United States Patent Application Publication US 2023/0330215 A1 - sequence listing, part 2

SEQ ID NO: 9527 - protein, 10 aa, Severe acute respiratory syndrome coronavirus 2
  REGION 1..10: note = Table B: HLA-DQA1*03:02-B1*03:03L HLA-DQA1*05:05-B1*03:19L HLA-DQA1*03:01-B1*03:02L HLA-DPA1*01:03-B1*104:01L
FEKGDYGDAV

SEQ ID NO: 9528 - protein, 12 aa, Severe acute respiratory syndrome coronavirus 2
  REGION 1..12: note = Table B: HLA-DQA1*03:02-B1*03:03L HLA-DQA1*05:01-B1*03:01L HLA-DRB1*04:03L HLA-DQA1*01:02-B1*06:02L HLA-DQA1*05:05-B1*03:19L HLA-DQA1*05:01-B1*02:01L HLA-DPA1*03:01-B1*105:01L
GDYGDAVVYRGT

SEQ ID NO: 9529 - protein, 11 aa, Severe acute respiratory syndrome coronavirus 2
  REGION 1..11: note = Table B: HLA-DQA1*03:02-B1*03:03L HLA-DRB1*04:03L HLA-DQA1*01:02-B1*06:02L HLA-DQA1*03:01-B1*03:02L HLA-DQA1*01:03-B1*06:01L HLA-DQA1*02:01-B1*03:03L
YGDAVVYRGTT

SEQ ID NO: 9530 - protein, 10 aa, Severe acute respiratory syndrome coronavirus 2
  REGION 1..10: note = Table B: HLA-DQA1*03:02-B1*03:03L HLA-DRB1*04:03L HLA-DRB1*04:02L HLA-DQA1*03:01-B1*03:02L HLA-DQA1*02:01-B1*03:03L
DAVVYRGTTT

SEQ ID NO: 9531 - protein, 10 aa, Severe acute respiratory syndrome coronavirus 2
  REGION 1..10: note = Table B: HLA-DQA1*03:02-B1*03:03L HLA-DQA1*05:01-B1*03:01L HLA-DRB1*13:02L HLA-DRB1*13:03L HLA-DRB1*01:03L HLA-DQA1*01:02-B1*06:02L HLA-DRB4*03:01NL HLA-DRB1*08:77L HLA-DPA1*01:03-B1*03:01L HLA-DPA1*03:01-B1*04:02L
  REGION 1..10: note = CONT. FROM ABOVE: HLA-DRB1*03:01L HLA-DRB1*14:01L HLA-DRB1*14:02 L HLA-DRB1*11:01L HLA-DQA1*01-B1*05L HLA-DQA1*05:05-B1*03:19L HL A-DQA1*05:01-B1*02:01L HLA-DRB4*01:01L HLA-DPA1*01:03-B1*04:01L HLA-DQA1*05:05-B1*03:116L HLA-DPA1*01:03-B1*04:02L
  REGION 1..10: note = CONT. FROM ABOVE: HLA-DRB1*12:01L HLA-DPA1*02:01-B1*13:01L HLA-D PA1*03:01-B1*105:01L HLA-DPA1*01:03-B1*104:01L HLA-DRB1*10:01L H LA-DRB1*16:01L HLA-DQA1*01:03-B1*06:01L HLA-DRB1*08:02L HLA-DQA1 *02:01-B1*03:03L HLA-DRB1*15:03L
AVVYRGTTTY

SEQ ID NO: 9532 - protein, 11 aa, Severe acute respiratory syndrome coronavirus 2
  REGION 1..11: note = Table B: HLA-DQA1*03:02-B1*03:03L HLA-DRB1*08:77L HLA-DPA1*03:01-B1*04:02L HLA-DPA1*01:02-B1*04:01L HLA-DRB1*07:01L
VVYRGTTTYKL

SEQ ID NO: 9533 - protein, 13 aa, Severe acute respiratory syndrome coronavirus 2
  REGION 1..13: note = Table B: HLA-DQA1*03:02-B1*03:03L HLA-DRB1*13:03L HLA-DRB1*01:01L HLA-DRB4*03:01NL HLA-DRB1*08:77L HLA-DPA1*01:03-B1*03:01L HLA-DPA1*03:01-B1*04:02L HLA-DRB1*11:03L HLA-DRB1*11:04L HLA-DRB1*14:02L HLA-DRB1*08:01L
  REGION 1..13: note = CONT. FROM ABOVE: HLA-DRB1*11:01L HLA-DQA1*05:05-B1*03:19L HLA-D QA1*05:01-B1*02:01L HLA-DPA1*01:03-B1*04:01L HLA-DRB3*01:01L HLA -DPA1*02:01-B1*13:01L HLA-DRB1*14:54L HLA-DRB1*14:17L HLA-DRB1*1 0:01L
VYRGTTTYKLNVG

SEQ ID NO: 9534 - protein, 10 aa, Severe acute respiratory syndrome coronavirus 2
  REGION 1..10: note = Table B: HLA-DQA1*03:02-B1*03:03L HLA-DQA1*05:01-B1*03:01L HLA-DRB1*04:03L HLA-DRB1*13:02L HLA-DRB1*13:03L HLA-DRB1*01:03L HLA-DRB1*04:05L HLA-DQA1*01:02-B1*06:02M HLA-DRB4*03:01NL HLA-DRB1*08:77L HLA-DPA1*01:03-B1*03:01L
  REGION 1..10: note = CONT. FROM ABOVE: HLA-DPA1*03:01-B1*04:02L HLA-DRB1*03:01L HLA-D RB1*14:01L HLA-DRB1*11:02L HLA-DRB1*14:02L HLA-DRB1*11:01L HLA-D QA1*01-B1*05L HLA-DQA1*05:05-B1*03:19L HLA-DQA1*05:01-B1*02:01L HLA-DRB4*01:01L HLA-DPA1*01:03-B1*04:01L
  REGION 1..10: note = CONT. FROM ABOVE: HLA-DQA1*05:05-B1*03:116L HLA-DPA1*01:03-B1*04 :02L HLA-DRB1*12:01L HLA-DPA1*02:01-B1*13:01L HLA-DPA1*03:01-B1* 105:01L HLA-DQA1*03:01-B1*03:02L HLA-DPA1*01:03-B1*104:01L HLA-D QA1*05:05-B1*03:01L HLA-DPA1*01:02-B1*04:01L HLA-DRB1*10:01L
  REGION 1..10: note = CONT. FROM ABOVE: HLA-DRB1*16:01L HLA-DQA1*01:03-B1*06:01L HLA-D RB1*08:02L HLA-DQA1*02:01-B1*03:03M HLA-DRB1*15:03L
TTYKLNVGDY

SEQ ID NO: 9535 - protein, 10 aa, Severe acute respiratory syndrome coronavirus 2
  REGION 1..10: note = Table B: HLA-DQA1*03:02-B1*03:03L
KLNVGDYFVL

SEQ ID NO: 9536 - protein, 10 aa, Severe acute respiratory syndrome coronavirus 2
  REGION 1..10: note = Table B: HLA-DQA1*03:02-B1*03:03L HLA-DQA1*05:01-B1*03:01L HLA-DRB1*04:05L HLA-DQA1*01:02-B1*06:02L HLA-DRB1*01:02L HLA-DRB1*08:77L HLA-DPA1*03:01-B1*04:02L HLA-DQA1*01-B1*05L HLA-DQA1*05:05-B1*03:19L HLA-DQA1*05:01-B1*02:01L
  REGION 1..10: note = CONT. FROM ABOVE: HLA-DQA1*05:05-B1*03:116L HLA-DRB1*12:01L HLA- DPA1*02:01-B1*13:01L HLA-DPA1*03:01-B1*105:01L HLA-DQA1*03:01-B1 *03:02L HLA-DPA1*01:03-B1*104:01L HLA-DPA1*01:02-B1*04:01L HLA-D RB1*16:01L HLA-DQA1*01:03-B1*06:01L HLA-DQA1*02:01-B1*03:03L
  REGION 1..10: note = CONT. FROM ABOVE: HLA-DRB1*15:03L
DYFVLTSHTV

SEQ ID NO: 9537 - protein, 10 aa, Severe acute respiratory syndrome coronavirus 2
  REGION 1..10: note = Table B: HLA-DQA1*03:02-B1*03:03L HLA-DRB1*14:01L HLA-DQA1*03:01-B1*03:02L HLA-DQA1*02:01-B1*03:03L
VLTSHTVMPL

SEQ ID NO: 9538 - protein, 12 aa, Severe acute respiratory syndrome coronavirus 2
  REGION 1..12: note = Table B: HLA-DQA1*03:02-B1*03:03L HLA-DQA1*05:01-B1*03:01L HLA-DRB1*04:02L HLA-DQA1*01:02-B1*06:02L HLA-DQA1*01:01-B1*05:01L HLA-DQA1*05:05-B1*03:19L HLA-DQA1*05:01-B1*02:01L HLA-DPA1*03:01-B1*105:01L
  REGION 1..12: note = CONT. FROM ABOVE: HLA-DQA1*05:05-B1*03:01L
TSHTVMPLSAPT

SEQ ID NO: 9539 - protein, 10 aa, Severe acute respiratory syndrome coronavirus 2
  REGION 1..10: note = Table B: HLA-DQA1*03:02-B1*03:03M HLA-DQA1*05:01-B1*03:01L HLA-DRB1*13:03L HLA-DRB1*01:03L HLA-DRB1*04:02L HLA-DQA1*01:02-B1*06:02L HLA-DRB1*01:02L HLA-DRB1*08:77L HLA-DRB3*02:01L HLA-DPA1*03:01-B1*04:02L HLA-DRB1*14:01L
  REGION 1..10: note = CONT. FROM ABOVE: HLA-DRB1*14:02L HLA-DRB1*08:01L HLA-DQA1*05:05 -B1*03:19L HLA-DQA1*05:01-B1*02:01L HLA-DPA1*01:03-B1*04:01L HLA -DQA1*05:05-B1*03:116L HLA-DRB1*09:01L HLA-DPA1*01:03-B1*04:02L HLA-DRB1*12:01L HLA-DPA1*02:01-B1*13:01L
  REGION 1..10: note = CONT. FROM ABOVE: HLA-DPA1*03:01-B1*105:01M HLA-DQA1*03:01-B1*03 :02L HLA-DPA1*01:02-B1*04:01L HLA-DRB1*07:01L HLA-DRB1*10:01L HL A-DRB1*16:01L HLA-DQA1*01:03-B1*06:01L HLA-DRB1*08:03L HLA-DQA1* 02:01-B1*03:03L HLA-DRB1*15:03L
TVMPLSAPTL

SEQ ID NO: 9540 - protein, 13 aa, Severe acute respiratory syndrome coronavirus 2
  REGION 1..13: note = Table B: HLA-DQA1*03:02-B1*03:03L HLA-DQA1*01:02-B1*06:02L HLA-DQA1*05:01-B1*02:01L HLA-DQA1*01:03-B1*06:01L
VMPLSAPTLVPQE

SEQ ID NO: 9541 - protein, 10 aa, Severe acute respiratory syndrome coronavirus 2
  REGION 1..10: note = Table B: HLA-DQA1*03:02-B1*03:03L HLA-DQA1*03:01-B1*03:02L HLA-DQA1*01:03-B1*06:01L HLA-DQA1*02:01-B1*03:03L
SAPTLVPQEH

SEQ ID NO: 9542 - protein, 10 aa, Severe acute respiratory syndrome coronavirus 2
  REGION 1..10: note = Table B: HLA-DQA1*03:02-B1*03:03M HLA-DRB1*11:02L HLA-DQA1*05:05-B1*03:19M HLA-DRB1*09:01L HLA-DQA1*03:01-B1*03:02L HLA-DPA1*01:03-B1*104:01L
QEHYVRITGL

SEQ ID NO: 9543 - protein, 10 aa, Severe acute respiratory syndrome coronavirus 2
  REGION 1..10: note = Table B: HLA-DQA1*03:02-B1*03:03L HLA-DQA1*03:01-B1*03:02L
VRITGLYPTL

SEQ ID NO: 9544 - protein, 12 aa, Severe acute respiratory syndrome coronavirus 2
  REGION 1..12: note = Table B: HLA-DQA1*03:02-B1*03:03L HLA-DQA1*05:01-B1*03:01L HLA-DRB1*04:03L HLA-DQA1*01:02-B1*06:02L HLA-DQA1*05:05-B1*03:19L HLA-DPA1*03:01-B1*105:01L HLA-DQA1*03:01-B1*03:02L HLA-DQA1*05:05-B1*03:01L
  REGION 1..12: note = CONT. FROM ABOVE: HLA-DRB1*14:17L HLA-DQA1*01:03-B1*06:01L HLA-D QA1*02:01-B1*03:03L
ITGLYPTLNISD

SEQ ID NO: 9545 - protein, 11 aa, Severe acute respiratory syndrome coronavirus 2
  REGION 1..11: note = Table B: HLA-DQA1*03:02-B1*03:03L HLA-DRB1*04:02L HLA-DRB4*03:01NL HLA-DQA1*05:01-B1*02:01L HLA-DRB1*04:10L HLA-DRB1*16:01L
GLYPTLNISDE

SEQ ID NO: 9546 - protein, 13 aa, Severe acute respiratory syndrome coronavirus 2
  REGION 1..13: note = Table B: HLA-DQA1*03:02-B1*03:03L HLA-DRB1*04:02L HLA-DRB1*04:05L HLA-DRB4*03:01NL HLA-DRB1*14:01L HLA-DQA1*01-B1*05L HLA-DQA1*05:01-B1*02:01L HLA-DRB1*04:10L HLA-DRB1*12:01L HLA-DQA1*03:01-B1*03:02L HLA-DRB1*14:54L
  REGION 1..13: note = CONT. FROM ABOVE: HLA-DRB1*14:17L HLA-DRB1*16:01L HLA-DQA1*01:03 -B1*06:01L HLA-DQA1*02:01-B1*03:03L
YPTLNISDEFSSN

SEQ ID NO: 9547 - protein, 11 aa, Severe acute respiratory syndrome coronavirus 2
  REGION 1..11: note = Table B: HLA-DQA1*03:02-B1*03:03L HLA-DRB1*04:03L HLA-DQA1*01-B1*05L HLA-DQA1*03:01-B1*03:02L
ISDEFSSNVAN

SEQ ID NO: 9548 - protein, 10 aa, Severe acute respiratory syndrome coronavirus 2
  REGION 1..10: note = Table B: HLA-DQA1*03:02-B1*03:03L HLA-DQA1*05:01-B1*03:01M HLA-DRB1*13:03L HLA-DRB1*01:03L HLA-DRB1*04:02L HLA-DQA1*01:02-B1*06:02L HLA-DRB4*03:01NL HLA-DRB1*08:77M HLA-DPA1*01:03-B1*03:01L HLA-DPA1*03:01-B1*04:02M
  REGION 1..10: note = CONT. FROM ABOVE: HLA-DRB1*03:01M HLA-DRB1*14:01L HLA-DRB1*11:02 L HLA-DRB1*14:02L HLA-DQA1*01-B1*05L HLA-DQA1*05:05-B1*03:19M HL A-DQA1*05:01-B1*02:01L HLA-DRB4*01:01M HLA-DPA1*01:03-B1*04:01M HLA-DQA1*05:05-B1*03:116L HLA-DPA1*01:03-B1*04:02L
  REGION 1..10: note = CONT. FROM ABOVE: HLA-DRB1*12:01L HLA-DPA1*03:01-B1*105:01L HLA- DQA1*03:01-B1*03:02L HLA-DRB1*14:54L HLA-DPA1*01:03-B1*104:01L H LA-DPA1*01:02-B1*04:01L HLA-DRB1*10:01M HLA-DRB1*16:01L HLA-DRB1 *08:02L HLA-DQA1*02:01-B1*03:03L HLA-DRB1*15:03M
DEFSSNVANY

SEQ ID NO: 9549 - protein, 10 aa, Severe acute respiratory syndrome coronavirus 2
  REGION 1..10: note = Table B: HLA-DQA1*03:02-B1*03:03L HLA-DQA1*05:01-B1*03:01L HLA-DRB1*04:01L HLA-DRB1*04:03L HLA-DRB1*13:02M HLA-DRB1*13:03M HLA-DRB1*01:03L HLA-DRB1*04:02L HLA-DRB1*04:04L HLA-DRB1*04:05L HLA-DQA1*01:02-B1*06:02L HLA-DRB1*01:01L HLA-DRB1*01:02L
  REGION 1..10: note = CONT. FROM ABOVE: HLA-DRB4*03:01NM HLA-DRB1*08:04L HLA-DRB1*08:7 7L HLA-DRB3*02:01L HLA-DRB1*14:01L HLA-DRB1*11:03L HLA-DRB1*11:0 4L HLA-DRB1*14:02L HLA-DRB1*08:01L HLA-DRB1*11:01L HLA-DRB5*01:0 1L HLA-DQA1*05:05-B1*03:19L HLA-DQA1*05:01-B1*02:01L
  REGION 1..10: note = CONT. FROM ABOVE: HLA-DPA1*01:03-B1*04:02L HLA-DRB1*12:01M HLA-D RB1*12:02L HLA-DRB3*01:01L HLA-DPA1*03:01-B1*105:01L HLA-DQA1*03 :01-B1*03:02M HLA-DRB1*14:54L HLA-DQA1*05:05-B1*03:01M HLA-DRB1* 14:17L HLA-DPA1*01:02-B1*04:01L HLA-DRB1*10:01L HLA-DRB1*16:01L
  REGION 1..10: note = CONT. FROM ABOVE: HLA-DQA1*01:03-B1*06:01L HLA-DRB1*04:08L HLA-D RB1*08:02L HLA-DRB1*08:03L HLA-DQA1*02:01-B1*03:03L HLA-DRB1*15: 01L
FSSNVANYQK

SEQ ID NO: 9550 - protein, 10 aa, Severe acute respiratory syndrome coronavirus 2
  REGION 1..10: note = Table B: HLA-DQA1*03:02-B1*03:03L HLA-DQA1*05:05-B1*03:19L
SSNVANYQKV

SEQ ID NO: 9551 - protein, 10 aa, Severe acute respiratory syndrome coronavirus 2
  REGION 1..10: note = Table B: HLA-DQA1*03:02-B1*03:03L HLA-DQA1*05:01-B1*03:01L HLA-DRB1*04:03L HLA-DRB1*04:02L HLA-DQA1*01:02-B1*06:02L HLA-DQA1*05:05-B1*03:19L HLA-DQA1*05:01-B1*02:01L HLA-DPA1*03:01-B1*105:01L HLA-DQA1*03:01-B1*03:02L
  REGION 1..10: note = CONT. FROM ABOVE: HLA-DQA1*05:05-B1*03:01L HLA-DRB1*14:17L HLA-D PA1*01:02-B1*04:01L HLA-DQA1*01:03-B1*06:01L HLA-DQA1*02:01-B1*0 3:03L
SNVANYQKVG

SEQ ID NO: 9552 - protein, 10 aa, Severe acute respiratory syndrome coronavirus 2
  REGION 1..10: note = Table B: HLA-DQA1*03:02-B1*03:03L HLA-DQA1*05:01-B1*03:01L HLA-DRB1*13:03L HLA-DQA1*01:02-B1*06:02L HLA-DRB1*01:02L HLA-DRB1*14:01L HLA-DQA1*05:01-B1*02:01L HLA-DRB1*12:01L HLA-DPA1*03:01-B1*105:01L HLA-DQA1*03:01-B1*03:02L
  REGION 1..10: note = CONT. FROM ABOVE: HLA-DQA1*05:05-B1*03:01L HLA-DQA1*01:03-B1*06: 01L HLA-DQA1*02:01-B1*03:03L HLA-DRB1*15:03L
NVANYQKVGM

SEQ ID NO: 9553 - protein, 10 aa, Severe acute respiratory syndrome coronavirus 2
  REGION 1..10: note = Table B: HLA-DQA1*03:02-B1*03:03L HLA-DQA1*05:01-B1*03:01L HLA-DRB1*04:01L HLA-DRB1*04:03L HLA-DRB1*13:02L HLA-DRB1*13:03L HLA-DRB1*01:03M HLA-DRB1*04:05L HLA-DQA1*01:02-B1*06:02M HLA-DRB1*01:01L HLA-DRB4*03:01NL HLA-DRB1*08:77L
  REGION 1..10: note = CONT. FROM ABOVE: HLA-DPA1*01:03-B1*03:01L HLA-DPA1*03:01-B1*04: 02L HLA-DRB1*03:01L HLA-DRB1*14:01L HLA-DRB1*11:02L HLA-DRB1*11: 03L HLA-DRB1*14:02L HLA-DQA1*01:01-B1*05:01L HLA-DRB1*11:01L HLA -DQA1*01-B1*05L HLA-DQA1*05:05-B1*03:19L
  REGION 1..10: note = CONT. FROM ABOVE: HLA-DQA1*05:01-B1*02:01L HLA-DRB4*01:01L HLA-D PA1*01:03-B1*04:01L HLA-DQA1*05:05-B1*03:116L HLA-DPA1*01:03-B1* 04:02L HLA-DRB1*12:01L HLA-DPA1*02:01-B1*13:01M HLA-DPA1*03:01-B 1*105:01L HLA-DQA1*03:01-B1*03:02L HLA-DPA1*01:03-B1*104:01L
  REGION 1..10: note = CONT. FROM ABOVE: HLA-DQA1*05:05-B1*03:01L HLA-DPA1*01:02-B1*04: 01L HLA-DRB1*10:01L HLA-DRB1*16:01L HLA-DQA1*01:03-B1*06:01M HLA -DRB1*08:02L HLA-DQA1*02:01-B1*03:03M HLA-DRB1*15:03L
NYQKVGMQKY

SEQ ID NO: 9554 - protein, 12 aa, Severe acute respiratory syndrome coronavirus 2
  REGION 1..12: note = Table B: HLA-DQA1*03:02-B1*03:03L HLA-DQA1*05:01-B1*03:01L HLA-DRB1*13:02L HLA-DRB1*13:03L HLA-DRB1*01:03L HLA-DRB1*04:02L HLA-DRB1*04:04L HLA-DQA1*01:02-B1*06:02L HLA-DRB1*01:02L HLA-DRB4*03:01NL HLA-DRB1*08:04L HLA-DRB1*14:01L HLA-DRB1*11:03L
  REGION 1..12: note = CONT. FROM ABOVE: HLA-DRB1*11:04L HLA-DRB1*08:01L HLA-DQA1*01-B1 *05L HLA-DQA1*05:01-B1*02:01L HLA-DRB1*04:10L HLA-DRB1*12:01L HL A-DRB1*12:02L HLA-DQA1*03:01-B1*03:02L HLA-DRB1*14:54L HLA-DRB1* 10:01L HLA-DRB1*16:01L HLA-DRB1*04:08L HLA-DRB1*08:03L
  REGION 1..12: note = CONT. FROM ABOVE: HLA-DQA1*02:01-B1*03:03L
MQKYSTLQGPPG

SEQ ID NO: 9555 - protein, 13 aa, Severe acute respiratory syndrome coronavirus 2
  REGION 1..13: note = Table B: HLA-DQA1*03:02-B1*03:03L HLA-DRB1*01:03L HLA-DRB1*01:02L HLA-DQA1*01:01-B1*05:01L HLA-DRB1*08:01L HLA-DRB1*11:01L HLA-DPA1*01:03-B1*04:02L HLA-DQA1*03:01-B1*03:02L HLA-DRB1*04:08L
GPPGTGKSHFAIG

SEQ ID NO: 9556 - protein, 10 aa, Severe acute respiratory syndrome coronavirus 2
  REGION 1..10: note = Table B: HLA-DQA1*03:02-B1*03:03L HLA-DQA1*05:01-B1*03:01L HLA-DRB1*13:03L HLA-DRB1*01:03L HLA-DQA1*01:02-B1*06:02L HLA-DRB1*08:77L HLA-DPA1*01:03-B1*03:01L HLA-DPA1*03:01-B1*04:02L HLA-DRB1*03:01L HLA-DRB1*14:01L
  REGION 1..10: note = CONT. FROM ABOVE: HLA-DRB1*11:02L HLA-DRB1*14:02L HLA-DQA1*01-B1 *05L HLA-DQA1*05:05-B1*03:19L HLA-DQA1*05:01-B1*02:01L HLA-DRB4* 01:01L HLA-DPA1*01:03-B1*04:01L HLA-DQA1*05:05-B1*03:116L HLA-DP A1*01:03-B1*04:02L HLA-DRB1*12:01L HLA-DPA1*02:01-B1*13:01L
  REGION 1..10: note = CONT. FROM ABOVE: HLA-DPA1*03:01-B1*105:01L HLA-DPA1*01:03-B1*10 4:01L HLA-DRB1*10:01L HLA-DRB1*16:01L HLA-DQA1*01:03-B1*06:01L H LA-DRB1*08:02L HLA-DQA1*02:01-B1*03:03L HLA-DRB1*15:03L
SHFAIGLALY

SEQ ID NO: 9557 - protein, 11 aa, Severe acute respiratory syndrome coronavirus 2
  REGION 1..11: note = Table B: HLA-DQA1*03:02-B1*03:03L HLA-DQA1*05:01-B1*03:01L HLA-DRB1*04:03L HLA-DRB1*04:02L HLA-DQA1*01:02-B1*06:02L HLA-DPA1*03:01-B1*105:01L HLA-DRB1*14:17L HLA-DPA1*01:02-B1*04:01L HLA-DQA1*01:03-B1*06:01L
IGLALYYPSAR

SEQ ID NO: 9558 - protein, 10 aa, Severe acute respiratory syndrome coronavirus 2
  REGION 1..10: note = Table B: HLA-DQA1*03:02-B1*03:03L HLA-DQA1*01-B1*05L HLA-DQA1*05:05-B1*03:19L HLA-DQA1*05:01-B1*02:01L HLA-DPA1*03:01-B1*105:01L HLA-DQA1*03:01-B1*03:02L HLA-DRB1*16:01L HLA-DQA1*01:03-B1*06:01L
  REGION 1..10: note = CONT. FROM ABOVE: HLA-DQA1*02:01-B1*03:03L HLA-DRB1*15:03L
ALYYPSARIV

SEQ ID NO: 9559 - protein, 10 aa, Severe acute respiratory syndrome coronavirus 2
  REGION 1..10: note = Table B: HLA-DQA1*03:02-B1*03:03L HLA-DQA1*05:01-B1*03:01L HLA-DRB1*04:03L HLA-DRB1*13:02L HLA-DRB1*13:03L HLA-DRB1*01:03L HLA-DRB1*04:05L HLA-DQA1*01:02-B1*06:02M HLA-DRB1*01:01L HLA-DRB1*01:02L HLA-DRB1*08:77L HLA-DPA1*01:03-B1*03:01L
  REGION 1..10: note = CONT. FROM ABOVE: HLA-DPA1*03:01-B1*04:02L HLA-DRB1*03:01L HLA-D RB1*14:01L HLA-DRB1*11:02L HLA-DRB1*11:03L HLA-DRB1*14:02L HLA-D QA1*01:01-B1*05:01L HLA-DRB1*11:01L HLA-DQA1*01-B1*05L HLA-DQA1* 05:05-B1*03:19L HLA-DQA1*05:01-B1*02:01L HLA-DRB4*01:01L
  REGION 1..10: note = CONT. FROM ABOVE: HLA-DPA1*01:03-B1*04:01L HLA-DQA1*05:05-B1*03: 116L HLA-DPA1*01:03-B1*04:02L HLA-DRB1*12:01L HLA-DPA1*02:01-B1* 13:01M HLA-DPA1*03:01-B1*105:01L HLA-DQA1*03:01-B1*03:02L HLA-DP A1*01:03-B1*104:01L HLA-DQA1*05:05-B1*03:01L
  REGION 1..10: note = CONT. FROM ABOVE: HLA-DPA1*01:02-B1*04:01L HLA-DRB1*10:01L HLA-D RB1*16:01L HLA-DQA1*01:03-B1*06:01M HLA-DRB1*08:02L HLA-DRB1*08: 03L HLA-DQA1*02:01-B1*03:03L HLA-DRB1*15:03L
LYYPSARIVY

SEQ ID NO: 9560 - protein, 12 aa, Severe acute respiratory syndrome coronavirus 2
  REGION 1..12: note = Table B: HLA-DQA1*03:02-B1*03:03L HLA-DRB1*13:02L HLA-DRB1*13:03L HLA-DRB1*01:03L HLA-DRB1*04:02L HLA-DRB1*04:04L HLA-DRB1*04:05L HLA-DRB1*01:02L HLA-DRB1*08:04L HLA-DRB3*02:01L HLA-DPA1*01:03-B1*03:01L HLA-DPA1*03:01-B1*04:02L
  REGION 1..12: note = CONT. FROM ABOVE: HLA-DRB1*14:01L HLA-DRB1*11:04L HLA-DRB1*14:02 L HLA-DRB1*08:01L HLA-DRB1*11:01L HLA-DQA1*05:01-B1*02:01L HLA-D PA1*01:03-B1*04:01L HLA-DQA1*05:05-B1*03:116L HLA-DRB1*09:01L HL A-DPA1*01:03-B1*04:02L HLA-DRB1*12:01L HLA-DPA1*02:01-B1*13:01L
  REGION 1..12: note = CONT. FROM ABOVE: HLA-DQA1*03:01-B1*03:02L HLA-DPA1*01:03-B1*02: 01L HLA-DPA1*01:03-B1*104:01L HLA-DRB1*14:17L HLA-DPA1*01:02-B1* 04:01L HLA-DRB1*10:01L HLA-DRB1*16:01L HLA-DRB1*04:08L HLA-DRB1* 08:03L HLA-DRB1*15:03L
IVYTACSHAAVD

SEQ ID NO: 9561 - protein, 12 aa, Severe acute respiratory syndrome coronavirus 2
  REGION 1..12: note = Table B: HLA-DQA1*03:02-B1*03:03L HLA-DRB1*08:04L HLA-DRB1*08:01L HLA-DQA1*03:01-B1*03:02L
VYTACSHAAVDA

SEQ ID NO: 9562 - protein, 11 aa, Severe acute respiratory syndrome coronavirus 2
  REGION 1..11: note = Table B: HLA-DQA1*03:02-B1*03:03L HLA-DRB1*04:03L HLA-DRB1*13:02L HLA-DRB1*13:03L HLA-DRB1*01:03L HLA-DRB1*04:02L HLA-DRB1*04:05L HLA-DRB1*01:02L HLA-DRB4*03:01NL HLA-DRB1*08:04L HLA-DRB1*14:01L HLA-DRB1*11:04L HLA-DRB1*08:01L
  REGION 1..11: note = CONT. FROM ABOVE: HLA-DQA1*01-B1*05L HLA-DRB1*04:10L HLA-DRB1*12 :01L HLA-DQA1*03:01-B1*03:02L HLA-DRB1*14:54L HLA-DRB1*14:17L HL A-DPA1*01:02-B1*04:01L HLA-DRB1*16:01L HLA-DRB1*04:08L HLA-DRB1* 08:03L HLA-DQA1*02:01-B1*03:03L
DKFKVNSTLEQ

SEQ ID NO: 9563 - protein, 10 aa, Severe acute respiratory syndrome coronavirus 2
  REGION 1..10: note = Table B: HLA-DQA1*03:02-B1*03:03L HLA-DQA1*05:01-B1*03:01L HLA-DRB1*04:03L HLA-DRB1*13:02L HLA-DRB1*13:03L HLA-DRB1*01:03L HLA-DQA1*01:02-B1*06:02L HLA-DRB4*03:01NL HLA-DRB1*08:77L HLA-DPA1*01:03-B1*03:01L HLA-DPA1*03:01-B1*04:02L
  REGION 1..10: note = CONT. FROM ABOVE: HLA-DRB1*03:01L HLA-DRB1*14:01L HLA-DRB1*11:02 L HLA-DRB1*14:02L HLA-DRB1*11:01L HLA-DQA1*01-B1*05L HLA-DQA1*05 :05-B1*03:19M HLA-DQA1*05:01-B1*02:01L HLA-DRB4*01:01L HLA-DPA1* 01:03-B1*04:01L HLA-DQA1*05:05-B1*03:116L
  REGION 1..10: note = CONT. FROM ABOVE: HLA-DPA1*01:03-B1*04:02L HLA-DRB1*12:01L HLA-D PA1*02:01-B1*13:01L HLA-DPA1*03:01-B1*105:01L HLA-DPA1*01:03-B1* 104:01L HLA-DQA1*05:05-B1*03:01L HLA-DPA1*01:02-B1*04:01L HLA-DR B1*10:01L HLA-DRB1*16:01L HLA-DQA1*01:03-B1*06:01L
  REGION 1..10: note = CONT. FROM ABOVE: HLA-DRB1*08:02L HLA-DQA1*02:01-B1*03:03L HLA-D RB1*15:03L
FKVNSTLEQY

SEQ ID NO: 9564 - protein, 10 aa, Severe acute respiratory syndrome coronavirus 2
  REGION 1..10: note = Table B: HLA-DQA1*03:02-B1*03:03L HLA-DQA1*01:02-B1*06:02L HLA-DRB1*01:02L HLA-DQA1*05:05-B1*03:19L HLA-DQA1*05:01-B1*02:01L HLA-DPA1*03:01-B1*105:01L HLA-DQA1*03:01-B1*03:02L HLA-DQA1*02:01-B1*03:03L
  REGION 1..10: note = CONT. FROM ABOVE: HLA-DRB1*15:03L
KVNSTLEQYV

SEQ ID NO: 9565 - protein, 10 aa, Severe acute respiratory syndrome coronavirus 2
  REGION 1..10: note = Table B: HLA-DQA1*03:02-B1*03:03L HLA-DQA1*05:01-B1*03:01L HLA-DQA1*01:02-B1*06:02L HLA-DQA1*05:05-B1*03:19L HLA-DQA1*05:01-B1*02:01L HLA-DPA1*03:01-B1*105:01L HLA-DQA1*01:03-B1*06:01L HLA-DQA1*02:01-B1*03:03L
  REGION 1..10: note = CONT. FROM ABOVE: HLA-DRB1*15:03L
VNSTLEQYVF

SEQ ID NO: 9566 - protein, 13 aa, Severe acute respiratory syndrome coronavirus 2
  REGION 1..13: note = Table B: HLA-DQA1*03:02-B1*03:03L HLA-DQA1*05:01-B1*03:01L HLA-DRB1*13:02L HLA-DRB1*13:03L HLA-DRB1*01:03L HLA-DRB1*04:02L HLA-DRB1*04:04L HLA-DRB1*04:05L HLA-DRB1*01:02L HLA-DRB4*03:01NL HLA-DRB1*08:04L HLA-DRB1*08:77L HLA-DPA1*03:01-B1*04:02L
  REGION 1..13: note = CONT. FROM ABOVE: HLA-DRB1*14:01L HLA-DQA1*01-B1*05L HLA-DQA1*05 :05-B1*03:19L HLA-DQA1*05:01-B1*02:01L HLA-DRB1*04:10L HLA-DPA1* 01:03-B1*04:02L HLA-DRB1*12:01L HLA-DRB1*12:02L HLA-DQA1*03:01-B 1*03:02L HLA-DRB1*14:54L HLA-DQA1*05:05-B1*03:01L
  REGION 1..13: note = CONT. FROM ABOVE: HLA-DRB1*14:17L HLA-DPA1*01:02-B1*04:01L HLA-D RB1*10:01L HLA-DRB1*16:01L HLA-DRB1*04:08L HLA-DQA1*02:01-B1*03: 03L HLA-DRB1*15:03L
EQYVFCTVNALPE

SEQ ID NO: 9567 - protein, 13 aa, Severe acute respiratory syndrome coronavirus 2
  REGION 1..13: note = Table B: HLA-DQA1*03:02-B1*03:03L HLA-DQA1*05:01-B1*03:01L HLA-DQA1*05:05-B1*03:19L HLA-DQA1*05:01-B1*02:01L HLA-DQA1*03:01-B1*03:02L HLA-DQA1*02:01-B1*03:03L
YVFCTVNALPETT

SEQ ID NO: 9568 - protein, 10 aa, Severe acute respiratory syndrome coronavirus 2
  REGION 1..10: note = Table B: HLA-DQA1*03:02-B1*03:03L
TVNALPETTA

SEQ ID NO: 9569 - protein, 12 aa, Severe acute respiratory syndrome coronavirus 2
  REGION 1..12: note = Table B: HLA-DQA1*03:02-B1*03:03L HLA-DQA1*05:01-B1*03:01L HLA-DRB1*04:03L HLA-DQA1*01:02-B1*06:02L HLA-DQA1*01-B1*05L HLA-DQA1*05:05-B1*03:19L HLA-DQA1*05:01-B1*02:01L HLA-DQA1*05:05-B1*03:01L HLA-DRB1*16:01L
  REGION 1..12: note = CONT. FROM ABOVE: HLA-DQA1*01:03-B1*06:01L HLA-DQA1*02:01-B1*03: 03L
VNALPETTADIV

SEQ ID NO: 9570 - protein, 12 aa, Severe acute respiratory syndrome coronavirus 2
  REGION 1..12: note = Table B: HLA-DQA1*03:02-B1*03:03L HLA-DQA1*03:01-B1*03:02L HLA-DQA1*01:03-B1*06:01L
ALPETTADIVVF

SEQ ID NO: 9571 - protein, 12 aa, Severe acute respiratory syndrome coronavirus 2
  REGION 1..12: note = Table B: HLA-DQA1*03:02-B1*03:03L HLA-DQA1*03:01-B1*03:02L HLA-DQA1*02:01-B1*03:03L
LPETTADIVVFD

SEQ ID NO: 9572 - protein, 11 aa, Severe acute respiratory syndrome coronavirus 2
  REGION 1..11: note = Table B: HLA-DQA1*03:02-B1*03:03L HLA-DQA1*01:02-B1*06:02L HLA-DPA1*03:01-B1*105:01L HLA-DPA1*01:03-B1*104:01L
TTADIVVFDEI

SEQ ID NO: 9573 - protein, 11 aa, Severe acute respiratory syndrome coronavirus 2
  REGION 1..11: note = Table B: HLA-DQA1*03:02-B1*03:03L HLA-DRB1*04:03L HLA-DRB1*12:01L HLA-DRB1*16:01L
ADIVVFDEISM

SEQ ID NO: 9574 - protein, 12 aa, Severe acute respiratory syndrome coronavirus 2
  REGION 1..12: note = Table B: HLA-DQA1*03:02-B1*03:03L HLA-DQA1*05:01-B1*03:01L HLA-DRB1*13:02L HLA-DRB1*13:03L HLA-DRB1*01:03L HLA-DRB1*04:04L HLA-DRB1*04:05L HLA-DQA1*01:02-B1*06:02L HLA-DRB1*01:02L HLA-DRB4*03:01NL HLA-DRB1*08:04L HLA-DRB1*08:77L HLA-DRB3*02:01L
  REGION 1..12: note = CONT. FROM ABOVE: HLA-DPA1*01:03-B1*03:01L HLA-DPA1*03:01-B1*04: 02L HLA-DRB1*14:01L HLA-DRB1*11:03L HLA-DRB1*14:02L HLA-DQA1*05: 05-B1*03:19L HLA-DRB4*01:01L HLA-DRB1*04:10L HLA-DRB1*09:01L HLA -DPA1*01:03-B1*04:02L HLA-DRB1*12:01L HLA-DRB1*12:02L
  REGION 1..12: note = CONT. FROM ABOVE: HLA-DPA1*02:01-B1*13:01L HLA-DPA1*03:01-B1*105 :01L HLA-DRB1*14:54L HLA-DPA1*01:03-B1*104:01L HLA-DQA1*05:05-B1 *03:01L HLA-DPA1*01:02-B1*04:01L HLA-DRB1*10:01L HLA-DRB1*16:01L HLA-DQA1*01:03-B1*06:01L HLA-DRB1*04:08L HLA-DRB1*08:03L
  REGION 1..12: note = CONT. FROM ABOVE: HLA-DRB1*15:01L
IVVFDEISMATN

SEQ ID NO: 9575 - protein, 12 aa, Severe acute respiratory syndrome coronavirus 2
  REGION 1..12: note = Table B: HLA-DQA1*03:02-B1*03:03L HLA-DQA1*05:01-B1*03:01L HLA-DPA1*03:01-B1*04:02L HLA-DRB1*14:02L HLA-DPA1*01:03-B1*04:02L HLA-DRB1*12:01L HLA-DPA1*02:01-B1*13:01L HLA-DPA1*03:01-B1*105:01L
  REGION 1..12: note = CONT. FROM ABOVE: HLA-DRB1*15:03L
VVFDEISMATNY

SEQ ID NO: 9576 - protein, 12 aa, Severe acute respiratory syndrome coronavirus 2
  REGION 1..12: note = Table B: HLA-DQA1*03:02-B1*03:03L HLA-DPA1*03:01-B1*105:01L HLA-DQA1*02:01-B1*03:03L
VFDEISMATNYD

SEQ ID NO: 9577 - protein, 11 aa, Severe acute respiratory syndrome coronavirus 2
  REGION 1..11: note = Table B: HLA-DQA1*03:02-B1*03:03L HLA-DRB1*04:03L HLA-DRB1*04:02L HLA-DQA1*01-B1*05L HLA-DQA1*05:05-B1*03:19L HLA-DQA1*05:01-B1*02:01L HLA-DRB1*12:01L HLA-DQA1*03:01-B1*03:02L HLA-DRB1*14:17L HLA-DRB1*16:01L
  REGION 1..11: note = CONT. FROM ABOVE: HLA-DQA1*02:01-B1*03:03L HLA-DRB1*15:03L
DEISMATNYDL

SEQ ID NO: 9578 - protein, 13 aa, Severe acute respiratory syndrome coronavirus 2
  REGION 1..13: note = Table B: HLA-DQA1*03:02-B1*03:03L HLA-DRB1*04:02L HLA-DRB1*04:05L HLA-DQA1*01:02-B1*06:02L HLA-DRB1*01:02L HLA-DRB1*14:01L HLA-DQA1*05:05-B1*03:19L HLA-DRB1*12:01L HLA-DPA1*03:01-B1*105:01L HLA-DQA1*05:05-B1*03:01L
  REGION 1..13: note = CONT. FROM ABOVE: HLA-DRB1*16:01L HLA-DQA1*01:03-B1*06:01L HLA-D QA1*02:01-B1*03:03L
ISMATNYDLSVVN

SEQ ID NO: 9579 - protein, 12 aa, Severe acute respiratory syndrome coronavirus 2
  REGION 1..12: note = Table B: HLA-DQA1*03:02-B1*03:03L HLA-DQA1*05:01-B1*03:01L HLA-DRB1*04:05L HLA-DQA1*01:02-B1*06:02L HLA-DQA1*01:01-B1*05:01L HLA-DQA1*01-B1*05L HLA-DQA1*05:05-B1*03:19L HLA-DQA1*05:01-B1*02:01L
  REGION 1..12: note = CONT. FROM ABOVE: HLA-DRB1*04:10L HLA-DPA1*03:01-B1*105:01L HLA- DRB1*14:54L HLA-DRB1*04:08L
ATNYDLSVVNAR

SEQ ID NO: 9580 - protein, 10 aa, Severe acute respiratory syndrome coronavirus 2
  REGION 1..10: note = Table B: HLA-DQA1*03:02-B1*03:03L HLA-DQA1*05:01-B1*03:01L HLA-DRB1*04:03L HLA-DQA1*01-B1*05L HLA-DQA1*05:05-B1*03:19L HLA-DQA1*05:01-B1*02:01L HLA-DQA1*03:01-B1*03:02L HLA-DPA1*01:02-B1*04:01L HLA-DRB1*16:01L
  REGION 1..10: note = CONT. FROM ABOVE: HLA-DQA1*01:03-B1*06:01L HLA-DQA1*02:01-B1*03: 03L
YDLSVVNARL

SEQ ID NO: 9581 - protein, 10 aa, Severe acute respiratory syndrome coronavirus 2
  REGION 1..10: note = Table B: HLA-DQA1*03:02-B1*03:03L HLA-DRB1*04:03L HLA-DRB1*13:03L HLA-DRB1*01:03L HLA-DRB1*04:02L HLA-DRB1*04:05L HLA-DRB4*03:01NL HLA-DQA1*01-B1*05L HLA-DQA1*05:01-B1*02:01L HLA-DRB1*04:10L HLA-DRB1*12:01L HLA-DQA1*03:01-B1*03:02L
  REGION 1..10: note = CONT. FROM ABOVE: HLA-DRB1*14:54L HLA-DRB1*14:17L HLA-DRB1*16:01 L HLA-DRB1*04:08L HLA-DQA1*02:01-B1*03:03L
HYVYIGDPAQ

SEQ ID NO: 9582 - protein, 10 aa, Severe acute respiratory syndrome coronavirus 2
  REGION 1..10: note = Table B: HLA-DQA1*03:02-B1*03:03L HLA-DQA1*03:01-B1*03:02L
YVYIGDPAQL

SEQ ID NO: 9583 - protein, 12 aa, Severe acute respiratory syndrome coronavirus 2
  REGION 1..12: note = Table B: HLA-DQA1*03:02-B1*03:03L HLA-DQA1*05:01-B1*03:01L HLA-DRB1*04:03L HLA-DRB1*13:03L HLA-DRB1*01:03L HLA-DRB1*04:02L HLA-DRB1*04:05L HLA-DRB4*03:01NL HLA-DQA1*01-B1*05L HLA-DQA1*05:05-B1*03:19L HLA-DQA1*05:01-B1*02:01L
  REGION 1..12: note = CONT. FROM ABOVE: HLA-DRB1*12:01L HLA-DPA1*03:01-B1*105:01L HLA- DQA1*03:01-B1*03:02L HLA-DRB1*14:54L HLA-DQA1*05:05-B1*03:01L HL A-DRB1*14:17L HLA-DRB1*16:01L HLA-DRB1*04:08L HLA-DQA1*02:01-B1* 03:03L HLA-DRB1*15:03L
VYIGDPAQLPAP

SEQ ID NO: 9584 - protein, 10 aa, Severe acute respiratory syndrome coronavirus 2
  REGION 1..10: note = Table B: HLA-DQA1*03:02-B1*03:03L HLA-DRB1*13:03L HLA-DRB1*04:02L HLA-DQA1*01-B1*05L HLA-DQA1*03:01-B1*03:02L HLA-DRB1*14:17L HLA-DQA1*02:01-B1*03:03L
GDPAQLPAPR

SEQ ID NO: 9585 - protein, 10 aa, Severe acute respiratory syndrome coronavirus 2
  REGION 1..10: note = Table B: HLA-DQA1*03:02-B1*03:03L HLA-DQA1*05:01-B1*03:01L HLA-DRB1*04:03L HLA-DRB1*13:03L HLA-DRB1*01:03L HLA-DRB1*04:02L HLA-DRB1*04:05L HLA-DRB4*03:01NL HLA-DQA1*01-B1*05L HLA-DQA1*05:01-B1*02:01L HLA-DQA1*03:01-B1*03:02L
  REGION 1..10: note = CONT. FROM ABOVE: HLA-DQA1*05:05-B1*03:01L HLA-DRB1*16:01L HLA-D QA1*01:03-B1*06:01L HLA-DQA1*02:01-B1*03:03L
DPAQLPAPRT

SEQ ID NO: 9586 - protein, 10 aa, Severe acute respiratory syndrome coronavirus 2
  REGION 1..10: note = Table B: HLA-DQA1*03:02-B1*03:03L HLA-DQA1*05:01-B1*03:01L HLA-DQA1*03:01-B1*03:02L HLA-DQA1*01:03-B1*06:01L HLA-DQA1*02:01-B1*03:03L
PAQLPAPRTL

SEQ ID NO: 9587 - protein, 16 aa, Severe acute respiratory syndrome coronavirus 2
  REGION 1..16: note = Table B: HLA-DQA1*03:02-B1*03:03L HLA-DQA1*05:01-B1*03:01L HLA-DRB1*13:02L HLA-DRB1*01:03L HLA-DRB1*01:02L HLA-DRB1*08:04L HLA-DRB1*14:01L HLA-DRB1*11:04L HLA-DQA1*01:01-B1*05:01L HLA-DRB1*11:01L HLA-DRB1*12:01L HLA-DRB3*01:01L
  REGION 1..16: note = CONT. FROM ABOVE: HLA-DPA1*02:01-B1*13:01L HLA-DPA1*03:01-B1*105 :01L HLA-DQA1*05:05-B1*03:01L HLA-DPA1*01:02-B1*04:01L HLA-DRB1* 16:01L HLA-DQA1*01:03-B1*06:01L HLA-DRB1*08:03L HLA-DRB1*15:03L
LPAPRTLLTKGTLEPE

SEQ ID NO: 9588 - protein, 10 aa, Severe acute respiratory syndrome coronavirus 2
  REGION 1..10: note = Table B: HLA-DQA1*03:02-B1*03:03L HLA-DQA1*05:01-B1*03:01L HLA-DRB1*04:03L HLA-DRB1*13:02L HLA-DRB1*13:03L HLA-DRB1*01:03L HLA-DRB1*04:05L HLA-DQA1*01:02-B1*06:02M HLA-DRB4*03:01NL HLA-DRB1*08:77L HLA-DPA1*01:03-B1*03:01L
  REGION 1..10: note = CONT. FROM ABOVE: HLA-DPA1*03:01-B1*04:02L HLA-DRB1*03:01L HLA-D RB1*14:01L HLA-DRB1*11:02L HLA-DRB1*14:02L HLA-DRB1*11:01L HLA-D QA1*01-B1*05L HLA-DQA1*05:05-B1*03:19M HLA-DQA1*05:01-B1*02:01M HLA-DRB4*01:01L HLA-DPA1*01:03-B1*04:01L
  REGION 1..10: note = CONT. FROM ABOVE: HLA-DQA1*05:05-B1*03:116L HLA-DPA1*01:03-B1*04 :02L HLA-DRB1*12:01L HLA-DPA1*02:01-B1*13:01L HLA-DPA1*03:01-B1* 105:01L HLA-DQA1*03:01-B1*03:02L HLA-DPA1*01:03-B1*104:01L HLA-D QA1*05:05-B1*03:01L HLA-DPA1*01:02-B1*04:01L HLA-DRB1*10:01L
  REGION 1..10: note = CONT. FROM ABOVE: HLA-DRB1*16:01M HLA-DQA1*01:03-B1*06:01L HLA-D RB1*08:02L HLA-DQA1*02:01-B1*03:03L HLA-DRB1*15:03L
LTKGTLEPEY

SEQ ID NO: 9589 - protein, 10 aa, Severe acute respiratory syndrome coronavirus 2
  REGION 1..10: note = Table B: HLA-DQA1*03:02-B1*03:03L HLA-DQA1*01:02-B1*06:02L HLA-DRB1*01:02L HLA-DPA1*03:01-B1*04:02L HLA-DRB1*11:02L HLA-DQA1*05:05-B1*03:19M HLA-DQA1*05:01-B1*02:01L HLA-DPA1*01:03-B1*04:01L HLA-DPA1*01:03-B1*04:02L
  REGION 1..10: note = CONT. FROM ABOVE: HLA-DPA1*02:01-B1*13:01L HLA-DPA1*03:01-B1*105 :01L HLA-DQA1*03:01-B1*03:02L HLA-DPA1*01:03-B1*104:01L HLA-DPA1 *01:02-B1*04:01L HLA-DRB1*16:01L HLA-DQA1*01:03-B1*06:01L HLA-DQ A1*02:01-B1*03:03L HLA-DRB1*15:03L
TLEPEYFNSV

SEQ ID NO: 9590 - protein, 10 aa, Severe acute respiratory syndrome coronavirus 2
  REGION 1..10: note = Table B: HLA-DQA1*03:02-B1*03:03L HLA-DQA1*05:01-B1*03:01L HLA-DRB1*13:02L HLA-DRB1*12:01L HLA-DQA1*03:01-B1*03:02L HLA-DRB1*16:01L HLA-DQA1*02:01-B1*03:03L HLA-DRB1*15:03L
RLMKTIGPDM

SEQ ID NO: 9591 - protein, 10 aa, Severe acute respiratory syndrome coronavirus 2
  REGION 1..10: note = Table B: HLA-DQA1*03:02-B1*03:03L HLA-DQA1*05:01-B1*03:01L HLA-DQA1*01:02-B1*06:02L HLA-DPA1*03:01-B1*04:02L HLA-DQA1*01-B1*05L HLA-DQA1*05:05-B1*03:19L HLA-DQA1*05:01-B1*02:01L HLA-DRB1*12:01L
  REGION 1..10: note = CONT. FROM ABOVE: HLA-DPA1*02:01-B1*13:01L HLA-DPA1*03:01-B1*105 :01L HLA-DRB1*16:01L HLA-DQA1*01:03-B1*06:01L HLA-DQA1*02:01-B1* 03:03L HLA-DRB1*15:03L
LMKTIGPDMF

SEQ ID NO: 9592 - protein, 10 aa, Severe acute respiratory syndrome coronavirus 2
  REGION 1..10: note = Table B: HLA-DQA1*03:02-B1*03:03H HLA-DQA1*05:01-B1*03:01L HLA-DRB1*13:03L HLA-DRB1*08:77L HLA-DRB1*11:02L HLA-DQA1*05:05-B1*03:19M HLA-DQA1*05:05-B1*03:116L HLA-DRB1*09:01M HLA-DPA1*01:03-B1*04:02L
  REGION 1..10: note = CONT. FROM ABOVE: HLA-DQA1*03:01-B1*03:02M HLA-DPA1*01:03-B1*104 :01L
AEIVDTVSAL

SEQ ID NO: 9593 - protein, 11 aa, Severe acute respiratory syndrome coronavirus 2
  REGION 1..11: note = Table B: HLA-DQA1*03:02-B1*03:03L HLA-DRB1*04:02L HLA-DRB1*14:01L HLA-DQA1*03:01-B1*03:02L HLA-DRB1*14:54L HLA-DRB1*14:17L HLA-DQA1*02:01-B1*03:03L
IVDTVSALVYD

SEQ ID NO: 9594 - protein, 11 aa, Severe acute respiratory syndrome coronavirus 2
  REGION 1..11: note = Table B: HLA-DQA1*03:02-B1*03:03L HLA-DRB1*04:03L HLA-DQA1*05:01-B1*02:01L HLA-DQA1*03:01-B1*03:02L HLA-DQA1*02:01-B1*03:03L
VDTVSALVYDN

SEQ ID NO: 9595 - protein, 11 aa, Severe acute respiratory syndrome coronavirus 2
  REGION 1..11: note = Table B: HLA-DQA1*03:02-B1*03:03L HLA-DQA1*01:01-B1*05:01L HLA-DQA1*05:05-B1*03:19L HLA-DQA1*05:01-B1*02:01L
DTVSALVYDNK

SEQ ID NO: 9596 - protein, 10 aa, Severe acute respiratory syndrome coronavirus 2
  REGION 1..10: note = Table B: HLA-DQA1*03:02-B1*03:03L HLA-DQA1*03:01-B1*03:02L HLA-DQA1*01:03-B1*06:01L HLA-DQA1*02:01-B1*03:03L
VSALVYDNKL

SEQ ID NO: 9597 - protein, 11 aa, Severe acute respiratory syndrome coronavirus 2
  REGION 1..11: note = Table B: HLA-DQA1*03:02-B1*03:03L HLA-DQA1*05:01-B1*03:01L HLA-DRB1*04:03L HLA-DRB1*01:03L HLA-DRB1*04:02L HLA-DQA1*01:02-B1*06:02L HLA-DRB1*01:02L HLA-DQA1*01-B1*05L HLA-DPA1*03:01-B1*105:01L HLA-DQA1*05:05-B1*03:01L
  REGION 1..11: note = CONT. FROM ABOVE: HLA-DRB1*16:01L HLA-DRB1*04:08L
FYKGVITHDVS

SEQ ID NO: 9598 - protein, 10 aa, Severe acute respiratory syndrome coronavirus 2
  REGION 1..10: note = Table B: HLA-DQA1*03:02-B1*03:03L HLA-DRB1*04:03L HLA-DRB1*13:03L HLA-DRB1*04:02L HLA-DQA1*01-B1*05L HLA-DQA1*03:01-B1*03:02L HLA-DRB1*16:01L HLA-DQA1*02:01-B1*03:03L
GVITHDVSSA

SEQ ID NO: 9599 - protein, 11 aa, Severe acute respiratory syndrome coronavirus 2
  REGION 1..11: note = Table B: HLA-DQA1*03:02-B1*03:03L HLA-DQA1*05:01-B1*03:01L HLA-DRB1*04:03L HLA-DRB1*13:02L HLA-DRB1*13:03L HLA-DRB1*01:03L HLA-DRB1*04:02L HLA-DRB1*04:05L HLA-DRB1*01:02L HLA-DRB4*03:01NL HLA-DRB1*08:04L HLA-DRB1*08:77L HLA-DRB3*02:01L
  REGION 1..11: note = CONT. FROM ABOVE: HLA-DPA1*01:03-B1*03:01L HLA-DPA1*03:01-B1*04: 02L HLA-DRB1*14:01L HLA-DRB1*11:03L HLA-DRB1*11:04L HLA-DRB1*14: 02L HLA-DQA1*01-B1*05L HLA-DQA1*05:01-B1*02:01L HLA-DRB1*04:10L HLA-DRB1*12:01L HLA-DRB1*12:02L HLA-DRB3*01:01L
  REGION 1..11: note = CONT. FROM ABOVE: HLA-DPA1*03:01-B1*105:01L HLA-DQA1*03:01-B1*03 :02L HLA-DRB1*14:54L HLA-DQA1*05:05-B1*03:01L HLA-DRB1*14:17L HL A-DPA1*01:02-B1*04:01L HLA-DRB1*16:01L HLA-DQA1*01:03-B1*06:01L HLA-DRB1*04:08L HLA-DQA1*02:01-B1*03:03L HLA-DRB1*15:03L
VITHDVSSAIN

SEQ ID NO: 9600 - protein, 10 aa, Severe acute respiratory syndrome coronavirus 2
  REGION 1..10: note = Table B: HLA-DQA1*03:02-B1*03:03L HLA-DQA1*05:01-B1*03:01L HLA-DRB1*04:03L HLA-DRB1*13:02L HLA-DRB1*13:03L HLA-DRB1*01:03L HLA-DRB1*04:02L HLA-DRB1*04:04L HLA-DRB1*04:05L HLA-DQA1*01:02-B1*06:02L HLA-DRB1*01:01L HLA-DRB1*01:02L
  REGION 1..10: note = CONT. FROM ABOVE: HLA-DRB4*03:01NL HLA-DRB1*08:77L HLA-DRB3*02:0 1L HLA-DPA1*01:03-B1*03:01L HLA-DRB1*14:01L HLA-DRB1*11:03L HLA- DRB1*11:04L HLA-DRB1*14:02L HLA-DQA1*01:01-B1*05:01L HLA-DRB1*08 :01L HLA-DRB1*11:01L HLA-DRB5*01:01L HLA-DQA1*01-B1*05L
  REGION 1..10: note = CONT. FROM ABOVE: HLA-DQA1*05:05-B1*03:19L HLA-DQA1*05:01-B1*02: 01L HLA-DRB1*04:10L HLA-DPA1*01:03-B1*04:02L HLA-DRB1*12:01L HLA -DRB1*12:02L HLA-DPA1*03:01-B1*105:01L HLA-DQA1*03:01-B1*03:02L HLA-DRB1*14:54L HLA-DQA1*05:05-B1*03:01L HLA-DRB1*14:17L
  REGION 1..10: note = CONT. FROM ABOVE: HLA-DPA1*01:02-B1*04:01L HLA-DRB1*10:01L HLA-D RB1*16:01L HLA-DQA1*01:03-B1*06:01L HLA-DRB1*04:08L HLA-DRB1*08: 03L HLA-DQA1*02:01-B1*03:03L HLA-DRB1*15:03L
DVSSAINRPQ

SEQ ID NO: 9601 - protein, 10 aa, Severe acute respiratory syndrome coronavirus 2
  REGION 1..10: note = Table B: HLA-DQA1*03:02-B1*03:03L HLA-DQA1*01:02-B1*06:02L HLA-DQA1*05:05-B1*03:19L HLA-DQA1*05:01-B1*02:01L HLA-DPA1*03:01-B1*105:01L HLA-DQA1*03:01-B1*03:02L HLA-DQA1*01:03-B1*06:01L HLA-DQA1*02:01-B1*03:03L
VSSAINRPQI

SEQ ID NO: 9602 - protein, 10 aa, Severe acute respiratory syndrome coronavirus 2
  REGION 1..10: note = Table B: HLA-DQA1*03:02-B1*03:03L HLA-DQA1*05:01-B1*03:01L HLA-DQA1*01:02-B1*06:02L HLA-DQA1*05:05-B1*03:19L HLA-DQA1*03:01-B1*03:02L HLA-DQA1*05:05-B1*03:01L HLA-DQA1*01:03-B1*06:01L HLA-DQA1*02:01-B1*03:03L
SSAINRPQIG

SEQ ID NO: 9603 - protein, 10 aa, Severe acute respiratory syndrome coronavirus 2
  REGION 1..10: note = Table B: HLA-DQA1*03:02-B1*03:03M HLA-DQA1*05:01-B1*03:01L HLA-DRB1*13:03L HLA-DQA1*01:02-B1*06:02L HLA-DRB1*01:02L HLA-DPA1*03:01-B1*04:02L HLA-DRB1*14:01L HLA-DRB1*14:02L HLA-DQA1*05:05-B1*03:19L HLA-DQA1*05:01-B1*02:01L
  REGION 1..10: note = CONT. FROM ABOVE: HLA-DPA1*01:03-B1*04:01L HLA-DQA1*05:05-B1*03: 116L HLA-DRB1*09:01L HLA-DPA1*02:01-B1*13:01L HLA-DPA1*03:01-B1* 105:01L HLA-DQA1*03:01-B1*03:02L HLA-DPA1*01:03-B1*104:01L HLA-D PA1*01:02-B1*04:01L HLA-DRB1*10:01L HLA-DRB1*16:01L
  REGION 1..10: note = CONT. FROM ABOVE: HLA-DQA1*01:03-B1*06:01L HLA-DRB1*08:03L HLA-D QA1*02:01-B1*03:03L HLA-DRB1*15:03L
SAINRPQIGV

SEQ ID NO: 9604 - protein, 10 aa, Severe acute respiratory syndrome coronavirus 2
  REGION 1..10: note = Table B: HLA-DQA1*03:02-B1*03:03L HLA-DQA1*05:01-B1*03:01M HLA-DRB1*13:03L HLA-DRB1*01:03L HLA-DQA1*01:02-B1*06:02L HLA-DRB4*03:01NL HLA-DRB1*08:77M HLA-DPA1*01:03-B1*03:01L HLA-DPA1*03:01-B1*04:02L HLA-DRB1*03:01L HLA-DRB1*11:02L
  REGION 1..10: note = CONT. FROM ABOVE: HLA-DRB1*14:02L HLA-DQA1*01-B1*05L HLA-DQA1*05 :05-B1*03:19M HLA-DQA1*05:01-B1*02:01L HLA-DRB4*01:01M HLA-DPA1* 01:03-B1*04:01M HLA-DQA1*05:05-B1*03:116L HLA-DPA1*01:03-B1*04:0 2L HLA-DPA1*02:01-B1*13:01L HLA-DQA1*03:01-B1*03:02L
  REGION 1..10: note = CONT. FROM ABOVE: HLA-DPA1*01:03-B1*104:01L HLA-DPA1*01:02-B1*04 :01L HLA-DRB1*10:01L HLA-DRB1*16:01L HLA-DQA1*01:03-B1*06:01L HL A-DRB1*08:02L HLA-DQA1*02:01-B1*03:03L HLA-DRB1*15:03L
REFLTRNPAW

SEQ ID NO: 9605 - protein, 14 aa, Severe acute respiratory syndrome coronavirus 2
  REGION 1..14: note = Table B: HLA-DQA1*03:02-B1*03:03L HLA-DRB1*04:03L HLA-DRB1*13:02L HLA-DRB1*13:03L HLA-DRB1*04:02L HLA-DRB1*04:04L HLA-DRB1*04:05L HLA-DRB1*08:04L HLA-DRB3*02:01L HLA-DPA1*01:03-B1*03:01L HLA-DPA1*03:01-B1*04:02L
  REGION 1..14: note = CONT. FROM ABOVE: HLA-DRB1*14:01L HLA-DRB1*11:04L HLA-DRB1*14:02 L HLA-DQA1*01:01-B1*05:01L HLA-DRB1*11:01L HLA-DQA1*01-B1*05L HL A-DPA1*01:03-B1*04:01L HLA-DPA1*01:03-B1*04:02L HLA-DRB3*01:01L HLA-DPA1*01:03-B1*02:01L HLA-DPA1*01:03-B1*104:01L
  REGION 1..14: note = CONT. FROM ABOVE: HLA-DQA1*05:05-B1*03:01L HLA-DRB1*07:01L HLA-D RB1*10:01L HLA-DRB1*08:02L HLA-DRB1*08:03L
NPAWRKAVFISPYN

SEQ ID NO: 9606 - protein, 12 aa, Severe acute respiratory syndrome coronavirus 2
  REGION 1..12: note = Table B: HLA-DQA1*03:02-B1*03:03L HLA-DQA1*05:01-B1*03:01L HLA-DRB1*01:03L HLA-DRB1*04:05L HLA-DQA1*01:02-B1*06:02L HLA-DRB1*01:02L HLA-DPA1*03:01-B1*04:02L HLA-DRB1*04:10L HLA-DRB1*12:01L HLA-DPA1*03:01-B1*105:01L HLA-DRB1*14:54L
  REGION 1..12: note = CONT. FROM ABOVE: HLA-DQA1*05:05-B1*03:01L HLA-DPA1*01:02-B1*04: 01L HLA-DRB1*16:01L HLA-DQA1*01:03-B1*06:01L HLA-DRB1*04:08L HLA -DRB1*15:03L
KAVFISPYNSQN

SEQ ID NO: 9607 - protein, 11 aa, Severe acute respiratory syndrome coronavirus 2
  REGION 1..11: note = Table B: HLA-DQA1*03:02-B1*03:03L HLA-DQA1*05:01-B1*03:01L HLA-DRB1*04:02L HLA-DRB1*01:02L HLA-DRB3*02:01L HLA-DPA1*03:01-B1*04:02L HLA-DQA1*05:05-B1*03:19L HLA-DQA1*05:01-B1*02:01L HLA-DRB1*12:01L
  REGION 1..11: note = CONT. FROM ABOVE: HLA-DPA1*02:01-B1*13:01L HLA-DPA1*03:01-B1*105 :01L HLA-DQA1*03:01-B1*03:02L HLA-DRB1*14:17L HLA-DQA1*01:03-B1* 06:01L HLA-DQA1*02:01-B1*03:03L HLA-DRB1*15:03L
FISPYNSQNAV

SEQ ID NO: 9608 - protein, 12 aa, Severe acute respiratory syndrome coronavirus 2
  REGION 1..12: note = Table B: HLA-DQA1*03:02-B1*03:03L HLA-DQA1*05:01-B1*03:01L HLA-DRB1*04:01L HLA-DRB1*13:02L HLA-DQA1*01:02-B1*06:02L HLA-DRB1*01:01L HLA-DRB1*08:04L HLA-DRB1*08:77L HLA-DRB3*02:01L HLA-DPA1*01:03-B1*03:01L HLA-DRB1*14:02L HLA-DRB1*08:01L
  REGION 1..12: note = CONT. FROM ABOVE: HLA-DRB5*01:01L HLA-DQA1*05:05-B1*03:19L HLA-D RB1*09:01L HLA-DRB1*12:02L HLA-DPA1*03:01-B1*105:01L HLA-DQA1*05 :05-B1*03:01L HLA-DRB1*07:01L HLA-DRB1*10:01L HLA-DRB1*08:03L
ISPYNSQNAVAS

SEQ ID NO: 9609 - protein, 12 aa, Severe acute respiratory syndrome coronavirus 2
  REGION 1..12: note = Table B: HLA-DQA1*03:02-B1*03:03L HLA-DRB1*04:01L HLA-DRB1*04:04L HLA-DQA1*01:02-B1*06:02L HLA-DRB1*08:04L HLA-DRB1*08:77L HLA-DRB3*02:01L HLA-DPA1*01:03-B1*03:01L HLA-DRB1*14:01L HLA-DRB1*11:03L HLA-DRB1*11:04L HLA-DRB1*14:02L
  REGION 1..12: note = CONT. FROM ABOVE: HLA-DRB1*08:01L HLA-DRB1*11:01L HLA-DRB5*01:01 L HLA-DQA1*05:05-B1*03:19L HLA-DQA1*05:01-B1*02:01L HLA-DRB1*04: 10L HLA-DRB1*09:01L HLA-DRB1*12:02L HLA-DPA1*03:01-B1*105:01L HL A-DRB1*07:01L HLA-DRB1*08:03L HLA-DRB1*15:03L
SPYNSQNAVASK

SEQ ID NO: 9610 - protein, 10 aa, Severe acute respiratory syndrome coronavirus 2
  REGION 1..10: note = Table B: HLA-DQA1*03:02-B1*03:03L HLA-DQA1*01:02-B1*06:02L HLA-DQA1*05:05-B1*03:19L HLA-DPA1*03:01-B1*105:01L HLA-DQA1*03:01-B1*03:02L HLA-DRB1*16:01L HLA-DQA1*01:03-B1*06:01L HLA-DQA1*02:01-B1*03:03L
  REGION 1..10: note = CONT. FROM ABOVE: HLA-DRB1*15:03L
NSQNAVASKI

SEQ ID NO: 9611 - protein, 10 aa, Severe acute respiratory syndrome coronavirus 2
  REGION 1..10: note = Table B: HLA-DQA1*03:02-B1*03:03L HLA-DQA1*03:01-B1*03:02L HLA-DQA1*01:03-B1*06:01L HLA-DQA1*02:01-B1*03:03L
SQNAVASKIL

SEQ ID NO: 9612 - protein, 12 aa, Severe acute respiratory syndrome coronavirus 2
  REGION 1..12: note = Table B: HLA-DQA1*03:02-B1*03:03L HLA-DRB1*04:02L HLA-DQA1*05:05-B1*03:19L HLA-DQA1*05:01-B1*02:01L HLA-DQA1*05:05-B1*03:01L HLA-DRB1*16:01L
NAVASKILGLPT

SEQ ID NO: 9613 - protein, 12 aa, Severe acute respiratory syndrome coronavirus 2
  REGION 1..12: note = Table B: HLA-DQA1*03:02-B1*03:03L HLA-DRB1*04:02L HLA-DPA1*03:01-B1*04:02L HLA-DQA1*05:05-B1*03:19L HLA-DPA1*01:03-B1*04:02L HLA-DQA1*05:05-B1*03:01L
AVASKILGLPTQ

SEQ ID NO: 9614 - protein, 10 aa, Severe acute respiratory syndrome coronavirus 2
  REGION 1..10: note = Table B: HLA-DQA1*03:02-B1*03:03M HLA-DQA1*05:01-B1*03:01L HLA-DQA1*01:02-B1*06:02L HLA-DRB1*01:02L HLA-DPA1*03:01-B1*04:02L HLA-DRB1*14:01L HLA-DRB1*14:02L HLA-DQA1*05:05-B1*03:19L HLA-DQA1*05:05-B1*03:116L
  REGION 1..10: note = CONT. FROM ABOVE: HLA-DRB1*09:01L HLA-DPA1*02:01-B1*13:01L HLA-D PA1*03:01-B1*105:01L HLA-DQA1*03:01-B1*03:02L HLA-DPA1*01:03-B1* 104:01L HLA-DPA1*01:02-B1*04:01L HLA-DRB1*10:01L HLA-DRB1*16:01L HLA-DQA1*01:03-B1*06:01L HLA-DRB1*08:03L
  REGION 1..10: note = CONT. FROM ABOVE: HLA-DQA1*02:01-B1*03:03L HLA-DRB1*15:03L
KILGLPTQTV

SEQ ID NO: 9615 - protein, 10 aa, Severe acute respiratory syndrome coronavirus 2
  REGION 1..10: note = Table B: HLA-DQA1*03:02-B1*03:03L HLA-DQA1*05:01-B1*03:01L HLA-DRB1*04:03L HLA-DRB1*13:03L HLA-DRB1*01:03L HLA-DRB1*04:02L HLA-DRB1*04:05L HLA-DQA1*01:02-B1*06:02L HLA-DRB1*01:02L HLA-DRB4*03:01NL HLA-DRB1*14:01L HLA-DQA1*01-B1*05L
  REGION 1..10: note = CONT. FROM ABOVE: HLA-DQA1*05:05-B1*03:19L HLA-DQA1*05:01-B1*02: 01L HLA-DRB1*04:10L HLA-DRB1*12:01L HLA-DPA1*03:01-B1*105:01L HL A-DQA1*03:01-B1*03:02L HLA-DRB1*14:54L HLA-DQA1*05:05-B1*03:01L HLA-DRB1*14:17L HLA-DRB1*16:01L HLA-DQA1*01:03-B1*06:01L
  REGION 1..10: note = CONT. FROM ABOVE: HLA-DQA1*02:01-B1*03:03L HLA-DRB1*15:03L
ILGLPTQTVD

SEQ ID NO: 9616 - protein, 12 aa, Severe acute respiratory syndrome coronavirus 2
  REGION 1..12: note = Table B: HLA-DQA1*03:02-B1*03:03L HLA-DRB1*13:03L HLA-DRB1*04:02L HLA-DRB1*04:05L HLA-DRB4*03:01NL HLA-DRB1*04:10L HLA-DRB1*14:54L HLA-DRB1*16:01L HLA-DQA1*02:01-B1*03:03L
GLPTQTVDSSQG

SEQ ID NO: 9617 - protein, 13 aa, Severe acute respiratory syndrome coronavirus 2
  REGION 1..13: note = Table B: HLA-DQA1*03:02-B1*03:03L HLA-DQA1*05:01-B1*03:01L HLA-DRB1*13:03L HLA-DRB1*04:02L HLA-DRB1*04:05L HLA-DRB4*03:01NL HLA-DQA1*01:01-B1*05:01L HLA-DQA1*05:05-B1*03:01L HLA-DRB1*16:01L HLA-DQA1*02:01-B1*03:03L
LPTQTVDSSQGSE

SEQ ID NO: 9618 - protein, 12 aa, Severe acute respiratory syndrome coronavirus 2
  REGION 1..12: note = Table B: HLA-DQA1*03:02-B1*03:03L
QTVDSSQGSEYD

SEQ ID NO: 9619 - protein, 14 aa, Severe acute respiratory syndrome coronavirus 2
  REGION 1..14: note = Table B: HLA-DQA1*03:02-B1*03:03L
TVDSSQGSEYDYVI

SEQ ID NO: 9620 - protein, 11 aa, Severe acute respiratory syndrome coronavirus 2
  REGION 1..11: note = Table B: HLA-DQA1*03:02-B1*03:03L HLA-DPA1*03:01-B1*04:02L HLA-DPA1*01:02-B1*04:01L
SEYDYVIFTQT

SEQ ID NO: 9621 - protein, 12 aa, Severe acute respiratory syndrome coronavirus 2
  REGION 1..12: note = Table B: HLA-DQA1*03:02-B1*03:03L HLA-DRB1*01:03L HLA-DRB1*04:05L HLA-DQA1*01:02-B1*06:02L HLA-DPA1*03:01-B1*04:02L HLA-DQA1*05:01-B1*02:01L HLA-DPA1*01:03-B1*04:01L HLA-DPA1*01:03-B1*04:02L
  REGION 1..12: note = CONT. FROM ABOVE: HLA-DRB1*12:01L HLA-DPA1*03:01-B1*105:01L HLA- DPA1*01:02-B1*04:01L HLA-DRB1*16:01L HLA-DQA1*01:03-B1*06:01L HL A-DRB1*04:08L HLA-DQA1*02:01-B1*03:03L HLA-DRB1*15:03L
YDYVIFTQTTET

SEQ ID NO: 9622 - protein, 12 aa, Severe acute respiratory syndrome coronavirus 2
  REGION 1..12: note = Table B: HLA-DQA1*03:02-B1*03:03L HLA-DRB1*04:02L HLA-DRB1*04:05L HLA-DQA1*05:01-B1*02:01L HLA-DRB1*04:10L HLA-DRB1*16:01L HLA-DQA1*02:01-B1*03:03L
DYVIFTQTTETA

SEQ ID NO: 9623 - protein, 11 aa, Severe acute respiratory syndrome coronavirus 2
  REGION 1..11: note = Table B: HLA-DQA1*03:02-B1*03:03L HLA-DQA1*05:01-B1*03:01L HLA-DRB1*04:01L HLA-DRB1*13:02L HLA-DRB1*04:04L HLA-DQA1*01:02-B1*06:02L HLA-DRB1*01:02L HLA-DRB1*08:77L HLA-DPA1*01:03-B1*03:01L HLA-DRB1*14:01L HLA-DRB1*11:03L
  REGION 1..11: note = CONT. FROM ABOVE: HLA-DRB1*11:04L HLA-DRB1*14:02L HLA-DQA1*01:01 -B1*05:01L HLA-DRB5*01:01L HLA-DQA1*05:05-B1*03:19L HLA-DRB1*12: 02L HLA-DPA1*03:01-B1*105:01L HLA-DQA1*05:05-B1*03:01L HLA-DRB1* 10:01L HLA-DQA1*01:03-B1*06:01L HLA-DRB1*08:03L HLA-DRB1*15:03L
VIFTQTTETAH

SEQ ID NO: 9624 - protein, 10 aa, Severe acute respiratory syndrome coronavirus 2
  REGION 1..10: note = Table B: HLA-DQA1*03:02-B1*03:03L HLA-DRB1*04:03L HLA-DRB1*13:03L HLA-DRB1*01:03L HLA-DRB1*04:02L HLA-DRB1*04:05L HLA-DRB4*03:01NL HLA-DQA1*01-B1*05L HLA-DQA1*05:01-B1*02:01L HLA-DRB1*04:10L HLA-DRB1*12:01L HLA-DQA1*03:01-B1*03:02L
  REGION 1..10: note = CONT. FROM ABOVE: HLA-DRB1*14:54L HLA-DRB1*14:17L HLA-DRB1*16:01 L HLA-DQA1*02:01-B1*03:03L
FTQTTETAHS

SEQ ID NO: 9625 - protein, 11 aa, Severe acute respiratory syndrome coronavirus 2
  REGION 1..11: note = Table B: HLA-DQA1*03:02-B1*03:03L HLA-DQA1*05:01-B1*03:01L HLA-DQA1*01:02-B1*06:02L HLA-DQA1*05:05-B1*03:19L HLA-DPA1*03:01-B1*105:01L HLA-DQA1*03:01-B1*03:02L HLA-DQA1*05:05-B1*03:01L HLA-DQA1*02:01-B1*03:03L
TTETAHSCNVN

SEQ ID NO: 9626 - protein, 13 aa, Severe acute respiratory syndrome coronavirus 2
  REGION 1..13: note = Table B: HLA-DQA1*03:02-B1*03:03L HLA-DRB1*01:02L HLA-DRB1*04:08L HLA-DRB1*15:03L
TETAHSCNVNRFN

SEQ ID NO: 9627 - protein, 10 aa, Severe acute respiratory syndrome coronavirus 2
  REGION 1..10: note = Table B: HLA-DQA1*03:02-B1*03:03L HLA-DQA1*05:01-B1*03:01L HLA-DRB1*04:03L HLA-DRB1*13:03L HLA-DRB1*01:03L HLA-DRB1*04:02L HLA-DQA1*01:02-B1*06:02L HLA-DRB4*03:01NL HLA-DRB1*14:01L HLA-DQA1*03:01-B1*03:02L HLA-DRB1*14:17L
  REGION 1..10: note = CONT. FROM ABOVE: HLA-DPA1*01:02-B1*04:01L HLA-DRB1*16:01L HLA-D QA1*01:03-B1*06:01L HLA-DQA1*02:01-B1*03:03L
NVAITRAKVG

SEQ ID NO: 9628 - protein, 11 aa, Severe acute respiratory syndrome coronavirus 2
  REGION 1..11: note = Table B: HLA-DQA1*03:02-B1*03:03L HLA-DQA1*05:01-B1*03:01L HLA-DRB1*04:03L HLA-DRB1*01:03L HLA-DRB1*04:02L HLA-DRB1*01:02L HLA-DRB1*14:01L HLA-DQA1*05:01-B1*02:01L HLA-DRB1*12:01L HLA-DPA1*03:01-B1*105:01L HLA-DQA1*03:01-B1*03:02L
  REGION 1..11: note = CONT. FROM ABOVE: HLA-DQA1*05:05-B1*03:01L HLA-DRB1*14:17L HLA-D PA1*01:02-B1*04:01L HLA-DRB1*15:03L
VAITRAKVGIL

SEQ ID NO: 9629 - protein, 10 aa, Severe acute respiratory syndrome coronavirus 2
  REGION 1..10: note = Table B: HLA-DQA1*03:02-B1*03:03L HLA-DQA1*05:05-B1*03:19L HLA-DQA1*03:01-B1*03:02L
MSDRDLYDKL

SEQ ID NO: 9630 - protein, 10 aa, Severe acute respiratory syndrome coronavirus 2
  REGION 1..10: note = Table B: HLA-DQA1*03:02-B1*03:03L HLA-DQA1*05:01-B1*03:01L HLA-DQA1*01:02-B1*06:02L HLA-DPA1*03:01-B1*04:02L HLA-DRB1*14:02L HLA-DQA1*01-B1*05L HLA-DQA1*05:05-B1*03:19L HLA-DQA1*05:01-B1*02:01L HLA-DQA1*05:05-B1*03:116L
  REGION 1..10: note = CONT. FROM ABOVE: HLA-DPA1*02:01-B1*13:01L HLA-DPA1*03:01-B1*105 :01L HLA-DQA1*03:01-B1*03:02L HLA-DPA1*01:03-B1*104:01L HLA-DPA1 *01:02-B1*04:01L HLA-DRB1*16:01L HLA-DQA1*01:03-B1*06:01L HLA-DQ A1*02:01-B1*03:03L HLA-DRB1*15:03L
LYDKLQFTSL

SEQ ID NO: 9631 - protein, 13 aa, Severe acute respiratory syndrome coronavirus 2
  REGION 1..13: note = Table B: HLA-DQA1*03:02-B1*03:03L HLA-DQA1*05:01-B1*03:01L HLA-DRB1*13:03L HLA-DRB1*01:02L HLA-DPA1*03:01-B1*04:02L HLA-DQA1*05:01-B1*02:01L HLA-DRB1*04:10L HLA-DPA1*02:01-B1*13:01L HLA-DRB1*15:03L
YDKLQFTSLEIPR

SEQ ID NO: 9632 - protein, 12 aa, Severe acute respiratory syndrome coronavirus 2
  REGION 1..12: note = Table B: HLA-DQA1*03:02-B1*03:03L HLA-DRB1*13:02L HLA-DRB1*01:03L HLA-DRB1*04:04L HLA-DRB1*04:05L HLA-DRB3*02:01L HLA-DPA1*03:01-B1*04:02L HLA-DRB1*14:01L HLA-DRB1*08:01L HLA-DQA1*05:05-B1*03:19L HLA-DQA1*05:01-B1*02:01L
  REGION 1..12: note = CONT. FROM ABOVE: HLA-DPA1*01:03-B1*04:02L HLA-DRB1*12:01L HLA-D PA1*02:01-B1*13:01L HLA-DQA1*05:05-B1*03:01L HLA-DRB1*04:08L HLA -DRB1*15:03L
LQFTSLEIPRRN

SEQ ID NO: 9633 - protein, 11 aa, Severe acute respiratory syndrome coronavirus 2
  REGION 1..11: note = Table B: HLA-DQA1*03:02-B1*03:03L
LEIPRRNVATL

SEQ ID NO: 9634 - protein, 13 aa, Severe acute respiratory syndrome coronavirus 2
  REGION 1..13: note = Table B: HLA-DQA1*03:02-B1*03:03L HLA-DQA1*05:01-B1*03:01L HLA-DRB1*13:02L HLA-DRB1*13:03L HLA-DRB1*01:03L HLA-DRB1*04:04L HLA-DRB1*04:05L HLA-DQA1*01:02-B1*06:02L HLA-DRB1*01:02L HLA-DPA1*01:03-B1*03:01L HLA-DQA1*01:01-B1*05:01L
  REGION 1..13: note = CONT. FROM ABOVE: HLA-DRB1*08:01L HLA-DQA1*05:05-B1*03:19L HLA-D QA1*05:01-B1*02:01L HLA-DRB1*04:10L HLA-DRB1*12:01L HLA-DPA1*02: 01-B1*13:01L HLA-DPA1*03:01-B1*105:01L HLA-DPA1*01:03-B1*104:01L HLA-DQA1*05:05-B1*03:01L HLA-DRB1*07:01L HLA-DRB1*16:01L
  REGION 1..13: note = CONT. FROM ABOVE: HLA-DQA1*01:03-B1*06:01L HLA-DRB1*04:08L HLA-D RB1*15:03L
IPRRNVATLQAEN

SEQ ID NO: 9635 - protein, 11 aa, Severe acute respiratory syndrome coronavirus 2
  REGION 1..11: note = Table B: HLA-DQA1*03:02-B1*03:03L HLA-DQA1*05:01-B1*03:01L HLA-DQA1*01:02-B1*06:02L HLA-DRB1*01:02L HLA-DPA1*03:01-B1*105:01L HLA-DQA1*05:05-B1*03:01L HLA-DRB1*14:17L HLA-DRB1*16:01L HLA-DRB1*15:03L
NVATLQAENVT

SEQ ID NO: 9636 - protein, 11 aa, Severe acute respiratory syndrome coronavirus 2
  REGION 1..11: note = Table B: HLA-DQA1*03:02-B1*03:03L HLA-DQA1*05:01-B1*03:01L HLA-DRB1*13:03L HLA-DRB1*01:03L HLA-DRB1*04:02L HLA-DRB1*04:05L HLA-DRB1*01:02L HLA-DRB4*03:01NL HLA-DQA1*05:05-B1*03:19L HLA-DRB1*04:10L HLA-DRB1*14:54L HLA-DQA1*05:05-B1*03:01L
  REGION 1..11: note = CONT. FROM ABOVE: HLA-DRB1*10:01L HLA-DRB1*16:01L HLA-DRB1*04:08 L HLA-DRB1*15:03L
VATLQAENVTG

SEQ ID NO: 9637 - protein, 10 aa, Severe acute respiratory syndrome coronavirus 2
  REGION 1..10: note = Table B: HLA-DQA1*03:02-B1*03:03M HLA-DQA1*05:01-B1*03:01L HLA-DRB1*13:03L HLA-DQA1*01:02-B1*06:02L HLA-DPA1*03:01-B1*04:02L HLA-DRB1*14:01L HLA-DRB1*14:02L HLA-DQA1*05:05-B1*03:19L HLA-DQA1*05:01-B1*02:01L
  REGION 1..10: note = CONT. FROM ABOVE: HLA-DQA1*05:05-B1*03:116L HLA-DRB1*09:01L HLA- DPA1*03:01-B1*105:01L HLA-DQA1*03:01-B1*03:02L HLA-DPA1*01:02-B1 *04:01L HLA-DRB1*16:01L HLA-DQA1*02:01-B1*03:03L HLA-DRB1*15:03L
TLQAENVTGL

SEQ ID NO: 9638 - protein, 10 aa, Severe acute respiratory syndrome coronavirus 2
  REGION 1..10: note = Table B: HLA-DQA1*03:02-B1*03:03L HLA-DQA1*05:05-B1*03:19L HLA-DQA1*03:01-B1*03:02L HLA-DQA1*02:01-B1*03:03L
AENVTGLFKD

SEQ ID NO: 9639 - protein, 12 aa, Severe acute respiratory syndrome coronavirus 2
  REGION 1..12: note = Table B: HLA-DQA1*03:02-B1*03:03L HLA-DRB1*04:01L HLA-DRB1*13:02L HLA-DRB1*13:03L HLA-DRB1*01:03L HLA-DRB1*04:04L HLA-DRB1*04:05L HLA-DRB1*01:01L HLA-DRB1*08:04L HLA-DRB1*08:77L HLA-DPA1*01:03-B1*03:01L HLA-DRB1*14:01L HLA-DRB1*11:03L
  REGION 1..12: note = CONT. FROM ABOVE: HLA-DRB1*11:04L HLA-DRB1*14:02L HLA-DQA1*01-B1 *05L HLA-DQA1*05:05-B1*03:19L HLA-DQA1*05:01-B1*02:01L HLA-DRB1* 04:10L HLA-DRB1*12:01L HLA-DRB1*12:02L HLA-DPA1*03:01-B1*105:01L HLA-DRB1*14:54L HLA-DRB1*10:01L HLA-DRB1*16:01L HLA-DRB1*04:08L
  REGION 1..12: note = CONT. FROM ABOVE: HLA-DRB1*15:03L
VITGLHPTQAPT

SEQ ID NO: 9640 - protein, 12 aa, Severe acute respiratory syndrome coronavirus 2
  REGION 1..12: note = Table B: HLA-DQA1*03:02-B1*03:03L HLA-DRB1*04:05L HLA-DQA1*01:02-B1*06:02L HLA-DPA1*01:03-B1*03:01L HLA-DQA1*05:05-B1*03:19L HLA-DRB1*12:01L HLA-DPA1*03:01-B1*105:01L HLA-DQA1*01:03-B1*06:01L
  REGION 1..12: note = CONT. FROM ABOVE: HLA-DRB1*04:08L HLA-DRB1*15:03L
ITGLHPTQAPTH

SEQ ID NO: 9641 - protein, 10 aa, Severe acute respiratory syndrome coronavirus 2
  REGION 1..10: note = Table B: HLA-DQA1*03:02-B1*03:03L HLA-DQA1*05:01-B1*03:01L HLA-DRB1*13:03L HLA-DRB1*04:02L HLA-DRB1*14:01L HLA-DRB1*08:01L HLA-DQA1*01-B1*05L HLA-DQA1*05:01-B1*02:01L HLA-DQA1*03:01-B1*03:02L HLA-DPA1*01:02-B1*04:01L
  REGION 1..10: note = CONT. FROM ABOVE: HLA-DRB1*16:01L HLA-DQA1*02:01-B1*03:03L
LHPTQAPTHL

SEQ ID NO: 9642 - protein, 13 aa, Severe acute respiratory syndrome coronavirus 2
  REGION 1..13: note = Table B: HLA-DQA1*03:02-B1*03:03L
HPTQAPTHLSVDT

SEQ ID NO: 9643 - protein, 15 aa, Severe acute respiratory syndrome coronavirus 2
  REGION 1..15: note = Table B: HLA-DQA1*03:02-B1*03:03L HLA-DRB1*14:04L HLA-DRB1*04:01L HLA-DRB1*01:01L HLA-DRB1*11:02L HLA-DRB5*01:01L HLA-DQA1*01-B1*05L HLA-DQA1*05:05-B1*03:19L HLA-DRB4*02:01NL HLA-DRB4*01:01L HLA-DPA1*01:03-B1*04:01L
  REGION 1..15: note = CONT. FROM ABOVE: HLA-DQA1*05:05-B1*03:116L HLA-DRB1*09:01L HLA- DPA1*01:03-B1*04:02L HLA-DPA1*01:03-B1*02:01L HLA-DPA1*01:03-B1* 104:01L HLA-DQA1*05:05-B1*03:01L HLA-DRB1*07:01L HLA-DQA1*01:03- B1*06:01L HLA-DRB1*08:02L HLA-DRB1*15:01L
APTHLSVDTKFKTEG

SEQ ID NO: 9644 - protein, 10 aa, Severe acute respiratory syndrome coronavirus 2
  REGION 1..10: note = Table B: HLA-DQA1*03:02-B1*03:03L HLA-DQA1*01-B1*05L HLA-DQA1*05:05-B1*03:19L HLA-DQA1*05:01-B1*02:01L HLA-DQA1*03:01-B1*03:02L HLA-DRB1*16:01L
VDTKFKTEGL

SEQ ID NO: 9645 - protein, 15 aa, Severe acute respiratory syndrome coronavirus 2
  REGION 1..15: note = Table B: HLA-DQA1*03:02-B1*03:03L HLA-DQA1*05:01-B1*03:01L HLA-DRB1*04:03L HLA-DRB1*13:02L HLA-DRB1*13:03L HLA-DRB1*04:04L HLA-DRB1*08:04L HLA-DRB1*14:01L HLA-DRB1*14:02L HLA-DQA1*01-B1*05L HLA-DQA1*05:01-B1*02:01L
  REGION 1..15: note = CONT. FROM ABOVE: HLA-DQA1*03:01-B1*03:02L HLA-DPA1*01:03-B1*104 :01L HLA-DQA1*05:05-B1*03:01L HLA-DRB1*10:01L HLA-DRB1*08:03L
DTKFKTEGLCVDIPG

SEQ ID NO: 9646 - protein, 10 aa, Severe acute respiratory syndrome coronavirus 2
  REGION 1..10: note = Table B: HLA-DQA1*03:02-B1*03:03L HLA-DQA1*05:01-B1*02:01L HLA-DQA1*03:01-B1*03:02L
VDIPGIPKDM

SEQ ID NO: 9647 - protein, 10 aa, Severe acute respiratory syndrome coronavirus 2
  REGION 1..10: note = Table B: HLA-DQA1*03:02-B1*03:03L HLA-DRB1*04:03L HLA-DRB1*04:02L HLA-DQA1*01-B1*05L HLA-DQA1*05:01-B1*02:01L HLA-DQA1*03:01-B1*03:02L HLA-DRB1*14:17L HLA-DQA1*02:01-B1*03:03L
MNYQVNGYPN

SEQ ID NO: 9648 - protein, 10 aa, Severe acute respiratory syndrome coronavirus 2
  REGION 1..10: note = Table B: HLA-DQA1*03:02-B1*03:03L HLA-DQA1*05:01-B1*03:01L HLA-DRB1*04:03L HLA-DPA1*03:01-B1*04:02L HLA-DQA1*01-B1*05L HLA-DQA1*05:05-B1*03:19L HLA-DQA1*05:01-B1*02:01L HLA-DRB1*12:01L HLA-DPA1*02:01-B1*13:01L
  REGION 1..10: note = CONT. FROM ABOVE: HLA-DPA1*03:01-B1*105:01L HLA-DQA1*03:01-B1*03 :02L HLA-DPA1*01:02-B1*04:01L HLA-DRB1*16:01L HLA-DQA1*01:03-B1* 06:01L HLA-DQA1*02:01-B1*03:03L HLA-DRB1*15:03L
NYQVNGYPNM

SEQ ID NO: 9649 - protein, 10 aa, Severe acute respiratory syndrome coronavirus 2
  REGION 1..10: note = Table B: HLA-DQA1*03:02-B1*03:03L HLA-DQA1*05:01-B1*03:01L HLA-DRB1*04:03L HLA-DRB1*13:03L HLA-DRB1*01:03L HLA-DRB1*04:05L HLA-DQA1*01:02-B1*06:02L HLA-DRB1*01:01L HLA-DRB1*08:77L HLA-DPA1*01:03-B1*03:01L HLA-DPA1*03:01-B1*04:02L
  REGION 1..10: note = CONT. FROM ABOVE: HLA-DRB1*03:01L HLA-DRB1*14:01L HLA-DRB1*14:02 L HLA-DQA1*01:01-B1*05:01L HLA-DQA1*01-B1*05L HLA-DQA1*05:05-B1* 03:19L HLA-DQA1*05:01-B1*02:01L HLA-DRB4*01:01L HLA-DPA1*01:03-B 1*04:01L HLA-DQA1*05:05-B1*03:116L HLA-DPA1*01:03-B1*04:02L
  REGION 1..10: note = CONT. FROM ABOVE: HLA-DRB1*12:01L HLA-DPA1*02:01-B1*13:01M HLA-D PA1*03:01-B1*105:01L HLA-DQA1*03:01-B1*03:02L HLA-DPA1*01:03-B1* 104:01L HLA-DQA1*05:05-B1*03:01L HLA-DPA1*01:02-B1*04:01L HLA-DR B1*10:01L HLA-DRB1*16:01L HLA-DQA1*01:03-B1*06:01L
  REGION 1..10: note = CONT. FROM ABOVE: HLA-DQA1*02:01-B1*03:03L HLA-DRB1*15:03L
YQVNGYPNMF

SEQ ID NO: 9650 - protein, 10 aa, Severe acute respiratory syndrome coronavirus 2
  REGION 1..10: note = Table B: HLA-DQA1*03:02-B1*03:03L HLA-DQA1*05:05-B1*03:19L HLA-DPA1*02:01-B1*13:01L HLA-DPA1*01:03-B1*104:01L
QVNGYPNMFI

SEQ ID NO: 9651 - protein, 13 aa, Severe acute respiratory syndrome coronavirus 2
  REGION 1..13: note = Table B: HLA-DQA1*03:02-B1*03:03L HLA-DQA1*05:01-B1*03:01L HLA-DRB1*04:05L HLA-DQA1*05:01-B1*02:01L HLA-DPA1*02:01-B1*13:01L HLA-DPA1*03:01-B1*105:01L HLA-DPA1*01:02-B1*04:01L
VNGYPNMFITREE

SEQ ID NO: 9652 - protein, 11 aa, Severe acute respiratory syndrome coronavirus 2
  REGION 1..11: note = Table B: HLA-DQA1*03:02-B1*03:03L HLA-DQA1*01-B1*05L
YPNMFITREEA

SEQ ID NO: 9653 - protein, 10 aa, Severe acute respiratory syndrome coronavirus 2
  REGION 1..10: note = Table B: HLA-DQA1*03:02-B1*03:03L HLA-DQA1*05:01-B1*03:01M HLA-DQA1*01:02-B1*06:02L HLA-DRB4*03:01NL HLA-DRB1*08:77L HLA-DPA1*01:03-B1*03:01L HLA-DPA1*03:01-B1*04:02L HLA-DRB1*03:01L HLA-DQA1*01-B1*05L HLA-DQA1*05:05-B1*03:19L
  REGION 1..10: note = CONT. FROM ABOVE: HLA-DQA1*05:01-B1*02:01L HLA-DRB4*01:01M HLA-D PA1*01:03-B1*04:01M HLA-DQA1*05:05-B1*03:116L HLA-DPA1*01:03-B1* 04:02L HLA-DRB1*12:01L HLA-DQA1*03:01-B1*03:02L HLA-DPA1*01:03-B 1*104:01L HLA-DPA1*01:02-B1*04:01L HLA-DRB1*10:01L
  REGION 1..10: note = CONT. FROM ABOVE: HLA-DRB1*16:01L HLA-DQA1*02:01-B1*03:03L HLA-D RB1*15:03L
EEAIRHVRAW

SEQ ID NO: 9654 - protein, 15 aa, Severe acute respiratory syndrome coronavirus 2
  REGION 1..15: note = Table B: HLA-DQA1*03:02-B1*03:03L HLA-DPA1*01:03-B1*04:02L HLA-DPA1*01:03-B1*104:01L HLA-DRB1*07:01L
EAIRHVRAWIGFDVE

SEQ ID NO: 9655 - protein, 14 aa, Severe acute respiratory syndrome coronavirus 2
  REGION 1..14: note = Table B: HLA-DQA1*03:02-B1*03:03L HLA-DQA1*05:01-B1*03:01L HLA-DRB1*13:03L HLA-DRB1*01:01L HLA-DRB3*02:01L HLA-DRB1*11:02L HLA-DRB1*11:04L HLA-DQA1*05:01-B1*02:01L HLA-DRB3*01:01L HLA-DPA1*01:03-B1*104:01L HLA-DQA1*05:05-B1*03:01L
IRHVRAWIGFDVEG

SEQ ID NO: 9656 - protein, 12 aa, Severe acute respiratory syndrome coronavirus 2
  REGION 1..12: note = Table B: HLA-DQA1*03:02-B1*03:03L HLA-DQA1*05:01-B1*03:01L HLA-DQA1*05:05-B1*03:19L HLA-DPA1*03:01-B1*105:01L HLA-DQA1*03:01-B1*03:02L HLA-DQA1*05:05-B1*03:01L
FDVEGCHATREA

SEQ ID NO: 9657 - protein, 13 aa, Severe acute respiratory syndrome coronavirus 2
  REGION 1..13: note = Table B: HLA-DQA1*03:02-B1*03:03L HLA-DRB1*08:01L HLA-DQA1*05:05-B1*03:19L HLA-DPA1*03:01-B1*105:01L HLA-DRB1*04:08L
DVEGCHATREAVG

SEQ ID NO: 9658 - protein, 10 aa, Severe acute respiratory syndrome coronavirus 2
  REGION 1..10: note = Table B: HLA-DQA1*03:02-B1*03:03L HLA-DQA1*05:01-B1*03:01L HLA-DPA1*03:01-B1*04:02L HLA-DRB1*14:01L HLA-DRB1*08:01L HLA-DQA1*01-B1*05L HLA-DQA1*03:01-B1*03:02L
ATREAVGTNL

SEQ ID NO: 9659 - protein, 10 aa, Severe acute respiratory syndrome coronavirus 2
  REGION 1..10: note = Table B: HLA-DQA1*03:02-B1*03:03M HLA-DQA1*05:05-B1*03:19L HLA-DQA1*05:05-B1*03:116L HLA-DRB1*09:01L HLA-DPA1*01:03-B1*04:02L HLA-DQA1*03:01-B1*03:02L HLA-DPA1*01:03-B1*104:01L HLA-DQA1*02:01-B1*03:03L
REAVGTNLPL

SEQ ID NO: 9660 - protein, 10 aa, Severe acute respiratory syndrome coronavirus 2
  REGION 1..10: note = Table B: HLA-DQA1*03:02-B1*03:03L HLA-DQA1*05:01-B1*02:01L HLA-DQA1*03:01-B1*03:02L HLA-DQA1*01:03-B1*06:01L HLA-DQA1*02:01-B1*03:03L
EAVGTNLPLQ

SEQ ID NO: 9661 - protein, 10 aa, Severe acute respiratory syndrome coronavirus 2
  REGION 1..10: note = Table B: HLA-DQA1*03:02-B1*03:03L HLA-DQA1*05:05-B1*03:19L HLA-DQA1*03:01-B1*03:02L HLA-DQA1*02:01-B1*03:03L HLA-DRB1*15:03L
AVGTNLPLQL

SEQ ID NO: 9662 - protein, 10 aa, Severe acute respiratory syndrome coronavirus 2
  REGION 1..10: note = Table B: HLA-DQA1*03:02-B1*03:03L HLA-DQA1*05:01-B1*03:01L HLA-DRB1*13:03L HLA-DQA1*01:02-B1*06:02L HLA-DRB1*08:77L HLA-DPA1*01:03-B1*03:01L HLA-DRB1*03:01L HLA-DRB1*14:02L HLA-DQA1*01-B1*05L HLA-DQA1*05:05-B1*03:19L
  REGION 1..10: note = CONT. FROM ABOVE: HLA-DQA1*05:01-B1*02:01L HLA-DRB4*01:01L HLA-D PA1*01:03-B1*04:01L HLA-DQA1*05:05-B1*03:116L HLA-DPA1*02:01-B1* 13:01L HLA-DPA1*03:01-B1*105:01L HLA-DPA1*01:03-B1*104:01L HLA-D RB1*10:01L HLA-DRB1*16:01L HLA-DQA1*01:03-B1*06:01L
  REGION 1..10: note = CONT. FROM ABOVE: HLA-DQA1*02:01-B1*03:03L HLA-DRB1*15:03L
GTNLPLQLGF

SEQ ID NO: 9663 - protein, 12 aa, Severe acute respiratory syndrome coronavirus 2
  REGION 1..12: note = Table B: HLA-DQA1*03:02-B1*03:03L HLA-DQA1*05:01-B1*03:01L HLA-DRB1*04:03L HLA-DQA1*01:02-B1*06:02L HLA-DQA1*05:05-B1*03:19L HLA-DQA1*05:01-B1*02:01L HLA-DPA1*03:01-B1*105:01L HLA-DQA1*03:01-B1*03:02L
  REGION 1..12: note = CONT. FROM ABOVE: HLA-DQA1*05:05-B1*03:01L HLA-DQA1*01:03-B1*06: 01L HLA-DQA1*02:01-B1*03:03L
LPLQLGFSTGVN

SEQ ID NO: 9664 - protein, 10 aa, Severe acute respiratory syndrome coronavirus 2
  REGION 1..10: note = Table B: HLA-DQA1*03:02-B1*03:03L HLA-DQA1*03:01-B1*03:02L HLA-DQA1*02:01-B1*03:03L
QLGFSTGVNL

SEQ ID NO: 9665 - protein, 12 aa, Severe acute respiratory syndrome coronavirus 2
  REGION 1..12: note = Table B: HLA-DQA1*03:02-B1*03:03L HLA-DQA1*05:01-B1*03:01L HLA-DRB1*04:03L HLA-DQA1*01:02-B1*06:02L HLA-DQA1*05:05-B1*03:19L HLA-DPA1*03:01-B1*105:01L HLA-DQA1*03:01-B1*03:02L HLA-DQA1*05:05-B1*03:01L
  REGION 1..12: note = CONT. FROM ABOVE: HLA-DQA1*02:01-B1*03:03L
FSTGVNLVAVPT

SEQ ID NO: 9666 - protein, 12 aa, Severe acute respiratory syndrome coronavirus 2
  REGION 1..12: note = Table B: HLA-DQA1*03:02-B1*03:03L HLA-DQA1*05:01-B1*03:01L HLA-DRB1*13:02L HLA-DRB1*13:03L HLA-DRB1*01:03L HLA-DRB1*04:04L HLA-DRB1*04:05L HLA-DRB1*01:02L HLA-DRB4*03:01NL HLA-DRB1*08:04L HLA-DRB1*08:77L HLA-DPA1*01:03-B1*03:01L HLA-DRB1*14:01L
  REGION 1..12: note = CONT. FROM ABOVE: HLA-DRB1*11:04L HLA-DQA1*01-B1*05L HLA-DRB1*04 :10L HLA-DRB1*12:01L HLA-DRB1*12:02L HLA-DPA1*03:01-B1*105:01L H LA-DRB1*14:54L HLA-DQA1*05:05-B1*03:01L HLA-DRB1*10:01L HLA-DRB1 *16:01L HLA-DQA1*01:03-B1*06:01L HLA-DRB1*04:08L HLA-DRB1*08:03L
  REGION 1..12: note = CONT. FROM ABOVE: HLA-DRB1*15:03L
VNLVAVPTGYVD

SEQ ID NO: 9667 - protein, 12 aa, Severe acute respiratory syndrome coronavirus 2
  REGION 1..12: note = Table B: HLA-DQA1*03:02-B1*03:03L HLA-DRB1*04:03L HLA-DRB1*04:02L HLA-DRB1*04:05L HLA-DQA1*01:01-B1*05:01L HLA-DQA1*05:01-B1*02:01L HLA-DRB1*04:10L HLA-DQA1*03:01-B1*03:02L HLA-DRB1*14:17L HLA-DRB1*16:01L
  REGION 1..12: note = CONT. FROM ABOVE: HLA-DQA1*01:03-B1*06:01L HLA-DQA1*02:01-B1*03: 03L
VAVPTGYVDTPN

SEQ ID NO: 9668 - protein, 11 aa, Severe acute respiratory syndrome coronavirus 2
  REGION 1..11: note = Table B: HLA-DQA1*03:02-B1*03:03L HLA-DRB1*04:03L HLA-DRB1*04:02L HLA-DQA1*05:01-B1*02:01L HLA-DQA1*03:01-B1*03:02L HLA-DRB1*16:01L HLA-DQA1*02:01-B1*03:03L
VPTGYVDTPNN

SEQ ID NO: 9669 - protein, 10 aa, Severe acute respiratory syndrome coronavirus 2
  REGION 1..10: note = Table B: HLA-DQA1*03:02-B1*03:03L HLA-DQA1*05:01-B1*03:01L HLA-DRB1*04:03L HLA-DRB1*13:02L HLA-DRB1*13:03L HLA-DRB1*01:03L HLA-DRB1*04:02L HLA-DRB1*04:05L HLA-DQA1*01:02-B1*06:02L HLA-DRB4*03:01NL HLA-DRB1*08:77L HLA-DPA1*01:03-B1*03:01L
  REGION 1..10: note = CONT. FROM ABOVE: HLA-DPA1*03:01-B1*04:02L HLA-DRB1*03:01L HLA-D RB1*14:01L HLA-DRB1*11:02L HLA-DRB1*11:03L HLA-DRB1*14:02L HLA-D QA1*01-B1*05L HLA-DQA1*05:05-B1*03:19L HLA-DQA1*05:01-B1*02:01L HLA-DRB4*01:01L HLA-DPA1*01:03-B1*04:01L
  REGION 1..10: note = CONT. FROM ABOVE: HLA-DQA1*05:05-B1*03:116L HLA-DPA1*01:03-B1*04 :02L HLA-DRB1*12:01L HLA-DPA1*02:01-B1*13:01L HLA-DPA1*03:01-B1* 105:01L HLA-DQA1*03:01-B1*03:02L HLA-DPA1*01:03-B1*104:01L HLA-D QA1*05:05-B1*03:01L HLA-DPA1*01:02-B1*04:01L HLA-DRB1*10:01L
  REGION 1..10: note = CONT. FROM ABOVE: HLA-DRB1*16:01L HLA-DQA1*01:03-B1*06:01L HLA-D RB1*08:02L HLA-DQA1*02:01-B1*03:03L HLA-DRB1*15:03L
YVDTPNNTDF

SEQ ID NO: 9670 - protein, 13 aa, Severe acute respiratory syndrome coronavirus 2
  REGION 1..13: note = Table B: HLA-DQA1*03:02-B1*03:03L HLA-DQA1*01:02-B1*06:02L
VDTPNNTDFSRVS

SEQ ID NO: 9671 - protein, 13 aa, Severe acute respiratory syndrome coronavirus 2
  REGION 1..13: note = Table B: HLA-DQA1*03:02-B1*03:03L HLA-DQA1*05:01-B1*03:01L HLA-DRB1*04:03L HLA-DRB1*13:03L HLA-DRB1*04:05L HLA-DQA1*01:02-B1*06:02L HLA-DRB1*01:02L HLA-DRB4*03:01NL HLA-DRB1*14:01L HLA-DRB1*08:01L HLA-DRB1*04:10L HLA-DRB1*12:01L
  REGION 1..13: note = CONT. FROM ABOVE: HLA-DRB1*14:54L HLA-DRB1*14:17L HLA-DRB1*04:08 L HLA-DRB1*15:03L
NTDFSRVSAKPPP

SEQ ID NO: 9672 - protein, 10 aa, Severe acute respiratory syndrome coronavirus 2
  REGION 1..10: note = Table B: HLA-DQA1*03:02-B1*03:03L HLA-DQA1*05:01-B1*03:01L HLA-DRB1*04:03L HLA-DRB1*13:03L HLA-DRB1*01:03L HLA-DRB1*04:02L HLA-DRB1*04:05L HLA-DQA1*01:02-B1*06:02L HLA-DRB4*03:01NL HLA-DQA1*05:05-B1*03:19L HLA-DQA1*05:01-B1*02:01L
  REGION 1..10: note = CONT. FROM ABOVE: HLA-DQA1*03:01-B1*03:02L HLA-DQA1*05:05-B1*03: 01L HLA-DRB1*14:17L HLA-DRB1*16:01L HLA-DQA1*01:03-B1*06:01L HLA -DQA1*02:01-B1*03:03L
VSAKPPPGDQ

SEQ ID NO: 9673 - protein, 10 aa, Severe acute respiratory syndrome coronavirus 2
  REGION 1..10: note = Table B: HLA-DQA1*03:02-B1*03:03L HLA-DQA1*05:01-B1*03:01L HLA-DRB1*13:02L HLA-DRB1*13:03L HLA-DRB1*01:03M HLA-DRB1*04:05L HLA-DQA1*01:02-B1*06:02M HLA-DRB4*03:01NL HLA-DRB1*08:77L HLA-DPA1*01:03-B1*03:01L HLA-DPA1*03:01-B1*04:02L
  REGION 1..10: note = CONT. FROM ABOVE: HLA-DRB1*03:01L HLA-DRB1*14:01L HLA-DRB1*14:02 M HLA-DRB1*11:01L HLA-DQA1*01-B1*05L HLA-DQA1*05:05-B1*03:19L HL A-DQA1*05:01-B1*02:01L HLA-DPA1*01:03-B1*04:01L HLA-DQA1*05:05-B 1*03:116L HLA-DPA1*01:03-B1*04:02L HLA-DPA1*02:01-B1*13:01L
  REGION 1..10: note = CONT. FROM ABOVE: HLA-DPA1*03:01-B1*105:01L HLA-DRB1*10:01L HLA- DRB1*16:01L HLA-DQA1*01:03-B1*06:01L HLA-DRB1*08:02L HLA-DQA1*02 :01-B1*03:03M HLA-DRB1*15:03L
SAKPPPGDQF

SEQ ID NO: 9674 - protein, 17 aa, Severe acute respiratory syndrome coronavirus 2
  REGION 1..17: note = Table B: HLA-DQA1*03:02-B1*03:03L HLA-DRB1*04:03L HLA-DRB1*13:03L HLA-DRB1*04:04L HLA-DRB1*01:01L HLA-DRB1*08:04L HLA-DRB3*02:01L HLA-DRB1*11:03L HLA-DRB1*11:04L HLA-DRB1*11:01L HLA-DRB3*01:01L HLA-DQA1*03:01-B1*03:02L
  REGION 1..17: note = CONT. FROM ABOVE: HLA-DPA1*01:03-B1*104:01L HLA-DQA1*05:05-B1*03 :01L
KPPPGDQFKHLIPLMYK

SEQ ID NO: 9675 - protein, 19 aa, Severe acute respiratory syndrome coronavirus 2
  REGION 1..19: note = Table B: HLA-DQA1*03:02-B1*03:03L HLA-DRB1*08:04L HLA-DRB3*02:01L HLA-DRB1*11:02L HLA-DQA1*01-B1*05L HLA-DRB1*09:01L HLA-DPA1*01:03-B1*104:01L HLA-DRB1*08:02L
PPPGDQFKHLIPLMYKGLP

SEQ ID NO: 9676 - protein, 11 aa, Severe acute respiratory syndrome coronavirus 2
  REGION 1..11: note = Table B: HLA-DQA1*03:02-B1*03:03L HLA-DQA1*05:01-B1*03:01L HLA-DRB1*04:03L HLA-DRB1*04:02L HLA-DQA1*01:02-B1*06:02L HLA-DQA1*01-B1*05L HLA-DQA1*05:01-B1*02:01L HLA-DRB1*12:01L HLA-DQA1*03:01-B1*03:02L HLA-DPA1*01:02-B1*04:01L
  REGION 1..11: note = CONT. FROM ABOVE: HLA-DRB1*16:01L HLA-DQA1*01:03-B1*06:01L HLA-D QA1*02:01-B1*03:03L HLA-DRB1*15:03L
IPLMYKGLPWN

SEQ ID NO: 9677 - protein, 10 aa, Severe acute respiratory syndrome coronavirus 2
  REGION 1..10: note = Table B: HLA-DQA1*03:02-B1*03:03L HLA-DQA1*05:01-B1*03:01L HLA-DQA1*01:02-B1*06:02L HLA-DPA1*01:03-B1*03:01L HLA-DRB1*14:01L HLA-DQA1*05:01-B1*02:01L HLA-DRB1*12:01L HLA-DPA1*03:01-B1*105:01L HLA-DQA1*03:01-B1*03:02L
  REGION 1..10: note = CONT. FROM ABOVE: HLA-DPA1*01:02-B1*04:01L HLA-DQA1*01:03-B1*06: 01L HLA-DQA1*02:01-B1*03:03L HLA-DRB1*15:03L
NVVRIKIVQM

SEQ ID NO: 9678 - protein, 10 aa, Severe acute respiratory syndrome coronavirus 2
  REGION 1..10: note = Table B: HLA-DQA1*03:02-B1*03:03L HLA-DPA1*03:01-B1*04:02L HLA-DQA1*03:01-B1*03:02L HLA-DQA1*02:01-B1*03:03L HLA-DRB1*15:03L
QMLSDTLKNL

SEQ ID NO: 9679 - protein, 12 aa, Severe acute respiratory syndrome coronavirus 2
  REGION 1..12: note = Table B: HLA-DQA1*03:02-B1*03:03L HLA-DRB1*04:02L HLA-DQA1*01:02-B1*06:02L HLA-DPA1*03:01-B1*04:02L HLA-DRB1*14:01L HLA-DQA1*05:01-B1*02:01L HLA-DRB1*12:01L HLA-DPA1*03:01-B1*105:01L HLA-DRB1*14:17L HLA-DRB1*16:01L
  REGION 1..12: note = CONT. FROM ABOVE: HLA-DQA1*01:03-B1*06:01L HLA-DRB1*15:03L
SDTLKNLSDRVV

SEQ ID NO: 9680 - protein, 10 aa, Severe acute respiratory syndrome coronavirus 2
  REGION 1..10: note = Table B: HLA-DQA1*03:02-B1*03:03L HLA-DQA1*03:01-B1*03:02L HLA-DQA1*02:01-B1*03:03L HLA-DRB1*15:03L
NLSDRVVFVL

SEQ ID NO: 9681 - protein, 13 aa, Severe acute respiratory syndrome coronavirus 2
  REGION 1..13: note = Table B: HLA-DQA1*03:02-B1*03:03L HLA-DRB1*01:03L HLA-DRB1*04:04L HLA-DRB1*04:05L HLA-DRB1*08:04L HLA-DRB3*02:01L HLA-DPA1*01:03-B1*03:01L HLA-DRB1*14:02L HLA-DRB1*08:01L HLA-DQA1*05:05-B1*03:19L HLA-DRB1*09:01L
  REGION 1..13: note = CONT. FROM ABOVE: HLA-DQA1*03:01-B1*03:02L HLA-DPA1*01:03-B1*02: 01L HLA-DPA1*01:03-B1*104:01L HLA-DQA1*05:05-B1*03:01L
DRVVFVLWAHGFE

SEQ ID NO: 9682 - protein, 10 aa, Severe acute respiratory syndrome coronavirus 2
  REGION 1..10: note = Table B: HLA-DQA1*03:02-B1*03:03L HLA-DQA1*05:01-B1*03:01L HLA-DPA1*03:01-B1*04:02L HLA-DPA1*02:01-B1*13:01L HLA-DQA1*03:01-B1*03:02L HLA-DPA1*01:02-B1*04:01L HLA-DQA1*01:03-B1*06:01L HLA-DQA1*02:01-B1*03:03L
  REGION 1..10: note = CONT. FROM ABOVE: HLA-DRB1*15:03L
FVLWAHGFEL

SEQ ID NO: 9683 - protein, 10 aa, Severe acute respiratory syndrome coronavirus 2
  REGION 1..10: note = Table B: HLA-DQA1*03:02-B1*03:03L HLA-DQA1*05:01-B1*03:01L HLA-DQA1*01:02-B1*06:02L HLA-DPA1*03:01-B1*04:02L HLA-DQA1*01-B1*05L HLA-DQA1*05:05-B1*03:19L HLA-DQA1*05:01-B1*02:01L HLA-DPA1*01:03-B1*04:02L
  REGION 1..10: note = CONT. FROM ABOVE: HLA-DPA1*02:01-B1*13:01L HLA-DPA1*03:01-B1*105 :01L HLA-DQA1*03:01-B1*03:02L HLA-DPA1*01:02-B1*04:01L HLA-DRB1* 16:01L HLA-DQA1*01:03-B1*06:01L HLA-DQA1*02:01-B1*03:03L HLA-DRB 1*15:03L
WAHGFELTSM

SEQ ID NO: 9684 - protein, 10 aa, Severe acute respiratory syndrome coronavirus 2
  REGION 1..10: note = Table B: HLA-DQA1*03:02-B1*03:03L HLA-DQA1*05:05-B1*03:19M HLA-DPA1*01:03-B1*104:01L
FELTSMKYFV

SEQ ID NO: 9685 - protein, 10 aa, Severe acute respiratory syndrome coronavirus 2
  REGION 1..10: note = Table B: HLA-DQA1*03:02-B1*03:03L HLA-DQA1*05:01-B1*03:01L HLA-DRB1*04:03L HLA-DRB1*13:03L HLA-DRB1*01:03L HLA-DRB1*04:02L HLA-DRB1*04:05L HLA-DQA1*01:02-B1*06:02L HLA-DRB1*01:02L HLA-DRB4*03:01NL HLA-DQA1*01-B1*05L HLA-DQA1*05:01-B1*02:01L
  REGION 1..10: note = CONT. FROM ABOVE: HLA-DRB1*12:01L HLA-DPA1*03:01-B1*105:01L HLA- DQA1*03:01-B1*03:02L HLA-DQA1*05:05-B1*03:01L HLA-DRB1*14:17L HL A-DPA1*01:02-B1*04:01L HLA-DRB1*16:01L HLA-DQA1*01:03-B1*06:01L HLA-DRB1*04:08L HLA-DQA1*02:01-B1*03:03L HLA-DRB1*15:03L
YFVKIGPERT

SEQ ID NO: 9686 - protein, 14 aa, Severe acute respiratory syndrome coronavirus 2
  REGION 1..14: note = Table B: HLA-DQA1*03:02-B1*03:03L HLA-DQA1*05:05-B1*03:19L
TASDTYACWHHSIG

SEQ ID NO: 9687 - protein, 10 aa, Severe acute respiratory syndrome coronavirus 2
  REGION 1..10: note = Table B: HLA-DQA1*03:02-B1*03:03L HLA-DQA1*01-B1*05L HLA-DQA1*05:01-B1*02:01L
GFDYVYNPFM

SEQ ID NO: 9688 - protein, 10 aa, Severe acute respiratory syndrome coronavirus 2
  REGION 1..10: note = Table B: HLA-DQA1*03:02-B1*03:03L HLA-DQA1*01:02-B1*06:02L HLA-DRB1*01:02L HLA-DPA1*03:01-B1*04:02L HLA-DRB1*14:02L HLA-DQA1*05:05-B1*03:19L HLA-DPA1*02:01-B1*13:01L HLA-DPA1*03:01-B1*105:01L HLA-DPA1*01:03-B1*104:01L
  REGION 1..10: note = CONT. FROM ABOVE: HLA-DPA1*01:02-B1*04:01L HLA-DQA1*01:03-B1*06: 01L HLA-DRB1*08:03L HLA-DQA1*02:01-B1*03:03L HLA-DRB1*15:03L
YVYNPFMIDV

SEQ ID NO: 9689 - protein, 11 aa, Severe acute respiratory syndrome coronavirus 2
  REGION 1..11: note = Table B: HLA-DQA1*03:02-B1*03:03L HLA-DRB1*04:03L HLA-DQA1*05:01-B1*02:01L HLA-DQA1*03:01-B1*03:02L HLA-DRB1*16:01L HLA-DQA1*02:01-B1*03:03L
VYNPFMIDVQQ

SEQ ID NO: 9690 - protein, 11 aa, Severe acute respiratory syndrome coronavirus 2
  REGION 1..11: note = Table B: HLA-DQA1*03:02-B1*03:03L HLA-DRB1*04:03L HLA-DRB1*04:02L HLA-DRB4*03:01NL HLA-DQA1*01:01-B1*05:01L HLA-DQA1*01-B1*05L HLA-DRB1*12:01L HLA-DQA1*03:01-B1*03:02L HLA-DRB1*14:17L HLA-DRB1*16:01L
NPFMIDVQQWG

SEQ ID NO: 9691 - protein, 10 aa, Severe acute respiratory syndrome coronavirus 2
  REGION 1..10: note = Table B: HLA-DQA1*03:02-B1*03:03L HLA-DRB1*01:03L HLA-DRB1*04:05L HLA-DQA1*01:02-B1*06:02L HLA-DRB1*01:01L HLA-DRB1*08:77L HLA-DPA1*03:01-B1*04:02L HLA-DRB1*14:02L HLA-DQA1*05:05-B1*03:19L HLA-DRB4*01:01L
  REGION 1..10: note = CONT. FROM ABOVE: HLA-DPA1*01:03-B1*04:01L HLA-DQA1*05:05-B1*03: 116L HLA-DPA1*02:01-B1*13:01M HLA-DPA1*03:01-B1*105:01L HLA-DPA1 *01:03-B1*104:01L HLA-DRB1*16:01L HLA-DQA1*01:03-B1*06:01L HLA-D QA1*02:01-B1*03:03L HLA-DRB1*15:03L
FMIDVQQWGF

SEQ ID NO: 9692 - protein, 12 aa, Severe acute respiratory syndrome coronavirus 2
  REGION 1..12: note = Table B: HLA-DQA1*03:02-B1*03:03L HLA-DQA1*05:01-B1*02:01L HLA-DQA1*03:01-B1*03:02L HLA-DQA1*01:03-B1*06:01L HLA-DQA1*02:01-B1*03:03L
DVQQWGFTGNLQ

SEQ ID NO: 9693 - protein, 13 aa, Severe acute respiratory syndrome coronavirus 2
  REGION 1..13: note = Table B: HLA-DQA1*03:02-B1*03:03L HLA-DQA1*05:01-B1*03:01L HLA-DRB1*13:02L HLA-DRB1*13:03L HLA-DRB1*01:03L HLA-DRB1*04:04L HLA-DQA1*01:02-B1*06:02L HLA-DRB1*01:02L HLA-DRB1*08:04L HLA-DRB1*08:77L HLA-DPA1*01:03-B1*03:01L HLA-DRB1*11:04L
  REGION 1..13: note = CONT. FROM ABOVE: HLA-DRB1*08:01L HLA-DQA1*05:05-B1*03:19L HLA-D QA1*05:01-B1*02:01L HLA-DRB1*12:01L HLA-DRB1*12:02L HLA-DPA1*02: 01-B1*13:01L HLA-DPA1*03:01-B1*105:01L HLA-DQA1*03:01-B1*03:02L HLA-DRB1*14:54L HLA-DQA1*05:05-B1*03:01L HLA-DRB1*10:01L
  REGION 1..13: note = CONT. FROM ABOVE: HLA-DQA1*01:03-B1*06:01L HLA-DRB1*04:08L HLA-D RB1*08:03L HLA-DQA1*02:01-B1*03:03L HLA-DRB1*15:03L
VQQWGFTGNLQSN

SEQ ID NO: 9694 - protein, 10 aa, Severe acute respiratory syndrome coronavirus 2
  REGION 1..10: note = Table B: HLA-DQA1*03:02-B1*03:03L HLA-DQA1*05:01-B1*03:01L HLA-DRB1*04:03L HLA-DRB1*13:03L HLA-DRB1*01:03L HLA-DRB1*04:02L HLA-DQA1*01:02-B1*06:02L HLA-DRB1*01:02L HLA-DRB4*03:01NL HLA-DQA1*01:01-B1*05:01L HLA-DQA1*01-B1*05L
  REGION 1..10: note = CONT. FROM ABOVE: HLA-DQA1*05:05-B1*03:19L HLA-DQA1*05:01-B1*02: 01L HLA-DPA1*01:03-B1*04:02L HLA-DRB1*12:01L HLA-DPA1*03:01-B1*1 05:01L HLA-DQA1*03:01-B1*03:02L HLA-DQA1*05:05-B1*03:01L HLA-DRB 1*14:17L HLA-DPA1*01:02-B1*04:01L HLA-DRB1*16:01L
  REGION 1..10: note = CONT. FROM ABOVE: HLA-DQA1*01:03-B1*06:01M HLA-DQA1*02:01-B1*03: 03L
FTGNLQSNHD

SEQ ID NO: 9695 - protein, 10 aa, Severe acute respiratory syndrome coronavirus 2
  REGION 1..10: note = Table B: HLA-DQA1*03:02-B1*03:03L HLA-DQA1*03:01-B1*03:02L HLA-DQA1*01:03-B1*06:01L HLA-DQA1*02:01-B1*03:03L
TGNLQSNHDL

SEQ ID NO: 9696 - protein, 10 aa, Severe acute respiratory syndrome coronavirus 2
  REGION 1..10: note = Table B: HLA-DQA1*03:02-B1*03:03L HLA-DQA1*05:01-B1*03:01L HLA-DRB1*04:03L HLA-DRB1*04:02L HLA-DQA1*01:02-B1*06:02L HLA-DRB1*01:02L HLA-DQA1*05:05-B1*03:19L HLA-DPA1*03:01-B1*105:01L HLA-DQA1*03:01-B1*03:02L
  REGION 1..10: note = CONT. FROM ABOVE: HLA-DQA1*05:05-B1*03:01L HLA-DRB1*14:17L HLA-D QA1*01:03-B1*06:01M HLA-DQA1*02:01-B1*03:03L
VASCDAIMTR

SEQ ID NO: 9697 - protein, 11 aa, Severe acute respiratory syndrome coronavirus 2
  REGION 1..11: note = Table B: HLA-DQA1*03:02-B1*03:03L HLA-DQA1*05:01-B1*03:01L HLA-DQA1*01:02-B1*06:02L HLA-DQA1*01-B1*05L HLA-DQA1*05:05-B1*03:19L HLA-DQA1*05:01-B1*02:01L HLA-DPA1*03:01-B1*105:01L HLA-DQA1*03:01-B1*03:02L
  REGION 1..11: note = CONT. FROM ABOVE: HLA-DQA1*05:05-B1*03:01L HLA-DRB1*16:01L HLA-D QA1*01:03-B1*06:01L HLA-DQA1*02:01-B1*03:03L
VDWTIEYPIIG

SEQ ID NO: 9698 - protein, 12 aa, Severe acute respiratory syndrome coronavirus 2
  REGION 1..12: note = Table B: HLA-DQA1*03:02-B1*03:03L HLA-DQA1*05:01-B1*03:01L HLA-DQA1*01:02-B1*06:02L HLA-DRB1*01:02L HLA-DQA1*01-B1*05L HLA-DQA1*05:05-B1*03:19L HLA-DQA1*05:01-B1*02:01L HLA-DQA1*05:05-B1*03:01L
DWTIEYPIIGDE

SEQ ID NO: 9699 - protein, 10 aa, Severe acute respiratory syndrome coronavirus 2
  REGION 1..10: note = Table B: HLA-DQA1*03:02-B1*03:03H HLA-DQA1*05:01-B1*03:01L HLA-DRB1*13:02L HLA-DRB1*13:03L HLA-DQA1*01:02-B1*06:02L HLA-DRB1*08:77L HLA-DPA1*03:01-B1*04:02L HLA-DRB1*03:01L HLA-DRB1*14:01L HLA-DRB1*11:02L HLA-DRB1*14:02L HLA-DRB1*08:01L
  REGION 1..10: note = CONT. FROM ABOVE: HLA-DRB1*11:01L HLA-DQA1*01-B1*05L HLA-DQA1*05 :05-B1*03:19M HLA-DQA1*05:01-B1*02:01L HLA-DRB4*01:01L HLA-DPA1* 01:03-B1*04:01L HLA-DQA1*05:05-B1*03:116M HLA-DRB1*09:01M HLA-DP A1*01:03-B1*04:02L HLA-DRB1*12:01L HLA-DPA1*02:01-B1*13:01L
  REGION 1..10: note = CONT. FROM ABOVE: HLA-DPA1*03:01-B1*105:01L HLA-DQA1*03:01-B1*03 :02M HLA-DPA1*01:03-B1*104:01M HLA-DPA1*01:02-B1*04:01L HLA-DRB1 *10:01L HLA-DRB1*16:01L HLA-DQA1*01:03-B1*06:01L HLA-DRB1*08:03L HLA-DQA1*02:01-B1*03:03L HLA-DRB1*15:03L
IEYPIIGDEL

SEQ ID NO: 9700 - protein, 10 aa, Severe acute respiratory syndrome coronavirus 2
  REGION 1..10: note = Table B: HLA-DQA1*03:02-B1*03:03L HLA-DQA1*05:01-B1*03:01L HLA-DRB1*13:03L HLA-DRB1*04:05L HLA-DQA1*01:02-B1*06:02L HLA-DRB1*01:01L HLA-DPA1*03:01-B1*04:02L HLA-DQA1*01-B1*05L HLA-DQA1*05:05-B1*03:19L HLA-DQA1*05:05-B1*03:116M
  REGION 1..10: note = CONT. FROM ABOVE: HLA-DPA1*02:01-B1*13:01M HLA-DPA1*03:01-B1*105 :01L HLA-DPA1*01:02-B1*04:01L HLA-DQA1*01:03-B1*06:01L HLA-DRB1* 08:03L HLA-DRB1*15:03L
YPIIGDELKI

SEQ ID NO: 9701 - protein, 10 aa, Severe acute respiratory syndrome coronavirus 2
  REGION 1..10: note = Table B: HLA-DQA1*03:02-B1*03:03L HLA-DQA1*05:01-B1*03:01L HLA-DQA1*01:02-B1*06:02L HLA-DRB1*14:01L HLA-DQA1*03:01-B1*03:02L HLA-DPA1*01:02-B1*04:01L HLA-DRB1*16:01L HLA-DQA1*01:03-B1*06:01L
  REGION 1..10: note = CONT. FROM ABOVE: HLA-DQA1*02:01-B1*03:03L
VQHMVVKAAL

SEQ ID NO: 9702 - protein, 10 aa, Severe acute respiratory syndrome coronavirus 2
  REGION 1..10: note = Table B: HLA-DQA1*03:02-B1*03:03M HLA-DQA1*05:01-B1*03:01L HLA-DQA1*01:02-B1*06:02L HLA-DPA1*03:01-B1*04:02L HLA-DRB1*14:01L HLA-DRB1*14:02L HLA-DQA1*05:05-B1*03:19L HLA-DQA1*05:01-B1*02:01L HLA-DPA1*01:03-B1*04:01L
  REGION 1..10: note = CONT. FROM ABOVE: HLA-DQA1*05:05-B1*03:116L HLA-DRB1*09:01L HLA- DPA1*01:03-B1*04:02L HLA-DPA1*02:01-B1*13:01L HLA-DPA1*03:01-B1* 105:01L HLA-DQA1*03:01-B1*03:02L HLA-DPA1*01:03-B1*104:01L HLA-D PA1*01:02-B1*04:01L HLA-DRB1*16:01L HLA-DQA1*01:03-B1*06:01L
  REGION 1..10: note = CONT. FROM ABOVE: HLA-DRB1*08:03L HLA-DQA1*02:01-B1*03:03L HLA-D RB1*15:03L
ALLADKFPVL

SEQ ID NO: 9703 - protein, 10 aa, Severe acute respiratory syndrome coronavirus 2
  REGION 1..10: note = Table B: HLA-DQA1*03:02-B1*03:03L HLA-DQA1*05:01-B1*03:01L HLA-DRB1*13:03L HLA-DRB1*14:02L HLA-DQA1*05:05-B1*03:116L HLA-DQA1*03:01-B1*03:02L HLA-DRB1*16:01L HLA-DQA1*02:01-B1*03:03L HLA-DRB1*15:03L
VLHDIGNPKA

SEQ ID NO: 9704 - protein, 10 aa, Severe acute respiratory syndrome coronavirus 2
  REGION 1..10: note = Table B: HLA-DQA1*03:02-B1*03:03L HLA-DQA1*01-B1*05L HLA-DQA1*05:05-B1*03:19L HLA-DQA1*05:01-B1*02:01L HLA-DQA1*03:01-B1*03:02L HLA-DRB1*16:01L
LHDIGNPKAI

SEQ ID NO: 9705 - protein, 13 aa, Severe acute respiratory syndrome coronavirus 2
  REGION 1..13: note = Table B: HLA-DQA1*03:02-B1*03:03L HLA-DQA1*05:01-B1*03:01L HLA-DRB1*04:03L HLA-DRB1*01:02L HLA-DQA1*05:05-B1*03:19L HLA-DQA1*03:01-B1*03:02L HLA-DQA1*05:05-B1*03:01L HLA-DQA1*01:03-B1*06:01L HLA-DRB1*04:08L
  REGION 1..13: note = CONT. FROM ABOVE: HLA-DQA1*02:01-B1*03:03L
IGNPKAIKCVPQA

SEQ ID NO: 9706 - protein, 12 aa, Severe acute respiratory syndrome coronavirus 2
  REGION 1..12: note = Table B: HLA-DQA1*03:02-B1*03:03L HLA-DQA1*05:01-B1*03:01L HLA-DRB1*04:03L HLA-DQA1*01:02-B1*06:02L HLA-DQA1*05:05-B1*03:19L HLA-DPA1*03:01-B1*105:01L HLA-DQA1*03:01-B1*03:02L HLA-DQA1*05:05-B1*03:01L
  REGION 1..12: note = CONT. FROM ABOVE: HLA-DQA1*01:03-B1*06:01L HLA-DQA1*02:01-B1*03: 03L
NPKAIKCVPQAD

SEQ ID NO: 9707 - protein, 15 aa, Severe acute respiratory syndrome coronavirus 2
  REGION 1..15: note = Table B: HLA-DQA1*03:02-B1*03:03L HLA-DRB1*04:03L HLA-DRB1*01:03L HLA-DRB1*04:05L HLA-DRB1*01:02L HLA-DRB1*08:04L HLA-DRB1*14:01L HLA-DRB1*08:01L HLA-DPA1*01:03-B1*04:01L HLA-DPA1*01:03-B1*04:02L HLA-DRB1*12:01L
  REGION 1..15: note = CONT. FROM ABOVE: HLA-DQA1*03:01-B1*03:02L HLA-DRB1*04:08L HLA-D QA1*02:01-B1*03:03L
VPQADVEWKFYDAQP

SEQ ID NO: 9708 - protein, 13 aa, Severe acute respiratory syndrome coronavirus 2
  REGION 1..13: note = Table B: HLA-DQA1*03:02-B1*03:03L HLA-DQA1*05:01-B1*03:01L HLA-DRB1*04:03L HLA-DRB1*13:02L HLA-DRB1*04:05L HLA-DQA1*01:02-B1*06:02L HLA-DRB1*01:01L HLA-DRB3*02:01L HLA-DPA1*03:01-B1*04:02L HLA-DRB1*14:02L HLA-DRB1*08:01L
  REGION 1..13: note = CONT. FROM ABOVE: HLA-DQA1*05:05-B1*03:19L HLA-DQA1*05:01-B1*02: 01L HLA-DPA1*02:01-B1*13:01L HLA-DPA1*03:01-B1*105:01L HLA-DQA1* 03:01-B1*03:02L HLA-DQA1*05:05-B1*03:01L HLA-DRB1*07:01L HLA-DRB 1*10:01L HLA-DRB1*15:01L
VEWKFYDAQPCSD

SEQ ID NO: 9709 - protein, 12 aa, Severe acute respiratory syndrome coronavirus 2
  REGION 1..12: note = Table B: HLA-DQA1*03:02-B1*03:03L HLA-DQA1*05:01-B1*03:01L HLA-DRB1*04:01L HLA-DRB1*13:02L HLA-DRB1*04:04L HLA-DQA1*01:02-B1*06:02L HLA-DRB1*01:01L HLA-DRB3*02:01L HLA-DPA1*01:03-B1*03:01L HLA-DPA1*03:01-B1*04:02L
  REGION 1..12: note = CONT. FROM ABOVE: HLA-DRB1*14:01L HLA-DRB1*11:03L HLA-DRB1*11:04 L HLA-DRB1*14:02L HLA-DRB1*11:01L HLA-DQA1*05:05-B1*03:19L HLA-D QA1*05:01-B1*02:01L HLA-DPA1*01:03-B1*04:02L HLA-DRB3*01:01L HLA -DPA1*02:01-B1*13:01L HLA-DPA1*01:03-B1*104:01L
  REGION 1..12: note = CONT. FROM ABOVE: HLA-DQA1*05:05-B1*03:01L HLA-DRB1*07:01L HLA-D RB1*10:01L HLA-DQA1*01:03-B1*06:01L HLA-DRB1*08:03L HLA-DRB1*15: 01L
WKFYDAQPCSDK

SEQ ID NO: 9710 - protein, 10 aa, Severe acute respiratory syndrome coronavirus 2
  REGION 1..10: note = Table B: HLA-DQA1*03:02-B1*03:03L HLA-DQA1*01-B1*05L HLA-DQA1*03:01-B1*03:02L
SDKAYKIEEL

SEQ ID NO: 9711 - protein, 13 aa, Severe acute respiratory syndrome coronavirus 2
  REGION 1..13: note = Table B: HLA-DQA1*03:02-B1*03:03L HLA-DRB1*01:02L HLA-DQA1*05:05-B1*03:01L HLA-DRB1*04:08L
DKAYKIEELFYSY

SEQ ID NO: 9712 - protein, 12 aa, Severe acute respiratory syndrome coronavirus 2
  REGION 1..12: note = Table B: HLA-DQA1*03:02-B1*03:03L HLA-DRB1*04:03L HLA-DRB1*04:02L HLA-DQA1*05:01-B1*02:01L HLA-DRB1*16:01L HLA-DQA1*02:01-B1*03:03L HLA-DRB1*15:03L
EELFYSYATHSD

SEQ ID NO: 9713 - protein, 10 aa, Severe acute respiratory syndrome coronavirus 2
  REGION 1..10: note = Table B: HLA-DQA1*03:02-B1*03:03L HLA-DQA1*05:01-B1*03:01L HLA-DRB1*04:03L HLA-DRB1*13:03L HLA-DRB1*01:03L HLA-DRB1*04:02L HLA-DRB1*04:04L HLA-DRB1*04:05L HLA-DQA1*01:02-B1*06:02L HLA-DRB1*01:02L HLA-DRB4*03:01NL HLA-DQA1*01:01-B1*05:01L
  REGION 1..10: note = CONT. FROM ABOVE: HLA-DRB1*08:01L HLA-DQA1*01-B1*05L HLA-DQA1*05 :01-B1*02:01L HLA-DRB1*04:10L HLA-DRB1*12:01L HLA-DPA1*03:01-B1* 105:01L HLA-DQA1*03:01-B1*03:02L HLA-DRB1*14:54L HLA-DRB1*14:17L HLA-DPA1*01:02-B1*04:01L HLA-DRB1*10:01L HLA-DRB1*16:01L
  REGION 1..10: note = CONT. FROM ABOVE: HLA-DQA1*01:03-B1*06:01L HLA-DRB1*04:08L HLA-D RB1*08:03L HLA-DQA1*02:01-B1*03:03L HLA-DRB1*15:03L
FYSYATHSDK

SEQ ID NO: 9714 - protein, 10 aa, Severe acute respiratory syndrome coronavirus 2
  REGION 1..10: note = Table B: HLA-DQA1*03:02-B1*03:03L HLA-DQA1*05:01-B1*03:01L HLA-DRB1*04:03L HLA-DRB1*01:03L HLA-DRB1*04:05L HLA-DQA1*01:02-B1*06:02L HLA-DRB1*01:01L HLA-DRB1*01:02L HLA-DRB1*08:77L HLA-DRB1*14:02L HLA-DQA1*01:01-B1*05:01L
  REGION 1..10: note = CONT. FROM ABOVE: HLA-DQA1*05:05-B1*03:19L HLA-DQA1*05:01-B1*02: 01L HLA-DPA1*01:03-B1*04:01L HLA-DPA1*02:01-B1*13:01L HLA-DPA1*0 3:01-B1*105:01L HLA-DRB1*16:01L HLA-DQA1*01:03-B1*06:01M HLA-DQA 1*02:01-B1*03:03L HLA-DRB1*15:03L
YSYATHSDKF

SEQ ID NO: 9715 - protein, 11 aa, Severe acute respiratory syndrome coronavirus 2
  REGION 1..11: note = Table B: HLA-DQA1*03:02-B1*03:03L HLA-DRB1*04:03L HLA-DRB1*13:03L HLA-DRB1*01:03L HLA-DRB1*04:02L HLA-DRB1*04:05L HLA-DQA1*01-B1*05L HLA-DQA1*05:01-B1*02:01L HLA-DRB1*14:17L HLA-DPA1*01:02-B1*04:01L HLA-DRB1*16:01L
  REGION 1..11: note = CONT. FROM ABOVE: HLA-DQA1*01:03-B1*06:01L HLA-DQA1*02:01-B1*03: 03L
YATHSDKFTDG

SEQ ID NO: 9716 - protein, 10 aa, Severe acute respiratory syndrome coronavirus 2
  REGION 1..10: note = Table B: HLA-DQA1*03:02-B1*03:03L HLA-DQA1*05:05-B1*03:19L HLA-DQA1*03:01-B1*03:02L HLA-DPA1*01:03-B1*104:01L HLA-DRB1*16:01L HLA-DQA1*02:01-B1*03:03L
NVDRYPANSI

SEQ ID NO: 9717 - protein, 10 aa, Severe acute respiratory syndrome coronavirus 2
  REGION 1..10: note = Table B: HLA-DQA1*03:02-B1*03:03L HLA-DQA1*05:01-B1*03:01L HLA-DRB1*04:03L HLA-DRB1*13:03L HLA-DRB1*01:03L HLA-DRB1*04:02L HLA-DQA1*01:02-B1*06:02L HLA-DRB1*01:02L HLA-DRB4*03:01NL HLA-DPA1*01:03-B1*03:01L HLA-DPA1*03:01-B1*04:02L
  REGION 1..10: note = CONT. FROM ABOVE: HLA-DRB1*14:01L HLA-DQA1*01-B1*05L HLA-DQA1*05 :05-B1*03:19L HLA-DQA1*05:01-B1*02:01L HLA-DQA1*05:05-B1*03:116L HLA-DRB1*12:01L HLA-DPA1*02:01-B1*13:01L HLA-DPA1*03:01-B1*105:0 1L HLA-DQA1*03:01-B1*03:02L HLA-DPA1*01:03-B1*104:01L
  REGION 1..10: note = CONT. FROM ABOVE: HLA-DRB1*14:17L HLA-DPA1*01:02-B1*04:01L HLA-D RB1*16:01L HLA-DQA1*01:03-B1*06:01L HLA-DQA1*02:01-B1*03:03L HLA -DRB1*15:03L
VDRYPANSIV

SEQ ID NO: 9718 - protein, 10 aa, Severe acute respiratory syndrome coronavirus 2
  REGION 1..10: note = Table B: HLA-DQA1*03:02-B1*03:03L HLA-DRB1*01:03L HLA-DQA1*03:01-B1*03:02L HLA-DPA1*01:02-B1*04:01L HLA-DRB1*16:01L HLA-DQA1*01:03-B1*06:01L HLA-DQA1*02:01-B1*03:03L
RFDTRVLSNL

SEQ ID NO: 9719 - protein, 12 aa, Severe acute respiratory syndrome coronavirus 2
  REGION 1..12: note = Table B: HLA-DQA1*03:02-B1*03:03L HLA-DRB1*13:03L HLA-DRB1*01:03L HLA-DRB1*04:05L HLA-DQA1*01-B1*05L HLA-DQA1*05:01-B1*02:01L HLA-DRB1*04:10L HLA-DRB1*12:01L HLA-DRB1*14:54L HLA-DRB1*16:01L HLA-DQA1*02:01-B1*03:03L
DTRVLSNLNLPG

SEQ ID NO: 9720 - protein, 15 aa, Severe acute respiratory syndrome coronavirus 2
  REGION 1..15: note = Table B: HLA-DQA1*03:02-B1*03:03L HLA-DQA1*05:05-B1*03:19L HLA-DPA1*03:01-B1*105:01L HLA-DRB1*04:08L
LPGCDGGSLYVNKHA

SEQ ID NO: 9721 - protein, 16 aa, Severe acute respiratory syndrome coronavirus 2
  REGION 1..16: note = Table B: HLA-DQA1*03:02-B1*03:03L HLA-DRB1*08:77L HLA-DRB3*02:01L HLA-DQA1*05:01-B1*02:01L HLA-DRB1*12:02L
DGGSLYVNKHAFHTPA

SEQ ID NO: 9722 - protein, 13 aa, Severe acute respiratory syndrome coronavirus 2
  REGION 1..13: note = Table B: HLA-DQA1*03:02-B1*03:03L HLA-DQA1*05:01-B1*03:01L HLA-DPA1*01:03-B1*03:01L HLA-DRB1*14:01L HLA-DRB1*08:01L HLA-DQA1*01-B1*05L HLA-DPA1*03:01-B1*105:01L HLA-DQA1*05:05-B1*03:01L HLA-DQA1*01:03-B1*06:01L
  REGION 1..13: note = CONT. FROM ABOVE: HLA-DRB1*15:03L
YVNKHAFHTPAFD

SEQ ID NO: 9723 - protein, 15 aa, Severe acute respiratory syndrome coronavirus 2
  REGION 1..15: note = Table B: HLA-DQA1*03:02-B1*03:03L HLA-DRB1*04:03L HLA-DPA1*03:01-B1*04:02L HLA-DPA1*01:03-B1*04:01L
VNKHAFHTPAFDKSA

SEQ ID NO: 9724 - protein, 11 aa, Severe acute respiratory syndrome coronavirus 2
  REGION 1..11: note = Table B: HLA-DQA1*03:02-B1*03:03L HLA-DRB1*04:03L HLA-DQA1*05:01-B1*02:01L HLA-DQA1*03:01-B1*03:02L HLA-DQA1*02:01-B1*03:03L
TPAFDKSAFVN

SEQ ID NO: 9725 - protein, 10 aa, Severe acute respiratory syndrome coronavirus 2
  REGION 1..10: note = Table B: HLA-DQA1*03:02-B1*03:03L HLA-DQA1*05:01-B1*03:01L HLA-DPA1*03:01-B1*04:02L HLA-DQA1*05:01-B1*02:01L HLA-DPA1*01:03-B1*04:01L HLA-DPA1*03:01-B1*105:01L HLA-DQA1*03:01-B1*03:02L HLA-DPA1*01:02-B1*04:01L
  REGION 1..10: note = CONT. FROM ABOVE: HLA-DRB1*16:01L HLA-DQA1*01:03-B1*06:01L HLA-D QA1*02:01-B1*03:03L HLA-DRB1*15:03L
AFDKSAFVNL

SEQ ID NO: 9726 - protein, 10 aa, Severe acute respiratory syndrome coronavirus 2
  REGION 1..10: note = Table B: HLA-DQA1*03:02-B1*03:03L HLA-DQA1*05:01-B1*03:01L HLA-DRB1*04:03L HLA-DRB1*13:02L HLA-DRB1*13:03L HLA-DRB1*01:03L HLA-DRB1*04:02L HLA-DRB1*04:05L HLA-DQA1*01:02-B1*06:02L HLA-DRB1*01:01L HLA-DRB1*01:02L HLA-DRB4*03:01NL HLA-DRB1*08:04L
  REGION 1..10: note = CONT. FROM ABOVE: HLA-DRB1*08:77L HLA-DRB3*02:01L HLA-DPA1*01:03 -B1*03:01L HLA-DPA1*03:01-B1*04:02L HLA-DRB1*14:01L HLA-DRB1*11: 03L HLA-DRB1*14:02L HLA-DQA1*01:01-B1*05:01L HLA-DRB1*08:01L HLA -DRB1*11:01L HLA-DQA1*01-B1*05L HLA-DQA1*05:05-B1*03:19L
  REGION 1..10: note = CONT. FROM ABOVE: HLA-DQA1*05:01-B1*02:01L HLA-DRB4*01:01L HLA-D PA1*01:03-B1*04:01L HLA-DRB1*09:01L HLA-DPA1*01:03-B1*04:02L HLA -DRB1*12:01M HLA-DRB1*12:02L HLA-DPA1*02:01-B1*13:01L HLA-DPA1*0 3:01-B1*105:01L HLA-DQA1*03:01-B1*03:02L HLA-DRB1*14:54L
  REGION 1..10: note = CONT. FROM ABOVE: HLA-DPA1*01:03-B1*104:01L HLA-DQA1*05:05-B1*03 :01L HLA-DPA1*01:02-B1*04:01L HLA-DRB1*07:01L HLA-DRB1*10:01L HL A-DRB1*16:01L HLA-DQA1*01:03-B1*06:01M HLA-DRB1*04:08L HLA-DRB1* 08:03L HLA-DQA1*02:01-B1*03:03L HLA-DRB1*15:03M
AFVNLKQLPF

SEQ ID NO: 9727 - protein, 15 aa, Severe acute respiratory syndrome coronavirus 2
  REGION 1..15: note = Table B: HLA-DQA1*03:02-B1*03:03L HLA-DRB1*04:03L HLA-DRB1*13:02L HLA-DRB1*01:03L HLA-DRB1*04:05L HLA-DRB1*08:04L HLA-DRB3*02:01L HLA-DRB1*08:01L HLA-DQA1*01-B1*05L HLA-DPA1*02:01-B1*13:01L HLA-DQA1*03:01-B1*03:02L
  REGION 1..15: note = CONT. FROM ABOVE: HLA-DQA1*05:05-B1*03:01L HLA-DQA1*01:03-B1*06: 01L HLA-DRB1*04:08L
VNLKQLPFFYYSDSP

SEQ ID NO: 9728 - protein, 14 aa, Severe acute respiratory syndrome coronavirus 2
  REGION 1..14: note = Table B: HLA-DQA1*03:02-B1*03:03L HLA-DQA1*05:01-B1*03:01L HLA-DRB1*04:01L HLA-DRB1*13:02L HLA-DRB1*13:03L HLA-DRB1*08:04L HLA-DRB3*02:01L HLA-DPA1*01:03-B1*03:01L HLA-DRB1*11:04L HLA-DRB1*14:02L HLA-DRB1*08:01L HLA-DQA1*05:05-B1*03:19L
  REGION 1..14: note = CONT. FROM ABOVE: HLA-DPA1*01:03-B1*04:02L HLA-DRB3*01:01L HLA-D PA1*02:01-B1*13:01L HLA-DQA1*03:01-B1*03:02L HLA-DQA1*05:05-B1*0 3:01L HLA-DPA1*01:02-B1*04:01L HLA-DRB1*08:03L HLA-DQA1*02:01-B1 *03:03L
LPFFYYSDSPCESH

SEQ ID NO: 9729 - protein, 12 aa, Severe acute respiratory syndrome coronavirus 2
  REGION 1..12: note = Table B: HLA-DQA1*03:02-B1*03:03L HLA-DQA1*05:01-B1*03:01L HLA-DQA1*01:02-B1*06:02L HLA-DQA1*01:01-B1*05:01L HLA-DQA1*05:05-B1*03:19L HLA-DQA1*05:01-B1*02:01L HLA-DQA1*05:05-B1*03:01L HLA-DQA1*01:03-B1*06:01L
  REGION 1..12: note = CONT. FROM ABOVE: HLA-DQA1*02:01-B1*03:03L
ESHGKQVVSDID

SEQ ID NO: 9730 - protein, 12 aa, Severe acute respiratory syndrome coronavirus 2
  REGION 1..12: note = Table B: HLA-DQA1*03:02-B1*03:03L HLA-DRB1*04:03L HLA-DRB1*04:02L HLA-DRB1*04:05L HLA-DRB1*14:01L HLA-DQA1*01-B1*05L HLA-DQA1*05:01-B1*02:01L HLA-DQA1*03:01-B1*03:02L HLA-DRB1*14:54L HLA-DRB1*14:17L
  REGION 1..12: note = CONT. FROM ABOVE: HLA-DRB1*16:01L HLA-DRB1*15:03L
KQVVSDIDYVPL

SEQ ID NO: 9731 - protein, 10 aa, Severe acute respiratory syndrome coronavirus 2
  REGION 1..10: note = Table B: HLA-DQA1*03:02-B1*03:03L HLA-DRB1*04:03L HLA-DQA1*01-B1*05L HLA-DQA1*05:01-B1*02:01L HLA-DQA1*03:01-B1*03:02L HLA-DQA1*01:03-B1*06:01L HLA-DQA1*02:01-B1*03:03L
VSDIDYVPLK

SEQ ID NO: 9732 - protein, 10 aa, Severe acute respiratory syndrome coronavirus 2
  REGION 1..10: note = Table B: HLA-DQA1*03:02-B1*03:03L HLA-DQA1*03:01-B1*03:02L
SDIDYVPLKS

SEQ ID NO: 9733 - protein, 10 aa, Severe acute respiratory syndrome coronavirus 2
  REGION 1..10: note = Table B: HLA-DQA1*03:02-B1*03:03L HLA-DRB1*04:03L HLA-DRB1*04:02L HLA-DQA1*01-B1*05L HLA-DQA1*03:01-B1*03:02L HLA-DRB1*14:17L HLA-DPA1*01:02-B1*04:01L HLA-DQA1*02:01-B1*03:03L
IDYVPLKSAT

SEQ ID NO: 9734 - protein, 10 aa, Severe acute respiratory syndrome coronavirus 2
  REGION 1..10: note = Table B: HLA-DQA1*03:02-B1*03:03L HLA-DQA1*05:01-B1*03:01M HLA-DRB1*01:03L HLA-DQA1*01:02-B1*06:02L HLA-DRB4*03:01NL HLA-DRB1*08:77M HLA-DPA1*01:03-B1*03:01L HLA-DPA1*03:01-B1*04:02L HLA-DRB1*03:01L HLA-DRB1*11:02L
  REGION 1..10: note = CONT. FROM ABOVE: HLA-DRB1*14:02L HLA-DQA1*01-B1*05L HLA-DQA1*05 :05-B1*03:19M HLA-DQA1*05:01-B1*02:01L HLA-DRB4*01:01M HLA-DPA1* 01:03-B1*04:01M HLA-DQA1*05:05-B1*03:116L HLA-DPA1*01:03-B1*04:0 2L HLA-DRB1*12:01L HLA-DQA1*03:01-B1*03:02L
  REGION 1..10: note = CONT. FROM ABOVE: HLA-DPA1*01:03-B1*104:01L HLA-DPA1*01:02-B1*04 :01L HLA-DRB1*10:01L HLA-DRB1*16:01L HLA-DRB1*08:02L HLA-DQA1*02 :01-B1*03:03L HLA-DRB1*15:03L
NEYRLYLDAY

SEQ ID NO: 9735 - protein, 10 aa, Severe acute respiratory syndrome coronavirus 2
  REGION 1..10: note = Table B: HLA-DQA1*03:02-B1*03:03L HLA-DQA1*01:02-B1*06:02L HLA-DPA1*03:01-B1*04:02L HLA-DQA1*01-B1*05L HLA-DQA1*05:01-B1*02:01L HLA-DPA1*01:03-B1*04:01L HLA-DRB1*12:01L HLA-DPA1*02:01-B1*13:01L
  REGION 1..10: note = CONT. FROM ABOVE: HLA-DPA1*03:01-B1*105:01L HLA-DPA1*01:02-B1*04 :01L HLA-DRB1*16:01L HLA-DQA1*01:03-B1*06:01L HLA-DQA1*02:01-B1* 03:03L HLA-DRB1*15:03L
RLYLDAYNMM

SEQ ID NO: 9736 - protein, 13 aa, Severe acute respiratory syndrome coronavirus 2
  REGION 1..13: note = Table B: HLA-DQA1*03:02-B1*03:03L HLA-DQA1*01:02-B1*06:02L HLA-DPA1*01:03-B1*03:01L HLA-DPA1*03:01-B1*04:02L HLA-DQA1*05:05-B1*03:19L HLA-DPA1*01:03-B1*04:02L HLA-DRB1*12:01L HLA-DQA1*05:05-B1*03:01L
  REGION 1..13: note = CONT. FROM ABOVE: HLA-DPA1*01:02-B1*04:01L HLA-DRB1*16:01L HLA-D QA1*01:03-B1*06:01L HLA-DRB1*15:03L
LYLDAYNMMISAG

SEQ ID NO: 9737 - protein, 12 aa, Severe acute respiratory syndrome coronavirus 2
  REGION 1..12: note = Table B: HLA-DQA1*03:02-B1*03:03L HLA-DQA1*05:01-B1*03:01L HLA-DRB1*13:02L HLA-DRB1*01:02L HLA-DQA1*05:05-B1*03:19L HLA-DQA1*05:01-B1*02:01L HLA-DQA1*05:05-B1*03:01L HLA-DRB1*14:17L
DAYNMMISAGFS

SEQ ID NO: 9738 - protein, 11 aa, Severe acute respiratory syndrome coronavirus 2
  REGION 1..11: note = Table B: HLA-DQA1*03:02-B1*03:03L HLA-DQA1*05:01-B1*03:01L HLA-DPA1*03:01-B1*105:01L HLA-DQA1*03:01-B1*03:02L HLA-DQA1*05:05-B1*03:01L HLA-DQA1*02:01-B1*03:03L
ISAGFSLWVYK

SEQ ID NO: 9739 - protein, 10 aa, Severe acute respiratory syndrome coronavirus 2
  REGION 1..10: note = Table B: HLA-DQA1*03:02-B1*03:03L HLA-DQA1*05:01-B1*03:01L HLA-DRB1*04:03L HLA-DRB1*01:03L HLA-DQA1*01:02-B1*06:02L HLA-DRB1*01:02L HLA-DPA1*01:03-B1*03:01L HLA-DPA1*03:01-B1*04:02M HLA-DRB1*14:01L HLA-DRB1*08:01L
  REGION 1..10: note = CONT. FROM ABOVE: HLA-DQA1*01-B1*05L HLA-DQA1*05:01-B1*02:01L HL A-DPA1*01:03-B1*04:01L HLA-DPA1*01:03-B1*04:02L HLA-DRB1*12:01L HLA-DPA1*03:01-B1*105:01M HLA-DQA1*03:01-B1*03:02L HLA-DPA1*01:0 3-B1*02:01L HLA-DPA1*01:02-B1*04:01M HLA-DRB1*16:01L
  REGION 1..10: note = CONT. FROM ABOVE: HLA-DQA1*01:03-B1*06:01L HLA-DRB1*04:08L HLA-D QA1*02:01-B1*03:03L HLA-DRB1*15:03L
WVYKQFDTYN

SEQ ID NO: 9740 - protein, 12 aa, Severe acute respiratory syndrome coronavirus 2
  REGION 1..12: note = Table B: HLA-DQA1*03:02-B1*03:03L HLA-DQA1*01:02-B1*06:02L HLA-DPA1*03:01-B1*04:02L HLA-DQA1*05:01-B1*02:01L HLA-DPA1*01:03-B1*04:01L HLA-DPA1*01:03-B1*04:02L HLA-DPA1*03:01-B1*105:01L HLA-DPA1*01:02-B1*04:01L
  REGION 1..12: note = CONT. FROM ABOVE: HLA-DRB1*16:01L HLA-DRB1*15:03L
KQFDTYNLWNTF

SEQ ID NO: 9741 - protein, 10 aa, Severe acute respiratory syndrome coronavirus 2
  REGION 1..10: note = Table B: HLA-DQA1*03:02-B1*03:03L HLA-DPA1*03:01-B1*04:02L HLA-DQA1*05:05-B1*03:19L HLA-DPA1*01:02-B1*04:01L HLA-DQA1*01:03-B1*06:01L HLA-DQA1*02:01-B1*03:03L HLA-DRB1*15:03L
YNLWNTFTRL

SEQ ID NO: 9742 - protein, 10 aa, Severe acute respiratory syndrome coronavirus 2
  REGION 1..10: note = Table B: HLA-DQA1*03:02-B1*03:03L HLA-DQA1*05:01-B1*03:01L HLA-DRB1*04:03L HLA-DRB1*01:03L HLA-DRB1*04:05L HLA-DQA1*01:02-B1*06:02L HLA-DRB1*01:02L HLA-DQA1*01-B1*05L HLA-DRB1*12:01L HLA-DPA1*03:01-B1*105:01L
  REGION 1..10: note = CONT. FROM ABOVE: HLA-DQA1*03:01-B1*03:02L HLA-DRB1*14:17L HLA-D PA1*01:02-B1*04:01L HLA-DRB1*16:01L HLA-DQA1*01:03-B1*06:01L HLA -DRB1*04:08L HLA-DQA1*02:01-B1*03:03L
TFTRLQSLEN

SEQ ID NO: 9743 - protein, 10 aa, Severe acute respiratory syndrome coronavirus 2
  REGION 1..10: note = Table B: HLA-DQA1*03:02-B1*03:03L HLA-DQA1*05:01-B1*03:01L HLA-DRB1*04:01L HLA-DRB1*04:03L HLA-DRB1*13:02L HLA-DRB1*13:03L HLA-DRB1*01:03M HLA-DRB1*04:05L HLA-DQA1*01:02-B1*06:02M HLA-DRB1*01:01L HLA-DRB1*01:02L HLA-DRB1*08:77L
  REGION 1..10: note = CONT. FROM ABOVE: HLA-DPA1*01:03-B1*03:01L HLA-DPA1*03:01-B1*04: 02L HLA-DRB1*03:01L HLA-DRB1*14:01L HLA-DRB1*11:03L HLA-DRB1*14: 02M HLA-DQA1*01:01-B1*05:01L HLA-DRB1*11:01L HLA-DQA1*01-B1*05L HLA-DQA1*05:05-B1*03:19L HLA-DQA1*05:01-B1*02:01L
  REGION 1..10: note = CONT. FROM ABOVE: HLA-DRB4*01:01L HLA-DPA1*01:03-B1*04:01L HLA-D QA1*05:05-B1*03:116L HLA-DPA1*01:03-B1*04:02L HLA-DRB1*12:01L HL A-DPA1*02:01-B1*13:01M HLA-DPA1*03:01-B1*105:01L HLA-DQA1*03:01- B1*03:02L HLA-DPA1*01:03-B1*104:01L HLA-DPA1*01:02-B1*04:01L
  REGION 1..10: note = CONT. FROM ABOVE: HLA-DRB1*07:01L HLA-DRB1*10:01L HLA-DRB1*16:01 L HLA-DQA1*01:03-B1*06:01M HLA-DRB1*08:02L HLA-DQA1*02:01-B1*03: 03M HLA-DRB1*15:03L
RLQSLENVAF

SEQ ID NO: 9744 - protein, 10 aa, Severe acute respiratory syndrome coronavirus 2
  REGION 1..10: note = Table B: HLA-DQA1*03:02-B1*03:03L HLA-DQA1*05:05-B1*03:19L
SLENVAFNVV

SEQ ID NO: 9745 - protein, 10 aa, Severe acute respiratory syndrome coronavirus 2
  REGION 1..10: note = Table B: HLA-DQA1*03:02-B1*03:03L HLA-DPA1*03:01-B1*04:02L HLA-DQA1*01-B1*05L HLA-DQA1*05:01-B1*02:01L HLA-DPA1*01:03-B1*04:01L HLA-DPA1*01:03-B1*04:02L HLA-DPA1*03:01-B1*105:01L HLA-DPA1*01:02-B1*04:01L
  REGION 1..10: note = CONT. FROM ABOVE: HLA-DRB1*16:01L HLA-DQA1*01:03-B1*06:01L
LENVAFNVVN

SEQ ID NO: 9746 - protein, 11 aa, Severe acute respiratory syndrome coronavirus 2
  REGION 1..11: note = Table B: HLA-DQA1*03:02-B1*03:03L HLA-DQA1*05:01-B1*03:01L HLA-DRB1*04:02L HLA-DRB1*14:17L HLA-DPA1*01:02-B1*04:01L
ENVAFNVVNKG

SEQ ID NO: 9747 - protein, 12 aa, Severe acute respiratory syndrome coronavirus 2
  REGION 1..12: note = Table B: HLA-DQA1*03:02-B1*03:03L HLA-DRB1*13:02L HLA-DRB1*04:05L HLA-DRB1*01:02L HLA-DRB4*03:01NL HLA-DRB3*02:01L HLA-DPA1*01:03-B1*03:01L HLA-DRB1*11:03L HLA-DRB1*11:04L HLA-DRB1*11:01L HLA-DQA1*05:01-B1*02:01L
  REGION 1..12: note = CONT. FROM ABOVE: HLA-DQA1*05:05-B1*03:116L HLA-DPA1*01:03-B1*04 :02L HLA-DRB1*12:02L HLA-DRB3*01:01L HLA-DQA1*05:05-B1*03:01L HL A-DRB1*14:17L HLA-DRB1*04:08L HLA-DRB1*08:02L HLA-DRB1*08:03L
VAFNVVNKGHFD

SEQ ID NO: 9748 - protein, 10 aa, Severe acute respiratory syndrome coronavirus 2
  REGION 1..10: note = Table B: HLA-DQA1*03:02-B1*03:03L
GHFDGQQGEV

SEQ ID NO: 9749 - protein, 12 aa, Severe acute respiratory syndrome coronavirus 2
  REGION 1..12: note = Table B: HLA-DQA1*03:02-B1*03:03L HLA-DQA1*05:01-B1*03:01L HLA-DQA1*05:05-B1*03:19L HLA-DQA1*05:05-B1*03:01L HLA-DQA1*02:01-B1*03:03L
HFDGQQGEVPVS

SEQ ID NO: 9750 - protein, 10 aa, Severe acute respiratory syndrome coronavirus 2
  REGION 1..10: note = Table B: HLA-DQA1*03:02-B1*03:03M HLA-DQA1*05:01-B1*03:01L HLA-DQA1*01:02-B1*06:02L HLA-DPA1*03:01-B1*04:02L HLA-DRB1*14:01L HLA-DRB1*11:02L HLA-DRB1*14:02L HLA-DQA1*05:05-B1*03:19M HLA-DQA1*05:05-B1*03:116L
  REGION 1..10: note = CONT. FROM ABOVE: HLA-DRB1*09:01L HLA-DPA1*02:01-B1*13:01L HLA-D PA1*03:01-B1*105:01L HLA-DQA1*03:01-B1*03:02L HLA-DPA1*01:03-B1* 104:01L HLA-DPA1*01:02-B1*04:01L HLA-DRB1*10:01L HLA-DRB1*16:01L HLA-DQA1*01:03-B1*06:01L HLA-DRB1*08:03L
  REGION 1..10: note = CONT. FROM ABOVE: HLA-DQA1*02:01-B1*03:03L HLA-DRB1*15:03L
GQQGEVPVSI

SEQ ID NO: 9751 - protein, 10 aa, Severe acute respiratory syndrome coronavirus 2
  REGION 1..10: note = Table B: HLA-DQA1*03:02-B1*03:03L HLA-DQA1*03:01-B1*03:02L
GEVPVSIINN

SEQ ID NO: 9752 - protein, 10 aa, Severe acute respiratory syndrome coronavirus 2
  REGION 1..10: note = Table B: HLA-DQA1*03:02-B1*03:03L HLA-DQA1*05:01-B1*03:01L HLA-DRB1*13:03L HLA-DRB1*04:05L HLA-DQA1*01:02-B1*06:02L HLA-DRB1*01:01L HLA-DRB1*01:02L HLA-DPA1*03:01-B1*04:02L HLA-DRB1*14:01L HLA-DRB1*08:01L HLA-DQA1*01-B1*05L
  REGION 1..10: note = CONT. FROM ABOVE: HLA-DQA1*05:01-B1*02:01L HLA-DQA1*05:05-B1*03: 116M HLA-DPA1*02:01-B1*13:01L HLA-DPA1*03:01-B1*105:01L HLA-DQA1 *03:01-B1*03:02L HLA-DPA1*01:02-B1*04:01L HLA-DRB1*16:01L HLA-DR B1*08:03L HLA-DQA1*02:01-B1*03:03L HLA-DRB1*15:03L
VPVSIINNTV

SEQ ID NO: 9753 - protein, 10 aa, Severe acute respiratory syndrome coronavirus 2
  REGION 1..10: note = Table B: HLA-DQA1*03:02-B1*03:03L HLA-DQA1*05:05-B1*03:19L HLA-DQA1*03:01-B1*03:02L HLA-DQA1*01:03-B1*06:01L HLA-DQA1*02:01-B1*03:03L HLA-DRB1*15:03L
IINNTVYTKV

SEQ ID NO: 9754 - protein, 10 aa, Severe acute respiratory syndrome coronavirus 2
  REGION 1..10: note = Table B: HLA-DQA1*03:02-B1*03:03L HLA-DQA1*05:01-B1*03:01L HLA-DRB1*04:03L HLA-DRB1*04:02L HLA-DQA1*01:02-B1*06:02L HLA-DQA1*01-B1*05L HLA-DQA1*05:01-B1*02:01L HLA-DPA1*03:01-B1*105:01L HLA-DQA1*03:01-B1*03:02L
  REGION 1..10: note = CONT. FROM ABOVE: HLA-DPA1*01:02-B1*04:01L HLA-DRB1*16:01L HLA-D QA1*01:03-B1*06:01L HLA-DQA1*02:01-B1*03:03L
TVYTKVDGVD

SEQ ID NO: 9755 - protein, 10 aa, Severe acute respiratory syndrome coronavirus 2
  REGION 1..10: note = Table B: HLA-DQA1*03:02-B1*03:03L HLA-DQA1*01-B1*05L HLA-DQA1*03:01-B1*03:02L HLA-DPA1*01:02-B1*04:01L HLA-DRB1*16:01L HLA-DQA1*01:03-B1*06:01L HLA-DQA1*02:01-B1*03:03L
VYTKVDGVDV

SEQ ID NO: 9756 - protein, 10 aa, Severe acute respiratory syndrome coronavirus 2
  REGION 1..10: note = Table B: HLA-DQA1*03:02-B1*03:03L HLA-DQA1*05:01-B1*03:01L HLA-DRB1*04:03L HLA-DRB1*13:03L HLA-DRB1*04:02L HLA-DRB1*04:05L HLA-DRB4*03:01NL HLA-DQA1*01-B1*05L HLA-DQA1*05:01-B1*02:01L HLA-DRB1*04:10L HLA-DRB1*12:01L HLA-DQA1*03:01-B1*03:02L
  REGION 1..10: note = CONT. FROM ABOVE: HLA-DRB1*14:54L HLA-DRB1*14:17L HLA-DRB1*16:01 L HLA-DQA1*02:01-B1*03:03L
YTKVDGVDVE

SEQ ID NO: 9757 - protein, 10 aa, Severe acute respiratory syndrome coronavirus 2
  REGION 1..10: note = Table B: HLA-DQA1*03:02-B1*03:03L HLA-DQA1*05:01-B1*03:01L HLA-DRB1*13:03L HLA-DRB1*04:02L HLA-DPA1*03:01-B1*04:02L HLA-DRB1*14:01L HLA-DRB1*08:01L HLA-DQA1*01-B1*05L HLA-DQA1*05:01-B1*02:01L HLA-DQA1*05:05-B1*03:116L
  REGION 1..10: note = CONT. FROM ABOVE: HLA-DQA1*03:01-B1*03:02L HLA-DPA1*01:02-B1*04: 01L HLA-DRB1*16:01L HLA-DQA1*02:01-B1*03:03L
TKVDGVDVEL

SEQ ID NO: 9758 - protein, 10 aa, Severe acute respiratory syndrome coronavirus 2
  REGION 1..10: note = Table B: HLA-DQA1*03:02-B1*03:03L HLA-DQA1*05:01-B1*03:01L HLA-DRB1*13:03L HLA-DRB1*01:03L HLA-DQA1*01:02-B1*06:02L HLA-DRB1*08:77L HLA-DPA1*01:03-B1*03:01L HLA-DPA1*03:01-B1*04:02L HLA-DRB1*03:01L HLA-DRB1*14:01L
  REGION 1..10: note = CONT. FROM ABOVE: HLA-DRB1*14:02L HLA-DQA1*01-B1*05L HLA-DQA1*05 :05-B1*03:19L HLA-DQA1*05:01-B1*02:01L HLA-DRB4*01:01L HLA-DPA1* 01:03-B1*04:01L HLA-DQA1*05:05-B1*03:116L HLA-DPA1*01:03-B1*04:0 2L HLA-DPA1*02:01-B1*13:01L HLA-DPA1*03:01-B1*105:01L
  REGION 1..10: note = CONT. FROM ABOVE: HLA-DQA1*03:01-B1*03:02L HLA-DPA1*01:03-B1*104 :01L HLA-DPA1*01:02-B1*04:01L HLA-DRB1*16:01L HLA-DQA1*01:03-B1* 06:01L HLA-DRB1*08:02L HLA-DQA1*02:01-B1*03:03L HLA-DRB1*15:03L
KVDGVDVELF

SEQ ID NO: 9759 - protein, 12 aa, Severe acute respiratory syndrome coronavirus 2
  REGION 1..12: note = Table B: HLA-DQA1*03:02-B1*03:03L HLA-DQA1*05:01-B1*03:01L HLA-DRB1*04:03L HLA-DQA1*01:02-B1*06:02L HLA-DQA1*01:01-B1*05:01L HLA-DQA1*01-B1*05L HLA-DQA1*05:01-B1*02:01L HLA-DPA1*03:01-B1*105:01L
  REGION 1..12: note = CONT. FROM ABOVE: HLA-DQA1*05:05-B1*03:01L HLA-DPA1*01:02-B1*04: 01L HLA-DRB1*16:01L
VDGVDVELFENK

SEQ ID NO: 9760 - protein, 11 aa, Severe acute respiratory syndrome coronavirus 2
  REGION 1..11: note = Table B: HLA-DQA1*03:02-B1*03:03L HLA-DRB1*04:03L HLA-DRB1*04:02L HLA-DPA1*03:01-B1*04:02L HLA-DQA1*05:01-B1*02:01L HLA-DPA1*03:01-B1*105:01L HLA-DQA1*03:01-B1*03:02L HLA-DRB1*14:17L
  REGION 1..11: note = CONT. FROM ABOVE: HLA-DPA1*01:02-B1*04:01L HLA-DRB1*16:01L HLA-D QA1*01:03-B1*06:01L HLA-DQA1*02:01-B1*03:03L
VDVELFENKTT

SEQ ID NO: 9761 - protein, 10 aa, Severe acute respiratory syndrome coronavirus 2
  REGION 1..10: note = Table B: HLA-DQA1*03:02-B1*03:03M HLA-DQA1*05:05-B1*03:19L HLA-DQA1*05:05-B1*03:116L HLA-DRB1*09:01L HLA-DQA1*03:01-B1*03:02L HLA-DPA1*01:03-B1*104:01L
VELFENKTTL

SEQ ID NO: 9762 - protein, 10 aa, Severe acute respiratory syndrome coronavirus 2
  REGION 1..10: note = Table B: HLA-DQA1*03:02-B1*03:03L HLA-DQA1*05:01-B1*03:01L HLA-DRB1*04:03L HLA-DRB1*13:02L HLA-DRB1*13:03L HLA-DRB1*01:03L HLA-DRB1*04:02L HLA-DRB1*04:05L HLA-DQA1*01:02-B1*06:02L HLA-DRB1*01:02L HLA-DRB4*03:01NL HLA-DRB1*08:04L HLA-DRB1*08:77L
  REGION 1..10: note = CONT. FROM ABOVE: HLA-DRB3*02:01L HLA-DPA1*01:03-B1*03:01L HLA-D PA1*03:01-B1*04:02L HLA-DRB1*14:01L HLA-DRB1*11:03L HLA-DRB1*11: 04L HLA-DRB1*14:02L HLA-DQA1*01:01-B1*05:01L HLA-DRB1*08:01L HLA -DRB1*11:01L HLA-DQA1*01-B1*05L HLA-DQA1*05:05-B1*03:19L
  REGION 1..10: note = CONT. FROM ABOVE: HLA-DQA1*05:01-B1*02:01L HLA-DPA1*01:03-B1*04: 01L HLA-DRB1*04:10L HLA-DPA1*01:03-B1*04:02L HLA-DRB1*12:01L HLA -DRB1*12:02L HLA-DRB3*01:01L HLA-DPA1*02:01-B1*13:01L HLA-DPA1*0 3:01-B1*105:01L HLA-DQA1*03:01-B1*03:02L HLA-DRB1*14:54L
  REGION 1..10: note = CONT. FROM ABOVE: HLA-DQA1*05:05-B1*03:01L HLA-DRB1*14:17L HLA-D PA1*01:02-B1*04:01L HLA-DRB1*10:01L HLA-DRB1*16:01L HLA-DQA1*01: 03-B1*06:01L HLA-DRB1*04:08L HLA-DRB1*08:03L HLA-DQA1*02:01-B1*0 3:03L HLA-DRB1*15:03L
FENKTTLPVN

SEQ ID NO: 9763 - protein, 11 aa, Severe acute respiratory syndrome coronavirus 2
  REGION 1..11: note = Table B: HLA-DQA1*03:02-B1*03:03L HLA-DQA1*05:01-B1*03:01L HLA-DRB1*04:03L HLA-DQA1*01:02-B1*06:02L HLA-DQA1*01-B1*05L HLA-DQA1*05:01-B1*02:01L
ENKTTLPVNVA

SEQ ID NO: 9764 - protein, 10 aa, Severe acute respiratory syndrome coronavirus 2
  REGION 1..10: note = Table B: HLA-DQA1*03:02-B1*03:03L HLA-DQA1*05:01-B1*03:01L HLA-DRB1*04:01L HLA-DRB1*04:03L HLA-DRB1*13:02L HLA-DRB1*13:03L HLA-DRB1*01:03M HLA-DRB1*04:05L HLA-DQA1*01:02-B1*06:02M HLA-DRB1*01:01L HLA-DRB4*03:01NL HLA-DRB1*08:77L
  REGION 1..10: note = CONT. FROM ABOVE: HLA-DPA1*01:03-B1*03:01L HLA-DPA1*03:01-B1*04: 02L HLA-DRB1*03:01L HLA-DRB1*14:01L HLA-DRB1*14:02M HLA-DRB1*11: 01L HLA-DQA1*01-B1*05L HLA-DQA1*05:05-B1*03:19L HLA-DQA1*05:01-B 1*02:01L HLA-DRB4*01:01L HLA-DPA1*01:03-B1*04:01L
  REGION 1..10: note = CONT. FROM ABOVE: HLA-DQA1*05:05-B1*03:116L HLA-DPA1*01:03-B1*04 :02L HLA-DRB1*12:01L HLA-DPA1*02:01-B1*13:01L HLA-DPA1*03:01-B1* 105:01L HLA-DQA1*03:01-B1*03:02L HLA-DPA1*01:02-B1*04:01L HLA-DR B1*10:01L HLA-DRB1*16:01L HLA-DQA1*01:03-B1*06:01L
  REGION 1..10: note = CONT. FROM ABOVE: HLA-DRB1*08:02L HLA-DQA1*02:01-B1*03:03M HLA-D RB1*15:03L
KTTLPVNVAF

SEQ ID NO: 9765 - protein, 10 aa, Severe acute respiratory syndrome coronavirus 2
  REGION 1..10: note = Table B: HLA-DQA1*03:02-B1*03:03L
TLPVNVAFEL

SEQ ID NO: 9766 - protein, 10 aa, Severe acute respiratory syndrome coronavirus 2
  REGION 1..10: note = Table B: HLA-DQA1*03:02-B1*03:03L HLA-DQA1*05:01-B1*03:01L HLA-DRB1*14:01L HLA-DQA1*05:05-B1*03:19L HLA-DPA1*02:01-B1*13:01L HLA-DQA1*03:01-B1*03:02L HLA-DPA1*01:03-B1*104:01L HLA-DRB1*16:01L
  REGION 1..10: note = CONT. FROM ABOVE: HLA-DQA1*01:03-B1*06:01L HLA-DQA1*02:01-B1*03: 03L HLA-DRB1*15:03L
NIKPVPEVKI

SEQ ID NO: 9767 - protein, 15 aa, Severe acute respiratory syndrome coronavirus 2
  REGION 1..15: note = Table B: HLA-DQA1*03:02-B1*03:03L HLA-DRB1*14:04L HLA-DQA1*05:05-B1*03:19L HLA-DRB3*01:01L HLA-DPA1*02:01-B1*13:01L HLA-DPA1*01:03-B1*104:01L HLA-DPA1*01:02-B1*04:01L HLA-DRB1*07:01L
  REGION 1..15: note = CONT. FROM ABOVE: HLA-DQA1*01:03-B1*06:01L
KPVPEVKILNNLGVD

SEQ ID NO: 9768 - protein, 12 aa, Severe acute respiratory syndrome coronavirus 2
  REGION 1..12: note = Table B: HLA-DQA1*03:02-B1*03:03L HLA-DQA1*05:01-B1*03:01L HLA-DRB1*04:01L HLA-DRB1*13:02L HLA-DRB1*13:03L HLA-DRB1*01:03L HLA-DRB1*04:02L HLA-DRB1*04:04L HLA-DRB1*04:05L HLA-DQA1*01:02-B1*06:02L HLA-DRB1*01:02L HLA-DRB4*03:01NL
  REGION 1..12: note = CONT. FROM ABOVE: HLA-DRB1*08:04L HLA-DRB1*08:77L HLA-DRB3*02:01 L HLA-DPA1*01:03-B1*03:01L HLA-DPA1*03:01-B1*04:02L HLA-DRB1*14: 01L HLA-DRB1*11:03L HLA-DRB1*11:04L HLA-DRB1*14:02L HLA-DRB5*01: 01L HLA-DQA1*01-B1*05L HLA-DQA1*05:05-B1*03:19L
  REGION 1..12: note = CONT. FROM ABOVE: HLA-DQA1*05:01-B1*02:01L HLA-DRB4*01:01L HLA-D RB1*04:10L HLA-DRB1*09:01L HLA-DRB1*12:01L HLA-DRB1*12:02L HLA-D PA1*03:01-B1*105:01L HLA-DQA1*03:01-B1*03:02L HLA-DRB1*14:54L HL A-DQA1*05:05-B1*03:01L HLA-DPA1*01:02-B1*04:01L HLA-DRB1*07:01L
  REGION 1..12: note = CONT. FROM ABOVE: HLA-DRB1*10:01L HLA-DRB1*16:01L HLA-DQA1*01:03 -B1*06:01L HLA-DRB1*04:08L HLA-DRB1*08:03L HLA-DQA1*02:01-B1*03: 03L HLA-DRB1*15:03L
ILNNLGVDIAAN

SEQ ID NO: 9769 - protein, 12 aa, Severe acute respiratory syndrome coronavirus 2
  REGION 1..12: note = Table B: HLA-DQA1*03:02-B1*03:03L HLA-DQA1*01:02-B1*06:02L HLA-DQA1*05:05-B1*03:19L HLA-DQA1*05:01-B1*02:01L HLA-DQA1*03:01-B1*03:02L HLA-DQA1*05:05-B1*03:01L HLA-DQA1*01:03-B1*06:01L HLA-DQA1*02:01-B1*03:03L
NNLGVDIAANTV

SEQ ID NO: 9770 - protein, 12 aa, Severe acute respiratory syndrome coronavirus 2
  REGION 1..12: note = Table B: HLA-DQA1*03:02-B1*03:03L HLA-DRB1*04:02L HLA-DRB1*12:01L HLA-DQA1*03:01-B1*03:02L HLA-DQA1*05:05-B1*03:01L HLA-DRB1*14:17L HLA-DQA1*02:01-B1*03:03L HLA-DRB1*15:03L
GVDIAANTVIWD

SEQ ID NO: 9771 - protein, 11 aa, Severe acute respiratory syndrome coronavirus 2
  REGION 1..11: note = Table B: HLA-DQA1*03:02-B1*03:03L HLA-DQA1*05:01-B1*03:01L HLA-DRB1*04:03L HLA-DRB1*01:03L HLA-DRB1*04:02L HLA-DRB1*01:02L HLA-DRB4*03:01NL HLA-DQA1*01:01-B1*05:01L HLA-DRB1*12:01L HLA-DRB1*14:17L HLA-DPA1*01:02-B1*04:01L HLA-DRB1*15:03L
IAANTVIWDYK

SEQ ID NO: 9772 - protein, 13 aa, Severe acute respiratory syndrome coronavirus 2
  REGION 1..13: note = Table B: HLA-DQA1*03:02-B1*03:03L HLA-DQA1*05:01-B1*03:01L HLA-DPA1*03:01-B1*04:02L HLA-DRB1*11:01L HLA-DQA1*01-B1*05L HLA-DRB1*13:01L HLA-DRB1*09:01L HLA-DRB1*12:02L HLA-DPA1*02:01-B1*13:01L HLA-DPA1*03:01-B1*105:01L
  REGION 1..13: note = CONT. FROM ABOVE: HLA-DRB1*10:01L HLA-DRB1*08:03L
IWDYKRDAPAHIS

SEQ ID NO: 9773 - protein, 12 aa, Severe acute respiratory syndrome coronavirus 2
  REGION 1..12: note = Table B: HLA-DQA1*03:02-B1*03:03L HLA-DRB1*04:01L HLA-DRB1*04:04L HLA-DQA1*01:02-B1*06:02L HLA-DRB1*01:01L HLA-DPA1*03:01-B1*04:02L HLA-DRB1*08:01L HLA-DRB1*11:01L HLA-DRB5*01:01L HLA-DQA1*01-B1*05L HLA-DQA1*05:05-B1*03:19L
  REGION 1..12: note = CONT. FROM ABOVE: HLA-DRB1*13:01L HLA-DRB1*04:10L HLA-DRB1*09:01 L HLA-DPA1*01:03-B1*04:02L HLA-DRB1*12:02L HLA-DPA1*02:01-B1*13: 01L HLA-DPA1*03:01-B1*105:01L HLA-DQA1*05:05-B1*03:01L HLA-DRB1* 07:01L HLA-DRB1*10:01L HLA-DRB1*08:03L
DYKRDAPAHIST

SEQ ID NO: 9774 - protein, 10 aa, Severe acute respiratory syndrome coronavirus 2
  REGION 1..10: note = Table B: HLA-DQA1*03:02-B1*03:03L HLA-DQA1*05:05-B1*03:19M HLA-DQA1*03:01-B1*03:02L HLA-DPA1*01:03-B1*104:01L HLA-DRB1*16:01L
RDAPAHISTI

SEQ ID NO: 9775 - protein, 10 aa, Severe acute respiratory syndrome coronavirus 2
  REGION 1..10: note = Table B: HLA-DQA1*03:02-B1*03:03L HLA-DQA1*05:01-B1*03:01L HLA-DQA1*05:05-B1*03:19L HLA-DQA1*03:01-B1*03:02L HLA-DQA1*05:05-B1*03:01L HLA-DQA1*01:03-B1*06:01L HLA-DQA1*02:01-B1*03:03L
DAPAHISTIG

SEQ ID NO: 9776 - protein, 10 aa, Severe acute respiratory syndrome coronavirus 2
  REGION 1..10: note = Table B: HLA-DQA1*03:02-B1*03:03L HLA-DQA1*05:01-B1*03:01L HLA-DRB1*13:03M HLA-DRB1*01:03L HLA-DRB1*04:02L HLA-DRB1*04:05L HLA-DQA1*01:02-B1*06:02L HLA-DRB1*01:01L HLA-DRB1*01:02L HLA-DRB4*03:01NL HLA-DPA1*01:03-B1*03:01L
  REGION 1..10: note = CONT. FROM ABOVE: HLA-DPA1*03:01-B1*04:02L HLA-DRB1*14:01L HLA-D RB1*08:01L HLA-DRB5*01:01L HLA-DQA1*01-B1*05L HLA-DQA1*05:01-B1* 02:01L HLA-DQA1*05:05-B1*03:116M HLA-DPA1*02:01-B1*13:01L HLA-DP A1*03:01-B1*105:01M HLA-DQA1*03:01-B1*03:02L
  REGION 1..10: note = CONT. FROM ABOVE: HLA-DPA1*01:02-B1*04:01L HLA-DRB1*10:01L HLA-D RB1*16:01L HLA-DRB1*08:03L HLA-DQA1*02:01-B1*03:03L HLA-DRB1*15: 03L
APAHISTIGV

SEQ ID NO: 9777 - protein, 10 aa, Severe acute respiratory syndrome coronavirus 2
  REGION 1..10: note = Table B: HLA-DQA1*03:02-B1*03:03L HLA-DQA1*05:01-B1*03:01L HLA-DRB1*04:03L HLA-DRB1*13:03L HLA-DRB1*01:03L HLA-DRB1*04:02L HLA-DRB1*04:05L HLA-DRB1*01:02L HLA-DRB4*03:01NL HLA-DRB1*14:01L HLA-DRB1*12:01L HLA-DQA1*03:01-B1*03:02L HLA-DRB1*14:54L
  REGION 1..10: note = CONT. FROM ABOVE: HLA-DRB1*14:17L HLA-DPA1*01:02-B1*04:01L HLA-D RB1*16:01L HLA-DQA1*01:03-B1*06:01L HLA-DRB1*04:08L HLA-DQA1*02: 01-B1*03:03L
SMTDIAKKPT

SEQ ID NO: 9778 - protein, 10 aa, Severe acute respiratory syndrome coronavirus 2
  REGION 1..10: note = Table B: HLA-DQA1*03:02-B1*03:03L HLA-DRB1*04:03L HLA-DRB1*13:03L HLA-DRB1*04:02L HLA-DQA1*01-B1*05L HLA-DQA1*03:01-B1*03:02L HLA-DRB1*14:17L HLA-DRB1*16:01L HLA-DQA1*02:01-B1*03:03L
TDIAKKPTET

SEQ ID NO: 9779 - protein, 10 aa, Severe acute respiratory syndrome coronavirus 2
  REGION 1..10: note = Table B: HLA-DQA1*03:02-B1*03:03L HLA-DQA1*05:01-B1*03:01L HLA-DQA1*01:02-B1*06:02L HLA-DRB1*01:02L HLA-DQA1*05:05-B1*03:19L HLA-DQA1*05:01-B1*02:01L HLA-DQA1*05:05-B1*03:116L HLA-DPA1*02:01-B1*13:01L
  REGION 1..10: note = CONT. FROM ABOVE: HLA-DPA1*03:01-B1*105:01L HLA-DPA1*01:02-B1*04 :01L HLA-DQA1*02:01-B1*03:03L HLA-DRB1*15:03L
DIAKKPTETI

SEQ ID NO: 9780 - protein, 12 aa, Severe acute respiratory syndrome coronavirus 2
  REGION 1..12: note = Table B: HLA-DQA1*03:02-B1*03:03L HLA-DRB1*04:03L HLA-DRB1*04:02L HLA-DQA1*01:02-B1*06:02L HLA-DQA1*05:01-B1*02:01L HLA-DQA1*03:01-B1*03:02L HLA-DRB1*16:01L HLA-DQA1*01:03-B1*06:01L
  REGION 1..12: note = CONT. FROM ABOVE: HLA-DQA1*02:01-B1*03:03L HLA-DRB1*15:03L
APLTVFFDGRVD

SEQ ID NO: 9781 - protein, 10 aa, Severe acute respiratory syndrome coronavirus 2
  REGION 1..10: note = Table B: HLA-DQA1*03:02-B1*03:03L HLA-DQA1*01-B1*05L HLA-DQA1*05:01-B1*02:01L HLA-DQA1*03:01-B1*03:02L HLA-DQA1*02:01-B1*03:03L
FDGRVDGQVD

SEQ ID NO: 9782 - protein, 14 aa, Severe acute respiratory syndrome coronavirus 2
  REGION 1..14: note = Table B: HLA-DQA1*03:02-B1*03:03L HLA-DQA1*05:01-B1*03:01L HLA-DRB1*13:02L HLA-DRB1*08:04L HLA-DPA1*03:01-B1*04:02L HLA-DRB3*01:01L HLA-DPA1*02:01-B1*13:01L HLA-DPA1*03:01-B1*105:01L HLA-DPA1*01:02-B1*04:01L
  REGION 1..14: note = CONT. FROM ABOVE: HLA-DRB1*10:01L
VDGQVDLFRNARNG

SEQ ID NO: 9783 - protein, 12 aa, Severe acute respiratory syndrome coronavirus 2
  REGION 1..12: note = Table B: HLA-DQA1*03:02-B1*03:03L HLA-DQA1*05:01-B1*03:01L HLA-DRB1*04:03L HLA-DRB1*13:02L HLA-DRB1*13:03L HLA-DRB1*01:03L HLA-DRB1*04:02L HLA-DRB1*04:05L HLA-DQA1*01:02-B1*06:02L HLA-DRB1*01:02L HLA-DRB1*08:04L HLA-DRB1*08:77L HLA-DRB3*02:01L
  REGION 1..12: note = CONT. FROM ABOVE: HLA-DPA1*03:01-B1*04:02L HLA-DRB1*08:01L HLA-D QA1*05:01-B1*02:01L HLA-DRB1*12:01L HLA-DRB1*12:02L HLA-DRB3*01: 01L HLA-DPA1*02:01-B1*13:01L HLA-DPA1*03:01-B1*105:01L HLA-DQA1* 03:01-B1*03:02L HLA-DRB1*14:54L HLA-DRB1*14:17L HLA-DRB1*07:01L
  REGION 1..12: note = CONT. FROM ABOVE: HLA-DRB1*04:08L HLA-DQA1*02:01-B1*03:03L HLA-D RB1*15:03L
VDLFRNARNGVL

SEQ ID NO: 9784 - protein, 11 aa, Severe acute respiratory syndrome coronavirus 2
  REGION 1..11: note = Table B: HLA-DQA1*03:02-B1*03:03L HLA-DQA1*01:03-B1*06:01L
NGVLITEGSVK

SEQ ID NO: 9785 - protein, 11 aa, Severe acute respiratory syndrome coronavirus 2
  REGION 1..11: note = Table B: HLA-DQA1*03:02-B1*03:03L HLA-DRB1*13:02L HLA-DRB1*04:04L HLA-DRB1*01:02L HLA-DRB1*14:01L HLA-DRB1*11:03L HLA-DRB1*11:04L HLA-DQA1*01-B1*05L HLA-DQA1*05:01-B1*02:01L HLA-DRB1*12:02L HLA-DRB1*10:01L HLA-DRB1*04:08L HLA-DRB1*08:03L
GVLITEGSVKG

SEQ ID NO: 9786 - protein, 10 aa, Severe acute respiratory syndrome coronavirus 2
  REGION 1..10: note = Table B: HLA-DQA1*03:02-B1*03:03L HLA-DQA1*05:01-B1*03:01L HLA-DQA1*03:01-B1*03:02L HLA-DQA1*02:01-B1*03:03L HLA-DRB1*15:03L
LITEGSVKGL

SEQ ID NO: 9787 - protein, 11 aa, Severe acute respiratory syndrome coronavirus 2
  REGION 1..11: note = Table B: HLA-DQA1*03:02-B1*03:03L HLA-DQA1*03:01-B1*03:02L HLA-DQA1*01:03-B1*06:01L HLA-DQA1*02:01-B1*03:03L
ITEGSVKGLQP

SEQ ID NO: 9788 - protein, 10 aa, Severe acute respiratory syndrome coronavirus 2
  REGION 1..10: note = Table B: HLA-DQA1*03:02-B1*03:03L
GSVKGLQPSV

SEQ ID NO: 9789 - protein, 10 aa, Severe acute respiratory syndrome coronavirus 2
  REGION 1..10: note = Table B: HLA-DQA1*03:02-B1*03:03L HLA-DQA1*05:01-B1*03:01L HLA-DRB1*04:03L HLA-DRB1*13:03L HLA-DRB1*01:03L HLA-DRB1*04:02L HLA-DRB4*03:01NL HLA-DQA1*03:01-B1*03:02L HLA-DRB1*14:17L HLA-DQA1*02:01-B1*03:03L
GLQPSVGPKQ

SEQ ID NO: 9790 - protein, 11 aa, Severe acute respiratory syndrome coronavirus 2
  REGION 1..11: note = Table B: HLA-DQA1*03:02-B1*03:03L HLA-DQA1*05:01-B1*03:01L HLA-DRB1*04:02L HLA-DPA1*03:01-B1*04:02L HLA-DRB1*14:01L HLA-DRB1*08:01L HLA-DRB5*01:01L HLA-DQA1*01-B1*05L HLA-DQA1*05:01-B1*02:01L HLA-DPA1*01:02-B1*04:01L
QPSVGPKQASL

SEQ ID NO: 9791 - protein, 12 aa, Severe acute respiratory syndrome coronavirus 2
  REGION 1..12: note = Table B: HLA-DQA1*03:02-B1*03:03L HLA-DQA1*05:01-B1*03:01L HLA-DRB1*04:03L HLA-DRB1*04:02L HLA-DQA1*01:02-B1*06:02L HLA-DQA1*05:05-B1*03:19L HLA-DQA1*05:01-B1*02:01L HLA-DPA1*03:01-B1*105:01L HLA-DQA1*03:01-B1*03:02L
  REGION 1..12: note = CONT. FROM ABOVE: HLA-DQA1*05:05-B1*03:01L HLA-DRB1*14:17L HLA-D QA1*01:03-B1*06:01L HLA-DQA1*02:01-B1*03:03L
VGPKQASLNGVT

SEQ ID NO: 9792 - protein, 10 aa, Severe acute respiratory syndrome coronavirus 2
  REGION 1..10: note = Table B: HLA-DQA1*03:02-B1*03:03L HLA-DQA1*05:01-B1*03:01L HLA-DRB1*08:01L HLA-DQA1*05:05-B1*03:116L HLA-DQA1*03:01-B1*03:02L HLA-DQA1*02:01-B1*03:03L
KQASLNGVTL

SEQ ID NO: 9793 - protein, 11 aa, Severe acute respiratory syndrome coronavirus 2
  REGION 1..11: note = Table B: HLA-DQA1*03:02-B1*03:03L HLA-DQA1*05:01-B1*03:01L HLA-DRB1*04:02L HLA-DQA1*01:02-B1*06:02L HLA-DQA1*05:05-B1*03:01L
NGVTLIGEAVK

SEQ ID NO: 9794 - protein, 10 aa, Severe acute respiratory syndrome coronavirus 2
  REGION 1..10: note = Table B: HLA-DQA1*03:02-B1*03:03L HLA-DQA1*05:01-B1*03:01L HLA-DRB1*04:03L HLA-DRB1*13:03L HLA-DRB1*01:03L HLA-DRB1*04:02L HLA-DQA1*01:02-B1*06:02L HLA-DRB1*01:02L HLA-DRB4*03:01NL HLA-DRB1*14:01L HLA-DQA1*05:01-B1*02:01L HLA-DRB1*12:01L
  REGION 1..10: note = CONT. FROM ABOVE: HLA-DPA1*03:01-B1*105:01L HLA-DQA1*03:01-B1*03 :02L HLA-DRB1*14:54L HLA-DQA1*05:05-B1*03:01L HLA-DRB1*14:17L HL A-DPA1*01:02-B1*04:01L HLA-DRB1*16:01L HLA-DQA1*01:03-B1*06:01L HLA-DQA1*02:01-B1*03:03L HLA-DRB1*15:03L
TLIGEAVKTQ

SEQ ID NO: 9795 - protein, 10 aa, Severe acute respiratory syndrome coronavirus 2
  REGION 1..10: note = Table B: HLA-DQA1*03:02-B1*03:03L HLA-DQA1*05:01-B1*03:01L HLA-DRB1*04:03L HLA-DRB1*13:03L HLA-DRB1*01:03L HLA-DRB1*04:05L HLA-DQA1*01:02-B1*06:02M HLA-DRB1*01:01L HLA-DRB1*08:77L HLA-DPA1*01:03-B1*03:01L HLA-DPA1*03:01-B1*04:02L
  REGION 1..10: note = CONT. FROM ABOVE: HLA-DRB1*03:01L HLA-DRB1*14:01L HLA-DRB1*14:02 L HLA-DQA1*01-B1*05L HLA-DQA1*05:05-B1*03:19L HLA-DQA1*05:01-B1* 02:01L HLA-DRB4*01:01L HLA-DPA1*01:03-B1*04:01L HLA-DQA1*05:05-B 1*03:116L HLA-DPA1*01:03-B1*04:02L HLA-DRB1*12:01L
  REGION 1..10: note = CONT. FROM ABOVE: HLA-DPA1*02:01-B1*13:01L HLA-DPA1*03:01-B1*105 :01L HLA-DQA1*03:01-B1*03:02L HLA-DPA1*01:02-B1*04:01L HLA-DRB1* 10:01L HLA-DRB1*16:01L HLA-DQA1*01:03-B1*06:01L HLA-DRB1*08:02L HLA-DQA1*02:01-B1*03:03M HLA-DRB1*15:03L
LIGEAVKTQF

SEQ ID NO: 9796 - protein, 10 aa, Severe acute respiratory syndrome coronavirus 2
  REGION 1..10: note = Table B: HLA-DQA1*03:02-B1*03:03L HLA-DRB1*04:03L HLA-DQA1*05:01-B1*02:01L HLA-DQA1*03:01-B1*03:02L HLA-DQA1*02:01-B1*03:03L
IGEAVKTQFN

SEQ ID NO: 9797 - protein, 10 aa, Severe acute respiratory syndrome coronavirus 2
  REGION 1..10: note = Table B: HLA-DQA1*03:02-B1*03:03L HLA-DQA1*05:01-B1*03:01M HLA-DRB1*13:03L HLA-DRB1*01:03L HLA-DRB4*03:01NL HLA-DRB1*08:77M HLA-DPA1*01:03-B1*03:01L HLA-DPA1*03:01-B1*04:02M HLA-DRB1*03:01M HLA-DRB1*11:02L HLA-DQA1*01-B1*05L
  REGION 1..10: note = CONT. FROM ABOVE: HLA-DQA1*05:05-B1*03:19M HLA-DQA1*05:01-B1*02: 01M HLA-DRB4*01:01M HLA-DPA1*01:03-B1*04:01M HLA-DQA1*05:05-B1*0 3:116L HLA-DPA1*01:03-B1*04:02L HLA-DRB1*12:01L HLA-DQA1*03:01-B 1*03:02L HLA-DPA1*01:03-B1*104:01L HLA-DPA1*01:02-B1*04:01L
  REGION 1..10: note = CONT. FROM ABOVE: HLA-DRB1*10:01M HLA-DRB1*16:01L HLA-DRB1*15:03 M
GEAVKTQFNY

SEQ ID NO: 9798 - protein, 13 aa, Severe acute respiratory syndrome coronavirus 2
  REGION 1..13: note = Table B: HLA-DQA1*03:02-B1*03:03L HLA-DRB1*04:01L HLA-DRB1*01:01L HLA-DPA1*01:03-B1*03:01L HLA-DRB1*11:03L HLA-DRB1*14:02L HLA-DPA1*01:03-B1*04:02L HLA-DQA1*05:05-B1*03:01L HLA-DRB1*07:01L
FNYYKKVDGVVQQ

SEQ ID NO: 9799 - protein, 14 aa, Severe acute respiratory syndrome coronavirus 2
  REGION 1..14: note = Table B: HLA-DQA1*03:02-B1*03:03L HLA-DQA1*05:01-B1*03:01L HLA-DRB1*13:02L HLA-DRB1*04:04L HLA-DPA1*01:03-B1*03:01L HLA-DRB1*14:01L HLA-DQA1*05:01-B1*02:01L HLA-DPA1*02:01-B1*13:01L HLA-DPA1*03:01-B1*105:01L
  REGION 1..14: note = CONT. FROM ABOVE: HLA-DQA1*05:05-B1*03:01L HLA-DRB1*15:03L
YYKKVDGVVQQLPE

SEQ ID NO: 9800 - protein, 11 aa, Severe acute respiratory syndrome coronavirus 2
  REGION 1..11: note = Table B: HLA-DQA1*03:02-B1*03:03L HLA-DQA1*03:01-B1*03:02L HLA-DQA1*02:01-B1*03:03L
VDGVVQQLPET

SEQ ID NO: 9801 - protein, 10 aa, Severe acute respiratory syndrome coronavirus 2
  REGION 1..10: note = Table B: HLA-DQA1*03:02-B1*03:03L HLA-DQA1*05:01-B1*03:01L HLA-DRB1*04:01L HLA-DRB1*04:03L HLA-DRB1*13:02L HLA-DRB1*13:03M HLA-DRB1*01:03M HLA-DRB1*04:02L HLA-DQA1*01:02-B1*06:02M HLA-DRB1*01:01L HLA-DRB4*03:01NL HLA-DRB1*08:77M
  REGION 1..10: note = CONT. FROM ABOVE: HLA-DPA1*01:03-B1*03:01L HLA-DPA1*03:01-B1*04: 02L HLA-DRB1*03:01M HLA-DRB1*14:01L HLA-DRB1*11:02L HLA-DRB1*11: 03L HLA-DRB1*11:04L HLA-DRB1*14:02M HLA-DRB1*08:01L HLA-DRB1*11: 01L HLA-DRB5*01:01L HLA-DQA1*01-B1*05L HLA-DQA1*05:05-B1*03:19M
  REGION 1..10: note = CONT. FROM ABOVE: HLA-DQA1*05:01-B1*02:01M HLA-DRB4*01:01L HLA-D PA1*01:03-B1*04:01M HLA-DQA1*05:05-B1*03:116L HLA-DRB1*09:01L HL A-DPA1*01:03-B1*04:02M HLA-DRB1*12:01L HLA-DPA1*02:01-B1*13:01L HLA-DPA1*03:01-B1*105:01L HLA-DQA1*03:01-B1*03:02L
  REGION 1..10: note = CONT. FROM ABOVE: HLA-DPA1*01:03-B1*104:01L HLA-DQA1*05:05-B1*03 :01L HLA-DRB1*14:17L HLA-DPA1*01:02-B1*04:01L HLA-DRB1*10:01L HL A-DRB1*16:01L HLA-DQA1*01:03-B1*06:01L HLA-DRB1*08:02L HLA-DQA1* 02:01-B1*03:03M HLA-DRB1*15:03L
GVVQQLPETY

SEQ ID NO: 9802 - protein, 10 aa, Severe acute respiratory syndrome coronavirus 2
  REGION 1..10: note = Table B: HLA-DQA1*03:02-B1*03:03L HLA-DQA1*05:01-B1*03:01L HLA-DRB1*04:03L HLA-DRB1*13:02L HLA-DRB1*13:03L HLA-DRB1*01:03L HLA-DRB1*04:05L HLA-DQA1*01:02-B1*06:02L HLA-DRB1*01:02L HLA-DRB1*08:77L HLA-DPA1*01:03-B1*03:01L
  REGION 1..10: note = CONT. FROM ABOVE: HLA-DPA1*03:01-B1*04:02L HLA-DRB1*14:01L HLA-D RB1*14:02L HLA-DQA1*01-B1*05L HLA-DQA1*05:05-B1*03:19L HLA-DQA1* 05:01-B1*02:01L HLA-DRB4*01:01L HLA-DPA1*01:03-B1*04:01L HLA-DPA 1*01:03-B1*04:02L HLA-DRB1*12:01L HLA-DPA1*02:01-B1*13:01L
  REGION 1..10: note = CONT. FROM ABOVE: HLA-DPA1*03:01-B1*105:01L HLA-DQA1*03:01-B1*03 :02L HLA-DPA1*01:03-B1*104:01L HLA-DQA1*05:05-B1*03:01L HLA-DPA1 *01:02-B1*04:01L HLA-DRB1*16:01L HLA-DQA1*01:03-B1*06:01L HLA-DQ A1*02:01-B1*03:03L HLA-DRB1*15:03L
VVQQLPETYF

SEQ ID NO: 9803 - protein, 10 aa, Severe acute respiratory syndrome coronavirus 2
  REGION 1..10: note = Table B: HLA-DQA1*03:02-B1*03:03L HLA-DQA1*01:02-B1*06:02L HLA-DPA1*03:01-B1*105:01L
ETYFTQSRNL

SEQ ID NO: 9804 - protein, 10 aa, Severe acute respiratory syndrome coronavirus 2
  REGION 1..10: note = Table B: HLA-DQA1*03:02-B1*03:03L HLA-DQA1*05:01-B1*03:01L HLA-DRB1*13:03L HLA-DRB1*01:03L HLA-DQA1*01:02-B1*06:02L HLA-DRB1*08:77L HLA-DPA1*01:03-B1*03:01L HLA-DPA1*03:01-B1*04:02L HLA-DRB1*03:01L HLA-DRB1*14:01L
  REGION 1..10: note = CONT. FROM ABOVE: HLA-DRB1*14:02L HLA-DQA1*01-B1*05L HLA-DQA1*05 :05-B1*03:19L HLA-DQA1*05:01-B1*02:01L HLA-DRB4*01:01L HLA-DPA1* 01:03-B1*04:01L HLA-DQA1*05:05-B1*03:116L HLA-DPA1*01:03-B1*04:0 2L HLA-DPA1*02:01-B1*13:01L HLA-DPA1*03:01-B1*105:01L
  REGION 1..10: note = CONT. FROM ABOVE: HLA-DQA1*03:01-B1*03:02L HLA-DPA1*01:02-B1*04: 01L HLA-DRB1*16:01L HLA-DQA1*01:03-B1*06:01L HLA-DRB1*08:02L HLA -DQA1*02:01-B1*03:03L HLA-DRB1*15:03L
FTQSRNLQEF

SEQ ID NO: 9805 - protein, 11 aa, Severe acute respiratory syndrome coronavirus 2
  REGION 1..11: note = Table B: HLA-DQA1*03:02-B1*03:03L HLA-DRB1*11:02L HLA-DQA1*05:05-B1*03:19M HLA-DPA1*01:03-B1*104:01L
QEFKPRSQMEI

SEQ ID NO: 9806 - protein, 10 aa, Severe acute respiratory syndrome coronavirus 2
  REGION 1..10: note = Table B: HLA-DQA1*03:02-B1*03:03M HLA-DQA1*05:01-B1*03:01L HLA-DPA1*03:01-B1*04:02L HLA-DRB1*14:02L HLA-DQA1*05:05-B1*03:19L HLA-DQA1*05:05-B1*03:116L HLA-DRB1*09:01L HLA-DQA1*03:01-B1*03:02L
  REGION 1..10: note = CONT. FROM ABOVE: HLA-DPA1*01:02-B1*04:01L HLA-DQA1*02:01-B1*03: 03L HLA-DRB1*15:03L
SQMEIDFLEL

SEQ ID NO: 9807 - protein, 10 aa, Severe acute respiratory syndrome coronavirus 2
  REGION 1..10: note = Table B: HLA-DQA1*03:02-B1*03:03L HLA-DRB1*11:02L HLA-DQA1*05:05-B1*03:19M HLA-DPA1*01:03-B1*104:01L
MEIDFLELAM

SEQ ID NO: 9808 - protein, 10 aa, Severe acute respiratory syndrome coronavirus 2
  REGION 1..10: note = Table B: HLA-DQA1*03:02-B1*03:03L HLA-DQA1*05:01-B1*03:01L HLA-DRB1*04:03L HLA-DRB1*13:02L HLA-DRB1*13:03L HLA-DRB1*01:03L HLA-DRB1*04:05L HLA-DQA1*01:02-B1*06:02M HLA-DRB4*03:01NL HLA-DRB1*08:77M HLA-DPA1*01:03-B1*03:01M
  REGION 1..10: note = CONT. FROM ABOVE: HLA-DPA1*03:01-B1*04:02L HLA-DRB1*03:01M HLA-D RB1*14:01L HLA-DRB1*11:02M HLA-DRB1*11:03L HLA-DRB1*14:02L HLA-D RB1*11:01L HLA-DRB5*01:01L HLA-DQA1*01-B1*05M HLA-DQA1*05:05-B1* 03:19H HLA-DQA1*05:01-B1*02:01M HLA-DRB4*01:01M
  REGION 1..10: note = CONT. FROM ABOVE: HLA-DPA1*01:03-B1*04:01M HLA-DQA1*05:05-B1*03: 116M HLA-DPA1*01:03-B1*04:02L HLA-DRB1*12:01L HLA-DPA1*02:01-B1* 13:01L HLA-DPA1*03:01-B1*105:01L HLA-DPA1*01:03-B1*104:01M HLA-D QA1*05:05-B1*03:01L HLA-DPA1*01:02-B1*04:01L HLA-DRB1*10:01L
  REGION 1..10: note = CONT. FROM ABOVE: HLA-DRB1*16:01M HLA-DQA1*01:03-B1*06:01L HLA-D RB1*08:02L HLA-DQA1*02:01-B1*03:03L HLA-DRB1*15:03L
LAMDEFIERY

SEQ ID NO: 9809 - protein, 11 aa, Severe acute respiratory syndrome coronavirus 2
  REGION 1..11: note = Table B: HLA-DQA1*03:02-B1*03:03L HLA-DQA1*05:05-B1*03:19L
AMDEFIERYKL

SEQ ID NO: 9810 - protein, 10 aa, Severe acute respiratory syndrome coronavirus 2
  REGION 1..10: note = Table B: HLA-DQA1*03:02-B1*03:03L HLA-DQA1*01-B1*05L HLA-DQA1*05:05-B1*03:19L HLA-DQA1*05:01-B1*02:01L HLA-DPA1*01:03-B1*104:01L HLA-DPA1*01:02-B1*04:01L
LEGYAFEHIV

SEQ ID NO: 9811 - protein, 10 aa, Severe acute respiratory syndrome coronavirus 2
  REGION 1..10: note = Table B: HLA-DQA1*03:02-B1*03:03L HLA-DQA1*05:01-B1*03:01L HLA-DRB1*13:03L HLA-DQA1*01:02-B1*06:02M HLA-DRB1*08:77L HLA-DPA1*01:03-B1*03:01L HLA-DRB1*03:01L HLA-DRB1*14:02L HLA-DQA1*01-B1*05L HLA-DQA1*05:05-B1*03:19L
  REGION 1..10: note = CONT. FROM ABOVE: HLA-DQA1*05:01-B1*02:01L HLA-DRB4*01:01L HLA-D PA1*01:03-B1*04:01L HLA-DQA1*05:05-B1*03:116L HLA-DPA1*02:01-B1* 13:01L HLA-DPA1*03:01-B1*105:01L HLA-DPA1*01:03-B1*104:01L HLA-D RB1*16:01L HLA-DQA1*01:03-B1*06:01L HLA-DQA1*02:01-B1*03:03L
  REGION 1..10: note = CONT. FROM ABOVE: HLA-DRB1*15:03L
EGYAFEHIVY

SEQ ID NO: 9812 - protein, 11 aa, Severe acute respiratory syndrome coronavirus 2
  REGION 1..11: note = Table B: HLA-DQA1*03:02-B1*03:03L HLA-DPA1*01:03-B1*03:01L HLA-DRB1*14:02L HLA-DPA1*01:03-B1*04:02L HLA-DRB1*12:01L HLA-DQA1*03:01-B1*03:02L HLA-DPA1*01:03-B1*104:01L HLA-DQA1*05:05-B1*03:01L
YAFEHIVYGDF

SEQ ID NO: 9813 - protein, 10 aa, Severe acute respiratory syndrome coronavirus 2
  REGION 1..10: note = Table B: HLA-DQA1*03:02-B1*03:03L HLA-DQA1*05:01-B1*03:01L HLA-DRB1*04:03L HLA-DRB1*01:03L HLA-DRB1*04:02L HLA-DQA1*01:02-B1*06:02L HLA-DPA1*03:01-B1*04:02L HLA-DQA1*01-B1*05L HLA-DQA1*05:01-B1*02:01L
  REGION 1..10: note = CONT. FROM ABOVE: HLA-DPA1*01:03-B1*04:01L HLA-DPA1*01:03-B1*04: 02L HLA-DPA1*03:01-B1*105:01L HLA-DQA1*03:01-B1*03:02L HLA-DRB1* 14:17L HLA-DPA1*01:02-B1*04:01L HLA-DRB1*16:01L HLA-DQA1*01:03-B 1*06:01L HLA-DRB1*04:08L HLA-DQA1*02:01-B1*03:03L
  REGION 1..10: note = CONT. FROM ABOVE: HLA-DRB1*15:03L
IVYGDFSHSQ

SEQ ID NO: 9814 - protein, 10 aa, Severe acute respiratory syndrome coronavirus 2
  REGION 1..10: note = Table B: HLA-DQA1*03:02-B1*03:03L HLA-DQA1*05:01-B1*03:01L HLA-DRB1*04:03L HLA-DRB1*01:03L HLA-DRB1*04:05L HLA-DQA1*01:02-B1*06:02L HLA-DRB1*01:02L HLA-DPA1*03:01-B1*04:02L HLA-DRB1*14:02L HLA-DQA1*01-B1*05L
  REGION 1..10: note = CONT. FROM ABOVE: HLA-DQA1*05:05-B1*03:19L HLA-DQA1*05:05-B1*03: 116L HLA-DPA1*02:01-B1*13:01L HLA-DPA1*03:01-B1*105:01L HLA-DQA1 *03:01-B1*03:02L HLA-DPA1*01:02-B1*04:01L HLA-DRB1*16:01L HLA-DQ A1*01:03-B1*06:01L HLA-DQA1*02:01-B1*03:03L HLA-DRB1*15:03L
VYGDFSHSQL

SEQ ID NO: 9815 - protein, 11 aa, Severe acute respiratory syndrome coronavirus 2
  REGION 1..11: note = Table B: HLA-DQA1*03:02-B1*03:03L HLA-DPA1*03:01-B1*04:02L HLA-DQA1*01-B1*05L HLA-DQA1*05:01-B1*02:01L HLA-DPA1*03:01-B1*105:01L HLA-DQA1*03:01-B1*03:02L HLA-DPA1*01:02-B1*04:01L HLA-DRB1*16:01L
  REGION 1..11: note = CONT. FROM ABOVE: HLA-DQA1*01:03-B1*06:01L HLA-DQA1*02:01-B1*03: 03L
GDFSHSQLGGL

SEQ ID NO: 9816 - protein, 11 aa, Severe acute respiratory syndrome coronavirus 2
  REGION 1..11: note = Table B: HLA-DQA1*03:02-B1*03:03L HLA-DRB1*04:03L HLA-DRB1*04:02L HLA-DRB1*01:02L HLA-DPA1*03:01-B1*04:02L HLA-DRB1*08:01L HLA-DQA1*01-B1*05L HLA-DQA1*05:05-B1*03:19L HLA-DQA1*05:01-B1*02:01L HLA-DPA1*01:03-B1*04:01L
  REGION 1..11: note = CONT. FROM ABOVE: HLA-DPA1*01:03-B1*04:02L HLA-DRB1*12:01L HLA-D QA1*05:05-B1*03:01L HLA-DRB1*04:08L
DFSHSQLGGLH

SEQ ID NO: 9817 - protein, 10 aa, Severe acute respiratory syndrome coronavirus 2
  REGION 1..10: note = Table B: HLA-DQA1*03:02-B1*03:03L HLA-DQA1*05:01-B1*03:01L HLA-DRB1*13:02L HLA-DRB1*13:03L HLA-DRB1*01:03L HLA-DRB1*04:02L HLA-DRB1*04:05L HLA-DQA1*01:02-B1*06:02L HLA-DRB1*01:02L HLA-DPA1*01:03-B1*03:01L HLA-DPA1*03:01-B1*04:02L
  REGION 1..10: note = CONT. FROM ABOVE: HLA-DRB1*14:01L HLA-DQA1*01:01-B1*05:01L HLA-D RB1*08:01M HLA-DRB5*01:01L HLA-DQA1*01-B1*05L HLA-DQA1*05:05-B1* 03:19L HLA-DQA1*05:01-B1*02:01L HLA-DPA1*01:03-B1*04:01L HLA-DQA 1*05:05-B1*03:116L HLA-DPA1*01:03-B1*04:02L HLA-DRB3*01:01L
  REGION 1..10: note = CONT. FROM ABOVE: HLA-DPA1*03:01-B1*105:01L HLA-DQA1*03:01-B1*03 :02M HLA-DPA1*01:02-B1*04:01L HLA-DRB1*10:01L HLA-DRB1*16:01L HL A-DQA1*01:03-B1*06:01L HLA-DQA1*02:01-B1*03:03L HLA-DRB1*15:03L
SHSQLGGLHL

SEQ ID NO: 9818 - protein, 10 aa, Severe acute respiratory syndrome coronavirus 2
  REGION 1..10: note = Table B: HLA-DQA1*03:02-B1*03:03L HLA-DQA1*05:01-B1*03:01L HLA-DQA1*03:01-B1*03:02L HLA-DQA1*02:01-B1*03:03L
HSQLGGLHLL

SEQ ID NO: 9819 - protein, 10 aa, Severe acute respiratory syndrome coronavirus 2
  REGION 1..10: note = Table B: HLA-DQA1*03:02-B1*03:03L HLA-DQA1*05:05-B1*03:19L HLA-DPA1*01:03-B1*104:01L HLA-DQA1*02:01-B1*03:03L HLA-DRB1*15:03L
SQLGGLHLLI

SEQ ID NO: 9820 - protein, 10 aa, Severe acute respiratory syndrome coronavirus 2
  REGION 1..10: note = Table B: HLA-DQA1*03:02-B1*03:03L HLA-DQA1*05:01-B1*03:01M HLA-DRB4*03:01NL HLA-DRB1*08:77M HLA-DPA1*01:03-B1*03:01L HLA-DPA1*03:01-B1*04:02L HLA-DRB1*03:01L HLA-DRB1*11:02L HLA-DRB1*14:02L HLA-DQA1*01-B1*05L HLA-DQA1*05:05-B1*03:19M
  REGION 1..10: note = CONT. FROM ABOVE: HLA-DQA1*05:01-B1*02:01L HLA-DRB4*01:01M HLA-D PA1*01:03-B1*04:01M HLA-DQA1*05:05-B1*03:116L HLA-DPA1*01:03-B1* 04:02L HLA-DQA1*03:01-B1*03:02L HLA-DPA1*01:03-B1*104:01L HLA-DP A1*01:02-B1*04:01L HLA-DRB1*10:01L HLA-DRB1*16:01L
  REGION 1..10: note = CONT. FROM ABOVE: HLA-DQA1*02:01-B1*03:03L HLA-DRB1*15:03L
KESPFELEDF

SEQ ID NO: 9821 - protein, 12 aa, Severe acute respiratory syndrome coronavirus 2
  REGION 1..12: note = Table B: HLA-DQA1*03:02-B1*03:03L HLA-DQA1*05:01-B1*03:01L HLA-DRB1*04:03L HLA-DRB1*13:03L HLA-DQA1*01:02-B1*06:02L HLA-DRB1*08:04L HLA-DRB1*14:01L HLA-DRB1*11:04L HLA-DRB1*11:01L HLA-DPA1*02:01-B1*13:01L HLA-DQA1*03:01-B1*03:02L
  REGION 1..12: note = CONT. FROM ABOVE: HLA-DPA1*01:03-B1*02:01L HLA-DPA1*01:03-B1*104 :01L HLA-DQA1*05:05-B1*03:01L HLA-DQA1*02:01-B1*03:03L
SPFELEDFIPMD

SEQ ID NO: 9822 - protein, 11 aa, Severe acute respiratory syndrome coronavirus 2
  REGION 1..11: note = Table B: HLA-DQA1*03:02-B1*03:03L HLA-DRB1*04:03L HLA-DRB1*13:03L HLA-DRB1*04:02L HLA-DRB1*04:05L HLA-DRB4*03:01NL HLA-DQA1*01-B1*05L HLA-DQA1*05:01-B1*02:01L HLA-DRB1*14:17L HLA-DRB1*16:01L HLA-DQA1*01:03-B1*06:01L
EDFIPMDSTVK

SEQ ID NO: 9823 - protein, 11 aa, Severe acute respiratory syndrome coronavirus 2
  REGION 1..11: note = Table B: HLA-DQA1*03:02-B1*03:03L HLA-DRB1*13:02L HLA-DQA1*01:02-B1*06:02L HLA-DPA1*01:03-B1*03:01L HLA-DRB1*14:01L HLA-DQA1*05:05-B1*03:19L HLA-DRB1*04:10L HLA-DPA1*03:01-B1*105:01L HLA-DRB1*14:54L
  REGION 1..11: note = CONT. FROM ABOVE: HLA-DQA1*05:05-B1*03:01L HLA-DPA1*01:02-B1*04: 01L HLA-DRB1*10:01L HLA-DQA1*01:03-B1*06:01L HLA-DRB1*04:08L
DFIPMDSTVKN

SEQ ID NO: 9824 - protein, 10 aa, Severe acute respiratory syndrome coronavirus 2
  REGION 1..10: note = Table B: HLA-DQA1*03:02-B1*03:03L HLA-DQA1*05:01-B1*03:01M HLA-DRB1*04:01L HLA-DRB1*04:03L HLA-DRB1*13:02L HLA-DRB1*13:03M HLA-DRB1*01:03M HLA-DRB1*04:02L HLA-DRB1*04:05L HLA-DQA1*01:02-B1*06:02H HLA-DRB1*01:01L HLA-DRB1*01:02L
  REGION 1..10: note = CONT. FROM ABOVE: HLA-DRB4*03:01NL HLA-DRB1*08:77L HLA-DPA1*01:0 3-B1*03:01M HLA-DPA1*03:01-B1*04:02L HLA-DRB1*03:01L HLA-DRB1*14 :01L HLA-DRB1*11:02L HLA-DRB1*11:03L HLA-DRB1*11:04L HLA-DRB1*14 :02M HLA-DRB1*08:01L HLA-DRB1*11:01L HLA-DRB5*01:01L
  REGION 1..10: note = CONT. FROM ABOVE: HLA-DQA1*01-B1*05L HLA-DQA1*05:05-B1*03:19L HL A-DRB4*02:01NL HLA-DQA1*05:01-B1*02:01M HLA-DRB4*01:01L HLA-DPA1 *01:03-B1*04:01M HLA-DQA1*05:05-B1*03:116L HLA-DPA1*01:03-B1*04: 02L HLA-DRB1*12:01L HLA-DPA1*02:01-B1*13:01L
  REGION 1..10: note = CONT. FROM ABOVE: HLA-DPA1*03:01-B1*105:01H HLA-DQA1*03:01-B1*03 :02L HLA-DPA1*01:03-B1*104:01L HLA-DQA1*05:05-B1*03:01L HLA-DRB1 *14:17L HLA-DPA1*01:02-B1*04:01L HLA-DRB1*10:01L HLA-DRB1*16:01L HLA-DQA1*01:03-B1*06:01L HLA-DRB1*08:02L HLA-DRB1*08:03L
  REGION 1..10: note = CONT. FROM ABOVE: HLA-DQA1*02:01-B1*03:03L HLA-DRB1*15:01L HLA -DRB1*15:03M
IPMDSTVKNY

SEQ ID NO: 9825 - protein, 13 aa, Severe acute respiratory syndrome coronavirus 2
  REGION 1..13: note = Table B: HLA-DQA1*03:02-B1*03:03L HLA-DRB1*04:03L HLA-DRB1*04:02L HLA-DQA1*01:02-B1*06:02L HLA-DQA1*05:01-B1*02:01L
DSTVKNYFITDAQ

SEQ ID NO: 9826 - protein, 12 aa, Severe acute respiratory syndrome coronavirus 2
  REGION 1..12: note = Table B: HLA-DQA1*03:02-B1*03:03L HLA-DRB1*13:02L HLA-DRB1*13:03L HLA-DRB1*01:03L HLA-DRB1*04:02L HLA-DRB1*04:04L HLA-DRB1*04:05L HLA-DQA1*01:02-B1*06:02L HLA-DRB1*01:02L HLA-DRB4*03:01NL HLA-DRB1*08:04L HLA-DPA1*01:03-B1*03:01L
  REGION 1..12: note = CONT. FROM ABOVE: HLA-DPA1*03:01-B1*04:02L HLA-DRB1*14:01L HLA-D QA1*01:01-B1*05:01L HLA-DRB1*08:01L HLA-DQA1*05:01-B1*02:01L HLA -DRB1*04:10L HLA-DRB1*12:01L HLA-DRB1*12:02L HLA-DPA1*02:01-B1*1 3:01L HLA-DPA1*03:01-B1*105:01L HLA-DRB1*14:54L HLA-DRB1*14:17L
  REGION 1..12: note = CONT. FROM ABOVE: HLA-DPA1*01:02-B1*04:01L HLA-DRB1*10:01L HLA-D RB1*16:01L HLA-DRB1*04:08L HLA-DRB1*08:03L HLA-DQA1*02:01-B1*03: 03L HLA-DRB1*15:03L
VKNYFITDAQTG

SEQ ID NO: 9827 - protein, 12 aa, Severe acute respiratory syndrome coronavirus 2
  REGION 1..12: note = Table B: HLA-DQA1*03:02-B1*03:03L HLA-DQA1*05:01-B1*03:01L HLA-DRB1*04:01L HLA-DRB1*13:02L HLA-DRB1*01:03L HLA-DRB1*01:02L HLA-DRB1*08:04L HLA-DRB1*08:77L HLA-DRB3*02:01L HLA-DPA1*01:03-B1*03:01L HLA-DRB1*14:01L HLA-DRB1*11:03L
  REGION 1..12: note = CONT. FROM ABOVE: HLA-DRB1*11:04L HLA-DRB1*14:02L HLA-DQA1*05:05 -B1*03:19L HLA-DRB1*04:10L HLA-DRB1*12:01L HLA-DRB1*12:02L HLA-D RB3*01:01L HLA-DPA1*03:01-B1*105:01L HLA-DQA1*05:05-B1*03:01L HL A-DRB1*10:01L HLA-DRB1*04:08L HLA-DQA1*02:01-B1*03:03L
  REGION 1..12: note = CONT. FROM ABOVE: HLA-DRB1*15:03L
NYFITDAQTGSS

SEQ ID NO: 9828 - protein, 10 aa, Severe acute respiratory syndrome coronavirus 2
  REGION 1..10: note = Table B: HLA-DQA1*03:02-B1*03:03L HLA-DQA1*05:01-B1*03:01L HLA-DRB1*04:01L HLA-DRB1*04:03L HLA-DRB1*13:02L HLA-DRB1*13:03M HLA-DRB1*01:03L HLA-DRB1*04:02L HLA-DRB1*04:04L HLA-DRB1*04:05L HLA-DQA1*01:02-B1*06:02L HLA-DRB1*01:01L HLA-DRB1*01:02L
  REGION 1..10: note = CONT. FROM ABOVE: HLA-DRB4*03:01NM HLA-DRB1*08:04L HLA-DRB1*08:7 7L HLA-DRB3*02:01L HLA-DPA1*01:03-B1*03:01L HLA-DRB1*14:01L HLA- DRB1*11:03L HLA-DRB1*11:04L HLA-DRB1*14:02L HLA-DQA1*01:01-B1*05 :01L HLA-DRB1*08:01L HLA-DRB1*11:01L HLA-DRB5*01:01L
  REGION 1..10: note = CONT. FROM ABOVE: HLA-DQA1*01-B1*05L HLA-DQA1*05:05-B1*03:19L HL A-DQA1*05:01-B1*02:01L HLA-DRB1*13:01L HLA-DRB4*01:01L HLA-DRB1* 04:10L HLA-DPA1*01:03-B1*04:02L HLA-DRB1*12:01M HLA-DRB1*12:02L HLA-DRB3*01:01L HLA-DPA1*03:01-B1*105:01L
  REGION 1..10: note = CONT. FROM ABOVE: HLA-DQA1*03:01-B1*03:02M HLA-DRB1*14:54L HLA-D QA1*05:05-B1*03:01L HLA-DRB1*14:17M HLA-DPA1*01:02-B1*04:01L HLA -DRB1*10:01L HLA-DRB1*16:01L HLA-DQA1*01:03-B1*06:01L HLA-DRB1*0 4:08L HLA-DRB1*08:02L HLA-DRB1*08:03L HLA-DQA1*02:01-B1*03:03L
  REGION 1..10: note = CONT. FROM ABOVE: HLA-DRB1*15:01L
ITDAQTGSSK

SEQ ID NO: 9829 - protein, 15 aa, Severe acute respiratory syndrome coronavirus 2
  REGION 1..15: note = Table B: HLA-DQA1*03:02-B1*03:03L
DAQTGSSKCVCSVID

SEQ ID NO: 9830 - protein, 10 aa, Severe acute respiratory syndrome coronavirus 2
  REGION 1..10: note = Table B: HLA-DQA1*03:02-B1*03:03L HLA-DRB1*13:03L HLA-DQA1*01:02-B1*06:02M HLA-DRB1*14:02L HLA-DQA1*05:05-B1*03:19L HLA-DQA1*05:01-B1*02:01L HLA-DRB4*01:01L HLA-DPA1*01:03-B1*04:01L
  REGION 1..10: note = CONT. FROM ABOVE: HLA-DPA1*02:01-B1*13:01L HLA-DPA1*03:01-B1*105 :01L HLA-DQA1*01:03-B1*06:01L HLA-DQA1*02:01-B1*03:03L HLA-DRB1* 15:03L
SVIDLLLDDF

SEQ ID NO: 9831 - protein, 10 aa, Severe acute respiratory syndrome coronavirus 2
  REGION 1..10: note = Table B: HLA-DQA1*03:02-B1*03:03L
LLLDDFVEII

SEQ ID NO: 9832 - protein, 10 aa, Severe acute respiratory syndrome coronavirus 2
  REGION 1..10: note = Table B: HLA-DQA1*03:02-B1*03:03L HLA-DQA1*05:01-B1*03:01L HLA-DQA1*01:02-B1*06:02L HLA-DQA1*01-B1*05L HLA-DQA1*05:01-B1*02:01L HLA-DPA1*03:01-B1*105:01L HLA-DQA1*03:01-B1*03:02L HLA-DPA1*01:02-B1*04:01L
  REGION 1..10: note = CONT. FROM ABOVE: HLA-DQA1*01:03-B1*06:01L HLA-DQA1*02:01-B1*03: 03L
DFVEIIKSQD

SEQ ID NO: 9833 - protein, 10 aa, Severe acute respiratory syndrome coronavirus 2
  REGION 1..10: note = Table B: HLA-DQA1*03:02-B1*03:03L HLA-DQA1*05:01-B1*03:01L HLA-DRB1*04:03L HLA-DRB1*13:03L HLA-DRB1*04:02L HLA-DRB1*04:05L HLA-DQA1*01:02-B1*06:02L HLA-DPA1*03:01-B1*04:02L HLA-DRB1*14:01L HLA-DRB1*08:01L HLA-DQA1*01-B1*05L
  REGION 1..10: note = CONT. FROM ABOVE: HLA-DQA1*05:01-B1*02:01L HLA-DPA1*03:01-B1*105 :01L HLA-DQA1*03:01-B1*03:02L HLA-DPA1*01:02-B1*04:01L HLA-DRB1* 16:01L HLA-DQA1*01:03-B1*06:01L HLA-DQA1*02:01-B1*03:03L HLA-DRB 1*15:03L
FVEIIKSQDL

SEQ ID NO: 9834 - protein, 10 aa, Severe acute respiratory syndrome coronavirus 2
  REGION 1..10: note = Table B: HLA-DQA1*03:02-B1*03:03L HLA-DQA1*05:01-B1*03:01L HLA-DRB1*04:03L HLA-DRB1*04:02L HLA-DRB1*04:05L HLA-DRB1*01:02L HLA-DRB4*03:01NL HLA-DRB1*14:01L HLA-DQA1*01-B1*05L HLA-DQA1*05:01-B1*02:01L HLA-DRB1*04:10L HLA-DRB1*12:01L
  REGION 1..10: note = CONT. FROM ABOVE: HLA-DQA1*03:01-B1*03:02L HLA-DRB1*14:54L HLA-D RB1*14:17L HLA-DPA1*01:02-B1*04:01L HLA-DRB1*16:01L HLA-DQA1*01: 03-B1*06:01L HLA-DQA1*02:01-B1*03:03L HLA-DRB1*15:03L
VEIIKSQDLS

SEQ ID NO: 9835 - protein, 10 aa, Severe acute respiratory syndrome coronavirus 2
  REGION 1..10: note = Table B: HLA-DQA1*03:02-B1*03:03L HLA-DQA1*05:01-B1*03:01L HLA-DRB1*13:03L HLA-DQA1*01:02-B1*06:02L HLA-DRB1*01:02L HLA-DQA1*05:05-B1*03:19L HLA-DQA1*05:01-B1*02:01L HLA-DPA1*02:01-B1*13:01L HLA-DPA1*03:01-B1*105:01L
  REGION 1..10: note = CONT. FROM ABOVE: HLA-DQA1*02:01-B1*03:03L HLA-DRB1*15:03L
EIIKSQDLSV

SEQ ID NO: 9836 - protein, 11 aa, Severe acute respiratory syndrome coronavirus 2
  REGION 1..11: note = Table B: HLA-DQA1*03:02-B1*03:03L HLA-DQA1*05:01-B1*03:01L HLA-DRB1*04:01L HLA-DRB1*13:02L HLA-DRB1*13:03L HLA-DRB1*01:03L HLA-DRB1*04:02M HLA-DRB1*04:04L HLA-DRB1*04:05L HLA-DQA1*01:02-B1*06:02L HLA-DRB1*01:02L HLA-DRB4*03:01NL
  REGION 1..11: note = CONT. FROM ABOVE: HLA-DRB1*08:04L HLA-DRB1*08:77L HLA-DRB3*02:01 L HLA-DPA1*01:03-B1*03:01L HLA-DPA1*03:01-B1*04:02L HLA-DRB1*14: 01L HLA-DRB1*11:03L HLA-DRB1*11:04L HLA-DRB1*14:02L HLA-DQA1*05: 05-B1*03:19L HLA-DRB1*04:10L HLA-DRB1*09:01L HLA-DRB1*12:01L
  REGION 1..11: note = CONT. FROM ABOVE: HLA-DRB1*12:02L HLA-DPA1*03:01-B1*105:01L HLA- DRB1*14:54L HLA-DQA1*05:05-B1*03:01L HLA-DRB1*14:17M HLA-DPA1*01 :02-B1*04:01L HLA-DRB1*07:01L HLA-DRB1*10:01L HLA-DQA1*01:03-B1* 06:01L HLA-DRB1*04:08L HLA-DRB1*08:03L HLA-DQA1*02:01-B1*03:03L
IIKSQDLSVVS

SEQ ID NO: 9837 - protein, 10 aa, Severe acute respiratory syndrome coronavirus 2
  REGION 1..10: note = Table B: HLA-DQA1*03:02-B1*03:03L HLA-DQA1*05:01-B1*03:01L HLA-DRB1*11:02L HLA-DQA1*05:05-B1*03:19M HLA-DQA1*05:01-B1*02:01L HLA-DQA1*05:05-B1*03:116L HLA-DRB1*09:01L HLA-DQA1*03:01-B1*03:02L
  REGION 1..10: note = CONT. FROM ABOVE: HLA-DPA1*01:03-B1*104:01L HLA-DRB1*10:01L HLA- DRB1*16:01L HLA-DQA1*02:01-B1*03:03L HLA-DRB1*15:03L
SQDLSVVSKV

SEQ ID NO: 9838 - protein, 10 aa, Severe acute respiratory syndrome coronavirus 2
  REGION 1..10: note = Table B: HLA-DQA1*03:02-B1*03:03L HLA-DQA1*05:01-B1*03:01L HLA-DRB1*04:03L HLA-DRB1*13:02L HLA-DRB1*13:03L HLA-DRB1*01:03L HLA-DRB1*04:02L HLA-DQA1*01:02-B1*06:02L HLA-DRB4*03:01NL HLA-DRB1*14:01L HLA-DQA1*01:01-B1*05:01L HLA-DRB1*08:01L
  REGION 1..10: note = CONT. FROM ABOVE: HLA-DRB1*12:01L HLA-DQA1*03:01-B1*03:02L HLA-D QA1*05:05-B1*03:01L HLA-DRB1*14:17L HLA-DPA1*01:02-B1*04:01L HLA -DRB1*16:01L HLA-DQA1*01:03-B1*06:01L HLA-DQA1*02:01-B1*03:03L
DLSVVSKVVK

SEQ ID NO: 9839 - protein, 10 aa, Severe acute respiratory syndrome coronavirus 2
  REGION 1..10: note = Table B: HLA-DQA1*03:02-B1*03:03L HLA-DQA1*01:02-B1*06:02L HLA-DQA1*05:05-B1*03:19L HLA-DPA1*02:01-B1*13:01L HLA-DRB1*16:01L HLA-DQA1*01:03-B1*06:01L HLA-DQA1*02:01-B1*03:03L HLA-DRB1*15:03L
VVSKVVKVTI

SEQ ID NO: 9840 - protein, 13 aa, Severe acute respiratory syndrome coronavirus 2
  REGION 1..13: note = Table B: HLA-DQA1*03:02-B1*03:03L HLA-DRB1*01:02L HLA-DPA1*01:03-B1*03:01L HLA-DRB1*14:01L HLA-DQA1*05:01-B1*02:01L HLA-DPA1*02:01-B1*13:01L HLA-DPA1*03:01-B1*105:01L HLA-DRB1*16:01L HLA-DRB1*04:08L
  REGION 1..13: note = CONT. FROM ABOVE: HLA-DQA1*02:01-B1*03:03L
VSKVVKVTIDYTE

SEQ ID NO: 9841 - protein, 12 aa, Severe acute respiratory syndrome coronavirus 2
  REGION 1..12: note = Table B: HLA-DQA1*03:02-B1*03:03L HLA-DQA1*05:01-B1*03:01L HLA-DRB1*13:02L HLA-DRB1*13:03L HLA-DRB1*01:03L HLA-DRB1*04:02L HLA-DRB1*04:04L HLA-DRB1*04:05L HLA-DQA1*01:02-B1*06:02L HLA-DRB1*01:02L HLA-DRB4*03:01NL HLA-DRB1*08:04L
  REGION 1..12: note = CONT. FROM ABOVE: HLA-DPA1*01:03-B1*03:01L HLA-DPA1*03:01-B1*04: 02L HLA-DRB1*14:01L HLA-DRB1*04:10L HLA-DRB1*12:01L HLA-DPA1*02: 01-B1*13:01L HLA-DPA1*03:01-B1*105:01L HLA-DRB1*14:54L HLA-DQA1* 05:05-B1*03:01L HLA-DRB1*14:17L HLA-DPA1*01:02-B1*04:01L
  REGION 1..12: note = CONT. FROM ABOVE: HLA-DRB1*16:01L HLA-DQA1*01:03-B1*06:01L HLA-D RB1*04:08L HLA-DQA1*02:01-B1*03:03L HLA-DRB1*15:03L
VVKVTIDYTEIS

SEQ ID NO: 9842 - protein, 10 aa, Severe acute respiratory syndrome coronavirus 2
  REGION 1..10: note = Table B: HLA-DQA1*03:02-B1*03:03L HLA-DQA1*05:01-B1*03:01L HLA-DRB1*04:03L HLA-DRB1*13:03L HLA-DRB1*01:03L HLA-DRB1*04:05L HLA-DQA1*01:02-B1*06:02M HLA-DRB1*08:77L HLA-DPA1*01:03-B1*03:01L HLA-DPA1*03:01-B1*04:02L
  REGION 1..10: note = CONT. FROM ABOVE: HLA-DRB1*03:01L HLA-DRB1*14:01L HLA-DRB1*14:02 L HLA-DQA1*01-B1*05L HLA-DQA1*05:05-B1*03:19L HLA-DQA1*05:01-B1* 02:01L HLA-DRB4*01:01L HLA-DPA1*01:03-B1*04:01L HLA-DQA1*05:05-B 1*03:116L HLA-DPA1*01:03-B1*04:02L HLA-DRB1*12:01L
  REGION 1..10: note = CONT. FROM ABOVE: HLA-DPA1*02:01-B1*13:01L HLA-DPA1*03:01-B1*105 :01L HLA-DQA1*03:01-B1*03:02L HLA-DPA1*01:03-B1*104:01L HLA-DPA1 *01:02-B1*04:01L HLA-DRB1*10:01L HLA-DRB1*16:01L HLA-DQA1*01:03- B1*06:01L HLA-DQA1*02:01-B1*03:03L HLA-DRB1*15:03L
VTIDYTEISF

SEQ ID NO: 9843 - protein, 10 aa, Severe acute respiratory syndrome coronavirus 2
  REGION 1..10: note = Table B: HLA-DQA1*03:02-B1*03:03L HLA-DPA1*03:01-B1*04:02L HLA-DQA1*01-B1*05L HLA-DQA1*05:01-B1*02:01L HLA-DPA1*03:01-B1*105:01L HLA-DQA1*03:01-B1*03:02L HLA-DPA1*01:02-B1*04:01L HLA-DQA1*01:03-B1*06:01L
  REGION 1..10: note = CONT. FROM ABOVE: HLA-DRB1*15:03L
TIDYTEISFM

SEQ ID NO: 9844 - protein, 10 aa, Severe acute respiratory syndrome coronavirus 2
  REGION 1..10: note = Table B: HLA-DQA1*03:02-B1*03:03L HLA-DQA1*03:01-B1*03:02L
GHVETFYPKL

SEQ ID NO: 9845 - protein, 10 aa, Severe acute respiratory syndrome coronavirus 2
  REGION 1..10: note = Table B: HLA-DQA1*03:02-B1*03:03L
VETFYPKLQS

SEQ ID NO: 9846 - protein, 13 aa, Severe acute respiratory syndrome coronavirus 2
  REGION 1..13: note = Table B: HLA-DQA1*03:02-B1*03:03L HLA-DRB1*04:03L HLA-DRB1*13:02L HLA-DRB1*01:03L HLA-DRB1*04:02L HLA-DRB1*04:04L HLA-DRB1*04:05L HLA-DRB1*01:02L HLA-DRB4*03:01NL HLA-DPA1*01:03-B1*03:01L HLA-DQA1*01:01-B1*05:01L
  REGION 1..13: note = CONT. FROM ABOVE: HLA-DQA1*01-B1*05L HLA-DQA1*05:05-B1*03:19L HL A-DRB1*04:10L HLA-DRB1*12:01L HLA-DQA1*03:01-B1*03:02L HLA-DRB1* 14:54L HLA-DQA1*05:05-B1*03:01L HLA-DRB1*14:17L HLA-DRB1*16:01L HLA-DQA1*01:03-B1*06:01L HLA-DRB1*04:08L
YPKLQSSQAWQPG

SEQ ID NO: 9847 - protein, 12 aa, Severe acute respiratory syndrome coronavirus 2
  REGION 1..12: note = Table B: HLA-DQA1*03:02-B1*03:03L HLA-DQA1*05:01-B1*03:01L HLA-DQA1*01:02-B1*06:02L HLA-DQA1*05:05-B1*03:19L HLA-DQA1*05:01-B1*02:01L HLA-DPA1*03:01-B1*105:01L HLA-DQA1*03:01-B1*03:02L HLA-DQA1*05:05-B1*03:01L
  REGION 1..12: note = CONT. FROM ABOVE: HLA-DQA1*01:03-B1*06:01L HLA-DQA1*02:01-B1*03: 03L
LQSSQAWQPGVA

SEQ ID NO: 9848 - protein, 10 aa, Severe acute respiratory syndrome coronavirus 2
  REGION 1..10: note = Table B: HLA-DQA1*03:02-B1*03:03L
SQAWQPGVAM

SEQ ID NO: 9849 - protein, 11 aa, Severe acute respiratory syndrome coronavirus 2
  REGION 1..11: note = Table B: HLA-DQA1*03:02-B1*03:03L HLA-DQA1*05:01-B1*03:01L HLA-DQA1*05:05-B1*03:19L HLA-DQA1*03:01-B1*03:02L HLA-DQA1*05:05-B1*03:01L
QAWQPGVAMPN

SEQ ID NO: 9850 - protein, 10 aa, Severe acute respiratory syndrome coronavirus 2
  REGION 1..10: note = Table B: HLA-DQA1*03:02-B1*03:03L HLA-DQA1*05:01-B1*03:01L HLA-DQA1*01:02-B1*06:02L HLA-DQA1*05:05-B1*03:19L HLA-DQA1*05:01-B1*02:01L HLA-DPA1*03:01-B1*105:01L HLA-DQA1*03:01-B1*03:02L HLA-DQA1*05:05-B1*03:01L
  REGION 1..10: note = CONT. FROM ABOVE: HLA-DQA1*01:03-B1*06:01L HLA-DQA1*02:01-B1*03: 03L
WQPGVAMPNL

SEQ ID NO: 9851 - protein, 11 aa, Severe acute respiratory syndrome coronavirus 2
  REGION 1..11: note = Table B: HLA-DQA1*03:02-B1*03:03L HLA-DRB1*04:03L HLA-DQA1*01:01-B1*05:01L
QPGVAMPNLYK

SEQ ID NO: 9852 - protein, 12 aa, Severe acute respiratory syndrome coronavirus 2
  REGION 1..12: note = Table B: HLA-DQA1*03:02-B1*03:03L HLA-DQA1*05:01-B1*03:01L HLA-DRB1*04:04L HLA-DRB1*04:05L HLA-DQA1*01:02-B1*06:02L HLA-DRB1*01:02L HLA-DRB1*14:01L HLA-DRB1*11:03L HLA-DRB1*11:04L HLA-DQA1*01:01-B1*05:01L HLA-DRB1*08:01L
  REGION 1..12: note = CONT. FROM ABOVE: HLA-DQA1*05:01-B1*02:01L HLA-DRB1*04:10L HLA-D RB1*12:02L HLA-DPA1*03:01-B1*105:01L HLA-DRB1*14:54L HLA-DRB1*10 :01L HLA-DQA1*01:03-B1*06:01L HLA-DRB1*04:08L HLA-DRB1*08:03L HL A-DRB1*15:03L
LQNYGDSATLPK

SEQ ID NO: 9853 - protein, 10 aa, Severe acute respiratory syndrome coronavirus 2
  REGION 1..10: note = Table B: HLA-DQA1*03:02-B1*03:03L HLA-DQA1*05:01-B1*03:01L HLA-DRB1*04:03L HLA-DRB1*13:02L HLA-DRB1*13:03L HLA-DRB1*01:03L HLA-DRB1*04:02L HLA-DRB1*04:05L HLA-DRB4*03:01NL HLA-DRB1*08:77L HLA-DRB1*14:01L HLA-DRB1*11:04L HLA-DRB1*14:02L
  REGION 1..10: note = CONT. FROM ABOVE: HLA-DQA1*01:01-B1*05:01L HLA-DQA1*01-B1*05L HL A-DQA1*05:05-B1*03:19L HLA-DQA1*05:01-B1*02:01L HLA-DRB1*04:10L HLA-DRB1*12:01L HLA-DPA1*03:01-B1*105:01L HLA-DQA1*03:01-B1*03:0 2L HLA-DRB1*14:54L HLA-DQA1*05:05-B1*03:01L HLA-DRB1*14:17L
  REGION 1..10: note = CONT. FROM ABOVE: HLA-DPA1*01:02-B1*04:01L HLA-DRB1*16:01L HLA-D QA1*01:03-B1*06:01L HLA-DRB1*04:08L HLA-DQA1*02:01-B1*03:03L
YGDSATLPKG

SEQ ID NO: 9854 - protein, 10 aa, Severe acute respiratory syndrome coronavirus 2
  REGION 1..10: note = Table B: HLA-DQA1*03:02-B1*03:03L HLA-DQA1*05:05-B1*03:19L HLA-DPA1*01:03-B1*104:01L
GDSATLPKGI

SEQ ID NO: 9855 - protein, 10 aa, Severe acute respiratory syndrome coronavirus 2
  REGION 1..10: note = Table B: HLA-DQA1*03:02-B1*03:03L HLA-DQA1*05:01-B1*03:01L HLA-DQA1*01:02-B1*06:02L HLA-DQA1*05:05-B1*03:19L HLA-DQA1*05:01-B1*02:01L HLA-DPA1*03:01-B1*105:01L HLA-DQA1*03:01-B1*03:02L HLA-DQA1*05:05-B1*03:01L
  REGION 1..10: note = CONT. FROM ABOVE: HLA-DPA1*01:02-B1*04:01L HLA-DQA1*01:03-B1*06: 01L HLA-DQA1*02:01-B1*03:03L
DSATLPKGIM

SEQ ID NO: 9856 - protein, 10 aa, Severe acute respiratory syndrome coronavirus 2
  REGION 1..10: note = Table B: HLA-DQA1*03:02-B1*03:03L HLA-DQA1*05:01-B1*03:01L HLA-DQA1*03:01-B1*03:02L HLA-DQA1*02:01-B1*03:03L
SATLPKGIMM

SEQ ID NO: 9857 - protein, 10 aa, Severe acute respiratory syndrome coronavirus 2
  REGION 1..10: note = Table B: HLA-DQA1*03:02-B1*03:03L HLA-DQA1*05:05-B1*03:19L
TLPKGIMMNV

SEQ ID NO: 9858 - protein, 13 aa, Severe acute respiratory syndrome coronavirus 2
  REGION 1..13: note = Table B: HLA-DQA1*03:02-B1*03:03L HLA-DRB1*04:03L HLA-DRB1*04:02L HLA-DRB1*04:05L HLA-DRB1*01:02L HLA-DPA1*01:03-B1*03:01L HLA-DRB1*14:01L HLA-DQA1*05:01-B1*02:01L HLA-DRB1*12:01L HLA-DRB1*16:01L
  REGION 1..13: note = CONT. FROM ABOVE: HLA-DRB1*15:03L
LPKGIMMNVAKYT

SEQ ID NO: 9859 - protein, 10 aa, Severe acute respiratory syndrome coronavirus 2
  REGION 1..10: note = Table B: HLA-DQA1*03:02-B1*03:03L HLA-DQA1*05:01-B1*03:01L HLA-DQA1*01:02-B1*06:02L HLA-DPA1*03:01-B1*04:02L HLA-DRB1*14:01L HLA-DRB1*14:02L HLA-DQA1*01-B1*05L HLA-DQA1*05:05-B1*03:19L HLA-DQA1*05:01-B1*02:01L
  REGION 1..10: note = CONT. FROM ABOVE: HLA-DPA1*01:03-B1*04:01L HLA-DPA1*01:03-B1*04: 02L HLA-DRB1*12:01L HLA-DPA1*03:01-B1*105:01L HLA-DQA1*03:01-B1* 03:02L HLA-DPA1*01:02-B1*04:01L HLA-DRB1*16:01L HLA-DQA1*01:03-B 1*06:01L HLA-DQA1*02:01-B1*03:03L HLA-DRB1*15:03L
MMNVAKYTQL

SEQ ID NO: 9860 - protein, 16 aa, Severe acute respiratory syndrome coronavirus 2
  REGION 1..16: note = Table B: HLA-DQA1*03:02-B1*03:03L HLA-DRB1*11:02L
NVAKYTQLCQYLNTLT

SEQ ID NO: 9861 - protein, 12 aa, Severe acute respiratory syndrome coronavirus 2
  REGION 1..12: note = Table B: HLA-DQA1*03:02-B1*03:03L HLA-DQA1*05:01-B1*03:01L HLA-DRB1*04:03L HLA-DQA1*01:02-B1*06:02L HLA-DPA1*03:01-B1*04:02L HLA-DQA1*05:05-B1*03:19L HLA-DQA1*05:01-B1*02:01L HLA-DRB1*12:01L
  REGION 1..12: note = CONT. FROM ABOVE: HLA-DPA1*03:01-B1*105:01L HLA-DQA1*05:05-B1*03 :01L HLA-DRB1*14:17L HLA-DQA1*01:03-B1*06:01L HLA-DQA1*02:01-B1* 03:03L HLA-DRB1*15:03L
YLNTLTLAVPYN

SEQ ID NO: 9862 - protein, 12 aa, Severe acute respiratory syndrome coronavirus 2
  REGION 1..12: note = Table B: HLA-DQA1*03:02-B1*03:03L HLA-DRB1*01:02L HLA-DPA1*01:03-B1*03:01L HLA-DQA1*05:05-B1*03:19L HLA-DQA1*05:01-B1*02:01L HLA-DRB1*12:01L HLA-DRB1*16:01L HLA-DRB1*15:03L
NTLTLAVPYNMR

SEQ ID NO: 9863 - protein, 14 aa, Severe acute respiratory syndrome coronavirus 2
  REGION 1..14: note = Table B: HLA-DQA1*03:02-B1*03:03L HLA-DQA1*05:01-B1*03:01L HLA-DQA1*01:02-B1*06:02L HLA-DQA1*05:05-B1*03:19L HLA-DQA1*05:01-B1*02:01L HLA-DQA1*05:05-B1*03:01L HLA-DQA1*01:03-B1*06:01L
VIHFGAGSDKGVAP

SEQ ID NO: 9864 - protein, 12 aa, Severe acute respiratory syndrome coronavirus 2
  REGION 1..12: note = Table B: HLA-DQA1*03:02-B1*03:03L HLA-DQA1*05:01-B1*03:01L HLA-DRB1*04:03L HLA-DRB1*13:03L HLA-DRB1*01:03L HLA-DRB1*04:02L HLA-DRB1*04:05L HLA-DRB4*03:01NL HLA-DRB1*08:77L HLA-DRB1*14:02L HLA-DQA1*01:01-B1*05:01L HLA-DQA1*05:05-B1*03:19L
  REGION 1..12: note = CONT. FROM ABOVE: HLA-DQA1*05:01-B1*02:01L HLA-DRB1*12:01L HLA-D RB1*14:54L HLA-DQA1*05:05-B1*03:01L HLA-DRB1*14:17L HLA-DRB1*16: 01L HLA-DQA1*01:03-B1*06:01L HLA-DRB1*04:08L HLA-DQA1*02:01-B1*0 3:03L
FGAGSDKGVAPG

SEQ ID NO: 9865 - protein, 10 aa, Severe acute respiratory syndrome coronavirus 2
  REGION 1..10: note = Table B: HLA-DQA1*03:02-B1*03:03L HLA-DRB1*04:03L HLA-DRB1*13:03L HLA-DQA1*01-B1*05L HLA-DQA1*03:01-B1*03:02L
SDKGVAPGTA

SEQ ID NO: 9866 - protein, 11 aa, Severe acute respiratory syndrome coronavirus 2
  REGION 1..11: note = Table B: HLA-DQA1*03:02-B1*03:03L
DKGVAPGTAVL

SEQ ID NO: 9867 - protein, 12 aa, Severe acute respiratory syndrome coronavirus 2
  REGION 1..12: note = Table B: HLA-DQA1*03:02-B1*03:03L HLA-DRB1*04:03L HLA-DRB1*04:05L HLA-DRB1*01:02L HLA-DRB1*11:02L HLA-DRB4*01:01L HLA-DQA1*05:05-B1*03:116L HLA-DPA1*01:03-B1*104:01L HLA-DPA1*01:02-B1*04:01L HLA-DRB1*07:01L HLA-DRB1*10:01L
  REGION 1..12: note = CONT. FROM ABOVE: HLA-DRB1*04:08L
GVAPGTAVLRQW

SEQ ID NO: 9868 - protein, 14 aa, Severe acute respiratory syndrome coronavirus 2
  REGION 1..14: note = Table B: HLA-DQA1*03:02-B1*03:03L HLA-DRB1*01:02L HLA-DRB1*08:01L HLA-DRB1*04:08L
VAPGTAVLRQWLPT

SEQ ID NO: 9869 - protein, 14 aa, Severe acute respiratory syndrome coronavirus 2
  REGION 1..14: note = Table B: HLA-DQA1*03:02-B1*03:03L
APGTAVLRQWLPTG

SEQ ID NO: 9870 - protein, 12 aa, Severe acute respiratory syndrome coronavirus 2
  REGION 1..12: note = Table B: HLA-DQA1*03:02-B1*03:03L HLA-DRB1*04:03L HLA-DRB1*04:02L HLA-DQA1*01:02-B1*06:02L HLA-DRB1*01:02L HLA-DPA1*03:01-B1*04:02L HLA-DRB1*14:01L HLA-DQA1*05:01-B1*02:01L HLA-DRB1*12:01L
  REGION 1..12: note = CONT. FROM ABOVE: HLA-DPA1*02:01-B1*13:01L HLA-DPA1*03:01-B1*105 :01L HLA-DQA1*03:01-B1*03:02L HLA-DPA1*01:02-B1*04:01L HLA-DRB1* 16:01L HLA-DQA1*02:01-B1*03:03L HLA-DRB1*15:03L
AVLRQWLPTGTL

SEQ ID NO: 9871 - protein, 10 aa, Severe acute respiratory syndrome coronavirus 2
  REGION 1..10: note = Table B: HLA-DQA1*03:02-B1*03:03M HLA-DQA1*05:01-B1*03:01L HLA-DRB1*13:02L HLA-DRB1*01:03L HLA-DRB1*04:05L HLA-DQA1*01:02-B1*06:02L HLA-DPA1*03:01-B1*04:02L HLA-DRB1*14:01L HLA-DRB1*14:02L HLA-DRB1*08:01L
  REGION 1..10: note = CONT. FROM ABOVE: HLA-DQA1*01-B1*05L HLA-DQA1*05:05-B1*03:19L HL A-DQA1*05:01-B1*02:01L HLA-DPA1*01:03-B1*04:01L HLA-DQA1*05:05-B 1*03:116L HLA-DRB1*09:01L HLA-DPA1*01:03-B1*04:02L HLA-DPA1*02:0 1-B1*13:01L HLA-DPA1*03:01-B1*105:01L HLA-DQA1*03:01-B1*03:02L
  REGION 1..10: note = CONT. FROM ABOVE: HLA-DPA1*01:03-B1*104:01L HLA-DPA1*01:02-B1*04 :01L HLA-DRB1*16:01L HLA-DQA1*01:03-B1*06:01L HLA-DQA1*02:01-B1* 03:03L HLA-DRB1*15:03L
RQWLPTGTLL

SEQ ID NO: 9872 - protein, 11 aa, Severe acute respiratory syndrome coronavirus 2
  REGION 1..11: note = Table B: HLA-DQA1*03:02-B1*03:03L HLA-DQA1*05:01-B1*02:01L HLA-DQA1*03:01-B1*03:02L HLA-DQA1*02:01-B1*03:03L
LPTGTLLVDSD

SEQ ID NO: 9873 - protein, 10 aa, Severe acute respiratory syndrome coronavirus 2
  REGION 1..10: note = Table B: HLA-DQA1*03:02-B1*03:03L HLA-DRB1*04:03L HLA-DQA1*01:02-B1*06:02L HLA-DPA1*03:01-B1*04:02L HLA-DRB1*14:02L HLA-DQA1*01-B1*05L HLA-DQA1*05:05-B1*03:19L HLA-DQA1*05:01-B1*02:01L HLA-DRB4*01:01L
  REGION 1..10: note = CONT. FROM ABOVE: HLA-DPA1*01:03-B1*04:01L HLA-DPA1*02:01-B1*13: 01L HLA-DPA1*03:01-B1*105:01L HLA-DQA1*03:01-B1*03:02L HLA-DQA1* 01:03-B1*06:01L HLA-DQA1*02:01-B1*03:03L HLA-DRB1*15:03L
LLVDSDLNDF

SEQ ID NO: 9874 - protein, 13 aa, Severe acute respiratory syndrome coronavirus 2
  REGION 1..13: note = Table B: HLA-DQA1*03:02-B1*03:03L HLA-DQA1*03:01-B1*03:02L HLA-DQA1*01:03-B1*06:01L
VDSDLNDFVSDAD

SEQ ID NO: 9875 - protein, 14 aa, Severe acute respiratory syndrome coronavirus 2
  REGION 1..14: note = Table B: HLA-DQA1*03:02-B1*03:03L HLA-DRB1*04:02L HLA-DRB1*04:05L HLA-DQA1*01:01-B1*05:01L HLA-DRB1*04:10L HLA-DRB1*16:01L HLA-DQA1*01:03-B1*06:01L HLA-DQA1*02:01-B1*03:03L
DSDLNDFVSDADST

SEQ ID NO: 9876 - protein, 10 aa, Severe acute respiratory syndrome coronavirus 2
  REGION 1..10: note = Table B: HLA-DQA1*03:02-B1*03:03L HLA-DRB1*04:03L HLA-DRB1*13:03L HLA-DQA1*01-B1*05L HLA-DQA1*05:01-B1*02:01L HLA-DQA1*03:01-B1*03:02L HLA-DRB1*16:01L
DFVSDADSTL

SEQ ID NO: 9877 - protein, 10 aa, Severe acute respiratory syndrome coronavirus 2
  REGION 1..10: note = Table B: HLA-DQA1*03:02-B1*03:03L HLA-DQA1*05:05-B1*03:19L
FVSDADSTLI

SEQ ID NO: 9878 - protein, 14 aa, Severe acute respiratory syndrome coronavirus 2
  REGION 1..14: note = Table B: HLA-DQA1*03:02-B1*03:03L HLA-DQA1*05:01-B1*03:01L HLA-DQA1*01:02-B1*06:02L HLA-DQA1*05:05-B1*03:19L HLA-DPA1*03:01-B1*105:01L HLA-DQA1*03:01-B1*03:02L HLA-DQA1*05:05-B1*03:01L HLA-DQA1*02:01-B1*03:03L
VSDADSTLIGDCAT

SEQ ID NO: 9879 - protein, 12 aa, Severe acute respiratory syndrome coronavirus 2
  REGION 1..12: note = Table B: HLA-DQA1*03:02-B1*03:03L HLA-DQA1*05:01-B1*03:01L HLA-DQA1*01:02-B1*06:02L HLA-DQA1*03:01-B1*03:02L HLA-DQA1*05:05-B1*03:01L HLA-DQA1*01:03-B1*06:01L HLA-DQA1*02:01-B1*03:03L
DSTLIGDCATVH

SEQ ID NO: 9880 - protein, 12 aa, Severe acute respiratory syndrome coronavirus 2
  REGION 1..12: note = Table B: HLA-DQA1*03:02-B1*03:03L HLA-DQA1*05:01-B1*03:01L HLA-DRB1*04:03L HLA-DQA1*05:05-B1*03:19L HLA-DPA1*03:01-B1*105:01L HLA-DQA1*03:01-B1*03:02L
LIGDCATVHTAN

SEQ ID NO: 9881 - protein, 11 aa, Severe acute respiratory syndrome coronavirus 2
  REGION 1..11: note = Table B: HLA-DQA1*03:02-B1*03:03L HLA-DQA1*05:01-B1*02:01L
DLIISDMYDPK

SEQ ID NO: 9882 - protein, 12 aa, Severe acute respiratory syndrome coronavirus 2
  REGION 1..12: note = Table B: HLA-DQA1*03:02-B1*03:03L HLA-DQA1*01:02-B1*06:02L HLA-DRB1*14:01L HLA-DPA1*02:01-B1*13:01L HLA-DPA1*03:01-B1*105:01L HLA-DPA1*01:02-B1*04:01L HLA-DQA1*01:03-B1*06:01L HLA-DRB1*15:03L
IISDMYDPKTKN

SEQ ID NO: 9883 - protein, 10 aa, Severe acute respiratory syndrome coronavirus 2
  REGION 1..10: note = Table B: HLA-DQA1*03:02-B1*03:03L HLA-DQA1*05:01-B1*03:01L HLA-DRB1*13:03L HLA-DRB1*04:05L HLA-DQA1*01:02-B1*06:02L HLA-DRB1*01:02L HLA-DPA1*03:01-B1*04:02L HLA-DRB1*14:01L HLA-DRB1*14:02L HLA-DRB1*08:01L HLA-DQA1*01-B1*05L
  REGION 1..10: note = CONT. FROM ABOVE: HLA-DQA1*05:05-B1*03:19L HLA-DQA1*05:01-B1*02: 01L HLA-DPA1*01:03-B1*04:01L HLA-DQA1*05:05-B1*03:116L HLA-DPA1* 02:01-B1*13:01L HLA-DPA1*03:01-B1*105:01M HLA-DQA1*03:01-B1*03:0 2L HLA-DPA1*01:02-B1*04:01L HLA-DRB1*16:01L
  REGION 1..10: note = CONT. FROM ABOVE: HLA-DQA1*01:03-B1*06:01L HLA-DRB1*08:03L HLA-D QA1*02:01-B1*03:03L HLA-DRB1*15:03L
DMYDPKTKNV

SEQ ID NO: 9884 - protein, 16 aa, Severe acute respiratory syndrome coronavirus 2
  REGION 1..16: note = Table B: HLA-DQA1*03:02-B1*03:03L HLA-DQA1*05:01-B1*03:01L HLA-DRB1*13:02L HLA-DRB1*08:04L HLA-DPA1*01:03-B1*03:01L HLA-DRB1*14:01L HLA-DRB1*11:04L HLA-DRB1*11:01L HLA-DQA1*05:01-B1*02:01L HLA-DRB3*01:01L
  REGION 1..16: note = CONT. FROM ABOVE: HLA-DPA1*03:01-B1*105:01L HLA-DQA1*05:05-B1*03 :01L HLA-DRB1*07:01L HLA-DRB1*08:03L HLA-DRB1*15:03L
DPKTKNVTKENDSKEG

SEQ ID NO: 9885 - protein, 10 aa, Severe acute respiratory syndrome coronavirus 2
  REGION 1..10: note = Table B: HLA-DQA1*03:02-B1*03:03L HLA-DQA1*05:01-B1*03:01M HLA-DRB1*13:03L HLA-DRB1*01:03L HLA-DRB4*03:01NL HLA-DRB1*08:77M HLA-DPA1*01:03-B1*03:01L HLA-DPA1*03:01-B1*04:02M HLA-DRB1*03:01L HLA-DRB1*11:02L HLA-DQA1*01-B1*05L
  REGION 1..10: note = CONT. FROM ABOVE: HLA-DQA1*05:05-B1*03:19L HLA-DQA1*05:01-B1*02: 01L HLA-DRB4*01:01M HLA-DPA1*01:03-B1*04:01M HLA-DQA1*05:05-B1*0 3:116L HLA-DPA1*01:03-B1*04:02L HLA-DRB1*12:01L HLA-DQA1*03:01-B 1*03:02L HLA-DPA1*01:03-B1*104:01L HLA-DPA1*01:02-B1*04:01L
  REGION 1..10: note = CONT. FROM ABOVE: HLA-DRB1*10:01L HLA-DRB1*16:01L HLA-DRB1*15:03 M
KENDSKEGFF

SEQ ID NO: 9886 - protein, 10 aa, Severe acute respiratory syndrome coronavirus 2
  REGION 1..10: note = Table B: HLA-DQA1*03:02-B1*03:03L HLA-DQA1*01:02-B1*06:02L HLA-DPA1*03:01-B1*04:02L HLA-DQA1*05:05-B1*03:19L HLA-DQA1*05:01-B1*02:01L HLA-DPA1*02:01-B1*13:01L HLA-DPA1*03:01-B1*105:01L HLA-DPA1*01:02-B1*04:01L
  REGION 1..10: note = CONT. FROM ABOVE: HLA-DQA1*01:03-B1*06:01L HLA-DQA1*02:01-B1*03: 03L HLA-DRB1*15:03L
YICGFIQQKL

SEQ ID NO: 9887 - protein, 12 aa, Severe acute respiratory syndrome coronavirus 2
  REGION 1..12: note = Table B: HLA-DQA1*03:02-B1*03:03L HLA-DQA1*05:01-B1*03:01L HLA-DRB1*04:02L HLA-DQA1*01:02-B1*06:02L HLA-DRB1*14:01L HLA-DQA1*05:05-B1*03:19L HLA-DQA1*03:01-B1*03:02L HLA-DQA1*05:05-B1*03:01L HLA-DRB1*14:17L
  REGION 1..12: note = CONT. FROM ABOVE: HLA-DQA1*01:03-B1*06:01L HLA-DQA1*02:01-B1*03: 03L
IQQKLALGGSVA

SEQ ID NO: 9888 - protein, 10 aa, Severe acute respiratory syndrome coronavirus 2
  REGION 1..10: note = Table B: HLA-DQA1*03:02-B1*03:03L HLA-DQA1*05:05-B1*03:19L
KLALGGSVAI

SEQ ID NO: 9889 - protein, 10 aa, Severe acute respiratory syndrome coronavirus 2
  REGION 1..10: note = Table B: HLA-DQA1*03:02-B1*03:03L HLA-DQA1*05:01-B1*03:01L HLA-DQA1*01:02-B1*06:02L HLA-DQA1*05:05-B1*03:19L HLA-DRB1*12:01L HLA-DQA1*03:01-B1*03:02L HLA-DQA1*05:05-B1*03:01L HLA-DQA1*01:03-B1*06:01L
  REGION 1..10: note = CONT. FROM ABOVE: HLA-DQA1*02:01-B1*03:03L
LGGSVAIKIT

SEQ ID NO: 9890 - protein, 10 aa, Severe acute respiratory syndrome coronavirus 2
  REGION 1..10: note = Table B: HLA-DQA1*03:02-B1*03:03L HLA-DQA1*05:01-B1*03:01L HLA-DQA1*03:01-B1*03:02L HLA-DQA1*05:05-B1*03:01L HLA-DQA1*01:03-B1*06:01L HLA-DQA1*02:01-B1*03:03L
GGSVAIKITE

SEQ ID NO: 9891 - protein, 12 aa, Severe acute respiratory syndrome coronavirus 2
  REGION 1..12: note = Table B: HLA-DQA1*03:02-B1*03:03L HLA-DQA1*05:01-B1*03:01L HLA-DRB1*13:03L HLA-DRB1*01:02L HLA-DRB1*08:04L HLA-DRB1*08:01L HLA-DRB1*04:10L HLA-DQA1*05:05-B1*03:01L HLA-DRB1*04:08L
SVAIKITEHSWN

SEQ ID NO: 9892 - protein, 10 aa, Severe acute respiratory syndrome coronavirus 2
  REGION 1..10: note = Table B: HLA-DQA1*03:02-B1*03:03L HLA-DQA1*01-B1*05L HLA-DQA1*03:01-B1*03:02L
ITEHSWNADL

SEQ ID NO: 9893 - protein, 10 aa, Severe acute respiratory syndrome coronavirus 2
  REGION 1..10: note = Table B: HLA-DQA1*03:02-B1*03:03L HLA-DQA1*05:01-B1*03:01M HLA-DRB1*13:03L HLA-DRB1*01:03L HLA-DQA1*01:02-B1*06:02L HLA-DRB4*03:01NL HLA-DRB1*08:77M HLA-DPA1*01:03-B1*03:01L HLA-DPA1*03:01-B1*04:02M HLA-DRB1*03:01M HLA-DRB1*11:02L
  REGION 1..10: note = CONT. FROM ABOVE: HLA-DRB1*14:02L HLA-DQA1*01-B1*05L HLA-DQA1*05 :05-B1*03:19M HLA-DQA1*05:01-B1*02:01M HLA-DRB4*01:01M HLA-DPA1* 01:03-B1*04:01M HLA-DQA1*05:05-B1*03:116L HLA-DPA1*01:03-B1*04:0 2L HLA-DRB1*12:01L HLA-DQA1*03:01-B1*03:02L
  REGION 1..10: note = CONT. FROM ABOVE: HLA-DPA1*01:03-B1*104:01L HLA-DPA1*01:02-B1*04 :01L HLA-DRB1*10:01L HLA-DRB1*16:01L HLA-DQA1*02:01-B1*03:03L HL A-DRB1*15:03L
TEHSWNADLY

SEQ ID NO: 9894 - protein, 10 aa, Severe acute respiratory syndrome coronavirus 2
  REGION 1..10: note = Table B: HLA-DQA1*03:02-B1*03:03L HLA-DQA1*05:01-B1*03:01L HLA-DQA1*01:02-B1*06:02L HLA-DPA1*03:01-B1*04:02L HLA-DQA1*05:05-B1*03:19L HLA-DQA1*05:01-B1*02:01L HLA-DQA1*05:05-B1*03:116L HLA-DPA1*03:01-B1*105:01L
  REGION 1..10: note = CONT. FROM ABOVE: HLA-DQA1*03:01-B1*03:02L HLA-DPA1*01:02-B1*04: 01L HLA-DQA1*01:03-B1*06:01L HLA-DQA1*02:01-B1*03:03L HLA-DRB1*1 5:03L
HSWNADLYKL

SEQ ID NO: 9895 - protein, 12 aa, Severe acute respiratory syndrome coronavirus 2
  REGION 1..12: note = Table B: HLA-DQA1*03:02-B1*03:03L HLA-DQA1*05:01-B1*03:01L HLA-DRB1*04:03L HLA-DRB1*13:02L HLA-DRB1*01:03L HLA-DRB1*04:05L HLA-DQA1*01:02-B1*06:02L HLA-DRB1*01:02L HLA-DRB3*02:01L HLA-DPA1*01:03-B1*03:01L HLA-DPA1*03:01-B1*04:02L
  REGION 1..12: note = CONT. FROM ABOVE: HLA-DRB1*14:01L HLA-DRB1*08:01L HLA-DQA1*01-B1 *05L HLA-DQA1*05:05-B1*03:19L HLA-DQA1*05:01-B1*02:01L HLA-DPA1* 01:03-B1*04:01L HLA-DRB1*09:01L HLA-DPA1*01:03-B1*04:02L HLA-DRB 1*12:01L HLA-DPA1*02:01-B1*13:01L HLA-DPA1*03:01-B1*105:01L
  REGION 1..12: note = CONT. FROM ABOVE: HLA-DQA1*03:01-B1*03:02L HLA-DPA1*01:03-B1*104 :01L HLA-DQA1*05:05-B1*03:01L HLA-DPA1*01:02-B1*04:01L HLA-DRB1* 07:01L HLA-DRB1*16:01L HLA-DQA1*01:03-B1*06:01L HLA-DRB1*04:08L HLA-DQA1*02:01-B1*03:03L HLA-DRB1*15:01L HLA-DRB1*15:03L
GHFAWWTAFVTN

SEQ ID NO: 9896 - protein, 12 aa, Severe acute respiratory syndrome coronavirus 2
  REGION 1..12: note = Table B: HLA-DQA1*03:02-B1*03:03L HLA-DRB1*01:02L HLA-DPA1*01:03-B1*03:01L HLA-DRB1*12:01L HLA-DPA1*02:01-B1*13:01L HLA-DRB1*04:08L HLA-DRB1*15:03L
FAWWTAFVTNVN

SEQ ID NO: 9897 - protein, 12 aa, Severe acute respiratory syndrome coronavirus 2
  REGION 1..12: note = Table B: HLA-DQA1*03:02-B1*03:03L HLA-DRB1*04:05L HLA-DQA1*01:02-B1*06:02L HLA-DRB1*14:01L HLA-DQA1*01-B1*05L HLA-DQA1*05:01-B1*02:01L HLA-DRB1*04:10L HLA-DRB1*12:01L HLA-DPA1*03:01-B1*105:01L HLA-DQA1*03:01-B1*03:02L
  REGION 1..12: note = CONT. FROM ABOVE: HLA-DQA1*05:05-B1*03:01L HLA-DRB1*04:08L HLA-D QA1*02:01-B1*03:03L
WTAFVTNVNASS

SEQ ID NO: 9898 - protein, 12 aa, Severe acute respiratory syndrome coronavirus 2
  REGION 1..12: note = Table B: HLA-DQA1*03:02-B1*03:03L HLA-DRB1*13:02L HLA-DRB1*01:03L HLA-DRB1*04:04L HLA-DRB1*04:05L HLA-DRB1*08:04L HLA-DRB1*08:77L HLA-DRB1*14:01L HLA-DRB1*11:03L HLA-DRB1*11:04L HLA-DQA1*01-B1*05L HLA-DQA1*05:01-B1*02:01L HLA-DRB1*04:10L
  REGION 1..12: note = CONT. FROM ABOVE: HLA-DRB1*12:01L HLA-DRB1*12:02L HLA-DQA1*03:01 -B1*03:02L HLA-DRB1*10:01L HLA-DRB1*04:08L HLA-DRB1*08:03L HLA-D QA1*02:01-B1*03:03L HLA-DRB1*15:03L
TAFVTNVNASSS

SEQ ID NO: 9899 - protein, 12 aa, Severe acute respiratory syndrome coronavirus 2
  REGION 1..12: note = Table B: HLA-DQA1*03:02-B1*03:03L HLA-DPA1*03:01-B1*04:02L HLA-DRB1*03:01L HLA-DRB1*11:02L HLA-DRB5*01:01L HLA-DRB4*01:01L HLA-DRB1*09:01L HLA-DPA1*01:03-B1*04:02L HLA-DRB3*01:01L HLA-DRB1*07:01L HLA-DQA1*01:03-B1*06:01L
AFVTNVNASSSE

SEQ ID NO: 9900 - protein, 12 aa, Severe acute respiratory syndrome coronavirus 2
  REGION 1..12: note = Table B: HLA-DQA1*03:02-B1*03:03L HLA-DPA1*03:01-B1*04:02L HLA-DRB1*03:01L HLA-DRB5*01:01L HLA-DRB4*01:01L HLA-DRB1*09:01L HLA-DRB1*07:01L HLA-DQA1*01:03-B1*06:01L
FVTNVNASSSEA

SEQ ID NO: 9901 - protein, 10 aa, Severe acute respiratory syndrome coronavirus 2
  REGION 1..10: note = Table B: HLA-DQA1*03:02-B1*03:03L HLA-DQA1*05:01-B1*03:01L HLA-DRB1*13:03L HLA-DQA1*01:02-B1*06:02L HLA-DRB1*08:77L HLA-DRB1*14:01L HLA-DRB1*14:02L HLA-DQA1*05:05-B1*03:19L HLA-DQA1*05:01-B1*02:01L HLA-DPA1*01:03-B1*04:01L
  REGION 1..10: note = CONT. FROM ABOVE: HLA-DPA1*02:01-B1*13:01L HLA-DPA1*03:01-B1*105 :01L HLA-DQA1*03:01-B1*03:02L HLA-DQA1*01:03-B1*06:01L HLA-DQA1* 02:01-B1*03:03L HLA-DRB1*15:03L
NVNASSSEAF

SEQ ID NO: 9902 - protein, 10 aa, Severe acute respiratory syndrome coronavirus 2
  REGION 1..10: note = Table B: HLA-DQA1*03:02-B1*03:03L HLA-DQA1*05:01-B1*02:01L HLA-DQA1*03:01-B1*03:02L HLA-DQA1*02:01-B1*03:03L
VNASSSEAFL

SEQ ID NO: 9903 - protein, 10 aa, Severe acute respiratory syndrome coronavirus 2
  REGION 1..10: note = Table B: HLA-DQA1*03:02-B1*03:03L HLA-DQA1*05:01-B1*03:01M HLA-DRB1*08:77M HLA-DPA1*01:03-B1*03:01L HLA-DPA1*03:01-B1*04:02L HLA-DRB1*03:01L HLA-DRB1*11:02L HLA-DQA1*01-B1*05L HLA-DQA1*05:05-B1*03:19M
  REGION 1..10: note = CONT. FROM ABOVE: HLA-DQA1*05:01-B1*02:01L HLA-DRB4*01:01M HLA-D PA1*01:03-B1*04:01M HLA-DPA1*01:03-B1*104:01L HLA-DPA1*01:02-B1* 04:01L HLA-DRB1*10:01L HLA-DRB1*16:01L HLA-DRB1*15:03L
SEAFLIGCNY

SEQ ID NO: 9904 - protein, 12 aa, Severe acute respiratory syndrome coronavirus 2
  REGION 1..12: note = Table B: HLA-DQA1*03:02-B1*03:03L HLA-DRB1*04:05L HLA-DRB1*08:04L HLA-DRB1*11:01L HLA-DQA1*05:05-B1*03:19L HLA-DRB1*12:01L HLA-DPA1*03:01-B1*105:01L HLA-DRB1*15:03L
NYLGKPREQIDG

SEQ ID NO: 9905 - protein, 10 aa, Severe acute respiratory syndrome coronavirus 2
  REGION 1..10: note = Table B: HLA-DQA1*03:02-B1*03:03L HLA-DRB1*13:03L HLA-DQA1*05:05-B1*03:19L HLA-DPA1*03:01-B1*105:01L HLA-DQA1*03:01-B1*03:02L HLA-DRB1*15:03L
EQIDGYVMHA

SEQ ID NO: 9906 - protein, 12 aa, Severe acute respiratory syndrome coronavirus 2
  REGION 1..12: note = Table B: HLA-DQA1*03:02-B1*03:03L HLA-DRB1*13:02L HLA-DRB1*08:04L HLA-DRB3*02:01L HLA-DPA1*01:03-B1*04:01L HLA-DRB1*09:01L HLA-DRB1*12:02L HLA-DQA1*03:01-B1*03:02L HLA-DQA1*05:05-B1*03:01L HLA-DRB1*07:01L
IDGYVMHANYIF

SEQ ID NO: 9907 - protein, 10 aa, Severe acute respiratory syndrome coronavirus 2
  REGION 1..10: note = Table B: HLA-DQA1*03:02-B1*03:03L HLA-DQA1*05:01-B1*03:01L HLA-DRB1*04:03L HLA-DRB1*13:02L HLA-DRB1*13:03L HLA-DRB1*01:03L HLA-DRB1*04:02L HLA-DRB1*04:05L HLA-DQA1*01:02-B1*06:02L HLA-DRB1*01:02L HLA-DRB4*03:01NL HLA-DRB1*08:04L HLA-DRB1*08:77L
  REGION 1..10: note = CONT. FROM ABOVE: HLA-DRB3*02:01L HLA-DPA1*01:03-B1*03:01L HLA-D PA1*03:01-B1*04:02L HLA-DRB1*14:01L HLA-DRB1*11:03L HLA-DRB1*08: 01L HLA-DQA1*01-B1*05L HLA-DQA1*05:05-B1*03:19L HLA-DQA1*05:01-B 1*02:01L HLA-DRB1*04:10L HLA-DRB1*12:01L HLA-DRB1*12:02L
  REGION 1..10: note = CONT. FROM ABOVE: HLA-DPA1*02:01-B1*13:01L HLA-DPA1*03:01-B1*105 :01L HLA-DQA1*03:01-B1*03:02L HLA-DRB1*14:54L HLA-DQA1*05:05-B1* 03:01L HLA-DRB1*14:17L HLA-DPA1*01:02-B1*04:01L HLA-DRB1*16:01L HLA-DQA1*01:03-B1*06:01L HLA-DRB1*04:08L
  REGION 1..10: note = CONT. FROM ABOVE: HLA-DQA1*02:01-B1*03:03L HLA-DRB1*15:03L
IFWRNTNPIQ

SEQ ID NO: 9908 - protein, 10 aa, Severe acute respiratory syndrome coronavirus 2
  REGION 1..10: note = Table B: HLA-DQA1*03:02-B1*03:03L HLA-DQA1*05:01-B1*03:01L HLA-DRB1*04:03L HLA-DRB1*13:02L HLA-DRB1*13:03L HLA-DRB1*01:03L HLA-DRB1*04:02L HLA-DRB1*04:05L HLA-DRB1*01:02L HLA-DRB4*03:01NL HLA-DRB1*08:77L HLA-DRB3*02:01L HLA-DPA1*03:01-B1*04:02L
  REGION 1..10: note = CONT. FROM ABOVE: HLA-DRB1*14:01L HLA-DRB1*11:03L HLA-DRB1*14:02 L HLA-DRB1*08:01L HLA-DQA1*01-B1*05L HLA-DQA1*05:05-B1*03:19L HL A-DQA1*05:01-B1*02:01L HLA-DPA1*01:03-B1*04:01L HLA-DRB1*09:01L HLA-DRB1*12:01L HLA-DPA1*02:01-B1*13:01L
  REGION 1..10: note = CONT. FROM ABOVE: HLA-DPA1*03:01-B1*105:01L HLA-DQA1*03:01-B1*03 :02L HLA-DPA1*01:02-B1*04:01L HLA-DRB1*07:01L HLA-DRB1*16:01L HL A-DQA1*01:03-B1*06:01L HLA-DQA1*02:01-B1*03:03L HLA-DRB1*15:03L
FWRNTNPIQL

SEQ ID NO: 9909 - protein, 10 aa, Severe acute respiratory syndrome coronavirus 2
  REGION 1..10: note = Table B: HLA-DQA1*03:02-B1*03:03L HLA-DQA1*05:01-B1*03:01M HLA-DRB1*14:04L HLA-DRB1*04:01L HLA-DRB1*04:03L HLA-DRB1*13:02M HLA-DRB1*13:03M HLA-DRB1*01:03M HLA-DRB1*04:02L HLA-DRB1*04:05L HLA-DQA1*01:02-B1*06:02H HLA-DRB1*01:01L HLA-DRB1*01:02L
  REGION 1..10: note = CONT. FROM ABOVE: HLA-DRB4*03:01NM HLA-DRB1*08:77M HLA-DPA1*01:0 3-B1*03:01M HLA-DPA1*03:01-B1*04:02M HLA-DRB1*03:01M HLA-DRB1*14 :01M HLA-DRB1*11:02M HLA-DRB1*11:03L HLA-DRB1*11:04L HLA-DRB1*14 :02M HLA-DRB1*08:01L HLA-DRB1*11:01L HLA-DRB5*01:01M
  REGION 1..10: note = CONT. FROM ABOVE: HLA-DQA1*01-B1*05M HLA-DQA1*05:05-B1*03:19M HL A-DRB4*02:01NL HLA-DQA1*05:01-B1*02:01H HLA-DRB4*01:01M HLA-DPA1 *01:03-B1*04:01M HLA-DQA1*05:05-B1*03:116M HLA-DRB1*09:01L HLA-D PA1*01:03-B1*04:02M HLA-DRB1*12:01M HLA-DRB1*12:02L
  REGION 1..10: note = CONT. FROM ABOVE: HLA-DPA1*02:01-B1*13:01L HLA-DPA1*03:01-B1*105 :01M HLA-DQA1*03:01-B1*03:02L HLA-DRB1*14:54L HLA-DPA1*01:03-B1* 104:01M HLA-DQA1*05:05-B1*03:01L HLA-DRB1*14:17L HLA-DPA1*01:02- B1*04:01L HLA-DRB1*10:01M HLA-DRB1*16:01M
  REGION 1..10: note = CONT. FROM ABOVE: HLA-DQA1*01:03-B1*06:01L HLA-DRB1*08:02M HLA -DRB1*08:03L HLA-DQA1*02:01-B1*03:03M HLA-DRB1*15:01L HLA-DRB1 *15:03M
NTNPIQLSSY

SEQ ID NO: 9910 - protein, 10 aa, Severe acute respiratory syndrome coronavirus 2
  REGION 1..10: note = Table B: HLA-DQA1*03:02-B1*03:03L HLA-DQA1*05:01-B1*03:01L HLA-DRB1*13:03L HLA-DQA1*01:02-B1*06:02L HLA-DQA1*01-B1*05L HLA-DPA1*03:01-B1*105:01L HLA-DQA1*03:01-B1*03:02L HLA-DPA1*01:02-B1*04:01L
NPIQLSSYSL

SEQ ID NO: 9911 - protein, 10 aa, Severe acute respiratory syndrome coronavirus 2
  REGION 1..10: note = Table B: HLA-DQA1*03:02-B1*03:03L HLA-DQA1*05:01-B1*03:01L HLA-DPA1*03:01-B1*04:02L HLA-DRB1*14:01L HLA-DQA1*05:05-B1*03:19L HLA-DPA1*03:01-B1*105:01L HLA-DQA1*03:01-B1*03:02L HLA-DPA1*01:02-B1*04:01L
  REGION 1..10: note = CONT. FROM ABOVE: HLA-DQA1*02:01-B1*03:03L HLA-DRB1*15:03L
SLFDMSKFPL

SEQ ID NO: 9912 - protein, 10 aa, Severe acute respiratory syndrome coronavirus 2
  REGION 1..10: note = Table B: HLA-DQA1*03:02-B1*03:03L HLA-DQA1*05:05-B1*03:19L HLA-DQA1*03:01-B1*03:02L HLA-DPA1*01:03-B1*104:01L HLA-DRB1*16:01L HLA-DQA1*02:01-B1*03:03L
FDMSKFPLKL

SEQ ID NO: 9913 - protein, 16 aa, Severe acute respiratory syndrome coronavirus 2
  REGION 1..16: note = Table B: HLA-DQA1*03:02-B1*03:03L HLA-DRB1*04:04L HLA-DRB3*02:01L HLA-DRB1*11:04L HLA-DRB1*11:01L HLA-DPA1*01:03-B1*04:02L HLA-DPA1*01:03-B1*02:01L HLA-DPA1*01:03-B1*104:01L
FPLKLRGTAVMSLKEG

SEQ ID NO: 9914 - protein, 13 aa, Severe acute respiratory syndrome coronavirus 2
  REGION 1..13: note = Table B: HLA-DQA1*03:02-B1*03:03L
LRGTAVMSLKEGQ

SEQ ID NO: 9915 - protein, 10 aa, Severe acute respiratory syndrome coronavirus 2
  REGION 1..10: note = Table B: HLA-DQA1*03:02-B1*03:03L HLA-DQA1*05:05-B1*03:19L HLA-DQA1*03:01-B1*03:02L HLA-DPA1*01:03-B1*104:01L
AVMSLKEGQI

SEQ ID NO: 9916 - protein, 10 aa, Severe acute respiratory syndrome coronavirus 2
  REGION 1..10: note = Table B: HLA-DQA1*03:02-B1*03:03L HLA-DQA1*05:01-B1*03:01L HLA-DRB1*04:03L HLA-DRB1*04:02L HLA-DQA1*01:02-B1*06:02L HLA-DRB1*14:01L HLA-DQA1*05:01-B1*02:01L HLA-DRB1*12:01L HLA-DPA1*03:01-B1*105:01L HLA-DQA1*03:01-B1*03:02L
  REGION 1..10: note = CONT. FROM ABOVE: HLA-DRB1*14:54L HLA-DRB1*14:17L HLA-DRB1*16:01 L HLA-DQA1*01:03-B1*06:01L HLA-DQA1*02:01-B1*03:03L HLA-DRB1*15: 03L
VMSLKEGQIN

SEQ ID NO: 9917 - protein, 10 aa, Severe acute respiratory syndrome coronavirus 2
  REGION 1..10: note = Table B: HLA-DQA1*03:02-B1*03:03L HLA-DQA1*05:01-B1*03:01L HLA-DRB1*04:03L HLA-DRB1*13:03L HLA-DRB1*01:03L HLA-DRB1*04:02L HLA-DQA1*01:02-B1*06:02L HLA-DPA1*03:01-B1*04:02L HLA-DRB1*14:01L HLA-DRB1*14:02L HLA-DQA1*01-B1*05L
  REGION 1..10: note = CONT. FROM ABOVE: HLA-DQA1*05:05-B1*03:19L HLA-DQA1*05:01-B1*02: 01L HLA-DQA1*05:05-B1*03:116L HLA-DPA1*01:03-B1*04:02L HLA-DRB1* 12:01L HLA-DPA1*03:01-B1*105:01L HLA-DQA1*03:01-B1*03:02L HLA-DP A1*01:02-B1*04:01L HLA-DRB1*16:01L HLA-DQA1*01:03-B1*06:01L
  REGION 1..10: note = CONT. FROM ABOVE: HLA-DQA1*02:01-B1*03:03L HLA-DRB1*15:03L
SLKEGQINDM

SEQ ID NO: 9918 - protein, 10 aa, Severe acute respiratory syndrome coronavirus 2
  REGION 1..10: note = Table B: HLA-DQA1*03:02-B1*03:03M HLA-DQA1*01-B1*05L HLA-DQA1*05:05-B1*03:19L HLA-DRB1*09:01L HLA-DQA1*03:01-B1*03:02L HLA-DPA1*01:03-B1*104:01L HLA-DQA1*02:01-B1*03:03L
KEGQINDMIL

SEQ ID NO: 9919 - protein, 10 aa, Severe acute respiratory syndrome coronavirus 2
  REGION 1..10: note = Table B: HLA-DQA1*03:02-B1*03:03M HLA-DQA1*05:01-B1*03:01L HLA-DRB1*13:03L HLA-DRB1*01:03L HLA-DQA1*01:02-B1*06:02L HLA-DRB1*01:02L HLA-DPA1*03:01-B1*04:02L HLA-DRB1*14:01L HLA-DRB1*14:02M HLA-DRB1*08:01L HLA-DQA1*05:05-B1*03:19L
  REGION 1..10: note = CONT. FROM ABOVE: HLA-DQA1*05:01-B1*02:01L HLA-DRB4*01:01L HLA-D PA1*01:03-B1*04:01L HLA-DQA1*05:05-B1*03:116M HLA-DRB1*09:01M HL A-DPA1*01:03-B1*04:02L HLA-DPA1*02:01-B1*13:01L HLA-DPA1*03:01-B 1*105:01L HLA-DQA1*03:01-B1*03:02M HLA-DPA1*01:03-B1*104:01L
  REGION 1..10: note = CONT. FROM ABOVE: HLA-DPA1*01:02-B1*04:01L HLA-DRB1*10:01L HLA-D RB1*16:01L HLA-DQA1*01:03-B1*06:01L HLA-DRB1*08:03L HLA-DQA1*02: 01-B1*03:03M HLA-DRB1*15:03M
GQINDMILSL

SEQ ID NO: 9920 - protein, 11 aa, Severe acute respiratory syndrome coronavirus 2
  REGION 1..11: note = Table B: HLA-DQA1*03:02-B1*03:03L HLA-DQA1*03:01-B1*03:02L
NNRVVISSDVL

SEQ ID NO: 9921 - protein, 11 aa, Severe acute respiratory syndrome coronavirus 2
  REGION 1..11: note = Table B: HLA-DQA1*03:02-B1*03:03L HLA-DQA1*05:01-B1*03:01L HLA-DRB1*14:04L HLA-DRB1*04:01L HLA-DRB1*13:02L HLA-DRB1*13:03L HLA-DRB1*01:03L HLA-DRB1*04:02M HLA-DRB1*04:04L HLA-DRB1*04:05L HLA-DQA1*01:02-B1*06:02L HLA-DRB1*01:01L HLA-DRB1*01:02L
  REGION 1..11: note = CONT. FROM ABOVE: HLA-DRB4*03:01NL HLA-DRB1*08:04L HLA-DRB1*08:7 7L HLA-DRB3*02:01L HLA-DPA1*01:03-B1*03:01L HLA-DPA1*03:01-B1*04 :02L HLA-DRB1*14:01L HLA-DRB1*11:03L HLA-DRB1*11:04L HLA-DRB1*14 :02L HLA-DQA1*01:01-B1*05:01L HLA-DRB1*11:01L HLA-DRB5*01:01L
  REGION 1..11: note = CONT. FROM ABOVE: HLA-DQA1*01-B1*05L HLA-DQA1*05:05-B1*03:19L HL A-DQA1*05:01-B1*02:01L HLA-DRB4*01:01L HLA-DPA1*01:03-B1*04:01L HLA-DRB1*04:10L HLA-DRB1*09:01L HLA-DPA1*01:03-B1*04:02L HLA-DRB 1*12:01L HLA-DRB1*12:02L HLA-DPA1*02:01-B1*13:01L
  REGION 1..11: note = CONT. FROM ABOVE: HLA-DPA1*03:01-B1*105:01L HLA-DQA1*03:01-B1*03 :02L HLA-DRB1*14:54L HLA-DPA1*01:03-B1*104:01L HLA-DQA1*05:05-B1 *03:01L HLA-DPA1*01:02-B1*04:01L HLA-DRB1*07:01L HLA-DRB1*10:01L HLA-DRB1*16:01L HLA-DQA1*01:03-B1*06:01L HLA-DRB1*04:08L
  REGION 1..11: note = CONT. FROM ABOVE: HLA-DRB1*08:03L HLA-DQA1*02:01-B1*03:03L HLA -DRB1*15:01L HLA-DRB1*15:03L
VVISSDVLVNN

SEQ ID NO: 9922 - protein, 14 aa, Severe acute respiratory syndrome coronavirus 2
  REGION 1..14: note = Table B: HLA-DQA1*03:02-B1*03:03L HLA-DQA1*05:01-B1*03:01L HLA-DRB1*04:03L HLA-DRB1*13:02L HLA-DRB1*01:03L HLA-DRB1*04:02L HLA-DRB1*04:04L HLA-DRB1*04:05L HLA-DRB1*01:02L HLA-DRB1*08:04L HLA-DPA1*01:03-B1*03:01L HLA-DRB1*14:01L HLA-DRB1*11:04L
  REGION 1..14: note = CONT. FROM ABOVE: HLA-DRB1*08:01L HLA-DRB1*11:01L HLA-DQA1*05:05 -B1*03:19L HLA-DPA1*01:03-B1*04:02L HLA-DRB1*12:01L HLA-DPA1*02: 01-B1*13:01L HLA-DQA1*03:01-B1*03:02L HLA-DPA1*01:03-B1*104:01L HLA-DQA1*05:05-B1*03:01L HLA-DRB1*14:17L HLA-DRB1*16:01L
  REGION 1..14: note = CONT. FROM ABOVE: HLA-DRB1*04:08L HLA-DRB1*15:03L
LPLVSSQCVNLTTR

SEQ ID NO: 9923 - protein, 10 aa, Severe acute respiratory syndrome coronavirus 2
  REGION 1..10: note = Table B: HLA-DQA1*03:02-B1*03:03L HLA-DQA1*05:01-B1*03:01L HLA-DRB1*04:01L HLA-DRB1*04:03L HLA-DRB1*13:02L HLA-DRB1*13:03L HLA-DRB1*01:03M HLA-DRB1*04:02L HLA-DQA1*01:02-B1*06:02M HLA-DRB4*03:01NL HLA-DRB1*08:77L HLA-DPA1*01:03-B1*03:01L
  REGION 1..10: note = CONT. FROM ABOVE: HLA-DPA1*03:01-B1*04:02L HLA-DRB1*03:01L HLA-D RB1*14:01L HLA-DRB1*14:02M HLA-DRB1*11:01L HLA-DQA1*01-B1*05L HL A-DQA1*05:05-B1*03:19L HLA-DQA1*05:01-B1*02:01L HLA-DRB4*01:01L HLA-DPA1*01:03-B1*04:01L HLA-DQA1*05:05-B1*03:116L
  REGION 1..10: note = CONT. FROM ABOVE: HLA-DPA1*01:03-B1*04:02L HLA-DRB1*12:01L HLA-D PA1*02:01-B1*13:01L HLA-DPA1*03:01-B1*105:01L HLA-DQA1*03:01-B1* 03:02L HLA-DPA1*01:03-B1*104:01L HLA-DQA1*05:05-B1*03:01L HLA-DP A1*01:02-B1*04:01L HLA-DRB1*10:01L HLA-DRB1*16:01L
  REGION 1..10: note = CONT. FROM ABOVE: HLA-DQA1*01:03-B1*06:01L HLA-DRB1*08:02L HLA-D QA1*02:01-B1*03:03M HLA-DRB1*15:03L
TTRTQLPPAY

SEQ ID NO: 9924 - protein, 11 aa, Severe acute respiratory syndrome coronavirus 2
  REGION 1..11: note = Table B: HLA-DQA1*03:02-B1*03:03L HLA-DQA1*05:01-B1*03:01L HLA-DRB1*04:03L HLA-DRB1*13:03L HLA-DRB1*01:03L HLA-DRB1*04:05L HLA-DRB1*08:77L HLA-DPA1*03:01-B1*04:02L HLA-DRB1*14:02L HLA-DQA1*05:05-B1*03:19L HLA-DQA1*05:01-B1*02:01L
  REGION 1..11: note = CONT. FROM ABOVE: HLA-DRB4*01:01L HLA-DPA1*01:03-B1*04:01L HLA-D QA1*05:05-B1*03:116L HLA-DPA1*01:03-B1*04:02L HLA-DRB1*16:01L HL A-DRB1*08:02L HLA-DRB1*15:03L
TQLPPAYTNSF

SEQ ID NO: 9925 - protein, 12 aa, Severe acute respiratory syndrome coronavirus 2
  REGION 1..12: note = Table B: HLA-DQA1*03:02-B1*03:03L HLA-DQA1*05:01-B1*03:01L HLA-DRB1*04:03L HLA-DRB1*04:02L HLA-DQA1*01:01-B1*05:01L HLA-DQA1*01-B1*05L HLA-DRB1*14:17L HLA-DRB1*16:01L HLA-DQA1*01:03-B1*06:01L HLA-DQA1*02:01-B1*03:03L
LPPAYTNSFTRG

SEQ ID NO: 9926 - protein, 10 aa, Severe acute respiratory syndrome coronavirus 2
  REGION 1..10: note = Table B: HLA-DQA1*03:02-B1*03:03L HLA-DQA1*05:01-B1*03:01L HLA-DRB1*13:03L HLA-DRB1*01:03L HLA-DQA1*01:02-B1*06:02L HLA-DRB1*08:77L HLA-DPA1*01:03-B1*03:01L HLA-DPA1*03:01-B1*04:02L HLA-DRB1*03:01L HLA-DRB1*11:02L
  REGION 1..10: note = CONT. FROM ABOVE: HLA-DRB1*14:02L HLA-DQA1*01-B1*05L HLA-DQA1*05 :05-B1*03:19M HLA-DQA1*05:01-B1*02:01L HLA-DRB4*01:01L HLA-DPA1* 01:03-B1*04:01L HLA-DQA1*05:05-B1*03:116L HLA-DPA1*01:03-B1*04:0 2L HLA-DRB1*12:01L HLA-DPA1*02:01-B1*13:01L
  REGION 1..10: note = CONT. FROM ABOVE: HLA-DPA1*03:01-B1*105:01L HLA-DPA1*01:03-B1*10 4:01L HLA-DPA1*01:02-B1*04:01L HLA-DRB1*10:01L HLA-DRB1*16:01L H LA-DQA1*01:03-B1*06:01L HLA-DRB1*08:02L HLA-DQA1*02:01-B1*03:03L HLA-DRB1*15:03L
YTNSFTRGVY

SEQ ID NO: 9927 - protein, 12 aa, Severe acute respiratory syndrome coronavirus 2
  REGION 1..12: note = Table B: HLA-DQA1*03:02-B1*03:03L HLA-DRB1*14:01L HLA-DQA1*05:05-B1*03:01L
NSFTRGVYYPDK

SEQ ID NO: 9928 - protein, 12 aa, Severe acute respiratory syndrome coronavirus 2
  REGION 1..12: note = Table B: HLA-DQA1*03:02-B1*03:03L HLA-DQA1*05:01-B1*03:01L HLA-DRB1*04:01L HLA-DRB1*04:04L HLA-DQA1*01:02-B1*06:02L HLA-DRB1*08:04L HLA-DRB1*08:77L HLA-DPA1*01:03-B1*03:01L HLA-DPA1*03:01-B1*04:02L HLA-DRB1*03:01L HLA-DRB1*11:03L
  REGION 1..12: note = CONT. FROM ABOVE: HLA-DRB1*14:02L HLA-DRB1*11:01L HLA-DQA1*05:05 -B1*03:19L HLA-DQA1*05:01-B1*02:01L HLA-DRB4*01:01L HLA-DRB1*04: 10L HLA-DRB3*01:01L HLA-DPA1*02:01-B1*13:01L HLA-DPA1*03:01-B1*1 05:01L HLA-DRB1*07:01L HLA-DRB1*10:01L HLA-DRB1*08:03L
GVYYPDKVFRSS

SEQ ID NO: 9929 - protein, 15 aa, Severe acute respiratory syndrome coronavirus 2
  REGION 1..15: note = Table B: HLA-DQA1*03:02-B1*03:03L HLA-DRB1*04:01L HLA-DRB1*04:04L HLA-DRB1*01:01L HLA-DRB4*03:01NL HLA-DRB1*08:04L HLA-DRB1*08:77L HLA-DRB3*02:01L HLA-DRB1*03:01L HLA-DRB1*11:03L HLA-DRB1*11:04L HLA-DRB1*14:02L HLA-DQA1*01:01-B1*05:01L
  REGION 1..15: note = CONT. FROM ABOVE: HLA-DQA1*05:05-B1*03:19L HLA-DQA1*05:01-B1*02: 01L HLA-DPA1*01:03-B1*04:01L HLA-DRB1*04:10L HLA-DRB1*09:01L HLA -DRB3*01:01L HLA-DRB1*14:54L HLA-DPA1*01:03-B1*104:01L HLA-DRB1* 14:17L HLA-DRB1*07:01L HLA-DRB1*10:01L HLA-DRB1*08:02L
  REGION 1..15: note = CONT. FROM ABOVE: HLA-DRB1*08:03L
YPDKVFRSSVLHSTQ

SEQ ID NO: 9930 - protein, 12 aa, Severe acute respiratory syndrome coronavirus 2
  REGION 1..12: note = Table B: HLA-DQA1*03:02-B1*03:03L HLA-DRB1*04:03L HLA-DRB1*04:02L HLA-DRB1*04:05L HLA-DRB1*01:02L HLA-DPA1*01:03-B1*03:01L HLA-DPA1*03:01-B1*04:02L HLA-DRB1*08:01L HLA-DRB1*11:01L HLA-DPA1*01:03-B1*04:01L
  REGION 1..12: note = CONT. FROM ABOVE: HLA-DPA1*01:03-B1*04:02L HLA-DRB1*12:01L HLA-D PA1*01:03-B1*02:01L HLA-DRB1*16:01L HLA-DRB1*15:03L
VFRSSVLHSTQD

SEQ ID NO: 9931 - protein, 10 aa, Severe acute respiratory syndrome coronavirus 2
  REGION 1..10: note = Table B: HLA-DQA1*03:02-B1*03:03L HLA-DQA1*03:01-B1*03:02L HLA-DQA1*01:03-B1*06:01L HLA-DQA1*02:01-B1*03:03L
SSVLHSTQDL

SEQ ID NO: 9932 - protein, 10 aa, Severe acute respiratory syndrome coronavirus 2
  REGION 1..10: note = Table B: HLA-DQA1*03:02-B1*03:03L HLA-DQA1*05:01-B1*03:01L HLA-DRB1*13:03L HLA-DRB1*01:03L HLA-DQA1*01:02-B1*06:02L HLA-DRB1*08:77L HLA-DPA1*01:03-B1*03:01L HLA-DPA1*03:01-B1*04:02L HLA-DRB1*14:01L HLA-DRB1*14:02L
  REGION 1..10: note = CONT. FROM ABOVE: HLA-DQA1*01-B1*05L HLA-DQA1*05:05-B1*03:19L HL A-DQA1*05:01-B1*02:01L HLA-DPA1*01:03-B1*04:01L HLA-DQA1*05:05-B 1*03:116L HLA-DPA1*01:03-B1*04:02L HLA-DRB1*12:01L HLA-DPA1*02:0 1-B1*13:01L HLA-DPA1*03:01-B1*105:01L HLA-DQA1*03:01-B1*03:02L
  REGION 1..10: note = CONT. FROM ABOVE: HLA-DPA1*01:02-B1*04:01L HLA-DRB1*16:01L HLA-D QA1*01:03-B1*06:01L HLA-DQA1*02:01-B1*03:03L HLA-DRB1*15:03L
SVLHSTQDLF

SEQ ID NO: 9933 - protein, 10 aa, Severe acute respiratory syndrome coronavirus 2
  REGION 1..10: note = Table B: HLA-DQA1*03:02-B1*03:03L HLA-DQA1*01:02-B1*06:02L HLA-DRB1*14:02L HLA-DQA1*05:05-B1*03:19L HLA-DQA1*05:01-B1*02:01L HLA-DPA1*01:03-B1*04:01L HLA-DPA1*02:01-B1*13:01L HLA-DPA1*03:01-B1*105:01L
  REGION 1..10: note = CONT. FROM ABOVE: HLA-DQA1*01:03-B1*06:01L HLA-DQA1*02:01-B1*03: 03L HLA-DRB1*15:03L
STQDLFLPFF

SEQ ID NO: 9934 - protein, 10 aa, Severe acute respiratory syndrome coronavirus 2
  REGION 1..10: note = Table B: HLA-DQA1*03:02-B1*03:03L HLA-DQA1*05:01-B1*03:01L HLA-DQA1*01:02-B1*06:02L HLA-DRB1*01:02L HLA-DPA1*03:01-B1*04:02L HLA-DRB1*14:02L HLA-DQA1*05:05-B1*03:19L HLA-DQA1*05:01-B1*02:01L
  REGION 1..10: note = CONT. FROM ABOVE: HLA-DQA1*05:05-B1*03:116L HLA-DPA1*02:01-B1*13 :01L HLA-DPA1*03:01-B1*105:01L HLA-DQA1*03:01-B1*03:02L HLA-DPA1 *01:03-B1*104:01L HLA-DPA1*01:02-B1*04:01L HLA-DQA1*01:03-B1*06: 01L HLA-DQA1*02:01-B1*03:03L HLA-DRB1*15:03L
DLFLPFFSNV

SEQ ID NO: 9935 - protein, 14 aa, Severe acute respiratory syndrome coronavirus 2
  REGION 1..14: note = Table B: HLA-DQA1*03:02-B1*03:03L HLA-DQA1*05:01-B1*03:01L HLA-DRB1*13:02L HLA-DRB1*04:02L HLA-DRB1*04:04L HLA-DRB1*01:01L HLA-DRB1*01:02M HLA-DRB1*08:04L HLA-DRB3*02:01L HLA-DPA1*01:03-B1*03:01L HLA-DRB1*11:02L HLA-DRB1*11:03L
  REGION 1..14: note = CONT. FROM ABOVE: HLA-DRB1*11:04L HLA-DRB1*14:02L HLA-DRB1*08:01 L HLA-DRB1*11:01L HLA-DQA1*05:05-B1*03:19L HLA-DQA1*05:01-B1*02: 01L HLA-DRB3*01:01L HLA-DQA1*03:01-B1*03:02L HLA-DPA1*01:03-B1*1 04:01L HLA-DQA1*05:05-B1*03:01L HLA-DRB1*07:01L HLA-DRB1*10:01L
  REGION 1..14: note = CONT. FROM ABOVE: HLA-DRB1*08:02L HLA-DRB1*08:03L
LPFFSNVTWFHAIH

SEQ ID NO: 9936 - protein, 14 aa, Severe acute respiratory syndrome coronavirus 2
  REGION 1..14: note = Table B: HLA-DQA1*03:02-B1*03:03L HLA-DRB1*11:02L HLA-DRB1*11:04L HLA-DRB1*14:02L HLA-DRB1*11:01L HLA-DQA1*05:05-B1*03:19L HLA-DPA1*01:03-B1*04:01L HLA-DRB1*09:01L HLA-DRB1*08:03L
FSNVTWFHAIHVSG

SEQ ID NO: 9937 - protein, 13 aa, Severe acute respiratory syndrome coronavirus 2
  REGION 1..13: note = Table B: HLA-DQA1*03:02-B1*03:03L HLA-DRB1*13:02L HLA-DRB1*13:03L HLA-DRB1*08:04L HLA-DRB3*02:01L HLA-DPA1*01:03-B1*03:01L HLA-DRB1*14:02L HLA-DRB1*08:01L HLA-DRB1*11:01L HLA-DQA1*05:01-B1*02:01L
  REGION 1..13: note = CONT. FROM ABOVE: HLA-DPA1*01:03-B1*04:02L HLA-DPA1*02:01-B1*13: 01L HLA-DPA1*01:03-B1*02:01L HLA-DPA1*01:03-B1*104:01L HLA-DRB1* 10:01L HLA-DRB1*08:02L HLA-DRB1*08:03L
VTWFHAIHVSGTN

SEQ ID NO: 9938 - protein, 10 aa, Severe acute respiratory syndrome coronavirus 2
  REGION 1..10: note = Table B: HLA-DQA1*03:02-B1*03:03L HLA-DQA1*05:01-B1*03:01L HLA-DRB1*04:03L HLA-DQA1*01:01-B1*05:01L HLA-DQA1*01-B1*05L HLA-DQA1*05:05-B1*03:19L HLA-DQA1*05:01-B1*02:01L HLA-DQA1*03:01-B1*03:02L HLA-DQA1*05:05-B1*03:01L
  REGION 1..10: note = CONT. FROM ABOVE: HLA-DQA1*01:03-B1*06:01L HLA-DQA1*02:01-B1*03: 03L
DNPVLPFNDG

SEQ ID NO: 9939 - protein, 10 aa, Severe acute respiratory syndrome coronavirus 2
  REGION 1..10: note = Table B: HLA-DQA1*03:02-B1*03:03L HLA-DQA1*05:01-B1*03:01L HLA-DRB1*04:03L HLA-DRB1*13:03L HLA-DQA1*01:02-B1*06:02L HLA-DRB1*08:77L HLA-DPA1*01:03-B1*03:01L HLA-DPA1*03:01-B1*04:02L HLA-DRB1*03:01L HLA-DRB1*11:02L
  REGION 1..10: note = CONT. FROM ABOVE: HLA-DRB1*14:02L HLA-DQA1*01-B1*05L HLA-DQA1*05 :05-B1*03:19L HLA-DQA1*05:01-B1*02:01L HLA-DRB4*01:01L HLA-DPA1* 01:03-B1*04:01L HLA-DPA1*01:03-B1*04:02L HLA-DRB1*12:01L HLA-DPA 1*02:01-B1*13:01L HLA-DPA1*03:01-B1*105:01L
  REGION 1..10: note = CONT. FROM ABOVE: HLA-DQA1*03:01-B1*03:02L HLA-DPA1*01:03-B1*104 :01L HLA-DRB1*16:01L HLA-DQA1*01:03-B1*06:01L HLA-DQA1*02:01-B1* 03:03L HLA-DRB1*15:03L
PVLPFNDGVY

SEQ ID NO: 9940 - protein, 14 aa, Severe acute respiratory syndrome coronavirus 2
  REGION 1..14: note = Table B: HLA-DQA1*03:02-B1*03:03L HLA-DQA1*05:01-B1*03:01L HLA-DRB1*01:03L HLA-DRB1*01:02L HLA-DPA1*01:03-B1*03:01L HLA-DPA1*03:01-B1*04:02L HLA-DRB1*08:01L HLA-DQA1*05:05-B1*03:19L HLA-DQA1*05:01-B1*02:01L
  REGION 1..14: note = CONT. FROM ABOVE: HLA-DPA1*01:03-B1*04:02L HLA-DQA1*05:05-B1*03: 01L HLA-DPA1*01:02-B1*04:01L HLA-DRB1*16:01L HLA-DRB1*04:08L
LPFNDGVYFASTEK

SEQ ID NO: 9941 - protein, 12 aa, Severe acute respiratory syndrome coronavirus 2
  REGION 1..12: note = Table B: HLA-DQA1*03:02-B1*03:03L HLA-DQA1*05:01-B1*03:01L HLA-DRB1*04:03L HLA-DRB1*04:02L HLA-DQA1*01:02-B1*06:02L HLA-DQA1*05:05-B1*03:19L HLA-DQA1*05:01-B1*02:01L HLA-DQA1*05:05-B1*03:01L
NDGVYFASTEKS

SEQ ID NO: 9942 - protein, 10 aa, Severe acute respiratory syndrome coronavirus 2
  REGION 1..10: note = Table B: HLA-DQA1*03:02-B1*03:03L HLA-DQA1*05:01-B1*03:01L HLA-DRB1*04:03L HLA-DRB1*13:03L HLA-DRB1*01:03L HLA-DRB1*04:02L HLA-DRB1*04:05L HLA-DQA1*01:02-B1*06:02L HLA-DRB1*01:02L HLA-DRB4*03:01NL HLA-DRB3*02:01L HLA-DPA1*01:03-B1*03:01L
  REGION 1..10: note = CONT. FROM ABOVE: HLA-DPA1*03:01-B1*04:02L HLA-DRB1*14:01L HLA-D RB1*08:01L HLA-DQA1*01-B1*05L HLA-DQA1*05:05-B1*03:19L HLA-DQA1* 05:01-B1*02:01L HLA-DRB1*04:10L HLA-DPA1*01:03-B1*04:02L HLA-DRB 1*12:01L HLA-DPA1*03:01-B1*105:01L HLA-DQA1*03:01-B1*03:02L
  REGION 1..10: note = CONT. FROM ABOVE: HLA-DRB1*14:54L HLA-DQA1*05:05-B1*03:01L HLA-D RB1*14:17L HLA-DPA1*01:02-B1*04:01L HLA-DRB1*10:01L HLA-DRB1*16: 01L HLA-DQA1*01:03-B1*06:01L HLA-DRB1*04:08L HLA-DQA1*02:01-B1*0 3:03L HLA-DRB1*15:03L
VYFASTEKSN

SEQ ID NO: 9943 - protein, 10 aa, Severe acute respiratory syndrome coronavirus 2
  REGION 1..10: note = Table B: HLA-DQA1*03:02-B1*03:03L HLA-DQA1*05:05-B1*03:19L HLA-DQA1*03:01-B1*03:02L
FASTEKSNII

SEQ ID NO: 9944 - protein, 10 aa, Severe acute respiratory syndrome coronavirus 2
  REGION 1..10: note = Table B: HLA-DQA1*03:02-B1*03:03L HLA-DQA1*05:01-B1*03:01H HLA-DRB1*13:03L HLA-DRB1*01:03L HLA-DRB1*04:02L HLA-DRB1*04:05L HLA-DQA1*01:02-B1*06:02L HLA-DRB4*03:01NM HLA-DRB1*08:77H HLA-DPA1*01:03-B1*03:01L HLA-DPA1*03:01-B1*04:02M
  REGION 1..10: note = CONT. FROM ABOVE: HLA-DRB1*03:01M HLA-DRB1*14:01L HLA-DRB1*11:02 L HLA-DRB1*14:02L HLA-DQA1*01-B1*05M HLA-DQA1*05:05-B1*03:19M HL A-DQA1*05:01-B1*02:01L HLA-DRB4*01:01H HLA-DPA1*01:03-B1*04:01H HLA-DQA1*05:05-B1*03:116L HLA-DPA1*01:03-B1*04:02L
  REGION 1..10: note = CONT. FROM ABOVE: HLA-DRB1*12:01L HLA-DPA1*02:01-B1*13:01L HLA-D QA1*03:01-B1*03:02L HLA-DPA1*01:03-B1*104:01L HLA-DPA1*01:02-B1* 04:01M HLA-DRB1*10:01M HLA-DRB1*16:01L HLA-DQA1*01:03-B1*06:01L HLA-DQA1*02:01-B1*03:03L HLA-DRB1*15:03M
TEKSNIIRGW

SEQ ID NO: 9945 - protein, 12 aa, Severe acute respiratory syndrome coronavirus 2
  REGION 1..12: note = Table B: HLA-DQA1*03:02-B1*03:03L HLA-DQA1*05:01-B1*03:01L HLA-DRB1*04:03L HLA-DRB1*04:02L HLA-DRB1*01:02L HLA-DPA1*01:03-B1*03:01L HLA-DRB1*14:01L HLA-DQA1*01-B1*05L HLA-DQA1*05:05-B1*03:19L HLA-DQA1*05:01-B1*02:01L
  REGION 1..12: note = CONT. FROM ABOVE: HLA-DPA1*01:03-B1*04:01L HLA-DPA1*01:03-B1*04: 02L HLA-DRB1*12:01L HLA-DQA1*03:01-B1*03:02L HLA-DQA1*05:05-B1*0 3:01L HLA-DRB1*14:17L HLA-DRB1*16:01L HLA-DRB1*04:08L HLA-DRB1*1 5:03L
SNIIRGWIFGTT

SEQ ID NO: 9946 - protein, 11 aa, Severe acute respiratory syndrome coronavirus 2
  REGION 1..11: note = Table B: HLA-DQA1*03:02-B1*03:03L HLA-DQA1*01:02-B1*06:02L HLA-DPA1*03:01-B1*04:02L HLA-DQA1*01-B1*05L HLA-DPA1*03:01-B1*105:01L HLA-DQA1*02:01-B1*03:03L
IIRGWIFGTTL

SEQ ID NO: 9947 - protein, 13 aa, Severe acute respiratory syndrome coronavirus 2
  REGION 1..13: note = Table B: HLA-DQA1*03:02-B1*03:03L HLA-DRB1*01:03L HLA-DRB1*04:05L HLA-DRB1*01:02L HLA-DRB1*08:01L HLA-DQA1*01-B1*05L HLA-DRB1*04:10L HLA-DRB1*04:08L
IRGWIFGTTLDSK

SEQ ID NO: 9948 - protein, 11 aa, Severe acute respiratory syndrome coronavirus 2
  REGION 1..11: note = Table B: HLA-DQA1*03:02-B1*03:03L HLA-DRB1*01:03L HLA-DRB1*04:05L HLA-DQA1*05:05-B1*03:19L HLA-DQA1*05:01-B1*02:01L HLA-DRB1*04:10L HLA-DRB1*04:08L
WIFGTTLDSKT

SEQ ID NO: 9949 - protein, 10 aa, Severe acute respiratory syndrome coronavirus 2
  REGION 1..10: note = Table B: HLA-DQA1*03:02-B1*03:03L HLA-DQA1*05:01-B1*03:01L HLA-DRB1*04:03L HLA-DRB1*13:03L HLA-DRB1*01:03L HLA-DRB1*04:02L HLA-DRB1*04:05L HLA-DRB4*03:01NL HLA-DQA1*01-B1*05L HLA-DQA1*05:05-B1*03:19L HLA-DQA1*05:01-B1*02:01L
  REGION 1..10: note = CONT. FROM ABOVE: HLA-DRB1*04:10L HLA-DRB1*12:01L HLA-DQA1*03:01 -B1*03:02L HLA-DRB1*14:54L HLA-DQA1*05:05-B1*03:01L HLA-DRB1*14: 17L HLA-DRB1*16:01L HLA-DQA1*01:03-B1*06:01L HLA-DRB1*04:08L HLA -DQA1*02:01-B1*03:03L
FGTTLDSKTQ

SEQ ID NO: 9950 - protein, 10 aa, Severe acute respiratory syndrome coronavirus 2
  REGION 1..10: note = Table B: HLA-DQA1*03:02-B1*03:03H HLA-DQA1*05:01-B1*03:01M HLA-DRB1*04:01L HLA-DRB1*04:03L HLA-DRB1*13:02L HLA-DRB1*13:03M HLA-DRB1*01:03L HLA-DRB1*04:02L HLA-DRB1*04:04L HLA-DRB1*04:05L HLA-DQA1*01:02-B1*06:02M HLA-DRB1*01:01L HLA-DRB1*01:02M
  REGION 1..10: note = CONT. FROM ABOVE: HLA-DRB4*03:01NL HLA-DRB1*08:77L HLA-DRB3*02:0 1L HLA-DPA1*01:03-B1*03:01L HLA-DPA1*03:01-B1*04:02M HLA-DRB1*03 :01L HLA-DRB1*14:01M HLA-DRB1*11:03L HLA-DRB1*11:04L HLA-DRB1*14 :02M HLA-DQA1*01:01-B1*05:01L HLA-DRB1*08:01M HLA-DRB1*11:01L
  REGION 1..10: note = CONT. FROM ABOVE: HLA-DRB5*01:01L HLA-DQA1*01-B1*05L HLA-DQA1*05 :05-B1*03:19L HLA-DQA1*05:01-B1*02:01M HLA-DRB1*13:01L HLA-DRB4* 01:01L HLA-DPA1*01:03-B1*04:01M HLA-DQA1*05:05-B1*03:116M HLA-DR B1*09:01M HLA-DPA1*01:03-B1*04:02M HLA-DRB1*12:01L
  REGION 1..10: note = CONT. FROM ABOVE: HLA-DRB3*01:01L HLA-DPA1*02:01-B1*13:01L HLA-D PA1*03:01-B1*105:01M HLA-DQA1*03:01-B1*03:02M HLA-DPA1*01:03-B1* 104:01L HLA-DQA1*05:05-B1*03:01L HLA-DPA1*01:02-B1*04:01M HLA-DR B1*07:01L HLA-DRB1*10:01L HLA-DRB1*16:01L
  REGION 1..10: note = CONT. FROM ABOVE: HLA-DQA1*01:03-B1*06:01L HLA-DRB1*08:02L HLA -DRB1*08:03L HLA-DQA1*02:01-B1*03:03M HLA-DRB1*15:01L HLA-DRB1 *15:03M
TTLDSKTQSL

SEQ ID NO: 9951 - protein, 10 aa, Severe acute respiratory syndrome coronavirus 2
  REGION 1..10: note = Table B: HLA-DQA1*03:02-B1*03:03L HLA-DQA1*05:01-B1*03:01L HLA-DRB1*04:03L HLA-DRB1*13:03L HLA-DRB1*04:02L HLA-DPA1*01:03-B1*03:01L HLA-DPA1*03:01-B1*04:02L HLA-DRB1*14:01L HLA-DRB1*14:02L HLA-DQA1*01-B1*05L
  REGION 1..10: note = CONT. FROM ABOVE: HLA-DQA1*05:05-B1*03:19L HLA-DQA1*05:01-B1*02: 01L HLA-DPA1*03:01-B1*105:01L HLA-DQA1*03:01-B1*03:02L HLA-DPA1* 01:02-B1*04:01L HLA-DRB1*16:01L HLA-DQA1*02:01-B1*03:03L HLA-DRB 1*15:03L
TLDSKTQSLL

SEQ ID NO: 9952 - protein, 12 aa, Severe acute respiratory syndrome coronavirus 2
  REGION 1..12: note = Table B: HLA-DQA1*03:02-B1*03:03L HLA-DQA1*05:01-B1*03:01L HLA-DRB1*04:05L HLA-DQA1*01:02-B1*06:02L HLA-DPA1*01:03-B1*03:01L HLA-DQA1*01:01-B1*05:01L HLA-DQA1*05:05-B1*03:19L HLA-DQA1*05:01-B1*02:01L
  REGION 1..12: note = CONT. FROM ABOVE: HLA-DRB1*12:01L HLA-DPA1*02:01-B1*13:01L HLA-D PA1*03:01-B1*105:01L HLA-DQA1*05:05-B1*03:01L HLA-DRB1*16:01L
DSKTQSLLIVNN

SEQ ID NO: 9953 - protein, 12 aa, Severe acute respiratory syndrome coronavirus 2
  REGION 1..12: note = Table B: HLA-DQA1*03:02-B1*03:03L HLA-DQA1*05:01-B1*03:01L HLA-DRB1*13:03L HLA-DRB1*01:03L HLA-DRB1*04:02L HLA-DRB1*04:04L HLA-DRB1*04:05L HLA-DQA1*01:02-B1*06:02L HLA-DRB1*01:02L HLA-DRB4*03:01NL HLA-DPA1*01:03-B1*03:01L HLA-DRB1*11:04L
  REGION 1..12: note = CONT. FROM ABOVE: HLA-DQA1*01-B1*05L HLA-DQA1*05:05-B1*03:19L HL A-DQA1*05:01-B1*02:01L HLA-DRB1*04:10M HLA-DRB1*12:01L HLA-DRB1* 12:02L HLA-DPA1*03:01-B1*105:01L HLA-DRB1*14:54L HLA-DQA1*05:05- B1*03:01L HLA-DRB1*10:01L HLA-DRB1*16:01L
  REGION 1..12: note = CONT. FROM ABOVE: HLA-DQA1*01:03-B1*06:01L HLA-DRB1*04:08L HLA-D RB1*08:03L HLA-DQA1*02:01-B1*03:03L
TQSLLIVNNATN

SEQ ID NO: 9954 - protein, 10 aa, Severe acute respiratory syndrome coronavirus 2
  REGION 1..10: note = Table B: HLA-DQA1*03:02-B1*03:03L
LLIVNNATNV

SEQ ID NO: 9955 - protein, 10 aa, Severe acute respiratory syndrome coronavirus 2
  REGION 1..10: note = Table B: HLA-DQA1*03:02-B1*03:03L HLA-DQA1*05:01-B1*03:01L HLA-DRB1*04:03L HLA-DRB1*13:02L HLA-DRB1*13:03L HLA-DRB1*04:02L HLA-DRB1*01:02L HLA-DRB4*03:01NL HLA-DRB1*08:77L HLA-DRB3*02:01L HLA-DRB1*14:01L HLA-DQA1*05:05-B1*03:19L
  REGION 1..10: note = CONT. FROM ABOVE: HLA-DQA1*05:01-B1*02:01L HLA-DRB1*12:01L HLA-D PA1*03:01-B1*105:01L HLA-DQA1*03:01-B1*03:02L HLA-DRB1*14:17L HL A-DPA1*01:02-B1*04:01L HLA-DRB1*16:01L HLA-DQA1*02:01-B1*03:03L HLA-DRB1*15:03L
LIVNNATNVV

SEQ ID NO: 9956 - protein, 10 aa, Severe acute respiratory syndrome coronavirus 2
  REGION 1..10: note = Table B: HLA-DQA1*03:02-B1*03:03L HLA-DQA1*05:01-B1*03:01L HLA-DRB1*04:03L HLA-DRB1*13:03L HLA-DRB1*04:02L HLA-DRB1*01:02L HLA-DRB1*08:77L HLA-DPA1*03:01-B1*04:02L HLA-DRB1*14:01L HLA-DRB1*14:02L HLA-DQA1*05:05-B1*03:19L
  REGION 1..10: note = CONT. FROM ABOVE: HLA-DQA1*05:01-B1*02:01L HLA-DRB1*12:01L HLA-D PA1*02:01-B1*13:01L HLA-DPA1*03:01-B1*105:01L HLA-DQA1*03:01-B1* 03:02L HLA-DRB1*14:17L HLA-DPA1*01:02-B1*04:01L HLA-DRB1*16:01L HLA-DQA1*02:01-B1*03:03L HLA-DRB1*15:03L
IVNNATNVVI

SEQ ID NO: 9957 - protein, 10 aa, Severe acute respiratory syndrome coronavirus 2
  REGION 1..10: note = Table B: HLA-DQA1*03:02-B1*03:03L HLA-DQA1*05:01-B1*03:01L HLA-DRB1*04:01L HLA-DRB1*04:03L HLA-DRB1*13:02L HLA-DRB1*13:03L HLA-DRB1*01:03L HLA-DRB1*04:02L HLA-DRB1*04:04L HLA-DRB1*04:05L HLA-DQA1*01:02-B1*06:02L HLA-DRB1*01:01L HLA-DRB1*01:02L
  REGION 1..10: note = CONT. FROM ABOVE: HLA-DRB4*03:01NL HLA-DRB1*08:04L HLA-DRB1*08:7 7L HLA-DRB3*02:01L HLA-DRB1*14:01L HLA-DRB1*11:03L HLA-DRB1*11:0 4L HLA-DRB1*14:02L HLA-DRB1*08:01L HLA-DRB5*01:01L HLA-DQA1*05:0 5-B1*03:19L HLA-DQA1*05:01-B1*02:01L HLA-DRB1*04:10L
  REGION 1..10: note = CONT. FROM ABOVE: HLA-DRB1*12:01L HLA-DRB1*12:02L HLA-DPA1*03:01 -B1*105:01L HLA-DQA1*03:01-B1*03:02L HLA-DRB1*14:54L HLA-DQA1*05 :05-B1*03:01L HLA-DRB1*14:17L HLA-DRB1*07:01L HLA-DRB1*10:01L HL A-DRB1*16:01L HLA-DQA1*01:03-B1*06:01L HLA-DRB1*04:08L
  REGION 1..10: note = CONT. FROM ABOVE: HLA-DRB1*08:03L HLA-DQA1*02:01-B1*03:03L HLA-D RB1*15:03L
VNNATNVVIK

SEQ ID NO: 9958 - protein, 10 aa, Severe acute respiratory syndrome coronavirus 2
  REGION 1..10: note = Table B: HLA-DQA1*03:02-B1*03:03L HLA-DQA1*01:02-B1*06:02L HLA-DPA1*03:01-B1*105:01L HLA-DQA1*02:01-B1*03:03L
NNATNVVIKV

SEQ ID NO: 9959 - protein, 16 aa, Severe acute respiratory syndrome coronavirus 2
  REGION 1..16: note = Table B: HLA-DQA1*03:02-B1*03:03L HLA-DRB1*04:04L HLA-DRB1*04:05L HLA-DRB1*14:01L HLA-DRB1*11:02L HLA-DRB1*11:04L HLA-DRB1*14:02L HLA-DRB1*11:01L HLA-DRB3*01:01L HLA-DRB1*10:01L HLA-DRB1*08:02L HLA-DRB1*08:03L
NVVIKVCEFQFCNDPF

SEQ ID NO: 9960 - protein, 17 aa, Severe acute respiratory syndrome coronavirus 2
  REGION 1..17: note = Table B: HLA-DQA1*03:02-B1*03:03L HLA-DRB1*03:01L HLA-DRB1*13:01L
DPFLGVYYHKNNKSWME

SEQ ID NO: 9961 - protein, 10 aa, Severe acute respiratory syndrome coronavirus 2
  REGION 1..10: note = Table B: HLA-DQA1*03:02-B1*03:03L HLA-DQA1*05:01-B1*03:01L HLA-DRB1*01:03L HLA-DQA1*01:02-B1*06:02L HLA-DRB1*08:77L HLA-DPA1*01:03-B1*03:01L HLA-DPA1*03:01-B1*04:02L HLA-DRB1*03:01L HLA-DRB1*11:02L HLA-DRB1*14:02L
  REGION 1..10: note = CONT. FROM ABOVE: HLA-DQA1*01-B1*05L HLA-DQA1*05:05-B1*03:19M HL A-DQA1*05:01-B1*02:01L HLA-DRB4*01:01L HLA-DPA1*01:03-B1*04:01L HLA-DQA1*05:05-B1*03:116L HLA-DPA1*01:03-B1*04:02L HLA-DPA1*02:0 1-B1*13:01L HLA-DPA1*03:01-B1*105:01L HLA-DPA1*01:03-B1*104:01L
  REGION 1..10: note = CONT. FROM ABOVE: HLA-DPA1*01:02-B1*04:01L HLA-DRB1*10:01L HLA-D RB1*16:01L HLA-DQA1*01:03-B1*06:01L HLA-DQA1*02:01-B1*03:03L HLA -DRB1*15:03L
SWMESEFRVY

SEQ ID NO: 9962 - protein, 11 aa, Severe acute respiratory syndrome coronavirus 2
  REGION 1..11: note = Table B: HLA-DQA1*03:02-B1*03:03L HLA-DQA1*05:01-B1*03:01L HLA-DRB1*13:03L HLA-DRB1*01:03L HLA-DRB1*04:02L HLA-DRB1*04:05L HLA-DQA1*01:02-B1*06:02L HLA-DRB1*01:02L HLA-DRB4*03:01NL HLA-DPA1*01:03-B1*03:01L HLA-DPA1*03:01-B1*04:02L
  REGION 1..11: note = CONT. FROM ABOVE: HLA-DRB1*14:01L HLA-DQA1*01:01-B1*05:01L HLA-D QA1*05:01-B1*02:01L HLA-DRB1*04:10L HLA-DRB1*12:01L HLA-DPA1*03: 01-B1*105:01L HLA-DRB1*14:54L HLA-DQA1*05:05-B1*03:01L HLA-DRB1* 14:17L HLA-DPA1*01:02-B1*04:01L HLA-DRB1*16:01L
  REGION 1..11: note = CONT. FROM ABOVE: HLA-DQA1*01:03-B1*06:01L HLA-DRB1*04:08L HLA-D QA1*02:01-B1*03:03L HLA-DRB1*15:03L
SEFRVYSSANN

SEQ ID NO: 9963 - protein, 12 aa, Severe acute respiratory syndrome coronavirus 2
  REGION 1..12: note = Table B: HLA-DQA1*03:02-B1*03:03L HLA-DQA1*05:01-B1*03:01L HLA-DRB1*13:02L HLA-DRB1*01:02L HLA-DPA1*01:03-B1*03:01L HLA-DPA1*03:01-B1*04:02L HLA-DRB1*14:01L HLA-DQA1*05:01-B1*02:01L HLA-DRB1*12:01L
  REGION 1..12: note = CONT. FROM ABOVE: HLA-DQA1*03:01-B1*03:02L HLA-DPA1*01:03-B1*104 :01L HLA-DQA1*05:05-B1*03:01L HLA-DPA1*01:02-B1*04:01L HLA-DRB1* 04:08L
RVYSSANNCTFE

SEQ ID NO: 9964 - protein, 10 aa, Severe acute respiratory syndrome coronavirus 2
  REGION 1..10: note = Table B: HLA-DQA1*03:02-B1*03:03L HLA-DQA1*05:01-B1*03:01L HLA-DPA1*03:01-B1*04:02L HLA-DQA1*01-B1*05L HLA-DQA1*05:05-B1*03:19L HLA-DQA1*05:01-B1*02:01L HLA-DRB1*12:01L HLA-DPA1*02:01-B1*13:01L
  REGION 1..10: note = CONT. FROM ABOVE: HLA-DPA1*03:01-B1*105:01L HLA-DQA1*03:01-B1*03 :02L HLA-DPA1*01:02-B1*04:01L HLA-DRB1*16:01L HLA-DQA1*01:03-B1* 06:01L HLA-DQA1*02:01-B1*03:03L HLA-DRB1*15:03L
TFEYVSQPFL

SEQ ID NO: 9965 - protein, 10 aa, Severe acute respiratory syndrome coronavirus 2
  REGION 1..10: note = Table B: HLA-DQA1*03:02-B1*03:03L HLA-DRB1*11:02L HLA-DQA1*05:05-B1*03:19M HLA-DQA1*05:01-B1*02:01L HLA-DRB1*09:01L HLA-DPA1*02:01-B1*13:01L HLA-DQA1*03:01-B1*03:02L HLA-DPA1*01:03-B1*104:01L
  REGION 1..10: note = CONT. FROM ABOVE: HLA-DQA1*01:03-B1*06:01L HLA-DQA1*02:01-B1*03: 03L HLA-DRB1*15:03L
FEYVSQPFLM

SEQ ID NO: 9966 - protein, 10 aa, Severe acute respiratory syndrome coronavirus 2
  REGION 1..10: note = Table B: HLA-DQA1*03:02-B1*03:03L HLA-DQA1*01:02-B1*06:02L HLA-DRB1*01:02L HLA-DPA1*03:01-B1*04:02L HLA-DRB1*14:02L HLA-DQA1*01-B1*05L HLA-DQA1*05:05-B1*03:19L HLA-DQA1*05:01-B1*02:01L HLA-DPA1*01:03-B1*04:01L
  REGION 1..10: note = CONT. FROM ABOVE: HLA-DPA1*01:03-B1*04:02L HLA-DPA1*02:01-B1*13: 01L HLA-DPA1*03:01-B1*105:01L HLA-DQA1*03:01-B1*03:02L HLA-DPA1* 01:03-B1*104:01L HLA-DPA1*01:02-B1*04:01L HLA-DRB1*16:01L HLA-DQ A1*01:03-B1*06:01L HLA-DRB1*04:08L HLA-DQA1*02:01-B1*03:03L
  REGION 1..10: note = CONT. FROM ABOVE: HLA-DRB1*15:03L
YVSQPFLMDL

SEQ ID NO: 9967 - protein, 12 aa, Severe acute respiratory syndrome coronavirus 2
  REGION 1..12: note = Table B: HLA-DQA1*03:02-B1*03:03L HLA-DRB1*04:03L HLA-DRB1*13:03L HLA-DRB1*01:03L HLA-DRB1*04:02L HLA-DRB1*04:05L HLA-DRB4*03:01NL HLA-DRB1*08:01L HLA-DQA1*01-B1*05L HLA-DQA1*05:01-B1*02:01L HLA-DRB1*04:10L HLA-DRB1*12:01L
  REGION 1..12: note = CONT. FROM ABOVE: HLA-DRB1*14:54L HLA-DRB1*14:17L HLA-DRB1*16:01 L HLA-DRB1*04:08L HLA-DQA1*02:01-B1*03:03L
SQPFLMDLEGKQ

SEQ ID NO: 9968 - protein, 12 aa, Severe acute respiratory syndrome coronavirus 2
  REGION 1..12: note = Table B: HLA-DQA1*03:02-B1*03:03L HLA-DRB1*13:02L HLA-DRB1*01:03L HLA-DRB1*01:02L HLA-DRB4*03:01NL HLA-DRB1*08:04L HLA-DRB1*08:77L HLA-DPA1*01:03-B1*03:01L HLA-DRB1*03:01L HLA-DRB1*14:01L HLA-DRB1*11:04L HLA-DRB1*14:02L HLA-DRB1*08:01L
  REGION 1..12: note = CONT. FROM ABOVE: HLA-DQA1*01-B1*05L HLA-DQA1*05:01-B1*02:01L HL A-DRB1*04:10L HLA-DRB1*12:01L HLA-DRB1*12:02L HLA-DRB3*01:01L HL A-DPA1*03:01-B1*105:01L HLA-DRB1*14:54L HLA-DRB1*10:01L HLA-DRB1 *16:01L HLA-DRB1*04:08L HLA-DRB1*08:03L HLA-DQA1*02:01-B1*03:03L
QPFLMDLEGKQG

SEQ ID NO: 9969 - protein, 10 aa, Severe acute respiratory syndrome coronavirus 2
  REGION 1..10: note = Table B: HLA-DQA1*03:02-B1*03:03L HLA-DQA1*05:01-B1*03:01L HLA-DRB1*13:03L HLA-DRB1*01:03L HLA-DQA1*01:02-B1*06:02L HLA-DRB1*08:77L HLA-DPA1*01:03-B1*03:01L HLA-DPA1*03:01-B1*04:02L HLA-DRB1*03:01L HLA-DRB1*11:02L
  REGION 1..10: note = CONT. FROM ABOVE: HLA-DRB1*14:02L HLA-DQA1*01-B1*05L HLA-DQA1*05 :05-B1*03:19M HLA-DQA1*05:01-B1*02:01L HLA-DRB4*01:01L HLA-DPA1* 01:03-B1*04:01L HLA-DQA1*05:05-B1*03:116L HLA-DPA1*01:03-B1*04:0 2L HLA-DPA1*02:01-B1*13:01L HLA-DPA1*03:01-B1*105:01L
  REGION 1..10: note = CONT. FROM ABOVE: HLA-DPA1*01:03-B1*104:01L HLA-DRB1*10:01L HLA- DRB1*16:01L HLA-DQA1*01:03-B1*06:01L HLA-DQA1*02:01-B1*03:03L HL A-DRB1*15:03L
EFVFKNIDGY

SEQ ID NO: 9970 - protein, 10 aa, Severe acute respiratory syndrome coronavirus 2
  REGION 1..10: note = Table B: HLA-DQA1*03:02-B1*03:03L HLA-DQA1*05:01-B1*03:01L HLA-DRB1*04:03L HLA-DRB1*01:03L HLA-DRB1*04:05L HLA-DQA1*01:02-B1*06:02L HLA-DPA1*01:03-B1*03:01L HLA-DPA1*03:01-B1*04:02L HLA-DRB1*14:02L HLA-DQA1*01-B1*05L
  REGION 1..10: note = CONT. FROM ABOVE: HLA-DQA1*05:05-B1*03:19L HLA-DQA1*05:01-B1*02: 01L HLA-DPA1*01:03-B1*04:01L HLA-DPA1*01:03-B1*04:02L HLA-DPA1*0 2:01-B1*13:01L HLA-DPA1*03:01-B1*105:01L HLA-DPA1*01:02-B1*04:01 L HLA-DRB1*16:01L HLA-DQA1*01:03-B1*06:01L
  REGION 1..10: note = CONT. FROM ABOVE: HLA-DQA1*02:01-B1*03:03L HLA-DRB1*15:03L
FVFKNIDGYF

SEQ ID NO: 9971 - protein, 14 aa, Severe acute respiratory syndrome coronavirus 2
  REGION 1..14: note = Table B: HLA-DQA1*03:02-B1*03:03L HLA-DRB1*04:04L HLA-DRB1*01:01L HLA-DRB4*03:01NL HLA-DRB3*02:01L HLA-DPA1*01:03-B1*03:01L HLA-DPA1*01:03-B1*104:01L HLA-DRB1*07:01L HLA-DRB1*10:01L HLA-DQA1*01:03-B1*06:01L
DGYFKIYSKHTPIN

SEQ ID NO: 9972 - protein, 10 aa, Severe acute respiratory syndrome coronavirus 2
  REGION 1..10: note = Table B: HLA-DQA1*03:02-B1*03:03L HLA-DQA1*05:01-B1*03:01L HLA-DRB1*04:03L HLA-DRB1*13:02L HLA-DRB1*13:03L HLA-DRB1*01:03L HLA-DRB1*04:05L HLA-DQA1*01:02-B1*06:02L HLA-DRB1*01:01L HLA-DRB1*01:02L HLA-DRB4*03:01NL HLA-DRB1*08:77L
  REGION 1..10: note = CONT. FROM ABOVE: HLA-DPA1*03:01-B1*04:02L HLA-DRB1*14:01L HLA-D RB1*11:03L HLA-DRB1*14:02L HLA-DQA1*01:01-B1*05:01L HLA-DRB1*08: 01L HLA-DRB1*11:01L HLA-DQA1*01-B1*05L HLA-DQA1*05:05-B1*03:19L HLA-DQA1*05:01-B1*02:01L HLA-DPA1*01:03-B1*04:01L
  REGION 1..10: note = CONT. FROM ABOVE: HLA-DQA1*05:05-B1*03:116L HLA-DPA1*01:03-B1*04 :02L HLA-DRB1*12:01L HLA-DPA1*02:01-B1*13:01M HLA-DPA1*03:01-B1* 105:01L HLA-DQA1*03:01-B1*03:02L HLA-DPA1*01:02-B1*04:01L HLA-DR B1*07:01L HLA-DRB1*16:01L HLA-DQA1*01:03-B1*06:01M
  REGION 1..10: note = CONT. FROM ABOVE: HLA-DRB1*08:03L HLA-DQA1*02:01-B1*03:03L HLA-D RB1*15:03L
IYSKHTPINL

SEQ ID NO: 9973 - protein, 11 aa, Severe acute respiratory syndrome coronavirus 2
  REGION 1..11: note = Table B: HLA-DQA1*03:02-B1*03:03L HLA-DRB1*04:01L HLA-DQA1*01:02-B1*06:02L HLA-DRB1*01:02L HLA-DRB1*08:04L HLA-DRB1*08:01L HLA-DQA1*05:01-B1*02:01L HLA-DRB1*12:02L HLA-DRB1*10:01L HLA-DQA1*02:01-B1*03:03L HLA-DRB1*15:03L
PINLVRDLPQG

SEQ ID NO: 9974 - protein, 10 aa, Severe acute respiratory syndrome coronavirus 2
  REGION 1..10: note = Table B: HLA-DQA1*03:02-B1*03:03L HLA-DRB1*04:03L HLA-DRB1*13:03L HLA-DRB1*01:03L HLA-DRB1*04:02L HLA-DRB1*04:05L HLA-DQA1*01-B1*05L HLA-DQA1*03:01-B1*03:02L HLA-DRB1*16:01L
VRDLPQGFSA

SEQ ID NO: 9975 - protein, 10 aa, Severe acute respiratory syndrome coronavirus 2
  REGION 1..10: note = Table B: HLA-DQA1*03:02-B1*03:03L HLA-DQA1*05:05-B1*03:19L HLA-DQA1*03:01-B1*03:02L HLA-DRB1*16:01L
RDLPQGFSAL

SEQ ID NO: 9976 - protein, 12 aa, Severe acute respiratory syndrome coronavirus 2
  REGION 1..12: note = Table B: HLA-DQA1*03:02-B1*03:03L HLA-DQA1*01:02-B1*06:02L HLA-DQA1*05:05-B1*03:19L HLA-DQA1*03:01-B1*03:02L HLA-DQA1*05:05-B1*03:01L HLA-DQA1*01:03-B1*06:01L HLA-DQA1*02:01-B1*03:03L
PQGFSALEPLVD

SEQ ID NO: 9977 - protein, 10 aa, Severe acute respiratory syndrome coronavirus 2
  REGION 1..10: note = Table B: HLA-DQA1*03:02-B1*03:03L HLA-DRB1*04:03L HLA-DRB1*13:03L HLA-DRB1*04:02L HLA-DRB1*04:05L HLA-DRB4*03:01NL HLA-DQA1*01-B1*05L HLA-DQA1*05:01-B1*02:01L HLA-DRB1*04:10L HLA-DRB1*12:01L HLA-DPA1*03:01-B1*105:01L
  REGION 1..10: note = CONT. FROM ABOVE: HLA-DQA1*03:01-B1*03:02L HLA-DRB1*14:54L HLA-D RB1*14:17L HLA-DRB1*16:01L HLA-DQA1*02:01-B1*03:03L HLA-DRB1*15: 03L
LEPLVDLPIG

SEQ ID NO: 9978 - protein, 11 aa, Severe acute respiratory syndrome coronavirus 2
  REGION 1..11: note = Table B: HLA-DQA1*03:02-B1*03:03L HLA-DRB1*04:03L HLA-DQA1*01-B1*05L HLA-DQA1*05:01-B1*02:01L HLA-DQA1*03:01-B1*03:02L HLA-DQA1*01:03-B1*06:01L HLA-DQA1*02:01-B1*03:03L
EPLVDLPIGIN

SEQ ID NO: 9979 - protein, 10 aa, Severe acute respiratory syndrome coronavirus 2
  REGION 1..10: note = Table B: HLA-DQA1*03:02-B1*03:03L HLA-DQA1*05:05-B1*03:19L
LVDLPIGINI

SEQ ID NO: 9980 - protein, 10 aa, Severe acute respiratory syndrome coronavirus 2
  REGION 1..10: note = Table B: HLA-DQA1*03:02-B1*03:03L HLA-DQA1*05:01-B1*03:01M HLA-DRB1*13:03M HLA-DRB1*01:03L HLA-DRB1*04:05L HLA-DQA1*01:02-B1*06:02H HLA-DRB1*01:01L HLA-DRB1*01:02L HLA-DRB4*03:01NL HLA-DRB1*08:77L HLA-DPA1*01:03-B1*03:01L
  REGION 1..10: note = CONT. FROM ABOVE: HLA-DPA1*03:01-B1*04:02L HLA-DRB1*03:01L HLA-D RB1*14:01L HLA-DRB1*11:03L HLA-DRB1*14:02L HLA-DRB1*08:01L HLA-D RB5*01:01L HLA-DQA1*01-B1*05L HLA-DQA1*05:05-B1*03:19L HLA-DQA1* 05:01-B1*02:01L HLA-DPA1*01:03-B1*04:01L
  REGION 1..10: note = CONT. FROM ABOVE: HLA-DQA1*05:05-B1*03:116L HLA-DPA1*01:03-B1*04 :02L HLA-DRB1*12:01L HLA-DPA1*02:01-B1*13:01M HLA-DPA1*03:01-B1* 105:01M HLA-DQA1*03:01-B1*03:02L HLA-DPA1*01:02-B1*04:01L HLA-DR B1*10:01L HLA-DRB1*16:01L HLA-DQA1*01:03-B1*06:01L
  REGION 1..10: note = CONT. FROM ABOVE: HLA-DRB1*08:03L HLA-DQA1*02:01-B1*03:03L HLA-D RB1*15:03M
LPIGINITRF

SEQ ID NO: 9981 - protein, 10 aa, Severe acute respiratory syndrome coronavirus 2
  REGION 1..10: note = Table B: HLA-DQA1*03:02-B1*03:03L HLA-DQA1*05:01-B1*03:01L HLA-DRB1*01:03L HLA-DQA1*01:02-B1*06:02L HLA-DRB1*01:02L HLA-DRB1*08:77L HLA-DRB3*02:01L HLA-DPA1*01:03-B1*03:01L HLA-DPA1*03:01-B1*04:02M HLA-DRB1*14:01L HLA-DRB1*11:04L
  REGION 1..10: note = CONT. FROM ABOVE: HLA-DRB1*08:01L HLA-DRB1*11:01L HLA-DQA1*01-B1 *05L HLA-DQA1*05:05-B1*03:19L HLA-DQA1*05:01-B1*02:01L HLA-DPA1* 01:03-B1*04:01M HLA-DPA1*01:03-B1*04:02L HLA-DRB1*12:01L HLA-DPA 1*02:01-B1*13:01L HLA-DPA1*03:01-B1*105:01L
  REGION 1..10: note = CONT. FROM ABOVE: HLA-DQA1*03:01-B1*03:02L HLA-DPA1*01:03-B1*104 :01L HLA-DPA1*01:02-B1*04:01M HLA-DRB1*16:01L HLA-DQA1*01:03-B1* 06:01L HLA-DRB1*04:08L HLA-DQA1*02:01-B1*03:03L HLA-DRB1*15:03L
GINITRFQTL

SEQ ID NO: 9982 - protein, 13 aa, Severe acute respiratory syndrome coronavirus 2
  REGION 1..13: note = Table B: HLA-DQA1*03:02-B1*03:03L HLA-DQA1*05:01-B1*03:01L HLA-DRB1*13:02L HLA-DRB1*01:03L HLA-DRB1*04:02L HLA-DRB1*04:04L HLA-DRB1*14:01L HLA-DQA1*01:01-B1*05:01L HLA-DRB1*08:01L HLA-DQA1*05:01-B1*02:01L HLA-DRB1*04:10L
  REGION 1..13: note = CONT. FROM ABOVE: HLA-DPA1*03:01-B1*105:01L HLA-DQA1*05:05-B1*03 :01L HLA-DRB1*14:17L HLA-DPA1*01:02-B1*04:01L HLA-DRB1*04:08L HL A-DRB1*15:03L
LALHRSYLTPGDS

SEQ ID NO: 9983 - protein, 12 aa, Severe acute respiratory syndrome coronavirus 2
  REGION 1..12: note = Table B: HLA-DQA1*03:02-B1*03:03L HLA-DRB1*13:03L HLA-DRB1*04:02L HLA-DRB1*04:05L HLA-DRB4*03:01NL HLA-DQA1*01-B1*05L HLA-DQA1*05:01-B1*02:01L HLA-DRB1*04:10L HLA-DRB1*12:01L HLA-DQA1*03:01-B1*03:02L HLA-DRB1*14:54L
  REGION 1..12: note = CONT. FROM ABOVE: HLA-DRB1*16:01L HLA-DQA1*02:01-B1*03:03L
RSYLTPGDSSSG

SEQ ID NO: 9984 - protein, 12 aa, Severe acute respiratory syndrome coronavirus 2
  REGION 1..12: note = Table B: HLA-DQA1*03:02-B1*03:03L HLA-DRB1*04:05L HLA-DQA1*01:03-B1*06:01L
SYLTPGDSSSGW

SEQ ID NO: 9985 - protein, 14 aa, Severe acute respiratory syndrome coronavirus 2
  REGION 1..14: note = Table B: HLA-DQA1*03:02-B1*03:03L HLA-DQA1*05:01-B1*03:01L HLA-DRB1*01:03L HLA-DQA1*01:02-B1*06:02L HLA-DQA1*01:01-B1*05:01L HLA-DQA1*05:05-B1*03:19L HLA-DQA1*05:01-B1*02:01L HLA-DQA1*05:05-B1*03:116L
  REGION 1..14: note = CONT. FROM ABOVE: HLA-DQA1*03:01-B1*03:02L HLA-DQA1*05:05-B1*03: 01L HLA-DQA1*01:03-B1*06:01L HLA-DQA1*02:01-B1*03:03L
TPGDSSSGWTAGAA

SEQ ID NO: 9986 - protein, 12 aa, Severe acute respiratory syndrome coronavirus 2
  REGION 1..12: note = Table B: HLA-DQA1*03:02-B1*03:03L HLA-DQA1*05:01-B1*03:01L HLA-DQA1*01:02-B1*06:02L HLA-DQA1*03:01-B1*03:02L HLA-DQA1*05:05-B1*03:01L HLA-DQA1*01:03-B1*06:01L HLA-DQA1*02:01-B1*03:03L
DSSSGWTAGAAA

SEQ ID NO: 9987 - protein, 12 aa, Severe acute respiratory syndrome coronavirus 2
  REGION 1..12: note = Table B: HLA-DQA1*03:02-B1*03:03L HLA-DQA1*05:01-B1*03:01L HLA-DQA1*01-B1*05L HLA-DRB1*12:01L HLA-DPA1*03:01-B1*105:01L HLA-DQA1*05:05-B1*03:01L HLA-DRB1*10:01L
SSGWTAGAAAYY

SEQ ID NO: 9988 - protein, 11 aa, Severe acute respiratory syndrome coronavirus 2
  REGION 1..11: note = Table B: HLA-DQA1*03:02-B1*03:03L HLA-DQA1*05:01-B1*03:01L HLA-DQA1*01:02-B1*06:02L HLA-DQA1*05:05-B1*03:19L HLA-DPA1*03:01-B1*105:01L HLA-DQA1*03:01-B1*03:02L HLA-DQA1*05:05-B1*03:01L HLA-DQA1*02:01-B1*03:03L
WTAGAAAYYVG

SEQ ID NO: 9989 - protein, 12 aa, Severe acute respiratory syndrome coronavirus 2
  REGION 1..12: note = Table B: HLA-DQA1*03:02-B1*03:03L HLA-DQA1*05:01-B1*03:01L HLA-DQA1*05:05-B1*03:01L HLA-DQA1*02:01-B1*03:03L
TAGAAAYYVGYL

SEQ ID NO: 9990 - protein, 12 aa, Severe acute respiratory syndrome coronavirus 2
  REGION 1..12: note = Table B: HLA-DQA1*03:02-B1*03:03L HLA-DRB1*04:03L HLA-DQA1*01:02-B1*06:02L
AAAYYVGYLQPR

SEQ ID NO: 9991 - protein, 10 aa, Severe acute respiratory syndrome coronavirus 2
  REGION 1..10: note = Table B: HLA-DQA1*03:02-B1*03:03L HLA-DQA1*05:01-B1*03:01L HLA-DRB1*04:03L HLA-DRB1*13:03L HLA-DRB1*01:03L HLA-DRB1*04:02L HLA-DQA1*01:02-B1*06:02L HLA-DPA1*03:01-B1*04:02L HLA-DQA1*01-B1*05L HLA-DQA1*05:01-B1*02:01L
  REGION 1..10: note = CONT. FROM ABOVE: HLA-DPA1*01:03-B1*04:02L HLA-DPA1*03:01-B1*105 :01L HLA-DQA1*03:01-B1*03:02L HLA-DRB1*14:17L HLA-DPA1*01:02-B1* 04:01L HLA-DRB1*16:01L HLA-DQA1*01:03-B1*06:01L HLA-DRB1*04:08L HLA-DQA1*02:01-B1*03:03L HLA-DRB1*15:03L
YYVGYLQPRT

SEQ ID NO: 9992 - protein, 10 aa, Severe acute respiratory syndrome coronavirus 2
  REGION 1..10: note = Table B: HLA-DQA1*03:02-B1*03:03L HLA-DQA1*05:01-B1*03:01L HLA-DRB1*04:03L HLA-DRB1*13:02L HLA-DRB1*13:03L HLA-DRB1*01:03L HLA-DRB1*04:05L HLA-DQA1*01:02-B1*06:02L HLA-DRB1*01:01L HLA-DRB1*01:02L HLA-DRB4*03:01NL HLA-DRB1*08:77L HLA-DRB3*02:01L
  REGION 1..10: note = CONT. FROM ABOVE: HLA-DPA1*01:03-B1*03:01L HLA-DPA1*03:01-B1*04: 02L HLA-DRB1*14:01L HLA-DRB1*11:03L HLA-DRB1*14:02L HLA-DQA1*01: 01-B1*05:01L HLA-DQA1*01-B1*05L HLA-DQA1*05:05-B1*03:19L HLA-DQA 1*05:01-B1*02:01L HLA-DRB4*01:01L HLA-DPA1*01:03-B1*04:01L
  REGION 1..10: note = CONT. FROM ABOVE: HLA-DQA1*05:05-B1*03:116L HLA-DRB1*09:01L HLA- DPA1*01:03-B1*04:02L HLA-DRB1*12:01L HLA-DPA1*02:01-B1*13:01L HL A-DPA1*03:01-B1*105:01L HLA-DQA1*03:01-B1*03:02L HLA-DPA1*01:03- B1*104:01L HLA-DQA1*05:05-B1*03:01L HLA-DPA1*01:02-B1*04:01L
  REGION 1..10: note = CONT. FROM ABOVE: HLA-DRB1*07:01L HLA-DRB1*10:01L HLA-DRB1*16:01 L HLA-DQA1*01:03-B1*06:01M HLA-DRB1*08:03L HLA-DQA1*02:01-B1*03: 03L HLA-DRB1*15:03L
YVGYLQPRTF

SEQ ID NO: 9993 - protein, 10 aa, Severe acute respiratory syndrome coronavirus 2
  REGION 1..10: note = Table B: HLA-DQA1*03:02-B1*03:03L HLA-DQA1*05:01-B1*03:01L HLA-DRB1*04:03L HLA-DQA1*01:02-B1*06:02L HLA-DRB1*01:02L HLA-DRB1*14:01L HLA-DQA1*01-B1*05L HLA-DQA1*05:05-B1*03:19L HLA-DQA1*05:01-B1*02:01L HLA-DRB1*12:01L
  REGION 1..10: note = CONT. FROM ABOVE: HLA-DPA1*02:01-B1*13:01L HLA-DPA1*03:01-B1*105 :01L HLA-DQA1*03:01-B1*03:02L HLA-DQA1*05:05-B1*03:01L HLA-DPA1* 01:02-B1*04:01L HLA-DRB1*16:01L HLA-DQA1*01:03-B1*06:01L HLA-DQA 1*02:01-B1*03:03L HLA-DRB1*15:03L
VGYLQPRTFL

SEQ ID NO: 9994 - protein, 10 aa, Severe acute respiratory syndrome coronavirus 2
  REGION 1..10: note = Table B: HLA-DQA1*03:02-B1*03:03L HLA-DPA1*02:01-B1*13:01L HLA-DQA1*01:03-B1*06:01L HLA-DQA1*02:01-B1*03:03L
GYLQPRTFLL

SEQ ID NO: 9995 - protein, 13 aa, Severe acute respiratory syndrome coronavirus 2
  REGION 1..13: note = Table B: HLA-DQA1*03:02-B1*03:03L HLA-DQA1*05:01-B1*03:01L HLA-DRB1*13:03L HLA-DRB1*01:03L HLA-DRB1*04:05L HLA-DRB1*08:04L HLA-DRB3*02:01L HLA-DPA1*01:03-B1*03:01L HLA-DPA1*03:01-B1*04:02L HLA-DRB1*14:02L HLA-DRB1*08:01L
  REGION 1..13: note = CONT. FROM ABOVE: HLA-DQA1*05:05-B1*03:19L HLA-DRB1*12:02L HLA-D PA1*02:01-B1*13:01L HLA-DQA1*03:01-B1*03:02L HLA-DRB1*14:54L HLA -DQA1*05:05-B1*03:01L HLA-DPA1*01:02-B1*04:01L HLA-DQA1*01:03-B1 *06:01L HLA-DRB1*04:08L
TFLLKYNENGTIT

SEQ ID NO: 9996 - protein, 12 aa, Severe acute respiratory syndrome coronavirus 2
  REGION 1..12: note = Table B: HLA-DQA1*03:02-B1*03:03L HLA-DQA1*05:01-B1*03:01L HLA-DRB1*13:03L HLA-DRB1*01:03L HLA-DRB1*04:05L HLA-DRB1*01:02L HLA-DRB4*03:01NL HLA-DRB1*08:04L HLA-DRB1*08:77L HLA-DRB3*02:01L HLA-DRB1*11:03L HLA-DQA1*05:01-B1*02:01L HLA-DRB1*12:02L
  REGION 1..12: note = CONT. FROM ABOVE: HLA-DPA1*03:01-B1*105:01L HLA-DRB1*14:54L HLA- DQA1*05:05-B1*03:01L HLA-DRB1*07:01L
LLKYNENGTITD

SEQ ID NO: 9997 - protein, 12 aa, Severe acute respiratory syndrome coronavirus 2
  REGION 1..12: note = Table B: HLA-DQA1*03:02-B1*03:03L HLA-DQA1*05:01-B1*03:01L HLA-DRB1*13:03L HLA-DRB1*01:03L HLA-DRB1*04:05L HLA-DRB1*01:02L HLA-DRB4*03:01NL HLA-DRB1*08:04L HLA-DRB1*08:77L HLA-DRB3*02:01L HLA-DPA1*01:03-B1*03:01L HLA-DRB1*11:03L HLA-DRB1*14:02L
  REGION 1..12: note = CONT. FROM ABOVE: HLA-DQA1*05:05-B1*03:19L HLA-DQA1*05:01-B1*02: 01L HLA-DRB1*04:10L HLA-DRB1*12:02L HLA-DPA1*03:01-B1*105:01L HL A-DRB1*14:54L HLA-DQA1*05:05-B1*03:01L HLA-DRB1*15:03L
LKYNENGTITDA

SEQ ID NO: 9998 - protein, 10 aa, Severe acute respiratory syndrome coronavirus 2
  REGION 1..10: note = Table B: HLA-DQA1*03:02-B1*03:03L HLA-DQA1*05:05-B1*03:19L HLA-DQA1*03:01-B1*03:02L HLA-DPA1*01:03-B1*104:01L
NENGTITDAV

SEQ ID NO: 9999 - protein, 15 aa, Severe acute respiratory syndrome coronavirus 2
  REGION 1..15: note = Table B: HLA-DQA1*03:02-B1*03:03L HLA-DRB1*04:02L HLA-DRB1*04:05L HLA-DRB1*01:02L HLA-DRB1*14:02L HLA-DRB1*12:01L HLA-DQA1*05:05-B1*03:01L HLA-DRB1*16:01L HLA-DRB1*15:03L
NGTITDAVDCALDPL

SEQ ID NO: 10000 - protein, 14 aa, Severe acute respiratory syndrome coronavirus 2
  REGION 1..14: note = Table B: HLA-DQA1*03:02-B1*03:03L HLA-DPA1*03:01-B1*105:01L HLA-DQA1*05:05-B1*03:01L HLA-DRB1*16:01L HLA-DQA1*01:03-B1*06:01L HLA-DQA1*02:01-B1*03:03L
ITDAVDCALDPLSE

SEQ ID NO: 10001 - protein, 13 aa, Severe acute respiratory syndrome coronavirus 2
  REGION 1..13: note = Table B: HLA-DQA1*03:02-B1*03:03L HLA-DRB1*04:02L HLA-DRB1*04:05L HLA-DQA1*01:02-B1*06:02L HLA-DRB1*04:10L HLA-DPA1*03:01-B1*105:01L HLA-DQA1*03:01-B1*03:02L HLA-DQA1*05:05-B1*03:01L HLA-DQA1*01:03-B1*06:01L
  REGION 1..13: note = CONT. FROM ABOVE: HLA-DQA1*02:01-B1*03:03L
DAVDCALDPLSET

SEQ ID NO: 10002 - protein, 13 aa, Severe acute respiratory syndrome coronavirus 2
  REGION 1..13: note = Table B: HLA-DQA1*03:02-B1*03:03L HLA-DQA1*05:01-B1*03:01L HLA-DRB1*01:03L HLA-DRB1*04:02L HLA-DRB1*04:05L HLA-DRB1*01:02L HLA-DQA1*01-B1*05L HLA-DQA1*05:01-B1*02:01L HLA-DRB1*04:10L HLA-DQA1*05:05-B1*03:01L HLA-DRB1*16:01L HLA-DRB1*04:08L
  REGION 1..13: note = CONT. FROM ABOVE: HLA-DRB1*15:03L
AVDCALDPLSETK

SEQ ID NO: 10003 - protein, 10 aa, Severe acute respiratory syndrome coronavirus 2
  REGION 1..10: note = Table B: HLA-DQA1*03:02-B1*03:03L HLA-DQA1*05:05-B1*03:19L
ALDPLSETKC

SEQ ID NO: 10004 - protein, 12 aa, Severe acute respiratory syndrome coronavirus 2
  REGION 1..12: note = Table B: HLA-DQA1*03:02-B1*03:03L HLA-DRB1*13:02L HLA-DRB1*13:03L HLA-DRB1*04:04L HLA-DRB4*03:01NL HLA-DRB1*08:04L HLA-DPA1*01:03-B1*03:01L HLA-DPA1*03:01-B1*04:02L HLA-DRB1*14:01L HLA-DRB1*11:04L HLA-DRB1*08:01L
  REGION 1..12: note = CONT. FROM ABOVE: HLA-DQA1*01-B1*05L HLA-DRB1*04:10L HLA-DRB1*12 :01L HLA-DRB1*12:02L HLA-DPA1*02:01-B1*13:01L HLA-DPA1*03:01-B1* 105:01L HLA-DRB1*14:54L HLA-DQA1*05:05-B1*03:01L HLA-DPA1*01:02- B1*04:01L HLA-DRB1*10:01L HLA-DRB1*08:03L HLA-DRB1*15:03L
LKSFTVEKGIYQ

SEQ ID NO: 10005 - protein, 12 aa, Severe acute respiratory syndrome coronavirus 2
  REGION 1..12: note = Table B: HLA-DQA1*03:02-B1*03:03L HLA-DQA1*05:01-B1*03:01L HLA-DRB1*04:01L HLA-DRB1*13:02L HLA-DRB1*01:03L HLA-DRB1*04:04L HLA-DRB1*04:05L HLA-DQA1*01:02-B1*06:02L HLA-DRB1*01:01L HLA-DRB1*01:02L HLA-DRB4*03:01NL HLA-DRB1*08:04L
  REGION 1..12: note = CONT. FROM ABOVE: HLA-DPA1*01:03-B1*03:01L HLA-DPA1*03:01-B1*04: 02L HLA-DRB1*14:01L HLA-DRB1*11:03L HLA-DRB1*14:02L HLA-DRB1*11: 01L HLA-DQA1*01-B1*05L HLA-DQA1*05:05-B1*03:19L HLA-DQA1*05:01-B 1*02:01L HLA-DPA1*01:03-B1*04:02L HLA-DRB1*12:01L
  REGION 1..12: note = CONT. FROM ABOVE: HLA-DPA1*03:01-B1*105:01L HLA-DRB1*14:54L HLA- DQA1*05:05-B1*03:01L HLA-DRB1*10:01L HLA-DRB1*04:08L HLA-DRB1*15 :03L
FTVEKGIYQTSN

SEQ ID NO: 10006 - protein, 14 aa, Severe acute respiratory syndrome coronavirus 2
  REGION 1..14: note = Table B: HLA-DQA1*03:02-B1*03:03L HLA-DRB1*13:02L HLA-DRB1*04:05L HLA-DRB4*03:01NL HLA-DPA1*01:03-B1*03:01L HLA-DRB1*14:01L HLA-DRB1*11:03L HLA-DRB1*11:04L HLA-DQA1*01-B1*05L HLA-DPA1*01:03-B1*04:01L HLA-DRB1*04:10L
  REGION 1..14: note = CONT. FROM ABOVE: HLA-DRB1*09:01L HLA-DRB1*12:02L HLA-DRB3*01:01 L HLA-DPA1*02:01-B1*13:01L HLA-DQA1*03:01-B1*03:02L HLA-DRB1*14: 54L HLA-DQA1*05:05-B1*03:01L HLA-DRB1*14:17L HLA-DQA1*01:03-B1*0 6:01L
VEKGIYQTSNFRVQ

SEQ ID NO: 10007 - protein, 12 aa, Severe acute respiratory syndrome coronavirus 2
  REGION 1..12: note = Table B: HLA-DQA1*03:02-B1*03:03L HLA-DRB1*13:02L HLA-DRB1*13:03L HLA-DRB1*04:04L HLA-DRB1*04:05L HLA-DQA1*01:02-B1*06:02L HLA-DRB4*03:01NL HLA-DRB1*08:04L HLA-DPA1*01:03-B1*03:01L HLA-DRB1*11:03L HLA-DRB1*11:04L
  REGION 1..12: note = CONT. FROM ABOVE: HLA-DRB1*14:02L HLA-DRB1*08:01L HLA-DRB1*11:01 L HLA-DQA1*05:05-B1*03:19L HLA-DRB1*09:01L HLA-DPA1*01:03-B1*04: 02L HLA-DRB3*01:01L HLA-DPA1*02:01-B1*13:01L HLA-DQA1*03:01-B1*0 3:02L HLA-DRB1*14:54L HLA-DQA1*05:05-B1*03:01L HLA-DRB1*14:17L
GIYQTSNFRVQP

SEQ ID NO: 10008 - protein, 10 aa, Severe acute respiratory syndrome coronavirus 2
  REGION 1..10: note = Table B: HLA-DQA1*03:02-B1*03:03L HLA-DQA1*05:01-B1*03:01L HLA-DRB1*04:03L HLA-DRB1*13:03L HLA-DRB1*01:03L HLA-DRB1*04:02L HLA-DRB4*03:01NL HLA-DRB1*14:02L HLA-DQA1*01-B1*05L HLA-DRB1*12:01L HLA-DPA1*03:01-B1*105:01L
  REGION 1..10: note = CONT. FROM ABOVE: HLA-DQA1*03:01-B1*03:02L HLA-DRB1*14:17L HLA-D PA1*01:02-B1*04:01L HLA-DRB1*16:01L HLA-DQA1*01:03-B1*06:01L HLA -DQA1*02:01-B1*03:03L
QTSNFRVQPT

SEQ ID NO: 10009 - protein, 12 aa, Severe acute respiratory syndrome coronavirus 2
  REGION 1..12: note = Table B: HLA-DQA1*03:02-B1*03:03L HLA-DQA1*05:01-B1*03:01L HLA-DRB1*13:02L HLA-DRB1*13:03L HLA-DRB1*01:03L HLA-DRB1*04:02L HLA-DRB1*04:05L HLA-DRB1*01:02L HLA-DRB4*03:01NL HLA-DRB1*08:04L HLA-DRB3*02:01L HLA-DPA1*03:01-B1*04:02L HLA-DRB1*14:01L
  REGION 1..12: note = CONT. FROM ABOVE: HLA-DQA1*01-B1*05L HLA-DQA1*05:01-B1*02:01L HL A-DRB1*12:01L HLA-DRB1*12:02L HLA-DPA1*02:01-B1*13:01L HLA-DPA1* 03:01-B1*105:01L HLA-DRB1*14:54L HLA-DRB1*14:17L HLA-DPA1*01:02- B1*04:01L HLA-DQA1*01:03-B1*06:01L HLA-DRB1*15:03L
TSNFRVQPTESI

SEQ ID NO: 10010 - protein, 12 aa, Severe acute respiratory syndrome coronavirus 2
  REGION 1..12: note = Table B: HLA-DQA1*03:02-B1*03:03L HLA-DRB1*13:02L HLA-DRB1*04:02L HLA-DRB1*01:02L HLA-DRB3*02:01L HLA-DPA1*03:01-B1*04:02L HLA-DRB1*14:01L HLA-DQA1*01-B1*05L HLA-DQA1*05:01-B1*02:01L HLA-DRB1*12:01L
  REGION 1..12: note = CONT. FROM ABOVE: HLA-DPA1*03:01-B1*105:01L HLA-DRB1*04:08L HLA- DQA1*02:01-B1*03:03L HLA-DRB1*15:03L
SNFRVQPTESIV

SEQ ID NO: 10011 - protein, 12 aa, Severe acute respiratory syndrome coronavirus 2
  REGION 1..12: note = Table B: HLA-DQA1*03:02-B1*03:03L HLA-DPA1*03:01-B1*04:02L HLA-DRB1*09:01L
NFRVQPTESIVR

SEQ ID NO: 10012 - protein, 12 aa, Severe acute respiratory syndrome coronavirus 2
  REGION 1..12: note = Table B: HLA-DQA1*03:02-B1*03:03L HLA-DQA1*05:01-B1*03:01L HLA-DRB1*13:02L HLA-DRB1*13:03L HLA-DRB1*04:02L HLA-DRB1*04:05L HLA-DRB1*01:02L HLA-DRB4*03:01NL HLA-DPA1*01:03-B1*03:01L HLA-DRB1*14:01L HLA-DQA1*01:01-B1*05:01L HLA-DQA1*01-B1*05L
  REGION 1..12: note = CONT. FROM ABOVE: HLA-DQA1*05:05-B1*03:19L HLA-DQA1*05:01-B1*02: 01L HLA-DRB1*12:01L HLA-DRB1*14:54L HLA-DQA1*05:05-B1*03:01L HLA -DRB1*14:17L HLA-DRB1*16:01L HLA-DRB1*04:08L
VQPTESIVRFPN

SEQ ID NO: 10013 - protein, 10 aa, Severe acute respiratory syndrome coronavirus 2
  REGION 1..10: note = Table B: HLA-DQA1*03:02-B1*03:03L HLA-DRB1*11:02L HLA-DQA1*05:05-B1*03:19M HLA-DPA1*01:03-B1*104:01L
TESIVRFPNI

SEQ ID NO: 10014 - protein, 10 aa, Severe acute respiratory syndrome coronavirus 2
  REGION 1..10: note = Table B: HLA-DQA1*03:02-B1*03:03L HLA-DQA1*05:01-B1*03:01L HLA-DRB1*04:03L HLA-DRB1*13:03L HLA-DRB1*01:03L HLA-DRB1*04:02L HLA-DRB1*04:05L HLA-DQA1*01:02-B1*06:02L HLA-DRB1*01:02L HLA-DRB4*03:01NL HLA-DRB1*14:01L HLA-DQA1*01-B1*05L
  REGION 1..10: note = CONT. FROM ABOVE: HLA-DQA1*05:01-B1*02:01L HLA-DRB1*04:10L HLA-D RB1*12:01L HLA-DQA1*03:01-B1*03:02L HLA-DRB1*14:54L HLA-DRB1*14: 17L HLA-DPA1*01:02-B1*04:01L HLA-DRB1*16:01L HLA-DRB1*04:08L HLA -DQA1*02:01-B1*03:03L HLA-DRB1*15:03L
SIVRFPNITN

SEQ ID NO: 10015 - protein, 10 aa, Severe acute respiratory syndrome coronavirus 2
  REGION 1..10: note = Table B: HLA-DQA1*03:02-B1*03:03M HLA-DQA1*05:01-B1*03:01L HLA-DRB1*04:03L HLA-DRB1*13:02L HLA-DRB1*13:03L HLA-DRB1*01:03L HLA-DRB1*04:02L HLA-DRB1*04:04L HLA-DRB1*04:05L HLA-DQA1*01:02-B1*06:02L HLA-DRB1*01:02L HLA-DRB4*03:01NL
  REGION 1..10: note = CONT. FROM ABOVE: HLA-DRB3*02:01L HLA-DPA1*01:03-B1*03:01L HLA-D PA1*03:01-B1*04:02L HLA-DRB1*14:01L HLA-DRB1*14:02L HLA-DQA1*01: 01-B1*05:01L HLA-DRB1*08:01L HLA-DQA1*01-B1*05L HLA-DQA1*05:05-B 1*03:19L HLA-DQA1*05:01-B1*02:01L HLA-DPA1*01:03-B1*04:01L
  REGION 1..10: note = CONT. FROM ABOVE: HLA-DQA1*05:05-B1*03:116L HLA-DRB1*09:01L HLA- DPA1*01:03-B1*04:02L HLA-DRB1*12:01L HLA-DPA1*02:01-B1*13:01L HL A-DPA1*03:01-B1*105:01L HLA-DQA1*03:01-B1*03:02L HLA-DRB1*14:17L HLA-DPA1*01:02-B1*04:01L HLA-DRB1*07:01L HLA-DRB1*10:01L
  REGION 1..10: note = CONT. FROM ABOVE: HLA-DRB1*16:01L HLA-DQA1*01:03-B1*06:01L HLA-D RB1*08:03L HLA-DQA1*02:01-B1*03:03L HLA-DRB1*15:03L
IVRFPNITNL

SEQ ID NO: 10016 - protein, 15 aa, Severe acute respiratory syndrome coronavirus 2
  REGION 1..15: note = Table B: HLA-DQA1*03:02-B1*03:03L HLA-DQA1*05:01-B1*03:01L HLA-DRB1*13:02L HLA-DRB1*04:05L HLA-DRB1*08:04L HLA-DRB3*02:01L HLA-DPA1*01:03-B1*03:01L HLA-DRB1*14:02L HLA-DQA1*05:05-B1*03:19L HLA-DPA1*01:03-B1*04:02L
  REGION 1..15: note = CONT. FROM ABOVE: HLA-DPA1*02:01-B1*13:01L HLA-DPA1*01:03-B1*104 :01L HLA-DRB1*16:01L HLA-DRB1*04:08L
FPNITNLCPFGEVFN

SEQ ID NO: 10017 - protein, 10 aa, Severe acute respiratory syndrome coronavirus 2
  REGION 1..10: note = Table B: HLA-DQA1*03:02-B1*03:03L
GEVFNATRFA

SEQ ID NO: 10018 - protein, 10 aa, Severe acute respiratory syndrome coronavirus 2
  REGION 1..10: note = Table B: HLA-DQA1*03:02-B1*03:03L HLA-DQA1*01:02-B1*06:02L HLA-DPA1*03:01-B1*04:02L HLA-DQA1*05:05-B1*03:19L HLA-DQA1*05:01-B1*02:01L HLA-DPA1*01:03-B1*04:01L HLA-DPA1*02:01-B1*13:01L HLA-DPA1*03:01-B1*105:01L
  REGION 1..10: note = CONT. FROM ABOVE: HLA-DPA1*01:03-B1*104:01L HLA-DPA1*01:02-B1*04 :01L HLA-DRB1*16:01L HLA-DQA1*01:03-B1*06:01L HLA-DQA1*02:01-B1* 03:03L HLA-DRB1*15:03L
VFNATRFASV

SEQ ID NO: 10019 - protein, 10 aa, Severe acute respiratory syndrome coronavirus 2
  REGION 1..10: note = Table B: HLA-DQA1*03:02-B1*03:03L HLA-DQA1*05:01-B1*03:01L HLA-DRB1*01:03L HLA-DQA1*01:02-B1*06:02L HLA-DPA1*01:03-B1*03:01L HLA-DPA1*03:01-B1*04:02L HLA-DRB1*14:02L HLA-DQA1*01-B1*05L HLA-DQA1*05:05-B1*03:19L
  REGION 1..10: note = CONT. FROM ABOVE: HLA-DQA1*05:01-B1*02:01L HLA-DPA1*01:03-B1*04: 01L HLA-DPA1*01:03-B1*04:02L HLA-DRB1*12:01L HLA-DPA1*02:01-B1*1 3:01L HLA-DPA1*03:01-B1*105:01L HLA-DPA1*01:03-B1*104:01L HLA-DQ A1*05:05-B1*03:01L HLA-DPA1*01:02-B1*04:01L HLA-DRB1*16:01L
  REGION 1..10: note = CONT. FROM ABOVE: HLA-DQA1*01:03-B1*06:01L HLA-DRB1*04:08L HLA-D QA1*02:01-B1*03:03L HLA-DRB1*15:03L
FNATRFASVY

SEQ ID NO: 10020 - protein, 12 aa, Severe acute respiratory syndrome coronavirus 2
  REGION 1..12: note = Table B: HLA-DQA1*03:02-B1*03:03L HLA-DQA1*05:01-B1*03:01L HLA-DRB1*04:03L HLA-DRB1*13:02L HLA-DRB1*01:03L HLA-DRB1*04:05L HLA-DRB1*01:02L HLA-DPA1*01:03-B1*03:01L HLA-DPA1*03:01-B1*04:02L HLA-DQA1*05:05-B1*03:19L
  REGION 1..12: note = CONT. FROM ABOVE: HLA-DQA1*05:01-B1*02:01L HLA-DPA1*01:03-B1*04: 01L HLA-DPA1*01:03-B1*04:02L HLA-DRB1*12:01L HLA-DPA1*02:01-B1*1 3:01L HLA-DPA1*03:01-B1*105:01L HLA-DQA1*03:01-B1*03:02L HLA-DPA 1*01:03-B1*104:01L HLA-DQA1*05:05-B1*03:01L
  REGION 1..12: note = CONT. FROM ABOVE: HLA-DPA1*01:02-B1*04:01L HLA-DRB1*16:01L HLA-D QA1*01:03-B1*06:01L HLA-DRB1*04:08L HLA-DRB1*15:03L
NATRFASVYAWN

SEQ ID NO: 10021 - protein, 12 aa, Severe acute respiratory syndrome coronavirus 2
  REGION 1..12: note = Table B: HLA-DQA1*03:02-B1*03:03L HLA-DQA1*05:01-B1*03:01L HLA-DRB1*04:01L HLA-DRB1*13:02L HLA-DRB1*13:03L HLA-DRB1*01:03L HLA-DRB1*04:02L HLA-DRB1*04:04L HLA-DRB1*04:05L HLA-DQA1*01:02-B1*06:02L HLA-DRB1*01:02L HLA-DRB4*03:01NL
  REGION 1..12: note = CONT. FROM ABOVE: HLA-DRB1*08:04L HLA-DRB1*08:77L HLA-DPA1*01:03 -B1*03:01L HLA-DPA1*03:01-B1*04:02L HLA-DRB1*14:01L HLA-DRB1*11: 03L HLA-DRB1*11:04L HLA-DRB5*01:01L HLA-DQA1*01-B1*05L HLA-DQA1* 05:05-B1*03:19L HLA-DQA1*05:01-B1*02:01L HLA-DRB1*04:10L
  REGION 1..12: note = CONT. FROM ABOVE: HLA-DRB1*12:01L HLA-DRB1*12:02L HLA-DPA1*03:01 -B1*105:01L HLA-DQA1*03:01-B1*03:02L HLA-DRB1*14:54L HLA-DQA1*05 :05-B1*03:01L HLA-DRB1*10:01L HLA-DRB1*16:01L HLA-DQA1*01:03-B1* 06:01L HLA-DRB1*04:08L HLA-DRB1*08:03L HLA-DQA1*02:01-B1*03:03L
  REGION 1..12: note = CONT. FROM ABOVE: HLA-DRB1*15:03L
VADYSVLYNSAS

SEQ ID NO: 10022 - protein, 13 aa, Severe acute respiratory syndrome coronavirus 2
  REGION 1..13: note = Table B: HLA-DQA1*03:02-B1*03:03L HLA-DQA1*05:01-B1*03:01L HLA-DRB1*13:02L HLA-DRB1*13:03L HLA-DRB1*08:04L HLA-DPA1*01:03-B1*03:01L HLA-DRB1*11:04L HLA-DQA1*02:01-B1*03:03L
DYSVLYNSASFST

SEQ ID NO: 10023 - protein, 11 aa, Severe acute respiratory syndrome coronavirus 2
  REGION 1..11: note = Table B: HLA-DQA1*03:02-B1*03:03L HLA-DQA1*05:01-B1*03:01L HLA-DRB1*13:03L HLA-DRB1*01:02L HLA-DPA1*01:03-B1*03:01L HLA-DPA1*03:01-B1*04:02L HLA-DRB1*03:01L HLA-DRB1*14:01L HLA-DRB1*11:03L HLA-DRB1*14:02L HLA-DRB1*11:01L
  REGION 1..11: note = CONT. FROM ABOVE: HLA-DQA1*01-B1*05L HLA-DQA1*05:05-B1*03:19L HL A-DQA1*05:01-B1*02:01L HLA-DRB4*01:01L HLA-DPA1*01:03-B1*04:01L HLA-DQA1*05:05-B1*03:116L HLA-DPA1*01:03-B1*04:02L HLA-DRB1*12:0 1L HLA-DQA1*03:01-B1*03:02L HLA-DPA1*01:03-B1*104:01L
  REGION 1..11: note = CONT. FROM ABOVE: HLA-DQA1*05:05-B1*03:01L HLA-DPA1*01:02-B1*04: 01L HLA-DRB1*10:01L
VLYNSASFSTF

SEQ ID NO: 10024 - protein, 10 aa, Severe acute respiratory syndrome coronavirus 2
  REGION 1..10: note = Table B: HLA-DQA1*03:02-B1*03:03L HLA-DQA1*05:01-B1*03:01L HLA-DRB1*04:03L HLA-DRB1*13:02L HLA-DRB1*13:03L HLA-DRB1*01:03L HLA-DRB1*04:02L HLA-DQA1*01:02-B1*06:02L HLA-DRB1*01:02L HLA-DRB4*03:01NL HLA-DRB3*02:01L HLA-DPA1*01:03-B1*03:01L
  REGION 1..10: note = CONT. FROM ABOVE: HLA-DPA1*03:01-B1*04:02L HLA-DRB1*14:01L HLA-D RB1*08:01L HLA-DQA1*01-B1*05L HLA-DQA1*05:05-B1*03:19L HLA-DQA1* 05:01-B1*02:01L HLA-DPA1*01:03-B1*04:01L HLA-DPA1*01:03-B1*04:02 L HLA-DRB1*12:01L HLA-DPA1*03:01-B1*105:01M
  REGION 1..10: note = CONT. FROM ABOVE: HLA-DQA1*03:01-B1*03:02L HLA-DPA1*01:03-B1*02: 01L HLA-DQA1*05:05-B1*03:01L HLA-DRB1*14:17L HLA-DPA1*01:02-B1*0 4:01M HLA-DRB1*16:01L HLA-DQA1*01:03-B1*06:01M HLA-DRB1*04:08L H LA-DQA1*02:01-B1*03:03L HLA-DRB1*15:03L
YNSASFSTFK

SEQ ID NO: 10025 - protein, 13 aa, Severe acute respiratory syndrome coronavirus 2
  REGION 1..13: note = Table B: HLA-DQA1*03:02-B1*03:03L HLA-DRB1*04:01L HLA-DPA1*01:03-B1*03:01L HLA-DPA1*03:01-B1*04:02L HLA-DRB1*11:03L HLA-DQA1*05:05-B1*03:19L HLA-DPA1*01:03-B1*04:01L HLA-DPA1*01:03-B1*04:02L
  REGION 1..13: note = CONT. FROM ABOVE: HLA-DQA1*05:05-B1*03:01L HLA-DRB1*07:01L
FSTFKCYGVSPTK

SEQ ID NO: 10026 - protein, 10 aa, Severe acute respiratory syndrome coronavirus 2
  REGION 1..10: note = Table B: HLA-DQA1*03:02-B1*03:03L HLA-DQA1*05:01-B1*03:01L HLA-DRB1*04:03L HLA-DRB1*13:03L HLA-DRB1*01:03L HLA-DRB1*04:02L HLA-DRB1*04:05L HLA-DQA1*01:02-B1*06:02L HLA-DRB1*01:02L HLA-DRB4*03:01NL HLA-DRB1*14:01L HLA-DQA1*01-B1*05L
  REGION 1..10: note = CONT. FROM ABOVE: HLA-DQA1*05:05-B1*03:19L HLA-DQA1*05:01-B1*02: 01L HLA-DRB1*12:01L HLA-DPA1*03:01-B1*105:01L HLA-DQA1*03:01-B1* 03:02L HLA-DQA1*05:05-B1*03:01L HLA-DRB1*14:17L HLA-DPA1*01:02-B 1*04:01L HLA-DRB1*16:01L HLA-DQA1*01:03-B1*06:01L
  REGION 1..10: note = CONT. FROM ABOVE: HLA-DQA1*02:01-B1*03:03L HLA-DRB1*15:03L
YGVSPTKLND

SEQ ID NO: 10027 - protein, 10 aa, Severe acute respiratory syndrome coronavirus 2
  REGION 1..10: note = Table B: HLA-DQA1*03:02-B1*03:03L HLA-DQA1*05:01-B1*03:01L HLA-DRB1*04:03L HLA-DRB1*13:03L HLA-DRB1*04:02L HLA-DQA1*01:02-B1*06:02L HLA-DRB3*02:01L HLA-DPA1*01:03-B1*03:01L HLA-DPA1*03:01-B1*04:02L
  REGION 1..10: note = CONT. FROM ABOVE: HLA-DRB1*14:01L HLA-DRB1*14:02L HLA-DQA1*01-B1 *05L HLA-DQA1*05:05-B1*03:19L HLA-DQA1*05:01-B1*02:01L HLA-DPA1* 01:03-B1*04:01L HLA-DQA1*05:05-B1*03:116L HLA-DRB1*09:01L HLA-DP A1*01:03-B1*04:02L HLA-DRB1*12:01L HLA-DPA1*03:01-B1*105:01L
  REGION 1..10: note = CONT. FROM ABOVE: HLA-DQA1*03:01-B1*03:02L HLA-DQA1*05:05-B1*03: 01L HLA-DPA1*01:02-B1*04:01L HLA-DRB1*07:01L HLA-DRB1*16:01L HLA -DQA1*01:03-B1*06:01L HLA-DQA1*02:01-B1*03:03L HLA-DRB1*15:03L
GVSPTKLNDL

SEQ ID NO: 10028 - protein, 10 aa, Severe acute respiratory syndrome coronavirus 2
  REGION 1..10: note = Table B: HLA-DQA1*03:02-B1*03:03L
KLNDLCFTNV

SEQ ID NO: 10029 - protein, 11 aa, Severe acute respiratory syndrome coronavirus 2
  REGION 1..11: note = Table B: HLA-DQA1*03:02-B1*03:03L HLA-DQA1*05:01-B1*03:01L HLA-DRB1*04:03L HLA-DQA1*01-B1*05L HLA-DQA1*05:01-B1*02:01L
TNVYADSFVIR

SEQ ID NO: 10030 - protein, 10 aa, Severe acute respiratory syndrome coronavirus 2
  REGION 1..10: note = Table B: HLA-DQA1*03:02-B1*03:03L HLA-DQA1*01-B1*05L HLA-DQA1*05:01-B1*02:01L HLA-DQA1*03:01-B1*03:02L HLA-DQA1*01:03-B1*06:01L HLA-DQA1*02:01-B1*03:03L
ADSFVIRGDE

SEQ ID NO: 10031 - protein, 11 aa, Severe acute respiratory syndrome coronavirus 2
  REGION 1..11: note = Table B: HLA-DQA1*03:02-B1*03:03L HLA-DQA1*05:05-B1*03:19L
FVIRGDEVRQI

SEQ ID NO: 10032 - protein, 13 aa, Severe acute respiratory syndrome coronavirus 2
  REGION 1..13: note = Table B: HLA-DQA1*03:02-B1*03:03L HLA-DRB1*04:01L HLA-DRB1*13:02L HLA-DRB1*13:03L HLA-DRB1*04:04L HLA-DRB1*04:05L HLA-DRB4*03:01NL HLA-DRB1*08:04L HLA-DRB1*08:77L HLA-DRB3*02:01L HLA-DPA1*01:03-B1*03:01L HLA-DPA1*03:01-B1*04:02L
  REGION 1..13: note = CONT. FROM ABOVE: HLA-DRB1*03:01L HLA-DRB1*11:03L HLA-DRB1*11:04 L HLA-DRB1*14:02L HLA-DQA1*01:01-B1*05:01L HLA-DRB1*08:01L HLA-D RB1*11:01L HLA-DQA1*05:05-B1*03:19L HLA-DQA1*05:01-B1*02:01L HLA -DRB1*04:10L HLA-DRB1*12:01L HLA-DRB3*01:01L
  REGION 1..13: note = CONT. FROM ABOVE: HLA-DPA1*02:01-B1*13:01L HLA-DRB1*14:54L HLA-D RB1*14:17L HLA-DPA1*01:02-B1*04:01L HLA-DRB1*10:01L HLA-DRB1*04: 08L HLA-DRB1*08:03L HLA-DRB1*15:03L
VIRGDEVRQIAPG

SEQ ID NO: 10033 - protein, 11 aa, Severe acute respiratory syndrome coronavirus 2
  REGION 1..11: note = Table B: HLA-DQA1*03:02-B1*03:03L HLA-DRB1*04:03L HLA-DRB1*04:02L HLA-DQA1*05:01-B1*02:01L HLA-DQA1*03:01-B1*03:02L HLA-DRB1*14:17L HLA-DQA1*02:01-B1*03:03L
DEVRQIAPGQT

SEQ ID NO: 10034 - protein, 11 aa, Severe acute respiratory syndrome coronavirus 2
  REGION 1..11: note = Table B: HLA-DQA1*03:02-B1*03:03L HLA-DRB1*04:02L HLA-DRB1*14:17L HLA-DQA1*02:01-B1*03:03L
EVRQIAPGQTG

SEQ ID NO: 10035 - protein, 10 aa, Severe acute respiratory syndrome coronavirus 2
  REGION 1..10: note = Table B: HLA-DQA1*03:02-B1*03:03L HLA-DQA1*05:01-B1*03:01L HLA-DRB1*04:03L HLA-DRB1*13:03L HLA-DQA1*01:02-B1*06:02L HLA-DRB1*01:02L HLA-DPA1*03:01-B1*04:02L HLA-DRB1*14:01L HLA-DRB1*14:02L HLA-DQA1*01-B1*05L HLA-DQA1*05:05-B1*03:19L
  REGION 1..10: note = CONT. FROM ABOVE: HLA-DQA1*05:01-B1*02:01L HLA-DPA1*01:03-B1*04: 01L HLA-DQA1*05:05-B1*03:116L HLA-DRB1*09:01L HLA-DPA1*01:03-B1* 04:02L HLA-DRB1*12:01L HLA-DPA1*02:01-B1*13:01L HLA-DPA1*03:01-B 1*105:01L HLA-DQA1*03:01-B1*03:02L HLA-DPA1*01:03-B1*104:01L
  REGION 1..10: note = CONT. FROM ABOVE: HLA-DPA1*01:02-B1*04:01L HLA-DRB1*10:01L HLA-D RB1*16:01L HLA-DQA1*01:03-B1*06:01L HLA-DRB1*08:03L HLA-DQA1*02: 01-B1*03:03L HLA-DRB1*15:03L
QIAPGQTGKI

SEQ ID NO: 10036 - protein, 10 aa, Severe acute respiratory syndrome coronavirus 2
  REGION 1..10: note = Table B: HLA-DQA1*03:02-B1*03:03L HLA-DQA1*05:01-B1*03:01L HLA-DRB1*04:03L HLA-DRB1*13:03L HLA-DRB1*04:02L HLA-DQA1*05:05-B1*03:19L HLA-DQA1*03:01-B1*03:02L HLA-DQA1*05:05-B1*03:01L HLA-DQA1*01:03-B1*06:01L
  REGION 1..10: note = CONT. FROM ABOVE: HLA-DQA1*02:01-B1*03:03L
IAPGQTGKIA

SEQ ID NO: 10037 - protein, 12 aa, Severe acute respiratory syndrome coronavirus 2
  REGION 1..12: note = Table B: HLA-DQA1*03:02-B1*03:03L HLA-DRB1*04:03L HLA-DRB1*04:02L HLA-DRB1*01:02L HLA-DPA1*01:03-B1*03:01L HLA-DQA1*01:01-B1*05:01L HLA-DRB1*08:01L HLA-DRB1*12:01L HLA-DRB1*16:01L HLA-DRB1*04:08L
APGQTGKIADYN

SEQ ID NO: 10038 - protein, 10 aa, Severe acute respiratory syndrome coronavirus 2
  REGION 1..10: note = Table B: HLA-DQA1*03:02-B1*03:03L HLA-DRB1*04:03L HLA-DRB1*04:02L HLA-DQA1*01-B1*05L HLA-DQA1*05:01-B1*02:01L HLA-DQA1*03:01-B1*03:02L HLA-DPA1*01:02-B1*04:01L HLA-DRB1*16:01L HLA-DQA1*02:01-B1*03:03L
ADYNYKLPDD

SEQ ID NO: 10039 - protein, 10 aa, Severe acute respiratory syndrome coronavirus 2
  REGION 1..10: note = Table B: HLA-DQA1*03:02-B1*03:03L HLA-DRB1*04:03L HLA-DRB1*04:05L HLA-DQA1*01:02-B1*06:02L HLA-DQA1*01-B1*05L HLA-DQA1*05:05-B1*03:19L HLA-DQA1*05:01-B1*02:01L HLA-DPA1*02:01-B1*13:01L HLA-DPA1*03:01-B1*105:01L
  REGION 1..10: note = CONT. FROM ABOVE: HLA-DQA1*01:03-B1*06:01L HLA-DQA1*02:01-B1*03: 03L HLA-DRB1*15:03L
DYNYKLPDDF

SEQ ID NO: 10040 - protein, 11 aa, Severe acute respiratory syndrome coronavirus 2
  REGION 1..11: note = Table B: HLA-DQA1*03:02-B1*03:03L HLA-DRB1*04:02L HLA-DQA1*05:01-B1*02:01L HLA-DQA1*02:01-B1*03:03L
YNYKLPDDFTG

SEQ ID NO: 10041 - protein, 15 aa, Severe acute respiratory syndrome coronavirus 2
  REGION 1..15: note = Table B: HLA-DQA1*03:02-B1*03:03L HLA-DRB1*04:03L HLA-DRB1*01:03L HLA-DRB1*04:05L HLA-DRB1*01:02L HLA-DPA1*01:03-B1*03:01L HLA-DRB1*08:01L HLA-DQA1*05:01-B1*02:01L HLA-DPA1*01:03-B1*04:02L
  REGION 1..15: note = CONT. FROM ABOVE: HLA-DRB1*12:01L HLA-DPA1*02:01-B1*13:01L HLA-D QA1*03:01-B1*03:02L HLA-DPA1*01:03-B1*104:01L HLA-DRB1*16:01L HL A-DRB1*04:08L HLA-DRB1*15:03L
LPDDFTGCVIAWNSN

SEQ ID NO: 10042 - protein, 13 aa, Severe acute respiratory syndrome coronavirus 2
  REGION 1..13: note = Table B: HLA-DQA1*03:02-B1*03:03L
DFTGCVIAWNSNN

SEQ ID NO: 10043 - protein, 10 aa, Severe acute respiratory syndrome coronavirus 2
  REGION 1..10: note = Table B: HLA-DQA1*03:02-B1*03:03L HLA-DRB1*04:03L HLA-DRB1*04:02L HLA-DRB1*04:05L HLA-DQA1*01:02-B1*06:02L HLA-DRB1*01:02L HLA-DRB4*03:01NL HLA-DPA1*03:01-B1*04:02L HLA-DQA1*01-B1*05L HLA-DQA1*05:01-B1*02:01L HLA-DRB1*04:10L
  REGION 1..10: note = CONT. FROM ABOVE: HLA-DRB1*12:01L HLA-DPA1*03:01-B1*105:01L HLA- DQA1*03:01-B1*03:02L HLA-DRB1*14:17L HLA-DRB1*16:01L HLA-DQA1*01 :03-B1*06:01L HLA-DQA1*02:01-B1*03:03L HLA-DRB1*15:03L
VIAWNSNNLD

SEQ ID NO: 10044 - protein, 11 aa, Severe acute respiratory syndrome coronavirus 2
  REGION 1..11: note = Table B: HLA-DQA1*03:02-B1*03:03L HLA-DQA1*05:01-B1*03:01L HLA-DRB1*04:01L HLA-DRB1*13:02L HLA-DRB1*13:03L HLA-DRB1*01:03L HLA-DRB1*04:04L HLA-DQA1*01:02-B1*06:02L HLA-DRB1*01:02L HLA-DRB4*03:01NL HLA-DRB1*08:04L HLA-DRB1*08:77L HLA-DRB1*14:01L
  REGION 1..11: note = CONT. FROM ABOVE: HLA-DRB1*11:03L HLA-DRB1*11:04L HLA-DRB1*08:01 L HLA-DQA1*05:01-B1*02:01L HLA-DRB1*12:01L HLA-DRB1*12:02L HLA-D PA1*03:01-B1*105:01L HLA-DRB1*14:54L HLA-DQA1*05:05-B1*03:01L HL A-DRB1*10:01L HLA-DRB1*16:01L HLA-DQA1*01:03-B1*06:01L
  REGION 1..11: note = CONT. FROM ABOVE: HLA-DRB1*04:08L HLA-DRB1*08:03L HLA-DQA1*02:01 -B1*03:03L HLA-DRB1*15:03L
IAWNSNNLDSK

SEQ ID NO: 10045 - protein, 12 aa, Severe acute respiratory syndrome coronavirus 2
  REGION 1..12: note = Table B: HLA-DQA1*03:02-B1*03:03L HLA-DQA1*05:01-B1*03:01L HLA-DQA1*05:01-B1*02:01L HLA-DQA1*01:03-B1*06:01L
NSNNLDSKVGGN

SEQ ID NO: 10046 - protein, 10 aa, Severe acute respiratory syndrome coronavirus 2
  REGION 1..10: note = Table B: HLA-DQA1*03:02-B1*03:03L HLA-DQA1*05:01-B1*03:01L HLA-DRB1*04:01L HLA-DRB1*04:03L HLA-DRB1*13:02L HLA-DRB1*13:03M HLA-DRB1*01:03M HLA-DRB1*04:02L HLA-DRB1*04:05L HLA-DQA1*01:02-B1*06:02M HLA-DRB1*01:01L HLA-DRB4*03:01NL
  REGION 1..10: note = CONT. FROM ABOVE: HLA-DRB1*08:77M HLA-DPA1*01:03-B1*03:01M HLA-D PA1*03:01-B1*04:02L HLA-DRB1*03:01M HLA-DRB1*14:01L HLA-DRB1*11: 02M HLA-DRB1*11:03M HLA-DRB1*11:04L HLA-DRB1*14:02M HLA-DRB1*11: 01L HLA-DRB5*01:01L HLA-DQA1*01-B1*05M HLA-DQA1*05:05-B1*03:19H
  REGION 1..10: note = CONT. FROM ABOVE: HLA-DQA1*05:01-B1*02:01H HLA-DRB4*01:01M HLA-D PA1*01:03-B1*04:01M HLA-DQA1*05:05-B1*03:116L HLA-DPA1*01:03-B1* 04:02M HLA-DRB1*12:01M HLA-DPA1*02:01-B1*13:01L HLA-DPA1*03:01-B 1*105:01L HLA-DQA1*03:01-B1*03:02L HLA-DRB1*14:54L
  REGION 1..10: note = CONT. FROM ABOVE: HLA-DPA1*01:03-B1*104:01M HLA-DQA1*05:05-B1*03 :01L HLA-DRB1*14:17L HLA-DPA1*01:02-B1*04:01L HLA-DRB1*10:01M HL A-DRB1*16:01M HLA-DQA1*01:03-B1*06:01L HLA-DRB1*08:02L HLA-DQA1* 02:01-B1*03:03L HLA-DRB1*15:03L
NLDSKVGGNY

SEQ ID NO: 10047 - protein, 10 aa, Severe acute respiratory syndrome coronavirus 2
  REGION 1..10: note = Table B: HLA-DQA1*03:02-B1*03:03L HLA-DQA1*05:01-B1*03:01L HLA-DRB1*04:03L HLA-DRB1*13:03L HLA-DRB1*04:02L HLA-DQA1*01-B1*05L HLA-DQA1*05:05-B1*03:19L HLA-DQA1*05:01-B1*02:01L HLA-DQA1*03:01-B1*03:02L
  REGION 1..10: note = CONT. FROM ABOVE: HLA-DRB1*14:17L HLA-DPA1*01:02-B1*04:01L HLA-D RB1*16:01L HLA-DQA1*01:03-B1*06:01L HLA-DQA1*02:01-B1*03:03L
LDSKVGGNYN

SEQ ID NO: 10048 - protein, 10 aa, Severe acute respiratory syndrome coronavirus 2
  REGION 1..10: note = Table B: HLA-DQA1*03:02-B1*03:03L HLA-DQA1*05:01-B1*03:01L HLA-DRB1*04:03L HLA-DRB1*13:02L HLA-DRB1*13:03M HLA-DRB1*01:03L HLA-DQA1*01:02-B1*06:02M HLA-DRB4*03:01NL HLA-DRB1*08:77L HLA-DPA1*01:03-B1*03:01L HLA-DPA1*03:01-B1*04:02L
  REGION 1..10: note = CONT. FROM ABOVE: HLA-DRB1*03:01L HLA-DRB1*14:01L HLA-DRB1*14:02 L HLA-DRB1*11:01L HLA-DRB5*01:01L HLA-DQA1*01-B1*05L HLA-DQA1*05 :05-B1*03:19M HLA-DQA1*05:01-B1*02:01M HLA-DRB4*01:01L HLA-DPA1* 01:03-B1*04:01M HLA-DQA1*05:05-B1*03:116L
  REGION 1..10: note = CONT. FROM ABOVE: HLA-DPA1*01:03-B1*04:02L HLA-DRB1*12:01L HLA-D PA1*02:01-B1*13:01L HLA-DPA1*03:01-B1*105:01M HLA-DPA1*01:03-B1* 104:01L HLA-DQA1*05:05-B1*03:01L HLA-DPA1*01:02-B1*04:01L HLA-DR B1*10:01L HLA-DRB1*16:01L HLA-DQA1*01:03-B1*06:01L
  REGION 1..10: note = CONT. FROM ABOVE: HLA-DRB1*08:02L HLA-DQA1*02:01-B1*03:03L HLA-D RB1*15:03L
DSKVGGNYNY

SEQ ID NO: 10049 - protein, 10 aa, Severe acute respiratory syndrome coronavirus 2
  REGION 1..10: note = Table B: HLA-DQA1*03:02-B1*03:03L HLA-DQA1*05:05-B1*03:19L HLA-DQA1*01:03-B1*06:01L
PFERDISTEI

SEQ ID NO: 10050 - protein, 10 aa, Severe acute respiratory syndrome coronavirus 2
  REGION 1..10: note = Table B: HLA-DQA1*03:02-B1*03:03L
RDISTEIYQA

SEQ ID NO: 10051 - protein, 13 aa, Severe acute respiratory syndrome coronavirus 2
  REGION 1..13: note = Table B: HLA-DQA1*03:02-B1*03:03L HLA-DQA1*05:01-B1*03:01L HLA-DRB1*04:03L HLA-DQA1*01:02-B1*06:02L HLA-DQA1*01-B1*05L HLA-DQA1*05:05-B1*03:19L HLA-DQA1*05:01-B1*02:01L HLA-DPA1*03:01-B1*105:01L HLA-DQA1*05:05-B1*03:01L
  REGION 1..13: note = CONT. FROM ABOVE: HLA-DQA1*02:01-B1*03:03L
DISTEIYQAGSTP

SEQ ID NO: 10052 - protein, 11 aa, Severe acute respiratory syndrome coronavirus 2
  REGION 1..11: note = Table B: HLA-DQA1*03:02-B1*03:03L HLA-DQA1*05:01-B1*03:01L HLA-DRB1*04:03L HLA-DRB1*04:02L HLA-DQA1*05:05-B1*03:19L HLA-DQA1*03:01-B1*03:02L HLA-DQA1*05:05-B1*03:01L HLA-DQA1*02:01-B1*03:03L
EIYQAGSTPCN

SEQ ID NO: 10053 - protein, 12 aa, Severe acute respiratory syndrome coronavirus 2
  REGION 1..12: note = Table B: HLA-DQA1*03:02-B1*03:03L HLA-DQA1*05:01-B1*03:01L HLA-DQA1*01:02-B1*06:02L HLA-DQA1*05:05-B1*03:19L HLA-DQA1*05:05-B1*03:01L HLA-DQA1*01:03-B1*06:01L HLA-DQA1*02:01-B1*03:03L
YQAGSTPCNGVE

SEQ ID NO: 10054 - protein, 14 aa, Severe acute respiratory syndrome coronavirus 2
  REGION 1..14: note = Table B: HLA-DQA1*03:02-B1*03:03L HLA-DPA1*03:01-B1*105:01L HLA-DQA1*02:01-B1*03:03L
QAGSTPCNGVEGFN

SEQ ID NO: 10055 - protein, 13 aa, Severe acute respiratory syndrome coronavirus 2
  REGION 1..13: note = Table B: HLA-DQA1*03:02-B1*03:03L HLA-DQA1*05:01-B1*03:01L HLA-DRB1*01:03L HLA-DRB1*04:02L HLA-DRB1*04:05L HLA-DQA1*01:02-B1*06:02L HLA-DRB4*03:01NL HLA-DQA1*05:05-B1*03:19L HLA-DQA1*05:01-B1*02:01L
  REGION 1..13: note = CONT. FROM ABOVE: HLA-DPA1*01:03-B1*04:02L HLA-DRB1*12:01L HLA-D PA1*01:03-B1*02:01L HLA-DQA1*05:05-B1*03:01L HLA-DRB1*14:17L HLA -DRB1*16:01L HLA-DQA1*01:03-B1*06:01L HLA-DRB1*04:08L
FPLQSYGFQPTNG

SEQ ID NO: 10056 - protein, 11 aa, Severe acute respiratory syndrome coronavirus 2
  REGION 1..11: note = Table B: HLA-DQA1*03:02-B1*03:03L
SYGFQPTNGVG

SEQ ID NO: 10057 - protein, 10 aa, Severe acute respiratory syndrome coronavirus 2
  REGION 1..10: note = Table B: HLA-DQA1*03:02-B1*03:03L HLA-DQA1*05:01-B1*03:01L HLA-DRB1*04:01L HLA-DRB1*04:03L HLA-DRB1*13:02L HLA-DRB1*13:03L HLA-DRB1*01:03L HLA-DRB1*04:05L HLA-DQA1*01:02-B1*06:02M HLA-DRB1*01:01L HLA-DRB4*03:01NL HLA-DRB1*08:77L
  REGION 1..10: note = CONT. FROM ABOVE: HLA-DPA1*01:03-B1*03:01L HLA-DPA1*03:01-B1*04: 02L HLA-DRB1*03:01L HLA-DRB1*14:01L HLA-DRB1*11:02L HLA-DRB1*14: 02L HLA-DRB1*11:01L HLA-DQA1*01-B1*05L HLA-DQA1*05:05-B1*03:19L HLA-DQA1*05:01-B1*02:01L HLA-DRB4*01:01L
  REGION 1..10: note = CONT. FROM ABOVE: HLA-DPA1*01:03-B1*04:01L HLA-DQA1*05:05-B1*03: 116L HLA-DPA1*01:03-B1*04:02L HLA-DRB1*12:01L HLA-DPA1*02:01-B1* 13:01L HLA-DPA1*03:01-B1*105:01L HLA-DQA1*03:01-B1*03:02L HLA-DP A1*01:03-B1*104:01L HLA-DQA1*05:05-B1*03:01L
  REGION 1..10: note = CONT. FROM ABOVE: HLA-DPA1*01:02-B1*04:01L HLA-DRB1*10:01L HLA-D RB1*16:01L HLA-DQA1*01:03-B1*06:01L HLA-DRB1*08:02L HLA-DQA1*02: 01-B1*03:03L HLA-DRB1*15:03L
GFQPTNGVGY

SEQ ID NO: 10058 - protein, 12 aa, Severe acute respiratory syndrome coronavirus 2
  REGION 1..12: note = Table B: HLA-DQA1*03:02-B1*03:03L HLA-DQA1*05:01-B1*03:01L HLA-DRB1*04:03L HLA-DPA1*01:03-B1*03:01L HLA-DRB1*12:01L HLA-DPA1*03:01-B1*105:01L HLA-DQA1*03:01-B1*03:02L HLA-DQA1*05:05-B1*03:01L HLA-DRB1*16:01L
  REGION 1..12: note = CONT. FROM ABOVE: HLA-DQA1*01:03-B1*06:01L HLA-DQA1*02:01-B1*03: 03L HLA-DRB1*15:03L
FQPTNGVGYQPY

SEQ ID NO: 10059 - protein, 11 aa, Severe acute respiratory syndrome coronavirus 2
  REGION 1..11: note = Table B: HLA-DQA1*03:02-B1*03:03L HLA-DQA1*05:01-B1*03:01L HLA-DRB1*04:03L HLA-DRB1*01:03L HLA-DRB1*12:01L HLA-DPA1*03:01-B1*105:01L HLA-DQA1*05:05-B1*03:01L HLA-DPA1*01:02-B1*04:01L HLA-DQA1*01:03-B1*06:01L
  REGION 1..11: note = CONT. FROM ABOVE: HLA-DQA1*02:01-B1*03:03L
PTNGVGYQPYR

SEQ ID NO: 10060 - protein, 10 aa, Severe acute respiratory syndrome coronavirus 2
  REGION 1..10: note = Table B: HLA-DQA1*03:02-B1*03:03L HLA-DQA1*01-B1*05L HLA-DPA1*02:01-B1*13:01L HLA-DQA1*03:01-B1*03:02L HLA-DPA1*01:02-B1*04:01L HLA-DRB1*16:01L HLA-DQA1*01:03-B1*06:01L HLA-DQA1*02:01-B1*03:03L
  REGION 1..10: note = CONT. FROM ABOVE: HLA-DRB1*15:03L
VGYQPYRVVV

SEQ ID NO: 10061 - protein, 10 aa, Severe acute respiratory syndrome coronavirus 2
  REGION 1..10: note = Table B: HLA-DQA1*03:02-B1*03:03L HLA-DQA1*05:01-B1*03:01L HLA-DRB1*04:03L HLA-DRB1*04:05L HLA-DQA1*01:02-B1*06:02L HLA-DPA1*03:01-B1*04:02L HLA-DQA1*01-B1*05L HLA-DQA1*05:05-B1*03:19L HLA-DQA1*05:01-B1*02:01L
  REGION 1..10: note = CONT. FROM ABOVE: HLA-DPA1*02:01-B1*13:01L HLA-DPA1*03:01-B1*105 :01L HLA-DQA1*03:01-B1*03:02L HLA-DPA1*01:02-B1*04:01L HLA-DRB1* 16:01L HLA-DQA1*01:03-B1*06:01L HLA-DQA1*02:01-B1*03:03L HLA-DRB 1*15:03L
GYQPYRVVVL

SEQ ID NO: 10062 - protein, 10 aa, Severe acute respiratory syndrome coronavirus 2
  REGION 1..10: note = Table B: HLA-DQA1*03:02-B1*03:03L HLA-DQA1*05:01-B1*03:01L HLA-DRB1*04:03L HLA-DRB1*04:02L HLA-DRB1*04:05L HLA-DRB4*03:01NL HLA-DQA1*01-B1*05L HLA-DQA1*05:01-B1*02:01L HLA-DRB1*12:01L HLA-DPA1*03:01-B1*105:01L HLA-DQA1*03:01-B1*03:02L
  REGION 1..10: note = CONT. FROM ABOVE: HLA-DRB1*14:17L HLA-DPA1*01:02-B1*04:01L HLA-D RB1*16:01L HLA-DQA1*02:01-B1*03:03L HLA-DRB1*15:03L
SFELLHAPAT

SEQ ID NO: 10063 - protein, 10 aa, Severe acute respiratory syndrome coronavirus 2
  REGION 1..10: note = Table B: HLA-DQA1*03:02-B1*03:03M HLA-DQA1*05:01-B1*03:01L HLA-DRB1*13:02L HLA-DQA1*01:02-B1*06:02L HLA-DRB1*01:02L HLA-DRB1*08:77L HLA-DPA1*03:01-B1*04:02L HLA-DRB1*11:02M HLA-DRB1*14:02L HLA-DRB1*11:01L HLA-DQA1*05:05-B1*03:19H
  REGION 1..10: note = CONT. FROM ABOVE: HLA-DQA1*05:01-B1*02:01L HLA-DRB4*01:01L HLA-D PA1*01:03-B1*04:01L HLA-DQA1*05:05-B1*03:116L HLA-DRB1*09:01L HL A-DPA1*01:03-B1*04:02L HLA-DRB1*12:01L HLA-DPA1*02:01-B1*13:01L HLA-DPA1*03:01-B1*105:01L HLA-DQA1*03:01-B1*03:02L
  REGION 1..10: note = CONT. FROM ABOVE: HLA-DPA1*01:03-B1*104:01M HLA-DPA1*01:02-B1*04 :01L HLA-DRB1*07:01L HLA-DRB1*10:01L HLA-DRB1*16:01L HLA-DQA1*01 :03-B1*06:01L HLA-DRB1*08:03L HLA-DQA1*02:01-B1*03:03L HLA-DRB1* 15:03L
FELLHAPATV

SEQ ID NO: 10064 - protein, 10 aa, Severe acute respiratory syndrome coronavirus 2
  REGION 1..10: note = Table B: HLA-DQA1*03:02-B1*03:03L HLA-DQA1*05:05-B1*03:19L
NFNGLTGTGV

SEQ ID NO: 10065 - protein, 12 aa, Severe acute respiratory syndrome coronavirus 2
  REGION 1..12: note = Table B: HLA-DQA1*03:02-B1*03:03L HLA-DQA1*05:01-B1*03:01L HLA-DQA1*05:05-B1*03:19L HLA-DPA1*03:01-B1*105:01L HLA-DQA1*03:01-B1*03:02L
GLTGTGVLTESN

SEQ ID NO: 10066 - protein, 11 aa, Severe acute respiratory syndrome coronavirus 2
  REGION 1..11: note = Table B: HLA-DQA1*03:02-B1*03:03L HLA-DRB1*04:03L HLA-DRB1*01:03L HLA-DRB1*04:02L HLA-DQA1*01:01-B1*05:01L HLA-DQA1*05:05-B1*03:19L HLA-DRB1*12:01L HLA-DPA1*03:01-B1*105:01L
TGTGVLTESNK

SEQ ID NO: 10067 - protein, 10 aa, Severe acute respiratory syndrome coronavirus 2
  REGION 1..10: note = Table B: HLA-DQA1*03:02-B1*03:03L HLA-DQA1*05:01-B1*03:01L HLA-DRB1*04:03L HLA-DRB1*13:02L HLA-DRB1*13:03L HLA-DRB1*01:03L HLA-DQA1*01:02-B1*06:02M HLA-DRB1*08:77L HLA-DPA1*01:03-B1*03:01L HLA-DPA1*03:01-B1*04:02L
  REGION 1..10: note = CONT. FROM ABOVE: HLA-DRB1*03:01L HLA-DRB1*14:01L HLA-DRB1*14:02 L HLA-DQA1*01-B1*05L HLA-DQA1*05:05-B1*03:19L HLA-DQA1*05:01-B1* 02:01L HLA-DRB4*01:01L HLA-DPA1*01:03-B1*04:01L HLA-DQA1*05:05-B 1*03:116L HLA-DPA1*01:03-B1*04:02L HLA-DRB1*12:01L
  REGION 1..10: note = CONT. FROM ABOVE: HLA-DPA1*02:01-B1*13:01L HLA-DPA1*03:01-B1*105 :01L HLA-DQA1*03:01-B1*03:02L HLA-DPA1*01:02-B1*04:01L HLA-DRB1* 10:01L HLA-DRB1*16:01L HLA-DQA1*01:03-B1*06:01L HLA-DRB1*08:02L HLA-DQA1*02:01-B1*03:03M HLA-DRB1*15:03L
GVLTESNKKF

SEQ ID NO: 10068 - protein, 10 aa, Severe acute respiratory syndrome coronavirus 2
  REGION 1..10: note = Table B: HLA-DQA1*03:02-B1*03:03L HLA-DQA1*05:05-B1*03:19L
TESNKKFLPF

SEQ ID NO: 10069 - protein, 15 aa, Severe acute respiratory syndrome coronavirus 2
  REGION 1..15: note = Table B: HLA-DQA1*03:02-B1*03:03L HLA-DQA1*05:05-B1*03:01L
ESNKKFLPFQQFGRD

SEQ ID NO: 10070 - protein, 18 aa, Severe acute respiratory syndrome coronavirus 2
  REGION 1..18: note = Table B: HLA-DQA1*03:02-B1*03:03L
SNKKFLPFQQFGRDIADT

SEQ ID NO: 10071 - protein, 14 aa, Severe acute respiratory syndrome coronavirus 2
  REGION 1..14: note = Table B: HLA-DQA1*03:02-B1*03:03L HLA-DQA1*05:01-B1*03:01L HLA-DRB1*13:02L HLA-DPA1*03:01-B1*04:02L HLA-DRB1*14:02L HLA-DQA1*05:05-B1*03:19L HLA-DQA1*05:01-B1*02:01L HLA-DPA1*01:03-B1*04:02L HLA-DRB3*01:01L
  REGION 1..14: note = CONT. FROM ABOVE: HLA-DPA1*02:01-B1*13:01L HLA-DPA1*03:01-B1*105 :01L HLA-DQA1*05:05-B1*03:01L HLA-DQA1*01:03-B1*06:01L HLA-DRB1* 08:02L
LPFQQFGRDIADTT

SEQ ID NO: 10072 - protein, 13 aa, Severe acute respiratory syndrome coronavirus 2
  REGION 1..13: note = Table B: HLA-DQA1*03:02-B1*03:03L HLA-DQA1*02:01-B1*03:03L
QQFGRDIADTTDA

SEQ ID NO: 10073 - protein, 10 aa, Severe acute respiratory syndrome coronavirus 2
  REGION 1..10: note = Table B: HLA-DQA1*03:02-B1*03:03L HLA-DQA1*05:05-B1*03:19L
RDIADTTDAV

SEQ ID NO: 10074 - protein, 11 aa, Severe acute respiratory syndrome coronavirus 2
  REGION 1..11: note = Table B: HLA-DQA1*03:02-B1*03:03L HLA-DRB1*04:03L HLA-DQA1*01-B1*05L HLA-DQA1*05:01-B1*02:01L HLA-DQA1*03:01-B1*03:02L HLA-DRB1*16:01L HLA-DQA1*01:03-B1*06:01L HLA-DQA1*02:01-B1*03:03L
IADTTDAVRDP

SEQ ID NO: 10075 - protein, 10 aa, Severe acute respiratory syndrome coronavirus 2
  REGION 1..10: note = Table B: HLA-DQA1*03:02-B1*03:03L HLA-DQA1*05:01-B1*03:01L HLA-DRB1*04:03L HLA-DRB1*04:02L HLA-DRB4*03:01NL HLA-DQA1*01:01-B1*05:01L HLA-DQA1*01-B1*05L HLA-DQA1*05:01-B1*02:01L HLA-DQA1*03:01-B1*03:02L
  REGION 1..10: note = CONT. FROM ABOVE: HLA-DQA1*05:05-B1*03:01L HLA-DRB1*14:17L HLA-D RB1*16:01L HLA-DQA1*01:03-B1*06:01L HLA-DQA1*02:01-B1*03:03L
DTTDAVRDPQ

SEQ ID NO: 10076 - protein, 10 aa, Severe acute respiratory syndrome coronavirus 2
  REGION 1..10: note = Table B: HLA-DQA1*03:02-B1*03:03L HLA-DQA1*05:01-B1*03:01L HLA-DRB1*04:03L HLA-DRB1*13:03L HLA-DRB1*01:03L HLA-DRB1*04:02L HLA-DRB1*04:05L HLA-DRB4*03:01NL HLA-DRB1*14:02L HLA-DQA1*01-B1*05L HLA-DQA1*05:01-B1*02:01L HLA-DRB1*12:01L
  REGION 1..10: note = CONT. FROM ABOVE: HLA-DQA1*03:01-B1*03:02L HLA-DRB1*14:54L HLA-D RB1*14:17L HLA-DRB1*16:01L HLA-DQA1*01:03-B1*06:01L HLA-DQA1*02: 01-B1*03:03L
TTDAVRDPQT

SEQ ID NO: 10077 - protein, 10 aa, Severe acute respiratory syndrome coronavirus 2
  REGION 1..10: note = Table B: HLA-DQA1*03:02-B1*03:03M HLA-DQA1*05:01-B1*03:01L HLA-DRB1*13:02L HLA-DRB1*13:03L HLA-DRB1*04:02L HLA-DRB1*08:77L HLA-DPA1*03:01-B1*04:02L HLA-DRB1*14:01L HLA-DRB1*08:01L HLA-DQA1*01-B1*05L HLA-DQA1*05:05-B1*03:19L
  REGION 1..10: note = CONT. FROM ABOVE: HLA-DQA1*05:01-B1*02:01L HLA-DPA1*01:03-B1*04: 01L HLA-DQA1*05:05-B1*03:116L HLA-DRB1*09:01L HLA-DPA1*01:03-B1* 04:02L HLA-DQA1*03:01-B1*03:02M HLA-DPA1*01:03-B1*104:01L HLA-DP A1*01:02-B1*04:01L HLA-DRB1*10:01L HLA-DRB1*16:01L
  REGION 1..10: note = CONT. FROM ABOVE: HLA-DQA1*02:01-B1*03:03L
TDAVRDPQTL

SEQ ID NO: 10078 - protein, 10 aa, Severe acute respiratory syndrome coronavirus 2
  REGION 1..10: note = Table B: HLA-DQA1*03:02-B1*03:03L HLA-DQA1*05:01-B1*03:01L HLA-DQA1*01:02-B1*06:02L HLA-DRB1*01:02L HLA-DPA1*03:01-B1*04:02L HLA-DRB1*14:01L HLA-DQA1*05:05-B1*03:19L HLA-DQA1*05:01-B1*02:01L
  REGION 1..10: note = CONT. FROM ABOVE: HLA-DQA1*05:05-B1*03:116L HLA-DPA1*02:01-B1*13 :01L HLA-DPA1*03:01-B1*105:01L HLA-DQA1*03:01-B1*03:02L HLA-DPA1 *01:03-B1*104:01L HLA-DPA1*01:02-B1*04:01L HLA-DRB1*16:01L HLA-D QA1*01:03-B1*06:01L HLA-DQA1*02:01-B1*03:03L HLA-DRB1*15:03L
AVRDPQTLEI

SEQ ID NO: 10079 - protein, 10 aa, Severe acute respiratory syndrome coronavirus 2
  REGION 1..10: note = Table B: HLA-DQA1*03:02-B1*03:03L HLA-DQA1*03:01-B1*03:02L
VRDPQTLEIL

SEQ ID NO: 10080 - protein, 12 aa, Severe acute respiratory syndrome coronavirus 2
  REGION 1..12: note = Table B: HLA-DQA1*03:02-B1*03:03L HLA-DQA1*01-B1*05L HLA-DQA1*05:01-B1*02:01L HLA-DQA1*03:01-B1*03:02L HLA-DQA1*01:03-B1*06:01L
DPQTLEILDITP

SEQ ID NO: 10081 - protein, 10 aa, Severe acute respiratory syndrome coronavirus 2
  REGION 1..10: note = Table B: HLA-DQA1*03:02-B1*03:03L HLA-DQA1*05:01-B1*03:01L HLA-DRB1*13:03L HLA-DQA1*01:02-B1*06:02M HLA-DRB1*01:02L HLA-DPA1*03:01-B1*04:02L HLA-DRB1*14:02L HLA-DQA1*05:05-B1*03:19L HLA-DQA1*05:01-B1*02:01L
  REGION 1..10: note = CONT. FROM ABOVE: HLA-DRB4*01:01L HLA-DPA1*01:03-B1*04:01L HLA-D QA1*05:05-B1*03:116L HLA-DPA1*02:01-B1*13:01L HLA-DPA1*03:01-B1* 105:01M HLA-DQA1*01:03-B1*06:01L HLA-DQA1*02:01-B1*03:03L HLA-DR B1*15:03L
EILDITPCSF

SEQ ID NO: 10082 - protein, 15 aa, Severe acute respiratory syndrome coronavirus 2
  REGION 1..15: note = Table B: HLA-DQA1*03:02-B1*03:03L HLA-DQA1*05:01-B1*03:01L HLA-DQA1*01:02-B1*06:02L HLA-DQA1*01:03-B1*06:01L
ITPCSFGGVSVITPG

SEQ ID NO: 10083 - protein, 10 aa, Severe acute respiratory syndrome coronavirus 2
  REGION 1..10: note = Table B: HLA-DQA1*03:02-B1*03:03L HLA-DQA1*03:01-B1*03:02L HLA-DQA1*01:03-B1*06:01L HLA-DQA1*02:01-B1*03:03L
GVSVITPGTN

SEQ ID NO: 10084 - protein, 13 aa, Severe acute respiratory syndrome coronavirus 2
  REGION 1..13: note = Table B: HLA-DQA1*03:02-B1*03:03L HLA-DRB1*04:05L HLA-DRB4*03:01NL HLA-DRB1*04:10L HLA-DRB1*14:54L HLA-DQA1*05:05-B1*03:01L HLA-DQA1*02:01-B1*03:03L
VSVITPGTNTSNQ

SEQ ID NO: 10085 - protein, 12 aa, Severe acute respiratory syndrome coronavirus 2
  REGION 1..12: note = Table B: HLA-DQA1*03:02-B1*03:03L HLA-DRB4*03:01NL HLA-DQA1*02:01-B1*03:03L
VITPGTNTSNQV

SEQ ID NO: 10086 - protein, 12 aa, Severe acute respiratory syndrome coronavirus 2
  REGION 1..12: note = Table B: HLA-DQA1*03:02-B1*03:03L HLA-DRB1*04:03L HLA-DQA1*05:01-B1*02:01L HLA-DQA1*03:01-B1*03:02L HLA-DQA1*02:01-B1*03:03L
ITPGTNTSNQVA

SEQ ID NO: 10087 - protein, 13 aa, Severe acute respiratory syndrome coronavirus 2
  REGION 1..13: note = Table B: HLA-DQA1*03:02-B1*03:03L HLA-DQA1*05:01-B1*03:01L HLA-DQA1*01:02-B1*06:02L HLA-DQA1*05:05-B1*03:19L HLA-DQA1*05:01-B1*02:01L HLA-DQA1*03:01-B1*03:02L HLA-DQA1*05:05-B1*03:01L HLA-DQA1*01:03-B1*06:01L
  REGION 1..13: note = CONT. FROM ABOVE: HLA-DQA1*02:01-B1*03:03L
TPGTNTSNQVAVL

SEQ ID NO: 10088 - protein, 10 aa, Severe acute respiratory syndrome coronavirus 2
  REGION 1..10: note = Table B: HLA-DQA1*03:02-B1*03:03L HLA-DQA1*01:02-B1*06:02L HLA-DQA1*01-B1*05L HLA-DQA1*05:01-B1*02:01L HLA-DPA1*03:01-B1*105:01L HLA-DQA1*03:01-B1*03:02L HLA-DPA1*01:02-B1*04:01L HLA-DQA1*01:03-B1*06:01L
  REGION 1..10: note = CONT. FROM ABOVE: HLA-DQA1*02:01-B1*03:03L
QVAVLYQDVN

SEQ ID NO: 10089 - protein, 15 aa, Severe acute respiratory syndrome coronavirus 2
  REGION 1..15: note = Table B: HLA-DQA1*03:02-B1*03:03L HLA-DRB1*04:01L HLA-DRB1*13:03L HLA-DRB1*04:04L HLA-DRB1*08:77L HLA-DRB1*03:01L HLA-DRB1*11:03L HLA-DQA1*05:05-B1*03:19L HLA-DRB1*04:10L HLA-DRB3*01:01L HLA-DQA1*05:05-B1*03:01L HLA-DRB1*10:01L
VAVLYQDVNCTEVPV

SEQ ID NO: 10090 - protein, 12 aa, Severe acute respiratory syndrome coronavirus 2
  REGION 1..12: note = Table B: HLA-DQA1*03:02-B1*03:03L HLA-DRB1*04:03L HLA-DQA1*05:05-B1*03:19L HLA-DQA1*05:01-B1*02:01L
DVNCTEVPVAIH

SEQ ID NO: 10091 - protein, 10 aa, Severe acute respiratory syndrome coronavirus 2
  REGION 1..10: note = Table B: HLA-DQA1*03:02-B1*03:03L HLA-DQA1*05:05-B1*03:19L HLA-DQA1*03:01-B1*03:02L
TEVPVAIHAD

SEQ ID NO: 10092 - protein, 10 aa, Severe acute respiratory syndrome coronavirus 2
  REGION 1..10: note = Table B: HLA-DQA1*03:02-B1*03:03L HLA-DQA1*03:01-B1*03:02L HLA-DQA1*01:03-B1*06:01L HLA-DQA1*02:01-B1*03:03L
EVPVAIHADQ

SEQ ID NO: 10093 - protein, 10 aa, Severe acute respiratory syndrome coronavirus 2
  REGION 1..10: note = Table B: HLA-DQA1*03:02-B1*03:03L HLA-DQA1*05:01-B1*03:01L HLA-DRB1*13:03L HLA-DPA1*03:01-B1*04:02L HLA-DRB1*14:01L HLA-DQA1*01-B1*05L HLA-DQA1*05:01-B1*02:01L HLA-DQA1*03:01-B1*03:02L HLA-DPA1*01:02-B1*04:01L
VPVAIHADQL

SEQ ID NO: 10094 - protein, 10 aa, Severe acute respiratory syndrome coronavirus 2
  REGION 1..10: note = Table B: HLA-DQA1*03:02-B1*03:03L HLA-DQA1*05:01-B1*03:01L HLA-DRB1*04:03L HLA-DRB1*13:03L HLA-DRB1*01:03L HLA-DRB1*04:05L HLA-DQA1*01:02-B1*06:02M HLA-DRB1*08:77L HLA-DPA1*01:03-B1*03:01L HLA-DPA1*03:01-B1*04:02L
  REGION 1..10: note = CONT. FROM ABOVE: HLA-DRB1*03:01L HLA-DRB1*14:01L HLA-DRB1*14:02 L HLA-DQA1*01-B1*05L HLA-DQA1*05:05-B1*03:19L HLA-DQA1*05:01-B1* 02:01L HLA-DRB4*01:01L HLA-DPA1*01:03-B1*04:01L HLA-DQA1*05:05-B 1*03:116L HLA-DPA1*01:03-B1*04:02L HLA-DPA1*02:01-B1*13:01L
  REGION 1..10: note = CONT. FROM ABOVE: HLA-DPA1*03:01-B1*105:01L HLA-DQA1*03:01-B1*03 :02L HLA-DPA1*01:03-B1*104:01L HLA-DPA1*01:02-B1*04:01L HLA-DRB1 *10:01L HLA-DRB1*16:01L HLA-DQA1*01:03-B1*06:01L HLA-DRB1*08:02L HLA-DQA1*02:01-B1*03:03L HLA-DRB1*15:03L
IHADQLTPTW

SEQ ID NO: 10095 - protein, 12 aa, Severe acute respiratory syndrome coronavirus 2
  REGION 1..12: note = Table B: HLA-DQA1*03:02-B1*03:03L HLA-DQA1*05:01-B1*03:01L HLA-DRB1*04:03L HLA-DRB1*13:02L HLA-DRB1*13:03L HLA-DRB1*01:03L HLA-DRB1*04:02L HLA-DRB1*04:04L HLA-DRB1*04:05L HLA-DQA1*01:02-B1*06:02L HLA-DRB1*01:02L HLA-DRB4*03:01NL
  REGION 1..12: note = CONT. FROM ABOVE: HLA-DRB1*08:04L HLA-DRB1*08:77L HLA-DRB3*02:01 L HLA-DPA1*01:03-B1*03:01L HLA-DPA1*03:01-B1*04:02L HLA-DRB1*14: 01L HLA-DRB1*11:03L HLA-DRB1*11:04L HLA-DQA1*01:01-B1*05:01L HLA -DRB1*08:01L HLA-DRB1*11:01L HLA-DQA1*01-B1*05L
  REGION 1..12: note = CONT. FROM ABOVE: HLA-DQA1*05:05-B1*03:19L HLA-DQA1*05:01-B1*02: 01L HLA-DRB1*04:10L HLA-DRB1*09:01L HLA-DPA1*01:03-B1*04:02L HLA -DRB1*12:01L HLA-DRB1*12:02L HLA-DPA1*02:01-B1*13:01L HLA-DPA1*0 3:01-B1*105:01L HLA-DQA1*03:01-B1*03:02L HLA-DRB1*14:54L
  REGION 1..12: note = CONT. FROM ABOVE: HLA-DQA1*05:05-B1*03:01L HLA-DRB1*14:17L HLA-D PA1*01:02-B1*04:01L HLA-DRB1*10:01L HLA-DRB1*16:01L HLA-DQA1*01: 03-B1*06:01L HLA-DRB1*04:08L HLA-DRB1*08:03L HLA-DQA1*02:01-B1*0 3:03L HLA-DRB1*15:03L
TPTWRVYSTGSN

SEQ ID NO: 10096 - protein, 10 aa, Severe acute respiratory syndrome coronavirus 2
  REGION 1..10: note = Table B: HLA-DQA1*03:02-B1*03:03L HLA-DQA1*05:01-B1*03:01L HLA-DRB1*04:01L HLA-DRB1*04:03L HLA-DRB1*13:02L HLA-DRB1*13:03M HLA-DRB1*01:03M HLA-DRB1*04:02L HLA-DRB1*04:05L HLA-DQA1*01:02-B1*06:02M HLA-DRB1*01:01L HLA-DRB1*01:02L
  REGION 1..10: note = CONT. FROM ABOVE: HLA-DRB4*03:01NL HLA-DRB1*08:77M HLA-DRB3*02:0 1L HLA-DPA1*01:03-B1*03:01L HLA-DPA1*03:01-B1*04:02L HLA-DRB1*03 :01L HLA-DRB1*14:01L HLA-DRB1*11:03L HLA-DRB1*11:04L HLA-DRB1*14 :02M HLA-DQA1*01:01-B1*05:01L HLA-DRB1*08:01L HLA-DRB1*11:01L
  REGION 1..10: note = CONT. FROM ABOVE: HLA-DRB5*01:01L HLA-DQA1*01-B1*05L HLA-DQA1*05 :05-B1*03:19L HLA-DQA1*05:01-B1*02:01L HLA-DRB1*13:01L HLA-DRB4* 01:01L HLA-DPA1*01:03-B1*04:01M HLA-DQA1*05:05-B1*03:116L HLA-DR B1*09:01L HLA-DPA1*01:03-B1*04:02M HLA-DRB1*12:01L
  REGION 1..10: note = CONT. FROM ABOVE: HLA-DPA1*02:01-B1*13:01M HLA-DPA1*03:01-B1*105 :01M HLA-DQA1*03:01-B1*03:02L HLA-DPA1*01:03-B1*104:01L HLA-DQA1 *05:05-B1*03:01L HLA-DRB1*14:17L HLA-DPA1*01:02-B1*04:01L HLA-DR B1*07:01L HLA-DRB1*10:01L HLA-DRB1*16:01L
  REGION 1..10: note = CONT. FROM ABOVE: HLA-DQA1*01:03-B1*06:01M HLA-DRB1*04:08L HLA -DRB1*08:02L HLA-DRB1*08:03L HLA-DQA1*02:01-B1*03:03M HLA-DRB1 *15:03L
RVYSTGSNVF

SEQ ID NO: 10097 - protein, 11 aa, Severe acute respiratory syndrome coronavirus 2
  REGION 1..11: note = Table B: HLA-DQA1*03:02-B1*03:03L HLA-DRB1*04:03L HLA-DRB1*08:04L
YSTGSNVFQTR

SEQ ID NO: 10098 - protein, 10 aa, Severe acute respiratory syndrome coronavirus 2
  REGION 1..10: note = Table B: HLA-DQA1*03:02-B1*03:03L HLA-DQA1*05:01-B1*03:01L HLA-DRB1*04:03L HLA-DRB1*04:02L HLA-DQA1*03:01-B1*03:02L HLA-DQA1*01:03-B1*06:01L HLA-DQA1*02:01-B1*03:03L
GSNVFQTRAG

SEQ ID NO: 10099 - protein, 14 aa, Severe acute respiratory syndrome coronavirus 2
  REGION 1..14: note = Table B: HLA-DQA1*03:02-B1*03:03L HLA-DRB1*04:03L HLA-DRB1*01:03L HLA-DRB1*04:04L HLA-DRB1*08:01L HLA-DRB1*11:01L HLA-DRB1*16:01L HLA-DRB1*15:03L
VFQTRAGCLIGAEH

SEQ ID NO: 10100 - protein, 15 aa, Severe acute respiratory syndrome coronavirus 2
  REGION 1..15: note = Table B: HLA-DQA1*03:02-B1*03:03L HLA-DRB1*15:03L
FQTRAGCLIGAEHVN

SEQ ID NO: 10101 - protein, 11 aa, Severe acute respiratory syndrome coronavirus 2
  REGION 1..11: note = Table B: HLA-DQA1*03:02-B1*03:03L HLA-DRB1*04:01L HLA-DRB1*04:02L HLA-DRB1*04:04L HLA-DRB1*04:05L HLA-DRB1*01:02L HLA-DRB1*11:04L HLA-DQA1*01:01-B1*05:01L HLA-DRB1*04:10L HLA-DRB1*14:54L HLA-DQA1*05:05-B1*03:01L HLA-DRB1*14:17L
  REGION 1..11: note = CONT. FROM ABOVE: HLA-DRB1*04:08L
IGAEHVNNSYE

SEQ ID NO: 10102 - protein, 12 aa, Severe acute respiratory syndrome coronavirus 2
  REGION 1..12: note = Table B: HLA-DQA1*03:02-B1*03:03L HLA-DQA1*05:01-B1*03:01L HLA-DRB1*04:03L HLA-DRB1*01:03L HLA-DRB1*04:02L HLA-DRB1*04:05L HLA-DRB1*01:02L HLA-DRB4*03:01NL HLA-DRB1*14:01L HLA-DQA1*01-B1*05L HLA-DQA1*05:05-B1*03:19L
  REGION 1..12: note = CONT. FROM ABOVE: HLA-DQA1*05:01-B1*02:01L HLA-DRB1*04:10L HLA-D RB1*12:01L HLA-DPA1*03:01-B1*105:01L HLA-DQA1*03:01-B1*03:02L HL A-DQA1*05:05-B1*03:01L HLA-DRB1*14:17L HLA-DRB1*16:01L HLA-DRB1* 04:08L HLA-DQA1*02:01-B1*03:03L HLA-DRB1*15:03L
NSYECDIPIGAG

SEQ ID NO: 10103 - protein, 11 aa, Severe acute respiratory syndrome coronavirus 2
  REGION 1..11: note = Table B: HLA-DQA1*03:02-B1*03:03L HLA-DQA1*05:05-B1*03:19L HLA-DPA1*01:03-B1*104:01L
YECDIPIGAGI

SEQ ID NO: 10104 - protein, 12 aa, Severe acute respiratory syndrome coronavirus 2
  REGION 1..12: note = Table B: HLA-DQA1*03:02-B1*03:03L HLA-DQA1*03:01-B1*03:02L HLA-DQA1*05:05-B1*03:01L HLA-DQA1*01:03-B1*06:01L
IPIGAGICASYQ

SEQ ID NO: 10105 - protein, 11 aa, Severe acute respiratory syndrome coronavirus 2
  REGION 1..11: note = Table B: HLA-DQA1*03:02-B1*03:03L HLA-DRB1*04:04L HLA-DRB1*01:02L HLA-DRB1*08:77L HLA-DRB3*02:01L HLA-DRB1*14:01L HLA-DRB1*14:02L HLA-DRB1*11:01L HLA-DQA1*05:01-B1*02:01L
ASYQTQTNSPR

SEQ ID NO: 10106 - protein, 15 aa, Severe acute respiratory syndrome coronavirus 2
  REGION 1..15: note = Table B: HLA-DQA1*03:02-B1*03:03L HLA-DRB1*04:03L HLA-DRB1*13:03L HLA-DRB1*01:01L HLA-DRB1*03:01L HLA-DRB1*14:01L HLA-DQA1*01:01-B1*05:01L HLA-DRB1*11:01L HLA-DQA1*05:05-B1*03:19L HLA-DRB1*04:10L HLA-DRB3*01:01L
  REGION 1..15: note = CONT. FROM ABOVE: HLA-DPA1*03:01-B1*105:01L HLA-DQA1*05:05-B1*03 :01L
SPRRARSVASQSIIA

SEQ ID NO: 10107 - protein, 10 aa, Severe acute respiratory syndrome coronavirus 2
  REGION 1..10: note = Table B: HLA-DQA1*03:02-B1*03:03L HLA-DQA1*05:01-B1*03:01L HLA-DRB1*04:01L HLA-DRB1*04:03L HLA-DRB1*13:02L HLA-DRB1*13:03M HLA-DRB1*01:03L HLA-DQA1*01:02-B1*06:02M HLA-DRB1*01:01L HLA-DRB4*03:01NL HLA-DRB1*08:77L HLA-DPA1*01:03-B1*03:01L
  REGION 1..10: note = CONT. FROM ABOVE: HLA-DPA1*03:01-B1*04:02L HLA-DRB1*03:01L HLA-D RB1*14:01L HLA-DRB1*14:02L HLA-DRB1*11:01L HLA-DRB5*01:01L HLA-D QA1*01-B1*05L HLA-DQA1*05:05-B1*03:19L HLA-DQA1*05:01-B1*02:01L HLA-DRB4*01:01L HLA-DPA1*01:03-B1*04:01M
  REGION 1..10: note = CONT. FROM ABOVE: HLA-DQA1*05:05-B1*03:116L HLA-DPA1*01:03-B1*04 :02L HLA-DRB1*12:01L HLA-DPA1*02:01-B1*13:01L HLA-DPA1*03:01-B1* 105:01M HLA-DPA1*01:03-B1*104:01L HLA-DQA1*05:05-B1*03:01L HLA-D RB1*14:17L HLA-DPA1*01:02-B1*04:01L HLA-DRB1*10:01L
  REGION 1..10: note = CONT. FROM ABOVE: HLA-DRB1*16:01L HLA-DQA1*01:03-B1*06:01L HLA-D RB1*08:02L HLA-DQA1*02:01-B1*03:03L HLA-DRB1*15:03L
SVASQSIIAY

SEQ ID NO: 10108 - protein, 10 aa, Severe acute respiratory syndrome coronavirus 2
  REGION 1..10: note = Table B: HLA-DQA1*03:02-B1*03:03L
ASQSIIAYTM

SEQ ID NO: 10109 - protein, 12 aa, Severe acute respiratory syndrome coronavirus 2
  REGION 1..12: note = Table B: HLA-DQA1*03:02-B1*03:03L HLA-DQA1*05:01-B1*03:01L HLA-DRB1*01:03L HLA-DRB1*04:04L HLA-DQA1*01:02-B1*06:02L HLA-DRB1*01:02L HLA-DPA1*01:03-B1*03:01L HLA-DRB1*14:01L HLA-DQA1*01-B1*05L HLA-DQA1*05:05-B1*03:19L
  REGION 1..12: note = CONT. FROM ABOVE: HLA-DQA1*05:01-B1*02:01L HLA-DRB1*12:01L HLA-D PA1*03:01-B1*105:01L HLA-DRB1*14:54L HLA-DQA1*05:05-B1*03:01L HL A-DRB1*10:01L HLA-DRB1*16:01L HLA-DQA1*01:03-B1*06:01L HLA-DRB1* 04:08L HLA-DRB1*15:03L
IIAYTMSLGAEN

SEQ ID NO: 10110 - protein, 11 aa, Severe acute respiratory syndrome coronavirus 2
  REGION 1..11: note = Table B: HLA-DQA1*03:02-B1*03:03L HLA-DQA1*05:05-B1*03:19L
YTMSLGAENSV

SEQ ID NO: 10111 - protein, 12 aa, Severe acute respiratory syndrome coronavirus 2
  REGION 1..12: note = Table B: HLA-DQA1*03:02-B1*03:03L HLA-DRB1*04:03L HLA-DRB1*12:01L HLA-DPA1*02:01-B1*13:01L HLA-DQA1*03:01-B1*03:02L HLA-DQA1*05:05-B1*03:01L HLA-DQA1*01:03-B1*06:01L
TMSLGAENSVAY

SEQ ID NO: 10112 - protein, 12 aa, Severe acute respiratory syndrome coronavirus 2
  REGION 1..12: note = Table B: HLA-DQA1*03:02-B1*03:03L HLA-DQA1*05:01-B1*03:01L HLA-DQA1*05:05-B1*03:19L HLA-DQA1*03:01-B1*03:02L HLA-DQA1*05:05-B1*03:01L HLA-DQA1*01:03-B1*06:01L HLA-DQA1*02:01-B1*03:03L
LGAENSVAYSNN

SEQ ID NO: 10113 - protein, 12 aa, Severe acute respiratory syndrome coronavirus 2
  REGION 1..12: note = Table B: HLA-DQA1*03:02-B1*03:03L HLA-DRB1*04:02L HLA-DRB1*04:05L HLA-DRB4*03:01NL HLA-DRB1*14:01L HLA-DQA1*01-B1*05L HLA-DQA1*05:01-B1*02:01L HLA-DRB1*04:10L HLA-DRB1*12:01L HLA-DRB1*12:02L HLA-DQA1*03:01-B1*03:02L
  REGION 1..12: note = CONT. FROM ABOVE: HLA-DRB1*14:54L HLA-DRB1*16:01L HLA-DQA1*02:01 -B1*03:03L
ENSVAYSNNSIA

SEQ ID NO: 10114 - protein, 14 aa, Severe acute respiratory syndrome coronavirus 2
  REGION 1..14: note = Table B: HLA-DQA1*03:02-B1*03:03L HLA-DQA1*05:01-B1*03:01L HLA-DRB1*14:04L HLA-DRB1*04:01L HLA-DRB1*13:02L HLA-DRB1*13:03L HLA-DRB1*01:03L HLA-DRB1*04:04L HLA-DQA1*01:02-B1*06:02L HLA-DRB1*01:01L HLA-DRB1*01:02L HLA-DRB1*08:04L HLA-DRB1*08:77L
  REGION 1..14: note = CONT. FROM ABOVE: HLA-DRB3*02:01L HLA-DPA1*01:03-B1*03:01L HLA-D RB1*14:01L HLA-DRB1*11:03L HLA-DRB1*11:04L HLA-DRB1*14:02L HLA-D RB1*11:01L HLA-DRB5*01:01L HLA-DQA1*05:05-B1*03:19L HLA-DRB4*01: 01L HLA-DRB1*09:01L HLA-DRB1*12:02L HLA-DPA1*03:01-B1*105:01L
  REGION 1..14: note = CONT. FROM ABOVE: HLA-DQA1*05:05-B1*03:01L HLA-DRB1*07:01L HLA-D RB1*10:01L HLA-DRB1*08:03L HLA-DRB1*15:01L HLA-DRB1*15:03L
NSVAYSNNSIAIPT

SEQ ID NO: 10115 - protein, 10 aa, Severe acute respiratory syndrome coronavirus 2
  REGION 1..10: note = Table B: HLA-DQA1*03:02-B1*03:03L HLA-DQA1*05:01-B1*02:01L HLA-DQA1*03:01-B1*03:02L HLA-DQA1*01:03-B1*06:01L HLA-DQA1*02:01-B1*03:03L
SNNSIAIPTN

SEQ ID NO: 10116 - protein, 11 aa, Severe acute respiratory syndrome coronavirus 2
  REGION 1..11: note = Table B: HLA-DQA1*03:02-B1*03:03L HLA-DQA1*01:02-B1*06:02L
NNSIAIPTNFT

SEQ ID NO: 10117 - protein, 10 aa, Severe acute respiratory syndrome coronavirus 2
  REGION 1..10: note = Table B: HLA-DQA1*03:02-B1*03:03L HLA-DQA1*01:02-B1*06:02L HLA-DQA1*05:05-B1*03:19L HLA-DQA1*05:05-B1*03:116L HLA-DPA1*02:01-B1*13:01L HLA-DPA1*03:01-B1*105:01L HLA-DQA1*03:01-B1*03:02L HLA-DPA1*01:03-B1*104:01L
  REGION 1..10: note = CONT. FROM ABOVE: HLA-DQA1*02:01-B1*03:03L HLA-DRB1*15:03L
SIAIPTNFTI

SEQ ID NO: 10118 - protein, 16 aa, Severe acute respiratory syndrome coronavirus 2
  REGION 1..16: note = Table B: HLA-DQA1*03:02-B1*03:03L HLA-DQA1*05:01-B1*03:01L HLA-DRB1*13:03L HLA-DRB1*01:03L HLA-DRB1*04:02L HLA-DRB1*04:04L HLA-DRB1*04:05L HLA-DRB4*03:01NL HLA-DRB1*08:04L HLA-DRB1*08:77L HLA-DRB3*02:01L HLA-DPA1*01:03-B1*03:01L HLA-DRB1*11:03L
  REGION 1..16: note = CONT. FROM ABOVE: HLA-DRB1*11:04L HLA-DRB1*14:02L HLA-DQA1*01-B1 *05L HLA-DQA1*05:05-B1*03:19L HLA-DRB4*01:01L HLA-DRB1*04:10L HL A-DRB1*09:01L HLA-DPA1*01:03-B1*04:02L HLA-DRB1*12:02L HLA-DPA1* 02:01-B1*13:01L HLA-DQA1*03:01-B1*03:02L HLA-DRB1*14:54L
  REGION 1..16: note = CONT. FROM ABOVE: HLA-DPA1*01:03-B1*104:01L HLA-DRB1*14:17L HLA- DRB1*07:01L HLA-DRB1*10:01L HLA-DQA1*01:03-B1*06:01L HLA-DRB1*04 :08L HLA-DRB1*08:03L HLA-DQA1*02:01-B1*03:03L
IPTNFTISVTTEILPV

SEQ ID NO: 10119 - protein, 11 aa, Severe acute respiratory syndrome coronavirus 2
  REGION 1..11: note = Table B: HLA-DQA1*03:02-B1*03:03L HLA-DQA1*05:01-B1*03:01L HLA-DRB1*04:03L HLA-DQA1*01:02-B1*06:02L HLA-DQA1*01-B1*05L HLA-DQA1*05:05-B1*03:19L HLA-DQA1*05:01-B1*02:01L HLA-DRB1*12:01L HLA-DPA1*03:01-B1*105:01L
  REGION 1..11: note = CONT. FROM ABOVE: HLA-DQA1*05:05-B1*03:01L HLA-DPA1*01:02-B1*04: 01L HLA-DRB1*16:01L
ISVTTEILPVS

SEQ ID NO: 10120 - protein, 10 aa, Severe acute respiratory syndrome coronavirus 2
  REGION 1..10: note = Table B: HLA-DQA1*03:02-B1*03:03M HLA-DQA1*05:01-B1*03:01L HLA-DRB1*13:03L HLA-DQA1*01:02-B1*06:02L HLA-DRB1*01:02L HLA-DPA1*03:01-B1*04:02L HLA-DRB1*14:01L HLA-DRB1*14:02L HLA-DQA1*01-B1*05L HLA-DQA1*05:05-B1*03:19L
  REGION 1..10: note = CONT. FROM ABOVE: HLA-DQA1*05:01-B1*02:01L HLA-DPA1*01:03-B1*04: 01L HLA-DQA1*05:05-B1*03:116L HLA-DRB1*09:01L HLA-DPA1*01:03-B1* 04:02L HLA-DRB1*12:01L HLA-DPA1*02:01-B1*13:01L HLA-DPA1*03:01-B 1*105:01L HLA-DQA1*03:01-B1*03:02L HLA-DQA1*05:05-B1*03:01L
  REGION 1..10: note = CONT. FROM ABOVE: HLA-DPA1*01:02-B1*04:01L HLA-DRB1*16:01L HLA-D QA1*01:03-B1*06:01L HLA-DQA1*02:01-B1*03:03L HLA-DRB1*15:03L
VTTEILPVSM

SEQ ID NO: 10121 - protein, 10 aa, Severe acute respiratory syndrome coronavirus 2
  REGION 1..10: note = Table B: HLA-DQA1*03:02-B1*03:03L HLA-DRB1*13:02L HLA-DRB1*13:03L HLA-DRB4*03:01NL HLA-DPA1*01:03-B1*04:02L HLA-DRB1*12:01L HLA-DQA1*03:01-B1*03:02L HLA-DQA1*05:05-B1*03:01L HLA-DRB1*14:17L
  REGION 1..10: note = CONT. FROM ABOVE: HLA-DQA1*02:01-B1*03:03L
TEILPVSMTK

SEQ ID NO: 10122 - protein, 10 aa, Severe acute respiratory syndrome coronavirus 2
  REGION 1..10: note = Table B: HLA-DQA1*03:02-B1*03:03L HLA-DQA1*05:01-B1*03:01L HLA-DRB1*04:03L HLA-DQA1*01:02-B1*06:02L HLA-DQA1*05:01-B1*02:01L HLA-DPA1*03:01-B1*105:01L HLA-DQA1*03:01-B1*03:02L HLA-DRB1*14:17L
  REGION 1..10: note = CONT. FROM ABOVE: HLA-DQA1*01:03-B1*06:01L HLA-DQA1*02:01-B1*03: 03L
EILPVSMTKT

SEQ ID NO: 10123 - protein, 10 aa, Severe acute respiratory syndrome coronavirus 2
  REGION 1..10: note = Table B: HLA-DQA1*03:02-B1*03:03L HLA-DQA1*05:01-B1*03:01L HLA-DRB1*04:03L HLA-DRB1*13:03L HLA-DRB1*04:02L HLA-DRB4*03:01NL HLA-DQA1*01-B1*05L HLA-DQA1*05:01-B1*02:01L HLA-DQA1*03:01-B1*03:02L HLA-DRB1*14:17L HLA-DRB1*16:01L
  REGION 1..10: note = CONT. FROM ABOVE: HLA-DQA1*01:03-B1*06:01L HLA-DQA1*02:01-B1*03: 03L
PVSMTKTSVD

SEQ ID NO: 10124 - protein, 10 aa, Severe acute respiratory syndrome coronavirus 2
  REGION 1..10: note = Table B: HLA-DQA1*03:02-B1*03:03L HLA-DQA1*05:05-B1*03:19L HLA-DPA1*01:03-B1*104:01L HLA-DQA1*02:01-B1*03:03L
TQLNRALTGI

SEQ ID NO: 10125 - protein, 11 aa, Severe acute respiratory syndrome coronavirus 2
  REGION 1..11: note = Table B: HLA-DQA1*03:02-B1*03:03L HLA-DQA1*05:01-B1*03:01L HLA-DRB1*04:02L HLA-DRB1*04:05L HLA-DQA1*01:02-B1*06:02L HLA-DRB4*03:01NL HLA-DPA1*01:03-B1*03:01L HLA-DQA1*01-B1*05L HLA-DQA1*05:05-B1*03:19L HLA-DQA1*05:01-B1*02:01L
  REGION 1..11: note = CONT. FROM ABOVE: HLA-DRB1*04:10L HLA-DRB1*12:01L HLA-DPA1*03:01 -B1*105:01L HLA-DRB1*14:54L HLA-DQA1*05:05-B1*03:01L HLA-DRB1*10 :01L HLA-DRB1*04:08L HLA-DRB1*15:03L
RALTGIAVEQD

SEQ ID NO: 10126 - protein, 10 aa, Severe acute respiratory syndrome coronavirus 2
  REGION 1..10: note = Table B: HLA-DQA1*03:02-B1*03:03L HLA-DQA1*05:01-B1*03:01L HLA-DRB1*04:03L HLA-DRB1*04:02L HLA-DRB1*04:05L HLA-DQA1*01:02-B1*06:02L HLA-DQA1*01:01-B1*05:01L HLA-DQA1*05:05-B1*03:19L HLA-DQA1*05:01-B1*02:01L
  REGION 1..10: note = CONT. FROM ABOVE: HLA-DRB1*04:10L HLA-DQA1*03:01-B1*03:02L HLA-D QA1*05:05-B1*03:01L HLA-DRB1*16:01L HLA-DQA1*01:03-B1*06:01L HLA -DQA1*02:01-B1*03:03L
LTGIAVEQDK

SEQ ID NO: 10127 - protein, 10 aa, Severe acute respiratory syndrome coronavirus 2
  REGION 1..10: note = Table B: HLA-DQA1*03:02-B1*03:03L HLA-DQA1*05:01-B1*03:01L HLA-DRB1*04:03L HLA-DRB1*04:02L HLA-DQA1*01:02-B1*06:02L HLA-DQA1*01:01-B1*05:01L HLA-DQA1*05:05-B1*03:19L HLA-DQA1*05:01-B1*02:01L HLA-DQA1*03:01-B1*03:02L
  REGION 1..10: note = CONT. FROM ABOVE: HLA-DQA1*05:05-B1*03:01L HLA-DRB1*14:17L HLA-D RB1*16:01L HLA-DQA1*01:03-B1*06:01L HLA-DQA1*02:01-B1*03:03L
TGIAVEQDKN

SEQ ID NO: 10128 - protein, 11 aa, Severe acute respiratory syndrome coronavirus 2
  REGION 1..11: note = Table B: HLA-DQA1*03:02-B1*03:03L HLA-DRB1*13:02L HLA-DRB1*13:03L HLA-DRB1*01:03L HLA-DRB1*04:04L HLA-DRB1*08:77L HLA-DRB1*14:01L HLA-DRB1*11:04L HLA-DRB1*12:01L HLA-DRB1*10:01L HLA-DRB1*16:01L HLA-DRB1*04:08L
IAVEQDKNTQE

SEQ ID NO: 10129 - protein, 10 aa, Severe acute respiratory syndrome coronavirus 2
  REGION 1..10: note = Table B: HLA-DQA1*03:02-B1*03:03M HLA-DQA1*05:01-B1*03:01L HLA-DRB1*13:02L HLA-DRB1*13:03L HLA-DRB1*08:77L HLA-DPA1*03:01-B1*04:02L HLA-DRB1*14:01L HLA-DRB1*11:02M HLA-DRB1*11:01L HLA-DQA1*01-B1*05L HLA-DQA1*05:05-B1*03:19H
  REGION 1..10: note = CONT. FROM ABOVE: HLA-DQA1*05:01-B1*02:01L HLA-DRB4*01:01L HLA-D PA1*01:03-B1*04:01L HLA-DQA1*05:05-B1*03:116L HLA-DRB1*09:01L HL A-DPA1*01:03-B1*04:02L HLA-DQA1*03:01-B1*03:02L HLA-DPA1*01:03-B 1*104:01M HLA-DPA1*01:02-B1*04:01L HLA-DRB1*10:01L
  REGION 1..10: note = CONT. FROM ABOVE: HLA-DRB1*16:01L HLA-DQA1*01:03-B1*06:01L HLA-D QA1*02:01-B1*03:03L HLA-DRB1*15:03L
VEQDKNTQEV

SEQ ID NO: 10130 - protein, 10 aa, Severe acute respiratory syndrome coronavirus 2
  REGION 1..10: note = Table B: HLA-DQA1*03:02-B1*03:03L HLA-DQA1*05:01-B1*03:01L HLA-DRB1*13:03L HLA-DRB1*01:03L HLA-DQA1*01:02-B1*06:02L HLA-DRB4*03:01NL HLA-DRB1*08:77L HLA-DPA1*01:03-B1*03:01L HLA-DPA1*03:01-B1*04:02L HLA-DRB1*03:01L HLA-DRB1*11:02L
  REGION 1..10: note = CONT. FROM ABOVE: HLA-DRB1*14:02L HLA-DQA1*01-B1*05L HLA-DQA1*05 :05-B1*03:19M HLA-DQA1*05:01-B1*02:01L HLA-DRB4*01:01L HLA-DPA1* 01:03-B1*04:01L HLA-DQA1*05:05-B1*03:116L HLA-DPA1*01:03-B1*04:0 2L HLA-DRB1*12:01L HLA-DPA1*03:01-B1*105:01L
  REGION 1..10: note = CONT. FROM ABOVE: HLA-DQA1*03:01-B1*03:02L HLA-DPA1*01:03-B1*104 :01L HLA-DPA1*01:02-B1*04:01L HLA-DRB1*10:01L HLA-DRB1*16:01L HL A-DRB1*08:02L HLA-DQA1*02:01-B1*03:03L HLA-DRB1*15:03L
EQDKNTQEVF

SEQ ID NO: 10131 - protein, 10 aa, Severe acute respiratory syndrome coronavirus 2
  REGION 1..10: note = Table B: HLA-DQA1*03:02-B1*03:03L HLA-DRB1*04:03L HLA-DQA1*01-B1*05L HLA-DQA1*05:01-B1*02:01L HLA-DPA1*03:01-B1*105:01L HLA-DQA1*03:01-B1*03:02L HLA-DPA1*01:02-B1*04:01L HLA-DQA1*01:03-B1*06:01L
  REGION 1..10: note = CONT. FROM ABOVE: HLA-DQA1*02:01-B1*03:03L
TQEVFAQVKQ

SEQ ID NO: 10132 - protein, 10 aa, Severe acute respiratory syndrome coronavirus 2
  REGION 1..10: note = Table B: HLA-DQA1*03:02-B1*03:03M HLA-DRB1*08:77L HLA-DRB1*11:02M HLA-DQA1*05:05-B1*03:19H HLA-DQA1*05:01-B1*02:01L HLA-DRB4*01:01L HLA-DPA1*01:03-B1*04:01L HLA-DRB1*09:01L
  REGION 1..10: note = CONT. FROM ABOVE: HLA-DQA1*03:01-B1*03:02L HLA-DPA1*01:03-B1*104 :01H HLA-DRB1*16:01L
QEVFAQVKQI

SEQ ID NO: 10133 - protein, 10 aa, Severe acute respiratory syndrome coronavirus 2
  REGION 1..10: note = Table B: HLA-DQA1*03:02-B1*03:03L HLA-DQA1*05:01-B1*03:01L HLA-DRB1*13:02L HLA-DRB1*13:03H HLA-DRB1*01:03L HLA-DQA1*01:02-B1*06:02H HLA-DRB1*01:01L HLA-DRB1*01:02L HLA-DRB4*03:01NL HLA-DRB1*08:77L HLA-DPA1*01:03-B1*03:01L
  REGION 1..10: note = CONT. FROM ABOVE: HLA-DPA1*03:01-B1*04:02L HLA-DRB1*03:01M HLA-D RB1*14:01L HLA-DRB1*11:04L HLA-DRB1*14:02L HLA-DRB1*08:01L HLA-D RB5*01:01L HLA-DQA1*01-B1*05L HLA-DQA1*05:05-B1*03:19L HLA-DRB4* 02:01NL HLA-DQA1*05:01-B1*02:01M HLA-DRB4*01:01L
  REGION 1..10: note = CONT. FROM ABOVE: HLA-DPA1*01:03-B1*04:01M HLA-DQA1*05:05-B1*03: 116L HLA-DRB1*09:01L HLA-DPA1*01:03-B1*04:02L HLA-DRB1*12:01L HL A-DPA1*02:01-B1*13:01M HLA-DPA1*03:01-B1*105:01M HLA-DQA1*05:05- B1*03:01L HLA-DPA1*01:02-B1*04:01L HLA-DRB1*10:01L
  REGION 1..10: note = CONT. FROM ABOVE: HLA-DRB1*16:01L HLA-DQA1*01:03-B1*06:01L HLA-D RB1*08:02L HLA-DQA1*02:01-B1*03:03L HLA-DRB1*15:01L HLA-DRB1*15: 03M
EVFAQVKQIY

SEQ ID NO: 10134 - protein, 14 aa, Severe acute respiratory syndrome coronavirus 2
  REGION 1..14: note = Table B: HLA-DQA1*03:02-B1*03:03L HLA-DRB1*04:01L HLA-DRB1*08:04L HLA-DRB3*02:01L HLA-DPA1*01:03-B1*03:01L HLA-DPA1*03:01-B1*04:02L HLA-DRB1*03:01L HLA-DRB1*11:03L HLA-DRB1*11:04L HLA-DQA1*05:01-B1*02:01L
  REGION 1..14: note = CONT. FROM ABOVE: HLA-DPA1*01:03-B1*04:02L HLA-DRB3*01:01L HLA-D PA1*01:03-B1*104:01L HLA-DRB1*07:01L HLA-DRB1*10:01L HLA-DRB1*08 :03L
VKQIYKTPPIKDFG

SEQ ID NO: 10135 - protein, 11 aa, Severe acute respiratory syndrome coronavirus 2
  REGION 1..11: note = Table B: HLA-DQA1*03:02-B1*03:03L HLA-DRB1*04:03L HLA-DRB1*04:02L HLA-DQA1*01-B1*05L HLA-DQA1*05:01-B1*02:01L HLA-DQA1*03:01-B1*03:02L HLA-DRB1*14:17L HLA-DQA1*02:01-B1*03:03L
TPPIKDFGGFN

SEQ ID NO: 10136 - protein, 12 aa, Severe acute respiratory syndrome coronavirus 2
  REGION 1..12: note = Table B: HLA-DQA1*03:02-B1*03:03L HLA-DQA1*01:02-B1*06:02L HLA-DPA1*03:01-B1*04:02L HLA-DQA1*01-B1*05L HLA-DQA1*05:01-B1*02:01L HLA-DPA1*01:03-B1*04:01L HLA-DPA1*01:03-B1*04:02L HLA-DQA1*03:01-B1*03:02L
  REGION 1..12: note = CONT. FROM ABOVE: HLA-DPA1*01:02-B1*04:01L HLA-DQA1*01:03-B1*06: 01L
GGFNFSQILPDP

SEQ ID NO: 10137 - protein, 11 aa, Severe acute respiratory syndrome coronavirus 2
  REGION 1..11: note = Table B: HLA-DQA1*03:02-B1*03:03L HLA-DQA1*05:01-B1*03:01L HLA-DRB1*04:03L HLA-DRB1*01:03L HLA-DQA1*01:02-B1*06:02L HLA-DPA1*03:01-B1*04:02L HLA-DQA1*01-B1*05L HLA-DQA1*05:05-B1*03:19L HLA-DQA1*05:01-B1*02:01L
  REGION 1..11: note = CONT. FROM ABOVE: HLA-DPA1*01:03-B1*04:01L HLA-DPA1*01:03-B1*04: 02L HLA-DPA1*03:01-B1*105:01L HLA-DQA1*03:01-B1*03:02L HLA-DQA1* 05:05-B1*03:01L HLA-DPA1*01:02-B1*04:01L HLA-DRB1*16:01L HLA-DQA 1*01:03-B1*06:01L HLA-DRB1*04:08L HLA-DQA1*02:01-B1*03:03L
FNFSQILPDPS

SEQ ID NO: 10138 - protein, 10 aa, Severe acute respiratory syndrome coronavirus 2
  REGION 1..10: note = Table B: HLA-DQA1*03:02-B1*03:03L HLA-DRB1*04:03L HLA-DQA1*01-B1*05L HLA-DQA1*03:01-B1*03:02L HLA-DQA1*02:01-B1*03:03L
SQILPDPSKP

SEQ ID NO: 10139 - protein, 10 aa, Severe acute respiratory syndrome coronavirus 2
  REGION 1..10: note = Table B: HLA-DQA1*03:02-B1*03:03L HLA-DQA1*05:01-B1*03:01L HLA-DRB1*04:03L HLA-DRB1*13:02L HLA-DRB1*13:03L HLA-DRB1*01:03L HLA-DRB1*04:02L HLA-DRB1*04:05L HLA-DRB1*01:02L HLA-DRB4*03:01NL HLA-DRB1*08:77L HLA-DRB1*14:01L HLA-DRB1*11:03L HLA-DRB1*11:04L
  REGION 1..10: note = CONT. FROM ABOVE: HLA-DQA1*01-B1*05L HLA-DQA1*05:01-B1*02:01L HL A-DRB1*04:10L HLA-DRB1*12:01L HLA-DRB1*12:02L HLA-DQA1*03:01-B1* 03:02L HLA-DRB1*14:54L HLA-DRB1*14:17L HLA-DRB1*10:01L HLA-DRB1* 16:01L HLA-DRB1*04:08L HLA-DQA1*02:01-B1*03:03L HLA-DRB1*15:03L
QILPDPSKPS

SEQ ID NO: 10140 - protein, 10 aa, Severe acute respiratory syndrome coronavirus 2
  REGION 1..10: note = Table B: HLA-DQA1*03:02-B1*03:03L HLA-DQA1*05:01-B1*03:01L HLA-DRB1*04:01L HLA-DRB1*04:03M HLA-DRB1*13:02L HLA-DRB1*13:03L HLA-DRB1*01:03L HLA-DRB1*04:02M HLA-DRB1*04:04L HLA-DRB1*04:05L HLA-DQA1*01:02-B1*06:02L HLA-DRB1*01:01L HLA-DRB1*01:02L
  REGION 1..10: note = CONT. FROM ABOVE: HLA-DRB4*03:01NL HLA-DRB1*08:04L HLA-DRB1*08:7 7L HLA-DRB3*02:01L HLA-DPA1*01:03-B1*03:01L HLA-DRB1*03:01L HLA- DRB1*14:01L HLA-DRB1*11:03L HLA-DRB1*11:04L HLA-DRB1*14:02L HLA- DRB1*08:01L HLA-DRB1*11:01L HLA-DRB5*01:01L HLA-DQA1*01-B1*05L
  REGION 1..10: note = CONT. FROM ABOVE: HLA-DQA1*05:05-B1*03:19L HLA-DQA1*05:01-B1*02: 01L HLA-DRB1*13:01L HLA-DRB1*04:10L HLA-DPA1*01:03-B1*04:02L HLA -DRB1*12:01L HLA-DRB1*12:02L HLA-DRB3*01:01L HLA-DPA1*02:01-B1*1 3:01L HLA-DPA1*03:01-B1*105:01L HLA-DQA1*03:01-B1*03:02L
  REGION 1..10: note = CONT. FROM ABOVE: HLA-DRB1*14:54L HLA-DQA1*05:05-B1*03:01L HLA-D RB1*14:17M HLA-DPA1*01:02-B1*04:01L HLA-DRB1*07:01L HLA-DRB1*10: 01L HLA-DRB1*16:01L HLA-DRB1*04:08L HLA-DRB1*08:03L HLA-DQA1*02: 01-B1*03:03L HLA-DRB1*15:01L HLA-DRB1*15:03L
ILPDPSKPSK

SEQ ID NO: 10141 - protein, 19 aa, Severe acute respiratory syndrome coronavirus 2
  REGION 1..19: note = Table B: HLA-DQA1*03:02-B1*03:03L HLA-DQA1*05:01-B1*03:01L HLA-DRB1*04:03L HLA-DRB1*08:04L HLA-DPA1*01:03-B1*03:01L HLA-DPA1*03:01-B1*04:02L HLA-DRB1*14:01L HLA-DRB1*14:02L HLA-DQA1*01:01-B1*05:01L HLA-DQA1*05:01-B1*02:01L
  REGION 1..19: note = CONT. FROM ABOVE: HLA-DRB3*01:01L HLA-DPA1*01:03-B1*104:01L HLA- DRB1*07:01L HLA-DQA1*01:03-B1*06:01L
PDPSKPSKRSFIEDLLFNK

SEQ ID NO: 10142 - protein, 10 aa, Severe acute respiratory syndrome coronavirus 2
  REGION 1..10: note = Table B: HLA-DQA1*03:02-B1*03:03M HLA-DQA1*05:01-B1*03:01L HLA-DQA1*01:02-B1*06:02L HLA-DRB1*01:02L HLA-DPA1*03:01-B1*04:02L HLA-DRB1*11:02L HLA-DRB1*14:02L HLA-DQA1*05:05-B1*03:19M HLA-DQA1*05:01-B1*02:01L
  REGION 1..10: note = CONT. FROM ABOVE: HLA-DPA1*01:03-B1*04:01L HLA-DQA1*05:05-B1*03: 116L HLA-DRB1*09:01L HLA-DPA1*01:03-B1*04:02L HLA-DPA1*02:01-B1* 13:01L HLA-DPA1*03:01-B1*105:01L HLA-DQA1*03:01-B1*03:02L HLA-DP A1*01:03-B1*104:01L HLA-DPA1*01:02-B1*04:01L HLA-DRB1*16:01L
  REGION 1..10: note = CONT. FROM ABOVE: HLA-DQA1*01:03-B1*06:01L HLA-DRB1*08:03L HLA-D QA1*02:01-B1*03:03L HLA-DRB1*15:03L
FIEDLLFNKV

SEQ ID NO: 10143 - protein, 10 aa, Severe acute respiratory syndrome coronavirus 2
  REGION 1..10: note = Table B: HLA-DQA1*03:02-B1*03:03L HLA-DRB1*01:03L HLA-DPA1*03:01-B1*04:02L HLA-DQA1*01-B1*05L HLA-DQA1*05:01-B1*02:01L HLA-DPA1*01:03-B1*04:01L HLA-DPA1*01:03-B1*04:02L HLA-DRB1*12:01L
  REGION 1..10: note = CONT. FROM ABOVE: HLA-DPA1*03:01-B1*105:01L HLA-DPA1*01:02-B1*04 :01L HLA-DRB1*16:01L HLA-DQA1*01:03-B1*06:01L HLA-DRB1*04:08L HL A-DQA1*02:01-B1*03:03L HLA-DRB1*15:03L
IEDLLFNKVT

SEQ ID NO: 10144 - protein, 10 aa, Severe acute respiratory syndrome coronavirus 2
  REGION 1..10: note = Table B: HLA-DQA1*03:02-B1*03:03L HLA-DQA1*05:05-B1*03:19L HLA-DQA1*03:01-B1*03:02L HLA-DPA1*01:03-B1*104:01L
EDLLFNKVTL

SEQ ID NO: 10145 - protein, 12 aa, Severe acute respiratory syndrome coronavirus 2
  REGION 1..12: note = Table B: HLA-DQA1*03:02-B1*03:03L HLA-DQA1*05:01-B1*03:01L HLA-DRB1*13:02L HLA-DRB1*13:03L HLA-DRB1*01:03L HLA-DRB1*04:02L HLA-DRB1*04:04L HLA-DRB1*04:05L HLA-DQA1*01:02-B1*06:02L HLA-DRB1*01:02L HLA-DRB4*03:01NL HLA-DRB1*08:04L
  REGION 1..12: note = CONT. FROM ABOVE: HLA-DPA1*01:03-B1*03:01L HLA-DPA1*03:01-B1*04: 02L HLA-DRB1*11:04L HLA-DRB1*08:01L HLA-DQA1*01-B1*05L HLA-DQA1* 05:01-B1*02:01L HLA-DRB1*04:10L HLA-DRB1*12:01L HLA-DPA1*02:01-B 1*13:01L HLA-DPA1*03:01-B1*105:01L HLA-DRB1*14:54L
  REGION 1..12: note = CONT. FROM ABOVE: HLA-DQA1*05:05-B1*03:01L HLA-DRB1*14:17L HLA-D PA1*01:02-B1*04:01L HLA-DRB1*16:01L HLA-DQA1*01:03-B1*06:01L HLA -DRB1*04:08L HLA-DRB1*08:03L HLA-DQA1*02:01-B1*03:03L HLA-DRB1*1 5:03L
LLFNKVTLADAG

SEQ ID NO: 10146 - protein, 10 aa, Severe acute respiratory syndrome coronavirus 2
  REGION 1..10: note = Table B: HLA-DQA1*03:02-B1*03:03L HLA-DQA1*05:01-B1*03:01L HLA-DRB1*04:03L HLA-DRB1*13:02L HLA-DRB1*13:03L HLA-DRB1*01:03L HLA-DRB1*04:02L HLA-DRB1*04:05L HLA-DQA1*01:02-B1*06:02L HLA-DRB1*01:02L HLA-DRB4*03:01NL HLA-DRB1*14:01L
  REGION 1..10: note = CONT. FROM ABOVE: HLA-DQA1*05:05-B1*03:19L HLA-DQA1*05:01-B1*02: 01L HLA-DRB1*12:01L HLA-DRB1*12:02L HLA-DPA1*03:01-B1*105:01L HL A-DQA1*03:01-B1*03:02L HLA-DRB1*14:54L HLA-DQA1*05:05-B1*03:01L HLA-DRB1*14:17L HLA-DRB1*16:01L HLA-DQA1*01:03-B1*06:01L
  REGION 1..10: note = CONT. FROM ABOVE: HLA-DQA1*02:01-B1*03:03L
VTLADAGFIK

SEQ ID NO: 10147 - protein, 10 aa, Severe acute respiratory syndrome coronavirus 2
  REGION 1..10: note = Table B: HLA-DQA1*03:02-B1*03:03L HLA-DQA1*05:01-B1*03:01L HLA-DRB1*04:03L HLA-DRB1*13:02L HLA-DRB1*13:03L HLA-DRB1*04:02L HLA-DRB4*03:01NL HLA-DRB1*14:01L HLA-DQA1*05:01-B1*02:01L HLA-DRB1*12:01L HLA-DPA1*03:01-B1*105:01L
  REGION 1..10: note = CONT. FROM ABOVE: HLA-DQA1*03:01-B1*03:02L HLA-DQA1*05:05-B1*03: 01L HLA-DRB1*14:17L HLA-DRB1*16:01L HLA-DQA1*02:01-B1*03:03L
TLADAGFIKQ

SEQ ID NO: 10148 - protein, 12 aa, Severe acute respiratory syndrome coronavirus 2
  REGION 1..12: note = Table B: HLA-DQA1*03:02-B1*03:03L
LADAGFIKQYGD

SEQ ID NO: 10149 - protein, 13 aa, Severe acute respiratory syndrome coronavirus 2
  REGION 1..13: note = Table B: HLA-DQA1*03:02-B1*03:03L HLA-DRB1*13:02L HLA-DRB1*01:03L HLA-DPA1*03:01-B1*04:02L HLA-DQA1*05:05-B1*03:19L HLA-DPA1*01:03-B1*104:01L HLA-DQA1*05:05-B1*03:01L
FIKQYGDCLGDIA

SEQ ID NO: 10150 - protein, 13 aa, Severe acute respiratory syndrome coronavirus 2
  REGION 1..13: note = Table B: HLA-DQA1*03:02-B1*03:03L HLA-DRB1*04:03L HLA-DRB1*04:05L HLA-DRB1*01:02L HLA-DPA1*01:03-B1*03:01L HLA-DQA1*01-B1*05L HLA-DQA1*05:01-B1*02:01L HLA-DRB1*12:01L HLA-DPA1*02:01-B1*13:01L HLA-DPA1*03:01-B1*105:01L
  REGION 1..13: note = CONT. FROM ABOVE: HLA-DPA1*01:03-B1*104:01L HLA-DQA1*05:05-B1*03 :01L HLA-DQA1*01:03-B1*06:01L HLA-DQA1*02:01-B1*03:03L
YGDCLGDIAARDL

SEQ ID NO: 10151 - protein, 10 aa, Severe acute respiratory syndrome coronavirus 2
  REGION 1..10: note = Table B: HLA-DQA1*03:02-B1*03:03L HLA-DQA1*03:01-B1*03:02L HLA-DQA1*02:01-B1*03:03L HLA-DRB1*15:03L
VLPPLLTDEM

SEQ ID NO: 10152 - protein, 14 aa, Severe acute respiratory syndrome coronavirus 2
  REGION 1..14: note = Table B: HLA-DQA1*03:02-B1*03:03L HLA-DRB1*13:02L HLA-DRB1*04:02L HLA-DRB1*04:05L HLA-DRB1*01:02L HLA-DRB1*08:04L HLA-DRB1*14:01L HLA-DRB3*01:01L HLA-DQA1*05:05-B1*03:01L HLA-DPA1*01:02-B1*04:01L HLA-DRB1*04:08L
  REGION 1..14: note = CONT. FROM ABOVE: HLA-DQA1*02:01-B1*03:03L
LPPLLTDEMIAQYT

SEQ ID NO: 10153 - protein, 10 aa, Severe acute respiratory syndrome coronavirus 2
  REGION 1..10: note = Table B: HLA-DQA1*03:02-B1*03:03L
DEMIAQYTSA

SEQ ID NO: 10154 - protein, 10 aa, Severe acute respiratory syndrome coronavirus 2
  REGION 1..10: note = Table B: HLA-DQA1*03:02-B1*03:03L
EMIAQYTSAL

SEQ ID NO: 10155 - protein, 12 aa, Severe acute respiratory syndrome coronavirus 2
  REGION 1..12: note = Table B: HLA-DQA1*03:02-B1*03:03L HLA-DQA1*05:01-B1*03:01L HLA-DRB1*01:03L HLA-DQA1*01:02-B1*06:02L HLA-DRB3*02:01L HLA-DPA1*03:01-B1*04:02L HLA-DQA1*05:05-B1*03:19L HLA-DPA1*03:01-B1*105:01L HLA-DQA1*05:05-B1*03:01L
IAQYTSALLAGT

SEQ ID NO: 10156 - protein, 12 aa, Severe acute respiratory syndrome coronavirus 2
  REGION 1..12: note = Table B: HLA-DQA1*03:02-B1*03:03L HLA-DQA1*05:01-B1*03:01L HLA-DQA1*01:02-B1*06:02L HLA-DQA1*05:05-B1*03:19L HLA-DPA1*03:01-B1*105:01L HLA-DQA1*05:05-B1*03:01L HLA-DQA1*01:03-B1*06:01L HLA-DQA1*02:01-B1*03:03L
AQYTSALLAGTI

SEQ ID NO: 10157 - protein, 11 aa, Severe acute respiratory syndrome coronavirus 2
  REGION 1..11: note = Table B: HLA-DQA1*03:02-B1*03:03L HLA-DQA1*05:01-B1*03:01L HLA-DQA1*01:02-B1*06:02L HLA-DQA1*05:05-B1*03:19L HLA-DPA1*03:01-B1*105:01L HLA-DQA1*03:01-B1*03:02L HLA-DQA1*05:05-B1*03:01L HLA-DQA1*02:01-B1*03:03L
YTSALLAGTIT

SEQ ID NO: 10158 - protein, 12 aa, Severe acute respiratory syndrome coronavirus 2
  REGION 1..12: note = Table B: HLA-DQA1*03:02-B1*03:03L
ALLAGTITSGWT

SEQ ID NO: 10159 - protein, 12 aa, Severe acute respiratory syndrome coronavirus 2
  REGION 1..12: note = Table B: HLA-DQA1*03:02-B1*03:03L HLA-DQA1*05:01-B1*03:01L HLA-DRB1*04:03L HLA-DRB1*04:02L HLA-DQA1*05:05-B1*03:19L HLA-DPA1*03:01-B1*105:01L HLA-DQA1*03:01-B1*03:02L HLA-DQA1*05:05-B1*03:01L HLA-DRB1*14:17L
  REGION 1..12: note = CONT. FROM ABOVE: HLA-DQA1*02:01-B1*03:03L
GTITSGWTFGAG

SEQ ID NO: 10160 - protein, 12 aa, Severe acute respiratory syndrome coronavirus 2
  REGION 1..12: note = Table B: HLA-DQA1*03:02-B1*03:03L HLA-DQA1*05:01-B1*03:01L HLA-DQA1*01:02-B1*06:02L HLA-DQA1*05:05-B1*03:19L HLA-DQA1*03:01-B1*03:02L HLA-DQA1*05:05-B1*03:01L HLA-DQA1*02:01-B1*03:03L
ITSGWTFGAGAA

SEQ ID NO: 10161 - protein, 12 aa, Severe acute respiratory syndrome coronavirus 2
  REGION 1..12: note = Table B: HLA-DQA1*03:02-B1*03:03L HLA-DQA1*05:01-B1*03:01L HLA-DQA1*05:05-B1*03:19L HLA-DQA1*05:01-B1*02:01L HLA-DQA1*03:01-B1*03:02L HLA-DQA1*05:05-B1*03:01L HLA-DQA1*02:01-B1*03:03L
SGWTFGAGAALQ

SEQ ID NO: 10162 - protein, 12 aa, Severe acute respiratory syndrome coronavirus 2
  REGION 1..12: note = Table B: HLA-DQA1*03:02-B1*03:03L HLA-DQA1*05:01-B1*03:01L HLA-DQA1*01:02-B1*06:02L HLA-DQA1*05:05-B1*03:19L HLA-DQA1*05:01-B1*02:01L HLA-DPA1*03:01-B1*105:01L HLA-DQA1*05:05-B1*03:01L HLA-DQA1*01:03-B1*06:01L
  REGION 1..12: note = CONT. FROM ABOVE: HLA-DQA1*02:01-B1*03:03L
WTFGAGAALQIP

SEQ ID NO: 10163 - protein, 12 aa, Severe acute respiratory syndrome coronavirus 2
  REGION 1..12: note = Table B: HLA-DQA1*03:02-B1*03:03L HLA-DQA1*05:01-B1*03:01L
TFGAGAALQIPF

SEQ ID NO: 10164 - protein, 10 aa, Severe acute respiratory syndrome coronavirus 2
  REGION 1..10: note = Table B: HLA-DQA1*03:02-B1*03:03L HLA-DQA1*05:01-B1*03:01L HLA-DQA1*05:05-B1*03:19L HLA-DQA1*03:01-B1*03:02L HLA-DQA1*05:05-B1*03:01L HLA-DQA1*01:03-B1*06:01L HLA-DQA1*02:01-B1*03:03L
AGAALQIPFA

SEQ ID NO: 10165 - protein, 10 aa, Severe acute respiratory syndrome coronavirus 2
  REGION 1..10: note = Table B: HLA-DQA1*03:02-B1*03:03L HLA-DQA1*05:05-B1*03:19L HLA-DQA1*02:01-B1*03:03L HLA-DRB1*15:03L
ALQIPFAMQM

SEQ ID NO: 10166 - protein, 10 aa, Severe acute respiratory syndrome coronavirus 2
  REGION 1..10: note = Table B: HLA-DQA1*03:02-B1*03:03L HLA-DQA1*05:05-B1*03:19L HLA-DQA1*01:03-B1*06:01L
MAYRFNGIGV

SEQ ID NO: 10167 - protein, 12 aa, Severe acute respiratory syndrome coronavirus 2
  REGION 1..12: note = Table B: HLA-DQA1*03:02-B1*03:03L HLA-DQA1*01:02-B1*06:02L HLA-DRB1*01:02L HLA-DRB1*14:01L HLA-DRB1*08:01L HLA-DQA1*05:05-B1*03:19L HLA-DRB1*12:01L HLA-DQA1*05:05-B1*03:01L HLA-DQA1*01:03-B1*06:01L
  REGION 1..12: note = CONT. FROM ABOVE: HLA-DRB1*15:03L
AYRFNGIGVTQN

SEQ ID NO: 10168 - protein, 10 aa, Severe acute respiratory syndrome coronavirus 2
  REGION 1..10: note = Table B: HLA-DQA1*03:02-B1*03:03L HLA-DQA1*05:01-B1*03:01L HLA-DQA1*05:01-B1*02:01L HLA-DQA1*03:01-B1*03:02L HLA-DQA1*01:03-B1*06:01L HLA-DQA1*02:01-B1*03:03L
NGIGVTQNVL

SEQ ID NO: 10169 - protein, 12 aa, Severe acute respiratory syndrome coronavirus 2
  REGION 1..12: note = Table B: HLA-DQA1*03:02-B1*03:03L HLA-DRB1*04:03L HLA-DQA1*03:01-B1*03:02L HLA-DQA1*05:05-B1*03:01L HLA-DRB1*14:17L HLA-DQA1*01:03-B1*06:01L
GIGVTQNVLYEN

SEQ ID NO: 10170 - protein, 11 aa, Severe acute respiratory syndrome coronavirus 2
  REGION 1..11: note = Table B: HLA-DQA1*03:02-B1*03:03L HLA-DQA1*05:01-B1*03:01L HLA-DRB1*04:03L HLA-DRB1*04:02L HLA-DQA1*01:02-B1*06:02L HLA-DRB4*03:01NL HLA-DQA1*01-B1*05L HLA-DRB1*14:17L HLA-DQA1*01:03-B1*06:01L
VTQNVLYENQK

SEQ ID NO: 10171 - protein, 11 aa, Severe acute respiratory syndrome coronavirus 2
  REGION 1..11: note = Table B: HLA-DQA1*03:02-B1*03:03L
TQNVLYENQKL

SEQ ID NO: 10172 - protein, 10 aa, Severe acute respiratory syndrome coronavirus 2
  REGION 1..10: note = Table B: HLA-DQA1*03:02-B1*03:03L HLA-DQA1*05:05-B1*03:19L HLA-DPA1*01:03-B1*104:01L
NVLYENQKLI

SEQ ID NO: 10173 - protein, 11 aa, Severe acute respiratory syndrome coronavirus 2
  REGION 1..11: note = Table B: HLA-DQA1*03:02-B1*03:03L HLA-DQA1*05:01-B1*03:01L HLA-DRB1*13:02L HLA-DRB1*13:03L HLA-DRB1*01:03L HLA-DRB1*04:05L HLA-DQA1*01:02-B1*06:02L HLA-DRB4*03:01NL HLA-DPA1*03:01-B1*04:02L HLA-DQA1*05:01-B1*02:01L
  REGION 1..11: note = CONT. FROM ABOVE: HLA-DRB1*12:01L HLA-DPA1*03:01-B1*105:01L HLA- DRB1*14:54L HLA-DRB1*14:17L HLA-DPA1*01:02-B1*04:01L HLA-DQA1*01 :03-B1*06:01L HLA-DRB1*04:08L
VLYENQKLIAN

SEQ ID NO: 10174 - protein, 10 aa, Severe acute respiratory syndrome coronavirus 2
  REGION 1..10: note = Table B: HLA-DQA1*03:02-B1*03:03L HLA-DRB1*04:03L HLA-DQA1*03:01-B1*03:02L HLA-DRB1*14:17L
YENQKLIANQ

SEQ ID NO: 10175 - protein, 10 aa, Severe acute respiratory syndrome coronavirus 2
  REGION 1..10: note = Table B: HLA-DQA1*03:02-B1*03:03L HLA-DQA1*05:01-B1*03:01L HLA-DRB1*13:03L HLA-DRB1*01:03L HLA-DQA1*01:02-B1*06:02M HLA-DRB1*08:77L HLA-DPA1*01:03-B1*03:01L HLA-DRB1*14:02L HLA-DQA1*05:05-B1*03:19L HLA-DQA1*05:01-B1*02:01L
  REGION 1..10: note = CONT. FROM ABOVE: HLA-DPA1*01:03-B1*04:01L HLA-DPA1*02:01-B1*13: 01L HLA-DPA1*03:01-B1*105:01L HLA-DQA1*01:03-B1*06:01L HLA-DQA1* 02:01-B1*03:03L HLA-DRB1*15:03L
ENQKLIANQF

SEQ ID NO: 10176 - protein, 10 aa, Severe acute respiratory syndrome coronavirus 2
  REGION 1..10: note = Table B: HLA-DQA1*03:02-B1*03:03L HLA-DQA1*05:01-B1*03:01L HLA-DRB1*04:03L HLA-DPA1*03:01-B1*04:02L HLA-DRB1*14:01L HLA-DRB1*14:02L HLA-DQA1*05:05-B1*03:19L HLA-DQA1*05:05-B1*03:116L HLA-DPA1*03:01-B1*105:01L
  REGION 1..10: note = CONT. FROM ABOVE: HLA-DQA1*03:01-B1*03:02L HLA-DPA1*01:02-B1*04: 01L HLA-DRB1*16:01L HLA-DQA1*02:01-B1*03:03L HLA-DRB1*15:03L
KLIANQFNSA

SEQ ID NO: 10177 - protein, 12 aa, Severe acute respiratory syndrome coronavirus 2
  REGION 1..12: note = Table B: HLA-DQA1*03:02-B1*03:03L HLA-DQA1*05:01-B1*03:01L HLA-DRB1*13:02L HLA-DRB1*04:04L HLA-DRB1*04:05L HLA-DRB1*01:02L HLA-DRB1*08:04L HLA-DPA1*01:03-B1*03:01L HLA-DRB1*14:01L HLA-DRB1*11:03L HLA-DRB1*11:04L HLA-DRB1*08:01L HLA-DRB1*11:01L
  REGION 1..12: note = CONT. FROM ABOVE: HLA-DQA1*05:05-B1*03:19L HLA-DRB1*04:10L HLA-D RB3*01:01L HLA-DPA1*02:01-B1*13:01L HLA-DPA1*01:03-B1*02:01L HLA -DRB1*10:01L HLA-DRB1*15:03L
LIANQFNSAIGK

SEQ ID NO: 10178 - protein, 10 aa, Severe acute respiratory syndrome coronavirus 2
  REGION 1..10: note = Table B: HLA-DQA1*03:02-B1*03:03L HLA-DQA1*05:05-B1*03:19L HLA-DPA1*03:01-B1*105:01L HLA-DQA1*03:01-B1*03:02L HLA-DPA1*01:03-B1*104:01L HLA-DRB1*16:01L HLA-DQA1*01:03-B1*06:01L HLA-DQA1*02:01-B1*03:03L
  REGION 1..10: note = CONT. FROM ABOVE: HLA-DRB1*15:03L
NQFNSAIGKI

SEQ ID NO: 10179 - protein, 10 aa, Severe acute respiratory syndrome coronavirus 2
  REGION 1..10: note = Table B: HLA-DQA1*03:02-B1*03:03L HLA-DQA1*05:01-B1*03:01L HLA-DRB1*04:03L HLA-DRB1*13:03L HLA-DRB1*01:03L HLA-DRB1*04:02L HLA-DQA1*01:02-B1*06:02L HLA-DRB4*03:01NL HLA-DQA1*05:05-B1*03:19L HLA-DQA1*05:01-B1*02:01L
  REGION 1..10: note = CONT. FROM ABOVE: HLA-DRB1*12:01L HLA-DPA1*03:01-B1*105:01L HLA- DQA1*03:01-B1*03:02L HLA-DQA1*05:05-B1*03:01L HLA-DRB1*14:17L HL A-DRB1*16:01L HLA-DQA1*01:03-B1*06:01L HLA-DQA1*02:01-B1*03:03L
FNSAIGKIQD

SEQ ID NO: 10180 - protein, 10 aa, Severe acute respiratory syndrome coronavirus 2
  REGION 1..10: note = Table B: HLA-DQA1*03:02-B1*03:03L HLA-DQA1*05:01-B1*03:01L HLA-DRB1*04:03L HLA-DRB1*04:02L HLA-DQA1*03:01-B1*03:02L HLA-DQA1*05:05-B1*03:01L HLA-DRB1*14:17L HLA-DQA1*01:03-B1*06:01L HLA-DQA1*02:01-B1*03:03L
NSAIGKIQDS

SEQ ID NO: 10181 - protein, 10 aa, Severe acute respiratory syndrome coronavirus 2
  REGION 1..10: note = Table B: HLA-DQA1*03:02-B1*03:03M HLA-DQA1*05:01-B1*03:01L HLA-DRB1*04:03L HLA-DRB1*13:03L HLA-DRB1*01:03L HLA-DRB1*04:02L HLA-DRB1*04:05L HLA-DQA1*01:02-B1*06:02M HLA-DRB1*01:02L HLA-DRB4*03:01NL HLA-DRB1*08:77L HLA-DRB3*02:01L
  REGION 1..10: note = CONT. FROM ABOVE: HLA-DPA1*01:03-B1*03:01L HLA-DPA1*03:01-B1*04: 02L HLA-DRB1*14:01L HLA-DRB1*14:02L HLA-DQA1*01:01-B1*05:01L HLA -DRB1*08:01L HLA-DQA1*01-B1*05L HLA-DQA1*05:05-B1*03:19L HLA-DQA 1*05:01-B1*02:01L HLA-DPA1*01:03-B1*04:01L
  REGION 1..10: note = CONT. FROM ABOVE: HLA-DQA1*05:05-B1*03:116L HLA-DRB1*09:01L HLA- DPA1*01:03-B1*04:02L HLA-DRB1*12:01L HLA-DPA1*02:01-B1*13:01L HL A-DPA1*03:01-B1*105:01L HLA-DQA1*03:01-B1*03:02L HLA-DPA1*01:03- B1*104:01L HLA-DQA1*05:05-B1*03:01L HLA-DRB1*14:17L
  REGION 1..10: note = CONT. FROM ABOVE: HLA-DPA1*01:02-B1*04:01L HLA-DRB1*07:01L HLA-D RB1*16:01L HLA-DQA1*01:03-B1*06:01L HLA-DRB1*08:03L HLA-DQA1*02: 01-B1*03:03L HLA-DRB1*15:03L
SAIGKIQDSL

SEQ ID NO: 10182 - protein, 10 aa, Severe acute respiratory syndrome coronavirus 2
  REGION 1..10: note = Table B: HLA-DQA1*03:02-B1*03:03L HLA-DRB1*14:17L
KIQDSLSSTA

SEQ ID NO: 10183 - protein, 12 aa, Severe acute respiratory syndrome coronavirus 2
  REGION 1..12: note = Table B: HLA-DQA1*03:02-B1*03:03L HLA-DQA1*03:01-B1*03:02L
IQDSLSSTASAL

SEQ ID NO: 10184 - protein, 12 aa, Severe acute respiratory syndrome coronavirus 2
  REGION 1..12: note = Table B: HLA-DQA1*03:02-B1*03:03L HLA-DRB1*04:04L HLA-DQA1*01:02-B1*06:02L HLA-DRB1*01:02L HLA-DRB1*08:77L HLA-DPA1*01:03-B1*03:01L HLA-DRB1*14:01L HLA-DRB1*11:04L HLA-DQA1*01:01-B1*05:01L HLA-DRB5*01:01L HLA-DQA1*01-B1*05L
  REGION 1..12: note = CONT. FROM ABOVE: HLA-DQA1*05:01-B1*02:01L HLA-DRB1*04:10L HLA-D RB1*10:01L HLA-DRB1*04:08L HLA-DRB1*15:03L
DSLSSTASALGK

SEQ ID NO: 10185 - protein, 10 aa, Severe acute respiratory syndrome coronavirus 2
  REGION 1..10: note = Table B: HLA-DQA1*03:02-B1*03:03L HLA-DQA1*05:01-B1*03:01L HLA-DRB1*04:03L HLA-DQA1*01:02-B1*06:02L HLA-DQA1*05:05-B1*03:19L HLA-DQA1*05:01-B1*02:01L HLA-DPA1*03:01-B1*105:01L HLA-DQA1*03:01-B1*03:02L
  REGION 1..10: note = CONT. FROM ABOVE: HLA-DQA1*05:05-B1*03:01L HLA-DQA1*01:03-B1*06: 01L HLA-DQA1*02:01-B1*03:03L
SSTASALGKL

SEQ ID NO: 10186 - protein, 10 aa, Severe acute respiratory syndrome coronavirus 2
  REGION 1..10: note = Table B: HLA-DQA1*03:02-B1*03:03L HLA-DQA1*05:01-B1*03:01L HLA-DRB1*04:03L HLA-DRB1*04:02L HLA-DQA1*01:02-B1*06:02L HLA-DRB4*03:01NL HLA-DQA1*05:05-B1*03:19L HLA-DQA1*05:01-B1*02:01L HLA-DRB1*12:01L
  REGION 1..10: note = CONT. FROM ABOVE: HLA-DPA1*03:01-B1*105:01L HLA-DQA1*03:01-B1*03 :02L HLA-DQA1*05:05-B1*03:01L HLA-DRB1*14:17L HLA-DRB1*16:01L HL A-DQA1*01:03-B1*06:01L HLA-DQA1*02:01-B1*03:03L
STASALGKLQ

SEQ ID NO: 10187 - protein, 10 aa, Severe acute respiratory syndrome coronavirus 2
  REGION 1..10: note = Table B: HLA-DQA1*03:02-B1*03:03L HLA-DQA1*05:01-B1*03:01L HLA-DRB1*04:03L HLA-DRB1*04:02L HLA-DQA1*01:02-B1*06:02L HLA-DRB4*03:01NL HLA-DQA1*05:05-B1*03:19L HLA-DQA1*05:01-B1*02:01L HLA-DPA1*03:01-B1*105:01L
  REGION 1..10: note = CONT. FROM ABOVE: HLA-DQA1*03:01-B1*03:02L HLA-DQA1*05:05-B1*03: 01L HLA-DRB1*14:17L HLA-DQA1*01:03-B1*06:01L HLA-DQA1*02:01-B1*0 3:03L
TASALGKLQD

SEQ ID NO: 10188 - protein, 10 aa, Severe acute respiratory syndrome coronavirus 2
  REGION 1..10: note = Table B: HLA-DQA1*03:02-B1*03:03L HLA-DQA1*05:01-B1*03:01L HLA-DRB1*04:03L HLA-DQA1*01:02-B1*06:02L HLA-DQA1*05:05-B1*03:19L HLA-DQA1*05:01-B1*02:01L HLA-DQA1*03:01-B1*03:02L HLA-DQA1*05:05-B1*03:01L
  REGION 1..10: note = CONT. FROM ABOVE: HLA-DQA1*01:03-B1*06:01L HLA-DQA1*02:01-B1*03: 03L
ALGKLQDVVN

SEQ ID NO: 10189 - protein, 10 aa, Severe acute respiratory syndrome coronavirus 2
  REGION 1..10: note = Table B: HLA-DQA1*03:02-B1*03:03L HLA-DRB1*13:03L HLA-DRB1*01:03L HLA-DQA1*05:05-B1*03:19L HLA-DQA1*03:01-B1*03:02L HLA-DRB1*16:01L HLA-DQA1*02:01-B1*03:03L
KLQDVVNQNA

SEQ ID NO: 10190 - protein, 11 aa, Severe acute respiratory syndrome coronavirus 2
  REGION 1..11: note = Table B: HLA-DQA1*03:02-B1*03:03L HLA-DRB1*13:03L HLA-DRB4*03:01NL HLA-DQA1*01-B1*05L HLA-DRB1*16:01L HLA-DQA1*02:01-B1*03:03L
LQDVVNQNAQA

SEQ ID NO: 10191 - protein, 10 aa, Severe acute respiratory syndrome coronavirus 2
  REGION 1..10: note = Table B: HLA-DQA1*03:02-B1*03:03L HLA-DQA1*05:01-B1*03:01L HLA-DRB1*13:03L HLA-DQA1*01:02-B1*06:02M HLA-DRB1*01:02L HLA-DRB4*03:01NL HLA-DPA1*01:03-B1*03:01L HLA-DPA1*03:01-B1*04:02L HLA-DRB1*14:01L HLA-DRB1*14:02L
  REGION 1..10: note = CONT. FROM ABOVE: HLA-DRB1*08:01L HLA-DRB5*01:01L HLA-DQA1*01-B1 *05L HLA-DQA1*05:01-B1*02:01L HLA-DPA1*01:03-B1*04:01L HLA-DQA1* 05:05-B1*03:116L HLA-DRB1*09:01L HLA-DRB1*12:01L HLA-DPA1*02:01- B1*13:01L HLA-DPA1*03:01-B1*105:01M HLA-DQA1*03:01-B1*03:02L
  REGION 1..10: note = CONT. FROM ABOVE: HLA-DQA1*05:05-B1*03:01L HLA-DPA1*01:02-B1*04: 01L HLA-DQA1*02:01-B1*03:03L HLA-DRB1*15:03L
DVVNQNAQAL

SEQ ID NO: 10192 - protein, 10 aa, Severe acute respiratory syndrome coronavirus 2
  REGION 1..10: note = Table B: HLA-DQA1*03:02-B1*03:03L HLA-DQA1*05:01-B1*03:01L HLA-DQA1*01:02-B1*06:02L HLA-DPA1*03:01-B1*04:02L HLA-DRB1*14:01L HLA-DQA1*05:05-B1*03:19L HLA-DQA1*05:01-B1*02:01L HLA-DQA1*05:05-B1*03:116L
  REGION 1..10: note = CONT. FROM ABOVE: HLA-DPA1*03:01-B1*105:01L HLA-DQA1*03:01-B1*03 :02L HLA-DPA1*01:02-B1*04:01L HLA-DQA1*01:03-B1*06:01L HLA-DQA1* 02:01-B1*03:03L HLA-DRB1*15:03L
NQNAQALNTL

SEQ ID NO: 10193 - protein, 11 aa, Severe acute respiratory syndrome coronavirus 2
  REGION 1..11: note = Table B: HLA-DQA1*03:02-B1*03:03L HLA-DQA1*01:02-B1*06:02L
NAQALNTLVKQ

SEQ ID NO: 10194 - protein, 10 aa, Severe acute respiratory syndrome coronavirus 2
  REGION 1..10: note = Table B: HLA-DQA1*03:02-B1*03:03L HLA-DQA1*05:01-B1*03:01L HLA-DQA1*03:01-B1*03:02L HLA-DQA1*02:01-B1*03:03L
QALNTLVKQL

SEQ ID NO: 10195 - protein, 12 aa, Severe acute respiratory syndrome coronavirus 2
  REGION 1..12: note = Table B: HLA-DQA1*03:02-B1*03:03L HLA-DRB1*14:04L HLA-DRB1*13:02L HLA-DRB1*13:03L HLA-DRB1*01:03L HLA-DRB1*04:04L HLA-DRB1*08:04L HLA-DRB1*08:77L HLA-DRB3*02:01L HLA-DPA1*01:03-B1*03:01L HLA-DPA1*03:01-B1*04:02L
  REGION 1..12: note = CONT. FROM ABOVE: HLA-DRB1*11:03L HLA-DRB1*11:04L HLA-DRB1*08:01 L HLA-DQA1*01-B1*05L HLA-DQA1*05:05-B1*03:19L HLA-DRB1*12:02L HL A-DPA1*02:01-B1*13:01L HLA-DPA1*03:01-B1*105:01L HLA-DQA1*05:05- B1*03:01L HLA-DPA1*01:02-B1*04:01L HLA-DRB1*10:01L
  REGION 1..12: note = CONT. FROM ABOVE: HLA-DRB1*04:08L HLA-DRB1*08:03L
NTLVKQLSSNFG

SEQ ID NO: 10196 - protein, 12 aa, Severe acute respiratory syndrome coronavirus 2
  REGION 1..12: note = Table B: HLA-DQA1*03:02-B1*03:03L HLA-DQA1*05:01-B1*03:01L HLA-DRB1*13:02L HLA-DRB1*13:03L HLA-DRB1*01:03L HLA-DRB1*04:02L HLA-DRB1*04:04L HLA-DRB1*04:05L HLA-DQA1*01:02-B1*06:02L HLA-DRB1*01:02L HLA-DRB4*03:01NL HLA-DPA1*01:03-B1*03:01L
  REGION 1..12: note = CONT. FROM ABOVE: HLA-DRB1*14:01L HLA-DRB1*11:04L HLA-DQA1*01-B1 *05L HLA-DQA1*05:05-B1*03:19L HLA-DQA1*05:01-B1*02:01L HLA-DRB1* 04:10L HLA-DRB1*12:01L HLA-DRB1*12:02L HLA-DPA1*03:01-B1*105:01L HLA-DQA1*03:01-B1*03:02L HLA-DRB1*14:54L
  REGION 1..12: note = CONT. FROM ABOVE: HLA-DQA1*05:05-B1*03:01L HLA-DRB1*14:17L HLA-D RB1*10:01L HLA-DRB1*16:01L HLA-DQA1*01:03-B1*06:01L HLA-DRB1*04: 08L HLA-DQA1*02:01-B1*03:03L HLA-DRB1*15:03L
VKQLSSNFGAIS

SEQ ID NO: 10197 - protein, 10 aa, Severe acute respiratory syndrome coronavirus 2
  REGION 1..10: note = Table B: HLA-DQA1*03:02-B1*03:03L
SSNFGAISSV

SEQ ID NO: 10198 - protein, 10 aa, Severe acute respiratory syndrome coronavirus 2
  REGION 1..10: note = Table B: HLA-DQA1*03:02-B1*03:03L
SNFGAISSVL

SEQ ID NO: 10199 - protein, 10 aa, Severe acute respiratory syndrome coronavirus 2
  REGION 1..10: note = Table B: HLA-DQA1*03:02-B1*03:03L HLA-DQA1*01:02-B1*06:02L HLA-DQA1*01-B1*05L HLA-DQA1*05:01-B1*02:01L HLA-DPA1*03:01-B1*105:01L HLA-DQA1*03:01-B1*03:02L HLA-DQA1*01:03-B1*06:01L HLA-DQA1*02:01-B1*03:03L
AISSVLNDIL

SEQ ID NO: 10200 - protein, 10 aa, Severe acute respiratory syndrome coronavirus 2
  REGION 1..10: note = Table B: HLA-DQA1*03:02-B1*03:03H HLA-DQA1*05:01-B1*03:01M HLA-DRB1*04:01L HLA-DRB1*13:02L HLA-DRB1*13:03L HLA-DRB1*01:03L HLA-DRB1*04:02L HLA-DRB1*04:04L HLA-DQA1*01:02-B1*06:02M HLA-DRB1*01:01L HLA-DRB1*01:02L HLA-DRB1*08:77L HLA-DRB3*02:01L
  REGION 1..10: note = CONT. FROM ABOVE: HLA-DPA1*01:03-B1*03:01L HLA-DPA1*03:01-B1*04: 02M HLA-DRB1*03:01L HLA-DRB1*14:01L HLA-DRB1*14:02M HLA-DRB1*08: 01L HLA-DRB1*11:01L HLA-DQA1*05:05-B1*03:19L HLA-DQA1*05:01-B1*0 2:01L HLA-DRB4*01:01L HLA-DPA1*01:03-B1*04:01L
  REGION 1..10: note = CONT. FROM ABOVE: HLA-DQA1*05:05-B1*03:116M HLA-DRB1*09:01M HLA- DPA1*01:03-B1*04:02M HLA-DRB1*12:01L HLA-DPA1*02:01-B1*13:01L HL A-DPA1*03:01-B1*105:01M HLA-DQA1*03:01-B1*03:02M HLA-DPA1*01:03- B1*104:01L HLA-DPA1*01:02-B1*04:01M HLA-DRB1*07:01L
  REGION 1..10: note = CONT. FROM ABOVE: HLA-DRB1*10:01L HLA-DRB1*16:01L HLA-DQA1*01:03 -B1*06:01L HLA-DRB1*08:03M HLA-DQA1*02:01-B1*03:03M HLA-DRB1*15: 01L HLA-DRB1*15:03M
SVLNDILSRL

SEQ ID NO: 10201 - protein, 13 aa, Severe acute respiratory syndrome coronavirus 2
  REGION 1..13: note = Table B: HLA-DQA1*03:02-B1*03:03L HLA-DQA1*05:01-B1*03:01L HLA-DRB1*13:02L HLA-DRB1*13:03L HLA-DRB1*01:03L HLA-DRB1*04:04L HLA-DRB1*01:02L HLA-DRB1*08:04L HLA-DQA1*01:01-B1*05:01L HLA-DQA1*05:01-B1*02:01L HLA-DRB1*04:10L HLA-DRB1*12:01L
  REGION 1..13: note = CONT. FROM ABOVE: HLA-DPA1*02:01-B1*13:01L HLA-DPA1*03:01-B1*105 :01L HLA-DRB1*14:54L HLA-DQA1*01:03-B1*06:01L HLA-DRB1*04:08L HL A-DRB1*08:03L HLA-DRB1*15:03L
ILSRLDKVEAEVQ

SEQ ID NO: 10202 - protein, 11 aa, Severe acute respiratory syndrome coronavirus 2
  REGION 1..11: note = Table B: HLA-DQA1*03:02-B1*03:03L HLA-DQA1*05:01-B1*03:01L HLA-DRB1*04:03L HLA-DRB1*13:03L HLA-DQA1*01:01-B1*05:01L HLA-DRB1*08:01L HLA-DRB1*12:01L HLA-DRB1*16:01L HLA-DQA1*01:03-B1*06:01L
DKVEAEVQIDR

SEQ ID NO: 10203 - protein, 10 aa, Severe acute respiratory syndrome coronavirus 2
  REGION 1..10: note = Table B: HLA-DQA1*03:02-B1*03:03H HLA-DQA1*05:01-B1*03:01M HLA-DRB1*04:01L HLA-DRB1*13:02L HLA-DRB1*13:03L HLA-DRB1*01:03L HLA-DRB1*04:02L HLA-DQA1*01:02-B1*06:02L HLA-DRB4*03:01NL HLA-DRB1*08:77M HLA-DPA1*03:01-B1*04:02L HLA-DRB1*03:01L
  REGION 1..10: note = CONT. FROM ABOVE: HLA-DRB1*14:01L HLA-DRB1*11:02L HLA-DRB1*11:04 L HLA-DRB1*14:02L HLA-DRB1*11:01L HLA-DQA1*01-B1*05L HLA-DQA1*05 :05-B1*03:19M HLA-DQA1*05:01-B1*02:01L HLA-DRB4*01:01L HLA-DPA1* 01:03-B1*04:01L HLA-DQA1*05:05-B1*03:116M HLA-DRB1*09:01M
  REGION 1..10: note = CONT. FROM ABOVE: HLA-DPA1*01:03-B1*04:02M HLA-DRB1*12:01L HLA-D PA1*02:01-B1*13:01L HLA-DPA1*03:01-B1*105:01L HLA-DQA1*03:01-B1* 03:02M HLA-DPA1*01:03-B1*104:01M HLA-DPA1*01:02-B1*04:01L HLA-DR B1*07:01L HLA-DRB1*10:01L HLA-DRB1*16:01L
  REGION 1..10: note = CONT. FROM ABOVE: HLA-DQA1*01:03-B1*06:01L HLA-DQA1*02:01-B1*03: 03L HLA-DRB1*15:03L
VEAEVQIDRL

SEQ ID NO: 10204 - protein, 11 aa, Severe acute respiratory syndrome coronavirus 2
  REGION 1..11: note = Table B: HLA-DQA1*03:02-B1*03:03L HLA-DRB1*04:03L HLA-DRB1*13:03L HLA-DRB1*04:02L HLA-DRB4*03:01NL HLA-DRB1*14:01L HLA-DQA1*01-B1*05L HLA-DQA1*05:01-B1*02:01L HLA-DRB1*14:54L HLA-DRB1*14:17L HLA-DPA1*01:02-B1*04:01L HLA-DRB1*16:01L
  REGION 1..11: note = CONT. FROM ABOVE: HLA-DQA1*01:03-B1*06:01L
AEVQIDRLITG

SEQ ID NO: 10205 - protein, 11 aa, Severe acute respiratory syndrome coronavirus 2
  REGION 1..11: note = Table B: HLA-DQA1*03:02-B1*03:03L HLA-DQA1*05:01-B1*03:01L HLA-DQA1*05:05-B1*03:19L HLA-DPA1*01:02-B1*04:01L HLA-DQA1*01:03-B1*06:01L HLA-DRB1*15:03L
VQIDRLITGRL

SEQ ID NO: 10206 - protein, 10 aa, Severe acute respiratory syndrome coronavirus 2
  REGION 1..10: note = Table B: HLA-DQA1*03:02-B1*03:03M HLA-DQA1*05:01-B1*03:01M HLA-DRB1*13:02L HLA-DRB1*13:03L HLA-DRB1*01:03L HLA-DRB1*04:02L HLA-DRB1*04:04L HLA-DRB1*04:05L HLA-DQA1*01:02-B1*06:02M HLA-DRB1*01:02L HLA-DRB3*02:01L HLA-DPA1*01:03-B1*03:01L
  REGION 1..10: note = CONT. FROM ABOVE: HLA-DPA1*03:01-B1*04:02M HLA-DRB1*03:01L HLA-D RB1*14:01L HLA-DRB1*14:02M HLA-DQA1*01:01-B1*05:01L HLA-DRB1*08: 01M HLA-DRB1*11:01L HLA-DQA1*01-B1*05L HLA-DQA1*05:05-B1*03:19L HLA-DQA1*05:01-B1*02:01L HLA-DRB4*01:01L
  REGION 1..10: note = CONT. FROM ABOVE: HLA-DPA1*01:03-B1*04:01L HLA-DQA1*05:05-B1*03: 116M HLA-DRB1*09:01L HLA-DPA1*01:03-B1*04:02L HLA-DRB1*12:01L HL A-DPA1*02:01-B1*13:01L HLA-DPA1*03:01-B1*105:01L HLA-DQA1*03:01- B1*03:02M HLA-DPA1*01:03-B1*104:01L HLA-DPA1*01:02-B1*04:01L
  REGION 1..10: note = CONT. FROM ABOVE: HLA-DRB1*07:01L HLA-DRB1*10:01L HLA-DRB1*16:01 L HLA-DQA1*01:03-B1*06:01L HLA-DRB1*08:03L HLA-DQA1*02:01-B1*03: 03M HLA-DRB1*15:03L
RLITGRLQSL

SEQ ID NO: 10207 - protein, 10 aa, Severe acute respiratory syndrome coronavirus 2
  REGION 1..10: note = Table B: HLA-DQA1*03:02-B1*03:03L HLA-DQA1*05:01-B1*03:01L HLA-DRB1*04:03L HLA-DQA1*01:02-B1*06:02L HLA-DRB1*01:02L HLA-DPA1*03:01-B1*04:02L HLA-DQA1*05:05-B1*03:19L HLA-DPA1*01:03-B1*04:02L HLA-DPA1*03:01-B1*105:01L
  REGION 1..10: note = CONT. FROM ABOVE: HLA-DQA1*03:01-B1*03:02L HLA-DQA1*05:05-B1*03: 01L HLA-DPA1*01:02-B1*04:01L HLA-DRB1*16:01L HLA-DQA1*01:03-B1*0 6:01M HLA-DRB1*04:08L HLA-DQA1*02:01-B1*03:03L
LITGRLQSLQ

SEQ ID NO: 10208 - protein, 14 aa, Severe acute respiratory syndrome coronavirus 2
  REGION 1..14: note = Table B: HLA-DQA1*03:02-B1*03:03L HLA-DPA1*03:01-B1*04:02L HLA-DRB1*08:01L HLA-DPA1*02:01-B1*13:01L HLA-DPA1*01:03-B1*104:01L HLA-DRB1*07:01L
ITGRLQSLQTYVTQ

SEQ ID NO: 10209 - protein, 14 aa, Severe acute respiratory syndrome coronavirus 2
  REGION 1..14: note = Table B: HLA-DQA1*03:02-B1*03:03L HLA-DRB3*02:01L HLA-DRB1*14:02L HLA-DRB1*08:01L HLA-DRB1*11:01L HLA-DQA1*05:05-B1*03:19L HLA-DRB1*09:01L HLA-DRB3*01:01L HLA-DPA1*02:01-B1*13:01L HLA-DPA1*01:03-B1*104:01L
  REGION 1..14: note = CONT. FROM ABOVE: HLA-DRB1*07:01L HLA-DQA1*01:03-B1*06:01L HLA-D RB1*15:01L
TGRLQSLQTYVTQQ

SEQ ID NO: 10210 - protein, 10 aa, Severe acute respiratory syndrome coronavirus 2
  REGION 1..10: note = Table B: HLA-DQA1*03:02-B1*03:03M HLA-DQA1*05:01-B1*03:01L HLA-DQA1*01:02-B1*06:02L HLA-DPA1*03:01-B1*04:02L HLA-DRB1*14:01L HLA-DRB1*14:02L HLA-DQA1*01-B1*05L HLA-DQA1*05:05-B1*03:19L HLA-DQA1*05:01-B1*02:01L
  REGION 1..10: note = CONT. FROM ABOVE: HLA-DQA1*05:05-B1*03:116L HLA-DRB1*09:01L HLA- DPA1*02:01-B1*13:01L HLA-DPA1*03:01-B1*105:01L HLA-DQA1*03:01-B1 *03:02L HLA-DPA1*01:03-B1*104:01L HLA-DPA1*01:02-B1*04:01L HLA-D RB1*16:01L HLA-DQA1*01:03-B1*06:01L HLA-DQA1*02:01-B1*03:03L
  REGION 1..10: note = CONT. FROM ABOVE: HLA-DRB1*15:03L
SLQTYVTQQL

SEQ ID NO: 10211 - protein, 10 aa, Severe acute respiratory syndrome coronavirus 2
  REGION 1..10: note = Table B: HLA-DQA1*03:02-B1*03:03L HLA-DQA1*05:01-B1*03:01L HLA-DRB1*04:03L HLA-DRB1*01:03L HLA-DRB1*04:05L HLA-DQA1*01:02-B1*06:02L HLA-DRB1*01:02L HLA-DPA1*03:01-B1*04:02L HLA-DQA1*01-B1*05L
  REGION 1..10: note = CONT. FROM ABOVE: HLA-DQA1*05:05-B1*03:19L HLA-DQA1*05:01-B1*02: 01L HLA-DRB1*12:01L HLA-DPA1*03:01-B1*105:01L HLA-DQA1*03:01-B1* 03:02L HLA-DPA1*01:02-B1*04:01L HLA-DRB1*16:01L HLA-DQA1*01:03-B 1*06:01L HLA-DQA1*02:01-B1*03:03L HLA-DRB1*15:03L
TYVTQQLIRA

SEQ ID NO: 10212 - protein, 11 aa, Severe acute respiratory syndrome coronavirus 2
  REGION 1..11: note = Table B: HLA-DQA1*03:02-B1*03:03L HLA-DRB1*13:03L HLA-DRB1*01:03L HLA-DRB1*04:02L HLA-DRB1*04:04L HLA-DRB1*04:05L HLA-DRB1*01:02L HLA-DRB4*03:01NL HLA-DPA1*01:03-B1*03:01L HLA-DRB1*14:01L HLA-DQA1*05:05-B1*03:19L
  REGION 1..11: note = CONT. FROM ABOVE: HLA-DQA1*05:01-B1*02:01L HLA-DPA1*01:03-B1*04: 02L HLA-DRB1*12:01L HLA-DRB1*14:54L HLA-DQA1*05:05-B1*03:01L HLA -DRB1*14:17L HLA-DRB1*16:01L HLA-DRB1*04:08L HLA-DRB1*15:03L
YVTQQLIRAAE

SEQ ID NO: 10213 - protein, 12 aa, Severe acute respiratory syndrome coronavirus 2
  REGION 1..12: note = Table B: HLA-DQA1*03:02-B1*03:03L HLA-DRB1*04:02L HLA-DRB1*01:02L HLA-DQA1*01:01-B1*05:01L HLA-DRB1*08:01L HLA-DQA1*05:05-B1*03:01L
VTQQLIRAAEIR

SEQ ID NO: 10214 - protein, 14 aa, Severe acute respiratory syndrome coronavirus 2
  REGION 1..14: note = Table B: HLA-DQA1*03:02-B1*03:03L HLA-DRB1*04:04L HLA-DRB1*08:04L HLA-DRB1*11:04L HLA-DRB1*08:01L
TQQLIRAAEIRASA

SEQ ID NO: 10215 - protein, 10 aa, Severe acute respiratory syndrome coronavirus 2
  REGION 1..10: note = Table B: HLA-DQA1*03:02-B1*03:03L HLA-DQA1*05:01-B1*03:01L HLA-DQA1*01:02-B1*06:02L HLA-DQA1*05:05-B1*03:19L HLA-DPA1*03:01-B1*105:01L HLA-DQA1*03:01-B1*03:02L HLA-DQA1*05:05-B1*03:01L HLA-DQA1*01:03-B1*06:01M
  REGION 1..10: note = CONT. FROM ABOVE: HLA-DQA1*02:01-B1*03:03L
RAAEIRASAN

SEQ ID NO: 10216 - protein, 10 aa, Severe acute respiratory syndrome coronavirus 2
  REGION 1..10: note = Table B: HLA-DQA1*03:02-B1*03:03L HLA-DQA1*05:01-B1*03:01L HLA-DQA1*03:01-B1*03:02L HLA-DQA1*01:03-B1*06:01L HLA-DQA1*02:01-B1*03:03L
AAEIRASANL

SEQ ID NO: 10217 - protein, 10 aa, Severe acute respiratory syndrome coronavirus 2
  REGION 1..10: note = Table B: HLA-DQA1*03:02-B1*03:03L HLA-DQA1*05:05-B1*03:19L HLA-DQA1*03:01-B1*03:02L
AEIRASANLA

SEQ ID NO: 10218 - protein, 12 aa, Severe acute respiratory syndrome coronavirus 2
  REGION 1..12: note = Table B: HLA-DQA1*03:02-B1*03:03L HLA-DRB1*14:04L HLA-DRB1*08:77L HLA-DPA1*01:03-B1*03:01L HLA-DRB1*14:02L HLA-DQA1*01:01-B1*05:01L HLA-DRB5*01:01L HLA-DQA1*01-B1*05L HLA-DQA1*05:01-B1*02:01L HLA-DRB1*09:01L HLA-DRB3*01:01L
  REGION 1..12: note = CONT. FROM ABOVE: HLA-DPA1*01:03-B1*104:01L HLA-DRB1*07:01L
EIRASANLAATK

SEQ ID NO: 10219 - protein, 10 aa, Severe acute respiratory syndrome coronavirus 2
  REGION 1..10: note = Table B: HLA-DQA1*03:02-B1*03:03L HLA-DQA1*05:01-B1*03:01L HLA-DRB1*04:03L HLA-DRB1*13:03L HLA-DRB1*04:02L HLA-DQA1*01:02-B1*06:02L HLA-DRB1*01:02L HLA-DRB4*03:01NL HLA-DRB1*14:01L HLA-DRB1*14:02L HLA-DQA1*01-B1*05L
  REGION 1..10: note = CONT. FROM ABOVE: HLA-DQA1*05:05-B1*03:19L HLA-DQA1*05:01-B1*02: 01L HLA-DRB1*12:01L HLA-DPA1*03:01-B1*105:01L HLA-DQA1*03:01-B1* 03:02L HLA-DQA1*05:05-B1*03:01L HLA-DPA1*01:02-B1*04:01L HLA-DRB 1*16:01L HLA-DQA1*01:03-B1*06:01L HLA-DQA1*02:01-B1*03:03L
  REGION 1..10: note = CONT. FROM ABOVE: HLA-DRB1*15:03L
ASANLAATKM

SEQ ID NO: 10220 - protein, 10 aa, Severe acute respiratory syndrome coronavirus 2
  REGION 1..10: note = Table B: HLA-DQA1*03:02-B1*03:03L HLA-DQA1*05:01-B1*03:01L HLA-DRB1*04:03L HLA-DRB1*13:03L HLA-DRB1*01:03L HLA-DRB1*04:02L HLA-DRB4*03:01NL HLA-DRB1*14:01L HLA-DQA1*01-B1*05L HLA-DQA1*05:05-B1*03:19L HLA-DQA1*05:01-B1*02:01L
  REGION 1..10: note = CONT. FROM ABOVE: HLA-DRB1*12:01L HLA-DPA1*03:01-B1*105:01L HLA- DQA1*03:01-B1*03:02L HLA-DRB1*14:54L HLA-DQA1*05:05-B1*03:01L HL A-DRB1*14:17L HLA-DPA1*01:02-B1*04:01L HLA-DRB1*16:01L HLA-DQA1* 01:03-B1*06:01L HLA-DQA1*02:01-B1*03:03L
ANLAATKMSE

SEQ ID NO: 10221 - protein, 13 aa, Severe acute respiratory syndrome coronavirus 2
  REGION 1..13: note = Table B: HLA-DQA1*03:02-B1*03:03L HLA-DRB1*11:01L HLA-DQA1*01-B1*05L HLA-DQA1*05:05-B1*03:19L HLA-DPA1*01:02-B1*04:01L HLA-DRB1*08:03L
GYHLMSFPQSAPH

SEQ ID NO: 10222 - protein, 10 aa, Severe acute respiratory syndrome coronavirus 2
  REGION 1..10: note = Table B: HLA-DQA1*03:02-B1*03:03L HLA-DQA1*05:01-B1*03:01L HLA-DRB1*04:03L HLA-DRB1*13:03L HLA-DRB1*04:02L HLA-DRB4*03:01NL HLA-DQA1*05:01-B1*02:01L HLA-DQA1*03:01-B1*03:02L HLA-DQA1*05:05-B1*03:01L HLA-DRB1*14:17L
  REGION 1..10: note = CONT. FROM ABOVE: HLA-DQA1*01:03-B1*06:01L HLA-DQA1*02:01-B1*03: 03L
MSFPQSAPHG

SEQ ID NO: 10223 - protein, 10 aa, Severe acute respiratory syndrome coronavirus 2
  REGION 1..10: note = Table B: HLA-DQA1*03:02-B1*03:03L HLA-DQA1*05:01-B1*03:01L HLA-DRB1*01:03L HLA-DRB1*04:05L HLA-DQA1*01:02-B1*06:02L HLA-DRB1*01:01L HLA-DRB1*01:02L HLA-DPA1*03:01-B1*04:02L HLA-DRB1*14:01L HLA-DQA1*01-B1*05L HLA-DQA1*05:05-B1*03:19L
  REGION 1..10: note = CONT. FROM ABOVE: HLA-DQA1*05:01-B1*02:01L HLA-DQA1*05:05-B1*03: 116L HLA-DPA1*02:01-B1*13:01M HLA-DPA1*03:01-B1*105:01L HLA-DQA1 *03:01-B1*03:02L HLA-DPA1*01:03-B1*104:01L HLA-DPA1*01:02-B1*04: 01L HLA-DRB1*16:01L HLA-DQA1*01:03-B1*06:01L HLA-DRB1*08:03L
  REGION 1..10: note = CONT. FROM ABOVE: HLA-DQA1*02:01-B1*03:03L HLA-DRB1*15:03L
SFPQSAPHGV

SEQ ID NO: 10224 - protein, 10 aa, Severe acute respiratory syndrome coronavirus 2
  REGION 1..10: note = Table B: HLA-DQA1*03:02-B1*03:03L HLA-DQA1*05:01-B1*03:01L HLA-DRB1*13:03L HLA-DRB1*04:02L HLA-DRB1*04:05L HLA-DQA1*01:02-B1*06:02L HLA-DRB4*03:01NL HLA-DPA1*03:01-B1*04:02L HLA-DRB1*14:01L HLA-DQA1*01-B1*05L
  REGION 1..10: note = CONT. FROM ABOVE: HLA-DQA1*05:01-B1*02:01L HLA-DQA1*05:05-B1*03: 116L HLA-DPA1*02:01-B1*13:01L HLA-DPA1*03:01-B1*105:01L HLA-DQA1 *03:01-B1*03:02L HLA-DPA1*01:02-B1*04:01L HLA-DRB1*16:01L HLA-DR B1*15:03L
FPQSAPHGVV

SEQ ID NO: 10225 - protein, 10 aa, Severe acute respiratory syndrome coronavirus 2
  REGION 1..10: note = Table B: HLA-DQA1*03:02-B1*03:03L HLA-DQA1*05:01-B1*03:01L HLA-DRB1*04:03L HLA-DRB1*13:03L HLA-DRB1*01:03L HLA-DRB1*04:05L HLA-DQA1*01:02-B1*06:02L HLA-DRB1*08:77L HLA-DRB1*14:02L HLA-DQA1*05:05-B1*03:19L HLA-DQA1*05:01-B1*02:01L
  REGION 1..10: note = CONT. FROM ABOVE: HLA-DPA1*02:01-B1*13:01L HLA-DPA1*03:01-B1*105 :01L HLA-DQA1*03:01-B1*03:02L HLA-DRB1*16:01L HLA-DQA1*01:03-B1* 06:01L HLA-DQA1*02:01-B1*03:03L HLA-DRB1*15:03L
PQSAPHGVVF

SEQ ID NO: 10226 - protein, 10 aa, Severe acute respiratory syndrome coronavirus 2
  REGION 1..10: note = Table B: HLA-DQA1*03:02-B1*03:03L
QSAPHGVVFL

SEQ ID NO: 10227 - protein, 15 aa, Severe acute respiratory syndrome coronavirus 2
  REGION 1..15: note = Table B: HLA-DQA1*03:02-B1*03:03L HLA-DRB1*13:02L HLA-DRB1*01:03L HLA-DRB1*04:02L HLA-DRB1*04:04L HLA-DRB1*04:05L HLA-DRB1*08:04L HLA-DRB3*02:01L HLA-DPA1*01:03-B1*03:01L HLA-DRB1*11:03L HLA-DRB1*08:01L HLA-DQA1*05:01-B1*02:01L
  REGION 1..15: note = CONT. FROM ABOVE: HLA-DRB1*04:10L HLA-DRB1*12:02L HLA-DPA1*02:01 -B1*13:01L HLA-DQA1*03:01-B1*03:02L HLA-DRB1*14:54L HLA-DQA1*05: 05-B1*03:01L HLA-DRB1*14:17L HLA-DRB1*07:01L HLA-DRB1*10:01L HLA -DRB1*16:01L HLA-DRB1*04:08L HLA-DQA1*02:01-B1*03:03L
APHGVVFLHVTYVPA

SEQ ID NO: 10228 - protein, 14 aa, Severe acute respiratory syndrome coronavirus 2
  REGION 1..14: note = Table B: HLA-DQA1*03:02-B1*03:03L HLA-DRB1*04:04L HLA-DRB1*11:04L HLA-DRB1*14:02L HLA-DRB1*11:01L HLA-DRB3*01:01L HLA-DRB1*10:01L HLA-DRB1*08:03L
GVVFLHVTYVPAQE

SEQ ID NO: 10229 - protein, 10 aa, Severe acute respiratory syndrome coronavirus 2
  REGION 1..10: note = Table B: HLA-DQA1*03:02-B1*03:03L HLA-DQA1*05:01-B1*03:01L HLA-DRB1*04:03L HLA-DRB1*13:03L HLA-DRB1*01:03L HLA-DRB1*04:02L HLA-DRB1*04:05L HLA-DQA1*01:02-B1*06:02L HLA-DRB1*01:02L HLA-DRB4*03:01NL HLA-DQA1*01:01-B1*05:01L HLA-DQA1*01-B1*05L
  REGION 1..10: note = CONT. FROM ABOVE: HLA-DQA1*05:05-B1*03:19L HLA-DQA1*05:01-B1*02: 01L HLA-DRB1*04:10L HLA-DRB1*12:01L HLA-DPA1*03:01-B1*105:01L HL A-DQA1*03:01-B1*03:02L HLA-DRB1*14:54L HLA-DQA1*05:05-B1*03:01L HLA-DRB1*14:17L HLA-DPA1*01:02-B1*04:01L HLA-DRB1*16:01L
  REGION 1..10: note = CONT. FROM ABOVE: HLA-DQA1*01:03-B1*06:01L HLA-DRB1*04:08L HLA-D QA1*02:01-B1*03:03L HLA-DRB1*15:03L
VTYVPAQEKN

SEQ ID NO: 10230 - protein, 10 aa, Severe acute respiratory syndrome coronavirus 2
  REGION 1..10: note = Table B: HLA-DQA1*03:02-B1*03:03L HLA-DRB1*04:03L HLA-DRB1*04:02L HLA-DQA1*05:01-B1*02:01L HLA-DRB1*12:01L HLA-DQA1*03:01-B1*03:02L HLA-DRB1*14:17L HLA-DRB1*16:01L HLA-DQA1*02:01-B1*03:03L
YVPAQEKNFT

SEQ ID NO: 10231 - protein, 13 aa, Severe acute respiratory syndrome coronavirus 2
  REGION 1..13: note = Table B: HLA-DQA1*03:02-B1*03:03L HLA-DRB1*04:03L HLA-DRB1*04:02L HLA-DQA1*05:01-B1*02:01L HLA-DQA1*03:01-B1*03:02L HLA-DRB1*14:17L HLA-DQA1*02:01-B1*03:03L
VPAQEKNFTTAPA

SEQ ID NO: 10232 - protein, 11 aa, Severe acute respiratory syndrome coronavirus 2
  REGION 1..11: note = Table B: HLA-DQA1*03:02-B1*03:03L HLA-DQA1*05:05-B1*03:19L HLA-DPA1*01:03-B1*104:01L
QEKNFTTAPAI

SEQ ID NO: 10233 - protein, 13 aa, Severe acute respiratory syndrome coronavirus 2
  REGION 1..13: note = Table B: HLA-DQA1*03:02-B1*03:03L HLA-DQA1*05:01-B1*03:01L HLA-DRB1*04:03L HLA-DRB1*01:03L HLA-DRB1*04:05L HLA-DRB1*01:02L HLA-DQA1*05:01-B1*02:01L HLA-DRB1*12:01L HLA-DPA1*02:01-B1*13:01L HLA-DPA1*03:01-B1*105:01L
  REGION 1..13: note = CONT. FROM ABOVE: HLA-DQA1*03:01-B1*03:02L HLA-DRB1*16:01L HLA-D RB1*04:08L HLA-DRB1*15:03L
EKNFTTAPAICHD

SEQ ID NO: 10234 - protein, 11 aa, Severe acute respiratory syndrome coronavirus 2
  REGION 1..11: note = Table B: HLA-DQA1*03:02-B1*03:03L HLA-DRB1*04:03L HLA-DPA1*03:01-B1*105:01L
FTTAPAICHDG

SEQ ID NO: 10235 - protein, 10 aa, Severe acute respiratory syndrome coronavirus 2
  REGION 1..10: note = Table B: HLA-DQA1*03:02-B1*03:03L HLA-DQA1*05:01-B1*03:01L HLA-DQA1*01:02-B1*06:02L HLA-DQA1*05:05-B1*03:19L HLA-DQA1*05:01-B1*02:01L HLA-DQA1*03:01-B1*03:02L HLA-DRB1*16:01L HLA-DQA1*01:03-B1*06:01L
  REGION 1..10: note = CONT. FROM ABOVE: HLA-DQA1*02:01-B1*03:03L
AHFPREGVFV

SEQ ID NO: 10236 - protein, 13 aa, Severe acute respiratory syndrome coronavirus 2
  REGION 1..13: note = Table B: HLA-DQA1*03:02-B1*03:03L HLA-DQA1*05:01-B1*03:01L HLA-DRB1*04:03L HLA-DRB1*04:05L HLA-DQA1*01:02-B1*06:02L HLA-DQA1*01:01-B1*05:01L HLA-DRB1*16:01L HLA-DQA1*01:03-B1*06:01L
FPREGVFVSNGTH

SEQ ID NO: 10237 - protein, 10 aa, Severe acute respiratory syndrome coronavirus 2
  REGION 1..10: note = Table B: HLA-DQA1*03:02-B1*03:03L HLA-DQA1*05:01-B1*03:01L HLA-DRB1*04:03L HLA-DRB1*13:02L HLA-DRB1*13:03L HLA-DRB1*01:03L HLA-DRB1*04:05L HLA-DQA1*01:02-B1*06:02M HLA-DRB1*01:01L HLA-DRB4*03:01NL HLA-DRB1*08:77L HLA-DPA1*01:03-B1*03:01L
  REGION 1..10: note = CONT. FROM ABOVE: HLA-DPA1*03:01-B1*04:02L HLA-DRB1*03:01L HLA-D RB1*14:01L HLA-DRB1*14:02L HLA-DQA1*01-B1*05L HLA-DQA1*05:05-B1* 03:19L HLA-DQA1*05:01-B1*02:01L HLA-DRB4*01:01L HLA-DPA1*01:03-B 1*04:01L HLA-DQA1*05:05-B1*03:116L HLA-DPA1*01:03-B1*04:02L
  REGION 1..10: note = CONT. FROM ABOVE: HLA-DRB1*12:01L HLA-DPA1*02:01-B1*13:01L HLA-D PA1*03:01-B1*105:01L HLA-DQA1*03:01-B1*03:02L HLA-DQA1*05:05-B1* 03:01L HLA-DPA1*01:02-B1*04:01L HLA-DRB1*07:01L HLA-DRB1*10:01L HLA-DRB1*16:01L HLA-DQA1*01:03-B1*06:01L HLA-DRB1*08:02L
  REGION 1..10: note = CONT. FROM ABOVE: HLA-DQA1*02:01-B1*03:03M HLA-DRB1*15:03L
GVFVSNGTHW

SEQ ID NO: 10238 - protein, 11 aa, Severe acute respiratory syndrome coronavirus 2
  REGION 1..11: note = Table B: HLA-DQA1*03:02-B1*03:03L HLA-DQA1*05:01-B1*03:01L HLA-DRB1*13:03L HLA-DRB1*01:03L HLA-DRB1*04:02L HLA-DRB1*04:04L HLA-DRB1*04:05L HLA-DQA1*01:02-B1*06:02L HLA-DRB1*01:02L HLA-DRB4*03:01NL HLA-DRB1*08:04L HLA-DRB1*14:01L HLA-DRB1*11:04L
  REGION 1..11: note = CONT. FROM ABOVE: HLA-DQA1*01:01-B1*05:01L HLA-DRB1*08:01L HLA-D QA1*01-B1*05L HLA-DQA1*05:01-B1*02:01L HLA-DRB1*04:10L HLA-DRB1* 12:01L HLA-DPA1*03:01-B1*105:01L HLA-DRB1*14:54L HLA-DPA1*01:02- B1*04:01L HLA-DRB1*10:01L HLA-DRB1*16:01L HLA-DRB1*04:08L
  REGION 1..11: note = CONT. FROM ABOVE: HLA-DRB1*08:03L HLA-DRB1*15:03L
FVTQRNFYEPQ

SEQ ID NO: 10239 - protein, 13 aa, Severe acute respiratory syndrome coronavirus 2
  REGION 1..13: note = Table B: HLA-DQA1*03:02-B1*03:03L HLA-DRB1*01:03L HLA-DRB1*04:02L HLA-DRB1*04:05L HLA-DQA1*01:02-B1*06:02L HLA-DRB1*01:02L HLA-DPA1*01:03-B1*03:01L HLA-DPA1*03:01-B1*04:02L HLA-DQA1*01:01-B1*05:01L
  REGION 1..13: note = CONT. FROM ABOVE: HLA-DRB1*12:01L HLA-DPA1*03:01-B1*105:01L HLA- DPA1*01:02-B1*04:01L HLA-DQA1*01:03-B1*06:01L HLA-DRB1*04:08L
VTQRNFYEPQIIT

SEQ ID NO: 10240 - protein, 12 aa, Severe acute respiratory syndrome coronavirus 2
  REGION 1..12: note = Table B: HLA-DQA1*03:02-B1*03:03L HLA-DQA1*01:02-B1*06:02L HLA-DQA1*05:01-B1*02:01L HLA-DPA1*03:01-B1*105:01L HLA-DQA1*03:01-B1*03:02L HLA-DQA1*01:03-B1*06:01L HLA-DQA1*02:01-B1*03:03L
RNFYEPQIITTD

SEQ ID NO: 10241 - protein, 11 aa, Severe acute respiratory syndrome coronavirus 2
  REGION 1..11: note = Table B: HLA-DQA1*03:02-B1*03:03L HLA-DRB1*04:03L HLA-DQA1*01-B1*05L HLA-DQA1*05:01-B1*02:01L HLA-DRB1*14:17L HLA-DQA1*01:03-B1*06:01L HLA-DQA1*02:01-B1*03:03L
FYEPQIITTDN

SEQ ID NO: 10242 - protein, 12 aa, Severe acute respiratory syndrome coronavirus 2
  REGION 1..12: note = Table B: HLA-DQA1*03:02-B1*03:03L HLA-DRB1*04:03L HLA-DQA1*01-B1*05L
YEPQIITTDNTF

SEQ ID NO: 10243 - protein, 12 aa, Severe acute respiratory syndrome coronavirus 2
  REGION 1..12: note = Table B: HLA-DQA1*03:02-B1*03:03L HLA-DRB1*04:03L HLA-DRB1*13:02L HLA-DRB1*04:02L HLA-DRB1*04:05L HLA-DRB4*03:01NL HLA-DRB1*08:77L HLA-DRB1*14:01L HLA-DQA1*01-B1*05L HLA-DRB1*04:10L HLA-DRB1*12:01L HLA-DRB1*12:02L
  REGION 1..12: note = CONT. FROM ABOVE: HLA-DQA1*03:01-B1*03:02L HLA-DRB1*14:54L HLA-D RB1*14:17L HLA-DRB1*16:01L HLA-DRB1*15:03L
EPQIITTDNTFV

SEQ ID NO: 10244 - protein, 12 aa, Severe acute respiratory syndrome coronavirus 2
  REGION 1..12: note = Table B: HLA-DQA1*03:02-B1*03:03L HLA-DRB1*13:02L HLA-DRB1*13:03L HLA-DRB1*04:02L HLA-DRB1*04:05L HLA-DRB4*03:01NL HLA-DRB1*08:77L HLA-DRB3*02:01L HLA-DRB1*14:01L HLA-DRB1*11:03L HLA-DRB1*11:04L HLA-DQA1*01-B1*05L HLA-DQA1*05:01-B1*02:01L
  REGION 1..12: note = CONT. FROM ABOVE: HLA-DRB1*04:10L HLA-DRB1*12:01L HLA-DRB1*12:02 L HLA-DQA1*03:01-B1*03:02L HLA-DRB1*14:54L HLA-DRB1*16:01L HLA-D QA1*02:01-B1*03:03L HLA-DRB1*15:03L
PQIITTDNTFVS

SEQ ID NO: 10245 - protein, 12 aa, Severe acute respiratory syndrome coronavirus 2
  REGION 1..12: note = Table B: HLA-DQA1*03:02-B1*03:03L HLA-DQA1*05:01-B1*03:01L HLA-DRB1*04:01L HLA-DRB1*01:03L HLA-DRB1*04:04L HLA-DRB1*04:05L HLA-DQA1*01:02-B1*06:02L HLA-DRB1*01:02L HLA-DRB1*08:04L HLA-DRB1*08:77L HLA-DRB3*02:01L HLA-DPA1*01:03-B1*03:01L
  REGION 1..12: note = CONT. FROM ABOVE: HLA-DRB1*11:03L HLA-DRB1*11:04L HLA-DRB1*14:02 L HLA-DQA1*01-B1*05L HLA-DQA1*05:05-B1*03:19L HLA-DRB4*01:01L HL A-DRB1*04:10L HLA-DRB1*12:02L HLA-DPA1*03:01-B1*105:01L HLA-DQA1 *03:01-B1*03:02L HLA-DQA1*05:05-B1*03:01L HLA-DRB1*10:01L
  REGION 1..12: note = CONT. FROM ABOVE: HLA-DRB1*04:08L HLA-DQA1*02:01-B1*03:03L HLA-D RB1*15:03L
IITTDNTFVSGN

SEQ ID NO: 10246 - protein, 12 aa, Severe acute respiratory syndrome coronavirus 2
  REGION 1..12: note = Table B: HLA-DQA1*03:02-B1*03:03L HLA-DQA1*05:01-B1*02:01L HLA-DQA1*03:01-B1*03:02L HLA-DQA1*01:03-B1*06:01L
DNTFVSGNCDVV

SEQ ID NO: 10247 - protein, 13 aa, Severe acute respiratory syndrome coronavirus 2
  REGION 1..13: note = Table B: HLA-DQA1*03:02-B1*03:03L HLA-DRB1*04:03L HLA-DQA1*05:01-B1*02:01L HLA-DQA1*03:01-B1*03:02L
NTFVSGNCDVVIG

SEQ ID NO: 10248 - protein, 10 aa, Severe acute respiratory syndrome coronavirus 2
  REGION 1..10: note = Table B: HLA-DQA1*03:02-B1*03:03M HLA-DQA1*05:01-B1*03:01L HLA-DRB1*13:03L HLA-DQA1*01:02-B1*06:02L HLA-DRB1*01:02L HLA-DPA1*03:01-B1*04:02L HLA-DRB1*14:01L HLA-DRB1*14:02L HLA-DRB1*08:01L HLA-DQA1*05:05-B1*03:19L
  REGION 1..10: note = CONT. FROM ABOVE: HLA-DQA1*05:01-B1*02:01L HLA-DPA1*01:03-B1*04: 01L HLA-DQA1*05:05-B1*03:116L HLA-DRB1*09:01L HLA-DPA1*01:03-B1* 04:02L HLA-DRB1*12:01L HLA-DPA1*02:01-B1*13:01L HLA-DPA1*03:01-B 1*105:01L HLA-DQA1*03:01-B1*03:02L HLA-DPA1*01:03-B1*104:01L
  REGION 1..10: note = CONT. FROM ABOVE: HLA-DPA1*01:02-B1*04:01L HLA-DRB1*10:01L HLA-D RB1*16:01L HLA-DQA1*01:03-B1*06:01L HLA-DRB1*08:03L HLA-DQA1*02: 01-B1*03:03L HLA-DRB1*15:03M
VVIGIVNNTV

SEQ ID NO: 10249 - protein, 12 aa, Severe acute respiratory syndrome coronavirus 2
  REGION 1..12: note = Table B: HLA-DQA1*03:02-B1*03:03L HLA-DQA1*05:01-B1*03:01L HLA-DRB1*04:03L HLA-DRB1*13:02L HLA-DRB1*04:02L HLA-DRB1*04:05L HLA-DRB1*01:02L HLA-DRB4*03:01NL HLA-DRB1*08:77L HLA-DRB3*02:01L HLA-DPA1*03:01-B1*04:02L HLA-DRB1*14:01L HLA-DQA1*01-B1*05L
  REGION 1..12: note = CONT. FROM ABOVE: HLA-DQA1*05:01-B1*02:01L HLA-DRB1*04:10L HLA-D RB1*12:01L HLA-DRB1*12:02L HLA-DPA1*03:01-B1*105:01L HLA-DQA1*03 :01-B1*03:02L HLA-DRB1*14:54L HLA-DRB1*14:17L HLA-DPA1*01:02-B1* 04:01L HLA-DRB1*16:01L HLA-DQA1*01:03-B1*06:01L
  REGION 1..12: note = CONT. FROM ABOVE: HLA-DQA1*02:01-B1*03:03L HLA-DRB1*15:03L
IGIVNNTVYDPL

SEQ ID NO: 10250 - protein, 12 aa, Severe acute respiratory syndrome coronavirus 2
  REGION 1..12: note = Table B: HLA-DQA1*03:02-B1*03:03L HLA-DRB1*04:03L HLA-DRB1*04:05L HLA-DQA1*01-B1*05L HLA-DPA1*02:01-B1*13:01L HLA-DQA1*03:01-B1*03:02L HLA-DRB1*16:01L HLA-DQA1*01:03-B1*06:01L HLA-DQA1*02:01-B1*03:03L
IVNNTVYDPLQP

SEQ ID NO: 10251 - protein, 12 aa, Severe acute respiratory syndrome coronavirus 2
  REGION 1..12: note = Table B: HLA-DQA1*03:02-B1*03:03L HLA-DRB1*04:03L HLA-DQA1*01-B1*05L HLA-DQA1*05:01-B1*02:01L HLA-DPA1*03:01-B1*105:01L HLA-DQA1*03:01-B1*03:02L HLA-DRB1*16:01L HLA-DQA1*01:03-B1*06:01L
  REGION 1..12: note = CONT. FROM ABOVE: HLA-DQA1*02:01-B1*03:03L
VNNTVYDPLQPE

SEQ ID NO: 10252 - protein, 10 aa, Severe acute respiratory syndrome coronavirus 2
  REGION 1..10: note = Table B: HLA-DQA1*03:02-B1*03:03H HLA-DQA1*05:01-B1*03:01M HLA-DRB1*04:01L HLA-DRB1*04:03L HLA-DRB1*13:02L HLA-DRB1*13:03L HLA-DRB1*01:03L HLA-DRB1*04:02L HLA-DRB1*04:05L HLA-DQA1*01:02-B1*06:02M HLA-DRB1*01:01L HLA-DRB1*01:02L
  REGION 1..10: note = CONT. FROM ABOVE: HLA-DRB1*08:77L HLA-DRB3*02:01L HLA-DPA1*01:03 -B1*03:01L HLA-DPA1*03:01-B1*04:02M HLA-DRB1*14:01L HLA-DRB1*14: 02M HLA-DRB1*08:01L HLA-DRB1*11:01L HLA-DQA1*01-B1*05L HLA-DQA1* 05:05-B1*03:19L HLA-DQA1*05:01-B1*02:01L HLA-DRB4*01:01L
  REGION 1..10: note = CONT. FROM ABOVE: HLA-DPA1*01:03-B1*04:01L HLA-DQA1*05:05-B1*03: 116M HLA-DRB1*09:01M HLA-DPA1*01:03-B1*04:02M HLA-DRB1*12:01L HL A-DPA1*02:01-B1*13:01M HLA-DPA1*03:01-B1*105:01M HLA-DQA1*03:01- B1*03:02M HLA-DPA1*01:03-B1*104:01L HLA-DPA1*01:02-B1*04:01L
  REGION 1..10: note = CONT. FROM ABOVE: HLA-DRB1*07:01L HLA-DRB1*10:01L HLA-DRB1*16:01 L HLA-DQA1*01:03-B1*06:01L HLA-DRB1*08:03L HLA-DQA1*02:01-B1*03: 03M HLA-DRB1*15:03M
TVYDPLQPEL

SEQ ID NO: 10253 - protein, 10 aa, Severe acute respiratory syndrome coronavirus 2
  REGION 1..10: note = Table B: HLA-DQA1*03:02-B1*03:03L HLA-DRB1*04:03L HLA-DRB1*04:05L HLA-DQA1*01-B1*05L HLA-DQA1*05:01-B1*02:01L HLA-DPA1*03:01-B1*105:01L HLA-DQA1*03:01-B1*03:02L HLA-DRB1*16:01L HLA-DQA1*01:03-B1*06:01L
  REGION 1..10: note = CONT. FROM ABOVE: HLA-DQA1*02:01-B1*03:03L HLA-DRB1*15:03L
VYDPLQPELD

SEQ ID NO: 10254 - protein, 13 aa, Severe acute respiratory syndrome coronavirus 2
  REGION 1..13: note = Table B: HLA-DQA1*03:02-B1*03:03L HLA-DRB1*04:02L HLA-DRB1*04:05L HLA-DQA1*01:01-B1*05:01L HLA-DRB1*04:10L HLA-DRB1*12:01L HLA-DRB1*14:17L HLA-DRB1*16:01L
DPLQPELDSFKEE

SEQ ID NO: 10255 - protein, 10 aa, Severe acute respiratory syndrome coronavirus 2
  REGION 1..10: note = Table B: HLA-DQA1*03:02-B1*03:03M HLA-DQA1*05:05-B1*03:19L HLA-DRB1*09:01L HLA-DQA1*03:01-B1*03:02L HLA-DPA1*01:03-B1*104:01L
PELDSFKEEL

SEQ ID NO: 10256 - protein, 10 aa, Severe acute respiratory syndrome coronavirus 2
  REGION 1..10: note = Table B: HLA-DQA1*03:02-B1*03:03L HLA-DQA1*05:01-B1*03:01L HLA-DRB1*04:03L HLA-DRB1*13:02L HLA-DRB1*13:03M HLA-DRB1*01:03L HLA-DQA1*01:02-B1*06:02M HLA-DRB4*03:01NL HLA-DRB1*08:77L HLA-DPA1*01:03-B1*03:01L HLA-DPA1*03:01-B1*04:02L
  REGION 1..10: note = CONT. FROM ABOVE: HLA-DRB1*03:01L HLA-DRB1*14:01L HLA-DRB1*14:02 L HLA-DRB5*01:01L HLA-DQA1*01-B1*05L HLA-DQA1*05:05-B1*03:19L HL A-DQA1*05:01-B1*02:01M HLA-DRB4*01:01L HLA-DPA1*01:03-B1*04:01L HLA-DQA1*05:05-B1*03:116L HLA-DPA1*01:03-B1*04:02L
  REGION 1..10: note = CONT. FROM ABOVE: HLA-DRB1*12:01L HLA-DPA1*02:01-B1*13:01L HLA-D PA1*03:01-B1*105:01M HLA-DPA1*01:03-B1*104:01L HLA-DQA1*05:05-B1 *03:01L HLA-DPA1*01:02-B1*04:01L HLA-DRB1*10:01L HLA-DRB1*16:01L HLA-DQA1*01:03-B1*06:01L HLA-DRB1*08:02L
  REGION 1..10: note = CONT. FROM ABOVE: HLA-DQA1*02:01-B1*03:03L HLA-DRB1*15:03L
DSFKEELDKY

SEQ ID NO: 10257 - protein, 11 aa, Severe acute respiratory syndrome coronavirus 2
  REGION 1..11: note = Table B: HLA-DQA1*03:02-B1*03:03L HLA-DQA1*05:01-B1*03:01L HLA-DRB1*13:02L HLA-DRB1*13:03L HLA-DRB1*01:03L HLA-DRB1*04:02L HLA-DRB1*04:05L HLA-DQA1*01:02-B1*06:02L HLA-DRB1*01:02L HLA-DRB4*03:01NL HLA-DRB1*08:04L HLA-DPA1*01:03-B1*03:01L
  REGION 1..11: note = CONT. FROM ABOVE: HLA-DRB1*14:01L HLA-DRB1*14:02L HLA-DQA1*01:01 -B1*05:01L HLA-DRB1*08:01L HLA-DQA1*01-B1*05L HLA-DQA1*05:05-B1* 03:19L HLA-DQA1*05:01-B1*02:01L HLA-DRB1*04:10L HLA-DRB1*12:01L HLA-DRB1*12:02L HLA-DPA1*02:01-B1*13:01L
  REGION 1..11: note = CONT. FROM ABOVE: HLA-DPA1*03:01-B1*105:01L HLA-DRB1*14:54L HLA- DQA1*05:05-B1*03:01L HLA-DRB1*14:17L HLA-DPA1*01:02-B1*04:01L HL A-DQA1*01:03-B1*06:01L HLA-DRB1*04:08L HLA-DRB1*15:03L
YFKNHTSPDVD

SEQ ID NO: 10258 - protein, 12 aa, Severe acute respiratory syndrome coronavirus 2
  REGION 1..12: note = Table B: HLA-DQA1*03:02-B1*03:03L HLA-DQA1*05:01-B1*02:01L HLA-DQA1*03:01-B1*03:02L HLA-DQA1*01:03-B1*06:01L HLA-DQA1*02:01-B1*03:03L
NHTSPDVDLGDI

SEQ ID NO: 10259 - protein, 12 aa, Severe acute respiratory syndrome coronavirus 2
  REGION 1..12: note = Table B: HLA-DQA1*03:02-B1*03:03L HLA-DQA1*03:01-B1*03:02L HLA-DQA1*01:03-B1*06:01L
PDVDLGDISGIN

SEQ ID NO: 10260 - protein, 12 aa, Severe acute respiratory syndrome coronavirus 2
  REGION 1..12: note = Table B: HLA-DQA1*03:02-B1*03:03L HLA-DRB1*04:03L HLA-DQA1*05:01-B1*02:01L HLA-DQA1*03:01-B1*03:02L HLA-DQA1*02:01-B1*03:03L
VDLGDISGINAS

SEQ ID NO: 10261 - protein, 10 aa, Severe acute respiratory syndrome coronavirus 2
  REGION 1..10: note = Table B: HLA-DQA1*03:02-B1*03:03L HLA-DRB1*11:02L HLA-DQA1*05:05-B1*03:19M HLA-DRB1*09:01L HLA-DQA1*03:01-B1*03:02L HLA-DPA1*01:03-B1*104:01L HLA-DQA1*02:01-B1*03:03L
GDISGINASV

SEQ ID NO: 10262 - protein, 10 aa, Severe acute respiratory syndrome coronavirus 2
  REGION 1..10: note = Table B: HLA-DQA1*03:02-B1*03:03L HLA-DQA1*05:01-B1*03:01L HLA-DQA1*05:05-B1*03:19L HLA-DQA1*03:01-B1*03:02L HLA-DQA1*05:05-B1*03:01L HLA-DQA1*02:01-B1*03:03L
ISGINASVVN

SEQ ID NO: 10263 - protein, 10 aa, Severe acute respiratory syndrome coronavirus 2
  REGION 1..10: note = Table B: HLA-DQA1*03:02-B1*03:03L HLA-DQA1*05:01-B1*03:01L HLA-DRB1*04:01L HLA-DRB1*04:03L HLA-DRB1*13:02L HLA-DRB1*13:03L HLA-DRB1*01:03L HLA-DRB1*04:02L HLA-DRB1*04:04L HLA-DRB1*04:05L HLA-DQA1*01:02-B1*06:02M HLA-DRB1*01:02L HLA-DRB4*03:01NL
  REGION 1..10: note = CONT. FROM ABOVE: HLA-DRB1*08:77L HLA-DRB1*14:01L HLA-DRB1*11:04 L HLA-DRB1*14:02L HLA-DQA1*01:01-B1*05:01L HLA-DRB1*08:01L HLA-D RB5*01:01L HLA-DQA1*05:05-B1*03:19L HLA-DRB4*02:01NL HLA-DQA1*05 :01-B1*02:01L HLA-DPA1*01:03-B1*04:02L HLA-DRB1*12:01L
  REGION 1..10: note = CONT. FROM ABOVE: HLA-DRB1*12:02L HLA-DPA1*03:01-B1*105:01L HLA- DQA1*03:01-B1*03:02M HLA-DRB1*14:54L HLA-DQA1*05:05-B1*03:01M HL A-DRB1*14:17L HLA-DRB1*16:01L HLA-DQA1*01:03-B1*06:01M HLA-DRB1* 04:08L HLA-DRB1*08:03L HLA-DQA1*02:01-B1*03:03M
INASVVNIQK

SEQ ID NO: 10264 - protein, 10 aa, Severe acute respiratory syndrome coronavirus 2
  REGION 1..10: note = Table B: HLA-DQA1*03:02-B1*03:03L HLA-DQA1*05:01-B1*03:01L HLA-DRB1*04:03L HLA-DRB1*04:02L HLA-DQA1*01:02-B1*06:02L HLA-DQA1*05:05-B1*03:19L HLA-DPA1*03:01-B1*105:01L HLA-DQA1*03:01-B1*03:02L HLA-DQA1*05:05-B1*03:01L
  REGION 1..10: note = CONT. FROM ABOVE: HLA-DQA1*01:03-B1*06:01L HLA-DQA1*02:01-B1*03: 03L
NASVVNIQKE

SEQ ID NO: 10265 - protein, 10 aa, Severe acute respiratory syndrome coronavirus 2
  REGION 1..10: note = Table B: HLA-DQA1*03:02-B1*03:03L HLA-DQA1*05:01-B1*03:01L HLA-DRB1*04:03L HLA-DRB1*04:02L HLA-DQA1*01:02-B1*06:02L HLA-DQA1*05:05-B1*03:19L HLA-DQA1*05:01-B1*02:01L HLA-DPA1*03:01-B1*105:01L HLA-DQA1*03:01-B1*03:02L
  REGION 1..10: note = CONT. FROM ABOVE: HLA-DQA1*05:05-B1*03:01L HLA-DRB1*14:17L HLA-D QA1*01:03-B1*06:01L HLA-DQA1*02:01-B1*03:03L
SVVNIQKEID

SEQ ID NO: 10266 - protein, 10 aa, Severe acute respiratory syndrome coronavirus 2
  REGION 1..10: note = Table B: HLA-DQA1*03:02-B1*03:03L HLA-DQA1*05:01-B1*03:01L HLA-DRB1*04:03L HLA-DRB1*13:02L HLA-DRB1*13:03M HLA-DRB1*01:03L HLA-DRB1*04:02M HLA-DRB1*04:04L HLA-DRB1*04:05L HLA-DQA1*01:02-B1*06:02L HLA-DRB1*01:02L HLA-DRB4*03:01NL
  REGION 1..10: note = CONT. FROM ABOVE: HLA-DRB1*08:04L HLA-DRB1*14:01L HLA-DRB1*11:04 L HLA-DQA1*01:01-B1*05:01L HLA-DRB1*08:01M HLA-DRB1*11:01L HLA-D RB1*04:10L HLA-DRB1*12:01L HLA-DRB3*01:01L HLA-DQA1*03:01-B1*03: 02L HLA-DRB1*14:54L HLA-DQA1*05:05-B1*03:01L HLA-DRB1*14:17L
  REGION 1..10: note = CONT. FROM ABOVE: HLA-DPA1*01:02-B1*04:01L HLA-DRB1*10:01L HLA-D RB1*16:01L HLA-DQA1*01:03-B1*06:01L HLA-DRB1*04:08L HLA-DRB1*08: 03L HLA-DQA1*02:01-B1*03:03L
VVNIQKEIDR

SEQ ID NO: 10267 - protein, 10 aa, Severe acute respiratory syndrome coronavirus 2
  REGION 1..10: note = Table B: HLA-DQA1*03:02-B1*03:03L HLA-DQA1*05:05-B1*03:19L HLA-DRB1*09:01L HLA-DPA1*01:03-B1*04:02L HLA-DQA1*03:01-B1*03:02L HLA-DPA1*01:03-B1*104:01L
KEIDRLNEVA

SEQ ID NO: 10268 - protein, 12 aa, Severe acute respiratory syndrome coronavirus 2
  REGION 1..12: note = Table B: HLA-DQA1*03:02-B1*03:03L HLA-DQA1*05:01-B1*03:01L HLA-DRB1*04:03L HLA-DRB1*13:02L HLA-DRB1*13:03L HLA-DRB1*04:05L HLA-DQA1*01:02-B1*06:02L HLA-DRB1*01:02L HLA-DPA1*01:03-B1*03:01L HLA-DRB1*14:01L HLA-DRB1*08:01L
  REGION 1..12: note = CONT. FROM ABOVE: HLA-DQA1*05:01-B1*02:01L HLA-DRB1*12:01L HLA-D PA1*02:01-B1*13:01L HLA-DPA1*03:01-B1*105:01L HLA-DRB1*14:54L HL A-DPA1*01:02-B1*04:01L HLA-DRB1*16:01L HLA-DQA1*01:03-B1*06:01L HLA-DQA1*02:01-B1*03:03L HLA-DRB1*15:03L
IDRLNEVAKNLN

SEQ ID NO: 10269 - protein, 10 aa, Severe acute respiratory syndrome coronavirus 2
  REGION 1..10: note = Table B: HLA-DQA1*03:02-B1*03:03L HLA-DQA1*03:01-B1*03:02L
NEVAKNLNES

SEQ ID NO: 10270 - protein, 10 aa, Severe acute respiratory syndrome coronavirus 2
  REGION 1..10: note = Table B: HLA-DQA1*03:02-B1*03:03M HLA-DQA1*05:01-B1*03:01L HLA-DRB1*13:02L HLA-DRB1*13:03M HLA-DRB1*01:03L HLA-DRB1*04:02L HLA-DRB1*04:05L HLA-DQA1*01:02-B1*06:02M HLA-DRB1*01:01L HLA-DRB1*01:02M HLA-DRB4*03:01NL HLA-DRB1*08:77L HLA-DRB3*02:01L
  REGION 1..10: note = CONT. FROM ABOVE: HLA-DPA1*01:03-B1*03:01L HLA-DPA1*03:01-B1*04: 02L HLA-DRB1*03:01L HLA-DRB1*14:01L HLA-DRB1*11:04L HLA-DRB1*14: 02L HLA-DRB1*08:01L HLA-DRB1*11:01L HLA-DRB5*01:01L HLA-DQA1*01- B1*05L HLA-DQA1*05:05-B1*03:19L HLA-DQA1*05:01-B1*02:01M
  REGION 1..10: note = CONT. FROM ABOVE: HLA-DRB4*01:01L HLA-DPA1*01:03-B1*04:01M HLA-D QA1*05:05-B1*03:116L HLA-DRB1*09:01L HLA-DPA1*01:03-B1*04:02L HL A-DRB1*12:01L HLA-DPA1*02:01-B1*13:01L HLA-DPA1*03:01-B1*105:01M HLA-DQA1*03:01-B1*03:02L HLA-DPA1*01:03-B1*104:01L
  REGION 1..10: note = CONT. FROM ABOVE: HLA-DQA1*05:05-B1*03:01L HLA-DPA1*01:02-B1*04: 01L HLA-DRB1*07:01L HLA-DRB1*10:01L HLA-DRB1*16:01L HLA-DQA1*01: 03-B1*06:01L HLA-DRB1*08:03L HLA-DQA1*02:01-B1*03:03L HLA-DRB1*1 5:01L HLA-DRB1*15:03M
EVAKNLNESL

SEQ ID NO: 10271 - protein, 10 aa, Severe acute respiratory syndrome coronavirus 2
  REGION 1..10: note = Table B: HLA-DQA1*03:02-B1*03:03L
KNLNESLIDL

SEQ ID NO: 10272 - protein, 10 aa, Severe acute respiratory syndrome coronavirus 2
  REGION 1..10: note = Table B: HLA-DQA1*03:02-B1*03:03M HLA-DRB1*11:02L HLA-DQA1*05:05-B1*03:19M HLA-DQA1*05:05-B1*03:116L HLA-DRB1*09:01L HLA-DQA1*03:01-B1*03:02M HLA-DPA1*01:03-B1*104:01L
NESLIDLQEL

SEQ ID NO: 10273 - protein, 11 aa, Severe acute respiratory syndrome coronavirus 2
  REGION 1..11: note = Table B: HLA-DQA1*03:02-B1*03:03L HLA-DRB1*04:01L HLA-DRB1*11:01L HLA-DRB1*09:01L HLA-DPA1*02:01-B1*13:01L HLA-DRB1*08:03L
SLIDLQELGKY

SEQ ID NO: 10274 - protein, 11 aa, Severe acute respiratory syndrome coronavirus 2
  REGION 1..11: note = Table B: HLA-DQA1*03:02-B1*03:03L HLA-DRB1*14:01L HLA-DPA1*03:01-B1*105:01L HLA-DRB1*14:17L HLA-DQA1*01:03-B1*06:01L
LIDLQELGKYE

SEQ ID NO: 10275 - protein, 12 aa, Severe acute respiratory syndrome coronavirus 2
  REGION 1..12: note = Table B: HLA-DQA1*03:02-B1*03:03L HLA-DPA1*02:01-B1*13:01L HLA-DQA1*05:05-B1*03:01L HLA-DPA1*01:02-B1*04:01L HLA-DQA1*01:03-B1*06:01L
IDLQELGKYEQY

SEQ ID NO: 10276 - protein, 10 aa, Severe acute respiratory syndrome coronavirus 2
  REGION 1..10: note = Table B: HLA-DQA1*03:02-B1*03:03L HLA-DRB1*11:02L HLA-DQA1*05:05-B1*03:19M HLA-DPA1*01:03-B1*104:01M
QELGKYEQYI

SEQ ID NO: 10277 - protein, 10 aa, Severe acute respiratory syndrome coronavirus 2
  REGION 1..10: note = Table B: HLA-DQA1*03:02-B1*03:03L HLA-DQA1*05:01-B1*03:01L HLA-DQA1*01:02-B1*06:02L HLA-DRB1*08:77L HLA-DPA1*01:03-B1*03:01L HLA-DPA1*03:01-B1*04:02L HLA-DRB1*03:01L HLA-DRB1*11:02L HLA-DQA1*01-B1*05L
  REGION 1..10: note = CONT. FROM ABOVE: HLA-DQA1*05:05-B1*03:19M HLA-DQA1*05:01-B1*02: 01L HLA-DRB4*01:01L HLA-DPA1*01:03-B1*04:01L HLA-DQA1*05:05-B1*0 3:116L HLA-DPA1*01:03-B1*04:02L HLA-DRB1*12:01L HLA-DPA1*02:01-B 1*13:01L HLA-DPA1*01:03-B1*104:01L HLA-DPA1*01:02-B1*04:01L
  REGION 1..10: note = CONT. FROM ABOVE: HLA-DRB1*10:01L HLA-DRB1*16:01L HLA-DQA1*01:03 -B1*06:01L HLA-DQA1*02:01-B1*03:03L HLA-DRB1*15:03L
YEQYIKWPWY

SEQ ID NO: 10278 - protein, 10 aa, Severe acute respiratory syndrome coronavirus 2
  REGION 1..10: note = Table B: HLA-DQA1*03:02-B1*03:03L HLA-DQA1*05:05-B1*03:19L
GLIAIVMVTI

SEQ ID NO: 10279 - protein, 10 aa, Severe acute respiratory syndrome coronavirus 2
  REGION 1..10: note = Table B: HLA-DQA1*03:02-B1*03:03L HLA-DQA1*01-B1*05L HLA-DQA1*05:01-B1*02:01L HLA-DQA1*03:01-B1*03:02L
FDEDDSEPVL

SEQ ID NO: 10280 - protein, 10 aa, Severe acute respiratory syndrome coronavirus 2
  REGION 1..10: note = Table B: HLA-DQA1*03:02-B1*03:03L HLA-DRB1*13:03L HLA-DQA1*01-B1*05L HLA-DQA1*05:01-B1*02:01L HLA-DQA1*03:01-B1*03:02L
DEDDSEPVLK

SEQ ID NO: 10281 - protein, 10 aa, Severe acute respiratory syndrome coronavirus 2
  REGION 1..10: note = Table B: HLA-DQA1*03:02-B1*03:03M HLA-DQA1*05:01-B1*03:01L HLA-DRB1*08:77L HLA-DQA1*05:05-B1*03:19M HLA-DRB4*01:01L HLA-DPA1*01:03-B1*04:01L HLA-DQA1*05:05-B1*03:116L HLA-DRB1*09:01L HLA-DPA1*01:03-B1*04:02L
  REGION 1..10: note = CONT. FROM ABOVE: HLA-DQA1*03:01-B1*03:02M HLA-DPA1*01:03-B1*104 :01L HLA-DPA1*01:02-B1*04:01L HLA-DRB1*10:01L HLA-DRB1*16:01L
SEPVLKGVKL

SEQ ID NO: 10282 - protein, 10 aa, Severe acute respiratory syndrome coronavirus 2
  REGION 1..10: note = Table B: HLA-DQA1*03:02-B1*03:03M HLA-DQA1*05:01-B1*03:01M HLA-DRB1*04:01L HLA-DRB1*04:03L HLA-DRB1*13:02L HLA-DRB1*13:03L HLA-DRB1*01:03L HLA-DRB1*04:02L HLA-DRB1*04:04L HLA-DRB1*04:05L HLA-DQA1*01:02-B1*06:02M HLA-DRB1*01:01L HLA-DRB1*01:02L
  REGION 1..10: note = CONT. FROM ABOVE: HLA-DRB1*08:77L HLA-DRB3*02:01L HLA-DPA1*01:03 -B1*03:01L HLA-DPA1*03:01-B1*04:02M HLA-DRB1*03:01L HLA-DRB1*14: 01M HLA-DRB1*14:02M HLA-DQA1*01:01-B1*05:01L HLA-DRB1*08:01M HLA -DRB1*11:01L HLA-DQA1*01-B1*05L HLA-DQA1*05:05-B1*03:19L
  REGION 1..10: note = CONT. FROM ABOVE: HLA-DQA1*05:01-B1*02:01L HLA-DRB4*01:01L HLA-D PA1*01:03-B1*04:01L HLA-DQA1*05:05-B1*03:116M HLA-DRB1*09:01M HL A-DPA1*01:03-B1*04:02M HLA-DRB1*12:01L HLA-DPA1*02:01-B1*13:01L HLA-DPA1*03:01-B1*105:01M HLA-DQA1*03:01-B1*03:02M
  REGION 1..10: note = CONT. FROM ABOVE: HLA-DPA1*01:03-B1*104:01L HLA-DPA1*01:02-B1*04 :01L HLA-DRB1*07:01L HLA-DRB1*10:01L HLA-DRB1*16:01L HLA-DQA1*01 :03-B1*06:01L HLA-DRB1*08:03L HLA-DQA1*02:01-B1*03:03M HLA-DRB1* 15:01L HLA-DRB1*15:03M
RIFTIGTVTL

SEQ ID NO: 10283 - protein, 12 aa, Severe acute respiratory syndrome coronavirus 2
  REGION 1..12: note = Table B: HLA-DQA1*03:02-B1*03:03L HLA-DQA1*05:01-B1*03:01L HLA-DQA1*05:05-B1*03:19L HLA-DPA1*03:01-B1*105:01L HLA-DQA1*05:05-B1*03:01L
TIGTVTLKQGEI

SEQ ID NO: 10284 - protein, 12 aa, Severe acute respiratory syndrome coronavirus 2
  REGION 1..12: note = Table B: HLA-DQA1*03:02-B1*03:03L HLA-DRB1*01:03L HLA-DRB1*04:02L HLA-DRB1*04:05L HLA-DRB1*01:02L HLA-DQA1*01:01-B1*05:01L HLA-DRB1*08:01L HLA-DQA1*05:05-B1*03:19L HLA-DQA1*05:01-B1*02:01L
  REGION 1..12: note = CONT. FROM ABOVE: HLA-DRB1*12:01L HLA-DPA1*03:01-B1*105:01L HLA- DQA1*05:05-B1*03:01L HLA-DRB1*14:17L HLA-DRB1*16:01L HLA-DRB1*04 :08L
IGTVTLKQGEIK

SEQ ID NO: 10285 - protein, 14 aa, Severe acute respiratory syndrome coronavirus 2
  REGION 1..14: note = Table B: HLA-DQA1*03:02-B1*03:03L HLA-DRB1*01:03L HLA-DRB1*04:02L HLA-DRB1*04:05L HLA-DRB1*01:02L HLA-DQA1*01:01-B1*05:01L HLA-DRB1*08:01L HLA-DQA1*05:05-B1*03:19L HLA-DQA1*05:01-B1*02:01L
  REGION 1..14: note = CONT. FROM ABOVE: HLA-DRB1*12:01L HLA-DPA1*03:01-B1*105:01L HLA- DRB1*14:17L HLA-DRB1*16:01L HLA-DRB1*04:08L HLA-DRB1*15:03L
VTLKQGEIKDATPS

SEQ ID NO: 10286 - protein, 10 aa, Severe acute respiratory syndrome coronavirus 2
  REGION 1..10: note = Table B: HLA-DQA1*03:02-B1*03:03L HLA-DQA1*01-B1*05L HLA-DQA1*05:05-B1*03:19L HLA-DQA1*03:01-B1*03:02L
GEIKDATPSD

SEQ ID NO: 10287 - protein, 10 aa, Severe acute respiratory syndrome coronavirus 2
  REGION 1..10: note = Table B: HLA-DQA1*03:02-B1*03:03L HLA-DQA1*05:01-B1*03:01L HLA-DRB1*13:02L HLA-DRB1*13:03M HLA-DRB1*01:03L HLA-DQA1*01:02-B1*06:02M HLA-DRB1*01:02L HLA-DRB4*03:01NL HLA-DRB1*08:77L HLA-DPA1*01:03-B1*03:01L
  REGION 1..10: note = CONT. FROM ABOVE: HLA-DPA1*03:01-B1*04:02L HLA-DRB1*03:01L HLA-D RB1*14:01L HLA-DRB1*14:02L HLA-DRB5*01:01L HLA-DQA1*01-B1*05L HL A-DQA1*05:05-B1*03:19L HLA-DQA1*05:01-B1*02:01L HLA-DPA1*01:03-B 1*04:01L HLA-DQA1*05:05-B1*03:116L HLA-DPA1*01:03-B1*04:02L
  REGION 1..10: note = CONT. FROM ABOVE: HLA-DRB1*12:01L HLA-DPA1*02:01-B1*13:01L HLA-D PA1*03:01-B1*105:01M HLA-DQA1*03:01-B1*03:02L HLA-DQA1*05:05-B1* 03:01L HLA-DPA1*01:02-B1*04:01L HLA-DRB1*16:01L HLA-DQA1*01:03-B 1*06:01L HLA-DQA1*02:01-B1*03:03L HLA-DRB1*15:03L
EIKDATPSDF

SEQ ID NO: 10288 - protein, 11 aa, Severe acute respiratory syndrome coronavirus 2
  REGION 1..11: note = Table B: HLA-DQA1*03:02-B1*03:03L HLA-DRB1*04:03L HLA-DQA1*01:01-B1*05:01L HLA-DQA1*01-B1*05L HLA-DQA1*05:01-B1*02:01L HLA-DRB1*14:17L HLA-DRB1*16:01L HLA-DQA1*01:03-B1*06:01L HLA-DQA1*02:01-B1*03:03L
IKDATPSDFVR

SEQ ID NO: 10289 - protein, 10 aa, Severe acute respiratory syndrome coronavirus 2
  REGION 1..10: note = Table B: HLA-DQA1*03:02-B1*03:03L HLA-DRB1*13:03L HLA-DPA1*03:01-B1*105:01L HLA-DQA1*03:01-B1*03:02L HLA-DQA1*02:01-B1*03:03L
DATPSDFVRA

SEQ ID NO: 10290 - protein, 11 aa, Severe acute respiratory syndrome coronavirus 2
  REGION 1..11: note = Table B: HLA-DQA1*03:02-B1*03:03L HLA-DRB1*04:03L HLA-DRB1*04:02L HLA-DQA1*01-B1*05L HLA-DQA1*03:01-B1*03:02L HLA-DRB1*14:17L HLA-DQA1*02:01-B1*03:03L
TPSDFVRATAT

SEQ ID NO: 10291 - protein, 10 aa, Severe acute respiratory syndrome coronavirus 2
  REGION 1..10: note = Table B: HLA-DQA1*03:02-B1*03:03L HLA-DQA1*05:01-B1*03:01L HLA-DRB1*04:03L HLA-DRB1*13:02L HLA-DRB1*13:03L HLA-DRB1*01:03L HLA-DRB1*04:02L HLA-DRB1*04:05L HLA-DQA1*01:02-B1*06:02L HLA-DRB1*01:02L HLA-DRB4*03:01NL HLA-DRB1*08:77L HLA-DRB3*02:01L
  REGION 1..10: note = CONT. FROM ABOVE: HLA-DPA1*01:03-B1*03:01L HLA-DPA1*03:01-B1*04: 02L HLA-DRB1*14:01L HLA-DRB1*11:03L HLA-DRB1*11:04L HLA-DRB5*01: 01L HLA-DQA1*01-B1*05L HLA-DQA1*05:05-B1*03:19L HLA-DQA1*05:01-B 1*02:01L HLA-DPA1*01:03-B1*04:01L HLA-DRB1*04:10L
  REGION 1..10: note = CONT. FROM ABOVE: HLA-DRB1*09:01L HLA-DRB1*12:01L HLA-DRB1*12:02 L HLA-DPA1*02:01-B1*13:01L HLA-DPA1*03:01-B1*105:01L HLA-DQA1*03 :01-B1*03:02L HLA-DRB1*14:54L HLA-DQA1*05:05-B1*03:01L HLA-DRB1* 14:17L HLA-DPA1*01:02-B1*04:01L HLA-DRB1*07:01L HLA-DRB1*16:01L
  REGION 1..10: note = CONT. FROM ABOVE: HLA-DQA1*01:03-B1*06:01L HLA-DRB1*04:08L HLA-D QA1*02:01-B1*03:03L HLA-DRB1*15:03L
VRATATIPIQ

SEQ ID NO: 10292 - protein, 10 aa, Severe acute respiratory syndrome coronavirus 2
  REGION 1..10: note = Table B: HLA-DQA1*03:02-B1*03:03L HLA-DQA1*05:01-B1*03:01L HLA-DRB1*04:03L HLA-DQA1*01:02-B1*06:02L HLA-DQA1*05:05-B1*03:19L HLA-DQA1*05:01-B1*02:01L HLA-DPA1*03:01-B1*105:01L HLA-DQA1*03:01-B1*03:02L
  REGION 1..10: note = CONT. FROM ABOVE: HLA-DQA1*05:05-B1*03:01L HLA-DQA1*01:03-B1*06: 01L HLA-DQA1*02:01-B1*03:03L
ATATIPIQAS

SEQ ID NO: 10293 - protein, 12 aa, Severe acute respiratory syndrome coronavirus 2
  REGION 1..12: note = Table B: HLA-DQA1*03:02-B1*03:03L HLA-DQA1*05:01-B1*03:01L HLA-DRB1*04:02L HLA-DQA1*05:05-B1*03:19L HLA-DQA1*05:01-B1*02:01L HLA-DRB1*04:10L HLA-DRB1*12:01L HLA-DPA1*03:01-B1*105:01L HLA-DQA1*05:05-B1*03:01L
  REGION 1..12: note = CONT. FROM ABOVE: HLA-DQA1*01:03-B1*06:01L HLA-DRB1*15:03L
ATIPIQASLPFG

SEQ ID NO: 10294 - protein, 11 aa, Severe acute respiratory syndrome coronavirus 2
  REGION 1..11: note = Table B: HLA-DQA1*03:02-B1*03:03L HLA-DQA1*05:01-B1*03:01L HLA-DRB1*04:03L HLA-DRB1*13:03L HLA-DRB1*01:03L HLA-DRB1*08:77L HLA-DPA1*01:03-B1*03:01L HLA-DPA1*03:01-B1*04:02L HLA-DRB1*14:01L HLA-DRB1*14:02L HLA-DQA1*01-B1*05L
  REGION 1..11: note = CONT. FROM ABOVE: HLA-DQA1*05:01-B1*02:01L HLA-DRB4*01:01L HLA-D PA1*01:03-B1*04:01L HLA-DQA1*05:05-B1*03:116L HLA-DPA1*01:03-B1* 04:02L HLA-DRB1*12:01L HLA-DPA1*01:03-B1*104:01L HLA-DQA1*05:05- B1*03:01L HLA-DPA1*01:02-B1*04:01L HLA-DRB1*10:01L
  REGION 1..11: note = CONT. FROM ABOVE: HLA-DRB1*16:01L
IPIQASLPFGW

SEQ ID NO: 10295 - protein, 10 aa, Severe acute respiratory syndrome coronavirus 2
  REGION 1..10: note = Table B: HLA-DQA1*03:02-B1*03:03L HLA-DQA1*05:01-B1*03:01L HLA-DRB1*04:05L HLA-DQA1*01:02-B1*06:02L HLA-DRB1*01:01L HLA-DRB1*01:02L HLA-DPA1*03:01-B1*04:02L HLA-DRB1*14:01L HLA-DQA1*01-B1*05L HLA-DQA1*05:05-B1*03:19L
  REGION 1..10: note = CONT. FROM ABOVE: HLA-DQA1*05:05-B1*03:116L HLA-DPA1*02:01-B1*13 :01M HLA-DPA1*03:01-B1*105:01M HLA-DPA1*01:02-B1*04:01L HLA-DRB1 *16:01L HLA-DQA1*01:03-B1*06:01L HLA-DRB1*08:03L HLA-DQA1*02:01- B1*03:03L HLA-DRB1*15:03L
LPFGWLIVGV

SEQ ID NO: 10296 - protein, 12 aa, Severe acute respiratory syndrome coronavirus 2
  REGION 1..12: note = Table B: HLA-DQA1*03:02-B1*03:03L HLA-DQA1*05:01-B1*03:01L HLA-DRB1*04:02L HLA-DRB1*04:04L HLA-DRB1*04:05L HLA-DQA1*01:02-B1*06:02L HLA-DRB1*01:02L HLA-DRB4*03:01NL HLA-DQA1*01-B1*05L HLA-DQA1*05:05-B1*03:19L HLA-DRB1*04:10L
  REGION 1..12: note = CONT. FROM ABOVE: HLA-DRB1*12:01L HLA-DPA1*03:01-B1*105:01L HLA- DQA1*03:01-B1*03:02L HLA-DQA1*05:05-B1*03:01L HLA-DRB1*16:01L HL A-DQA1*01:03-B1*06:01L HLA-DRB1*04:08L HLA-DQA1*02:01-B1*03:03L HLA-DRB1*15:03L
VALLAVFQSASK

SEQ ID NO: 10297 - protein, 10 aa, Severe acute respiratory syndrome coronavirus 2
  REGION 1..10: note = Table B: HLA-DQA1*03:02-B1*03:03L HLA-DQA1*05:01-B1*03:01L HLA-DRB1*04:03L HLA-DRB1*13:02L HLA-DRB1*13:03L HLA-DRB1*01:03L HLA-DRB1*04:02L HLA-DRB1*04:05L HLA-DRB1*01:02L HLA-DRB4*03:01NL HLA-DRB1*08:04L HLA-DRB1*08:77L HLA-DRB3*02:01L
  REGION 1..10: note = CONT. FROM ABOVE: HLA-DPA1*03:01-B1*04:02L HLA-DRB1*14:01L HLA-D RB1*11:03L HLA-DRB1*14:02L HLA-DRB1*08:01L HLA-DQA1*05:05-B1*03: 19L HLA-DQA1*05:01-B1*02:01L HLA-DRB1*09:01L HLA-DRB1*12:01L HLA -DRB1*12:02L HLA-DPA1*03:01-B1*105:01L HLA-DQA1*03:01-B1*03:02L
  REGION 1..10: note = CONT. FROM ABOVE: HLA-DRB1*14:54L HLA-DQA1*05:05-B1*03:01L HLA-D RB1*14:17L HLA-DPA1*01:02-B1*04:01L HLA-DRB1*07:01L HLA-DRB1*16: 01L HLA-DQA1*01:03-B1*06:01L HLA-DRB1*04:08L HLA-DQA1*02:01-B1*0 3:03L HLA-DRB1*15:03L
VFQSASKIIT

SEQ ID NO: 10298 - protein, 10 aa, Severe acute respiratory syndrome coronavirus 2
  REGION 1..10: note = Table B: HLA-DQA1*03:02-B1*03:03M HLA-DQA1*05:01-B1*03:01L HLA-DRB1*13:02L HLA-DRB1*13:03L HLA-DRB1*01:03L HLA-DRB1*04:02L HLA-DQA1*01:02-B1*06:02L HLA-DRB1*01:02L HLA-DRB1*08:77L HLA-DRB3*02:01L HLA-DPA1*03:01-B1*04:02L HLA-DRB1*14:01L
  REGION 1..10: note = CONT. FROM ABOVE: HLA-DRB1*14:02L HLA-DRB1*08:01L HLA-DQA1*01-B1 *05L HLA-DQA1*05:05-B1*03:19L HLA-DQA1*05:01-B1*02:01L HLA-DPA1* 01:03-B1*04:01L HLA-DQA1*05:05-B1*03:116L HLA-DRB1*09:01L HLA-DP A1*01:03-B1*04:02L HLA-DRB1*12:01L HLA-DPA1*02:01-B1*13:01L
  REGION 1..10: note = CONT. FROM ABOVE: HLA-DPA1*03:01-B1*105:01L HLA-DQA1*03:01-B1*03 :02L HLA-DPA1*01:03-B1*104:01L HLA-DPA1*01:02-B1*04:01L HLA-DRB1 *10:01L HLA-DRB1*16:01L HLA-DQA1*01:03-B1*06:01L HLA-DRB1*08:03L HLA-DQA1*02:01-B1*03:03L HLA-DRB1*15:03L
FQSASKIITL

SEQ ID NO: 10299 - protein, 10 aa, Severe acute respiratory syndrome coronavirus 2
  REGION 1..10: note = Table B: HLA-DQA1*03:02-B1*03:03L HLA-DQA1*05:01-B1*03:01L HLA-DRB1*04:03L HLA-DRB1*01:03L HLA-DRB1*04:02L HLA-DQA1*01:02-B1*06:02L HLA-DRB1*01:02L HLA-DQA1*05:01-B1*02:01L HLA-DRB1*12:01L
  REGION 1..10: note = CONT. FROM ABOVE: HLA-DPA1*03:01-B1*105:01L HLA-DQA1*03:01-B1*03 :02L HLA-DQA1*05:05-B1*03:01L HLA-DPA1*01:02-B1*04:01L HLA-DRB1* 07:01L HLA-DRB1*16:01L HLA-DQA1*01:03-B1*06:01L HLA-DRB1*04:08L HLA-DQA1*02:01-B1*03:03L HLA-DRB1*15:03L
WQLALSKGVH

SEQ ID NO: 10300 - protein, 10 aa, Severe acute respiratory syndrome coronavirus 2
  REGION 1..10: note = Table B: HLA-DQA1*03:02-B1*03:03L HLA-DQA1*05:01-B1*03:01L HLA-DRB1*04:03L HLA-DRB1*13:02L HLA-DRB1*13:03L HLA-DRB1*01:03L HLA-DRB1*04:05L HLA-DQA1*01:02-B1*06:02L HLA-DRB1*01:02L HLA-DRB1*08:77L HLA-DRB3*02:01L HLA-DPA1*01:03-B1*03:01L
  REGION 1..10: note = CONT. FROM ABOVE: HLA-DPA1*03:01-B1*04:02L HLA-DRB1*14:01L HLA-D RB1*14:02L HLA-DQA1*05:05-B1*03:19L HLA-DQA1*05:01-B1*02:01L HLA -DPA1*01:03-B1*04:01L HLA-DRB1*09:01L HLA-DRB1*12:01L HLA-DPA1*0 2:01-B1*13:01L HLA-DPA1*03:01-B1*105:01L
  REGION 1..10: note = CONT. FROM ABOVE: HLA-DQA1*03:01-B1*03:02L HLA-DQA1*05:05-B1*03: 01L HLA-DPA1*01:02-B1*04:01L HLA-DRB1*07:01L HLA-DRB1*16:01L HLA -DQA1*01:03-B1*06:01L HLA-DQA1*02:01-B1*03:03L HLA-DRB1*15:03L
QLALSKGVHF

SEQ ID NO: 10301 - protein, 10 aa, Severe acute respiratory syndrome coronavirus 2
  REGION 1..10: note = Table B: HLA-DQA1*03:02-B1*03:03L HLA-DQA1*05:01-B1*03:01L HLA-DQA1*01:02-B1*06:02L HLA-DQA1*05:05-B1*03:19L HLA-DQA1*05:01-B1*02:01L HLA-DPA1*03:01-B1*105:01L HLA-DQA1*03:01-B1*03:02L HLA-DQA1*05:05-B1*03:01L
  REGION 1..10: note = CONT. FROM ABOVE: HLA-DQA1*01:03-B1*06:01L HLA-DQA1*02:01-B1*03: 03L
VAAGLEAPFL

SEQ ID NO: 10302 - protein, 10 aa, Severe acute respiratory syndrome coronavirus 2
  REGION 1..10: note = Table B: HLA-DQA1*03:02-B1*03:03M HLA-DQA1*05:01-B1*03:01L HLA-DQA1*01:02-B1*06:02L HLA-DRB1*01:02L HLA-DPA1*03:01-B1*04:02L HLA-DRB1*14:01L HLA-DRB1*11:02L HLA-DRB1*14:02L HLA-DQA1*05:05-B1*03:19M
  REGION 1..10: note = CONT. FROM ABOVE: HLA-DQA1*05:01-B1*02:01L HLA-DPA1*01:03-B1*04: 01L HLA-DQA1*05:05-B1*03:116L HLA-DRB1*09:01L HLA-DPA1*01:03-B1* 04:02L HLA-DPA1*02:01-B1*13:01L HLA-DPA1*03:01-B1*105:01L HLA-DQ A1*03:01-B1*03:02L HLA-DPA1*01:03-B1*104:01L
  REGION 1..10: note = CONT. FROM ABOVE: HLA-DPA1*01:02-B1*04:01L HLA-DRB1*10:01L HLA-D RB1*16:01L HLA-DQA1*01:03-B1*06:01L HLA-DRB1*08:03L HLA-DQA1*02: 01-B1*03:03L HLA-DRB1*15:03L
FLQSINFVRI

SEQ ID NO: 10303 - protein, 11 aa, Severe acute respiratory syndrome coronavirus 2
  REGION 1..11: note = Table B: HLA-DQA1*03:02-B1*03:03L HLA-DRB1*04:03L HLA-DRB1*14:01L HLA-DQA1*01-B1*05L HLA-DQA1*05:01-B1*02:01L HLA-DQA1*03:01-B1*03:02L HLA-DRB1*16:01L HLA-DRB1*15:03L
NPLLYDANYFL

SEQ ID NO: 10304 - protein, 13 aa, Severe acute respiratory syndrome coronavirus 2
  REGION 1..13: note = Table B: HLA-DQA1*03:02-B1*03:03L HLA-DRB1*04:03L HLA-DRB1*13:02L HLA-DRB1*01:03L HLA-DRB1*04:02L HLA-DRB4*03:01NL HLA-DRB1*08:77L HLA-DRB3*02:01L HLA-DPA1*01:03-B1*03:01L HLA-DRB1*11:03L HLA-DRB1*14:02L HLA-DQA1*05:05-B1*03:19L
  REGION 1..13: note = CONT. FROM ABOVE: HLA-DRB1*09:01L HLA-DRB1*12:02L HLA-DQA1*03:01 -B1*03:02L HLA-DRB1*14:54L HLA-DQA1*05:05-B1*03:01L HLA-DRB1*14: 17L HLA-DRB1*07:01L HLA-DRB1*10:01L HLA-DQA1*01:03-B1*06:01L HLA -DRB1*04:08L HLA-DQA1*02:01-B1*03:03L
IPYNSVTSSIVIT

SEQ ID NO: 10305 - protein, 12 aa, Severe acute respiratory syndrome coronavirus 2
  REGION 1..12: note = Table B: HLA-DQA1*03:02-B1*03:03L HLA-DQA1*05:01-B1*03:01L HLA-DQA1*01:02-B1*06:02M HLA-DQA1*01:01-B1*05:01L HLA-DQA1*05:05-B1*03:19L HLA-DQA1*05:01-B1*02:01L HLA-DPA1*03:01-B1*105:01L HLA-DQA1*03:01-B1*03:02L
  REGION 1..12: note = CONT. FROM ABOVE: HLA-DQA1*05:05-B1*03:01L HLA-DQA1*01:03-B1*06: 01M HLA-DRB1*04:08L HLA-DQA1*02:01-B1*03:03M
VTSSIVITSGDG

SEQ ID NO: 10306 - protein, 12 aa, Severe acute respiratory syndrome coronavirus 2
  REGION 1..12: note = Table B: HLA-DQA1*03:02-B1*03:03L HLA-DRB1*04:03L HLA-DQA1*05:01-B1*02:01L HLA-DQA1*03:01-B1*03:02L HLA-DRB1*14:17L HLA-DQA1*02:01-B1*03:03L
IVITSGDGTTSP

SEQ ID NO: 10307 - protein, 13 aa, Severe acute respiratory syndrome coronavirus 2
  REGION 1..13: note = Table B: HLA-DQA1*03:02-B1*03:03L HLA-DQA1*05:01-B1*03:01L HLA-DQA1*05:05-B1*03:19L HLA-DQA1*03:01-B1*03:02L HLA-DQA1*05:05-B1*03:01L HLA-DQA1*02:01-B1*03:03L
VITSGDGTTSPIS

SEQ ID NO: 10308 - protein, 10 aa, Severe acute respiratory syndrome coronavirus 2
  REGION 1..10: note = Table B: HLA-DQA1*03:02-B1*03:03L HLA-DQA1*05:01-B1*03:01L HLA-DQA1*01:01-B1*05:01L HLA-DQA1*05:05-B1*03:19L HLA-DQA1*05:01-B1*02:01L HLA-DQA1*03:01-B1*03:02L HLA-DQA1*05:05-B1*03:01L HLA-DRB1*16:01L
  REGION 1..10: note = CONT. FROM ABOVE: HLA-DQA1*01:03-B1*06:01L HLA-DQA1*02:01-B1*03: 03L
DGTTSPISEH

SEQ ID NO: 10309 - protein, 10 aa, Severe acute respiratory syndrome coronavirus 2
  REGION 1..10: note = Table B: HLA-DQA1*03:02-B1*03:03L HLA-DQA1*05:01-B1*03:01L HLA-DRB1*04:03L HLA-DQA1*05:01-B1*02:01L HLA-DQA1*03:01-B1*03:02L HLA-DQA1*05:05-B1*03:01L HLA-DQA1*01:03-B1*06:01L HLA-DQA1*02:01-B1*03:03L
GTTSPISEHD

SEQ ID NO: 10310 - protein, 10 aa, Severe acute respiratory syndrome coronavirus 2
  REGION 1..10: note = Table B: HLA-DQA1*03:02-B1*03:03L HLA-DQA1*05:01-B1*03:01L HLA-DRB1*14:04L HLA-DRB1*04:01L HLA-DRB1*04:03L HLA-DRB1*13:02L HLA-DRB1*13:03M HLA-DRB1*01:03M HLA-DRB1*04:02L HLA-DRB1*04:05L HLA-DQA1*01:02-B1*06:02H HLA-DRB1*01:01L HLA-DRB4*03:01NM
  REGION 1..10: note = CONT. FROM ABOVE: HLA-DRB1*08:77M HLA-DPA1*01:03-B1*03:01M HLA-D PA1*03:01-B1*04:02L HLA-DRB1*03:01M HLA-DRB1*14:01L HLA-DRB1*11: 02M HLA-DRB1*11:03M HLA-DRB1*11:04L HLA-DRB1*14:02M HLA-DRB1*08: 01L HLA-DRB1*11:01L HLA-DRB5*01:01L HLA-DQA1*01-B1*05M
  REGION 1..10: note = CONT. FROM ABOVE: HLA-DQA1*05:05-B1*03:19H HLA-DRB4*02:01NL HLA- DQA1*05:01-B1*02:01M HLA-DRB4*01:01M HLA-DPA1*01:03-B1*04:01M HL A-DQA1*05:05-B1*03:116L HLA-DRB1*09:01L HLA-DPA1*01:03-B1*04:02M HLA-DRB1*12:01M HLA-DRB1*12:02L HLA-DPA1*02:01-B1*13:01L
  REGION 1..10: note = CONT. FROM ABOVE: HLA-DPA1*03:01-B1*105:01M HLA-DQA1*03:01-B1*03 :02L HLA-DRB1*14:54L HLA-DPA1*01:03-B1*104:01M HLA-DQA1*05:05-B1 *03:01L HLA-DRB1*14:17L HLA-DPA1*01:02-B1*04:01L HLA-DRB1*10:01M HLA-DRB1*16:01M HLA-DQA1*01:03-B1*06:01L HLA-DRB1*08:02L
  REGION 1..10: note = CONT. FROM ABOVE: HLA-DRB1*08:03L HLA-DQA1*02:01-B1*03:03L HLA -DRB1*15:01L HLA-DRB1*15:03M
TTSPISEHDY

SEQ ID NO: 10311 - protein, 10 aa, Severe acute respiratory syndrome coronavirus 2
  REGION 1..10: note = Table B: HLA-DQA1*03:02-B1*03:03L HLA-DQA1*01-B1*05L HLA-DQA1*05:01-B1*02:01L HLA-DQA1*03:01-B1*03:02L HLA-DQA1*01:03-B1*06:01L HLA-DQA1*02:01-B1*03:03L
TSPISEHDYQ

SEQ ID NO: 10312 - protein, 12 aa, Severe acute respiratory syndrome coronavirus 2
  REGION 1..12: note = Table B: HLA-DQA1*03:02-B1*03:03L HLA-DRB1*04:03L HLA-DRB1*04:02L HLA-DRB1*14:17L HLA-DRB1*16:01L HLA-DQA1*02:01-B1*03:03L
SPISEHDYQIGG

SEQ ID NO: 10313 - protein, 10 aa, Severe acute respiratory syndrome coronavirus 2
  REGION 1..10: note = Table B: HLA-DQA1*03:02-B1*03:03L HLA-DQA1*05:01-B1*03:01M HLA-DRB1*13:02L HLA-DRB1*13:03L HLA-DRB1*01:03L HLA-DRB1*04:02L HLA-DQA1*01:02-B1*06:02L HLA-DRB4*03:01NM HLA-DRB1*08:77M HLA-DPA1*01:03-B1*03:01L HLA-DPA1*03:01-B1*04:02M
  REGION 1..10: note = CONT. FROM ABOVE: HLA-DRB1*03:01M HLA-DRB1*11:02L HLA-DRB1*14:02 L HLA-DQA1*01-B1*05M HLA-DQA1*05:05-B1*03:19M HLA-DQA1*05:01-B1* 02:01L HLA-DRB4*01:01M HLA-DPA1*01:03-B1*04:01M HLA-DQA1*05:05-B 1*03:116L HLA-DPA1*01:03-B1*04:02L HLA-DRB1*12:01L
  REGION 1..10: note = CONT. FROM ABOVE: HLA-DQA1*03:01-B1*03:02L HLA-DRB1*14:54L HLA-D PA1*01:03-B1*104:01L HLA-DPA1*01:02-B1*04:01M HLA-DRB1*10:01M HL A-DRB1*16:01L HLA-DRB1*15:03M
SEHDYQIGGY

SEQ ID NO: 10314 - protein, 10 aa, Severe acute respiratory syndrome coronavirus 2
  REGION 1..10: note = Table B: HLA-DQA1*03:02-B1*03:03L HLA-DQA1*05:01-B1*03:01L HLA-DRB1*04:03L HLA-DRB1*13:03L HLA-DRB1*01:03L HLA-DRB1*04:05L HLA-DQA1*01:02-B1*06:02M HLA-DRB1*01:01L HLA-DRB1*08:77L HLA-DPA1*01:03-B1*03:01L HLA-DPA1*03:01-B1*04:02L
  REGION 1..10: note = CONT. FROM ABOVE: HLA-DRB1*03:01L HLA-DRB1*14:01L HLA-DRB1*14:02 L HLA-DQA1*01-B1*05L HLA-DQA1*05:05-B1*03:19L HLA-DQA1*05:01-B1* 02:01L HLA-DRB4*01:01L HLA-DPA1*01:03-B1*04:01L HLA-DQA1*05:05-B 1*03:116L HLA-DPA1*01:03-B1*04:02L HLA-DRB1*12:01L
  REGION 1..10: note = CONT. FROM ABOVE: HLA-DPA1*02:01-B1*13:01L HLA-DPA1*03:01-B1*105 :01L HLA-DPA1*01:03-B1*104:01L HLA-DQA1*05:05-B1*03:01L HLA-DPA1 *01:02-B1*04:01L HLA-DRB1*10:01L HLA-DRB1*16:01L HLA-DQA1*01:03- B1*06:01L HLA-DRB1*08:02L HLA-DQA1*02:01-B1*03:03M
  REGION 1..10: note = CONT. FROM ABOVE: HLA-DRB1*15:03L
YQIGGYTEKW

SEQ ID NO: 10315 - protein, 11 aa, Severe acute respiratory syndrome coronavirus 2
  REGION 1..11: note = Table B: HLA-DQA1*03:02-B1*03:03L HLA-DRB1*04:03L HLA-DRB1*04:02L HLA-DQA1*01-B1*05L HLA-DQA1*05:01-B1*02:01L HLA-DQA1*03:01-B1*03:02L HLA-DQA1*01:03-B1*06:01L HLA-DQA1*02:01-B1*03:03L
IGGYTEKWESG

SEQ ID NO: 10316 - protein, 10 aa, Severe acute respiratory syndrome coronavirus 2
  REGION 1..10: note = Table B: HLA-DQA1*03:02-B1*03:03L HLA-DQA1*03:01-B1*03:02L
TEKWESGVKD

SEQ ID NO: 10317 - protein, 10 aa, Severe acute respiratory syndrome coronavirus 2
  REGION 1..10: note = Table B: HLA-DQA1*03:02-B1*03:03L HLA-DRB1*04:05L HLA-DQA1*01:02-B1*06:02L HLA-DPA1*03:01-B1*04:02L HLA-DRB1*14:02L HLA-DQA1*05:05-B1*03:19L HLA-DQA1*05:01-B1*02:01L HLA-DPA1*02:01-B1*13:01L
  REGION 1..10: note = CONT. FROM ABOVE: HLA-DPA1*03:01-B1*105:01L HLA-DQA1*03:01-B1*03 :02L HLA-DPA1*01:02-B1*04:01L HLA-DQA1*01:03-B1*06:01L HLA-DQA1* 02:01-B1*03:03L HLA-DRB1*15:03L
SYFTSDYYQL

SEQ ID NO: 10318 - protein, 10 aa, Severe acute respiratory syndrome coronavirus 2
  REGION 1..10: note = Table B: HLA-DQA1*03:02-B1*03:03L HLA-DQA1*05:01-B1*03:01L HLA-DQA1*01:02-B1*06:02L HLA-DRB1*01:02L HLA-DPA1*03:01-B1*04:02L HLA-DQA1*01-B1*05L HLA-DQA1*05:05-B1*03:19L HLA-DQA1*05:01-B1*02:01L
  REGION 1..10: note = CONT. FROM ABOVE: HLA-DRB1*12:01L HLA-DPA1*02:01-B1*13:01L HLA-D PA1*03:01-B1*105:01L HLA-DQA1*03:01-B1*03:02L HLA-DPA1*01:02-B1* 04:01L HLA-DRB1*16:01L HLA-DQA1*01:03-B1*06:01L HLA-DQA1*02:01-B 1*03:03L HLA-DRB1*15:03L
DYYQLYSTQL

SEQ ID NO: 10319 - protein, 12 aa, Severe acute respiratory syndrome coronavirus 2
  REGION 1..12: note = Table B: HLA-DQA1*03:02-B1*03:03L HLA-DRB1*04:03L HLA-DRB1*04:05L HLA-DQA1*01:02-B1*06:02L HLA-DPA1*03:01-B1*105:01L HLA-DQA1*05:05-B1*03:01L HLA-DRB1*14:17L
QLYSTQLSTDTG

SEQ ID NO: 10320 - protein, 12 aa, Severe acute respiratory syndrome coronavirus 2
  REGION 1..12: note = Table B: HLA-DQA1*03:02-B1*03:03L HLA-DQA1*05:01-B1*02:01L HLA-DQA1*03:01-B1*03:02L
YSTQLSTDTGVE

SEQ ID NO: 10321 - protein, 11 aa, Severe acute respiratory syndrome coronavirus 2
  REGION 1..11: note = Table B: HLA-DQA1*03:02-B1*03:03L HLA-DQA1*05:01-B1*03:01L HLA-DRB1*13:02L HLA-DRB1*01:03L HLA-DRB1*04:05L HLA-DQA1*01:01-B1*05:01L HLA-DQA1*01-B1*05L HLA-DRB1*04:10L HLA-DRB1*14:54L HLA-DQA1*05:05-B1*03:01L
TQLSTDTGVEH

SEQ ID NO: 10322 - protein, 10 aa, Severe acute respiratory syndrome coronavirus 2
  REGION 1..10: note = Table B: HLA-DQA1*03:02-B1*03:03L HLA-DQA1*05:01-B1*03:01L HLA-DQA1*05:05-B1*03:19L HLA-DQA1*05:01-B1*02:01L HLA-DQA1*05:05-B1*03:116L HLA-DPA1*03:01-B1*105:01L HLA-DQA1*03:01-B1*03:02L HLA-DPA1*01:03-B1*104:01L
  REGION 1..10: note = CONT. FROM ABOVE: HLA-DRB1*16:01L HLA-DQA1*02:01-B1*03:03L HLA-D RB1*15:03L
LSTDTGVEHV

SEQ ID NO: 10323 - protein, 10 aa, Severe acute respiratory syndrome coronavirus 2
  REGION 1..10: note = Table B: HLA-DQA1*03:02-B1*03:03L HLA-DRB1*04:03L HLA-DQA1*01-B1*05L HLA-DQA1*05:01-B1*02:01L HLA-DQA1*03:01-B1*03:02L HLA-DRB1*16:01L HLA-DQA1*02:01-B1*03:03L
STDTGVEHVT

SEQ ID NO: 10324 - protein, 10 aa, Severe acute respiratory syndrome coronavirus 2
  REGION 1..10: note = Table B: HLA-DQA1*03:02-B1*03:03L HLA-DQA1*05:01-B1*03:01L HLA-DRB1*13:02L HLA-DRB1*13:03L HLA-DRB1*01:03L HLA-DRB1*04:05L HLA-DQA1*01:02-B1*06:02L HLA-DRB4*03:01NL HLA-DRB1*08:77M HLA-DPA1*01:03-B1*03:01L HLA-DPA1*03:01-B1*04:02L
  REGION 1..10: note = CONT. FROM ABOVE: HLA-DRB1*03:01L HLA-DRB1*14:01L HLA-DRB1*11:02 L HLA-DRB1*14:02L HLA-DQA1*01-B1*05L HLA-DQA1*05:05-B1*03:19M HL A-DQA1*05:01-B1*02:01L HLA-DRB4*01:01L HLA-DPA1*01:03-B1*04:01L HLA-DQA1*05:05-B1*03:116L HLA-DPA1*01:03-B1*04:02L
  REGION 1..10: note = CONT. FROM ABOVE: HLA-DRB1*12:01L HLA-DPA1*02:01-B1*13:01L HLA-D PA1*03:01-B1*105:01L HLA-DQA1*03:01-B1*03:02L HLA-DPA1*01:03-B1* 104:01L HLA-DPA1*01:02-B1*04:01L HLA-DRB1*10:01L HLA-DRB1*16:01L HLA-DQA1*01:03-B1*06:01L HLA-DRB1*08:02L
  REGION 1..10: note = CONT. FROM ABOVE: HLA-DQA1*02:01-B1*03:03L HLA-DRB1*15:03L
TDTGVEHVTF

SEQ ID NO: 10325 - protein, 10 aa, Severe acute respiratory syndrome coronavirus 2
  REGION 1..10: note = Table B: HLA-DQA1*03:02-B1*03:03L HLA-DQA1*05:01-B1*03:01L HLA-DRB1*13:03L HLA-DQA1*01:02-B1*06:02L HLA-DQA1*05:05-B1*03:19L HLA-DQA1*05:01-B1*02:01L HLA-DPA1*02:01-B1*13:01L HLA-DPA1*03:01-B1*105:01L
  REGION 1..10: note = CONT. FROM ABOVE: HLA-DQA1*01:03-B1*06:01L HLA-DQA1*02:01-B1*03: 03L HLA-DRB1*15:03L
DTGVEHVTFF

SEQ ID NO: 10326 - protein, 10 aa, Severe acute respiratory syndrome coronavirus 2
  REGION 1..10: note = Table B: HLA-DQA1*03:02-B1*03:03L HLA-DRB1*04:03L HLA-DRB1*13:03L HLA-DRB1*04:02L HLA-DRB1*04:05L HLA-DRB4*03:01NL HLA-DQA1*01-B1*05L HLA-DQA1*05:01-B1*02:01L HLA-DRB1*04:10L HLA-DQA1*03:01-B1*03:02L HLA-DRB1*14:17L HLA-DRB1*16:01L
  REGION 1..10: note = CONT. FROM ABOVE: HLA-DRB1*04:08L HLA-DQA1*02:01-B1*03:03L
IYNKIVDEPE

SEQ ID NO: 10327 - protein, 10 aa, Severe acute respiratory syndrome coronavirus 2
  REGION 1..10: note = Table B: HLA-DQA1*03:02-B1*03:03L HLA-DRB1*04:03L HLA-DRB1*04:02L HLA-DRB1*04:05L HLA-DQA1*01-B1*05L HLA-DQA1*05:01-B1*02:01L HLA-DRB1*04:10L HLA-DQA1*03:01-B1*03:02L HLA-DRB1*14:17L HLA-DRB1*16:01L
  REGION 1..10: note = CONT. FROM ABOVE: HLA-DRB1*04:08L
YNKIVDEPEE

SEQ ID NO: 10328 - protein, 10 aa, Severe acute respiratory syndrome coronavirus 2
  REGION 1..10: note = Table B: HLA-DQA1*03:02-B1*03:03L HLA-DRB1*04:03L HLA-DRB1*04:02L HLA-DQA1*01:01-B1*05:01L HLA-DQA1*01-B1*05L HLA-DQA1*05:01-B1*02:01L HLA-DQA1*03:01-B1*03:02L HLA-DRB1*16:01L HLA-DQA1*02:01-B1*03:03L
NKIVDEPEEH

SEQ ID NO: 10329 - protein, 10 aa, Severe acute respiratory syndrome coronavirus 2
  REGION 1..10: note = Table B: HLA-DQA1*03:02-B1*03:03M HLA-DQA1*05:01-B1*03:01L HLA-DQA1*01:02-B1*06:02L HLA-DRB1*01:02L HLA-DPA1*03:01-B1*04:02L HLA-DRB1*14:01L HLA-DRB1*11:02L HLA-DRB1*14:02L HLA-DQA1*05:05-B1*03:19L
  REGION 1..10: note = CONT. FROM ABOVE: HLA-DQA1*05:01-B1*02:01L HLA-DQA1*05:05-B1*03: 116L HLA-DRB1*09:01L HLA-DPA1*01:03-B1*04:02L HLA-DPA1*02:01-B1* 13:01L HLA-DPA1*03:01-B1*105:01L HLA-DQA1*03:01-B1*03:02L HLA-DP A1*01:03-B1*104:01L HLA-DPA1*01:02-B1*04:01L HLA-DRB1*10:01L
  REGION 1..10: note = CONT. FROM ABOVE: HLA-DRB1*16:01L HLA-DQA1*01:03-B1*06:01L HLA-D RB1*08:03L HLA-DQA1*02:01-B1*03:03L HLA-DRB1*15:03L
KIVDEPEEHV

SEQ ID NO: 10330 - protein, 10 aa, Severe acute respiratory syndrome coronavirus 2
  REGION 1..10: note = Table B: HLA-DQA1*03:02-B1*03:03L HLA-DQA1*05:01-B1*03:01L HLA-DRB1*04:01L HLA-DRB1*04:03L HLA-DRB1*13:02L HLA-DRB1*13:03L HLA-DRB1*01:03L HLA-DRB1*04:02L HLA-DRB1*04:04L HLA-DRB1*04:05L HLA-DQA1*01:02-B1*06:02L HLA-DRB1*01:02L HLA-DRB4*03:01NL
  REGION 1..10: note = CONT. FROM ABOVE: HLA-DRB1*08:04L HLA-DRB1*08:77L HLA-DRB3*02:01 L HLA-DPA1*01:03-B1*03:01L HLA-DPA1*03:01-B1*04:02L HLA-DRB1*14: 01L HLA-DRB1*11:03L HLA-DRB1*11:04L HLA-DRB1*14:02L HLA-DQA1*01: 01-B1*05:01L HLA-DRB5*01:01L HLA-DQA1*01-B1*05M
  REGION 1..10: note = CONT. FROM ABOVE: HLA-DQA1*05:05-B1*03:19L HLA-DQA1*05:01-B1*02: 01M HLA-DRB4*01:01L HLA-DRB1*04:10L HLA-DPA1*01:03-B1*04:02L HLA -DRB1*12:01L HLA-DRB1*12:02L HLA-DRB3*01:01L HLA-DPA1*02:01-B1*1 3:01L HLA-DPA1*03:01-B1*105:01L HLA-DQA1*03:01-B1*03:02L
  REGION 1..10: note = CONT. FROM ABOVE: HLA-DRB1*14:54L HLA-DQA1*05:05-B1*03:01L HLA-D RB1*14:17L HLA-DPA1*01:02-B1*04:01L HLA-DRB1*10:01L HLA-DRB1*16: 01L HLA-DQA1*01:03-B1*06:01L HLA-DRB1*04:08L HLA-DQA1*02:01-B1*0 3:03L HLA-DRB1*15:03L
IVDEPEEHVQ

SEQ ID NO: 10331 - protein, 10 aa, Severe acute respiratory syndrome coronavirus 2
  REGION 1..10: note = Table B: HLA-DQA1*03:02-B1*03:03L HLA-DRB1*11:02L HLA-DQA1*05:05-B1*03:19M HLA-DPA1*01:03-B1*104:01L
PEEHVQIHTI

SEQ ID NO: 10332 - protein, 11 aa, Severe acute respiratory syndrome coronavirus 2
  REGION 1..11: note = Table B: HLA-DQA1*03:02-B1*03:03L HLA-DRB1*04:01L HLA-DRB1*13:02L HLA-DRB1*13:03L HLA-DRB1*01:03L HLA-DRB1*04:02M HLA-DRB1*04:04L HLA-DRB1*04:05L HLA-DQA1*01:02-B1*06:02L HLA-DRB1*01:02L HLA-DRB4*03:01NL HLA-DRB1*08:77L HLA-DRB1*14:01L
  REGION 1..11: note = CONT. FROM ABOVE: HLA-DRB1*11:03L HLA-DRB1*11:04L HLA-DRB5*01:01 L HLA-DQA1*01-B1*05L HLA-DQA1*05:01-B1*02:01L HLA-DRB1*04:10M HL A-DRB1*12:01L HLA-DRB1*12:02L HLA-DQA1*03:01-B1*03:02L HLA-DRB1* 14:54L HLA-DRB1*10:01L HLA-DRB1*16:01L HLA-DRB1*04:08L
  REGION 1..11: note = CONT. FROM ABOVE: HLA-DRB1*08:03L HLA-DQA1*02:01-B1*03:03L HLA-D RB1*15:03L
VQIHTIDGSSG

SEQ ID NO: 10333 - protein, 10 aa, Severe acute respiratory syndrome coronavirus 2
  REGION 1..10: note = Table B: HLA-DQA1*03:02-B1*03:03L HLA-DQA1*05:01-B1*03:01L HLA-DRB1*13:03L HLA-DQA1*01:02-B1*06:02L HLA-DRB1*01:02L HLA-DRB1*14:02L HLA-DQA1*05:01-B1*02:01L HLA-DRB1*12:01L HLA-DPA1*03:01-B1*105:01L HLA-DQA1*03:01-B1*03:02L
  REGION 1..10: note = CONT. FROM ABOVE: HLA-DQA1*02:01-B1*03:03L HLA-DRB1*15:03L
HTIDGSSGVV

SEQ ID NO: 10334 - protein, 12 aa, Severe acute respiratory syndrome coronavirus 2
  REGION 1..12: note = Table B: HLA-DQA1*03:02-B1*03:03L HLA-DQA1*05:01-B1*03:01L HLA-DQA1*05:01-B1*02:01L HLA-DQA1*03:01-B1*03:02L HLA-DQA1*02:01-B1*03:03L
TIDGSSGVVNPV

SEQ ID NO: 10335 - protein, 10 aa, Severe acute respiratory syndrome coronavirus 2
  REGION 1..10: note = Table B: HLA-DQA1*03:02-B1*03:03L HLA-DQA1*05:01-B1*03:01L HLA-DQA1*01:02-B1*06:02L HLA-DQA1*05:05-B1*03:19L HLA-DQA1*05:01-B1*02:01L HLA-DPA1*03:01-B1*105:01L HLA-DQA1*03:01-B1*03:02L HLA-DQA1*05:05-B1*03:01L
  REGION 1..10: note = CONT. FROM ABOVE: HLA-DQA1*01:03-B1*06:01L HLA-DQA1*02:01-B1*03: 03L
GSSGVVNPVM

SEQ ID NO: 10336 - protein, 12 aa, Severe acute respiratory syndrome coronavirus 2
  REGION 1..12: note = Table B: HLA-DQA1*03:02-B1*03:03L HLA-DQA1*05:01-B1*02:01L HLA-DPA1*03:01-B1*105:01L
SSGVVNPVMEPI

SEQ ID NO: 10337 - protein, 13 aa, Severe acute respiratory syndrome coronavirus 2
  REGION 1..13: note = Table B: HLA-DQA1*03:02-B1*03:03L HLA-DRB1*04:02L HLA-DRB1*04:05L HLA-DRB1*01:02L HLA-DRB3*02:01L HLA-DRB1*04:10L HLA-DRB1*12:02L HLA-DRB1*14:54L HLA-DQA1*05:05-B1*03:01L HLA-DRB1*14:17L
SGVVNPVMEPIYD

SEQ ID NO: 10338 - protein, 13 aa, Severe acute respiratory syndrome coronavirus 2
  REGION 1..13: note = Table B: HLA-DQA1*03:02-B1*03:03L HLA-DRB1*13:03L HLA-DQA1*01:01-B1*05:01L HLA-DRB1*12:02L HLA-DRB1*04:08L
VNPVMEPIYDEPT

SEQ ID NO: 10339 - protein, 13 aa, Severe acute respiratory syndrome coronavirus 2
  REGION 1..13: note = Table B: HLA-DQA1*03:02-B1*03:03L HLA-DRB1*13:03L HLA-DRB1*01:03L HLA-DRB1*04:04L HLA-DRB1*01:02L HLA-DRB1*11:04L HLA-DRB1*12:02L HLA-DRB1*10:01L HLA-DRB1*04:08L HLA-DRB1*08:03L HLA-DRB1*15:03L
NPVMEPIYDEPTT

SEQ ID NO: 10340 - protein, 12 aa, Severe acute respiratory syndrome coronavirus 2
  REGION 1..12: note = Table B: HLA-DQA1*03:02-B1*03:03L HLA-DRB1*04:03L HLA-DQA1*05:01-B1*02:01L HLA-DQA1*03:01-B1*03:02L
EPIYDEPTTTTS

SEQ ID NO: 10341 - protein, 11 aa, Severe acute respiratory syndrome coronavirus 2
  REGION 1..11: note = Table B: HLA-DQA1*03:02-B1*03:03L HLA-DQA1*01-B1*05L HLA-DQA1*05:01-B1*02:01L HLA-DQA1*03:01-B1*03:02L
DEPTTTTSVPL

SEQ ID NO: 10342 - protein, 10 aa, Severe acute respiratory syndrome coronavirus 2
  REGION 1..10: note = Table B: HLA-DQA1*03:02-B1*03:03L HLA-DQA1*01-B1*05L HLA-DQA1*05:01-B1*02:01L HLA-DQA1*03:01-B1*03:02L
SFVSEETGTL

SEQ ID NO: 10343 - protein, 10 aa, Severe acute respiratory syndrome coronavirus 2
  REGION 1..10: note = Table B: HLA-DQA1*03:02-B1*03:03L HLA-DQA1*05:05-B1*03:19L HLA-DQA1*03:01-B1*03:02L HLA-DRB1*15:03L
FVSEETGTLI

SEQ ID NO: 10344 - protein, 11 aa, Severe acute respiratory syndrome coronavirus 2
  REGION 1..11: note = Table B: HLA-DQA1*03:02-B1*03:03L HLA-DRB1*04:03L HLA-DQA1*05:01-B1*02:01L HLA-DQA1*03:01-B1*03:02L HLA-DRB1*16:01L HLA-DQA1*01:03-B1*06:01L HLA-DQA1*02:01-B1*03:03L
VSEETGTLIVN

SEQ ID NO: 10345 - protein, 10 aa, Severe acute respiratory syndrome coronavirus 2
  REGION 1..10: note = Table B: HLA-DQA1*03:02-B1*03:03L HLA-DQA1*05:01-B1*03:01L HLA-DRB1*13:03L HLA-DQA1*01:02-B1*06:02M HLA-DRB1*01:02L HLA-DQA1*05:05-B1*03:19L HLA-DQA1*05:01-B1*02:01L HLA-DPA1*02:01-B1*13:01L HLA-DPA1*03:01-B1*105:01M
  REGION 1..10: note = CONT. FROM ABOVE: HLA-DQA1*05:05-B1*03:01L HLA-DQA1*01:03-B1*06: 01L HLA-DQA1*02:01-B1*03:03L HLA-DRB1*15:03L
ETGTLIVNSV

SEQ ID NO: 10346 - protein, 10 aa, Severe acute respiratory syndrome coronavirus 2
  REGION 1..10: note = Table B: HLA-DQA1*03:02-B1*03:03L HLA-DQA1*03:01-B1*03:02L HLA-DQA1*01:03-B1*06:01L HLA-DQA1*02:01-B1*03:03L
TGTLIVNSVL

SEQ ID NO: 10347 - protein, 10 aa, Severe acute respiratory syndrome coronavirus 2
  REGION 1..10: note = Table B: HLA-DQA1*03:02-B1*03:03L
GTLIVNSVLL

SEQ ID NO: 10348 - protein, 10 aa, Severe acute respiratory syndrome coronavirus 2
  REGION 1..10: note = Table B: HLA-DQA1*03:02-B1*03:03L HLA-DQA1*05:01-B1*03:01L HLA-DRB1*13:02L HLA-DRB1*01:02L HLA-DRB3*02:01L HLA-DPA1*03:01-B1*04:02L HLA-DRB1*14:01L HLA-DQA1*05:01-B1*02:01L HLA-DRB1*12:01L
  REGION 1..10: note = CONT. FROM ABOVE: HLA-DPA1*03:01-B1*105:01L HLA-DPA1*01:02-B1*04 :01L HLA-DRB1*07:01L HLA-DRB1*16:01L HLA-DQA1*02:01-B1*03:03L HL A-DRB1*15:03L
TLAILTALRL

SEQ ID NO: 10349 - protein, 10 aa, Severe acute respiratory syndrome coronavirus 2
  REGION 1..10: note = Table B: HLA-DQA1*03:02-B1*03:03L HLA-DQA1*05:01-B1*03:01L HLA-DRB1*04:03L HLA-DRB1*13:03L HLA-DRB1*01:03L HLA-DRB1*04:02L HLA-DRB1*04:05L HLA-DRB4*03:01NL HLA-DQA1*05:01-B1*02:01L HLA-DRB1*12:01L HLA-DPA1*03:01-B1*105:01L
  REGION 1..10: note = CONT. FROM ABOVE: HLA-DQA1*03:01-B1*03:02L HLA-DRB1*14:54L HLA-D RB1*14:17L HLA-DPA1*01:02-B1*04:01L HLA-DRB1*16:01L HLA-DQA1*01: 03-B1*06:01L HLA-DQA1*02:01-B1*03:03L
IVNVSLVKPS

SEQ ID NO: 10350 - protein, 10 aa, Severe acute respiratory syndrome coronavirus 2
  REGION 1..10: note = Table B: HLA-DQA1*03:02-B1*03:03L HLA-DQA1*05:01-B1*03:01L HLA-DRB1*13:03L HLA-DRB1*01:03L HLA-DQA1*01:02-B1*06:02M HLA-DRB4*03:01NL HLA-DRB1*08:77L HLA-DPA1*01:03-B1*03:01L HLA-DPA1*03:01-B1*04:02L HLA-DRB1*03:01L HLA-DRB1*14:01L
  REGION 1..10: note = CONT. FROM ABOVE: HLA-DRB1*11:02L HLA-DRB1*14:02L HLA-DQA1*01-B1 *05L HLA-DQA1*05:05-B1*03:19M HLA-DQA1*05:01-B1*02:01L HLA-DRB4* 01:01L HLA-DPA1*01:03-B1*04:01L HLA-DQA1*05:05-B1*03:116L HLA-DP A1*01:03-B1*04:02L HLA-DRB1*12:01L HLA-DPA1*02:01-B1*13:01L
  REGION 1..10: note = CONT. FROM ABOVE: HLA-DPA1*03:01-B1*105:01L HLA-DPA1*01:03-B1*10 4:01L HLA-DPA1*01:02-B1*04:01L HLA-DRB1*10:01L HLA-DRB1*16:01L H LA-DQA1*01:03-B1*06:01L HLA-DRB1*08:02L HLA-DQA1*02:01-B1*03:03L HLA-DRB1*15:03L
SLVKPSFYVY

SEQ ID NO: 10351 - protein, 15 aa, Severe acute respiratory syndrome coronavirus 2
  REGION 1..15: note = Table B: HLA-DQA1*03:02-B1*03:03L HLA-DRB1*03:01L HLA-DRB1*13:01L
VKPSFYVYSRVKNLN

SEQ ID NO: 10352 - protein, 19 aa, Severe acute respiratory syndrome coronavirus 2
  REGION 1..19: note = Table B: HLA-DQA1*03:02-B1*03:03L HLA-DRB1*03:01L HLA-DRB1*11:02L HLA-DRB1*14:02L HLA-DQA1*05:05-B1*03:19L HLA-DQA1*05:01-B1*02:01L HLA-DPA1*01:03-B1*104:01L HLA-DRB1*08:02L
PSFYVYSRVKNLNSSRVPD

SEQ ID NO: 10353 - protein, 10 aa, Severe acute respiratory syndrome coronavirus 2
  REGION 1..10: note = Table B: HLA-DQA1*03:02-B1*03:03L HLA-DQA1*05:01-B1*03:01L HLA-DRB1*04:03L HLA-DRB1*13:02L HLA-DRB1*13:03L HLA-DRB1*04:02L HLA-DQA1*01:02-B1*06:02L HLA-DPA1*03:01-B1*04:02L HLA-DRB1*14:01L HLA-DQA1*01-B1*05L HLA-DQA1*05:05-B1*03:19L
  REGION 1..10: note = CONT. FROM ABOVE: HLA-DQA1*05:01-B1*02:01L HLA-DRB1*12:01L HLA-D PA1*03:01-B1*105:01L HLA-DQA1*03:01-B1*03:02L HLA-DQA1*05:05-B1* 03:01L HLA-DPA1*01:02-B1*04:01L HLA-DRB1*16:01L HLA-DQA1*01:03-B 1*06:01L HLA-DQA1*02:01-B1*03:03L HLA-DRB1*15:03L
NLNSSRVPDL

SEQ ID NO: 10354 - protein, 10 aa, Severe acute respiratory syndrome coronavirus 2
  REGION 1..10: note = Table B: HLA-DQA1*03:02-B1*03:03L HLA-DQA1*05:01-B1*03:01L HLA-DQA1*01:02-B1*06:02L HLA-DQA1*05:05-B1*03:19L HLA-DQA1*05:01-B1*02:01L HLA-DPA1*03:01-B1*105:01L HLA-DQA1*03:01-B1*03:02L HLA-DQA1*05:05-B1*03:01L
  REGION 1..10: note = CONT. FROM ABOVE: HLA-DQA1*01:03-B1*06:01L HLA-DQA1*02:01-B1*03: 03L
LNSSRVPDLL

SEQ ID NO: 10355 - protein, 11 aa, Severe acute respiratory syndrome coronavirus 2
  REGION 1..11: note = Table B: HLA-DQA1*03:02-B1*03:03L HLA-DQA1*05:01-B1*02:01L HLA-DQA1*03:01-B1*03:02L
DSNGTITVEEL

SEQ ID NO: 10356 - protein, 10 aa, Severe acute respiratory syndrome coronavirus 2
  REGION 1..10: note = Table B: HLA-DQA1*03:02-B1*03:03L HLA-DQA1*05:01-B1*03:01L HLA-DQA1*01:02-B1*06:02L HLA-DQA1*01:01-B1*05:01L HLA-DQA1*05:05-B1*03:19L HLA-DQA1*05:01-B1*02:01L HLA-DPA1*03:01-B1*105:01L HLA-DQA1*03:01-B1*03:02L
  REGION 1..10: note = CONT. FROM ABOVE: HLA-DQA1*05:05-B1*03:01L HLA-DRB1*16:01L HLA-D QA1*01:03-B1*06:01M HLA-DQA1*02:01-B1*03:03L
NGTITVEELK

SEQ ID NO: 10357 - protein, 10 aa, Severe acute respiratory syndrome coronavirus 2
  REGION 1..10: note = Table B: HLA-DQA1*03:02-B1*03:03L HLA-DQA1*05:01-B1*03:01L HLA-DQA1*01:02-B1*06:02L HLA-DPA1*03:01-B1*04:02L HLA-DQA1*05:01-B1*02:01L HLA-DRB1*12:01L HLA-DPA1*03:01-B1*105:01L HLA-DQA1*03:01-B1*03:02L
  REGION 1..10: note = CONT. FROM ABOVE: HLA-DPA1*01:02-B1*04:01L HLA-DRB1*16:01L HLA-D QA1*01:03-B1*06:01L HLA-DQA1*02:01-B1*03:03L HLA-DRB1*15:03L
TITVEELKKL

SEQ ID NO: 10358 - protein, 10 aa, Severe acute respiratory syndrome coronavirus 2
  REGION 1..10: note = Table B: HLA-DQA1*03:02-B1*03:03L HLA-DQA1*05:01-B1*03:01M HLA-DRB1*13:03L HLA-DRB1*01:03L HLA-DQA1*01:02-B1*06:02L HLA-DRB4*03:01NL HLA-DRB1*08:77M HLA-DPA1*01:03-B1*03:01L HLA-DPA1*03:01-B1*04:02M HLA-DRB1*03:01M HLA-DRB1*14:02L
  REGION 1..10: note = CONT. FROM ABOVE: HLA-DQA1*01-B1*05L HLA-DQA1*05:05-B1*03:19L HL A-DQA1*05:01-B1*02:01L HLA-DRB4*01:01M HLA-DPA1*01:03-B1*04:01M HLA-DQA1*05:05-B1*03:116L HLA-DPA1*01:03-B1*04:02L HLA-DRB1*12:0 1L HLA-DQA1*03:01-B1*03:02L HLA-DPA1*01:03-B1*104:01L
  REGION 1..10: note = CONT. FROM ABOVE: HLA-DPA1*01:02-B1*04:01L HLA-DRB1*10:01L HLA-D RB1*16:01L HLA-DQA1*02:01-B1*03:03L HLA-DRB1*15:03M
EELKKLLEQW

SEQ ID NO: 10359 - protein, 10 aa, Severe acute respiratory syndrome coronavirus 2
  REGION 1..10: note = Table B: HLA-DQA1*03:02-B1*03:03L HLA-DQA1*05:05-B1*03:19L
KLLEQWNLVI

SEQ ID NO: 10360 - protein, 10 aa, Severe acute respiratory syndrome coronavirus 2
  REGION 1..10: note = Table B: HLA-DQA1*03:02-B1*03:03L HLA-DQA1*05:01-B1*03:01L HLA-DRB1*04:03L HLA-DRB1*13:02L HLA-DRB1*01:03L HLA-DQA1*01:02-B1*06:02L HLA-DRB1*01:02L HLA-DRB3*02:01L HLA-DPA1*01:03-B1*03:01L HLA-DPA1*03:01-B1*04:02L
  REGION 1..10: note = CONT. FROM ABOVE: HLA-DRB1*14:01L HLA-DQA1*05:05-B1*03:19L HLA-D QA1*05:01-B1*02:01L HLA-DPA1*01:03-B1*04:01L HLA-DRB1*12:01L HLA -DPA1*03:01-B1*105:01L HLA-DQA1*03:01-B1*03:02L HLA-DQA1*05:05-B 1*03:01L HLA-DPA1*01:02-B1*04:01L HLA-DRB1*07:01L
  REGION 1..10: note = CONT. FROM ABOVE: HLA-DRB1*16:01L HLA-DQA1*01:03-B1*06:01L HLA-D QA1*02:01-B1*03:03L HLA-DRB1*15:03L
FVLAAVYRIN

SEQ ID NO: 10361 - protein, 12 aa, Severe acute respiratory syndrome coronavirus 2
  REGION 1..12: note = Table B: HLA-DQA1*03:02-B1*03:03L HLA-DQA1*05:01-B1*03:01L HLA-DRB1*13:02L HLA-DRB1*01:03L HLA-DRB1*04:02L HLA-DRB1*04:05L HLA-DQA1*01:02-B1*06:02L HLA-DRB1*01:02L HLA-DRB1*08:04L HLA-DPA1*01:03-B1*03:01L HLA-DPA1*03:01-B1*04:02L
  REGION 1..12: note = CONT. FROM ABOVE: HLA-DRB1*14:01L HLA-DRB1*08:01L HLA-DQA1*01-B1 *05L HLA-DQA1*05:05-B1*03:19L HLA-DQA1*05:01-B1*02:01L HLA-DPA1* 01:03-B1*04:02L HLA-DRB1*12:01L HLA-DPA1*02:01-B1*13:01L HLA-DPA 1*03:01-B1*105:01L HLA-DQA1*05:05-B1*03:01L
  REGION 1..12: note = CONT. FROM ABOVE: HLA-DPA1*01:02-B1*04:01L HLA-DRB1*16:01L HLA-D QA1*01:03-B1*06:01L HLA-DRB1*04:08L HLA-DQA1*02:01-B1*03:03L HLA -DRB1*15:03L
VYRINWITGGIA

SEQ ID NO: 10362 - protein, 12 aa, Severe acute respiratory syndrome coronavirus 2
  REGION 1..12: note = Table B: HLA-DQA1*03:02-B1*03:03L HLA-DQA1*05:01-B1*03:01L HLA-DRB1*13:02L HLA-DRB1*01:03L HLA-DQA1*01:02-B1*06:02L HLA-DRB1*01:01L HLA-DRB1*01:02L HLA-DPA1*01:03-B1*03:01L HLA-DPA1*03:01-B1*04:02L HLA-DQA1*01-B1*05L
  REGION 1..12: note = CONT. FROM ABOVE: HLA-DQA1*05:01-B1*02:01L HLA-DRB1*12:01L HLA-D PA1*03:01-B1*105:01L HLA-DQA1*05:05-B1*03:01L HLA-DRB1*14:17L HL A-DRB1*07:01L HLA-DRB1*10:01L HLA-DRB1*16:01L HLA-DQA1*01:03-B1* 06:01L HLA-DRB1*04:08L HLA-DQA1*02:01-B1*03:03L HLA-DRB1*15:03L
RINWITGGIAIA

SEQ ID NO: 10363 - protein, 12 aa, Severe acute respiratory syndrome coronavirus 2
  REGION 1..12: note = Table B: HLA-DQA1*03:02-B1*03:03L HLA-DQA1*05:01-B1*03:01L HLA-DRB1*01:02L HLA-DQA1*05:01-B1*02:01L HLA-DRB1*12:01L HLA-DQA1*02:01-B1*03:03L HLA-DRB1*15:03L
INWITGGIAIAM

SEQ ID NO: 10364 - protein, 10 aa, Severe acute respiratory syndrome coronavirus 2
  REGION 1..10: note = Table B: HLA-DQA1*03:02-B1*03:03L HLA-DQA1*05:01-B1*03:01L HLA-DQA1*01:02-B1*06:02L HLA-DQA1*05:05-B1*03:19L HLA-DQA1*05:05-B1*03:01L HLA-DQA1*01:03-B1*06:01L HLA-DQA1*02:01-B1*03:03L
ITGGIAIAMA

SEQ ID NO: 10365 - protein, 12 aa, Severe acute respiratory syndrome coronavirus 2
  REGION 1..12: note = Table B: HLA-DQA1*03:02-B1*03:03L HLA-DRB1*04:03L HLA-DRB1*04:02L HLA-DRB1*04:05L HLA-DQA1*01:02-B1*06:02L HLA-DPA1*03:01-B1*105:01L HLA-DRB1*14:17L HLA-DRB1*16:01L HLA-DQA1*01:03-B1*06:01L
TRSMWSFNPETN

SEQ ID NO: 10366 - protein, 10 aa, Severe acute respiratory syndrome coronavirus 2
  REGION 1..10: note = Table B: HLA-DQA1*03:02-B1*03:03L HLA-DQA1*05:01-B1*03:01L HLA-DRB1*04:03L HLA-DRB1*13:02L HLA-DRB1*13:03L HLA-DRB1*04:02L HLA-DQA1*01:02-B1*06:02L HLA-DRB1*01:02L HLA-DRB1*08:77L HLA-DRB3*02:01L HLA-DPA1*03:01-B1*04:02L HLA-DRB1*14:01L
  REGION 1..10: note = CONT. FROM ABOVE: HLA-DRB1*14:02L HLA-DQA1*01-B1*05L HLA-DQA1*05 :05-B1*03:19L HLA-DQA1*05:01-B1*02:01L HLA-DPA1*01:03-B1*04:01L HLA-DQA1*05:05-B1*03:116L HLA-DRB1*09:01L HLA-DRB1*12:01L HLA-DP A1*02:01-B1*13:01L HLA-DPA1*03:01-B1*105:01L
  REGION 1..10: note = CONT. FROM ABOVE: HLA-DQA1*03:01-B1*03:02L HLA-DQA1*05:05-B1*03: 01L HLA-DPA1*01:02-B1*04:01L HLA-DRB1*07:01L HLA-DRB1*16:01L HLA -DQA1*01:03-B1*06:01L HLA-DQA1*02:01-B1*03:03L HLA-DRB1*15:03L
WSFNPETNIL

SEQ ID NO: 10367 - protein, 10 aa, Severe acute respiratory syndrome coronavirus 2
  REGION 1..10: note = Table B: HLA-DQA1*03:02-B1*03:03L HLA-DQA1*05:01-B1*03:01L HLA-DRB1*09:01L HLA-DPA1*02:01-B1*13:01L HLA-DQA1*03:01-B1*03:02L HLA-DRB1*16:01L HLA-DQA1*02:01-B1*03:03L HLA-DRB1*15:03L
SFNPETNILL

SEQ ID NO: 10368 - protein, 14 aa, Severe acute respiratory syndrome coronavirus 2
  REGION 1..14: note = Table B: HLA-DQA1*03:02-B1*03:03L HLA-DQA1*05:01-B1*03:01L HLA-DRB1*13:02L HLA-DRB1*13:03L HLA-DRB1*01:03L HLA-DRB1*04:05L HLA-DRB1*01:02L HLA-DRB4*03:01NL HLA-DRB1*08:04L HLA-DRB3*02:01L HLA-DPA1*01:03-B1*03:01L HLA-DPA1*03:01-B1*04:02L
  REGION 1..14: note = CONT. FROM ABOVE: HLA-DRB1*08:01L HLA-DQA1*01-B1*05L HLA-DQA1*05 :05-B1*03:19L HLA-DQA1*05:01-B1*02:01L HLA-DRB1*04:10L HLA-DRB1* 12:02L HLA-DPA1*02:01-B1*13:01L HLA-DPA1*03:01-B1*105:01L HLA-DQ A1*05:05-B1*03:01L HLA-DRB1*04:08L HLA-DRB1*15:03L
NPETNILLNVPLHG

SEQ ID NO: 10369 - protein, 10 aa, Severe acute respiratory syndrome coronavirus 2
  REGION 1..10: note = Table B: HLA-DQA1*03:02-B1*03:03L HLA-DQA1*05:01-B1*03:01L HLA-DRB1*04:03L HLA-DRB1*01:02L HLA-DRB1*14:01L HLA-DRB1*14:02L HLA-DRB1*12:01L HLA-DQA1*03:01-B1*03:02L HLA-DRB1*16:01L HLA-DQA1*02:01-B1*03:03L HLA-DRB1*15:03L
ILLNVPLHGT

SEQ ID NO: 10370 - protein, 10 aa, Severe acute respiratory syndrome coronavirus 2
  REGION 1..10: note = Table B: HLA-DQA1*03:02-B1*03:03L HLA-DQA1*05:05-B1*03:19L
LLNVPLHGTI

SEQ ID NO: 10371 - protein, 10 aa, Severe acute respiratory syndrome coronavirus 2
  REGION 1..10: note = Table B: HLA-DQA1*03:02-B1*03:03L HLA-DQA1*03:01-B1*03:02L HLA-DQA1*02:01-B1*03:03L
LTRPLLESEL

SEQ ID NO: 10372 - protein, 10 aa, Severe acute respiratory syndrome coronavirus 2
  REGION 1..10: note = Table B: HLA-DQA1*03:02-B1*03:03L HLA-DQA1*05:05-B1*03:19M HLA-DQA1*03:01-B1*03:02L HLA-DPA1*01:03-B1*104:01L
LESELVIGAV

SEQ ID NO: 10373 - protein, 10 aa, Severe acute respiratory syndrome coronavirus 2
  REGION 1..10: note = Table B: HLA-DQA1*03:02-B1*03:03M HLA-DQA1*05:05-B1*03:19L HLA-DRB1*09:01L HLA-DQA1*03:01-B1*03:02L HLA-DPA1*01:03-B1*104:01L
SELVIGAVIL

SEQ ID NO: 10374 - protein, 11 aa, Severe acute respiratory syndrome coronavirus 2
  REGION 1..11: note = Table B: HLA-DQA1*03:02-B1*03:03L
VIGAVILRGHL

SEQ ID NO: 10375 - protein, 11 aa, Severe acute respiratory syndrome coronavirus 2
  REGION 1..11: note = Table B: HLA-DQA1*03:02-B1*03:03L
DIKDLPKEITV

SEQ ID NO: 10376 - protein, 12 aa, Severe acute respiratory syndrome coronavirus 2
  REGION 1..12: note = Table B: HLA-DQA1*03:02-B1*03:03L HLA-DRB1*04:03L HLA-DRB1*04:02L HLA-DRB1*04:05L HLA-DQA1*01:02-B1*06:02L HLA-DQA1*01:01-B1*05:01L HLA-DRB1*04:10L HLA-DRB1*14:17L HLA-DRB1*16:01L HLA-DQA1*01:03-B1*06:01L
  REGION 1..12: note = CONT. FROM ABOVE: HLA-DQA1*02:01-B1*03:03L
LPKEITVATSRT

SEQ ID NO: 10377 - protein, 10 aa, Severe acute respiratory syndrome coronavirus 2
  REGION 1..10: note = Table B: HLA-DQA1*03:02-B1*03:03L HLA-DQA1*05:01-B1*03:01L HLA-DRB1*04:03L HLA-DRB1*13:02L HLA-DRB1*13:03L HLA-DRB1*01:03L HLA-DRB1*04:02L HLA-DRB1*04:05L HLA-DQA1*01:02-B1*06:02L HLA-DRB1*01:02L HLA-DRB4*03:01NL HLA-DRB1*08:77L HLA-DRB3*02:01L
  REGION 1..10: note = CONT. FROM ABOVE: HLA-DPA1*01:03-B1*03:01L HLA-DPA1*03:01-B1*04: 02L HLA-DRB1*14:01L HLA-DRB1*11:03L HLA-DRB1*11:04L HLA-DRB1*14: 02L HLA-DRB5*01:01L HLA-DQA1*01-B1*05L HLA-DQA1*05:05-B1*03:19L HLA-DQA1*05:01-B1*02:01L HLA-DPA1*01:03-B1*04:01L
  REGION 1..10: note = CONT. FROM ABOVE: HLA-DQA1*05:05-B1*03:116L HLA-DRB1*09:01L HLA- DPA1*01:03-B1*04:02L HLA-DRB1*12:01L HLA-DRB1*12:02L HLA-DPA1*02 :01-B1*13:01L HLA-DPA1*03:01-B1*105:01L HLA-DQA1*03:01-B1*03:02L HLA-DRB1*14:54L HLA-DQA1*05:05-B1*03:01L HLA-DRB1*14:17L
  REGION 1..10: note = CONT. FROM ABOVE: HLA-DPA1*01:02-B1*04:01L HLA-DRB1*07:01L HLA-D RB1*16:01L HLA-DQA1*01:03-B1*06:01L HLA-DQA1*02:01-B1*03:03L HLA -DRB1*15:03L
EITVATSRTL

SEQ ID NO: 10378 - protein, 10 aa, Severe acute respiratory syndrome coronavirus 2
  REGION 1..10: note = Table B: HLA-DQA1*03:02-B1*03:03L HLA-DQA1*05:01-B1*03:01L HLA-DRB1*04:01L HLA-DRB1*04:03L HLA-DRB1*13:02L HLA-DRB1*13:03M HLA-DRB1*01:03M HLA-DRB1*04:02L HLA-DQA1*01:02-B1*06:02M HLA-DRB1*01:01L HLA-DRB4*03:01NL HLA-DRB1*08:77M
  REGION 1..10: note = CONT. FROM ABOVE: HLA-DPA1*01:03-B1*03:01M HLA-DPA1*03:01-B1*04: 02L HLA-DRB1*03:01L HLA-DRB1*14:01L HLA-DRB1*11:02L HLA-DRB1*11: 03L HLA-DRB1*11:04L HLA-DRB1*14:02M HLA-DRB1*11:01L HLA-DRB5*01: 01L HLA-DQA1*01-B1*05L HLA-DQA1*05:05-B1*03:19M
  REGION 1..10: note = CONT. FROM ABOVE: HLA-DQA1*05:01-B1*02:01M HLA-DRB4*01:01L HLA-D PA1*01:03-B1*04:01M HLA-DQA1*05:05-B1*03:116L HLA-DPA1*01:03-B1* 04:02L HLA-DRB1*12:01L HLA-DRB1*12:02L HLA-DPA1*02:01-B1*13:01L HLA-DPA1*03:01-B1*105:01L HLA-DQA1*03:01-B1*03:02L
  REGION 1..10: note = CONT. FROM ABOVE: HLA-DRB1*14:54L HLA-DPA1*01:03-B1*104:01L HLA- DQA1*05:05-B1*03:01L HLA-DRB1*14:17L HLA-DPA1*01:02-B1*04:01L HL A-DRB1*10:01L HLA-DRB1*16:01M HLA-DQA1*01:03-B1*06:01L HLA-DRB1* 08:02L HLA-DQA1*02:01-B1*03:03M HLA-DRB1*15:03L
TVATSRTLSY

SEQ ID NO: 10379 - protein, 13 aa, Severe acute respiratory syndrome coronavirus 2
  REGION 1..13: note = Table B: HLA-DQA1*03:02-B1*03:03L HLA-DRB1*04:01L HLA-DRB1*04:03L HLA-DRB1*04:02L HLA-DRB1*04:04L HLA-DRB1*08:77L HLA-DRB3*02:01L HLA-DPA1*01:03-B1*03:01L HLA-DPA1*03:01-B1*04:02L HLA-DRB1*14:01L HLA-DRB1*11:03L
  REGION 1..13: note = CONT. FROM ABOVE: HLA-DRB1*11:01L HLA-DQA1*01-B1*05L HLA-DQA1*05 :01-B1*02:01L HLA-DRB1*09:01L HLA-DRB3*01:01L HLA-DPA1*02:01-B1* 13:01L HLA-DPA1*01:02-B1*04:01L
LSYYKLGASQRVA

SEQ ID NO: 10380 - protein, 11 aa, Severe acute respiratory syndrome coronavirus 2
  REGION 1..11: note = Table B: HLA-DQA1*03:02-B1*03:03L HLA-DQA1*05:01-B1*03:01L HLA-DRB1*04:03L HLA-DRB1*13:02L HLA-DRB1*13:03L HLA-DRB1*04:02L HLA-DRB1*04:05L HLA-DQA1*01:02-B1*06:02L HLA-DRB1*01:01L HLA-DRB4*03:01NL HLA-DRB1*08:04L HLA-DRB1*08:77L HLA-DRB1*14:01L
  REGION 1..11: note = CONT. FROM ABOVE: HLA-DRB1*11:03L HLA-DRB1*11:04L HLA-DRB1*14:02 L HLA-DRB1*08:01L HLA-DRB1*11:01L HLA-DQA1*05:05-B1*03:19L HLA-D RB1*12:01L HLA-DRB1*12:02L HLA-DPA1*03:01-B1*105:01L HLA-DQA1*03 :01-B1*03:02L HLA-DRB1*14:54L HLA-DQA1*05:05-B1*03:01L
  REGION 1..11: note = CONT. FROM ABOVE: HLA-DRB1*14:17L HLA-DPA1*01:02-B1*04:01L HLA-D RB1*07:01L HLA-DRB1*10:01L HLA-DQA1*01:03-B1*06:01L HLA-DRB1*04: 08L HLA-DRB1*15:03L
YKLGASQRVAG

SEQ ID NO: 10381 - protein, 11 aa, Severe acute respiratory syndrome coronavirus 2
  REGION 1..11: note = Table B: HLA-DQA1*03:02-B1*03:03L HLA-DRB1*04:03L HLA-DRB1*04:02L HLA-DRB1*14:17L HLA-DQA1*02:01-B1*03:03L
GASQRVAGDSG

SEQ ID NO: 10382 - protein, 12 aa, Severe acute respiratory syndrome coronavirus 2
  REGION 1..12: note = Table B: HLA-DQA1*03:02-B1*03:03L HLA-DRB1*04:03L HLA-DQA1*01-B1*05L HLA-DQA1*05:01-B1*02:01L
ASQRVAGDSGFA

SEQ ID NO: 10383 - protein, 10 aa, Severe acute respiratory syndrome coronavirus 2
  REGION 1..10: note = Table B: HLA-DQA1*03:02-B1*03:03L HLA-DRB1*13:03L
RVAGDSGFAA

SEQ ID NO: 10384 - protein, 12 aa, Severe acute respiratory syndrome coronavirus 2
  REGION 1..12: note = Table B: HLA-DQA1*03:02-B1*03:03L HLA-DQA1*05:01-B1*03:01L HLA-DRB1*04:03L HLA-DRB1*01:03L HLA-DRB1*04:02L HLA-DRB1*04:05L HLA-DRB1*01:02L HLA-DRB4*03:01NL HLA-DQA1*01:01-B1*05:01L HLA-DQA1*01-B1*05L HLA-DRB1*12:01L HLA-DRB1*14:17L
  REGION 1..12: note = CONT. FROM ABOVE: HLA-DRB1*04:08L
VAGDSGFAAYSR

SEQ ID NO: 10385 - protein, 12 aa, Severe acute respiratory syndrome coronavirus 2
  REGION 1..12: note = Table B: HLA-DQA1*03:02-B1*03:03L HLA-DRB1*08:77L HLA-DRB1*11:02L HLA-DQA1*01-B1*05L HLA-DRB1*12:01L
AGDSGFAAYSRY

SEQ ID NO: 10386 - protein, 12 aa, Severe acute respiratory syndrome coronavirus 2
  REGION 1..12: note = Table B: HLA-DQA1*03:02-B1*03:03L HLA-DQA1*01:01-B1*05:01L HLA-DRB1*04:08L
GDSGFAAYSRYR

SEQ ID NO: 10387 - protein, 12 aa, Severe acute respiratory syndrome coronavirus 2
  REGION 1..12: note = Table B: HLA-DQA1*03:02-B1*03:03L HLA-DQA1*05:01-B1*03:01L HLA-DRB1*04:01L HLA-DRB1*13:02L HLA-DRB1*04:04L HLA-DQA1*01:02-B1*06:02L HLA-DRB1*01:02L HLA-DRB1*08:04L HLA-DRB1*08:77L HLA-DRB3*02:01L HLA-DPA1*01:03-B1*03:01L
  REGION 1..12: note = CONT. FROM ABOVE: HLA-DPA1*03:01-B1*04:02L HLA-DRB1*14:01L HLA-D RB1*11:03L HLA-DRB1*11:04L HLA-DRB1*14:02L HLA-DQA1*01:01-B1*05: 01L HLA-DRB1*08:01L HLA-DRB1*11:01L HLA-DRB5*01:01L HLA-DQA1*05: 01-B1*02:01L HLA-DRB1*04:10L HLA-DRB1*09:01L HLA-DRB1*12:01L
  REGION 1..12: note = CONT. FROM ABOVE: HLA-DRB1*12:02L HLA-DRB3*01:01L HLA-DPA1*02:01 -B1*13:01L HLA-DPA1*03:01-B1*105:01L HLA-DQA1*05:05-B1*03:01L HL A-DPA1*01:02-B1*04:01L HLA-DRB1*07:01L HLA-DRB1*10:01L HLA-DRB1* 04:08L HLA-DRB1*08:03L HLA-DRB1*15:03L
IGNYKLNTDHSS

SEQ ID NO: 10388 - protein, 14 aa, Severe acute respiratory syndrome coronavirus 2
  REGION 1..14: note = Table B: HLA-DQA1*03:02-B1*03:03L HLA-DQA1*05:01-B1*03:01L HLA-DQA1*01:02-B1*06:02L HLA-DRB3*02:01L HLA-DPA1*01:03-B1*03:01L HLA-DPA1*03:01-B1*04:02L HLA-DRB1*11:02L HLA-DQA1*05:05-B1*03:19L
  REGION 1..14: note = CONT. FROM ABOVE: HLA-DPA1*01:03-B1*04:02L HLA-DPA1*02:01-B1*13: 01L HLA-DPA1*03:01-B1*105:01L HLA-DQA1*05:05-B1*03:01L HLA-DPA1* 01:02-B1*04:01L HLA-DRB1*08:02L
GNYKLNTDHSSSSD

SEQ ID NO: 10389 - protein, 11 aa, Severe acute respiratory syndrome coronavirus 2
  REGION 1..11: note = Table B: HLA-DQA1*03:02-B1*03:03L HLA-DRB1*04:02L HLA-DRB1*04:05L HLA-DRB4*03:01NL HLA-DQA1*05:01-B1*02:01L HLA-DRB1*14:17L HLA-DQA1*02:01-B1*03:03L
LNTDHSSSSDN

SEQ ID NO: 10390 - protein, 11 aa, Severe acute respiratory syndrome coronavirus 2
  REGION 1..11: note = Table B: HLA-DQA1*03:02-B1*03:03L HLA-DRB1*04:03L HLA-DQA1*01:01-B1*05:01L HLA-DRB1*16:01L HLA-DQA1*02:01-B1*03:03L
TDHSSSSDNIA

SEQ ID NO: 10391 - protein, 10 aa, Severe acute respiratory syndrome coronavirus 2
  REGION 1..10: note = Table B: HLA-DQA1*03:02-B1*03:03L HLA-DQA1*05:01-B1*03:01L HLA-DRB1*13:03L HLA-DRB1*04:02L HLA-DPA1*03:01-B1*04:02L HLA-DRB1*14:01L HLA-DQA1*01-B1*05L HLA-DQA1*05:01-B1*02:01L HLA-DQA1*05:05-B1*03:116L HLA-DRB1*09:01L
  REGION 1..10: note = CONT. FROM ABOVE: HLA-DPA1*03:01-B1*105:01L HLA-DQA1*03:01-B1*03 :02L HLA-DPA1*01:02-B1*04:01L HLA-DRB1*16:01L HLA-DQA1*02:01-B1* 03:03L HLA-DRB1*15:03L
HSSSSDNIAL

SEQ ID NO: 10392 - protein, 10 aa, Severe acute respiratory syndrome coronavirus 2
  REGION 1..10: note = Table B: HLA-DQA1*03:02-B1*03:03L HLA-DQA1*01:02-B1*06:02L HLA-DPA1*03:01-B1*04:02L HLA-DRB1*11:02L HLA-DRB1*14:02L HLA-DQA1*05:05-B1*03:19L HLA-DQA1*05:05-B1*03:116L HLA-DPA1*01:03-B1*04:02L HLA-DPA1*02:01-B1*13:01L
  REGION 1..10: note = CONT. FROM ABOVE: HLA-DPA1*03:01-B1*105:01L HLA-DQA1*03:01-B1*03 :02L HLA-DPA1*01:03-B1*104:01L HLA-DPA1*01:02-B1*04:01L HLA-DRB1 *16:01L HLA-DQA1*01:03-B1*06:01L HLA-DQA1*02:01-B1*03:03L HLA-DR B1*15:03L
FHLVDFQVTI

SEQ ID NO: 10393 - protein, 10 aa, Severe acute respiratory syndrome coronavirus 2
  REGION 1..10: note = Table B: HLA-DQA1*03:02-B1*03:03L HLA-DRB1*08:77L HLA-DRB3*02:01L HLA-DQA1*05:01-B1*02:01L HLA-DRB1*09:01L HLA-DRB1*12:01L HLA-DRB1*07:01L HLA-DRB1*16:01L HLA-DQA1*02:01-B1*03:03L HLA-DRB1*15:03L
DFQVTIAEIL

SEQ ID NO: 10394 - protein, 10 aa, Severe acute respiratory syndrome coronavirus 2
  REGION 1..10: note = Table B: HLA-DQA1*03:02-B1*03:03L HLA-DQA1*03:01-B1*03:02L HLA-DQA1*02:01-B1*03:03L
RTFKVSIWNL

SEQ ID NO: 10395 - protein, 10 aa, Severe acute respiratory syndrome coronavirus 2
  REGION 1..10: note = Table B: HLA-DQA1*03:02-B1*03:03L HLA-DRB1*04:03L HLA-DQA1*01-B1*05L HLA-DQA1*05:01-B1*02:01L HLA-DPA1*03:01-B1*105:01L HLA-DQA1*03:01-B1*03:02L HLA-DPA1*01:02-B1*04:01L HLA-DQA1*01:03-B1*06:01L
  REGION 1..10: note = CONT. FROM ABOVE: HLA-DQA1*02:01-B1*03:03L
DYIINLIIKN

SEQ ID NO: 10396 - protein, 10 aa, Severe acute respiratory syndrome coronavirus 2
  REGION 1..10: note = Table B: HLA-DQA1*03:02-B1*03:03L HLA-DQA1*05:01-B1*03:01L HLA-DRB1*13:02L HLA-DRB1*13:03L HLA-DRB1*01:03L HLA-DRB1*04:05L HLA-DQA1*01:02-B1*06:02L HLA-DRB1*01:02L HLA-DRB1*08:77L HLA-DRB3*02:01L HLA-DPA1*01:03-B1*03:01L
  REGION 1..10: note = CONT. FROM ABOVE: HLA-DPA1*03:01-B1*04:02L HLA-DRB1*14:01L HLA-D RB1*14:02L HLA-DQA1*05:05-B1*03:19L HLA-DQA1*05:01-B1*02:01L HLA -DRB4*01:01L HLA-DPA1*01:03-B1*04:01L HLA-DQA1*05:05-B1*03:116L HLA-DRB1*09:01L HLA-DPA1*01:03-B1*04:02L HLA-DRB1*12:01L
  REGION 1..10: note = CONT. FROM ABOVE: HLA-DPA1*02:01-B1*13:01L HLA-DPA1*03:01-B1*105 :01L HLA-DQA1*03:01-B1*03:02L HLA-DPA1*01:03-B1*104:01L HLA-DQA1 *05:05-B1*03:01L HLA-DPA1*01:02-B1*04:01L HLA-DRB1*16:01L HLA-DQ A1*01:03-B1*06:01L HLA-DRB1*08:03L HLA-DQA1*02:01-B1*03:03L
  REGION 1..10: note = CONT. FROM ABOVE: HLA-DRB1*15:03L
YIINLIIKNL

SEQ ID NO: 10397 - protein, 13 aa, Severe acute respiratory syndrome coronavirus 2
  REGION 1..13: note = Table B: HLA-DQA1*03:02-B1*03:03L HLA-DRB1*14:04L HLA-DRB1*04:04L HLA-DRB1*03:01L HLA-DRB1*11:02L HLA-DQA1*05:01-B1*02:01L HLA-DQA1*05:05-B1*03:116L HLA-DRB1*04:10L HLA-DPA1*01:03-B1*04:02L
  REGION 1..13: note = CONT. FROM ABOVE: HLA-DPA1*01:03-B1*02:01L HLA-DPA1*01:03-B1*104 :01L HLA-DRB1*07:01L HLA-DRB1*10:01L HLA-DQA1*01:03-B1*06:01L HL A-DRB1*08:02L
LIIKNLSKSLTEN

SEQ ID NO: 10398 - protein, 10 aa, Severe acute respiratory syndrome coronavirus 2
  REGION 1..10: note = Table B: HLA-DQA1*03:02-B1*03:03M HLA-DQA1*05:01-B1*03:01L HLA-DQA1*01:02-B1*06:02L HLA-DPA1*03:01-B1*04:02L HLA-DRB1*14:01L HLA-DRB1*14:02L HLA-DQA1*05:05-B1*03:19L HLA-DQA1*05:01-B1*02:01L HLA-DPA1*01:03-B1*04:01L
  REGION 1..10: note = CONT. FROM ABOVE: HLA-DQA1*05:05-B1*03:116L HLA-DRB1*09:01L HLA- DPA1*01:03-B1*04:02L HLA-DPA1*03:01-B1*105:01L HLA-DQA1*03:01-B1 *03:02L HLA-DPA1*01:03-B1*104:01L HLA-DPA1*01:02-B1*04:01L HLA-D RB1*16:01L HLA-DQA1*01:03-B1*06:01L HLA-DQA1*02:01-B1*03:03L
  REGION 1..10: note = CONT. FROM ABOVE: HLA-DRB1*15:03L
SLTENKYSQL

SEQ ID NO: 10399 - protein, 12 aa, Severe acute respiratory syndrome coronavirus 2
  REGION 1..12: note = Table B: HLA-DQA1*03:02-B1*03:03L HLA-DRB1*04:03L HLA-DQA1*01-B1*05L HLA-DQA1*05:01-B1*02:01L HLA-DQA1*03:01-B1*03:02L HLA-DPA1*01:02-B1*04:01L HLA-DQA1*01:03-B1*06:01L HLA-DQA1*02:01-B1*03:03L
LTENKYSQLDEE

SEQ ID NO: 10400 - protein, 12 aa, Severe acute respiratory syndrome coronavirus 2
  REGION 1..12: note = Table B: HLA-DQA1*03:02-B1*03:03L HLA-DRB1*04:03L HLA-DRB1*13:03L HLA-DRB1*04:02L HLA-DRB1*04:05L HLA-DQA1*01:02-B1*06:02L HLA-DQA1*01:01-B1*05:01L HLA-DQA1*05:01-B1*02:01L HLA-DRB1*04:10L
  REGION 1..12: note = CONT. FROM ABOVE: HLA-DPA1*02:01-B1*13:01L HLA-DRB1*16:01L HLA-D QA1*01:03-B1*06:01L HLA-DQA1*02:01-B1*03:03L
ENKYSQLDEEQP

SEQ ID NO: 10401 - protein, 10 aa, Severe acute respiratory syndrome coronavirus 2
  REGION 1..10: note = Table B: HLA-DQA1*03:02-B1*03:03L HLA-DQA1*01-B1*05L HLA-DQA1*05:01-B1*02:01L HLA-DQA1*03:01-B1*03:02L
SQLDEEQPME

SEQ ID NO: 10402 - protein, 10 aa, Severe acute respiratory syndrome coronavirus 2
  REGION 1..10: note = Table B: HLA-DQA1*03:02-B1*03:03L HLA-DQA1*05:01-B1*03:01L HLA-DQA1*05:05-B1*03:19L HLA-DQA1*05:05-B1*03:116L HLA-DRB1*09:01L HLA-DQA1*03:01-B1*03:02L HLA-DPA1*01:03-B1*104:01L HLA-DQA1*02:01-B1*03:03L
  REGION 1..10: note = CONT. FROM ABOVE: HLA-DRB1*15:03L
QLDEEQPMEI

SEQ ID NO: 10403 - protein, 11 aa, Severe acute respiratory syndrome coronavirus 2
  REGION 1..11: note = Table B: HLA-DQA1*03:02-B1*03:03L HLA-DQA1*05:01-B1*03:01L HLA-DRB1*04:03L HLA-DRB1*13:03L HLA-DRB1*04:02L HLA-DQA1*05:01-B1*02:01L HLA-DRB1*14:17L HLA-DRB1*16:01L HLA-DQA1*02:01-B1*03:03L
GTYEGNSPFHP

SEQ ID NO: 10404 - protein, 10 aa, Severe acute respiratory syndrome coronavirus 2
  REGION 1..10: note = Table B: HLA-DQA1*03:02-B1*03:03L HLA-DQA1*05:05-B1*03:19L HLA-DQA1*05:01-B1*02:01L HLA-DQA1*03:01-B1*03:02L HLA-DPA1*01:03-B1*104:01L HLA-DPA1*01:02-B1*04:01L HLA-DQA1*02:01-B1*03:03L
YEGNSPFHPL

SEQ ID NO: 10405 - protein, 11 aa, Severe acute respiratory syndrome coronavirus 2
  REGION 1..11: note = Table B: HLA-DQA1*03:02-B1*03:03L HLA-DQA1*01:03-B1*06:01L
GNSPFHPLADN

SEQ ID NO: 10406 - protein, 11 aa, Severe acute respiratory syndrome coronavirus 2
  REGION 1..11: note = Table B: HLA-DQA1*03:02-B1*03:03L HLA-DRB1*13:02L HLA-DRB1*04:04L HLA-DRB1*08:77L HLA-DRB3*02:01L HLA-DPA1*01:03-B1*03:01L HLA-DPA1*03:01-B1*04:02L HLA-DRB1*03:01L HLA-DRB1*14:01L HLA-DRB1*11:03L HLA-DRB1*11:04L
  REGION 1..11: note = CONT. FROM ABOVE: HLA-DRB1*14:02L HLA-DRB1*08:01L HLA-DRB1*11:01 L HLA-DQA1*05:05-B1*03:19L HLA-DRB4*01:01L HLA-DPA1*01:03-B1*04: 01L HLA-DQA1*05:05-B1*03:116L HLA-DRB1*04:10L HLA-DRB1*09:01L HL A-DPA1*01:03-B1*04:02L HLA-DRB1*12:02L HLA-DRB3*01:01L
  REGION 1..11: note = CONT. FROM ABOVE: HLA-DRB1*14:54L HLA-DPA1*01:03-B1*104:01L HLA- DQA1*05:05-B1*03:01L HLA-DRB1*07:01L HLA-DRB1*10:01L HLA-DRB1*04 :08L HLA-DRB1*08:02L HLA-DRB1*08:03L
SPFHPLADNKF

SEQ ID NO: 10407 - protein, 12 aa, Severe acute respiratory syndrome coronavirus 2
  REGION 1..12: note = Table B: HLA-DQA1*03:02-B1*03:03L HLA-DQA1*05:01-B1*03:01L HLA-DQA1*01:02-B1*06:02L HLA-DPA1*01:03-B1*03:01L HLA-DPA1*03:01-B1*04:02L HLA-DRB1*08:01L HLA-DQA1*05:05-B1*03:19L HLA-DPA1*01:03-B1*04:02L
  REGION 1..12: note = CONT. FROM ABOVE: HLA-DRB1*12:01L HLA-DPA1*02:01-B1*13:01L HLA-D PA1*03:01-B1*105:01L HLA-DQA1*03:01-B1*03:02L HLA-DQA1*05:05-B1* 03:01L HLA-DPA1*01:02-B1*04:01L HLA-DRB1*16:01L HLA-DQA1*01:03-B 1*06:01L HLA-DRB1*04:08L HLA-DQA1*02:01-B1*03:03L
DNKFALTCFSTQ

SEQ ID NO: 10408 - protein, 12 aa, Severe acute respiratory syndrome coronavirus 2
  REGION 1..12: note = Table B: HLA-DQA1*03:02-B1*03:03L HLA-DQA1*05:01-B1*03:01L HLA-DQA1*01:02-B1*06:02L HLA-DRB1*01:02L HLA-DQA1*05:05-B1*03:19L HLA-DQA1*05:01-B1*02:01L HLA-DRB1*12:01L HLA-DPA1*03:01-B1*105:01L
  REGION 1..12: note = CONT. FROM ABOVE: HLA-DQA1*03:01-B1*03:02L HLA-DQA1*05:05-B1*03: 01L HLA-DRB1*16:01L HLA-DRB1*04:08L HLA-DQA1*02:01-B1*03:03L HLA -DRB1*15:03L
TQFAFACPDGVK

SEQ ID NO: 10409 - protein, 10 aa, Severe acute respiratory syndrome coronavirus 2
  REGION 1..10: note = Table B: HLA-DQA1*03:02-B1*03:03L HLA-DQA1*05:01-B1*03:01L HLA-DQA1*01:02-B1*06:02L HLA-DQA1*05:05-B1*03:19L HLA-DQA1*03:01-B1*03:02L HLA-DPA1*01:03-B1*104:01L HLA-DRB1*16:01L HLA-DQA1*02:01-B1*03:03L HLA-DRB1*15:03L
FACPDGVKHV

SEQ ID NO: 10410 - protein, 16 aa, Severe acute respiratory syndrome coronavirus 2
  REGION 1..16: note = Table B: HLA-DQA1*03:02-B1*03:03L HLA-DRB1*08:77L
GVKHVYQLRARSVSPK

SEQ ID NO: 10411 - protein, 13 aa, Severe acute respiratory syndrome coronavirus 2
  REGION 1..13: note = Table B: HLA-DQA1*03:02-B1*03:03L HLA-DQA1*05:01-B1*03:01L HLA-DRB1*04:03L HLA-DRB1*13:02L HLA-DRB1*13:03L HLA-DRB1*01:03L HLA-DRB1*04:02L HLA-DRB1*04:05L HLA-DRB1*01:02L HLA-DRB1*08:04L HLA-DPA1*01:03-B1*03:01L HLA-DPA1*03:01-B1*04:02L
  REGION 1..13: note = CONT. FROM ABOVE: HLA-DRB1*14:01L HLA-DQA1*01:01-B1*05:01L HLA-D RB1*04:10L HLA-DRB1*12:01L HLA-DPA1*02:01-B1*13:01L HLA-DPA1*03: 01-B1*105:01L HLA-DQA1*05:05-B1*03:01L HLA-DPA1*01:02-B1*04:01L HLA-DRB1*16:01L HLA-DQA1*01:03-B1*06:01L HLA-DRB1*04:08L
  REGION 1..13: note = CONT. FROM ABOVE: HLA-DRB1*15:03L
VSPKLFIRQEEVQ

SEQ ID NO: 10412 - protein, 10 aa, Severe acute respiratory syndrome coronavirus 2
  REGION 1..10: note = Table B: HLA-DQA1*03:02-B1*03:03L HLA-DRB1*04:03L HLA-DRB1*04:02L HLA-DQA1*01-B1*05L HLA-DQA1*03:01-B1*03:02L HLA-DPA1*01:02-B1*04:01L HLA-DRB1*16:01L HLA-DQA1*02:01-B1*03:03L
LFIRQEEVQE

SEQ ID NO: 10413 - protein, 10 aa, Severe acute respiratory syndrome coronavirus 2
  REGION 1..10: note = Table B: HLA-DQA1*03:02-B1*03:03L HLA-DQA1*05:01-B1*03:01L HLA-DQA1*01:02-B1*06:02L HLA-DPA1*03:01-B1*04:02L HLA-DRB1*14:01L HLA-DRB1*14:02L HLA-DQA1*01-B1*05L HLA-DQA1*05:01-B1*02:01L HLA-DQA1*05:05-B1*03:116L
  REGION 1..10: note = CONT. FROM ABOVE: HLA-DPA1*03:01-B1*105:01L HLA-DQA1*03:01-B1*03 :02L HLA-DPA1*01:02-B1*04:01L HLA-DRB1*16:01L HLA-DQA1*01:03-B1* 06:01L HLA-DQA1*02:01-B1*03:03L HLA-DRB1*15:03L
FIRQEEVQEL

SEQ ID NO: 10414 - protein, 10 aa, Severe acute respiratory syndrome coronavirus 2
  REGION 1..10: note = Table B: HLA-DQA1*03:02-B1*03:03L HLA-DQA1*05:05-B1*03:19L
EEVQELYSPI

SEQ ID NO: 10415 - protein, 10 aa, Severe acute respiratory syndrome coronavirus 2
  REGION 1..10: note = Table B: HLA-DQA1*03:02-B1*03:03L HLA-DQA1*05:01-B1*03:01L HLA-DRB1*13:03L HLA-DQA1*01:02-B1*06:02M HLA-DRB1*01:02L HLA-DPA1*03:01-B1*04:02L HLA-DRB1*14:01L HLA-DRB1*14:02L HLA-DQA1*05:01-B1*02:01L HLA-DPA1*01:03-B1*04:01L
  REGION 1..10: note = CONT. FROM ABOVE: HLA-DRB1*12:01L HLA-DPA1*02:01-B1*13:01L HLA-D PA1*03:01-B1*105:01L HLA-DPA1*01:02-B1*04:01L HLA-DQA1*01:03-B1* 06:01L HLA-DQA1*02:01-B1*03:03L HLA-DRB1*15:03L
EVQELYSPIF

SEQ ID NO: 10416 - protein, 10 aa, Severe acute respiratory syndrome coronavirus 2
  REGION 1..10: note = Table B: HLA-DQA1*03:02-B1*03:03L HLA-DQA1*01-B1*05L HLA-DQA1*05:01-B1*02:01L HLA-DQA1*03:01-B1*03:02L
VQELYSPIFL

SEQ ID NO: 10417 - protein, 10 aa, Severe acute respiratory syndrome coronavirus 2
  REGION 1..10: note = Table B: HLA-DQA1*03:02-B1*03:03L HLA-DRB1*11:02M HLA-DQA1*05:05-B1*03:19H HLA-DQA1*05:01-B1*02:01L HLA-DQA1*03:01-B1*03:02L HLA-DPA1*01:03-B1*104:01M
QELYSPIFLI

SEQ ID NO: 10418 - protein, 10 aa, Severe acute respiratory syndrome coronavirus 2
  REGION 1..10: note = Table B: HLA-DQA1*03:02-B1*03:03L HLA-DQA1*01:02-B1*06:02L HLA-DQA1*05:05-B1*03:19L HLA-DPA1*02:01-B1*13:01L HLA-DPA1*03:01-B1*105:01L HLA-DRB1*15:03L
ELYSPIFLIV

SEQ ID NO: 10419 - protein, 10 aa, Severe acute respiratory syndrome coronavirus 2
  REGION 1..10: note = Table B: HLA-DQA1*03:02-B1*03:03L HLA-DQA1*05:05-B1*03:19L HLA-DQA1*03:01-B1*03:02L HLA-DPA1*01:03-B1*104:01L
IELSLIDFYL

SEQ ID NO: 10420 - protein, 11 aa, Severe acute respiratory syndrome coronavirus 2
  REGION 1..11: note = Table B: HLA-DQA1*03:02-B1*03:03L HLA-DRB1*13:03L HLA-DRB1*01:03L HLA-DRB1*04:02L HLA-DRB1*04:05L HLA-DRB4*03:01NL HLA-DQA1*01-B1*05L HLA-DQA1*05:01-B1*02:01L HLA-DRB1*04:10L HLA-DRB1*12:01L HLA-DRB1*14:54L HLA-DRB1*14:17L HLA-DRB1*16:01L
  REGION 1..11: note = CONT. FROM ABOVE: HLA-DRB1*04:08L HLA-DQA1*02:01-B1*03:03L
FSLELQDHNET

SEQ ID NO: 10421 - protein, 10 aa, Severe acute respiratory syndrome coronavirus 2
  REGION 1..10: note = Table B: HLA-DQA1*03:02-B1*03:03L HLA-DQA1*05:01-B1*03:01L HLA-DRB1*04:03L HLA-DRB1*13:02L HLA-DRB1*13:03L HLA-DRB1*01:03L HLA-DRB1*04:02L HLA-DRB1*04:05L HLA-DQA1*01:02-B1*06:02L HLA-DRB1*01:02L HLA-DRB4*03:01NL HLA-DPA1*01:03-B1*03:01L
  REGION 1..10: note = CONT. FROM ABOVE: HLA-DRB1*14:01L HLA-DQA1*01:01-B1*05:01L HLA-D QA1*01-B1*05L HLA-DQA1*05:05-B1*03:19L HLA-DQA1*05:01-B1*02:01L HLA-DRB1*04:10L HLA-DRB1*12:01L HLA-DPA1*03:01-B1*105:01L HLA-DQ A1*03:01-B1*03:02L HLA-DRB1*14:54L HLA-DQA1*05:05-B1*03:01L
  REGION 1..10: note = CONT. FROM ABOVE: HLA-DRB1*14:17L HLA-DPA1*01:02-B1*04:01L HLA-D RB1*16:01L HLA-DQA1*01:03-B1*06:01L HLA-DRB1*04:08L HLA-DQA1*02: 01-B1*03:03L HLA-DRB1*15:03L
ITTVAAFHQE

SEQ ID NO: 10422 - protein, 11 aa, Severe acute respiratory syndrome coronavirus 2
  REGION 1..11: note = Table B: HLA-DQA1*03:02-B1*03:03L HLA-DQA1*05:01-B1*03:01L HLA-DRB1*04:01L HLA-DRB1*04:04L HLA-DQA1*01:02-B1*06:02L HLA-DRB1*01:01L HLA-DRB1*03:01L HLA-DQA1*01:01-B1*05:01L HLA-DRB1*08:01L HLA-DRB1*11:01L HLA-DRB5*01:01L
  REGION 1..11: note = CONT. FROM ABOVE: HLA-DQA1*05:05-B1*03:19L HLA-DRB1*13:01L HLA-D RB4*01:01L HLA-DPA1*01:03-B1*04:01L HLA-DRB1*04:10L HLA-DRB1*09: 01L HLA-DPA1*01:03-B1*04:02L HLA-DPA1*02:01-B1*13:01L HLA-DPA1*0 1:03-B1*02:01L HLA-DPA1*01:03-B1*104:01L
  REGION 1..11: note = CONT. FROM ABOVE: HLA-DQA1*05:05-B1*03:01L HLA-DRB1*07:01L HLA-D RB1*10:01L HLA-DQA1*01:03-B1*06:01L HLA-DRB1*08:03L
PYVVDDPCPIH

SEQ ID NO: 10423 - protein, 10 aa, Severe acute respiratory syndrome coronavirus 2
  REGION 1..10: note = Table B: HLA-DQA1*03:02-B1*03:03L HLA-DQA1*05:01-B1*03:01L HLA-DRB1*04:03L HLA-DRB1*13:02L HLA-DRB1*13:03L HLA-DRB1*01:03L HLA-DRB1*04:05L HLA-DQA1*01:02-B1*06:02M HLA-DRB1*01:01L HLA-DRB1*08:77L HLA-DPA1*01:03-B1*03:01L
  REGION 1..10: note = CONT. FROM ABOVE: HLA-DPA1*03:01-B1*04:02L HLA-DRB1*03:01L HLA-D RB1*14:01L HLA-DRB1*11:02L HLA-DRB1*14:02L HLA-DRB1*11:01L HLA-D QA1*01-B1*05L HLA-DQA1*05:05-B1*03:19M HLA-DQA1*05:01-B1*02:01L HLA-DRB4*01:01L HLA-DPA1*01:03-B1*04:01L
  REGION 1..10: note = CONT. FROM ABOVE: HLA-DQA1*05:05-B1*03:116L HLA-DPA1*01:03-B1*04 :02L HLA-DRB1*12:01L HLA-DPA1*02:01-B1*13:01L HLA-DPA1*03:01-B1* 105:01L HLA-DQA1*03:01-B1*03:02L HLA-DPA1*01:03-B1*104:01L HLA-D PA1*01:02-B1*04:01L HLA-DRB1*10:01L HLA-DRB1*16:01L
  REGION 1..10: note = CONT. FROM ABOVE: HLA-DQA1*01:03-B1*06:01L HLA-DRB1*08:02L HLA-D QA1*02:01-B1*03:03L HLA-DRB1*15:03L
VVDDPCPIHF

SEQ ID NO: 10424 - protein, 18 aa, Severe acute respiratory syndrome coronavirus 2
  REGION 1..18: note = Table B: HLA-DQA1*03:02-B1*03:03L HLA-DQA1*05:05-B1*03:116L
YSKWYIRVGARKSAPLIE

SEQ ID NO: 10425 - protein, 10 aa, Severe acute respiratory syndrome coronavirus 2
  REGION 1..10: note = Table B: HLA-DQA1*03:02-B1*03:03L HLA-DQA1*05:05-B1*03:19L HLA-DQA1*03:01-B1*03:02L
VDEAGSKSPI

SEQ ID NO: 10426 - protein, 10 aa, Severe acute respiratory syndrome coronavirus 2
  REGION 1..10: note = Table B: HLA-DQA1*03:02-B1*03:03L HLA-DQA1*05:01-B1*03:01L HLA-DQA1*05:05-B1*03:19L HLA-DQA1*05:01-B1*02:01L HLA-DQA1*03:01-B1*03:02L HLA-DQA1*05:05-B1*03:01L HLA-DQA1*02:01-B1*03:03L
DEAGSKSPIQ

SEQ ID NO: 10427 - protein, 12 aa, Severe acute respiratory syndrome coronavirus 2
  REGION 1..12: note = Table B: HLA-DQA1*03:02-B1*03:03L HLA-DQA1*03:01-B1*03:02L
EAGSKSPIQYID

SEQ ID NO: 10428 - protein, 13 aa, Severe acute respiratory syndrome coronavirus 2
  REGION 1..13: note = Table B: HLA-DQA1*03:02-B1*03:03L HLA-DRB1*04:03L HLA-DRB1*04:05L HLA-DQA1*01:02-B1*06:02L HLA-DQA1*05:01-B1*02:01L HLA-DPA1*02:01-B1*13:01L HLA-DQA1*01:03-B1*06:01L
GSKSPIQYIDIGN

SEQ ID NO: 10429 - protein, 11 aa, Severe acute respiratory syndrome coronavirus 2
  REGION 1..11: note = Table B: HLA-DQA1*03:02-B1*03:03L HLA-DQA1*05:01-B1*03:01L HLA-DRB1*04:03L HLA-DRB1*13:03L HLA-DRB1*01:03L HLA-DRB4*03:01NL HLA-DRB1*08:77L HLA-DPA1*03:01-B1*04:02L HLA-DRB1*03:01L HLA-DRB1*14:01L HLA-DRB1*11:02L HLA-DRB4*01:01L
  REGION 1..11: note = CONT. FROM ABOVE: HLA-DPA1*01:03-B1*04:01L HLA-DQA1*05:05-B1*03: 116L HLA-DPA1*01:03-B1*04:02L HLA-DRB1*12:01L HLA-DPA1*02:01-B1* 13:01L HLA-DQA1*03:01-B1*03:02L HLA-DQA1*05:05-B1*03:01L HLA-DPA 1*01:02-B1*04:01L HLA-DRB1*10:01L HLA-DQA1*01:03-B1*06:01L
  REGION 1..11: note = CONT. FROM ABOVE: HLA-DRB1*08:02L
SPIQYIDIGNY

SEQ ID NO: 10430 - protein, 11 aa, Severe acute respiratory syndrome coronavirus 2
  REGION 1..11: note = Table B: HLA-DQA1*03:02-B1*03:03L HLA-DRB1*04:03L HLA-DPA1*03:01-B1*04:02L HLA-DRB1*12:01L HLA-DQA1*03:01-B1*03:02L HLA-DPA1*01:02-B1*04:01L
PIQYIDIGNYT

SEQ ID NO: 10431 - protein, 10 aa, Severe acute respiratory syndrome coronavirus 2
  REGION 1..10: note = Table B: HLA-DQA1*03:02-B1*03:03M HLA-DQA1*05:01-B1*03:01L HLA-DRB1*04:03L HLA-DRB1*01:03L HLA-DRB1*04:05L HLA-DQA1*01:02-B1*06:02L HLA-DRB1*01:01L HLA-DRB1*01:02L HLA-DRB1*08:77L HLA-DPA1*03:01-B1*04:02L HLA-DRB1*14:01L
  REGION 1..10: note = CONT. FROM ABOVE: HLA-DRB1*11:02L HLA-DRB1*14:02L HLA-DRB1*08:01 L HLA-DRB1*11:01L HLA-DQA1*05:05-B1*03:19M HLA-DQA1*05:01-B1*02: 01L HLA-DRB4*01:01L HLA-DPA1*01:03-B1*04:01L HLA-DQA1*05:05-B1*0 3:116L HLA-DRB1*09:01L HLA-DPA1*01:03-B1*04:02L HLA-DRB1*12:01L
  REGION 1..10: note = CONT. FROM ABOVE: HLA-DPA1*02:01-B1*13:01M HLA-DPA1*03:01-B1*105 :01L HLA-DQA1*03:01-B1*03:02L HLA-DPA1*01:03-B1*104:01M HLA-DPA1 *01:02-B1*04:01L HLA-DRB1*10:01L HLA-DRB1*16:01L HLA-DQA1*01:03- B1*06:01M HLA-DRB1*08:03L HLA-DQA1*02:01-B1*03:03L
  REGION 1..10: note = CONT. FROM ABOVE: HLA-DRB1*15:03M
QYIDIGNYTV

SEQ ID NO: 10432 - protein, 12 aa, Severe acute respiratory syndrome coronavirus 2
  REGION 1..12: note = Table B: HLA-DQA1*03:02-B1*03:03L HLA-DQA1*05:01-B1*03:01L HLA-DQA1*01:02-B1*06:02L HLA-DQA1*05:05-B1*03:19L HLA-DQA1*05:01-B1*02:01L HLA-DPA1*03:01-B1*105:01L HLA-DQA1*03:01-B1*03:02L HLA-DQA1*05:05-B1*03:01L
  REGION 1..12: note = CONT. FROM ABOVE: HLA-DQA1*02:01-B1*03:03L
IGNYTVSCLPFT

SEQ ID NO: 10433 - protein, 13 aa, Severe acute respiratory syndrome coronavirus 2
  REGION 1..13: note = Table B: HLA-DQA1*03:02-B1*03:03L HLA-DPA1*01:03-B1*03:01L HLA-DQA1*05:01-B1*02:01L HLA-DPA1*01:03-B1*04:02L HLA-DQA1*03:01-B1*03:02L HLA-DRB1*15:03L
GNYTVSCLPFTIN

SEQ ID NO: 10434 - protein, 11 aa, Severe acute respiratory syndrome coronavirus 2
  REGION 1..11: note = Table B: HLA-DQA1*03:02-B1*03:03L HLA-DQA1*05:01-B1*03:01L HLA-DRB1*04:03L HLA-DRB1*04:02L HLA-DQA1*01:02-B1*06:02L HLA-DQA1*03:01-B1*03:02L HLA-DRB1*14:17L HLA-DRB1*16:01L HLA-DQA1*01:03-B1*06:01L HLA-DQA1*02:01-B1*03:03L
LPFTINCQEPK

SEQ ID NO: 10435 - protein, 10 aa, Severe acute respiratory syndrome coronavirus 2
  REGION 1..10: note = Table B: HLA-DQA1*03:02-B1*03:03L HLA-DRB1*11:02L HLA-DQA1*05:05-B1*03:19M HLA-DQA1*03:01-B1*03:02L HLA-DPA1*01:03-B1*104:01L
QEPKLGSLVV

SEQ ID NO: 10436 - protein, 10 aa, Severe acute respiratory syndrome coronavirus 2
  REGION 1..10: note = Table B: HLA-DQA1*03:02-B1*03:03L HLA-DQA1*01-B1*05L HLA-DQA1*05:05-B1*03:19L HLA-DPA1*01:03-B1*104:01L HLA-DPA1*01:02-B1*04:01L
YEDFLEYHDV

SEQ ID NO: 10437 - protein, 10 aa, Severe acute respiratory syndrome coronavirus 2
  REGION 1..10: note = Table B: HLA-DQA1*03:02-B1*03:03L HLA-DRB1*04:03L HLA-DRB1*04:02L HLA-DPA1*03:01-B1*04:02L HLA-DQA1*01-B1*05L HLA-DQA1*05:01-B1*02:01L HLA-DPA1*03:01-B1*105:01L HLA-DQA1*03:01-B1*03:02L HLA-DPA1*01:02-B1*04:01L
  REGION 1..10: note = CONT. FROM ABOVE: HLA-DRB1*16:01L HLA-DQA1*01:03-B1*06:01L HLA-D QA1*02:01-B1*03:03L
EDFLEYHDVR

SEQ ID NO: 10438 - protein, 10 aa, Severe acute respiratory syndrome coronavirus 2
  REGION 1..10: note = Table B: HLA-DQA1*03:02-B1*03:03L HLA-DRB1*04:03L HLA-DQA1*01:02-B1*06:02L HLA-DRB1*01:02L HLA-DPA1*03:01-B1*04:02L HLA-DQA1*01-B1*05L HLA-DQA1*05:01-B1*02:01L HLA-DPA1*02:01-B1*13:01L
  REGION 1..10: note = CONT. FROM ABOVE: HLA-DPA1*03:01-B1*105:01L HLA-DQA1*03:01-B1*03 :02L HLA-DPA1*01:02-B1*04:01L HLA-DRB1*16:01L HLA-DQA1*01:03-B1* 06:01L HLA-DQA1*02:01-B1*03:03L HLA-DRB1*15:03L
FLEYHDVRVV

SEQ ID NO: 10439 - protein, 10 aa, Severe acute respiratory syndrome coronavirus 2
  REGION 1..10: note = Table B: HLA-DQA1*03:02-B1*03:03M HLA-DQA1*05:01-B1*03:01L HLA-DPA1*03:01-B1*04:02L HLA-DRB1*11:02L HLA-DQA1*05:05-B1*03:19L HLA-DQA1*05:01-B1*02:01L HLA-DQA1*05:05-B1*03:116L HLA-DRB1*09:01L
  REGION 1..10: note = CONT. FROM ABOVE: HLA-DPA1*01:03-B1*04:02L HLA-DQA1*03:01-B1*03: 02L HLA-DPA1*01:03-B1*104:01L HLA-DPA1*01:02-B1*04:01L HLA-DRB1* 16:01L HLA-DQA1*01:03-B1*06:01L HLA-DQA1*02:01-B1*03:03L HLA-DRB 1*15:03L
LEYHDVRVVL

SEQ ID NO: 10440 - protein, 11 aa, Severe acute respiratory syndrome coronavirus 2
  REGION 1..11: note = Table B: HLA-DQA1*03:02-B1*03:03L HLA-DRB1*04:03L HLA-DRB1*01:03L HLA-DRB1*04:05L HLA-DRB1*01:01L HLA-DRB1*01:02L HLA-DPA1*03:01-B1*04:02L HLA-DRB1*14:02L HLA-DQA1*01:01-B1*05:01L HLA-DQA1*05:05-B1*03:19L
  REGION 1..11: note = CONT. FROM ABOVE: HLA-DQA1*05:01-B1*02:01L HLA-DPA1*01:03-B1*04: 01L HLA-DPA1*01:03-B1*04:02L HLA-DRB1*12:01L HLA-DRB1*16:01L
EYHDVRVVLDF

SEQ ID NO: 10441 - protein, 17 aa, Severe acute respiratory syndrome coronavirus 2
  REGION 1..17: note = Table B: HLA-DQA1*03:02-B1*03:03L HLA-DQA1*05:01-B1*03:01L HLA-DRB1*04:03L HLA-DRB1*13:02L HLA-DRB1*04:05L HLA-DPA1*01:03-B1*03:01L HLA-DRB1*14:01L HLA-DRB1*11:04L HLA-DRB1*08:01L HLA-DRB1*11:01L HLA-DQA1*05:05-B1*03:19L
  REGION 1..17: note = CONT. FROM ABOVE: HLA-DRB1*12:01L HLA-DRB3*01:01L HLA-DPA1*02:01 -B1*13:01L HLA-DPA1*01:03-B1*104:01L HLA-DQA1*05:05-B1*03:01L HL A-DRB1*07:01L HLA-DRB1*16:01L HLA-DRB1*04:08L HLA-DRB1*15:03L
GPQNQRNAPRITFGGPS

SEQ ID NO: 10442 - protein, 12 aa, Severe acute respiratory syndrome coronavirus 2
  REGION 1..12: note = Table B: HLA-DQA1*03:02-B1*03:03L HLA-DRB1*04:02L HLA-DQA1*01-B1*05L
APRITFGGPSDS

SEQ ID NO: 10443 - protein, 13 aa, Severe acute respiratory syndrome coronavirus 2
  REGION 1..13: note = Table B: HLA-DQA1*03:02-B1*03:03L HLA-DQA1*05:01-B1*03:01L HLA-DQA1*01:02-B1*06:02L HLA-DQA1*05:05-B1*03:19L HLA-DQA1*03:01-B1*03:02L HLA-DQA1*05:05-B1*03:01L HLA-DQA1*01:03-B1*06:01L HLA-DQA1*02:01-B1*03:03L
ITFGGPSDSTGSN

SEQ ID NO: 10444 - protein, 13 aa, Severe acute respiratory syndrome coronavirus 2
  REGION 1..13: note = Table B: HLA-DQA1*03:02-B1*03:03L HLA-DQA1*03:01-B1*03:02L
GPSDSTGSNQNGE

SEQ ID NO: 10445 - protein, 12 aa, Severe acute respiratory syndrome coronavirus 2
  REGION 1..12: note = Table B: HLA-DQA1*03:02-B1*03:03L HLA-DQA1*05:01-B1*03:01L
SDSTGSNQNGER

SEQ ID NO: 10446 - protein, 12 aa, Severe acute respiratory syndrome coronavirus 2
  REGION 1..12: note = Table B: HLA-DQA1*03:02-B1*03:03L HLA-DQA1*05:01-B1*03:01L HLA-DQA1*05:05-B1*03:19L
DSTGSNQNGERS

SEQ ID NO: 10447 - protein, 10 aa, Severe acute respiratory syndrome coronavirus 2
  REGION 1..10: note = Table B: HLA-DQA1*03:02-B1*03:03L HLA-DQA1*05:01-B1*03:01L HLA-DRB1*13:03M HLA-DRB1*01:03L HLA-DRB1*04:02L HLA-DRB1*04:05L HLA-DRB4*03:01NL HLA-DPA1*03:01-B1*04:02L HLA-DRB1*14:01L HLA-DRB1*11:03L HLA-DRB1*08:01L HLA-DRB5*01:01L
  REGION 1..10: note = CONT. FROM ABOVE: HLA-DQA1*01-B1*05M HLA-DQA1*05:01-B1*02:01L HL A-DRB1*13:01L HLA-DRB3*01:01L HLA-DPA1*03:01-B1*105:01L HLA-DQA1 *03:01-B1*03:02L HLA-DRB1*14:17L HLA-DPA1*01:02-B1*04:01L HLA-DR B1*10:01L HLA-DRB1*16:01L
RPQGLPNNTA

SEQ ID NO: 10448 - protein, 13 aa, Severe acute respiratory syndrome coronavirus 2
  REGION 1..13: note = Table B: HLA-DQA1*03:02-B1*03:03L HLA-DQA1*05:01-B1*03:01L HLA-DQA1*05:05-B1*03:19L HLA-DPA1*03:01-B1*105:01L HLA-DQA1*05:05-B1*03:01L HLA-DQA1*02:01-B1*03:03L
LPNNTASWFTALT

SEQ ID NO: 10449 - protein, 12 aa, Severe acute respiratory syndrome coronavirus 2
  REGION 1..12: note = Table B: HLA-DQA1*03:02-B1*03:03L HLA-DRB1*04:03L HLA-DRB1*04:02L HLA-DRB1*04:05L HLA-DQA1*01:02-B1*06:02L HLA-DRB1*04:10L HLA-DPA1*03:01-B1*105:01L HLA-DQA1*03:01-B1*03:02L HLA-DRB1*14:17L
  REGION 1..12: note = CONT. FROM ABOVE: HLA-DQA1*01:03-B1*06:01L HLA-DQA1*02:01-B1*03: 03L
TASWFTALTQHG

SEQ ID NO: 10450 - protein, 12 aa, Severe acute respiratory syndrome coronavirus 2
  REGION 1..12: note = Table B: HLA-DQA1*03:02-B1*03:03L HLA-DRB1*13:03L HLA-DRB1*04:05L HLA-DRB1*01:02L HLA-DRB1*08:01L HLA-DQA1*05:05-B1*03:19L HLA-DRB1*04:10L HLA-DRB1*12:01L HLA-DRB1*14:54L HLA-DRB1*10:01L
ASWFTALTQHGK

SEQ ID NO: 10451 - protein, 10 aa, Severe acute respiratory syndrome coronavirus 2
  REGION 1..10: note = Table B: HLA-DQA1*03:02-B1*03:03L HLA-DQA1*05:01-B1*03:01L HLA-DRB1*04:03L HLA-DRB1*13:03L HLA-DRB1*01:03L HLA-DRB1*04:02L HLA-DRB1*04:05L HLA-DQA1*01:02-B1*06:02L HLA-DRB1*01:02L HLA-DRB4*03:01NL HLA-DRB1*14:01L HLA-DQA1*05:05-B1*03:19L
  REGION 1..10: note = CONT. FROM ABOVE: HLA-DQA1*05:01-B1*02:01L HLA-DRB1*12:01L HLA-D PA1*03:01-B1*105:01L HLA-DQA1*03:01-B1*03:02L HLA-DRB1*14:54L HL A-DQA1*05:05-B1*03:01L HLA-DRB1*14:17L HLA-DPA1*01:02-B1*04:01L HLA-DRB1*16:01L HLA-DQA1*01:03-B1*06:01L HLA-DRB1*04:08L
  REGION 1..10: note = CONT. FROM ABOVE: HLA-DQA1*02:01-B1*03:03L HLA-DRB1*15:03L
FTALTQHGKE

SEQ ID NO: 10452 - protein, 10 aa, Severe acute respiratory syndrome coronavirus 2
  REGION 1..10: note = Table B: HLA-DQA1*03:02-B1*03:03L HLA-DQA1*05:01-B1*03:01L HLA-DRB1*04:03L HLA-DRB1*13:02L HLA-DRB1*13:03L HLA-DRB1*01:03L HLA-DRB1*04:02L HLA-DRB1*04:05L HLA-DQA1*01:02-B1*06:02L HLA-DRB1*01:02L HLA-DRB4*03:01NL HLA-DRB1*14:01L
  REGION 1..10: note = CONT. FROM ABOVE: HLA-DQA1*01:01-B1*05:01L HLA-DRB1*08:01L HLA-D QA1*01-B1*05L HLA-DQA1*05:05-B1*03:19L HLA-DQA1*05:01-B1*02:01L HLA-DRB1*04:10L HLA-DRB1*12:01L HLA-DPA1*03:01-B1*105:01L HLA-DQ A1*03:01-B1*03:02L HLA-DRB1*14:54L HLA-DQA1*05:05-B1*03:01L
  REGION 1..10: note = CONT. FROM ABOVE: HLA-DRB1*14:17L HLA-DPA1*01:02-B1*04:01L HLA-D RB1*16:01L HLA-DQA1*01:03-B1*06:01L HLA-DRB1*04:08L HLA-DQA1*02: 01-B1*03:03L
TALTQHGKED

SEQ ID NO: 10453 - protein, 13 aa, Severe acute respiratory syndrome coronavirus 2
  REGION 1..13: note = Table B: HLA-DQA1*03:02-B1*03:03L HLA-DRB1*01:02L HLA-DQA1*05:05-B1*03:19L
DLKFPRGQGVPIN

SEQ ID NO: 10454 - protein, 12 aa, Severe acute respiratory syndrome coronavirus 2
  REGION 1..12: note = Table B: HLA-DQA1*03:02-B1*03:03L HLA-DRB1*04:03L HLA-DRB1*13:02L HLA-DRB1*04:02L HLA-DRB1*04:05L HLA-DQA1*01:02-B1*06:02L HLA-DRB1*01:02L HLA-DRB4*03:01NL HLA-DRB1*08:04L HLA-DPA1*01:03-B1*03:01L HLA-DRB1*14:02L
  REGION 1..12: note = CONT. FROM ABOVE: HLA-DQA1*01:01-B1*05:01L HLA-DRB1*08:01L HLA-D RB1*11:01L HLA-DQA1*05:05-B1*03:19M HLA-DQA1*05:01-B1*02:01L HLA -DQA1*05:05-B1*03:116L HLA-DPA1*01:03-B1*04:02L HLA-DRB1*12:01L HLA-DPA1*03:01-B1*105:01L HLA-DPA1*01:03-B1*104:01L
  REGION 1..12: note = CONT. FROM ABOVE: HLA-DQA1*05:05-B1*03:01M HLA-DRB1*14:17L HLA-D QA1*01:03-B1*06:01L HLA-DRB1*04:08L
FPRGQGVPINTN

SEQ ID NO: 10455 - protein, 14 aa, Severe acute respiratory syndrome coronavirus 2
  REGION 1..14: note = Table B: HLA-DQA1*03:02-B1*03:03L HLA-DQA1*05:05-B1*03:01L HLA-DQA1*02:01-B1*03:03L
GQGVPINTNSSPDD

SEQ ID NO: 10456 - protein, 12 aa, Severe acute respiratory syndrome coronavirus 2
  REGION 1..12: note = Table B: HLA-DQA1*03:02-B1*03:03L HLA-DQA1*05:01-B1*03:01L HLA-DRB1*13:02L HLA-DRB1*13:03L HLA-DRB1*01:03L HLA-DRB1*04:04L HLA-DQA1*01:02-B1*06:02L HLA-DRB1*08:77L HLA-DPA1*01:03-B1*03:01L HLA-DRB1*11:03L HLA-DRB1*11:04L
  REGION 1..12: note = CONT. FROM ABOVE: HLA-DQA1*01:01-B1*05:01L HLA-DRB5*01:01L HLA-D QA1*01-B1*05L HLA-DQA1*05:05-B1*03:19L HLA-DRB1*12:01L HLA-DRB1* 12:02L HLA-DQA1*05:05-B1*03:01L HLA-DRB1*07:01L HLA-DRB1*10:01L HLA-DRB1*16:01L HLA-DRB1*04:08L HLA-DRB1*08:03L
  REGION 1..12: note = CONT. FROM ABOVE: HLA-DQA1*02:01-B1*03:03L
VPINTNSSPDDQ

SEQ ID NO: 10457 - protein, 12 aa, Severe acute respiratory syndrome coronavirus 2
  REGION 1..12: note = Table B: HLA-DQA1*03:02-B1*03:03L HLA-DRB1*04:03L HLA-DRB1*04:05L HLA-DRB1*04:10L HLA-DRB1*12:01L HLA-DQA1*03:01-B1*03:02L HLA-DRB1*16:01L HLA-DQA1*01:03-B1*06:01L HLA-DQA1*02:01-B1*03:03L
INTNSSPDDQIG

SEQ ID NO: 10458 - protein, 14 aa, Severe acute respiratory syndrome coronavirus 2
  REGION 1..14: note = Table B: HLA-DQA1*03:02-B1*03:03L HLA-DQA1*05:01-B1*03:01L HLA-DRB1*04:03L HLA-DRB1*13:02L HLA-DRB1*13:03L HLA-DRB1*01:03L HLA-DRB1*04:02L HLA-DRB1*04:04L HLA-DRB1*04:05L HLA-DQA1*01:02-B1*06:02L HLA-DRB1*01:02L HLA-DRB1*08:04L
  REGION 1..14: note = CONT. FROM ABOVE: HLA-DPA1*01:03-B1*03:01L HLA-DPA1*03:01-B1*04: 02L HLA-DRB1*08:01L HLA-DQA1*01-B1*05L HLA-DQA1*05:01-B1*02:01L HLA-DPA1*01:03-B1*04:01L HLA-DPA1*01:03-B1*04:02L HLA-DRB1*12:01 L HLA-DPA1*02:01-B1*13:01L HLA-DPA1*03:01-B1*105:01L
  REGION 1..14: note = CONT. FROM ABOVE: HLA-DQA1*03:01-B1*03:02L HLA-DPA1*01:03-B1*02: 01L HLA-DPA1*01:03-B1*104:01L HLA-DQA1*05:05-B1*03:01L HLA-DPA1* 01:02-B1*04:01L HLA-DRB1*16:01L HLA-DQA1*01:03-B1*06:01L HLA-DRB 1*04:08L HLA-DRB1*08:03L HLA-DQA1*02:01-B1*03:03L
  REGION 1..14: note = CONT. FROM ABOVE: HLA-DRB1*15:03L
SPRWYFYYLGTGPE

SEQ ID NO: 10459 - protein, 11 aa, Severe acute respiratory syndrome coronavirus 2
  REGION 1..11: note = Table B: HLA-DQA1*03:02-B1*03:03L HLA-DRB1*04:03L HLA-DRB1*13:03L HLA-DRB1*04:02L HLA-DRB1*04:05L HLA-DRB4*03:01NL HLA-DQA1*01-B1*05L HLA-DQA1*05:01-B1*02:01L HLA-DRB1*04:10L HLA-DQA1*03:01-B1*03:02L HLA-DRB1*14:54L HLA-DRB1*14:17L
  REGION 1..11: note = CONT. FROM ABOVE: HLA-DRB1*16:01L HLA-DRB1*04:08L HLA-DQA1*02:01 -B1*03:03L
FYYLGTGPEAG

SEQ ID NO: 10460 - protein, 12 aa, Severe acute respiratory syndrome coronavirus 2
  REGION 1..12: note = Table B: HLA-DQA1*03:02-B1*03:03L HLA-DQA1*05:01-B1*03:01L HLA-DQA1*01:02-B1*06:02L HLA-DQA1*05:05-B1*03:19L HLA-DQA1*05:01-B1*02:01L HLA-DPA1*03:01-B1*105:01L HLA-DQA1*03:01-B1*03:02L HLA-DQA1*05:05-B1*03:01L
  REGION 1..12: note = CONT. FROM ABOVE: HLA-DQA1*01:03-B1*06:01L HLA-DQA1*02:01-B1*03: 03L
YLGTGPEAGLPY

SEQ ID NO: 10461 - protein, 12 aa, Severe acute respiratory syndrome coronavirus 2
  REGION 1..12: note = Table B: HLA-DQA1*03:02-B1*03:03L HLA-DQA1*05:01-B1*03:01L HLA-DQA1*05:05-B1*03:19L HLA-DQA1*05:05-B1*03:01L HLA-DQA1*01:03-B1*06:01L HLA-DQA1*02:01-B1*03:03L
LGTGPEAGLPYG

SEQ ID NO: 10462 - protein, 10 aa, Severe acute respiratory syndrome coronavirus 2
  REGION 1..10: note = Table B: HLA-DQA1*03:02-B1*03:03L HLA-DQA1*05:01-B1*03:01L HLA-DQA1*05:05-B1*03:19L HLA-DQA1*05:05-B1*03:01L HLA-DQA1*01:03-B1*06:01L HLA-DQA1*02:01-B1*03:03L
PEAGLPYGAN

SEQ ID NO: 10463 - protein, 11 aa, Severe acute respiratory syndrome coronavirus 2
  REGION 1..11: note = Table B: HLA-DQA1*03:02-B1*03:03L HLA-DRB1*04:02L
AGLPYGANKDG

SEQ ID NO: 10464 - protein, 10 aa, Severe acute respiratory syndrome coronavirus 2
  REGION 1..10: note = Table B: HLA-DQA1*03:02-B1*03:03L HLA-DQA1*05:01-B1*03:01L HLA-DRB1*13:03L HLA-DRB1*04:05L HLA-DQA1*01:02-B1*06:02L HLA-DRB1*01:01L HLA-DRB1*01:02L HLA-DPA1*03:01-B1*04:02L HLA-DRB1*14:01L HLA-DQA1*01-B1*05L HLA-DQA1*05:05-B1*03:19L
  REGION 1..10: note = CONT. FROM ABOVE: HLA-DQA1*05:05-B1*03:116L HLA-DPA1*02:01-B1*13 :01L HLA-DPA1*03:01-B1*105:01L HLA-DPA1*01:02-B1*04:01L HLA-DQA1 *01:03-B1*06:01L HLA-DRB1*08:03L HLA-DRB1*15:03L
LPYGANKDGI

SEQ ID NO: 10465 - protein, 13 aa, Severe acute respiratory syndrome coronavirus 2
  REGION 1..13: note = Table B: HLA-DQA1*03:02-B1*03:03L HLA-DQA1*05:01-B1*03:01L HLA-DQA1*05:05-B1*03:19L HLA-DQA1*03:01-B1*03:02L
GANKDGIIWVATE

SEQ ID NO: 10466 - protein, 12 aa, Severe acute respiratory syndrome coronavirus 2
  REGION 1..12: note = Table B: HLA-DQA1*03:02-B1*03:03L HLA-DQA1*05:01-B1*03:01L HLA-DQA1*01:02-B1*06:02L HLA-DQA1*05:05-B1*03:19L HLA-DPA1*03:01-B1*105:01L HLA-DQA1*03:01-B1*03:02L HLA-DQA1*05:05-B1*03:01L HLA-DQA1*02:01-B1*03:03L
NKDGIIWVATEG

SEQ ID NO: 10467 - protein, 13 aa, Severe acute respiratory syndrome coronavirus 2
  REGION 1..13: note = Table B: HLA-DQA1*03:02-B1*03:03L HLA-DQA1*05:01-B1*03:01L HLA-DRB1*01:03L HLA-DRB1*04:02L HLA-DRB1*04:04L HLA-DRB1*04:05L HLA-DRB1*01:02L HLA-DRB4*03:01NL HLA-DPA1*01:03-B1*03:01L HLA-DPA1*03:01-B1*04:02L HLA-DRB1*14:01L HLA-DQA1*01-B1*05L
  REGION 1..13: note = CONT. FROM ABOVE: HLA-DQA1*05:05-B1*03:19L HLA-DRB1*04:10L HLA-D RB1*12:01L HLA-DPA1*03:01-B1*105:01L HLA-DRB1*14:54L HLA-DQA1*05 :05-B1*03:01L HLA-DRB1*16:01L HLA-DQA1*01:03-B1*06:01L HLA-DRB1* 04:08L HLA-DQA1*02:01-B1*03:03L HLA-DRB1*15:03L
KDGIIWVATEGAL

SEQ ID NO: 10468 - protein, 12 aa, Severe acute respiratory syndrome coronavirus 2
  REGION 1..12: note = Table B: HLA-DQA1*03:02-B1*03:03L HLA-DQA1*05:01-B1*03:01L HLA-DRB1*01:03L HLA-DPA1*01:03-B1*03:01L HLA-DRB1*14:01L HLA-DQA1*01-B1*05L HLA-DRB1*12:02L HLA-DPA1*03:01-B1*105:01L HLA-DRB1*10:01L HLA-DQA1*01:03-B1*06:01L HLA-DRB1*15:03L
GIIWVATEGALN

SEQ ID NO: 10469 - protein, 12 aa, Severe acute respiratory syndrome coronavirus 2
  REGION 1..12: note = Table B: HLA-DQA1*03:02-B1*03:03L HLA-DQA1*05:01-B1*03:01L HLA-DRB1*04:01L HLA-DRB1*13:02L HLA-DRB1*04:04L HLA-DRB1*04:05L HLA-DQA1*01:02-B1*06:02L HLA-DRB1*01:01L HLA-DRB1*01:02L HLA-DRB1*08:77L HLA-DPA1*01:03-B1*03:01L HLA-DRB1*11:03L
  REGION 1..12: note = CONT. FROM ABOVE: HLA-DRB1*11:04L HLA-DRB1*14:02L HLA-DQA1*05:05 -B1*03:19L HLA-DQA1*05:01-B1*02:01L HLA-DRB1*04:10L HLA-DRB1*12: 02L HLA-DPA1*03:01-B1*105:01L HLA-DRB1*10:01L HLA-DRB1*04:08L HL A-DRB1*15:03L
WVATEGALNTPK

SEQ ID NO: 10470 - protein, 10 aa, Severe acute respiratory syndrome coronavirus 2
  REGION 1..10: note = Table B: HLA-DQA1*03:02-B1*03:03L HLA-DQA1*03:01-B1*03:02L HLA-DQA1*02:01-B1*03:03L
TEGALNTPKD

SEQ ID NO: 10471 - protein, 10 aa, Severe acute respiratory syndrome coronavirus 2
  REGION 1..10: note = Table B: HLA-DQA1*03:02-B1*03:03L HLA-DRB1*04:03L HLA-DRB1*04:05L HLA-DRB1*04:10L HLA-DQA1*03:01-B1*03:02L HLA-DQA1*05:05-B1*03:01L HLA-DQA1*01:03-B1*06:01L HLA-DQA1*02:01-B1*03:03L
EGALNTPKDH

SEQ ID NO: 10472 - protein, 14 aa, Severe acute respiratory syndrome coronavirus 2
  REGION 1..14: note = Table B: HLA-DQA1*03:02-B1*03:03L HLA-DRB1*01:03L HLA-DRB1*04:05L HLA-DRB1*01:02L HLA-DQA1*01:01-B1*05:01L HLA-DRB1*12:01L HLA-DPA1*02:01-B1*13:01L HLA-DQA1*05:05-B1*03:01L HLA-DRB1*16:01L HLA-DRB1*04:08L
TPKDHIGTRNPANN

SEQ ID NO: 10473 - protein, 13 aa, Severe acute respiratory syndrome coronavirus 2
  REGION 1..13: note = Table B: HLA-DQA1*03:02-B1*03:03L HLA-DQA1*01:02-B1*06:02L HLA-DQA1*01:03-B1*06:01L
DHIGTRNPANNAA

SEQ ID NO: 10474 - protein, 10 aa, Severe acute respiratory syndrome coronavirus 2
  REGION 1..10: note = Table B: HLA-DQA1*03:02-B1*03:03L HLA-DRB1*13:03L HLA-DQA1*05:05-B1*03:19L HLA-DQA1*03:01-B1*03:02L HLA-DRB1*16:01L HLA-DQA1*02:01-B1*03:03L
TRNPANNAAI

SEQ ID NO: 10475 - protein, 14 aa, Severe acute respiratory syndrome coronavirus 2
  REGION 1..14: note = Table B: HLA-DQA1*03:02-B1*03:03L HLA-DQA1*05:01-B1*03:01L HLA-DRB1*04:03L HLA-DRB1*01:03L HLA-DQA1*05:05-B1*03:19L HLA-DQA1*05:01-B1*02:01L HLA-DPA1*03:01-B1*105:01L HLA-DQA1*03:01-B1*03:02L HLA-DQA1*05:05-B1*03:01L
  REGION 1..14: note = CONT. FROM ABOVE: HLA-DRB1*04:08L HLA-DQA1*02:01-B1*03:03L
NPANNAAIVLQLPQ

SEQ ID NO: 10476 - protein, 12 aa, Severe acute respiratory syndrome coronavirus 2
  REGION 1..12: note = Table B: HLA-DQA1*03:02-B1*03:03L HLA-DQA1*05:01-B1*03:01L HLA-DQA1*01:02-B1*06:02L HLA-DQA1*05:05-B1*03:19L HLA-DQA1*03:01-B1*03:02L HLA-DQA1*05:05-B1*03:01L HLA-DQA1*02:01-B1*03:03L
NNAAIVLQLPQG

SEQ ID NO: 10477 - protein, 10 aa, Severe acute respiratory syndrome coronavirus 2
  REGION 1..10: note = Table B: HLA-DQA1*03:02-B1*03:03L HLA-DQA1*05:01-B1*03:01L HLA-DRB1*04:03L HLA-DRB1*04:02L HLA-DRB4*03:01NL HLA-DQA1*05:01-B1*02:01L HLA-DRB1*12:01L HLA-DQA1*03:01-B1*03:02L HLA-DRB1*14:17L HLA-DRB1*16:01L
  REGION 1..10: note = CONT. FROM ABOVE: HLA-DQA1*02:01-B1*03:03L
IVLQLPQGTT

SEQ ID NO: 10478 - protein, 10 aa, Severe acute respiratory syndrome coronavirus 2
  REGION 1..10: note = Table B: HLA-DQA1*03:02-B1*03:03L HLA-DQA1*05:01-B1*03:01L HLA-DPA1*03:01-B1*04:02L HLA-DRB1*14:02L HLA-DQA1*05:05-B1*03:116L HLA-DRB1*09:01L HLA-DQA1*03:01-B1*03:02L HLA-DQA1*02:01-B1*03:03L
  REGION 1..10: note = CONT. FROM ABOVE: HLA-DRB1*15:03L
VLQLPQGTTL

SEQ ID NO: 10479 - protein, 12 aa, Severe acute respiratory syndrome coronavirus 2
  REGION 1..12: note = Table B: HLA-DQA1*03:02-B1*03:03L HLA-DRB3*02:01L HLA-DRB1*03:01L HLA-DQA1*01-B1*05L HLA-DPA1*01:03-B1*04:02L HLA-DRB1*12:01L HLA-DPA1*01:03-B1*104:01L HLA-DQA1*05:05-B1*03:01L HLA-DRB1*08:02L
LPQGTTLPKGFY

SEQ ID NO: 10480 - protein, 14 aa, Severe acute respiratory syndrome coronavirus 2
  REGION 1..14: note = Table B: HLA-DQA1*03:02-B1*03:03L HLA-DQA1*05:05-B1*03:19L HLA-DPA1*02:01-B1*13:01L HLA-DQA1*05:05-B1*03:01L HLA-DQA1*01:03-B1*06:01L HLA-DRB1*15:03L
LPKGFYAEGSRGGS

SEQ ID NO: 10481 - protein, 12 aa, Severe acute respiratory syndrome coronavirus 2
  REGION 1..12: note = Table B: HLA-DQA1*03:02-B1*03:03L HLA-DRB1*13:02L HLA-DRB1*08:04L HLA-DRB1*08:77L HLA-DPA1*01:03-B1*03:01L HLA-DRB1*08:01L HLA-DPA1*03:01-B1*105:01L HLA-DRB1*08:03L
GFYAEGSRGGSQ

SEQ ID NO: 10482 - protein, 10 aa, Severe acute respiratory syndrome coronavirus 2
  REGION 1..10: note = Table B: HLA-DQA1*03:02-B1*03:03M HLA-DRB1*13:03L HLA-DRB1*11:01L HLA-DQA1*05:05-B1*03:19L HLA-DRB1*09:01L HLA-DPA1*01:03-B1*04:02L HLA-DQA1*03:01-B1*03:02L
AEGSRGGSQA

SEQ ID NO: 10483 - protein, 13 aa, Severe acute respiratory syndrome coronavirus 2
  REGION 1..13: note = Table B: HLA-DQA1*03:02-B1*03:03L HLA-DRB1*04:03L HLA-DRB1*04:02L HLA-DRB1*04:05L HLA-DRB1*11:01L HLA-DRB1*14:17L
EGSRGGSQASSRS

SEQ ID NO: 10484 - protein, 12 aa, Severe acute respiratory syndrome coronavirus 2
  REGION 1..12: note = Table B: HLA-DQA1*03:02-B1*03:03L HLA-DQA1*05:01-B1*03:01L HLA-DRB1*01:03L HLA-DQA1*01:02-B1*06:02L HLA-DQA1*05:05-B1*03:19L HLA-DQA1*05:05-B1*03:01L HLA-DQA1*01:03-B1*06:01L HLA-DQA1*02:01-B1*03:03L
SRGGSQASSRSS

SEQ ID NO: 10485 - protein, 12 aa, Severe acute respiratory syndrome coronavirus 2
  REGION 1..12: note = Table B: HLA-DQA1*03:02-B1*03:03L HLA-DQA1*05:01-B1*03:01L HLA-DQA1*05:05-B1*03:19L HLA-DQA1*05:05-B1*03:01L HLA-DQA1*02:01-B1*03:03L
STPGSSRGTSPA

SEQ ID NO: 10486 - protein, 15 aa, Severe acute respiratory syndrome coronavirus 2
  REGION 1..15: note = Table B: HLA-DQA1*03:02-B1*03:03L HLA-DRB1*13:02L HLA-DRB1*04:05L HLA-DRB1*01:02L HLA-DPA1*01:03-B1*03:01L HLA-DQA1*01:01-B1*05:01L HLA-DRB1*08:01L HLA-DRB1*12:01L HLA-DPA1*02:01-B1*13:01L HLA-DPA1*03:01-B1*105:01L
  REGION 1..15: note = CONT. FROM ABOVE: HLA-DPA1*01:03-B1*104:01L HLA-DRB1*07:01L HLA- DRB1*04:08L HLA-DRB1*15:03L
TPGSSRGTSPARMAG

SEQ ID NO: 10487 - protein, 12 aa, Severe acute respiratory syndrome coronavirus 2
  REGION 1..12: note = Table B: HLA-DQA1*03:02-B1*03:03L HLA-DQA1*05:01-B1*03:01L HLA-DRB1*13:03L HLA-DRB1*01:03L HLA-DRB1*04:02L HLA-DRB1*04:05L HLA-DQA1*01:02-B1*06:02L HLA-DRB4*03:01NL HLA-DQA1*05:05-B1*03:19L HLA-DRB1*14:54L
  REGION 1..12: note = CONT. FROM ABOVE: HLA-DQA1*05:05-B1*03:01L HLA-DRB1*14:17L HLA-D RB1*16:01L HLA-DQA1*01:03-B1*06:01L HLA-DQA1*02:01-B1*03:03L
TSPARMAGNGGD

SEQ ID NO: 10488 - protein, 12 aa, Severe acute respiratory syndrome coronavirus 2
  REGION 1..12: note = Table B: HLA-DQA1*03:02-B1*03:03L HLA-DQA1*05:01-B1*03:01L HLA-DRB1*13:03L HLA-DRB1*01:03L HLA-DRB1*04:02L HLA-DRB1*04:05L HLA-DRB4*03:01NL HLA-DQA1*05:05-B1*03:19L HLA-DQA1*05:05-B1*03:01L HLA-DRB1*14:17L
  REGION 1..12: note = CONT. FROM ABOVE: HLA-DQA1*02:01-B1*03:03L
SPARMAGNGGDA

SEQ ID NO: 10489 - protein, 11 aa, Severe acute respiratory syndrome coronavirus 2
  REGION 1..11: note = Table B: HLA-DQA1*03:02-B1*03:03L HLA-DQA1*03:01-B1*03:02L HLA-DRB1*16:01L
RMAGNGGDAAL

SEQ ID NO: 10490 - protein, 12 aa, Severe acute respiratory syndrome coronavirus 2
  REGION 1..12: note = Table B: HLA-DQA1*03:02-B1*03:03L HLA-DPA1*03:01-B1*105:01L
GDAALALLLLDR

SEQ ID NO: 10491 - protein, 14 aa, Severe acute respiratory syndrome coronavirus 2
  REGION 1..14: note = Table B: HLA-DQA1*03:02-B1*03:03L HLA-DRB1*13:02L HLA-DRB1*01:03L HLA-DRB1*04:04L HLA-DRB1*11:04L HLA-DQA1*05:05-B1*03:19L HLA-DRB1*04:10L HLA-DPA1*01:03-B1*02:01L HLA-DPA1*01:03-B1*104:01L
DAALALLLLDRLNQ

SEQ ID NO: 10492 - protein, 10 aa, Severe acute respiratory syndrome coronavirus 2
  REGION 1..10: note = Table B: HLA-DQA1*03:02-B1*03:03L HLA-DQA1*05:01-B1*03:01L HLA-DQA1*01:02-B1*06:02L HLA-DPA1*03:01-B1*04:02L HLA-DRB1*14:01L HLA-DRB1*14:02L HLA-DQA1*05:05-B1*03:19L HLA-DQA1*05:05-B1*03:116L HLA-DPA1*01:03-B1*04:02L
  REGION 1..10: note = CONT. FROM ABOVE: HLA-DPA1*03:01-B1*105:01L HLA-DQA1*03:01-B1*03 :02L HLA-DPA1*01:02-B1*04:01L HLA-DRB1*08:03L HLA-DQA1*02:01-B1* 03:03L HLA-DRB1*15:03L
LLLLDRLNQL

SEQ ID NO: 10493 - protein, 12 aa, Severe acute respiratory syndrome coronavirus 2
  REGION 1..12: note = Table B: HLA-DQA1*03:02-B1*03:03L HLA-DQA1*05:01-B1*03:01L HLA-DRB1*01:03L HLA-DRB1*04:02L HLA-DQA1*01:02-B1*06:02L HLA-DQA1*05:05-B1*03:19L HLA-DQA1*05:01-B1*02:01L HLA-DQA1*05:05-B1*03:01L HLA-DRB1*14:17L
  REGION 1..12: note = CONT. FROM ABOVE: HLA-DQA1*01:03-B1*06:01L HLA-DQA1*02:01-B1*03: 03L
MSGKGQQQQGQT

SEQ ID NO: 10494 - protein, 13 aa, Severe acute respiratory syndrome coronavirus 2
  REGION 1..13: note = Table B: HLA-DQA1*03:02-B1*03:03L HLA-DQA1*02:01-B1*03:03L
SGKGQQQQGQTVT

SEQ ID NO: 10495 - protein, 10 aa, Severe acute respiratory syndrome coronavirus 2
  REGION 1..10: note = Table B: HLA-DQA1*03:02-B1*03:03L HLA-DQA1*05:01-B1*03:01L HLA-DRB1*04:03L HLA-DRB1*13:03L HLA-DRB1*01:03L HLA-DRB1*04:02L HLA-DRB4*03:01NL HLA-DQA1*05:05-B1*03:19L HLA-DQA1*05:01-B1*02:01L HLA-DRB1*12:01L
  REGION 1..10: note = CONT. FROM ABOVE: HLA-DQA1*03:01-B1*03:02L HLA-DQA1*05:05-B1*03: 01L HLA-DRB1*14:17L HLA-DPA1*01:02-B1*04:01L HLA-DRB1*16:01L HLA -DQA1*01:03-B1*06:01L HLA-DQA1*02:01-B1*03:03L
TATKAYNVTQ

SEQ ID NO: 10496 - protein, 12 aa, Severe acute respiratory syndrome coronavirus 2
  REGION 1..12: note = Table B: HLA-DQA1*03:02-B1*03:03L HLA-DRB1*04:02L HLA-DQA1*01:02-B1*06:02L HLA-DQA1*01-B1*05L HLA-DQA1*05:01-B1*02:01L HLA-DQA1*01:03-B1*06:01L
ATKAYNVTQAFG

SEQ ID NO: 10497 - protein, 16 aa, Severe acute respiratory syndrome coronavirus 2
  REGION 1..16: note = Table B: HLA-DQA1*03:02-B1*03:03L HLA-DRB1*04:01L HLA-DRB1*04:04L HLA-DRB1*08:77L HLA-DRB3*02:01L HLA-DPA1*03:01-B1*04:02L HLA-DRB1*03:01L HLA-DRB1*11:03L HLA-DRB1*14:02L HLA-DQA1*01-B1*05L HLA-DQA1*05:05-B1*03:19L
  REGION 1..16: note = CONT. FROM ABOVE: HLA-DQA1*05:01-B1*02:01L HLA-DRB1*13:01L HLA-D RB1*09:01L HLA-DPA1*02:01-B1*13:01L HLA-DPA1*01:02-B1*04:01L HLA -DRB1*10:01L
TKAYNVTQAFGRRGPE

SEQ ID NO: 10498 - protein, 12 aa, Severe acute respiratory syndrome coronavirus 2
  REGION 1..12: note = Table B: HLA-DQA1*03:02-B1*03:03L HLA-DQA1*05:01-B1*02:01L HLA-DQA1*03:01-B1*03:02L
GPEQTQGNFGDQ

SEQ ID NO: 10499 - protein, 10 aa, Severe acute respiratory syndrome coronavirus 2
  REGION 1..10: note = Table B: HLA-DQA1*03:02-B1*03:03L HLA-DQA1*01-B1*05L HLA-DQA1*05:01-B1*02:01L HLA-DQA1*03:01-B1*03:02L HLA-DRB1*16:01L
TQGNFGDQEL

SEQ ID NO: 10500 - protein, 12 aa, Severe acute respiratory syndrome coronavirus 2
  REGION 1..12: note = Table B: HLA-DQA1*03:02-B1*03:03L HLA-DQA1*05:01-B1*03:01L HLA-DRB1*13:03L HLA-DRB1*01:03L HLA-DRB1*04:05L HLA-DQA1*01:02-B1*06:02L HLA-DQA1*01:01-B1*05:01L HLA-DPA1*03:01-B1*105:01L HLA-DPA1*01:02-B1*04:01L
  REGION 1..12: note = CONT. FROM ABOVE: HLA-DRB1*04:08L
GNFGDQELIRQG

SEQ ID NO: 10501 - protein, 11 aa, Severe acute respiratory syndrome coronavirus 2
  REGION 1..11: note = Table B: HLA-DQA1*03:02-B1*03:03L HLA-DRB1*04:03L HLA-DQA1*05:01-B1*02:01L HLA-DQA1*01:03-B1*06:01L HLA-DQA1*02:01-B1*03:03L
GDQELIRQGTD

SEQ ID NO: 10502 - protein, 10 aa, Severe acute respiratory syndrome coronavirus 2
  REGION 1..10: note = Table B: HLA-DQA1*03:02-B1*03:03L HLA-DQA1*05:01-B1*03:01M HLA-DRB1*13:03L HLA-DRB4*03:01NL HLA-DRB1*08:77M HLA-DPA1*01:03-B1*03:01L HLA-DPA1*03:01-B1*04:02M HLA-DRB1*03:01L HLA-DRB1*11:02L HLA-DQA1*01-B1*05L
  REGION 1..10: note = CONT. FROM ABOVE: HLA-DQA1*05:05-B1*03:19L HLA-DQA1*05:01-B1*02: 01L HLA-DRB4*01:01M HLA-DPA1*01:03-B1*04:01M HLA-DQA1*05:05-B1*0 3:116L HLA-DPA1*01:03-B1*04:02L HLA-DRB1*12:01L HLA-DQA1*03:01-B 1*03:02L HLA-DPA1*01:03-B1*104:01L HLA-DPA1*01:02-B1*04:01L
  REGION 1..10: note = CONT. FROM ABOVE: HLA-DRB1*10:01M HLA-DRB1*16:01L HLA-DRB1*15:03 M
QELIRQGTDY

SEQ ID NO: 10503 - protein, 12 aa, Severe acute respiratory syndrome coronavirus 2
  REGION 1..12: note = Table B: HLA-DQA1*03:02-B1*03:03L HLA-DRB1*01:03L HLA-DQA1*01:02-B1*06:02L HLA-DRB1*01:02L HLA-DRB4*03:01NL HLA-DRB1*08:04L HLA-DRB1*14:01L HLA-DRB1*08:01L HLA-DRB1*04:10L HLA-DRB1*12:01L HLA-DRB1*14:54L HLA-DQA1*02:01-B1*03:03L
  REGION 1..12: note = CONT. FROM ABOVE: HLA-DRB1*15:03L
GTDYKHWPQIAQ

SEQ ID NO: 10504 - protein, 14 aa, Severe acute respiratory syndrome coronavirus 2
  REGION 1..14: note = Table B: HLA-DQA1*03:02-B1*03:03L HLA-DQA1*05:01-B1*03:01L HLA-DRB1*13:02L HLA-DRB1*13:03L HLA-DRB1*04:02L HLA-DRB1*04:04L HLA-DRB1*08:04L HLA-DPA1*01:03-B1*03:01L HLA-DPA1*03:01-B1*04:02L HLA-DRB1*14:01L HLA-DRB1*11:04L
  REGION 1..14: note = CONT. FROM ABOVE: HLA-DRB1*14:02L HLA-DRB1*08:01L HLA-DRB1*11:01 L HLA-DQA1*01-B1*05L HLA-DQA1*05:05-B1*03:19L HLA-DQA1*05:01-B1* 02:01L HLA-DRB1*04:10L HLA-DPA1*01:03-B1*04:02L HLA-DRB1*12:01L HLA-DPA1*03:01-B1*105:01L HLA-DPA1*01:03-B1*104:01L
  REGION 1..14: note = CONT. FROM ABOVE: HLA-DQA1*05:05-B1*03:01L HLA-DRB1*14:17L HLA-D PA1*01:02-B1*04:01L HLA-DRB1*07:01L HLA-DRB1*10:01L HLA-DRB1*04: 08L HLA-DRB1*08:03L HLA-DRB1*15:03L
DYKHWPQIAQFAPS

SEQ ID NO: 10505 - protein, 12 aa, Severe acute respiratory syndrome coronavirus 2
  REGION 1..12: note = Table B: HLA-DQA1*03:02-B1*03:03L HLA-DRB1*04:03L HLA-DQA1*03:01-B1*03:02L HLA-DRB1*14:17L HLA-DQA1*02:01-B1*03:03L
WPQIAQFAPSAS

SEQ ID NO: 10506 - protein, 10 aa, Severe acute respiratory syndrome coronavirus 2
  REGION 1..10: note = Table B: HLA-DQA1*03:02-B1*03:03L HLA-DQA1*05:01-B1*03:01L HLA-DRB1*04:01L HLA-DRB1*04:03L HLA-DRB1*13:02L HLA-DRB1*13:03L HLA-DRB1*01:03L HLA-DRB1*04:05L HLA-DQA1*01:02-B1*06:02M HLA-DRB1*01:01L HLA-DRB4*03:01NL HLA-DRB1*08:77L
  REGION 1..10: note = CONT. FROM ABOVE: HLA-DPA1*01:03-B1*03:01L HLA-DPA1*03:01-B1*04: 02L HLA-DRB1*03:01L HLA-DRB1*14:01L HLA-DRB1*14:02M HLA-DRB1*11: 01L HLA-DQA1*01-B1*05L HLA-DQA1*05:05-B1*03:19L HLA-DQA1*05:01-B 1*02:01L HLA-DRB4*01:01L HLA-DPA1*01:03-B1*04:01L
  REGION 1..10: note = CONT. FROM ABOVE: HLA-DQA1*05:05-B1*03:116L HLA-DPA1*01:03-B1*04 :02L HLA-DRB1*12:01L HLA-DPA1*02:01-B1*13:01L HLA-DPA1*03:01-B1* 105:01L HLA-DQA1*03:01-B1*03:02L HLA-DPA1*01:02-B1*04:01L HLA-DR B1*10:01L HLA-DRB1*16:01L HLA-DQA1*01:03-B1*06:01L
  REGION 1..10: note = CONT. FROM ABOVE: HLA-DRB1*08:02L HLA-DQA1*02:01-B1*03:03M HLA-D RB1*15:03L
AQFAPSASAF

SEQ ID NO: 10507 - protein, 12 aa, Severe acute respiratory syndrome coronavirus 2
  REGION 1..12: note = Table B: HLA-DQA1*03:02-B1*03:03L HLA-DQA1*05:01-B1*03:01L HLA-DRB1*04:03L HLA-DRB1*01:03L HLA-DQA1*01:02-B1*06:02L HLA-DQA1*01:01-B1*05:01L HLA-DQA1*05:05-B1*03:19L HLA-DQA1*05:01-B1*02:01L HLA-DPA1*03:01-B1*105:01L
  REGION 1..12: note = CONT. FROM ABOVE: HLA-DRB1*16:01L
APSASAFFGMSR

SEQ ID NO: 10508 - protein, 11 aa, Severe acute respiratory syndrome coronavirus 2
  REGION 1..11: note = Table B: HLA-DQA1*03:02-B1*03:03L HLA-DRB1*13:03L HLA-DRB1*01:03L HLA-DRB1*04:02L HLA-DRB4*03:01NL HLA-DQA1*01-B1*05L HLA-DRB1*04:10L HLA-DRB1*12:01L HLA-DRB1*14:54L HLA-DRB1*16:01L HLA-DRB1*04:08L
  REGION 1..11: note = CONT. FROM ABOVE: HLA-DQA1*02:01-B1*03:03L
SRIGMEVTPSG

SEQ ID NO: 10509 - protein, 11 aa, Severe acute respiratory syndrome coronavirus 2
  REGION 1..11: note = Table B: HLA-DQA1*03:02-B1*03:03L HLA-DQA1*05:01-B1*03:01L HLA-DRB1*04:03L HLA-DRB1*13:03L HLA-DRB1*08:77L HLA-DPA1*01:03-B1*03:01L HLA-DPA1*03:01-B1*04:02L HLA-DRB1*14:02L HLA-DQA1*01-B1*05L HLA-DRB4*01:01L
  REGION 1..11: note = CONT. FROM ABOVE: HLA-DPA1*01:03-B1*04:01L HLA-DPA1*01:03-B1*04: 02L HLA-DRB1*12:01L HLA-DPA1*02:01-B1*13:01L HLA-DPA1*03:01-B1*1 05:01L HLA-DQA1*03:01-B1*03:02L HLA-DRB1*16:01L HLA-DQA1*01:03-B 1*06:01L HLA-DQA1*02:01-B1*03:03L HLA-DRB1*15:03L
IGMEVTPSGTW

SEQ ID NO: 10510 - protein, 10 aa, Severe acute respiratory syndrome coronavirus 2
  REGION 1..10: note = Table B: HLA-DQA1*03:02-B1*03:03M HLA-DQA1*05:01-B1*03:01L HLA-DRB1*13:03L HLA-DRB1*08:77L HLA-DPA1*03:01-B1*04:02L HLA-DRB1*11:02L HLA-DRB1*14:02L HLA-DQA1*05:05-B1*03:19M HLA-DQA1*05:01-B1*02:01L HLA-DRB4*01:01L
  REGION 1..10: note = CONT. FROM ABOVE: HLA-DPA1*01:03-B1*04:01L HLA-DQA1*05:05-B1*03: 116L HLA-DRB1*09:01L HLA-DPA1*01:03-B1*04:02L HLA-DQA1*03:01-B1* 03:02M HLA-DPA1*01:03-B1*104:01L HLA-DPA1*01:02-B1*04:01L HLA-DR B1*10:01L HLA-DQA1*02:01-B1*03:03L HLA-DRB1*15:03L
MEVTPSGTWL

SEQ ID NO: 10511 - protein, 11 aa, Severe acute respiratory syndrome coronavirus 2
  REGION 1..11: note = Table B: HLA-DQA1*03:02-B1*03:03L HLA-DQA1*05:01-B1*03:01L HLA-DRB1*04:03L HLA-DRB1*04:02L HLA-DRB1*01:02L HLA-DQA1*01-B1*05L HLA-DQA1*03:01-B1*03:02L HLA-DRB1*14:17L HLA-DRB1*16:01L HLA-DQA1*01:03-B1*06:01L
  REGION 1..11: note = CONT. FROM ABOVE: HLA-DQA1*02:01-B1*03:03L
GTWLTYTGAIK

SEQ ID NO: 10512 - protein, 10 aa, Severe acute respiratory syndrome coronavirus 2
  REGION 1..10: note = Table B: HLA-DQA1*03:02-B1*03:03L HLA-DRB1*08:77L HLA-DRB3*02:01L HLA-DPA1*03:01-B1*04:02L HLA-DRB1*12:01L HLA-DPA1*01:02-B1*04:01L HLA-DRB1*07:01L HLA-DRB1*16:01L HLA-DQA1*02:01-B1*03:03L HLA-DRB1*15:03L
WLTYTGAIKL

SEQ ID NO: 10513 - protein, 12 aa, Severe acute respiratory syndrome coronavirus 2
  REGION 1..12: note = Table B: HLA-DQA1*03:02-B1*03:03L HLA-DRB1*04:03L HLA-DRB1*13:02L HLA-DRB1*01:01L HLA-DRB4*03:01NL HLA-DRB1*08:77L HLA-DRB3*02:01L HLA-DPA1*01:03-B1*03:01L HLA-DPA1*03:01-B1*04:02L HLA-DRB1*14:01L HLA-DRB1*11:03L
  REGION 1..12: note = CONT. FROM ABOVE: HLA-DRB1*11:04L HLA-DRB1*14:02L HLA-DQA1*01:01 -B1*05:01L HLA-DRB1*11:01L HLA-DQA1*01-B1*05L HLA-DQA1*05:05-B1* 03:19L HLA-DPA1*01:03-B1*04:01L HLA-DRB1*04:10L HLA-DRB1*09:01L HLA-DPA1*01:03-B1*04:02L HLA-DRB1*12:02L HLA-DRB3*01:01L
  REGION 1..12: note = CONT. FROM ABOVE: HLA-DPA1*02:01-B1*13:01L HLA-DRB1*14:54L HLA-D PA1*01:03-B1*02:01L HLA-DQA1*05:05-B1*03:01L HLA-DRB1*14:17L HLA -DRB1*07:01L HLA-DRB1*10:01L HLA-DRB1*08:02L
LTYTGAIKLDDK

SEQ ID NO: 10514 - protein, 11 aa, Severe acute respiratory syndrome coronavirus 2
  REGION 1..11: note = Table B: HLA-DQA1*03:02-B1*03:03L HLA-DRB1*13:02L HLA-DRB1*01:02L HLA-DRB1*08:04L HLA-DRB1*08:77L HLA-DRB1*14:01L HLA-DRB1*11:04L HLA-DRB1*08:01L HLA-DQA1*05:01-B1*02:01L HLA-DRB1*04:10L HLA-DRB1*12:01L HLA-DRB1*12:02L
  REGION 1..11: note = CONT. FROM ABOVE: HLA-DPA1*01:02-B1*04:01L HLA-DRB1*04:08L HLA-D RB1*08:03L HLA-DRB1*15:03L
GAIKLDDKDPN

SEQ ID NO: 10515 - protein, 10 aa, Severe acute respiratory syndrome coronavirus 2
  REGION 1..10: note = Table B: HLA-DQA1*03:02-B1*03:03L HLA-DQA1*05:01-B1*03:01L HLA-DRB1*13:03L HLA-DQA1*01-B1*05L HLA-DQA1*05:01-B1*02:01L HLA-DQA1*03:01-B1*03:02L HLA-DPA1*01:02-B1*04:01L
DPNFKDQVIL

SEQ ID NO: 10516 - protein, 11 aa, Severe acute respiratory syndrome coronavirus 2
  REGION 1..11: note = Table B: HLA-DQA1*03:02-B1*03:03L HLA-DQA1*05:01-B1*03:01L HLA-DRB1*04:03L HLA-DRB1*13:03L HLA-DRB1*01:03L HLA-DRB1*04:02L HLA-DRB1*04:05L HLA-DQA1*01:02-B1*06:02L HLA-DRB1*01:02L HLA-DRB4*03:01NL HLA-DRB1*08:04L HLA-DPA1*03:01-B1*04:02L
  REGION 1..11: note = CONT. FROM ABOVE: HLA-DRB1*14:01L HLA-DRB1*11:04L HLA-DRB1*08:01 L HLA-DRB1*12:01L HLA-DPA1*03:01-B1*105:01L HLA-DRB1*14:54L HLA- DRB1*14:17L HLA-DPA1*01:02-B1*04:01L HLA-DRB1*16:01L HLA-DQA1*01 :03-B1*06:01L HLA-DRB1*04:08L HLA-DRB1*08:03L
  REGION 1..11: note = CONT. FROM ABOVE: HLA-DQA1*02:01-B1*03:03L HLA-DRB1*15:03L
DQVILLNKHID

SEQ ID NO: 10517 - protein, 12 aa, Severe acute respiratory syndrome coronavirus 2
  REGION 1..12: note = Table B: HLA-DQA1*03:02-B1*03:03L HLA-DQA1*01:02-B1*06:02L HLA-DQA1*05:01-B1*02:01L HLA-DPA1*03:01-B1*105:01L HLA-DRB1*16:01L HLA-DQA1*01:03-B1*06:01L HLA-DQA1*02:01-B1*03:03L HLA-DRB1*15:03L
IDAYKTFPPTEP

SEQ ID NO: 10518 - protein, 12 aa, Severe acute respiratory syndrome coronavirus 2
  REGION 1..12: note = Table B: HLA-DQA1*03:02-B1*03:03L HLA-DQA1*01:02-B1*06:02L HLA-DRB1*01:02L HLA-DQA1*01:01-B1*05:01L HLA-DQA1*05:01-B1*02:01L HLA-DRB1*12:02L HLA-DPA1*02:01-B1*13:01L HLA-DRB1*10:01L HLA-DRB1*08:03L
  REGION 1..12: note = CONT. FROM ABOVE: HLA-DRB1*15:03L
DAYKTFPPTEPK

SEQ ID NO: 10519 - protein, 10 aa, Severe acute respiratory syndrome coronavirus 2
  REGION 1..10: note = Table B: HLA-DQA1*03:02-B1*03:03L HLA-DQA1*05:01-B1*03:01L HLA-DQA1*05:01-B1*02:01L HLA-DQA1*03:01-B1*03:02L HLA-DQA1*01:03-B1*06:01L HLA-DQA1*02:01-B1*03:03L
DETQALPQRQ

SEQ ID NO: 10520 - protein, 10 aa, Severe acute respiratory syndrome coronavirus 2
  REGION 1..10: note = Table B: HLA-DQA1*03:02-B1*03:03L HLA-DQA1*05:01-B1*03:01L HLA-DRB1*04:01L HLA-DRB1*13:02M HLA-DRB1*13:03M HLA-DRB1*01:03L HLA-DRB1*04:02L HLA-DRB1*04:04L HLA-DQA1*01:02-B1*06:02L HLA-DRB1*01:01L HLA-DRB4*03:01NM HLA-DRB3*02:01L HLA-DRB1*14:01L
  REGION 1..10: note = CONT. FROM ABOVE: HLA-DRB1*11:04M HLA-DRB1*14:02L HLA-DRB1*08:01 M HLA-DRB1*11:01L HLA-DRB5*01:01M HLA-DPA1*01:03-B1*04:01L HLA-D PA1*01:03-B1*04:02L HLA-DRB1*12:01M HLA-DRB1*12:02L HLA-DPA1*03: 01-B1*105:01L HLA-DQA1*03:01-B1*03:02M HLA-DRB1*14:54L
  REGION 1..10: note = CONT. FROM ABOVE: HLA-DQA1*05:05-B1*03:01M HLA-DRB1*14:17L HLA-D RB1*16:01L HLA-DQA1*01:03-B1*06:01L HLA-DRB1*08:02L HLA-DRB1*08: 03L HLA-DQA1*02:01-B1*03:03L HLA-DRB1*15:01L
ETQALPQRQK

SEQ ID NO: 10521 - protein, 10 aa, Severe acute respiratory syndrome coronavirus 2
  REGION 1..10: note = Table B: HLA-DQA1*03:02-B1*03:03L HLA-DQA1*05:01-B1*03:01L HLA-DRB1*13:02L HLA-DRB1*13:03L HLA-DRB1*01:03L HLA-DRB1*04:02L HLA-DQA1*01:02-B1*06:02L HLA-DPA1*01:03-B1*03:01L HLA-DPA1*03:01-B1*04:02L HLA-DRB1*14:01L
  REGION 1..10: note = CONT. FROM ABOVE: HLA-DQA1*01:01-B1*05:01L HLA-DRB1*08:01M HLA-D RB1*11:01L HLA-DRB5*01:01L HLA-DQA1*01-B1*05L HLA-DQA1*05:01-B1* 02:01L HLA-DRB1*13:01L HLA-DPA1*01:03-B1*04:01L HLA-DQA1*05:05-B 1*03:116L HLA-DPA1*01:03-B1*04:02L HLA-DRB3*01:01L
  REGION 1..10: note = CONT. FROM ABOVE: HLA-DQA1*03:01-B1*03:02L HLA-DPA1*01:02-B1*04: 01L HLA-DRB1*16:01L HLA-DQA1*01:03-B1*06:01L HLA-DQA1*02:01-B1*0 3:03L
RQKKQQTVTL

SEQ ID NO: 10522 - protein, 12 aa, Severe acute respiratory syndrome coronavirus 2
  REGION 1..12: note = Table B: HLA-DQA1*03:02-B1*03:03L HLA-DRB1*04:03L HLA-DQA1*05:01-B1*02:01L
KQQTVTLLPAAD

SEQ ID NO: 10523 - protein, 13 aa, Severe acute respiratory syndrome coronavirus 2
  REGION 1..13: note = Table B: HLA-DQA1*03:02-B1*03:03L HLA-DRB1*01:02L HLA-DRB1*14:17L HLA-DRB1*16:01L HLA-DRB1*15:03L
QQTVTLLPAADLD

SEQ ID NO: 10524 - protein, 11 aa, Severe acute respiratory syndrome coronavirus 2
  REGION 1..11: note = Table B: HLA-DQA1*03:02-B1*03:03L HLA-DRB1*04:03L HLA-DRB1*04:02L HLA-DRB1*04:05L HLA-DRB4*03:01NL HLA-DQA1*01-B1*05L HLA-DQA1*05:01-B1*02:01L HLA-DRB1*04:10L HLA-DRB1*12:01L HLA-DRB1*14:54L HLA-DRB1*14:17L HLA-DRB1*16:01L
  REGION 1..11: note = CONT. FROM ABOVE: HLA-DQA1*01:03-B1*06:01L HLA-DQA1*02:01-B1*03: 03L HLA-DRB1*15:03L
VTLLPAADLDD

SEQ ID NO: 10525 - protein, 12 aa, Severe acute respiratory syndrome coronavirus 2
  REGION 1..12: note = Table B: HLA-DQA1*03:02-B1*03:03L HLA-DRB1*04:02L HLA-DRB1*04:05L HLA-DRB1*04:10L HLA-DRB1*12:01L HLA-DPA1*03:01-B1*105:01L HLA-DRB1*14:17L HLA-DRB1*16:01L
TLLPAADLDDFS

SEQ ID NO: 10526 - protein, 12 aa, Severe acute respiratory syndrome coronavirus 2
  REGION 1..12: note = Table B: HLA-DQA1*03:02-B1*03:03L HLA-DRB1*04:02L HLA-DRB1*04:05L HLA-DRB1*04:10L HLA-DRB1*14:17L HLA-DRB1*16:01L HLA-DRB1*04:08L
LLPAADLDDFSK

SEQ ID NO: 10527 - protein, 12 aa, Severe acute respiratory syndrome coronavirus 2
  REGION 1..12: note = Table B: HLA-DQA1*03:02-B1*03:03L HLA-DRB1*01:03L HLA-DRB1*04:02L HLA-DRB1*04:05L HLA-DQA1*01:01-B1*05:01L HLA-DRB1*12:01L HLA-DPA1*03:01-B1*105:01L HLA-DRB1*14:17L HLA-DRB1*16:01L HLA-DQA1*01:03-B1*06:01L
LPAADLDDFSKQ

SEQ ID NO: 10528 - protein, 10 aa, Severe acute respiratory syndrome coronavirus 2
  REGION 1..10: note = Table B: HLA-DQA1*03:02-B1*03:03M HLA-DQA1*01-B1*05L HLA-DQA1*05:05-B1*03:19L HLA-DQA1*05:01-B1*02:01L HLA-DRB1*09:01L HLA-DQA1*03:01-B1*03:02L HLA-DPA1*01:03-B1*104:01L
ADLDDFSKQL

SEQ ID NO: 10529 - protein, 10 aa, Severe acute respiratory syndrome coronavirus 2
  REGION 1..10: note = Table B: HLA-DQA1*03:02-B1*03:03L HLA-DQA1*01-B1*05L HLA-DQA1*03:01-B1*03:02L
DDFSKQLQQS

SEQ ID NO: 10530 - protein, 10 aa, Severe acute respiratory syndrome coronavirus 2
  REGION 1..10: note = Table B: HLA-DQA1*03:02-B1*03:03L HLA-DQA1*03:01-B1*03:02L
DFSKQLQQSM

SEQ ID NO: 10531 - protein, 14 aa, Severe acute respiratory syndrome coronavirus 2
  REGION 1..14: note = Table B: HLA-DQA1*03:02-B1*03:03L HLA-DQA1*05:01-B1*03:01L HLA-DRB1*04:01L HLA-DRB1*13:02L HLA-DRB1*13:03L HLA-DRB1*01:03L HLA-DQA1*01:02-B1*06:02L HLA-DRB1*01:02L HLA-DRB1*08:04L HLA-DPA1*01:03-B1*03:01L HLA-DRB1*14:01L HLA-DRB1*11:04L
  REGION 1..14: note = CONT. FROM ABOVE: HLA-DQA1*01:01-B1*05:01L HLA-DQA1*05:05-B1*03: 19L HLA-DQA1*05:01-B1*02:01L HLA-DRB1*12:01L HLA-DPA1*02:01-B1*1 3:01L HLA-DPA1*03:01-B1*105:01L HLA-DQA1*05:05-B1*03:01L HLA-DRB 1*10:01L HLA-DQA1*01:03-B1*06:01L HLA-DRB1*08:03L
  REGION 1..14: note = CONT. FROM ABOVE: HLA-DRB1*15:03L
SKQLQQSMSSADST

SEQ ID NO: 10532 - protein, 14 aa, Severe acute respiratory syndrome coronavirus 2
  REGION 1..14: note = Table B: HLA-DQA1*03:02-B1*03:03L HLA-DQA1*01:02-B1*06:02L HLA-DQA1*01-B1*05L HLA-DQA1*05:01-B1*02:01L HLA-DQA1*02:01-B1*03:03L
KQLQQSMSSADSTQ

SEQ ID NO: 10533 - protein, 13 aa, Severe acute respiratory syndrome coronavirus 2
  REGION 1..13: note = Table B: HLA-DQA1*03:02-B1*03:03L HLA-DRB1*04:03L HLA-DQA1*01-B1*05L HLA-DQA1*05:01-B1*02:01L HLA-DRB1*14:17L HLA-DQA1*02:01-B1*03:03L
LQQSMSSADSTQA

SEQ ID NO: 10534 - protein, 10 aa, Severe acute respiratory syndrome coronavirus 2
  REGION 1..10: note = Table B: HLA-DQA1*03:02-B1*03:03L HLA-DRB1*04:03L HLA-DRB1*01:03L HLA-DRB1*04:05L HLA-DQA1*01:02-B1*06:02L HLA-DRB1*01:01L HLA-DRB1*01:02L HLA-DPA1*03:01-B1*04:02L HLA-DQA1*05:05-B1*03:19L HLA-DQA1*05:01-B1*02:01L
  REGION 1..10: note = CONT. FROM ABOVE: HLA-DPA1*01:03-B1*04:01L HLA-DRB1*12:01L HLA-D PA1*02:01-B1*13:01M HLA-DPA1*03:01-B1*105:01L HLA-DRB1*16:01L HL A-DQA1*01:03-B1*06:01M HLA-DQA1*02:01-B1*03:03L HLA-DRB1*15:03L
GYINVFAFPF

SEQ ID NO: 10535 - protein, 10 aa, Severe acute respiratory syndrome coronavirus 2
  REGION 1..10: note = Table B: HLA-DQA1*03:02-B1*03:03L HLA-DQA1*05:01-B1*03:01L HLA-DRB1*13:02L HLA-DRB1*13:03L HLA-DRB1*01:03L HLA-DRB1*04:05L HLA-DQA1*01:02-B1*06:02M HLA-DRB1*01:01L HLA-DRB4*03:01NL HLA-DRB1*08:77L HLA-DPA1*01:03-B1*03:01L
  REGION 1..10: note = CONT. FROM ABOVE: HLA-DPA1*03:01-B1*04:02L HLA-DRB1*03:01L HLA-D RB1*14:01L HLA-DRB1*11:02L HLA-DRB1*14:02L HLA-DQA1*01-B1*05L HL A-DQA1*05:05-B1*03:19L HLA-DQA1*05:01-B1*02:01L HLA-DRB4*01:01L HLA-DPA1*01:03-B1*04:01M HLA-DQA1*05:05-B1*03:116L
  REGION 1..10: note = CONT. FROM ABOVE: HLA-DRB1*09:01L HLA-DPA1*01:03-B1*04:02L HLA-D RB1*12:01L HLA-DPA1*02:01-B1*13:01L HLA-DPA1*03:01-B1*105:01M HL A-DPA1*01:03-B1*104:01L HLA-DQA1*05:05-B1*03:01L HLA-DPA1*01:02- B1*04:01L HLA-DRB1*10:01L HLA-DRB1*16:01L
  REGION 1..10: note = CONT. FROM ABOVE: HLA-DQA1*01:03-B1*06:01L HLA-DRB1*08:02L HLA-D QA1*02:01-B1*03:03L HLA-DRB1*15:03L
NVFAFPFTIY

SEQ ID NO: 10536 - protein, 10 aa, Severe acute respiratory syndrome coronavirus 2
  REGION 1..10: note = Table B: HLA-DQA1*03:02-B1*03:03M HLA-DQA1*05:01-B1*03:01L HLA-DRB1*01:03L HLA-DRB1*04:05L HLA-DQA1*01:02-B1*06:02L HLA-DRB1*01:02L HLA-DPA1*03:01-B1*04:02L HLA-DRB1*14:01L HLA-DRB1*11:02L HLA-DRB1*14:02L HLA-DRB1*08:01L
  REGION 1..10: note = CONT. FROM ABOVE: HLA-DQA1*05:05-B1*03:19L HLA-DQA1*05:01-B1*02: 01L HLA-DRB4*01:01L HLA-DPA1*01:03-B1*04:01L HLA-DQA1*05:05-B1*0 3:116L HLA-DRB1*09:01L HLA-DPA1*01:03-B1*04:02L HLA-DPA1*02:01-B 1*13:01L HLA-DPA1*03:01-B1*105:01L HLA-DQA1*03:01-B1*03:02L
  REGION 1..10: note = CONT. FROM ABOVE: HLA-DPA1*01:03-B1*104:01L HLA-DPA1*01:02-B1*04 :01L HLA-DRB1*10:01L HLA-DRB1*16:01L HLA-DQA1*01:03-B1*06:01L HL A-DRB1*08:03L HLA-DQA1*02:01-B1*03:03L HLA-DRB1*15:03M
FAFPFTIYSL

SEQ ID NO: 10537 - protein, 10 aa, Severe acute respiratory syndrome coronavirus 2
  REGION 1..10: note = Table B: HLA-DQA1*03:02-B1*03:03L HLA-DQA1*05:01-B1*03:01L HLA-DRB1*04:03L HLA-DRB1*04:05L HLA-DQA1*01:02-B1*06:02L HLA-DQA1*01-B1*05L HLA-DQA1*05:01-B1*02:01L HLA-DQA1*03:01-B1*03:02L HLA-DQA1*01:03-B1*06:01L
  REGION 1..10: note = CONT. FROM ABOVE: HLA-DQA1*02:01-B1*03:03L
NYIAQVDVVN

SEQ ID NO: 10538 - protein, 10 aa, Severe acute respiratory syndrome coronavirus 2
  REGION 1..10: note = Table B: HLA-DQA1*03:02-B1*03:03L HLA-DQA1*05:01-B1*03:01L HLA-DRB1*04:03L HLA-DRB1*13:03L HLA-DRB1*01:03L HLA-DRB1*04:05L HLA-DQA1*01:02-B1*06:02M HLA-DRB1*01:01L HLA-DRB1*01:02L HLA-DRB4*03:01NL HLA-DRB1*08:77L HLA-DPA1*01:03-B1*03:01L
  REGION 1..10: note = CONT. FROM ABOVE: HLA-DPA1*03:01-B1*04:02L HLA-DRB1*03:01L HLA-D RB1*14:01L HLA-DRB1*11:03L HLA-DRB1*14:02L HLA-DQA1*01:01-B1*05: 01L HLA-DRB1*11:01L HLA-DQA1*01-B1*05L HLA-DQA1*05:05-B1*03:19L HLA-DQA1*05:01-B1*02:01L HLA-DRB4*01:01L
  REGION 1..10: note = CONT. FROM ABOVE: HLA-DPA1*01:03-B1*04:01L HLA-DQA1*05:05-B1*03: 116L HLA-DRB1*09:01L HLA-DPA1*01:03-B1*04:02L HLA-DRB1*12:01L HL A-DPA1*02:01-B1*13:01M HLA-DPA1*03:01-B1*105:01L HLA-DQA1*03:01- B1*03:02L HLA-DQA1*05:05-B1*03:01L HLA-DPA1*01:02-B1*04:01L
  REGION 1..10: note = CONT. FROM ABOVE: HLA-DRB1*10:01L HLA-DRB1*16:01L HLA-DQA1*01:03 -B1*06:01M HLA-DRB1*08:03L HLA-DQA1*02:01-B1*03:03L HLA-DRB1*15: 03L
YIAQVDVVNF

SEQ ID NO: 10539 - protein, 10 aa, Severe acute respiratory syndrome coronavirus 2
  REGION 1..10: note = Table B: HLA-DQA1*03:02-B1*03:03L HLA-DQA1*05:01-B1*03:01L HLA-DRB1*04:03L HLA-DRB1*13:02L HLA-DRB1*13:03L HLA-DRB1*04:02L HLA-DRB1*04:05L HLA-DQA1*01:02-B1*06:02L HLA-DRB1*01:02L HLA-DRB4*03:01NL HLA-DRB3*02:01L HLA-DPA1*01:03-B1*03:01L
  REGION 1..10: note = CONT. FROM ABOVE: HLA-DPA1*03:01-B1*04:02L HLA-DRB1*14:01L HLA-D QA1*01-B1*05L HLA-DQA1*05:05-B1*03:19L HLA-DQA1*05:01-B1*02:01L HLA-DRB1*04:10L HLA-DRB1*12:01L HLA-DRB1*12:02L HLA-DPA1*03:01-B 1*105:01L HLA-DQA1*03:01-B1*03:02L HLA-DRB1*14:54L
  REGION 1..10: note = CONT. FROM ABOVE: HLA-DQA1*05:05-B1*03:01L HLA-DRB1*14:17L HLA-D PA1*01:02-B1*04:01L HLA-DRB1*16:01L HLA-DQA1*01:03-B1*06:01L HLA -DQA1*02:01-B1*03:03L HLA-DRB1*15:03L
IAQVDVVNFN

SEQ ID NO: 10540 - protein, 10 aa, Severe acute respiratory syndrome coronavirus 2
  REGION 1..10: note = Table B: HLA-DQA1*03:02-B1*03:03M HLA-DQA1*05:01-B1*03:01L HLA-DRB1*13:03L HLA-DRB1*01:03L HLA-DQA1*01:02-B1*06:02L HLA-DRB1*01:02L HLA-DPA1*03:01-B1*04:02L HLA-DRB1*14:01L HLA-DRB1*11:02L HLA-DRB1*14:02L HLA-DRB1*08:01L
  REGION 1..10: note = CONT. FROM ABOVE: HLA-DQA1*05:05-B1*03:19M HLA-DQA1*05:01-B1*02: 01L HLA-DRB4*01:01L HLA-DPA1*01:03-B1*04:01L HLA-DQA1*05:05-B1*0 3:116M HLA-DRB1*09:01L HLA-DPA1*01:03-B1*04:02L HLA-DPA1*02:01-B 1*13:01L HLA-DPA1*03:01-B1*105:01L HLA-DQA1*03:01-B1*03:02M
  REGION 1..10: note = CONT. FROM ABOVE: HLA-DPA1*01:03-B1*104:01L HLA-DPA1*01:02-B1*04 :01L HLA-DRB1*10:01L HLA-DRB1*16:01L HLA-DQA1*01:03-B1*06:01L HL A-DRB1*08:03L HLA-DQA1*02:01-B1*03:03M HLA-DRB1*15:03M
AQVDVVNFNL

SEQ ID NO: 10541 - protein, 14 aa, Severe acute respiratory syndrome coronavirus 2
  REGION 1..14: note = Table B: HLA-DQA1*05:01-B1*03:01L HLA-DRB1*04:05L HLA-DPA1*01:03-B1*03:01L HLA-DQA1*05:01-B1*02:01L HLA-DPA1*02:01-B1*13:01L HLA-DPA1*03:01-B1*105:01L HLA-DQA1*05:05-B1*03:01L
NEKTHVQLSLPVLQ

SEQ ID NO: 10542 - protein, 15 aa, Severe acute respiratory syndrome coronavirus 2
  REGION 1..15: note = Table B: HLA-DQA1*05:01-B1*03:01L HLA-DPA1*02:01-B1*13:01L
THVQLSLPVLQVRDV

SEQ ID NO: 10543 - protein, 10 aa, Severe acute respiratory syndrome coronavirus 2
  REGION 1..10: note = Table B: HLA-DQA1*05:01-B1*03:01L HLA-DRB1*13:02L HLA-DRB1*13:03L HLA-DRB1*01:03L HLA-DQA1*01:02-B1*06:02M HLA-DPA1*01:03-B1*03:01L HLA-DRB1*03:01L HLA-DRB1*14:01L HLA-DRB1*14:02L HLA-DRB1*11:01L HLA-DQA1*05:01-B1*02:01L
  REGION 1..10: note = CONT. FROM ABOVE: HLA-DPA1*01:03-B1*04:01L HLA-DPA1*01:03-B1*04: 02L HLA-DPA1*02:01-B1*13:01L HLA-DPA1*03:01-B1*105:01L HLA-DQA1* 01:03-B1*06:01L HLA-DRB1*08:02L HLA-DQA1*02:01-B1*03:03M HLA-DRB 1*15:03L
QVRDVLVRGF

SEQ ID NO: 10544 - protein, 11 aa, Severe acute respiratory syndrome coronavirus 2
  REGION 1..11: note = Table B: HLA-DQA1*05:01-B1*03:01L HLA-DRB1*13:02L HLA-DRB1*13:03L HLA-DRB1*01:03L HLA-DRB4*03:01NL HLA-DRB1*14:01L HLA-DQA1*05:01-B1*02:01L HLA-DRB1*12:01L HLA-DRB1*14:54L HLA-DRB1*16:01L
LVEVEKGVLPQ

SEQ ID NO: 10545 - protein, 10 aa, Severe acute respiratory syndrome coronavirus 2
  REGION 1..10: note = Table B: HLA-DQA1*05:01-B1*03:01L HLA-DRB1*13:03L HLA-DQA1*01:02-B1*06:02M HLA-DPA1*03:01-B1*04:02L HLA-DRB1*14:01L HLA-DQA1*05:05-B1*03:116L HLA-DPA1*02:01-B1*13:01L HLA-DPA1*03:01-B1*105:01M
  REGION 1..10: note = CONT. FROM ABOVE: HLA-DPA1*01:02-B1*04:01L HLA-DQA1*01:03-B1*06: 01L HLA-DQA1*02:01-B1*03:03L HLA-DRB1*15:03L
LPQLEQPYVF

SEQ ID NO: 10546 - protein, 13 aa, Severe acute respiratory syndrome coronavirus 2
  REGION 1..13: note = Table B: HLA-DQA1*05:01-B1*03:01L HLA-DRB1*13:03L HLA-DRB1*04:02L HLA-DRB1*04:04L HLA-DRB1*14:01L HLA-DRB1*11:04L HLA-DRB1*11:01L HLA-DRB3*01:01L HLA-DRB1*14:17L
VFIKRSDARTAPH

SEQ ID NO: 10547 - protein, 12 aa, Severe acute respiratory syndrome coronavirus 2
  REGION 1..12: note = Table B: HLA-DQA1*05:01-B1*03:01L HLA-DRB1*04:05L HLA-DQA1*01:02-B1*06:02L HLA-DRB1*01:02L HLA-DRB1*08:01L HLA-DRB1*12:01L HLA-DQA1*01:03-B1*06:01L HLA-DRB1*04:08L
IKRSDARTAPHG

SEQ ID NO: 10548 - protein, 10 aa, Severe acute respiratory syndrome coronavirus 2
  REGION 1..10: note = Table B: HLA-DQA1*05:01-B1*03:01L HLA-DRB1*01:03L HLA-DRB1*08:01L HLA-DQA1*03:01-B1*03:02L HLA-DRB1*16:01L HLA-DQA1*02:01-B1*03:03L
ARTAPHGHVM

SEQ ID NO: 10549 - protein, 10 aa, Severe acute respiratory syndrome coronavirus 2
  REGION 1..10: note = Table B: HLA-DQA1*05:01-B1*03:01M HLA-DRB1*13:03L HLA-DRB1*04:02L HLA-DRB1*04:05L HLA-DQA1*01:02-B1*06:02L HLA-DPA1*01:03-B1*03:01L HLA-DPA1*03:01-B1*04:02L HLA-DRB1*14:01L HLA-DRB1*08:01L HLA-DRB5*01:01L
  REGION 1..10: note = CONT. FROM ABOVE: HLA-DQA1*01-B1*05L HLA-DQA1*05:01-B1*02:01L HL A-DRB1*13:01L HLA-DPA1*01:03-B1*04:01L HLA-DRB3*01:01L HLA-DPA1* 03:01-B1*105:01L HLA-DQA1*03:01-B1*03:02L HLA-DPA1*01:02-B1*04:0 1L HLA-DRB1*10:01L HLA-DRB1*16:01L HLA-DRB1*15:01L
APHGHVMVEL

SEQ ID NO: 10550 - protein, 10 aa, Severe acute respiratory syndrome coronavirus 2
  REGION 1..10: note = Table B: HLA-DQA1*05:01-B1*03:01L HLA-DRB1*13:03M HLA-DRB1*01:03L HLA-DQA1*01:02-B1*06:02M HLA-DRB4*03:01NL HLA-DRB1*08:77L HLA-DPA1*01:03-B1*03:01L HLA-DPA1*03:01-B1*04:02L HLA-DRB1*03:01L HLA-DRB1*14:01L
  REGION 1..10: note = CONT. FROM ABOVE: HLA-DRB1*11:02L HLA-DRB1*14:02L HLA-DQA1*01-B1 *05L HLA-DQA1*05:05-B1*03:19M HLA-DQA1*05:01-B1*02:01M HLA-DRB4* 01:01L HLA-DPA1*01:03-B1*04:01L HLA-DQA1*05:05-B1*03:116L HLA-DP A1*01:03-B1*04:02L HLA-DRB1*12:01L HLA-DPA1*02:01-B1*13:01L
  REGION 1..10: note = CONT. FROM ABOVE: HLA-DPA1*03:01-B1*105:01L HLA-DPA1*01:03-B1*10 4:01L HLA-DRB1*10:01L HLA-DRB1*16:01L HLA-DRB1*08:02L HLA-DQA1*0 2:01-B1*03:03L HLA-DRB1*15:03L
LVAELEGIQY

SEQ ID NO: 10551 - protein, 12 aa, Severe acute respiratory syndrome coronavirus 2
  REGION 1..12: note = Table B: HLA-DQA1*05:01-B1*03:01L HLA-DRB1*04:03L HLA-DRB1*01:02L HLA-DPA1*03:01-B1*04:02L HLA-DRB1*14:01L HLA-DQA1*05:01-B1*02:01L HLA-DPA1*03:01-B1*105:01L HLA-DRB1*14:54L HLA-DRB1*14:17L HLA-DPA1*01:02-B1*04:01L
  REGION 1..12: note = CONT. FROM ABOVE: HLA-DRB1*16:01L HLA-DQA1*02:01-B1*03:03L HLA-D RB1*15:03L
VAELEGIQYGRS

SEQ ID NO: 10552 - protein, 14 aa, Severe acute respiratory syndrome coronavirus 2
  REGION 1..14: note = Table B: HLA-DQA1*05:01-B1*03:01L HLA-DRB1*04:05L HLA-DRB1*01:02L HLA-DRB1*12:01L HLA-DPA1*02:01-B1*13:01L
YGRSGETLGVLVPH

SEQ ID NO: 10553 - protein, 10 aa, Severe acute respiratory syndrome coronavirus 2
  REGION 1..10: note = Table B: HLA-DQA1*05:01-B1*03:01L HLA-DRB1*13:03L HLA-DRB1*04:05L HLA-DQA1*01-B1*05L HLA-DQA1*03:01-B1*03:02L HLA-DRB1*16:01L
VPHVGEIPVA

SEQ ID NO: 10554 - protein, 10 aa, Severe acute respiratory syndrome coronavirus 2
  REGION 1..10: note = Table B: HLA-DQA1*05:01-B1*03:01L
IPVAYRKVLL

SEQ ID NO: 10555 - protein, 12 aa, Severe acute respiratory syndrome coronavirus 2
  REGION 1..12: note = Table B: HLA-DQA1*05:01-B1*03:01L HLA-DQA1*03:01-B1*03:02L
NGNKGAGGHSYG

SEQ ID NO: 10556 - protein, 13 aa, Severe acute respiratory syndrome coronavirus 2
  REGION 1..13: note = Table B: HLA-DQA1*05:01-B1*03:01L HLA-DQA1*03:01-B1*03:02L HLA-DQA1*05:05-B1*03:01L HLA-DQA1*01:03-B1*06:01L
GNKGAGGHSYGAD

SEQ ID NO: 10557 - protein, 11 aa, Severe acute respiratory syndrome coronavirus 2
  REGION 1..11: note = Table B: HLA-DQA1*05:01-B1*03:01L HLA-DQA1*01:03-B1*06:01L HLA-DQA1*02:01-B1*03:03L
AGGHSYGADLK

SEQ ID NO: 10558 - protein, 13 aa, Severe acute respiratory syndrome coronavirus 2
  REGION 1..13: note = Table B: HLA-DQA1*05:01-B1*03:01L HLA-DRB1*13:03L HLA-DRB1*01:03L HLA-DQA1*01:02-B1*06:02L HLA-DRB1*01:02L HLA-DPA1*01:03-B1*03:01L HLA-DRB1*08:01L HLA-DRB1*04:10L HLA-DRB1*12:01L HLA-DPA1*02:01-B1*13:01L
  REGION 1..13: note = CONT. FROM ABOVE: HLA-DPA1*03:01-B1*105:01L HLA-DQA1*05:05-B1*03 :01L HLA-DRB1*04:08L HLA-DRB1*15:03L
YGADLKSFDLGDE

SEQ ID NO: 10559 - protein, 12 aa, Severe acute respiratory syndrome coronavirus 2
  REGION 1..12: note = Table B: HLA-DQA1*05:01-B1*03:01L HLA-DPA1*01:03-B1*04:01L HLA-DPA1*01:03-B1*04:02L HLA-DRB1*12:01L HLA-DPA1*02:01-B1*13:01L HLA-DQA1*05:05-B1*03:01L HLA-DPA1*01:02-B1*04:01L HLA-DRB1*16:01L HLA-DRB1*04:08L
  REGION 1..12: note = CONT. FROM ABOVE: HLA-DRB1*15:03L
DELGTDPYEDFQ

SEQ ID NO: 10560 - protein, 10 aa, Severe acute respiratory syndrome coronavirus 2
  REGION 1..10: note = Table B: HLA-DQA1*05:01-B1*03:01L HLA-DRB1*13:03L HLA-DQA1*01:02-B1*06:02M HLA-DPA1*03:01-B1*04:02L HLA-DQA1*05:05-B1*03:116L HLA-DPA1*02:01-B1*13:01L HLA-DPA1*03:01-B1*105:01M HLA-DQA1*01:03-B1*06:01L
  REGION 1..10: note = CONT. FROM ABOVE: HLA-DRB1*15:03L
DPYEDFQENW

SEQ ID NO: 10561 - protein, 12 aa, Severe acute respiratory syndrome coronavirus 2
  REGION 1..12: note = Table B: HLA-DQA1*05:01-B1*03:01L HLA-DQA1*01:02-B1*06:02L HLA-DRB1*08:01L HLA-DQA1*02:01-B1*03:03L
ENWNTKHSSGVT

SEQ ID NO: 10562 - protein, 10 aa, Severe acute respiratory syndrome coronavirus 2
  REGION 1..10: note = Table B: HLA-DQA1*05:01-B1*03:01L HLA-DQA1*01:02-B1*06:02L HLA-DPA1*03:01-B1*105:01L HLA-DQA1*03:01-B1*03:02L HLA-DQA1*05:05-B1*03:01L HLA-DQA1*01:03-B1*06:01L HLA-DQA1*02:01-B1*03:03L
HSSGVTRELM

SEQ ID NO: 10563 - protein, 10 aa, Severe acute respiratory syndrome coronavirus 2
  REGION 1..10: note = Table B: HLA-DQA1*05:01-B1*03:01L HLA-DRB1*13:02L HLA-DRB1*13:03L HLA-DRB1*01:03L HLA-DQA1*01:02-B1*06:02L HLA-DRB1*08:77L HLA-DPA1*01:03-B1*03:01L HLA-DRB1*03:01L HLA-DRB1*14:01L HLA-DRB1*11:02L HLA-DRB1*14:02L HLA-DRB1*11:01L
  REGION 1..10: note = CONT. FROM ABOVE: HLA-DQA1*01-B1*05L HLA-DQA1*05:05-B1*03:19L HL A-DQA1*05:01-B1*02:01L HLA-DRB4*01:01L HLA-DPA1*01:03-B1*04:01L HLA-DQA1*05:05-B1*03:116L HLA-DPA1*01:03-B1*04:02L HLA-DRB1*12:0 1L HLA-DPA1*02:01-B1*13:01L HLA-DPA1*03:01-B1*105:01L
  REGION 1..10: note = CONT. FROM ABOVE: HLA-DPA1*01:03-B1*104:01L HLA-DRB1*10:01L HLA- DRB1*16:01L HLA-DQA1*01:03-B1*06:01L HLA-DRB1*08:02L HLA-DQA1*02 :01-B1*03:03L HLA-DRB1*15:03L
LMRELNGGAY

SEQ ID NO: 10564 - protein, 11 aa, Severe acute respiratory syndrome coronavirus 2
  REGION 1..11: note = Table B: HLA-DQA1*05:01-B1*03:01L HLA-DPA1*03:01-B1*105:01L HLA-DQA1*05:05-B1*03:01L
LNGGAYTRYVD

SEQ ID NO: 10565 - protein, 11 aa, Severe acute respiratory syndrome coronavirus 2
  REGION 1..11: note = Table B: HLA-DQA1*05:01-B1*03:01L HLA-DQA1*05:05-B1*03:19L HLA-DPA1*03:01-B1*105:01L HLA-DQA1*05:05-B1*03:01L
NGGAYTRYVDN

SEQ ID NO: 10566 - protein, 12 aa, Severe acute respiratory syndrome coronavirus 2
  REGION 1..12: note = Table B: HLA-DQA1*05:01-B1*03:01L HLA-DRB1*08:04L HLA-DRB3*02:01L HLA-DPA1*01:03-B1*03:01L HLA-DPA1*03:01-B1*04:02L HLA-DRB1*14:01L HLA-DRB1*08:01L HLA-DQA1*05:05-B1*03:19L HLA-DQA1*05:05-B1*03:01L
  REGION 1..12: note = CONT. FROM ABOVE: HLA-DRB1*14:17L HLA-DRB1*04:08L
GGAYTRYVDNNF

SEQ ID NO: 10567 - protein, 16 aa, Severe acute respiratory syndrome coronavirus 2
  REGION 1..16: note = Table B: HLA-DQA1*05:01-B1*03:01L HLA-DRB1*13:02L HLA-DPA1*03:01-B1*04:02L HLA-DRB1*14:02L HLA-DQA1*05:05-B1*03:19L HLA-DPA1*01:03-B1*04:02L HLA-DPA1*01:03-B1*104:01L HLA-DQA1*05:05-B1*03:01L
GAYTRYVDNNFCGPDG

SEQ ID NO: 10568 - protein, 16 aa, Severe acute respiratory syndrome coronavirus 2
  REGION 1..16: note = Table B: HLA-DQA1*05:01-B1*03:01L HLA-DRB1*04:01L HLA-DRB1*13:02L HLA-DRB1*13:03L HLA-DRB1*01:01L HLA-DRB1*08:04L HLA-DRB1*14:01L HLA-DQA1*01-B1*05L HLA-DPA1*01:03-B1*04:02L HLA-DRB3*01:01L HLA-DPA1*01:03-B1*02:01L
  REGION 1..16: note = CONT. FROM ABOVE: HLA-DPA1*01:03-B1*104:01L HLA-DPA1*01:02-B1*04 :01L HLA-DRB1*07:01L HLA-DRB1*10:01L HLA-DRB1*08:03L
GPDGYPLECIKDLLAR

SEQ ID NO: 10569 - protein, 12 aa, Severe acute respiratory syndrome coronavirus 2
  REGION 1..12: note = Table B: HLA-DQA1*05:01-B1*03:01L HLA-DQA1*01:02-B1*06:02L HLA-DRB1*01:02L HLA-DRB1*08:01L HLA-DQA1*05:05-B1*03:01L HLA-DRB1*16:01L HLA-DQA1*01:03-B1*06:01L HLA-DRB1*04:08L
IKDLLARAGKAS

SEQ ID NO: 10570 - protein, 15 aa, Severe acute respiratory syndrome coronavirus 2
  REGION 1..15: note = Table B: HLA-DQA1*05:01-B1*03:01L HLA-DRB1*13:02L HLA-DQA1*05:05-B1*03:19L HLA-DQA1*01:03-B1*06:01L HLA-DRB1*04:08L
DLLARAGKASCTLSE

SEQ ID NO: 10571 - protein, 14 aa, Severe acute respiratory syndrome coronavirus 2
  REGION 1..14: note = Table B: HLA-DQA1*05:01-B1*03:01L HLA-DRB1*04:05L HLA-DRB1*01:02L HLA-DPA1*01:03-B1*03:01L HLA-DQA1*05:05-B1*03:19L HLA-DRB1*12:01L HLA-DPA1*02:01-B1*13:01L HLA-DPA1*01:03-B1*104:01L
  REGION 1..14: note = CONT. FROM ABOVE: HLA-DQA1*05:05-B1*03:01L HLA-DQA1*01:03-B1*06: 01L HLA-DQA1*02:01-B1*03:03L
LARAGKASCTLSEQ

SEQ ID NO: 10572 - protein, 12 aa, Severe acute respiratory syndrome coronavirus 2
  REGION 1..12: note = Table B: HLA-DQA1*05:01-B1*03:01L HLA-DRB1*01:03L HLA-DRB1*04:04L HLA-DQA1*01:02-B1*06:02L HLA-DRB1*01:02L HLA-DRB1*14:01L HLA-DQA1*01:01-B1*05:01L HLA-DQA1*05:01-B1*02:01L HLA-DRB1*04:10L
  REGION 1..12: note = CONT. FROM ABOVE: HLA-DPA1*02:01-B1*13:01L HLA-DPA1*03:01-B1*105 :01L HLA-DRB1*14:54L HLA-DPA1*01:02-B1*04:01L HLA-DQA1*01:03-B1* 06:01L HLA-DRB1*04:08L HLA-DRB1*08:03L HLA-DRB1*15:03L
SEQLDFIDTKRG

SEQ ID NO: 10573 - protein, 16 aa, Severe acute respiratory syndrome coronavirus 2
  REGION 1..16: note = Table B: HLA-DQA1*05:01-B1*03:01L HLA-DRB1*13:03L HLA-DRB1*03:01L HLA-DRB1*14:01L HLA-DRB1*11:04L HLA-DQA1*01:01-B1*05:01L HLA-DRB3*01:01L HLA-DPA1*03:01-B1*105:01L HLA-DQA1*01:03-B1*06:01L
IDTKRGVYCCREHEHE

SEQ ID NO: 10574 - protein, 10 aa, Severe acute respiratory syndrome coronavirus 2
  REGION 1..10: note = Table B: HLA-DQA1*05:01-B1*03:01M HLA-DRB1*13:03L HLA-DRB1*01:03L HLA-DQA1*01:02-B1*06:02L HLA-DRB4*03:01NL HLA-DRB1*08:77L HLA-DPA1*01:03-B1*03:01L HLA-DPA1*03:01-B1*04:02L HLA-DRB1*03:01L HLA-DRB1*14:02L
  REGION 1..10: note = CONT. FROM ABOVE: HLA-DRB1*11:01L HLA-DQA1*01-B1*05L HLA-DQA1*05 :05-B1*03:19L HLA-DQA1*05:01-B1*02:01L HLA-DRB4*01:01L HLA-DPA1* 01:03-B1*04:01L HLA-DQA1*05:05-B1*03:116L HLA-DPA1*01:03-B1*04:0 2L HLA-DRB1*12:01L HLA-DPA1*01:03-B1*104:01L
  REGION 1..10: note = CONT. FROM ABOVE: HLA-DPA1*01:02-B1*04:01L HLA-DRB1*10:01L HLA-D RB1*16:01L HLA-DRB1*08:02L HLA-DQA1*02:01-B1*03:03L HLA-DRB1*15: 03L
REHEHEIAWY

SEQ ID NO: 10575 - protein, 15 aa, Severe acute respiratory syndrome coronavirus 2
  REGION 1..15: note = Table B: HLA-DQA1*05:01-B1*03:01L HLA-DQA1*01:01-B1*05:01L
EHEHEIAWYTERSEK

SEQ ID NO: 10576 - protein, 14 aa, Severe acute respiratory syndrome coronavirus 2
  REGION 1..14: note = Table B: HLA-DQA1*05:01-B1*03:01L HLA-DRB1*13:02L HLA-DRB1*08:04L HLA-DRB3*02:01L HLA-DRB1*11:04L HLA-DRB1*07:01L HLA-DRB1*08:03L
EHEIAWYTERSEKS

SEQ ID NO: 10577 - protein, 10 aa, Severe acute respiratory syndrome coronavirus 2
  REGION 1..10: note = Table B: HLA-DQA1*05:01-B1*03:01L HLA-DRB1*01:03L HLA-DRB1*04:05L HLA-DQA1*01:02-B1*06:02L HLA-DRB1*08:77L HLA-DPA1*01:03-B1*03:01L HLA-DPA1*03:01-B1*04:02L HLA-DRB1*03:01L HLA-DRB1*14:02L HLA-DQA1*01-B1*05L
  REGION 1..10: note = CONT. FROM ABOVE: HLA-DQA1*05:05-B1*03:19L HLA-DQA1*05:01-B1*02: 01L HLA-DRB4*01:01L HLA-DPA1*01:03-B1*04:01L HLA-DPA1*01:03-B1*0 4:02L HLA-DPA1*02:01-B1*13:01L HLA-DPA1*03:01-B1*105:01L HLA-DPA 1*01:03-B1*104:01L HLA-DRB1*10:01L HLA-DRB1*16:01L
  REGION 1..10: note = CONT. FROM ABOVE: HLA-DQA1*01:03-B1*06:01L HLA-DQA1*02:01-B1*03: 03L HLA-DRB1*15:03L
WYTERSEKSY

SEQ ID NO: 10578 - protein, 12 aa, Severe acute respiratory syndrome coronavirus 2
  REGION 1..12: note = Table B: HLA-DQA1*05:01-B1*03:01L HLA-DRB1*04:02L HLA-DRB1*04:05L HLA-DQA1*01:02-B1*06:02L HLA-DPA1*01:03-B1*03:01L HLA-DQA1*01:01-B1*05:01L HLA-DQA1*05:05-B1*03:19L HLA-DPA1*02:01-B1*13:01L
  REGION 1..12: note = CONT. FROM ABOVE: HLA-DPA1*03:01-B1*105:01L HLA-DQA1*05:05-B1*03 :01L HLA-DRB1*14:17L HLA-DRB1*16:01L HLA-DQA1*01:03-B1*06:01L
SEKSYELQTPFE

SEQ ID NO: 10579 - protein, 11 aa, Severe acute respiratory syndrome coronavirus 2
  REGION 1..11: note = Table B: HLA-DQA1*05:01-B1*03:01L HLA-DRB1*01:03L HLA-DQA1*01:02-B1*06:02L HLA-DPA1*03:01-B1*04:02L HLA-DRB1*14:01L HLA-DRB1*14:02L HLA-DQA1*05:01-B1*02:01L HLA-DPA1*01:03-B1*04:01L HLA-DRB1*12:01L
  REGION 1..11: note = CONT. FROM ABOVE: HLA-DPA1*03:01-B1*105:01L HLA-DPA1*01:02-B1*04 :01L HLA-DRB1*16:01L HLA-DRB1*15:03L
TPFEIKLAKKF

SEQ ID NO: 10580 - protein, 14 aa, Severe acute respiratory syndrome coronavirus 2
  REGION 1..14: note = Table B: HLA-DQA1*05:01-B1*03:01L HLA-DRB1*01:02L HLA-DQA1*05:05-B1*03:19L HLA-DRB1*12:01L HLA-DQA1*05:05-B1*03:01L HLA-DRB1*10:01L HLA-DQA1*01:03-B1*06:01L
DTFNGECPNFVFPL

SEQ ID NO: 10581 - protein, 13 aa, Severe acute respiratory syndrome coronavirus 2
  REGION 1..13: note = Table B: HLA-DQA1*05:01-B1*03:01L HLA-DQA1*05:05-B1*03:19L HLA-DPA1*03:01-B1*105:01L HLA-DQA1*05:05-B1*03:01L HLA-DQA1*02:01-B1*03:03L
FNGECPNFVFPLN

SEQ ID NO: 10582 - protein, 10 aa, Severe acute respiratory syndrome coronavirus 2
  REGION 1..10: note = Table B: HLA-DQA1*05:01-B1*03:01L HLA-DRB1*04:03L HLA-DRB1*13:02L HLA-DRB1*13:03L HLA-DRB1*04:02L HLA-DRB4*03:01NL HLA-DRB1*08:01L HLA-DRB1*12:01L HLA-DPA1*03:01-B1*105:01L HLA-DQA1*03:01-B1*03:02L HLA-DQA1*05:05-B1*03:01L
  REGION 1..10: note = CONT. FROM ABOVE: HLA-DRB1*14:17L HLA-DRB1*16:01L HLA-DQA1*01:03 -B1*06:01L HLA-DQA1*02:01-B1*03:03L
FVFPLNSIIK

SEQ ID NO: 10583 - protein, 10 aa, Severe acute respiratory syndrome coronavirus 2
  REGION 1..10: note = Table B: HLA-DQA1*05:01-B1*03:01L HLA-DRB1*01:03L HLA-DQA1*01:02-B1*06:02L HLA-DQA1*03:01-B1*03:02L HLA-DQA1*01:03-B1*06:01L HLA-DQA1*02:01-B1*03:03L
IKTIQPRVEK

SEQ ID NO: 10584 - protein, 12 aa, Severe acute respiratory syndrome coronavirus 2
  REGION 1..12: note = Table B: HLA-DQA1*05:01-B1*03:01L HLA-DQA1*01:02-B1*06:02L HLA-DQA1*05:05-B1*03:19L HLA-DQA1*05:05-B1*03:01L HLA-DQA1*01:03-B1*06:01L
YPVASPNECNQM

SEQ ID NO: 10585 - protein, 14 aa, Severe acute respiratory syndrome coronavirus 2
  REGION 1..14: note = Table B: HLA-DQA1*05:01-B1*03:01L HLA-DRB1*01:02L HLA-DPA1*01:03-B1*04:02L HLA-DPA1*03:01-B1*105:01L HLA-DQA1*05:05-B1*03:01L HLA-DRB1*04:08L HLA-DQA1*02:01-B1*03:03L HLA-DRB1*15:03L
GDFVKATCEFCGTE

SEQ ID NO: 10586 - protein, 14 aa, Severe acute respiratory syndrome coronavirus 2
  REGION 1..14: note = Table B: HLA-DQA1*05:01-B1*03:01L HLA-DRB1*01:02L HLA-DPA1*01:03-B1*03:01L HLA-DQA1*05:05-B1*03:19L HLA-DPA1*01:03-B1*04:02L HLA-DPA1*02:01-B1*13:01L HLA-DPA1*03:01-B1*105:01L HLA-DPA1*01:03-B1*104:01L
  REGION 1..14: note = CONT. FROM ABOVE: HLA-DQA1*05:05-B1*03:01L HLA-DQA1*02:01-B1*03: 03L HLA-DRB1*15:03L
DFVKATCEFCGTEN

SEQ ID NO: 10587 - protein, 12 aa, Severe acute respiratory syndrome coronavirus 2
  REGION 1..12: note = Table B: HLA-DQA1*05:01-B1*03:01L HLA-DRB1*01:03L HLA-DRB1*04:05L HLA-DQA1*01:02-B1*06:02L HLA-DRB1*14:01L HLA-DQA1*01:01-B1*05:01L HLA-DQA1*05:05-B1*03:19L HLA-DRB1*12:01L HLA-DPA1*03:01-B1*105:01L HLA-DRB1*14:54L
  REGION 1..12: note = CONT. FROM ABOVE: HLA-DQA1*05:05-B1*03:01L HLA-DQA1*01:03-B1*06: 01L
GTENLTKEGATT

SEQ ID NO: 10588 - protein, 15 aa, Severe acute respiratory syndrome coronavirus 2
  REGION 1..15: note = Table B: HLA-DQA1*05:01-B1*03:01L HLA-DRB1*01:02L HLA-DPA1*01:03-B1*03:01L HLA-DPA1*02:01-B1*13:01L HLA-DPA1*01:03-B1*104:01L
NLTKEGATTCGYLPQ

SEQ ID NO: 10589 - protein, 14 aa, Severe acute respiratory syndrome coronavirus 2
  REGION 1..14: note = Table B: HLA-DQA1*05:01-B1*03:01L HLA-DQA1*03:01-B1*03:02L
TKEGATTCGYLPQN

SEQ ID NO: 10590 - protein, 10 aa, Severe acute respiratory syndrome coronavirus 2
  REGION 1..10: note = Table B: HLA-DQA1*05:01-B1*03:01L HLA-DRB1*13:03M HLA-DRB1*01:03L HLA-DQA1*01:02-B1*06:02M HLA-DPA1*01:03-B1*03:01L HLA-DPA1*03:01-B1*04:02L HLA-DRB1*03:01L HLA-DRB1*14:01L HLA-DRB1*14:02L HLA-DRB5*01:01L
  REGION 1..10: note = CONT. FROM ABOVE: HLA-DQA1*01-B1*05L HLA-DQA1*05:05-B1*03:19L HL A-DQA1*05:01-B1*02:01L HLA-DPA1*01:03-B1*04:01L HLA-DPA1*02:01-B 1*13:01L HLA-DPA1*03:01-B1*105:01M HLA-DQA1*02:01-B1*03:03L HLA- DRB1*15:03L
LPQNAVVKIY

SEQ ID NO: 10591 - protein, 11 aa, Severe acute respiratory syndrome coronavirus 2
  REGION 1..11: note = Table B: HLA-DQA1*05:01-B1*03:01L HLA-DRB1*04:03L HLA-DRB1*13:02L HLA-DRB4*03:01NL HLA-DRB1*08:77L HLA-DPA1*03:01-B1*04:02L HLA-DRB1*03:01L HLA-DRB1*14:01L HLA-DRB1*11:02L HLA-DRB1*11:03L HLA-DRB1*14:02L HLA-DRB1*11:01L
  REGION 1..11: note = CONT. FROM ABOVE: HLA-DQA1*01-B1*05L HLA-DRB4*01:01L HLA-DPA1*01 :03-B1*04:01L HLA-DQA1*05:05-B1*03:116L HLA-DPA1*01:03-B1*04:02L HLA-DRB1*12:01L HLA-DPA1*02:01-B1*13:01L HLA-DPA1*01:03-B1*104:0 1L HLA-DRB1*10:01L HLA-DRB1*16:01L HLA-DQA1*01:03-B1*06:01L
  REGION 1..11: note = CONT. FROM ABOVE: HLA-DRB1*08:02L HLA-DRB1*15:03L
EVGPEHSLAEY

SEQ ID NO: 10592 - protein, 14 aa, Severe acute respiratory syndrome coronavirus 2
  REGION 1..14: note = Table B: HLA-DQA1*05:01-B1*03:01L HLA-DRB1*13:03L HLA-DRB1*01:03L HLA-DRB1*04:05L HLA-DQA1*01:02-B1*06:02L HLA-DRB1*01:02L HLA-DRB4*03:01NL HLA-DPA1*01:03-B1*03:01L HLA-DQA1*01:01-B1*05:01L HLA-DRB1*08:01L
  REGION 1..14: note = CONT. FROM ABOVE: HLA-DQA1*05:05-B1*03:19L HLA-DQA1*05:01-B1*02: 01L HLA-DRB1*04:10L HLA-DRB1*12:01L HLA-DPA1*02:01-B1*13:01L HLA -DPA1*03:01-B1*105:01L HLA-DQA1*05:05-B1*03:01L HLA-DRB1*14:17L HLA-DRB1*16:01L HLA-DQA1*01:03-B1*06:01L HLA-DRB1*04:08L
  REGION 1..14: note = CONT. FROM ABOVE: HLA-DRB1*15:03L
GPEHSLAEYHNESG

SEQ ID NO: 10593 - protein, 12 aa, Severe acute respiratory syndrome coronavirus 2
  REGION 1..12: note = Table B: HLA-DQA1*05:01-B1*03:01L HLA-DRB1*13:02L HLA-DRB1*04:04L HLA-DQA1*01:02-B1*06:02L HLA-DRB1*08:04L HLA-DRB1*08:77L HLA-DRB3*02:01L HLA-DPA1*01:03-B1*03:01L HLA-DPA1*03:01-B1*04:02L HLA-DRB1*14:01L HLA-DRB1*11:03L
  REGION 1..12: note = CONT. FROM ABOVE: HLA-DRB1*11:04L HLA-DRB1*08:01L HLA-DRB1*11:01 L HLA-DQA1*05:01-B1*02:01L HLA-DRB1*04:10L HLA-DRB1*09:01L HLA-D RB1*12:02L HLA-DRB3*01:01L HLA-DPA1*02:01-B1*13:01L HLA-DPA1*03: 01-B1*105:01L HLA-DRB1*14:54L HLA-DPA1*01:02-B1*04:01L
  REGION 1..12: note = CONT. FROM ABOVE: HLA-DRB1*07:01L HLA-DRB1*10:01L HLA-DRB1*08:03 L HLA-DRB1*15:03L
LAEYHNESGLKT

SEQ ID NO: 10594 - protein, 14 aa, Severe acute respiratory syndrome coronavirus 2
  REGION 1..14: note = Table B: HLA-DQA1*05:01-B1*03:01L HLA-DRB1*01:02L HLA-DPA1*01:03-B1*03:01L HLA-DRB1*04:08L HLA-DQA1*02:01-B1*03:03L
RTIAFGGCVFSYVG

SEQ ID NO: 10595 - protein, 12 aa, Severe acute respiratory syndrome coronavirus 2
  REGION 1..12: note = Table B: HLA-DQA1*05:01-B1*03:01L HLA-DRB1*04:05L HLA-DQA1*01:02-B1*06:02L HLA-DRB1*01:02L HLA-DPA1*01:03-B1*03:01L HLA-DRB1*12:01L HLA-DQA1*03:01-B1*03:02L HLA-DQA1*05:05-B1*03:01L
  REGION 1..12: note = CONT. FROM ABOVE: HLA-DQA1*01:03-B1*06:01L HLA-DQA1*02:01-B1*03: 03L
VPRASANIGCNH

SEQ ID NO: 10596 - protein, 12 aa, Severe acute respiratory syndrome coronavirus 2
  REGION 1..12: note = Table B: HLA-DQA1*05:01-B1*03:01L HLA-DRB1*04:03L HLA-DRB1*13:02L HLA-DRB1*04:02L HLA-DQA1*01:02-B1*06:02L HLA-DRB1*08:04L HLA-DRB1*12:01L HLA-DRB1*12:02L HLA-DRB1*14:54L HLA-DQA1*05:05-B1*03:01L HLA-DQA1*01:03-B1*06:01L
  REGION 1..12: note = CONT. FROM ABOVE: HLA-DQA1*02:01-B1*03:03L HLA-DRB1*15:03L
ANIGCNHTGVVG

SEQ ID NO: 10597 - protein, 12 aa, Severe acute respiratory syndrome coronavirus 2
  REGION 1..12: note = Table B: HLA-DQA1*05:01-B1*03:01L HLA-DRB1*13:02L HLA-DRB1*13:03L HLA-DRB1*01:03L HLA-DRB1*04:02L HLA-DRB1*04:05L HLA-DQA1*01:02-B1*06:02L HLA-DRB1*01:02L HLA-DRB1*08:04L HLA-DPA1*03:01-B1*04:02L HLA-DRB1*11:04L HLA-DRB1*08:01L
  REGION 1..12: note = CONT. FROM ABOVE: HLA-DRB1*11:01L HLA-DRB1*12:01L HLA-DRB3*01:01 L HLA-DRB1*14:54L HLA-DRB1*16:01L HLA-DRB1*04:08L HLA-DRB1*15:03 L
NLLEILQKEKVN

SEQ ID NO: 10598 - protein, 15 aa, Severe acute respiratory syndrome coronavirus 2
  REGION 1..15: note = Table B: HLA-DQA1*05:01-B1*03:01L HLA-DRB1*01:01L HLA-DQA1*05:05-B1*03:01L
LQKEKVNINIVGDFK

SEQ ID NO: 10599 - protein, 13 aa, Severe acute respiratory syndrome coronavirus 2
  REGION 1..13: note = Table B: HLA-DQA1*05:01-B1*03:01L HLA-DRB1*04:04L HLA-DRB1*04:05L HLA-DQA1*01:02-B1*06:02L HLA-DRB1*01:02L HLA-DRB4*03:01NL HLA-DPA1*01:03-B1*03:01L HLA-DRB1*14:01L HLA-DQA1*05:05-B1*03:19L HLA-DQA1*05:01-B1*02:01L
  REGION 1..13: note = CONT. FROM ABOVE: HLA-DRB1*04:10L HLA-DRB1*12:01L HLA-DPA1*03:01 -B1*105:01L HLA-DQA1*03:01-B1*03:02L HLA-DRB1*14:54L HLA-DQA1*05 :05-B1*03:01L HLA-DRB1*16:01L HLA-DRB1*04:08L HLA-DQA1*02:01-B1* 03:03L HLA-DRB1*15:03L
IAIILASFSASTS

SEQ ID NO: 10600 - protein, 13 aa, Severe acute respiratory syndrome coronavirus 2
  REGION 1..13: note = Table B: HLA-DQA1*05:01-B1*03:01L HLA-DQA1*01:02-B1*06:02L HLA-DRB1*01:02L HLA-DPA1*01:03-B1*03:01L HLA-DRB1*14:01L HLA-DRB1*11:04L HLA-DRB1*08:01L HLA-DRB1*11:01L HLA-DQA1*01-B1*05L HLA-DRB1*12:01L HLA-DPA1*02:01-B1*13:01L
  REGION 1..13: note = CONT. FROM ABOVE: HLA-DPA1*01:03-B1*02:01L HLA-DQA1*01:03-B1*06: 01L HLA-DQA1*02:01-B1*03:03L HLA-DRB1*15:03L
VKGLDYKAFKQIV

SEQ ID NO: 10601 - protein, 11 aa, Severe acute respiratory syndrome coronavirus 2
  REGION 1..11: note = Table B: HLA-DQA1*05:01-B1*03:01L HLA-DRB1*04:03L HLA-DRB1*13:03L HLA-DRB1*01:03L HLA-DRB1*04:02L HLA-DRB1*04:05L HLA-DQA1*01:02-B1*06:02L HLA-DRB1*01:02L HLA-DRB1*14:01L HLA-DRB1*11:04L HLA-DRB1*08:01L HLA-DRB1*11:01L
  REGION 1..11: note = CONT. FROM ABOVE: HLA-DQA1*01-B1*05L HLA-DPA1*01:03-B1*04:01L HL A-DPA1*01:03-B1*04:02L HLA-DRB1*12:01L HLA-DQA1*03:01-B1*03:02L HLA-DPA1*01:03-B1*02:01L HLA-DRB1*16:01L HLA-DQA1*01:03-B1*06:01 L HLA-DRB1*04:08L HLA-DQA1*02:01-B1*03:03L HLA-DRB1*15:03L
LDYKAFKQIVE

SEQ ID NO: 10602 - protein, 13 aa, Severe acute respiratory syndrome coronavirus 2
  REGION 1..13: note = Table B: HLA-DQA1*05:01-B1*03:01L HLA-DRB1*04:03L HLA-DRB1*01:03L HLA-DRB1*14:01L HLA-DRB1*12:01L HLA-DPA1*03:01-B1*105:01L HLA-DQA1*05:05-B1*03:01L HLA-DRB1*16:01L HLA-DRB1*04:08L HLA-DQA1*02:01-B1*03:03L
KQIVESCGNFKVT

SEQ ID NO: 10603 - protein, 11 aa, Severe acute respiratory syndrome coronavirus 2
  REGION 1..11: note = Table B: HLA-DQA1*05:01-B1*03:01L HLA-DRB1*04:03L HLA-DRB1*13:02L HLA-DRB1*13:03L HLA-DRB1*04:02L HLA-DRB1*04:04L HLA-DRB1*04:05L HLA-DQA1*01:02-B1*06:02L HLA-DRB1*01:01L HLA-DRB4*03:01NL HLA-DRB1*14:01L HLA-DRB1*11:04L HLA-DRB1*08:01L
  REGION 1..11: note = CONT. FROM ABOVE: HLA-DRB1*11:01L HLA-DRB1*12:01L HLA-DRB3*01:01 L HLA-DRB1*14:17L HLA-DPA1*01:02-B1*04:01L HLA-DRB1*07:01L HLA-D QA1*01:03-B1*06:01L HLA-DQA1*02:01-B1*03:03L HLA-DRB1*15:03L
GNFKVTKGKAK

SEQ ID NO: 10604 - protein, 12 aa, Severe acute respiratory syndrome coronavirus 2
  REGION 1..12: note = Table B: HLA-DQA1*05:01-B1*03:01L HLA-DRB1*13:02L HLA-DRB1*04:05L HLA-DQA1*01:02-B1*06:02L HLA-DRB1*01:01L HLA-DRB1*14:01L HLA-DRB1*08:01L HLA-DRB1*11:01L HLA-DRB3*01:01L HLA-DRB1*07:01L HLA-DQA1*01:03-B1*06:01L
NFKVTKGKAKKG

SEQ ID NO: 10605 - protein, 14 aa, Severe acute respiratory syndrome coronavirus 2
  REGION 1..14: note = Table B: HLA-DQA1*05:01-B1*03:01L HLA-DRB1*08:01L HLA-DQA1*05:05-B1*03:01L HLA-DQA1*01:03-B1*06:01L
FKVTKGKAKKGAWN

SEQ ID NO: 10606 - protein, 13 aa, Severe acute respiratory syndrome coronavirus 2
  REGION 1..13: note = Table B: HLA-DQA1*05:01-B1*03:01L HLA-DPA1*03:01-B1*105:01L HLA-DQA1*05:05-B1*03:01L HLA-DRB1*15:03L
AWNIGEQKSILSP

SEQ ID NO: 10607 - protein, 12 aa, Severe acute respiratory syndrome coronavirus 2
  REGION 1..12: note = Table B: HLA-DQA1*05:01-B1*03:01L
NIGEQKSILSPL

SEQ ID NO: 10608 - protein, 14 aa, Severe acute respiratory syndrome coronavirus 2
  REGION 1..14: note = Table B: HLA-DQA1*05:01-B1*03:01L HLA-DRB1*01:03L HLA-DPA1*01:03-B1*03:01L HLA-DRB1*14:01L HLA-DQA1*01-B1*05L HLA-DQA1*03:01-B1*03:02L HLA-DRB1*10:01L
KSILSPLYAFASEA

SEQ ID NO: 10609 - protein, 11 aa, Severe acute respiratory syndrome coronavirus 2
  REGION 1..11: note = Table B: HLA-DQA1*05:01-B1*03:01L HLA-DRB1*04:03L HLA-DRB1*04:02L HLA-DQA1*01-B1*05L HLA-DQA1*03:01-B1*03:02L HLA-DRB1*14:17L HLA-DRB1*16:01L HLA-DQA1*02:01-B1*03:03L
PLYAFASEAAR

SEQ ID NO: 10610 - protein, 10 aa, Severe acute respiratory syndrome coronavirus 2
  REGION 1..10: note = Table B: HLA-DQA1*05:01-B1*03:01L HLA-DQA1*01:02-B1*06:02L HLA-DPA1*03:01-B1*105:01L HLA-DQA1*01:03-B1*06:01L HLA-DQA1*02:01-B1*03:03L HLA-DRB1*15:03L
EAARVVRSIF

SEQ ID NO: 10611 - protein, 10 aa, Severe acute respiratory syndrome coronavirus 2
  REGION 1..10: note = Table B: HLA-DQA1*05:01-B1*03:01L HLA-DQA1*03:01-B1*03:02L HLA-DPA1*01:02-B1*04:01L HLA-DRB1*16:01L HLA-DQA1*01:03-B1*06:01L HLA-DQA1*02:01-B1*03:03L
VVRSIFSRTL

SEQ ID NO: 10612 - protein, 12 aa, Severe acute respiratory syndrome coronavirus 2
  REGION 1..12: note = Table B: HLA-DQA1*05:01-B1*03:01L HLA-DQA1*01:02-B1*06:02L HLA-DRB1*01:02L HLA-DRB1*08:04L HLA-DRB1*11:03L HLA-DRB1*11:04L HLA-DRB1*08:01L HLA-DRB1*11:01L HLA-DRB3*01:01L HLA-DPA1*02:01-B1*13:01L HLA-DRB1*14:54L HLA-DRB1*04:08L
  REGION 1..12: note = CONT. FROM ABOVE: HLA-DRB1*15:03L
NSVRVLQKAAIT

SEQ ID NO: 10613 - protein, 12 aa, Severe acute respiratory syndrome coronavirus 2
  REGION 1..12: note = Table B: HLA-DQA1*05:01-B1*03:01L HLA-DRB1*04:05L HLA-DRB1*01:02L HLA-DRB1*08:04L HLA-DPA1*01:03-B1*03:01L HLA-DPA1*03:01-B1*04:02L HLA-DRB1*08:01L HLA-DQA1*05:05-B1*03:19L HLA-DPA1*01:03-B1*04:01L
  REGION 1..12: note = CONT. FROM ABOVE: HLA-DPA1*01:03-B1*04:02L HLA-DRB1*12:01L HLA-D PA1*02:01-B1*13:01L HLA-DQA1*05:05-B1*03:01L HLA-DRB1*15:03L
ISQYSLRLIDAM

SEQ ID NO: 10614 - protein, 13 aa, Severe acute respiratory syndrome coronavirus 2
  REGION 1..13: note = Table B: HLA-DQA1*05:01-B1*03:01L HLA-DRB4*03:01NL HLA-DPA1*03:01-B1*04:02L HLA-DQA1*05:05-B1*03:19L HLA-DRB1*04:10L HLA-DRB1*12:01L HLA-DRB1*14:54L HLA-DRB1*04:08L HLA-DRB1*15:03L
DAMMFTSDLATNN

SEQ ID NO: 10615 - protein, 11 aa, Severe acute respiratory syndrome coronavirus 2
  REGION 1..11: note = Table B: HLA-DQA1*05:01-B1*03:01L HLA-DQA1*01:02-B1*06:02L HLA-DQA1*05:05-B1*03:19L HLA-DQA1*05:05-B1*03:01L HLA-DQA1*02:01-B1*03:03L
YITGGVVQLTS

SEQ ID NO: 10616 - protein, 12 aa, Severe acute respiratory syndrome coronavirus 2
  REGION 1..12: note = Table B: HLA-DQA1*05:01-B1*03:01L HLA-DQA1*05:01-B1*02:01L HLA-DQA1*05:05-B1*03:01L HLA-DRB1*15:03L
TGGVVQLTSQWL

SEQ ID NO: 10617 - protein, 11 aa, Severe acute respiratory syndrome coronavirus 2
  REGION 1..11: note = Table B: HLA-DQA1*05:01-B1*03:01L HLA-DRB1*04:03L HLA-DRB1*04:02L HLA-DRB1*01:02L HLA-DQA1*05:01-B1*02:01L HLA-DRB1*12:01L HLA-DPA1*03:01-B1*105:01L HLA-DQA1*05:05-B1*03:01L HLA-DRB1*14:17L HLA-DRB1*16:01L
  REGION 1..11: note = CONT. FROM ABOVE: HLA-DQA1*02:01-B1*03:03L HLA-DRB1*15:03L
VVQLTSQWLTN

SEQ ID NO: 10618 - protein, 12 aa, Severe acute respiratory syndrome coronavirus 2
  REGION 1..12: note = Table B: HLA-DQA1*05:01-B1*03:01L HLA-DRB1*14:01L HLA-DRB1*12:01L HLA-DQA1*05:05-B1*03:01L HLA-DPA1*01:02-B1*04:01L
SQWLTNIFGTVY

SEQ ID NO: 10619 - protein, 12 aa, Severe acute respiratory syndrome coronavirus 2
  REGION 1..12: note = Table B: HLA-DQA1*05:01-B1*03:01L HLA-DRB1*04:03L HLA-DRB1*13:02L HLA-DRB1*01:02L HLA-DRB1*08:04L HLA-DPA1*01:03-B1*03:01L HLA-DRB1*14:01L HLA-DRB1*11:04L HLA-DRB1*08:01L HLA-DRB1*11:01L HLA-DQA1*01-B1*05L
  REGION 1..12: note = CONT. FROM ABOVE: HLA-DQA1*05:01-B1*02:01L HLA-DRB3*01:01L HLA-D PA1*02:01-B1*13:01L HLA-DQA1*03:01-B1*03:02L HLA-DPA1*01:03-B1*0 2:01L HLA-DPA1*01:03-B1*104:01L HLA-DQA1*05:05-B1*03:01L HLA-DRB 1*15:03L
IFGTVYEKLKPV

SEQ ID NO: 10620 - protein, 10 aa, Severe acute respiratory syndrome coronavirus 2
  REGION 1..10: note = Table B: HLA-DQA1*05:01-B1*03:01L HLA-DQA1*01:02-B1*06:02L HLA-DRB1*08:77L HLA-DPA1*03:01-B1*04:02L HLA-DRB1*03:01L HLA-DQA1*01-B1*05L HLA-DQA1*05:05-B1*03:19L HLA-DQA1*05:01-B1*02:01L HLA-DRB4*01:01L
  REGION 1..10: note = CONT. FROM ABOVE: HLA-DPA1*01:03-B1*04:01L HLA-DPA1*01:03-B1*104 :01L HLA-DRB1*10:01L HLA-DRB1*16:01L HLA-DQA1*01:03-B1*06:01L HL A-DQA1*02:01-B1*03:03L HLA-DRB1*15:03L
YEKLKPVLDW

SEQ ID NO: 10621 - protein, 10 aa, Severe acute respiratory syndrome coronavirus 2
  REGION 1..10: note = Table B: HLA-DQA1*05:01-B1*03:01L HLA-DRB1*04:03L HLA-DRB1*13:02L HLA-DRB1*01:03L HLA-DQA1*01:02-B1*06:02L HLA-DRB1*01:02L HLA-DPA1*01:03-B1*03:01L HLA-DPA1*03:01-B1*04:02L HLA-DRB1*14:01L HLA-DRB1*11:04L
  REGION 1..10: note = CONT. FROM ABOVE: HLA-DRB1*08:01L HLA-DRB1*11:01L HLA-DQA1*01-B1 *05L HLA-DQA1*05:01-B1*02:01L HLA-DPA1*01:03-B1*04:01L HLA-DPA1* 01:03-B1*04:02L HLA-DRB1*12:01L HLA-DRB3*01:01L HLA-DPA1*03:01-B 1*105:01L HLA-DQA1*03:01-B1*03:02L HLA-DPA1*01:03-B1*02:01L
  REGION 1..10: note = CONT. FROM ABOVE: HLA-DPA1*01:02-B1*04:01M HLA-DRB1*16:01L HLA-D QA1*01:03-B1*06:01L HLA-DRB1*04:08L HLA-DQA1*02:01-B1*03:03L HLA -DRB1*15:03L
FLRDGWEIVK

SEQ ID NO: 10622 - protein, 14 aa, Severe acute respiratory syndrome coronavirus 2
  REGION 1..14: note = Table B: HLA-DQA1*05:01-B1*03:01L HLA-DRB1*13:02L HLA-DRB1*01:03L HLA-DRB1*04:05L HLA-DRB1*01:02L HLA-DPA1*01:03-B1*03:01L HLA-DQA1*05:05-B1*03:19L HLA-DPA1*01:03-B1*04:02L HLA-DRB1*12:01L
  REGION 1..14: note = CONT. FROM ABOVE: HLA-DPA1*02:01-B1*13:01L HLA-DPA1*01:03-B1*104 :01L HLA-DPA1*01:02-B1*04:01L HLA-DRB1*16:01L HLA-DRB1*04:08L HL A-DQA1*02:01-B1*03:03L HLA-DRB1*15:03L
IVKFISTCACEIVG

SEQ ID NO: 10623 - protein, 15 aa, Severe acute respiratory syndrome coronavirus 2
  REGION 1..15: note = Table B: HLA-DQA1*05:01-B1*03:01L HLA-DPA1*01:03-B1*03:01L HLA-DRB1*12:01L HLA-DPA1*01:03-B1*104:01L HLA-DQA1*02:01-B1*03:03L
VKFISTCACEIVGGQ

SEQ ID NO: 10624 - protein, 11 aa, Severe acute respiratory syndrome coronavirus 2
  REGION 1..11: note = Table B: HLA-DQA1*05:01-B1*03:01L HLA-DQA1*01:02-B1*06:02L HLA-DQA1*05:05-B1*03:19L HLA-DQA1*05:05-B1*03:01L HLA-DQA1*02:01-B1*03:03L
VGGQIVTCAKE

SEQ ID NO: 10625 - protein, 15 aa, Severe acute respiratory syndrome coronavirus 2
  REGION 1..15: note = Table B: HLA-DQA1*05:01-B1*03:01L HLA-DPA1*01:03-B1*03:01L HLA-DPA1*03:01-B1*04:02L HLA-DRB1*03:01L HLA-DRB1*11:02L HLA-DRB1*14:02L HLA-DQA1*05:05-B1*03:19L HLA-DQA1*05:01-B1*02:01L HLA-DRB1*13:01L
  REGION 1..15: note = CONT. FROM ABOVE: HLA-DPA1*01:03-B1*04:02L HLA-DPA1*02:01-B1*13: 01L HLA-DQA1*05:05-B1*03:01L HLA-DPA1*01:02-B1*04:01L HLA-DRB1*0 8:02L HLA-DRB1*08:03L HLA-DQA1*02:01-B1*03:03L
GQIVTCAKEIKESVQ

SEQ ID NO: 10626 - protein, 10 aa, Severe acute respiratory syndrome coronavirus 2
  REGION 1..10: note = Table B: HLA-DQA1*05:01-B1*03:01L HLA-DRB1*04:03L HLA-DRB1*01:03L HLA-DRB1*04:02L HLA-DRB1*01:02L HLA-DRB1*14:01L HLA-DRB1*12:01L HLA-DQA1*03:01-B1*03:02L HLA-DRB1*14:17L HLA-DPA1*01:02-B1*04:01L HLA-DRB1*16:01L
  REGION 1..10: note = CONT. FROM ABOVE: HLA-DQA1*02:01-B1*03:03L HLA-DRB1*15:03L
IIIGGAKLKA

SEQ ID NO: 10627 - protein, 10 aa, Severe acute respiratory syndrome coronavirus 2
  REGION 1..10: note = Table B: HLA-DQA1*05:01-B1*03:01L HLA-DQA1*01:02-B1*06:02L HLA-DPA1*03:01-B1*105:01L HLA-DQA1*05:05-B1*03:01L HLA-DQA1*01:03-B1*06:01L HLA-DQA1*02:01-B1*03:03L
IGGAKLKALN

SEQ ID NO: 10628 - protein, 13 aa, Severe acute respiratory syndrome coronavirus 2
  REGION 1..13: note = Table B: HLA-DQA1*05:01-B1*03:01L HLA-DRB1*04:03L HLA-DRB1*04:05L HLA-DRB1*01:02L HLA-DPA1*01:03-B1*03:01L HLA-DRB1*12:01L HLA-DQA1*05:05-B1*03:01L HLA-DRB1*14:17L
LKALNLGETFVTH

SEQ ID NO: 10629 - protein, 12 aa, Severe acute respiratory syndrome coronavirus 2
  REGION 1..12: note = Table B: HLA-DQA1*05:01-B1*03:01L HLA-DQA1*01:02-B1*06:02L HLA-DQA1*05:05-B1*03:01L HLA-DQA1*01:03-B1*06:01L HLA-DQA1*02:01-B1*03:03L
LNLGETFVTHSK

SEQ ID NO: 10630 - protein, 12 aa, Severe acute respiratory syndrome coronavirus 2
  REGION 1..12: note = Table B: HLA-DQA1*05:01-B1*03:01L HLA-DRB1*01:03L HLA-DRB1*04:02L HLA-DRB1*04:05L HLA-DQA1*01:02-B1*06:02L HLA-DQA1*01:01-B1*05:01L HLA-DRB1*08:01L HLA-DPA1*03:01-B1*105:01L HLA-DQA1*05:05-B1*03:01L
  REGION 1..12: note = CONT. FROM ABOVE: HLA-DRB1*14:17L HLA-DRB1*16:01L HLA-DRB1*04:08 L
NLGETFVTHSKG

SEQ ID NO: 10631 - protein, 10 aa, Severe acute respiratory syndrome coronavirus 2
  REGION 1..10: note = Table B: HLA-DQA1*05:01-B1*03:01L HLA-DRB1*13:03L HLA-DRB1*01:03L HLA-DQA1*01:02-B1*06:02L HLA-DRB1*08:77L HLA-DPA1*01:03-B1*03:01L HLA-DPA1*03:01-B1*04:02L HLA-DRB1*03:01L HLA-DRB1*14:02L HLA-DQA1*01-B1*05L
  REGION 1..10: note = CONT. FROM ABOVE: HLA-DQA1*05:05-B1*03:19L HLA-DQA1*05:01-B1*02: 01L HLA-DRB4*01:01L HLA-DPA1*01:03-B1*04:01L HLA-DQA1*05:05-B1*0 3:116L HLA-DPA1*01:03-B1*04:02L HLA-DPA1*02:01-B1*13:01L HLA-DPA 1*03:01-B1*105:01L HLA-DPA1*01:03-B1*104:01L
  REGION 1..10: note = CONT. FROM ABOVE: HLA-DPA1*01:02-B1*04:01L HLA-DRB1*16:01L HLA-D QA1*01:03-B1*06:01L HLA-DQA1*02:01-B1*03:03L HLA-DRB1*15:03L
TFVTHSKGLY

SEQ ID NO: 10632 - protein, 10 aa, Severe acute respiratory syndrome coronavirus 2
  REGION 1..10: note = Table B: HLA-DQA1*05:01-B1*03:01L HLA-DRB1*04:03L HLA-DRB1*13:02L HLA-DRB1*13:03L HLA-DRB1*01:03L HLA-DRB1*04:02L HLA-DRB1*04:04L HLA-DRB1*04:05L HLA-DQA1*01:02-B1*06:02L HLA-DRB1*01:01L HLA-DRB1*01:02L HLA-DRB4*03:01NL HLA-DRB1*03:01L
  REGION 1..10: note = CONT. FROM ABOVE: HLA-DRB1*14:01L HLA-DRB1*11:03L HLA-DRB1*11:04 L HLA-DRB1*08:01L HLA-DRB1*11:01L HLA-DRB1*13:01L HLA-DRB1*12:01 L HLA-DRB3*01:01L HLA-DQA1*03:01-B1*03:02L HLA-DRB1*14:54L HLA-D RB1*14:17L HLA-DPA1*01:02-B1*04:01L HLA-DRB1*16:01L
  REGION 1..10: note = CONT. FROM ABOVE: HLA-DQA1*01:03-B1*06:01L HLA-DRB1*04:08L HLA-D QA1*02:01-B1*03:03L HLA-DRB1*15:03L
FVTHSKGLYR

SEQ ID NO: 10633 - protein, 12 aa, Severe acute respiratory syndrome coronavirus 2
  REGION 1..12: note = Table B: HLA-DQA1*05:01-B1*03:01L HLA-DPA1*03:01-B1*105:01L HLA-DQA1*05:05-B1*03:01L
ETGLLMPLKAPK

SEQ ID NO: 10634 - protein, 11 aa, Severe acute respiratory syndrome coronavirus 2
  REGION 1..11: note = Table B: HLA-DQA1*05:01-B1*03:01L HLA-DRB1*13:03L HLA-DRB1*01:03L HLA-DRB1*04:04L HLA-DRB1*04:05L HLA-DQA1*01:02-B1*06:02L HLA-DRB1*01:02L HLA-DRB4*03:01NL HLA-DRB1*14:01L HLA-DRB1*08:01L HLA-DRB1*04:10L HLA-DRB1*12:01L
  REGION 1..11: note = CONT. FROM ABOVE: HLA-DRB1*14:54L HLA-DPA1*01:02-B1*04:01L HLA-D RB1*16:01L HLA-DQA1*01:03-B1*06:01L HLA-DRB1*04:08L HLA-DRB1*15: 03L
GLLMPLKAPKE

SEQ ID NO: 10635 - protein, 10 aa, Severe acute respiratory syndrome coronavirus 2
  REGION 1..10: note = Table B: HLA-DQA1*05:01-B1*03:01L HLA-DQA1*01:02-B1*06:02L HLA-DQA1*01-B1*05L HLA-DQA1*05:05-B1*03:116L HLA-DPA1*02:01-B1*13:01L
MPLKAPKEII

SEQ ID NO: 10636 - protein, 13 aa, Severe acute respiratory syndrome coronavirus 2
  REGION 1..13: note = Table B: HLA-DQA1*05:01-B1*03:01L HLA-DRB1*04:03L HLA-DRB1*13:02L HLA-DRB1*01:02L HLA-DRB4*03:01NL HLA-DRB1*08:77L HLA-DRB3*02:01L HLA-DPA1*03:01-B1*04:02L HLA-DRB1*14:01L HLA-DRB1*11:03L HLA-DQA1*05:01-B1*02:01L HLA-DRB1*09:01L
  REGION 1..13: note = CONT. FROM ABOVE: HLA-DRB1*12:01L HLA-DRB1*12:02L HLA-DRB1*14:54 L HLA-DPA1*01:02-B1*04:01L HLA-DRB1*07:01L HLA-DRB1*16:01L HLA-D QA1*02:01-B1*03:03L HLA-DRB1*15:03L
APKEIIFLEGETL

SEQ ID NO: 10637 - protein, 12 aa, Severe acute respiratory syndrome coronavirus 2
  REGION 1..12: note = Table B: HLA-DQA1*05:01-B1*03:01L HLA-DRB1*13:02L HLA-DRB1*01:03L HLA-DRB1*04:02L HLA-DRB1*01:01L HLA-DRB4*03:01NL HLA-DRB1*08:77L HLA-DRB1*11:03L HLA-DQA1*05:05-B1*03:19L HLA-DQA1*05:01-B1*02:01L HLA-DPA1*03:01-B1*105:01L
  REGION 1..12: note = CONT. FROM ABOVE: HLA-DQA1*05:05-B1*03:01L HLA-DRB1*07:01L HLA-D RB1*10:01L HLA-DRB1*04:08L HLA-DQA1*02:01-B1*03:03L
EIIFLEGETLPT

SEQ ID NO: 10638 - protein, 12 aa, Severe acute respiratory syndrome coronavirus 2
  REGION 1..12: note = Table B: HLA-DQA1*05:01-B1*03:01L HLA-DRB1*01:03L HLA-DQA1*01:02-B1*06:02L HLA-DRB1*01:01L HLA-DRB1*08:77L HLA-DQA1*05:05-B1*03:19L HLA-DQA1*05:01-B1*02:01L HLA-DPA1*03:01-B1*105:01L HLA-DQA1*03:01-B1*03:02L
  REGION 1..12: note = CONT. FROM ABOVE: HLA-DQA1*05:05-B1*03:01L HLA-DRB1*10:01L HLA-D QA1*01:03-B1*06:01L HLA-DRB1*04:08L HLA-DQA1*02:01-B1*03:03L
IIFLEGETLPTE

SEQ ID NO: 10639 - protein, 12 aa, Severe acute respiratory syndrome coronavirus 2
  REGION 1..12: note = Table B: HLA-DQA1*05:01-B1*03:01L HLA-DQA1*01:02-B1*06:02L HLA-DPA1*03:01-B1*105:01L HLA-DQA1*05:05-B1*03:01L HLA-DQA1*01:03-B1*06:01L HLA-DQA1*02:01-B1*03:03L
FLEGETLPTEVL

SEQ ID NO: 10640 - protein, 13 aa, Severe acute respiratory syndrome coronavirus 2
  REGION 1..13: note = Table B: HLA-DQA1*05:01-B1*03:01L HLA-DRB1*04:05L HLA-DRB1*01:02L HLA-DPA1*01:03-B1*03:01L HLA-DQA1*01:01-B1*05:01L HLA-DRB1*04:10L HLA-DPA1*02:01-B1*13:01L HLA-DRB1*14:54L HLA-DRB1*15:03L
LPTEVLTEEVVLK

SEQ ID NO: 10641 - protein, 12 aa, Severe acute respiratory syndrome coronavirus 2
  REGION 1..12: note = Table B: HLA-DQA1*05:01-B1*03:01L HLA-DRB1*01:02L HLA-DQA1*01-B1*05L HLA-DQA1*05:01-B1*02:01L HLA-DRB1*15:03L
EVLTEEVVLKTG

SEQ ID NO: 10642 - protein, 13 aa, Severe acute respiratory syndrome coronavirus 2
  REGION 1..13: note = Table B: HLA-DQA1*05:01-B1*03:01L HLA-DQA1*05:05-B1*03:01L
VLTEEVVLKTGDL

SEQ ID NO: 10643 - protein, 12 aa, Severe acute respiratory syndrome coronavirus 2
  REGION 1..12: note = Table B: HLA-DQA1*05:01-B1*03:01L HLA-DQA1*05:01-B1*02:01L
EVVLKTGDLQPL

SEQ ID NO: 10644 - protein, 12 aa, Severe acute respiratory syndrome coronavirus 2
  REGION 1..12: note = Table B: HLA-DQA1*05:01-B1*03:01L HLA-DQA1*05:05-B1*03:19L HLA-DQA1*03:01-B1*03:02L HLA-DQA1*05:05-B1*03:01L
LKTGDLQPLEQP

SEQ ID NO: 10645 - protein, 12 aa, Severe acute respiratory syndrome coronavirus 2
  REGION 1..12: note = Table B: HLA-DQA1*05:01-B1*03:01L HLA-DQA1*01:02-B1*06:02L HLA-DQA1*03:01-B1*03:02L HLA-DQA1*02:01-B1*03:03L
KTGDLQPLEQPT

SEQ ID NO: 10646 - protein, 13 aa, Severe acute respiratory syndrome coronavirus 2
  REGION 1..13: note = Table B: HLA-DQA1*05:01-B1*03:01L HLA-DRB1*13:02L HLA-DRB1*04:04L HLA-DQA1*01:02-B1*06:02L HLA-DRB1*01:02L HLA-DRB1*08:04L HLA-DRB1*08:77L HLA-DPA1*01:03-B1*03:01L HLA-DRB1*11:03L HLA-DRB1*11:04L HLA-DQA1*05:05-B1*03:19L
  REGION 1..13: note = CONT. FROM ABOVE: HLA-DPA1*03:01-B1*105:01L HLA-DRB1*08:03L HLA- DRB1*15:03L
TGDLQPLEQPTSE

SEQ ID NO: 10647 - protein, 13 aa, Severe acute respiratory syndrome coronavirus 2
  REGION 1..13: note = Table B: HLA-DQA1*05:01-B1*03:01L HLA-DRB1*04:04L HLA-DQA1*01:02-B1*06:02L HLA-DRB1*01:02L HLA-DPA1*01:03-B1*03:01L HLA-DRB1*14:01L HLA-DRB1*11:04L HLA-DQA1*05:05-B1*03:19L HLA-DPA1*03:01-B1*105:01L
  REGION 1..13: note = CONT. FROM ABOVE: HLA-DRB1*08:03L HLA-DRB1*15:03L
GDLQPLEQPTSEA

SEQ ID NO: 10648 - protein, 14 aa, Severe acute respiratory syndrome coronavirus 2
  REGION 1..14: note = Table B: HLA-DQA1*05:01-B1*03:01L HLA-DRB1*01:03L HLA-DQA1*01:02-B1*06:02L HLA-DRB1*01:02L HLA-DRB4*03:01NL HLA-DPA1*01:03-B1*03:01L HLA-DQA1*05:05-B1*03:19L HLA-DRB1*12:01L HLA-DPA1*02:01-B1*13:01L
  REGION 1..14: note = CONT. FROM ABOVE: HLA-DPA1*03:01-B1*105:01L HLA-DRB1*14:54L HLA- DQA1*05:05-B1*03:01L HLA-DRB1*04:08L
DLQPLEQPTSEAVE

SEQ ID NO: 10649 - protein, 15 aa, Severe acute respiratory syndrome coronavirus 2
  REGION 1..15: note = Table B: HLA-DQA1*05:01-B1*03:01L HLA-DRB1*04:03L HLA-DRB1*01:03L HLA-DRB1*04:02L HLA-DQA1*01:02-B1*06:02L HLA-DPA1*01:03-B1*03:01L HLA-DQA1*01:01-B1*05:01L HLA-DQA1*05:05-B1*03:19L HLA-DRB1*12:01L
  REGION 1..15: note = CONT. FROM ABOVE: HLA-DPA1*02:01-B1*13:01L HLA-DPA1*03:01-B1*105 :01L HLA-DQA1*05:05-B1*03:01L HLA-DRB1*16:01L
QPLEQPTSEAVEAPL

SEQ ID NO: 10650 - protein, 13 aa, Severe acute respiratory syndrome coronavirus 2
  REGION 1..13: note = Table B: HLA-DQA1*05:01-B1*03:01L HLA-DQA1*01:02-B1*06:02L HLA-DQA1*01:01-B1*05:01L HLA-DQA1*01-B1*05L HLA-DQA1*05:05-B1*03:19L HLA-DQA1*05:05-B1*03:01L HLA-DRB1*16:01L
QPTSEAVEAPLVG

SEQ ID NO: 10651 - protein, 13 aa, Severe acute respiratory syndrome coronavirus 2
  REGION 1..13: note = Table B: HLA-DQA1*05:01-B1*03:01L HLA-DQA1*01:02-B1*06:02L HLA-DPA1*03:01-B1*105:01L HLA-DQA1*01:03-B1*06:01L
VEAPLVGTPVCIN

SEQ ID NO: 10652 - protein, 12 aa, Severe acute respiratory syndrome coronavirus 2
  REGION 1..12: note = Table B: HLA-DQA1*05:01-B1*03:01L HLA-DQA1*05:05-B1*03:19L HLA-DPA1*01:03-B1*04:02L HLA-DQA1*03:01-B1*03:02L HLA-DQA1*05:05-B1*03:01L HLA-DQA1*02:01-B1*03:03L
INGLMLLEIKDT

SEQ ID NO: 10653 - protein, 13 aa, Severe acute respiratory syndrome coronavirus 2
  REGION 1..13: note = Table B: HLA-DQA1*05:01-B1*03:01L HLA-DRB1*01:03L HLA-DRB1*04:05L HLA-DQA1*01:02-B1*06:02L HLA-DRB1*01:02L HLA-DPA1*01:03-B1*03:01L HLA-DPA1*03:01-B1*04:02L HLA-DRB1*08:01L HLA-DPA1*01:03-B1*04:02L HLA-DRB1*12:01L
  REGION 1..13: note = CONT. FROM ABOVE: HLA-DPA1*02:01-B1*13:01L HLA-DQA1*03:01-B1*03: 02L HLA-DRB1*16:01L HLA-DRB1*04:08L HLA-DQA1*02:01-B1*03:03L
IKDTEKYCALAPN

SEQ ID NO: 10654 - protein, 11 aa, Severe acute respiratory syndrome coronavirus 2
  REGION 1..11: note = Table B: HLA-DQA1*05:01-B1*03:01L HLA-DRB1*13:03L HLA-DQA1*01:02-B1*06:02L HLA-DQA1*05:01-B1*02:01L HLA-DPA1*03:01-B1*105:01L HLA-DQA1*01:03-B1*06:01L HLA-DQA1*02:01-B1*03:03L HLA-DRB1*15:03L
APNMMVTNNTF

SEQ ID NO: 10655 - protein, 10 aa, Severe acute respiratory syndrome coronavirus 2
  REGION 1..10: note = Table B: HLA-DQA1*05:01-B1*03:01L HLA-DRB1*04:03L HLA-DRB1*13:02L HLA-DRB1*13:03L HLA-DRB1*01:03L HLA-DRB1*04:02L HLA-DRB1*01:01L HLA-DRB1*01:02L HLA-DRB4*03:01NL HLA-DRB1*11:04L HLA-DRB1*08:01L HLA-DRB1*12:01L HLA-DQA1*03:01-B1*03:02L
  REGION 1..10: note = CONT. FROM ABOVE: HLA-DQA1*05:05-B1*03:01L HLA-DRB1*14:17L HLA-D RB1*16:01L HLA-DQA1*02:01-B1*03:03L
FTLKGGAPTK

SEQ ID NO: 10656 - protein, 10 aa, Severe acute respiratory syndrome coronavirus 2
  REGION 1..10: note = Table B: HLA-DQA1*05:01-B1*03:01L HLA-DQA1*05:05-B1*03:01L HLA-DQA1*01:03-B1*06:01L
LKGGAPTKVT

SEQ ID NO: 10657 - protein, 12 aa, Severe acute respiratory syndrome coronavirus 2
  REGION 1..12: note = Table B: HLA-DQA1*05:01-B1*03:01L HLA-DRB4*01:01L HLA-DRB1*12:01L HLA-DPA1*03:01-B1*105:01L HLA-DRB1*15:03L
FGDDTVIEVQGY

SEQ ID NO: 10658 - protein, 10 aa, Severe acute respiratory syndrome coronavirus 2
  REGION 1..10: note = Table B: HLA-DQA1*05:01-B1*03:01L HLA-DRB1*13:03L HLA-DQA1*01:02-B1*06:02L HLA-DRB4*03:01NL HLA-DRB1*08:01L HLA-DRB5*01:01L HLA-DRB1*12:01L HLA-DQA1*03:01-B1*03:02L HLA-DQA1*05:05-B1*03:01L HLA-DRB1*14:17L
  REGION 1..10: note = CONT. FROM ABOVE: HLA-DQA1*01:03-B1*06:01L HLA-DQA1*02:01-B1*03: 03L
DTVIEVQGYK

SEQ ID NO: 10659 - protein, 11 aa, Severe acute respiratory syndrome coronavirus 2
  REGION 1..11: note = Table B: HLA-DQA1*05:01-B1*03:01L HLA-DRB1*13:03L HLA-DRB1*01:03L HLA-DRB1*04:02L HLA-DRB1*04:04L HLA-DRB1*04:05L HLA-DQA1*01:02-B1*06:02L HLA-DRB1*01:02L HLA-DRB4*03:01NL HLA-DPA1*01:03-B1*03:01L HLA-DPA1*03:01-B1*04:02L
  REGION 1..11: note = CONT. FROM ABOVE: HLA-DRB1*14:01L HLA-DQA1*05:05-B1*03:19L HLA-D QA1*05:01-B1*02:01L HLA-DRB1*04:10L HLA-DPA1*01:03-B1*04:02L HLA -DRB1*12:01L HLA-DPA1*03:01-B1*105:01L HLA-DRB1*14:54L HLA-DQA1* 05:05-B1*03:01L HLA-DRB1*14:17L HLA-DRB1*16:01L
  REGION 1..11: note = CONT. FROM ABOVE: HLA-DQA1*01:03-B1*06:01L HLA-DRB1*04:08L HLA-D RB1*15:03L
VIEVQGYKSVN

SEQ ID NO: 10660 - protein, 12 aa, Severe acute respiratory syndrome coronavirus 2
  REGION 1..12: note = Table B: HLA-DQA1*05:01-B1*03:01L HLA-DRB1*13:02L HLA-DRB1*13:03L HLA-DRB1*01:03L HLA-DRB1*04:04L HLA-DRB1*04:05L HLA-DRB3*02:01L HLA-DPA1*03:01-B1*04:02L HLA-DRB1*14:01L HLA-DRB1*08:01L HLA-DPA1*02:01-B1*13:01L
  REGION 1..12: note = CONT. FROM ABOVE: HLA-DQA1*05:05-B1*03:01L HLA-DRB1*04:08L HLA-D RB1*15:01L
IEVQGYKSVNIT

SEQ ID NO: 10661 - protein, 13 aa, Severe acute respiratory syndrome coronavirus 2
  REGION 1..13: note = Table B: HLA-DQA1*05:01-B1*03:01L HLA-DRB1*13:02L HLA-DRB1*01:03L HLA-DRB1*04:02L HLA-DRB1*04:05L HLA-DRB1*01:02L HLA-DRB3*02:01L HLA-DPA1*01:03-B1*03:01L HLA-DRB1*14:01L HLA-DPA1*01:03-B1*04:01L HLA-DRB1*04:10L
  REGION 1..13: note = CONT. FROM ABOVE: HLA-DPA1*01:03-B1*04:02L HLA-DQA1*05:05-B1*03: 01L HLA-DRB1*04:08L
SVNITFELDERID

SEQ ID NO: 10662 - protein, 16 aa, Severe acute respiratory syndrome coronavirus 2
  REGION 1..16: note = Table B: HLA-DQA1*05:01-B1*03:01L HLA-DRB1*14:02L HLA-DQA1*01-B1*05L HLA-DRB3*01:01L HLA-DRB1*07:01L
DERIDKVLNEKCSAYT

SEQ ID NO: 10663 - protein, 15 aa, Severe acute respiratory syndrome coronavirus 2
  REGION 1..15: note = Table B: HLA-DQA1*05:01-B1*03:01L HLA-DRB1*04:03L HLA-DRB1*13:02L HLA-DRB1*01:03L HLA-DRB1*04:05L HLA-DRB1*08:04L HLA-DRB1*08:01L HLA-DQA1*05:05-B1*03:01L HLA-DRB1*04:08L
IDKVLNEKCSAYTVE

SEQ ID NO: 10664 - protein, 13 aa, Severe acute respiratory syndrome coronavirus 2
  REGION 1..13: note = Table B: HLA-DQA1*05:01-B1*03:01L HLA-DRB1*14:01L HLA-DRB1*12:01L HLA-DPA1*03:01-B1*105:01L HLA-DQA1*05:05-B1*03:01L
VADAVIKTLQPVS

SEQ ID NO: 10665 - protein, 13 aa, Severe acute respiratory syndrome coronavirus 2
  REGION 1..13: note = Table B: HLA-DQA1*05:01-B1*03:01L HLA-DRB1*01:02L HLA-DPA1*01:03-B1*03:01L HLA-DPA1*03:01-B1*04:02L HLA-DRB1*14:01L HLA-DQA1*01:01-B1*05:01L HLA-DPA1*02:01-B1*13:01L HLA-DQA1*05:05-B1*03:01L
  REGION 1..13: note = CONT. FROM ABOVE: HLA-DPA1*01:02-B1*04:01L
TLQPVSELLTPLG

SEQ ID NO: 10666 - protein, 14 aa, Severe acute respiratory syndrome coronavirus 2
  REGION 1..14: note = Table B: HLA-DQA1*05:01-B1*03:01L HLA-DRB1*04:01L HLA-DRB1*01:03L HLA-DRB1*01:02L HLA-DRB1*08:04L HLA-DPA1*01:03-B1*03:01L HLA-DRB1*14:01L HLA-DRB1*11:04L HLA-DRB4*01:01L HLA-DQA1*05:05-B1*03:01L HLA-DRB1*10:01L
  REGION 1..14: note = CONT. FROM ABOVE: HLA-DRB1*04:08L HLA-DRB1*08:03L
LQPVSELLTPLGID

SEQ ID NO: 10667 - protein, 10 aa, Severe acute respiratory syndrome coronavirus 2
  REGION 1..10: note = Table B: HLA-DQA1*05:01-B1*03:01L HLA-DRB1*13:03L HLA-DQA1*01:02-B1*06:02M HLA-DQA1*05:01-B1*02:01L HLA-DPA1*02:01-B1*13:01L HLA-DPA1*03:01-B1*105:01M HLA-DRB1*15:03L
TPLGIDLDEW

SEQ ID NO: 10668 - protein, 19 aa, Severe acute respiratory syndrome coronavirus 2
  REGION 1..19: note = Table B: HLA-DQA1*05:01-B1*03:01L HLA-DRB1*04:05L HLA-DRB1*14:02L HLA-DPA1*02:01-B1*13:01L HLA-DRB1*04:08L
PPDEDEEEGDCEEEEFEPS

SEQ ID NO: 10669 - protein, 10 aa, Severe acute respiratory syndrome coronavirus 2
  REGION 1..10: note = Table B: HLA-DQA1*05:01-B1*03:01L HLA-DRB1*13:03L HLA-DRB1*01:03L HLA-DQA1*01:02-B1*06:02L HLA-DRB1*08:77L HLA-DPA1*01:03-B1*03:01L HLA-DPA1*03:01-B1*04:02L HLA-DRB1*03:01L HLA-DRB1*11:02L HLA-DRB1*14:02L
  REGION 1..10: note = CONT. FROM ABOVE: HLA-DQA1*01-B1*05L HLA-DQA1*05:05-B1*03:19M HL A-DQA1*05:01-B1*02:01M HLA-DRB4*01:01L HLA-DPA1*01:03-B1*04:01L HLA-DQA1*05:05-B1*03:116L HLA-DPA1*01:03-B1*04:02L HLA-DPA1*02:0 1-B1*13:01L HLA-DPA1*03:01-B1*105:01L HLA-DPA1*01:03-B1*104:01L
  REGION 1..10: note = CONT. FROM ABOVE: HLA-DRB1*10:01L HLA-DRB1*16:01L HLA-DQA1*02:01 -B1*03:03L HLA-DRB1*15:03L
EFEPSTQYEY

SEQ ID NO: 10670 - protein, 11 aa, Severe acute respiratory syndrome coronavirus 2
  REGION 1..11: note = Table B: HLA-DQA1*05:01-B1*03:01L HLA-DRB1*13:03L HLA-DRB1*01:03L HLA-DRB1*04:05L HLA-DRB4*03:01NL HLA-DRB1*04:10L HLA-DRB1*12:01L HLA-DPA1*03:01-B1*105:01L HLA-DRB1*14:54L HLA-DQA1*05:05-B1*03:01L HLA-DQA1*01:03-B1*06:01L
  REGION 1..11: note = CONT. FROM ABOVE: HLA-DRB1*04:08L
YGTEDDYQGKP

SEQ ID NO: 10671 - protein, 12 aa, Severe acute respiratory syndrome coronavirus 2
  REGION 1..12: note = Table B: HLA-DQA1*05:01-B1*03:01L HLA-DQA1*01:02-B1*06:02L HLA-DQA1*05:05-B1*03:19L HLA-DPA1*03:01-B1*105:01L HLA-DQA1*05:05-B1*03:01L
DYQGKPLEFGAT

SEQ ID NO: 10672 - protein, 13 aa, Severe acute respiratory syndrome coronavirus 2
  REGION 1..13: note = Table B: HLA-DQA1*05:01-B1*03:01L HLA-DRB1*04:03L HLA-DRB1*04:02L HLA-DQA1*01:02-B1*06:02L HLA-DQA1*05:05-B1*03:01L HLA-DRB1*14:17L HLA-DQA1*01:03-B1*06:01L HLA-DQA1*02:01-B1*03:03L
KPLEFGATSAALQ

SEQ ID NO: 10673 - protein, 14 aa, Severe acute respiratory syndrome coronavirus 2
  REGION 1..14: note = Table B: HLA-DQA1*05:01-B1*03:01L HLA-DQA1*01:02-B1*06:02L HLA-DQA1*01:03-B1*06:01L
PLEFGATSAALQPE

SEQ ID NO: 10674 - protein, 11 aa, Severe acute respiratory syndrome coronavirus 2
  REGION 1..11: note = Table B: HLA-DQA1*05:01-B1*03:01L HLA-DQA1*01:01-B1*05:01L HLA-DQA1*05:05-B1*03:19L HLA-DQA1*05:05-B1*03:01L
ATSAALQPEEE

SEQ ID NO: 10675 - protein, 11 aa, Severe acute respiratory syndrome coronavirus 2
  REGION 1..11: note = Table B: HLA-DQA1*05:01-B1*03:01L HLA-DQA1*01:01-B1*05:01L HLA-DQA1*05:05-B1*03:19L HLA-DQA1*05:05-B1*03:01L
TSAALQPEEEQ

SEQ ID NO: 10676 - protein, 12 aa, Severe acute respiratory syndrome coronavirus 2
  REGION 1..12: note = Table B: HLA-DQA1*05:01-B1*03:01L HLA-DRB1*13:03L HLA-DRB1*04:02L HLA-DRB1*04:05L HLA-DQA1*01:02-B1*06:02L HLA-DQA1*01:01-B1*05:01L HLA-DQA1*05:05-B1*03:19L HLA-DRB1*04:10L HLA-DRB1*12:01L HLA-DQA1*05:05-B1*03:01L
  REGION 1..12: note = CONT. FROM ABOVE: HLA-DRB1*16:01L
SAALQPEEEQEE

SEQ ID NO: 10677 - protein, 14 aa, Severe acute respiratory syndrome coronavirus 2
  REGION 1..14: note = Table B: HLA-DQA1*05:01-B1*03:01L HLA-DRB1*04:03L HLA-DQA1*01:02-B1*06:02L HLA-DQA1*01:01-B1*05:01L HLA-DQA1*05:05-B1*03:19L HLA-DQA1*05:05-B1*03:01L
DSQQTVGQQDGSED

SEQ ID NO: 10678 - protein, 12 aa, Severe acute respiratory syndrome coronavirus 2
  REGION 1..12: note = Table B: HLA-DQA1*05:01-B1*03:01L HLA-DRB1*13:02L HLA-DRB1*13:03L HLA-DRB1*01:03L HLA-DRB1*04:02L HLA-DRB1*04:04L HLA-DRB1*04:05L HLA-DRB1*01:02L HLA-DRB4*03:01NL HLA-DRB1*08:04L HLA-DRB3*02:01L HLA-DPA1*01:03-B1*03:01L
  REGION 1..12: note = CONT. FROM ABOVE: HLA-DPA1*03:01-B1*04:02L HLA-DRB1*14:01L HLA-D QA1*01:01-B1*05:01L HLA-DQA1*01-B1*05L HLA-DQA1*05:05-B1*03:19L HLA-DRB1*04:10L HLA-DRB1*12:01L HLA-DRB1*12:02L HLA-DPA1*02:01-B 1*13:01L HLA-DPA1*03:01-B1*105:01L HLA-DRB1*14:54L
  REGION 1..12: note = CONT. FROM ABOVE: HLA-DPA1*01:03-B1*104:01L HLA-DQA1*05:05-B1*03 :01L HLA-DRB1*10:01L HLA-DRB1*16:01L HLA-DRB1*04:08L HLA-DRB1*08 :03L HLA-DRB1*15:03L
IQTIVEVQPQLE

SEQ ID NO: 10679 - protein, 12 aa, Severe acute respiratory syndrome coronavirus 2
  REGION 1..12: note = Table B: HLA-DQA1*05:01-B1*03:01L HLA-DRB1*04:03L HLA-DRB1*04:02L HLA-DQA1*05:01-B1*02:01L HLA-DRB1*12:01L HLA-DQA1*03:01-B1*03:02L HLA-DQA1*05:05-B1*03:01L HLA-DRB1*14:17L
VVQTIEVNSFSG

SEQ ID NO: 10680 - protein, 10 aa, Severe acute respiratory syndrome coronavirus 2
  REGION 1..10: note = Table B: HLA-DQA1*05:01-B1*03:01L HLA-DRB1*04:03L HLA-DRB1*13:03L HLA-DRB1*01:03L HLA-DQA1*01:02-B1*06:02L HLA-DRB4*03:01NL HLA-DRB1*08:77M HLA-DPA1*01:03-B1*03:01M HLA-DPA1*03:01-B1*04:02L HLA-DRB1*03:01L HLA-DRB1*11:02L
  REGION 1..10: note = CONT. FROM ABOVE: HLA-DRB1*14:02L HLA-DQA1*01-B1*05L HLA-DQA1*05 :05-B1*03:19M HLA-DQA1*05:01-B1*02:01M HLA-DRB4*01:01L HLA-DPA1* 01:03-B1*04:01L HLA-DQA1*05:05-B1*03:116L HLA-DPA1*01:03-B1*04:0 2L HLA-DRB1*12:01L HLA-DPA1*03:01-B1*105:01L
  REGION 1..10: note = CONT. FROM ABOVE: HLA-DPA1*01:03-B1*104:01M HLA-DPA1*01:02-B1*04 :01L HLA-DRB1*10:01L HLA-DRB1*16:01M HLA-DQA1*02:01-B1*03:03L HL A-DRB1*15:03L
TIEVNSFSGY

SEQ ID NO: 10681 - protein, 11 aa, Severe acute respiratory syndrome coronavirus 2
  REGION 1..11: note = Table B: HLA-DQA1*05:01-B1*03:01L HLA-DRB1*04:03L HLA-DRB1*01:03L HLA-DRB1*04:02L HLA-DPA1*03:01-B1*04:02L HLA-DQA1*01-B1*05L HLA-DPA1*01:02-B1*04:01L HLA-DRB1*16:01L HLA-DRB1*15:03L
IEVNSFSGYLK

SEQ ID NO: 10682 - protein, 11 aa, Severe acute respiratory syndrome coronavirus 2
  REGION 1..11: note = Table B: HLA-DQA1*05:01-B1*03:01L HLA-DRB1*04:03L HLA-DRB1*13:02L HLA-DRB1*13:03L HLA-DRB1*01:03L HLA-DRB1*04:02L HLA-DRB1*04:05L HLA-DRB4*03:01NL HLA-DRB1*14:01L HLA-DQA1*05:01-B1*02:01L HLA-DPA1*03:01-B1*105:01L
  REGION 1..11: note = CONT. FROM ABOVE: HLA-DQA1*03:01-B1*03:02L HLA-DRB1*14:54L HLA-D RB1*14:17L HLA-DPA1*01:02-B1*04:01L HLA-DRB1*07:01L HLA-DRB1*04: 08L
YLKLTDNVYIK

SEQ ID NO: 10683 - protein, 12 aa, Severe acute respiratory syndrome coronavirus 2
  REGION 1..12: note = Table B: HLA-DQA1*05:01-B1*03:01L HLA-DRB1*13:02L HLA-DRB1*04:04L HLA-DQA1*01:02-B1*06:02L HLA-DRB1*08:04L HLA-DRB1*08:77L HLA-DRB3*02:01L HLA-DPA1*01:03-B1*03:01L HLA-DPA1*03:01-B1*04:02L HLA-DRB1*11:03L HLA-DRB1*11:04L
  REGION 1..12: note = CONT. FROM ABOVE: HLA-DRB1*14:02L HLA-DQA1*01:01-B1*05:01L HLA-D RB1*11:01L HLA-DRB5*01:01L HLA-DQA1*05:05-B1*03:19L HLA-DPA1*01: 03-B1*04:01L HLA-DRB1*09:01L HLA-DPA1*01:03-B1*04:02L HLA-DRB1*1 2:02M HLA-DRB3*01:01L HLA-DQA1*05:05-B1*03:01L HLA-DRB1*07:01L
  REGION 1..12: note = CONT. FROM ABOVE: HLA-DRB1*10:01L HLA-DRB1*08:03L
DNVYIKNADIVE

SEQ ID NO: 10684 - protein, 11 aa, Severe acute respiratory syndrome coronavirus 2
  REGION 1..11: note = Table B: HLA-DQA1*05:01-B1*03:01L HLA-DRB1*04:03L HLA-DRB1*13:03L HLA-DRB1*04:02L HLA-DRB1*04:05L HLA-DQA1*01:02-B1*06:02L HLA-DRB1*01:02L HLA-DRB4*03:01NL HLA-DRB1*14:01L HLA-DRB1*11:04L HLA-DRB1*08:01L HLA-DRB1*12:01L
  REGION 1..11: note = CONT. FROM ABOVE: HLA-DRB1*14:54L HLA-DRB1*14:17L HLA-DPA1*01:02 -B1*04:01L HLA-DRB1*04:08L HLA-DQA1*02:01-B1*03:03L
IVEEAKKVKPT

SEQ ID NO: 10685 - protein, 12 aa, Severe acute respiratory syndrome coronavirus 2
  REGION 1..12: note = Table B: HLA-DQA1*05:01-B1*03:01L HLA-DQA1*01:02-B1*06:02L HLA-DRB1*01:02L
VVNAANVYLKHG

SEQ ID NO: 10686 - protein, 12 aa, Severe acute respiratory syndrome coronavirus 2
  REGION 1..12: note = Table B: HLA-DQA1*05:01-B1*03:01L HLA-DQA1*05:05-B1*03:19L HLA-DQA1*05:05-B1*03:01L
YLKHGGGVAGAL

SEQ ID NO: 10687 - protein, 14 aa, Severe acute respiratory syndrome coronavirus 2
  REGION 1..14: note = Table B: HLA-DQA1*05:01-B1*03:01L HLA-DRB1*01:03L HLA-DRB1*04:05L HLA-DRB1*01:02L HLA-DPA1*01:03-B1*03:01L HLA-DQA1*05:05-B1*03:19L HLA-DRB1*12:01L HLA-DPA1*02:01-B1*13:01L HLA-DPA1*03:01-B1*105:01L
  REGION 1..14: note = CONT. FROM ABOVE: HLA-DQA1*03:01-B1*03:02L HLA-DPA1*01:03-B1*104 :01L HLA-DRB1*04:08L HLA-DQA1*02:01-B1*03:03L
GPLKVGGSCVLSGH

SEQ ID NO: 10688 - protein, 10 aa, Severe acute respiratory syndrome coronavirus 2
  REGION 1..10: note = Table B: HLA-DQA1*05:01-B1*03:01L HLA-DRB1*04:03L HLA-DRB1*13:03L HLA-DRB1*01:03L HLA-DRB1*04:02L HLA-DRB1*01:02L HLA-DRB1*12:01L HLA-DQA1*03:01-B1*03:02L HLA-DRB1*14:17L HLA-DRB1*16:01L HLA-DRB1*04:08L HLA-DQA1*02:01-B1*03:03L
VLSGHNLAKH

SEQ ID NO: 10689 - protein, 16 aa, Severe acute respiratory syndrome coronavirus 2
  REGION 1..16: note = Table B: HLA-DQA1*05:01-B1*03:01L HLA-DRB1*13:02L HLA-DRB1*04:04L HLA-DRB1*04:05L HLA-DPA1*01:03-B1*03:01L HLA-DRB1*14:01L HLA-DRB1*11:04L HLA-DRB1*11:01L HLA-DRB1*12:01L HLA-DRB3*01:01L HLA-DPA1*02:01-B1*13:01L
  REGION 1..16: note = CONT. FROM ABOVE: HLA-DPA1*03:01-B1*105:01L HLA-DQA1*03:01-B1*03 :02L HLA-DPA1*01:03-B1*104:01L HLA-DPA1*01:02-B1*04:01L HLA-DRB1 *07:01L HLA-DRB1*16:01L HLA-DRB1*15:03L
SGHNLAKHCLHVVGPN

SEQ ID NO: 10690 - protein, 10 aa, Severe acute respiratory syndrome coronavirus 2
  REGION 1..10: note = Table B: HLA-DQA1*05:01-B1*03:01M HLA-DRB1*13:03L HLA-DRB1*01:03L HLA-DQA1*01:02-B1*06:02L HLA-DRB4*03:01NL HLA-DRB1*08:77M HLA-DPA1*01:03-B1*03:01L HLA-DPA1*03:01-B1*04:02L HLA-DRB1*03:01L HLA-DRB1*11:02L
  REGION 1..10: note = CONT. FROM ABOVE: HLA-DRB1*14:02L HLA-DQA1*01-B1*05L HLA-DQA1*05 :05-B1*03:19M HLA-DQA1*05:01-B1*02:01L HLA-DRB4*01:01M HLA-DPA1* 01:03-B1*04:01M HLA-DQA1*05:05-B1*03:116L HLA-DPA1*01:03-B1*04:0 2L HLA-DRB1*12:01L HLA-DPA1*01:03-B1*104:01L
  REGION 1..10: note = CONT. FROM ABOVE: HLA-DPA1*01:02-B1*04:01L HLA-DRB1*10:01L HLA-D RB1*16:01L HLA-DQA1*02:01-B1*03:03L HLA-DRB1*15:03L
EDIQLLKSAY

SEQ ID NO: 10691 - protein, 13 aa, Severe acute respiratory syndrome coronavirus 2
  REGION 1..13: note = Table B: HLA-DQA1*05:01-B1*03:01L HLA-DRB1*04:04L HLA-DRB1*04:05L HLA-DRB1*01:02L HLA-DRB1*04:10L HLA-DRB1*12:01L HLA-DPA1*03:01-B1*105:01L HLA-DQA1*03:01-B1*03:02L HLA-DQA1*05:05-B1*03:01L HLA-DQA1*01:03-B1*06:01L
  REGION 1..13: note = CONT. FROM ABOVE: HLA-DQA1*02:01-B1*03:03L HLA-DRB1*15:03L
QHEVLLAPLLSAG

SEQ ID NO: 10692 - protein, 12 aa, Severe acute respiratory syndrome coronavirus 2
  REGION 1..12: note = Table B: HLA-DQA1*05:01-B1*03:01L HLA-DQA1*01:02-B1*06:02L HLA-DQA1*05:05-B1*03:19L HLA-DPA1*03:01-B1*105:01L HLA-DQA1*05:05-B1*03:01L
LSAGIFGADPIH

SEQ ID NO: 10693 - protein, 10 aa, Severe acute respiratory syndrome coronavirus 2
  REGION 1..10: note = Table B: HLA-DQA1*05:01-B1*03:01L HLA-DRB1*04:03L HLA-DRB1*13:02L HLA-DRB1*13:03L HLA-DRB1*01:03L HLA-DRB1*04:02L HLA-DQA1*01:02-B1*06:02L HLA-DRB1*01:01L HLA-DRB1*01:02L HLA-DRB4*03:01NL HLA-DRB3*02:01L HLA-DRB1*14:01L HLA-DRB1*11:04L
  REGION 1..10: note = CONT. FROM ABOVE: HLA-DRB1*14:02L HLA-DRB1*08:01L HLA-DRB5*01:01 L HLA-DQA1*05:05-B1*03:19L HLA-DQA1*05:01-B1*02:01L HLA-DRB1*13: 01L HLA-DPA1*01:03-B1*04:02L HLA-DRB1*12:01L HLA-DRB1*12:02L HLA -DRB3*01:01L HLA-DPA1*03:01-B1*105:01L HLA-DQA1*03:01-B1*03:02M
  REGION 1..10: note = CONT. FROM ABOVE: HLA-DQA1*05:05-B1*03:01L HLA-DRB1*14:17L HLA-D PA1*01:02-B1*04:01L HLA-DRB1*16:01L HLA-DQA1*01:03-B1*06:01L HLA -DRB1*04:08L HLA-DQA1*02:01-B1*03:03L HLA-DRB1*15:03L
FGADPIHSLR

SEQ ID NO: 10694 - protein, 14 aa, Severe acute respiratory syndrome coronavirus 2
  REGION 1..14: note = Table B: HLA-DQA1*05:01-B1*03:01L HLA-DRB1*13:02L HLA-DRB1*04:05L HLA-DPA1*01:03-B1*03:01L HLA-DRB1*14:01L HLA-DRB1*08:01L HLA-DPA1*01:03-B1*04:02L HLA-DPA1*02:01-B1*13:01L HLA-DPA1*01:03-B1*02:01L
DTVRTNVYLAVFDK

SEQ ID NO: 10695 - protein, 13 aa, Severe acute respiratory syndrome coronavirus 2
  REGION 1..13: note = Table B: HLA-DQA1*05:01-B1*03:01L HLA-DRB1*04:05L HLA-DRB1*01:02L HLA-DPA1*01:03-B1*03:01L HLA-DPA1*03:01-B1*04:02L HLA-DRB1*12:01L HLA-DPA1*02:01-B1*13:01L HLA-DQA1*05:05-B1*03:01L
  REGION 1..13: note = CONT. FROM ABOVE: HLA-DRB1*16:01L HLA-DRB1*04:08L HLA-DRB1*15:03 L
VRTNVYLAVFDKN

SEQ ID NO: 10696 - protein, 12 aa, Severe acute respiratory syndrome coronavirus 2
  REGION 1..12: note = Table B: HLA-DQA1*05:01-B1*03:01L HLA-DRB1*13:02L HLA-DRB1*13:03L HLA-DRB1*01:03L HLA-DRB4*03:01NL HLA-DRB1*08:04L HLA-DRB1*08:77L HLA-DRB3*02:01L HLA-DPA1*01:03-B1*03:01L HLA-DRB1*14:01L HLA-DRB1*08:01L HLA-DQA1*05:05-B1*03:19L
  REGION 1..12: note = CONT. FROM ABOVE: HLA-DRB1*09:01L HLA-DPA1*01:03-B1*04:02L HLA-D QA1*05:05-B1*03:01L HLA-DRB1*14:17L HLA-DRB1*07:01L HLA-DRB1*04: 08L
TNVYLAVFDKNL

SEQ ID NO: 10697 - protein, 10 aa, Severe acute respiratory syndrome coronavirus 2
  REGION 1..10: note = Table B: HLA-DQA1*05:01-B1*03:01L HLA-DRB1*04:05L HLA-DQA1*01:02-B1*06:02L HLA-DRB1*08:77L HLA-DPA1*01:03-B1*03:01L HLA-DPA1*03:01-B1*04:02L HLA-DRB1*03:01L HLA-DRB1*11:02L HLA-DRB1*14:02L
  REGION 1..10: note = CONT. FROM ABOVE: HLA-DQA1*01-B1*05L HLA-DQA1*05:05-B1*03:19L HL A-DQA1*05:01-B1*02:01L HLA-DRB4*01:01L HLA-DPA1*01:03-B1*04:01L HLA-DQA1*05:05-B1*03:116L HLA-DPA1*01:03-B1*04:02L HLA-DPA1*02:0 1-B1*13:01L HLA-DPA1*03:01-B1*105:01L HLA-DPA1*01:03-B1*104:01L
  REGION 1..10: note = CONT. FROM ABOVE: HLA-DRB1*10:01L HLA-DRB1*16:01L HLA-DQA1*01:03 -B1*06:01L HLA-DQA1*02:01-B1*03:03L HLA-DRB1*15:03L
YLAVFDKNLY

SEQ ID NO: 10698 - protein, 10 aa, Severe acute respiratory syndrome coronavirus 2
  REGION 1..10: note = Table B: HLA-DQA1*05:01-B1*03:01L HLA-DRB1*04:01L HLA-DRB1*04:03L HLA-DRB1*13:02L HLA-DRB1*13:03M HLA-DRB1*01:03L HLA-DRB1*04:02L HLA-DRB1*04:04L HLA-DQA1*01:02-B1*06:02L HLA-DRB1*01:01L HLA-DRB1*01:02L HLA-DRB4*03:01NL HLA-DRB3*02:01L
  REGION 1..10: note = CONT. FROM ABOVE: HLA-DRB1*14:01L HLA-DRB1*11:04L HLA-DRB1*14:02 L HLA-DRB1*08:01L HLA-DRB1*11:01L HLA-DRB5*01:01L HLA-DPA1*01:03 -B1*04:02L HLA-DRB1*12:01L HLA-DRB1*12:02L HLA-DRB3*01:01L HLA-D PA1*03:01-B1*105:01L HLA-DQA1*03:01-B1*03:02M
  REGION 1..10: note = CONT. FROM ABOVE: HLA-DQA1*05:05-B1*03:01L HLA-DRB1*14:17L HLA-D PA1*01:02-B1*04:01L HLA-DRB1*16:01L HLA-DQA1*01:03-B1*06:01L HLA -DRB1*08:02L HLA-DRB1*08:03L HLA-DQA1*02:01-B1*03:03L HLA-DRB1*1 5:01L
AVFDKNLYDK

SEQ ID NO: 10699 - protein, 13 aa, Severe acute respiratory syndrome coronavirus 2
  REGION 1..13: note = Table B: HLA-DQA1*05:01-B1*03:01L HLA-DRB1*08:01L HLA-DQA1*05:05-B1*03:01L
LYDKLVSSFLEMK

SEQ ID NO: 10700 - protein, 12 aa, Severe acute respiratory syndrome coronavirus 2
  REGION 1..12: note = Table B: HLA-DQA1*05:01-B1*03:01L HLA-DRB1*01:01L HLA-DRB1*11:03L HLA-DRB1*14:02L HLA-DRB1*11:01L HLA-DRB3*01:01L HLA-DQA1*05:05-B1*03:01L HLA-DRB1*08:03L
SFLEMKSEKQVE

SEQ ID NO: 10701 - protein, 12 aa, Severe acute respiratory syndrome coronavirus 2
  REGION 1..12: note = Table B: HLA-DQA1*05:01-B1*03:01L HLA-DRB1*04:05L HLA-DQA1*01:02-B1*06:02L HLA-DRB1*01:02L HLA-DRB1*16:01L HLA-DQA1*01:03-B1*06:01L HLA-DRB1*04:08L
LEMKSEKQVEQK

SEQ ID NO: 10702 - protein, 12 aa, Severe acute respiratory syndrome coronavirus 2
  REGION 1..12: note = Table B: HLA-DQA1*05:01-B1*03:01L HLA-DRB1*13:02L HLA-DRB1*13:03L HLA-DRB1*01:03L HLA-DRB1*04:02L HLA-DRB1*04:05L HLA-DQA1*01:02-B1*06:02L HLA-DRB1*01:02L HLA-DRB1*08:04L HLA-DRB1*14:01L HLA-DRB1*11:04L HLA-DRB1*08:01L
  REGION 1..12: note = CONT. FROM ABOVE: HLA-DQA1*05:01-B1*02:01L HLA-DRB1*12:01L HLA-D RB1*14:54L HLA-DRB1*14:17L HLA-DRB1*16:01L HLA-DRB1*04:08L HLA-D RB1*08:03L HLA-DRB1*15:03L
KPFITESKPSVE

SEQ ID NO: 10703 - protein, 14 aa, Severe acute respiratory syndrome coronavirus 2
  REGION 1..14: note = Table B: HLA-DQA1*05:01-B1*03:01L HLA-DRB1*13:02L HLA-DRB1*01:03L HLA-DPA1*01:03-B1*03:01L HLA-DRB1*14:01L HLA-DRB1*08:01L HLA-DPA1*03:01-B1*105:01L HLA-DPA1*01:03-B1*104:01L HLA-DQA1*05:05-B1*03:01L
  REGION 1..14: note = CONT. FROM ABOVE: HLA-DRB1*04:08L
DDKKIKACVEEVTT

SEQ ID NO: 10704 - protein, 14 aa, Severe acute respiratory syndrome coronavirus 2
  REGION 1..14: note = Table B: HLA-DQA1*05:01-B1*03:01L HLA-DRB1*01:03L HLA-DPA1*02:01-B1*13:01L HLA-DPA1*03:01-B1*105:01L HLA-DQA1*03:01-B1*03:02L HLA-DQA1*05:05-B1*03:01L HLA-DRB1*04:08L
DKKIKACVEEVTTT

SEQ ID NO: 10705 - protein, 12 aa, Severe acute respiratory syndrome coronavirus 2
  REGION 1..12: note = Table B: HLA-DQA1*05:01-B1*03:01L HLA-DQA1*01:02-B1*06:02L HLA-DPA1*01:03-B1*03:01L
TTTLEETKFLTE

SEQ ID NO: 10706 - protein, 11 aa, Severe acute respiratory syndrome coronavirus 2
  REGION 1..11: note = Table B: HLA-DQA1*05:01-B1*03:01L HLA-DRB1*13:02L HLA-DRB1*04:04L HLA-DRB1*01:02L HLA-DRB1*08:77L HLA-DRB1*14:01L HLA-DRB1*11:04L HLA-DRB1*04:10L HLA-DPA1*03:01-B1*105:01L HLA-DQA1*05:05-B1*03:01L HLA-DRB1*10:01L HLA-DRB1*04:08L
  REGION 1..11: note = CONT. FROM ABOVE: HLA-DRB1*15:03L
YIDINGNLHPD

SEQ ID NO: 10707 - protein, 11 aa, Severe acute respiratory syndrome coronavirus 2
  REGION 1..11: note = Table B: HLA-DQA1*05:01-B1*03:01L HLA-DRB1*13:02L HLA-DQA1*01:02-B1*06:02L HLA-DRB1*14:01L HLA-DQA1*01:01-B1*05:01L HLA-DQA1*05:05-B1*03:19L HLA-DRB1*04:10L HLA-DPA1*03:01-B1*105:01L
  REGION 1..11: note = CONT. FROM ABOVE: HLA-DQA1*05:05-B1*03:01L HLA-DQA1*01:03-B1*06: 01L HLA-DRB1*04:08L
IDINGNLHPDS

SEQ ID NO: 10708 - protein, 10 aa, Severe acute respiratory syndrome coronavirus 2
  REGION 1..10: note = Table B: HLA-DQA1*05:01-B1*03:01L HLA-DRB1*01:03L HLA-DQA1*01:02-B1*06:02L HLA-DRB1*14:01L HLA-DQA1*05:05-B1*03:19L HLA-DQA1*05:01-B1*02:01L HLA-DQA1*03:01-B1*03:02L HLA-DPA1*01:02-B1*04:01L
  REGION 1..10: note = CONT. FROM ABOVE: HLA-DRB1*16:01L HLA-DQA1*01:03-B1*06:01L HLA-D QA1*02:01-B1*03:03L
ITFLKKDAPY

SEQ ID NO: 10709 - protein, 13 aa, Severe acute respiratory syndrome coronavirus 2
  REGION 1..13: note = Table B: HLA-DQA1*05:01-B1*03:01L HLA-DQA1*01:02-B1*06:02L HLA-DRB1*01:02L HLA-DRB1*08:04L HLA-DPA1*01:03-B1*03:01L HLA-DRB1*14:01L HLA-DRB1*11:03L HLA-DRB1*14:02L HLA-DQA1*01:01-B1*05:01L HLA-DRB1*08:01L HLA-DRB5*01:01L
  REGION 1..13: note = CONT. FROM ABOVE: HLA-DQA1*05:05-B1*03:19L HLA-DRB1*09:01L HLA-D RB3*01:01L HLA-DPA1*02:01-B1*13:01L HLA-DQA1*05:05-B1*03:01L HLA -DQA1*01:03-B1*06:01L HLA-DRB1*08:03L HLA-DRB1*15:03L
DAPYIVGDVVQEG

SEQ ID NO: 10710 - protein, 11 aa, Severe acute respiratory syndrome coronavirus 2
  REGION 1..11: note = Table B: HLA-DQA1*05:01-B1*03:01L HLA-DRB1*04:03L HLA-DRB1*04:02L HLA-DRB1*04:05L HLA-DQA1*01:02-B1*06:02L HLA-DRB4*03:01NL HLA-DQA1*01-B1*05L HLA-DQA1*05:05-B1*03:19L HLA-DQA1*05:01-B1*02:01L HLA-DRB1*12:01L
  REGION 1..11: note = CONT. FROM ABOVE: HLA-DPA1*03:01-B1*105:01L HLA-DQA1*03:01-B1*03 :02L HLA-DRB1*14:54L HLA-DQA1*05:05-B1*03:01L HLA-DRB1*14:17L HL A-DRB1*16:01L HLA-DQA1*01:03-B1*06:01L HLA-DQA1*02:01-B1*03:03L HLA-DRB1*15:03L
IVGDVVQEGVL

SEQ ID NO: 10711 - protein, 10 aa, Severe acute respiratory syndrome coronavirus 2
  REGION 1..10: note = Table B: HLA-DQA1*05:01-B1*03:01L HLA-DQA1*01:02-B1*06:02L HLA-DQA1*05:05-B1*03:19L HLA-DPA1*03:01-B1*105:01L HLA-DQA1*03:01-B1*03:02L HLA-DQA1*05:05-B1*03:01L HLA-DQA1*01:03-B1*06:01M HLA-DQA1*02:01-B1*03:03L
LTAVVIPTKK

SEQ ID NO: 10712 - protein, 15 aa, Severe acute respiratory syndrome coronavirus 2
  REGION 1..15: note = Table B: HLA-DQA1*05:01-B1*03:01L HLA-DRB1*13:02L HLA-DRB1*04:05L HLA-DQA1*01:02-B1*06:02L HLA-DRB1*01:02L HLA-DPA1*01:03-B1*03:01L HLA-DRB1*12:01L HLA-DPA1*02:01-B1*13:01L HLA-DQA1*05:05-B1*03:01L
IPTKKAGGTTEMLAK

SEQ ID NO: 10713 - protein, 16 aa, Severe acute respiratory syndrome coronavirus 2
  REGION 1..16: note = Table B: HLA-DQA1*05:01-B1*03:01L HLA-DRB1*04:05L HLA-DPA1*03:01-B1*04:02L HLA-DRB1*11:02L HLA-DRB1*11:03L HLA-DRB1*11:04L HLA-DRB1*14:02L HLA-DQA1*05:05-B1*03:19L HLA-DPA1*01:03-B1*04:02L HLA-DRB3*01:01L
  REGION 1..16: note = CONT. FROM ABOVE: HLA-DPA1*02:01-B1*13:01L HLA-DPA1*01:03-B1*02: 01L HLA-DQA1*05:05-B1*03:01L HLA-DPA1*01:02-B1*04:01L HLA-DRB1*0 8:02L HLA-DRB1*08:03L
TTEMLAKALRKVPTDN

SEQ ID NO: 10714 - protein, 10 aa, Severe acute respiratory syndrome coronavirus 2
  REGION 1..10: note = Table B: HLA-DQA1*05:01-B1*03:01L HLA-DRB1*04:01L HLA-DRB1*04:03L HLA-DRB1*13:02L HLA-DRB1*13:03L HLA-DRB1*01:03M HLA-DQA1*01:02-B1*06:02L HLA-DRB1*08:77L HLA-DPA1*01:03-B1*03:01L HLA-DRB1*03:01L HLA-DRB1*14:01L
  REGION 1..10: note = CONT. FROM ABOVE: HLA-DRB1*14:02L HLA-DRB1*11:01L HLA-DQA1*01-B1 *05L HLA-DQA1*05:05-B1*03:19L HLA-DQA1*05:01-B1*02:01L HLA-DPA1* 01:03-B1*04:01L HLA-DQA1*05:05-B1*03:116L HLA-DPA1*01:03-B1*04:0 2L HLA-DRB1*12:01L HLA-DPA1*02:01-B1*13:01L
  REGION 1..10: note = CONT. FROM ABOVE: HLA-DPA1*03:01-B1*105:01L HLA-DPA1*01:03-B1*10 4:01L HLA-DPA1*01:02-B1*04:01L HLA-DRB1*10:01L HLA-DRB1*16:01L H LA-DQA1*01:03-B1*06:01L HLA-DRB1*08:02L HLA-DQA1*02:01-B1*03:03M HLA-DRB1*15:03L
ALRKVPTDNY

SEQ ID NO: 10715 - protein, 11 aa, Severe acute respiratory syndrome coronavirus 2
  REGION 1..11: note = Table B: HLA-DQA1*05:01-B1*03:01L HLA-DRB1*13:03L HLA-DQA1*01:02-B1*06:02L HLA-DQA1*05:05-B1*03:19L HLA-DRB1*12:01L HLA-DQA1*05:05-B1*03:01L HLA-DQA1*01:03-B1*06:01L
DNYITTYPGQG

SEQ ID NO: 10716 - protein, 12 aa, Severe acute respiratory syndrome coronavirus 2
  REGION 1..12: note = Table B: HLA-DQA1*05:01-B1*03:01L HLA-DQA1*01:01-B1*05:01L HLA-DQA1*05:05-B1*03:19L HLA-DRB1*04:10L HLA-DPA1*03:01-B1*105:01L HLA-DQA1*05:05-B1*03:01L
GLNGYTVEEAKT

SEQ ID NO: 10717 - protein, 11 aa, Severe acute respiratory syndrome coronavirus 2
  REGION 1..11: note = Table B: HLA-DQA1*05:01-B1*03:01L HLA-DRB1*12:01L HLA-DPA1*03:01-B1*105:01L
NGYTVEEAKTV

SEQ ID NO: 10718 - protein, 11 aa, Severe acute respiratory syndrome coronavirus 2
  REGION 1..11: note = Table B: HLA-DQA1*05:01-B1*03:01L HLA-DRB1*04:03L HLA-DRB1*01:02L HLA-DPA1*01:02-B1*04:01L
TVEEAKTVLKK

SEQ ID NO: 10719 - protein, 12 aa, Severe acute respiratory syndrome coronavirus 2
  REGION 1..12: note = Table B: HLA-DQA1*05:01-B1*03:01L HLA-DRB1*04:01L HLA-DRB1*13:02L HLA-DRB1*04:04L HLA-DQA1*01:02-B1*06:02L HLA-DRB1*01:01L HLA-DRB1*08:04L HLA-DRB1*08:77L HLA-DPA1*01:03-B1*03:01L HLA-DRB1*14:01L HLA-DRB1*11:03L
  REGION 1..12: note = CONT. FROM ABOVE: HLA-DRB1*11:04L HLA-DRB1*14:02L HLA-DRB1*08:01 L HLA-DQA1*05:05-B1*03:19L HLA-DRB1*09:01L HLA-DRB1*12:02L HLA-D PA1*02:01-B1*13:01L HLA-DRB1*08:03L
SAFYILPSIISN

SEQ ID NO: 10720 - protein, 12 aa, Severe acute respiratory syndrome coronavirus 2
  REGION 1..12: note = Table B: HLA-DQA1*05:01-B1*03:01L HLA-DRB1*01:03L HLA-DRB1*04:05L HLA-DRB4*03:01NL HLA-DQA1*01:01-B1*05:01L HLA-DQA1*01-B1*05L HLA-DQA1*05:05-B1*03:19L HLA-DRB1*04:10L HLA-DRB1*12:01L HLA-DPA1*03:01-B1*105:01L HLA-DRB1*14:54L
  REGION 1..12: note = CONT. FROM ABOVE: HLA-DRB1*16:01L
ILPSIISNEKQE

SEQ ID NO: 10721 - protein, 10 aa, Severe acute respiratory syndrome coronavirus 2
  REGION 1..10: note = Table B: HLA-DQA1*05:01-B1*03:01L HLA-DQA1*01:02-B1*06:02L HLA-DRB1*08:77L HLA-DQA1*05:05-B1*03:19L HLA-DQA1*05:01-B1*02:01L HLA-DRB4*01:01L HLA-DPA1*01:03-B1*04:01L HLA-DQA1*02:01-B1*03:03L
KQEILGTVSW

SEQ ID NO: 10722 - protein, 10 aa, Severe acute respiratory syndrome coronavirus 2
  REGION 1..10: note = Table B: HLA-DQA1*05:01-B1*03:01L HLA-DRB1*04:03L HLA-DQA1*01:02-B1*06:02L HLA-DRB1*01:02L HLA-DQA1*05:01-B1*02:01L HLA-DRB1*12:01L HLA-DPA1*03:01-B1*105:01L HLA-DQA1*03:01-B1*03:02L
  REGION 1..10: note = CONT. FROM ABOVE: HLA-DQA1*05:05-B1*03:01L HLA-DPA1*01:02-B1*04: 01L HLA-DRB1*16:01L HLA-DQA1*01:03-B1*06:01L HLA-DQA1*02:01-B1*0 3:03L HLA-DRB1*15:03L
ILGTVSWNLR

SEQ ID NO: 10723 - protein, 13 aa, Severe acute respiratory syndrome coronavirus 2
  REGION 1..13: note = Table B: HLA-DQA1*05:01-B1*03:01L HLA-DRB1*01:03L HLA-DQA1*01:01-B1*05:01L HLA-DPA1*02:01-B1*13:01L HLA-DRB1*04:08L
NLREMLAHAEETR

SEQ ID NO: 10724 - protein, 11 aa, Severe acute respiratory syndrome coronavirus 2
  REGION 1..11: note = Table B: HLA-DQA1*05:01-B1*03:01L HLA-DRB1*16:01L
EMLAHAEETRK

SEQ ID NO: 10725 - protein, 10 aa, Severe acute respiratory syndrome coronavirus 2
  REGION 1..10: note = Table B: HLA-DQA1*05:01-B1*03:01L HLA-DRB1*01:03L HLA-DRB1*01:02L HLA-DRB1*12:01L HLA-DQA1*03:01-B1*03:02L HLA-DPA1*01:02-B1*04:01L HLA-DRB1*16:01L HLA-DQA1*01:03-B1*06:01L HLA-DQA1*02:01-B1*03:03L
IVSTIQRKYK

SEQ ID NO: 10726 - protein, 15 aa, Severe acute respiratory syndrome coronavirus 2
  REGION 1..15: note = Table B: HLA-DQA1*05:01-B1*03:01L HLA-DRB1*04:01L HLA-DRB1*04:03L HLA-DRB1*04:02L HLA-DRB1*01:01L HLA-DRB1*08:04L HLA-DPA1*01:03-B1*03:01L HLA-DQA1*05:05-B1*03:19L HLA-DPA1*01:03-B1*04:02L HLA-DRB3*01:01L
  REGION 1..15: note = CONT. FROM ABOVE: HLA-DQA1*05:05-B1*03:01L HLA-DRB1*10:01L
IQRKYKGIKIQEGVV

SEQ ID NO: 10727 - protein, 11 aa, Severe acute respiratory syndrome coronavirus 2
  REGION 1..11: note = Table B: HLA-DQA1*05:01-B1*03:01L HLA-DRB1*04:03L HLA-DRB1*13:02L HLA-DRB1*13:03L HLA-DRB1*01:03L HLA-DRB1*04:02L HLA-DRB1*04:05L HLA-DQA1*01:02-B1*06:02L HLA-DRB1*01:02L HLA-DRB4*03:01NL HLA-DPA1*01:03-B1*03:01L
  REGION 1..11: note = CONT. FROM ABOVE: HLA-DQA1*01:01-B1*05:01L HLA-DRB1*08:01L HLA-D RB5*01:01L HLA-DQA1*01-B1*05L HLA-DQA1*05:05-B1*03:19L HLA-DQA1* 05:01-B1*02:01L HLA-DRB1*04:10L HLA-DPA1*01:03-B1*04:02L HLA-DRB 1*12:01L HLA-DPA1*03:01-B1*105:01L HLA-DRB1*14:54L
  REGION 1..11: note = CONT. FROM ABOVE: HLA-DQA1*05:05-B1*03:01L HLA-DRB1*14:17L HLA-D PA1*01:02-B1*04:01L HLA-DRB1*16:01L HLA-DRB1*04:08L HLA-DRB1*15: 03L
IQEGVVDYGAR

SEQ ID NO: 10728 - protein, 10 aa, Severe acute respiratory syndrome coronavirus 2
  REGION 1..10: note = Table B: HLA-DQA1*05:01-B1*03:01L HLA-DQA1*01:02-B1*06:02L HLA-DPA1*01:03-B1*03:01L HLA-DRB1*03:01L HLA-DRB1*11:02L HLA-DRB1*14:02L HLA-DQA1*01-B1*05L HLA-DQA1*05:05-B1*03:19L HLA-DQA1*05:01-B1*02:01L HLA-DPA1*01:03-B1*04:01L
  REGION 1..10: note = CONT. FROM ABOVE: HLA-DPA1*02:01-B1*13:01L HLA-DPA1*03:01-B1*105 :01L HLA-DPA1*01:03-B1*104:01L HLA-DRB1*16:01L HLA-DQA1*01:03-B1 *06:01L HLA-DQA1*02:01-B1*03:03L HLA-DRB1*15:03L
VVDYGARFYF

SEQ ID NO: 10729 - protein, 11 aa, Severe acute respiratory syndrome coronavirus 2
  REGION 1..11: note = Table B: HLA-DQA1*05:01-B1*03:01L HLA-DRB1*13:03L HLA-DRB1*01:03L HLA-DRB1*04:02L HLA-DRB3*02:01L HLA-DPA1*03:01-B1*04:02L HLA-DRB1*14:01L HLA-DQA1*05:01-B1*02:01L HLA-DRB1*12:01L
  REGION 1..11: note = CONT. FROM ABOVE: HLA-DQA1*03:01-B1*03:02L HLA-DQA1*05:05-B1*03: 01L HLA-DRB1*14:17L HLA-DRB1*04:08L
FYFYTSKTTVA

SEQ ID NO: 10730 - protein, 12 aa, Severe acute respiratory syndrome coronavirus 2
  REGION 1..12: note = Table B: HLA-DQA1*05:01-B1*03:01L HLA-DRB1*01:02L HLA-DPA1*03:01-B1*105:01L HLA-DPA1*01:02-B1*04:01L HLA-DQA1*01:03-B1*06:01L HLA-DRB1*15:03L
LVTMPLGYVTHG

SEQ ID NO: 10731 - protein, 12 aa, Severe acute respiratory syndrome coronavirus 2
  REGION 1..12: note = Table B: HLA-DQA1*05:01-B1*03:01L HLA-DRB1*01:03L HLA-DRB1*04:05L HLA-DQA1*01:02-B1*06:02L HLA-DQA1*01:01-B1*05:01L HLA-DQA1*05:05-B1*03:19L HLA-DRB1*12:01L HLA-DQA1*05:05-B1*03:01L
YVTHGLNLEEAA

SEQ ID NO: 10732 - protein, 12 aa, Severe acute respiratory syndrome coronavirus 2
  REGION 1..12: note = Table B: HLA-DQA1*05:01-B1*03:01L HLA-DRB1*04:03L HLA-DQA1*01:02-B1*06:02L HLA-DQA1*01:01-B1*05:01L HLA-DPA1*03:01-B1*105:01L HLA-DQA1*05:05-B1*03:01L
VTHGLNLEEAAR

SEQ ID NO: 10733 - protein, 10 aa, Severe acute respiratory syndrome coronavirus 2
  REGION 1..10: note = Table B: HLA-DQA1*05:01-B1*03:01L HLA-DRB1*04:03L HLA-DRB1*13:02L HLA-DRB1*13:03L HLA-DRB1*01:03L HLA-DQA1*01:02-B1*06:02L HLA-DRB4*03:01NL HLA-DRB1*08:77L HLA-DPA1*01:03-B1*03:01L HLA-DPA1*03:01-B1*04:02L
  REGION 1..10: note = CONT. FROM ABOVE: HLA-DRB1*03:01L HLA-DRB1*14:01L HLA-DRB1*11:02 L HLA-DRB1*14:02L HLA-DRB1*11:01L HLA-DQA1*01-B1*05L HLA-DQA1*05 :05-B1*03:19M HLA-DQA1*05:01-B1*02:01M HLA-DRB4*01:01L HLA-DPA1* 01:03-B1*04:01L HLA-DQA1*05:05-B1*03:116L
  REGION 1..10: note = CONT. FROM ABOVE: HLA-DPA1*01:03-B1*04:02L HLA-DRB1*12:01L HLA-D PA1*02:01-B1*13:01L HLA-DPA1*03:01-B1*105:01L HLA-DPA1*01:03-B1* 104:01L HLA-DPA1*01:02-B1*04:01L HLA-DRB1*10:01L HLA-DRB1*16:01L HLA-DQA1*01:03-B1*06:01L HLA-DRB1*08:02L
  REGION 1..10: note = CONT. FROM ABOVE: HLA-DQA1*02:01-B1*03:03L HLA-DRB1*15:03L
GLNLEEAARY

SEQ ID NO: 10734 - protein, 10 aa, Severe acute respiratory syndrome coronavirus 2
  REGION 1..10: note = Table B: HLA-DQA1*05:01-B1*03:01L HLA-DRB1*04:03L HLA-DRB1*13:03L HLA-DRB1*01:03L HLA-DRB1*04:02L HLA-DRB1*01:02L HLA-DRB4*03:01NL HLA-DRB1*08:04L HLA-DRB1*14:01L HLA-DRB1*08:01L HLA-DRB1*12:01L HLA-DQA1*03:01-B1*03:02L HLA-DRB1*14:54L
  REGION 1..10: note = CONT. FROM ABOVE: HLA-DRB1*14:17L HLA-DPA1*01:02-B1*04:01L HLA-D RB1*16:01L HLA-DRB1*04:08L HLA-DQA1*02:01-B1*03:03L
YMRSLKVPAT

SEQ ID NO: 10735 - protein, 13 aa, Severe acute respiratory syndrome coronavirus 2
  REGION 1..13: note = Table B: HLA-DQA1*05:01-B1*03:01L HLA-DRB1*04:02L HLA-DQA1*01:02-B1*06:02L HLA-DQA1*05:05-B1*03:01L HLA-DQA1*01:03-B1*06:01L
LKVPATVSVSSPD

SEQ ID NO: 10736 - protein, 10 aa, Severe acute respiratory syndrome coronavirus 2
  REGION 1..10: note = Table B: HLA-DQA1*05:01-B1*03:01L HLA-DRB1*13:03M HLA-DRB1*01:03L HLA-DQA1*01:02-B1*06:02M HLA-DRB4*03:01NL HLA-DRB1*08:77L HLA-DPA1*01:03-B1*03:01L HLA-DRB1*03:01L HLA-DRB1*14:01L HLA-DRB1*11:02L HLA-DRB1*14:02L
  REGION 1..10: note = CONT. FROM ABOVE: HLA-DQA1*01-B1*05L HLA-DQA1*05:05-B1*03:19L HL A-DQA1*05:01-B1*02:01L HLA-DRB4*01:01L HLA-DPA1*01:03-B1*04:01L HLA-DQA1*05:05-B1*03:116L HLA-DPA1*01:03-B1*04:02L HLA-DRB1*12:0 1L HLA-DPA1*02:01-B1*13:01L HLA-DPA1*03:01-B1*105:01L
  REGION 1..10: note = CONT. FROM ABOVE: HLA-DPA1*01:03-B1*104:01L HLA-DRB1*10:01L HLA- DRB1*16:01L HLA-DRB1*08:02L HLA-DQA1*02:01-B1*03:03L HLA-DRB1*15 :03L
VSSPDAVTAY

SEQ ID NO: 10737 - protein, 11 aa, Severe acute respiratory syndrome coronavirus 2
  REGION 1..11: note = Table B: HLA-DQA1*05:01-B1*03:01L HLA-DRB1*04:03L HLA-DRB1*13:03M HLA-DRB1*01:03L HLA-DRB4*03:01NL HLA-DRB1*08:77L HLA-DRB1*03:01L HLA-DRB1*14:01L HLA-DRB1*14:02L HLA-DQA1*01-B1*05L HLA-DPA1*01:03-B1*04:01L
  REGION 1..11: note = CONT. FROM ABOVE: HLA-DQA1*05:05-B1*03:116L HLA-DRB1*12:01L HLA- DPA1*02:01-B1*13:01L HLA-DPA1*03:01-B1*105:01L HLA-DPA1*01:02-B1 *04:01L HLA-DRB1*10:01L HLA-DQA1*02:01-B1*03:03L HLA-DRB1*15:03L
SPDAVTAYNGY

SEQ ID NO: 10738 - protein, 14 aa, Severe acute respiratory syndrome coronavirus 2
  REGION 1..14: note = Table B: HLA-DQA1*05:01-B1*03:01L HLA-DRB1*13:02L HLA-DRB1*13:03L HLA-DRB1*01:03L HLA-DRB1*04:02L HLA-DRB1*04:04L HLA-DRB1*04:05L HLA-DQA1*01:02-B1*06:02L HLA-DRB1*01:02L HLA-DRB4*03:01NL HLA-DRB1*08:04L HLA-DRB1*08:77L HLA-DRB3*02:01L
  REGION 1..14: note = CONT. FROM ABOVE: HLA-DPA1*01:03-B1*03:01L HLA-DPA1*03:01-B1*04: 02L HLA-DRB1*14:01L HLA-DRB1*11:03L HLA-DQA1*01:01-B1*05:01L HLA -DRB1*08:01L HLA-DRB1*04:10L HLA-DRB1*12:01L HLA-DRB1*12:02L HLA -DRB3*01:01L HLA-DPA1*03:01-B1*105:01L HLA-DRB1*14:54L
  REGION 1..14: note = CONT. FROM ABOVE: HLA-DQA1*05:05-B1*03:01L HLA-DPA1*01:02-B1*04: 01L HLA-DRB1*07:01L HLA-DRB1*10:01L HLA-DQA1*01:03-B1*06:01L HLA -DRB1*04:08L HLA-DRB1*08:03L HLA-DQA1*02:01-B1*03:03L HLA-DRB1*1 5:03L
TPEEHFIETISLAG

SEQ ID NO: 10739 - protein, 10 aa, Severe acute respiratory syndrome coronavirus 2
  REGION 1..10: note = Table B: HLA-DQA1*05:01-B1*03:01L HLA-DRB1*08:77L HLA-DQA1*05:05-B1*03:19L HLA-DRB4*01:01L HLA-DPA1*01:03-B1*04:01L
IETISLAGSY

SEQ ID NO: 10740 - protein, 12 aa, Severe acute respiratory syndrome coronavirus 2
  REGION 1..12: note = Table B: HLA-DQA1*05:01-B1*03:01L HLA-DRB1*04:05L HLA-DRB1*01:02L HLA-DRB1*12:01L HLA-DQA1*05:05-B1*03:01L
TISLAGSYKDWS

SEQ ID NO: 10741 - protein, 12 aa, Severe acute respiratory syndrome coronavirus 2
  REGION 1..12: note = Table B: HLA-DQA1*05:01-B1*03:01L HLA-DRB1*01:02L HLA-DPA1*01:03-B1*03:01L HLA-DRB1*14:01L HLA-DRB1*12:01L HLA-DQA1*01:03-B1*06:01L
YSGQSTQLGIEF

SEQ ID NO: 10742 - protein, 13 aa, Severe acute respiratory syndrome coronavirus 2
  REGION 1..13: note = Table B: HLA-DQA1*05:01-B1*03:01L HLA-DRB1*04:03L HLA-DRB1*12:01L
SGQSTQLGIEFLK

SEQ ID NO: 10743 - protein, 14 aa, Severe acute respiratory syndrome coronavirus 2
  REGION 1..14: note = Table B: HLA-DQA1*05:01-B1*03:01L HLA-DRB1*04:05L HLA-DRB1*14:01L HLA-DRB1*12:01L HLA-DRB3*01:01L HLA-DPA1*03:01-B1*105:01L HLA-DPA1*01:02-B1*04:01L HLA-DRB1*15:03L
STQLGIEFLKRGDK

SEQ ID NO: 10744 - protein, 18 aa, Severe acute respiratory syndrome coronavirus 2
  REGION 1..18: note = Table B: HLA-DQA1*05:01-B1*03:01L HLA-DRB1*04:03L HLA-DPA1*01:03-B1*03:01L HLA-DRB1*08:01L HLA-DQA1*05:01-B1*02:01L HLA-DRB3*01:01L HLA-DPA1*03:01-B1*105:01L HLA-DPA1*01:03-B1*104:01L
  REGION 1..18: note = CONT. FROM ABOVE: HLA-DRB1*07:01L HLA-DQA1*01:03-B1*06:01L HLA-D RB1*04:08L
IEFLKRGDKSVYYTSNPT

SEQ ID NO: 10745 - protein, 13 aa, Severe acute respiratory syndrome coronavirus 2
  REGION 1..13: note = Table B: HLA-DQA1*05:01-B1*03:01L HLA-DRB1*13:02L HLA-DRB1*04:04L HLA-DRB1*01:02L HLA-DRB1*14:01L HLA-DRB1*11:04L HLA-DRB1*12:02L HLA-DRB1*04:08L HLA-DRB1*15:03L
GDKSVYYTSNPTT

SEQ ID NO: 10746 - protein, 13 aa, Severe acute respiratory syndrome coronavirus 2
  REGION 1..13: note = Table B: HLA-DQA1*05:01-B1*03:01L HLA-DRB1*13:02L HLA-DRB1*13:03L HLA-DRB1*01:03L HLA-DRB1*04:02L HLA-DRB1*04:04L HLA-DRB1*04:05L HLA-DQA1*01:02-B1*06:02L HLA-DRB1*01:02L HLA-DRB4*03:01NL HLA-DRB1*08:04L HLA-DRB1*08:77L HLA-DRB3*02:01L
  REGION 1..13: note = CONT. FROM ABOVE: HLA-DPA1*01:03-B1*03:01L HLA-DPA1*03:01-B1*04: 02L HLA-DRB1*03:01L HLA-DRB1*14:01L HLA-DRB1*11:03L HLA-DRB1*11: 04L HLA-DRB1*14:02L HLA-DQA1*01:01-B1*05:01L HLA-DRB1*08:01L HLA -DRB1*11:01L HLA-DRB5*01:01L HLA-DQA1*05:05-B1*03:19L
  REGION 1..13: note = CONT. FROM ABOVE: HLA-DRB1*13:01L HLA-DRB4*01:01L HLA-DPA1*01:03 -B1*04:01L HLA-DRB1*04:10L HLA-DRB1*09:01L HLA-DPA1*01:03-B1*04: 02L HLA-DRB1*12:01L HLA-DRB1*12:02L HLA-DRB3*01:01L HLA-DPA1*02: 01-B1*13:01L HLA-DPA1*03:01-B1*105:01L HLA-DRB1*14:54M
  REGION 1..13: note = CONT. FROM ABOVE: HLA-DQA1*05:05-B1*03:01L HLA-DRB1*14:17L HLA-D PA1*01:02-B1*04:01L HLA-DRB1*07:01L HLA-DRB1*10:01L HLA-DRB1*16: 01M HLA-DQA1*01:03-B1*06:01L HLA-DRB1*04:08L HLA-DRB1*08:03L HLA -DQA1*02:01-B1*03:03L HLA-DRB1*15:03L
NPTTFHLDGEVIT

SEQ ID NO: 10747 - protein, 12 aa, Severe acute respiratory syndrome coronavirus 2
  REGION 1..12: note = Table B: HLA-DQA1*05:01-B1*03:01L HLA-DRB1*13:02L HLA-DRB3*02:01L HLA-DPA1*03:01-B1*04:02L HLA-DRB1*11:03L HLA-DRB1*11:04L HLA-DRB1*12:02L HLA-DPA1*02:01-B1*13:01L HLA-DRB1*10:01L HLA-DRB1*08:03L
DGEVITFDNLKT

SEQ ID NO: 10748 - protein, 14 aa, Severe acute respiratory syndrome coronavirus 2
  REGION 1..14: note = Table B: HLA-DQA1*05:01-B1*03:01L HLA-DRB1*13:02L HLA-DRB1*04:04L HLA-DRB1*01:01L HLA-DRB1*14:01L HLA-DRB1*11:04L HLA-DRB1*08:01L HLA-DRB1*11:01L HLA-DRB3*01:01L HLA-DPA1*03:01-B1*105:01L HLA-DRB1*07:01L
  REGION 1..14: note = CONT. FROM ABOVE: HLA-DQA1*02:01-B1*03:03L
LKTLLSLREVRTIK

SEQ ID NO: 10749 - protein, 12 aa, Severe acute respiratory syndrome coronavirus 2
  REGION 1..12: note = Table B: HLA-DQA1*05:01-B1*03:01L HLA-DRB1*04:03L HLA-DQA1*05:05-B1*03:19L HLA-DPA1*03:01-B1*105:01L HLA-DQA1*05:05-B1*03:01L HLA-DQA1*02:01-B1*03:03L
EVRTIKVFTTVD

SEQ ID NO: 10750 - protein, 12 aa, Severe acute respiratory syndrome coronavirus 2
  REGION 1..12: note = Table B: HLA-DQA1*05:01-B1*03:01L HLA-DRB1*13:03L HLA-DRB1*01:03L HLA-DRB1*04:05L HLA-DQA1*01:02-B1*06:02L HLA-DRB1*01:02L HLA-DRB3*02:01L HLA-DPA1*01:03-B1*03:01L HLA-DPA1*03:01-B1*04:02L HLA-DRB1*14:01L
  REGION 1..12: note = CONT. FROM ABOVE: HLA-DQA1*01:01-B1*05:01L HLA-DQA1*05:05-B1*03: 19L HLA-DPA1*01:03-B1*04:01L HLA-DRB1*04:10L HLA-DPA1*01:03-B1*0 4:02L HLA-DRB1*12:01L HLA-DPA1*02:01-B1*13:01L HLA-DPA1*03:01-B1 *105:01L HLA-DPA1*01:03-B1*104:01L HLA-DQA1*05:05-B1*03:01L
  REGION 1..12: note = CONT. FROM ABOVE: HLA-DPA1*01:02-B1*04:01L HLA-DRB1*16:01L HLA-D RB1*04:08L HLA-DRB1*15:03L
TIKVFTTVDNIN

SEQ ID NO: 10751 - protein, 11 aa, Severe acute respiratory syndrome coronavirus 2
  REGION 1..11: note = Table B: HLA-DQA1*05:01-B1*03:01L HLA-DRB1*08:77L HLA-DRB3*02:01L HLA-DPA1*03:01-B1*04:02L HLA-DRB1*14:02L HLA-DRB1*09:01L HLA-DRB1*12:01L
KVFTTVDNINL

SEQ ID NO: 10752 - protein, 11 aa, Severe acute respiratory syndrome coronavirus 2
  REGION 1..11: note = Table B: HLA-DQA1*05:01-B1*03:01L HLA-DRB1*13:02L HLA-DRB1*04:05L HLA-DQA1*01:02-B1*06:02L HLA-DRB1*01:02L HLA-DPA1*01:03-B1*03:01L HLA-DRB1*14:01L HLA-DRB1*14:02L HLA-DQA1*01:01-B1*05:01L HLA-DQA1*05:05-B1*03:19L
  REGION 1..11: note = CONT. FROM ABOVE: HLA-DPA1*01:03-B1*04:02L HLA-DRB1*12:01L HLA-D PA1*03:01-B1*105:01L HLA-DQA1*05:05-B1*03:01L HLA-DPA1*01:02-B1* 04:01L HLA-DRB1*15:03L
TTVDNINLHTQ

SEQ ID NO: 10753 - protein, 11 aa, Severe acute respiratory syndrome coronavirus 2
  REGION 1..11: note = Table B: HLA-DQA1*05:01-B1*03:01L HLA-DRB1*13:02L HLA-DRB1*13:03L HLA-DRB1*01:03L HLA-DRB1*04:04L HLA-DRB1*04:05L HLA-DQA1*01:02-B1*06:02L HLA-DRB1*01:02L HLA-DRB4*03:01NL HLA-DPA1*01:03-B1*03:01L HLA-DPA1*03:01-B1*04:02L
  REGION 1..11: note = CONT. FROM ABOVE: HLA-DRB1*14:01L HLA-DQA1*01:01-B1*05:01L HLA-D RB1*04:10L HLA-DRB1*12:01L HLA-DPA1*02:01-B1*13:01L HLA-DPA1*03: 01-B1*105:01L HLA-DRB1*14:54L HLA-DQA1*05:05-B1*03:01L HLA-DPA1* 01:02-B1*04:01L HLA-DRB1*16:01L HLA-DQA1*01:03-B1*06:01L
  REGION 1..11: note = CONT. FROM ABOVE: HLA-DRB1*04:08L HLA-DRB1*15:03L
INLHTQVVDMS

SEQ ID NO: 10754 - protein, 11 aa, Severe acute respiratory syndrome coronavirus 2
  REGION 1..11: note = Table B: HLA-DQA1*05:01-B1*03:01L HLA-DRB1*04:01L HLA-DRB1*13:02L HLA-DRB1*13:03L HLA-DRB1*04:02L HLA-DRB1*04:04L HLA-DRB1*04:05L HLA-DQA1*01:02-B1*06:02L HLA-DRB1*01:02L HLA-DRB4*03:01NL HLA-DRB1*08:04L HLA-DRB1*08:77L HLA-DRB3*02:01L
  REGION 1..11: note = CONT. FROM ABOVE: HLA-DPA1*01:03-B1*03:01L HLA-DPA1*03:01-B1*04: 02L HLA-DRB1*14:01L HLA-DRB1*11:03L HLA-DRB1*11:04L HLA-DRB1*14: 02L HLA-DQA1*01:01-B1*05:01L HLA-DQA1*05:05-B1*03:19L HLA-DPA1*0 1:03-B1*04:01L HLA-DRB1*04:10L HLA-DPA1*01:03-B1*04:02L
  REGION 1..11: note = CONT. FROM ABOVE: HLA-DRB1*12:01L HLA-DPA1*02:01-B1*13:01L HLA-D RB1*14:54L HLA-DPA1*01:03-B1*104:01L HLA-DQA1*05:05-B1*03:01L HL A-DRB1*14:17L HLA-DRB1*10:01L HLA-DRB1*04:08L
LHTQVVDMSMT

SEQ ID NO: 10755 - protein, 11 aa, Severe acute respiratory syndrome coronavirus 2
  REGION 1..11: note = Table B: HLA-DQA1*05:01-B1*03:01L HLA-DRB1*13:02L HLA-DRB1*01:03L HLA-DRB4*03:01NL HLA-DPA1*03:01-B1*04:02L HLA-DRB1*14:01L HLA-DRB1*14:02L HLA-DQA1*05:05-B1*03:116L HLA-DPA1*01:03-B1*04:02L HLA-DRB1*12:01L
  REGION 1..11: note = CONT. FROM ABOVE: HLA-DPA1*02:01-B1*13:01L HLA-DPA1*03:01-B1*105 :01L HLA-DRB1*08:02L HLA-DRB1*15:03L
HTQVVDMSMTY

SEQ ID NO: 10756 - protein, 14 aa, Severe acute respiratory syndrome coronavirus 2
  REGION 1..14: note = Table B: HLA-DQA1*05:01-B1*03:01L HLA-DRB1*04:03L HLA-DQA1*01:02-B1*06:02L HLA-DRB1*01:02L HLA-DRB1*14:01L HLA-DPA1*03:01-B1*105:01L HLA-DQA1*05:05-B1*03:01L HLA-DRB1*07:01L HLA-DQA1*01:03-B1*06:01L
VVDMSMTYGQQFGP

SEQ ID NO: 10757 - protein, 12 aa, Severe acute respiratory syndrome coronavirus 2
  REGION 1..12: note = Table B: HLA-DQA1*05:01-B1*03:01L HLA-DRB1*04:03L HLA-DQA1*05:05-B1*03:19L HLA-DRB1*12:01L HLA-DQA1*03:01-B1*03:02L HLA-DQA1*05:05-B1*03:01L HLA-DQA1*01:03-B1*06:01L HLA-DQA1*02:01-B1*03:03L
MSMTYGQQFGPT

SEQ ID NO: 10758 - protein, 15 aa, Severe acute respiratory syndrome coronavirus 2
  REGION 1..15: note = Table B: HLA-DQA1*05:01-B1*03:01L HLA-DRB1*04:03L HLA-DRB1*04:05L HLA-DQA1*01:02-B1*06:02L HLA-DQA1*05:05-B1*03:19L HLA-DPA1*02:01-B1*13:01L HLA-DPA1*03:01-B1*105:01L HLA-DQA1*05:05-B1*03:01L
  REGION 1..15: note = CONT. FROM ABOVE: HLA-DRB1*16:01L HLA-DQA1*01:03-B1*06:01L
GQQFGPTYLDGADVT

SEQ ID NO: 10759 - protein, 11 aa, Severe acute respiratory syndrome coronavirus 2
  REGION 1..11: note = Table B: HLA-DQA1*05:01-B1*03:01L HLA-DQA1*01:02-B1*06:02L HLA-DQA1*05:05-B1*03:19L HLA-DQA1*05:05-B1*03:01L
LDGADVTKIKP

SEQ ID NO: 10760 - protein, 11 aa, Severe acute respiratory syndrome coronavirus 2
  REGION 1..11: note = Table B: HLA-DQA1*05:01-B1*03:01L
DGADVTKIKPH

SEQ ID NO: 10761 - protein, 12 aa, Severe acute respiratory syndrome coronavirus 2
  REGION 1..12: note = Table B: HLA-DQA1*05:01-B1*03:01L HLA-DRB1*04:03L HLA-DRB1*01:03L HLA-DQA1*01:02-B1*06:02L HLA-DRB1*01:02L HLA-DRB1*14:17L HLA-DRB1*04:08L
ADVTKIKPHNSH

SEQ ID NO: 10762 - protein, 12 aa, Severe acute respiratory syndrome coronavirus 2
  REGION 1..12: note = Table B: HLA-DQA1*05:01-B1*03:01L HLA-DRB1*04:03L HLA-DRB1*01:03L HLA-DRB1*04:02L HLA-DRB1*04:04L HLA-DRB1*04:05L HLA-DQA1*01:02-B1*06:02L HLA-DRB1*01:02L HLA-DRB1*14:01L HLA-DRB1*08:01L HLA-DRB1*04:10L HLA-DRB1*12:01L
  REGION 1..12: note = CONT. FROM ABOVE: HLA-DQA1*03:01-B1*03:02L HLA-DRB1*14:17L HLA-D RB1*16:01L HLA-DRB1*04:08L HLA-DQA1*02:01-B1*03:03L
VTKIKPHNSHEG

SEQ ID NO: 10763 - protein, 11 aa, Severe acute respiratory syndrome coronavirus 2
  REGION 1..11: note = Table B: HLA-DQA1*05:01-B1*03:01L HLA-DRB1*13:03L HLA-DRB1*01:03L HLA-DQA1*01:02-B1*06:02L HLA-DRB1*14:01L HLA-DPA1*03:01-B1*105:01L
KPHNSHEGKTF

SEQ ID NO: 10764 - protein, 14 aa, Severe acute respiratory syndrome coronavirus 2
  REGION 1..14: note = Table B: HLA-DQA1*05:01-B1*03:01L HLA-DRB1*04:05L HLA-DRB1*01:02L HLA-DPA1*01:03-B1*03:01L HLA-DQA1*01:01-B1*05:01L HLA-DRB1*08:01L HLA-DPA1*02:01-B1*13:01L HLA-DPA1*03:01-B1*105:01L
  REGION 1..14: note = CONT. FROM ABOVE: HLA-DQA1*05:05-B1*03:01L HLA-DRB1*16:01L HLA-D RB1*04:08L
SHEGKTFYVLPNDD

SEQ ID NO: 10765 - protein, 12 aa, Severe acute respiratory syndrome coronavirus 2
  REGION 1..12: note = Table B: HLA-DQA1*05:01-B1*03:01L HLA-DRB1*13:03L HLA-DRB1*01:03L HLA-DRB1*04:04L HLA-DQA1*01:02-B1*06:02L HLA-DRB1*01:02L HLA-DRB4*03:01NL HLA-DPA1*01:03-B1*03:01L HLA-DQA1*01:01-B1*05:01L HLA-DRB1*08:01L HLA-DRB1*12:01L
  REGION 1..12: note = CONT. FROM ABOVE: HLA-DRB1*12:02L HLA-DPA1*02:01-B1*13:01L HLA-D PA1*03:01-B1*105:01L HLA-DRB1*14:54L HLA-DQA1*05:05-B1*03:01L HL A-DRB1*10:01L HLA-DQA1*01:03-B1*06:01L HLA-DRB1*04:08L HLA-DRB1* 08:03L HLA-DRB1*15:03L
GKTFYVLPNDDT

SEQ ID NO: 10766 - protein, 10 aa, Severe acute respiratory syndrome coronavirus 2
  REGION 1..10: note = Table B: HLA-DQA1*05:01-B1*03:01L HLA-DRB1*13:03L HLA-DRB1*01:03L HLA-DQA1*01:02-B1*06:02M HLA-DRB1*08:77L HLA-DPA1*01:03-B1*03:01L HLA-DRB1*03:01L HLA-DRB1*14:02L HLA-DQA1*01-B1*05L HLA-DQA1*05:05-B1*03:19L
  REGION 1..10: note = CONT. FROM ABOVE: HLA-DQA1*05:01-B1*02:01L HLA-DRB4*01:01L HLA-D PA1*01:03-B1*04:01L HLA-DQA1*05:05-B1*03:116L HLA-DPA1*01:03-B1* 04:02L HLA-DPA1*02:01-B1*13:01L HLA-DPA1*03:01-B1*105:01L HLA-DP A1*01:03-B1*104:01L HLA-DRB1*10:01L HLA-DRB1*16:01L
  REGION 1..10: note = CONT. FROM ABOVE: HLA-DQA1*01:03-B1*06:01L HLA-DQA1*02:01-B1*03: 03L HLA-DRB1*15:03L
DTLRVEAFEY

SEQ ID NO: 10767 - protein, 13 aa, Severe acute respiratory syndrome coronavirus 2
  REGION 1..13: note = Table B: HLA-DQA1*05:01-B1*03:01L HLA-DRB1*13:03L HLA-DRB1*01:03L HLA-DRB1*04:02L HLA-DRB1*04:05L HLA-DQA1*01:02-B1*06:02L HLA-DRB1*01:02L HLA-DRB4*03:01NL HLA-DRB1*08:04L HLA-DPA1*01:03-B1*03:01L
  REGION 1..13: note = CONT. FROM ABOVE: HLA-DPA1*03:01-B1*04:02L HLA-DRB1*14:01L HLA-D QA1*01:01-B1*05:01L HLA-DRB1*08:01L HLA-DQA1*05:05-B1*03:19L HLA -DQA1*05:01-B1*02:01L HLA-DPA1*01:03-B1*04:01L HLA-DRB1*04:10L H LA-DPA1*01:03-B1*04:02L HLA-DRB1*12:01L HLA-DPA1*02:01-B1*13:01L
  REGION 1..13: note = CONT. FROM ABOVE: HLA-DRB1*14:54L HLA-DQA1*05:05-B1*03:01L HLA-D RB1*14:17L HLA-DRB1*16:01L HLA-DQA1*01:03-B1*06:01L HLA-DRB1*04: 08L HLA-DRB1*08:03L HLA-DRB1*15:03L
VEAFEYYHTTDPS

SEQ ID NO: 10768 - protein, 10 aa, Severe acute respiratory syndrome coronavirus 2
  REGION 1..10: note = Table B: HLA-DQA1*05:01-B1*03:01L HLA-DRB1*04:01L HLA-DRB1*13:02H HLA-DRB1*13:03H HLA-DRB1*01:03L HLA-DRB1*04:02L HLA-DRB1*04:04L HLA-DQA1*01:02-B1*06:02L HLA-DRB1*01:01M HLA-DRB4*03:01NM HLA-DRB3*02:01M HLA-DRB1*03:01L HLA-DRB1*14:01M
  REGION 1..10: note = CONT. FROM ABOVE: HLA-DRB1*11:04M HLA-DRB1*14:02L HLA-DRB1*08:01 H HLA-DRB1*11:01L HLA-DRB5*01:01M HLA-DRB4*02:01NL HLA-DRB1*13:0 1L HLA-DPA1*01:03-B1*04:01L HLA-DPA1*01:03-B1*04:02M HLA-DRB1*12 :01H HLA-DRB1*12:02M HLA-DRB3*01:01L HLA-DPA1*03:01-B1*105:01L
  REGION 1..10: note = CONT. FROM ABOVE: HLA-DQA1*03:01-B1*03:02M HLA-DRB1*14:54L HLA-D QA1*05:05-B1*03:01H HLA-DRB1*14:17L HLA-DRB1*16:01L HLA-DQA1*01: 03-B1*06:01L HLA-DRB1*08:02L HLA-DRB1*08:03L HLA-DQA1*02:01-B1*0 3:03L HLA-DRB1*15:01M
HTTDPSFLGR

SEQ ID NO: 10769 - protein, 14 aa, Severe acute respiratory syndrome coronavirus 2
  REGION 1..14: note = Table B: HLA-DQA1*05:01-B1*03:01L HLA-DQA1*05:05-B1*03:01L HLA-DQA1*02:01-B1*03:03L
TDPSFLGRYMSALN

SEQ ID NO: 10770 - protein, 15 aa, Severe acute respiratory syndrome coronavirus 2
  REGION 1..15: note = Table B: HLA-DQA1*05:01-B1*03:01L HLA-DRB1*04:03L HLA-DRB1*13:02L HLA-DRB1*04:02L HLA-DRB1*04:04L HLA-DRB1*04:05L HLA-DRB1*08:04L HLA-DPA1*01:03-B1*03:01L HLA-DRB1*14:01L HLA-DRB1*11:04L HLA-DRB1*11:01L HLA-DQA1*01-B1*05L
  REGION 1..15: note = CONT. FROM ABOVE: HLA-DRB3*01:01L HLA-DPA1*02:01-B1*13:01L HLA-D QA1*03:01-B1*03:02L HLA-DPA1*01:03-B1*02:01L
DPSFLGRYMSALNHT

SEQ ID NO: 10771 - protein, 12 aa, Severe acute respiratory syndrome coronavirus 2
  REGION 1..12: note = Table B: HLA-DQA1*05:01-B1*03:01L HLA-DRB1*04:03L HLA-DRB1*04:02L HLA-DRB1*04:04L HLA-DRB1*04:05L HLA-DQA1*01:02-B1*06:02L HLA-DRB1*01:01L HLA-DRB1*14:01L HLA-DRB1*11:04L HLA-DRB1*11:01L HLA-DRB3*01:01L
  REGION 1..12: note = CONT. FROM ABOVE: HLA-DPA1*01:02-B1*04:01L HLA-DRB1*07:01L HLA-D RB1*15:03L
GRYMSALNHTKK

SEQ ID NO: 10772 - protein, 10 aa, Severe acute respiratory syndrome coronavirus 2
  REGION 1..10: note = Table B: HLA-DQA1*05:01-B1*03:01L HLA-DRB1*13:03L HLA-DRB1*01:03L HLA-DQA1*01:02-B1*06:02L HLA-DRB1*08:77L HLA-DRB1*14:02L HLA-DQA1*05:05-B1*03:19L HLA-DQA1*05:01-B1*02:01L HLA-DRB4*01:01L
  REGION 1..10: note = CONT. FROM ABOVE: HLA-DPA1*01:03-B1*04:01L HLA-DPA1*01:03-B1*04: 02L HLA-DPA1*02:01-B1*13:01L HLA-DPA1*03:01-B1*105:01L HLA-DQA1* 01:03-B1*06:01L HLA-DQA1*02:01-B1*03:03L HLA-DRB1*15:03L
QVNGLTSIKW

SEQ ID NO: 10773 - protein, 11 aa, Severe acute respiratory syndrome coronavirus 2
  REGION 1..11: note = Table B: HLA-DQA1*05:01-B1*03:01L HLA-DRB1*04:02L HLA-DPA1*03:01-B1*04:02L HLA-DQA1*05:01-B1*02:01L HLA-DPA1*01:03-B1*04:02L HLA-DQA1*05:05-B1*03:01L HLA-DRB1*14:17L HLA-DRB1*16:01L
GLTSIKWADNN

SEQ ID NO: 10774 - protein, 12 aa, Severe acute respiratory syndrome coronavirus 2
  REGION 1..12: note = Table B: HLA-DQA1*05:01-B1*03:01L HLA-DQA1*05:05-B1*03:01L HLA-DQA1*02:01-B1*03:03L
LATALLTLQQIE

SEQ ID NO: 10775 - protein, 10 aa, Severe acute respiratory syndrome coronavirus 2
  REGION 1..10: note = Table B: HLA-DQA1*05:01-B1*03:01L HLA-DRB1*13:03L HLA-DRB1*01:03L HLA-DQA1*01:02-B1*06:02L HLA-DRB1*08:77L HLA-DPA1*01:03-B1*03:01L HLA-DRB1*03:01L HLA-DRB1*11:02L HLA-DRB1*14:02L HLA-DQA1*01-B1*05L HLA-DQA1*05:05-B1*03:19M
  REGION 1..10: note = CONT. FROM ABOVE: HLA-DQA1*05:01-B1*02:01L HLA-DRB4*01:01L HLA-D PA1*01:03-B1*04:01L HLA-DQA1*05:05-B1*03:116L HLA-DPA1*01:03-B1* 04:02L HLA-DRB1*12:01L HLA-DPA1*03:01-B1*105:01L HLA-DPA1*01:03- B1*104:01L HLA-DRB1*10:01L HLA-DRB1*16:01L
  REGION 1..10: note = CONT. FROM ABOVE: HLA-DQA1*02:01-B1*03:03L HLA-DRB1*15:03L
FNPPALQDAY

SEQ ID NO: 10776 - protein, 11 aa, Severe acute respiratory syndrome coronavirus 2
  REGION 1..11: note = Table B: HLA-DQA1*05:01-B1*03:01L HLA-DRB1*13:03L HLA-DRB1*04:02L HLA-DRB1*04:05L HLA-DQA1*01:02-B1*06:02L HLA-DRB1*01:02L HLA-DRB4*03:01NL HLA-DRB1*08:01L HLA-DQA1*05:05-B1*03:19L HLA-DRB1*12:01L
  REGION 1..11: note = CONT. FROM ABOVE: HLA-DQA1*05:05-B1*03:01L HLA-DRB1*14:17L HLA-D QA1*01:03-B1*06:01L HLA-DRB1*04:08L HLA-DRB1*15:03L
YYRARAGEAAN

SEQ ID NO: 10777 - protein, 10 aa, Severe acute respiratory syndrome coronavirus 2
  REGION 1..10: note = Table B: HLA-DQA1*05:01-B1*03:01L HLA-DRB1*13:02L HLA-DRB1*13:03L HLA-DRB1*01:03M HLA-DQA1*01:02-B1*06:02L HLA-DRB1*08:77L HLA-DRB1*03:01L HLA-DRB1*14:01L HLA-DRB1*14:02L HLA-DRB1*11:01L HLA-DQA1*05:01-B1*02:01L
  REGION 1..10: note = CONT. FROM ABOVE: HLA-DPA1*01:03-B1*04:01L HLA-DPA1*01:03-B1*04: 02L HLA-DRB1*12:01L HLA-DPA1*02:01-B1*13:01L HLA-DPA1*03:01-B1*1 05:01L HLA-DQA1*03:01-B1*03:02L HLA-DRB1*16:01L HLA-DQA1*01:03-B 1*06:01L HLA-DRB1*08:02L HLA-DQA1*02:01-B1*03:03M
  REGION 1..10: note = CONT. FROM ABOVE: HLA-DRB1*15:03L
RARAGEAANF

SEQ ID NO: 10778 - protein, 12 aa, Severe acute respiratory syndrome coronavirus 2
  REGION 1..12: note = Table B: HLA-DQA1*05:01-B1*03:01L HLA-DRB1*04:03L HLA-DRB1*04:02L HLA-DRB1*01:02L HLA-DRB1*14:01L HLA-DQA1*01-B1*05L HLA-DRB1*12:01L HLA-DPA1*03:01-B1*105:01L HLA-DQA1*05:05-B1*03:01L HLA-DRB1*14:17L HLA-DRB1*16:01L
  REGION 1..12: note = CONT. FROM ABOVE: HLA-DQA1*02:01-B1*03:03L
ALILAYCNKTVG

SEQ ID NO: 10779 - protein, 14 aa, Severe acute respiratory syndrome coronavirus 2
  REGION 1..14: note = Table B: HLA-DQA1*05:01-B1*03:01L HLA-DRB1*13:02L HLA-DRB1*01:03L HLA-DQA1*05:05-B1*03:19L HLA-DPA1*01:03-B1*04:02L HLA-DRB1*12:01L HLA-DPA1*02:01-B1*13:01L HLA-DQA1*05:05-B1*03:01L
  REGION 1..14: note = CONT. FROM ABOVE: HLA-DRB1*16:01L HLA-DRB1*04:08L HLA-DQA1*02:01 -B1*03:03L
LILAYCNKTVGELG

SEQ ID NO: 10780 - protein, 11 aa, Severe acute respiratory syndrome coronavirus 2
  REGION 1..11: note = Table B: HLA-DQA1*05:01-B1*03:01L HLA-DRB1*04:03L HLA-DRB1*13:02L HLA-DRB1*01:03L HLA-DRB4*03:01NL HLA-DPA1*03:01-B1*04:02L HLA-DRB1*14:02L HLA-DQA1*05:05-B1*03:116L HLA-DPA1*01:03-B1*04:02L
  REGION 1..11: note = CONT. FROM ABOVE: HLA-DPA1*02:01-B1*13:01L HLA-DPA1*03:01-B1*105 :01L HLA-DPA1*01:02-B1*04:01L HLA-DRB1*08:02L HLA-DQA1*02:01-B1* 03:03L HLA-DRB1*15:03L
ELGDVRETMSY

SEQ ID NO: 10781 - protein, 13 aa, Severe acute respiratory syndrome coronavirus 2
  REGION 1..13: note = Table B: HLA-DQA1*05:01-B1*03:01L HLA-DRB1*04:03L HLA-DRB1*13:02L HLA-DRB3*02:01L HLA-DPA1*03:01-B1*04:02L HLA-DQA1*02:01-B1*03:03L
LGDVRETMSYLFQ

SEQ ID NO: 10782 - protein, 14 aa, Severe acute respiratory syndrome coronavirus 2
  REGION 1..14: note = Table B: HLA-DQA1*05:01-B1*03:01L HLA-DRB1*04:03L HLA-DRB1*13:02L HLA-DRB1*01:03L HLA-DRB1*04:05L HLA-DRB3*02:01L HLA-DPA1*01:03-B1*03:01L HLA-DRB1*14:01L HLA-DQA1*01-B1*05L HLA-DQA1*05:05-B1*03:19L HLA-DQA1*05:01-B1*02:01L
  REGION 1..14: note = CONT. FROM ABOVE: HLA-DPA1*01:03-B1*104:01L HLA-DQA1*05:05-B1*03 :01L HLA-DRB1*04:08L
DVRETMSYLFQHAN

SEQ ID NO: 10783 - protein, 13 aa, Severe acute respiratory syndrome coronavirus 2
  REGION 1..13: note = Table B: HLA-DQA1*05:01-B1*03:01L HLA-DRB1*01:02L HLA-DRB1*08:04L HLA-DPA1*01:03-B1*03:01L HLA-DQA1*05:01-B1*02:01L HLA-DPA1*01:03-B1*04:02L HLA-DRB1*12:01L HLA-DPA1*02:01-B1*13:01L
  REGION 1..13: note = CONT. FROM ABOVE: HLA-DQA1*05:05-B1*03:01L HLA-DRB1*16:01L HLA-D RB1*04:08L
ETMSYLFQHANLD

SEQ ID NO: 10784 - protein, 12 aa, Severe acute respiratory syndrome coronavirus 2
  REGION 1..12: note = Table B: HLA-DQA1*05:01-B1*03:01L HLA-DRB1*04:04L HLA-DQA1*01:02-B1*06:02L HLA-DRB1*01:02L HLA-DRB1*08:04L HLA-DRB1*08:01L HLA-DQA1*05:01-B1*02:01L HLA-DRB1*12:01L HLA-DPA1*02:01-B1*13:01L HLA-DPA1*03:01-B1*105:01L
  REGION 1..12: note = CONT. FROM ABOVE: HLA-DQA1*05:05-B1*03:01L HLA-DPA1*01:02-B1*04: 01L HLA-DRB1*10:01L HLA-DRB1*08:03L HLA-DRB1*15:03L
MSYLFQHANLDS

SEQ ID NO: 10785 - protein, 14 aa, Severe acute respiratory syndrome coronavirus 2
  REGION 1..14: note = Table B: HLA-DQA1*05:01-B1*03:01L HLA-DRB1*04:01L HLA-DRB1*13:02L HLA-DRB1*04:04L HLA-DRB1*01:01L HLA-DRB1*14:01L HLA-DRB1*11:04L HLA-DPA1*02:01-B1*13:01L
SYLFQHANLDSCKR

SEQ ID NO: 10786 - protein, 12 aa, Severe acute respiratory syndrome coronavirus 2
  REGION 1..12: note = Table B: HLA-DQA1*05:01-B1*03:01L HLA-DRB1*04:02L HLA-DQA1*01:02-B1*06:02L HLA-DRB4*03:01NL HLA-DQA1*05:01-B1*02:01L HLA-DRB1*14:54L HLA-DQA1*05:05-B1*03:01L HLA-DRB1*14:17L
  REGION 1..12: note = CONT. FROM ABOVE: HLA-DQA1*01:03-B1*06:01L HLA-DQA1*02:01-B1*03: 03L
GQQQTTLKGVEA

SEQ ID NO: 10787 - protein, 13 aa, Severe acute respiratory syndrome coronavirus 2
  REGION 1..13: note = Table B: HLA-DQA1*05:01-B1*03:01L HLA-DPA1*01:03-B1*03:01L HLA-DPA1*03:01-B1*04:02L HLA-DPA1*01:03-B1*04:02L HLA-DRB1*12:01L HLA-DQA1*05:05-B1*03:01L HLA-DQA1*02:01-B1*03:03L HLA-DRB1*15:03L
LKGVEAVMYMGTL

SEQ ID NO: 10788 - protein, 10 aa, Severe acute respiratory syndrome coronavirus 2
  REGION 1..10: note = Table B: HLA-DQA1*05:01-B1*03:01L HLA-DRB1*13:03L HLA-DQA1*01:02-B1*06:02L HLA-DRB1*08:77L HLA-DPA1*01:03-B1*03:01L HLA-DRB1*03:01L HLA-DRB1*11:02L HLA-DRB1*14:02L HLA-DQA1*01-B1*05L HLA-DQA1*05:05-B1*03:19M
  REGION 1..10: note = CONT. FROM ABOVE: HLA-DQA1*05:01-B1*02:01L HLA-DRB4*01:01L HLA-D PA1*01:03-B1*04:01L HLA-DQA1*05:05-B1*03:116L HLA-DRB1*12:01L HL A-DPA1*03:01-B1*105:01L HLA-DPA1*01:03-B1*104:01L HLA-DRB1*10:01 L HLA-DRB1*16:01L HLA-DQA1*02:01-B1*03:03L HLA-DRB1*15:03L
AVMYMGTLSY

SEQ ID NO: 10789 - protein, 11 aa, Severe acute respiratory syndrome coronavirus 2
  REGION 1..11: note = Table B: HLA-DQA1*05:01-B1*03:01L HLA-DRB1*04:03L HLA-DPA1*03:01-B1*04:02L HLA-DPA1*01:03-B1*04:02L HLA-DRB1*12:01L HLA-DQA1*03:01-B1*03:02L HLA-DQA1*05:05-B1*03:01L
YMGTLSYEQFK

SEQ ID NO: 10790 - protein, 11 aa, Severe acute respiratory syndrome coronavirus 2
  REGION 1..11: note = Table B: HLA-DQA1*05:01-B1*03:01L HLA-DRB1*04:03L HLA-DRB1*13:02L HLA-DRB1*13:03L HLA-DRB1*04:02L HLA-DRB1*04:05L HLA-DQA1*01:02-B1*06:02L HLA-DRB1*01:02L HLA-DPA1*01:03-B1*03:01L HLA-DRB1*14:01L HLA-DRB1*11:04L
  REGION 1..11: note = CONT. FROM ABOVE: HLA-DRB1*08:01L HLA-DRB1*11:01L HLA-DQA1*01-B1 *05L HLA-DPA1*01:03-B1*04:02L HLA-DRB1*12:01L HLA-DRB3*01:01L HL A-DPA1*02:01-B1*13:01L HLA-DPA1*01:03-B1*02:01L HLA-DRB1*14:17L HLA-DRB1*15:03L
GTLSYEQFKKG

SEQ ID NO: 10791 - protein, 12 aa, Severe acute respiratory syndrome coronavirus 2
  REGION 1..12: note = Table B: HLA-DQA1*05:01-B1*03:01L HLA-DRB1*04:03L HLA-DRB1*13:02L HLA-DRB1*04:02L HLA-DRB1*04:04L HLA-DRB1*04:05L HLA-DPA1*01:03-B1*03:01L HLA-DRB3*01:01L HLA-DPA1*02:01-B1*13:01L HLA-DRB1*08:03L HLA-DRB1*15:03L
TLSYEQFKKGVQ

SEQ ID NO: 10792 - protein, 13 aa, Severe acute respiratory syndrome coronavirus 2
  REGION 1..13: note = Table B: HLA-DQA1*05:01-B1*03:01L HLA-DRB1*01:02L HLA-DPA1*03:01-B1*105:01L HLA-DQA1*05:05-B1*03:01L HLA-DRB1*16:01L HLA-DQA1*02:01-B1*03:03L
YEQFKKGVQIPCT

SEQ ID NO: 10793 - protein, 14 aa, Severe acute respiratory syndrome coronavirus 2
  REGION 1..14: note = Table B: HLA-DQA1*05:01-B1*03:01L HLA-DQA1*05:05-B1*03:19L HLA-DQA1*02:01-B1*03:03L
GTFTCASEYTGNYQ

SEQ ID NO: 10794 - protein, 13 aa, Severe acute respiratory syndrome coronavirus 2
  REGION 1..13: note = Table B: HLA-DQA1*05:01-B1*03:01L HLA-DRB1*13:02L HLA-DRB1*04:04L HLA-DRB1*04:05L HLA-DPA1*01:03-B1*03:01L HLA-DRB1*14:01L HLA-DRB1*11:04L HLA-DRB3*01:01L HLA-DPA1*02:01-B1*13:01L HLA-DQA1*02:01-B1*03:03L
TGNYQCGHYKHIT

SEQ ID NO: 10795 - protein, 11 aa, Severe acute respiratory syndrome coronavirus 2
  REGION 1..11: note = Table B: HLA-DQA1*05:01-B1*03:01L HLA-DRB1*04:03L HLA-DRB1*13:02L HLA-DRB1*13:03L HLA-DRB1*04:02L HLA-DRB4*03:01NL HLA-DRB1*14:01L HLA-DRB1*12:01L HLA-DRB1*14:17L HLA-DRB1*15:03L
GHYKHITSKET

SEQ ID NO: 10796 - protein, 10 aa, Severe acute respiratory syndrome coronavirus 2
  REGION 1..10: note = Table B: HLA-DQA1*05:01-B1*03:01L HLA-DRB1*08:01L HLA-DQA1*01-B1*05L HLA-DQA1*03:01-B1*03:02L HLA-DPA1*01:02-B1*04:01L HLA-DRB1*16:01L HLA-DQA1*02:01-B1*03:03L
YKHITSKETL

SEQ ID NO: 10797 - protein, 10 aa, Severe acute respiratory syndrome coronavirus 2
  REGION 1..10: note = Table B: HLA-DQA1*05:01-B1*03:01L HLA-DRB1*13:02L HLA-DRB1*13:03L HLA-DRB1*01:03M HLA-DQA1*01:02-B1*06:02L HLA-DRB1*08:77L HLA-DPA1*01:03-B1*03:01L HLA-DRB1*03:01L HLA-DRB1*14:01L HLA-DRB1*14:02L HLA-DRB1*11:01L
  REGION 1..10: note = CONT. FROM ABOVE: HLA-DQA1*05:05-B1*03:19L HLA-DQA1*05:01-B1*02: 01L HLA-DPA1*01:03-B1*04:01L HLA-DPA1*01:03-B1*04:02L HLA-DRB1*1 2:01L HLA-DPA1*03:01-B1*105:01L HLA-DRB1*16:01L HLA-DQA1*01:03-B 1*06:01L HLA-DRB1*08:02L HLA-DQA1*02:01-B1*03:03M
  REGION 1..10: note = CONT. FROM ABOVE: HLA-DRB1*15:03L
KHITSKETLY

SEQ ID NO: 10798 - protein, 13 aa, Severe acute respiratory syndrome coronavirus 2
  REGION 1..13: note = Table B: HLA-DQA1*05:01-B1*03:01L HLA-DRB1*04:03L HLA-DRB1*04:02L HLA-DRB1*04:05L HLA-DQA1*01:02-B1*06:02L HLA-DRB1*01:01L HLA-DRB1*08:04L HLA-DRB1*14:02L HLA-DQA1*05:01-B1*02:01L HLA-DRB3*01:01L HLA-DRB1*14:17L
  REGION 1..13: note = CONT. FROM ABOVE: HLA-DPA1*01:02-B1*04:01L HLA-DRB1*10:01L HLA-D RB1*04:08L
ETLYCIDGALLTK

SEQ ID NO: 10799 - protein, 10 aa, Severe acute respiratory syndrome coronavirus 2
  REGION 1..10: note = Table B: HLA-DQA1*05:01-B1*03:01L HLA-DQA1*03:01-B1*03:02L HLA-DQA1*01:03-B1*06:01L HLA-DQA1*02:01-B1*03:03L
DGALLTKSSE

SEQ ID NO: 10800 - protein, 10 aa, Severe acute respiratory syndrome coronavirus 2
  REGION 1..10: note = Table B: HLA-DQA1*05:01-B1*03:01L HLA-DQA1*01:02-B1*06:02L HLA-DRB1*14:02L HLA-DQA1*05:05-B1*03:19L HLA-DQA1*05:01-B1*02:01L HLA-DPA1*03:01-B1*105:01L HLA-DQA1*01:03-B1*06:01L HLA-DQA1*02:01-B1*03:03L
GALLTKSSEY

SEQ ID NO: 10801 - protein, 10 aa, Severe acute respiratory syndrome coronavirus 2
  REGION 1..10: note = Table B: HLA-DQA1*05:01-B1*03:01L HLA-DRB1*01:03L HLA-DQA1*01:02-B1*06:02L HLA-DRB1*08:77L HLA-DPA1*01:03-B1*03:01L HLA-DRB1*03:01L HLA-DRB1*14:02L HLA-DQA1*01-B1*05L HLA-DQA1*05:05-B1*03:19L
  REGION 1..10: note = CONT. FROM ABOVE: HLA-DQA1*05:01-B1*02:01L HLA-DPA1*01:03-B1*04: 01L HLA-DPA1*01:03-B1*04:02L HLA-DPA1*02:01-B1*13:01L HLA-DPA1*0 3:01-B1*105:01L HLA-DPA1*01:03-B1*104:01L HLA-DRB1*16:01L HLA-DQ A1*01:03-B1*06:01L HLA-DQA1*02:01-B1*03:03L
YKGPITDVFY

SEQ ID NO: 10802 - protein, 14 aa, Severe acute respiratory syndrome coronavirus 2
  REGION 1..14: note = Table B: HLA-DQA1*05:01-B1*03:01L HLA-DRB1*01:03L HLA-DRB1*04:02L HLA-DRB1*04:05L HLA-DRB1*01:02L HLA-DRB1*08:04L HLA-DQA1*01:01-B1*05:01L HLA-DRB1*08:01L HLA-DPA1*01:03-B1*04:01L HLA-DPA1*01:03-B1*04:02L
  REGION 1..14: note = CONT. FROM ABOVE: HLA-DRB1*12:01L HLA-DPA1*02:01-B1*13:01L HLA-D QA1*05:05-B1*03:01L HLA-DRB1*04:08L
GPITDVFYKENSYT

SEQ ID NO: 10803 - protein, 14 aa, Severe acute respiratory syndrome coronavirus 2
  REGION 1..14: note = Table B: HLA-DQA1*05:01-B1*03:01L HLA-DRB1*13:02L HLA-DRB1*01:03L HLA-DRB1*04:05L HLA-DQA1*01:02-B1*06:02L HLA-DRB1*01:02L HLA-DPA1*01:03-B1*03:01L HLA-DRB1*08:01L HLA-DRB1*12:01L HLA-DPA1*03:01-B1*105:01L
  REGION 1..14: note = CONT. FROM ABOVE: HLA-DQA1*05:05-B1*03:01L HLA-DPA1*01:02-B1*04: 01L HLA-DRB1*16:01L HLA-DRB1*04:08L HLA-DRB1*15:03L
VFYKENSYTTTIKP

SEQ ID NO: 10804 - protein, 10 aa, Severe acute respiratory syndrome coronavirus 2
  REGION 1..10: note = Table B: HLA-DQA1*05:01-B1*03:01L HLA-DRB1*04:03L HLA-DRB1*13:02L HLA-DRB1*13:03L HLA-DRB1*01:03L HLA-DRB1*04:02L HLA-DQA1*01:02-B1*06:02L HLA-DRB1*01:01L HLA-DRB4*03:01NL HLA-DRB3*02:01L HLA-DRB1*14:01L HLA-DRB1*11:04L HLA-DRB1*08:01L
  REGION 1..10: note = CONT. FROM ABOVE: HLA-DRB5*01:01L HLA-DPA1*01:03-B1*04:02L HLA-D RB1*12:01L HLA-DRB1*12:02L HLA-DPA1*03:01-B1*105:01L HLA-DQA1*03 :01-B1*03:02M HLA-DRB1*14:54L HLA-DQA1*05:05-B1*03:01L HLA-DRB1* 14:17L HLA-DPA1*01:02-B1*04:01L HLA-DRB1*16:01L
  REGION 1..10: note = CONT. FROM ABOVE: HLA-DQA1*01:03-B1*06:01L HLA-DQA1*02:01-B1*03: 03L
TTTIKPVTYK

SEQ ID NO: 10805 - protein, 14 aa, Severe acute respiratory syndrome coronavirus 2
  REGION 1..14: note = Table B: HLA-DQA1*05:01-B1*03:01L HLA-DRB1*13:02L HLA-DRB1*01:03L HLA-DRB1*04:04L HLA-DPA1*01:03-B1*03:01L HLA-DRB1*14:01L HLA-DRB1*14:02L HLA-DQA1*01:01-B1*05:01L HLA-DRB1*08:01L HLA-DQA1*05:05-B1*03:19L HLA-DRB1*04:10L
  REGION 1..14: note = CONT. FROM ABOVE: HLA-DRB1*12:01L HLA-DRB1*14:17L HLA-DRB1*04:08 L
DGVVCTEIDPKLDN

SEQ ID NO: 10806 - protein, 16 aa, Severe acute respiratory syndrome coronavirus 2
  REGION 1..16: note = Table B: HLA-DQA1*05:01-B1*03:01L HLA-DRB1*04:01L HLA-DRB1*04:04L HLA-DRB1*11:02L HLA-DRB1*11:03L HLA-DPA1*01:03-B1*104:01L HLA-DRB1*10:01L HLA-DRB1*08:02L
LDNYYKKDNSYFTEQP

SEQ ID NO: 10807 - protein, 13 aa, Severe acute respiratory syndrome coronavirus 2
  REGION 1..13: note = Table B: HLA-DQA1*05:01-B1*03:01L HLA-DRB1*13:02L HLA-DRB1*01:03L HLA-DRB1*01:02L HLA-DRB1*08:77L HLA-DPA1*01:03-B1*03:01L HLA-DRB1*14:01L HLA-DQA1*01:01-B1*05:01L HLA-DRB1*08:01L HLA-DRB1*04:10L
  REGION 1..13: note = CONT. FROM ABOVE: HLA-DPA1*01:03-B1*04:02L HLA-DRB1*07:01L HLA-D RB1*04:08L
KDNSYFTEQPIDL

SEQ ID NO: 10808 - protein, 12 aa, Severe acute respiratory syndrome coronavirus 2
  REGION 1..12: note = Table B: HLA-DQA1*05:01-B1*03:01L HLA-DRB1*13:02L HLA-DRB1*04:04L HLA-DQA1*01:02-B1*06:02L HLA-DRB1*01:02L HLA-DRB1*08:04L HLA-DPA1*01:03-B1*03:01L HLA-DPA1*03:01-B1*04:02L HLA-DQA1*05:05-B1*03:19L
  REGION 1..12: note = CONT. FROM ABOVE: HLA-DPA1*01:03-B1*04:02L HLA-DPA1*03:01-B1*105 :01L HLA-DQA1*05:05-B1*03:01L HLA-DPA1*01:02-B1*04:01L HLA-DRB1* 10:01L HLA-DQA1*01:03-B1*06:01L HLA-DRB1*15:03L
YFTEQPIDLVPN

SEQ ID NO: 10809 - protein, 13 aa, Severe acute respiratory syndrome coronavirus 2
  REGION 1..13: note = Table B: HLA-DQA1*05:01-B1*03:01L HLA-DQA1*01:02-B1*06:02L HLA-DPA1*01:03-B1*03:01L HLA-DQA1*05:05-B1*03:19L HLA-DPA1*03:01-B1*105:01L HLA-DQA1*05:05-B1*03:01L HLA-DQA1*01:03-B1*06:01L
FTEQPIDLVPNQP

SEQ ID NO: 10810 - protein, 11 aa, Severe acute respiratory syndrome coronavirus 2
  REGION 1..11: note = Table B: HLA-DQA1*05:01-B1*03:01L HLA-DRB1*13:03L HLA-DRB1*08:77L HLA-DPA1*03:01-B1*04:02L HLA-DRB1*14:01L HLA-DRB1*14:02L HLA-DPA1*01:03-B1*04:01L HLA-DQA1*05:05-B1*03:116L HLA-DPA1*01:02-B1*04:01L
  REGION 1..11: note = CONT. FROM ABOVE: HLA-DRB1*08:03L
QPYPNASFDNF

SEQ ID NO: 10811 - protein, 11 aa, Severe acute respiratory syndrome coronavirus 2
  REGION 1..11: note = Table B: HLA-DQA1*05:01-B1*03:01L HLA-DPA1*03:01-B1*105:01L
NIKFADDLNQL

SEQ ID NO: 10812 - protein, 11 aa, Severe acute respiratory syndrome coronavirus 2
  REGION 1..11: note = Table B: HLA-DQA1*05:01-B1*03:01L HLA-DRB1*13:03L HLA-DRB1*01:03L HLA-DRB1*04:05L HLA-DQA1*01:02-B1*06:02L HLA-DPA1*03:01-B1*04:02L HLA-DRB1*11:03L HLA-DQA1*05:05-B1*03:116L HLA-DPA1*01:03-B1*04:02L
  REGION 1..11: note = CONT. FROM ABOVE: HLA-DRB1*12:01L HLA-DRB1*15:03L
FADDLNQLTGY

SEQ ID NO: 10813 - protein, 12 aa, Severe acute respiratory syndrome coronavirus 2
  REGION 1..12: note = Table B: HLA-DQA1*05:01-B1*03:01L HLA-DRB1*04:03L HLA-DRB1*01:03L HLA-DRB1*04:02L HLA-DRB1*01:02L HLA-DRB1*14:01L HLA-DRB1*12:01L HLA-DRB1*14:17L HLA-DPA1*01:02-B1*04:01L HLA-DRB1*16:01L HLA-DRB1*04:08L HLA-DQA1*02:01-B1*03:03L
  REGION 1..12: note = CONT. FROM ABOVE: HLA-DRB1*15:03L
DDLNQLTGYKKP

SEQ ID NO: 10814 - protein, 12 aa, Severe acute respiratory syndrome coronavirus 2
  REGION 1..12: note = Table B: HLA-DQA1*05:01-B1*03:01L HLA-DRB1*01:03L HLA-DRB1*04:05L HLA-DQA1*01:02-B1*06:02L HLA-DRB1*01:02L HLA-DRB4*03:01NL HLA-DRB1*08:01L HLA-DRB1*12:01L HLA-DRB1*14:54L HLA-DPA1*01:02-B1*04:01L HLA-DRB1*04:08L HLA-DRB1*15:03L
LNQLTGYKKPAS

SEQ ID NO: 10815 - protein, 13 aa, Severe acute respiratory syndrome coronavirus 2
  REGION 1..13: note = Table B: HLA-DQA1*05:01-B1*03:01L HLA-DRB1*11:02L
NQLTGYKKPASRE

SEQ ID NO: 10816 - protein, 10 aa, Severe acute respiratory syndrome coronavirus 2
  REGION 1..10: note = Table B: HLA-DQA1*05:01-B1*03:01L HLA-DRB1*01:03L HLA-DRB1*08:01L HLA-DQA1*03:01-B1*03:02L HLA-DPA1*01:02-B1*04:01L HLA-DRB1*16:01L HLA-DQA1*02:01-B1*03:03L
GYKKPASREL

SEQ ID NO: 10817 - protein, 13 aa, Severe acute respiratory syndrome coronavirus 2
  REGION 1..13: note = Table B: HLA-DQA1*05:01-B1*03:01L HLA-DRB1*13:02L HLA-DRB1*08:04L HLA-DRB1*14:01L HLA-DRB1*11:01L HLA-DQA1*03:01-B1*03:02L HLA-DPA1*01:03-B1*02:01L HLA-DPA1*01:03-B1*104:01L
SRELKVTFFPDLN

SEQ ID NO: 10818 - protein, 12 aa, Severe acute respiratory syndrome coronavirus 2
  REGION 1..12: note = Table B: HLA-DQA1*05:01-B1*03:01L HLA-DRB1*04:01L HLA-DRB1*13:02L HLA-DRB1*13:03L HLA-DRB1*01:03L HLA-DRB1*04:04L HLA-DQA1*01:02-B1*06:02L HLA-DRB1*01:02L HLA-DRB4*03:01NL HLA-DRB1*08:04L HLA-DRB1*08:77L HLA-DRB3*02:01L
  REGION 1..12: note = CONT. FROM ABOVE: HLA-DPA1*01:03-B1*03:01L HLA-DPA1*03:01-B1*04: 02L HLA-DRB1*14:01L HLA-DRB1*11:03L HLA-DRB1*11:04L HLA-DRB1*14: 02L HLA-DRB4*01:01L HLA-DPA1*01:03-B1*04:01L HLA-DRB1*09:01L HLA -DPA1*01:03-B1*04:02L HLA-DRB1*12:01L HLA-DRB3*01:01L
  REGION 1..12: note = CONT. FROM ABOVE: HLA-DPA1*03:01-B1*105:01L HLA-DRB1*14:54L HLA- DPA1*01:03-B1*104:01L HLA-DQA1*05:05-B1*03:01L HLA-DPA1*01:02-B1 *04:01L HLA-DRB1*10:01L HLA-DQA1*01:03-B1*06:01L HLA-DRB1*04:08L HLA-DRB1*08:03L
VTFFPDLNGDVV

SEQ ID NO: 10819 - protein, 11 aa, Severe acute respiratory syndrome coronavirus 2
  REGION 1..11: note = Table B: HLA-DQA1*05:01-B1*03:01L HLA-DRB1*04:03L HLA-DQA1*01:01-B1*05:01L HLA-DQA1*01-B1*05L HLA-DPA1*03:01-B1*105:01L HLA-DQA1*05:05-B1*03:01L
LNGDVVAIDYK

SEQ ID NO: 10820 - protein, 13 aa, Severe acute respiratory syndrome coronavirus 2
  REGION 1..13: note = Table B: HLA-DQA1*05:01-B1*03:01L HLA-DRB1*13:02L HLA-DQA1*01:02-B1*06:02L HLA-DRB1*01:01L HLA-DRB1*14:01L HLA-DRB3*01:01L HLA-DPA1*03:01-B1*105:01L HLA-DRB1*07:01L HLA-DRB1*15:01L
IDYKHYTPSFKKG

SEQ ID NO: 10821 - protein, 14 aa, Severe acute respiratory syndrome coronavirus 2
  REGION 1..14: note = Table B: HLA-DQA1*05:01-B1*03:01L HLA-DRB1*01:01L HLA-DPA1*02:01-B1*13:01L HLA-DRB1*07:01L
DYKHYTPSFKKGAK

SEQ ID NO: 10822 - protein, 10 aa, Severe acute respiratory syndrome coronavirus 2
  REGION 1..10: note = Table B: HLA-DQA1*05:01-B1*03:01L HLA-DQA1*01-B1*05L HLA-DPA1*01:02-B1*04:01L
TPSFKKGAKL

SEQ ID NO: 10823 - protein, 13 aa, Severe acute respiratory syndrome coronavirus 2
  REGION 1..13: note = Table B: HLA-DQA1*05:01-B1*03:01L HLA-DRB1*04:01L HLA-DRB1*13:02L HLA-DRB1*11:04L HLA-DRB1*08:01L HLA-DRB1*11:01L HLA-DRB3*01:01L HLA-DPA1*02:01-B1*13:01L HLA-DPA1*01:02-B1*04:01L HLA-DRB1*07:01L HLA-DRB1*10:01L
  REGION 1..13: note = CONT. FROM ABOVE: HLA-DRB1*08:03L
KPIVWHVNNATNK

SEQ ID NO: 10824 - protein, 13 aa, Severe acute respiratory syndrome coronavirus 2
  REGION 1..13: note = Table B: HLA-DQA1*05:01-B1*03:01L HLA-DRB1*13:02L HLA-DRB1*14:01L
PIVWHVNNATNKA

SEQ ID NO: 10825 - protein, 12 aa, Severe acute respiratory syndrome coronavirus 2
  REGION 1..12: note = Table B: HLA-DQA1*05:01-B1*03:01L HLA-DRB1*04:03L HLA-DRB1*13:02L HLA-DRB1*01:03L HLA-DRB1*04:02L HLA-DRB1*01:02L HLA-DRB1*08:04L HLA-DRB1*14:01L HLA-DRB1*12:01L HLA-DRB1*12:02L HLA-DRB1*14:54L HLA-DRB1*14:17L HLA-DRB1*16:01L HLA-DRB1*15:03L
VWHVNNATNKAT

SEQ ID NO: 10826 - protein, 10 aa, Severe acute respiratory syndrome coronavirus 2
  REGION 1..10: note = Table B: HLA-DQA1*05:01-B1*03:01L HLA-DRB1*04:03L HLA-DRB1*13:03L HLA-DRB1*01:03L HLA-DQA1*01:02-B1*06:02L HLA-DRB1*08:77L HLA-DPA1*01:03-B1*03:01L HLA-DRB1*03:01L HLA-DRB1*14:02L HLA-DQA1*01-B1*05L HLA-DQA1*05:05-B1*03:19L
  REGION 1..10: note = CONT. FROM ABOVE: HLA-DQA1*05:01-B1*02:01L HLA-DPA1*01:03-B1*04: 01L HLA-DPA1*01:03-B1*04:02L HLA-DRB1*12:01L HLA-DPA1*03:01-B1*1 05:01L HLA-DRB1*10:01L HLA-DRB1*16:01L HLA-DRB1*08:02L HLA-DQA1* 02:01-B1*03:03L HLA-DRB1*15:03L
VNNATNKATY

SEQ ID NO: 10827 - protein, 12 aa, Severe acute respiratory syndrome coronavirus 2
  REGION 1..12: note = Table B: HLA-DQA1*05:01-B1*03:01L HLA-DQA1*01:02-B1*06:02L HLA-DQA1*01-B1*05L HLA-DQA1*05:01-B1*02:01L HLA-DRB1*12:01L HLA-DPA1*03:01-B1*105:01L HLA-DQA1*05:05-B1*03:01L HLA-DRB1*16:01L HLA-DQA1*01:03-B1*06:01L
  REGION 1..12: note = CONT. FROM ABOVE: HLA-DQA1*02:01-B1*03:03L
KPVETSNSFDVL

SEQ ID NO: 10828 - protein, 12 aa, Severe acute respiratory syndrome coronavirus 2
  REGION 1..12: note = Table B: HLA-DQA1*05:01-B1*03:01L HLA-DRB1*04:03L HLA-DQA1*05:01-B1*02:01L HLA-DRB1*16:01L
PVETSNSFDVLK

SEQ ID NO: 10829 - protein, 12 aa, Severe acute respiratory syndrome coronavirus 2
  REGION 1..12: note = Table B: HLA-DQA1*05:01-B1*03:01L HLA-DRB1*13:02L HLA-DRB1*01:03L HLA-DRB1*04:04L HLA-DQA1*01:02-B1*06:02L HLA-DRB1*01:02L HLA-DRB1*08:77L HLA-DRB3*02:01L HLA-DPA1*01:03-B1*03:01L HLA-DPA1*03:01-B1*04:02L
  REGION 1..12: note = CONT. FROM ABOVE: HLA-DRB1*14:01L HLA-DRB1*11:03L HLA-DRB1*11:04 L HLA-DRB1*14:02L HLA-DQA1*01:01-B1*05:01L HLA-DQA1*05:05-B1*03: 19L HLA-DRB4*01:01L HLA-DRB1*04:10L HLA-DRB1*09:01L HLA-DRB1*12: 02L HLA-DPA1*02:01-B1*13:01L HLA-DPA1*03:01-B1*105:01L
  REGION 1..12: note = CONT. FROM ABOVE: HLA-DRB1*14:54L HLA-DQA1*05:05-B1*03:01L HLA-D PA1*01:02-B1*04:01L HLA-DRB1*07:01L HLA-DRB1*10:01L HLA-DRB1*04: 08L
DVLKSEDAQGMD

SEQ ID NO: 10830 - protein, 12 aa, Severe acute respiratory syndrome coronavirus 2
  REGION 1..12: note = Table B: HLA-DQA1*05:01-B1*03:01L HLA-DRB1*04:01L HLA-DRB1*13:02L HLA-DRB1*13:03L HLA-DRB1*01:03L HLA-DRB1*04:04L HLA-DQA1*01:02-B1*06:02L HLA-DRB1*01:01L HLA-DRB1*01:02M HLA-DRB1*08:04L HLA-DRB1*08:77L HLA-DRB3*02:01L
  REGION 1..12: note = CONT. FROM ABOVE: HLA-DPA1*01:03-B1*03:01L HLA-DRB1*14:01L HLA-D RB1*11:03L HLA-DRB1*11:04L HLA-DRB1*14:02L HLA-DQA1*01:01-B1*05: 01L HLA-DRB1*08:01L HLA-DRB1*11:01L HLA-DRB5*01:01L HLA-DQA1*05: 05-B1*03:19L HLA-DRB4*01:01L HLA-DRB1*04:10L HLA-DRB1*09:01L
  REGION 1..12: note = CONT. FROM ABOVE: HLA-DRB1*12:01L HLA-DRB1*12:02L HLA-DRB3*01:01 L HLA-DPA1*02:01-B1*13:01L HLA-DPA1*03:01-B1*105:01L HLA-DRB1*14 :54L HLA-DPA1*01:03-B1*104:01L HLA-DQA1*05:05-B1*03:01L HLA-DRB1 *07:01L HLA-DRB1*10:01L HLA-DRB1*04:08L HLA-DRB1*08:03L
  REGION 1..12: note = CONT. FROM ABOVE: HLA-DRB1*15:03L
VLKSEDAQGMDN

SEQ ID NO: 10831 - protein, 13 aa, Severe acute respiratory syndrome coronavirus 2
  REGION 1..13: note = Table B: HLA-DQA1*05:01-B1*03:01L HLA-DRB1*04:03L HLA-DRB1*01:02L HLA-DPA1*01:03-B1*03:01L HLA-DRB1*14:01L HLA-DRB1*08:01L HLA-DQA1*01-B1*05L HLA-DRB1*12:01L HLA-DPA1*02:01-B1*13:01L HLA-DPA1*01:03-B1*02:01L
  REGION 1..13: note = CONT. FROM ABOVE: HLA-DRB1*15:03L
MDNLACEDLKPVS

SEQ ID NO: 10832 - protein, 13 aa, Severe acute respiratory syndrome coronavirus 2
  REGION 1..13: note = Table B: HLA-DQA1*05:01-B1*03:01L
DNLACEDLKPVSE

SEQ ID NO: 10833 - protein, 14 aa, Severe acute respiratory syndrome coronavirus 2
  REGION 1..14: note = Table B: HLA-DQA1*05:01-B1*03:01L HLA-DQA1*01:02-B1*06:02L HLA-DQA1*05:05-B1*03:01L
KPVSEEVVENPTIQ

SEQ ID NO: 10834 - protein, 10 aa, Severe acute respiratory syndrome coronavirus 2
  REGION 1..10: note = Table B: HLA-DQA1*05:01-B1*03:01L HLA-DRB1*04:01L HLA-DRB1*13:02H HLA-DRB1*13:03H HLA-DRB1*01:03L HLA-DRB1*04:02L HLA-DRB1*04:04L HLA-DQA1*01:02-B1*06:02L HLA-DRB1*01:01M HLA-DRB4*03:01NM HLA-DRB3*02:01M HLA-DPA1*03:01-B1*04:02L
  REGION 1..10: note = CONT. FROM ABOVE: HLA-DRB1*03:01L HLA-DRB1*14:01M HLA-DRB1*11:04 M HLA-DRB1*14:02M HLA-DRB1*08:01H HLA-DRB1*11:01L HLA-DRB5*01:01 M HLA-DRB4*02:01NL HLA-DQA1*05:01-B1*02:01L HLA-DRB1*13:01L HLA- DRB4*01:01L HLA-DPA1*01:03-B1*04:01L HLA-DPA1*01:03-B1*04:02M
  REGION 1..10: note = CONT. FROM ABOVE: HLA-DRB1*12:01H HLA-DRB1*12:02M HLA-DRB3*01:01 L HLA-DPA1*03:01-B1*105:01M HLA-DQA1*03:01-B1*03:02M HLA-DRB1*14 :54L HLA-DQA1*05:05-B1*03:01H HLA-DRB1*14:17L HLA-DRB1*16:01L HL A-DQA1*01:03-B1*06:01L HLA-DRB1*08:02M HLA-DRB1*08:03M
  REGION 1..10: note = CONT. FROM ABOVE: HLA-DQA1*02:01-B1*03:03L HLA-DRB1*15:01M HLA-D RB1*15:03L
EVVENPTIQK

SEQ ID NO: 10835 - protein, 14 aa, Severe acute respiratory syndrome coronavirus 2
  REGION 1..14: note = Table B: HLA-DQA1*05:01-B1*03:01L HLA-DRB1*04:03L HLA-DRB1*13:02L HLA-DRB1*01:02L HLA-DRB1*08:04L HLA-DRB1*14:02L HLA-DRB1*08:01L HLA-DQA1*05:05-B1*03:19L HLA-DQA1*05:01-B1*02:01L HLA-DRB1*12:01L
  REGION 1..14: note = CONT. FROM ABOVE: HLA-DPA1*03:01-B1*105:01L HLA-DQA1*05:05-B1*03 :01L HLA-DRB1*16:01L HLA-DQA1*02:01-B1*03:03L HLA-DRB1*15:03L
DVLECNVKTTEVVG

SEQ ID NO: 10836 - protein, 12 aa, Severe acute respiratory syndrome coronavirus 2
  REGION 1..12: note = Table B: HLA-DQA1*05:01-B1*03:01L HLA-DRB1*04:03L HLA-DRB1*04:05L HLA-DQA1*01:02-B1*06:02L HLA-DRB1*01:02L HLA-DPA1*01:03-B1*03:01L HLA-DQA1*01:01-B1*05:01L HLA-DQA1*05:05-B1*03:19L HLA-DRB1*12:01L
  REGION 1..12: note = CONT. FROM ABOVE: HLA-DPA1*02:01-B1*13:01L HLA-DQA1*05:05-B1*03: 01L HLA-DRB1*16:01L HLA-DRB1*15:03L
NVKTTEVVGDII

SEQ ID NO: 10837 - protein, 14 aa, Severe acute respiratory syndrome coronavirus 2
  REGION 1..14: note = Table B: HLA-DQA1*05:01-B1*03:01L HLA-DQA1*05:05-B1*03:19L
KPANNSLKITEEVG

SEQ ID NO: 10838 - protein, 11 aa, Severe acute respiratory syndrome coronavirus 2
  REGION 1..11: note = Table B: HLA-DQA1*05:01-B1*03:01L HLA-DRB1*08:77L HLA-DPA1*01:03-B1*03:01L HLA-DPA1*03:01-B1*04:02L HLA-DRB1*14:01L HLA-DRB1*14:02L HLA-DQA1*01-B1*05L HLA-DRB4*01:01L HLA-DPA1*01:03-B1*04:01L
  REGION 1..11: note = CONT. FROM ABOVE: HLA-DQA1*05:05-B1*03:116L HLA-DPA1*01:03-B1*04 :02L HLA-DRB1*12:01L HLA-DPA1*02:01-B1*13:01L HLA-DPA1*01:03-B1* 104:01L HLA-DPA1*01:02-B1*04:01L HLA-DRB1*10:01L HLA-DQA1*01:03- B1*06:01L HLA-DRB1*08:02L HLA-DRB1*15:03L
EVGHTDLMAAY

SEQ ID NO: 10839 - protein, 13 aa, Severe acute respiratory syndrome coronavirus 2
  REGION 1..13: note = Table B: HLA-DQA1*05:01-B1*03:01L HLA-DRB1*13:03L HLA-DRB1*01:03L HLA-DRB1*04:04L HLA-DRB1*01:02L HLA-DRB4*03:01NL HLA-DRB3*02:01L HLA-DPA1*01:03-B1*03:01L HLA-DRB1*14:01L HLA-DQA1*05:05-B1*03:19L HLA-DRB1*14:54L
  REGION 1..13: note = CONT. FROM ABOVE: HLA-DQA1*05:05-B1*03:01L HLA-DRB1*04:08L HLA-D RB1*08:03L
TDLMAAYVDNSSL

SEQ ID NO: 10840 - protein, 13 aa, Severe acute respiratory syndrome coronavirus 2
  REGION 1..13: note = Table B: HLA-DQA1*05:01-B1*03:01L HLA-DRB1*13:02L HLA-DRB1*13:03L HLA-DRB1*01:03L HLA-DRB1*08:04L HLA-DRB3*02:01L HLA-DPA1*01:03-B1*03:01L HLA-DRB1*14:01L HLA-DRB1*11:03L HLA-DRB1*11:04L HLA-DRB1*08:01L HLA-DQA1*05:05-B1*03:19L
  REGION 1..13: note = CONT. FROM ABOVE: HLA-DRB1*09:01L HLA-DQA1*05:05-B1*03:01L HLA-D RB1*10:01L HLA-DRB1*08:03L HLA-DRB1*15:01L
DLMAAYVDNSSLT

SEQ ID NO: 10841 - protein, 11 aa, Severe acute respiratory syndrome coronavirus 2
  REGION 1..11: note = Table B: HLA-DQA1*05:01-B1*03:01L HLA-DQA1*01:02-B1*06:02L HLA-DRB1*14:01L HLA-DQA1*05:01-B1*02:01L HLA-DQA1*03:01-B1*03:02L HLA-DRB1*16:01L HLA-DQA1*02:01-B1*03:03L
KPNELSRVLGL

SEQ ID NO: 10842 - protein, 11 aa, Severe acute respiratory syndrome coronavirus 2
  REGION 1..11: note = Table B: HLA-DQA1*05:01-B1*03:01L HLA-DRB1*01:03L HLA-DRB1*04:04L HLA-DRB1*04:05L HLA-DQA1*01:02-B1*06:02L HLA-DRB1*01:02L HLA-DRB4*03:01NL HLA-DRB1*14:01L HLA-DRB1*04:10L HLA-DRB1*12:01L HLA-DQA1*03:01-B1*03:02L HLA-DRB1*14:54L
  REGION 1..11: note = CONT. FROM ABOVE: HLA-DRB1*16:01L HLA-DRB1*04:08L HLA-DQA1*02:01 -B1*03:03L
VLGLKTLATHG

SEQ ID NO: 10843 - protein, 12 aa, Severe acute respiratory syndrome coronavirus 2
  REGION 1..12: note = Table B: HLA-DQA1*05:01-B1*03:01L HLA-DQA1*01:02-B1*06:02L HLA-DQA1*05:05-B1*03:19L HLA-DQA1*03:01-B1*03:02L HLA-DQA1*05:05-B1*03:01L HLA-DQA1*01:03-B1*06:01L HLA-DQA1*02:01-B1*03:03L
ATHGLAAVNSVP

SEQ ID NO: 10844 - protein, 13 aa, Severe acute respiratory syndrome coronavirus 2
  REGION 1..13: note = Table B: HLA-DQA1*05:01-B1*03:01L HLA-DRB1*01:03L HLA-DRB1*01:02L HLA-DRB3*02:01L HLA-DPA1*01:03-B1*03:01L HLA-DRB1*14:01L HLA-DRB1*12:01L HLA-DQA1*05:05-B1*03:01L HLA-DRB1*04:08L
LAAVNSVPWDTIA

SEQ ID NO: 10845 - protein, 12 aa, Severe acute respiratory syndrome coronavirus 2
  REGION 1..12: note = Table B: HLA-DQA1*05:01-B1*03:01L HLA-DRB1*01:03L HLA-DRB1*04:05L HLA-DRB1*01:02L HLA-DPA1*01:03-B1*03:01L HLA-DPA1*03:01-B1*04:02L HLA-DQA1*01:01-B1*05:01L HLA-DPA1*01:03-B1*04:01L HLA-DRB1*04:10L
  REGION 1..12: note = CONT. FROM ABOVE: HLA-DPA1*01:03-B1*04:02L HLA-DRB1*12:01L HLA-D QA1*05:05-B1*03:01L HLA-DRB1*04:08L
AVNSVPWDTIAN

SEQ ID NO: 10846 - protein, 10 aa, Severe acute respiratory syndrome coronavirus 2
  REGION 1..10: note = Table B: HLA-DQA1*05:01-B1*03:01L HLA-DRB1*13:02L HLA-DRB1*13:03L HLA-DRB1*01:03L HLA-DRB1*04:02L HLA-DQA1*01:02-B1*06:02L HLA-DRB1*01:01L HLA-DRB4*03:01NL HLA-DRB1*08:01L HLA-DRB1*12:01L HLA-DQA1*03:01-B1*03:02L
  REGION 1..10: note = CONT. FROM ABOVE: HLA-DQA1*05:05-B1*03:01L HLA-DRB1*14:17L HLA-D RB1*16:01L HLA-DQA1*01:03-B1*06:01L HLA-DQA1*02:01-B1*03:03L
ANYAKPFLNK

SEQ ID NO: 10847 - protein, 11 aa, Severe acute respiratory syndrome coronavirus 2
  REGION 1..11: note = Table B: HLA-DQA1*05:01-B1*03:01L HLA-DRB1*04:04L HLA-DRB1*01:02L HLA-DRB1*08:04L HLA-DPA1*01:03-B1*03:01L HLA-DPA1*03:01-B1*04:02L HLA-DRB1*14:02L HLA-DRB5*01:01L HLA-DQA1*05:05-B1*03:19L HLA-DRB1*09:01L
  REGION 1..11: note = CONT. FROM ABOVE: HLA-DPA1*03:01-B1*105:01L HLA-DQA1*05:05-B1*03 :01L HLA-DRB1*10:01L HLA-DQA1*01:03-B1*06:01L HLA-DRB1*04:08L HL A-DRB1*08:03L HLA-DRB1*15:03L
KVVSTTTNIVT

SEQ ID NO: 10848 - protein, 11 aa, Severe acute respiratory syndrome coronavirus 2
  REGION 1..11: note = Table B: HLA-DQA1*05:01-B1*03:01L HLA-DRB1*14:04L HLA-DQA1*01:02-B1*06:02L HLA-DRB1*01:02L HLA-DRB1*08:04L HLA-DPA1*01:03-B1*03:01L HLA-DRB1*03:01L HLA-DQA1*01:01-B1*05:01L HLA-DQA1*01-B1*05L
  REGION 1..11: note = CONT. FROM ABOVE: HLA-DQA1*05:05-B1*03:19L HLA-DRB5*02:02L HLA-D RB4*01:01L HLA-DPA1*01:03-B1*04:01L HLA-DRB1*09:01L HLA-DPA1*01: 02-B1*04:01L HLA-DRB1*10:01L HLA-DRB1*04:08L HLA-DRB1*15:03L
VVSTTTNIVTR

SEQ ID NO: 10849 - protein, 12 aa, Severe acute respiratory syndrome coronavirus 2
  REGION 1..12: note = Table B: HLA-DQA1*05:01-B1*03:01L HLA-DQA1*01:02-B1*06:02L HLA-DQA1*03:01-B1*03:02L HLA-DQA1*01:03-B1*06:01L HLA-DQA1*02:01-B1*03:03L
STNSRIKASMPT

SEQ ID NO: 10850 - protein, 12 aa, Severe acute respiratory syndrome coronavirus 2
  REGION 1..12: note = Table B: HLA-DQA1*05:01-B1*03:01L HLA-DRB1*13:02L HLA-DRB1*01:02L HLA-DRB3*02:01L HLA-DRB1*14:01L HLA-DQA1*05:01-B1*02:01L HLA-DRB1*12:01L HLA-DQA1*05:05-B1*03:01L HLA-DRB1*07:01L HLA-DRB1*15:03L
SRIKASMPTTIA

SEQ ID NO: 10851 - protein, 11 aa, Severe acute respiratory syndrome coronavirus 2
  REGION 1..11: note = Table B: HLA-DQA1*05:01-B1*03:01L HLA-DRB1*04:03L HLA-DRB1*01:03L HLA-DRB1*04:02L HLA-DQA1*01:02-B1*06:02L HLA-DRB1*01:02L HLA-DQA1*05:05-B1*03:19L HLA-DRB1*14:17L HLA-DQA1*01:03-B1*06:01L HLA-DQA1*02:01-B1*03:03L
IKASMPTTIAK

SEQ ID NO: 10852 - protein, 10 aa, Severe acute respiratory syndrome coronavirus 2
  REGION 1..10: note = Table B: HLA-DQA1*05:01-B1*03:01L HLA-DRB1*04:03L HLA-DRB1*13:03L HLA-DRB1*01:03L HLA-DRB1*04:02L HLA-DRB1*04:05L HLA-DRB1*01:02L HLA-DRB4*03:01NL HLA-DQA1*05:01-B1*02:01L HLA-DRB1*12:01L HLA-DQA1*03:01-B1*03:02L HLA-DRB1*14:54L
  REGION 1..10: note = CONT. FROM ABOVE: HLA-DQA1*05:05-B1*03:01L HLA-DRB1*14:17L HLA-D RB1*16:01L HLA-DQA1*01:03-B1*06:01L HLA-DQA1*02:01-B1*03:03L
ASMPTTIAKN

SEQ ID NO: 10853 - protein, 10 aa, Severe acute respiratory syndrome coronavirus 2
  REGION 1..10: note = Table B: HLA-DQA1*05:01-B1*03:01L HLA-DRB1*04:03L HLA-DRB1*13:03L HLA-DRB1*01:03L HLA-DRB1*04:02L HLA-DRB4*03:01NL HLA-DQA1*03:01-B1*03:02L HLA-DQA1*05:05-B1*03:01L HLA-DRB1*14:17L HLA-DRB1*16:01L HLA-DQA1*01:03-B1*06:01L
  REGION 1..10: note = CONT. FROM ABOVE: HLA-DQA1*02:01-B1*03:03L
PTTIAKNTVK

SEQ ID NO: 10854 - protein, 12 aa, Severe acute respiratory syndrome coronavirus 2
  REGION 1..12: note = Table B: HLA-DQA1*05:01-B1*03:01L HLA-DRB1*04:03L HLA-DRB1*13:02L HLA-DRB1*04:05L HLA-DRB1*01:02L HLA-DRB1*14:01L HLA-DRB1*04:08L HLA-DRB1*15:03L
TIAKNTVKSVGK

SEQ ID NO: 10855 - protein, 12 aa, Severe acute respiratory syndrome coronavirus 2
  REGION 1..12: note = Table B: HLA-DQA1*05:01-B1*03:01L HLA-DQA1*01:02-B1*06:02L HLA-DRB1*01:02L HLA-DRB1*14:01L HLA-DQA1*01:03-B1*06:01L HLA-DRB1*15:03L
IAKNTVKSVGKF

SEQ ID NO: 10856 - protein, 18 aa, Severe acute respiratory syndrome coronavirus 2
  REGION 1..18: note = Table B: HLA-DQA1*05:01-B1*03:01L HLA-DRB1*08:04L HLA-DRB1*11:02L HLA-DRB1*14:02L HLA-DQA1*05:01-B1*02:01L HLA-DPA1*01:03-B1*04:01L HLA-DRB3*01:01L HLA-DQA1*05:05-B1*03:01L
SVGKFCLEASFNYLKSPN

SEQ ID NO: 10857 - protein, 10 aa, Severe acute respiratory syndrome coronavirus 2
  REGION 1..10: note = Table B: HLA-DQA1*05:01-B1*03:01L HLA-DRB1*04:03L HLA-DRB1*04:02L HLA-DRB1*01:02L HLA-DRB3*02:01L HLA-DPA1*03:01-B1*04:02L HLA-DRB1*14:01L HLA-DQA1*01-B1*05L HLA-DQA1*05:01-B1*02:01L HLA-DRB1*12:01L
  REGION 1..10: note = CONT. FROM ABOVE: HLA-DPA1*03:01-B1*105:01L HLA-DQA1*03:01-B1*03 :02L HLA-DRB1*14:17L HLA-DPA1*01:02-B1*04:01L HLA-DRB1*16:01L HL A-DQA1*02:01-B1*03:03L HLA-DRB1*15:03L
FNYLKSPNFS

SEQ ID NO: 10858 - protein, 12 aa, Severe acute respiratory syndrome coronavirus 2
  REGION 1..12: note = Table B: HLA-DQA1*05:01-B1*03:01L HLA-DQA1*01:02-B1*06:02L HLA-DQA1*05:05-B1*03:19L HLA-DPA1*03:01-B1*105:01L HLA-DQA1*05:05-B1*03:01L HLA-DQA1*02:01-B1*03:03L
YSTAALGVLMSN

SEQ ID NO: 10859 - protein, 12 aa, Severe acute respiratory syndrome coronavirus 2
  REGION 1..12: note = Table B: HLA-DQA1*05:01-B1*03:01L HLA-DRB1*04:02L HLA-DQA1*05:05-B1*03:19L HLA-DQA1*05:01-B1*02:01L HLA-DRB1*04:10L HLA-DRB1*12:01L HLA-DPA1*03:01-B1*105:01L
TAALGVLMSNLG

SEQ ID NO: 10860 - protein, 11 aa, Severe acute respiratory syndrome coronavirus 2
  REGION 1..11: note = Table B: HLA-DQA1*05:01-B1*03:01L HLA-DRB1*13:02L HLA-DRB1*13:03L HLA-DRB1*01:03L HLA-DPA1*03:01-B1*04:02L HLA-DRB1*03:01L HLA-DRB1*14:01L HLA-DRB1*11:02L HLA-DRB1*14:02L HLA-DQA1*01-B1*05L HLA-DQA1*05:05-B1*03:116L
  REGION 1..11: note = CONT. FROM ABOVE: HLA-DPA1*01:03-B1*04:02L HLA-DRB1*12:01L HLA-D PA1*02:01-B1*13:01L HLA-DPA1*03:01-B1*105:01L HLA-DQA1*05:05-B1* 03:01L HLA-DRB1*10:01L HLA-DQA1*01:03-B1*06:01L HLA-DRB1*08:02L
VLMSNLGMPSY

SEQ ID NO: 10861 - protein, 14 aa, Severe acute respiratory syndrome coronavirus 2
  REGION 1..14: note = Table B: HLA-DQA1*05:01-B1*03:01L HLA-DQA1*02:01-B1*03:03L
MSNLGMPSYCTGYR

SEQ ID NO: 10862 - protein, 12 aa, Severe acute respiratory syndrome coronavirus 2
  REGION 1..12: note = Table B: HLA-DQA1*05:01-B1*03:01L HLA-DRB1*04:03L HLA-DQA1*01:02-B1*06:02L HLA-DQA1*05:01-B1*02:01L HLA-DPA1*03:01-B1*105:01L HLA-DQA1*05:05-B1*03:01L HLA-DPA1*01:02-B1*04:01L HLA-DQA1*01:03-B1*06:01L
  REGION 1..12: note = CONT. FROM ABOVE: HLA-DQA1*02:01-B1*03:03L
YREGYLNSTNVT

SEQ ID NO: 10863 - protein, 14 aa, Severe acute respiratory syndrome coronavirus 2
  REGION 1..14: note = Table B: HLA-DQA1*05:01-B1*03:01L HLA-DPA1*01:03-B1*03:01L
TNVTIATYCTGSIP

SEQ ID NO: 10864 - protein, 13 aa, Severe acute respiratory syndrome coronavirus 2
  REGION 1..13: note = Table B: HLA-DQA1*05:01-B1*03:01L HLA-DRB1*04:04L HLA-DRB1*01:02L HLA-DRB4*03:01NL HLA-DRB1*08:04L HLA-DQA1*05:05-B1*03:19L HLA-DRB1*12:01L HLA-DRB1*14:54L HLA-DRB1*10:01L HLA-DRB1*04:08L HLA-DRB1*15:03L
SGLDSLDTYPSLE

SEQ ID NO: 10865 - protein, 13 aa, Severe acute respiratory syndrome coronavirus 2
  REGION 1..13: note = Table B: HLA-DQA1*05:01-B1*03:01L HLA-DRB1*01:03L HLA-DRB1*04:04L HLA-DRB1*04:05L HLA-DRB3*02:01L HLA-DPA1*03:01-B1*04:02L HLA-DRB1*14:01L HLA-DRB1*04:10L HLA-DQA1*05:05-B1*03:01L HLA-DRB1*04:08L HLA-DRB1*15:01L
DSLDTYPSLETIQ

SEQ ID NO: 10866 - protein, 11 aa, Severe acute respiratory syndrome coronavirus 2
  REGION 1..11: note = Table B: HLA-DQA1*05:01-B1*03:01L HLA-DRB1*04:03L HLA-DRB1*01:02L HLA-DPA1*03:01-B1*04:02L HLA-DRB1*14:01L HLA-DQA1*05:01-B1*02:01L HLA-DRB1*12:01L HLA-DQA1*03:01-B1*03:02L HLA-DRB1*14:17L
  REGION 1..11: note = CONT. FROM ABOVE: HLA-DPA1*01:02-B1*04:01L HLA-DRB1*16:01L
IQITISSFKWD

SEQ ID NO: 10867 - protein, 11 aa, Severe acute respiratory syndrome coronavirus 2
  REGION 1..11: note = Table B: HLA-DQA1*05:01-B1*03:01L HLA-DRB1*04:03L HLA-DRB1*01:02L HLA-DQA1*05:01-B1*02:01L HLA-DPA1*01:03-B1*04:01L HLA-DRB1*12:01L HLA-DQA1*05:05-B1*03:01L HLA-DRB1*04:08L HLA-DRB1*15:03L
FSYFAVHFISN

SEQ ID NO: 10868 - protein, 11 aa, Severe acute respiratory syndrome coronavirus 2
  REGION 1..11: note = Table B: HLA-DQA1*05:01-B1*03:01L HLA-DRB1*04:03L HLA-DRB1*04:02L HLA-DQA1*01:02-B1*06:02L HLA-DRB1*01:02L HLA-DRB1*14:01L HLA-DQA1*05:01-B1*02:01L HLA-DRB1*12:01L HLA-DPA1*03:01-B1*105:01L HLA-DQA1*03:01-B1*03:02L
  REGION 1..11: note = CONT. FROM ABOVE: HLA-DQA1*05:05-B1*03:01L HLA-DRB1*14:17L HLA-D RB1*16:01L HLA-DQA1*01:03-B1*06:01L HLA-DQA1*02:01-B1*03:03L HLA -DRB1*15:03L
IINLVQMAPIS

SEQ ID NO: 10869 - protein, 11 aa, Severe acute respiratory syndrome coronavirus 2
  REGION 1..11: note = Table B: HLA-DQA1*05:01-B1*03:01L HLA-DRB1*04:03L HLA-DRB1*01:03L HLA-DRB1*04:02L HLA-DQA1*01:02-B1*06:02L HLA-DPA1*03:01-B1*105:01L HLA-DRB1*14:17L HLA-DPA1*01:02-B1*04:01L HLA-DRB1*16:01L
VQMAPISAMVR

SEQ ID NO: 10870 - protein, 10 aa, Severe acute respiratory syndrome coronavirus 2
  REGION 1..10: note = Table B: HLA-DQA1*05:01-B1*03:01L HLA-DRB1*13:03M HLA-DRB1*01:03L HLA-DQA1*01:02-B1*06:02M HLA-DRB1*08:77L HLA-DPA1*01:03-B1*03:01L HLA-DPA1*03:01-B1*04:02L HLA-DRB1*03:01L HLA-DRB1*14:01L HLA-DRB1*14:02L
  REGION 1..10: note = CONT. FROM ABOVE: HLA-DQA1*01-B1*05L HLA-DQA1*05:05-B1*03:19L HL A-DQA1*05:01-B1*02:01L HLA-DPA1*01:03-B1*04:01L HLA-DQA1*05:05-B 1*03:116L HLA-DPA1*01:03-B1*04:02L HLA-DPA1*02:01-B1*13:01L HLA- DPA1*03:01-B1*105:01M HLA-DPA1*01:02-B1*04:01L HLA-DRB1*16:01L
  REGION 1..10: note = CONT. FROM ABOVE: HLA-DQA1*01:03-B1*06:01L HLA-DQA1*02:01-B1*03: 03L HLA-DRB1*15:03L
APISAMVRMY

SEQ ID NO: 10871 - protein, 12 aa, Severe acute respiratory syndrome coronavirus 2
  REGION 1..12: note = Table B: HLA-DQA1*05:01-B1*03:01L HLA-DRB1*04:03L HLA-DRB1*13:02L HLA-DRB1*13:03L HLA-DRB1*04:02L HLA-DRB1*04:05L HLA-DRB1*01:02L HLA-DRB1*08:04L HLA-DPA1*03:01-B1*04:02L HLA-DRB1*14:01L HLA-DRB1*11:04L HLA-DRB1*11:01L
  REGION 1..12: note = CONT. FROM ABOVE: HLA-DPA1*01:03-B1*04:02L HLA-DRB1*12:01L HLA-D RB3*01:01L HLA-DPA1*02:01-B1*13:01L HLA-DPA1*03:01-B1*105:01L HL A-DQA1*03:01-B1*03:02L HLA-DRB1*14:54L HLA-DPA1*01:03-B1*02:01L HLA-DRB1*08:03L HLA-DRB1*15:03L
ASFYYVWKSYVH

SEQ ID NO: 10872 - protein, 12 aa, Severe acute respiratory syndrome coronavirus 2
  REGION 1..12: note = Table B: HLA-DQA1*05:01-B1*03:01L HLA-DRB1*13:02L HLA-DRB1*04:05L HLA-DRB1*08:04L HLA-DRB1*14:01L HLA-DRB1*11:04L HLA-DRB1*11:01L HLA-DQA1*01-B1*05L HLA-DRB3*01:01L HLA-DQA1*03:01-B1*03:02L
YYVWKSYVHVVD

SEQ ID NO: 10873 - protein, 11 aa, Severe acute respiratory syndrome coronavirus 2
  REGION 1..11: note = Table B: HLA-DQA1*05:01-B1*03:01L HLA-DRB1*04:03L HLA-DPA1*03:01-B1*105:01L HLA-DQA1*03:01-B1*03:02L HLA-DQA1*05:05-B1*03:01L
VECTTIVNGVR

SEQ ID NO: 10874 - protein, 10 aa, Severe acute respiratory syndrome coronavirus 2
  REGION 1..10: note = Table B: HLA-DQA1*05:01-B1*03:01L HLA-DRB1*01:03L HLA-DQA1*01:02-B1*06:02L HLA-DPA1*01:03-B1*03:01L HLA-DRB1*03:01L HLA-DRB1*14:02L HLA-DQA1*05:05-B1*03:19L HLA-DQA1*05:01-B1*02:01L HLA-DPA1*01:03-B1*04:01L
  REGION 1..10: note = CONT. FROM ABOVE: HLA-DPA1*01:03-B1*04:02L HLA-DRB1*16:01L HLA-D QA1*01:03-B1*06:01L HLA-DRB1*08:02L HLA-DQA1*02:01-B1*03:03L
IVNGVRRSFY

SEQ ID NO: 10875 - protein, 11 aa, Severe acute respiratory syndrome coronavirus 2
  REGION 1..11: note = Table B: HLA-DQA1*05:01-B1*03:01L HLA-DRB1*04:01L HLA-DRB1*04:04L HLA-DQA1*01:02-B1*06:02L HLA-DRB1*08:04L HLA-DRB1*08:77L HLA-DPA1*01:03-B1*03:01L HLA-DPA1*03:01-B1*04:02L HLA-DRB1*11:03L HLA-DRB1*14:02L
  REGION 1..11: note = CONT. FROM ABOVE: HLA-DRB1*11:01L HLA-DQA1*05:05-B1*03:19L HLA-D RB4*01:01L HLA-DRB1*09:01L HLA-DRB3*01:01L HLA-DPA1*02:01-B1*13: 01L HLA-DRB1*07:01L HLA-DRB1*08:03L
STFISDEVARD

SEQ ID NO: 10876 - protein, 11 aa, Severe acute respiratory syndrome coronavirus 2
  REGION 1..11: note = Table B: HLA-DQA1*05:01-B1*03:01L HLA-DQA1*05:05-B1*03:116L
ISDEVARDLSL

SEQ ID NO: 10877 - protein, 10 aa, Severe acute respiratory syndrome coronavirus 2
  REGION 1..10: note = Table B: HLA-DQA1*05:01-B1*03:01L HLA-DRB1*04:03L HLA-DRB1*13:03L HLA-DRB1*01:03L HLA-DQA1*01:02-B1*06:02L HLA-DRB4*03:01NL HLA-DRB1*08:77L HLA-DPA1*01:03-B1*03:01L HLA-DRB1*03:01L HLA-DRB1*11:02L HLA-DRB1*14:02L
  REGION 1..10: note = CONT. FROM ABOVE: HLA-DQA1*01-B1*05L HLA-DQA1*05:05-B1*03:19L HL A-DQA1*05:01-B1*02:01L HLA-DRB4*01:01L HLA-DPA1*01:03-B1*04:01L HLA-DPA1*01:03-B1*04:02L HLA-DRB1*12:01L HLA-DPA1*03:01-B1*105:0 1L HLA-DPA1*01:03-B1*104:01L HLA-DRB1*10:01L HLA-DRB1*16:01L
  REGION 1..10: note = CONT. FROM ABOVE: HLA-DRB1*08:02L HLA-DQA1*02:01-B1*03:03L HLA-D RB1*15:03L
PINPTDQSSY

SEQ ID NO: 10878 - protein, 14 aa, Severe acute respiratory syndrome coronavirus 2
  REGION 1..14: note = Table B: HLA-DQA1*05:01-B1*03:01L HLA-DRB1*01:03L HLA-DRB1*04:05L HLA-DPA1*01:03-B1*03:01L HLA-DQA1*01:01-B1*05:01L HLA-DQA1*05:05-B1*03:19L HLA-DPA1*01:03-B1*04:02L HLA-DRB1*12:01L
  REGION 1..14: note = CONT. FROM ABOVE: HLA-DPA1*02:01-B1*13:01L HLA-DPA1*03:01-B1*105 :01L HLA-DQA1*05:05-B1*03:01L HLA-DRB1*16:01L HLA-DRB1*04:08L
NPTDQSSYIVDSVT

SEQ ID NO: 10879 - protein, 13 aa, Severe acute respiratory syndrome coronavirus 2
  REGION 1..13: note = Table B: HLA-DQA1*05:01-B1*03:01L HLA-DRB1*04:05L HLA-DQA1*01:02-B1*06:02L HLA-DRB1*01:02L HLA-DRB1*08:04L HLA-DRB1*08:77L HLA-DRB3*02:01L HLA-DPA1*01:03-B1*03:01L HLA-DPA1*03:01-B1*04:02L HLA-DRB1*11:03L HLA-DRB1*11:04L
  REGION 1..13: note = CONT. FROM ABOVE: HLA-DQA1*01:01-B1*05:01L HLA-DRB5*01:01L HLA-D RB1*04:10L HLA-DRB1*12:02L HLA-DPA1*02:01-B1*13:01L HLA-DPA1*03: 01-B1*105:01L HLA-DRB1*10:01L HLA-DRB1*04:08L HLA-DRB1*08:03L HL A-DRB1*15:03L
DQSSYIVDSVTVK

SEQ ID NO: 10880 - protein, 10 aa, Severe acute respiratory syndrome coronavirus 2
  REGION 1..10: note = Table B: HLA-DQA1*05:01-B1*03:01L HLA-DRB1*04:01L HLA-DRB1*13:02L HLA-DRB1*13:03L HLA-DRB1*01:03M HLA-DQA1*01:02-B1*06:02M HLA-DRB4*03:01NL HLA-DRB1*08:77L HLA-DPA1*01:03-B1*03:01L HLA-DPA1*03:01-B1*04:02L
  REGION 1..10: note = CONT. FROM ABOVE: HLA-DRB1*03:01M HLA-DRB1*14:01L HLA-DRB1*11:02 L HLA-DRB1*14:02M HLA-DRB1*11:01L HLA-DRB5*01:01L HLA-DQA1*01-B1 *05L HLA-DQA1*05:05-B1*03:19M HLA-DQA1*05:01-B1*02:01M HLA-DRB4* 01:01L HLA-DPA1*01:03-B1*04:01M HLA-DQA1*05:05-B1*03:116L
  REGION 1..10: note = CONT. FROM ABOVE: HLA-DPA1*01:03-B1*04:02M HLA-DRB1*12:01L HLA-D PA1*02:01-B1*13:01L HLA-DPA1*03:01-B1*105:01L HLA-DPA1*01:03-B1* 104:01L HLA-DPA1*01:02-B1*04:01L HLA-DRB1*10:01L HLA-DRB1*16:01L HLA-DQA1*01:03-B1*06:01L HLA-DRB1*08:02L
  REGION 1..10: note = CONT. FROM ABOVE: HLA-DQA1*02:01-B1*03:03M HLA-DRB1*15:03L
TVKNGSIHLY

SEQ ID NO: 10881 - protein, 12 aa, Severe acute respiratory syndrome coronavirus 2
  REGION 1..12: note = Table B: HLA-DQA1*05:01-B1*03:01L HLA-DPA1*03:01-B1*105:01L HLA-DQA1*03:01-B1*03:02L
VKNGSIHLYFDK

SEQ ID NO: 10882 - protein, 13 aa, Severe acute respiratory syndrome coronavirus 2
  REGION 1..13: note = Table B: HLA-DQA1*05:01-B1*03:01L HLA-DRB1*08:04L HLA-DRB3*02:01L HLA-DRB1*03:01L HLA-DRB1*11:04L HLA-DQA1*05:01-B1*02:01L HLA-DPA1*03:01-B1*105:01L HLA-DQA1*01:03-B1*06:01L
SIHLYFDKAGQKT

SEQ ID NO: 10883 - protein, 11 aa, Severe acute respiratory syndrome coronavirus 2
  REGION 1..11: note = Table B: HLA-DQA1*05:01-B1*03:01L HLA-DRB1*03:01L HLA-DRB1*11:01L HLA-DPA1*01:02-B1*04:01L HLA-DRB1*15:03L
KTYERHSLSHF

SEQ ID NO: 10884 - protein, 13 aa, Severe acute respiratory syndrome coronavirus 2
  REGION 1..13: note = Table B: HLA-DQA1*05:01-B1*03:01L HLA-DRB1*01:03L HLA-DQA1*01:01-B1*05:01L HLA-DRB1*12:01L HLA-DRB1*15:03L
ERHSLSHFVNLDN

SEQ ID NO: 10885 - protein, 12 aa, Severe acute respiratory syndrome coronavirus 2
  REGION 1..12: note = Table B: HLA-DQA1*05:01-B1*03:01L HLA-DRB1*01:01L HLA-DRB1*08:77L HLA-DPA1*01:03-B1*03:01L HLA-DRB1*14:02L HLA-DQA1*05:05-B1*03:19L HLA-DRB4*01:01L HLA-DRB1*09:01L
FVNLDNLRANNT

SEQ ID NO: 10886 - protein, 12 aa, Severe acute respiratory syndrome coronavirus 2
  REGION 1..12: note = Table B: HLA-DQA1*05:01-B1*03:01L HLA-DRB1*01:03L HLA-DRB1*04:05L HLA-DQA1*01:02-B1*06:02L HLA-DRB1*01:02L HLA-DRB1*16:01L HLA-DQA1*01:03-B1*06:01L HLA-DRB1*04:08L HLA-DQA1*02:01-B1*03:03L
VNLDNLRANNTK

SEQ ID NO: 10887 - protein, 14 aa, Severe acute respiratory syndrome coronavirus 2
  REGION 1..14: note = Table B: HLA-DQA1*05:01-B1*03:01L HLA-DRB1*13:02L HLA-DRB1*13:03L HLA-DRB1*01:03L HLA-DRB1*04:02L HLA-DRB1*04:04L HLA-DRB1*04:05L HLA-DQA1*01:02-B1*06:02L HLA-DRB1*01:02L HLA-DRB1*08:04L HLA-DRB1*11:04L HLA-DRB1*12:01L
  REGION 1..14: note = CONT. FROM ABOVE: HLA-DQA1*03:01-B1*03:02L HLA-DRB1*14:54L HLA-D QA1*05:05-B1*03:01L HLA-DRB1*16:01L HLA-DQA1*01:03-B1*06:01L HLA -DRB1*04:08L HLA-DQA1*02:01-B1*03:03L HLA-DRB1*15:03L
LDNLRANNTKGSLP

SEQ ID NO: 10888 - protein, 14 aa, Severe acute respiratory syndrome coronavirus 2
  REGION 1..14: note = Table B: HLA-DQA1*05:01-B1*03:01L HLA-DRB1*08:01L HLA-DQA1*03:01-B1*03:02L HLA-DRB1*04:08L
VFDGKSKCEESSAK

SEQ ID NO: 10889 - protein, 11 aa, Severe acute respiratory syndrome coronavirus 2
  REGION 1..11: note = Table B: HLA-DQA1*05:01-B1*03:01L HLA-DQA1*01:02-B1*06:02L HLA-DQA1*05:05-B1*03:19L HLA-DQA1*03:01-B1*03:02L HLA-DQA1*05:05-B1*03:01L
SAKSASVYYSQ

SEQ ID NO: 10890 - protein, 13 aa, Severe acute respiratory syndrome coronavirus 2
  REGION 1..13: note = Table B: HLA-DQA1*05:01-B1*03:01L HLA-DRB1*13:03L HLA-DRB1*01:03L HLA-DRB1*04:04L HLA-DRB1*04:05L HLA-DRB1*01:02L HLA-DRB4*03:01NL HLA-DRB1*08:04L HLA-DRB1*08:77L HLA-DRB3*02:01L HLA-DPA1*01:03-B1*03:01L HLA-DPA1*03:01-B1*04:02L
  REGION 1..13: note = CONT. FROM ABOVE: HLA-DRB1*11:03L HLA-DRB1*11:04L HLA-DRB1*14:02 L HLA-DQA1*01-B1*05L HLA-DRB1*04:10L HLA-DRB3*01:01L HLA-DPA1*03 :01-B1*105:01L HLA-DQA1*03:01-B1*03:02L HLA-DRB1*10:01L HLA-DRB1 *04:08L HLA-DQA1*02:01-B1*03:03L
QPILLLDQALVSD

SEQ ID NO: 10891 - protein, 15 aa, Severe acute respiratory syndrome coronavirus 2
  REGION 1..15: note = Table B: HLA-DQA1*05:01-B1*03:01L HLA-DQA1*01:02-B1*06:02L HLA-DRB1*01:01L HLA-DRB3*02:01L HLA-DPA1*03:01-B1*04:02L HLA-DRB1*03:01L HLA-DQA1*01:01-B1*05:01L HLA-DRB1*08:01L HLA-DRB1*11:01L HLA-DQA1*05:05-B1*03:19L HLA-DRB1*13:01L
  REGION 1..15: note = CONT. FROM ABOVE: HLA-DRB1*09:01L HLA-DPA1*01:03-B1*04:02L HLA-D PA1*01:03-B1*104:01L HLA-DQA1*05:05-B1*03:01L HLA-DRB1*07:01L HL A-DQA1*01:03-B1*06:01L HLA-DRB1*15:01L
DQALVSDVGDSAEVA

SEQ ID NO: 10892 - protein, 12 aa, Severe acute respiratory syndrome coronavirus 2
  REGION 1..12: note = Table B: HLA-DQA1*05:01-B1*03:01L HLA-DRB1*13:02L HLA-DRB1*04:02L HLA-DRB4*03:01NL HLA-DRB3*02:01L HLA-DPA1*01:03-B1*03:01L HLA-DRB1*14:01L HLA-DRB1*04:10L HLA-DRB1*09:01L HLA-DRB1*12:02L HLA-DQA1*03:01-B1*03:02L
  REGION 1..12: note = CONT. FROM ABOVE: HLA-DRB1*14:54L HLA-DQA1*05:05-B1*03:01L HLA-D RB1*14:17L HLA-DRB1*07:01L HLA-DRB1*04:08L
DAYVNTFSSTFN

SEQ ID NO: 10893 - protein, 12 aa, Severe acute respiratory syndrome coronavirus 2
  REGION 1..12: note = Table B: HLA-DQA1*05:01-B1*03:01L HLA-DRB1*13:03L HLA-DRB1*01:03L HLA-DRB1*04:02L HLA-DRB1*04:05L HLA-DQA1*01:02-B1*06:02L HLA-DRB1*01:02L HLA-DRB1*08:04L HLA-DPA1*01:03-B1*03:01L HLA-DRB1*14:01L HLA-DRB1*11:03L
  REGION 1..12: note = CONT. FROM ABOVE: HLA-DRB1*11:04L HLA-DRB1*14:02L HLA-DRB1*08:01 L HLA-DRB5*01:01L HLA-DQA1*01-B1*05L HLA-DQA1*05:05-B1*03:19L HL A-DRB4*01:01L HLA-DPA1*01:03-B1*04:01L HLA-DRB1*04:10L HLA-DRB1* 09:01L HLA-DRB1*12:02L HLA-DRB3*01:01L HLA-DPA1*02:01-B1*13:01L
  REGION 1..12: note = CONT. FROM ABOVE: HLA-DPA1*03:01-B1*105:01L HLA-DQA1*03:01-B1*03 :02L HLA-DRB1*14:54L HLA-DPA1*01:03-B1*104:01L HLA-DQA1*05:05-B1 *03:01L HLA-DRB1*14:17L HLA-DPA1*01:02-B1*04:01L HLA-DRB1*10:01L HLA-DQA1*01:03-B1*06:01L HLA-DRB1*04:08L HLA-DRB1*08:03L
VNTFSSTFNVPM

SEQ ID NO: 10894 - protein, 11 aa, Severe acute respiratory syndrome coronavirus 2
  REGION 1..11: note = Table B: HLA-DQA1*05:01-B1*03:01L HLA-DRB1*13:02L HLA-DRB1*13:03L HLA-DRB1*04:02L HLA-DRB1*01:02L HLA-DRB4*03:01NL HLA-DRB1*08:77L HLA-DRB3*02:01L HLA-DPA1*03:01-B1*04:02L HLA-DPA1*03:01-B1*105:01L HLA-DRB1*14:17L HLA-DRB1*07:01L
  REGION 1..11: note = CONT. FROM ABOVE: HLA-DRB1*15:03L
TFSSTFNVPME

SEQ ID NO: 10895 - protein, 10 aa, Severe acute respiratory syndrome coronavirus 2
  REGION 1..10: note = Table B: HLA-DQA1*05:01-B1*03:01L HLA-DQA1*03:01-B1*03:02L HLA-DPA1*01:02-B1*04:01L HLA-DQA1*02:01-B1*03:03L
NVPMEKLKTL

SEQ ID NO: 10896 - protein, 14 aa, Severe acute respiratory syndrome coronavirus 2
  REGION 1..14: note = Table B: HLA-DQA1*05:01-B1*03:01L HLA-DRB1*13:02L HLA-DRB1*01:03L HLA-DRB1*04:02L HLA-DRB1*04:04L HLA-DRB1*04:05L HLA-DQA1*01:02-B1*06:02L HLA-DRB1*01:02L HLA-DRB1*08:04L HLA-DPA1*01:03-B1*03:01L HLA-DRB1*14:01L HLA-DRB1*11:04L
  REGION 1..14: note = CONT. FROM ABOVE: HLA-DRB1*08:01L HLA-DRB1*04:10L HLA-DRB1*12:01 L HLA-DPA1*02:01-B1*13:01L HLA-DPA1*03:01-B1*105:01L HLA-DQA1*03 :01-B1*03:02L HLA-DPA1*01:03-B1*104:01L HLA-DQA1*05:05-B1*03:01L HLA-DRB1*10:01L HLA-DRB1*16:01L HLA-DRB1*04:08L
  REGION 1..14: note = CONT. FROM ABOVE: HLA-DQA1*02:01-B1*03:03L HLA-DRB1*15:03L
VPMEKLKTLVATAE

SEQ ID NO: 10897 - protein, 12 aa, Severe acute respiratory syndrome coronavirus 2
  REGION 1..12: note = Table B: HLA-DQA1*05:01-B1*03:01L HLA-DRB1*13:02L HLA-DRB1*04:02L HLA-DRB1*04:05L HLA-DRB4*03:01NL HLA-DRB1*08:77L HLA-DRB3*02:01L HLA-DPA1*01:03-B1*03:01L HLA-DPA1*03:01-B1*04:02L HLA-DRB1*14:01L HLA-DRB1*04:10L
  REGION 1..12: note = CONT. FROM ABOVE: HLA-DRB1*12:02L HLA-DPA1*02:01-B1*13:01L HLA-D PA1*03:01-B1*105:01L HLA-DRB1*14:54L HLA-DRB1*14:17L HLA-DRB1*07 :01L HLA-DRB1*16:01L HLA-DQA1*01:03-B1*06:01L HLA-DRB1*15:03L
LKTLVATAEAEL

SEQ ID NO: 10898 - protein, 11 aa, Severe acute respiratory syndrome coronavirus 2
  REGION 1..11: note = Table B: HLA-DQA1*05:01-B1*03:01L HLA-DRB1*04:03L HLA-DQA1*01:02-B1*06:02L HLA-DQA1*05:01-B1*02:01L HLA-DPA1*03:01-B1*105:01L HLA-DQA1*05:05-B1*03:01L HLA-DRB1*14:17L HLA-DQA1*02:01-B1*03:03L
TAEAELAKNVS

SEQ ID NO: 10899 - protein, 11 aa, Severe acute respiratory syndrome coronavirus 2
  REGION 1..11: note = Table B: HLA-DQA1*05:01-B1*03:01L HLA-DPA1*03:01-B1*04:02L HLA-DPA1*01:02-B1*04:01L
TFISAARQGFV

SEQ ID NO: 10900 - protein, 12 aa, Severe acute respiratory syndrome coronavirus 2
  REGION 1..12: note = Table B: HLA-DQA1*05:01-B1*03:01L HLA-DRB1*13:02L HLA-DRB1*01:03L HLA-DRB1*04:02L HLA-DRB1*04:05L HLA-DQA1*01:02-B1*06:02L HLA-DRB1*01:02L HLA-DRB4*03:01NL HLA-DRB1*08:77L HLA-DPA1*01:03-B1*03:01L HLA-DRB1*11:04L
  REGION 1..12: note = CONT. FROM ABOVE: HLA-DRB1*14:02L HLA-DRB5*01:01L HLA-DQA1*05:05 -B1*03:19L HLA-DRB4*01:01L HLA-DRB1*04:10L HLA-DPA1*01:03-B1*04: 02L HLA-DRB1*12:01L HLA-DRB3*01:01L HLA-DPA1*02:01-B1*13:01L HLA -DPA1*03:01-B1*105:01L HLA-DRB1*14:54L HLA-DQA1*05:05-B1*03:01L
  REGION 1..12: note = CONT. FROM ABOVE: HLA-DRB1*14:17L HLA-DPA1*01:02-B1*04:01L HLA-D RB1*07:01L HLA-DRB1*04:08L HLA-DRB1*15:03L
VDSDVETKDVVE

SEQ ID NO: 10901 - protein, 13 aa, Severe acute respiratory syndrome coronavirus 2
  REGION 1..13: note = Table B: HLA-DQA1*05:01-B1*03:01L HLA-DRB1*01:03L HLA-DRB1*01:02L HLA-DPA1*03:01-B1*105:01L HLA-DRB1*04:08L
SDVETKDVVECLK

SEQ ID NO: 10902 - protein, 18 aa, Severe acute respiratory syndrome coronavirus 2
  REGION 1..18: note = Table B: HLA-DQA1*05:01-B1*03:01L HLA-DRB1*04:03L HLA-DPA1*03:01-B1*04:02L HLA-DRB1*14:02L HLA-DQA1*05:05-B1*03:116L HLA-DPA1*01:03-B1*04:02L HLA-DQA1*05:05-B1*03:01L HLA-DRB1*07:01L HLA-DRB1*08:03L
DVETKDVVECLKLSHQSD

SEQ ID NO: 10903 - protein, 15 aa, Severe acute respiratory syndrome coronavirus 2
  REGION 1..15: note = Table B: HLA-DQA1*05:01-B1*03:01L HLA-DPA1*02:01-B1*13:01L HLA-DQA1*05:05-B1*03:01L
DVVECLKLSHQSDIE

SEQ ID NO: 10904 - protein, 11 aa, Severe acute respiratory syndrome coronavirus 2
  REGION 1..11: note = Table B: HLA-DQA1*05:01-B1*03:01L HLA-DRB1*08:77L HLA-DPA1*03:01-B1*04:02L HLA-DQA1*01-B1*05L HLA-DRB4*01:01L HLA-DPA1*01:03-B1*104:01L HLA-DRB1*10:01L HLA-DRB1*16:01L
IEVTGDSCNNY

SEQ ID NO: 10905 - protein, 12 aa, Severe acute respiratory syndrome coronavirus 2
  REGION 1..12: note = Table B: HLA-DQA1*05:01-B1*03:01L HLA-DRB1*13:03L HLA-DRB1*01:03L HLA-DRB1*04:05L HLA-DRB1*01:02L HLA-DRB4*03:01NL HLA-DRB1*08:04L HLA-DRB1*14:01L HLA-DRB1*08:01L HLA-DQA1*05:01-B1*02:01L HLA-DRB1*04:10L HLA-DRB1*12:01L
  REGION 1..12: note = CONT. FROM ABOVE: HLA-DPA1*02:01-B1*13:01L HLA-DRB1*14:54L HLA-D QA1*05:05-B1*03:01L HLA-DRB1*04:08L HLA-DRB1*08:03L HLA-DRB1*15: 03L
NNYMLTYNKVEN

SEQ ID NO: 10906 - protein, 12 aa, Severe acute respiratory syndrome coronavirus 2
  REGION 1..12: note = Table B: HLA-DQA1*05:01-B1*03:01L HLA-DRB1*01:03L HLA-DRB1*01:02L HLA-DRB1*08:04L HLA-DRB3*02:01L HLA-DPA1*01:03-B1*03:01L HLA-DPA1*03:01-B1*04:02L HLA-DRB1*14:01L HLA-DQA1*05:01-B1*02:01L
  REGION 1..12: note = CONT. FROM ABOVE: HLA-DPA1*01:03-B1*04:01L HLA-DPA1*01:03-B1*04: 02L HLA-DRB1*12:01L HLA-DPA1*02:01-B1*13:01L HLA-DRB1*04:08L HLA -DRB1*15:03L
NYMLTYNKVENM

SEQ ID NO: 10907 - protein, 11 aa, Severe acute respiratory syndrome coronavirus 2
  REGION 1..11: note = Table B: HLA-DQA1*05:01-B1*03:01L HLA-DRB1*04:05L HLA-DRB4*03:01NL HLA-DRB1*16:01L HLA-DQA1*01:03-B1*06:01L
YNKVENMTPRD

SEQ ID NO: 10908 - protein, 14 aa, Severe acute respiratory syndrome coronavirus 2
  REGION 1..14: note = Table B: HLA-DQA1*05:01-B1*03:01L HLA-DRB1*01:03L HLA-DRB1*04:05L HLA-DRB1*01:02L HLA-DRB1*08:01L HLA-DRB1*12:01L HLA-DPA1*02:01-B1*13:01L HLA-DPA1*03:01-B1*105:01L HLA-DQA1*03:01-B1*03:02L HLA-DQA1*05:05-B1*03:01L
  REGION 1..14: note = CONT. FROM ABOVE: HLA-DRB1*16:01L HLA-DRB1*04:08L HLA-DQA1*02:01 -B1*03:03L
TPRDLGACIDCSAR

SEQ ID NO: 10909 - protein, 13 aa, Severe acute respiratory syndrome coronavirus 2
  REGION 1..13: note = Table B: HLA-DQA1*05:01-B1*03:01L HLA-DRB1*04:03L HLA-DRB1*01:03L HLA-DRB1*04:04L HLA-DRB1*04:05L HLA-DQA1*01:02-B1*06:02L HLA-DRB1*08:01L HLA-DRB1*12:01L HLA-DPA1*02:01-B1*13:01L HLA-DRB1*16:01L
  REGION 1..13: note = CONT. FROM ABOVE: HLA-DQA1*01:03-B1*06:01L HLA-DRB1*04:08L
SARHINAQVAKSH

SEQ ID NO: 10910 - protein, 13 aa, Severe acute respiratory syndrome coronavirus 2
  REGION 1..13: note = Table B: HLA-DQA1*05:01-B1*03:01L HLA-DRB1*04:03L HLA-DRB1*13:02L HLA-DRB1*04:02L HLA-DRB1*04:04L HLA-DRB1*04:05L HLA-DRB1*08:04L HLA-DRB1*14:01L HLA-DRB1*11:04L HLA-DRB1*14:02L HLA-DRB1*11:01L HLA-DQA1*05:05-B1*03:19L HLA-DRB3*01:01L
  REGION 1..13: note = CONT. FROM ABOVE: HLA-DQA1*03:01-B1*03:02L HLA-DPA1*01:03-B1*104 :01L HLA-DQA1*05:05-B1*03:01L
IWNVKDFMSLSEQ

SEQ ID NO: 10911 - protein, 13 aa, Severe acute respiratory syndrome coronavirus 2
  REGION 1..13: note = Table B: HLA-DQA1*05:01-B1*03:01L HLA-DRB1*01:03L HLA-DQA1*01:01-B1*05:01L HLA-DRB1*08:01L HLA-DRB1*04:10L HLA-DPA1*02:01-B1*13:01L HLA-DPA1*03:01-B1*105:01L
NVKDFMSLSEQLR

SEQ ID NO: 10912 - protein, 11 aa, Severe acute respiratory syndrome coronavirus 2
  REGION 1..11: note = Table B: HLA-DQA1*05:01-B1*03:01L HLA-DRB1*04:03L HLA-DRB1*01:03L HLA-DRB1*01:02L HLA-DRB1*12:01L HLA-DRB1*14:17L HLA-DRB1*16:01L HLA-DRB1*15:03L
DFMSLSEQLRK

SEQ ID NO: 10913 - protein, 16 aa, Severe acute respiratory syndrome coronavirus 2
  REGION 1..16: note = Table B: HLA-DQA1*05:01-B1*03:01L HLA-DRB1*08:04L
SEQLRKQIRSAAKKNN

SEQ ID NO: 10914 - protein, 11 aa, Severe acute respiratory syndrome coronavirus 2
  REGION 1..11: note = Table B: HLA-DQA1*05:01-B1*03:01L HLA-DRB1*04:03L HLA-DRB1*13:03L HLA-DRB1*04:02L HLA-DRB1*01:02L HLA-DRB1*08:01L HLA-DRB1*14:17L HLA-DPA1*01:02-B1*04:01L HLA-DRB1*16:01L
SAAKKNNLPFK

SEQ ID NO: 10915 - protein, 11 aa, Severe acute respiratory syndrome coronavirus 2
  REGION 1..11: note = Table B: HLA-DQA1*05:01-B1*03:01L HLA-DRB1*04:03L HLA-DQA1*05:05-B1*03:19L HLA-DPA1*03:01-B1*105:01L HLA-DQA1*03:01-B1*03:02L HLA-DQA1*05:05-B1*03:01L HLA-DQA1*02:01-B1*03:03L
LTCATTRQVVN

SEQ ID NO: 10916 - protein, 12 aa, Severe acute respiratory syndrome coronavirus 2
  REGION 1..12: note = Table B: HLA-DQA1*05:01-B1*03:01L HLA-DRB1*01:03L HLA-DRB1*04:05L HLA-DQA1*01:02-B1*06:02L HLA-DRB1*01:02L HLA-DRB1*14:01L HLA-DRB1*08:01L HLA-DRB1*12:01L HLA-DPA1*03:01-B1*105:01L HLA-DPA1*01:02-B1*04:01L
  REGION 1..12: note = CONT. FROM ABOVE: HLA-DRB1*16:01L HLA-DRB1*04:08L HLA-DRB1*15:03 L
VVTTKIALKGGK

SEQ ID NO: 10917 - protein, 10 aa, Severe acute respiratory syndrome coronavirus 2
  REGION 1..10: note = Table B: HLA-DQA1*05:01-B1*03:01L HLA-DRB1*04:03L HLA-DRB1*13:02L HLA-DRB1*13:03L HLA-DRB1*01:03L HLA-DRB1*04:02L HLA-DRB1*01:01L HLA-DRB1*01:02L HLA-DRB4*03:01NL HLA-DRB1*08:77L HLA-DRB1*14:01L HLA-DRB1*11:03L HLA-DRB1*14:02L HLA-DRB1*12:01L
  REGION 1..10: note = CONT. FROM ABOVE: HLA-DRB1*12:02L HLA-DQA1*03:01-B1*03:02L HLA-D RB1*14:54L HLA-DQA1*05:05-B1*03:01L HLA-DRB1*14:17L HLA-DRB1*07: 01L HLA-DRB1*16:01L HLA-DRB1*04:08L HLA-DQA1*02:01-B1*03:03L HLA -DRB1*15:03L
IALKGGKIVN

SEQ ID NO: 10918 - protein, 11 aa, Severe acute respiratory syndrome coronavirus 2
  REGION 1..11: note = Table B: HLA-DQA1*05:01-B1*03:01L HLA-DRB1*01:03L HLA-DRB1*14:02L HLA-DQA1*05:05-B1*03:19L HLA-DPA1*03:01-B1*105:01L
ALKGGKIVNNW

SEQ ID NO: 10919 - protein, 12 aa, Severe acute respiratory syndrome coronavirus 2
  REGION 1..12: note = Table B: HLA-DQA1*05:01-B1*03:01L HLA-DQA1*03:01-B1*03:02L HLA-DQA1*05:05-B1*03:01L
LKGGKIVNNWLK

SEQ ID NO: 10920 - protein, 13 aa, Severe acute respiratory syndrome coronavirus 2
  REGION 1..13: note = Table B: HLA-DQA1*05:01-B1*03:01L HLA-DRB1*04:03L HLA-DRB1*13:03L HLA-DRB1*04:02L HLA-DRB1*08:04L HLA-DPA1*03:01-B1*04:02L HLA-DRB1*11:03L HLA-DRB1*11:04L HLA-DRB1*11:01L HLA-DRB1*13:01L HLA-DPA1*02:01-B1*13:01L
  REGION 1..13: note = CONT. FROM ABOVE: HLA-DPA1*03:01-B1*105:01L HLA-DRB1*14:54L HLA- DPA1*01:03-B1*02:01L
GKIVNNWLKQLIK

SEQ ID NO: 10921 - protein, 10 aa, Severe acute respiratory syndrome coronavirus 2
  REGION 1..10: note = Table B: HLA-DQA1*05:01-B1*03:01L HLA-DRB1*04:03L HLA-DRB1*13:02L HLA-DRB1*01:03L HLA-DRB1*04:02L HLA-DRB1*01:02L HLA-DRB4*03:01NL HLA-DRB3*02:01L HLA-DPA1*03:01-B1*04:02L HLA-DRB1*14:01L HLA-DQA1*05:01-B1*02:01L HLA-DRB1*12:01L
  REGION 1..10: note = CONT. FROM ABOVE: HLA-DPA1*03:01-B1*105:01L HLA-DQA1*03:01-B1*03 :02L HLA-DRB1*14:17L HLA-DPA1*01:02-B1*04:01L HLA-DRB1*16:01L HL A-DQA1*02:01-B1*03:03L HLA-DRB1*15:03L
YLITPVHVMS

SEQ ID NO: 10922 - protein, 12 aa, Severe acute respiratory syndrome coronavirus 2
  REGION 1..12: note = Table B: HLA-DQA1*05:01-B1*03:01L HLA-DRB1*04:03L HLA-DRB1*13:02L HLA-DRB1*04:05L HLA-DQA1*01:02-B1*06:02L HLA-DRB1*01:02L HLA-DRB1*08:04L HLA-DRB1*11:04L HLA-DRB1*11:01L HLA-DRB1*12:01L HLA-DRB3*01:01L HLA-DRB1*14:54L
  REGION 1..12: note = CONT. FROM ABOVE: HLA-DPA1*01:02-B1*04:01L HLA-DQA1*01:03-B1*06: 01L HLA-DRB1*04:08L HLA-DQA1*02:01-B1*03:03L HLA-DRB1*15:03L
ITPVHVMSKHTD

SEQ ID NO: 10923 - protein, 15 aa, Severe acute respiratory syndrome coronavirus 2
  REGION 1..15: note = Table B: HLA-DQA1*05:01-B1*03:01L HLA-DPA1*03:01-B1*04:02L HLA-DRB1*14:02L HLA-DQA1*01-B1*05L HLA-DQA1*05:05-B1*03:19L HLA-DQA1*05:01-B1*02:01L HLA-DPA1*01:03-B1*04:02L HLA-DPA1*02:01-B1*13:01L HLA-DPA1*03:01-B1*105:01L
  REGION 1..15: note = CONT. FROM ABOVE: HLA-DPA1*01:03-B1*02:01L HLA-DPA1*01:02-B1*04: 01L HLA-DQA1*02:01-B1*03:03L
TPVHVMSKHTDFSSE

SEQ ID NO: 10924 - protein, 14 aa, Severe acute respiratory syndrome coronavirus 2
  REGION 1..14: note = Table B: HLA-DQA1*05:01-B1*03:01L HLA-DRB1*13:02L HLA-DRB1*13:03L HLA-DRB1*01:03L HLA-DRB1*01:02L HLA-DPA1*01:03-B1*03:01L HLA-DRB1*08:01L HLA-DQA1*05:05-B1*03:19L HLA-DRB1*04:10L
  REGION 1..14: note = CONT. FROM ABOVE: HLA-DPA1*03:01-B1*105:01L HLA-DQA1*05:05-B1*03 :01L HLA-DRB1*04:08L
VMSKHTDFSSEIIG

SEQ ID NO: 10925 - protein, 10 aa, Severe acute respiratory syndrome coronavirus 2
  REGION 1..10: note = Table B: HLA-DQA1*05:01-B1*03:01L HLA-DRB1*13:03L HLA-DQA1*01:02-B1*06:02L HLA-DRB4*03:01NL HLA-DRB1*08:77L HLA-DPA1*01:03-B1*03:01L HLA-DPA1*03:01-B1*04:02L HLA-DRB1*03:01L HLA-DRB1*11:02L HLA-DQA1*01-B1*05L
  REGION 1..10: note = CONT. FROM ABOVE: HLA-DQA1*05:05-B1*03:19M HLA-DQA1*05:01-B1*02: 01M HLA-DRB4*01:01L HLA-DPA1*01:03-B1*04:01L HLA-DQA1*05:05-B1*0 3:116L HLA-DRB1*12:01L HLA-DPA1*01:03-B1*104:01L HLA-DRB1*10:01L HLA-DRB1*16:01L HLA-DRB1*15:03L
TDFSSEIIGY

SEQ ID NO: 10926 - protein, 12 aa, Severe acute respiratory syndrome coronavirus 2
  REGION 1..12: note = Table B: HLA-DQA1*05:01-B1*03:01L HLA-DQA1*01:02-B1*06:02L HLA-DQA1*01:01-B1*05:01L HLA-DQA1*05:05-B1*03:19L HLA-DQA1*05:01-B1*02:01L HLA-DQA1*05:05-B1*03:01L HLA-DRB1*16:01L HLA-DQA1*01:03-B1*06:01L
DGGVTRDIASTD

SEQ ID NO: 10927 - protein, 12 aa, Severe acute respiratory syndrome coronavirus 2
  REGION 1..12: note = Table B: HLA-DQA1*05:01-B1*03:01L HLA-DRB1*01:03L HLA-DQA1*01:01-B1*05:01L HLA-DQA1*05:05-B1*03:19L HLA-DRB1*04:10L HLA-DRB1*14:54L HLA-DQA1*05:05-B1*03:01L
GGVTRDIASTDT

SEQ ID NO: 10928 - protein, 14 aa, Severe acute respiratory syndrome coronavirus 2
  REGION 1..14: note = Table B: HLA-DQA1*05:01-B1*03:01L HLA-DRB1*04:05L HLA-DRB1*01:02L HLA-DPA1*01:03-B1*03:01L HLA-DRB1*14:01L HLA-DQA1*05:05-B1*03:19L HLA-DQA1*05:01-B1*02:01L HLA-DRB1*12:01L HLA-DPA1*02:01-B1*13:01L
  REGION 1..14: note = CONT. FROM ABOVE: HLA-DPA1*03:01-B1*105:01L HLA-DQA1*05:05-B1*03 :01L HLA-DRB1*16:01L HLA-DRB1*15:03L
VTRDIASTDTCFAN

SEQ ID NO: 10929 - protein, 12 aa, Severe acute respiratory syndrome coronavirus 2
  REGION 1..12: note = Table B: HLA-DQA1*05:01-B1*03:01L HLA-DRB1*04:03L HLA-DRB1*04:02L HLA-DQA1*01:02-B1*06:02L HLA-DPA1*03:01-B1*105:01L HLA-DQA1*03:01-B1*03:02L HLA-DQA1*05:05-B1*03:01L HLA-DRB1*14:17L
DIASTDTCFANK

SEQ ID NO: 10930 - protein, 12 aa, Severe acute respiratory syndrome coronavirus 2
  REGION 1..12: note = Table B: HLA-DQA1*05:01-B1*03:01L HLA-DRB1*04:03L HLA-DQA1*01:02-B1*06:02L HLA-DPA1*03:01-B1*105:01L HLA-DQA1*03:01-B1*03:02L
IASTDTCFANKH

SEQ ID NO: 10931 - protein, 14 aa, Severe acute respiratory syndrome coronavirus 2
  REGION 1..14: note = Table B: HLA-DQA1*05:01-B1*03:01L HLA-DQA1*05:05-B1*03:01L
STDTCFANKHADFD

SEQ ID NO: 10932 - protein, 12 aa, Severe acute respiratory syndrome coronavirus 2
  REGION 1..12: note = Table B: HLA-DQA1*05:01-B1*03:01L HLA-DQA1*02:01-B1*03:03L
FSQRGGSYTNDK

SEQ ID NO: 10933 - protein, 12 aa, Severe acute respiratory syndrome coronavirus 2
  REGION 1..12: note = Table B: HLA-DQA1*05:01-B1*03:01L HLA-DQA1*01:02-B1*06:02L HLA-DQA1*05:05-B1*03:19L HLA-DPA1*03:01-B1*105:01L HLA-DQA1*05:05-B1*03:01L HLA-DQA1*01:03-B1*06:01L HLA-DQA1*02:01-B1*03:03L
DKACPLIAAVIT

SEQ ID NO: 10934 - protein, 12 aa, Severe acute respiratory syndrome coronavirus 2
  REGION 1..12: note = Table B: HLA-DQA1*05:01-B1*03:01L HLA-DRB1*13:02L HLA-DRB1*01:03L HLA-DRB1*04:02L HLA-DRB1*04:05L HLA-DQA1*01:02-B1*06:02L HLA-DRB1*01:01L HLA-DRB1*01:02M HLA-DRB4*03:01NL HLA-DRB3*02:01L HLA-DPA1*01:03-B1*03:01L
  REGION 1..12: note = CONT. FROM ABOVE: HLA-DRB1*14:01L HLA-DRB1*11:03L HLA-DQA1*01-B1 *05L HLA-DQA1*05:05-B1*03:19L HLA-DQA1*05:01-B1*02:01L HLA-DRB1* 12:01L HLA-DPA1*02:01-B1*13:01L HLA-DPA1*03:01-B1*105:01L HLA-DQ A1*03:01-B1*03:02L HLA-DQA1*05:05-B1*03:01L HLA-DRB1*14:17L
  REGION 1..12: note = CONT. FROM ABOVE: HLA-DRB1*07:01L HLA-DRB1*16:01L HLA-DQA1*01:03 -B1*06:01L HLA-DRB1*04:08L HLA-DQA1*02:01-B1*03:03L HLA-DRB1*15: 03L
VITREVGFVVPG

SEQ ID NO: 10935 - protein, 14 aa, Severe acute respiratory syndrome coronavirus 2
  REGION 1..14: note = Table B: HLA-DQA1*05:01-B1*03:01L HLA-DRB1*13:02L HLA-DRB1*01:03L HLA-DRB1*04:02L HLA-DRB1*04:05L HLA-DRB1*01:02L HLA-DPA1*01:03-B1*03:01L HLA-DQA1*01:01-B1*05:01L HLA-DQA1*05:01-B1*02:01L HLA-DRB1*04:10L HLA-DRB1*12:01L
  REGION 1..14: note = CONT. FROM ABOVE: HLA-DPA1*02:01-B1*13:01L HLA-DPA1*03:01-B1*105 :01L HLA-DQA1*05:05-B1*03:01L HLA-DRB1*16:01L HLA-DQA1*01:03-B1* 06:01L HLA-DRB1*04:08L HLA-DRB1*15:03L
ITREVGFVVPGLPG

SEQ ID NO: 10936 - protein, 13 aa, Severe acute respiratory syndrome coronavirus 2
  REGION 1..13: note = Table B: HLA-DQA1*05:01-B1*03:01L HLA-DRB1*13:02L HLA-DRB1*04:02L HLA-DQA1*01-B1*05L HLA-DQA1*03:01-B1*03:02L
NGDFLHFLPRVFS

SEQ ID NO: 10937 - protein, 14 aa, Severe acute respiratory syndrome coronavirus 2
  REGION 1..14: note = Table B: HLA-DQA1*05:01-B1*03:01L HLA-DRB1*13:02L HLA-DRB1*13:03L HLA-DRB1*04:02L HLA-DRB1*11:02L HLA-DRB1*11:03L HLA-DRB1*14:02L HLA-DQA1*05:05-B1*03:19L HLA-DQA1*05:05-B1*03:116L HLA-DRB3*01:01L
  REGION 1..14: note = CONT. FROM ABOVE: HLA-DQA1*05:05-B1*03:01L HLA-DRB1*08:02L HLA-D RB1*08:03L
DFLHFLPRVFSAVG

SEQ ID NO: 10938 - protein, 13 aa, Severe acute respiratory syndrome coronavirus 2
  REGION 1..13: note = Table B: HLA-DQA1*05:01-B1*03:01L HLA-DRB1*04:03L HLA-DRB1*13:02L HLA-DRB1*01:03L HLA-DRB1*01:02L HLA-DPA1*01:03-B1*03:01L HLA-DPA1*03:01-B1*04:02L HLA-DRB1*14:01L HLA-DRB1*12:01L HLA-DPA1*03:01-B1*105:01L
  REGION 1..13: note = CONT. FROM ABOVE: HLA-DPA1*01:03-B1*104:01L HLA-DQA1*05:05-B1*03 :01L HLA-DRB1*16:01L HLA-DRB1*15:03L
LPRVFSAVGNICY

SEQ ID NO: 10939 - protein, 14 aa, Severe acute respiratory syndrome coronavirus 2
  REGION 1..14: note = Table B: HLA-DQA1*05:01-B1*03:01L HLA-DRB1*01:02L HLA-DPA1*03:01-B1*105:01L
VFSAVGNICYTPSK

SEQ ID NO: 10940 - protein, 14 aa, Severe acute respiratory syndrome coronavirus 2
  REGION 1..14: note = Table B: HLA-DQA1*05:01-B1*03:01L HLA-DRB1*13:02L HLA-DRB1*01:03L HLA-DRB1*04:08L
NICYTPSKLIEYTD

SEQ ID NO: 10941 - protein, 14 aa, Severe acute respiratory syndrome coronavirus 2
  REGION 1..14: note = Table B: HLA-DQA1*05:01-B1*03:01L HLA-DRB1*13:02L HLA-DRB1*13:03L HLA-DRB4*03:01NL HLA-DRB1*08:04L HLA-DRB1*08:77L HLA-DRB1*11:02L HLA-DRB1*11:03L HLA-DRB1*11:04L HLA-DRB1*14:02L HLA-DQA1*01:01-B1*05:01L HLA-DRB1*11:01L
  REGION 1..14: note = CONT. FROM ABOVE: HLA-DQA1*05:05-B1*03:19L HLA-DRB1*09:01L HLA-D RB1*12:02L HLA-DRB3*01:01L HLA-DPA1*01:03-B1*02:01L HLA-DPA1*01: 03-B1*104:01L HLA-DQA1*05:05-B1*03:01L HLA-DRB1*07:01L HLA-DRB1* 10:01L HLA-DRB1*08:03L
TPSKLIEYTDFATS

SEQ ID NO: 10942 - protein, 12 aa, Severe acute respiratory syndrome coronavirus 2
  REGION 1..12: note = Table B: HLA-DQA1*05:01-B1*03:01L HLA-DRB1*13:02L HLA-DRB1*04:04L HLA-DRB1*04:05L HLA-DQA1*01:02-B1*06:02L HLA-DRB4*03:01NL HLA-DRB1*08:04L HLA-DRB3*02:01L HLA-DRB1*14:01L HLA-DRB1*11:03L HLA-DRB1*11:04L HLA-DRB1*14:02L HLA-DRB1*08:01L
  REGION 1..12: note = CONT. FROM ABOVE: HLA-DRB1*04:10L HLA-DRB3*01:01L HLA-DPA1*02:01 -B1*13:01L HLA-DRB1*14:54L HLA-DPA1*01:03-B1*02:01L HLA-DQA1*05: 05-B1*03:01L HLA-DRB1*07:01L HLA-DRB1*10:01L HLA-DRB1*08:03L HLA -DRB1*15:01L
KLIEYTDFATSA

SEQ ID NO: 10943 - protein, 12 aa, Severe acute respiratory syndrome coronavirus 2
  REGION 1..12: note = Table B: HLA-DQA1*05:01-B1*03:01L HLA-DQA1*05:05-B1*03:19L HLA-DPA1*03:01-B1*105:01L HLA-DQA1*05:05-B1*03:01L HLA-DQA1*02:01-B1*03:03L
DFATSACVLAAE

SEQ ID NO: 10944 - protein, 14 aa, Severe acute respiratory syndrome coronavirus 2
  REGION 1..14: note = Table B: HLA-DQA1*05:01-B1*03:01L HLA-DRB1*01:02L HLA-DQA1*05:05-B1*03:19L
VLAAECTIFKDASG

SEQ ID NO: 10945 - protein, 12 aa, Severe acute respiratory syndrome coronavirus 2
  REGION 1..12: note = Table B: HLA-DQA1*05:01-B1*03:01L
YDTNVLEGSVAY

SEQ ID NO: 10946 - protein, 11 aa, Severe acute respiratory syndrome coronavirus 2
  REGION 1..11: note = Table B: HLA-DQA1*05:01-B1*03:01L HLA-DQA1*01:02-B1*06:02L HLA-DQA1*05:05-B1*03:19L HLA-DQA1*05:01-B1*02:01L HLA-DQA1*05:05-B1*03:01L HLA-DQA1*01:03-B1*06:01L HLA-DQA1*02:01-B1*03:03L
VLEGSVAYESL

SEQ ID NO: 10947 - protein, 11 aa, Severe acute respiratory syndrome coronavirus 2
  REGION 1..11: note = Table B: HLA-DQA1*05:01-B1*03:01L HLA-DQA1*01:02-B1*06:02L HLA-DQA1*05:05-B1*03:19L
LEGSVAYESLR

SEQ ID NO: 10948 - protein, 11 aa, Severe acute respiratory syndrome coronavirus 2
  REGION 1..11: note = Table B: HLA-DQA1*05:01-B1*03:01L HLA-DRB1*04:02L HLA-DQA1*01:02-B1*06:02L
GSVAYESLRPD

SEQ ID NO: 10949 - protein, 11 aa, Severe acute respiratory syndrome coronavirus 2
  REGION 1..11: note = Table B: HLA-DQA1*05:01-B1*03:01L HLA-DRB1*13:03L HLA-DRB1*01:03L HLA-DRB1*04:05L HLA-DRB1*01:01L HLA-DRB3*02:01L HLA-DRB1*11:03L HLA-DQA1*05:05-B1*03:19L HLA-DRB1*12:02L HLA-DPA1*03:01-B1*105:01L HLA-DQA1*03:01-B1*03:02L
  REGION 1..11: note = CONT. FROM ABOVE: HLA-DRB1*14:54L HLA-DQA1*05:05-B1*03:01L HLA-D PA1*01:02-B1*04:01L HLA-DRB1*07:01L HLA-DRB1*10:01L HLA-DRB1*04: 08L
RYVLMDGSIIQ

SEQ ID NO: 10950 - protein, 11 aa, Severe acute respiratory syndrome coronavirus 2
  REGION 1..11: note = Table B: HLA-DQA1*05:01-B1*03:01L HLA-DRB1*13:02L HLA-DRB1*13:03L HLA-DRB1*01:03L HLA-DRB1*04:05L HLA-DRB4*03:01NL HLA-DRB3*02:01L HLA-DRB1*14:01L HLA-DRB1*11:03L HLA-DQA1*05:01-B1*02:01L HLA-DRB1*04:10L
  REGION 1..11: note = CONT. FROM ABOVE: HLA-DPA1*03:01-B1*105:01L HLA-DQA1*03:01-B1*03 :02L HLA-DRB1*14:54L HLA-DQA1*01:03-B1*06:01L
IIQFPNTYLEG

SEQ ID NO: 10951 - protein, 11 aa, Severe acute respiratory syndrome coronavirus 2
  REGION 1..11: note = Table B: HLA-DQA1*05:01-B1*03:01L HLA-DRB1*01:03L HLA-DRB1*04:02L HLA-DQA1*01:02-B1*06:02L HLA-DRB1*14:01L HLA-DQA1*02:01-B1*03:03L
YLEGSVRVVTT

SEQ ID NO: 10952 - protein, 12 aa, Severe acute respiratory syndrome coronavirus 2
  REGION 1..12: note = Table B: HLA-DQA1*05:01-B1*03:01L HLA-DQA1*05:05-B1*03:19L HLA-DPA1*03:01-B1*105:01L HLA-DQA1*05:05-B1*03:01L
LEGSVRVVTTFD

SEQ ID NO: 10953 - protein, 13 aa, Severe acute respiratory syndrome coronavirus 2
  REGION 1..13: note = Table B: HLA-DQA1*05:01-B1*03:01L HLA-DRB1*13:02L HLA-DRB1*04:02L HLA-DRB1*04:04L HLA-DPA1*03:01-B1*04:02L HLA-DRB1*14:01L HLA-DRB1*08:01L HLA-DQA1*05:05-B1*03:01L HLA-DPA1*01:02-B1*04:01L
VVTTFDSEYCRHG

SEQ ID NO: 10954 - protein, 16 aa, Severe acute respiratory syndrome coronavirus 2
  REGION 1..16: note = Table B: HLA-DQA1*05:01-B1*03:01L HLA-DRB1*13:02L HLA-DRB1*01:03L HLA-DRB1*14:01L HLA-DRB1*08:01L HLA-DRB1*12:01L HLA-DRB3*01:01L HLA-DPA1*03:01-B1*105:01L HLA-DQA1*05:05-B1*03:01L HLA-DRB1*16:01L HLA-DRB1*15:03L
DSEYCRHGTCERSEAG

SEQ ID NO: 10955 - protein, 12 aa, Severe acute respiratory syndrome coronavirus 2
  REGION 1..12: note = Table B: HLA-DQA1*05:01-B1*03:01L HLA-DQA1*01:02-B1*06:02L HLA-DQA1*05:05-B1*03:19L HLA-DQA1*05:05-B1*03:01L HLA-DQA1*01:03-B1*06:01L
RSEAGVCVSTSG

SEQ ID NO: 10956 - protein, 15 aa, Severe acute respiratory syndrome coronavirus 2
  REGION 1..15: note = Table B: HLA-DQA1*05:01-B1*03:01L HLA-DRB1*03:01L HLA-DRB1*11:01L
SGRWVLNNDYYRSLP

SEQ ID NO: 10957 - protein, 12 aa, Severe acute respiratory syndrome coronavirus 2
  REGION 1..12: note = Table B: HLA-DQA1*05:01-B1*03:01L HLA-DRB1*04:03L HLA-DRB1*01:03L HLA-DRB1*04:02L HLA-DRB1*04:05L HLA-DQA1*01:02-B1*06:02L HLA-DRB1*01:02L HLA-DPA1*01:03-B1*03:01L HLA-DPA1*03:01-B1*04:02L
  REGION 1..12: note = CONT. FROM ABOVE: HLA-DRB1*14:01L HLA-DRB1*08:01L HLA-DQA1*05:01 -B1*02:01L HLA-DPA1*01:03-B1*04:01L HLA-DPA1*01:03-B1*04:02L HLA -DRB1*12:01L HLA-DPA1*03:01-B1*105:01L HLA-DQA1*03:01-B1*03:02L HLA-DPA1*01:03-B1*02:01L HLA-DRB1*16:01L
  REGION 1..12: note = CONT. FROM ABOVE: HLA-DQA1*01:03-B1*06:01L HLA-DRB1*04:08L HLA-D QA1*02:01-B1*03:03L HLA-DRB1*15:03L
VLNNDYYRSLPG

SEQ ID NO: 10958 - protein, 11 aa, Severe acute respiratory syndrome coronavirus 2
  REGION 1..11: note = Table B: HLA-DQA1*05:01-B1*03:01L HLA-DQA1*05:01-B1*02:01L HLA-DPA1*03:01-B1*105:01L HLA-DQA1*02:01-B1*03:03L HLA-DRB1*15:03L
GVDAVNLLTNM

SEQ ID NO: 10959 - protein, 12 aa, Severe acute respiratory syndrome coronavirus 2
  REGION 1..12: note = Table B: HLA-DQA1*05:01-B1*03:01L HLA-DRB1*13:02L HLA-DQA1*01:02-B1*06:02L HLA-DRB1*01:02L HLA-DRB3*02:01L HLA-DPA1*01:03-B1*03:01L HLA-DRB1*14:01L HLA-DQA1*05:01-B1*02:01L HLA-DPA1*01:03-B1*04:01L
  REGION 1..12: note = CONT. FROM ABOVE: HLA-DPA1*03:01-B1*105:01L HLA-DRB1*14:17L HLA- DRB1*16:01L HLA-DQA1*02:01-B1*03:03L HLA-DRB1*15:03L
AVNLLTNMFTPL

SEQ ID NO: 10960 - protein, 15 aa, Severe acute respiratory syndrome coronavirus 2
  REGION 1..15: note = Table B: HLA-DQA1*05:01-B1*03:01L HLA-DRB1*13:02L HLA-DRB1*01:03L HLA-DRB1*08:04L HLA-DPA1*01:03-B1*03:01L HLA-DQA1*05:05-B1*03:19L HLA-DPA1*02:01-B1*13:01L HLA-DQA1*03:01-B1*03:02L HLA-DPA1*01:03-B1*02:01L
  REGION 1..15: note = CONT. FROM ABOVE: HLA-DQA1*05:05-B1*03:01L HLA-DRB1*10:01L HLA-D QA1*02:01-B1*03:03L
VNLLTNMFTPLIQPI

SEQ ID NO: 10961 - protein, 12 aa, Severe acute respiratory syndrome coronavirus 2
  REGION 1..12: note = Table B: HLA-DQA1*05:01-B1*03:01L HLA-DRB1*04:05L HLA-DQA1*01:02-B1*06:02L HLA-DRB1*01:02L HLA-DQA1*05:05-B1*03:19L HLA-DRB1*04:10L HLA-DRB1*12:01L HLA-DPA1*03:01-B1*105:01L HLA-DQA1*05:05-B1*03:01L
  REGION 1..12: note = CONT. FROM ABOVE: HLA-DRB1*10:01L HLA-DRB1*16:01L HLA-DQA1*01:03 -B1*06:01L HLA-DRB1*04:08L
FTPLIQPIGALD

SEQ ID NO: 10962 - protein, 12 aa, Severe acute respiratory syndrome coronavirus 2
  REGION 1..12: note = Table B: HLA-DQA1*05:01-B1*03:01L HLA-DRB1*01:02L HLA-DQA1*05:01-B1*02:01L HLA-DRB1*12:01L HLA-DPA1*03:01-B1*105:01L HLA-DRB1*16:01L HLA-DQA1*02:01-B1*03:03L HLA-DRB1*15:03L
PLIQPIGALDIS

SEQ ID NO: 10963 - protein, 11 aa, Severe acute respiratory syndrome coronavirus 2
  REGION 1..11: note = Table B: HLA-DQA1*05:01-B1*03:01L HLA-DQA1*01:02-B1*06:02L HLA-DQA1*05:05-B1*03:19L HLA-DQA1*05:05-B1*03:01L HLA-DQA1*01:03-B1*06:01L HLA-DQA1*02:01-B1*03:03L
ISASIVAGGIV

SEQ ID NO: 10964 - protein, 12 aa, Severe acute respiratory syndrome coronavirus 2
  REGION 1..12: note = Table B: HLA-DQA1*05:01-B1*03:01L HLA-DRB1*13:02L HLA-DRB1*01:03L HLA-DRB1*04:02L HLA-DRB1*04:04L HLA-DRB1*04:05L HLA-DRB1*01:02L HLA-DRB4*03:01NL HLA-DRB1*08:04L HLA-DRB1*08:77L HLA-DRB3*02:01L HLA-DPA1*03:01-B1*04:02L HLA-DRB1*14:01L
  REGION 1..12: note = CONT. FROM ABOVE: HLA-DRB1*11:03L HLA-DRB1*11:04L HLA-DQA1*01:01 -B1*05:01L HLA-DRB1*08:01L HLA-DRB5*01:01L HLA-DRB4*01:01L HLA-D RB1*04:10L HLA-DRB1*09:01L HLA-DPA1*01:03-B1*04:02L HLA-DRB1*12: 01L HLA-DRB1*12:02L HLA-DRB1*14:54L HLA-DPA1*01:03-B1*104:01L
  REGION 1..12: note = CONT. FROM ABOVE: HLA-DQA1*05:05-B1*03:01L HLA-DRB1*14:17L HLA-D PA1*01:02-B1*04:01L HLA-DRB1*07:01L HLA-DRB1*10:01L HLA-DRB1*04: 08L HLA-DRB1*08:03L
TPVYSFLPGVYS

SEQ ID NO: 10965 - protein, 11 aa, Severe acute respiratory syndrome coronavirus 2
  REGION 1..11: note = Table B: HLA-DQA1*05:01-B1*03:01L HLA-DRB1*04:05L HLA-DQA1*01:02-B1*06:02L HLA-DRB1*01:02L HLA-DRB1*08:04L HLA-DRB3*02:01L HLA-DPA1*01:03-B1*03:01L HLA-DPA1*03:01-B1*04:02L HLA-DRB1*14:02L
  REGION 1..11: note = CONT. FROM ABOVE: HLA-DPA1*01:02-B1*04:01L HLA-DRB1*04:08L HLA-D RB1*15:03L
YLTNDVSFLAH

SEQ ID NO: 10966 - protein, 11 aa, Severe acute respiratory syndrome coronavirus 2
  REGION 1..11: note = Table B: HLA-DQA1*05:01-B1*03:01L HLA-DRB1*04:02L HLA-DQA1*01:02-B1*06:02L HLA-DQA1*05:05-B1*03:01L HLA-DRB1*14:17L HLA-DRB1*16:01L
TNDVSFLAHIQ

SEQ ID NO: 10967 - protein, 11 aa, Severe acute respiratory syndrome coronavirus 2
  REGION 1..11: note = Table B: HLA-DQA1*05:01-B1*03:01L HLA-DRB1*04:03L HLA-DQA1*01:02-B1*06:02L HLA-DPA1*03:01-B1*105:01L HLA-DQA1*03:01-B1*03:02L HLA-DQA1*01:03-B1*06:01L HLA-DQA1*02:01-B1*03:03L
IAYIICISTKH

SEQ ID NO: 10968 - protein, 14 aa, Severe acute respiratory syndrome coronavirus 2
  REGION 1..14: note = Table B: HLA-DQA1*05:01-B1*03:01L HLA-DRB1*13:03L HLA-DRB1*11:04L HLA-DRB1*11:01L
TKHFYWFFSNYLKR

SEQ ID NO: 10969 - protein, 14 aa, Severe acute respiratory syndrome coronavirus 2
  REGION 1..14: note = Table B: HLA-DQA1*05:01-B1*03:01L HLA-DRB1*04:01L HLA-DRB1*11:04L HLA-DRB1*11:01L
KHFYWFFSNYLKRR

SEQ ID NO: 10970 - protein, 12 aa, Severe acute respiratory syndrome coronavirus 2
  REGION 1..12: note = Table B: HLA-DQA1*05:01-B1*03:01L HLA-DQA1*05:05-B1*03:19L HLA-DPA1*01:03-B1*04:01L HLA-DPA1*01:03-B1*04:02L HLA-DQA1*05:05-B1*03:01L
VFNGVSFSTFEE

SEQ ID NO: 10971 - protein, 11 aa, Severe acute respiratory syndrome coronavirus 2
  REGION 1..11: note = Table B: HLA-DQA1*05:01-B1*03:01L HLA-DRB1*04:03L HLA-DQA1*01:02-B1*06:02L HLA-DPA1*03:01-B1*04:02L HLA-DQA1*05:05-B1*03:19L HLA-DPA1*01:03-B1*04:01L HLA-DPA1*01:03-B1*04:02L HLA-DRB1*12:01L
  REGION 1..11: note = CONT. FROM ABOVE: HLA-DPA1*02:01-B1*13:01L HLA-DPA1*03:01-B1*105 :01L HLA-DQA1*03:01-B1*03:02L HLA-DPA1*01:02-B1*04:01L HLA-DRB1* 16:01L HLA-DQA1*02:01-B1*03:03L HLA-DRB1*15:03L
VSFSTFEEAAL

SEQ ID NO: 10972 - protein, 13 aa, Severe acute respiratory syndrome coronavirus 2
  REGION 1..13: note = Table B: HLA-DQA1*05:01-B1*03:01L HLA-DQA1*05:05-B1*03:19L HLA-DQA1*05:05-B1*03:01L
EEAALCTFLLNKE

SEQ ID NO: 10973 - protein, 10 aa, Severe acute respiratory syndrome coronavirus 2
  REGION 1..10: note = Table B: HLA-DQA1*05:01-B1*03:01L HLA-DRB1*13:02L HLA-DRB1*01:03L HLA-DRB1*01:02L HLA-DRB1*14:01L HLA-DRB1*12:01L HLA-DQA1*03:01-B1*03:02L HLA-DPA1*01:02-B1*04:01L HLA-DRB1*16:01L HLA-DQA1*02:01-B1*03:03L HLA-DRB1*15:03L
FLLNKEMYLK

SEQ ID NO: 10974 - protein, 14 aa, Severe acute respiratory syndrome coronavirus 2
  REGION 1..14: note = Table B: HLA-DQA1*05:01-B1*03:01L HLA-DRB1*04:03L HLA-DRB1*08:04L
YLKLRSDVLLPLTQ

SEQ ID NO: 10975 - protein, 10 aa, Severe acute respiratory syndrome coronavirus 2
  REGION 1..10: note = Table B: HLA-DQA1*05:01-B1*03:01L HLA-DRB1*13:03L HLA-DQA1*01:02-B1*06:02L HLA-DRB4*03:01NL HLA-DRB1*08:77M HLA-DPA1*01:03-B1*03:01M HLA-DPA1*03:01-B1*04:02L HLA-DRB1*03:01L HLA-DRB1*11:02L HLA-DQA1*01-B1*05L
  REGION 1..10: note = CONT. FROM ABOVE: HLA-DQA1*05:05-B1*03:19M HLA-DQA1*05:01-B1*02: 01M HLA-DRB4*01:01L HLA-DPA1*01:03-B1*04:01L HLA-DQA1*05:05-B1*0 3:116L HLA-DPA1*01:03-B1*04:02L HLA-DRB1*12:01L HLA-DPA1*01:03-B 1*104:01M HLA-DRB1*10:01L HLA-DRB1*16:01M HLA-DRB1*15:03L
SDVLLPLTQY

SEQ ID NO: 10976 - protein, 10 aa, Severe acute respiratory syndrome coronavirus 2
  REGION 1..10: note = Table B: HLA-DQA1*05:01-B1*03:01L HLA-DRB1*04:03L HLA-DRB1*13:03L HLA-DRB1*01:03L HLA-DQA1*01:02-B1*06:02L HLA-DRB1*08:77L HLA-DPA1*01:03-B1*03:01L HLA-DPA1*03:01-B1*04:02L HLA-DRB1*03:01L HLA-DRB1*14:01L
  REGION 1..10: note = CONT. FROM ABOVE: HLA-DRB1*11:02L HLA-DRB1*14:02L HLA-DQA1*01-B1 *05L HLA-DQA1*05:05-B1*03:19M HLA-DQA1*05:01-B1*02:01L HLA-DRB4* 01:01L HLA-DPA1*01:03-B1*04:01L HLA-DQA1*05:05-B1*03:116L HLA-DP A1*01:03-B1*04:02L HLA-DRB1*12:01L HLA-DPA1*02:01-B1*13:01L
  REGION 1..10: note = CONT. FROM ABOVE: HLA-DPA1*03:01-B1*105:01L HLA-DPA1*01:03-B1*10 4:01L HLA-DQA1*05:05-B1*03:01L HLA-DPA1*01:02-B1*04:01L HLA-DRB1 *10:01L HLA-DRB1*16:01L HLA-DQA1*01:03-B1*06:01L HLA-DRB1*08:02L HLA-DQA1*02:01-B1*03:03L HLA-DRB1*15:03L
LLPLTQYNRY

SEQ ID NO: 10977 - protein, 10 aa, Severe acute respiratory syndrome coronavirus 2
  REGION 1..10: note = Table B: HLA-DQA1*05:01-B1*03:01L HLA-DRB1*01:03L HLA-DQA1*01:02-B1*06:02L HLA-DRB1*03:01L HLA-DQA1*05:05-B1*03:19L HLA-DQA1*05:01-B1*02:01L HLA-DRB1*16:01L HLA-DQA1*01:03-B1*06:01L
  REGION 1..10: note = CONT. FROM ABOVE: HLA-DQA1*02:01-B1*03:03L
NRYLALYNKY

SEQ ID NO: 10978 - protein, 10 aa, Severe acute respiratory syndrome coronavirus 2
  REGION 1..10: note = Table B: HLA-DQA1*05:01-B1*03:01L HLA-DRB1*01:03L HLA-DQA1*01:02-B1*06:02L HLA-DRB1*08:77L HLA-DPA1*01:03-B1*03:01L HLA-DPA1*03:01-B1*04:02L HLA-DRB1*03:01L HLA-DRB1*14:01L HLA-DRB1*11:02L HLA-DRB1*14:02L
  REGION 1..10: note = CONT. FROM ABOVE: HLA-DQA1*01-B1*05L HLA-DQA1*05:05-B1*03:19M HL A-DQA1*05:01-B1*02:01L HLA-DRB4*01:01L HLA-DPA1*01:03-B1*04:01L HLA-DQA1*05:05-B1*03:116L HLA-DPA1*01:03-B1*04:02L HLA-DRB1*12:0 1L HLA-DPA1*02:01-B1*13:01L HLA-DPA1*03:01-B1*105:01L
  REGION 1..10: note = CONT. FROM ABOVE: HLA-DPA1*01:03-B1*104:01L HLA-DRB1*10:01L HLA- DRB1*16:01L HLA-DQA1*01:03-B1*06:01L HLA-DQA1*02:01-B1*03:03L HL A-DRB1*15:03L
YLALYNKYKY

SEQ ID NO: 10979 - protein, 11 aa, Severe acute respiratory syndrome coronavirus 2
  REGION 1..11: note = Table B: HLA-DQA1*05:01-B1*03:01L HLA-DRB1*01:03L HLA-DPA1*03:01-B1*04:02L HLA-DRB1*03:01L HLA-DRB1*11:02L HLA-DRB1*14:02L HLA-DRB4*01:01L HLA-DPA1*01:03-B1*04:02L HLA-DPA1*02:01-B1*13:01L HLA-DPA1*03:01-B1*105:01L
  REGION 1..11: note = CONT. FROM ABOVE: HLA-DRB1*10:01L HLA-DQA1*01:03-B1*06:01L HLA-D RB1*15:03L
YFSGAMDTTSY

SEQ ID NO: 10980 - protein, 10 aa, Severe acute respiratory syndrome coronavirus 2
  REGION 1..10: note = Table B: HLA-DQA1*05:01-B1*03:01L HLA-DRB1*04:03L HLA-DRB1*13:03L HLA-DRB1*04:02L HLA-DRB4*03:01NL HLA-DRB1*12:01L HLA-DQA1*03:01-B1*03:02L HLA-DQA1*05:05-B1*03:01L HLA-DRB1*14:17L HLA-DQA1*01:03-B1*06:01L
  REGION 1..10: note = CONT. FROM ABOVE: HLA-DQA1*02:01-B1*03:03L
SGAMDTTSYR

SEQ ID NO: 10981 - protein, 11 aa, Severe acute respiratory syndrome coronavirus 2
  REGION 1..11: note = Table B: HLA-DQA1*05:01-B1*03:01L HLA-DRB1*13:02L HLA-DRB1*04:05L HLA-DQA1*01:02-B1*06:02L HLA-DRB1*01:02L HLA-DRB1*08:77L HLA-DPA1*01:03-B1*03:01L HLA-DPA1*03:01-B1*04:02L HLA-DQA1*05:05-B1*03:19L
  REGION 1..11: note = CONT. FROM ABOVE: HLA-DPA1*01:03-B1*04:01L HLA-DRB1*04:10L HLA-D PA1*01:03-B1*04:02L HLA-DQA1*05:05-B1*03:01L HLA-DQA1*01:03-B1*0 6:01L HLA-DRB1*04:08L HLA-DRB1*15:03L
GAMDTTSYREA

SEQ ID NO: 10982 - protein, 11 aa, Severe acute respiratory syndrome coronavirus 2
  REGION 1..11: note = Table B: HLA-DQA1*05:01-B1*03:01L HLA-DQA1*01:02-B1*06:02L HLA-DQA1*05:05-B1*03:19L HLA-DPA1*01:03-B1*04:02L HLA-DQA1*05:05-B1*03:01L
AMDTTSYREAA

SEQ ID NO: 10983 - protein, 13 aa, Severe acute respiratory syndrome coronavirus 2
  REGION 1..13: note = Table B: HLA-DQA1*05:01-B1*03:01L HLA-DRB1*13:02L HLA-DRB1*04:04L HLA-DQA1*01:02-B1*06:02L HLA-DRB1*01:01L HLA-DPA1*01:03-B1*03:01L HLA-DRB1*11:04L HLA-DRB1*08:01L HLA-DRB1*11:01L HLA-DRB3*01:01L HLA-DPA1*02:01-B1*13:01L
  REGION 1..13: note = CONT. FROM ABOVE: HLA-DPA1*03:01-B1*105:01L HLA-DQA1*03:01-B1*03 :02L HLA-DPA1*01:02-B1*04:01L HLA-DRB1*07:01L HLA-DQA1*02:01-B1* 03:03L
TSYREAACCHLAK

SEQ ID NO: 10984 - protein, 13 aa, Severe acute respiratory syndrome coronavirus 2
  REGION 1..13: note = Table B: HLA-DQA1*05:01-B1*03:01L HLA-DPA1*03:01-B1*04:02L HLA-DPA1*02:01-B1*13:01L HLA-DPA1*03:01-B1*105:01L HLA-DQA1*05:05-B1*03:01L HLA-DQA1*01:03-B1*06:01L
ALNDFSNSGSDVL

SEQ ID NO: 10985 - protein, 14 aa, Severe acute respiratory syndrome coronavirus 2
  REGION 1..14: note = Table B: HLA-DQA1*05:01-B1*03:01L HLA-DPA1*03:01-B1*105:01L
DFSNSGSDVLYQPP

SEQ ID NO: 10986 - protein, 14 aa, Severe acute respiratory syndrome coronavirus 2
  REGION 1..14: note = Table B: HLA-DQA1*05:01-B1*03:01L HLA-DPA1*03:01-B1*105:01L
FSNSGSDVLYQPPQ

SEQ ID NO: 10987 - protein, 10 aa, Severe acute respiratory syndrome coronavirus 2
  REGION 1..10: note = Table B: HLA-DQA1*05:01-B1*03:01L HLA-DPA1*03:01-B1*04:02L HLA-DQA1*03:01-B1*03:02L HLA-DPA1*01:02-B1*04:01L HLA-DRB1*16:01L HLA-DQA1*01:03-B1*06:01L HLA-DQA1*02:01-B1*03:03L
AVLQSGFRKM

SEQ ID NO: 10988 - protein, 12 aa, Severe acute respiratory syndrome coronavirus 2
  REGION 1..12: note = Table B: HLA-DQA1*05:01-B1*03:01L HLA-DRB1*04:03L HLA-DRB1*01:03L HLA-DRB1*04:02L HLA-DRB1*04:04L HLA-DRB1*04:05L HLA-DQA1*01:02-B1*06:02L HLA-DRB1*01:02L HLA-DRB1*14:01L HLA-DRB1*08:01L HLA-DRB1*12:01L HLA-DRB1*14:17L HLA-DRB1*16:01L
  REGION 1..12: note = CONT. FROM ABOVE: HLA-DRB1*04:08L HLA-DQA1*02:01-B1*03:03L HLA-D RB1*15:03L
FRKMAFPSGKVE

SEQ ID NO: 10989 - protein, 14 aa, Severe acute respiratory syndrome coronavirus 2
  REGION 1..14: note = Table B: HLA-DQA1*05:01-B1*03:01L
TSEDMLNPNYEDLL

SEQ ID NO: 10990 - protein, 12 aa, Severe acute respiratory syndrome coronavirus 2
  REGION 1..12: note = Table B: HLA-DQA1*05:01-B1*03:01L HLA-DRB1*01:03L HLA-DRB1*04:05L HLA-DQA1*01:02-B1*06:02L HLA-DRB1*01:02L HLA-DRB1*08:01L HLA-DPA1*03:01-B1*105:01L HLA-DQA1*05:05-B1*03:01L HLA-DPA1*01:02-B1*04:01L
  REGION 1..12: note = CONT. FROM ABOVE: HLA-DRB1*16:01L HLA-DRB1*04:08L
YEDLLIRKSNHN

SEQ ID NO: 10991 - protein, 13 aa, Severe acute respiratory syndrome coronavirus 2
  REGION 1..13: note = Table B: HLA-DQA1*05:01-B1*03:01L HLA-DRB1*04:03L HLA-DRB1*13:03L HLA-DRB3*02:01L HLA-DRB1*11:04L HLA-DQA1*05:01-B1*02:01L HLA-DRB1*12:02L HLA-DRB3*01:01L HLA-DPA1*02:01-B1*13:01L HLA-DPA1*03:01-B1*105:01L
  REGION 1..13: note = CONT. FROM ABOVE: HLA-DRB1*14:17L HLA-DPA1*01:02-B1*04:01L
EDLLIRKSNHNFL

SEQ ID NO: 10992 - protein, 14 aa, Severe acute respiratory syndrome coronavirus 2
  REGION 1..14: note = Table B: HLA-DQA1*05:01-B1*03:01L HLA-DRB1*13:02L HLA-DRB1*04:05L HLA-DRB1*01:02L HLA-DPA1*01:03-B1*03:01L HLA-DRB1*08:01L HLA-DRB1*12:01L HLA-DPA1*02:01-B1*13:01L HLA-DPA1*03:01-B1*105:01L HLA-DPA1*01:02-B1*04:01L
  REGION 1..14: note = CONT. FROM ABOVE: HLA-DRB1*16:01L HLA-DRB1*04:08L HLA-DRB1*15:03 L
IRKSNHNFLVQAGN

SEQ ID NO: 10993 - protein, 11 aa, Severe acute respiratory syndrome coronavirus 2
  REGION 1..11: note = Table B: HLA-DQA1*05:01-B1*03:01L HLA-DRB1*13:03L HLA-DRB1*01:03L HLA-DRB1*04:02L HLA-DRB1*04:05L HLA-DQA1*01:02-B1*06:02L HLA-DRB4*03:01NL HLA-DPA1*01:03-B1*03:01L HLA-DQA1*01:01-B1*05:01L
  REGION 1..11: note = CONT. FROM ABOVE: HLA-DRB1*08:01L HLA-DQA1*05:05-B1*03:19L HLA-D RB1*04:10L HLA-DRB1*12:01L HLA-DPA1*03:01-B1*105:01L HLA-DRB1*14 :54L HLA-DQA1*05:05-B1*03:01L HLA-DRB1*14:17L HLA-DRB1*16:01L HL A-DQA1*01:03-B1*06:01L HLA-DRB1*04:08L
HNFLVQAGNVQ

SEQ ID NO: 10994 - protein, 10 aa, Severe acute respiratory syndrome coronavirus 2
  REGION 1..10: note = Table B: HLA-DQA1*05:01-B1*03:01L HLA-DRB1*04:03L HLA-DRB1*13:02L HLA-DRB1*13:03L HLA-DRB1*01:03L HLA-DRB1*04:02L HLA-DRB1*04:04L HLA-DQA1*01:02-B1*06:02L HLA-DRB1*01:01L HLA-DRB1*01:02L HLA-DRB4*03:01NL HLA-DRB1*08:77L HLA-DRB3*02:01L
  REGION 1..10: note = CONT. FROM ABOVE: HLA-DRB1*14:01L HLA-DRB1*11:04L HLA-DRB1*14:02 L HLA-DRB1*08:01L HLA-DRB5*01:01L HLA-DQA1*05:05-B1*03:19L HLA-D PA1*01:03-B1*04:02L HLA-DRB1*12:01L HLA-DRB1*12:02L HLA-DPA1*03: 01-B1*105:01L HLA-DQA1*03:01-B1*03:02M HLA-DRB1*14:54L
  REGION 1..10: note = CONT. FROM ABOVE: HLA-DQA1*05:05-B1*03:01L HLA-DRB1*14:17L HLA-D PA1*01:02-B1*04:01L HLA-DRB1*16:01L HLA-DQA1*01:03-B1*06:01L HLA -DQA1*02:01-B1*03:03L HLA-DRB1*15:01L HLA-DRB1*15:03L
LVQAGNVQLR

SEQ ID NO: 10995 - protein, 10 aa, Severe acute respiratory syndrome coronavirus 2
  REGION 1..10: note = Table B: HLA-DQA1*05:01-B1*03:01L HLA-DQA1*01:02-B1*06:02L HLA-DQA1*03:01-B1*03:02L HLA-DQA1*01:03-B1*06:01L HLA-DQA1*02:01-B1*03:03L
AGNVQLRVIG

SEQ ID NO: 10996 - protein, 12 aa, Severe acute respiratory syndrome coronavirus 2
  REGION 1..12: note = Table B: HLA-DQA1*05:01-B1*03:01L HLA-DRB1*13:02L HLA-DRB1*04:04L HLA-DRB1*04:05L HLA-DQA1*01:02-B1*06:02L HLA-DRB1*01:02L HLA-DRB4*03:01NL HLA-DRB1*08:04L HLA-DPA1*01:03-B1*03:01L HLA-DRB1*11:03L HLA-DRB1*11:04L
  REGION 1..12: note = CONT. FROM ABOVE: HLA-DRB1*11:01L HLA-DRB1*04:10L HLA-DRB1*12:01 L HLA-DRB3*01:01L HLA-DPA1*02:01-B1*13:01L HLA-DPA1*03:01-B1*105 :01L HLA-DRB1*14:54L HLA-DPA1*01:03-B1*104:01L HLA-DQA1*05:05-B1 *03:01L HLA-DPA1*01:02-B1*04:01L HLA-DQA1*01:03-B1*06:01L
  REGION 1..12: note = CONT. FROM ABOVE: HLA-DRB1*04:08L HLA-DRB1*08:03L HLA-DRB1*15:03 L
VQLRVIGHSMQN

SEQ ID NO: 10997 - protein, 15 aa, Severe acute respiratory syndrome coronavirus 2
  REGION 1..15: note = Table B: HLA-DQA1*05:01-B1*03:01L HLA-DRB1*13:02L HLA-DRB1*04:04L HLA-DRB1*08:04L HLA-DPA1*02:01-B1*13:01L HLA-DRB1*08:03L
NPKTPKYKFVRIQPG

SEQ ID NO: 10998 - protein, 13 aa, Severe acute respiratory syndrome coronavirus 2
  REGION 1..13: note = Table B: HLA-DQA1*05:01-B1*03:01L HLA-DRB1*04:03L HLA-DRB1*08:04L HLA-DPA1*03:01-B1*105:01L
TPKYKFVRIQPGQ

SEQ ID NO: 10999 - protein, 10 aa, Severe acute respiratory syndrome coronavirus 2
  REGION 1..10: note = Table B: HLA-DQA1*05:01-B1*03:01L HLA-DRB1*04:03L HLA-DQA1*01:02-B1*06:02L HLA-DQA1*03:01-B1*03:02L HLA-DRB1*14:17L HLA-DQA1*01:03-B1*06:01L HLA-DQA1*02:01-B1*03:03L
KFVRIQPGQT

SEQ ID NO: 11000 - protein, 10 aa, Severe acute respiratory syndrome coronavirus 2
  REGION 1..10: note = Table B: HLA-DQA1*05:01-B1*03:01L HLA-DRB1*04:03L HLA-DRB1*04:02L HLA-DRB1*01:02L HLA-DRB4*03:01NL HLA-DRB1*14:01L HLA-DRB1*12:01L HLA-DQA1*03:01-B1*03:02L HLA-DRB1*14:54L HLA-DRB1*14:17L HLA-DRB1*16:01L HLA-DQA1*02:01-B1*03:03L
  REGION 1..10: note = CONT. FROM ABOVE: HLA-DRB1*15:03L
VRIQPGQTFS

SEQ ID NO: 11001 - protein, 11 aa, Severe acute respiratory syndrome coronavirus 2
  REGION 1..11: note = Table B: HLA-DQA1*05:01-B1*03:01L HLA-DPA1*03:01-B1*105:01L HLA-DQA1*05:05-B1*03:01L HLA-DQA1*02:01-B1*03:03L
VYQCAMRPNFT

SEQ ID NO: 11002 - protein, 10 aa, Severe acute respiratory syndrome coronavirus 2
  REGION 1..10: note = Table B: HLA-DQA1*05:01-B1*03:01L HLA-DRB1*13:03L HLA-DRB1*01:03L HLA-DQA1*01:02-B1*06:02L HLA-DPA1*01:03-B1*03:01L HLA-DRB1*14:01L HLA-DPA1*03:01-B1*105:01L HLA-DQA1*02:01-B1*03:03L
RPNFTIKGSF

SEQ ID NO: 11003 - protein, 12 aa, Severe acute respiratory syndrome coronavirus 2
  REGION 1..12: note = Table B: HLA-DQA1*05:01-B1*03:01L HLA-DQA1*05:05-B1*03:19L HLA-DPA1*03:01-B1*105:01L HLA-DQA1*05:05-B1*03:01L HLA-DQA1*02:01-B1*03:03L
TIKGSFLNGSCG

SEQ ID NO: 11004 - protein, 13 aa, Severe acute respiratory syndrome coronavirus 2
  REGION 1..13: note = Table B: HLA-DQA1*05:01-B1*03:01L HLA-DQA1*01:02-B1*06:02L
KGSFLNGSCGSVG

SEQ ID NO: 11005 - protein, 14 aa, Severe acute respiratory syndrome coronavirus 2
  REGION 1..14: note = Table B: HLA-DQA1*05:01-B1*03:01L HLA-DPA1*03:01-B1*105:01L
GSFLNGSCGSVGFN

SEQ ID NO: 11006 - protein, 14 aa, Severe acute respiratory syndrome coronavirus 2
  REGION 1..14: note = Table B: HLA-DQA1*05:01-B1*03:01L HLA-DRB1*13:02L HLA-DRB1*04:05L HLA-DRB1*08:04L HLA-DRB1*11:04L HLA-DRB3*01:01L HLA-DPA1*02:01-B1*13:01L HLA-DPA1*01:03-B1*104:01L
NIDYDCVSFCYMHH

SEQ ID NO: 11007 - protein, 12 aa, Severe acute respiratory syndrome coronavirus 2
  REGION 1..12: note = Table B: HLA-DQA1*05:01-B1*03:01L HLA-DQA1*01:02-B1*06:02L HLA-DRB1*01:02L HLA-DPA1*03:01-B1*105:01L HLA-DQA1*01:03-B1*06:01L HLA-DQA1*02:01-B1*03:03L
YMHHMELPTGVH

SEQ ID NO: 11008 - protein, 11 aa, Severe acute respiratory syndrome coronavirus 2
  REGION 1..11: note = Table B: HLA-DQA1*05:01-B1*03:01L HLA-DQA1*05:01-B1*02:01L HLA-DQA1*05:05-B1*03:01L HLA-DQA1*01:03-B1*06:01L
ELPTGVHAGTD

SEQ ID NO: 11009 - protein, 11 aa, Severe acute respiratory syndrome coronavirus 2
  REGION 1..11: note = Table B: HLA-DQA1*05:01-B1*03:01L HLA-DRB1*01:03L HLA-DRB1*04:02L HLA-DQA1*01:02-B1*06:02L HLA-DRB4*03:01NL HLA-DRB1*14:01L HLA-DQA1*01:01-B1*05:01L HLA-DRB5*01:01L HLA-DQA1*05:05-B1*03:19L HLA-DQA1*05:01-B1*02:01L
  REGION 1..11: note = CONT. FROM ABOVE: HLA-DQA1*05:05-B1*03:01L HLA-DPA1*01:02-B1*04: 01L HLA-DRB1*16:01L
LPTGVHAGTDL

SEQ ID NO: 11010 - protein, 11 aa, Severe acute respiratory syndrome coronavirus 2
  REGION 1..11: note = Table B: HLA-DQA1*05:01-B1*03:01L HLA-DRB1*04:02L HLA-DQA1*01:02-B1*06:02L HLA-DQA1*01-B1*05L HLA-DQA1*05:05-B1*03:01L HLA-DRB1*16:01L
GVHAGTDLEGN

SEQ ID NO: 11011 - protein, 11 aa, Severe acute respiratory syndrome coronavirus 2
  REGION 1..11: note = Table B: HLA-DQA1*05:01-B1*03:01L HLA-DQA1*05:05-B1*03:19L HLA-DRB1*15:03L
VHAGTDLEGNF

SEQ ID NO: 11012 - protein, 11 aa, Severe acute respiratory syndrome coronavirus 2
  REGION 1..11: note = Table B: HLA-DQA1*05:01-B1*03:01L HLA-DRB1*01:03L HLA-DRB1*11:02L HLA-DRB1*14:02L HLA-DPA1*01:03-B1*04:01L HLA-DPA1*01:03-B1*04:02L HLA-DRB1*12:01L HLA-DRB1*10:01L HLA-DRB1*15:03L
HAGTDLEGNFY

SEQ ID NO: 11013 - protein, 13 aa, Severe acute respiratory syndrome coronavirus 2
  REGION 1..13: note = Table B: HLA-DQA1*05:01-B1*03:01L HLA-DRB1*04:03L HLA-DRB1*04:02L HLA-DQA1*01:01-B1*05:01L HLA-DPA1*03:01-B1*105:01L HLA-DPA1*01:02-B1*04:01L HLA-DRB1*16:01L
DLEGNFYGPFVDR

SEQ ID NO: 11014 - protein, 14 aa, Severe acute respiratory syndrome coronavirus 2
  REGION 1..14: note = Table B: HLA-DQA1*05:01-B1*03:01L HLA-DPA1*01:03-B1*03:01L HLA-DPA1*01:03-B1*04:02L
EGNFYGPFVDRQTA

SEQ ID NO: 11015 - protein, 12 aa, Severe acute respiratory syndrome coronavirus 2
  REGION 1..12: note = Table B: HLA-DQA1*05:01-B1*03:01L HLA-DQA1*01:02-B1*06:02L HLA-DRB1*01:02L HLA-DPA1*03:01-B1*105:01L HLA-DQA1*01:03-B1*06:01L HLA-DRB1*15:03L
FYGPFVDRQTAQ

SEQ ID NO: 11016 - protein, 12 aa, Severe acute respiratory syndrome coronavirus 2
  REGION 1..12: note = Table B: HLA-DQA1*05:01-B1*03:01L HLA-DQA1*05:01-B1*02:01L HLA-DQA1*03:01-B1*03:02L HLA-DQA1*05:05-B1*03:01L HLA-DQA1*02:01-B1*03:03L
TAQAAGTDTTIT

SEQ ID NO: 11017 - protein, 13 aa, Severe acute respiratory syndrome coronavirus 2
  REGION 1..13: note = Table B: HLA-DQA1*05:01-B1*03:01L HLA-DRB1*04:03L HLA-DQA1*01:02-B1*06:02L HLA-DQA1*01:01-B1*05:01L HLA-DQA1*01-B1*05L HLA-DQA1*05:01-B1*02:01L HLA-DQA1*05:05-B1*03:01L HLA-DRB1*16:01L
  REGION 1..13: note = CONT. FROM ABOVE: HLA-DQA1*01:03-B1*06:01L HLA-DQA1*02:01-B1*03: 03L
AQAAGTDTTITVN

SEQ ID NO: 11018 - protein, 11 aa, Severe acute respiratory syndrome coronavirus 2
  REGION 1..11: note = Table B: HLA-DQA1*05:01-B1*03:01L HLA-DRB1*13:03L HLA-DQA1*01-B1*05L HLA-DPA1*01:02-B1*04:01L
GTDTTITVNVL

SEQ ID NO: 11019 - protein, 10 aa, Severe acute respiratory syndrome coronavirus 2
  REGION 1..10: note = Table B: HLA-DQA1*05:01-B1*03:01L HLA-DQA1*01:02-B1*06:02L HLA-DQA1*05:05-B1*03:19L HLA-DQA1*05:01-B1*02:01L HLA-DPA1*03:01-B1*105:01L HLA-DQA1*01:03-B1*06:01L HLA-DQA1*02:01-B1*03:03L
AAVINGDRWF

SEQ ID NO: 11020 - protein, 12 aa, Severe acute respiratory syndrome coronavirus 2
  REGION 1..12: note = Table B: HLA-DQA1*05:01-B1*03:01L HLA-DRB1*04:05L HLA-DQA1*01:02-B1*06:02L HLA-DRB1*01:02L HLA-DRB1*14:01L HLA-DRB1*08:01L HLA-DRB1*11:01L HLA-DPA1*01:03-B1*04:02L HLA-DRB1*12:01L HLA-DPA1*02:01-B1*13:01L
  REGION 1..12: note = CONT. FROM ABOVE: HLA-DQA1*03:01-B1*03:02L HLA-DQA1*01:03-B1*06: 01L HLA-DQA1*02:01-B1*03:03L HLA-DRB1*15:03L
GDRWFLNRFTTT

SEQ ID NO: 11021 - protein, 12 aa, Severe acute respiratory syndrome coronavirus 2
  REGION 1..12: note = Table B: HLA-DQA1*05:01-B1*03:01L HLA-DRB1*13:02L HLA-DRB1*01:03L HLA-DRB1*04:02L HLA-DRB1*04:05L HLA-DRB1*01:02L HLA-DPA1*01:03-B1*03:01L HLA-DPA1*03:01-B1*04:02L HLA-DQA1*01:01-B1*05:01L HLA-DQA1*05:05-B1*03:19L
  REGION 1..12: note = CONT. FROM ABOVE: HLA-DRB1*04:10L HLA-DRB1*12:01L HLA-DPA1*01:03 -B1*104:01L HLA-DQA1*05:05-B1*03:01L HLA-DPA1*01:02-B1*04:01L HL A-DRB1*04:08L HLA-DRB1*15:03L
LNRFTTTLNDFN

SEQ ID NO: 11022 - protein, 14 aa, Severe acute respiratory syndrome coronavirus 2
  REGION 1..14: note = Table B: HLA-DQA1*05:01-B1*03:01L HLA-DRB1*13:02L HLA-DRB1*01:03L HLA-DRB1*04:02L HLA-DRB1*04:04L HLA-DPA1*01:03-B1*03:01L HLA-DRB1*08:01L HLA-DRB1*04:10L HLA-DPA1*01:03-B1*04:02L HLA-DPA1*01:03-B1*104:01L
  REGION 1..14: note = CONT. FROM ABOVE: HLA-DQA1*05:05-B1*03:01L HLA-DRB1*04:08L
NRFTTTLNDFNLVA

SEQ ID NO: 11023 - protein, 10 aa, Severe acute respiratory syndrome coronavirus 2
  REGION 1..10: note = Table B: HLA-DQA1*05:01-B1*03:01M HLA-DRB1*13:03L HLA-DQA1*01:02-B1*06:02L HLA-DRB4*03:01NL HLA-DRB1*08:77M HLA-DPA1*01:03-B1*03:01M HLA-DPA1*03:01-B1*04:02L HLA-DRB1*03:01L HLA-DRB1*11:02L HLA-DQA1*01-B1*05L
  REGION 1..10: note = CONT. FROM ABOVE: HLA-DQA1*05:05-B1*03:19M HLA-DQA1*05:01-B1*02: 01M HLA-DRB4*01:01M HLA-DPA1*01:03-B1*04:01M HLA-DQA1*05:05-B1*0 3:116L HLA-DPA1*01:03-B1*04:02L HLA-DRB1*12:01L HLA-DPA1*01:03-B 1*104:01M HLA-DPA1*01:02-B1*04:01L HLA-DRB1*10:01L
  REGION 1..10: note = CONT. FROM ABOVE: HLA-DRB1*16:01M HLA-DRB1*15:03L
NDFNLVAMKY

SEQ ID NO: 11024 - protein, 13 aa, Severe acute respiratory syndrome coronavirus 2
  REGION 1..13: note = Table B: HLA-DQA1*05:01-B1*03:01L HLA-DRB1*13:02L HLA-DRB1*04:04L HLA-DPA1*01:03-B1*03:01L HLA-DRB1*14:01L HLA-DRB1*11:04L HLA-DRB1*11:01L HLA-DPA1*01:03-B1*04:01L HLA-DPA1*01:03-B1*04:02L HLA-DRB3*01:01L HLA-DRB1*14:54L
  REGION 1..13: note = CONT. FROM ABOVE: HLA-DPA1*01:03-B1*02:01L
AMKYNYEPLTQDH

SEQ ID NO: 11025 - protein, 11 aa, Severe acute respiratory syndrome coronavirus 2
  REGION 1..11: note = Table B: HLA-DQA1*05:01-B1*03:01L HLA-DRB1*04:05L HLA-DQA1*01:02-B1*06:02L HLA-DRB1*12:01L HLA-DPA1*03:01-B1*105:01L HLA-DPA1*01:02-B1*04:01L HLA-DRB1*15:03L
NYEPLTQDHVD

SEQ ID NO: 11026 - protein, 12 aa, Severe acute respiratory syndrome coronavirus 2
  REGION 1..12: note = Table B: HLA-DQA1*05:01-B1*03:01L HLA-DRB1*13:02L HLA-DRB1*13:03L HLA-DRB1*04:02L HLA-DRB1*04:05L HLA-DQA1*01:02-B1*06:02L HLA-DRB1*01:02L HLA-DRB1*08:04L HLA-DRB3*02:01L HLA-DPA1*01:03-B1*03:01L
  REGION 1..12: note = CONT. FROM ABOVE: HLA-DPA1*03:01-B1*04:02L HLA-DRB1*14:01L HLA-D RB1*14:02L HLA-DRB1*12:01L HLA-DPA1*02:01-B1*13:01L HLA-DPA1*03: 01-B1*105:01L HLA-DRB1*15:03L
YEPLTQDHVDIL

SEQ ID NO: 11027 - protein, 14 aa, Severe acute respiratory syndrome coronavirus 2
  REGION 1..14: note = Table B: HLA-DQA1*05:01-B1*03:01L HLA-DRB1*04:01L HLA-DRB1*13:02L HLA-DRB1*13:03L HLA-DRB1*01:03L HLA-DRB1*04:04L HLA-DQA1*01:02-B1*06:02L HLA-DRB1*01:02L HLA-DRB4*03:01NL HLA-DRB1*08:04L HLA-DRB1*08:77L HLA-DRB3*02:01L
  REGION 1..14: note = CONT. FROM ABOVE: HLA-DPA1*01:03-B1*03:01L HLA-DPA1*03:01-B1*04: 02L HLA-DRB1*03:01L HLA-DRB1*14:01L HLA-DRB1*11:03L HLA-DRB1*11: 04L HLA-DRB1*14:02L HLA-DQA1*01:01-B1*05:01L HLA-DRB1*08:01L HLA -DRB5*01:01L HLA-DQA1*05:05-B1*03:19L HLA-DRB1*13:01L
  REGION 1..14: note = CONT. FROM ABOVE: HLA-DRB4*01:01L HLA-DRB1*04:10L HLA-DRB1*09:01 L HLA-DPA1*01:03-B1*04:02L HLA-DRB1*12:01L HLA-DRB1*12:02L HLA-D RB3*01:01L HLA-DPA1*02:01-B1*13:01L HLA-DRB1*14:54L HLA-DQA1*05: 05-B1*03:01L HLA-DRB1*14:17L HLA-DPA1*01:02-B1*04:01L
  REGION 1..14: note = CONT. FROM ABOVE: HLA-DRB1*10:01L HLA-DQA1*01:03-B1*06:01L HLA-D RB1*04:08L HLA-DRB1*08:03L HLA-DRB1*15:03L
EPLTQDHVDILGPL

SEQ ID NO: 11028 - protein, 14 aa, Severe acute respiratory syndrome coronavirus 2
  REGION 1..14: note = Table B: HLA-DQA1*05:01-B1*03:01L HLA-DRB1*01:03L HLA-DPA1*01:03-B1*03:01L HLA-DRB1*14:01L HLA-DQA1*05:01-B1*02:01L HLA-DPA1*02:01-B1*13:01L HLA-DPA1*03:01-B1*105:01L HLA-DQA1*05:05-B1*03:01L
  REGION 1..14: note = CONT. FROM ABOVE: HLA-DRB1*04:08L
TQDHVDILGPLSAQ

SEQ ID NO: 11029 - protein, 14 aa, Severe acute respiratory syndrome coronavirus 2
  REGION 1..14: note = Table B: HLA-DQA1*05:01-B1*03:01L HLA-DPA1*03:01-B1*105:01L
ELLQNGMNGRTILG

SEQ ID NO: 11030 - protein, 12 aa, Severe acute respiratory syndrome coronavirus 2
  REGION 1..12: note = Table B: HLA-DQA1*05:01-B1*03:01L HLA-DRB1*13:02L HLA-DRB1*13:03L HLA-DRB1*01:03L HLA-DRB1*04:02L HLA-DRB1*04:05L HLA-DRB1*01:02L HLA-DRB4*03:01NL HLA-DRB1*08:04L HLA-DRB3*02:01L HLA-DPA1*01:03-B1*03:01L HLA-DRB1*14:01L
  REGION 1..12: note = CONT. FROM ABOVE: HLA-DPA1*01:03-B1*04:01L HLA-DPA1*01:03-B1*04: 02L HLA-DRB1*12:01L HLA-DPA1*02:01-B1*13:01L HLA-DRB1*14:54L HLA -DRB1*14:17L HLA-DRB1*16:01L HLA-DRB1*04:08L
SALLEDEFTPFD

SEQ ID NO: 11031 - protein, 14 aa, Severe acute respiratory syndrome coronavirus 2
  REGION 1..14: note = Table B: HLA-DQA1*05:01-B1*03:01L HLA-DRB1*01:03L HLA-DRB1*01:02L HLA-DRB1*08:04L HLA-DRB1*08:01L HLA-DQA1*05:05-B1*03:19L HLA-DPA1*01:03-B1*04:02L HLA-DRB1*16:01L HLA-DRB1*15:03L
FTPFDVVRQCSGVT

SEQ ID NO: 11032 - protein, 15 aa, Severe acute respiratory syndrome coronavirus 2
  REGION 1..15: note = Table B: HLA-DQA1*05:01-B1*03:01L HLA-DRB1*13:02L HLA-DRB1*01:03L HLA-DRB1*04:05L HLA-DRB3*02:01L HLA-DPA1*01:03-B1*03:01L HLA-DPA1*03:01-B1*04:02L HLA-DRB1*14:01L HLA-DQA1*05:05-B1*03:19L
  REGION 1..15: note = CONT. FROM ABOVE: HLA-DQA1*05:01-B1*02:01L HLA-DPA1*02:01-B1*13: 01L HLA-DPA1*01:03-B1*104:01L HLA-DRB1*07:01L
TPFDVVRQCSGVTFQ

SEQ ID NO: 11033 - protein, 14 aa, Severe acute respiratory syndrome coronavirus 2
  REGION 1..14: note = Table B: HLA-DQA1*05:01-B1*03:01L HLA-DPA1*03:01-B1*105:01L HLA-DQA1*05:05-B1*03:01L HLA-DQA1*02:01-B1*03:03L
DVVRQCSGVTFQSA

SEQ ID NO: 11034 - protein, 12 aa, Severe acute respiratory syndrome coronavirus 2
  REGION 1..12: note = Table B: HLA-DQA1*05:01-B1*03:01L HLA-DRB1*13:03L HLA-DRB1*01:03L HLA-DRB1*04:05L HLA-DQA1*01:02-B1*06:02L HLA-DRB1*01:02L HLA-DRB1*14:01L HLA-DRB1*11:04L HLA-DRB1*11:01L HLA-DRB1*12:01L HLA-DPA1*01:02-B1*04:01L HLA-DRB1*04:08L
  REGION 1..12: note = CONT. FROM ABOVE: HLA-DRB1*15:03L
VTFQSAVKRTIK

SEQ ID NO: 11035 - protein, 11 aa, Severe acute respiratory syndrome coronavirus 2
  REGION 1..11: note = Table B: HLA-DQA1*05:01-B1*03:01L HLA-DPA1*01:03-B1*04:02L HLA-DRB1*12:01L HLA-DQA1*03:01-B1*03:02L
FLYENAFLPFA

SEQ ID NO: 11036 - protein, 11 aa, Severe acute respiratory syndrome coronavirus 2
  REGION 1..11: note = Table B: HLA-DQA1*05:01-B1*03:01L HLA-DRB1*13:02L HLA-DRB3*02:01L HLA-DPA1*01:03-B1*03:01L HLA-DQA1*01-B1*05L HLA-DQA1*05:05-B1*03:19L HLA-DPA1*01:03-B1*04:01L HLA-DPA1*01:03-B1*04:02L HLA-DQA1*05:05-B1*03:01L
  REGION 1..11: note = CONT. FROM ABOVE: HLA-DRB1*16:01L HLA-DQA1*02:01-B1*03:03L
GIIAMSAFAMM

SEQ ID NO: 11037 - protein, 12 aa, Severe acute respiratory syndrome coronavirus 2
  REGION 1..12: note = Table B: HLA-DQA1*05:01-B1*03:01L HLA-DRB1*13:02L HLA-DRB1*04:02L HLA-DRB1*04:05L HLA-DQA1*01:02-B1*06:02L HLA-DRB1*01:02L HLA-DRB1*14:01L HLA-DRB1*08:01L HLA-DRB1*11:01L HLA-DRB1*12:01L HLA-DRB3*01:01L HLA-DPA1*03:01-B1*105:01L
  REGION 1..12: note = CONT. FROM ABOVE: HLA-DRB1*14:17L HLA-DRB1*04:08L HLA-DRB1*15:03 L
SAFAMMFVKHKH

SEQ ID NO: 11038 - protein, 12 aa, Severe acute respiratory syndrome coronavirus 2
  REGION 1..12: note = Table B: HLA-DQA1*05:01-B1*03:01L HLA-DRB1*13:02L HLA-DRB1*04:05L HLA-DQA1*01:02-B1*06:02L HLA-DRB1*14:01L HLA-DRB1*11:01L HLA-DRB1*12:01L HLA-DRB3*01:01L HLA-DPA1*03:01-B1*105:01L HLA-DQA1*02:01-B1*03:03L
  REGION 1..12: note = CONT. FROM ABOVE: HLA-DRB1*15:03L
AFAMMFVKHKHA

SEQ ID NO: 11039 - protein, 12 aa, Severe acute respiratory syndrome coronavirus 2
  REGION 1..12: note = Table B: HLA-DQA1*05:01-B1*03:01L HLA-DRB1*04:03L HLA-DPA1*03:01-B1*04:02L HLA-DRB1*14:01L HLA-DQA1*05:01-B1*02:01L HLA-DPA1*01:03-B1*04:01L HLA-DRB1*12:01L HLA-DPA1*01:02-B1*04:01L HLA-DRB1*16:01L
  REGION 1..12: note = CONT. FROM ABOVE: HLA-DQA1*01:03-B1*06:01L HLA-DQA1*02:01-B1*03: 03L HLA-DRB1*15:03L
LPSLATVAYFNM

SEQ ID NO: 11040 - protein, 10 aa, Severe acute respiratory syndrome coronavirus 2
  REGION 1..10: note = Table B: HLA-DQA1*05:01-B1*03:01L HLA-DRB1*13:03L HLA-DQA1*01:02-B1*06:02L HLA-DRB1*08:77L HLA-DPA1*01:03-B1*03:01L HLA-DRB1*03:01L HLA-DRB1*11:02L HLA-DRB1*14:02L HLA-DQA1*01-B1*05L HLA-DQA1*05:05-B1*03:19M
  REGION 1..10: note = CONT. FROM ABOVE: HLA-DQA1*05:01-B1*02:01L HLA-DRB4*01:01L HLA-D PA1*01:03-B1*04:01L HLA-DQA1*05:05-B1*03:116L HLA-DPA1*01:03-B1* 04:02L HLA-DPA1*03:01-B1*105:01L HLA-DPA1*01:03-B1*104:01L HLA-D RB1*10:01L HLA-DRB1*16:01L HLA-DQA1*02:01-B1*03:03L
  REGION 1..10: note = CONT. FROM ABOVE: HLA-DRB1*15:03L
ATVAYFNMVY

SEQ ID NO: 11041 - protein, 11 aa, Severe acute respiratory syndrome coronavirus 2
  REGION 1..11: note = Table B: HLA-DQA1*05:01-B1*03:01L HLA-DRB1*04:03L HLA-DRB1*01:03L HLA-DRB1*01:02L HLA-DPA1*01:02-B1*04:01L
MVYMPASWVMR

SEQ ID NO: 11042 - protein, 11 aa, Severe acute respiratory syndrome coronavirus 2
  REGION 1..11: note = Table B: HLA-DQA1*05:01-B1*03:01L HLA-DRB1*04:03L HLA-DRB1*04:05L HLA-DRB1*08:77L HLA-DPA1*03:01-B1*04:02L HLA-DRB1*11:02L HLA-DRB1*14:02L HLA-DQA1*05:01-B1*02:01L HLA-DRB4*01:01L HLA-DRB1*09:01L HLA-DPA1*01:02-B1*04:01L
VYMPASWVMRI

SEQ ID NO: 11043 - protein, 10 aa, Severe acute respiratory syndrome coronavirus 2
  REGION 1..10: note = Table B: HLA-DQA1*05:01-B1*03:01L HLA-DRB1*13:03L HLA-DQA1*01:02-B1*06:02L HLA-DQA1*01-B1*05L HLA-DPA1*03:01-B1*105:01L HLA-DQA1*03:01-B1*03:02L HLA-DPA1*01:02-B1*04:01L HLA-DQA1*01:03-B1*06:01L
  REGION 1..10: note = CONT. FROM ABOVE: HLA-DRB1*15:03L
MPASWVMRIM

SEQ ID NO: 11044 - protein, 10 aa, Severe acute respiratory syndrome coronavirus 2
  REGION 1..10: note = Table B: HLA-DQA1*05:01-B1*03:01L HLA-DRB1*04:03L HLA-DRB1*01:03L HLA-DRB1*01:02L HLA-DRB1*12:01L HLA-DQA1*03:01-B1*03:02L HLA-DRB1*14:17L HLA-DRB1*16:01L HLA-DQA1*01:03-B1*06:01L HLA-DRB1*04:08L
  REGION 1..10: note = CONT. FROM ABOVE: HLA-DQA1*02:01-B1*03:03L HLA-DRB1*15:03L
TSLSGFKLKD

SEQ ID NO: 11045 - protein, 15 aa, Severe acute respiratory syndrome coronavirus 2
  REGION 1..15: note = Table B: HLA-DQA1*05:01-B1*03:01L
GFKLKDCVMYASAVV

SEQ ID NO: 11046 - protein, 10 aa, Severe acute respiratory syndrome coronavirus 2
  REGION 1..10: note = Table B: HLA-DQA1*05:01-B1*03:01L HLA-DRB1*04:03L HLA-DRB1*13:02L HLA-DRB1*13:03L HLA-DRB1*01:03L HLA-DRB1*04:02L HLA-DQA1*01:02-B1*06:02L HLA-DRB1*01:02L HLA-DRB4*03:01NL HLA-DRB1*14:01L HLA-DQA1*05:01-B1*02:01L HLA-DRB1*12:01L
  REGION 1..10: note = CONT. FROM ABOVE: HLA-DRB1*12:02L HLA-DPA1*03:01-B1*105:01L HLA- DQA1*03:01-B1*03:02L HLA-DRB1*14:54L HLA-DRB1*14:17L HLA-DPA1*01 :02-B1*04:01L HLA-DRB1*16:01L HLA-DQA1*02:01-B1*03:03L HLA-DRB1* 15:03L
ILMTARTVYD

SEQ ID NO: 11047 - protein, 10 aa, Severe acute respiratory syndrome coronavirus 2
  REGION 1..10: note = Table B: HLA-DQA1*05:01-B1*03:01L HLA-DRB1*13:03L HLA-DQA1*01:02-B1*06:02L HLA-DRB1*08:77L HLA-DPA1*01:03-B1*03:01L HLA-DPA1*03:01-B1*04:02L HLA-DRB1*03:01L HLA-DRB1*11:02L HLA-DRB1*14:02L
  REGION 1..10: note = CONT. FROM ABOVE: HLA-DQA1*01-B1*05L HLA-DQA1*05:05-B1*03:19M HL A-DQA1*05:01-B1*02:01L HLA-DRB4*01:01L HLA-DPA1*01:03-B1*04:01L HLA-DQA1*05:05-B1*03:116L HLA-DPA1*01:03-B1*04:02L HLA-DRB1*12:0 1L HLA-DPA1*02:01-B1*13:01L HLA-DPA1*03:01-B1*105:01L
  REGION 1..10: note = CONT. FROM ABOVE: HLA-DPA1*01:03-B1*104:01L HLA-DRB1*10:01L HLA- DRB1*16:01L HLA-DQA1*02:01-B1*03:03L HLA-DRB1*15:03L
TLMNVLTLVY

SEQ ID NO: 11048 - protein, 11 aa, Severe acute respiratory syndrome coronavirus 2
  REGION 1..11: note = Table B: HLA-DQA1*05:01-B1*03:01L HLA-DRB1*13:03L HLA-DRB1*01:03L HLA-DRB1*04:05L HLA-DRB4*03:01NL HLA-DRB1*12:01L HLA-DPA1*03:01-B1*105:01L HLA-DPA1*01:02-B1*04:01L HLA-DQA1*01:03-B1*06:01L
KVYYGNALDQA

SEQ ID NO: 11049 - protein, 12 aa, Severe acute respiratory syndrome coronavirus 2
  REGION 1..12: note = Table B: HLA-DQA1*05:01-B1*03:01L HLA-DRB1*13:02L HLA-DRB1*13:03L HLA-DRB1*01:03L HLA-DRB1*04:02L HLA-DRB1*04:04L HLA-DRB1*04:05L HLA-DQA1*01:02-B1*06:02L HLA-DRB1*01:02L HLA-DRB4*03:01NL HLA-DRB1*08:77L HLA-DRB3*02:01L
  REGION 1..12: note = CONT. FROM ABOVE: HLA-DPA1*01:03-B1*03:01L HLA-DPA1*03:01-B1*04: 02L HLA-DRB1*14:01L HLA-DRB1*11:03L HLA-DRB1*14:02L HLA-DQA1*01: 01-B1*05:01L HLA-DRB1*04:10L HLA-DRB1*09:01L HLA-DPA1*01:03-B1*0 4:02L HLA-DRB1*12:01L HLA-DPA1*03:01-B1*105:01L HLA-DRB1*14:54L
  REGION 1..12: note = CONT. FROM ABOVE: HLA-DQA1*05:05-B1*03:01L HLA-DPA1*01:02-B1*04: 01L HLA-DRB1*10:01L HLA-DRB1*16:01L HLA-DRB1*04:08L HLA-DRB1*15: 03L
VYYGNALDQAIS

SEQ ID NO: 11050 - protein, 10 aa, Severe acute respiratory syndrome coronavirus 2
  REGION 1..10: note = Table B: HLA-DQA1*05:01-B1*03:01L HLA-DRB1*13:03L HLA-DRB1*01:03L HLA-DQA1*01:02-B1*06:02L HLA-DRB1*08:77L HLA-DPA1*01:03-B1*03:01L HLA-DRB1*03:01L HLA-DRB1*14:02L HLA-DQA1*05:05-B1*03:19L HLA-DQA1*05:01-B1*02:01L
  REGION 1..10: note = CONT. FROM ABOVE: HLA-DRB4*01:01L HLA-DPA1*01:03-B1*04:01L HLA-D PA1*01:03-B1*04:02L HLA-DPA1*02:01-B1*13:01L HLA-DPA1*03:01-B1*1 05:01L HLA-DPA1*01:03-B1*104:01L HLA-DRB1*10:01L HLA-DQA1*01:03- B1*06:01L HLA-DQA1*02:01-B1*03:03L HLA-DRB1*15:03L
ALIISVTSNY

SEQ ID NO: 11051 - protein, 12 aa, Severe acute respiratory syndrome coronavirus 2
  REGION 1..12: note = Table B: HLA-DQA1*05:01-B1*03:01L HLA-DQA1*01:02-B1*06:02L HLA-DRB1*01:02L HLA-DRB1*08:04L HLA-DPA1*01:03-B1*03:01L HLA-DRB1*14:01L HLA-DQA1*01-B1*05L HLA-DQA1*05:05-B1*03:19L HLA-DRB4*01:01L HLA-DPA1*03:01-B1*105:01L
  REGION 1..12: note = CONT. FROM ABOVE: HLA-DQA1*05:05-B1*03:01L HLA-DQA1*01:03-B1*06: 01L HLA-DRB1*15:03L
IISVTSNYSGVV

SEQ ID NO: 11052 - protein, 10 aa, Severe acute respiratory syndrome coronavirus 2
  REGION 1..10: note = Table B: HLA-DQA1*05:01-B1*03:01L HLA-DQA1*01:02-B1*06:02L HLA-DRB1*12:01L HLA-DPA1*03:01-B1*105:01L HLA-DQA1*03:01-B1*03:02L HLA-DQA1*05:05-B1*03:01L HLA-DQA1*01:03-B1*06:01L HLA-DQA1*02:01-B1*03:03L
VVTTVMFLAR

SEQ ID NO: 11053 - protein, 12 aa, Severe acute respiratory syndrome coronavirus 2
  REGION 1..12: note = Table B: HLA-DQA1*05:01-B1*03:01L HLA-DPA1*03:01-B1*04:02L HLA-DRB1*14:01L HLA-DRB1*12:01L HLA-DQA1*05:05-B1*03:01L HLA-DPA1*01:02-B1*04:01L HLA-DRB1*15:03L
VTTVMFLARGIV

SEQ ID NO: 11054 - protein, 11 aa, Severe acute respiratory syndrome coronavirus 2
  REGION 1..11: note = Table B: HLA-DQA1*05:01-B1*03:01L HLA-DRB1*04:03L HLA-DRB1*13:02L HLA-DRB1*13:03L HLA-DRB1*01:03L HLA-DRB1*04:02L HLA-DRB1*04:04L HLA-DRB1*04:05L HLA-DQA1*01:02-B1*06:02L HLA-DRB4*03:01NL HLA-DRB1*08:77L HLA-DRB3*02:01L
  REGION 1..11: note = CONT. FROM ABOVE: HLA-DPA1*01:03-B1*03:01L HLA-DPA1*03:01-B1*04: 02L HLA-DRB1*14:01L HLA-DRB1*11:03L HLA-DQA1*01-B1*05L HLA-DQA1* 05:05-B1*03:19L HLA-DQA1*05:01-B1*02:01L HLA-DRB1*04:10L HLA-DRB 1*09:01L HLA-DRB1*12:02L HLA-DPA1*03:01-B1*105:01L
  REGION 1..11: note = CONT. FROM ABOVE: HLA-DQA1*03:01-B1*03:02L HLA-DRB1*14:54L HLA-D QA1*05:05-B1*03:01L HLA-DRB1*14:17L HLA-DPA1*01:02-B1*04:01L HLA -DRB1*07:01L HLA-DRB1*10:01L HLA-DRB1*16:01L HLA-DQA1*01:03-B1*0 6:01L HLA-DRB1*04:08L HLA-DQA1*02:01-B1*03:03L
PIFFITGNTLQ

SEQ ID NO: 11055 - protein, 12 aa, Severe acute respiratory syndrome coronavirus 2
  REGION 1..12: note = Table B: HLA-DQA1*05:01-B1*03:01L HLA-DPA1*01:03-B1*03:01L HLA-DPA1*03:01-B1*04:02L HLA-DQA1*05:05-B1*03:116L HLA-DPA1*01:03-B1*04:02L HLA-DRB1*12:01L HLA-DPA1*01:03-B1*104:01L HLA-DQA1*05:05-B1*03:01L
  REGION 1..12: note = CONT. FROM ABOVE: HLA-DPA1*01:02-B1*04:01L HLA-DRB1*10:01L HLA-D RB1*04:08L
GVYDYLVSTQEF

SEQ ID NO: 11056 - protein, 10 aa, Severe acute respiratory syndrome coronavirus 2
  REGION 1..10: note = Table B: HLA-DQA1*05:01-B1*03:01L HLA-DQA1*01:02-B1*06:02L HLA-DPA1*03:01-B1*04:02L HLA-DQA1*05:01-B1*02:01L HLA-DRB1*12:01L HLA-DPA1*03:01-B1*105:01L HLA-DPA1*01:02-B1*04:01L HLA-DQA1*01:03-B1*06:01L
  REGION 1..10: note = CONT. FROM ABOVE: HLA-DQA1*02:01-B1*03:03L HLA-DRB1*15:03L
LVSTQEFRYM

SEQ ID NO: 11057 - protein, 12 aa, Severe acute respiratory syndrome coronavirus 2
  REGION 1..12: note = Table B: HLA-DQA1*05:01-B1*03:01L HLA-DRB1*04:03L HLA-DRB1*01:03L HLA-DRB1*04:02L HLA-DRB1*04:05L HLA-DQA1*01:02-B1*06:02L HLA-DRB1*01:01L HLA-DRB1*01:02M HLA-DRB1*11:03L HLA-DRB1*14:02L HLA-DQA1*01-B1*05L
  REGION 1..12: note = CONT. FROM ABOVE: HLA-DQA1*05:05-B1*03:19L HLA-DRB1*12:01L HLA-D PA1*03:01-B1*105:01L HLA-DQA1*03:01-B1*03:02L HLA-DQA1*05:05-B1* 03:01L HLA-DRB1*07:01L HLA-DRB1*10:01L HLA-DRB1*16:01L HLA-DRB1* 04:08L HLA-DQA1*02:01-B1*03:03L HLA-DRB1*15:03L
FRYMNSQGLLPP

SEQ ID NO: 11058 - protein, 11 aa, Severe acute respiratory syndrome coronavirus 2
  REGION 1..11: note = Table B: HLA-DQA1*05:01-B1*03:01L HLA-DRB1*13:02L HLA-DRB1*01:03L HLA-DRB1*14:01L HLA-DRB1*12:01L HLA-DPA1*03:01-B1*105:01L HLA-DQA1*05:05-B1*03:01L HLA-DPA1*01:02-B1*04:01L HLA-DRB1*16:01L
YMNSQGLLPPK

SEQ ID NO: 11059 - protein, 10 aa, Severe acute respiratory syndrome coronavirus 2
  REGION 1..10: note = Table B: HLA-DQA1*05:01-B1*03:01L HLA-DQA1*03:01-B1*03:02L HLA-DQA1*05:05-B1*03:01L HLA-DQA1*01:03-B1*06:01L HLA-DQA1*02:01-B1*03:03L
NSQGLLPPKN

SEQ ID NO: 11060 - protein, 10 aa, Severe acute respiratory syndrome coronavirus 2
  REGION 1..10: note = Table B: HLA-DQA1*05:01-B1*03:01L HLA-DRB1*13:03L HLA-DQA1*01:02-B1*06:02M HLA-DRB1*14:01L HLA-DPA1*02:01-B1*13:01L HLA-DPA1*03:01-B1*105:01L HLA-DRB1*15:03L
LPPKNSIDAF

SEQ ID NO: 11061 - protein, 16 aa, Severe acute respiratory syndrome coronavirus 2
  REGION 1..16: note = Table B: HLA-DQA1*05:01-B1*03:01L HLA-DRB1*01:01L HLA-DRB3*02:01L HLA-DRB1*03:01L HLA-DRB1*14:54L HLA-DPA1*01:03-B1*104:01L HLA-DQA1*05:05-B1*03:01L HLA-DQA1*01:03-B1*06:01L HLA-DRB1*08:03L
DAFKLNIKLLGVGGKP

SEQ ID NO: 11062 - protein, 14 aa, Severe acute respiratory syndrome coronavirus 2
  REGION 1..14: note = Table B: HLA-DQA1*05:01-B1*03:01L HLA-DRB1*07:01L HLA-DQA1*01:03-B1*06:01L
NIKLLGVGGKPCIK

SEQ ID NO: 11063 - protein, 10 aa, Severe acute respiratory syndrome coronavirus 2
  REGION 1..10: note = Table B: HLA-DQA1*05:01-B1*03:01L HLA-DRB1*04:03L HLA-DRB1*13:02L HLA-DRB1*13:03L HLA-DRB1*01:03L HLA-DRB1*04:02L HLA-DQA1*01:02-B1*06:02L HLA-DRB4*03:01NL HLA-DRB1*14:01L HLA-DQA1*01:01-B1*05:01L HLA-DRB1*08:01L HLA-DRB1*12:01L
  REGION 1..10: note = CONT. FROM ABOVE: HLA-DPA1*03:01-B1*105:01L HLA-DQA1*03:01-B1*03 :02L HLA-DQA1*05:05-B1*03:01L HLA-DRB1*14:17L HLA-DPA1*01:02-B1* 04:01L HLA-DRB1*16:01L HLA-DQA1*01:03-B1*06:01L HLA-DQA1*02:01-B 1*03:03L
TVQSKMSDVK

SEQ ID NO: 11064 - protein, 11 aa, Severe acute respiratory syndrome coronavirus 2
  REGION 1..11: note = Table B: HLA-DQA1*05:01-B1*03:01L HLA-DQA1*01:02-B1*06:02L HLA-DQA1*03:01-B1*03:02L
SVVLLSVLQQL

SEQ ID NO: 11065 - protein, 13 aa, Severe acute respiratory syndrome coronavirus 2
  REGION 1..13: note = Table B: HLA-DQA1*05:01-B1*03:01L HLA-DRB1*13:02L HLA-DRB3*02:01L HLA-DPA1*01:03-B1*03:01L HLA-DQA1*05:01-B1*02:01L HLA-DQA1*05:05-B1*03:01L HLA-DRB1*16:01L
VVLLSVLQQLRVE

SEQ ID NO: 11066 - protein, 12 aa, Severe acute respiratory syndrome coronavirus 2
  REGION 1..12: note = Table B: HLA-DQA1*05:01-B1*03:01L HLA-DRB1*04:05L HLA-DQA1*01:02-B1*06:02L HLA-DRB1*01:02L HLA-DPA1*03:01-B1*105:01L HLA-DRB1*14:54L
LSVLQQLRVESS

SEQ ID NO: 11067 - protein, 12 aa, Severe acute respiratory syndrome coronavirus 2
  REGION 1..12: note = Table B: HLA-DQA1*05:01-B1*03:01L HLA-DRB1*01:03L HLA-DRB1*04:05L HLA-DQA1*01:02-B1*06:02L HLA-DRB1*01:02L HLA-DPA1*03:01-B1*105:01L HLA-DQA1*01:03-B1*06:01L HLA-DRB1*04:08L HLA-DQA1*02:01-B1*03:03L
VLQQLRVESSSK

SEQ ID NO: 11068 - protein, 11 aa, Severe acute respiratory syndrome coronavirus 2
  REGION 1..11: note = Table B: HLA-DQA1*05:01-B1*03:01L HLA-DRB1*04:03L HLA-DRB1*01:02L HLA-DRB1*14:01L HLA-DRB1*12:01L HLA-DRB1*16:01L HLA-DQA1*02:01-B1*03:03L HLA-DRB1*15:03L
QQLRVESSSKL

SEQ ID NO: 11069 - protein, 15 aa, Severe acute respiratory syndrome coronavirus 2
  REGION 1..15: note = Table B: HLA-DQA1*05:01-B1*03:01L HLA-DQA1*05:05-B1*03:19L
SSSKLWAQCVQLHND

SEQ ID NO: 11070 - protein, 13 aa, Severe acute respiratory syndrome coronavirus 2
  REGION 1..13: note = Table B: HLA-DQA1*05:01-B1*03:01L HLA-DQA1*01:01-B1*05:01L HLA-DPA1*03:01-B1*105:01L HLA-DQA1*05:05-B1*03:01L HLA-DRB1*15:03L
LHNDILLAKDTTE

SEQ ID NO: 11071 - protein, 12 aa, Severe acute respiratory syndrome coronavirus 2
  REGION 1..12: note = Table B: HLA-DQA1*05:01-B1*03:01L HLA-DRB1*04:04L HLA-DQA1*01:02-B1*06:02L HLA-DRB1*01:02L HLA-DRB1*08:04L HLA-DRB1*14:01L HLA-DRB1*11:04L HLA-DQA1*01:01-B1*05:01L HLA-DRB1*08:01L HLA-DRB1*12:02L HLA-DPA1*02:01-B1*13:01L
  REGION 1..12: note = CONT. FROM ABOVE: HLA-DPA1*03:01-B1*105:01L HLA-DQA1*05:05-B1*03 :01L HLA-DRB1*08:03L HLA-DRB1*15:03L
NDILLAKDTTEA

SEQ ID NO: 11072 - protein, 11 aa, Severe acute respiratory syndrome coronavirus 2
  REGION 1..11: note = Table B: HLA-DQA1*05:01-B1*03:01L HLA-DRB1*08:77L HLA-DPA1*03:01-B1*04:02L HLA-DRB1*14:01L HLA-DQA1*05:05-B1*03:19L HLA-DQA1*05:01-B1*02:01L HLA-DRB1*12:01L
ILLAKDTTEAF

SEQ ID NO: 11073 - protein, 14 aa, Severe acute respiratory syndrome coronavirus 2
  REGION 1..14: note = Table B: HLA-DQA1*05:01-B1*03:01L HLA-DPA1*01:03-B1*04:02L HLA-DQA1*05:05-B1*03:01L
LAKDTTEAFEKMVS

SEQ ID NO: 11074 - protein, 11 aa, Severe acute respiratory syndrome coronavirus 2
  REGION 1..11: note = Table B: HLA-DQA1*05:01-B1*03:01L HLA-DRB1*01:02L
LSMQGAVDINK

SEQ ID NO: 11075 - protein, 13 aa, Severe acute respiratory syndrome coronavirus 2
  REGION 1..13: note = Table B: HLA-DQA1*05:01-B1*03:01L HLA-DRB1*01:02L HLA-DQA1*05:01-B1*02:01L HLA-DPA1*03:01-B1*105:01L HLA-DQA1*03:01-B1*03:02L HLA-DQA1*05:05-B1*03:01L HLA-DRB1*16:01L HLA-DQA1*02:01-B1*03:03L
VDINKLCEEMLDN

SEQ ID NO: 11076 - protein, 13 aa, Severe acute respiratory syndrome coronavirus 2
  REGION 1..13: note = Table B: HLA-DQA1*05:01-B1*03:01L
EMLDNRATLQAIA

SEQ ID NO: 11077 - protein, 11 aa, Severe acute respiratory syndrome coronavirus 2
  REGION 1..11: note = Table B: HLA-DQA1*05:01-B1*03:01L HLA-DRB1*04:03L HLA-DRB1*13:03L HLA-DRB1*04:02L HLA-DRB1*04:05L HLA-DRB4*03:01NL HLA-DRB1*14:01L HLA-DQA1*01-B1*05L HLA-DQA1*05:01-B1*02:01L HLA-DRB1*12:01L HLA-DPA1*03:01-B1*105:01L
  REGION 1..11: note = CONT. FROM ABOVE: HLA-DPA1*01:03-B1*104:01L HLA-DRB1*14:17L HLA- DRB1*10:01L HLA-DRB1*16:01L HLA-DQA1*02:01-B1*03:03L HLA-DRB1*15 :03L
SEFSSLPSYAA

SEQ ID NO: 11078 - protein, 14 aa, Severe acute respiratory syndrome coronavirus 2
  REGION 1..14: note = Table B: HLA-DQA1*05:01-B1*03:01L HLA-DQA1*01:02-B1*06:02L HLA-DQA1*05:05-B1*03:19L HLA-DRB1*12:01L HLA-DPA1*03:01-B1*105:01L HLA-DQA1*05:05-B1*03:01L
ATAQEAYEQAVANG

SEQ ID NO: 11079 - protein, 14 aa, Severe acute respiratory syndrome coronavirus 2
  REGION 1..14: note = Table B: HLA-DQA1*05:01-B1*03:01L HLA-DRB1*13:03L HLA-DQA1*01:02-B1*06:02L HLA-DRB1*01:02L HLA-DPA1*01:03-B1*03:01L HLA-DQA1*01:01-B1*05:01L HLA-DQA1*05:05-B1*03:19L HLA-DRB1*12:01L
  REGION 1..14: note = CONT. FROM ABOVE: HLA-DPA1*02:01-B1*13:01L HLA-DPA1*03:01-B1*105 :01L HLA-DQA1*05:05-B1*03:01L HLA-DQA1*01:03-B1*06:01L HLA-DRB1* 15:03L
TAQEAYEQAVANGD

SEQ ID NO: 11080 - protein, 12 aa, Severe acute respiratory syndrome coronavirus 2
  REGION 1..12: note = Table B: HLA-DQA1*05:01-B1*03:01L HLA-DRB1*13:02L HLA-DRB1*04:04L HLA-DQA1*01:02-B1*06:02L HLA-DRB1*08:04L HLA-DRB1*08:77L HLA-DRB1*14:01L HLA-DRB1*11:03L HLA-DRB1*11:04L HLA-DRB1*14:02L HLA-DQA1*01:01-B1*05:01L HLA-DRB1*08:01L
  REGION 1..12: note = CONT. FROM ABOVE: HLA-DRB5*01:01L HLA-DQA1*05:05-B1*03:19L HLA-D RB1*09:01L HLA-DRB1*12:02L HLA-DPA1*02:01-B1*13:01L HLA-DPA1*03: 01-B1*105:01L HLA-DQA1*05:05-B1*03:01L HLA-DQA1*01:03-B1*06:01L HLA-DRB1*08:03L
EAYEQAVANGDS

SEQ ID NO: 11081 - protein, 11 aa, Severe acute respiratory syndrome coronavirus 2
  REGION 1..11: note = Table B: HLA-DQA1*05:01-B1*03:01L HLA-DRB1*13:03L HLA-DQA1*05:05-B1*03:19L HLA-DQA1*05:01-B1*02:01L HLA-DPA1*01:02-B1*04:01L HLA-DQA1*01:03-B1*06:01L HLA-DQA1*02:01-B1*03:03L HLA-DRB1*15:03L
AVANGDSEVVL

SEQ ID NO: 11082 - protein, 11 aa, Severe acute respiratory syndrome coronavirus 2
  REGION 1..11: note = Table B: HLA-DQA1*05:01-B1*03:01L HLA-DRB1*04:01L HLA-DRB1*04:03L HLA-DRB1*13:02L HLA-DRB1*01:03L HLA-DRB1*04:02L HLA-DRB1*04:05L HLA-DQA1*01:02-B1*06:02L HLA-DRB1*01:01L HLA-DRB1*08:77L HLA-DRB3*02:01L HLA-DPA1*01:03-B1*03:01L
  REGION 1..11: note = CONT. FROM ABOVE: HLA-DRB1*14:01L HLA-DRB1*11:04L HLA-DRB1*14:02 L HLA-DQA1*01:01-B1*05:01L HLA-DRB1*08:01L HLA-DRB5*01:01L HLA-D QA1*01-B1*05L HLA-DQA1*05:05-B1*03:19L HLA-DQA1*05:01-B1*02:01L HLA-DPA1*01:03-B1*04:02L HLA-DRB1*12:02L
  REGION 1..11: note = CONT. FROM ABOVE: HLA-DPA1*03:01-B1*105:01L HLA-DRB1*14:54L HLA- DRB1*14:17L HLA-DPA1*01:02-B1*04:01L HLA-DRB1*16:01L
VANGDSEVVLK

SEQ ID NO: 11083 - protein, 14 aa, Severe acute respiratory syndrome coronavirus 2
  REGION 1..14: note = Table B: HLA-DQA1*05:01-B1*03:01L HLA-DRB1*13:02L HLA-DRB1*13:03L HLA-DRB1*04:02L HLA-DRB1*04:05L HLA-DRB1*11:03L HLA-DRB1*11:04L HLA-DRB1*11:01L HLA-DPA1*02:01-B1*13:01L HLA-DPA1*03:01-B1*105:01L HLA-DPA1*01:02-B1*04:01L
  REGION 1..14: note = CONT. FROM ABOVE: HLA-DQA1*01:03-B1*06:01L HLA-DRB1*08:03L HLA-D QA1*02:01-B1*03:03L
DSEVVLKKLKKSLN

SEQ ID NO: 11084 - protein, 10 aa, Severe acute respiratory syndrome coronavirus 2
  REGION 1..10: note = Table B: HLA-DQA1*05:01-B1*03:01L HLA-DRB1*01:03L HLA-DQA1*01:02-B1*06:02L HLA-DRB1*14:02L HLA-DQA1*05:01-B1*02:01L HLA-DPA1*01:03-B1*04:01L HLA-DPA1*02:01-B1*13:01L HLA-DQA1*01:03-B1*06:01L
  REGION 1..10: note = CONT. FROM ABOVE: HLA-DQA1*02:01-B1*03:03L
KSLNVAKSEF

SEQ ID NO: 11085 - protein, 12 aa, Severe acute respiratory syndrome coronavirus 2
  REGION 1..12: note = Table B: HLA-DQA1*05:01-B1*03:01L HLA-DRB1*04:01L HLA-DRB1*04:04L HLA-DQA1*01:02-B1*06:02L HLA-DRB1*08:04L HLA-DRB1*08:77L HLA-DPA1*03:01-B1*04:02L HLA-DRB1*11:03L HLA-DRB1*14:02L HLA-DRB1*11:01L HLA-DRB1*13:01L
  REGION 1..12: note = CONT. FROM ABOVE: HLA-DPA1*02:01-B1*13:01L HLA-DPA1*03:01-B1*105 :01L HLA-DRB1*14:54L HLA-DRB1*07:01L HLA-DRB1*10:01L HLA-DQA1*01 :03-B1*06:01L HLA-DRB1*08:03L
SEFDRDAAMQRK

SEQ ID NO: 11086 - protein, 13 aa, Severe acute respiratory syndrome coronavirus 2
  REGION 1..13: note = Table B: HLA-DQA1*05:01-B1*03:01L HLA-DRB1*04:05L
FDRDAAMQRKLEK

SEQ ID NO: 11087 - protein, 13 aa, Severe acute respiratory syndrome coronavirus 2
  REGION 1..13: note = Table B: HLA-DQA1*05:01-B1*03:01L HLA-DRB1*04:01L HLA-DRB1*01:01L HLA-DRB1*11:04L HLA-DRB1*08:01L HLA-DRB1*11:01L HLA-DRB3*01:01L HLA-DPA1*03:01-B1*105:01L HLA-DPA1*01:02-B1*04:01L HLA-DRB1*10:01L
  REGION 1..13: note = CONT. FROM ABOVE: HLA-DQA1*01:03-B1*06:01L
RKLEKMADQAMTQ

SEQ ID NO: 11088 - protein, 10 aa, Severe acute respiratory syndrome coronavirus 2
  REGION 1..10: note = Table B: HLA-DQA1*05:01-B1*03:01L HLA-DRB1*04:03L HLA-DRB1*13:02L HLA-DRB1*13:03M HLA-DRB1*01:03M HLA-DRB1*04:02L HLA-DRB1*04:05L HLA-DQA1*01:02-B1*06:02M HLA-DRB4*03:01NL HLA-DRB1*08:77H HLA-DPA1*01:03-B1*03:01H
  REGION 1..10: note = CONT. FROM ABOVE: HLA-DPA1*03:01-B1*04:02L HLA-DRB1*03:01M HLA-D RB1*14:01L HLA-DRB1*11:02H HLA-DRB1*11:03M HLA-DRB1*11:04L HLA-D RB1*14:02L HLA-DRB1*11:01L HLA-DRB5*01:01L HLA-DQA1*01-B1*05H HL A-DQA1*05:05-B1*03:19H HLA-DQA1*05:01-B1*02:01H HLA-DRB4*01:01M
  REGION 1..10: note = CONT. FROM ABOVE: HLA-DPA1*01:03-B1*04:01M HLA-DQA1*05:05-B1*03: 116M HLA-DPA1*01:03-B1*04:02M HLA-DRB1*12:01M HLA-DPA1*03:01-B1* 105:01L HLA-DRB1*14:54L HLA-DPA1*01:03-B1*104:01H HLA-DPA1*01:02 -B1*04:01L HLA-DRB1*10:01M HLA-DRB1*16:01H HLA-DRB1*08:02L
  REGION 1..10: note = CONT. FROM ABOVE: HLA-DQA1*02:01-B1*03:03L HLA-DRB1*15:01L HLA-D RB1*15:03L
MADQAMTQMY

SEQ ID NO: 11089 - protein, 12 aa, Severe acute respiratory syndrome coronavirus 2
  REGION 1..12: note = Table B: HLA-DQA1*05:01-B1*03:01L HLA-DRB1*04:02L HLA-DQA1*01:02-B1*06:02L HLA-DRB1*08:01L HLA-DQA1*02:01-B1*03:03L
DQAMTQMYKQAR

SEQ ID NO: 11090 - protein, 12 aa, Severe acute respiratory syndrome coronavirus 2
  REGION 1..12: note = Table B: HLA-DQA1*05:01-B1*03:01L HLA-DRB1*04:03L HLA-DRB1*13:02L HLA-DRB1*13:03L HLA-DRB1*01:03L HLA-DRB1*04:02L HLA-DRB1*04:04L HLA-DRB1*04:05L HLA-DQA1*01:02-B1*06:02L HLA-DRB1*01:02L HLA-DRB4*03:01NL HLA-DRB1*08:04L HLA-DRB1*14:01L
  REGION 1..12: note = CONT. FROM ABOVE: HLA-DRB1*11:04L HLA-DQA1*01:01-B1*05:01L HLA-D RB1*08:01M HLA-DRB1*11:01L HLA-DRB1*04:10L HLA-DRB1*12:01L HLA-D RB3*01:01L HLA-DPA1*02:01-B1*13:01L HLA-DQA1*03:01-B1*03:02L HLA -DRB1*14:17L HLA-DPA1*01:02-B1*04:01L HLA-DRB1*16:01L
  REGION 1..12: note = CONT. FROM ABOVE: HLA-DRB1*04:08L HLA-DRB1*08:03L HLA-DQA1*02:01 -B1*03:03L HLA-DRB1*15:03L
TQMYKQARSEDK

SEQ ID NO: 11091 - protein, 12 aa, Severe acute respiratory syndrome coronavirus 2
  REGION 1..12: note = Table B: HLA-DQA1*05:01-B1*03:01L HLA-DQA1*01:02-B1*06:02L HLA-DQA1*05:05-B1*03:01L HLA-DQA1*01:03-B1*06:01L
EDKRAKVTSAMQ

SEQ ID NO: 11092 - protein, 12 aa, Severe acute respiratory syndrome coronavirus 2
  REGION 1..12: note = Table B: HLA-DQA1*05:01-B1*03:01L HLA-DRB1*04:03L HLA-DRB1*04:02L HLA-DQA1*01:02-B1*06:02L HLA-DQA1*01:01-B1*05:01L HLA-DQA1*05:05-B1*03:01L HLA-DRB1*16:01L HLA-DQA1*01:03-B1*06:01L
LDNDALNNIINN

SEQ ID NO: 11093 - protein, 13 aa, Severe acute respiratory syndrome coronavirus 2
  REGION 1..13: note = Table B: HLA-DQA1*05:01-B1*03:01L HLA-DRB1*14:04L HLA-DRB1*01:03L HLA-DRB1*04:04L HLA-DRB1*04:05L HLA-DRB1*01:02L HLA-DRB1*08:04L HLA-DRB1*08:77L HLA-DPA1*01:03-B1*03:01L HLA-DPA1*03:01-B1*04:02L HLA-DRB1*11:03L
  REGION 1..13: note = CONT. FROM ABOVE: HLA-DQA1*01:01-B1*05:01L HLA-DRB5*01:01L HLA-D QA1*05:05-B1*03:19L HLA-DQA1*05:01-B1*02:01L HLA-DRB1*04:10M HLA -DRB1*09:01L HLA-DRB1*12:02L HLA-DPA1*02:01-B1*13:01L HLA-DRB1*1 4:54L HLA-DPA1*01:03-B1*104:01L HLA-DRB1*10:01L
  REGION 1..13: note = CONT. FROM ABOVE: HLA-DQA1*01:03-B1*06:01L HLA-DRB1*04:08L HLA-D RB1*08:03L HLA-DRB1*15:03L
VPLNIIPLTTAAK

SEQ ID NO: 11094 - protein, 11 aa, Severe acute respiratory syndrome coronavirus 2
  REGION 1..11: note = Table B: HLA-DQA1*05:01-B1*03:01L HLA-DRB1*13:02L HLA-DQA1*01:02-B1*06:02L HLA-DRB1*01:02L HLA-DRB1*08:04L HLA-DRB1*14:01L HLA-DRB1*11:03L HLA-DQA1*01:01-B1*05:01L HLA-DRB5*01:01L HLA-DRB1*12:02L HLA-DPA1*03:01-B1*105:01L
  REGION 1..11: note = CONT. FROM ABOVE: HLA-DQA1*05:05-B1*03:01L HLA-DQA1*01:03-B1*06: 01L HLA-DRB1*15:03L
EIQQVVDADSK

SEQ ID NO: 11095 - protein, 13 aa, Severe acute respiratory syndrome coronavirus 2
  REGION 1..13: note = Table B: HLA-DQA1*05:01-B1*03:01L HLA-DQA1*05:05-B1*03:01L
DADSKIVQLSEIS

SEQ ID NO: 11096 - protein, 13 aa, Severe acute respiratory syndrome coronavirus 2
  REGION 1..13: note = Table B: HLA-DQA1*05:01-B1*03:01L HLA-DRB1*13:02L HLA-DRB1*13:03L HLA-DRB1*01:03L HLA-DRB1*04:02L HLA-DRB1*04:04L HLA-DRB1*04:05L HLA-DQA1*01:02-B1*06:02L HLA-DRB4*03:01NL HLA-DQA1*01:01-B1*05:01L HLA-DQA1*05:05-B1*03:19L
  REGION 1..13: note = CONT. FROM ABOVE: HLA-DRB1*04:10L HLA-DRB1*12:01L HLA-DRB1*12:02 L HLA-DRB1*14:54L HLA-DQA1*05:05-B1*03:01L HLA-DRB1*16:01L HLA-D QA1*01:03-B1*06:01L HLA-DRB1*04:08L
VQLSEISMDNSPN

SEQ ID NO: 11097 - protein, 11 aa, Severe acute respiratory syndrome coronavirus 2
  REGION 1..11: note = Table B: HLA-DQA1*05:01-B1*03:01L HLA-DRB1*04:01L HLA-DRB1*04:03L HLA-DRB1*13:02L HLA-DRB1*13:03L HLA-DRB1*01:03L HLA-DRB1*04:02L HLA-DRB4*03:01NL HLA-DRB1*08:77L HLA-DRB3*02:01L HLA-DPA1*03:01-B1*04:02L HLA-DRB1*14:01L HLA-DRB1*11:02L
  REGION 1..11: note = CONT. FROM ABOVE: HLA-DRB1*11:03L HLA-DRB1*11:04L HLA-DRB1*14:02 L HLA-DRB1*11:01L HLA-DRB5*01:01L HLA-DQA1*01-B1*05L HLA-DQA1*05 :05-B1*03:19L HLA-DQA1*05:01-B1*02:01L HLA-DRB4*01:01L HLA-DPA1* 01:03-B1*04:01L HLA-DQA1*05:05-B1*03:116L HLA-DRB1*09:01L
  REGION 1..11: note = CONT. FROM ABOVE: HLA-DPA1*01:03-B1*04:02L HLA-DRB1*12:01L HLA-D PA1*03:01-B1*105:01L HLA-DRB1*14:54L HLA-DPA1*01:03-B1*104:01L H LA-DRB1*14:17L HLA-DPA1*01:02-B1*04:01L HLA-DRB1*07:01L HLA-DRB1 *10:01L HLA-DRB1*16:01L HLA-DRB1*08:03L HLA-DQA1*02:01-B1*03:03L
  REGION 1..11: note = CONT. FROM ABOVE: HLA-DRB1*15:03L
SEISMDNSPNL

SEQ ID NO: 11098 - protein, 14 aa, Severe acute respiratory syndrome coronavirus 2
  REGION 1..14: note = Table B: HLA-DQA1*05:01-B1*03:01L HLA-DRB1*13:02L HLA-DQA1*01:02-B1*06:02L HLA-DRB1*01:02L HLA-DPA1*01:03-B1*03:01L HLA-DRB1*03:01L HLA-DRB1*14:02L HLA-DRB1*12:01L HLA-DQA1*05:05-B1*03:01L
  REGION 1..14: note = CONT. FROM ABOVE: HLA-DQA1*01:03-B1*06:01L HLA-DQA1*02:01-B1*03: 03L
EISMDNSPNLAWPL

SEQ ID NO: 11099 - protein, 12 aa, Severe acute respiratory syndrome coronavirus 2
  REGION 1..12: note = Table B: HLA-DQA1*05:01-B1*03:01L HLA-DQA1*01:02-B1*06:02L HLA-DQA1*01:03-B1*06:01L
NSPNLAWPLIVT

SEQ ID NO: 11100 - protein, 14 aa, Severe acute respiratory syndrome coronavirus 2
  REGION 1..14: note = Table B: HLA-DQA1*05:01-B1*03:01L HLA-DRB1*04:03L HLA-DRB1*01:03L HLA-DRB1*04:05L HLA-DRB1*01:02L HLA-DPA1*01:03-B1*03:01L HLA-DRB1*08:01L HLA-DPA1*01:03-B1*04:02L HLA-DRB1*12:01L
  REGION 1..14: note = CONT. FROM ABOVE: HLA-DPA1*02:01-B1*13:01L HLA-DPA1*01:03-B1*104 :01L HLA-DRB1*16:01L HLA-DQA1*01:03-B1*06:01L HLA-DRB1*04:08L
SPNLAWPLIVTALR

SEQ ID NO: 11101 - protein, 13 aa, Severe acute respiratory syndrome coronavirus 2
  REGION 1..13: note = Table B: HLA-DQA1*05:01-B1*03:01L HLA-DRB1*01:03L HLA-DRB1*04:04L HLA-DRB1*01:02L HLA-DPA1*03:01-B1*04:02L HLA-DRB1*11:04L HLA-DRB1*08:01L HLA-DRB1*04:10L HLA-DPA1*03:01-B1*105:01L HLA-DQA1*05:05-B1*03:01L
  REGION 1..13: note = CONT. FROM ABOVE: HLA-DPA1*01:02-B1*04:01L HLA-DQA1*01:03-B1*06: 01L HLA-DRB1*04:08L HLA-DRB1*15:03L
WPLIVTALRANSA

SEQ ID NO: 11102 - protein, 11 aa, Severe acute respiratory syndrome coronavirus 2
  REGION 1..11: note = Table B: HLA-DQA1*05:01-B1*03:01L HLA-DRB1*13:03L HLA-DRB1*04:04L HLA-DRB1*04:05L HLA-DQA1*01:02-B1*06:02L HLA-DRB1*01:01L HLA-DRB4*03:01NL HLA-DRB1*12:01L HLA-DRB1*14:54L HLA-DQA1*05:05-B1*03:01L HLA-DRB1*10:01L HLA-DRB1*16:01L
  REGION 1..11: note = CONT. FROM ABOVE: HLA-DQA1*01:03-B1*06:01L HLA-DRB1*04:08L HLA-D RB1*15:03L
VTALRANSAVK

SEQ ID NO: 11103 - protein, 12 aa, Severe acute respiratory syndrome coronavirus 2
  REGION 1..12: note = Table B: HLA-DQA1*05:01-B1*03:01L HLA-DRB4*03:01NL HLA-DRB1*11:03L HLA-DRB1*14:02L
TALRANSAVKLQ

SEQ ID NO: 11104 - protein, 11 aa, Severe acute respiratory syndrome coronavirus 2
  REGION 1..11: note = Table B: HLA-DQA1*05:01-B1*03:01L HLA-DRB1*04:03L HLA-DRB1*13:03L HLA-DRB1*01:03L HLA-DRB1*04:02L HLA-DRB1*01:02L HLA-DRB4*03:01NL HLA-DRB1*08:04L HLA-DRB1*08:77L HLA-DRB1*11:03L HLA-DRB1*11:04L HLA-DRB1*14:02L HLA-DRB1*12:02L HLA-DRB1*14:54L
  REGION 1..11: note = CONT. FROM ABOVE: HLA-DRB1*14:17L HLA-DRB1*04:08L HLA-DQA1*02:01 -B1*03:03L
LRANSAVKLQN

SEQ ID NO: 11105 - protein, 12 aa, Severe acute respiratory syndrome coronavirus 2
  REGION 1..12: note = Table B: HLA-DQA1*05:01-B1*03:01L HLA-DQA1*01:02-B1*06:02L HLA-DPA1*03:01-B1*105:01L HLA-DQA1*01:03-B1*06:01L
LQNNELSPVALR

SEQ ID NO: 11106 - protein, 14 aa, Severe acute respiratory syndrome coronavirus 2
  REGION 1..14: note = Table B: HLA-DQA1*05:01-B1*03:01L HLA-DRB1*01:02L HLA-DQA1*05:05-B1*03:19L HLA-DPA1*03:01-B1*105:01L HLA-DRB1*04:08L
LRQMSCAAGTTQTA

SEQ ID NO: 11107 - protein, 13 aa, Severe acute respiratory syndrome coronavirus 2
  REGION 1..13: note = Table B: HLA-DQA1*05:01-B1*03:01L HLA-DQA1*01:02-B1*06:02L HLA-DQA1*01:01-B1*05:01L HLA-DQA1*05:01-B1*02:01L
AAGTTQTACTDDN

SEQ ID NO: 11108 - protein, 13 aa, Severe acute respiratory syndrome coronavirus 2
  REGION 1..13: note = Table B: HLA-DQA1*05:01-B1*03:01L HLA-DQA1*05:05-B1*03:01L
TDDNALAYYNTTK

SEQ ID NO: 11109 - protein, 10 aa, Severe acute respiratory syndrome coronavirus 2
  REGION 1..10: note = Table B: HLA-DQA1*05:01-B1*03:01L HLA-DQA1*03:01-B1*03:02L HLA-DRB1*16:01L HLA-DQA1*02:01-B1*03:03L
NTTKGGRFVL

SEQ ID NO: 11110 - protein, 13 aa, Severe acute respiratory syndrome coronavirus 2
  REGION 1..13: note = Table B: HLA-DQA1*05:01-B1*03:01L HLA-DRB1*13:02L HLA-DRB1*04:05L HLA-DRB1*14:01L HLA-DRB1*11:04L HLA-DRB1*08:01L HLA-DRB1*11:01L HLA-DPA1*01:03-B1*04:01L HLA-DPA1*01:03-B1*04:02L HLA-DPA1*02:01-B1*13:01L
  REGION 1..13: note = CONT. FROM ABOVE: HLA-DQA1*03:01-B1*03:02L HLA-DPA1*01:03-B1*02: 01L HLA-DQA1*02:01-B1*03:03L HLA-DRB1*15:03L
LQDLKWARFPKSD

SEQ ID NO: 11111 - protein, 12 aa, Severe acute respiratory syndrome coronavirus 2
  REGION 1..12: note = Table B: HLA-DQA1*05:01-B1*03:01L HLA-DRB1*04:05L HLA-DRB1*01:02L HLA-DPA1*03:01-B1*04:02L HLA-DPA1*01:03-B1*04:02L HLA-DRB1*12:01L HLA-DPA1*03:01-B1*105:01L HLA-DQA1*03:01-B1*03:02L
  REGION 1..12: note = CONT. FROM ABOVE: HLA-DRB1*16:01L HLA-DQA1*02:01-B1*03:03L
DLKWARFPKSDG

SEQ ID NO: 11112 - protein, 10 aa, Severe acute respiratory syndrome coronavirus 2
  REGION 1..10: note = Table B: HLA-DQA1*05:01-B1*03:01L HLA-DRB1*13:03L HLA-DRB1*04:05L HLA-DRB4*03:01NL HLA-DRB1*14:01L HLA-DQA1*01-B1*05L
FPKSDGTGTI

SEQ ID NO: 11113 - protein, 13 aa, Severe acute respiratory syndrome coronavirus 2
  REGION 1..13: note = Table B: HLA-DQA1*05:01-B1*03:01L HLA-DQA1*01:01-B1*05:01L HLA-DQA1*01-B1*05L HLA-DQA1*05:05-B1*03:19L HLA-DPA1*03:01-B1*105:01L HLA-DQA1*05:05-B1*03:01L
DGTGTIYTELEPP

SEQ ID NO: 11114 - protein, 10 aa, Severe acute respiratory syndrome coronavirus 2
  REGION 1..10: note = Table B: HLA-DQA1*05:01-B1*03:01L HLA-DQA1*01:02-B1*06:02L HLA-DRB1*01:02L HLA-DQA1*01-B1*05L HLA-DQA1*05:01-B1*02:01L HLA-DPA1*03:01-B1*105:01L HLA-DQA1*03:01-B1*03:02L HLA-DQA1*05:05-B1*03:01L HLA-DPA1*01:02-B1*04:01L
  REGION 1..10: note = CONT. FROM ABOVE: HLA-DRB1*16:01L HLA-DQA1*01:03-B1*06:01L HLA-D QA1*02:01-B1*03:03L HLA-DRB1*15:03L
IYTELEPPCR

SEQ ID NO: 11115 - protein, 10 aa, Severe acute respiratory syndrome coronavirus 2
  REGION 1..10: note = Table B: HLA-DQA1*05:01-B1*03:01L HLA-DRB1*13:03M HLA-DRB1*01:03L HLA-DQA1*01:02-B1*06:02M HLA-DRB4*03:01NL HLA-DRB1*08:77L HLA-DPA1*01:03-B1*03:01L HLA-DPA1*03:01-B1*04:02L HLA-DRB1*03:01L HLA-DRB1*14:01L
  REGION 1..10: note = CONT. FROM ABOVE: HLA-DRB1*14:02L HLA-DRB1*11:01L HLA-DRB5*01:01 L HLA-DQA1*01-B1*05L HLA-DQA1*05:05-B1*03:19L HLA-DQA1*05:01-B1* 02:01M HLA-DPA1*01:03-B1*04:01L HLA-DPA1*01:03-B1*04:02L HLA-DPA 1*02:01-B1*13:01L HLA-DPA1*03:01-B1*105:01M
  REGION 1..10: note = CONT. FROM ABOVE: HLA-DPA1*01:02-B1*04:01L HLA-DRB1*10:01L HLA-D RB1*16:01L HLA-DQA1*01:03-B1*06:01L HLA-DRB1*08:02L HLA-DQA1*02: 01-B1*03:03L HLA-DRB1*15:03L
DTPKGPKVKY

SEQ ID NO: 11116 - protein, 10 aa, Severe acute respiratory syndrome coronavirus 2
  REGION 1..10: note = Table B: HLA-DQA1*05:01-B1*03:01L HLA-DQA1*05:01-B1*02:01L
TPKGPKVKYL

SEQ ID NO: 11117 - protein, 15 aa, Severe acute respiratory syndrome coronavirus 2
  REGION 1..15: note = Table B: HLA-DQA1*05:01-B1*03:01L HLA-DRB1*04:03L HLA-DRB1*13:02L HLA-DRB1*04:02L HLA-DRB1*04:04L HLA-DPA1*01:03-B1*03:01L HLA-DRB1*11:02L HLA-DRB1*11:03L HLA-DRB1*14:02L HLA-DQA1*05:05-B1*03:19L
  REGION 1..15: note = CONT. FROM ABOVE: HLA-DPA1*01:03-B1*04:01L HLA-DQA1*05:05-B1*03: 116L HLA-DRB3*01:01L HLA-DQA1*03:01-B1*03:02L HLA-DPA1*01:03-B1* 104:01L HLA-DQA1*05:05-B1*03:01L HLA-DRB1*07:01L HLA-DQA1*01:03- B1*06:01L HLA-DRB1*08:02L
GPKVKYLYFIKGLNN

SEQ ID NO: 11118 - protein, 12 aa, Severe acute respiratory syndrome coronavirus 2
  REGION 1..12: note = Table B: HLA-DQA1*05:01-B1*03:01L HLA-DRB1*01:03L HLA-DRB1*04:05L HLA-DRB1*01:02L HLA-DRB1*08:04L HLA-DPA1*01:03-B1*03:01L HLA-DQA1*05:05-B1*03:19L HLA-DPA1*01:03-B1*04:02L HLA-DRB1*12:01L
  REGION 1..12: note = CONT. FROM ABOVE: HLA-DQA1*05:05-B1*03:01L HLA-DRB1*04:08L
YLYFIKGLNNLN

SEQ ID NO: 11119 - protein, 11 aa, Severe acute respiratory syndrome coronavirus 2
  REGION 1..11: note = Table B: HLA-DQA1*05:01-B1*03:01L HLA-DRB1*13:02L HLA-DRB1*04:04L HLA-DRB1*04:05L HLA-DQA1*01:02-B1*06:02L HLA-DRB1*01:02L HLA-DRB1*14:01L HLA-DRB1*11:04L HLA-DQA1*01-B1*05L HLA-DRB1*04:10L HLA-DPA1*03:01-B1*105:01L
  REGION 1..11: note = CONT. FROM ABOVE: HLA-DRB1*14:54L HLA-DPA1*01:02-B1*04:01L HLA-D RB1*10:01L HLA-DRB1*16:01L HLA-DQA1*01:03-B1*06:01L HLA-DRB1*04: 08L HLA-DRB1*15:03L
FIKGLNNLNRG

SEQ ID NO: 11120 - protein, 11 aa, Severe acute respiratory syndrome coronavirus 2
  REGION 1..11: note = Table B: HLA-DQA1*05:01-B1*03:01L HLA-DQA1*05:05-B1*03:01L
LNRGMVLGSLA

SEQ ID NO: 11121 - protein, 11 aa, Severe acute respiratory syndrome coronavirus 2
  REGION 1..11: note = Table B: HLA-DQA1*05:01-B1*03:01L HLA-DRB1*13:03L HLA-DRB1*08:04L HLA-DRB1*11:04L HLA-DQA1*05:05-B1*03:19L HLA-DRB1*14:54L HLA-DQA1*05:05-B1*03:01L
SLAATVRLQAG

SEQ ID NO: 11122 - protein, 10 aa, Severe acute respiratory syndrome coronavirus 2
  REGION 1..10: note = Table B: HLA-DQA1*05:01-B1*03:01L HLA-DRB1*04:03L HLA-DQA1*01:02-B1*06:02L HLA-DQA1*03:01-B1*03:02L HLA-DQA1*05:05-B1*03:01L HLA-DQA1*01:03-B1*06:01L HLA-DQA1*02:01-B1*03:03L
AATVRLQAGN

SEQ ID NO: 11123 - protein, 12 aa, Severe acute respiratory syndrome coronavirus 2
  REGION 1..12: note = Table B: HLA-DQA1*05:01-B1*03:01L HLA-DQA1*01:02-B1*06:02L HLA-DRB1*01:02L HLA-DRB4*03:01NL HLA-DRB1*12:01L HLA-DQA1*03:01-B1*03:02L HLA-DQA1*05:05-B1*03:01L HLA-DQA1*01:03-B1*06:01L
ATVRLQAGNATE

SEQ ID NO: 11124 - protein, 13 aa, Severe acute respiratory syndrome coronavirus 2
  REGION 1..13: note = Table B: HLA-DQA1*05:01-B1*03:01L HLA-DRB1*01:02L HLA-DQA1*05:05-B1*03:19L HLA-DQA1*03:01-B1*03:02L HLA-DQA1*05:05-B1*03:01L HLA-DQA1*01:03-B1*06:01L HLA-DRB1*15:03L
TVRLQAGNATEVP

SEQ ID NO: 11125 - protein, 13 aa, Severe acute respiratory syndrome coronavirus 2
  REGION 1..13: note = Table B: HLA-DQA1*05:01-B1*03:01L HLA-DRB1*04:03L HLA-DRB1*04:02L HLA-DQA1*05:05-B1*03:19L HLA-DQA1*03:01-B1*03:02L HLA-DQA1*05:05-B1*03:01L HLA-DRB1*14:17L
VRLQAGNATEVPA

SEQ ID NO: 11126 - protein, 10 aa, Severe acute respiratory syndrome coronavirus 2
  REGION 1..10: note = Table B: HLA-DQA1*05:01-B1*03:01L HLA-DRB1*13:03M HLA-DQA1*01:02-B1*06:02M HLA-DPA1*03:01-B1*04:02L HLA-DRB1*14:01L HLA-DRB1*14:02L HLA-DQA1*01-B1*05L HLA-DQA1*05:01-B1*02:01L HLA-DQA1*05:05-B1*03:116L
  REGION 1..10: note = CONT. FROM ABOVE: HLA-DPA1*02:01-B1*13:01L HLA-DPA1*03:01-B1*105 :01M HLA-DPA1*01:02-B1*04:01L HLA-DQA1*01:03-B1*06:01L HLA-DRB1* 15:03L
VPANSTVLSF

SEQ ID NO: 11127 - protein, 13 aa, Severe acute respiratory syndrome coronavirus 2
  REGION 1..13: note = Table B: HLA-DQA1*05:01-B1*03:01L HLA-DRB1*04:03L HLA-DRB1*01:03L HLA-DRB1*04:05L HLA-DRB1*01:02L HLA-DRB1*08:01L HLA-DQA1*01-B1*05L HLA-DPA1*01:03-B1*04:01L HLA-DPA1*02:01-B1*13:01L HLA-DQA1*03:01-B1*03:02L
  REGION 1..13: note = CONT. FROM ABOVE: HLA-DPA1*01:03-B1*02:01L HLA-DQA1*05:05-B1*03: 01L HLA-DRB1*16:01L HLA-DRB1*15:03L
VLSFCAFAVDAAK

SEQ ID NO: 11128 - protein, 10 aa, Severe acute respiratory syndrome coronavirus 2
  REGION 1..10: note = Table B: HLA-DQA1*05:01-B1*03:01L HLA-DRB1*04:01L HLA-DRB1*04:03L HLA-DRB1*13:02L HLA-DRB1*13:03L HLA-DRB1*01:03L HLA-DRB1*04:02L HLA-DRB1*04:04L HLA-DRB1*04:05L HLA-DRB1*01:01L HLA-DRB1*01:02L HLA-DRB4*03:01NL HLA-DRB1*08:04L HLA-DRB1*08:77L
  REGION 1..10: note = CONT. FROM ABOVE: HLA-DRB3*02:01L HLA-DPA1*01:03-B1*03:01L HLA-D RB1*03:01L HLA-DRB1*14:01L HLA-DRB1*11:03L HLA-DRB1*11:04L HLA-D RB1*14:02L HLA-DRB1*08:01L HLA-DRB1*11:01L HLA-DRB5*01:01L HLA-D QA1*01-B1*05L HLA-DQA1*05:01-B1*02:01L HLA-DRB1*13:01L
  REGION 1..10: note = CONT. FROM ABOVE: HLA-DRB1*12:01L HLA-DRB1*12:02L HLA-DRB3*01:01 L HLA-DPA1*03:01-B1*105:01L HLA-DQA1*03:01-B1*03:02L HLA-DRB1*14 :54L HLA-DQA1*05:05-B1*03:01L HLA-DRB1*14:17L HLA-DPA1*01:02-B1* 04:01L HLA-DRB1*10:01L HLA-DRB1*16:01L HLA-DRB1*04:08L
  REGION 1..10: note = CONT. FROM ABOVE: HLA-DRB1*08:03L HLA-DQA1*02:01-B1*03:03L HLA-D RB1*15:03L
FAVDAAKAYK

SEQ ID NO: 11129 - protein, 12 aa, Severe acute respiratory syndrome coronavirus 2
  REGION 1..12: note = Table B: HLA-DQA1*05:01-B1*03:01L HLA-DRB1*01:03L HLA-DRB1*04:05L HLA-DRB1*01:02L HLA-DRB1*08:04L HLA-DPA1*01:03-B1*03:01L HLA-DPA1*03:01-B1*04:02L HLA-DRB1*14:01L HLA-DRB1*11:04L HLA-DRB1*14:02L HLA-DRB5*01:01L
  REGION 1..12: note = CONT. FROM ABOVE: HLA-DQA1*01-B1*05L HLA-DQA1*05:05-B1*03:19L HL A-DPA1*01:03-B1*04:01L HLA-DRB1*04:10L HLA-DRB3*01:01L HLA-DPA1* 03:01-B1*105:01L HLA-DRB1*14:54L HLA-DQA1*05:05-B1*03:01L HLA-DR B1*14:17L HLA-DPA1*01:02-B1*04:01L HLA-DRB1*10:01L
  REGION 1..12: note = CONT. FROM ABOVE: HLA-DRB1*04:08L HLA-DRB1*08:03L
YKDYLASGGQPI

SEQ ID NO: 11130 - protein, 11 aa, Severe acute respiratory syndrome coronavirus 2
  REGION 1..11: note = Table B: HLA-DQA1*05:01-B1*03:01L HLA-DQA1*05:05-B1*03:19L HLA-DQA1*05:05-B1*03:01L HLA-DQA1*01:03-B1*06:01L HLA-DQA1*02:01-B1*03:03L
SGGQPITNCVK

SEQ ID NO: 11131 - protein, 12 aa, Severe acute respiratory syndrome coronavirus 2
  REGION 1..12: note = Table B: HLA-DQA1*05:01-B1*03:01L HLA-DQA1*01:02-B1*06:02L HLA-DQA1*05:05-B1*03:19L HLA-DQA1*05:05-B1*03:01L
TGTGQAITVTPE

SEQ ID NO: 11132 - protein, 12 aa, Severe acute respiratory syndrome coronavirus 2
  REGION 1..12: note = Table B: HLA-DQA1*05:01-B1*03:01L HLA-DQA1*01:02-B1*06:02L HLA-DQA1*01:01-B1*05:01L HLA-DQA1*01-B1*05L HLA-DQA1*05:05-B1*03:19L HLA-DQA1*05:05-B1*03:01L HLA-DRB1*16:01L
TGQAITVTPEAN

SEQ ID NO: 11133 - protein, 13 aa, Severe acute respiratory syndrome coronavirus 2
  REGION 1..13: note = Table B: HLA-DQA1*05:01-B1*03:01L HLA-DRB1*13:03L HLA-DRB1*01:03L HLA-DRB1*04:05L HLA-DQA1*01:02-B1*06:02L HLA-DRB1*01:02L HLA-DRB1*08:04L HLA-DPA1*01:03-B1*03:01L HLA-DPA1*03:01-B1*04:02L HLA-DRB1*11:03L
  REGION 1..13: note = CONT. FROM ABOVE: HLA-DQA1*01:01-B1*05:01L HLA-DQA1*05:05-B1*03: 19L HLA-DRB1*09:01L HLA-DPA1*03:01-B1*105:01L HLA-DQA1*05:05-B1* 03:01L HLA-DRB1*04:08L HLA-DRB1*08:03L
GQAITVTPEANMD

SEQ ID NO: 11134 - protein, 12 aa, Severe acute respiratory syndrome coronavirus 2
  REGION 1..12: note = Table B: HLA-DQA1*05:01-B1*03:01L HLA-DQA1*01:02-B1*06:02L HLA-DQA1*01:01-B1*05:01L HLA-DQA1*05:05-B1*03:19L HLA-DRB1*12:02L HLA-DPA1*03:01-B1*105:01L HLA-DQA1*05:05-B1*03:01L
AITVTPEANMDQ

SEQ ID NO: 11135 - protein, 13 aa, Severe acute respiratory syndrome coronavirus 2
  REGION 1..13: note = Table B: HLA-DQA1*05:01-B1*03:01L HLA-DRB1*13:02L HLA-DRB1*01:03L HLA-DRB1*04:02L HLA-DRB1*04:05L HLA-DRB4*03:01NL HLA-DRB1*14:02L HLA-DRB1*04:10L HLA-DPA1*02:01-B1*13:01L HLA-DQA1*05:05-B1*03:01L HLA-DRB1*04:08L HLA-DRB1*15:03L
VTPEANMDQESFG

SEQ ID NO: 11136 - protein, 15 aa, Severe acute respiratory syndrome coronavirus 2
  REGION 1..15: note = Table B: HLA-DQA1*05:01-B1*03:01L HLA-DRB1*13:02L HLA-DRB1*01:03L HLA-DRB1*04:04L HLA-DRB1*01:02L HLA-DRB4*03:01NL HLA-DPA1*01:03-B1*03:01L HLA-DRB1*14:02L HLA-DRB1*04:10L HLA-DPA1*01:03-B1*04:02L HLA-DRB3*01:01L
  REGION 1..15: note = CONT. FROM ABOVE: HLA-DPA1*02:01-B1*13:01L HLA-DRB1*14:54L HLA-D RB1*04:08L HLA-DRB1*15:03L
TPEANMDQESFGGAS

SEQ ID NO: 11137 - protein, 15 aa, Severe acute respiratory syndrome coronavirus 2
  REGION 1..15: note = Table B: HLA-DQA1*05:01-B1*03:01L HLA-DPA1*03:01-B1*105:01L
DQESFGGASCCLYCR

SEQ ID NO: 11138 - protein, 17 aa, Severe acute respiratory syndrome coronavirus 2
  REGION 1..17: note = Table B: HLA-DQA1*05:01-B1*03:01L HLA-DPA1*03:01-B1*105:01L
DHPNPKGFCDLKGKYVQ

SEQ ID NO: 11139 - protein, 15 aa, Severe acute respiratory syndrome coronavirus 2
  REGION 1..15: note = Table B: HLA-DQA1*05:01-B1*03:01L HLA-DPA1*03:01-B1*04:02L HLA-DQA1*05:05-B1*03:01L
DLKGKYVQIPTTCAN

SEQ ID NO: 11140 - protein, 14 aa, Severe acute respiratory syndrome coronavirus 2
  REGION 1..14: note = Table B: HLA-DQA1*05:01-B1*03:01L HLA-DRB1*13:02L HLA-DRB1*01:01L HLA-DPA1*01:03-B1*03:01L HLA-DRB1*14:01L HLA-DQA1*01-B1*05L HLA-DQA1*05:05-B1*03:19L HLA-DQA1*05:01-B1*02:01L HLA-DRB4*01:01L
  REGION 1..14: note = CONT. FROM ABOVE: HLA-DPA1*01:03-B1*04:02L HLA-DRB3*01:01L HLA-D PA1*02:01-B1*13:01L HLA-DPA1*03:01-B1*105:01L HLA-DQA1*05:05-B1* 03:01L
GKYVQIPTTCANDP

SEQ ID NO: 11141 - protein, 13 aa, Severe acute respiratory syndrome coronavirus 2
  REGION 1..13: note = Table B: HLA-DQA1*05:01-B1*03:01L HLA-DRB1*04:03L HLA-DRB1*01:03L HLA-DRB1*04:02L HLA-DRB1*04:05L HLA-DQA1*01:02-B1*06:02L HLA-DRB4*03:01NL HLA-DPA1*01:03-B1*03:01L HLA-DQA1*01:01-B1*05:01L
  REGION 1..13: note = CONT. FROM ABOVE: HLA-DQA1*05:05-B1*03:19L HLA-DRB1*04:10L HLA-D RB1*12:01L HLA-DPA1*02:01-B1*13:01L HLA-DPA1*03:01-B1*105:01L HL A-DQA1*05:05-B1*03:01L HLA-DRB1*14:17L HLA-DRB1*16:01L HLA-DQA1* 01:03-B1*06:01L HLA-DRB1*04:08L
VQIPTTCANDPVG

SEQ ID NO: 11142 - protein, 14 aa, Severe acute respiratory syndrome coronavirus 2
  REGION 1..14: note = Table B: HLA-DQA1*05:01-B1*03:01L HLA-DRB1*13:02L HLA-DRB1*01:03L HLA-DRB1*04:05L HLA-DRB1*01:02L HLA-DPA1*01:03-B1*03:01L HLA-DQA1*01:01-B1*05:01L HLA-DQA1*05:05-B1*03:19L HLA-DQA1*05:01-B1*02:01L
  REGION 1..14: note = CONT. FROM ABOVE: HLA-DRB1*12:01L HLA-DPA1*02:01-B1*13:01L HLA-D PA1*03:01-B1*105:01L HLA-DQA1*05:05-B1*03:01L HLA-DRB1*16:01L HL A-DRB1*15:03L
DQLREPMLQSADAQ

SEQ ID NO: 11143 - protein, 12 aa, Severe acute respiratory syndrome coronavirus 2
  REGION 1..12: note = Table B: HLA-DQA1*05:01-B1*03:01L HLA-DRB1*04:03L HLA-DQA1*05:05-B1*03:19L HLA-DQA1*05:01-B1*02:01L HLA-DQA1*05:05-B1*03:01L
PMLQSADAQSFL

SEQ ID NO: 11144 - protein, 11 aa, Severe acute respiratory syndrome coronavirus 2
  REGION 1..11: note = Table B: HLA-DQA1*05:01-B1*03:01L HLA-DQA1*01:02-B1*06:02L HLA-DQA1*05:05-B1*03:19L HLA-DPA1*03:01-B1*105:01L HLA-DQA1*03:01-B1*03:02L HLA-DQA1*05:05-B1*03:01L HLA-DQA1*02:01-B1*03:03L
LQSADAQSFLN

SEQ ID NO: 11145 - protein, 15 aa, Severe acute respiratory syndrome coronavirus 2
  REGION 1..15: note = Table B: HLA-DQA1*05:01-B1*03:01L HLA-DRB1*12:01L HLA-DPA1*03:01-B1*105:01L HLA-DQA1*05:05-B1*03:01L HLA-DRB1*16:01L HLA-DRB1*15:03L
AQSFLNRVCGVSAAR

SEQ ID NO: 11146 - protein, 14 aa, Severe acute respiratory syndrome coronavirus 2
  REGION 1..14: note = Table B: HLA-DQA1*05:01-B1*03:01L HLA-DRB1*01:02L HLA-DRB1*12:01L HLA-DPA1*03:01-B1*105:01L HLA-DQA1*05:05-B1*03:01L HLA-DQA1*02:01-B1*03:03L HLA-DRB1*15:03L
LNRVCGVSAARLTP

SEQ ID NO: 11147 - protein, 10 aa, Severe acute respiratory syndrome coronavirus 2
  REGION 1..10: note = Table B: HLA-DQA1*05:01-B1*03:01L HLA-DQA1*01:02-B1*06:02L HLA-DQA1*05:05-B1*03:19L HLA-DQA1*05:05-B1*03:01L HLA-DQA1*01:03-B1*06:01L HLA-DQA1*02:01-B1*03:03L
VSAARLTPCG

SEQ ID NO: 11148 - protein, 14 aa, Severe acute respiratory syndrome coronavirus 2
  REGION 1..14: note = Table B: HLA-DQA1*05:01-B1*03:01L HLA-DRB1*04:01L HLA-DRB1*01:03L HLA-DRB1*04:04L HLA-DRB1*01:02L HLA-DRB4*03:01NL HLA-DRB1*08:04L HLA-DPA1*01:03-B1*03:01L HLA-DRB1*11:04L HLA-DQA1*05:05-B1*03:19L HLA-DRB1*12:01L
  REGION 1..14: note = CONT. FROM ABOVE: HLA-DPA1*03:01-B1*105:01L HLA-DQA1*03:01-B1*03 :02L HLA-DRB1*10:01L HLA-DRB1*16:01L HLA-DRB1*04:08L HLA-DQA1*02 :01-B1*03:03L HLA-DRB1*15:03L
AARLTPCGTGTSTD

SEQ ID NO: 11149 - protein, 11 aa, Severe acute respiratory syndrome coronavirus 2
  REGION 1..11: note = Table B: HLA-DQA1*05:01-B1*03:01L HLA-DRB1*04:01L HLA-DRB1*13:02L HLA-DRB1*13:03L HLA-DRB1*01:03L HLA-DRB1*04:02L HLA-DRB1*04:05L HLA-DRB1*01:02L HLA-DRB4*03:01NL HLA-DRB1*08:04L HLA-DPA1*01:03-B1*03:01L HLA-DRB1*03:01L HLA-DRB1*11:04L
  REGION 1..11: note = CONT. FROM ABOVE: HLA-DRB1*14:02L HLA-DRB1*08:01L HLA-DRB1*11:01 L HLA-DRB1*12:01L HLA-DRB3*01:01L HLA-DRB1*14:54L HLA-DRB1*14:17 L HLA-DRB1*04:08L HLA-DQA1*02:01-B1*03:03L
IYNDKVAGFAK

SEQ ID NO: 11150 - protein, 11 aa, Severe acute respiratory syndrome coronavirus 2
  REGION 1..11: note = Table B: HLA-DQA1*05:01-B1*03:01L HLA-DRB1*01:03L HLA-DQA1*01:02-B1*06:02L HLA-DPA1*03:01-B1*04:02L HLA-DPA1*01:03-B1*04:01L HLA-DPA1*01:03-B1*04:02L HLA-DQA1*03:01-B1*03:02L HLA-DRB1*16:01L HLA-DRB1*04:08L
VAGFAKFLKTN

SEQ ID NO: 11151 - protein, 10 aa, Severe acute respiratory syndrome coronavirus 2
  REGION 1..10: note = Table B: HLA-DQA1*05:01-B1*03:01L HLA-DRB1*13:03L HLA-DRB1*01:03L HLA-DQA1*01:02-B1*06:02L HLA-DRB4*03:01NL HLA-DRB1*08:77M HLA-DPA1*01:03-B1*03:01M HLA-DPA1*03:01-B1*04:02L HLA-DRB1*03:01L HLA-DRB1*11:02L
  REGION 1..10: note = CONT. FROM ABOVE: HLA-DQA1*01-B1*05L HLA-DQA1*05:05-B1*03:19M HL A-DQA1*05:01-B1*02:01M HLA-DRB4*01:01L HLA-DPA1*01:03-B1*04:01L HLA-DRB1*12:01L HLA-DPA1*01:03-B1*104:01M HLA-DPA1*01:02-B1*04:0 1L HLA-DRB1*10:01L HLA-DRB1*16:01M HLA-DRB1*15:03L
DEDDNLIDSY

SEQ ID NO: 11152 - protein, 13 aa, Severe acute respiratory syndrome coronavirus 2
  REGION 1..13: note = Table B: HLA-DQA1*05:01-B1*03:01L HLA-DRB1*04:03L HLA-DRB1*04:05L HLA-DRB1*01:02L HLA-DPA1*03:01-B1*04:02L HLA-DPA1*01:03-B1*04:02L HLA-DRB1*14:17L HLA-DRB1*15:03L
DDNLIDSYFVVKR

SEQ ID NO: 11153 - protein, 14 aa, Severe acute respiratory syndrome coronavirus 2
  REGION 1..14: note = Table B: HLA-DQA1*05:01-B1*03:01L HLA-DRB1*04:03L HLA-DRB1*04:04L HLA-DRB1*08:04L HLA-DPA1*03:01-B1*04:02L HLA-DRB1*11:04L HLA-DRB1*11:01L HLA-DPA1*01:03-B1*04:01L HLA-DPA1*01:03-B1*04:02L HLA-DPA1*02:01-B1*13:01L
  REGION 1..14: note = CONT. FROM ABOVE: HLA-DPA1*01:03-B1*02:01L
DNLIDSYFVVKRHT

SEQ ID NO: 11154 - protein, 11 aa, Severe acute respiratory syndrome coronavirus 2
  REGION 1..11: note = Table B: HLA-DQA1*05:01-B1*03:01L HLA-DPA1*03:01-B1*04:02L HLA-DRB1*14:01L HLA-DRB1*08:01L HLA-DRB1*04:08L
DSYFVVKRHTF

SEQ ID NO: 11155 - protein, 15 aa, Severe acute respiratory syndrome coronavirus 2
  REGION 1..15: note = Table B: HLA-DQA1*05:01-B1*03:01L HLA-DRB1*04:04L HLA-DQA1*01-B1*05L HLA-DPA1*03:01-B1*105:01L
FVVKRHTFSNYQHEE

SEQ ID NO: 11156 - protein, 12 aa, Severe acute respiratory syndrome coronavirus 2
  REGION 1..12: note = Table B: HLA-DQA1*05:01-B1*03:01L HLA-DRB1*01:03L HLA-DRB1*04:05L HLA-DRB1*01:02L HLA-DRB1*14:01L HLA-DQA1*01:01-B1*05:01L HLA-DRB1*08:01L HLA-DRB1*04:10L HLA-DRB1*12:01L HLA-DPA1*02:01-B1*13:01L
  REGION 1..12: note = CONT. FROM ABOVE: HLA-DPA1*01:02-B1*04:01L HLA-DRB1*04:08L HLA-D RB1*08:03L HLA-DRB1*15:03L
RHTFSNYQHEET

SEQ ID NO: 11157 - protein, 13 aa, Severe acute respiratory syndrome coronavirus 2
  REGION 1..13: note = Table B: HLA-DQA1*05:01-B1*03:01L HLA-DRB1*13:02L HLA-DRB1*13:03L HLA-DRB4*03:01NL HLA-DPA1*01:03-B1*03:01L HLA-DPA1*03:01-B1*04:02L HLA-DRB1*11:03L HLA-DRB1*14:02L HLA-DRB4*01:01L HLA-DRB3*01:01L HLA-DPA1*02:01-B1*13:01L
  REGION 1..13: note = CONT. FROM ABOVE: HLA-DRB1*14:54L HLA-DRB1*08:02L HLA-DRB1*08:03 L
TIYNLLKDCPAVA

SEQ ID NO: 11158 - protein, 14 aa, Severe acute respiratory syndrome coronavirus 2
  REGION 1..14: note = Table B: HLA-DQA1*05:01-B1*03:01L HLA-DRB1*13:02L HLA-DRB3*01:01L HLA-DPA1*02:01-B1*13:01L
IYNLLKDCPAVAKH

SEQ ID NO: 11159 - protein, 13 aa, Severe acute respiratory syndrome coronavirus 2
  REGION 1..13: note = Table B: HLA-DQA1*05:01-B1*03:01L HLA-DRB1*04:03L HLA-DRB1*13:02L HLA-DPA1*02:01-B1*13:01L HLA-DQA1*01:03-B1*06:01L
NLLKDCPAVAKHD

SEQ ID NO: 11160 - protein, 13 aa, Severe acute respiratory syndrome coronavirus 2
  REGION 1..13: note = Table B: HLA-DQA1*05:01-B1*03:01L HLA-DRB1*14:01L HLA-DPA1*02:01-B1*13:01L HLA-DPA1*03:01-B1*105:01L
LLKDCPAVAKHDF

SEQ ID NO: 11161 - protein, 11 aa, Severe acute respiratory syndrome coronavirus 2
  REGION 1..11: note = Table B: HLA-DQA1*05:01-B1*03:01L HLA-DRB1*13:03L HLA-DRB1*01:03L HLA-DRB1*04:02L HLA-DQA1*01:02-B1*06:02L HLA-DQA1*01:01-B1*05:01L HLA-DRB1*08:01L HLA-DQA1*05:05-B1*03:19L HLA-DRB1*12:01L
  REGION 1..11: note = CONT. FROM ABOVE: HLA-DQA1*05:05-B1*03:01L HLA-DQA1*01:03-B1*06: 01L
IDGDMVPHISR

SEQ ID NO: 11162 - protein, 12 aa, Severe acute respiratory syndrome coronavirus 2
  REGION 1..12: note = Table B: HLA-DQA1*05:01-B1*03:01L HLA-DQA1*01:02-B1*06:02L HLA-DRB1*01:02L HLA-DRB1*04:08L
DGDMVPHISRQR

SEQ ID NO: 11163 - protein, 17 aa, Severe acute respiratory syndrome coronavirus 2
  REGION 1..17: note = Table B: HLA-DQA1*05:01-B1*03:01L HLA-DRB3*02:01L HLA-DRB1*14:01L HLA-DRB3*01:01L HLA-DQA1*05:05-B1*03:01L
DDYFNKKDWYDFVENPD

SEQ ID NO: 11164 - protein, 13 aa, Severe acute respiratory syndrome coronavirus 2
  REGION 1..13: note = Table B: HLA-DQA1*05:01-B1*03:01L HLA-DRB1*13:02L HLA-DRB1*01:03L HLA-DRB1*04:02L HLA-DRB1*01:02L HLA-DRB1*08:04L HLA-DRB3*02:01L HLA-DPA1*01:03-B1*03:01L HLA-DRB1*14:02L HLA-DQA1*01:01-B1*05:01L HLA-DRB1*08:01L
  REGION 1..13: note = CONT. FROM ABOVE: HLA-DQA1*05:05-B1*03:19L HLA-DPA1*01:03-B1*04: 01L HLA-DRB1*09:01L HLA-DPA1*01:03-B1*04:02L HLA-DPA1*01:03-B1*1 04:01L HLA-DQA1*05:05-B1*03:01L HLA-DPA1*01:02-B1*04:01L HLA-DRB 1*08:03L HLA-DQA1*02:01-B1*03:03L
KDWYDFVENPDIL

SEQ ID NO: 11165 - protein, 10 aa, Severe acute respiratory syndrome coronavirus 2
  REGION 1..10: note = Table B: HLA-DQA1*05:01-B1*03:01L HLA-DRB1*13:02L HLA-DRB1*13:03L HLA-DRB1*01:03L HLA-DRB1*01:02L HLA-DRB1*14:01L HLA-DRB1*08:01L HLA-DRB1*12:01L HLA-DRB1*12:02L HLA-DQA1*03:01-B1*03:02L HLA-DPA1*01:02-B1*04:01L
  REGION 1..10: note = CONT. FROM ABOVE: HLA-DRB1*16:01L HLA-DQA1*01:03-B1*06:01L HLA-D RB1*04:08L HLA-DQA1*02:01-B1*03:03L HLA-DRB1*15:03L
VYANLGERVR

SEQ ID NO: 11166 - protein, 10 aa, Severe acute respiratory syndrome coronavirus 2
  REGION 1..10: note = Table B: HLA-DQA1*05:01-B1*03:01L HLA-DRB1*13:02L HLA-DRB1*01:03L HLA-DRB1*08:01L HLA-DQA1*03:01-B1*03:02L HLA-DRB1*16:01L HLA-DQA1*01:03-B1*06:01L HLA-DQA1*02:01-B1*03:03L
RVRQALLKTV

SEQ ID NO: 11167 - protein, 10 aa, Severe acute respiratory syndrome coronavirus 2
  REGION 1..10: note = Table B: HLA-DQA1*05:01-B1*03:01L HLA-DRB1*13:02L HLA-DRB1*13:03L HLA-DRB1*01:03M HLA-DRB1*04:05L HLA-DQA1*01:02-B1*06:02L HLA-DRB1*08:77L HLA-DPA1*01:03-B1*03:01L HLA-DRB1*03:01L HLA-DRB1*14:01L
  REGION 1..10: note = CONT. FROM ABOVE: HLA-DRB1*14:02L HLA-DQA1*01:01-B1*05:01L HLA-D RB1*11:01L HLA-DQA1*05:05-B1*03:19L HLA-DQA1*05:01-B1*02:01L HLA -DPA1*01:03-B1*04:01L HLA-DQA1*05:05-B1*03:116L HLA-DPA1*01:03-B 1*04:02L HLA-DPA1*02:01-B1*13:01L HLA-DPA1*03:01-B1*105:01L
  REGION 1..10: note = CONT. FROM ABOVE: HLA-DQA1*03:01-B1*03:02L HLA-DRB1*16:01L HLA-D QA1*01:03-B1*06:01L HLA-DRB1*08:02L HLA-DQA1*02:01-B1*03:03M HLA -DRB1*15:03L
RQALLKTVQF

SEQ ID NO: 11168 - protein, 12 aa, Severe acute respiratory syndrome coronavirus 2
  REGION 1..12: note = Table B: HLA-DQA1*05:01-B1*03:01L HLA-DRB1*01:02L HLA-DQA1*05:05-B1*03:19L HLA-DPA1*03:01-B1*105:01L HLA-DRB1*04:08L HLA-DRB1*15:03L
TVQFCDAMRNAG

SEQ ID NO: 11169 - protein, 13 aa, Severe acute respiratory syndrome coronavirus 2
  REGION 1..13: note = Table B: HLA-DQA1*05:01-B1*03:01L HLA-DRB1*01:03L HLA-DRB1*04:04L HLA-DRB1*01:02L HLA-DPA1*01:03-B1*03:01L HLA-DQA1*05:05-B1*03:19L HLA-DRB1*12:01L HLA-DRB1*14:54L HLA-DRB1*10:01L HLA-DRB1*04:08L HLA-DRB1*15:03L
AGIVGVLTLDNQD

SEQ ID NO: 11170 - protein, 13 aa, Severe acute respiratory syndrome coronavirus 2
  REGION 1..13: note = Table B: HLA-DQA1*05:01-B1*03:01L HLA-DRB1*15:03L
GIVGVLTLDNQDL

SEQ ID NO: 11171 - protein, 13 aa, Severe acute respiratory syndrome coronavirus 2
  REGION 1..13: note = Table B: HLA-DQA1*05:01-B1*03:01L HLA-DRB1*13:02L HLA-DRB1*13:03L HLA-DRB1*01:03L HLA-DRB1*04:04L HLA-DRB1*01:02L HLA-DRB1*08:04L HLA-DRB1*08:77L HLA-DRB3*02:01L HLA-DPA1*01:03-B1*03:01L HLA-DPA1*03:01-B1*04:02L
  REGION 1..13: note = CONT. FROM ABOVE: HLA-DRB1*14:01L HLA-DRB1*14:02L HLA-DQA1*01:01 -B1*05:01L HLA-DQA1*05:05-B1*03:19L HLA-DRB4*01:01L HLA-DRB1*09: 01L HLA-DRB1*12:02L HLA-DPA1*02:01-B1*13:01L HLA-DPA1*01:03-B1*1 04:01L HLA-DRB1*07:01L HLA-DRB1*10:01L HLA-DRB1*04:08L
  REGION 1..13: note = CONT. FROM ABOVE: HLA-DRB1*08:03L HLA-DRB1*15:03L
IVGVLTLDNQDLN

SEQ ID NO: 11172 - protein, 14 aa, Severe acute respiratory syndrome coronavirus 2
  REGION 1..14: note = Table B: HLA-DQA1*05:01-B1*03:01L HLA-DRB1*01:01L HLA-DPA1*03:01-B1*04:02L HLA-DRB1*03:01L HLA-DRB1*08:01L HLA-DRB1*11:01L HLA-DQA1*05:05-B1*03:19L HLA-DRB4*01:01L HLA-DRB1*09:01L HLA-DPA1*02:01-B1*13:01L
  REGION 1..14: note = CONT. FROM ABOVE: HLA-DQA1*05:05-B1*03:01L HLA-DRB1*07:01L
VGVLTLDNQDLNGN

SEQ ID NO: 11173 - protein, 11 aa, Severe acute respiratory syndrome coronavirus 2
  REGION 1..11: note = Table B: HLA-DQA1*05:01-B1*03:01L HLA-DQA1*01:02-B1*06:02L HLA-DRB1*08:77L HLA-DPA1*01:03-B1*03:01L HLA-DPA1*03:01-B1*04:02L HLA-DRB1*03:01L HLA-DQA1*01-B1*05L HLA-DRB4*01:01L HLA-DPA1*01:03-B1*04:01L
  REGION 1..11: note = CONT. FROM ABOVE: HLA-DPA1*03:01-B1*105:01L HLA-DPA1*01:03-B1*10 4:01L HLA-DRB1*10:01L HLA-DRB1*16:01L HLA-DRB1*15:03L
TLDNQDLNGNW

SEQ ID NO: 11174 - protein, 12 aa, Severe acute respiratory syndrome coronavirus 2
  REGION 1..12: note = Table B: HLA-DQA1*05:01-B1*03:01L HLA-DQA1*01:02-B1*06:02L HLA-DRB1*08:77L HLA-DRB3*02:01L HLA-DPA1*01:03-B1*03:01L HLA-DRB1*11:03L HLA-DRB1*11:04L HLA-DQA1*01:01-B1*05:01L HLA-DRB5*01:01L HLA-DQA1*05:05-B1*03:19L HLA-DRB1*09:01L
  REGION 1..12: note = CONT. FROM ABOVE: HLA-DRB1*12:02L HLA-DPA1*03:01-B1*105:01L HLA- DQA1*05:05-B1*03:01L HLA-DRB1*10:01L HLA-DRB1*04:08L
FGDFIQTTPGSG

SEQ ID NO: 11175 - protein, 10 aa, Severe acute respiratory syndrome coronavirus 2
  REGION 1..10: note = Table B: HLA-DQA1*05:01-B1*03:01L
MPILTLTRAL

SEQ ID NO: 11176 - protein, 12 aa, Severe acute respiratory syndrome coronavirus 2
  REGION 1..12: note = Table B: HLA-DQA1*05:01-B1*03:01L HLA-DRB1*01:03L HLA-DRB1*04:04L HLA-DRB1*04:05L HLA-DQA1*01:02-B1*06:02L HLA-DRB1*01:02L HLA-DRB1*04:10L HLA-DRB1*12:01L HLA-DRB1*16:01L HLA-DQA1*01:03-B1*06:01L HLA-DRB1*04:08L
LTLTRALTAESH

SEQ ID NO: 11177 - protein, 12 aa, Severe acute respiratory syndrome coronavirus 2
  REGION 1..12: note = Table B: HLA-DQA1*05:01-B1*03:01L HLA-DRB1*04:05L HLA-DQA1*01:02-B1*06:02L HLA-DRB1*04:10L HLA-DRB1*16:01L
TRALTAESHVDT

SEQ ID NO: 11178 - protein, 11 aa, Severe acute respiratory syndrome coronavirus 2
  REGION 1..11: note = Table B: HLA-DQA1*05:01-B1*03:01L HLA-DQA1*01:02-B1*06:02L HLA-DQA1*01-B1*05L HLA-DQA1*05:05-B1*03:19L HLA-DPA1*03:01-B1*105:01L HLA-DQA1*05:05-B1*03:01L HLA-DRB1*16:01L
ALTAESHVDTD

SEQ ID NO: 11179 - protein, 10 aa, Severe acute respiratory syndrome coronavirus 2
  REGION 1..10: note = Table B: HLA-DQA1*05:01-B1*03:01L HLA-DPA1*01:03-B1*03:01L HLA-DQA1*01-B1*05L HLA-DQA1*05:05-B1*03:19L HLA-DQA1*05:01-B1*02:01L HLA-DPA1*01:03-B1*04:01L HLA-DPA1*01:03-B1*104:01L HLA-DRB1*16:01L
TDLTKPYIKW

SEQ ID NO: 11180 - protein, 10 aa, Severe acute respiratory syndrome coronavirus 2
  REGION 1..10: note = Table B: HLA-DQA1*05:01-B1*03:01L HLA-DRB1*03:01L HLA-DQA1*05:05-B1*03:19L HLA-DQA1*05:01-B1*02:01L HLA-DRB1*16:01L HLA-DQA1*02:01-B1*03:03L
EERLKLFDRY

SEQ ID NO: 11181 - protein, 15 aa, Severe acute respiratory syndrome coronavirus 2
  REGION 1..15: note = Table B: HLA-DQA1*05:01-B1*03:01L HLA-DRB1*04:03L HLA-DRB1*13:02L HLA-DRB1*01:03L HLA-DRB1*04:05L HLA-DRB1*08:04L HLA-DPA1*01:03-B1*03:01L HLA-DPA1*03:01-B1*04:02L HLA-DRB1*03:01L HLA-DRB1*11:04L HLA-DRB1*08:01L HLA-DRB1*11:01L
  REGION 1..15: note = CONT. FROM ABOVE: HLA-DQA1*05:05-B1*03:19L HLA-DQA1*05:01-B1*02: 01L HLA-DRB1*12:01L HLA-DRB3*01:01L HLA-DPA1*02:01-B1*13:01L HLA -DPA1*03:01-B1*105:01L HLA-DQA1*03:01-B1*03:02L HLA-DQA1*05:05-B 1*03:01L HLA-DPA1*01:02-B1*04:01L HLA-DRB1*07:01L
  REGION 1..15: note = CONT. FROM ABOVE: HLA-DRB1*16:01L HLA-DQA1*01:03-B1*06:01L HLA-D RB1*04:08L HLA-DQA1*02:01-B1*03:03L
DQTYHPNCVNCLDDR

SEQ ID NO: 11182 - protein, 15 aa, Severe acute respiratory syndrome coronavirus 2
  REGION 1..15: note = Table B: HLA-DQA1*05:01-B1*03:01L HLA-DRB1*04:03L HLA-DPA1*01:03-B1*03:01L HLA-DQA1*05:01-B1*02:01L HLA-DRB1*12:01L HLA-DRB1*16:01L HLA-DRB1*04:08L
NVLFSTVFPPTSFGP

SEQ ID NO: 11183 - protein, 11 aa, Severe acute respiratory syndrome coronavirus 2
  REGION 1..11: note = Table B: HLA-DQA1*05:01-B1*03:01L HLA-DRB1*13:03L HLA-DRB1*04:02L HLA-DQA1*01:02-B1*06:02L HLA-DRB4*03:01NL HLA-DPA1*03:01-B1*04:02L HLA-DRB1*14:01L HLA-DQA1*05:05-B1*03:19L HLA-DQA1*05:01-B1*02:01L
  REGION 1..11: note = CONT. FROM ABOVE: HLA-DRB1*12:01L HLA-DPA1*02:01-B1*13:01L HLA-D PA1*03:01-B1*105:01L HLA-DRB1*14:17L HLA-DPA1*01:02-B1*04:01L HL A-DRB1*16:01L HLA-DQA1*01:03-B1*06:01L HLA-DRB1*15:03L
TVFPPTSFGPL

SEQ ID NO: 11184 - protein, 17 aa, Severe acute respiratory syndrome coronavirus 2
  REGION 1..17: note = Table B: HLA-DQA1*05:01-B1*03:01L HLA-DRB1*13:02L HLA-DRB1*13:03L HLA-DRB1*04:02L HLA-DRB1*04:05L HLA-DPA1*03:01-B1*04:02L HLA-DRB1*11:02L HLA-DRB1*11:03L HLA-DRB1*14:02L HLA-DQA1*05:05-B1*03:116L
  REGION 1..17: note = CONT. FROM ABOVE: HLA-DPA1*01:03-B1*04:02L HLA-DRB1*12:01L HLA-D RB3*01:01L HLA-DPA1*02:01-B1*13:01L HLA-DPA1*03:01-B1*105:01L HL A-DQA1*05:05-B1*03:01L HLA-DPA1*01:02-B1*04:01L HLA-DRB1*04:08L HLA-DRB1*08:02L HLA-DRB1*08:03L
FPPTSFGPLVRKIFVDG

SEQ ID NO: 11185 - protein, 12 aa, Severe acute respiratory syndrome coronavirus 2
  REGION 1..12: note = Table B: HLA-DQA1*05:01-B1*03:01L HLA-DQA1*01:02-B1*06:02L HLA-DRB1*01:02L HLA-DPA1*03:01-B1*105:01L HLA-DQA1*03:01-B1*03:02L HLA-DPA1*01:02-B1*04:01L HLA-DRB1*16:01L HLA-DQA1*02:01-B1*03:03L
VVSTGYHFRELG

SEQ ID NO: 11186 - protein, 13 aa, Severe acute respiratory syndrome coronavirus 2
  REGION 1..13: note = Table B: HLA-DQA1*05:01-B1*03:01L HLA-DRB1*04:01L HLA-DRB1*04:04L HLA-DRB1*08:04L HLA-DRB1*11:04L HLA-DPA1*02:01-B1*13:01L HLA-DRB1*15:03L
YHFRELGVVHNQD

SEQ ID NO: 11187 - protein, 10 aa, Severe acute respiratory syndrome coronavirus 2
  REGION 1..10: note = Table B: HLA-DQA1*05:01-B1*03:01L HLA-DRB1*04:03L HLA-DRB1*13:03L HLA-DRB1*01:03L HLA-DRB1*04:02L HLA-DRB1*04:05L HLA-DRB1*01:02L HLA-DRB4*03:01NL HLA-DRB1*14:01L HLA-DQA1*01-B1*05L HLA-DRB1*12:01L HLA-DQA1*03:01-B1*03:02L
  REGION 1..10: note = CONT. FROM ABOVE: HLA-DRB1*14:54L HLA-DRB1*14:17L HLA-DPA1*01:02 -B1*04:01L HLA-DRB1*16:01L HLA-DQA1*01:03-B1*06:01L HLA-DQA1*02: 01-B1*03:03L HLA-DRB1*15:03L
VVHNQDVNLH

SEQ ID NO: 11188 - protein, 12 aa, Severe acute respiratory syndrome coronavirus 2
  REGION 1..12: note = Table B: HLA-DQA1*05:01-B1*03:01L HLA-DRB1*04:03L HLA-DQA1*01:02-B1*06:02L HLA-DRB1*14:01L HLA-DPA1*03:01-B1*105:01L HLA-DRB1*15:03L
NQDVNLHSSRLS

SEQ ID NO: 11189 - protein, 12 aa, Severe acute respiratory syndrome coronavirus 2
  REGION 1..12: note = Table B: HLA-DQA1*05:01-B1*03:01L HLA-DRB1*01:03L HLA-DQA1*01:02-B1*06:02L HLA-DRB1*01:02L HLA-DRB1*12:01L HLA-DQA1*03:01-B1*03:02L HLA-DRB1*16:01L HLA-DQA1*01:03-B1*06:01L HLA-DRB1*04:08L
VNLHSSRLSFKE

SEQ ID NO: 11190 - protein, 14 aa, Severe acute respiratory syndrome coronavirus 2
  REGION 1..14: note = Table B: HLA-DQA1*05:01-B1*03:01L HLA-DRB1*13:02L HLA-DRB1*01:03L HLA-DRB1*04:04L HLA-DRB1*08:04L HLA-DPA1*01:03-B1*03:01L HLA-DPA1*03:01-B1*04:02L HLA-DRB1*08:01L HLA-DRB1*11:01L HLA-DQA1*05:05-B1*03:19L
  REGION 1..14: note = CONT. FROM ABOVE: HLA-DQA1*05:01-B1*02:01L HLA-DPA1*01:03-B1*04: 01L HLA-DPA1*01:03-B1*04:02L HLA-DPA1*02:01-B1*13:01L HLA-DPA1*0 1:03-B1*02:01L HLA-DPA1*01:03-B1*104:01L HLA-DQA1*05:05-B1*03:01 L HLA-DPA1*01:02-B1*04:01L HLA-DRB1*10:01L
  REGION 1..14: note = CONT. FROM ABOVE: HLA-DQA1*01:03-B1*06:01L
LSFKELLVYAADPA

SEQ ID NO: 11191 - protein, 10 aa, Severe acute respiratory syndrome coronavirus 2
  REGION 1..10: note = Table B: HLA-DQA1*05:01-B1*03:01L HLA-DQA1*01:02-B1*06:02L HLA-DRB4*03:01NL HLA-DRB1*12:01L HLA-DQA1*03:01-B1*03:02L HLA-DQA1*05:05-B1*03:01L HLA-DQA1*01:03-B1*06:01L HLA-DQA1*02:01-B1*03:03L
AASGNLLLDK

SEQ ID NO: 11192 - protein, 12 aa, Severe acute respiratory syndrome coronavirus 2
  REGION 1..12: note = Table B: HLA-DQA1*05:01-B1*03:01L HLA-DQA1*01:02-B1*06:02L
ASGNLLLDKRTT

SEQ ID NO: 11193 - protein, 14 aa, Severe acute respiratory syndrome coronavirus 2
  REGION 1..14: note = Table B: HLA-DQA1*05:01-B1*03:01L HLA-DRB1*04:01L HLA-DRB1*04:05L HLA-DRB1*01:01L HLA-DRB4*03:01NL HLA-DPA1*03:01-B1*04:02L HLA-DRB1*11:02L HLA-DQA1*05:05-B1*03:19L HLA-DRB1*13:01L
  REGION 1..14: note = CONT. FROM ABOVE: HLA-DPA1*01:03-B1*04:02L HLA-DPA1*03:01-B1*105 :01L HLA-DRB1*14:17L HLA-DPA1*01:02-B1*04:01L HLA-DRB1*10:01L HL A-DRB1*08:03L
SGNLLLDKRTTCFS

SEQ ID NO: 11194 - protein, 11 aa, Severe acute respiratory syndrome coronavirus 2
  REGION 1..11: note = Table B: HLA-DQA1*05:01-B1*03:01L HLA-DRB1*04:02L HLA-DRB1*04:05L HLA-DQA1*01:02-B1*06:02L HLA-DRB4*03:01NL HLA-DQA1*05:01-B1*02:01L HLA-DRB1*04:10L HLA-DRB1*12:01L HLA-DRB1*14:54L HLA-DQA1*05:05-B1*03:01L HLA-DRB1*16:01L
  REGION 1..11: note = CONT. FROM ABOVE: HLA-DQA1*01:03-B1*06:01L
FSVAALTNNVA

SEQ ID NO: 11195 - protein, 14 aa, Severe acute respiratory syndrome coronavirus 2
  REGION 1..14: note = Table B: HLA-DQA1*05:01-B1*03:01L HLA-DRB1*13:02L HLA-DRB1*01:02L HLA-DRB1*14:01L HLA-DRB1*12:01L HLA-DRB1*15:03L
AALTNNVAFQTVKP

SEQ ID NO: 11196 - protein, 11 aa, Severe acute respiratory syndrome coronavirus 2
  REGION 1..11: note = Table B: HLA-DQA1*05:01-B1*03:01L HLA-DQA1*01:02-B1*06:02L HLA-DPA1*03:01-B1*105:01L HLA-DQA1*01:03-B1*06:01L
TVKPGNFNKDF

SEQ ID NO: 11197 - protein, 17 aa, Severe acute respiratory syndrome coronavirus 2
  REGION 1..17: note = Table B: HLA-DQA1*05:01-B1*03:01L HLA-DRB1*04:01L HLA-DRB3*02:01L HLA-DRB1*03:01L HLA-DRB1*11:02L HLA-DQA1*05:05-B1*03:19L HLA-DQA1*05:05-B1*03:01L HLA-DRB1*07:01L HLA-DRB1*10:01L HLA-DRB1*08:02L
KPGNFNKDFYDFAVSKG

SEQ ID NO: 11198 - protein, 12 aa, Severe acute respiratory syndrome coronavirus 2
  REGION 1..12: note = Table B: HLA-DQA1*05:01-B1*03:01L HLA-DRB1*13:02L HLA-DRB1*01:03L HLA-DRB1*04:05L HLA-DQA1*01:02-B1*06:02L HLA-DRB1*14:01L HLA-DRB1*08:01L HLA-DQA1*01-B1*05L HLA-DRB1*12:01L HLA-DPA1*03:01-B1*105:01L
  REGION 1..12: note = CONT. FROM ABOVE: HLA-DQA1*05:05-B1*03:01L HLA-DRB1*07:01L HLA-D RB1*04:08L HLA-DRB1*15:03L
DFAVSKGFFKEG

SEQ ID NO: 11199 - protein, 14 aa, Severe acute respiratory syndrome coronavirus 2
  REGION 1..14: note = Table B: HLA-DQA1*05:01-B1*03:01L HLA-DPA1*03:01-B1*105:01L HLA-DRB1*15:03L
AVSKGFFKEGSSVE

SEQ ID NO: 11200 - protein, 13 aa, Severe acute respiratory syndrome coronavirus 2
  REGION 1..13: note = Table B: HLA-DQA1*05:01-B1*03:01L HLA-DRB1*04:04L HLA-DQA1*01:02-B1*06:02L HLA-DRB1*01:01L HLA-DRB3*02:01L HLA-DPA1*01:03-B1*03:01L HLA-DPA1*03:01-B1*04:02L HLA-DRB1*03:01L HLA-DRB1*11:04L HLA-DRB1*11:01L HLA-DRB5*01:01L
  REGION 1..13: note = CONT. FROM ABOVE: HLA-DRB4*01:01L HLA-DRB1*04:10L HLA-DRB1*09:01 L HLA-DRB1*12:02L HLA-DRB3*01:01L HLA-DPA1*03:01-B1*105:01L HLA- DQA1*05:05-B1*03:01L HLA-DRB1*08:03L HLA-DQA1*02:01-B1*03:03L
HFFFAQDGNAAIS

SEQ ID NO: 11201 - protein, 12 aa, Severe acute respiratory syndrome coronavirus 2
  REGION 1..12: note = Table B: HLA-DQA1*05:01-B1*03:01L HLA-DRB1*04:01L HLA-DRB1*04:04L HLA-DRB1*04:05L HLA-DRB1*01:01L HLA-DRB1*01:02L HLA-DRB1*08:04L HLA-DRB3*02:01L HLA-DPA1*01:03-B1*03:01L HLA-DRB1*11:04L HLA-DRB1*11:01L HLA-DRB4*01:01L HLA-DRB1*04:10L
  REGION 1..12: note = CONT. FROM ABOVE: HLA-DRB1*12:02L HLA-DRB3*01:01L HLA-DPA1*03:01 -B1*105:01L HLA-DQA1*03:01-B1*03:02L HLA-DQA1*05:05-B1*03:01L HL A-DQA1*02:01-B1*03:03L HLA-DRB1*15:03L
FFAQDGNAAISD

SEQ ID NO: 11202 - protein, 11 aa, Severe acute respiratory syndrome coronavirus 2
  REGION 1..11: note = Table B: HLA-DQA1*05:01-B1*03:01L HLA-DRB1*13:03L HLA-DRB1*01:03L HLA-DQA1*01:02-B1*06:02L HLA-DRB1*08:77L HLA-DPA1*01:03-B1*03:01L HLA-DPA1*03:01-B1*04:02L HLA-DRB1*03:01L HLA-DRB1*11:02L HLA-DRB1*14:02L
  REGION 1..11: note = CONT. FROM ABOVE: HLA-DQA1*01-B1*05L HLA-DQA1*05:01-B1*02:01L HL A-DRB4*01:01L HLA-DPA1*01:03-B1*04:01L HLA-DPA1*01:03-B1*04:02L HLA-DRB1*12:01L HLA-DPA1*01:03-B1*104:01L HLA-DRB1*10:01L HLA-DR B1*16:01L HLA-DRB1*08:02L HLA-DQA1*02:01-B1*03:03L
  REGION 1..11: note = CONT. FROM ABOVE: HLA-DRB1*15:03L
AQDGNAAISDY

SEQ ID NO: 11203 - protein, 13 aa, Severe acute respiratory syndrome coronavirus 2
  REGION 1..13: note = Table B: HLA-DQA1*05:01-B1*03:01L HLA-DRB1*01:03L HLA-DRB1*04:05L HLA-DQA1*01:01-B1*05:01L HLA-DPA1*02:01-B1*13:01L HLA-DRB1*04:08L HLA-DRB1*15:03L
DGNAAISDYDYYR

SEQ ID NO: 11204 - protein, 10 aa, Severe acute respiratory syndrome coronavirus 2
  REGION 1..10: note = Table B: HLA-DQA1*05:01-B1*03:01L HLA-DRB1*13:03L HLA-DRB1*01:03L HLA-DQA1*01:02-B1*06:02M HLA-DRB4*03:01NL HLA-DRB1*08:77M HLA-DPA1*01:03-B1*03:01M HLA-DPA1*03:01-B1*04:02L HLA-DRB1*03:01L HLA-DRB1*11:02M
  REGION 1..10: note = CONT. FROM ABOVE: HLA-DRB1*14:02L HLA-DQA1*01-B1*05M HLA-DQA1*05 :05-B1*03:19H HLA-DQA1*05:01-B1*02:01M HLA-DRB4*01:01L HLA-DPA1* 01:03-B1*04:01L HLA-DQA1*05:05-B1*03:116L HLA-DPA1*01:03-B1*04:0 2L HLA-DRB1*12:01L HLA-DPA1*02:01-B1*13:01L
  REGION 1..10: note = CONT. FROM ABOVE: HLA-DPA1*03:01-B1*105:01L HLA-DPA1*01:03-B1*10 4:01M HLA-DRB1*10:01L HLA-DRB1*16:01M HLA-DRB1*08:02L HLA-DQA1*0 2:01-B1*03:03L HLA-DRB1*15:03L
AISDYDYYRY

SEQ ID NO: 11205 - protein, 12 aa, Severe acute respiratory syndrome coronavirus 2
  REGION 1..12: note = Table B: HLA-DQA1*05:01-B1*03:01L HLA-DRB1*13:02L HLA-DRB1*01:03L HLA-DQA1*01:02-B1*06:02L HLA-DRB1*01:02L HLA-DPA1*01:03-B1*03:01L HLA-DPA1*03:01-B1*04:02L HLA-DRB1*14:01L HLA-DRB1*14:02L HLA-DQA1*05:05-B1*03:19L
  REGION 1..12: note = CONT. FROM ABOVE: HLA-DQA1*05:01-B1*02:01L HLA-DRB1*12:01L HLA-D PA1*02:01-B1*13:01L HLA-DPA1*03:01-B1*105:01L HLA-DQA1*05:05-B1* 03:01L HLA-DRB1*15:03L
DYYRYNLPTMCD

SEQ ID NO: 11206 - protein, 12 aa, Severe acute respiratory syndrome coronavirus 2
  REGION 1..12: note = Table B: HLA-DQA1*05:01-B1*03:01L HLA-DRB1*13:02L HLA-DRB1*01:03L HLA-DRB1*04:05L HLA-DQA1*01:02-B1*06:02L HLA-DRB1*01:02L HLA-DPA1*01:03-B1*03:01L HLA-DPA1*03:01-B1*04:02L HLA-DRB1*14:01L HLA-DRB1*11:04L
  REGION 1..12: note = CONT. FROM ABOVE: HLA-DRB1*08:01L HLA-DRB1*11:01L HLA-DPA1*01:03 -B1*04:02L HLA-DRB1*12:01L HLA-DRB3*01:01L HLA-DPA1*02:01-B1*13: 01L HLA-DPA1*03:01-B1*105:01L HLA-DQA1*03:01-B1*03:02L HLA-DQA1* 05:05-B1*03:01L HLA-DPA1*01:02-B1*04:01L HLA-DRB1*16:01L
  REGION 1..12: note = CONT. FROM ABOVE: HLA-DQA1*01:03-B1*06:01L HLA-DRB1*04:08L HLA-D QA1*02:01-B1*03:03L HLA-DRB1*15:03L
YRYNLPTMCDIR

SEQ ID NO: 11207 - protein, 10 aa, Severe acute respiratory syndrome coronavirus 2
  REGION 1..10: note = Table B: HLA-DQA1*05:01-B1*03:01L HLA-DRB1*13:03L HLA-DQA1*01:02-B1*06:02M HLA-DRB1*08:77L HLA-DPA1*01:03-B1*03:01L HLA-DRB1*03:01L HLA-DRB1*14:02L HLA-DQA1*01-B1*05L HLA-DQA1*05:05-B1*03:19L
  REGION 1..10: note = CONT. FROM ABOVE: HLA-DQA1*05:01-B1*02:01L HLA-DRB4*01:01L HLA-D PA1*01:03-B1*04:01M HLA-DPA1*02:01-B1*13:01L HLA-DPA1*03:01-B1*1 05:01M HLA-DQA1*02:01-B1*03:03L HLA-DRB1*15:03L
EVVDKYFDCY

SEQ ID NO: 11208 - protein, 10 aa, Severe acute respiratory syndrome coronavirus 2
  REGION 1..10: note = Table B: HLA-DQA1*05:01-B1*03:01L HLA-DRB1*01:03L HLA-DQA1*01:02-B1*06:02L HLA-DPA1*01:03-B1*03:01L HLA-DRB1*03:01L HLA-DRB1*14:02L HLA-DQA1*05:05-B1*03:19L HLA-DQA1*05:01-B1*02:01L HLA-DPA1*01:03-B1*04:01L
  REGION 1..10: note = CONT. FROM ABOVE: HLA-DPA1*01:03-B1*04:02L HLA-DPA1*02:01-B1*13: 01L HLA-DPA1*03:01-B1*105:01L HLA-DQA1*01:03-B1*06:01L HLA-DQA1* 02:01-B1*03:03L HLA-DRB1*15:03L
KSAGFPFNKW

SEQ ID NO: 11209 - protein, 14 aa, Severe acute respiratory syndrome coronavirus 2
  REGION 1..14: note = Table B: HLA-DQA1*05:01-B1*03:01L HLA-DRB1*04:05L HLA-DRB1*08:04L HLA-DRB1*11:04L HLA-DRB1*11:01L HLA-DQA1*05:05-B1*03:19L HLA-DRB3*01:01L HLA-DQA1*05:05-B1*03:01L
FPFNKWGKARLYYD

SEQ ID NO: 11210 - protein, 15 aa, Severe acute respiratory syndrome coronavirus 2
  REGION 1..15: note = Table B: HLA-DQA1*05:01-B1*03:01L HLA-DRB3*02:01L HLA-DRB1*14:01L HLA-DRB1*14:02L HLA-DQA1*01:01-B1*05:01L HLA-DPA1*01:03-B1*04:01L HLA-DPA1*01:03-B1*04:02L HLA-DRB3*01:01L HLA-DPA1*01:03-B1*104:01L
  REGION 1..15: note = CONT. FROM ABOVE: HLA-DQA1*05:05-B1*03:01L HLA-DRB1*10:01L
GKARLYYDSMSYEDQ

SEQ ID NO: 11211 - protein, 13 aa, Severe acute respiratory syndrome coronavirus 2
  REGION 1..13: note = Table B: HLA-DQA1*05:01-B1*03:01L
EDQDALFAYTKRN

SEQ ID NO: 11212 - protein, 13 aa, Severe acute respiratory syndrome coronavirus 2
  REGION 1..13: note = Table B: HLA-DQA1*05:01-B1*03:01L HLA-DRB1*13:02L HLA-DRB1*13:03L HLA-DRB1*04:02L HLA-DRB1*04:05L HLA-DQA1*01:02-B1*06:02L HLA-DRB3*02:01L HLA-DRB1*11:03L HLA-DRB1*11:04L HLA-DRB1*14:02L HLA-DPA1*01:03-B1*04:01L
  REGION 1..13: note = CONT. FROM ABOVE: HLA-DPA1*01:03-B1*04:02L HLA-DRB3*01:01L HLA-D PA1*02:01-B1*13:01L HLA-DPA1*03:01-B1*105:01L HLA-DRB1*08:03L HL A-DQA1*02:01-B1*03:03L
DALFAYTKRNVIP

SEQ ID NO: 11213 - protein, 12 aa, Severe acute respiratory syndrome coronavirus 2
  REGION 1..12: note = Table B: HLA-DQA1*05:01-B1*03:01L HLA-DRB1*04:03L HLA-DRB1*01:03L HLA-DRB1*04:05L HLA-DQA1*01:02-B1*06:02L HLA-DRB1*01:02L HLA-DRB1*14:01L HLA-DRB1*08:01L HLA-DRB1*12:01L HLA-DPA1*02:01-B1*13:01L HLA-DRB1*16:01L
YTKRNVIPTITQ

SEQ ID NO: 11214 - protein, 10 aa, Severe acute respiratory syndrome coronavirus 2
  REGION 1..10: note = Table B: HLA-DQA1*05:01-B1*03:01L HLA-DQA1*01:02-B1*06:02L HLA-DRB1*08:77L HLA-DPA1*01:03-B1*03:01L HLA-DRB1*03:01L HLA-DRB1*11:02L HLA-DQA1*01-B1*05L HLA-DQA1*05:05-B1*03:19M HLA-DQA1*05:01-B1*02:01L HLA-DPA1*01:03-B1*04:01L
  REGION 1..10: note = CONT. FROM ABOVE: HLA-DRB1*12:01L HLA-DPA1*01:03-B1*104:01L HLA- DRB1*16:01L HLA-DQA1*02:01-B1*03:03L
PTITQMNLKY

SEQ ID NO: 11215 - protein, 14 aa, Severe acute respiratory syndrome coronavirus 2
  REGION 1..14: note = Table B: HLA-DQA1*05:01-B1*03:01L HLA-DRB1*13:02L HLA-DRB1*01:03L HLA-DRB1*04:02L HLA-DRB1*08:04L HLA-DRB1*14:01L HLA-DPA1*03:01-B1*105:01L HLA-DQA1*03:01-B1*03:02L HLA-DQA1*05:05-B1*03:01L HLA-DRB1*16:01L HLA-DRB1*04:08L
  REGION 1..14: note = CONT. FROM ABOVE: HLA-DRB1*15:03L
ITQMNLKYAISAKN

SEQ ID NO: 11216 - protein, 12 aa, Severe acute respiratory syndrome coronavirus 2
  REGION 1..12: note = Table B: HLA-DQA1*05:01-B1*03:01L HLA-DRB1*13:02L HLA-DRB1*04:02L HLA-DRB1*04:04L HLA-DRB1*04:05M HLA-DQA1*01:02-B1*06:02L HLA-DRB1*01:01L HLA-DPA1*01:03-B1*03:01L HLA-DRB1*11:01L HLA-DRB1*04:10L
  REGION 1..12: note = CONT. FROM ABOVE: HLA-DPA1*02:01-B1*13:01L HLA-DPA1*01:03-B1*104 :01L HLA-DPA1*01:02-B1*04:01L HLA-DRB1*07:01L HLA-DQA1*01:03-B1* 06:01L HLA-DRB1*15:03L
MNLKYAISAKNR

SEQ ID NO: 11217 - protein, 12 aa, Severe acute respiratory syndrome coronavirus 2
  REGION 1..12: note = Table B: HLA-DQA1*05:01-B1*03:01L HLA-DRB1*13:02L HLA-DRB1*04:04L HLA-DQA1*01:02-B1*06:02L HLA-DRB4*03:01NL HLA-DRB1*08:04L HLA-DRB1*11:04L HLA-DRB1*11:01L HLA-DRB1*04:10L HLA-DRB3*01:01L HLA-DPA1*02:01-B1*13:01L HLA-DRB1*14:54L
  REGION 1..12: note = CONT. FROM ABOVE: HLA-DPA1*01:02-B1*04:01L HLA-DRB1*15:03L
NLKYAISAKNRA

SEQ ID NO: 11218 - protein, 10 aa, Severe acute respiratory syndrome coronavirus 2
  REGION 1..10: note = Table B: HLA-DQA1*05:01-B1*03:01L HLA-DRB1*04:03L HLA-DRB1*13:02L HLA-DRB1*13:03L HLA-DRB1*01:03L HLA-DRB1*04:02L HLA-DRB1*04:05L HLA-DQA1*01:02-B1*06:02L HLA-DRB1*01:01L HLA-DRB1*01:02L HLA-DRB4*03:01NL HLA-DRB1*14:01L HLA-DRB1*11:04L
  REGION 1..10: note = CONT. FROM ABOVE: HLA-DRB1*08:01L HLA-DRB1*11:01L HLA-DRB1*12:01 L HLA-DRB3*01:01L HLA-DQA1*03:01-B1*03:02L HLA-DRB1*14:54L HLA-D RB1*14:17L HLA-DRB1*16:01L HLA-DRB1*04:08L HLA-DQA1*02:01-B1*03: 03L
YAISAKNRAR

SEQ ID NO: 11219 - protein, 14 aa, Severe acute respiratory syndrome coronavirus 2
  REGION 1..14: note = Table B: HLA-DQA1*05:01-B1*03:01L HLA-DQA1*02:01-B1*03:03L
ARTVAGVSICSTMT

SEQ ID NO: 11220 - protein, 12 aa, Severe acute respiratory syndrome coronavirus 2
  REGION 1..12: note = Table B: HLA-DQA1*05:01-B1*03:01L HLA-DRB1*04:05L HLA-DQA1*05:05-B1*03:19L HLA-DRB1*04:10L HLA-DPA1*03:01-B1*105:01L
GVSICSTMTNRQ

SEQ ID NO: 11221 - protein, 16 aa, Severe acute respiratory syndrome coronavirus 2
  REGION 1..16: note = Table B: HLA-DQA1*05:01-B1*03:01L HLA-DRB1*01:01L HLA-DPA1*01:03-B1*03:01L HLA-DQA1*03:01-B1*03:02L HLA-DPA1*01:03-B1*104:01L HLA-DRB1*07:01L
TNRQFHQKLLKSIAAT

SEQ ID NO: 11222 - protein, 13 aa, Severe acute respiratory syndrome coronavirus 2
  REGION 1..13: note = Table B: HLA-DQA1*05:01-B1*03:01L HLA-DPA1*02:01-B1*13:01L
HQKLLKSIAATRG

SEQ ID NO: 11223 - protein, 12 aa, Severe acute respiratory syndrome coronavirus 2
  REGION 1..12: note = Table B: HLA-DQA1*05:01-B1*03:01L HLA-DRB1*01:03L HLA-DQA1*01:02-B1*06:02L HLA-DRB1*01:02L HLA-DPA1*03:01-B1*105:01L HLA-DQA1*05:05-B1*03:01L HLA-DRB1*16:01L HLA-DQA1*01:03-B1*06:01L HLA-DRB1*04:08L
  REGION 1..12: note = CONT. FROM ABOVE: HLA-DQA1*02:01-B1*03:03L HLA-DRB1*15:03L
LLKSIAATRGAT

SEQ ID NO: 11224 - protein, 11 aa, Severe acute respiratory syndrome coronavirus 2
  REGION 1..11: note = Table B: HLA-DQA1*05:01-B1*03:01L HLA-DQA1*03:01-B1*03:02L HLA-DQA1*02:01-B1*03:03L
AATRGATVVIG

SEQ ID NO: 11225 - protein, 12 aa, Severe acute respiratory syndrome coronavirus 2
  REGION 1..12: note = Table B: HLA-DQA1*05:01-B1*03:01L HLA-DQA1*01:02-B1*06:02L HLA-DPA1*01:03-B1*03:01L HLA-DPA1*03:01-B1*04:02L HLA-DQA1*05:05-B1*03:19L HLA-DQA1*05:01-B1*02:01L HLA-DRB1*12:01L HLA-DPA1*03:01-B1*105:01L
  REGION 1..12: note = CONT. FROM ABOVE: HLA-DQA1*05:05-B1*03:01L HLA-DPA1*01:02-B1*04: 01L HLA-DQA1*01:03-B1*06:01L HLA-DRB1*15:03L
VVIGTSKFYGGW

SEQ ID NO: 11226 - protein, 11 aa, Severe acute respiratory syndrome coronavirus 2
  REGION 1..11: note = Table B: HLA-DQA1*05:01-B1*03:01L HLA-DQA1*01:02-B1*06:02L HLA-DPA1*03:01-B1*105:01L HLA-DQA1*05:05-B1*03:01L HLA-DQA1*01:03-B1*06:01L HLA-DQA1*02:01-B1*03:03L
IGTSKFYGGWH

SEQ ID NO: 11227 - protein, 10 aa, Severe acute respiratory syndrome coronavirus 2
  REGION 1..10: note = Table B: HLA-DQA1*05:01-B1*03:01L HLA-DRB1*13:03L HLA-DQA1*01:02-B1*06:02M HLA-DRB1*08:77L HLA-DPA1*01:03-B1*03:01L HLA-DPA1*03:01-B1*04:02L HLA-DRB1*03:01L HLA-DRB1*14:02L HLA-DQA1*01-B1*05L
  REGION 1..10: note = CONT. FROM ABOVE: HLA-DQA1*05:05-B1*03:19M HLA-DQA1*05:01-B1*02: 01L HLA-DRB4*01:01L HLA-DPA1*01:03-B1*04:01L HLA-DQA1*05:05-B1*0 3:116L HLA-DPA1*02:01-B1*13:01L HLA-DPA1*03:01-B1*105:01L HLA-DP A1*01:03-B1*104:01L HLA-DRB1*10:01L HLA-DRB1*16:01L
  REGION 1..10: note = CONT. FROM ABOVE: HLA-DQA1*01:03-B1*06:01L HLA-DQA1*02:01-B1*03: 03L HLA-DRB1*15:03L
DVENPHLMGW

SEQ ID NO: 11228 - protein, 11 aa, Severe acute respiratory syndrome coronavirus 2
  REGION 1..11: note = Table B: HLA-DQA1*05:01-B1*03:01L HLA-DQA1*01:02-B1*06:02L HLA-DRB1*08:77L HLA-DPA1*01:03-B1*03:01L HLA-DRB1*03:01L HLA-DQA1*05:01-B1*02:01L HLA-DRB4*01:01L HLA-DPA1*01:03-B1*04:01L HLA-DPA1*01:03-B1*104:01L
  REGION 1..11: note = CONT. FROM ABOVE: HLA-DRB1*16:01L
VENPHLMGWDY

SEQ ID NO: 11229 - protein, 16 aa, Severe acute respiratory syndrome coronavirus 2
  REGION 1..16: note = Table B: HLA-DQA1*05:01-B1*03:01L HLA-DRB1*04:01L HLA-DRB1*14:02L HLA-DRB1*08:01L HLA-DRB1*11:01L HLA-DQA1*01-B1*05L HLA-DPA1*02:01-B1*13:01L HLA-DQA1*05:05-B1*03:01L HLA-DRB1*10:01L
MPNMLRIMASLVLARK

SEQ ID NO: 11230 - protein, 12 aa, Severe acute respiratory syndrome coronavirus 2
  REGION 1..12: note = Table B: HLA-DQA1*05:01-B1*03:01L HLA-DRB1*01:02L
IMASLVLARKHT

SEQ ID NO: 11231 - protein, 13 aa, Severe acute respiratory syndrome coronavirus 2
  REGION 1..13: note = Table B: HLA-DQA1*05:01-B1*03:01L HLA-DPA1*01:03-B1*03:01L HLA-DQA1*05:05-B1*03:19L
RLANECAQVLSEM

SEQ ID NO: 11232 - protein, 14 aa, Severe acute respiratory syndrome coronavirus 2
  REGION 1..14: note = Table B: HLA-DQA1*05:01-B1*03:01L HLA-DRB1*01:02L HLA-DPA1*03:01-B1*105:01L HLA-DQA1*05:05-B1*03:01L HLA-DQA1*02:01-B1*03:03L HLA-DRB1*15:03L
EMVMCGGSLYVKPG

SEQ ID NO: 11233 - protein, 12 aa, Severe acute respiratory syndrome coronavirus 2
  REGION 1..12: note = Table B: HLA-DQA1*05:01-B1*03:01L HLA-DQA1*05:05-B1*03:19L HLA-DQA1*05:05-B1*03:01L
SLYVKPGGTSSG

SEQ ID NO: 11234 - protein, 10 aa, Severe acute respiratory syndrome coronavirus 2
  REGION 1..10: note = Table B: HLA-DQA1*05:01-B1*03:01L HLA-DRB1*13:03L HLA-DRB1*01:03L HLA-DQA1*01:02-B1*06:02L HLA-DRB1*08:77L HLA-DPA1*01:03-B1*03:01L HLA-DRB1*03:01L HLA-DRB1*14:02L HLA-DQA1*01-B1*05L HLA-DQA1*05:05-B1*03:19L
  REGION 1..10: note = CONT. FROM ABOVE: HLA-DQA1*05:01-B1*02:01L HLA-DPA1*01:03-B1*04: 01L HLA-DPA1*01:03-B1*04:02L HLA-DPA1*03:01-B1*105:01L HLA-DRB1* 10:01L HLA-DRB1*16:01L HLA-DQA1*02:01-B1*03:03L HLA-DRB1*15:03L
TSSGDATTAY

SEQ ID NO: 11235 - protein, 12 aa, Severe acute respiratory syndrome coronavirus 2
  REGION 1..12: note = Table B: HLA-DQA1*05:01-B1*03:01L HLA-DRB1*04:03L HLA-DQA1*01:02-B1*06:02L HLA-DRB1*01:02L HLA-DQA1*05:05-B1*03:19L HLA-DRB1*12:01L HLA-DPA1*03:01-B1*105:01L HLA-DQA1*05:05-B1*03:01L
  REGION 1..12: note = CONT. FROM ABOVE: HLA-DRB1*14:17L HLA-DRB1*16:01L HLA-DQA1*01:03 -B1*06:01L HLA-DRB1*04:08L HLA-DQA1*02:01-B1*03:03L HLA-DRB1*15: 03L
SVFNICQAVTAN

SEQ ID NO: 11236 - protein, 11 aa, Severe acute respiratory syndrome coronavirus 2
  REGION 1..11: note = Table B: HLA-DQA1*05:01-B1*03:01L HLA-DRB1*04:03L HLA-DQA1*01:02-B1*06:02L HLA-DQA1*03:01-B1*03:02L HLA-DQA1*05:05-B1*03:01L HLA-DRB1*14:17L HLA-DQA1*01:03-B1*06:01L HLA-DQA1*02:01-B1*03:03L
NICQAVTANVN

SEQ ID NO: 11237 - protein, 14 aa, Severe acute respiratory syndrome coronavirus 2
  REGION 1..14: note = Table B: HLA-DQA1*05:01-B1*03:01L HLA-DRB1*04:02L HLA-DRB1*01:02L HLA-DQA1*05:05-B1*03:19L HLA-DPA1*03:01-B1*105:01L HLA-DRB1*14:54L
AVTANVNALLSTDG

SEQ ID NO: 11238 - protein, 14 aa, Severe acute respiratory syndrome coronavirus 2
  REGION 1..14: note = Table B: HLA-DQA1*05:01-B1*03:01L HLA-DQA1*05:05-B1*03:19L HLA-DPA1*03:01-B1*105:01L
VTANVNALLSTDGN

SEQ ID NO: 11239 - protein, 14 aa, Severe acute respiratory syndrome coronavirus 2
  REGION 1..14: note = Table B: HLA-DQA1*05:01-B1*03:01L HLA-DRB1*01:03L HLA-DRB1*04:04L HLA-DRB1*01:02L HLA-DRB1*12:01L HLA-DPA1*03:01-B1*105:01L HLA-DQA1*05:05-B1*03:01L HLA-DRB1*16:01L HLA-DRB1*04:08L
TANVNALLSTDGNK

SEQ ID NO: 11240 - protein, 11 aa, Severe acute respiratory syndrome coronavirus 2
  REGION 1..11: note = Table B: HLA-DQA1*05:01-B1*03:01L HLA-DRB1*01:03L HLA-DRB1*04:05L HLA-DRB1*14:01L HLA-DRB1*14:54L HLA-DPA1*01:02-B1*04:01L HLA-DQA1*01:03-B1*06:01L
LSTDGNKIADK

SEQ ID NO: 11241 - protein, 10 aa, Severe acute respiratory syndrome coronavirus 2
  REGION 1..10: note = Table B: HLA-DQA1*05:01-B1*03:01L HLA-DRB1*13:03L HLA-DRB1*01:03L HLA-DQA1*01:02-B1*06:02L HLA-DRB1*08:77L HLA-DPA1*01:03-B1*03:01L HLA-DPA1*03:01-B1*04:02L HLA-DRB1*03:01L HLA-DRB1*11:02L HLA-DQA1*01-B1*05L
  REGION 1..10: note = CONT. FROM ABOVE: HLA-DQA1*05:05-B1*03:19M HLA-DQA1*05:01-B1*02: 01M HLA-DRB4*01:01L HLA-DPA1*01:03-B1*04:01L HLA-DPA1*01:03-B1*0 4:02L HLA-DRB1*12:01L HLA-DPA1*01:03-B1*104:01L HLA-DRB1*10:01L HLA-DRB1*16:01M HLA-DRB1*15:03L
TDGNKIADKY

SEQ ID NO: 11242 - protein, 16 aa, Severe acute respiratory syndrome coronavirus 2
  REGION 1..16: note = Table B: HLA-DQA1*05:01-B1*03:01L HLA-DRB1*01:01L HLA-DRB1*03:01L HLA-DPA1*03:01-B1*105:01L
DGNKIADKYVRNLQHR

SEQ ID NO: 11243 - protein, 11 aa, Severe acute respiratory syndrome coronavirus 2
  REGION 1..11: note = Table B: HLA-DQA1*05:01-B1*03:01L HLA-DRB1*13:02L HLA-DRB1*13:03L HLA-DRB1*04:05L HLA-DRB1*14:01L HLA-DRB3*01:01L HLA-DRB1*07:01L HLA-DRB1*04:08L HLA-DRB1*15:03L
DKYVRNLQHRL

SEQ ID NO: 11244 - protein, 10 aa, Severe acute respiratory syndrome coronavirus 2
  REGION 1..10: note = Table B: HLA-DQA1*05:01-B1*03:01L HLA-DRB1*13:02L HLA-DRB1*01:03L HLA-DQA1*01:02-B1*06:02L HLA-DRB1*01:02L HLA-DPA1*01:03-B1*03:01L HLA-DPA1*03:01-B1*04:02L HLA-DRB1*03:01L HLA-DRB1*14:01L HLA-DRB1*14:02L HLA-DRB1*11:01L
  REGION 1..10: note = CONT. FROM ABOVE: HLA-DQA1*05:05-B1*03:19L HLA-DQA1*05:01-B1*02: 01L HLA-DPA1*01:03-B1*04:01L HLA-DPA1*01:03-B1*04:02L HLA-DRB1*1 2:01L HLA-DPA1*02:01-B1*13:01L HLA-DPA1*03:01-B1*105:01L HLA-DPA 1*01:02-B1*04:01L HLA-DRB1*16:01L HLA-DQA1*01:03-B1*06:01L
  REGION 1..10: note = CONT. FROM ABOVE: HLA-DQA1*02:01-B1*03:03L HLA-DRB1*15:03L
YVRNLQHRLY

SEQ ID NO: 11245 - protein, 16 aa, Severe acute respiratory syndrome coronavirus 2
  REGION 1..16: note = Table B: HLA-DQA1*05:01-B1*03:01L HLA-DRB1*01:01L HLA-DPA1*03:01-B1*04:02L HLA-DRB1*14:02L HLA-DPA1*01:03-B1*04:01L HLA-DPA1*03:01-B1*105:01L HLA-DQA1*03:01-B1*03:02L HLA-DPA1*01:03-B1*02:01L
  REGION 1..16: note = CONT. FROM ABOVE: HLA-DPA1*01:03-B1*104:01L HLA-DQA1*01:03-B1*06 :01L
LQHRLYECLYRNRDVD

SEQ ID NO: 11246 - protein, 10 aa, Severe acute respiratory syndrome coronavirus 2
  REGION 1..10: note = Table B: HLA-DQA1*05:01-B1*03:01L HLA-DRB1*13:03L HLA-DQA1*01:02-B1*06:02L HLA-DRB1*08:77L HLA-DPA1*01:03-B1*03:01M HLA-DRB1*03:01L HLA-DRB1*11:02L HLA-DQA1*01-B1*05L HLA-DQA1*05:05-B1*03:19M
  REGION 1..10: note = CONT. FROM ABOVE: HLA-DQA1*05:01-B1*02:01M HLA-DRB4*01:01L HLA-D PA1*01:03-B1*04:01L HLA-DQA1*05:05-B1*03:116L HLA-DRB1*12:01L HL A-DPA1*01:03-B1*104:01M HLA-DRB1*10:01L HLA-DRB1*16:01M HLA-DRB1 *15:03L
VDTDFVNEFY

SEQ ID NO: 11247 - protein, 13 aa, Severe acute respiratory syndrome coronavirus 2
  REGION 1..13: note = Table B: HLA-DQA1*05:01-B1*03:01L HLA-DRB1*13:02L HLA-DRB1*08:04L HLA-DRB1*14:01L HLA-DRB1*11:04L HLA-DRB1*11:01L HLA-DRB3*01:01L HLA-DPA1*02:01-B1*13:01L HLA-DQA1*02:01-B1*03:03L
DTDFVNEFYAYLR

SEQ ID NO: 11248 - protein, 12 aa, Severe acute respiratory syndrome coronavirus 2
  REGION 1..12: note = Table B: HLA-DQA1*05:01-B1*03:01L HLA-DRB1*13:02L HLA-DRB1*04:04L HLA-DRB1*04:05L HLA-DQA1*01:02-B1*06:02L HLA-DRB1*14:01L HLA-DRB1*11:04L HLA-DRB1*11:01L HLA-DQA1*01-B1*05L HLA-DRB1*12:01L HLA-DRB3*01:01L
  REGION 1..12: note = CONT. FROM ABOVE: HLA-DRB1*15:03L
FVNEFYAYLRKH

SEQ ID NO: 11249 - protein, 12 aa, Severe acute respiratory syndrome coronavirus 2
  REGION 1..12: note = Table B: HLA-DQA1*05:01-B1*03:01L HLA-DRB1*13:02L HLA-DRB1*08:04L HLA-DPA1*03:01-B1*04:02L HLA-DRB1*14:01L HLA-DRB1*11:04L HLA-DRB1*11:01L HLA-DRB1*12:01L HLA-DRB3*01:01L
VNEFYAYLRKHF

SEQ ID NO: 11250 - protein, 12 aa, Severe acute respiratory syndrome coronavirus 2
  REGION 1..12: note = Table B: HLA-DQA1*05:01-B1*03:01L HLA-DRB1*13:02L HLA-DRB1*13:03L HLA-DRB1*04:02L HLA-DRB1*01:02L HLA-DRB1*08:04L HLA-DPA1*03:01-B1*04:02L HLA-DRB1*11:04L HLA-DRB1*12:01L HLA-DRB3*01:01L HLA-DRB1*08:03L
NEFYAYLRKHFS

SEQ ID NO: 11251 - protein, 15 aa, Severe acute respiratory syndrome coronavirus 2
  REGION 1..15: note = Table B: HLA-DQA1*05:01-B1*03:01L HLA-DRB1*13:03L HLA-DRB1*01:01L HLA-DRB4*03:01NL HLA-DRB1*08:04L HLA-DRB3*02:01L HLA-DPA1*03:01-B1*04:02L HLA-DRB1*11:02L HLA-DRB1*11:03L HLA-DRB1*11:04L HLA-DRB1*08:01L HLA-DQA1*05:01-B1*02:01L
  REGION 1..15: note = CONT. FROM ABOVE: HLA-DRB1*09:01L HLA-DRB1*14:54L HLA-DRB1*10:01 L HLA-DRB1*08:03L
DDAVVCFNSTYASQG

SEQ ID NO: 11252 - protein, 12 aa, Severe acute respiratory syndrome coronavirus 2
  REGION 1..12: note = Table B: HLA-DQA1*05:01-B1*03:01L HLA-DRB1*04:03L HLA-DQA1*01:02-B1*06:02L HLA-DQA1*05:05-B1*03:19L HLA-DQA1*03:01-B1*03:02L HLA-DQA1*05:05-B1*03:01L HLA-DQA1*01:03-B1*06:01L HLA-DQA1*02:01-B1*03:03L
FNSTYASQGLVA

SEQ ID NO: 11253 - protein, 10 aa, Severe acute respiratory syndrome coronavirus 2
  REGION 1..10: note = Table B: HLA-DQA1*05:01-B1*03:01L HLA-DQA1*01:02-B1*06:02L HLA-DQA1*05:05-B1*03:19L HLA-DQA1*03:01-B1*03:02L HLA-DQA1*05:05-B1*03:01L HLA-DQA1*01:03-B1*06:01L HLA-DQA1*02:01-B1*03:03L
ASQGLVASIK

SEQ ID NO: 11254 - protein, 10 aa, Severe acute respiratory syndrome coronavirus 2
  REGION 1..10: note = Table B: HLA-DQA1*05:01-B1*03:01L HLA-DQA1*03:01-B1*03:02L HLA-DQA1*05:05-B1*03:01L HLA-DQA1*01:03-B1*06:01L HLA-DQA1*02:01-B1*03:03L
SQGLVASIKN

SEQ ID NO: 11255 - protein, 14 aa, Severe acute respiratory syndrome coronavirus 2
  REGION 1..14: note = Table B: HLA-DQA1*05:01-B1*03:01L HLA-DRB1*04:01L HLA-DRB1*13:02L HLA-DPA1*01:03-B1*03:01L HLA-DRB1*11:02L HLA-DRB1*08:01L HLA-DRB1*11:01L HLA-DQA1*05:05-B1*03:19L HLA-DRB4*01:01L HLA-DRB1*09:01L HLA-DRB3*01:01L
  REGION 1..14: note = CONT. FROM ABOVE: HLA-DQA1*05:05-B1*03:01L HLA-DRB1*10:01L HLA-D QA1*01:03-B1*06:01L HLA-DRB1*08:03L HLA-DRB1*15:01L
QGLVASIKNFKSVL

SEQ ID NO: 11256 - protein, 10 aa, Severe acute respiratory syndrome coronavirus 2
  REGION 1..10: note = Table B: HLA-DQA1*05:01-B1*03:01L HLA-DRB1*13:02L HLA-DRB1*13:03L HLA-DRB1*01:03L HLA-DQA1*01:02-B1*06:02L HLA-DRB1*08:77L HLA-DPA1*01:03-B1*03:01L HLA-DPA1*03:01-B1*04:02L HLA-DRB1*03:01L HLA-DRB1*14:01L
  REGION 1..10: note = CONT. FROM ABOVE: HLA-DRB1*14:02L HLA-DQA1*01-B1*05L HLA-DQA1*05 :05-B1*03:19L HLA-DQA1*05:01-B1*02:01L HLA-DRB4*01:01L HLA-DPA1* 01:03-B1*04:01L HLA-DPA1*01:03-B1*04:02L HLA-DRB1*12:01L HLA-DPA 1*02:01-B1*13:01L HLA-DPA1*03:01-B1*105:01L
  REGION 1..10: note = CONT. FROM ABOVE: HLA-DPA1*01:03-B1*104:01L HLA-DQA1*05:05-B1*03 :01L HLA-DPA1*01:02-B1*04:01L HLA-DRB1*16:01L HLA-DQA1*01:03-B1* 06:01L HLA-DRB1*08:02L HLA-DQA1*02:01-B1*03:03L HLA-DRB1*15:03L
SIKNFKSVLY

SEQ ID NO: 11257 - protein, 12 aa, Severe acute respiratory syndrome coronavirus 2
  REGION 1..12: note = Table B: HLA-DQA1*05:01-B1*03:01L HLA-DRB1*13:02L HLA-DRB1*01:03L HLA-DRB1*04:02L HLA-DRB1*04:04L HLA-DRB1*04:05L HLA-DQA1*01:02-B1*06:02L HLA-DRB3*02:01L HLA-DPA1*03:01-B1*04:02L HLA-DRB1*14:01L HLA-DRB1*08:01L
  REGION 1..12: note = CONT. FROM ABOVE: HLA-DQA1*01-B1*05L HLA-DQA1*05:01-B1*02:01L HL A-DRB3*01:01L HLA-DPA1*02:01-B1*13:01L HLA-DPA1*03:01-B1*105:01L HLA-DQA1*03:01-B1*03:02L HLA-DPA1*01:02-B1*04:01L HLA-DQA1*01:03 -B1*06:01L HLA-DRB1*04:08L HLA-DQA1*02:01-B1*03:03L
IKNFKSVLYYQN

SEQ ID NO: 11258 - protein, 12 aa, Severe acute respiratory syndrome coronavirus 2
  REGION 1..12: note = Table B: HLA-DQA1*05:01-B1*03:01L HLA-DRB1*04:02L HLA-DRB1*01:02L HLA-DPA1*01:03-B1*03:01L HLA-DPA1*03:01-B1*04:02L
FKSVLYYQNNVF

SEQ ID NO: 11259 - protein, 12 aa, Severe acute respiratory syndrome coronavirus 2
  REGION 1..12: note = Table B: HLA-DQA1*05:01-B1*03:01L HLA-DRB1*13:02L HLA-DRB1*01:03L HLA-DRB1*04:02L HLA-DRB1*04:04L HLA-DRB1*04:05L HLA-DRB1*01:02L HLA-DRB3*02:01L HLA-DPA1*03:01-B1*04:02L HLA-DRB1*08:01L HLA-DRB1*04:10L HLA-DRB1*14:54L HLA-DRB1*14:17L
  REGION 1..12: note = CONT. FROM ABOVE: HLA-DRB1*04:08L HLA-DRB1*15:01L
KSVLYYQNNVFM

SEQ ID NO: 11260 - protein, 13 aa, Severe acute respiratory syndrome coronavirus 2
  REGION 1..13: note = Table B: HLA-DQA1*05:01-B1*03:01L HLA-DRB1*13:02L HLA-DRB1*01:03L HLA-DRB1*04:04L HLA-DRB1*04:05L HLA-DRB1*08:04L HLA-DRB3*02:01L HLA-DPA1*01:03-B1*03:01L HLA-DQA1*03:01-B1*03:02L HLA-DQA1*05:05-B1*03:01L
  REGION 1..13: note = CONT. FROM ABOVE: HLA-DPA1*01:02-B1*04:01L HLA-DRB1*04:08L HLA-D RB1*15:01L
SVLYYQNNVFMSE

SEQ ID NO: 11261 - protein, 12 aa, Severe acute respiratory syndrome coronavirus 2
  REGION 1..12: note = Table B: HLA-DQA1*05:01-B1*03:01L HLA-DQA1*01:02-B1*06:02L HLA-DQA1*05:01-B1*02:01L HLA-DPA1*03:01-B1*105:01L HLA-DQA1*05:05-B1*03:01L
WTETDLTKGPHE

SEQ ID NO: 11262 - protein, 14 aa, Severe acute respiratory syndrome coronavirus 2
  REGION 1..14: note = Table B: HLA-DQA1*05:01-B1*03:01L HLA-DRB1*04:03L HLA-DRB1*13:02L HLA-DRB1*13:03L HLA-DRB1*01:03L HLA-DRB1*04:02L HLA-DRB1*04:04L HLA-DRB1*04:05L HLA-DRB1*01:01L HLA-DRB1*01:02L HLA-DRB1*08:04L HLA-DPA1*01:03-B1*03:01L
  REGION 1..14: note = CONT. FROM ABOVE: HLA-DPA1*03:01-B1*04:02L HLA-DRB1*14:01L HLA-D RB1*11:03L HLA-DRB1*11:04L HLA-DRB1*08:01L HLA-DRB1*11:01L HLA-D RB1*12:01L HLA-DRB3*01:01L HLA-DPA1*02:01-B1*13:01L HLA-DPA1*03: 01-B1*105:01L HLA-DPA1*01:03-B1*02:01L HLA-DQA1*05:05-B1*03:01L
  REGION 1..14: note = CONT. FROM ABOVE: HLA-DPA1*01:02-B1*04:01L HLA-DRB1*07:01L HLA-D RB1*16:01L HLA-DQA1*01:03-B1*06:01L HLA-DRB1*04:08M HLA-DRB1*08: 03L HLA-DQA1*02:01-B1*03:03L HLA-DRB1*15:03L
GPHEFCSQHTMLVK

SEQ ID NO: 11263 - protein, 10 aa, Severe acute respiratory syndrome coronavirus 2
  REGION 1..10: note = Table B: HLA-DQA1*05:01-B1*03:01L HLA-DRB1*13:03L HLA-DRB1*01:03L HLA-DQA1*01:02-B1*06:02L HLA-DRB1*08:77L HLA-DPA1*01:03-B1*03:01L HLA-DRB1*03:01L HLA-DRB1*11:02L HLA-DRB1*14:02L HLA-DQA1*01-B1*05L HLA-DQA1*05:05-B1*03:19L
  REGION 1..10: note = CONT. FROM ABOVE: HLA-DQA1*05:01-B1*02:01L HLA-DRB4*01:01L HLA-D PA1*01:03-B1*04:01L HLA-DPA1*01:03-B1*04:02L HLA-DRB1*12:01L HLA -DPA1*03:01-B1*105:01L HLA-DPA1*01:03-B1*104:01L HLA-DRB1*10:01L HLA-DRB1*16:01L HLA-DQA1*01:03-B1*06:01L HLA-DRB1*08:02L
  REGION 1..10: note = CONT. FROM ABOVE: HLA-DQA1*02:01-B1*03:03L HLA-DRB1*15:03L
LVKQGDDYVY

SEQ ID NO: 11264 - protein, 12 aa, Severe acute respiratory syndrome coronavirus 2
  REGION 1..12: note = Table B: HLA-DQA1*05:01-B1*03:01L HLA-DRB1*13:03L HLA-DRB1*01:03L HLA-DRB1*04:05L HLA-DQA1*01:02-B1*06:02L HLA-DPA1*01:03-B1*03:01L HLA-DPA1*03:01-B1*04:02L HLA-DQA1*01:01-B1*05:01L HLA-DRB1*08:01L
  REGION 1..12: note = CONT. FROM ABOVE: HLA-DQA1*05:05-B1*03:19L HLA-DPA1*01:03-B1*04: 01L HLA-DRB1*04:10L HLA-DPA1*01:03-B1*04:02L HLA-DRB1*12:01L HLA -DPA1*02:01-B1*13:01L HLA-DQA1*05:05-B1*03:01L HLA-DPA1*01:02-B1 *04:01L HLA-DRB1*16:01L HLA-DRB1*04:08L HLA-DRB1*15:03L
DDYVYLPYPDPS

SEQ ID NO: 11265 - protein, 16 aa, Severe acute respiratory syndrome coronavirus 2
  REGION 1..16: note = Table B: HLA-DQA1*05:01-B1*03:01L
YPDPSRILGAGCFVDD

SEQ ID NO: 11266 - protein, 17 aa, Severe acute respiratory syndrome coronavirus 2
  REGION 1..17: note = Table B: HLA-DQA1*05:01-B1*03:01L HLA-DPA1*01:03-B1*03:01L HLA-DPA1*01:03-B1*04:02L HLA-DPA1*02:01-B1*13:01L HLA-DRB1*15:03L
DPSRILGAGCFVDDIVK

SEQ ID NO: 11267 - protein, 12 aa, Severe acute respiratory syndrome coronavirus 2
  REGION 1..12: note = Table B: HLA-DQA1*05:01-B1*03:01L HLA-DRB1*04:04L HLA-DRB1*04:05L HLA-DQA1*01:02-B1*06:02L HLA-DRB1*08:04L HLA-DRB1*03:01L HLA-DRB1*11:03L HLA-DRB1*11:01L HLA-DRB1*13:01L HLA-DRB1*04:10L HLA-DRB3*01:01L HLA-DPA1*03:01-B1*105:01L
  REGION 1..12: note = CONT. FROM ABOVE: HLA-DPA1*01:02-B1*04:01L HLA-DRB1*10:01L HLA-D QA1*01:03-B1*06:01L HLA-DRB1*04:08L HLA-DRB1*08:03L
IVKTDGTLMIER

SEQ ID NO: 11268 - protein, 14 aa, Severe acute respiratory syndrome coronavirus 2
  REGION 1..14: note = Table B: HLA-DQA1*05:01-B1*03:01L HLA-DRB1*13:03L HLA-DRB1*01:03L HLA-DRB1*04:04L HLA-DRB1*08:04L HLA-DRB3*02:01L HLA-DRB1*14:01L HLA-DRB1*11:03L HLA-DRB1*14:02L HLA-DRB1*08:01L HLA-DRB1*11:01L HLA-DRB1*04:10L HLA-DRB1*09:01L HLA-DRB3*01:01L
  REGION 1..14: note = CONT. FROM ABOVE: HLA-DQA1*03:01-B1*03:02L HLA-DPA1*01:03-B1*02: 01L HLA-DRB1*07:01L HLA-DRB1*10:01L HLA-DRB1*08:03L HLA-DQA1*02: 01-B1*03:03L
IERFVSLAIDAYPL

SEQ ID NO: 11269 - protein, 10 aa, Severe acute respiratory syndrome coronavirus 2
  REGION 1..10: note = Table B: HLA-DQA1*05:01-B1*03:01L HLA-DRB1*04:03L HLA-DRB1*13:02L HLA-DRB1*13:03L HLA-DRB1*01:03L HLA-DRB1*04:02L HLA-DRB1*01:01L HLA-DRB1*01:02L HLA-DRB4*03:01NL HLA-DRB1*14:01L HLA-DRB1*12:01L HLA-DRB1*12:02L HLA-DPA1*03:01-B1*105:01L
  REGION 1..10: note = CONT. FROM ABOVE: HLA-DQA1*03:01-B1*03:02L HLA-DQA1*05:05-B1*03: 01L HLA-DRB1*14:17L HLA-DRB1*16:01L HLA-DQA1*01:03-B1*06:01L HLA -DQA1*02:01-B1*03:03L HLA-DRB1*15:03L
LAIDAYPLTK

SEQ ID NO: 11270 - protein, 10 aa, Severe acute respiratory syndrome coronavirus 2
  REGION 1..10: note = Table B: HLA-DQA1*05:01-B1*03:01L HLA-DRB1*13:03L HLA-DQA1*03:01-B1*03:02L HLA-DQA1*01:03-B1*06:01L HLA-DQA1*02:01-B1*03:03L
DAYPLTKHPN

SEQ ID NO: 11271 - protein, 10 aa, Severe acute respiratory syndrome coronavirus 2
  REGION 1..10: note = Table B: HLA-DQA1*05:01-B1*03:01L HLA-DRB1*01:03L HLA-DQA1*01:02-B1*06:02L HLA-DPA1*01:03-B1*03:01L HLA-DRB1*03:01L HLA-DRB1*14:02L HLA-DQA1*05:05-B1*03:19L HLA-DQA1*05:01-B1*02:01L HLA-DPA1*01:03-B1*04:02L
  REGION 1..10: note = CONT. FROM ABOVE: HLA-DPA1*03:01-B1*105:01L HLA-DRB1*16:01L HLA- DQA1*01:03-B1*06:01L HLA-DQA1*02:01-B1*03:03L HLA-DRB1*15:03L
PLTKHPNQEY

SEQ ID NO: 11272 - protein, 10 aa, Severe acute respiratory syndrome coronavirus 2
  REGION 1..10: note = Table B: HLA-DQA1*05:01-B1*03:01L HLA-DRB1*13:03L HLA-DQA1*01:02-B1*06:02L HLA-DRB1*14:01L HLA-DPA1*03:01-B1*105:01L HLA-DRB1*15:03L
HPNQEYADVF

SEQ ID NO: 11273 - protein, 10 aa, Severe acute respiratory syndrome coronavirus 2
  REGION 1..10: note = Table B: HLA-DQA1*05:01-B1*03:01L HLA-DQA1*01:02-B1*06:02L HLA-DRB1*08:77L HLA-DPA1*01:03-B1*03:01M HLA-DPA1*03:01-B1*04:02L HLA-DRB1*03:01L HLA-DRB1*11:02L HLA-DQA1*01-B1*05L HLA-DQA1*05:05-B1*03:19H
  REGION 1..10: note = CONT. FROM ABOVE: HLA-DQA1*05:01-B1*02:01M HLA-DRB4*01:01L HLA-D PA1*01:03-B1*04:01L HLA-DQA1*05:05-B1*03:116L HLA-DRB1*12:01L HL A-DPA1*01:03-B1*104:01M HLA-DPA1*01:02-B1*04:01L HLA-DRB1*10:01L HLA-DRB1*16:01M HLA-DRB1*15:03L
ADVFHLYLQY

SEQ ID NO: 11274 - protein, 12 aa, Severe acute respiratory syndrome coronavirus 2
  REGION 1..12: note = Table B: HLA-DQA1*05:01-B1*03:01L HLA-DRB1*13:02L HLA-DRB1*04:05L HLA-DRB1*14:01L HLA-DRB1*08:01L HLA-DQA1*01-B1*05L HLA-DRB1*12:01L HLA-DRB3*01:01L HLA-DQA1*03:01-B1*03:02L HLA-DQA1*02:01-B1*03:03L
  REGION 1..12: note = CONT. FROM ABOVE: HLA-DRB1*15:01L
DVFHLYLQYIRK

SEQ ID NO: 11275 - protein, 15 aa, Severe acute respiratory syndrome coronavirus 2
  REGION 1..15: note = Table B: HLA-DQA1*05:01-B1*03:01L HLA-DPA1*03:01-B1*04:02L HLA-DRB1*11:02L HLA-DPA1*01:03-B1*04:02L HLA-DPA1*03:01-B1*105:01L HLA-DQA1*02:01-B1*03:03L
VFHLYLQYIRKLHDE

SEQ ID NO: 11276 - protein, 12 aa, Severe acute respiratory syndrome coronavirus 2
  REGION 1..12: note = Table B: HLA-DQA1*05:01-B1*03:01L HLA-DQA1*05:05-B1*03:01L
LTGHMLDMYSVM

SEQ ID NO: 11277 - protein, 12 aa, Severe acute respiratory syndrome coronavirus 2
  REGION 1..12: note = Table B: HLA-DQA1*05:01-B1*03:01L HLA-DRB1*04:02L HLA-DRB1*04:04L HLA-DRB1*04:05L HLA-DRB4*03:01NL HLA-DPA1*01:03-B1*03:01L HLA-DQA1*01-B1*05L HLA-DQA1*05:05-B1*03:19L HLA-DQA1*05:01-B1*02:01L
  REGION 1..12: note = CONT. FROM ABOVE: HLA-DRB1*04:10L HLA-DRB1*12:01L HLA-DPA1*03:01 -B1*105:01L HLA-DRB1*14:54L HLA-DQA1*05:05-B1*03:01L HLA-DRB1*16 :01L HLA-DRB1*04:08L
LDMYSVMLTNDN

SEQ ID NO: 11278 - protein, 14 aa, Severe acute respiratory syndrome coronavirus 2
  REGION 1..14: note = Table B: HLA-DQA1*05:01-B1*03:01L HLA-DRB1*01:01L HLA-DRB1*08:04L HLA-DPA1*01:03-B1*03:01L HLA-DRB1*11:01L HLA-DQA1*05:05-B1*03:19L HLA-DRB1*09:01L HLA-DRB3*01:01L HLA-DPA1*02:01-B1*13:01L HLA-DPA1*03:01-B1*105:01L
  REGION 1..14: note = CONT. FROM ABOVE: HLA-DRB1*15:03L
DMYSVMLTNDNTSR

SEQ ID NO: 11279 - protein, 10 aa, Severe acute respiratory syndrome coronavirus 2
  REGION 1..10: note = Table B: HLA-DQA1*05:01-B1*03:01L HLA-DRB1*13:03L HLA-DRB1*01:03L HLA-DQA1*01:02-B1*06:02L HLA-DRB1*08:77L HLA-DPA1*01:03-B1*03:01L HLA-DPA1*03:01-B1*04:02L HLA-DRB1*03:01L HLA-DRB1*14:01L HLA-DRB1*11:02L HLA-DRB1*14:02L
  REGION 1..10: note = CONT. FROM ABOVE: HLA-DQA1*01-B1*05L HLA-DQA1*05:05-B1*03:19L HL A-DQA1*05:01-B1*02:01L HLA-DRB4*01:01L HLA-DPA1*01:03-B1*04:01L HLA-DQA1*05:05-B1*03:116L HLA-DPA1*01:03-B1*04:02L HLA-DRB1*12:0 1L HLA-DPA1*02:01-B1*13:01L HLA-DPA1*03:01-B1*105:01L
  REGION 1..10: note = CONT. FROM ABOVE: HLA-DPA1*01:03-B1*104:01L HLA-DPA1*01:02-B1*04 :01L HLA-DRB1*10:01L HLA-DRB1*16:01L HLA-DQA1*01:03-B1*06:01L HL A-DRB1*08:02L HLA-DQA1*02:01-B1*03:03L HLA-DRB1*15:03L
LTNDNTSRYW

SEQ ID NO: 11280 - protein, 11 aa, Severe acute respiratory syndrome coronavirus 2
  REGION 1..11: note = Table B: HLA-DQA1*05:01-B1*03:01L HLA-DRB1*01:03L HLA-DRB1*01:02L HLA-DPA1*01:03-B1*03:01L HLA-DRB1*14:01L HLA-DRB1*14:02L HLA-DRB1*08:01L HLA-DRB1*11:01L HLA-DRB1*12:01L HLA-DPA1*01:03-B1*104:01L HLA-DQA1*05:05-B1*03:01L
  REGION 1..11: note = CONT. FROM ABOVE: HLA-DRB1*04:08L
RYWEPEFYEAM

SEQ ID NO: 11281 - protein, 10 aa, Severe acute respiratory syndrome coronavirus 2
  REGION 1..10: note = Table B: HLA-DQA1*05:01-B1*03:01L HLA-DPA1*01:03-B1*03:01L HLA-DPA1*03:01-B1*04:02L HLA-DRB1*11:02L HLA-DQA1*01-B1*05L HLA-DQA1*05:05-B1*03:19M HLA-DQA1*05:01-B1*02:01L HLA-DRB4*01:01L HLA-DPA1*01:03-B1*04:01L
  REGION 1..10: note = CONT. FROM ABOVE: HLA-DPA1*01:03-B1*104:01L HLA-DRB1*16:01L
WEPEFYEAMY

SEQ ID NO: 11282 - protein, 14 aa, Severe acute respiratory syndrome coronavirus 2
  REGION 1..14: note = Table B: HLA-DQA1*05:01-B1*03:01L HLA-DRB1*01:02L HLA-DPA1*03:01-B1*105:01L HLA-DQA1*05:05-B1*03:01L
VGACVLCNSQTSLR

SEQ ID NO: 11283 - protein, 14 aa, Severe acute respiratory syndrome coronavirus 2
  REGION 1..14: note = Table B: HLA-DQA1*05:01-B1*03:01L HLA-DRB1*13:02L HLA-DRB1*01:03L HLA-DRB1*04:02L HLA-DRB1*04:04L HLA-DRB1*04:05L HLA-DRB1*01:02L HLA-DPA1*01:03-B1*03:01L HLA-DRB1*14:01L HLA-DQA1*05:05-B1*03:19L HLA-DRB1*12:01L
  REGION 1..14: note = CONT. FROM ABOVE: HLA-DQA1*03:01-B1*03:02L HLA-DPA1*01:03-B1*02: 01L HLA-DPA1*01:03-B1*104:01L HLA-DQA1*05:05-B1*03:01L HLA-DRB1* 16:01L HLA-DRB1*04:08L HLA-DRB1*15:03L
LVLSVNPYVCNAPG

SEQ ID NO: 11284 - protein, 12 aa, Severe acute respiratory syndrome coronavirus 2
  REGION 1..12: note = Table B: HLA-DQA1*05:01-B1*03:01L HLA-DRB1*04:03L HLA-DPA1*03:01-B1*04:02L HLA-DRB1*12:01L
DVTQLYLGGMSY

SEQ ID NO: 11285 - protein, 10 aa, Severe acute respiratory syndrome coronavirus 2
  REGION 1..10: note = Table B: HLA-DQA1*05:01-B1*03:01L HLA-DRB1*13:03L HLA-DRB1*01:03L HLA-DQA1*01:02-B1*06:02M HLA-DRB1*08:77L HLA-DPA1*01:03-B1*03:01L HLA-DPA1*03:01-B1*04:02L HLA-DRB1*03:01L HLA-DRB1*14:01L HLA-DRB1*11:02L HLA-DRB1*14:02L
  REGION 1..10: note = CONT. FROM ABOVE: HLA-DQA1*01-B1*05L HLA-DQA1*05:05-B1*03:19M HL A-DQA1*05:01-B1*02:01L HLA-DRB4*01:01L HLA-DPA1*01:03-B1*04:01L HLA-DQA1*05:05-B1*03:116L HLA-DPA1*01:03-B1*04:02L HLA-DRB1*12:0 1L HLA-DPA1*02:01-B1*13:01L HLA-DPA1*03:01-B1*105:01L
  REGION 1..10: note = CONT. FROM ABOVE: HLA-DPA1*01:03-B1*104:01L HLA-DQA1*05:05-B1*03 :01L HLA-DRB1*10:01L HLA-DRB1*16:01L HLA-DQA1*01:03-B1*06:01L HL A-DRB1*08:02L HLA-DQA1*02:01-B1*03:03L HLA-DRB1*15:03L
QLYLGGMSYY

SEQ ID NO: 11286 - protein, 13 aa, Severe acute respiratory syndrome coronavirus 2
  REGION 1..13: note = Table B: HLA-DQA1*05:01-B1*03:01L HLA-DRB1*13:02L HLA-DRB1*13:03L HLA-DRB1*04:02L HLA-DRB1*08:04L HLA-DRB1*12:01L HLA-DRB3*01:01L HLA-DPA1*02:01-B1*13:01L HLA-DQA1*01:03-B1*06:01L HLA-DRB1*08:03L HLA-DRB1*15:03L
GGMSYYCKSHKPP

SEQ ID NO: 11287 - protein, 14 aa, Severe acute respiratory syndrome coronavirus 2
  REGION 1..14: note = Table B: HLA-DQA1*05:01-B1*03:01L HLA-DRB1*04:02L HLA-DRB1*11:03L HLA-DPA1*03:01-B1*105:01L HLA-DRB1*08:02L
GMSYYCKSHKPPIS

SEQ ID NO: 11288 - protein, 13 aa, Severe acute respiratory syndrome coronavirus 2
  REGION 1..13: note = Table B: HLA-DQA1*05:01-B1*03:01L HLA-DRB1*04:03L HLA-DRB1*13:02L HLA-DRB1*13:03L HLA-DRB1*01:03L HLA-DRB1*04:02L HLA-DRB1*04:04L HLA-DRB1*04:05L HLA-DQA1*01:02-B1*06:02L HLA-DRB1*08:04L HLA-DRB3*02:01L HLA-DPA1*03:01-B1*04:02L
  REGION 1..13: note = CONT. FROM ABOVE: HLA-DRB1*14:01L HLA-DRB1*11:03L HLA-DRB1*11:04 L HLA-DRB1*08:01L HLA-DRB1*11:01L HLA-DQA1*01-B1*05L HLA-DPA1*01 :03-B1*04:02L HLA-DRB1*12:01L HLA-DRB3*01:01L HLA-DPA1*03:01-B1* 105:01L HLA-DQA1*03:01-B1*03:02L HLA-DQA1*05:05-B1*03:01L
  REGION 1..13: note = CONT. FROM ABOVE: HLA-DRB1*14:17L HLA-DPA1*01:02-B1*04:01L HLA-D QA1*01:03-B1*06:01L HLA-DRB1*04:08L HLA-DRB1*08:03L HLA-DQA1*02: 01-B1*03:03L HLA-DRB1*15:01L
GQVFGLYKNTCVG

SEQ ID NO: 11289 - protein, 14 aa, Severe acute respiratory syndrome coronavirus 2
  REGION 1..14: note = Table B: HLA-DQA1*05:01-B1*03:01L HLA-DRB1*13:03L HLA-DRB1*01:03L HLA-DQA1*01:02-B1*06:02L HLA-DQA1*01:01-B1*05:01L HLA-DRB1*12:01L HLA-DPA1*02:01-B1*13:01L HLA-DPA1*03:01-B1*105:01L
  REGION 1..14: note = CONT. FROM ABOVE: HLA-DQA1*05:05-B1*03:01L
VGSDNVTDFNAIAT

SEQ ID NO: 11290 - protein, 14 aa, Severe acute respiratory syndrome coronavirus 2
  REGION 1..14: note = Table B: HLA-DQA1*05:01-B1*03:01L HLA-DPA1*03:01-B1*04:02L HLA-DQA1*05:05-B1*03:19L HLA-DPA1*01:03-B1*04:02L HLA-DQA1*05:05-B1*03:01L HLA-DQA1*02:01-B1*03:03L
DFNAIATCDWTNAG

SEQ ID NO: 11291 - protein, 12 aa, Severe acute respiratory syndrome coronavirus 2
  REGION 1..12: note = Table B: HLA-DQA1*05:01-B1*03:01L HLA-DRB1*13:02L HLA-DRB1*01:03L HLA-DRB1*04:05L HLA-DRB1*14:01L HLA-DRB1*12:01L HLA-DPA1*03:01-B1*105:01L HLA-DRB1*16:01L HLA-DRB1*04:08L
YILANTCTERLK

SEQ ID NO: 11292 - protein, 13 aa, Severe acute respiratory syndrome coronavirus 2
  REGION 1..13: note = Table B: HLA-DQA1*05:01-B1*03:01L HLA-DRB1*13:02L HLA-DRB1*04:02L HLA-DRB1*04:04L HLA-DRB3*02:01L HLA-DRB1*14:01L HLA-DRB3*01:01L HLA-DPA1*02:01-B1*13:01L HLA-DPA1*03:01-B1*105:01L
TERLKLFAAETLK

SEQ ID NO: 11293 - protein, 14 aa, Severe acute respiratory syndrome coronavirus 2
  REGION 1..14: note = Table B: HLA-DQA1*05:01-B1*03:01L HLA-DRB1*13:02L HLA-DRB1*01:01L
ERLKLFAAETLKAT

SEQ ID NO: 11294 - protein, 10 aa, Severe acute respiratory syndrome coronavirus 2
  REGION 1..10: note = Table B: HLA-DQA1*05:01-B1*03:01L HLA-DRB1*04:03L HLA-DRB1*13:02L HLA-DRB1*13:03L HLA-DRB1*01:03M HLA-DRB1*04:02L HLA-DRB1*04:05L HLA-DQA1*01:02-B1*06:02M HLA-DRB4*03:01NL HLA-DRB1*08:77H HLA-DPA1*01:03-B1*03:01H
  REGION 1..10: note = CONT. FROM ABOVE: HLA-DPA1*03:01-B1*04:02L HLA-DRB1*03:01M HLA-D RB1*11:02H HLA-DRB1*11:03M HLA-DRB1*11:04L HLA-DRB1*14:02L HLA-D RB1*11:01L HLA-DRB5*01:01L HLA-DQA1*01-B1*05H HLA-DQA1*05:05-B1* 03:19H HLA-DQA1*05:01-B1*02:01H HLA-DRB4*01:01M
  REGION 1..10: note = CONT. FROM ABOVE: HLA-DPA1*01:03-B1*04:01M HLA-DQA1*05:05-B1*03: 116M HLA-DPA1*01:03-B1*04:02L HLA-DRB1*12:01M HLA-DPA1*03:01-B1* 105:01L HLA-DRB1*14:54L HLA-DPA1*01:03-B1*104:01H HLA-DPA1*01:02 -B1*04:01L HLA-DRB1*10:01M HLA-DRB1*16:01H HLA-DRB1*08:02L
  REGION 1..10: note = CONT. FROM ABOVE: HLA-DQA1*02:01-B1*03:03L HLA-DRB1*15:03L
ATEETFKLSY

SEQ ID NO: 11295 - protein, 12 aa, Severe acute respiratory syndrome coronavirus 2
  REGION 1..12: note = Table B: HLA-DQA1*05:01-B1*03:01L HLA-DRB1*01:03L HLA-DRB1*01:01L HLA-DRB1*01:02L HLA-DPA1*03:01-B1*105:01L HLA-DRB1*16:01L HLA-DRB1*04:08L HLA-DRB1*15:03L
TFKLSYGIATVR

SEQ ID NO: 11296 - protein, 10 aa, Severe acute respiratory syndrome coronavirus 2
  REGION 1..10: note = Table B: HLA-DQA1*05:01-B1*03:01L HLA-DQA1*03:01-B1*03:02L HLA-DQA1*02:01-B1*03:03L
SWEVGKPRPP

SEQ ID NO: 11297 - protein, 10 aa, Severe acute respiratory syndrome coronavirus 2
  REGION 1..10: note = Table B: HLA-DQA1*05:01-B1*03:01L HLA-DQA1*03:01-B1*03:02L HLA-DQA1*01:03-B1*06:01L HLA-DQA1*02:01-B1*03:03L
EVGKPRPPLN

SEQ ID NO: 11298 - protein, 10 aa, Severe acute respiratory syndrome coronavirus 2
  REGION 1..10: note = Table B: HLA-DQA1*05:01-B1*03:01L HLA-DRB1*13:02L HLA-DRB1*13:03L HLA-DRB1*01:03L HLA-DQA1*01:02-B1*06:02M HLA-DPA1*01:03-B1*03:01L HLA-DRB1*03:01L HLA-DRB1*14:01L HLA-DRB1*14:02L HLA-DRB1*08:01L HLA-DRB1*11:01L HLA-DRB5*01:01L
  REGION 1..10: note = CONT. FROM ABOVE: HLA-DQA1*01-B1*05L HLA-DQA1*05:01-B1*02:01L HL A-DPA1*01:03-B1*04:01L HLA-DRB3*01:01L HLA-DPA1*03:01-B1*105:01L HLA-DRB1*16:01L HLA-DQA1*02:01-B1*03:03L HLA-DRB1*15:03L
KPRPPLNRNY

SEQ ID NO: 11299 - protein, 10 aa, Severe acute respiratory syndrome coronavirus 2
  REGION 1..10: note = Table B: HLA-DQA1*05:01-B1*03:01L HLA-DRB1*13:02L HLA-DRB1*13:03L HLA-DRB1*01:03L HLA-DRB1*04:02L HLA-DQA1*01:02-B1*06:02L HLA-DRB1*01:01L HLA-DRB1*01:02L HLA-DRB4*03:01NL HLA-DRB3*02:01L HLA-DPA1*03:01-B1*04:02L
  REGION 1..10: note = CONT. FROM ABOVE: HLA-DRB1*14:01L HLA-DRB1*11:04L HLA-DRB1*08:01 L HLA-DRB1*11:01L HLA-DPA1*01:03-B1*04:01L HLA-DPA1*01:03-B1*04: 02L HLA-DRB1*12:01L HLA-DRB3*01:01L HLA-DPA1*03:01-B1*105:01L HL A-DQA1*03:01-B1*03:02L HLA-DQA1*05:05-B1*03:01L HLA-DRB1*14:17L
  REGION 1..10: note = CONT. FROM ABOVE: HLA-DPA1*01:02-B1*04:01L HLA-DRB1*16:01L HLA-D QA1*01:03-B1*06:01L HLA-DRB1*04:08L HLA-DQA1*02:01-B1*03:03L HLA -DRB1*15:03L
YVFTGYRVTK

SEQ ID NO: 11300 - protein, 10 aa, Severe acute respiratory syndrome coronavirus 2
  REGION 1..10: note = Table B: HLA-DQA1*05:01-B1*03:01L HLA-DRB1*04:03L HLA-DRB1*13:02L HLA-DRB1*13:03L HLA-DRB1*01:03L HLA-DRB1*04:02L HLA-DRB1*04:05L HLA-DRB1*01:02L HLA-DRB4*03:01NL HLA-DRB1*08:77L HLA-DRB1*14:01L HLA-DRB1*11:03L HLA-DRB1*11:04L HLA-DRB1*08:01L
  REGION 1..10: note = CONT. FROM ABOVE: HLA-DRB1*12:01L HLA-DRB3*01:01L HLA-DQA1*03:01 -B1*03:02L HLA-DRB1*14:17L HLA-DPA1*01:02-B1*04:01L HLA-DRB1*07: 01L HLA-DRB1*16:01L HLA-DRB1*04:08L HLA-DQA1*02:01-B1*03:03L HLA -DRB1*15:03L
YRVTKNSKVQ

SEQ ID NO: 11301 - protein, 12 aa, Severe acute respiratory syndrome coronavirus 2
  REGION 1..12: note = Table B: HLA-DQA1*05:01-B1*03:01L HLA-DRB1*13:02L HLA-DRB1*01:02L HLA-DPA1*01:03-B1*03:01L HLA-DPA1*03:01-B1*04:02L HLA-DRB1*12:01L HLA-DPA1*02:01-B1*13:01L HLA-DPA1*03:01-B1*105:01L
  REGION 1..12: note = CONT. FROM ABOVE: HLA-DQA1*03:01-B1*03:02L HLA-DPA1*01:03-B1*104 :01L HLA-DQA1*05:05-B1*03:01L HLA-DPA1*01:02-B1*04:01L HLA-DRB1* 16:01L HLA-DQA1*01:03-B1*06:01L HLA-DRB1*15:03L
VTKNSKVQIGEY

SEQ ID NO: 11302 - protein, 14 aa, Severe acute respiratory syndrome coronavirus 2
  REGION 1..14: note = Table B: HLA-DQA1*05:01-B1*03:01L HLA-DRB1*01:02L HLA-DPA1*03:01-B1*105:01L HLA-DRB1*15:03L
NSKVQIGEYTFEKG

SEQ ID NO: 11303 - protein, 12 aa, Severe acute respiratory syndrome coronavirus 2
  REGION 1..12: note = Table B: HLA-DQA1*05:01-B1*03:01L HLA-DQA1*01:02-B1*06:02L HLA-DRB1*01:02L HLA-DRB1*08:01L HLA-DQA1*05:05-B1*03:19L HLA-DRB1*04:10L HLA-DRB1*12:01L HLA-DQA1*05:05-B1*03:01L HLA-DRB1*10:01L HLA-DQA1*01:03-B1*06:01L HLA-DRB1*04:08L
  REGION 1..12: note = CONT. FROM ABOVE: HLA-DRB1*15:03L
EYTFEKGDYGDA

SEQ ID NO: 11304 - protein, 12 aa, Severe acute respiratory syndrome coronavirus 2
  REGION 1..12: note = Table B: HLA-DQA1*05:01-B1*03:01L HLA-DQA1*01:02-B1*06:02L HLA-DRB1*08:77L HLA-DPA1*03:01-B1*04:02L HLA-DRB1*14:02L HLA-DPA1*01:03-B1*04:01L HLA-DPA1*01:03-B1*04:02L HLA-DRB1*12:01L HLA-DPA1*02:01-B1*13:01L
  REGION 1..12: note = CONT. FROM ABOVE: HLA-DPA1*03:01-B1*105:01L HLA-DPA1*01:02-B1*04 :01L HLA-DQA1*01:03-B1*06:01L HLA-DQA1*02:01-B1*03:03L HLA-DRB1* 15:03L
FEKGDYGDAVVY

SEQ ID NO: 11305 - protein, 12 aa, Severe acute respiratory syndrome coronavirus 2
  REGION 1..12: note = Table B: HLA-DQA1*05:01-B1*03:01L HLA-DRB1*01:03L HLA-DRB1*01:02L HLA-DQA1*05:05-B1*03:19L HLA-DQA1*05:01-B1*02:01L HLA-DPA1*01:03-B1*04:02L HLA-DPA1*03:01-B1*105:01L HLA-DQA1*05:05-B1*03:01L
  REGION 1..12: note = CONT. FROM ABOVE: HLA-DRB1*04:08L
DYGDAVVYRGTT

SEQ ID NO: 11306 - protein, 11 aa, Severe acute respiratory syndrome coronavirus 2
  REGION 1..11: note = Table B: HLA-DQA1*05:01-B1*03:01L HLA-DRB1*13:03L HLA-DRB1*01:03L HLA-DQA1*01:02-B1*06:02L HLA-DRB4*03:01NL HLA-DQA1*01:01-B1*05:01L HLA-DQA1*01-B1*05L HLA-DQA1*05:05-B1*03:19L HLA-DQA1*05:01-B1*02:01L
  REGION 1..11: note = CONT. FROM ABOVE: HLA-DQA1*05:05-B1*03:01L HLA-DRB1*14:17L HLA-D RB1*16:01L HLA-DQA1*01:03-B1*06:01L
GDAVVYRGTTT

SEQ ID NO: 11307 - protein, 10 aa, Severe acute respiratory syndrome coronavirus 2
  REGION 1..10: note = Table B: HLA-DQA1*05:01-B1*03:01L HLA-DRB1*04:01L HLA-DRB1*04:03L HLA-DRB1*13:02L HLA-DRB1*13:03L HLA-DRB1*01:03L HLA-DRB1*04:02L HLA-DRB1*04:04L HLA-DRB1*01:01L HLA-DRB1*01:02L HLA-DRB4*03:01NL HLA-DRB3*02:01L HLA-DRB1*14:01L HLA-DRB1*11:04L
  REGION 1..10: note = CONT. FROM ABOVE: HLA-DRB1*08:01L HLA-DRB1*11:01L HLA-DRB5*01:01 L HLA-DRB1*13:01L HLA-DRB1*12:01L HLA-DRB1*12:02L HLA-DRB3*01:01 L HLA-DQA1*03:01-B1*03:02M HLA-DQA1*05:05-B1*03:01L HLA-DRB1*14: 17L HLA-DRB1*16:01L HLA-DQA1*02:01-B1*03:03L HLA-DRB1*15:01L
  REGION 1..10: note = CONT. FROM ABOVE: HLA-DRB1*15:03L
VVYRGTTTYK

SEQ ID NO: 11308 - protein, 11 aa, Severe acute respiratory syndrome coronavirus 2
  REGION 1..11: note = Table B: HLA-DQA1*05:01-B1*03:01L HLA-DRB1*13:02L HLA-DRB1*01:03L HLA-DRB3*02:01L HLA-DPA1*03:01-B1*105:01L HLA-DPA1*01:02-B1*04:01L HLA-DRB1*07:01L HLA-DRB1*04:08L
VYRGTTTYKLN

SEQ ID NO: 11309 - protein, 12 aa, Severe acute respiratory syndrome coronavirus 2
  REGION 1..12: note = Table B: HLA-DQA1*05:01-B1*03:01L HLA-DRB1*04:03L HLA-DRB1*13:02L HLA-DRB1*01:03L HLA-DRB1*04:02L HLA-DRB1*04:05L HLA-DQA1*01:02-B1*06:02L HLA-DRB3*02:01L HLA-DRB1*14:01L HLA-DRB1*12:01L HLA-DPA1*03:01-B1*105:01L
  REGION 1..12: note = CONT. FROM ABOVE: HLA-DQA1*05:05-B1*03:01L HLA-DPA1*01:02-B1*04: 01L HLA-DRB1*07:01L HLA-DQA1*01:03-B1*06:01L HLA-DRB1*04:08L
YRGTTTYKLNVG

SEQ ID NO: 11310 - protein, 12 aa, Severe acute respiratory syndrome coronavirus 2
  REGION 1..12: note = Table B: HLA-DQA1*05:01-B1*03:01L HLA-DRB1*13:02L HLA-DRB1*01:03L HLA-DQA1*01:02-B1*06:02L HLA-DRB1*01:01L HLA-DRB3*02:01L HLA-DPA1*03:01-B1*04:02L HLA-DRB1*14:02L HLA-DQA1*05:05-B1*03:19L HLA-DQA1*05:01-B1*02:01L
  REGION 1..12: note = CONT. FROM ABOVE: HLA-DPA1*03:01-B1*105:01L HLA-DQA1*05:05-B1*03 :01L HLA-DPA1*01:02-B1*04:01L HLA-DRB1*07:01L HLA-DQA1*01:03-B1* 06:01L HLA-DRB1*04:08L
YFVLTSHTVMPL

SEQ ID NO: 11311 - protein, 12 aa, Severe acute respiratory syndrome coronavirus 2
  REGION 1..12: note = Table B: HLA-DQA1*05:01-B1*03:01L HLA-DRB1*13:02L HLA-DQA1*01:02-B1*06:02L HLA-DRB1*01:02L HLA-DPA1*03:01-B1*04:02L HLA-DQA1*05:01-B1*02:01L HLA-DPA1*03:01-B1*105:01L HLA-DRB1*14:54L
  REGION 1..12: note = CONT. FROM ABOVE: HLA-DPA1*01:02-B1*04:01L
FVLTSHTVMPLS

SEQ ID NO: 11312 - protein, 13 aa, Severe acute respiratory syndrome coronavirus 2
  REGION 1..13: note = Table B: HLA-DQA1*05:01-B1*03:01L HLA-DQA1*05:01-B1*02:01L HLA-DPA1*03:01-B1*105:01L HLA-DQA1*05:05-B1*03:01L
VLTSHTVMPLSAP

SEQ ID NO: 11313 - protein, 12 aa, Severe acute respiratory syndrome coronavirus 2
  REGION 1..12: note = Table B: HLA-DQA1*05:01-B1*03:01L HLA-DRB1*04:03L HLA-DRB1*01:03L HLA-DRB1*04:02L HLA-DRB1*01:01L HLA-DRB1*01:02L HLA-DRB4*03:01NL HLA-DRB1*08:77L HLA-DRB1*11:03L HLA-DQA1*05:05-B1*03:19L HLA-DRB1*12:01L HLA-DRB1*14:54L
  REGION 1..12: note = CONT. FROM ABOVE: HLA-DQA1*05:05-B1*03:01L HLA-DRB1*14:17L HLA-D RB1*10:01L HLA-DRB1*16:01L HLA-DQA1*02:01-B1*03:03L HLA-DRB1*15: 03L
VMPLSAPTLVPQ

SEQ ID NO: 11314 - protein, 13 aa, Severe acute respiratory syndrome coronavirus 2
  REGION 1..13: note = Table B: HLA-DQA1*05:01-B1*03:01L HLA-DRB1*01:03L HLA-DRB1*04:02L HLA-DRB1*04:05L HLA-DQA1*01:01-B1*05:01L HLA-DQA1*05:05-B1*03:19L HLA-DQA1*05:01-B1*02:01L HLA-DPA1*03:01-B1*105:01L HLA-DRB1*14:17L HLA-DRB1*16:01L
MPLSAPTLVPQEH

SEQ ID NO: 11315 - protein, 10 aa, Severe acute respiratory syndrome coronavirus 2
  REGION 1..10: note = Table B: HLA-DQA1*05:01-B1*03:01L HLA-DRB1*04:03L HLA-DRB1*13:03M HLA-DRB1*01:03L HLA-DRB1*04:02L HLA-DQA1*01:02-B1*06:02M HLA-DRB4*03:01NL HLA-DRB1*08:77L HLA-DPA1*01:03-B1*03:01L HLA-DPA1*03:01-B1*04:02L
  REGION 1..10: note = CONT. FROM ABOVE: HLA-DRB1*03:01L HLA-DRB1*14:01L HLA-DRB1*11:03 L HLA-DRB1*14:02L HLA-DQA1*01-B1*05L HLA-DQA1*05:05-B1*03:19L HL A-DQA1*05:01-B1*02:01L HLA-DPA1*01:03-B1*04:01L HLA-DPA1*01:03-B 1*04:02L HLA-DRB1*12:01L HLA-DPA1*02:01-B1*13:01L
  REGION 1..10: note = CONT. FROM ABOVE: HLA-DPA1*03:01-B1*105:01M HLA-DPA1*01:03-B1*10 4:01L HLA-DPA1*01:02-B1*04:01L HLA-DRB1*10:01L HLA-DRB1*16:01L H LA-DQA1*01:03-B1*06:01L HLA-DRB1*08:02L HLA-DQA1*02:01-B1*03:03L HLA-DRB1*15:03L
APTLVPQEHY

SEQ ID NO: 11316 - protein, 12 aa, Severe acute respiratory syndrome coronavirus 2
  REGION 1..12: note = Table B: HLA-DQA1*05:01-B1*03:01L HLA-DRB1*13:03L HLA-DRB1*01:03L HLA-DRB1*04:05L HLA-DRB1*01:02L HLA-DRB1*14:01L HLA-DRB1*08:01L HLA-DQA1*01-B1*05L HLA-DRB1*12:01L HLA-DPA1*03:01-B1*105:01L HLA-DPA1*01:02-B1*04:01L
  REGION 1..12: note = CONT. FROM ABOVE: HLA-DRB1*16:01L HLA-DRB1*04:08L HLA-DRB1*15:03 L
EHYVRITGLYPT

SEQ ID NO: 11317 - protein, 11 aa, Severe acute respiratory syndrome coronavirus 2
  REGION 1..11: note = Table B: HLA-DQA1*05:01-B1*03:01L HLA-DQA1*01:02-B1*06:02L HLA-DPA1*03:01-B1*105:01L HLA-DQA1*05:05-B1*03:01L HLA-DQA1*01:03-B1*06:01L HLA-DQA1*02:01-B1*03:03L
VRITGLYPTLN

SEQ ID NO: 11318 - protein, 16 aa, Severe acute respiratory syndrome coronavirus 2
  REGION 1..16: note = Table B: HLA-DQA1*05:01-B1*03:01L HLA-DRB1*01:03L HLA-DRB1*08:04L HLA-DPA1*01:03-B1*03:01L HLA-DQA1*05:05-B1*03:19L HLA-DPA1*01:03-B1*04:02L HLA-DRB1*04:08L
YPTLNISDEFSSNVAN

SEQ ID NO: 11319 - protein, 11 aa, Severe acute respiratory syndrome coronavirus 2
  REGION 1..11: note = Table B: HLA-DQA1*05:01-B1*03:01L HLA-DRB1*01:03L HLA-DRB1*04:05L HLA-DRB1*01:02L HLA-DPA1*01:02-B1*04:01L HLA-DQA1*01:03-B1*06:01L HLA-DRB1*04:08L
VANYQKVGMQK

SEQ ID NO: 11320 - protein, 12 aa, Severe acute respiratory syndrome coronavirus 2
  REGION 1..12: note = Table B: HLA-DQA1*05:01-B1*03:01L HLA-DRB1*08:77L HLA-DRB1*11:03L HLA-DQA1*05:05-B1*03:19L HLA-DRB1*10:01L HLA-DRB1*15:03L
YSTLQGPPGTGK

SEQ ID NO: 11321 - protein, 12 aa, Severe acute respiratory syndrome coronavirus 2
  REGION 1..12: note = Table B: HLA-DQA1*05:01-B1*03:01L HLA-DRB1*01:02L HLA-DRB1*04:08L
TLQGPPGTGKSH

SEQ ID NO: 11322 - protein, 10 aa, Severe acute respiratory syndrome coronavirus 2
  REGION 1..10: note = Table B: HLA-DQA1*05:01-B1*03:01L HLA-DRB1*13:03L HLA-DQA1*01:02-B1*06:02L HLA-DRB1*14:01L HLA-DRB5*01:01L HLA-DQA1*01-B1*05L HLA-DPA1*03:01-B1*105:01L
GPPGTGKSHF

SEQ ID NO: 11323 - protein, 12 aa, Severe acute respiratory syndrome coronavirus 2
  REGION 1..12: note = Table B: HLA-DQA1*05:01-B1*03:01L HLA-DQA1*01:02-B1*06:02L HLA-DQA1*05:05-B1*03:19L HLA-DQA1*05:05-B1*03:01L HLA-DQA1*02:01-B1*03:03L
PPGTGKSHFAIG

SEQ ID NO: 11324 - protein, 10 aa, Severe acute respiratory syndrome coronavirus 2
  REGION 1..10: note = Table B: HLA-DQA1*05:01-B1*03:01L HLA-DRB1*04:03L HLA-DRB1*14:01L HLA-DRB1*12:01L HLA-DPA1*03:01-B1*105:01L HLA-DQA1*03:01-B1*03:02L HLA-DPA1*01:02-B1*04:01L HLA-DRB1*16:01L HLA-DQA1*02:01-B1*03:03L HLA-DRB1*15:03L
YYPSARIVYT

SEQ ID NO: 11325 - protein, 10 aa, Severe acute respiratory syndrome coronavirus 2
  REGION 1..10: note = Table B: HLA-DQA1*05:01-B1*03:01L HLA-DRB1*13:03L HLA-DRB1*04:05L HLA-DQA1*01-B1*05L HLA-DPA1*01:02-B1*04:01L HLA-DRB1*16:01L
YPSARIVYTA

SEQ ID NO: 11326 - protein, 11 aa, Severe acute respiratory syndrome coronavirus 2
  REGION 1..11: note = Table B: HLA-DQA1*05:01-B1*03:01L HLA-DQA1*05:05-B1*03:19L HLA-DPA1*03:01-B1*105:01L HLA-DQA1*05:05-B1*03:01L HLA-DQA1*02:01-B1*03:03L
VYTACSHAAVD

SEQ ID NO: 11327 - protein, 14 aa, Severe acute respiratory syndrome coronavirus 2
  REGION 1..14: note = Table B: HLA-DQA1*05:01-B1*03:01L HLA-DRB1*04:05L HLA-DRB1*12:01L HLA-DRB1*16:01L HLA-DRB1*04:08L HLA-DRB1*15:03L
SHAAVDALCEKALK

SEQ ID NO: 11328 - protein, 14 aa, Severe acute respiratory syndrome coronavirus 2
  REGION 1..14: note = Table B: HLA-DQA1*05:01-B1*03:01L HLA-DRB1*13:03L HLA-DRB1*03:01L HLA-DRB1*11:03L HLA-DRB1*07:01L HLA-DRB1*10:01L HLA-DQA1*01:03-B1*06:01L
EKALKYLPIDKCSR

SEQ ID NO: 11329 - protein, 13 aa, Severe acute respiratory syndrome coronavirus 2
  REGION 1..13: note = Table B: HLA-DQA1*05:01-B1*03:01L HLA-DRB1*01:03L HLA-DRB1*01:02L HLA-DRB1*11:04L HLA-DRB1*08:01L HLA-DRB1*11:01L HLA-DQA1*03:01-B1*03:02L HLA-DQA1*05:05-B1*03:01L HLA-DRB1*16:01L HLA-DRB1*04:08L
LPIDKCSRIIPAR

SEQ ID NO: 11330 - protein, 10 aa, Severe acute respiratory syndrome coronavirus 2
  REGION 1..10: note = Table B: HLA-DQA1*05:01-B1*03:01L HLA-DRB1*01:03L HLA-DRB1*01:02L HLA-DRB1*12:01L HLA-DQA1*03:01-B1*03:02L HLA-DRB1*16:01L HLA-DRB1*04:08L HLA-DQA1*02:01-B1*03:03L HLA-DRB1*15:03L
RIIPARARVE

SEQ ID NO: 11331 - protein, 12 aa, Severe acute respiratory syndrome coronavirus 2
  REGION 1..12: note = Table B: HLA-DQA1*05:01-B1*03:01L HLA-DRB1*04:04L HLA-DQA1*01:02-B1*06:02L HLA-DRB1*08:77L HLA-DRB3*02:01L HLA-DPA1*01:03-B1*03:01L HLA-DPA1*03:01-B1*04:02L HLA-DRB1*11:03L HLA-DRB1*14:02L HLA-DQA1*01:01-B1*05:01L
  REGION 1..12: note = CONT. FROM ABOVE: HLA-DRB1*11:01L HLA-DQA1*05:01-B1*02:01L HLA-D RB1*09:01L HLA-DRB1*12:02L HLA-DRB3*01:01L HLA-DPA1*02:01-B1*13: 01L HLA-DPA1*03:01-B1*105:01L HLA-DQA1*05:05-B1*03:01L HLA-DRB1* 10:01L HLA-DRB1*15:03L
FDKFKVNSTLEQ

SEQ ID NO: 11332 - protein, 13 aa, Severe acute respiratory syndrome coronavirus 2
  REGION 1..13: note = Table B: HLA-DQA1*05:01-B1*03:01L HLA-DQA1*01-B1*05L HLA-DQA1*05:05-B1*03:01L
ALPETTADIVVFD

SEQ ID NO: 11333 - protein, 13 aa, Severe acute respiratory syndrome coronavirus 2
  REGION 1..13: note = Table B: HLA-DQA1*05:01-B1*03:01L HLA-DRB1*04:03L HLA-DRB1*01:03L HLA-DRB1*04:05L HLA-DQA1*01:01-B1*05:01L HLA-DQA1*01-B1*05L HLA-DRB1*12:01L HLA-DQA1*05:05-B1*03:01L HLA-DRB1*16:01L HLA-DRB1*04:08L
LPETTADIVVFDE

SEQ ID NO: 11334 - protein, 13 aa, Severe acute respiratory syndrome coronavirus 2
  REGION 1..13: note = Table B: HLA-DQA1*05:01-B1*03:01L HLA-DRB1*04:04L HLA-DRB3*02:01L HLA-DRB1*12:02L HLA-DPA1*03:01-B1*105:01L HLA-DRB1*04:08L
FDEISMATNYDLS

SEQ ID NO: 11335 - protein, 14 aa, Severe acute respiratory syndrome coronavirus 2
  REGION 1..14: note = Table B: HLA-DQA1*05:01-B1*03:01L HLA-DRB1*13:02L HLA-DRB3*02:01L HLA-DPA1*03:01-B1*04:02L
EISMATNYDLSVVN

SEQ ID NO: 11336 - protein, 10 aa, Severe acute respiratory syndrome coronavirus 2
  REGION 1..10: note = Table B: HLA-DQA1*05:01-B1*03:01L HLA-DQA1*03:01-B1*03:02L HLA-DQA1*01:03-B1*06:01L HLA-DQA1*02:01-B1*03:03L
DLSVVNARLR

SEQ ID NO: 11337 - protein, 12 aa, Severe acute respiratory syndrome coronavirus 2
  REGION 1..12: note = Table B: HLA-DQA1*05:01-B1*03:01L HLA-DRB1*13:02L HLA-DQA1*01:02-B1*06:02L HLA-DRB1*01:01L HLA-DRB1*08:77L HLA-DPA1*01:03-B1*03:01L HLA-DPA1*03:01-B1*04:02L HLA-DRB1*14:01L HLA-DRB1*11:03L HLA-DRB1*14:02L
  REGION 1..12: note = CONT. FROM ABOVE: HLA-DQA1*01:01-B1*05:01L HLA-DRB1*11:01L HLA-D RB5*01:01L HLA-DRB1*09:01L HLA-DRB3*01:01L HLA-DPA1*03:01-B1*105 :01L HLA-DQA1*05:05-B1*03:01L HLA-DPA1*01:02-B1*04:01L HLA-DRB1* 07:01L HLA-DRB1*15:03L
AKHYVYIGDPAQ

SEQ ID NO: 11338 - protein, 11 aa, Severe acute respiratory syndrome coronavirus 2
  REGION 1..11: note = Table B: HLA-DQA1*05:01-B1*03:01L HLA-DRB1*04:03L HLA-DRB1*13:02L HLA-DRB1*01:03L HLA-DRB1*04:05L HLA-DQA1*01:02-B1*06:02L HLA-DRB4*03:01NL HLA-DRB1*08:77L HLA-DRB1*11:04L HLA-DRB1*14:02L HLA-DQA1*01:01-B1*05:01L
  REGION 1..11: note = CONT. FROM ABOVE: HLA-DRB1*08:01L HLA-DRB5*01:01L HLA-DQA1*05:05 -B1*03:19L HLA-DQA1*05:01-B1*02:01L HLA-DRB1*04:10L HLA-DRB1*12: 01L HLA-DRB1*12:02L HLA-DRB1*14:54L HLA-DQA1*05:05-B1*03:01L HLA -DRB1*16:01L HLA-DQA1*01:03-B1*06:01L HLA-DRB1*04:08L
IGDPAQLPAPR

SEQ ID NO: 11339 - protein, 11 aa, Severe acute respiratory syndrome coronavirus 2
  REGION 1..11: note = Table B: HLA-DQA1*05:01-B1*03:01L HLA-DRB1*04:03L HLA-DRB1*01:03L HLA-DPA1*01:03-B1*03:01L HLA-DRB1*14:01L HLA-DRB1*14:02L HLA-DRB1*08:01L HLA-DRB1*11:01L HLA-DQA1*01-B1*05L HLA-DQA1*05:05-B1*03:116L HLA-DRB1*09:01L
  REGION 1..11: note = CONT. FROM ABOVE: HLA-DRB1*12:01L HLA-DQA1*05:05-B1*03:01L HLA-D RB1*04:08L HLA-DRB1*08:03L
GTLEPEYFNSV

SEQ ID NO: 11340 - protein, 13 aa, Severe acute respiratory syndrome coronavirus 2
  REGION 1..13: note = Table B: HLA-DQA1*05:01-B1*03:01L HLA-DRB1*13:02L HLA-DRB1*13:03L HLA-DRB1*01:03L HLA-DRB1*04:05L HLA-DQA1*01:02-B1*06:02L HLA-DRB1*01:02L HLA-DRB1*08:04L HLA-DRB1*14:01L HLA-DRB1*08:01L HLA-DRB1*11:01L
  REGION 1..13: note = CONT. FROM ABOVE: HLA-DPA1*02:01-B1*13:01L HLA-DQA1*01:03-B1*06: 01L HLA-DRB1*04:08L HLA-DQA1*02:01-B1*03:03L
EPEYFNSVCRLMK

SEQ ID NO: 11341 - protein, 14 aa, Severe acute respiratory syndrome coronavirus 2
  REGION 1..14: note = Table B: HLA-DQA1*05:01-B1*03:01L HLA-DRB1*01:03L HLA-DRB1*01:02L HLA-DRB1*08:01L HLA-DPA1*03:01-B1*105:01L HLA-DQA1*05:05-B1*03:01L HLA-DRB1*04:08L
FNSVCRLMKTIGPD

SEQ ID NO: 11342 - protein, 15 aa, Severe acute respiratory syndrome coronavirus 2
  REGION 1..15: note = Table B: HLA-DQA1*05:01-B1*03:01L HLA-DRB1*01:03L HLA-DRB1*08:04L HLA-DRB1*08:01L HLA-DRB1*11:01L HLA-DQA1*05:05-B1*03:19L HLA-DPA1*03:01-B1*105:01L HLA-DQA1*05:05-B1*03:01L HLA-DRB1*04:08L
  REGION 1..15: note = CONT. FROM ABOVE: HLA-DQA1*02:01-B1*03:03L
GPDMFLGTCRRCPAE

SEQ ID NO: 11343 - protein, 10 aa, Severe acute respiratory syndrome coronavirus 2
  REGION 1..10: note = Table B: HLA-DQA1*05:01-B1*03:01L HLA-DRB1*04:03L HLA-DRB1*13:03L HLA-DRB1*01:03L HLA-DQA1*01:02-B1*06:02L HLA-DRB4*03:01NL HLA-DRB1*08:77L HLA-DPA1*01:03-B1*03:01M HLA-DRB1*03:01L HLA-DRB1*11:02L HLA-DRB1*14:02L
  REGION 1..10: note = CONT. FROM ABOVE: HLA-DQA1*01-B1*05L HLA-DQA1*05:05-B1*03:19M HL A-DQA1*05:01-B1*02:01M HLA-DRB4*01:01L HLA-DPA1*01:03-B1*04:01L HLA-DQA1*05:05-B1*03:116L HLA-DPA1*01:03-B1*04:02L HLA-DRB1*12:0 1L HLA-DPA1*01:03-B1*104:01L HLA-DRB1*10:01L HLA-DRB1*16:01M
  REGION 1..10: note = CONT. FROM ABOVE: HLA-DRB1*15:03L
IVDTVSALVY

SEQ ID NO: 11344 - protein, 10 aa, Severe acute respiratory syndrome coronavirus 2
  REGION 1..10: note = Table B: HLA-DQA1*05:01-B1*03:01L HLA-DRB1*13:02L HLA-DRB1*13:03L HLA-DRB1*04:02L HLA-DQA1*01:02-B1*06:02L HLA-DRB4*03:01NL HLA-DRB1*08:01L HLA-DRB5*01:01L HLA-DRB1*12:01L HLA-DPA1*03:01-B1*105:01L HLA-DQA1*03:01-B1*03:02L
  REGION 1..10: note = CONT. FROM ABOVE: HLA-DQA1*05:05-B1*03:01L HLA-DRB1*14:17L HLA-D QA1*01:03-B1*06:01L HLA-DQA1*02:01-B1*03:03L
TVSALVYDNK

SEQ ID NO: 11345 - protein, 13 aa, Severe acute respiratory syndrome coronavirus 2
  REGION 1..13: note = Table B: HLA-DQA1*05:01-B1*03:01L HLA-DRB1*04:01L HLA-DRB1*04:04L HLA-DQA1*01:02-B1*06:02L HLA-DRB1*01:01L HLA-DRB3*02:01L HLA-DPA1*01:03-B1*03:01L HLA-DPA1*03:01-B1*04:02L HLA-DPA1*03:01-B1*105:01L
  REGION 1..13: note = CONT. FROM ABOVE: HLA-DRB1*10:01L
VSALVYDNKLKAH

SEQ ID NO: 11346 - protein, 12 aa, Severe acute respiratory syndrome coronavirus 2
  REGION 1..12: note = Table B: HLA-DQA1*05:01-B1*03:01L HLA-DRB1*04:01L HLA-DRB1*04:04L HLA-DQA1*01:02-B1*06:02L HLA-DRB1*01:01L HLA-DRB1*08:04L HLA-DRB1*08:77L HLA-DPA1*01:03-B1*03:01L HLA-DRB1*14:02L HLA-DQA1*05:01-B1*02:01L HLA-DRB1*13:01L
  REGION 1..12: note = CONT. FROM ABOVE: HLA-DPA1*03:01-B1*105:01L HLA-DPA1*01:02-B1*04 :01L HLA-DRB1*10:01L HLA-DQA1*01:03-B1*06:01L HLA-DRB1*08:03L HL A-DQA1*02:01-B1*03:03L
LVYDNKLKAHKD

SEQ ID NO: 11347 - protein, 16 aa, Severe acute respiratory syndrome coronavirus 2
  REGION 1..16: note = Table B: HLA-DQA1*05:01-B1*03:01L HLA-DRB1*12:01L HLA-DPA1*02:01-B1*13:01L HLA-DPA1*03:01-B1*105:01L
AHKDKSAQCFKMFYKG

SEQ ID NO: 11348 - protein, 12 aa, Severe acute respiratory syndrome coronavirus 2
  REGION 1..12: note = Table B: HLA-DQA1*05:01-B1*03:01L HLA-DRB1*04:03L HLA-DRB1*04:02L HLA-DRB1*14:17L HLA-DRB1*16:01L HLA-DQA1*02:01-B1*03:03L
ITHDVSSAINRP

SEQ ID NO: 11349 - protein, 10 aa, Severe acute respiratory syndrome coronavirus 2
  REGION 1..10: note = Table B: HLA-DQA1*05:01-B1*03:01L HLA-DRB1*13:03L HLA-DRB1*01:03L HLA-DQA1*01:02-B1*06:02M HLA-DPA1*01:03-B1*03:01L HLA-DPA1*03:01-B1*04:02L HLA-DRB1*14:01L HLA-DRB1*14:02L HLA-DRB1*08:01L HLA-DRB5*01:01L
  REGION 1..10: note = CONT. FROM ABOVE: HLA-DQA1*01-B1*05L HLA-DQA1*05:01-B1*02:01L HL A-DPA1*01:03-B1*04:01L HLA-DRB3*01:01L HLA-DPA1*02:01-B1*13:01L HLA-DPA1*03:01-B1*105:01M HLA-DPA1*01:02-B1*04:01L HLA-DQA1*01:0 3-B1*06:01L HLA-DQA1*02:01-B1*03:03L HLA-DRB1*15:03L
RPQIGVVREF

SEQ ID NO: 11350 - protein, 13 aa, Severe acute respiratory syndrome coronavirus 2
  REGION 1..13: note = Table B: HLA-DQA1*05:01-B1*03:01L HLA-DRB1*01:03L HLA-DQA1*01:02-B1*06:02L HLA-DRB1*01:02L HLA-DRB1*08:01L HLA-DQA1*05:05-B1*03:19L HLA-DQA1*05:01-B1*02:01L HLA-DRB1*12:01L HLA-DPA1*02:01-B1*13:01L
  REGION 1..13: note = CONT. FROM ABOVE: HLA-DPA1*03:01-B1*105:01L HLA-DQA1*03:01-B1*03 :02L HLA-DPA1*01:02-B1*04:01L HLA-DRB1*16:01L HLA-DQA1*01:03-B1* 06:01L HLA-DRB1*04:08L HLA-DQA1*02:01-B1*03:03L HLA-DRB1*15:03L
NPAWRKAVFISPY

SEQ ID NO: 11351 - protein, 11 aa, Severe acute respiratory syndrome coronavirus 2
  REGION 1..11: note = Table B: HLA-DQA1*05:01-B1*03:01L HLA-DRB1*13:02L HLA-DRB1*01:03L HLA-DRB1*04:05L HLA-DRB1*01:01L HLA-DRB1*01:02L HLA-DRB1*14:54L HLA-DQA1*05:05-B1*03:01L HLA-DRB1*10:01L HLA-DRB1*04:08L HLA-DQA1*02:01-B1*03:03L
PYNSQNAVASK

SEQ ID NO: 11352 - protein, 11 aa, Severe acute respiratory syndrome coronavirus 2
  REGION 1..11: note = Table B: HLA-DQA1*05:01-B1*03:01L
NSQNAVASKIL

SEQ ID NO: 11353 - protein, 11 aa, Severe acute respiratory syndrome coronavirus 2
  REGION 1..11: note = Table B: HLA-DQA1*05:01-B1*03:01L HLA-DRB1*04:03L HLA-DRB1*04:02L HLA-DQA1*01:02-B1*06:02L HLA-DQA1*05:05-B1*03:19L HLA-DQA1*05:05-B1*03:01L
SQNAVASKILG

SEQ ID NO: 11354 - protein, 11 aa, Severe acute respiratory syndrome coronavirus 2
  REGION 1..11: note = Table B: HLA-DQA1*05:01-B1*03:01L HLA-DRB1*04:03L HLA-DQA1*01:02-B1*06:02L HLA-DPA1*03:01-B1*105:01L HLA-DQA1*03:01-B1*03:02L HLA-DRB1*14:17L HLA-DPA1*01:02-B1*04:01L HLA-DQA1*02:01-B1*03:03L
AVASKILGLPT

SEQ ID NO: 11355 - protein, 10 aa, Severe acute respiratory syndrome coronavirus 2
  REGION 1..10: note = Table B: HLA-DQA1*05:01-B1*03:01L HLA-DRB1*13:03L HLA-DRB1*01:03L HLA-DQA1*01:02-B1*06:02L HLA-DRB4*03:01NL HLA-DRB1*08:77M HLA-DPA1*01:03-B1*03:01M HLA-DPA1*03:01-B1*04:02L HLA-DRB1*03:01M HLA-DRB1*11:02M
  REGION 1..10: note = CONT. FROM ABOVE: HLA-DRB1*11:03L HLA-DRB1*11:04L HLA-DRB1*14:02 L HLA-DRB5*01:01L HLA-DQA1*01-B1*05M HLA-DQA1*05:05-B1*03:19M HL A-DQA1*05:01-B1*02:01M HLA-DRB4*01:01L HLA-DPA1*01:03-B1*04:01L HLA-DQA1*05:05-B1*03:116L HLA-DPA1*01:03-B1*04:02L
  REGION 1..10: note = CONT. FROM ABOVE: HLA-DRB1*12:01L HLA-DPA1*01:03-B1*104:01M HLA- DRB1*10:01M HLA-DRB1*16:01M HLA-DRB1*08:02L HLA-DRB1*15:03L
TVDSSQGSEY

SEQ ID NO: 11356 - protein, 13 aa, Severe acute respiratory syndrome coronavirus 2
  REGION 1..13: note = Table B: HLA-DQA1*05:01-B1*03:01L HLA-DRB1*04:03L HLA-DQA1*01:02-B1*06:02L HLA-DRB1*01:02L HLA-DRB1*08:04L HLA-DRB1*08:01L HLA-DQA1*03:01-B1*03:02L HLA-DPA1*01:03-B1*02:01L HLA-DPA1*01:03-B1*104:01L
  REGION 1..13: note = CONT. FROM ABOVE: HLA-DQA1*05:05-B1*03:01L HLA-DQA1*02:01-B1*03: 03L
GSEYDYVIFTQTT

SEQ ID NO: 11357 - protein, 14 aa, Severe acute respiratory syndrome coronavirus 2
  REGION 1..14: note = Table B: HLA-DQA1*05:01-B1*03:01L HLA-DRB1*13:02L HLA-DRB1*01:02L HLA-DRB1*08:04L HLA-DRB1*11:01L HLA-DQA1*05:05-B1*03:19L HLA-DPA1*01:03-B1*104:01L HLA-DQA1*05:05-B1*03:01L
SEYDYVIFTQTTET

SEQ ID NO: 11358 - protein, 11 aa, Severe acute respiratory syndrome coronavirus 2
  REGION 1..11: note = Table B: HLA-DQA1*05:01-B1*03:01L HLA-DRB1*04:01L HLA-DRB1*13:02L HLA-DRB1*04:04L HLA-DQA1*01:02-B1*06:02L HLA-DRB1*01:01L HLA-DRB1*01:02L HLA-DRB1*08:04L HLA-DRB1*08:77L HLA-DRB3*02:01L HLA-DPA1*01:03-B1*03:01L HLA-DRB1*14:01L
  REGION 1..11: note = CONT. FROM ABOVE: HLA-DRB1*11:03L HLA-DRB1*11:04L HLA-DRB1*14:02 L HLA-DRB1*11:01L HLA-DRB5*01:01L HLA-DQA1*05:05-B1*03:19L HLA-D RB4*01:01L HLA-DRB1*09:01L HLA-DRB1*12:02L HLA-DPA1*03:01-B1*105 :01L HLA-DQA1*05:05-B1*03:01L HLA-DRB1*07:01L HLA-DRB1*10:01L
  REGION 1..11: note = CONT. FROM ABOVE: HLA-DQA1*01:03-B1*06:01L HLA-DRB1*08:03L HLA-D RB1*15:03L
IFTQTTETAHS

SEQ ID NO: 11359 - protein, 12 aa, Severe acute respiratory syndrome coronavirus 2
  REGION 1..12: note = Table B: HLA-DQA1*05:01-B1*03:01L HLA-DQA1*05:05-B1*03:19L HLA-DPA1*03:01-B1*105:01L
ETAHSCNVNRFN

SEQ ID NO: 11360 - protein, 12 aa, Severe acute respiratory syndrome coronavirus 2
  REGION 1..12: note = Table B: HLA-DQA1*05:01-B1*03:01L HLA-DRB1*04:03L HLA-DRB1*04:05L HLA-DQA1*01:02-B1*06:02L HLA-DRB1*08:01L HLA-DRB1*12:01L HLA-DRB1*14:17L HLA-DRB1*04:08L HLA-DRB1*15:03L
VNRFNVAITRAK

SEQ ID NO: 11361 - protein, 13 aa, Severe acute respiratory syndrome coronavirus 2
  REGION 1..13: note = Table B: HLA-DQA1*05:01-B1*03:01L HLA-DRB1*13:03L HLA-DRB1*04:04L HLA-DRB1*04:10L HLA-DRB3*01:01L HLA-DPA1*02:01-B1*13:01L
DKLQFTSLEIPRR

SEQ ID NO: 11362 - protein, 10 aa, Severe acute respiratory syndrome coronavirus 2
  REGION 1..10: note = Table B: HLA-DQA1*05:01-B1*03:01L HLA-DQA1*03:01-B1*03:02L HLA-DQA1*01:03-B1*06:01L HLA-DQA1*02:01-B1*03:03L
FTSLEIPRRN

SEQ ID NO: 11363 - protein, 14 aa, Severe acute respiratory syndrome coronavirus 2
  REGION 1..14: note = Table B: HLA-DQA1*05:01-B1*03:01L HLA-DPA1*02:01-B1*13:01L HLA-DPA1*03:01-B1*105:01L HLA-DQA1*02:01-B1*03:03L
VTGLFKDCSKVITG

SEQ ID NO: 11364 - protein, 12 aa, Severe acute respiratory syndrome coronavirus 2
  REGION 1..12: note = Table B: HLA-DQA1*05:01-B1*03:01L HLA-DRB1*04:03L HLA-DRB1*01:02L HLA-DRB1*12:01L HLA-DRB1*14:17L HLA-DRB1*16:01L HLA-DRB1*15:03L
KVITGLHPTQAP

SEQ ID NO: 11365 - protein, 11 aa, Severe acute respiratory syndrome coronavirus 2
  REGION 1..11: note = Table B: HLA-DQA1*05:01-B1*03:01L HLA-DRB1*04:03L HLA-DRB1*04:02L HLA-DRB1*01:02L HLA-DRB4*03:01NL HLA-DQA1*03:01-B1*03:02L HLA-DQA1*05:05-B1*03:01L HLA-DRB1*14:17L HLA-DQA1*02:01-B1*03:03L
ITGLHPTQAPT

SEQ ID NO: 11366 - protein, 10 aa, Severe acute respiratory syndrome coronavirus 2
  REGION 1..10: note = Table B: HLA-DQA1*05:01-B1*03:01L HLA-DRB1*04:03L HLA-DRB1*13:03L HLA-DRB1*01:03L HLA-DRB1*04:02L HLA-DRB4*03:01NL HLA-DQA1*03:01-B1*03:02L HLA-DRB1*14:17L HLA-DRB1*16:01L HLA-DQA1*02:01-B1*03:03L
GLHPTQAPTH

SEQ ID NO: 11367 - protein, 14 aa, Severe acute respiratory syndrome coronavirus 2
  REGION 1..14: note = Table B: HLA-DQA1*05:01-B1*03:01L HLA-DRB1*01:02L HLA-DRB1*08:01L
HPTQAPTHLSVDTK

SEQ ID NO: 11368 - protein, 14 aa, Severe acute respiratory syndrome coronavirus 2
  REGION 1..14: note = Table B: HLA-DQA1*05:01-B1*03:01L HLA-DRB1*04:04L HLA-DRB4*03:01NL HLA-DRB1*08:04L HLA-DRB1*08:77L HLA-DRB3*02:01L HLA-DPA1*01:03-B1*03:01L HLA-DPA1*03:01-B1*04:02L HLA-DRB1*03:01L HLA-DRB1*11:03L HLA-DRB1*11:04L HLA-DRB1*14:02L
  REGION 1..14: note = CONT. FROM ABOVE: HLA-DRB1*11:01L HLA-DQA1*05:01-B1*02:01L HLA-D RB1*04:10L HLA-DRB1*12:02L HLA-DPA1*02:01-B1*13:01L HLA-DPA1*03: 01-B1*105:01L HLA-DPA1*01:02-B1*04:01L HLA-DRB1*10:01L HLA-DRB1* 08:03L HLA-DRB1*15:03L
APTHLSVDTKFKTE

SEQ ID NO: 11369 - protein, 11 aa, Severe acute respiratory syndrome coronavirus 2
  REGION 1..11: note = Table B: HLA-DQA1*05:01-B1*03:01L HLA-DRB1*14:01L
SVDTKFKTEGL

SEQ ID NO: 11370 - protein, 10 aa, Severe acute respiratory syndrome coronavirus 2
  REGION 1..10: note = Table B: HLA-DQA1*05:01-B1*03:01L HLA-DRB1*13:03L HLA-DQA1*01:02-B1*06:02M HLA-DPA1*01:03-B1*03:01L HLA-DQA1*05:05-B1*03:19L HLA-DQA1*05:01-B1*02:01L HLA-DPA1*03:01-B1*105:01L HLA-DRB1*15:03L
IPGIPKDMTY

SEQ ID NO: 11371 - protein, 10 aa, Severe acute respiratory syndrome coronavirus 2
  REGION 1..10: note = Table B: HLA-DQA1*05:01-B1*03:01L HLA-DRB1*14:01L HLA-DRB1*08:01L HLA-DRB3*01:01L HLA-DQA1*03:01-B1*03:02L
IPKDMTYRRL

SEQ ID NO: 11372 - protein, 14 aa, Severe acute respiratory syndrome coronavirus 2
  REGION 1..14: note = Table B: HLA-DQA1*05:01-B1*03:01L HLA-DRB1*13:02L HLA-DRB1*04:02L HLA-DRB1*08:04L HLA-DRB1*14:01L HLA-DRB3*01:01L HLA-DPA1*02:01-B1*13:01L HLA-DPA1*03:01-B1*105:01L HLA-DQA1*03:01-B1*03:02L HLA-DPA1*01:02-B1*04:01L
  REGION 1..14: note = CONT. FROM ABOVE: HLA-DRB1*07:01L HLA-DRB1*10:01L HLA-DQA1*02:01 -B1*03:03L
DMTYRRLISMMGFK

SEQ ID NO: 11373 - protein, 14 aa, Severe acute respiratory syndrome coronavirus 2
  REGION 1..14: note = Table B: HLA-DQA1*05:01-B1*03:01L HLA-DRB1*13:02L HLA-DRB1*04:04L HLA-DRB1*04:05L HLA-DRB1*01:01L HLA-DRB1*14:01L HLA-DRB1*08:01L HLA-DRB3*01:01L HLA-DRB1*07:01L HLA-DQA1*01:03-B1*06:01L HLA-DRB1*15:01L
RRLISMMGFKMNYQ

SEQ ID NO: 11374 - protein, 12 aa, Severe acute respiratory syndrome coronavirus 2
  REGION 1..12: note = Table B: HLA-DQA1*05:01-B1*03:01L HLA-DRB1*14:04L HLA-DRB1*04:01L HLA-DRB1*13:02L HLA-DRB1*13:03L HLA-DRB1*01:03L HLA-DRB1*04:04L HLA-DRB1*04:05L HLA-DQA1*01:02-B1*06:02L HLA-DRB1*01:01L HLA-DRB1*01:02L HLA-DRB4*03:01NL HLA-DRB1*08:04L
  REGION 1..12: note = CONT. FROM ABOVE: HLA-DRB1*08:77L HLA-DRB3*02:01L HLA-DPA1*01:03 -B1*03:01L HLA-DPA1*03:01-B1*04:02L HLA-DRB1*03:01L HLA-DRB1*14: 01M HLA-DRB1*11:02L HLA-DRB1*11:03L HLA-DRB1*11:04L HLA-DRB1*14: 02L HLA-DRB1*08:01L HLA-DRB1*11:01L HLA-DQA1*05:05-B1*03:19L
  REGION 1..12: note = CONT. FROM ABOVE: HLA-DRB1*04:10L HLA-DRB1*09:01L HLA-DPA1*01:03 -B1*04:02L HLA-DRB1*12:01M HLA-DRB1*12:02L HLA-DRB3*01:01L HLA-D PA1*02:01-B1*13:01L HLA-DPA1*03:01-B1*105:01L HLA-DRB1*14:54L HL A-DPA1*01:03-B1*02:01L HLA-DPA1*01:03-B1*104:01L
  REGION 1..12: note = CONT. FROM ABOVE: HLA-DQA1*05:05-B1*03:01L HLA-DPA1*01:02-B1*04: 01L HLA-DRB1*07:01L HLA-DRB1*10:01L HLA-DRB1*16:01L HLA-DQA1*01: 03-B1*06:01L HLA-DRB1*04:08L HLA-DRB1*08:03L HLA-DRB1*15:03L
FKMNYQVNGYPN

SEQ ID NO: 11375 - protein, 12 aa, Severe acute respiratory syndrome coronavirus 2
  REGION 1..12: note = Table B: HLA-DQA1*05:01-B1*03:01L HLA-DRB1*04:03L HLA-DRB1*04:02L HLA-DQA1*01:02-B1*06:02L HLA-DQA1*05:01-B1*02:01L HLA-DPA1*03:01-B1*105:01L HLA-DQA1*01:03-B1*06:01L
GYPNMFITREEA

SEQ ID NO: 11376 - protein, 12 aa, Severe acute respiratory syndrome coronavirus 2
  REGION 1..12: note = Table B: HLA-DQA1*05:01-B1*03:01L HLA-DRB1*13:02L HLA-DRB1*01:03L HLA-DQA1*01:02-B1*06:02L HLA-DRB1*01:02L HLA-DRB1*14:01L HLA-DRB1*08:01L HLA-DQA1*05:01-B1*02:01L HLA-DRB1*12:01L HLA-DPA1*03:01-B1*105:01L HLA-DRB1*07:01L
  REGION 1..12: note = CONT. FROM ABOVE: HLA-DQA1*01:03-B1*06:01L HLA-DRB1*04:08L HLA-D RB1*15:03L
PNMFITREEAIR

SEQ ID NO: 11377 - protein, 10 aa, Severe acute respiratory syndrome coronavirus 2
  REGION 1..10: note = Table B: HLA-DQA1*05:01-B1*03:01L HLA-DRB1*01:03L HLA-DRB1*01:02L HLA-DRB1*08:01L HLA-DRB1*12:01L HLA-DQA1*03:01-B1*03:02L HLA-DRB1*14:17L HLA-DPA1*01:02-B1*04:01L HLA-DRB1*16:01L HLA-DRB1*04:08L
  REGION 1..10: note = CONT. FROM ABOVE: HLA-DQA1*02:01-B1*03:03L
FITREEAIRH

SEQ ID NO: 11378 - protein, 13 aa, Severe acute respiratory syndrome coronavirus 2
  REGION 1..13: note = Table B: HLA-DQA1*05:01-B1*03:01L HLA-DRB1*04:03L HLA-DRB1*01:03L HLA-DRB1*04:02L HLA-DRB1*04:04L HLA-DPA1*03:01-B1*105:01L HLA-DQA1*05:05-B1*03:01L HLA-DRB1*04:08L
EAIRHVRAWIGFD

SEQ ID NO: 11379 - protein, 14 aa, Severe acute respiratory syndrome coronavirus 2
  REGION 1..14: note = Table B: HLA-DQA1*05:01-B1*03:01L HLA-DRB1*13:02L HLA-DRB3*02:01L HLA-DRB1*14:02L HLA-DQA1*05:05-B1*03:19L HLA-DQA1*05:01-B1*02:01L HLA-DQA1*05:05-B1*03:01L
AIRHVRAWIGFDVE

SEQ ID NO: 11380 - protein, 16 aa, Severe acute respiratory syndrome coronavirus 2
  REGION 1..16: note = Table B: HLA-DQA1*05:01-B1*03:01L HLA-DRB1*04:01L HLA-DRB1*13:02L HLA-DRB1*04:04L HLA-DRB1*04:05L HLA-DRB1*14:02L HLA-DRB1*08:01L HLA-DRB1*11:01L HLA-DRB3*01:01L HLA-DPA1*02:01-B1*13:01L HLA-DQA1*03:01-B1*03:02L
  REGION 1..16: note = CONT. FROM ABOVE: HLA-DRB1*10:01L HLA-DQA1*01:03-B1*06:01L HLA-D QA1*02:01-B1*03:03L
VRAWIGFDVEGCHATR

SEQ ID NO: 11381 - protein, 13 aa, Severe acute respiratory syndrome coronavirus 2
  REGION 1..13: note = Table B: HLA-DQA1*05:01-B1*03:01L HLA-DRB1*01:02L HLA-DPA1*03:01-B1*105:01L HLA-DQA1*03:01-B1*03:02L HLA-DQA1*05:05-B1*03:01L HLA-DQA1*01:03-B1*06:01L HLA-DRB1*04:08L HLA-DQA1*02:01-B1*03:03L
IGFDVEGCHATRE

SEQ ID NO: 11382 - protein, 12 aa, Severe acute respiratory syndrome coronavirus 2
  REGION 1..12: note = Table B: HLA-DQA1*05:01-B1*03:01L HLA-DQA1*01:02-B1*06:02M HLA-DQA1*03:01-B1*03:02L HLA-DQA1*05:05-B1*03:01L HLA-DQA1*02:01-B1*03:03L
VEGCHATREAVG

SEQ ID NO: 11383 - protein, 11 aa, Severe acute respiratory syndrome coronavirus 2
  REGION 1..11: note = Table B: HLA-DQA1*05:01-B1*03:01L HLA-DRB1*04:03L HLA-DRB1*04:02L HLA-DRB1*14:17L
REAVGTNLPLQ

SEQ ID NO: 11384 - protein, 11 aa, Severe acute respiratory syndrome coronavirus 2
  REGION 1..11: note = Table B: HLA-DQA1*05:01-B1*03:01L HLA-DQA1*01:02-B1*06:02L HLA-DPA1*03:01-B1*105:01L
EAVGTNLPLQL

SEQ ID NO: 11385 - protein, 11 aa, Severe acute respiratory syndrome coronavirus 2
  REGION 1..11: note = Table B: HLA-DQA1*05:01-B1*03:01L HLA-DRB1*04:03L HLA-DQA1*01:02-B1*06:02L HLA-DQA1*05:01-B1*02:01L HLA-DPA1*03:01-B1*105:01L
AVGTNLPLQLG

SEQ ID NO: 11386 - protein, 13 aa, Severe acute respiratory syndrome coronavirus 2
  REGION 1..13: note = Table B: HLA-DQA1*05:01-B1*03:01L HLA-DRB1*13:02L HLA-DRB1*13:03L HLA-DRB1*01:03L HLA-DQA1*01:02-B1*06:02L HLA-DRB1*01:02L HLA-DRB4*03:01NL HLA-DQA1*05:05-B1*03:19L HLA-DRB1*12:01L HLA-DPA1*02:01-B1*13:01L
  REGION 1..13: note = CONT. FROM ABOVE: HLA-DPA1*03:01-B1*105:01L HLA-DRB1*14:54L HLA- DQA1*05:05-B1*03:01L HLA-DRB1*04:08L HLA-DRB1*15:03L
LVAVPTGYVDTPN

SEQ ID NO: 11387 - protein, 13 aa, Severe acute respiratory syndrome coronavirus 2
  REGION 1..13: note = Table B: HLA-DQA1*05:01-B1*03:01L HLA-DRB1*13:03L HLA-DRB1*01:03L HLA-DQA1*01:02-B1*06:02L HLA-DRB4*03:01NL HLA-DQA1*05:05-B1*03:19L HLA-DRB1*12:01L HLA-DPA1*02:01-B1*13:01L HLA-DPA1*03:01-B1*105:01L
  REGION 1..13: note = CONT. FROM ABOVE: HLA-DQA1*05:05-B1*03:01L HLA-DRB1*04:08L HLA-D RB1*15:03L
VAVPTGYVDTPNN

SEQ ID NO: 11388 - protein, 13 aa, Severe acute respiratory syndrome coronavirus 2
  REGION 1..13: note = Table B: HLA-DQA1*05:01-B1*03:01L HLA-DRB1*04:01L HLA-DRB1*13:02L HLA-DRB1*13:03L HLA-DRB1*01:03L HLA-DRB1*04:04L HLA-DRB1*04:05M HLA-DQA1*01:02-B1*06:02L HLA-DRB1*01:02L HLA-DRB4*03:01NL HLA-DRB1*08:04L HLA-DRB1*08:77L HLA-DRB3*02:01L
  REGION 1..13: note = CONT. FROM ABOVE: HLA-DPA1*01:03-B1*03:01L HLA-DPA1*03:01-B1*04: 02L HLA-DRB1*14:01L HLA-DRB1*11:03L HLA-DRB1*11:04L HLA-DRB1*14: 02L HLA-DQA1*01:01-B1*05:01L HLA-DRB1*08:01L HLA-DRB5*01:01L HLA -DQA1*05:05-B1*03:19L HLA-DRB1*13:01L HLA-DRB4*01:01L
  REGION 1..13: note = CONT. FROM ABOVE: HLA-DRB1*04:10M HLA-DRB1*09:01L HLA-DPA1*01:03 -B1*04:02L HLA-DRB1*12:01L HLA-DRB1*12:02L HLA-DRB3*01:01L HLA-D PA1*02:01-B1*13:01L HLA-DPA1*03:01-B1*105:01L HLA-DRB1*14:54L HL A-DPA1*01:03-B1*104:01L HLA-DQA1*05:05-B1*03:01L HLA-DRB1*14:17L
  REGION 1..13: note = CONT. FROM ABOVE: HLA-DPA1*01:02-B1*04:01L HLA-DRB1*07:01L HLA-D RB1*10:01L HLA-DQA1*01:03-B1*06:01L HLA-DRB1*04:08L HLA-DRB1*08: 03L HLA-DRB1*15:03L
VPTGYVDTPNNTD

SEQ ID NO: 11389 - protein, 10 aa, Severe acute respiratory syndrome coronavirus 2
  REGION 1..10: note = Table B: HLA-DQA1*05:01-B1*03:01L HLA-DRB1*13:03L HLA-DQA1*01-B1*05L HLA-DPA1*03:01-B1*105:01L HLA-DPA1*01:02-B1*04:01L
TPNNTDFSRV

SEQ ID NO: 11390 - protein, 12 aa, Severe acute respiratory syndrome coronavirus 2
  REGION 1..12: note = Table B: HLA-DQA1*05:01-B1*03:01L HLA-DRB1*13:03L HLA-DRB1*04:05L HLA-DRB1*01:02L HLA-DRB1*08:01L HLA-DRB1*12:01L HLA-DRB1*16:01L HLA-DRB1*04:08L HLA-DQA1*02:01-B1*03:03L
DFSRVSAKPPPG

SEQ ID NO: 11391 - protein, 11 aa, Severe acute respiratory syndrome coronavirus 2
  REGION 1..11: note = Table B: HLA-DQA1*05:01-B1*03:01L HLA-DPA1*03:01-B1*04:02L HLA-DRB1*12:01L
DQFKHLIPLMY

SEQ ID NO: 11392 - protein, 10 aa, Severe acute respiratory syndrome coronavirus 2
  REGION 1..10: note = Table B: HLA-DQA1*05:01-B1*03:01L HLA-DRB1*04:03L HLA-DRB1*13:02L HLA-DRB1*13:03L HLA-DRB1*01:03M HLA-DQA1*01:02-B1*06:02L HLA-DRB1*01:02L HLA-DPA1*01:03-B1*03:01L HLA-DPA1*03:01-B1*04:02L
  REGION 1..10: note = CONT. FROM ABOVE: HLA-DRB1*14:01L HLA-DRB1*11:04L HLA-DRB1*08:01 L HLA-DRB1*11:01L HLA-DPA1*01:03-B1*04:01L HLA-DPA1*01:03-B1*04: 02L HLA-DRB1*12:01L HLA-DRB3*01:01L HLA-DPA1*03:01-B1*105:01L HL A-DQA1*03:01-B1*03:02L HLA-DPA1*01:03-B1*02:01L
  REGION 1..10: note = CONT. FROM ABOVE: HLA-DQA1*05:05-B1*03:01L HLA-DPA1*01:02-B1*04: 01M HLA-DRB1*16:01L HLA-DQA1*01:03-B1*06:01L HLA-DRB1*04:08M HLA -DQA1*02:01-B1*03:03L HLA-DRB1*15:03L
YKGLPWNVVR

SEQ ID NO: 11393 - protein, 12 aa, Severe acute respiratory syndrome coronavirus 2
  REGION 1..12: note = Table B: HLA-DQA1*05:01-B1*03:01L HLA-DRB1*01:03L HLA-DRB1*01:02L HLA-DPA1*03:01-B1*04:02L HLA-DRB1*14:01L HLA-DRB1*08:01L HLA-DRB1*12:01L HLA-DQA1*03:01-B1*03:02L HLA-DPA1*01:02-B1*04:01L HLA-DRB1*16:01L HLA-DRB1*04:08L
  REGION 1..12: note = CONT. FROM ABOVE: HLA-DQA1*02:01-B1*03:03L
LPWNVVRIKIVQ

SEQ ID NO: 11394 - protein, 12 aa, Severe acute respiratory syndrome coronavirus 2
  REGION 1..12: note = Table B: HLA-DQA1*05:01-B1*03:01L HLA-DRB1*01:03L HLA-DRB1*04:04L HLA-DRB1*04:05L HLA-DQA1*01:02-B1*06:02L HLA-DPA1*03:01-B1*04:02L HLA-DRB1*14:01L HLA-DRB1*04:10L HLA-DPA1*02:01-B1*13:01L HLA-DRB1*04:08L
IKIVQMLSDTLK

SEQ ID NO: 11395 - protein, 11 aa, Severe acute respiratory syndrome coronavirus 2
  REGION 1..11: note = Table B: HLA-DQA1*05:01-B1*03:01L HLA-DRB1*01:03L HLA-DRB1*04:04L HLA-DRB1*04:05L HLA-DQA1*01:02-B1*06:02L HLA-DRB4*03:01NL HLA-DRB1*14:01L HLA-DRB1*04:10L HLA-DRB1*14:54L HLA-DRB1*10:01L HLA-DRB1*04:08L
IVQMLSDTLKN

SEQ ID NO: 11396 - protein, 13 aa, Severe acute respiratory syndrome coronavirus 2
  REGION 1..13: note = Table B: HLA-DQA1*05:01-B1*03:01L HLA-DRB1*01:03L HLA-DRB1*04:04L HLA-DRB1*04:05L HLA-DRB1*08:04L HLA-DRB1*04:10L HLA-DRB1*14:54L HLA-DPA1*01:02-B1*04:01L HLA-DRB1*04:08L
SDTLKNLSDRVVF

SEQ ID NO: 11397 - protein, 11 aa, Severe acute respiratory syndrome coronavirus 2
  REGION 1..11: note = Table B: HLA-DQA1*05:01-B1*03:01L HLA-DRB1*04:03L HLA-DRB1*01:02L HLA-DRB1*14:01L HLA-DQA1*01-B1*05L HLA-DQA1*05:01-B1*02:01L HLA-DPA1*01:03-B1*04:01L HLA-DPA1*01:03-B1*04:02L HLA-DRB1*12:01L
  REGION 1..11: note = CONT. FROM ABOVE: HLA-DPA1*03:01-B1*105:01L HLA-DPA1*01:02-B1*04 :01L HLA-DRB1*16:01L HLA-DQA1*02:01-B1*03:03L
VVFVLWAHGFE

SEQ ID NO: 11398 - protein, 10 aa, Severe acute respiratory syndrome coronavirus 2
  REGION 1..10: note = Table B: HLA-DQA1*05:01-B1*03:01L HLA-DRB1*04:03L HLA-DRB1*13:02L HLA-DRB1*13:03L HLA-DRB1*01:03L HLA-DQA1*01:02-B1*06:02M HLA-DRB4*03:01NL HLA-DRB1*08:77L HLA-DPA1*01:03-B1*03:01L HLA-DPA1*03:01-B1*04:02L
  REGION 1..10: note = CONT. FROM ABOVE: HLA-DRB1*03:01L HLA-DRB1*14:01L HLA-DRB1*11:02 L HLA-DRB1*14:02L HLA-DRB1*11:01L HLA-DQA1*01-B1*05L HLA-DQA1*05 :05-B1*03:19M HLA-DQA1*05:01-B1*02:01M HLA-DRB4*01:01L HLA-DPA1* 01:03-B1*04:01L HLA-DQA1*05:05-B1*03:116L
  REGION 1..10: note = CONT. FROM ABOVE: HLA-DPA1*01:03-B1*04:02L HLA-DRB1*12:01L HLA-D PA1*02:01-B1*13:01L HLA-DPA1*03:01-B1*105:01L HLA-DPA1*01:03-B1* 104:01L HLA-DPA1*01:02-B1*04:01L HLA-DRB1*10:01L HLA-DRB1*16:01L HLA-DQA1*01:03-B1*06:01L HLA-DRB1*08:02L
  REGION 1..10: note = CONT. FROM ABOVE: HLA-DQA1*02:01-B1*03:03M HLA-DRB1*15:03L
HGFELTSMKY

SEQ ID NO: 11399 - protein, 10 aa, Severe acute respiratory syndrome coronavirus 2
  REGION 1..10: note = Table B: HLA-DQA1*05:01-B1*03:01L HLA-DQA1*01:02-B1*06:02L HLA-DPA1*03:01-B1*04:02L HLA-DQA1*05:05-B1*03:19L HLA-DQA1*05:01-B1*02:01L HLA-DPA1*02:01-B1*13:01L HLA-DPA1*03:01-B1*105:01L HLA-DPA1*01:02-B1*04:01L
  REGION 1..10: note = CONT. FROM ABOVE: HLA-DQA1*01:03-B1*06:01L HLA-DQA1*02:01-B1*03: 03L HLA-DRB1*15:03L
GFELTSMKYF

SEQ ID NO: 11400 - protein, 14 aa, Severe acute respiratory syndrome coronavirus 2
  REGION 1..14: note = Table B: HLA-DQA1*05:01-B1*03:01L HLA-DPA1*03:01-B1*105:01L
FSTASDTYACWHHS

SEQ ID NO: 11401 - protein, 12 aa, Severe acute respiratory syndrome coronavirus 2
  REGION 1..12: note = Table B: HLA-DQA1*05:01-B1*03:01L HLA-DRB1*13:03L HLA-DRB1*01:03L HLA-DRB1*04:05L HLA-DRB1*01:02L HLA-DRB1*08:04L HLA-DRB1*14:01L HLA-DPA1*02:01-B1*13:01L HLA-DPA1*03:01-B1*105:01L HLA-DQA1*03:01-B1*03:02L
  REGION 1..12: note = CONT. FROM ABOVE: HLA-DQA1*05:05-B1*03:01L HLA-DPA1*01:02-B1*04: 01L HLA-DRB1*16:01L HLA-DRB1*04:08L HLA-DRB1*08:03L HLA-DQA1*02: 01-B1*03:03L
SDTYACWHHSIG

SEQ ID NO: 11402 - protein, 11 aa, Severe acute respiratory syndrome coronavirus 2
  REGION 1..11: note = Table B: HLA-DQA1*05:01-B1*03:01L HLA-DRB1*04:03L HLA-DQA1*01:02-B1*06:02L HLA-DPA1*03:01-B1*04:02L HLA-DQA1*05:05-B1*03:19L HLA-DPA1*01:03-B1*04:01L HLA-DRB1*12:01L HLA-DPA1*02:01-B1*13:01L
  REGION 1..11: note = CONT. FROM ABOVE: HLA-DPA1*03:01-B1*105:01L HLA-DQA1*03:01-B1*03 :02L HLA-DPA1*01:02-B1*04:01L HLA-DRB1*16:01L HLA-DQA1*01:03-B1* 06:01L HLA-DQA1*02:01-B1*03:03L HLA-DRB1*15:03L
IGFDYVYNPFM

SEQ ID NO: 11403 - protein, 11 aa, Severe acute respiratory syndrome coronavirus 2
  REGION 1..11: note = Table B: HLA-DQA1*05:01-B1*03:01L HLA-DRB1*04:03L HLA-DRB1*13:02L HLA-DRB1*13:03L HLA-DRB1*01:03L HLA-DRB1*04:02L HLA-DRB1*04:05L HLA-DRB1*08:04L HLA-DPA1*01:03-B1*03:01L HLA-DRB1*14:01L HLA-DRB1*08:01L HLA-DQA1*05:01-B1*02:01L
  REGION 1..11: note = CONT. FROM ABOVE: HLA-DPA1*01:03-B1*04:01L HLA-DPA1*01:03-B1*04: 02L HLA-DRB1*12:01L HLA-DQA1*03:01-B1*03:02L HLA-DPA1*01:03-B1*0 2:01L HLA-DQA1*05:05-B1*03:01L HLA-DRB1*14:17L HLA-DRB1*16:01L H LA-DRB1*04:08L
YVYNPFMIDVQ

SEQ ID NO: 11404 - protein, 10 aa, Severe acute respiratory syndrome coronavirus 2
  REGION 1..10: note = Table B: HLA-DQA1*05:01-B1*03:01L HLA-DRB1*13:03L HLA-DRB1*01:03L HLA-DRB1*04:05L HLA-DQA1*01:02-B1*06:02M HLA-DRB1*01:01L HLA-DRB1*08:77L HLA-DPA1*03:01-B1*04:02L HLA-DRB1*14:01L HLA-DRB1*14:02L HLA-DQA1*05:01-B1*02:01L
  REGION 1..10: note = CONT. FROM ABOVE: HLA-DPA1*01:03-B1*04:01L HLA-DQA1*05:05-B1*03: 116L HLA-DPA1*02:01-B1*13:01M HLA-DPA1*03:01-B1*105:01M HLA-DPA1 *01:02-B1*04:01L HLA-DQA1*01:03-B1*06:01L HLA-DQA1*02:01-B1*03:0 3L HLA-DRB1*15:03M
NPFMIDVQQW

SEQ ID NO: 11405 - protein, 13 aa, Severe acute respiratory syndrome coronavirus 2
  REGION 1..13: note = Table B: HLA-DQA1*05:01-B1*03:01L HLA-DRB1*04:03L HLA-DQA1*01:02-B1*06:02L HLA-DQA1*01:01-B1*05:01L HLA-DQA1*05:05-B1*03:19L HLA-DPA1*03:01-B1*105:01L HLA-DQA1*05:05-B1*03:01L HLA-DRB1*16:01L
IDVQQWGFTGNLQ

SEQ ID NO: 11406 - protein, 11 aa, Severe acute respiratory syndrome coronavirus 2
  REGION 1..11: note = Table B: HLA-DQA1*05:01-B1*03:01L HLA-DRB1*04:03L HLA-DQA1*01:02-B1*06:02L HLA-DPA1*03:01-B1*105:01L HLA-DQA1*05:05-B1*03:01L
WGFTGNLQSNH

SEQ ID NO: 11407 - protein, 10 aa, Severe acute respiratory syndrome coronavirus 2
  REGION 1..10: note = Table B: HLA-DQA1*05:01-B1*03:01L HLA-DRB1*04:03L HLA-DRB1*13:03L HLA-DRB1*01:03L HLA-DQA1*01:02-B1*06:02L HLA-DRB1*08:77L HLA-DPA1*01:03-B1*03:01L HLA-DRB1*03:01L HLA-DRB1*11:02L HLA-DRB1*14:02L HLA-DQA1*01-B1*05L
  REGION 1..10: note = CONT. FROM ABOVE: HLA-DQA1*05:05-B1*03:19M HLA-DQA1*05:01-B1*02: 01L HLA-DRB4*01:01L HLA-DPA1*01:03-B1*04:01L HLA-DQA1*05:05-B1*0 3:116L HLA-DPA1*01:03-B1*04:02L HLA-DRB1*12:01L HLA-DPA1*03:01-B 1*105:01L HLA-DPA1*01:03-B1*104:01L HLA-DRB1*10:01L
  REGION 1..10: note = CONT. FROM ABOVE: HLA-DRB1*16:01L HLA-DRB1*08:02L HLA-DQA1*02:01 -B1*03:03L HLA-DRB1*15:03L
GNLQSNHDLY

SEQ ID NO: 11408 - protein, 12 aa, Severe acute respiratory syndrome coronavirus 2
  REGION 1..12: note = Table B: HLA-DQA1*05:01-B1*03:01L HLA-DRB1*01:03L HLA-DRB1*08:01L HLA-DQA1*03:01-B1*03:02L HLA-DRB1*04:08L
HDLYCQVHGNAH

SEQ ID NO: 11409 - protein, 14 aa, Severe acute respiratory syndrome coronavirus 2
  REGION 1..14: note = Table B: HLA-DQA1*05:01-B1*03:01L HLA-DQA1*05:05-B1*03:19L HLA-DQA1*03:01-B1*03:02L HLA-DQA1*05:05-B1*03:01L HLA-DQA1*02:01-B1*03:03L
VHGNAHVASCDAIM

SEQ ID NO: 11410 - protein, 12 aa, Severe acute respiratory syndrome coronavirus 2
  REGION 1..12: note = Table B: HLA-DQA1*05:01-B1*03:01L HLA-DRB1*04:03L HLA-DRB1*01:03L HLA-DRB1*04:05L HLA-DRB1*01:02L HLA-DRB1*14:01L HLA-DRB1*08:01L HLA-DRB1*12:01L HLA-DPA1*03:01-B1*105:01L HLA-DQA1*03:01-B1*03:02L HLA-DRB1*16:01L HLA-DRB1*04:08L
  REGION 1..12: note = CONT. FROM ABOVE: HLA-DRB1*15:03L
DAIMTRCLAVHE

SEQ ID NO: 11411 - protein, 13 aa, Severe acute respiratory syndrome coronavirus 2
  REGION 1..13: note = Table B: HLA-DQA1*05:01-B1*03:01L HLA-DRB1*04:03L HLA-DRB1*13:02L HLA-DRB1*01:03L HLA-DRB1*04:02L HLA-DRB1*04:05L HLA-DQA1*01:02-B1*06:02L HLA-DRB1*08:04L HLA-DRB1*03:01L HLA-DRB1*11:03L HLA-DRB1*11:04L HLA-DRB1*08:01L HLA-DRB1*11:01L
  REGION 1..13: note = CONT. FROM ABOVE: HLA-DRB3*01:01L HLA-DRB1*14:54L HLA-DPA1*01:02 -B1*04:01L HLA-DQA1*01:03-B1*06:01L HLA-DRB1*04:08L HLA-DQA1*02: 01-B1*03:03L
DELKINAACRKVQ

SEQ ID NO: 11412 - protein, 10 aa, Severe acute respiratory syndrome coronavirus 2
  REGION 1..10: note = Table B: HLA-DQA1*05:01-B1*03:01L HLA-DRB1*04:03L HLA-DRB1*13:03L HLA-DRB1*01:03L HLA-DRB1*04:02L HLA-DQA1*03:01-B1*03:02L HLA-DRB1*14:17L HLA-DRB1*16:01L HLA-DQA1*01:03-B1*06:01L HLA-DQA1*02:01-B1*03:03L
VVKAALLADK

SEQ ID NO: 11413 - protein, 15 aa, Severe acute respiratory syndrome coronavirus 2
  REGION 1..15: note = Table B: HLA-DQA1*05:01-B1*03:01L HLA-DQA1*05:05-B1*03:01L HLA-DRB1*15:03L
LHDIGNPKAIKCVPQ

SEQ ID NO: 11414 - protein, 10 aa, Severe acute respiratory syndrome coronavirus 2
  REGION 1..10: note = Table B: HLA-DQA1*05:01-B1*03:01L HLA-DRB1*13:03L HLA-DQA1*01:02-B1*06:02M HLA-DQA1*05:05-B1*03:116L HLA-DPA1*02:01-B1*13:01L HLA-DPA1*03:01-B1*105:01M HLA-DPA1*01:02-B1*04:01L HLA-DQA1*01:03-B1*06:01L
  REGION 1..10: note = CONT. FROM ABOVE: HLA-DRB1*15:03L
VPQADVEWKF

SEQ ID NO: 11415 - protein, 10 aa, Severe acute respiratory syndrome coronavirus 2
  REGION 1..10: note = Table B: HLA-DQA1*05:01-B1*03:01L HLA-DRB1*01:03L HLA-DQA1*01:02-B1*06:02L HLA-DRB1*08:77L HLA-DPA1*01:03-B1*03:01L HLA-DRB1*03:01L HLA-DRB1*14:02L HLA-DQA1*01-B1*05L HLA-DQA1*05:05-B1*03:19L
  REGION 1..10: note = CONT. FROM ABOVE: HLA-DQA1*05:01-B1*02:01L HLA-DRB4*01:01L HLA-D PA1*01:03-B1*04:01L HLA-DQA1*05:05-B1*03:116L HLA-DPA1*01:03-B1* 04:02L HLA-DPA1*02:01-B1*13:01L HLA-DPA1*03:01-B1*105:01L HLA-DP A1*01:03-B1*104:01L HLA-DRB1*16:01L HLA-DQA1*01:03-B1*06:01L
  REGION 1..10: note = CONT. FROM ABOVE: HLA-DRB1*08:02L HLA-DQA1*02:01-B1*03:03L HLA-D RB1*15:03L
KAYKIEELFY

SEQ ID NO: 11416 - protein, 10 aa, Severe acute respiratory syndrome coronavirus 2
  REGION 1..10: note = Table B: HLA-DQA1*05:01-B1*03:01L HLA-DRB1*01:03L HLA-DQA1*01:02-B1*06:02L HLA-DRB1*08:77L HLA-DPA1*01:03-B1*03:01L HLA-DPA1*03:01-B1*04:02L HLA-DRB1*03:01L HLA-DRB1*11:02L HLA-DRB1*14:02L
  REGION 1..10: note = CONT. FROM ABOVE: HLA-DQA1*01-B1*05L HLA-DQA1*05:05-B1*03:19M HL A-DQA1*05:01-B1*02:01L HLA-DRB4*01:01L HLA-DPA1*01:03-B1*04:01L HLA-DQA1*05:05-B1*03:116L HLA-DPA1*01:03-B1*04:02L HLA-DPA1*02:0 1-B1*13:01L HLA-DPA1*03:01-B1*105:01L HLA-DPA1*01:03-B1*104:01L
  REGION 1..10: note = CONT. FROM ABOVE: HLA-DRB1*10:01L HLA-DRB1*16:01L HLA-DQA1*01:03 -B1*06:01L HLA-DQA1*02:01-B1*03:03L HLA-DRB1*15:03L
YKIEELFYSY

SEQ ID NO: 11417 - protein, 13 aa, Severe acute respiratory syndrome coronavirus 2
  REGION 1..13: note = Table B: HLA-DQA1*05:01-B1*03:01L HLA-DRB1*13:02L HLA-DRB1*13:03L HLA-DRB1*01:03L HLA-DRB1*04:05L HLA-DQA1*01:02-B1*06:02L HLA-DRB1*01:02L HLA-DRB4*03:01NL HLA-DRB1*08:04L HLA-DRB1*08:77L HLA-DRB3*02:01L
  REGION 1..13: note = CONT. FROM ABOVE: HLA-DPA1*01:03-B1*03:01L HLA-DPA1*03:01-B1*04: 02L HLA-DRB1*14:01L HLA-DRB1*11:03L HLA-DRB1*14:02L HLA-DQA1*01: 01-B1*05:01L HLA-DRB1*08:01L HLA-DQA1*05:05-B1*03:19L HLA-DPA1*0 1:03-B1*04:01L HLA-DRB1*04:10L HLA-DRB1*09:01L
  REGION 1..13: note = CONT. FROM ABOVE: HLA-DPA1*01:03-B1*04:02L HLA-DRB1*12:01L HLA-D RB1*12:02L HLA-DPA1*02:01-B1*13:01L HLA-DPA1*03:01-B1*105:01L HL A-DRB1*14:54L HLA-DPA1*01:03-B1*104:01L HLA-DQA1*05:05-B1*03:01L HLA-DRB1*14:17L HLA-DPA1*01:02-B1*04:01L HLA-DRB1*07:01L
  REGION 1..13: note = CONT. FROM ABOVE: HLA-DRB1*10:01L HLA-DQA1*01:03-B1*06:01L HLA-D RB1*04:08L HLA-DRB1*08:03L
IEELFYSYATHSD

SEQ ID NO: 11418 - protein, 12 aa, Severe acute respiratory syndrome coronavirus 2
  REGION 1..12: note = Table B: HLA-DQA1*05:01-B1*03:01L HLA-DRB1*01:03L HLA-DPA1*03:01-B1*04:02L HLA-DRB1*08:01L HLA-DQA1*05:05-B1*03:19L HLA-DPA1*01:03-B1*04:02L HLA-DQA1*05:05-B1*03:01L HLA-DRB1*16:01L
  REGION 1..12: note = CONT. FROM ABOVE: HLA-DQA1*01:03-B1*06:01L HLA-DRB1*04:08L HLA-D QA1*02:01-B1*03:03L HLA-DRB1*15:03L
FWNCNVDRYPAN

SEQ ID NO: 11419 - protein, 13 aa, Severe acute respiratory syndrome coronavirus 2
  REGION 1..13: note = Table B: HLA-DQA1*05:01-B1*03:01L HLA-DRB1*13:02L HLA-DRB1*04:04L HLA-DQA1*01:02-B1*06:02L HLA-DRB1*01:02L HLA-DPA1*01:03-B1*03:01L HLA-DRB1*14:01L HLA-DQA1*01:01-B1*05:01L HLA-DPA1*02:01-B1*13:01L
  REGION 1..13: note = CONT. FROM ABOVE: HLA-DPA1*03:01-B1*105:01L HLA-DQA1*05:05-B1*03 :01L HLA-DRB1*04:08L HLA-DRB1*15:03L
FDTRVLSNLNLPG

SEQ ID NO: 11420 - protein, 12 aa, Severe acute respiratory syndrome coronavirus 2
  REGION 1..12: note = Table B: HLA-DQA1*05:01-B1*03:01L HLA-DRB1*04:03L HLA-DRB1*04:02L HLA-DQA1*01:02-B1*06:02L HLA-DRB1*01:02L HLA-DRB1*14:01L HLA-DQA1*05:05-B1*03:19L HLA-DRB1*12:01L HLA-DPA1*03:01-B1*105:01L HLA-DQA1*03:01-B1*03:02L
  REGION 1..12: note = CONT. FROM ABOVE: HLA-DQA1*05:05-B1*03:01L HLA-DRB1*14:17L HLA-D QA1*01:03-B1*06:01L HLA-DQA1*02:01-B1*03:03L HLA-DRB1*15:03L
VLSNLNLPGCDG

SEQ ID NO: 11421 - protein, 13 aa, Severe acute respiratory syndrome coronavirus 2
  REGION 1..13: note = Table B: HLA-DQA1*05:01-B1*03:01L HLA-DQA1*01:02-B1*06:02L HLA-DQA1*05:05-B1*03:01L HLA-DQA1*01:03-B1*06:01L HLA-DQA1*02:01-B1*03:03L
LPGCDGGSLYVNK

SEQ ID NO: 11422 - protein, 13 aa, Severe acute respiratory syndrome coronavirus 2
  REGION 1..13: note = Table B: HLA-DQA1*05:01-B1*03:01L HLA-DRB1*08:04L HLA-DRB1*11:04L HLA-DPA1*01:02-B1*04:01L
DGGSLYVNKHAFH

SEQ ID NO: 11423 - protein, 14 aa, Severe acute respiratory syndrome coronavirus 2
  REGION 1..14: note = Table B: HLA-DQA1*05:01-B1*03:01L HLA-DRB3*01:01L HLA-DPA1*02:01-B1*13:01L HLA-DPA1*01:02-B1*04:01L HLA-DRB1*08:03L
GGSLYVNKHAFHTP

SEQ ID NO: 11424 - protein, 14 aa, Severe acute respiratory syndrome coronavirus 2
  REGION 1..14: note = Table B: HLA-DQA1*05:01-B1*03:01L HLA-DRB1*04:04L HLA-DRB1*01:01L HLA-DRB4*03:01NL HLA-DPA1*03:01-B1*04:02L HLA-DRB1*03:01L HLA-DRB1*11:02L HLA-DRB1*14:02L HLA-DQA1*05:05-B1*03:19L HLA-DQA1*05:05-B1*03:116L
  REGION 1..14: note = CONT. FROM ABOVE: HLA-DPA1*01:03-B1*04:02L HLA-DPA1*02:01-B1*13: 01L HLA-DPA1*03:01-B1*105:01L HLA-DRB1*14:54L HLA-DPA1*01:03-B1* 02:01L HLA-DQA1*05:05-B1*03:01L HLA-DRB1*07:01L HLA-DRB1*08:02L
GSLYVNKHAFHTPA

SEQ ID NO: 11425 - protein, 14 aa, Severe acute respiratory syndrome coronavirus 2
  REGION 1..14: note = Table B: HLA-DQA1*05:01-B1*03:01L HLA-DRB1*03:01L HLA-DRB1*14:01L HLA-DPA1*03:01-B1*105:01L HLA-DQA1*01:03-B1*06:01L
VNKHAFHTPAFDKS

SEQ ID NO: 11426 - protein, 10 aa, Severe acute respiratory syndrome coronavirus 2
  REGION 1..10: note = Table B: HLA-DQA1*05:01-B1*03:01L HLA-DRB1*13:03L HLA-DRB1*01:03L HLA-DQA1*01:02-B1*06:02M HLA-DPA1*01:03-B1*03:01L HLA-DPA1*03:01-B1*04:02L HLA-DRB1*14:01L HLA-DRB1*14:02L HLA-DQA1*05:05-B1*03:19L
  REGION 1..10: note = CONT. FROM ABOVE: HLA-DQA1*05:01-B1*02:01L HLA-DPA1*01:03-B1*04: 01L HLA-DPA1*02:01-B1*13:01L HLA-DPA1*03:01-B1*105:01L HLA-DPA1* 01:02-B1*04:01L HLA-DQA1*01:03-B1*06:01L HLA-DQA1*02:01-B1*03:03 L HLA-DRB1*15:03L
HTPAFDKSAF

SEQ ID NO: 11427 - protein, 10 aa, Severe acute respiratory syndrome coronavirus 2
  REGION 1..10: note = Table B: HLA-DQA1*05:01-B1*03:01L HLA-DRB1*04:03L HLA-DQA1*01:02-B1*06:02L HLA-DRB1*01:02L HLA-DRB3*02:01L HLA-DPA1*03:01-B1*04:02L HLA-DRB1*14:01L HLA-DRB1*14:02L HLA-DQA1*05:05-B1*03:19L HLA-DQA1*05:01-B1*02:01L
  REGION 1..10: note = CONT. FROM ABOVE: HLA-DRB1*12:01L HLA-DPA1*02:01-B1*13:01L HLA-D PA1*03:01-B1*105:01L HLA-DQA1*05:05-B1*03:01L HLA-DPA1*01:02-B1* 04:01L HLA-DRB1*16:01L HLA-DQA1*01:03-B1*06:01L HLA-DQA1*02:01-B 1*03:03L HLA-DRB1*15:03L
FVNLKQLPFF

SEQ ID NO: 11428 - protein, 10 aa, Severe acute respiratory syndrome coronavirus 2
  REGION 1..10: note = Table B: HLA-DQA1*05:01-B1*03:01L HLA-DQA1*01:02-B1*06:02L HLA-DPA1*01:03-B1*03:01L HLA-DRB1*03:01L HLA-DRB1*14:02L HLA-DQA1*05:05-B1*03:19L HLA-DQA1*05:01-B1*02:01L HLA-DRB4*01:01L HLA-DPA1*01:03-B1*04:01L HLA-DRB1*12:01L
  REGION 1..10: note = CONT. FROM ABOVE: HLA-DPA1*03:01-B1*105:01L HLA-DPA1*01:03-B1*10 4:01L HLA-DRB1*16:01L HLA-DQA1*02:01-B1*03:03L HLA-DRB1*15:03L
NLKQLPFFYY

SEQ ID NO: 11429 - protein, 13 aa, Severe acute respiratory syndrome coronavirus 2
  REGION 1..13: note = Table B: HLA-DQA1*05:01-B1*03:01L HLA-DQA1*01:02-B1*06:02L HLA-DPA1*03:01-B1*105:01L HLA-DQA1*01:03-B1*06:01L HLA-DQA1*02:01-B1*03:03L
YYSDSPCESHGKQ

SEQ ID NO: 11430 - protein, 11 aa, Severe acute respiratory syndrome coronavirus 2
  REGION 1..11: note = Table B: HLA-DQA1*05:01-B1*03:01L HLA-DRB1*13:02L HLA-DRB1*13:03L HLA-DRB1*01:03L HLA-DRB1*04:02L HLA-DRB1*04:05L HLA-DQA1*01:02-B1*06:02L HLA-DRB1*01:02L HLA-DRB4*03:01NL HLA-DPA1*01:03-B1*03:01L HLA-DPA1*03:01-B1*04:02L
  REGION 1..11: note = CONT. FROM ABOVE: HLA-DRB1*14:01L HLA-DQA1*01:01-B1*05:01L HLA-D QA1*05:05-B1*03:19L HLA-DRB1*04:10L HLA-DPA1*01:03-B1*04:02L HLA -DRB1*12:01L HLA-DPA1*03:01-B1*105:01L HLA-DRB1*14:54L HLA-DQA1* 05:05-B1*03:01L HLA-DRB1*14:17L HLA-DPA1*01:02-B1*04:01L
  REGION 1..11: note = CONT. FROM ABOVE: HLA-DRB1*16:01L HLA-DRB1*04:08L HLA-DRB1*15:03 L
VVSDIDYVPLK

SEQ ID NO: 11431 - protein, 13 aa, Severe acute respiratory syndrome coronavirus 2
  REGION 1..13: note = Table B: HLA-DQA1*05:01-B1*03:01L HLA-DRB1*01:03L HLA-DRB1*04:05L HLA-DRB1*01:02L HLA-DPA1*01:03-B1*03:01L HLA-DQA1*05:05-B1*03:19L HLA-DPA1*01:03-B1*04:01L HLA-DRB1*12:01L HLA-DQA1*05:05-B1*03:01L HLA-DRB1*04:08L
  REGION 1..13: note = CONT. FROM ABOVE: HLA-DRB1*15:03L
VSDIDYVPLKSAT

SEQ ID NO: 11432 - protein, 13 aa, Severe acute respiratory syndrome coronavirus 2
  REGION 1..13: note = Table B: HLA-DQA1*05:01-B1*03:01L HLA-DRB1*04:01L HLA-DRB1*13:02L HLA-DRB1*04:04L HLA-DRB1*04:05L HLA-DPA1*01:03-B1*03:01L HLA-DRB1*14:01L HLA-DRB1*11:03L HLA-DRB1*11:01L HLA-DQA1*05:05-B1*03:19L
  REGION 1..13: note = CONT. FROM ABOVE: HLA-DPA1*01:03-B1*04:02L HLA-DRB3*01:01L HLA-D RB1*07:01L HLA-DQA1*01:03-B1*06:01L HLA-DRB1*08:02L
IDYVPLKSATCIT

SEQ ID NO: 11433 - protein, 12 aa, Severe acute respiratory syndrome coronavirus 2
  REGION 1..12: note = Table B: HLA-DQA1*05:01-B1*03:01L HLA-DRB1*04:01L HLA-DRB1*04:04L HLA-DRB1*04:05L HLA-DQA1*01:02-B1*06:02L HLA-DRB1*11:04L HLA-DRB1*08:01L HLA-DRB1*11:01L HLA-DRB1*12:01L HLA-DRB3*01:01L HLA-DPA1*03:01-B1*105:01L HLA-DRB1*07:01L
  REGION 1..12: note = CONT. FROM ABOVE: HLA-DRB1*10:01L HLA-DQA1*01:03-B1*06:01L
YVPLKSATCITR

SEQ ID NO: 11434 - protein, 10 aa, Severe acute respiratory syndrome coronavirus 2
  REGION 1..10: note = Table B: HLA-DQA1*05:01-B1*03:01L HLA-DRB1*01:03L HLA-DQA1*01:02-B1*06:02L HLA-DRB1*03:01L HLA-DRB1*11:01L HLA-DRB1*16:01L HLA-DQA1*02:01-B1*03:03L
RHHANEYRLY

SEQ ID NO: 11435 - protein, 12 aa, Severe acute respiratory syndrome coronavirus 2
  REGION 1..12: note = Table B: HLA-DQA1*05:01-B1*03:01L HLA-DRB1*01:03L HLA-DRB1*01:02L HLA-DRB1*12:01L HLA-DPA1*01:03-B1*104:01L HLA-DRB1*04:08L
FSLWVYKQFDTY

SEQ ID NO: 11436 - protein, 13 aa, Severe acute respiratory syndrome coronavirus 2
  REGION 1..13: note = Table B: HLA-DQA1*05:01-B1*03:01L HLA-DRB1*13:02L HLA-DPA1*01:03-B1*04:02L HLA-DQA1*03:01-B1*03:02L HLA-DQA1*05:05-B1*03:01L
VYKQFDTYNLWNT

SEQ ID NO: 11437 - protein, 12 aa, Severe acute respiratory syndrome coronavirus 2
  REGION 1..12: note = Table B: HLA-DQA1*05:01-B1*03:01L HLA-DRB1*01:03L HLA-DRB1*01:02L HLA-DRB1*14:01L HLA-DPA1*01:03-B1*04:02L HLA-DRB1*04:08L
DTYNLWNTFTRL

SEQ ID NO: 11438 - protein, 11 aa, Severe acute respiratory syndrome coronavirus 2
  REGION 1..11: note = Table B: HLA-DQA1*05:01-B1*03:01L HLA-DRB1*04:03L HLA-DRB1*01:03L HLA-DQA1*01:02-B1*06:02L HLA-DRB1*01:02L HLA-DPA1*01:03-B1*03:01L HLA-DRB1*12:01L HLA-DPA1*02:01-B1*13:01L HLA-DQA1*03:01-B1*03:02L
  REGION 1..11: note = CONT. FROM ABOVE: HLA-DPA1*01:03-B1*02:01L HLA-DRB1*04:08L HLA-D QA1*02:01-B1*03:03L HLA-DRB1*15:03L
SLENVAFNVVN

SEQ ID NO: 11439 - protein, 10 aa, Severe acute respiratory syndrome coronavirus 2
  REGION 1..10: note = Table B: HLA-DQA1*05:01-B1*03:01L HLA-DRB1*04:03L HLA-DRB1*04:02L HLA-DQA1*03:01-B1*03:02L HLA-DPA1*01:02-B1*04:01L HLA-DQA1*01:03-B1*06:01L HLA-DQA1*02:01-B1*03:03L
VAFNVVNKGH

SEQ ID NO: 11440 - protein, 11 aa, Severe acute respiratory syndrome coronavirus 2
  REGION 1..11: note = Table B: HLA-DQA1*05:01-B1*03:01L HLA-DQA1*05:05-B1*03:116L
SIINNTVYTKV

SEQ ID NO: 11441 - protein, 11 aa, Severe acute respiratory syndrome coronavirus 2
  REGION 1..11: note = Table B: HLA-DQA1*05:01-B1*03:01L HLA-DRB1*04:03L HLA-DRB1*04:02L HLA-DQA1*01:02-B1*06:02L HLA-DRB1*01:02L HLA-DPA1*03:01-B1*04:02L HLA-DRB1*14:01L HLA-DQA1*05:01-B1*02:01L HLA-DRB1*12:01L
  REGION 1..11: note = CONT. FROM ABOVE: HLA-DPA1*03:01-B1*105:01L HLA-DRB1*14:17L HLA- DPA1*01:02-B1*04:01L HLA-DRB1*16:01L
IINNTVYTKVD

SEQ ID NO: 11442 - protein, 14 aa, Severe acute respiratory syndrome coronavirus 2
  REGION 1..14: note = Table B: HLA-DQA1*05:01-B1*03:01L HLA-DRB1*01:03L HLA-DRB3*02:01L HLA-DRB1*08:01L HLA-DRB1*15:01L
VDVELFENKTTLPV

SEQ ID NO: 11443 - protein, 14 aa, Severe acute respiratory syndrome coronavirus 2
  REGION 1..14: note = Table B: HLA-DQA1*05:01-B1*03:01L HLA-DRB1*04:03L HLA-DRB1*01:03L HLA-DRB1*04:05L HLA-DPA1*01:03-B1*03:01L HLA-DPA1*03:01-B1*04:02L HLA-DRB1*08:01L HLA-DQA1*01-B1*05L HLA-DPA1*01:03-B1*04:01L HLA-DPA1*01:03-B1*04:02L
  REGION 1..14: note = CONT. FROM ABOVE: HLA-DRB1*12:01L HLA-DQA1*05:05-B1*03:01L HLA-D RB1*16:01L
LPVNVAFELWAKRN

SEQ ID NO: 11444 - protein, 14 aa, Severe acute respiratory syndrome coronavirus 2
  REGION 1..14: note = Table B: HLA-DQA1*05:01-B1*03:01L HLA-DRB1*08:04L HLA-DRB1*11:02L HLA-DRB1*11:03L HLA-DPA1*03:01-B1*105:01L HLA-DPA1*01:03-B1*02:01L HLA-DQA1*01:03-B1*06:01L HLA-DRB1*08:02L HLA-DRB1*08:03L
FELWAKRNIKPVPE

SEQ ID NO: 11445 - protein, 14 aa, Severe acute respiratory syndrome coronavirus 2
  REGION 1..14: note = Table B: HLA-DQA1*05:01-B1*03:01L HLA-DRB1*03:01L HLA-DQA1*01:01-B1*05:01L HLA-DRB1*04:10L HLA-DQA1*01:03-B1*06:01L
LWAKRNIKPVPEVK

SEQ ID NO: 11446 - protein, 12 aa, Severe acute respiratory syndrome coronavirus 2
  REGION 1..12: note = Table B: HLA-DQA1*05:01-B1*03:01L HLA-DRB1*13:02L HLA-DRB1*01:03L HLA-DRB1*04:02L HLA-DRB1*04:05L HLA-DQA1*01:02-B1*06:02L HLA-DRB1*01:02L HLA-DRB1*14:01L HLA-DQA1*01-B1*05L HLA-DQA1*05:01-B1*02:01L HLA-DRB1*12:01L
  REGION 1..12: note = CONT. FROM ABOVE: HLA-DPA1*03:01-B1*105:01L HLA-DRB1*14:17L HLA- DPA1*01:02-B1*04:01L HLA-DRB1*16:01L HLA-DQA1*01:03-B1*06:01L HL A-DRB1*04:08L
IKPVPEVKILNN

SEQ ID NO: 11447 - protein, 13 aa, Severe acute respiratory syndrome coronavirus 2
  REGION 1..13: note = Table B: HLA-DQA1*05:01-B1*03:01L HLA-DRB1*13:02L HLA-DRB1*13:03L HLA-DRB1*01:03L HLA-DQA1*01:02-B1*06:02L HLA-DRB1*08:04L HLA-DRB1*08:77L HLA-DRB3*02:01L HLA-DPA1*01:03-B1*03:01L HLA-DPA1*03:01-B1*04:02L
  REGION 1..13: note = CONT. FROM ABOVE: HLA-DRB1*11:03L HLA-DRB1*11:04L HLA-DRB1*08:01 L HLA-DQA1*05:01-B1*02:01L HLA-DRB1*09:01L HLA-DRB1*12:02L HLA-D PA1*03:01-B1*105:01L HLA-DQA1*05:05-B1*03:01L HLA-DRB1*10:01L HL A-DRB1*04:08L HLA-DRB1*08:03L
VPEVKILNNLGVD

SEQ ID NO: 11448 - protein, 12 aa, Severe acute respiratory syndrome coronavirus 2
  REGION 1..12: note = Table B: HLA-DQA1*05:01-B1*03:01L HLA-DRB1*13:02L HLA-DRB1*01:03L HLA-DQA1*01:02-B1*06:02L HLA-DRB1*08:04L HLA-DRB1*08:77L HLA-DRB3*02:01L HLA-DPA1*01:03-B1*03:01L HLA-DPA1*03:01-B1*04:02L HLA-DRB1*11:03L HLA-DRB1*14:02L
  REGION 1..12: note = CONT. FROM ABOVE: HLA-DQA1*05:05-B1*03:19L HLA-DQA1*05:01-B1*02: 01L HLA-DRB1*12:02L HLA-DPA1*03:01-B1*105:01L HLA-DQA1*05:05-B1* 03:01L HLA-DPA1*01:02-B1*04:01L HLA-DRB1*07:01L
VKILNNLGVDIA

SEQ ID NO: 11449 - protein, 12 aa, Severe acute respiratory syndrome coronavirus 2
  REGION 1..12: note = Table B: HLA-DQA1*05:01-B1*03:01L HLA-DPA1*03:01-B1*04:02L HLA-DRB1*14:01L HLA-DRB1*12:01L HLA-DQA1*05:05-B1*03:01L HLA-DQA1*01:03-B1*06:01L
VDIAANTVIWDY

SEQ ID NO: 11450 - protein, 14 aa, Severe acute respiratory syndrome coronavirus 2
  REGION 1..14: note = Table B: HLA-DQA1*05:01-B1*03:01L HLA-DRB1*14:04L HLA-DRB1*04:01L HLA-DPA1*01:03-B1*03:01L HLA-DPA1*03:01-B1*04:02L HLA-DRB1*03:01L HLA-DRB1*11:02L HLA-DQA1*05:05-B1*03:19L HLA-DRB1*13:01L
  REGION 1..14: note = CONT. FROM ABOVE: HLA-DPA1*01:03-B1*04:02L HLA-DRB1*12:02L HLA-D PA1*03:01-B1*105:01L HLA-DPA1*01:03-B1*02:01L HLA-DRB1*10:01L HL A-DQA1*01:03-B1*06:01L HLA-DRB1*08:02L
ANTVIWDYKRDAPA

SEQ ID NO: 11451 - protein, 13 aa, Severe acute respiratory syndrome coronavirus 2
  REGION 1..13: note = Table B: HLA-DQA1*05:01-B1*03:01L HLA-DRB1*04:04L HLA-DRB1*11:03L HLA-DRB1*14:02L HLA-DQA1*01:01-B1*05:01L HLA-DPA1*02:01-B1*13:01L HLA-DPA1*03:01-B1*105:01L HLA-DRB1*10:01L HLA-DRB1*08:02L
TVIWDYKRDAPAH

SEQ ID NO: 11452 - protein, 11 aa, Severe acute respiratory syndrome coronavirus 2
  REGION 1..11: note = Table B: HLA-DQA1*05:01-B1*03:01L HLA-DRB1*04:03L HLA-DRB1*13:03L HLA-DRB1*01:03L HLA-DRB1*04:02L HLA-DRB1*04:05L HLA-DRB1*01:02L HLA-DRB4*03:01NL HLA-DRB1*08:04L HLA-DRB1*08:77L HLA-DRB1*11:04L HLA-DRB1*12:01L HLA-DRB3*01:01L
  REGION 1..11: note = CONT. FROM ABOVE: HLA-DQA1*03:01-B1*03:02L HLA-DRB1*14:54L HLA-D RB1*14:17L HLA-DRB1*04:08L HLA-DQA1*02:01-B1*03:03L HLA-DRB1*15: 03L
YKRDAPAHIST

SEQ ID NO: 11453 - protein, 11 aa, Severe acute respiratory syndrome coronavirus 2
  REGION 1..11: note = Table B: HLA-DQA1*05:01-B1*03:01L HLA-DRB1*04:03L HLA-DRB1*04:02L HLA-DQA1*01:02-B1*06:02L HLA-DQA1*05:05-B1*03:19L HLA-DPA1*03:01-B1*105:01L HLA-DQA1*05:05-B1*03:01L HLA-DQA1*01:03-B1*06:01L
FFDGRVDGQVD

SEQ ID NO: 11454 - protein, 10 aa, Severe acute respiratory syndrome coronavirus 2
  REGION 1..10: note = Table B: HLA-DQA1*05:01-B1*03:01L HLA-DRB1*01:03L HLA-DQA1*01:02-B1*06:02L HLA-DRB1*14:02L HLA-DQA1*05:05-B1*03:19L HLA-DQA1*05:01-B1*02:01L HLA-DPA1*03:01-B1*105:01L HLA-DQA1*01:03-B1*06:01L
  REGION 1..10: note = CONT. FROM ABOVE: HLA-DQA1*02:01-B1*03:03L HLA-DRB1*15:03L
GRVDGQVDLF

SEQ ID NO: 11455 - protein, 14 aa, Severe acute respiratory syndrome coronavirus 2
  REGION 1..14: note = Table B: HLA-DQA1*05:01-B1*03:01L HLA-DRB1*01:03L HLA-DRB1*04:05L HLA-DRB1*01:02L HLA-DRB1*12:01L HLA-DPA1*02:01-B1*13:01L HLA-DPA1*03:01-B1*105:01L HLA-DQA1*05:05-B1*03:01L HLA-DRB1*04:08L
NARNGVLITEGSVK

SEQ ID NO: 11456 - protein, 12 aa, Severe acute respiratory syndrome coronavirus 2
  REGION 1..12: note = Table B: HLA-DQA1*05:01-B1*03:01L HLA-DRB1*04:01L HLA-DQA1*01:02-B1*06:02L HLA-DRB1*08:04L HLA-DRB1*08:77L HLA-DRB3*02:01L HLA-DPA1*01:03-B1*03:01L HLA-DRB1*14:02L HLA-DQA1*01:01-B1*05:01L HLA-DRB1*08:01L HLA-DRB5*01:01L
  REGION 1..12: note = CONT. FROM ABOVE: HLA-DQA1*05:05-B1*03:19L HLA-DRB1*09:01L HLA-D PA1*03:01-B1*105:01L HLA-DQA1*05:05-B1*03:01L HLA-DRB1*07:01L HL A-DRB1*15:03L
NGVLITEGSVKG

SEQ ID NO: 11457 - protein, 12 aa, Severe acute respiratory syndrome coronavirus 2
  REGION 1..12: note = Table B: HLA-DQA1*05:01-B1*03:01L HLA-DRB1*04:03L HLA-DRB1*13:02L HLA-DRB1*13:03L HLA-DRB1*01:03L HLA-DRB1*04:02L HLA-DRB1*04:05L HLA-DQA1*01:02-B1*06:02L HLA-DRB1*01:02L HLA-DRB4*03:01NL HLA-DRB1*08:04L HLA-DRB1*08:77L
  REGION 1..12: note = CONT. FROM ABOVE: HLA-DPA1*01:03-B1*03:01L HLA-DRB1*14:01L HLA-D RB1*11:03L HLA-DRB1*11:04L HLA-DRB1*14:02L HLA-DQA1*01:01-B1*05: 01L HLA-DQA1*05:05-B1*03:19L HLA-DQA1*05:01-B1*02:01L HLA-DRB1*0 4:10L HLA-DRB1*12:01L HLA-DRB1*12:02L HLA-DPA1*03:01-B1*105:01L
  REGION 1..12: note = CONT. FROM ABOVE: HLA-DRB1*14:54L HLA-DQA1*05:05-B1*03:01L HLA-D RB1*14:17L HLA-DRB1*10:01L HLA-DRB1*16:01L HLA-DRB1*04:08L
ITEGSVKGLQPS

SEQ ID NO: 11458 - protein, 12 aa, Severe acute respiratory syndrome coronavirus 2
  REGION 1..12: note = Table B: HLA-DQA1*05:01-B1*03:01L HLA-DRB1*04:03L HLA-DRB1*04:02L HLA-DRB1*04:05L HLA-DQA1*01:02-B1*06:02L HLA-DRB1*01:02L HLA-DQA1*05:05-B1*03:19L HLA-DRB1*04:10L HLA-DRB1*12:01L HLA-DQA1*03:01-B1*03:02L
  REGION 1..12: note = CONT. FROM ABOVE: HLA-DQA1*05:05-B1*03:01L HLA-DRB1*14:17L HLA-D QA1*02:01-B1*03:03L
GSVKGLQPSVGP

SEQ ID NO: 11459 - protein, 12 aa, Severe acute respiratory syndrome coronavirus 2
  REGION 1..12: note = Table B: HLA-DQA1*05:01-B1*03:01L HLA-DRB1*04:02L HLA-DQA1*01:02-B1*06:02L HLA-DQA1*05:05-B1*03:01L
SVKGLQPSVGPK

SEQ ID NO: 11460 - protein, 10 aa, Severe acute respiratory syndrome coronavirus 2
  REGION 1..10: note = Table B: HLA-DQA1*05:01-B1*03:01L HLA-DRB1*13:03M HLA-DRB1*01:03L HLA-DQA1*01:02-B1*06:02M HLA-DRB4*03:01NL HLA-DRB1*08:77L HLA-DPA1*01:03-B1*03:01L HLA-DPA1*03:01-B1*04:02L HLA-DRB1*03:01L HLA-DRB1*14:01L
  REGION 1..10: note = CONT. FROM ABOVE: HLA-DRB1*11:02L HLA-DRB1*14:02L HLA-DRB5*01:01 L HLA-DQA1*01-B1*05L HLA-DQA1*05:05-B1*03:19M HLA-DQA1*05:01-B1* 02:01L HLA-DRB4*01:01L HLA-DPA1*01:03-B1*04:01M HLA-DQA1*05:05-B 1*03:116L HLA-DPA1*01:03-B1*04:02L HLA-DRB1*12:01L
  REGION 1..10: note = CONT. FROM ABOVE: HLA-DPA1*02:01-B1*13:01L HLA-DPA1*03:01-B1*105 :01L HLA-DPA1*01:03-B1*104:01L HLA-DQA1*05:05-B1*03:01L HLA-DPA1 *01:02-B1*04:01L HLA-DRB1*10:01L HLA-DRB1*16:01L HLA-DQA1*01:03- B1*06:01L HLA-DRB1*08:02L HLA-DQA1*02:01-B1*03:03L
  REGION 1..10: note = CONT. FROM ABOVE: HLA-DRB1*15:03L
EAVKTQFNYY

SEQ ID NO: 11461 - protein, 12 aa, Severe acute respiratory syndrome coronavirus 2
  REGION 1..12: note = Table B: HLA-DQA1*05:01-B1*03:01L HLA-DRB1*04:03L HLA-DRB1*13:02L HLA-DRB1*04:04L HLA-DQA1*01:02-B1*06:02L HLA-DRB1*01:02L HLA-DRB4*03:01NL HLA-DRB1*08:04L HLA-DRB1*14:01L HLA-DRB1*11:04L HLA-DRB1*11:01L HLA-DRB1*04:10L HLA-DRB1*12:01L
  REGION 1..12: note = CONT. FROM ABOVE: HLA-DRB3*01:01L HLA-DPA1*02:01-B1*13:01L HLA-D PA1*03:01-B1*105:01L HLA-DRB1*14:54L HLA-DRB1*14:17L HLA-DPA1*01 :02-B1*04:01L HLA-DRB1*08:03L HLA-DRB1*15:03L
FNYYKKVDGVVQ

SEQ ID NO: 11462 - protein, 14 aa, Severe acute respiratory syndrome coronavirus 2
  REGION 1..14: note = Table B: HLA-DQA1*05:01-B1*03:01L HLA-DRB1*01:02L HLA-DPA1*01:03-B1*03:01L HLA-DQA1*05:05-B1*03:19L HLA-DPA1*02:01-B1*13:01L HLA-DPA1*03:01-B1*105:01L HLA-DQA1*05:05-B1*03:01L
YKKVDGVVQQLPET

SEQ ID NO: 11463 - protein, 12 aa, Severe acute respiratory syndrome coronavirus 2
  REGION 1..12: note = Table B: HLA-DQA1*05:01-B1*03:01L HLA-DRB1*04:03L HLA-DRB1*13:02L HLA-DRB1*13:03L HLA-DRB1*01:03L HLA-DRB1*04:02L HLA-DRB1*04:05L HLA-DRB1*01:02L HLA-DRB4*03:01NL HLA-DRB1*08:77L HLA-DRB3*02:01L HLA-DPA1*01:03-B1*03:01L
  REGION 1..12: note = CONT. FROM ABOVE: HLA-DPA1*03:01-B1*04:02L HLA-DRB1*14:01L HLA-D RB1*11:03L HLA-DRB1*08:01L HLA-DQA1*05:05-B1*03:19L HLA-DQA1*05: 01-B1*02:01L HLA-DPA1*01:03-B1*04:01L HLA-DRB1*09:01L HLA-DPA1*0 1:03-B1*04:02L HLA-DRB1*12:01L HLA-DRB1*12:02L
  REGION 1..12: note = CONT. FROM ABOVE: HLA-DPA1*02:01-B1*13:01L HLA-DRB1*14:54L HLA-D QA1*05:05-B1*03:01L HLA-DRB1*14:17L HLA-DPA1*01:02-B1*04:01L HLA -DRB1*07:01L HLA-DRB1*16:01L HLA-DQA1*01:03-B1*06:01L HLA-DRB1*0 4:08L HLA-DRB1*15:03L
LPETYFTQSRNL

SEQ ID NO: 11464 - protein, 12 aa, Severe acute respiratory syndrome coronavirus 2
  REGION 1..12: note = Table B: HLA-DQA1*05:01-B1*03:01L HLA-DRB1*04:03L HLA-DRB1*13:03L HLA-DRB1*01:03L HLA-DRB1*04:02L HLA-DRB1*04:05L HLA-DRB1*01:02L HLA-DRB1*08:04L HLA-DPA1*03:01-B1*04:02L HLA-DRB1*14:01L HLA-DRB1*08:01L HLA-DQA1*01-B1*05L
  REGION 1..12: note = CONT. FROM ABOVE: HLA-DRB1*12:01L HLA-DPA1*02:01-B1*13:01L HLA-D QA1*05:05-B1*03:01L HLA-DRB1*16:01L HLA-DQA1*01:03-B1*06:01L HLA -DRB1*04:08L HLA-DRB1*15:03L
PETYFTQSRNLQ

SEQ ID NO: 11465 - protein, 13 aa, Severe acute respiratory syndrome coronavirus 2
  REGION 1..13: note = Table B: HLA-DQA1*05:01-B1*03:01L HLA-DRB1*13:03L HLA-DRB1*01:03L HLA-DRB1*04:02L HLA-DRB1*04:05L HLA-DQA1*01:02-B1*06:02L HLA-DRB1*01:02L HLA-DRB1*08:04L HLA-DRB1*14:01L HLA-DPA1*02:01-B1*13:01L HLA-DRB1*16:01L
  REGION 1..13: note = CONT. FROM ABOVE: HLA-DRB1*04:08L HLA-DRB1*08:03L HLA-DQA1*02:01 -B1*03:03L HLA-DRB1*15:03L
LQEFKPRSQMEID

SEQ ID NO: 11466 - protein, 13 aa, Severe acute respiratory syndrome coronavirus 2
  REGION 1..13: note = Table B: HLA-DQA1*05:01-B1*03:01L HLA-DRB1*01:03L HLA-DRB1*04:02L HLA-DRB1*04:05L HLA-DRB1*11:03L HLA-DRB1*14:02L HLA-DQA1*05:05-B1*03:116L HLA-DPA1*01:03-B1*04:02L HLA-DRB3*01:01L HLA-DPA1*02:01-B1*13:01L
  REGION 1..13: note = CONT. FROM ABOVE: HLA-DPA1*03:01-B1*105:01L HLA-DRB1*08:02L
DEFIERYKLEGYA

SEQ ID NO: 11467 - protein, 13 aa, Severe acute respiratory syndrome coronavirus 2
  REGION 1..13: note = Table B: HLA-DQA1*05:01-B1*03:01L HLA-DRB1*04:03L HLA-DRB1*13:02L HLA-DRB1*13:03L HLA-DRB1*04:02L HLA-DRB1*04:04L HLA-DRB1*08:04L HLA-DRB1*11:04L HLA-DRB1*11:01L HLA-DPA1*01:03-B1*04:01L HLA-DPA1*01:03-B1*04:02L
  REGION 1..13: note = CONT. FROM ABOVE: HLA-DRB3*01:01L HLA-DPA1*01:03-B1*02:01L HLA-D RB1*08:03L
IERYKLEGYAFEH

SEQ ID NO: 11468 - protein, 10 aa, Severe acute respiratory syndrome coronavirus 2
  REGION 1..10: note = Table B: HLA-DQA1*05:01-B1*03:01L HLA-DRB1*04:05L HLA-DQA1*01:02-B1*06:02L HLA-DPA1*03:01-B1*04:02L HLA-DQA1*01-B1*05L HLA-DQA1*05:05-B1*03:19L HLA-DQA1*05:01-B1*02:01L HLA-DPA1*01:03-B1*04:01L
  REGION 1..10: note = CONT. FROM ABOVE: HLA-DPA1*02:01-B1*13:01L HLA-DPA1*03:01-B1*105 :01L HLA-DPA1*01:02-B1*04:01L HLA-DRB1*16:01L HLA-DQA1*01:03-B1* 06:01L HLA-DQA1*02:01-B1*03:03L HLA-DRB1*15:03L
AFEHIVYGDF

SEQ ID NO: 11469 - protein, 10 aa, Severe acute respiratory syndrome coronavirus 2
  REGION 1..10: note = Table B: HLA-DQA1*05:01-B1*03:01L HLA-DRB1*01:03L HLA-DQA1*01:02-B1*06:02L HLA-DPA1*03:01-B1*105:01L HLA-DQA1*03:01-B1*03:02L HLA-DPA1*01:02-B1*04:01L HLA-DRB1*16:01L HLA-DQA1*01:03-B1*06:01L
  REGION 1..10: note = CONT. FROM ABOVE: HLA-DQA1*02:01-B1*03:03L
FSHSQLGGLH

SEQ ID NO: 11470 - protein, 12 aa, Severe acute respiratory syndrome coronavirus 2
  REGION 1..12: note = Table B: HLA-DQA1*05:01-B1*03:01L HLA-DRB1*01:03L HLA-DQA1*01:02-B1*06:02L HLA-DRB1*01:02L HLA-DQA1*01:01-B1*05:01L HLA-DRB1*04:10L HLA-DRB1*12:01L HLA-DPA1*02:01-B1*13:01L HLA-DPA1*03:01-B1*105:01L
  REGION 1..12: note = CONT. FROM ABOVE: HLA-DRB1*14:54L HLA-DRB1*04:08L HLA-DRB1*15:03 L
LEDFIPMDSTVK

SEQ ID NO: 11471 - protein, 10 aa, Severe acute respiratory syndrome coronavirus 2
  REGION 1..10: note = Table B: HLA-DQA1*05:01-B1*03:01L HLA-DRB1*04:03L HLA-DRB1*13:03L HLA-DRB1*01:03L HLA-DRB1*04:02L HLA-DRB1*04:05L HLA-DRB1*01:02L HLA-DRB4*03:01NL HLA-DQA1*01-B1*05L HLA-DQA1*05:01-B1*02:01L HLA-DRB1*12:01L
  REGION 1..10: note = CONT. FROM ABOVE: HLA-DQA1*03:01-B1*03:02L HLA-DRB1*14:17L HLA-D RB1*16:01L HLA-DQA1*02:01-B1*03:03L HLA-DRB1*15:03L
FIPMDSTVKN

SEQ ID NO: 11472 - protein, 15 aa, Severe acute respiratory syndrome coronavirus 2
  REGION 1..15: note = Table B: HLA-DQA1*05:01-B1*03:01L HLA-DQA1*05:05-B1*03:19L HLA-DQA1*05:05-B1*03:01L
DSTVKNYFITDAQTG

SEQ ID NO: 11473 - protein, 14 aa, Severe acute respiratory syndrome coronavirus 2
  REGION 1..14: note = Table B: HLA-DQA1*05:01-B1*03:01L HLA-DQA1*05:05-B1*03:19L HLA-DPA1*03:01-B1*105:01L HLA-DQA1*05:05-B1*03:01L HLA-DQA1*01:03-B1*06:01L HLA-DQA1*02:01-B1*03:03L
AQTGSSKCVCSVID

SEQ ID NO: 11474 - protein, 13 aa, Severe acute respiratory syndrome coronavirus 2
  REGION 1..13: note = Table B: HLA-DQA1*05:01-B1*03:01L HLA-DRB1*08:01L HLA-DRB3*01:01L HLA-DPA1*01:03-B1*104:01L HLA-DQA1*05:05-B1*03:01L
IDLLLDDFVEIIK

SEQ ID NO: 11475 - protein, 12 aa, Severe acute respiratory syndrome coronavirus 2
  REGION 1..12: note = Table B: HLA-DQA1*05:01-B1*03:01L HLA-DRB1*01:03L HLA-DRB1*04:05L HLA-DQA1*01:02-B1*06:02L HLA-DRB1*08:04L HLA-DPA1*03:01-B1*04:02L HLA-DRB1*08:01L HLA-DQA1*01-B1*05L HLA-DPA1*03:01-B1*105:01L HLA-DRB1*16:01L
  REGION 1..12: note = CONT. FROM ABOVE: HLA-DQA1*01:03-B1*06:01L HLA-DRB1*04:08L
VETFYPKLQSSQ

SEQ ID NO: 11476 - protein, 10 aa, Severe acute respiratory syndrome coronavirus 2
  REGION 1..10: note = Table B: HLA-DQA1*05:01-B1*03:01L HLA-DRB1*13:03L HLA-DQA1*01:02-B1*06:02M HLA-DPA1*03:01-B1*04:02L HLA-DRB1*14:01L HLA-DRB1*14:02L HLA-DQA1*05:01-B1*02:01L HLA-DPA1*02:01-B1*13:01L HLA-DPA1*03:01-B1*105:01M
  REGION 1..10: note = CONT. FROM ABOVE: HLA-DQA1*02:01-B1*03:03L HLA-DRB1*15:03L
YPKLQSSQAW

SEQ ID NO: 11477 - protein, 10 aa, Severe acute respiratory syndrome coronavirus 2
  REGION 1..10: note = Table B: HLA-DQA1*05:01-B1*03:01L HLA-DQA1*01:02-B1*06:02L HLA-DQA1*05:05-B1*03:19L HLA-DQA1*03:01-B1*03:02L HLA-DQA1*05:05-B1*03:01L HLA-DQA1*01:03-B1*06:01L HLA-DQA1*02:01-B1*03:03L
PGVAMPNLYK

SEQ ID NO: 11478 - protein, 14 aa, Severe acute respiratory syndrome coronavirus 2
  REGION 1..14: note = Table B: HLA-DQA1*05:01-B1*03:01L HLA-DRB1*04:03L HLA-DRB1*04:04L HLA-DRB1*01:01L HLA-DRB1*11:02L HLA-DRB1*11:03L HLA-DRB1*14:02L HLA-DQA1*05:05-B1*03:116L HLA-DPA1*01:03-B1*04:02L HLA-DPA1*02:01-B1*13:01L
  REGION 1..14: note = CONT. FROM ABOVE: HLA-DPA1*03:01-B1*105:01L HLA-DQA1*03:01-B1*03 :02L HLA-DPA1*01:03-B1*02:01L HLA-DRB1*07:01L HLA-DRB1*08:02L HL A-DRB1*08:03L HLA-DQA1*02:01-B1*03:03L
MPNLYKMQRMLLEK

SEQ ID NO: 11479 - protein, 15 aa, Severe acute respiratory syndrome coronavirus 2
  REGION 1..15: note = Table B: HLA-DQA1*05:01-B1*03:01L HLA-DRB1*01:02L HLA-DRB1*04:08L HLA-DRB1*15:03L
RMLLEKCDLQNYGDS

SEQ ID NO: 11480 - protein, 12 aa, Severe acute respiratory syndrome coronavirus 2
  REGION 1..12: note = Table B: HLA-DQA1*05:01-B1*03:01L HLA-DQA1*05:05-B1*03:19L HLA-DPA1*03:01-B1*105:01L HLA-DQA1*05:05-B1*03:01L
LPKGIMMNVAKY

SEQ ID NO: 11481 - protein, 14 aa, Severe acute respiratory syndrome coronavirus 2
  REGION 1..14: note = Table B: HLA-DQA1*05:01-B1*03:01L HLA-DRB1*13:02L HLA-DRB1*04:04L HLA-DRB1*14:01L HLA-DRB1*11:01L HLA-DPA1*01:03-B1*02:01L
NVAKYTQLCQYLNT

SEQ ID NO: 11482 - protein, 15 aa, Severe acute respiratory syndrome coronavirus 2
  REGION 1..15: note = Table B: HLA-DQA1*05:01-B1*03:01L HLA-DRB1*13:02L HLA-DRB1*01:01L HLA-DRB1*11:01L HLA-DQA1*01-B1*05L HLA-DPA1*01:03-B1*02:01L HLA-DRB1*08:02L HLA-DRB1*08:03L
VAKYTQLCQYLNTLT

SEQ ID NO: 11483 - protein, 10 aa, Severe acute respiratory syndrome coronavirus 2
  REGION 1..10: note = Table B: HLA-DQA1*05:01-B1*03:01L HLA-DRB1*04:03L HLA-DQA1*01:02-B1*06:02L HLA-DPA1*03:01-B1*105:01L HLA-DQA1*03:01-B1*03:02L HLA-DQA1*05:05-B1*03:01L HLA-DRB1*14:17L HLA-DQA1*01:03-B1*06:01L
  REGION 1..10: note = CONT. FROM ABOVE: HLA-DQA1*02:01-B1*03:03L
LTLAVPYNMR

SEQ ID NO: 11484 - protein, 10 aa, Severe acute respiratory syndrome coronavirus 2
  REGION 1..10: note = Table B: HLA-DQA1*05:01-B1*03:01L HLA-DRB1*13:03L HLA-DRB1*01:03L HLA-DRB1*04:05L HLA-DQA1*01:02-B1*06:02M HLA-DRB1*01:01L HLA-DRB1*01:02L HLA-DPA1*03:01-B1*04:02L HLA-DRB1*14:01L HLA-DRB1*08:01L HLA-DQA1*05:01-B1*02:01L
  REGION 1..10: note = CONT. FROM ABOVE: HLA-DQA1*05:05-B1*03:116L HLA-DPA1*02:01-B1*13 :01M HLA-DPA1*03:01-B1*105:01M HLA-DPA1*01:02-B1*04:01L HLA-DRB1 *16:01L HLA-DQA1*01:03-B1*06:01L HLA-DQA1*02:01-B1*03:03L HLA-DR B1*15:03M
VPYNMRVIHF

SEQ ID NO: 11485 - protein, 12 aa, Severe acute respiratory syndrome coronavirus 2
  REGION 1..12: note = Table B: HLA-DQA1*05:01-B1*03:01L HLA-DRB1*01:03L HLA-DRB4*03:01NL HLA-DQA1*01:01-B1*05:01L HLA-DQA1*05:05-B1*03:19L HLA-DQA1*05:05-B1*03:01L
AGSDKGVAPGTA

SEQ ID NO: 11486 - protein, 11 aa, Severe acute respiratory syndrome coronavirus 2
  REGION 1..11: note = Table B: HLA-DQA1*05:01-B1*03:01L
SDKGVAPGTAV

SEQ ID NO: 11487 - protein, 12 aa, Severe acute respiratory syndrome coronavirus 2
  REGION 1..12: note = Table B: HLA-DQA1*05:01-B1*03:01L HLA-DQA1*05:05-B1*03:19L
DKGVAPGTAVLR

SEQ ID NO: 11488 - protein, 10 aa, Severe acute respiratory syndrome coronavirus 2
  REGION 1..10: note = Table B: HLA-DQA1*05:01-B1*03:01L HLA-DRB1*13:03L HLA-DRB1*01:03L HLA-DQA1*01:02-B1*06:02M HLA-DPA1*01:03-B1*03:01L HLA-DPA1*03:01-B1*04:02L HLA-DRB1*14:01L HLA-DRB1*14:02L HLA-DQA1*05:01-B1*02:01L
  REGION 1..10: note = CONT. FROM ABOVE: HLA-DPA1*01:03-B1*04:01L HLA-DPA1*02:01-B1*13: 01L HLA-DPA1*03:01-B1*105:01M HLA-DQA1*02:01-B1*03:03L HLA-DRB1* 15:03L
APGTAVLRQW

SEQ ID NO: 11489 - protein, 13 aa, Severe acute respiratory syndrome coronavirus 2
  REGION 1..13: note = Table B: HLA-DQA1*05:01-B1*03:01L HLA-DRB1*13:02L HLA-DRB1*01:03L HLA-DRB1*04:04L HLA-DRB1*04:05L HLA-DRB3*02:01L HLA-DPA1*01:03-B1*03:01L HLA-DQA1*05:05-B1*03:19L HLA-DQA1*05:05-B1*03:01L HLA-DRB1*14:17L
  REGION 1..13: note = CONT. FROM ABOVE: HLA-DQA1*01:03-B1*06:01L HLA-DRB1*04:08L
TAVLRQWLPTGTL

SEQ ID NO: 11490 - protein, 12 aa, Severe acute respiratory syndrome coronavirus 2
  REGION 1..12: note = Table B: HLA-DQA1*05:01-B1*03:01L HLA-DRB1*04:03L HLA-DRB1*13:02L HLA-DRB1*01:03L HLA-DRB1*04:02L HLA-DRB1*04:05L HLA-DQA1*01:02-B1*06:02L HLA-DRB1*01:02L HLA-DRB4*03:01NL HLA-DRB1*08:77L HLA-DRB3*02:01L HLA-DPA1*01:03-B1*03:01L
  REGION 1..12: note = CONT. FROM ABOVE: HLA-DPA1*03:01-B1*04:02L HLA-DRB1*14:01L HLA-D RB1*11:03L HLA-DQA1*01-B1*05L HLA-DQA1*05:05-B1*03:19L HLA-DPA1* 01:03-B1*04:01L HLA-DPA1*01:03-B1*04:02L HLA-DRB1*12:01L HLA-DPA 1*03:01-B1*105:01L HLA-DQA1*05:05-B1*03:01L HLA-DRB1*14:17L
  REGION 1..12: note = CONT. FROM ABOVE: HLA-DPA1*01:02-B1*04:01L HLA-DRB1*07:01L HLA-D RB1*16:01L HLA-DRB1*04:08L HLA-DRB1*15:03L
WLPTGTLLVDSD

SEQ ID NO: 11491 - protein, 13 aa, Severe acute respiratory syndrome coronavirus 2
  REGION 1..13: note = Table B: HLA-DQA1*05:01-B1*03:01L HLA-DQA1*01:01-B1*05:01L HLA-DQA1*01-B1*05L HLA-DQA1*05:05-B1*03:19L HLA-DPA1*03:01-B1*105:01L HLA-DQA1*05:05-B1*03:01L HLA-DRB1*16:01L
LPTGTLLVDSDLN

SEQ ID NO: 11492 - protein, 14 aa, Severe acute respiratory syndrome coronavirus 2
  REGION 1..14: note = Table B: HLA-DQA1*05:01-B1*03:01L HLA-DRB1*14:04L HLA-DQA1*01:02-B1*06:02L HLA-DRB1*11:02L HLA-DQA1*01:01-B1*05:01L HLA-DRB1*08:01L HLA-DRB4*02:01NL HLA-DPA1*01:03-B1*104:01L HLA-DPA1*01:02-B1*04:01L
  REGION 1..14: note = CONT. FROM ABOVE: HLA-DQA1*01:03-B1*06:01L HLA-DRB1*08:02L HLA-D RB1*15:01L
LNDFVSDADSTLIG

SEQ ID NO: 11493 - protein, 12 aa, Severe acute respiratory syndrome coronavirus 2
  REGION 1..12: note = Table B: HLA-DQA1*05:01-B1*03:01L HLA-DRB1*04:03L HLA-DPA1*03:01-B1*105:01L HLA-DQA1*03:01-B1*03:02L
IGDCATVHTANK

SEQ ID NO: 11494 - protein, 15 aa, Severe acute respiratory syndrome coronavirus 2
  REGION 1..15: note = Table B: HLA-DQA1*05:01-B1*03:01L HLA-DRB1*13:02L HLA-DRB1*01:03L HLA-DRB1*04:04L HLA-DPA1*03:01-B1*04:02L HLA-DRB1*14:01L HLA-DRB1*08:01L HLA-DQA1*05:05-B1*03:01L HLA-DPA1*01:02-B1*04:01L HLA-DRB1*07:01L
  REGION 1..15: note = CONT. FROM ABOVE: HLA-DQA1*01:03-B1*06:01L
ANKWDLIISDMYDPK

SEQ ID NO: 11495 - protein, 14 aa, Severe acute respiratory syndrome coronavirus 2
  REGION 1..14: note = Table B: HLA-DQA1*05:01-B1*03:01L HLA-DRB1*13:02L HLA-DRB1*01:01L HLA-DPA1*01:03-B1*03:01L HLA-DRB1*03:01L HLA-DRB1*11:03L HLA-DRB1*14:02L HLA-DQA1*01:01-B1*05:01L HLA-DRB1*11:01L HLA-DRB4*01:01L HLA-DPA1*01:03-B1*04:02L
  REGION 1..14: note = CONT. FROM ABOVE: HLA-DRB3*01:01L HLA-DQA1*05:05-B1*03:01L
DLIISDMYDPKTKN

SEQ ID NO: 11496 - protein, 11 aa, Severe acute respiratory syndrome coronavirus 2
  REGION 1..11: note = Table B: HLA-DQA1*05:01-B1*03:01L HLA-DRB1*01:03L HLA-DQA1*01:02-B1*06:02L HLA-DRB1*03:01L HLA-DQA1*05:01-B1*02:01L HLA-DPA1*01:03-B1*04:01L HLA-DRB1*16:01L
VTKENDSKEGF

SEQ ID NO: 11497 - protein, 14 aa, Severe acute respiratory syndrome coronavirus 2
  REGION 1..14: note = Table B: HLA-DQA1*05:01-B1*03:01L HLA-DRB1*04:03L HLA-DRB1*13:02L HLA-DRB1*04:04L HLA-DRB1*04:05L HLA-DRB1*01:01L HLA-DPA1*01:03-B1*03:01L HLA-DPA1*03:01-B1*04:02L HLA-DRB1*14:01L HLA-DRB1*14:02L HLA-DRB1*08:01L HLA-DRB1*11:01L
  REGION 1..14: note = CONT. FROM ABOVE: HLA-DQA1*01-B1*05L HLA-DQA1*05:05-B1*03:19L HL A-DPA1*02:01-B1*13:01L HLA-DQA1*05:05-B1*03:01L HLA-DRB1*10:01L
EGFFTYICGFIQQK

SEQ ID NO: 11498 - protein, 10 aa, Severe acute respiratory syndrome coronavirus 2
  REGION 1..10: note = Table B: HLA-DQA1*05:01-B1*03:01L HLA-DRB1*04:03L HLA-DRB1*04:02L HLA-DRB1*01:02L HLA-DRB4*03:01NL HLA-DRB1*12:01L HLA-DQA1*03:01-B1*03:02L HLA-DQA1*05:05-B1*03:01L HLA-DRB1*14:17L HLA-DQA1*02:01-B1*03:03L
LALGGSVAIK

SEQ ID NO: 11499 - protein, 10 aa, Severe acute respiratory syndrome coronavirus 2
  REGION 1..10: note = Table B: HLA-DQA1*05:01-B1*03:01L HLA-DRB1*08:77L HLA-DPA1*01:03-B1*03:01L HLA-DPA1*03:01-B1*04:02L HLA-DQA1*01-B1*05L HLA-DQA1*05:05-B1*03:19L HLA-DQA1*05:01-B1*02:01L HLA-DRB4*01:01L
  REGION 1..10: note = CONT. FROM ABOVE: HLA-DPA1*01:03-B1*04:01L HLA-DPA1*01:03-B1*104 :01L HLA-DPA1*01:02-B1*04:01L HLA-DRB1*10:01L HLA-DRB1*16:01L
ADLYKLMGHF

SEQ ID NO: 11500 - protein, 11 aa, Severe acute respiratory syndrome coronavirus 2
  REGION 1..11: note = Table B: HLA-DQA1*05:01-B1*03:01L HLA-DQA1*05:05-B1*03:19L HLA-DQA1*05:01-B1*02:01L HLA-DQA1*05:05-B1*03:01L HLA-DRB1*16:01L HLA-DQA1*02:01-B1*03:03L
AWWTAFVTNVN

SEQ ID NO: 11501 - protein, 13 aa, Severe acute respiratory syndrome coronavirus 2
  REGION 1..13: note = Table B: HLA-DQA1*05:01-B1*03:01L HLA-DRB1*01:02L HLA-DRB3*02:01L HLA-DPA1*01:03-B1*03:01L HLA-DRB1*14:02L HLA-DQA1*05:05-B1*03:19L
WTAFVTNVNASSS

SEQ ID NO: 11502 - protein, 11 aa, Severe acute respiratory syndrome coronavirus 2
  REGION 1..11: note = Table B: HLA-DQA1*05:01-B1*03:01L HLA-DRB1*04:01L HLA-DRB1*13:02L HLA-DRB1*13:03L HLA-DRB1*01:03L HLA-DRB1*04:02L HLA-DRB1*04:04L HLA-DRB1*04:05L HLA-DQA1*01:02-B1*06:02L HLA-DRB1*01:01L HLA-DRB1*01:02L HLA-DRB4*03:01NL HLA-DRB1*08:04L
  REGION 1..11: note = CONT. FROM ABOVE: HLA-DRB1*08:77L HLA-DRB3*02:01L HLA-DPA1*01:03 -B1*03:01L HLA-DRB1*14:01L HLA-DRB1*11:03L HLA-DRB1*11:04L HLA-D RB1*14:02L HLA-DRB1*11:01L HLA-DQA1*01-B1*05L HLA-DQA1*05:05-B1* 03:19L HLA-DQA1*05:01-B1*02:01L HLA-DRB1*04:10L HLA-DRB1*12:01L
  REGION 1..11: note = CONT. FROM ABOVE: HLA-DRB1*12:02L HLA-DPA1*03:01-B1*105:01L HLA- DQA1*03:01-B1*03:02L HLA-DQA1*05:05-B1*03:01L HLA-DRB1*10:01L HL A-DRB1*16:01L HLA-DRB1*04:08L HLA-DRB1*08:03L HLA-DQA1*02:01-B1* 03:03L HLA-DRB1*15:03L
FVTNVNASSSE

SEQ ID NO: 11503 - protein, 12 aa, Severe acute respiratory syndrome coronavirus 2
  REGION 1..12: note = Table B: HLA-DQA1*05:01-B1*03:01L HLA-DRB1*04:03L HLA-DQA1*01:02-B1*06:02L HLA-DQA1*01:01-B1*05:01L HLA-DQA1*01-B1*05L HLA-DQA1*05:05-B1*03:19L HLA-DRB1*12:01L HLA-DPA1*03:01-B1*105:01L HLA-DQA1*05:05-B1*03:01L
  REGION 1..12: note = CONT. FROM ABOVE: HLA-DRB1*16:01L
VNASSSEAFLIG

SEQ ID NO: 11504 - protein, 14 aa, Severe acute respiratory syndrome coronavirus 2
  REGION 1..14: note = Table B: HLA-DQA1*05:01-B1*03:01L HLA-DRB1*04:01L HLA-DRB1*13:02L HLA-DRB1*04:02L HLA-DRB1*04:04L HLA-DRB1*04:05L HLA-DRB1*01:01L HLA-DRB1*08:04L HLA-DRB1*14:01L HLA-DRB1*11:04L HLA-DRB1*11:01L HLA-DRB1*12:01L HLA-DRB3*01:01L
  REGION 1..14: note = CONT. FROM ABOVE: HLA-DQA1*03:01-B1*03:02L HLA-DPA1*01:03-B1*02: 01L HLA-DQA1*05:05-B1*03:01L HLA-DRB1*14:17L HLA-DRB1*10:01L HLA -DQA1*01:03-B1*06:01L HLA-DQA1*02:01-B1*03:03L
EAFLIGCNYLGKPR

SEQ ID NO: 11505 - protein, 11 aa, Severe acute respiratory syndrome coronavirus 2
  REGION 1..11: note = Table B: HLA-DQA1*05:01-B1*03:01L HLA-DRB1*04:03L HLA-DRB1*13:03L HLA-DRB1*01:03L HLA-DRB1*04:02L HLA-DRB1*01:02L HLA-DRB1*14:01L HLA-DRB1*08:01L HLA-DQA1*05:05-B1*03:01L HLA-DRB1*14:17L HLA-DRB1*16:01L HLA-DRB1*04:08L
YLGKPREQIDG

SEQ ID NO: 11506 - protein, 15 aa, Severe acute respiratory syndrome coronavirus 2
  REGION 1..15: note = Table B: HLA-DQA1*05:01-B1*03:01L HLA-DRB1*13:02L HLA-DPA1*01:03-B1*03:01L HLA-DRB1*04:08L
GKPREQIDGYVMHAN

SEQ ID NO: 11507 - protein, 10 aa, Severe acute respiratory syndrome coronavirus 2
  REGION 1..10: note = Table B: HLA-DQA1*05:01-B1*03:01L HLA-DPA1*01:03-B1*03:01L HLA-DRB1*03:01L HLA-DQA1*01-B1*05L HLA-DQA1*05:05-B1*03:19L HLA-DQA1*05:01-B1*02:01L HLA-DPA1*01:03-B1*104:01L HLA-DRB1*16:01L HLA-DQA1*02:01-B1*03:03L
IDGYVMHANY

SEQ ID NO: 11508 - protein, 11 aa, Severe acute respiratory syndrome coronavirus 2
  REGION 1..11: note = Table B: HLA-DQA1*05:01-B1*03:01L HLA-DPA1*03:01-B1*04:02L HLA-DRB1*14:01L HLA-DQA1*05:01-B1*02:01L HLA-DRB1*12:01L HLA-DPA1*03:01-B1*105:01L HLA-DPA1*01:02-B1*04:01L
DGYVMHANYIF

SEQ ID NO: 11509 - protein, 10 aa, Severe acute respiratory syndrome coronavirus 2
  REGION 1..10: note = Table B: HLA-DQA1*05:01-B1*03:01L HLA-DRB1*13:03L HLA-DRB1*04:05L HLA-DQA1*01:02-B1*06:02L HLA-DRB1*01:02L HLA-DPA1*01:03-B1*03:01L HLA-DPA1*03:01-B1*04:02L HLA-DRB1*14:01L HLA-DRB1*08:01L HLA-DRB5*01:01L
  REGION 1..10: note = CONT. FROM ABOVE: HLA-DQA1*01-B1*05L HLA-DQA1*05:01-B1*02:01L HL A-DQA1*05:05-B1*03:116L HLA-DPA1*02:01-B1*13:01L HLA-DPA1*03:01- B1*105:01L HLA-DQA1*03:01-B1*03:02L HLA-DPA1*01:02-B1*04:01L HLA -DRB1*16:01L HLA-DQA1*02:01-B1*03:03L HLA-DRB1*15:03L
FPLKLRGTAV

SEQ ID NO: 11510 - protein, 10 aa, Severe acute respiratory syndrome coronavirus 2
  REGION 1..10: note = Table B: HLA-DQA1*05:01-B1*03:01L HLA-DQA1*01:02-B1*06:02L HLA-DPA1*03:01-B1*105:01L HLA-DPA1*01:02-B1*04:01L HLA-DQA1*01:03-B1*06:01L HLA-DQA1*02:01-B1*03:03L
LRGTAVMSLK

SEQ ID NO: 11511 - protein, 13 aa, Severe acute respiratory syndrome coronavirus 2
  REGION 1..13: note = Table B: HLA-DQA1*05:01-B1*03:01L HLA-DRB1*01:03L HLA-DRB1*04:02L HLA-DRB1*04:05L HLA-DRB1*01:02L HLA-DRB1*12:01L HLA-DPA1*01:02-B1*04:01L HLA-DRB1*16:01L HLA-DRB1*04:08L
INDMILSLLSKGR

SEQ ID NO: 11512 - protein, 12 aa, Severe acute respiratory syndrome coronavirus 2
  REGION 1..12: note = Table B: HLA-DQA1*05:01-B1*03:01L HLA-DRB1*13:02L HLA-DRB1*01:03L HLA-DRB1*04:02L HLA-DRB1*04:05L HLA-DRB1*01:02L HLA-DRB3*02:01L HLA-DPA1*03:01-B1*04:02L HLA-DQA1*05:01-B1*02:01L HLA-DRB1*12:01L
  REGION 1..12: note = CONT. FROM ABOVE: HLA-DPA1*03:01-B1*105:01L HLA-DRB1*14:54L HLA- DQA1*05:05-B1*03:01L HLA-DPA1*01:02-B1*04:01L HLA-DRB1*16:01L HL A-DRB1*04:08L
DMILSLLSKGRL

SEQ ID NO: 11513 - protein, 12 aa, Severe acute respiratory syndrome coronavirus 2
  REGION 1..12: note = Table B: HLA-DQA1*05:01-B1*03:01L HLA-DRB1*04:05L HLA-DQA1*01:02-B1*06:02L HLA-DRB4*03:01NL HLA-DRB3*02:01L HLA-DPA1*01:03-B1*03:01L HLA-DPA1*03:01-B1*04:02L HLA-DRB1*03:01L HLA-DRB1*11:03L HLA-DRB1*14:02L HLA-DRB1*08:01L
  REGION 1..12: note = CONT. FROM ABOVE: HLA-DRB1*11:01L HLA-DQA1*05:01-B1*02:01L HLA-D PA1*03:01-B1*105:01L HLA-DQA1*02:01-B1*03:03L
LIIRENNRVVIS

SEQ ID NO: 11514 - protein, 13 aa, Severe acute respiratory syndrome coronavirus 2
  REGION 1..13: note = Table B: HLA-DQA1*05:01-B1*03:01L HLA-DRB1*04:05L HLA-DQA1*01:02-B1*06:02L HLA-DRB1*08:77L HLA-DRB3*02:01L HLA-DPA1*01:03-B1*03:01L HLA-DRB1*03:01L HLA-DRB1*11:03L HLA-DRB1*14:02L HLA-DRB1*11:01L HLA-DQA1*05:05-B1*03:19L
  REGION 1..13: note = CONT. FROM ABOVE: HLA-DQA1*05:01-B1*02:01L HLA-DQA1*03:01-B1*03: 02L HLA-DQA1*02:01-B1*03:03L
IIRENNRVVISSD

SEQ ID NO: 11515 - protein, 12 aa, Severe acute respiratory syndrome coronavirus 2
  REGION 1..12: note = Table B: HLA-DQA1*05:01-B1*03:01L HLA-DRB1*13:02L HLA-DRB1*04:04L HLA-DRB1*04:05L HLA-DRB1*01:02L HLA-DRB4*03:01NL HLA-DQA1*01-B1*05L HLA-DRB1*04:10L HLA-DRB1*12:02L HLA-DQA1*02:01-B1*03:03L HLA-DRB1*15:03L
NRVVISSDVLVN

SEQ ID NO: 11516 - protein, 13 aa, Severe acute respiratory syndrome coronavirus 2
  REGION 1..13: note = Table B: HLA-DQA1*05:01-B1*03:01L HLA-DRB1*04:02L HLA-DRB1*04:04L HLA-DPA1*01:03-B1*03:01L HLA-DQA1*02:01-B1*03:03L
LVLLPLVSSQCVN

SEQ ID NO: 11517 - protein, 12 aa, Severe acute respiratory syndrome coronavirus 2
  REGION 1..12: note = Table B: HLA-DQA1*05:01-B1*03:01L HLA-DRB1*13:02L HLA-DRB1*13:03L HLA-DRB1*01:03L HLA-DRB4*03:01NL HLA-DRB1*08:04L HLA-DRB1*08:01L HLA-DRB1*12:01L HLA-DQA1*03:01-B1*03:02L HLA-DRB1*16:01L HLA-DQA1*02:01-B1*03:03L
VNLTTRTQLPPA

SEQ ID NO: 11518 - protein, 12 aa, Severe acute respiratory syndrome coronavirus 2
  REGION 1..12: note = Table B: HLA-DQA1*05:01-B1*03:01L HLA-DQA1*01:02-B1*06:02L HLA-DRB1*14:01L HLA-DQA1*01:03-B1*06:01L
TNSFTRGVYYPD

SEQ ID NO: 11519 - protein, 10 aa, Severe acute respiratory syndrome coronavirus 2
  REGION 1..10: note = Table B: HLA-DQA1*05:01-B1*03:01L HLA-DRB1*01:03L HLA-DRB1*04:02L HLA-DQA1*01:02-B1*06:02L HLA-DQA1*03:01-B1*03:02L HLA-DPA1*01:02-B1*04:01L HLA-DRB1*16:01L HLA-DQA1*01:03-B1*06:01L
  REGION 1..10: note = CONT. FROM ABOVE: HLA-DQA1*02:01-B1*03:03L
FTRGVYYPDK

SEQ ID NO: 11520 - protein, 10 aa, Severe acute respiratory syndrome coronavirus 2
  REGION 1..10: note = Table B: HLA-DQA1*05:01-B1*03:01L HLA-DRB1*13:03L HLA-DQA1*01:02-B1*06:02L HLA-DQA1*01-B1*05L HLA-DQA1*05:05-B1*03:116L HLA-DPA1*02:01-B1*13:01L HLA-DPA1*03:01-B1*105:01L HLA-DPA1*01:02-B1*04:01L
  REGION 1..10: note = CONT. FROM ABOVE: HLA-DRB1*16:01L
YPDKVFRSSV

SEQ ID NO: 11521 - protein, 11 aa, Severe acute respiratory syndrome coronavirus 2
  REGION 1..11: note = Table B: HLA-DQA1*05:01-B1*03:01L HLA-DRB1*01:03L HLA-DQA1*05:05-B1*03:01L HLA-DPA1*01:02-B1*04:01L HLA-DRB1*04:08L
VFRSSVLHSTQ

SEQ ID NO: 11522 - protein, 11 aa, Severe acute respiratory syndrome coronavirus 2
  REGION 1..11: note = Table B: HLA-DQA1*05:01-B1*03:01L HLA-DQA1*05:05-B1*03:19L HLA-DQA1*05:05-B1*03:01L HLA-DPA1*01:02-B1*04:01L
FRSSVLHSTQD

SEQ ID NO: 11523 - protein, 13 aa, Severe acute respiratory syndrome coronavirus 2
  REGION 1..13: note = Table B: HLA-DQA1*05:01-B1*03:01L HLA-DRB1*04:03L HLA-DRB1*13:02L HLA-DRB1*01:03L HLA-DRB1*04:02L HLA-DRB1*04:05L HLA-DRB3*02:01L HLA-DRB1*14:01L HLA-DQA1*05:01-B1*02:01L HLA-DPA1*02:01-B1*13:01L HLA-DRB1*04:08L HLA-DRB1*15:01L
FSNVTWFHAIHVS

SEQ ID NO: 11524 - protein, 12 aa, Severe acute respiratory syndrome coronavirus 2
  REGION 1..12: note = Table B: HLA-DQA1*05:01-B1*03:01L HLA-DRB1*13:02L HLA-DQA1*01:02-B1*06:02L HLA-DRB1*08:01L HLA-DRB1*15:01L
NVTWFHAIHVSG

SEQ ID NO: 11525 - protein, 11 aa, Severe acute respiratory syndrome coronavirus 2
  REGION 1..11: note = Table B: HLA-DQA1*05:01-B1*03:01L HLA-DQA1*05:05-B1*03:19L HLA-DQA1*03:01-B1*03:02L HLA-DQA1*05:05-B1*03:01L HLA-DQA1*01:03-B1*06:01L
WFHAIHVSGTN

SEQ ID NO: 11526 - protein, 12 aa, Severe acute respiratory syndrome coronavirus 2
  REGION 1..12: note = Table B: HLA-DQA1*05:01-B1*03:01L HLA-DRB1*04:04L HLA-DQA1*01:02-B1*06:02L HLA-DRB1*01:02L HLA-DRB1*14:01L HLA-DRB1*11:04L HLA-DRB1*08:01L HLA-DRB1*04:10L HLA-DRB1*14:54L HLA-DRB1*10:01L HLA-DRB1*04:08L HLA-DRB1*08:03L HLA-DRB1*15:03L
HAIHVSGTNGTK

SEQ ID NO: 11527 - protein, 12 aa, Severe acute respiratory syndrome coronavirus 2
  REGION 1..12: note = Table B: HLA-DQA1*05:01-B1*03:01L HLA-DRB1*04:04L HLA-DQA1*01:02-B1*06:02L HLA-DRB1*01:02L HLA-DRB1*04:08L
AIHVSGTNGTKR

SEQ ID NO: 11528 - protein, 10 aa, Severe acute respiratory syndrome coronavirus 2
  REGION 1..10: note = Table B: HLA-DQA1*05:01-B1*03:01L HLA-DRB1*04:01L HLA-DRB1*13:02L HLA-DRB1*13:03L HLA-DRB1*01:03L HLA-DRB1*04:02L HLA-DRB1*01:01L HLA-DRB4*03:01NL HLA-DRB3*02:01L HLA-DRB1*14:01L HLA-DRB1*11:04L HLA-DRB1*14:02L HLA-DRB1*08:01L HLA-DRB5*01:01L
  REGION 1..10: note = CONT. FROM ABOVE: HLA-DPA1*01:03-B1*04:02L HLA-DRB1*12:01L HLA-D RB1*12:02L HLA-DQA1*03:01-B1*03:02M HLA-DQA1*05:05-B1*03:01L HLA -DRB1*14:17L HLA-DRB1*16:01L HLA-DQA1*01:03-B1*06:01L HLA-DQA1*0 2:01-B1*03:03L HLA-DRB1*15:01L
ASTEKSNIIR

SEQ ID NO: 11529 - protein, 14 aa, Severe acute respiratory syndrome coronavirus 2
  REGION 1..14: note = Table B: HLA-DQA1*05:01-B1*03:01L HLA-DRB1*01:03L HLA-DRB1*01:02L HLA-DPA1*01:03-B1*03:01L HLA-DQA1*05:05-B1*03:19L HLA-DPA1*01:03-B1*04:01L HLA-DPA1*02:01-B1*13:01L HLA-DRB1*16:01L HLA-DRB1*04:08L
NIIRGWIFGTTLDS

SEQ ID NO: 11530 - protein, 10 aa, Severe acute respiratory syndrome coronavirus 2
  REGION 1..10: note = Table B: HLA-DQA1*05:01-B1*03:01L HLA-DRB1*04:03L HLA-DRB1*13:02L HLA-DRB1*13:03L HLA-DRB1*04:02L HLA-DQA1*01:02-B1*06:02L HLA-DRB4*03:01NL HLA-DRB1*12:01L HLA-DPA1*03:01-B1*105:01L HLA-DQA1*03:01-B1*03:02L
  REGION 1..10: note = CONT. FROM ABOVE: HLA-DQA1*05:05-B1*03:01L HLA-DRB1*14:17L HLA-D RB1*16:01L HLA-DQA1*01:03-B1*06:01L HLA-DQA1*02:01-B1*03:03L
WIFGTTLDSK

SEQ ID NO: 11531 - protein, 13 aa, Severe acute respiratory syndrome coronavirus 2
  REGION 1..13: note = Table B: HLA-DQA1*05:01-B1*03:01L
NATNVVIKVCEFQ

SEQ ID NO: 11532 - protein, 15 aa, Severe acute respiratory syndrome coronavirus 2
  REGION 1..15: note = Table B: HLA-DQA1*05:01-B1*03:01L HLA-DRB1*04:03L HLA-DRB1*13:02L HLA-DPA1*01:03-B1*03:01L HLA-DRB1*08:01L HLA-DQA1*01-B1*05L HLA-DQA1*05:05-B1*03:19L HLA-DQA1*05:01-B1*02:01L HLA-DPA1*02:01-B1*13:01L
  REGION 1..15: note = CONT. FROM ABOVE: HLA-DPA1*01:03-B1*104:01L HLA-DQA1*05:05-B1*03 :01L HLA-DQA1*02:01-B1*03:03L
VVIKVCEFQFCNDPF

SEQ ID NO: 11533 - protein, 12 aa, Severe acute respiratory syndrome coronavirus 2
  REGION 1..12: note = Table B: HLA-DQA1*05:01-B1*03:01L HLA-DRB1*04:05L HLA-DQA1*01:02-B1*06:02L HLA-DRB1*01:02L HLA-DPA1*01:03-B1*03:01L HLA-DRB1*12:01L HLA-DPA1*01:03-B1*02:01L HLA-DQA1*02:01-B1*03:03L
  REGION 1..12: note = CONT. FROM ABOVE: HLA-DRB1*15:03L
NDPFLGVYYHKN

SEQ ID NO: 11534 - protein, 12 aa, Severe acute respiratory syndrome coronavirus 2
  REGION 1..12: note = Table B: HLA-DQA1*05:01-B1*03:01L HLA-DRB1*04:03L HLA-DRB1*13:02L HLA-DRB1*13:03L HLA-DRB1*04:04L HLA-DRB1*04:05L HLA-DQA1*01:02-B1*06:02L HLA-DRB1*01:02L HLA-DRB1*08:04L HLA-DPA1*01:03-B1*03:01L HLA-DRB1*14:01L HLA-DRB1*11:04L
  REGION 1..12: note = CONT. FROM ABOVE: HLA-DRB1*11:01L HLA-DQA1*01-B1*05L HLA-DRB1*12 :01L HLA-DRB3*01:01L HLA-DPA1*02:01-B1*13:01L HLA-DPA1*01:03-B1* 02:01L HLA-DQA1*02:01-B1*03:03L HLA-DRB1*15:03L
DPFLGVYYHKNN

SEQ ID NO: 11535 - protein, 10 aa, Severe acute respiratory syndrome coronavirus 2
  REGION 1..10: note = Table B: HLA-DQA1*05:01-B1*03:01L HLA-DRB1*04:03L HLA-DRB1*01:03M HLA-DRB1*04:05M HLA-DQA1*01:02-B1*06:02L HLA-DRB1*01:01L HLA-DRB1*01:02L HLA-DRB1*08:77L HLA-DPA1*03:01-B1*04:02L HLA-DRB1*11:03L HLA-DRB1*14:02L
  REGION 1..10: note = CONT. FROM ABOVE: HLA-DQA1*01:01-B1*05:01L HLA-DRB1*11:01L HLA-D QA1*05:05-B1*03:19L HLA-DQA1*05:01-B1*02:01L HLA-DRB4*01:01L HLA -DPA1*01:03-B1*04:01L HLA-DQA1*05:05-B1*03:116L HLA-DPA1*01:03-B 1*04:02L HLA-DRB1*12:01L HLA-DPA1*02:01-B1*13:01M
  REGION 1..10: note = CONT. FROM ABOVE: HLA-DPA1*03:01-B1*105:01L HLA-DPA1*01:02-B1*04 :01L HLA-DRB1*16:01L HLA-DQA1*01:03-B1*06:01M HLA-DQA1*02:01-B1* 03:03L HLA-DRB1*15:03L
VYYHKNNKSW

SEQ ID NO: 11536 - protein, 13 aa, Severe acute respiratory syndrome coronavirus 2
  REGION 1..13: note = Table B: HLA-DQA1*05:01-B1*03:01L HLA-DRB1*04:03L HLA-DRB1*04:05L HLA-DRB1*11:01L HLA-DQA1*05:05-B1*03:01L
FEYVSQPFLMDLE

SEQ ID NO: 11537 - protein, 12 aa, Severe acute respiratory syndrome coronavirus 2
  REGION 1..12: note = Table B: HLA-DQA1*05:01-B1*03:01L HLA-DRB1*04:03L HLA-DRB1*13:02L HLA-DRB1*13:03L HLA-DRB1*04:02L HLA-DRB1*04:04L HLA-DRB1*04:05L HLA-DRB1*08:04L HLA-DRB1*14:01L HLA-DRB1*11:04L HLA-DRB1*08:01L HLA-DRB1*11:01L HLA-DRB3*01:01L
  REGION 1..12: note = CONT. FROM ABOVE: HLA-DPA1*01:03-B1*02:01L HLA-DQA1*05:05-B1*03: 01L HLA-DRB1*14:17L HLA-DRB1*10:01L HLA-DRB1*08:03L
YVSQPFLMDLEG

SEQ ID NO: 11538 - protein, 14 aa, Severe acute respiratory syndrome coronavirus 2
  REGION 1..14: note = Table B: HLA-DQA1*05:01-B1*03:01L HLA-DRB1*01:01L HLA-DQA1*05:05-B1*03:19L HLA-DRB1*13:01L HLA-DPA1*01:03-B1*04:01L HLA-DPA1*01:03-B1*04:02L HLA-DQA1*05:05-B1*03:01L HLA-DRB1*07:01L
VSQPFLMDLEGKQG

SEQ ID NO: 11539 - protein, 10 aa, Severe acute respiratory syndrome coronavirus 2
  REGION 1..10: note = Table B: HLA-DQA1*05:01-B1*03:01L HLA-DRB1*08:77L HLA-DPA1*03:01-B1*04:02L HLA-DQA1*01-B1*05L HLA-DQA1*05:05-B1*03:19L HLA-DQA1*05:01-B1*02:01L HLA-DRB4*01:01L HLA-DPA1*01:03-B1*04:01L
  REGION 1..10: note = CONT. FROM ABOVE: HLA-DPA1*01:02-B1*04:01L HLA-DRB1*10:01L HLA-D RB1*16:01L HLA-DRB1*15:03L
MDLEGKQGNF

SEQ ID NO: 11540 - protein, 12 aa, Severe acute respiratory syndrome coronavirus 2
  REGION 1..12: note = Table B: HLA-DQA1*05:01-B1*03:01L HLA-DRB1*13:02L HLA-DRB1*01:03L HLA-DQA1*01:02-B1*06:02L HLA-DRB1*14:01L HLA-DRB1*08:01L HLA-DRB3*01:01L HLA-DPA1*01:02-B1*04:01L HLA-DRB1*07:01L HLA-DRB1*16:01L HLA-DRB1*04:08L
  REGION 1..12: note = CONT. FROM ABOVE: HLA-DQA1*02:01-B1*03:03L
GNFKNLREFVFK

SEQ ID NO: 11541 - protein, 13 aa, Severe acute respiratory syndrome coronavirus 2
  REGION 1..13: note = Table B: HLA-DQA1*05:01-B1*03:01L HLA-DRB1*04:03L HLA-DRB1*13:02L HLA-DRB1*04:02L HLA-DPA1*03:01-B1*04:02L HLA-DRB1*11:04L HLA-DRB3*01:01L HLA-DPA1*02:01-B1*13:01L HLA-DPA1*03:01-B1*105:01L HLA-DQA1*01:03-B1*06:01L
  REGION 1..13: note = CONT. FROM ABOVE: HLA-DRB1*08:03L
IDGYFKIYSKHTP

SEQ ID NO: 11542 - protein, 11 aa, Severe acute respiratory syndrome coronavirus 2
  REGION 1..11: note = Table B: HLA-DQA1*05:01-B1*03:01L HLA-DRB1*04:03L HLA-DRB1*13:03L HLA-DRB1*04:02L HLA-DRB1*04:05L HLA-DQA1*01:02-B1*06:02L HLA-DRB1*01:02L HLA-DRB1*08:04L HLA-DRB1*11:04L HLA-DRB1*11:01L HLA-DRB1*12:01L HLA-DRB1*14:54L
  REGION 1..11: note = CONT. FROM ABOVE: HLA-DRB1*14:17L HLA-DPA1*01:02-B1*04:01L HLA-D RB1*04:08L HLA-DRB1*08:03L
FKIYSKHTPIN

SEQ ID NO: 11543 - protein, 12 aa, Severe acute respiratory syndrome coronavirus 2
  REGION 1..12: note = Table B: HLA-DQA1*05:01-B1*03:01L HLA-DRB1*14:04L HLA-DRB1*13:02L HLA-DRB1*01:01L HLA-DRB1*08:77L HLA-DRB3*02:01L HLA-DPA1*01:03-B1*03:01L HLA-DPA1*03:01-B1*04:02L HLA-DRB1*11:03L HLA-DRB1*14:02L HLA-DQA1*01:01-B1*05:01L
  REGION 1..12: note = CONT. FROM ABOVE: HLA-DRB1*11:01L HLA-DRB5*01:01L HLA-DQA1*05:05 -B1*03:19L HLA-DRB4*01:01L HLA-DRB1*09:01L HLA-DRB3*01:01L HLA-D PA1*02:01-B1*13:01L HLA-DPA1*03:01-B1*105:01L HLA-DPA1*01:03-B1* 104:01L HLA-DQA1*05:05-B1*03:01L HLA-DRB1*07:01L
  REGION 1..12: note = CONT. FROM ABOVE: HLA-DQA1*01:03-B1*06:01L HLA-DRB1*08:02L HLA-D RB1*15:01L
TPINLVRDLPQG

SEQ ID NO: 11544 - protein, 13 aa, Severe acute respiratory syndrome coronavirus 2
  REGION 1..13: note = Table B: HLA-DQA1*05:01-B1*03:01L HLA-DRB1*04:03L HLA-DRB1*13:02L HLA-DRB1*13:03L HLA-DRB1*01:03L HLA-DRB1*04:02L HLA-DRB1*04:05L HLA-DRB1*01:02L HLA-DRB4*03:01NL HLA-DRB1*08:04L HLA-DRB3*02:01L HLA-DPA1*01:03-B1*03:01L
  REGION 1..13: note = CONT. FROM ABOVE: HLA-DPA1*03:01-B1*04:02L HLA-DRB1*14:01L HLA-D RB1*14:02L HLA-DQA1*01:01-B1*05:01L HLA-DRB1*08:01L HLA-DQA1*01- B1*05L HLA-DQA1*05:01-B1*02:01L HLA-DPA1*01:03-B1*04:01L HLA-DRB 1*04:10L HLA-DRB1*09:01L HLA-DPA1*01:03-B1*04:02L
  REGION 1..13: note = CONT. FROM ABOVE: HLA-DRB1*12:01L HLA-DRB1*12:02L HLA-DPA1*02:01 -B1*13:01L HLA-DPA1*03:01-B1*105:01L HLA-DRB1*14:54L HLA-DPA1*01 :03-B1*104:01L HLA-DRB1*14:17L HLA-DPA1*01:02-B1*04:01L HLA-DRB1 *10:01L HLA-DRB1*16:01L HLA-DRB1*04:08L HLA-DRB1*08:03L
  REGION 1..13: note = CONT. FROM ABOVE: HLA-DRB1*15:03L
LPQGFSALEPLVD

SEQ ID NO: 11545 - protein, 11 aa, Severe acute respiratory syndrome coronavirus 2
  REGION 1..11: note = Table B: HLA-DQA1*05:01-B1*03:01L HLA-DRB1*13:02L HLA-DRB1*01:03L HLA-DRB1*04:04L HLA-DQA1*01:02-B1*06:02L HLA-DRB1*01:02L HLA-DRB1*08:77L HLA-DRB3*02:01L HLA-DPA1*03:01-B1*04:02L HLA-DRB1*14:01L HLA-DRB1*11:03L
  REGION 1..11: note = CONT. FROM ABOVE: HLA-DRB1*12:02L HLA-DPA1*02:01-B1*13:01L HLA-D RB1*10:01L HLA-DQA1*01:03-B1*06:01L HLA-DRB1*04:08L
ALEPLVDLPIG

SEQ ID NO: 11546 - protein, 14 aa, Severe acute respiratory syndrome coronavirus 2
  REGION 1..14: note = Table B: HLA-DQA1*05:01-B1*03:01L HLA-DRB1*01:03L HLA-DRB1*04:05L HLA-DRB1*01:02L HLA-DPA1*01:03-B1*03:01L HLA-DRB1*14:01L HLA-DQA1*01:01-B1*05:01L HLA-DPA1*02:01-B1*13:01L HLA-DPA1*01:02-B1*04:01L
  REGION 1..14: note = CONT. FROM ABOVE: HLA-DRB1*16:01L HLA-DRB1*04:08L
EPLVDLPIGINITR

SEQ ID NO: 11547 - protein, 13 aa, Severe acute respiratory syndrome coronavirus 2
  REGION 1..13: note = Table B: HLA-DQA1*05:01-B1*03:01L HLA-DRB1*13:02L HLA-DRB1*08:04L HLA-DRB1*14:01L HLA-DRB1*11:04L HLA-DRB1*08:01L HLA-DRB1*11:01L HLA-DRB3*01:01L HLA-DPA1*01:03-B1*02:01L HLA-DPA1*01:03-B1*104:01L
INITRFQTLLALH

SEQ ID NO: 11548 - protein, 12 aa, Severe acute respiratory syndrome coronavirus 2
  REGION 1..12: note = Table B: HLA-DQA1*05:01-B1*03:01L HLA-DRB1*04:01L HLA-DRB1*13:02L HLA-DRB1*13:03L HLA-DRB1*01:01L HLA-DRB1*14:01L HLA-DRB1*11:04L HLA-DRB1*11:01L HLA-DRB3*01:01L HLA-DPA1*02:01-B1*13:01L HLA-DPA1*01:03-B1*104:01L
  REGION 1..12: note = CONT. FROM ABOVE: HLA-DRB1*07:01L HLA-DQA1*01:03-B1*06:01L
ITRFQTLLALHR

SEQ ID NO: 11549 - protein, 10 aa, Severe acute respiratory syndrome coronavirus 2
  REGION 1..10: note = Table B: HLA-DQA1*05:01-B1*03:01L HLA-DQA1*01:02-B1*06:02L HLA-DQA1*05:05-B1*03:19L HLA-DQA1*05:01-B1*02:01L HLA-DQA1*02:01-B1*03:03L
QTLLALHRSY

SEQ ID NO: 11550 - protein, 14 aa, Severe acute respiratory syndrome coronavirus 2
  REGION 1..14: note = Table B: HLA-DQA1*05:01-B1*03:01L HLA-DRB1*13:02L HLA-DRB1*01:03L HLA-DRB1*04:04L HLA-DQA1*01:02-B1*06:02L HLA-DRB1*01:02L HLA-DPA1*01:03-B1*03:01L HLA-DQA1*01:01-B1*05:01L HLA-DRB1*08:01L
  REGION 1..14: note = CONT. FROM ABOVE: HLA-DQA1*05:05-B1*03:19L HLA-DRB3*01:01L HLA-D PA1*03:01-B1*105:01L HLA-DPA1*01:03-B1*104:01L HLA-DQA1*05:05-B1 *03:01L HLA-DRB1*07:01L HLA-DQA1*01:03-B1*06:01L HLA-DRB1*15:03L
LHRSYLTPGDSSSG

SEQ ID NO: 11551 - protein, 11 aa, Severe acute respiratory syndrome coronavirus 2
  REGION 1..11: note = Table B: HLA-DQA1*05:01-B1*03:01L HLA-DRB1*08:77L HLA-DRB1*14:02L HLA-DQA1*05:05-B1*03:19L HLA-DQA1*05:01-B1*02:01L HLA-DRB4*01:01L HLA-DPA1*01:03-B1*04:01L HLA-DPA1*02:01-B1*13:01L
  REGION 1..11: note = CONT. FROM ABOVE: HLA-DQA1*02:01-B1*03:03L HLA-DRB1*15:03L
YLTPGDSSSGW

SEQ ID NO: 11552 - protein, 14 aa, Severe acute respiratory syndrome coronavirus 2
  REGION 1..14: note = Table B: HLA-DQA1*05:01-B1*03:01L HLA-DRB1*01:02L HLA-DRB1*08:01L HLA-DPA1*03:01-B1*105:01L HLA-DRB1*04:08L HLA-DRB1*15:01L
AGAAAYYVGYLQPR

SEQ ID NO: 11553 - protein, 12 aa, Severe acute respiratory syndrome coronavirus 2
  REGION 1..12: note = Table B: HLA-DQA1*05:01-B1*03:01L HLA-DRB1*04:03L HLA-DRB1*13:02L HLA-DRB1*13:03L HLA-DRB1*01:03L HLA-DRB1*04:02L HLA-DRB1*04:04L HLA-DRB1*04:05L HLA-DRB1*01:02L HLA-DRB4*03:01NL HLA-DRB1*08:04L HLA-DRB1*08:77L HLA-DRB3*02:01L
  REGION 1..12: note = CONT. FROM ABOVE: HLA-DPA1*01:03-B1*03:01L HLA-DPA1*03:01-B1*04: 02L HLA-DRB1*14:01L HLA-DRB1*11:04L HLA-DRB1*14:02L HLA-DQA1*01: 01-B1*05:01L HLA-DRB1*08:01L HLA-DQA1*01-B1*05L HLA-DRB4*01:01L HLA-DPA1*01:03-B1*04:01L HLA-DQA1*05:05-B1*03:116L
  REGION 1..12: note = CONT. FROM ABOVE: HLA-DRB1*04:10L HLA-DRB1*09:01L HLA-DPA1*01:03 -B1*04:02L HLA-DRB1*12:01L HLA-DPA1*02:01-B1*13:01L HLA-DPA1*03: 01-B1*105:01L HLA-DRB1*14:54L HLA-DQA1*05:05-B1*03:01M HLA-DRB1* 14:17L HLA-DPA1*01:02-B1*04:01L HLA-DRB1*07:01L HLA-DRB1*10:01L
  REGION 1..12: note = CONT. FROM ABOVE: HLA-DRB1*16:01L HLA-DRB1*04:08L HLA-DRB1*15:03 L
YNENGTITDAVD

SEQ ID NO: 11554 - protein, 15 aa, Severe acute respiratory syndrome coronavirus 2
  REGION 1..15: note = Table B: HLA-DQA1*05:01-B1*03:01L HLA-DRB1*01:03L HLA-DRB1*01:02L HLA-DRB4*03:01NL HLA-DQA1*05:05-B1*03:19L HLA-DRB1*12:01L HLA-DRB1*15:03L
ITDAVDCALDPLSET

SEQ ID NO: 11555 - protein, 10 aa, Severe acute respiratory syndrome coronavirus 2
  REGION 1..10: note = Table B: HLA-DQA1*05:01-B1*03:01L HLA-DRB1*04:03L HLA-DRB1*04:02L HLA-DQA1*03:01-B1*03:02L HLA-DRB1*14:17L HLA-DRB1*16:01L HLA-DQA1*02:01-B1*03:03L
SFTVEKGIYQ

SEQ ID NO: 11556 - protein, 11 aa, Severe acute respiratory syndrome coronavirus 2
  REGION 1..11: note = Table B: HLA-DQA1*05:01-B1*03:01L HLA-DRB1*04:03L HLA-DRB1*01:03L HLA-DRB1*04:02L HLA-DRB1*01:02L HLA-DRB1*08:77L HLA-DRB3*02:01L HLA-DPA1*03:01-B1*04:02L HLA-DQA1*05:01-B1*02:01L HLA-DRB1*12:01L
  REGION 1..11: note = CONT. FROM ABOVE: HLA-DPA1*03:01-B1*105:01L HLA-DPA1*01:02-B1*04 :01L HLA-DRB1*07:01L HLA-DRB1*04:08L HLA-DQA1*02:01-B1*03:03L
GIYQTSNFRVQ

SEQ ID NO: 11557 - protein, 11 aa, Severe acute respiratory syndrome coronavirus 2
  REGION 1..11: note = Table B: HLA-DQA1*05:01-B1*03:01L HLA-DRB1*04:03L HLA-DRB1*01:03L HLA-DRB1*01:02L HLA-DPA1*03:01-B1*04:02L HLA-DRB1*14:01L HLA-DQA1*01-B1*05L HLA-DPA1*01:03-B1*04:01L HLA-DRB1*12:01L HLA-DPA1*03:01-B1*105:01L
  REGION 1..11: note = CONT. FROM ABOVE: HLA-DQA1*01:03-B1*06:01L HLA-DRB1*04:08L HLA-D QA1*02:01-B1*03:03L
IYQTSNFRVQP

SEQ ID NO: 11558 - protein, 10 aa, Severe acute respiratory syndrome coronavirus 2
  REGION 1..10: note = Table B: HLA-DQA1*05:01-B1*03:01L HLA-DRB1*04:01L HLA-DRB1*04:03L HLA-DRB1*13:02M HLA-DRB1*13:03M HLA-DRB1*01:03L HLA-DRB1*04:02L HLA-DRB1*04:04L HLA-DRB1*01:01L HLA-DRB4*03:01NL HLA-DRB3*02:01L HLA-DRB1*14:01L HLA-DRB1*11:04L HLA-DRB1*14:02L
  REGION 1..10: note = CONT. FROM ABOVE: HLA-DRB1*08:01M HLA-DRB1*11:01L HLA-DRB5*01:01 L HLA-DRB1*13:01L HLA-DPA1*01:03-B1*04:02L HLA-DRB1*12:01M HLA-D RB1*12:02L HLA-DRB3*01:01L HLA-DQA1*03:01-B1*03:02M HLA-DQA1*05: 05-B1*03:01L HLA-DRB1*14:17L HLA-DRB1*16:01L
  REGION 1..10: note = CONT. FROM ABOVE: HLA-DQA1*01:03-B1*06:01L HLA-DRB1*08:02L HLA-D RB1*08:03L HLA-DQA1*02:01-B1*03:03L HLA-DRB1*15:01L
RVQPTESIVR

SEQ ID NO: 11559 - protein, 13 aa, Severe acute respiratory syndrome coronavirus 2
  REGION 1..13: note = Table B: HLA-DQA1*05:01-B1*03:01L
QPTESIVRFPNIT

SEQ ID NO: 11560 - protein, 11 aa, Severe acute respiratory syndrome coronavirus 2
  REGION 1..11: note = Table B: HLA-DQA1*05:01-B1*03:01L HLA-DRB1*01:03L HLA-DRB1*01:02L HLA-DPA1*01:03-B1*03:01L HLA-DRB1*14:01L HLA-DRB1*14:02L HLA-DQA1*01-B1*05L HLA-DPA1*01:03-B1*04:02L HLA-DRB1*12:01L HLA-DQA1*03:01-B1*03:02L
EVFNATRFASV

SEQ ID NO: 11561 - protein, 12 aa, Severe acute respiratory syndrome coronavirus 2
  REGION 1..12: note = Table B: HLA-DQA1*05:01-B1*03:01L HLA-DRB1*13:02L HLA-DRB1*04:04L HLA-DRB1*04:05L HLA-DQA1*01:02-B1*06:02L HLA-DRB1*08:01L HLA-DPA1*02:01-B1*13:01L HLA-DPA1*01:02-B1*04:01L HLA-DRB1*07:01L
  REGION 1..12: note = CONT. FROM ABOVE: HLA-DQA1*01:03-B1*06:01L
TRFASVYAWNRK

SEQ ID NO: 11562 - protein, 12 aa, Severe acute respiratory syndrome coronavirus 2
  REGION 1..12: note = Table B: HLA-DQA1*05:01-B1*03:01L HLA-DRB1*13:02L HLA-DRB1*04:05L HLA-DQA1*01:02-B1*06:02L HLA-DRB1*01:01L HLA-DRB3*01:01L HLA-DRB1*07:01L HLA-DQA1*01:03-B1*06:01L
RFASVYAWNRKR

SEQ ID NO: 11563 - protein, 13 aa, Severe acute respiratory syndrome coronavirus 2
  REGION 1..13: note = Table B: HLA-DQA1*05:01-B1*03:01L HLA-DPA1*03:01-B1*04:02L HLA-DRB1*03:01L HLA-DRB1*14:02L HLA-DQA1*05:05-B1*03:19L HLA-DQA1*05:05-B1*03:116L HLA-DPA1*01:03-B1*04:02L HLA-DPA1*02:01-B1*13:01L HLA-DPA1*01:03-B1*02:01L
  REGION 1..13: note = CONT. FROM ABOVE: HLA-DRB1*07:01L HLA-DRB1*08:02L
ASVYAWNRKRISN

SEQ ID NO: 11564 - protein, 14 aa, Severe acute respiratory syndrome coronavirus 2
  REGION 1..14: note = Table B: HLA-DQA1*05:01-B1*03:01L HLA-DRB1*01:03L HLA-DRB1*04:04L HLA-DRB1*04:05L HLA-DPA1*01:03-B1*03:01L HLA-DRB1*08:01L HLA-DRB1*12:01L HLA-DQA1*03:01-B1*03:02L HLA-DPA1*01:03-B1*104:01L HLA-DPA1*01:02-B1*04:01L
  REGION 1..14: note = CONT. FROM ABOVE: HLA-DRB1*16:01L HLA-DRB1*04:08L
RKRISNCVADYSVL

SEQ ID NO: 11565 - protein, 14 aa, Severe acute respiratory syndrome coronavirus 2
  REGION 1..14: note = Table B: HLA-DQA1*05:01-B1*03:01L HLA-DQA1*01-B1*05L HLA-DQA1*01:03-B1*06:01L
ASFSTFKCYGVSPT

SEQ ID NO: 11566 - protein, 12 aa, Severe acute respiratory syndrome coronavirus 2
  REGION 1..12: note = Table B: HLA-DQA1*05:01-B1*03:01L HLA-DRB1*04:03L HLA-DRB1*13:02L HLA-DRB1*13:03L HLA-DRB1*04:02L HLA-DRB1*04:04L HLA-DRB1*04:05L HLA-DQA1*01:02-B1*06:02L HLA-DRB1*01:01L HLA-DRB1*01:02L HLA-DRB1*08:04L HLA-DRB1*14:01L HLA-DRB1*11:04L
  REGION 1..12: note = CONT. FROM ABOVE: HLA-DRB1*08:01L HLA-DRB1*11:01L HLA-DQA1*01-B1 *05L HLA-DRB1*04:10L HLA-DRB1*12:01L HLA-DRB3*01:01L HLA-DPA1*02 :01-B1*13:01L HLA-DPA1*03:01-B1*105:01L HLA-DPA1*01:03-B1*02:01L HLA-DRB1*14:17L HLA-DPA1*01:02-B1*04:01L HLA-DRB1*10:01L
  REGION 1..12: note = CONT. FROM ABOVE: HLA-DRB1*16:01L HLA-DQA1*01:03-B1*06:01L HLA-D RB1*08:03L HLA-DQA1*02:01-B1*03:03L HLA-DRB1*15:03L
STFKCYGVSPTK

SEQ ID NO: 11567 - protein, 17 aa, Severe acute respiratory syndrome coronavirus 2
  REGION 1..17: note = Table B: HLA-DQA1*05:01-B1*03:01L HLA-DRB1*08:04L HLA-DRB1*14:01L HLA-DRB1*14:02L HLA-DRB1*08:01L HLA-DQA1*01-B1*05L HLA-DQA1*05:01-B1*02:01L HLA-DPA1*01:03-B1*04:01L HLA-DPA1*01:03-B1*02:01L
SPTKLNDLCFTNVYADS

SEQ ID NO: 11568 - protein, 12 aa, Severe acute respiratory syndrome coronavirus 2
  REGION 1..12: note = Table B: HLA-DQA1*05:01-B1*03:01L HLA-DRB1*04:03L HLA-DRB1*13:03L HLA-DRB1*01:03L HLA-DRB1*04:02L HLA-DRB1*04:05L HLA-DQA1*01:02-B1*06:02L HLA-DRB1*01:02L HLA-DPA1*01:03-B1*03:01L HLA-DPA1*03:01-B1*04:02L
  REGION 1..12: note = CONT. FROM ABOVE: HLA-DQA1*01:01-B1*05:01L HLA-DRB1*08:01L HLA-D QA1*05:05-B1*03:19L HLA-DPA1*01:03-B1*04:02L HLA-DRB1*12:01L HLA -DPA1*02:01-B1*13:01L HLA-DPA1*03:01-B1*105:01L HLA-DQA1*05:05-B 1*03:01L HLA-DRB1*14:17L HLA-DPA1*01:02-B1*04:01L
  REGION 1..12: note = CONT. FROM ABOVE: HLA-DRB1*16:01L HLA-DRB1*04:08L HLA-DRB1*15:03 L
VYADSFVIRGDE

SEQ ID NO: 11569 - protein, 12 aa, Severe acute respiratory syndrome coronavirus 2
  REGION 1..12: note = Table B: HLA-DQA1*05:01-B1*03:01L HLA-DRB1*01:03L HLA-DRB1*04:02L HLA-DRB1*04:05L HLA-DQA1*01:02-B1*06:02L HLA-DQA1*01:01-B1*05:01L HLA-DRB1*16:01L HLA-DRB1*04:08L
ADSFVIRGDEVR

SEQ ID NO: 11570 - protein, 12 aa, Severe acute respiratory syndrome coronavirus 2
  REGION 1..12: note = Table B: HLA-DQA1*05:01-B1*03:01L HLA-DRB1*04:05L HLA-DQA1*01:02-B1*06:02L HLA-DRB4*03:01NL HLA-DRB1*14:01L HLA-DRB1*12:01L HLA-DRB1*14:54L HLA-DRB1*15:03L
DSFVIRGDEVRQ

SEQ ID NO: 11571 - protein, 12 aa, Severe acute respiratory syndrome coronavirus 2
  REGION 1..12: note = Table B: HLA-DQA1*05:01-B1*03:01L HLA-DRB1*04:03L HLA-DRB1*01:03L HLA-DRB1*04:02L HLA-DQA1*01:02-B1*06:02L HLA-DRB1*01:02L HLA-DRB1*14:01L HLA-DPA1*03:01-B1*105:01L HLA-DQA1*03:01-B1*03:02L HLA-DQA1*05:05-B1*03:01L
  REGION 1..12: note = CONT. FROM ABOVE: HLA-DRB1*16:01L HLA-DQA1*01:03-B1*06:01L HLA-D QA1*02:01-B1*03:03L
IRGDEVRQIAPG

SEQ ID NO: 11572 - protein, 12 aa, Severe acute respiratory syndrome coronavirus 2
  REGION 1..12: note = Table B: HLA-DQA1*05:01-B1*03:01L HLA-DRB1*13:03L HLA-DRB1*01:03L HLA-DRB1*04:05L HLA-DQA1*01:02-B1*06:02L HLA-DRB4*03:01NL HLA-DQA1*01-B1*05L HLA-DRB1*04:10L HLA-DRB1*12:01L HLA-DRB1*14:54L HLA-DQA1*05:05-B1*03:01L
  REGION 1..12: note = CONT. FROM ABOVE: HLA-DRB1*16:01L HLA-DQA1*01:03-B1*06:01L
GDEVRQIAPGQT

SEQ ID NO: 11573 - protein, 12 aa, Severe acute respiratory syndrome coronavirus 2
  REGION 1..12: note = Table B: HLA-DQA1*05:01-B1*03:01L HLA-DRB1*13:02L HLA-DRB1*13:03L HLA-DRB1*01:03L HLA-DRB1*04:04L HLA-DRB1*04:05L HLA-DQA1*01:02-B1*06:02L HLA-DRB1*01:02L HLA-DRB4*03:01NL HLA-DRB1*08:04L HLA-DRB1*08:77L HLA-DPA1*01:03-B1*03:01L
  REGION 1..12: note = CONT. FROM ABOVE: HLA-DRB1*14:01L HLA-DQA1*01:01-B1*05:01L HLA-D RB1*08:01L HLA-DQA1*01-B1*05L HLA-DQA1*05:05-B1*03:19L HLA-DRB1* 04:10L HLA-DRB1*12:01L HLA-DRB1*12:02L HLA-DPA1*02:01-B1*13:01L HLA-DPA1*03:01-B1*105:01L HLA-DRB1*14:54L
  REGION 1..12: note = CONT. FROM ABOVE: HLA-DQA1*05:05-B1*03:01L HLA-DRB1*10:01L HLA-D RB1*16:01L HLA-DQA1*01:03-B1*06:01L HLA-DRB1*04:08L HLA-DRB1*08: 03L HLA-DRB1*15:03L
DEVRQIAPGQTG

SEQ ID NO: 11574 - protein, 11 aa, Severe acute respiratory syndrome coronavirus 2
  REGION 1..11: note = Table B: HLA-DQA1*05:01-B1*03:01L HLA-DRB1*01:03L HLA-DRB1*08:77L HLA-DRB1*14:02L HLA-DPA1*01:03-B1*04:02L HLA-DPA1*03:01-B1*105:01L HLA-DRB1*15:03L
APGQTGKIADY

SEQ ID NO: 11575 - protein, 11 aa, Severe acute respiratory syndrome coronavirus 2
  REGION 1..11: note = Table B: HLA-DQA1*05:01-B1*03:01L HLA-DQA1*03:01-B1*03:02L HLA-DQA1*05:05-B1*03:01L
PGQTGKIADYN

SEQ ID NO: 11576 - protein, 10 aa, Severe acute respiratory syndrome coronavirus 2
  REGION 1..10: note = Table B: HLA-DQA1*05:01-B1*03:01L HLA-DRB1*13:03L HLA-DRB1*01:03L HLA-DQA1*01:02-B1*06:02L HLA-DRB1*08:77L HLA-DPA1*01:03-B1*03:01L HLA-DRB1*03:01L HLA-DRB1*11:02L HLA-DRB1*14:02L HLA-DQA1*01-B1*05L HLA-DQA1*05:05-B1*03:19M
  REGION 1..10: note = CONT. FROM ABOVE: HLA-DQA1*05:01-B1*02:01L HLA-DRB4*01:01L HLA-D PA1*01:03-B1*04:01L HLA-DQA1*05:05-B1*03:116L HLA-DPA1*01:03-B1* 04:02L HLA-DPA1*03:01-B1*105:01L HLA-DPA1*01:03-B1*104:01L HLA-D RB1*10:01L HLA-DRB1*16:01L HLA-DQA1*01:03-B1*06:01L
  REGION 1..10: note = CONT. FROM ABOVE: HLA-DQA1*02:01-B1*03:03L
QTGKIADYNY

SEQ ID NO: 11577 - protein, 11 aa, Severe acute respiratory syndrome coronavirus 2
  REGION 1..11: note = Table B: HLA-DQA1*05:01-B1*03:01L HLA-DRB1*13:02L HLA-DRB1*13:03L HLA-DRB1*01:03L HLA-DRB1*04:05L HLA-DQA1*01:02-B1*06:02L HLA-DRB1*01:02L HLA-DRB4*03:01NL HLA-DRB1*08:04L HLA-DRB1*08:77L HLA-DRB3*02:01L
  REGION 1..11: note = CONT. FROM ABOVE: HLA-DPA1*01:03-B1*03:01L HLA-DPA1*03:01-B1*04: 02L HLA-DRB1*14:01L HLA-DRB1*14:02L HLA-DQA1*01:01-B1*05:01L HLA -DRB1*08:01L HLA-DQA1*05:05-B1*03:19L HLA-DRB1*04:10L HLA-DPA1*0 1:03-B1*04:02L HLA-DRB1*12:01L HLA-DPA1*02:01-B1*13:01L
  REGION 1..11: note = CONT. FROM ABOVE: HLA-DPA1*03:01-B1*105:01L HLA-DRB1*14:54L HLA- DQA1*05:05-B1*03:01L HLA-DRB1*14:17L HLA-DQA1*01:03-B1*06:01L HL A-DRB1*04:08L HLA-DRB1*15:03L
IADYNYKLPDD

SEQ ID NO: 11578 - protein, 12 aa, Severe acute respiratory syndrome coronavirus 2
  REGION 1..12: note = Table B: HLA-DQA1*05:01-B1*03:01L HLA-DQA1*05:05-B1*03:19L HLA-DPA1*03:01-B1*105:01L HLA-DQA1*02:01-B1*03:03L
DFTGCVIAWNSN

SEQ ID NO: 11579 - protein, 12 aa, Severe acute respiratory syndrome coronavirus 2
  REGION 1..12: note = Table B: HLA-DQA1*05:01-B1*03:01L HLA-DQA1*05:05-B1*03:19L HLA-DPA1*03:01-B1*105:01L HLA-DQA1*02:01-B1*03:03L
FTGCVIAWNSNN

SEQ ID NO: 11580 - protein, 16 aa, Severe acute respiratory syndrome coronavirus 2
  REGION 1..16: note = Table B: HLA-DQA1*05:01-B1*03:01L HLA-DRB1*04:04L HLA-DRB1*01:01L HLA-DPA1*01:03-B1*03:01L HLA-DRB1*03:01L HLA-DQA1*05:05-B1*03:19L HLA-DQA1*05:05-B1*03:116L HLA-DPA1*02:01-B1*13:01L HLA-DPA1*01:03-B1*104:01L
  REGION 1..16: note = CONT. FROM ABOVE: HLA-DRB1*07:01L HLA-DRB1*08:03L HLA-DQA1*02:01 -B1*03:03L
VGGNYNYLYRLFRKSN

SEQ ID NO: 11581 - protein, 16 aa, Severe acute respiratory syndrome coronavirus 2
  REGION 1..16: note = Table B: HLA-DQA1*05:01-B1*03:01L HLA-DPA1*01:03-B1*03:01L HLA-DPA1*03:01-B1*04:02L HLA-DRB1*03:01L HLA-DRB1*14:02L HLA-DQA1*05:05-B1*03:19L HLA-DRB1*13:01L HLA-DPA1*01:03-B1*04:02L HLA-DPA1*01:03-B1*02:01L
  REGION 1..16: note = CONT. FROM ABOVE: HLA-DPA1*01:03-B1*104:01L HLA-DRB1*07:01L HLA- DRB1*08:02L
NYLYRLFRKSNLKPFE

SEQ ID NO: 11582 - protein, 10 aa, Severe acute respiratory syndrome coronavirus 2
  REGION 1..10: note = Table B: HLA-DQA1*05:01-B1*03:01L HLA-DRB1*08:77L HLA-DPA1*01:03-B1*03:01L HLA-DPA1*03:01-B1*04:02L HLA-DRB1*03:01L HLA-DQA1*01-B1*05L HLA-DQA1*05:05-B1*03:19L HLA-DQA1*05:01-B1*02:01L HLA-DRB4*01:01L
  REGION 1..10: note = CONT. FROM ABOVE: HLA-DPA1*01:03-B1*04:01L HLA-DPA1*01:03-B1*104 :01L HLA-DRB1*10:01L HLA-DRB1*16:01L HLA-DRB1*15:03L
FERDISTEIY

SEQ ID NO: 11583 - protein, 14 aa, Severe acute respiratory syndrome coronavirus 2
  REGION 1..14: note = Table B: HLA-DQA1*05:01-B1*03:01L HLA-DRB1*04:02L HLA-DRB1*01:02L HLA-DQA1*05:05-B1*03:19L HLA-DPA1*01:03-B1*04:02L HLA-DQA1*05:05-B1*03:01L HLA-DRB1*04:08L
ERDISTEIYQAGST

SEQ ID NO: 11584 - protein, 12 aa, Severe acute respiratory syndrome coronavirus 2
  REGION 1..12: note = Table B: HLA-DQA1*05:01-B1*03:01L HLA-DQA1*01:02-B1*06:02L HLA-DQA1*05:05-B1*03:19L HLA-DQA1*05:05-B1*03:01L HLA-DQA1*01:03-B1*06:01L
QAGSTPCNGVEG

SEQ ID NO: 11585 - protein, 14 aa, Severe acute respiratory syndrome coronavirus 2
  REGION 1..14: note = Table B: HLA-DQA1*05:01-B1*03:01L HLA-DRB1*04:03L HLA-DRB1*01:03L HLA-DRB1*04:05L HLA-DRB1*01:02L HLA-DRB1*08:04L HLA-DPA1*01:03-B1*03:01L HLA-DPA1*03:01-B1*04:02L HLA-DQA1*01-B1*05L HLA-DQA1*05:01-B1*02:01L
  REGION 1..14: note = CONT. FROM ABOVE: HLA-DPA1*01:03-B1*04:02L HLA-DRB1*12:01L HLA-D PA1*02:01-B1*13:01L HLA-DQA1*05:05-B1*03:01L HLA-DPA1*01:02-B1*0 4:01L HLA-DRB1*16:01L HLA-DQA1*01:03-B1*06:01L HLA-DRB1*04:08L H LA-DQA1*02:01-B1*03:03L HLA-DRB1*15:03L
VEGFNCYFPLQSYG

SEQ ID NO: 11586 - protein, 12 aa, Severe acute respiratory syndrome coronavirus 2
  REGION 1..12: note = Table B: HLA-DQA1*05:01-B1*03:01L HLA-DRB1*04:03L HLA-DRB1*13:02L HLA-DRB1*01:03L HLA-DRB1*04:02L HLA-DRB1*04:05L HLA-DQA1*01:02-B1*06:02L HLA-DRB1*01:01L HLA-DRB1*01:02L HLA-DRB3*02:01L HLA-DPA1*03:01-B1*04:02L HLA-DRB1*14:01L
  REGION 1..12: note = CONT. FROM ABOVE: HLA-DRB1*11:03L HLA-DQA1*01-B1*05L HLA-DQA1*05 :01-B1*02:01L HLA-DRB1*12:01L HLA-DPA1*03:01-B1*105:01L HLA-DQA1 *03:01-B1*03:02L HLA-DQA1*05:05-B1*03:01L HLA-DRB1*14:17L HLA-DP A1*01:02-B1*04:01L HLA-DRB1*07:01L HLA-DRB1*16:01L
  REGION 1..12: note = CONT. FROM ABOVE: HLA-DRB1*04:08L HLA-DQA1*02:01-B1*03:03L HLA-D RB1*15:03L
YFPLQSYGFQPT

SEQ ID NO: 11587 - protein, 12 aa, Severe acute respiratory syndrome coronavirus 2
  REGION 1..12: note = Table B: HLA-DQA1*05:01-B1*03:01L HLA-DRB1*04:05L HLA-DQA1*05:01-B1*02:01L HLA-DRB1*14:54L HLA-DQA1*05:05-B1*03:01L HLA-DRB1*16:01L
QSYGFQPTNGVG

SEQ ID NO: 11588 - protein, 10 aa, Severe acute respiratory syndrome coronavirus 2
  REGION 1..10: note = Table B: HLA-DQA1*05:01-B1*03:01L HLA-DRB1*13:03L HLA-DRB1*01:03L HLA-DRB1*04:05L HLA-DQA1*01:02-B1*06:02M HLA-DRB1*01:01L HLA-DRB1*01:02L HLA-DRB1*14:02L HLA-DQA1*05:01-B1*02:01L HLA-DQA1*05:05-B1*03:116L
  REGION 1..10: note = CONT. FROM ABOVE: HLA-DPA1*02:01-B1*13:01L HLA-DPA1*03:01-B1*105 :01L HLA-DQA1*01:03-B1*06:01L HLA-DQA1*02:01-B1*03:03L HLA-DRB1* 15:03L
QPYRVVVLSF

SEQ ID NO: 11589 - protein, 13 aa, Severe acute respiratory syndrome coronavirus 2
  REGION 1..13: note = Table B: HLA-DQA1*05:01-B1*03:01L HLA-DRB1*04:03L HLA-DRB1*04:02L HLA-DRB1*12:01L HLA-DQA1*03:01-B1*03:02L HLA-DQA1*05:05-B1*03:01L HLA-DRB1*16:01L HLA-DQA1*01:03-B1*06:01L HLA-DRB1*15:03L
ELLHAPATVCGPK

SEQ ID NO: 11590 - protein, 13 aa, Severe acute respiratory syndrome coronavirus 2
  REGION 1..13: note = Table B: HLA-DQA1*05:01-B1*03:01L HLA-DQA1*05:05-B1*03:01L HLA-DQA1*01:03-B1*06:01L HLA-DQA1*02:01-B1*03:03L
APATVCGPKKSTN

SEQ ID NO: 11591 - protein, 13 aa, Severe acute respiratory syndrome coronavirus 2
  REGION 1..13: note = Table B: HLA-DQA1*05:01-B1*03:01L HLA-DQA1*01:02-B1*06:02L HLA-DRB1*08:04L HLA-DRB3*02:01L HLA-DRB1*14:54L HLA-DPA1*01:02-B1*04:01L HLA-DRB1*16:01L HLA-DQA1*02:01-B1*03:03L
STNLVKNKCVNFN

SEQ ID NO: 11592 - protein, 12 aa, Severe acute respiratory syndrome coronavirus 2
  REGION 1..12: note = Table B: HLA-DQA1*05:01-B1*03:01L HLA-DQA1*01:02-B1*06:02L HLA-DRB1*01:01L HLA-DQA1*05:01-B1*02:01L HLA-DRB1*12:01L HLA-DPA1*03:01-B1*105:01L HLA-DQA1*05:05-B1*03:01L HLA-DRB1*10:01L HLA-DRB1*16:01L HLA-DQA1*01:03-B1*06:01L
  REGION 1..12: note = CONT. FROM ABOVE: HLA-DQA1*02:01-B1*03:03L HLA-DRB1*15:03L
FNFNGLTGTGVL

SEQ ID NO: 11593 - protein, 10 aa, Severe acute respiratory syndrome coronavirus 2
  REGION 1..10: note = Table B: HLA-DQA1*05:01-B1*03:01L HLA-DQA1*01:02-B1*06:02L HLA-DQA1*03:01-B1*03:02L HLA-DQA1*05:05-B1*03:01L HLA-DQA1*01:03-B1*06:01L HLA-DQA1*02:01-B1*03:03L
GTGVLTESNK

SEQ ID NO: 11594 - protein, 13 aa, Severe acute respiratory syndrome coronavirus 2
  REGION 1..13: note = Table B: HLA-DQA1*05:01-B1*03:01L HLA-DRB1*13:02L HLA-DRB1*01:03L HLA-DRB1*04:05L HLA-DRB1*01:02L HLA-DPA1*01:03-B1*03:01L HLA-DRB1*08:01L HLA-DQA1*01-B1*05L HLA-DPA1*01:03-B1*04:01L HLA-DPA1*01:03-B1*04:02L
  REGION 1..13: note = CONT. FROM ABOVE: HLA-DRB1*12:01L HLA-DPA1*01:03-B1*104:01L HLA- DRB1*04:08L HLA-DRB1*15:03L
ESNKKFLPFQQFG

SEQ ID NO: 11595 - protein, 13 aa, Severe acute respiratory syndrome coronavirus 2
  REGION 1..13: note = Table B: HLA-DQA1*05:01-B1*03:01L
NKKFLPFQQFGRD

SEQ ID NO: 11596 - protein, 12 aa, Severe acute respiratory syndrome coronavirus 2
  REGION 1..12: note = Table B: HLA-DQA1*05:01-B1*03:01L HLA-DRB1*01:03L HLA-DRB1*04:05L HLA-DQA1*01:02-B1*06:02L HLA-DQA1*01:01-B1*05:01L HLA-DQA1*05:05-B1*03:19L HLA-DRB1*04:10L HLA-DRB1*04:08L
DIADTTDAVRDP

SEQ ID NO: 11597 - protein, 14 aa, Severe acute respiratory syndrome coronavirus 2
  REGION 1..14: note = Table B: HLA-DQA1*05:01-B1*03:01L HLA-DRB1*13:02L HLA-DRB1*13:03L HLA-DRB1*01:03L HLA-DRB1*04:02L HLA-DRB1*04:04L HLA-DRB1*04:05L HLA-DQA1*01:02-B1*06:02L HLA-DRB1*01:02L HLA-DRB4*03:01NL HLA-DRB1*08:04L HLA-DRB1*08:77L HLA-DRB3*02:01L
  REGION 1..14: note = CONT. FROM ABOVE: HLA-DPA1*01:03-B1*03:01L HLA-DRB1*14:01L HLA-D RB1*11:03L HLA-DRB1*11:04L HLA-DRB1*14:02L HLA-DQA1*01:01-B1*05: 01L HLA-DRB1*08:01L HLA-DQA1*05:05-B1*03:19L HLA-DRB4*01:01L HLA -DPA1*01:03-B1*04:01L HLA-DRB1*04:10L HLA-DRB1*09:01L
  REGION 1..14: note = CONT. FROM ABOVE: HLA-DPA1*01:03-B1*04:02L HLA-DRB1*12:02L HLA-D PA1*02:01-B1*13:01L HLA-DRB1*14:54L HLA-DPA1*01:03-B1*02:01L HLA -DPA1*01:03-B1*104:01L HLA-DQA1*05:05-B1*03:01L HLA-DRB1*14:17L HLA-DPA1*01:02-B1*04:01L HLA-DRB1*07:01L HLA-DRB1*10:01L
  REGION 1..14: note = CONT. FROM ABOVE: HLA-DRB1*04:08L HLA-DRB1*08:03L HLA-DQA1*02:01 -B1*03:03L
DPQTLEILDITPCS

SEQ ID NO: 11598 - protein, 13 aa, Severe acute respiratory syndrome coronavirus 2
  REGION 1..13: note = Table B: HLA-DQA1*05:01-B1*03:01L HLA-DRB1*04:03L HLA-DPA1*01:03-B1*03:01L HLA-DPA1*03:01-B1*04:02L HLA-DQA1*05:05-B1*03:19L HLA-DQA1*05:01-B1*02:01L HLA-DPA1*01:03-B1*04:01L HLA-DPA1*01:03-B1*04:02L
  REGION 1..13: note = CONT. FROM ABOVE: HLA-DRB1*12:01L HLA-DQA1*05:05-B1*03:01L HLA-D PA1*01:02-B1*04:01L HLA-DQA1*02:01-B1*03:03L HLA-DRB1*15:03L
ILDITPCSFGGVS

SEQ ID NO: 11599 - protein, 11 aa, Severe acute respiratory syndrome coronavirus 2
  REGION 1..11: note = Table B: HLA-DQA1*05:01-B1*03:01L HLA-DQA1*01:02-B1*06:02L HLA-DQA1*05:05-B1*03:19L HLA-DQA1*05:01-B1*02:01L HLA-DQA1*05:05-B1*03:01L
GGVSVITPGTN

SEQ ID NO: 11600 - protein, 13 aa, Severe acute respiratory syndrome coronavirus 2
  REGION 1..13: note = Table B: HLA-DQA1*05:01-B1*03:01L HLA-DRB1*04:02L HLA-DQA1*05:05-B1*03:19L HLA-DQA1*05:05-B1*03:01L
GVSVITPGTNTSN

SEQ ID NO: 11601 - protein, 14 aa, Severe acute respiratory syndrome coronavirus 2
  REGION 1..14: note = Table B: HLA-DQA1*05:01-B1*03:01L HLA-DQA1*01:02-B1*06:02L HLA-DRB1*01:02L HLA-DQA1*05:05-B1*03:19L HLA-DQA1*05:01-B1*02:01L HLA-DRB1*16:01L HLA-DRB1*04:08L
VSVITPGTNTSNQV

SEQ ID NO: 11602 - protein, 13 aa, Severe acute respiratory syndrome coronavirus 2
  REGION 1..13: note = Table B: HLA-DQA1*05:01-B1*03:01L HLA-DRB1*13:02L HLA-DRB1*01:03L HLA-DRB1*04:05L HLA-DQA1*01:02-B1*06:02L HLA-DRB1*01:02L HLA-DRB1*08:77L HLA-DPA1*01:03-B1*03:01L HLA-DQA1*05:05-B1*03:19L HLA-DRB1*04:10L HLA-DRB1*12:01L
  REGION 1..13: note = CONT. FROM ABOVE: HLA-DRB1*14:54L HLA-DQA1*05:05-B1*03:01L HLA-D RB1*16:01L HLA-DQA1*01:03-B1*06:01L
VITPGTNTSNQVA

SEQ ID NO: 11603 - protein, 10 aa, Severe acute respiratory syndrome coronavirus 2
  REGION 1..10: note = Table B: HLA-DQA1*05:01-B1*03:01L HLA-DRB1*13:03M HLA-DRB1*01:03L HLA-DQA1*01:02-B1*06:02M HLA-DRB4*03:01NL HLA-DRB1*08:77L HLA-DPA1*01:03-B1*03:01L HLA-DPA1*03:01-B1*04:02L HLA-DRB1*03:01L HLA-DRB1*14:01L
  REGION 1..10: note = CONT. FROM ABOVE: HLA-DRB1*11:02L HLA-DRB1*14:02L HLA-DQA1*01-B1 *05L HLA-DQA1*05:05-B1*03:19M HLA-DQA1*05:01-B1*02:01L HLA-DRB4* 01:01L HLA-DPA1*01:03-B1*04:01L HLA-DQA1*05:05-B1*03:116L HLA-DP A1*01:03-B1*04:02L HLA-DRB1*12:01L HLA-DPA1*02:01-B1*13:01L
  REGION 1..10: note = CONT. FROM ABOVE: HLA-DPA1*03:01-B1*105:01L HLA-DPA1*01:03-B1*10 4:01L HLA-DRB1*10:01L HLA-DRB1*16:01L HLA-DRB1*08:02L HLA-DQA1*0 2:01-B1*03:03L HLA-DRB1*15:03L
NTSNQVAVLY

SEQ ID NO: 11604 - protein, 11 aa, Severe acute respiratory syndrome coronavirus 2
  REGION 1..11: note = Table B: HLA-DQA1*05:01-B1*03:01L HLA-DRB1*04:03L HLA-DPA1*01:03-B1*03:01L HLA-DPA1*03:01-B1*04:02L HLA-DQA1*01:01-B1*05:01L HLA-DQA1*05:05-B1*03:19L HLA-DPA1*01:03-B1*04:01L HLA-DPA1*01:03-B1*04:02L
  REGION 1..11: note = CONT. FROM ABOVE: HLA-DRB1*12:01L HLA-DQA1*05:05-B1*03:01L HLA-D RB1*14:17L HLA-DRB1*16:01L HLA-DRB1*15:03L
NQVAVLYQDVN

SEQ ID NO: 11605 - protein, 11 aa, Severe acute respiratory syndrome coronavirus 2
  REGION 1..11: note = Table B: HLA-DQA1*05:01-B1*03:01L HLA-DQA1*01:02-B1*06:02L HLA-DPA1*03:01-B1*105:01L HLA-DQA1*03:01-B1*03:02L HLA-DQA1*05:05-B1*03:01L HLA-DQA1*02:01-B1*03:03L
VNCTEVPVAIH

SEQ ID NO: 11606 - protein, 10 aa, Severe acute respiratory syndrome coronavirus 2
  REGION 1..10: note = Table B: HLA-DQA1*05:01-B1*03:01L HLA-DRB1*13:03L HLA-DRB1*01:03L HLA-DQA1*01:02-B1*06:02M HLA-DRB1*08:77L HLA-DPA1*01:03-B1*03:01L HLA-DRB1*03:01L HLA-DRB1*14:02L HLA-DQA1*05:05-B1*03:19L HLA-DQA1*05:01-B1*02:01L
  REGION 1..10: note = CONT. FROM ABOVE: HLA-DPA1*01:03-B1*04:01L HLA-DPA1*01:03-B1*04: 02L HLA-DPA1*02:01-B1*13:01L HLA-DPA1*03:01-B1*105:01L HLA-DRB1* 16:01L HLA-DQA1*01:03-B1*06:01L HLA-DQA1*02:01-B1*03:03L HLA-DRB 1*15:03L
DQLTPTWRVY

SEQ ID NO: 11607 - protein, 10 aa, Severe acute respiratory syndrome coronavirus 2
  REGION 1..10: note = Table B: HLA-DQA1*05:01-B1*03:01L HLA-DRB1*04:01L HLA-DRB1*13:02M HLA-DRB1*13:03M HLA-DRB1*01:03L HLA-DRB1*04:02L HLA-DRB1*04:04L HLA-DQA1*01:02-B1*06:02L HLA-DRB1*01:01M HLA-DRB4*03:01NM HLA-DRB3*02:01L HLA-DRB1*14:01L HLA-DRB1*11:04M
  REGION 1..10: note = CONT. FROM ABOVE: HLA-DRB1*14:02L HLA-DRB1*08:01M HLA-DRB1*11:01 L HLA-DRB5*01:01M HLA-DQA1*05:05-B1*03:19L HLA-DRB4*02:01NL HLA- DRB5*02:02L HLA-DPA1*01:03-B1*04:01L HLA-DPA1*01:03-B1*04:02M HL A-DRB1*12:01H HLA-DRB1*12:02M HLA-DRB3*01:01L
  REGION 1..10: note = CONT. FROM ABOVE: HLA-DPA1*03:01-B1*105:01L HLA-DQA1*03:01-B1*03 :02M HLA-DRB1*14:54L HLA-DQA1*05:05-B1*03:01H HLA-DRB1*14:17L HL A-DRB1*16:01L HLA-DQA1*01:03-B1*06:01M HLA-DRB1*08:02L HLA-DRB1* 08:03L HLA-DQA1*02:01-B1*03:03L HLA-DRB1*15:01L
STGSNVFQTR

SEQ ID NO: 11608 - protein, 13 aa, Severe acute respiratory syndrome coronavirus 2
  REGION 1..13: note = Table B: HLA-DQA1*05:01-B1*03:01L HLA-DQA1*05:05-B1*03:19L HLA-DPA1*03:01-B1*105:01L HLA-DQA1*05:05-B1*03:01L HLA-DQA1*02:01-B1*03:03L
VFQTRAGCLIGAE

SEQ ID NO: 11609 - protein, 12 aa, Severe acute respiratory syndrome coronavirus 2
  REGION 1..12: note = Table B: HLA-DQA1*05:01-B1*03:01L HLA-DPA1*03:01-B1*105:01L HLA-DQA1*03:01-B1*03:02L HLA-DQA1*05:05-B1*03:01L
QTRAGCLIGAEH

SEQ ID NO: 11610 - protein, 13 aa, Severe acute respiratory syndrome coronavirus 2
  REGION 1..13: note = Table B: HLA-DQA1*05:01-B1*03:01L HLA-DQA1*03:01-B1*03:02L HLA-DQA1*05:05-B1*03:01L
TRAGCLIGAEHVN

SEQ ID NO: 11611 - protein, 10 aa, Severe acute respiratory syndrome coronavirus 2
  REGION 1..10: note = Table B: HLA-DQA1*05:01-B1*03:01L HLA-DRB1*04:03L HLA-DRB1*13:03L HLA-DRB1*01:03L HLA-DQA1*01:02-B1*06:02L HLA-DRB4*03:01NL HLA-DRB1*08:77L HLA-DPA1*01:03-B1*03:01L HLA-DPA1*03:01-B1*04:02L HLA-DRB1*03:01L HLA-DRB1*14:01L
  REGION 1..10: note = CONT. FROM ABOVE: HLA-DRB1*14:02L HLA-DQA1*01-B1*05L HLA-DQA1*05 :05-B1*03:19L HLA-DQA1*05:01-B1*02:01L HLA-DRB4*01:01L HLA-DPA1* 01:03-B1*04:01L HLA-DQA1*05:05-B1*03:116L HLA-DPA1*01:03-B1*04:0 2L HLA-DRB1*12:01L HLA-DPA1*02:01-B1*13:01L
  REGION 1..10: note = CONT. FROM ABOVE: HLA-DPA1*03:01-B1*105:01L HLA-DPA1*01:03-B1*10 4:01L HLA-DRB1*10:01L HLA-DRB1*16:01L HLA-DQA1*01:03-B1*06:01L H LA-DRB1*08:02L HLA-DQA1*02:01-B1*03:03L HLA-DRB1*15:03L
IGAEHVNNSY

SEQ ID NO: 11612 - protein, 11 aa, Severe acute respiratory syndrome coronavirus 2
  REGION 1..11: note = Table B: HLA-DQA1*05:01-B1*03:01L HLA-DRB1*13:03L HLA-DQA1*01:02-B1*06:02L HLA-DRB1*08:77L HLA-DPA1*01:03-B1*03:01L HLA-DRB1*03:01L HLA-DRB1*14:02L HLA-DQA1*05:05-B1*03:19L HLA-DQA1*05:01-B1*02:01L
  REGION 1..11: note = CONT. FROM ABOVE: HLA-DPA1*01:03-B1*04:01L HLA-DPA1*03:01-B1*105 :01L HLA-DRB1*16:01L HLA-DQA1*02:01-B1*03:03L HLA-DRB1*15:03L
IPIGAGICASY

SEQ ID NO: 11613 - protein, 10 aa, Severe acute respiratory syndrome coronavirus 2
  REGION 1..10: note = Table B: HLA-DQA1*05:01-B1*03:01L HLA-DRB1*04:01L HLA-DRB1*04:03L HLA-DRB1*13:02L HLA-DRB1*13:03L HLA-DRB1*01:03L HLA-DRB1*04:02L HLA-DRB1*04:05L HLA-DRB1*01:01L HLA-DRB4*03:01NL HLA-DRB1*11:03L HLA-DRB1*11:04L HLA-DRB1*08:01L HLA-DRB5*01:01L
  REGION 1..10: note = CONT. FROM ABOVE: HLA-DQA1*01-B1*05L HLA-DRB1*04:10L HLA-DRB1*12 :01L HLA-DRB1*12:02L HLA-DQA1*03:01-B1*03:02L HLA-DRB1*14:54L HL A-DQA1*05:05-B1*03:01L HLA-DRB1*14:17L HLA-DRB1*10:01L HLA-DRB1* 16:01L HLA-DRB1*04:08L HLA-DRB1*08:03L HLA-DQA1*02:01-B1*03:03L
SYQTQTNSPR

SEQ ID NO: 11614 - protein, 12 aa, Severe acute respiratory syndrome coronavirus 2
  REGION 1..12: note = Table B: HLA-DQA1*05:01-B1*03:01L HLA-DQA1*01:02-B1*06:02L HLA-DQA1*01:03-B1*06:01L
YQTQTNSPRRAR

SEQ ID NO: 11615 - protein, 14 aa, Severe acute respiratory syndrome coronavirus 2
  REGION 1..14: note = Table B: HLA-DQA1*05:01-B1*03:01L HLA-DRB1*13:02L HLA-DRB1*04:04L HLA-DQA1*01:02-B1*06:02L HLA-DPA1*01:03-B1*03:01L HLA-DRB1*08:01L HLA-DQA1*03:01-B1*03:02L HLA-DPA1*01:03-B1*104:01L
  REGION 1..14: note = CONT. FROM ABOVE: HLA-DPA1*01:02-B1*04:01L HLA-DRB1*07:01L HLA-D QA1*01:03-B1*06:01L HLA-DRB1*04:08L HLA-DQA1*02:01-B1*03:03L HLA -DRB1*15:03L
SPRRARSVASQSII

SEQ ID NO: 11616 - protein, 12 aa, Severe acute respiratory syndrome coronavirus 2
  REGION 1..12: note = Table B: HLA-DQA1*05:01-B1*03:01L HLA-DQA1*01:02-B1*06:02L HLA-DQA1*03:01-B1*03:02L HLA-DQA1*01:03-B1*06:01L HLA-DQA1*02:01-B1*03:03L
RARSVASQSIIA

SEQ ID NO: 11617 - protein, 14 aa, Severe acute respiratory syndrome coronavirus 2
  REGION 1..14: note = Table B: HLA-DQA1*05:01-B1*03:01L HLA-DRB1*01:03L HLA-DRB3*02:01L HLA-DPA1*01:03-B1*03:01L HLA-DRB1*11:03L HLA-DRB1*11:04L HLA-DQA1*05:05-B1*03:19L HLA-DQA1*03:01-B1*03:02L HLA-DQA1*05:05-B1*03:01L
  REGION 1..14: note = CONT. FROM ABOVE: HLA-DQA1*01:03-B1*06:01L HLA-DRB1*08:03L HLA-D QA1*02:01-B1*03:03L HLA-DRB1*15:01L
SQSIIAYTMSLGAE

SEQ ID NO: 11618 - protein, 12 aa, Severe acute respiratory syndrome coronavirus 2
  REGION 1..12: note = Table B: HLA-DQA1*05:01-B1*03:01L HLA-DRB1*04:03L HLA-DRB1*01:02L HLA-DQA1*03:01-B1*03:02L HLA-DQA1*05:05-B1*03:01L HLA-DRB1*14:17L HLA-DQA1*02:01-B1*03:03L
YTMSLGAENSVA

SEQ ID NO: 11619 - protein, 11 aa, Severe acute respiratory syndrome coronavirus 2
  REGION 1..11: note = Table B: HLA-DQA1*05:01-B1*03:01L HLA-DPA1*01:03-B1*03:01L HLA-DRB1*03:01L HLA-DRB4*01:01L HLA-DPA1*01:03-B1*04:01L HLA-DRB1*16:01L HLA-DRB1*08:02L HLA-DRB1*15:03L
MSLGAENSVAY

SEQ ID NO: 11620 - protein, 13 aa, Severe acute respiratory syndrome coronavirus 2
  REGION 1..13: note = Table B: HLA-DQA1*05:01-B1*03:01L HLA-DRB1*13:02L HLA-DRB1*13:03L HLA-DRB1*01:03L HLA-DRB1*04:04L HLA-DQA1*01:02-B1*06:02L HLA-DRB1*01:02L HLA-DRB1*08:77L HLA-DRB3*02:01L HLA-DPA1*01:03-B1*03:01L HLA-DRB1*11:04L
  REGION 1..13: note = CONT. FROM ABOVE: HLA-DQA1*05:05-B1*03:19L HLA-DPA1*03:01-B1*105 :01L HLA-DQA1*05:05-B1*03:01L HLA-DQA1*01:03-B1*06:01L HLA-DRB1* 04:08L HLA-DRB1*08:03L HLA-DRB1*15:03L
AENSVAYSNNSIA

SEQ ID NO: 11621 - protein, 11 aa, Severe acute respiratory syndrome coronavirus 2
  REGION 1..11: note = Table B: HLA-DQA1*05:01-B1*03:01L HLA-DRB1*04:03L HLA-DRB1*13:03L HLA-DRB1*01:03L HLA-DRB1*04:02L HLA-DQA1*01:02-B1*06:02L HLA-DRB4*03:01NL HLA-DQA1*05:05-B1*03:19L HLA-DRB1*12:01L
  REGION 1..11: note = CONT. FROM ABOVE: HLA-DPA1*03:01-B1*105:01L HLA-DRB1*14:54L HLA- DQA1*05:05-B1*03:01L HLA-DRB1*14:17L HLA-DRB1*16:01L
YSNNSIAIPTN

SEQ ID NO: 11622 - protein, 12 aa, Severe acute respiratory syndrome coronavirus 2
  REGION 1..12: note = Table B: HLA-DQA1*05:01-B1*03:01L HLA-DQA1*01:01-B1*05:01L HLA-DQA1*05:05-B1*03:19L HLA-DPA1*03:01-B1*105:01L HLA-DQA1*05:05-B1*03:01L
SNNSIAIPTNFT

SEQ ID NO: 11623 - protein, 10 aa, Severe acute respiratory syndrome coronavirus 2
  REGION 1..10: note = Table B: HLA-DQA1*05:01-B1*03:01L HLA-DRB1*13:03L HLA-DPA1*03:01-B1*04:02L HLA-DQA1*01-B1*05L HLA-DQA1*05:05-B1*03:116L HLA-DPA1*02:01-B1*13:01L HLA-DPA1*03:01-B1*105:01L
LPVSMTKTSV

SEQ ID NO: 11624 - protein, 10 aa, Severe acute respiratory syndrome coronavirus 2
  REGION 1..10: note = Table B: HLA-DQA1*05:01-B1*03:01L HLA-DQA1*01:02-B1*06:02L HLA-DRB1*08:77L HLA-DPA1*01:03-B1*03:01L HLA-DPA1*03:01-B1*04:02L HLA-DRB1*03:01L HLA-DRB1*11:02L HLA-DQA1*01-B1*05L HLA-DQA1*05:05-B1*03:19M
  REGION 1..10: note = CONT. FROM ABOVE: HLA-DQA1*05:01-B1*02:01L HLA-DRB4*01:01L HLA-D PA1*01:03-B1*04:01L HLA-DQA1*05:05-B1*03:116L HLA-DPA1*01:03-B1* 104:01L HLA-DRB1*10:01L HLA-DRB1*16:01L HLA-DRB1*15:03L
TECSNLLLQY

SEQ ID NO: 11625 - protein, 12 aa, Severe acute respiratory syndrome coronavirus 2
  REGION 1..12: note = Table B: HLA-DQA1*05:01-B1*03:01L HLA-DRB1*01:03L HLA-DQA1*01:02-B1*06:02L HLA-DRB1*01:02L HLA-DPA1*03:01-B1*04:02L HLA-DRB1*08:01L HLA-DPA1*01:03-B1*04:01L HLA-DPA1*01:03-B1*04:02L
  REGION 1..12: note = CONT. FROM ABOVE: HLA-DQA1*03:01-B1*03:02L HLA-DPA1*01:03-B1*02: 01L HLA-DQA1*05:05-B1*03:01L HLA-DPA1*01:02-B1*04:01L HLA-DRB1*1 6:01L HLA-DRB1*04:08L HLA-DQA1*02:01-B1*03:03L
LQYGSFCTQLNR

SEQ ID NO: 11626 - protein, 12 aa, Severe acute respiratory syndrome coronavirus 2
  REGION 1..12: note = Table B: HLA-DQA1*05:01-B1*03:01L HLA-DPA1*03:01-B1*105:01L HLA-DQA1*05:05-B1*03:01L HLA-DQA1*02:01-B1*03:03L
SFCTQLNRALTG

SEQ ID NO: 11627 - protein, 13 aa, Severe acute respiratory syndrome coronavirus 2
  REGION 1..13: note = Table B: HLA-DQA1*05:01-B1*03:01L HLA-DRB1*04:03L HLA-DRB1*04:02L HLA-DRB1*04:05L HLA-DQA1*01:02-B1*06:02L HLA-DRB1*01:02L HLA-DPA1*01:03-B1*03:01L HLA-DRB1*12:01L HLA-DPA1*03:01-B1*105:01L HLA-DQA1*05:05-B1*03:01L
  REGION 1..13: note = CONT. FROM ABOVE: HLA-DRB1*14:17L HLA-DRB1*15:03L
TQLNRALTGIAVE

SEQ ID NO: 11628 - protein, 11 aa, Severe acute respiratory syndrome coronavirus 2
  REGION 1..11: note = Table B: HLA-DQA1*05:01-B1*03:01L HLA-DRB1*04:02L HLA-DRB1*14:17L HLA-DRB1*16:01L
NTQEVFAQVKQ

SEQ ID NO: 11629 - protein, 10 aa, Severe acute respiratory syndrome coronavirus 2
  REGION 1..10: note = Table B: HLA-DQA1*05:01-B1*03:01L HLA-DRB1*04:03L HLA-DRB1*13:02L HLA-DRB1*13:03L HLA-DRB1*01:03L HLA-DRB1*04:02L HLA-DRB1*04:05L HLA-DQA1*01:02-B1*06:02L HLA-DRB1*01:02L HLA-DRB4*03:01NL HLA-DRB1*14:01L HLA-DQA1*01-B1*05L
  REGION 1..10: note = CONT. FROM ABOVE: HLA-DRB1*12:01L HLA-DPA1*03:01-B1*105:01L HLA- DQA1*03:01-B1*03:02L HLA-DQA1*05:05-B1*03:01L HLA-DRB1*14:17L HL A-DPA1*01:02-B1*04:01L HLA-DRB1*16:01L HLA-DQA1*01:03-B1*06:01L HLA-DRB1*04:08L HLA-DQA1*02:01-B1*03:03L HLA-DRB1*15:03L
QIYKTPPIKD

SEQ ID NO: 11630 - protein, 14 aa, Severe acute respiratory syndrome coronavirus 2
  REGION 1..14: note = Table B: HLA-DQA1*05:01-B1*03:01L HLA-DRB1*13:02L HLA-DRB1*04:04L HLA-DPA1*01:03-B1*03:01L HLA-DRB1*08:01L HLA-DQA1*05:05-B1*03:19L HLA-DRB1*04:10L HLA-DRB3*01:01L HLA-DRB1*14:54L HLA-DQA1*05:05-B1*03:01L
  REGION 1..14: note = CONT. FROM ABOVE: HLA-DPA1*01:02-B1*04:01L HLA-DRB1*07:01L
TPPIKDFGGFNFSQ

SEQ ID NO: 11631 - protein, 14 aa, Severe acute respiratory syndrome coronavirus 2
  REGION 1..14: note = Table B: HLA-DQA1*05:01-B1*03:01L
DFGGFNFSQILPDP

SEQ ID NO: 11632 - protein, 12 aa, Severe acute respiratory syndrome coronavirus 2
  REGION 1..12: note = Table B: HLA-DQA1*05:01-B1*03:01L HLA-DRB1*01:03L HLA-DRB1*04:05L HLA-DQA1*01:02-B1*06:02L HLA-DRB1*01:02L HLA-DRB4*03:01NL HLA-DQA1*05:05-B1*03:19L HLA-DRB1*12:01L HLA-DPA1*03:01-B1*105:01L HLA-DQA1*05:05-B1*03:01L
  REGION 1..12: note = CONT. FROM ABOVE: HLA-DRB1*10:01L HLA-DRB1*16:01L HLA-DQA1*01:03 -B1*06:01L HLA-DRB1*04:08L
NFSQILPDPSKP

SEQ ID NO: 11633 - protein, 11 aa, Severe acute respiratory syndrome coronavirus 2
  REGION 1..11: note = Table B: HLA-DQA1*05:01-B1*03:01L HLA-DQA1*01:02-B1*06:02L HLA-DRB1*11:02L HLA-DRB1*09:01L HLA-DPA1*02:01-B1*13:01L
IEDLLFNKVTL

SEQ ID NO: 11634 - protein, 10 aa, Severe acute respiratory syndrome coronavirus 2
  REGION 1..10: note = Table B: HLA-DQA1*05:01-B1*03:01L HLA-DRB1*04:03L HLA-DRB1*13:02L HLA-DRB1*13:03L HLA-DRB1*01:03L HLA-DRB1*04:02L HLA-DRB1*04:05L HLA-DQA1*01:02-B1*06:02M HLA-DRB4*03:01NL HLA-DRB1*08:77M HLA-DPA1*01:03-B1*03:01H
  REGION 1..10: note = CONT. FROM ABOVE: HLA-DPA1*03:01-B1*04:02L HLA-DRB1*03:01M HLA-D RB1*14:01L HLA-DRB1*11:02M HLA-DRB1*11:03L HLA-DRB1*11:04L HLA-D RB1*14:02L HLA-DRB1*11:01L HLA-DRB5*01:01L HLA-DQA1*01-B1*05H HL A-DQA1*05:05-B1*03:19H HLA-DQA1*05:01-B1*02:01H HLA-DRB4*01:01M
  REGION 1..10: note = CONT. FROM ABOVE: HLA-DPA1*01:03-B1*04:01M HLA-DQA1*05:05-B1*03: 116M HLA-DPA1*01:03-B1*04:02M HLA-DRB1*12:01M HLA-DPA1*02:01-B1* 13:01L HLA-DPA1*03:01-B1*105:01L HLA-DRB1*14:54L HLA-DPA1*01:03- B1*104:01H HLA-DQA1*05:05-B1*03:01L HLA-DPA1*01:02-B1*04:01L
  REGION 1..10: note = CONT. FROM ABOVE: HLA-DRB1*10:01M HLA-DRB1*16:01H HLA-DRB1*08:02 L HLA-DQA1*02:01-B1*03:03L HLA-DRB1*15:03L
LADAGFIKQY

SEQ ID NO: 11635 - protein, 14 aa, Severe acute respiratory syndrome coronavirus 2
  REGION 1..14: note = Table B: HLA-DQA1*05:01-B1*03:01L HLA-DRB1*04:01L HLA-DRB1*13:03L HLA-DRB1*04:02L HLA-DRB1*04:04L HLA-DRB1*01:01L HLA-DRB1*08:04L HLA-DRB3*02:01L HLA-DRB1*14:01L HLA-DRB1*11:02L HLA-DRB1*11:03L HLA-DRB1*11:04L HLA-DRB1*14:02L HLA-DRB1*08:01L
  REGION 1..14: note = CONT. FROM ABOVE: HLA-DRB1*11:01L HLA-DRB4*01:01L HLA-DPA1*01:03 -B1*04:01L HLA-DRB1*04:10L HLA-DRB1*09:01L HLA-DPA1*01:03-B1*04: 02L HLA-DRB3*01:01L HLA-DPA1*01:02-B1*04:01L HLA-DRB1*07:01L HLA -DRB1*10:01L HLA-DRB1*08:03L HLA-DRB1*15:01L
GFIKQYGDCLGDIA

SEQ ID NO: 11636 - protein, 15 aa, Severe acute respiratory syndrome coronavirus 2
  REGION 1..15: note = Table B: HLA-DQA1*05:01-B1*03:01L HLA-DQA1*05:05-B1*03:01L
IKQYGDCLGDIAARD

SEQ ID NO: 11637 - protein, 14 aa, Severe acute respiratory syndrome coronavirus 2
  REGION 1..14: note = Table B: HLA-DQA1*05:01-B1*03:01L HLA-DRB1*01:03L HLA-DRB1*01:02L HLA-DRB1*04:08L
LGDIAARDLICAQK

SEQ ID NO: 11638 - protein, 14 aa, Severe acute respiratory syndrome coronavirus 2
  REGION 1..14: note = Table B: HLA-DQA1*05:01-B1*03:01L HLA-DRB1*13:03L HLA-DRB1*04:02L HLA-DRB1*04:05L HLA-DRB1*11:02L HLA-DRB1*11:03L HLA-DRB1*14:02L HLA-DQA1*05:05-B1*03:19L HLA-DQA1*05:05-B1*03:116L HLA-DPA1*02:01-B1*13:01L
  REGION 1..14: note = CONT. FROM ABOVE: HLA-DPA1*01:03-B1*104:01L HLA-DQA1*05:05-B1*03 :01L HLA-DRB1*08:02L HLA-DRB1*08:03L HLA-DQA1*02:01-B1*03:03L
ARDLICAQKFNGLT

SEQ ID NO: 11639 - protein, 11 aa, Severe acute respiratory syndrome coronavirus 2
  REGION 1..11: note = Table B: HLA-DQA1*05:01-B1*03:01L HLA-DQA1*01:02-B1*06:02L HLA-DQA1*01-B1*05L HLA-DQA1*05:01-B1*02:01L HLA-DPA1*03:01-B1*105:01L HLA-DQA1*01:03-B1*06:01L
TVLPPLLTDEM

SEQ ID NO: 11640 - protein, 16 aa, Severe acute respiratory syndrome coronavirus 2
  REGION 1..16: note = Table B: HLA-DQA1*05:01-B1*03:01L HLA-DRB1*04:01L HLA-DRB3*02:01L HLA-DPA1*02:01-B1*13:01L HLA-DPA1*01:03-B1*02:01L
LPPLLTDEMIAQYTSA

SEQ ID NO: 11641 - protein, 14 aa, Severe acute respiratory syndrome coronavirus 2
  REGION 1..14: note = Table B: HLA-DQA1*05:01-B1*03:01L HLA-DRB1*13:02L HLA-DRB1*13:03L HLA-DRB1*04:05L HLA-DRB1*01:01L HLA-DPA1*03:01-B1*04:02L HLA-DRB1*14:01L HLA-DRB1*11:03L HLA-DRB1*11:04L HLA-DRB1*14:02L HLA-DRB1*08:01L
  REGION 1..14: note = CONT. FROM ABOVE: HLA-DQA1*05:05-B1*03:19L HLA-DRB1*04:10L HLA-D PA1*03:01-B1*105:01L HLA-DRB1*14:54L HLA-DRB1*08:03L
DEMIAQYTSALLAG

SEQ ID NO: 11642 - protein, 12 aa, Severe acute respiratory syndrome coronavirus 2
  REGION 1..12: note = Table B: HLA-DQA1*05:01-B1*03:01L HLA-DQA1*05:05-B1*03:19L HLA-DQA1*03:01-B1*03:02L HLA-DQA1*05:05-B1*03:01L HLA-DQA1*02:01-B1*03:03L
TSALLAGTITSG

SEQ ID NO: 11643 - protein, 10 aa, Severe acute respiratory syndrome coronavirus 2
  REGION 1..10: note = Table B: HLA-DQA1*05:01-B1*03:01L HLA-DRB1*13:03L HLA-DQA1*01:02-B1*06:02L HLA-DPA1*03:01-B1*04:02L HLA-DRB1*14:02L HLA-DQA1*05:05-B1*03:19L HLA-DQA1*05:01-B1*02:01L HLA-DRB4*01:01L
  REGION 1..10: note = CONT. FROM ABOVE: HLA-DPA1*01:03-B1*04:01L HLA-DPA1*02:01-B1*13: 01L HLA-DPA1*03:01-B1*105:01L HLA-DQA1*01:03-B1*06:01L HLA-DQA1* 02:01-B1*03:03L HLA-DRB1*15:03L
LLAGTITSGW

SEQ ID NO: 11644 - protein, 12 aa, Severe acute respiratory syndrome coronavirus 2
  REGION 1..12: note = Table B: HLA-DQA1*05:01-B1*03:01L HLA-DRB1*13:02L HLA-DRB3*02:01L HLA-DPA1*03:01-B1*04:02L HLA-DRB1*14:01L HLA-DQA1*05:01-B1*02:01L HLA-DPA1*01:02-B1*04:01L
IPFAMQMAYRFN

SEQ ID NO: 11645 - protein, 12 aa, Severe acute respiratory syndrome coronavirus 2
  REGION 1..12: note = Table B: HLA-DQA1*05:01-B1*03:01L HLA-DRB1*04:03L HLA-DRB1*01:03L HLA-DRB1*04:02L HLA-DQA1*01:02-B1*06:02L HLA-DRB1*01:02L HLA-DPA1*03:01-B1*04:02L HLA-DRB1*14:01L HLA-DRB1*08:01L HLA-DQA1*01-B1*05L HLA-DRB1*12:01L
  REGION 1..12: note = CONT. FROM ABOVE: HLA-DPA1*03:01-B1*105:01L HLA-DQA1*03:01-B1*03 :02L HLA-DPA1*01:02-B1*04:01L HLA-DRB1*16:01L HLA-DRB1*04:08L HL A-DQA1*02:01-B1*03:03L HLA-DRB1*15:03L
MAYRFNGIGVTQ

SEQ ID NO: 11646 - protein, 11 aa, Severe acute respiratory syndrome coronavirus 2
  REGION 1..11: note = Table B: HLA-DQA1*05:01-B1*03:01L HLA-DRB1*01:03L HLA-DRB1*04:02L HLA-DRB1*04:05L HLA-DPA1*03:01-B1*105:01L HLA-DPA1*01:02-B1*04:01L HLA-DRB1*16:01L HLA-DRB1*04:08L
YRFNGIGVTQN

SEQ ID NO: 11647 - protein, 10 aa, Severe acute respiratory syndrome coronavirus 2
  REGION 1..10: note = Table B: HLA-DQA1*05:01-B1*03:01L HLA-DRB1*13:03L HLA-DRB1*01:03L HLA-DQA1*01:02-B1*06:02L HLA-DRB1*08:77L HLA-DPA1*01:03-B1*03:01L HLA-DRB1*03:01L HLA-DRB1*14:02L HLA-DQA1*05:05-B1*03:19L HLA-DQA1*05:01-B1*02:01L
  REGION 1..10: note = CONT. FROM ABOVE: HLA-DPA1*01:03-B1*04:01L HLA-DRB1*12:01L HLA-D PA1*03:01-B1*105:01L HLA-DPA1*01:03-B1*104:01L HLA-DRB1*16:01L H LA-DQA1*02:01-B1*03:03L HLA-DRB1*15:03L
GIGVTQNVLY

SEQ ID NO: 11648 - protein, 10 aa, Severe acute respiratory syndrome coronavirus 2
  REGION 1..10: note = Table B: HLA-DQA1*05:01-B1*03:01L HLA-DRB1*04:03L HLA-DPA1*03:01-B1*105:01L HLA-DQA1*03:01-B1*03:02L HLA-DPA1*01:02-B1*04:01L HLA-DQA1*01:03-B1*06:01L HLA-DQA1*02:01-B1*03:03L
QFNSAIGKIQ

SEQ ID NO: 11649 - protein, 14 aa, Severe acute respiratory syndrome coronavirus 2
  REGION 1..14: note = Table B: HLA-DQA1*05:01-B1*03:01L HLA-DRB1*14:04L HLA-DRB1*04:01L HLA-DRB1*13:02L HLA-DQA1*01:02-B1*06:02L HLA-DRB1*01:01L HLA-DRB1*08:04L HLA-DRB1*08:77L HLA-DPA1*01:03-B1*03:01L HLA-DRB1*11:03L HLA-DRB1*14:02L
  REGION 1..14: note = CONT. FROM ABOVE: HLA-DRB1*11:01L HLA-DRB5*01:01L HLA-DQA1*05:05 -B1*03:19L HLA-DRB4*01:01L HLA-DRB1*09:01L HLA-DRB1*12:02L HLA-D PA1*02:01-B1*13:01L HLA-DPA1*03:01-B1*105:01L HLA-DPA1*01:03-B1* 104:01L HLA-DQA1*05:05-B1*03:01L HLA-DRB1*07:01L HLA-DRB1*10:01L
  REGION 1..14: note = CONT. FROM ABOVE: HLA-DQA1*01:03-B1*06:01L HLA-DRB1*08:03L HLA-D RB1*15:03L
IGKIQDSLSSTASA

SEQ ID NO: 11650 - protein, 13 aa, Severe acute respiratory syndrome coronavirus 2
  REGION 1..13: note = Table B: HLA-DQA1*05:01-B1*03:01L HLA-DRB1*04:03L HLA-DRB1*04:02L HLA-DRB1*04:05L HLA-DQA1*01:02-B1*06:02L HLA-DRB4*03:01NL HLA-DQA1*01:01-B1*05:01L HLA-DQA1*05:05-B1*03:19L HLA-DQA1*05:01-B1*02:01L
  REGION 1..13: note = CONT. FROM ABOVE: HLA-DQA1*05:05-B1*03:01L HLA-DRB1*14:17L HLA-D RB1*16:01L HLA-DQA1*01:03-B1*06:01L HLA-DQA1*02:01-B1*03:03L
IQDSLSSTASALG

SEQ ID NO: 11651 - protein, 11 aa, Severe acute respiratory syndrome coronavirus 2
  REGION 1..11: note = Table B: HLA-DQA1*05:01-B1*03:01L HLA-DRB1*13:02L HLA-DRB1*04:05L HLA-DQA1*05:05-B1*03:19L HLA-DRB1*12:02L HLA-DPA1*03:01-B1*105:01L
SLSSTASALGK

SEQ ID NO: 11652 - protein, 13 aa, Severe acute respiratory syndrome coronavirus 2
  REGION 1..13: note = Table B: HLA-DQA1*05:01-B1*03:01L HLA-DRB1*04:01L HLA-DRB1*13:02L HLA-DRB1*08:04L HLA-DRB1*08:77L HLA-DPA1*01:03-B1*03:01L HLA-DRB1*14:01L HLA-DRB1*11:03L HLA-DRB1*11:04L HLA-DRB1*09:01L HLA-DRB1*12:02L
  REGION 1..13: note = CONT. FROM ABOVE: HLA-DPA1*03:01-B1*105:01L HLA-DPA1*01:03-B1*10 4:01L HLA-DQA1*05:05-B1*03:01L HLA-DRB1*07:01L HLA-DRB1*10:01L H LA-DRB1*08:03L HLA-DRB1*15:03L
LGKLQDVVNQNAQ

SEQ ID NO: 11653 - protein, 13 aa, Severe acute respiratory syndrome coronavirus 2
  REGION 1..13: note = Table B: HLA-DQA1*05:01-B1*03:01L HLA-DRB1*04:01L HLA-DRB1*13:02L HLA-DRB1*08:04L HLA-DPA1*01:03-B1*03:01L HLA-DRB1*14:01L HLA-DRB1*11:03L HLA-DRB1*11:04L HLA-DPA1*03:01-B1*105:01L HLA-DQA1*05:05-B1*03:01L
  REGION 1..13: note = CONT. FROM ABOVE: HLA-DRB1*10:01L HLA-DRB1*08:03L HLA-DRB1*15:03 L
GKLQDVVNQNAQA

SEQ ID NO: 11654 - protein, 10 aa, Severe acute respiratory syndrome coronavirus 2
  REGION 1..10: note = Table B: HLA-DQA1*05:01-B1*03:01L HLA-DRB4*03:01NL HLA-DQA1*03:01-B1*03:02L HLA-DQA1*05:05-B1*03:01L HLA-DQA1*01:03-B1*06:01L HLA-DQA1*02:01-B1*03:03L
NAQALNTLVK

SEQ ID NO: 11655 - protein, 11 aa, Severe acute respiratory syndrome coronavirus 2
  REGION 1..11: note = Table B: HLA-DQA1*05:01-B1*03:01L HLA-DRB1*04:05L HLA-DRB1*01:02L HLA-DRB4*03:01NL HLA-DRB1*14:01L HLA-DQA1*05:01-B1*02:01L HLA-DRB1*04:10L HLA-DRB1*14:54L HLA-DRB1*16:01L HLA-DRB1*15:03L
TLVKQLSSNFG

SEQ ID NO: 11656 - protein, 11 aa, Severe acute respiratory syndrome coronavirus 2
  REGION 1..11: note = Table B: HLA-DQA1*05:01-B1*03:01L HLA-DRB1*04:03L HLA-DQA1*01:02-B1*06:02L HLA-DQA1*05:05-B1*03:19L HLA-DQA1*05:01-B1*02:01L HLA-DQA1*03:01-B1*03:02L HLA-DQA1*05:05-B1*03:01L HLA-DRB1*14:17L
  REGION 1..11: note = CONT. FROM ABOVE: HLA-DQA1*01:03-B1*06:01L HLA-DQA1*02:01-B1*03: 03L
SNFGAISSVLN

SEQ ID NO: 11657 - protein, 11 aa, Severe acute respiratory syndrome coronavirus 2
  REGION 1..11: note = Table B: HLA-DQA1*05:01-B1*03:01L HLA-DRB1*04:03L HLA-DRB1*12:01L HLA-DRB1*16:01L HLA-DRB1*15:03L
GAISSVLNDIL

SEQ ID NO: 11658 - protein, 11 aa, Severe acute respiratory syndrome coronavirus 2
  REGION 1..11: note = Table B: HLA-DQA1*05:01-B1*03:01L HLA-DRB1*04:03L HLA-DQA1*01:02-B1*06:02L HLA-DPA1*03:01-B1*105:01L HLA-DRB1*16:01L
ISSVLNDILSR

SEQ ID NO: 11659 - protein, 10 aa, Severe acute respiratory syndrome coronavirus 2
  REGION 1..10: note = Table B: HLA-DQA1*05:01-B1*03:01L HLA-DQA1*01:02-B1*06:02L HLA-DPA1*03:01-B1*105:01L HLA-DQA1*01:03-B1*06:01L HLA-DQA1*02:01-B1*03:03L
ITGRLQSLQT

SEQ ID NO: 11660 - protein, 13 aa, Severe acute respiratory syndrome coronavirus 2
  REGION 1..13: note = Table B: HLA-DQA1*05:01-B1*03:01L HLA-DRB1*13:02L HLA-DRB1*13:03L HLA-DRB1*08:04L HLA-DPA1*01:03-B1*03:01L HLA-DRB1*11:03L HLA-DRB1*11:04L HLA-DQA1*01-B1*05L HLA-DQA1*05:01-B1*02:01L HLA-DRB1*12:02L
  REGION 1..13: note = CONT. FROM ABOVE: HLA-DPA1*03:01-B1*105:01L HLA-DQA1*05:05-B1*03 :01L HLA-DRB1*10:01L HLA-DRB1*08:03L
TGRLQSLQTYVTQ

SEQ ID NO: 11661 - protein, 13 aa, Severe acute respiratory syndrome coronavirus 2
  REGION 1..13: note = Table B: HLA-DQA1*05:01-B1*03:01L HLA-DRB1*04:01L HLA-DRB1*01:01L HLA-DRB1*08:04L HLA-DRB1*11:04L HLA-DQA1*01-B1*05L HLA-DPA1*03:01-B1*105:01L HLA-DQA1*05:05-B1*03:01L HLA-DRB1*10:01L
GRLQSLQTYVTQQ

SEQ ID NO: 11662 - protein, 10 aa, Severe acute respiratory syndrome coronavirus 2
  REGION 1..10: note = Table B: HLA-DQA1*05:01-B1*03:01L HLA-DRB1*04:03L HLA-DQA1*01:02-B1*06:02L HLA-DPA1*03:01-B1*105:01L HLA-DQA1*03:01-B1*03:02L HLA-DQA1*01:03-B1*06:01L HLA-DQA1*02:01-B1*03:03L
VTQQLIRAAE

SEQ ID NO: 11663 - protein, 12 aa, Severe acute respiratory syndrome coronavirus 2
  REGION 1..12: note = Table B: HLA-DQA1*05:01-B1*03:01L
QQLIRAAEIRAS

SEQ ID NO: 11664 - protein, 10 aa, Severe acute respiratory syndrome coronavirus 2
  REGION 1..10: note = Table B: HLA-DQA1*05:01-B1*03:01L HLA-DQA1*01:02-B1*06:02L HLA-DQA1*05:05-B1*03:19L HLA-DPA1*03:01-B1*105:01L HLA-DQA1*03:01-B1*03:02L HLA-DQA1*05:05-B1*03:01L HLA-DQA1*01:03-B1*06:01L HLA-DQA1*02:01-B1*03:03L
IRAAEIRASA

SEQ ID NO: 11665 - protein, 11 aa, Severe acute respiratory syndrome coronavirus 2
  REGION 1..11: note = Table B: HLA-DQA1*05:01-B1*03:01L HLA-DRB1*04:01L HLA-DRB1*04:04L HLA-DRB1*04:05L HLA-DQA1*01:02-B1*06:02L HLA-DRB1*01:02L HLA-DRB1*08:04L HLA-DRB1*14:01L HLA-DRB1*11:03L HLA-DRB1*11:04L HLA-DRB1*11:01L HLA-DQA1*05:05-B1*03:19L
  REGION 1..11: note = CONT. FROM ABOVE: HLA-DRB1*04:10L HLA-DRB1*12:02L HLA-DPA1*03:01 -B1*105:01L HLA-DRB1*14:54L HLA-DRB1*10:01L HLA-DQA1*01:03-B1*06 :01L HLA-DRB1*04:08L HLA-DRB1*08:03L HLA-DRB1*15:03L
IRASANLAATK

SEQ ID NO: 11666 - protein, 14 aa, Severe acute respiratory syndrome coronavirus 2
  REGION 1..14: note = Table B: HLA-DQA1*05:01-B1*03:01L HLA-DRB1*01:02L
LAATKMSECVLGQS

SEQ ID NO: 11667 - protein, 13 aa, Severe acute respiratory syndrome coronavirus 2
  REGION 1..13: note = Table B: HLA-DQA1*05:01-B1*03:01L
ATKMSECVLGQSK

SEQ ID NO: 11668 - protein, 13 aa, Severe acute respiratory syndrome coronavirus 2
  REGION 1..13: note = Table B: HLA-DQA1*05:01-B1*03:01L HLA-DRB1*01:02L HLA-DRB1*04:08L
TKMSECVLGQSKR

SEQ ID NO: 11669 - protein, 10 aa, Severe acute respiratory syndrome coronavirus 2
  REGION 1..10: note = Table B: HLA-DQA1*05:01-B1*03:01L HLA-DRB1*01:03L HLA-DQA1*01:02-B1*06:02L HLA-DRB1*14:01L HLA-DQA1*03:01-B1*03:02L HLA-DRB1*16:01L HLA-DQA1*01:03-B1*06:01L HLA-DQA1*02:01-B1*03:03L
  REGION 1..10: note = CONT. FROM ABOVE: HLA-DRB1*15:03L
VLGQSKRVDF

SEQ ID NO: 11670 - protein, 12 aa, Severe acute respiratory syndrome coronavirus 2
  REGION 1..12: note = Table B: HLA-DQA1*05:01-B1*03:01L HLA-DRB1*04:01L HLA-DRB1*13:03L HLA-DRB1*01:03L HLA-DRB1*04:04L HLA-DRB1*04:05L HLA-DQA1*01:02-B1*06:02L HLA-DRB1*01:02L HLA-DRB4*03:01NL HLA-DRB1*08:04L HLA-DRB1*14:01L HLA-DRB1*11:04L HLA-DRB1*08:01L
  REGION 1..12: note = CONT. FROM ABOVE: HLA-DRB1*04:10L HLA-DRB1*12:01L HLA-DPA1*03:01 -B1*105:01L HLA-DRB1*14:54L HLA-DQA1*05:05-B1*03:01L HLA-DRB1*10 :01L HLA-DRB1*16:01L HLA-DRB1*04:08L HLA-DRB1*15:03L
YHLMSFPQSAPH

SEQ ID NO: 11671 - protein, 10 aa, Severe acute respiratory syndrome coronavirus 2
  REGION 1..10: note = Table B: HLA-DQA1*05:01-B1*03:01L HLA-DRB1*13:03L HLA-DQA1*01:02-B1*06:02L HLA-DPA1*03:01-B1*04:02L HLA-DQA1*01-B1*05L HLA-DQA1*05:05-B1*03:116L HLA-DPA1*03:01-B1*105:01L HLA-DPA1*01:02-B1*04:01L
APHGVVFLHV

SEQ ID NO: 11672 - protein, 12 aa, Severe acute respiratory syndrome coronavirus 2
  REGION 1..12: note = Table B: HLA-DQA1*05:01-B1*03:01L HLA-DRB1*04:03L HLA-DQA1*01:02-B1*06:02L HLA-DRB1*01:02L HLA-DPA1*01:03-B1*03:01L HLA-DRB1*14:01L HLA-DQA1*05:01-B1*02:01L HLA-DPA1*01:03-B1*04:01L
  REGION 1..12: note = CONT. FROM ABOVE: HLA-DPA1*01:03-B1*04:02L HLA-DRB1*12:01L HLA-D RB1*16:01L HLA-DRB1*04:08L HLA-DQA1*02:01-B1*03:03L HLA-DRB1*15: 03L
VVFLHVTYVPAQ

SEQ ID NO: 11673 - protein, 11 aa, Severe acute respiratory syndrome coronavirus 2
  REGION 1..11: note = Table B: HLA-DQA1*05:01-B1*03:01L
TYVPAQEKNFT

SEQ ID NO: 11674 - protein, 14 aa, Severe acute respiratory syndrome coronavirus 2
  REGION 1..14: note = Table B: HLA-DQA1*05:01-B1*03:01L HLA-DQA1*01:02-B1*06:02L HLA-DQA1*05:05-B1*03:01L HLA-DQA1*01:03-B1*06:01L
YVPAQEKNFTTAPA

SEQ ID NO: 11675 - protein, 16 aa, Severe acute respiratory syndrome coronavirus 2
  REGION 1..16: note = Table B: HLA-DQA1*05:01-B1*03:01L HLA-DRB1*13:02L HLA-DRB1*01:03L HLA-DRB1*04:04L HLA-DRB1*01:02L HLA-DPA1*03:01-B1*105:01L HLA-DQA1*05:05-B1*03:01L HLA-DRB1*07:01L HLA-DRB1*04:08L HLA-DRB1*15:03L
VPAQEKNFTTAPAICH

SEQ ID NO: 11676 - protein, 10 aa, Severe acute respiratory syndrome coronavirus 2
  REGION 1..10: note = Table B: HLA-DQA1*05:01-B1*03:01L HLA-DQA1*01:02-B1*06:02L HLA-DQA1*05:05-B1*03:19L HLA-DQA1*03:01-B1*03:02L HLA-DQA1*05:05-B1*03:01L HLA-DQA1*01:03-B1*06:01L HLA-DQA1*02:01-B1*03:03L
TTAPAICHDG

SEQ ID NO: 11677 - protein, 14 aa, Severe acute respiratory syndrome coronavirus 2
  REGION 1..14: note = Table B: HLA-DQA1*05:01-B1*03:01L HLA-DRB1*04:01L HLA-DRB1*04:02L HLA-DRB1*04:05L HLA-DQA1*01:02-B1*06:02L HLA-DRB1*01:01L HLA-DRB4*03:01NL HLA-DRB1*08:77L HLA-DPA1*01:03-B1*03:01L HLA-DRB1*11:03L HLA-DRB1*14:02L
  REGION 1..14: note = CONT. FROM ABOVE: HLA-DRB1*11:01L HLA-DRB5*01:01L HLA-DQA1*05:01 -B1*02:01L HLA-DPA1*03:01-B1*105:01L HLA-DQA1*03:01-B1*03:02L HL A-DRB1*14:54L HLA-DPA1*01:02-B1*04:01L HLA-DRB1*10:01L HLA-DRB1* 08:03L HLA-DQA1*02:01-B1*03:03L
APAICHDGKAHFPR

SEQ ID NO: 11678 - protein, 13 aa, Severe acute respiratory syndrome coronavirus 2
  REGION 1..13: note = Table B: HLA-DQA1*05:01-B1*03:01L HLA-DRB1*13:02L HLA-DQA1*05:05-B1*03:01L HLA-DPA1*01:02-B1*04:01L
VFVSNGTHWFVTQ

SEQ ID NO: 11679 - protein, 13 aa, Severe acute respiratory syndrome coronavirus 2
  REGION 1..13: note = Table B: HLA-DQA1*05:01-B1*03:01L
VSNGTHWFVTQRN

SEQ ID NO: 11680 - protein, 12 aa, Severe acute respiratory syndrome coronavirus 2
  REGION 1..12: note = Table B: HLA-DQA1*05:01-B1*03:01L HLA-DPA1*01:03-B1*03:01L HLA-DPA1*03:01-B1*04:02L HLA-DRB1*14:01L HLA-DRB1*12:01L HLA-DPA1*03:01-B1*105:01L HLA-DRB1*15:03L
GTHWFVTQRNFY

SEQ ID NO: 11681 - protein, 15 aa, Severe acute respiratory syndrome coronavirus 2
  REGION 1..15: note = Table B: HLA-DQA1*05:01-B1*03:01L HLA-DRB3*02:01L HLA-DRB1*08:01L HLA-DQA1*05:05-B1*03:19L HLA-DPA1*01:03-B1*04:01L HLA-DPA1*01:03-B1*04:02L HLA-DQA1*05:05-B1*03:01L
VTQRNFYEPQIITTD

SEQ ID NO: 11682 - protein, 12 aa, Severe acute respiratory syndrome coronavirus 2
  REGION 1..12: note = Table B: HLA-DQA1*05:01-B1*03:01L HLA-DRB1*13:03L HLA-DRB1*04:02L HLA-DRB1*04:05L HLA-DQA1*01:02-B1*06:02L HLA-DRB4*03:01NL HLA-DQA1*05:05-B1*03:19L HLA-DRB1*04:10L HLA-DPA1*03:01-B1*105:01L HLA-DQA1*05:05-B1*03:01L
  REGION 1..12: note = CONT. FROM ABOVE: HLA-DRB1*16:01L HLA-DRB1*04:08L
NFYEPQIITTDN

SEQ ID NO: 11683 - protein, 13 aa, Severe acute respiratory syndrome coronavirus 2
  REGION 1..13: note = Table B: HLA-DQA1*05:01-B1*03:01L HLA-DRB3*02:01L HLA-DPA1*03:01-B1*04:02L HLA-DPA1*03:01-B1*105:01L
YEPQIITTDNTFV

SEQ ID NO: 11684 - protein, 13 aa, Severe acute respiratory syndrome coronavirus 2
  REGION 1..13: note = Table B: HLA-DQA1*05:01-B1*03:01L HLA-DRB1*14:04L HLA-DRB1*04:01L HLA-DRB1*01:03L HLA-DRB1*04:04L HLA-DRB1*01:01L HLA-DRB1*01:02L HLA-DRB1*08:04L HLA-DPA1*01:03-B1*03:01L HLA-DPA1*03:01-B1*04:02L HLA-DRB1*14:02L HLA-DRB1*08:01L
  REGION 1..13: note = CONT. FROM ABOVE: HLA-DRB1*11:01L HLA-DRB5*01:01L HLA-DQA1*05:05 -B1*03:19L HLA-DRB4*01:01L HLA-DRB1*09:01L HLA-DRB3*01:01L HLA-D PA1*03:01-B1*105:01L HLA-DQA1*05:05-B1*03:01L HLA-DRB1*07:01L HL A-DRB1*10:01L HLA-DRB1*04:08L HLA-DRB1*08:03L
EPQIITTDNTFVS

SEQ ID NO: 11685 - protein, 13 aa, Severe acute respiratory syndrome coronavirus 2
  REGION 1..13: note = Table B: HLA-DQA1*05:01-B1*03:01L HLA-DRB1*04:01L HLA-DRB1*01:03L HLA-DRB1*04:04L HLA-DRB1*01:02L HLA-DRB1*08:04L HLA-DPA1*01:03-B1*03:01L HLA-DRB1*03:01L HLA-DRB1*14:02L HLA-DRB5*01:01L HLA-DRB4*01:01L HLA-DRB1*09:01L HLA-DRB3*01:01L
  REGION 1..13: note = CONT. FROM ABOVE: HLA-DQA1*05:05-B1*03:01L HLA-DRB1*07:01L HLA-D RB1*10:01L HLA-DRB1*04:08L HLA-DRB1*08:03L
PQIITTDNTFVSG

SEQ ID NO: 11686 - protein, 12 aa, Severe acute respiratory syndrome coronavirus 2
  REGION 1..12: note = Table B: HLA-DQA1*05:01-B1*03:01L HLA-DQA1*05:05-B1*03:19L HLA-DPA1*03:01-B1*105:01L HLA-DQA1*05:05-B1*03:01L HLA-DQA1*02:01-B1*03:03L
TFVSGNCDVVIG

SEQ ID NO: 11687 - protein, 10 aa, Severe acute respiratory syndrome coronavirus 2
  REGION 1..10: note = Table B: HLA-DQA1*05:01-B1*03:01L HLA-DRB1*04:03L HLA-DRB1*13:03L HLA-DRB1*01:03L HLA-DQA1*01:02-B1*06:02L HLA-DRB1*08:77L HLA-DPA1*01:03-B1*03:01L HLA-DPA1*03:01-B1*04:02L HLA-DRB1*03:01L HLA-DRB1*14:01L
  REGION 1..10: note = CONT. FROM ABOVE: HLA-DRB1*14:02L HLA-DQA1*01-B1*05L HLA-DQA1*05 :05-B1*03:19L HLA-DQA1*05:01-B1*02:01L HLA-DRB4*01:01L HLA-DPA1* 01:03-B1*04:01L HLA-DPA1*01:03-B1*04:02L HLA-DRB1*12:01L HLA-DPA 1*03:01-B1*105:01L HLA-DPA1*01:03-B1*104:01L HLA-DRB1*16:01L
  REGION 1..10: note = CONT. FROM ABOVE: HLA-DQA1*01:03-B1*06:01L HLA-DQA1*02:01-B1*03: 03L HLA-DRB1*15:03L
VIGIVNNTVY

SEQ ID NO: 11688 - protein, 13 aa, Severe acute respiratory syndrome coronavirus 2
  REGION 1..13: note = Table B: HLA-DQA1*05:01-B1*03:01L HLA-DRB1*13:02L HLA-DRB1*13:03L HLA-DRB1*01:03L HLA-DRB1*04:02L HLA-DQA1*01:02-B1*06:02L HLA-DRB1*01:02L HLA-DRB4*03:01NL HLA-DPA1*01:03-B1*03:01L HLA-DPA1*03:01-B1*04:02L
  REGION 1..13: note = CONT. FROM ABOVE: HLA-DQA1*01:01-B1*05:01L HLA-DQA1*05:05-B1*03: 19L HLA-DRB1*04:10L HLA-DRB1*12:01L HLA-DRB1*14:54L HLA-DQA1*05: 05-B1*03:01L HLA-DRB1*14:17L HLA-DPA1*01:02-B1*04:01L HLA-DRB1*0 4:08L HLA-DRB1*15:03L
IVNNTVYDPLQPE

SEQ ID NO: 11689 - protein, 10 aa, Severe acute respiratory syndrome coronavirus 2
  REGION 1..10: note = Table B: HLA-DQA1*05:01-B1*03:01L HLA-DRB1*13:03L HLA-DQA1*01:02-B1*06:02M HLA-DPA1*03:01-B1*04:02L HLA-DQA1*05:01-B1*02:01L HLA-DQA1*05:05-B1*03:116L HLA-DPA1*02:01-B1*13:01L HLA-DPA1*03:01-B1*105:01M
  REGION 1..10: note = CONT. FROM ABOVE: HLA-DPA1*01:02-B1*04:01L HLA-DQA1*01:03-B1*06: 01L HLA-DRB1*15:03L
DPLQPELDSF

SEQ ID NO: 11690 - protein, 13 aa, Severe acute respiratory syndrome coronavirus 2
  REGION 1..13: note = Table B: HLA-DQA1*05:01-B1*03:01L HLA-DRB1*13:02L HLA-DRB1*13:03L HLA-DRB1*01:03L HLA-DRB1*04:04L HLA-DRB1*01:02L HLA-DRB4*03:01NL HLA-DRB1*08:04L HLA-DPA1*03:01-B1*04:02L HLA-DRB1*14:01L HLA-DQA1*01:01-B1*05:01L HLA-DRB1*12:01L
  REGION 1..13: note = CONT. FROM ABOVE: HLA-DPA1*03:01-B1*105:01L HLA-DRB1*14:54L HLA- DRB1*14:17L HLA-DPA1*01:02-B1*04:01L HLA-DRB1*08:03L
QPELDSFKEELDK

SEQ ID NO: 11691 - protein, 13 aa, Severe acute respiratory syndrome coronavirus 2
  REGION 1..13: note = Table B: HLA-DQA1*05:01-B1*03:01L HLA-DRB1*04:03L HLA-DRB1*01:03L HLA-DRB1*04:05L HLA-DQA1*01:02-B1*06:02L HLA-DQA1*01:01-B1*05:01L HLA-DQA1*01-B1*05L HLA-DQA1*05:05-B1*03:19L HLA-DQA1*05:01-B1*02:01L
  REGION 1..13: note = CONT. FROM ABOVE: HLA-DRB1*12:01L HLA-DPA1*03:01-B1*105:01L HLA- DQA1*05:05-B1*03:01L HLA-DRB1*16:01L HLA-DRB1*04:08L HLA-DQA1*02 :01-B1*03:03L
SPDVDLGDISGIN

SEQ ID NO: 11692 - protein, 14 aa, Severe acute respiratory syndrome coronavirus 2
  REGION 1..14: note = Table B: HLA-DQA1*05:01-B1*03:01L HLA-DQA1*01:02-B1*06:02L HLA-DPA1*03:01-B1*105:01L HLA-DQA1*05:05-B1*03:01L HLA-DQA1*01:03-B1*06:01L
VDLGDISGINASVV

SEQ ID NO: 11693 - protein, 14 aa, Severe acute respiratory syndrome coronavirus 2
  REGION 1..14: note = Table B: HLA-DQA1*05:01-B1*03:01L HLA-DRB1*13:02L HLA-DRB1*04:04L HLA-DQA1*01:02-B1*06:02L HLA-DPA1*01:03-B1*03:01L HLA-DRB1*14:01L HLA-DQA1*01:01-B1*05:01L HLA-DRB3*01:01L
  REGION 1..14: note = CONT. FROM ABOVE: HLA-DPA1*02:01-B1*13:01L HLA-DPA1*03:01-B1*105 :01L HLA-DPA1*01:02-B1*04:01L HLA-DRB1*07:01L HLA-DQA1*01:03-B1* 06:01L
IQKEIDRLNEVAKN

SEQ ID NO: 11694 - protein, 14 aa, Severe acute respiratory syndrome coronavirus 2
  REGION 1..14: note = Table B: HLA-DQA1*05:01-B1*03:01L HLA-DRB1*13:03L HLA-DRB1*14:01L HLA-DQA1*01:01-B1*05:01L HLA-DQA1*05:05-B1*03:19L HLA-DRB1*07:01L
VAKNLNESLIDLQE

SEQ ID NO: 11695 - protein, 10 aa, Severe acute respiratory syndrome coronavirus 2
  REGION 1..10: note = Table B: HLA-DQA1*05:01-B1*03:01L HLA-DRB1*04:03L HLA-DRB1*13:02L HLA-DRB1*13:03L HLA-DRB1*01:03L HLA-DRB1*04:02L HLA-DRB1*04:05L HLA-DQA1*01:02-B1*06:02L HLA-DRB4*03:01NL HLA-DRB1*08:77M HLA-DPA1*01:03-B1*03:01H
  REGION 1..10: note = CONT. FROM ABOVE: HLA-DPA1*03:01-B1*04:02L HLA-DRB1*03:01M HLA-D RB1*11:02M HLA-DRB1*11:03L HLA-DRB1*11:04L HLA-DRB1*14:02L HLA-D RB5*01:01L HLA-DQA1*01-B1*05M HLA-DQA1*05:05-B1*03:19H HLA-DQA1* 05:01-B1*02:01H HLA-DRB4*01:01L HLA-DPA1*01:03-B1*04:01M
  REGION 1..10: note = CONT. FROM ABOVE: HLA-DQA1*05:05-B1*03:116L HLA-DPA1*01:03-B1*04 :02L HLA-DRB1*12:01L HLA-DRB1*14:54L HLA-DPA1*01:03-B1*104:01M H LA-DPA1*01:02-B1*04:01L HLA-DRB1*10:01M HLA-DRB1*16:01M HLA-DRB1 *08:02L HLA-DQA1*02:01-B1*03:03L HLA-DRB1*15:03L
LIDLQELGKY

SEQ ID NO: 11696 - protein, 10 aa, Severe acute respiratory syndrome coronavirus 2
  REGION 1..10: note = Table B: HLA-DQA1*05:01-B1*03:01L HLA-DRB1*01:03L HLA-DQA1*01:02-B1*06:02L HLA-DRB1*08:77L HLA-DPA1*01:03-B1*03:01M HLA-DPA1*03:01-B1*04:02L HLA-DRB1*03:01L HLA-DRB1*11:02L HLA-DRB1*14:02L
  REGION 1..10: note = CONT. FROM ABOVE: HLA-DQA1*01-B1*05L HLA-DQA1*05:05-B1*03:19M HL A-DQA1*05:01-B1*02:01M HLA-DRB4*01:01L HLA-DPA1*01:03-B1*04:01L HLA-DQA1*05:05-B1*03:116L HLA-DPA1*01:03-B1*04:02L HLA-DRB1*12:0 1L HLA-DPA1*01:03-B1*104:01M HLA-DRB1*10:01L HLA-DRB1*16:01L
  REGION 1..10: note = CONT. FROM ABOVE: HLA-DRB1*08:02L HLA-DQA1*02:01-B1*03:03L HLA-D RB1*15:03L
LQELGKYEQY

SEQ ID NO: 11697 - protein, 12 aa, Severe acute respiratory syndrome coronavirus 2
  REGION 1..12: note = Table B: HLA-DQA1*05:01-B1*03:01L HLA-DRB1*13:02L HLA-DRB1*01:02L HLA-DRB1*08:04L HLA-DRB1*08:77L HLA-DPA1*01:03-B1*03:01L HLA-DRB1*14:01L HLA-DQA1*05:05-B1*03:19L HLA-DPA1*03:01-B1*105:01L
  REGION 1..12: note = CONT. FROM ABOVE: HLA-DQA1*05:05-B1*03:01L
FDEDDSEPVLKG

SEQ ID NO: 11698 - protein, 13 aa, Severe acute respiratory syndrome coronavirus 2
  REGION 1..13: note = Table B: HLA-DQA1*05:01-B1*03:01L HLA-DQA1*01:02-B1*06:02L HLA-DQA1*01:01-B1*05:01L HLA-DQA1*05:05-B1*03:01L
DEDDSEPVLKGVK

SEQ ID NO: 11699 - protein, 12 aa, Severe acute respiratory syndrome coronavirus 2
  REGION 1..12: note = Table B: HLA-DQA1*05:01-B1*03:01L HLA-DRB1*01:03L HLA-DRB1*04:05L HLA-DRB1*01:02L HLA-DRB1*14:01L HLA-DRB1*04:08L HLA-DRB1*15:03L
IFTIGTVTLKQG

SEQ ID NO: 11700 - protein, 12 aa, Severe acute respiratory syndrome coronavirus 2
  REGION 1..12: note = Table B: HLA-DQA1*05:01-B1*03:01L HLA-DPA1*03:01-B1*105:01L HLA-DQA1*05:05-B1*03:01L
FTIGTVTLKQGE

SEQ ID NO: 11701 - protein, 10 aa, Severe acute respiratory syndrome coronavirus 2
  REGION 1..10: note = Table B: HLA-DQA1*05:01-B1*03:01L HLA-DQA1*03:01-B1*03:02L HLA-DQA1*01:03-B1*06:01L HLA-DQA1*02:01-B1*03:03L
TVTLKQGEIK

SEQ ID NO: 11702 - protein, 12 aa, Severe acute respiratory syndrome coronavirus 2
  REGION 1..12: note = Table B: HLA-DQA1*05:01-B1*03:01L HLA-DQA1*01:02-B1*06:02L HLA-DQA1*03:01-B1*03:02L HLA-DQA1*05:05-B1*03:01L HLA-DQA1*02:01-B1*03:03L
LKQGEIKDATPS

SEQ ID NO: 11703 - protein, 14 aa, Severe acute respiratory syndrome coronavirus 2
  REGION 1..14: note = Table B: HLA-DQA1*05:01-B1*03:01L HLA-DRB1*13:02L HLA-DRB1*01:03L HLA-DRB1*04:05L HLA-DQA1*01:02-B1*06:02L HLA-DRB1*01:02L HLA-DRB4*03:01NL HLA-DRB1*08:04L HLA-DRB1*08:77L HLA-DRB3*02:01L HLA-DPA1*01:03-B1*03:01L
  REGION 1..14: note = CONT. FROM ABOVE: HLA-DPA1*03:01-B1*04:02L HLA-DRB1*14:01L HLA-D RB1*11:03L HLA-DQA1*05:01-B1*02:01L HLA-DRB1*04:10L HLA-DRB1*09: 01L HLA-DRB1*12:01L HLA-DRB1*12:02L HLA-DPA1*02:01-B1*13:01L HLA -DPA1*03:01-B1*105:01L HLA-DRB1*14:54L HLA-DQA1*05:05-B1*03:01L
  REGION 1..14: note = CONT. FROM ABOVE: HLA-DPA1*01:02-B1*04:01L HLA-DRB1*07:01L HLA-D RB1*16:01L HLA-DQA1*01:03-B1*06:01L HLA-DRB1*04:08L HLA-DRB1*15: 03L
TPSDFVRATATIPI

SEQ ID NO: 11704 - protein, 12 aa, Severe acute respiratory syndrome coronavirus 2
  REGION 1..12: note = Table B: HLA-DQA1*05:01-B1*03:01L HLA-DRB1*01:02L
QSASKIITLKKR

SEQ ID NO: 11705 - protein, 13 aa, Severe acute respiratory syndrome coronavirus 2
  REGION 1..13: note = Table B: HLA-DQA1*05:01-B1*03:01L HLA-DRB1*13:02L HLA-DRB1*08:04L HLA-DRB1*14:01L HLA-DRB1*08:01L HLA-DQA1*01-B1*05L HLA-DQA1*05:01-B1*02:01L HLA-DPA1*01:03-B1*104:01L HLA-DQA1*05:05-B1*03:01L
VTVYSHLLLVAAG

SEQ ID NO: 11706 - protein, 14 aa, Severe acute respiratory syndrome coronavirus 2
  REGION 1..14: note = Table B: HLA-DQA1*05:01-B1*03:01L HLA-DRB1*04:02L HLA-DRB1*04:04L HLA-DRB1*04:05L HLA-DRB1*01:02L HLA-DPA1*01:03-B1*03:01L HLA-DRB1*14:01L HLA-DQA1*05:05-B1*03:19L HLA-DQA1*05:01-B1*02:01L
  REGION 1..14: note = CONT. FROM ABOVE: HLA-DRB1*04:10L HLA-DRB1*12:01L HLA-DPA1*02:01 -B1*13:01L HLA-DQA1*03:01-B1*03:02L HLA-DPA1*01:03-B1*104:01L HL A-DQA1*05:05-B1*03:01L HLA-DRB1*14:17L HLA-DRB1*16:01L HLA-DQA1* 01:03-B1*06:01L HLA-DRB1*04:08L HLA-DQA1*02:01-B1*03:03L
SHLLLVAAGLEAPF

SEQ ID NO: 11707 - protein, 10 aa, Severe acute respiratory syndrome coronavirus 2
  REGION 1..10: note = Table B: HLA-DQA1*05:01-B1*03:01L HLA-DQA1*01:02-B1*06:02L HLA-DRB1*08:77L HLA-DPA1*01:03-B1*03:01M HLA-DRB1*03:01L HLA-DRB1*11:02L HLA-DQA1*01-B1*05L HLA-DQA1*05:05-B1*03:19M HLA-DQA1*05:01-B1*02:01M HLA-DRB4*01:01L
  REGION 1..10: note = CONT. FROM ABOVE: HLA-DPA1*01:03-B1*04:01L HLA-DQA1*05:05-B1*03: 116L HLA-DPA1*01:03-B1*104:01M HLA-DRB1*10:01L HLA-DRB1*16:01L H LA-DRB1*15:03L
GLEAPFLYLY

SEQ ID NO: 11708 - protein, 11 aa, Severe acute respiratory syndrome coronavirus 2
  REGION 1..11: note = Table B: HLA-DQA1*05:01-B1*03:01L HLA-DRB1*04:03L HLA-DRB1*13:02L HLA-DRB1*13:03L HLA-DRB1*01:03L HLA-DRB1*04:02L HLA-DQA1*01:02-B1*06:02L HLA-DRB1*01:02L HLA-DRB4*03:01NL HLA-DPA1*03:01-B1*04:02L HLA-DRB1*14:01L
  REGION 1..11: note = CONT. FROM ABOVE: HLA-DPA1*03:01-B1*105:01L HLA-DQA1*05:05-B1*03 :01L HLA-DRB1*14:17L HLA-DRB1*16:01L HLA-DRB1*04:08L
VYFLQSINFVR

SEQ ID NO: 11709 - protein, 12 aa, Severe acute respiratory syndrome coronavirus 2
  REGION 1..12: note = Table B: HLA-DQA1*05:01-B1*03:01L HLA-DRB1*01:03L HLA-DRB1*04:05L HLA-DRB1*01:02L HLA-DRB1*14:01L HLA-DPA1*01:03-B1*04:02L HLA-DPA1*01:03-B1*02:01L HLA-DRB1*04:08L
LQSINFVRIIMR

SEQ ID NO: 11710 - protein, 13 aa, Severe acute respiratory syndrome coronavirus 2
  REGION 1..13: note = Table B: HLA-DQA1*05:01-B1*03:01L HLA-DRB1*13:03L HLA-DRB1*01:03L HLA-DRB4*03:01NL HLA-DRB1*08:77L HLA-DRB3*02:01L HLA-DPA1*01:03-B1*04:01L HLA-DRB1*09:01L HLA-DRB3*01:01L HLA-DRB1*14:17L HLA-DRB1*07:01L HLA-DRB1*04:08L
  REGION 1..13: note = CONT. FROM ABOVE: HLA-DQA1*02:01-B1*03:03L
SKNPLLYDANYFL

SEQ ID NO: 11711 - protein, 16 aa, Severe acute respiratory syndrome coronavirus 2
  REGION 1..16: note = Table B: HLA-DQA1*05:01-B1*03:01L HLA-DRB1*13:02L HLA-DRB1*03:01L HLA-DRB1*11:02L HLA-DRB1*11:04L HLA-DRB1*14:02M HLA-DRB1*08:01L HLA-DRB1*11:01L HLA-DQA1*05:05-B1*03:19L HLA-DRB4*01:01L HLA-DQA1*05:05-B1*03:116L HLA-DRB1*09:01L
  REGION 1..16: note = CONT. FROM ABOVE: HLA-DRB3*01:01L HLA-DPA1*01:03-B1*104:01L HLA- DQA1*05:05-B1*03:01L HLA-DRB1*10:01L HLA-DRB1*08:02L HLA-DRB1*08 :03L HLA-DQA1*02:01-B1*03:03L
NPLLYDANYFLCWHTN

SEQ ID NO: 11712 - protein, 14 aa, Severe acute respiratory syndrome coronavirus 2
  REGION 1..14: note = Table B: HLA-DQA1*05:01-B1*03:01L HLA-DRB1*01:02L HLA-DPA1*01:03-B1*04:02L HLA-DQA1*02:01-B1*03:03L HLA-DRB1*15:03L
TNCYDYCIPYNSVT

SEQ ID NO: 11713 - protein, 10 aa, Severe acute respiratory syndrome coronavirus 2
  REGION 1..10: note = Table B: HLA-DQA1*05:01-B1*03:01L HLA-DRB1*13:03L HLA-DRB1*04:05L HLA-DQA1*01:02-B1*06:02L HLA-DRB1*01:01L HLA-DPA1*03:01-B1*04:02L HLA-DRB1*14:01L HLA-DQA1*01-B1*05L HLA-DQA1*05:05-B1*03:116M HLA-DPA1*02:01-B1*13:01M
  REGION 1..10: note = CONT. FROM ABOVE: HLA-DPA1*03:01-B1*105:01L HLA-DPA1*01:02-B1*04 :01L HLA-DRB1*16:01L HLA-DRB1*08:03L HLA-DRB1*15:03L
IPYNSVTSSI

SEQ ID NO: 11714 - protein, 14 aa, Severe acute respiratory syndrome coronavirus 2
  REGION 1..14: note = Table B: HLA-DQA1*05:01-B1*03:01L HLA-DRB1*13:02L HLA-DQA1*01:02-B1*06:02L HLA-DRB1*01:02L HLA-DRB4*03:01NL HLA-DRB1*14:01L HLA-DRB1*12:01L HLA-DRB1*14:54L HLA-DRB1*16:01L HLA-DQA1*01:03-B1*06:01L HLA-DRB1*15:03L
SSIVITSGDGTTSP

SEQ ID NO: 11715 - protein, 13 aa, Severe acute respiratory syndrome coronavirus 2
  REGION 1..13: note = Table B: HLA-DQA1*05:01-B1*03:01L HLA-DRB1*04:02L HLA-DRB4*03:01NL HLA-DQA1*05:05-B1*03:19L HLA-DQA1*05:05-B1*03:01L
IVITSGDGTTSPI

SEQ ID NO: 11716 - protein, 13 aa, Severe acute respiratory syndrome coronavirus 2
  REGION 1..13: note = Table B: HLA-DQA1*05:01-B1*03:01L HLA-DRB1*13:03L HLA-DRB1*01:03L HLA-DRB1*04:05L HLA-DRB1*01:02L HLA-DRB1*08:04L HLA-DQA1*01:01-B1*05:01L HLA-DRB1*12:01L HLA-DPA1*02:01-B1*13:01L HLA-DPA1*03:01-B1*105:01L
  REGION 1..13: note = CONT. FROM ABOVE: HLA-DRB1*16:01L HLA-DRB1*04:08L HLA-DRB1*08:03 L HLA-DRB1*15:03L
IGGYTEKWESGVK

SEQ ID NO: 11717 - protein, 15 aa, Severe acute respiratory syndrome coronavirus 2
  REGION 1..15: note = Table B: HLA-DQA1*05:01-B1*03:01L HLA-DRB1*01:03L HLA-DRB1*01:02L HLA-DRB1*08:01L HLA-DPA1*03:01-B1*105:01L HLA-DRB1*04:08L
TEKWESGVKDCVVLH

SEQ ID NO: 11718 - protein, 13 aa, Severe acute respiratory syndrome coronavirus 2
  REGION 1..13: note = Table B: HLA-DQA1*05:01-B1*03:01L HLA-DPA1*01:03-B1*03:01L HLA-DQA1*05:05-B1*03:01L HLA-DRB1*15:03L
ESGVKDCVVLHSY

SEQ ID NO: 11719 - protein, 14 aa, Severe acute respiratory syndrome coronavirus 2
  REGION 1..14: note = Table B: HLA-DQA1*05:01-B1*03:01L HLA-DRB1*04:03L HLA-DRB1*01:02L HLA-DQA1*05:05-B1*03:01L
SGVKDCVVLHSYFT

SEQ ID NO: 11720 - protein, 11 aa, Severe acute respiratory syndrome coronavirus 2
  REGION 1..11: note = Table B: HLA-DQA1*05:01-B1*03:01L HLA-DRB1*01:03L HLA-DRB1*12:01L HLA-DQA1*05:05-B1*03:01L
SYFTSDYYQLY

SEQ ID NO: 11721 - protein, 13 aa, Severe acute respiratory syndrome coronavirus 2
  REGION 1..13: note = Table B: HLA-DQA1*05:01-B1*03:01L HLA-DRB1*04:01L HLA-DRB1*13:02L HLA-DRB1*13:03L HLA-DRB1*01:01L HLA-DRB1*08:04L HLA-DRB1*08:77L HLA-DRB3*02:01L HLA-DPA1*01:03-B1*03:01L HLA-DPA1*03:01-B1*04:02L HLA-DRB1*11:04L HLA-DRB1*14:02L
  REGION 1..13: note = CONT. FROM ABOVE: HLA-DQA1*01:01-B1*05:01L HLA-DRB1*08:01L HLA-D RB5*01:01L HLA-DQA1*05:05-B1*03:19L HLA-DRB4*01:01L HLA-DPA1*01: 03-B1*04:01L HLA-DRB1*09:01L HLA-DPA1*01:03-B1*04:02L HLA-DRB1*1 2:02L HLA-DPA1*02:01-B1*13:01L HLA-DPA1*01:03-B1*104:01L
  REGION 1..13: note = CONT. FROM ABOVE: HLA-DPA1*01:02-B1*04:01L HLA-DRB1*07:01L HLA-D RB1*08:03L
YQLYSTQLSTDTG

SEQ ID NO: 11722 - protein, 14 aa, Severe acute respiratory syndrome coronavirus 2
  REGION 1..14: note = Table B: HLA-DQA1*05:01-B1*03:01L HLA-DQA1*05:05-B1*03:19L
QLYSTQLSTDTGVE

SEQ ID NO: 11723 - protein, 11 aa, Severe acute respiratory syndrome coronavirus 2
  REGION 1..11: note = Table B: HLA-DQA1*05:01-B1*03:01L HLA-DRB1*13:02L HLA-DRB1*01:03L HLA-DRB1*04:04L HLA-DQA1*01:02-B1*06:02L HLA-DRB1*01:02L HLA-DRB1*08:04L HLA-DPA1*01:03-B1*03:01L HLA-DRB1*14:01L HLA-DRB1*11:04L HLA-DQA1*01:01-B1*05:01L
  REGION 1..11: note = CONT. FROM ABOVE: HLA-DRB1*08:01L HLA-DPA1*01:03-B1*04:02L HLA-D RB1*12:01L HLA-DRB1*12:02L HLA-DPA1*02:01-B1*13:01L HLA-DRB1*14: 54L HLA-DQA1*05:05-B1*03:01L HLA-DRB1*10:01L HLA-DRB1*08:03L HLA -DRB1*15:03L
FIYNKIVDEPE

SEQ ID NO: 11724 - protein, 12 aa, Severe acute respiratory syndrome coronavirus 2
  REGION 1..12: note = Table B: HLA-DQA1*05:01-B1*03:01L HLA-DRB1*04:01L HLA-DRB1*13:02L HLA-DRB1*04:04L HLA-DRB1*01:02L HLA-DRB1*08:04L HLA-DPA1*01:03-B1*03:01L HLA-DRB1*14:01L HLA-DRB1*11:04L HLA-DRB1*12:02L HLA-DRB3*01:01L HLA-DPA1*03:01-B1*105:01L
  REGION 1..12: note = CONT. FROM ABOVE: HLA-DQA1*05:05-B1*03:01L HLA-DRB1*07:01L HLA-D RB1*10:01L HLA-DQA1*01:03-B1*06:01L HLA-DRB1*08:03L HLA-DRB1*15: 03L
IYNKIVDEPEEH

SEQ ID NO: 11725 - protein, 13 aa, Severe acute respiratory syndrome coronavirus 2
  REGION 1..13: note = Table B: HLA-DQA1*05:01-B1*03:01L HLA-DRB1*04:03L HLA-DRB1*13:03L HLA-DRB1*01:03L HLA-DRB1*04:02L HLA-DRB1*04:05L HLA-DQA1*01:01-B1*05:01L HLA-DRB1*08:01L HLA-DQA1*01-B1*05L HLA-DQA1*05:01-B1*02:01L HLA-DPA1*02:01-B1*13:01L
  REGION 1..13: note = CONT. FROM ABOVE: HLA-DPA1*03:01-B1*105:01L HLA-DQA1*05:05-B1*03 :01L HLA-DRB1*16:01L HLA-DRB1*04:08L
EPEEHVQIHTIDG

SEQ ID NO: 11726 - protein, 12 aa, Severe acute respiratory syndrome coronavirus 2
  REGION 1..12: note = Table B: HLA-DQA1*05:01-B1*03:01L HLA-DRB1*08:04L HLA-DQA1*01:01-B1*05:01L HLA-DRB1*08:01L HLA-DPA1*02:01-B1*13:01L HLA-DQA1*01:03-B1*06:01L
HVQIHTIDGSSG

SEQ ID NO: 11727 - protein, 10 aa, Severe acute respiratory syndrome coronavirus 2
  REGION 1..10: note = Table B: HLA-DQA1*05:01-B1*03:01L HLA-DQA1*01:02-B1*06:02L HLA-DQA1*05:05-B1*03:19L HLA-DQA1*05:05-B1*03:01L HLA-DQA1*01:03-B1*06:01L HLA-DQA1*02:01-B1*03:03L
SSGVVNPVME

SEQ ID NO: 11728 - protein, 10 aa, Severe acute respiratory syndrome coronavirus 2
  REGION 1..10: note = Table B: HLA-DQA1*05:01-B1*03:01L HLA-DRB1*13:03L HLA-DRB1*01:03L HLA-DQA1*01:02-B1*06:02L HLA-DRB1*08:77L HLA-DPA1*01:03-B1*03:01L HLA-DRB1*03:01L HLA-DRB1*14:02L HLA-DQA1*01-B1*05L HLA-DQA1*05:05-B1*03:19L
  REGION 1..10: note = CONT. FROM ABOVE: HLA-DQA1*05:01-B1*02:01L HLA-DRB4*01:01L HLA-D PA1*01:03-B1*04:01L HLA-DQA1*05:05-B1*03:116L HLA-DPA1*01:03-B1* 04:02L HLA-DRB1*12:01L HLA-DPA1*03:01-B1*105:01L HLA-DPA1*01:03- B1*104:01L HLA-DRB1*10:01L HLA-DRB1*16:01L
  REGION 1..10: note = CONT. FROM ABOVE: HLA-DQA1*01:03-B1*06:01L HLA-DQA1*02:01-B1*03: 03L HLA-DRB1*15:03L
VVNPVMEPIY

SEQ ID NO: 11729 - protein, 15 aa, Severe acute respiratory syndrome coronavirus 2
  REGION 1..15: note = Table B: HLA-DQA1*05:01-B1*03:01L HLA-DRB3*02:01L HLA-DPA1*01:03-B1*03:01L HLA-DQA1*05:05-B1*03:19L HLA-DQA1*01:03-B1*06:01L
NPVMEPIYDEPTTTT

SEQ ID NO: 11730 - protein, 14 aa, Severe acute respiratory syndrome coronavirus 2
  REGION 1..14: note = Table B: HLA-DQA1*05:01-B1*03:01L HLA-DRB1*13:02L HLA-DRB1*13:03L HLA-DRB1*01:03L HLA-DRB1*04:02L HLA-DRB1*04:04L HLA-DRB1*04:05L HLA-DQA1*01:02-B1*06:02L HLA-DRB1*01:02L HLA-DRB4*03:01NL HLA-DPA1*01:03-B1*03:01L
  REGION 1..14: note = CONT. FROM ABOVE: HLA-DQA1*01:01-B1*05:01L HLA-DQA1*05:05-B1*03: 19L HLA-DRB1*04:10L HLA-DRB1*12:01L HLA-DPA1*02:01-B1*13:01L HLA -DPA1*03:01-B1*105:01L HLA-DRB1*14:54L HLA-DQA1*05:05-B1*03:01L HLA-DRB1*14:17L HLA-DRB1*10:01L HLA-DRB1*16:01L
  REGION 1..14: note = CONT. FROM ABOVE: HLA-DQA1*01:03-B1*06:01L HLA-DRB1*04:08L HLA-D QA1*02:01-B1*03:03L HLA-DRB1*15:03L
EPIYDEPTTTTSVP

SEQ ID NO: 11731 - protein, 14 aa, Severe acute respiratory syndrome coronavirus 2
  REGION 1..14: note = Table B: HLA-DQA1*05:01-B1*03:01L HLA-DRB1*13:02L HLA-DRB1*13:03L HLA-DRB1*01:03L HLA-DRB1*04:02L HLA-DRB1*04:05L HLA-DQA1*01:02-B1*06:02L HLA-DRB1*01:02L HLA-DRB4*03:01NL HLA-DRB1*08:77L HLA-DPA1*01:03-B1*03:01L
  REGION 1..14: note = CONT. FROM ABOVE: HLA-DQA1*05:05-B1*03:19L HLA-DRB1*04:10L HLA-D RB1*12:01L HLA-DPA1*03:01-B1*105:01L HLA-DQA1*05:05-B1*03:01L HL A-DRB1*14:17L HLA-DRB1*16:01L HLA-DQA1*01:03-B1*06:01L HLA-DQA1* 02:01-B1*03:03L
PIYDEPTTTTSVPL

SEQ ID NO: 11732 - protein, 11 aa, Severe acute respiratory syndrome coronavirus 2
  REGION 1..11: note = Table B: HLA-DQA1*05:01-B1*03:01L HLA-DRB1*04:03L HLA-DRB1*13:02L HLA-DRB1*13:03L HLA-DRB1*01:03L HLA-DRB1*04:02L HLA-DRB1*04:05L HLA-DQA1*01:02-B1*06:02L HLA-DRB4*03:01NL HLA-DRB1*08:77L HLA-DRB3*02:01L HLA-DPA1*01:03-B1*03:01L
  REGION 1..11: note = CONT. FROM ABOVE: HLA-DPA1*03:01-B1*04:02L HLA-DRB1*14:01L HLA-D RB1*14:02L HLA-DQA1*05:05-B1*03:19L HLA-DPA1*01:03-B1*04:01L HLA -DRB1*09:01L HLA-DPA1*01:03-B1*04:02L HLA-DRB1*12:01L HLA-DPA1*0 2:01-B1*13:01L HLA-DPA1*03:01-B1*105:01L
  REGION 1..11: note = CONT. FROM ABOVE: HLA-DQA1*05:05-B1*03:01L HLA-DRB1*14:17L HLA-D PA1*01:02-B1*04:01L HLA-DRB1*07:01L HLA-DRB1*16:01L HLA-DQA1*01: 03-B1*06:01L HLA-DQA1*02:01-B1*03:03L HLA-DRB1*15:03L
YSFVSEETGTL

SEQ ID NO: 11733 - protein, 12 aa, Severe acute respiratory syndrome coronavirus 2
  REGION 1..12: note = Table B: HLA-DQA1*05:01-B1*03:01L HLA-DRB1*13:02L HLA-DRB1*01:03L HLA-DRB1*04:02L HLA-DRB1*04:05L HLA-DQA1*01:02-B1*06:02L HLA-DRB1*01:01L HLA-DRB1*01:02L HLA-DRB4*03:01NL HLA-DRB1*08:77L HLA-DRB1*14:02L
  REGION 1..12: note = CONT. FROM ABOVE: HLA-DQA1*01-B1*05L HLA-DRB1*12:01L HLA-DPA1*03 :01-B1*105:01L HLA-DRB1*14:54L HLA-DQA1*05:05-B1*03:01L HLA-DRB1 *14:17L HLA-DRB1*10:01L HLA-DRB1*04:08L
FVSEETGTLIVN

SEQ ID NO: 11734 - protein, 10 aa, Severe acute respiratory syndrome coronavirus 2
  REGION 1..10: note = Table B: HLA-DQA1*05:01-B1*03:01L HLA-DQA1*01:02-B1*06:02L HLA-DQA1*05:05-B1*03:19L HLA-DQA1*05:01-B1*02:01L HLA-DPA1*03:01-B1*105:01L HLA-DQA1*01:03-B1*06:01L HLA-DQA1*02:01-B1*03:03L HLA-DRB1*15:03L
VNVSLVKPSF

SEQ ID NO: 11735 - protein, 10 aa, Severe acute respiratory syndrome coronavirus 2
  REGION 1..10: note = Table B: HLA-DQA1*05:01-B1*03:01L HLA-DRB1*13:03L HLA-DRB1*01:03L HLA-DQA1*01:02-B1*06:02L HLA-DRB1*08:77L HLA-DPA1*01:03-B1*03:01L HLA-DPA1*03:01-B1*04:02L HLA-DRB1*03:01L HLA-DRB1*14:01L HLA-DRB1*14:02L
  REGION 1..10: note = CONT. FROM ABOVE: HLA-DQA1*01-B1*05L HLA-DQA1*05:05-B1*03:19L HL A-DQA1*05:01-B1*02:01L HLA-DRB4*01:01L HLA-DPA1*01:03-B1*04:01L HLA-DPA1*01:03-B1*04:02L HLA-DRB1*12:01L HLA-DPA1*02:01-B1*13:01 L HLA-DPA1*03:01-B1*105:01L HLA-DPA1*01:03-B1*104:01L
  REGION 1..10: note = CONT. FROM ABOVE: HLA-DQA1*05:05-B1*03:01L HLA-DPA1*01:02-B1*04: 01L HLA-DRB1*10:01L HLA-DRB1*16:01L HLA-DQA1*01:03-B1*06:01L HLA -DQA1*02:01-B1*03:03L HLA-DRB1*15:03L
NVSLVKPSFY

SEQ ID NO: 11736 - protein, 12 aa, Severe acute respiratory syndrome coronavirus 2
  REGION 1..12: note = Table B: HLA-DQA1*05:01-B1*03:01L HLA-DRB1*13:02L HLA-DRB1*04:02L HLA-DRB1*04:05L HLA-DRB1*01:02L HLA-DRB1*08:04L HLA-DRB1*14:01L HLA-DRB1*11:04L HLA-DRB1*11:01L HLA-DRB1*12:01L HLA-DRB3*01:01L HLA-DPA1*02:01-B1*13:01L HLA-DRB1*14:54L
  REGION 1..12: note = CONT. FROM ABOVE: HLA-DRB1*14:17L HLA-DRB1*08:03L HLA-DRB1*15:03 L
KPSFYVYSRVKN

SEQ ID NO: 11737 - protein, 10 aa, Severe acute respiratory syndrome coronavirus 2
  REGION 1..10: note = Table B: HLA-DQA1*05:01-B1*03:01L HLA-DRB1*04:03L HLA-DRB1*01:03L HLA-DQA1*01:02-B1*06:02L HLA-DRB1*01:02L HLA-DPA1*03:01-B1*04:02L HLA-DPA1*01:03-B1*04:01L HLA-DPA1*01:03-B1*04:02L HLA-DRB1*12:01L
  REGION 1..10: note = CONT. FROM ABOVE: HLA-DPA1*03:01-B1*105:01L HLA-DQA1*03:01-B1*03 :02L HLA-DPA1*01:02-B1*04:01L HLA-DRB1*16:01L HLA-DQA1*01:03-B1* 06:01L HLA-DRB1*04:08L HLA-DQA1*02:01-B1*03:03L HLA-DRB1*15:03L
YVYSRVKNLN

SEQ ID NO: 11738 - protein, 11 aa, Severe acute respiratory syndrome coronavirus 2
  REGION 1..11: note = Table B: HLA-DQA1*05:01-B1*03:01L HLA-DRB1*04:03L HLA-DRB1*13:03L HLA-DRB1*01:03L HLA-DRB1*04:02L HLA-DRB1*04:04L HLA-DRB1*04:05L HLA-DRB1*01:02L HLA-DRB4*03:01NL HLA-DRB1*14:01L HLA-DRB1*04:10L HLA-DRB1*12:01L HLA-DQA1*03:01-B1*03:02L
  REGION 1..11: note = CONT. FROM ABOVE: HLA-DRB1*14:54L HLA-DRB1*14:17L HLA-DRB1*16:01 L HLA-DRB1*04:08L HLA-DQA1*02:01-B1*03:03L HLA-DRB1*15:03L
VKNLNSSRVPD

SEQ ID NO: 11739 - protein, 10 aa, Severe acute respiratory syndrome coronavirus 2
  REGION 1..10: note = Table B: HLA-DQA1*05:01-B1*03:01L HLA-DRB1*04:03L HLA-DRB1*13:02L HLA-DRB1*13:03L HLA-DRB1*01:03L HLA-DRB1*04:02L HLA-DQA1*01:02-B1*06:02L HLA-DRB1*01:01L HLA-DRB4*03:01NL HLA-DRB1*11:04L HLA-DQA1*01:01-B1*05:01L HLA-DRB1*08:01L
  REGION 1..10: note = CONT. FROM ABOVE: HLA-DRB5*01:01L HLA-DRB1*12:01L HLA-DPA1*03:01 -B1*105:01L HLA-DQA1*03:01-B1*03:02M HLA-DQA1*05:05-B1*03:01L HL A-DRB1*14:17L HLA-DPA1*01:02-B1*04:01L HLA-DRB1*16:01L HLA-DQA1* 01:03-B1*06:01L HLA-DQA1*02:01-B1*03:03L
GTITVEELKK

SEQ ID NO: 11740 - protein, 10 aa, Severe acute respiratory syndrome coronavirus 2
  REGION 1..10: note = Table B: HLA-DQA1*05:01-B1*03:01L HLA-DRB1*08:77L HLA-DPA1*03:01-B1*04:02L HLA-DQA1*05:05-B1*03:19L HLA-DQA1*05:01-B1*02:01L HLA-DRB4*01:01L HLA-DPA1*01:03-B1*04:01L HLA-DPA1*01:03-B1*104:01L
  REGION 1..10: note = CONT. FROM ABOVE: HLA-DRB1*15:03L
LEQWNLVIGF

SEQ ID NO: 11741 - protein, 10 aa, Severe acute respiratory syndrome coronavirus 2
  REGION 1..10: note = Table B: HLA-DQA1*05:01-B1*03:01L HLA-DRB1*04:03L HLA-DRB1*13:03L HLA-DRB1*01:03L HLA-DQA1*01:02-B1*06:02L HLA-DRB1*08:01L HLA-DRB1*12:01L HLA-DQA1*03:01-B1*03:02L HLA-DRB1*14:17L HLA-DPA1*01:02-B1*04:01L HLA-DRB1*16:01L
  REGION 1..10: note = CONT. FROM ABOVE: HLA-DQA1*01:03-B1*06:01L HLA-DRB1*04:08L HLA-D QA1*02:01-B1*03:03L
LQFAYANRNR

SEQ ID NO: 11742 - protein, 10 aa, Severe acute respiratory syndrome coronavirus 2
  REGION 1..10: note = Table B: HLA-DQA1*05:01-B1*03:01L HLA-DQA1*01:02-B1*06:02L HLA-DPA1*03:01-B1*04:02L HLA-DRB1*14:01L HLA-DRB1*14:02L HLA-DQA1*05:05-B1*03:19L HLA-DQA1*05:01-B1*02:01L HLA-DPA1*01:03-B1*04:01L HLA-DPA1*02:01-B1*13:01L
  REGION 1..10: note = CONT. FROM ABOVE: HLA-DPA1*03:01-B1*105:01L HLA-DQA1*01:03-B1*06 :01L HLA-DQA1*02:01-B1*03:03L HLA-DRB1*15:03L
VLAAVYRINW

SEQ ID NO: 11743 - protein, 15 aa, Severe acute respiratory syndrome coronavirus 2
  REGION 1..15: note = Table B: HLA-DQA1*05:01-B1*03:01L HLA-DRB1*07:01L
LSYFIASFRLFARTR

SEQ ID NO: 11744 - protein, 16 aa, Severe acute respiratory syndrome coronavirus 2
  REGION 1..16: note = Table B: HLA-DQA1*05:01-B1*03:01L HLA-DRB1*04:01L HLA-DRB1*04:03L HLA-DRB1*13:02L HLA-DRB1*04:04L HLA-DRB1*01:01L HLA-DRB1*11:04L HLA-DRB1*08:01L HLA-DRB1*11:01L HLA-DRB3*01:01L HLA-DQA1*05:05-B1*03:01L HLA-DRB1*10:01L
FRLFARTRSMWSFNPE

SEQ ID NO: 11745 - protein, 12 aa, Severe acute respiratory syndrome coronavirus 2
  REGION 1..12: note = Table B: HLA-DQA1*05:01-B1*03:01L HLA-DRB1*04:03L HLA-DRB1*01:03L HLA-DQA1*01:02-B1*06:02L HLA-DRB1*01:02L HLA-DPA1*03:01-B1*105:01L HLA-DRB1*16:01L HLA-DQA1*01:03-B1*06:01L
VPLHGTILTRPL

SEQ ID NO: 11746 - protein, 13 aa, Severe acute respiratory syndrome coronavirus 2
  REGION 1..13: note = Table B: HLA-DQA1*05:01-B1*03:01L HLA-DRB1*04:02L HLA-DRB1*14:01L HLA-DPA1*03:01-B1*105:01L HLA-DQA1*01:03-B1*06:01L
ESELVIGAVILRG

SEQ ID NO: 11747 - protein, 10 aa, Severe acute respiratory syndrome coronavirus 2
  REGION 1..10: note = Table B: HLA-DQA1*05:01-B1*03:01L HLA-DQA1*01:02-B1*06:02L HLA-DQA1*05:05-B1*03:19L HLA-DPA1*03:01-B1*105:01L HLA-DQA1*03:01-B1*03:02L HLA-DQA1*05:05-B1*03:01L HLA-DQA1*01:03-B1*06:01L HLA-DQA1*02:01-B1*03:03L
VIGAVILRGH

SEQ ID NO: 11748 - protein, 11 aa, Severe acute respiratory syndrome coronavirus 2
  REGION 1..11: note = Table B: HLA-DQA1*05:01-B1*03:01L
IGAVILRGHLR

SEQ ID NO: 11749 - protein, 13 aa, Severe acute respiratory syndrome coronavirus 2
  REGION 1..13: note = Table B: HLA-DQA1*05:01-B1*03:01L HLA-DRB1*01:03L HLA-DRB4*03:01NL HLA-DPA1*01:03-B1*03:01L HLA-DQA1*01-B1*05L HLA-DQA1*05:01-B1*02:01L HLA-DRB1*12:01L HLA-DQA1*05:05-B1*03:01L
DLPKEITVATSRT

SEQ ID NO: 11750 - protein, 10 aa, Severe acute respiratory syndrome coronavirus 2
  REGION 1..10: note = Table B: HLA-DQA1*05:01-B1*03:01L HLA-DRB1*04:03L HLA-DRB1*13:02L HLA-DRB1*13:03L HLA-DRB1*01:03L HLA-DQA1*01:02-B1*06:02L HLA-DRB4*03:01NL HLA-DRB1*08:77L HLA-DPA1*01:03-B1*03:01L HLA-DPA1*03:01-B1*04:02L
  REGION 1..10: note = CONT. FROM ABOVE: HLA-DRB1*03:01L HLA-DRB1*14:01L HLA-DRB1*11:02 L HLA-DRB1*14:02L HLA-DRB1*11:01L HLA-DQA1*01-B1*05L HLA-DQA1*05 :05-B1*03:19M HLA-DQA1*05:01-B1*02:01L HLA-DRB4*01:01L HLA-DPA1* 01:03-B1*04:01L HLA-DQA1*05:05-B1*03:116L
  REGION 1..10: note = CONT. FROM ABOVE: HLA-DPA1*01:03-B1*04:02L HLA-DRB1*12:01L HLA-D PA1*02:01-B1*13:01L HLA-DPA1*03:01-B1*105:01L HLA-DPA1*01:03-B1* 104:01L HLA-DQA1*05:05-B1*03:01L HLA-DPA1*01:02-B1*04:01L HLA-DR B1*10:01L HLA-DRB1*16:01L HLA-DQA1*01:03-B1*06:01L
  REGION 1..10: note = CONT. FROM ABOVE: HLA-DRB1*08:02L HLA-DQA1*02:01-B1*03:03L HLA-D RB1*15:03L
VATSRTLSYY

SEQ ID NO: 11751 - protein, 11 aa, Severe acute respiratory syndrome coronavirus 2
  REGION 1..11: note = Table B: HLA-DQA1*05:01-B1*03:01L HLA-DRB1*12:01L HLA-DRB1*04:08L HLA-DRB1*15:03L
YYKLGASQRVA

SEQ ID NO: 11752 - protein, 12 aa, Severe acute respiratory syndrome coronavirus 2
  REGION 1..12: note = Table B: HLA-DQA1*05:01-B1*03:01L HLA-DRB1*04:05L HLA-DQA1*01:02-B1*06:02L HLA-DRB1*14:01L HLA-DQA1*01:01-B1*05:01L HLA-DRB1*08:01L HLA-DQA1*05:05-B1*03:19L HLA-DQA1*05:01-B1*02:01L
  REGION 1..12: note = CONT. FROM ABOVE: HLA-DRB1*04:10L HLA-DPA1*03:01-B1*105:01L HLA- DRB1*14:54L HLA-DQA1*05:05-B1*03:01L
LGASQRVAGDSG

SEQ ID NO: 11753 - protein, 13 aa, Severe acute respiratory syndrome coronavirus 2
  REGION 1..13: note = Table B: HLA-DQA1*05:01-B1*03:01L
GASQRVAGDSGFA

SEQ ID NO: 11754 - protein, 11 aa, Severe acute respiratory syndrome coronavirus 2
  REGION 1..11: note = Table B: HLA-DQA1*05:01-B1*03:01L HLA-DRB1*04:01L HLA-DRB1*04:03L HLA-DRB1*13:02L HLA-DRB1*01:03M HLA-DRB4*03:01NL HLA-DRB1*08:77M HLA-DPA1*01:03-B1*03:01L HLA-DPA1*03:01-B1*04:02L HLA-DRB1*03:01M HLA-DRB1*14:01L
  REGION 1..11: note = CONT. FROM ABOVE: HLA-DRB1*11:02L HLA-DRB1*11:03L HLA-DRB1*14:02 M HLA-DRB1*11:01L HLA-DQA1*01-B1*05L HLA-DRB4*01:01L HLA-DPA1*01 :03-B1*04:01L HLA-DQA1*05:05-B1*03:116L HLA-DPA1*01:03-B1*04:02M HLA-DRB1*12:01L HLA-DPA1*02:01-B1*13:01L
  REGION 1..11: note = CONT. FROM ABOVE: HLA-DPA1*01:03-B1*104:01L HLA-DQA1*05:05-B1*03 :01L HLA-DPA1*01:02-B1*04:01L HLA-DRB1*10:01L HLA-DQA1*01:03-B1* 06:01L HLA-DRB1*08:02L
RVAGDSGFAAY

SEQ ID NO: 11755 - protein, 10 aa, Severe acute respiratory syndrome coronavirus 2
  REGION 1..10: note = Table B: HLA-DQA1*05:01-B1*03:01L HLA-DRB1*13:03L HLA-DQA1*01:02-B1*06:02L HLA-DPA1*01:03-B1*03:01L HLA-DRB1*03:01L HLA-DQA1*05:05-B1*03:19L HLA-DQA1*05:01-B1*02:01L HLA-DPA1*03:01-B1*105:01L
  REGION 1..10: note = CONT. FROM ABOVE: HLA-DRB1*16:01L HLA-DQA1*01:03-B1*06:01L HLA-D QA1*02:01-B1*03:03L
DSGFAAYSRY

SEQ ID NO: 11756 - protein, 10 aa, Severe acute respiratory syndrome coronavirus 2
  REGION 1..10: note = Table B: HLA-DQA1*05:01-B1*03:01L HLA-DRB1*01:03L HLA-DQA1*01:02-B1*06:02L HLA-DQA1*03:01-B1*03:02L HLA-DPA1*01:02-B1*04:01L HLA-DQA1*01:03-B1*06:01L HLA-DQA1*02:01-B1*03:03L
SGFAAYSRYR

SEQ ID NO: 11757 - protein, 13 aa, Severe acute respiratory syndrome coronavirus 2
  REGION 1..13: note = Table B: HLA-DQA1*05:01-B1*03:01L HLA-DRB1*13:02L HLA-DRB1*11:01L HLA-DRB3*01:01L HLA-DPA1*02:01-B1*13:01L HLA-DPA1*03:01-B1*105:01L
FAAYSRYRIGNYK

SEQ ID NO: 11758 - protein, 13 aa, Severe acute respiratory syndrome coronavirus 2
  REGION 1..13: note = Table B: HLA-DQA1*05:01-B1*03:01L HLA-DQA1*01:02-B1*06:02L HLA-DRB1*08:77L HLA-DRB3*02:01L HLA-DPA1*01:03-B1*03:01L HLA-DRB1*03:01L HLA-DRB1*11:03L HLA-DRB1*14:02L HLA-DQA1*01:01-B1*05:01L HLA-DRB1*08:01L HLA-DRB1*11:01L
  REGION 1..13: note = CONT. FROM ABOVE: HLA-DRB5*01:01L HLA-DQA1*05:05-B1*03:19L HLA-D RB4*01:01L HLA-DRB1*12:02L HLA-DRB3*01:01L HLA-DPA1*02:01-B1*13: 01L HLA-DPA1*03:01-B1*105:01L HLA-DQA1*05:05-B1*03:01L HLA-DRB1* 07:01L HLA-DRB1*10:01L HLA-DQA1*01:03-B1*06:01L HLA-DRB1*08:03L
YKLNTDHSSSSDN

SEQ ID NO: 11759 - protein, 12 aa, Severe acute respiratory syndrome coronavirus 2
  REGION 1..12: note = Table B: HLA-DQA1*05:01-B1*03:01L HLA-DRB1*13:03L HLA-DRB1*01:03L HLA-DRB1*04:05L HLA-DRB1*14:02L HLA-DRB1*12:01L HLA-DQA1*05:05-B1*03:01L HLA-DQA1*01:03-B1*06:01L
NTDHSSSSDNIA

SEQ ID NO: 11760 - protein, 12 aa, Severe acute respiratory syndrome coronavirus 2
  REGION 1..12: note = Table B: HLA-DQA1*05:01-B1*03:01L HLA-DRB1*04:03L HLA-DRB1*13:02L HLA-DRB1*01:03L HLA-DRB1*04:05L HLA-DRB1*01:02L HLA-DRB1*08:04L HLA-DPA1*01:03-B1*03:01L HLA-DRB1*14:01L HLA-DRB1*08:01L HLA-DQA1*01-B1*05L HLA-DQA1*05:01-B1*02:01L
  REGION 1..12: note = CONT. FROM ABOVE: HLA-DRB1*12:01L HLA-DPA1*01:03-B1*02:01L HLA-D QA1*05:05-B1*03:01L HLA-DRB1*04:08L
FHLVDFQVTIAE

SEQ ID NO: 11761 - protein, 11 aa, Severe acute respiratory syndrome coronavirus 2
  REGION 1..11: note = Table B: HLA-DQA1*05:01-B1*03:01L HLA-DRB1*13:02L HLA-DPA1*03:01-B1*04:02L HLA-DPA1*01:03-B1*04:01L HLA-DPA1*03:01-B1*105:01L HLA-DQA1*03:01-B1*03:02L HLA-DPA1*01:02-B1*04:01L HLA-DQA1*01:03-B1*06:01L
VDFQVTIAEIL

SEQ ID NO: 11762 - protein, 11 aa, Severe acute respiratory syndrome coronavirus 2
  REGION 1..11: note = Table B: HLA-DQA1*05:01-B1*03:01L HLA-DPA1*03:01-B1*04:02L HLA-DQA1*05:05-B1*03:19L HLA-DRB4*01:01L HLA-DRB1*12:01L
AEILLIIMRTF

SEQ ID NO: 11763 - protein, 12 aa, Severe acute respiratory syndrome coronavirus 2
  REGION 1..12: note = Table B: HLA-DQA1*05:01-B1*03:01L HLA-DRB1*04:03L HLA-DRB1*13:02L HLA-DRB1*04:05L HLA-DRB1*01:02L HLA-DRB1*08:04L HLA-DRB1*14:01L HLA-DRB1*14:02L HLA-DRB1*08:01L HLA-DRB1*11:01L HLA-DRB1*12:01L HLA-DPA1*01:03-B1*02:01L
  REGION 1..12: note = CONT. FROM ABOVE: HLA-DQA1*05:05-B1*03:01L
RTFKVSIWNLDY

SEQ ID NO: 11764 - protein, 12 aa, Severe acute respiratory syndrome coronavirus 2
  REGION 1..12: note = Table B: HLA-DQA1*05:01-B1*03:01L HLA-DRB1*13:02L HLA-DRB1*01:03L HLA-DRB1*04:05L HLA-DRB1*01:02L HLA-DRB1*08:04L HLA-DRB3*02:01L HLA-DPA1*01:03-B1*03:01L HLA-DRB1*14:01L HLA-DQA1*05:05-B1*03:19L HLA-DPA1*01:03-B1*04:01L
  REGION 1..12: note = CONT. FROM ABOVE: HLA-DPA1*01:03-B1*04:02L HLA-DPA1*02:01-B1*13: 01L HLA-DQA1*05:05-B1*03:01L HLA-DRB1*14:17L HLA-DRB1*04:08L
NLDYIINLIIKN

SEQ ID NO: 11765 - protein, 13 aa, Severe acute respiratory syndrome coronavirus 2
  REGION 1..13: note = Table B: HLA-DQA1*05:01-B1*03:01L HLA-DRB3*02:01L HLA-DPA1*01:03-B1*03:01L HLA-DRB1*11:03L HLA-DQA1*05:01-B1*02:01L HLA-DRB1*12:02L HLA-DPA1*03:01-B1*105:01L
INLIIKNLSKSLT

SEQ ID NO: 11766 - protein, 12 aa, Severe acute respiratory syndrome coronavirus 2
  REGION 1..12: note = Table B: HLA-DQA1*05:01-B1*03:01L HLA-DRB1*04:05L HLA-DQA1*01:02-B1*06:02L HLA-DRB3*02:01L HLA-DPA1*03:01-B1*04:02L HLA-DRB1*11:03L HLA-DRB1*11:04L HLA-DRB1*14:02L HLA-DRB1*08:01L HLA-DRB1*11:01L HLA-DRB1*12:02L
  REGION 1..12: note = CONT. FROM ABOVE: HLA-DRB3*01:01L HLA-DPA1*03:01-B1*105:01L HLA- DQA1*03:01-B1*03:02L HLA-DRB1*08:03L
LIIKNLSKSLTE

SEQ ID NO: 11767 - protein, 12 aa, Severe acute respiratory syndrome coronavirus 2
  REGION 1..12: note = Table B: HLA-DQA1*05:01-B1*03:01L HLA-DRB1*04:05L HLA-DQA1*01:02-B1*06:02L HLA-DRB3*02:01L HLA-DPA1*01:03-B1*03:01L HLA-DPA1*03:01-B1*04:02L HLA-DRB1*11:03L HLA-DRB1*11:04L HLA-DRB1*14:02L HLA-DRB1*08:01L
  REGION 1..12: note = CONT. FROM ABOVE: HLA-DRB1*11:01L HLA-DQA1*05:05-B1*03:19L HLA-D RB1*12:02L HLA-DRB3*01:01L HLA-DPA1*02:01-B1*13:01L HLA-DPA1*03: 01-B1*105:01L HLA-DQA1*03:01-B1*03:02L HLA-DQA1*05:05-B1*03:01L HLA-DPA1*01:02-B1*04:01L HLA-DRB1*08:03L
  REGION 1..12: note = CONT. FROM ABOVE: HLA-DQA1*02:01-B1*03:03L
IIKNLSKSLTEN

SEQ ID NO: 11768 - protein, 10 aa, Severe acute respiratory syndrome coronavirus 2
  REGION 1..10: note = Table B: HLA-DQA1*05:01-B1*03:01L HLA-DRB1*13:03L HLA-DRB1*01:03L HLA-DQA1*01:02-B1*06:02L HLA-DRB1*08:77L HLA-DPA1*01:03-B1*03:01L HLA-DRB1*03:01L HLA-DRB1*14:02L HLA-DQA1*01-B1*05L HLA-DQA1*05:05-B1*03:19L
  REGION 1..10: note = CONT. FROM ABOVE: HLA-DQA1*05:01-B1*02:01L HLA-DPA1*01:03-B1*04: 01L HLA-DPA1*01:03-B1*04:02L HLA-DRB1*12:01L HLA-DPA1*03:01-B1*1 05:01L HLA-DPA1*01:03-B1*104:01L HLA-DPA1*01:02-B1*04:01L HLA-DR B1*16:01L HLA-DQA1*01:03-B1*06:01L HLA-DRB1*08:02L
  REGION 1..10: note = CONT. FROM ABOVE: HLA-DQA1*02:01-B1*03:03L HLA-DRB1*15:03L
LSKSLTENKY

SEQ ID NO: 11769 - protein, 14 aa, Severe acute respiratory syndrome coronavirus 2
  REGION 1..14: note = Table B: HLA-DQA1*05:01-B1*03:01L HLA-DRB1*13:02L HLA-DRB1*01:02L HLA-DPA1*01:03-B1*03:01L HLA-DPA1*03:01-B1*04:02L HLA-DQA1*05:05-B1*03:19L HLA-DQA1*05:05-B1*03:01L
LTENKYSQLDEEQP

SEQ ID NO: 11770 - protein, 14 aa, Severe acute respiratory syndrome coronavirus 2
  REGION 1..14: note = Table B: HLA-DQA1*05:01-B1*03:01L HLA-DRB1*13:02L HLA-DPA1*01:03-B1*03:01L HLA-DRB1*14:02L HLA-DQA1*05:05-B1*03:01L HLA-DRB1*08:03L
TENKYSQLDEEQPM

SEQ ID NO: 11771 - protein, 14 aa, Severe acute respiratory syndrome coronavirus 2
  REGION 1..14: note = Table B: HLA-DQA1*05:01-B1*03:01L HLA-DRB1*04:01L HLA-DRB1*13:02L HLA-DRB1*04:04L HLA-DRB3*02:01L HLA-DPA1*01:03-B1*03:01L HLA-DPA1*03:01-B1*04:02L HLA-DRB1*14:01L HLA-DRB1*14:02L HLA-DQA1*05:05-B1*03:19L
  REGION 1..14: note = CONT. FROM ABOVE: HLA-DRB1*09:01L HLA-DPA1*01:03-B1*04:02L HLA-D RB1*12:02L HLA-DRB3*01:01L HLA-DPA1*01:03-B1*104:01L HLA-DRB1*07 :01L HLA-DRB1*10:01L HLA-DRB1*08:03L
ENKYSQLDEEQPME

SEQ ID NO: 11772 - protein, 12 aa, Severe acute respiratory syndrome coronavirus 2
  REGION 1..12: note = Table B: HLA-DQA1*05:01-B1*03:01L HLA-DPA1*03:01-B1*04:02L HLA-DQA1*05:05-B1*03:01L HLA-DQA1*02:01-B1*03:03L
ITLATCELYHYQ

SEQ ID NO: 11773 - protein, 12 aa, Severe acute respiratory syndrome coronavirus 2
  REGION 1..12: note = Table B: HLA-DQA1*05:01-B1*03:01L HLA-DQA1*01:02-B1*06:02L HLA-DQA1*01-B1*05L HLA-DQA1*05:05-B1*03:19L HLA-DQA1*05:01-B1*02:01L HLA-DQA1*05:05-B1*03:01L
EGNSPFHPLADN

SEQ ID NO: 11774 - protein, 10 aa, Severe acute respiratory syndrome coronavirus 2
  REGION 1..10: note = Table B: HLA-DQA1*05:01-B1*03:01L HLA-DRB1*04:03L HLA-DRB1*01:03L HLA-DRB1*04:05L HLA-DQA1*01:02-B1*06:02L HLA-DRB1*01:01L HLA-DRB1*01:02L HLA-DQA1*01:01-B1*05:01L HLA-DQA1*01-B1*05L HLA-DQA1*05:01-B1*02:01L HLA-DRB1*12:01L
  REGION 1..10: note = CONT. FROM ABOVE: HLA-DPA1*02:01-B1*13:01L HLA-DPA1*03:01-B1*105 :01L HLA-DPA1*01:02-B1*04:01L HLA-DRB1*16:01L HLA-DQA1*01:03-B1* 06:01L HLA-DQA1*02:01-B1*03:03L HLA-DRB1*15:03L
PFHPLADNKF

SEQ ID NO: 11775 - protein, 10 aa, Severe acute respiratory syndrome coronavirus 2
  REGION 1..10: note = Table B: HLA-DQA1*05:01-B1*03:01L HLA-DRB1*13:03L HLA-DRB1*04:02L HLA-DQA1*01:02-B1*06:02L HLA-DPA1*03:01-B1*04:02L HLA-DRB1*14:01L HLA-DRB1*08:01L HLA-DRB5*01:01L HLA-DQA1*01-B1*05L HLA-DQA1*05:01-B1*02:01L
  REGION 1..10: note = CONT. FROM ABOVE: HLA-DQA1*05:05-B1*03:116L HLA-DPA1*03:01-B1*10 5:01L HLA-DQA1*03:01-B1*03:02L HLA-DPA1*01:02-B1*04:01L HLA-DRB1 *16:01L HLA-DQA1*02:01-B1*03:03L HLA-DRB1*15:03L
HPLADNKFAL

SEQ ID NO: 11776 - protein, 12 aa, Severe acute respiratory syndrome coronavirus 2
  REGION 1..12: note = Table B: HLA-DQA1*05:01-B1*03:01L HLA-DRB1*01:03L HLA-DQA1*01:02-B1*06:02L HLA-DRB1*01:02L HLA-DQA1*03:01-B1*03:02L HLA-DRB1*04:08L HLA-DQA1*02:01-B1*03:03L HLA-DRB1*15:03L
QFAFACPDGVKH

SEQ ID NO: 11777 - protein, 10 aa, Severe acute respiratory syndrome coronavirus 2
  REGION 1..10: note = Table B: HLA-DQA1*05:01-B1*03:01L HLA-DRB1*13:03L HLA-DRB1*01:03L HLA-DQA1*01:02-B1*06:02L HLA-DRB1*08:77L HLA-DPA1*01:03-B1*03:01L HLA-DRB1*03:01L HLA-DRB1*14:02L HLA-DQA1*01-B1*05L HLA-DQA1*05:05-B1*03:19L
  REGION 1..10: note = CONT. FROM ABOVE: HLA-DQA1*05:01-B1*02:01L HLA-DRB4*01:01L HLA-D PA1*01:03-B1*04:01L HLA-DPA1*01:03-B1*04:02L HLA-DPA1*03:01-B1*1 05:01L HLA-DPA1*01:03-B1*104:01L HLA-DRB1*10:01L HLA-DRB1*16:01L HLA-DQA1*01:03-B1*06:01L HLA-DRB1*08:02L
  REGION 1..10: note = CONT. FROM ABOVE: HLA-DQA1*02:01-B1*03:03L HLA-DRB1*15:03L
ACPDGVKHVY

SEQ ID NO: 11778 - protein, 12 aa, Severe acute respiratory syndrome coronavirus 2
  REGION 1..12: note = Table B: HLA-DQA1*05:01-B1*03:01L HLA-DRB1*13:02L HLA-DQA1*01:02-B1*06:02L HLA-DRB1*01:01L HLA-DRB1*08:04L HLA-DRB1*11:03L HLA-DRB3*01:01L HLA-DRB1*08:03L HLA-DRB1*15:03L
VYQLRARSVSPK

SEQ ID NO: 11779 - protein, 13 aa, Severe acute respiratory syndrome coronavirus 2
  REGION 1..13: note = Table B: HLA-DQA1*05:01-B1*03:01L HLA-DRB1*13:03L HLA-DRB1*01:02L HLA-DRB4*03:01NL HLA-DRB1*08:04L HLA-DRB1*14:01L HLA-DQA1*01:01-B1*05:01L HLA-DRB1*04:10L HLA-DRB1*12:01L HLA-DRB1*14:54L HLA-DRB1*14:17L HLA-DRB1*08:03L HLA-DRB1*15:03L
SPKLFIRQEEVQE

SEQ ID NO: 11780 - protein, 10 aa, Severe acute respiratory syndrome coronavirus 2
  REGION 1..10: note = Table B: HLA-DQA1*05:01-B1*03:01L HLA-DRB1*13:03L HLA-DRB1*01:03L HLA-DQA1*01:02-B1*06:02L HLA-DRB1*08:77L HLA-DPA1*01:03-B1*03:01L HLA-DRB1*03:01L HLA-DRB1*14:02L HLA-DQA1*01-B1*05L HLA-DQA1*05:05-B1*03:19L
  REGION 1..10: note = CONT. FROM ABOVE: HLA-DQA1*05:01-B1*02:01L HLA-DPA1*01:03-B1*04: 01L HLA-DPA1*01:03-B1*04:02L HLA-DRB1*12:01L HLA-DPA1*03:01-B1*1 05:01L HLA-DPA1*01:03-B1*104:01L HLA-DRB1*16:01L HLA-DQA1*01:03- B1*06:01L HLA-DRB1*08:02L HLA-DQA1*02:01-B1*03:03L
  REGION 1..10: note = CONT. FROM ABOVE: HLA-DRB1*15:03L
IRQEEVQELY

SEQ ID NO: 11781 - protein, 15 aa, Severe acute respiratory syndrome coronavirus 2
  REGION 1..15: note = Table B: HLA-DQA1*05:01-B1*03:01L HLA-DRB1*04:04L HLA-DRB1*08:04L HLA-DPA1*01:03-B1*03:01L HLA-DPA1*03:01-B1*04:02L HLA-DRB1*03:01L HLA-DRB1*11:02L HLA-DRB1*14:02L HLA-DRB1*13:01L HLA-DPA1*01:03-B1*04:02L
  REGION 1..15: note = CONT. FROM ABOVE: HLA-DQA1*05:05-B1*03:01L
IVFITLCFTLKRKTE

SEQ ID NO: 11782 - protein, 16 aa, Severe acute respiratory syndrome coronavirus 2
  REGION 1..16: note = Table B: HLA-DQA1*05:01-B1*03:01L HLA-DRB1*04:03L HLA-DRB1*13:03L HLA-DRB3*02:01L HLA-DPA1*01:03-B1*03:01L HLA-DRB1*03:01L HLA-DRB1*11:02L HLA-DRB1*14:02L HLA-DQA1*01-B1*05L HLA-DQA1*05:05-B1*03:19L
  REGION 1..16: note = CONT. FROM ABOVE: HLA-DQA1*05:01-B1*02:01L HLA-DRB1*13:01L HLA-D PA1*01:03-B1*02:01L HLA-DPA1*01:03-B1*104:01L HLA-DQA1*05:05-B1* 03:01L HLA-DRB1*07:01L HLA-DQA1*01:03-B1*06:01L HLA-DRB1*08:02L HLA-DRB1*08:03L HLA-DRB1*15:01L
DPCPIHFYSKWYIRVG

SEQ ID NO: 11783 - protein, 12 aa, Severe acute respiratory syndrome coronavirus 2
  REGION 1..12: note = Table B: HLA-DQA1*05:01-B1*03:01L HLA-DRB1*04:03L HLA-DRB1*13:02L HLA-DRB1*13:03L HLA-DRB1*01:03L HLA-DRB1*04:02L HLA-DRB1*04:05L HLA-DQA1*01:02-B1*06:02L HLA-DRB1*01:02L HLA-DRB1*14:01L HLA-DRB1*11:04L HLA-DRB1*08:01L HLA-DRB1*11:01L
  REGION 1..12: note = CONT. FROM ABOVE: HLA-DRB1*12:01L HLA-DRB3*01:01L HLA-DQA1*03:01 -B1*03:02L HLA-DPA1*01:02-B1*04:01L HLA-DRB1*16:01L HLA-DRB1*04: 08L HLA-DQA1*02:01-B1*03:03L HLA-DRB1*15:03L
YIRVGARKSAPL

SEQ ID NO: 11784 - protein, 14 aa, Severe acute respiratory syndrome coronavirus 2
  REGION 1..14: note = Table B: HLA-DQA1*05:01-B1*03:01L HLA-DRB1*04:01L HLA-DRB1*13:03L HLA-DRB1*01:03L HLA-DRB1*01:01L HLA-DRB4*03:01NL HLA-DRB1*08:04L HLA-DPA1*01:03-B1*03:01L HLA-DRB1*14:01L HLA-DRB1*11:03L HLA-DRB1*11:04L HLA-DRB1*08:01L HLA-DRB1*11:01L
  REGION 1..14: note = CONT. FROM ABOVE: HLA-DQA1*01-B1*05L HLA-DQA1*05:05-B1*03:19L HL A-DRB4*01:01L HLA-DRB1*09:01L HLA-DRB1*12:01L HLA-DPA1*03:01-B1* 105:01L HLA-DQA1*03:01-B1*03:02L HLA-DRB1*14:54L HLA-DQA1*05:05- B1*03:01L HLA-DRB1*10:01L HLA-DRB1*16:01M
  REGION 1..14: note = CONT. FROM ABOVE: HLA-DQA1*01:03-B1*06:01L HLA-DRB1*08:03L HLA-D QA1*02:01-B1*03:03L HLA-DRB1*15:03L
APLIELCVDEAGSK

SEQ ID NO: 11785 - protein, 10 aa, Severe acute respiratory syndrome coronavirus 2
  REGION 1..10: note = Table B: HLA-DQA1*05:01-B1*03:01L HLA-DRB1*13:02L HLA-DRB1*13:03M HLA-DRB1*01:03L HLA-DQA1*01:02-B1*06:02M HLA-DRB4*03:01NL HLA-DRB1*08:77L HLA-DPA1*01:03-B1*03:01L HLA-DPA1*03:01-B1*04:02L HLA-DRB1*03:01L HLA-DRB1*14:01L
  REGION 1..10: note = CONT. FROM ABOVE: HLA-DRB1*14:02L HLA-DRB5*01:01L HLA-DQA1*01-B1 *05L HLA-DQA1*05:05-B1*03:19L HLA-DQA1*05:01-B1*02:01L HLA-DRB4* 01:01L HLA-DPA1*01:03-B1*04:01L HLA-DQA1*05:05-B1*03:116L HLA-DP A1*01:03-B1*04:02L HLA-DRB1*12:01L HLA-DPA1*02:01-B1*13:01L
  REGION 1..10: note = CONT. FROM ABOVE: HLA-DPA1*03:01-B1*105:01L HLA-DPA1*01:03-B1*10 4:01L HLA-DQA1*05:05-B1*03:01L HLA-DPA1*01:02-B1*04:01L HLA-DRB1 *10:01L HLA-DRB1*16:01L HLA-DQA1*01:03-B1*06:01L HLA-DRB1*08:02L HLA-DQA1*02:01-B1*03:03L HLA-DRB1*15:03L
EAGSKSPIQY

SEQ ID NO: 11786 - protein, 12 aa, Severe acute respiratory syndrome coronavirus 2
  REGION 1..12: note = Table B: HLA-DQA1*05:01-B1*03:01L HLA-DPA1*03:01-B1*04:02L HLA-DQA1*05:05-B1*03:19L HLA-DQA1*05:05-B1*03:01L HLA-DQA1*02:01-B1*03:03L
NYTVSCLPFTIN

SEQ ID NO: 11787 - protein, 10 aa, Severe acute respiratory syndrome coronavirus 2
  REGION 1..10: note = Table B: HLA-DQA1*05:01-B1*03:01L HLA-DRB1*13:02L HLA-DRB1*13:03L HLA-DRB1*01:03L HLA-DRB1*04:02L HLA-DQA1*01:02-B1*06:02L HLA-DRB1*01:01L HLA-DRB4*03:01NL HLA-DRB1*11:04L HLA-DRB1*08:01L HLA-DRB5*01:01L HLA-DRB1*12:01L
  REGION 1..10: note = CONT. FROM ABOVE: HLA-DQA1*03:01-B1*03:02M HLA-DQA1*05:05-B1*03: 01L HLA-DRB1*14:17L HLA-DPA1*01:02-B1*04:01L HLA-DRB1*16:01L HLA -DQA1*01:03-B1*06:01L HLA-DQA1*02:01-B1*03:03L
EPKLGSLVVR

SEQ ID NO: 11788 - protein, 12 aa, Severe acute respiratory syndrome coronavirus 2
  REGION 1..12: note = Table B: HLA-DQA1*05:01-B1*03:01L HLA-DRB1*13:02L HLA-DRB1*04:05L HLA-DRB1*01:02L HLA-DRB1*08:04L HLA-DRB1*14:01L HLA-DRB1*14:02L HLA-DRB1*08:01L HLA-DRB1*11:01L HLA-DRB1*12:01L HLA-DRB3*01:01L HLA-DPA1*02:01-B1*13:01L
  REGION 1..12: note = CONT. FROM ABOVE: HLA-DPA1*01:03-B1*02:01L
FYEDFLEYHDVR

SEQ ID NO: 11789 - protein, 12 aa, Severe acute respiratory syndrome coronavirus 2
  REGION 1..12: note = Table B: HLA-DQA1*05:01-B1*03:01L HLA-DRB1*13:02L HLA-DRB1*13:03L HLA-DRB1*01:03L HLA-DRB1*04:04L HLA-DRB1*04:05L HLA-DRB3*02:01L HLA-DPA1*01:03-B1*03:01L HLA-DRB1*14:01L HLA-DRB1*08:01L HLA-DPA1*01:03-B1*04:01L HLA-DRB1*14:17L
  REGION 1..12: note = CONT. FROM ABOVE: HLA-DRB1*04:08L HLA-DRB1*15:01L
EDFLEYHDVRVV

SEQ ID NO: 11790 - protein, 13 aa, Severe acute respiratory syndrome coronavirus 2
  REGION 1..13: note = Table B: HLA-DQA1*05:01-B1*03:01L HLA-DRB1*04:03L HLA-DQA1*01:02-B1*06:02L
SDNGPQNQRNAPR

SEQ ID NO: 11791 - protein, 13 aa, Severe acute respiratory syndrome coronavirus 2
  REGION 1..13: note = Table B: HLA-DQA1*05:01-B1*03:01L HLA-DQA1*01:02-B1*06:02L HLA-DQA1*05:05-B1*03:19L HLA-DQA1*05:01-B1*02:01L HLA-DQA1*05:05-B1*03:01L HLA-DQA1*01:03-B1*06:01L
APRITFGGPSDST

SEQ ID NO: 11792 - protein, 10 aa, Severe acute respiratory syndrome coronavirus 2
  REGION 1..10: note = Table B: HLA-DQA1*05:01-B1*03:01L HLA-DRB1*04:03L HLA-DRB1*01:03L HLA-DRB1*04:02L HLA-DQA1*01:02-B1*06:02L HLA-DPA1*03:01-B1*105:01L HLA-DQA1*03:01-B1*03:02L HLA-DQA1*05:05-B1*03:01L HLA-DRB1*14:17L
  REGION 1..10: note = CONT. FROM ABOVE: HLA-DPA1*01:02-B1*04:01L HLA-DRB1*16:01L HLA-D QA1*01:03-B1*06:01L HLA-DQA1*02:01-B1*03:03L
WFTALTQHGK

SEQ ID NO: 11793 - protein, 10 aa, Severe acute respiratory syndrome coronavirus 2
  REGION 1..10: note = Table B: HLA-DQA1*05:01-B1*03:01L HLA-DRB1*13:03L HLA-DRB1*01:03L HLA-DQA1*03:01-B1*03:02L
FPRGQGVPIN

SEQ ID NO: 11794 - protein, 10 aa, Severe acute respiratory syndrome coronavirus 2
  REGION 1..10: note = Table B: HLA-DQA1*05:01-B1*03:01L HLA-DRB1*04:03L HLA-DRB1*13:03L HLA-DRB1*01:03L HLA-DQA1*01:02-B1*06:02L HLA-DRB4*03:01NL HLA-DRB1*08:77L HLA-DPA1*01:03-B1*03:01L HLA-DPA1*03:01-B1*04:02L HLA-DRB1*03:01L HLA-DRB1*11:02L
  REGION 1..10: note = CONT. FROM ABOVE: HLA-DRB1*14:02L HLA-DQA1*01-B1*05L HLA-DQA1*05 :05-B1*03:19M HLA-DQA1*05:01-B1*02:01M HLA-DRB4*01:01L HLA-DPA1* 01:03-B1*04:01L HLA-DQA1*05:05-B1*03:116L HLA-DPA1*01:03-B1*04:0 2L HLA-DRB1*12:01L HLA-DPA1*02:01-B1*13:01L
  REGION 1..10: note = CONT. FROM ABOVE: HLA-DPA1*03:01-B1*105:01L HLA-DPA1*01:03-B1*10 4:01L HLA-DRB1*10:01L HLA-DRB1*16:01L HLA-DRB1*08:02L HLA-DQA1*0 2:01-B1*03:03L HLA-DRB1*15:03L
NSSPDDQIGY

SEQ ID NO: 11795 - protein, 10 aa, Severe acute respiratory syndrome coronavirus 2
  REGION 1..10: note = Table B: HLA-DQA1*05:01-B1*03:01L HLA-DRB1*13:03L HLA-DRB1*01:03L HLA-DQA1*01:02-B1*06:02M HLA-DRB1*08:77L HLA-DPA1*01:03-B1*03:01L HLA-DRB1*03:01L HLA-DRB1*14:02L HLA-DQA1*01-B1*05L HLA-DQA1*05:05-B1*03:19L
  REGION 1..10: note = CONT. FROM ABOVE: HLA-DQA1*05:01-B1*02:01L HLA-DPA1*01:03-B1*04: 01L HLA-DPA1*03:01-B1*105:01L HLA-DPA1*01:03-B1*104:01L HLA-DRB1 *10:01L HLA-DRB1*16:01L HLA-DRB1*15:03L
SSPDDQIGYY

SEQ ID NO: 11796 - protein, 15 aa, Severe acute respiratory syndrome coronavirus 2
  REGION 1..15: note = Table B: HLA-DQA1*05:01-B1*03:01L HLA-DRB1*04:02L HLA-DRB1*04:04L HLA-DRB1*01:01L HLA-DRB1*03:01L HLA-DRB1*11:03L HLA-DRB1*13:01L HLA-DPA1*02:01-B1*13:01L HLA-DRB1*14:54L HLA-DPA1*01:02-B1*04:01L HLA-DRB1*07:01L
SPDDQIGYYRRATRR

SEQ ID NO: 11797 - protein, 10 aa, Severe acute respiratory syndrome coronavirus 2
  REGION 1..10: note = Table B: HLA-DQA1*05:01-B1*03:01L HLA-DRB1*13:02L HLA-DRB1*01:03L HLA-DQA1*01:02-B1*06:02L HLA-DPA1*01:03-B1*03:01L HLA-DRB1*03:01L HLA-DRB1*14:01L HLA-DRB1*14:02L HLA-DRB1*11:01L HLA-DQA1*05:05-B1*03:19L
  REGION 1..10: note = CONT. FROM ABOVE: HLA-DQA1*05:01-B1*02:01L HLA-DPA1*01:03-B1*04: 01L HLA-DPA1*01:03-B1*04:02L HLA-DRB1*12:01L HLA-DRB1*16:01L HLA -DQA1*01:03-B1*06:01L HLA-DRB1*08:02L HLA-DQA1*02:01-B1*03:03M H LA-DRB1*15:03L
KMKDLSPRWY

SEQ ID NO: 11798 - protein, 12 aa, Severe acute respiratory syndrome coronavirus 2
  REGION 1..12: note = Table B: HLA-DQA1*05:01-B1*03:01L HLA-DQA1*05:05-B1*03:19L HLA-DQA1*01:03-B1*06:01L
EAGLPYGANKDG

SEQ ID NO: 11799 - protein, 12 aa, Severe acute respiratory syndrome coronavirus 2
  REGION 1..12: note = Table B: HLA-DQA1*05:01-B1*03:01L HLA-DRB1*13:02L HLA-DRB1*04:04L HLA-DRB1*04:05L HLA-DQA1*01:02-B1*06:02L HLA-DRB1*01:02L HLA-DRB1*08:77L HLA-DPA1*01:03-B1*03:01L HLA-DRB1*11:03L HLA-DRB1*11:04L HLA-DRB1*14:02L
  REGION 1..12: note = CONT. FROM ABOVE: HLA-DQA1*01:01-B1*05:01L HLA-DQA1*01-B1*05L HL A-DQA1*05:05-B1*03:19L HLA-DRB1*04:10L HLA-DPA1*01:03-B1*04:02L HLA-DRB1*12:02L HLA-DPA1*03:01-B1*105:01L HLA-DRB1*10:01L HLA-DR B1*04:08L HLA-DRB1*15:03L
VATEGALNTPKD

SEQ ID NO: 11800 - protein, 11 aa, Severe acute respiratory syndrome coronavirus 2
  REGION 1..11: note = Table B: HLA-DQA1*05:01-B1*03:01L HLA-DRB1*13:03L HLA-DRB1*01:03L HLA-DRB1*04:02L HLA-DQA1*01:02-B1*06:02L HLA-DRB4*03:01NL HLA-DQA1*01:01-B1*05:01L HLA-DQA1*01-B1*05L HLA-DQA1*05:01-B1*02:01L HLA-DRB1*14:17L HLA-DRB1*16:01L
TEGALNTPKDH

SEQ ID NO: 11801 - protein, 13 aa, Severe acute respiratory syndrome coronavirus 2
  REGION 1..13: note = Table B: HLA-DQA1*05:01-B1*03:01L HLA-DQA1*01:02-B1*06:02L HLA-DRB1*08:01L HLA-DQA1*01:03-B1*06:01L HLA-DQA1*02:01-B1*03:03L
TPKDHIGTRNPAN

SEQ ID NO: 11802 - protein, 11 aa, Severe acute respiratory syndrome coronavirus 2
  REGION 1..11: note = Table B: HLA-DQA1*05:01-B1*03:01L HLA-DRB1*04:03L HLA-DQA1*02:01-B1*03:03L
DHIGTRNPANN

SEQ ID NO: 11803 - protein, 13 aa, Severe acute respiratory syndrome coronavirus 2
  REGION 1..13: note = Table B: HLA-DQA1*05:01-B1*03:01L HLA-DRB1*13:02L HLA-DQA1*01:02-B1*06:02L HLA-DRB1*01:02L HLA-DPA1*01:03-B1*03:01L HLA-DQA1*05:01-B1*02:01L HLA-DRB1*04:10L HLA-DRB1*12:01L HLA-DPA1*02:01-B1*13:01L
  REGION 1..13: note = CONT. FROM ABOVE: HLA-DPA1*01:03-B1*104:01L HLA-DQA1*05:05-B1*03 :01L HLA-DQA1*01:03-B1*06:01L
IGTRNPANNAAIV

SEQ ID NO: 11804 - protein, 11 aa, Severe acute respiratory syndrome coronavirus 2
  REGION 1..11: note = Table B: HLA-DQA1*05:01-B1*03:01L HLA-DRB1*01:03L HLA-DRB1*08:77L HLA-DPA1*01:03-B1*03:01L HLA-DPA1*03:01-B1*04:02L HLA-DRB1*14:01L HLA-DRB1*14:02L HLA-DQA1*05:05-B1*03:19L HLA-DQA1*05:01-B1*02:01L
  REGION 1..11: note = CONT. FROM ABOVE: HLA-DPA1*01:03-B1*04:01L HLA-DPA1*03:01-B1*105 :01L HLA-DPA1*01:02-B1*04:01L HLA-DRB1*16:01L HLA-DRB1*15:03L
LPQGTTLPKGF

SEQ ID NO: 11805 - protein, 14 aa, Severe acute respiratory syndrome coronavirus 2
  REGION 1..14: note = Table B: HLA-DQA1*05:01-B1*03:01L HLA-DQA1*01:02-B1*06:02L HLA-DRB1*01:02L HLA-DRB1*08:01L HLA-DQA1*01:03-B1*06:01L HLA-DRB1*04:08L
GTTLPKGFYAEGSR

SEQ ID NO: 11806 - protein, 13 aa, Severe acute respiratory syndrome coronavirus 2
  REGION 1..13: note = Table B: HLA-DQA1*05:01-B1*03:01L HLA-DQA1*01:02-B1*06:02L HLA-DQA1*01:03-B1*06:01L
TLPKGFYAEGSRG

SEQ ID NO: 11807 - protein, 13 aa, Severe acute respiratory syndrome coronavirus 2
  REGION 1..13: note = Table B: HLA-DQA1*05:01-B1*03:01L HLA-DRB1*04:03L HLA-DRB1*13:03L HLA-DRB1*01:03L HLA-DRB1*04:02L HLA-DRB1*04:05L HLA-DQA1*01:02-B1*06:02L HLA-DRB1*01:02L HLA-DRB4*03:01NL HLA-DRB1*08:01L HLA-DRB1*04:10L HLA-DRB1*12:01L HLA-DRB1*14:17L
  REGION 1..13: note = CONT. FROM ABOVE: HLA-DRB1*16:01L HLA-DRB1*04:08L
LPKGFYAEGSRGG

SEQ ID NO: 11808 - protein, 11 aa, Severe acute respiratory syndrome coronavirus 2
  REGION 1..11: note = Table B: HLA-DQA1*05:01-B1*03:01L HLA-DRB1*04:01L HLA-DRB1*04:04L HLA-DRB1*04:05L HLA-DQA1*01:02-B1*06:02L HLA-DRB1*01:01L HLA-DRB1*01:02L HLA-DRB4*03:01NL HLA-DRB1*14:01L HLA-DRB1*11:03L HLA-DRB1*11:04L HLA-DRB1*14:02L HLA-DRB1*11:01L
  REGION 1..11: note = CONT. FROM ABOVE: HLA-DQA1*05:05-B1*03:19L HLA-DRB1*04:10L HLA-D RB1*12:01L HLA-DRB1*14:54L HLA-DQA1*05:05-B1*03:01L HLA-DRB1*10: 01L HLA-DRB1*16:01L HLA-DRB1*04:08L HLA-DQA1*02:01-B1*03:03L HLA -DRB1*15:03L
FYAEGSRGGSQ

SEQ ID NO: 11809 - protein, 13 aa, Severe acute respiratory syndrome coronavirus 2
  REGION 1..13: note = Table B: HLA-DQA1*05:01-B1*03:01L HLA-DQA1*05:05-B1*03:01L
YAEGSRGGSQASS

SEQ ID NO: 11810 - protein, 12 aa, Severe acute respiratory syndrome coronavirus 2
  REGION 1..12: note = Table B: HLA-DQA1*05:01-B1*03:01L HLA-DQA1*01:02-B1*06:02L HLA-DQA1*01:03-B1*06:01L HLA-DRB1*04:08L HLA-DQA1*02:01-B1*03:03L
EGSRGGSQASSR

SEQ ID NO: 11811 - protein, 12 aa, Severe acute respiratory syndrome coronavirus 2
  REGION 1..12: note = Table B: HLA-DQA1*05:01-B1*03:01L HLA-DQA1*01:02-B1*06:02L HLA-DRB1*01:02L HLA-DQA1*05:05-B1*03:19L HLA-DQA1*01:03-B1*06:01L HLA-DRB1*04:08L HLA-DQA1*02:01-B1*03:03L
GSRGGSQASSRS

SEQ ID NO: 11812 - protein, 12 aa, Severe acute respiratory syndrome coronavirus 2
  REGION 1..12: note = Table B: HLA-DQA1*05:01-B1*03:01L HLA-DRB1*01:03L HLA-DQA1*02:01-B1*03:03L
GGSQASSRSSSR

SEQ ID NO: 11813 - protein, 12 aa, Severe acute respiratory syndrome coronavirus 2
  REGION 1..12: note = Table B: HLA-DQA1*05:01-B1*03:01L HLA-DQA1*02:01-B1*03:03L
NSSRNSTPGSSR

SEQ ID NO: 11814 - protein, 12 aa, Severe acute respiratory syndrome coronavirus 2
  REGION 1..12: note = Table B: HLA-DQA1*05:01-B1*03:01L HLA-DQA1*03:01-B1*03:02L HLA-DQA1*02:01-B1*03:03L
NSTPGSSRGTSP

SEQ ID NO: 11815 - protein, 12 aa, Severe acute respiratory syndrome coronavirus 2
  REGION 1..12: note = Table B: HLA-DQA1*05:01-B1*03:01L HLA-DQA1*05:05-B1*03:01L HLA-DQA1*02:01-B1*03:03L
TPGSSRGTSPAR

SEQ ID NO: 11816 - protein, 13 aa, Severe acute respiratory syndrome coronavirus 2
  REGION 1..13: note = Table B: HLA-DQA1*05:01-B1*03:01L HLA-DQA1*01:02-B1*06:02L HLA-DQA1*03:01-B1*03:02L HLA-DQA1*05:05-B1*03:01L HLA-DQA1*01:03-B1*06:01L HLA-DQA1*02:01-B1*03:03L
SSRGTSPARMAGN

SEQ ID NO: 11817 - protein, 11 aa, Severe acute respiratory syndrome coronavirus 2
  REGION 1..11: note = Table B: HLA-DQA1*05:01-B1*03:01L HLA-DRB1*04:03L HLA-DQA1*01:02-B1*06:02L HLA-DQA1*03:01-B1*03:02L HLA-DQA1*05:05-B1*03:01L HLA-DQA1*01:03-B1*06:01L HLA-DQA1*02:01-B1*03:03L
DAALALLLLDR

SEQ ID NO: 11818 - protein, 15 aa, Severe acute respiratory syndrome coronavirus 2
  REGION 1..15: note = Table B: HLA-DQA1*05:01-B1*03:01L HLA-DRB1*01:01L HLA-DRB1*11:04L HLA-DRB3*01:01L HLA-DRB1*10:01L
LDRLNQLESKMSGKG

SEQ ID NO: 11819 - protein, 14 aa, Severe acute respiratory syndrome coronavirus 2
  REGION 1..14: note = Table B: HLA-DQA1*05:01-B1*03:01L HLA-DQA1*01:02-B1*06:02L HLA-DRB1*08:01L HLA-DQA1*03:01-B1*03:02L HLA-DQA1*02:01-B1*03:03L
LESKMSGKGQQQQG

SEQ ID NO: 11820 - protein, 13 aa, Severe acute respiratory syndrome coronavirus 2
  REGION 1..13: note = Table B: HLA-DQA1*05:01-B1*03:01L HLA-DRB1*01:02L
GKGQQQQGQTVTK

SEQ ID NO: 11821 - protein, 12 aa, Severe acute respiratory syndrome coronavirus 2
  REGION 1..12: note = Table B: HLA-DQA1*05:01-B1*03:01L HLA-DRB1*04:03L HLA-DRB1*01:02L
GQQQQGQTVTKK

SEQ ID NO: 11822 - protein, 14 aa, Severe acute respiratory syndrome coronavirus 2
  REGION 1..14: note = Table B: HLA-DQA1*05:01-B1*03:01L HLA-DRB1*04:04L HLA-DQA1*01:02-B1*06:02L HLA-DRB1*01:02L HLA-DRB1*08:04L HLA-DRB1*14:01L HLA-DRB1*11:04L HLA-DQA1*01:01-B1*05:01L HLA-DRB1*11:01L HLA-DRB1*04:10L HLA-DRB1*12:01L HLA-DRB3*01:01L
  REGION 1..14: note = CONT. FROM ABOVE: HLA-DPA1*02:01-B1*13:01L HLA-DRB1*16:01L HLA-D QA1*01:03-B1*06:01L HLA-DRB1*08:03L HLA-DRB1*15:03L
GQTVTKKSAAEASK

SEQ ID NO: 11823 - protein, 13 aa, Severe acute respiratory syndrome coronavirus 2
  REGION 1..13: note = Table B: HLA-DQA1*05:01-B1*03:01L HLA-DRB1*01:03L HLA-DRB1*04:05L HLA-DQA1*01:02-B1*06:02L HLA-DRB1*01:02L HLA-DRB1*08:01L HLA-DRB1*12:01L HLA-DRB1*16:01L HLA-DQA1*01:03-B1*06:01L HLA-DQA1*02:01-B1*03:03L
VTKKSAAEASKKP

SEQ ID NO: 11824 - protein, 15 aa, Severe acute respiratory syndrome coronavirus 2
  REGION 1..15: note = Table B: HLA-DQA1*05:01-B1*03:01L HLA-DRB1*13:02L HLA-DQA1*01:02-B1*06:02L HLA-DPA1*01:03-B1*03:01L HLA-DRB1*08:01L HLA-DRB1*11:01L HLA-DQA1*03:01-B1*03:02L HLA-DPA1*01:03-B1*104:01L HLA-DPA1*01:02-B1*04:01L
  REGION 1..15: note = CONT. FROM ABOVE: HLA-DRB1*16:01L HLA-DQA1*01:03-B1*06:01L HLA-D RB1*04:08L HLA-DRB1*15:03L
KPRQKRTATKAYNVT

SEQ ID NO: 11825 - protein, 12 aa, Severe acute respiratory syndrome coronavirus 2
  REGION 1..12: note = Table B: HLA-DQA1*05:01-B1*03:01L HLA-DRB1*04:05L HLA-DRB1*07:01L HLA-DRB1*04:08L
KAYNVTQAFGRR

SEQ ID NO: 11826 - protein, 13 aa, Severe acute respiratory syndrome coronavirus 2
  REGION 1..13: note = Table B: HLA-DQA1*05:01-B1*03:01L
AYNVTQAFGRRGP

SEQ ID NO: 11827 - protein, 12 aa, Severe acute respiratory syndrome coronavirus 2
  REGION 1..12: note = Table B: HLA-DQA1*05:01-B1*03:01L HLA-DRB1*01:03L HLA-DRB1*04:02L HLA-DQA1*01:02-B1*06:02L HLA-DRB1*01:02L HLA-DRB1*08:01L HLA-DQA1*03:01-B1*03:02L HLA-DRB1*14:17L HLA-DRB1*16:01L HLA-DQA1*01:03-B1*06:01L
  REGION 1..12: note = CONT. FROM ABOVE: HLA-DQA1*02:01-B1*03:03L
NVTQAFGRRGPE

SEQ ID NO: 11828 - protein, 12 aa, Severe acute respiratory syndrome coronavirus 2
  REGION 1..12: note = Table B: HLA-DQA1*05:01-B1*03:01L HLA-DQA1*01:02-B1*06:02L HLA-DQA1*03:01-B1*03:02L HLA-DQA1*01:03-B1*06:01L HLA-DQA1*02:01-B1*03:03L
VTQAFGRRGPEQ

SEQ ID NO: 11829 - protein, 14 aa, Severe acute respiratory syndrome coronavirus 2
  REGION 1..14: note = Table B: HLA-DQA1*05:01-B1*03:01L
RGPEQTQGNFGDQE

SEQ ID NO: 11830 - protein, 14 aa, Severe acute respiratory syndrome coronavirus 2
  REGION 1..14: note = Table B: HLA-DQA1*05:01-B1*03:01L HLA-DRB1*01:03L HLA-DRB1*04:02L HLA-DRB1*04:05L HLA-DQA1*01:02-B1*06:02L HLA-DRB1*01:02L HLA-DPA1*01:03-B1*03:01L HLA-DPA1*03:01-B1*04:02L HLA-DQA1*05:05-B1*03:19L
  REGION 1..14: note = CONT. FROM ABOVE: HLA-DRB1*12:01L HLA-DPA1*02:01-B1*13:01L HLA-D PA1*03:01-B1*105:01L HLA-DRB1*04:08L HLA-DRB1*15:03L
GPEQTQGNFGDQEL

SEQ ID NO: 11831 - protein, 12 aa, Severe acute respiratory syndrome coronavirus 2
  REGION 1..12: note = Table B: HLA-DQA1*05:01-B1*03:01L HLA-DRB1*13:03L HLA-DRB1*01:03L HLA-DRB1*04:02L HLA-DQA1*01:02-B1*06:02L HLA-DPA1*01:03-B1*03:01L HLA-DRB1*14:01L HLA-DQA1*01:01-B1*05:01L HLA-DQA1*05:05-B1*03:19L
  REGION 1..12: note = CONT. FROM ABOVE: HLA-DPA1*01:03-B1*04:02L HLA-DRB1*12:01L HLA-D PA1*03:01-B1*105:01L HLA-DQA1*05:05-B1*03:01L HLA-DPA1*01:02-B1* 04:01L
FGDQELIRQGTD

SEQ ID NO: 11832 - protein, 14 aa, Severe acute respiratory syndrome coronavirus 2
  REGION 1..14: note = Table B: HLA-DQA1*05:01-B1*03:01L HLA-DRB1*04:02L HLA-DPA1*01:03-B1*03:01L HLA-DRB3*01:01L HLA-DPA1*03:01-B1*105:01L HLA-DQA1*01:03-B1*06:01L
ELIRQGTDYKHWPQ

SEQ ID NO: 11833 - protein, 13 aa, Severe acute respiratory syndrome coronavirus 2
  REGION 1..13: note = Table B: HLA-DQA1*05:01-B1*03:01L HLA-DRB1*04:02L HLA-DRB1*04:05L HLA-DQA1*01:02-B1*06:02L HLA-DRB1*01:02L HLA-DRB4*03:01NL HLA-DQA1*01-B1*05L HLA-DQA1*05:01-B1*02:01L HLA-DRB1*04:10L HLA-DRB1*12:01L HLA-DRB1*14:54L
  REGION 1..13: note = CONT. FROM ABOVE: HLA-DQA1*05:05-B1*03:01L HLA-DRB1*16:01L HLA-D RB1*15:03L
WPQIAQFAPSASA

SEQ ID NO: 11834 - protein, 12 aa, Severe acute respiratory syndrome coronavirus 2
  REGION 1..12: note = Table B: HLA-DQA1*05:01-B1*03:01L HLA-DRB1*13:03L HLA-DPA1*03:01-B1*04:02L HLA-DRB1*11:04L HLA-DRB1*11:01L HLA-DQA1*05:05-B1*03:19L HLA-DPA1*01:03-B1*04:02L HLA-DQA1*05:05-B1*03:01L HLA-DPA1*01:02-B1*04:01L
  REGION 1..12: note = CONT. FROM ABOVE: HLA-DRB1*16:01L HLA-DRB1*04:08L HLA-DRB1*08:03 L HLA-DRB1*15:03L
SAFFGMSRIGME

SEQ ID NO: 11835 - protein, 13 aa, Severe acute respiratory syndrome coronavirus 2
  REGION 1..13: note = Table B: HLA-DQA1*05:01-B1*03:01L HLA-DRB1*13:02L HLA-DRB1*11:03L HLA-DRB1*11:04L HLA-DQA1*01:01-B1*05:01L HLA-DRB1*08:01L HLA-DRB1*12:02L HLA-DPA1*03:01-B1*105:01L HLA-DPA1*01:03-B1*104:01L HLA-DQA1*05:05-B1*03:01L
  REGION 1..13: note = CONT. FROM ABOVE: HLA-DRB1*07:01L HLA-DRB1*10:01L HLA-DQA1*01:03 -B1*06:01L HLA-DRB1*15:03L
GMSRIGMEVTPSG

SEQ ID NO: 11836 - protein, 10 aa, Severe acute respiratory syndrome coronavirus 2
  REGION 1..10: note = Table B: HLA-DQA1*05:01-B1*03:01L HLA-DRB1*13:03L HLA-DQA1*01:02-B1*06:02L HLA-DRB1*08:77L HLA-DPA1*01:03-B1*03:01L HLA-DRB1*03:01L HLA-DRB1*11:02L HLA-DRB1*14:02L HLA-DQA1*01-B1*05L HLA-DQA1*05:05-B1*03:19L
  REGION 1..10: note = CONT. FROM ABOVE: HLA-DQA1*05:01-B1*02:01L HLA-DRB4*01:01L HLA-D PA1*01:03-B1*04:01L HLA-DPA1*03:01-B1*105:01L HLA-DPA1*01:03-B1* 104:01L HLA-DRB1*10:01L HLA-DRB1*16:01L HLA-DQA1*02:01-B1*03:03L HLA-DRB1*15:03L
VTPSGTWLTY

SEQ ID NO: 11837 - protein, 10 aa, Severe acute respiratory syndrome coronavirus 2
  REGION 1..10: note = Table B: HLA-DQA1*05:01-B1*03:01L HLA-DRB1*01:02L HLA-DQA1*05:01-B1*02:01L HLA-DRB1*12:01L HLA-DPA1*03:01-B1*105:01L HLA-DRB1*16:01L HLA-DQA1*01:03-B1*06:01L HLA-DQA1*02:01-B1*03:03L
  REGION 1..10: note = CONT. FROM ABOVE: HLA-DRB1*15:03L
LTYTGAIKLD

SEQ ID NO: 11838 - protein, 11 aa, Severe acute respiratory syndrome coronavirus 2
  REGION 1..11: note = Table B: HLA-DQA1*05:01-B1*03:01L HLA-DRB1*04:05L HLA-DQA1*01:02-B1*06:02L HLA-DRB1*08:04L HLA-DPA1*01:02-B1*04:01L HLA-DRB1*16:01L HLA-DRB1*04:08L HLA-DRB1*08:03L
TYTGAIKLDDK

SEQ ID NO: 11839 - protein, 12 aa, Severe acute respiratory syndrome coronavirus 2
  REGION 1..12: note = Table B: HLA-DQA1*05:01-B1*03:01L HLA-DRB1*04:04L HLA-DQA1*01:02-B1*06:02L HLA-DRB3*02:01L HLA-DPA1*01:03-B1*03:01L HLA-DPA1*03:01-B1*04:02L HLA-DRB1*11:03L HLA-DRB1*14:02L HLA-DQA1*01:01-B1*05:01L
  REGION 1..12: note = CONT. FROM ABOVE: HLA-DRB5*01:01L HLA-DQA1*05:05-B1*03:19L HLA-D RB3*01:01L HLA-DPA1*02:01-B1*13:01L HLA-DPA1*03:01-B1*105:01L HL A-DQA1*05:05-B1*03:01L HLA-DRB1*10:01L HLA-DQA1*01:03-B1*06:01L
TGAIKLDDKDPN

SEQ ID NO: 11840 - protein, 13 aa, Severe acute respiratory syndrome coronavirus 2
  REGION 1..13: note = Table B: HLA-DQA1*05:01-B1*03:01L HLA-DRB3*02:01L HLA-DPA1*03:01-B1*04:02L HLA-DRB1*11:02L HLA-DQA1*05:05-B1*03:19L HLA-DRB4*02:01NL HLA-DRB1*09:01L HLA-DPA1*01:03-B1*04:02L HLA-DRB1*08:02L HLA-DRB1*15:01L
GAIKLDDKDPNFK

SEQ ID NO: 11841 - protein, 14 aa, Severe acute respiratory syndrome coronavirus 2
  REGION 1..14: note = Table B: HLA-DQA1*05:01-B1*03:01L HLA-DRB3*02:01L HLA-DPA1*03:01-B1*04:02L HLA-DRB1*11:02L HLA-DQA1*05:05-B1*03:19L HLA-DRB1*04:10L HLA-DPA1*01:03-B1*04:02L HLA-DQA1*01:03-B1*06:01L
AIKLDDKDPNFKDQ

SEQ ID NO: 11842 - protein, 10 aa, Severe acute respiratory syndrome coronavirus 2
  REGION 1..10: note = Table B: HLA-DQA1*05:01-B1*03:01L HLA-DRB1*01:03L HLA-DQA1*01:02-B1*06:02L HLA-DRB1*08:77L HLA-DPA1*01:03-B1*03:01L HLA-DRB1*03:01L HLA-DRB1*14:02L HLA-DQA1*01-B1*05L HLA-DQA1*05:05-B1*03:19L
  REGION 1..10: note = CONT. FROM ABOVE: HLA-DQA1*05:01-B1*02:01L HLA-DRB4*01:01L HLA-D PA1*01:03-B1*04:01L HLA-DQA1*05:05-B1*03:116L HLA-DPA1*01:03-B1* 04:02L HLA-DPA1*02:01-B1*13:01L HLA-DPA1*03:01-B1*105:01L HLA-DP A1*01:03-B1*104:01L HLA-DRB1*16:01L HLA-DQA1*01:03-B1*06:01L
  REGION 1..10: note = CONT. FROM ABOVE: HLA-DRB1*08:02L HLA-DQA1*02:01-B1*03:03L HLA-D RB1*15:03L
ILLNKHIDAY

SEQ ID NO: 11843 - protein, 10 aa, Severe acute respiratory syndrome coronavirus 2
  REGION 1..10: note = Table B: HLA-DQA1*05:01-B1*03:01L HLA-DRB1*04:03L HLA-DRB1*13:02L HLA-DRB1*13:03L HLA-DRB1*01:03L HLA-DRB1*04:02L HLA-DRB1*04:05L HLA-DRB4*03:01NL HLA-DRB1*08:01L HLA-DQA1*01-B1*05L HLA-DRB1*12:01L HLA-DQA1*03:01-B1*03:02L
  REGION 1..10: note = CONT. FROM ABOVE: HLA-DRB1*14:54L HLA-DRB1*14:17L HLA-DRB1*16:01 L HLA-DRB1*04:08L HLA-DQA1*02:01-B1*03:03L
YKTFPPTEPK

SEQ ID NO: 11844 - protein, 11 aa, Severe acute respiratory syndrome coronavirus 2
  REGION 1..11: note = Table B: HLA-DQA1*05:01-B1*03:01L HLA-DQA1*05:05-B1*03:19L HLA-DPA1*03:01-B1*105:01L HLA-DQA1*05:05-B1*03:01L
QQTVTLLPAAD

SEQ ID NO: 11845 - protein, 12 aa, Severe acute respiratory syndrome coronavirus 2
  REGION 1..12: note = Table B: HLA-DQA1*05:01-B1*03:01L HLA-DQA1*01:02-B1*06:02L HLA-DRB1*01:02L HLA-DQA1*05:05-B1*03:19L HLA-DPA1*03:01-B1*105:01L HLA-DQA1*05:05-B1*03:01L
TVTLLPAADLDD

SEQ ID NO: 11846 - protein, 13 aa, Severe acute respiratory syndrome coronavirus 2
  REGION 1..13: note = Table B: HLA-DQA1*05:01-B1*03:01L HLA-DRB1*13:03L HLA-DRB1*01:03L HLA-DRB1*04:04L HLA-DPA1*01:03-B1*03:01L HLA-DPA1*03:01-B1*04:02L HLA-DQA1*01:01-B1*05:01L HLA-DRB4*01:01L HLA-DRB1*04:08L HLA-DRB1*08:03L
VTLLPAADLDDFS

SEQ ID NO: 11847 - protein, 15 aa, Severe acute respiratory syndrome coronavirus 2
  REGION 1..15: note = Table B: HLA-DQA1*05:01-B1*03:01L HLA-DRB1*13:02L HLA-DRB1*13:03L HLA-DRB1*08:04L HLA-DPA1*01:03-B1*03:01L HLA-DPA1*03:01-B1*04:02L HLA-DRB1*14:01L HLA-DRB1*08:01L HLA-DRB3*01:01L HLA-DRB1*14:54L HLA-DPA1*01:02-B1*04:01L
  REGION 1..15: note = CONT. FROM ABOVE: HLA-DRB1*04:08L
LPAADLDDFSKQLQQ

SEQ ID NO: 11848 - protein, 13 aa, Severe acute respiratory syndrome coronavirus 2
  REGION 1..13: note = Table B: HLA-DQA1*05:01-B1*03:01L HLA-DRB1*13:03L HLA-DRB1*01:03L HLA-DQA1*01:02-B1*06:02L HLA-DRB1*08:04L HLA-DRB1*14:01L HLA-DRB1*08:01L HLA-DPA1*03:01-B1*105:01L HLA-DRB1*14:54L HLA-DRB1*16:01L HLA-DQA1*01:03-B1*06:01L
  REGION 1..13: note = CONT. FROM ABOVE: HLA-DRB1*04:08L HLA-DQA1*02:01-B1*03:03L
ADLDDFSKQLQQS

SEQ ID NO: 11849 - protein, 11 aa, Severe acute respiratory syndrome coronavirus 2
  REGION 1..11: note = Table B: HLA-DQA1*05:01-B1*03:01L HLA-DQA1*05:01-B1*02:01L HLA-DPA1*01:02-B1*04:01L HLA-DQA1*01:03-B1*06:01L HLA-DQA1*02:01-B1*03:03L
DDFSKQLQQSM

SEQ ID NO: 11850 - protein, 11 aa, Severe acute respiratory syndrome coronavirus 2
  REGION 1..11: note = Table B: HLA-DQA1*05:01-B1*03:01L HLA-DRB1*13:02L HLA-DRB1*04:02L HLA-DRB3*02:01L HLA-DPA1*01:03-B1*03:01L HLA-DRB1*14:01L HLA-DQA1*01-B1*05L HLA-DQA1*03:01-B1*03:02L HLA-DQA1*05:05-B1*03:01L HLA-DRB1*14:17L
  REGION 1..11: note = CONT. FROM ABOVE: HLA-DPA1*01:02-B1*04:01L HLA-DRB1*07:01L
GYINVFAFPFT

SEQ ID NO: 11851 - protein, 15 aa, Severe acute respiratory syndrome coronavirus 2
  REGION 1..15: note = Table B: HLA-DRB1*14:04L HLA-DRB3*02:01L HLA-DPA1*01:03-B1*04:02L HLA-DPA1*01:03-B1*02:01L HLA-DRB1*07:01L
VEEVLSEARQHLKDG

SEQ ID NO: 11852 - protein, 12 aa, Severe acute respiratory syndrome coronavirus 2
  REGION 1..12: note = Table B: HLA-DRB1*14:04L HLA-DRB1*04:05L HLA-DQA1*01:02-B1*06:02L HLA-DRB1*01:02L HLA-DRB1*08:04L HLA-DRB1*11:03L HLA-DRB1*11:04L HLA-DRB1*08:01L HLA-DRB1*11:01L HLA-DQA1*05:05-B1*03:19L HLA-DRB1*12:02L
  REGION 1..12: note = CONT. FROM ABOVE: HLA-DQA1*05:05-B1*03:01L HLA-DRB1*08:03L HLA-D RB1*15:03L
GLVEVEKGVLPQ

SEQ ID NO: 11853 - protein, 12 aa, Severe acute respiratory syndrome coronavirus 2
  REGION 1..12: note = Table B: HLA-DRB1*14:04L HLA-DRB1*04:04L HLA-DQA1*01:01-B1*05:01L HLA-DRB1*11:01L HLA-DRB5*01:01L HLA-DRB4*01:01L HLA-DPA1*01:03-B1*04:02L HLA-DRB3*01:01L HLA-DPA1*01:03-B1*104:01L HLA-DRB1*10:01L HLA-DRB1*08:03L
NSIIKTIQPRVE

SEQ ID NO: 11854 - protein, 12 aa, Severe acute respiratory syndrome coronavirus 2
  REGION 1..12: note = Table B: HLA-DRB1*14:04L HLA-DRB1*04:01L HLA-DRB1*04:04L HLA-DQA1*01:02-B1*06:02L HLA-DRB1*01:01L HLA-DRB3*02:01L HLA-DRB1*03:01L HLA-DRB1*11:02L HLA-DRB1*11:03L HLA-DQA1*01:01-B1*05:01L HLA-DRB1*08:01L HLA-DRB1*11:01L
  REGION 1..12: note = CONT. FROM ABOVE: HLA-DRB5*01:01L HLA-DQA1*05:05-B1*03:19L HLA-D RB1*13:01L HLA-DRB4*01:01L HLA-DPA1*01:03-B1*04:01L HLA-DRB1*04: 10L HLA-DRB1*09:01L HLA-DPA1*01:03-B1*04:02L HLA-DRB1*12:02L HLA -DPA1*02:01-B1*13:01L HLA-DPA1*01:03-B1*02:01L
  REGION 1..12: note = CONT. FROM ABOVE: HLA-DPA1*01:03-B1*104:01L HLA-DQA1*05:05-B1*03 :01L HLA-DRB1*07:01L HLA-DRB1*10:01L HLA-DRB1*08:03L HLA-DRB1*15 :01L
INIVGDFKLNEE

SEQ ID NO: 11855 - protein, 14 aa, Severe acute respiratory syndrome coronavirus 2
  REGION 1..14: note = Table B: HLA-DRB1*14:04L HLA-DRB1*08:03L
AQNSVRVLQKAAIT

SEQ ID NO: 11856 - protein, 14 aa, Severe acute respiratory syndrome coronavirus 2
  REGION 1..14: note = Table B: HLA-DRB1*14:04L HLA-DPA1*01:03-B1*03:01L HLA-DPA1*02:01-B1*13:01L
VGGQIVTCAKEIKE

SEQ ID NO: 11857 - protein, 14 aa, Severe acute respiratory syndrome coronavirus 2
  REGION 1..14: note = Table B: HLA-DRB1*14:04L HLA-DRB1*04:01L HLA-DRB1*01:01L HLA-DRB1*08:77L HLA-DRB3*02:01L HLA-DRB1*03:01L HLA-DRB1*11:02L HLA-DQA1*01:01-B1*05:01L HLA-DQA1*05:05-B1*03:116L HLA-DRB1*12:02L HLA-DRB3*01:01L HLA-DPA1*02:01-B1*13:01L
  REGION 1..14: note = CONT. FROM ABOVE: HLA-DPA1*01:03-B1*104:01L HLA-DRB1*07:01L HLA- DRB1*10:01L HLA-DRB1*08:02L HLA-DRB1*08:03L
DSIIIGGAKLKALN

SEQ ID NO: 11858 - protein, 13 aa, Severe acute respiratory syndrome coronavirus 2
  REGION 1..13: note = Table B: HLA-DRB1*14:04L HLA-DPA1*01:03-B1*02:01L
GETFVTHSKGLYR

SEQ ID NO: 11859 - protein, 14 aa, Severe acute respiratory syndrome coronavirus 2
  REGION 1..14: note = Table B: HLA-DRB1*14:04L HLA-DRB1*04:01L HLA-DRB1*01:01L HLA-DRB3*02:01L HLA-DRB1*14:02L HLA-DQA1*01:01-B1*05:01L HLA-DRB1*08:01L HLA-DRB1*11:01L HLA-DRB5*01:01L HLA-DRB4*01:01L HLA-DRB1*09:01L HLA-DRB3*01:01L HLA-DPA1*02:01-B1*13:01L
  REGION 1..14: note = CONT. FROM ABOVE: HLA-DPA1*01:03-B1*104:01L HLA-DRB1*07:01L HLA- DQA1*01:03-B1*06:01L HLA-DRB1*08:02L
TGDLQPLEQPTSEA

SEQ ID NO: 11860 - protein, 14 aa, Severe acute respiratory syndrome coronavirus 2
  REGION 1..14: note = Table B: HLA-DRB1*14:04L HLA-DRB1*04:04L HLA-DRB1*08:01L HLA-DRB1*11:01L HLA-DRB3*01:01L HLA-DPA1*02:01-B1*13:01L HLA-DPA1*01:03-B1*104:01L HLA-DPA1*01:02-B1*04:01L HLA-DRB1*10:01L HLA-DRB1*08:03L
APNMMVTNNTFTLK

SEQ ID NO: 11861 - protein, 14 aa, Severe acute respiratory syndrome coronavirus 2
  REGION 1..14: note = Table B: HLA-DRB1*14:04L HLA-DRB1*13:01L HLA-DQA1*05:05-B1*03:116L HLA-DRB1*08:02L
DDTVIEVQGYKSVN

SEQ ID NO: 11862 - protein, 11 aa, Severe acute respiratory syndrome coronavirus 2
  REGION 1..11: note = Table B: HLA-DRB1*14:04L HLA-DRB1*04:01L HLA-DRB1*08:04L HLA-DRB1*08:77L HLA-DRB3*02:01L HLA-DPA1*01:03-B1*03:01L HLA-DPA1*03:01-B1*04:02L HLA-DRB1*11:03L HLA-DRB1*11:04L HLA-DRB1*14:02L HLA-DQA1*01:01-B1*05:01L HLA-DRB1*08:01L
  REGION 1..11: note = CONT. FROM ABOVE: HLA-DRB5*01:01L HLA-DQA1*05:05-B1*03:19L HLA-D RB1*09:01L HLA-DRB3*01:01L HLA-DPA1*02:01-B1*13:01L HLA-DRB1*07: 01L HLA-DRB1*10:01L HLA-DRB1*08:03L
AVIKTLQPVSE

SEQ ID NO: 11863 - protein, 13 aa, Severe acute respiratory syndrome coronavirus 2
  REGION 1..13: note = Table B: HLA-DRB1*14:04L HLA-DRB1*11:02L HLA-DRB4*02:01NL HLA-DPA1*01:03-B1*02:01L HLA-DRB1*15:01L
ATYYLFDESGEFK

SEQ ID NO: 11864 - protein, 14 aa, Severe acute respiratory syndrome coronavirus 2
  REGION 1..14: note = Table B: HLA-DRB1*14:04L HLA-DRB1*04:01L HLA-DRB1*11:03L HLA-DRB1*14:02L HLA-DRB1*08:01L HLA-DRB4*01:01L HLA-DRB1*09:01L HLA-DPA1*01:03-B1*04:02L HLA-DPA1*01:02-B1*04:01L HLA-DRB1*07:01L
IQTIVEVQPQLEME

SEQ ID NO: 11865 - protein, 14 aa, Severe acute respiratory syndrome coronavirus 2
  REGION 1..14: note = Table B: HLA-DRB1*14:04L HLA-DPA1*01:03-B1*03:01L HLA-DPA1*03:01-B1*04:02L HLA-DRB1*08:01L HLA-DRB5*01:01L HLA-DQA1*05:05-B1*03:19L HLA-DRB4*01:01L HLA-DRB1*09:01L HLA-DRB3*01:01L HLA-DPA1*02:01-B1*13:01L
  REGION 1..14: note = CONT. FROM ABOVE: HLA-DPA1*01:03-B1*104:01L HLA-DRB1*07:01L HLA- DQA1*01:03-B1*06:01L
VQPQLEMELTPVVQ

SEQ ID NO: 11866 - protein, 13 aa, Severe acute respiratory syndrome coronavirus 2
  REGION 1..13: note = Table B: HLA-DRB1*14:04L HLA-DRB1*04:04L HLA-DRB1*08:04L HLA-DRB1*11:04L HLA-DQA1*01:01-B1*05:01L HLA-DPA1*01:03-B1*104:01L HLA-DRB1*10:01L HLA-DRB1*08:03L
TPVVQTIEVNSFS

SEQ ID NO: 11867 - protein, 13 aa, Severe acute respiratory syndrome coronavirus 2
  REGION 1..13: note = Table B: HLA-DRB1*14:04L HLA-DRB1*04:01L HLA-DRB1*01:01L HLA-DRB4*01:01L HLA-DPA1*01:03-B1*02:01L HLA-DPA1*01:03-B1*104:01L HLA-DRB1*08:02L
DNVYIKNADIVEE

SEQ ID NO: 11868 - protein, 13 aa, Severe acute respiratory syndrome coronavirus 2
  REGION 1..13: note = Table B: HLA-DRB1*14:04L HLA-DRB1*04:04L HLA-DRB1*11:03L HLA-DRB1*08:03L
ADIVEEAKKVKPT

SEQ ID NO: 11869 - protein, 13 aa, Severe acute respiratory syndrome coronavirus 2
  REGION 1..13: note = Table B: HLA-DRB1*14:04L HLA-DRB1*11:04L HLA-DRB1*08:01L HLA-DRB1*04:10L HLA-DRB1*09:01L HLA-DRB3*01:01L HLA-DRB1*04:08L HLA-DRB1*08:03L
VKPTVVVNAANVY

SEQ ID NO: 11870 - protein, 14 aa, Severe acute respiratory syndrome coronavirus 2
  REGION 1..14: note = Table B: HLA-DRB1*14:04L HLA-DRB1*04:01L HLA-DRB1*01:01L HLA-DRB1*08:01L HLA-DRB1*11:01L HLA-DRB5*01:01L HLA-DRB1*13:01L HLA-DRB1*08:03L
KPTVVVNAANVYLK

SEQ ID NO: 11871 - protein, 12 aa, Severe acute respiratory syndrome coronavirus 2
  REGION 1..12: note = Table B: HLA-DRB1*14:04L HLA-DRB1*01:01L
GALNKATNNAMQ

SEQ ID NO: 11872 - protein, 12 aa, Severe acute respiratory syndrome coronavirus 2
  REGION 1..12: note = Table B: HLA-DRB1*14:04L HLA-DRB1*04:01L HLA-DRB1*11:02L HLA-DRB4*02:01NL HLA-DRB1*13:01L HLA-DRB4*01:01L HLA-DPA1*01:03-B1*04:01L HLA-DRB1*08:02L HLA-DRB1*15:01L
DYIATNGPLKVG

SEQ ID NO: 11873 - protein, 12 aa, Severe acute respiratory syndrome coronavirus 2
  REGION 1..12: note = Table B: HLA-DRB1*14:04L HLA-DRB1*04:01L HLA-DRB1*04:04L HLA-DRB1*01:01L HLA-DRB1*03:01L HLA-DRB1*11:02L HLA-DQA1*01:01-B1*05:01L HLA-DRB1*08:01L HLA-DRB1*11:01L HLA-DRB5*01:01L HLA-DQA1*01-B1*05L HLA-DRB4*02:01NL
  REGION 1..12: note = CONT. FROM ABOVE: HLA-DRB5*02:02L HLA-DRB1*13:01L HLA-DRB4*01:01 L HLA-DPA1*01:03-B1*04:01L HLA-DQA1*05:05-B1*03:116L HLA-DRB1*04 :10L HLA-DRB1*09:01L HLA-DPA1*01:03-B1*04:02L HLA-DRB3*01:01L HL A-DPA1*02:01-B1*13:01L HLA-DPA1*01:03-B1*02:01L
  REGION 1..12: note = CONT. FROM ABOVE: HLA-DPA1*01:03-B1*104:01L HLA-DRB1*10:01L HLA- DRB1*08:02L HLA-DRB1*08:03L HLA-DRB1*15:01L
IATNGPLKVGGS

SEQ ID NO: 11874 - protein, 13 aa, Severe acute respiratory syndrome coronavirus 2
  REGION 1..13: note = Table B: HLA-DRB1*14:04L HLA-DRB1*04:01L HLA-DRB1*01:01L HLA-DRB1*11:01L HLA-DRB5*01:01L HLA-DRB1*09:01L HLA-DRB1*07:01L
GEDIQLLKSAYEN

SEQ ID NO: 11875 - protein, 13 aa, Severe acute respiratory syndrome coronavirus 2
  REGION 1..13: note = Table B: HLA-DRB1*14:04L
SAGIFGADPIHSL

SEQ ID NO: 11876 - protein, 12 aa, Severe acute respiratory syndrome coronavirus 2
  REGION 1..12: note = Table B: HLA-DRB1*14:04L HLA-DRB4*02:01NL
GIFGADPIHSLR

SEQ ID NO: 11877 - protein, 16 aa, Severe acute respiratory syndrome coronavirus 2
  REGION 1..16: note = Table B: HLA-DRB1*14:04L
VEQKIAEIPKEEVKPF

SEQ ID NO: 11878 - protein, 14 aa, Severe acute respiratory syndrome coronavirus 2
  REGION 1..14: note = Table B: HLA-DRB1*14:04L HLA-DRB1*01:01L HLA-DRB1*03:01L HLA-DRB1*11:02L HLA-DRB5*01:01L HLA-DRB1*13:01L HLA-DPA1*01:03-B1*02:01L HLA-DPA1*01:03-B1*104:01L
VKPFITESKPSVEQ

SEQ ID NO: 11879 - protein, 14 aa, Severe acute respiratory syndrome coronavirus 2
  REGION 1..14: note = Table B: HLA-DRB1*14:04L HLA-DRB1*11:02L HLA-DRB4*02:01NL HLA-DPA1*01:03-B1*04:01L HLA-DPA1*01:03-B1*02:01L
NGNLHPDSATLVSD

SEQ ID NO: 11880 - protein, 15 aa, Severe acute respiratory syndrome coronavirus 2
  REGION 1..15: note = Table B: HLA-DRB1*14:04L HLA-DRB4*02:01NL HLA-DRB5*02:02L HLA-DRB1*15:01L
GNLHPDSATLVSDID

SEQ ID NO: 11881 - protein, 15 aa, Severe acute respiratory syndrome coronavirus 2
  REGION 1..15: note = Table B: HLA-DRB1*14:04L HLA-DRB4*02:01NL
DAPYIVGDVVQEGVL

SEQ ID NO: 11882 - protein, 13 aa, Severe acute respiratory syndrome coronavirus 2
  REGION 1..13: note = Table B: HLA-DRB1*14:04L HLA-DRB1*08:77L HLA-DPA1*03:01-B1*04:02L HLA-DRB1*11:02L HLA-DQA1*05:05-B1*03:116L HLA-DPA1*01:03-B1*04:02L HLA-DRB1*12:02L HLA-DPA1*03:01-B1*105:01L
  REGION 1..13: note = CONT. FROM ABOVE: HLA-DPA1*01:03-B1*02:01L HLA-DRB1*10:01L
AVVIPTKKAGGTT

SEQ ID NO: 11883 - protein, 14 aa, Severe acute respiratory syndrome coronavirus 2
  REGION 1..14: note = Table B: HLA-DRB1*14:04L HLA-DRB1*04:01L HLA-DRB1*03:01L HLA-DRB4*02:01NL HLA-DRB1*13:01L HLA-DQA1*05:05-B1*03:116L HLA-DPA1*01:03-B1*02:01L HLA-DRB1*08:02L
DNYITTYPGQGLNG

SEQ ID NO: 11884 - protein, 13 aa, Severe acute respiratory syndrome coronavirus 2
  REGION 1..13: note = Table B: HLA-DRB1*14:04L HLA-DRB1*01:03L HLA-DRB1*04:05L HLA-DRB1*01:02L HLA-DRB4*03:01NL HLA-DPA1*01:03-B1*03:01L HLA-DRB1*03:01L HLA-DRB1*11:03L HLA-DRB1*11:04L HLA-DRB1*08:01L HLA-DRB1*11:01L HLA-DRB5*01:01L HLA-DRB1*09:01L HLA-DRB3*01:01L
  REGION 1..13: note = CONT. FROM ABOVE: HLA-DPA1*03:01-B1*105:01L HLA-DQA1*05:05-B1*03 :01L HLA-DRB1*10:01L HLA-DRB1*04:08L HLA-DRB1*08:03L
LPSIISNEKQEIL

SEQ ID NO: 11885 - protein, 13 aa, Severe acute respiratory syndrome coronavirus 2
  REGION 1..13: note = Table B: HLA-DRB1*14:04L HLA-DRB1*11:02L HLA-DRB1*08:01L HLA-DRB5*01:01L HLA-DRB1*13:01L HLA-DRB4*01:01L HLA-DRB1*09:01L HLA-DPA1*01:03-B1*04:02L HLA-DRB1*08:02L
PSIISNEKQEILG

SEQ ID NO: 11886 - protein, 14 aa, Severe acute respiratory syndrome coronavirus 2
  REGION 1..14: note = Table B: HLA-DRB1*14:04L HLA-DRB1*08:77L HLA-DRB1*11:02L HLA-DRB1*14:02L HLA-DRB1*11:01L HLA-DRB4*01:01L HLA-DPA1*01:03-B1*02:01L HLA-DRB1*08:02L
YKGIKIQEGVVDYG

SEQ ID NO: 11887 - protein, 14 aa, Severe acute respiratory syndrome coronavirus 2
  REGION 1..14: note = Table B: HLA-DRB1*14:04L HLA-DRB1*01:01L HLA-DRB1*08:77L HLA-DRB1*03:01L HLA-DRB1*14:02L HLA-DRB4*01:01L HLA-DRB1*09:01L HLA-DPA1*01:03-B1*02:01L
GIKIQEGVVDYGAR

SEQ ID NO: 11888 - protein, 14 aa, Severe acute respiratory syndrome coronavirus 2
  REGION 1..14: note = Table B: HLA-DRB1*14:04L HLA-DRB1*08:77L HLA-DRB3*02:01L HLA-DPA1*01:03-B1*03:01L HLA-DPA1*03:01-B1*04:02L HLA-DRB1*14:02L HLA-DQA1*01:01-B1*05:01L HLA-DRB1*08:01L HLA-DRB5*01:01L HLA-DRB4*01:01L HLA-DRB1*09:01L HLA-DRB3*01:01L
  REGION 1..14: note = CONT. FROM ABOVE: HLA-DPA1*02:01-B1*13:01L HLA-DPA1*01:03-B1*104 :01L HLA-DRB1*07:01L
VASLINTLNDLNET

SEQ ID NO: 11889 - protein, 13 aa, Severe acute respiratory syndrome coronavirus 2
  REGION 1..13: note = Table B: HLA-DRB1*14:04L HLA-DRB1*01:01L HLA-DQA1*05:05-B1*03:116L HLA-DRB3*01:01L HLA-DPA1*01:03-B1*02:01L HLA-DPA1*01:03-B1*104:01L
NGYLTSSSKTPEE

SEQ ID NO: 11890 - protein, 14 aa, Severe acute respiratory syndrome coronavirus 2
  REGION 1..14: note = Table B: HLA-DRB1*14:04L HLA-DRB1*11:02L HLA-DRB4*02:01NL HLA-DRB1*13:01L HLA-DPA1*01:03-B1*02:01L HLA-DRB1*08:02L
DKSVYYTSNPTTFH

SEQ ID NO: 11891 - protein, 16 aa, Severe acute respiratory syndrome coronavirus 2
  REGION 1..16: note = Table B: HLA-DRB1*14:04L HLA-DRB4*02:01NL HLA-DPA1*01:03-B1*02:01L HLA-DRB1*15:01L
NPTTFHLDGEVITFDN

SEQ ID NO: 11892 - protein, 13 aa, Severe acute respiratory syndrome coronavirus 2
  REGION 1..13: note = Table B: HLA-DRB1*14:04L HLA-DRB1*04:01L HLA-DRB1*01:01L HLA-DRB1*11:02L HLA-DRB1*11:01L HLA-DPA1*01:03-B1*02:01L
DGEVITFDNLKTL

SEQ ID NO: 11893 - protein, 13 aa, Severe acute respiratory syndrome coronavirus 2
  REGION 1..13: note = Table B: HLA-DRB1*14:04L HLA-DRB1*01:01L HLA-DRB1*03:01L HLA-DRB1*11:02L HLA-DRB1*11:01L HLA-DRB5*01:01L HLA-DRB1*13:01L HLA-DPA1*01:03-B1*02:01L HLA-DRB1*08:02L HLA-DRB1*15:01L
INLHTQVVDMSMT

SEQ ID NO: 11894 - protein, 15 aa, Severe acute respiratory syndrome coronavirus 2
  REGION 1..15: note = Table B: HLA-DRB1*14:04L HLA-DRB1*04:01L HLA-DRB1*01:01L HLA-DRB1*03:01L HLA-DRB1*11:02L HLA-DRB1*11:04L HLA-DRB1*08:01L HLA-DRB1*11:01L HLA-DRB3*01:01L HLA-DPA1*01:03-B1*104:01L HLA-DRB1*10:01L HLA-DRB1*15:01L
YPQVNGLTSIKWADN

SEQ ID NO: 11895 - protein, 14 aa, Severe acute respiratory syndrome coronavirus 2
  REGION 1..14: note = Table B: HLA-DRB1*14:04L HLA-DRB1*13:02L HLA-DRB1*01:03L HLA-DRB1*04:04L HLA-DRB4*03:01NL HLA-DRB1*08:04L HLA-DRB1*11:03L HLA-DRB1*11:04L HLA-DRB1*09:01L HLA-DQA1*01:03-B1*06:01L HLA-DRB1*04:08L HLA-DRB1*08:03L
VEAVMYMGTLSYEQ

SEQ ID NO: 11896 - protein, 14 aa, Severe acute respiratory syndrome coronavirus 2
  REGION 1..14: note = Table B: HLA-DRB1*14:04L HLA-DRB1*04:03L HLA-DRB1*13:02L HLA-DRB1*13:03M HLA-DRB1*04:02L HLA-DRB1*04:04L HLA-DRB1*01:02L HLA-DRB4*03:01NL HLA-DRB1*08:04L HLA-DRB3*02:01L HLA-DRB1*11:03L HLA-DRB1*11:04L HLA-DQA1*01:01-B1*05:01L HLA-DRB1*11:01L
  REGION 1..14: note = CONT. FROM ABOVE: HLA-DQA1*01-B1*05L HLA-DRB1*04:10L HLA-DRB1*09 :01L HLA-DRB1*12:02L HLA-DRB3*01:01L HLA-DRB1*14:54L HLA-DPA1*01 :03-B1*02:01L HLA-DPA1*01:03-B1*104:01L HLA-DQA1*05:05-B1*03:01L HLA-DRB1*14:17L HLA-DRB1*07:01L HLA-DRB1*10:01L HLA-DRB1*04:08M
  REGION 1..14: note = CONT. FROM ABOVE: HLA-DRB1*08:03L
APPAQYELKHGTFT

SEQ ID NO: 11897 - protein, 12 aa, Severe acute respiratory syndrome coronavirus 2
  REGION 1..12: note = Table B: HLA-DRB1*14:04L HLA-DRB1*04:04L HLA-DRB5*01:01L HLA-DRB1*09:01L HLA-DRB3*01:01L HLA-DPA1*01:03-B1*104:01L HLA-DRB1*07:01L HLA-DRB1*08:02L
ENSYTTTIKPVT

SEQ ID NO: 11898 - protein, 13 aa, Severe acute respiratory syndrome coronavirus 2
  REGION 1..13: note = Table B: HLA-DRB1*14:04L HLA-DRB1*04:04L HLA-DQA1*01:02-B1*06:02L HLA-DRB1*08:04L HLA-DRB1*11:03L HLA-DRB1*11:04L HLA-DRB1*14:02L HLA-DRB1*08:01L HLA-DRB1*09:01L HLA-DPA1*02:01-B1*13:01L HLA-DPA1*03:01-B1*105:01L
  REGION 1..13: note = CONT. FROM ABOVE: HLA-DQA1*05:05-B1*03:01L HLA-DPA1*01:02-B1*04: 01L HLA-DRB1*07:01L HLA-DRB1*10:01L HLA-DQA1*01:03-B1*06:01L HLA -DRB1*08:03L
EQPIDLVPNQPYP

SEQ ID NO: 11899 - protein, 12 aa, Severe acute respiratory syndrome coronavirus 2
  REGION 1..12: note = Table B: HLA-DRB1*14:04L HLA-DRB1*04:01L HLA-DQA1*01:02-B1*06:02L HLA-DRB1*01:01L HLA-DPA1*03:01-B1*04:02L HLA-DRB1*03:01L HLA-DQA1*01:01-B1*05:01L HLA-DRB1*08:01L HLA-DRB1*11:01L
  REGION 1..12: note = CONT. FROM ABOVE: HLA-DRB5*01:01L HLA-DRB1*13:01L HLA-DRB4*01:01 L HLA-DRB1*09:01L HLA-DPA1*01:03-B1*04:02L HLA-DRB3*01:01L HLA-D PA1*02:01-B1*13:01L HLA-DPA1*03:01-B1*105:01L HLA-DQA1*05:05-B1* 03:01L HLA-DPA1*01:02-B1*04:01L HLA-DRB1*07:01L
  REGION 1..12: note = CONT. FROM ABOVE: HLA-DQA1*01:03-B1*06:01L HLA-DRB1*15:01L
PIDLVPNQPYPN

SEQ ID NO: 11900 - protein, 14 aa, Severe acute respiratory syndrome coronavirus 2
  REGION 1..14: note = Table B: HLA-DRB1*14:04L HLA-DRB1*01:01L HLA-DRB3*02:01L HLA-DRB1*11:02L HLA-DQA1*01:01-B1*05:01L HLA-DRB1*11:01L HLA-DRB5*01:01L HLA-DQA1*05:05-B1*03:19L HLA-DRB1*13:01L HLA-DPA1*01:03-B1*04:01L HLA-DPA1*01:03-B1*04:02L
  REGION 1..14: note = CONT. FROM ABOVE: HLA-DPA1*01:03-B1*02:01L HLA-DPA1*01:03-B1*104 :01L HLA-DRB1*07:01L HLA-DRB1*08:02L HLA-DRB1*15:01L
DNIKFADDLNQLTG

SEQ ID NO: 11901 - protein, 13 aa, Severe acute respiratory syndrome coronavirus 2
  REGION 1..13: note = Table B: HLA-DRB1*14:04L HLA-DRB1*03:01L HLA-DRB1*11:02L HLA-DRB4*02:01NL HLA-DRB1*13:01L HLA-DPA1*01:03-B1*04:01L HLA-DPA1*01:03-B1*04:02L HLA-DPA1*01:03-B1*02:01L HLA-DRB1*08:02L HLA-DRB1*15:01L
DVLKSEDAQGMDN

SEQ ID NO: 11902 - protein, 13 aa, Severe acute respiratory syndrome coronavirus 2
  REGION 1..13: note = Table B: HLA-DRB1*14:04L HLA-DRB1*04:04L HLA-DRB1*11:01L HLA-DPA1*02:01-B1*13:01L HLA-DRB1*07:01L
VGDIILKPANNSL

SEQ ID NO: 11903 - protein, 13 aa, Severe acute respiratory syndrome coronavirus 2
  REGION 1..13: note = Table B: HLA-DRB1*14:04L HLA-DRB1*01:01L HLA-DRB1*03:01L HLA-DRB1*11:02L HLA-DRB5*01:01L HLA-DPA1*01:03-B1*104:01L HLA-DRB1*07:01L HLA-DRB1*08:02L HLA-DRB1*15:01L
GDIILKPANNSLK

SEQ ID NO: 11904 - protein, 14 aa, Severe acute respiratory syndrome coronavirus 2
  REGION 1..14: note = Table B: HLA-DRB1*14:04L HLA-DRB1*13:01L HLA-DRB1*08:02L
AAYVDNSSLTIKKP

SEQ ID NO: 11905 - protein, 13 aa, Severe acute respiratory syndrome coronavirus 2
  REGION 1..13: note = Table B: HLA-DRB1*14:04L HLA-DRB1*11:02L HLA-DPA1*01:03-B1*04:01L HLA-DRB1*09:01L HLA-DPA1*01:03-B1*02:01L HLA-DPA1*01:03-B1*104:01L HLA-DRB1*08:02L
YVDNSSLTIKKPN

SEQ ID NO: 11906 - protein, 13 aa, Severe acute respiratory syndrome coronavirus 2
  REGION 1..13: note = Table B: HLA-DRB1*14:04L HLA-DRB1*13:03L HLA-DRB1*01:03L HLA-DRB1*04:04L HLA-DRB1*04:05L HLA-DRB4*03:01NL HLA-DRB1*08:04L HLA-DRB1*11:03L HLA-DRB1*14:02L HLA-DQA1*01-B1*05L HLA-DRB1*04:10L HLA-DRB1*09:01L HLA-DPA1*02:01-B1*13:01L
  REGION 1..13: note = CONT. FROM ABOVE: HLA-DPA1*01:03-B1*104:01L HLA-DPA1*01:02-B1*04 :01L HLA-DRB1*07:01L HLA-DRB1*10:01L HLA-DRB1*04:08L
THGLAAVNSVPWD

SEQ ID NO: 11907 - protein, 12 aa, Severe acute respiratory syndrome coronavirus 2
  REGION 1..12: note = Table B: HLA-DRB1*14:04L HLA-DRB1*04:01L HLA-DQA1*01:02-B1*06:02L HLA-DRB1*01:01L HLA-DRB1*03:01L HLA-DRB1*08:01L HLA-DRB1*11:01L HLA-DQA1*01-B1*05L HLA-DRB4*02:01NL HLA-DRB1*13:01L HLA-DRB4*01:01L
  REGION 1..12: note = CONT. FROM ABOVE: HLA-DPA1*01:03-B1*04:01L HLA-DPA1*01:03-B1*04: 02L HLA-DRB3*01:01L HLA-DPA1*02:01-B1*13:01L HLA-DPA1*01:03-B1*1 04:01L HLA-DPA1*01:02-B1*04:01L HLA-DRB1*15:01L
NKVVSTTTNIVT

SEQ ID NO: 11908 - protein, 13 aa, Severe acute respiratory syndrome coronavirus 2
  REGION 1..13: note = Table B: HLA-DRB1*14:04L HLA-DRB1*11:02L HLA-DQA1*01:01-B1*05:01L HLA-DRB1*11:01L HLA-DRB1*08:02L HLA-DRB1*15:01L
EASFNYLKSPNFS

SEQ ID NO: 11909 - protein, 14 aa, Severe acute respiratory syndrome coronavirus 2
  REGION 1..14: note = Table B: HLA-DRB1*14:04L HLA-DRB1*03:01L HLA-DQA1*01:01-B1*05:01L HLA-DRB4*02:01NL HLA-DRB1*13:01L HLA-DPA1*01:03-B1*02:01L HLA-DRB1*08:02L HLA-DRB1*15:01L
REGYLNSTNVTIAT

SEQ ID NO: 11910 - protein, 14 aa, Severe acute respiratory syndrome coronavirus 2
  REGION 1..14: note = Table B: HLA-DRB1*14:04L HLA-DRB1*15:01L
AGSTFISDEVARDL

SEQ ID NO: 11911 - protein, 13 aa, Severe acute respiratory syndrome coronavirus 2
  REGION 1..13: note = Table B: HLA-DRB1*14:04L HLA-DRB1*11:02L HLA-DRB4*02:01NL HLA-DRB1*15:01L
STFISDEVARDLS

SEQ ID NO: 11912 - protein, 15 aa, Severe acute respiratory syndrome coronavirus 2
  REGION 1..15: note = Table B: HLA-DRB1*14:04L HLA-DRB1*11:02L HLA-DRB1*08:02L
DQSSYIVDSVTVKNG

SEQ ID NO: 11913 - protein, 13 aa, Severe acute respiratory syndrome coronavirus 2
  REGION 1..13: note = Table B: HLA-DRB1*14:04L HLA-DRB1*04:04L HLA-DRB1*08:04L HLA-DRB1*08:77L HLA-DRB3*02:01L HLA-DPA1*01:03-B1*03:01L HLA-DRB1*11:04L HLA-DRB1*14:02L HLA-DRB1*11:01L HLA-DPA1*01:03-B1*04:02L HLA-DRB1*12:02L HLA-DRB3*01:01L
  REGION 1..13: note = CONT. FROM ABOVE: HLA-DPA1*02:01-B1*13:01L HLA-DPA1*01:03-B1*104 :01L HLA-DRB1*07:01L HLA-DRB1*08:03L HLA-DRB1*15:03L
IVDSVTVKNGSIH

SEQ ID NO: 11914 - protein, 16 aa, Severe acute respiratory syndrome coronavirus 2
  REGION 1..16: note = Table B: HLA-DRB1*14:04L HLA-DRB1*08:02L
LDQALVSDVGDSAEVA

SEQ ID NO: 11915 - protein, 13 aa, Severe acute respiratory syndrome coronavirus 2
  REGION 1..13: note = Table B: HLA-DRB1*14:04L HLA-DRB1*04:01L HLA-DRB1*04:04L HLA-DRB1*01:01L HLA-DRB1*03:01L HLA-DRB1*11:02L HLA-DQA1*01:01-B1*05:01L HLA-DRB1*11:01L HLA-DRB4*02:01NL HLA-DRB1*13:01L HLA-DPA1*01:03-B1*04:02L
  REGION 1..13: note = CONT. FROM ABOVE: HLA-DPA1*01:03-B1*02:01L HLA-DRB1*08:02L HLA-D RB1*15:01L
VNTFSSTFNVPME

SEQ ID NO: 11916 - protein, 15 aa, Severe acute respiratory syndrome coronavirus 2
  REGION 1..15: note = Table B: HLA-DRB1*14:04L
LKTLVATAEAELAKN

SEQ ID NO: 11917 - protein, 14 aa, Severe acute respiratory syndrome coronavirus 2
  REGION 1..14: note = Table B: HLA-DRB1*14:04L HLA-DRB1*04:01L HLA-DRB1*01:01L HLA-DRB1*08:77L HLA-DRB1*11:02L HLA-DRB1*11:03L HLA-DRB1*11:04L HLA-DRB1*14:02L HLA-DRB1*11:01L HLA-DRB4*02:01NL HLA-DRB4*01:01L HLA-DPA1*01:03-B1*04:01L HLA-DQA1*05:05-B1*03:116L
  REGION 1..14: note = CONT. FROM ABOVE: HLA-DRB1*09:01L HLA-DRB1*12:02L HLA-DRB3*01:01 L HLA-DPA1*01:03-B1*02:01L HLA-DPA1*01:03-B1*104:01L HLA-DRB1*07 :01L HLA-DRB1*10:01L HLA-DRB1*08:02L
DNVLSTFISAARQG

SEQ ID NO: 11918 - protein, 13 aa, Severe acute respiratory syndrome coronavirus 2
  REGION 1..13: note = Table B: HLA-DRB1*14:04L HLA-DRB1*04:04L HLA-DRB1*03:01L HLA-DRB5*01:01L HLA-DRB1*13:01L HLA-DRB1*04:10L HLA-DRB1*07:01L HLA-DRB1*10:01L
STFISAARQGFVD

SEQ ID NO: 11919 - protein, 13 aa, Severe acute respiratory syndrome coronavirus 2
  REGION 1..13: note = Table B: HLA-DRB1*14:04L HLA-DRB1*04:04L HLA-DRB1*08:04L HLA-DRB1*11:03L HLA-DRB1*11:04L HLA-DQA1*01-B1*05L HLA-DRB3*01:01L HLA-DRB1*07:01L
TRQVVNVVTTKIA

SEQ ID NO: 11920 - protein, 15 aa, Severe acute respiratory syndrome coronavirus 2
  REGION 1..15: note = Table B: HLA-DRB1*14:04L HLA-DRB1*13:01L HLA-DQA1*05:05-B1*03:116L
SSEIIGYKAIDGGVT

SEQ ID NO: 11921 - protein, 14 aa, Severe acute respiratory syndrome coronavirus 2
  REGION 1..14: note = Table B: HLA-DRB1*14:04L HLA-DQA1*01:01-B1*05:01L HLA-DRB4*02:01NL HLA-DRB5*02:02L HLA-DRB1*13:01L HLA-DQA1*05:05-B1*03:116L HLA-DRB1*08:02L HLA-DRB1*15:01L
GGSYTNDKACPLIA

SEQ ID NO: 11922 - protein, 16 aa, Severe acute respiratory syndrome coronavirus 2
  REGION 1..16: note = Table B: HLA-DRB1*14:04L HLA-DRB1*03:01L HLA-DRB1*11:02L HLA-DRB4*01:01L HLA-DRB1*09:01L HLA-DRB1*08:02L
TNVLEGSVAYESLRPD

SEQ ID NO: 11923 - protein, 15 aa, Severe acute respiratory syndrome coronavirus 2
  REGION 1..15: note = Table B: HLA-DRB1*14:04L HLA-DRB1*11:02L HLA-DQA1*01:01-B1*05:01L HLA-DPA1*01:03-B1*04:02L HLA-DPA1*01:03-B1*02:01L HLA-DRB1*08:02L
RPDTRYVLMDGSIIQ

SEQ ID NO: 11924 - protein, 14 aa, Severe acute respiratory syndrome coronavirus 2
  REGION 1..14: note = Table B: HLA-DRB1*14:04L HLA-DRB1*13:01L HLA-DPA1*01:03-B1*02:01L HLA-DRB1*08:02L
DGSIIQFPNTYLEG

SEQ ID NO: 11925 - protein, 13 aa, Severe acute respiratory syndrome coronavirus 2
  REGION 1..13: note = Table B: HLA-DRB1*14:04L HLA-DRB1*13:02L HLA-DRB1*01:03L HLA-DRB1*04:04L HLA-DRB1*04:05L HLA-DQA1*01:02-B1*06:02L HLA-DRB1*08:04L HLA-DRB1*08:77L HLA-DRB3*02:01L HLA-DPA1*01:03-B1*03:01L HLA-DPA1*03:01-B1*04:02L
  REGION 1..13: note = CONT. FROM ABOVE: HLA-DRB1*11:03L HLA-DRB1*11:04L HLA-DRB1*14:02 L HLA-DQA1*01:01-B1*05:01L HLA-DRB1*08:01L HLA-DQA1*05:05-B1*03: 19L HLA-DRB4*01:01L HLA-DPA1*01:03-B1*04:01L HLA-DRB1*04:10L HLA -DRB1*09:01L HLA-DRB1*12:02M HLA-DRB3*01:01L
  REGION 1..13: note = CONT. FROM ABOVE: HLA-DPA1*02:01-B1*13:01L HLA-DRB1*14:54L HLA-D PA1*01:03-B1*104:01L HLA-DQA1*05:05-B1*03:01L HLA-DPA1*01:02-B1* 04:01L HLA-DRB1*07:01L HLA-DRB1*10:01L HLA-DQA1*01:03-B1*06:01L HLA-DRB1*04:08L HLA-DRB1*08:03L
TPLIQPIGALDIS

SEQ ID NO: 11926 - protein, 15 aa, Severe acute respiratory syndrome coronavirus 2
  REGION 1..15: note = Table B: HLA-DRB1*14:04L HLA-DRB3*02:01L HLA-DPA1*03:01-B1*04:02L HLA-DRB1*03:01L HLA-DRB1*11:02L HLA-DRB4*01:01L HLA-DPA1*01:03-B1*04:01L HLA-DQA1*05:05-B1*03:116L HLA-DPA1*01:03-B1*02:01L
  REGION 1..15: note = CONT. FROM ABOVE: HLA-DRB1*07:01L
GPFVDRQTAQAAGTD

SEQ ID NO: 11927 - protein, 12 aa, Severe acute respiratory syndrome coronavirus 2
  REGION 1..12: note = Table B: HLA-DRB1*14:04L HLA-DRB1*04:04L HLA-DRB1*04:05L HLA-DRB1*08:04L HLA-DRB1*08:77L HLA-DRB3*02:01L HLA-DPA1*01:03-B1*03:01L HLA-DPA1*03:01-B1*04:02L HLA-DRB1*03:01L HLA-DRB1*11:03L HLA-DRB1*11:04L HLA-DRB1*14:02L
  REGION 1..12: note = CONT. FROM ABOVE: HLA-DQA1*01:01-B1*05:01L HLA-DRB1*08:01L HLA-D RB1*11:01L HLA-DRB5*01:01L HLA-DQA1*01-B1*05L HLA-DQA1*05:05-B1* 03:19L HLA-DRB4*01:01L HLA-DRB1*04:10L HLA-DRB1*09:01L HLA-DPA1* 01:03-B1*04:02L HLA-DRB3*01:01L HLA-DPA1*02:01-B1*13:01L
  REGION 1..12: note = CONT. FROM ABOVE: HLA-DPA1*01:03-B1*02:01L HLA-DPA1*01:03-B1*104 :01L HLA-DRB1*07:01L HLA-DRB1*10:01L HLA-DRB1*04:08L HLA-DRB1*08 :03L
ILMTARTVYDDG

SEQ ID NO: 11928 - protein, 14 aa, Severe acute respiratory syndrome coronavirus 2
  REGION 1..14: note = Table B: HLA-DRB1*14:04L HLA-DRB1*01:01L HLA-DRB1*11:02L
NDILLAKDTTEAFE

SEQ ID NO: 11929 - protein, 14 aa, Severe acute respiratory syndrome coronavirus 2
  REGION 1..14: note = Table B: HLA-DRB1*14:04L HLA-DRB1*01:01L HLA-DRB1*11:02L HLA-DRB4*02:01NL HLA-DPA1*01:03-B1*02:01L
DILLAKDTTEAFEK

SEQ ID NO: 11930 - protein, 14 aa, Severe acute respiratory syndrome coronavirus 2
  REGION 1..14: note = Table B: HLA-DRB1*14:04L HLA-DRB1*13:02L HLA-DRB1*04:04L HLA-DRB1*03:01L HLA-DRB1*11:02L HLA-DRB1*11:03L HLA-DRB1*14:02L HLA-DRB1*11:01L HLA-DQA1*05:05-B1*03:19L HLA-DRB3*01:01L HLA-DPA1*03:01-B1*105:01L HLA-DPA1*01:02-B1*04:01L
  REGION 1..14: note = CONT. FROM ABOVE: HLA-DRB1*08:02L HLA-DRB1*08:03L
DQAMTQMYKQARSE

SEQ ID NO: 11931 - protein, 14 aa, Severe acute respiratory syndrome coronavirus 2
  REGION 1..14: note = Table B: HLA-DRB1*14:04L HLA-DRB1*04:01L HLA-DRB1*09:01L HLA-DRB3*01:01L HLA-DPA1*01:03-B1*104:01L HLA-DRB1*15:01L
NDALNNIINNARDG

SEQ ID NO: 11932 - protein, 13 aa, Severe acute respiratory syndrome coronavirus 2
  REGION 1..13: note = Table B: HLA-DRB1*14:04L HLA-DQA1*01:02-B1*06:02L HLA-DRB1*01:01L HLA-DPA1*03:01-B1*04:02L HLA-DRB1*03:01L HLA-DRB1*08:01L HLA-DRB1*11:01L HLA-DRB4*02:01NL HLA-DRB1*13:01L HLA-DRB4*01:01L HLA-DPA1*01:03-B1*04:01L HLA-DRB1*09:01L
  REGION 1..13: note = CONT. FROM ABOVE: HLA-DPA1*01:03-B1*04:02L HLA-DPA1*02:01-B1*13: 01L HLA-DPA1*01:03-B1*104:01L
IQQVVDADSKIVQ

SEQ ID NO: 11933 - protein, 12 aa, Severe acute respiratory syndrome coronavirus 2
  REGION 1..12: note = Table B: HLA-DRB1*14:04L HLA-DRB1*13:03L HLA-DRB1*04:05L HLA-DQA1*01:02-B1*06:02L HLA-DRB4*03:01NL HLA-DRB1*11:03L HLA-DPA1*01:03-B1*04:01L HLA-DRB1*04:10L HLA-DRB1*09:01L HLA-DPA1*03:01-B1*105:01L HLA-DQA1*05:05-B1*03:01L
DSKIVQLSEISM

SEQ ID NO: 11934 - protein, 13 aa, Severe acute respiratory syndrome coronavirus 2
  REGION 1..13: note = Table B: HLA-DRB1*14:04L HLA-DRB1*01:01L HLA-DRB1*08:04L HLA-DRB1*11:04L HLA-DRB1*14:02L HLA-DRB1*08:01L HLA-DRB4*01:01L HLA-DRB3*01:01L HLA-DPA1*02:01-B1*13:01L HLA-DRB1*08:03L HLA-DRB1*15:01L
SKIVQLSEISMDN

SEQ ID NO: 11935 - protein, 14 aa, Severe acute respiratory syndrome coronavirus 2
  REGION 1..14: note = Table B: HLA-DRB1*14:04L HLA-DRB1*04:01L HLA-DRB1*01:01L HLA-DRB1*08:04L HLA-DPA1*01:03-B1*03:01L HLA-DPA1*03:01-B1*04:02L HLA-DRB1*03:01L HLA-DRB1*11:04L HLA-DRB1*14:02L HLA-DRB1*08:01L HLA-DRB1*11:01L HLA-DRB5*01:01L
  REGION 1..14: note = CONT. FROM ABOVE: HLA-DRB4*01:01L HLA-DPA1*01:03-B1*04:01L HLA-D RB1*09:01L HLA-DPA1*01:03-B1*04:02L HLA-DRB3*01:01L HLA-DPA1*02: 01-B1*13:01L HLA-DPA1*01:03-B1*104:01L HLA-DPA1*01:02-B1*04:01L HLA-DRB1*07:01L HLA-DRB1*08:03L
IVQLSEISMDNSPN

SEQ ID NO: 11936 - protein, 13 aa, Severe acute respiratory syndrome coronavirus 2
  REGION 1..13: note = Table B: HLA-DRB1*14:04L HLA-DRB1*04:01L HLA-DRB1*04:04L HLA-DRB1*08:01L HLA-DRB5*01:01L HLA-DRB4*02:01NL HLA-DRB1*13:01L HLA-DRB4*01:01L HLA-DPA1*01:03-B1*04:01L HLA-DRB1*09:01L HLA-DPA1*02:01-B1*13:01L HLA-DPA1*01:03-B1*02:01L
  REGION 1..13: note = CONT. FROM ABOVE: HLA-DPA1*01:03-B1*104:01L HLA-DRB1*10:01L HLA- DRB1*08:02L HLA-DRB1*08:03L HLA-DRB1*15:01L
ALRANSAVKLQNN

SEQ ID NO: 11937 - protein, 13 aa, Severe acute respiratory syndrome coronavirus 2
  REGION 1..13: note = Table B: HLA-DRB1*14:04L HLA-DRB1*01:01L HLA-DRB3*02:01L HLA-DPA1*03:01-B1*04:02L HLA-DQA1*01:01-B1*05:01L HLA-DRB1*08:01L HLA-DRB1*11:01L HLA-DRB5*01:01L HLA-DRB3*01:01L HLA-DPA1*02:01-B1*13:01L HLA-DPA1*01:03-B1*104:01L
  REGION 1..13: note = CONT. FROM ABOVE: HLA-DRB1*07:01L HLA-DRB1*08:02L HLA-DRB1*15:01 L
SAVKLQNNELSPV

SEQ ID NO: 11938 - protein, 13 aa, Severe acute respiratory syndrome coronavirus 2
  REGION 1..13: note = Table B: HLA-DRB1*14:04L HLA-DRB5*01:01L
AVKLQNNELSPVA

SEQ ID NO: 11939 - protein, 15 aa, Severe acute respiratory syndrome coronavirus 2
  REGION 1..15: note = Table B: HLA-DRB1*14:04L HLA-DRB1*14:02L HLA-DPA1*01:03-B1*04:01L HLA-DPA1*01:03-B1*04:02L HLA-DPA1*01:03-B1*02:01L HLA-DPA1*01:03-B1*104:01L
DDNALAYYNTTKGGR

SEQ ID NO: 11940 - protein, 12 aa, Severe acute respiratory syndrome coronavirus 2
  REGION 1..12: note = Table B: HLA-DRB1*14:04L HLA-DRB1*13:02L HLA-DRB1*01:03L HLA-DRB1*04:05L HLA-DRB1*11:03L HLA-DRB1*14:02L HLA-DRB1*08:01L HLA-DRB1*11:01L HLA-DRB1*12:01L HLA-DRB1*16:01L HLA-DRB1*04:08L HLA-DRB1*08:03L
GSLAATVRLQAG

SEQ ID NO: 11941 - protein, 14 aa, Severe acute respiratory syndrome coronavirus 2
  REGION 1..14: note = Table B: HLA-DRB1*14:04L HLA-DQA1*01:01-B1*05:01L HLA-DQA1*05:05-B1*03:116L
AYKDYLASGGQPIT

SEQ ID NO: 11942 - protein, 13 aa, Severe acute respiratory syndrome coronavirus 2
  REGION 1..13: note = Table B: HLA-DRB1*14:04L HLA-DRB1*11:02L HLA-DQA1*01:01-B1*05:01L
KDYLASGGQPITN

SEQ ID NO: 11943 - protein, 14 aa, Severe acute respiratory syndrome coronavirus 2
  REGION 1..14: note = Table B: HLA-DRB1*14:04L HLA-DRB1*04:01L HLA-DRB1*04:04L HLA-DRB1*01:01L HLA-DRB1*11:04L HLA-DRB1*14:02L HLA-DRB1*08:01L HLA-DRB1*11:01L HLA-DRB5*01:01L HLA-DRB4*01:01L HLA-DPA1*01:03-B1*04:02L HLA-DRB3*01:01L
  REGION 1..14: note = CONT. FROM ABOVE: HLA-DPA1*02:01-B1*13:01L HLA-DPA1*01:03-B1*104 :01L HLA-DRB1*10:01L
GQAITVTPEANMDQ

SEQ ID NO: 11944 - protein, 14 aa, Severe acute respiratory syndrome coronavirus 2
  REGION 1..14: note = Table B: HLA-DRB1*14:04L HLA-DRB1*04:01L HLA-DRB1*01:01L HLA-DRB1*11:04L HLA-DQA1*01:01-B1*05:01L HLA-DRB1*08:01L HLA-DRB1*11:01L HLA-DRB5*01:01L HLA-DRB4*02:01NL HLA-DQA1*05:05-B1*03:116L HLA-DRB3*01:01L
  REGION 1..14: note = CONT. FROM ABOVE: HLA-DPA1*01:03-B1*02:01L HLA-DRB1*08:02L
EPMLQSADAQSFLN

SEQ ID NO: 11945 - protein, 14 aa, Severe acute respiratory syndrome coronavirus 2
  REGION 1..14: note = Table B: HLA-DRB1*14:04L
AFDIYNDKVAGFAK

SEQ ID NO: 11946 - protein, 14 aa, Severe acute respiratory syndrome coronavirus 2
  REGION 1..14: note = Table B: HLA-DRB1*14:04L HLA-DRB1*04:01L HLA-DRB1*13:02L HLA-DRB1*13:03L HLA-DRB1*01:01L HLA-DRB1*08:77L HLA-DRB3*02:01L HLA-DPA1*01:03-B1*03:01L HLA-DRB1*03:01L HLA-DRB1*11:02L HLA-DRB1*11:03L HLA-DRB1*14:02L HLA-DQA1*01:01-B1*05:01L
  REGION 1..14: note = CONT. FROM ABOVE: HLA-DRB1*11:01L HLA-DQA1*05:05-B1*03:19L HLA-D RB1*09:01L HLA-DPA1*01:03-B1*04:02L HLA-DRB1*12:02L HLA-DRB3*01: 01L HLA-DPA1*02:01-B1*13:01L HLA-DPA1*01:03-B1*02:01L HLA-DPA1*0 1:03-B1*104:01L HLA-DQA1*05:05-B1*03:01L
  REGION 1..14: note = CONT. FROM ABOVE: HLA-DPA1*01:02-B1*04:01L HLA-DRB1*07:01L HLA-D RB1*10:01L HLA-DRB1*08:02L HLA-DRB1*08:03L
NPDILRVYANLGER

SEQ ID NO: 11947 - protein, 12 aa, Severe acute respiratory syndrome coronavirus 2
  REGION 1..12: note = Table B: HLA-DRB1*14:04L HLA-DRB1*04:10L
GVPFVVSTGYHF

SEQ ID NO: 11948 - protein, 13 aa, Severe acute respiratory syndrome coronavirus 2
  REGION 1..13: note = Table B: HLA-DRB1*14:04L HLA-DRB1*04:01L HLA-DRB3*01:01L
LGVVHNQDVNLHS

SEQ ID NO: 11949 - protein, 14 aa, Severe acute respiratory syndrome coronavirus 2
  REGION 1..14: note = Table B: HLA-DRB1*14:04L HLA-DPA1*01:03-B1*02:01L
LLVYAADPAMHAAS

SEQ ID NO: 11950 - protein, 14 aa, Severe acute respiratory syndrome coronavirus 2
  REGION 1..14: note = Table B: HLA-DRB1*14:04L HLA-DQA1*01:01-B1*05:01L HLA-DPA1*01:03-B1*04:01L HLA-DPA1*01:03-B1*02:01L
LVYAADPAMHAASG

SEQ ID NO: 11951 - protein, 16 aa, Severe acute respiratory syndrome coronavirus 2
  REGION 1..16: note = Table B: HLA-DRB1*14:04L HLA-DRB1*03:01L HLA-DRB1*11:02L HLA-DRB1*11:01L HLA-DRB5*01:01L HLA-DRB4*02:01NL HLA-DRB1*13:01L HLA-DPA1*01:03-B1*04:01L HLA-DQA1*05:05-B1*03:116L HLA-DRB1*09:01L HLA-DPA1*01:03-B1*04:02L HLA-DRB3*01:01L
  REGION 1..16: note = CONT. FROM ABOVE: HLA-DPA1*01:03-B1*02:01L HLA-DPA1*01:03-B1*104 :01L HLA-DRB1*07:01L HLA-DRB1*08:02L HLA-DRB1*15:01L
VAALTNNVAFQTVKPG

SEQ ID NO: 11952 - protein, 13 aa, Severe acute respiratory syndrome coronavirus 2
  REGION 1..13: note = Table B: HLA-DRB1*14:04L HLA-DRB1*04:01L HLA-DRB1*04:04L HLA-DRB1*03:01L HLA-DRB1*11:02L HLA-DRB4*02:01NL HLA-DPA1*01:03-B1*02:01L HLA-DRB1*08:02L
NVAFQTVKPGNFN

SEQ ID NO: 11953 - protein, 12 aa, Severe acute respiratory syndrome coronavirus 2
  REGION 1..12: note = Table B: HLA-DRB1*14:04L HLA-DRB4*02:01NL HLA-DRB1*13:01L HLA-DRB1*08:02L
QVIVNNLDKSAG

SEQ ID NO: 11954 - protein, 14 aa, Severe acute respiratory syndrome coronavirus 2
  REGION 1..14: note = Table B: HLA-DRB1*14:04L HLA-DRB1*11:02L HLA-DQA1*05:05-B1*03:116L HLA-DRB1*08:02L
VIVNNLDKSAGFPF

SEQ ID NO: 11955 - protein, 14 aa, Severe acute respiratory syndrome coronavirus 2
  REGION 1..14: note = Table B: HLA-DRB1*14:04L HLA-DRB1*04:01L HLA-DPA1*01:03-B1*02:01L
IVNNLDKSAGFPFN

SEQ ID NO: 11956 - protein, 13 aa, Severe acute respiratory syndrome coronavirus 2
  REGION 1..13: note = Table B: HLA-DRB1*14:04L HLA-DPA1*01:03-B1*104:01L
ALFAYTKRNVIPT

SEQ ID NO: 11957 - protein, 13 aa, Severe acute respiratory syndrome coronavirus 2
  REGION 1..13: note = Table B: HLA-DRB1*14:04L HLA-DRB1*04:01L HLA-DRB1*04:04L HLA-DRB1*01:01L HLA-DRB1*03:01L HLA-DQA1*01:01-B1*05:01L HLA-DRB1*08:01L HLA-DRB4*01:01L HLA-DPA1*01:03-B1*04:02L HLA-DPA1*01:03-B1*02:01L HLA-DRB1*08:02L HLA-DRB1*15:01L
VNALLSTDGNKIA

SEQ ID NO: 11958 - protein, 15 aa, Severe acute respiratory syndrome coronavirus 2
  REGION 1..15: note = Table B: HLA-DRB1*14:04L HLA-DQA1*01:01-B1*05:01L HLA-DQA1*01-B1*05L
IADKYVRNLQHRLYE

SEQ ID NO: 11959 - protein, 14 aa, Severe acute respiratory syndrome coronavirus 2
  REGION 1..14: note = Table B: HLA-DRB1*14:04L HLA-DQA1*01:01-B1*05:01L HLA-DQA1*05:05-B1*03:116L HLA-DPA1*01:03-B1*02:01L HLA-DPA1*01:03-B1*104:01L HLA-DRB1*08:02L HLA-DRB1*15:01L
VDDIVKTDGTLMIE

SEQ ID NO: 11960 - protein, 13 aa, Severe acute respiratory syndrome coronavirus 2
  REGION 1..13: note = Table B: HLA-DRB1*14:04L HLA-DRB1*11:02L HLA-DRB4*02:01NL HLA-DPA1*01:03-B1*02:01L HLA-DPA1*01:03-B1*104:01L HLA-DRB1*15:01L
DIVKTDGTLMIER

SEQ ID NO: 11961 - protein, 12 aa, Severe acute respiratory syndrome coronavirus 2
  REGION 1..12: note = Table B: HLA-DRB1*14:04L HLA-DRB1*01:01L HLA-DRB1*01:02L HLA-DRB1*08:04L HLA-DRB3*02:01L HLA-DRB1*09:01L HLA-DRB3*01:01L HLA-DRB1*07:01L
SVMLTNDNTSRY

SEQ ID NO: 11962 - protein, 14 aa, Severe acute respiratory syndrome coronavirus 2
  REGION 1..14: note = Table B: HLA-DRB1*14:04L HLA-DRB1*01:01L HLA-DRB1*08:77L HLA-DRB3*02:01L HLA-DRB1*03:01L HLA-DRB1*11:02L HLA-DRB1*11:03L HLA-DQA1*01:01-B1*05:01L HLA-DRB5*01:01L HLA-DRB4*01:01L HLA-DRB1*09:01L HLA-DRB1*12:02L HLA-DPA1*01:03-B1*104:01L
  REGION 1..14: note = CONT. FROM ABOVE: HLA-DRB1*07:01L HLA-DRB1*08:02L
EAMYTPHTVLQAVG

SEQ ID NO: 11963 - protein, 13 aa, Severe acute respiratory syndrome coronavirus 2
  REGION 1..13: note = Table B: HLA-DRB1*14:04L HLA-DRB1*01:03L HLA-DRB1*04:05L HLA-DRB3*02:01L HLA-DPA1*03:01-B1*04:02L HLA-DRB1*11:03L
YDHVISTSHKLVL

SEQ ID NO: 11964 - protein, 16 aa, Severe acute respiratory syndrome coronavirus 2
  REGION 1..16: note = Table B: HLA-DRB1*14:04L
DAVVYRGTTTYKLNVG

SEQ ID NO: 11965 - protein, 12 aa, Severe acute respiratory syndrome coronavirus 2
  REGION 1..12: note = Table B: HLA-DRB1*14:04L HLA-DRB4*02:01NL HLA-DRB1*09:01L HLA-DPA1*02:01-B1*13:01L HLA-DPA1*01:03-B1*02:01L
DEFSSNVANYQK

SEQ ID NO: 11966 - protein, 12 aa, Severe acute respiratory syndrome coronavirus 2
  REGION 1..12: note = Table B: HLA-DRB1*14:04L HLA-DPA1*01:03-B1*03:01L HLA-DRB1*03:01L HLA-DRB1*11:02L HLA-DRB4*01:01L HLA-DPA1*01:03-B1*04:01L HLA-DQA1*05:05-B1*03:116L HLA-DRB1*04:10L HLA-DRB1*09:01L HLA-DPA1*02:01-B1*13:01L
  REGION 1..12: note = CONT. FROM ABOVE: HLA-DPA1*01:03-B1*02:01L HLA-DPA1*01:03-B1*104 :01L HLA-DRB1*07:01L
FSSNVANYQKVG

SEQ ID NO: 11967 - protein, 14 aa, Severe acute respiratory syndrome coronavirus 2
  REGION 1..14: note = Table B: HLA-DRB1*14:04L HLA-DRB1*03:01L HLA-DRB1*11:01L HLA-DRB1*08:03L
SSNVANYQKVGMQK

SEQ ID NO: 11968 - protein, 13 aa, Severe acute respiratory syndrome coronavirus 2
  REGION 1..13: note = Table B: HLA-DRB1*14:04L HLA-DRB3*02:01L HLA-DPA1*03:01-B1*04:02L HLA-DRB1*03:01L HLA-DRB4*02:01NL HLA-DRB1*13:01L HLA-DRB1*09:01L HLA-DRB3*01:01L HLA-DPA1*02:01-B1*13:01L HLA-DPA1*01:03-B1*02:01L
  REGION 1..13: note = CONT. FROM ABOVE: HLA-DPA1*01:03-B1*104:01L HLA-DPA1*01:02-B1*04 :01L HLA-DRB1*08:02L
VYIGDPAQLPAPR

SEQ ID NO: 11969 - protein, 15 aa, Severe acute respiratory syndrome coronavirus 2
  REGION 1..15: note = Table B: HLA-DRB1*14:04L HLA-DQA1*01-B1*05L HLA-DRB4*02:01NL HLA-DRB4*01:01L HLA-DQA1*05:05-B1*03:116L HLA-DRB1*04:10L HLA-DRB1*09:01L HLA-DPA1*02:01-B1*13:01L HLA-DPA1*01:03-B1*02:01L HLA-DPA1*01:03-B1*104:01L
  REGION 1..15: note = CONT. FROM ABOVE: HLA-DQA1*05:05-B1*03:01L
VSALVYDNKLKAHKD

SEQ ID NO: 11970 - protein, 12 aa, Severe acute respiratory syndrome coronavirus 2
  REGION 1..12: note = Table B: HLA-DRB1*14:04L HLA-DRB1*04:01L HLA-DRB1*04:04L HLA-DQA1*01:02-B1*06:02L HLA-DRB1*01:01L HLA-DRB1*03:01L HLA-DRB1*08:01L HLA-DRB1*11:01L HLA-DRB5*01:01L HLA-DQA1*05:05-B1*03:19L HLA-DRB4*02:01NL HLA-DRB1*13:01L
  REGION 1..12: note = CONT. FROM ABOVE: HLA-DRB4*01:01L HLA-DPA1*01:03-B1*04:01L HLA-D RB1*09:01L HLA-DPA1*01:03-B1*04:02L HLA-DPA1*02:01-B1*13:01L HLA -DRB1*07:01L HLA-DRB1*10:01L HLA-DRB1*08:03L
GVITHDVSSAIN

SEQ ID NO: 11971 - protein, 14 aa, Severe acute respiratory syndrome coronavirus 2
  REGION 1..14: note = Table B: HLA-DRB1*14:04L HLA-DRB1*04:01L HLA-DRB1*11:02L HLA-DRB4*02:01NL HLA-DRB1*13:01L HLA-DRB4*01:01L HLA-DPA1*01:03-B1*04:01L HLA-DRB1*09:01L HLA-DPA1*01:03-B1*104:01L HLA-DRB1*07:01L HLA-DRB1*08:02L
VITHDVSSAINRPQ

SEQ ID NO: 11972 - protein, 14 aa, Severe acute respiratory syndrome coronavirus 2
  REGION 1..14: note = Table B: HLA-DRB1*14:04L HLA-DRB1*04:01L
THDVSSAINRPQIG

SEQ ID NO: 11973 - protein, 13 aa, Severe acute respiratory syndrome coronavirus 2
  REGION 1..13: note = Table B: HLA-DRB1*14:04L HLA-DRB1*08:01L
ASKILGLPTQTVD

SEQ ID NO: 11974 - protein, 13 aa, Severe acute respiratory syndrome coronavirus 2
  REGION 1..13: note = Table B: HLA-DRB1*14:04L HLA-DRB1*04:01L HLA-DRB1*08:01L HLA-DRB1*11:01L HLA-DRB4*01:01L HLA-DRB3*01:01L HLA-DRB1*15:01L
SKILGLPTQTVDS

SEQ ID NO: 11975 - protein, 12 aa, Severe acute respiratory syndrome coronavirus 2
  REGION 1..12: note = Table B: HLA-DRB1*14:04L HLA-DPA1*03:01-B1*04:02L HLA-DRB1*03:01L HLA-DRB1*08:01L HLA-DRB1*13:01L HLA-DPA1*01:03-B1*04:02L HLA-DRB3*01:01L HLA-DPA1*02:01-B1*13:01L HLA-DPA1*01:03-B1*104:01L
  REGION 1..12: note = CONT. FROM ABOVE: HLA-DRB1*08:02L
VIFTQTTETAHS

SEQ ID NO: 11976 - protein, 14 aa, Severe acute respiratory syndrome coronavirus 2
  REGION 1..14: note = Table B: HLA-DRB1*14:04L HLA-DRB1*04:01L HLA-DRB1*01:01L HLA-DRB1*08:04L HLA-DRB1*08:77L HLA-DRB3*02:01L HLA-DPA1*03:01-B1*04:02L HLA-DRB1*03:01L HLA-DRB1*11:02L HLA-DRB1*11:03L HLA-DRB1*14:02L HLA-DQA1*01-B1*05L
  REGION 1..14: note = CONT. FROM ABOVE: HLA-DRB1*13:01L HLA-DPA1*01:03-B1*04:01L HLA-D RB1*04:10L HLA-DRB1*09:01L HLA-DPA1*01:03-B1*04:02L HLA-DRB1*12: 02L HLA-DPA1*01:03-B1*02:01L HLA-DPA1*01:03-B1*104:01L HLA-DRB1* 10:01L HLA-DRB1*08:02L HLA-DRB1*08:03L HLA-DRB1*15:01L
VNRFNVAITRAKVG

SEQ ID NO: 11977 - protein, 14 aa, Severe acute respiratory syndrome coronavirus 2
  REGION 1..14: note = Table B: HLA-DRB1*14:04L HLA-DRB3*02:01L HLA-DPA1*03:01-B1*04:02L HLA-DRB1*03:01L HLA-DQA1*01:01-B1*05:01L HLA-DRB1*08:01L HLA-DRB4*02:01NL HLA-DRB4*01:01L HLA-DRB1*09:01L HLA-DPA1*01:03-B1*04:02L
  REGION 1..14: note = CONT. FROM ABOVE: HLA-DRB3*01:01L HLA-DPA1*02:01-B1*13:01L HLA-D PA1*01:03-B1*104:01L HLA-DRB1*07:01L HLA-DRB1*08:02L HLA-DRB1*15 :01L
SKVITGLHPTQAPT

SEQ ID NO: 11978 - protein, 16 aa, Severe acute respiratory syndrome coronavirus 2
  REGION 1..16: note = Table B: HLA-DRB1*14:04L HLA-DRB1*04:01L HLA-DRB1*01:01L HLA-DRB1*03:01L HLA-DRB1*11:02L HLA-DRB1*11:01L HLA-DRB4*01:01L HLA-DPA1*01:03-B1*04:01L HLA-DPA1*01:03-B1*04:02L HLA-DRB3*01:01L HLA-DPA1*01:03-B1*02:01L
  REGION 1..16: note = CONT. FROM ABOVE: HLA-DPA1*01:02-B1*04:01L HLA-DRB1*07:01L HLA-D RB1*08:02L HLA-DRB1*15:01L
GVNLVAVPTGYVDTPN

SEQ ID NO: 11979 - protein, 14 aa, Severe acute respiratory syndrome coronavirus 2
  REGION 1..14: note = Table B: HLA-DRB1*14:04L HLA-DRB1*03:01L HLA-DRB1*11:02L HLA-DRB1*11:03L HLA-DQA1*01:01-B1*05:01L HLA-DRB5*01:01L HLA-DRB1*13:01L HLA-DRB1*09:01L HLA-DRB1*12:02L HLA-DPA1*01:03-B1*104:01L HLA-DRB1*07:01L
  REGION 1..14: note = CONT. FROM ABOVE: HLA-DQA1*01:03-B1*06:01L HLA-DRB1*08:02L HLA-D RB1*15:01L
FPVLHDIGNPKAIK

SEQ ID NO: 11980 - protein, 14 aa, Severe acute respiratory syndrome coronavirus 2
  REGION 1..14: note = Table B: HLA-DRB1*14:04L HLA-DRB1*03:01L HLA-DRB1*11:02L HLA-DRB5*01:01L HLA-DRB1*13:01L HLA-DRB4*01:01L HLA-DQA1*05:05-B1*03:116L HLA-DPA1*01:03-B1*02:01L HLA-DRB1*15:01L
IEELFYSYATHSDK

SEQ ID NO: 11981 - protein, 11 aa, Severe acute respiratory syndrome coronavirus 2
  REGION 1..11: note = Table B: HLA-DRB1*14:04L HLA-DRB1*04:04L HLA-DRB1*03:01L HLA-DRB1*11:04L HLA-DRB5*02:02L HLA-DRB1*04:10L HLA-DRB3*01:01L HLA-DRB1*14:17L
SAFVNLKQLPF

SEQ ID NO: 11982 - protein, 14 aa, Severe acute respiratory syndrome coronavirus 2
  REGION 1..14: note = Table B: HLA-DRB1*14:04L HLA-DRB1*04:01L HLA-DRB1*04:04L HLA-DRB1*03:01L HLA-DQA1*01:01-B1*05:01L HLA-DRB1*13:01L HLA-DPA1*01:03-B1*04:01L HLA-DRB1*04:10L HLA-DRB1*09:01L HLA-DPA1*01:03-B1*104:01L HLA-DRB1*07:01L HLA-DRB1*10:01L
ENVAFNVVNKGHFD

SEQ ID NO: 11983 - protein, 13 aa, Severe acute respiratory syndrome coronavirus 2
  REGION 1..13: note = Table B: HLA-DRB1*14:04L HLA-DRB1*15:01L
EVPVSIINNTVYT

SEQ ID NO: 11984 - protein, 13 aa, Severe acute respiratory syndrome coronavirus 2
  REGION 1..13: note = Table B: HLA-DRB1*14:04L
VPVSIINNTVYTK

SEQ ID NO: 11985 - protein, 13 aa, Severe acute respiratory syndrome coronavirus 2
  REGION 1..13: note = Table B: HLA-DRB1*14:04L HLA-DRB1*04:01L HLA-DRB1*01:01L HLA-DRB1*03:01L HLA-DRB1*11:02L HLA-DRB5*01:01L HLA-DRB4*02:01NL HLA-DRB1*13:01L HLA-DRB4*01:01L HLA-DRB1*07:01L HLA-DRB1*15:01L
VELFENKTTLPVN

SEQ ID NO: 11986 - protein, 14 aa, Severe acute respiratory syndrome coronavirus 2
  REGION 1..14: note = Table B: HLA-DRB1*14:04L HLA-DRB1*11:02L HLA-DQA1*01:01-B1*05:01L HLA-DRB1*08:01L HLA-DRB1*13:01L HLA-DPA1*01:03-B1*04:01L HLA-DRB3*01:01L HLA-DPA1*02:01-B1*13:01L HLA-DPA1*01:03-B1*02:01L
  REGION 1..14: note = CONT. FROM ABOVE: HLA-DRB1*08:02L HLA-DRB1*15:01L
VKILNNLGVDIAAN

SEQ ID NO: 11987 - protein, 14 aa, Severe acute respiratory syndrome coronavirus 2
  REGION 1..14: note = Table B: HLA-DRB1*14:04L HLA-DRB1*04:01L HLA-DRB1*01:01L HLA-DRB5*01:01L HLA-DRB1*13:01L HLA-DRB3*01:01L HLA-DRB1*08:02L
GVDIAANTVIWDYK

SEQ ID NO: 11988 - protein, 14 aa, Severe acute respiratory syndrome coronavirus 2
  REGION 1..14: note = Table B: HLA-DRB1*14:04L HLA-DRB1*01:01L HLA-DRB3*02:01L HLA-DRB1*03:01L HLA-DRB1*11:02L HLA-DRB1*08:01L HLA-DRB1*11:01L HLA-DRB5*01:01L HLA-DQA1*01-B1*05L HLA-DRB4*01:01L HLA-DRB1*09:01L HLA-DPA1*01:03-B1*04:02L
  REGION 1..14: note = CONT. FROM ABOVE: HLA-DPA1*01:03-B1*104:01L HLA-DRB1*07:01L HLA- DRB1*08:02L
VLITEGSVKGLQPS

SEQ ID NO: 11989 - protein, 14 aa, Severe acute respiratory syndrome coronavirus 2
  REGION 1..14: note = Table B: HLA-DRB1*14:04L HLA-DRB1*08:04L HLA-DRB1*04:08L
VDGVVQQLPETYFT

SEQ ID NO: 11990 - protein, 14 aa, Severe acute respiratory syndrome coronavirus 2
  REGION 1..14: note = Table B: HLA-DRB1*14:04L HLA-DRB1*04:01L HLA-DRB1*01:01L HLA-DRB1*03:01L HLA-DRB1*11:02L HLA-DRB5*01:01L
LPETYFTQSRNLQE

SEQ ID NO: 11991 - protein, 14 aa, Severe acute respiratory syndrome coronavirus 2
  REGION 1..14: note = Table B: HLA-DRB1*14:04L HLA-DRB1*11:02L HLA-DRB4*02:01NL HLA-DPA1*01:03-B1*04:01L HLA-DQA1*05:05-B1*03:116L HLA-DPA1*01:03-B1*04:02L HLA-DPA1*01:03-B1*02:01L HLA-DPA1*01:03-B1*104:01L HLA-DQA1*01:03-B1*06:01L
  REGION 1..14: note = CONT. FROM ABOVE: HLA-DRB1*08:02L HLA-DRB1*15:01L
VKNYFITDAQTGSS

SEQ ID NO: 11992 - protein, 11 aa, Severe acute respiratory syndrome coronavirus 2
  REGION 1..11: note = Table B: HLA-DRB1*14:04L HLA-DPA1*03:01-B1*04:02L HLA-DRB1*03:01L HLA-DRB4*02:01NL HLA-DRB5*02:02L HLA-DPA1*01:03-B1*04:01L HLA-DRB1*09:01L HLA-DPA1*02:01-B1*13:01L HLA-DPA1*01:03-B1*02:01L
  REGION 1..11: note = CONT. FROM ABOVE: HLA-DPA1*01:03-B1*104:01L HLA-DRB1*07:01L HLA- DRB1*15:03L
FITDAQTGSSK

SEQ ID NO: 11993 - protein, 12 aa, Severe acute respiratory syndrome coronavirus 2
  REGION 1..12: note = Table B: HLA-DRB1*14:04L HLA-DRB1*01:01L HLA-DRB1*08:01L HLA-DRB1*11:01L HLA-DRB5*01:01L HLA-DRB4*01:01L
EIIKSQDLSVVS

SEQ ID NO: 11994 - protein, 12 aa, Severe acute respiratory syndrome coronavirus 2
  REGION 1..12: note = Table B: HLA-DRB1*14:04L HLA-DQA1*01:01-B1*05:01L HLA-DRB1*11:01L HLA-DPA1*01:03-B1*04:02L HLA-DPA1*02:01-B1*13:01L
IIKSQDLSVVSK

SEQ ID NO: 11995 - protein, 14 aa, Severe acute respiratory syndrome coronavirus 2
  REGION 1..14: note = Table B: HLA-DRB1*14:04L HLA-DRB1*13:03L HLA-DRB1*01:03L HLA-DRB1*04:04L HLA-DRB4*03:01NL HLA-DRB1*08:04L HLA-DRB3*02:01L HLA-DPA1*03:01-B1*04:02L HLA-DRB1*11:03L HLA-DRB1*11:04L HLA-DRB1*14:02L HLA-DQA1*01:01-B1*05:01L HLA-DRB1*08:01L
  REGION 1..14: note = CONT. FROM ABOVE: HLA-DRB1*11:01L HLA-DPA1*01:03-B1*04:01L HLA-D RB1*04:10L HLA-DRB1*09:01L HLA-DPA1*01:03-B1*04:02L HLA-DRB1*12: 02L HLA-DRB3*01:01L HLA-DPA1*02:01-B1*13:01L HLA-DPA1*01:03-B1*0 2:01L HLA-DPA1*01:03-B1*104:01L HLA-DPA1*01:02-B1*04:01L
  REGION 1..14: note = CONT. FROM ABOVE: HLA-DRB1*07:01L HLA-DRB1*04:08L HLA-DRB1*08:03 L
LPKGIMMNVAKYTQ

SEQ ID NO: 11996 - protein, 13 aa, Severe acute respiratory syndrome coronavirus 2
  REGION 1..13: note = Table B: HLA-DRB1*14:04L HLA-DRB1*13:02L HLA-DRB1*04:04L HLA-DRB4*03:01NL HLA-DRB3*02:01L HLA-DPA1*01:03-B1*03:01L HLA-DPA1*03:01-B1*04:02L HLA-DRB1*11:02L HLA-DRB1*11:03L HLA-DRB1*11:04L HLA-DRB1*11:01L HLA-DQA1*01-B1*05L
  REGION 1..13: note = CONT. FROM ABOVE: HLA-DPA1*01:03-B1*04:02L HLA-DRB1*12:02L HLA-D RB3*01:01L HLA-DPA1*01:03-B1*02:01L HLA-DPA1*01:02-B1*04:01L HLA -DRB1*10:01L HLA-DRB1*08:02L HLA-DRB1*08:03L
GSVAIKITEHSWN

SEQ ID NO: 11997 - protein, 13 aa, Severe acute respiratory syndrome coronavirus 2
  REGION 1..13: note = Table B: HLA-DRB1*14:04L HLA-DQA1*01:01-B1*05:01L HLA-DRB1*08:01L HLA-DRB4*02:01NL HLA-DRB1*13:01L HLA-DQA1*05:05-B1*03:116L HLA-DPA1*02:01-B1*13:01L HLA-DPA1*01:03-B1*02:01L HLA-DPA1*01:03-B1*104:01L
  REGION 1..13: note = CONT. FROM ABOVE: HLA-DPA1*01:02-B1*04:01L HLA-DRB1*08:02L HLA-D RB1*15:01L
TAFVTNVNASSSE

SEQ ID NO: 11998 - protein, 13 aa, Severe acute respiratory syndrome coronavirus 2
  REGION 1..13: note = Table B: HLA-DRB1*14:04L HLA-DRB1*04:01L HLA-DRB1*01:01L HLA-DRB1*11:02L HLA-DRB5*01:01L HLA-DRB4*01:01L HLA-DQA1*05:05-B1*03:116L HLA-DRB1*15:01L
ANYIFWRNTNPIQ

SEQ ID NO: 11999 - protein, 13 aa, Severe acute respiratory syndrome coronavirus 2
  REGION 1..13: note = Table B: HLA-DRB1*14:04L HLA-DRB1*04:04L HLA-DRB1*11:04L HLA-DQA1*01:01-B1*05:01L HLA-DRB1*08:01L HLA-DRB4*01:01L HLA-DPA1*01:03-B1*04:01L HLA-DRB1*10:01L HLA-DRB1*04:08L HLA-DRB1*08:03L
GTAVMSLKEGQIN

SEQ ID NO: 12000 - protein, 13 aa, Severe acute respiratory syndrome coronavirus 2
  REGION 1..13: note = Table B: HLA-DRB1*14:04L HLA-DRB1*13:03L HLA-DRB1*01:03L HLA-DQA1*01:02-B1*06:02L HLA-DRB1*08:04L HLA-DRB1*08:77L HLA-DRB3*02:01L HLA-DPA1*01:03-B1*03:01L HLA-DPA1*03:01-B1*04:02L HLA-DRB1*11:03L HLA-DRB1*11:04L
  REGION 1..13: note = CONT. FROM ABOVE: HLA-DRB1*09:01L HLA-DPA1*02:01-B1*13:01L HLA-D PA1*03:01-B1*105:01L HLA-DQA1*05:05-B1*03:01L HLA-DRB1*07:01L HL A-DRB1*10:01L HLA-DQA1*01:03-B1*06:01L HLA-DRB1*04:08L HLA-DRB1* 08:03L
NNRVVISSDVLVN

SEQ ID NO: 12001 - protein, 16 aa, Severe acute respiratory syndrome coronavirus 2
  REGION 1..16: note = Table B: HLA-DRB1*14:04L HLA-DRB1*11:02L HLA-DRB4*02:01NL HLA-DRB1*13:01L HLA-DRB4*01:01L HLA-DRB1*12:02L HLA-DRB1*15:01L
YPDKVFRSSVLHSTQD

SEQ ID NO: 12002 - protein, 13 aa, Severe acute respiratory syndrome coronavirus 2
  REGION 1..13: note = Table B: HLA-DRB1*14:04L HLA-DRB1*04:04L HLA-DRB4*01:01L HLA-DRB1*09:01L HLA-DRB1*07:01L HLA-DRB1*08:03L
QSLLIVNNATNVV

SEQ ID NO: 12003 - protein, 11 aa, Severe acute respiratory syndrome coronavirus 2
  REGION 1..11: note = Table B: HLA-DRB1*14:04L HLA-DPA1*01:03-B1*03:01L HLA-DRB1*03:01L HLA-DRB1*11:02L HLA-DQA1*01:01-B1*05:01L HLA-DRB1*11:01L HLA-DQA1*01-B1*05L HLA-DRB4*02:01NL HLA-DRB1*13:01L HLA-DRB4*01:01L HLA-DPA1*01:03-B1*04:01L
  REGION 1..11: note = CONT. FROM ABOVE: HLA-DRB1*09:01L HLA-DPA1*01:03-B1*04:02L HLA-D RB3*01:01L HLA-DPA1*01:03-B1*02:01L HLA-DPA1*01:03-B1*104:01L HL A-DRB1*08:02L HLA-DRB1*15:01L
IVNNATNVVIK

SEQ ID NO: 12004 - protein, 12 aa, Severe acute respiratory syndrome coronavirus 2
  REGION 1..12: note = Table B: HLA-DRB1*14:04L HLA-DRB1*08:04L HLA-DPA1*01:03-B1*03:01L HLA-DRB1*11:04L HLA-DRB1*14:02L HLA-DQA1*01:01-B1*05:01L HLA-DRB1*08:01L HLA-DQA1*05:05-B1*03:19L HLA-DRB4*01:01L HLA-DRB1*09:01L
  REGION 1..12: note = CONT. FROM ABOVE: HLA-DRB3*01:01L HLA-DQA1*05:05-B1*03:01L HLA-D RB1*07:01L HLA-DRB1*08:03L HLA-DRB1*15:01L
SALEPLVDLPIG

SEQ ID NO: 12005 - protein, 15 aa, Severe acute respiratory syndrome coronavirus 2
  REGION 1..15: note = Table B: HLA-DRB1*14:04L HLA-DRB5*01:01L HLA-DRB4*02:01NL HLA-DRB1*13:01L
LLKYNENGTITDAVD

SEQ ID NO: 12006 - protein, 16 aa, Severe acute respiratory syndrome coronavirus 2
  REGION 1..16: note = Table B: HLA-DRB1*14:04L HLA-DRB4*01:01L
VEKGIYQTSNFRVQPT

SEQ ID NO: 12007 - protein, 13 aa, Severe acute respiratory syndrome coronavirus 2
  REGION 1..13: note = Table B: HLA-DRB1*14:04L HLA-DRB1*11:02L HLA-DRB4*02:01NL HLA-DPA1*01:03-B1*04:01L HLA-DPA1*01:03-B1*02:01L HLA-DPA1*01:03-B1*104:01L
SNFRVQPTESIVR

SEQ ID NO: 12008 - protein, 14 aa, Severe acute respiratory syndrome coronavirus 2
  REGION 1..14: note = Table B: HLA-DRB1*14:04L HLA-DRB1*01:01L HLA-DRB1*11:02L HLA-DRB5*01:01L HLA-DQA1*01-B1*05L HLA-DRB1*13:01L HLA-DRB4*01:01L HLA-DRB1*09:01L HLA-DPA1*01:03-B1*04:02L HLA-DRB1*12:02L HLA-DPA1*01:03-B1*02:01L
  REGION 1..14: note = CONT. FROM ABOVE: HLA-DPA1*01:03-B1*104:01L HLA-DRB1*07:01L HLA- DRB1*08:02L
FVIRGDEVRQIAPG

SEQ ID NO: 12009 - protein, 13 aa, Severe acute respiratory syndrome coronavirus 2
  REGION 1..13: note = Table B: HLA-DRB1*14:04L HLA-DRB1*04:01L HLA-DRB3*02:01L HLA-DRB1*11:03L HLA-DRB1*11:04L HLA-DRB1*14:02L HLA-DRB1*09:01L HLA-DPA1*01:03-B1*104:01L HLA-DRB1*07:01L
GDEVRQIAPGQTG

SEQ ID NO: 12010 - protein, 13 aa, Severe acute respiratory syndrome coronavirus 2
  REGION 1..13: note = Table B: HLA-DRB1*14:04L HLA-DRB1*04:01L HLA-DRB1*13:02L HLA-DRB1*01:03L HLA-DRB1*04:04L HLA-DRB1*04:05L HLA-DQA1*01:02-B1*06:02L HLA-DRB1*01:02L HLA-DRB1*08:04L HLA-DRB1*08:77L HLA-DRB3*02:01L HLA-DPA1*01:03-B1*03:01L
  REGION 1..13: note = CONT. FROM ABOVE: HLA-DRB1*11:03L HLA-DRB1*11:04L HLA-DRB1*14:02 L HLA-DQA1*01:01-B1*05:01L HLA-DRB1*08:01L HLA-DRB1*11:01L HLA-D RB5*01:01L HLA-DQA1*05:05-B1*03:19L HLA-DRB4*01:01L HLA-DPA1*01: 03-B1*04:01L HLA-DRB1*04:10M HLA-DRB1*09:01L
  REGION 1..13: note = CONT. FROM ABOVE: HLA-DPA1*01:03-B1*04:02L HLA-DRB1*12:01L HLA-D RB1*12:02L HLA-DRB3*01:01L HLA-DPA1*02:01-B1*13:01L HLA-DPA1*03: 01-B1*105:01L HLA-DPA1*01:03-B1*104:01L HLA-DQA1*05:05-B1*03:01L HLA-DRB1*07:01L HLA-DRB1*10:01L HLA-DQA1*01:03-B1*06:01L
  REGION 1..13: note = CONT. FROM ABOVE: HLA-DRB1*04:08L HLA-DRB1*08:03L HLA-DRB1*15:03 L
VPVAIHADQLTPT

SEQ ID NO: 12011 - protein, 14 aa, Severe acute respiratory syndrome coronavirus 2
  REGION 1..14: note = Table B: HLA-DRB1*14:04L HLA-DRB1*01:01L HLA-DRB1*08:77L HLA-DRB3*02:01L HLA-DRB1*15:01L
QSIIAYTMSLGAEN

SEQ ID NO: 12012 - protein, 12 aa, Severe acute respiratory syndrome coronavirus 2
  REGION 1..12: note = Table B: HLA-DRB1*14:04L HLA-DQA1*01:02-B1*06:02L HLA-DQA1*01:01-B1*05:01L HLA-DPA1*01:03-B1*04:01L HLA-DPA1*01:03-B1*04:02L HLA-DPA1*02:01-B1*13:01L HLA-DPA1*01:03-B1*104:01L HLA-DQA1*01:03-B1*06:01L
FSQILPDPSKPS

SEQ ID NO: 12013 - protein, 12 aa, Severe acute respiratory syndrome coronavirus 2
  REGION 1..12: note = Table B: HLA-DRB1*14:04L HLA-DRB1*11:02L HLA-DQA1*01:01-B1*05:01L HLA-DRB4*02:01NL HLA-DPA1*01:03-B1*04:01L HLA-DPA1*01:03-B1*02:01L HLA-DPA1*01:03-B1*104:01L HLA-DQA1*01:03-B1*06:01L
  REGION 1..12: note = CONT. FROM ABOVE: HLA-DRB1*08:02L
SQILPDPSKPSK

SEQ ID NO: 12014 - protein, 14 aa, Severe acute respiratory syndrome coronavirus 2
  REGION 1..14: note = Table B: HLA-DRB1*14:04L HLA-DRB1*04:01L HLA-DRB1*01:01L HLA-DRB1*03:01L HLA-DRB1*11:02L HLA-DRB5*01:01L HLA-DRB1*13:01L HLA-DRB4*01:01L HLA-DPA1*01:03-B1*04:01L HLA-DRB1*09:01L HLA-DPA1*01:03-B1*02:01L HLA-DRB1*07:01L
EDLLFNKVTLADAG

SEQ ID NO: 12015 - protein, 14 aa, Severe acute respiratory syndrome coronavirus 2
  REGION 1..14: note = Table B: HLA-DRB1*14:04L HLA-DRB1*01:01L HLA-DRB1*08:77L HLA-DRB1*03:01L HLA-DRB1*13:01L HLA-DRB1*07:01L
QNVLYENQKLIANQ

SEQ ID NO: 12016 - protein, 14 aa, Severe acute respiratory syndrome coronavirus 2
  REGION 1..14: note = Table B: HLA-DRB1*14:04L HLA-DRB1*01:01L HLA-DRB1*03:01L HLA-DRB1*11:02L HLA-DQA1*01:01-B1*05:01L HLA-DRB1*13:01L HLA-DRB4*01:01L HLA-DRB1*09:01L HLA-DRB1*07:01L HLA-DRB1*08:02L HLA-DRB1*15:01L
NQKLIANQFNSAIG

SEQ ID NO: 12017 - protein, 14 aa, Severe acute respiratory syndrome coronavirus 2
  REGION 1..14: note = Table B: HLA-DRB1*14:04L HLA-DRB1*13:02L HLA-DRB1*01:01L HLA-DRB1*11:01L HLA-DRB5*01:01L HLA-DRB1*08:02L
NSAIGKIQDSLSST

SEQ ID NO: 12018 - protein, 16 aa, Severe acute respiratory syndrome coronavirus 2
  REGION 1..16: note = Table B: HLA-DRB1*14:04L HLA-DRB1*03:01L HLA-DRB1*11:02L HLA-DRB1*13:01L HLA-DPA1*01:03-B1*04:01L HLA-DRB3*01:01L
IQDSLSSTASALGKLQ

SEQ ID NO: 12019 - protein, 14 aa, Severe acute respiratory syndrome coronavirus 2
  REGION 1..14: note = Table B: HLA-DRB1*14:04L HLA-DRB1*01:01L HLA-DRB3*02:01L HLA-DPA1*03:01-B1*04:02L HLA-DRB1*03:01L HLA-DRB1*14:02L HLA-DRB1*08:01L HLA-DRB1*11:01L HLA-DRB5*01:01L HLA-DRB4*01:01L HLA-DRB3*01:01L HLA-DQA1*01:03-B1*06:01L HLA-DRB1*15:01L
LGKLQDVVNQNAQA

SEQ ID NO: 12020 - protein, 14 aa, Severe acute respiratory syndrome coronavirus 2
  REGION 1..14: note = Table B: HLA-DRB1*14:04L HLA-DRB1*13:02L HLA-DRB1*04:04L HLA-DRB1*11:02L HLA-DRB1*14:02L HLA-DPA1*01:03-B1*04:02L HLA-DRB1*12:01L HLA-DRB3*01:01L HLA-DPA1*02:01-B1*13:01L HLA-DPA1*01:03-B1*02:01L HLA-DPA1*01:03-B1*104:01L
  REGION 1..14: note = CONT. FROM ABOVE: HLA-DRB1*16:01L HLA-DRB1*08:02L HLA-DRB1*08:03 L
AQALNTLVKQLSSN

SEQ ID NO: 12021 - protein, 14 aa, Severe acute respiratory syndrome coronavirus 2
  REGION 1..14: note = Table B: HLA-DRB1*14:04L HLA-DRB4*01:01L HLA-DRB1*09:01L HLA-DPA1*01:03-B1*104:01L HLA-DRB1*08:03L
AEVQIDRLITGRLQ

SEQ ID NO: 12022 - protein, 14 aa, Severe acute respiratory syndrome coronavirus 2
  REGION 1..14: note = Table B: HLA-DRB1*14:04L HLA-DRB1*01:01L HLA-DPA1*03:01-B1*04:02L HLA-DRB1*14:01L HLA-DRB1*11:03L HLA-DRB1*14:54L HLA-DRB1*07:01L HLA-DRB1*10:01L
QQLIRAAEIRASAN

SEQ ID NO: 12023 - protein, 14 aa, Severe acute respiratory syndrome coronavirus 2
  REGION 1..14: note = Table B: HLA-DRB1*14:04L HLA-DRB1*01:01L HLA-DPA1*03:01-B1*04:02L HLA-DRB1*11:02L HLA-DRB1*11:01L HLA-DRB1*13:01L HLA-DPA1*01:03-B1*04:02L HLA-DPA1*02:01-B1*13:01L HLA-DPA1*01:03-B1*104:01L
  REGION 1..14: note = CONT. FROM ABOVE: HLA-DPA1*01:02-B1*04:01L
PQIITTDNTFVSGN

SEQ ID NO: 12024 - protein, 11 aa, Severe acute respiratory syndrome coronavirus 2
  REGION 1..11: note = Table B: HLA-DRB1*14:04L HLA-DRB1*04:01L HLA-DRB1*13:02L HLA-DRB1*04:02L HLA-DRB1*04:05L HLA-DRB1*01:01L HLA-DRB4*03:01NL HLA-DRB3*02:01L HLA-DRB1*11:02L HLA-DRB1*11:03L HLA-DRB1*11:01L HLA-DRB5*01:01L HLA-DRB1*12:02L HLA-DRB1*14:54L
  REGION 1..11: note = CONT. FROM ABOVE: HLA-DQA1*05:05-B1*03:01L HLA-DRB1*14:17L HLA-D RB1*08:02L
VVIGIVNNTVY

SEQ ID NO: 12025 - protein, 14 aa, Severe acute respiratory syndrome coronavirus 2
  REGION 1..14: note = Table B: HLA-DRB1*14:04L HLA-DRB1*13:01L HLA-DRB1*15:01L
LDKYFKNHTSPDVD

SEQ ID NO: 12026 - protein, 13 aa, Severe acute respiratory syndrome coronavirus 2
  REGION 1..13: note = Table B: HLA-DRB1*14:04L HLA-DRB1*04:01L HLA-DRB1*03:01L HLA-DRB1*11:01L HLA-DPA1*01:03-B1*04:01L HLA-DRB3*01:01L HLA-DPA1*01:03-B1*02:01L HLA-DPA1*01:02-B1*04:01L HLA-DRB1*08:02L HLA-DRB1*15:01L
LGDISGINASVVN

SEQ ID NO: 12027 - protein, 13 aa, Severe acute respiratory syndrome coronavirus 2
  REGION 1..13: note = Table B: HLA-DRB1*14:04L HLA-DRB1*01:01L HLA-DRB3*02:01L HLA-DPA1*03:01-B1*04:02L HLA-DQA1*01-B1*05L HLA-DRB4*01:01L HLA-DRB1*09:01L HLA-DPA1*02:01-B1*13:01L HLA-DPA1*01:03-B1*02:01L HLA-DPA1*01:03-B1*104:01L
  REGION 1..13: note = CONT. FROM ABOVE: HLA-DPA1*01:02-B1*04:01L HLA-DRB1*07:01L HLA-D RB1*08:02L
ISGINASVVNIQK

SEQ ID NO: 12028 - protein, 13 aa, Severe acute respiratory syndrome coronavirus 2
  REGION 1..13: note = Table B: HLA-DRB1*14:04L HLA-DRB3*02:01L HLA-DPA1*03:01-B1*04:02L HLA-DPA1*02:01-B1*13:01L HLA-DPA1*01:03-B1*104:01L
INASVVNIQKEID

SEQ ID NO: 12029 - protein, 12 aa, Severe acute respiratory syndrome coronavirus 2
  REGION 1..12: note = Table B: HLA-DRB1*14:04L HLA-DRB1*14:02L HLA-DQA1*05:05-B1*03:116L HLA-DRB1*09:01L HLA-DPA1*01:03-B1*02:01L HLA-DRB1*07:01L
ASVVNIQKEIDR

SEQ ID NO: 12030 - protein, 14 aa, Severe acute respiratory syndrome coronavirus 2
  REGION 1..14: note = Table B: HLA-DRB1*14:04L HLA-DRB1*04:01L HLA-DRB1*04:04L HLA-DRB1*11:02L HLA-DRB1*13:01L HLA-DPA1*01:03-B1*02:01L HLA-DRB1*04:08L HLA-DRB1*08:02L
LNEVAKNLNESLID

SEQ ID NO: 12031 - protein, 12 aa, Severe acute respiratory syndrome coronavirus 2
  REGION 1..12: note = Table B: HLA-DRB1*14:04L HLA-DRB1*04:01L HLA-DRB1*03:01L HLA-DRB1*11:02L HLA-DQA1*01:01-B1*05:01L HLA-DRB4*02:01NL HLA-DRB4*01:01L HLA-DQA1*05:05-B1*03:116L HLA-DRB3*01:01L HLA-DPA1*01:03-B1*02:01L HLA-DRB1*08:02L HLA-DRB1*15:01L
DFVRATATIPIQ

SEQ ID NO: 12032 - protein, 12 aa, Severe acute respiratory syndrome coronavirus 2
  REGION 1..12: note = Table B: HLA-DRB1*14:04L HLA-DQA1*01:01-B1*05:01L HLA-DQA1*01-B1*05L HLA-DRB4*01:01L HLA-DPA1*01:03-B1*04:02L HLA-DRB3*01:01L HLA-DRB1*10:01L
LAVFQSASKIIT

SEQ ID NO: 12033 - protein, 13 aa, Severe acute respiratory syndrome coronavirus 2
  REGION 1..13: note = Table B: HLA-DRB1*14:04L HLA-DPA1*01:03-B1*03:01L HLA-DRB1*14:02L HLA-DRB1*09:01L HLA-DRB3*01:01L HLA-DPA1*03:01-B1*105:01L HLA-DQA1*05:05-B1*03:01L HLA-DRB1*07:01L
EHVQIHTIDGSSG

SEQ ID NO: 12034 - protein, 12 aa, Severe acute respiratory syndrome coronavirus 2
  REGION 1..12: note = Table B: HLA-DRB1*14:04L HLA-DRB1*13:02L HLA-DRB1*01:02L HLA-DRB1*11:02L HLA-DRB1*12:02L
IVNVSLVKPSFY

SEQ ID NO: 12035 - protein, 14 aa, Severe acute respiratory syndrome coronavirus 2
  REGION 1..14: note = Table B: HLA-DRB1*14:04L HLA-DRB1*01:01L HLA-DQA1*01:01-B1*05:01L HLA-DRB5*01:01L HLA-DRB4*02:01NL HLA-DRB1*13:01L HLA-DQA1*05:05-B1*03:116L HLA-DRB1*07:01L HLA-DRB1*15:01L
AAVYRINWITGGIA

SEQ ID NO: 12036 - protein, 13 aa, Severe acute respiratory syndrome coronavirus 2
  REGION 1..13: note = Table B: HLA-DRB1*14:04L HLA-DRB1*04:04L HLA-DRB1*01:01L HLA-DRB1*08:04L HLA-DRB1*03:01L HLA-DRB1*08:01L HLA-DRB1*11:01L HLA-DRB4*02:01NL HLA-DRB4*01:01L HLA-DRB3*01:01L HLA-DPA1*01:03-B1*104:01L HLA-DRB1*10:01L HLA-DRB1*04:08L
  REGION 1..13: note = CONT. FROM ABOVE: HLA-DRB1*08:03L HLA-DRB1*15:01L
LPKEITVATSRTL

SEQ ID NO: 12037 - protein, 13 aa, Severe acute respiratory syndrome coronavirus 2
  REGION 1..13: note = Table B: HLA-DRB1*14:04L HLA-DRB1*01:01L HLA-DRB1*03:01L HLA-DRB1*11:02L HLA-DQA1*05:05-B1*03:19L HLA-DRB4*02:01NL HLA-DRB1*13:01L HLA-DRB4*01:01L HLA-DPA1*01:03-B1*04:02L HLA-DPA1*01:03-B1*02:01L HLA-DPA1*01:03-B1*104:01L
  REGION 1..13: note = CONT. FROM ABOVE: HLA-DRB1*08:02L
IGNYKLNTDHSSS

SEQ ID NO: 12038 - protein, 14 aa, Severe acute respiratory syndrome coronavirus 2
  REGION 1..14: note = Table B: HLA-DRB1*14:04L HLA-DRB1*04:04L HLA-DRB1*08:77L HLA-DRB1*03:01L HLA-DRB1*11:02L HLA-DQA1*05:05-B1*03:19L HLA-DPA1*01:03-B1*04:02L HLA-DPA1*02:01-B1*13:01L HLA-DQA1*05:05-B1*03:01L HLA-DRB1*07:01L
  REGION 1..14: note = CONT. FROM ABOVE: HLA-DQA1*01:03-B1*06:01L HLA-DRB1*08:02L
INLIIKNLSKSLTE

SEQ ID NO: 12039 - protein, 12 aa, Severe acute respiratory syndrome coronavirus 2
  REGION 1..12: note = Table B: HLA-DRB1*14:04L HLA-DRB1*04:01L HLA-DRB1*08:04L HLA-DRB5*01:01L HLA-DPA1*01:03-B1*02:01L HLA-DRB1*15:01L
SPFHPLADNKFA

SEQ ID NO: 12040 - protein, 12 aa, Severe acute respiratory syndrome coronavirus 2
  REGION 1..12: note = Table B: HLA-DRB1*14:04L HLA-DRB1*04:01L HLA-DRB1*01:01L HLA-DRB4*01:01L HLA-DRB3*01:01L
GIITTVAAFHQE

SEQ ID NO: 12041 - protein, 12 aa, Severe acute respiratory syndrome coronavirus 2
  REGION 1..12: note = Table B: HLA-DRB1*14:04L HLA-DRB1*11:02L HLA-DRB4*02:01NL HLA-DRB1*08:02L HLA-DRB1*15:01L
QPYVVDDPCPIH

SEQ ID NO: 12042 - protein, 13 aa, Severe acute respiratory syndrome coronavirus 2
  REGION 1..13: note = Table B: HLA-DRB1*14:04L HLA-DRB1*11:01L HLA-DPA1*01:03-B1*02:01L HLA-DRB1*15:01L
KSPIQYIDIGNYT

SEQ ID NO: 12043 - protein, 14 aa, Severe acute respiratory syndrome coronavirus 2
  REGION 1..14: note = Table B: HLA-DRB1*14:04L HLA-DRB1*04:01L HLA-DPA1*01:03-B1*02:01L HLA-DRB1*15:01L
SPIQYIDIGNYTVS

SEQ ID NO: 12044 - protein, 14 aa, Severe acute respiratory syndrome coronavirus 2
  REGION 1..14: note = Table B: HLA-DRB1*14:04L HLA-DRB1*03:01L HLA-DRB5*01:01L HLA-DRB4*02:01NL HLA-DRB1*13:01L HLA-DRB1*15:01L
ASWFTALTQHGKED

SEQ ID NO: 12045 - protein, 14 aa, Severe acute respiratory syndrome coronavirus 2
  REGION 1..14: note = Table B: HLA-DRB1*14:04L HLA-DRB1*01:01L HLA-DRB1*11:02L HLA-DQA1*01:01-B1*05:01L HLA-DRB1*08:01L HLA-DRB1*11:01L HLA-DRB5*01:01L HLA-DPA1*01:03-B1*04:02L HLA-DRB1*07:01L HLA-DRB1*08:02L
KDGIIWVATEGALN

SEQ ID NO: 12046 - protein, 14 aa, Severe acute respiratory syndrome coronavirus 2
  REGION 1..14: note = Table B: HLA-DRB1*14:04L HLA-DPA1*01:03-B1*02:01L HLA-DPA1*01:03-B1*104:01L HLA-DRB1*07:01L
TGAIKLDDKDPNFK

SEQ ID NO: 12047 - protein, 12 aa, Severe acute respiratory syndrome coronavirus 2
  REGION 1..12: note = Table B: HLA-DRB1*14:04L HLA-DRB1*13:02L HLA-DRB1*04:04L HLA-DRB3*02:01L HLA-DRB1*11:03L HLA-DRB1*14:02L HLA-DRB1*11:01L HLA-DQA1*05:05-B1*03:19L HLA-DQA1*05:05-B1*03:116L HLA-DPA1*01:03-B1*04:02L HLA-DRB1*12:02L HLA-DRB3*01:01L
  REGION 1..12: note = CONT. FROM ABOVE: HLA-DPA1*02:01-B1*13:01L HLA-DPA1*01:03-B1*02: 01L HLA-DQA1*05:05-B1*03:01L HLA-DRB1*10:01L HLA-DRB1*08:02L
DQVILLNKHIDA

SEQ ID NO: 12048 - protein, 11 aa, Severe acute respiratory syndrome coronavirus 2
  REGION 1..11: note = Table B: HLA-DRB1*14:04L HLA-DRB1*04:01L HLA-DRB1*04:04L HLA-DRB1*08:04L HLA-DRB1*11:02L HLA-DRB1*11:04L HLA-DRB1*08:01L HLA-DRB5*01:01L HLA-DRB5*02:02L HLA-DRB1*13:01L HLA-DRB3*01:01L HLA-DPA1*01:03-B1*02:01L HLA-DPA1*01:03-B1*104:01L
  REGION 1..11: note = CONT. FROM ABOVE: HLA-DRB1*07:01L HLA-DRB1*04:08M HLA-DRB1*08:02 L HLA-DRB1*15:01L
YIAQVDVVNFN

SEQ ID NO: 12049 - protein, 14 aa, Severe acute respiratory syndrome coronavirus 2
  REGION 1..14: note = Table B: HLA-DRB3*02:02L
DYIATNGPLKVGGS

SEQ ID NO: 12050 - protein, 18 aa, Severe acute respiratory syndrome coronavirus 2
  REGION 1..18: note = Table B: HLA-DRB3*02:02L
QPIDLVPNQPYPNASFDN

SEQ ID NO: 12051 - protein, 16 aa, Severe acute respiratory syndrome coronavirus 2
  REGION 1..16: note = Table B: HLA-DRB3*02:02L
ISDEFSSNVANYQKVG

SEQ ID NO: 12052 - protein, 14 aa, Severe acute respiratory syndrome coronavirus 2
  REGION 1..14: note = Table B: HLA-DRB1*04:01L HLA-DRB1*04:04L HLA-DRB1*01:01L HLA-DRB1*11:02L HLA-DRB1*13:01L HLA-DRB1*08:02L
VEEVLSEARQHLKD

SEQ ID NO: 12053 - protein, 14 aa, Severe acute respiratory syndrome coronavirus 2
  REGION 1..14: note = Table B: HLA-DRB1*04:01L HLA-DRB1*04:04L HLA-DRB1*01:01L HLA-DRB1*08:04L HLA-DRB1*08:77L HLA-DRB1*11:02L HLA-DRB1*13:01L HLA-DRB1*10:01L HLA-DRB1*08:02L HLA-DRB1*08:03L
EEVLSEARQHLKDG

SEQ ID NO: 12054 - protein, 15 aa, Severe acute respiratory syndrome coronavirus 2
  REGION 1..15: note = Table B: HLA-DRB1*04:01L HLA-DRB1*13:02L HLA-DRB1*01:01L
PYVFIKRSDARTAPH

SEQ ID NO: 12055 - protein, 18 aa, Severe acute respiratory syndrome coronavirus 2
  REGION 1..18: note = Table B: HLA-DRB1*04:01L
YRKVLLRKNGNKGAGGHS

SEQ ID NO: 12056 - protein, 14 aa, Severe acute respiratory syndrome coronavirus 2
  REGION 1..14: note = Table B: HLA-DRB1*04:01L HLA-DRB1*04:04L HLA-DRB4*03:01NL HLA-DRB3*02:01L HLA-DRB1*11:02L HLA-DRB1*11:03L HLA-DQA1*01:01-B1*05:01L HLA-DRB1*04:10L HLA-DRB1*12:02L HLA-DRB3*01:01L HLA-DPA1*01:03-B1*02:01L HLA-DRB1*14:17L
GHSYGADLKSFDLG

SEQ ID NO: 12057 - protein, 17 aa, Severe acute respiratory syndrome coronavirus 2
  REGION 1..17: note = Table B: HLA-DRB1*04:01L HLA-DRB1*04:04L HLA-DRB3*02:01L HLA-DRB1*03:01L HLA-DRB1*11:02L HLA-DRB1*11:03L HLA-DRB1*14:02L HLA-DRB1*11:01L HLA-DQA1*05:05-B1*03:19L HLA-DPA1*01:03-B1*04:02L HLA-DPA1*01:03-B1*02:01L
  REGION 1..17: note = CONT. FROM ABOVE: HLA-DPA1*01:03-B1*104:01L HLA-DRB1*10:01L HLA- DRB1*08:02L
DPYEDFQENWNTKHSSG

SEQ ID NO: 12058 - protein, 13 aa, Severe acute respiratory syndrome coronavirus 2
  REGION 1..13: note = Table B: HLA-DRB1*04:01L HLA-DRB1*08:04L HLA-DRB1*11:04L
RELMRELNGGAYT

SEQ ID NO: 12059 - protein, 10 aa, Severe acute respiratory syndrome coronavirus 2
  REGION 1..10: note = Table B: HLA-DRB1*04:01L HLA-DRB1*13:02L HLA-DRB1*13:03L HLA-DRB1*01:03L HLA-DRB1*04:02L HLA-DRB1*01:01L HLA-DRB4*03:01NL HLA-DRB3*02:01L HLA-DRB1*14:01L HLA-DRB1*11:04L HLA-DRB1*08:01L HLA-DRB1*11:01L HLA-DRB5*01:01L HLA-DPA1*01:03-B1*04:02L
  REGION 1..10: note = CONT. FROM ABOVE: HLA-DRB1*12:01L HLA-DRB3*01:01L HLA-DQA1*03:01 -B1*03:02M HLA-DQA1*05:05-B1*03:01L HLA-DRB1*14:17L HLA-DRB1*16: 01L HLA-DRB1*08:02L HLA-DQA1*02:01-B1*03:03L HLA-DRB1*15:01L
RELNGGAYTR

SEQ ID NO: 12060 - protein, 14 aa, Severe acute respiratory syndrome coronavirus 2
  REGION 1..14: note = Table B: HLA-DRB1*04:01L HLA-DRB1*08:04L HLA-DRB1*14:01L HLA-DRB1*11:04L HLA-DRB1*11:01L HLA-DRB1*12:01L HLA-DRB3*01:01L HLA-DPA1*03:01-B1*105:01L HLA-DQA1*03:01-B1*03:02L HLA-DQA1*02:01-B1*03:03L HLA-DRB1*15:03L
YPLECIKDLLARAG

SEQ ID NO: 12061 - protein, 14 aa, Severe acute respiratory syndrome coronavirus 2
  REGION 1..14: note = Table B: HLA-DRB1*04:01L
SEQLDFIDTKRGVY

SEQ ID NO: 12062 - protein, 11 aa, Severe acute respiratory syndrome coronavirus 2
  REGION 1..11: note = Table B: HLA-DRB1*04:01L HLA-DRB1*13:02L HLA-DRB1*04:04L HLA-DRB1*01:01L HLA-DRB1*01:02L HLA-DRB4*03:01NL HLA-DRB1*08:04L HLA-DRB1*14:01L HLA-DRB1*11:04L HLA-DRB1*08:01L HLA-DRB1*11:01L HLA-DRB1*04:10L HLA-DRB1*12:01L HLA-DRB1*14:54L
  REGION 1..11: note = CONT. FROM ABOVE: HLA-DQA1*05:05-B1*03:01L HLA-DRB1*04:08L
WYTERSEKSYE

SEQ ID NO: 12063 - protein, 13 aa, Severe acute respiratory syndrome coronavirus 2
  REGION 1..13: note = Table B: HLA-DRB1*04:01L HLA-DRB1*08:04L HLA-DRB1*03:01L HLA-DQA1*01:01-B1*05:01L HLA-DRB4*02:01NL HLA-DRB1*04:10L HLA-DPA1*01:03-B1*04:02L HLA-DRB1*14:54L HLA-DRB1*08:03L
EKSYELQTPFEIK

SEQ ID NO: 12064 - protein, 13 aa, Severe acute respiratory syndrome coronavirus 2
  REGION 1..13: note = Table B: HLA-DRB1*04:01L HLA-DRB1*01:01L HLA-DRB1*03:01L
NSIIKTIQPRVEK

SEQ ID NO: 12065 - protein, 13 aa, Severe acute respiratory syndrome coronavirus 2
  REGION 1..13: note = Table B: HLA-DRB1*04:01L HLA-DRB1*13:02L HLA-DRB1*13:03L HLA-DRB1*01:01L HLA-DRB1*08:04L HLA-DRB1*08:77L HLA-DPA1*01:03-B1*03:01L HLA-DRB1*11:03L HLA-DRB1*11:04L HLA-DRB1*14:02L HLA-DQA1*01:01-B1*05:01L HLA-DRB1*08:01L
  REGION 1..13: note = CONT. FROM ABOVE: HLA-DRB1*11:01L HLA-DQA1*01-B1*05L HLA-DQA1*05 :05-B1*03:19L HLA-DQA1*05:01-B1*02:01L HLA-DRB1*12:02L HLA-DRB3* 01:01L HLA-DPA1*02:01-B1*13:01L HLA-DPA1*03:01-B1*105:01L HLA-DR B1*14:54L HLA-DPA1*01:03-B1*104:01L HLA-DPA1*01:02-B1*04:01L
  REGION 1..13: note = CONT. FROM ABOVE: HLA-DRB1*07:01L HLA-DRB1*10:01L HLA-DRB1*08:03 L
GRIRSVYPVASPN

SEQ ID NO: 12066 - protein, 16 aa, Severe acute respiratory syndrome coronavirus 2
  REGION 1..16: note = Table B: HLA-DRB1*04:01L HLA-DRB1*01:01L HLA-DRB1*08:04L HLA-DRB3*02:01L HLA-DRB1*11:02L HLA-DRB1*11:01L HLA-DQA1*05:01-B1*02:01L HLA-DRB4*01:01L HLA-DQA1*03:01-B1*03:02L HLA-DRB1*10:01L HLA-DRB1*08:02L
TGDFVKATCEFCGTEN

SEQ ID NO: 12067 - protein, 12 aa, Severe acute respiratory syndrome coronavirus 2
  REGION 1..12: note = Table B: HLA-DRB1*04:01L HLA-DRB1*11:03L HLA-DQA1*01:01-B1*05:01L HLA-DRB1*07:01L
GYLPQNAVVKIY

SEQ ID NO: 12068 - protein, 16 aa, Severe acute respiratory syndrome coronavirus 2
  REGION 1..16: note = Table B: HLA-DRB1*04:01L HLA-DRB1*13:02L HLA-DRB1*01:01L HLA-DRB1*08:04L HLA-DRB3*02:01L HLA-DPA1*03:01-B1*04:02L HLA-DRB1*14:01L HLA-DRB1*11:02L HLA-DRB1*11:03L HLA-DRB1*11:04L HLA-DRB1*14:02L HLA-DRB1*11:01L HLA-DRB3*01:01L
  REGION 1..16: note = CONT. FROM ABOVE: HLA-DPA1*01:02-B1*04:01L HLA-DRB1*07:01L HLA-D RB1*10:01L HLA-DRB1*08:03L
GPEHSLAEYHNESGLK

SEQ ID NO: 12069 - protein, 14 aa, Severe acute respiratory syndrome coronavirus 2
  REGION 1..14: note = Table B: HLA-DRB1*04:01L
LAEYHNESGLKTIL

SEQ ID NO: 12070 - protein, 14 aa, Severe acute respiratory syndrome coronavirus 2
  REGION 1..14: note = Table B: HLA-DRB1*04:01L HLA-DRB1*11:01L HLA-DRB3*01:01L
AEYHNESGLKTILR

SEQ ID NO: 12071 - protein, 15 aa, Severe acute respiratory syndrome coronavirus 2
  REGION 1..15: note = Table B: HLA-DRB1*04:01L HLA-DRB1*04:04L HLA-DRB1*08:04L HLA-DRB1*14:01L HLA-DRB1*08:01L HLA-DRB1*11:01L HLA-DRB4*01:01L HLA-DRB3*01:01L HLA-DPA1*01:02-B1*04:01L HLA-DRB1*08:03L
HTGVVGEGSEGLNDN

SEQ ID NO: 12072 - protein, 15 aa, Severe acute respiratory syndrome coronavirus 2
  REGION 1..15: note = Table B: HLA-DRB1*04:01L HLA-DRB3*02:01L HLA-DPA1*03:01-B1*04:02L HLA-DRB1*11:02L HLA-DQA1*01-B1*05L HLA-DRB4*01:01L HLA-DPA1*01:03-B1*04:02L HLA-DPA1*01:03-B1*104:01L HLA-DRB1*14:17L HLA-DRB1*10:01L
  REGION 1..15: note = CONT. FROM ABOVE: HLA-DRB1*08:02L HLA-DRB1*08:03L
LEILQKEKVNINIVG

SEQ ID NO: 12073 - protein, 14 aa, Severe acute respiratory syndrome coronavirus 2
  REGION 1..14: note = Table B: HLA-DRB1*04:01L HLA-DRB1*04:04L HLA-DRB1*03:01L HLA-DRB1*11:02L HLA-DRB1*08:01L HLA-DRB1*11:01L HLA-DRB4*02:01NL HLA-DRB4*01:01L HLA-DPA1*01:03-B1*04:02L HLA-DRB3*01:01L HLA-DPA1*01:03-B1*104:01L HLA-DRB1*08:02L HLA-DRB1*15:01L
LASFSASTSAFVET

SEQ ID NO: 12074 - protein, 14 aa, Severe acute respiratory syndrome coronavirus 2
  REGION 1..14: note = Table B: HLA-DRB1*04:01L HLA-DRB1*01:01L HLA-DRB1*03:01L HLA-DRB1*11:03L HLA-DRB1*13:01L HLA-DRB1*14:54L HLA-DPA1*01:03-B1*104:01L HLA-DQA1*05:05-B1*03:01L HLA-DRB1*07:01L HLA-DRB1*10:01L
VKGLDYKAFKQIVE

SEQ ID NO: 12075 - protein, 13 aa, Severe acute respiratory syndrome coronavirus 2
  REGION 1..13: note = Table B: HLA-DRB1*04:01L HLA-DRB1*11:03L HLA-DPA1*03:01-B1*105:01L HLA-DRB1*15:01L
GNFKVTKGKAKKG

SEQ ID NO: 12076 - protein, 11 aa, Severe acute respiratory syndrome coronavirus 2
  REGION 1..11: note = Table B: HLA-DRB1*04:01L HLA-DRB3*02:01L HLA-DPA1*01:03-B1*03:01L HLA-DRB1*11:01L HLA-DRB1*12:02L HLA-DRB3*01:01L HLA-DRB1*07:01L HLA-DRB1*04:08L
RTLETAQNSVR

SEQ ID NO: 12077 - protein, 13 aa, Severe acute respiratory syndrome coronavirus 2
  REGION 1..13: note = Table B: HLA-DRB1*04:01L HLA-DRB1*01:01L HLA-DRB1*08:04L HLA-DRB1*11:03L HLA-DRB1*11:04L HLA-DRB1*11:01L HLA-DRB1*09:01L HLA-DRB1*12:02L HLA-DRB3*01:01L HLA-DRB1*08:03L
AAITILDGISQYS

SEQ ID NO: 12078 - protein, 15 aa, Severe acute respiratory syndrome coronavirus 2
  REGION 1..15: note = Table B: HLA-DRB1*04:01L HLA-DRB1*01:01L HLA-DRB3*02:01L HLA-DRB1*11:03L HLA-DRB1*13:01L HLA-DRB1*09:01L HLA-DRB1*07:01L HLA-DRB1*08:02L HLA-DRB1*08:03L
TSQWLTNIFGTVYEK

SEQ ID NO: 12079 - protein, 14 aa, Severe acute respiratory syndrome coronavirus 2
  REGION 1..14: note = Table B: HLA-DRB1*04:01L HLA-DRB1*01:01L HLA-DRB1*03:01L HLA-DQA1*01:01-B1*05:01L HLA-DRB1*13:01L HLA-DRB1*14:54L HLA-DRB1*10:01L
TNIFGTVYEKLKPV

SEQ ID NO: 12080 - protein, 14 aa, Severe acute respiratory syndrome coronavirus 2
  REGION 1..14: note = Table B: HLA-DRB1*04:01L HLA-DRB1*04:04L HLA-DRB1*01:01L HLA-DRB1*08:02L
GTVYEKLKPVLDWL

SEQ ID NO: 12081 - protein, 14 aa, Severe acute respiratory syndrome coronavirus 2
  REGION 1..14: note = Table B: HLA-DRB1*04:01L HLA-DRB1*04:04L HLA-DRB1*01:01L HLA-DRB1*11:01L
TVYEKLKPVLDWLE

SEQ ID NO: 12082 - protein, 13 aa, Severe acute respiratory syndrome coronavirus 2
  REGION 1..13: note = Table B: HLA-DRB1*04:01L HLA-DRB1*01:01L HLA-DRB4*03:01NL HLA-DRB1*08:77L HLA-DRB1*03:01L HLA-DQA1*01:01-B1*05:01L HLA-DRB1*14:54L HLA-DRB1*14:17L HLA-DRB1*10:01L
GVEFLRDGWEIVK

SEQ ID NO: 12083 - protein, 15 aa, Severe acute respiratory syndrome coronavirus 2
  REGION 1..15: note = Table B: HLA-DRB1*04:01L HLA-DRB1*11:02L HLA-DRB1*14:02L HLA-DRB4*01:01L HLA-DPA1*01:03-B1*04:02L HLA-DRB3*01:01L
TGLLMPLKAPKEIIF

SEQ ID NO: 12084 - protein, 15 aa, Severe acute respiratory syndrome coronavirus 2
  REGION 1..15: note = Table B: HLA-DRB1*04:01L HLA-DRB1*03:01L HLA-DRB1*11:02L HLA-DRB1*11:04M HLA-DQA1*01:01-B1*05:01L HLA-DRB1*08:01L HLA-DRB1*11:01L HLA-DRB5*01:01L HLA-DRB4*02:01NL HLA-DRB1*13:01L HLA-DRB4*01:01L HLA-DRB1*04:10L HLA-DPA1*01:03-B1*04:02L
  REGION 1..15: note = CONT. FROM ABOVE: HLA-DRB3*01:01L HLA-DPA1*01:03-B1*02:01L HLA-D RB1*08:02L HLA-DRB1*08:03L HLA-DRB1*15:01L
APKEIIFLEGETLPT

SEQ ID NO: 12085 - protein, 17 aa, Severe acute respiratory syndrome coronavirus 2
  REGION 1..17: note = Table B: HLA-DRB1*04:01L HLA-DRB1*11:02L HLA-DRB1*11:01L HLA-DPA1*01:03-B1*02:01L HLA-DRB1*08:02L HLA-DRB1*08:03L
LPTEVLTEEVVLKTGDL

SEQ ID NO: 12086 - protein, 16 aa, Severe acute respiratory syndrome coronavirus 2
  REGION 1..16: note = Table B: HLA-DRB1*04:01L HLA-DRB1*04:04L HLA-DRB1*08:77L HLA-DRB1*11:01L HLA-DQA1*05:05-B1*03:116L HLA-DRB3*01:01L HLA-DPA1*01:03-B1*02:01L HLA-DRB1*07:01L HLA-DRB1*08:03L
EVVLKTGDLQPLEQPT

SEQ ID NO: 12087 - protein, 16 aa, Severe acute respiratory syndrome coronavirus 2
  REGION 1..16: note = Table B: HLA-DRB1*04:01L HLA-DRB1*04:04L HLA-DRB1*11:01L
DTEKYCALAPNMMVTN

SEQ ID NO: 12088 - protein, 15 aa, Severe acute respiratory syndrome coronavirus 2
  REGION 1..15: note = Table B: HLA-DRB1*04:01L HLA-DRB1*01:01L HLA-DRB1*03:01L HLA-DRB1*11:02L HLA-DRB5*01:01L HLA-DRB1*13:01L HLA-DPA1*01:03-B1*04:02L HLA-DRB1*08:02L HLA-DRB1*15:01L
APNMMVTNNTFTLKG

SEQ ID NO: 12089 - protein, 13 aa, Severe acute respiratory syndrome coronavirus 2
  REGION 1..13: note = Table B: HLA-DRB1*04:01L HLA-DRB1*04:04L HLA-DPA1*01:03-B1*03:01L HLA-DQA1*01-B1*05L HLA-DPA1*01:03-B1*04:02L HLA-DRB3*01:01L HLA-DPA1*02:01-B1*13:01L HLA-DPA1*01:03-B1*02:01L
  REGION 1..13: note = CONT. FROM ABOVE: HLA-DPA1*01:02-B1*04:01L HLA-DRB1*07:01L HLA-D RB1*08:02L
NNTFTLKGGAPTK

SEQ ID NO: 12090 - protein, 14 aa, Severe acute respiratory syndrome coronavirus 2
  REGION 1..14: note = Table B: HLA-DRB1*04:01L HLA-DRB1*13:02L HLA-DRB1*01:03L HLA-DRB1*04:02L HLA-DRB1*04:04L HLA-DQA1*01:02-B1*06:02L HLA-DRB1*01:02L HLA-DRB4*03:01NL HLA-DRB1*08:04L HLA-DRB1*08:77L HLA-DPA1*03:01-B1*04:02L HLA-DRB1*03:01L HLA-DRB1*14:01L
  REGION 1..14: note = CONT. FROM ABOVE: HLA-DRB1*11:03L HLA-DRB1*11:04L HLA-DQA1*05:05 -B1*03:19L HLA-DRB1*13:01L HLA-DRB4*01:01L HLA-DRB1*04:10L HLA-D RB1*12:01L HLA-DRB3*01:01L HLA-DPA1*02:01-B1*13:01L HLA-DRB1*14: 54L HLA-DQA1*05:05-B1*03:01L HLA-DRB1*14:17L HLA-DRB1*10:01L
  REGION 1..14: note = CONT. FROM ABOVE: HLA-DQA1*01:03-B1*06:01L HLA-DRB1*04:08L HLA-D RB1*15:03L
KVTFGDDTVIEVQG

SEQ ID NO: 12091 - protein, 13 aa, Severe acute respiratory syndrome coronavirus 2
  REGION 1..13: note = Table B: HLA-DRB1*04:01L HLA-DRB1*01:01L HLA-DRB1*08:77L HLA-DRB1*11:02L HLA-DRB1*11:03L HLA-DRB1*11:04L HLA-DRB1*14:02L HLA-DQA1*01:01-B1*05:01L HLA-DRB1*11:01L HLA-DRB4*01:01L HLA-DRB1*09:01L HLA-DRB1*12:02L HLA-DRB3*01:01L
  REGION 1..13: note = CONT. FROM ABOVE: HLA-DPA1*01:03-B1*02:01L HLA-DRB1*07:01L HLA-D RB1*08:03L HLA-DRB1*15:01L
DTVIEVQGYKSVN

SEQ ID NO: 12092 - protein, 14 aa, Severe acute respiratory syndrome coronavirus 2
  REGION 1..14: note = Table B: HLA-DRB1*04:01L HLA-DRB1*13:02L HLA-DRB1*13:03L HLA-DRB1*01:01L HLA-DRB4*03:01NL HLA-DRB1*08:04L HLA-DRB1*08:77L HLA-DRB3*02:01L HLA-DRB1*03:01L HLA-DRB1*14:01L HLA-DRB1*11:02L HLA-DRB1*11:03L HLA-DRB1*11:04L HLA-DRB1*14:02M
  REGION 1..14: note = CONT. FROM ABOVE: HLA-DQA1*01:01-B1*05:01L HLA-DRB1*08:01L HLA-D RB1*11:01L HLA-DQA1*01-B1*05L HLA-DRB4*01:01L HLA-DPA1*01:03-B1* 04:01L HLA-DRB1*04:10L HLA-DRB1*09:01L HLA-DRB1*12:02L HLA-DRB3* 01:01L HLA-DRB1*14:54L HLA-DPA1*01:03-B1*02:01L
  REGION 1..14: note = CONT. FROM ABOVE: HLA-DPA1*01:03-B1*104:01L HLA-DRB1*07:01L HLA- DRB1*08:02L HLA-DRB1*08:03L
VNEFACVVADAVIK

SEQ ID NO: 12093 - protein, 12 aa, Severe acute respiratory syndrome coronavirus 2
  REGION 1..12: note = Table B: HLA-DRB1*04:01L HLA-DRB1*04:04L HLA-DQA1*01:02-B1*06:02L HLA-DRB1*01:02L HLA-DRB1*08:04L HLA-DPA1*01:03-B1*03:01L HLA-DRB1*11:04L HLA-DQA1*01:01-B1*05:01L HLA-DQA1*05:05-B1*03:19L
  REGION 1..12: note = CONT. FROM ABOVE: HLA-DRB1*10:01L HLA-DRB1*15:03L
EYGTEDDYQGKP

SEQ ID NO: 12094 - protein, 15 aa, Severe acute respiratory syndrome coronavirus 2
  REGION 1..15: note = Table B: HLA-DRB1*04:01L HLA-DRB1*01:01L HLA-DRB3*02:01L HLA-DPA1*03:01-B1*04:02L HLA-DRB1*14:01L HLA-DRB1*11:03L HLA-DRB1*11:04L HLA-DRB1*14:02L HLA-DQA1*01:01-B1*05:01L HLA-DRB1*08:01L HLA-DRB1*11:01L HLA-DRB5*01:01L HLA-DRB4*01:01L
  REGION 1..15: note = CONT. FROM ABOVE: HLA-DPA1*01:03-B1*04:02L HLA-DRB3*01:01L HLA-D PA1*01:03-B1*02:01L HLA-DPA1*01:02-B1*04:01L HLA-DRB1*07:01L HLA -DRB1*08:02L HLA-DRB1*08:03L
KPLEFGATSAALQPE

SEQ ID NO: 12095 - protein, 14 aa, Severe acute respiratory syndrome coronavirus 2
  REGION 1..14: note = Table B: HLA-DRB1*04:01L HLA-DRB1*04:05L HLA-DPA1*01:03-B1*03:01L HLA-DRB1*03:01L HLA-DRB1*11:03L HLA-DRB1*11:04L HLA-DRB5*01:01L HLA-DRB4*01:01L HLA-DRB1*12:01L HLA-DPA1*03:01-B1*105:01L HLA-DRB1*04:08L
EEDWLDDDSQQTVG

SEQ ID NO: 12096 - protein, 14 aa, Severe acute respiratory syndrome coronavirus 2
  REGION 1..14: note = Table B: HLA-DRB1*04:01L HLA-DRB1*01:01L HLA-DPA1*01:03-B1*03:01L HLA-DQA1*05:05-B1*03:19L HLA-DRB4*01:01L
QPQLEMELTPVVQT

SEQ ID NO: 12097 - protein, 14 aa, Severe acute respiratory syndrome coronavirus 2
  REGION 1..14: note = Table B: HLA-DRB1*04:01L HLA-DRB1*01:01L HLA-DRB1*03:01L HLA-DRB1*11:02L HLA-DRB1*08:01L HLA-DRB1*11:01L HLA-DRB5*01:01L HLA-DRB4*02:01NL HLA-DRB1*13:01L HLA-DPA1*01:03-B1*04:02L HLA-DRB3*01:01L HLA-DPA1*01:03-B1*02:01L HLA-DRB1*08:02L
TPVVQTIEVNSFSG

SEQ ID NO: 12098 - protein, 13 aa, Severe acute respiratory syndrome coronavirus 2
  REGION 1..13: note = Table B: HLA-DRB1*04:01L HLA-DRB1*08:04L HLA-DRB5*01:01L HLA-DRB4*02:01NL HLA-DRB1*04:10L HLA-DRB1*08:03L HLA-DRB1*15:01L
SGYLKLTDNVYIK

SEQ ID NO: 12099 - protein, 14 aa, Severe acute respiratory syndrome coronavirus 2
  REGION 1..14: note = Table B: HLA-DRB1*04:01L HLA-DRB1*01:01L HLA-DRB4*01:01L HLA-DRB1*09:01L HLA-DPA1*01:03-B1*02:01L HLA-DRB1*08:02L
NVYIKNADIVEEAK

SEQ ID NO: 12100 - protein, 14 aa, Severe acute respiratory syndrome coronavirus 2
  REGION 1..14: note = Table B: HLA-DRB1*04:01L HLA-DRB1*13:02L HLA-DRB1*01:01L HLA-DRB1*08:04L HLA-DPA1*01:03-B1*03:01L HLA-DRB1*14:01L HLA-DRB1*11:03L HLA-DRB1*11:04L HLA-DQA1*01:01-B1*05:01L HLA-DRB1*08:01L HLA-DRB1*11:01L HLA-DRB1*04:10L HLA-DRB3*01:01L
  REGION 1..14: note = CONT. FROM ABOVE: HLA-DPA1*02:01-B1*13:01L HLA-DRB1*14:54L HLA-D PA1*01:03-B1*104:01L HLA-DRB1*07:01L HLA-DRB1*10:01L HLA-DRB1*08 :03L HLA-DRB1*15:03L
AKKVKPTVVVNAAN

SEQ ID NO: 12101 - protein, 16 aa, Severe acute respiratory syndrome coronavirus 2
  REGION 1..16: note = Table B: HLA-DRB1*04:01L HLA-DRB1*11:02L
ANVYLKHGGGVAGALN

SEQ ID NO: 12102 - protein, 11 aa, Severe acute respiratory syndrome coronavirus 2
  REGION 1..11: note = Table B: HLA-DRB1*04:01L HLA-DRB1*04:04L HLA-DPA1*03:01-B1*04:02L HLA-DRB1*11:01L HLA-DPA1*01:03-B1*04:01L HLA-DRB1*09:01L HLA-DRB3*01:01L HLA-DPA1*02:01-B1*13:01L
DDYIATNGPLK

SEQ ID NO: 12103 - protein, 16 aa, Severe acute respiratory syndrome coronavirus 2
  REGION 1..16: note = Table B: HLA-DRB1*04:01L HLA-DRB1*01:01L HLA-DRB1*03:01L HLA-DRB1*11:02L HLA-DRB1*14:02L HLA-DRB4*01:01L HLA-DRB1*09:01L HLA-DRB1*10:01L HLA-DRB1*08:02L
VDTVRTNVYLAVFDKN

SEQ ID NO: 12104 - protein, 14 aa, Severe acute respiratory syndrome coronavirus 2
  REGION 1..14: note = Table B: HLA-DRB1*04:01L HLA-DRB1*11:04L HLA-DRB1*11:01L HLA-DRB1*04:10L HLA-DRB1*12:02L HLA-DPA1*01:03-B1*02:01L HLA-DRB1*08:03L HLA-DRB1*15:01L
TNVYLAVFDKNLYD

SEQ ID NO: 12105 - protein, 11 aa, Severe acute respiratory syndrome coronavirus 2
  REGION 1..11: note = Table B: HLA-DRB1*04:01L HLA-DRB1*04:03L HLA-DRB1*13:03L HLA-DRB1*01:03L HLA-DRB1*04:02L HLA-DRB1*04:04L HLA-DRB1*04:05L HLA-DQA1*01:02-B1*06:02L HLA-DRB1*01:02L HLA-DRB4*03:01NL HLA-DRB1*08:04L HLA-DRB1*14:01L HLA-DRB1*11:04L HLA-DRB1*12:01L
  REGION 1..11: note = CONT. FROM ABOVE: HLA-DPA1*03:01-B1*105:01L HLA-DQA1*03:01-B1*03 :02L HLA-DRB1*14:54L HLA-DRB1*14:17L HLA-DRB1*10:01L HLA-DRB1*16 :01L HLA-DRB1*04:08L HLA-DQA1*02:01-B1*03:03L HLA-DRB1*15:03L
FLEMKSEKQVE

SEQ ID NO: 12106 - protein, 15 aa, Severe acute respiratory syndrome coronavirus 2
  REGION 1..15: note = Table B: HLA-DRB1*04:01L HLA-DRB3*02:01L HLA-DRB1*11:02L HLA-DPA1*01:03-B1*04:02L HLA-DPA1*01:03-B1*02:01L HLA-DRB1*10:01L
VEQKIAEIPKEEVKP

SEQ ID NO: 12107 - protein, 16 aa, Severe acute respiratory syndrome coronavirus 2
  REGION 1..16: note = Table B: HLA-DRB1*04:01L HLA-DRB1*01:01L HLA-DRB1*08:04L HLA-DRB3*02:01L HLA-DPA1*01:03-B1*03:01L HLA-DPA1*03:01-B1*04:02L HLA-DRB1*03:01L HLA-DRB1*11:03L HLA-DRB1*11:04L HLA-DRB1*11:01L HLA-DRB3*01:01L
  REGION 1..16: note = CONT. FROM ABOVE: HLA-DPA1*01:03-B1*104:01L HLA-DRB1*07:01L HLA- DRB1*10:01L HLA-DRB1*08:03L HLA-DRB1*15:01L
IPKEEVKPFITESKPS

SEQ ID NO: 12108 - protein, 13 aa, Severe acute respiratory syndrome coronavirus 2
  REGION 1..13: note = Table B: HLA-DRB1*04:01L HLA-DRB1*04:04L HLA-DRB1*11:03L HLA-DRB1*11:01L HLA-DRB1*04:10L HLA-DPA1*01:03-B1*04:02L HLA-DRB1*12:02L HLA-DRB3*01:01L HLA-DPA1*02:01-B1*13:01L HLA-DRB1*10:01L HLA-DRB1*08:02L
KPFITESKPSVEQ

SEQ ID NO: 12109 - protein, 13 aa, Severe acute respiratory syndrome coronavirus 2
  REGION 1..13: note = Table B: HLA-DRB1*04:01L HLA-DRB1*01:01L HLA-DRB1*09:01L
TTTLEETKFLTEN

SEQ ID NO: 12110 - protein, 15 aa, Severe acute respiratory syndrome coronavirus 2
  REGION 1..15: note = Table B: HLA-DRB1*04:01L HLA-DPA1*02:01-B1*13:01L HLA-DPA1*01:03-B1*02:01L HLA-DPA1*01:03-B1*104:01L
NLLLYIDINGNLHPD

SEQ ID NO: 12111 - protein, 13 aa, Severe acute respiratory syndrome coronavirus 2
  REGION 1..13: note = Table B: HLA-DRB1*04:01L HLA-DRB1*04:04L HLA-DQA1*01:02-B1*06:02L HLA-DRB1*01:01L HLA-DQA1*05:05-B1*03:19L HLA-DRB4*01:01L HLA-DPA1*01:03-B1*04:02L HLA-DQA1*05:05-B1*03:01L
GNLHPDSATLVSD

SEQ ID NO: 12112 - protein, 14 aa, Severe acute respiratory syndrome coronavirus 2
  REGION 1..14: note = Table B: HLA-DRB1*04:01L HLA-DRB1*04:04L HLA-DRB1*01:01L HLA-DRB1*11:02L HLA-DRB1*11:01L HLA-DRB5*01:01L HLA-DRB1*13:01L HLA-DPA1*01:03-B1*04:01L HLA-DRB1*04:10L HLA-DRB1*09:01L HLA-DPA1*01:03-B1*02:01L HLA-DRB1*07:01L HLA-DRB1*10:01L
  REGION 1..14: note = CONT. FROM ABOVE: HLA-DRB1*08:02L HLA-DRB1*08:03L
NLHPDSATLVSDID

SEQ ID NO: 12113 - protein, 14 aa, Severe acute respiratory syndrome coronavirus 2
  REGION 1..14: note = Table B: HLA-DRB1*04:01L HLA-DRB1*13:02L HLA-DRB1*13:03L HLA-DRB1*01:03L HLA-DRB1*04:02L HLA-DRB1*04:05L HLA-DRB1*01:02L HLA-DRB4*03:01NL HLA-DRB1*08:04L HLA-DRB1*08:77L HLA-DPA1*01:03-B1*03:01L HLA-DRB1*14:01L HLA-DRB1*11:03L
  REGION 1..14: note = CONT. FROM ABOVE: HLA-DRB1*11:04L HLA-DPA1*01:03-B1*04:02L HLA-D RB1*12:01L HLA-DRB3*01:01L HLA-DRB1*14:54L HLA-DRB1*14:17L HLA-D RB1*10:01L HLA-DRB1*16:01L HLA-DRB1*04:08L
SATLVSDIDITFLK

SEQ ID NO: 12114 - protein, 14 aa, Severe acute respiratory syndrome coronavirus 2
  REGION 1..14: note = Table B: HLA-DRB1*04:01L HLA-DQA1*05:05-B1*03:116L HLA-DPA1*01:03-B1*02:01L HLA-DPA1*01:03-B1*104:01L HLA-DRB1*08:02L
DITFLKKDAPYIVG

SEQ ID NO: 12115 - protein, 13 aa, Severe acute respiratory syndrome coronavirus 2
  REGION 1..13: note = Table B: HLA-DRB1*04:01L HLA-DRB1*13:02L HLA-DRB1*13:03L HLA-DRB1*01:03L HLA-DRB1*04:04L HLA-DRB1*01:02L HLA-DRB1*08:04L HLA-DRB1*08:77L HLA-DPA1*01:03-B1*03:01L HLA-DPA1*03:01-B1*04:02L HLA-DRB1*03:01L HLA-DRB1*14:01L
  REGION 1..13: note = CONT. FROM ABOVE: HLA-DRB1*14:02L HLA-DRB4*01:01L HLA-DPA1*01:03 -B1*04:01L HLA-DRB1*04:10L HLA-DPA1*01:03-B1*04:02L HLA-DPA1*02: 01-B1*13:01L HLA-DPA1*01:03-B1*104:01L HLA-DPA1*01:02-B1*04:01L HLA-DRB1*10:01L
PYIVGDVVQEGVL

SEQ ID NO: 12116 - protein, 14 aa, Severe acute respiratory syndrome coronavirus 2
  REGION 1..14: note = Table B: HLA-DRB1*04:01L HLA-DRB1*01:03L HLA-DRB1*04:04L HLA-DRB1*04:05L HLA-DRB4*03:01NL HLA-DRB1*08:04L HLA-DPA1*01:03-B1*03:01L HLA-DRB1*11:04L HLA-DRB1*04:10L HLA-DRB1*12:01L HLA-DRB1*14:54L HLA-DRB1*04:08L
VGDVVQEGVLTAVV

SEQ ID NO: 12117 - protein, 14 aa, Severe acute respiratory syndrome coronavirus 2
  REGION 1..14: note = Table B: HLA-DRB1*04:01L HLA-DRB1*01:01L HLA-DRB3*02:01L HLA-DPA1*01:03-B1*03:01L HLA-DRB1*03:01L HLA-DQA1*05:01-B1*02:01L HLA-DRB1*13:01L HLA-DPA1*02:01-B1*13:01L HLA-DPA1*01:03-B1*104:01L
  REGION 1..14: note = CONT. FROM ABOVE: HLA-DPA1*01:02-B1*04:01L HLA-DRB1*07:01L
TAVVIPTKKAGGTT

SEQ ID NO: 12118 - protein, 14 aa, Severe acute respiratory syndrome coronavirus 2
  REGION 1..14: note = Table B: HLA-DRB1*04:01L HLA-DRB1*01:01L HLA-DPA1*01:03-B1*03:01L HLA-DRB1*03:01L HLA-DRB1*13:01L HLA-DPA1*02:01-B1*13:01L HLA-DPA1*01:03-B1*104:01L HLA-DPA1*01:02-B1*04:01L HLA-DRB1*07:01L
AVVIPTKKAGGTTE

SEQ ID NO: 12119 - protein, 16 aa, Severe acute respiratory syndrome coronavirus 2
  REGION 1..16: note = Table B: HLA-DRB1*04:01L HLA-DRB1*03:01L HLA-DRB4*01:01L HLA-DRB3*01:01L HLA-DPA1*01:03-B1*02:01L HLA-DRB1*08:02L
VPTDNYITTYPGQGLN

SEQ ID NO: 12120 - protein, 12 aa, Severe acute respiratory syndrome coronavirus 2
  REGION 1..12: note = Table B: HLA-DRB1*04:01L HLA-DRB1*13:02L HLA-DRB1*01:01L HLA-DRB1*08:04L HLA-DRB1*08:77L HLA-DRB3*02:01L HLA-DPA1*01:03-B1*03:01L HLA-DPA1*03:01-B1*04:02L HLA-DRB1*14:01L HLA-DRB1*11:03L HLA-DRB1*11:04L HLA-DRB1*14:02L
  REGION 1..12: note = CONT. FROM ABOVE: HLA-DQA1*01:01-B1*05:01L HLA-DRB1*08:01L HLA-D RB1*11:01L HLA-DQA1*05:05-B1*03:19L HLA-DRB4*01:01L HLA-DRB1*09: 01L HLA-DPA1*01:03-B1*04:02L HLA-DRB3*01:01L HLA-DPA1*02:01-B1*1 3:01L HLA-DPA1*01:03-B1*02:01L HLA-DPA1*01:03-B1*104:01L
  REGION 1..12: note = CONT. FROM ABOVE: HLA-DRB1*07:01L HLA-DRB1*08:02L HLA-DRB1*08:03 L
FYILPSIISNEK

SEQ ID NO: 12121 - protein, 14 aa, Severe acute respiratory syndrome coronavirus 2
  REGION 1..14: note = Table B: HLA-DRB1*04:01L HLA-DRB1*04:04L HLA-DRB1*01:01L HLA-DQA1*01-B1*05L HLA-DRB4*02:01NL HLA-DPA1*01:03-B1*04:01L HLA-DQA1*05:05-B1*03:116L HLA-DPA1*02:01-B1*13:01L HLA-DPA1*01:03-B1*02:01L HLA-DRB1*07:01L HLA-DRB1*15:01L
LPSIISNEKQEILG

SEQ ID NO: 12122 - protein, 14 aa, Severe acute respiratory syndrome coronavirus 2
  REGION 1..14: note = Table B: HLA-DRB1*04:01L HLA-DRB1*11:01L
KQEILGTVSWNLRE

SEQ ID NO: 12123 - protein, 14 aa, Severe acute respiratory syndrome coronavirus 2
  REGION 1..14: note = Table B: HLA-DRB1*04:01L HLA-DRB1*01:01L HLA-DRB1*11:01L HLA-DRB3*01:01L HLA-DPA1*01:03-B1*02:01L HLA-DRB1*07:01L
RKYKGIKIQEGVVD

SEQ ID NO: 12124 - protein, 13 aa, Severe acute respiratory syndrome coronavirus 2
  REGION 1..13: note = Table B: HLA-DRB1*04:01L HLA-DRB1*13:03L HLA-DRB1*01:01L HLA-DRB1*08:04L HLA-DRB1*11:03L HLA-DRB1*11:04L HLA-DRB1*08:01L HLA-DRB1*09:01L HLA-DRB1*12:02L HLA-DRB3*01:01L HLA-DPA1*01:03-B1*104:01L HLA-DPA1*01:02-B1*04:01L
  REGION 1..13: note = CONT. FROM ABOVE: HLA-DRB1*07:01L HLA-DRB1*08:03L
KGIKIQEGVVDYG

SEQ ID NO: 12125 - protein, 13 aa, Severe acute respiratory syndrome coronavirus 2
  REGION 1..13: note = Table B: HLA-DRB1*04:01L HLA-DRB1*08:04L HLA-DRB3*02:01L HLA-DPA1*03:01-B1*04:02L HLA-DRB1*11:03L HLA-DRB1*11:04L HLA-DRB1*11:01L HLA-DRB1*12:02L HLA-DRB3*01:01L HLA-DPA1*02:01-B1*13:01L HLA-DPA1*01:03-B1*104:01L
  REGION 1..13: note = CONT. FROM ABOVE: HLA-DRB1*07:01L HLA-DRB1*10:01L HLA-DRB1*08:03 L
IKIQEGVVDYGAR

SEQ ID NO: 12126 - protein, 14 aa, Severe acute respiratory syndrome coronavirus 2
  REGION 1..14: note = Table B: HLA-DRB1*04:01L HLA-DPA1*01:03-B1*03:01L HLA-DPA1*01:03-B1*04:01L HLA-DRB1*09:01L HLA-DPA1*01:03-B1*04:02L HLA-DRB1*10:01L HLA-DRB1*08:03L
GARFYFYTSKTTVA

SEQ ID NO: 12127 - protein, 14 aa, Severe acute respiratory syndrome coronavirus 2
  REGION 1..14: note = Table B: HLA-DRB1*04:01L HLA-DRB1*03:01L HLA-DRB1*13:01L HLA-DPA1*01:03-B1*02:01L HLA-DRB1*08:02L
ARFYFYTSKTTVAS

SEQ ID NO: 12128 - protein, 15 aa, Severe acute respiratory syndrome coronavirus 2
  REGION 1..15: note = Table B: HLA-DRB1*04:01L HLA-DRB4*01:01L
FYFYTSKTTVASLIN

SEQ ID NO: 12129 - protein, 13 aa, Severe acute respiratory syndrome coronavirus 2
  REGION 1..13: note = Table B: HLA-DRB1*04:01L HLA-DRB1*13:02L HLA-DRB1*08:04L HLA-DRB1*11:03L HLA-DRB1*12:02L
ASLINTLNDLNET

SEQ ID NO: 12130 - protein, 13 aa, Severe acute respiratory syndrome coronavirus 2
  REGION 1..13: note = Table B: HLA-DRB1*04:01L HLA-DRB1*01:01L HLA-DRB3*01:01L HLA-DRB1*07:01L
RYMRSLKVPATVS

SEQ ID NO: 12131 - protein, 15 aa, Severe acute respiratory syndrome coronavirus 2
  REGION 1..15: note = Table B: HLA-DRB1*04:01L HLA-DRB1*04:04L HLA-DRB1*14:01L HLA-DRB1*11:03L HLA-DRB1*11:04L HLA-DRB1*14:02L HLA-DRB5*01:01L HLA-DPA1*01:03-B1*104:01L HLA-DRB1*10:01L HLA-DRB1*08:03L
VPATVSVSSPDAVTA

SEQ ID NO: 12132 - protein, 15 aa, Severe acute respiratory syndrome coronavirus 2
  REGION 1..15: note = Table B: HLA-DRB1*04:01L
TAYNGYLTSSSKTPE

SEQ ID NO: 12133 - protein, 13 aa, Severe acute respiratory syndrome coronavirus 2
  REGION 1..13: note = Table B: HLA-DRB1*04:01L HLA-DRB3*01:01L HLA-DPA1*01:03-B1*02:01L
GYLTSSSKTPEEH

SEQ ID NO: 12134 - protein, 16 aa, Severe acute respiratory syndrome coronavirus 2
  REGION 1..16: note = Table B: HLA-DRB1*04:01L HLA-DRB1*01:01L HLA-DRB1*11:02L HLA-DRB1*11:04L HLA-DRB1*11:01L HLA-DPA1*01:03-B1*02:01L HLA-DRB1*08:02L
TPEEHFIETISLAGSY

SEQ ID NO: 12135 - protein, 14 aa, Severe acute respiratory syndrome coronavirus 2
  REGION 1..14: note = Table B: HLA-DRB1*04:01L HLA-DRB1*11:01L HLA-DPA1*02:01-B1*13:01L HLA-DPA1*01:03-B1*02:01L HLA-DRB1*08:02L HLA-DRB1*08:03L
EHFIETISLAGSYK

SEQ ID NO: 12136 - protein, 14 aa, Severe acute respiratory syndrome coronavirus 2
  REGION 1..14: note = Table B: HLA-DRB1*04:01L HLA-DRB1*11:02L HLA-DRB1*11:03L HLA-DRB1*14:02L HLA-DRB1*09:01L HLA-DPA1*01:03-B1*104:01L HLA-DPA1*01:02-B1*04:01L HLA-DRB1*07:01L HLA-DRB1*08:02L
IETISLAGSYKDWS

SEQ ID NO: 12137 - protein, 14 aa, Severe acute respiratory syndrome coronavirus 2
  REGION 1..14: note = Table B: HLA-DRB1*04:01L HLA-DRB1*13:02L HLA-DRB1*13:03L HLA-DRB1*01:01L HLA-DRB1*08:04L HLA-DRB1*08:77L HLA-DRB3*02:01L HLA-DPA1*03:01-B1*04:02L HLA-DRB1*14:01L HLA-DRB1*11:03L HLA-DRB1*11:04L HLA-DRB1*14:02L HLA-DQA1*01:01-B1*05:01L
  REGION 1..14: note = CONT. FROM ABOVE: HLA-DRB1*08:01L HLA-DRB1*11:01L HLA-DQA1*01-B1 *05L HLA-DRB4*01:01L HLA-DRB1*09:01L HLA-DPA1*01:03-B1*04:02L HL A-DPA1*01:03-B1*104:01L HLA-DRB1*07:01L HLA-DRB1*08:02L HLA-DRB1 *08:03L
DWSYSGQSTQLGIE

SEQ ID NO: 12138 - protein, 12 aa, Severe acute respiratory syndrome coronavirus 2
  REGION 1..12: note = Table B: HLA-DRB1*04:01L HLA-DRB1*03:01L HLA-DRB5*01:01L HLA-DRB1*09:01L HLA-DRB3*01:01L HLA-DPA1*01:03-B1*104:01L HLA-DRB1*15:01L
SVYYTSNPTTFH

SEQ ID NO: 12139 - protein, 15 aa, Severe acute respiratory syndrome coronavirus 2
  REGION 1..15: note = Table B: HLA-DRB1*04:01L HLA-DRB1*11:02L
NPTTFHLDGEVITFD

SEQ ID NO: 12140 - protein, 15 aa, Severe acute respiratory syndrome coronavirus 2
  REGION 1..15: note = Table B: HLA-DRB1*04:01L
PTTFHLDGEVITFDN

SEQ ID NO: 12141 - protein, 14 aa, Severe acute respiratory syndrome coronavirus 2
  REGION 1..14: note = Table B: HLA-DRB1*04:01L HLA-DRB1*03:01L HLA-DRB1*11:02L HLA-DRB1*11:01L HLA-DPA1*01:03-B1*02:01L
GEVITFDNLKTLLS

SEQ ID NO: 12142 - protein, 14 aa, Severe acute respiratory syndrome coronavirus 2
  REGION 1..14: note = Table B: HLA-DRB1*04:01L HLA-DRB1*13:03L HLA-DRB1*01:01L HLA-DRB1*03:01L HLA-DRB1*11:02L HLA-DRB1*11:03L HLA-DRB3*01:01L HLA-DPA1*01:03-B1*02:01L HLA-DQA1*05:05-B1*03:01L HLA-DRB1*10:01L HLA-DRB1*08:02L HLA-DRB1*08:03L
VITFDNLKTLLSLR

SEQ ID NO: 12143 - protein, 14 aa, Severe acute respiratory syndrome coronavirus 2
  REGION 1..14: note = Table B: HLA-DRB1*04:01L
ITFDNLKTLLSLRE

SEQ ID NO: 12144 - protein, 14 aa, Severe acute respiratory syndrome coronavirus 2
  REGION 1..14: note = Table B: HLA-DRB1*04:01L HLA-DRB1*01:01L HLA-DRB1*11:03L HLA-DRB1*11:04L HLA-DRB1*11:01L HLA-DRB3*01:01L HLA-DPA1*01:03-B1*02:01L HLA-DRB1*07:01L
REVRTIKVFTTVDN

SEQ ID NO: 12145 - protein, 14 aa, Severe acute respiratory syndrome coronavirus 2
  REGION 1..14: note = Table B: HLA-DRB1*04:01L HLA-DRB1*01:01L HLA-DRB1*08:77L HLA-DRB1*11:02L HLA-DRB1*11:03L HLA-DRB1*11:04L HLA-DRB1*14:02L HLA-DRB1*11:01L HLA-DRB4*01:01L HLA-DRB1*09:01L HLA-DRB1*12:02L HLA-DRB3*01:01L HLA-DPA1*01:03-B1*02:01L HLA-DRB1*07:01L
  REGION 1..14: note = CONT. FROM ABOVE: HLA-DRB1*08:02L HLA-DRB1*15:01L
VRTIKVFTTVDNIN

SEQ ID NO: 12146 - protein, 11 aa, Severe acute respiratory syndrome coronavirus 2
  REGION 1..11: note = Table B: HLA-DRB1*04:01L HLA-DRB1*04:04L HLA-DRB1*01:01L HLA-DRB1*08:04L HLA-DPA1*01:03-B1*03:01L HLA-DPA1*03:01-B1*04:02L HLA-DRB1*11:04L HLA-DQA1*01:01-B1*05:01L HLA-DRB1*08:01L HLA-DRB5*01:01L
  REGION 1..11: note = CONT. FROM ABOVE: HLA-DPA1*01:03-B1*04:01L HLA-DRB1*09:01L HLA-D PA1*01:03-B1*04:02L HLA-DPA1*02:01-B1*13:01L HLA-DRB1*07:01L HLA -DRB1*08:03L
VFTTVDNINLH

SEQ ID NO: 12147 - protein, 16 aa, Severe acute respiratory syndrome coronavirus 2
  REGION 1..16: note = Table B: HLA-DRB1*04:01L HLA-DRB1*04:04L HLA-DRB1*01:01L HLA-DRB1*08:04L HLA-DRB1*03:01L HLA-DRB3*01:01L HLA-DPA1*01:03-B1*02:01L
GPTYLDGADVTKIKPH

SEQ ID NO: 12148 - protein, 15 aa, Severe acute respiratory syndrome coronavirus 2
  REGION 1..15: note = Table B: HLA-DRB1*04:01L HLA-DRB1*13:02L HLA-DRB1*01:01L HLA-DRB1*08:04L HLA-DRB1*11:01L HLA-DQA1*05:05-B1*03:19L HLA-DRB3*01:01L HLA-DPA1*02:01-B1*13:01L HLA-DRB1*07:01L HLA-DRB1*10:01L
GADVTKIKPHNSHEG

SEQ ID NO: 12149 - protein, 14 aa, Severe acute respiratory syndrome coronavirus 2
  REGION 1..14: note = Table B: HLA-DRB1*04:01L HLA-DRB1*13:02L HLA-DRB1*01:01L HLA-DRB1*08:04L HLA-DRB1*03:01L HLA-DRB1*11:03L HLA-DRB1*11:01L HLA-DQA1*01-B1*05L HLA-DPA1*02:01-B1*13:01L HLA-DPA1*03:01-B1*105:01L HLA-DRB1*07:01L HLA-DRB1*10:01L
  REGION 1..14: note = CONT. FROM ABOVE: HLA-DQA1*01:03-B1*06:01L HLA-DRB1*08:03L HLA-D RB1*15:01L
VTKIKPHNSHEGKT

SEQ ID NO: 12150 - protein, 11 aa, Severe acute respiratory syndrome coronavirus 2
  REGION 1..11: note = Table B: HLA-DRB1*04:01L HLA-DRB1*04:04L HLA-DRB1*01:02L HLA-DRB1*04:10L HLA-DRB1*10:01L HLA-DRB1*04:08L
FYVLPNDDTLR

SEQ ID NO: 12151 - protein, 20 aa, Severe acute respiratory syndrome coronavirus 2
  REGION 1..20: note = Table B: HLA-DRB1*04:01L HLA-DRB1*09:01L HLA-DRB1*07:01L HLA-DRB1*08:02L
LPNDDTLRVEAFEYYHTTDP

SEQ ID NO: 12152 - protein, 18 aa, Severe acute respiratory syndrome coronavirus 2
  REGION 1..18: note = Table B: HLA-DRB1*04:01L HLA-DRB1*13:01L HLA-DRB1*09:01L HLA-DRB1*07:01L HLA-DRB1*08:02L
DDTLRVEAFEYYHTTDPS

SEQ ID NO: 12153 - protein, 13 aa, Severe acute respiratory syndrome coronavirus 2
  REGION 1..13: note = Table B: HLA-DRB1*04:01L HLA-DRB4*03:01NL HLA-DRB1*11:03L HLA-DPA1*02:01-B1*13:01L HLA-DPA1*03:01-B1*105:01L HLA-DRB1*10:01L HLA-DQA1*01:03-B1*06:01L HLA-DRB1*08:03L HLA-DRB1*15:01L
LGRYMSALNHTKK

SEQ ID NO: 12154 - protein, 14 aa, Severe acute respiratory syndrome coronavirus 2
  REGION 1..14: note = Table B: HLA-DRB1*04:01L HLA-DRB1*13:02L HLA-DPA1*01:03-B1*03:01L HLA-DRB1*11:03L HLA-DRB1*14:02L HLA-DRB3*01:01L HLA-DPA1*02:01-B1*13:01L HLA-DPA1*03:01-B1*105:01L HLA-DQA1*05:05-B1*03:01L
  REGION 1..14: note = CONT. FROM ABOVE: HLA-DRB1*10:01L HLA-DQA1*01:03-B1*06:01L HLA-D RB1*08:02L HLA-DRB1*08:03L
LQQIELKFNPPALQ

SEQ ID NO: 12155 - protein, 13 aa, Severe acute respiratory syndrome coronavirus 2
  REGION 1..13: note = Table B: HLA-DRB1*04:01L HLA-DRB1*04:04L HLA-DRB3*02:01L HLA-DPA1*01:03-B1*03:01L HLA-DPA1*03:01-B1*04:02L HLA-DRB1*03:01L HLA-DRB1*11:02L HLA-DRB4*01:01L HLA-DPA1*01:03-B1*04:01L HLA-DQA1*05:05-B1*03:116L
  REGION 1..13: note = CONT. FROM ABOVE: HLA-DPA1*01:03-B1*04:02L HLA-DRB3*01:01L HLA-D PA1*01:03-B1*02:01L HLA-DPA1*01:03-B1*104:01L HLA-DRB1*08:02L HL A-DRB1*15:01L
DAYYRARAGEAAN

SEQ ID NO: 12156 - protein, 14 aa, Severe acute respiratory syndrome coronavirus 2
  REGION 1..14: note = Table B: HLA-DRB1*04:01L HLA-DRB1*14:02L HLA-DQA1*05:05-B1*03:19L HLA-DRB1*09:01L HLA-DPA1*01:03-B1*02:01L HLA-DPA1*01:03-B1*104:01L HLA-DRB1*07:01L
ETMSYLFQHANLDS

SEQ ID NO: 12157 - protein, 16 aa, Severe acute respiratory syndrome coronavirus 2
  REGION 1..16: note = Table B: HLA-DRB1*04:01L HLA-DRB1*01:01L
AVMYMGTLSYEQFKKG

SEQ ID NO: 12158 - protein, 14 aa, Severe acute respiratory syndrome coronavirus 2
  REGION 1..14: note = Table B: HLA-DRB1*04:01L HLA-DRB3*02:01L HLA-DRB1*03:01L HLA-DRB1*11:02L HLA-DRB1*13:01L HLA-DQA1*05:05-B1*03:116L HLA-DRB1*09:01L HLA-DRB1*08:02L HLA-DRB1*15:01L
MGTLSYEQFKKGVQ

SEQ ID NO: 12159 - protein, 14 aa, Severe acute respiratory syndrome coronavirus 2
  REGION 1..14: note = Table B: HLA-DRB1*04:01L HLA-DRB1*03:01L HLA-DRB1*11:02L HLA-DRB1*11:01L HLA-DPA1*01:03-B1*02:01L HLA-DRB1*08:02L
ATKYLVQQESPFVM

SEQ ID NO: 12160 - protein, 15 aa, Severe acute respiratory syndrome coronavirus 2
  REGION 1..15: note = Table B: HLA-DRB1*04:01L HLA-DRB1*01:01L HLA-DPA1*03:01-B1*04:02L HLA-DRB1*11:02L HLA-DRB1*11:03L HLA-DRB1*13:01L HLA-DPA1*02:01-B1*13:01L HLA-DPA1*01:03-B1*02:01L HLA-DQA1*05:05-B1*03:01L
  REGION 1..15: note = CONT. FROM ABOVE: HLA-DRB1*07:01L HLA-DRB1*10:01L HLA-DRB1*08:03 L
YKHITSKETLYCIDG

SEQ ID NO: 12161 - protein, 14 aa, Severe acute respiratory syndrome coronavirus 2
  REGION 1..14: note = Table B: HLA-DRB1*04:01L HLA-DRB1*04:04L HLA-DRB1*11:04L HLA-DRB1*08:01L HLA-DRB1*07:01L
KETLYCIDGALLTK

SEQ ID NO: 12162 - protein, 18 aa, Severe acute respiratory syndrome coronavirus 2
  REGION 1..18: note = Table B: HLA-DRB1*04:01L HLA-DRB1*11:01L
GPITDVFYKENSYTTTIK

SEQ ID NO: 12163 - protein, 16 aa, Severe acute respiratory syndrome coronavirus 2
  REGION 1..16: note = Table B: HLA-DRB1*04:01L HLA-DRB1*04:04L HLA-DRB1*08:04L HLA-DPA1*03:01-B1*04:02L HLA-DRB1*14:01L HLA-DRB1*14:02L HLA-DRB1*11:01L HLA-DRB3*01:01L HLA-DRB1*07:01L
TDVFYKENSYTTTIKP

SEQ ID NO: 12164 - protein, 18 aa, Severe acute respiratory syndrome coronavirus 2
  REGION 1..18: note = Table B: HLA-DRB1*04:01L HLA-DRB1*04:03L HLA-DRB1*04:04L HLA-DRB1*01:01L HLA-DRB1*08:04L HLA-DRB3*02:01L HLA-DPA1*03:01-B1*04:02L HLA-DRB1*03:01L HLA-DRB1*14:01L HLA-DRB1*11:02L HLA-DRB1*11:03L HLA-DRB1*11:04L HLA-DRB1*14:02L
  REGION 1..18: note = CONT. FROM ABOVE: HLA-DRB1*08:01L HLA-DRB1*11:01L HLA-DQA1*05:01 -B1*02:01L HLA-DRB3*01:01L HLA-DPA1*01:03-B1*104:01L HLA-DPA1*01 :02-B1*04:01L HLA-DRB1*07:01L HLA-DRB1*10:01L HLA-DRB1*08:02L
KPVTYKLDGVVCTEIDPK

SEQ ID NO: 12165 - protein, 13 aa, Severe acute respiratory syndrome coronavirus 2
  REGION 1..13: note = Table B: HLA-DRB1*04:01L HLA-DRB1*01:01L HLA-DRB3*02:01L HLA-DRB1*11:03L HLA-DRB1*11:04L HLA-DRB1*08:01L HLA-DRB1*11:01L HLA-DPA1*01:03-B1*04:01L HLA-DRB1*09:01L HLA-DRB1*12:02L HLA-DRB3*01:01L HLA-DPA1*01:03-B1*02:01L
  REGION 1..13: note = CONT. FROM ABOVE: HLA-DPA1*01:03-B1*104:01L HLA-DRB1*07:01L HLA- DRB1*08:03L
SYFTEQPIDLVPN

SEQ ID NO: 12166 - protein, 12 aa, Severe acute respiratory syndrome coronavirus 2
  REGION 1..12: note = Table B: HLA-DRB1*04:01L HLA-DRB1*04:04L HLA-DRB1*01:01L HLA-DRB3*02:01L HLA-DPA1*01:03-B1*03:01L HLA-DPA1*03:01-B1*04:02L HLA-DRB1*03:01L HLA-DRB1*11:01L HLA-DRB5*01:01L HLA-DRB1*09:01L HLA-DPA1*03:01-B1*105:01L
  REGION 1..12: note = CONT. FROM ABOVE: HLA-DPA1*01:02-B1*04:01L HLA-DRB1*07:01L HLA-D RB1*10:01L HLA-DQA1*01:03-B1*06:01L HLA-DRB1*08:03L
DLVPNQPYPNAS

SEQ ID NO: 12167 - protein, 13 aa, Severe acute respiratory syndrome coronavirus 2
  REGION 1..13: note = Table B: HLA-DRB1*04:01L HLA-DRB1*11:03L HLA-DRB1*14:02L HLA-DRB4*01:01L HLA-DRB1*09:01L
DNIKFADDLNQLT

SEQ ID NO: 12168 - protein, 12 aa, Severe acute respiratory syndrome coronavirus 2
  REGION 1..12: note = Table B: HLA-DRB1*04:01L HLA-DRB1*13:02L HLA-DRB1*13:03L HLA-DRB1*01:03L HLA-DRB1*04:04L HLA-DQA1*01:02-B1*06:02L HLA-DRB1*01:02L HLA-DRB4*03:01NL HLA-DRB1*08:04L HLA-DRB1*11:04L HLA-DRB1*04:10L HLA-DRB1*12:01L HLA-DRB3*01:01L
  REGION 1..12: note = CONT. FROM ABOVE: HLA-DPA1*03:01-B1*105:01L HLA-DRB1*14:54L HLA- DRB1*10:01L HLA-DRB1*04:08L HLA-DRB1*08:03L
IKFADDLNQLTG

SEQ ID NO: 12169 - protein, 16 aa, Severe acute respiratory syndrome coronavirus 2
  REGION 1..16: note = Table B: HLA-DRB1*04:01L HLA-DPA1*01:03-B1*03:01L HLA-DPA1*03:01-B1*04:02L HLA-DPA1*01:03-B1*104:01L
DDLNQLTGYKKPASRE

SEQ ID NO: 12170 - protein, 16 aa, Severe acute respiratory syndrome coronavirus 2
  REGION 1..16: note = Table B: HLA-DRB1*04:01L HLA-DPA1*01:03-B1*03:01L HLA-DPA1*01:03-B1*104:01L HLA-DRB1*10:01L
LNQLTGYKKPASRELK

SEQ ID NO: 12171 - protein, 14 aa, Severe acute respiratory syndrome coronavirus 2
  REGION 1..14: note = Table B: HLA-DRB1*04:01L HLA-DRB1*13:02L HLA-DRB1*13:03L HLA-DRB1*04:04L HLA-DRB1*01:02L HLA-DRB4*03:01NL HLA-DRB1*08:04L HLA-DRB1*08:77L HLA-DRB3*02:01L HLA-DPA1*03:01-B1*04:02L HLA-DRB1*03:01L HLA-DRB1*14:01L HLA-DRB1*11:03L HLA-DRB1*11:04L
  REGION 1..14: note = CONT. FROM ABOVE: HLA-DRB1*14:02L HLA-DRB1*08:01L HLA-DRB1*11:01 L HLA-DRB4*01:01L HLA-DPA1*01:03-B1*04:01L HLA-DRB1*04:10L HLA-D RB1*09:01L HLA-DPA1*01:03-B1*04:02L HLA-DRB1*12:01L HLA-DRB1*12: 02L HLA-DRB3*01:01L HLA-DPA1*02:01-B1*13:01L HLA-DRB1*14:54L
  REGION 1..14: note = CONT. FROM ABOVE: HLA-DPA1*01:03-B1*104:01L HLA-DRB1*14:17L HLA- DPA1*01:02-B1*04:01L HLA-DRB1*07:01L HLA-DRB1*10:01L HLA-DRB1*08 :02L HLA-DRB1*08:03L HLA-DRB1*15:03L
FPDLNGDVVAIDYK

SEQ ID NO: 12172 - protein, 13 aa, Severe acute respiratory syndrome coronavirus 2
  REGION 1..13: note = Table B: HLA-DRB1*04:01L HLA-DRB1*01:01L HLA-DPA1*03:01-B1*04:02L HLA-DRB1*11:01L HLA-DRB5*01:01L HLA-DRB4*01:01L HLA-DRB1*09:01L HLA-DPA1*01:03-B1*04:02L HLA-DRB3*01:01L HLA-DPA1*01:03-B1*104:01L HLA-DRB1*07:01L
SNSFDVLKSEDAQ

SEQ ID NO: 12173 - protein, 11 aa, Severe acute respiratory syndrome coronavirus 2
  REGION 1..11: note = Table B: HLA-DRB1*04:01L HLA-DRB1*13:03L HLA-DRB1*01:03L HLA-DRB1*04:04L HLA-DRB1*04:05L HLA-DRB1*01:02L HLA-DRB4*03:01NL HLA-DRB1*11:04L HLA-DQA1*05:01-B1*02:01L HLA-DRB1*04:10L HLA-DRB1*12:01L HLA-DRB1*14:54L HLA-DRB1*10:01L HLA-DRB1*16:01L
  REGION 1..11: note = CONT. FROM ABOVE: HLA-DRB1*04:08L
FDVLKSEDAQG

SEQ ID NO: 12174 - protein, 12 aa, Severe acute respiratory syndrome coronavirus 2
  REGION 1..12: note = Table B: HLA-DRB1*04:01L HLA-DRB1*08:04L HLA-DRB1*11:03L HLA-DQA1*01:01-B1*05:01L HLA-DRB1*11:01L HLA-DRB1*12:02L HLA-DRB3*01:01L HLA-DPA1*02:01-B1*13:01L HLA-DQA1*05:05-B1*03:01L HLA-DRB1*08:03L
DIILKPANNSLK

SEQ ID NO: 12175 - protein, 14 aa, Severe acute respiratory syndrome coronavirus 2
  REGION 1..14: note = Table B: HLA-DRB1*04:01L HLA-DRB1*01:01L HLA-DRB1*08:77L HLA-DRB1*11:02L HLA-DRB1*14:02L HLA-DQA1*01:01-B1*05:01L HLA-DRB1*11:01L HLA-DRB4*01:01L HLA-DPA1*01:03-B1*04:01L HLA-DPA1*01:03-B1*04:02L HLA-DRB1*12:02L HLA-DRB3*01:01L
  REGION 1..14: note = CONT. FROM ABOVE: HLA-DPA1*01:03-B1*02:01L HLA-DPA1*01:03-B1*104 :01L HLA-DRB1*07:01L
TDLMAAYVDNSSLT

SEQ ID NO: 12176 - protein, 13 aa, Severe acute respiratory syndrome coronavirus 2
  REGION 1..13: note = Table B: HLA-DRB1*04:01L HLA-DRB1*08:04L HLA-DRB1*11:04L HLA-DRB1*11:01L HLA-DRB3*01:01L
SRVLGLKTLATHG

SEQ ID NO: 12177 - protein, 14 aa, Severe acute respiratory syndrome coronavirus 2
  REGION 1..14: note = Table B: HLA-DRB1*04:01L HLA-DRB1*11:03L HLA-DRB1*11:04L HLA-DRB1*08:01L HLA-DRB1*11:01L HLA-DRB3*01:01L HLA-DRB1*10:01L HLA-DRB1*15:01L
VLGLKTLATHGLAA

SEQ ID NO: 12178 - protein, 14 aa, Severe acute respiratory syndrome coronavirus 2
  REGION 1..14: note = Table B: HLA-DRB1*04:01L HLA-DRB1*01:01L HLA-DRB1*08:77L HLA-DRB1*03:01L HLA-DRB1*11:02L HLA-DRB1*11:03L HLA-DRB1*11:04L HLA-DRB1*14:02L HLA-DRB1*11:01L HLA-DRB4*01:01L HLA-DRB1*09:01L HLA-DRB1*12:02L HLA-DRB3*01:01L HLA-DRB1*07:01L HLA-DRB1*10:01L
  REGION 1..14: note = CONT. FROM ABOVE: HLA-DRB1*08:02L HLA-DRB1*08:03L
LAAVNSVPWDTIAN

SEQ ID NO: 12179 - protein, 10 aa, Severe acute respiratory syndrome coronavirus 2
  REGION 1..10: note = Table B: HLA-DRB1*04:01L HLA-DRB1*13:02M HLA-DRB1*13:03M HLA-DRB1*01:03L HLA-DRB1*04:02L HLA-DRB1*04:04L HLA-DRB1*01:01L HLA-DRB4*03:01NM HLA-DRB3*02:01L HLA-DRB1*14:01L HLA-DRB1*11:04M HLA-DRB1*14:02L HLA-DRB1*08:01M HLA-DRB1*11:01L HLA-DRB5*01:01M
  REGION 1..10: note = CONT. FROM ABOVE: HLA-DRB4*02:01NL HLA-DRB1*13:01L HLA-DPA1*01:0 3-B1*04:02L HLA-DRB1*12:01M HLA-DRB1*12:02M HLA-DRB3*01:01L HLA- DPA1*03:01-B1*105:01L HLA-DQA1*03:01-B1*03:02M HLA-DRB1*14:54L H LA-DQA1*05:05-B1*03:01M HLA-DRB1*14:17L HLA-DRB1*16:01L
  REGION 1..10: note = CONT. FROM ABOVE: HLA-DQA1*01:03-B1*06:01L HLA-DRB1*08:02L HLA-D RB1*08:03L HLA-DQA1*02:01-B1*03:03L HLA-DRB1*15:01L
VSTTTNIVTR

SEQ ID NO: 12180 - protein, 14 aa, Severe acute respiratory syndrome coronavirus 2
  REGION 1..14: note = Table B: HLA-DRB1*04:01L HLA-DRB1*03:01L HLA-DRB1*14:02L HLA-DRB1*11:01L HLA-DRB1*04:10L HLA-DPA1*02:01-B1*13:01L HLA-DPA1*01:02-B1*04:01L
NSRIKASMPTTIAK

SEQ ID NO: 12181 - protein, 13 aa, Severe acute respiratory syndrome coronavirus 2
  REGION 1..13: note = Table B: HLA-DRB1*04:01L HLA-DRB1*15:01L
ASFNYLKSPNFSK

SEQ ID NO: 12182 - protein, 14 aa, Severe acute respiratory syndrome coronavirus 2
  REGION 1..14: note = Table B: HLA-DRB1*04:01L HLA-DRB1*08:01L HLA-DPA1*01:03-B1*02:01L HLA-DRB1*08:02L
LGSLIYSTAALGVL

SEQ ID NO: 12183 - protein, 15 aa, Severe acute respiratory syndrome coronavirus 2
  REGION 1..15: note = Table B: HLA-DRB1*04:01L HLA-DRB1*01:01L HLA-DRB1*08:04L HLA-DRB1*14:01L HLA-DRB1*11:03L HLA-DQA1*01-B1*05L HLA-DRB1*09:01L HLA-DRB1*08:03L
TAALGVLMSNLGMPS

SEQ ID NO: 12184 - protein, 13 aa, Severe acute respiratory syndrome coronavirus 2
  REGION 1..13: note = Table B: HLA-DRB1*04:01L HLA-DRB1*04:04L HLA-DRB1*08:04L HLA-DRB1*11:01L HLA-DRB4*01:01L HLA-DRB3*01:01L
EGYLNSTNVTIAT

SEQ ID NO: 12185 - protein, 14 aa, Severe acute respiratory syndrome coronavirus 2
  REGION 1..14: note = Table B: HLA-DRB1*04:01L HLA-DRB1*13:02L HLA-DRB1*13:03L HLA-DRB1*01:03L HLA-DRB1*01:01L HLA-DRB1*08:77L HLA-DRB3*02:01L HLA-DPA1*01:03-B1*03:01L HLA-DPA1*03:01-B1*04:02L HLA-DRB1*14:01L HLA-DRB1*11:03L HLA-DRB1*11:04L HLA-DRB1*14:02L
  REGION 1..14: note = CONT. FROM ABOVE: HLA-DRB1*11:01L HLA-DRB4*01:01L HLA-DRB1*09:01 L HLA-DRB1*12:02L HLA-DPA1*01:03-B1*104:01L HLA-DRB1*08:02L HLA- DRB1*08:03L
LSGLDSLDTYPSLE

SEQ ID NO: 12186 - protein, 14 aa, Severe acute respiratory syndrome coronavirus 2
  REGION 1..14: note = Table B: HLA-DRB1*04:01L HLA-DPA1*01:03-B1*03:01L HLA-DRB1*08:03L
SGLDSLDTYPSLET

SEQ ID NO: 12187 - protein, 14 aa, Severe acute respiratory syndrome coronavirus 2
  REGION 1..14: note = Table B: HLA-DRB1*04:01L HLA-DRB1*03:01L HLA-DRB1*11:02L HLA-DRB1*11:04L HLA-DRB1*11:01L HLA-DQA1*05:05-B1*03:19L HLA-DRB4*01:01L HLA-DPA1*01:03-B1*02:01L HLA-DRB1*08:02L
ISSFKWDLTAFGLV

SEQ ID NO: 12188 - protein, 14 aa, Severe acute respiratory syndrome coronavirus 2
  REGION 1..14: note = Table B: HLA-DRB1*04:01L HLA-DRB1*01:01L HLA-DRB1*08:04L HLA-DRB1*11:03L HLA-DRB1*11:04L HLA-DRB1*14:02L HLA-DRB1*11:01L HLA-DQA1*01-B1*05L HLA-DRB1*09:01L HLA-DPA1*01:03-B1*04:02L HLA-DRB3*01:01L HLA-DPA1*02:01-B1*13:01L
  REGION 1..14: note = CONT. FROM ABOVE: HLA-DPA1*01:03-B1*104:01L HLA-DRB1*07:01L HLA- DRB1*08:03L
INLVQMAPISAMVR

SEQ ID NO: 12189 - protein, 15 aa, Severe acute respiratory syndrome coronavirus 2
  REGION 1..15: note = Table B: HLA-DRB1*04:01L HLA-DRB1*09:01L
SFYYVWKSYVHVVDG

SEQ ID NO: 12190 - protein, 12 aa, Severe acute respiratory syndrome coronavirus 2
  REGION 1..12: note = Table B: HLA-DRB1*04:01L HLA-DRB1*13:02L HLA-DRB1*04:04L HLA-DRB1*01:01L HLA-DRB1*08:04L HLA-DRB3*02:01L HLA-DPA1*01:03-B1*03:01L HLA-DPA1*03:01-B1*04:02L HLA-DRB1*14:01L HLA-DRB1*11:03L HLA-DRB1*11:04L
  REGION 1..12: note = CONT. FROM ABOVE: HLA-DQA1*01:01-B1*05:01L HLA-DRB1*11:01L HLA-D RB1*09:01L HLA-DRB1*12:02L HLA-DRB3*01:01L HLA-DPA1*02:01-B1*13: 01L HLA-DPA1*01:02-B1*04:01L HLA-DRB1*07:01L HLA-DRB1*10:01L HLA -DRB1*08:03L HLA-DRB1*15:01L
RSFYVYANGGKG

SEQ ID NO: 12191 - protein, 14 aa, Severe acute respiratory syndrome coronavirus 2
  REGION 1..14: note = Table B: HLA-DRB1*04:01L HLA-DRB1*04:10L HLA-DRB1*07:01L
ISDEVARDLSLQFK

SEQ ID NO: 12192 - protein, 15 aa, Severe acute respiratory syndrome coronavirus 2
  REGION 1..15: note = Table B: HLA-DRB1*04:01L
SDEVARDLSLQFKRP

SEQ ID NO: 12193 - protein, 12 aa, Severe acute respiratory syndrome coronavirus 2
  REGION 1..12: note = Table B: HLA-DRB1*04:01L HLA-DRB1*08:04L HLA-DRB3*02:01L HLA-DPA1*01:03-B1*03:01L HLA-DPA1*03:01-B1*04:02L HLA-DRB1*03:01L HLA-DRB1*11:03L HLA-DRB1*11:04L HLA-DRB1*11:01L HLA-DRB5*01:01L HLA-DRB4*02:01NL HLA-DRB1*13:01L HLA-DRB1*04:10L
  REGION 1..12: note = CONT. FROM ABOVE: HLA-DRB1*09:01L HLA-DRB1*12:02L HLA-DRB3*01:01 L HLA-DPA1*03:01-B1*105:01L HLA-DPA1*01:02-B1*04:01L HLA-DRB1*10 :01L HLA-DRB1*08:03L HLA-DRB1*15:03L
SSYIVDSVTVKN

SEQ ID NO: 12194 - protein, 11 aa, Severe acute respiratory syndrome coronavirus 2
  REGION 1..11: note = Table B: HLA-DRB1*04:01L HLA-DRB1*04:04L HLA-DRB1*08:04L HLA-DRB3*02:01L HLA-DPA1*01:03-B1*03:01L HLA-DRB1*11:03L HLA-DRB1*11:04L HLA-DRB1*12:02L HLA-DPA1*03:01-B1*105:01L HLA-DQA1*05:05-B1*03:01L HLA-DPA1*01:02-B1*04:01L
  REGION 1..11: note = CONT. FROM ABOVE: HLA-DRB1*15:03L
YIVDSVTVKNG

SEQ ID NO: 12195 - protein, 14 aa, Severe acute respiratory syndrome coronavirus 2
  REGION 1..14: note = Table B: HLA-DRB1*04:01L HLA-DRB1*01:01L HLA-DPA1*03:01-B1*04:02L HLA-DRB1*11:03L HLA-DRB1*07:01L HLA-DRB1*08:03L
GSIHLYFDKAGQKT

SEQ ID NO: 12196 - protein, 11 aa, Severe acute respiratory syndrome coronavirus 2
  REGION 1..11: note = Table B: HLA-DRB1*04:01L HLA-DRB1*01:01L HLA-DQA1*05:05-B1*03:01L
LYFDKAGQKTY

SEQ ID NO: 12197 - protein, 10 aa, Severe acute respiratory syndrome coronavirus 2
  REGION 1..10: note = Table B: HLA-DRB1*04:01L HLA-DRB1*04:03M HLA-DRB1*13:02L HLA-DRB1*13:03L HLA-DRB1*01:03L HLA-DRB1*04:02M HLA-DRB1*04:04L HLA-DRB1*04:05L HLA-DQA1*01:02-B1*06:02L HLA-DRB1*01:02L HLA-DRB4*03:01NL HLA-DRB1*08:04L HLA-DRB1*14:01L HLA-DRB1*11:03L
  REGION 1..10: note = CONT. FROM ABOVE: HLA-DRB1*11:04L HLA-DRB1*11:01L HLA-DQA1*01-B1 *05L HLA-DQA1*05:01-B1*02:01L HLA-DRB1*04:10M HLA-DRB1*12:01L HL A-DRB1*12:02L HLA-DPA1*03:01-B1*105:01L HLA-DQA1*03:01-B1*03:02L HLA-DRB1*14:54L HLA-DQA1*05:05-B1*03:01L HLA-DRB1*14:17M
  REGION 1..10: note = CONT. FROM ABOVE: HLA-DRB1*10:01L HLA-DRB1*16:01L HLA-DRB1*04:08 M HLA-DRB1*08:03L HLA-DQA1*02:01-B1*03:03L HLA-DRB1*15:03L
FVNLDNLRAN

SEQ ID NO: 12198 - protein, 16 aa, Severe acute respiratory syndrome coronavirus 2
  REGION 1..16: note = Table B: HLA-DRB1*04:01L HLA-DRB1*01:01L HLA-DPA1*03:01-B1*04:02L HLA-DRB1*11:02L HLA-DRB1*13:01L HLA-DRB4*01:01L HLA-DQA1*05:05-B1*03:116L HLA-DRB1*04:10L HLA-DRB1*09:01L HLA-DPA1*01:03-B1*04:02L
  REGION 1..16: note = CONT. FROM ABOVE: HLA-DPA1*01:03-B1*02:01L HLA-DPA1*01:03-B1*104 :01L HLA-DPA1*01:02-B1*04:01L HLA-DRB1*07:01L HLA-DRB1*10:01L HL A-DRB1*08:02L HLA-DRB1*08:03L
LDNLRANNTKGSLPIN

SEQ ID NO: 12199 - protein, 14 aa, Severe acute respiratory syndrome coronavirus 2
  REGION 1..14: note = Table B: HLA-DRB1*04:01L HLA-DRB1*01:01L HLA-DRB1*11:02L HLA-DRB5*01:01L HLA-DRB1*08:03L
INVIVFDGKSKCEE

SEQ ID NO: 12200 - protein, 14 aa, Severe acute respiratory syndrome coronavirus 2
  REGION 1..14: note = Table B: HLA-DRB1*04:01L HLA-DRB1*11:02L HLA-DRB5*01:01L HLA-DRB1*13:01L HLA-DRB1*08:03L
NVIVFDGKSKCEES

SEQ ID NO: 12201 - protein, 11 aa, Severe acute respiratory syndrome coronavirus 2
  REGION 1..11: note = Table B: HLA-DRB1*04:01L HLA-DRB1*04:03L HLA-DRB1*04:02L HLA-DRB1*04:05L HLA-DRB1*11:03L HLA-DRB1*14:54L HLA-DRB1*04:08L
EESSAKSASVY

SEQ ID NO: 12202 - protein, 14 aa, Severe acute respiratory syndrome coronavirus 2
  REGION 1..14: note = Table B: HLA-DRB1*04:01L HLA-DRB1*04:04L HLA-DRB1*01:02L HLA-DRB1*08:04L HLA-DRB1*08:77L HLA-DPA1*01:03-B1*03:01L HLA-DRB1*14:01L HLA-DRB1*11:03L HLA-DRB1*11:04L HLA-DRB1*14:02L HLA-DRB5*01:01L HLA-DRB4*01:01L HLA-DRB1*12:02L HLA-DRB3*01:01L
  REGION 1..14: note = CONT. FROM ABOVE: HLA-DPA1*02:01-B1*13:01L HLA-DPA1*03:01-B1*105 :01L HLA-DRB1*10:01L HLA-DRB1*04:08L HLA-DRB1*08:03L HLA-DRB1*15 :03L
DQALVSDVGDSAEV

SEQ ID NO: 12203 - protein, 14 aa, Severe acute respiratory syndrome coronavirus 2
  REGION 1..14: note = Table B: HLA-DRB1*04:01L HLA-DRB1*13:03L HLA-DRB1*01:03L HLA-DRB1*04:04L HLA-DRB1*01:02L HLA-DRB1*11:04L HLA-DRB1*12:01L HLA-DRB1*14:54L HLA-DRB1*10:01L HLA-DRB1*04:08L
QALVSDVGDSAEVA

SEQ ID NO: 12204 - protein, 11 aa, Severe acute respiratory syndrome coronavirus 2
  REGION 1..11: note = Table B: HLA-DRB1*04:01L HLA-DRB1*04:04L HLA-DQA1*01:02-B1*06:02L HLA-DRB1*01:01L HLA-DRB1*01:02L HLA-DRB1*08:04L HLA-DRB1*08:77L HLA-DRB3*02:01L HLA-DPA1*01:03-B1*03:01L HLA-DPA1*03:01-B1*04:02L
  REGION 1..11: note = CONT. FROM ABOVE: HLA-DRB1*14:01L HLA-DRB1*11:03L HLA-DRB1*11:04 L HLA-DRB1*08:01L HLA-DRB1*11:01L HLA-DRB4*02:01NL HLA-DRB1*13:0 1L HLA-DRB4*01:01L HLA-DPA1*01:03-B1*04:01L HLA-DQA1*05:05-B1*03 :116L HLA-DRB1*04:10L HLA-DRB1*09:01L HLA-DRB1*12:02L
  REGION 1..11: note = CONT. FROM ABOVE: HLA-DRB3*01:01L HLA-DPA1*02:01-B1*13:01L HLA-D PA1*01:03-B1*104:01L HLA-DPA1*01:02-B1*04:01L HLA-DRB1*07:01L HL A-DRB1*10:01L HLA-DRB1*04:08L HLA-DRB1*08:02L HLA-DRB1*08:03L HL A-DRB1*15:03L
DVGDSAEVAVK

SEQ ID NO: 12205 - protein, 13 aa, Severe acute respiratory syndrome coronavirus 2
  REGION 1..13: note = Table B: HLA-DRB1*04:01L HLA-DRB1*08:04L HLA-DRB1*11:01L HLA-DRB3*01:01L HLA-DPA1*01:03-B1*104:01L HLA-DRB1*08:03L HLA-DRB1*15:01L
NTFSSTFNVPMEK

SEQ ID NO: 12206 - protein, 15 aa, Severe acute respiratory syndrome coronavirus 2
  REGION 1..15: note = Table B: HLA-DRB1*04:01L HLA-DRB1*11:01L HLA-DRB3*01:01L
NVPMEKLKTLVATAE

SEQ ID NO: 12207 - protein, 12 aa, Severe acute respiratory syndrome coronavirus 2
  REGION 1..12: note = Table B: HLA-DRB1*04:01L HLA-DRB1*01:01L HLA-DRB1*08:04L HLA-DRB1*11:03L HLA-DRB1*09:01L HLA-DRB3*01:01L HLA-DRB1*10:01L
LVATAEAELAKN

SEQ ID NO: 12208 - protein, 14 aa, Severe acute respiratory syndrome coronavirus 2
  REGION 1..14: note = Table B: HLA-DRB1*04:01L HLA-DRB1*04:04L HLA-DRB1*08:77L HLA-DRB1*03:01L HLA-DRB1*11:02L HLA-DRB1*11:03L HLA-DRB1*11:04L HLA-DRB1*14:02L HLA-DRB1*11:01L HLA-DRB4*01:01L HLA-DQA1*05:05-B1*03:116L HLA-DRB1*09:01L
  REGION 1..14: note = CONT. FROM ABOVE: HLA-DPA1*01:03-B1*04:02L HLA-DRB3*01:01L HLA-D PA1*01:03-B1*02:01L HLA-DPA1*01:03-B1*104:01L HLA-DRB1*07:01L HL A-DRB1*10:01L HLA-DRB1*08:02L HLA-DRB1*08:03L
EAELAKNVSLDNVL

SEQ ID NO: 12209 - protein, 14 aa, Severe acute respiratory syndrome coronavirus 2
  REGION 1..14: note = Table B: HLA-DRB1*04:01L HLA-DRB1*04:04L HLA-DRB1*08:04L HLA-DPA1*03:01-B1*04:02L HLA-DRB1*11:03L HLA-DRB1*13:01L HLA-DRB1*09:01L HLA-DRB1*12:02L HLA-DRB1*10:01L
GFVDSDVETKDVVE

SEQ ID NO: 12210 - protein, 15 aa, Severe acute respiratory syndrome coronavirus 2
  REGION 1..15: note = Table B: HLA-DRB1*04:01L HLA-DRB1*01:01L HLA-DRB1*08:77L HLA-DRB1*11:02L HLA-DQA1*01:01-B1*05:01L HLA-DRB1*13:01L HLA-DRB1*09:01L HLA-DPA1*01:03-B1*104:01L HLA-DRB1*08:02L HLA-DRB1*15:01L
NYMLTYNKVENMTPR

SEQ ID NO: 12211 - protein, 15 aa, Severe acute respiratory syndrome coronavirus 2
  REGION 1..15: note = Table B: HLA-DRB1*04:01L HLA-DRB1*04:03L HLA-DRB1*04:02L HLA-DRB1*04:04L HLA-DRB1*11:04L HLA-DRB1*11:01L HLA-DQA1*05:05-B1*03:19L HLA-DRB1*15:03L
TPRDLGACIDCSARH

SEQ ID NO: 12212 - protein, 16 aa, Severe acute respiratory syndrome coronavirus 2
  REGION 1..16: note = Table B: HLA-DRB1*04:01L HLA-DRB3*02:01L HLA-DRB1*10:01L
SARHINAQVAKSHNIA

SEQ ID NO: 12213 - protein, 14 aa, Severe acute respiratory syndrome coronavirus 2
  REGION 1..14: note = Table B: HLA-DRB1*04:01L HLA-DRB1*14:02L HLA-DRB1*08:02L
SHNIALIWNVKDFM

SEQ ID NO: 12214 - protein, 16 aa, Severe acute respiratory syndrome coronavirus 2
  REGION 1..16: note = Table B: HLA-DRB1*04:01L HLA-DRB3*02:01L HLA-DRB4*01:01L
IALIWNVKDFMSLSEQ

SEQ ID NO: 12215 - protein, 14 aa, Severe acute respiratory syndrome coronavirus 2
  REGION 1..14: note = Table B: HLA-DRB1*04:01L HLA-DRB3*02:01L HLA-DRB1*03:01L HLA-DRB1*11:03L HLA-DRB1*11:04L HLA-DRB1*14:02L HLA-DRB1*11:01L HLA-DPA1*02:01-B1*13:01L HLA-DRB1*10:01L HLA-DRB1*15:01L
VKDFMSLSEQLRKQ

SEQ ID NO: 12216 - protein, 14 aa, Severe acute respiratory syndrome coronavirus 2
  REGION 1..14: note = Table B: HLA-DRB1*04:01L HLA-DRB1*13:02L HLA-DRB1*01:01L HLA-DRB1*03:01L HLA-DRB1*11:03L HLA-DQA1*03:01-B1*03:02L HLA-DRB1*14:17L HLA-DRB1*07:01L
SEQLRKQIRSAAKK

SEQ ID NO: 12217 - protein, 15 aa, Severe acute respiratory syndrome coronavirus 2
  REGION 1..15: note = Table B: HLA-DRB1*04:01L HLA-DRB1*01:01L HLA-DRB1*11:01L
TRQVVNVVTTKIALK

SEQ ID NO: 12218 - protein, 13 aa, Severe acute respiratory syndrome coronavirus 2
  REGION 1..13: note = Table B: HLA-DRB1*04:01L HLA-DRB1*04:04L HLA-DRB1*11:02L HLA-DRB1*11:04L HLA-DRB1*11:01L HLA-DRB3*01:01L HLA-DRB1*08:02L
AAIFYLITPVHVM

SEQ ID NO: 12219 - protein, 13 aa, Severe acute respiratory syndrome coronavirus 2
  REGION 1..13: note = Table B: HLA-DRB1*04:01L HLA-DRB1*04:04L HLA-DRB1*11:04L HLA-DRB1*11:01L HLA-DRB3*01:01L
AIFYLITPVHVMS

SEQ ID NO: 12220 - protein, 13 aa, Severe acute respiratory syndrome coronavirus 2
  REGION 1..13: note = Table B: HLA-DRB1*04:01L HLA-DRB1*11:02L HLA-DRB4*01:01L HLA-DPA1*01:03-B1*02:01L HLA-DRB1*08:02L
EIIGYKAIDGGVT

SEQ ID NO: 12221 - protein, 13 aa, Severe acute respiratory syndrome coronavirus 2
  REGION 1..13: note = Table B: HLA-DRB1*04:01L
IIGYKAIDGGVTR

SEQ ID NO: 12222 - protein, 15 aa, Severe acute respiratory syndrome coronavirus 2
  REGION 1..15: note = Table B: HLA-DRB1*04:01L HLA-DRB1*13:02L HLA-DRB4*03:01NL HLA-DRB1*08:04L HLA-DRB1*11:04L HLA-DRB1*08:01L HLA-DRB1*11:01L HLA-DRB1*04:10L HLA-DRB3*01:01L
VTRDIASTDTCFANK

SEQ ID NO: 12223 - protein, 15 aa, Severe acute respiratory syndrome coronavirus 2
  REGION 1..15: note = Table B: HLA-DRB1*04:01L HLA-DRB1*01:01L
TRDIASTDTCFANKH

SEQ ID NO: 12224 - protein, 13 aa, Severe acute respiratory syndrome coronavirus 2
  REGION 1..13: note = Table B: HLA-DRB1*04:01L HLA-DRB1*04:04L HLA-DRB1*01:01L HLA-DRB1*11:02L HLA-DRB1*11:03L HLA-DRB1*11:04L HLA-DRB1*08:01L HLA-DRB1*11:01L HLA-DRB4*01:01L HLA-DRB1*09:01L HLA-DPA1*01:03-B1*02:01L HLA-DPA1*01:03-B1*104:01L
  REGION 1..13: note = CONT. FROM ABOVE: HLA-DQA1*05:05-B1*03:01L HLA-DRB1*10:01L HLA-D QA1*01:03-B1*06:01L HLA-DRB1*08:03L
GSYTNDKACPLIA

SEQ ID NO: 12225 - protein, 15 aa, Severe acute respiratory syndrome coronavirus 2
  REGION 1..15: note = Table B: HLA-DRB1*04:01L HLA-DRB1*08:04L
IAAVITREVGFVVPG

SEQ ID NO: 12226 - protein, 15 aa, Severe acute respiratory syndrome coronavirus 2
  REGION 1..15: note = Table B: HLA-DRB1*04:01L HLA-DRB1*01:01L HLA-DRB1*03:01L HLA-DRB1*11:01L
LPGTILRTTNGDFLH

SEQ ID NO: 12227 - protein, 15 aa, Severe acute respiratory syndrome coronavirus 2
  REGION 1..15: note = Table B: HLA-DRB1*04:01L HLA-DRB1*01:01L HLA-DRB1*03:01L HLA-DRB1*13:01L HLA-DRB4*01:01L HLA-DQA1*05:05-B1*03:116L HLA-DRB1*08:02L
TPSKLIEYTDFATSA

SEQ ID NO: 12228 - protein, 12 aa, Severe acute respiratory syndrome coronavirus 2
  REGION 1..12: note = Table B: HLA-DRB1*04:01L HLA-DRB1*04:04L HLA-DRB1*01:01L HLA-DRB1*08:04L HLA-DRB1*11:02L HLA-DRB1*11:03L HLA-DRB1*11:04L HLA-DQA1*01:01-B1*05:01L HLA-DRB1*08:01L HLA-DRB1*11:01L HLA-DQA1*05:05-B1*03:116L HLA-DRB1*04:10L HLA-DRB1*09:01L
  REGION 1..12: note = CONT. FROM ABOVE: HLA-DRB1*12:02L HLA-DRB3*01:01L HLA-DRB1*08:02 L HLA-DRB1*08:03L
IFKDASGKPVPY

SEQ ID NO: 12229 - protein, 15 aa, Severe acute respiratory syndrome coronavirus 2
  REGION 1..15: note = Table B: HLA-DRB1*04:01L HLA-DRB1*13:02L HLA-DRB1*13:03L HLA-DRB4*03:01NL HLA-DRB1*08:04L HLA-DRB3*02:01L HLA-DRB1*14:01L HLA-DRB1*11:04L HLA-DRB1*11:01L HLA-DQA1*01-B1*05L HLA-DPA1*01:03-B1*02:01L HLA-DPA1*01:02-B1*04:01L
  REGION 1..15: note = CONT. FROM ABOVE: HLA-DRB1*10:01L
TNVLEGSVAYESLRP

SEQ ID NO: 12230 - protein, 15 aa, Severe acute respiratory syndrome coronavirus 2
  REGION 1..15: note = Table B: HLA-DRB1*04:01L HLA-DRB1*01:01L HLA-DRB1*08:04L HLA-DRB1*08:77L HLA-DRB1*14:01L HLA-DRB1*11:03L HLA-DRB1*11:04L HLA-DRB1*12:02L HLA-DRB3*01:01L HLA-DPA1*01:03-B1*02:01L HLA-DRB1*10:01L
NVLEGSVAYESLRPD

SEQ ID NO: 12231 - protein, 14 aa, Severe acute respiratory syndrome coronavirus 2
  REGION 1..14: note = Table B: HLA-DRB1*04:01L HLA-DRB1*01:01L HLA-DRB1*11:04L HLA-DRB1*11:01L HLA-DRB3*01:01L HLA-DRB1*07:01L
SVAYESLRPDTRYV

SEQ ID NO: 12232 - protein, 15 aa, Severe acute respiratory syndrome coronavirus 2
  REGION 1..15: note = Table B: HLA-DRB1*04:01L HLA-DRB3*02:01L HLA-DRB1*08:03L HLA-DRB1*15:01L
YESLRPDTRYVLMDG

SEQ ID NO: 12233 - protein, 12 aa, Severe acute respiratory syndrome coronavirus 2
  REGION 1..12: note = Table B: HLA-DRB1*04:01L HLA-DRB1*04:03L HLA-DRB1*13:02L HLA-DRB1*04:02L HLA-DRB1*04:04L HLA-DRB1*04:05L HLA-DRB1*01:02L HLA-DRB4*03:01NL HLA-DRB1*08:04L HLA-DRB3*02:01L HLA-DPA1*01:03-B1*03:01L HLA-DRB1*03:01L HLA-DRB1*11:03L
  REGION 1..12: note = CONT. FROM ABOVE: HLA-DRB1*11:04L HLA-DQA1*01-B1*05L HLA-DRB1*04 :10L HLA-DRB1*12:01L HLA-DRB1*14:54L HLA-DQA1*05:05-B1*03:01L HL A-DRB1*14:17L HLA-DRB1*04:08L
VLMDGSIIQFPN

SEQ ID NO: 12234 - protein, 13 aa, Severe acute respiratory syndrome coronavirus 2
  REGION 1..13: note = Table B: HLA-DRB1*04:01L HLA-DRB1*01:01L HLA-DRB1*08:04L HLA-DRB1*11:02L HLA-DRB1*11:01L HLA-DRB3*01:01L HLA-DRB1*10:01L
GSIIQFPNTYLEG

SEQ ID NO: 12235 - protein, 15 aa, Severe acute respiratory syndrome coronavirus 2
  REGION 1..15: note = Table B: HLA-DRB1*04:01L HLA-DRB1*01:01L HLA-DRB3*02:01L HLA-DRB1*11:02L HLA-DRB1*13:01L HLA-DRB1*07:01L HLA-DRB1*10:01L HLA-DRB1*08:02L HLA-DRB1*08:03L
GRWVLNNDYYRSLPG

SEQ ID NO: 12236 - protein, 15 aa, Severe acute respiratory syndrome coronavirus 2
  REGION 1..15: note = Table B: HLA-DRB1*04:01L HLA-DRB3*01:01L HLA-DRB1*15:01L
NDYYRSLPGVFCGVD

SEQ ID NO: 12237 - protein, 16 aa, Severe acute respiratory syndrome coronavirus 2
  REGION 1..16: note = Table B: HLA-DRB1*04:01L HLA-DRB1*11:02L HLA-DRB4*01:01L HLA-DRB1*08:02L
VNLLTNMFTPLIQPIG

SEQ ID NO: 12238 - protein, 14 aa, Severe acute respiratory syndrome coronavirus 2
  REGION 1..14: note = Table B: HLA-DRB1*04:01L HLA-DRB1*01:01L HLA-DRB1*08:02L
TNMFTPLIQPIGAL

SEQ ID NO: 12239 - protein, 14 aa, Severe acute respiratory syndrome coronavirus 2
  REGION 1..14: note = Table B: HLA-DRB1*04:01L HLA-DRB1*04:04L HLA-DRB1*01:01L HLA-DPA1*01:03-B1*03:01L
NMFTPLIQPIGALD

SEQ ID NO: 12240 - protein, 14 aa, Severe acute respiratory syndrome coronavirus 2
  REGION 1..14: note = Table B: HLA-DRB1*04:01L HLA-DRB1*01:01L HLA-DRB1*11:01L HLA-DRB1*15:01L
TPLIQPIGALDISA

SEQ ID NO: 12241 - protein, 14 aa, Severe acute respiratory syndrome coronavirus 2
  REGION 1..14: note = Table B: HLA-DRB1*04:01L HLA-DRB1*11:01L HLA-DRB3*01:01L HLA-DRB1*08:02L
TPVYSFLPGVYSVI

SEQ ID NO: 12242 - protein, 12 aa, Severe acute respiratory syndrome coronavirus 2
  REGION 1..12: note = Table B: HLA-DRB1*04:01L HLA-DRB1*04:04L HLA-DRB1*04:05L HLA-DRB1*01:02L HLA-DRB1*08:04L HLA-DRB3*02:01L HLA-DPA1*01:03-B1*03:01L HLA-DPA1*03:01-B1*04:02L HLA-DRB1*14:02L HLA-DQA1*01:01-B1*05:01L HLA-DRB4*01:01L
  REGION 1..12: note = CONT. FROM ABOVE: HLA-DRB1*04:10L HLA-DPA1*01:03-B1*04:02L HLA-D PA1*02:01-B1*13:01L HLA-DRB1*10:01L HLA-DRB1*04:08L
LTNDVSFLAHIQ

SEQ ID NO: 12243 - protein, 15 aa, Severe acute respiratory syndrome coronavirus 2
  REGION 1..15: note = Table B: HLA-DRB1*04:01L
RRVVFNGVSFSTFEE

SEQ ID NO: 12244 - protein, 17 aa, Severe acute respiratory syndrome coronavirus 2
  REGION 1..17: note = Table B: HLA-DRB1*04:01L HLA-DRB3*02:01L HLA-DRB1*09:01L HLA-DRB1*15:01L
LPLTQYNRYLALYNKYK

SEQ ID NO: 12245 - protein, 14 aa, Severe acute respiratory syndrome coronavirus 2
  REGION 1..14: note = Table B: HLA-DRB1*04:01L HLA-DRB1*01:01L HLA-DRB3*02:01L HLA-DRB1*11:02L HLA-DRB1*11:03L HLA-DRB1*14:02L HLA-DQA1*01:01-B1*05:01L HLA-DPA1*01:03-B1*02:01L HLA-DRB1*08:02L HLA-DRB1*15:01L
YNKYKYFSGAMDTT

SEQ ID NO: 12246 - protein, 14 aa, Severe acute respiratory syndrome coronavirus 2
  REGION 1..14: note = Table B: HLA-DRB1*04:01L HLA-DRB1*04:03L HLA-DRB1*14:01L HLA-DQA1*01:03-B1*06:01L
TTSYREAACCHLAK

SEQ ID NO: 12247 - protein, 17 aa, Severe acute respiratory syndrome coronavirus 2
  REGION 1..17: note = Table B: HLA-DRB1*04:01L HLA-DRB1*01:01L HLA-DRB1*08:04L HLA-DRB1*08:77L HLA-DRB1*11:04L HLA-DPA1*01:03-B1*04:01L HLA-DRB3*01:01L HLA-DRB1*07:01L HLA-DRB1*08:03L
QPPQTSITSAVLQSGFR

SEQ ID NO: 12248 - protein, 14 aa, Severe acute respiratory syndrome coronavirus 2
  REGION 1..14: note = Table B: HLA-DRB1*04:01L HLA-DRB1*13:02L HLA-DRB1*13:03L HLA-DRB1*01:01L HLA-DRB1*08:04L HLA-DRB1*11:04L HLA-DRB1*11:01L HLA-DPA1*01:03-B1*04:02L HLA-DRB3*01:01L HLA-DPA1*03:01-B1*105:01L HLA-DQA1*05:05-B1*03:01L
  REGION 1..14: note = CONT. FROM ABOVE: HLA-DRB1*10:01L
SGFRKMAFPSGKVE

SEQ ID NO: 12249 - protein, 15 aa, Severe acute respiratory syndrome coronavirus 2
  REGION 1..15: note = Table B: HLA-DRB1*04:01L HLA-DRB1*13:02L HLA-DRB1*04:04L HLA-DRB1*01:01L HLA-DRB3*01:01L HLA-DPA1*01:03-B1*02:01L HLA-DRB1*07:01L HLA-DRB1*10:01L HLA-DRB1*08:03L
NPNYEDLLIRKSNHN

SEQ ID NO: 12250 - protein, 14 aa, Severe acute respiratory syndrome coronavirus 2
  REGION 1..14: note = Table B: HLA-DRB1*04:01L HLA-DQA1*01:02-B1*06:02L HLA-DRB1*08:04L HLA-DRB1*08:77L HLA-DRB3*02:01L HLA-DRB1*11:03L HLA-DRB1*11:04L HLA-DRB1*11:01L HLA-DQA1*01-B1*05L HLA-DPA1*02:01-B1*13:01L HLA-DPA1*03:01-B1*105:01L
  REGION 1..14: note = CONT. FROM ABOVE: HLA-DPA1*01:02-B1*04:01L HLA-DRB1*10:01L
VLKLKVDTANPKTP

SEQ ID NO: 12251 - protein, 14 aa, Severe acute respiratory syndrome coronavirus 2
  REGION 1..14: note = Table B: HLA-DRB1*04:01L HLA-DRB1*13:02L HLA-DRB1*01:01L HLA-DRB3*02:01L HLA-DPA1*01:03-B1*03:01L HLA-DPA1*03:01-B1*04:02L HLA-DRB1*03:01L HLA-DRB1*11:02L HLA-DRB1*11:03L HLA-DRB1*14:02L HLA-DQA1*01:01-B1*05:01L
  REGION 1..14: note = CONT. FROM ABOVE: HLA-DQA1*01-B1*05L HLA-DPA1*01:03-B1*04:01L HL A-DQA1*05:05-B1*03:116L HLA-DRB1*09:01L HLA-DPA1*01:03-B1*104:01 L HLA-DRB1*07:01L HLA-DRB1*08:02L HLA-DRB1*08:03L
TPKYKFVRIQPGQT

SEQ ID NO: 12252 - protein, 13 aa, Severe acute respiratory syndrome coronavirus 2
  REGION 1..13: note = Table B: HLA-DRB1*04:01L HLA-DRB3*01:01L
YKFVRIQPGQTFS

SEQ ID NO: 12253 - protein, 16 aa, Severe acute respiratory syndrome coronavirus 2
  REGION 1..16: note = Table B: HLA-DRB1*04:01L HLA-DRB1*08:04L HLA-DRB1*11:03L HLA-DRB1*11:04L HLA-DRB1*11:01L HLA-DRB4*02:01NL HLA-DRB1*09:01L HLA-DRB1*08:02L HLA-DRB1*08:03L
LPTGVHAGTDLEGNFY

SEQ ID NO: 12254 - protein, 13 aa, Severe acute respiratory syndrome coronavirus 2
  REGION 1..13: note = Table B: HLA-DRB1*04:01L HLA-DRB1*13:02L HLA-DRB1*04:04L HLA-DQA1*01:02-B1*06:02L HLA-DRB1*01:01L HLA-DRB1*01:02L HLA-DRB1*08:04L HLA-DRB1*08:77L HLA-DPA1*01:03-B1*03:01L HLA-DRB1*11:03L HLA-DRB1*11:04L HLA-DRB1*14:02L HLA-DRB1*11:01L
  REGION 1..13: note = CONT. FROM ABOVE: HLA-DRB5*01:01L HLA-DQA1*05:05-B1*03:19L HLA-D RB1*09:01L HLA-DPA1*01:03-B1*04:02L HLA-DRB1*12:02L HLA-DRB3*01: 01L HLA-DPA1*03:01-B1*105:01L HLA-DQA1*05:05-B1*03:01L HLA-DRB1* 10:01L HLA-DRB1*08:02L HLA-DRB1*08:03L HLA-DRB1*15:03L
GPFVDRQTAQAAG

SEQ ID NO: 12255 - protein, 14 aa, Severe acute respiratory syndrome coronavirus 2
  REGION 1..14: note = Table B: HLA-DRB1*04:01L HLA-DRB1*04:04L HLA-DRB1*08:04L HLA-DRB1*11:01L HLA-DRB1*10:01L HLA-DRB1*15:03L
PFVDRQTAQAAGTD

SEQ ID NO: 12256 - protein, 16 aa, Severe acute respiratory syndrome coronavirus 2
  REGION 1..16: note = Table B: HLA-DRB1*04:01L HLA-DRB1*01:01L HLA-DRB3*02:01L HLA-DRB1*14:01L HLA-DRB1*11:02L HLA-DRB1*11:03L HLA-DRB1*11:01L HLA-DPA1*01:03-B1*04:01L HLA-DRB1*09:01L HLA-DRB1*07:01L
VNVLAWLYAAVINGDR

SEQ ID NO: 12257 - protein, 17 aa, Severe acute respiratory syndrome coronavirus 2
  REGION 1..17: note = Table B: HLA-DRB1*04:01L
GDRWFLNRFTTTLNDFN

SEQ ID NO: 12258 - protein, 15 aa, Severe acute respiratory syndrome coronavirus 2
  REGION 1..15: note = Table B: HLA-DRB1*04:01L HLA-DRB3*02:01L HLA-DRB1*14:01L HLA-DRB1*14:02L HLA-DRB4*01:01L HLA-DRB1*09:01L HLA-DRB3*01:01L HLA-DPA1*01:03-B1*02:01L HLA-DRB1*07:01L HLA-DRB1*08:03L
LNRFTTTLNDFNLVA

SEQ ID NO: 12259 - protein, 15 aa, Severe acute respiratory syndrome coronavirus 2
  REGION 1..15: note = Table B: HLA-DRB1*04:01L HLA-DRB1*01:01L HLA-DRB1*07:01L HLA-DRB1*08:02L
AMKYNYEPLTQDHVD

SEQ ID NO: 12260 - protein, 15 aa, Severe acute respiratory syndrome coronavirus 2
  REGION 1..15: note = Table B: HLA-DRB1*04:01L HLA-DRB1*01:01L
TQDHVDILGPLSAQT

SEQ ID NO: 12261 - protein, 14 aa, Severe acute respiratory syndrome coronavirus 2
  REGION 1..14: note = Table B: HLA-DRB1*04:01L HLA-DRB1*13:02L HLA-DRB1*13:03L HLA-DRB1*01:01L HLA-DRB1*08:04L HLA-DRB1*08:77L HLA-DRB1*14:01L HLA-DRB1*11:03L HLA-DRB1*11:04L HLA-DRB1*14:02L HLA-DRB1*11:01L HLA-DQA1*01-B1*05L HLA-DRB4*01:01L HLA-DRB1*12:02L
  REGION 1..14: note = CONT. FROM ABOVE: HLA-DPA1*01:03-B1*104:01L HLA-DRB1*07:01L HLA- DQA1*01:03-B1*06:01L HLA-DRB1*08:03L HLA-DRB1*15:03L
DHVDILGPLSAQTG

SEQ ID NO: 12262 - protein, 14 aa, Severe acute respiratory syndrome coronavirus 2
  REGION 1..14: note = Table B: HLA-DRB1*04:01L HLA-DRB1*11:04L HLA-DRB1*04:10L HLA-DRB1*08:03L
LGPLSAQTGIAVLD

SEQ ID NO: 12263 - protein, 16 aa, Severe acute respiratory syndrome coronavirus 2
  REGION 1..16: note = Table B: HLA-DRB1*04:01L HLA-DRB1*04:04L HLA-DRB1*03:01L HLA-DRB1*10:01L
GSALLEDEFTPFDVVR

SEQ ID NO: 12264 - protein, 11 aa, Severe acute respiratory syndrome coronavirus 2
  REGION 1..11: note = Table B: HLA-DRB1*04:01L HLA-DRB1*01:01L HLA-DRB1*08:77L HLA-DRB1*11:03L HLA-DRB1*11:04L HLA-DRB1*14:02L HLA-DRB1*11:01L HLA-DRB4*01:01L HLA-DRB1*09:01L HLA-DRB1*12:02L HLA-DRB3*01:01L HLA-DPA1*01:03-B1*104:01L HLA-DRB1*07:01L HLA-DRB1*08:03L
DEFTPFDVVRQ

SEQ ID NO: 12265 - protein, 11 aa, Severe acute respiratory syndrome coronavirus 2
  REGION 1..11: note = Table B: HLA-DRB1*04:01L HLA-DRB1*13:02L HLA-DRB1*04:05L HLA-DRB1*01:01L HLA-DRB1*11:03L HLA-DRB1*11:01L HLA-DRB5*01:01L HLA-DQA1*03:01-B1*03:02L
FLLPSLATVAY

SEQ ID NO: 12266 - protein, 13 aa, Severe acute respiratory syndrome coronavirus 2
  REGION 1..13: note = Table B: HLA-DRB1*04:01L HLA-DRB1*11:02L HLA-DRB4*02:01NL HLA-DRB1*13:01L HLA-DPA1*01:03-B1*04:01L HLA-DQA1*05:05-B1*03:116L HLA-DRB1*08:02L
LILMTARTVYDDG

SEQ ID NO: 12267 - protein, 15 aa, Severe acute respiratory syndrome coronavirus 2
  REGION 1..15: note = Table B: HLA-DRB1*04:01L HLA-DRB1*04:05L HLA-DRB1*14:01L HLA-DRB1*08:01L HLA-DRB1*11:01L HLA-DRB1*07:01L
RRVWTLMNVLTLVYK

SEQ ID NO: 12268 - protein, 13 aa, Severe acute respiratory syndrome coronavirus 2
  REGION 1..13: note = Table B: HLA-DRB1*04:01L HLA-DRB1*11:02L HLA-DRB1*11:01L HLA-DRB1*04:10L HLA-DPA1*01:03-B1*04:02L HLA-DRB1*12:02L HLA-DRB1*14:54L HLA-DPA1*01:03-B1*104:01L
LVYKVYYGNALDQ

SEQ ID NO: 12269 - protein, 13 aa, Severe acute respiratory syndrome coronavirus 2
  REGION 1..13: note = Table B: HLA-DRB1*04:01L HLA-DRB1*01:01L HLA-DRB1*08:04L HLA-DRB1*03:01L HLA-DRB1*11:02L HLA-DRB1*11:04L HLA-DRB1*08:01L HLA-DRB1*11:01L HLA-DRB5*01:01L HLA-DRB4*01:01L HLA-DPA1*01:03-B1*04:01L HLA-DQA1*05:05-B1*03:116L
  REGION 1..13: note = CONT. FROM ABOVE: HLA-DRB1*12:02L HLA-DRB3*01:01L HLA-DPA1*01:03 -B1*02:01L HLA-DRB1*07:01L HLA-DRB1*08:02L HLA-DRB1*08:03L
KVYYGNALDQAIS

SEQ ID NO: 12270 - protein, 13 aa, Severe acute respiratory syndrome coronavirus 2
  REGION 1..13: note = Table B: HLA-DRB1*04:01L HLA-DRB1*13:02L HLA-DRB1*04:04L HLA-DRB1*08:04L HLA-DRB1*14:01L HLA-DRB1*11:03L HLA-DRB1*11:04L HLA-DQA1*01:01-B1*05:01L HLA-DRB1*11:01L HLA-DRB1*09:01L HLA-DRB1*12:02L HLA-DRB3*01:01L HLA-DRB1*07:01L HLA-DRB1*08:02L
  REGION 1..13: note = CONT. FROM ABOVE: HLA-DRB1*08:03L
GVYDYLVSTQEFR

SEQ ID NO: 12271 - protein, 13 aa, Severe acute respiratory syndrome coronavirus 2
  REGION 1..13: note = Table B: HLA-DRB1*04:01L HLA-DRB1*13:02L HLA-DRB1*13:03L HLA-DRB1*04:04L HLA-DRB1*11:01L HLA-DRB3*01:01L HLA-DRB1*14:17L HLA-DQA1*01:03-B1*06:01L
EFRYMNSQGLLPP

SEQ ID NO: 12272 - protein, 13 aa, Severe acute respiratory syndrome coronavirus 2
  REGION 1..13: note = Table B: HLA-DRB1*04:01L HLA-DRB1*01:01L HLA-DRB1*11:04L HLA-DRB1*08:01L HLA-DRB1*11:01L HLA-DQA1*05:05-B1*03:01L HLA-DRB1*10:01L
SVLQQLRVESSSK

SEQ ID NO: 12273 - protein, 14 aa, Severe acute respiratory syndrome coronavirus 2
  REGION 1..14: note = Table B: HLA-DRB1*04:01L HLA-DRB1*04:04L HLA-DRB1*11:04L HLA-DRB1*11:01L HLA-DRB3*01:01L HLA-DRB1*10:01L
LQQLRVESSSKLWA

SEQ ID NO: 12274 - protein, 14 aa, Severe acute respiratory syndrome coronavirus 2
  REGION 1..14: note = Table B: HLA-DRB1*04:01L HLA-DRB1*13:02L HLA-DRB1*11:03L HLA-DRB1*11:04L HLA-DRB1*14:02L HLA-DRB1*08:01L HLA-DRB1*11:01L HLA-DQA1*01-B1*05L HLA-DRB3*01:01L HLA-DRB1*07:01L HLA-DRB1*10:01L HLA-DRB1*15:01L
QQLRVESSSKLWAQ

SEQ ID NO: 12275 - protein, 13 aa, Severe acute respiratory syndrome coronavirus 2
  REGION 1..13: note = Table B: HLA-DRB1*04:01L HLA-DRB1*13:02L HLA-DRB1*08:77L HLA-DPA1*01:03-B1*03:01L HLA-DRB1*11:03L HLA-DRB5*01:01L HLA-DRB4*01:01L HLA-DRB1*09:01L HLA-DRB3*01:01L HLA-DRB1*07:01L
HNDILLAKDTTEA

SEQ ID NO: 12276 - protein, 13 aa, Severe acute respiratory syndrome coronavirus 2
  REGION 1..13: note = Table B: HLA-DRB1*04:01L HLA-DRB1*11:03L HLA-DRB1*11:04L HLA-DQA1*01:01-B1*05:01L HLA-DRB1*08:01L HLA-DRB1*11:01L HLA-DRB5*01:01L HLA-DRB1*13:01L HLA-DPA1*01:03-B1*04:01L HLA-DRB1*09:01L HLA-DPA1*01:03-B1*04:02L
  REGION 1..13: note = CONT. FROM ABOVE: HLA-DPA1*01:03-B1*104:01L HLA-DQA1*05:05-B1*03 :01L HLA-DPA1*01:02-B1*04:01L HLA-DRB1*07:01L HLA-DRB1*08:02L HL A-DRB1*08:03L
DILLAKDTTEAFE

SEQ ID NO: 12277 - protein, 12 aa, Severe acute respiratory syndrome coronavirus 2
  REGION 1..12: note = Table B: HLA-DRB1*04:01L HLA-DRB1*08:04L HLA-DRB1*08:77L HLA-DPA1*01:03-B1*03:01L HLA-DRB1*03:01L HLA-DRB1*11:04L HLA-DRB1*08:01L
LLAKDTTEAFEK

SEQ ID NO: 12278 - protein, 13 aa, Severe acute respiratory syndrome coronavirus 2
  REGION 1..13: note = Table B: HLA-DRB1*04:01L HLA-DRB1*04:04L HLA-DRB1*01:01L HLA-DRB1*08:04L HLA-DQA1*01-B1*05L HLA-DRB4*01:01L
EAFEKMVSLLSVL

SEQ ID NO: 12279 - protein, 10 aa, Severe acute respiratory syndrome coronavirus 2
  REGION 1..10: note = Table B: HLA-DRB1*04:01L HLA-DRB1*04:03L HLA-DRB1*13:02L HLA-DRB1*13:03L HLA-DRB1*01:03L HLA-DRB1*04:02L HLA-DRB1*01:01L HLA-DRB4*03:01NL HLA-DRB3*02:01L HLA-DRB1*14:01L HLA-DRB1*11:04L HLA-DRB1*14:02L HLA-DRB1*08:01L HLA-DRB5*01:01L
  REGION 1..10: note = CONT. FROM ABOVE: HLA-DPA1*01:03-B1*04:02L HLA-DRB1*12:01L HLA-D RB1*12:02L HLA-DPA1*03:01-B1*105:01L HLA-DQA1*03:01-B1*03:02M HL A-DQA1*05:05-B1*03:01L HLA-DRB1*14:17L HLA-DRB1*16:01L HLA-DQA1* 01:03-B1*06:01L HLA-DRB1*08:02L HLA-DQA1*02:01-B1*03:03L
SMQGAVDINK

SEQ ID NO: 12280 - protein, 14 aa, Severe acute respiratory syndrome coronavirus 2
  REGION 1..14: note = Table B: HLA-DRB1*04:01L HLA-DRB1*01:03L HLA-DRB1*04:04L HLA-DRB1*04:05L HLA-DRB1*01:02L HLA-DRB1*08:04L HLA-DRB3*02:01L HLA-DPA1*01:03-B1*03:01L HLA-DRB1*03:01L HLA-DRB1*11:03L HLA-DRB1*11:04L HLA-DRB1*14:02L HLA-DRB1*08:01L HLA-DRB1*11:01L
  REGION 1..14: note = CONT. FROM ABOVE: HLA-DRB1*04:08L
EEMLDNRATLQAIA

SEQ ID NO: 12281 - protein, 16 aa, Severe acute respiratory syndrome coronavirus 2
  REGION 1..16: note = Table B: HLA-DRB1*04:01L HLA-DRB1*13:02L HLA-DRB1*01:01L HLA-DRB1*08:04L HLA-DRB3*02:01L HLA-DRB1*11:02L HLA-DRB1*11:03L HLA-DRB1*11:01L HLA-DRB1*09:01L HLA-DRB3*01:01L HLA-DRB1*07:01L HLA-DRB1*08:02L HLA-DRB1*15:01L
RATLQAIASEFSSLPS

SEQ ID NO: 12282 - protein, 12 aa, Severe acute respiratory syndrome coronavirus 2
  REGION 1..12: note = Table B: HLA-DRB1*04:01L HLA-DRB1*11:03L
EFSSLPSYAAFA

SEQ ID NO: 12283 - protein, 12 aa, Severe acute respiratory syndrome coronavirus 2
  REGION 1..12: note = Table B: HLA-DRB1*04:01L HLA-DRB1*04:05L HLA-DRB1*01:01L HLA-DRB1*11:03L
FSSLPSYAAFAT

SEQ ID NO: 12284 - protein, 14 aa, Severe acute respiratory syndrome coronavirus 2
  REGION 1..14: note = Table B: HLA-DRB1*04:01L HLA-DRB1*01:01L HLA-DRB1*11:04L HLA-DRB1*11:01L HLA-DRB1*09:01L HLA-DRB1*07:01L
PSYAAFATAQEAYE

SEQ ID NO: 12285 - protein, 14 aa, Severe acute respiratory syndrome coronavirus 2
  REGION 1..14: note = Table B: HLA-DRB1*04:01L HLA-DRB1*11:03L HLA-DRB1*11:04L HLA-DRB1*11:01L HLA-DRB1*09:01L HLA-DRB1*07:01L
YAAFATAQEAYEQA

SEQ ID NO: 12286 - protein, 13 aa, Severe acute respiratory syndrome coronavirus 2
  REGION 1..13: note = Table B: HLA-DRB1*04:01L HLA-DRB1*01:02L HLA-DPA1*01:03-B1*03:01L HLA-DRB1*11:01L HLA-DRB4*01:01L HLA-DRB1*07:01L
QEAYEQAVANGDS

SEQ ID NO: 12287 - protein, 13 aa, Severe acute respiratory syndrome coronavirus 2
  REGION 1..13: note = Table B: HLA-DRB1*04:01L HLA-DRB1*01:01L HLA-DRB3*02:01L HLA-DRB1*11:01L HLA-DRB4*01:01L HLA-DRB1*07:01L HLA-DRB1*15:03L
EAYEQAVANGDSE

SEQ ID NO: 12288 - protein, 14 aa, Severe acute respiratory syndrome coronavirus 2
  REGION 1..14: note = Table B: HLA-DRB1*04:01L HLA-DRB1*08:04L HLA-DRB1*14:01L HLA-DRB1*11:04L HLA-DRB3*01:01L HLA-DRB1*07:01L HLA-DRB1*10:01L HLA-DRB1*15:03L
KKSLNVAKSEFDRD

SEQ ID NO: 12289 - protein, 11 aa, Severe acute respiratory syndrome coronavirus 2
  REGION 1..11: note = Table B: HLA-DRB1*04:01L HLA-DQA1*05:05-B1*03:01L
KMADQAMTQMY

SEQ ID NO: 12290 - protein, 16 aa, Severe acute respiratory syndrome coronavirus 2
  REGION 1..16: note = Table B: HLA-DRB1*04:01L HLA-DPA1*01:03-B1*04:01L HLA-DQA1*05:05-B1*03:116L HLA-DRB1*12:02L HLA-DPA1*01:03-B1*104:01L
ADQAMTQMYKQARSED

SEQ ID NO: 12291 - protein, 16 aa, Severe acute respiratory syndrome coronavirus 2
  REGION 1..16: note = Table B: HLA-DRB1*04:01L HLA-DQA1*05:05-B1*03:116L HLA-DPA1*01:03-B1*104:01L
DQAMTQMYKQARSEDK

SEQ ID NO: 12292 - protein, 14 aa, Severe acute respiratory syndrome coronavirus 2
  REGION 1..14: note = Table B: HLA-DRB1*04:01L
TQMYKQARSEDKRA

SEQ ID NO: 12293 - protein, 13 aa, Severe acute respiratory syndrome coronavirus 2
  REGION 1..13: note = Table B: HLA-DRB1*04:01L HLA-DRB1*13:02L HLA-DRB1*13:03L HLA-DQA1*01:02-B1*06:02L HLA-DRB4*03:01NL HLA-DPA1*01:03-B1*03:01L HLA-DRB1*14:01L HLA-DRB1*11:04L HLA-DRB1*08:01L HLA-DRB3*01:01L HLA-DPA1*03:01-B1*105:01L
  REGION 1..13: note = CONT. FROM ABOVE: HLA-DRB1*14:54L HLA-DPA1*01:03-B1*104:01L HLA- DRB1*07:01L HLA-DRB1*10:01L
TMLRKLDNDALNN

SEQ ID NO: 12294 - protein, 15 aa, Severe acute respiratory syndrome coronavirus 2
  REGION 1..15: note = Table B: HLA-DRB1*04:01L HLA-DRB1*01:01L HLA-DPA1*01:03-B1*02:01L
MLRKLDNDALNNIIN

SEQ ID NO: 12295 - protein, 15 aa, Severe acute respiratory syndrome coronavirus 2
  REGION 1..15: note = Table B: HLA-DRB1*04:01L HLA-DPA1*01:03-B1*02:01L
LRKLDNDALNNIINN

SEQ ID NO: 12296 - protein, 14 aa, Severe acute respiratory syndrome coronavirus 2
  REGION 1..14: note = Table B: HLA-DRB1*04:01L HLA-DRB1*11:01L HLA-DRB4*01:01L HLA-DRB3*01:01L HLA-DPA1*01:03-B1*02:01L
VPLNIIPLTTAAKL

SEQ ID NO: 12297 - protein, 14 aa, Severe acute respiratory syndrome coronavirus 2
  REGION 1..14: note = Table B: HLA-DRB1*04:01L HLA-DRB1*01:01L HLA-DRB1*11:03L HLA-DRB1*11:04L HLA-DRB1*08:01L HLA-DRB1*11:01L HLA-DRB1*09:01L HLA-DRB3*01:01L HLA-DRB1*07:01L HLA-DRB1*08:03L HLA-DRB1*15:01L
AKLMVVIPDYNTYK

SEQ ID NO: 12298 - protein, 14 aa, Severe acute respiratory syndrome coronavirus 2
  REGION 1..14: note = Table B: HLA-DRB1*04:01L HLA-DRB1*08:01L HLA-DPA1*01:03-B1*02:01L
LMVVIPDYNTYKNT

SEQ ID NO: 12299 - protein, 14 aa, Severe acute respiratory syndrome coronavirus 2
  REGION 1..14: note = Table B: HLA-DRB1*04:01L HLA-DRB1*01:03L HLA-DRB1*04:04L HLA-DRB1*01:02L HLA-DRB1*08:01L HLA-DQA1*05:05-B1*03:19L HLA-DRB1*12:01L HLA-DPA1*03:01-B1*105:01L HLA-DQA1*05:05-B1*03:01L HLA-DQA1*02:01-B1*03:03L
YNTYKNTCDGTTFT

SEQ ID NO: 12300 - protein, 15 aa, Severe acute respiratory syndrome coronavirus 2
  REGION 1..15: note = Table B: HLA-DRB1*04:01L HLA-DRB1*04:04L HLA-DRB1*14:01L HLA-DRB1*07:01L HLA-DRB1*08:02L
DGTTFTYASALWEIQ

SEQ ID NO: 12301 - protein, 14 aa, Severe acute respiratory syndrome coronavirus 2
  REGION 1..14: note = Table B: HLA-DRB1*04:01L HLA-DRB1*03:01L HLA-DRB1*11:02L HLA-DQA1*01:01-B1*05:01L HLA-DRB1*11:01L HLA-DRB5*01:01L HLA-DRB4*02:01NL HLA-DRB1*13:01L HLA-DPA1*01:03-B1*04:02L HLA-DPA1*01:03-B1*02:01L HLA-DPA1*01:03-B1*104:01L
  REGION 1..14: note = CONT. FROM ABOVE: HLA-DRB1*08:02L
DSKIVQLSEISMDN

SEQ ID NO: 12302 - protein, 12 aa, Severe acute respiratory syndrome coronavirus 2
  REGION 1..12: note = Table B: HLA-DRB1*04:01L HLA-DRB1*13:02L HLA-DRB1*08:04L HLA-DPA1*01:03-B1*03:01L HLA-DRB1*11:03L HLA-DRB1*11:04L HLA-DRB1*08:01L HLA-DRB1*11:01L HLA-DQA1*01-B1*05L HLA-DQA1*05:05-B1*03:19L HLA-DRB1*04:10L
  REGION 1..12: note = CONT. FROM ABOVE: HLA-DPA1*03:01-B1*105:01L
IVTALRANSAVK

SEQ ID NO: 12303 - protein, 14 aa, Severe acute respiratory syndrome coronavirus 2
  REGION 1..14: note = Table B: HLA-DRB1*04:01L HLA-DRB3*02:01L HLA-DRB1*11:02L HLA-DRB1*11:01L HLA-DQA1*05:05-B1*03:19L HLA-DRB1*09:01L HLA-DRB3*01:01L HLA-DPA1*02:01-B1*13:01L HLA-DRB1*07:01L
DNALAYYNTTKGGR

SEQ ID NO: 12304 - protein, 14 aa, Severe acute respiratory syndrome coronavirus 2
  REGION 1..14: note = Table B: HLA-DRB1*04:01L HLA-DRB1*11:04L HLA-DRB1*08:01L HLA-DPA1*01:03-B1*04:02L HLA-DRB1*10:01L HLA-DRB1*08:03L
RFVLALLSDLQDLK

SEQ ID NO: 12305 - protein, 15 aa, Severe acute respiratory syndrome coronavirus 2
  REGION 1..15: note = Table B: HLA-DRB1*04:01L HLA-DRB1*01:01L HLA-DRB1*11:03L HLA-DRB1*14:02L HLA-DRB1*10:01L
DLQDLKWARFPKSDG

SEQ ID NO: 12306 - protein, 16 aa, Severe acute respiratory syndrome coronavirus 2
  REGION 1..16: note = Table B: HLA-DRB1*04:01L HLA-DRB1*01:01L HLA-DRB3*02:01L HLA-DRB1*11:02L HLA-DQA1*05:01-B1*02:01L
LQDLKWARFPKSDGTG

SEQ ID NO: 12307 - protein, 13 aa, Severe acute respiratory syndrome coronavirus 2
  REGION 1..13: note = Table B: HLA-DRB1*04:01L HLA-DRB1*01:01L HLA-DRB1*08:04L HLA-DRB1*08:77L HLA-DRB3*02:01L HLA-DRB1*11:03L HLA-DRB1*11:04L HLA-DRB1*14:02L HLA-DQA1*01:01-B1*05:01L HLA-DRB1*11:01L HLA-DRB1*09:01L HLA-DRB1*12:02L HLA-DRB3*01:01L
  REGION 1..13: note = CONT. FROM ABOVE: HLA-DPA1*01:03-B1*02:01L HLA-DPA1*01:03-B1*104 :01L HLA-DRB1*07:01L HLA-DRB1*08:03L
TGTIYTELEPPCR

SEQ ID NO: 12308 - protein, 14 aa, Severe acute respiratory syndrome coronavirus 2
  REGION 1..14: note = Table B: HLA-DRB1*04:01L HLA-DRB1*13:02L HLA-DRB1*04:02L HLA-DRB1*04:04L HLA-DRB1*01:01L HLA-DRB3*02:01L HLA-DRB1*11:02L HLA-DRB1*11:03L HLA-DRB1*14:02L HLA-DQA1*01-B1*05L HLA-DQA1*05:01-B1*02:01L HLA-DPA1*01:03-B1*04:01L
  REGION 1..14: note = CONT. FROM ABOVE: HLA-DQA1*05:05-B1*03:116L HLA-DRB1*09:01L HLA- DRB3*01:01L HLA-DPA1*01:03-B1*02:01L HLA-DPA1*01:03-B1*104:01L H LA-DRB1*07:01L HLA-DRB1*10:01L HLA-DRB1*08:02L
VKYLYFIKGLNNLN

SEQ ID NO: 12309 - protein, 13 aa, Severe acute respiratory syndrome coronavirus 2
  REGION 1..13: note = Table B: HLA-DRB1*04:01L HLA-DRB1*01:01L HLA-DPA1*01:03-B1*03:01L HLA-DRB1*11:03L HLA-DRB1*14:02L HLA-DRB1*11:01L HLA-DQA1*05:05-B1*03:19L HLA-DQA1*05:01-B1*02:01L HLA-DPA1*01:03-B1*04:02L
  REGION 1..13: note = CONT. FROM ABOVE: HLA-DPA1*01:03-B1*02:01L HLA-DRB1*07:01L HLA-D RB1*08:03L
LYFIKGLNNLNRG

SEQ ID NO: 12310 - protein, 16 aa, Severe acute respiratory syndrome coronavirus 2
  REGION 1..16: note = Table B: HLA-DRB1*04:01L HLA-DRB1*01:01L HLA-DRB1*08:77L HLA-DRB1*11:03L HLA-DRB1*11:04L HLA-DRB1*14:02L HLA-DQA1*01-B1*05L
AATVRLQAGNATEVPA

SEQ ID NO: 12311 - protein, 15 aa, Severe acute respiratory syndrome coronavirus 2
  REGION 1..15: note = Table B: HLA-DRB1*04:01L HLA-DRB1*04:04L HLA-DRB1*01:01L HLA-DRB3*02:01L HLA-DRB1*14:01L HLA-DRB1*11:03L HLA-DRB1*11:04L HLA-DQA1*01-B1*05L HLA-DQA1*05:05-B1*03:116L HLA-DRB1*04:10L HLA-DRB1*09:01L HLA-DRB1*14:54L HLA-DRB1*10:01L HLA-DRB1*08:03L
TVRLQAGNATEVPAN

SEQ ID NO: 12312 - protein, 11 aa, Severe acute respiratory syndrome coronavirus 2
  REGION 1..11: note = Table B: HLA-DRB1*04:01L HLA-DRB3*02:01L HLA-DRB1*11:03L HLA-DRB1*11:01L HLA-DRB5*01:01L HLA-DRB1*12:02L HLA-DRB1*08:02L
AVDAAKAYKDY

SEQ ID NO: 12313 - protein, 15 aa, Severe acute respiratory syndrome coronavirus 2
  REGION 1..15: note = Table B: HLA-DRB1*04:01L
AKAYKDYLASGGQPI

SEQ ID NO: 12314 - protein, 12 aa, Severe acute respiratory syndrome coronavirus 2
  REGION 1..12: note = Table B: HLA-DRB1*04:01L HLA-DRB1*04:04L HLA-DQA1*01:02-B1*06:02L HLA-DRB1*03:01L HLA-DRB1*08:01L HLA-DRB1*11:01L HLA-DQA1*01-B1*05L HLA-DRB4*02:01NL HLA-DRB4*01:01L HLA-DPA1*01:03-B1*04:02L HLA-DRB3*01:01L
  REGION 1..12: note = CONT. FROM ABOVE: HLA-DPA1*02:01-B1*13:01L HLA-DPA1*01:03-B1*02: 01L HLA-DPA1*01:03-B1*104:01L HLA-DPA1*01:02-B1*04:01L HLA-DRB1* 10:01L HLA-DRB1*08:02L HLA-DRB1*08:03L HLA-DRB1*15:01L
KDYLASGGQPIT

SEQ ID NO: 12315 - protein, 12 aa, Severe acute respiratory syndrome coronavirus 2
  REGION 1..12: note = Table B: HLA-DRB1*04:01L HLA-DRB1*04:04L HLA-DRB1*03:01L HLA-DRB1*08:01L HLA-DRB1*11:01L HLA-DQA1*01-B1*05L HLA-DRB4*02:01NL HLA-DRB5*02:02L HLA-DRB4*01:01L HLA-DQA1*05:05-B1*03:116L HLA-DPA1*01:03-B1*04:02L
  REGION 1..12: note = CONT. FROM ABOVE: HLA-DRB3*01:01L HLA-DPA1*02:01-B1*13:01L HLA-D PA1*01:03-B1*02:01L HLA-DPA1*01:03-B1*104:01L HLA-DRB1*08:02L HL A-DRB1*08:03L HLA-DRB1*15:01L
DYLASGGQPITN

SEQ ID NO: 12316 - protein, 14 aa, Severe acute respiratory syndrome coronavirus 2
  REGION 1..14: note = Table B: HLA-DRB1*04:01L HLA-DRB1*13:02L HLA-DRB1*08:04L HLA-DRB1*14:01L HLA-DRB1*11:04L HLA-DRB4*01:01L HLA-DRB1*10:01L HLA-DRB1*08:03L
AITVTPEANMDQES

SEQ ID NO: 12317 - protein, 12 aa, Severe acute respiratory syndrome coronavirus 2
  REGION 1..12: note = Table B: HLA-DRB1*04:01L HLA-DRB1*13:03L HLA-DRB1*01:03L HLA-DRB1*04:02L HLA-DRB1*04:04L HLA-DRB1*04:05L HLA-DQA1*01:02-B1*06:02L HLA-DRB1*01:02L HLA-DRB4*03:01NL HLA-DRB1*08:04L HLA-DRB1*11:04L HLA-DRB1*08:01L HLA-DRB1*11:01L
  REGION 1..12: note = CONT. FROM ABOVE: HLA-DRB1*04:10L HLA-DRB1*12:01L HLA-DQA1*03:01 -B1*03:02L HLA-DRB1*14:54L HLA-DRB1*10:01L HLA-DRB1*16:01L HLA-D RB1*08:03L HLA-DQA1*02:01-B1*03:03L HLA-DRB1*15:03L
GKYVQIPTTCAN

SEQ ID NO: 12318 - protein, 14 aa, Severe acute respiratory syndrome coronavirus 2
  REGION 1..14: note = Table B: HLA-DRB1*04:01L HLA-DRB1*01:01L HLA-DRB1*11:01L HLA-DRB3*01:01L
REPMLQSADAQSFL

SEQ ID NO: 12319 - protein, 10 aa, Severe acute respiratory syndrome coronavirus 2
  REGION 1..10: note = Table B: HLA-DRB1*04:01L HLA-DRB1*13:02M HLA-DRB1*13:03M HLA-DRB1*04:02L HLA-DRB1*01:01L HLA-DRB4*03:01NL HLA-DRB3*02:01L HLA-DRB1*14:01L HLA-DRB1*11:04L HLA-DRB1*14:02L HLA-DRB1*08:01M HLA-DRB5*01:01L HLA-DPA1*01:03-B1*04:02L HLA-DRB1*12:01M
  REGION 1..10: note = CONT. FROM ABOVE: HLA-DRB1*12:02L HLA-DQA1*03:01-B1*03:02M HLA-D QA1*05:05-B1*03:01M HLA-DRB1*14:17L HLA-DRB1*16:01L HLA-DQA1*01: 03-B1*06:01L HLA-DRB1*08:02L HLA-DQA1*02:01-B1*03:03L HLA-DRB1*1 5:01L
SADAQSFLNR

SEQ ID NO: 12320 - protein, 13 aa, Severe acute respiratory syndrome coronavirus 2
  REGION 1..13: note = Table B: HLA-DRB1*04:01L HLA-DRB4*03:01NL HLA-DRB3*02:01L HLA-DRB1*11:03L HLA-DRB1*14:02L HLA-DRB1*12:02L HLA-DRB1*14:54L HLA-DPA1*01:03-B1*02:01L HLA-DPA1*01:03-B1*104:01L HLA-DQA1*05:05-B1*03:01L HLA-DRB1*07:01L HLA-DRB1*08:02L
DVVYRAFDIYNDK

SEQ ID NO: 12321 - protein, 12 aa, Severe acute respiratory syndrome coronavirus 2
  REGION 1..12: note = Table B: HLA-DRB1*04:01L HLA-DRB1*01:03L HLA-DRB1*04:04L HLA-DRB1*04:05L HLA-DQA1*01:02-B1*06:02L HLA-DRB1*01:01L HLA-DRB1*08:04L HLA-DRB1*14:01L HLA-DRB1*11:04L HLA-DRB1*08:01L HLA-DRB1*11:01L HLA-DQA1*01-B1*05L HLA-DQA1*05:05-B1*03:19L
  REGION 1..12: note = CONT. FROM ABOVE: HLA-DRB1*04:10L HLA-DPA1*01:03-B1*04:02L HLA-D RB1*12:01L HLA-DPA1*03:01-B1*105:01L HLA-DQA1*03:01-B1*03:02L HL A-DQA1*05:05-B1*03:01L HLA-DRB1*10:01L HLA-DQA1*02:01-B1*03:03L HLA-DRB1*15:03L
IYNLLKDCPAVA

SEQ ID NO: 12322 - protein, 10 aa, Severe acute respiratory syndrome coronavirus 2
  REGION 1..10: note = Table B: HLA-DRB1*04:01L HLA-DRB1*04:03L HLA-DRB1*13:02L HLA-DRB1*13:03L HLA-DRB1*01:03L HLA-DRB1*04:02L HLA-DRB1*04:04L HLA-DRB1*04:05L HLA-DRB1*01:02L HLA-DRB4*03:01NL HLA-DRB1*14:01L HLA-DRB1*11:04L HLA-DRB1*08:01L HLA-DQA1*01-B1*05L
  REGION 1..10: note = CONT. FROM ABOVE: HLA-DRB1*04:10L HLA-DRB1*12:01L HLA-DRB3*01:01 L HLA-DQA1*03:01-B1*03:02L HLA-DRB1*14:54L HLA-DRB1*14:17L HLA-D RB1*10:01L HLA-DRB1*16:01L HLA-DRB1*04:08L HLA-DQA1*02:01-B1*03: 03L
FRIDGDMVPH

SEQ ID NO: 12323 - protein, 15 aa, Severe acute respiratory syndrome coronavirus 2
  REGION 1..15: note = Table B: HLA-DRB1*04:01L HLA-DRB1*08:04L HLA-DRB1*08:77L HLA-DRB3*02:01L HLA-DPA1*01:03-B1*03:01L HLA-DPA1*03:01-B1*04:02L HLA-DRB1*11:02L HLA-DRB1*14:02L HLA-DRB1*14:54L HLA-DRB1*10:01L HLA-DRB1*08:03L
IDGDMVPHISRQRLT

SEQ ID NO: 12324 - protein, 14 aa, Severe acute respiratory syndrome coronavirus 2
  REGION 1..14: note = Table B: HLA-DRB1*04:01L HLA-DRB1*04:02L HLA-DRB1*04:04L HLA-DRB1*01:01L HLA-DRB1*08:04L HLA-DPA1*01:03-B1*03:01L HLA-DRB1*14:01L HLA-DRB1*11:04L HLA-DRB1*11:01L HLA-DPA1*01:03-B1*04:01L HLA-DRB3*01:01L
  REGION 1..14: note = CONT. FROM ABOVE: HLA-DPA1*01:03-B1*02:01L HLA-DPA1*01:03-B1*104 :01L HLA-DRB1*07:01L HLA-DRB1*10:01L HLA-DRB1*08:03L
LTKYTMADLVYALR

SEQ ID NO: 12325 - protein, 14 aa, Severe acute respiratory syndrome coronavirus 2
  REGION 1..14: note = Table B: HLA-DRB1*04:01L HLA-DRB1*11:01L HLA-DRB1*15:01L
KDWYDFVENPDILR

SEQ ID NO: 12326 - protein, 14 aa, Severe acute respiratory syndrome coronavirus 2
  REGION 1..14: note = Table B: HLA-DRB1*04:01L HLA-DRB1*08:04L HLA-DRB1*11:02L HLA-DRB1*10:01L HLA-DRB1*15:01L
ILRVYANLGERVRQ

SEQ ID NO: 12327 - protein, 16 aa, Severe acute respiratory syndrome coronavirus 2
  REGION 1..16: note = Table B: HLA-DRB1*04:01L HLA-DPA1*01:03-B1*04:02L
NAGIVGVLTLDNQDLN

SEQ ID NO: 12328 - protein, 13 aa, Severe acute respiratory syndrome coronavirus 2
  REGION 1..13: note = Table B: HLA-DRB1*04:01L HLA-DRB1*13:02L HLA-DRB1*13:03L HLA-DRB1*01:03L HLA-DRB1*04:04L HLA-DRB1*01:02L HLA-DRB1*08:04L HLA-DRB1*08:77L HLA-DRB3*02:01L HLA-DPA1*01:03-B1*03:01L HLA-DRB1*14:01L HLA-DRB1*11:03L HLA-DRB1*11:04L HLA-DRB1*14:02L
  REGION 1..13: note = CONT. FROM ABOVE: HLA-DRB5*01:01L HLA-DRB1*12:02L HLA-DRB3*01:01 L HLA-DPA1*03:01-B1*105:01L HLA-DRB1*10:01L HLA-DRB1*04:08L HLA- DRB1*08:03L HLA-DRB1*15:03L
VGVLTLDNQDLNG

SEQ ID NO: 12329 - protein, 16 aa, Severe acute respiratory syndrome coronavirus 2
  REGION 1..16: note = Table B: HLA-DRB1*04:01L HLA-DRB4*01:01L
NGNWYDFGDFIQTTPG

SEQ ID NO: 12330 - protein, 14 aa, Severe acute respiratory syndrome coronavirus 2
  REGION 1..14: note = Table B: HLA-DRB1*04:01L HLA-DRB1*01:01L HLA-DRB1*08:04L HLA-DRB1*03:01L HLA-DRB1*08:01L HLA-DRB1*11:01L HLA-DRB5*01:01L HLA-DRB4*02:01NL HLA-DRB4*01:01L HLA-DRB3*01:01L HLA-DPA1*02:01-B1*13:01L HLA-DPA1*01:03-B1*104:01L
  REGION 1..14: note = CONT. FROM ABOVE: HLA-DRB1*08:02L HLA-DRB1*08:03L HLA-DRB1*15:01 L
GDFIQTTPGSGVPV

SEQ ID NO: 12331 - protein, 15 aa, Severe acute respiratory syndrome coronavirus 2
  REGION 1..15: note = Table B: HLA-DRB1*04:01L HLA-DQA1*05:01-B1*02:01L
MPILTLTRALTAESH

SEQ ID NO: 12332 - protein, 14 aa, Severe acute respiratory syndrome coronavirus 2
  REGION 1..14: note = Table B: HLA-DRB1*04:01L HLA-DRB1*08:04L HLA-DPA1*01:03-B1*03:01L HLA-DRB1*11:04L HLA-DRB1*08:01L HLA-DPA1*02:01-B1*13:01L HLA-DRB1*10:01L
LTLTRALTAESHVD

SEQ ID NO: 12333 - protein, 13 aa, Severe acute respiratory syndrome coronavirus 2
  REGION 1..13: note = Table B: HLA-DRB1*04:01L HLA-DRB1*04:02L HLA-DRB1*04:04L HLA-DRB1*08:77L HLA-DRB3*02:01L HLA-DRB1*11:03L HLA-DRB1*11:04L HLA-DRB1*11:01L HLA-DQA1*05:05-B1*03:19L HLA-DRB1*13:01L HLA-DRB4*01:01L HLA-DPA1*01:03-B1*04:01L
  REGION 1..13: note = CONT. FROM ABOVE: HLA-DPA1*01:03-B1*04:02L HLA-DPA1*01:03-B1*02: 01L HLA-DRB1*14:17L HLA-DRB1*10:01L HLA-DQA1*01:03-B1*06:01L HLA -DRB1*08:03L HLA-DQA1*02:01-B1*03:03L
DLLKYDFTEERLK

SEQ ID NO: 12334 - protein, 12 aa, Severe acute respiratory syndrome coronavirus 2
  REGION 1..12: note = Table B: HLA-DRB1*04:01L HLA-DRB4*03:01NL HLA-DRB1*08:04L HLA-DRB1*08:77L HLA-DRB3*02:01L HLA-DRB1*03:01L HLA-DRB1*11:02L HLA-DRB1*11:03L HLA-DRB1*11:04L HLA-DRB1*11:01L HLA-DQA1*01-B1*05L HLA-DRB4*01:01L HLA-DPA1*01:03-B1*04:01L
  REGION 1..12: note = CONT. FROM ABOVE: HLA-DRB1*12:02L HLA-DRB3*01:01L HLA-DRB1*14:54 L HLA-DQA1*05:05-B1*03:01L HLA-DRB1*04:08L
KIFVDGVPFVVS

SEQ ID NO: 12335 - protein, 14 aa, Severe acute respiratory syndrome coronavirus 2
  REGION 1..14: note = Table B: HLA-DRB1*04:01L HLA-DRB1*11:02L
GVPFVVSTGYHFRE

SEQ ID NO: 12336 - protein, 14 aa, Severe acute respiratory syndrome coronavirus 2
  REGION 1..14: note = Table B: HLA-DRB1*04:01L HLA-DRB3*01:01L HLA-DRB1*08:02L
HFRELGVVHNQDVN

SEQ ID NO: 12337 - protein, 13 aa, Severe acute respiratory syndrome coronavirus 2
  REGION 1..13: note = Table B: HLA-DRB1*04:01L HLA-DPA1*01:03-B1*03:01L HLA-DRB3*01:01L HLA-DQA1*05:05-B1*03:01L
GVVHNQDVNLHSS

SEQ ID NO: 12338 - protein, 15 aa, Severe acute respiratory syndrome coronavirus 2
  REGION 1..15: note = Table B: HLA-DRB1*04:01L HLA-DRB1*01:01L HLA-DRB1*14:01L HLA-DRB1*11:04L HLA-DRB3*01:01L
RLSFKELLVYAADPA

SEQ ID NO: 12339 - protein, 13 aa, Severe acute respiratory syndrome coronavirus 2
  REGION 1..13: note = Table B: HLA-DRB1*04:01L HLA-DRB1*13:02L HLA-DRB1*01:01L HLA-DRB1*08:04L HLA-DRB1*08:77L HLA-DRB3*02:01L HLA-DPA1*01:03-B1*03:01L HLA-DRB1*11:03L HLA-DRB1*11:04L HLA-DRB1*14:02L HLA-DQA1*01:01-B1*05:01L HLA-DRB1*08:01L
  REGION 1..13: note = CONT. FROM ABOVE: HLA-DPA1*01:03-B1*04:01L HLA-DRB1*09:01L HLA-D PA1*01:03-B1*04:02L HLA-DRB1*12:02L HLA-DRB3*01:01L HLA-DPA1*01: 03-B1*104:01L HLA-DRB1*07:01L HLA-DRB1*10:01L HLA-DRB1*08:03L HL A-DRB1*15:01L
KELLVYAADPAMH

SEQ ID NO: 12340 - protein, 13 aa, Severe acute respiratory syndrome coronavirus 2
  REGION 1..13: note = Table B: HLA-DRB1*04:01L HLA-DRB1*03:01L HLA-DRB1*08:01L HLA-DRB1*11:01L HLA-DRB1*13:01L HLA-DRB4*01:01L HLA-DPA1*01:03-B1*04:01L HLA-DPA1*01:03-B1*04:02L HLA-DPA1*01:03-B1*104:01L HLA-DRB1*07:01L
ELLVYAADPAMHA

SEQ ID NO: 12341 - protein, 15 aa, Severe acute respiratory syndrome coronavirus 2
  REGION 1..15: note = Table B: HLA-DRB1*04:01L HLA-DRB1*03:01L HLA-DRB1*11:02L HLA-DPA1*01:03-B1*02:01L HLA-DRB1*08:02L
DPAMHAASGNLLLDK

SEQ ID NO: 12342 - protein, 11 aa, Severe acute respiratory syndrome coronavirus 2
  REGION 1..11: note = Table B: HLA-DRB1*04:01L HLA-DRB1*04:04L HLA-DRB1*01:01L HLA-DRB1*01:02L HLA-DRB4*03:01NL HLA-DRB1*08:04L HLA-DRB1*11:03L HLA-DRB1*11:04L HLA-DQA1*01-B1*05L HLA-DRB4*01:01L HLA-DRB1*04:10L HLA-DRB1*12:02L HLA-DRB1*14:54L
  REGION 1..11: note = CONT. FROM ABOVE: HLA-DQA1*05:05-B1*03:01L HLA-DRB1*10:01L HLA-D RB1*04:08L HLA-DRB1*08:03L
VAALTNNVAFQ

SEQ ID NO: 12343 - protein, 14 aa, Severe acute respiratory syndrome coronavirus 2
  REGION 1..14: note = Table B: HLA-DRB1*04:01L HLA-DRB1*04:02L HLA-DRB1*04:04L HLA-DRB1*11:04L HLA-DRB3*01:01L
KDFYDFAVSKGFFK

SEQ ID NO: 12344 - protein, 13 aa, Severe acute respiratory syndrome coronavirus 2
  REGION 1..13: note = Table B: HLA-DRB1*04:01L HLA-DRB1*04:04L HLA-DRB1*01:01L HLA-DRB1*11:01L HLA-DRB3*01:01L HLA-DRB1*07:01L
KGFFKEGSSVELK

SEQ ID NO: 12345 - protein, 13 aa, Severe acute respiratory syndrome coronavirus 2
  REGION 1..13: note = Table B: HLA-DRB1*04:01L HLA-DRB1*13:02L HLA-DRB1*04:04L HLA-DRB1*01:01L HLA-DRB1*11:04L HLA-DRB1*11:01L HLA-DRB3*01:01L HLA-DRB1*07:01L
GFFKEGSSVELKH

SEQ ID NO: 12346 - protein, 12 aa, Severe acute respiratory syndrome coronavirus 2
  REGION 1..12: note = Table B: HLA-DRB1*04:01L HLA-DRB1*04:05L HLA-DRB1*01:02L HLA-DRB1*08:04L HLA-DRB1*15:03L
FFFAQDGNAAIS

SEQ ID NO: 12347 - protein, 14 aa, Severe acute respiratory syndrome coronavirus 2
  REGION 1..14: note = Table B: HLA-DRB1*04:01L HLA-DRB1*04:03L HLA-DRB1*13:03L HLA-DRB1*04:02L HLA-DRB1*04:04L HLA-DRB1*01:01L HLA-DRB1*08:04L HLA-DRB1*08:77L HLA-DRB3*02:01L HLA-DRB1*03:01L HLA-DRB1*11:02L HLA-DRB1*11:03L HLA-DRB1*13:01L HLA-DQA1*05:05-B1*03:116L
  REGION 1..14: note = CONT. FROM ABOVE: HLA-DRB1*09:01L HLA-DRB1*10:01L HLA-DRB1*08:02 L HLA-DRB1*08:03L
DYYRYNLPTMCDIR

SEQ ID NO: 12348 - protein, 11 aa, Severe acute respiratory syndrome coronavirus 2
  REGION 1..11: note = Table B: HLA-DRB1*04:01L HLA-DQA1*01:02-B1*06:02L HLA-DRB1*01:01L HLA-DRB3*02:01L HLA-DPA1*01:03-B1*03:01L HLA-DPA1*03:01-B1*04:02L HLA-DRB1*03:01L HLA-DQA1*01:01-B1*05:01L HLA-DRB1*08:01L HLA-DRB1*11:01L
  REGION 1..11: note = CONT. FROM ABOVE: HLA-DRB5*01:01L HLA-DQA1*05:05-B1*03:19L HLA-D RB4*01:01L HLA-DRB1*09:01L HLA-DPA1*01:03-B1*04:02L HLA-DRB3*01: 01L HLA-DPA1*02:01-B1*13:01L HLA-DPA1*03:01-B1*105:01L HLA-DPA1* 01:03-B1*02:01L HLA-DPA1*01:03-B1*104:01L
  REGION 1..11: note = CONT. FROM ABOVE: HLA-DQA1*05:05-B1*03:01L HLA-DPA1*01:02-B1*04: 01L HLA-DRB1*07:01L HLA-DQA1*01:03-B1*06:01L
VIVNNLDKSAG

SEQ ID NO: 12349 - protein, 14 aa, Severe acute respiratory syndrome coronavirus 2
  REGION 1..14: note = Table B: HLA-DRB1*04:01L HLA-DRB1*04:04L HLA-DRB1*01:01L
MSYEDQDALFAYTK

SEQ ID NO: 12350 - protein, 14 aa, Severe acute respiratory syndrome coronavirus 2
  REGION 1..14: note = Table B: HLA-DRB1*04:01L HLA-DRB1*13:02L HLA-DRB1*13:03L HLA-DRB1*01:01L HLA-DRB1*08:04L HLA-DRB1*08:01L HLA-DRB1*11:01L HLA-DRB3*01:01L HLA-DPA1*01:03-B1*104:01L HLA-DRB1*07:01L
KRNVIPTITQMNLK

SEQ ID NO: 12351 - protein, 14 aa, Severe acute respiratory syndrome coronavirus 2
  REGION 1..14: note = Table B: HLA-DRB1*04:01L
QMNLKYAISAKNRA

SEQ ID NO: 12352 - protein, 14 aa, Severe acute respiratory syndrome coronavirus 2
  REGION 1..14: note = Table B: HLA-DRB1*04:01L HLA-DRB1*03:01L HLA-DQA1*01:01-B1*05:01L HLA-DQA1*05:05-B1*03:19L
MNLKYAISAKNRAR

SEQ ID NO: 12353 - protein, 14 aa, Severe acute respiratory syndrome coronavirus 2
  REGION 1..14: note = Table B: HLA-DRB1*04:01L HLA-DRB1*03:01L HLA-DPA1*03:01-B1*105:01L HLA-DRB1*10:01L HLA-DQA1*01:03-B1*06:01L
NLKYAISAKNRART

SEQ ID NO: 12354 - protein, 15 aa, Severe acute respiratory syndrome coronavirus 2
  REGION 1..15: note = Table B: HLA-DRB1*04:01L HLA-DRB1*14:01L
GVSICSTMTNRQFHQ

SEQ ID NO: 12355 - protein, 13 aa, Severe acute respiratory syndrome coronavirus 2
  REGION 1..13: note = Table B: HLA-DRB1*04:01L HLA-DRB1*04:04L HLA-DRB1*04:05L HLA-DRB1*01:01L HLA-DRB1*14:01L HLA-DRB1*11:04L HLA-DRB1*12:01L HLA-DRB1*10:01L
KLLKSIAATRGAT

SEQ ID NO: 12356 - protein, 14 aa, Severe acute respiratory syndrome coronavirus 2
  REGION 1..14: note = Table B: HLA-DRB1*04:01L HLA-DRB1*04:04L HLA-DRB1*08:01L HLA-DRB1*11:01L HLA-DRB4*02:01NL HLA-DRB3*01:01L HLA-DRB1*15:01L
KSIAATRGATVVIG

SEQ ID NO: 12357 - protein, 15 aa, Severe acute respiratory syndrome coronavirus 2
  REGION 1..15: note = Table B: HLA-DRB1*04:01L HLA-DRB1*08:04L HLA-DPA1*01:03-B1*04:01L HLA-DPA1*01:03-B1*104:01L HLA-DRB1*07:01L
HNMLKTVYSDVENPH

SEQ ID NO: 12358 - protein, 14 aa, Severe acute respiratory syndrome coronavirus 2
  REGION 1..14: note = Table B: HLA-DRB1*04:01L
SHRFYRLANECAQV

SEQ ID NO: 12359 - protein, 16 aa, Severe acute respiratory syndrome coronavirus 2
  REGION 1..16: note = Table B: HLA-DRB1*04:01L HLA-DRB1*04:04L HLA-DRB1*01:01L HLA-DPA1*01:03-B1*04:02L HLA-DPA1*02:01-B1*13:01L HLA-DPA1*01:03-B1*104:01L HLA-DRB1*07:01L HLA-DRB1*10:01L HLA-DRB1*08:02L
GGSLYVKPGGTSSGDA

SEQ ID NO: 12360 - protein, 14 aa, Severe acute respiratory syndrome coronavirus 2
  REGION 1..14: note = Table B: HLA-DRB1*04:01L HLA-DRB1*13:02L HLA-DRB1*08:04L HLA-DPA1*03:01-B1*04:02L HLA-DRB1*11:02L HLA-DRB1*11:03L HLA-DRB1*11:04L HLA-DQA1*01:01-B1*05:01L HLA-DRB1*08:01L HLA-DRB1*11:01L HLA-DQA1*01-B1*05L HLA-DRB4*01:01L
  REGION 1..14: note = CONT. FROM ABOVE: HLA-DRB1*09:01L HLA-DRB3*01:01L HLA-DPA1*02:01 -B1*13:01L HLA-DPA1*01:02-B1*04:01L HLA-DRB1*07:01L HLA-DRB1*08: 02L HLA-DRB1*08:03L
SVFNICQAVTANVN

SEQ ID NO: 12361 - protein, 13 aa, Severe acute respiratory syndrome coronavirus 2
  REGION 1..13: note = Table B: HLA-DRB1*04:01L HLA-DRB1*03:01L HLA-DPA1*01:03-B1*02:01L
ALLSTDGNKIADK

SEQ ID NO: 12362 - protein, 13 aa, Severe acute respiratory syndrome coronavirus 2
  REGION 1..13: note = Table B: HLA-DRB1*04:01L HLA-DRB1*04:04L HLA-DRB1*01:01L HLA-DRB1*08:77L HLA-DRB1*11:02L HLA-DRB1*09:01L HLA-DRB1*12:02L HLA-DRB1*14:54L HLA-DPA1*01:03-B1*02:01L HLA-DQA1*05:05-B1*03:01L HLA-DRB1*14:17L HLA-DRB1*10:01L
  REGION 1..13: note = CONT. FROM ABOVE: HLA-DRB1*08:02L HLA-DRB1*08:03L
DKYVRNLQHRLYE

SEQ ID NO: 12363 - protein, 15 aa, Severe acute respiratory syndrome coronavirus 2
  REGION 1..15: note = Table B: HLA-DRB1*04:01L HLA-DRB1*11:03L HLA-DRB1*07:01L
VDTDFVNEFYAYLRK

SEQ ID NO: 12364 - protein, 14 aa, Severe acute respiratory syndrome coronavirus 2
  REGION 1..14: note = Table B: HLA-DRB1*04:01L HLA-DRB1*13:03L HLA-DRB1*04:02L HLA-DRB1*01:01L HLA-DRB1*08:04L HLA-DRB1*11:03L HLA-DRB1*14:02L HLA-DRB1*13:01L HLA-DQA1*05:05-B1*03:01L HLA-DRB1*07:01L HLA-DRB1*08:03L HLA-DRB1*15:01L
TDFVNEFYAYLRKH

SEQ ID NO: 12365 - protein, 16 aa, Severe acute respiratory syndrome coronavirus 2
  REGION 1..16: note = Table B: HLA-DRB1*04:01L HLA-DRB1*08:77L HLA-DRB1*11:03L HLA-DRB1*11:01L HLA-DPA1*01:03-B1*104:01L HLA-DPA1*01:02-B1*04:01L HLA-DRB1*10:01L HLA-DRB1*08:02L
SMMILSDDAVVCFNST

SEQ ID NO: 12366 - protein, 13 aa, Severe acute respiratory syndrome coronavirus 2
  REGION 1..13: note = Table B: HLA-DRB1*04:01L HLA-DRB1*13:02L HLA-DRB1*13:03L HLA-DRB1*04:04L HLA-DRB1*04:05L HLA-DRB1*08:04L HLA-DRB1*08:77L HLA-DRB3*02:01L HLA-DPA1*01:03-B1*03:01L HLA-DPA1*03:01-B1*04:02L HLA-DRB1*11:04L HLA-DRB1*14:02L
  REGION 1..13: note = CONT. FROM ABOVE: HLA-DQA1*01:01-B1*05:01L HLA-DRB1*08:01L HLA-D RB1*11:01L HLA-DQA1*05:01-B1*02:01L HLA-DPA1*01:03-B1*04:01L HLA -DRB1*04:10L HLA-DRB1*12:01L HLA-DPA1*01:03-B1*02:01L HLA-DPA1*0 1:02-B1*04:01L HLA-DRB1*10:01L HLA-DRB1*16:01L HLA-DRB1*15:03L
STYASQGLVASIK

SEQ ID NO: 12367 - protein, 14 aa, Severe acute respiratory syndrome coronavirus 2
  REGION 1..14: note = Table B: HLA-DRB1*04:01L HLA-DRB1*11:02L HLA-DRB1*04:10L HLA-DRB1*09:01L HLA-DRB1*14:17L
SIKNFKSVLYYQNN

SEQ ID NO: 12368 - protein, 14 aa, Severe acute respiratory syndrome coronavirus 2
  REGION 1..14: note = Table B: HLA-DRB1*04:01L HLA-DRB1*01:01L HLA-DRB1*08:77L HLA-DRB3*02:01L HLA-DRB1*03:01L HLA-DRB1*11:02L HLA-DRB1*11:03L HLA-DRB1*14:02M HLA-DQA1*01:01-B1*05:01L HLA-DRB4*01:01L HLA-DQA1*05:05-B1*03:116L HLA-DRB1*04:10L HLA-DRB1*09:01L
  REGION 1..14: note = CONT. FROM ABOVE: HLA-DRB1*12:02L HLA-DRB3*01:01L HLA-DPA1*02:01 -B1*13:01L HLA-DPA1*01:03-B1*104:01L HLA-DRB1*07:01L HLA-DRB1*10 :01L HLA-DRB1*08:02L HLA-DRB1*08:03L
VLYYQNNVFMSEAK

SEQ ID NO: 12369 - protein, 15 aa, Severe acute respiratory syndrome coronavirus 2
  REGION 1..15: note = Table B: HLA-DRB1*04:01L HLA-DRB1*14:17L HLA-DRB1*10:01L
GPHEFCSQHTMLVKQ

SEQ ID NO: 12370 - protein, 13 aa, Severe acute respiratory syndrome coronavirus 2
  REGION 1..13: note = Table B: HLA-DRB1*04:01L HLA-DRB1*04:04L HLA-DRB1*11:02L HLA-DRB1*08:01L HLA-DPA1*01:03-B1*04:02L
DDIVKTDGTLMIE

SEQ ID NO: 12371 - protein, 10 aa, Severe acute respiratory syndrome coronavirus 2
  REGION 1..10: note = Table B: HLA-DRB1*04:01L HLA-DRB1*13:02L HLA-DRB1*13:03L HLA-DRB1*04:02L HLA-DRB1*01:01L HLA-DRB4*03:01NL HLA-DRB3*02:01L HLA-DRB1*14:01L HLA-DRB1*11:04L HLA-DRB1*14:02L HLA-DRB1*08:01L HLA-DRB5*01:01L HLA-DPA1*01:03-B1*04:02L HLA-DRB1*12:01L
  REGION 1..10: note = CONT. FROM ABOVE: HLA-DRB1*12:02L HLA-DQA1*03:01-B1*03:02M HLA-D QA1*05:05-B1*03:01L HLA-DRB1*14:17L HLA-DRB1*16:01L HLA-DRB1*08: 02L HLA-DQA1*02:01-B1*03:03L
KTDGTLMIER

SEQ ID NO: 12372 - protein, 14 aa, Severe acute respiratory syndrome coronavirus 2
  REGION 1..14: note = Table B: HLA-DRB1*04:01L HLA-DRB1*01:01L
TDGTLMIERFVSLA

SEQ ID NO: 12373 - protein, 16 aa, Severe acute respiratory syndrome coronavirus 2
  REGION 1..16: note = Table B: HLA-DRB1*04:01L HLA-DRB1*13:03L HLA-DRB1*11:02L HLA-DRB1*11:03L HLA-DRB1*11:04L HLA-DRB4*01:01L HLA-DRB3*01:01L HLA-DPA1*01:02-B1*04:01L HLA-DRB1*07:01L
TGHMLDMYSVMLTNDN

SEQ ID NO: 12374 - protein, 14 aa, Severe acute respiratory syndrome coronavirus 2
  REGION 1..14: note = Table B: HLA-DRB1*04:01L HLA-DRB1*13:03L HLA-DRB1*01:02L HLA-DRB1*11:03L HLA-DRB1*11:04L HLA-DRB1*08:03L HLA-DRB1*15:03L
LDMYSVMLTNDNTS

SEQ ID NO: 12375 - protein, 11 aa, Severe acute respiratory syndrome coronavirus 2
  REGION 1..11: note = Table B: HLA-DRB1*04:01L HLA-DRB1*13:02L HLA-DRB1*08:01L HLA-DRB5*01:01L HLA-DQA1*01-B1*05L HLA-DRB1*12:02L HLA-DQA1*05:05-B1*03:01L HLA-DRB1*08:03L
SVMLTNDNTSR

SEQ ID NO: 12376 - protein, 16 aa, Severe acute respiratory syndrome coronavirus 2
  REGION 1..16: note = Table B: HLA-DRB1*04:01L HLA-DRB1*01:01L HLA-DRB1*11:03L HLA-DRB1*13:01L HLA-DRB1*14:54L HLA-DRB1*07:01L HLA-DRB1*10:01L
SRYWEPEFYEAMYTPH

SEQ ID NO: 12377 - protein, 13 aa, Severe acute respiratory syndrome coronavirus 2
  REGION 1..13: note = Table B: HLA-DRB1*04:01L HLA-DRB1*13:02L HLA-DRB1*04:04L HLA-DRB1*01:02L HLA-DRB1*08:04L HLA-DRB1*08:77L HLA-DRB3*02:01L HLA-DPA1*01:03-B1*03:01L HLA-DRB1*14:01L HLA-DRB1*11:03L HLA-DRB1*11:04L HLA-DRB1*14:02L HLA-DQA1*01:01-B1*05:01L
  REGION 1..13: note = CONT. FROM ABOVE: HLA-DRB1*11:01L HLA-DRB5*01:01L HLA-DQA1*05:05 -B1*03:19L HLA-DRB4*01:01L HLA-DPA1*01:03-B1*04:01L HLA-DRB1*09: 01L HLA-DRB1*12:02L HLA-DRB3*01:01L HLA-DPA1*02:01-B1*13:01L HLA -DRB1*14:54L HLA-DPA1*01:03-B1*02:01L HLA-DPA1*01:03-B1*104:01L
  REGION 1..13: note = CONT. FROM ABOVE: HLA-DQA1*05:05-B1*03:01L HLA-DRB1*07:01L HLA-D RB1*10:01L HLA-DRB1*08:02L HLA-DRB1*08:03L
EPEFYEAMYTPHT

SEQ ID NO: 12378 - protein, 11 aa, Severe acute respiratory syndrome coronavirus 2
  REGION 1..11: note = Table B: HLA-DRB1*04:01L HLA-DRB1*04:03L HLA-DRB1*01:03L HLA-DRB1*04:02L HLA-DRB1*04:04L HLA-DRB1*04:05L HLA-DRB4*03:01NL HLA-DRB1*14:17L HLA-DRB1*04:08L
YEAMYTPHTVL

SEQ ID NO: 12379 - protein, 13 aa, Severe acute respiratory syndrome coronavirus 2
  REGION 1..13: note = Table B: HLA-DRB1*04:01L HLA-DRB1*13:02L HLA-DRB1*11:04L HLA-DRB1*14:02L HLA-DRB1*11:01L HLA-DRB3*01:01L HLA-DPA1*01:03-B1*02:01L HLA-DRB1*10:01L HLA-DRB1*08:03L
AMYTPHTVLQAVG

SEQ ID NO: 12380 - protein, 20 aa, Severe acute respiratory syndrome coronavirus 2
  REGION 1..20: note = Table B: HLA-DRB1*04:01L HLA-DRB1*01:01L HLA-DPA1*01:03-B1*02:01L HLA-DRB1*07:01L
DVTQLYLGGMSYYCKSHKPP

SEQ ID NO: 12381 - protein, 14 aa, Severe acute respiratory syndrome coronavirus 2
  REGION 1..14: note = Table B: HLA-DRB1*04:01L HLA-DRB1*01:01L HLA-DPA1*01:03-B1*03:01L HLA-DRB1*11:02L HLA-DRB1*14:02L HLA-DQA1*05:05-B1*03:19L HLA-DPA1*02:01-B1*13:01L HLA-DPA1*01:03-B1*02:01L HLA-DPA1*01:03-B1*104:01L
  REGION 1..14: note = CONT. FROM ABOVE: HLA-DRB1*10:01L HLA-DRB1*08:02L
NGQVFGLYKNTCVG

SEQ ID NO: 12382 - protein, 14 aa, Severe acute respiratory syndrome coronavirus 2
  REGION 1..14: note = Table B: HLA-DRB1*04:01L HLA-DRB1*01:01L HLA-DRB3*02:01L HLA-DPA1*03:01-B1*04:02L HLA-DRB1*11:02L HLA-DRB1*11:03L HLA-DRB1*14:02L HLA-DPA1*01:03-B1*04:02L HLA-DRB3*01:01L HLA-DPA1*01:03-B1*104:01L HLA-DPA1*01:02-B1*04:01L
  REGION 1..14: note = CONT. FROM ABOVE: HLA-DRB1*07:01L HLA-DQA1*01:03-B1*06:01L
VFGLYKNTCVGSDN

SEQ ID NO: 12383 - protein, 12 aa, Severe acute respiratory syndrome coronavirus 2
  REGION 1..12: note = Table B: HLA-DRB1*04:01L HLA-DRB1*13:02L HLA-DRB1*04:04L HLA-DRB1*01:02L HLA-DRB1*08:04L HLA-DPA1*01:03-B1*03:01L HLA-DRB1*14:01L HLA-DRB1*11:04L HLA-DQA1*01:01-B1*05:01L HLA-DRB1*11:01L HLA-DQA1*05:05-B1*03:19L
  REGION 1..12: note = CONT. FROM ABOVE: HLA-DQA1*05:01-B1*02:01L HLA-DRB1*12:01L HLA-D RB1*12:02L HLA-DPA1*02:01-B1*13:01L HLA-DRB1*14:54L HLA-DRB1*10: 01L HLA-DRB1*08:03L HLA-DRB1*15:03L
GDYILANTCTER

SEQ ID NO: 12384 - protein, 14 aa, Severe acute respiratory syndrome coronavirus 2
  REGION 1..14: note = Table B: HLA-DRB1*04:01L HLA-DRB1*01:01L HLA-DRB3*02:01L HLA-DRB1*14:02L HLA-DRB3*01:01L HLA-DRB1*07:01L HLA-DRB1*15:01L
RLKLFAAETLKATE

SEQ ID NO: 12385 - protein, 12 aa, Severe acute respiratory syndrome coronavirus 2
  REGION 1..12: note = Table B: HLA-DRB1*04:01L HLA-DRB1*13:02L HLA-DRB1*13:03L HLA-DRB1*08:04L HLA-DPA1*01:03-B1*03:01L HLA-DRB1*14:01L HLA-DRB1*11:04L HLA-DRB1*14:02L HLA-DQA1*01:01-B1*05:01L HLA-DRB1*08:01L HLA-DRB1*11:01L HLA-DRB1*04:10L
  REGION 1..12: note = CONT. FROM ABOVE: HLA-DPA1*01:03-B1*02:01L HLA-DPA1*01:03-B1*104 :01L HLA-DRB1*10:01L
LFAAETLKATEE

SEQ ID NO: 12386 - protein, 14 aa, Severe acute respiratory syndrome coronavirus 2
  REGION 1..14: note = Table B: HLA-DRB1*04:01L HLA-DRB1*04:04L HLA-DRB1*08:77L HLA-DRB3*02:01L HLA-DPA1*01:03-B1*03:01L HLA-DRB1*03:01L HLA-DRB1*11:04L HLA-DRB1*14:02L HLA-DRB1*08:01L HLA-DRB1*11:01L HLA-DQA1*01-B1*05L HLA-DRB1*09:01L HLA-DRB3*01:01L
  REGION 1..14: note = CONT. FROM ABOVE: HLA-DPA1*02:01-B1*13:01L HLA-DPA1*01:02-B1*04: 01L HLA-DRB1*15:01L
EETFKLSYGIATVR

SEQ ID NO: 12387 - protein, 14 aa, Severe acute respiratory syndrome coronavirus 2
  REGION 1..14: note = Table B: HLA-DRB1*04:01L HLA-DRB1*01:01L HLA-DRB1*03:01L HLA-DRB1*11:04L HLA-DRB1*11:01L HLA-DRB3*01:01L HLA-DPA1*01:03-B1*104:01L HLA-DRB1*07:01L HLA-DRB1*10:01L
IATVREVLSDRELH

SEQ ID NO: 12388 - protein, 15 aa, Severe acute respiratory syndrome coronavirus 2
  REGION 1..15: note = Table B: HLA-DRB1*04:01L HLA-DRB1*11:02L HLA-DRB4*01:01L
VREVLSDRELHLSWE

SEQ ID NO: 12389 - protein, 12 aa, Severe acute respiratory syndrome coronavirus 2
  REGION 1..12: note = Table B: HLA-DRB1*04:01L HLA-DRB1*08:04L HLA-DPA1*01:03-B1*03:01L HLA-DRB1*03:01L HLA-DRB1*14:02L HLA-DQA1*01:01-B1*05:01L HLA-DRB5*01:01L HLA-DQA1*01-B1*05L HLA-DQA1*05:05-B1*03:19L HLA-DRB1*13:01L
  REGION 1..12: note = CONT. FROM ABOVE: HLA-DPA1*01:03-B1*04:01L HLA-DRB1*09:01L HLA-D PA1*01:03-B1*04:02L HLA-DPA1*01:03-B1*104:01L HLA-DQA1*05:05-B1* 03:01L HLA-DRB1*10:01L HLA-DRB1*08:03L HLA-DRB1*15:01L
TGYRVTKNSKVQ

SEQ ID NO: 12390 - protein, 12 aa, Severe acute respiratory syndrome coronavirus 2
  REGION 1..12: note = Table B: HLA-DRB1*04:01L HLA-DRB1*13:02L HLA-DRB1*04:04L HLA-DQA1*01:02-B1*06:02L HLA-DRB1*01:02L HLA-DRB1*08:04L HLA-DRB3*02:01L HLA-DRB1*14:01L HLA-DRB1*11:03L HLA-DRB1*11:04L HLA-DRB1*14:02L HLA-DQA1*01:01-B1*05:01L HLA-DRB1*08:01L
  REGION 1..12: note = CONT. FROM ABOVE: HLA-DRB1*11:01L HLA-DRB5*01:01L HLA-DRB1*09:01 L HLA-DRB1*12:02L HLA-DRB3*01:01L HLA-DPA1*02:01-B1*13:01L HLA-D PA1*03:01-B1*105:01L HLA-DQA1*05:05-B1*03:01L HLA-DRB1*07:01L HL A-DQA1*01:03-B1*06:01L HLA-DRB1*08:03L
IGEYTFEKGDYG

SEQ ID NO: 12391 - protein, 13 aa, Severe acute respiratory syndrome coronavirus 2
  REGION 1..13: note = Table B: HLA-DRB1*04:01L HLA-DRB1*13:02L HLA-DRB1*04:04L HLA-DRB1*01:01L HLA-DRB1*08:04L HLA-DRB1*14:01L HLA-DRB1*11:03L HLA-DRB1*11:04L HLA-DRB1*14:02L HLA-DPA1*02:01-B1*13:01L HLA-DRB1*08:03L
GEYTFEKGDYGDA

SEQ ID NO: 12392 - protein, 16 aa, Severe acute respiratory syndrome coronavirus 2
  REGION 1..16: note = Table B: HLA-DRB1*04:01L HLA-DRB1*01:01L HLA-DRB1*14:01L HLA-DRB1*11:04L HLA-DRB1*14:02L HLA-DRB3*01:01L
EKGDYGDAVVYRGTTT

SEQ ID NO: 12393 - protein, 14 aa, Severe acute respiratory syndrome coronavirus 2
  REGION 1..14: note = Table B: HLA-DRB1*04:01L HLA-DRB1*03:01L HLA-DRB1*11:02L HLA-DRB5*02:02L HLA-DPA1*01:03-B1*02:01L HLA-DRB1*08:02L HLA-DRB1*15:01L
VGDYFVLTSHTVMP

SEQ ID NO: 12394 - protein, 14 aa, Severe acute respiratory syndrome coronavirus 2
  REGION 1..14: note = Table B: HLA-DRB1*04:01L HLA-DRB1*11:02L HLA-DRB1*08:02L
GDYFVLTSHTVMPL

SEQ ID NO: 12395 - protein, 16 aa, Severe acute respiratory syndrome coronavirus 2
  REGION 1..16: note = Table B: HLA-DRB1*04:01L HLA-DRB1*13:03L HLA-DRB1*08:77L HLA-DRB1*03:01L HLA-DRB1*11:02L HLA-DRB1*11:03L HLA-DRB1*11:01L HLA-DQA1*01-B1*05L HLA-DPA1*01:03-B1*04:01L HLA-DRB1*12:02L HLA-DRB3*01:01L HLA-DRB1*10:01L HLA-DRB1*08:03L
YFVLTSHTVMPLSAPT

SEQ ID NO: 12396 - protein, 14 aa, Severe acute respiratory syndrome coronavirus 2
  REGION 1..14: note = Table B: HLA-DRB1*04:01L HLA-DRB1*04:04L HLA-DPA1*01:03-B1*03:01L HLA-DQA1*01-B1*05L
HTVMPLSAPTLVPQ

SEQ ID NO: 12397 - protein, 16 aa, Severe acute respiratory syndrome coronavirus 2
  REGION 1..16: note = Table B: HLA-DRB1*04:01L
SAPTLVPQEHYVRITG

SEQ ID NO: 12398 - protein, 17 aa, Severe acute respiratory syndrome coronavirus 2
  REGION 1..17: note = Table B: HLA-DRB1*04:01L HLA-DRB1*01:01L HLA-DPA1*01:03-B1*04:01L
VPQEHYVRITGLYPTLN

SEQ ID NO: 12399 - protein, 13 aa, Severe acute respiratory syndrome coronavirus 2
  REGION 1..13: note = Table B: HLA-DRB1*04:01L HLA-DRB1*04:02L HLA-DRB1*11:03L HLA-DRB1*14:02L HLA-DQA1*01-B1*05L HLA-DQA1*05:05-B1*03:01L HLA-DQA1*02:01-B1*03:03L
QKYSTLQGPPGTG

SEQ ID NO: 12400 - protein, 10 aa, Severe acute respiratory syndrome coronavirus 2
  REGION 1..10: note = Table B: HLA-DRB1*04:01L HLA-DRB1*04:03L HLA-DRB1*13:02L HLA-DRB1*13:03L HLA-DRB1*01:03L HLA-DRB1*04:02L HLA-DRB1*04:04L HLA-DRB1*01:01L HLA-DRB4*03:01NL HLA-DRB3*02:01L HLA-DRB1*14:01L HLA-DRB1*11:04L HLA-DRB1*14:02L HLA-DRB1*08:01L HLA-DRB1*11:01L
  REGION 1..10: note = CONT. FROM ABOVE: HLA-DRB5*01:01L HLA-DPA1*01:03-B1*04:02L HLA-D RB1*12:01L HLA-DRB1*12:02L HLA-DRB3*01:01L HLA-DPA1*03:01-B1*105 :01L HLA-DQA1*03:01-B1*03:02L HLA-DRB1*14:54L HLA-DQA1*05:05-B1* 03:01L HLA-DRB1*14:17L HLA-DRB1*16:01L HLA-DRB1*08:02L
  REGION 1..10: note = CONT. FROM ABOVE: HLA-DRB1*08:03L HLA-DQA1*02:01-B1*03:03L HLA-D RB1*15:01L
TLQGPPGTGK

SEQ ID NO: 12401 - protein, 17 aa, Severe acute respiratory syndrome coronavirus 2
  REGION 1..17: note = Table B: HLA-DRB1*04:01L HLA-DRB1*11:03L HLA-DRB1*08:03L
GKSHFAIGLALYYPSAR

SEQ ID NO: 12402 - protein, 14 aa, Severe acute respiratory syndrome coronavirus 2
  REGION 1..14: note = Table B: HLA-DRB1*04:01L HLA-DRB1*01:01L HLA-DRB4*03:01NL HLA-DRB1*11:02L HLA-DRB1*11:03L HLA-DQA1*01:01-B1*05:01L HLA-DRB1*04:10L HLA-DRB3*01:01L HLA-DRB1*14:54L HLA-DRB1*07:01L HLA-DRB1*08:02L
ARIVYTACSHAAVD

SEQ ID NO: 12403 - protein, 13 aa, Severe acute respiratory syndrome coronavirus 2
  REGION 1..13: note = Table B: HLA-DRB1*04:01L HLA-DRB1*13:02L HLA-DRB1*04:04L HLA-DQA1*01:02-B1*06:02L HLA-DRB1*01:01L HLA-DRB1*14:01L HLA-DRB1*11:04L HLA-DRB1*11:01L HLA-DPA1*01:03-B1*04:02L HLA-DRB3*01:01L HLA-DPA1*01:03-B1*02:01L
KALKYLPIDKCSR

SEQ ID NO: 12404 - protein, 13 aa, Severe acute respiratory syndrome coronavirus 2
  REGION 1..13: note = Table B: HLA-DRB1*04:01L
FDKFKVNSTLEQY

SEQ ID NO: 12405 - protein, 14 aa, Severe acute respiratory syndrome coronavirus 2
  REGION 1..14: note = Table B: HLA-DRB1*04:01L HLA-DRB1*01:01L
DKFKVNSTLEQYVF

SEQ ID NO: 12406 - protein, 14 aa, Severe acute respiratory syndrome coronavirus 2
  REGION 1..14: note = Table B: HLA-DRB1*04:01L HLA-DRB1*01:01L HLA-DRB3*02:01L HLA-DPA1*01:03-B1*03:01L HLA-DRB1*11:03L HLA-DRB1*11:04L HLA-DRB1*14:02L HLA-DRB1*08:01L HLA-DRB1*11:01L HLA-DRB4*01:01L HLA-DPA1*01:03-B1*04:01L HLA-DRB1*09:01L
  REGION 1..14: note = CONT. FROM ABOVE: HLA-DPA1*02:01-B1*13:01L HLA-DPA1*01:03-B1*02: 01L HLA-DPA1*01:03-B1*104:01L HLA-DRB1*07:01L HLA-DRB1*08:03L
LEQYVFCTVNALPE

SEQ ID NO: 12407 - protein, 14 aa, Severe acute respiratory syndrome coronavirus 2
  REGION 1..14: note = Table B: HLA-DRB1*04:01L HLA-DRB1*01:01L
ADIVVFDEISMATN

SEQ ID NO: 12408 - protein, 14 aa, Severe acute respiratory syndrome coronavirus 2
  REGION 1..14: note = Table B: HLA-DRB1*04:01L HLA-DRB1*01:01L HLA-DQA1*01:01-B1*05:01L HLA-DRB1*08:01L HLA-DPA1*01:03-B1*02:01L HLA-DRB1*08:02L
IVVFDEISMATNYD

SEQ ID NO: 12409 - protein, 11 aa, Severe acute respiratory syndrome coronavirus 2
  REGION 1..11: note = Table B: HLA-DRB1*04:01L HLA-DRB1*04:04L HLA-DRB1*01:02L HLA-DRB1*08:04L HLA-DRB1*11:04L HLA-DRB1*08:01L HLA-DRB1*12:02L HLA-DPA1*02:01-B1*13:01L HLA-DRB1*10:01L HLA-DRB1*08:03L
KHYVYIGDPAQ

SEQ ID NO: 12410 - protein, 12 aa, Severe acute respiratory syndrome coronavirus 2
  REGION 1..12: note = Table B: HLA-DRB1*04:01L HLA-DRB1*13:03L HLA-DRB1*01:03L HLA-DRB1*04:04L HLA-DRB1*04:05L HLA-DRB4*03:01NL HLA-DRB1*08:77L HLA-DRB1*11:03L HLA-DRB1*11:04L HLA-DRB1*04:10L HLA-DRB1*12:01L HLA-DRB1*14:54L HLA-DRB1*10:01L HLA-DRB1*04:08L HLA-DRB1*08:03L
YVYIGDPAQLPA

SEQ ID NO: 12411 - protein, 12 aa, Severe acute respiratory syndrome coronavirus 2
  REGION 1..12: note = Table B: HLA-DRB1*04:01L HLA-DRB1*04:04L HLA-DRB1*01:01L HLA-DRB1*01:02L HLA-DRB1*08:04L HLA-DPA1*01:03-B1*03:01L HLA-DRB1*14:01L HLA-DRB1*11:03L HLA-DRB1*11:01L HLA-DPA1*01:03-B1*04:02L HLA-DPA1*03:01-B1*105:01L
  REGION 1..12: note = CONT. FROM ABOVE: HLA-DRB1*07:01L HLA-DRB1*10:01L HLA-DRB1*08:03 L HLA-DRB1*15:03L
YIGDPAQLPAPR

SEQ ID NO: 12412 - protein, 12 aa, Severe acute respiratory syndrome coronavirus 2
  REGION 1..12: note = Table B: HLA-DRB1*04:01L HLA-DRB1*13:02L HLA-DRB1*13:03L HLA-DRB1*04:02L HLA-DRB1*04:04L HLA-DRB1*04:05L HLA-DRB4*03:01NL HLA-DRB1*08:04L HLA-DRB1*08:77L HLA-DRB3*02:01L HLA-DRB1*11:03L HLA-DRB1*11:04L HLA-DRB5*02:02L HLA-DRB3*01:01L HLA-DRB1*14:54L
  REGION 1..12: note = CONT. FROM ABOVE: HLA-DPA1*01:03-B1*02:01L HLA-DRB1*14:17L HLA-D RB1*07:01L HLA-DRB1*10:01L
KGTLEPEYFNSV

SEQ ID NO: 12413 - protein, 12 aa, Severe acute respiratory syndrome coronavirus 2
  REGION 1..12: note = Table B: HLA-DRB1*04:01L HLA-DRB1*13:02L HLA-DRB1*04:04L HLA-DRB1*04:05L HLA-DRB1*01:01L HLA-DRB1*01:02L HLA-DRB1*08:04L HLA-DRB3*02:01L HLA-DPA1*03:01-B1*04:02L HLA-DRB1*11:03L HLA-DRB1*11:04L HLA-DQA1*01:01-B1*05:01L HLA-DRB5*01:01L
  REGION 1..12: note = CONT. FROM ABOVE: HLA-DRB1*04:10L HLA-DRB1*09:01L HLA-DRB1*12:02 L HLA-DPA1*02:01-B1*13:01L HLA-DPA1*03:01-B1*105:01L HLA-DQA1*05 :05-B1*03:01L HLA-DPA1*01:02-B1*04:01L HLA-DRB1*07:01L HLA-DRB1* 04:08L HLA-DRB1*08:03L
IVDTVSALVYDN

SEQ ID NO: 12414 - protein, 12 aa, Severe acute respiratory syndrome coronavirus 2
  REGION 1..12: note = Table B: HLA-DRB1*04:01L HLA-DQA1*01:02-B1*06:02L HLA-DPA1*01:03-B1*03:01L HLA-DRB1*13:01L
ALVYDNKLKAHK

SEQ ID NO: 12415 - protein, 14 aa, Severe acute respiratory syndrome coronavirus 2
  REGION 1..14: note = Table B: HLA-DRB1*04:01L HLA-DRB1*08:77L HLA-DPA1*01:03-B1*03:01L HLA-DRB1*11:01L HLA-DRB4*01:01L HLA-DPA1*01:03-B1*04:01L HLA-DPA1*01:03-B1*04:02L HLA-DRB3*01:01L HLA-DPA1*01:03-B1*02:01L
  REGION 1..14: note = CONT. FROM ABOVE: HLA-DPA1*01:03-B1*104:01L HLA-DRB1*08:02L
AVFISPYNSQNAVA

SEQ ID NO: 12416 - protein, 14 aa, Severe acute respiratory syndrome coronavirus 2
  REGION 1..14: note = Table B: HLA-DRB1*04:01L HLA-DRB1*08:04L HLA-DRB3*02:01L HLA-DPA1*01:03-B1*03:01L HLA-DRB1*03:01L HLA-DRB1*14:02L HLA-DQA1*01:01-B1*05:01L HLA-DRB1*08:01L HLA-DRB5*01:01L HLA-DRB1*09:01L HLA-DRB3*01:01L HLA-DPA1*02:01-B1*13:01L
  REGION 1..14: note = CONT. FROM ABOVE: HLA-DPA1*01:03-B1*104:01L HLA-DRB1*07:01L
ILGLPTQTVDSSQG

SEQ ID NO: 12417 - protein, 15 aa, Severe acute respiratory syndrome coronavirus 2
  REGION 1..15: note = Table B: HLA-DRB1*04:01L HLA-DRB1*01:01L HLA-DRB1*08:77L HLA-DRB3*02:01L HLA-DRB1*11:02L HLA-DRB1*11:03L HLA-DRB4*01:01L HLA-DQA1*05:05-B1*03:116L HLA-DRB1*04:10L HLA-DRB1*09:01L HLA-DRB1*07:01L HLA-DRB1*08:02L
GSEYDYVIFTQTTET

SEQ ID NO: 12418 - protein, 14 aa, Severe acute respiratory syndrome coronavirus 2
  REGION 1..14: note = Table B: HLA-DRB1*04:01L HLA-DRB1*01:01L HLA-DRB1*08:04L HLA-DPA1*01:03-B1*03:01L HLA-DRB1*11:03L HLA-DRB1*11:04L HLA-DRB1*14:02L HLA-DQA1*01:01-B1*05:01L HLA-DRB1*11:01L HLA-DPA1*01:03-B1*04:01L HLA-DPA1*01:03-B1*02:01L
  REGION 1..14: note = CONT. FROM ABOVE: HLA-DPA1*01:03-B1*104:01L HLA-DRB1*07:01L HLA- DRB1*10:01L HLA-DRB1*08:03L
DKLQFTSLEIPRRN

SEQ ID NO: 12419 - protein, 13 aa, Severe acute respiratory syndrome coronavirus 2
  REGION 1..13: note = Table B: HLA-DRB1*04:01L HLA-DRB1*11:04L
RNVATLQAENVTG

SEQ ID NO: 12420 - protein, 14 aa, Severe acute respiratory syndrome coronavirus 2
  REGION 1..14: note = Table B: HLA-DRB1*04:01L HLA-DRB1*04:04L HLA-DRB1*08:04L HLA-DRB1*03:01L HLA-DRB1*11:03L HLA-DRB1*11:04L HLA-DRB1*08:01L HLA-DRB1*11:01L HLA-DRB3*01:01L
VATLQAENVTGLFK

SEQ ID NO: 12421 - protein, 16 aa, Severe acute respiratory syndrome coronavirus 2
  REGION 1..16: note = Table B: HLA-DRB1*04:01L HLA-DRB1*04:02L HLA-DRB1*01:01L HLA-DRB1*03:01L HLA-DRB1*11:02L HLA-DRB1*11:03L HLA-DQA1*01:01-B1*05:01L HLA-DRB1*04:10L HLA-DRB1*07:01L HLA-DRB1*08:02L
VDTKFKTEGLCVDIPG

SEQ ID NO: 12422 - protein, 13 aa, Severe acute respiratory syndrome coronavirus 2
  REGION 1..13: note = Table B: HLA-DRB1*04:01L HLA-DRB1*04:03L HLA-DRB1*04:04L HLA-DRB1*04:05L HLA-DRB1*11:04L
MTYRRLISMMGFK

SEQ ID NO: 12423 - protein, 14 aa, Severe acute respiratory syndrome coronavirus 2
  REGION 1..14: note = Table B: HLA-DRB1*04:01L HLA-DRB1*04:04L HLA-DRB1*01:01L HLA-DRB1*08:04L HLA-DRB1*03:01L HLA-DRB1*11:01L HLA-DRB1*10:01L HLA-DRB1*15:01L
YPNMFITREEAIRH

SEQ ID NO: 12424 - protein, 16 aa, Severe acute respiratory syndrome coronavirus 2
  REGION 1..16: note = Table B: HLA-DRB1*04:01L HLA-DRB1*11:02L HLA-DRB1*11:03L HLA-DRB1*09:01L HLA-DRB1*08:02L HLA-DRB1*08:03L
EEAIRHVRAWIGFDVE

SEQ ID NO: 12425 - protein, 11 aa, Severe acute respiratory syndrome coronavirus 2
  REGION 1..11: note = Table B: HLA-DRB1*04:01L HLA-DRB1*04:04L HLA-DRB1*11:04L HLA-DRB1*04:10L HLA-DRB1*14:54L HLA-DRB1*14:17L HLA-DRB1*04:08L
YVDTPNNTDFS

SEQ ID NO: 12426 - protein, 17 aa, Severe acute respiratory syndrome coronavirus 2
  REGION 1..17: note = Table B: HLA-DRB1*04:01L HLA-DRB1*13:03L HLA-DRB1*04:04L HLA-DRB1*11:03L HLA-DRB1*11:04L HLA-DQA1*03:01-B1*03:02L HLA-DQA1*05:05-B1*03:01L HLA-DRB1*10:01L
PPPGDQFKHLIPLMYKG

SEQ ID NO: 12427 - protein, 14 aa, Severe acute respiratory syndrome coronavirus 2
  REGION 1..14: note = Table B: HLA-DRB1*04:01L HLA-DRB1*04:04L HLA-DRB1*04:05L HLA-DRB1*01:01L HLA-DRB1*08:77L HLA-DRB3*02:01L HLA-DRB1*03:01L HLA-DRB1*11:02L HLA-DRB1*11:03L HLA-DRB1*14:02L HLA-DQA1*01:01-B1*05:01L HLA-DRB1*09:01L
  REGION 1..14: note = CONT. FROM ABOVE: HLA-DPA1*01:03-B1*104:01L HLA-DRB1*14:17L HLA- DRB1*07:01L HLA-DRB1*10:01L HLA-DRB1*08:03L
IPLMYKGLPWNVVR

SEQ ID NO: 12428 - protein, 14 aa, Severe acute respiratory syndrome coronavirus 2
  REGION 1..14: note = Table B: HLA-DRB1*04:01L HLA-DRB1*04:04L HLA-DRB1*01:01L HLA-DRB3*02:01L HLA-DRB1*11:02L HLA-DRB1*11:03L HLA-DRB1*09:01L HLA-DRB3*01:01L HLA-DRB1*07:01L HLA-DRB1*10:01L HLA-DRB1*08:02L
GFDYVYNPFMIDVQ

SEQ ID NO: 12429 - protein, 13 aa, Severe acute respiratory syndrome coronavirus 2
  REGION 1..13: note = Table B: HLA-DRB1*04:01L HLA-DRB1*01:01L HLA-DRB1*08:77L HLA-DRB1*11:02L HLA-DQA1*01:01-B1*05:01L HLA-DRB4*01:01L HLA-DQA1*05:05-B1*03:116L HLA-DRB1*04:10L HLA-DRB1*09:01L HLA-DRB1*08:02L
DYVYNPFMIDVQQ

SEQ ID NO: 12430 - protein, 14 aa, Severe acute respiratory syndrome coronavirus 2
  REGION 1..14: note = Table B: HLA-DRB1*04:01L HLA-DRB1*11:02L HLA-DRB1*11:03L HLA-DRB1*11:04L HLA-DRB1*08:01L HLA-DRB1*11:01L HLA-DRB1*12:02L HLA-DRB3*01:01L HLA-DRB1*14:54L HLA-DPA1*01:03-B1*02:01L HLA-DRB1*10:01L HLA-DRB1*08:02L
NPFMIDVQQWGFTG

SEQ ID NO: 12431 - protein, 14 aa, Severe acute respiratory syndrome coronavirus 2
  REGION 1..14: note = Table B: HLA-DRB1*04:01L HLA-DRB1*01:01L HLA-DRB1*14:01L HLA-DRB1*11:03L HLA-DRB1*14:02L HLA-DQA1*01:01-B1*05:01L HLA-DRB1*11:01L HLA-DPA1*01:03-B1*04:02L HLA-DRB3*01:01L HLA-DPA1*01:03-B1*104:01L HLA-DRB1*07:01L
VQQWGFTGNLQSNH

SEQ ID NO: 12432 - protein, 16 aa, Severe acute respiratory syndrome coronavirus 2
  REGION 1..16: note = Table B: HLA-DRB1*04:01L HLA-DRB3*02:01L HLA-DPA1*02:01-B1*13:01L HLA-DRB1*07:01L HLA-DRB1*08:03L
TGNLQSNHDLYCQVHG

SEQ ID NO: 12433 - protein, 14 aa, Severe acute respiratory syndrome coronavirus 2
  REGION 1..14: note = Table B: HLA-DRB1*04:01L HLA-DRB1*04:04L HLA-DRB1*01:01L HLA-DRB1*08:04L HLA-DRB1*11:03L HLA-DRB1*09:01L HLA-DPA1*01:03-B1*104:01L HLA-DRB1*07:01L HLA-DRB1*08:03L
RVDWTIEYPIIGDE

SEQ ID NO: 12434 - protein, 16 aa, Severe acute respiratory syndrome coronavirus 2
  REGION 1..16: note = Table B: HLA-DRB1*04:01L HLA-DRB1*01:01L
IGDELKINAACRKVQH

SEQ ID NO: 12435 - protein, 14 aa, Severe acute respiratory syndrome coronavirus 2
  REGION 1..14: note = Table B: HLA-DRB1*04:01L HLA-DRB1*03:01L HLA-DRB1*11:03L
KAALLADKFPVLHD

SEQ ID NO: 12436 - protein, 13 aa, Severe acute respiratory syndrome coronavirus 2
  REGION 1..13: note = Table B: HLA-DRB1*04:01L HLA-DQA1*01:02-B1*06:02L HLA-DRB3*02:01L HLA-DPA1*01:03-B1*03:01L HLA-DPA1*03:01-B1*04:02L HLA-DRB4*01:01L HLA-DPA1*01:03-B1*04:02L HLA-DPA1*03:01-B1*105:01L
  REGION 1..13: note = CONT. FROM ABOVE: HLA-DQA1*05:05-B1*03:01L HLA-DRB1*08:03L
FPVLHDIGNPKAI

SEQ ID NO: 12437 - protein, 13 aa, Severe acute respiratory syndrome coronavirus 2
  REGION 1..13: note = Table B: HLA-DRB1*04:01L HLA-DRB1*01:01L HLA-DRB1*08:04L HLA-DRB1*14:01L HLA-DRB1*11:04L HLA-DRB1*08:01L HLA-DRB1*11:01L HLA-DRB1*04:10L HLA-DRB1*12:01L HLA-DRB3*01:01L HLA-DPA1*03:01-B1*105:01L HLA-DRB1*14:54L
  REGION 1..13: note = CONT. FROM ABOVE: HLA-DQA1*05:05-B1*03:01L HLA-DRB1*10:01L
PVLHDIGNPKAIK

SEQ ID NO: 12438 - protein, 16 aa, Severe acute respiratory syndrome coronavirus 2
  REGION 1..16: note = Table B: HLA-DRB1*04:01L HLA-DRB1*01:01L HLA-DRB1*03:01L HLA-DRB1*11:02L
NPKAIKCVPQADVEWK

SEQ ID NO: 12439 - protein, 16 aa, Severe acute respiratory syndrome coronavirus 2
  REGION 1..16: note = Table B: HLA-DRB1*04:01L HLA-DRB1*01:01L
SDKAYKIEELFYSYAT

SEQ ID NO: 12440 - protein, 16 aa, Severe acute respiratory syndrome coronavirus 2
  REGION 1..16: note = Table B: HLA-DRB1*04:01L HLA-DRB1*01:01L HLA-DRB3*02:01L HLA-DRB1*11:03L HLA-DRB1*07:01L
DKAYKIEELFYSYATH

SEQ ID NO: 12441 - protein, 12 aa, Severe acute respiratory syndrome coronavirus 2
  REGION 1..12: note = Table B: HLA-DRB1*04:01L HLA-DRB1*13:02L HLA-DRB1*08:04L HLA-DPA1*01:03-B1*03:01L HLA-DPA1*03:01-B1*04:02L HLA-DRB1*14:01L HLA-DRB1*11:04L HLA-DRB1*14:02L HLA-DRB1*11:01L HLA-DQA1*05:05-B1*03:19L HLA-DRB1*09:01L
  REGION 1..12: note = CONT. FROM ABOVE: HLA-DPA1*01:03-B1*04:02L HLA-DRB1*12:02L HLA-D RB3*01:01L HLA-DPA1*02:01-B1*13:01L HLA-DQA1*05:05-B1*03:01L HLA -DRB1*07:01L
ELFYSYATHSDK

SEQ ID NO: 12442 - protein, 14 aa, Severe acute respiratory syndrome coronavirus 2
  REGION 1..14: note = Table B: HLA-DRB1*04:01L HLA-DRB1*13:02L HLA-DRB1*01:03L HLA-DRB1*04:04L HLA-DRB1*04:05L HLA-DRB1*01:01L HLA-DRB1*08:04L HLA-DPA1*01:03-B1*03:01L HLA-DRB1*11:04L HLA-DRB1*11:01L HLA-DRB1*10:01L HLA-DRB1*16:01L
TRVLSNLNLPGCDG

SEQ ID NO: 12443 - protein, 16 aa, Severe acute respiratory syndrome coronavirus 2
  REGION 1..16: note = Table B: HLA-DRB1*04:01L HLA-DRB1*13:02L HLA-DRB1*04:04L HLA-DRB1*08:04L HLA-DRB1*11:04L HLA-DRB1*11:01L HLA-DPA1*01:03-B1*04:02L HLA-DRB3*01:01L HLA-DPA1*01:03-B1*02:01L HLA-DPA1*01:03-B1*104:01L
  REGION 1..16: note = CONT. FROM ABOVE: HLA-DRB1*07:01L
KHAFHTPAFDKSAFVN

SEQ ID NO: 12444 - protein, 12 aa, Severe acute respiratory syndrome coronavirus 2
  REGION 1..12: note = Table B: HLA-DRB1*04:01L HLA-DRB1*04:02L HLA-DRB1*04:04L HLA-DRB4*03:01NL HLA-DRB1*08:04L HLA-DRB1*03:01L HLA-DRB1*11:03L HLA-DRB1*11:04L HLA-DRB1*14:02L HLA-DQA1*01:01-B1*05:01L HLA-DRB1*11:01L HLA-DRB5*01:01L HLA-DRB4*01:01L HLA-DRB1*04:10L
  REGION 1..12: note = CONT. FROM ABOVE: HLA-DRB1*09:01L HLA-DRB1*12:02L HLA-DRB3*01:01 L HLA-DRB1*14:54L HLA-DPA1*01:03-B1*02:01L HLA-DQA1*05:05-B1*03: 01L HLA-DRB1*14:17L HLA-DRB1*10:01L HLA-DRB1*08:03L
TPAFDKSAFVNL

SEQ ID NO: 12445 - protein, 12 aa, Severe acute respiratory syndrome coronavirus 2
  REGION 1..12: note = Table B: HLA-DRB1*04:01L HLA-DRB1*13:03L HLA-DRB1*01:03L HLA-DRB1*04:04L HLA-DRB1*04:05L HLA-DQA1*01:02-B1*06:02L HLA-DRB1*01:02L HLA-DRB1*08:04L HLA-DQA1*01-B1*05L HLA-DQA1*05:01-B1*02:01L HLA-DRB1*12:01L
  REGION 1..12: note = CONT. FROM ABOVE: HLA-DPA1*03:01-B1*105:01L HLA-DQA1*03:01-B1*03 :02L HLA-DRB1*14:54L HLA-DRB1*16:01L HLA-DQA1*02:01-B1*03:03L HL A-DRB1*15:03L
FYYSDSPCESHG

SEQ ID NO: 12446 - protein, 14 aa, Severe acute respiratory syndrome coronavirus 2
  REGION 1..14: note = Table B: HLA-DRB1*04:01L HLA-DRB1*01:01L HLA-DRB1*08:77L HLA-DRB3*02:01L HLA-DRB1*03:01L HLA-DRB1*11:03L HLA-DRB1*11:04L HLA-DRB1*14:02L HLA-DRB1*08:01L HLA-DRB1*11:01L HLA-DRB4*01:01L HLA-DPA1*01:03-B1*04:01L HLA-DRB1*09:01L HLA-DRB1*12:02L
  REGION 1..14: note = CONT. FROM ABOVE: HLA-DPA1*01:03-B1*02:01L HLA-DPA1*01:03-B1*104 :01L HLA-DRB1*07:01L HLA-DRB1*10:01L HLA-DRB1*08:03L
GKQVVSDIDYVPLK

SEQ ID NO: 12447 - protein, 14 aa, Severe acute respiratory syndrome coronavirus 2
  REGION 1..14: note = Table B: HLA-DRB1*04:01L HLA-DRB1*01:01L HLA-DRB1*11:01L HLA-DRB1*09:01L HLA-DRB3*01:01L
ANEYRLYLDAYNMM

SEQ ID NO: 12448 - protein, 11 aa, Severe acute respiratory syndrome coronavirus 2
  REGION 1..11: note = Table B: HLA-DRB1*04:01L HLA-DRB1*13:02L HLA-DRB1*13:03L HLA-DRB1*04:02L HLA-DRB1*04:04L HLA-DRB1*01:01L HLA-DRB4*03:01NL HLA-DRB1*08:04L HLA-DPA1*01:03-B1*03:01L HLA-DPA1*03:01-B1*04:02L HLA-DRB1*14:01L HLA-DRB1*11:03L
  REGION 1..11: note = CONT. FROM ABOVE: HLA-DRB1*11:04L HLA-DQA1*01:01-B1*05:01L HLA-D RB1*08:01L HLA-DRB1*11:01L HLA-DQA1*05:05-B1*03:19L HLA-DQA1*05: 01-B1*02:01L HLA-DRB1*04:10L HLA-DPA1*01:03-B1*04:02L HLA-DRB1*1 2:02L HLA-DPA1*02:01-B1*13:01L HLA-DRB1*14:54L
  REGION 1..11: note = CONT. FROM ABOVE: HLA-DQA1*05:05-B1*03:01L HLA-DRB1*10:01L HLA-D RB1*08:03L HLA-DRB1*15:03L
NTFTRLQSLEN

SEQ ID NO: 12449 - protein, 12 aa, Severe acute respiratory syndrome coronavirus 2
  REGION 1..12: note = Table B: HLA-DRB1*04:01L HLA-DRB1*01:01L HLA-DPA1*01:03-B1*03:01L HLA-DRB1*11:01L HLA-DQA1*05:05-B1*03:19L HLA-DQA1*05:01-B1*02:01L HLA-DPA1*01:03-B1*04:02L HLA-DPA1*02:01-B1*13:01L
  REGION 1..12: note = CONT. FROM ABOVE: HLA-DQA1*05:05-B1*03:01L
TFTRLQSLENVA

SEQ ID NO: 12450 - protein, 14 aa, Severe acute respiratory syndrome coronavirus 2
  REGION 1..14: note = Table B: HLA-DRB1*04:01L
LQSLENVAFNVVNK

SEQ ID NO: 12451 - protein, 14 aa, Severe acute respiratory syndrome coronavirus 2
  REGION 1..14: note = Table B: HLA-DRB1*04:01L HLA-DRB1*14:02L HLA-DRB1*10:01L HLA-DRB1*08:03L
QSLENVAFNVVNKG

SEQ ID NO: 12452 - protein, 10 aa, Severe acute respiratory syndrome coronavirus 2
  REGION 1..10: note = Table B: HLA-DRB1*04:01L HLA-DRB1*13:02L HLA-DRB1*13:03L HLA-DRB1*04:02L HLA-DRB1*01:01L HLA-DRB4*03:01NL HLA-DRB3*02:01L HLA-DRB1*14:01L HLA-DRB1*11:04L HLA-DRB1*08:01L HLA-DRB5*01:01L HLA-DPA1*01:03-B1*04:02L HLA-DRB1*12:01L HLA-DRB1*12:02L
  REGION 1..10: note = CONT. FROM ABOVE: HLA-DQA1*03:01-B1*03:02L HLA-DQA1*05:05-B1*03: 01L HLA-DRB1*14:17L HLA-DRB1*16:01L HLA-DQA1*02:01-B1*03:03L
SIINNTVYTK

SEQ ID NO: 12453 - protein, 12 aa, Severe acute respiratory syndrome coronavirus 2
  REGION 1..12: note = Table B: HLA-DRB1*04:01L HLA-DRB1*01:01L HLA-DRB1*11:01L HLA-DRB4*01:01L HLA-DPA1*01:03-B1*04:02L HLA-DRB3*01:01L HLA-DPA1*01:03-B1*104:01L HLA-DRB1*08:02L
TVYTKVDGVDVE

SEQ ID NO: 12454 - protein, 16 aa, Severe acute respiratory syndrome coronavirus 2
  REGION 1..16: note = Table B: HLA-DRB1*04:01L HLA-DRB1*13:03L HLA-DRB1*08:04L HLA-DRB1*08:77L HLA-DRB1*03:01L HLA-DRB1*11:02L HLA-DRB1*14:02L HLA-DRB1*13:01L HLA-DPA1*01:03-B1*04:01L HLA-DRB1*09:01L HLA-DPA1*01:03-B1*04:02L HLA-DRB1*14:54L HLA-DRB1*10:01L
  REGION 1..16: note = CONT. FROM ABOVE: HLA-DRB1*08:03L
AKRNIKPVPEVKILNN

SEQ ID NO: 12455 - protein, 17 aa, Severe acute respiratory syndrome coronavirus 2
  REGION 1..17: note = Table B: HLA-DRB1*04:01L HLA-DRB1*01:01L HLA-DRB1*11:02L HLA-DRB1*11:01L HLA-DRB4*01:01L HLA-DPA1*01:03-B1*04:02L HLA-DRB1*08:02L
KPVPEVKILNNLGVDIA

SEQ ID NO: 12456 - protein, 14 aa, Severe acute respiratory syndrome coronavirus 2
  REGION 1..14: note = Table B: HLA-DRB1*04:01L HLA-DPA1*01:03-B1*03:01L HLA-DPA1*03:01-B1*04:02L HLA-DRB1*03:01L HLA-DRB1*11:02L HLA-DRB1*13:01L HLA-DPA1*01:03-B1*04:02L HLA-DPA1*01:03-B1*02:01L HLA-DRB1*07:01L
  REGION 1..14: note = CONT. FROM ABOVE: HLA-DQA1*01:03-B1*06:01L
NTVIWDYKRDAPAH

SEQ ID NO: 12457 - protein, 16 aa, Severe acute respiratory syndrome coronavirus 2
  REGION 1..16: note = Table B: HLA-DRB1*04:01L HLA-DRB1*01:01L HLA-DRB1*08:77L HLA-DRB1*11:02L HLA-DRB1*11:03L HLA-DRB1*11:04L HLA-DRB1*11:01L HLA-DRB1*13:01L HLA-DPA1*01:03-B1*04:01L HLA-DQA1*05:05-B1*03:116L HLA-DRB1*09:01L
  REGION 1..16: note = CONT. FROM ABOVE: HLA-DPA1*01:03-B1*02:01L HLA-DPA1*01:03-B1*104 :01L HLA-DRB1*07:01L HLA-DRB1*10:01L HLA-DRB1*08:02L
APLTVFFDGRVDGQVD

SEQ ID NO: 12458 - protein, 16 aa, Severe acute respiratory syndrome coronavirus 2
  REGION 1..16: note = Table B: HLA-DRB1*04:01L HLA-DRB1*01:01L HLA-DRB1*11:02L HLA-DRB1*11:03L HLA-DRB1*11:01L HLA-DQA1*05:05-B1*03:19L HLA-DPA1*01:03-B1*04:01L HLA-DRB1*09:01L HLA-DPA1*01:03-B1*04:02L HLA-DPA1*01:03-B1*104:01L
  REGION 1..16: note = CONT. FROM ABOVE: HLA-DQA1*05:05-B1*03:01L
VDGQVDLFRNARNGVL

SEQ ID NO: 12459 - protein, 13 aa, Severe acute respiratory syndrome coronavirus 2
  REGION 1..13: note = Table B: HLA-DRB1*04:01L HLA-DRB1*01:01L HLA-DRB1*08:04L HLA-DRB1*08:77L HLA-DPA1*01:03-B1*03:01L HLA-DRB1*11:01L HLA-DRB1*09:01L HLA-DQA1*05:05-B1*03:01L
GVLITEGSVKGLQ

SEQ ID NO: 12460 - protein, 13 aa, Severe acute respiratory syndrome coronavirus 2
  REGION 1..13: note = Table B: HLA-DRB1*04:01L HLA-DRB1*04:04L HLA-DRB1*08:03L
LITEGSVKGLQPS

SEQ ID NO: 12461 - protein, 13 aa, Severe acute respiratory syndrome coronavirus 2
  REGION 1..13: note = Table B: HLA-DRB1*04:01L HLA-DRB1*13:03L HLA-DRB1*01:03L HLA-DRB1*04:04L HLA-DRB1*01:01L HLA-DRB4*03:01NL HLA-DRB1*11:04L HLA-DPA1*03:01-B1*105:01L HLA-DRB1*14:54L HLA-DRB1*10:01L HLA-DRB1*16:01L HLA-DQA1*01:03-B1*06:01L HLA-DRB1*04:08L
  REGION 1..13: note = CONT. FROM ABOVE: HLA-DRB1*08:03L HLA-DRB1*15:03L
GSVKGLQPSVGPK

SEQ ID NO: 12462 - protein, 14 aa, Severe acute respiratory syndrome coronavirus 2
  REGION 1..14: note = Table B: HLA-DRB1*04:01L HLA-DRB1*11:02L HLA-DRB1*11:03L HLA-DRB1*11:04L HLA-DRB1*11:01L HLA-DRB1*09:01L HLA-DRB1*12:02L HLA-DRB1*08:03L
GVTLIGEAVKTQFN

SEQ ID NO: 12463 - protein, 15 aa, Severe acute respiratory syndrome coronavirus 2
  REGION 1..15: note = Table B: HLA-DRB1*04:01L HLA-DQA1*05:05-B1*03:19L HLA-DPA1*01:03-B1*104:01L HLA-DRB1*07:01L
NYYKKVDGVVQQLPE

SEQ ID NO: 12464 - protein, 16 aa, Severe acute respiratory syndrome coronavirus 2
  REGION 1..16: note = Table B: HLA-DRB1*04:01L HLA-DRB1*01:01L HLA-DRB1*11:03L HLA-DRB1*07:01L
ETYFTQSRNLQEFKPR

SEQ ID NO: 12465 - protein, 14 aa, Severe acute respiratory syndrome coronavirus 2
  REGION 1..14: note = Table B: HLA-DRB1*04:01L HLA-DRB1*01:01L HLA-DRB1*03:01L HLA-DRB1*11:02L HLA-DRB1*11:03L HLA-DRB1*11:01L HLA-DRB4*01:01L HLA-DRB1*08:02L
EHIVYGDFSHSQLG

SEQ ID NO: 12466 - protein, 14 aa, Severe acute respiratory syndrome coronavirus 2
  REGION 1..14: note = Table B: HLA-DRB1*04:01L HLA-DRB1*04:04L HLA-DRB4*03:01NL HLA-DRB1*14:17L HLA-DRB1*10:01L
ESPFELEDFIPMDS

SEQ ID NO: 12467 - protein, 14 aa, Severe acute respiratory syndrome coronavirus 2
  REGION 1..14: note = Table B: HLA-DRB1*04:01L HLA-DRB1*13:02L HLA-DRB1*04:04L HLA-DRB1*01:01L HLA-DRB3*02:01L HLA-DRB1*11:03L HLA-DRB1*14:02L HLA-DQA1*05:05-B1*03:19L HLA-DRB1*10:01L HLA-DRB1*08:03L
SPFELEDFIPMDST

SEQ ID NO: 12468 - protein, 13 aa, Severe acute respiratory syndrome coronavirus 2
  REGION 1..13: note = Table B: HLA-DRB1*04:01L HLA-DRB1*01:01L HLA-DRB1*11:01L HLA-DRB5*01:01L HLA-DRB4*01:01L HLA-DRB3*01:01L HLA-DPA1*01:03-B1*104:01L HLA-DRB1*15:01L
LEDFIPMDSTVKN

SEQ ID NO: 12469 - protein, 13 aa, Severe acute respiratory syndrome coronavirus 2
  REGION 1..13: note = Table B: HLA-DRB1*04:01L HLA-DRB1*01:01L HLA-DRB1*08:77L HLA-DRB1*11:02L HLA-DRB5*01:01L HLA-DRB4*01:01L
DDFVEIIKSQDLS

SEQ ID NO: 12470 - protein, 14 aa, Severe acute respiratory syndrome coronavirus 2
  REGION 1..14: note = Table B: HLA-DRB1*04:01L HLA-DRB3*02:01L HLA-DRB1*11:04L HLA-DQA1*01:01-B1*05:01L HLA-DQA1*05:05-B1*03:19L HLA-DRB4*01:01L HLA-DRB1*09:01L HLA-DRB3*01:01L HLA-DPA1*01:03-B1*104:01L HLA-DRB1*10:01L HLA-DRB1*08:03L
SKVVKVTIDYTEIS

SEQ ID NO: 12471 - protein, 14 aa, Severe acute respiratory syndrome coronavirus 2
  REGION 1..14: note = Table B: HLA-DRB1*04:01L HLA-DRB1*11:02L HLA-DRB1*11:03L HLA-DRB1*11:04L HLA-DRB1*08:01L HLA-DRB1*11:01L HLA-DPA1*01:03-B1*02:01L HLA-DRB1*08:02L HLA-DRB1*08:03L
VVKVTIDYTEISFM

SEQ ID NO: 12472 - protein, 15 aa, Severe acute respiratory syndrome coronavirus 2
  REGION 1..15: note = Table B: HLA-DRB1*04:01L HLA-DRB1*13:02L HLA-DRB1*04:04L HLA-DRB1*08:04L HLA-DRB1*08:77L HLA-DRB3*02:01L HLA-DRB1*11:02L HLA-DRB1*11:03L HLA-DRB1*11:04L HLA-DQA1*01-B1*05L HLA-DRB1*09:01L HLA-DRB1*12:02L HLA-DRB3*01:01L HLA-DRB1*14:17L
  REGION 1..15: note = CONT. FROM ABOVE: HLA-DPA1*01:02-B1*04:01L HLA-DRB1*07:01L HLA-D RB1*08:02L HLA-DRB1*08:03L
SQAWQPGVAMPNLYK

SEQ ID NO: 12473 - protein, 13 aa, Severe acute respiratory syndrome coronavirus 2
  REGION 1..13: note = Table B: HLA-DRB1*04:01L HLA-DRB1*08:04L HLA-DRB1*08:77L HLA-DRB3*02:01L HLA-DPA1*01:03-B1*03:01L HLA-DPA1*03:01-B1*04:02L HLA-DRB1*14:02L HLA-DQA1*05:05-B1*03:19L HLA-DRB1*09:01L
  REGION 1..13: note = CONT. FROM ABOVE: HLA-DPA1*02:01-B1*13:01L HLA-DPA1*01:02-B1*04: 01L
DLQNYGDSATLPK

SEQ ID NO: 12474 - protein, 13 aa, Severe acute respiratory syndrome coronavirus 2
  REGION 1..13: note = Table B: HLA-DRB1*04:01L HLA-DRB1*08:04L HLA-DRB3*02:01L HLA-DPA1*03:01-B1*04:02L HLA-DRB1*11:01L HLA-DRB1*09:01L HLA-DRB3*01:01L HLA-DPA1*01:03-B1*104:01L
LQNYGDSATLPKG

SEQ ID NO: 12475 - protein, 15 aa, Severe acute respiratory syndrome coronavirus 2
  REGION 1..15: note = Table B: HLA-DRB1*04:01L HLA-DRB1*01:01L HLA-DRB1*08:77L HLA-DRB1*03:01L HLA-DRB1*11:02L HLA-DRB1*13:01L HLA-DRB4*01:01L HLA-DRB1*10:01L HLA-DRB1*08:02L HLA-DRB1*15:01L
LPKGIMMNVAKYTQL

SEQ ID NO: 12476 - protein, 15 aa, Severe acute respiratory syndrome coronavirus 2
  REGION 1..15: note = Table B: HLA-DRB1*04:01L HLA-DRB1*13:02L HLA-DRB1*04:04L HLA-DRB1*01:01L HLA-DRB1*08:04L HLA-DPA1*01:03-B1*03:01L HLA-DRB1*14:01L HLA-DRB1*11:03L HLA-DRB1*11:04L HLA-DRB1*11:01L HLA-DRB5*01:01L HLA-DQA1*01-B1*05L HLA-DRB1*04:10L
  REGION 1..15: note = CONT. FROM ABOVE: HLA-DPA1*01:03-B1*04:02L HLA-DRB1*12:02L HLA-D PA1*02:01-B1*13:01L HLA-DPA1*03:01-B1*105:01L HLA-DPA1*01:03-B1* 104:01L HLA-DRB1*07:01L HLA-DRB1*10:01L HLA-DRB1*08:03L HLA-DRB1 *15:03L
VIHFGAGSDKGVAPG

SEQ ID NO: 12477 - protein, 10 aa, Severe acute respiratory syndrome coronavirus 2
  REGION 1..10: note = Table B: HLA-DRB1*04:01L HLA-DRB1*13:02M HLA-DRB1*13:03M HLA-DRB1*01:03L HLA-DRB1*04:02L HLA-DRB1*04:04L HLA-DQA1*01:02-B1*06:02L HLA-DRB1*01:01M HLA-DRB4*03:01NM HLA-DRB3*02:01M HLA-DRB1*14:01L HLA-DRB1*11:04M HLA-DRB1*14:02L
  REGION 1..10: note = CONT. FROM ABOVE: HLA-DRB1*08:01M HLA-DRB1*11:01L HLA-DRB5*01:01 M HLA-DRB5*02:02L HLA-DRB1*13:01L HLA-DPA1*01:03-B1*04:01L HLA-D PA1*01:03-B1*04:02L HLA-DRB1*12:01M HLA-DRB1*12:02M HLA-DRB3*01: 01L HLA-DPA1*03:01-B1*105:01L HLA-DQA1*03:01-B1*03:02M
  REGION 1..10: note = CONT. FROM ABOVE: HLA-DRB1*14:54L HLA-DQA1*05:05-B1*03:01M HLA-D RB1*14:17L HLA-DRB1*16:01L HLA-DQA1*01:03-B1*06:01L HLA-DRB1*08: 02L HLA-DRB1*08:03L HLA-DQA1*02:01-B1*03:03L HLA-DRB1*15:01L
GVAPGTAVLR

SEQ ID NO: 12478 - protein, 14 aa, Severe acute respiratory syndrome coronavirus 2
  REGION 1..14: note = Table B: HLA-DRB1*04:01L HLA-DRB1*04:04L HLA-DRB1*01:01L HLA-DRB1*03:01L HLA-DRB1*11:02L HLA-DQA1*01:01-B1*05:01L HLA-DRB1*11:01L HLA-DRB4*01:01L HLA-DRB1*04:10L HLA-DRB3*01:01L HLA-DPA1*01:03-B1*02:01L HLA-DRB1*10:01L HLA-DRB1*08:03L
  REGION 1..14: note = CONT. FROM ABOVE: HLA-DRB1*15:01L
RQWLPTGTLLVDSD

SEQ ID NO: 12479 - protein, 15 aa, Severe acute respiratory syndrome coronavirus 2
  REGION 1..15: note = Table B: HLA-DRB1*04:01L HLA-DRB1*13:02L HLA-DRB1*04:04L HLA-DRB1*01:02L HLA-DRB1*08:04L HLA-DRB1*08:77L HLA-DRB3*02:01L HLA-DPA1*01:03-B1*03:01L HLA-DRB1*14:01L HLA-DRB1*11:03L HLA-DRB1*11:04L HLA-DRB1*08:01L HLA-DRB1*09:01L
  REGION 1..15: note = CONT. FROM ABOVE: HLA-DPA1*01:03-B1*04:02L HLA-DRB1*12:02L HLA-D RB3*01:01L HLA-DRB1*14:54L HLA-DPA1*01:03-B1*104:01L HLA-DPA1*01 :02-B1*04:01L HLA-DRB1*10:01L HLA-DRB1*08:03L
LPTGTLLVDSDLNDF

SEQ ID NO: 12480 - protein, 14 aa, Severe acute respiratory syndrome coronavirus 2
  REGION 1..14: note = Table B: HLA-DRB1*04:01L HLA-DRB1*01:03L HLA-DRB1*04:04L HLA-DRB1*01:02L HLA-DRB4*03:01NL HLA-DRB1*08:04L HLA-DRB1*08:03L
GTLLVDSDLNDFVS

SEQ ID NO: 12481 - protein, 12 aa, Severe acute respiratory syndrome coronavirus 2
  REGION 1..12: note = Table B: HLA-DRB1*04:01L HLA-DRB1*04:04L HLA-DRB1*01:02L HLA-DRB4*03:01NL HLA-DRB1*08:04L HLA-DRB3*02:01L HLA-DPA1*01:03-B1*03:01L HLA-DRB1*14:01L HLA-DRB1*11:03L HLA-DRB1*11:04L HLA-DRB1*14:02L HLA-DRB5*01:01L HLA-DRB4*01:01L
  REGION 1..12: note = CONT. FROM ABOVE: HLA-DPA1*01:03-B1*04:01L HLA-DRB1*04:10L HLA-D RB1*09:01L HLA-DRB1*12:02L HLA-DRB3*01:01L HLA-DPA1*02:01-B1*13: 01L HLA-DPA1*03:01-B1*105:01L HLA-DRB1*14:54L HLA-DRB1*07:01L HL A-DRB1*10:01L HLA-DRB1*04:08L HLA-DRB1*08:03L HLA-DRB1*15:03L
LNDFVSDADSTL

SEQ ID NO: 12482 - protein, 11 aa, Severe acute respiratory syndrome coronavirus 2
  REGION 1..11: note = Table B: HLA-DRB1*04:01L HLA-DRB1*04:03L HLA-DRB1*13:03L HLA-DRB1*01:03L HLA-DRB1*04:02L HLA-DRB1*04:04L HLA-DRB1*04:05L HLA-DRB4*03:01NL HLA-DRB1*08:77L HLA-DRB1*14:01L HLA-DRB1*11:03L HLA-DRB1*11:04L HLA-DRB1*14:02L HLA-DQA1*01-B1*05L
  REGION 1..11: note = CONT. FROM ABOVE: HLA-DQA1*05:01-B1*02:01L HLA-DRB1*04:10L HLA-D RB1*12:01L HLA-DQA1*03:01-B1*03:02L HLA-DRB1*14:54L HLA-DRB1*14: 17L HLA-DRB1*10:01L HLA-DRB1*16:01L HLA-DRB1*04:08L
FVSDADSTLIG

SEQ ID NO: 12483 - protein, 15 aa, Severe acute respiratory syndrome coronavirus 2
  REGION 1..15: note = Table B: HLA-DRB1*04:01L HLA-DRB1*13:02L HLA-DRB3*02:01L HLA-DRB1*11:04L HLA-DRB1*14:02L HLA-DRB1*08:01L HLA-DPA1*01:03-B1*04:02L HLA-DPA1*02:01-B1*13:01L HLA-DPA1*01:03-B1*104:01L HLA-DRB1*10:01L
DSTLIGDCATVHTAN

SEQ ID NO: 12484 - protein, 13 aa, Severe acute respiratory syndrome coronavirus 2
  REGION 1..13: note = Table B: HLA-DRB1*04:01L HLA-DRB1*08:04L HLA-DRB1*14:01L HLA-DRB1*11:04L HLA-DRB1*08:01L HLA-DRB1*10:01L HLA-DRB1*08:03L
DLIISDMYDPKTK

SEQ ID NO: 12485 - protein, 14 aa, Severe acute respiratory syndrome coronavirus 2
  REGION 1..14: note = Table B: HLA-DRB1*04:01L HLA-DRB1*01:01L HLA-DRB1*08:77L HLA-DRB1*03:01L HLA-DRB1*13:01L HLA-DRB4*01:01L HLA-DQA1*05:05-B1*03:116L HLA-DRB1*09:01L HLA-DPA1*01:03-B1*104:01L HLA-DRB1*07:01L
GGSVAIKITEHSWN

SEQ ID NO: 12486 - protein, 14 aa, Severe acute respiratory syndrome coronavirus 2
  REGION 1..14: note = Table B: HLA-DRB1*04:01L HLA-DRB1*04:02L HLA-DRB1*04:04L HLA-DRB1*01:01L HLA-DRB1*08:04L HLA-DRB1*11:02L HLA-DRB1*11:03L HLA-DRB1*11:04L HLA-DRB1*14:02L HLA-DRB1*11:01L HLA-DRB4*01:01L HLA-DQA1*05:05-B1*03:116L HLA-DRB3*01:01L
  REGION 1..14: note = CONT. FROM ABOVE: HLA-DPA1*01:03-B1*02:01L HLA-DRB1*10:01L HLA-D RB1*08:02L HLA-DRB1*08:03L
GHFAWWTAFVTNVN

SEQ ID NO: 12487 - protein, 14 aa, Severe acute respiratory syndrome coronavirus 2
  REGION 1..14: note = Table B: HLA-DRB1*04:01L HLA-DRB1*01:01L
NYIFWRNTNPIQLS

SEQ ID NO: 12488 - protein, 14 aa, Severe acute respiratory syndrome coronavirus 2
  REGION 1..14: note = Table B: HLA-DRB1*04:01L HLA-DPA1*01:03-B1*02:01L HLA-DRB1*08:02L
YIFWRNTNPIQLSS

SEQ ID NO: 12489 - protein, 14 aa, Severe acute respiratory syndrome coronavirus 2
  REGION 1..14: note = Table B: HLA-DRB1*04:01L HLA-DRB1*04:04L HLA-DRB1*01:01L HLA-DRB1*11:02L HLA-DRB1*13:01L HLA-DPA1*02:01-B1*13:01L HLA-DRB1*07:01L HLA-DRB1*10:01L HLA-DQA1*01:03-B1*06:01L HLA-DRB1*08:02L HLA-DRB1*08:03L HLA-DRB1*15:01L
GRLIIRENNRVVIS

SEQ ID NO: 12490 - protein, 17 aa, Severe acute respiratory syndrome coronavirus 2
  REGION 1..17: note = Table B: HLA-DRB1*04:01L HLA-DRB1*01:01L HLA-DRB1*13:01L HLA-DPA1*01:03-B1*02:01L HLA-DRB1*15:01L
LPPAYTNSFTRGVYYPD

SEQ ID NO: 12491 - protein, 14 aa, Severe acute respiratory syndrome coronavirus 2
  REGION 1..14: note = Table B: HLA-DRB1*04:01L HLA-DRB1*04:04L HLA-DRB1*01:01L HLA-DRB1*11:04L
VTWFHAIHVSGTNG

SEQ ID NO: 12492 - protein, 13 aa, Severe acute respiratory syndrome coronavirus 2
  REGION 1..13: note = Table B: HLA-DRB1*04:01L HLA-DRB1*13:02L HLA-DRB1*08:04L HLA-DRB1*11:03L HLA-DQA1*05:05-B1*03:19L HLA-DRB1*12:02L HLA-DPA1*03:01-B1*105:01L HLA-DQA1*05:05-B1*03:01L HLA-DQA1*01:03-B1*06:01L
FHAIHVSGTNGTK

SEQ ID NO: 12493 - protein, 13 aa, Severe acute respiratory syndrome coronavirus 2
  REGION 1..13: note = Table B: HLA-DRB1*04:01L HLA-DRB1*11:01L HLA-DRB3*01:01L
HAIHVSGTNGTKR

SEQ ID NO: 12494 - protein, 13 aa, Severe acute respiratory syndrome coronavirus 2
  REGION 1..13: note = Table B: HLA-DRB1*04:01L HLA-DRB1*11:01L HLA-DRB4*01:01L
NDGVYFASTEKSN

SEQ ID NO: 12495 - protein, 14 aa, Severe acute respiratory syndrome coronavirus 2
  REGION 1..14: note = Table B: HLA-DRB1*04:01L HLA-DRB1*11:02L HLA-DRB1*11:01L HLA-DRB4*01:01L HLA-DRB3*01:01L HLA-DPA1*01:03-B1*02:01L HLA-DRB1*08:02L
DGVYFASTEKSNII

SEQ ID NO: 12496 - protein, 14 aa, Severe acute respiratory syndrome coronavirus 2
  REGION 1..14: note = Table B: HLA-DRB1*04:01L HLA-DRB1*04:04L HLA-DRB1*08:04L HLA-DPA1*01:03-B1*03:01L HLA-DPA1*03:01-B1*04:02L HLA-DQA1*01:01-B1*05:01L HLA-DPA1*01:03-B1*04:02L HLA-DPA1*02:01-B1*13:01L HLA-DPA1*01:02-B1*04:01L
  REGION 1..14: note = CONT. FROM ABOVE: HLA-DRB1*10:01L HLA-DRB1*15:03L
IRGWIFGTTLDSKT

SEQ ID NO: 12497 - protein, 12 aa, Severe acute respiratory syndrome coronavirus 2
  REGION 1..12: note = Table B: HLA-DRB1*04:01L HLA-DRB1*08:04L HLA-DRB3*02:01L HLA-DRB1*08:01L HLA-DRB1*11:01L HLA-DRB4*01:01L HLA-DRB1*09:01L HLA-DPA1*01:03-B1*04:02L HLA-DRB3*01:01L HLA-DPA1*02:01-B1*13:01L HLA-DPA1*01:03-B1*104:01L
  REGION 1..12: note = CONT. FROM ABOVE: HLA-DRB1*07:01L HLA-DRB1*08:03L
WIFGTTLDSKTQ

SEQ ID NO: 12498 - protein, 14 aa, Severe acute respiratory syndrome coronavirus 2
  REGION 1..14: note = Table B: HLA-DRB1*04:01L HLA-DRB1*01:01L HLA-DRB1*03:01L HLA-DRB1*11:02L HLA-DQA1*01:01-B1*05:01L HLA-DRB1*08:01L HLA-DRB1*11:01L HLA-DRB5*01:01L HLA-DPA1*01:03-B1*04:02L HLA-DRB3*01:01L HLA-DPA1*02:01-B1*13:01L
  REGION 1..14: note = CONT. FROM ABOVE: HLA-DPA1*01:03-B1*02:01L HLA-DPA1*01:03-B1*104 :01L HLA-DRB1*08:02L HLA-DRB1*15:01L
TQSLLIVNNATNVV

SEQ ID NO: 12499 - protein, 14 aa, Severe acute respiratory syndrome coronavirus 2
  REGION 1..14: note = Table B: HLA-DRB1*04:01L
QSLLIVNNATNVVI

SEQ ID NO: 12500 - protein, 14 aa, Severe acute respiratory syndrome coronavirus 2
  REGION 1..14: note = Table B: HLA-DRB1*04:01L HLA-DRB1*11:03L HLA-DPA1*01:03-B1*104:01L HLA-DQA1*05:05-B1*03:01L HLA-DRB1*07:01L HLA-DRB1*10:01L HLA-DRB1*08:03L
DPFLGVYYHKNNKS

SEQ ID NO: 12501 - protein, 18 aa, Severe acute respiratory syndrome coronavirus 2
  REGION 1..18: note = Table B: HLA-DRB1*04:01L
NNKSWMESEFRVYSSANN

SEQ ID NO: 12502 - protein, 14 aa, Severe acute respiratory syndrome coronavirus 2
  REGION 1..14: note = Table B: HLA-DRB1*04:01L HLA-DRB1*11:02L HLA-DPA1*01:03-B1*02:01L
ESEFRVYSSANNCT

SEQ ID NO: 12503 - protein, 15 aa, Severe acute respiratory syndrome coronavirus 2
  REGION 1..15: note = Table B: HLA-DRB1*04:01L HLA-DRB1*01:01L HLA-DRB1*11:03L HLA-DRB4*01:01L HLA-DQA1*05:05-B1*03:116L HLA-DRB1*04:10L HLA-DRB1*07:01L HLA-DRB1*08:02L
TFEYVSQPFLMDLEG

SEQ ID NO: 12504 - protein, 13 aa, Severe acute respiratory syndrome coronavirus 2
  REGION 1..13: note = Table B: HLA-DRB1*04:01L HLA-DRB1*04:04L HLA-DQA1*01:02-B1*06:02L HLA-DRB3*02:01L HLA-DRB1*11:03L HLA-DRB1*11:01L HLA-DRB5*01:01L HLA-DRB4*01:01L HLA-DRB1*09:01L HLA-DPA1*02:01-B1*13:01L HLA-DRB1*15:03L
SQPFLMDLEGKQG

SEQ ID NO: 12505 - protein, 15 aa, Severe acute respiratory syndrome coronavirus 2
  REGION 1..15: note = Table B: HLA-DRB1*04:01L HLA-DRB1*01:01L HLA-DRB1*11:01L HLA-DQA1*05:05-B1*03:01L HLA-DQA1*01:03-B1*06:01L
QPFLMDLEGKQGNFK

SEQ ID NO: 12506 - protein, 14 aa, Severe acute respiratory syndrome coronavirus 2
  REGION 1..14: note = Table B: HLA-DRB1*04:01L HLA-DRB1*04:04L HLA-DRB1*01:01L HLA-DRB1*11:03L HLA-DRB1*13:01L HLA-DPA1*01:03-B1*02:01L HLA-DRB1*07:01L HLA-DRB1*08:03L
LREFVFKNIDGYFK

SEQ ID NO: 12507 - protein, 15 aa, Severe acute respiratory syndrome coronavirus 2
  REGION 1..15: note = Table B: HLA-DRB1*04:01L HLA-DRB1*03:01L HLA-DQA1*01:01-B1*05:01L HLA-DQA1*01-B1*05L HLA-DQA1*05:01-B1*02:01L HLA-DRB1*13:01L HLA-DPA1*01:03-B1*04:01L HLA-DRB1*04:10L HLA-DRB1*09:01L
IDGYFKIYSKHTPIN

SEQ ID NO: 12508 - protein, 16 aa, Severe acute respiratory syndrome coronavirus 2
  REGION 1..16: note = Table B: HLA-DRB1*04:01L HLA-DRB1*01:01L HLA-DRB1*11:01L HLA-DRB1*08:02L
LPQGFSALEPLVDLPI

SEQ ID NO: 12509 - protein, 13 aa, Severe acute respiratory syndrome coronavirus 2
  REGION 1..13: note = Table B: HLA-DRB1*04:01L HLA-DRB1*01:01L HLA-DRB1*03:01L HLA-DRB1*11:02L HLA-DRB1*11:01L HLA-DRB5*01:01L HLA-DPA1*01:03-B1*04:01L HLA-DPA1*01:03-B1*04:02L HLA-DPA1*01:03-B1*104:01L HLA-DPA1*01:02-B1*04:01L
FSALEPLVDLPIG

SEQ ID NO: 12510 - protein, 13 aa, Severe acute respiratory syndrome coronavirus 2
  REGION 1..13: note = Table B: HLA-DRB1*04:01L HLA-DRB1*13:02L HLA-DRB1*04:04L HLA-DRB1*08:04L HLA-DQA1*01:01-B1*05:01L HLA-DRB4*01:01L HLA-DRB1*09:01L HLA-DRB3*01:01L HLA-DRB1*14:54L HLA-DQA1*05:05-B1*03:01L HLA-DRB1*07:01L
LPIGINITRFQTL

SEQ ID NO: 12511 - protein, 14 aa, Severe acute respiratory syndrome coronavirus 2
  REGION 1..14: note = Table B: HLA-DRB1*04:01L HLA-DRB1*01:01L HLA-DRB1*03:01L HLA-DRB1*11:02L HLA-DRB1*11:01L HLA-DRB3*01:01L HLA-DPA1*01:03-B1*02:01L HLA-DRB1*08:02L HLA-DRB1*08:03L
LKYNENGTITDAVD

SEQ ID NO: 12512 - protein, 15 aa, Severe acute respiratory syndrome coronavirus 2
  REGION 1..15: note = Table B: HLA-DRB1*04:01L HLA-DRB1*10:01L
TDAVDCALDPLSETK

SEQ ID NO: 12513 - protein, 13 aa, Severe acute respiratory syndrome coronavirus 2
  REGION 1..13: note = Table B: HLA-DRB1*04:01L HLA-DRB1*01:01L HLA-DRB1*11:03L HLA-DRB1*11:01L HLA-DPA1*01:03-B1*04:02L HLA-DRB3*01:01L HLA-DRB1*07:01L
LKSFTVEKGIYQT

SEQ ID NO: 12514 - protein, 12 aa, Severe acute respiratory syndrome coronavirus 2
  REGION 1..12: note = Table B: HLA-DRB1*04:01L HLA-DRB1*13:02L HLA-DRB1*04:04L HLA-DRB1*04:05L HLA-DRB1*01:01L HLA-DRB1*08:04L HLA-DRB1*08:77L HLA-DRB3*02:01L HLA-DPA1*01:03-B1*03:01L HLA-DRB1*03:01L HLA-DRB1*11:03L HLA-DRB1*11:04L HLA-DRB1*08:01L HLA-DRB1*11:01L
  REGION 1..12: note = CONT. FROM ABOVE: HLA-DQA1*05:05-B1*03:19L HLA-DRB1*04:10L HLA-D RB1*09:01L HLA-DRB1*12:02L HLA-DRB3*01:01L HLA-DPA1*02:01-B1*13: 01L HLA-DRB1*14:54L HLA-DPA1*01:03-B1*02:01L HLA-DPA1*01:03-B1*1 04:01L HLA-DQA1*05:05-B1*03:01L HLA-DRB1*07:01L HLA-DRB1*10:01L
  REGION 1..12: note = CONT. FROM ABOVE: HLA-DRB1*08:03L HLA-DRB1*15:01L
IYQTSNFRVQPT

SEQ ID NO: 12515 - protein, 12 aa, Severe acute respiratory syndrome coronavirus 2
  REGION 1..12: note = Table B: HLA-DRB1*04:01L HLA-DRB1*04:03L HLA-DRB1*04:02L HLA-DRB1*04:04L HLA-DRB1*01:01L HLA-DRB1*11:03L HLA-DRB1*09:01L HLA-DRB3*01:01L HLA-DPA1*01:03-B1*02:01L HLA-DRB1*07:01L HLA-DRB1*08:02L HLA-DRB1*08:03L
EVFNATRFASVY

SEQ ID NO: 12516 - protein, 14 aa, Severe acute respiratory syndrome coronavirus 2
  REGION 1..14: note = Table B: HLA-DRB1*04:01L HLA-DRB1*11:03L HLA-DQA1*05:05-B1*03:01L HLA-DRB1*14:17L HLA-DRB1*10:01L HLA-DRB1*15:01L
ATRFASVYAWNRKR

SEQ ID NO: 12517 - protein, 12 aa, Severe acute respiratory syndrome coronavirus 2
  REGION 1..12: note = Table B: HLA-DRB1*04:01L HLA-DRB1*01:03L HLA-DRB1*01:02L HLA-DQA1*01-B1*05L HLA-DQA1*05:05-B1*03:19L HLA-DRB1*12:01L HLA-DPA1*03:01-B1*105:01L HLA-DQA1*03:01-B1*03:02L HLA-DRB1*14:54L HLA-DQA1*05:05-B1*03:01L HLA-DRB1*10:01L
  REGION 1..12: note = CONT. FROM ABOVE: HLA-DRB1*15:03L
DYSVLYNSASFS

SEQ ID NO: 12518 - protein, 12 aa, Severe acute respiratory syndrome coronavirus 2
  REGION 1..12: note = Table B: HLA-DRB1*04:01L HLA-DRB1*04:04L HLA-DRB1*08:04L HLA-DRB1*11:02L HLA-DRB1*11:04L HLA-DRB1*09:01L HLA-DRB1*12:02L HLA-DRB3*01:01L HLA-DRB1*14:54L HLA-DRB1*07:01L HLA-DRB1*08:03L
VLYNSASFSTFK

SEQ ID NO: 12519 - protein, 10 aa, Severe acute respiratory syndrome coronavirus 2
  REGION 1..10: note = Table B: HLA-DRB1*04:01L HLA-DRB1*13:02M HLA-DRB1*13:03M HLA-DRB1*04:02L HLA-DRB1*01:01L HLA-DRB4*03:01NL HLA-DRB3*02:01L HLA-DRB1*14:01L HLA-DRB1*11:04L HLA-DRB1*14:02L HLA-DRB1*08:01M HLA-DRB5*01:01L HLA-DPA1*01:03-B1*04:02L HLA-DRB1*12:01M
  REGION 1..10: note = CONT. FROM ABOVE: HLA-DRB1*12:02L HLA-DRB3*01:01L HLA-DPA1*03:01 -B1*105:01L HLA-DQA1*03:01-B1*03:02M HLA-DQA1*05:05-B1*03:01M HL A-DRB1*14:17L HLA-DRB1*16:01L HLA-DQA1*01:03-B1*06:01L HLA-DRB1* 08:02L HLA-DRB1*08:03L HLA-DQA1*02:01-B1*03:03L HLA-DRB1*15:01L
NVYADSFVIR

SEQ ID NO: 12520 - protein, 16 aa, Severe acute respiratory syndrome coronavirus 2
  REGION 1..16: note = Table B: HLA-DRB1*04:01L HLA-DRB1*03:01L HLA-DRB1*11:02L HLA-DRB4*01:01L HLA-DPA1*01:03-B1*02:01L HLA-DRB1*08:02L
VRQIAPGQTGKIADYN

SEQ ID NO: 12521 - protein, 13 aa, Severe acute respiratory syndrome coronavirus 2
  REGION 1..13: note = Table B: HLA-DRB1*04:01L HLA-DRB1*04:04L HLA-DRB1*01:01L HLA-DRB1*08:01L HLA-DRB1*11:01L HLA-DRB5*01:01L HLA-DRB1*13:01L HLA-DRB1*04:10L HLA-DRB1*09:01L HLA-DRB1*07:01L HLA-DRB1*08:03L
KPFERDISTEIYQ

SEQ ID NO: 12522 - protein, 13 aa, Severe acute respiratory syndrome coronavirus 2
  REGION 1..13: note = Table B: HLA-DRB1*04:01L HLA-DRB1*08:04L HLA-DRB1*11:04L HLA-DRB1*11:01L HLA-DQA1*01-B1*05L HLA-DRB1*04:10L HLA-DRB1*09:01L HLA-DRB1*07:01L HLA-DRB1*08:03L
TEIYQAGSTPCNG

SEQ ID NO: 12523 - protein, 15 aa, Severe acute respiratory syndrome coronavirus 2
  REGION 1..15: note = Table B: HLA-DRB1*04:01L HLA-DRB1*01:01L HLA-DRB1*03:01L HLA-DRB1*11:02L HLA-DQA1*01:01-B1*05:01L HLA-DRB1*11:01L HLA-DRB5*01:01L HLA-DRB4*01:01L HLA-DPA1*01:03-B1*04:01L HLA-DQA1*05:05-B1*03:116L HLA-DRB3*01:01L
  REGION 1..15: note = CONT. FROM ABOVE: HLA-DPA1*01:03-B1*104:01L HLA-DRB1*07:01L HLA- DRB1*08:02L
FPLQSYGFQPTNGVG

SEQ ID NO: 12524 - protein, 14 aa, Severe acute respiratory syndrome coronavirus 2
  REGION 1..14: note = Table B: HLA-DRB1*04:01L HLA-DRB1*04:04L HLA-DRB1*04:05L HLA-DRB1*01:01L HLA-DPA1*01:03-B1*03:01L HLA-DRB1*14:01L HLA-DRB1*11:04L HLA-DRB1*08:01L HLA-DRB3*01:01L
FELLHAPATVCGPK

SEQ ID NO: 12525 - protein, 15 aa, Severe acute respiratory syndrome coronavirus 2
  REGION 1..15: note = Table B: HLA-DRB1*04:01L HLA-DRB1*03:01L HLA-DRB4*01:01L HLA-DPA1*01:03-B1*104:01L HLA-DRB1*10:01L
GRDIADTTDAVRDPQ

SEQ ID NO: 12526 - protein, 16 aa, Severe acute respiratory syndrome coronavirus 2
  REGION 1..16: note = Table B: HLA-DRB1*04:01L HLA-DRB1*01:01L HLA-DRB1*11:02L HLA-DRB1*11:01L HLA-DRB1*08:02L
DPQTLEILDITPCSFG

SEQ ID NO: 12527 - protein, 14 aa, Severe acute respiratory syndrome coronavirus 2
  REGION 1..14: note = Table B: HLA-DRB1*04:01L HLA-DRB1*04:04L HLA-DRB1*08:77L HLA-DRB3*02:01L HLA-DRB1*03:01L HLA-DRB1*11:03L HLA-DQA1*01:01-B1*05:01L HLA-DRB1*08:01L HLA-DRB1*11:01L HLA-DRB4*01:01L HLA-DPA1*01:03-B1*04:01L HLA-DRB1*09:01L
  REGION 1..14: note = CONT. FROM ABOVE: HLA-DRB1*12:02L HLA-DPA1*01:03-B1*02:01L HLA-D PA1*01:03-B1*104:01L HLA-DPA1*01:02-B1*04:01L HLA-DRB1*08:03L
VNNSYECDIPIGAG

SEQ ID NO: 12528 - protein, 13 aa, Severe acute respiratory syndrome coronavirus 2
  REGION 1..13: note = Table B: HLA-DRB1*04:01L HLA-DRB1*13:02L HLA-DRB1*13:03L HLA-DRB1*08:04L HLA-DPA1*03:01-B1*04:02L HLA-DRB1*11:03L HLA-DRB1*11:04L HLA-DRB4*01:01L HLA-DRB1*09:01L HLA-DRB1*12:02L HLA-DPA1*01:03-B1*104:01L HLA-DRB1*08:03L
SIIAYTMSLGAEN

SEQ ID NO: 12529 - protein, 14 aa, Severe acute respiratory syndrome coronavirus 2
  REGION 1..14: note = Table B: HLA-DRB1*04:01L HLA-DRB1*13:02L HLA-DRB1*01:03L HLA-DRB1*04:04L HLA-DRB1*01:01L HLA-DRB1*08:77L HLA-DPA1*01:03-B1*03:01L HLA-DRB1*11:03L HLA-DRB1*14:02L HLA-DQA1*01-B1*05L HLA-DRB1*09:01L HLA-DPA1*01:03-B1*04:02L
  REGION 1..14: note = CONT. FROM ABOVE: HLA-DPA1*02:01-B1*13:01L HLA-DPA1*01:03-B1*104 :01L HLA-DRB1*07:01L HLA-DQA1*01:03-B1*06:01L HLA-DRB1*04:08L
IAYTMSLGAENSVA

SEQ ID NO: 12530 - protein, 14 aa, Severe acute respiratory syndrome coronavirus 2
  REGION 1..14: note = Table B: HLA-DRB1*04:01L HLA-DRB1*01:01L HLA-DPA1*03:01-B1*04:02L HLA-DRB1*03:01L HLA-DRB1*11:02L HLA-DRB4*01:01L HLA-DRB3*01:01L HLA-DPA1*01:02-B1*04:01L HLA-DRB1*08:03L
SVAYSNNSIAIPTN

SEQ ID NO: 12531 - protein, 13 aa, Severe acute respiratory syndrome coronavirus 2
  REGION 1..13: note = Table B: HLA-DRB1*04:01L HLA-DRB1*08:77L HLA-DRB1*14:01L HLA-DRB1*11:01L HLA-DRB3*01:01L HLA-DPA1*01:03-B1*104:01L
NRALTGIAVEQDK

SEQ ID NO: 12532 - protein, 13 aa, Severe acute respiratory syndrome coronavirus 2
  REGION 1..13: note = Table B: HLA-DRB1*04:01L
TGIAVEQDKNTQE

SEQ ID NO: 12533 - protein, 11 aa, Severe acute respiratory syndrome coronavirus 2
  REGION 1..11: note = Table B: HLA-DRB1*04:01L HLA-DRB1*04:03L HLA-DRB1*04:02L HLA-DRB1*04:05L HLA-DPA1*02:01-B1*13:01L HLA-DRB1*14:54L
VEQDKNTQEVF

SEQ ID NO: 12534 - protein, 16 aa, Severe acute respiratory syndrome coronavirus 2
  REGION 1..16: note = Table B: HLA-DRB1*04:01L HLA-DRB3*02:01L HLA-DRB1*13:01L HLA-DPA1*01:03-B1*02:01L
TQEVFAQVKQIYKTPP

SEQ ID NO: 12535 - protein, 14 aa, Severe acute respiratory syndrome coronavirus 2
  REGION 1..14: note = Table B: HLA-DRB1*04:01L HLA-DRB1*13:02L HLA-DRB1*04:04L HLA-DRB1*01:01L HLA-DRB1*08:77L HLA-DRB3*02:01L HLA-DRB1*14:01L HLA-DRB1*11:03L HLA-DRB1*11:04L HLA-DRB1*11:01L HLA-DRB1*09:01L HLA-DRB1*12:02L HLA-DRB3*01:01L HLA-DRB1*14:54L
  REGION 1..14: note = CONT. FROM ABOVE: HLA-DPA1*01:03-B1*104:01L HLA-DRB1*07:01L HLA- DRB1*08:02L
FGGFNFSQILPDPS

SEQ ID NO: 12536 - protein, 14 aa, Severe acute respiratory syndrome coronavirus 2
  REGION 1..14: note = Table B: HLA-DRB1*04:01L HLA-DRB1*01:01L HLA-DRB1*08:77L HLA-DRB3*02:01L HLA-DRB1*14:01L HLA-DRB1*11:03L HLA-DRB4*01:01L HLA-DQA1*05:05-B1*03:116L HLA-DRB1*09:01L HLA-DRB3*01:01L HLA-DRB1*14:54L HLA-DRB1*07:01L HLA-DRB1*08:02L HLA-DRB1*08:03L
GFNFSQILPDPSKP

SEQ ID NO: 12537 - protein, 11 aa, Severe acute respiratory syndrome coronavirus 2
  REGION 1..11: note = Table B: HLA-DRB1*04:01L HLA-DRB1*04:04L HLA-DRB1*01:01L HLA-DRB1*08:04L HLA-DRB3*02:01L HLA-DPA1*01:03-B1*03:01L HLA-DPA1*03:01-B1*04:02L HLA-DRB1*03:01L HLA-DRB1*14:02L HLA-DRB1*08:01L HLA-DRB1*11:01L HLA-DRB5*01:01L
  REGION 1..11: note = CONT. FROM ABOVE: HLA-DQA1*05:05-B1*03:19L HLA-DRB1*13:01L HLA-D RB4*01:01L HLA-DRB1*09:01L HLA-DRB3*01:01L HLA-DPA1*03:01-B1*105 :01L HLA-DQA1*05:05-B1*03:01L HLA-DPA1*01:02-B1*04:01L HLA-DRB1* 07:01L HLA-DRB1*08:03L
SQILPDPSKPS

SEQ ID NO: 12538 - protein, 13 aa, Severe acute respiratory syndrome coronavirus 2
  REGION 1..13: note = Table B: HLA-DRB1*04:01L HLA-DRB1*04:04L HLA-DRB3*02:01L HLA-DRB1*03:01L HLA-DRB1*11:03L
RSFIEDLLFNKVT

SEQ ID NO: 12539 - protein, 14 aa, Severe acute respiratory syndrome coronavirus 2
  REGION 1..14: note = Table B: HLA-DRB1*04:01L HLA-DRB1*11:01L
FNKVTLADAGFIKQ

SEQ ID NO: 12540 - protein, 14 aa, Severe acute respiratory syndrome coronavirus 2
  REGION 1..14: note = Table B: HLA-DRB1*04:01L HLA-DRB1*01:03L HLA-DRB1*04:04L HLA-DRB1*01:01L HLA-DRB1*08:01L HLA-DRB1*11:01L HLA-DRB1*10:01L
IKQYGDCLGDIAAR

SEQ ID NO: 12541 - protein, 14 aa, Severe acute respiratory syndrome coronavirus 2
  REGION 1..14: note = Table B: HLA-DRB1*04:01L HLA-DRB1*13:02L HLA-DRB1*13:03L HLA-DRB1*04:04L HLA-DRB1*04:05L HLA-DRB1*01:01L HLA-DRB1*08:04L HLA-DRB1*08:77L HLA-DRB1*14:01L HLA-DRB1*11:02L HLA-DRB1*11:03L HLA-DRB1*11:04L HLA-DQA1*01:01-B1*05:01L HLA-DRB1*08:01L
  REGION 1..14: note = CONT. FROM ABOVE: HLA-DRB1*11:01L HLA-DRB4*01:01L HLA-DQA1*05:05 -B1*03:116L HLA-DRB1*04:10L HLA-DRB1*09:01L HLA-DPA1*01:03-B1*02 :01L HLA-DRB1*07:01L HLA-DRB1*10:01L HLA-DRB1*08:02L HLA-DRB1*08 :03L
IAQYTSALLAGTIT

SEQ ID NO: 12542 - protein, 14 aa, Severe acute respiratory syndrome coronavirus 2
  REGION 1..14: note = Table B: HLA-DRB1*04:01L HLA-DRB1*13:02L HLA-DRB1*04:04L HLA-DRB1*01:01L HLA-DPA1*03:01-B1*04:02L HLA-DRB1*11:04L HLA-DRB1*14:02L HLA-DRB1*11:01L HLA-DPA1*01:03-B1*02:01L HLA-DRB1*08:02L HLA-DRB1*08:03L
AYRFNGIGVTQNVL

SEQ ID NO: 12543 - protein, 16 aa, Severe acute respiratory syndrome coronavirus 2
  REGION 1..16: note = Table B: HLA-DRB1*04:01L HLA-DPA1*01:03-B1*04:01L
VTQNVLYENQKLIANQ

SEQ ID NO: 12544 - protein, 15 aa, Severe acute respiratory syndrome coronavirus 2
  REGION 1..15: note = Table B: HLA-DRB1*04:01L HLA-DRB1*01:01L HLA-DRB1*09:01L
NVLYENQKLIANQFN

SEQ ID NO: 12545 - protein, 13 aa, Severe acute respiratory syndrome coronavirus 2
  REGION 1..13: note = Table B: HLA-DRB1*04:01L HLA-DRB4*03:01NL HLA-DRB3*02:01L HLA-DRB1*11:03L HLA-DRB3*01:01L HLA-DPA1*01:03-B1*104:01L HLA-DRB1*08:03L
QKLIANQFNSAIG

SEQ ID NO: 12546 - protein, 14 aa, Severe acute respiratory syndrome coronavirus 2
  REGION 1..14: note = Table B: HLA-DRB1*04:01L HLA-DRB5*01:01L HLA-DQA1*05:05-B1*03:116L HLA-DRB3*01:01L HLA-DPA1*01:03-B1*02:01L HLA-DRB1*08:02L
ANQFNSAIGKIQDS

SEQ ID NO: 12547 - protein, 13 aa, Severe acute respiratory syndrome coronavirus 2
  REGION 1..13: note = Table B: HLA-DRB1*04:01L HLA-DRB1*11:03L HLA-DRB4*01:01L
SAIGKIQDSLSST

SEQ ID NO: 12548 - protein, 14 aa, Severe acute respiratory syndrome coronavirus 2
  REGION 1..14: note = Table B: HLA-DRB1*04:01L HLA-DRB1*08:04L HLA-DRB1*11:03L HLA-DRB1*08:01L HLA-DPA1*01:03-B1*04:02L HLA-DPA1*02:01-B1*13:01L HLA-DPA1*01:03-B1*104:01L HLA-DRB1*07:01L HLA-DRB1*08:03L
IQDSLSSTASALGK

SEQ ID NO: 12549 - protein, 14 aa, Severe acute respiratory syndrome coronavirus 2
  REGION 1..14: note = Table B: HLA-DRB1*04:01L HLA-DRB1*01:01L HLA-DRB3*02:01L HLA-DPA1*03:01-B1*04:02L HLA-DRB1*11:03L HLA-DRB1*14:02L HLA-DRB1*08:01L HLA-DRB1*11:01L HLA-DRB4*02:01NL HLA-DRB4*01:01L HLA-DRB1*09:01L HLA-DPA1*02:01-B1*13:01L
  REGION 1..14: note = CONT. FROM ABOVE: HLA-DPA1*01:03-B1*02:01L HLA-DPA1*01:03-B1*104 :01L HLA-DPA1*01:02-B1*04:01L HLA-DRB1*07:01L HLA-DRB1*08:02L HL A-DRB1*08:03L
DSLSSTASALGKLQ

SEQ ID NO: 12550 - protein, 14 aa, Severe acute respiratory syndrome coronavirus 2
  REGION 1..14: note = Table B: HLA-DRB1*04:01L HLA-DRB1*08:04L HLA-DRB1*14:01L HLA-DRB1*11:04L HLA-DPA1*02:01-B1*13:01L HLA-DRB1*08:03L
ASALGKLQDVVNQN

SEQ ID NO: 12551 - protein, 14 aa, Severe acute respiratory syndrome coronavirus 2
  REGION 1..14: note = Table B: HLA-DRB1*04:01L HLA-DRB1*04:04L HLA-DRB1*01:01L HLA-DRB1*11:01L HLA-DRB4*01:01L HLA-DRB3*01:01L HLA-DRB1*08:03L
LQDVVNQNAQALNT

SEQ ID NO: 12552 - protein, 14 aa, Severe acute respiratory syndrome coronavirus 2
  REGION 1..14: note = Table B: HLA-DRB1*04:01L HLA-DRB1*01:01L HLA-DRB3*02:01L HLA-DRB1*11:03L HLA-DRB1*14:02L HLA-DRB1*11:01L HLA-DRB4*01:01L HLA-DRB1*09:01L HLA-DPA1*01:03-B1*04:02L HLA-DRB3*01:01L HLA-DPA1*01:03-B1*104:01L HLA-DRB1*07:01L HLA-DRB1*08:03L
TLVKQLSSNFGAIS

SEQ ID NO: 12553 - protein, 15 aa, Severe acute respiratory syndrome coronavirus 2
  REGION 1..15: note = Table B: HLA-DRB1*04:01L HLA-DRB4*01:01L HLA-DRB1*09:01L
SSNFGAISSVLNDIL

SEQ ID NO: 12554 - protein, 13 aa, Severe acute respiratory syndrome coronavirus 2
  REGION 1..13: note = Table B: HLA-DRB1*04:01L HLA-DRB1*04:04L HLA-DRB1*08:04L HLA-DRB1*08:77L HLA-DPA1*01:03-B1*03:01L HLA-DPA1*03:01-B1*04:02L HLA-DRB1*14:01L HLA-DRB1*11:04L HLA-DRB1*04:10L HLA-DRB1*12:02L HLA-DPA1*02:01-B1*13:01L
  REGION 1..13: note = CONT. FROM ABOVE: HLA-DRB1*14:54L HLA-DRB1*10:01L HLA-DRB1*08:03 L
GAISSVLNDILSR

SEQ ID NO: 12555 - protein, 15 aa, Severe acute respiratory syndrome coronavirus 2
  REGION 1..15: note = Table B: HLA-DRB1*04:01L HLA-DRB4*03:01NL HLA-DPA1*01:03-B1*03:01L HLA-DPA1*03:01-B1*04:02L HLA-DRB1*03:01L HLA-DRB1*13:01L HLA-DPA1*01:03-B1*02:01L HLA-DPA1*01:03-B1*104:01L HLA-DPA1*01:02-B1*04:01L
  REGION 1..15: note = CONT. FROM ABOVE: HLA-DRB1*07:01L HLA-DRB1*10:01L
NDILSRLDKVEAEVQ

SEQ ID NO: 12556 - protein, 15 aa, Severe acute respiratory syndrome coronavirus 2
  REGION 1..15: note = Table B: HLA-DRB1*04:01L
LSRLDKVEAEVQIDR

SEQ ID NO: 12557 - protein, 10 aa, Severe acute respiratory syndrome coronavirus 2
  REGION 1..10: note = Table B: HLA-DRB1*04:01L HLA-DRB1*13:02M HLA-DRB1*13:03M HLA-DRB1*01:03L HLA-DRB1*04:02L HLA-DRB1*04:04L HLA-DRB1*01:01L HLA-DRB4*03:01NL HLA-DRB3*02:01L HLA-DRB1*14:01L HLA-DRB1*11:04L HLA-DRB1*08:01L HLA-DRB1*11:01L HLA-DRB5*01:01L HLA-DRB1*13:01L
  REGION 1..10: note = CONT. FROM ABOVE: HLA-DPA1*01:03-B1*04:02L HLA-DRB1*12:01L HLA-D RB1*12:02L HLA-DRB3*01:01L HLA-DQA1*03:01-B1*03:02M HLA-DQA1*05: 05-B1*03:01L HLA-DRB1*14:17L HLA-DRB1*16:01L HLA-DRB1*08:02L HLA -DQA1*02:01-B1*03:03L HLA-DRB1*15:01L
VQIDRLITGR

SEQ ID NO: 12558 - protein, 12 aa, Severe acute respiratory syndrome coronavirus 2
  REGION 1..12: note = Table B: HLA-DRB1*04:01L HLA-DRB1*13:02L HLA-DRB1*08:04L HLA-DRB1*11:04L HLA-DRB1*08:01L HLA-DRB1*11:01L HLA-DPA1*01:03-B1*04:01L HLA-DRB1*04:10L HLA-DPA1*01:03-B1*02:01L HLA-DRB1*10:01L
TYVTQQLIRAAE

SEQ ID NO: 12559 - protein, 13 aa, Severe acute respiratory syndrome coronavirus 2
  REGION 1..13: note = Table B: HLA-DRB1*04:01L HLA-DRB1*13:03L HLA-DRB4*03:01NL HLA-DRB1*08:04L HLA-DRB1*11:04L HLA-DRB1*14:02L HLA-DRB1*04:10L HLA-DRB3*01:01L HLA-DPA1*02:01-B1*13:01L
QLIRAAEIRASAN

SEQ ID NO: 12560 - protein, 13 aa, Severe acute respiratory syndrome coronavirus 2
  REGION 1..13: note = Table B: HLA-DRB1*04:01L HLA-DRB1*13:02L HLA-DRB1*08:04L HLA-DRB1*08:77L HLA-DPA1*01:03-B1*03:01L HLA-DRB1*11:03L HLA-DRB1*08:01L HLA-DRB1*11:01L HLA-DQA1*01-B1*05L HLA-DQA1*05:01-B1*02:01L HLA-DRB1*09:01L
  REGION 1..13: note = CONT. FROM ABOVE: HLA-DPA1*03:01-B1*105:01L HLA-DRB1*15:03L
AAEIRASANLAAT

SEQ ID NO: 12561 - protein, 11 aa, Severe acute respiratory syndrome coronavirus 2
  REGION 1..11: note = Table B: HLA-DRB1*04:01L HLA-DRB1*13:02L HLA-DRB1*01:01L HLA-DRB1*01:02L HLA-DPA1*01:03-B1*03:01L HLA-DRB1*03:01L HLA-DRB1*11:03L HLA-DRB1*11:04L HLA-DQA1*01:01-B1*05:01L HLA-DRB1*08:01L HLA-DRB1*11:01L HLA-DRB5*01:01L HLA-DRB4*01:01L
  REGION 1..11: note = CONT. FROM ABOVE: HLA-DPA1*01:03-B1*04:01L HLA-DRB1*09:01L HLA-D PA1*01:03-B1*04:02L HLA-DRB1*12:01L HLA-DQA1*05:05-B1*03:01L HLA -DRB1*07:01L HLA-DRB1*10:01L HLA-DRB1*08:02L HLA-DRB1*08:03L
FPQSAPHGVVF

SEQ ID NO: 12562 - protein, 17 aa, Severe acute respiratory syndrome coronavirus 2
  REGION 1..17: note = Table B: HLA-DRB1*04:01L HLA-DRB4*01:01L
APHGVVFLHVTYVPAQE

SEQ ID NO: 12563 - protein, 16 aa, Severe acute respiratory syndrome coronavirus 2
  REGION 1..16: note = Table B: HLA-DRB1*04:01L HLA-DRB1*01:01L HLA-DRB1*11:02L HLA-DRB1*11:03L HLA-DRB4*01:01L HLA-DQA1*05:05-B1*03:116L HLA-DRB1*09:01L HLA-DRB1*07:01L HLA-DRB1*08:02L
GVVFLHVTYVPAQEKN

SEQ ID NO: 12564 - protein, 14 aa, Severe acute respiratory syndrome coronavirus 2
  REGION 1..14: note = Table B: HLA-DRB1*04:01L HLA-DRB1*13:02L HLA-DRB1*13:03L HLA-DRB1*04:04L HLA-DRB1*01:01L HLA-DRB1*08:04L HLA-DRB1*14:01L HLA-DRB1*14:02L HLA-DRB1*11:01L HLA-DPA1*01:03-B1*104:01L HLA-DRB1*14:17L HLA-DPA1*01:02-B1*04:01L HLA-DRB1*07:01L
  REGION 1..14: note = CONT. FROM ABOVE: HLA-DRB1*10:01L HLA-DRB1*08:03L
EKNFTTAPAICHDG

SEQ ID NO: 12565 - protein, 18 aa, Severe acute respiratory syndrome coronavirus 2
  REGION 1..18: note = Table B: HLA-DRB1*04:01L
FPREGVFVSNGTHWFVTQ

SEQ ID NO: 12566 - protein, 14 aa, Severe acute respiratory syndrome coronavirus 2
  REGION 1..14: note = Table B: HLA-DRB1*04:01L HLA-DRB1*01:01L HLA-DRB3*02:01L HLA-DPA1*01:03-B1*03:01L HLA-DRB1*11:02L HLA-DRB1*11:03L HLA-DQA1*05:05-B1*03:116L HLA-DRB1*09:01L HLA-DRB1*12:02L HLA-DPA1*01:03-B1*02:01L HLA-DPA1*01:03-B1*104:01L
  REGION 1..14: note = CONT. FROM ABOVE: HLA-DQA1*05:05-B1*03:01L HLA-DRB1*07:01L
THWFVTQRNFYEPQ

SEQ ID NO: 12567 - protein, 15 aa, Severe acute respiratory syndrome coronavirus 2
  REGION 1..15: note = Table B: HLA-DRB1*04:01L HLA-DRB1*01:01L HLA-DRB1*11:02L HLA-DRB4*01:01L
TDNTFVSGNCDVVIG

SEQ ID NO: 12568 - protein, 13 aa, Severe acute respiratory syndrome coronavirus 2
  REGION 1..13: note = Table B: HLA-DRB1*04:01L HLA-DRB1*01:01L HLA-DRB1*08:77L HLA-DRB3*02:01L HLA-DPA1*03:01-B1*04:02L HLA-DRB1*03:01L HLA-DRB1*11:02L HLA-DRB1*11:03L HLA-DRB5*01:01L HLA-DRB4*01:01L HLA-DPA1*01:03-B1*04:01L HLA-DQA1*05:05-B1*03:116L
  REGION 1..13: note = CONT. FROM ABOVE: HLA-DRB1*09:01L HLA-DPA1*01:03-B1*04:02L HLA-D PA1*01:03-B1*02:01L HLA-DPA1*01:03-B1*104:01L HLA-DRB1*07:01L HL A-DRB1*10:01L HLA-DRB1*08:02L
DKYFKNHTSPDVD

SEQ ID NO: 12569 - protein, 14 aa, Severe acute respiratory syndrome coronavirus 2
  REGION 1..14: note = Table B: HLA-DRB1*04:01L HLA-DRB1*07:01L HLA-DRB1*10:01L
KYFKNHTSPDVDLG

SEQ ID NO: 12570 - protein, 16 aa, Severe acute respiratory syndrome coronavirus 2
  REGION 1..16: note = Table B: HLA-DRB1*04:01L HLA-DRB1*03:01L HLA-DRB1*11:04L HLA-DRB1*14:02L HLA-DRB1*08:01L HLA-DRB4*01:01L HLA-DPA1*01:03-B1*04:01L HLA-DRB3*01:01L HLA-DRB1*10:01L HLA-DRB1*08:03L
VAKNLNESLIDLQELG

SEQ ID NO: 12571 - protein, 14 aa, Severe acute respiratory syndrome coronavirus 2
  REGION 1..14: note = Table B: HLA-DRB1*04:01L HLA-DRB1*08:04L HLA-DRB1*11:04L HLA-DRB1*12:02L HLA-DRB3*01:01L HLA-DRB1*07:01L HLA-DRB1*08:03L
QGEIKDATPSDFVR

SEQ ID NO: 12572 - protein, 13 aa, Severe acute respiratory syndrome coronavirus 2
  REGION 1..13: note = Table B: HLA-DRB1*04:01L HLA-DRB1*04:04L HLA-DRB3*02:01L HLA-DPA1*01:03-B1*03:01L HLA-DPA1*03:01-B1*04:02L HLA-DRB1*11:03L HLA-DQA1*01:01-B1*05:01L HLA-DPA1*01:03-B1*04:01L HLA-DRB1*09:01L HLA-DRB1*10:01L
KKRWQLALSKGVH

SEQ ID NO: 12573 - protein, 15 aa, Severe acute respiratory syndrome coronavirus 2
  REGION 1..15: note = Table B: HLA-DRB1*04:01L HLA-DRB1*04:04L HLA-DRB1*01:01L HLA-DRB1*11:03L HLA-DRB1*08:03L
HSYFTSDYYQLYSTQ

SEQ ID NO: 12574 - protein, 14 aa, Severe acute respiratory syndrome coronavirus 2
  REGION 1..14: note = Table B: HLA-DRB1*04:01L HLA-DRB1*13:02L HLA-DRB1*04:04L HLA-DRB1*11:04L HLA-DRB1*11:01L HLA-DRB1*12:02L HLA-DRB3*01:01L HLA-DRB1*15:01L
TSDYYQLYSTQLST

SEQ ID NO: 12575 - protein, 14 aa, Severe acute respiratory syndrome coronavirus 2
  REGION 1..14: note = Table B: HLA-DRB1*04:01L HLA-DRB1*13:02L HLA-DRB3*02:01L HLA-DPA1*01:03-B1*03:01L HLA-DRB1*14:01L HLA-DRB1*11:04L HLA-DRB1*08:01L HLA-DRB1*11:01L HLA-DRB1*09:01L HLA-DRB3*01:01L HLA-DPA1*01:03-B1*104:01L HLA-DRB1*07:01L HLA-DRB1*08:03L
SDYYQLYSTQLSTD

SEQ ID NO: 12576 - protein, 14 aa, Severe acute respiratory syndrome coronavirus 2
  REGION 1..14: note = Table B: HLA-DRB1*04:01L HLA-DRB1*13:02L HLA-DRB1*13:03L HLA-DRB1*08:77L HLA-DRB3*02:01L HLA-DPA1*01:03-B1*03:01L HLA-DRB1*11:04L HLA-DRB1*11:01L HLA-DRB1*09:01L HLA-DRB1*07:01L HLA-DRB1*08:03L
DYYQLYSTQLSTDT

SEQ ID NO: 12577 - protein, 14 aa, Severe acute respiratory syndrome coronavirus 2
  REGION 1..14: note = Table B: HLA-DRB1*04:01L HLA-DRB1*04:04L HLA-DRB1*01:01L HLA-DRB3*02:01L HLA-DPA1*03:01-B1*04:02L HLA-DRB1*08:01L HLA-DRB1*11:01L HLA-DRB4*02:01NL HLA-DRB1*13:01L HLA-DRB4*01:01L HLA-DPA1*01:03-B1*04:01L HLA-DRB1*09:01L
  REGION 1..14: note = CONT. FROM ABOVE: HLA-DPA1*01:03-B1*04:02L HLA-DPA1*02:01-B1*13: 01L HLA-DPA1*01:02-B1*04:01L HLA-DRB1*07:01L HLA-DRB1*08:03L
STQLSTDTGVEHVT

SEQ ID NO: 12578 - protein, 15 aa, Severe acute respiratory syndrome coronavirus 2
  REGION 1..15: note = Table B: HLA-DRB1*04:01L HLA-DRB1*01:01L HLA-DRB1*03:01L HLA-DRB4*01:01L
HVTFFIYNKIVDEPE

SEQ ID NO: 12579 - protein, 14 aa, Severe acute respiratory syndrome coronavirus 2
  REGION 1..14: note = Table B: HLA-DRB1*04:01L HLA-DRB1*01:01L HLA-DRB1*08:04L HLA-DRB1*11:03L HLA-DRB1*11:04L HLA-DRB1*08:01L HLA-DRB1*11:01L HLA-DRB5*01:01L HLA-DQA1*05:05-B1*03:116L HLA-DPA1*01:03-B1*04:02L HLA-DRB1*12:02L HLA-DRB1*07:01L
IHTIDGSSGVVNPV

SEQ ID NO: 12580 - protein, 14 aa, Severe acute respiratory syndrome coronavirus 2
  REGION 1..14: note = Table B: HLA-DRB1*04:01L HLA-DRB1*13:02L HLA-DQA1*01:02-B1*06:02L HLA-DRB1*08:04L HLA-DRB1*08:77L HLA-DPA1*03:01-B1*04:02L HLA-DRB1*14:01L HLA-DRB1*11:03L HLA-DRB1*14:02L HLA-DRB1*09:01L HLA-DPA1*02:01-B1*13:01L
  REGION 1..14: note = CONT. FROM ABOVE: HLA-DPA1*03:01-B1*105:01L HLA-DQA1*05:05-B1*03 :01L
NPVMEPIYDEPTTT

SEQ ID NO: 12581 - protein, 15 aa, Severe acute respiratory syndrome coronavirus 2
  REGION 1..15: note = Table B: HLA-DRB1*04:01L HLA-DRB1*01:01L HLA-DRB1*08:04L HLA-DRB3*02:01L HLA-DPA1*03:01-B1*04:02L HLA-DRB1*14:01L HLA-DRB1*11:03L HLA-DRB1*11:04L HLA-DRB1*14:02L HLA-DRB1*08:01L HLA-DRB1*11:01L HLA-DRB5*01:01L HLA-DRB4*01:01L
  REGION 1..15: note = CONT. FROM ABOVE: HLA-DPA1*01:03-B1*04:01L HLA-DQA1*05:05-B1*03: 116L HLA-DRB1*09:01L HLA-DPA1*01:03-B1*04:02L HLA-DRB1*12:02L HL A-DRB3*01:01L HLA-DPA1*01:03-B1*104:01L HLA-DRB1*07:01L HLA-DRB1 *08:03L
EPIYDEPTTTTSVPL

SEQ ID NO: 12582 - protein, 14 aa, Severe acute respiratory syndrome coronavirus 2
  REGION 1..14: note = Table B: HLA-DRB1*04:01L HLA-DRB1*04:04L HLA-DRB1*08:04L HLA-DRB1*11:04L HLA-DRB1*11:01L HLA-DRB4*01:01L HLA-DRB1*04:10L HLA-DRB1*12:02L HLA-DRB3*01:01L HLA-DPA1*01:03-B1*104:01L HLA-DRB1*08:03L
YSFVSEETGTLIVN

SEQ ID NO: 12583 - protein, 17 aa, Severe acute respiratory syndrome coronavirus 2
  REGION 1..17: note = Table B: HLA-DRB1*04:01L HLA-DQA1*05:01-B1*02:01L HLA-DRB1*09:01L
VKPSFYVYSRVKNLNSS

SEQ ID NO: 12584 - protein, 14 aa, Severe acute respiratory syndrome coronavirus 2
  REGION 1..14: note = Table B: HLA-DRB1*04:01L HLA-DRB1*01:01L HLA-DPA1*02:01-B1*13:01L
FYVYSRVKNLNSSR

SEQ ID NO: 12585 - protein, 13 aa, Severe acute respiratory syndrome coronavirus 2
  REGION 1..13: note = Table B: HLA-DRB1*04:01L HLA-DRB1*13:02L HLA-DQA1*01:02-B1*06:02L HLA-DRB1*01:01L HLA-DRB1*11:03L HLA-DRB1*11:04L HLA-DRB1*08:01L HLA-DRB1*11:01L HLA-DQA1*01-B1*05L HLA-DRB3*01:01L HLA-DPA1*02:01-B1*13:01L
  REGION 1..13: note = CONT. FROM ABOVE: HLA-DPA1*03:01-B1*105:01L HLA-DQA1*05:05-B1*03 :01L HLA-DPA1*01:02-B1*04:01L HLA-DRB1*07:01L HLA-DRB1*10:01L HL A-DQA1*01:03-B1*06:01L HLA-DRB1*08:03L HLA-DRB1*15:01L
SRVKNLNSSRVPD

SEQ ID NO: 12586 - protein, 13 aa, Severe acute respiratory syndrome coronavirus 2
  REGION 1..13: note = Table B: HLA-DRB1*04:01L HLA-DRB1*13:03L HLA-DRB1*04:04L HLA-DRB4*03:01NL HLA-DRB1*08:77L HLA-DRB3*02:01L HLA-DRB1*03:01L HLA-DRB1*11:02L HLA-DRB1*11:03L HLA-DRB1*11:04L HLA-DRB1*14:02L HLA-DRB1*11:01L HLA-DRB4*01:01L HLA-DPA1*01:03-B1*04:01L
  REGION 1..13: note = CONT. FROM ABOVE: HLA-DRB1*04:10L HLA-DRB1*09:01L HLA-DRB1*12:02 L HLA-DRB3*01:01L HLA-DRB1*14:54L HLA-DPA1*01:03-B1*02:01L HLA-D PA1*01:03-B1*104:01L HLA-DRB1*10:01L HLA-DRB1*08:02L HLA-DRB1*08 :03L
AVYRINWITGGIA

SEQ ID NO: 12587 - protein, 14 aa, Severe acute respiratory syndrome coronavirus 2
  REGION 1..14: note = Table B: HLA-DRB1*04:01L HLA-DRB1*04:04L HLA-DRB1*11:03L HLA-DRB1*14:02L HLA-DRB1*11:01L HLA-DRB4*01:01L HLA-DRB1*09:01L HLA-DPA1*01:03-B1*104:01L
VYRINWITGGIAIA

SEQ ID NO: 12588 - protein, 17 aa, Severe acute respiratory syndrome coronavirus 2
  REGION 1..17: note = Table B: HLA-DRB1*04:01L HLA-DQA1*05:05-B1*03:116L HLA-DRB1*08:02L HLA-DRB1*08:03L
NPETNILLNVPLHGTIL

SEQ ID NO: 12589 - protein, 12 aa, Severe acute respiratory syndrome coronavirus 2
  REGION 1..12: note = Table B: HLA-DRB1*04:01L HLA-DRB3*02:01L HLA-DPA1*01:03-B1*03:01L HLA-DQA1*01-B1*05L HLA-DQA1*05:01-B1*02:01L HLA-DRB1*09:01L HLA-DRB3*01:01L
YYKLGASQRVAG

SEQ ID NO: 12590 - protein, 12 aa, Severe acute respiratory syndrome coronavirus 2
  REGION 1..12: note = Table B: HLA-DRB1*04:01L HLA-DRB1*13:02L HLA-DRB1*04:04L HLA-DRB1*01:02L HLA-DRB1*08:04L HLA-DRB1*08:77L HLA-DRB1*14:01L HLA-DRB1*11:03L HLA-DRB1*11:04L HLA-DRB1*14:02L HLA-DRB1*08:01L HLA-DRB1*11:01L HLA-DRB1*04:10L HLA-DRB1*12:01L HLA-DRB1*12:02L
  REGION 1..12: note = CONT. FROM ABOVE: HLA-DRB3*01:01L HLA-DQA1*03:01-B1*03:02L HLA-D RB1*10:01L HLA-DRB1*04:08L HLA-DRB1*08:03L HLA-DQA1*02:01-B1*03: 03L HLA-DRB1*15:03L
GNYKLNTDHSSS

SEQ ID NO: 12591 - protein, 11 aa, Severe acute respiratory syndrome coronavirus 2
  REGION 1..11: note = Table B: HLA-DRB1*04:01L HLA-DRB1*13:03L HLA-DRB1*04:04L HLA-DRB1*04:05L HLA-DRB1*14:01L HLA-DRB1*11:04L HLA-DRB1*04:10L HLA-DRB1*12:01L HLA-DRB1*04:08L
YKLNTDHSSSS

SEQ ID NO: 12592 - protein, 13 aa, Severe acute respiratory syndrome coronavirus 2
  REGION 1..13: note = Table B: HLA-DRB1*04:01L HLA-DRB1*01:01L HLA-DRB1*03:01L HLA-DRB1*11:02L HLA-DRB1*04:10L HLA-DRB1*10:01L HLA-DRB1*08:02L
DYIINLIIKNLSK

SEQ ID NO: 12593 - protein, 16 aa, Severe acute respiratory syndrome coronavirus 2
  REGION 1..16: note = Table B: HLA-DRB1*04:01L
INLIIKNLSKSLTENK

SEQ ID NO: 12594 - protein, 14 aa, Severe acute respiratory syndrome coronavirus 2
  REGION 1..14: note = Table B: HLA-DRB1*04:01L HLA-DRB1*04:04L HLA-DRB1*11:03L HLA-DRB1*11:04L HLA-DRB1*14:02L HLA-DRB1*11:01L HLA-DRB3*01:01L HLA-DRB1*14:54L HLA-DRB1*08:03L
STQFAFACPDGVKH

SEQ ID NO: 12595 - protein, 14 aa, Severe acute respiratory syndrome coronavirus 2
  REGION 1..14: note = Table B: HLA-DRB1*04:01L HLA-DRB1*10:01L
KHVYQLRARSVSPK

SEQ ID NO: 12596 - protein, 17 aa, Severe acute respiratory syndrome coronavirus 2
  REGION 1..17: note = Table B: HLA-DRB1*04:01L HLA-DRB1*04:04L HLA-DRB1*01:01L HLA-DRB1*11:04L HLA-DRB1*11:01L HLA-DRB3*01:01L HLA-DRB1*07:01L
SPKLFIRQEEVQELYSP

SEQ ID NO: 12597 - protein, 15 aa, Severe acute respiratory syndrome coronavirus 2
  REGION 1..15: note = Table B: HLA-DRB1*04:01L HLA-DRB1*01:01L HLA-DRB3*01:01L HLA-DPA1*01:03-B1*02:01L
LFIRQEEVQELYSPI

SEQ ID NO: 12598 - protein, 14 aa, Severe acute respiratory syndrome coronavirus 2
  REGION 1..14: note = Table B: HLA-DRB1*04:01L HLA-DRB1*04:04L HLA-DRB1*11:03L HLA-DRB1*13:01L HLA-DRB1*07:01L HLA-DRB1*10:01L
KWYIRVGARKSAPL

SEQ ID NO: 12599 - protein, 14 aa, Severe acute respiratory syndrome coronavirus 2
  REGION 1..14: note = Table B: HLA-DRB1*04:01L
SKSPIQYIDIGNYT

SEQ ID NO: 12600 - protein, 16 aa, Severe acute respiratory syndrome coronavirus 2
  REGION 1..16: note = Table B: HLA-DRB1*04:01L HLA-DRB1*04:04L HLA-DRB1*11:04L HLA-DRB1*14:02L HLA-DQA1*05:05-B1*03:116L HLA-DRB1*10:01L
APRITFGGPSDSTGSN

SEQ ID NO: 12601 - protein, 14 aa, Severe acute respiratory syndrome coronavirus 2
  REGION 1..14: note = Table B: HLA-DRB1*04:01L HLA-DRB1*04:03L HLA-DRB1*01:03L HLA-DRB1*04:02L HLA-DRB1*04:05L HLA-DQA1*01:02-B1*06:02M HLA-DRB1*01:02L HLA-DRB1*08:04L HLA-DRB1*08:77L HLA-DPA1*01:03-B1*03:01L HLA-DRB1*11:04L HLA-DRB1*14:02L
  REGION 1..14: note = CONT. FROM ABOVE: HLA-DQA1*01:01-B1*05:01L HLA-DRB1*11:01L HLA-D QA1*01-B1*05L HLA-DQA1*05:05-B1*03:19M HLA-DQA1*05:01-B1*02:01L HLA-DQA1*05:05-B1*03:116L HLA-DRB1*04:10L HLA-DPA1*01:03-B1*04:0 2L HLA-DRB3*01:01L HLA-DPA1*02:01-B1*13:01L
  REGION 1..14: note = CONT. FROM ABOVE: HLA-DPA1*03:01-B1*105:01L HLA-DRB1*14:54L HLA- DRB1*07:01L HLA-DRB1*16:01L HLA-DRB1*04:08L HLA-DRB1*15:03L
GPSDSTGSNQNGER

SEQ ID NO: 12602 - protein, 12 aa, Severe acute respiratory syndrome coronavirus 2
  REGION 1..12: note = Table B: HLA-DRB1*04:01L HLA-DRB1*13:02L HLA-DRB1*04:04L HLA-DRB1*01:01L HLA-DRB1*08:04L HLA-DPA1*01:03-B1*03:01L HLA-DRB1*11:04L HLA-DRB1*14:02L HLA-DRB1*11:01L HLA-DRB1*04:10L HLA-DPA1*01:03-B1*04:02L HLA-DPA1*02:01-B1*13:01L
SWFTALTQHGKE

SEQ ID NO: 12603 - protein, 12 aa, Severe acute respiratory syndrome coronavirus 2
  REGION 1..12: note = Table B: HLA-DRB1*04:01L HLA-DRB4*01:01L HLA-DPA1*01:03-B1*04:01L HLA-DQA1*05:05-B1*03:116L HLA-DRB1*09:01L HLA-DRB3*01:01L HLA-DPA1*01:03-B1*02:01L HLA-DPA1*01:03-B1*104:01L HLA-DRB1*08:02L
WFTALTQHGKED

SEQ ID NO: 12604 - protein, 14 aa, Severe acute respiratory syndrome coronavirus 2
  REGION 1..14: note = Table B: HLA-DRB1*04:01L HLA-DRB1*01:02L HLA-DRB1*08:04L HLA-DRB3*02:01L HLA-DPA1*03:01-B1*04:02L HLA-DRB1*03:01L HLA-DRB1*14:01L HLA-DRB1*14:02L HLA-DRB1*08:01L HLA-DRB1*11:01L HLA-DRB1*13:01L HLA-DRB4*01:01L HLA-DPA1*01:03-B1*04:01L
  REGION 1..14: note = CONT. FROM ABOVE: HLA-DRB1*09:01L HLA-DPA1*01:03-B1*04:02L HLA-D RB3*01:01L HLA-DPA1*02:01-B1*13:01L HLA-DPA1*03:01-B1*105:01L HL A-DPA1*01:03-B1*104:01L HLA-DPA1*01:02-B1*04:01L HLA-DRB1*15:03L
VPINTNSSPDDQIG

SEQ ID NO: 12605 - protein, 16 aa, Severe acute respiratory syndrome coronavirus 2
  REGION 1..16: note = Table B: HLA-DRB1*04:01L HLA-DRB1*01:01L HLA-DRB3*02:01L HLA-DRB1*14:01L HLA-DRB1*11:02L HLA-DRB1*11:03L HLA-DRB1*11:04L HLA-DRB1*14:02L HLA-DQA1*01:01-B1*05:01L HLA-DRB1*11:01L HLA-DRB4*01:01L HLA-DQA1*05:05-B1*03:116L HLA-DRB1*09:01L
  REGION 1..16: note = CONT. FROM ABOVE: HLA-DRB3*01:01L HLA-DRB1*07:01L HLA-DRB1*08:02 L
SPRWYFYYLGTGPEAG

SEQ ID NO: 12606 - protein, 13 aa, Severe acute respiratory syndrome coronavirus 2
  REGION 1..13: note = Table B: HLA-DRB1*04:01L HLA-DRB1*13:02L HLA-DRB1*13:03L HLA-DRB1*08:04L HLA-DRB1*08:77L HLA-DRB3*02:01L HLA-DPA1*03:01-B1*04:02L HLA-DRB1*11:03L HLA-DRB1*11:04L HLA-DRB1*14:02L HLA-DRB4*01:01L HLA-DRB1*09:01L
  REGION 1..13: note = CONT. FROM ABOVE: HLA-DPA1*02:01-B1*13:01L HLA-DPA1*01:03-B1*104 :01L HLA-DRB1*08:03L
DGIIWVATEGALN

SEQ ID NO: 12607 - protein, 13 aa, Severe acute respiratory syndrome coronavirus 2
  REGION 1..13: note = Table B: HLA-DRB1*04:01L HLA-DRB1*08:04L HLA-DRB1*14:01L HLA-DRB1*11:01L HLA-DRB5*01:01L HLA-DRB1*09:01L HLA-DRB3*01:01L HLA-DPA1*02:01-B1*13:01L HLA-DPA1*01:03-B1*104:01L HLA-DRB1*07:01L HLA-DRB1*08:03L
VATEGALNTPKDH

SEQ ID NO: 12608 - protein, 16 aa, Severe acute respiratory syndrome coronavirus 2
  REGION 1..16: note = Table B: HLA-DRB1*04:01L HLA-DRB1*11:01L HLA-DQA1*01-B1*05L HLA-DRB3*01:01L HLA-DPA1*02:01-B1*13:01L HLA-DPA1*01:03-B1*104:01L
NAAIVLQLPQGTTLPK

SEQ ID NO: 12609 - protein, 10 aa, Severe acute respiratory syndrome coronavirus 2
  REGION 1..10: note = Table B: HLA-DRB1*04:01L HLA-DRB1*13:02M HLA-DRB1*13:03M HLA-DRB1*01:03L HLA-DRB1*04:02L HLA-DRB1*04:04L HLA-DRB1*01:01L HLA-DRB4*03:01NL HLA-DRB3*02:01L HLA-DRB1*14:01L HLA-DRB1*11:04L HLA-DRB1*14:02L HLA-DRB1*08:01L HLA-DRB5*01:01L
  REGION 1..10: note = CONT. FROM ABOVE: HLA-DPA1*01:03-B1*04:02L HLA-DRB1*12:01L HLA-D RB1*12:02L HLA-DRB3*01:01L HLA-DQA1*03:01-B1*03:02M HLA-DQA1*05: 05-B1*03:01L HLA-DRB1*14:17L HLA-DRB1*16:01L HLA-DRB1*08:02L HLA -DQA1*02:01-B1*03:03L HLA-DRB1*15:01L
QQQQGQTVTK

SEQ ID NO: 12610 - protein, 16 aa, Severe acute respiratory syndrome coronavirus 2
  REGION 1..16: note = Table B: HLA-DRB1*04:01L HLA-DRB1*13:02L HLA-DRB1*01:01L HLA-DPA1*03:01-B1*105:01L HLA-DQA1*05:05-B1*03:01L HLA-DRB1*07:01L
GQTVTKKSAAEASKKP

SEQ ID NO: 12611 - protein, 18 aa, Severe acute respiratory syndrome coronavirus 2
  REGION 1..18: note = Table B: HLA-DRB1*04:01L HLA-DRB1*08:77L HLA-DRB1*03:01L HLA-DRB1*11:03L HLA-DRB1*11:04L HLA-DRB4*01:01L HLA-DRB1*09:01L HLA-DRB1*10:01L
GPEQTQGNFGDQELIRQG

SEQ ID NO: 12612 - protein, 16 aa, Severe acute respiratory syndrome coronavirus 2
  REGION 1..16: note = Table B: HLA-DRB1*04:01L HLA-DRB1*01:01L HLA-DRB3*02:01L HLA-DRB1*11:03L HLA-DRB1*14:02L HLA-DQA1*01:01-B1*05:01L HLA-DRB1*11:01L HLA-DRB1*13:01L HLA-DRB1*09:01L HLA-DPA1*01:03-B1*02:01L HLA-DRB1*07:01L HLA-DRB1*08:03L
  REGION 1..16: note = CONT. FROM ABOVE: HLA-DRB1*15:01L
DQELIRQGTDYKHWPQ

SEQ ID NO: 12613 - protein, 15 aa, Severe acute respiratory syndrome coronavirus 2
  REGION 1..15: note = Table B: HLA-DRB1*04:01L HLA-DRB1*01:01L HLA-DRB3*02:01L HLA-DRB1*03:01L HLA-DRB1*11:02L HLA-DRB1*11:03L HLA-DQA1*01:01-B1*05:01L HLA-DRB4*01:01L HLA-DPA1*01:03-B1*04:01L HLA-DRB1*09:01L HLA-DRB3*01:01L
  REGION 1..15: note = CONT. FROM ABOVE: HLA-DRB1*14:54L HLA-DPA1*01:03-B1*02:01L HLA-D RB1*08:02L
TDYKHWPQIAQFAPS

SEQ ID NO: 12614 - protein, 14 aa, Severe acute respiratory syndrome coronavirus 2
  REGION 1..14: note = Table B: HLA-DRB1*04:01L HLA-DRB1*13:02L HLA-DRB1*08:04L HLA-DRB1*11:04L HLA-DRB1*08:01L HLA-DRB3*01:01L HLA-DRB1*10:01L HLA-DRB1*08:03L
MSRIGMEVTPSGTW

SEQ ID NO: 12615 - protein, 15 aa, Severe acute respiratory syndrome coronavirus 2
  REGION 1..15: note = Table B: HLA-DRB1*04:01L HLA-DRB1*03:01L HLA-DRB1*11:02L HLA-DRB4*02:01NL
GTWLTYTGAIKLDDK

SEQ ID NO: 12616 - protein, 16 aa, Severe acute respiratory syndrome coronavirus 2
  REGION 1..16: note = Table B: HLA-DRB1*04:01L HLA-DRB1*03:01L HLA-DRB1*11:02L HLA-DRB1*13:01L HLA-DRB4*01:01L
WLTYTGAIKLDDKDPN

SEQ ID NO: 12617 - protein, 12 aa, Severe acute respiratory syndrome coronavirus 2
  REGION 1..12: note = Table B: HLA-DRB1*04:01L HLA-DRB1*04:04L HLA-DQA1*01:02-B1*06:02L HLA-DRB1*01:01L HLA-DRB1*08:77L HLA-DPA1*01:03-B1*03:01L HLA-DRB1*11:03L HLA-DRB1*14:02L HLA-DRB1*11:01L HLA-DRB5*01:01L HLA-DQA1*05:01-B1*02:01L
  REGION 1..12: note = CONT. FROM ABOVE: HLA-DRB1*13:01L HLA-DRB4*01:01L HLA-DPA1*03:01 -B1*105:01L HLA-DPA1*01:02-B1*04:01L HLA-DRB1*10:01L HLA-DRB1*08 :03L
AIKLDDKDPNFK

SEQ ID NO: 12618 - protein, 14 aa, Severe acute respiratory syndrome coronavirus 2
  REGION 1..14: note = Table B: HLA-DRB1*04:01L HLA-DRB1*13:02L HLA-DRB1*01:01L HLA-DRB1*03:01L HLA-DRB1*14:01L HLA-DRB1*11:03L HLA-DRB1*11:04L HLA-DRB1*14:02L HLA-DQA1*01:01-B1*05:01L HLA-DQA1*05:05-B1*03:19L HLA-DPA1*01:03-B1*04:01L
  REGION 1..14: note = CONT. FROM ABOVE: HLA-DRB3*01:01L HLA-DPA1*01:03-B1*104:01L HLA- DQA1*05:05-B1*03:01L HLA-DRB1*07:01L HLA-DRB1*10:01L HLA-DRB1*08 :03L
DPNFKDQVILLNKH

SEQ ID NO: 12619 - protein, 13 aa, Severe acute respiratory syndrome coronavirus 2
  REGION 1..13: note = Table B: HLA-DRB1*04:01L HLA-DRB1*04:04L HLA-DRB1*01:01L HLA-DRB1*08:04L HLA-DRB1*08:77L HLA-DPA1*01:03-B1*03:01L HLA-DRB1*14:01L HLA-DRB1*11:03L HLA-DRB1*11:04L HLA-DRB1*14:02L HLA-DRB1*11:01L HLA-DRB5*01:01L HLA-DQA1*05:05-B1*03:19L
  REGION 1..13: note = CONT. FROM ABOVE: HLA-DRB1*09:01L HLA-DRB3*01:01L HLA-DQA1*05:05 -B1*03:01L HLA-DPA1*01:02-B1*04:01L HLA-DRB1*07:01L
IDAYKTFPPTEPK

SEQ ID NO: 12620 - protein, 10 aa, Severe acute respiratory syndrome coronavirus 2
  REGION 1..10: note = Table B: HLA-DRB1*04:01L HLA-DRB1*13:02L HLA-DRB1*13:03L HLA-DRB1*01:03L HLA-DRB1*04:02L HLA-DRB1*04:04L HLA-DQA1*01:02-B1*06:02L HLA-DRB1*01:01L HLA-DRB4*03:01NL HLA-DRB3*02:01L HLA-DRB1*14:01L HLA-DRB1*11:04L HLA-DRB1*14:02L
  REGION 1..10: note = CONT. FROM ABOVE: HLA-DRB1*08:01L HLA-DRB1*11:01L HLA-DRB5*01:01 L HLA-DPA1*01:03-B1*04:02L HLA-DRB1*12:01L HLA-DRB1*12:02L HLA-D RB3*01:01L HLA-DQA1*03:01-B1*03:02M HLA-DQA1*05:05-B1*03:01L HLA -DRB1*14:17L HLA-DRB1*16:01L HLA-DRB1*08:02L
  REGION 1..10: note = CONT. FROM ABOVE: HLA-DQA1*02:01-B1*03:03L HLA-DRB1*15:01L
KTFPPTEPKK

SEQ ID NO: 12621 - protein, 14 aa, Severe acute respiratory syndrome coronavirus 2
  REGION 1..14: note = Table B: HLA-DRB1*04:01L HLA-DRB1*13:02L HLA-DRB1*08:04L HLA-DRB3*02:01L HLA-DRB1*14:01L HLA-DRB1*11:04L HLA-DRB1*14:02L HLA-DRB1*08:01L HLA-DRB1*09:01L HLA-DRB1*12:02L HLA-DPA1*01:03-B1*104:01L HLA-DRB1*10:01L
TVTLLPAADLDDFS

SEQ ID NO: 12622 - protein, 10 aa, Severe acute respiratory syndrome coronavirus 2
  REGION 1..10: note = Table B: HLA-DRB1*04:03L HLA-DQA1*03:01-B1*03:02L HLA-DQA1*01:03-B1*06:01L HLA-DQA1*02:01-B1*03:03L
LVPGFNEKTH

SEQ ID NO: 12623 - protein, 10 aa, Severe acute respiratory syndrome coronavirus 2
  REGION 1..10: note = Table B: HLA-DRB1*04:03L
HVQLSLPVLQ

SEQ ID NO: 12624 - protein, 10 aa, Severe acute respiratory syndrome coronavirus 2
  REGION 1..10: note = Table B: HLA-DRB1*04:03L HLA-DQA1*03:01-B1*03:02L HLA-DRB1*14:17L HLA-DQA1*01:03-B1*06:01L HLA-DQA1*02:01-B1*03:03L
LSLPVLQVRD

SEQ ID NO: 12625 - protein, 12 aa, Severe acute respiratory syndrome coronavirus 2
  REGION 1..12: note = Table B: HLA-DRB1*04:03L HLA-DRB1*01:03L HLA-DRB1*04:02L HLA-DRB1*04:05L HLA-DRB1*01:02L HLA-DRB1*08:01L HLA-DRB1*12:01L HLA-DRB1*14:17L HLA-DRB1*16:01L HLA-DRB1*04:08L HLA-DRB1*15:03L
LPVLQVRDVLVR

SEQ ID NO: 12626 - protein, 12 aa, Severe acute respiratory syndrome coronavirus 2
  REGION 1..12: note = Table B: HLA-DRB1*04:03L HLA-DRB1*01:03L HLA-DRB1*04:05L HLA-DRB1*01:02L HLA-DRB1*14:01L HLA-DRB1*12:01L HLA-DRB1*16:01L HLA-DRB1*04:08L HLA-DQA1*02:01-B1*03:03L HLA-DRB1*15:03L
PVLQVRDVLVRG

SEQ ID NO: 12627 - protein, 11 aa, Severe acute respiratory syndrome coronavirus 2
  REGION 1..11: note = Table B: HLA-DRB1*04:03L HLA-DRB1*04:02L HLA-DQA1*05:01-B1*02:01L HLA-DQA1*03:01-B1*03:02L HLA-DRB1*16:01L HLA-DRB1*15:03L
VLVRGFGDSVE

SEQ ID NO: 12628 - protein, 10 aa, Severe acute respiratory syndrome coronavirus 2
  REGION 1..10: note = Table B: HLA-DRB1*04:03L HLA-DRB1*04:02L HLA-DRB1*04:05L HLA-DQA1*01-B1*05M HLA-DQA1*05:01-B1*02:01L HLA-DRB1*04:10L HLA-DQA1*03:01-B1*03:02L HLA-DRB1*16:01L
VRGFGDSVEE

SEQ ID NO: 12629 - protein, 11 aa, Severe acute respiratory syndrome coronavirus 2
  REGION 1..11: note = Table B: HLA-DRB1*04:03L HLA-DRB1*04:02L HLA-DRB1*14:17L HLA-DQA1*01:03-B1*06:01L HLA-DQA1*02:01-B1*03:03L
VEEVLSEARQH

SEQ ID NO: 12630 - protein, 12 aa, Severe acute respiratory syndrome coronavirus 2
  REGION 1..12: note = Table B: HLA-DRB1*04:03L HLA-DRB1*04:02L HLA-DRB1*11:04L HLA-DRB1*11:01L HLA-DRB3*01:01L HLA-DRB1*14:17L HLA-DRB1*04:08L
EVLSEARQHLKD

SEQ ID NO: 12631 - protein, 11 aa, Severe acute respiratory syndrome coronavirus 2
  REGION 1..11: note = Table B: HLA-DRB1*04:03L HLA-DRB1*04:05L HLA-DRB1*14:02L HLA-DRB1*12:01L
VLPQLEQPYVF

SEQ ID NO: 12632 - protein, 12 aa, Severe acute respiratory syndrome coronavirus 2
  REGION 1..12: note = Table B: HLA-DRB1*04:03L HLA-DRB1*04:05L HLA-DQA1*01:02-B1*06:02L HLA-DRB1*01:02L HLA-DRB1*08:01L HLA-DRB1*12:01L HLA-DRB1*04:08L HLA-DRB1*15:03L
FIKRSDARTAPH

SEQ ID NO: 12633 - protein, 13 aa, Severe acute respiratory syndrome coronavirus 2
  REGION 1..13: note = Table B: HLA-DRB1*04:03L HLA-DRB1*04:05L HLA-DQA1*01:02-B1*06:02L HLA-DRB1*04:10L HLA-DRB1*12:01L HLA-DPA1*03:01-B1*105:01L HLA-DRB1*14:17L HLA-DRB1*15:03L
GHVMVELVAELEG

SEQ ID NO: 12634 - protein, 11 aa, Severe acute respiratory syndrome coronavirus 2
  REGION 1..11: note = Table B: HLA-DRB1*04:03L HLA-DRB1*14:17L
LVAELEGIQYG

SEQ ID NO: 12635 - protein, 12 aa, Severe acute respiratory syndrome coronavirus 2
  REGION 1..12: note = Table B: HLA-DRB1*04:03L HLA-DQA1*01:02-B1*06:02L HLA-DPA1*03:01-B1*105:01L HLA-DPA1*01:02-B1*04:01L
AELEGIQYGRSG

SEQ ID NO: 12636 - protein, 12 aa, Severe acute respiratory syndrome coronavirus 2
  REGION 1..12: note = Table B: HLA-DRB1*04:03L HLA-DRB1*04:02L HLA-DRB1*04:05L HLA-DPA1*01:03-B1*03:01L HLA-DQA1*01:01-B1*05:01L HLA-DQA1*01-B1*05L HLA-DRB1*04:10L HLA-DRB1*16:01L HLA-DRB1*04:08L
GETLGVLVPHVG

SEQ ID NO: 12637 - protein, 13 aa, Severe acute respiratory syndrome coronavirus 2
  REGION 1..13: note = Table B: HLA-DRB1*04:03L
GAGGHSYGADLKS

SEQ ID NO: 12638 - protein, 10 aa, Severe acute respiratory syndrome coronavirus 2
  REGION 1..10: note = Table B: HLA-DRB1*04:03L HLA-DRB1*04:02L HLA-DQA1*01-B1*05L HLA-DQA1*03:01-B1*03:02L HLA-DRB1*14:17L
DLKSFDLGDE

SEQ ID NO: 12639 - protein, 13 aa, Severe acute respiratory syndrome coronavirus 2
  REGION 1..13: note = Table B: HLA-DRB1*04:03L HLA-DRB1*01:03L HLA-DRB1*04:05L HLA-DRB1*01:02L HLA-DRB1*08:04L HLA-DRB3*02:01L HLA-DPA1*01:03-B1*03:01L HLA-DRB1*14:02L HLA-DQA1*01:01-B1*05:01L HLA-DRB1*08:01L
GDELGTDPYEDFQ

SEQ ID NO: 12640 - protein, 12 aa, Severe acute respiratory syndrome coronavirus 2
  REGION 1..12: note = Table B: HLA-DRB1*04:03L HLA-DRB1*04:02L HLA-DQA1*01-B1*05L HLA-DRB1*14:17L HLA-DRB1*16:01L HLA-DQA1*02:01-B1*03:03L
EDFQENWNTKHS

SEQ ID NO: 12641 - protein, 12 aa, Severe acute respiratory syndrome coronavirus 2
  REGION 1..12: note = Table B: HLA-DRB1*04:03L HLA-DRB1*13:03L HLA-DRB1*01:03L HLA-DRB1*04:02L HLA-DQA1*01:02-B1*06:02L HLA-DRB1*08:01L HLA-DQA1*03:01-B1*03:02L HLA-DRB1*14:17L HLA-DQA1*02:01-B1*03:03L
FQENWNTKHSSG

SEQ ID NO: 12642 - protein, 12 aa, Severe acute respiratory syndrome coronavirus 2
  REGION 1..12: note = Table B: HLA-DRB1*04:03L HLA-DRB1*04:05L HLA-DRB1*01:02L
NTKHSSGVTREL

SEQ ID NO: 12643 - protein, 10 aa, Severe acute respiratory syndrome coronavirus 2
  REGION 1..10: note = Table B: HLA-DRB1*04:03L
MRELNGGAYT

SEQ ID NO: 12644 - protein, 10 aa, Severe acute respiratory syndrome coronavirus 2
  REGION 1..10: note = Table B: HLA-DRB1*04:03L HLA-DRB1*01:03L HLA-DRB1*04:05L HLA-DQA1*01:02-B1*06:02L HLA-DRB1*01:01L HLA-DRB1*01:02L HLA-DQA1*01:01-B1*05:01L HLA-DPA1*02:01-B1*13:01M HLA-DRB1*16:01L HLA-DQA1*01:03-B1*06:01M
  REGION 1..10: note = CONT. FROM ABOVE: HLA-DQA1*02:01-B1*03:03L HLA-DRB1*15:03L
AYTRYVDNNF

SEQ ID NO: 12645 - protein, 13 aa, Severe acute respiratory syndrome coronavirus 2
  REGION 1..13: note = Table B: HLA-DRB1*04:03L HLA-DRB1*04:05L HLA-DQA1*01:02-B1*06:02L HLA-DRB1*08:01L HLA-DQA1*03:01-B1*03:02L HLA-DRB1*04:08L HLA-DQA1*02:01-B1*03:03L
TRYVDNNFCGPDG

SEQ ID NO: 12646 - protein, 11 aa, Severe acute respiratory syndrome coronavirus 2
  REGION 1..11: note = Table B: HLA-DRB1*04:03L HLA-DRB1*04:08L
PLECIKDLLAR

SEQ ID NO: 12647 - protein, 12 aa, Severe acute respiratory syndrome coronavirus 2
  REGION 1..12: note = Table B: HLA-DRB1*04:03L HLA-DRB1*04:08L
LECIKDLLARAG

SEQ ID NO: 12648 - protein, 10 aa, Severe acute respiratory syndrome coronavirus 2
  REGION 1..10: note = Table B: HLA-DRB1*04:03L HLA-DRB1*01:03L HLA-DQA1*03:01-B1*03:02L HLA-DRB1*14:17L HLA-DQA1*02:01-B1*03:03L
DLLARAGKAS

SEQ ID NO: 12649 - protein, 12 aa, Severe acute respiratory syndrome coronavirus 2
  REGION 1..12: note = Table B: HLA-DRB1*04:03L HLA-DQA1*01:02-B1*06:02L HLA-DQA1*05:01-B1*02:01L HLA-DPA1*03:01-B1*105:01L HLA-DQA1*01:03-B1*06:01L HLA-DQA1*02:01-B1*03:03L
TLSEQLDFIDTK

SEQ ID NO: 12650 - protein, 10 aa, Severe acute respiratory syndrome coronavirus 2
  REGION 1..10: note = Table B: HLA-DRB1*04:03L HLA-DQA1*01-B1*05L HLA-DQA1*03:01-B1*03:02L HLA-DRB1*14:17L
QLDFIDTKRG

SEQ ID NO: 12651 - protein, 10 aa, Severe acute respiratory syndrome coronavirus 2
  REGION 1..10: note = Table B: HLA-DRB1*04:03L HLA-DRB1*04:02L HLA-DQA1*01-B1*05L HLA-DQA1*03:01-B1*03:02L HLA-DRB1*14:17L
IAWYTERSEK

SEQ ID NO: 12652 - protein, 10 aa, Severe acute respiratory syndrome coronavirus 2
  REGION 1..10: note = Table B: HLA-DRB1*04:03L HLA-DRB1*13:03L HLA-DRB1*01:03L HLA-DRB1*04:02L HLA-DQA1*01-B1*05L HLA-DQA1*05:01-B1*02:01L HLA-DQA1*03:01-B1*03:02L HLA-DRB1*14:17L HLA-DPA1*01:02-B1*04:01L HLA-DRB1*16:01L
  REGION 1..10: note = CONT. FROM ABOVE: HLA-DQA1*02:01-B1*03:03L
YTERSEKSYE

SEQ ID NO: 12653 - protein, 11 aa, Severe acute respiratory syndrome coronavirus 2
  REGION 1..11: note = Table B: HLA-DRB1*04:03L HLA-DQA1*05:01-B1*02:01L
EKSYELQTPFE

SEQ ID NO: 12654 - protein, 13 aa, Severe acute respiratory syndrome coronavirus 2
  REGION 1..13: note = Table B: HLA-DRB1*04:03L HLA-DRB1*04:02L HLA-DRB1*08:04L HLA-DRB1*11:03L HLA-DRB1*11:04L HLA-DRB1*11:01L HLA-DRB3*01:01L HLA-DRB1*14:54L HLA-DRB1*14:17L HLA-DRB1*08:03L
TPFEIKLAKKFDT

SEQ ID NO: 12655 - protein, 13 aa, Severe acute respiratory syndrome coronavirus 2
  REGION 1..13: note = Table B: HLA-DRB1*04:03L HLA-DRB1*04:05L HLA-DQA1*01-B1*05L HLA-DQA1*03:01-B1*03:02L HLA-DRB1*16:01L HLA-DQA1*02:01-B1*03:03L
AKKFDTFNGECPN

SEQ ID NO: 12656 - protein, 13 aa, Severe acute respiratory syndrome coronavirus 2
  REGION 1..13: note = Table B: HLA-DRB1*04:03L HLA-DRB1*01:03L HLA-DRB1*08:04L HLA-DRB1*11:04L HLA-DRB1*04:08L
FPLNSIIKTIQPR

SEQ ID NO: 12657 - protein, 12 aa, Severe acute respiratory syndrome coronavirus 2
  REGION 1..12: note = Table B: HLA-DRB1*04:03L HLA-DRB1*01:03L HLA-DRB1*04:02L HLA-DRB1*04:05L HLA-DQA1*01:02-B1*06:02L HLA-DRB1*01:02L HLA-DRB1*14:01L HLA-DRB1*12:01L HLA-DQA1*03:01-B1*03:02L HLA-DRB1*14:17L HLA-DRB1*16:01L HLA-DRB1*04:08L
  REGION 1..12: note = CONT. FROM ABOVE: HLA-DQA1*02:01-B1*03:03L HLA-DRB1*15:03L
GRIRSVYPVASP

SEQ ID NO: 12658 - protein, 15 aa, Severe acute respiratory syndrome coronavirus 2
  REGION 1..15: note = Table B: HLA-DRB1*04:03L HLA-DRB1*01:03L HLA-DPA1*01:03-B1*03:01L HLA-DPA1*03:01-B1*04:02L HLA-DRB1*14:01L HLA-DRB1*14:02L HLA-DRB1*12:01L HLA-DRB1*16:01L
TGDFVKATCEFCGTE

SEQ ID NO: 12659 - protein, 11 aa, Severe acute respiratory syndrome coronavirus 2
  REGION 1..11: note = Table B: HLA-DRB1*04:03L HLA-DRB1*13:03L HLA-DRB1*04:02L HLA-DRB4*03:01NL HLA-DQA1*01-B1*05L HLA-DQA1*05:01-B1*02:01L HLA-DQA1*03:01-B1*03:02L HLA-DRB1*14:17L HLA-DRB1*16:01L HLA-DQA1*02:01-B1*03:03L
TENLTKEGATT

SEQ ID NO: 12660 - protein, 11 aa, Severe acute respiratory syndrome coronavirus 2
  REGION 1..11: note = Table B: HLA-DRB1*04:03L HLA-DRB1*13:02L HLA-DRB4*03:01NL HLA-DRB1*11:02L HLA-DRB1*11:01L HLA-DRB4*01:01L HLA-DPA1*01:03-B1*04:02L HLA-DRB1*12:01L HLA-DQA1*05:05-B1*03:01L HLA-DRB1*08:02L
YLPQNAVVKIY

SEQ ID NO: 12661 - protein, 13 aa, Severe acute respiratory syndrome coronavirus 2
  REGION 1..13: note = Table B: HLA-DRB1*04:03L HLA-DRB1*01:03L HLA-DQA1*01:02-B1*06:02L HLA-DRB1*16:01L HLA-DRB1*04:08L
NAVVKIYCPACHN

SEQ ID NO: 12662 - protein, 11 aa, Severe acute respiratory syndrome coronavirus 2
  REGION 1..11: note = Table B: HLA-DRB1*04:03L
SEVGPEHSLAE

SEQ ID NO: 12663 - protein, 11 aa, Severe acute respiratory syndrome coronavirus 2
  REGION 1..11: note = Table B: HLA-DRB1*04:03L HLA-DRB1*04:02L HLA-DQA1*01-B1*05L
HSLAEYHNESG

SEQ ID NO: 12664 - protein, 11 aa, Severe acute respiratory syndrome coronavirus 2
  REGION 1..11: note = Table B: HLA-DRB1*04:03L HLA-DRB1*04:02L HLA-DRB1*14:17L
LAEYHNESGLK

SEQ ID NO: 12665 - protein, 12 aa, Severe acute respiratory syndrome coronavirus 2
  REGION 1..12: note = Table B: HLA-DRB1*04:03L HLA-DRB1*01:03L HLA-DRB1*04:02L HLA-DRB1*04:05L HLA-DRB1*01:02L HLA-DPA1*01:03-B1*03:01L HLA-DRB1*08:01L HLA-DRB1*11:01L HLA-DRB4*02:01NL HLA-DQA1*05:01-B1*02:01L HLA-DPA1*01:03-B1*04:02L
  REGION 1..12: note = CONT. FROM ABOVE: HLA-DRB1*12:01L HLA-DRB1*16:01L HLA-DRB1*04:08 L
NHTGVVGEGSEG

SEQ ID NO: 12666 - protein, 13 aa, Severe acute respiratory syndrome coronavirus 2
  REGION 1..13: note = Table B: HLA-DRB1*04:03L HLA-DRB1*13:02L HLA-DRB1*04:02L HLA-DRB1*01:02L HLA-DRB4*03:01NL HLA-DRB1*08:77L HLA-DRB3*02:01L HLA-DPA1*01:03-B1*03:01L HLA-DPA1*03:01-B1*04:02L HLA-DQA1*01-B1*05L HLA-DRB1*12:01L HLA-DRB1*14:17L
  REGION 1..13: note = CONT. FROM ABOVE: HLA-DRB1*07:01L HLA-DRB1*16:01L HLA-DRB1*15:03 L
HTGVVGEGSEGLN

SEQ ID NO: 12667 - protein, 11 aa, Severe acute respiratory syndrome coronavirus 2
  REGION 1..11: note = Table B: HLA-DRB1*04:03L HLA-DRB1*13:03L HLA-DRB1*04:02L HLA-DRB1*08:04L HLA-DRB1*08:01L HLA-DRB1*14:54L HLA-DRB1*16:01L
EILQKEKVNIN

SEQ ID NO: 12668 - protein, 10 aa, Severe acute respiratory syndrome coronavirus 2
  REGION 1..10: note = Table B: HLA-DRB1*04:03L HLA-DRB1*04:02L HLA-DRB1*01:02L HLA-DQA1*01-B1*05L HLA-DQA1*05:01-B1*02:01L HLA-DRB1*12:01L HLA-DRB1*14:17L HLA-DRB1*16:01L HLA-DRB1*15:03L
INIVGDFKLN

SEQ ID NO: 12669 - protein, 12 aa, Severe acute respiratory syndrome coronavirus 2
  REGION 1..12: note = Table B: HLA-DRB1*04:03L
NEEIAIILASFS

SEQ ID NO: 12670 - protein, 12 aa, Severe acute respiratory syndrome coronavirus 2
  REGION 1..12: note = Table B: HLA-DRB1*04:03L HLA-DRB1*14:17L
EEIAIILASFSA

SEQ ID NO: 12671 - protein, 12 aa, Severe acute respiratory syndrome coronavirus 2
  REGION 1..12: note = Table B: HLA-DRB1*04:03L
EIAIILASFSAS

SEQ ID NO: 12672 - protein, 12 aa, Severe acute respiratory syndrome coronavirus 2
  REGION 1..12: note = Table B: HLA-DRB1*04:03L HLA-DRB1*14:17L
IAIILASFSAST

SEQ ID NO: 12673 - protein, 11 aa, Severe acute respiratory syndrome coronavirus 2
  REGION 1..11: note = Table B: HLA-DRB1*04:03L HLA-DRB1*14:17L
IILASFSASTS

SEQ ID NO: 12674 - protein, 12 aa, Severe acute respiratory syndrome coronavirus 2
  REGION 1..12: note = Table B: HLA-DRB1*04:03L HLA-DRB1*13:02L HLA-DRB1*04:02L HLA-DRB1*04:05L HLA-DRB1*01:02L HLA-DRB4*03:01NL HLA-DRB3*02:01L HLA-DRB1*11:03L HLA-DRB1*09:01L HLA-DRB1*12:01L HLA-DRB1*12:02L HLA-DQA1*03:01-B1*03:02L HLA-DQA1*05:05-B1*03:01L
  REGION 1..12: note = CONT. FROM ABOVE: HLA-DRB1*14:17L HLA-DRB1*07:01L HLA-DRB1*16:01 L
ASFSASTSAFVE

SEQ ID NO: 12675 - protein, 11 aa, Severe acute respiratory syndrome coronavirus 2
  REGION 1..11: note = Table B: HLA-DRB1*04:03L
FSASTSAFVET

SEQ ID NO: 12676 - protein, 11 aa, Severe acute respiratory syndrome coronavirus 2
  REGION 1..11: note = Table B: HLA-DRB1*04:03L HLA-DRB1*04:02L HLA-DQA1*01:01-B1*05:01L
ASTSAFVETVK

SEQ ID NO: 12677 - protein, 12 aa, Severe acute respiratory syndrome coronavirus 2
  REGION 1..12: note = Table B: HLA-DRB1*04:03L HLA-DQA1*01:02-B1*06:02L
WNIGEQKSILSP

SEQ ID NO: 12678 - protein, 11 aa, Severe acute respiratory syndrome coronavirus 2
  REGION 1..11: note = Table B: HLA-DRB1*04:03L HLA-DRB1*04:02L HLA-DRB1*14:01L HLA-DQA1*01-B1*05L HLA-DQA1*05:01-B1*02:01L HLA-DRB1*14:17L HLA-DPA1*01:02-B1*04:01L HLA-DRB1*16:01L
IGEQKSILSPL

SEQ ID NO: 12679 - protein, 12 aa, Severe acute respiratory syndrome coronavirus 2
  REGION 1..12: note = Table B: HLA-DRB1*04:03L HLA-DRB1*04:05L HLA-DRB1*01:02L
GEQKSILSPLYA

SEQ ID NO: 12680 - protein, 12 aa, Severe acute respiratory syndrome coronavirus 2
  REGION 1..12: note = Table B: HLA-DRB1*04:03L HLA-DQA1*01:02-B1*06:02L HLA-DRB1*14:17L
SILSPLYAFASE

SEQ ID NO: 12681 - protein, 13 aa, Severe acute respiratory syndrome coronavirus 2
  REGION 1..13: note = Table B: HLA-DRB1*04:03L HLA-DRB1*14:17L
ILSPLYAFASEAA

SEQ ID NO: 12682 - protein, 13 aa, Severe acute respiratory syndrome coronavirus 2
  REGION 1..13: note = Table B: HLA-DRB1*04:03L HLA-DRB1*04:05L HLA-DRB1*08:01L
ARVVRSIFSRTLE

SEQ ID NO: 12683 - protein, 11 aa, Severe acute respiratory syndrome coronavirus 2
  REGION 1..11: note = Table B: HLA-DRB1*04:03L HLA-DRB1*04:02L HLA-DQA1*01:02-B1*06:02L HLA-DPA1*03:01-B1*105:01L HLA-DQA1*03:01-B1*03:02L HLA-DRB1*14:17L HLA-DPA1*01:02-B1*04:01L HLA-DQA1*01:03-B1*06:01L
  REGION 1..11: note = CONT. FROM ABOVE: HLA-DQA1*02:01-B1*03:03L
IFSRTLETAQN

SEQ ID NO: 12684 - protein, 12 aa, Severe acute respiratory syndrome coronavirus 2
  REGION 1..12: note = Table B: HLA-DRB1*04:03L HLA-DRB1*04:05L HLA-DPA1*01:03-B1*03:01L
FSRTLETAQNSV

SEQ ID NO: 12685 - protein, 10 aa, Severe acute respiratory syndrome coronavirus 2
  REGION 1..10: note = Table B: HLA-DRB1*04:03L HLA-DQA1*03:01-B1*03:02L HLA-DQA1*01:03-B1*06:01L HLA-DQA1*02:01-B1*03:03L
TAQNSVRVLQ

SEQ ID NO: 12686 - protein, 11 aa, Severe acute respiratory syndrome coronavirus 2
  REGION 1..11: note = Table B: HLA-DRB1*04:03L HLA-DRB1*13:02L HLA-DRB1*13:03L HLA-DRB1*01:03L HLA-DRB1*04:02L HLA-DRB1*04:05L HLA-DRB1*14:01L HLA-DRB1*12:01L HLA-DQA1*03:01-B1*03:02L HLA-DPA1*01:02-B1*04:01L HLA-DRB1*16:01L
  REGION 1..11: note = CONT. FROM ABOVE: HLA-DQA1*02:01-B1*03:03L
SVRVLQKAAIT

SEQ ID NO: 12687 - protein, 10 aa, Severe acute respiratory syndrome coronavirus 2
  REGION 1..10: note = Table B: HLA-DRB1*04:03L HLA-DRB1*14:17L
AITILDGISQ

SEQ ID NO: 12688 - protein, 11 aa, Severe acute respiratory syndrome coronavirus 2
  REGION 1..11: note = Table B: HLA-DRB1*04:03L HLA-DRB1*13:02L HLA-DRB1*01:03L HLA-DRB1*04:02L HLA-DRB1*01:02L HLA-DRB4*03:01NL HLA-DPA1*01:03-B1*03:01L HLA-DRB1*12:01L HLA-DQA1*05:05-B1*03:01L HLA-DRB1*14:17L HLA-DRB1*04:08L
ILDGISQYSLR

SEQ ID NO: 12689 - protein, 11 aa, Severe acute respiratory syndrome coronavirus 2
  REGION 1..11: note = Table B: HLA-DRB1*04:03L HLA-DRB1*13:03L HLA-DRB1*04:02L HLA-DQA1*01:02-B1*06:02L HLA-DRB1*14:01L HLA-DRB1*14:17L HLA-DPA1*01:02-B1*04:01L HLA-DRB1*16:01L HLA-DQA1*01:03-B1*06:01L
ISQYSLRLIDA

SEQ ID NO: 12690 - protein, 11 aa, Severe acute respiratory syndrome coronavirus 2
  REGION 1..11: note = Table B: HLA-DRB1*04:03L HLA-DRB1*14:17L
MMFTSDLATNN

SEQ ID NO: 12691 - protein, 11 aa, Severe acute respiratory syndrome coronavirus 2
  REGION 1..11: note = Table B: HLA-DRB1*04:03L HLA-DQA1*01-B1*05L HLA-DQA1*05:05-B1*03:19L HLA-DRB1*16:01L
SDLATNNLVVM

SEQ ID NO: 12692 - protein, 12 aa, Severe acute respiratory syndrome coronavirus 2
  REGION 1..12: note = Table B: HLA-DRB1*04:03L HLA-DQA1*01:02-B1*06:02L HLA-DRB1*14:17L HLA-DQA1*01:03-B1*06:01L
TNNLVVMAYITG

SEQ ID NO: 12693 - protein, 12 aa, Severe acute respiratory syndrome coronavirus 2
  REGION 1..12: note = Table B: HLA-DRB1*04:03L
LVVMAYITGGVV

SEQ ID NO: 12694 - protein, 12 aa, Severe acute respiratory syndrome coronavirus 2
  REGION 1..12: note = Table B: HLA-DRB1*04:03L HLA-DRB1*01:03L HLA-DRB1*04:02L HLA-DRB1*01:02L HLA-DRB1*08:01L HLA-DPA1*01:03-B1*04:02L
YITGGVVQLTSQ

SEQ ID NO: 12695 - protein, 13 aa, Severe acute respiratory syndrome coronavirus 2
  REGION 1..13: note = Table B: HLA-DRB1*04:03L HLA-DRB1*13:02L HLA-DRB1*01:02L HLA-DRB1*08:77L HLA-DRB3*02:01L HLA-DPA1*01:03-B1*03:01L HLA-DPA1*03:01-B1*04:02L HLA-DRB1*14:01L HLA-DRB1*12:02L HLA-DRB1*16:01L
ITGGVVQLTSQWL

SEQ ID NO: 12696 - protein, 12 aa, Severe acute respiratory syndrome coronavirus 2
  REGION 1..12: note = Table B: HLA-DRB1*04:03L HLA-DRB1*01:02L HLA-DRB1*15:03L
GGVVQLTSQWLT

SEQ ID NO: 12697 - protein, 13 aa, Severe acute respiratory syndrome coronavirus 2
  REGION 1..13: note = Table B: HLA-DRB1*04:03L HLA-DRB1*01:02L HLA-DPA1*01:03-B1*02:01L HLA-DRB1*04:08L
SQWLTNIFGTVYE

SEQ ID NO: 12698 - protein, 10 aa, Severe acute respiratory syndrome coronavirus 2
  REGION 1..10: note = Table B: HLA-DRB1*04:03L HLA-DRB1*13:03L HLA-DRB1*04:02L HLA-DRB4*03:01NL HLA-DRB1*12:01L HLA-DQA1*03:01-B1*03:02L HLA-DQA1*05:05-B1*03:01L HLA-DRB1*14:17L HLA-DQA1*02:01-B1*03:03L
TNIFGTVYEK

SEQ ID NO: 12699 - protein, 11 aa, Severe acute respiratory syndrome coronavirus 2
  REGION 1..11: note = Table B: HLA-DRB1*04:03L HLA-DRB1*04:05L HLA-DRB1*08:04L HLA-DRB1*04:10L HLA-DRB1*14:17L HLA-DRB1*04:08L
TVYEKLKPVLD

SEQ ID NO: 12700 - protein, 11 aa, Severe acute respiratory syndrome coronavirus 2
  REGION 1..11: note = Table B: HLA-DRB1*04:03L HLA-DRB1*01:03L HLA-DRB1*04:05L HLA-DRB1*12:01L HLA-DPA1*02:01-B1*13:01L
VYEKLKPVLDW

SEQ ID NO: 12701 - protein, 12 aa, Severe acute respiratory syndrome coronavirus 2
  REGION 1..12: note = Table B: HLA-DRB1*04:03L
YEKLKPVLDWLE

SEQ ID NO: 12702 - protein, 12 aa, Severe acute respiratory syndrome coronavirus 2
  REGION 1..12: note = Table B: HLA-DRB1*04:03L HLA-DRB1*04:05L HLA-DQA1*01-B1*05L
EKLKPVLDWLEE

SEQ ID NO: 12703 - protein, 14 aa, Severe acute respiratory syndrome coronavirus 2
  REGION 1..14: note = Table B: HLA-DRB1*04:03L HLA-DRB1*13:02L HLA-DRB1*01:03L HLA-DRB1*04:02L HLA-DRB1*04:04L HLA-DRB1*14:01L HLA-DRB1*08:01L HLA-DRB3*01:01L
KPVLDWLEEKFKEG

SEQ ID NO: 12704 - protein, 14 aa, Severe acute respiratory syndrome coronavirus 2
  REGION 1..14: note = Table B: HLA-DRB1*04:03L HLA-DRB1*13:03L HLA-DRB3*01:01L HLA-DPA1*03:01-B1*105:01L HLA-DQA1*01:03-B1*06:01L
EEKFKEGVEFLRDG

SEQ ID NO: 12705 - protein, 13 aa, Severe acute respiratory syndrome coronavirus 2
  REGION 1..13: note = Table B: HLA-DRB1*04:03L HLA-DRB1*04:05L HLA-DRB1*01:02L HLA-DRB1*08:04L HLA-DPA1*01:03-B1*03:01L HLA-DPA1*02:01-B1*13:01L HLA-DRB1*04:08L
EGVEFLRDGWEIV

SEQ ID NO: 12706 - protein, 13 aa, Severe acute respiratory syndrome coronavirus 2
  REGION 1..13: note = Table B: HLA-DRB1*04:03L HLA-DRB1*04:02L HLA-DQA1*05:01-B1*02:01L HLA-DPA1*01:02-B1*04:01L HLA-DRB1*16:01L
EIVGGQIVTCAKE

SEQ ID NO: 12707 - protein, 14 aa, Severe acute respiratory syndrome coronavirus 2
  REGION 1..14: note = Table B: HLA-DRB1*04:03L HLA-DRB1*13:02L HLA-DPA1*03:01-B1*04:02L HLA-DQA1*01:01-B1*05:01L HLA-DPA1*02:01-B1*13:01L
IVGGQIVTCAKEIK

SEQ ID NO: 12708 - protein, 12 aa, Severe acute respiratory syndrome coronavirus 2
  REGION 1..12: note = Table B: HLA-DRB1*04:03L HLA-DRB1*13:02L HLA-DRB1*13:03L HLA-DRB1*01:03L HLA-DRB1*04:02L HLA-DRB1*04:05L HLA-DQA1*01:02-B1*06:02L HLA-DRB1*01:02L HLA-DRB1*08:04L HLA-DRB1*11:03L HLA-DRB1*11:04L HLA-DRB1*11:01L HLA-DRB1*12:01L
  REGION 1..12: note = CONT. FROM ABOVE: HLA-DRB3*01:01L HLA-DRB1*14:54L HLA-DRB1*16:01 L HLA-DRB1*04:08L HLA-DRB1*15:03L
GQIVTCAKEIKE

SEQ ID NO: 12709 - protein, 13 aa, Severe acute respiratory syndrome coronavirus 2
  REGION 1..13: note = Table B: HLA-DRB1*04:03L HLA-DRB1*08:01L HLA-DRB3*01:01L HLA-DRB1*07:01L HLA-DRB1*04:08L
AKEIKESVQTFFK

SEQ ID NO: 12710 - protein, 14 aa, Severe acute respiratory syndrome coronavirus 2
  REGION 1..14: note = Table B: HLA-DRB1*04:03L HLA-DRB1*01:01L HLA-DRB1*11:02L HLA-DRB1*11:03L HLA-DRB3*01:01L HLA-DPA1*01:03-B1*02:01L HLA-DPA1*01:03-B1*104:01L HLA-DQA1*05:05-B1*03:01L HLA-DRB1*07:01L HLA-DRB1*10:01L HLA-DRB1*08:02L
VQTFFKLVNKFLAL

SEQ ID NO: 12711 - protein, 11 aa, Severe acute respiratory syndrome coronavirus 2
  REGION 1..11: note = Table B: HLA-DRB1*04:03L HLA-DRB1*13:02L HLA-DRB1*01:03L HLA-DRB1*04:02L HLA-DQA1*05:05-B1*03:01L HLA-DRB1*16:01L
DSIIIGGAKLK

SEQ ID NO: 12712 - protein, 11 aa, Severe acute respiratory syndrome coronavirus 2
  REGION 1..11: note = Table B: HLA-DRB1*04:03L HLA-DRB1*04:02L HLA-DQA1*03:01-B1*03:02L HLA-DRB1*14:17L HLA-DQA1*02:01-B1*03:03L
AKLKALNLGET

SEQ ID NO: 12713 - protein, 13 aa, Severe acute respiratory syndrome coronavirus 2
  REGION 1..13: note = Table B: HLA-DRB1*04:03L HLA-DRB1*01:02L HLA-DPA1*03:01-B1*105:01L
ALNLGETFVTHSK

SEQ ID NO: 12714 - protein, 11 aa, Severe acute respiratory syndrome coronavirus 2
  REGION 1..11: note = Table B: HLA-DRB1*04:03L HLA-DQA1*01:03-B1*06:01L
LGETFVTHSKG

SEQ ID NO: 12715 - protein, 11 aa, Severe acute respiratory syndrome coronavirus 2
  REGION 1..11: note = Table B: HLA-DRB1*04:03L HLA-DRB1*13:02L HLA-DRB4*03:01NL HLA-DRB1*11:01L HLA-DRB1*10:01L HLA-DRB1*08:02L
ETFVTHSKGLY

SEQ ID NO: 12716 - protein, 10 aa, Severe acute respiratory syndrome coronavirus 2
  REGION 1..10: note = Table B: HLA-DRB1*04:03L HLA-DRB1*04:02L HLA-DQA1*03:01-B1*03:02L HLA-DRB1*14:17L HLA-DQA1*02:01-B1*03:03L
LLMPLKAPKE

SEQ ID NO: 12717 - protein, 11 aa, Severe acute respiratory syndrome coronavirus 2
  REGION 1..11: note = Table B: HLA-DRB1*04:03L HLA-DRB1*01:02L HLA-DRB1*12:01L HLA-DRB1*14:17L HLA-DRB1*16:01L HLA-DRB1*15:03L
IIFLEGETLPT

SEQ ID NO: 12718 - protein, 13 aa, Severe acute respiratory syndrome coronavirus 2
  REGION 1..13: note = Table B: HLA-DRB1*04:03L HLA-DQA1*01-B1*05L HLA-DQA1*05:01-B1*02:01L HLA-DQA1*01:03-B1*06:01L HLA-DQA1*02:01-B1*03:03L
EGETLPTEVLTEE

SEQ ID NO: 12719 - protein, 14 aa, Severe acute respiratory syndrome coronavirus 2
  REGION 1..14: note = Table B: HLA-DRB1*04:03L HLA-DQA1*02:01-B1*03:03L
GETLPTEVLTEEVV

SEQ ID NO: 12720 - protein, 12 aa, Severe acute respiratory syndrome coronavirus 2
  REGION 1..12: note = Table B: HLA-DRB1*04:03L HLA-DQA1*01-B1*05L HLA-DQA1*05:01-B1*02:01L
PTEVLTEEVVLK

SEQ ID NO: 12721 - protein, 11 aa, Severe acute respiratory syndrome coronavirus 2
  REGION 1..11: note = Table B: HLA-DRB1*04:03L HLA-DPA1*03:01-B1*105:01L HLA-DPA1*01:02-B1*04:01L HLA-DQA1*01:03-B1*06:01L HLA-DQA1*02:01-B1*03:03L
VLTEEVVLKTG

SEQ ID NO: 12722 - protein, 12 aa, Severe acute respiratory syndrome coronavirus 2
  REGION 1..12: note = Table B: HLA-DRB1*04:03L HLA-DQA1*01-B1*05L HLA-DQA1*05:01-B1*02:01L HLA-DQA1*02:01-B1*03:03L
EEVVLKTGDLQP

SEQ ID NO: 12723 - protein, 12 aa, Severe acute respiratory syndrome coronavirus 2
  REGION 1..12: note = Table B: HLA-DRB1*04:03L HLA-DRB1*01:03L HLA-DRB1*04:02L HLA-DRB1*04:05L HLA-DRB1*01:02L HLA-DPA1*01:03-B1*03:01L HLA-DPA1*03:01-B1*04:02L HLA-DRB1*14:02L HLA-DQA1*01:01-B1*05:01L HLA-DQA1*01-B1*05L HLA-DRB4*02:01NL
  REGION 1..12: note = CONT. FROM ABOVE: HLA-DPA1*01:03-B1*04:02L HLA-DRB1*12:01L HLA-D RB1*14:17L HLA-DPA1*01:02-B1*04:01L HLA-DRB1*04:08L HLA-DRB1*15: 03L
VVLKTGDLQPLE

SEQ ID NO: 12724 - protein, 14 aa, Severe acute respiratory syndrome coronavirus 2
  REGION 1..14: note = Table B: HLA-DRB1*04:03L HLA-DRB1*01:03L HLA-DRB1*04:02L HLA-DRB1*01:02L HLA-DQA1*01:01-B1*05:01L HLA-DRB1*08:01L HLA-DRB4*02:01NL HLA-DPA1*01:03-B1*04:02L HLA-DRB1*12:01L HLA-DRB1*04:08L
VLKTGDLQPLEQPT

SEQ ID NO: 12725 - protein, 11 aa, Severe acute respiratory syndrome coronavirus 2
  REGION 1..11: note = Table B: HLA-DRB1*04:03L HLA-DRB1*04:02L HLA-DRB1*04:05L HLA-DRB4*03:01NL HLA-DQA1*01-B1*05L HLA-DQA1*05:01-B1*02:01L HLA-DRB1*04:10L HLA-DQA1*03:01-B1*03:02L HLA-DRB1*14:17L HLA-DRB1*16:01L
GDLQPLEQPTS

SEQ ID NO: 12726 - protein, 11 aa, Severe acute respiratory syndrome coronavirus 2
  REGION 1..11: note = Table B: HLA-DRB1*04:03L HLA-DQA1*03:01-B1*03:02L HLA-DRB1*14:17L
DLQPLEQPTSE

SEQ ID NO: 12727 - protein, 13 aa, Severe acute respiratory syndrome coronavirus 2
  REGION 1..13: note = Table B: HLA-DRB1*04:03L HLA-DRB1*04:02L HLA-DQA1*01:01-B1*05:01L HLA-DRB1*04:10L HLA-DRB1*14:17L HLA-DRB1*16:01L HLA-DQA1*01:03-B1*06:01L
LQPLEQPTSEAVE

SEQ ID NO: 12728 - protein, 14 aa, Severe acute respiratory syndrome coronavirus 2
  REGION 1..14: note = Table B: HLA-DRB1*04:03L HLA-DRB1*01:03L HLA-DRB1*04:02L HLA-DRB1*04:05L HLA-DRB1*12:01L HLA-DPA1*03:01-B1*105:01L HLA-DRB1*04:08L
EQPTSEAVEAPLVG

SEQ ID NO: 12729 - protein, 12 aa, Severe acute respiratory syndrome coronavirus 2
  REGION 1..12: note = Table B: HLA-DRB1*04:03L
EAVEAPLVGTPV

SEQ ID NO: 12730 - protein, 13 aa, Severe acute respiratory syndrome coronavirus 2
  REGION 1..13: note = Table B: HLA-DRB1*04:03L HLA-DRB1*13:02L HLA-DRB1*04:05L HLA-DRB3*02:01L HLA-DRB1*14:01L HLA-DRB1*14:02L HLA-DQA1*01-B1*05L HLA-DPA1*01:03-B1*04:01L HLA-DRB1*09:01L HLA-DRB1*07:01L HLA-DRB1*04:08L
DTEKYCALAPNMM

SEQ ID NO: 12731 - protein, 10 aa, Severe acute respiratory syndrome coronavirus 2
  REGION 1..10: note = Table B: HLA-DRB1*04:03L HLA-DRB1*04:02L HLA-DQA1*03:01-B1*03:02L HLA-DRB1*14:17L HLA-DQA1*02:01-B1*03:03L
ALAPNMMVTN

SEQ ID NO: 12732 - protein, 10 aa, Severe acute respiratory syndrome coronavirus 2
  REGION 1..10: note = Table B: HLA-DRB1*04:03L HLA-DRB1*13:02L HLA-DRB1*13:03L HLA-DRB1*04:02L HLA-DRB4*03:01NL HLA-DRB3*02:01L HLA-DRB1*14:01L HLA-DRB1*12:01L HLA-DRB1*12:02L HLA-DQA1*03:01-B1*03:02L HLA-DQA1*05:05-B1*03:01L HLA-DRB1*14:17L HLA-DRB1*16:01L
  REGION 1..10: note = CONT. FROM ABOVE: HLA-DQA1*01:03-B1*06:01L HLA-DQA1*02:01-B1*03: 03L
MVTNNTFTLK

SEQ ID NO: 12733 - protein, 11 aa, Severe acute respiratory syndrome coronavirus 2
  REGION 1..11: note = Table B: HLA-DRB1*04:03L HLA-DRB1*13:03L HLA-DRB1*01:03L HLA-DRB1*04:02L HLA-DRB1*04:05L HLA-DRB4*03:01NL HLA-DRB1*08:01L HLA-DQA1*03:01-B1*03:02L HLA-DRB1*14:54L HLA-DRB1*14:17L HLA-DRB1*16:01L HLA-DQA1*02:01-B1*03:03L
NTFTLKGGAPT

SEQ ID NO: 12734 - protein, 13 aa, Severe acute respiratory syndrome coronavirus 2
  REGION 1..13: note = Table B: HLA-DRB1*04:03L HLA-DRB1*13:03L HLA-DRB1*04:05L HLA-DPA1*01:03-B1*03:01L HLA-DRB1*14:02L HLA-DPA1*03:01-B1*105:01L HLA-DRB1*16:01L
KVTFGDDTVIEVQ

SEQ ID NO: 12735 - protein, 13 aa, Severe acute respiratory syndrome coronavirus 2
  REGION 1..13: note = Table B: HLA-DRB1*04:03L HLA-DRB1*04:05L HLA-DPA1*03:01-B1*105:01L HLA-DRB1*16:01L HLA-DQA1*02:01-B1*03:03L
VTFGDDTVIEVQG

SEQ ID NO: 12736 - protein, 10 aa, Severe acute respiratory syndrome coronavirus 2
  REGION 1..10: note = Table B: HLA-DRB1*04:03L HLA-DRB1*04:02L HLA-DRB4*03:01NL HLA-DQA1*03:01-B1*03:02L HLA-DRB1*14:17L HLA-DQA1*01:03-B1*06:01L HLA-DQA1*02:01-B1*03:03L
TVIEVQGYKS

SEQ ID NO: 12737 - protein, 10 aa, Severe acute respiratory syndrome coronavirus 2
  REGION 1..10: note = Table B: HLA-DRB1*04:03L HLA-DRB1*04:02L HLA-DQA1*01-B1*05L HLA-DQA1*03:01-B1*03:02L HLA-DRB1*16:01L HLA-DQA1*01:03-B1*06:01L HLA-DQA1*02:01-B1*03:03L HLA-DRB1*15:03L
VQGYKSVNIT

SEQ ID NO: 12738 - protein, 12 aa, Severe acute respiratory syndrome coronavirus 2
  REGION 1..12: note = Table B: HLA-DRB1*04:03L HLA-DRB1*01:03L HLA-DRB1*08:04L HLA-DPA1*01:03-B1*03:01L HLA-DQA1*01-B1*05L HLA-DRB1*12:01L HLA-DRB3*01:01L HLA-DRB1*04:08L
FELDERIDKVLN

SEQ ID NO: 12739 - protein, 13 aa, Severe acute respiratory syndrome coronavirus 2
  REGION 1..13: note = Table B: HLA-DRB1*04:03L HLA-DRB1*04:05L HLA-DRB1*01:02L HLA-DRB1*04:08L HLA-DRB1*15:03L
DERIDKVLNEKCS

SEQ ID NO: 12740 - protein, 11 aa, Severe acute respiratory syndrome coronavirus 2
  REGION 1..11: note = Table B: HLA-DRB1*04:03L HLA-DRB1*14:17L
YTVELGTEVNE

SEQ ID NO: 12741 - protein, 11 aa, Severe acute respiratory syndrome coronavirus 2
  REGION 1..11: note = Table B: HLA-DRB1*04:03L HLA-DPA1*03:01-B1*105:01L HLA-DQA1*01:03-B1*06:01L
VELGTEVNEFA

SEQ ID NO: 12742 - protein, 11 aa, Severe acute respiratory syndrome coronavirus 2
  REGION 1..11: note = Table B: HLA-DRB1*04:03L HLA-DQA1*01:02-B1*06:02L HLA-DQA1*01:03-B1*06:01L HLA-DQA1*02:01-B1*03:03L
FACVVADAVIK

SEQ ID NO: 12743 - protein, 10 aa, Severe acute respiratory syndrome coronavirus 2
  REGION 1..10: note = Table B: HLA-DRB1*04:03L HLA-DRB1*04:02L HLA-DQA1*03:01-B1*03:02L HLA-DRB1*14:17L HLA-DQA1*02:01-B1*03:03L
AVIKTLQPVS

SEQ ID NO: 12744 - protein, 13 aa, Severe acute respiratory syndrome coronavirus 2
  REGION 1..13: note = Table B: HLA-DRB1*04:03L HLA-DQA1*05:01-B1*02:01L HLA-DRB1*12:01L HLA-DRB1*16:01L HLA-DRB1*15:03L
IKTLQPVSELLTP

SEQ ID NO: 12745 - protein, 11 aa, Severe acute respiratory syndrome coronavirus 2
  REGION 1..11: note = Table B: HLA-DRB1*04:03L HLA-DQA1*01-B1*05L HLA-DQA1*05:01-B1*02:01L HLA-DQA1*03:01-B1*03:02L HLA-DQA1*01:03-B1*06:01L HLA-DQA1*02:01-B1*03:03L
QPVSELLTPLG

SEQ ID NO: 12746 - protein, 12 aa, Severe acute respiratory syndrome coronavirus 2
  REGION 1..12: note = Table B: HLA-DRB1*04:03L
PVSELLTPLGID

SEQ ID NO: 12747 - protein, 12 aa, Severe acute respiratory syndrome coronavirus 2
  REGION 1..12: note = Table B: HLA-DRB1*04:03L HLA-DRB1*04:05L HLA-DQA1*05:01-B1*02:01L HLA-DRB1*04:10L HLA-DQA1*03:01-B1*03:02L HLA-DRB1*14:17L
ELLTPLGIDLDE

SEQ ID NO: 12748 - protein, 12 aa, Severe acute respiratory syndrome coronavirus 2
  REGION 1..12: note = Table B: HLA-DRB1*04:03L HLA-DQA1*03:01-B1*03:02L
LTPLGIDLDEWS

SEQ ID NO: 12749 - protein, 13 aa, Severe acute respiratory syndrome coronavirus 2
  REGION 1..13: note = Table B: HLA-DRB1*04:03L
TPLGIDLDEWSMA

SEQ ID NO: 12750 - protein, 12 aa, Severe acute respiratory syndrome coronavirus 2
  REGION 1..12: note = Table B: HLA-DRB1*04:03L HLA-DQA1*05:05-B1*03:01L
ESGEFKLASHMY

SEQ ID NO: 12751 - protein, 12 aa, Severe acute respiratory syndrome coronavirus 2
  REGION 1..12: note = Table B: HLA-DRB1*04:03L HLA-DRB1*04:02L HLA-DRB1*04:05L HLA-DRB1*01:02L HLA-DRB3*02:01L HLA-DRB1*11:03L HLA-DRB1*09:01L HLA-DRB1*12:02L HLA-DRB1*14:54L HLA-DRB1*14:17L
EEFEPSTQYEYG

SEQ ID NO: 12752 - protein, 15 aa, Severe acute respiratory syndrome coronavirus 2
  REGION 1..15: note = Table B: HLA-DRB1*04:03L HLA-DRB1*04:05L HLA-DQA1*01:02-B1*06:02L HLA-DQA1*01:01-B1*05:01L HLA-DRB1*12:01L HLA-DPA1*02:01-B1*13:01L HLA-DPA1*03:01-B1*105:01L HLA-DRB1*04:08L HLA-DRB1*15:03L
EPSTQYEYGTEDDYQ

SEQ ID NO: 12753 - protein, 13 aa, Severe acute respiratory syndrome coronavirus 2
  REGION 1..13: note = Table B: HLA-DRB1*04:03L HLA-DRB1*04:05L HLA-DRB1*04:10L HLA-DQA1*03:01-B1*03:02L
TQYEYGTEDDYQG

SEQ ID NO: 12754 - protein, 12 aa, Severe acute respiratory syndrome coronavirus 2
  REGION 1..12: note = Table B: HLA-DRB1*04:03L HLA-DRB1*04:05L HLA-DRB1*04:10L
YEYGTEDDYQGK

SEQ ID NO: 12755 - protein, 13 aa, Severe acute respiratory syndrome coronavirus 2
  REGION 1..13: note = Table B: HLA-DRB1*04:03L HLA-DRB1*04:02L HLA-DRB1*08:04L HLA-DRB1*08:01L HLA-DPA1*01:03-B1*02:01L HLA-DRB1*04:08L
DDYQGKPLEFGAT

SEQ ID NO: 12756 - protein, 12 aa, Severe acute respiratory syndrome coronavirus 2
  REGION 1..12: note = Table B: HLA-DRB1*04:03L HLA-DQA1*01:02-B1*06:02L HLA-DPA1*03:01-B1*105:01L HLA-DPA1*01:02-B1*04:01L HLA-DQA1*02:01-B1*03:03L
YQGKPLEFGATS

SEQ ID NO: 12757 - protein, 13 aa, Severe acute respiratory syndrome coronavirus 2
  REGION 1..13: note = Table B: HLA-DRB1*04:03L
GKPLEFGATSAAL

SEQ ID NO: 12758 - protein, 13 aa, Severe acute respiratory syndrome coronavirus 2
  REGION 1..13: note = Table B: HLA-DRB1*04:03L HLA-DRB1*14:17L
LEFGATSAALQPE

SEQ ID NO: 12759 - protein, 13 aa, Severe acute respiratory syndrome coronavirus 2
  REGION 1..13: note = Table B: HLA-DRB1*04:03L HLA-DPA1*03:01-B1*105:01L HLA-DRB1*04:08L
EFGATSAALQPEE

SEQ ID NO: 12760 - protein, 12 aa, Severe acute respiratory syndrome coronavirus 2
  REGION 1..12: note = Table B: HLA-DRB1*04:03L HLA-DRB1*01:03L HLA-DPA1*03:01-B1*105:01L HLA-DRB1*16:01L HLA-DRB1*04:08L
GATSAALQPEEE

SEQ ID NO: 12761 - protein, 12 aa, Severe acute respiratory syndrome coronavirus 2
  REGION 1..12: note = Table B: HLA-DRB1*04:03L HLA-DRB1*01:03L HLA-DPA1*03:01-B1*105:01L HLA-DRB1*16:01L HLA-DRB1*04:08L
ATSAALQPEEEQ

SEQ ID NO: 12762 - protein, 11 aa, Severe acute respiratory syndrome coronavirus 2
  REGION 1..11: note = Table B: HLA-DRB1*04:03L HLA-DQA1*01-B1*05L HLA-DQA1*02:01-B1*03:03L
AALQPEEEQEE

SEQ ID NO: 12763 - protein, 11 aa, Severe acute respiratory syndrome coronavirus 2
  REGION 1..11: note = Table B: HLA-DRB1*04:03L HLA-DQA1*05:01-B1*02:01L
WLDDDSQQTVG

SEQ ID NO: 12764 - protein, 12 aa, Severe acute respiratory syndrome coronavirus 2
  REGION 1..12: note = Table B: HLA-DRB1*04:03L HLA-DRB1*01:03L HLA-DRB1*04:02L HLA-DRB1*04:05L HLA-DRB1*01:02L HLA-DQA1*01:01-B1*05:01L HLA-DRB1*08:01L HLA-DRB4*02:01NL HLA-DPA1*01:03-B1*04:02L HLA-DRB1*12:01L HLA-DRB1*14:17L HLA-DRB1*16:01L HLA-DRB1*04:08L
DNQTTTIQTIVE

SEQ ID NO: 12765 - protein, 11 aa, Severe acute respiratory syndrome coronavirus 2
  REGION 1..11: note = Table B: HLA-DRB1*04:03L HLA-DRB1*14:17L HLA-DQA1*02:01-B1*03:03L
TIQTIVEVQPQ

SEQ ID NO: 12766 - protein, 13 aa, Severe acute respiratory syndrome coronavirus 2
  REGION 1..13: note = Table B: HLA-DRB1*04:03L HLA-DRB1*14:17L
VQPQLEMELTPVV

SEQ ID NO: 12767 - protein, 12 aa, Severe acute respiratory syndrome coronavirus 2
  REGION 1..12: note = Table B: HLA-DRB1*04:03L HLA-DQA1*05:01-B1*02:01L HLA-DQA1*03:01-B1*03:02L HLA-DRB1*14:17L
PQLEMELTPVVQ

SEQ ID NO: 12768 - protein, 11 aa, Severe acute respiratory syndrome coronavirus 2
  REGION 1..11: note = Table B: HLA-DRB1*04:03L HLA-DRB1*14:17L
LEMELTPVVQT

SEQ ID NO: 12769 - protein, 11 aa, Severe acute respiratory syndrome coronavirus 2
  REGION 1..11: note = Table B: HLA-DRB1*04:03L HLA-DRB1*14:17L
MELTPVVQTIE

SEQ ID NO: 12770 - protein, 12 aa, Severe acute respiratory syndrome coronavirus 2
  REGION 1..12: note = Table B: HLA-DRB1*04:03L
LTPVVQTIEVNS

SEQ ID NO: 12771 - protein, 12 aa, Severe acute respiratory syndrome coronavirus 2
  REGION 1..12: note = Table B: HLA-DRB1*04:03L HLA-DRB1*13:02L HLA-DRB1*13:03L HLA-DRB1*04:02L HLA-DRB1*04:05L HLA-DRB1*01:02L HLA-DRB1*14:01L HLA-DRB1*11:01L HLA-DQA1*01-B1*05L HLA-DRB1*12:01L HLA-DPA1*02:01-B1*13:01L HLA-DPA1*01:03-B1*02:01L
  REGION 1..12: note = CONT. FROM ABOVE: HLA-DRB1*08:03L HLA-DRB1*15:03L
NSFSGYLKLTDN

SEQ ID NO: 12772 - protein, 11 aa, Severe acute respiratory syndrome coronavirus 2
  REGION 1..11: note = Table B: HLA-DRB1*04:03L HLA-DRB1*14:17L
LKLTDNVYIKN

SEQ ID NO: 12773 - protein, 11 aa, Severe acute respiratory syndrome coronavirus 2
  REGION 1..11: note = Table B: HLA-DRB1*04:03L HLA-DQA1*03:01-B1*03:02L HLA-DQA1*02:01-B1*03:03L
LTDNVYIKNAD

SEQ ID NO: 12774 - protein, 10 aa, Severe acute respiratory syndrome coronavirus 2
  REGION 1..10: note = Table B: HLA-DRB1*04:03L HLA-DRB1*01:03L HLA-DRB1*04:02L HLA-DRB1*04:05L HLA-DRB1*01:02L HLA-DQA1*01-B1*05L HLA-DQA1*05:01-B1*02:01L HLA-DRB1*12:01L HLA-DPA1*02:01-B1*13:01L HLA-DPA1*03:01-B1*105:01L
  REGION 1..10: note = CONT. FROM ABOVE: HLA-DQA1*03:01-B1*03:02L HLA-DRB1*14:17L HLA-D PA1*01:02-B1*04:01L HLA-DRB1*16:01L HLA-DQA1*01:03-B1*06:01L HLA -DQA1*02:01-B1*03:03L HLA-DRB1*15:03L
VYIKNADIVE

SEQ ID NO: 12775 - protein, 10 aa, Severe acute respiratory syndrome coronavirus 2
  REGION 1..10: note = Table B: HLA-DRB1*04:03L HLA-DRB1*04:02L HLA-DRB1*14:17L
YIKNADIVEE

SEQ ID NO: 12776 - protein, 13 aa, Severe acute respiratory syndrome coronavirus 2
  REGION 1..13: note = Table B: HLA-DRB1*04:03L
AKKVKPTVVVNAA

SEQ ID NO: 12777 - protein, 10 aa, Severe acute respiratory syndrome coronavirus 2
  REGION 1..10: note = Table B: HLA-DRB1*04:03L HLA-DRB1*13:02L HLA-DRB1*13:03L HLA-DRB1*04:02L HLA-DRB4*03:01NL HLA-DRB1*12:01L HLA-DQA1*03:01-B1*03:02L HLA-DQA1*05:05-B1*03:01L HLA-DRB1*14:17L HLA-DQA1*02:01-B1*03:03L
VVNAANVYLK

SEQ ID NO: 12778 - protein, 12 aa, Severe acute respiratory syndrome coronavirus 2
  REGION 1..12: note = Table B: HLA-DRB1*04:03L HLA-DQA1*01:02-B1*06:02L
AANVYLKHGGGV

SEQ ID NO: 12779 - protein, 11 aa, Severe acute respiratory syndrome coronavirus 2
  REGION 1..11: note = Table B: HLA-DRB1*04:03L HLA-DRB1*04:02L HLA-DRB4*03:01NL HLA-DRB1*14:17L HLA-DRB1*16:01L
NVYLKHGGGVA

SEQ ID NO: 12780 - protein, 12 aa, Severe acute respiratory syndrome coronavirus 2
  REGION 1..12: note = Table B: HLA-DRB1*04:03L HLA-DRB1*04:02L HLA-DRB1*01:02L HLA-DPA1*01:03-B1*03:01L HLA-DQA1*01:01-B1*05:01L HLA-DRB1*08:01L HLA-DRB1*11:01L HLA-DQA1*05:05-B1*03:116L HLA-DPA1*01:03-B1*04:02L HLA-DPA1*03:01-B1*105:01L
  REGION 1..12: note = CONT. FROM ABOVE: HLA-DRB1*04:08L
LKHGGGVAGALN

SEQ ID NO: 12781 - protein, 11 aa, Severe acute respiratory syndrome coronavirus 2
  REGION 1..11: note = Table B: HLA-DRB1*04:03L HLA-DRB1*04:02L HLA-DQA1*01:01-B1*05:01L HLA-DRB1*08:01L HLA-DRB1*12:01L HLA-DRB1*04:08L
HGGGVAGALNK

SEQ ID NO: 12782 - protein, 10 aa, Severe acute respiratory syndrome coronavirus 2
  REGION 1..10: note = Table B: HLA-DRB1*04:03L HLA-DRB1*14:17L
LNKATNNAMQ

SEQ ID NO: 12783 - protein, 13 aa, Severe acute respiratory syndrome coronavirus 2
  REGION 1..13: note = Table B: HLA-DRB1*04:03L HLA-DRB1*04:02L HLA-DRB1*04:05L HLA-DRB1*04:10L HLA-DRB1*12:01L HLA-DRB1*14:17L
NNAMQVESDDYIA

SEQ ID NO: 12784 - protein, 12 aa, Severe acute respiratory syndrome coronavirus 2
  REGION 1..12: note = Table B: HLA-DRB1*04:03L HLA-DQA1*05:01-B1*02:01L
AMQVESDDYIAT

SEQ ID NO: 12785 - protein, 10 aa, Severe acute respiratory syndrome coronavirus 2
  REGION 1..10: note = Table B: HLA-DRB1*04:03L HLA-DRB1*04:02L HLA-DQA1*03:01-B1*03:02L HLA-DRB1*14:17L HLA-DQA1*02:01-B1*03:03L
ATNGPLKVGG

SEQ ID NO: 12786 - protein, 15 aa, Severe acute respiratory syndrome coronavirus 2
  REGION 1..15: note = Table B: HLA-DRB1*04:03L HLA-DRB1*13:02L HLA-DRB1*04:02L HLA-DRB1*04:04L HLA-DPA1*03:01-B1*04:02L HLA-DQA1*01:01-B1*05:01L HLA-DRB1*08:01L HLA-DRB1*11:01L HLA-DQA1*05:01-B1*02:01L HLA-DPA1*01:03-B1*04:02L
  REGION 1..15: note = CONT. FROM ABOVE: HLA-DPA1*01:02-B1*04:01L HLA-DRB1*07:01L HLA-D RB1*16:01L HLA-DRB1*15:03L
GPLKVGGSCVLSGHN

SEQ ID NO: 12787 - protein, 11 aa, Severe acute respiratory syndrome coronavirus 2
  REGION 1..11: note = Table B: HLA-DRB1*04:03L
LHVVGPNVNKG

SEQ ID NO: 12788 - protein, 10 aa, Severe acute respiratory syndrome coronavirus 2
  REGION 1..10: note = Table B: HLA-DRB1*04:03L HLA-DRB1*14:17L
DIQLLKSAYE

SEQ ID NO: 12789 - protein, 10 aa, Severe acute respiratory syndrome coronavirus 2
  REGION 1..10: note = Table B: HLA-DRB1*04:03L HLA-DRB1*04:02L HLA-DRB1*04:05L HLA-DRB4*03:01NL HLA-DQA1*01-B1*05L HLA-DRB1*04:10L HLA-DQA1*03:01-B1*03:02L HLA-DRB1*14:17L HLA-DQA1*02:01-B1*03:03L
IQLLKSAYEN

SEQ ID NO: 12790 - protein, 11 aa, Severe acute respiratory syndrome coronavirus 2
  REGION 1..11: note = Table B: HLA-DRB1*04:03L HLA-DQA1*01-B1*05L
FNQHEVLLAPL

SEQ ID NO: 12791 - protein, 10 aa, Severe acute respiratory syndrome coronavirus 2
  REGION 1..10: note = Table B: HLA-DRB1*04:03L HLA-DRB1*04:02L HLA-DRB1*14:17L
VLLAPLLSAG

SEQ ID NO: 12792 - protein, 14 aa, Severe acute respiratory syndrome coronavirus 2
  REGION 1..14: note = Table B: HLA-DRB1*04:03L HLA-DRB1*01:02L HLA-DPA1*01:03-B1*03:01L HLA-DPA1*01:03-B1*04:02L HLA-DRB1*15:03L
LAPLLSAGIFGADP

SEQ ID NO: 12793 - protein, 14 aa, Severe acute respiratory syndrome coronavirus 2
  REGION 1..14: note = Table B: HLA-DRB1*04:03L HLA-DPA1*01:03-B1*04:02L
APLLSAGIFGADPI

SEQ ID NO: 12794 - protein, 13 aa, Severe acute respiratory syndrome coronavirus 2
  REGION 1..13: note = Table B: HLA-DRB1*04:03L HLA-DRB1*04:05L HLA-DRB1*04:08L
ADPIHSLRVCVDT

SEQ ID NO: 12795 - protein, 16 aa, Severe acute respiratory syndrome coronavirus 2
  REGION 1..16: note = Table B: HLA-DRB1*04:03L HLA-DRB1*13:02L HLA-DRB1*04:04L HLA-DRB1*08:04L HLA-DPA1*01:03-B1*03:01L HLA-DRB1*14:01L HLA-DRB3*01:01L HLA-DPA1*03:01-B1*105:01L HLA-DPA1*01:03-B1*104:01L HLA-DQA1*01:03-B1*06:01L
DPIHSLRVCVDTVRTN

SEQ ID NO: 12796 - protein, 15 aa, Severe acute respiratory syndrome coronavirus 2
  REGION 1..15: note = Table B: HLA-DRB1*04:03L HLA-DRB1*13:03L HLA-DRB1*04:02L HLA-DRB1*04:04L HLA-DRB1*08:04L HLA-DRB1*11:03L HLA-DRB1*11:04L HLA-DRB1*11:01L HLA-DPA1*01:03-B1*04:01L HLA-DRB3*01:01L HLA-DRB1*07:01L HLA-DRB1*08:03L
VDTVRTNVYLAVFDK

SEQ ID NO: 12797 - protein, 11 aa, Severe acute respiratory syndrome coronavirus 2
  REGION 1..11: note = Table B: HLA-DRB1*04:03L HLA-DRB1*04:02L HLA-DQA1*01:02-B1*06:02L HLA-DQA1*05:01-B1*02:01L HLA-DPA1*01:02-B1*04:01L
TNVYLAVFDKN

SEQ ID NO: 12798 - protein, 10 aa, Severe acute respiratory syndrome coronavirus 2
  REGION 1..10: note = Table B: HLA-DRB1*04:03L HLA-DRB1*14:01L HLA-DQA1*01-B1*05L
LAVFDKNLYD

SEQ ID NO: 12799 - protein, 10 aa, Severe acute respiratory syndrome coronavirus 2
  REGION 1..10: note = Table B: HLA-DRB1*04:03L HLA-DRB1*13:03L HLA-DRB1*01:03L HLA-DRB1*04:02L HLA-DRB1*04:05L HLA-DRB4*03:01NL HLA-DRB1*08:01L HLA-DQA1*01-B1*05L HLA-DRB1*04:10L HLA-DQA1*03:01-B1*03:02L HLA-DRB1*14:54L HLA-DRB1*14:17L HLA-DRB1*16:01L HLA-DRB1*04:08L
  REGION 1..10: note = CONT. FROM ABOVE: HLA-DQA1*02:01-B1*03:03L
SFLEMKSEKQ

SEQ ID NO: 12800 - protein, 11 aa, Severe acute respiratory syndrome coronavirus 2
  REGION 1..11: note = Table B: HLA-DRB1*04:03L HLA-DRB1*04:02L HLA-DQA1*03:01-B1*03:02L HLA-DRB1*14:17L
LEMKSEKQVEQ

SEQ ID NO: 12801 - protein, 11 aa, Severe acute respiratory syndrome coronavirus 2
  REGION 1..11: note = Table B: HLA-DRB1*04:03L HLA-DQA1*02:01-B1*03:03L
VEQKIAEIPKE

SEQ ID NO: 12802 - protein, 11 aa, Severe acute respiratory syndrome coronavirus 2
  REGION 1..11: note = Table B: HLA-DRB1*04:03L HLA-DRB1*13:03L HLA-DRB1*01:03L HLA-DRB1*04:02L HLA-DRB4*03:01NL HLA-DRB1*14:01L HLA-DQA1*03:01-B1*03:02L HLA-DRB1*14:54L HLA-DRB1*14:17L HLA-DPA1*01:02-B1*04:01L HLA-DRB1*16:01L
  REGION 1..11: note = CONT. FROM ABOVE: HLA-DQA1*02:01-B1*03:03L
IAEIPKEEVKP

SEQ ID NO: 12803 - protein, 11 aa, Severe acute respiratory syndrome coronavirus 2
  REGION 1..11: note = Table B: HLA-DRB1*04:03L HLA-DRB1*13:03L HLA-DRB1*04:02L HLA-DQA1*01-B1*05L HLA-DQA1*03:01-B1*03:02L HLA-DRB1*14:17L HLA-DRB1*16:01L HLA-DQA1*02:01-B1*03:03L
VKPFITESKPS

SEQ ID NO: 12804 - protein, 11 aa, Severe acute respiratory syndrome coronavirus 2
  REGION 1..11: note = Table B: HLA-DRB1*04:03L HLA-DQA1*03:01-B1*03:02L HLA-DQA1*02:01-B1*03:03L
PFITESKPSVE

SEQ ID NO: 12805 - protein, 13 aa, Severe acute respiratory syndrome coronavirus 2
  REGION 1..13: note = Table B: HLA-DRB1*04:03L HLA-DRB1*04:05L HLA-DRB1*01:02L HLA-DRB1*12:01L HLA-DRB1*16:01L HLA-DQA1*01:03-B1*06:01L HLA-DQA1*02:01-B1*03:03L HLA-DRB1*15:03L
DKKIKACVEEVTT

SEQ ID NO: 12806 - protein, 14 aa, Severe acute respiratory syndrome coronavirus 2
  REGION 1..14: note = Table B: HLA-DRB1*04:03L
IKACVEEVTTTLEE

SEQ ID NO: 12807 - protein, 14 aa, Severe acute respiratory syndrome coronavirus 2
  REGION 1..14: note = Table B: HLA-DRB1*04:03L
KACVEEVTTTLEET

SEQ ID NO: 12808 - protein, 12 aa, Severe acute respiratory syndrome coronavirus 2
  REGION 1..12: note = Table B: HLA-DRB1*04:03L HLA-DRB1*04:04L HLA-DRB1*04:05L HLA-DRB1*01:02L HLA-DRB1*08:77L HLA-DPA1*01:03-B1*03:01L HLA-DQA1*01-B1*05L HLA-DQA1*05:05-B1*03:19L HLA-DRB1*04:10L HLA-DPA1*02:01-B1*13:01L HLA-DRB1*14:54L HLA-DRB1*07:01L
  REGION 1..12: note = CONT. FROM ABOVE: HLA-DRB1*04:08L HLA-DRB1*15:03L
VEEVTTTLEETK

SEQ ID NO: 12809 - protein, 11 aa, Severe acute respiratory syndrome coronavirus 2
  REGION 1..11: note = Table B: HLA-DRB1*04:03L HLA-DRB1*01:03L HLA-DRB1*01:02L HLA-DRB1*14:01L HLA-DRB1*08:01L HLA-DQA1*01-B1*05L HLA-DQA1*05:01-B1*02:01L HLA-DPA1*01:03-B1*04:02L HLA-DRB1*12:01L HLA-DPA1*01:03-B1*02:01L HLA-DRB1*16:01L
  REGION 1..11: note = CONT. FROM ABOVE: HLA-DQA1*01:03-B1*06:01L HLA-DRB1*04:08L HLA-D QA1*02:01-B1*03:03L HLA-DRB1*15:03L
TTLEETKFLTE

SEQ ID NO: 12810 - protein, 13 aa, Severe acute respiratory syndrome coronavirus 2
  REGION 1..13: note = Table B: HLA-DRB1*04:03L
TENLLLYIDINGN

SEQ ID NO: 12811 - protein, 14 aa, Severe acute respiratory syndrome coronavirus 2
  REGION 1..14: note = Table B: HLA-DRB1*04:03L HLA-DRB1*16:01L
ENLLLYIDINGNLH

SEQ ID NO: 12812 - protein, 10 aa, Severe acute respiratory syndrome coronavirus 2
  REGION 1..10: note = Table B: HLA-DRB1*04:03L HLA-DRB1*14:17L
YIDINGNLHP

SEQ ID NO: 12813 - protein, 10 aa, Severe acute respiratory syndrome coronavirus 2
  REGION 1..10: note = Table B: HLA-DRB1*04:03L HLA-DQA1*03:01-B1*03:02L HLA-DQA1*02:01-B1*03:03L
DINGNLHPDS

SEQ ID NO: 12814 - protein, 11 aa, Severe acute respiratory syndrome coronavirus 2
  REGION 1..11: note = Table B: HLA-DRB1*04:03L HLA-DRB1*13:02L HLA-DRB1*12:01L
GNLHPDSATLV

SEQ ID NO: 12815 - protein, 11 aa, Severe acute respiratory syndrome coronavirus 2
  REGION 1..11: note = Table B: HLA-DRB1*04:03L HLA-DRB1*13:03L HLA-DRB1*14:01L HLA-DQA1*05:01-B1*02:01L HLA-DRB1*14:17L HLA-DRB1*16:01L
LHPDSATLVSD

SEQ ID NO: 12816 - protein, 12 aa, Severe acute respiratory syndrome coronavirus 2
  REGION 1..12: note = Table B: HLA-DRB1*04:03L
SATLVSDIDITF

SEQ ID NO: 12817 - protein, 13 aa, Severe acute respiratory syndrome coronavirus 2
  REGION 1..13: note = Table B: HLA-DRB1*04:03L HLA-DRB1*03:01L
ATLVSDIDITFLK

SEQ ID NO: 12818 - protein, 11 aa, Severe acute respiratory syndrome coronavirus 2
  REGION 1..11: note = Table B: HLA-DRB1*04:03L HLA-DRB1*13:02L HLA-DRB1*13:03L HLA-DRB1*01:03L HLA-DRB1*04:02L HLA-DRB1*01:02L HLA-DRB1*14:01L HLA-DQA1*05:01-B1*02:01L HLA-DRB1*12:01L HLA-DRB3*01:01L HLA-DQA1*03:01-B1*03:02L HLA-DRB1*14:54L HLA-DRB1*14:17L
  REGION 1..11: note = CONT. FROM ABOVE: HLA-DRB1*16:01L HLA-DRB1*15:03L
FLKKDAPYIVG

SEQ ID NO: 12819 - protein, 10 aa, Severe acute respiratory syndrome coronavirus 2
  REGION 1..10: note = Table B: HLA-DRB1*04:03L HLA-DRB1*14:17L
YIVGDVVQEG

SEQ ID NO: 12820 - protein, 12 aa, Severe acute respiratory syndrome coronavirus 2
  REGION 1..12: note = Table B: HLA-DRB1*04:03L HLA-DRB1*14:17L
VGDVVQEGVLTA

SEQ ID NO: 12821 - protein, 11 aa, Severe acute respiratory syndrome coronavirus 2
  REGION 1..11: note = Table B: HLA-DRB1*04:03L HLA-DRB1*14:17L
VVQEGVLTAVV

SEQ ID NO: 12822 - protein, 10 aa, Severe acute respiratory syndrome coronavirus 2
  REGION 1..10: note = Table B: HLA-DRB1*04:03L HLA-DRB1*04:02L HLA-DRB1*14:17L
VVIPTKKAGG

SEQ ID NO: 12823 - protein, 11 aa, Severe acute respiratory syndrome coronavirus 2
  REGION 1..11: note = Table B: HLA-DRB1*04:03L HLA-DRB1*13:03L HLA-DRB1*01:03L HLA-DRB1*04:02L HLA-DRB4*03:01NL HLA-DRB1*14:01L HLA-DRB1*11:04L HLA-DQA1*03:01-B1*03:02L HLA-DRB1*14:54L HLA-DRB1*14:17L HLA-DRB1*04:08L
VIPTKKAGGTT

SEQ ID NO: 12824 - protein, 10 aa, Severe acute respiratory syndrome coronavirus 2
  REGION 1..10: note = Table B: HLA-DRB1*04:03L HLA-DRB1*13:02L HLA-DRB1*13:03L HLA-DRB1*01:03L HLA-DRB1*04:02L HLA-DRB1*01:02L HLA-DRB4*03:01NL HLA-DRB1*14:01L HLA-DRB1*14:02L HLA-DQA1*01-B1*05L HLA-DRB1*12:01L HLA-DQA1*03:01-B1*03:02L HLA-DRB1*14:17L
  REGION 1..10: note = CONT. FROM ABOVE: HLA-DRB1*16:01L HLA-DQA1*02:01-B1*03:03L HLA-D RB1*15:03L
TTYPGQGLNG

SEQ ID NO: 12825 - protein, 10 aa, Severe acute respiratory syndrome coronavirus 2
  REGION 1..10: note = Table B: HLA-DRB1*04:03L HLA-DQA1*01-B1*05L HLA-DQA1*03:01-B1*03:02L HLA-DQA1*02:01-B1*03:03L
LNGYTVEEAK

SEQ ID NO: 12826 - protein, 11 aa, Severe acute respiratory syndrome coronavirus 2
  REGION 1..11: note = Table B: HLA-DRB1*04:03L HLA-DRB1*04:05L HLA-DQA1*01-B1*05L HLA-DRB1*14:17L
SAFYILPSIIS

SEQ ID NO: 12827 - protein, 10 aa, Severe acute respiratory syndrome coronavirus 2
  REGION 1..10: note = Table B: HLA-DRB1*04:03L HLA-DRB1*04:02L HLA-DQA1*03:01-B1*03:02L HLA-DRB1*14:17L HLA-DQA1*02:01-B1*03:03L
YILPSIISNE

SEQ ID NO: 12828 - protein, 10 aa, Severe acute respiratory syndrome coronavirus 2
  REGION 1..10: note = Table B: HLA-DRB1*04:03L HLA-DRB1*04:02L HLA-DQA1*03:01-B1*03:02L HLA-DQA1*05:05-B1*03:01L HLA-DRB1*14:17L HLA-DQA1*01:03-B1*06:01L HLA-DQA1*02:01-B1*03:03L
ILPSIISNEK

SEQ ID NO: 12829 - protein, 13 aa, Severe acute respiratory syndrome coronavirus 2
  REGION 1..13: note = Table B: HLA-DRB1*04:03L
NEKQEILGTVSWN

SEQ ID NO: 12830 - protein, 13 aa, Severe acute respiratory syndrome coronavirus 2
  REGION 1..13: note = Table B: HLA-DRB1*04:03L HLA-DRB1*13:03L HLA-DRB1*04:05L HLA-DRB1*01:02L HLA-DRB4*03:01NL HLA-DPA1*01:03-B1*03:01L HLA-DRB1*14:01L HLA-DRB1*11:03L HLA-DQA1*01-B1*05L HLA-DRB1*12:02L HLA-DPA1*02:01-B1*13:01L
  REGION 1..13: note = CONT. FROM ABOVE: HLA-DQA1*05:05-B1*03:01L HLA-DPA1*01:02-B1*04: 01L HLA-DQA1*01:03-B1*06:01L HLA-DRB1*04:08L
EKQEILGTVSWNL

SEQ ID NO: 12831 - protein, 12 aa, Severe acute respiratory syndrome coronavirus 2
  REGION 1..12: note = Table B: HLA-DRB1*04:03L HLA-DRB1*01:03L HLA-DRB1*04:02L HLA-DRB1*04:05L HLA-DQA1*01:02-B1*06:02L HLA-DRB1*01:02L HLA-DRB1*14:01L HLA-DRB3*01:01L HLA-DRB1*04:08L HLA-DRB1*15:03L
REMLAHAEETRK

SEQ ID NO: 12832 - protein, 11 aa, Severe acute respiratory syndrome coronavirus 2
  REGION 1..11: note = Table B: HLA-DRB1*04:03L HLA-DQA1*01:02-B1*06:02L HLA-DQA1*05:05-B1*03:01L
VETKAIVSTIQ

SEQ ID NO: 12833 - protein, 13 aa, Severe acute respiratory syndrome coronavirus 2
  REGION 1..13: note = Table B: HLA-DRB1*04:03L HLA-DPA1*03:01-B1*04:02L
GARFYFYTSKTTV

SEQ ID NO: 12834 - protein, 10 aa, Severe acute respiratory syndrome coronavirus 2
  REGION 1..10: note = Table B: HLA-DRB1*04:03L HLA-DQA1*01-B1*05L HLA-DPA1*01:02-B1*04:01L HLA-DRB1*16:01L
YFYTSKTTVA

SEQ ID NO: 12835 - protein, 12 aa, Severe acute respiratory syndrome coronavirus 2
  REGION 1..12: note = Table B: HLA-DRB1*04:03L HLA-DRB1*04:04L HLA-DRB1*04:05L HLA-DRB4*03:01NL HLA-DRB1*08:04L HLA-DQA1*01:01-B1*05:01L HLA-DRB1*04:10L HLA-DRB1*12:01L HLA-DPA1*02:01-B1*13:01L HLA-DRB1*14:54L HLA-DQA1*05:05-B1*03:01L HLA-DRB1*14:17L
  REGION 1..12: note = CONT. FROM ABOVE: HLA-DRB1*04:08L HLA-DRB1*08:03L
YTSKTTVASLIN

SEQ ID NO: 12836 - protein, 12 aa, Severe acute respiratory syndrome coronavirus 2
  REGION 1..12: note = Table B: HLA-DRB1*04:03L
TSKTTVASLINT

SEQ ID NO: 12837 - protein, 12 aa, Severe acute respiratory syndrome coronavirus 2
  REGION 1..12: note = Table B: HLA-DRB1*04:03L HLA-DQA1*05:05-B1*03:01L
KTTVASLINTLN

SEQ ID NO: 12838 - protein, 12 aa, Severe acute respiratory syndrome coronavirus 2
  REGION 1..12: note = Table B: HLA-DRB1*04:03L HLA-DRB1*04:02L HLA-DQA1*05:05-B1*03:01L HLA-DRB1*14:17L
TTVASLINTLND

SEQ ID NO: 12839 - protein, 10 aa, Severe acute respiratory syndrome coronavirus 2
  REGION 1..10: note = Table B: HLA-DRB1*04:03L HLA-DQA1*01-B1*05L HLA-DRB1*14:17L
LINTLNDLNE

SEQ ID NO: 12840 - protein, 10 aa, Severe acute respiratory syndrome coronavirus 2
  REGION 1..10: note = Table B: HLA-DRB1*04:03L HLA-DRB1*04:02L HLA-DRB1*04:05L HLA-DRB4*03:01NL HLA-DQA1*01-B1*05L HLA-DQA1*05:01-B1*02:01L HLA-DRB1*04:10L HLA-DQA1*03:01-B1*03:02L HLA-DRB1*14:54L HLA-DRB1*14:17L HLA-DRB1*16:01L
INTLNDLNET

SEQ ID NO: 12841 - protein, 12 aa, Severe acute respiratory syndrome coronavirus 2
  REGION 1..12: note = Table B: HLA-DRB1*04:03L HLA-DPA1*01:02-B1*04:01L HLA-DQA1*01:03-B1*06:01L
ETLVTMPLGYVT

SEQ ID NO: 12842 - protein, 10 aa, Severe acute respiratory syndrome coronavirus 2
  REGION 1..10: note = Table B: HLA-DRB1*04:03L HLA-DRB1*13:03L HLA-DRB1*04:02L HLA-DRB4*03:01NL HLA-DRB1*12:01L HLA-DQA1*03:01-B1*03:02L HLA-DQA1*05:05-B1*03:01L HLA-DRB1*14:17L HLA-DQA1*02:01-B1*03:03L
VTMPLGYVTH

SEQ ID NO: 12843 - protein, 11 aa, Severe acute respiratory syndrome coronavirus 2
  REGION 1..11: note = Table B: HLA-DRB1*04:03L HLA-DRB1*04:02L
MPLGYVTHGLN

SEQ ID NO: 12844 - protein, 10 aa, Severe acute respiratory syndrome coronavirus 2
  REGION 1..10: note = Table B: HLA-DRB1*04:03L HLA-DRB1*04:02L HLA-DRB4*03:01NL HLA-DQA1*03:01-B1*03:02L HLA-DRB1*14:17L HLA-DQA1*02:01-B1*03:03L
YVTHGLNLEE

SEQ ID NO: 12845 - protein, 11 aa, Severe acute respiratory syndrome coronavirus 2
  REGION 1..11: note = Table B: HLA-DRB1*04:03L
MRSLKVPATVS

SEQ ID NO: 12846 - protein, 13 aa, Severe acute respiratory syndrome coronavirus 2
  REGION 1..13: note = Table B: HLA-DRB1*04:03L
TVSVSSPDAVTAY

SEQ ID NO: 12847 - protein, 14 aa, Severe acute respiratory syndrome coronavirus 2
  REGION 1..14: note = Table B: HLA-DRB1*04:03L
VSVSSPDAVTAYNG

SEQ ID NO: 12848 - protein, 12 aa, Severe acute respiratory syndrome coronavirus 2
  REGION 1..12: note = Table B: HLA-DRB1*04:03L HLA-DRB1*04:02L HLA-DRB1*16:01L HLA-DQA1*01:03-B1*06:01L HLA-DRB1*15:01L HLA-DRB1*15:03L
AVTAYNGYLTSS

SEQ ID NO: 12849 - protein, 10 aa, Severe acute respiratory syndrome coronavirus 2
  REGION 1..10: note = Table B: HLA-DRB1*04:03L HLA-DRB1*04:02L HLA-DQA1*03:01-B1*03:02L HLA-DRB1*14:17L
YNGYLTSSSK

SEQ ID NO: 12850 - protein, 10 aa, Severe acute respiratory syndrome coronavirus 2
  REGION 1..10: note = Table B: HLA-DRB1*04:03L HLA-DRB1*13:03L HLA-DRB1*04:02L HLA-DRB4*03:01NL HLA-DQA1*03:01-B1*03:02L HLA-DRB1*14:17L HLA-DRB1*16:01L HLA-DQA1*02:01-B1*03:03L
LTSSSKTPEE

SEQ ID NO: 12851 - protein, 13 aa, Severe acute respiratory syndrome coronavirus 2
  REGION 1..13: note = Table B: HLA-DRB1*04:03L
TPEEHFIETISLA

SEQ ID NO: 12852 - protein, 11 aa, Severe acute respiratory syndrome coronavirus 2
  REGION 1..11: note = Table B: HLA-DRB1*04:03L HLA-DRB1*14:17L
EHFIETISLAG

SEQ ID NO: 12853 - protein, 11 aa, Severe acute respiratory syndrome coronavirus 2
  REGION 1..11: note = Table B: HLA-DRB1*04:03L HLA-DRB1*04:02L HLA-DQA1*05:01-B1*02:01L
ETISLAGSYKD

SEQ ID NO: 12854 - protein, 11 aa, Severe acute respiratory syndrome coronavirus 2
  REGION 1..11: note = Table B: HLA-DRB1*04:03L HLA-DRB1*04:02L HLA-DQA1*01-B1*05L HLA-DQA1*05:01-B1*02:01L HLA-DPA1*03:01-B1*105:01L HLA-DQA1*03:01-B1*03:02L HLA-DRB1*14:17L
ISLAGSYKDWS

SEQ ID NO: 12855 - protein, 12 aa, Severe acute respiratory syndrome coronavirus 2
  REGION 1..12: note = Table B: HLA-DRB1*04:03L HLA-DRB1*04:02L HLA-DQA1*05:01-B1*02:01L HLA-DQA1*03:01-B1*03:02L HLA-DRB1*16:01L HLA-DRB1*15:03L
AGSYKDWSYSGQ

SEQ ID NO: 12856 - protein, 12 aa, Severe acute respiratory syndrome coronavirus 2
  REGION 1..12: note = Table B: HLA-DRB1*04:03L HLA-DQA1*05:01-B1*02:01L HLA-DQA1*03:01-B1*03:02L
GSYKDWSYSGQS

SEQ ID NO: 12857 - protein, 11 aa, Severe acute respiratory syndrome coronavirus 2
  REGION 1..11: note = Table B: HLA-DRB1*04:03L
WSYSGQSTQLG

SEQ ID NO: 12858 - protein, 11 aa, Severe acute respiratory syndrome coronavirus 2
  REGION 1..11: note = Table B: HLA-DRB1*04:03L HLA-DRB1*01:03L HLA-DRB1*04:02L HLA-DRB1*04:05L HLA-DQA1*01:02-B1*06:02L HLA-DRB4*03:01NL HLA-DQA1*05:05-B1*03:19L HLA-DRB1*04:10L HLA-DQA1*03:01-B1*03:02L HLA-DRB1*14:54L
  REGION 1..11: note = CONT. FROM ABOVE: HLA-DQA1*05:05-B1*03:01L HLA-DRB1*14:17L HLA-D RB1*16:01L HLA-DRB1*04:08L HLA-DQA1*02:01-B1*03:03L
YSGQSTQLGIE

SEQ ID NO: 12859 - protein, 11 aa, Severe acute respiratory syndrome coronavirus 2
  REGION 1..11: note = Table B: HLA-DRB1*04:03L HLA-DQA1*01-B1*05L
KSVYYTSNPTT

SEQ ID NO: 12860 - protein, 12 aa, Severe acute respiratory syndrome coronavirus 2
  REGION 1..12: note = Table B: HLA-DRB1*04:03L HLA-DRB1*13:02L HLA-DRB1*04:02L HLA-DRB1*04:05L HLA-DRB4*03:01NL HLA-DRB1*08:04L HLA-DPA1*01:03-B1*03:01L HLA-DQA1*01-B1*05L HLA-DRB1*04:10L HLA-DRB1*14:54L HLA-DQA1*05:05-B1*03:01L HLA-DRB1*14:17L
  REGION 1..12: note = CONT. FROM ABOVE: HLA-DRB1*04:08L
YTSNPTTFHLDG

SEQ ID NO: 12861 - protein, 11 aa, Severe acute respiratory syndrome coronavirus 2
  REGION 1..11: note = Table B: HLA-DRB1*04:03L HLA-DQA1*01-B1*05L HLA-DQA1*03:01-B1*03:02L HLA-DQA1*02:01-B1*03:03L
DGEVITFDNLK

SEQ ID NO: 12862 - protein, 10 aa, Severe acute respiratory syndrome coronavirus 2
  REGION 1..10: note = Table B: HLA-DRB1*04:03L HLA-DRB1*04:02L HLA-DQA1*01-B1*05L HLA-DPA1*03:01-B1*105:01L HLA-DQA1*03:01-B1*03:02L HLA-DRB1*14:17L HLA-DQA1*01:03-B1*06:01L HLA-DQA1*02:01-B1*03:03L
EVITFDNLKT

SEQ ID NO: 12863 - protein, 11 aa, Severe acute respiratory syndrome coronavirus 2
  REGION 1..11: note = Table B: HLA-DRB1*04:03L HLA-DRB1*14:17L
ITFDNLKTLLS

SEQ ID NO: 12864 - protein, 11 aa, Severe acute respiratory syndrome coronavirus 2
  REGION 1..11: note = Table B: HLA-DRB1*04:03L HLA-DRB1*01:03L HLA-DRB1*04:02L HLA-DRB1*14:17L HLA-DRB1*04:08L
FDNLKTLLSLR

SEQ ID NO: 12865 - protein, 11 aa, Severe acute respiratory syndrome coronavirus 2
  REGION 1..11: note = Table B: HLA-DRB1*04:03L HLA-DRB1*04:02L HLA-DRB1*04:05L HLA-DRB1*12:01L HLA-DQA1*03:01-B1*03:02L HLA-DRB1*14:17L
DNLKTLLSLRE

SEQ ID NO: 12866 - protein, 14 aa, Severe acute respiratory syndrome coronavirus 2
  REGION 1..14: note = Table B: HLA-DRB1*04:03L HLA-DRB1*04:04L HLA-DRB1*04:05L HLA-DRB1*14:01L
LLSLREVRTIKVFT

SEQ ID NO: 12867 - protein, 12 aa, Severe acute respiratory syndrome coronavirus 2
  REGION 1..12: note = Table B: HLA-DRB1*04:03L HLA-DRB1*01:03L HLA-DRB1*01:02L HLA-DRB1*14:01L HLA-DRB1*12:01L HLA-DRB1*14:17L HLA-DRB1*16:01L HLA-DRB1*04:08L HLA-DRB1*15:03L
LREVRTIKVFTT

SEQ ID NO: 12868 - protein, 10 aa, Severe acute respiratory syndrome coronavirus 2
  REGION 1..10: note = Table B: HLA-DRB1*04:03L HLA-DQA1*03:01-B1*03:02L HLA-DQA1*01:03-B1*06:01L HLA-DQA1*02:01-B1*03:03L
TIKVFTTVDN

SEQ ID NO: 12869 - protein, 10 aa, Severe acute respiratory syndrome coronavirus 2
  REGION 1..10: note = Table B: HLA-DRB1*04:03L HLA-DQA1*03:01-B1*03:02L HLA-DQA1*01:03-B1*06:01L HLA-DQA1*02:01-B1*03:03L
TTVDNINLHT

SEQ ID NO: 12870 - protein, 10 aa, Severe acute respiratory syndrome coronavirus 2
  REGION 1..10: note = Table B: HLA-DRB1*04:03L HLA-DRB1*04:02L HLA-DQA1*01-B1*05L HLA-DQA1*05:01-B1*02:01L HLA-DQA1*03:01-B1*03:02L HLA-DRB1*14:17L HLA-DQA1*02:01-B1*03:03L
NLHTQVVDMS

SEQ ID NO: 12871 - protein, 13 aa, Severe acute respiratory syndrome coronavirus 2
  REGION 1..13: note = Table B: HLA-DRB1*04:03L HLA-DRB1*04:02L HLA-DRB1*04:05L HLA-DRB4*03:01NL HLA-DRB1*04:10L HLA-DQA1*03:01-B1*03:02L HLA-DRB1*14:54L HLA-DRB1*14:17L HLA-DQA1*02:01-B1*03:03L
TQVVDMSMTYGQQ

SEQ ID NO: 12872 - protein, 12 aa, Severe acute respiratory syndrome coronavirus 2
  REGION 1..12: note = Table B: HLA-DRB1*04:03L
YLDGADVTKIKP

SEQ ID NO: 12873 - protein, 11 aa, Severe acute respiratory syndrome coronavirus 2
  REGION 1..11: note = Table B: HLA-DRB1*04:03L HLA-DRB1*01:03L HLA-DQA1*03:01-B1*03:02L HLA-DRB1*14:17L
IKPHNSHEGKT

SEQ ID NO: 12874 - protein, 11 aa, Severe acute respiratory syndrome coronavirus 2
  REGION 1..11: note = Table B: HLA-DRB1*04:03L HLA-DRB1*04:02L HLA-DRB1*04:05L HLA-DRB1*04:10L HLA-DRB1*14:17L HLA-DRB1*16:01L HLA-DQA1*02:01-B1*03:03L
KTFYVLPNDDT

SEQ ID NO: 12875 - protein, 10 aa, Severe acute respiratory syndrome coronavirus 2
  REGION 1..10: note = Table B: HLA-DRB1*04:03L HLA-DRB1*13:02L HLA-DRB1*13:03L HLA-DRB1*01:03L HLA-DRB1*04:02L HLA-DRB4*03:01NL HLA-DRB3*02:01L HLA-DRB1*14:01L HLA-DRB1*08:01L HLA-DRB5*01:01L HLA-DQA1*01-B1*05L HLA-DRB1*12:01L HLA-DPA1*03:01-B1*105:01L
  REGION 1..10: note = CONT. FROM ABOVE: HLA-DQA1*03:01-B1*03:02L HLA-DRB1*14:54L HLA-D QA1*05:05-B1*03:01L HLA-DRB1*14:17L HLA-DRB1*16:01L HLA-DQA1*01: 03-B1*06:01L HLA-DQA1*02:01-B1*03:03L
YVLPNDDTLR

SEQ ID NO: 12876 - protein, 11 aa, Severe acute respiratory syndrome coronavirus 2
  REGION 1..11: note = Table B: HLA-DRB1*04:03L HLA-DRB1*13:03L HLA-DRB1*04:02L HLA-DQA1*01-B1*05L HLA-DQA1*05:01-B1*02:01L HLA-DRB1*14:17L
VLPNDDTLRVE

SEQ ID NO: 12877 - protein, 13 aa, Severe acute respiratory syndrome coronavirus 2
  REGION 1..13: note = Table B: HLA-DRB1*04:03L HLA-DRB1*13:02L HLA-DRB1*04:04L HLA-DRB1*04:05L
DDTLRVEAFEYYH

SEQ ID NO: 12878 - protein, 11 aa, Severe acute respiratory syndrome coronavirus 2
  REGION 1..11: note = Table B: HLA-DRB1*04:03L HLA-DQA1*03:01-B1*03:02L HLA-DPA1*01:02-B1*04:01L
AFEYYHTTDPS

SEQ ID NO: 12879 - protein, 12 aa, Severe acute respiratory syndrome coronavirus 2
  REGION 1..12: note = Table B: HLA-DRB1*04:03L HLA-DRB1*04:05L HLA-DRB1*01:02L HLA-DRB1*14:17L HLA-DRB1*04:08L HLA-DQA1*02:01-B1*03:03L
LGRYMSALNHTK

SEQ ID NO: 12880 - protein, 11 aa, Severe acute respiratory syndrome coronavirus 2
  REGION 1..11: note = Table B: HLA-DRB1*04:03L HLA-DRB1*04:02L HLA-DRB4*03:01NL HLA-DRB1*12:01L HLA-DQA1*03:01-B1*03:02L HLA-DQA1*05:05-B1*03:01L HLA-DRB1*14:17L HLA-DQA1*02:01-B1*03:03L
YPQVNGLTSIK

SEQ ID NO: 12881 - protein, 14 aa, Severe acute respiratory syndrome coronavirus 2
  REGION 1..14: note = Table B: HLA-DRB1*04:03L HLA-DRB1*13:02L HLA-DRB1*01:03L HLA-DRB1*04:05L HLA-DRB1*01:02L HLA-DPA1*01:03-B1*03:01L HLA-DRB1*14:01L HLA-DRB1*12:01L HLA-DPA1*02:01-B1*13:01L HLA-DPA1*03:01-B1*105:01L HLA-DPA1*01:03-B1*104:01L
  REGION 1..14: note = CONT. FROM ABOVE: HLA-DRB1*16:01L HLA-DRB1*04:08L
TSIKWADNNCYLAT

SEQ ID NO: 12882 - protein, 11 aa, Severe acute respiratory syndrome coronavirus 2
  REGION 1..11: note = Table B: HLA-DRB1*04:03L HLA-DQA1*01:02-B1*06:02L HLA-DRB1*01:02L HLA-DQA1*05:01-B1*02:01L HLA-DRB1*12:01L HLA-DPA1*03:01-B1*105:01L HLA-DPA1*01:02-B1*04:01L HLA-DRB1*16:01L HLA-DQA1*01:03-B1*06:01L
ALLTLQQIELK

SEQ ID NO: 12883 - protein, 12 aa, Severe acute respiratory syndrome coronavirus 2
  REGION 1..12: note = Table B: HLA-DRB1*04:03L HLA-DRB1*13:03L HLA-DRB1*04:02L HLA-DRB1*04:05L HLA-DQA1*01:02-B1*06:02L HLA-DRB4*03:01NL HLA-DRB1*08:04L HLA-DRB1*14:01L HLA-DRB1*08:01L HLA-DRB1*04:10L HLA-DRB1*12:01L HLA-DQA1*03:01-B1*03:02L HLA-DRB1*14:54L
  REGION 1..12: note = CONT. FROM ABOVE: HLA-DRB1*14:17L HLA-DRB1*16:01L HLA-DRB1*04:08 L HLA-DQA1*02:01-B1*03:03L
LQQIELKFNPPA

SEQ ID NO: 12884 - protein, 11 aa, Severe acute respiratory syndrome coronavirus 2
  REGION 1..11: note = Table B: HLA-DRB1*04:03L HLA-DRB1*04:02L HLA-DRB1*14:01L HLA-DRB1*14:17L
IELKFNPPALQ

SEQ ID NO: 12885 - protein, 11 aa, Severe acute respiratory syndrome coronavirus 2
  REGION 1..11: note = Table B: HLA-DRB1*04:03L
LKFNPPALQDA

SEQ ID NO: 12886 - protein, 10 aa, Severe acute respiratory syndrome coronavirus 2
  REGION 1..10: note = Table B: HLA-DRB1*04:03L HLA-DRB1*01:03L HLA-DQA1*03:01-B1*03:02L HLA-DRB1*16:01L HLA-DQA1*02:01-B1*03:03L
YRARAGEAAN

SEQ ID NO: 12887 - protein, 13 aa, Severe acute respiratory syndrome coronavirus 2
  REGION 1..13: note = Table B: HLA-DRB1*04:03L HLA-DRB1*13:02L HLA-DRB1*04:05L HLA-DQA1*02:01-B1*03:03L
GDVRETMSYLFQH

SEQ ID NO: 12888 - protein, 12 aa, Severe acute respiratory syndrome coronavirus 2
  REGION 1..12: note = Table B: HLA-DRB1*04:03L HLA-DRB1*04:05L HLA-DQA1*01:02-B1*06:02L HLA-DPA1*03:01-B1*04:02L HLA-DPA1*03:01-B1*105:01L HLA-DPA1*01:02-B1*04:01L HLA-DRB1*15:03L
TMSYLFQHANLD

SEQ ID NO: 12889 - protein, 11 aa, Severe acute respiratory syndrome coronavirus 2
  REGION 1..11: note = Table B: HLA-DRB1*04:03L HLA-DQA1*03:01-B1*03:02L
GQQQTTLKGVE

SEQ ID NO: 12890 - protein, 12 aa, Severe acute respiratory syndrome coronavirus 2
  REGION 1..12: note = Table B: HLA-DRB1*04:03L HLA-DPA1*03:01-B1*04:02L
VEAVMYMGTLSY

SEQ ID NO: 12891 - protein, 11 aa, Severe acute respiratory syndrome coronavirus 2
  REGION 1..11: note = Table B: HLA-DRB1*04:03L
AVMYMGTLSYE

SEQ ID NO: 12892 - protein, 11 aa, Severe acute respiratory syndrome coronavirus 2
  REGION 1..11: note = Table B: HLA-DRB1*04:03L HLA-DRB1*14:17L
VMYMGTLSYEQ

SEQ ID NO: 12893 - protein, 11 aa, Severe acute respiratory syndrome coronavirus 2
  REGION 1..11: note = Table B: HLA-DRB1*04:03L HLA-DRB1*04:05L
MYMGTLSYEQF

SEQ ID NO: 12894 - protein, 11 aa, Severe acute respiratory syndrome coronavirus 2
  REGION 1..11: note = Table B: HLA-DRB1*04:03L HLA-DRB1*13:03L HLA-DRB1*04:02L HLA-DRB1*04:05L HLA-DRB4*03:01NL HLA-DRB1*04:10L HLA-DRB1*14:54L HLA-DRB1*14:17L HLA-DRB1*16:01L HLA-DRB1*04:08L
SPFVMMSAPPA

SEQ ID NO: 12895 - protein, 10 aa, Severe acute respiratory syndrome coronavirus 2
  REGION 1..10: note = Table B: HLA-DRB1*04:03L HLA-DRB1*01:03L HLA-DRB1*04:02L HLA-DRB1*04:04L HLA-DRB1*04:05L HLA-DRB1*01:02L HLA-DRB4*03:01NL HLA-DRB1*04:10L HLA-DRB1*12:01L HLA-DRB1*14:54L HLA-DRB1*14:17L HLA-DRB1*10:01L HLA-DRB1*16:01L HLA-DRB1*04:08L HLA-DRB1*15:03L
FVMMSAPPAQ

SEQ ID NO: 12896 - protein, 14 aa, Severe acute respiratory syndrome coronavirus 2
  REGION 1..14: note = Table B: HLA-DRB1*04:03L HLA-DRB1*13:02L HLA-DRB1*01:03L HLA-DRB1*04:05L HLA-DRB1*01:02L HLA-DRB1*08:04L HLA-DRB1*14:01L HLA-DRB1*11:04L HLA-DRB1*08:01L HLA-DRB1*11:01L HLA-DRB3*01:01L HLA-DPA1*01:03-B1*02:01L HLA-DPA1*01:02-B1*04:01L
  REGION 1..14: note = CONT. FROM ABOVE: HLA-DRB1*04:08L HLA-DQA1*02:01-B1*03:03L
ASEYTGNYQCGHYK

SEQ ID NO: 12897 - protein, 12 aa, Severe acute respiratory syndrome coronavirus 2
  REGION 1..12: note = Table B: HLA-DRB1*04:03L HLA-DRB1*01:03L HLA-DRB1*04:02L HLA-DQA1*01:02-B1*06:02L HLA-DRB1*01:02L HLA-DPA1*03:01-B1*105:01L HLA-DQA1*03:01-B1*03:02L HLA-DRB1*14:17L HLA-DPA1*01:02-B1*04:01L HLA-DRB1*16:01L
  REGION 1..12: note = CONT. FROM ABOVE: HLA-DQA1*01:03-B1*06:01L HLA-DRB1*04:08L HLA-D QA1*02:01-B1*03:03L
ITSKETLYCIDG

SEQ ID NO: 12898 - protein, 13 aa, Severe acute respiratory syndrome coronavirus 2
  REGION 1..13: note = Table B: HLA-DRB1*04:03L HLA-DRB1*01:02L HLA-DRB1*12:01L HLA-DRB1*15:03L
KETLYCIDGALLT

SEQ ID NO: 12899 - protein, 11 aa, Severe acute respiratory syndrome coronavirus 2
  REGION 1..11: note = Table B: HLA-DRB1*04:03L HLA-DRB1*01:03L HLA-DRB1*04:02L HLA-DQA1*01:01-B1*05:01L HLA-DQA1*05:01-B1*02:01L HLA-DPA1*01:03-B1*04:02L HLA-DPA1*03:01-B1*105:01L HLA-DRB1*04:08L
IDGALLTKSSE

SEQ ID NO: 12900 - protein, 14 aa, Severe acute respiratory syndrome coronavirus 2
  REGION 1..14: note = Table B: HLA-DRB1*04:03L HLA-DRB1*04:02L HLA-DRB1*04:05L HLA-DRB1*01:02L HLA-DRB1*12:01L HLA-DRB1*16:01L HLA-DRB1*15:03L
DGALLTKSSEYKGP

SEQ ID NO: 12901 - protein, 14 aa, Severe acute respiratory syndrome coronavirus 2
  REGION 1..14: note = Table B: HLA-DRB1*04:03L HLA-DRB1*04:02L HLA-DRB1*01:02L
GALLTKSSEYKGPI

SEQ ID NO: 12902 - protein, 13 aa, Severe acute respiratory syndrome coronavirus 2
  REGION 1..13: note = Table B: HLA-DRB1*04:03L HLA-DRB1*04:02L HLA-DRB1*16:01L HLA-DRB1*15:03L
LTKSSEYKGPITD

SEQ ID NO: 12903 - protein, 12 aa, Severe acute respiratory syndrome coronavirus 2
  REGION 1..12: note = Table B: HLA-DRB1*04:03L HLA-DRB1*04:02L HLA-DQA1*03:01-B1*03:02L HLA-DRB1*14:17L
TDVFYKENSYTT

SEQ ID NO: 12904 - protein, 11 aa, Severe acute respiratory syndrome coronavirus 2
  REGION 1..11: note = Table B: HLA-DRB1*04:03L
VFYKENSYTTT

SEQ ID NO: 12905 - protein, 12 aa, Severe acute respiratory syndrome coronavirus 2
  REGION 1..12: note = Table B: HLA-DRB1*04:03L
YKENSYTTTIKP

SEQ ID NO: 12906 - protein, 10 aa, Severe acute respiratory syndrome coronavirus 2
  REGION 1..10: note = Table B: HLA-DRB1*04:03L HLA-DRB1*01:03L HLA-DRB1*04:05L HLA-DQA1*01:02-B1*06:02L HLA-DRB1*01:01L HLA-DQA1*01:01-B1*05:01L HLA-DPA1*02:01-B1*13:01M HLA-DRB1*16:01L HLA-DQA1*01:03-B1*06:01M
  REGION 1..10: note = CONT. FROM ABOVE: HLA-DQA1*02:01-B1*03:03L HLA-DRB1*15:03L
NYYKKDNSYF

SEQ ID NO: 12907 - protein, 14 aa, Severe acute respiratory syndrome coronavirus 2
  REGION 1..14: note = Table B: HLA-DRB1*04:03L HLA-DRB1*04:02L HLA-DRB1*04:05L HLA-DRB1*01:02L HLA-DQA1*01:01-B1*05:01L HLA-DRB1*12:01L HLA-DPA1*03:01-B1*105:01L HLA-DRB1*04:08L
YKKDNSYFTEQPID

SEQ ID NO: 12908 - protein, 12 aa, Severe acute respiratory syndrome coronavirus 2
  REGION 1..12: note = Table B: HLA-DRB1*04:03L HLA-DRB1*13:03L HLA-DRB1*04:02L HLA-DQA1*01:02-B1*06:02L HLA-DRB4*03:01NL HLA-DRB3*02:01L HLA-DPA1*03:01-B1*04:02L HLA-DPA1*01:03-B1*04:01L HLA-DRB1*09:01L HLA-DRB1*12:01L HLA-DPA1*03:01-B1*105:01L
  REGION 1..12: note = CONT. FROM ABOVE: HLA-DPA1*01:02-B1*04:01L
DNSYFTEQPIDL

SEQ ID NO: 12909 - protein, 10 aa, Severe acute respiratory syndrome coronavirus 2
  REGION 1..10: note = Table B: HLA-DRB1*04:03L
TEQPIDLVPN

SEQ ID NO: 12910 - protein, 11 aa, Severe acute respiratory syndrome coronavirus 2
  REGION 1..11: note = Table B: HLA-DRB1*04:03L
PIDLVPNQPYP

SEQ ID NO: 12911 - protein, 10 aa, Severe acute respiratory syndrome coronavirus 2
  REGION 1..10: note = Table B: HLA-DRB1*04:03L HLA-DRB1*13:03L HLA-DRB1*04:02L HLA-DQA1*03:01-B1*03:02L HLA-DRB1*14:17L
VPNQPYPNAS

SEQ ID NO: 12912 - protein, 10 aa, Severe acute respiratory syndrome coronavirus 2
  REGION 1..10: note = Table B: HLA-DRB1*04:03L HLA-DQA1*01-B1*05L HLA-DQA1*03:01-B1*03:02L HLA-DQA1*02:01-B1*03:03L
QPYPNASFDN

SEQ ID NO: 12913 - protein, 10 aa, Severe acute respiratory syndrome coronavirus 2
  REGION 1..10: note = Table B: HLA-DRB1*04:03L HLA-DRB1*01:03L HLA-DRB1*04:05M HLA-DQA1*01:02-B1*06:02L HLA-DRB1*01:01L HLA-DRB1*01:02L HLA-DQA1*01:01-B1*05:01L HLA-DPA1*02:01-B1*13:01M HLA-DPA1*03:01-B1*105:01L HLA-DRB1*16:01L
  REGION 1..10: note = CONT. FROM ABOVE: HLA-DQA1*01:03-B1*06:01M HLA-DRB1*15:03L
PYPNASFDNF

SEQ ID NO: 12914 - protein, 10 aa, Severe acute respiratory syndrome coronavirus 2
  REGION 1..10: note = Table B: HLA-DRB1*04:03L HLA-DQA1*01-B1*05L
NIKFADDLNQ

SEQ ID NO: 12915 - protein, 12 aa, Severe acute respiratory syndrome coronavirus 2
  REGION 1..12: note = Table B: HLA-DRB1*04:03L HLA-DRB1*01:03L HLA-DRB1*04:02L HLA-DRB1*01:02L HLA-DRB1*14:01L HLA-DRB1*12:01L HLA-DRB1*14:17L HLA-DRB1*16:01L HLA-DRB1*04:08L HLA-DQA1*02:01-B1*03:03L HLA-DRB1*15:03L
DLNQLTGYKKPA

SEQ ID NO: 12916 - protein, 11 aa, Severe acute respiratory syndrome coronavirus 2
  REGION 1..11: note = Table B: HLA-DRB1*04:03L HLA-DRB1*13:03L HLA-DRB1*04:02L HLA-DRB1*14:01L HLA-DQA1*03:01-B1*03:02L HLA-DRB1*14:17L HLA-DRB1*16:01L HLA-DQA1*02:01-B1*03:03L
NQLTGYKKPAS

SEQ ID NO: 12917 - protein, 11 aa, Severe acute respiratory syndrome coronavirus 2
  REGION 1..11: note = Table B: HLA-DRB1*04:03L
LKVTFFPDLNG

SEQ ID NO: 12918 - protein, 11 aa, Severe acute respiratory syndrome coronavirus 2
  REGION 1..11: note = Table B: HLA-DRB1*04:03L HLA-DRB1*13:03L HLA-DRB1*01:03L HLA-DRB1*04:02L HLA-DRB1*04:05L HLA-DRB4*03:01NL HLA-DRB1*14:54L HLA-DRB1*14:17L HLA-DRB1*16:01L
FFPDLNGDVVA

SEQ ID NO: 12919 - protein, 12 aa, Severe acute respiratory syndrome coronavirus 2
  REGION 1..12: note = Table B: HLA-DRB1*04:03L HLA-DRB1*04:02L HLA-DRB1*14:54L HLA-DRB1*14:17L
GDVVAIDYKHYT

SEQ ID NO: 12920 - protein, 12 aa, Severe acute respiratory syndrome coronavirus 2
  REGION 1..12: note = Table B: HLA-DRB1*04:03L HLA-DRB1*04:02L HLA-DRB1*01:02L HLA-DRB1*08:04L HLA-DRB3*01:01L HLA-DRB1*14:54L HLA-DRB1*14:17L
DVVAIDYKHYTP

SEQ ID NO: 12921 - protein, 11 aa, Severe acute respiratory syndrome coronavirus 2
  REGION 1..11: note = Table B: HLA-DRB1*04:03L HLA-DRB1*13:02L HLA-DRB1*13:03L HLA-DRB1*01:03L HLA-DRB1*04:02L HLA-DRB4*03:01NL HLA-DRB1*14:01L HLA-DRB1*12:01L HLA-DQA1*03:01-B1*03:02L HLA-DRB1*14:54L HLA-DRB1*14:17L HLA-DPA1*01:02-B1*04:01L HLA-DRB1*16:01L
  REGION 1..11: note = CONT. FROM ABOVE: HLA-DRB1*04:08L
VAIDYKHYTPS

SEQ ID NO: 12922 - protein, 11 aa, Severe acute respiratory syndrome coronavirus 2
  REGION 1..11: note = Table B: HLA-DRB1*04:03L HLA-DRB1*04:02L HLA-DQA1*03:01-B1*03:02L HLA-DRB1*14:17L
PIVWHVNNATN

SEQ ID NO: 12923 - protein, 10 aa, Severe acute respiratory syndrome coronavirus 2
  REGION 1..10: note = Table B: HLA-DRB1*04:03L HLA-DRB1*01:03L HLA-DRB1*04:02L HLA-DQA1*03:01-B1*03:02L HLA-DRB1*14:17L HLA-DRB1*16:01L HLA-DQA1*02:01-B1*03:03L
TNKATYKPNT

SEQ ID NO: 12924 - protein, 10 aa, Severe acute respiratory syndrome coronavirus 2
  REGION 1..10: note = Table B: HLA-DRB1*04:03L HLA-DQA1*03:01-B1*03:02L
KPVETSNSFD

SEQ ID NO: 12925 - protein, 10 aa, Severe acute respiratory syndrome coronavirus 2
  REGION 1..10: note = Table B: HLA-DRB1*04:03L HLA-DQA1*03:01-B1*03:02L HLA-DRB1*14:17L
SFDVLKSEDA

SEQ ID NO: 12926 - protein, 10 aa, Severe acute respiratory syndrome coronavirus 2
  REGION 1..10: note = Table B: HLA-DRB1*04:03L HLA-DRB1*14:17L
FDVLKSEDAQ

SEQ ID NO: 12927 - protein, 10 aa, Severe acute respiratory syndrome coronavirus 2
  REGION 1..10: note = Table B: HLA-DRB1*04:03L HLA-DRB1*04:02L HLA-DQA1*01-B1*05L HLA-DQA1*03:01-B1*03:02L HLA-DRB1*14:17L HLA-DQA1*02:01-B1*03:03L
DVLKSEDAQG

SEQ ID NO: 12928 - protein, 11 aa, Severe acute respiratory syndrome coronavirus 2
  REGION 1..11: note = Table B: HLA-DRB1*04:03L HLA-DRB1*04:02L HLA-DRB1*04:05L HLA-DRB4*03:01NL HLA-DQA1*01-B1*05L HLA-DQA1*05:01-B1*02:01L HLA-DQA1*03:01-B1*03:02L HLA-DRB1*14:17L HLA-DRB1*16:01L HLA-DQA1*01:03-B1*06:01L HLA-DQA1*02:01-B1*03:03L
VLKSEDAQGMD

SEQ ID NO: 12929 - protein, 10 aa, Severe acute respiratory syndrome coronavirus 2
  REGION 1..10: note = Table B: HLA-DRB1*04:03L HLA-DQA1*01-B1*05L HLA-DQA1*05:01-B1*02:01L HLA-DQA1*03:01-B1*03:02L HLA-DQA1*02:01-B1*03:03L
LKPVSEEVVE

SEQ ID NO: 12930 - protein, 12 aa, Severe acute respiratory syndrome coronavirus 2
  REGION 1..12: note = Table B: HLA-DRB1*04:03L HLA-DRB1*04:05L HLA-DRB1*08:04L HLA-DRB1*11:03L HLA-DRB1*04:10L HLA-DPA1*01:02-B1*04:01L HLA-DRB1*07:01L HLA-DRB1*10:01L HLA-DRB1*04:08L
SEEVVENPTIQK

SEQ ID NO: 12931 - protein, 12 aa, Severe acute respiratory syndrome coronavirus 2
  REGION 1..12: note = Table B: HLA-DRB1*04:03L HLA-DQA1*01:01-B1*05:01L HLA-DRB1*12:01L
VENPTIQKDVLE

SEQ ID NO: 12932 - protein, 14 aa, Severe acute respiratory syndrome coronavirus 2
  REGION 1..14: note = Table B: HLA-DRB1*04:03L HLA-DRB1*13:02L HLA-DRB1*01:03L HLA-DRB1*04:05L HLA-DQA1*01:02-B1*06:02L HLA-DRB1*01:02L HLA-DRB1*03:01L HLA-DRB1*14:01L HLA-DRB1*14:02L HLA-DRB1*08:01L HLA-DRB1*12:01L HLA-DRB3*01:01L HLA-DPA1*02:01-B1*13:01L
  REGION 1..14: note = CONT. FROM ABOVE: HLA-DPA1*03:01-B1*105:01L HLA-DPA1*01:02-B1*04 :01L HLA-DRB1*16:01L HLA-DQA1*01:03-B1*06:01L HLA-DRB1*04:08L HL A-DRB1*15:03L
NPTIQKDVLECNVK

SEQ ID NO: 12933 - protein, 12 aa, Severe acute respiratory syndrome coronavirus 2
  REGION 1..12: note = Table B: HLA-DRB1*04:03L
TTEVVGDIILKP

SEQ ID NO: 12934 - protein, 12 aa, Severe acute respiratory syndrome coronavirus 2
  REGION 1..12: note = Table B: HLA-DRB1*04:03L HLA-DRB1*04:02L
TEVVGDIILKPA

SEQ ID NO: 12935 - protein, 10 aa, Severe acute respiratory syndrome coronavirus 2
  REGION 1..10: note = Table B: HLA-DRB1*04:03L HLA-DRB1*04:02L HLA-DQA1*03:01-B1*03:02L HLA-DRB1*14:17L HLA-DQA1*02:01-B1*03:03L
DIILKPANNS

SEQ ID NO: 12936 - protein, 10 aa, Severe acute respiratory syndrome coronavirus 2
  REGION 1..10: note = Table B: HLA-DRB1*04:03L HLA-DRB1*04:02L HLA-DQA1*03:01-B1*03:02L HLA-DRB1*14:17L
ILKPANNSLK

SEQ ID NO: 12937 - protein, 12 aa, Severe acute respiratory syndrome coronavirus 2
  REGION 1..12: note = Table B: HLA-DRB1*04:03L HLA-DQA1*01:02-B1*06:02L HLA-DRB1*15:03L
NSLKITEEVGHT

SEQ ID NO: 12938 - protein, 10 aa, Severe acute respiratory syndrome coronavirus 2
  REGION 1..10: note = Table B: HLA-DRB1*04:03L HLA-DRB1*04:02L HLA-DQA1*03:01-B1*03:02L HLA-DRB1*14:17L HLA-DRB1*16:01L HLA-DQA1*01:03-B1*06:01L HLA-DQA1*02:01-B1*03:03L
KITEEVGHTD

SEQ ID NO: 12939 - protein, 11 aa, Severe acute respiratory syndrome coronavirus 2
  REGION 1..11: note = Table B: HLA-DRB1*04:03L HLA-DQA1*05:01-B1*02:01L HLA-DQA1*03:01-B1*03:02L HLA-DQA1*01:03-B1*06:01L
DLMAAYVDNSS

SEQ ID NO: 12940 - protein, 10 aa, Severe acute respiratory syndrome coronavirus 2
  REGION 1..10: note = Table B: HLA-DRB1*04:03L HLA-DQA1*01-B1*05L
AAYVDNSSLT

SEQ ID NO: 12941 - protein, 10 aa, Severe acute respiratory syndrome coronavirus 2
  REGION 1..10: note = Table B: HLA-DRB1*04:03L HLA-DRB1*04:02L HLA-DRB4*03:01NL HLA-DQA1*03:01-B1*03:02L HLA-DRB1*14:17L HLA-DQA1*01:03-B1*06:01L HLA-DQA1*02:01-B1*03:03L
NSSLTIKKPN

SEQ ID NO: 12942 - protein, 10 aa, Severe acute respiratory syndrome coronavirus 2
  REGION 1..10: note = Table B: HLA-DRB1*04:03L HLA-DRB1*04:02L HLA-DQA1*03:01-B1*03:02L HLA-DRB1*14:17L HLA-DQA1*01:03-B1*06:01L HLA-DQA1*02:01-B1*03:03L
SSLTIKKPNE

SEQ ID NO: 12943 - protein, 10 aa, Severe acute respiratory syndrome coronavirus 2
  REGION 1..10: note = Table B: HLA-DRB1*04:03L HLA-DRB1*04:02L HLA-DRB1*14:17L
VLGLKTLATH

SEQ ID NO: 12944 - protein, 11 aa, Severe acute respiratory syndrome coronavirus 2
  REGION 1..11: note = Table B: HLA-DRB1*04:03L HLA-DRB1*01:02L HLA-DRB1*15:03L
GLKTLATHGLA

SEQ ID NO: 12945 - protein, 11 aa, Severe acute respiratory syndrome coronavirus 2
  REGION 1..11: note = Table B: HLA-DRB1*04:03L HLA-DRB1*01:02L HLA-DRB1*14:17L
LKTLATHGLAA

SEQ ID NO: 12946 - protein, 12 aa, Severe acute respiratory syndrome coronavirus 2
  REGION 1..12: note = Table B: HLA-DRB1*04:03L
TLATHGLAAVNS

SEQ ID NO: 12947 - protein, 11 aa, Severe acute respiratory syndrome coronavirus 2
  REGION 1..11: note = Table B: HLA-DRB1*04:03L HLA-DQA1*05:01-B1*02:01L HLA-DRB1*12:01L HLA-DQA1*03:01-B1*03:02L
GLAAVNSVPWD

SEQ ID NO: 12948 - protein, 11 aa, Severe acute respiratory syndrome coronavirus 2
  REGION 1..11: note = Table B: HLA-DRB1*04:03L HLA-DQA1*02:01-B1*03:03L
LAAVNSVPWDT

SEQ ID NO: 12949 - protein, 10 aa, Severe acute respiratory syndrome coronavirus 2
  REGION 1..10: note = Table B: HLA-DRB1*04:03L HLA-DRB1*04:02L HLA-DQA1*01-B1*05L HLA-DQA1*03:01-B1*03:02L HLA-DQA1*02:01-B1*03:03L
IANYAKPFLN

SEQ ID NO: 12950 - protein, 10 aa, Severe acute respiratory syndrome coronavirus 2
  REGION 1..10: note = Table B: HLA-DRB1*04:03L HLA-DQA1*03:01-B1*03:02L HLA-DRB1*14:17L HLA-DQA1*02:01-B1*03:03L
LNKVVSTTTN

SEQ ID NO: 12951 - protein, 11 aa, Severe acute respiratory syndrome coronavirus 2
  REGION 1..11: note = Table B: HLA-DRB1*04:03L HLA-DRB1*12:01L HLA-DRB1*16:01L
NKVVSTTTNIV

SEQ ID NO: 12952 - protein, 13 aa, Severe acute respiratory syndrome coronavirus 2
  REGION 1..13: note = Table B: HLA-DRB1*04:03L HLA-DQA1*01:02-B1*06:02L HLA-DRB4*03:01NL HLA-DRB1*08:77L HLA-DPA1*01:03-B1*03:01L HLA-DPA1*03:01-B1*04:02L HLA-DRB1*09:01L HLA-DRB1*12:02L HLA-DPA1*03:01-B1*105:01L
NSRIKASMPTTIA

SEQ ID NO: 12953 - protein, 10 aa, Severe acute respiratory syndrome coronavirus 2
  REGION 1..10: note = Table B: HLA-DRB1*04:03L HLA-DRB1*04:02L HLA-DQA1*03:01-B1*03:02L HLA-DRB1*14:17L
SMPTTIAKNT

SEQ ID NO: 12954 - protein, 10 aa, Severe acute respiratory syndrome coronavirus 2
  REGION 1..10: note = Table B: HLA-DRB1*04:03L HLA-DRB1*13:03L HLA-DRB1*01:03L HLA-DQA1*03:01-B1*03:02L HLA-DRB1*14:17L HLA-DRB1*16:01L HLA-DQA1*02:01-B1*03:03L
NYLKSPNFSK

SEQ ID NO: 12955 - protein, 12 aa, Severe acute respiratory syndrome coronavirus 2
  REGION 1..12: note = Table B: HLA-DRB1*04:03L HLA-DRB1*13:02L HLA-DRB1*01:02L HLA-DRB3*02:01L HLA-DPA1*01:03-B1*03:01L HLA-DPA1*03:01-B1*04:02L HLA-DRB1*14:01L HLA-DRB1*12:01L HLA-DQA1*05:05-B1*03:01L HLA-DRB1*16:01L HLA-DRB1*15:03L
SPNFSKLINIII

SEQ ID NO: 12956 - protein, 11 aa, Severe acute respiratory syndrome coronavirus 2
  REGION 1..11: note = Table B: HLA-DRB1*04:03L HLA-DRB1*14:17L
GSLIYSTAALG

SEQ ID NO: 12957 - protein, 11 aa, Severe acute respiratory syndrome coronavirus 2
  REGION 1..11: note = Table B: HLA-DRB1*04:03L HLA-DQA1*01:02-B1*06:02L HLA-DQA1*05:05-B1*03:01L HLA-DRB1*14:17L HLA-DQA1*01:03-B1*06:01L
AALGVLMSNLG

SEQ ID NO: 12958 - protein, 10 aa, Severe acute respiratory syndrome coronavirus 2
  REGION 1..10: note = Table B: HLA-DRB1*04:03L HLA-DRB1*14:17L
VLMSNLGMPS

SEQ ID NO: 12959 - protein, 10 aa, Severe acute respiratory syndrome coronavirus 2
  REGION 1..10: note = Table B: HLA-DRB1*04:03L HLA-DRB1*14:17L
YLNSTNVTIA

SEQ ID NO: 12960 - protein, 13 aa, Severe acute respiratory syndrome coronavirus 2
  REGION 1..13: note = Table B: HLA-DRB1*04:03L HLA-DQA1*01:02-B1*06:02L HLA-DRB1*01:02L HLA-DQA1*05:05-B1*03:19L HLA-DQA1*05:01-B1*02:01L HLA-DRB1*12:01L HLA-DPA1*03:01-B1*105:01L HLA-DQA1*05:05-B1*03:01L
  REGION 1..13: note = CONT. FROM ABOVE: HLA-DRB1*14:17L HLA-DQA1*01:03-B1*06:01L HLA-D QA1*02:01-B1*03:03L HLA-DRB1*15:03L
NVTIATYCTGSIP

SEQ ID NO: 12961 - protein, 12 aa, Severe acute respiratory syndrome coronavirus 2
  REGION 1..12: note = Table B: HLA-DRB1*04:03L HLA-DRB1*04:02L HLA-DRB1*04:05L HLA-DRB4*03:01NL HLA-DQA1*01-B1*05L HLA-DQA1*05:01-B1*02:01L HLA-DRB1*04:10L HLA-DQA1*03:01-B1*03:02L HLA-DRB1*14:54L HLA-DRB1*14:17L HLA-DRB1*16:01L HLA-DQA1*02:01-B1*03:03L
LSGLDSLDTYPS

SEQ ID NO: 12962 - protein, 12 aa, Severe acute respiratory syndrome coronavirus 2
  REGION 1..12: note = Table B: HLA-DRB1*04:03L HLA-DRB1*14:17L
SGLDSLDTYPSL

SEQ ID NO: 12963 - protein, 11 aa, Severe acute respiratory syndrome coronavirus 2
  REGION 1..11: note = Table B: HLA-DRB1*04:03L HLA-DRB1*04:02L HLA-DRB1*04:05L HLA-DQA1*01-B1*05L HLA-DQA1*05:01-B1*02:01L HLA-DRB1*04:10L HLA-DQA1*03:01-B1*03:02L HLA-DRB1*14:17L HLA-DRB1*16:01L
LDSLDTYPSLE

SEQ ID NO: 12964 - protein, 11 aa, Severe acute respiratory syndrome coronavirus 2
  REGION 1..11: note = Table B: HLA-DRB1*04:03L HLA-DRB1*04:02L HLA-DQA1*01-B1*05L HLA-DRB1*14:17L
DSLDTYPSLET

SEQ ID NO: 12965 - protein, 11 aa, Severe acute respiratory syndrome coronavirus 2
  REGION 1..11: note = Table B: HLA-DRB1*04:03L HLA-DRB1*04:02L HLA-DQA1*02:01-B1*03:03L
LDTYPSLETIQ

SEQ ID NO: 12966 - protein, 13 aa, Severe acute respiratory syndrome coronavirus 2
  REGION 1..13: note = Table B: HLA-DRB1*04:03L HLA-DQA1*01:02-B1*06:02L HLA-DQA1*01:03-B1*06:01L
YPSLETIQITISS

SEQ ID NO: 12967 - protein, 12 aa, Severe acute respiratory syndrome coronavirus 2
  REGION 1..12: note = Table B: HLA-DRB1*04:03L
LETIQITISSFK

SEQ ID NO: 12968 - protein, 11 aa, Severe acute respiratory syndrome coronavirus 2
  REGION 1..11: note = Table B: HLA-DRB1*04:03L HLA-DRB1*04:05L HLA-DQA1*01-B1*05L HLA-DRB1*14:17L
SSFKWDLTAFG

SEQ ID NO: 12969 - protein, 10 aa, Severe acute respiratory syndrome coronavirus 2
  REGION 1..10: note = Table B: HLA-DRB1*04:03L HLA-DRB1*01:03L HLA-DRB1*04:05L HLA-DQA1*01:02-B1*06:02L HLA-DRB1*01:01L HLA-DPA1*03:01-B1*04:02L HLA-DRB1*14:02L HLA-DQA1*05:05-B1*03:19L HLA-DQA1*05:01-B1*02:01L
  REGION 1..10: note = CONT. FROM ABOVE: HLA-DRB4*01:01L HLA-DPA1*01:03-B1*04:01L HLA-D PA1*02:01-B1*13:01M HLA-DPA1*01:03-B1*104:01L HLA-DRB1*16:01L HL A-DQA1*01:03-B1*06:01M HLA-DQA1*02:01-B1*03:03L HLA-DRB1*15:03L
AYILFTRFFY

SEQ ID NO: 12970 - protein, 10 aa, Severe acute respiratory syndrome coronavirus 2
  REGION 1..10: note = Table B: HLA-DRB1*04:03L HLA-DRB1*04:05L HLA-DQA1*01:02-B1*06:02L HLA-DPA1*02:01-B1*13:01M HLA-DQA1*01:03-B1*06:01L HLA-DRB1*15:03L
LFFSYFAVHF

SEQ ID NO: 12971 - protein, 10 aa, Severe acute respiratory syndrome coronavirus 2
  REGION 1..10: note = Table B: HLA-DRB1*04:03L HLA-DRB1*01:03L HLA-DRB1*04:05M HLA-DQA1*01:02-B1*06:02L HLA-DRB1*01:01L HLA-DQA1*01:01-B1*05:01L HLA-DQA1*05:05-B1*03:19L HLA-DRB4*01:01L HLA-DPA1*01:03-B1*04:01L
  REGION 1..10: note = CONT. FROM ABOVE: HLA-DPA1*02:01-B1*13:01M HLA-DPA1*03:01-B1*105 :01L HLA-DRB1*16:01L HLA-DQA1*01:03-B1*06:01M HLA-DQA1*02:01-B1* 03:03L HLA-DRB1*15:03L
HFISNSWLMW

SEQ ID NO: 12972 - protein, 11 aa, Severe acute respiratory syndrome coronavirus 2
  REGION 1..11: note = Table B: HLA-DRB1*04:03L HLA-DRB1*14:17L
INLVQMAPISA

SEQ ID NO: 12973 - protein, 14 aa, Severe acute respiratory syndrome coronavirus 2
  REGION 1..14: note = Table B: HLA-DRB1*04:03L HLA-DRB1*01:01L HLA-DRB1*11:02L HLA-DRB1*11:03L HLA-DRB1*14:02L HLA-DQA1*05:05-B1*03:01L HLA-DRB1*07:01L HLA-DRB1*08:02L HLA-DRB1*08:03L
SFYYVWKSYVHVVD

SEQ ID NO: 12974 - protein, 11 aa, Severe acute respiratory syndrome coronavirus 2
  REGION 1..11: note = Table B: HLA-DRB1*04:03L
VHVVDGCNSST

SEQ ID NO: 12975 - protein, 11 aa, Severe acute respiratory syndrome coronavirus 2
  REGION 1..11: note = Table B: HLA-DRB1*04:03L
GSTFISDEVAR

SEQ ID NO: 12976 - protein, 11 aa, Severe acute respiratory syndrome coronavirus 2
  REGION 1..11: note = Table B: HLA-DRB1*04:03L HLA-DRB1*04:05L HLA-DRB3*02:01L HLA-DRB1*09:01L HLA-DPA1*01:03-B1*104:01L HLA-DRB1*08:02L
DEVARDLSLQF

SEQ ID NO: 12977 - protein, 11 aa, Severe acute respiratory syndrome coronavirus 2
  REGION 1..11: note = Table B: HLA-DRB1*04:03L HLA-DRB3*01:01L
EVARDLSLQFK

SEQ ID NO: 12978 - protein, 10 aa, Severe acute respiratory syndrome coronavirus 2
  REGION 1..10: note = Table B: HLA-DRB1*04:03L HLA-DRB1*13:03L HLA-DRB1*04:02L HLA-DRB1*04:05L HLA-DRB1*08:01L HLA-DQA1*03:01-B1*03:02L HLA-DQA1*02:01-B1*03:03L
FKRPINPTDQ

SEQ ID NO: 12979 - protein, 11 aa, Severe acute respiratory syndrome coronavirus 2
  REGION 1..11: note = Table B: HLA-DRB1*04:03L HLA-DRB1*13:02L HLA-DRB1*01:03L HLA-DRB1*04:02L HLA-DRB4*03:01NL HLA-DRB1*14:01L HLA-DQA1*01-B1*05L HLA-DQA1*05:01-B1*02:01L HLA-DRB1*12:01L HLA-DRB1*14:54L HLA-DQA1*05:05-B1*03:01L HLA-DRB1*14:17L
  REGION 1..11: note = CONT. FROM ABOVE: HLA-DRB1*16:01L
SSYIVDSVTVK

SEQ ID NO: 12980 - protein, 10 aa, Severe acute respiratory syndrome coronavirus 2
  REGION 1..10: note = Table B: HLA-DRB1*04:03L HLA-DRB1*13:02L HLA-DRB1*13:03L HLA-DRB1*01:03L HLA-DRB1*04:02L HLA-DRB1*04:05L HLA-DRB1*01:02L HLA-DRB4*03:01NL HLA-DRB1*08:77L HLA-DRB1*14:01L HLA-DRB1*14:02L HLA-DQA1*05:01-B1*02:01L HLA-DRB1*12:01L
  REGION 1..10: note = CONT. FROM ABOVE: HLA-DQA1*03:01-B1*03:02L HLA-DRB1*14:54L HLA-D RB1*14:17L HLA-DRB1*16:01L HLA-DRB1*04:08L HLA-DQA1*02:01-B1*03: 03L
YIVDSVTVKN

SEQ ID NO: 12981 - protein, 11 aa, Severe acute respiratory syndrome coronavirus 2
  REGION 1..11: note = Table B: HLA-DRB1*04:03L HLA-DRB1*04:02L HLA-DQA1*01-B1*05L HLA-DRB1*14:17L
GSIHLYFDKAG

SEQ ID NO: 12982 - protein, 11 aa, Severe acute respiratory syndrome coronavirus 2
  REGION 1..11: note = Table B: HLA-DRB1*04:03L HLA-DRB1*01:03L HLA-DRB1*04:02L HLA-DRB1*01:02L HLA-DRB1*14:17L HLA-DRB1*16:01L HLA-DRB1*04:08L HLA-DRB1*15:03L
IHLYFDKAGQK

SEQ ID NO: 12983 - protein, 10 aa, Severe acute respiratory syndrome coronavirus 2
  REGION 1..10: note = Table B: HLA-DRB1*04:03L HLA-DRB1*13:03L HLA-DRB1*01:03L HLA-DRB1*04:02L HLA-DRB1*04:05L HLA-DRB1*01:02L HLA-DRB4*03:01NL HLA-DQA1*01-B1*05L HLA-DRB1*12:01L HLA-DQA1*03:01-B1*03:02L HLA-DRB1*14:17L HLA-DPA1*01:02-B1*04:01L HLA-DRB1*16:01L
  REGION 1..10: note = CONT. FROM ABOVE: HLA-DRB1*04:08L HLA-DQA1*02:01-B1*03:03L
LYFDKAGQKT

SEQ ID NO: 12984 - protein, 11 aa, Severe acute respiratory syndrome coronavirus 2
  REGION 1..11: note = Table B: HLA-DRB1*04:03L HLA-DRB1*13:03L HLA-DRB1*01:03L HLA-DRB1*04:02L HLA-DRB1*04:05L HLA-DRB4*03:01NL HLA-DRB1*04:10L HLA-DRB1*14:54L HLA-DRB1*14:17L HLA-DRB1*16:01L HLA-DRB1*04:08L
SHFVNLDNLRA

SEQ ID NO: 12985 - protein, 10 aa, Severe acute respiratory syndrome coronavirus 2
  REGION 1..10: note = Table B: HLA-DRB1*04:03L HLA-DRB1*04:02L HLA-DRB4*03:01NL HLA-DQA1*03:01-B1*03:02L HLA-DRB1*14:17L
VNLDNLRANN

SEQ ID NO: 12986 - protein, 12 aa, Severe acute respiratory syndrome coronavirus 2
  REGION 1..12: note = Table B: HLA-DRB1*04:03L HLA-DRB1*14:17L
LDNLRANNTKGS

SEQ ID NO: 12987 - protein, 13 aa, Severe acute respiratory syndrome coronavirus 2
  REGION 1..13: note = Table B: HLA-DRB1*04:03L HLA-DRB1*14:01L
DNLRANNTKGSLP

SEQ ID NO: 12988 - protein, 12 aa, Severe acute respiratory syndrome coronavirus 2
  REGION 1..12: note = Table B: HLA-DRB1*04:03L HLA-DQA1*03:01-B1*03:02L
GSLPINVIVFDG

SEQ ID NO: 12989 - protein, 12 aa, Severe acute respiratory syndrome coronavirus 2
  REGION 1..12: note = Table B: HLA-DRB1*04:03L
SLPINVIVFDGK

SEQ ID NO: 12990 - protein, 10 aa, Severe acute respiratory syndrome coronavirus 2
  REGION 1..10: note = Table B: HLA-DRB1*04:03L HLA-DRB1*04:02L HLA-DQA1*03:01-B1*03:02L HLA-DRB1*14:17L HLA-DQA1*02:01-B1*03:03L
NVIVFDGKSK

SEQ ID NO: 12991 - protein, 12 aa, Severe acute respiratory syndrome coronavirus 2
  REGION 1..12: note = Table B: HLA-DRB1*04:03L HLA-DRB1*13:02L HLA-DRB1*13:03L HLA-DRB1*04:02L HLA-DRB1*04:05L HLA-DQA1*01:02-B1*06:02L HLA-DRB1*01:02L HLA-DRB1*08:04L HLA-DRB1*08:77L HLA-DPA1*01:03-B1*03:01L HLA-DPA1*03:01-B1*04:02L
  REGION 1..12: note = CONT. FROM ABOVE: HLA-DRB1*11:03L HLA-DRB1*11:04L HLA-DRB1*14:02 L HLA-DRB1*08:01L HLA-DRB1*11:01L HLA-DQA1*05:01-B1*02:01L HLA-D RB1*12:01L HLA-DPA1*03:01-B1*105:01L HLA-DRB1*14:54L HLA-DRB1*04 :08L HLA-DRB1*15:03L
VIVFDGKSKCEE

SEQ ID NO: 12992 - protein, 15 aa, Severe acute respiratory syndrome coronavirus 2
  REGION 1..15: note = Table B: HLA-DRB1*04:03L HLA-DRB1*01:03L HLA-DPA1*01:03-B1*03:01L HLA-DRB1*16:01L HLA-DRB1*04:08L HLA-DRB1*15:03L
DGKSKCEESSAKSAS

SEQ ID NO: 12993 - protein, 12 aa, Severe acute respiratory syndrome coronavirus 2
  REGION 1..12: note = Table B: HLA-DRB1*04:03L HLA-DPA1*01:03-B1*03:01L
SAKSASVYYSQL

SEQ ID NO: 12994 - protein, 12 aa, Severe acute respiratory syndrome coronavirus 2
  REGION 1..12: note = Table B: HLA-DRB1*04:03L HLA-DRB1*13:02L HLA-DRB1*04:02L HLA-DRB1*14:01L HLA-DQA1*05:01-B1*02:01L HLA-DRB1*12:01L HLA-DRB1*12:02L HLA-DRB1*14:54L HLA-DRB1*14:17L HLA-DRB1*16:01L HLA-DRB1*15:03L
QPILLLDQALVS

SEQ ID NO: 12995 - protein, 12 aa, Severe acute respiratory syndrome coronavirus 2
  REGION 1..12: note = Table B: HLA-DRB1*04:03L HLA-DRB1*15:03L
PILLLDQALVSD

SEQ ID NO: 12996 - protein, 12 aa, Severe acute respiratory syndrome coronavirus 2
  REGION 1..12: note = Table B: HLA-DRB1*04:03L HLA-DRB1*04:02L HLA-DQA1*01:02-B1*06:02L HLA-DQA1*01-B1*05L HLA-DQA1*05:01-B1*02:01L HLA-DPA1*03:01-B1*105:01L HLA-DQA1*03:01-B1*03:02L HLA-DRB1*14:17L HLA-DRB1*16:01L
  REGION 1..12: note = CONT. FROM ABOVE: HLA-DQA1*02:01-B1*03:03L
LLLDQALVSDVG

SEQ ID NO: 12997 - protein, 12 aa, Severe acute respiratory syndrome coronavirus 2
  REGION 1..12: note = Table B: HLA-DRB1*04:03L HLA-DQA1*01-B1*05L HLA-DQA1*05:01-B1*02:01L
DQALVSDVGDSA

SEQ ID NO: 12998 - protein, 11 aa, Severe acute respiratory syndrome coronavirus 2
  REGION 1..11: note = Table B: HLA-DRB1*04:03L HLA-DQA1*01-B1*05L HLA-DQA1*05:01-B1*02:01L
ALVSDVGDSAE

SEQ ID NO: 12999 - protein, 12 aa, Severe acute respiratory syndrome coronavirus 2
  REGION 1..12: note = Table B: HLA-DRB1*04:03L
SAEVAVKMFDAY

SEQ ID NO: 13000 - protein, 11 aa, Severe acute respiratory syndrome coronavirus 2
  REGION 1..11: note = Table B: HLA-DRB1*04:03L HLA-DRB1*04:02L HLA-DQA1*01:02-B1*06:02L HLA-DQA1*01-B1*05L HLA-DQA1*05:01-B1*02:01L HLA-DQA1*03:01-B1*03:02L HLA-DRB1*14:17L HLA-DQA1*01:03-B1*06:01L
  REGION 1..11: note = CONT. FROM ABOVE: HLA-DQA1*02:01-B1*03:03L
VAVKMFDAYVN

SEQ ID NO: 13001 - protein, 10 aa, Severe acute respiratory syndrome coronavirus 2
  REGION 1..10: note = Table B: HLA-DRB1*04:03L HLA-DQA1*01-B1*05L
VKMFDAYVNT

SEQ ID NO: 13002 - protein, 11 aa, Severe acute respiratory syndrome coronavirus 2
  REGION 1..11: note = Table B: HLA-DRB1*04:03L HLA-DQA1*01-B1*05L HLA-DRB1*14:17L
FDAYVNTFSST

SEQ ID NO: 13003 - protein, 10 aa, Severe acute respiratory syndrome coronavirus 2
  REGION 1..10: note = Table B: HLA-DRB1*04:03L HLA-DRB1*01:03L HLA-DRB1*04:05M HLA-DQA1*01:02-B1*06:02L HLA-DRB1*01:01L HLA-DRB1*01:02L HLA-DRB1*08:77L HLA-DRB1*11:03L HLA-DRB1*14:02L HLA-DQA1*01:01-B1*05:01L HLA-DRB1*11:01L HLA-DRB4*01:01L
  REGION 1..10: note = CONT. FROM ABOVE: HLA-DPA1*02:01-B1*13:01M HLA-DPA1*03:01-B1*105 :01L HLA-DRB1*16:01L HLA-DQA1*01:03-B1*06:01M HLA-DQA1*02:01-B1* 03:03L HLA-DRB1*15:03L
AYVNTFSSTF

SEQ ID NO: 13004 - protein, 13 aa, Severe acute respiratory syndrome coronavirus 2
  REGION 1..13: note = Table B: HLA-DRB1*04:03L HLA-DRB1*04:02L HLA-DRB1*12:01L HLA-DRB1*14:17L
NVPMEKLKTLVAT

SEQ ID NO: 13005 - protein, 13 aa, Severe acute respiratory syndrome coronavirus 2
  REGION 1..13: note = Table B: HLA-DRB1*04:03L HLA-DRB1*14:17L
VPMEKLKTLVATA

SEQ ID NO: 13006 - protein, 12 aa, Severe acute respiratory syndrome coronavirus 2
  REGION 1..12: note = Table B: HLA-DRB1*04:03L
EKLKTLVATAEA

SEQ ID NO: 13007 - protein, 11 aa, Severe acute respiratory syndrome coronavirus 2
  REGION 1..11: note = Table B: HLA-DRB1*04:03L HLA-DQA1*03:01-B1*03:02L
LKTLVATAEAE

SEQ ID NO: 13008 - protein, 12 aa, Severe acute respiratory syndrome coronavirus 2
  REGION 1..12: note = Table B: HLA-DRB1*04:03L HLA-DRB1*16:01L HLA-DQA1*01:03-B1*06:01L HLA-DRB1*15:03L
KTLVATAEAELA

SEQ ID NO: 13009 - protein, 11 aa, Severe acute respiratory syndrome coronavirus 2
  REGION 1..11: note = Table B: HLA-DRB1*04:03L HLA-DQA1*01-B1*05L HLA-DRB1*14:17L
KNVSLDNVLST

SEQ ID NO: 13010 - protein, 10 aa, Severe acute respiratory syndrome coronavirus 2
  REGION 1..10: note = Table B: HLA-DRB1*04:03L HLA-DRB1*01:03L HLA-DRB1*04:05M HLA-DQA1*01:02-B1*06:02L HLA-DRB1*01:01L HLA-DRB1*01:02L HLA-DRB1*08:77L HLA-DRB1*11:03L HLA-DRB1*14:02L HLA-DQA1*01:01-B1*05:01L HLA-DRB1*11:01L
  REGION 1..10: note = CONT. FROM ABOVE: HLA-DQA1*05:05-B1*03:19L HLA-DRB4*01:01L HLA-D PA1*01:03-B1*04:01L HLA-DQA1*05:05-B1*03:116L HLA-DPA1*02:01-B1* 13:01M HLA-DPA1*03:01-B1*105:01L HLA-DRB1*16:01L HLA-DQA1*01:03- B1*06:01M HLA-DQA1*02:01-B1*03:03L HLA-DRB1*15:03L
TFISAARQGF

SEQ ID NO: 13011 - protein, 10 aa, Severe acute respiratory syndrome coronavirus 2
  REGION 1..10: note = Table B: HLA-DRB1*04:03L HLA-DRB1*13:02L HLA-DRB1*13:03L HLA-DRB1*04:02L HLA-DRB4*03:01NL HLA-DQA1*01-B1*05L HLA-DQA1*05:01-B1*02:01L HLA-DRB1*12:01L HLA-DQA1*03:01-B1*03:02L HLA-DQA1*05:05-B1*03:01L
  REGION 1..10: note = CONT. FROM ABOVE: HLA-DRB1*14:17L HLA-DRB1*16:01L HLA-DQA1*02:01 -B1*03:03L
GFVDSDVETK

SEQ ID NO: 13012 - protein, 13 aa, Severe acute respiratory syndrome coronavirus 2
  REGION 1..13: note = Table B: HLA-DRB1*04:03L
QSDIEVTGDSCNN

SEQ ID NO: 13013 - protein, 10 aa, Severe acute respiratory syndrome coronavirus 2
  REGION 1..10: note = Table B: HLA-DRB1*04:03L HLA-DRB1*04:02L HLA-DQA1*01-B1*05L HLA-DQA1*03:01-B1*03:02L HLA-DRB1*14:17L HLA-DPA1*01:02-B1*04:01L HLA-DQA1*02:01-B1*03:03L
YMLTYNKVEN

SEQ ID NO: 13014 - protein, 10 aa, Severe acute respiratory syndrome coronavirus 2
  REGION 1..10: note = Table B: HLA-DRB1*04:03L HLA-DRB1*13:03L HLA-DRB1*01:03L HLA-DRB1*04:02L HLA-DQA1*03:01-B1*03:02L HLA-DRB1*14:17L HLA-DQA1*02:01-B1*03:03L
YNKVENMTPR

SEQ ID NO: 13015 - protein, 10 aa, Severe acute respiratory syndrome coronavirus 2
  REGION 1..10: note = Table B: HLA-DRB1*04:03L HLA-DQA1*03:01-B1*03:02L HLA-DQA1*02:01-B1*03:03L
AQVAKSHNIA

SEQ ID NO: 13016 - protein, 10 aa, Severe acute respiratory syndrome coronavirus 2
  REGION 1..10: note = Table B: HLA-DRB1*04:03L HLA-DQA1*01:02-B1*06:02L
NIALIWNVKD

SEQ ID NO: 13017 - protein, 12 aa, Severe acute respiratory syndrome coronavirus 2
  REGION 1..12: note = Table B: HLA-DRB1*04:03L HLA-DRB1*04:02L HLA-DRB1*04:05L HLA-DQA1*01:02-B1*06:02L HLA-DRB1*01:02L HLA-DRB1*12:01L HLA-DRB1*16:01L HLA-DRB1*04:08L HLA-DRB1*15:03L
VKDFMSLSEQLR

SEQ ID NO: 13018 - protein, 13 aa, Severe acute respiratory syndrome coronavirus 2
  REGION 1..13: note = Table B: HLA-DRB1*04:03L HLA-DRB1*13:03L HLA-DRB1*04:02L HLA-DRB1*04:04L HLA-DRB1*04:05L HLA-DQA1*01:02-B1*06:02L HLA-DRB1*14:01L HLA-DRB1*12:01L HLA-DRB3*01:01L HLA-DRB1*15:03L
EQLRKQIRSAAKK

SEQ ID NO: 13019 - protein, 12 aa, Severe acute respiratory syndrome coronavirus 2
  REGION 1..12: note = Table B: HLA-DRB1*04:03L HLA-DQA1*03:01-B1*03:02L HLA-DRB1*14:17L HLA-DQA1*02:01-B1*03:03L
ATTRQVVNVVTT

SEQ ID NO: 13020 - protein, 12 aa, Severe acute respiratory syndrome coronavirus 2
  REGION 1..12: note = Table B: HLA-DRB1*04:03L
TTRQVVNVVTTK

SEQ ID NO: 13021 - protein, 12 aa, Severe acute respiratory syndrome coronavirus 2
  REGION 1..12: note = Table B: HLA-DRB1*04:03L
TRQVVNVVTTKI

SEQ ID NO: 13022 - protein, 10 aa, Severe acute respiratory syndrome coronavirus 2
  REGION 1..10: note = Table B: HLA-DRB1*04:03L HLA-DRB1*04:02L HLA-DQA1*03:01-B1*03:02L HLA-DRB1*14:17L HLA-DQA1*01:03-B1*06:01L HLA-DQA1*02:01-B1*03:03L
VVTTKIALKG

SEQ ID NO: 13023 - protein, 11 aa, Severe acute respiratory syndrome coronavirus 2
  REGION 1..11: note = Table B: HLA-DRB1*04:03L
AAIFYLITPVH

SEQ ID NO: 13024 - protein, 11 aa, Severe acute respiratory syndrome coronavirus 2
  REGION 1..11: note = Table B: HLA-DRB1*04:03L HLA-DQA1*03:01-B1*03:02L
VMSKHTDFSSE

SEQ ID NO: 13025 - protein, 11 aa, Severe acute respiratory syndrome coronavirus 2
  REGION 1..11: note = Table B: HLA-DRB1*04:03L HLA-DQA1*01:01-B1*05:01L
TDFSSEIIGYK

SEQ ID NO: 13026 - protein, 11 aa, Severe acute respiratory syndrome coronavirus 2
  REGION 1..11: note = Table B: HLA-DRB1*04:03L HLA-DRB1*04:02L HLA-DQA1*01-B1*05L
SSEIIGYKAID

SEQ ID NO: 13027 - protein, 10 aa, Severe acute respiratory syndrome coronavirus 2
  REGION 1..10: note = Table B: HLA-DRB1*04:03L HLA-DRB1*04:02L HLA-DQA1*01-B1*05L HLA-DQA1*03:01-B1*03:02L HLA-DRB1*14:17L HLA-DQA1*01:03-B1*06:01L HLA-DQA1*02:01-B1*03:03L
EIIGYKAIDG

SEQ ID NO: 13028 - protein, 10 aa, Severe acute respiratory syndrome coronavirus 2
  REGION 1..10: note = Table B: HLA-DRB1*04:03L HLA-DRB1*04:02L HLA-DQA1*01-B1*05L HLA-DRB1*14:17L HLA-DRB1*16:01L
IIGYKAIDGG

SEQ ID NO: 13029 - protein, 10 aa, Severe acute respiratory syndrome coronavirus 2
  REGION 1..10: note = Table B: HLA-DRB1*04:03L HLA-DRB1*13:02L HLA-DRB1*13:03L HLA-DRB1*01:03L HLA-DRB1*04:02L HLA-DRB1*01:01L HLA-DRB1*01:02L HLA-DRB4*03:01NL HLA-DRB1*14:01L HLA-DRB1*11:04L HLA-DRB1*08:01L HLA-DRB5*01:01L HLA-DRB1*12:01L HLA-DRB1*12:02L
  REGION 1..10: note = CONT. FROM ABOVE: HLA-DQA1*03:01-B1*03:02L HLA-DRB1*14:54L HLA-D QA1*05:05-B1*03:01L HLA-DRB1*14:17L HLA-DRB1*16:01L HLA-DRB1*04: 08L HLA-DQA1*02:01-B1*03:03L
YKAIDGGVTR

SEQ ID NO: 13030 - protein, 11 aa, Severe acute respiratory syndrome coronavirus 2
  REGION 1..11: note = Table B: HLA-DRB1*04:03L HLA-DRB1*13:03L HLA-DRB1*01:03L HLA-DRB1*04:02L HLA-DRB4*03:01NL HLA-DPA1*01:03-B1*03:01L HLA-DQA1*01:01-B1*05:01L HLA-DPA1*01:03-B1*04:02L HLA-DRB1*12:01L HLA-DRB1*14:17L
AIDGGVTRDIA

SEQ ID NO: 13031 - protein, 11 aa, Severe acute respiratory syndrome coronavirus 2
  REGION 1..11: note = Table B: HLA-DRB1*04:03L HLA-DRB1*04:02L HLA-DQA1*01:01-B1*05:01L
IDGGVTRDIAS

SEQ ID NO: 13032 - protein, 10 aa, Severe acute respiratory syndrome coronavirus 2
  REGION 1..10: note = Table B: HLA-DRB1*04:03L HLA-DRB1*04:02L HLA-DQA1*03:01-B1*03:02L HLA-DRB1*14:17L HLA-DQA1*02:01-B1*03:03L
GVTRDIASTD

SEQ ID NO: 13033 - protein, 10 aa, Severe acute respiratory syndrome coronavirus 2
  REGION 1..10: note = Table B: HLA-DRB1*04:03L HLA-DRB1*04:02L HLA-DQA1*01-B1*05L HLA-DQA1*03:01-B1*03:02L HLA-DRB1*14:17L HLA-DQA1*02:01-B1*03:03L
VTRDIASTDT

SEQ ID NO: 13034 - protein, 12 aa, Severe acute respiratory syndrome coronavirus 2
  REGION 1..12: note = Table B: HLA-DRB1*04:03L HLA-DQA1*01:02-B1*06:02L
RDIASTDTCFAN

SEQ ID NO: 13035 - protein, 12 aa, Severe acute respiratory syndrome coronavirus 2
  REGION 1..12: note = Table B: HLA-DRB1*04:03L HLA-DRB1*04:02L HLA-DQA1*03:01-B1*03:02L
ADFDTWFSQRGG

SEQ ID NO: 13036 - protein, 12 aa, Severe acute respiratory syndrome coronavirus 2
  REGION 1..12: note = Table B: HLA-DRB1*04:03L
DFDTWFSQRGGS

SEQ ID NO: 13037 - protein, 12 aa, Severe acute respiratory syndrome coronavirus 2
  REGION 1..12: note = Table B: HLA-DRB1*04:03L HLA-DRB1*13:02L HLA-DRB1*04:02L HLA-DRB1*04:05L HLA-DRB1*01:02L HLA-DRB3*02:01L HLA-DRB1*12:02L HLA-DRB1*14:54L
FDTWFSQRGGSY

SEQ ID NO: 13038 - protein, 12 aa, Severe acute respiratory syndrome coronavirus 2
  REGION 1..12: note = Table B: HLA-DRB1*04:03L HLA-DRB1*13:02L HLA-DRB1*04:02L HLA-DRB1*04:05L HLA-DRB1*01:02L HLA-DRB4*03:01NL HLA-DRB3*02:01L HLA-DRB1*11:03L HLA-DRB1*08:01L HLA-DRB1*09:01L HLA-DRB1*12:02L HLA-DRB1*14:54L HLA-DRB1*14:17L HLA-DRB1*07:01L HLA-DRB1*04:08L
DTWFSQRGGSYT

SEQ ID NO: 13039 - protein, 12 aa, Severe acute respiratory syndrome coronavirus 2
  REGION 1..12: note = Table B: HLA-DRB1*04:03L HLA-DRB1*13:02L HLA-DRB1*01:03L HLA-DQA1*01:02-B1*06:02L HLA-DRB1*01:02L HLA-DRB1*08:04L HLA-DPA1*01:03-B1*03:01L HLA-DPA1*03:01-B1*04:02L HLA-DRB1*03:01L HLA-DRB1*14:01L HLA-DRB1*14:02L
  REGION 1..12: note = CONT. FROM ABOVE: HLA-DQA1*01-B1*05L HLA-DQA1*05:01-B1*02:01L HL A-DPA1*01:03-B1*04:02L HLA-DRB1*12:01L HLA-DRB3*01:01L HLA-DPA1* 03:01-B1*105:01L HLA-DPA1*01:02-B1*04:01L HLA-DRB1*16:01L HLA-DR B1*04:08L
SYTNDKACPLIA

SEQ ID NO: 13040 - protein, 14 aa, Severe acute respiratory syndrome coronavirus 2
  REGION 1..14: note = Table B: HLA-DRB1*04:03L HLA-DRB1*13:02L HLA-DRB1*04:05L HLA-DRB1*15:03L
TNDKACPLIAAVIT

SEQ ID NO: 13041 - protein, 11 aa, Severe acute respiratory syndrome coronavirus 2
  REGION 1..11: note = Table B: HLA-DRB1*04:03L
ITREVGFVVPG

SEQ ID NO: 13042 - protein, 11 aa, Severe acute respiratory syndrome coronavirus 2
  REGION 1..11: note = Table B: HLA-DRB1*04:03L HLA-DRB1*13:02L HLA-DRB1*04:02L
FVVPGLPGTIL

SEQ ID NO: 13043 - protein, 10 aa, Severe acute respiratory syndrome coronavirus 2
  REGION 1..10: note = Table B: HLA-DRB1*04:03L HLA-DRB1*01:03L HLA-DRB1*04:05L HLA-DQA1*01:02-B1*06:02L HLA-DRB1*01:01L HLA-DRB1*01:02L HLA-DQA1*01:01-B1*05:01L HLA-DPA1*02:01-B1*13:01L HLA-DPA1*03:01-B1*105:01L HLA-DPA1*01:02-B1*04:01L
  REGION 1..10: note = CONT. FROM ABOVE: HLA-DRB1*16:01L HLA-DQA1*01:03-B1*06:01M HLA-D QA1*02:01-B1*03:03L HLA-DRB1*15:03L
DFLHFLPRVF

SEQ ID NO: 13044 - protein, 15 aa, Severe acute respiratory syndrome coronavirus 2
  REGION 1..15: note = Table B: HLA-DRB1*04:03L HLA-DRB1*01:03L HLA-DRB1*01:01L HLA-DRB1*12:01L HLA-DPA1*03:01-B1*105:01L
PRVFSAVGNICYTPS

SEQ ID NO: 13045 - protein, 13 aa, Severe acute respiratory syndrome coronavirus 2
  REGION 1..13: note = Table B: HLA-DRB1*04:03L HLA-DRB1*01:03L HLA-DRB1*04:02L HLA-DRB1*04:04L HLA-DRB1*04:05L HLA-DQA1*01:02-B1*06:02L HLA-DRB1*08:04L HLA-DRB1*03:01L HLA-DRB1*11:04L HLA-DRB1*14:02L HLA-DQA1*01:01-B1*05:01L HLA-DRB1*08:01L HLA-DRB1*11:01L
  REGION 1..13: note = CONT. FROM ABOVE: HLA-DRB5*01:01L HLA-DQA1*01-B1*05L HLA-DQA1*05 :05-B1*03:19L HLA-DRB5*02:02L HLA-DRB4*01:01L HLA-DRB1*04:10L HL A-DPA1*01:03-B1*04:02L HLA-DRB1*12:02L HLA-DRB3*01:01L HLA-DPA1* 02:01-B1*13:01L HLA-DRB1*14:54L HLA-DPA1*01:03-B1*104:01L
  REGION 1..13: note = CONT. FROM ABOVE: HLA-DRB1*14:17L HLA-DRB1*10:01L HLA-DRB1*08:03 L HLA-DRB1*15:01L
VGNICYTPSKLIE

SEQ ID NO: 13046 - protein, 13 aa, Severe acute respiratory syndrome coronavirus 2
  REGION 1..13: note = Table B: HLA-DRB1*04:03L HLA-DRB1*04:02L HLA-DRB1*04:05L HLA-DRB1*01:02L HLA-DPA1*03:01-B1*04:02L HLA-DRB1*04:10L HLA-DRB1*12:01L HLA-DPA1*02:01-B1*13:01L HLA-DPA1*03:01-B1*105:01L HLA-DRB1*14:54L HLA-DRB1*14:17L
  REGION 1..13: note = CONT. FROM ABOVE: HLA-DRB1*16:01L HLA-DRB1*04:08L HLA-DRB1*15:03 L
TPSKLIEYTDFAT

SEQ ID NO: 13047 - protein, 11 aa, Severe acute respiratory syndrome coronavirus 2
  REGION 1..11: note = Table B: HLA-DRB1*04:03L HLA-DRB1*01:03L HLA-DRB1*04:02L HLA-DRB1*01:02L HLA-DPA1*01:03-B1*03:01L HLA-DPA1*03:01-B1*04:02L HLA-DQA1*05:01-B1*02:01L HLA-DPA1*01:03-B1*04:01L HLA-DPA1*01:03-B1*04:02L
  REGION 1..11: note = CONT. FROM ABOVE: HLA-DRB1*12:01L HLA-DPA1*03:01-B1*105:01L HLA- DRB1*14:17L HLA-DPA1*01:02-B1*04:01L HLA-DRB1*16:01L HLA-DQA1*01 :03-B1*06:01L HLA-DRB1*04:08L HLA-DQA1*02:01-B1*03:03L HLA-DRB1* 15:03L
KLIEYTDFATS

SEQ ID NO: 13048 - protein, 11 aa, Severe acute respiratory syndrome coronavirus 2
  REGION 1..11: note = Table B: HLA-DRB1*04:03L HLA-DRB1*12:01L
LIEYTDFATSA

SEQ ID NO: 13049 - protein, 10 aa, Severe acute respiratory syndrome coronavirus 2
  REGION 1..10: note = Table B: HLA-DRB1*04:03L HLA-DRB1*04:02L HLA-DQA1*01-B1*05L HLA-DQA1*03:01-B1*03:02L HLA-DRB1*14:17L
TIFKDASGKP

SEQ ID NO: 13050 - protein, 10 aa, Severe acute respiratory syndrome coronavirus 2
  REGION 1..10: note = Table B: HLA-DRB1*04:03L HLA-DRB1*01:02L HLA-DQA1*03:01-B1*03:02L HLA-DRB1*16:01L HLA-DQA1*02:01-B1*03:03L HLA-DRB1*15:03L
FKDASGKPVP

SEQ ID NO: 13051 - protein, 13 aa, Severe acute respiratory syndrome coronavirus 2
  REGION 1..13: note = Table B: HLA-DRB1*04:03L HLA-DRB1*04:02L HLA-DRB1*04:05L HLA-DQA1*05:01-B1*02:01L HLA-DRB1*04:10L HLA-DPA1*02:01-B1*13:01L HLA-DQA1*03:01-B1*03:02L HLA-DRB1*14:17L HLA-DRB1*16:01L HLA-DRB1*04:08L HLA-DRB1*15:03L
KPVPYCYDTNVLE

SEQ ID NO: 13052 - protein, 12 aa, Severe acute respiratory syndrome coronavirus 2
  REGION 1..12: note = Table B: HLA-DRB1*04:03L HLA-DRB1*14:17L
TNVLEGSVAYES

SEQ ID NO: 13053 - protein, 12 aa, Severe acute respiratory syndrome coronavirus 2
  REGION 1..12: note = Table B: HLA-DRB1*04:03L HLA-DPA1*03:01-B1*105:01L
NVLEGSVAYESL

SEQ ID NO: 13054 - protein, 13 aa, Severe acute respiratory syndrome coronavirus 2
  REGION 1..13: note = Table B: HLA-DRB1*04:03L HLA-DRB1*04:02L HLA-DRB1*01:02L
VLEGSVAYESLRP

SEQ ID NO: 13055 - protein, 12 aa, Severe acute respiratory syndrome coronavirus 2
  REGION 1..12: note = Table B: HLA-DRB1*04:03L HLA-DRB1*04:02L HLA-DRB1*01:02L HLA-DRB1*08:04L HLA-DRB1*14:54L
YESLRPDTRYVL

SEQ ID NO: 13056 - protein, 13 aa, Severe acute respiratory syndrome coronavirus 2
  REGION 1..13: note = Table B: HLA-DRB1*04:03L HLA-DPA1*01:03-B1*03:01L HLA-DQA1*05:01-B1*02:01L HLA-DRB1*13:01L HLA-DRB1*04:08L
SLRPDTRYVLMDG

SEQ ID NO: 13057 - protein, 10 aa, Severe acute respiratory syndrome coronavirus 2
  REGION 1..10: note = Table B: HLA-DRB1*04:03L HLA-DRB1*13:02L HLA-DRB1*04:02L HLA-DRB1*01:02L HLA-DRB4*03:01NL HLA-DRB1*08:77L HLA-DRB1*14:01L HLA-DQA1*05:01-B1*02:01L HLA-DRB1*12:01L HLA-DRB1*14:17L HLA-DRB1*16:01L HLA-DQA1*02:01-B1*03:03L HLA-DRB1*15:03L
YVLMDGSIIQ

SEQ ID NO: 13058 - protein, 11 aa, Severe acute respiratory syndrome coronavirus 2
  REGION 1..11: note = Table B: HLA-DRB1*04:03L HLA-DRB1*12:01L HLA-DQA1*05:05-B1*03:01L HLA-DPA1*01:02-B1*04:01L
DGSIIQFPNTY

SEQ ID NO: 13059 - protein, 10 aa, Severe acute respiratory syndrome coronavirus 2
  REGION 1..10: note = Table B: HLA-DRB1*04:03L HLA-DRB1*04:02L HLA-DRB1*04:04L HLA-DQA1*01:02-B1*06:02L HLA-DRB1*01:02L HLA-DPA1*03:01-B1*04:02L HLA-DQA1*01-B1*05L HLA-DRB1*12:01L HLA-DRB1*14:17L HLA-DRB1*16:01L HLA-DRB1*04:08L
  REGION 1..10: note = CONT. FROM ABOVE: HLA-DQA1*02:01-B1*03:03L HLA-DRB1*15:01L HLA-D RB1*15:03L
IIQFPNTYLE

SEQ ID NO: 13060 - protein, 10 aa, Severe acute respiratory syndrome coronavirus 2
  REGION 1..10: note = Table B: HLA-DRB1*04:03L HLA-DRB1*14:17L
YLEGSVRVVT

SEQ ID NO: 13061 - protein, 11 aa, Severe acute respiratory syndrome coronavirus 2
  REGION 1..11: note = Table B: HLA-DRB1*04:03L HLA-DRB1*04:02L HLA-DRB1*14:17L
GSVRVVTTFDS

SEQ ID NO: 13062 - protein, 11 aa, Severe acute respiratory syndrome coronavirus 2
  REGION 1..11: note = Table B: HLA-DRB1*04:03L
SVRVVTTFDSE

SEQ ID NO: 13063 - protein, 12 aa, Severe acute respiratory syndrome coronavirus 2
  REGION 1..12: note = Table B: HLA-DRB1*04:03L HLA-DRB1*01:03L HLA-DRB1*01:02L HLA-DRB1*12:01L HLA-DRB1*16:01L HLA-DRB1*04:08L HLA-DRB1*15:03L
VVTTFDSEYCRH

SEQ ID NO: 13064 - protein, 12 aa, Severe acute respiratory syndrome coronavirus 2
  REGION 1..12: note = Table B: HLA-DRB1*04:03L HLA-DRB1*13:03L HLA-DRB1*01:03L HLA-DRB1*04:02L HLA-DRB1*04:05L HLA-DRB1*01:02L HLA-DRB1*14:01L HLA-DRB1*08:01L HLA-DRB1*12:01L HLA-DQA1*03:01-B1*03:02L HLA-DRB1*14:17L HLA-DRB1*04:08L
SGRWVLNNDYYR

SEQ ID NO: 13065 - protein, 13 aa, Severe acute respiratory syndrome coronavirus 2
  REGION 1..13: note = Table B: HLA-DRB1*04:03L HLA-DRB1*04:02L HLA-DRB1*04:10L HLA-DRB1*12:01L HLA-DRB1*14:17L HLA-DRB1*16:01L
VDAVNLLTNMFTP

SEQ ID NO: 13066 - protein, 11 aa, Severe acute respiratory syndrome coronavirus 2
  REGION 1..11: note = Table B: HLA-DRB1*04:03L HLA-DPA1*03:01-B1*04:02L HLA-DRB1*12:01L HLA-DPA1*01:02-B1*04:01L
VNLLTNMFTPL

SEQ ID NO: 13067 - protein, 14 aa, Severe acute respiratory syndrome coronavirus 2
  REGION 1..14: note = Table B: HLA-DRB1*04:03L HLA-DRB1*01:02L HLA-DQA1*01-B1*05L HLA-DQA1*05:01-B1*02:01L HLA-DPA1*01:03-B1*04:02L HLA-DRB1*12:01L HLA-DRB1*16:01L HLA-DRB1*04:08L HLA-DRB1*15:03L
NLLTNMFTPLIQPI

SEQ ID NO: 13068 - protein, 11 aa, Severe acute respiratory syndrome coronavirus 2
  REGION 1..11: note = Table B: HLA-DRB1*04:03L HLA-DRB1*13:03L HLA-DRB1*01:03L HLA-DRB1*04:02L HLA-DRB1*01:02L HLA-DRB4*03:01NL HLA-DRB1*08:04L HLA-DRB1*14:01L HLA-DRB1*08:01L HLA-DRB1*04:10L HLA-DPA1*01:03-B1*04:02L HLA-DRB1*12:01L
  REGION 1..11: note = CONT. FROM ABOVE: HLA-DPA1*02:01-B1*13:01L HLA-DRB1*14:54L HLA-D RB1*14:17L HLA-DRB1*16:01L HLA-DRB1*04:08L HLA-DRB1*08:03L HLA-D RB1*15:03L
NMFTPLIQPIG

SEQ ID NO: 13069 - protein, 10 aa, Severe acute respiratory syndrome coronavirus 2
  REGION 1..10: note = Table B: HLA-DRB1*04:03L HLA-DRB1*14:17L
IQPIGALDIS

SEQ ID NO: 13070 - protein, 14 aa, Severe acute respiratory syndrome coronavirus 2
  REGION 1..14: note = Table B: HLA-DRB1*04:03L HLA-DQA1*05:05-B1*03:01L HLA-DQA1*01:03-B1*06:01L
QPIGALDISASIVA

SEQ ID NO: 13071 - protein, 12 aa, Severe acute respiratory syndrome coronavirus 2
  REGION 1..12: note = Table B: HLA-DRB1*04:03L
GALDISASIVAG

SEQ ID NO: 13072 - protein, 14 aa, Severe acute respiratory syndrome coronavirus 2
  REGION 1..14: note = Table B: HLA-DRB1*04:03L HLA-DRB1*01:03L HLA-DPA1*01:03-B1*03:01L HLA-DRB1*12:01L
ASIVAGGIVAIVVT

SEQ ID NO: 13073 - protein, 10 aa, Severe acute respiratory syndrome coronavirus 2
  REGION 1..10: note = Table B: HLA-DRB1*04:03L HLA-DRB1*04:05L HLA-DQA1*01:02-B1*06:02L HLA-DRB1*01:01L HLA-DPA1*02:01-B1*13:01M HLA-DPA1*03:01-B1*105:01L HLA-DRB1*16:01L HLA-DQA1*01:03-B1*06:01L HLA-DRB1*15:03L
TFYLTNDVSF

SEQ ID NO: 13074 - protein, 10 aa, Severe acute respiratory syndrome coronavirus 2
  REGION 1..10: note = Table B: HLA-DRB1*04:03L HLA-DRB1*13:02L HLA-DRB1*13:03L HLA-DRB1*01:03L HLA-DRB1*04:02L HLA-DRB4*03:01NL HLA-DRB1*14:01L HLA-DQA1*05:01-B1*02:01L HLA-DRB1*12:01L HLA-DPA1*03:01-B1*105:01L HLA-DQA1*03:01-B1*03:02L
  REGION 1..10: note = CONT. FROM ABOVE: HLA-DRB1*14:54L HLA-DQA1*05:05-B1*03:01L HLA-D RB1*14:17L HLA-DRB1*16:01L HLA-DQA1*01:03-B1*06:01L HLA-DQA1*02: 01-B1*03:03L
LTNDVSFLAH

SEQ ID NO: 13075 - protein, 13 aa, Severe acute respiratory syndrome coronavirus 2
  REGION 1..13: note = Table B: HLA-DRB1*04:03L HLA-DRB1*13:02L HLA-DRB1*04:02L HLA-DRB1*04:04L HLA-DRB1*14:01L HLA-DRB1*08:01L HLA-DPA1*03:01-B1*105:01L HLA-DQA1*03:01-B1*03:02L HLA-DPA1*01:02-B1*04:01L HLA-DRB1*07:01L HLA-DRB1*15:01L
TKHFYWFFSNYLK

SEQ ID NO: 13076 - protein, 13 aa, Severe acute respiratory syndrome coronavirus 2
  REGION 1..13: note = Table B: HLA-DRB1*04:03L HLA-DRB1*13:02L HLA-DRB1*04:02L HLA-DRB1*04:04L HLA-DRB1*01:01L HLA-DRB1*14:01L HLA-DRB3*01:01L HLA-DQA1*03:01-B1*03:02L HLA-DRB1*07:01L
KHFYWFFSNYLKR

SEQ ID NO: 13077 - protein, 13 aa, Severe acute respiratory syndrome coronavirus 2
  REGION 1..13: note = Table B: HLA-DRB1*04:03L HLA-DRB1*04:05L HLA-DRB1*01:02L HLA-DRB1*12:01L HLA-DRB1*16:01L HLA-DRB1*04:08L
KRRVVFNGVSFST

SEQ ID NO: 13078 - protein, 10 aa, Severe acute respiratory syndrome coronavirus 2
  REGION 1..10: note = Table B: HLA-DRB1*04:03L HLA-DRB1*01:03L HLA-DRB1*04:05L HLA-DQA1*01:02-B1*06:02L HLA-DRB1*01:01L HLA-DRB1*08:77L HLA-DPA1*02:01-B1*13:01M HLA-DPA1*03:01-B1*105:01L HLA-DRB1*16:01L HLA-DQA1*01:03-B1*06:01M
  REGION 1..10: note = CONT. FROM ABOVE: HLA-DQA1*02:01-B1*03:03L HLA-DRB1*15:03L
VFNGVSFSTF

SEQ ID NO: 13079 - protein, 13 aa, Severe acute respiratory syndrome coronavirus 2
  REGION 1..13: note = Table B: HLA-DRB1*04:03L HLA-DRB1*08:04L HLA-DPA1*01:03-B1*02:01L HLA-DPA1*01:03-B1*104:01L
FNGVSFSTFEEAA

SEQ ID NO: 13080 - protein, 12 aa, Severe acute respiratory syndrome coronavirus 2
  REGION 1..12: note = Table B: HLA-DRB1*04:03L HLA-DRB1*01:03L HLA-DRB1*04:02L HLA-DRB1*04:05L HLA-DRB1*01:02L HLA-DRB1*14:01L HLA-DRB1*04:10L HLA-DRB1*14:54L HLA-DRB1*04:08L HLA-DQA1*02:01-B1*03:03L
SDVLLPLTQYNR

SEQ ID NO: 13081 - protein, 14 aa, Severe acute respiratory syndrome coronavirus 2
  REGION 1..14: note = Table B: HLA-DRB1*04:03L HLA-DRB1*04:02L HLA-DRB1*04:05L HLA-DRB1*11:03L HLA-DRB1*11:04L HLA-DRB3*01:01L HLA-DPA1*01:03-B1*02:01L HLA-DRB1*08:03L
LPLTQYNRYLALYN

SEQ ID NO: 13082 - protein, 11 aa, Severe acute respiratory syndrome coronavirus 2
  REGION 1..11: note = Table B: HLA-DRB1*04:03L HLA-DRB1*13:02L HLA-DRB1*04:05L HLA-DRB1*01:02L HLA-DRB1*11:01L
RYLALYNKYKY

SEQ ID NO: 13083 - protein, 13 aa, Severe acute respiratory syndrome coronavirus 2
  REGION 1..13: note = Table B: HLA-DRB1*04:03L HLA-DRB1*13:03L HLA-DRB1*08:03L
YLALYNKYKYFSG

SEQ ID NO: 13084 - protein, 12 aa, Severe acute respiratory syndrome coronavirus 2
  REGION 1..12: note = Table B: HLA-DRB1*04:03L HLA-DRB1*01:03L HLA-DRB1*04:02L HLA-DRB1*04:05L HLA-DRB1*01:02L HLA-DRB1*08:01L HLA-DRB1*12:01L HLA-DQA1*03:01-B1*03:02L HLA-DRB1*14:17L HLA-DRB1*16:01L HLA-DRB1*04:08L HLA-DRB1*15:03L
YNKYKYFSGAMD

SEQ ID NO: 13085 - protein, 12 aa, Severe acute respiratory syndrome coronavirus 2
  REGION 1..12: note = Table B: HLA-DRB1*04:03L HLA-DRB1*13:03L HLA-DRB1*01:03L HLA-DRB1*04:02L HLA-DRB1*04:05L HLA-DQA1*01:02-B1*06:02L HLA-DRB1*01:02L HLA-DRB4*03:01NL HLA-DRB1*08:01L HLA-DRB1*04:10L HLA-DRB1*12:01L HLA-DPA1*02:01-B1*13:01L
  REGION 1..12: note = CONT. FROM ABOVE: HLA-DQA1*03:01-B1*03:02L HLA-DRB1*14:17L HLA-D RB1*16:01L HLA-DRB1*04:08L HLA-DRB1*08:03L HLA-DQA1*02:01-B1*03: 03L HLA-DRB1*15:03L
NKYKYFSGAMDT

SEQ ID NO: 13086 - protein, 11 aa, Severe acute respiratory syndrome coronavirus 2
  REGION 1..11: note = Table B: HLA-DRB1*04:03L HLA-DQA1*05:01-B1*02:01L HLA-DQA1*03:01-B1*03:02L HLA-DQA1*02:01-B1*03:03L
YKYFSGAMDTT

SEQ ID NO: 13087 - protein, 10 aa, Severe acute respiratory syndrome coronavirus 2
  REGION 1..10: note = Table B: HLA-DRB1*04:03L HLA-DRB1*04:02L HLA-DQA1*03:01-B1*03:02L HLA-DRB1*14:17L HLA-DQA1*02:01-B1*03:03L
GAMDTTSYRE

SEQ ID NO: 13088 - protein, 11 aa, Severe acute respiratory syndrome coronavirus 2
  REGION 1..11: note = Table B: HLA-DRB1*04:03L HLA-DQA1*02:01-B1*03:03L
HLAKALNDFSN

SEQ ID NO: 13089 - protein, 11 aa, Severe acute respiratory syndrome coronavirus 2
  REGION 1..11: note = Table B: HLA-DRB1*04:03L HLA-DRB1*04:02L HLA-DQA1*01-B1*05L HLA-DRB1*14:17L
AKALNDFSNSG

SEQ ID NO: 13090 - protein, 12 aa, Severe acute respiratory syndrome coronavirus 2
  REGION 1..12: note = Table B: HLA-DRB1*04:03L HLA-DRB1*04:02L HLA-DRB1*04:05L HLA-DQA1*01-B1*05L HLA-DQA1*05:01-B1*02:01L HLA-DRB1*04:10L HLA-DQA1*03:01-B1*03:02L HLA-DRB1*14:17L HLA-DRB1*16:01L
KALNDFSNSGSD

SEQ ID NO: 13091 - protein, 12 aa, Severe acute respiratory syndrome coronavirus 2
  REGION 1..12: note = Table B: HLA-DRB1*04:03L HLA-DQA1*01-B1*05L HLA-DQA1*05:01-B1*02:01L HLA-DQA1*03:01-B1*03:02L
ALNDFSNSGSDV

SEQ ID NO: 13092 - protein, 12 aa, Severe acute respiratory syndrome coronavirus 2
  REGION 1..12: note = Table B: HLA-DRB1*04:03L HLA-DRB1*13:02L HLA-DRB1*13:03L HLA-DRB1*04:02L HLA-DRB1*04:05L HLA-DRB4*03:01NL HLA-DRB1*08:77L HLA-DRB3*02:01L HLA-DQA1*05:05-B1*03:19L HLA-DRB1*09:01L HLA-DRB1*12:01L HLA-DRB1*12:02L HLA-DRB1*07:01L HLA-DRB1*16:01L
  REGION 1..12: note = CONT. FROM ABOVE: HLA-DQA1*02:01-B1*03:03L HLA-DRB1*15:03L
LNDFSNSGSDVL

SEQ ID NO: 13093 - protein, 15 aa, Severe acute respiratory syndrome coronavirus 2
  REGION 1..15: note = Table B: HLA-DRB1*04:03L HLA-DQA1*01:01-B1*05:01L HLA-DRB1*04:08L
DFSNSGSDVLYQPPQ

SEQ ID NO: 13094 - protein, 11 aa, Severe acute respiratory syndrome coronavirus 2
  REGION 1..11: note = Table B: HLA-DRB1*04:03L HLA-DRB1*04:02L HLA-DRB4*03:01NL HLA-DQA1*01-B1*05L HLA-DRB1*14:17L
VLYQPPQTSIT

SEQ ID NO: 13095 - protein, 11 aa, Severe acute respiratory syndrome coronavirus 2
  REGION 1..11: note = Table B: HLA-DRB1*04:03L HLA-DQA1*01:02-B1*06:02L HLA-DQA1*03:01-B1*03:02L HLA-DQA1*02:01-B1*03:03L
TSITSAVLQSG

SEQ ID NO: 13096 - protein, 11 aa, Severe acute respiratory syndrome coronavirus 2
  REGION 1..11: note = Table B: HLA-DRB1*04:03L HLA-DRB1*01:03L HLA-DRB1*04:02L HLA-DRB1*04:05L HLA-DRB1*01:02L HLA-DRB4*03:01NL HLA-DPA1*01:03-B1*03:01L HLA-DQA1*01:01-B1*05:01L HLA-DRB1*08:01L HLA-DRB4*02:01NL HLA-DPA1*01:03-B1*04:02L
  REGION 1..11: note = CONT. FROM ABOVE: HLA-DRB1*14:17L HLA-DPA1*01:02-B1*04:01L HLA-D RB1*16:01L HLA-DRB1*04:08L
ITSAVLQSGFR

SEQ ID NO: 13097 - protein, 13 aa, Severe acute respiratory syndrome coronavirus 2
  REGION 1..13: note = Table B: HLA-DRB1*04:03L HLA-DRB1*13:03L HLA-DRB1*04:02L HLA-DRB1*04:05L HLA-DQA1*01:02-B1*06:02L HLA-DPA1*01:03-B1*03:01L HLA-DRB1*14:02L HLA-DRB1*08:01L HLA-DPA1*01:03-B1*04:02L HLA-DRB1*12:01L
NGLWLDDVVYCPR

SEQ ID NO: 13098 - protein, 12 aa, Severe acute respiratory syndrome coronavirus 2
  REGION 1..12: note = Table B: HLA-DRB1*04:03L
VICTSEDMLNPN

SEQ ID NO: 13099 - protein, 13 aa, Severe acute respiratory syndrome coronavirus 2
  REGION 1..13: note = Table B: HLA-DRB1*04:03L HLA-DRB1*04:02L HLA-DRB1*04:05L HLA-DRB1*01:02L HLA-DRB1*04:08L
DMLNPNYEDLLIR

SEQ ID NO: 13100 - protein, 12 aa, Severe acute respiratory syndrome coronavirus 2
  REGION 1..12: note = Table B: HLA-DRB1*04:03L HLA-DRB1*04:02L HLA-DRB1*04:05L HLA-DRB1*16:01L HLA-DRB1*04:08L
NPNYEDLLIRKS

SEQ ID NO: 13101 - protein, 14 aa, Severe acute respiratory syndrome coronavirus 2
  REGION 1..14: note = Table B: HLA-DRB1*04:03L HLA-DRB3*01:01L HLA-DPA1*02:01-B1*13:01L HLA-DPA1*03:01-B1*105:01L
DLLIRKSNHNFLVQ

SEQ ID NO: 13102 - protein, 12 aa, Severe acute respiratory syndrome coronavirus 2
  REGION 1..12: note = Table B: HLA-DRB1*04:03L
AGNVQLRVIGHS

SEQ ID NO: 13103 - protein, 12 aa, Severe acute respiratory syndrome coronavirus 2
  REGION 1..12: note = Table B: HLA-DRB1*04:03L HLA-DRB1*04:05L HLA-DQA1*01:02-B1*06:02L HLA-DRB1*01:02L HLA-DRB1*08:04L HLA-DRB1*12:01L HLA-DRB1*14:17L HLA-DRB1*16:01L HLA-DRB1*04:08L HLA-DRB1*15:03L
NVQLRVIGHSMQ

SEQ ID NO: 13104 - protein, 10 aa, Severe acute respiratory syndrome coronavirus 2
  REGION 1..10: note = Table B: HLA-DRB1*04:03L HLA-DRB1*13:03L HLA-DRB1*01:03L HLA-DRB1*04:02L HLA-DRB1*14:01L HLA-DQA1*03:01-B1*03:02L HLA-DRB1*14:17L HLA-DRB1*16:01L HLA-DQA1*02:01-B1*03:03L
LRVIGHSMQN

SEQ ID NO: 13105 - protein, 11 aa, Severe acute respiratory syndrome coronavirus 2
  REGION 1..11: note = Table B: HLA-DRB1*04:03L
LKLKVDTANPK

SEQ ID NO: 13106 - protein, 11 aa, Severe acute respiratory syndrome coronavirus 2
  REGION 1..11: note = Table B: HLA-DRB1*04:03L HLA-DRB1*14:01L HLA-DRB1*14:17L HLA-DRB1*16:01L
LKVDTANPKTP

SEQ ID NO: 13107 - protein, 12 aa, Severe acute respiratory syndrome coronavirus 2
  REGION 1..12: note = Table B: HLA-DRB1*04:03L
RIQPGQTFSVLA

SEQ ID NO: 13108 - protein, 12 aa, Severe acute respiratory syndrome coronavirus 2
  REGION 1..12: note = Table B: HLA-DRB1*04:03L
FSVLACYNGSPS

SEQ ID NO: 13109 - protein, 12 aa, Severe acute respiratory syndrome coronavirus 2
  REGION 1..12: note = Table B: HLA-DRB1*04:03L HLA-DQA1*01-B1*05L
SVLACYNGSPSG

SEQ ID NO: 13110 - protein, 10 aa, Severe acute respiratory syndrome coronavirus 2
  REGION 1..10: note = Table B: HLA-DRB1*04:03L HLA-DRB1*04:02L HLA-DQA1*03:01-B1*03:02L HLA-DRB1*14:17L
FTIKGSFLNG

SEQ ID NO: 13111 - protein, 13 aa, Severe acute respiratory syndrome coronavirus 2
  REGION 1..13: note = Table B: HLA-DRB1*04:03L HLA-DRB1*14:01L HLA-DQA1*01-B1*05L HLA-DPA1*03:01-B1*105:01L HLA-DRB1*15:03L
GSVGFNIDYDCVS

SEQ ID NO: 13112 - protein, 10 aa, Severe acute respiratory syndrome coronavirus 2
  REGION 1..10: note = Table B: HLA-DRB1*04:03L HLA-DRB1*13:03L HLA-DRB1*04:02L HLA-DQA1*01-B1*05L HLA-DQA1*03:01-B1*03:02L HLA-DRB1*14:17L HLA-DQA1*02:01-B1*03:03L
GPFVDRQTAQ

SEQ ID NO: 13113 - protein, 11 aa, Severe acute respiratory syndrome coronavirus 2
  REGION 1..11: note = Table B: HLA-DRB1*04:03L HLA-DRB1*14:17L
FVDRQTAQAAG

SEQ ID NO: 13114 - protein, 12 aa, Severe acute respiratory syndrome coronavirus 2
  REGION 1..12: note = Table B: HLA-DRB1*04:03L HLA-DRB1*13:02L HLA-DRB1*13:03L HLA-DRB1*01:03L HLA-DRB1*04:02L HLA-DRB1*04:05L HLA-DQA1*01:02-B1*06:02L HLA-DRB1*01:02L HLA-DRB4*03:01NL HLA-DPA1*01:03-B1*03:01L HLA-DQA1*01:01-B1*05:01L
  REGION 1..12: note = CONT. FROM ABOVE: HLA-DQA1*01-B1*05L HLA-DQA1*05:05-B1*03:19L HL A-DQA1*05:01-B1*02:01L HLA-DRB1*04:10L HLA-DRB1*12:01L HLA-DPA1* 02:01-B1*13:01L HLA-DPA1*03:01-B1*105:01L HLA-DRB1*14:54L HLA-DP A1*01:03-B1*104:01L HLA-DQA1*05:05-B1*03:01L HLA-DRB1*14:17L
  REGION 1..12: note = CONT. FROM ABOVE: HLA-DRB1*16:01L HLA-DQA1*01:03-B1*06:01L HLA-D RB1*04:08L
VDRQTAQAAGTD

SEQ ID NO: 13115 - protein, 13 aa, Severe acute respiratory syndrome coronavirus 2
  REGION 1..13: note = Table B: HLA-DRB1*04:03L
AAGTDTTITVNVL

SEQ ID NO: 13116 - protein, 14 aa, Severe acute respiratory syndrome coronavirus 2
  REGION 1..14: note = Table B: HLA-DRB1*04:03L HLA-DQA1*05:05-B1*03:19L HLA-DQA1*05:05-B1*03:01L
VNVLAWLYAAVING

SEQ ID NO: 13117 - protein, 13 aa, Severe acute respiratory syndrome coronavirus 2
  REGION 1..13: note = Table B: HLA-DRB1*04:03L HLA-DRB1*13:02L HLA-DRB1*04:02L HLA-DRB1*04:04L HLA-DRB1*04:05L HLA-DRB1*11:04L HLA-DRB1*08:01L HLA-DRB1*11:01L HLA-DRB3*01:01L HLA-DPA1*01:03-B1*02:01L
AAVINGDRWFLNR

SEQ ID NO: 13118 - protein, 15 aa, Severe acute respiratory syndrome coronavirus 2
  REGION 1..15: note = Table B: HLA-DRB1*04:03L HLA-DRB1*11:02L HLA-DQA1*05:05-B1*03:01L HLA-DRB1*10:01L
GDRWFLNRFTTTLND

SEQ ID NO: 13119 - protein, 10 aa, Severe acute respiratory syndrome coronavirus 2
  REGION 1..10: note = Table B: HLA-DRB1*04:03L HLA-DQA1*01:02-B1*06:02L HLA-DQA1*01-B1*05L HLA-DQA1*05:01-B1*02:01L HLA-DPA1*03:01-B1*105:01L HLA-DQA1*03:01-B1*03:02L HLA-DQA1*01:03-B1*06:01L HLA-DQA1*02:01-B1*03:03L
RFTTTLNDFN

SEQ ID NO: 13120 - protein, 12 aa, Severe acute respiratory syndrome coronavirus 2
  REGION 1..12: note = Table B: HLA-DRB1*04:03L HLA-DQA1*01:02-B1*06:02L HLA-DPA1*03:01-B1*105:01L HLA-DQA1*01:03-B1*06:01L HLA-DQA1*02:01-B1*03:03L
FTTTLNDFNLVA

SEQ ID NO: 13121 - protein, 11 aa, Severe acute respiratory syndrome coronavirus 2
  REGION 1..11: note = Table B: HLA-DRB1*04:03L HLA-DRB1*04:02L HLA-DRB1*12:01L HLA-DQA1*05:05-B1*03:01L HLA-DRB1*14:17L
TLNDFNLVAMK

SEQ ID NO: 13122 - protein, 13 aa, Severe acute respiratory syndrome coronavirus 2
  REGION 1..13: note = Table B: HLA-DRB1*04:03L HLA-DRB1*01:03L HLA-DRB1*04:02L HLA-DRB1*04:05L HLA-DRB1*08:04L HLA-DRB1*08:01L HLA-DPA1*01:03-B1*04:01L HLA-DPA1*01:03-B1*04:02L HLA-DQA1*03:01-B1*03:02L HLA-DRB1*16:01L
  REGION 1..13: note = CONT. FROM ABOVE: HLA-DQA1*01:03-B1*06:01L HLA-DRB1*04:08L HLA-D QA1*02:01-B1*03:03L
FNLVAMKYNYEPL

SEQ ID NO: 13123 - protein, 12 aa, Severe acute respiratory syndrome coronavirus 2
  REGION 1..12: note = Table B: HLA-DRB1*04:03L HLA-DRB1*04:02L HLA-DQA1*01:02-B1*06:02L HLA-DPA1*03:01-B1*04:02L HLA-DRB1*14:01L HLA-DQA1*05:01-B1*02:01L HLA-DRB1*12:01L HLA-DPA1*03:01-B1*105:01L HLA-DQA1*03:01-B1*03:02L
  REGION 1..12: note = CONT. FROM ABOVE: HLA-DPA1*01:02-B1*04:01L HLA-DRB1*16:01L HLA-D QA1*01:03-B1*06:01L HLA-DRB1*04:08L HLA-DQA1*02:01-B1*03:03L HLA -DRB1*15:03L
LVAMKYNYEPLT

SEQ ID NO: 13124 - protein, 12 aa, Severe acute respiratory syndrome coronavirus 2
  REGION 1..12: note = Table B: HLA-DRB1*04:03L HLA-DRB1*04:02L HLA-DQA1*03:01-B1*03:02L HLA-DQA1*02:01-B1*03:03L
VAMKYNYEPLTQ

SEQ ID NO: 13125 - protein, 13 aa, Severe acute respiratory syndrome coronavirus 2
  REGION 1..13: note = Table B: HLA-DRB1*04:03L
TQDHVDILGPLSA

SEQ ID NO: 13126 - protein, 12 aa, Severe acute respiratory syndrome coronavirus 2
  REGION 1..12: note = Table B: HLA-DRB1*04:03L HLA-DRB1*04:02L HLA-DRB1*01:02L HLA-DRB4*03:01NL HLA-DRB1*12:01L HLA-DRB1*14:54L HLA-DRB1*14:17L HLA-DRB1*16:01L HLA-DQA1*02:01-B1*03:03L
DHVDILGPLSAQ

SEQ ID NO: 13127 - protein, 11 aa, Severe acute respiratory syndrome coronavirus 2
  REGION 1..11: note = Table B: HLA-DRB1*04:03L
VDILGPLSAQT

SEQ ID NO: 13128 - protein, 10 aa, Severe acute respiratory syndrome coronavirus 2
  REGION 1..10: note = Table B: HLA-DRB1*04:03L HLA-DRB1*14:17L
ILGPLSAQTG

SEQ ID NO: 13129 - protein, 13 aa, Severe acute respiratory syndrome coronavirus 2
  REGION 1..13: note = Table B: HLA-DRB1*04:03L HLA-DRB1*01:02L HLA-DRB1*12:01L HLA-DRB1*14:17L HLA-DRB1*16:01L HLA-DRB1*15:03L
LGPLSAQTGIAVL

SEQ ID NO: 13130 - protein, 13 aa, Severe acute respiratory syndrome coronavirus 2
  REGION 1..13: note = Table B: HLA-DRB1*04:03L HLA-DRB1*13:02L HLA-DRB1*13:03L HLA-DRB1*01:03L HLA-DRB1*04:02L HLA-DRB1*04:04L HLA-DRB1*04:05L HLA-DQA1*01:02-B1*06:02L HLA-DRB1*01:01L HLA-DRB1*01:02M HLA-DRB4*03:01NL HLA-DRB1*08:77L HLA-DRB3*02:01L
  REGION 1..13: note = CONT. FROM ABOVE: HLA-DPA1*01:03-B1*03:01L HLA-DRB1*14:01L HLA-D RB1*11:03L HLA-DRB1*14:02L HLA-DQA1*01-B1*05L HLA-DRB1*09:01L HL A-DRB1*12:01L HLA-DRB1*12:02L HLA-DPA1*03:01-B1*105:01L HLA-DRB1 *14:54L HLA-DRB1*14:17L HLA-DRB1*07:01L HLA-DRB1*10:01L
  REGION 1..13: note = CONT. FROM ABOVE: HLA-DRB1*16:01L HLA-DQA1*01:03-B1*06:01L HLA-D RB1*04:08L HLA-DRB1*15:03L
GPLSAQTGIAVLD

SEQ ID NO: 13131 - protein, 11 aa, Severe acute respiratory syndrome coronavirus 2
  REGION 1..11: note = Table B: HLA-DRB1*04:03L HLA-DQA1*01:02-B1*06:02L
IAVLDMCASLK

SEQ ID NO: 13132 - protein, 12 aa, Severe acute respiratory syndrome coronavirus 2
  REGION 1..12: note = Table B: HLA-DRB1*04:03L HLA-DRB1*01:02L HLA-DRB1*14:01L HLA-DQA1*05:01-B1*02:01L HLA-DRB1*12:01L HLA-DQA1*01:03-B1*06:01L
ASLKELLQNGMN

SEQ ID NO: 13133 - protein, 13 aa, Severe acute respiratory syndrome coronavirus 2
  REGION 1..13: note = Table B: HLA-DRB1*04:03L HLA-DQA1*01:02-B1*06:02L HLA-DRB1*01:02L HLA-DRB1*14:01L HLA-DPA1*03:01-B1*105:01L HLA-DQA1*01:03-B1*06:01L HLA-DQA1*02:01-B1*03:03L
LKELLQNGMNGRT

SEQ ID NO: 13134 - protein, 12 aa, Severe acute respiratory syndrome coronavirus 2
  REGION 1..12: note = Table B: HLA-DRB1*04:03L HLA-DQA1*01:02-B1*06:02L HLA-DQA1*01:03-B1*06:01L HLA-DQA1*02:01-B1*03:03L
ELLQNGMNGRTI

SEQ ID NO: 13135 - protein, 11 aa, Severe acute respiratory syndrome coronavirus 2
  REGION 1..11: note = Table B: HLA-DRB1*04:03L HLA-DPA1*03:01-B1*04:02L HLA-DPA1*03:01-B1*105:01L HLA-DQA1*03:01-B1*03:02L HLA-DPA1*01:02-B1*04:01L HLA-DQA1*01:03-B1*06:01L
ALLEDEFTPFD

SEQ ID NO: 13136 - protein, 11 aa, Severe acute respiratory syndrome coronavirus 2
  REGION 1..11: note = Table B: HLA-DRB1*04:03L HLA-DPA1*03:01-B1*04:02L HLA-DQA1*01:01-B1*05:01L
EDEFTPFDVVR

SEQ ID NO: 13137 - protein, 12 aa, Severe acute respiratory syndrome coronavirus 2
  REGION 1..12: note = Table B: HLA-DRB1*04:03L HLA-DQA1*01:02-B1*06:02L HLA-DPA1*03:01-B1*105:01L HLA-DRB1*04:08L
FTPFDVVRQCSG

SEQ ID NO: 13138 - protein, 13 aa, Severe acute respiratory syndrome coronavirus 2
  REGION 1..13: note = Table B: HLA-DRB1*04:03L HLA-DPA1*03:01-B1*105:01L HLA-DQA1*05:05-B1*03:01L HLA-DQA1*01:03-B1*06:01L HLA-DRB1*04:08L HLA-DQA1*02:01-B1*03:03L
TPFDVVRQCSGVT

SEQ ID NO: 13139 - protein, 14 aa, Severe acute respiratory syndrome coronavirus 2
  REGION 1..14: note = Table B: HLA-DRB1*04:03L HLA-DRB1*01:01L HLA-DRB1*14:02L HLA-DPA1*02:01-B1*13:01L HLA-DRB1*07:01L
SGVTFQSAVKRTIK

SEQ ID NO: 13140 - protein, 14 aa, Severe acute respiratory syndrome coronavirus 2
  REGION 1..14: note = Table B: HLA-DRB1*04:03L HLA-DRB1*01:01L HLA-DRB1*11:02L HLA-DRB1*14:02L HLA-DQA1*05:05-B1*03:19L HLA-DQA1*05:05-B1*03:116L HLA-DPA1*01:03-B1*04:02L HLA-DPA1*02:01-B1*13:01L HLA-DQA1*05:05-B1*03:01L
  REGION 1..14: note = CONT. FROM ABOVE: HLA-DRB1*07:01L HLA-DRB1*08:02L
GVTFQSAVKRTIKG

SEQ ID NO: 13141 - protein, 13 aa, Severe acute respiratory syndrome coronavirus 2
  REGION 1..13: note = Table B: HLA-DRB1*04:03L HLA-DRB1*01:02L HLA-DRB1*14:01L
TSLLVLVQSTQWS

SEQ ID NO: 13142 - protein, 13 aa, Severe acute respiratory syndrome coronavirus 2
  REGION 1..13: note = Table B: HLA-DRB1*04:03L HLA-DRB1*01:02L HLA-DPA1*01:03-B1*03:01L HLA-DRB1*14:01L HLA-DQA1*05:01-B1*02:01L HLA-DPA1*01:03-B1*04:01L HLA-DPA1*01:03-B1*04:02L HLA-DRB1*12:01L
  REGION 1..13: note = CONT. FROM ABOVE: HLA-DPA1*01:02-B1*04:01L HLA-DRB1*16:01L
ENAFLPFAMGIIA

SEQ ID NO: 13143 - protein, 12 aa, Severe acute respiratory syndrome coronavirus 2
  REGION 1..12: note = Table B: HLA-DRB1*04:03L HLA-DQA1*05:05-B1*03:19L HLA-DQA1*05:05-B1*03:01L HLA-DQA1*01:03-B1*06:01L
LPFAMGIIAMSA

SEQ ID NO: 13144 - protein, 12 aa, Severe acute respiratory syndrome coronavirus 2
  REGION 1..12: note = Table B: HLA-DRB1*04:03L HLA-DRB1*14:01L
AMGIIAMSAFAM

SEQ ID NO: 13145 - protein, 10 aa, Severe acute respiratory syndrome coronavirus 2
  REGION 1..10: note = Table B: HLA-DRB1*04:03L HLA-DQA1*01:02-B1*06:02L HLA-DRB1*01:02L HLA-DPA1*03:01-B1*04:02L HLA-DRB1*14:01L HLA-DQA1*05:01-B1*02:01L HLA-DRB1*12:01L HLA-DPA1*03:01-B1*105:01L HLA-DPA1*01:02-B1*04:01L
  REGION 1..10: note = CONT. FROM ABOVE: HLA-DQA1*01:03-B1*06:01L HLA-DRB1*15:03L
IIAMSAFAMM

SEQ ID NO: 13146 - protein, 13 aa, Severe acute respiratory syndrome coronavirus 2
  REGION 1..13: note = Table B: HLA-DRB1*04:03L HLA-DRB1*13:03L HLA-DRB1*04:04L HLA-DRB1*01:01L HLA-DRB1*08:04L HLA-DRB1*11:03L HLA-DRB1*11:04L HLA-DPA1*02:01-B1*13:01L HLA-DRB1*07:01L
SAFAMMFVKHKHA

SEQ ID NO: 13147 - protein, 11 aa, Severe acute respiratory syndrome coronavirus 2
  REGION 1..11: note = Table B: HLA-DRB1*04:03L HLA-DRB1*14:17L
LFLLPSLATVA

SEQ ID NO: 13148 - protein, 13 aa, Severe acute respiratory syndrome coronavirus 2
  REGION 1..13: note = Table B: HLA-DRB1*04:03L
ATVAYFNMVYMPA

SEQ ID NO: 13149 - protein, 12 aa, Severe acute respiratory syndrome coronavirus 2
  REGION 1..12: note = Table B: HLA-DRB1*04:03L HLA-DPA1*03:01-B1*04:02L HLA-DQA1*01-B1*05L HLA-DPA1*03:01-B1*105:01L
VAYFNMVYMPAS

SEQ ID NO: 13150 - protein, 13 aa, Severe acute respiratory syndrome coronavirus 2
  REGION 1..13: note = Table B: HLA-DRB1*04:03L HLA-DRB1*04:02L HLA-DRB1*04:05L HLA-DQA1*01:02-B1*06:02L HLA-DRB1*12:01L HLA-DRB1*16:01L HLA-DRB1*04:08L
VMRIMTWLDMVDT

SEQ ID NO: 13151 - protein, 12 aa, Severe acute respiratory syndrome coronavirus 2
  REGION 1..12: note = Table B: HLA-DRB1*04:03L HLA-DRB1*04:05L HLA-DQA1*01:02-B1*06:02L HLA-DPA1*03:01-B1*04:02L HLA-DQA1*05:01-B1*02:01L HLA-DPA1*03:01-B1*105:01L HLA-DRB1*15:03L
RIMTWLDMVDTS

SEQ ID NO: 13152 - protein, 10 aa, Severe acute respiratory syndrome coronavirus 2
  REGION 1..10: note = Table B: HLA-DRB1*04:03L HLA-DRB1*14:17L
LDMVDTSLSG

SEQ ID NO: 13153 - protein, 10 aa, Severe acute respiratory syndrome coronavirus 2
  REGION 1..10: note = Table B: HLA-DRB1*04:03L HLA-DRB1*04:02L HLA-DQA1*01:02-B1*06:02L HLA-DQA1*03:01-B1*03:02L HLA-DQA1*01:03-B1*06:01L HLA-DQA1*02:01-B1*03:03L
MTARTVYDDG

SEQ ID NO: 13154 - protein, 11 aa, Severe acute respiratory syndrome coronavirus 2
  REGION 1..11: note = Table B: HLA-DRB1*04:03L HLA-DRB1*04:02L HLA-DQA1*01-B1*05L HLA-DRB1*16:01L HLA-DQA1*02:01-B1*03:03L
TARTVYDDGAR

SEQ ID NO: 13155 - protein, 15 aa, Severe acute respiratory syndrome coronavirus 2
  REGION 1..15: note = Table B: HLA-DRB1*04:03L HLA-DRB1*01:03L HLA-DPA1*03:01-B1*04:02L HLA-DRB1*08:01L HLA-DRB1*11:01L HLA-DPA1*01:03-B1*04:01L HLA-DPA1*01:03-B1*04:02L HLA-DRB3*01:01L HLA-DQA1*03:01-B1*03:02L
  REGION 1..15: note = CONT. FROM ABOVE: HLA-DQA1*05:05-B1*03:01L HLA-DQA1*01:03-B1*06: 01L HLA-DQA1*02:01-B1*03:03L
DDGARRVWTLMNVLT

SEQ ID NO: 13156 - protein, 11 aa, Severe acute respiratory syndrome coronavirus 2
  REGION 1..11: note = Table B: HLA-DRB1*04:03L HLA-DQA1*01:03-B1*06:01L
TLMNVLTLVYK

SEQ ID NO: 13157 - protein, 13 aa, Severe acute respiratory syndrome coronavirus 2
  REGION 1..13: note = Table B: HLA-DRB1*04:03L HLA-DRB1*01:03L HLA-DRB1*01:02L HLA-DRB1*08:04L HLA-DPA1*01:03-B1*03:01L HLA-DRB1*08:01L HLA-DPA1*01:03-B1*04:01L HLA-DPA1*01:03-B1*04:02L HLA-DRB1*16:01L HLA-DQA1*01:03-B1*06:01L HLA-DRB1*04:08L
VLTLVYKVYYGNA

SEQ ID NO: 13158 - protein, 11 aa, Severe acute respiratory syndrome coronavirus 2
  REGION 1..11: note = Table B: HLA-DRB1*04:03L HLA-DRB1*01:02L HLA-DRB1*12:01L
VYKVYYGNALD

SEQ ID NO: 13159 - protein, 10 aa, Severe acute respiratory syndrome coronavirus 2
  REGION 1..10: note = Table B: HLA-DRB1*04:03L HLA-DRB1*04:02L HLA-DQA1*01-B1*05L HLA-DQA1*03:01-B1*03:02L HLA-DRB1*14:17L HLA-DRB1*16:01L HLA-DQA1*02:01-B1*03:03L HLA-DRB1*15:03L
KVYYGNALDQ

SEQ ID NO: 13160 - protein, 11 aa, Severe acute respiratory syndrome coronavirus 2
  REGION 1..11: note = Table B: HLA-DRB1*04:03L HLA-DQA1*01-B1*05L HLA-DQA1*05:01-B1*02:01L HLA-DQA1*03:01-B1*03:02L HLA-DRB1*14:17L
YYGNALDQAIS

SEQ ID NO: 13161 - protein, 13 aa, Severe acute respiratory syndrome coronavirus 2
  REGION 1..13: note = Table B: HLA-DRB1*04:03L HLA-DQA1*01:02-B1*06:02L HLA-DPA1*03:01-B1*105:01L HLA-DQA1*05:05-B1*03:01L
ISMWALIISVTSN

SEQ ID NO: 13162 - protein, 11 aa, Severe acute respiratory syndrome coronavirus 2
  REGION 1..11: note = Table B: HLA-DRB1*04:03L HLA-DRB1*14:17L
ALIISVTSNYS

SEQ ID NO: 13163 - protein, 10 aa, Severe acute respiratory syndrome coronavirus 2
  REGION 1..10: note = Table B: HLA-DRB1*04:03M HLA-DRB1*13:03L HLA-DRB1*01:03L HLA-DRB1*04:02L HLA-DRB1*04:04L HLA-DRB1*04:05L HLA-DRB4*03:01NL HLA-DRB1*11:04L HLA-DQA1*05:01-B1*02:01L HLA-DRB1*04:10M HLA-DRB1*12:01L HLA-DQA1*03:01-B1*03:02L HLA-DRB1*14:54L
  REGION 1..10: note = CONT. FROM ABOVE: HLA-DRB1*14:17M HLA-DRB1*10:01L HLA-DRB1*16:01 L HLA-DRB1*04:08L HLA-DRB1*08:03L HLA-DQA1*02:01-B1*03:03L
IISVTSNYSG

SEQ ID NO: 13164 - protein, 11 aa, Severe acute respiratory syndrome coronavirus 2
  REGION 1..11: note = Table B: HLA-DRB1*04:03L
ISVTSNYSGVV

SEQ ID NO: 13165 - protein, 11 aa, Severe acute respiratory syndrome coronavirus 2
  REGION 1..11: note = Table B: HLA-DRB1*04:03L HLA-DRB1*13:02L HLA-DRB1*01:03L HLA-DRB1*04:02L HLA-DRB4*03:01NL HLA-DRB1*08:77L HLA-DRB3*02:01L HLA-DPA1*01:03-B1*03:01L HLA-DPA1*01:03-B1*04:01L HLA-DPA1*01:03-B1*04:02L HLA-DRB1*12:01L HLA-DRB1*07:01L
  REGION 1..11: note = CONT. FROM ABOVE: HLA-DRB1*04:08L
SNYSGVVTTVM

SEQ ID NO: 13166 - protein, 11 aa, Severe acute respiratory syndrome coronavirus 2
  REGION 1..11: note = Table B: HLA-DRB1*04:03L HLA-DRB1*04:05L HLA-DRB4*01:01L
NYSGVVTTVMF

SEQ ID NO: 13167 - protein, 11 aa, Severe acute respiratory syndrome coronavirus 2
  REGION 1..11: note = Table B: HLA-DRB1*04:03L HLA-DRB1*01:03L HLA-DRB1*01:01L HLA-DRB1*14:02L HLA-DPA1*01:03-B1*04:01L HLA-DPA1*03:01-B1*105:01L HLA-DRB1*16:01L HLA-DQA1*02:01-B1*03:03L
VYDYLVSTQEF

SEQ ID NO: 13168 - protein, 11 aa, Severe acute respiratory syndrome coronavirus 2
  REGION 1..11: note = Table B: HLA-DRB1*04:03L HLA-DRB1*04:02L HLA-DRB1*14:17L
YDYLVSTQEFR

SEQ ID NO: 13169 - protein, 11 aa, Severe acute respiratory syndrome coronavirus 2
  REGION 1..11: note = Table B: HLA-DRB1*04:03L HLA-DRB1*04:02L HLA-DQA1*01-B1*05L HLA-DQA1*03:01-B1*03:02L HLA-DRB1*14:17L
TQEFRYMNSQG

SEQ ID NO: 13170 - protein, 10 aa, Severe acute respiratory syndrome coronavirus 2
  REGION 1..10: note = Table B: HLA-DRB1*04:03L HLA-DRB1*13:03L HLA-DRB1*04:02L HLA-DRB4*03:01NL HLA-DQA1*03:01-B1*03:02L HLA-DRB1*14:17L HLA-DQA1*01:03-B1*06:01L HLA-DQA1*02:01-B1*03:03L
MNSQGLLPPK

SEQ ID NO: 13171 - protein, 10 aa, Severe acute respiratory syndrome coronavirus 2
  REGION 1..10: note = Table B: HLA-DRB1*04:03L HLA-DQA1*03:01-B1*03:02L
GLLPPKNSID

SEQ ID NO: 13172 - protein, 10 aa, Severe acute respiratory syndrome coronavirus 2
  REGION 1..10: note = Table B: HLA-DRB1*04:03L HLA-DQA1*03:01-B1*03:02L HLA-DRB1*14:17L
LLPPKNSIDA

SEQ ID NO: 13173 - protein, 10 aa, Severe acute respiratory syndrome coronavirus 2
  REGION 1..10: note = Table B: HLA-DRB1*04:03L
IKLLGVGGKP

SEQ ID NO: 13174 - protein, 10 aa, Severe acute respiratory syndrome coronavirus 2
  REGION 1..10: note = Table B: HLA-DRB1*04:03L HLA-DQA1*03:01-B1*03:02L HLA-DQA1*01:03-B1*06:01L HLA-DQA1*02:01-B1*03:03L
IKVATVQSKM

SEQ ID NO: 13175 - protein, 11 aa, Severe acute respiratory syndrome coronavirus 2
  REGION 1..11: note = Table B: HLA-DRB1*04:03L
TSVVLLSVLQQ

SEQ ID NO: 13176 - protein, 11 aa, Severe acute respiratory syndrome coronavirus 2
  REGION 1..11: note = Table B: HLA-DRB1*04:03L HLA-DRB1*04:02L HLA-DQA1*01:02-B1*06:02L HLA-DRB1*12:01L HLA-DPA1*03:01-B1*105:01L HLA-DRB1*14:17L HLA-DPA1*01:02-B1*04:01L
VVLLSVLQQLR

SEQ ID NO: 13177 - protein, 10 aa, Severe acute respiratory syndrome coronavirus 2
  REGION 1..10: note = Table B: HLA-DRB1*04:03L HLA-DRB1*14:17L
VLQQLRVESS

SEQ ID NO: 13178 - protein, 11 aa, Severe acute respiratory syndrome coronavirus 2
  REGION 1..11: note = Table B: HLA-DRB1*04:03L HLA-DRB1*14:17L
LQQLRVESSSK

SEQ ID NO: 13179 - protein, 13 aa, Severe acute respiratory syndrome coronavirus 2
  REGION 1..13: note = Table B: HLA-DRB1*04:03L HLA-DQA1*01:02-B1*06:02L HLA-DPA1*03:01-B1*105:01L HLA-DQA1*01:03-B1*06:01L HLA-DQA1*02:01-B1*03:03L
VQLHNDILLAKDT

SEQ ID NO: 13180 - protein, 10 aa, Severe acute respiratory syndrome coronavirus 2
  REGION 1..10: note = Table B: HLA-DRB1*04:03L HLA-DQA1*01-B1*05L HLA-DQA1*05:01-B1*02:01L
LAKDTTEAFE

SEQ ID NO: 13181 - protein, 11 aa, Severe acute respiratory syndrome coronavirus 2
  REGION 1..11: note = Table B: HLA-DRB1*04:03L HLA-DRB1*14:17L
EAFEKMVSLLS

SEQ ID NO: 13182 - protein, 11 aa, Severe acute respiratory syndrome coronavirus 2
  REGION 1..11: note = Table B: HLA-DRB1*04:03L HLA-DRB1*04:02L HLA-DRB1*04:05L HLA-DQA1*01:02-B1*06:02L HLA-DRB1*01:02L HLA-DPA1*01:03-B1*03:01L HLA-DPA1*03:01-B1*04:02L HLA-DRB1*14:01L HLA-DRB1*12:01L HLA-DPA1*03:01-B1*105:01L
  REGION 1..11: note = CONT. FROM ABOVE: HLA-DRB1*14:17L HLA-DRB1*04:08L HLA-DQA1*02:01 -B1*03:03L HLA-DRB1*15:03L
FEKMVSLLSVL

SEQ ID NO: 13183 - protein, 12 aa, Severe acute respiratory syndrome coronavirus 2
  REGION 1..12: note = Table B: HLA-DRB1*04:03L
VSLLSVLLSMQG

SEQ ID NO: 13184 - protein, 11 aa, Severe acute respiratory syndrome coronavirus 2
  REGION 1..11: note = Table B: HLA-DRB1*04:03L
SVLLSMQGAVD

SEQ ID NO: 13185 - protein, 12 aa, Severe acute respiratory syndrome coronavirus 2
  REGION 1..12: note = Table B: HLA-DRB1*04:03L
VLLSMQGAVDIN

SEQ ID NO: 13186 - protein, 14 aa, Severe acute respiratory syndrome coronavirus 2
  REGION 1..14: note = Table B: HLA-DRB1*04:03L HLA-DRB1*01:03L HLA-DRB1*04:04L HLA-DPA1*03:01-B1*04:02L HLA-DRB1*14:01L HLA-DQA1*01-B1*05L HLA-DPA1*01:02-B1*04:01L HLA-DRB1*07:01L HLA-DRB1*04:08L
VDINKLCEEMLDNR

SEQ ID NO: 13187 - protein, 12 aa, Severe acute respiratory syndrome coronavirus 2
  REGION 1..12: note = Table B: HLA-DRB1*04:03L HLA-DRB1*04:05L
KLCEEMLDNRAT

SEQ ID NO: 13188 - protein, 11 aa, Severe acute respiratory syndrome coronavirus 2
  REGION 1..11: note = Table B: HLA-DRB1*04:03L HLA-DRB1*14:17L
EEMLDNRATLQ

SEQ ID NO: 13189 - protein, 12 aa, Severe acute respiratory syndrome coronavirus 2
  REGION 1..12: note = Table B: HLA-DRB1*04:03L HLA-DRB1*04:02L HLA-DRB1*04:05L HLA-DRB1*04:10L HLA-DRB1*12:01L HLA-DRB1*14:54L HLA-DRB1*14:17L
RATLQAIASEFS

SEQ ID NO: 13190 - protein, 12 aa, Severe acute respiratory syndrome coronavirus 2
  REGION 1..12: note = Table B: HLA-DRB1*04:03L HLA-DRB1*04:02L HLA-DRB1*04:10L HLA-DRB1*14:17L
ATLQAIASEFSS

SEQ ID NO: 13191 - protein, 11 aa, Severe acute respiratory syndrome coronavirus 2
  REGION 1..11: note = Table B: HLA-DRB1*04:03L
PSYAAFATAQE

SEQ ID NO: 13192 - protein, 11 aa, Severe acute respiratory syndrome coronavirus 2
  REGION 1..11: note = Table B: HLA-DRB1*04:03L
AAFATAQEAYE

SEQ ID NO: 13193 - protein, 12 aa, Severe acute respiratory syndrome coronavirus 2
  REGION 1..12: note = Table B: HLA-DRB1*04:03L HLA-DQA1*01-B1*05L HLA-DQA1*05:01-B1*02:01L HLA-DQA1*03:01-B1*03:02L
QEAYEQAVANGD

SEQ ID NO: 13194 - protein, 10 aa, Severe acute respiratory syndrome coronavirus 2
  REGION 1..10: note = Table B: HLA-DRB1*04:03L HLA-DRB1*04:05L HLA-DQA1*03:01-B1*03:02L HLA-DRB1*14:17L
YEQAVANGDS

SEQ ID NO: 13195 - protein, 12 aa, Severe acute respiratory syndrome coronavirus 2
  REGION 1..12: note = Table B: HLA-DRB1*04:03L HLA-DQA1*01-B1*05L HLA-DQA1*05:01-B1*02:01L HLA-DQA1*03:01-B1*03:02L HLA-DQA1*02:01-B1*03:03L
EQAVANGDSEVV

SEQ ID NO: 13196 - protein, 18 aa, Severe acute respiratory syndrome coronavirus 2
  REGION 1..18: note = Table B: HLA-DRB1*04:03L HLA-DPA1*01:03-B1*03:01L HLA-DQA1*05:05-B1*03:116L HLA-DPA1*01:03-B1*104:01L
GDSEVVLKKLKKSLNVAK

SEQ ID NO: 13197 - protein, 11 aa, Severe acute respiratory syndrome coronavirus 2
  REGION 1..11: note = Table B: HLA-DRB1*04:03L
KSLNVAKSEFD

SEQ ID NO: 13198 - protein, 10 aa, Severe acute respiratory syndrome coronavirus 2
  REGION 1..10: note = Table B: HLA-DRB1*04:03L HLA-DRB1*04:05L HLA-DQA1*03:01-B1*03:02L HLA-DRB1*14:17L HLA-DQA1*02:01-B1*03:03L
LNVAKSEFDR

SEQ ID NO: 13199 - protein, 11 aa, Severe acute respiratory syndrome coronavirus 2
  REGION 1..11: note = Table B: HLA-DRB1*04:03L HLA-DQA1*01-B1*05L HLA-DQA1*03:01-B1*03:02L HLA-DQA1*02:01-B1*03:03L
VAKSEFDRDAA

SEQ ID NO: 13200 - protein, 10 aa, Severe acute respiratory syndrome coronavirus 2
  REGION 1..10: note = Table B: HLA-DRB1*04:03L HLA-DRB1*13:02L HLA-DRB1*13:03L HLA-DRB1*01:03L HLA-DRB1*01:02L HLA-DRB1*03:01L HLA-DRB1*14:01L HLA-DRB3*01:01L HLA-DQA1*03:01-B1*03:02L HLA-DPA1*01:02-B1*04:01L HLA-DRB1*16:01L
FDRDAAMQRK

SEQ ID NO: 13201 - protein, 10 aa, Severe acute respiratory syndrome coronavirus 2
  REGION 1..10: note = Table B: HLA-DRB1*04:03L HLA-DQA1*01-B1*05L
LEKMADQAMT

SEQ ID NO: 13202 - protein, 13 aa, Severe acute respiratory syndrome coronavirus 2
  REGION 1..13: note = Table B: HLA-DRB1*04:03L HLA-DRB1*13:03L HLA-DRB1*01:03L HLA-DRB1*04:05L HLA-DRB1*01:02L HLA-DRB1*08:04L HLA-DRB1*11:04L HLA-DRB1*12:01L HLA-DRB1*14:54L HLA-DRB1*14:17L HLA-DRB1*16:01L HLA-DRB1*04:08L
DQAMTQMYKQARS

SEQ ID NO: 13203 - protein, 12 aa, Severe acute respiratory syndrome coronavirus 2
  REGION 1..12: note = Table B: HLA-DRB1*04:03L HLA-DRB1*01:03L HLA-DRB1*04:02L HLA-DQA1*01:02-B1*06:02L HLA-DRB1*01:02L HLA-DRB1*14:01L HLA-DRB1*12:01L HLA-DQA1*03:01-B1*03:02L HLA-DPA1*01:02-B1*04:01L HLA-DRB1*16:01L
  REGION 1..12: note = CONT. FROM ABOVE: HLA-DQA1*01:03-B1*06:01L HLA-DQA1*02:01-B1*03: 03L HLA-DRB1*15:03L
MTQMYKQARSED

SEQ ID NO: 13204 - protein, 12 aa, Severe acute respiratory syndrome coronavirus 2
  REGION 1..12: note = Table B: HLA-DRB1*04:03L HLA-DRB1*04:02L HLA-DRB1*04:05L HLA-DRB1*01:02L HLA-DQA1*05:01-B1*02:01L HLA-DRB1*12:01L HLA-DPA1*02:01-B1*13:01L HLA-DQA1*03:01-B1*03:02L HLA-DRB1*16:01L HLA-DRB1*04:08L HLA-DRB1*15:03L
TMLRKLDNDALN

SEQ ID NO: 13205 - protein, 11 aa, Severe acute respiratory syndrome coronavirus 2
  REGION 1..11: note = Table B: HLA-DRB1*04:03L HLA-DRB1*04:02L HLA-DQA1*03:01-B1*03:02L HLA-DRB1*14:17L HLA-DRB1*16:01L
LRKLDNDALNN

SEQ ID NO: 13206 - protein, 12 aa, Severe acute respiratory syndrome coronavirus 2
  REGION 1..12: note = Table B: HLA-DRB1*04:03L HLA-DRB1*04:02L HLA-DPA1*01:03-B1*03:01L HLA-DQA1*01-B1*05L
KLDNDALNNIIN

SEQ ID NO: 13207 - protein, 12 aa, Severe acute respiratory syndrome coronavirus 2
  REGION 1..12: note = Table B: HLA-DRB1*04:03L HLA-DQA1*01:02-B1*06:02L
NDALNNIINNAR

SEQ ID NO: 13208 - protein, 10 aa, Severe acute respiratory syndrome coronavirus 2
  REGION 1..10: note = Table B: HLA-DRB1*04:03L HLA-DQA1*03:01-B1*03:02L HLA-DRB1*14:17L
LNNIINNARD

SEQ ID NO: 13209 - protein, 11 aa, Severe acute respiratory syndrome coronavirus 2
  REGION 1..11: note = Table B: HLA-DRB1*04:03L
IINNARDGCVP

SEQ ID NO: 13210 - protein, 10 aa, Severe acute respiratory syndrome coronavirus 2
  REGION 1..10: note = Table B: HLA-DRB1*04:03L HLA-DRB1*13:02L HLA-DRB1*13:03L HLA-DRB1*04:02L HLA-DRB1*01:01L HLA-DRB4*03:01NL HLA-DRB1*14:01L HLA-DRB1*11:04L HLA-DRB1*08:01L HLA-DRB1*12:01L HLA-DQA1*03:01-B1*03:02L HLA-DQA1*05:05-B1*03:01L
  REGION 1..10: note = CONT. FROM ABOVE: HLA-DRB1*14:17L HLA-DRB1*16:01L HLA-DQA1*02:01 -B1*03:03L
NIIPLTTAAK

SEQ ID NO: 13211 - protein, 10 aa, Severe acute respiratory syndrome coronavirus 2
  REGION 1..10: note = Table B: HLA-DRB1*04:03L HLA-DQA1*01:02-B1*06:02L HLA-DQA1*03:01-B1*03:02L
KLMVVIPDYN

SEQ ID NO: 13212 - protein, 10 aa, Severe acute respiratory syndrome coronavirus 2
  REGION 1..10: note = Table B: HLA-DRB1*04:03L HLA-DRB1*13:02L HLA-DRB1*13:03L HLA-DRB1*01:03L HLA-DRB1*04:02L HLA-DRB4*03:01NL HLA-DRB1*14:01L HLA-DQA1*01-B1*05L HLA-DRB1*12:01L HLA-DQA1*03:01-B1*03:02L HLA-DRB1*14:54L HLA-DQA1*05:05-B1*03:01L HLA-DRB1*14:17L
  REGION 1..10: note = CONT. FROM ABOVE: HLA-DRB1*16:01L HLA-DQA1*02:01-B1*03:03L
VVIPDYNTYK

SEQ ID NO: 13213 - protein, 11 aa, Severe acute respiratory syndrome coronavirus 2
  REGION 1..11: note = Table B: HLA-DRB1*04:03L HLA-DRB1*04:02L HLA-DRB1*14:17L
VIPDYNTYKNT

SEQ ID NO: 13214 - protein, 12 aa, Severe acute respiratory syndrome coronavirus 2
  REGION 1..12: note = Table B: HLA-DRB1*04:03L HLA-DRB1*04:02L HLA-DRB1*04:05L HLA-DQA1*01-B1*05L HLA-DQA1*03:01-B1*03:02L HLA-DRB1*16:01L HLA-DRB1*04:08L
YNTYKNTCDGTT

SEQ ID NO: 13215 - protein, 12 aa, Severe acute respiratory syndrome coronavirus 2
  REGION 1..12: note = Table B: HLA-DRB1*04:03L HLA-DQA1*01-B1*05L HLA-DQA1*05:01-B1*02:01L HLA-DRB1*12:01L HLA-DRB1*14:17L HLA-DRB1*15:03L
GTTFTYASALWE

SEQ ID NO: 13216 - protein, 13 aa, Severe acute respiratory syndrome coronavirus 2
  REGION 1..13: note = Table B: HLA-DRB1*04:03L HLA-DRB1*01:03L HLA-DRB1*01:02L HLA-DPA1*01:03-B1*03:01L HLA-DRB1*12:01L HLA-DPA1*02:01-B1*13:01L HLA-DQA1*03:01-B1*03:02L HLA-DPA1*01:03-B1*02:01L
TFTYASALWEIQQ

SEQ ID NO: 13217 - protein, 12 aa, Severe acute respiratory syndrome coronavirus 2
  REGION 1..12: note = Table B: HLA-DRB1*04:03L
SALWEIQQVVDA

SEQ ID NO: 13218 - protein, 11 aa, Severe acute respiratory syndrome coronavirus 2
  REGION 1..11: note = Table B: HLA-DRB1*04:03L HLA-DRB1*14:17L
WEIQQVVDADS

SEQ ID NO: 13219 - protein, 12 aa, Severe acute respiratory syndrome coronavirus 2
  REGION 1..12: note = Table B: HLA-DRB1*04:03L HLA-DRB1*04:05L HLA-DRB4*03:01NL HLA-DRB1*14:54L HLA-DQA1*05:05-B1*03:01L HLA-DRB1*14:17L HLA-DRB1*04:08L
VDADSKIVQLSE

SEQ ID NO: 13220 - protein, 11 aa, Severe acute respiratory syndrome coronavirus 2
  REGION 1..11: note = Table B: HLA-DRB1*04:03L HLA-DRB1*13:02L HLA-DRB1*04:02L HLA-DRB1*01:02L HLA-DRB1*14:54L HLA-DRB1*14:17L HLA-DPA1*01:02-B1*04:01L HLA-DRB1*07:01L
SKIVQLSEISM

SEQ ID NO: 13221 - protein, 10 aa, Severe acute respiratory syndrome coronavirus 2
  REGION 1..10: note = Table B: HLA-DRB1*04:03L HLA-DRB1*04:02L HLA-DRB1*14:17L HLA-DRB1*16:01L
ISMDNSPNLA

SEQ ID NO: 13222 - protein, 10 aa, Severe acute respiratory syndrome coronavirus 2
  REGION 1..10: note = Table B: HLA-DRB1*04:03L HLA-DRB1*01:03L HLA-DRB1*04:02L HLA-DRB1*01:02L HLA-DQA1*03:01-B1*03:02L HLA-DRB1*14:17L HLA-DQA1*02:01-B1*03:03L
TALRANSAVK

SEQ ID NO: 13223 - protein, 10 aa, Severe acute respiratory syndrome coronavirus 2
  REGION 1..10: note = Table B: HLA-DRB1*04:03L HLA-DQA1*01:02-B1*06:02L HLA-DQA1*03:01-B1*03:02L HLA-DRB1*14:17L HLA-DQA1*01:03-B1*06:01L HLA-DQA1*02:01-B1*03:03L
NSAVKLQNNE

SEQ ID NO: 13224 - protein, 10 aa, Severe acute respiratory syndrome coronavirus 2
  REGION 1..10: note = Table B: HLA-DRB1*04:03L HLA-DRB1*14:17L
VKLQNNELSP

SEQ ID NO: 13225 - protein, 10 aa, Severe acute respiratory syndrome coronavirus 2
  REGION 1..10: note = Table B: HLA-DRB1*04:03L HLA-DRB1*04:02L HLA-DRB1*14:17L
KLQNNELSPV

SEQ ID NO: 13226 - protein, 10 aa, Severe acute respiratory syndrome coronavirus 2
  REGION 1..10: note = Table B: HLA-DRB1*04:03L
LQNNELSPVA

SEQ ID NO: 13227 - protein, 10 aa, Severe acute respiratory syndrome coronavirus 2
  REGION 1..10: note = Table B: HLA-DRB1*04:03L HLA-DRB1*01:03L HLA-DQA1*03:01-B1*03:02L HLA-DRB1*14:17L HLA-DQA1*02:01-B1*03:03L
NELSPVALRQ

SEQ ID NO: 13228 - protein, 13 aa, Severe acute respiratory syndrome coronavirus 2
  REGION 1..13: note = Table B: HLA-DRB1*04:03L
SPVALRQMSCAAG

SEQ ID NO: 13229 - protein, 12 aa, Severe acute respiratory syndrome coronavirus 2
  REGION 1..12: note = Table B: HLA-DRB1*04:03L HLA-DQA1*01:02-B1*06:02L HLA-DQA1*05:05-B1*03:01L HLA-DQA1*01:03-B1*06:01L HLA-DQA1*02:01-B1*03:03L
LRQMSCAAGTTQ

SEQ ID NO: 13230 - protein, 11 aa, Severe acute respiratory syndrome coronavirus 2
  REGION 1..11: note = Table B: HLA-DRB1*04:03L HLA-DRB1*04:02L HLA-DQA1*01-B1*05L
DNALAYYNTTK

SEQ ID NO: 13231 - protein, 11 aa, Severe acute respiratory syndrome coronavirus 2
  REGION 1..11: note = Table B: HLA-DRB1*04:03L HLA-DRB1*04:02L HLA-DQA1*03:01-B1*03:02L HLA-DRB1*14:17L HLA-DQA1*02:01-B1*03:03L
NALAYYNTTKG

SEQ ID NO: 13232 - protein, 11 aa, Severe acute respiratory syndrome coronavirus 2
  REGION 1..11: note = Table B: HLA-DRB1*04:03L
LAYYNTTKGGR

SEQ ID NO: 13233 - protein, 13 aa, Severe acute respiratory syndrome coronavirus 2
  REGION 1..13: note = Table B: HLA-DRB1*04:03L HLA-DRB1*04:05L HLA-DRB1*12:01L
GRFVLALLSDLQD

SEQ ID NO: 13234 - protein, 11 aa, Severe acute respiratory syndrome coronavirus 2
  REGION 1..11: note = Table B: HLA-DRB1*04:03L HLA-DQA1*01-B1*05L
VLALLSDLQDL

SEQ ID NO: 13235 - protein, 10 aa, Severe acute respiratory syndrome coronavirus 2
  REGION 1..10: note = Table B: HLA-DRB1*04:03L HLA-DRB1*13:03L HLA-DRB1*04:02L HLA-DRB1*04:05L HLA-DRB4*03:01NL HLA-DQA1*01-B1*05L HLA-DQA1*05:01-B1*02:01L HLA-DRB1*12:01L HLA-DPA1*03:01-B1*105:01L HLA-DQA1*03:01-B1*03:02L
  REGION 1..10: note = CONT. FROM ABOVE: HLA-DRB1*14:54L HLA-DRB1*14:17L HLA-DRB1*16:01 L HLA-DQA1*01:03-B1*06:01L HLA-DQA1*02:01-B1*03:03L
ALLSDLQDLK

SEQ ID NO: 13236 - protein, 11 aa, Severe acute respiratory syndrome coronavirus 2
  REGION 1..11: note = Table B: HLA-DRB1*04:03L HLA-DRB1*14:17L
WARFPKSDGTG

SEQ ID NO: 13237 - protein, 11 aa, Severe acute respiratory syndrome coronavirus 2
  REGION 1..11: note = Table B: HLA-DRB1*04:03L HLA-DRB1*01:03M HLA-DQA1*01:02-B1*06:02M HLA-DRB1*08:77L HLA-DPA1*01:03-B1*03:01L HLA-DRB1*03:01L HLA-DRB1*11:03L HLA-DRB1*14:02L HLA-DRB1*11:01L HLA-DRB5*01:01L
  REGION 1..11: note = CONT. FROM ABOVE: HLA-DQA1*05:01-B1*02:01L HLA-DPA1*01:03-B1*04: 01L HLA-DQA1*05:05-B1*03:116L HLA-DPA1*01:03-B1*04:02L HLA-DRB1* 12:01L HLA-DPA1*03:01-B1*105:01M HLA-DRB1*10:01L HLA-DRB1*16:01L HLA-DQA1*01:03-B1*06:01L HLA-DRB1*08:02L
  REGION 1..11: note = CONT. FROM ABOVE: HLA-DQA1*02:01-B1*03:03L HLA-DRB1*15:03L
FPKSDGTGTIY

SEQ ID NO: 13238 - protein, 11 aa, Severe acute respiratory syndrome coronavirus 2
  REGION 1..11: note = Table B: HLA-DRB1*04:03L HLA-DRB1*01:03L HLA-DPA1*03:01-B1*04:02L HLA-DRB1*12:01L HLA-DRB1*04:08L
TIYTELEPPCR

SEQ ID NO: 13239 - protein, 11 aa, Severe acute respiratory syndrome coronavirus 2
  REGION 1..11: note = Table B: HLA-DRB1*04:03L HLA-DRB1*04:05L HLA-DPA1*02:01-B1*13:01 M
IYTELEPPCRF

SEQ ID NO: 13240 - protein, 11 aa, Severe acute respiratory syndrome coronavirus 2
  REGION 1..11: note = Table B: HLA-DRB1*04:03L HLA-DQA1*01:02-B1*06:02L HLA-DPA1*03:01-B1*04:02L HLA-DQA1*03:01-B1*03:02L HLA-DPA1*01:02-B1*04:01L HLA-DRB1*16:01L
LYFIKGLNNLN

SEQ ID NO: 13241 - protein, 10 aa, Severe acute respiratory syndrome coronavirus 2
  REGION 1..10: note = Table B: HLA-DRB1*04:03L HLA-DRB1*01:03L HLA-DRB1*04:02L HLA-DQA1*03:01-B1*03:02L HLA-DRB1*14:17L HLA-DQA1*02:01-B1*03:03L
IKGLNNLNRG

SEQ ID NO: 13242 - protein, 13 aa, Severe acute respiratory syndrome coronavirus 2
  REGION 1..13: note = Table B: HLA-DRB1*04:03L HLA-DRB1*01:02L HLA-DPA1*01:03-B1*03:01L HLA-DQA1*05:01-B1*02:01L HLA-DRB1*15:03L
LNNLNRGMVLGSL

SEQ ID NO: 13243 - protein, 12 aa, Severe acute respiratory syndrome coronavirus 2
  REGION 1..12: note = Table B: HLA-DRB1*04:03L HLA-DRB1*01:02L
NLNRGMVLGSLA

SEQ ID NO: 13244 - protein, 10 aa, Severe acute respiratory syndrome coronavirus 2
  REGION 1..10: note = Table B: HLA-DRB1*04:03L HLA-DRB1*04:02L HLA-DQA1*01:02-B1*06:02L HLA-DRB1*14:01L HLA-DQA1*01:03-B1*06:01L HLA-DQA1*02:01-B1*03:03L
LAATVRLQAG

SEQ ID NO: 13245 - protein, 11 aa, Severe acute respiratory syndrome coronavirus 2
  REGION 1..11: note = Table B: HLA-DRB1*04:03L HLA-DRB1*04:02L HLA-DRB1*14:17L HLA-DQA1*02:01-B1*03:03L
ATVRLQAGNAT

SEQ ID NO: 13246 - protein, 11 aa, Severe acute respiratory syndrome coronavirus 2
  REGION 1..11: note = Table B: HLA-DRB1*04:03L
TVRLQAGNATE

SEQ ID NO: 13247 - protein, 12 aa, Severe acute respiratory syndrome coronavirus 2
  REGION 1..12: note = Table B: HLA-DRB1*04:03L
GNATEVPANSTV

SEQ ID NO: 13248 - protein, 11 aa, Severe acute respiratory syndrome coronavirus 2
  REGION 1..11: note = Table B: HLA-DRB1*04:03L HLA-DRB1*04:02L HLA-DRB1*14:01L HLA-DRB1*12:01L
ATEVPANSTVL

SEQ ID NO: 13249 - protein, 12 aa, Severe acute respiratory syndrome coronavirus 2
  REGION 1..12: note = Table B: HLA-DRB1*04:03L HLA-DRB4*03:01NL HLA-DPA1*01:03-B1*03:01L HLA-DRB1*03:01L HLA-DRB1*12:01L
TEVPANSTVLSF

SEQ ID NO: 13250 - protein, 12 aa, Severe acute respiratory syndrome coronavirus 2
  REGION 1..12: note = Table B: HLA-DRB1*04:03L HLA-DRB1*04:02L HLA-DRB1*16:01L HLA-DRB1*15:03L
DAAKAYKDYLAS

SEQ ID NO: 13251 - protein, 12 aa, Severe acute respiratory syndrome coronavirus 2
  REGION 1..12: note = Table B: HLA-DRB1*04:03L HLA-DRB1*04:02L HLA-DRB1*04:05L HLA-DRB1*01:02L HLA-DRB1*12:01L HLA-DPA1*02:01-B1*13:01L HLA-DQA1*03:01-B1*03:02L HLA-DRB1*16:01L HLA-DQA1*02:01-B1*03:03L HLA-DRB1*15:03L
AAKAYKDYLASG

SEQ ID NO: 13252 - protein, 12 aa, Severe acute respiratory syndrome coronavirus 2
  REGION 1..12: note = Table B: HLA-DRB1*04:03L HLA-DRB1*04:02L HLA-DRB1*16:01L HLA-DRB1*15:03L
AKAYKDYLASGG

SEQ ID NO: 13253 - protein, 13 aa, Severe acute respiratory syndrome coronavirus 2
  REGION 1..13: note = Table B: HLA-DRB1*04:03L HLA-DRB1*01:03L HLA-DRB1*04:05L HLA-DRB1*01:02L HLA-DRB1*12:01L HLA-DPA1*02:01-B1*13:01L HLA-DPA1*03:01-B1*105:01L HLA-DPA1*01:02-B1*04:01L HLA-DRB1*16:01L HLA-DRB1*04:08L HLA-DRB1*15:03L
KAYKDYLASGGQP

SEQ ID NO: 13254 - protein, 13 aa, Severe acute respiratory syndrome coronavirus 2
  REGION 1..13: note = Table B: HLA-DRB1*04:03L HLA-DRB1*01:03L HLA-DRB1*04:02L HLA-DQA1*01:01-B1*05:01L HLA-DQA1*05:01-B1*02:01L HLA-DRB1*04:08L
HTGTGQAITVTPE

SEQ ID NO: 13255 - protein, 10 aa, Severe acute respiratory syndrome coronavirus 2
  REGION 1..10: note = Table B: HLA-DRB1*04:03L HLA-DQA1*05:01-B1*02:01L HLA-DQA1*03:01-B1*03:02L HLA-DRB1*14:17L HLA-DQA1*02:01-B1*03:03L
ITVTPEANMD

SEQ ID NO: 13256 - protein, 11 aa, Severe acute respiratory syndrome coronavirus 2
  REGION 1..11: note = Table B: HLA-DRB1*04:03L HLA-DQA1*03:01-B1*03:02L HLA-DRB1*14:17L
VTPEANMDQES

SEQ ID NO: 13257 - protein, 10 aa, Severe acute respiratory syndrome coronavirus 2
  REGION 1..10: note = Table B: HLA-DRB1*04:03L
KGKYVQIPTT

SEQ ID NO: 13258 - protein, 10 aa, Severe acute respiratory syndrome coronavirus 2
  REGION 1..10: note = Table B: HLA-DRB1*04:03L HLA-DRB1*14:17L HLA-DRB1*04:08L
YVQIPTTCAN

SEQ ID NO: 13259 - protein, 12 aa, Severe acute respiratory syndrome coronavirus 2
  REGION 1..12: note = Table B: HLA-DRB1*04:03L
NDPVGFTLKNTV

SEQ ID NO: 13260 - protein, 13 aa, Severe acute respiratory syndrome coronavirus 2
  REGION 1..13: note = Table B: HLA-DRB1*04:03L HLA-DRB1*04:02L HLA-DQA1*01:02-B1*06:02L HLA-DQA1*03:01-B1*03:02L HLA-DQA1*01:03-B1*06:01L HLA-DQA1*02:01-B1*03:03L
DQLREPMLQSADA

SEQ ID NO: 13261 - protein, 12 aa, Severe acute respiratory syndrome coronavirus 2
  REGION 1..12: note = Table B: HLA-DRB1*04:03L HLA-DQA1*02:01-B1*03:03L
LREPMLQSADAQ

SEQ ID NO: 13262 - protein, 12 aa, Severe acute respiratory syndrome coronavirus 2
  REGION 1..12: note = Table B: HLA-DRB1*04:03L HLA-DRB1*04:02L HLA-DRB1*04:05L HLA-DQA1*01-B1*05L HLA-DRB1*04:10L HLA-DRB1*14:17L HLA-DQA1*02:01-B1*03:03L
REPMLQSADAQS

SEQ ID NO: 13263 - protein, 13 aa, Severe acute respiratory syndrome coronavirus 2
  REGION 1..13: note = Table B: HLA-DRB1*04:03L HLA-DRB1*04:02L HLA-DRB1*04:05L HLA-DQA1*01:02-B1*06:02L HLA-DRB1*04:10L HLA-DRB1*14:17L
AARLTPCGTGTST

SEQ ID NO: 13264 - protein, 13 aa, Severe acute respiratory syndrome coronavirus 2
  REGION 1..13: note = Table B: HLA-DRB1*04:03L HLA-DRB1*14:17L HLA-DQA1*01:03-B1*06:01L
ARLTPCGTGTSTD

SEQ ID NO: 13265 - protein, 12 aa, Severe acute respiratory syndrome coronavirus 2
  REGION 1..12: note = Table B: HLA-DRB1*04:03L
GTSTDVVYRAFD

SEQ ID NO: 13266 - protein, 10 aa, Severe acute respiratory syndrome coronavirus 2
  REGION 1..10: note = Table B: HLA-DRB1*04:03L HLA-DRB1*01:02L HLA-DQA1*01-B1*05L HLA-DRB1*16:01L HLA-DRB1*15:03L
VVYRAFDIYN

SEQ ID NO: 13267 - protein, 11 aa, Severe acute respiratory syndrome coronavirus 2
  REGION 1..11: note = Table B: HLA-DRB1*04:03L HLA-DRB1*13:03L HLA-DRB1*01:03L HLA-DRB1*04:05L HLA-DRB1*08:01L HLA-DQA1*01-B1*05L HLA-DPA1*01:02-B1*04:01L HLA-DRB1*16:01L HLA-DRB1*04:08L HLA-DQA1*02:01-B1*03:03L
VYRAFDIYNDK

SEQ ID NO: 13268 - protein, 11 aa, Severe acute respiratory syndrome coronavirus 2
  REGION 1..11: note = Table B: HLA-DRB1*04:03L HLA-DRB1*04:02L
RAFDIYNDKVA

SEQ ID NO: 13269 - protein, 10 aa, Severe acute respiratory syndrome coronavirus 2
  REGION 1..10: note = Table B: HLA-DRB1*04:03L HLA-DRB1*14:01L HLA-DQA1*01-B1*05L HLA-DQA1*05:01-B1*02:01L HLA-DPA1*03:01-B1*105:01L HLA-DQA1*03:01-B1*03:02L HLA-DPA1*01:02-B1*04:01L HLA-DRB1*16:01L HLA-DRB1*15:03L
IYNDKVAGFA

SEQ ID NO: 13270 - protein, 13 aa, Severe acute respiratory syndrome coronavirus 2
  REGION 1..13: note = Table B: HLA-DRB1*04:03L HLA-DRB1*13:03L HLA-DRB1*04:02L HLA-DRB1*04:04L HLA-DRB1*04:05L HLA-DRB1*08:04L HLA-DPA1*01:03-B1*03:01L HLA-DRB1*03:01L HLA-DRB1*11:04L HLA-DRB1*11:01L HLA-DQA1*01-B1*05L HLA-DQA1*05:05-B1*03:19L
  REGION 1..13: note = CONT. FROM ABOVE: HLA-DQA1*05:01-B1*02:01L HLA-DRB3*01:01L HLA-D PA1*02:01-B1*13:01L HLA-DPA1*01:03-B1*02:01L HLA-DQA1*05:05-B1*0 3:01L
DKVAGFAKFLKTN

SEQ ID NO: 13271 - protein, 12 aa, Severe acute respiratory syndrome coronavirus 2
  REGION 1..12: note = Table B: HLA-DRB1*04:03L
FQEKDEDDNLID

SEQ ID NO: 13272 - protein, 10 aa, Severe acute respiratory syndrome coronavirus 2
  REGION 1..10: note = Table B: HLA-DRB1*04:03L HLA-DRB1*01:03L HLA-DRB1*04:05L HLA-DQA1*01:02-B1*06:02L HLA-DRB1*01:01L HLA-DRB1*01:02L HLA-DQA1*01:01-B1*05:01L HLA-DRB1*11:01L HLA-DRB1*12:01L HLA-DPA1*02:01-B1*13:01L HLA-DPA1*01:02-B1*04:01L
  REGION 1..10: note = CONT. FROM ABOVE: HLA-DRB1*16:01L HLA-DQA1*01:03-B1*06:01M HLA-D QA1*02:01-B1*03:03L HLA-DRB1*15:03L
SYFVVKRHTF

SEQ ID NO: 13273 - protein, 11 aa, Severe acute respiratory syndrome coronavirus 2
  REGION 1..11: note = Table B: HLA-DRB1*04:03L HLA-DRB1*13:03L HLA-DRB1*04:02L HLA-DQA1*01:02-B1*06:02L HLA-DRB1*16:01L
HTFSNYQHEET

SEQ ID NO: 13274 - protein, 11 aa, Severe acute respiratory syndrome coronavirus 2
  REGION 1..11: note = Table B: HLA-DRB1*04:03L HLA-DRB1*14:17L
TIYNLLKDCPA

SEQ ID NO: 13275 - protein, 11 aa, Severe acute respiratory syndrome coronavirus 2
  REGION 1..11: note = Table B: HLA-DRB1*04:03L HLA-DRB1*04:02L HLA-DRB1*01:02L HLA-DRB1*14:17L HLA-DRB1*16:01L HLA-DRB1*04:08L
YNLLKDCPAVA

SEQ ID NO: 13276 - protein, 13 aa, Severe acute respiratory syndrome coronavirus 2
  REGION 1..13: note = Table B: HLA-DRB1*04:03L HLA-DRB1*04:05L HLA-DRB3*01:01L HLA-DPA1*01:02-B1*04:01L HLA-DRB1*15:03L
IDGDMVPHISRQR

SEQ ID NO: 13277 - protein, 13 aa, Severe acute respiratory syndrome coronavirus 2
  REGION 1..13: note = Table B: HLA-DRB1*04:03L HLA-DRB1*04:02L HLA-DRB1*03:01L HLA-DRB1*11:03L HLA-DRB1*11:01L HLA-DPA1*03:01-B1*105:01L HLA-DPA1*01:02-B1*04:01L
GDMVPHISRQRLT

SEQ ID NO: 13278 - protein, 12 aa, Severe acute respiratory syndrome coronavirus 2
  REGION 1..12: note = Table B: HLA-DRB1*04:03L HLA-DPA1*03:01-B1*105:01L HLA-DRB1*15:03L
LTKYTMADLVYA

SEQ ID NO: 13279 - protein, 13 aa, Severe acute respiratory syndrome coronavirus 2
  REGION 1..13: note = Table B: HLA-DRB1*04:03L HLA-DRB1*04:05L HLA-DRB1*12:01L HLA-DPA1*02:01-B1*13:01L HLA-DRB1*04:08L
YALRHFDEGNCDT

SEQ ID NO: 13280 - protein, 14 aa, Severe acute respiratory syndrome coronavirus 2
  REGION 1..14: note = Table B: HLA-DRB1*04:03L HLA-DRB1*04:05L HLA-DQA1*01:02-B1*06:02L HLA-DPA1*01:03-B1*03:01L HLA-DPA1*03:01-B1*105:01L
LKEILVTYNCCDDD

SEQ ID NO: 13281 - protein, 11 aa, Severe acute respiratory syndrome coronavirus 2
  REGION 1..11: note = Table B: HLA-DRB1*04:03L HLA-DRB1*01:01L HLA-DRB1*11:01L HLA-DQA1*05:05-B1*03:01L
FVENPDILRVY

SEQ ID NO: 13282 - protein, 12 aa, Severe acute respiratory syndrome coronavirus 2
  REGION 1..12: note = Table B: HLA-DRB1*04:03L
PDILRVYANLGE

SEQ ID NO: 13283 - protein, 11 aa, Severe acute respiratory syndrome coronavirus 2
  REGION 1..11: note = Table B: HLA-DRB1*04:03L HLA-DRB1*01:03L HLA-DRB1*04:02L HLA-DRB1*04:04L HLA-DRB1*04:05L HLA-DQA1*01:02-B1*06:02L HLA-DRB1*01:02L HLA-DQA1*01-B1*05L HLA-DRB1*04:10L HLA-DRB1*12:01L HLA-DQA1*03:01-B1*03:02L HLA-DRB1*16:01L
  REGION 1..11: note = CONT. FROM ABOVE: HLA-DRB1*04:08L HLA-DQA1*02:01-B1*03:03L HLA-D RB1*15:03L
ILRVYANLGER

SEQ ID NO: 13284 - protein, 11 aa, Severe acute respiratory syndrome coronavirus 2
  REGION 1..11: note = Table B: HLA-DRB1*04:03L HLA-DRB1*04:02L HLA-DRB1*04:05L HLA-DQA1*01:02-B1*06:02L HLA-DRB1*01:01L HLA-DRB4*03:01NL HLA-DRB1*11:03L HLA-DRB1*11:04L HLA-DRB1*11:01L HLA-DRB3*01:01L HLA-DPA1*03:01-B1*105:01L HLA-DRB1*14:54L HLA-DRB1*14:17L
VYANLGERVRQ

SEQ ID NO: 13285 - protein, 13 aa, Severe acute respiratory syndrome coronavirus 2
  REGION 1..13: note = Table B: HLA-DRB1*04:03L
LKTVQFCDAMRNA

SEQ ID NO: 13286 - protein, 11 aa, Severe acute respiratory syndrome coronavirus 2
  REGION 1..11: note = Table B: HLA-DRB1*04:03L HLA-DQA1*01:02-B1*06:02L HLA-DQA1*05:05-B1*03:01L HLA-DQA1*01:03-B1*06:01L HLA-DQA1*02:01-B1*03:03L
VQFCDAMRNAG

SEQ ID NO: 13287 - protein, 12 aa, Severe acute respiratory syndrome coronavirus 2
  REGION 1..12: note = Table B: HLA-DRB1*04:03L HLA-DQA1*03:01-B1*03:02L HLA-DRB1*14:17L HLA-DQA1*02:01-B1*03:03L
AGIVGVLTLDNQ

SEQ ID NO: 13288 - protein, 10 aa, Severe acute respiratory syndrome coronavirus 2
  REGION 1..10: note = Table B: HLA-DRB1*04:03L HLA-DRB1*04:02L HLA-DRB1*04:05L HLA-DQA1*01-B1*05L HLA-DQA1*05:01-B1*02:01L HLA-DRB1*04:10L HLA-DQA1*03:01-B1*03:02L HLA-DRB1*14:17L
VLTLDNQDLN

SEQ ID NO: 13289 - protein, 15 aa, Severe acute respiratory syndrome coronavirus 2
  REGION 1..15: note = Table B: HLA-DRB1*04:03L HLA-DRB1*13:02L HLA-DRB1*13:03L HLA-DRB1*04:02L HLA-DRB1*04:04L HLA-DRB1*04:05L HLA-DRB1*08:04L HLA-DRB3*02:01L HLA-DRB1*14:01L HLA-DRB1*11:04L HLA-DRB1*14:02L HLA-DQA1*01:01-B1*05:01L HLA-DRB1*11:01L HLA-DRB1*09:01L
  REGION 1..15: note = CONT. FROM ABOVE: HLA-DRB3*01:01L HLA-DPA1*02:01-B1*13:01L HLA-D PA1*01:03-B1*104:01L HLA-DRB1*10:01L HLA-DRB1*08:03L
GNWYDFGDFIQTTPG

SEQ ID NO: 13290 - protein, 10 aa, Severe acute respiratory syndrome coronavirus 2
  REGION 1..10: note = Table B: HLA-DRB1*04:03L HLA-DRB1*13:03L HLA-DRB1*04:02L HLA-DRB1*04:05L HLA-DRB4*03:01NL HLA-DQA1*01-B1*05L HLA-DQA1*03:01-B1*03:02L HLA-DRB1*14:17L
DFIQTTPGSG

SEQ ID NO: 13291 - protein, 13 aa, Severe acute respiratory syndrome coronavirus 2
  REGION 1..13: note = Table B: HLA-DRB1*04:03L HLA-DRB1*01:03L HLA-DQA1*01:02-B1*06:02L HLA-DRB4*03:01NL HLA-DQA1*01:01-B1*05:01L HLA-DQA1*05:01-B1*02:01L HLA-DQA1*05:05-B1*03:116L HLA-DPA1*03:01-B1*105:01L
  REGION 1..13: note = CONT. FROM ABOVE: HLA-DRB1*16:01L HLA-DRB1*04:08L
IQTTPGSGVPVVD

SEQ ID NO: 13292 - protein, 12 aa, Severe acute respiratory syndrome coronavirus 2
  REGION 1..12: note = Table B: HLA-DRB1*04:03L HLA-DRB1*13:03L HLA-DRB1*01:03L HLA-DRB1*08:77L HLA-DPA1*01:03-B1*03:01L HLA-DRB1*14:02L HLA-DQA1*01-B1*05L HLA-DQA1*05:05-B1*03:116L HLA-DPA1*01:03-B1*04:02L HLA-DRB1*12:01L
  REGION 1..12: note = CONT. FROM ABOVE: HLA-DPA1*03:01-B1*105:01L HLA-DPA1*01:03-B1*10 4:01L HLA-DRB1*16:01L HLA-DRB1*04:08L HLA-DRB1*15:03L
TPGSGVPVVDSY

SEQ ID NO: 13293 - protein, 14 aa, Severe acute respiratory syndrome coronavirus 2
  REGION 1..14: note = Table B: HLA-DRB1*04:03L HLA-DQA1*01:02-B1*06:02L HLA-DRB1*01:02L HLA-DPA1*03:01-B1*04:02L HLA-DRB1*12:01L HLA-DPA1*03:01-B1*105:01L HLA-DRB1*16:01L
VPVVDSYYSLLMPI

SEQ ID NO: 13294 - protein, 11 aa, Severe acute respiratory syndrome coronavirus 2
  REGION 1..11: note = Table B: HLA-DRB1*04:03L HLA-DRB1*04:02L HLA-DRB1*14:01L HLA-DRB1*14:54L HLA-DRB1*14:17L
MPILTLTRALT

SEQ ID NO: 13295 - protein, 11 aa, Severe acute respiratory syndrome coronavirus 2
  REGION 1..11: note = Table B: HLA-DRB1*04:03L HLA-DRB1*14:17L
ILTLTRALTAE

SEQ ID NO: 13296 - protein, 11 aa, Severe acute respiratory syndrome coronavirus 2
  REGION 1..11: note = Table B: HLA-DRB1*04:03L
LTLTRALTAES

SEQ ID NO: 13297 - protein, 10 aa, Severe acute respiratory syndrome coronavirus 2
  REGION 1..10: note = Table B: HLA-DRB1*04:03L HLA-DQA1*03:01-B1*03:02L HLA-DRB1*14:17L
LTRALTAESH

SEQ ID NO: 13298 - protein, 11 aa, Severe acute respiratory syndrome coronavirus 2
  REGION 1..11: note = Table B: HLA-DRB1*04:03L HLA-DQA1*01:03-B1*06:01L
TRALTAESHVD

SEQ ID NO: 13299 - protein, 10 aa, Severe acute respiratory syndrome coronavirus 2
  REGION 1..10: note = Table B: HLA-DRB1*04:03L HLA-DQA1*03:01-B1*03:02L
SHVDTDLTKP

SEQ ID NO: 13300 - protein, 11 aa, Severe acute respiratory syndrome coronavirus 2
  REGION 1..11: note = Table B: HLA-DRB1*04:03L HLA-DRB1*01:03L HLA-DQA1*01:03-B1*06:01L HLA-DQA1*02:01-B1*03:03L
VDTDLTKPYIK

SEQ ID NO: 13301 - protein, 12 aa, Severe acute respiratory syndrome coronavirus 2
  REGION 1..12: note = Table B: HLA-DRB1*04:03L HLA-DQA1*05:01-B1*02:01L HLA-DRB1*16:01L HLA-DRB1*15:03L
DLLKYDFTEERL

SEQ ID NO: 13302 - protein, 11 aa, Severe acute respiratory syndrome coronavirus 2
  REGION 1..11: note = Table B: HLA-DRB1*04:03L HLA-DRB1*13:02L HLA-DRB1*04:05L HLA-DRB1*03:01L HLA-DRB1*14:01L HLA-DRB1*08:01L HLA-DRB1*12:01L HLA-DRB3*01:01L HLA-DRB1*04:08L HLA-DRB1*15:03L
LKYDFTEERLK

SEQ ID NO: 13303 - protein, 11 aa, Severe acute respiratory syndrome coronavirus 2
  REGION 1..11: note = Table B: HLA-DRB1*04:03L HLA-DRB1*13:03L HLA-DRB1*01:03L HLA-DRB1*04:02L HLA-DRB1*04:05L HLA-DRB1*08:01L HLA-DRB1*04:08L
FKYWDQTYHPN

SEQ ID NO: 13304 - protein, 12 aa, Severe acute respiratory syndrome coronavirus 2
  REGION 1..12: note = Table B: HLA-DRB1*04:03L HLA-DPA1*03:01-B1*04:02L HLA-DRB1*12:01L HLA-DPA1*03:01-B1*105:01L HLA-DRB1*15:03L
FNVLFSTVFPPT

SEQ ID NO: 13305 - protein, 14 aa, Severe acute respiratory syndrome coronavirus 2
  REGION 1..14: note = Table B: HLA-DRB1*04:03L HLA-DRB1*13:02L HLA-DRB1*01:03L HLA-DRB1*04:02L HLA-DRB1*04:04L HLA-DRB1*04:05L HLA-DQA1*01:02-B1*06:02L HLA-DRB1*08:04L HLA-DPA1*01:03-B1*03:01L HLA-DPA1*03:01-B1*04:02L
  REGION 1..14: note = CONT. FROM ABOVE: HLA-DRB1*14:01L HLA-DRB1*08:01L HLA-DQA1*05:01 -B1*02:01L HLA-DPA1*01:03-B1*04:02L HLA-DRB1*12:01L HLA-DRB3*01: 01L HLA-DPA1*02:01-B1*13:01L HLA-DPA1*03:01-B1*105:01L HLA-DPA1* 01:02-B1*04:01L HLA-DQA1*01:03-B1*06:01L HLA-DRB1*04:08L
  REGION 1..14: note = CONT. FROM ABOVE: HLA-DQA1*02:01-B1*03:03L
GPLVRKIFVDGVPF

SEQ ID NO: 13306 - protein, 12 aa, Severe acute respiratory syndrome coronavirus 2
  REGION 1..12: note = Table B: HLA-DRB1*04:03L HLA-DRB1*13:02L HLA-DRB1*13:03L HLA-DRB1*01:03L HLA-DRB1*04:02L HLA-DRB1*04:05L HLA-DRB1*01:02L HLA-DQA1*01-B1*05L HLA-DRB1*12:01L HLA-DRB3*01:01L HLA-DRB1*04:08L
VRKIFVDGVPFV

SEQ ID NO: 13307 - protein, 10 aa, Severe acute respiratory syndrome coronavirus 2
  REGION 1..10: note = Table B: HLA-DRB1*04:03L HLA-DRB1*04:02L HLA-DQA1*01-B1*05L HLA-DQA1*03:01-B1*03:02L HLA-DQA1*02:01-B1*03:03L
VPFVVSTGYH

SEQ ID NO: 13308 - protein, 10 aa, Severe acute respiratory syndrome coronavirus 2
  REGION 1..10: note = Table B: HLA-DRB1*04:03L HLA-DRB1*01:03L HLA-DRB1*04:05M HLA-DQA1*01:02-B1*06:02L HLA-DRB1*01:01L HLA-DRB1*01:02L HLA-DRB1*08:77L HLA-DPA1*03:01-B1*04:02L HLA-DRB1*11:03L HLA-DQA1*01:01-B1*05:01L HLA-DRB1*11:01L
  REGION 1..10: note = CONT. FROM ABOVE: HLA-DQA1*05:05-B1*03:19L HLA-DRB1*12:01L HLA-D PA1*02:01-B1*13:01M HLA-DPA1*03:01-B1*105:01L HLA-DRB1*16:01L HL A-DQA1*01:03-B1*06:01M HLA-DQA1*02:01-B1*03:03L HLA-DRB1*15:03L
PFVVSTGYHF

SEQ ID NO: 13309 - protein, 11 aa, Severe acute respiratory syndrome coronavirus 2
  REGION 1..11: note = Table B: HLA-DRB1*04:03L HLA-DRB1*01:03L HLA-DRB1*04:02L HLA-DRB1*04:05L HLA-DRB1*01:02L HLA-DRB1*14:17L HLA-DRB1*10:01L HLA-DRB1*16:01L HLA-DRB1*04:08L HLA-DQA1*02:01-B1*03:03L
FRELGVVHNQD

SEQ ID NO: 13310 - protein, 13 aa, Severe acute respiratory syndrome coronavirus 2
  REGION 1..13: note = Table B: HLA-DRB1*04:03L HLA-DRB1*04:02L HLA-DRB1*04:05L HLA-DRB1*14:01L HLA-DRB1*08:01L HLA-DPA1*03:01-B1*105:01L
DVNLHSSRLSFKE

SEQ ID NO: 13311 - protein, 11 aa, Severe acute respiratory syndrome coronavirus 2
  REGION 1..11: note = Table B: HLA-DRB1*04:03L HLA-DQA1*01-B1*05L
KELLVYAADPA

SEQ ID NO: 13312 - protein, 10 aa, Severe acute respiratory syndrome coronavirus 2
  REGION 1..10: note = Table B: HLA-DRB1*04:03L
AADPAMHAAS

SEQ ID NO: 13313 - protein, 11 aa, Severe acute respiratory syndrome coronavirus 2
  REGION 1..11: note = Table B: HLA-DRB1*04:03L HLA-DRB1*13:03L HLA-DRB1*01:03L HLA-DRB1*04:02L HLA-DRB1*04:05L HLA-DRB1*01:02L HLA-DRB4*03:01NL HLA-DRB1*14:01L HLA-DRB1*11:03L HLA-DQA1*05:05-B1*03:19L HLA-DRB1*12:02L HLA-DQA1*05:05-B1*03:01L
  REGION 1..11: note = CONT. FROM ABOVE: HLA-DQA1*01:03-B1*06:01L
PAMHAASGNLL

SEQ ID NO: 13314 - protein, 11 aa, Severe acute respiratory syndrome coronavirus 2
  REGION 1..11: note = Table B: HLA-DRB1*04:03L HLA-DRB1*13:03L HLA-DRB1*04:02L HLA-DRB1*14:17L
HAASGNLLLDK

SEQ ID NO: 13315 - protein, 13 aa, Severe acute respiratory syndrome coronavirus 2
  REGION 1..13: note = Table B: HLA-DRB1*04:03L HLA-DRB1*13:03L HLA-DRB1*01:03L HLA-DRB1*04:02L HLA-DQA1*01:02-B1*06:02L HLA-DRB1*08:04L HLA-DRB1*08:77L HLA-DPA1*01:03-B1*03:01L HLA-DRB1*11:03L HLA-DRB1*11:04L HLA-DRB1*14:02L HLA-DRB1*08:01L HLA-DRB1*11:01L
  REGION 1..13: note = CONT. FROM ABOVE: HLA-DQA1*05:01-B1*02:01L HLA-DRB1*12:01L HLA-D RB1*14:54L HLA-DRB1*04:08L
GNLLLDKRTTCFS

SEQ ID NO: 13316 - protein, 10 aa, Severe acute respiratory syndrome coronavirus 2
  REGION 1..10: note = Table B: HLA-DRB1*04:03L HLA-DRB1*14:17L
AALTNNVAFQ

SEQ ID NO: 13317 - protein, 10 aa, Severe acute respiratory syndrome coronavirus 2
  REGION 1..10: note = Table B: HLA-DRB1*04:03L HLA-DRB1*04:02L HLA-DQA1*03:01-B1*03:02L HLA-DRB1*14:17L HLA-DPA1*01:02-B1*04:01L HLA-DQA1*01:03-B1*06:01L HLA-DQA1*02:01-B1*03:03L
NVAFQTVKPG

SEQ ID NO: 13318 - protein, 11 aa, Severe acute respiratory syndrome coronavirus 2
  REGION 1..11: note = Table B: HLA-DRB1*04:03L HLA-DRB1*04:02L HLA-DRB1*01:02L HLA-DRB1*14:17L HLA-DPA1*01:02-B1*04:01L HLA-DRB1*16:01L HLA-DQA1*01:03-B1*06:01L
FAVSKGFFKEG

SEQ ID NO: 13319 - protein, 12 aa, Severe acute respiratory syndrome coronavirus 2
  REGION 1..12: note = Table B: HLA-DRB1*04:03L HLA-DQA1*01:02-B1*06:02L
SKGFFKEGSSVE

SEQ ID NO: 13320 - protein, 10 aa, Severe acute respiratory syndrome coronavirus 2
  REGION 1..10: note = Table B: HLA-DRB1*04:03L
FFFAQDGNAA

SEQ ID NO: 13321 - protein, 10 aa, Severe acute respiratory syndrome coronavirus 2
  REGION 1..10: note = Table B: HLA-DRB1*04:03L HLA-DRB1*14:17L
FAQDGNAAIS

SEQ ID NO: 13322 - protein, 10 aa, Severe acute respiratory syndrome coronavirus 2
  REGION 1..10: note = Table B: HLA-DRB1*04:03L HLA-DRB1*13:02L HLA-DRB1*13:03L HLA-DRB1*04:02L HLA-DRB4*03:01NL HLA-DRB1*12:01L HLA-DPA1*03:01-B1*105:01L HLA-DQA1*03:01-B1*03:02L HLA-DQA1*05:05-B1*03:01L HLA-DRB1*14:17L
  REGION 1..10: note = CONT. FROM ABOVE: HLA-DPA1*01:02-B1*04:01L HLA-DQA1*01:03-B1*06: 01L HLA-DQA1*02:01-B1*03:03L
AAISDYDYYR

SEQ ID NO: 13323 - protein, 13 aa, Severe acute respiratory syndrome coronavirus 2
  REGION 1..13: note = Table B: HLA-DRB1*04:03L HLA-DRB1*04:05L HLA-DRB1*08:04L HLA-DRB3*02:01L HLA-DPA1*01:03-B1*04:01L HLA-DPA1*01:03-B1*04:02L HLA-DPA1*01:03-B1*104:01L HLA-DRB1*07:01L HLA-DRB1*04:08L
YDYYRYNLPTMCD

SEQ ID NO: 13324 - protein, 13 aa, Severe acute respiratory syndrome coronavirus 2
  REGION 1..13: note = Table B: HLA-DRB1*04:03L HLA-DRB1*01:03L HLA-DQA1*01:02-B1*06:02L HLA-DRB1*01:02L HLA-DRB1*08:04L HLA-DRB1*08:01L HLA-DQA1*01-B1*05L HLA-DRB1*04:10L HLA-DRB1*12:01L HLA-DPA1*02:01-B1*13:01L
  REGION 1..13: note = CONT. FROM ABOVE: HLA-DPA1*03:01-B1*105:01L HLA-DQA1*03:01-B1*03 :02L HLA-DRB1*16:01L HLA-DRB1*04:08L HLA-DRB1*15:03L
IRQLLFVVEVVDK

SEQ ID NO: 13325 - protein, 14 aa, Severe acute respiratory syndrome coronavirus 2
  REGION 1..14: note = Table B: HLA-DRB1*04:03L HLA-DRB1*01:03L HLA-DRB1*04:05L HLA-DQA1*01:02-B1*06:02L HLA-DQA1*01-B1*05L HLA-DRB1*12:01L HLA-DPA1*02:01-B1*13:01L HLA-DQA1*05:05-B1*03:01L HLA-DRB1*04:08L
VDKYFDCYDGGCIN

SEQ ID NO: 13326 - protein, 10 aa, Severe acute respiratory syndrome coronavirus 2
  REGION 1..10: note = Table B: HLA-DRB1*04:03L HLA-DRB1*04:02L HLA-DRB1*04:05L HLA-DRB4*03:01NL HLA-DRB1*04:10L HLA-DQA1*03:01-B1*03:02L HLA-DRB1*14:17L HLA-DQA1*01:03-B1*06:01L HLA-DQA1*02:01-B1*03:03L
NQVIVNNLDK

SEQ ID NO: 13327 - protein, 10 aa, Severe acute respiratory syndrome coronavirus 2
  REGION 1..10: note = Table B: HLA-DRB1*04:03L HLA-DRB1*14:17L
VIVNNLDKSA

SEQ ID NO: 13328 - protein, 13 aa, Severe acute respiratory syndrome coronavirus 2
  REGION 1..13: note = Table B: HLA-DRB1*04:03L HLA-DRB1*01:03L HLA-DRB1*04:02L HLA-DRB1*04:05L HLA-DRB1*01:02L HLA-DQA1*05:01-B1*02:01L HLA-DRB1*12:01L HLA-DPA1*02:01-B1*13:01L HLA-DPA1*03:01-B1*105:01L HLA-DQA1*03:01-B1*03:02L
  REGION 1..13: note = CONT. FROM ABOVE: HLA-DRB1*16:01L HLA-DRB1*04:08L HLA-DRB1*15:03 L
GKARLYYDSMSYE

SEQ ID NO: 13329 - protein, 12 aa, Severe acute respiratory syndrome coronavirus 2
  REGION 1..12: note = Table B: HLA-DRB1*04:03L
ARLYYDSMSYED

SEQ ID NO: 13330 - protein, 12 aa, Severe acute respiratory syndrome coronavirus 2
  REGION 1..12: note = Table B: HLA-DRB1*04:03L HLA-DRB1*04:05L HLA-DQA1*05:01-B1*02:01L HLA-DRB1*04:10L HLA-DPA1*03:01-B1*105:01L HLA-DQA1*03:01-B1*03:02L
RLYYDSMSYEDQ

SEQ ID NO: 13331 - protein, 12 aa, Severe acute respiratory syndrome coronavirus 2
  REGION 1..12: note = Table B: HLA-DRB1*04:03L HLA-DRB1*04:02L HLA-DRB1*04:05L HLA-DQA1*01:02-B1*06:02L HLA-DPA1*03:01-B1*04:02L HLA-DQA1*01:01-B1*05:01L HLA-DRB1*12:01L HLA-DPA1*02:01-B1*13:01L HLA-DPA1*03:01-B1*105:01L
  REGION 1..12: note = CONT. FROM ABOVE: HLA-DRB1*04:08L HLA-DQA1*02:01-B1*03:03L HLA-D RB1*15:03L
YDSMSYEDQDAL

SEQ ID NO: 13332 - protein, 12 aa, Severe acute respiratory syndrome coronavirus 2
  REGION 1..12: note = Table B: HLA-DRB1*04:03L HLA-DRB1*04:02L HLA-DPA1*03:01-B1*105:01L HLA-DRB1*14:17L HLA-DQA1*02:01-B1*03:03L
YEDQDALFAYTK

SEQ ID NO: 13333 - protein, 16 aa, Severe acute respiratory syndrome coronavirus 2
  REGION 1..16: note = Table B: HLA-DRB1*04:03L HLA-DPA1*01:03-B1*03:01L HLA-DQA1*05:05-B1*03:19L HLA-DQA1*05:01-B1*02:01L HLA-DQA1*05:05-B1*03:01L
EDQDALFAYTKRNVIP

SEQ ID NO: 13334 - protein, 10 aa, Severe acute respiratory syndrome coronavirus 2
  REGION 1..10: note = Table B: HLA-DRB1*04:03L HLA-DRB1*13:03L HLA-DRB1*01:03L HLA-DRB1*04:02L HLA-DRB1*01:02L HLA-DRB4*03:01NL HLA-DRB1*14:01L HLA-DRB1*08:01L HLA-DRB1*12:01L HLA-DQA1*03:01-B1*03:02L HLA-DRB1*14:54L HLA-DRB1*14:17L HLA-DPA1*01:02-B1*04:01L
  REGION 1..10: note = CONT. FROM ABOVE: HLA-DRB1*16:01L HLA-DRB1*04:08L HLA-DQA1*02:01 -B1*03:03L
AYTKRNVIPT

SEQ ID NO: 13335 - protein, 12 aa, Severe acute respiratory syndrome coronavirus 2
  REGION 1..12: note = Table B: HLA-DRB1*04:03L HLA-DRB1*04:05L HLA-DQA1*01:02-B1*06:02L HLA-DRB1*12:01L
KRNVIPTITQMN

SEQ ID NO: 13336 - protein, 12 aa, Severe acute respiratory syndrome coronavirus 2
  REGION 1..12: note = Table B: HLA-DRB1*04:03L HLA-DRB1*12:01L HLA-DRB1*14:17L
RNVIPTITQMNL

SEQ ID NO: 13337 - protein, 11 aa, Severe acute respiratory syndrome coronavirus 2
  REGION 1..11: note = Table B: HLA-DRB1*04:03L HLA-DRB1*04:02L HLA-DQA1*01:02-B1*06:02L HLA-DRB4*03:01NL HLA-DRB1*12:01L HLA-DPA1*03:01-B1*105:01L HLA-DQA1*05:05-B1*03:01L HLA-DRB1*14:17L HLA-DRB1*16:01L HLA-DQA1*01:03-B1*06:01L
VIPTITQMNLK

SEQ ID NO: 13338 - protein, 12 aa, Severe acute respiratory syndrome coronavirus 2
  REGION 1..12: note = Table B: HLA-DRB1*04:03L HLA-DRB1*04:02L HLA-DRB1*14:01L HLA-DPA1*03:01-B1*105:01L HLA-DRB1*14:17L HLA-DRB1*15:03L
IPTITQMNLKYA

SEQ ID NO: 13339 - protein, 11 aa, Severe acute respiratory syndrome coronavirus 2
  REGION 1..11: note = Table B: HLA-DRB1*04:03L
MNLKYAISAKN

SEQ ID NO: 13340 - protein, 11 aa, Severe acute respiratory syndrome coronavirus 2
  REGION 1..11: note = Table B: HLA-DRB1*04:03L HLA-DRB1*13:03L HLA-DRB1*04:02L HLA-DRB1*04:05L HLA-DRB1*01:02L HLA-DRB1*14:01L HLA-DRB1*12:01L HLA-DRB1*04:08L
LKYAISAKNRA

SEQ ID NO: 13341 - protein, 13 aa, Severe acute respiratory syndrome coronavirus 2
  REGION 1..13: note = Table B: HLA-DRB1*04:03L HLA-DRB1*04:02L HLA-DRB1*14:17L HLA-DQA1*02:01-B1*03:03L
VAGVSICSTMTNR

SEQ ID NO: 13342 - protein, 11 aa, Severe acute respiratory syndrome coronavirus 2
  REGION 1..11: note = Table B: HLA-DRB1*04:03L HLA-DRB1*04:02L HLA-DQA1*01:02-B1*06:02L HLA-DQA1*03:01-B1*03:02L HLA-DQA1*05:05-B1*03:01L HLA-DRB1*14:17L HLA-DQA1*01:03-B1*06:01L HLA-DQA1*02:01-B1*03:03L
VSICSTMTNRQ

SEQ ID NO: 13343 - protein, 10 aa, Severe acute respiratory syndrome coronavirus 2
  REGION 1..10: note = Table B: HLA-DRB1*04:03L HLA-DQA1*03:01-B1*03:02L HLA-DRB1*14:17L
LLKSIAATRG

SEQ ID NO: 13344 - protein, 11 aa, Severe acute respiratory syndrome coronavirus 2
  REGION 1..11: note = Table B: HLA-DRB1*04:03L HLA-DRB1*04:02L HLA-DQA1*03:01-B1*03:02L HLA-DRB1*14:17L
LKSIAATRGAT

SEQ ID NO: 13345 - protein, 10 aa, Severe acute respiratory syndrome coronavirus 2
  REGION 1..10: note = Table B: HLA-DRB1*04:03L HLA-DRB1*04:02L HLA-DRB1*14:01L HLA-DRB1*14:17L HLA-DQA1*02:01-B1*03:03L
VVIGTSKFYG

SEQ ID NO: 13346 - protein, 11 aa, Severe acute respiratory syndrome coronavirus 2
  REGION 1..11: note = Table B: HLA-DRB1*04:03L HLA-DQA1*05:01-B1*02:01L HLA-DPA1*03:01-B1*105:01L HLA-DPA1*01:02-B1*04:01L
NMLKTVYSDVE

SEQ ID NO: 13347 - protein, 11 aa, Severe acute respiratory syndrome coronavirus 2
  REGION 1..11: note = Table B: HLA-DRB1*04:03L HLA-DQA1*01-B1*05L HLA-DQA1*03:01-B1*03:02L
NPHLMGWDYPK

SEQ ID NO: 13348 - protein, 14 aa, Severe acute respiratory syndrome coronavirus 2
  REGION 1..14: note = Table B: HLA-DRB1*04:03L
PNMLRIMASLVLAR

SEQ ID NO: 13349 - protein, 13 aa, Severe acute respiratory syndrome coronavirus 2
  REGION 1..13: note = Table B: HLA-DRB1*04:03L HLA-DRB1*13:02L HLA-DRB1*13:03L HLA-DRB1*04:04L HLA-DQA1*01:02-B1*06:02L HLA-DRB1*01:01L HLA-DPA1*01:03-B1*03:01L HLA-DRB1*11:04L HLA-DRB1*11:01L HLA-DRB3*01:01L HLA-DQA1*03:01-B1*03:02L
  REGION 1..13: note = CONT. FROM ABOVE: HLA-DPA1*01:02-B1*04:01L HLA-DRB1*07:01L HLA-D QA1*02:01-B1*03:03L HLA-DRB1*15:03L
SHRFYRLANECAQ

SEQ ID NO: 13350 - protein, 13 aa, Severe acute respiratory syndrome coronavirus 2
  REGION 1..13: note = Table B: HLA-DRB1*04:03L HLA-DRB1*13:02L HLA-DRB1*04:05L HLA-DPA1*01:03-B1*104:01L HLA-DQA1*05:05-B1*03:01L
FYRLANECAQVLS

SEQ ID NO: 13351 - protein, 13 aa, Severe acute respiratory syndrome coronavirus 2
  REGION 1..13: note = Table B: HLA-DRB1*04:03L HLA-DPA1*01:03-B1*03:01L HLA-DRB1*12:01L HLA-DPA1*03:01-B1*105:01L HLA-DQA1*05:05-B1*03:01L
YRLANECAQVLSE

SEQ ID NO: 13352 - protein, 14 aa, Severe acute respiratory syndrome coronavirus 2
  REGION 1..14: note = Table B: HLA-DRB1*04:03L HLA-DPA1*03:01-B1*105:01L HLA-DQA1*05:05-B1*03:01L HLA-DQA1*01:03-B1*06:01L
AQVLSEMVMCGGSL

SEQ ID NO: 13353 - protein, 15 aa, Severe acute respiratory syndrome coronavirus 2
  REGION 1..15: note = Table B: HLA-DRB1*04:03L HLA-DRB1*01:03L HLA-DRB1*14:01L HLA-DQA1*05:05-B1*03:19L HLA-DRB1*12:01L HLA-DRB1*16:01L HLA-DRB1*04:08L
SEMVMCGGSLYVKPG

SEQ ID NO: 13354 - protein, 10 aa, Severe acute respiratory syndrome coronavirus 2
  REGION 1..10: note = Table B: HLA-DRB1*04:03L HLA-DRB1*04:02L HLA-DQA1*03:01-B1*03:02L HLA-DRB1*14:17L HLA-DQA1*02:01-B1*03:03L
SLYVKPGGTS

SEQ ID NO: 13355 - protein, 10 aa, Severe acute respiratory syndrome coronavirus 2
  REGION 1..10: note = Table B: HLA-DRB1*04:03L HLA-DRB1*14:17L
YVKPGGTSSG

SEQ ID NO: 13356 - protein, 15 aa, Severe acute respiratory syndrome coronavirus 2
  REGION 1..15: note = Table B: HLA-DRB1*04:03L HLA-DQA1*01:03-B1*06:01L
VKPGGTSSGDATTAY

SEQ ID NO: 13357 - protein, 16 aa, Severe acute respiratory syndrome coronavirus 2
  REGION 1..16: note = Table B: HLA-DRB1*04:03L HLA-DRB1*04:02L HLA-DRB1*01:02L HLA-DQA1*01:01-B1*05:01L HLA-DRB1*08:01L HLA-DRB1*11:01L HLA-DQA1*05:05-B1*03:116L HLA-DRB1*04:08L
KPGGTSSGDATTAYAN

SEQ ID NO: 13358 - protein, 11 aa, Severe acute respiratory syndrome coronavirus 2
  REGION 1..11: note = Table B: HLA-DRB1*04:03L
ATTAYANSVFN

SEQ ID NO: 13359 - protein, 14 aa, Severe acute respiratory syndrome coronavirus 2
  REGION 1..14: note = Table B: HLA-DRB1*04:03L HLA-DRB1*08:04L HLA-DRB1*14:01L HLA-DRB1*11:04L
TTAYANSVFNICQA

SEQ ID NO: 13360 - protein, 13 aa, Severe acute respiratory syndrome coronavirus 2
  REGION 1..13: note = Table B: HLA-DRB1*04:03L
ANSVFNICQAVTA

SEQ ID NO: 13361 - protein, 12 aa, Severe acute respiratory syndrome coronavirus 2
  REGION 1..12: note = Table B: HLA-DRB1*04:03L
AVTANVNALLST

SEQ ID NO: 13362 - protein, 12 aa, Severe acute respiratory syndrome coronavirus 2
  REGION 1..12: note = Table B: HLA-DRB1*04:03L
VTANVNALLSTD

SEQ ID NO: 13363 - protein, 12 aa, Severe acute respiratory syndrome coronavirus 2
  REGION 1..12: note = Table B: HLA-DRB1*04:03L
TANVNALLSTDG

SEQ ID NO: 13364 - protein, 12 aa, Severe acute respiratory syndrome coronavirus 2
  REGION 1..12: note = Table B: HLA-DRB1*04:03L HLA-DRB1*04:02L HLA-DQA1*01:02-B1*06:02L HLA-DQA1*03:01-B1*03:02L HLA-DQA1*01:03-B1*06:01L HLA-DQA1*02:01-B1*03:03L
ANVNALLSTDGN

SEQ ID NO: 13365 - protein, 11 aa, Severe acute respiratory syndrome coronavirus 2
  REGION 1..11: note = Table B: HLA-DRB1*04:03L HLA-DQA1*03:01-B1*03:02L
VNALLSTDGNK

SEQ ID NO: 13366 - protein, 10 aa, Severe acute respiratory syndrome coronavirus 2
  REGION 1..10: note = Table B: HLA-DRB1*04:03L HLA-DRB1*04:02L HLA-DQA1*03:01-B1*03:02L HLA-DRB1*14:17L
LSTDGNKIAD

SEQ ID NO: 13367 - protein, 10 aa, Severe acute respiratory syndrome coronavirus 2
  REGION 1..10: note = Table B: HLA-DRB1*04:03L HLA-DRB1*13:02L HLA-DRB1*13:03L HLA-DRB1*04:02L HLA-DRB1*01:01L HLA-DRB4*03:01NL HLA-DRB1*11:04L HLA-DRB1*08:01L HLA-DRB5*01:01L HLA-DRB1*12:01L HLA-DQA1*03:01-B1*03:02L HLA-DQA1*05:05-B1*03:01L
  REGION 1..10: note = CONT. FROM ABOVE: HLA-DRB1*14:17L HLA-DRB1*16:01L HLA-DQA1*02:01 -B1*03:03L
STDGNKIADK

SEQ ID NO: 13368 - protein, 13 aa, Severe acute respiratory syndrome coronavirus 2
  REGION 1..13: note = Table B: HLA-DRB1*04:03L HLA-DRB1*04:02L HLA-DQA1*01:02-B1*06:02L HLA-DRB3*02:01L HLA-DPA1*03:01-B1*04:02L HLA-DRB1*11:03L HLA-DRB1*11:01L HLA-DPA1*02:01-B1*13:01L HLA-DPA1*03:01-B1*105:01L
IADKYVRNLQHRL

SEQ ID NO: 13369 - protein, 11 aa, Severe acute respiratory syndrome coronavirus 2
  REGION 1..11: note = Table B: HLA-DRB1*04:03L HLA-DRB1*13:03L HLA-DRB1*04:02L HLA-DRB1*04:05L HLA-DRB1*11:03L HLA-DRB1*11:04L HLA-DRB1*08:01L HLA-DRB3*01:01L HLA-DQA1*03:01-B1*03:02L HLA-DRB1*04:08L
YVRNLQHRLYE

SEQ ID NO: 13370 - protein, 11 aa, Severe acute respiratory syndrome coronavirus 2
  REGION 1..11: note = Table B: HLA-DRB1*04:03L HLA-DRB1*01:03L HLA-DRB1*04:05L HLA-DPA1*03:01-B1*04:02L HLA-DRB1*14:01L HLA-DRB4*01:01L HLA-DQA1*05:05-B1*03:116L HLA-DPA1*01:03-B1*04:02L HLA-DRB1*12:01L HLA-DQA1*03:01-B1*03:02L
  REGION 1..11: note = CONT. FROM ABOVE: HLA-DPA1*01:02-B1*04:01L
RDVDTDFVNEF

SEQ ID NO: 13371 - protein, 11 aa, Severe acute respiratory syndrome coronavirus 2
  REGION 1..11: note = Table B: HLA-DRB1*04:03L HLA-DRB1*01:03L HLA-DRB4*03:01NL HLA-DPA1*03:01-B1*04:02L HLA-DRB1*11:03L HLA-DPA1*01:03-B1*04:02L HLA-DPA1*01:02-B1*04:01L HLA-DRB1*08:02L
DVDTDFVNEFY

SEQ ID NO: 13372 - protein, 14 aa, Severe acute respiratory syndrome coronavirus 2
  REGION 1..14: note = Table B: HLA-DRB1*04:03L HLA-DRB1*04:05L HLA-DRB1*14:02L HLA-DQA1*03:01-B1*03:02L HLA-DQA1*05:05-B1*03:01L
VDTDFVNEFYAYLR

SEQ ID NO: 13373 - protein, 13 aa, Severe acute respiratory syndrome coronavirus 2
  REGION 1..13: note = Table B: HLA-DRB1*04:03L HLA-DRB1*13:02L HLA-DRB1*04:04L HLA-DRB1*04:05L HLA-DRB1*14:01L HLA-DQA1*02:01-B1*03:03L
TDFVNEFYAYLRK

SEQ ID NO: 13374 - protein, 13 aa, Severe acute respiratory syndrome coronavirus 2
  REGION 1..13: note = Table B: HLA-DRB1*04:03L HLA-DPA1*02:01-B1*13:01L
DFVNEFYAYLRKH

SEQ ID NO: 13375 - protein, 14 aa, Severe acute respiratory syndrome coronavirus 2
  REGION 1..14: note = Table B: HLA-DRB1*04:03L HLA-DRB1*13:02L HLA-DRB1*01:03L HLA-DRB1*04:04L HLA-DQA1*01-B1*05L HLA-DPA1*01:03-B1*104:01L HLA-DQA1*05:05-B1*03:01L
LRKHFSMMILSDDA

SEQ ID NO: 13376 - protein, 11 aa, Severe acute respiratory syndrome coronavirus 2
  REGION 1..11: note = Table B: HLA-DRB1*04:03L HLA-DRB1*14:01L HLA-DRB1*14:02L HLA-DQA1*05:01-B1*02:01L HLA-DPA1*03:01-B1*105:01L HLA-DRB1*14:17L
ILSDDAVVCFN

SEQ ID NO: 13377 - protein, 13 aa, Severe acute respiratory syndrome coronavirus 2
  REGION 1..13: note = Table B: HLA-DRB1*04:03L
DDAVVCFNSTYAS

SEQ ID NO: 13378 - protein, 13 aa, Severe acute respiratory syndrome coronavirus 2
  REGION 1..13: note = Table B: HLA-DRB1*04:03L HLA-DRB1*04:02L HLA-DRB1*01:02L HLA-DQA1*01-B1*05L HLA-DRB1*12:01L HLA-DRB1*14:17L HLA-DRB1*16:01L HLA-DRB1*15:03L
DAVVCFNSTYASQ

SEQ ID NO: 13379 - protein, 12 aa, Severe acute respiratory syndrome coronavirus 2
  REGION 1..12: note = Table B: HLA-DRB1*04:03L HLA-DRB1*04:02L HLA-DRB1*14:17L HLA-DRB1*15:03L
VVCFNSTYASQG

SEQ ID NO: 13380 - protein, 11 aa, Severe acute respiratory syndrome coronavirus 2
  REGION 1..11: note = Table B: HLA-DRB1*04:03L HLA-DRB1*01:03L HLA-DRB1*04:02L HLA-DRB4*03:01NL HLA-DPA1*03:01-B1*105:01L HLA-DRB1*14:17L
YASQGLVASIK

SEQ ID NO: 13381 - protein, 10 aa, Severe acute respiratory syndrome coronavirus 2
  REGION 1..10: note = Table B: HLA-DRB1*04:03L
LVASIKNFKS

SEQ ID NO: 13382 - protein, 11 aa, Severe acute respiratory syndrome coronavirus 2
  REGION 1..11: note = Table B: HLA-DRB1*04:03L HLA-DRB1*04:02L HLA-DQA1*01-B1*05L HLA-DRB1*12:01L HLA-DQA1*03:01-B1*03:02L HLA-DRB1*14:17L HLA-DRB1*16:01L HLA-DQA1*02:01-B1*03:03L HLA-DRB1*15:03L
VASIKNFKSVL

SEQ ID NO: 13383 - protein, 11 aa, Severe acute respiratory syndrome coronavirus 2
  REGION 1..11: note = Table B: HLA-DRB1*04:03L HLA-DRB1*01:02L HLA-DRB1*12:01L HLA-DRB1*16:01L
IKNFKSVLYYQ

SEQ ID NO: 13384 - protein, 12 aa, Severe acute respiratory syndrome coronavirus 2
  REGION 1..12: note = Table B: HLA-DRB1*04:03L HLA-DRB1*04:02L HLA-DQA1*01:02-B1*06:02L HLA-DRB1*01:02L HLA-DPA1*03:01-B1*04:02L HLA-DRB1*14:01L HLA-DQA1*05:01-B1*02:01L HLA-DRB1*12:01L
  REGION 1..12: note = CONT. FROM ABOVE: HLA-DPA1*03:01-B1*105:01L
VLYYQNNVFMSE

SEQ ID NO: 13385 - protein, 15 aa, Severe acute respiratory syndrome coronavirus 2
  REGION 1..15: note = Table B: HLA-DRB1*04:03L HLA-DRB1*01:03L HLA-DRB1*14:02L HLA-DRB1*08:01L HLA-DRB1*12:01L HLA-DPA1*02:01-B1*13:01L HLA-DPA1*01:03-B1*02:01L HLA-DRB1*16:01L
NNVFMSEAKCWTETD

SEQ ID NO: 13386 - protein, 11 aa, Severe acute respiratory syndrome coronavirus 2
  REGION 1..11: note = Table B: HLA-DRB1*04:03L
HTMLVKQGDDY

SEQ ID NO: 13387 - protein, 12 aa, Severe acute respiratory syndrome coronavirus 2
  REGION 1..12: note = Table B: HLA-DRB1*04:03L
TMLVKQGDDYVY

SEQ ID NO: 13388 - protein, 11 aa, Severe acute respiratory syndrome coronavirus 2
  REGION 1..11: note = Table B: HLA-DRB1*04:03L HLA-DRB1*01:03L HLA-DRB1*14:17L
LPYPDPSRILG

SEQ ID NO: 13389 - protein, 10 aa, Severe acute respiratory syndrome coronavirus 2
  REGION 1..10: note = Table B: HLA-DRB1*04:03L
PDPSRILGAG

SEQ ID NO: 13390 - protein, 10 aa, Severe acute respiratory syndrome coronavirus 2
  REGION 1..10: note = Table B: HLA-DRB1*04:03L HLA-DRB1*04:02L HLA-DQA1*01-B1*05L HLA-DQA1*03:01-B1*03:02L HLA-DRB1*14:17L HLA-DQA1*02:01-B1*03:03L
FVDDIVKTDG

SEQ ID NO: 13391 - protein, 11 aa, Severe acute respiratory syndrome coronavirus 2
  REGION 1..11: note = Table B: HLA-DRB1*04:03L HLA-DQA1*02:01-B1*03:03L
VDDIVKTDGTL

SEQ ID NO: 13392 - protein, 11 aa, Severe acute respiratory syndrome coronavirus 2
  REGION 1..11: note = Table B: HLA-DRB1*04:03L HLA-DRB1*13:02L HLA-DRB1*01:03L HLA-DRB1*04:02L HLA-DRB1*01:02L HLA-DRB4*03:01NL HLA-DRB1*08:77L HLA-DPA1*01:03-B1*03:01L HLA-DRB1*14:01L HLA-DRB1*14:02L HLA-DQA1*05:01-B1*02:01L HLA-DRB1*12:01L HLA-DRB1*12:02L
  REGION 1..11: note = CONT. FROM ABOVE: HLA-DRB1*14:54L HLA-DRB1*14:17L HLA-DRB1*16:01 L HLA-DQA1*02:01-B1*03:03L HLA-DRB1*15:03L
IVKTDGTLMIE

SEQ ID NO: 13393 - protein, 11 aa, Severe acute respiratory syndrome coronavirus 2
  REGION 1..11: note = Table B: HLA-DRB1*04:03L HLA-DRB1*01:03L
VKTDGTLMIER

SEQ ID NO: 13394 - protein, 11 aa, Severe acute respiratory syndrome coronavirus 2
  REGION 1..11: note = Table B: HLA-DRB1*04:03L HLA-DRB1*13:02L HLA-DRB1*13:03L HLA-DRB1*04:05L HLA-DRB1*08:04L HLA-DRB1*08:77L HLA-DRB3*02:01L HLA-DRB1*11:03L HLA-DRB1*11:04L HLA-DRB1*09:01L HLA-DRB3*01:01L HLA-DPA1*01:03-B1*02:01L HLA-DRB1*07:01L HLA-DRB1*08:03L
GTLMIERFVSL

SEQ ID NO: 13395 - protein, 11 aa, Severe acute respiratory syndrome coronavirus 2
  REGION 1..11: note = Table B: HLA-DRB1*04:03L HLA-DQA1*01-B1*05L HLA-DRB1*15:03L
IERFVSLAIDA

SEQ ID NO: 13396 - protein, 12 aa, Severe acute respiratory syndrome coronavirus 2
  REGION 1..12: note = Table B: HLA-DRB1*04:03L HLA-DRB1*01:02L HLA-DPA1*01:03-B1*03:01L HLA-DPA1*03:01-B1*04:02L HLA-DQA1*05:01-B1*02:01L HLA-DRB1*12:01L HLA-DPA1*03:01-B1*105:01L HLA-DRB1*16:01L HLA-DRB1*15:03L
RFVSLAIDAYPL

SEQ ID NO: 13397 - protein, 11 aa, Severe acute respiratory syndrome coronavirus 2
  REGION 1..11: note = Table B: HLA-DRB1*04:03L HLA-DRB1*04:02L
IDAYPLTKHPN

SEQ ID NO: 13398 - protein, 10 aa, Severe acute respiratory syndrome coronavirus 2
  REGION 1..10: note = Table B: HLA-DRB1*04:03L HLA-DRB1*13:03L HLA-DRB1*01:03L HLA-DRB1*04:02L HLA-DQA1*03:01-B1*03:02L HLA-DRB1*14:17L HLA-DRB1*16:01L HLA-DQA1*02:01-B1*03:03L
YPLTKHPNQE

SEQ ID NO: 13399 - protein, 13 aa, Severe acute respiratory syndrome coronavirus 2
  REGION 1..13: note = Table B: HLA-DRB1*04:03L HLA-DRB1*04:02L HLA-DRB1*04:04L HLA-DRB1*07:01L
ADVFHLYLQYIRK

SEQ ID NO: 13400 - protein, 11 aa, Severe acute respiratory syndrome coronavirus 2
  REGION 1..11: note = Table B: HLA-DRB1*04:03L HLA-DRB1*04:05L HLA-DRB1*12:01L HLA-DRB1*16:01L
YIRKLHDELTG

SEQ ID NO: 13401 - protein, 14 aa, Severe acute respiratory syndrome coronavirus 2
  REGION 1..14: note = Table B: HLA-DRB1*04:03L HLA-DRB1*04:04L HLA-DQA1*01:02-B1*06:02L HLA-DRB3*01:01L
IRKLHDELTGHMLD

SEQ ID NO: 13402 - protein, 13 aa, Severe acute respiratory syndrome coronavirus 2
  REGION 1..13: note = Table B: HLA-DRB1*04:03L HLA-DRB1*04:08L
HDELTGHMLDMYS

SEQ ID NO: 13403 - protein, 13 aa, Severe acute respiratory syndrome coronavirus 2
  REGION 1..13: note = Table B: HLA-DRB1*04:03L
TGHMLDMYSVMLT

SEQ ID NO: 13404 - protein, 13 aa, Severe acute respiratory syndrome coronavirus 2
  REGION 1..13: note = Table B: HLA-DRB1*04:03L HLA-DRB1*04:02L HLA-DRB1*01:02L HLA-DQA1*01-B1*05L HLA-DRB1*12:01L HLA-DRB1*16:01L
GHMLDMYSVMLTN

SEQ ID NO: 13405 - protein, 11 aa, Severe acute respiratory syndrome coronavirus 2
  REGION 1..11: note = Table B: HLA-DRB1*04:03L HLA-DRB1*14:17L
YSVMLTNDNTS

SEQ ID NO: 13406 - protein, 10 aa, Severe acute respiratory syndrome coronavirus 2
  REGION 1..10: note = Table B: HLA-DRB1*04:03M HLA-DRB1*13:03L HLA-DRB1*01:03L HLA-DRB1*04:02L HLA-DRB1*04:04L HLA-DRB1*04:05L HLA-DRB4*03:01NL HLA-DRB1*11:04L HLA-DRB1*04:10L HLA-DRB1*12:01L HLA-DQA1*03:01-B1*03:02L HLA-DRB1*14:54L HLA-DRB1*14:17L
  REGION 1..10: note = CONT. FROM ABOVE: HLA-DRB1*10:01L HLA-DRB1*16:01L HLA-DRB1*04:08 L HLA-DQA1*02:01-B1*03:03L
VMLTNDNTSR

SEQ ID NO: 13407 - protein, 12 aa, Severe acute respiratory syndrome coronavirus 2
  REGION 1..12: note = Table B: HLA-DRB1*04:03L HLA-DRB1*13:02L HLA-DRB1*13:03L HLA-DRB1*04:05L HLA-DRB1*08:04L HLA-DRB1*11:04L HLA-DRB3*01:01L HLA-DPA1*01:03-B1*02:01L HLA-DRB1*08:03L
SRYWEPEFYEAM

SEQ ID NO: 13408 - protein, 10 aa, Severe acute respiratory syndrome coronavirus 2
  REGION 1..10: note = Table B: HLA-DRB1*04:03L HLA-DRB1*01:03L HLA-DRB1*04:02L HLA-DRB1*01:02L HLA-DRB1*14:01L HLA-DRB1*12:01L HLA-DRB1*14:17L HLA-DRB1*16:01L HLA-DQA1*02:01-B1*03:03L HLA-DRB1*15:03L
AMYTPHTVLQ

SEQ ID NO: 13409 - protein, 11 aa, Severe acute respiratory syndrome coronavirus 2
  REGION 1..11: note = Table B: HLA-DRB1*04:03L HLA-DRB1*13:03L HLA-DRB1*01:03L HLA-DRB1*04:02L HLA-DRB1*04:05L HLA-DQA1*01:02-B1*06:02L HLA-DRB1*01:02L HLA-DRB4*03:01NL HLA-DRB1*14:01L HLA-DQA1*01-B1*05L HLA-DRB1*04:10L HLA-DRB1*12:01L
  REGION 1..11: note = CONT. FROM ABOVE: HLA-DRB1*14:54L HLA-DRB1*14:17L HLA-DPA1*01:02 -B1*04:01L HLA-DRB1*04:08L HLA-DQA1*02:01-B1*03:03L
YTPHTVLQAVG

SEQ ID NO: 13410 - protein, 11 aa, Severe acute respiratory syndrome coronavirus 2
  REGION 1..11: note = Table B: HLA-DRB1*04:03L HLA-DRB1*13:03L HLA-DRB1*04:02L HLA-DRB1*04:05L HLA-DQA1*01-B1*05L HLA-DRB1*14:17L HLA-DRB1*16:01L HLA-DQA1*02:01-B1*03:03L
TPHTVLQAVGA

SEQ ID NO: 13411 - protein, 10 aa, Severe acute respiratory syndrome coronavirus 2
  REGION 1..10: note = Table B: HLA-DRB1*04:03L HLA-DQA1*01:02-B1*06:02L HLA-DQA1*03:01-B1*03:02L HLA-DRB1*14:17L HLA-DQA1*01:03-B1*06:01L HLA-DQA1*02:01-B1*03:03L
VLCNSQTSLR

SEQ ID NO: 13412 - protein, 12 aa, Severe acute respiratory syndrome coronavirus 2
  REGION 1..12: note = Table B: HLA-DRB1*04:03L HLA-DQA1*01:02-B1*06:02L
YDHVISTSHKLV

SEQ ID NO: 13413 - protein, 12 aa, Severe acute respiratory syndrome coronavirus 2
  REGION 1..12: note = Table B: HLA-DRB1*04:03L HLA-DRB1*13:02L HLA-DRB1*13:03L HLA-DRB1*04:02L HLA-DRB1*01:02L HLA-DRB1*08:04L HLA-DRB1*11:04L HLA-DRB1*12:02L HLA-DRB3*01:01L
DHVISTSHKLVL

SEQ ID NO: 13414 - protein, 11 aa, Severe acute respiratory syndrome coronavirus 2
  REGION 1..11: note = Table B: HLA-DRB1*04:03L
HKLVLSVNPYV

SEQ ID NO: 13415 - protein, 13 aa, Severe acute respiratory syndrome coronavirus 2
  REGION 1..13: note = Table B: HLA-DRB1*04:03L HLA-DQA1*01:02-B1*06:02L HLA-DPA1*03:01-B1*04:02L HLA-DPA1*01:03-B1*04:02L HLA-DPA1*01:02-B1*04:01L HLA-DQA1*01:03-B1*06:01L HLA-DQA1*02:01-B1*03:03L
VLSVNPYVCNAPG

SEQ ID NO: 13416 - protein, 13 aa, Severe acute respiratory syndrome coronavirus 2
  REGION 1..13: note = Table B: HLA-DRB1*04:03L HLA-DRB1*12:01L HLA-DQA1*05:05-B1*03:01L
VTDVTQLYLGGMS

SEQ ID NO: 13417 - protein, 19 aa, Severe acute respiratory syndrome coronavirus 2
  REGION 1..19: note = Table B: HLA-DRB1*04:03L
VTQLYLGGMSYYCKSHKPP

SEQ ID NO: 13418 - protein, 10 aa, Severe acute respiratory syndrome coronavirus 2
  REGION 1..10: note = Table B: HLA-DRB1*04:03L HLA-DRB1*01:03L HLA-DQA1*03:01-B1*03:02L HLA-DPA1*01:02-B1*04:01L HLA-DRB1*16:01L HLA-DQA1*02:01-B1*03:03L
SHKPPISFPL

SEQ ID NO: 13419 - protein, 11 aa, Severe acute respiratory syndrome coronavirus 2
  REGION 1..11: note = Table B: HLA-DRB1*04:03L
GDYILANTCTE

SEQ ID NO: 13420 - protein, 10 aa, Severe acute respiratory syndrome coronavirus 2
  REGION 1..10: note = Table B: HLA-DRB1*04:03L HLA-DRB1*04:02L HLA-DQA1*03:01-B1*03:02L HLA-DRB1*14:17L HLA-DQA1*02:01-B1*03:03L
YILANTCTER

SEQ ID NO: 13421 - protein, 12 aa, Severe acute respiratory syndrome coronavirus 2
  REGION 1..12: note = Table B: HLA-DRB1*04:03L HLA-DRB1*01:03L HLA-DRB1*04:05L HLA-DQA1*01:02-B1*06:02L HLA-DRB1*08:01L HLA-DQA1*03:01-B1*03:02L HLA-DRB1*07:01L HLA-DQA1*01:03-B1*06:01L HLA-DRB1*04:08L
  REGION 1..12: note = CONT. FROM ABOVE: HLA-DQA1*02:01-B1*03:03L HLA-DRB1*15:01L
ERLKLFAAETLK

SEQ ID NO: 13422 - protein, 10 aa, Severe acute respiratory syndrome coronavirus 2
  REGION 1..10: note = Table B: HLA-DRB1*04:03L HLA-DQA1*01:02-B1*06:02L HLA-DPA1*03:01-B1*105:01L HLA-DQA1*01:03-B1*06:01L HLA-DQA1*02:01-B1*03:03L
LFAAETLKAT

SEQ ID NO: 13423 - protein, 10 aa, Severe acute respiratory syndrome coronavirus 2
  REGION 1..10: note = Table B: HLA-DRB1*04:03L HLA-DRB1*04:02L HLA-DQA1*03:01-B1*03:02L HLA-DRB1*14:17L HLA-DQA1*02:01-B1*03:03L
AAETLKATEE

SEQ ID NO: 13424 - protein, 10 aa, Severe acute respiratory syndrome coronavirus 2
  REGION 1..10: note = Table B: HLA-DRB1*04:03L HLA-DQA1*03:01-B1*03:02L HLA-DQA1*01:03-B1*06:01L HLA-DQA1*02:01-B1*03:03L
TLKATEETFK

SEQ ID NO: 13425 - protein, 13 aa, Severe acute respiratory syndrome coronavirus 2
  REGION 1..13: note = Table B: HLA-DRB1*04:03L HLA-DRB1*04:05L HLA-DQA1*01:02-B1*06:02L HLA-DRB1*11:03L HLA-DRB1*07:01L HLA-DRB1*10:01L HLA-DQA1*01:03-B1*06:01L
ETFKLSYGIATVR

SEQ ID NO: 13426 - protein, 10 aa, Severe acute respiratory syndrome coronavirus 2
  REGION 1..10: note = Table B: HLA-DRB1*04:03L HLA-DQA1*01:02-B1*06:02L HLA-DQA1*03:01-B1*03:02L HLA-DQA1*01:03-B1*06:01L HLA-DQA1*02:01-B1*03:03L
IATVREVLSD

SEQ ID NO: 13427 - protein, 11 aa, Severe acute respiratory syndrome coronavirus 2
  REGION 1..11: note = Table B: HLA-DRB1*04:03L
ATVREVLSDRE

SEQ ID NO: 13428 - protein, 12 aa, Severe acute respiratory syndrome coronavirus 2
  REGION 1..12: note = Table B: HLA-DRB1*04:03L HLA-DRB1*04:02L HLA-DRB1*04:05L HLA-DRB4*03:01NL HLA-DRB1*08:04L HLA-DRB1*11:04L HLA-DRB3*01:01L HLA-DRB1*14:54L HLA-DRB1*14:17L HLA-DRB1*04:08L
VREVLSDRELHL

SEQ ID NO: 13429 - protein, 11 aa, Severe acute respiratory syndrome coronavirus 2
  REGION 1..11: note = Table B: HLA-DRB1*04:03L
EVLSDRELHLS

SEQ ID NO: 13430 - protein, 11 aa, Severe acute respiratory syndrome coronavirus 2
  REGION 1..11: note = Table B: HLA-DRB1*04:03L HLA-DRB1*01:03L HLA-DQA1*01:02-B1*06:02L HLA-DRB1*01:02L HLA-DQA1*05:05-B1*03:01L HLA-DRB1*16:01L HLA-DQA1*01:03-B1*06:01L
LSWEVGKPRPP

SEQ ID NO: 13431 - protein, 19 aa, Severe acute respiratory syndrome coronavirus 2
  REGION 1..19: note = Table B: HLA-DRB1*04:03L HLA-DRB1*11:02L HLA-DRB1*11:03L HLA-DQA1*05:05-B1*03:19L
KPRPPLNRNYVFTGYRVTK

SEQ ID NO: 13432 - protein, 19 aa, Severe acute respiratory syndrome coronavirus 2
  REGION 1..19: note = Table B: HLA-DRB1*04:03L HLA-DRB1*08:04L HLA-DRB1*03:01L HLA-DRB1*11:02L HLA-DRB1*14:02L HLA-DPA1*01:03-B1*104:01L
PRPPLNRNYVFTGYRVTKN

SEQ ID NO: 13433 - protein, 13 aa, Severe acute respiratory syndrome coronavirus 2
  REGION 1..13: note = Table B: HLA-DRB1*04:03L HLA-DRB1*04:02L HLA-DRB1*04:05L HLA-DQA1*01:01-B1*05:01L HLA-DRB1*08:01L HLA-DRB1*04:08L
VTKNSKVQIGEYT

SEQ ID NO: 13434 - protein, 13 aa, Severe acute respiratory syndrome coronavirus 2
  REGION 1..13: note = Table B: HLA-DRB1*04:03L HLA-DRB1*04:02L HLA-DRB1*04:05L HLA-DQA1*01:02-B1*06:02L HLA-DRB1*16:01L HLA-DQA1*01:03-B1*06:01L
SKVQIGEYTFEKG

SEQ ID NO: 13435 - protein, 12 aa, Severe acute respiratory syndrome coronavirus 2
  REGION 1..12: note = Table B: HLA-DRB1*04:03L HLA-DQA1*01:02-B1*06:02L HLA-DQA1*01-B1*05L HLA-DPA1*03:01-B1*105:01L HLA-DQA1*01:03-B1*06:01L HLA-DQA1*02:01-B1*03:03L
VQIGEYTFEKGD

SEQ ID NO: 13436 - protein, 11 aa, Severe acute respiratory syndrome coronavirus 2
  REGION 1..11: note = Table B: HLA-DRB1*04:03L HLA-DRB1*13:03L HLA-DRB1*01:03L HLA-DRB1*04:02L HLA-DRB1*04:05L HLA-DRB1*04:10L HLA-DRB1*14:54L HLA-DRB1*14:17L HLA-DRB1*04:08L HLA-DQA1*02:01-B1*03:03L
GEYTFEKGDYG

SEQ ID NO: 13437 - protein, 13 aa, Severe acute respiratory syndrome coronavirus 2
  REGION 1..13: note = Table B: HLA-DRB1*04:03L
TFEKGDYGDAVVY

SEQ ID NO: 13438 - protein, 12 aa, Severe acute respiratory syndrome coronavirus 2
  REGION 1..12: note = Table B: HLA-DRB1*04:03L
KGDYGDAVVYRG

SEQ ID NO: 13439 - protein, 10 aa, Severe acute respiratory syndrome coronavirus 2
  REGION 1..10: note = Table B: HLA-DRB1*04:03L HLA-DRB1*01:03L HLA-DRB1*04:05M HLA-DQA1*01:02-B1*06:02L HLA-DRB1*01:01L HLA-DRB1*01:02L HLA-DRB1*08:77L HLA-DPA1*03:01-B1*04:02L HLA-DRB1*11:03L HLA-DRB1*14:02L HLA-DQA1*01:01-B1*05:01L
  REGION 1..10: note = CONT. FROM ABOVE: HLA-DQA1*05:05-B1*03:19L HLA-DQA1*05:01-B1*02: 01L HLA-DPA1*01:03-B1*04:01L HLA-DRB1*12:01L HLA-DPA1*02:01-B1*1 3:01M HLA-DPA1*03:01-B1*105:01L HLA-DRB1*16:01L HLA-DQA1*01:03-B 1*06:01M HLA-DQA1*02:01-B1*03:03L HLA-DRB1*15:03L
TYKLNVGDYF

SEQ ID NO: 13440 - protein, 12 aa, Severe acute respiratory syndrome coronavirus 2
  REGION 1..12: note = Table B: HLA-DRB1*04:03L HLA-DRB1*13:02L HLA-DRB1*13:03L HLA-DRB1*01:03L HLA-DRB1*04:02L HLA-DRB1*04:04L HLA-DRB4*03:01NL HLA-DRB1*08:04L HLA-DRB3*02:01L HLA-DPA1*01:03-B1*03:01L HLA-DRB1*14:01L HLA-DRB1*11:03L HLA-DRB1*11:04L HLA-DRB1*14:02L
  REGION 1..12: note = CONT. FROM ABOVE: HLA-DQA1*01:01-B1*05:01L HLA-DRB1*08:01L HLA-D RB1*11:01L HLA-DRB4*01:01L HLA-DPA1*01:03-B1*04:01L HLA-DRB1*04: 10L HLA-DRB1*09:01L HLA-DPA1*01:03-B1*04:02L HLA-DRB1*12:02L HLA -DRB3*01:01L HLA-DRB1*14:54L HLA-DQA1*05:05-B1*03:01L
  REGION 1..12: note = CONT. FROM ABOVE: HLA-DRB1*14:17L HLA-DRB1*07:01L HLA-DRB1*10:01 L HLA-DRB1*04:08L HLA-DRB1*08:03L
VGDYFVLTSHTV

SEQ ID NO: 13441 - protein, 10 aa, Severe acute respiratory syndrome coronavirus 2
  REGION 1..10: note = Table B: HLA-DRB1*04:03L HLA-DRB1*14:01L
FVLTSHTVMP

SEQ ID NO: 13442 - protein, 11 aa, Severe acute respiratory syndrome coronavirus 2
  REGION 1..11: note = Table B: HLA-DRB1*04:03L HLA-DQA1*01:03-B1*06:01L
VLTSHTVMPLS

SEQ ID NO: 13443 - protein, 11 aa, Severe acute respiratory syndrome coronavirus 2
  REGION 1..11: note = Table B: HLA-DRB1*04:03L HLA-DRB1*14:17L
SHTVMPLSAPT

SEQ ID NO: 13444 - protein, 12 aa, Severe acute respiratory syndrome coronavirus 2
  REGION 1..12: note = Table B: HLA-DRB1*04:03L HLA-DQA1*01:02-B1*06:02L HLA-DQA1*05:05-B1*03:01L
PLSAPTLVPQEH

SEQ ID NO: 13445 - protein, 10 aa, Severe acute respiratory syndrome coronavirus 2
  REGION 1..10: note = Table B: HLA-DRB1*04:03L HLA-DRB1*04:02L HLA-DQA1*03:01-B1*03:02L HLA-DRB1*14:17L HLA-DQA1*02:01-B1*03:03L
YVRITGLYPT

SEQ ID NO: 13446 - protein, 13 aa, Severe acute respiratory syndrome coronavirus 2
  REGION 1..13: note = Table B: HLA-DRB1*04:03L HLA-DRB1*01:02L HLA-DQA1*05:05-B1*03:19L HLA-DRB1*10:01L HLA-DRB1*16:01L HLA-DRB1*15:03L
VRITGLYPTLNIS

SEQ ID NO: 13447 - protein, 10 aa, Severe acute respiratory syndrome coronavirus 2
  REGION 1..10: note = Table B: HLA-DRB1*04:03L HLA-DRB1*04:05L HLA-DQA1*01-B1*05L HLA-DQA1*03:01-B1*03:02L HLA-DRB1*14:17L HLA-DQA1*02:01-B1*03:03L
LYPTLNISDE

SEQ ID NO: 13448 - protein, 10 aa, Severe acute respiratory syndrome coronavirus 2
  REGION 1..10: note = Table B: HLA-DRB1*04:03L
LNISDEFSSN

SEQ ID NO: 13449 - protein, 11 aa, Severe acute respiratory syndrome coronavirus 2
  REGION 1..11: note = Table B: HLA-DRB1*04:03L HLA-DRB1*13:02L HLA-DRB1*04:05L HLA-DRB1*14:17L
DEFSSNVANYQ

SEQ ID NO: 13450 - protein, 10 aa, Severe acute respiratory syndrome coronavirus 2
  REGION 1..10: note = Table B: HLA-DRB1*04:03L HLA-DRB1*04:02L HLA-DRB1*14:01L HLA-DQA1*01-B1*05L HLA-DQA1*03:01-B1*03:02L HLA-DRB1*14:17L HLA-DQA1*02:01-B1*03:03L
VANYQKVGMQ

SEQ ID NO: 13451 - protein, 13 aa, Severe acute respiratory syndrome coronavirus 2
  REGION 1..13: note = Table B: HLA-DRB1*04:03L HLA-DRB1*04:02L HLA-DQA1*01:02-B1*06:02L HLA-DPA1*03:01-B1*105:01L HLA-DQA1*03:01-B1*03:02L HLA-DRB1*14:17L HLA-DRB1*16:01L HLA-DQA1*01:03-B1*06:01L HLA-DQA1*02:01-B1*03:03L
VGMQKYSTLQGPP

SEQ ID NO: 13452 - protein, 10 aa, Severe acute respiratory syndrome coronavirus 2
  REGION 1..10: note = Table B: HLA-DRB1*04:03L
KYSTLQGPPG

SEQ ID NO: 13453 - protein, 11 aa, Severe acute respiratory syndrome coronavirus 2
  REGION 1..11: note = Table B: HLA-DRB1*04:03L HLA-DRB1*01:03L HLA-DRB1*01:02L HLA-DRB1*14:17L HLA-DRB1*16:01L HLA-DRB1*04:08L
YSTLQGPPGTG

SEQ ID NO: 13454 - protein, 10 aa, Severe acute respiratory syndrome coronavirus 2
  REGION 1..10: note = Table B: HLA-DRB1*04:03L HLA-DRB1*13:03L HLA-DRB1*01:03L HLA-DRB1*04:02L HLA-DRB4*03:01NL HLA-DQA1*03:01-B1*03:02L HLA-DRB1*14:17L
QGPPGTGKSH

SEQ ID NO: 13455 - protein, 13 aa, Severe acute respiratory syndrome coronavirus 2
  REGION 1..13: note = Table B: HLA-DRB1*04:03L HLA-DPA1*01:02-B1*04:01L
SHFAIGLALYYPS

SEQ ID NO: 13456 - protein, 10 aa, Severe acute respiratory syndrome coronavirus 2
  REGION 1..10: note = Table B: HLA-DRB1*04:03L
IVYTACSHAA

SEQ ID NO: 13457 - protein, 10 aa, Severe acute respiratory syndrome coronavirus 2
  REGION 1..10: note = Table B: HLA-DRB1*04:03L HLA-DRB1*01:03L HLA-DRB1*04:02L HLA-DRB1*04:05L HLA-DRB1*01:02L HLA-DRB1*08:01L HLA-DRB1*12:01L HLA-DQA1*03:01-B1*03:02L HLA-DRB1*14:17L HLA-DPA1*01:02-B1*04:01L HLA-DRB1*16:01L HLA-DRB1*04:08L
  REGION 1..10: note = CONT. FROM ABOVE: HLA-DQA1*02:01-B1*03:03L HLA-DRB1*15:03L
KALKYLPIDK

SEQ ID NO: 13458 - protein, 11 aa, Severe acute respiratory syndrome coronavirus 2
  REGION 1..11: note = Table B: HLA-DRB1*04:03L HLA-DRB1*01:03L HLA-DRB1*08:77L HLA-DPA1*01:03-B1*03:01L HLA-DPA1*03:01-B1*04:02L HLA-DRB1*14:01L HLA-DRB1*14:02L HLA-DQA1*01-B1*05L HLA-DRB4*01:01L HLA-DPA1*01:03-B1*04:01L
  REGION 1..11: note = CONT. FROM ABOVE: HLA-DQA1*05:05-B1*03:116L HLA-DPA1*01:03-B1*04 :02L HLA-DRB1*12:01L HLA-DPA1*02:01-B1*13:01L HLA-DPA1*01:03-B1* 104:01L HLA-DQA1*05:05-B1*03:01L HLA-DPA1*01:02-B1*04:01L HLA-DR B1*16:01L
KVNSTLEQYVF

SEQ ID NO: 13459 - protein, 12 aa, Severe acute respiratory syndrome coronavirus 2
  REGION 1..12: note = Table B: HLA-DRB1*04:03L HLA-DQA1*01:02-B1*06:02L HLA-DPA1*03:01-B1*105:01L HLA-DQA1*01:03-B1*06:01L
QYVFCTVNALPE

SEQ ID NO: 13460 - protein, 12 aa, Severe acute respiratory syndrome coronavirus 2
  REGION 1..12: note = Table B: HLA-DRB1*04:03L HLA-DQA1*01:02-B1*06:02L HLA-DPA1*03:01-B1*105:01L HLA-DQA1*05:05-B1*03:01L HLA-DQA1*01:03-B1*06:01L
YVFCTVNALPET

SEQ ID NO: 13461 - protein, 11 aa, Severe acute respiratory syndrome coronavirus 2
  REGION 1..11: note = Table B: HLA-DRB1*04:03L HLA-DQA1*02:01-B1*03:03L
TVNALPETTAD

SEQ ID NO: 13462 - protein, 11 aa, Severe acute respiratory syndrome coronavirus 2
  REGION 1..11: note = Table B: HLA-DRB1*04:03L HLA-DRB1*12:01L HLA-DRB1*16:01L
DIVVFDEISMA

SEQ ID NO: 13463 - protein, 11 aa, Severe acute respiratory syndrome coronavirus 2
  REGION 1..11: note = Table B: HLA-DRB1*04:03L HLA-DRB1*14:17L
IVVFDEISMAT

SEQ ID NO: 13464 - protein, 11 aa, Severe acute respiratory syndrome coronavirus 2
  REGION 1..11: note = Table B: HLA-DRB1*04:03L HLA-DRB1*04:02L HLA-DQA1*01-B1*05L HLA-DQA1*05:01-B1*02:01L HLA-DQA1*03:01-B1*03:02L HLA-DRB1*14:17L HLA-DQA1*02:01-B1*03:03L
VVFDEISMATN

SEQ ID NO: 13465 - protein, 11 aa, Severe acute respiratory syndrome coronavirus 2
  REGION 1..11: note = Table B: HLA-DRB1*04:03L HLA-DQA1*03:01-B1*03:02L HLA-DRB1*14:17L
FDEISMATNYD

SEQ ID NO: 13466 - protein, 10 aa, Severe acute respiratory syndrome coronavirus 2
  REGION 1..10: note = Table B: HLA-DRB1*04:03L HLA-DRB1*14:17L
ISMATNYDLS

SEQ ID NO: 13467 - protein, 10 aa, Severe acute respiratory syndrome coronavirus 2
  REGION 1..10: note = Table B: HLA-DRB1*04:03L HLA-DRB1*13:02L HLA-DRB1*13:03L HLA-DRB1*01:03L HLA-DRB1*04:02L HLA-DRB4*03:01NL HLA-DRB1*08:01L HLA-DRB5*01:01L HLA-DPA1*01:03-B1*04:02L HLA-DRB1*12:01L HLA-DQA1*03:01-B1*03:02L HLA-DQA1*05:05-B1*03:01L
  REGION 1..10: note = CONT. FROM ABOVE: HLA-DRB1*14:17L HLA-DRB1*16:01L HLA-DQA1*01:03 -B1*06:01L HLA-DQA1*02:01-B1*03:03L
NYDLSVVNAR

SEQ ID NO: 13468 - protein, 11 aa, Severe acute respiratory syndrome coronavirus 2
  REGION 1..11: note = Table B: HLA-DRB1*04:03L HLA-DRB1*04:02L HLA-DQA1*01-B1*05L HLA-DRB1*14:17L HLA-DRB1*16:01L
YVYIGDPAQLP

SEQ ID NO: 13469 - protein, 11 aa, Severe acute respiratory syndrome coronavirus 2
  REGION 1..11: note = Table B: HLA-DRB1*04:03L HLA-DRB1*04:02L HLA-DQA1*03:01-B1*03:02L HLA-DRB1*14:17L
TLLTKGTLEPE

SEQ ID NO: 13470 - protein, 18 aa, Severe acute respiratory syndrome coronavirus 2
  REGION 1..18: note = Table B: HLA-DRB1*04:03L HLA-DPA1*01:03-B1*03:01L HLA-DRB1*11:02L HLA-DPA1*01:03-B1*04:02L HLA-DRB3*01:01L HLA-DPA1*01:03-B1*02:01L HLA-DPA1*01:03-B1*104:01L HLA-DRB1*08:02L HLA-DRB1*08:03L
EPEYFNSVCRLMKTIGPD

SEQ ID NO: 13471 - protein, 12 aa, Severe acute respiratory syndrome coronavirus 2
  REGION 1..12: note = Table B: HLA-DRB1*04:03L HLA-DQA1*01-B1*05L HLA-DRB1*16:01L
DTVSALVYDNKL

SEQ ID NO: 13472 - protein, 10 aa, Severe acute respiratory syndrome coronavirus 2
  REGION 1..10: note = Table B: HLA-DRB1*04:03L HLA-DRB1*04:02L HLA-DRB1*14:01L HLA-DRB1*14:17L HLA-DRB1*16:01L
ALVYDNKLKA

SEQ ID NO: 13473 - protein, 10 aa, Severe acute respiratory syndrome coronavirus 2
  REGION 1..10: note = Table B: HLA-DRB1*04:03L HLA-DRB1*13:02L HLA-DRB1*13:03L HLA-DRB1*01:03L HLA-DRB1*04:02L HLA-DRB1*04:05L HLA-DRB1*01:02L HLA-DRB4*03:01NL HLA-DRB1*14:01L HLA-DRB1*11:04L HLA-DRB1*08:01L HLA-DRB1*11:01L HLA-DRB1*12:01L HLA-DRB3*01:01L
  REGION 1..10: note = CONT. FROM ABOVE: HLA-DQA1*03:01-B1*03:02L HLA-DRB1*14:54L HLA-D RB1*14:17L HLA-DRB1*16:01L HLA-DRB1*04:08L HLA-DRB1*15:03L
LVYDNKLKAH

SEQ ID NO: 13474 - protein, 13 aa, Severe acute respiratory syndrome coronavirus 2
  REGION 1..13: note = Table B: HLA-DRB1*04:03L HLA-DRB1*01:03L HLA-DRB1*04:02L HLA-DRB1*04:04L HLA-DRB1*04:05L HLA-DQA1*01:02-B1*06:02L HLA-DRB1*01:02L HLA-DRB1*14:01L HLA-DRB1*08:01L HLA-DQA1*01-B1*05L HLA-DRB1*04:10L HLA-DRB1*12:01L
  REGION 1..13: note = CONT. FROM ABOVE: HLA-DQA1*03:01-B1*03:02L HLA-DRB1*14:17L HLA-D RB1*16:01L HLA-DRB1*04:08L HLA-DQA1*02:01-B1*03:03L HLA-DRB1*15: 03L
DNKLKAHKDKSAQ

SEQ ID NO: 13475 - protein, 11 aa, Severe acute respiratory syndrome coronavirus 2
  REGION 1..11: note = Table B: HLA-DRB1*04:03L HLA-DRB1*13:02L HLA-DRB1*13:03L HLA-DRB1*01:03L HLA-DRB1*04:02L HLA-DRB1*04:05L HLA-DRB1*01:02L HLA-DRB4*03:01NL HLA-DPA1*01:03-B1*03:01L HLA-DRB1*14:01L HLA-DQA1*01:01-B1*05:01L HLA-DRB1*08:01L HLA-DRB4*02:01NL
  REGION 1..11: note = CONT. FROM ABOVE: HLA-DQA1*05:05-B1*03:116L HLA-DRB1*04:10L HLA- DPA1*01:03-B1*04:02L HLA-DRB1*12:01L HLA-DRB1*14:54L HLA-DRB1*14 :17L HLA-DPA1*01:02-B1*04:01L HLA-DRB1*16:01L HLA-DRB1*04:08L HL A-DRB1*15:03L
VSSAINRPQIG

SEQ ID NO: 13476 - protein, 10 aa, Severe acute respiratory syndrome coronavirus 2
  REGION 1..10: note = Table B: HLA-DRB1*04:03L HLA-DRB1*14:01L HLA-DQA1*03:01-B1*03:02L HLA-DQA1*02:01-B1*03:03L
AINRPQIGVV

SEQ ID NO: 13477 - protein, 13 aa, Severe acute respiratory syndrome coronavirus 2
  REGION 1..13: note = Table B: HLA-DRB1*04:03L HLA-DRB1*04:02L HLA-DRB1*04:05L HLA-DRB1*12:01L HLA-DRB1*04:08L
RPQIGVVREFLTR

SEQ ID NO: 13478 - protein, 13 aa, Severe acute respiratory syndrome coronavirus 2
  REGION 1..13: note = Table B: HLA-DRB1*04:03L HLA-DRB1*01:03L HLA-DRB1*04:02L HLA-DRB1*04:05L HLA-DQA1*01:02-B1*06:02L HLA-DRB1*01:02L HLA-DRB1*14:01L HLA-DRB1*08:01L HLA-DRB1*12:01L HLA-DQA1*03:01-B1*03:02L HLA-DRB1*14:17L HLA-DRB1*16:01L
  REGION 1..13: note = CONT. FROM ABOVE: HLA-DRB1*04:08L HLA-DQA1*02:01-B1*03:03L
IGVVREFLTRNPA

SEQ ID NO: 13479 - protein, 10 aa, Severe acute respiratory syndrome coronavirus 2
  REGION 1..10: note = Table B: HLA-DRB1*04:03L HLA-DRB1*13:03L HLA-DRB1*01:03L HLA-DRB1*04:02L HLA-DRB1*08:01L HLA-DQA1*03:01-B1*03:02L HLA-DRB1*14:17L HLA-DRB1*04:08L HLA-DQA1*02:01-B1*03:03L
EFLTRNPAWR

SEQ ID NO: 13480 - protein, 10 aa, Severe acute respiratory syndrome coronavirus 2
  REGION 1..10: note = Table B: HLA-DRB1*04:03L HLA-DQA1*01-B1*05L HLA-DQA1*03:01-B1*03:02L HLA-DRB1*14:17L
VFISPYNSQN

SEQ ID NO: 13481 - protein, 10 aa, Severe acute respiratory syndrome coronavirus 2
  REGION 1..10: note = Table B: HLA-DRB1*04:03L HLA-DQA1*01-B1*05L HLA-DRB1*16:01L
ISPYNSQNAV

SEQ ID NO: 13482 - protein, 11 aa, Severe acute respiratory syndrome coronavirus 2
  REGION 1..11: note = Table B: HLA-DRB1*04:03L HLA-DRB1*04:02L HLA-DRB4*03:01NL HLA-DRB1*14:54L HLA-DRB1*14:17L
SPYNSQNAVAS

SEQ ID NO: 13483 - protein, 10 aa, Severe acute respiratory syndrome coronavirus 2
  REGION 1..10: note = Table B: HLA-DRB1*04:03L HLA-DRB1*13:03L HLA-DRB1*04:02L HLA-DRB4*03:01NL HLA-DRB1*12:01L HLA-DQA1*03:01-B1*03:02L HLA-DRB1*14:17L HLA-DRB1*16:01L
YNSQNAVASK

SEQ ID NO: 13484 - protein, 12 aa, Severe acute respiratory syndrome coronavirus 2
  REGION 1..12: note = Table B: HLA-DRB1*04:03L
LGLPTQTVDSSQ

SEQ ID NO: 13485 - protein, 11 aa, Severe acute respiratory syndrome coronavirus 2
  REGION 1..11: note = Table B: HLA-DRB1*04:03L HLA-DQA1*01-B1*05L HLA-DQA1*05:01-B1*02:01L HLA-DQA1*03:01-B1*03:02L HLA-DRB1*14:17L
LPTQTVDSSQG

SEQ ID NO: 13486 - protein, 11 aa, Severe acute respiratory syndrome coronavirus 2
  REGION 1..11: note = Table B: HLA-DRB1*04:03L HLA-DQA1*01-B1*05L HLA-DQA1*03:01-B1*03:02L
DYVIFTQTTET

SEQ ID NO: 13487 - protein, 11 aa, Severe acute respiratory syndrome coronavirus 2
  REGION 1..11: note = Table B: HLA-DRB1*04:03L HLA-DRB1*14:17L
YVIFTQTTETA

SEQ ID NO: 13488 - protein, 10 aa, Severe acute respiratory syndrome coronavirus 2
  REGION 1..10: note = Table B: HLA-DRB1*04:03L HLA-DRB1*13:03L HLA-DRB1*01:03L HLA-DRB1*04:02L HLA-DRB1*04:05L HLA-DRB4*03:01NL HLA-DQA1*01-B1*05L HLA-DQA1*05:01-B1*02:01L HLA-DRB1*04:10L HLA-DRB1*12:01L HLA-DQA1*03:01-B1*03:02L HLA-DRB1*14:54L
  REGION 1..10: note = CONT. FROM ABOVE: HLA-DRB1*14:17L HLA-DRB1*16:01L HLA-DRB1*04:08 L HLA-DQA1*02:01-B1*03:03L
IFTQTTETAH

SEQ ID NO: 13489 - protein, 13 aa, Severe acute respiratory syndrome coronavirus 2
  REGION 1..13: note = Table B: HLA-DRB1*04:03L HLA-DRB1*01:03L HLA-DRB1*01:02L HLA-DPA1*01:03-B1*03:01L HLA-DQA1*05:01-B1*02:01L HLA-DPA1*01:03-B1*04:02L HLA-DRB1*16:01L HLA-DRB1*04:08L
TQTTETAHSCNVN

SEQ ID NO: 13490 - protein, 12 aa, Severe acute respiratory syndrome coronavirus 2
  REGION 1..12: note = Table B: HLA-DRB1*04:03L HLA-DQA1*01:02-B1*06:02L
VGILCIMSDRDL

SEQ ID NO: 13491 - protein, 10 aa, Severe acute respiratory syndrome coronavirus 2
  REGION 1..10: note = Table B: HLA-DRB1*04:03L HLA-DRB1*13:03L HLA-DRB1*01:03L HLA-DRB1*04:02L HLA-DRB1*04:04L HLA-DRB1*04:05L HLA-DRB4*03:01NL HLA-DRB1*08:01L HLA-DQA1*01-B1*05L HLA-DRB1*04:10L HLA-DRB1*12:01L HLA-DQA1*03:01-B1*03:02L HLA-DRB1*14:54L
  REGION 1..10: note = CONT. FROM ABOVE: HLA-DRB1*14:17L HLA-DRB1*16:01L HLA-DRB1*04:08 L HLA-DQA1*02:01-B1*03:03L
IMSDRDLYDK

SEQ ID NO: 13492 - protein, 10 aa, Severe acute respiratory syndrome coronavirus 2
  REGION 1..10: note = Table B: HLA-DRB1*04:03L HLA-DRB1*04:02L HLA-DQA1*01-B1*05L HLA-DPA1*03:01-B1*105:01L HLA-DQA1*03:01-B1*03:02L HLA-DRB1*14:17L HLA-DPA1*01:02-B1*04:01L HLA-DQA1*01:03-B1*06:01L HLA-DQA1*02:01-B1*03:03L
LQFTSLEIPR

SEQ ID NO: 13493 - protein, 10 aa, Severe acute respiratory syndrome coronavirus 2
  REGION 1..10: note = Table B: HLA-DRB1*04:03L HLA-DRB1*04:02L HLA-DQA1*03:01-B1*03:02L HLA-DRB1*14:17L HLA-DQA1*02:01-B1*03:03L
RNVATLQAEN

SEQ ID NO: 13494 - protein, 10 aa, Severe acute respiratory syndrome coronavirus 2
  REGION 1..10: note = Table B: HLA-DRB1*04:03L HLA-DQA1*05:01-B1*02:01L HLA-DRB1*12:01L HLA-DQA1*03:01-B1*03:02L HLA-DQA1*01:03-B1*06:01L HLA-DQA1*02:01-B1*03:03L
VATLQAENVT

SEQ ID NO: 13495 - protein, 10 aa, Severe acute respiratory syndrome coronavirus 2
  REGION 1..10: note = Table B: HLA-DRB1*04:03L HLA-DRB1*14:17L
ATLQAENVTG

SEQ ID NO: 13496 - protein, 12 aa, Severe acute respiratory syndrome coronavirus 2
  REGION 1..12: note = Table B: HLA-DRB1*04:03L HLA-DRB1*01:02L HLA-DRB1*12:01L HLA-DQA1*05:05-B1*03:01L HLA-DRB1*14:17L
TLQAENVTGLFK

SEQ ID NO: 13497 - protein, 12 aa, Severe acute respiratory syndrome coronavirus 2
  REGION 1..12: note = Table B: HLA-DRB1*04:03L
LQAENVTGLFKD

SEQ ID NO: 13498 - protein, 13 aa, Severe acute respiratory syndrome coronavirus 2
  REGION 1..13: note = Table B: HLA-DRB1*04:03L HLA-DRB1*13:02L HLA-DRB1*13:03L HLA-DRB1*01:03L HLA-DRB1*04:02L HLA-DRB1*04:05L HLA-DRB1*01:02L HLA-DRB1*14:01L HLA-DRB1*08:01L HLA-DRB1*12:01L HLA-DRB3*01:01L HLA-DRB1*14:54L HLA-DRB1*14:17L HLA-DRB1*16:01L HLA-DRB1*04:08L
APTHLSVDTKFKT

SEQ ID NO: 13499 - protein, 10 aa, Severe acute respiratory syndrome coronavirus 2
  REGION 1..10: note = Table B: HLA-DRB1*04:03L HLA-DRB1*13:03L HLA-DRB1*01:03L HLA-DRB1*04:02L HLA-DQA1*03:01-B1*03:02L HLA-DRB1*14:17L HLA-DPA1*01:02-B1*04:01L HLA-DRB1*16:01L HLA-DQA1*02:01-B1*03:03L
SVDTKFKTEG

SEQ ID NO: 13500 - protein, 12 aa, Severe acute respiratory syndrome coronavirus 2
  REGION 1..12: note = Table B: HLA-DRB1*04:03L HLA-DPA1*03:01-B1*105:01L
LISMMGFKMNYQ

SEQ ID NO: 13501 - protein, 14 aa, Severe acute respiratory syndrome coronavirus 2
  REGION 1..14: note = Table B: HLA-DRB1*04:03L HLA-DRB1*01:02L HLA-DRB1*08:04L HLA-DRB1*04:08L HLA-DRB1*15:03L
ISMMGFKMNYQVNG

SEQ ID NO: 13502 - protein, 11 aa, Severe acute respiratory syndrome coronavirus 2
  REGION 1..11: note = Table B: HLA-DRB1*04:03L HLA-DRB1*04:02L HLA-DRB1*16:01L HLA-DRB1*15:03L
VNGYPNMFITR

SEQ ID NO: 13503 - protein, 13 aa, Severe acute respiratory syndrome coronavirus 2
  REGION 1..13: note = Table B: HLA-DRB1*04:03L HLA-DRB1*13:03L HLA-DRB1*04:02L HLA-DRB1*04:05L HLA-DRB4*03:01NL HLA-DRB1*08:77L HLA-DRB3*02:01L HLA-DPA1*01:03-B1*03:01L HLA-DRB1*11:03L HLA-DRB1*11:04L HLA-DRB1*14:02L HLA-DQA1*01:01-B1*05:01L
  REGION 1..13: note = CONT. FROM ABOVE: HLA-DQA1*05:05-B1*03:19L HLA-DPA1*01:03-B1*04: 01L HLA-DRB1*04:10L HLA-DRB1*09:01L HLA-DRB1*12:02L HLA-DRB3*01: 01L HLA-DPA1*02:01-B1*13:01L HLA-DRB1*14:54L HLA-DQA1*05:05-B1*0 3:01L HLA-DRB1*14:17L HLA-DRB1*08:03L
YPNMFITREEAIR

SEQ ID NO: 13504 - protein, 12 aa, Severe acute respiratory syndrome coronavirus 2
  REGION 1..12: note = Table B: HLA-DRB1*04:03L HLA-DRB1*04:02L HLA-DRB1*01:02L HLA-DRB1*14:01L HLA-DRB1*08:01L HLA-DRB1*14:17L
EEAIRHVRAWIG

SEQ ID NO: 13505 - protein, 12 aa, Severe acute respiratory syndrome coronavirus 2
  REGION 1..12: note = Table B: HLA-DRB1*04:03L HLA-DRB1*04:05L HLA-DQA1*01:02-B1*06:02L HLA-DRB1*01:02L HLA-DRB1*12:01L HLA-DPA1*02:01-B1*13:01L HLA-DRB1*16:01L HLA-DRB1*04:08L
RHVRAWIGFDVE

SEQ ID NO: 13506 - protein, 12 aa, Severe acute respiratory syndrome coronavirus 2
  REGION 1..12: note = Table B: HLA-DRB1*04:03L HLA-DRB1*04:02L HLA-DQA1*01:02-B1*06:02L HLA-DRB1*01:02L HLA-DRB1*12:01L HLA-DRB1*16:01L HLA-DQA1*01:03-B1*06:01L HLA-DQA1*02:01-B1*03:03L HLA-DRB1*15:01L
HVRAWIGFDVEG

SEQ ID NO: 13507 - protein, 14 aa, Severe acute respiratory syndrome coronavirus 2
  REGION 1..14: note = Table B: HLA-DRB1*04:03L HLA-DRB1*01:03L HLA-DRB1*04:05L HLA-DRB1*01:02L HLA-DQA1*01:01-B1*05:01L HLA-DPA1*02:01-B1*13:01L HLA-DRB1*16:01L HLA-DRB1*15:03L
FDVEGCHATREAVG

SEQ ID NO: 13508 - protein, 13 aa, Severe acute respiratory syndrome coronavirus 2
  REGION 1..13: note = Table B: HLA-DRB1*04:03L
STGVNLVAVPTGY

SEQ ID NO: 13509 - protein, 12 aa, Severe acute respiratory syndrome coronavirus 2
  REGION 1..12: note = Table B: HLA-DRB1*04:03L HLA-DRB1*14:17L
GVNLVAVPTGYV

SEQ ID NO: 13510 - protein, 10 aa, Severe acute respiratory syndrome coronavirus 2
  REGION 1..10: note = Table B: HLA-DRB1*04:03L HLA-DRB1*04:02L HLA-DQA1*05:01-B1*02:01L HLA-DQA1*03:01-B1*03:02L HLA-DRB1*14:17L HLA-DQA1*02:01-B1*03:03L
LVAVPTGYVD

SEQ ID NO: 13511 - protein, 10 aa, Severe acute respiratory syndrome coronavirus 2
  REGION 1..10: note = Table B: HLA-DRB1*04:03L HLA-DQA1*01-B1*05L HLA-DQA1*03:01-B1*03:02L
GYVDTPNNTD

SEQ ID NO: 13512 - protein, 11 aa, Severe acute respiratory syndrome coronavirus 2
  REGION 1..11: note = Table B: HLA-DRB1*04:03L HLA-DRB1*04:02L HLA-DRB1*14:17L
FSRVSAKPPPG

SEQ ID NO: 13513 - protein, 13 aa, Severe acute respiratory syndrome coronavirus 2
  REGION 1..13: note = Table B: HLA-DRB1*04:03L HLA-DRB1*13:02L HLA-DRB1*01:01L HLA-DRB1*14:01L HLA-DRB1*08:01L HLA-DRB1*11:01L HLA-DRB3*01:01L HLA-DRB1*07:01L
DQFKHLIPLMYKG

SEQ ID NO: 13514 - protein, 13 aa, Severe acute respiratory syndrome coronavirus 2
  REGION 1..13: note = Table B: HLA-DRB1*04:03L HLA-DRB1*01:03L HLA-DRB1*04:02L HLA-DRB1*04:04L HLA-DRB1*04:05L HLA-DQA1*01:02-B1*06:02L HLA-DRB1*01:02L HLA-DRB1*08:04L HLA-DPA1*01:03-B1*03:01L HLA-DPA1*03:01-B1*04:02L HLA-DRB1*14:01L HLA-DRB1*08:01L
  REGION 1..13: note = CONT. FROM ABOVE: HLA-DRB1*04:10L HLA-DRB1*12:01L HLA-DPA1*02:01 -B1*13:01L HLA-DPA1*03:01-B1*105:01L HLA-DQA1*03:01-B1*03:02L HL A-DRB1*14:17L HLA-DPA1*01:02-B1*04:01L HLA-DRB1*16:01L HLA-DRB1* 04:08L HLA-DQA1*02:01-B1*03:03L HLA-DRB1*15:03L
VVRIKIVQMLSDT

SEQ ID NO: 13515 - protein, 10 aa, Severe acute respiratory syndrome coronavirus 2
  REGION 1..10: note = Table B: HLA-DRB1*04:03L HLA-DRB1*04:02L HLA-DRB1*01:02L HLA-DQA1*01-B1*05L HLA-DQA1*05:01-B1*02:01L HLA-DRB1*12:01L HLA-DPA1*03:01-B1*105:01L HLA-DQA1*03:01-B1*03:02L HLA-DRB1*14:17L HLA-DRB1*16:01L HLA-DQA1*01:03-B1*06:01L
  REGION 1..10: note = CONT. FROM ABOVE: HLA-DQA1*02:01-B1*03:03L HLA-DRB1*15:03L
IVQMLSDTLK

SEQ ID NO: 13516 - protein, 10 aa, Severe acute respiratory syndrome coronavirus 2
  REGION 1..10: note = Table B: HLA-DRB1*04:03L HLA-DRB1*14:17L
VQMLSDTLKN

SEQ ID NO: 13517 - protein, 11 aa, Severe acute respiratory syndrome coronavirus 2
  REGION 1..11: note = Table B: HLA-DRB1*04:03L HLA-DQA1*01-B1*05L HLA-DQA1*03:01-B1*03:02L
DTLKNLSDRVV

SEQ ID NO: 13518 - protein, 11 aa, Severe acute respiratory syndrome coronavirus 2
  REGION 1..11: note = Table B: HLA-DRB1*04:03L HLA-DRB1*01:03L HLA-DQA1*01:02-B1*06:02L HLA-DRB1*01:02L HLA-DPA1*01:03-B1*03:01L HLA-DRB1*04:08L
VLWAHGFELTS

SEQ ID NO: 13519 - protein, 11 aa, Severe acute respiratory syndrome coronavirus 2
  REGION 1..11: note = Table B: HLA-DRB1*04:03L
PFMIDVQQWGF

SEQ ID NO: 13520 - protein, 12 aa, Severe acute respiratory syndrome coronavirus 2
  REGION 1..12: note = Table B: HLA-DRB1*04:03L HLA-DRB1*04:02L HLA-DRB1*04:05L HLA-DRB4*03:01NL HLA-DRB1*04:10L HLA-DRB1*14:17L HLA-DRB1*16:01L
VQQWGFTGNLQS

SEQ ID NO: 13521 - protein, 12 aa, Severe acute respiratory syndrome coronavirus 2
  REGION 1..12: note = Table B: HLA-DRB1*04:03L HLA-DRB1*13:02L HLA-DRB1*01:03L HLA-DRB1*04:02L HLA-DRB1*04:05L HLA-DRB1*01:02L HLA-DRB3*02:01L HLA-DPA1*01:03-B1*03:01L HLA-DPA1*03:01-B1*04:02L HLA-DRB1*14:01L HLA-DQA1*01:01-B1*05:01L HLA-DRB1*08:01L
  REGION 1..12: note = CONT. FROM ABOVE: HLA-DPA1*01:03-B1*04:01L HLA-DPA1*01:03-B1*04: 02L HLA-DRB1*12:01L HLA-DPA1*02:01-B1*13:01L HLA-DPA1*01:02-B1*0 4:01L HLA-DRB1*04:08L HLA-DRB1*15:03L
RVDWTIEYPIIG

SEQ ID NO: 13522 - protein, 13 aa, Severe acute respiratory syndrome coronavirus 2
  REGION 1..13: note = Table B: HLA-DRB1*04:03L HLA-DRB1*01:03L HLA-DRB1*04:02L HLA-DRB1*04:05L HLA-DPA1*01:03-B1*03:01L HLA-DPA1*03:01-B1*04:02L HLA-DRB1*14:02L HLA-DPA1*01:03-B1*04:02L HLA-DRB1*12:01L
  REGION 1..13: note = CONT. FROM ABOVE: HLA-DPA1*02:01-B1*13:01L HLA-DRB1*14:17L HLA-D RB1*10:01L HLA-DRB1*04:08L HLA-DRB1*15:03L
VDWTIEYPIIGDE

SEQ ID NO: 13523 - protein, 11 aa, Severe acute respiratory syndrome coronavirus 2
  REGION 1..11: note = Table B: HLA-DRB1*04:03L HLA-DRB1*04:02L HLA-DRB1*04:05L HLA-DRB4*03:01NL HLA-DQA1*01:01-B1*05:01L HLA-DQA1*05:05-B1*03:01L HLA-DRB1*14:17L
IEYPIIGDELK

SEQ ID NO: 13524 - protein, 11 aa, Severe acute respiratory syndrome coronavirus 2
  REGION 1..11: note = Table B: HLA-DRB1*04:03L HLA-DQA1*05:01-B1*02:01L HLA-DQA1*03:01-B1*03:02L HLA-DQA1*02:01-B1*03:03L
YPIIGDELKIN

SEQ ID NO: 13525 - protein, 12 aa, Severe acute respiratory syndrome coronavirus 2
  REGION 1..12: note = Table B: HLA-DRB1*04:03L HLA-DRB1*01:03L HLA-DRB1*04:02L HLA-DRB1*04:05L HLA-DQA1*01:02-B1*06:02L HLA-DRB1*14:01L HLA-DQA1*05:01-B1*02:01L HLA-DPA1*03:01-B1*105:01L HLA-DQA1*03:01-B1*03:02L HLA-DRB1*14:17L
  REGION 1..12: note = CONT. FROM ABOVE: HLA-DPA1*01:02-B1*04:01L HLA-DRB1*16:01L HLA-D QA1*01:03-B1*06:01L HLA-DQA1*02:01-B1*03:03L
PIIGDELKINAA

SEQ ID NO: 13526 - protein, 12 aa, Severe acute respiratory syndrome coronavirus 2
  REGION 1..12: note = Table B: HLA-DRB1*04:03L HLA-DRB1*13:02L HLA-DRB1*13:03L HLA-DRB1*08:04L HLA-DPA1*01:03-B1*03:01L HLA-DRB1*11:04L HLA-DRB1*08:01L HLA-DRB3*01:01L HLA-DRB1*14:54L HLA-DPA1*01:03-B1*02:01L HLA-DRB1*04:08L
KAALLADKFPVL

SEQ ID NO: 13527 - protein, 13 aa, Severe acute respiratory syndrome coronavirus 2
  REGION 1..13: note = Table B: HLA-DRB1*04:03L HLA-DRB1*13:03L HLA-DRB1*04:02L HLA-DRB1*04:04L HLA-DRB1*04:05L
AALLADKFPVLHD

SEQ ID NO: 13528 - protein, 10 aa, Severe acute respiratory syndrome coronavirus 2
  REGION 1..10: note = Table B: HLA-DRB1*04:03L HLA-DRB1*13:03L HLA-DRB1*01:03L HLA-DRB1*04:02L HLA-DQA1*03:01-B1*03:02L HLA-DRB1*14:17L HLA-DRB1*16:01L HLA-DQA1*02:01-B1*03:03L
PVLHDIGNPK

SEQ ID NO: 13529 - protein, 10 aa, Severe acute respiratory syndrome coronavirus 2
  REGION 1..10: note = Table B: HLA-DRB1*04:03L HLA-DRB1*04:02L HLA-DQA1*03:01-B1*03:02L HLA-DRB1*14:17L HLA-DQA1*02:01-B1*03:03L
HDIGNPKAIK

SEQ ID NO: 13530 - protein, 13 aa, Severe acute respiratory syndrome coronavirus 2
  REGION 1..13: note = Table B: HLA-DRB1*04:03L HLA-DRB1*01:03L HLA-DRB1*04:02L HLA-DQA1*01:02-B1*06:02L HLA-DRB1*12:01L HLA-DPA1*03:01-B1*105:01L HLA-DQA1*01:03-B1*06:01L HLA-DRB1*04:08L HLA-DQA1*02:01-B1*03:03L
DVEWKFYDAQPCS

SEQ ID NO: 13531 - protein, 10 aa, Severe acute respiratory syndrome coronavirus 2
  REGION 1..10: note = Table B: HLA-DRB1*04:03L HLA-DRB1*13:03L HLA-DRB1*01:03L HLA-DRB1*04:02L HLA-DRB1*04:05L HLA-DRB4*03:01NL HLA-DQA1*01-B1*05L HLA-DRB1*04:10L HLA-DPA1*03:01-B1*105:01L HLA-DQA1*03:01-B1*03:02L HLA-DRB1*14:17L HLA-DRB1*16:01L
  REGION 1..10: note = CONT. FROM ABOVE: HLA-DRB1*04:08L HLA-DQA1*02:01-B1*03:03L
FYDAQPCSDK

SEQ ID NO: 13532 - protein, 14 aa, Severe acute respiratory syndrome coronavirus 2
  REGION 1..14: note = Table B: HLA-DRB1*04:03L HLA-DRB1*13:02L HLA-DRB1*14:01L HLA-DRB1*08:01L HLA-DRB1*11:01L HLA-DPA1*01:03-B1*02:01L HLA-DRB1*08:03L
DKAYKIEELFYSYA

SEQ ID NO: 13533 - protein, 17 aa, Severe acute respiratory syndrome coronavirus 2
  REGION 1..17: note = Table B: HLA-DRB1*04:03L HLA-DRB1*13:02L HLA-DRB1*04:04L HLA-DRB1*08:04L HLA-DRB1*11:04L HLA-DRB1*08:01L HLA-DRB3*01:01L
YPANSIVCRFDTRVLSN

SEQ ID NO: 13534 - protein, 10 aa, Severe acute respiratory syndrome coronavirus 2
  REGION 1..10: note = Table B: HLA-DRB1*04:03L HLA-DRB1*04:02L HLA-DRB1*14:17L
RVLSNLNLPG

SEQ ID NO: 13535 - protein, 11 aa, Severe acute respiratory syndrome coronavirus 2
  REGION 1..11: note = Table B: HLA-DRB1*04:03L HLA-DRB1*13:03L HLA-DRB1*01:03L HLA-DRB1*04:02L HLA-DQA1*03:01-B1*03:02L HLA-DRB1*14:17L HLA-DPA1*01:02-B1*04:01L HLA-DRB1*16:01L HLA-DRB1*04:08L
YVNKHAFHTPA

SEQ ID NO: 13536 - protein, 11 aa, Severe acute respiratory syndrome coronavirus 2
  REGION 1..11: note = Table B: HLA-DRB1*04:03L HLA-DRB1*13:02L HLA-DRB1*13:03L HLA-DRB1*01:03L HLA-DRB1*04:05L HLA-DQA1*01:02-B1*06:02L HLA-DRB1*01:02L HLA-DRB1*08:77L HLA-DRB3*02:01L HLA-DPA1*01:03-B1*03:01L HLA-DRB1*14:01L HLA-DRB1*08:01L
  REGION 1..11: note = CONT. FROM ABOVE: HLA-DQA1*01-B1*05L HLA-DQA1*05:05-B1*03:19L HL A-DPA1*01:03-B1*04:02L HLA-DRB1*12:01L HLA-DPA1*02:01-B1*13:01L HLA-DPA1*01:03-B1*104:01L HLA-DRB1*07:01L HLA-DRB1*04:08L
PAFDKSAFVNL

SEQ ID NO: 13537 - protein, 12 aa, Severe acute respiratory syndrome coronavirus 2
  REGION 1..12: note = Table B: HLA-DRB1*04:03L HLA-DRB1*04:02L HLA-DQA1*05:01-B1*02:01L HLA-DRB1*14:17L HLA-DRB1*16:01L HLA-DRB1*15:03L
LPFFYYSDSPCE

SEQ ID NO: 13538 - protein, 11 aa, Severe acute respiratory syndrome coronavirus 2
  REGION 1..11: note = Table B: HLA-DRB1*04:03L HLA-DRB1*04:02L HLA-DRB1*14:17L HLA-DRB1*04:08L
YYSDSPCESHG

SEQ ID NO: 13539 - protein, 11 aa, Severe acute respiratory syndrome coronavirus 2
  REGION 1..11: note = Table B: HLA-DRB1*04:03L HLA-DRB1*01:03L HLA-DRB1*01:01L HLA-DRB1*01:02L HLA-DRB1*16:01L HLA-DRB1*04:08L HLA-DRB1*15:03L
YVPLKSATCIT

SEQ ID NO: 13540 - protein, 11 aa, Severe acute respiratory syndrome coronavirus 2
  REGION 1..11: note = Table B: HLA-DRB1*04:03L HLA-DRB1*04:02L HLA-DRB1*04:05L HLA-DRB1*04:10L HLA-DRB1*14:17L
NEYRLYLDAYN

SEQ ID NO: 13541 - protein, 12 aa, Severe acute respiratory syndrome coronavirus 2
  REGION 1..12: note = Table B: HLA-DRB1*04:03L HLA-DRB1*04:02L HLA-DQA1*01-B1*05L HLA-DQA1*05:01-B1*02:01L HLA-DPA1*03:01-B1*105:01L HLA-DQA1*03:01-B1*03:02L HLA-DRB1*14:17L HLA-DQA1*02:01-B1*03:03L
YLDAYNMMISAG

SEQ ID NO: 13542 - protein, 10 aa, Severe acute respiratory syndrome coronavirus 2
  REGION 1..10: note = Table B: HLA-DRB1*04:03L HLA-DRB1*04:05L HLA-DQA1*01:02-B1*06:02L HLA-DRB1*01:01L HLA-DPA1*02:01-B1*13:01M HLA-DRB1*16:01L HLA-DQA1*01:03-B1*06:01M HLA-DRB1*15:03L
AYNMMISAGF

SEQ ID NO: 13543 - protein, 15 aa, Severe acute respiratory syndrome coronavirus 2
  REGION 1..15: note = Table B: HLA-DRB1*04:03L HLA-DRB1*13:02L HLA-DRB1*01:03L HLA-DRB1*14:01L HLA-DPA1*01:03-B1*02:01L HLA-DPA1*01:03-B1*104:01L
ISAGFSLWVYKQFDT

SEQ ID NO: 13544 - protein, 11 aa, Severe acute respiratory syndrome coronavirus 2
  REGION 1..11: note = Table B: HLA-DRB1*04:03L HLA-DRB1*01:03L HLA-DRB1*04:05L HLA-DRB1*01:01L HLA-DRB1*01:02L HLA-DPA1*03:01-B1*04:02L HLA-DRB1*14:02L HLA-DQA1*01:01-B1*05:01L HLA-DQA1*05:05-B1*03:19L HLA-DQA1*05:01-B1*02:01L
  REGION 1..11: note = CONT. FROM ABOVE: HLA-DRB4*01:01L HLA-DPA1*01:03-B1*04:01L HLA-D PA1*03:01-B1*105:01L
VYKQFDTYNLW

SEQ ID NO: 13545 - protein, 12 aa, Severe acute respiratory syndrome coronavirus 2
  REGION 1..12: note = Table B: HLA-DRB1*04:03L HLA-DRB1*01:03L HLA-DRB1*04:02L HLA-DRB1*01:02L HLA-DRB1*12:01L HLA-DPA1*03:01-B1*105:01L HLA-DRB1*04:08L
YKQFDTYNLWNT

SEQ ID NO: 13546 - protein, 12 aa, Severe acute respiratory syndrome coronavirus 2
  REGION 1..12: note = Table B: HLA-DRB1*04:03L HLA-DRB1*01:03L HLA-DRB1*04:05L HLA-DQA1*01:02-B1*06:02L HLA-DRB1*01:02L HLA-DPA1*03:01-B1*04:02L HLA-DQA1*01-B1*05L HLA-DRB1*04:08L HLA-DRB1*15:03L
FDTYNLWNTFTR

SEQ ID NO: 13547 - protein, 12 aa, Severe acute respiratory syndrome coronavirus 2
  REGION 1..12: note = Table B: HLA-DRB1*04:03L HLA-DRB1*13:02L HLA-DRB1*01:03L HLA-DRB1*14:01L HLA-DRB1*14:02L HLA-DRB1*12:01L HLA-DRB1*04:08L
TYNLWNTFTRLQ

SEQ ID NO: 13548 - protein, 12 aa, Severe acute respiratory syndrome coronavirus 2
  REGION 1..12: note = Table B: HLA-DRB1*04:03L HLA-DRB1*13:02L HLA-DRB1*01:03L HLA-DRB1*04:02L HLA-DRB1*04:05L HLA-DRB1*11:01L HLA-DRB1*12:01L HLA-DRB1*04:08L
YNLWNTFTRLQS

SEQ ID NO: 13549 - protein, 11 aa, Severe acute respiratory syndrome coronavirus 2
  REGION 1..11: note = Table B: HLA-DRB1*04:03L HLA-DRB1*01:03L HLA-DRB1*04:02L HLA-DRB1*04:04L HLA-DRB1*04:05L HLA-DRB1*01:02L HLA-DRB4*03:01NL HLA-DQA1*01-B1*05L HLA-DRB1*04:10L HLA-DRB1*12:01L HLA-DPA1*03:01-B1*105:01L HLA-DQA1*03:01-B1*03:02L
  REGION 1..11: note = CONT. FROM ABOVE: HLA-DRB1*14:54L HLA-DRB1*14:17L HLA-DRB1*10:01 L HLA-DRB1*16:01L HLA-DRB1*04:08L HLA-DQA1*02:01-B1*03:03L HLA-D RB1*15:03L
FTRLQSLENVA

SEQ ID NO: 13550 - protein, 10 aa, Severe acute respiratory syndrome coronavirus 2
  REGION 1..10: note = Table B: HLA-DRB1*04:03L
LQSLENVAFN

SEQ ID NO: 13551 - protein, 11 aa, Severe acute respiratory syndrome coronavirus 2
  REGION 1..11: note = Table B: HLA-DRB1*04:03L HLA-DRB1*01:03L HLA-DRB1*04:02L HLA-DQA1*01:02-B1*06:02L HLA-DRB1*04:08L
LENVAFNVVNK

SEQ ID NO: 13552 - protein, 10 aa, Severe acute respiratory syndrome coronavirus 2
  REGION 1..10: note = Table B: HLA-DRB1*04:03L HLA-DQA1*03:01-B1*03:02L HLA-DQA1*01:03-B1*06:01L HLA-DQA1*02:01-B1*03:03L
NVAFNVVNKG

SEQ ID NO: 13553 - protein, 12 aa, Severe acute respiratory syndrome coronavirus 2
  REGION 1..12: note = Table B: HLA-DRB1*04:03L HLA-DQA1*01:02-B1*06:02L HLA-DRB1*14:01L HLA-DRB1*14:17L HLA-DQA1*01:03-B1*06:01L
NVVNKGHFDGQQ

SEQ ID NO: 13554 - protein, 12 aa, Severe acute respiratory syndrome coronavirus 2
  REGION 1..12: note = Table B: HLA-DRB1*04:03L HLA-DRB1*04:02L HLA-DQA1*03:01-B1*03:02L
VVNKGHFDGQQG

SEQ ID NO: 13555 - protein, 11 aa, Severe acute respiratory syndrome coronavirus 2
  REGION 1..11: note = Table B: HLA-DRB1*04:03L HLA-DQA1*01-B1*05L HLA-DQA1*05:01-B1*02:01L HLA-DQA1*03:01-B1*03:02L HLA-DQA1*02:01-B1*03:03L
GHFDGQQGEVP

SEQ ID NO: 13556 - protein, 14 aa, Severe acute respiratory syndrome coronavirus 2
  REGION 1..14: note = Table B: HLA-DRB1*04:03L HLA-DRB1*13:02L HLA-DRB1*13:03L HLA-DRB1*04:02L HLA-DRB1*04:05L HLA-DRB1*01:02L HLA-DRB4*03:01NL HLA-DRB1*08:01L HLA-DRB1*04:10L HLA-DPA1*01:03-B1*04:02L HLA-DRB1*14:17L
DGQQGEVPVSIINN

SEQ ID NO: 13557 - protein, 11 aa, Severe acute respiratory syndrome coronavirus 2
  REGION 1..11: note = Table B: HLA-DRB1*04:03L HLA-DRB1*13:02L HLA-DRB1*01:03L HLA-DRB1*04:02L HLA-DRB4*03:01NL HLA-DRB1*08:77L HLA-DRB1*03:01L HLA-DRB1*14:02L HLA-DRB4*01:01L HLA-DPA1*01:03-B1*04:01L HLA-DPA1*01:03-B1*04:02L HLA-DRB1*12:01L
  REGION 1..11: note = CONT. FROM ABOVE: HLA-DPA1*01:03-B1*104:01L HLA-DQA1*05:05-B1*03 :01L HLA-DRB1*14:17L HLA-DRB1*10:01L HLA-DQA1*01:03-B1*06:01L HL A-DRB1*08:02L
VPVSIINNTVY

SEQ ID NO: 13558 - protein, 10 aa, Severe acute respiratory syndrome coronavirus 2
  REGION 1..10: note = Table B: HLA-DRB1*04:03L HLA-DRB1*12:01L HLA-DRB1*14:17L
VSIINNTVYT

SEQ ID NO: 13559 - protein, 11 aa, Severe acute respiratory syndrome coronavirus 2
  REGION 1..11: note = Table B: HLA-DRB1*04:03L HLA-DRB1*04:02L HLA-DRB1*14:17L HLA-DQA1*01:03-B1*06:01L HLA-DQA1*02:01-B1*03:03L
INNTVYTKVDG

SEQ ID NO: 13560 - protein, 12 aa, Severe acute respiratory syndrome coronavirus 2
  REGION 1..12: note = Table B: HLA-DRB1*04:03L HLA-DRB1*13:03L HLA-DRB1*04:02L HLA-DRB1*04:05L HLA-DRB1*01:02L HLA-DRB4*03:01NL HLA-DRB1*14:01L HLA-DQA1*01-B1*05L HLA-DRB1*04:10L HLA-DRB1*12:01L HLA-DRB1*14:54L HLA-DRB1*14:17L HLA-DRB1*16:01L HLA-DRB1*04:08L
  REGION 1..12: note = CONT. FROM ABOVE: HLA-DQA1*02:01-B1*03:03L HLA-DRB1*15:03L
VELFENKTTLPV

SEQ ID NO: 13561 - protein, 10 aa, Severe acute respiratory syndrome coronavirus 2
  REGION 1..10: note = Table B: HLA-DRB1*04:03L HLA-DQA1*03:01-B1*03:02L HLA-DQA1*01:03-B1*06:01L HLA-DQA1*02:01-B1*03:03L
TTLPVNVAFE

SEQ ID NO: 13562 - protein, 12 aa, Severe acute respiratory syndrome coronavirus 2
  REGION 1..12: note = Table B: HLA-DRB1*04:03L HLA-DRB1*13:02L HLA-DRB1*13:03L HLA-DRB1*04:04L HLA-DQA1*01:02-B1*06:02L HLA-DPA1*01:03-B1*03:01L HLA-DRB1*14:01L HLA-DRB1*11:04L HLA-DRB1*11:01L HLA-DRB3*01:01L HLA-DRB1*07:01L HLA-DRB1*04:08L
  REGION 1..12: note = CONT. FROM ABOVE: HLA-DRB1*15:03L
LWAKRNIKPVPE

SEQ ID NO: 13563 - protein, 13 aa, Severe acute respiratory syndrome coronavirus 2
  REGION 1..13: note = Table B: HLA-DRB1*04:03L HLA-DRB1*04:05L
KRNIKPVPEVKIL

SEQ ID NO: 13564 - protein, 13 aa, Severe acute respiratory syndrome coronavirus 2
  REGION 1..13: note = Table B: HLA-DRB1*04:03L HLA-DRB1*04:05L HLA-DQA1*01:02-B1*06:02L
RNIKPVPEVKILN

SEQ ID NO: 13565 - protein, 10 aa, Severe acute respiratory syndrome coronavirus 2
  REGION 1..10: note = Table B: HLA-DRB1*04:03L HLA-DQA1*03:01-B1*03:02L HLA-DQA1*02:01-B1*03:03L
PVPEVKILNN

SEQ ID NO: 13566 - protein, 11 aa, Severe acute respiratory syndrome coronavirus 2
  REGION 1..11: note = Table B: HLA-DRB1*04:03L HLA-DRB1*04:02L HLA-DRB1*04:10L HLA-DRB1*14:17L
VPEVKILNNLG

SEQ ID NO: 13567 - protein, 10 aa, Severe acute respiratory syndrome coronavirus 2
  REGION 1..10: note = Table B: HLA-DRB1*04:03L HLA-DRB1*04:02L HLA-DRB1*04:04L HLA-DRB1*04:05L HLA-DRB1*01:02L HLA-DRB4*03:01NL HLA-DRB1*14:01L HLA-DQA1*01-B1*05L HLA-DRB1*04:10L HLA-DRB1*12:01L HLA-DQA1*03:01-B1*03:02L HLA-DRB1*14:54L HLA-DRB1*14:17L
  REGION 1..10: note = CONT. FROM ABOVE: HLA-DRB1*16:01L HLA-DQA1*02:01-B1*03:03L HLA-D RB1*15:03L
VKILNNLGVD

SEQ ID NO: 13568 - protein, 11 aa, Severe acute respiratory syndrome coronavirus 2
  REGION 1..11: note = Table B: HLA-DRB1*04:03L
ILNNLGVDIAA

SEQ ID NO: 13569 - protein, 11 aa, Severe acute respiratory syndrome coronavirus 2
  REGION 1..11: note = Table B: HLA-DRB1*04:03L HLA-DRB1*14:17L
LNNLGVDIAAN

SEQ ID NO: 13570 - protein, 11 aa, Severe acute respiratory syndrome coronavirus 2
  REGION 1..11: note = Table B: HLA-DRB1*04:03L
VDIAANTVIWD

SEQ ID NO: 13571 - protein, 13 aa, Severe acute respiratory syndrome coronavirus 2
  REGION 1..13: note = Table B: HLA-DRB1*04:03L HLA-DRB1*01:03L HLA-DRB1*04:02L HLA-DQA1*01:02-B1*06:02L HLA-DRB1*08:01L HLA-DRB1*12:01L HLA-DRB1*14:54L HLA-DRB1*14:17L HLA-DRB1*04:08L HLA-DRB1*15:03L
ANTVIWDYKRDAP

SEQ ID NO: 13572 - protein, 11 aa, Severe acute respiratory syndrome coronavirus 2
  REGION 1..11: note = Table B: HLA-DRB1*04:03L HLA-DRB1*13:03L HLA-DRB1*01:03L HLA-DRB1*04:02L HLA-DRB1*14:01L HLA-DRB1*14:17L HLA-DRB1*16:01L
VIWDYKRDAPA

SEQ ID NO: 13573 - protein, 11 aa, Severe acute respiratory syndrome coronavirus 2
  REGION 1..11: note = Table B: HLA-DRB1*04:03L HLA-DRB1*13:03L HLA-DRB1*01:03L HLA-DRB1*04:02L HLA-DRB1*01:02L HLA-DRB4*03:01NL HLA-DRB1*08:04L HLA-DRB1*08:77L HLA-DRB3*02:01L HLA-DPA1*01:03-B1*03:01L HLA-DRB1*03:01L HLA-DRB1*11:03L HLA-DRB1*11:04L HLA-DRB1*14:02L
  REGION 1..11: note = CONT. FROM ABOVE: HLA-DQA1*05:01-B1*02:01L HLA-DRB1*12:01L HLA-D RB3*01:01L HLA-DQA1*03:01-B1*03:02L HLA-DRB1*14:54L HLA-DRB1*14: 17L HLA-DPA1*01:02-B1*04:01L HLA-DRB1*04:08L HLA-DQA1*02:01-B1*0 3:03L HLA-DRB1*15:03L
DYKRDAPAHIS

SEQ ID NO: 13574 - protein, 13 aa, Severe acute respiratory syndrome coronavirus 2
  REGION 1..13: note = Table B: HLA-DRB1*04:03L
DAPAHISTIGVCS

SEQ ID NO: 13575 - protein, 14 aa, Severe acute respiratory syndrome coronavirus 2
  REGION 1..14: note = Table B: HLA-DRB1*04:03L HLA-DRB1*13:02L HLA-DQA1*05:05-B1*03:19L HLA-DPA1*01:03-B1*04:02L HLA-DPA1*01:03-B1*104:01L HLA-DQA1*05:05-B1*03:01L
APAHISTIGVCSMT

SEQ ID NO: 13576 - protein, 10 aa, Severe acute respiratory syndrome coronavirus 2
  REGION 1..10: note = Table B: HLA-DRB1*04:03L HLA-DRB1*04:02L HLA-DQA1*03:01-B1*03:02L HLA-DQA1*02:01-B1*03:03L
MTDIAKKPTE

SEQ ID NO: 13577 - protein, 11 aa, Severe acute respiratory syndrome coronavirus 2
  REGION 1..11: note = Table B: HLA-DRB1*04:03L HLA-DRB1*04:02L HLA-DQA1*01-B1*05L HLA-DRB1*14:17L
GQVDLFRNARN

SEQ ID NO: 13578 - protein, 10 aa, Severe acute respiratory syndrome coronavirus 2
  REGION 1..10: note = Table B: HLA-DRB1*04:03L HLA-DRB1*04:02L HLA-DQA1*03:01-B1*03:02L HLA-DRB1*14:17L HLA-DQA1*02:01-B1*03:03L
GVLITEGSVK

SEQ ID NO: 13579 - protein, 10 aa, Severe acute respiratory syndrome coronavirus 2
  REGION 1..10: note = Table B: HLA-DRB1*04:03L HLA-DRB1*13:03L HLA-DRB1*01:03L HLA-DRB1*04:02L HLA-DRB1*04:05L HLA-DRB4*03:01NL HLA-DRB1*04:10L HLA-DRB1*12:01L HLA-DQA1*03:01-B1*03:02L HLA-DRB1*14:54L HLA-DRB1*14:17L HLA-DRB1*16:01L HLA-DQA1*02:01-B1*03:03L
VLITEGSVKG

SEQ ID NO: 13580 - protein, 11 aa, Severe acute respiratory syndrome coronavirus 2
  REGION 1..11: note = Table B: HLA-DRB1*04:03L HLA-DRB1*14:17L
LITEGSVKGLQ

SEQ ID NO: 13581 - protein, 11 aa, Severe acute respiratory syndrome coronavirus 2
  REGION 1..11: note = Table B: HLA-DRB1*04:03L HLA-DQA1*03:01-B1*03:02L HLA-DRB1*14:17L HLA-DQA1*02:01-B1*03:03L
VKGLQPSVGPK

SEQ ID NO: 13582 - protein, 10 aa, Severe acute respiratory syndrome coronavirus 2
  REGION 1..10: note = Table B: HLA-DRB1*04:03L HLA-DRB1*04:02L HLA-DQA1*03:01-B1*03:02L HLA-DRB1*14:17L
LQPSVGPKQA

SEQ ID NO: 13583 - protein, 13 aa, Severe acute respiratory syndrome coronavirus 2
  REGION 1..13: note = Table B: HLA-DRB1*04:03L HLA-DQA1*05:05-B1*03:01L HLA-DQA1*02:01-B1*03:03L
QPSVGPKQASLNG

SEQ ID NO: 13584 - protein, 10 aa, Severe acute respiratory syndrome coronavirus 2
  REGION 1..10: note = Table B: HLA-DRB1*04:03L HLA-DQA1*03:01-B1*03:02L HLA-DQA1*01:03-B1*06:01L HLA-DQA1*02:01-B1*03:03L
GVTLIGEAVK

SEQ ID NO: 13585 - protein, 10 aa, Severe acute respiratory syndrome coronavirus 2
  REGION 1..10: note = Table B: HLA-DRB1*04:03L HLA-DQA1*03:01-B1*03:02L HLA-DRB1*14:17L HLA-DQA1*02:01-B1*03:03L
VTLIGEAVKT

SEQ ID NO: 13586 - protein, 10 aa, Severe acute respiratory syndrome coronavirus 2
  REGION 1..10: note = Table B: HLA-DRB1*04:03L HLA-DRB1*01:03L HLA-DRB1*04:02L HLA-DRB4*03:01NL HLA-DQA1*03:01-B1*03:02L HLA-DRB1*14:17L HLA-DRB1*16:01L
YKKVDGVVQQ

SEQ ID NO: 13587 - protein, 14 aa, Severe acute respiratory syndrome coronavirus 2
  REGION 1..14: note = Table B: HLA-DRB1*04:03L HLA-DQA1*01:02-B1*06:02L HLA-DRB1*01:02L HLA-DPA1*03:01-B1*105:01L HLA-DRB1*16:01L HLA-DRB1*15:03L
VQQLPETYFTQSRN

SEQ ID NO: 13588 - protein, 10 aa, Severe acute respiratory syndrome coronavirus 2
  REGION 1..10: note = Table B: HLA-DRB1*04:03L HLA-DRB1*13:03L HLA-DRB1*04:02L HLA-DRB1*14:17L HLA-DRB1*16:01L HLA-DRB1*04:08L
YFTQSRNLQE

SEQ ID NO: 13589 - protein, 12 aa, Severe acute respiratory syndrome coronavirus 2
  REGION 1..12: note = Table B: HLA-DRB1*04:03L HLA-DRB1*04:08L
FTQSRNLQEFKP

SEQ ID NO: 13590 - protein, 10 aa, Severe acute respiratory syndrome coronavirus 2
  REGION 1..10: note = Table B: HLA-DRB1*04:03L HLA-DRB1*01:03L HLA-DQA1*03:01-B1*03:02L HLA-DRB1*14:17L HLA-DQA1*02:01-B1*03:03L
NLQEFKPRSQ

SEQ ID NO: 13591 - protein, 17 aa, Severe acute respiratory syndrome coronavirus 2
  REGION 1..17: note = Table B: HLA-DRB1*04:03L HLA-DRB1*01:03L HLA-DRB1*08:04L HLA-DPA1*01:03-B1*03:01L HLA-DPA1*01:03-B1*04:01L HLA-DPA1*01:03-B1*02:01L HLA-DRB1*04:08L
KPRSQMEIDFLELAMDE

SEQ ID NO: 13592 - protein, 14 aa, Severe acute respiratory syndrome coronavirus 2
  REGION 1..14: note = Table B: HLA-DRB1*04:03L HLA-DRB1*04:05L HLA-DRB1*01:02L HLA-DPA1*03:01-B1*04:02L HLA-DQA1*05:01-B1*02:01L
IDFLELAMDEFIER

SEQ ID NO: 13593 - protein, 15 aa, Severe acute respiratory syndrome coronavirus 2
  REGION 1..15: note = Table B: HLA-DRB1*04:03L HLA-DRB1*04:04L HLA-DRB1*14:01L HLA-DRB1*11:04L HLA-DRB3*01:01L
RYKLEGYAFEHIVYG

SEQ ID NO: 13594 - protein, 13 aa, Severe acute respiratory syndrome coronavirus 2
  REGION 1..13: note = Table B: HLA-DRB1*04:03L HLA-DRB1*08:04L HLA-DRB1*08:01L HLA-DPA1*01:03-B1*02:01L
GYAFEHIVYGDFS

SEQ ID NO: 13595 - protein, 11 aa, Severe acute respiratory syndrome coronavirus 2
  REGION 1..11: note = Table B: HLA-DRB1*04:03L HLA-DQA1*03:01-B1*03:02L
KNYFITDAQTG

SEQ ID NO: 13596 - protein, 10 aa, Severe acute respiratory syndrome coronavirus 2
  REGION 1..10: note = Table B: HLA-DRB1*04:03L HLA-DRB1*13:03L HLA-DQA1*05:01-B1*02:01L HLA-DRB1*14:17L
FITDAQTGSS

SEQ ID NO: 13597 - protein, 10 aa, Severe acute respiratory syndrome coronavirus 2
  REGION 1..10: note = Table B: HLA-DRB1*04:03L HLA-DPA1*03:01-B1*04:02L HLA-DQA1*01-B1*05L HLA-DQA1*05:01-B1*02:01L HLA-DPA1*01:03-B1*04:01L HLA-DPA1*01:03-B1*04:02L HLA-DPA1*03:01-B1*105:01L HLA-DQA1*03:01-B1*03:02L
  REGION 1..10: note = CONT. FROM ABOVE: HLA-DPA1*01:02-B1*04:01L HLA-DRB1*16:01L HLA-D QA1*01:03-B1*06:01L HLA-DQA1*02:01-B1*03:03L
LLDDFVEIIK

SEQ ID NO: 13598 - protein, 11 aa, Severe acute respiratory syndrome coronavirus 2
  REGION 1..11: note = Table B: HLA-DRB1*04:03L HLA-DRB1*13:03L HLA-DRB1*01:03L HLA-DRB1*04:02L HLA-DRB1*04:05L HLA-DRB4*03:01NL HLA-DRB1*08:04L HLA-DRB1*14:01L HLA-DQA1*01:01-B1*05:01L HLA-DRB1*08:01L HLA-DQA1*05:05-B1*03:19L HLA-DPA1*01:03-B1*04:02L
  REGION 1..11: note = CONT. FROM ABOVE: HLA-DRB1*14:54L HLA-DQA1*05:05-B1*03:01L HLA-D RB1*14:17L HLA-DRB1*16:01L HLA-DRB1*04:08L
DDFVEIIKSQD

SEQ ID NO: 13599 - protein, 10 aa, Severe acute respiratory syndrome coronavirus 2
  REGION 1..10: note = Table B: HLA-DRB1*04:03L HLA-DQA1*01-B1*05L HLA-DQA1*05:01-B1*02:01L HLA-DQA1*03:01-B1*03:02L HLA-DRB1*16:01L HLA-DRB1*15:03L
IIKSQDLSVV

SEQ ID NO: 13600 - protein, 12 aa, Severe acute respiratory syndrome coronavirus 2
  REGION 1..12: note = Table B: HLA-DRB1*04:03L HLA-DRB1*04:02L HLA-DRB1*04:05L HLA-DQA1*01:02-B1*06:02L HLA-DQA1*01-B1*05L HLA-DRB1*04:10L HLA-DRB1*12:01L HLA-DQA1*03:01-B1*03:02L HLA-DRB1*14:17L HLA-DRB1*15:03L
SKVVKVTIDYTE

SEQ ID NO: 13601 - protein, 11 aa, Severe acute respiratory syndrome coronavirus 2
  REGION 1..11: note = Table B: HLA-DRB1*04:03L HLA-DQA1*01-B1*05L HLA-DQA1*05:01-B1*02:01L HLA-DQA1*03:01-B1*03:02L
VKVTIDYTEIS

SEQ ID NO: 13602 - protein, 13 aa, Severe acute respiratory syndrome coronavirus 2
  REGION 1..13: note = Table B: HLA-DRB1*04:03L HLA-DRB1*04:02L HLA-DRB1*04:05L HLA-DRB1*14:17L HLA-DRB1*15:03L
DGHVETFYPKLQS

SEQ ID NO: 13603 - protein, 10 aa, Severe acute respiratory syndrome coronavirus 2
  REGION 1..10: note = Table B: HLA-DRB1*04:03L HLA-DRB1*13:03L HLA-DRB1*04:02L HLA-DRB1*14:01L HLA-DQA1*03:01-B1*03:02L HLA-DRB1*14:17L HLA-DPA1*01:02-B1*04:01L HLA-DQA1*02:01-B1*03:03L
TFYPKLQSSQ

SEQ ID NO: 13604 - protein, 11 aa, Severe acute respiratory syndrome coronavirus 2
  REGION 1..11: note = Table B: HLA-DRB1*04:03L HLA-DRB1*01:03L HLA-DRB1*04:05L HLA-DRB1*08:77L HLA-DQA1*05:05-B1*03:19L HLA-DPA1*01:03-B1*04:01L HLA-DRB1*16:01L HLA-DQA1*01:03-B1*06:01L
FYPKLQSSQAW

SEQ ID NO: 13605 - protein, 12 aa, Severe acute respiratory syndrome coronavirus 2
  REGION 1..12: note = Table B: HLA-DRB1*04:03L HLA-DRB1*04:02L HLA-DQA1*01:02-B1*06:02L HLA-DQA1*05:01-B1*02:01L HLA-DQA1*01:03-B1*06:01L HLA-DQA1*02:01-B1*03:03L
SQAWQPGVAMPN

SEQ ID NO: 13606 - protein, 11 aa, Severe acute respiratory syndrome coronavirus 2
  REGION 1..11: note = Table B: HLA-DRB1*04:03L HLA-DRB1*01:02L HLA-DPA1*01:03-B1*03:01L HLA-DRB1*14:02L HLA-DQA1*05:05-B1*03:116L HLA-DPA1*01:03-B1*04:02L HLA-DRB1*12:01L HLA-DPA1*02:01-B1*13:01L HLA-DRB1*16:01L
  REGION 1..11: note = CONT. FROM ABOVE: HLA-DRB1*15:03L
AWQPGVAMPNL

SEQ ID NO: 13607 - protein, 10 aa, Severe acute respiratory syndrome coronavirus 2
  REGION 1..10: note = Table B: HLA-DRB1*04:03L HLA-DRB1*13:02L HLA-DRB1*13:03L HLA-DRB1*01:03L HLA-DRB1*04:02L HLA-DRB4*03:01NL HLA-DQA1*01-B1*05L HLA-DRB1*12:01L HLA-DQA1*03:01-B1*03:02L HLA-DQA1*05:05-B1*03:01L HLA-DRB1*14:17L HLA-DRB1*16:01L
  REGION 1..10: note = CONT. FROM ABOVE: HLA-DQA1*02:01-B1*03:03L
NYGDSATLPK

SEQ ID NO: 13608 - protein, 10 aa, Severe acute respiratory syndrome coronavirus 2
  REGION 1..10: note = Table B: HLA-DRB1*04:03L HLA-DRB1*13:02L HLA-DRB1*04:02L HLA-DRB1*01:02L HLA-DRB1*14:01L HLA-DRB1*12:01L HLA-DQA1*03:01-B1*03:02L HLA-DRB1*14:54L HLA-DRB1*14:17L HLA-DRB1*16:01L HLA-DQA1*02:01-B1*03:03L HLA-DRB1*15:03L
IMMNVAKYTQ

SEQ ID NO: 13609 - protein, 13 aa, Severe acute respiratory syndrome coronavirus 2
  REGION 1..13: note = Table B: HLA-DRB1*04:03L HLA-DRB1*01:03L HLA-DRB1*04:05L HLA-DRB1*01:02L HLA-DRB1*08:04L HLA-DPA1*01:03-B1*03:01L HLA-DRB1*08:01L HLA-DPA1*01:03-B1*04:02L HLA-DRB1*12:01L HLA-DPA1*02:01-B1*13:01L HLA-DQA1*03:01-B1*03:02L
  REGION 1..13: note = CONT. FROM ABOVE: HLA-DPA1*01:03-B1*104:01L HLA-DQA1*05:05-B1*03 :01L HLA-DRB1*10:01L HLA-DRB1*16:01L HLA-DRB1*04:08L HLA-DQA1*02 :01-B1*03:03L HLA-DRB1*15:03L
VAKYTQLCQYLNT

SEQ ID NO: 13610 - protein, 12 aa, Severe acute respiratory syndrome coronavirus 2
  REGION 1..12: note = Table B: HLA-DRB1*04:03L HLA-DQA1*05:01-B1*02:01L HLA-DRB1*12:01L HLA-DRB1*15:03L
LNTLTLAVPYNM

SEQ ID NO: 13611 - protein, 10 aa, Severe acute respiratory syndrome coronavirus 2
  REGION 1..10: note = Table B: HLA-DRB1*04:03L HLA-DRB1*04:02L HLA-DQA1*03:01-B1*03:02L HLA-DRB1*14:17L HLA-DQA1*02:01-B1*03:03L
VIHFGAGSDK

SEQ ID NO: 13612 - protein, 12 aa, Severe acute respiratory syndrome coronavirus 2
  REGION 1..12: note = Table B: HLA-DRB1*04:03L HLA-DRB1*13:03L HLA-DRB1*04:02L HLA-DRB1*01:02L HLA-DRB4*03:01NL HLA-DRB1*08:04L HLA-DRB1*08:77L HLA-DRB3*02:01L HLA-DPA1*01:03-B1*03:01L HLA-DRB1*11:03L HLA-DRB1*11:04L HLA-DRB1*12:01L HLA-DRB1*12:02L HLA-DRB1*14:54L
  REGION 1..12: note = CONT. FROM ABOVE: HLA-DQA1*05:05-B1*03:01L HLA-DRB1*14:17L HLA-D RB1*07:01L HLA-DRB1*04:08L
RQWLPTGTLLVD

SEQ ID NO: 13613 - protein, 11 aa, Severe acute respiratory syndrome coronavirus 2
  REGION 1..11: note = Table B: HLA-DRB1*04:03L HLA-DRB1*14:17L
GTLLVDSDLND

SEQ ID NO: 13614 - protein, 13 aa, Severe acute respiratory syndrome coronavirus 2
  REGION 1..13: note = Table B: HLA-DRB1*04:03L
SDLNDFVSDADST

SEQ ID NO: 13615 - protein, 13 aa, Severe acute respiratory syndrome coronavirus 2
  REGION 1..13: note = Table B: HLA-DRB1*04:03L HLA-DQA1*05:05-B1*03:19L HLA-DQA1*05:01-B1*02:01L HLA-DPA1*03:01-B1*105:01L
ADSTLIGDCATVH

SEQ ID NO: 13616 - protein, 12 aa, Severe acute respiratory syndrome coronavirus 2
  REGION 1..12: note = Table B: HLA-DRB1*04:03L HLA-DQA1*01:02-B1*06:02L HLA-DQA1*03:01-B1*03:02L HLA-DQA1*02:01-B1*03:03L
STLIGDCATVHT

SEQ ID NO: 13617 - protein, 10 aa, Severe acute respiratory syndrome coronavirus 2
  REGION 1..10: note = Table B: HLA-DRB1*04:03L HLA-DRB1*04:02L HLA-DRB1*04:05L HLA-DRB4*03:01NL HLA-DQA1*01-B1*05L HLA-DRB1*04:10L HLA-DQA1*03:01-B1*03:02L HLA-DRB1*14:54L HLA-DRB1*14:17L HLA-DQA1*02:01-B1*03:03L
LIISDMYDPK

SEQ ID NO: 13618 - protein, 10 aa, Severe acute respiratory syndrome coronavirus 2
  REGION 1..10: note = Table B: HLA-DRB1*04:03L HLA-DRB1*04:02L HLA-DRB1*04:05L HLA-DQA1*01-B1*05L HLA-DQA1*05:01-B1*02:01L HLA-DQA1*03:01-B1*03:02L HLA-DRB1*14:17L HLA-DRB1*16:01L
IISDMYDPKT

SEQ ID NO: 13619 - protein, 10 aa, Severe acute respiratory syndrome coronavirus 2
  REGION 1..10: note = Table B: HLA-DRB1*04:03L HLA-DRB1*04:02L HLA-DQA1*01-B1*05L HLA-DQA1*03:01-B1*03:02L HLA-DRB1*14:17L
ISDMYDPKTK

SEQ ID NO: 13620 - protein, 10 aa, Severe acute respiratory syndrome coronavirus 2
  REGION 1..10: note = Table B: HLA-DRB1*04:03L HLA-DQA1*03:01-B1*03:02L
VTKENDSKEG

SEQ ID NO: 13621 - protein, 10 aa, Severe acute respiratory syndrome coronavirus 2
  REGION 1..10: note = Table B: HLA-DRB1*04:03L
IQQKLALGGS

SEQ ID NO: 13622 - protein, 11 aa, Severe acute respiratory syndrome coronavirus 2
  REGION 1..11: note = Table B: HLA-DRB1*04:03L HLA-DRB1*04:02L HLA-DQA1*01:02-B1*06:02L HLA-DRB1*14:17L
GSVAIKITEHS

SEQ ID NO: 13623 - protein, 11 aa, Severe acute respiratory syndrome coronavirus 2
  REGION 1..11: note = Table B: HLA-DRB1*04:03L HLA-DRB1*04:02L HLA-DRB1*04:05L HLA-DRB1*14:01L HLA-DRB1*12:01L HLA-DQA1*03:01-B1*03:02L HLA-DRB1*14:54L HLA-DRB1*14:17L HLA-DRB1*16:01L
VAIKITEHSWN

SEQ ID NO: 13624 - protein, 10 aa, Severe acute respiratory syndrome coronavirus 2
  REGION 1..10: note = Table B: HLA-DRB1*04:03L HLA-DQA1*01-B1*05L HLA-DQA1*05:01-B1*02:01L HLA-DQA1*03:01-B1*03:02L HLA-DRB1*16:01L HLA-DQA1*02:01-B1*03:03L
EHSWNADLYK

SEQ ID NO: 13625 - protein, 10 aa, Severe acute respiratory syndrome coronavirus 2
  REGION 1..10: note = Table B: HLA-DRB1*04:03L HLA-DRB1*01:03L HLA-DRB1*04:05L HLA-DQA1*01:02-B1*06:02L HLA-DRB1*01:01L HLA-DPA1*02:01-B1*13:01L HLA-DRB1*16:01L HLA-DQA1*01:03-B1*06:01L
LYKLMGHFAW

SEQ ID NO: 13626 - protein, 13 aa, Severe acute respiratory syndrome coronavirus 2
  REGION 1..13: note = Table B: HLA-DRB1*04:03L HLA-DRB1*13:02L HLA-DRB1*01:03L HLA-DRB3*02:01L HLA-DRB1*08:01L HLA-DQA1*03:01-B1*03:02L HLA-DPA1*01:03-B1*104:01L
HFAWWTAFVTNVN

SEQ ID NO: 13627 - protein, 11 aa, Severe acute respiratory syndrome coronavirus 2
  REGION 1..11: note = Table B: HLA-DRB1*04:03L
WTAFVTNVNAS

SEQ ID NO: 13628 - protein, 11 aa, Severe acute respiratory syndrome coronavirus 2
  REGION 1..11: note = Table B: HLA-DRB1*04:03L HLA-DRB1*13:03L HLA-DRB1*04:02L HLA-DRB4*03:01NL HLA-DRB1*14:54L HLA-DRB1*14:17L HLA-DRB1*16:01L
TAFVTNVNASS

SEQ ID NO: 13629 - protein, 10 aa, Severe acute respiratory syndrome coronavirus 2
  REGION 1..10: note = Table B: HLA-DRB1*04:03L HLA-DRB1*14:54L HLA-DRB1*14:17L
FVTNVNASSS

SEQ ID NO: 13630 - protein, 10 aa, Severe acute respiratory syndrome coronavirus 2
  REGION 1..10: note = Table B: HLA-DRB1*04:03L HLA-DRB1*14:17L
VTNVNASSSE

SEQ ID NO: 13631 - protein, 11 aa, Severe acute respiratory syndrome coronavirus 2
  REGION 1..11: note = Table B: HLA-DRB1*04:03L HLA-DRB3*02:01L HLA-DQA1*01-B1*05L HLA-DRB1*12:01L HLA-DQA1*05:05-B1*03:01L HLA-DRB1*07:01L HLA-DRB1*16:01L
NVNASSSEAFL

SEQ ID NO: 13632 - protein, 13 aa, Severe acute respiratory syndrome coronavirus 2
  REGION 1..13: note = Table B: HLA-DRB1*04:03L HLA-DQA1*01:02-B1*06:02L HLA-DRB1*01:02L HLA-DPA1*03:01-B1*04:02L HLA-DPA1*01:03-B1*04:02L HLA-DPA1*01:02-B1*04:01L HLA-DRB1*16:01L HLA-DRB1*04:08L HLA-DRB1*15:03L
EAFLIGCNYLGKP

SEQ ID NO: 13633 - protein, 11 aa, Severe acute respiratory syndrome coronavirus 2
  REGION 1..11: note = Table B: HLA-DRB1*04:03L HLA-DRB1*04:02L HLA-DQA1*01:02-B1*06:02L HLA-DQA1*01-B1*05L HLA-DQA1*05:01-B1*02:01L HLA-DRB1*14:17L HLA-DQA1*01:03-B1*06:01L HLA-DQA1*02:01-B1*03:03L
EQIDGYVMHAN

SEQ ID NO: 13634 - protein, 10 aa, Severe acute respiratory syndrome coronavirus 2
  REGION 1..10: note = Table B: HLA-DRB1*04:03L HLA-DRB1*01:03L HLA-DRB1*04:05L HLA-DQA1*01:02-B1*06:02L HLA-DRB1*01:01L HLA-DRB1*01:02L HLA-DQA1*01:01-B1*05:01L HLA-DPA1*02:01-B1*13:01M HLA-DRB1*16:01L HLA-DQA1*01:03-B1*06:01M
  REGION 1..10: note = CONT. FROM ABOVE: HLA-DQA1*02:01-B1*03:03L HLA-DRB1*15:03L
GYVMHANYIF

SEQ ID NO: 13635 - protein, 10 aa, Severe acute respiratory syndrome coronavirus 2
  REGION 1..10: note = Table B: HLA-DRB1*04:03L HLA-DRB1*01:03L HLA-DRB1*04:05L HLA-DQA1*01:02-B1*06:02L HLA-DRB1*01:01L HLA-DRB1*01:02L HLA-DRB1*08:77L HLA-DPA1*03:01-B1*04:02L HLA-DRB1*14:02L HLA-DQA1*01:01-B1*05:01L HLA-DQA1*05:05-B1*03:19L
  REGION 1..10: note = CONT. FROM ABOVE: HLA-DQA1*05:01-B1*02:01L HLA-DRB4*01:01L HLA-D PA1*01:03-B1*04:01L HLA-DQA1*05:05-B1*03:116L HLA-DPA1*01:03-B1* 04:02L HLA-DRB1*12:01L HLA-DPA1*02:01-B1*13:01M HLA-DPA1*03:01-B 1*105:01L HLA-DRB1*16:01L HLA-DQA1*01:03-B1*06:01M
  REGION 1..10: note = CONT. FROM ABOVE: HLA-DQA1*02:01-B1*03:03L HLA-DRB1*15:03L
YVMHANYIFW

SEQ ID NO: 13636 - protein, 12 aa, Severe acute respiratory syndrome coronavirus 2
  REGION 1..12: note = Table B: HLA-DRB1*04:03L HLA-DRB1*04:02L HLA-DPA1*03:01-B1*04:02L HLA-DQA1*01-B1*05L HLA-DPA1*03:01-B1*105:01L HLA-DQA1*03:01-B1*03:02L HLA-DPA1*01:02-B1*04:01L HLA-DRB1*16:01L
  REGION 1..12: note = CONT. FROM ABOVE: HLA-DQA1*02:01-B1*03:03L HLA-DRB1*15:03L
ANYIFWRNTNPI

SEQ ID NO: 13637 - protein, 11 aa, Severe acute respiratory syndrome coronavirus 2
  REGION 1..11: note = Table B: HLA-DRB1*04:03L
WRNTNPIQLSS

SEQ ID NO: 13638 - protein, 12 aa, Severe acute respiratory syndrome coronavirus 2
  REGION 1..12: note = Table B: HLA-DRB1*04:03L HLA-DRB1*01:02L HLA-DRB1*14:01L HLA-DQA1*05:05-B1*03:01L HLA-DRB1*16:01L
NPIQLSSYSLFD

SEQ ID NO: 13639 - protein, 10 aa, Severe acute respiratory syndrome coronavirus 2
  REGION 1..10: note = Table B: HLA-DRB1*04:03L HLA-DRB1*04:05L HLA-DRB1*01:01L HLA-DPA1*02:01-B1*13:01M HLA-DQA1*01:03-B1*06:01M
SYSLFDMSKF

SEQ ID NO: 13640 - protein, 10 aa, Severe acute respiratory syndrome coronavirus 2
  REGION 1..10: note = Table B: HLA-DRB1*04:03L HLA-DRB1*01:03L HLA-DRB1*04:02L HLA-DRB1*14:01L HLA-DQA1*03:01-B1*03:02L HLA-DRB1*14:17L HLA-DPA1*01:02-B1*04:01L HLA-DRB1*16:01L HLA-DQA1*02:01-B1*03:03L
LFDMSKFPLK

SEQ ID NO: 13641 - protein, 15 aa, Severe acute respiratory syndrome coronavirus 2
  REGION 1..15: note = Table B: HLA-DRB1*04:03L HLA-DQA1*05:05-B1*03:19L
FPLKLRGTAVMSLKE

SEQ ID NO: 13642 - protein, 14 aa, Severe acute respiratory syndrome coronavirus 2
  REGION 1..14: note = Table B: HLA-DRB1*04:03L
EGQINDMILSLLSK

SEQ ID NO: 13643 - protein, 10 aa, Severe acute respiratory syndrome coronavirus 2
  REGION 1..10: note = Table B: HLA-DRB1*04:03L HLA-DRB1*14:17L
DMILSLLSKG

SEQ ID NO: 13644 - protein, 12 aa, Severe acute respiratory syndrome coronavirus 2
  REGION 1..12: note = Table B: HLA-DRB1*04:03L HLA-DRB1*01:03L HLA-DRB1*04:02L HLA-DRB1*04:05L HLA-DRB1*01:02L HLA-DRB1*14:01L HLA-DRB1*08:01L HLA-DRB1*12:01L HLA-DPA1*01:02-B1*04:01L HLA-DRB1*16:01L HLA-DRB1*04:08L HLA-DRB1*15:03L
GRLIIRENNRVV

SEQ ID NO: 13645 - protein, 11 aa, Severe acute respiratory syndrome coronavirus 2
  REGION 1..11: note = Table B: HLA-DRB1*04:03L HLA-DRB1*13:02L HLA-DRB1*13:03L HLA-DRB1*01:03L HLA-DRB1*04:02L HLA-DRB1*01:02L HLA-DRB1*08:04L HLA-DRB1*11:04L HLA-DRB1*12:01L HLA-DRB1*12:02L HLA-DRB3*01:01L HLA-DRB1*14:54L HLA-DRB1*14:17L HLA-DPA1*01:02-B1*04:01L
  REGION 1..11: note = CONT. FROM ABOVE: HLA-DRB1*04:08L HLA-DRB1*15:03L
IIRENNRVVIS

SEQ ID NO: 13646 - protein, 10 aa, Severe acute respiratory syndrome coronavirus 2
  REGION 1..10: note = Table B: HLA-DRB1*04:03L HLA-DRB1*14:17L
VVISSDVLVN

SEQ ID NO: 13647 - protein, 10 aa, Severe acute respiratory syndrome coronavirus 2
  REGION 1..10: note = Table B: HLA-DRB1*04:03L HLA-DRB1*14:17L
LVLLPLVSSQ

SEQ ID NO: 13648 - protein, 12 aa, Severe acute respiratory syndrome coronavirus 2
  REGION 1..12: note = Table B: HLA-DRB1*04:03L HLA-DRB1*01:03L HLA-DQA1*01:02-B1*06:02L HLA-DRB1*01:01L HLA-DQA1*05:05-B1*03:19L HLA-DRB1*12:01L HLA-DPA1*03:01-B1*105:01L HLA-DQA1*05:05-B1*03:01L
  REGION 1..12: note = CONT. FROM ABOVE: HLA-DRB1*10:01L HLA-DRB1*16:01L HLA-DRB1*04:08 L HLA-DRB1*15:03L
VLLPLVSSQCVN

SEQ ID NO: 13649 - protein, 11 aa, Severe acute respiratory syndrome coronavirus 2
  REGION 1..11: note = Table B: HLA-DRB1*04:03L HLA-DRB1*04:02L HLA-DRB1*14:01L HLA-DRB1*14:54L HLA-DRB1*14:17L
VNLTTRTQLPP

SEQ ID NO: 13650 - protein, 13 aa, Severe acute respiratory syndrome coronavirus 2
  REGION 1..13: note = Table B: HLA-DRB1*04:03L HLA-DRB1*04:02L
YTNSFTRGVYYPD

SEQ ID NO: 13651 - protein, 11 aa, Severe acute respiratory syndrome coronavirus 2
  REGION 1..11: note = Table B: HLA-DRB1*04:03L HLA-DRB1*13:03L HLA-DRB1*04:05L HLA-DRB1*01:02L HLA-DRB1*08:01L HLA-DQA1*01-B1*05L HLA-DRB1*12:01L HLA-DPA1*03:01-B1*105:01L HLA-DRB1*14:17L HLA-DRB1*04:08L HLA-DRB1*15:03L
SFTRGVYYPDK

SEQ ID NO: 13652 - protein, 11 aa, Severe acute respiratory syndrome coronavirus 2
  REGION 1..11: note = Table B: HLA-DRB1*04:03L HLA-DRB1*01:03L HLA-DRB1*04:05L HLA-DRB1*01:02L HLA-DRB1*14:54L HLA-DPA1*01:02-B1*04:01L HLA-DRB1*04:08L HLA-DRB1*15:03L
GVYYPDKVFRS

SEQ ID NO: 13653 - protein, 11 aa, Severe acute respiratory syndrome coronavirus 2
  REGION 1..11: note = Table B: HLA-DRB1*04:03L HLA-DRB1*13:03L HLA-DRB1*01:03L HLA-DRB1*04:02L HLA-DRB1*14:01L HLA-DQA1*03:01-B1*03:02L HLA-DRB1*14:17L HLA-DPA1*01:02-B1*04:01L HLA-DRB1*16:01L HLA-DRB1*04:08L HLA-DQA1*02:01-B1*03:03L
VYYPDKVFRSS

SEQ ID NO: 13654 - protein, 14 aa, Severe acute respiratory syndrome coronavirus 2
  REGION 1..14: note = Table B: HLA-DRB1*04:03L HLA-DRB1*13:02L HLA-DRB1*01:03L HLA-DRB1*04:02L HLA-DRB1*04:05L HLA-DRB1*01:02L HLA-DPA1*01:03-B1*03:01L HLA-DPA1*03:01-B1*04:02L HLA-DRB1*14:01L HLA-DRB1*08:01L HLA-DRB1*12:01L
  REGION 1..14: note = CONT. FROM ABOVE: HLA-DQA1*01:03-B1*06:01L HLA-DRB1*04:08L HLA-D QA1*02:01-B1*03:03L HLA-DRB1*15:03L
YPDKVFRSSVLHST

SEQ ID NO: 13655 - protein, 14 aa, Severe acute respiratory syndrome coronavirus 2
  REGION 1..14: note = Table B: HLA-DRB1*04:03L HLA-DRB1*04:05L
PDKVFRSSVLHSTQ

SEQ ID NO: 13656 - protein, 13 aa, Severe acute respiratory syndrome coronavirus 2
  REGION 1..13: note = Table B: HLA-DRB1*04:03L HLA-DRB1*13:02L HLA-DRB1*04:02L HLA-DRB1*04:05L HLA-DRB1*01:02L HLA-DRB3*02:01L HLA-DRB1*14:54L HLA-DRB1*14:17L
SSVLHSTQDLFLP

SEQ ID NO: 13657 - protein, 12 aa, Severe acute respiratory syndrome coronavirus 2
  REGION 1..12: note = Table B: HLA-DRB1*04:03L HLA-DPA1*03:01-B1*04:02L HLA-DRB1*14:01L HLA-DQA1*05:01-B1*02:01L HLA-DRB1*12:01L HLA-DPA1*03:01-B1*105:01L HLA-DPA1*01:02-B1*04:01L HLA-DRB1*16:01L HLA-DRB1*15:03L
VLHSTQDLFLPF

SEQ ID NO: 13658 - protein, 10 aa, Severe acute respiratory syndrome coronavirus 2
  REGION 1..10: note = Table B: HLA-DRB1*04:03L HLA-DRB1*01:03L HLA-DRB1*04:05L HLA-DQA1*01:02-B1*06:02L HLA-DRB1*01:01L HLA-DRB1*01:02L HLA-DRB1*08:77L HLA-DRB1*14:02L HLA-DQA1*05:05-B1*03:19L HLA-DRB4*01:01L HLA-DPA1*01:03-B1*04:01L
  REGION 1..10: note = CONT. FROM ABOVE: HLA-DQA1*05:05-B1*03:116L HLA-DPA1*02:01-B1*13 :01M HLA-DPA1*03:01-B1*105:01L HLA-DRB1*16:01L HLA-DQA1*01:03-B1 *06:01M HLA-DQA1*02:01-B1*03:03L HLA-DRB1*15:03L
FLPFFSNVTW

SEQ ID NO: 13659 - protein, 12 aa, Severe acute respiratory syndrome coronavirus 2
  REGION 1..12: note = Table B: HLA-DRB1*04:03L HLA-DPA1*03:01-B1*04:02L HLA-DRB1*14:01L HLA-DQA1*01-B1*05L HLA-DRB1*12:01L HLA-DPA1*01:02-B1*04:01L HLA-DRB1*16:01L
LPFFSNVTWFHA

SEQ ID NO: 13660 - protein, 11 aa, Severe acute respiratory syndrome coronavirus 2
  REGION 1..11: note = Table B: HLA-DRB1*04:03L HLA-DRB1*01:03L HLA-DRB1*04:02L HLA-DRB1*04:05L HLA-DRB1*01:02L HLA-DRB1*14:01L HLA-DRB1*12:01L HLA-DPA1*03:01-B1*105:01L HLA-DRB1*14:17L HLA-DPA1*01:02-B1*04:01L HLA-DQA1*01:03-B1*06:01L
  REGION 1..11: note = CONT. FROM ABOVE: HLA-DRB1*04:08L HLA-DQA1*02:01-B1*03:03L
VTWFHAIHVSG

SEQ ID NO: 13661 - protein, 11 aa, Severe acute respiratory syndrome coronavirus 2
  REGION 1..11: note = Table B: HLA-DRB1*04:03L HLA-DRB1*14:17L
FHAIHVSGTNG

SEQ ID NO: 13662 - protein, 10 aa, Severe acute respiratory syndrome coronavirus 2
  REGION 1..10: note = Table B: HLA-DRB1*04:03L HLA-DRB1*01:03L HLA-DRB1*04:02L HLA-DRB1*04:05L HLA-DRB4*03:01NL HLA-DQA1*03:01-B1*03:02L HLA-DRB1*14:17L
IHVSGTNGTK

SEQ ID NO: 13663 - protein, 10 aa, Severe acute respiratory syndrome coronavirus 2
  REGION 1..10: note = Table B: HLA-DRB1*04:03L HLA-DRB1*04:05L HLA-DQA1*01:02-B1*06:02L HLA-DRB1*01:01L HLA-DPA1*02:01-B1*13:01L HLA-DPA1*03:01-B1*105:01L HLA-DQA1*01:03-B1*06:01L HLA-DRB1*15:03L
VLPFNDGVYF

SEQ ID NO: 13664 - protein, 11 aa, Severe acute respiratory syndrome coronavirus 2
  REGION 1..11: note = Table B: HLA-DRB1*04:03L HLA-DQA1*01:02-B1*06:02L HLA-DRB1*01:02L HLA-DPA1*03:01-B1*105:01L HLA-DRB1*14:54L HLA-DPA1*01:02-B1*04:01L HLA-DRB1*04:08L
FASTEKSNIIR

SEQ ID NO: 13665 - protein, 10 aa, Severe acute respiratory syndrome coronavirus 2
  REGION 1..10: note = Table B: HLA-DRB1*04:03L HLA-DRB1*13:03L HLA-DRB1*01:03L HLA-DRB1*04:02L HLA-DRB4*03:01NL HLA-DQA1*03:01-B1*03:02L HLA-DRB1*14:17L HLA-DRB1*16:01L HLA-DQA1*02:01-B1*03:03L
STEKSNIIRG

SEQ ID NO: 13666 - protein, 10 aa, Severe acute respiratory syndrome coronavirus 2
  REGION 1..10: note = Table B: HLA-DRB1*04:03L HLA-DQA1*01-B1*05L HLA-DQA1*03:01-B1*03:02L HLA-DQA1*02:01-B1*03:03L
IFGTTLDSKT

SEQ ID NO: 13667 - protein, 10 aa, Severe acute respiratory syndrome coronavirus 2
  REGION 1..10: note = Table B: HLA-DRB1*04:03L HLA-DQA1*03:01-B1*03:02L HLA-DQA1*02:01-B1*03:03L
GTTLDSKTQS

SEQ ID NO: 13668 - protein, 11 aa, Severe acute respiratory syndrome coronavirus 2
  REGION 1..11: note = Table B: HLA-DRB1*04:03L HLA-DQA1*01:03-B1*06:01L
SKTQSLLIVNN

SEQ ID NO: 13669 - protein, 10 aa, Severe acute respiratory syndrome coronavirus 2
  REGION 1..10: note = Table B: HLA-DRB1*04:03L HLA-DRB1*14:17L
SLLIVNNATN

SEQ ID NO: 13670 - protein, 15 aa, Severe acute respiratory syndrome coronavirus 2
  REGION 1..15: note = Table B: HLA-DRB1*04:03L HLA-DRB1*04:04L
NKSWMESEFRVYSSA

SEQ ID NO: 13671 - protein, 15 aa, Severe acute respiratory syndrome coronavirus 2
  REGION 1..15: note = Table B: HLA-DRB1*04:03L
KSWMESEFRVYSSAN

SEQ ID NO: 13672 - protein, 10 aa, Severe acute respiratory syndrome coronavirus 2
  REGION 1..10: note = Table B: HLA-DRB1*04:03L HLA-DQA1*01-B1*05L HLA-DQA1*03:01-B1*03:02L
EFRVYSSANN

SEQ ID NO: 13673 - protein, 11 aa, Severe acute respiratory syndrome coronavirus 2
  REGION 1..11: note = Table B: HLA-DRB1*04:03L
FRVYSSANNCT

SEQ ID NO: 13674 - protein, 10 aa, Severe acute respiratory syndrome coronavirus 2
  REGION 1..10: note = Table B: HLA-DRB1*04:03L HLA-DRB1*01:03L HLA-DRB1*04:05L HLA-DQA1*01:02-B1*06:02L HLA-DRB1*01:01L HLA-DPA1*02:01-B1*13:01M HLA-DRB1*16:01L HLA-DQA1*01:03-B1*06:01M HLA-DRB1*15:03L
VYSSANNCTF

SEQ ID NO: 13675 - protein, 11 aa, Severe acute respiratory syndrome coronavirus 2
  REGION 1..11: note = Table B: HLA-DRB1*04:03L HLA-DRB1*13:03L HLA-DRB1*04:02L HLA-DRB1*04:05L HLA-DQA1*03:01-B1*03:02L HLA-DRB1*14:17L
PFLMDLEGKQG

SEQ ID NO: 13676 - protein, 10 aa, Severe acute respiratory syndrome coronavirus 2
  REGION 1..10: note = Table B: HLA-DRB1*04:03L HLA-DRB1*04:02L HLA-DRB1*14:17L
PINLVRDLPQ

SEQ ID NO: 13677 - protein, 10 aa, Severe acute respiratory syndrome coronavirus 2
  REGION 1..10: note = Table B: HLA-DRB1*04:03M HLA-DRB1*13:03L HLA-DRB1*01:03L HLA-DRB1*04:02L HLA-DRB1*04:04L HLA-DRB1*04:05L HLA-DRB4*03:01NL HLA-DRB1*14:01L HLA-DRB1*11:04L HLA-DQA1*01-B1*05L HLA-DRB1*04:10L HLA-DRB1*12:01L HLA-DQA1*03:01-B1*03:02L
  REGION 1..10: note = CONT. FROM ABOVE: HLA-DRB1*14:54L HLA-DRB1*14:17L HLA-DRB1*16:01 L HLA-DRB1*04:08L HLA-DRB1*08:03L
INLVRDLPQG

SEQ ID NO: 13678 - protein, 10 aa, Severe acute respiratory syndrome coronavirus 2
  REGION 1..10: note = Table B: HLA-DRB1*04:03L HLA-DRB1*13:02L HLA-DRB1*13:03L HLA-DRB1*01:03L HLA-DRB1*04:02L HLA-DRB1*14:01L HLA-DRB1*14:02L HLA-DQA1*01-B1*05L HLA-DQA1*05:01-B1*02:01L HLA-DRB1*12:01L HLA-DRB3*01:01L HLA-DQA1*03:01-B1*03:02L HLA-DRB1*16:01L
  REGION 1..10: note = CONT. FROM ABOVE: HLA-DRB1*15:03L
LVRDLPQGFS

SEQ ID NO: 13679 - protein, 12 aa, Severe acute respiratory syndrome coronavirus 2
  REGION 1..12: note = Table B: HLA-DRB1*04:03L
FSALEPLVDLPI

SEQ ID NO: 13680 - protein, 11 aa, Severe acute respiratory syndrome coronavirus 2
  REGION 1..11: note = Table B: HLA-DRB1*04:03L HLA-DRB1*04:02L HLA-DRB1*14:17L
LPIGINITRFQ

SEQ ID NO: 13681 - protein, 11 aa, Severe acute respiratory syndrome coronavirus 2
  REGION 1..11: note = Table B: HLA-DRB1*04:03L HLA-DRB1*01:03L HLA-DRB1*04:02L HLA-DRB1*04:04L HLA-DRB1*04:05L HLA-DQA1*01:02-B1*06:02L HLA-DRB1*01:02L HLA-DPA1*01:03-B1*03:01L HLA-DRB1*12:01L HLA-DPA1*03:01-B1*105:01L HLA-DQA1*03:01-B1*03:02L
  REGION 1..11: note = CONT. FROM ABOVE: HLA-DRB1*14:17L HLA-DPA1*01:02-B1*04:01L HLA-D RB1*16:01L HLA-DRB1*04:08L HLA-DQA1*02:01-B1*03:03L HLA-DRB1*15: 03L
ITRFQTLLALH

SEQ ID NO: 13682 - protein, 13 aa, Severe acute respiratory syndrome coronavirus 2
  REGION 1..13: note = Table B: HLA-DRB1*04:03L HLA-DRB1*13:02L HLA-DRB1*04:02L HLA-DRB1*08:04L HLA-DRB1*11:04L HLA-DRB1*08:01L HLA-DRB1*04:08L
TLLALHRSYLTPG

SEQ ID NO: 13683 - protein, 12 aa, Severe acute respiratory syndrome coronavirus 2
  REGION 1..12: note = Table B: HLA-DRB1*04:03L HLA-DRB1*04:05L HLA-DQA1*01:02-B1*06:02L HLA-DRB1*01:02L HLA-DPA1*01:03-B1*03:01L HLA-DQA1*01-B1*05L HLA-DRB1*12:01L HLA-DPA1*02:01-B1*13:01L HLA-DQA1*03:01-B1*03:02L
  REGION 1..12: note = CONT. FROM ABOVE: HLA-DRB1*16:01L HLA-DQA1*01:03-B1*06:01L HLA-D QA1*02:01-B1*03:03L
ALHRSYLTPGDS

SEQ ID NO: 13684 - protein, 10 aa, Severe acute respiratory syndrome coronavirus 2
  REGION 1..10: note = Table B: HLA-DRB1*04:03L HLA-DRB1*14:17L
YLTPGDSSSG

SEQ ID NO: 13685 - protein, 15 aa, Severe acute respiratory syndrome coronavirus 2
  REGION 1..15: note = Table B: HLA-DRB1*04:03L HLA-DRB1*13:03L HLA-DRB1*04:02L HLA-DRB1*04:05L HLA-DRB1*01:02L HLA-DRB4*03:01NL HLA-DPA1*01:03-B1*03:01L HLA-DRB1*08:01L HLA-DRB1*11:01L HLA-DQA1*01-B1*05L HLA-DPA1*01:03-B1*04:02L HLA-DRB1*12:01L
  REGION 1..15: note = CONT. FROM ABOVE: HLA-DPA1*03:01-B1*105:01L HLA-DPA1*01:03-B1*10 4:01L HLA-DRB1*14:17L HLA-DRB1*16:01L HLA-DRB1*04:08L
TPGDSSSGWTAGAAA

SEQ ID NO: 13686 - protein, 13 aa, Severe acute respiratory syndrome coronavirus 2
  REGION 1..13: note = Table B: HLA-DRB1*04:03L HLA-DRB1*01:03L HLA-DRB1*01:02L HLA-DQA1*01:01-B1*05:01L HLA-DQA1*05:05-B1*03:116L HLA-DPA1*01:03-B1*04:02L HLA-DRB1*12:01L
SGWTAGAAAYYVG

SEQ ID NO: 13687 - protein, 11 aa, Severe acute respiratory syndrome coronavirus 2
  REGION 1..11: note = Table B: HLA-DRB1*04:03L HLA-DRB1*13:02L HLA-DRB1*04:02L HLA-DRB1*14:01L HLA-DRB1*12:01L HLA-DRB1*14:17L HLA-DRB1*16:01L HLA-DQA1*02:01-B1*03:03L HLA-DRB1*15:03L
LLKYNENGTIT

SEQ ID NO: 13688 - protein, 11 aa, Severe acute respiratory syndrome coronavirus 2
  REGION 1..11: note = Table B: HLA-DRB1*04:03L HLA-DRB1*13:02L HLA-DRB1*04:02L HLA-DRB1*14:01L HLA-DQA1*01-B1*05L HLA-DRB1*12:01L HLA-DQA1*03:01-B1*03:02L HLA-DRB1*14:17L HLA-DRB1*16:01L HLA-DQA1*02:01-B1*03:03L
LKYNENGTITD

SEQ ID NO: 13689 - protein, 11 aa, Severe acute respiratory syndrome coronavirus 2
  REGION 1..11: note = Table B: HLA-DRB1*04:03L
KYNENGTITDA

SEQ ID NO: 13690 - protein, 14 aa, Severe acute respiratory syndrome coronavirus 2
  REGION 1..14: note = Table B: HLA-DRB1*04:03L HLA-DQA1*01:02-B1*06:02L HLA-DQA1*01-B1*05L HLA-DPA1*03:01-B1*105:01L HLA-DQA1*03:01-B1*03:02L HLA-DQA1*01:03-B1*06:01L HLA-DQA1*02:01-B1*03:03L
GTITDAVDCALDPL

SEQ ID NO: 13691 - protein, 12 aa, Severe acute respiratory syndrome coronavirus 2
  REGION 1..12: note = Table B: HLA-DRB1*04:03L HLA-DQA1*01-B1*05L HLA-DQA1*05:01-B1*02:01L HLA-DRB1*14:17L
DAVDCALDPLSE

SEQ ID NO: 13692 - protein, 12 aa, Severe acute respiratory syndrome coronavirus 2
  REGION 1..12: note = Table B: HLA-DRB1*04:03L HLA-DRB1*14:17L
AVDCALDPLSET

SEQ ID NO: 13693 - protein, 12 aa, Severe acute respiratory syndrome coronavirus 2
  REGION 1..12: note = Table B: HLA-DRB1*04:03L HLA-DQA1*01:02-B1*06:02L HLA-DPA1*03:01-B1*105:01L HLA-DQA1*03:01-B1*03:02L HLA-DQA1*01:03-B1*06:01L HLA-DQA1*02:01-B1*03:03L
VDCALDPLSETK

SEQ ID NO: 13694 - protein, 10 aa, Severe acute respiratory syndrome coronavirus 2
  REGION 1..10: note = Table B: HLA-DRB1*04:03L HLA-DRB1*13:03L HLA-DRB1*04:02L HLA-DQA1*03:01-B1*03:02L HLA-DRB1*14:17L HLA-DRB1*16:01L HLA-DQA1*02:01-B1*03:03L
FTVEKGIYQT

SEQ ID NO: 13695 - protein, 11 aa, Severe acute respiratory syndrome coronavirus 2
  REGION 1..11: note = Table B: HLA-DRB1*04:03L HLA-DQA1*03:01-B1*03:02L HLA-DRB1*14:17L HLA-DQA1*01:03-B1*06:01L HLA-DQA1*02:01-B1*03:03L
TVEKGIYQTSN

SEQ ID NO: 13696 - protein, 10 aa, Severe acute respiratory syndrome coronavirus 2
  REGION 1..10: note = Table B: HLA-DRB1*04:03L HLA-DQA1*03:01-B1*03:02L HLA-DQA1*02:01-B1*03:03L
TSNFRVQPTE

SEQ ID NO: 13697 - protein, 10 aa, Severe acute respiratory syndrome coronavirus 2
  REGION 1..10: note = Table B: HLA-DRB1*04:03L HLA-DQA1*03:01-B1*03:02L
SNFRVQPTES

SEQ ID NO: 13698 - protein, 10 aa, Severe acute respiratory syndrome coronavirus 2
  REGION 1..10: note = Table B: HLA-DRB1*04:03L HLA-DQA1*03:01-B1*03:02L HLA-DPA1*01:02-B1*04:01L HLA-DQA1*01:03-B1*06:01L HLA-DQA1*02:01-B1*03:03L
PTESIVRFPN

SEQ ID NO: 13699 - protein, 13 aa, Severe acute respiratory syndrome coronavirus 2
  REGION 1..13: note = Table B: HLA-DRB1*04:03L HLA-DQA1*01:02-B1*06:02L HLA-DRB1*01:02L HLA-DPA1*03:01-B1*04:02L HLA-DQA1*05:01-B1*02:01L HLA-DRB1*12:01L HLA-DPA1*03:01-B1*105:01L HLA-DQA1*03:01-B1*03:02L
  REGION 1..13: note = CONT. FROM ABOVE: HLA-DQA1*05:05-B1*03:01L HLA-DQA1*01:03-B1*06: 01L HLA-DQA1*02:01-B1*03:03L HLA-DRB1*15:03L
FPNITNLCPFGEV

SEQ ID NO: 13700 - protein, 12 aa, Severe acute respiratory syndrome coronavirus 2
  REGION 1..12: note = Table B: HLA-DRB1*04:03L HLA-DRB1*13:02L HLA-DRB1*13:03L HLA-DRB1*04:05L HLA-DRB1*08:04L HLA-DRB3*02:01L HLA-DRB1*11:04L HLA-DRB1*08:01L HLA-DRB1*11:01L HLA-DRB1*14:54L HLA-DPA1*01:03-B1*02:01L HLA-DRB1*04:08L
GEVFNATRFASV

SEQ ID NO: 13701 - protein, 12 aa, Severe acute respiratory syndrome coronavirus 2
  REGION 1..12: note = Table B: HLA-DRB1*04:03L HLA-DRB1*04:04L HLA-DRB3*01:01L
VFNATRFASVYA

SEQ ID NO: 13702 - protein, 13 aa, Severe acute respiratory syndrome coronavirus 2
  REGION 1..13: note = Table B: HLA-DRB1*04:03L HLA-DRB1*04:02L HLA-DRB1*01:01L HLA-DRB1*03:01L HLA-DRB1*14:01L HLA-DRB1*11:04L HLA-DRB3*01:01L HLA-DPA1*03:01-B1*105:01L
ATRFASVYAWNRK

SEQ ID NO: 13703 - protein, 14 aa, Severe acute respiratory syndrome coronavirus 2
  REGION 1..14: note = Table B: HLA-DRB1*04:03L HLA-DRB1*04:04L HLA-DRB1*01:01L HLA-DPA1*01:03-B1*03:01L HLA-DPA1*03:01-B1*105:01L HLA-DQA1*01:03-B1*06:01L
FASVYAWNRKRISN

SEQ ID NO: 13704 - protein, 13 aa, Severe acute respiratory syndrome coronavirus 2
  REGION 1..13: note = Table B: HLA-DRB1*04:03L HLA-DRB1*01:02L HLA-DQA1*02:01-B1*03:03L HLA-DRB1*15:03L
KRISNCVADYSVL

SEQ ID NO: 13705 - protein, 11 aa, Severe acute respiratory syndrome coronavirus 2
  REGION 1..11: note = Table B: HLA-DRB1*04:03L HLA-DRB1*14:17L
ADYSVLYNSAS

SEQ ID NO: 13706 - protein, 11 aa, Severe acute respiratory syndrome coronavirus 2
  REGION 1..11: note = Table B: HLA-DRB1*04:03L HLA-DPA1*02:01-B1*13:01L
DYSVLYNSASF

SEQ ID NO: 13707 - protein, 11 aa, Severe acute respiratory syndrome coronavirus 2
  REGION 1..11: note = Table B: HLA-DRB1*04:03L HLA-DRB1*04:02L HLA-DRB1*04:04L HLA-DRB1*04:05L HLA-DRB4*03:01NL HLA-DRB1*04:10L HLA-DRB1*14:17L HLA-DRB1*16:01L HLA-DRB1*04:08L
YSVLYNSASFS

SEQ ID NO: 13708 - protein, 10 aa, Severe acute respiratory syndrome coronavirus 2
  REGION 1..10: note = Table B: HLA-DRB1*04:03L HLA-DRB1*01:03L HLA-DRB1*04:05L HLA-DQA1*01:02-B1*06:02L HLA-DRB1*01:01L HLA-DRB1*08:77L HLA-DQA1*01:01-B1*05:01L HLA-DPA1*02:01-B1*13:01M HLA-DPA1*03:01-B1*105:01L HLA-DRB1*16:01L
  REGION 1..10: note = CONT. FROM ABOVE: HLA-DQA1*01:03-B1*06:01M HLA-DQA1*02:01-B1*03: 03L HLA-DRB1*15:03L
LYNSASFSTF

SEQ ID NO: 13709 - protein, 15 aa, Severe acute respiratory syndrome coronavirus 2
  REGION 1..15: note = Table B: HLA-DRB1*04:03L HLA-DRB1*13:02L HLA-DRB1*04:02L HLA-DRB1*04:04L HLA-DRB1*01:01L HLA-DRB3*02:01L HLA-DPA1*01:03-B1*03:01L HLA-DPA1*03:01-B1*04:02L HLA-DRB1*14:01L HLA-DRB1*11:03L HLA-DRB1*11:04L HLA-DRB1*14:02L
  REGION 1..15: note = CONT. FROM ABOVE: HLA-DQA1*05:05-B1*03:19L HLA-DPA1*01:03-B1*04: 02L HLA-DRB3*01:01L HLA-DPA1*02:01-B1*13:01L HLA-DQA1*03:01-B1*0 3:02L HLA-DQA1*05:05-B1*03:01L HLA-DRB1*07:01L HLA-DRB1*10:01L H LA-DRB1*15:01L
SASFSTFKCYGVSPT

SEQ ID NO: 13710 - protein, 16 aa, Severe acute respiratory syndrome coronavirus 2
  REGION 1..16: note = Table B: HLA-DRB1*04:03L HLA-DRB1*01:03L HLA-DQA1*03:01-B1*03:02L HLA-DRB1*16:01L
SPTKLNDLCFTNVYAD

SEQ ID NO: 13711 - protein, 11 aa, Severe acute respiratory syndrome coronavirus 2
  REGION 1..11: note = Table B: HLA-DRB1*04:03L
NVYADSFVIRG

SEQ ID NO: 13712 - protein, 10 aa, Severe acute respiratory syndrome coronavirus 2
  REGION 1..10: note = Table B: HLA-DRB1*04:03L HLA-DRB1*01:03L HLA-DRB1*04:02L HLA-DRB1*01:02L HLA-DQA1*03:01-B1*03:02L HLA-DRB1*14:17L HLA-DRB1*16:01L HLA-DRB1*04:08L HLA-DQA1*02:01-B1*03:03L
FVIRGDEVRQ

SEQ ID NO: 13713 - protein, 10 aa, Severe acute respiratory syndrome coronavirus 2
  REGION 1..10: note = Table B: HLA-DRB1*04:03L HLA-DQA1*03:01-B1*03:02L
VRQIAPGQTG

SEQ ID NO: 13714 - protein, 10 aa, Severe acute respiratory syndrome coronavirus 2
  REGION 1..10: note = Table B: HLA-DRB1*04:03L HLA-DQA1*01-B1*05L HLA-DQA1*03:01-B1*03:02L
NYKLPDDFTG

SEQ ID NO: 13715 - protein, 10 aa, Severe acute respiratory syndrome coronavirus 2
  REGION 1..10: note = Table B: HLA-DRB1*04:03L HLA-DRB1*04:02L HLA-DRB1*04:05L HLA-DQA1*01-B1*05L HLA-DRB1*04:10L HLA-DRB1*14:17L
IAWNSNNLDS

SEQ ID NO: 13716 - protein, 11 aa, Severe acute respiratory syndrome coronavirus 2
  REGION 1..11: note = Table B: HLA-DRB1*04:03L HLA-DQA1*02:01-B1*03:03L
WNSNNLDSKVG

SEQ ID NO: 13717 - protein, 10 aa, Severe acute respiratory syndrome coronavirus 2
  REGION 1..10: note = Table B: HLA-DRB1*04:03L HLA-DQA1*03:01-B1*03:02L HLA-DRB1*14:17L
NNLDSKVGGN

SEQ ID NO: 13718 - protein, 11 aa, Severe acute respiratory syndrome coronavirus 2
  REGION 1..11: note = Table B: HLA-DRB1*04:03L HLA-DQA1*01-B1*05L HLA-DQA1*03:01-B1*03:02L
LKPFERDISTE

SEQ ID NO: 13719 - protein, 12 aa, Severe acute respiratory syndrome coronavirus 2
  REGION 1..12: note = Table B: HLA-DRB1*04:03L HLA-DRB1*13:02L HLA-DRB1*13:03L HLA-DRB1*01:03L HLA-DRB1*01:02L HLA-DRB1*08:04L HLA-DRB3*02:01L HLA-DPA1*01:03-B1*04:02L HLA-DRB1*12:01L HLA-DRB3*01:01L HLA-DPA1*03:01-B1*105:01L HLA-DPA1*01:02-B1*04:01L
  REGION 1..12: note = CONT. FROM ABOVE: HLA-DRB1*04:08L
KPFERDISTEIY

SEQ ID NO: 13720 - protein, 11 aa, Severe acute respiratory syndrome coronavirus 2
  REGION 1..11: note = Table B: HLA-DRB1*04:03L HLA-DRB1*14:17L
FERDISTEIYQ

SEQ ID NO: 13721 - protein, 12 aa, Severe acute respiratory syndrome coronavirus 2
  REGION 1..12: note = Table B: HLA-DRB1*04:03L HLA-DQA1*01:02-B1*06:02L HLA-DQA1*05:01-B1*02:01L HLA-DQA1*02:01-B1*03:03L
ERDISTEIYQAG

SEQ ID NO: 13722 - protein, 11 aa, Severe acute respiratory syndrome coronavirus 2
  REGION 1..11: note = Table B: HLA-DRB1*04:03L HLA-DQA1*05:05-B1*03:01L
IYQAGSTPCNG

SEQ ID NO: 13723 - protein, 12 aa, Severe acute respiratory syndrome coronavirus 2
  REGION 1..12: note = Table B: HLA-DRB1*04:03L HLA-DPA1*03:01-B1*04:02L HLA-DQA1*01-B1*05L HLA-DPA1*03:01-B1*105:01L HLA-DQA1*03:01-B1*03:02L HLA-DPA1*01:02-B1*04:01L HLA-DQA1*02:01-B1*03:03L
FPLQSYGFQPTN

SEQ ID NO: 13724 - protein, 10 aa, Severe acute respiratory syndrome coronavirus 2
  REGION 1..10: note = Table B: HLA-DRB1*04:03L HLA-DRB1*04:02L HLA-DRB4*03:01NL HLA-DQA1*01-B1*05L HLA-DQA1*03:01-B1*03:02L HLA-DRB1*14:17L HLA-DQA1*02:01-B1*03:03L
YGFQPTNGVG

SEQ ID NO: 13725 - protein, 13 aa, Severe acute respiratory syndrome coronavirus 2
  REGION 1..13: note = Table B: HLA-DRB1*04:03L HLA-DRB1*01:03L HLA-DRB1*04:02L HLA-DRB1*04:05L HLA-DRB1*01:02L HLA-DRB1*08:04L HLA-DPA1*01:03-B1*03:01L HLA-DRB1*14:01L HLA-DRB1*08:01L HLA-DQA1*01-B1*05L HLA-DQA1*05:01-B1*02:01L
  REGION 1..13: note = CONT. FROM ABOVE: HLA-DPA1*01:03-B1*04:01L HLA-DPA1*01:03-B1*04: 02L HLA-DRB1*12:01L HLA-DQA1*03:01-B1*03:02L HLA-DPA1*01:03-B1*0 2:01L HLA-DRB1*14:17L HLA-DRB1*16:01L HLA-DQA1*01:03-B1*06:01L H LA-DRB1*04:08L HLA-DQA1*02:01-B1*03:03L
VVVLSFELLHAPA

SEQ ID NO: 13726 - protein, 15 aa, Severe acute respiratory syndrome coronavirus 2
  REGION 1..15: note = Table B: HLA-DRB1*04:03L HLA-DRB1*13:02L HLA-DRB1*08:77L HLA-DRB1*07:01L
VNFNFNGLTGTGVLT

SEQ ID NO: 13727 - protein, 13 aa, Severe acute respiratory syndrome coronavirus 2
  REGION 1..13: note = Table B: HLA-DRB1*04:03L
NGLTGTGVLTESN

SEQ ID NO: 13728 - protein, 12 aa, Severe acute respiratory syndrome coronavirus 2
  REGION 1..12: note = Table B: HLA-DRB1*04:03L HLA-DRB1*13:02L HLA-DRB1*01:03L HLA-DRB1*04:02L HLA-DRB1*04:05L HLA-DQA1*01:02-B1*06:02L HLA-DRB1*01:02L HLA-DRB1*14:01L HLA-DRB1*08:01L HLA-DRB1*12:01L HLA-DPA1*02:01-B1*13:01L HLA-DPA1*03:01-B1*105:01L
  REGION 1..12: note = CONT. FROM ABOVE: HLA-DQA1*01:03-B1*06:01L HLA-DRB1*04:08L
KKFLPFQQFGRD

SEQ ID NO: 13729 - protein, 13 aa, Severe acute respiratory syndrome coronavirus 2
  REGION 1..13: note = Table B: HLA-DRB1*04:03L HLA-DRB1*01:02L HLA-DRB1*11:04L HLA-DRB1*11:01L HLA-DRB1*12:01L HLA-DRB1*14:54L HLA-DRB1*14:17L HLA-DRB1*08:03L HLA-DRB1*15:03L
LPFQQFGRDIADT

SEQ ID NO: 13730 - protein, 11 aa, Severe acute respiratory syndrome coronavirus 2
  REGION 1..11: note = Table B: HLA-DRB1*04:03L HLA-DQA1*03:01-B1*03:02L HLA-DRB1*14:17L
FGRDIADTTDA

SEQ ID NO: 13731 - protein, 11 aa, Severe acute respiratory syndrome coronavirus 2
  REGION 1..11: note = Table B: HLA-DRB1*04:03L HLA-DQA1*01:03-B1*06:01L
TDAVRDPQTLE

SEQ ID NO: 13732 - protein, 13 aa, Severe acute respiratory syndrome coronavirus 2
  REGION 1..13: note = Table B: HLA-DRB1*04:03L HLA-DPA1*03:01-B1*04:02L HLA-DRB1*12:01L HLA-DPA1*03:01-B1*105:01L HLA-DRB1*16:01L HLA-DRB1*15:03L
DPQTLEILDITPC

SEQ ID NO: 13733 - protein, 12 aa, Severe acute respiratory syndrome coronavirus 2
  REGION 1..12: note = Table B: HLA-DRB1*04:03L HLA-DRB1*01:03L HLA-DRB1*04:02L HLA-DPA1*01:03-B1*03:01L HLA-DQA1*01:01-B1*05:01L HLA-DPA1*03:01-B1*105:01L HLA-DRB1*04:08L
FGGVSVITPGTN

SEQ ID NO: 13734 - protein, 12 aa, Severe acute respiratory syndrome coronavirus 2
  REGION 1..12: note = Table B: HLA-DRB1*04:03L
GGVSVITPGTNT

SEQ ID NO: 13735 - protein, 10 aa, Severe acute respiratory syndrome coronavirus 2
  REGION 1..10: note = Table B: HLA-DRB1*04:03L HLA-DRB1*14:17L
VITPGTNTSN

SEQ ID NO: 13736 - protein, 15 aa, Severe acute respiratory syndrome coronavirus 2
  REGION 1..15: note = Table B: HLA-DRB1*04:03L
TPGTNTSNQVAVLYQ

SEQ ID NO: 13737 - protein, 12 aa, Severe acute respiratory syndrome coronavirus 2
  REGION 1..12: note = Table B: HLA-DRB1*04:03L HLA-DQA1*01-B1*05L HLA-DRB1*15:03L
VAVLYQDVNCTE

SEQ ID NO: 13738 - protein, 14 aa, Severe acute respiratory syndrome coronavirus 2
  REGION 1..14: note = Table B: HLA-DRB1*04:03L HLA-DQA1*01-B1*05L HLA-DQA1*05:01-B1*02:01L
AVLYQDVNCTEVPV

SEQ ID NO: 13739 - protein, 11 aa, Severe acute respiratory syndrome coronavirus 2
  REGION 1..11: note = Table B: HLA-DRB1*04:03L HLA-DRB1*04:02L HLA-DRB1*14:17L
TEVPVAIHADQ

SEQ ID NO: 13740 - protein, 12 aa, Severe acute respiratory syndrome coronavirus 2
  REGION 1..12: note = Table B: HLA-DRB1*04:03L
VPVAIHADQLTP

SEQ ID NO: 13741 - protein, 11 aa, Severe acute respiratory syndrome coronavirus 2
  REGION 1..11: note = Table B: HLA-DRB1*04:03L HLA-DRB1*04:02L HLA-DRB4*03:01NL HLA-DQA1*03:01-B1*03:02L HLA-DRB1*14:54L HLA-DRB1*14:17L HLA-DRB1*16:01L
VAIHADQLTPT

SEQ ID NO: 13742 - protein, 13 aa, Severe acute respiratory syndrome coronavirus 2
  REGION 1..13: note = Table B: HLA-DRB1*04:03L HLA-DRB1*13:02L HLA-DRB1*04:05L HLA-DRB1*01:02L HLA-DPA1*03:01-B1*04:02L HLA-DRB1*11:02L HLA-DRB1*11:03L HLA-DRB1*11:04L HLA-DRB1*11:01L HLA-DQA1*05:05-B1*03:116L HLA-DRB1*12:01L HLA-DRB3*01:01L
  REGION 1..13: note = CONT. FROM ABOVE: HLA-DPA1*01:03-B1*02:01L HLA-DRB1*14:17L HLA-D RB1*04:08L HLA-DRB1*08:02L HLA-DRB1*08:03L
DQLTPTWRVYSTG

SEQ ID NO: 13743 - protein, 10 aa, Severe acute respiratory syndrome coronavirus 2
  REGION 1..10: note = Table B: HLA-DRB1*04:03L HLA-DRB4*03:01NL HLA-DRB1*12:01L HLA-DRB1*16:01L HLA-DQA1*02:01-B1*03:03L
VYSTGSNVFQ

SEQ ID NO: 13744 - protein, 10 aa, Severe acute respiratory syndrome coronavirus 2
  REGION 1..10: note = Table B: HLA-DRB1*04:03L HLA-DQA1*03:01-B1*03:02L
GAEHVNNSYE

SEQ ID NO: 13745 - protein, 10 aa, Severe acute respiratory syndrome coronavirus 2
  REGION 1..10: note = Table B: HLA-DRB1*04:03L HLA-DRB1*13:03L HLA-DRB1*01:03L HLA-DRB1*04:02L HLA-DRB4*03:01NL HLA-DRB1*08:01L HLA-DRB1*12:01L HLA-DQA1*03:01-B1*03:02L HLA-DRB1*14:17L HLA-DRB1*16:01L HLA-DQA1*02:01-B1*03:03L
YQTQTNSPRR

SEQ ID NO: 13746 - protein, 12 aa, Severe acute respiratory syndrome coronavirus 2
  REGION 1..12: note = Table B: HLA-DRB1*04:03L HLA-DQA1*01:02-B1*06:02L
SQSIIAYTMSLG

SEQ ID NO: 13747 - protein, 11 aa, Severe acute respiratory syndrome coronavirus 2
  REGION 1..11: note = Table B: HLA-DRB1*04:03L HLA-DRB1*14:17L
IIAYTMSLGAE

SEQ ID NO: 13748 - protein, 11 aa, Severe acute respiratory syndrome coronavirus 2
  REGION 1..11: note = Table B: HLA-DRB1*04:03L HLA-DRB1*04:02L HLA-DRB1*04:05L HLA-DRB4*03:01NL HLA-DRB1*04:10L HLA-DQA1*03:01-B1*03:02L HLA-DRB1*14:17L HLA-DQA1*02:01-B1*03:03L
IAYTMSLGAEN

SEQ ID NO: 13749 - protein, 13 aa, Severe acute respiratory syndrome coronavirus 2
  REGION 1..13: note = Table B: HLA-DRB1*04:03L
SLGAENSVAYSNN

SEQ ID NO: 13750 - protein, 11 aa, Severe acute respiratory syndrome coronavirus 2
  REGION 1..11: note = Table B: HLA-DRB1*04:03L HLA-DRB1*14:17L
NSVAYSNNSIA

SEQ ID NO: 13751 - protein, 12 aa, Severe acute respiratory syndrome coronavirus 2
  REGION 1..12: note = Table B: HLA-DRB1*04:03L HLA-DRB1*04:02L HLA-DRB1*04:05L HLA-DRB4*03:01NL HLA-DQA1*01-B1*05L HLA-DRB1*04:10L HLA-DRB1*12:01L HLA-DQA1*03:01-B1*03:02L HLA-DRB1*14:54L HLA-DRB1*14:17L HLA-DRB1*16:01L HLA-DQA1*02:01-B1*03:03L
VAYSNNSIAIPT

SEQ ID NO: 13752 - protein, 13 aa, Severe acute respiratory syndrome coronavirus 2
  REGION 1..13: note = Table B: HLA-DRB1*04:03L
SNNSIAIPTNFTI

SEQ ID NO: 13753 - protein, 13 aa, Severe acute respiratory syndrome coronavirus 2
  REGION 1..13: note = Table B: HLA-DRB1*04:03L HLA-DQA1*01-B1*05L HLA-DQA1*05:01-B1*02:01L HLA-DRB1*12:01L
NNSIAIPTNFTIS

SEQ ID NO: 13754 - protein, 15 aa, Severe acute respiratory syndrome coronavirus 2
  REGION 1..15: note = Table B: HLA-DRB1*04:03L HLA-DRB1*13:02L HLA-DQA1*01:02-B1*06:02L HLA-DRB1*01:02L HLA-DPA1*03:01-B1*04:02L HLA-DRB1*14:01L HLA-DRB1*12:01L HLA-DPA1*03:01-B1*105:01L HLA-DQA1*05:05-B1*03:01L
  REGION 1..15: note = CONT. FROM ABOVE: HLA-DRB1*16:01L HLA-DRB1*15:03L
IPTNFTISVTTEILP

SEQ ID NO: 13755 - protein, 12 aa, Severe acute respiratory syndrome coronavirus 2
  REGION 1..12: note = Table B: HLA-DRB1*04:03L
VTTEILPVSMTK

SEQ ID NO: 13756 - protein, 10 aa, Severe acute respiratory syndrome coronavirus 2
  REGION 1..10: note = Table B: HLA-DRB1*04:03L
ILPVSMTKTS

SEQ ID NO: 13757 - protein, 13 aa, Severe acute respiratory syndrome coronavirus 2
  REGION 1..13: note = Table B: HLA-DRB1*04:03L HLA-DRB1*01:03L HLA-DQA1*01:02-B1*06:02L HLA-DPA1*03:01-B1*04:02L HLA-DQA1*01-B1*05L HLA-DRB1*12:01L HLA-DQA1*01:03-B1*06:01L HLA-DRB1*04:08L HLA-DRB1*15:01L
SNLLLQYGSFCTQ

SEQ ID NO: 13758 - protein, 13 aa, Severe acute respiratory syndrome coronavirus 2
  REGION 1..13: note = Table B: HLA-DRB1*04:03L HLA-DRB1*04:05L HLA-DQA1*05:05-B1*03:19L HLA-DRB1*12:01L HLA-DRB1*15:03L
LLQYGSFCTQLNR

SEQ ID NO: 13759 - protein, 10 aa, Severe acute respiratory syndrome coronavirus 2
  REGION 1..10: note = Table B: HLA-DRB1*04:03L HLA-DRB1*01:03L HLA-DRB1*01:02L HLA-DRB1*14:17L HLA-DRB1*16:01L
RALTGIAVEQ

SEQ ID NO: 13760 - protein, 10 aa, Severe acute respiratory syndrome coronavirus 2
  REGION 1..10: note = Table B: HLA-DRB1*04:03L HLA-DRB1*04:02L HLA-DRB1*04:05L HLA-DRB4*03:01NL HLA-DQA1*01-B1*05L HLA-DQA1*05:01-B1*02:01L HLA-DRB1*04:10L HLA-DQA1*03:01-B1*03:02L HLA-DRB1*14:54L HLA-DRB1*14:17L HLA-DQA1*02:01-B1*03:03L
IAVEQDKNTQ

SEQ ID NO: 13761 - protein, 10 aa, Severe acute respiratory syndrome coronavirus 2
  REGION 1..10: note = Table B: HLA-DRB1*04:03L HLA-DRB1*14:17L
AVEQDKNTQE

SEQ ID NO: 13762 - protein, 14 aa, Severe acute respiratory syndrome coronavirus 2
  REGION 1..14: note = Table B: HLA-DRB1*04:03L HLA-DRB1*04:05L HLA-DRB3*01:01L HLA-DRB1*04:08L
EVFAQVKQIYKTPP

SEQ ID NO: 13763 - protein, 13 aa, Severe acute respiratory syndrome coronavirus 2
  REGION 1..13: note = Table B: HLA-DRB1*04:03L HLA-DRB1*13:02L HLA-DRB1*13:03L HLA-DRB1*01:03L HLA-DRB1*04:04L HLA-DRB1*04:05L HLA-DQA1*01:02-B1*06:02L HLA-DRB1*01:02L HLA-DRB1*08:04L HLA-DRB1*11:04L HLA-DRB1*08:01L HLA-DRB1*11:01L HLA-DRB1*12:01L
  REGION 1..13: note = CONT. FROM ABOVE: HLA-DRB3*01:01L HLA-DRB1*04:08L HLA-DQA1*02:01 -B1*03:03L
AQVKQIYKTPPIK

SEQ ID NO: 13764 - protein, 10 aa, Severe acute respiratory syndrome coronavirus 2
  REGION 1..10: note = Table B: HLA-DRB1*04:03L HLA-DRB1*01:03L HLA-DRB1*04:05L HLA-DQA1*01:02-B1*06:02L HLA-DRB1*01:01L HLA-DRB1*01:02L HLA-DRB1*08:77L HLA-DRB1*14:02L HLA-DQA1*01:01-B1*05:01L HLA-DRB1*11:01L HLA-DQA1*05:05-B1*03:19L
  REGION 1..10: note = CONT. FROM ABOVE: HLA-DPA1*01:03-B1*04:01L HLA-DRB1*12:01L HLA-D PA1*02:01-B1*13:01M HLA-DPA1*03:01-B1*105:01L HLA-DRB1*16:01L HL A-DQA1*01:03-B1*06:01M HLA-DQA1*02:01-B1*03:03L HLA-DRB1*15:03L
IYKTPPIKDF

SEQ ID NO: 13765 - protein, 13 aa, Severe acute respiratory syndrome coronavirus 2
  REGION 1..13: note = Table B: HLA-DRB1*04:03L HLA-DRB1*01:03L HLA-DPA1*01:03-B1*03:01L HLA-DQA1*05:05-B1*03:19L HLA-DRB1*12:01L HLA-DPA1*02:01-B1*13:01L HLA-DQA1*05:05-B1*03:01L HLA-DRB1*16:01L HLA-DRB1*04:08L
  REGION 1..13: note = CONT. FROM ABOVE: HLA-DQA1*02:01-B1*03:03L HLA-DRB1*15:03L
FGGFNFSQILPDP

SEQ ID NO: 13766 - protein, 11 aa, Severe acute respiratory syndrome coronavirus 2
  REGION 1..11: note = Table B: HLA-DRB1*04:03L HLA-DRB1*14:17L HLA-DQA1*02:01-B1*03:03L
NFSQILPDPSK

SEQ ID NO: 13767 - protein, 11 aa, Severe acute respiratory syndrome coronavirus 2
  REGION 1..11: note = Table B: HLA-DRB1*04:03L HLA-DRB1*08:04L HLA-DPA1*01:03-B1*03:01L HLA-DRB1*14:01L HLA-DRB1*08:01L HLA-DPA1*01:03-B1*02:01L
FIEDLLFNKVT

SEQ ID NO: 13768 - protein, 13 aa, Severe acute respiratory syndrome coronavirus 2
  REGION 1..13: note = Table B: HLA-DRB1*04:03L HLA-DRB1*13:02L HLA-DRB1*13:03L HLA-DRB1*04:02L HLA-DRB1*04:05L HLA-DRB1*01:02L HLA-DRB4*03:01NL HLA-DRB1*08:04L HLA-DRB3*02:01L HLA-DPA1*01:03-B1*03:01L HLA-DRB1*11:03L HLA-DRB1*11:04L HLA-DRB1*14:02L HLA-DRB1*08:01L
  REGION 1..13: note = CONT. FROM ABOVE: HLA-DRB1*12:02L HLA-DRB1*14:54L HLA-DQA1*05:05 -B1*03:01L HLA-DRB1*14:17L
IEDLLFNKVTLAD

SEQ ID NO: 13769 - protein, 11 aa, Severe acute respiratory syndrome coronavirus 2
  REGION 1..11: note = Table B: HLA-DRB1*04:03L HLA-DRB1*14:01L
LLFNKVTLADA

SEQ ID NO: 13770 - protein, 11 aa, Severe acute respiratory syndrome coronavirus 2
  REGION 1..11: note = Table B: HLA-DRB1*04:03L HLA-DQA1*03:01-B1*03:02L
LFNKVTLADAG

SEQ ID NO: 13771 - protein, 13 aa, Severe acute respiratory syndrome coronavirus 2
  REGION 1..13: note = Table B: HLA-DRB1*04:03L HLA-DQA1*01-B1*05L HLA-DRB1*16:01L HLA-DRB1*15:03L
DAGFIKQYGDCLG

SEQ ID NO: 13772 - protein, 13 aa, Severe acute respiratory syndrome coronavirus 2
  REGION 1..13: note = Table B: HLA-DRB1*04:03L HLA-DRB1*01:02L HLA-DQA1*01-B1*05L HLA-DRB1*12:01L HLA-DRB1*16:01L
AGFIKQYGDCLGD

SEQ ID NO: 13773 - protein, 13 aa, Severe acute respiratory syndrome coronavirus 2
  REGION 1..13: note = Table B: HLA-DRB1*04:03L HLA-DRB1*01:03L HLA-DQA1*01:02-B1*06:02L HLA-DRB1*01:02L HLA-DRB1*12:01L HLA-DPA1*02:01-B1*13:01L HLA-DPA1*03:01-B1*105:01L HLA-DRB1*04:08L
GFIKQYGDCLGDI

SEQ ID NO: 13774 - protein, 12 aa, Severe acute respiratory syndrome coronavirus 2
  REGION 1..12: note = Table B: HLA-DRB1*04:03L HLA-DRB1*04:05L HLA-DQA1*01:02-B1*06:02L HLA-DRB1*01:02L HLA-DPA1*01:03-B1*03:01L HLA-DQA1*01-B1*05L HLA-DQA1*05:01-B1*02:01L HLA-DRB1*12:01L
  REGION 1..12: note = CONT. FROM ABOVE: HLA-DPA1*02:01-B1*13:01L HLA-DPA1*03:01-B1*105 :01L HLA-DQA1*03:01-B1*03:02L HLA-DRB1*16:01L HLA-DQA1*01:03-B1* 06:01L HLA-DRB1*04:08L HLA-DQA1*02:01-B1*03:03L HLA-DRB1*15:03L
IKQYGDCLGDIA

SEQ ID NO: 13775 - protein, 13 aa, Severe acute respiratory syndrome coronavirus 2
  REGION 1..13: note = Table B: HLA-DRB1*04:03L HLA-DRB1*04:05L HLA-DQA1*01:02-B1*06:02L HLA-DPA1*03:01-B1*105:01L HLA-DRB1*16:01L HLA-DRB1*04:08L
AQKFNGLTVLPPL

SEQ ID NO: 13776 - protein, 13 aa, Severe acute respiratory syndrome coronavirus 2
  REGION 1..13: note = Table B: HLA-DRB1*04:03L HLA-DQA1*01:02-B1*06:02L HLA-DPA1*03:01-B1*105:01L
NGLTVLPPLLTDE

SEQ ID NO: 13777 - protein, 13 aa, Severe acute respiratory syndrome coronavirus 2
  REGION 1..13: note = Table B: HLA-DRB1*04:03L HLA-DPA1*03:01-B1*04:02L HLA-DRB1*12:01L HLA-DPA1*03:01-B1*105:01L HLA-DRB1*15:03L
LPPLLTDEMIAQY

SEQ ID NO: 13778 - protein, 11 aa, Severe acute respiratory syndrome coronavirus 2
  REGION 1..11: note = Table B: HLA-DRB1*04:03L HLA-DQA1*01-B1*05L HLA-DQA1*05:01-B1*02:01L HLA-DQA1*03:01-B1*03:02L HLA-DQA1*02:01-B1*03:03L
DEMIAQYTSAL

SEQ ID NO: 13779 - protein, 11 aa, Severe acute respiratory syndrome coronavirus 2
  REGION 1..11: note = Table B: HLA-DRB1*04:03L HLA-DRB1*04:02L HLA-DRB1*01:02L HLA-DQA1*01-B1*05L HLA-DRB1*12:01L HLA-DRB1*14:17L HLA-DRB1*16:01L HLA-DQA1*01:03-B1*06:01L HLA-DRB1*04:08L HLA-DQA1*02:01-B1*03:03L HLA-DRB1*15:01L HLA-DRB1*15:03L
IAQYTSALLAG

SEQ ID NO: 13780 - protein, 13 aa, Severe acute respiratory syndrome coronavirus 2
  REGION 1..13: note = Table B: HLA-DRB1*04:03L HLA-DRB1*01:03L HLA-DRB1*04:02L HLA-DRB1*01:02L HLA-DPA1*01:03-B1*03:01L HLA-DPA1*03:01-B1*04:02L HLA-DQA1*05:01-B1*02:01L HLA-DRB1*12:01L HLA-DPA1*01:02-B1*04:01L HLA-DRB1*16:01L
  REGION 1..13: note = CONT. FROM ABOVE: HLA-DRB1*04:08L HLA-DRB1*15:03L
AQYTSALLAGTIT

SEQ ID NO: 13781 - protein, 13 aa, Severe acute respiratory syndrome coronavirus 2
  REGION 1..13: note = Table B: HLA-DRB1*04:03L HLA-DQA1*03:01-B1*03:02L
SALLAGTITSGWT

SEQ ID NO: 13782 - protein, 12 aa, Severe acute respiratory syndrome coronavirus 2
  REGION 1..12: note = Table B: HLA-DRB1*04:03L HLA-DRB1*01:03L HLA-DRB1*01:02L HLA-DPA1*01:03-B1*03:01L HLA-DQA1*05:01-B1*02:01L HLA-DPA1*01:03-B1*04:02L HLA-DPA1*03:01-B1*105:01L HLA-DRB1*04:08L
FGAGAALQIPFA

SEQ ID NO: 13783 - protein, 13 aa, Severe acute respiratory syndrome coronavirus 2
  REGION 1..13: note = Table B: HLA-DRB1*04:03L HLA-DRB1*01:03L HLA-DRB1*04:05L HLA-DRB1*04:08L
IPFAMQMAYRFNG

SEQ ID NO: 13784 - protein, 10 aa, Severe acute respiratory syndrome coronavirus 2
  REGION 1..10: note = Table B: HLA-DRB1*04:03L HLA-DQA1*01-B1*05L HLA-DQA1*03:01-B1*03:02L HLA-DRB1*14:17L HLA-DQA1*02:01-B1*03:03L
RFNGIGVTQN

SEQ ID NO: 13785 - protein, 11 aa, Severe acute respiratory syndrome coronavirus 2
  REGION 1..11: note = Table B: HLA-DRB1*04:03L HLA-DQA1*05:05-B1*03:19L HLA-DQA1*05:05-B1*03:01L
FNGIGVTQNVL

SEQ ID NO: 13786 - protein, 11 aa, Severe acute respiratory syndrome coronavirus 2
  REGION 1..11: note = Table B: HLA-DRB1*04:03L HLA-DRB1*13:02L HLA-DRB4*03:01NL HLA-DRB3*02:01L HLA-DPA1*03:01-B1*04:02L HLA-DRB1*14:01L HLA-DRB1*11:02L HLA-DQA1*01-B1*05L HLA-DRB4*01:01L HLA-DQA1*05:05-B1*03:116L HLA-DPA1*01:03-B1*04:02L
  REGION 1..11: note = CONT. FROM ABOVE: HLA-DRB1*12:02L HLA-DPA1*02:01-B1*13:01L HLA-D QA1*05:05-B1*03:01L HLA-DRB1*14:17L HLA-DPA1*01:02-B1*04:01L HLA -DRB1*10:01L HLA-DRB1*08:02L
NGIGVTQNVLY

SEQ ID NO: 13787 - protein, 12 aa, Severe acute respiratory syndrome coronavirus 2
  REGION 1..12: note = Table B: HLA-DRB1*04:03L HLA-DQA1*05:01-B1*02:01L HLA-DRB1*12:01L HLA-DQA1*03:01-B1*03:02L HLA-DRB1*14:17L HLA-DQA1*01:03-B1*06:01L
IGVTQNVLYENQ

SEQ ID NO: 13788 - protein, 10 aa, Severe acute respiratory syndrome coronavirus 2
  REGION 1..10: note = Table B: HLA-DRB1*04:03L HLA-DRB1*04:02L HLA-DRB1*01:02L HLA-DRB1*14:01L HLA-DQA1*01-B1*05L HLA-DQA1*03:01-B1*03:02L HLA-DRB1*16:01L HLA-DQA1*02:01-B1*03:03L HLA-DRB1*15:03L
VLYENQKLIA

SEQ ID NO: 13789 - protein, 11 aa, Severe acute respiratory syndrome coronavirus 2
  REGION 1..11: note = Table B: HLA-DRB1*04:03L HLA-DQA1*03:01-B1*03:02L
ENQKLIANQFN

SEQ ID NO: 13790 - protein, 11 aa, Severe acute respiratory syndrome coronavirus 2
  REGION 1..11: note = Table B: HLA-DRB1*04:03L HLA-DRB1*01:03L HLA-DRB1*04:02L HLA-DQA1*01:02-B1*06:02L HLA-DPA1*03:01-B1*04:02L HLA-DQA1*01-B1*05L HLA-DQA1*05:01-B1*02:01L HLA-DPA1*01:03-B1*04:01L HLA-DPA1*01:03-B1*04:02L
  REGION 1..11: note = CONT. FROM ABOVE: HLA-DRB1*12:01L HLA-DPA1*03:01-B1*105:01L HLA- DRB1*14:17L HLA-DPA1*01:02-B1*04:01L HLA-DRB1*16:01L HLA-DQA1*01 :03-B1*06:01L HLA-DRB1*04:08L HLA-DQA1*02:01-B1*03:03L
LIANQFNSAIG

SEQ ID NO: 13791 - protein, 11 aa, Severe acute respiratory syndrome coronavirus 2
  REGION 1..11: note = Table B: HLA-DRB1*04:03L HLA-DRB1*13:03L HLA-DRB1*01:03L HLA-DRB1*04:02L HLA-DRB4*03:01NL HLA-DQA1*01-B1*05L HLA-DRB1*12:01L HLA-DRB1*14:54L HLA-DQA1*05:05-B1*03:01L HLA-DRB1*14:17L HLA-DPA1*01:02-B1*04:01L HLA-DRB1*16:01L
  REGION 1..11: note = CONT. FROM ABOVE: HLA-DQA1*02:01-B1*03:03L
IANQFNSAIGK

SEQ ID NO: 13792 - protein, 10 aa, Severe acute respiratory syndrome coronavirus 2
  REGION 1..10: note = Table B: HLA-DRB1*04:03L HLA-DQA1*01:02-B1*06:02L HLA-DQA1*03:01-B1*03:02L HLA-DQA1*01:03-B1*06:01L HLA-DQA1*02:01-B1*03:03L
AIGKIQDSLS

SEQ ID NO: 13793 - protein, 10 aa, Severe acute respiratory syndrome coronavirus 2
  REGION 1..10: note = Table B: HLA-DRB1*04:03L HLA-DRB1*04:02L HLA-DQA1*03:01-B1*03:02L HLA-DRB1*14:17L
IGKIQDSLSS

SEQ ID NO: 13794 - protein, 12 aa, Severe acute respiratory syndrome coronavirus 2
  REGION 1..12: note = Table B: HLA-DRB1*04:03L
GKIQDSLSSTAS

SEQ ID NO: 13795 - protein, 12 aa, Severe acute respiratory syndrome coronavirus 2
  REGION 1..12: note = Table B: HLA-DRB1*04:03L
KIQDSLSSTASA

SEQ ID NO: 13796 - protein, 10 aa, Severe acute respiratory syndrome coronavirus 2
  REGION 1..10: note = Table B: HLA-DRB1*04:03L HLA-DRB1*13:03L HLA-DRB1*01:03L HLA-DRB1*04:02L HLA-DRB4*03:01NL HLA-DRB1*12:01L HLA-DQA1*03:01-B1*03:02L HLA-DRB1*14:54L HLA-DQA1*05:05-B1*03:01L HLA-DRB1*14:17L HLA-DRB1*16:01L
  REGION 1..10: note = CONT. FROM ABOVE: HLA-DQA1*01:03-B1*06:01L HLA-DQA1*02:01-B1*03: 03L
LSSTASALGK

SEQ ID NO: 13797 - protein, 10 aa, Severe acute respiratory syndrome coronavirus 2
  REGION 1..10: note = Table B: HLA-DRB1*04:03L HLA-DQA1*03:01-B1*03:02L HLA-DQA1*02:01-B1*03:03L
GKLQDVVNQN

SEQ ID NO: 13798 - protein, 10 aa, Severe acute respiratory syndrome coronavirus 2
  REGION 1..10: note = Table B: HLA-DRB1*04:03L HLA-DRB1*04:02L HLA-DRB1*04:05L HLA-DQA1*05:01-B1*02:01L HLA-DRB1*04:10L HLA-DQA1*03:01-B1*03:02L HLA-DRB1*14:54L HLA-DRB1*14:17L
LQDVVNQNAQ

SEQ ID NO: 13799 - protein, 10 aa, Severe acute respiratory syndrome coronavirus 2
  REGION 1..10: note = Table B: HLA-DRB1*04:03L HLA-DRB1*13:02L HLA-DRB1*13:03L HLA-DRB1*01:03L HLA-DRB1*04:02L HLA-DRB1*01:02L HLA-DRB4*03:01NL HLA-DRB1*08:77L HLA-DRB1*14:01L HLA-DQA1*05:01-B1*02:01L HLA-DRB1*12:01L HLA-DRB1*12:02L HLA-DQA1*03:01-B1*03:02L
  REGION 1..10: note = CONT. FROM ABOVE: HLA-DRB1*14:54L HLA-DRB1*14:17L HLA-DRB1*16:01 L HLA-DQA1*02:01-B1*03:03L HLA-DRB1*15:03L
VVNQNAQALN

SEQ ID NO: 13800 - protein, 12 aa, Severe acute respiratory syndrome coronavirus 2
  REGION 1..12: note = Table B: HLA-DRB1*04:03L HLA-DRB1*04:02L
NQNAQALNTLVK

SEQ ID NO: 13801 - protein, 10 aa, Severe acute respiratory syndrome coronavirus 2
  REGION 1..10: note = Table B: HLA-DRB1*04:03L HLA-DRB1*04:02L HLA-DRB4*03:01NL HLA-DQA1*03:01-B1*03:02L HLA-DRB1*14:17L HLA-DQA1*01:03-B1*06:01L HLA-DQA1*02:01-B1*03:03L
AQALNTLVKQ

SEQ ID NO: 13802 - protein, 10 aa, Severe acute respiratory syndrome coronavirus 2
  REGION 1..10: note = Table B: HLA-DRB1*04:03L HLA-DRB1*04:02L HLA-DQA1*01:02-B1*06:02L HLA-DQA1*03:01-B1*03:02L HLA-DRB1*14:17L HLA-DQA1*01:03-B1*06:01L HLA-DQA1*02:01-B1*03:03L
NTLVKQLSSN

SEQ ID NO: 13803 - protein, 10 aa, Severe acute respiratory syndrome coronavirus 2
  REGION 1..10: note = Table B: HLA-DRB1*04:03L HLA-DRB1*04:02L HLA-DRB1*12:01L HLA-DQA1*03:01-B1*03:02L HLA-DRB1*14:17L HLA-DQA1*02:01-B1*03:03L
LVKQLSSNFG

SEQ ID NO: 13804 - protein, 11 aa, Severe acute respiratory syndrome coronavirus 2
  REGION 1..11: note = Table B: HLA-DRB1*04:03L
VKQLSSNFGAI

SEQ ID NO: 13805 - protein, 10 aa, Severe acute respiratory syndrome coronavirus 2
  REGION 1..10: note = Table B: HLA-DRB1*04:03L HLA-DQA1*01-B1*05L HLA-DQA1*05:01-B1*02:01L HLA-DPA1*03:01-B1*105:01L HLA-DQA1*03:01-B1*03:02L HLA-DQA1*01:03-B1*06:01L HLA-DQA1*02:01-B1*03:03L
VLNDILSRLD

SEQ ID NO: 13806 - protein, 11 aa, Severe acute respiratory syndrome coronavirus 2
  REGION 1..11: note = Table B: HLA-DRB1*04:03L HLA-DRB1*04:02L HLA-DQA1*03:01-B1*03:02L
ILSRLDKVEAE

SEQ ID NO: 13807 - protein, 11 aa, Severe acute respiratory syndrome coronavirus 2
  REGION 1..11: note = Table B: HLA-DRB1*04:03L HLA-DQA1*01-B1*05L HLA-DRB1*14:17L HLA-DQA1*02:01-B1*03:03L
SRLDKVEAEVQ

SEQ ID NO: 13808 - protein, 12 aa, Severe acute respiratory syndrome coronavirus 2
  REGION 1..12: note = Table B: HLA-DRB1*04:03L HLA-DRB1*01:02L HLA-DQA1*05:01-B1*02:01L HLA-DPA1*03:01-B1*105:01L HLA-DRB1*14:54L
EVQIDRLITGRL

SEQ ID NO: 13809 - protein, 12 aa, Severe acute respiratory syndrome coronavirus 2
  REGION 1..12: note = Table B: HLA-DRB1*04:03L HLA-DRB1*04:05L HLA-DQA1*01:02-B1*06:02L HLA-DRB1*01:02L HLA-DQA1*05:01-B1*02:01L HLA-DPA1*03:01-B1*105:01L HLA-DRB1*04:08L
VQIDRLITGRLQ

SEQ ID NO: 13810 - protein, 11 aa, Severe acute respiratory syndrome coronavirus 2
  REGION 1..11: note = Table B: HLA-DRB1*04:03L HLA-DRB1*14:17L
GRLQSLQTYVT

SEQ ID NO: 13811 - protein, 11 aa, Severe acute respiratory syndrome coronavirus 2
  REGION 1..11: note = Table B: HLA-DRB1*04:03L HLA-DRB1*04:02L HLA-DRB1*14:17L
LQSLQTYVTQQ

SEQ ID NO: 13812 - protein, 11 aa, Severe acute respiratory syndrome coronavirus 2
  REGION 1..11: note = Table B: HLA-DRB1*04:03L
QSLQTYVTQQL

SEQ ID NO: 13813 - protein, 11 aa, Severe acute respiratory syndrome coronavirus 2
  REGION 1..11: note = Table B: HLA-DRB1*04:03L HLA-DQA1*01:02-B1*06:02L HLA-DRB1*01:02L HLA-DQA1*01-B1*05L HLA-DRB1*15:03L
LQTYVTQQLIR

SEQ ID NO: 13814 - protein, 10 aa, Severe acute respiratory syndrome coronavirus 2
  REGION 1..10: note = Table B: HLA-DRB1*04:03L HLA-DPA1*03:01-B1*04:02L HLA-DPA1*03:01-B1*105:01L HLA-DQA1*03:01-B1*03:02L HLA-DPA1*01:02-B1*04:01L HLA-DQA1*01:03-B1*06:01L HLA-DQA1*02:01-B1*03:03L
YVTQQLIRAA

SEQ ID NO: 13815 - protein, 10 aa, Severe acute respiratory syndrome coronavirus 2
  REGION 1..10: note = Table B: HLA-DRB1*04:03L HLA-DQA1*01:02-B1*06:02L HLA-DQA1*03:01-B1*03:02L HLA-DQA1*01:03-B1*06:01L HLA-DQA1*02:01-B1*03:03L
LIRAAEIRAS

SEQ ID NO: 13816 - protein, 11 aa, Severe acute respiratory syndrome coronavirus 2
  REGION 1..11: note = Table B: HLA-DRB1*04:03L HLA-DRB1*01:03L HLA-DRB1*04:02L HLA-DRB1*01:02L HLA-DQA1*01:01-B1*05:01L HLA-DRB1*08:01L HLA-DQA1*05:01-B1*02:01L HLA-DPA1*01:03-B1*04:02L HLA-DRB1*12:01L HLA-DRB1*14:17L HLA-DPA1*01:02-B1*04:01L
  REGION 1..11: note = CONT. FROM ABOVE: HLA-DRB1*16:01L HLA-DRB1*04:08L
IRAAEIRASAN

SEQ ID NO: 13817 - protein, 11 aa, Severe acute respiratory syndrome coronavirus 2
  REGION 1..11: note = Table B: HLA-DRB1*04:03L HLA-DRB1*13:03L HLA-DRB1*04:02L HLA-DRB1*04:05L HLA-DRB1*04:10L HLA-DRB1*14:54L HLA-DRB1*14:17L HLA-DRB1*16:01L
AEIRASANLAA

SEQ ID NO: 13818 - protein, 10 aa, Severe acute respiratory syndrome coronavirus 2
  REGION 1..10: note = Table B: HLA-DRB1*04:03L HLA-DRB1*04:02L HLA-DRB1*14:17L
IRASANLAAT

SEQ ID NO: 13819 - protein, 15 aa, Severe acute respiratory syndrome coronavirus 2
  REGION 1..15: note = Table B: HLA-DRB1*04:03L
LAATKMSECVLGQSK

SEQ ID NO: 13820 - protein, 12 aa, Severe acute respiratory syndrome coronavirus 2
  REGION 1..12: note = Table B: HLA-DRB1*04:03L HLA-DQA1*01:02-B1*06:02L HLA-DPA1*03:01-B1*105:01L
GYHLMSFPQSAP

SEQ ID NO: 13821 - protein, 10 aa, Severe acute respiratory syndrome coronavirus 2
  REGION 1..10: note = Table B: HLA-DRB1*04:03L HLA-DRB1*04:02L HLA-DQA1*03:01-B1*03:02L HLA-DRB1*14:17L HLA-DQA1*02:01-B1*03:03L
LMSFPQSAPH

SEQ ID NO: 13822 - protein, 11 aa, Severe acute respiratory syndrome coronavirus 2
  REGION 1..11: note = Table B: HLA-DRB1*04:03L
SFPQSAPHGVV

SEQ ID NO: 13823 - protein, 12 aa, Severe acute respiratory syndrome coronavirus 2
  REGION 1..12: note = Table B: HLA-DRB1*04:03L HLA-DRB1*01:02L HLA-DPA1*03:01-B1*04:02L HLA-DRB1*14:01L HLA-DRB1*12:01L HLA-DPA1*03:01-B1*105:01L HLA-DPA1*01:02-B1*04:01L HLA-DRB1*15:03L
GVVFLHVTYVPA

SEQ ID NO: 13824 - protein, 10 aa, Severe acute respiratory syndrome coronavirus 2
  REGION 1..10: note = Table B: HLA-DRB1*04:03L HLA-DQA1*03:01-B1*03:02L HLA-DRB1*14:17L HLA-DQA1*01:03-B1*06:01L HLA-DQA1*02:01-B1*03:03L
LHVTYVPAQE

SEQ ID NO: 13825 - protein, 10 aa, Severe acute respiratory syndrome coronavirus 2
  REGION 1..10: note = Table B: HLA-DRB1*04:03L HLA-DRB1*01:03L HLA-DRB1*04:05M HLA-DQA1*01:02-B1*06:02L HLA-DRB1*01:01L HLA-DRB1*01:02L HLA-DRB1*08:77L HLA-DPA1*03:01-B1*04:02L HLA-DRB1*11:03L HLA-DRB1*14:02L HLA-DQA1*01:01-B1*05:01L HLA-DRB1*11:01L
  REGION 1..10: note = CONT. FROM ABOVE: HLA-DQA1*05:05-B1*03:19L HLA-DQA1*05:01-B1*02: 01L HLA-DRB4*01:01L HLA-DPA1*01:03-B1*04:01L HLA-DQA1*05:05-B1*0 3:116L HLA-DPA1*01:03-B1*04:02L HLA-DRB1*12:01L HLA-DPA1*02:01-B 1*13:01M HLA-DPA1*03:01-B1*105:01L HLA-DRB1*16:01L
  REGION 1..10: note = CONT. FROM ABOVE: HLA-DQA1*01:03-B1*06:01M HLA-DQA1*02:01-B1*03: 03L HLA-DRB1*15:03L
TYVPAQEKNF

SEQ ID NO: 13826 - protein, 13 aa, Severe acute respiratory syndrome coronavirus 2
  REGION 1..13: note = Table B: HLA-DRB1*04:03L HLA-DRB1*13:02L HLA-DRB1*13:03L HLA-DRB1*01:02L HLA-DRB1*11:04L HLA-DRB1*08:01L HLA-DRB1*13:01L HLA-DRB1*12:01L HLA-DRB1*14:17L HLA-DRB1*04:08L HLA-DRB1*15:03L
PAICHDGKAHFPR

SEQ ID NO: 13827 - protein, 10 aa, Severe acute respiratory syndrome coronavirus 2
  REGION 1..10: note = Table B: HLA-DRB1*04:03L HLA-DRB1*01:03L HLA-DRB1*04:05M HLA-DQA1*01:02-B1*06:02L HLA-DRB1*01:01L HLA-DRB1*01:02L HLA-DRB1*08:77L HLA-DPA1*03:01-B1*04:02L HLA-DRB1*11:03L HLA-DRB1*14:02L HLA-DQA1*01:01-B1*05:01L HLA-DRB1*11:01L
  REGION 1..10: note = CONT. FROM ABOVE: HLA-DQA1*05:05-B1*03:19L HLA-DQA1*05:01-B1*02: 01L HLA-DRB4*01:01L HLA-DPA1*01:03-B1*04:01L HLA-DQA1*05:05-B1*0 3:116L HLA-DRB1*12:01L HLA-DPA1*02:01-B1*13:01M HLA-DPA1*03:01-B 1*105:01L HLA-DRB1*16:01L HLA-DQA1*01:03-B1*06:01M
  REGION 1..10: note = CONT. FROM ABOVE: HLA-DQA1*02:01-B1*03:03L HLA-DRB1*15:03L
VFVSNGTHWF

SEQ ID NO: 13828 - protein, 10 aa, Severe acute respiratory syndrome coronavirus 2
  REGION 1..10: note = Table B: HLA-DRB1*04:03L HLA-DQA1*03:01-B1*03:02L HLA-DRB1*14:17L HLA-DQA1*02:01-B1*03:03L
VTQRNFYEPQ

SEQ ID NO: 13829 - protein, 14 aa, Severe acute respiratory syndrome coronavirus 2
  REGION 1..14: note = Table B: HLA-DRB1*04:03L HLA-DRB1*04:05L HLA-DRB1*01:02L HLA-DPA1*01:03-B1*03:01L HLA-DPA1*03:01-B1*04:02L HLA-DRB1*12:01L HLA-DPA1*02:01-B1*13:01L HLA-DRB1*04:08L
TQRNFYEPQIITTD

SEQ ID NO: 13830 - protein, 10 aa, Severe acute respiratory syndrome coronavirus 2
  REGION 1..10: note = Table B: HLA-DRB1*04:03L HLA-DRB1*14:17L
IITTDNTFVS

SEQ ID NO: 13831 - protein, 11 aa, Severe acute respiratory syndrome coronavirus 2
  REGION 1..11: note = Table B: HLA-DRB1*04:03L
ITTDNTFVSGN

SEQ ID NO: 13832 - protein, 12 aa, Severe acute respiratory syndrome coronavirus 2
  REGION 1..12: note = Table B: HLA-DRB1*04:03L
DPLQPELDSFKE

SEQ ID NO: 13833 - protein, 12 aa, Severe acute respiratory syndrome coronavirus 2
  REGION 1..12: note = Table B: HLA-DRB1*04:03L HLA-DQA1*05:01-B1*02:01L HLA-DPA1*02:01-B1*13:01L HLA-DRB1*16:01L HLA-DQA1*01:03-B1*06:01L HLA-DQA1*02:01-B1*03:03L
QPELDSFKEELD

SEQ ID NO: 13834 - protein, 10 aa, Severe acute respiratory syndrome coronavirus 2
  REGION 1..10: note = Table B: HLA-DRB1*04:03L HLA-DRB1*04:02L HLA-DQA1*01-B1*05L HLA-DQA1*03:01-B1*03:02L
LDSFKEELDK

SEQ ID NO: 13835 - protein, 12 aa, Severe acute respiratory syndrome coronavirus 2
  REGION 1..12: note = Table B: HLA-DRB1*04:03L HLA-DRB1*13:03L HLA-DRB1*01:03L HLA-DRB1*04:02L HLA-DRB1*04:05L HLA-DQA1*01:02-B1*06:02L HLA-DRB1*01:02L HLA-DRB4*03:01NL HLA-DRB1*14:01L HLA-DRB1*08:01L HLA-DRB1*12:01L HLA-DRB1*14:54L HLA-DRB1*14:17L
  REGION 1..12: note = CONT. FROM ABOVE: HLA-DPA1*01:02-B1*04:01L HLA-DRB1*16:01L HLA-D RB1*04:08L HLA-DQA1*02:01-B1*03:03L
LDKYFKNHTSPD

SEQ ID NO: 13836 - protein, 12 aa, Severe acute respiratory syndrome coronavirus 2
  REGION 1..12: note = Table B: HLA-DRB1*04:03L HLA-DRB1*13:03L HLA-DRB1*01:03L HLA-DRB1*04:02L HLA-DRB1*04:05L HLA-DRB1*14:01L HLA-DRB1*08:01L HLA-DRB1*12:01L HLA-DRB1*14:54L HLA-DRB1*14:17L HLA-DRB1*16:01L HLA-DRB1*04:08L
DKYFKNHTSPDV

SEQ ID NO: 13837 - protein, 10 aa, Severe acute respiratory syndrome coronavirus 2
  REGION 1..10: note = Table B: HLA-DRB1*04:03L HLA-DQA1*03:01-B1*03:02L HLA-DRB1*16:01L HLA-DQA1*02:01-B1*03:03L
FKNHTSPDVD

SEQ ID NO: 13838 - protein, 12 aa, Severe acute respiratory syndrome coronavirus 2
  REGION 1..12: note = Table B: HLA-DRB1*04:03L HLA-DRB1*04:02L HLA-DQA1*05:01-B1*02:01L HLA-DRB1*12:01L HLA-DRB1*14:17L HLA-DRB1*16:01L
LGDISGINASVV

SEQ ID NO: 13839 - protein, 11 aa, Severe acute respiratory syndrome coronavirus 2
  REGION 1..11: note = Table B: HLA-DRB1*04:03L HLA-DRB1*04:02L HLA-DQA1*01:02-B1*06:02L HLA-DRB1*01:02L HLA-DRB4*03:01NL HLA-DQA1*05:01-B1*02:01L HLA-DRB1*12:01L HLA-DPA1*03:01-B1*105:01L HLA-DRB1*14:17L HLA-DRB1*16:01L
  REGION 1..11: note = CONT. FROM ABOVE: HLA-DQA1*01:03-B1*06:01L
DISGINASVVN

SEQ ID NO: 13840 - protein, 12 aa, Severe acute respiratory syndrome coronavirus 2
  REGION 1..12: note = Table B: HLA-DRB1*04:03L HLA-DRB1*04:02L HLA-DQA1*01:02-B1*06:02L HLA-DQA1*05:01-B1*02:01L HLA-DPA1*03:01-B1*105:01L HLA-DRB1*14:17L HLA-DQA1*01:03-B1*06:01L
ISGINASVVNIQ

SEQ ID NO: 13841 - protein, 13 aa, Severe acute respiratory syndrome coronavirus 2
  REGION 1..13: note = Table B: HLA-DRB1*04:03L HLA-DRB1*01:03L HLA-DRB1*04:02L HLA-DRB1*04:05L HLA-DRB1*01:02L HLA-DRB1*12:01L HLA-DRB1*16:01L HLA-DRB1*04:08L HLA-DQA1*02:01-B1*03:03L
IQKEIDRLNEVAK

SEQ ID NO: 13842 - protein, 10 aa, Severe acute respiratory syndrome coronavirus 2
  REGION 1..10: note = Table B: HLA-DRB1*04:03L HLA-DQA1*03:01-B1*03:02L HLA-DRB1*14:17L
LNEVAKNLNE

SEQ ID NO: 13843 - protein, 11 aa, Severe acute respiratory syndrome coronavirus 2
  REGION 1..11: note = Table B: HLA-DRB1*04:03L HLA-DRB1*12:02L
NEVAKNLNESL

SEQ ID NO: 13844 - protein, 12 aa, Severe acute respiratory syndrome coronavirus 2
  REGION 1..12: note = Table B: HLA-DRB1*04:03L HLA-DRB1*12:02L HLA-DRB1*14:54L
EVAKNLNESLID

SEQ ID NO: 13845 - protein, 13 aa, Severe acute respiratory syndrome coronavirus 2
  REGION 1..13: note = Table B: HLA-DRB1*04:03L HLA-DRB1*13:02L HLA-DRB1*04:05L HLA-DQA1*01:02-B1*06:02L HLA-DRB1*01:02L HLA-DRB3*02:01L HLA-DPA1*01:03-B1*03:01L HLA-DPA1*03:01-B1*04:02L HLA-DRB1*12:01L HLA-DPA1*03:01-B1*105:01L
  REGION 1..13: note = CONT. FROM ABOVE: HLA-DPA1*01:03-B1*104:01L HLA-DQA1*05:05-B1*03 :01L HLA-DPA1*01:02-B1*04:01L HLA-DRB1*16:01L HLA-DQA1*01:03-B1* 06:01L HLA-DQA1*02:01-B1*03:03L HLA-DRB1*15:03L
VAKNLNESLIDLQ

SEQ ID NO: 13846 - protein, 12 aa, Severe acute respiratory syndrome coronavirus 2
  REGION 1..12: note = Table B: HLA-DRB1*04:03L HLA-DRB1*04:02L HLA-DRB1*04:05L HLA-DQA1*01:02-B1*06:02L HLA-DQA1*05:01-B1*02:01L HLA-DRB1*04:10L HLA-DPA1*02:01-B1*13:01L HLA-DPA1*03:01-B1*105:01L HLA-DQA1*03:01-B1*03:02L
  REGION 1..12: note = CONT. FROM ABOVE: HLA-DRB1*16:01L HLA-DQA1*01:03-B1*06:01L HLA-D QA1*02:01-B1*03:03L
KNLNESLIDLQE

SEQ ID NO: 13847 - protein, 12 aa, Severe acute respiratory syndrome coronavirus 2
  REGION 1..12: note = Table B: HLA-DRB1*04:03L
NESLIDLQELGK

SEQ ID NO: 13848 - protein, 11 aa, Severe acute respiratory syndrome coronavirus 2
  REGION 1..11: note = Table B: HLA-DRB1*04:03L HLA-DRB1*13:03L HLA-DRB1*04:02L HLA-DRB1*14:01L HLA-DRB1*08:01L HLA-DRB1*14:54L HLA-DRB1*14:17L HLA-DQA1*02:01-B1*03:03L
IDLQELGKYEQ

SEQ ID NO: 13849 - protein, 10 aa, Severe acute respiratory syndrome coronavirus 2
  REGION 1..10: note = Table B: HLA-DRB1*04:03L HLA-DRB1*01:03L HLA-DRB1*04:05M HLA-DQA1*01:02-B1*06:02L HLA-DRB1*01:01L HLA-DRB1*01:02L HLA-DRB1*08:77L HLA-DQA1*01:01-B1*05:01L HLA-DRB1*11:01L HLA-DQA1*05:05-B1*03:19L HLA-DRB4*01:01L
  REGION 1..10: note = CONT. FROM ABOVE: HLA-DPA1*02:01-B1*13:01H HLA-DRB1*16:01L HLA-D QA1*01:03-B1*06:01M HLA-DQA1*02:01-B1*03:03L HLA-DRB1*15:03L
QYIKWPWYIW

SEQ ID NO: 13850 - protein, 11 aa, Severe acute respiratory syndrome coronavirus 2
  REGION 1..11: note = Table B: HLA-DRB1*04:03L HLA-DRB1*13:03L HLA-DRB1*14:02L HLA-DRB1*16:01L HLA-DQA1*02:01-B1*03:03L
KFDEDDSEPVL

SEQ ID NO: 13851 - protein, 11 aa, Severe acute respiratory syndrome coronavirus 2
  REGION 1..11: note = Table B: HLA-DRB1*04:03L HLA-DRB1*01:03L HLA-DRB1*04:02L HLA-DRB1*04:05L HLA-DRB4*03:01NL HLA-DRB1*14:02L HLA-DRB1*12:01L HLA-DRB1*14:54L HLA-DRB1*14:17L HLA-DRB1*16:01L HLA-DRB1*04:08L HLA-DQA1*02:01-B1*03:03L
FDEDDSEPVLK

SEQ ID NO: 13852 - protein, 14 aa, Severe acute respiratory syndrome coronavirus 2
  REGION 1..14: note = Table B: HLA-DRB1*04:03L HLA-DRB1*13:02L HLA-DRB1*11:04L HLA-DRB1*11:01L HLA-DRB3*01:01L HLA-DPA1*02:01-B1*13:01L HLA-DPA1*03:01-B1*105:01L HLA-DQA1*05:05-B1*03:01L
DSEPVLKGVKLHYT

SEQ ID NO: 13853 - protein, 11 aa, Severe acute respiratory syndrome coronavirus 2
  REGION 1..11: note = Table B: HLA-DRB1*04:03L
FMRIFTIGTVT

SEQ ID NO: 13854 - protein, 10 aa, Severe acute respiratory syndrome coronavirus 2
  REGION 1..10: note = Table B: HLA-DRB1*04:03L HLA-DRB1*13:02L HLA-DRB1*04:02L HLA-DRB4*03:01NL HLA-DRB1*12:01L HLA-DPA1*03:01-B1*105:01L HLA-DQA1*03:01-B1*03:02L HLA-DQA1*05:05-B1*03:01L HLA-DRB1*14:17L HLA-DRB1*16:01L HLA-DQA1*01:03-B1*06:01L
  REGION 1..10: note = CONT. FROM ABOVE: HLA-DQA1*02:01-B1*03:03L
IFTIGTVTLK

SEQ ID NO: 13855 - protein, 10 aa, Severe acute respiratory syndrome coronavirus 2
  REGION 1..10: note = Table B: HLA-DRB1*04:03L HLA-DRB1*04:02L HLA-DQA1*03:01-B1*03:02L HLA-DRB1*14:17L HLA-DQA1*01:03-B1*06:01L HLA-DQA1*02:01-B1*03:03L
TIGTVTLKQG

SEQ ID NO: 13856 - protein, 10 aa, Severe acute respiratory syndrome coronavirus 2
  REGION 1..10: note = Table B: HLA-DRB1*04:03L HLA-DQA1*01:02-B1*06:02L HLA-DQA1*03:01-B1*03:02L HLA-DQA1*01:03-B1*06:01L HLA-DQA1*02:01-B1*03:03L
IGTVTLKQGE

SEQ ID NO: 13857 - protein, 13 aa, Severe acute respiratory syndrome coronavirus 2
  REGION 1..13: note = Table B: HLA-DRB1*04:03L
TLKQGEIKDATPS

SEQ ID NO: 13858 - protein, 11 aa, Severe acute respiratory syndrome coronavirus 2
  REGION 1..11: note = Table B: HLA-DRB1*04:03L HLA-DQA1*02:01-B1*03:03L
QGEIKDATPSD

SEQ ID NO: 13859 - protein, 11 aa, Severe acute respiratory syndrome coronavirus 2
  REGION 1..11: note = Table B: HLA-DRB1*04:03L HLA-DRB1*04:02L HLA-DRB1*04:05L HLA-DRB3*02:01L HLA-DRB1*11:02L HLA-DRB4*01:01L HLA-DRB1*09:01L HLA-DPA1*01:03-B1*104:01L HLA-DRB1*10:01L HLA-DRB1*08:02L
GEIKDATPSDF

SEQ ID NO: 13860 - protein, 11 aa, Severe acute respiratory syndrome coronavirus 2
  REGION 1..11: note = Table B: HLA-DRB1*04:03L HLA-DQA1*01-B1*05L
DATPSDFVRAT

SEQ ID NO: 13861 - protein, 11 aa, Severe acute respiratory syndrome coronavirus 2
  REGION 1..11: note = Table B: HLA-DRB1*04:03L HLA-DRB1*14:17L HLA-DQA1*02:01-B1*03:03L
TIPIQASLPFG

SEQ ID NO: 13862 - protein, 11 aa, Severe acute respiratory syndrome coronavirus 2
  REGION 1..11: note = Table B: HLA-DRB1*04:03L HLA-DRB1*14:17L
VALLAVFQSAS

SEQ ID NO: 13863 - protein, 10 aa, Severe acute respiratory syndrome coronavirus 2
  REGION 1..10: note = Table B: HLA-DRB1*04:03L HLA-DRB1*14:17L
LLAVFQSASK

SEQ ID NO: 13864 - protein, 12 aa, Severe acute respiratory syndrome coronavirus 2
  REGION 1..12: note = Table B: HLA-DRB1*04:03L HLA-DRB1*01:03L HLA-DRB1*01:02L HLA-DPA1*01:03-B1*03:01L HLA-DRB1*12:01L HLA-DPA1*01:03-B1*02:01L HLA-DQA1*02:01-B1*03:03L
TVYSHLLLVAAG

SEQ ID NO: 13865 - protein, 13 aa, Severe acute respiratory syndrome coronavirus 2
  REGION 1..13: note = Table B: HLA-DRB1*04:03L HLA-DQA1*01:02-B1*06:02L
SHLLLVAAGLEAP

SEQ ID NO: 13866 - protein, 13 aa, Severe acute respiratory syndrome coronavirus 2
  REGION 1..13: note = Table B: HLA-DRB1*04:03L HLA-DQA1*01:02-B1*06:02L HLA-DPA1*03:01-B1*105:01L HLA-DRB1*15:03L
HLLLVAAGLEAPF

SEQ ID NO: 13867 - protein, 14 aa, Severe acute respiratory syndrome coronavirus 2
  REGION 1..14: note = Table B: HLA-DRB1*04:03L HLA-DRB1*01:03L HLA-DRB1*04:02L HLA-DRB1*04:05L HLA-DRB1*01:02L HLA-DPA1*01:03-B1*03:01L HLA-DRB1*08:01L HLA-DRB1*11:01L HLA-DRB4*02:01NL HLA-DPA1*01:03-B1*04:02L HLA-DRB1*12:01L HLA-DRB1*16:01L
NSVTSSIVITSGDG

SEQ ID NO: 13868 - protein, 12 aa, Severe acute respiratory syndrome coronavirus 2
  REGION 1..12: note = Table B: HLA-DRB1*04:03L HLA-DRB1*04:02L HLA-DQA1*05:01-B1*02:01L HLA-DQA1*03:01-B1*03:02L HLA-DRB1*14:17L HLA-DQA1*02:01-B1*03:03L
SSIVITSGDGTT

SEQ ID NO: 13869 - protein, 11 aa, Severe acute respiratory syndrome coronavirus 2
  REGION 1..11: note = Table B: HLA-DRB1*04:03L
HDYQIGGYTEK

SEQ ID NO: 13870 - protein, 11 aa, Severe acute respiratory syndrome coronavirus 2
  REGION 1..11: note = Table B: HLA-DRB1*04:03L HLA-DPA1*03:01-B1*04:02L HLA-DPA1*01:03-B1*04:01L HLA-DRB1*12:01L HLA-DPA1*03:01-B1*105:01L HLA-DRB1*16:01L HLA-DQA1*01:03-B1*06:01L HLA-DRB1*15:03L
VVLHSYFTSDY

SEQ ID NO: 13871 - protein, 12 aa, Severe acute respiratory syndrome coronavirus 2
  REGION 1..12: note = Table B: HLA-DRB1*04:03L HLA-DRB1*13:02L HLA-DRB1*01:02L HLA-DRB1*08:04L HLA-DRB3*02:01L HLA-DRB1*14:01L HLA-DRB1*08:01L HLA-DRB1*04:08L
HSYFTSDYYQLY

SEQ ID NO: 13872 - protein, 14 aa, Severe acute respiratory syndrome coronavirus 2
  REGION 1..14: note = Table B: HLA-DRB1*04:03L HLA-DRB1*13:02L HLA-DRB1*01:02L HLA-DRB1*08:04L HLA-DRB1*14:01L HLA-DRB1*08:01L HLA-DRB1*11:01L HLA-DRB3*01:01L
SYFTSDYYQLYSTQ

SEQ ID NO: 13873 - protein, 12 aa, Severe acute respiratory syndrome coronavirus 2
  REGION 1..12: note = Table B: HLA-DRB1*04:03L HLA-DRB1*08:77L HLA-DRB3*02:01L HLA-DPA1*01:03-B1*03:01L HLA-DRB1*14:01L HLA-DPA1*01:03-B1*04:01L HLA-DRB1*09:01L HLA-DPA1*01:03-B1*04:02L HLA-DQA1*05:05-B1*03:01L
TSDYYQLYSTQL

SEQ ID NO: 13874 - protein, 12 aa, Severe acute respiratory syndrome coronavirus 2
  REGION 1..12: note = Table B: HLA-DRB1*04:03L
SDYYQLYSTQLS

SEQ ID NO: 13875 - protein, 12 aa, Severe acute respiratory syndrome coronavirus 2
  REGION 1..12: note = Table B: HLA-DRB1*04:03L HLA-DRB1*01:03L HLA-DRB1*01:01L HLA-DRB1*14:17L HLA-DRB1*04:08L
DYYQLYSTQLST

SEQ ID NO: 13876 - protein, 11 aa, Severe acute respiratory syndrome coronavirus 2
  REGION 1..11: note = Table B: HLA-DRB1*04:03L HLA-DRB1*04:02L HLA-DQA1*01-B1*05L HLA-DRB1*14:17L HLA-DRB1*16:01L
YQLYSTQLSTD

SEQ ID NO: 13877 - protein, 10 aa, Severe acute respiratory syndrome coronavirus 2
  REGION 1..10: note = Table B: HLA-DRB1*04:03L HLA-DRB1*13:03L HLA-DRB1*04:02L HLA-DRB4*03:01NL HLA-DQA1*05:01-B1*02:01L HLA-DRB1*12:01L HLA-DQA1*03:01-B1*03:02L HLA-DRB1*14:17L HLA-DRB1*16:01L HLA-DQA1*02:01-B1*03:03L
QLSTDTGVEH

SEQ ID NO: 13878 - protein, 10 aa, Severe acute respiratory syndrome coronavirus 2
  REGION 1..10: note = Table B: HLA-DRB1*04:03L HLA-DRB1*14:17L
QIHTIDGSSG

SEQ ID NO: 13879 - protein, 11 aa, Severe acute respiratory syndrome coronavirus 2
  REGION 1..11: note = Table B: HLA-DRB1*04:03L HLA-DRB1*14:17L
IHTIDGSSGVV

SEQ ID NO: 13880 - protein, 12 aa, Severe acute respiratory syndrome coronavirus 2
  REGION 1..12: note = Table B: HLA-DRB1*04:03L
HTIDGSSGVVNP

SEQ ID NO: 13881 - protein, 12 aa, Severe acute respiratory syndrome coronavirus 2
  REGION 1..12: note = Table B: HLA-DRB1*04:03L HLA-DRB1*01:03L HLA-DRB1*04:02L HLA-DRB1*04:05L HLA-DRB1*01:02L HLA-DPA1*01:03-B1*03:01L HLA-DQA1*01:01-B1*05:01L HLA-DRB1*08:01L HLA-DQA1*01-B1*05L HLA-DPA1*01:03-B1*04:02L HLA-DRB1*12:01L
IDGSSGVVNPVM

SEQ ID NO: 13882 - protein, 12 aa, Severe acute respiratory syndrome coronavirus 2
  REGION 1..12: note = Table B: HLA-DRB1*04:03L HLA-DRB1*14:01L HLA-DQA1*03:01-B1*03:02L
SGVVNPVMEPIY

SEQ ID NO: 13883 - protein, 12 aa, Severe acute respiratory syndrome coronavirus 2
  REGION 1..12: note = Table B: HLA-DRB1*04:03L
GVVNPVMEPIYD

SEQ ID NO: 13884 - protein, 11 aa, Severe acute respiratory syndrome coronavirus 2
  REGION 1..11: note = Table B: HLA-DRB1*04:03L HLA-DQA1*01-B1*05L
PVMEPIYDEPT

SEQ ID NO: 13885 - protein, 13 aa, Severe acute respiratory syndrome coronavirus 2
  REGION 1..13: note = Table B: HLA-DRB1*04:03L
PIYDEPTTTTSVP

SEQ ID NO: 13886 - protein, 12 aa, Severe acute respiratory syndrome coronavirus 2
  REGION 1..12: note = Table B: HLA-DRB1*04:03L
EETGTLIVNSVL

SEQ ID NO: 13887 - protein, 11 aa, Severe acute respiratory syndrome coronavirus 2
  REGION 1..11: note = Table B: HLA-DRB1*04:03L
LVTLAILTALR

SEQ ID NO: 13888 - protein, 11 aa, Severe acute respiratory syndrome coronavirus 2
  REGION 1..11: note = Table B: HLA-DRB1*04:03L HLA-DRB1*08:77L HLA-DQA1*05:05-B1*03:19L HLA-DRB1*12:02L
VTLAILTALRL

SEQ ID NO: 13889 - protein, 10 aa, Severe acute respiratory syndrome coronavirus 2
  REGION 1..10: note = Table B: HLA-DRB1*04:03L HLA-DQA1*03:01-B1*03:02L HLA-DRB1*14:17L HLA-DQA1*01:03-B1*06:01L HLA-DQA1*02:01-B1*03:03L
NIVNVSLVKP

SEQ ID NO: 13890 - protein, 13 aa, Severe acute respiratory syndrome coronavirus 2
  REGION 1..13: note = Table B: HLA-DRB1*04:03L HLA-DRB1*04:04L HLA-DPA1*03:01-B1*105:01L HLA-DPA1*01:03-B1*02:01L HLA-DQA1*01:03-B1*06:01L
VKPSFYVYSRVKN

SEQ ID NO: 13891 - protein, 11 aa, Severe acute respiratory syndrome coronavirus 2
  REGION 1..11: note = Table B: HLA-DRB1*04:03L HLA-DRB1*01:03L HLA-DRB1*04:02L HLA-DRB1*14:17L HLA-DRB1*16:01L HLA-DRB1*04:08L
VYSRVKNLNSS

SEQ ID NO: 13892 - protein, 12 aa, Severe acute respiratory syndrome coronavirus 2
  REGION 1..12: note = Table B: HLA-DRB1*04:03L HLA-DRB1*01:03L HLA-DRB1*04:05L HLA-DRB1*01:02L HLA-DRB1*14:01L HLA-DRB1*12:01L HLA-DRB1*16:01L HLA-DRB1*04:08L HLA-DRB1*15:03L
SRVKNLNSSRVP

SEQ ID NO: 13893 - protein, 11 aa, Severe acute respiratory syndrome coronavirus 2
  REGION 1..11: note = Table B: HLA-DRB1*04:03L HLA-DRB1*01:03L HLA-DQA1*01-B1*05L HLA-DRB1*12:01L
SNGTITVEELK

SEQ ID NO: 13894 - protein, 13 aa, Severe acute respiratory syndrome coronavirus 2
  REGION 1..13: note = Table B: HLA-DRB1*04:03L HLA-DRB1*04:05L HLA-DQA1*01:02-B1*06:02L HLA-DPA1*01:03-B1*03:01L HLA-DPA1*03:01-B1*04:02L HLA-DQA1*05:01-B1*02:01L HLA-DPA1*01:02-B1*04:01L HLA-DRB1*16:01L
LKKLLEQWNLVIG

SEQ ID NO: 13895 - protein, 12 aa, Severe acute respiratory syndrome coronavirus 2
  REGION 1..12: note = Table B: HLA-DRB1*04:03L HLA-DRB1*04:02L HLA-DRB1*14:01L HLA-DRB1*14:17L
AAVYRINWITGG

SEQ ID NO: 13896 - protein, 10 aa, Severe acute respiratory syndrome coronavirus 2
  REGION 1..10: note = Table B: HLA-DRB1*04:03L HLA-DQA1*03:01-B1*03:02L
RINWITGGIA

SEQ ID NO: 13897 - protein, 13 aa, Severe acute respiratory syndrome coronavirus 2
  REGION 1..13: note = Table B: HLA-DRB1*04:03L HLA-DPA1*01:03-B1*03:01L HLA-DPA1*03:01-B1*04:02L HLA-DPA1*01:03-B1*04:02L HLA-DQA1*03:01-B1*03:02L HLA-DRB1*16:01L HLA-DRB1*04:08L
INWITGGIAIAMA

SEQ ID NO: 13898 - protein, 13 aa, Severe acute respiratory syndrome coronavirus 2
  REGION 1..13: note = Table B: HLA-DRB1*04:03L HLA-DPA1*03:01-B1*04:02L HLA-DQA1*05:05-B1*03:19L HLA-DRB1*12:01L HLA-DQA1*05:05-B1*03:01L HLA-DRB1*15:03L
TGGIAIAMACLVG

SEQ ID NO: 13899 - protein, 10 aa, Severe acute respiratory syndrome coronavirus 2
  REGION 1..10: note = Table B: HLA-DRB1*04:03L HLA-DRB1*01:03L HLA-DRB1*04:05L HLA-DQA1*01:02-B1*06:02L HLA-DRB1*01:01L HLA-DRB1*01:02L HLA-DPA1*03:01-B1*04:02L HLA-DRB1*14:02L HLA-DQA1*01:01-B1*05:01L HLA-DQA1*05:05-B1*03:19L
  REGION 1..10: note = CONT. FROM ABOVE: HLA-DRB4*01:01L HLA-DPA1*01:03-B1*04:01L HLA-D RB1*12:01L HLA-DPA1*02:01-B1*13:01M HLA-DPA1*03:01-B1*105:01L HL A-DPA1*01:02-B1*04:01L HLA-DRB1*16:01L HLA-DQA1*01:03-B1*06:01M HLA-DQA1*02:01-B1*03:03L HLA-DRB1*15:03L
SYFIASFRLF

SEQ ID NO: 13900 - protein, 10 aa, Severe acute respiratory syndrome coronavirus 2
  REGION 1..10: note = Table B: HLA-DRB1*04:03L HLA-DRB1*04:02L HLA-DRB1*12:01L HLA-DRB1*14:17L HLA-DRB1*16:01L
NILLNVPLHG

SEQ ID NO: 13901 - protein, 10 aa, Severe acute respiratory syndrome coronavirus 2
  REGION 1..10: note = Table B: HLA-DRB1*04:03L HLA-DRB1*04:02L HLA-DQA1*03:01-B1*03:02L HLA-DRB1*14:17L HLA-DPA1*01:02-B1*04:01L HLA-DRB1*16:01L HLA-DQA1*02:01-B1*03:03L
ILTRPLLESE

SEQ ID NO: 13902 - protein, 13 aa, Severe acute respiratory syndrome coronavirus 2
  REGION 1..13: note = Table B: HLA-DRB1*04:03L HLA-DQA1*01:02-B1*06:02L HLA-DPA1*01:03-B1*03:01L HLA-DPA1*03:01-B1*04:02L HLA-DQA1*05:01-B1*02:01L HLA-DPA1*03:01-B1*105:01L HLA-DQA1*01:03-B1*06:01L HLA-DRB1*15:03L
RPLLESELVIGAV

SEQ ID NO: 13903 - protein, 12 aa, Severe acute respiratory syndrome coronavirus 2
  REGION 1..12: note = Table B: HLA-DRB1*04:03L HLA-DQA1*01:02-B1*06:02L
SELVIGAVILRG

SEQ ID NO: 13904 - protein, 12 aa, Severe acute respiratory syndrome coronavirus 2
  REGION 1..12: note = Table B: HLA-DRB1*04:03L
ELVIGAVILRGH

SEQ ID NO: 13905 - protein, 12 aa, Severe acute respiratory syndrome coronavirus 2
  REGION 1..12: note = Table B: HLA-DRB1*04:03L HLA-DRB1*14:17L HLA-DQA1*02:01-B1*03:03L
DLPKEITVATSR

SEQ ID NO: 13906 - protein, 10 aa, Severe acute respiratory syndrome coronavirus 2
  REGION 1..10: note = Table B: HLA-DRB1*04:03L HLA-DRB1*04:02L HLA-DQA1*03:01-B1*03:02L HLA-DRB1*14:17L HLA-DQA1*01:03-B1*06:01L HLA-DQA1*02:01-B1*03:03L
ITVATSRTLS

SEQ ID NO: 13907 - protein, 13 aa, Severe acute respiratory syndrome coronavirus 2
  REGION 1..13: note = Table B: HLA-DRB1*04:03L HLA-DRB1*04:02L HLA-DRB1*04:05L HLA-DRB1*01:02L HLA-DRB1*08:01L HLA-DQA1*03:01-B1*03:02L HLA-DRB1*14:17L HLA-DRB1*16:01L HLA-DRB1*04:08L HLA-DQA1*02:01-B1*03:03L
SRTLSYYKLGASQ

SEQ ID NO: 13908 - protein, 12 aa, Severe acute respiratory syndrome coronavirus 2
  REGION 1..12: note = Table B: HLA-DRB1*04:03L HLA-DRB1*01:03L HLA-DRB1*04:02L HLA-DRB1*04:05L HLA-DQA1*01:02-B1*06:02L HLA-DRB1*01:02L HLA-DPA1*01:02-B1*04:01L HLA-DRB1*16:01L HLA-DRB1*04:08L
TLSYYKLGASQR

SEQ ID NO: 13909 - protein, 10 aa, Severe acute respiratory syndrome coronavirus 2
  REGION 1..10: note = Table B: HLA-DRB1*04:03L HLA-DRB1*13:03L HLA-DRB1*01:03L HLA-DRB1*04:02L HLA-DRB1*01:02L HLA-DRB4*03:01NL HLA-DRB1*08:77L HLA-DRB1*11:03L HLA-DRB1*14:02L HLA-DRB1*12:01L HLA-DQA1*03:01-B1*03:02L HLA-DRB1*14:17L
  REGION 1..10: note = CONT. FROM ABOVE: HLA-DPA1*01:02-B1*04:01L HLA-DRB1*16:01L HLA-D RB1*04:08L HLA-DQA1*02:01-B1*03:03L
LGASQRVAGD

SEQ ID NO: 13910 - protein, 14 aa, Severe acute respiratory syndrome coronavirus 2
  REGION 1..14: note = Table B: HLA-DRB1*04:03L HLA-DRB1*04:04L HLA-DRB1*01:01L HLA-DRB1*11:02L HLA-DQA1*05:05-B1*03:116L HLA-DRB1*07:01L
DSGFAAYSRYRIGN

SEQ ID NO: 13911 - protein, 11 aa, Severe acute respiratory syndrome coronavirus 2
  REGION 1..11: note = Table B: HLA-DRB1*04:03L HLA-DRB1*04:02L HLA-DQA1*01-B1*05L HLA-DRB1*14:17L HLA-DQA1*02:01-B1*03:03L
IGNYKLNTDHS

SEQ ID NO: 13912 - protein, 11 aa, Severe acute respiratory syndrome coronavirus 2
  REGION 1..11: note = Table B: HLA-DRB1*04:03L HLA-DRB1*13:03L HLA-DRB1*01:03L HLA-DRB1*04:02L HLA-DRB1*04:05L HLA-DRB4*03:01NL HLA-DRB1*14:54L HLA-DRB1*14:17L HLA-DRB1*16:01L
GNYKLNTDHSS

SEQ ID NO: 13913 - protein, 10 aa, Severe acute respiratory syndrome coronavirus 2
  REGION 1..10: note = Table B: HLA-DRB1*04:03L HLA-DRB1*01:03L HLA-DRB1*04:02L HLA-DRB4*03:01NL HLA-DRB1*14:54L HLA-DRB1*14:17L HLA-DRB1*16:01L
YKLNTDHSSS

SEQ ID NO: 13914 - protein, 10 aa, Severe acute respiratory syndrome coronavirus 2
  REGION 1..10: note = Table B: HLA-DRB1*04:03L HLA-DQA1*03:01-B1*03:02L
NTDHSSSSDN

SEQ ID NO: 13915 - protein, 14 aa, Severe acute respiratory syndrome coronavirus 2
  REGION 1..14: note = Table B: HLA-DRB1*04:03L HLA-DQA1*01:02-B1*06:02L HLA-DPA1*01:03-B1*03:01L HLA-DQA1*01:01-B1*05:01L HLA-DQA1*05:05-B1*03:19L HLA-DPA1*02:01-B1*13:01L HLA-DQA1*05:05-B1*03:01L
DHSSSSDNIALLVQ

SEQ ID NO: 13916 - protein, 13 aa, Severe acute respiratory syndrome coronavirus 2
  REGION 1..13: note = Table B: HLA-DRB1*04:03L HLA-DRB1*13:02L HLA-DRB1*01:02L HLA-DRB1*14:01L HLA-DRB1*16:01L HLA-DQA1*01:03-B1*06:01L
IAEILLIIMRTFK

SEQ ID NO: 13917 - protein, 10 aa, Severe acute respiratory syndrome coronavirus 2
  REGION 1..10: note = Table B: HLA-DRB1*04:03L HLA-DRB1*01:02L HLA-DRB1*14:01L HLA-DRB1*12:01L HLA-DPA1*01:02-B1*04:01L HLA-DRB1*16:01L HLA-DRB1*15:03L
LIIMRTFKVS

SEQ ID NO: 13918 - protein, 12 aa, Severe acute respiratory syndrome coronavirus 2
  REGION 1..12: note = Table B: HLA-DRB1*04:03L HLA-DRB1*13:02L HLA-DRB1*01:03L HLA-DRB1*04:05L HLA-DQA1*01:02-B1*06:02L HLA-DRB1*01:02L HLA-DRB1*08:04L HLA-DPA1*01:03-B1*03:01L HLA-DPA1*03:01-B1*04:02L HLA-DRB1*14:01L HLA-DRB1*12:01L
  REGION 1..12: note = CONT. FROM ABOVE: HLA-DPA1*02:01-B1*13:01L HLA-DPA1*03:01-B1*105 :01L HLA-DPA1*01:03-B1*104:01L HLA-DPA1*01:02-B1*04:01L HLA-DRB1 *16:01L HLA-DRB1*04:08L HLA-DRB1*15:03L
IIMRTFKVSIWN

SEQ ID NO: 13919 - protein, 11 aa, Severe acute respiratory syndrome coronavirus 2
  REGION 1..11: note = Table B: HLA-DRB1*04:03L
YIINLIIKNLS

SEQ ID NO: 13920 - protein, 10 aa, Severe acute respiratory syndrome coronavirus 2
  REGION 1..10: note = Table B: HLA-DRB1*04:03L HLA-DRB1*04:02L HLA-DRB1*14:17L
INLIIKNLSK

SEQ ID NO: 13921 - protein, 11 aa, Severe acute respiratory syndrome coronavirus 2
  REGION 1..11: note = Table B: HLA-DRB1*04:03L HLA-DRB1*04:02L HLA-DRB1*12:01L HLA-DRB1*14:17L HLA-DPA1*01:02-B1*04:01L HLA-DRB1*16:01L
LIIKNLSKSLT

SEQ ID NO: 13922 - protein, 11 aa, Severe acute respiratory syndrome coronavirus 2
  REGION 1..11: note = Table B: HLA-DRB1*04:03L HLA-DRB1*13:02L HLA-DRB1*13:03L HLA-DRB1*01:03L HLA-DRB1*04:02L HLA-DRB1*01:02L HLA-DRB4*03:01NL HLA-DRB1*08:04L HLA-DRB1*12:01L HLA-DRB1*14:54L HLA-DRB1*14:17L HLA-DRB1*16:01L HLA-DRB1*04:08L HLA-DRB1*15:03L
IIKNLSKSLTE

SEQ ID NO: 13923 - protein, 14 aa, Severe acute respiratory syndrome coronavirus 2
  REGION 1..14: note = Table B: HLA-DRB1*04:03L HLA-DRB1*04:05L HLA-DRB1*04:08L
IKNLSKSLTENKYS

SEQ ID NO: 13924 - protein, 14 aa, Severe acute respiratory syndrome coronavirus 2
  REGION 1..14: note = Table B: HLA-DRB1*04:03L HLA-DRB1*13:02L HLA-DRB1*04:05L HLA-DRB1*01:02L HLA-DPA1*02:01-B1*13:01L HLA-DRB1*04:08L
LSKSLTENKYSQLD

SEQ ID NO: 13925 - protein, 14 aa, Severe acute respiratory syndrome coronavirus 2
  REGION 1..14: note = Table B: HLA-DRB1*04:03L HLA-DRB1*01:03L HLA-DRB1*04:02L HLA-DRB1*04:05L HLA-DRB1*01:02L HLA-DRB1*08:04L HLA-DRB1*08:01L HLA-DRB1*04:08L
SKSLTENKYSQLDE

SEQ ID NO: 13926 - protein, 11 aa, Severe acute respiratory syndrome coronavirus 2
  REGION 1..11: note = Table B: HLA-DRB1*04:03L HLA-DRB1*16:01L HLA-DQA1*02:01-B1*03:03L
YSQLDEEQPME

SEQ ID NO: 13927 - protein, 12 aa, Severe acute respiratory syndrome coronavirus 2
  REGION 1..12: note = Table B: HLA-DRB1*04:03L HLA-DQA1*01:02-B1*06:02L HLA-DQA1*01:01-B1*05:01L HLA-DRB1*12:01L HLA-DPA1*02:01-B1*13:01L HLA-DPA1*03:01-B1*105:01L HLA-DRB1*16:01L HLA-DQA1*01:03-B1*06:01L
SQLDEEQPMEID

SEQ ID NO: 13928 - protein, 13 aa, Severe acute respiratory syndrome coronavirus 2
  REGION 1..13: note = Table B: HLA-DRB1*04:03L
LALITLATCELYH

SEQ ID NO: 13929 - protein, 14 aa, Severe acute respiratory syndrome coronavirus 2
  REGION 1..14: note = Table B: HLA-DRB1*04:03L HLA-DRB1*01:02L
TVLLKEPCSSGTYE

SEQ ID NO: 13930 - protein, 13 aa, Severe acute respiratory syndrome coronavirus 2
  REGION 1..13: note = Table B: HLA-DRB1*04:03L HLA-DRB1*04:02L HLA-DQA1*01:01-B1*05:01L HLA-DPA1*03:01-B1*105:01L
YEGNSPFHPLADN

SEQ ID NO: 13931 - protein, 10 aa, Severe acute respiratory syndrome coronavirus 2
  REGION 1..10: note = Table B: HLA-DRB1*04:03L HLA-DRB1*13:03L HLA-DRB1*01:03L HLA-DRB1*04:02L HLA-DRB4*03:01NL HLA-DQA1*01-B1*05L HLA-DQA1*03:01-B1*03:02L HLA-DRB1*14:17L HLA-DRB1*16:01L HLA-DQA1*02:01-B1*03:03L
SPFHPLADNK

SEQ ID NO: 13932 - protein, 10 aa, Severe acute respiratory syndrome coronavirus 2
  REGION 1..10: note = Table B: HLA-DRB1*04:03L HLA-DRB1*01:02L HLA-DRB1*12:01L HLA-DRB1*16:01L HLA-DRB1*15:03L
FHPLADNKFA

SEQ ID NO: 13933 - protein, 11 aa, Severe acute respiratory syndrome coronavirus 2
  REGION 1..11: note = Table B: HLA-DRB1*04:03L
HPLADNKFALT

SEQ ID NO: 13934 - protein, 13 aa, Severe acute respiratory syndrome coronavirus 2
  REGION 1..13: note = Table B: HLA-DRB1*04:03L HLA-DRB1*01:03L HLA-DRB1*04:05L HLA-DRB1*01:02L HLA-DRB1*08:04L HLA-DQA1*01-B1*05L HLA-DQA1*05:01-B1*02:01L HLA-DPA1*01:03-B1*04:01L HLA-DPA1*01:03-B1*02:01L HLA-DPA1*01:03-B1*104:01L
  REGION 1..13: note = CONT. FROM ABOVE: HLA-DRB1*15:03L
ADNKFALTCFSTQ

SEQ ID NO: 13935 - protein, 14 aa, Severe acute respiratory syndrome coronavirus 2
  REGION 1..14: note = Table B: HLA-DRB1*04:03L HLA-DRB1*13:02L HLA-DRB1*01:03L HLA-DRB1*04:05L HLA-DRB1*01:02L HLA-DRB1*08:04L HLA-DRB1*14:02L HLA-DRB1*11:01L HLA-DQA1*05:01-B1*02:01L HLA-DPA1*01:03-B1*04:01L HLA-DPA1*01:03-B1*02:01L
  REGION 1..14: note = CONT. FROM ABOVE: HLA-DPA1*01:03-B1*104:01L
DNKFALTCFSTQFA

SEQ ID NO: 13936 - protein, 14 aa, Severe acute respiratory syndrome coronavirus 2
  REGION 1..14: note = Table B: HLA-DRB1*04:03L HLA-DQA1*01:02-B1*06:02L HLA-DRB1*01:02L HLA-DRB1*15:03L
KFALTCFSTQFAFA

SEQ ID NO: 13937 - protein, 12 aa, Severe acute respiratory syndrome coronavirus 2
  REGION 1..12: note = Table B: HLA-DRB1*04:03L HLA-DQA1*01:02-B1*06:02L HLA-DQA1*05:05-B1*03:19L HLA-DPA1*03:01-B1*105:01L HLA-DQA1*03:01-B1*03:02L HLA-DQA1*05:05-B1*03:01L HLA-DQA1*01:03-B1*06:01L HLA-DQA1*02:01-B1*03:03L
FSTQFAFACPDG

SEQ ID NO: 13938 - protein, 13 aa, Severe acute respiratory syndrome coronavirus 2
  REGION 1..13: note = Table B: HLA-DRB1*04:03L HLA-DRB1*13:02L HLA-DRB1*13:03L HLA-DRB1*01:03L HLA-DRB1*04:02L HLA-DRB1*04:05L HLA-DRB4*03:01NL HLA-DRB1*08:04L HLA-DRB1*08:77L HLA-DRB3*02:01L HLA-DPA1*01:03-B1*03:01L HLA-DPA1*03:01-B1*04:02L
  REGION 1..13: note = CONT. FROM ABOVE: HLA-DRB1*14:01L HLA-DQA1*01:01-B1*05:01L HLA-D RB1*08:01L HLA-DQA1*01-B1*05L HLA-DPA1*01:03-B1*04:01L HLA-DRB1* 04:10L HLA-DRB1*09:01L HLA-DPA1*01:03-B1*04:02L HLA-DRB1*12:02L HLA-DPA1*02:01-B1*13:01L HLA-DPA1*01:03-B1*104:01L
  REGION 1..13: note = CONT. FROM ABOVE: HLA-DRB1*14:17L HLA-DPA1*01:02-B1*04:01L HLA-D RB1*07:01L HLA-DRB1*10:01L
STQFAFACPDGVK

SEQ ID NO: 13939 - protein, 13 aa, Severe acute respiratory syndrome coronavirus 2
  REGION 1..13: note = Table B: HLA-DRB1*04:03L HLA-DRB1*04:02L HLA-DRB1*04:05L HLA-DRB1*01:01L HLA-DRB1*08:01L HLA-DRB1*10:01L
TQFAFACPDGVKH

SEQ ID NO: 13940 - protein, 15 aa, Severe acute respiratory syndrome coronavirus 2
  REGION 1..15: note = Table B: HLA-DRB1*04:03L HLA-DRB1*04:04L HLA-DPA1*01:03-B1*03:01L HLA-DPA1*03:01-B1*04:02L HLA-DRB1*03:01L HLA-DRB1*11:02L HLA-DRB1*13:01L HLA-DRB1*14:54L HLA-DQA1*05:05-B1*03:01L HLA-DRB1*15:01L
VKHVYQLRARSVSPK

SEQ ID NO: 13941 - protein, 11 aa, Severe acute respiratory syndrome coronavirus 2
  REGION 1..11: note = Table B: HLA-DRB1*04:03L HLA-DRB1*13:02L HLA-DRB1*11:02L HLA-DRB4*01:01L HLA-DPA1*02:01-B1*13:01L HLA-DRB1*10:01L
FIRQEEVQELY

SEQ ID NO: 13942 - protein, 12 aa, Severe acute respiratory syndrome coronavirus 2
  REGION 1..12: note = Table B: HLA-DRB1*04:03L HLA-DRB1*01:02L HLA-DQA1*03:01-B1*03:02L
IRQEEVQELYSP

SEQ ID NO: 13943 - protein, 13 aa, Severe acute respiratory syndrome coronavirus 2
  REGION 1..13: note = Table B: HLA-DRB1*04:03L HLA-DRB1*13:02L HLA-DRB1*04:05L HLA-DQA1*05:05-B1*03:01L
RQEEVQELYSPIF

SEQ ID NO: 13944 - protein, 13 aa, Severe acute respiratory syndrome coronavirus 2
  REGION 1..13: note = Table B: HLA-DRB1*04:03L
QEEVQELYSPIFL

SEQ ID NO: 13945 - protein, 12 aa, Severe acute respiratory syndrome coronavirus 2
  REGION 1..12: note = Table B: HLA-DRB1*04:03L HLA-DRB1*13:02L HLA-DRB1*01:03L HLA-DRB1*04:05L HLA-DQA1*01:02-B1*06:02L HLA-DRB1*14:01L HLA-DRB1*11:04L HLA-DRB1*08:01L HLA-DRB1*11:01L HLA-DRB1*12:01L HLA-DRB3*01:01L HLA-DPA1*02:01-B1*13:01L
  REGION 1..12: note = CONT. FROM ABOVE: HLA-DPA1*03:01-B1*105:01L HLA-DPA1*01:02-B1*04 :01L HLA-DQA1*01:03-B1*06:01L HLA-DRB1*04:08L HLA-DQA1*02:01-B1* 03:03L HLA-DRB1*15:03L
ITLCFTLKRKTE

SEQ ID NO: 13946 - protein, 10 aa, Severe acute respiratory syndrome coronavirus 2
  REGION 1..10: note = Table B: HLA-DRB1*04:03L HLA-DQA1*03:01-B1*03:02L
SLELQDHNET

SEQ ID NO: 13947 - protein, 10 aa, Severe acute respiratory syndrome coronavirus 2
  REGION 1..10: note = Table B: HLA-DRB1*04:03L HLA-DRB1*04:02L HLA-DQA1*03:01-B1*03:02L HLA-DRB1*14:17L
GIITTVAAFH

SEQ ID NO: 13948 - protein, 10 aa, Severe acute respiratory syndrome coronavirus 2
  REGION 1..10: note = Table B: HLA-DRB1*04:03L HLA-DRB1*04:02L HLA-DRB1*04:05L HLA-DRB4*03:01NL HLA-DRB1*04:10L HLA-DRB1*12:01L HLA-DQA1*03:01-B1*03:02L HLA-DRB1*14:54L HLA-DRB1*14:17L HLA-DRB1*16:01L HLA-DQA1*02:01-B1*03:03L
IITTVAAFHQ

SEQ ID NO: 13949 - protein, 12 aa, Severe acute respiratory syndrome coronavirus 2
  REGION 1..12: note = Table B: HLA-DRB1*04:03L HLA-DRB1*04:02L HLA-DRB1*04:05L HLA-DRB1*12:01L HLA-DRB1*14:17L HLA-DRB1*16:01L
VAAFHQECSLQS

SEQ ID NO: 13950 - protein, 12 aa, Severe acute respiratory syndrome coronavirus 2
  REGION 1..12: note = Table B: HLA-DRB1*04:03L HLA-DRB1*13:02L HLA-DRB1*13:03L HLA-DRB1*01:03L HLA-DRB1*04:02L HLA-DRB1*04:05L HLA-DRB1*08:04L HLA-DRB1*14:01L HLA-DQA1*05:01-B1*02:01L HLA-DRB1*12:01L HLA-DRB3*01:01L HLA-DQA1*03:01-B1*03:02L HLA-DRB1*14:54L
  REGION 1..12: note = CONT. FROM ABOVE: HLA-DRB1*14:17L HLA-DRB1*16:01L
HQPYVVDDPCPI

SEQ ID NO: 13951 - protein, 10 aa, Severe acute respiratory syndrome coronavirus 2
  REGION 1..10: note = Table B: HLA-DRB1*04:03L HLA-DRB1*13:02L HLA-DRB1*13:03L HLA-DRB1*01:03L HLA-DRB1*04:02L HLA-DRB1*04:05L HLA-DRB1*01:02L HLA-DRB4*03:01NL HLA-DRB1*08:04L HLA-DRB1*08:77L HLA-DRB3*02:01L HLA-DPA1*01:03-B1*03:01L HLA-DPA1*03:01-B1*04:02L
  REGION 1..10: note = CONT. FROM ABOVE: HLA-DRB1*14:01L HLA-DRB1*11:03L HLA-DRB1*11:04 L HLA-DRB1*14:02L HLA-DQA1*01-B1*05L HLA-DQA1*05:01-B1*02:01L HL A-DRB1*12:01L HLA-DRB1*12:02L HLA-DRB3*01:01L HLA-DPA1*03:01-B1* 105:01L HLA-DQA1*03:01-B1*03:02L HLA-DRB1*14:54L HLA-DRB1*14:17L
  REGION 1..10: note = CONT. FROM ABOVE: HLA-DPA1*01:02-B1*04:01L HLA-DRB1*16:01L HLA-D RB1*04:08L HLA-DQA1*02:01-B1*03:03L HLA-DRB1*15:03L
YVVDDPCPIH

SEQ ID NO: 13952 - protein, 12 aa, Severe acute respiratory syndrome coronavirus 2
  REGION 1..12: note = Table B: HLA-DRB1*04:03L HLA-DRB1*04:05L HLA-DRB1*04:10L HLA-DRB1*14:17L
APLIELCVDEAG

SEQ ID NO: 13953 - protein, 11 aa, Severe acute respiratory syndrome coronavirus 2
  REGION 1..11: note = Table B: HLA-DRB1*04:03L HLA-DRB1*04:02L HLA-DQA1*01:02-B1*06:02L HLA-DRB1*14:17L
IELCVDEAGSK

SEQ ID NO: 13954 - protein, 11 aa, Severe acute respiratory syndrome coronavirus 2
  REGION 1..11: note = Table B: HLA-DRB1*04:03L HLA-DRB1*13:03L HLA-DRB1*01:03L HLA-DRB1*04:02L HLA-DRB1*04:05L HLA-DQA1*01:02-B1*06:02L HLA-DRB4*03:01NL HLA-DPA1*01:03-B1*03:01L HLA-DQA1*01:01-B1*05:01L HLA-DQA1*01-B1*05L
  REGION 1..11: note = CONT. FROM ABOVE: HLA-DQA1*05:05-B1*03:116L HLA-DPA1*01:03-B1*04 :02L HLA-DRB1*12:01L HLA-DPA1*03:01-B1*105:01L HLA-DRB1*14:54L H LA-DRB1*14:17L HLA-DRB1*16:01L HLA-DQA1*01:03-B1*06:01L HLA-DRB1 *04:08L
VDEAGSKSPIQ

SEQ ID NO: 13955 - protein, 10 aa, Severe acute respiratory syndrome coronavirus 2
  REGION 1..10: note = Table B: HLA-DRB1*04:03L HLA-DRB1*14:17L
YIDIGNYTVS

SEQ ID NO: 13956 - protein, 14 aa, Severe acute respiratory syndrome coronavirus 2
  REGION 1..14: note = Table B: HLA-DRB1*04:03L HLA-DRB1*01:02L HLA-DQA1*01-B1*05L HLA-DPA1*01:03-B1*04:02L HLA-DRB1*12:01L HLA-DPA1*02:01-B1*13:01L HLA-DPA1*01:03-B1*104:01L HLA-DRB1*15:03L
IDIGNYTVSCLPFT

SEQ ID NO: 13957 - protein, 14 aa, Severe acute respiratory syndrome coronavirus 2
  REGION 1..14: note = Table B: HLA-DRB1*04:03L HLA-DRB1*13:02L HLA-DRB1*01:03L HLA-DRB1*04:05L HLA-DRB1*01:02L HLA-DRB1*08:04L HLA-DRB3*02:01L HLA-DRB1*14:02L HLA-DRB1*08:01L HLA-DQA1*01-B1*05L HLA-DPA1*01:03-B1*04:01L HLA-DRB1*12:01L
  REGION 1..14: note = CONT. FROM ABOVE: HLA-DPA1*02:01-B1*13:01L HLA-DPA1*01:03-B1*104 :01L HLA-DPA1*01:02-B1*04:01L HLA-DRB1*16:01L HLA-DRB1*04:08L
IGNYTVSCLPFTIN

SEQ ID NO: 13958 - protein, 11 aa, Severe acute respiratory syndrome coronavirus 2
  REGION 1..11: note = Table B: HLA-DRB1*04:03L
QEPKLGSLVVR

SEQ ID NO: 13959 - protein, 11 aa, Severe acute respiratory syndrome coronavirus 2
  REGION 1..11: note = Table B: HLA-DRB1*04:03L HLA-DQA1*03:01-B1*03:02L HLA-DQA1*02:01-B1*03:03L
APRITFGGPSD

SEQ ID NO: 13960 - protein, 11 aa, Severe acute respiratory syndrome coronavirus 2
  REGION 1..11: note = Table B: HLA-DRB1*04:03L
RPQGLPNNTAS

SEQ ID NO: 13961 - protein, 10 aa, Severe acute respiratory syndrome coronavirus 2
  REGION 1..10: note = Table B: HLA-DRB1*04:03L
VPINTNSSPD

SEQ ID NO: 13962 - protein, 14 aa, Severe acute respiratory syndrome coronavirus 2
  REGION 1..14: note = Table B: HLA-DRB1*04:03L HLA-DRB1*01:03L HLA-DRB1*04:02L HLA-DRB1*01:02L HLA-DPA1*01:03-B1*03:01L HLA-DPA1*01:03-B1*04:02L HLA-DRB1*12:01L HLA-DRB1*04:08L HLA-DRB1*15:03L
YYLGTGPEAGLPYG

SEQ ID NO: 13963 - protein, 12 aa, Severe acute respiratory syndrome coronavirus 2
  REGION 1..12: note = Table B: HLA-DRB1*04:03L HLA-DRB1*01:03L HLA-DRB1*04:02L HLA-DQA1*01:01-B1*05:01L HLA-DRB1*08:01L HLA-DRB1*11:01L HLA-DPA1*01:03-B1*04:02L HLA-DPA1*03:01-B1*105:01L
GPEAGLPYGANK

SEQ ID NO: 13964 - protein, 10 aa, Severe acute respiratory syndrome coronavirus 2
  REGION 1..10: note = Table B: HLA-DRB1*04:03L HLA-DQA1*03:01-B1*03:02L HLA-DQA1*02:01-B1*03:03L
GLPYGANKDG

SEQ ID NO: 13965 - protein, 12 aa, Severe acute respiratory syndrome coronavirus 2
  REGION 1..12: note = Table B: HLA-DRB1*04:03L HLA-DRB1*13:02L HLA-DRB1*01:03L HLA-DRB1*08:77L HLA-DRB3*02:01L HLA-DPA1*01:03-B1*03:01L HLA-DRB1*14:02L HLA-DRB4*01:01L HLA-DPA1*01:03-B1*04:01L HLA-DPA1*01:03-B1*04:02L HLA-DRB1*12:01L
  REGION 1..12: note = CONT. FROM ABOVE: HLA-DPA1*01:03-B1*104:01L HLA-DQA1*05:05-B1*03 :01L
LPYGANKDGIIW

SEQ ID NO: 13966 - protein, 14 aa, Severe acute respiratory syndrome coronavirus 2
  REGION 1..14: note = Table B: HLA-DRB1*04:03L HLA-DRB1*13:02L HLA-DRB1*01:03L HLA-DRB1*04:05L HLA-DRB1*01:02L HLA-DPA1*01:03-B1*03:01L HLA-DQA1*01:01-B1*05:01L HLA-DRB1*08:01L HLA-DRB1*11:01L HLA-DQA1*05:01-B1*02:01L HLA-DPA1*01:03-B1*04:02L
  REGION 1..14: note = CONT. FROM ABOVE: HLA-DRB1*12:01L HLA-DPA1*02:01-B1*13:01L HLA-D PA1*01:03-B1*104:01L HLA-DRB1*16:01L HLA-DRB1*04:08L HLA-DRB1*15 :03L
GANKDGIIWVATEG

SEQ ID NO: 13967 - protein, 12 aa, Severe acute respiratory syndrome coronavirus 2
  REGION 1..12: note = Table B: HLA-DRB1*04:03L HLA-DRB1*14:17L
KDGIIWVATEGA

SEQ ID NO: 13968 - protein, 12 aa, Severe acute respiratory syndrome coronavirus 2
  REGION 1..12: note = Table B: HLA-DRB1*04:03L HLA-DQA1*01:02-B1*06:02L HLA-DQA1*05:01-B1*02:01L HLA-DQA1*03:01-B1*03:02L HLA-DRB1*14:17L
DGIIWVATEGAL

SEQ ID NO: 13969 - protein, 11 aa, Severe acute respiratory syndrome coronavirus 2
  REGION 1..11: note = Table B: HLA-DRB1*04:03L HLA-DRB1*04:02L HLA-DRB1*04:04L HLA-DRB1*04:05L HLA-DQA1*01:02-B1*06:02L HLA-DRB1*01:02L HLA-DRB4*03:01NL HLA-DQA1*05:05-B1*03:19L HLA-DQA1*05:01-B1*02:01L HLA-DRB1*04:10L HLA-DRB1*12:01L
  REGION 1..11: note = CONT. FROM ABOVE: HLA-DQA1*03:01-B1*03:02L HLA-DRB1*14:54L HLA-D QA1*05:05-B1*03:01L HLA-DRB1*14:17L HLA-DRB1*16:01L HLA-DRB1*04: 08L HLA-DQA1*02:01-B1*03:03L
IIWVATEGALN

SEQ ID NO: 13970 - protein, 11 aa, Severe acute respiratory syndrome coronavirus 2
  REGION 1..11: note = Table B: HLA-DRB1*04:03L HLA-DRB1*01:03L HLA-DRB1*14:54L HLA-DQA1*05:05-B1*03:01L HLA-DRB1*16:01L HLA-DQA1*01:03-B1*06:01L HLA-DQA1*02:01-B1*03:03L
VATEGALNTPK

SEQ ID NO: 13971 - protein, 11 aa, Severe acute respiratory syndrome coronavirus 2
  REGION 1..11: note = Table B: HLA-DRB1*04:03L HLA-DQA1*05:01-B1*02:01L HLA-DQA1*01:03-B1*06:01L
ATEGALNTPKD

SEQ ID NO: 13972 - protein, 10 aa, Severe acute respiratory syndrome coronavirus 2
  REGION 1..10: note = Table B: HLA-DRB1*04:03L HLA-DQA1*03:01-B1*03:02L
ALNTPKDHIG

SEQ ID NO: 13973 - protein, 10 aa, Severe acute respiratory syndrome coronavirus 2
  REGION 1..10: note = Table B: HLA-DRB1*04:03L HLA-DRB1*13:03L HLA-DRB1*01:03L HLA-DRB1*04:02L HLA-DRB1*04:05L HLA-DRB4*03:01NL HLA-DQA1*01-B1*05L HLA-DQA1*03:01-B1*03:02L HLA-DRB1*14:17L HLA-DRB1*16:01L
GTRNPANNAA

SEQ ID NO: 13974 - protein, 11 aa, Severe acute respiratory syndrome coronavirus 2
  REGION 1..11: note = Table B: HLA-DRB1*04:03L
TRNPANNAAIV

SEQ ID NO: 13975 - protein, 10 aa, Severe acute respiratory syndrome coronavirus 2
  REGION 1..10: note = Table B: HLA-DRB1*04:03L HLA-DRB1*13:03L HLA-DRB1*04:02L HLA-DRB4*03:01NL HLA-DRB1*12:01L HLA-DQA1*03:01-B1*03:02L HLA-DQA1*05:05-B1*03:01L HLA-DRB1*14:17L HLA-DQA1*02:01-B1*03:03L
QLPQGTTLPK

SEQ ID NO: 13976 - protein, 10 aa, Severe acute respiratory syndrome coronavirus 2
  REGION 1..10: note = Table B: HLA-DRB1*04:03L HLA-DRB1*13:03L HLA-DQA1*03:01-B1*03:02L HLA-DQA1*02:01-B1*03:03L
LPQGTTLPKG

SEQ ID NO: 13977 - protein, 10 aa, Severe acute respiratory syndrome coronavirus 2
  REGION 1..10: note = Table B: HLA-DRB1*04:03L HLA-DRB1*13:03L HLA-DRB1*01:03L HLA-DRB1*04:02L HLA-DQA1*03:01-B1*03:02L HLA-DRB1*14:17L
YAEGSRGGSQ

SEQ ID NO: 13978 - protein, 11 aa, Severe acute respiratory syndrome coronavirus 2
  REGION 1..11: note = Table B: HLA-DRB1*04:03L HLA-DRB1*01:03L HLA-DRB1*04:02L HLA-DRB4*03:01NL HLA-DQA1*03:01-B1*03:02L HLA-DRB1*14:17L HLA-DRB1*16:01L
TPGSSRGTSPA

SEQ ID NO: 13979 - protein, 11 aa, Severe acute respiratory syndrome coronavirus 2
  REGION 1..11: note = Table B: HLA-DRB1*04:03L HLA-DQA1*03:01-B1*03:02L
SPARMAGNGGD

SEQ ID NO: 13980 - protein, 10 aa, Severe acute respiratory syndrome coronavirus 2
  REGION 1..10: note = Table B: HLA-DRB1*04:03L HLA-DRB1*14:01L
ALLLLDRLNQ

SEQ ID NO: 13981 - protein, 10 aa, Severe acute respiratory syndrome coronavirus 2
  REGION 1..10: note = Table B: HLA-DRB1*04:03L HLA-DPA1*03:01-B1*04:02L HLA-DRB1*14:01L HLA-DPA1*03:01-B1*105:01L HLA-DPA1*01:02-B1*04:01L
LLLDRLNQLE

SEQ ID NO: 13982 - protein, 12 aa, Severe acute respiratory syndrome coronavirus 2
  REGION 1..12: note = Table B: HLA-DRB1*04:03L HLA-DRB1*01:02L HLA-DRB1*14:17L
DRLNQLESKMSG

SEQ ID NO: 13983 - protein, 14 aa, Severe acute respiratory syndrome coronavirus 2
  REGION 1..14: note = Table B: HLA-DRB1*04:03L HLA-DRB1*13:03L HLA-DRB1*01:03L HLA-DRB1*04:05L HLA-DRB1*01:02L HLA-DRB1*08:04L HLA-DRB1*14:01L HLA-DRB1*11:04L HLA-DRB1*11:01L HLA-DRB1*16:01L HLA-DRB1*04:08L HLA-DRB1*08:03L
LNQLESKMSGKGQQ

SEQ ID NO: 13984 - protein, 11 aa, Severe acute respiratory syndrome coronavirus 2
  REGION 1..11: note = Table B: HLA-DRB1*04:03L HLA-DQA1*03:01-B1*03:02L
SGKGQQQQGQT

SEQ ID NO: 13985 - protein, 11 aa, Severe acute respiratory syndrome coronavirus 2
  REGION 1..11: note = Table B: HLA-DRB1*04:03L HLA-DQA1*03:01-B1*03:02L HLA-DRB1*14:17L
GQTVTKKSAAE

SEQ ID NO: 13986 - protein, 14 aa, Severe acute respiratory syndrome coronavirus 2
  REGION 1..14: note = Table B: HLA-DRB1*04:03L HLA-DQA1*01:01-B1*05:01L HLA-DPA1*02:01-B1*13:01L HLA-DRB1*15:03L
TVTKKSAAEASKKP

SEQ ID NO: 13987 - protein, 11 aa, Severe acute respiratory syndrome coronavirus 2
  REGION 1..11: note = Table B: HLA-DRB1*04:03L HLA-DQA1*03:01-B1*03:02L HLA-DRB1*14:17L
TKAYNVTQAFG

SEQ ID NO: 13988 - protein, 13 aa, Severe acute respiratory syndrome coronavirus 2
  REGION 1..13: note = Table B: HLA-DRB1*04:03L HLA-DRB1*14:01L
YNVTQAFGRRGPE

SEQ ID NO: 13989 - protein, 13 aa, Severe acute respiratory syndrome coronavirus 2
  REGION 1..13: note = Table B: HLA-DRB1*04:03L HLA-DQA1*01:01-B1*05:01L HLA-DQA1*01-B1*05L HLA-DQA1*05:05-B1*03:01L HLA-DRB1*16:01L HLA-DQA1*01:03-B1*06:01L HLA-DQA1*02:01-B1*03:03L
GPEQTQGNFGDQE

SEQ ID NO: 13990 - protein, 12 aa, Severe acute respiratory syndrome coronavirus 2
  REGION 1..12: note = Table B: HLA-DRB1*04:03L HLA-DRB1*04:02L HLA-DRB1*04:05L HLA-DQA1*01:01-B1*05:01L HLA-DRB1*12:01L HLA-DPA1*02:01-B1*13:01L HLA-DPA1*03:01-B1*105:01L HLA-DRB1*15:03L
TQGNFGDQELIR

SEQ ID NO: 13991 - protein, 12 aa, Severe acute respiratory syndrome coronavirus 2
  REGION 1..12: note = Table B: HLA-DRB1*04:03L HLA-DRB1*16:01L
QGNFGDQELIRQ

SEQ ID NO: 13992 - protein, 10 aa, Severe acute respiratory syndrome coronavirus 2
  REGION 1..10: note = Table B: HLA-DRB1*04:03L HLA-DQA1*01-B1*05L HLA-DQA1*05:01-B1*02:01L HLA-DQA1*03:01-B1*03:02L HLA-DRB1*16:01L HLA-DQA1*02:01-B1*03:03L
FGDQELIRQG

SEQ ID NO: 13993 - protein, 12 aa, Severe acute respiratory syndrome coronavirus 2
  REGION 1..12: note = Table B: HLA-DRB1*04:03L HLA-DRB1*04:02L HLA-DQA1*01:03-B1*06:01L
DQELIRQGTDYK

SEQ ID NO: 13994 - protein, 12 aa, Severe acute respiratory syndrome coronavirus 2
  REGION 1..12: note = Table B: HLA-DRB1*04:03L HLA-DRB1*01:03L HLA-DRB1*04:05L HLA-DQA1*01:02-B1*06:02L HLA-DRB1*01:02L HLA-DRB1*08:01L HLA-DRB1*12:01L HLA-DQA1*03:01-B1*03:02L HLA-DPA1*01:02-B1*04:01L HLA-DRB1*16:01L HLA-DRB1*04:08L
  REGION 1..12: note = CONT. FROM ABOVE: HLA-DQA1*02:01-B1*03:03L
IRQGTDYKHWPQ

SEQ ID NO: 13995 - protein, 11 aa, Severe acute respiratory syndrome coronavirus 2
  REGION 1..11: note = Table B: HLA-DRB1*04:03L HLA-DRB1*13:03L HLA-DRB1*04:02L HLA-DRB1*04:05L HLA-DQA1*01-B1*05L HLA-DQA1*03:01-B1*03:02L HLA-DRB1*14:17L HLA-DPA1*01:02-B1*04:01L HLA-DRB1*16:01L HLA-DRB1*04:08L
TDYKHWPQIAQ

SEQ ID NO: 13996 - protein, 13 aa, Severe acute respiratory syndrome coronavirus 2
  REGION 1..13: note = Table B: HLA-DRB1*04:03L HLA-DRB1*01:02L HLA-DQA1*03:01-B1*03:02L
YKHWPQIAQFAPS

SEQ ID NO: 13997 - protein, 12 aa, Severe acute respiratory syndrome coronavirus 2
  REGION 1..12: note = Table B: HLA-DRB1*04:03L HLA-DRB1*14:17L
PQIAQFAPSASA

SEQ ID NO: 13998 - protein, 10 aa, Severe acute respiratory syndrome coronavirus 2
  REGION 1..10: note = Table B: HLA-DRB1*04:03L HLA-DRB1*01:03L HLA-DRB1*04:05L HLA-DQA1*01:02-B1*06:02L HLA-DRB1*01:01L HLA-DRB1*08:77L HLA-DPA1*02:01-B1*13:01M HLA-DPA1*03:01-B1*105:01L HLA-DRB1*16:01L HLA-DQA1*01:03-B1*06:01M
  REGION 1..10: note = CONT. FROM ABOVE: HLA-DQA1*02:01-B1*03:03L HLA-DRB1*15:03L
QFAPSASAFF

SEQ ID NO: 13999 - protein, 10 aa, Severe acute respiratory syndrome coronavirus 2
  REGION 1..10: note = Table B: HLA-DRB1*04:03L HLA-DRB1*04:05L HLA-DQA1*03:01-B1*03:02L HLA-DRB1*14:17L
RIGMEVTPSG

SEQ ID NO: 14000 - protein, 14 aa, Severe acute respiratory syndrome coronavirus 2
  REGION 1..14: note = Table B: HLA-DRB1*04:03L HLA-DRB1*04:02L HLA-DRB1*01:02L HLA-DQA1*05:05-B1*03:01L
MEVTPSGTWLTYTG

SEQ ID NO: 14001 - protein, 10 aa, Severe acute respiratory syndrome coronavirus 2
  REGION 1..10: note = Table B: HLA-DRB1*04:03L HLA-DRB1*13:03L HLA-DRB1*01:03L HLA-DRB1*04:02L HLA-DRB1*04:05L HLA-DRB4*03:01NL HLA-DQA1*01-B1*05L HLA-DQA1*03:01-B1*03:02L HLA-DRB1*14:54L HLA-DRB1*14:17L HLA-DRB1*16:01L HLA-DQA1*02:01-B1*03:03L
AIKLDDKDPN

SEQ ID NO: 14002 - protein, 11 aa, Severe acute respiratory syndrome coronavirus 2
  REGION 1..11: note = Table B: HLA-DRB1*04:03L HLA-DRB1*13:02L HLA-DRB1*13:03L HLA-DRB1*01:03L HLA-DRB1*04:02L HLA-DRB1*04:05L HLA-DRB1*01:02L HLA-DRB4*03:01NL HLA-DRB1*08:04L HLA-DRB1*03:01L HLA-DRB1*14:01L HLA-DRB1*11:04L HLA-DRB1*08:01L HLA-DRB1*12:01L HLA-DRB3*01:01L
  REGION 1..11: note = CONT. FROM ABOVE: HLA-DRB1*14:54L HLA-DRB1*14:17L HLA-DRB1*16:01 L HLA-DRB1*04:08L HLA-DRB1*15:03L
IKLDDKDPNFK

SEQ ID NO: 14003 - protein, 13 aa, Severe acute respiratory syndrome coronavirus 2
  REGION 1..13: note = Table B: HLA-DRB1*04:03L HLA-DRB1*01:03L HLA-DRB1*04:02L HLA-DRB1*04:04L HLA-DRB1*04:05L HLA-DQA1*01:02-B1*06:02L HLA-DRB1*01:02L HLA-DRB1*08:04L HLA-DPA1*01:03-B1*03:01L HLA-DPA1*03:01-B1*04:02L HLA-DRB1*08:01L HLA-DRB1*11:01L
  REGION 1..13: note = CONT. FROM ABOVE: HLA-DPA1*01:03-B1*04:02L HLA-DRB1*12:01L HLA-D PA1*02:01-B1*13:01L HLA-DPA1*03:01-B1*105:01L HLA-DRB1*14:54L HL A-DPA1*01:03-B1*02:01L HLA-DRB1*14:17L HLA-DRB1*16:01L HLA-DQA1* 01:03-B1*06:01L HLA-DRB1*04:08L HLA-DQA1*02:01-B1*03:03L
  REGION 1..13: note = CONT. FROM ABOVE: HLA-DRB1*15:03L
DPNFKDQVILLNK

SEQ ID NO: 14004 - protein, 10 aa, Severe acute respiratory syndrome coronavirus 2
  REGION 1..10: note = Table B: HLA-DRB1*04:03L HLA-DRB1*13:03L HLA-DRB1*01:03L HLA-DRB1*04:02L HLA-DRB1*04:05L HLA-DQA1*01:02-B1*06:02L HLA-DRB4*03:01NL HLA-DRB1*08:04L HLA-DRB1*14:01L HLA-DRB1*11:04L HLA-DRB1*08:01L HLA-DRB1*04:10L HLA-DRB1*12:01L
  REGION 1..10: note = CONT. FROM ABOVE: HLA-DQA1*03:01-B1*03:02L HLA-DRB1*14:54L HLA-D RB1*14:17L HLA-DRB1*16:01L HLA-DRB1*04:08L HLA-DRB1*08:03L HLA-D QA1*02:01-B1*03:03L
VILLNKHIDA

SEQ ID NO: 14005 - protein, 10 aa, Severe acute respiratory syndrome coronavirus 2
  REGION 1..10: note = Table B: HLA-DRB1*04:03L HLA-DRB1*04:02L HLA-DQA1*01-B1*05L
IDAYKTFPPT

SEQ ID NO: 14006 - protein, 11 aa, Severe acute respiratory syndrome coronavirus 2
  REGION 1..11: note = Table B: HLA-DRB1*04:03L HLA-DRB1*04:05L HLA-DRB1*01:02L HLA-DRB1*08:77L HLA-DPA1*01:03-B1*03:01L HLA-DQA1*01:01-B1*05:01L HLA-DQA1*05:05-B1*03:19L HLA-DRB4*02:01NL HLA-DPA1*01:02-B1*04:01L HLA-DRB1*04:08L
  REGION 1..11: note = CONT. FROM ABOVE: HLA-DRB1*15:03L
DETQALPQRQK

SEQ ID NO: 14007 - protein, 12 aa, Severe acute respiratory syndrome coronavirus 2
  REGION 1..12: note = Table B: HLA-DRB1*04:03L HLA-DQA1*05:01-B1*02:01L HLA-DRB1*12:01L
QQTVTLLPAADL

SEQ ID NO: 14008 - protein, 11 aa, Severe acute respiratory syndrome coronavirus 2
  REGION 1..11: note = Table B: HLA-DRB1*04:03L HLA-DQA1*03:01-B1*03:02L
LLPAADLDDFS

SEQ ID NO: 14009 - protein, 11 aa, Severe acute respiratory syndrome coronavirus 2
  REGION 1..11: note = Table B: HLA-DRB1*04:03L HLA-DQA1*05:01-B1*02:01L HLA-DQA1*03:01-B1*03:02L HLA-DQA1*02:01-B1*03:03L
LPAADLDDFSK

SEQ ID NO: 14010 - protein, 12 aa, Severe acute respiratory syndrome coronavirus 2
  REGION 1..12: note = Table B: HLA-DRB1*04:03L HLA-DRB1*04:02L
ADLDDFSKQLQQ

SEQ ID NO: 14011 - protein, 11 aa, Severe acute respiratory syndrome coronavirus 2
  REGION 1..11: note = Table B: HLA-DRB1*04:03L HLA-DRB1*04:02L HLA-DRB1*14:17L HLA-DPA1*01:02-B1*04:01L
LDDFSKQLQQS

SEQ ID NO: 14012 - protein, 13 aa, Severe acute respiratory syndrome coronavirus 2
  REGION 1..13: note = Table B: HLA-DRB1*04:03L
DDFSKQLQQSMSS

SEQ ID NO: 14013 - protein, 12 aa, Severe acute respiratory syndrome coronavirus 2
  REGION 1..12: note = Table B: HLA-DRB1*04:03L HLA-DRB1*14:17L
SKQLQQSMSSAD

SEQ ID NO: 14014 - protein, 13 aa, Severe acute respiratory syndrome coronavirus 2
  REGION 1..13: note = Table B: HLA-DRB1*04:03L HLA-DRB1*04:02L HLA-DRB1*04:05L HLA-DRB1*04:10L HLA-DQA1*03:01-B1*03:02L HLA-DRB1*14:17L
KQLQQSMSSADST

SEQ ID NO: 14015 - protein, 10 aa, Severe acute respiratory syndrome coronavirus 2
  REGION 1..10: note = Table B: HLA-DRB1*04:03L HLA-DQA1*05:01-B1*02:01L HLA-DRB1*12:01L HLA-DRB1*15:03L
YINVFAFPFT

SEQ ID NO: 14016 - protein, 12 aa, Severe acute respiratory syndrome coronavirus 2
  REGION 1..12: note = Table B: HLA-DRB1*04:03L HLA-DRB1*01:02L HLA-DQA1*03:01-B1*03:02L
INVFAFPFTIYS

SEQ ID NO: 14017 - protein, 11 aa, Severe acute respiratory syndrome coronavirus 2
  REGION 1..11: note = Table B: HLA-DRB1*04:03L HLA-DRB1*04:02L HLA-DRB4*03:01NL HLA-DQA1*01-B1*05L HLA-DRB1*12:01L HLA-DRB1*14:17L
AQVDVVNFNLT

SEQ ID NO: 14018 - protein, 10 aa, Severe acute respiratory syndrome coronavirus 2
  REGION 1..10: note = Table B: HLA-DRB1*13:02L HLA-DRB1*13:03L HLA-DRB1*04:02L HLA-DQA1*01:02-B1*06:02L HLA-DRB1*01:01L HLA-DRB4*03:01NL HLA-DRB3*02:01L HLA-DRB1*14:01L HLA-DRB1*11:04L HLA-DRB1*08:01L HLA-DRB5*01:01L HLA-DPA1*01:03-B1*04:02L HLA-DRB1*12:01M
  REGION 1..10: note = CONT. FROM ABOVE: HLA-DRB1*12:02L HLA-DPA1*03:01-B1*105:01L HLA- DQA1*03:01-B1*03:02M HLA-DQA1*05:05-B1*03:01M HLA-DRB1*14:17L HL A-DRB1*16:01L HLA-DQA1*01:03-B1*06:01L HLA-DQA1*02:01-B1*03:03L
ESLVPGFNEK

SEQ ID NO: 14019 - protein, 16 aa, Severe acute respiratory syndrome coronavirus 2
  REGION 1..16: note = Table B: HLA-DRB1*13:02L HLA-DRB1*01:02L HLA-DRB1*11:01L HLA-DPA1*02:01-B1*13:01L HLA-DQA1*05:05-B1*03:01L HLA-DRB1*15:03L
VPGFNEKTHVQLSLPV

SEQ ID NO: 14020 - protein, 13 aa, Severe acute respiratory syndrome coronavirus 2
  REGION 1..13: note = Table B: HLA-DRB1*13:02L HLA-DRB1*04:04L HLA-DRB1*01:01L HLA-DRB1*11:03L HLA-DRB1*11:04L HLA-DRB3*01:01L HLA-DRB1*07:01L HLA-DQA1*01:03-B1*06:01L HLA-DRB1*15:01L
LPVLQVRDVLVRG

SEQ ID NO: 14021 - protein, 13 aa, Severe acute respiratory syndrome coronavirus 2
  REGION 1..13: note = Table B: HLA-DRB1*13:02L HLA-DRB1*08:04L HLA-DRB1*14:01L HLA-DRB1*11:04L HLA-DQA1*05:05-B1*03:19L HLA-DPA1*01:03-B1*04:01L HLA-DRB1*12:02L HLA-DRB1*14:54L HLA-DPA1*01:03-B1*104:01L HLA-DRB1*10:01L HLA-DRB1*08:03L
  REGION 1..13: note = CONT. FROM ABOVE: HLA-DRB1*15:01L
DVLVRGFGDSVEE

SEQ ID NO: 14022 - protein, 14 aa, Severe acute respiratory syndrome coronavirus 2
  REGION 1..14: note = Table B: HLA-DRB1*13:02L HLA-DPA1*01:03-B1*03:01L HLA-DPA1*01:03-B1*104:01L
VLVRGFGDSVEEVL

SEQ ID NO: 14023 - protein, 10 aa, Severe acute respiratory syndrome coronavirus 2
  REGION 1..10: note = Table B: HLA-DRB1*13:02L HLA-DRB1*13:03L HLA-DRB4*03:01NL HLA-DRB5*01:01L HLA-DRB1*12:01L HLA-DQA1*03:01-B1*03:02L HLA-DQA1*05:05-B1*03:01L HLA-DQA1*02:01-B1*03:03L
SVEEVLSEAR

SEQ ID NO: 14024 - protein, 12 aa, Severe acute respiratory syndrome coronavirus 2
  REGION 1..12: note = Table B: HLA-DRB1*13:02L HLA-DRB1*12:02L HLA-DRB1*14:54L HLA-DRB1*16:01L
VEEVLSEARQHL

SEQ ID NO: 14025 - protein, 11 aa, Severe acute respiratory syndrome coronavirus 2
  REGION 1..11: note = Table B: HLA-DRB1*13:02L HLA-DRB1*01:03L HLA-DRB1*16:01L
EVLSEARQHLK

SEQ ID NO: 14026 - protein, 12 aa, Severe acute respiratory syndrome coronavirus 2
  REGION 1..12: note = Table B: HLA-DRB1*13:02L HLA-DRB1*04:02L HLA-DRB1*04:05L HLA-DQA1*01:02-B1*06:02L HLA-DRB1*01:02L HLA-DRB1*08:04L HLA-DRB1*11:03L HLA-DRB1*12:01L HLA-DRB3*01:01L HLA-DRB1*08:03L
QPYVFIKRSDAR

SEQ ID NO: 14027 - protein, 16 aa, Severe acute respiratory syndrome coronavirus 2
  REGION 1..16: note = Table B: HLA-DRB1*13:02L HLA-DRB1*01:03L HLA-DRB1*04:04L HLA-DRB1*08:04L HLA-DQA1*05:05-B1*03:19L HLA-DPA1*01:03-B1*04:02L HLA-DPA1*01:03-B1*02:01L HLA-DQA1*05:05-B1*03:01L HLA-DRB1*04:08L
  REGION 1..16: note = CONT. FROM ABOVE: HLA-DQA1*02:01-B1*03:03L
APHGHVMVELVAELEG

SEQ ID NO: 14028 - protein, 13 aa, Severe acute respiratory syndrome coronavirus 2
  REGION 1..13: note = Table B: HLA-DRB1*13:02L HLA-DRB1*04:02L HLA-DRB1*04:04L HLA-DRB1*04:05L HLA-DRB1*01:02L HLA-DRB3*02:01L HLA-DRB1*04:10L HLA-DRB1*12:02L HLA-DQA1*03:01-B1*03:02L HLA-DRB1*14:54L HLA-DQA1*05:05-B1*03:01L
VELVAELEGIQYG

SEQ ID NO: 14029 - protein, 13 aa, Severe acute respiratory syndrome coronavirus 2
  REGION 1..13: note = Table B: HLA-DRB1*13:02L HLA-DRB1*01:03L HLA-DRB4*03:01NL HLA-DRB1*08:01L HLA-DPA1*01:03-B1*04:02L HLA-DRB1*12:02L HLA-DRB1*14:54L HLA-DRB1*14:17L
SGETLGVLVPHVG

SEQ ID NO: 14030 - protein, 13 aa, Severe acute respiratory syndrome coronavirus 2
  REGION 1..13: note = Table B: HLA-DRB1*13:02L HLA-DRB1*01:03L HLA-DRB1*04:04L HLA-DQA1*01:02-B1*06:02L HLA-DRB1*01:02L HLA-DRB4*03:01NL HLA-DPA1*01:03-B1*03:01L HLA-DQA1*05:05-B1*03:19L HLA-DQA1*05:01-B1*02:01L HLA-DRB1*04:10L HLA-DRB1*12:01L
  REGION 1..13: note = CONT. FROM ABOVE: HLA-DPA1*03:01-B1*105:01L HLA-DRB1*14:54L HLA- DQA1*05:05-B1*03:01L HLA-DQA1*01:03-B1*06:01L HLA-DRB1*04:08L HL A-DRB1*15:03L
GVLVPHVGEIPVA

SEQ ID NO: 14031 - protein, 10 aa, Severe acute respiratory syndrome coronavirus 2
  REGION 1..10: note = Table B: HLA-DRB1*13:02L HLA-DRB1*13:03L HLA-DRB1*01:01L HLA-DRB4*03:01NL HLA-DRB1*11:04L HLA-DRB1*08:01L HLA-DRB5*01:01L HLA-DRB1*12:01L HLA-DQA1*03:01-B1*03:02L HLA-DQA1*05:05-B1*03:01L HLA-DQA1*02:01-B1*03:03L
HVGEIPVAYR

SEQ ID NO: 14032 - protein, 13 aa, Severe acute respiratory syndrome coronavirus 2
  REGION 1..13: note = Table B: HLA-DRB1*13:02L HLA-DRB1*04:05L HLA-DRB1*14:01L HLA-DRB1*08:01L HLA-DRB1*12:01L HLA-DRB3*01:01L HLA-DPA1*01:02-B1*04:01L HLA-DRB1*15:03L
IPVAYRKVLLRKN

SEQ ID NO: 14033 - protein, 15 aa, Severe acute respiratory syndrome coronavirus 2
  REGION 1..15: note = Table B: HLA-DRB1*13:02L HLA-DRB1*08:77L HLA-DRB4*01:01L HLA-DRB1*09:01L HLA-DRB3*01:01L HLA-DRB1*14:54L HLA-DPA1*01:03-B1*104:01L HLA-DRB1*14:17L HLA-DRB1*10:01L HLA-DRB1*08:03L
GDELGTDPYEDFQEN

SEQ ID NO: 14034 - protein, 15 aa, Severe acute respiratory syndrome coronavirus 2
  REGION 1..15: note = Table B: HLA-DRB1*13:02L HLA-DRB1*08:04L HLA-DPA1*01:03-B1*03:01L HLA-DRB1*14:01L HLA-DQA1*01:01-B1*05:01L HLA-DRB1*12:01L HLA-DRB3*01:01L HLA-DQA1*05:05-B1*03:01L HLA-DPA1*01:02-B1*04:01L
DPYEDFQENWNTKHS

SEQ ID NO: 14035 - protein, 14 aa, Severe acute respiratory syndrome coronavirus 2
  REGION 1..14: note = Table B: HLA-DRB1*13:02L HLA-DRB1*11:04L HLA-DQA1*05:01-B1*02:01L HLA-DRB1*12:01L HLA-DRB3*01:01L HLA-DPA1*02:01-B1*13:01L HLA-DPA1*03:01-B1*105:01L HLA-DQA1*05:05-B1*03:01L HLA-DQA1*01:03-B1*06:01L
  REGION 1..14: note = CONT. FROM ABOVE: HLA-DRB1*08:03L HLA-DRB1*15:03L
EDFQENWNTKHSSG

SEQ ID NO: 14036 - protein, 14 aa, Severe acute respiratory syndrome coronavirus 2
  REGION 1..14: note = Table B: HLA-DRB1*13:02L HLA-DRB1*04:05L HLA-DRB1*01:02L HLA-DRB1*08:04L HLA-DPA1*01:03-B1*03:01L HLA-DRB1*14:01L HLA-DQA1*01:01-B1*05:01L HLA-DRB1*11:01L HLA-DQA1*01-B1*05L HLA-DQA1*05:05-B1*03:19L HLA-DQA1*05:01-B1*02:01L
  REGION 1..14: note = CONT. FROM ABOVE: HLA-DPA1*01:03-B1*04:02L HLA-DRB1*12:01L HLA-D PA1*02:01-B1*13:01L HLA-DPA1*03:01-B1*105:01L HLA-DPA1*01:02-B1* 04:01L HLA-DRB1*04:08L HLA-DRB1*08:03L HLA-DRB1*15:03L
FQENWNTKHSSGVT

SEQ ID NO: 14037 - protein, 10 aa, Severe acute respiratory syndrome coronavirus 2
  REGION 1..10: note = Table B: HLA-DRB1*13:02M HLA-DRB1*13:03L HLA-DRB1*01:01L HLA-DRB4*03:01NL HLA-DRB1*14:01L HLA-DRB1*11:04L HLA-DRB1*08:01M HLA-DRB5*01:01L HLA-DRB1*12:01L HLA-DRB3*01:01L HLA-DQA1*03:01-B1*03:02M HLA-DQA1*05:05-B1*03:01L
  REGION 1..10: note = CONT. FROM ABOVE: HLA-DRB1*14:17L HLA-DRB1*16:01L HLA-DRB1*15:01 L
NTKHSSGVTR

SEQ ID NO: 14038 - protein, 16 aa, Severe acute respiratory syndrome coronavirus 2
  REGION 1..16: note = Table B: HLA-DRB1*13:02L HLA-DRB1*04:04L HLA-DRB1*14:02L HLA-DRB1*15:01L
GGAYTRYVDNNFCGPD

SEQ ID NO: 14039 - protein, 15 aa, Severe acute respiratory syndrome coronavirus 2
  REGION 1..15: note = Table B: HLA-DRB1*13:02L HLA-DRB1*04:04L HLA-DRB1*11:01L HLA-DRB1*07:01L
LLARAGKASCTLSEQ

SEQ ID NO: 14040 - protein, 10 aa, Severe acute respiratory syndrome coronavirus 2
  REGION 1..10: note = Table B: HLA-DRB1*13:02L HLA-DRB1*13:03L HLA-DRB4*03:01NL HLA-DRB1*08:01L HLA-DRB5*01:01L HLA-DRB1*12:01L HLA-DQA1*03:01-B1*03:02L HLA-DQA1*05:05-B1*03:01L
EQLDFIDTKR

SEQ ID NO: 14041 - protein, 14 aa, Severe acute respiratory syndrome coronavirus 2
  REGION 1..14: note = Table B: HLA-DRB1*13:02L HLA-DPA1*01:03-B1*03:01L HLA-DRB1*04:08L HLA-DQA1*02:01-B1*03:03L
IDTKRGVYCCREHE

SEQ ID NO: 14042 - protein, 14 aa, Severe acute respiratory syndrome coronavirus 2
  REGION 1..14: note = Table B: HLA-DRB1*13:02L HLA-DRB3*01:01L HLA-DPA1*01:02-B1*04:01L
HEHEIAWYTERSEK

SEQ ID NO: 14043 - protein, 13 aa, Severe acute respiratory syndrome coronavirus 2
  REGION 1..13: note = Table B: HLA-DRB1*13:02L HLA-DRB1*08:04L HLA-DRB3*02:01L
EIAWYTERSEKSY

SEQ ID NO: 14044 - protein, 13 aa, Severe acute respiratory syndrome coronavirus 2
  REGION 1..13: note = Table B: HLA-DRB1*13:02L HLA-DRB1*13:03L HLA-DRB1*01:03L HLA-DRB1*04:04L HLA-DRB1*01:02L HLA-DRB1*08:01L HLA-DRB1*04:10L HLA-DRB1*12:01L HLA-DPA1*01:03-B1*104:01L HLA-DPA1*01:02-B1*04:01L HLA-DRB1*07:01L HLA-DRB1*04:08L
  REGION 1..13: note = CONT. FROM ABOVE: HLA-DRB1*15:03L
RSEKSYELQTPFE

SEQ ID NO: 14045 - protein, 12 aa, Severe acute respiratory syndrome coronavirus 2
  REGION 1..12: note = Table B: HLA-DRB1*13:02L HLA-DRB1*04:05L HLA-DRB1*01:02L HLA-DRB1*04:08L
TPFEIKLAKKFD

SEQ ID NO: 14046 - protein, 14 aa, Severe acute respiratory syndrome coronavirus 2
  REGION 1..14: note = Table B: HLA-DRB1*13:02L HLA-DRB1*01:03L HLA-DRB1*01:02L HLA-DRB1*11:04L HLA-DRB1*11:01L HLA-DRB1*16:01L HLA-DRB1*04:08L HLA-DRB1*15:03L
PFEIKLAKKFDTFN

SEQ ID NO: 14047 - protein, 14 aa, Severe acute respiratory syndrome coronavirus 2
  REGION 1..14: note = Table B: HLA-DRB1*13:02L HLA-DRB1*04:05L HLA-DRB1*01:02L HLA-DRB3*01:01L HLA-DPA1*03:01-B1*105:01L HLA-DRB1*15:03L
EIKLAKKFDTFNGE

SEQ ID NO: 14048 - protein, 14 aa, Severe acute respiratory syndrome coronavirus 2
  REGION 1..14: note = Table B: HLA-DRB1*13:02L HLA-DRB1*01:03L HLA-DRB1*04:04L HLA-DQA1*01:02-B1*06:02L HLA-DRB1*01:02L HLA-DPA1*01:03-B1*03:01L HLA-DRB1*12:01L HLA-DPA1*02:01-B1*13:01L HLA-DPA1*03:01-B1*105:01L
  REGION 1..14: note = CONT. FROM ABOVE: HLA-DPA1*01:03-B1*104:01L HLA-DRB1*07:01L HLA- DRB1*04:08L HLA-DRB1*15:03L
LAKKFDTFNGECPN

SEQ ID NO: 14049 - protein, 10 aa, Severe acute respiratory syndrome coronavirus 2
  REGION 1..10: note = Table B: HLA-DRB1*13:02L HLA-DRB1*13:03L HLA-DRB1*04:02L HLA-DRB4*03:01NL HLA-DRB1*08:01L HLA-DRB1*12:01L HLA-DQA1*03:01-B1*03:02L HLA-DQA1*05:05-B1*03:01L HLA-DRB1*14:17L HLA-DQA1*01:03-B1*06:01L
  REGION 1..10: note = CONT. FROM ABOVE: HLA-DQA1*02:01-B1*03:03L
NSIIKTIQPR

SEQ ID NO: 14050 - protein, 10 aa, Severe acute respiratory syndrome coronavirus 2
  REGION 1..10: note = Table B: HLA-DRB1*13:02L HLA-DRB1*13:03L HLA-DRB1*08:01L HLA-DRB1*12:01L HLA-DQA1*03:01-B1*03:02L
KTIQPRVEKK

SEQ ID NO: 14051 - protein, 11 aa, Severe acute respiratory syndrome coronavirus 2
  REGION 1..11: note = Table B: HLA-DRB1*13:02L HLA-DQA1*01:02-B1*06:02L HLA-DQA1*01:01-B1*05:01L HLA-DQA1*01-B1*05L HLA-DRB1*12:01L HLA-DRB1*14:17L HLA-DRB1*16:01L
ETSWQTGDFVK

SEQ ID NO: 14052 - protein, 16 aa, Severe acute respiratory syndrome coronavirus 2
  REGION 1..16: note = Table B: HLA-DRB1*13:02L HLA-DRB1*04:04L HLA-DRB1*01:01L HLA-DRB1*08:04L HLA-DRB1*11:04L HLA-DRB1*08:01L HLA-DRB1*11:01L HLA-DPA1*01:03-B1*04:02L HLA-DRB3*01:01L HLA-DPA1*01:03-B1*104:01L HLA-DPA1*01:02-B1*04:01L
LPQNAVVKIYCPACHN

SEQ ID NO: 14053 - protein, 14 aa, Severe acute respiratory syndrome coronavirus 2
  REGION 1..14: note = Table B: HLA-DRB1*13:02L HLA-DRB1*01:03L HLA-DRB1*04:04L HLA-DRB1*11:01L HLA-DPA1*01:03-B1*104:01L HLA-DPA1*01:02-B1*04:01L HLA-DRB1*07:01L HLA-DRB1*16:01L HLA-DRB1*04:08L HLA-DQA1*02:01-B1*03:03L
AVVKIYCPACHNSE

SEQ ID NO: 14054 - protein, 15 aa, Severe acute respiratory syndrome coronavirus 2
  REGION 1..15: note = Table B: HLA-DRB1*13:02L
VGPEHSLAEYHNESG

SEQ ID NO: 14055 - protein, 13 aa, Severe acute respiratory syndrome coronavirus 2
  REGION 1..13: note = Table B: HLA-DRB1*13:02L HLA-DRB1*13:03L HLA-DRB1*04:02L HLA-DRB1*08:04L HLA-DRB1*11:03L HLA-DRB1*12:01L HLA-DRB3*01:01L HLA-DRB1*16:01L
SGLKTILRKGGRT

SEQ ID NO: 14056 - protein, 15 aa, Severe acute respiratory syndrome coronavirus 2
  REGION 1..15: note = Table B: HLA-DRB1*13:02L HLA-DRB1*11:04L HLA-DRB1*08:01L HLA-DRB1*11:01L HLA-DRB3*01:01L
LKTILRKGGRTIAFG

SEQ ID NO: 14057 - protein, 16 aa, Severe acute respiratory syndrome coronavirus 2
  REGION 1..16: note = Table B: HLA-DRB1*13:02L HLA-DRB1*01:03L HLA-DRB1*14:01L HLA-DRB1*13:01L HLA-DRB1*12:01L HLA-DRB3*01:01L HLA-DRB1*16:01L HLA-DRB1*04:08L HLA-DRB1*15:03L
FSYVGCHNKCAYWVPR

SEQ ID NO: 14058 - protein, 11 aa, Severe acute respiratory syndrome coronavirus 2
  REGION 1..11: note = Table B: HLA-DRB1*13:02L HLA-DRB1*04:05L HLA-DQA1*01:02-B1*06:02L HLA-DRB1*01:02L HLA-DRB1*08:01L HLA-DRB1*12:01L HLA-DPA1*03:01-B1*105:01L HLA-DRB1*14:54L HLA-DQA1*01:03-B1*06:01L HLA-DRB1*04:08L HLA-DRB1*15:03L
YWVPRASANIG

SEQ ID NO: 14059 - protein, 13 aa, Severe acute respiratory syndrome coronavirus 2
  REGION 1..13: note = Table B: HLA-DRB1*13:02L HLA-DRB1*04:04L HLA-DPA1*02:01-B1*13:01L HLA-DPA1*01:03-B1*104:01L HLA-DRB1*04:08L
WVPRASANIGCNH

SEQ ID NO: 14060 - protein, 17 aa, Severe acute respiratory syndrome coronavirus 2
  REGION 1..17: note = Table B: HLA-DRB1*13:02L
GSEGLNDNLLEILQKEK

SEQ ID NO: 14061 - protein, 12 aa, Severe acute respiratory syndrome coronavirus 2
  REGION 1..12: note = Table B: HLA-DRB1*13:02L HLA-DRB1*01:03L HLA-DRB1*04:05L HLA-DQA1*01:02-B1*06:02L HLA-DRB1*01:02L HLA-DRB1*11:03L HLA-DRB1*11:04L HLA-DRB1*11:01L HLA-DQA1*05:01-B1*02:01L HLA-DRB1*12:01L HLA-DRB3*01:01L HLA-DRB1*04:08L HLA-DRB1*15:03L
LEILQKEKVNIN

SEQ ID NO: 14062 - protein, 13 aa, Severe acute respiratory syndrome coronavirus 2
  REGION 1..13: note = Table B: HLA-DRB1*13:02L HLA-DRB1*01:03L HLA-DRB1*04:04L HLA-DRB1*01:02L HLA-DPA1*01:03-B1*03:01L HLA-DRB1*14:01L HLA-DRB1*08:01L HLA-DRB1*04:10L HLA-DPA1*03:01-B1*105:01L HLA-DPA1*01:02-B1*04:01L HLA-DRB1*16:01L HLA-DRB1*04:08L
  REGION 1..13: note = CONT. FROM ABOVE: HLA-DRB1*15:03L
KEKVNINIVGDFK

SEQ ID NO: 14063 - protein, 14 aa, Severe acute respiratory syndrome coronavirus 2
  REGION 1..14: note = Table B: HLA-DRB1*13:02L HLA-DPA1*01:03-B1*03:01L
EKVNINIVGDFKLN

SEQ ID NO: 14064 - protein, 12 aa, Severe acute respiratory syndrome coronavirus 2
  REGION 1..12: note = Table B: HLA-DRB1*13:02L HLA-DPA1*03:01-B1*04:02L HLA-DRB1*14:01L HLA-DQA1*05:01-B1*02:01L HLA-DRB1*12:01L HLA-DRB1*16:01L HLA-DRB1*15:03L
VGDFKLNEEIAI

SEQ ID NO: 14065 - protein, 12 aa, Severe acute respiratory syndrome coronavirus 2
  REGION 1..12: note = Table B: HLA-DRB1*13:02L HLA-DRB3*02:01L HLA-DPA1*03:01-B1*04:02L HLA-DRB1*14:01L HLA-DQA1*05:01-B1*02:01L HLA-DRB1*12:01L HLA-DRB1*16:01L
GDFKLNEEIAII

SEQ ID NO: 14066 - protein, 12 aa, Severe acute respiratory syndrome coronavirus 2
  REGION 1..12: note = Table B: HLA-DRB1*13:02L HLA-DRB1*14:01L HLA-DRB1*12:01L HLA-DPA1*03:01-B1*105:01L
DFKLNEEIAIIL

SEQ ID NO: 14067 - protein, 14 aa, Severe acute respiratory syndrome coronavirus 2
  REGION 1..14: note = Table B: HLA-DRB1*13:02L HLA-DRB3*01:01L
TVKGLDYKAFKQIV

SEQ ID NO: 14068 - protein, 12 aa, Severe acute respiratory syndrome coronavirus 2
  REGION 1..12: note = Table B: HLA-DRB1*13:02L HLA-DRB1*04:04L HLA-DRB1*08:04L HLA-DPA1*01:03-B1*03:01L HLA-DRB3*01:01L HLA-DPA1*02:01-B1*13:01L HLA-DRB1*14:17L HLA-DRB1*08:03L
GLDYKAFKQIVE

SEQ ID NO: 14069 - protein, 14 aa, Severe acute respiratory syndrome coronavirus 2
  REGION 1..14: note = Table B: HLA-DRB1*13:02L HLA-DRB1*01:03L HLA-DRB1*04:04L HLA-DRB1*01:01L HLA-DRB1*08:01L HLA-DRB1*11:01L HLA-DQA1*03:01-B1*03:02L HLA-DPA1*01:03-B1*104:01L HLA-DPA1*01:02-B1*04:01L HLA-DRB1*07:01L HLA-DRB1*16:01L
  REGION 1..14: note = CONT. FROM ABOVE: HLA-DRB1*04:08L HLA-DQA1*02:01-B1*03:03L HLA-D RB1*15:03L
KAFKQIVESCGNFK

SEQ ID NO: 14070 - protein, 15 aa, Severe acute respiratory syndrome coronavirus 2
  REGION 1..15: note = Table B: HLA-DRB1*13:02L HLA-DRB1*04:02L HLA-DRB1*01:01L HLA-DRB1*08:01L HLA-DRB3*01:01L HLA-DQA1*03:01-B1*03:02L
KQIVESCGNFKVTKG

SEQ ID NO: 14071 - protein, 14 aa, Severe acute respiratory syndrome coronavirus 2
  REGION 1..14: note = Table B: HLA-DRB1*13:02L HLA-DRB1*01:03L HLA-DRB1*04:04L HLA-DRB1*04:05L HLA-DRB1*08:04L HLA-DPA1*01:03-B1*03:01L HLA-DRB1*04:10L HLA-DRB1*04:08L
AWNIGEQKSILSPL

SEQ ID NO: 14072 - protein, 14 aa, Severe acute respiratory syndrome coronavirus 2
  REGION 1..14: note = Table B: HLA-DRB1*13:02L HLA-DRB1*04:04L HLA-DRB3*01:01L HLA-DPA1*02:01-B1*13:01L HLA-DPA1*03:01-B1*105:01L
AARVVRSIFSRTLE

SEQ ID NO: 14073 - protein, 14 aa, Severe acute respiratory syndrome coronavirus 2
  REGION 1..14: note = Table B: HLA-DRB1*13:02L HLA-DRB1*04:02L HLA-DRB1*04:04L HLA-DRB1*01:01L HLA-DRB3*01:01L HLA-DRB1*07:01L HLA-DRB1*15:01L
ARVVRSIFSRTLET

SEQ ID NO: 14074 - protein, 15 aa, Severe acute respiratory syndrome coronavirus 2
  REGION 1..15: note = Table B: HLA-DRB1*13:02L HLA-DRB1*11:04L HLA-DRB1*11:01L HLA-DRB3*01:01L HLA-DPA1*01:03-B1*104:01L HLA-DRB1*08:03L
VVRSIFSRTLETAQN

SEQ ID NO: 14075 - protein, 13 aa, Severe acute respiratory syndrome coronavirus 2
  REGION 1..13: note = Table B: HLA-DRB1*13:02L HLA-DRB1*04:04L HLA-DRB1*04:10L HLA-DQA1*05:05-B1*03:01L HLA-DRB1*07:01L
IFSRTLETAQNSV

SEQ ID NO: 14076 - protein, 10 aa, Severe acute respiratory syndrome coronavirus 2
  REGION 1..10: note = Table B: HLA-DRB1*13:02L HLA-DRB1*13:03L HLA-DRB4*03:01NL HLA-DRB1*08:01L HLA-DRB1*12:01L HLA-DQA1*03:01-B1*03:02L HLA-DQA1*05:05-B1*03:01L HLA-DRB1*14:17L HLA-DQA1*02:01-B1*03:03L
AQNSVRVLQK

SEQ ID NO: 14077 - protein, 14 aa, Severe acute respiratory syndrome coronavirus 2
  REGION 1..14: note = Table B: HLA-DRB1*13:02L
YSLRLIDAMMFTSD

SEQ ID NO: 14078 - protein, 14 aa, Severe acute respiratory syndrome coronavirus 2
  REGION 1..14: note = Table B: HLA-DRB1*13:02L HLA-DRB1*13:03L HLA-DRB1*01:03L HLA-DRB1*04:04L HLA-DRB1*01:02L HLA-DRB1*08:77L HLA-DRB3*02:01L HLA-DPA1*01:03-B1*03:01L HLA-DRB1*14:01L HLA-DRB1*14:02L HLA-DQA1*01:01-B1*05:01L HLA-DPA1*01:03-B1*04:02L
  REGION 1..14: note = CONT. FROM ABOVE: HLA-DPA1*02:01-B1*13:01L HLA-DPA1*01:03-B1*104 :01L
IDAMMFTSDLATNN

SEQ ID NO: 14079 - protein, 13 aa, Severe acute respiratory syndrome coronavirus 2
  REGION 1..13: note = Table B: HLA-DRB1*13:02L HLA-DRB1*04:08L
AMMFTSDLATNNL

SEQ ID NO: 14080 - protein, 12 aa, Severe acute respiratory syndrome coronavirus 2
  REGION 1..12: note = Table B: HLA-DRB1*13:02L HLA-DRB1*14:54L HLA-DRB1*14:17L
FTSDLATNNLVV

SEQ ID NO: 14081 - protein, 12 aa, Severe acute respiratory syndrome coronavirus 2
  REGION 1..12: note = Table B: HLA-DRB1*13:02L HLA-DRB1*08:77L HLA-DRB3*02:01L HLA-DPA1*01:03-B1*03:01L HLA-DPA1*03:01-B1*04:02L HLA-DRB1*14:01L HLA-DQA1*05:05-B1*03:01L HLA-DPA1*01:02-B1*04:01L
TSDLATNNLVVM

SEQ ID NO: 14082 - protein, 11 aa, Severe acute respiratory syndrome coronavirus 2
  REGION 1..11: note = Table B: HLA-DRB1*13:02L HLA-DRB1*04:02L HLA-DRB1*01:02L HLA-DRB4*03:01NL HLA-DRB1*08:77L HLA-DQA1*01-B1*05L HLA-DQA1*05:05-B1*03:19L HLA-DRB1*12:01L HLA-DPA1*03:01-B1*105:01L HLA-DQA1*05:05-B1*03:01L
  REGION 1..11: note = CONT. FROM ABOVE: HLA-DRB1*14:17L HLA-DRB1*07:01L HLA-DRB1*16:01 L HLA-DQA1*01:03-B1*06:01L HLA-DRB1*15:03L
VMAYITGGVVQ

SEQ ID NO: 14083 - protein, 13 aa, Severe acute respiratory syndrome coronavirus 2
  REGION 1..13: note = Table B: HLA-DRB1*13:02L HLA-DRB1*04:04L HLA-DRB1*04:05L HLA-DRB4*03:01NL HLA-DRB1*08:77L HLA-DRB3*02:01L HLA-DRB1*14:01L HLA-DRB1*11:03L HLA-DQA1*01-B1*05L HLA-DQA1*03:01-B1*03:02L HLA-DRB1*14:54L HLA-DRB1*07:01L
GGVVQLTSQWLTN

SEQ ID NO: 14084 - protein, 14 aa, Severe acute respiratory syndrome coronavirus 2
  REGION 1..14: note = Table B: HLA-DRB1*13:02L HLA-DRB1*04:04L HLA-DRB1*04:05L HLA-DRB1*08:04L HLA-DRB1*11:04L HLA-DRB1*08:01L HLA-DRB1*11:01L HLA-DRB3*01:01L
SQWLTNIFGTVYEK

SEQ ID NO: 14085 - protein, 15 aa, Severe acute respiratory syndrome coronavirus 2
  REGION 1..15: note = Table B: HLA-DRB1*13:02L
EKLKPVLDWLEEKFK

SEQ ID NO: 14086 - protein, 15 aa, Severe acute respiratory syndrome coronavirus 2
  REGION 1..15: note = Table B: HLA-DRB1*13:02L
PVLDWLEEKFKEGVE

SEQ ID NO: 14087 - protein, 12 aa, Severe acute respiratory syndrome coronavirus 2
  REGION 1..12: note = Table B: HLA-DRB1*13:02L HLA-DRB1*04:05L HLA-DRB1*01:02L HLA-DPA1*01:03-B1*03:01L HLA-DRB1*12:01L HLA-DPA1*02:01-B1*13:01L HLA-DPA1*01:02-B1*04:01L HLA-DRB1*16:01L HLA-DRB1*04:08L
KFKEGVEFLRDG

SEQ ID NO: 14088 - protein, 11 aa, Severe acute respiratory syndrome coronavirus 2
  REGION 1..11: note = Table B: HLA-DRB1*13:02L HLA-DRB1*13:03L HLA-DRB1*12:01L
SVQTFFKLVNK

SEQ ID NO: 14089 - protein, 12 aa, Severe acute respiratory syndrome coronavirus 2
  REGION 1..12: note = Table B: HLA-DRB1*13:02L HLA-DRB1*04:05L HLA-DRB1*01:02L HLA-DRB1*08:04L HLA-DPA1*01:03-B1*03:01L HLA-DPA1*03:01-B1*04:02L HLA-DRB1*14:01L HLA-DQA1*01-B1*05L HLA-DPA1*01:03-B1*04:02L HLA-DRB1*12:01L
VQTFFKLVNKFL

SEQ ID NO: 14090 - protein, 12 aa, Severe acute respiratory syndrome coronavirus 2
  REGION 1..12: note = Table B: HLA-DRB1*13:02L HLA-DRB1*04:05L HLA-DRB1*08:03L
TFFKLVNKFLAL

SEQ ID NO: 14091 - protein, 12 aa, Severe acute respiratory syndrome coronavirus 2
  REGION 1..12: note = Table B: HLA-DRB1*13:02L HLA-DRB1*04:04L HLA-DRB1*08:04L HLA-DPA1*01:03-B1*03:01L HLA-DRB1*11:04L HLA-DRB1*08:01L HLA-DRB1*11:01L HLA-DPA1*01:03-B1*02:01L
IIIGGAKLKALN

SEQ ID NO: 14092 - protein, 14 aa, Severe acute respiratory syndrome coronavirus 2
  REGION 1..14: note = Table B: HLA-DRB1*13:02L HLA-DPA1*01:03-B1*03:01L HLA-DQA1*05:01-B1*02:01L HLA-DRB1*12:01L HLA-DPA1*02:01-B1*13:01L HLA-DRB1*15:03L
ALNLGETFVTHSKG

SEQ ID NO: 14093 - protein, 10 aa, Severe acute respiratory syndrome coronavirus 2
  REGION 1..10: note = Table B: HLA-DRB1*13:02L HLA-DRB1*13:03L HLA-DRB1*01:03L HLA-DRB1*01:01L HLA-DRB1*01:02L HLA-DRB4*03:01NL HLA-DRB1*14:01L HLA-DRB1*11:04L HLA-DRB1*08:01L HLA-DRB1*11:01L HLA-DRB1*12:01L HLA-DRB3*01:01L HLA-DQA1*03:01-B1*03:02L HLA-DRB1*14:17L
  REGION 1..10: note = CONT. FROM ABOVE: HLA-DRB1*16:01L HLA-DQA1*02:01-B1*03:03L
VTHSKGLYRK

SEQ ID NO: 14094 - protein, 14 aa, Severe acute respiratory syndrome coronavirus 2
  REGION 1..14: note = Table B: HLA-DRB1*13:02L HLA-DQA1*01:02-B1*06:02L HLA-DRB1*14:01L HLA-DRB1*12:01L HLA-DRB3*01:01L
KGLYRKCVKSREET

SEQ ID NO: 14095 - protein, 14 aa, Severe acute respiratory syndrome coronavirus 2
  REGION 1..14: note = Table B: HLA-DRB1*13:02L HLA-DRB1*01:02L HLA-DRB1*14:01L HLA-DRB1*11:02L HLA-DRB1*12:01L HLA-DRB3*01:01L HLA-DPA1*02:01-B1*13:01L HLA-DRB1*08:02L
GLYRKCVKSREETG

SEQ ID NO: 14096 - protein, 14 aa, Severe acute respiratory syndrome coronavirus 2
  REGION 1..14: note = Table B: HLA-DRB1*13:02L HLA-DRB1*08:04L HLA-DQA1*05:05-B1*03:01L
GLLMPLKAPKEIIF

SEQ ID NO: 14097 - protein, 16 aa, Severe acute respiratory syndrome coronavirus 2
  REGION 1..16: note = Table B: HLA-DRB1*13:02L HLA-DRB1*04:05L HLA-DRB1*01:02L HLA-DRB1*12:01L
MPLKAPKEIIFLEGET

SEQ ID NO: 14098 - protein, 10 aa, Severe acute respiratory syndrome coronavirus 2
  REGION 1..10: note = Table B: HLA-DRB1*13:02M HLA-DRB1*13:03M HLA-DRB1*04:02L HLA-DQA1*01:02-B1*06:02L HLA-DRB1*01:01L HLA-DRB4*03:01NL HLA-DRB3*02:01L HLA-DRB1*14:01L HLA-DRB1*11:04L HLA-DRB1*14:02L HLA-DRB1*08:01M HLA-DRB5*01:01L HLA-DPA1*01:03-B1*04:02L
  REGION 1..10: note = CONT. FROM ABOVE: HLA-DRB1*12:01M HLA-DRB1*12:02L HLA-DPA1*03:01 -B1*105:01L HLA-DQA1*03:01-B1*03:02L HLA-DQA1*05:05-B1*03:01M HL A-DRB1*14:17L HLA-DRB1*16:01L HLA-DQA1*01:03-B1*06:01L HLA-DQA1* 02:01-B1*03:03L HLA-DRB1*15:01L
EVLTEEVVLK

SEQ ID NO: 14099 - protein, 14 aa, Severe acute respiratory syndrome coronavirus 2
  REGION 1..14: note = Table B: HLA-DRB1*13:02L HLA-DPA1*02:01-B1*13:01L
EEVVLKTGDLQPLE

SEQ ID NO: 14100 - protein, 14 aa, Severe acute respiratory syndrome coronavirus 2
  REGION 1..14: note = Table B: HLA-DRB1*13:02L HLA-DRB1*08:01L HLA-DPA1*01:03-B1*04:01L HLA-DPA1*02:01-B1*13:01L HLA-DPA1*01:03-B1*104:01L
VVLKTGDLQPLEQP

SEQ ID NO: 14101 - protein, 15 aa, Severe acute respiratory syndrome coronavirus 2
  REGION 1..15: note = Table B: HLA-DRB1*13:02L HLA-DPA1*01:03-B1*104:01L
GDLQPLEQPTSEAVE

SEQ ID NO: 14102 - protein, 13 aa, Severe acute respiratory syndrome coronavirus 2
  REGION 1..13: note = Table B: HLA-DRB1*13:02L HLA-DPA1*01:03-B1*02:01L
EAPLVGTPVCING

SEQ ID NO: 14103 - protein, 14 aa, Severe acute respiratory syndrome coronavirus 2
  REGION 1..14: note = Table B: HLA-DRB1*13:02L HLA-DRB1*04:04L HLA-DRB1*08:04L HLA-DRB1*14:01L HLA-DRB1*11:04L HLA-DRB1*11:01L HLA-DQA1*05:01-B1*02:01L HLA-DPA1*01:03-B1*04:01L HLA-DRB3*01:01L HLA-DPA1*01:03-B1*02:01L
  REGION 1..14: note = CONT. FROM ABOVE: HLA-DPA1*01:03-B1*104:01L HLA-DQA1*05:05-B1*03 :01L HLA-DRB1*07:01L HLA-DRB1*15:03L
EIKDTEKYCALAPN

SEQ ID NO: 14104 - protein, 13 aa, Severe acute respiratory syndrome coronavirus 2
  REGION 1..13: note = Table B: HLA-DRB1*13:02L HLA-DRB1*01:02L HLA-DRB1*08:04L HLA-DRB1*08:77L HLA-DRB3*02:01L HLA-DPA1*03:01-B1*04:02L HLA-DRB1*11:03L HLA-DRB1*11:04L HLA-DRB1*14:02L HLA-DPA1*01:03-B1*04:01L HLA-DRB1*09:01L HLA-DRB1*07:01L
APNMMVTNNTFTL

SEQ ID NO: 14105 - protein, 15 aa, Severe acute respiratory syndrome coronavirus 2
  REGION 1..15: note = Table B: HLA-DRB1*13:02L HLA-DRB1*08:04L HLA-DPA1*03:01-B1*04:02L
VTFGDDTVIEVQGYK

SEQ ID NO: 14106 - protein, 13 aa, Severe acute respiratory syndrome coronavirus 2
  REGION 1..13: note = Table B: HLA-DRB1*13:02L HLA-DPA1*02:01-B1*13:01L HLA-DPA1*01:02-B1*04:01L
GDDTVIEVQGYKS

SEQ ID NO: 14107 - protein, 12 aa, Severe acute respiratory syndrome coronavirus 2
  REGION 1..12: note = Table B: HLA-DRB1*13:02L HLA-DRB1*08:04L HLA-DRB3*02:01L HLA-DPA1*01:03-B1*04:01L HLA-DPA1*02:01-B1*13:01L HLA-DRB1*10:01L
TVIEVQGYKSVN

SEQ ID NO: 14108 - protein, 13 aa, Severe acute respiratory syndrome coronavirus 2
  REGION 1..13: note = Table B: HLA-DRB1*13:02L HLA-DRB1*04:04L HLA-DRB1*04:10L HLA-DRB3*01:01L
VNITFELDERIDK

SEQ ID NO: 14109 - protein, 10 aa, Severe acute respiratory syndrome coronavirus 2
  REGION 1..10: note = Table B: HLA-DRB1*13:02L HLA-DRB1*13:03L HLA-DRB1*01:03L HLA-DRB1*04:02L HLA-DRB1*01:01L HLA-DRB4*03:01NL HLA-DRB1*11:04L HLA-DRB1*08:01L HLA-DRB1*12:01L HLA-DQA1*03:01-B1*03:02M HLA-DQA1*05:05-B1*03:01L HLA-DRB1*14:17L HLA-DRB1*16:01L
  REGION 1..10: note = CONT. FROM ABOVE: HLA-DQA1*02:01-B1*03:03L
ERIDKVLNEK

SEQ ID NO: 14110 - protein, 13 aa, Severe acute respiratory syndrome coronavirus 2
  REGION 1..13: note = Table B: HLA-DRB1*13:02L HLA-DRB1*13:03L HLA-DRB1*01:03L HLA-DRB1*04:02L HLA-DRB1*04:04L HLA-DRB1*04:05L HLA-DRB1*01:01L HLA-DRB4*03:01NL HLA-DRB1*08:77L HLA-DRB1*11:03L HLA-DRB1*14:02L HLA-DRB1*14:54L HLA-DRB1*04:08L
SAYTVELGTEVNE

SEQ ID NO: 14111 - protein, 13 aa, Severe acute respiratory syndrome coronavirus 2
  REGION 1..13: note = Table B: HLA-DRB1*13:02L HLA-DRB1*08:77L HLA-DRB1*14:01L HLA-DRB1*11:03L HLA-DRB1*14:02L HLA-DRB4*01:01L HLA-DRB3*01:01L HLA-DPA1*02:01-B1*13:01L HLA-DRB1*08:03L
YEYGTEDDYQGKP

SEQ ID NO: 14112 - protein, 13 aa, Severe acute respiratory syndrome coronavirus 2
  REGION 1..13: note = Table B: HLA-DRB1*13:02L
EYGTEDDYQGKPL

SEQ ID NO: 14113 - protein, 11 aa, Severe acute respiratory syndrome coronavirus 2
  REGION 1..11: note = Table B: HLA-DRB1*13:02L HLA-DRB1*01:03L HLA-DRB1*04:05L HLA-DQA1*01:02-B1*06:02L HLA-DRB4*03:01NL HLA-DPA1*01:03-B1*03:01L HLA-DPA1*03:01-B1*04:02L HLA-DRB1*14:02L HLA-DQA1*01:01-B1*05:01L HLA-DRB1*12:01L
  REGION 1..11: note = CONT. FROM ABOVE: HLA-DPA1*03:01-B1*105:01L HLA-DQA1*05:05-B1*03 :01L HLA-DRB1*14:17L HLA-DRB1*15:03L
TEDDYQGKPLE

SEQ ID NO: 14114 - protein, 14 aa, Severe acute respiratory syndrome coronavirus 2
  REGION 1..14: note = Table B: HLA-DRB1*13:02L HLA-DRB1*01:02L HLA-DRB1*11:01L HLA-DPA1*01:03-B1*104:01L HLA-DRB1*08:03L
EDDYQGKPLEFGAT

SEQ ID NO: 14115 - protein, 14 aa, Severe acute respiratory syndrome coronavirus 2
  REGION 1..14: note = Table B: HLA-DRB1*13:02L HLA-DRB1*01:02L HLA-DPA1*01:03-B1*03:01L HLA-DRB1*11:04L HLA-DRB1*11:01L HLA-DRB1*12:01L
DDYQGKPLEFGATS

SEQ ID NO: 14116 - protein, 14 aa, Severe acute respiratory syndrome coronavirus 2
  REGION 1..14: note = Table B: HLA-DRB1*13:02L HLA-DRB1*01:03L HLA-DRB1*04:04L HLA-DRB1*01:02L HLA-DRB4*03:01NL HLA-DRB1*08:04L HLA-DRB1*08:77L HLA-DPA1*01:03-B1*03:01L HLA-DQA1*05:01-B1*02:01L HLA-DRB1*04:10L HLA-DRB1*12:01L HLA-DRB1*12:02L
  REGION 1..14: note = CONT. FROM ABOVE: HLA-DPA1*02:01-B1*13:01L HLA-DPA1*03:01-B1*105 :01L HLA-DRB1*14:54L HLA-DPA1*01:03-B1*104:01L HLA-DRB1*10:01L H LA-DRB1*04:08L HLA-DRB1*15:03L
KPLEFGATSAALQP

SEQ ID NO: 14117 - protein, 14 aa, Severe acute respiratory syndrome coronavirus 2
  REGION 1..14: note = Table B: HLA-DRB1*13:02L HLA-DRB1*13:03L HLA-DRB1*01:02L HLA-DRB1*14:02L HLA-DRB1*11:01L HLA-DRB4*02:01NL HLA-DQA1*05:05-B1*03:116L HLA-DRB3*01:01L HLA-DPA1*02:01-B1*13:01L HLA-DPA1*01:03-B1*104:01L
  REGION 1..14: note = CONT. FROM ABOVE: HLA-DRB1*14:17L HLA-DRB1*15:03L
FGATSAALQPEEEQ

SEQ ID NO: 14118 - protein, 15 aa, Severe acute respiratory syndrome coronavirus 2
  REGION 1..15: note = Table B: HLA-DRB1*13:02L HLA-DPA1*01:03-B1*104:01L HLA-DRB1*15:03L
GATSAALQPEEEQEE

SEQ ID NO: 14119 - protein, 13 aa, Severe acute respiratory syndrome coronavirus 2
  REGION 1..13: note = Table B: HLA-DRB1*13:02L HLA-DRB1*13:03L HLA-DRB1*01:03L HLA-DRB1*04:02L HLA-DRB4*03:01NL HLA-DRB1*08:04L HLA-DRB1*08:77L HLA-DRB3*01:01L HLA-DRB1*14:54L HLA-DRB1*14:17L
EDWLDDDSQQTVG

SEQ ID NO: 14120 - protein, 15 aa, Severe acute respiratory syndrome coronavirus 2
  REGION 1..15: note = Table B: HLA-DRB1*13:02L HLA-DRB1*13:03L HLA-DRB4*03:01NL HLA-DRB1*11:01L HLA-DQA1*01-B1*05L HLA-DQA1*05:05-B1*03:116L HLA-DRB3*01:01L HLA-DPA1*02:01-B1*13:01L HLA-DPA1*01:03-B1*104:01L
GSEDNQTTTIQTIVE

SEQ ID NO: 14121 - protein, 16 aa, Severe acute respiratory syndrome coronavirus 2
  REGION 1..16: note = Table B: HLA-DRB1*13:02L HLA-DRB1*13:03L HLA-DPA1*01:03-B1*03:01L HLA-DPA1*03:01-B1*04:02L HLA-DRB1*14:01L HLA-DPA1*02:01-B1*13:01L HLA-DPA1*01:03-B1*104:01L HLA-DPA1*01:02-B1*04:01L
DNQTTTIQTIVEVQPQ

SEQ ID NO: 14122 - protein, 12 aa, Severe acute respiratory syndrome coronavirus 2
  REGION 1..12: note = Table B: HLA-DRB1*13:02L HLA-DRB1*01:03L HLA-DRB1*04:02L HLA-DRB1*04:05L HLA-DRB1*01:02L HLA-DRB4*03:01NL HLA-DRB3*02:01L HLA-DPA1*01:03-B1*03:01L HLA-DRB1*11:03L HLA-DQA1*01-B1*05L HLA-DRB1*04:10L HLA-DRB1*09:01L HLA-DRB1*12:02L HLA-DRB1*14:54L
  REGION 1..12: note = CONT. FROM ABOVE: HLA-DQA1*05:05-B1*03:01L HLA-DRB1*14:17L HLA-D RB1*07:01L HLA-DRB1*04:08L
TPVVQTIEVNSF

SEQ ID NO: 14123 - protein, 13 aa, Severe acute respiratory syndrome coronavirus 2
  REGION 1..13: note = Table B: HLA-DRB1*13:02L HLA-DRB1*01:03L HLA-DRB1*04:04L HLA-DRB1*04:05L HLA-DRB4*03:01NL HLA-DRB3*02:01L HLA-DPA1*01:03-B1*03:01L HLA-DRB1*04:10L HLA-DRB1*12:02L HLA-DRB1*14:54L HLA-DRB1*04:08L
PVVQTIEVNSFSG

SEQ ID NO: 14124 - protein, 10 aa, Severe acute respiratory syndrome coronavirus 2
  REGION 1..10: note = Table B: HLA-DRB1*13:02L HLA-DRB1*13:03M HLA-DQA1*01:02-B1*06:02L HLA-DRB1*01:01L HLA-DRB4*03:01NL HLA-DRB3*02:01L HLA-DRB1*14:01L HLA-DRB1*11:04L HLA-DRB1*08:01M HLA-DRB5*01:01L HLA-DPA1*01:03-B1*04:02L HLA-DRB1*12:01M
  REGION 1..10: note = CONT. FROM ABOVE: HLA-DRB1*12:02L HLA-DPA1*03:01-B1*105:01L HLA- DQA1*03:01-B1*03:02M HLA-DQA1*05:05-B1*03:01M HLA-DRB1*14:17L HL A-DQA1*01:03-B1*06:01L HLA-DQA1*02:01-B1*03:03L HLA-DRB1*15:01L
EVNSFSGYLK

SEQ ID NO: 14125 - protein, 12 aa, Severe acute respiratory syndrome coronavirus 2
  REGION 1..12: note = Table B: HLA-DRB1*13:02L HLA-DQA1*01:02-B1*06:02L HLA-DRB1*08:04L HLA-DRB1*08:77L HLA-DRB3*02:01L HLA-DPA1*01:03-B1*03:01L HLA-DPA1*03:01-B1*04:02L HLA-DRB1*11:04L HLA-DRB1*14:02L HLA-DQA1*05:05-B1*03:19L
  REGION 1..12: note = CONT. FROM ABOVE: HLA-DRB1*12:02L HLA-DQA1*05:05-B1*03:01L HLA-D RB1*10:01L HLA-DRB1*08:03L
NVYIKNADIVEE

SEQ ID NO: 14126 - protein, 12 aa, Severe acute respiratory syndrome coronavirus 2
  REGION 1..12: note = Table B: HLA-DRB1*13:02L HLA-DQA1*01:02-B1*06:02L HLA-DRB1*08:04L HLA-DPA1*01:03-B1*03:01L HLA-DPA1*03:01-B1*04:02L HLA-DRB1*08:01L HLA-DQA1*05:05-B1*03:19L HLA-DQA1*05:05-B1*03:01L
VYIKNADIVEEA

SEQ ID NO: 14127 - protein, 12 aa, Severe acute respiratory syndrome coronavirus 2
  REGION 1..12: note = Table B: HLA-DRB1*13:02L HLA-DRB1*13:03L HLA-DRB1*01:03L HLA-DRB1*04:04L HLA-DRB1*04:05L HLA-DRB1*01:02L HLA-DRB4*03:01NL HLA-DPA1*01:03-B1*03:01L HLA-DRB1*08:01L HLA-DQA1*05:05-B1*03:19L HLA-DRB1*04:10L HLA-DRB1*12:01L
  REGION 1..12: note = CONT. FROM ABOVE: HLA-DPA1*02:01-B1*13:01L HLA-DPA1*01:02-B1*04: 01L HLA-DRB1*04:08L HLA-DRB1*15:03L
YIKNADIVEEAK

SEQ ID NO: 14128 - protein, 12 aa, Severe acute respiratory syndrome coronavirus 2
  REGION 1..12: note = Table B: HLA-DRB1*13:02L HLA-DRB1*08:04L HLA-DRB1*11:01L HLA-DRB3*01:01L HLA-DQA1*01:03-B1*06:01L HLA-DRB1*15:03L
DIVEEAKKVKPT

SEQ ID NO: 14129 - protein, 12 aa, Severe acute respiratory syndrome coronavirus 2
  REGION 1..12: note = Table B: HLA-DRB1*13:02L HLA-DRB1*04:05L HLA-DQA1*01:02-B1*06:02L HLA-DRB1*01:01L HLA-DRB1*08:77L HLA-DRB1*11:03L HLA-DRB1*11:04L HLA-DRB1*08:01L HLA-DQA1*05:01-B1*02:01L HLA-DRB1*12:02L
  REGION 1..12: note = CONT. FROM ABOVE: HLA-DPA1*03:01-B1*105:01L HLA-DRB1*14:54L HLA- DRB1*07:01L HLA-DRB1*04:08L HLA-DRB1*15:03L
NVYLKHGGGVAG

SEQ ID NO: 14130 - protein, 14 aa, Severe acute respiratory syndrome coronavirus 2
  REGION 1..14: note = Table B: HLA-DRB1*13:02L HLA-DRB1*04:05L HLA-DRB1*01:01L HLA-DRB1*08:04L HLA-DRB1*14:02L HLA-DQA1*05:01-B1*02:01L HLA-DPA1*02:01-B1*13:01L HLA-DPA1*01:03-B1*104:01L
VYLKHGGGVAGALN

SEQ ID NO: 14131 - protein, 12 aa, Severe acute respiratory syndrome coronavirus 2
  REGION 1..12: note = Table B: HLA-DRB1*13:02L HLA-DRB1*04:05L HLA-DRB1*01:02L HLA-DPA1*01:03-B1*03:01L HLA-DQA1*01:01-B1*05:01L HLA-DRB1*08:01L HLA-DPA1*01:03-B1*04:02L HLA-DRB1*15:03L
GGVAGALNKATN

SEQ ID NO: 14132 - protein, 14 aa, Severe acute respiratory syndrome coronavirus 2
  REGION 1..14: note = Table B: HLA-DRB1*13:02L HLA-DRB1*01:02L HLA-DRB1*04:10L HLA-DPA1*02:01-B1*13:01L
KATNNAMQVESDDY

SEQ ID NO: 14133 - protein, 15 aa, Severe acute respiratory syndrome coronavirus 2
  REGION 1..15: note = Table B: HLA-DRB1*13:02L HLA-DRB1*14:01L HLA-DRB1*14:02L HLA-DQA1*05:05-B1*03:01L
NNAMQVESDDYIATN

SEQ ID NO: 14134 - protein, 12 aa, Severe acute respiratory syndrome coronavirus 2
  REGION 1..12: note = Table B: HLA-DRB1*13:02L HLA-DRB1*01:03L HLA-DRB1*04:05L HLA-DQA1*01:02-B1*06:02L HLA-DPA1*01:03-B1*03:01L HLA-DRB1*12:01L HLA-DPA1*03:01-B1*105:01L
VGPNVNKGEDIQ

SEQ ID NO: 14135 - protein, 12 aa, Severe acute respiratory syndrome coronavirus 2
  REGION 1..12: note = Table B: HLA-DRB1*13:02L HLA-DRB1*04:04L HLA-DRB1*01:02L HLA-DRB1*08:04L HLA-DRB3*02:01L HLA-DRB1*14:01L HLA-DRB1*11:03L HLA-DRB1*11:04L HLA-DQA1*01:01-B1*05:01L HLA-DRB1*08:01L HLA-DRB1*12:02L HLA-DPA1*02:01-B1*13:01L
  REGION 1..12: note = CONT. FROM ABOVE: HLA-DPA1*03:01-B1*105:01L HLA-DQA1*05:05-B1*03 :01L HLA-DQA1*01:03-B1*06:01L HLA-DRB1*08:03L
EDIQLLKSAYEN

SEQ ID NO: 14136 - protein, 12 aa, Severe acute respiratory syndrome coronavirus 2
  REGION 1..12: note = Table B: HLA-DRB1*13:02L HLA-DRB1*01:03L HLA-DRB1*08:04L HLA-DRB3*02:01L HLA-DPA1*01:03-B1*03:01L HLA-DQA1*01:01-B1*05:01L HLA-DRB1*08:01L HLA-DQA1*05:05-B1*03:01L HLA-DRB1*07:01L HLA-DRB1*04:08L
SAYENFNQHEVL

SEQ ID NO: 14137 - protein, 13 aa, Severe acute respiratory syndrome coronavirus 2
  REGION 1..13: note = Table B: HLA-DRB1*13:02L HLA-DRB1*13:03L HLA-DRB1*01:03L HLA-DRB1*04:02L HLA-DRB1*01:02L HLA-DRB1*08:04L HLA-DPA1*01:03-B1*03:01L HLA-DRB1*08:01L HLA-DPA1*01:03-B1*04:01L HLA-DPA1*01:03-B1*04:02L
  REGION 1..13: note = CONT. FROM ABOVE: HLA-DRB1*12:01L HLA-DQA1*05:05-B1*03:01L HLA-D RB1*04:08L
ENFNQHEVLLAPL

SEQ ID NO: 14138 - protein, 14 aa, Severe acute respiratory syndrome coronavirus 2
  REGION 1..14: note = Table B: HLA-DRB1*13:02L HLA-DRB1*01:03L HLA-DRB1*08:04L HLA-DPA1*01:03-B1*03:01L HLA-DRB1*14:01L HLA-DQA1*01:01-B1*05:01L HLA-DRB1*08:01L HLA-DQA1*05:05-B1*03:19L HLA-DQA1*05:01-B1*02:01L
  REGION 1..14: note = CONT. FROM ABOVE: HLA-DPA1*02:01-B1*13:01L HLA-DPA1*01:03-B1*104 :01L HLA-DRB1*10:01L HLA-DRB1*04:08L
NQHEVLLAPLLSAG

SEQ ID NO: 14139 - protein, 14 aa, Severe acute respiratory syndrome coronavirus 2
  REGION 1..14: note = Table B: HLA-DRB1*13:02L HLA-DRB1*04:04L HLA-DRB1*08:04L HLA-DRB1*14:01L HLA-DRB1*08:01L HLA-DQA1*05:05-B1*03:19L HLA-DPA1*01:03-B1*04:01L HLA-DPA1*01:03-B1*04:02L HLA-DPA1*01:03-B1*104:01L
TVRTNVYLAVFDKN

SEQ ID NO: 14140 - protein, 12 aa, Severe acute respiratory syndrome coronavirus 2
  REGION 1..12: note = Table B: HLA-DRB1*13:02L HLA-DRB1*08:04L HLA-DRB3*02:01L HLA-DRB1*08:01L HLA-DRB1*04:08L
VYLAVFDKNLYD

SEQ ID NO: 14141 - protein, 12 aa, Severe acute respiratory syndrome coronavirus 2
  REGION 1..12: note = Table B: HLA-DRB1*13:02L HLA-DRB1*04:05L HLA-DQA1*01:02-B1*06:02L HLA-DRB1*01:02L HLA-DPA1*02:01-B1*13:01L HLA-DPA1*01:03-B1*104:01L HLA-DRB1*15:03L
YDKLVSSFLEMK

SEQ ID NO: 14142 - protein, 13 aa, Severe acute respiratory syndrome coronavirus 2
  REGION 1..13: note = Table B: HLA-DRB1*13:02L HLA-DQA1*05:05-B1*03:19L HLA-DRB1*08:02L
SSFLEMKSEKQVE

SEQ ID NO: 14143 - protein, 11 aa, Severe acute respiratory syndrome coronavirus 2
  REGION 1..11: note = Table B: HLA-DRB1*13:02L HLA-DRB1*13:03L HLA-DRB1*01:03L HLA-DRB1*08:01L HLA-DRB1*12:01L HLA-DRB1*14:17L HLA-DQA1*02:01-B1*03:03L
EMKSEKQVEQK

SEQ ID NO: 14144 - protein, 13 aa, Severe acute respiratory syndrome coronavirus 2
  REGION 1..13: note = Table B: HLA-DRB1*13:02L HLA-DRB1*01:03L HLA-DRB1*04:02L HLA-DRB1*04:05L HLA-DRB1*08:04L HLA-DRB1*11:03L HLA-DRB1*11:04L HLA-DRB1*11:01L HLA-DRB3*01:01L HLA-DRB1*04:08L HLA-DRB1*08:03L
EQKIAEIPKEEVK

SEQ ID NO: 14145 - protein, 12 aa, Severe acute respiratory syndrome coronavirus 2
  REGION 1..12: note = Table B: HLA-DRB1*13:02L HLA-DRB1*04:05L HLA-DRB1*08:04L HLA-DRB1*11:04L HLA-DRB1*08:01L HLA-DRB1*11:01L HLA-DRB1*12:01L HLA-DRB3*01:01L HLA-DRB1*04:08L
KIAEIPKEEVKP

SEQ ID NO: 14146 - protein, 11 aa, Severe acute respiratory syndrome coronavirus 2
  REGION 1..11: note = Table B: HLA-DRB1*13:02L HLA-DRB4*03:01NL HLA-DRB1*08:77L HLA-DPA1*03:01-B1*04:02L HLA-DRB1*03:01L HLA-DQA1*01-B1*05L HLA-DRB4*01:01L HLA-DQA1*05:05-B1*03:116L HLA-DPA1*01:03-B1*04:02L HLA-DRB1*12:01L
  REGION 1..11: note = CONT. FROM ABOVE: HLA-DPA1*02:01-B1*13:01L HLA-DPA1*01:03-B1*104 :01L HLA-DRB1*10:01L HLA-DRB1*08:02L
AEIPKEEVKPF

SEQ ID NO: 14147 - protein, 10 aa, Severe acute respiratory syndrome coronavirus 2
  REGION 1..10: note = Table B: HLA-DRB1*13:02L HLA-DRB1*13:03L HLA-DRB1*08:01L HLA-DRB1*12:01L HLA-DQA1*03:01-B1*03:02L HLA-DQA1*05:05-B1*03:01L
EVKPFITESK

SEQ ID NO: 14148 - protein, 10 aa, Severe acute respiratory syndrome coronavirus 2
  REGION 1..10: note = Table B: HLA-DRB1*13:02L HLA-DRB1*13:03L HLA-DRB1*01:01L HLA-DRB4*03:01NL HLA-DRB3*02:01L HLA-DRB1*11:04L HLA-DRB1*08:01L HLA-DRB5*01:01L HLA-DPA1*01:03-B1*04:02L HLA-DRB1*12:01L HLA-DQA1*03:01-B1*03:02L HLA-DQA1*05:05-B1*03:01L
  REGION 1..10: note = CONT. FROM ABOVE: HLA-DRB1*14:17L
TESKPSVEQR

SEQ ID NO: 14149 - protein, 10 aa, Severe acute respiratory syndrome coronavirus 2
  REGION 1..10: note = Table B: HLA-DRB1*13:02L HLA-DRB1*13:03L HLA-DRB4*03:01NL HLA-DRB1*08:01L HLA-DRB1*12:01L HLA-DQA1*03:01-B1*03:02L HLA-DQA1*05:05-B1*03:01L
ESKPSVEQRK

SEQ ID NO: 14150 - protein, 13 aa, Severe acute respiratory syndrome coronavirus 2
  REGION 1..13: note = Table B: HLA-DRB1*13:02L HLA-DRB1*08:04L HLA-DRB1*11:04L HLA-DRB1*11:01L
VTTTLEETKFLTE

SEQ ID NO: 14151 - protein, 12 aa, Severe acute respiratory syndrome coronavirus 2
  REGION 1..12: note = Table B: HLA-DRB1*13:02L HLA-DRB1*13:03L HLA-DRB1*04:02L HLA-DRB1*04:04L HLA-DRB1*04:05L HLA-DRB4*03:01NL HLA-DRB1*08:77L HLA-DRB3*02:01L HLA-DRB1*11:03L HLA-DRB1*14:02L HLA-DQA1*05:05-B1*03:19L HLA-DRB3*01:01L HLA-DRB1*14:54L
  REGION 1..12: note = CONT. FROM ABOVE: HLA-DRB1*14:17L HLA-DRB1*07:01L HLA-DRB1*10:01 L HLA-DRB1*08:03L
TTLEETKFLTEN

SEQ ID NO: 14152 - protein, 11 aa, Severe acute respiratory syndrome coronavirus 2
  REGION 1..11: note = Table B: HLA-DRB1*13:02L
NLHPDSATLVS

SEQ ID NO: 14153 - protein, 13 aa, Severe acute respiratory syndrome coronavirus 2
  REGION 1..13: note = Table B: HLA-DRB1*13:02L HLA-DRB1*01:03L HLA-DRB1*04:02L HLA-DRB1*04:05L HLA-DRB1*01:02L HLA-DRB4*03:01NL HLA-DRB1*08:04L HLA-DRB1*08:77L HLA-DRB3*02:01L HLA-DPA1*03:01-B1*04:02L HLA-DRB1*03:01L HLA-DRB1*14:02L HLA-DRB1*08:01L HLA-DRB4*01:01L
  REGION 1..13: note = CONT. FROM ABOVE: HLA-DQA1*05:05-B1*03:116L HLA-DPA1*01:03-B1*04 :02L HLA-DRB1*12:01L HLA-DRB3*01:01L HLA-DPA1*02:01-B1*13:01L HL A-DPA1*01:03-B1*104:01L HLA-DPA1*01:02-B1*04:01L HLA-DRB1*04:08L HLA-DRB1*15:03L
LHPDSATLVSDID

SEQ ID NO: 14154 - protein, 14 aa, Severe acute respiratory syndrome coronavirus 2
  REGION 1..14: note = Table B: HLA-DRB1*13:02L HLA-DRB1*04:05L HLA-DRB1*01:02L
IDITFLKKDAPYIV

SEQ ID NO: 14155 - protein, 18 aa, Severe acute respiratory syndrome coronavirus 2
  REGION 1..18: note = Table B: HLA-DRB1*13:02L
IVGDVVQEGVLTAVVIPT

SEQ ID NO: 14156 - protein, 15 aa, Severe acute respiratory syndrome coronavirus 2
  REGION 1..15: note = Table B: HLA-DRB1*13:02L HLA-DRB1*04:05L HLA-DRB1*11:04L HLA-DRB3*01:01L
GTTEMLAKALRKVPT

SEQ ID NO: 14157 - protein, 15 aa, Severe acute respiratory syndrome coronavirus 2
  REGION 1..15: note = Table B: HLA-DRB1*13:02L HLA-DRB1*11:01L HLA-DPA1*03:01-B1*105:01L HLA-DRB1*16:01L HLA-DRB1*15:03L
TEMLAKALRKVPTDN

SEQ ID NO: 14158 - protein, 14 aa, Severe acute respiratory syndrome coronavirus 2
  REGION 1..14: note = Table B: HLA-DRB1*13:02L HLA-DRB1*01:03L HLA-DRB1*04:04L HLA-DRB1*01:02L HLA-DRB1*08:04L HLA-DRB1*08:77L HLA-DRB3*02:01L HLA-DPA1*01:03-B1*03:01L HLA-DPA1*03:01-B1*04:02L HLA-DRB1*14:01L HLA-DRB1*11:03L HLA-DRB1*11:04L HLA-DRB1*14:02L
  REGION 1..14: note = CONT. FROM ABOVE: HLA-DQA1*01:01-B1*05:01L HLA-DRB1*08:01L HLA-D RB1*11:01L HLA-DPA1*01:03-B1*04:01L HLA-DQA1*05:05-B1*03:116L HL A-DRB1*09:01L HLA-DPA1*01:03-B1*04:02L HLA-DRB1*12:02L HLA-DPA1* 02:01-B1*13:01L HLA-DPA1*01:03-B1*104:01L
  REGION 1..14: note = CONT. FROM ABOVE: HLA-DPA1*01:02-B1*04:01L HLA-DRB1*07:01L HLA-D RB1*10:01L HLA-DRB1*08:03L HLA-DRB1*15:03L
VPTDNYITTYPGQG

SEQ ID NO: 14159 - protein, 12 aa, Severe acute respiratory syndrome coronavirus 2
  REGION 1..12: note = Table B: HLA-DRB1*13:02L HLA-DRB1*08:77L HLA-DRB1*14:01L HLA-DPA1*01:03-B1*04:01L HLA-DRB1*09:01L HLA-DRB1*12:02L HLA-DRB1*07:01L
DNYITTYPGQGL

SEQ ID NO: 14160 - protein, 11 aa, Severe acute respiratory syndrome coronavirus 2
  REGION 1..11: note = Table B: HLA-DRB1*13:02L HLA-DRB1*04:04L HLA-DRB1*04:05L HLA-DRB4*03:01NL HLA-DRB1*08:77L HLA-DRB1*11:03L HLA-DRB1*14:02L HLA-DRB1*08:01L HLA-DRB1*09:01L HLA-DRB1*12:02L HLA-DRB1*14:54L HLA-DRB1*07:01L
YITTYPGQGLN

SEQ ID NO: 14161 - protein, 15 aa, Severe acute respiratory syndrome coronavirus 2
  REGION 1..15: note = Table B: HLA-DRB1*13:02L HLA-DRB1*13:03L HLA-DRB1*01:03L HLA-DRB1*04:04L HLA-DRB1*01:02L HLA-DRB4*03:01NL HLA-DPA1*01:03-B1*03:01L HLA-DPA1*03:01-B1*04:02L HLA-DQA1*01:01-B1*05:01L HLA-DRB1*08:01L
  REGION 1..15: note = CONT. FROM ABOVE: HLA-DPA1*01:03-B1*04:02L HLA-DRB1*12:01L HLA-D PA1*02:01-B1*13:01L HLA-DPA1*03:01-B1*105:01L HLA-DRB1*14:54L HL A-DPA1*01:03-B1*104:01L HLA-DPA1*01:02-B1*04:01L HLA-DRB1*04:08L HLA-DRB1*15:03L
YPGQGLNGYTVEEAK

SEQ ID NO: 14162 - protein, 12 aa, Severe acute respiratory syndrome coronavirus 2
  REGION 1..12: note = Table B: HLA-DRB1*13:02L HLA-DRB1*13:03L HLA-DRB1*01:03L HLA-DRB1*01:02L HLA-DRB1*08:77L HLA-DRB3*02:01L HLA-DPA1*01:03-B1*03:01L HLA-DPA1*03:01-B1*04:02L HLA-DRB1*14:01L HLA-DPA1*01:03-B1*04:01L HLA-DRB1*12:02L
  REGION 1..12: note = CONT. FROM ABOVE: HLA-DRB1*14:54L HLA-DQA1*05:05-B1*03:01L HLA-D PA1*01:02-B1*04:01L HLA-DRB1*04:08L
LNGYTVEEAKTV

SEQ ID NO: 14163 - protein, 10 aa, Severe acute respiratory syndrome coronavirus 2
  REGION 1..10: note = Table B: HLA-DRB1*13:02L HLA-DRB1*13:03L HLA-DRB1*01:03L HLA-DRB1*04:02L HLA-DRB1*01:01L HLA-DRB4*03:01NL HLA-DRB1*08:01L HLA-DRB5*01:01L HLA-DRB1*12:01L HLA-DQA1*03:01-B1*03:02L HLA-DQA1*05:05-B1*03:01L HLA-DRB1*14:17L HLA-DRB1*16:01L
  REGION 1..10: note = CONT. FROM ABOVE: HLA-DQA1*02:01-B1*03:03L
TVEEAKTVLK

SEQ ID NO: 14164 - protein, 15 aa, Severe acute respiratory syndrome coronavirus 2
  REGION 1..15: note = Table B: HLA-DRB1*13:02L HLA-DRB1*04:05L HLA-DPA1*01:03-B1*03:01L HLA-DRB1*12:01L HLA-DPA1*02:01-B1*13:01L HLA-DPA1*03:01-B1*105:01L HLA-DRB1*16:01L
TVLKKCKSAFYILPS

SEQ ID NO: 14165 - protein, 12 aa, Severe acute respiratory syndrome coronavirus 2
  REGION 1..12: note = Table B: HLA-DRB1*13:02L HLA-DRB1*13:03L HLA-DRB1*08:04L HLA-DRB1*12:01L HLA-DRB1*12:02L HLA-DRB1*14:54L HLA-DRB1*16:01L
LPSIISNEKQEI

SEQ ID NO: 14166 - protein, 12 aa, Severe acute respiratory syndrome coronavirus 2
  REGION 1..12: note = Table B: HLA-DRB1*13:02L HLA-DRB1*13:03L HLA-DQA1*01:02-B1*06:02L HLA-DRB1*08:04L HLA-DRB1*08:77L HLA-DRB1*14:02L HLA-DRB1*12:02L
PSIISNEKQEIL

SEQ ID NO: 14167 - protein, 11 aa, Severe acute respiratory syndrome coronavirus 2
  REGION 1..11: note = Table B: HLA-DRB1*13:02L HLA-DRB1*13:03L HLA-DRB1*01:03L HLA-DRB1*04:05L HLA-DQA1*01:02-B1*06:02L HLA-DRB1*01:02L HLA-DRB4*03:01NL HLA-DRB1*08:04L HLA-DRB1*08:77L HLA-DPA1*01:03-B1*03:01L HLA-DRB1*03:01L HLA-DRB1*11:03L
  REGION 1..11: note = CONT. FROM ABOVE: HLA-DRB1*11:04L HLA-DRB1*14:02L HLA-DRB1*11:01 L HLA-DQA1*05:05-B1*03:19L HLA-DRB1*04:10L HLA-DRB1*12:02L HLA-D RB3*01:01L HLA-DPA1*03:01-B1*105:01L HLA-DQA1*05:05-B1*03:01L HL A-DRB1*14:17L HLA-DRB1*10:01L HLA-DQA1*01:03-B1*06:01L
  REGION 1..11: note = CONT. FROM ABOVE: HLA-DRB1*04:08L HLA-DRB1*08:03L
IISNEKQEILG

SEQ ID NO: 14168 - protein, 12 aa, Severe acute respiratory syndrome coronavirus 2
  REGION 1..12: note = Table B: HLA-DRB1*13:02L HLA-DRB3*02:01L HLA-DPA1*03:01-B1*04:02L HLA-DRB1*12:01L HLA-DRB1*07:01L HLA-DRB1*16:01L
KQEILGTVSWNL

SEQ ID NO: 14169 - protein, 11 aa, Severe acute respiratory syndrome coronavirus 2
  REGION 1..11: note = Table B: HLA-DRB1*13:02L HLA-DRB1*13:03L HLA-DRB1*01:03L HLA-DRB1*04:02L HLA-DRB1*04:05L HLA-DRB4*03:01NL HLA-DRB1*08:77L HLA-DRB3*02:01L HLA-DPA1*03:01-B1*04:02L HLA-DRB1*14:01L HLA-DRB1*11:03L HLA-DQA1*05:05-B1*03:19L
  REGION 1..11: note = CONT. FROM ABOVE: HLA-DPA1*01:03-B1*04:01L HLA-DRB1*12:02L HLA-D RB1*14:17L HLA-DRB1*07:01L HLA-DRB1*04:08L
EILGTVSWNLR

SEQ ID NO: 14170 - protein, 13 aa, Severe acute respiratory syndrome coronavirus 2
  REGION 1..13: note = Table B: HLA-DRB1*13:02L HLA-DRB1*01:03L HLA-DRB1*01:02L HLA-DRB3*01:01L HLA-DRB1*16:01L HLA-DRB1*15:03L
GTVSWNLREMLAH

SEQ ID NO: 14171 - protein, 10 aa, Severe acute respiratory syndrome coronavirus 2
  REGION 1..10: note = Table B: HLA-DRB1*13:02L HLA-DRB1*13:03L HLA-DRB1*01:01L HLA-DRB4*03:01NL HLA-DRB1*11:04L HLA-DRB1*08:01L HLA-DRB5*01:01L HLA-DRB1*12:01L HLA-DQA1*03:01-B1*03:02M HLA-DQA1*05:05-B1*03:01L HLA-DRB1*14:17L
  REGION 1..10: note = CONT. FROM ABOVE: HLA-DQA1*01:03-B1*06:01L HLA-DQA1*02:01-B1*03: 03L
EMLAHAEETR

SEQ ID NO: 14172 - protein, 13 aa, Severe acute respiratory syndrome coronavirus 2
  REGION 1..13: note = Table B: HLA-DRB1*13:02L HLA-DRB1*04:04L HLA-DRB1*07:01L
ETRKLMPVCVETK

SEQ ID NO: 14173 - protein, 11 aa, Severe acute respiratory syndrome coronavirus 2
  REGION 1..11: note = Table B: HLA-DRB1*13:02M HLA-DRB1*01:01L HLA-DRB4*03:01NL HLA-DRB1*14:01L HLA-DRB1*11:04L HLA-DRB5*01:01L HLA-DRB1*12:01M HLA-DRB1*12:02L HLA-DQA1*05:05-B1*03:01M HLA-DRB1*15:01L
ETKAIVSTIQR

SEQ ID NO: 14174 - protein, 14 aa, Severe acute respiratory syndrome coronavirus 2
  REGION 1..14: note = Table B: HLA-DRB1*13:02L HLA-DRB1*01:03L HLA-DRB1*08:01L HLA-DRB3*01:01L HLA-DRB1*04:08L
VSTIQRKYKGIKIQ

SEQ ID NO: 14175 - protein, 14 aa, Severe acute respiratory syndrome coronavirus 2
  REGION 1..14: note = Table B: HLA-DRB1*13:02L HLA-DRB3*01:01L HLA-DRB1*07:01L
TIQRKYKGIKIQEG

SEQ ID NO: 14176 - protein, 12 aa, Severe acute respiratory syndrome coronavirus 2
  REGION 1..12: note = Table B: HLA-DRB1*13:02L HLA-DRB1*13:03L HLA-DRB1*04:04L HLA-DRB1*08:04L HLA-DPA1*01:03-B1*03:01L HLA-DRB1*11:04L HLA-DRB1*08:01L HLA-DPA1*01:03-B1*04:02L HLA-DRB1*12:02L HLA-DPA1*02:01-B1*13:01L HLA-DPA1*01:03-B1*104:01L
  REGION 1..12: note = CONT. FROM ABOVE: HLA-DPA1*01:02-B1*04:01L HLA-DRB1*10:01L HLA-D RB1*08:03L
YKGIKIQEGVVD

SEQ ID NO: 14177 - protein, 12 aa, Severe acute respiratory syndrome coronavirus 2
  REGION 1..12: note = Table B: HLA-DRB1*13:02L HLA-DRB1*04:04L HLA-DRB3*02:01L HLA-DPA1*03:01-B1*04:02L HLA-DPA1*02:01-B1*13:01L HLA-DRB1*10:01L
GIKIQEGVVDYG

SEQ ID NO: 14178 - protein, 13 aa, Severe acute respiratory syndrome coronavirus 2
  REGION 1..13: note = Table B: HLA-DRB1*13:02L HLA-DRB1*04:04L HLA-DRB1*01:01L HLA-DRB1*11:03L HLA-DRB1*11:04L HLA-DRB1*14:02L HLA-DRB1*11:01L HLA-DRB3*01:01L HLA-DRB1*07:01L HLA-DRB1*15:01L
ARFYFYTSKTTVA

SEQ ID NO: 14179 - protein, 12 aa, Severe acute respiratory syndrome coronavirus 2
  REGION 1..12: note = Table B: HLA-DRB1*13:02L HLA-DRB1*04:04L HLA-DRB1*01:01L HLA-DRB1*08:04L HLA-DRB1*08:77L HLA-DPA1*01:03-B1*03:01L HLA-DRB1*11:03L HLA-DRB1*11:04L HLA-DRB1*14:02L HLA-DQA1*01:01-B1*05:01L HLA-DRB1*11:01L
  REGION 1..12: note = CONT. FROM ABOVE: HLA-DPA1*01:03-B1*04:01L HLA-DRB1*09:01L HLA-D PA1*01:03-B1*04:02L HLA-DRB1*12:02L HLA-DRB3*01:01L HLA-DRB1*07: 01L HLA-DRB1*10:01L HLA-DRB1*08:03L HLA-DRB1*15:01L
FYFYTSKTTVAS

SEQ ID NO: 14180 - protein, 14 aa, Severe acute respiratory syndrome coronavirus 2
  REGION 1..14: note = Table B: HLA-DRB1*13:02L HLA-DRB1*01:03L HLA-DPA1*02:01-B1*13:01L HLA-DPA1*01:03-B1*104:01L
SKTTVASLINTLND

SEQ ID NO: 14181 - protein, 15 aa, Severe acute respiratory syndrome coronavirus 2
  REGION 1..15: note = Table B: HLA-DRB1*13:02L HLA-DRB1*11:04L HLA-DRB1*08:01L
NETLVTMPLGYVTHG

SEQ ID NO: 14182 - protein, 14 aa, Severe acute respiratory syndrome coronavirus 2
  REGION 1..14: note = Table B: HLA-DRB1*13:02L HLA-DPA1*01:03-B1*04:02L HLA-DPA1*01:03-B1*104:01L
LVTMPLGYVTHGLN

SEQ ID NO: 14183 - protein, 15 aa, Severe acute respiratory syndrome coronavirus 2
  REGION 1..15: note = Table B: HLA-DRB1*13:02L HLA-DQA1*05:05-B1*03:19L HLA-DRB1*04:10L HLA-DQA1*05:05-B1*03:01L
MPLGYVTHGLNLEEA

SEQ ID NO: 14184 - protein, 11 aa, Severe acute respiratory syndrome coronavirus 2
  REGION 1..11: note = Table B: HLA-DRB1*13:02L HLA-DRB1*04:05L HLA-DQA1*01:02-B1*06:02L HLA-DRB1*11:04L HLA-DRB1*11:01L HLA-DRB1*15:03L
RYMRSLKVPAT

SEQ ID NO: 14185 - protein, 14 aa, Severe acute respiratory syndrome coronavirus 2
  REGION 1..14: note = Table B: HLA-DRB1*13:02L HLA-DRB1*01:03L HLA-DRB1*04:05L HLA-DRB4*03:01NL HLA-DPA1*01:03-B1*03:01L HLA-DQA1*05:01-B1*02:01L HLA-DRB1*04:10L HLA-DRB1*12:01L HLA-DPA1*01:03-B1*104:01L HLA-DRB1*04:08L
SLKVPATVSVSSPD

SEQ ID NO: 14186 - protein, 14 aa, Severe acute respiratory syndrome coronavirus 2
  REGION 1..14: note = Table B: HLA-DRB1*13:02L HLA-DRB1*13:03L HLA-DRB1*01:03L HLA-DRB1*04:02L HLA-DRB1*04:05L HLA-DQA1*01:02-B1*06:02L HLA-DRB1*01:02L HLA-DRB4*03:01NL HLA-DRB1*08:77L HLA-DPA1*01:03-B1*03:01L HLA-DRB1*04:10L HLA-DRB1*12:01L
  REGION 1..14: note = CONT. FROM ABOVE: HLA-DRB1*12:02L HLA-DPA1*02:01-B1*13:01L HLA-D PA1*03:01-B1*105:01L HLA-DRB1*14:54L HLA-DRB1*14:17L HLA-DRB1*07 :01L HLA-DRB1*16:01L HLA-DQA1*01:03-B1*06:01L HLA-DRB1*04:08L HL A-DRB1*15:03L
VPATVSVSSPDAVT

SEQ ID NO: 14187 - protein, 11 aa, Severe acute respiratory syndrome coronavirus 2
  REGION 1..11: note = Table B: HLA-DRB1*13:02L HLA-DRB5*01:01L
SVSSPDAVTAY

SEQ ID NO: 14188 - protein, 15 aa, Severe acute respiratory syndrome coronavirus 2
  REGION 1..15: note = Table B: HLA-DRB1*13:02L HLA-DRB1*11:02L HLA-DRB1*11:03L HLA-DRB1*11:04L HLA-DRB1*08:01L HLA-DRB1*08:03L
SPDAVTAYNGYLTSS

SEQ ID NO: 14189 - protein, 10 aa, Severe acute respiratory syndrome coronavirus 2
  REGION 1..10: note = Table B: HLA-DRB1*13:02L HLA-DRB1*13:03L HLA-DQA1*01:02-B1*06:02L HLA-DRB1*01:01L HLA-DRB4*03:01NL HLA-DRB3*02:01L HLA-DRB1*14:01L HLA-DRB1*11:04L HLA-DRB1*08:01L HLA-DRB5*01:01L HLA-DPA1*01:03-B1*04:02L HLA-DRB1*12:01L
  REGION 1..10: note = CONT. FROM ABOVE: HLA-DRB1*12:02L HLA-DPA1*03:01-B1*105:01L HLA- DQA1*03:01-B1*03:02L HLA-DQA1*05:05-B1*03:01M HLA-DRB1*14:17L HL A-DQA1*01:03-B1*06:01L HLA-DQA1*02:01-B1*03:03L HLA-DRB1*15:01L
ETISLAGSYK

SEQ ID NO: 14190 - protein, 14 aa, Severe acute respiratory syndrome coronavirus 2
  REGION 1..14: note = Table B: HLA-DRB1*13:02L HLA-DRB1*01:03L HLA-DRB1*08:04L HLA-DRB1*14:02L HLA-DRB1*08:01L HLA-DPA1*01:03-B1*04:02L
TISLAGSYKDWSYS

SEQ ID NO: 14191 - protein, 16 aa, Severe acute respiratory syndrome coronavirus 2
  REGION 1..16: note = Table B: HLA-DRB1*13:02L HLA-DRB1*14:02L
ISLAGSYKDWSYSGQS

SEQ ID NO: 14192 - protein, 14 aa, Severe acute respiratory syndrome coronavirus 2
  REGION 1..14: note = Table B: HLA-DRB1*13:02L HLA-DRB1*01:03L HLA-DRB1*04:04L HLA-DRB1*01:02L HLA-DRB1*08:04L HLA-DPA1*03:01-B1*04:02L HLA-DRB1*14:02L HLA-DQA1*01:01-B1*05:01L HLA-DPA1*01:03-B1*04:01L HLA-DPA1*01:03-B1*04:02L
  REGION 1..14: note = CONT. FROM ABOVE: HLA-DRB1*12:01L HLA-DPA1*01:03-B1*02:01L HLA-D PA1*01:03-B1*104:01L HLA-DPA1*01:02-B1*04:01L HLA-DRB1*07:01L HL A-DRB1*10:01L HLA-DRB1*15:03L
GSYKDWSYSGQSTQ

SEQ ID NO: 14193 - protein, 14 aa, Severe acute respiratory syndrome coronavirus 2
  REGION 1..14: note = Table B: HLA-DRB1*13:02L HLA-DRB1*04:05L HLA-DRB1*08:04L HLA-DRB1*12:01L HLA-DRB3*01:01L HLA-DPA1*02:01-B1*13:01L HLA-DRB1*15:03L
TQLGIEFLKRGDKS

SEQ ID NO: 14194 - protein, 17 aa, Severe acute respiratory syndrome coronavirus 2
  REGION 1..17: note = Table B: HLA-DRB1*13:02L HLA-DRB1*04:05L HLA-DRB1*12:01L HLA-DPA1*02:01-B1*13:01L
IEFLKRGDKSVYYTSNP

SEQ ID NO: 14195 - protein, 12 aa, Severe acute respiratory syndrome coronavirus 2
  REGION 1..12: note = Table B: HLA-DRB1*13:02L HLA-DRB1*04:02L HLA-DRB3*02:01L HLA-DRB1*12:02L HLA-DQA1*03:01-B1*03:02L HLA-DRB1*14:54L
KSVYYTSNPTTF

SEQ ID NO: 14196 - protein, 12 aa, Severe acute respiratory syndrome coronavirus 2
  REGION 1..12: note = Table B: HLA-DRB1*13:02L HLA-DQA1*01-B1*05L HLA-DQA1*05:05-B1*03:01L HLA-DRB1*14:17L
FHLDGEVITFDN

SEQ ID NO: 14197 - protein, 11 aa, Severe acute respiratory syndrome coronavirus 2
  REGION 1..11: note = Table B: HLA-DRB1*13:02L HLA-DRB1*13:03L HLA-DRB1*01:03L HLA-DRB1*04:05L HLA-DQA1*01:02-B1*06:02L HLA-DRB1*01:02L HLA-DRB4*03:01NL HLA-DRB1*08:77L HLA-DRB3*02:01L HLA-DPA1*01:03-B1*03:01L HLA-DRB1*14:02L HLA-DRB1*08:01L
  REGION 1..11: note = CONT. FROM ABOVE: HLA-DQA1*05:05-B1*03:19L HLA-DRB4*01:01L HLA-D PA1*01:03-B1*04:01L HLA-DQA1*05:05-B1*03:116L HLA-DRB1*09:01L HL A-DPA1*01:03-B1*04:02L HLA-DPA1*02:01-B1*13:01L HLA-DPA1*01:03-B 1*104:01L HLA-DQA1*05:05-B1*03:01L HLA-DRB1*07:01L
  REGION 1..11: note = CONT. FROM ABOVE: HLA-DRB1*10:01L HLA-DRB1*04:08L HLA-DRB1*08:03 L
EVITFDNLKTL

SEQ ID NO: 14198 - protein, 12 aa, Severe acute respiratory syndrome coronavirus 2
  REGION 1..12: note = Table B: HLA-DRB1*13:02L HLA-DRB1*01:03L HLA-DRB1*04:04L HLA-DRB1*04:05L HLA-DRB1*01:02L HLA-DRB1*08:04L HLA-DPA1*01:03-B1*03:01L HLA-DRB1*04:10L HLA-DRB1*14:54L HLA-DRB1*04:08L
VITFDNLKTLLS

SEQ ID NO: 14199 - protein, 15 aa, Severe acute respiratory syndrome coronavirus 2
  REGION 1..15: note = Table B: HLA-DRB1*13:02L
FDNLKTLLSLREVRT

SEQ ID NO: 14200 - protein, 13 aa, Severe acute respiratory syndrome coronavirus 2
  REGION 1..13: note = Table B: HLA-DRB1*13:02L HLA-DRB1*13:03L HLA-DRB1*08:04L HLA-DRB3*02:01L HLA-DPA1*03:01-B1*04:02L HLA-DPA1*01:03-B1*04:02L HLA-DRB1*12:02L HLA-DPA1*02:01-B1*13:01L HLA-DPA1*01:03-B1*104:01L
  REGION 1..13: note = CONT. FROM ABOVE: HLA-DPA1*01:02-B1*04:01L HLA-DRB1*10:01L HLA-D RB1*08:03L
EVRTIKVFTTVDN

SEQ ID NO: 14201 - protein, 13 aa, Severe acute respiratory syndrome coronavirus 2
  REGION 1..13: note = Table B: HLA-DRB1*13:02L HLA-DRB1*04:04L HLA-DRB1*08:04L HLA-DRB1*08:01L HLA-DRB1*10:01L HLA-DRB1*08:03L
RTIKVFTTVDNIN

SEQ ID NO: 14202 - protein, 12 aa, Severe acute respiratory syndrome coronavirus 2
  REGION 1..12: note = Table B: HLA-DRB1*13:02L HLA-DRB1*13:03L HLA-DRB1*01:03L HLA-DRB1*04:05L HLA-DRB4*03:01NL HLA-DPA1*01:03-B1*03:01L HLA-DRB1*14:01L HLA-DRB1*11:03L HLA-DPA1*01:03-B1*04:01L HLA-DRB1*04:10L HLA-DRB1*12:02L HLA-DPA1*02:01-B1*13:01L
  REGION 1..12: note = CONT. FROM ABOVE: HLA-DRB1*14:54L HLA-DPA1*01:02-B1*04:01L HLA-D RB1*07:01L HLA-DRB1*04:08L
IKVFTTVDNINL

SEQ ID NO: 14203 - protein, 12 aa, Severe acute respiratory syndrome coronavirus 2
  REGION 1..12: note = Table B: HLA-DRB1*13:02L HLA-DRB1*01:02L HLA-DRB1*08:04L HLA-DPA1*01:03-B1*03:01L HLA-DRB1*08:01L HLA-DRB1*04:10L HLA-DRB1*12:02L HLA-DPA1*02:01-B1*13:01L HLA-DRB1*04:08L HLA-DRB1*15:03L
VDNINLHTQVVD

SEQ ID NO: 14204 - protein, 13 aa, Severe acute respiratory syndrome coronavirus 2
  REGION 1..13: note = Table B: HLA-DRB1*13:02L HLA-DRB1*08:77L HLA-DRB3*02:01L HLA-DRB1*12:02L HLA-DRB1*16:01L HLA-DQA1*02:01-B1*03:03L
VVDMSMTYGQQFG

SEQ ID NO: 14205 - protein, 11 aa, Severe acute respiratory syndrome coronavirus 2
  REGION 1..11: note = Table B: HLA-DRB1*13:02L HLA-DRB1*11:02L HLA-DQA1*05:05-B1*03:01L
MTYGQQFGPTY

SEQ ID NO: 14206 - protein, 10 aa, Severe acute respiratory syndrome coronavirus 2
  REGION 1..10: note = Table B: HLA-DRB1*13:02L HLA-DRB1*13:03L HLA-DRB4*03:01NL HLA-DRB1*08:01L HLA-DRB1*12:01L HLA-DQA1*03:01-B1*03:02L HLA-DQA1*05:05-B1*03:01L
TYLDGADVTK

SEQ ID NO: 14207 - protein, 14 aa, Severe acute respiratory syndrome coronavirus 2
  REGION 1..14: note = Table B: HLA-DRB1*13:02L
DVTKIKPHNSHEGK

SEQ ID NO: 14208 - protein, 18 aa, Severe acute respiratory syndrome coronavirus 2
  REGION 1..18: note = Table B: HLA-DRB1*13:02L HLA-DQA1*05:05-B1*03:19L HLA-DPA1*01:03-B1*04:02L HLA-DRB1*12:01L HLA-DPA1*01:03-B1*104:01L HLA-DPA1*01:02-B1*04:01L HLA-DRB1*15:03L
KPHNSHEGKTFYVLPNDD

SEQ ID NO: 14209 - protein, 13 aa, Severe acute respiratory syndrome coronavirus 2
  REGION 1..13: note = Table B: HLA-DRB1*13:02L HLA-DRB1*08:04L HLA-DPA1*03:01-B1*04:02L HLA-DQA1*05:05-B1*03:19L HLA-DPA1*01:02-B1*04:01L
EGKTFYVLPNDDT

SEQ ID NO: 14210 - protein, 13 aa, Severe acute respiratory syndrome coronavirus 2
  REGION 1..13: note = Table B: HLA-DRB1*13:02L HLA-DRB1*08:04L HLA-DRB1*08:77L HLA-DRB3*02:01L HLA-DRB1*14:01L HLA-DRB1*11:03L HLA-DPA1*01:03-B1*04:01L HLA-DPA1*01:03-B1*104:01L
GKTFYVLPNDDTL

SEQ ID NO: 14211 - protein, 14 aa, Severe acute respiratory syndrome coronavirus 2
  REGION 1..14: note = Table B: HLA-DRB1*13:02L HLA-DRB1*08:04L
DTLRVEAFEYYHTT

SEQ ID NO: 14212 - protein, 14 aa, Severe acute respiratory syndrome coronavirus 2
  REGION 1..14: note = Table B: HLA-DRB1*13:02L HLA-DRB1*04:04L HLA-DRB3*01:01L HLA-DPA1*01:03-B1*02:01L
RVEAFEYYHTTDPS

SEQ ID NO: 14213 - protein, 10 aa, Severe acute respiratory syndrome coronavirus 2
  REGION 1..10: note = Table B: HLA-DRB1*13:02L HLA-DRB1*13:03L HLA-DRB1*08:01L HLA-DRB1*12:01L HLA-DQA1*03:01-B1*03:02L HLA-DRB1*16:01L
RYMSALNHTK

SEQ ID NO: 14214 - protein, 13 aa, Severe acute respiratory syndrome coronavirus 2
  REGION 1..13: note = Table B: HLA-DRB1*13:02L HLA-DRB1*01:03L HLA-DQA1*01:02-B1*06:02L HLA-DRB1*08:04L HLA-DRB1*03:01L HLA-DRB1*11:03L HLA-DRB1*11:04L HLA-DRB1*08:01L HLA-DRB1*11:01L HLA-DRB1*13:01L HLA-DRB1*14:54L HLA-DRB1*04:08L HLA-DRB1*15:03L
SALNHTKKWKYPQ

SEQ ID NO: 14215 - protein, 12 aa, Severe acute respiratory syndrome coronavirus 2
  REGION 1..12: note = Table B: HLA-DRB1*13:02L HLA-DRB1*04:04L HLA-DRB1*04:05L HLA-DRB1*01:02L HLA-DPA1*01:03-B1*03:01L HLA-DRB1*12:01L HLA-DPA1*02:01-B1*13:01L HLA-DPA1*01:02-B1*04:01L HLA-DRB1*16:01L HLA-DRB1*04:08L
NHTKKWKYPQVN

SEQ ID NO: 14216 - protein, 12 aa, Severe acute respiratory syndrome coronavirus 2
  REGION 1..12: note = Table B: HLA-DRB1*13:02L HLA-DRB1*04:04L HLA-DRB1*04:05L HLA-DRB1*01:02L HLA-DRB1*12:01L HLA-DPA1*02:01-B1*13:01L HLA-DPA1*01:02-B1*04:01L HLA-DRB1*07:01L
HTKKWKYPQVNG

SEQ ID NO: 14217 - protein, 12 aa, Severe acute respiratory syndrome coronavirus 2
  REGION 1..12: note = Table B: HLA-DRB1*13:02L HLA-DRB1*04:05L HLA-DRB1*01:02L HLA-DRB3*02:01L HLA-DPA1*01:03-B1*03:01L HLA-DPA1*03:01-B1*04:02L HLA-DRB1*14:01L HLA-DRB1*11:03L HLA-DRB1*09:01L HLA-DRB1*12:02L HLA-DRB1*14:54L HLA-DRB1*07:01L
  REGION 1..12: note = CONT. FROM ABOVE: HLA-DRB1*16:01L
YPQVNGLTSIKW

SEQ ID NO: 14218 - protein, 12 aa, Severe acute respiratory syndrome coronavirus 2
  REGION 1..12: note = Table B: HLA-DRB1*13:02L HLA-DRB1*04:02L HLA-DRB1*04:05L HLA-DRB3*02:01L HLA-DRB1*14:01L HLA-DRB1*12:02L HLA-DQA1*05:05-B1*03:01L HLA-DRB1*14:17L HLA-DRB1*04:08L
TALLTLQQIELK

SEQ ID NO: 14219 - protein, 12 aa, Severe acute respiratory syndrome coronavirus 2
  REGION 1..12: note = Table B: HLA-DRB1*13:02L HLA-DRB1*01:03L HLA-DRB1*04:04L HLA-DRB1*04:05L HLA-DQA1*01:02-B1*06:02L HLA-DRB1*01:02L HLA-DRB4*03:01NL HLA-DRB1*08:04L HLA-DRB1*08:77L HLA-DRB3*02:01L HLA-DPA1*01:03-B1*03:01L HLA-DRB1*11:03L HLA-DRB1*11:04L
  REGION 1..12: note = CONT. FROM ABOVE: HLA-DRB1*14:02L HLA-DRB1*08:01L HLA-DQA1*01-B1 *05L HLA-DQA1*05:01-B1*02:01L HLA-DRB1*04:10L HLA-DRB1*12:01L HL A-DRB1*12:02L HLA-DRB3*01:01L HLA-DPA1*02:01-B1*13:01L HLA-DPA1* 03:01-B1*105:01L HLA-DRB1*14:54L HLA-DQA1*05:05-B1*03:01L
  REGION 1..12: note = CONT. FROM ABOVE: HLA-DRB1*04:08L HLA-DRB1*15:03L
IELKFNPPALQD

SEQ ID NO: 14220 - protein, 12 aa, Severe acute respiratory syndrome coronavirus 2
  REGION 1..12: note = Table B: HLA-DRB1*13:02L HLA-DRB1*14:01L HLA-DRB1*12:01L HLA-DRB1*15:03L
ELKFNPPALQDA

SEQ ID NO: 14221 - protein, 14 aa, Severe acute respiratory syndrome coronavirus 2
  REGION 1..14: note = Table B: HLA-DRB1*13:02L HLA-DRB1*08:04L HLA-DQA1*05:05-B1*03:19L HLA-DRB1*04:08L
ALILAYCNKTVGEL

SEQ ID NO: 14222 - protein, 10 aa, Severe acute respiratory syndrome coronavirus 2
  REGION 1..10: note = Table B: HLA-DRB1*13:02L HLA-DRB1*13:03L HLA-DRB1*04:02L HLA-DRB1*01:01L HLA-DRB4*03:01NL HLA-DRB1*11:04L HLA-DRB1*08:01L HLA-DRB5*01:01L HLA-DRB1*12:01L HLA-DQA1*03:01-B1*03:02M HLA-DQA1*05:05-B1*03:01L HLA-DRB1*14:17L HLA-DRB1*16:01L
  REGION 1..10: note = CONT. FROM ABOVE: HLA-DQA1*01:03-B1*06:01L HLA-DQA1*02:01-B1*03: 03L
KTVGELGDVR

SEQ ID NO: 14223 - protein, 13 aa, Severe acute respiratory syndrome coronavirus 2
  REGION 1..13: note = Table B: HLA-DRB1*13:02L HLA-DPA1*01:03-B1*03:01L HLA-DRB1*14:01L HLA-DRB1*11:04L HLA-DQA1*01:01-B1*05:01L HLA-DRB1*11:01L HLA-DPA1*01:03-B1*04:02L HLA-DRB1*12:02L HLA-DRB3*01:01L
TMSYLFQHANLDS

SEQ ID NO: 14224 - protein, 14 aa, Severe acute respiratory syndrome coronavirus 2
  REGION 1..14: note = Table B: HLA-DRB1*13:02L HLA-DQA1*01:03-B1*06:01L
GVEAVMYMGTLSYE

SEQ ID NO: 14225 - protein, 14 aa, Severe acute respiratory syndrome coronavirus 2
  REGION 1..14: note = Table B: HLA-DRB1*13:02L HLA-DRB1*04:04L HLA-DRB3*02:01L HLA-DRB1*08:01L HLA-DRB1*09:01L HLA-DRB1*07:01L HLA-DRB1*08:03L
AVMYMGTLSYEQFK

SEQ ID NO: 14226 - protein, 13 aa, Severe acute respiratory syndrome coronavirus 2
  REGION 1..13: note = Table B: HLA-DRB1*13:02L HLA-DRB1*14:02L HLA-DPA1*02:01-B1*13:01L HLA-DRB1*08:02L HLA-DRB1*08:03L HLA-DRB1*15:03L
LSYEQFKKGVQIP

SEQ ID NO: 14227 - protein, 12 aa, Severe acute respiratory syndrome coronavirus 2
  REGION 1..12: note = Table B: HLA-DRB1*13:02L HLA-DRB1*13:03L HLA-DRB4*03:01NL HLA-DRB1*08:04L HLA-DRB3*02:01L HLA-DPA1*01:03-B1*03:01L HLA-DRB1*14:01L HLA-DRB1*14:02L HLA-DRB1*08:01L HLA-DRB1*04:10L HLA-DRB1*09:01L HLA-DRB1*12:02L HLA-DRB1*14:54L
  REGION 1..12: note = CONT. FROM ABOVE: HLA-DPA1*01:03-B1*104:01L HLA-DRB1*14:17L HLA- DRB1*07:01L HLA-DRB1*04:08L HLA-DRB1*08:03L
ATKYLVQQESPF

SEQ ID NO: 14228 - protein, 12 aa, Severe acute respiratory syndrome coronavirus 2
  REGION 1..12: note = Table B: HLA-DRB1*13:02L HLA-DRB1*13:03L HLA-DRB4*03:01NL HLA-DRB1*08:04L HLA-DRB3*02:01L HLA-DPA1*01:03-B1*03:01L HLA-DRB1*08:01L HLA-DRB1*04:10L HLA-DRB1*12:02L HLA-DRB1*14:54L HLA-DRB1*14:17L HLA-DRB1*07:01L HLA-DRB1*04:08L
TKYLVQQESPFV

SEQ ID NO: 14229 - protein, 11 aa, Severe acute respiratory syndrome coronavirus 2
  REGION 1..11: note = Table B: HLA-DRB1*13:02L HLA-DRB1*04:02L HLA-DRB1*04:05L HLA-DRB3*02:01L HLA-DPA1*01:03-B1*03:01L HLA-DQA1*05:05-B1*03:01L HLA-DRB1*14:17L
YLVQQESPFVM

SEQ ID NO: 14230 - protein, 14 aa, Severe acute respiratory syndrome coronavirus 2
  REGION 1..14: note = Table B: HLA-DRB1*13:02L HLA-DRB1*04:05L HLA-DRB1*11:04L HLA-DRB3*01:01L HLA-DQA1*02:01-B1*03:03L
GNYQCGHYKHITSK

SEQ ID NO: 14231 - protein, 10 aa, Severe acute respiratory syndrome coronavirus 2
  REGION 1..10: note = Table B: HLA-DRB1*13:02L HLA-DRB1*13:03L HLA-DRB1*01:03L HLA-DRB4*03:01NL HLA-DRB1*14:01L HLA-DRB1*12:01L HLA-DPA1*03:01-B1*105:01L HLA-DQA1*03:01-B1*03:02L HLA-DQA1*05:05-B1*03:01L HLA-DRB1*16:01L
  REGION 1..10: note = CONT. FROM ABOVE: HLA-DQA1*02:01-B1*03:03L
YCIDGALLTK

SEQ ID NO: 14232 - protein, 15 aa, Severe acute respiratory syndrome coronavirus 2
  REGION 1..15: note = Table B: HLA-DRB1*13:02L HLA-DRB1*13:03L HLA-DRB1*08:04L HLA-DPA1*02:01-B1*13:01L HLA-DRB1*14:17L
IDGALLTKSSEYKGP

SEQ ID NO: 14233 - protein, 16 aa, Severe acute respiratory syndrome coronavirus 2
  REGION 1..16: note = Table B: HLA-DRB1*13:02L HLA-DPA1*01:03-B1*03:01L HLA-DRB3*01:01L
DGALLTKSSEYKGPIT

SEQ ID NO: 14234 - protein, 15 aa, Severe acute respiratory syndrome coronavirus 2
  REGION 1..15: note = Table B: HLA-DRB1*13:02L HLA-DRB1*13:03L HLA-DRB1*14:01L HLA-DRB1*04:10L HLA-DRB1*08:03L
GPITDVFYKENSYTT

SEQ ID NO: 14235 - protein, 17 aa, Severe acute respiratory syndrome coronavirus 2
  REGION 1..17: note = Table B: HLA-DRB1*13:02L HLA-DRB1*04:05L HLA-DQA1*05:05-B1*03:19L HLA-DPA1*01:03-B1*04:02L HLA-DRB1*16:01L HLA-DRB1*15:03L
PVTYKLDGVVCTEIDPK

SEQ ID NO: 14236 - protein, 13 aa, Severe acute respiratory syndrome coronavirus 2
  REGION 1..13: note = Table B: HLA-DRB1*13:02L HLA-DRB1*13:03L HLA-DRB1*01:03L HLA-DRB1*04:05L HLA-DQA1*01:02-B1*06:02L HLA-DRB1*01:02L HLA-DRB1*14:01L HLA-DQA1*01:01-B1*05:01L HLA-DRB1*12:01L HLA-DPA1*02:01-B1*13:01L HLA-DPA1*01:02-B1*04:01L
  REGION 1..13: note = CONT. FROM ABOVE: HLA-DRB1*16:01L HLA-DQA1*01:03-B1*06:01L HLA-D RB1*04:08L HLA-DQA1*02:01-B1*03:03L HLA-DRB1*15:03L
IDPKLDNYYKKDN

SEQ ID NO: 14237 - protein, 13 aa, Severe acute respiratory syndrome coronavirus 2
  REGION 1..13: note = Table B: HLA-DRB1*13:02L HLA-DRB1*01:02L HLA-DQA1*01-B1*05L
LDNYYKKDNSYFT

SEQ ID NO: 14238 - protein, 13 aa, Severe acute respiratory syndrome coronavirus 2
  REGION 1..13: note = Table B: HLA-DRB1*13:02L HLA-DRB1*01:02L HLA-DRB3*01:01L HLA-DRB1*14:17L
DNYYKKDNSYFTE

SEQ ID NO: 14239 - protein, 16 aa, Severe acute respiratory syndrome coronavirus 2
  REGION 1..16: note = Table B: HLA-DRB1*13:02L HLA-DRB1*08:04L HLA-DPA1*01:03-B1*03:01L HLA-DPA1*03:01-B1*04:02L HLA-DRB1*14:02L HLA-DRB1*08:01L HLA-DPA1*01:03-B1*04:02L
NYYKKDNSYFTEQPID

SEQ ID NO: 14240 - protein, 11 aa, Severe acute respiratory syndrome coronavirus 2
  REGION 1..11: note = Table B: HLA-DRB1*13:02L HLA-DRB1*01:03L HLA-DRB1*04:05L HLA-DQA1*01:02-B1*06:02L HLA-DRB1*01:02L HLA-DRB1*08:04L HLA-DRB1*08:77L HLA-DRB1*11:03L HLA-DRB1*11:04L HLA-DRB1*14:02L HLA-DQA1*05:05-B1*03:19L HLA-DQA1*05:01-B1*02:01L
  REGION 1..11: note = CONT. FROM ABOVE: HLA-DRB1*04:10L HLA-DRB1*12:02L HLA-DRB1*14:54 L HLA-DQA1*05:05-B1*03:01L HLA-DRB1*04:08L HLA-DRB1*15:03L
LVPNQPYPNAS

SEQ ID NO: 14241 - protein, 13 aa, Severe acute respiratory syndrome coronavirus 2
  REGION 1..13: note = Table B: HLA-DRB1*13:02L HLA-DRB1*01:02L HLA-DRB1*11:04L HLA-DQA1*01:01-B1*05:01L HLA-DRB1*11:01L HLA-DRB1*04:10L HLA-DRB1*12:01L HLA-DRB1*12:02L HLA-DRB3*01:01L HLA-DRB1*14:54L HLA-DPA1*01:03-B1*104:01L HLA-DRB1*07:01L HLA-DRB1*04:08L
  REGION 1..13: note = CONT. FROM ABOVE: HLA-DRB1*08:03L
VPNQPYPNASFDN

SEQ ID NO: 14242 - protein, 19 aa, Severe acute respiratory syndrome coronavirus 2
  REGION 1..19: note = Table B: HLA-DRB1*13:02L HLA-DPA1*01:03-B1*03:01L HLA-DPA1*01:03-B1*104:01L
QPYPNASFDNFKFVCDNIK

SEQ ID NO: 14243 - protein, 14 aa, Severe acute respiratory syndrome coronavirus 2
  REGION 1..14: note = Table B: HLA-DRB1*13:02L HLA-DRB1*01:03L HLA-DRB1*04:05L HLA-DRB1*14:01L HLA-DRB1*08:01L HLA-DRB1*12:01L HLA-DPA1*02:01-B1*13:01L HLA-DRB1*04:08L
NFKFVCDNIKFADD

SEQ ID NO: 14244 - protein, 12 aa, Severe acute respiratory syndrome coronavirus 2
  REGION 1..12: note = Table B: HLA-DRB1*13:02L HLA-DQA1*01:02-B1*06:02L HLA-DRB1*01:02L HLA-DRB1*08:04L HLA-DPA1*01:03-B1*03:01L HLA-DRB1*08:01L HLA-DRB1*12:02L HLA-DQA1*05:05-B1*03:01L HLA-DRB1*10:01L HLA-DQA1*01:03-B1*06:01L
DNIKFADDLNQL

SEQ ID NO: 14245 - protein, 13 aa, Severe acute respiratory syndrome coronavirus 2
  REGION 1..13: note = Table B: HLA-DRB1*13:02L HLA-DRB1*04:05L HLA-DQA1*01:02-B1*06:02L HLA-DPA1*03:01-B1*105:01L HLA-DRB1*14:54L HLA-DQA1*01:03-B1*06:01L
ADDLNQLTGYKKP

SEQ ID NO: 14246 - protein, 13 aa, Severe acute respiratory syndrome coronavirus 2
  REGION 1..13: note = Table B: HLA-DRB1*13:02L HLA-DRB1*04:04L HLA-DRB1*04:05L HLA-DQA1*01:02-B1*06:02L HLA-DRB1*01:01L HLA-DRB1*11:03L HLA-DRB1*08:01L HLA-DQA1*01-B1*05L HLA-DPA1*03:01-B1*105:01L HLA-DRB1*14:54L HLA-DRB1*10:01L HLA-DQA1*01:03-B1*06:01L
  REGION 1..13: note = CONT. FROM ABOVE: HLA-DRB1*15:01L
DDLNQLTGYKKPA

SEQ ID NO: 14247 - protein, 13 aa, Severe acute respiratory syndrome coronavirus 2
  REGION 1..13: note = Table B: HLA-DRB1*13:02L HLA-DQA1*01:03-B1*06:01L
DLNQLTGYKKPAS

SEQ ID NO: 14248 - protein, 12 aa, Severe acute respiratory syndrome coronavirus 2
  REGION 1..12: note = Table B: HLA-DRB1*13:02L HLA-DRB1*04:04L HLA-DRB1*04:05L HLA-DQA1*01:02-B1*06:02L HLA-DRB1*01:02L HLA-DRB1*08:04L HLA-DRB1*11:03L HLA-DRB1*11:04L HLA-DRB1*11:01L HLA-DRB1*04:10L HLA-DRB1*12:01L HLA-DRB3*01:01L HLA-DRB1*14:54L
  REGION 1..12: note = CONT. FROM ABOVE: HLA-DPA1*01:02-B1*04:01L HLA-DRB1*04:08L HLA-D RB1*08:03L HLA-DRB1*15:03L
NQLTGYKKPASR

SEQ ID NO: 14249 - protein, 14 aa, Severe acute respiratory syndrome coronavirus 2
  REGION 1..14: note = Table B: HLA-DRB1*13:02L HLA-DRB1*11:01L HLA-DRB3*01:01L
QLTGYKKPASRELK

SEQ ID NO: 14250 - protein, 14 aa, Severe acute respiratory syndrome coronavirus 2
  REGION 1..14: note = Table B: HLA-DRB1*13:02L HLA-DRB1*13:03L HLA-DRB1*08:04L HLA-DPA1*01:03-B1*03:01L HLA-DRB1*11:04L HLA-DRB1*08:01L HLA-DRB4*01:01L HLA-DRB3*01:01L HLA-DPA1*01:03-B1*02:01L HLA-DPA1*01:03-B1*104:01L HLA-DQA1*05:05-B1*03:01L
  REGION 1..14: note = CONT. FROM ABOVE: HLA-DRB1*10:01L HLA-DRB1*08:03L
ELKVTFFPDLNGDV

SEQ ID NO: 14251 - protein, 12 aa, Severe acute respiratory syndrome coronavirus 2
  REGION 1..12: note = Table B: HLA-DRB1*13:02L HLA-DRB1*04:05L HLA-DQA1*01:02-B1*06:02L HLA-DRB1*01:02L HLA-DRB1*14:01L HLA-DRB1*11:04L HLA-DRB1*12:01L HLA-DRB3*01:01L HLA-DPA1*01:02-B1*04:01L
KHYTPSFKKGAK

SEQ ID NO: 14252 - protein, 14 aa, Severe acute respiratory syndrome coronavirus 2
  REGION 1..14: note = Table B: HLA-DRB1*13:02L HLA-DRB1*13:03L HLA-DRB1*04:05L HLA-DQA1*01:02-B1*06:02L HLA-DRB1*08:04L HLA-DRB1*14:01L HLA-DRB1*11:03L HLA-DRB1*12:01L HLA-DRB3*01:01L HLA-DQA1*02:01-B1*03:03L HLA-DRB1*15:03L
TPSFKKGAKLLHKP

SEQ ID NO: 14253 - protein, 15 aa, Severe acute respiratory syndrome coronavirus 2
  REGION 1..15: note = Table B: HLA-DRB1*13:02L
KGAKLLHKPIVWHVN

SEQ ID NO: 14254 - protein, 15 aa, Severe acute respiratory syndrome coronavirus 2
  REGION 1..15: note = Table B: HLA-DRB1*13:02L HLA-DRB1*01:03L HLA-DRB1*14:01L HLA-DQA1*02:01-B1*03:03L
GAKLLHKPIVWHVNN

SEQ ID NO: 14255 - protein, 13 aa, Severe acute respiratory syndrome coronavirus 2
  REGION 1..13: note = Table B: HLA-DRB1*13:02L HLA-DRB1*04:02L HLA-DRB1*04:05L HLA-DPA1*01:03-B1*03:01L HLA-DQA1*01:01-B1*05:01L HLA-DPA1*02:01-B1*13:01L HLA-DRB1*15:03L
TKPVETSNSFDVL

SEQ ID NO: 14256 - protein, 10 aa, Severe acute respiratory syndrome coronavirus 2
  REGION 1..10: note = Table B: HLA-DRB1*13:02L HLA-DRB1*13:03L HLA-DQA1*01:02-B1*06:02L HLA-DRB1*01:01L HLA-DRB4*03:01NL HLA-DRB3*02:01L HLA-DRB1*14:01L HLA-DRB1*11:04L HLA-DRB1*08:01L HLA-DRB5*01:01L HLA-DPA1*01:03-B1*04:02L HLA-DRB1*12:01M
  REGION 1..10: note = CONT. FROM ABOVE: HLA-DRB1*12:02L HLA-DPA1*03:01-B1*105:01L HLA- DQA1*03:01-B1*03:02L HLA-DQA1*05:05-B1*03:01M HLA-DRB1*14:17L HL A-DQA1*01:03-B1*06:01L HLA-DQA1*02:01-B1*03:03L HLA-DRB1*15:01L
ETSNSFDVLK

SEQ ID NO: 14257 - protein, 10 aa, Severe acute respiratory syndrome coronavirus 2
  REGION 1..10: note = Table B: HLA-DRB1*13:02L HLA-DRB1*13:03L HLA-DRB4*03:01NL HLA-DRB1*12:01L HLA-DQA1*03:01-B1*03:02L HLA-DQA1*05:05-B1*03:01L
TEVVGDIILK

SEQ ID NO: 14258 - protein, 13 aa, Severe acute respiratory syndrome coronavirus 2
  REGION 1..13: note = Table B: HLA-DRB1*13:02L HLA-DRB1*13:03L HLA-DRB1*01:03L HLA-DRB1*04:04L HLA-DRB4*03:01NL HLA-DPA1*01:03-B1*03:01L HLA-DQA1*01:01-B1*05:01L HLA-DRB1*08:01L HLA-DQA1*05:05-B1*03:19L HLA-DRB1*04:10L HLA-DRB1*14:54L
  REGION 1..13: note = CONT. FROM ABOVE: HLA-DQA1*05:05-B1*03:01L HLA-DPA1*01:02-B1*04: 01L HLA-DRB1*07:01L HLA-DRB1*04:08L
NSLKITEEVGHTD

SEQ ID NO: 14259 - protein, 14 aa, Severe acute respiratory syndrome coronavirus 2
  REGION 1..14: note = Table B: HLA-DRB1*13:02L
EVGHTDLMAAYVDN

SEQ ID NO: 14260 - protein, 12 aa, Severe acute respiratory syndrome coronavirus 2
  REGION 1..12: note = Table B: HLA-DRB1*13:02L HLA-DRB1*13:03L HLA-DRB1*01:03L HLA-DRB1*04:05L HLA-DRB1*01:02L HLA-DRB1*08:04L HLA-DRB1*08:77L HLA-DRB3*02:01L HLA-DPA1*01:03-B1*03:01L HLA-DPA1*03:01-B1*04:02L HLA-DRB1*08:01L
  REGION 1..12: note = CONT. FROM ABOVE: HLA-DQA1*05:01-B1*02:01L HLA-DPA1*01:03-B1*04: 01L HLA-DRB1*12:02L HLA-DPA1*02:01-B1*13:01L HLA-DPA1*03:01-B1*1 05:01L HLA-DRB1*14:54L HLA-DQA1*05:05-B1*03:01L HLA-DRB1*07:01L HLA-DRB1*04:08L HLA-DRB1*15:03L
NSSLTIKKPNEL

SEQ ID NO: 14261 - protein, 10 aa, Severe acute respiratory syndrome coronavirus 2
  REGION 1..10: note = Table B: HLA-DRB1*13:02L HLA-DRB1*13:03L HLA-DRB1*01:03L HLA-DRB1*01:01L HLA-DRB4*03:01NL HLA-DRB1*11:04L HLA-DRB1*08:01L HLA-DRB1*12:01L HLA-DQA1*03:01-B1*03:02M HLA-DQA1*05:05-B1*03:01L HLA-DRB1*14:17L HLA-DRB1*16:01L
TIKKPNELSR

SEQ ID NO: 14262 - protein, 14 aa, Severe acute respiratory syndrome coronavirus 2
  REGION 1..14: note = Table B: HLA-DRB1*13:02L HLA-DRB1*13:03L HLA-DRB1*01:01L HLA-DRB1*11:03L HLA-DPA1*02:01-B1*13:01L HLA-DPA1*03:01-B1*105:01L HLA-DQA1*05:05-B1*03:01L HLA-DRB1*07:01L HLA-DRB1*10:01L HLA-DRB1*08:03L
LSRVLGLKTLATHG

SEQ ID NO: 14263 - protein, 12 aa, Severe acute respiratory syndrome coronavirus 2
  REGION 1..12: note = Table B: HLA-DRB1*13:02L HLA-DPA1*01:03-B1*03:01L HLA-DPA1*03:01-B1*04:02L HLA-DQA1*05:01-B1*02:01L HLA-DRB1*12:02L HLA-DPA1*03:01-B1*105:01L HLA-DQA1*01:03-B1*06:01L HLA-DRB1*15:03L
VLGLKTLATHGL

SEQ ID NO: 14264 - protein, 14 aa, Severe acute respiratory syndrome coronavirus 2
  REGION 1..14: note = Table B: HLA-DRB1*13:02L HLA-DRB1*04:05L
GLKTLATHGLAAVN

SEQ ID NO: 14265 - protein, 13 aa, Severe acute respiratory syndrome coronavirus 2
  REGION 1..13: note = Table B: HLA-DRB1*13:02L HLA-DRB1*13:03L HLA-DRB1*04:04L HLA-DRB4*03:01NL HLA-DRB1*08:04L HLA-DRB3*02:01L HLA-DRB1*14:01L HLA-DRB1*08:01L HLA-DRB1*14:54L HLA-DPA1*01:03-B1*02:01L
AAVNSVPWDTIAN

SEQ ID NO: 14266 - protein, 15 aa, Severe acute respiratory syndrome coronavirus 2
  REGION 1..15: note = Table B: HLA-DRB1*13:02L HLA-DRB1*08:04L HLA-DRB3*01:01L
VNSVPWDTIANYAKP

SEQ ID NO: 14267 - protein, 13 aa, Severe acute respiratory syndrome coronavirus 2
  REGION 1..13: note = Table B: HLA-DRB1*13:02L HLA-DRB1*08:04L HLA-DRB3*02:01L HLA-DRB1*08:01L HLA-DRB1*04:10L HLA-DPA1*01:03-B1*04:02L HLA-DRB1*12:02L HLA-DRB1*14:54L HLA-DPA1*01:03-B1*104:01L
VPWDTIANYAKPF

SEQ ID NO: 14268 - protein, 12 aa, Severe acute respiratory syndrome coronavirus 2
  REGION 1..12: note = Table B: HLA-DRB1*13:02L HLA-DRB1*04:05L HLA-DRB1*01:02L HLA-DRB1*08:04L HLA-DRB3*02:01L HLA-DRB1*08:01L HLA-DRB1*12:02L HLA-DRB1*14:54L HLA-DRB1*04:08L
DTIANYAKPFLN

SEQ ID NO: 14269 - protein, 14 aa, Severe acute respiratory syndrome coronavirus 2
  REGION 1..14: note = Table B: HLA-DRB1*13:02L HLA-DPA1*01:03-B1*03:01L HLA-DPA1*03:01-B1*04:02L HLA-DRB1*11:04L HLA-DRB1*14:02L HLA-DQA1*01:01-B1*05:01L HLA-DRB1*11:01L HLA-DQA1*05:01-B1*02:01L HLA-DPA1*01:03-B1*04:02L
  REGION 1..14: note = CONT. FROM ABOVE: HLA-DRB1*14:54L HLA-DPA1*01:03-B1*104:01L HLA- DRB1*10:01L
AKPFLNKVVSTTTN

SEQ ID NO: 14270 - protein, 14 aa, Severe acute respiratory syndrome coronavirus 2
  REGION 1..14: note = Table B: HLA-DRB1*13:02L HLA-DRB1*01:02L HLA-DPA1*03:01-B1*105:01L HLA-DPA1*01:03-B1*104:01L HLA-DRB1*15:03L
LNRVCTNYMPYFFT

SEQ ID NO: 14271 - protein, 10 aa, Severe acute respiratory syndrome coronavirus 2
  REGION 1..10: note = Table B: HLA-DRB1*13:02L HLA-DRB1*13:03L HLA-DRB4*03:01NL HLA-DRB1*08:01L HLA-DRB1*12:01L HLA-DQA1*03:01-B1*03:02L HLA-DQA1*05:05-B1*03:01L
KASMPTTIAK

SEQ ID NO: 14272 - protein, 11 aa, Severe acute respiratory syndrome coronavirus 2
  REGION 1..11: note = Table B: HLA-DRB1*13:02L HLA-DRB3*02:01L HLA-DRB1*11:04L HLA-DRB1*14:02L HLA-DQA1*01:01-B1*05:01L HLA-DRB5*01:01L HLA-DPA1*01:03-B1*04:02L HLA-DRB1*12:01L HLA-DRB1*12:02L HLA-DRB1*14:54L
MPTTIAKNTVK

SEQ ID NO: 14273 - protein, 15 aa, Severe acute respiratory syndrome coronavirus 2
  REGION 1..15: note = Table B: HLA-DRB1*13:02L HLA-DRB1*04:05L
SVGKFCLEASFNYLK

SEQ ID NO: 14274 - protein, 17 aa, Severe acute respiratory syndrome coronavirus 2
  REGION 1..17: note = Table B: HLA-DRB1*13:02L HLA-DPA1*01:03-B1*03:01L HLA-DPA1*01:03-B1*104:01L
VGKFCLEASFNYLKSPN

SEQ ID NO: 14275 - protein, 11 aa, Severe acute respiratory syndrome coronavirus 2
  REGION 1..11: note = Table B: HLA-DRB1*13:02L HLA-DRB1*01:03L HLA-DRB3*02:01L HLA-DPA1*01:03-B1*03:01L HLA-DRB1*14:01L HLA-DRB1*14:02L HLA-DPA1*01:03-B1*04:01L HLA-DRB1*09:01L HLA-DRB1*12:02L HLA-DQA1*05:05-B1*03:01L HLA-DRB1*07:01L
ASFNYLKSPNF

SEQ ID NO: 14276 - protein, 11 aa, Severe acute respiratory syndrome coronavirus 2
  REGION 1..11: note = Table B: HLA-DRB1*13:02L HLA-DRB1*12:02L
SFNYLKSPNFS

SEQ ID NO: 14277 - protein, 11 aa, Severe acute respiratory syndrome coronavirus 2
  REGION 1..11: note = Table B: HLA-DRB1*13:02L HLA-DRB1*04:08L
FNYLKSPNFSK

SEQ ID NO: 14278 - protein, 12 aa, Severe acute respiratory syndrome coronavirus 2
  REGION 1..12: note = Table B: HLA-DRB1*13:02L HLA-DRB1*01:03L HLA-DRB1*04:02L HLA-DRB1*04:05L HLA-DRB4*03:01NL HLA-DRB1*11:03L HLA-DPA1*01:03-B1*04:01L HLA-DPA1*01:03-B1*104:01L HLA-DRB1*14:17L HLA-DRB1*04:08L
SLIYSTAALGVL

SEQ ID NO: 14279 - protein, 14 aa, Severe acute respiratory syndrome coronavirus 2
  REGION 1..14: note = Table B: HLA-DRB1*13:02L HLA-DRB1*13:03L HLA-DRB1*04:04L HLA-DRB1*08:04L HLA-DRB3*02:01L HLA-DRB1*14:01L HLA-DRB1*11:04L HLA-DRB1*14:02L HLA-DQA1*01:01-B1*05:01L HLA-DRB1*08:01L HLA-DRB1*11:01L HLA-DPA1*01:03-B1*04:01L HLA-DRB1*04:10L
  REGION 1..14: note = CONT. FROM ABOVE: HLA-DRB3*01:01L HLA-DPA1*01:03-B1*02:01L HLA-D RB1*07:01L HLA-DRB1*10:01L HLA-DRB1*08:03L
TGYREGYLNSTNVT

SEQ ID NO: 14280 - protein, 12 aa, Severe acute respiratory syndrome coronavirus 2
  REGION 1..12: note = Table B: HLA-DRB1*13:02L HLA-DRB1*04:02L HLA-DRB3*02:01L HLA-DQA1*05:01-B1*02:01L HLA-DRB1*12:01L
REGYLNSTNVTI

SEQ ID NO: 14281 - protein, 12 aa, Severe acute respiratory syndrome coronavirus 2
  REGION 1..12: note = Table B: HLA-DRB1*13:02L HLA-DRB1*13:03L HLA-DRB1*04:02L HLA-DRB4*03:01NL HLA-DRB3*02:01L HLA-DPA1*01:03-B1*03:01L HLA-DRB1*11:03L HLA-DRB1*11:04L HLA-DQA1*01-B1*05L HLA-DQA1*05:01-B1*02:01L HLA-DPA1*01:03-B1*04:01L
  REGION 1..12: note = CONT. FROM ABOVE: HLA-DRB1*12:02L HLA-DRB1*14:54L HLA-DQA1*05:05 -B1*03:01L HLA-DRB1*07:01L HLA-DRB1*04:08L
EGYLNSTNVTIA

SEQ ID NO: 14282 - protein, 11 aa, Severe acute respiratory syndrome coronavirus 2
  REGION 1..11: note = Table B: HLA-DRB1*13:02L HLA-DRB1*13:03L HLA-DRB1*04:02L HLA-DRB4*03:01NL HLA-DRB1*08:77L HLA-DRB1*14:01L HLA-DRB1*12:01L HLA-DRB1*14:54L HLA-DRB1*16:01L HLA-DQA1*02:01-B1*03:03L
YLNSTNVTIAT

SEQ ID NO: 14283 - protein, 14 aa, Severe acute respiratory syndrome coronavirus 2
  REGION 1..14: note = Table B: HLA-DRB1*13:02L HLA-DRB1*08:04L HLA-DPA1*01:03-B1*03:01L HLA-DRB1*11:02L HLA-DRB1*11:03L HLA-DRB1*14:02L HLA-DRB1*08:01L HLA-DPA1*01:03-B1*04:01L HLA-DRB1*09:01L HLA-DPA1*01:03-B1*04:02L HLA-DRB1*12:02L
  REGION 1..14: note = CONT. FROM ABOVE: HLA-DPA1*01:02-B1*04:01L HLA-DRB1*07:01L HLA-D RB1*10:01L HLA-DRB1*08:03L
LDSLDTYPSLETIQ

SEQ ID NO: 14284 - protein, 15 aa, Severe acute respiratory syndrome coronavirus 2
  REGION 1..15: note = Table B: HLA-DRB1*13:02L HLA-DPA1*01:03-B1*03:01L HLA-DRB1*14:02L
DSLDTYPSLETIQIT

SEQ ID NO: 14285 - protein, 11 aa, Severe acute respiratory syndrome coronavirus 2
  REGION 1..11: note = Table B: HLA-DRB1*13:02L HLA-DQA1*03:01-B1*03:02L HLA-DRB1*14:17L
ETIQITISSFK

SEQ ID NO: 14286 - protein, 14 aa, Severe acute respiratory syndrome coronavirus 2
  REGION 1..14: note = Table B: HLA-DRB1*13:02L HLA-DRB1*01:03L HLA-DRB1*04:05L HLA-DRB1*08:04L HLA-DPA1*01:03-B1*03:01L
TIQITISSFKWDLT

SEQ ID NO: 14287 - protein, 14 aa, Severe acute respiratory syndrome coronavirus 2
  REGION 1..14: note = Table B: HLA-DRB1*13:02L HLA-DRB1*01:03L HLA-DRB1*08:04L HLA-DPA1*01:03-B1*03:01L
IQITISSFKWDLTA

SEQ ID NO: 14288 - protein, 14 aa, Severe acute respiratory syndrome coronavirus 2
  REGION 1..14: note = Table B: HLA-DRB1*13:02L HLA-DRB1*11:04L
SSFKWDLTAFGLVA

SEQ ID NO: 14289 - protein, 14 aa, Severe acute respiratory syndrome coronavirus 2
  REGION 1..14: note = Table B: HLA-DRB1*13:02L HLA-DRB3*01:01L
SFKWDLTAFGLVAE

SEQ ID NO: 14290 - protein, 14 aa, Severe acute respiratory syndrome coronavirus 2
  REGION 1..14: note = Table B: HLA-DRB1*13:02L HLA-DRB1*01:02L HLA-DRB1*08:04L HLA-DRB1*14:01L
LAYILFTRFFYVLG

SEQ ID NO: 14291 - protein, 14 aa, Severe acute respiratory syndrome coronavirus 2
  REGION 1..14: note = Table B: HLA-DRB1*13:02L
FSYFAVHFISNSWL

SEQ ID NO: 14292 - protein, 12 aa, Severe acute respiratory syndrome coronavirus 2
  REGION 1..12: note = Table B: HLA-DRB1*13:02L HLA-DRB1*04:04L HLA-DRB3*02:01L HLA-DPA1*01:03-B1*03:01L HLA-DPA1*03:01-B1*04:02L HLA-DQA1*05:05-B1*03:19L HLA-DRB1*12:02L HLA-DRB1*14:54L HLA-DPA1*01:02-B1*04:01L
LIINLVQMAPIS

SEQ ID NO: 14293 - protein, 10 aa, Severe acute respiratory syndrome coronavirus 2
  REGION 1..10: note = Table B: HLA-DRB1*13:02L HLA-DRB1*13:03L HLA-DRB4*03:01NL HLA-DRB1*08:01L HLA-DRB5*01:01L HLA-DRB1*12:01L HLA-DQA1*03:01-B1*03:02L HLA-DQA1*05:05-B1*03:01L HLA-DQA1*01:03-B1*06:01L HLA-DQA1*02:01-B1*03:03L
QMAPISAMVR

SEQ ID NO: 14294 - protein, 10 aa, Severe acute respiratory syndrome coronavirus 2
  REGION 1..10: note = Table B: HLA-DRB1*13:02L HLA-DRB1*01:03L HLA-DRB1*01:02L HLA-DRB1*14:01L HLA-DRB1*12:01L HLA-DPA1*01:02-B1*04:01L HLA-DRB1*16:01L HLA-DRB1*04:08L HLA-DQA1*02:01-B1*03:03L HLA-DRB1*15:03L
YKRNRATRVE

SEQ ID NO: 14295 - protein, 15 aa, Severe acute respiratory syndrome coronavirus 2
  REGION 1..15: note = Table B: HLA-DRB1*13:02L HLA-DRB1*11:01L HLA-DPA1*01:03-B1*104:01L
RATRVECTTIVNGVR

SEQ ID NO: 14296 - protein, 15 aa, Severe acute respiratory syndrome coronavirus 2
  REGION 1..15: note = Table B: HLA-DRB1*13:02L HLA-DRB1*04:04L HLA-DQA1*01:02-B1*06:02L HLA-DPA1*01:03-B1*03:01L HLA-DQA1*03:01-B1*03:02L HLA-DRB1*16:01L HLA-DRB1*04:08L HLA-DQA1*02:01-B1*03:03L
VNGVRRSFYVYANGG

SEQ ID NO: 14297 - protein, 14 aa, Severe acute respiratory syndrome coronavirus 2
  REGION 1..14: note = Table B: HLA-DRB1*13:02L HLA-DRB1*04:04L HLA-DQA1*01:02-B1*06:02L HLA-DPA1*01:03-B1*03:01L HLA-DRB1*08:01L HLA-DRB1*12:01L HLA-DPA1*02:01-B1*13:01L HLA-DPA1*01:02-B1*04:01L HLA-DRB1*07:01L HLA-DRB1*15:03L
GVRRSFYVYANGGK

SEQ ID NO: 14298 - protein, 10 aa, Severe acute respiratory syndrome coronavirus 2
  REGION 1..10: note = Table B: HLA-DRB1*13:02L HLA-DRB1*13:03L HLA-DRB1*04:02L HLA-DRB1*01:01L HLA-DRB4*03:01NL HLA-DRB3*02:01L HLA-DRB1*14:01L HLA-DRB1*11:04L HLA-DRB1*08:01L HLA-DRB5*01:01L HLA-DQA1*01-B1*05L HLA-DPA1*01:03-B1*04:02L HLA-DRB1*12:01L
  REGION 1..10: note = CONT. FROM ABOVE: HLA-DRB1*12:02L HLA-DQA1*03:01-B1*03:02M HLA-D QA1*05:05-B1*03:01L HLA-DRB1*14:17L HLA-DRB1*16:01L HLA-DQA1*01: 03-B1*06:01L HLA-DQA1*02:01-B1*03:03L
STFISDEVAR

SEQ ID NO: 14299 - protein, 14 aa, Severe acute respiratory syndrome coronavirus 2
  REGION 1..14: note = Table B: HLA-DRB1*13:02L HLA-DRB1*13:03L HLA-DRB1*01:03L HLA-DRB1*04:05L HLA-DRB1*01:02L HLA-DRB1*08:04L HLA-DRB1*11:03L HLA-DRB1*11:04L HLA-DRB1*11:01L HLA-DRB1*13:01L HLA-DRB1*12:01L HLA-DRB3*01:01L HLA-DRB1*14:54L HLA-DRB1*04:08L HLA-DRB1*15:03L
RDLSLQFKRPINPT

SEQ ID NO: 14300 - protein, 15 aa, Severe acute respiratory syndrome coronavirus 2
  REGION 1..15: note = Table B: HLA-DRB1*13:02L HLA-DRB1*11:04L HLA-DRB1*11:01L HLA-DQA1*05:05-B1*03:19L HLA-DQA1*05:01-B1*02:01L HLA-DRB3*01:01L HLA-DQA1*05:05-B1*03:01L HLA-DQA1*01:03-B1*06:01L HLA-DRB1*08:02L
DLSLQFKRPINPTDQ

SEQ ID NO: 14301 - protein, 13 aa, Severe acute respiratory syndrome coronavirus 2
  REGION 1..13: note = Table B: HLA-DRB1*13:02L HLA-DRB1*13:03L HLA-DRB1*11:04L HLA-DRB1*11:01L HLA-DRB3*01:01L HLA-DPA1*03:01-B1*105:01L HLA-DQA1*01:03-B1*06:01L
GSIHLYFDKAGQK

SEQ ID NO: 14302 - protein, 12 aa, Severe acute respiratory syndrome coronavirus 2
  REGION 1..12: note = Table B: HLA-DRB1*13:02L HLA-DRB1*04:04L HLA-DQA1*01:02-B1*06:02L HLA-DRB1*14:01L HLA-DRB1*08:01L HLA-DRB3*01:01L HLA-DPA1*02:01-B1*13:01L
IHLYFDKAGQKT

SEQ ID NO: 14303 - protein, 10 aa, Severe acute respiratory syndrome coronavirus 2
  REGION 1..10: note = Table B: HLA-DRB1*13:02L HLA-DRB1*13:03L HLA-DRB1*01:03L HLA-DRB1*08:01L HLA-DRB1*12:01L HLA-DQA1*03:01-B1*03:02L HLA-DRB1*16:01L
KTYERHSLSH

SEQ ID NO: 14304 - protein, 14 aa, Severe acute respiratory syndrome coronavirus 2
  REGION 1..14: note = Table B: HLA-DRB1*13:02L HLA-DPA1*01:03-B1*03:01L
YERHSLSHFVNLDN

SEQ ID NO: 14305 - protein, 15 aa, Severe acute respiratory syndrome coronavirus 2
  REGION 1..15: note = Table B: HLA-DRB1*13:02L HLA-DRB1*04:05L HLA-DRB1*08:04L HLA-DRB3*02:01L HLA-DPA1*01:03-B1*03:01L HLA-DRB1*03:01L HLA-DRB1*11:03L HLA-DRB1*11:04L HLA-DRB1*14:02L HLA-DRB1*08:01L HLA-DQA1*05:05-B1*03:19L HLA-DRB1*12:02L HLA-DRB3*01:01L
  REGION 1..15: note = CONT. FROM ABOVE: HLA-DPA1*02:01-B1*13:01L HLA-DPA1*03:01-B1*105 :01L HLA-DRB1*14:54L HLA-DRB1*04:08L HLA-DRB1*15:03L
DNLRANNTKGSLPIN

SEQ ID NO: 14306 - protein, 16 aa, Severe acute respiratory syndrome coronavirus 2
  REGION 1..16: note = Table B: HLA-DRB1*13:02L HLA-DRB1*04:05L HLA-DRB1*12:01L
NNTKGSLPINVIVFDG

SEQ ID NO: 14307 - protein, 12 aa, Severe acute respiratory syndrome coronavirus 2
  REGION 1..12: note = Table B: HLA-DRB1*13:02L HLA-DRB1*13:03L HLA-DRB1*01:03L HLA-DRB1*01:02L HLA-DRB1*08:04L HLA-DRB1*08:77L HLA-DPA1*01:03-B1*03:01L HLA-DRB1*11:03L HLA-DRB1*11:04L HLA-DRB1*14:02L HLA-DRB1*12:01L HLA-DRB1*14:54L HLA-DRB1*04:08L
  REGION 1..12: note = CONT. FROM ABOVE: HLA-DRB1*15:03L
NVIVFDGKSKCE

SEQ ID NO: 14308 - protein, 12 aa, Severe acute respiratory syndrome coronavirus 2
  REGION 1..12: note = Table B: HLA-DRB1*13:02L HLA-DRB1*01:02L HLA-DRB1*08:04L HLA-DPA1*01:03-B1*03:01L HLA-DRB3*01:01L HLA-DRB1*04:08L HLA-DRB1*15:03L
IVFDGKSKCEES

SEQ ID NO: 14309 - protein, 13 aa, Severe acute respiratory syndrome coronavirus 2
  REGION 1..13: note = Table B: HLA-DRB1*13:02L HLA-DRB1*13:03L HLA-DRB3*02:01L HLA-DPA1*01:03-B1*03:01L HLA-DPA1*03:01-B1*04:02L HLA-DRB1*14:02L HLA-DRB1*08:01L HLA-DRB1*04:10L HLA-DRB1*12:02L HLA-DPA1*01:02-B1*04:01L HLA-DRB1*07:01L
KTLVATAEAELAK

SEQ ID NO: 14310 - protein, 11 aa, Severe acute respiratory syndrome coronavirus 2
  REGION 1..11: note = Table B: HLA-DRB1*13:02L HLA-DRB1*13:03L HLA-DRB1*04:04L HLA-DRB1*04:05L HLA-DRB1*01:02L HLA-DRB1*08:77L HLA-DRB3*02:01L HLA-DPA1*01:03-B1*03:01L HLA-DPA1*03:01-B1*04:02L HLA-DRB1*14:01L HLA-DRB1*11:04L HLA-DRB1*14:02L HLA-DRB1*08:01L
  REGION 1..11: note = CONT. FROM ABOVE: HLA-DRB1*11:01L HLA-DQA1*01-B1*05L HLA-DPA1*01 :03-B1*04:01L HLA-DQA1*05:05-B1*03:116L HLA-DRB1*04:10L HLA-DRB1 *12:02L HLA-DPA1*02:01-B1*13:01L HLA-DRB1*14:54L HLA-DPA1*01:03- B1*02:01L HLA-DPA1*01:03-B1*104:01L HLA-DRB1*07:01L
  REGION 1..11: note = CONT. FROM ABOVE: HLA-DRB1*08:03L HLA-DRB1*15:03L
VATAEAELAKN

SEQ ID NO: 14311 - protein, 11 aa, Severe acute respiratory syndrome coronavirus 2
  REGION 1..11: note = Table B: HLA-DRB1*13:02L HLA-DRB1*13:03L HLA-DRB1*01:03L HLA-DQA1*01:02-B1*06:02L HLA-DRB1*08:77L HLA-DPA1*03:01-B1*04:02L HLA-DRB1*03:01L HLA-DRB1*14:01L HLA-DRB1*11:02L HLA-DRB1*14:02L HLA-DRB1*08:01L
  REGION 1..11: note = CONT. FROM ABOVE: HLA-DQA1*01-B1*05L HLA-DRB4*01:01L HLA-DPA1*01 :03-B1*04:01L HLA-DQA1*05:05-B1*03:116M HLA-DRB1*09:01M HLA-DPA1 *01:03-B1*04:02M HLA-DRB1*12:01L HLA-DPA1*03:01-B1*105:01L HLA-D PA1*01:03-B1*104:01L HLA-DPA1*01:02-B1*04:01L HLA-DRB1*10:01L
  REGION 1..11: note = CONT. FROM ABOVE: HLA-DRB1*16:01L HLA-DQA1*01:03-B1*06:01L HLA-D QA1*02:01-B1*03:03L HLA-DRB1*15:03L
AEAELAKNVSL

SEQ ID NO: 14312 - protein, 12 aa, Severe acute respiratory syndrome coronavirus 2
  REGION 1..12: note = Table B: HLA-DRB1*13:02L HLA-DQA1*01:02-B1*06:02L HLA-DRB1*08:04L HLA-DRB1*14:01L HLA-DQA1*01:01-B1*05:01L HLA-DRB1*08:01L HLA-DRB1*04:10L HLA-DRB1*12:02L
EAELAKNVSLDN

SEQ ID NO: 14313 - protein, 13 aa, Severe acute respiratory syndrome coronavirus 2
  REGION 1..13: note = Table B: HLA-DRB1*13:02L HLA-DRB1*01:02L HLA-DRB1*08:04L HLA-DRB3*02:01L HLA-DPA1*01:03-B1*03:01L HLA-DPA1*03:01-B1*04:02L HLA-DQA1*05:05-B1*03:19L HLA-DPA1*02:01-B1*13:01L HLA-DPA1*01:02-B1*04:01L
  REGION 1..13: note = CONT. FROM ABOVE: HLA-DRB1*04:08L
AELAKNVSLDNVL

SEQ ID NO: 14314 - protein, 13 aa, Severe acute respiratory syndrome coronavirus 2
  REGION 1..13: note = Table B: HLA-DRB1*13:02L HLA-DRB1*13:03L HLA-DRB1*01:03L HLA-DRB1*04:04L HLA-DQA1*01:02-B1*06:02L HLA-DRB1*01:02L HLA-DRB1*14:01L HLA-DPA1*02:01-B1*13:01L HLA-DPA1*03:01-B1*105:01L HLA-DRB1*04:08L HLA-DRB1*15:03L
LAKNVSLDNVLST

SEQ ID NO: 14315 - protein, 13 aa, Severe acute respiratory syndrome coronavirus 2
  REGION 1..13: note = Table B: HLA-DRB1*13:02L HLA-DRB1*01:02L HLA-DRB1*08:04L HLA-DPA1*01:03-B1*03:01L
AKNVSLDNVLSTF

SEQ ID NO: 14316 - protein, 14 aa, Severe acute respiratory syndrome coronavirus 2
  REGION 1..14: note = Table B: HLA-DRB1*13:02L HLA-DRB1*01:02L HLA-DRB1*08:04L HLA-DPA1*01:03-B1*03:01L HLA-DRB1*03:01L
KNVSLDNVLSTFIS

SEQ ID NO: 14317 - protein, 13 aa, Severe acute respiratory syndrome coronavirus 2
  REGION 1..13: note = Table B: HLA-DRB1*13:02L HLA-DRB1*04:04L HLA-DRB3*02:01L HLA-DPA1*01:03-B1*03:01L HLA-DPA1*03:01-B1*04:02L HLA-DRB1*14:01L HLA-DRB1*08:01L HLA-DRB1*04:10L HLA-DPA1*01:03-B1*04:02L HLA-DPA1*02:01-B1*13:01L
  REGION 1..13: note = CONT. FROM ABOVE: HLA-DRB1*14:54L HLA-DPA1*01:02-B1*04:01L
DNVLSTFISAARQ

SEQ ID NO: 14318 - protein, 13 aa, Severe acute respiratory syndrome coronavirus 2
  REGION 1..13: note = Table B: HLA-DRB1*13:02L HLA-DRB1*04:04L HLA-DRB1*08:04L HLA-DRB3*02:01L HLA-DPA1*03:01-B1*04:02L HLA-DRB1*14:01L HLA-DRB1*04:10L HLA-DPA1*01:03-B1*04:02L HLA-DPA1*02:01-B1*13:01L HLA-DRB1*14:54L HLA-DRB1*08:03L
  REGION 1..13: note = CONT. FROM ABOVE: HLA-DRB1*15:01L
NVLSTFISAARQG

SEQ ID NO: 14319 - protein, 12 aa, Severe acute respiratory syndrome coronavirus 2
  REGION 1..12: note = Table B: HLA-DRB1*13:02L HLA-DRB1*08:04L HLA-DRB3*02:01L HLA-DPA1*01:03-B1*03:01L HLA-DRB1*08:01L HLA-DRB1*12:02L HLA-DRB1*14:54L
STFISAARQGFV

SEQ ID NO: 14320 - protein, 11 aa, Severe acute respiratory syndrome coronavirus 2
  REGION 1..11: note = Table B: HLA-DRB1*13:02L HLA-DRB1*13:03L HLA-DRB1*01:03L HLA-DRB1*04:05L HLA-DRB1*01:02L HLA-DRB1*08:04L HLA-DRB1*08:77L HLA-DRB3*02:01L HLA-DPA1*01:03-B1*03:01L HLA-DPA1*03:01-B1*04:02L HLA-DRB1*11:03L HLA-DRB1*11:04L
  REGION 1..11: note = CONT. FROM ABOVE: HLA-DRB1*14:02L HLA-DRB1*08:01L HLA-DPA1*01:03 -B1*04:02L HLA-DRB1*12:01L HLA-DRB1*12:02L HLA-DRB1*14:54L HLA-D PA1*01:02-B1*04:01L HLA-DRB1*16:01L HLA-DRB1*04:08L
FISAARQGFVD

SEQ ID NO: 14321 - protein, 14 aa, Severe acute respiratory syndrome coronavirus 2
  REGION 1..14: note = Table B: HLA-DRB1*13:02L HLA-DRB1*13:03L HLA-DRB3*02:01L HLA-DRB1*14:02L HLA-DRB1*08:01L HLA-DPA1*01:03-B1*04:01L HLA-DRB1*04:10L HLA-DPA1*01:03-B1*04:02L HLA-DPA1*01:03-B1*104:01L HLA-DPA1*01:02-B1*04:01L
  REGION 1..14: note = CONT. FROM ABOVE: HLA-DRB1*08:03L
ISAARQGFVDSDVE

SEQ ID NO: 14322 - protein, 15 aa, Severe acute respiratory syndrome coronavirus 2
  REGION 1..15: note = Table B: HLA-DRB1*13:02L HLA-DRB1*04:04L HLA-DPA1*01:03-B1*03:01L HLA-DRB3*01:01L HLA-DPA1*01:03-B1*104:01L HLA-DPA1*01:02-B1*04:01L HLA-DRB1*16:01L HLA-DRB1*15:03L
VETKDVVECLKLSHQ

SEQ ID NO: 14323 - protein, 14 aa, Severe acute respiratory syndrome coronavirus 2
  REGION 1..14: note = Table B: HLA-DRB1*13:02L HLA-DRB1*01:03L HLA-DRB1*04:02L HLA-DRB1*04:05L HLA-DRB1*01:02L HLA-DRB1*12:01L HLA-DRB3*01:01L HLA-DRB1*16:01L HLA-DRB1*15:03L
KDVVECLKLSHQSD

SEQ ID NO: 14324 - protein, 15 aa, Severe acute respiratory syndrome coronavirus 2
  REGION 1..15: note = Table B: HLA-DRB1*13:02L HLA-DRB1*04:04L HLA-DRB1*08:01L HLA-DPA1*02:01-B1*13:01L HLA-DPA1*01:03-B1*104:01L
LKLSHQSDIEVTGDS

SEQ ID NO: 14325 - protein, 13 aa, Severe acute respiratory syndrome coronavirus 2
  REGION 1..13: note = Table B: HLA-DRB1*13:02L
NNYMLTYNKVENM

SEQ ID NO: 14326 - protein, 14 aa, Severe acute respiratory syndrome coronavirus 2
  REGION 1..14: note = Table B: HLA-DRB1*13:02L HLA-DRB1*04:05L HLA-DRB1*14:02L HLA-DRB1*08:01L HLA-DQA1*05:05-B1*03:19L HLA-DQA1*05:05-B1*03:01L
NYMLTYNKVENMTP

SEQ ID NO: 14327 - protein, 13 aa, Severe acute respiratory syndrome coronavirus 2
  REGION 1..13: note = Table B: HLA-DRB1*13:02L HLA-DPA1*01:03-B1*03:01L HLA-DQA1*05:05-B1*03:01L
TYNKVENMTPRDL

SEQ ID NO: 14328 - protein, 13 aa, Severe acute respiratory syndrome coronavirus 2
  REGION 1..13: note = Table B: HLA-DRB1*13:02L HLA-DRB1*04:04L HLA-DRB1*08:04L HLA-DRB1*08:77L HLA-DRB3*02:01L HLA-DPA1*01:03-B1*03:01L HLA-DPA1*03:01-B1*04:02L HLA-DRB1*14:02L HLA-DQA1*01:01-B1*05:01L HLA-DRB1*08:01L HLA-DRB1*04:10L
  REGION 1..13: note = CONT. FROM ABOVE: HLA-DRB1*12:02L HLA-DPA1*01:03-B1*104:01L HLA- DRB1*07:01L HLA-DRB1*10:01L HLA-DRB1*04:08L HLA-DRB1*08:03L
YNKVENMTPRDLG

SEQ ID NO: 14329 - protein, 14 aa, Severe acute respiratory syndrome coronavirus 2
  REGION 1..14: note = Table B: HLA-DRB1*13:02L HLA-DRB1*01:01L HLA-DPA1*01:03-B1*03:01L HLA-DRB1*11:04L HLA-DRB1*11:01L HLA-DRB1*04:10L HLA-DRB3*01:01L HLA-DPA1*01:03-B1*104:01L HLA-DRB1*07:01L
SARHINAQVAKSHN

SEQ ID NO: 14330 - protein, 13 aa, Severe acute respiratory syndrome coronavirus 2
  REGION 1..13: note = Table B: HLA-DRB1*13:02L HLA-DRB3*02:01L HLA-DRB4*01:01L HLA-DPA1*01:03-B1*04:02L HLA-DRB1*12:02L HLA-DPA1*01:03-B1*104:01L HLA-DRB1*10:01L HLA-DRB1*08:03L
SHNIALIWNVKDF

SEQ ID NO: 14331 - protein, 14 aa, Severe acute respiratory syndrome coronavirus 2
  REGION 1..14: note = Table B: HLA-DRB1*13:02L HLA-DRB1*04:04L HLA-DPA1*01:03-B1*104:01L
IALIWNVKDFMSLS

SEQ ID NO: 14332 - protein, 13 aa, Severe acute respiratory syndrome coronavirus 2
  REGION 1..13: note = Table B: HLA-DRB1*13:02L HLA-DRB1*13:03L HLA-DRB1*04:04L HLA-DRB1*01:01L HLA-DRB1*14:01L HLA-DRB1*08:01L HLA-DRB3*01:01L HLA-DPA1*01:02-B1*04:01L HLA-DRB1*07:01L
VKDFMSLSEQLRK

SEQ ID NO: 14333 - protein, 12 aa, Severe acute respiratory syndrome coronavirus 2
  REGION 1..12: note = Table B: HLA-DRB1*13:02L HLA-DRB1*04:05L HLA-DQA1*01:02-B1*06:02L HLA-DRB1*01:01L HLA-DRB1*14:01L HLA-DQA1*01-B1*05L HLA-DPA1*03:01-B1*105:01L HLA-DRB1*07:01L HLA-DRB1*04:08L
DFMSLSEQLRKQ

SEQ ID NO: 14334 - protein, 15 aa, Severe acute respiratory syndrome coronavirus 2
  REGION 1..15: note = Table B: HLA-DRB1*13:02L HLA-DPA1*02:01-B1*13:01L HLA-DRB1*07:01L HLA-DQA1*02:01-B1*03:03L
EQLRKQIRSAAKKNN

SEQ ID NO: 14335 - protein, 14 aa, Severe acute respiratory syndrome coronavirus 2
  REGION 1..14: note = Table B: HLA-DRB1*13:02L HLA-DRB1*13:03L HLA-DRB1*01:03L HLA-DRB1*04:02L HLA-DRB1*04:05L HLA-DRB1*01:02L HLA-DRB1*08:04L HLA-DRB1*11:03L HLA-DRB1*11:04L HLA-DRB1*11:01L HLA-DRB1*12:01L HLA-DRB3*01:01L HLA-DRB1*16:01L HLA-DRB1*04:08L HLA-DRB1*15:03L
KQIRSAAKKNNLPF

SEQ ID NO: 14336 - protein, 10 aa, Severe acute respiratory syndrome coronavirus 2
  REGION 1..10: note = Table B: HLA-DRB1*13:02L HLA-DRB1*13:03L HLA-DRB4*03:01NL HLA-DRB1*08:01L HLA-DRB1*12:01L HLA-DQA1*03:01-B1*03:02M HLA-DQA1*05:05-B1*03:01L HLA-DRB1*14:17L
RQVVNVVTTK

SEQ ID NO: 14337 - protein, 14 aa, Severe acute respiratory syndrome coronavirus 2
  REGION 1..14: note = Table B: HLA-DRB1*13:02L HLA-DRB1*13:03L HLA-DRB1*04:04L HLA-DRB1*11:04L HLA-DRB1*11:01L HLA-DRB3*01:01L HLA-DPA1*02:01-B1*13:01L HLA-DQA1*05:05-B1*03:01L
VNVVTTKIALKGGK

SEQ ID NO: 14338 - protein, 13 aa, Severe acute respiratory syndrome coronavirus 2
  REGION 1..13: note = Table B: HLA-DRB1*13:02L HLA-DPA1*01:03-B1*03:01L HLA-DPA1*03:01-B1*105:01L
KGGKIVNNWLKQL

SEQ ID NO: 14339 - protein, 12 aa, Severe acute respiratory syndrome coronavirus 2
  REGION 1..12: note = Table B: HLA-DRB1*13:02L HLA-DRB1*01:03L HLA-DRB1*04:05L HLA-DRB1*01:02L HLA-DRB1*08:01L HLA-DRB1*12:01L HLA-DRB3*01:01L HLA-DRB1*04:08L
KIVNNWLKQLIK

SEQ ID NO: 14340 - protein, 12 aa, Severe acute respiratory syndrome coronavirus 2
  REGION 1..12: note = Table B: HLA-DRB1*13:02L HLA-DRB1*04:02L HLA-DRB3*02:01L HLA-DPA1*01:03-B1*03:01L HLA-DRB1*14:54L HLA-DRB1*14:17L HLA-DRB1*04:08L
AAIFYLITPVHV

SEQ ID NO: 14341 - protein, 11 aa, Severe acute respiratory syndrome coronavirus 2
  REGION 1..11: note = Table B: HLA-DRB1*13:02L HLA-DPA1*01:03-B1*03:01L HLA-DRB4*01:01L HLA-DRB1*04:08L
IFYLITPVHVM

SEQ ID NO: 14342 - protein, 13 aa, Severe acute respiratory syndrome coronavirus 2
  REGION 1..13: note = Table B: HLA-DRB1*13:02L HLA-DRB1*04:05L HLA-DRB1*01:02L HLA-DRB1*11:02L HLA-DRB1*11:03L HLA-DQA1*05:05-B1*03:116L HLA-DRB1*12:01L HLA-DRB3*01:01L HLA-DRB1*14:54L HLA-DRB1*08:02L HLA-DRB1*08:03L HLA-DRB1*15:03L
TPVHVMSKHTDFS

SEQ ID NO: 14343 - protein, 12 aa, Severe acute respiratory syndrome coronavirus 2
  REGION 1..12: note = Table B: HLA-DRB1*13:02L HLA-DRB1*04:04L HLA-DQA1*01:02-B1*06:02L HLA-DRB1*01:01L HLA-DRB1*01:02L HLA-DRB1*08:04L HLA-DRB1*08:77L HLA-DRB3*02:01L HLA-DPA1*01:03-B1*03:01L HLA-DPA1*03:01-B1*04:02L
  REGION 1..12: note = CONT. FROM ABOVE: HLA-DRB1*14:01L HLA-DRB1*11:03L HLA-DRB1*11:04 L HLA-DRB1*14:02L HLA-DQA1*01:01-B1*05:01L HLA-DRB1*08:01L HLA-D RB1*11:01L HLA-DQA1*05:05-B1*03:19L HLA-DPA1*01:03-B1*04:01L HLA -DRB1*09:01L HLA-DPA1*01:03-B1*04:02L HLA-DRB1*12:02L
  REGION 1..12: note = CONT. FROM ABOVE: HLA-DRB3*01:01L HLA-DPA1*02:01-B1*13:01L HLA-D PA1*03:01-B1*105:01L HLA-DPA1*01:03-B1*104:01L HLA-DQA1*05:05-B1 *03:01L HLA-DPA1*01:02-B1*04:01L HLA-DRB1*07:01L HLA-DRB1*10:01L HLA-DQA1*01:03-B1*06:01L HLA-DRB1*08:03L HLA-DRB1*15:01L
  REGION 1..12: note = CONT. FROM ABOVE: HLA-DRB1*15:03M
IIGYKAIDGGVT

SEQ ID NO: 14344 - protein, 12 aa, Severe acute respiratory syndrome coronavirus 2
  REGION 1..12: note = Table B: HLA-DRB1*13:02L HLA-DRB1*04:05L HLA-DRB1*08:01L HLA-DRB1*14:54L HLA-DRB1*04:08L
AIDGGVTRDIAS

SEQ ID NO: 14345 - protein, 13 aa, Severe acute respiratory syndrome coronavirus 2
  REGION 1..13: note = Table B: HLA-DRB1*13:02L HLA-DPA1*01:03-B1*03:01L HLA-DRB1*12:01L HLA-DPA1*02:01-B1*13:01L HLA-DPA1*03:01-B1*105:01L HLA-DRB1*04:08L
DGGVTRDIASTDT

SEQ ID NO: 14346 - protein, 11 aa, Severe acute respiratory syndrome coronavirus 2
  REGION 1..11: note = Table B: HLA-DRB1*13:02L HLA-DRB1*01:03L HLA-DRB1*04:02L HLA-DRB4*03:01NL HLA-DRB1*08:01L HLA-DRB5*01:01L HLA-DRB1*12:01L
VVPGLPGTILR

SEQ ID NO: 14347 - protein, 12 aa, Severe acute respiratory syndrome coronavirus 2
  REGION 1..12: note = Table B: HLA-DRB1*13:02L HLA-DRB1*04:02L HLA-DRB4*03:01NL HLA-DRB1*09:01L HLA-DRB1*12:02L HLA-DRB1*14:54L
GTILRTTNGDFL

SEQ ID NO: 14348 - protein, 12 aa, Severe acute respiratory syndrome coronavirus 2
  REGION 1..12: note = Table B: HLA-DRB1*13:02L HLA-DRB1*04:05L HLA-DQA1*01:02-B1*06:02L HLA-DPA1*03:01-B1*105:01L HLA-DRB1*14:17L HLA-DRB1*04:08L
TILRTTNGDFLH

SEQ ID NO: 14349 - protein, 13 aa, Severe acute respiratory syndrome coronavirus 2
  REGION 1..13: note = Table B: HLA-DRB1*13:02L HLA-DRB1*13:03L HLA-DRB1*04:02L HLA-DRB3*01:01L
GDFLHFLPRVFSA

SEQ ID NO: 14350 - protein, 14 aa, Severe acute respiratory syndrome coronavirus 2
  REGION 1..14: note = Table B: HLA-DRB1*13:02L
FLHFLPRVFSAVGN

SEQ ID NO: 14351 - protein, 14 aa, Severe acute respiratory syndrome coronavirus 2
  REGION 1..14: note = Table B: HLA-DRB1*13:02L HLA-DRB1*13:03L HLA-DRB1*04:04L HLA-DRB3*02:01L HLA-DRB1*14:02L HLA-DRB1*11:01L HLA-DRB4*02:01NL HLA-DPA1*01:03-B1*04:01L HLA-DQA1*05:05-B1*03:116L HLA-DPA1*02:01-B1*13:01L HLA-DRB1*14:54L
  REGION 1..14: note = CONT. FROM ABOVE: HLA-DPA1*01:03-B1*104:01L HLA-DRB1*07:01L HLA- DRB1*08:03L HLA-DRB1*15:03L
VLEGSVAYESLRPD

SEQ ID NO: 14352 - protein, 13 aa, Severe acute respiratory syndrome coronavirus 2
  REGION 1..13: note = Table B: HLA-DRB1*13:02L HLA-DRB1*04:04L HLA-DRB1*01:02L HLA-DRB1*08:04L HLA-DPA1*01:03-B1*03:01L HLA-DRB1*14:01L HLA-DRB1*11:04L HLA-DPA1*01:03-B1*04:01L HLA-DRB1*12:02L HLA-DPA1*02:01-B1*13:01L HLA-DRB1*14:54L
  REGION 1..13: note = CONT. FROM ABOVE: HLA-DPA1*01:03-B1*02:01L HLA-DPA1*01:03-B1*104 :01L HLA-DRB1*08:03L HLA-DRB1*15:03L
EGSVAYESLRPDT

SEQ ID NO: 14353 - protein, 13 aa, Severe acute respiratory syndrome coronavirus 2
  REGION 1..13: note = Table B: HLA-DRB1*13:02L HLA-DPA1*01:03-B1*03:01L HLA-DRB1*11:04L HLA-DQA1*05:05-B1*03:19L HLA-DRB3*01:01L HLA-DPA1*01:03-B1*02:01L HLA-DRB1*08:03L
GSVAYESLRPDTR

SEQ ID NO: 14354 - protein, 13 aa, Severe acute respiratory syndrome coronavirus 2
  REGION 1..13: note = Table B: HLA-DRB1*13:02L
SVAYESLRPDTRY

SEQ ID NO: 14355 - protein, 11 aa, Severe acute respiratory syndrome coronavirus 2
  REGION 1..11: note = Table B: HLA-DRB1*13:02L HLA-DRB3*01:01L
ESLRPDTRYVL

SEQ ID NO: 14356 - protein, 12 aa, Severe acute respiratory syndrome coronavirus 2
  REGION 1..12: note = Table B: HLA-DRB1*13:02L HLA-DRB1*01:03L HLA-DRB1*01:02L HLA-DRB1*03:01L HLA-DRB1*14:01L HLA-DRB3*01:01L HLA-DRB1*16:01L
LRPDTRYVLMDG

SEQ ID NO: 14357 - protein, 12 aa, Severe acute respiratory syndrome coronavirus 2
  REGION 1..12: note = Table B: HLA-DRB1*13:02L HLA-DRB1*08:04L HLA-DRB1*11:03L HLA-DRB1*11:04L HLA-DRB1*08:01L HLA-DRB1*07:01L HLA-DRB1*08:03L
DGSIIQFPNTYL

SEQ ID NO: 14358 - protein, 12 aa, Severe acute respiratory syndrome coronavirus 2
  REGION 1..12: note = Table B: HLA-DRB1*13:02L HLA-DRB1*11:03L HLA-DRB1*11:04L HLA-DRB1*08:01L HLA-DQA1*05:05-B1*03:01L HLA-DRB1*08:03L
GSIIQFPNTYLE

SEQ ID NO: 14359 - protein, 11 aa, Severe acute respiratory syndrome coronavirus 2
  REGION 1..11: note = Table B: HLA-DRB1*13:02L HLA-DRB1*01:03L HLA-DRB1*04:05L HLA-DRB4*03:01NL HLA-DQA1*01:01-B1*05:01L HLA-DRB1*08:01L HLA-DRB5*01:01L HLA-DQA1*05:05-B1*03:19L HLA-DPA1*01:03-B1*04:02L HLA-DRB1*12:01L
  REGION 1..11: note = CONT. FROM ABOVE: HLA-DPA1*03:01-B1*105:01L HLA-DRB1*14:54L HLA- DRB1*04:08L HLA-DRB1*15:03L
FPNTYLEGSVR

SEQ ID NO: 14360 - protein, 13 aa, Severe acute respiratory syndrome coronavirus 2
  REGION 1..13: note = Table B: HLA-DRB1*13:02L HLA-DRB4*03:01NL HLA-DRB1*08:04L HLA-DRB1*08:77L HLA-DRB1*11:03L HLA-DRB1*11:04L HLA-DRB3*01:01L HLA-DRB1*14:54L HLA-DRB1*15:03L
SGRWVLNNDYYRS

SEQ ID NO: 14361 - protein, 14 aa, Severe acute respiratory syndrome coronavirus 2
  REGION 1..14: note = Table B: HLA-DRB1*13:02L HLA-DRB1*08:04L HLA-DRB1*14:02L HLA-DRB1*08:01L HLA-DQA1*01-B1*05L HLA-DRB1*12:01L HLA-DRB3*01:01L HLA-DPA1*02:01-B1*13:01L
GRWVLNNDYYRSLP

SEQ ID NO: 14362 - protein, 12 aa, Severe acute respiratory syndrome coronavirus 2
  REGION 1..12: note = Table B: HLA-DRB1*13:02L HLA-DRB3*02:01L
NNDYYRSLPGVF

SEQ ID NO: 14363 - protein, 13 aa, Severe acute respiratory syndrome coronavirus 2
  REGION 1..13: note = Table B: HLA-DRB1*13:02L
NDYYRSLPGVFCG

SEQ ID NO: 14364 - protein, 14 aa, Severe acute respiratory syndrome coronavirus 2
  REGION 1..14: note = Table B: HLA-DRB1*13:02L
DYYRSLPGVFCGVD

SEQ ID NO: 14365 - protein, 16 aa, Severe acute respiratory syndrome coronavirus 2
  REGION 1..16: note = Table B: HLA-DRB1*13:02L HLA-DRB1*01:03L HLA-DRB1*14:01L HLA-DRB1*14:02L HLA-DPA1*01:03-B1*104:01L HLA-DRB1*10:01L HLA-DRB1*04:08L
LPGVFCGVDAVNLLTN

SEQ ID NO: 14366 - protein, 12 aa, Severe acute respiratory syndrome coronavirus 2
  REGION 1..12: note = Table B: HLA-DRB1*13:02L HLA-DRB1*04:04L HLA-DRB1*08:77L HLA-DRB3*02:01L HLA-DPA1*01:03-B1*03:01L HLA-DRB1*11:03L HLA-DRB1*11:04L HLA-DRB1*14:02L HLA-DQA1*01:01-B1*05:01L HLA-DRB1*11:01L HLA-DPA1*01:03-B1*04:01L HLA-DRB1*09:01L
  REGION 1..12: note = CONT. FROM ABOVE: HLA-DRB1*12:02L HLA-DPA1*01:03-B1*02:01L HLA-D PA1*01:03-B1*104:01L HLA-DRB1*07:01L HLA-DRB1*10:01L
TNMFTPLIQPIG

SEQ ID NO: 14367 - protein, 17 aa, Severe acute respiratory syndrome coronavirus 2
  REGION 1..17: note = Table B: HLA-DRB1*13:02L HLA-DRB1*04:04L HLA-DRB1*16:01L HLA-DRB1*04:08L
QPIGALDISASIVAGGI

SEQ ID NO: 14368 - protein, 14 aa, Severe acute respiratory syndrome coronavirus 2
  REGION 1..14: note = Table B: HLA-DRB1*13:02L HLA-DRB1*08:04L HLA-DPA1*01:03-B1*04:02L HLA-DRB1*15:03L
AYYFMRFRRAFGEY

SEQ ID NO: 14369 - protein, 14 aa, Severe acute respiratory syndrome coronavirus 2
  REGION 1..14: note = Table B: HLA-DRB1*13:02L HLA-DRB1*04:04L HLA-DRB1*01:01L HLA-DRB1*11:01L HLA-DRB1*07:01L
RFRRAFGEYSHVVA

SEQ ID NO: 14370 - protein, 15 aa, Severe acute respiratory syndrome coronavirus 2
  REGION 1..15: note = Table B: HLA-DRB1*13:02L HLA-DRB1*08:04L HLA-DRB1*14:01L
FRRAFGEYSHVVAFN

SEQ ID NO: 14371 - protein, 11 aa, Severe acute respiratory syndrome coronavirus 2
  REGION 1..11: note = Table B: HLA-DRB1*13:02L HLA-DRB1*01:03L HLA-DRB4*03:01NL HLA-DRB1*08:77L HLA-DQA1*01:01-B1*05:01L HLA-DRB1*09:01L HLA-DPA1*01:03-B1*104:01L HLA-DRB1*07:01L HLA-DRB1*10:01L HLA-DRB1*04:08L HLA-DRB1*08:03L
EYSHVVAFNTL

SEQ ID NO: 14372 - protein, 12 aa, Severe acute respiratory syndrome coronavirus 2
  REGION 1..12: note = Table B: HLA-DRB1*13:02L HLA-DPA1*01:03-B1*03:01L
SHVVAFNTLLFL

SEQ ID NO: 14373 - protein, 11 aa, Severe acute respiratory syndrome coronavirus 2
  REGION 1..11: note = Table B: HLA-DRB1*13:02L HLA-DRB1*04:05L HLA-DRB1*08:02L
SFLPGVYSVIY

SEQ ID NO: 14374 - protein, 12 aa, Severe acute respiratory syndrome coronavirus 2
  REGION 1..12: note = Table B: HLA-DRB1*13:02L HLA-DRB1*01:02L HLA-DRB1*08:04L HLA-DRB3*02:01L HLA-DRB1*12:02L HLA-DRB1*14:54L
TNDVSFLAHIQW

SEQ ID NO: 14375 - protein, 13 aa, Severe acute respiratory syndrome coronavirus 2
  REGION 1..13: note = Table B: HLA-DRB1*13:02L HLA-DRB1*14:01L HLA-DRB3*01:01L
HFYWFFSNYLKRR

SEQ ID NO: 14376 - protein, 14 aa, Severe acute respiratory syndrome coronavirus 2
  REGION 1..14: note = Table B: HLA-DRB1*13:02L HLA-DPA1*03:01-B1*04:02L
FYWFFSNYLKRRVV

SEQ ID NO: 14377 - protein, 15 aa, Severe acute respiratory syndrome coronavirus 2
  REGION 1..15: note = Table B: HLA-DRB1*13:02L HLA-DRB3*01:01L
YWFFSNYLKRRVVFN

SEQ ID NO: 14378 - protein, 15 aa, Severe acute respiratory syndrome coronavirus 2
  REGION 1..15: note = Table B: HLA-DRB1*13:02L HLA-DRB3*01:01L
WFFSNYLKRRVVFNG

SEQ ID NO: 14379 - protein, 14 aa, Severe acute respiratory syndrome coronavirus 2
  REGION 1..14: note = Table B: HLA-DRB1*13:02L HLA-DRB1*04:04L HLA-DPA1*01:03-B1*03:01L HLA-DPA1*02:01-B1*13:01L HLA-DRB1*15:03L
LKRRVVFNGVSFST

SEQ ID NO: 14380 - protein, 13 aa, Severe acute respiratory syndrome coronavirus 2
  REGION 1..13: note = Table B: HLA-DRB1*13:02L HLA-DRB1*08:04L HLA-DRB1*11:04L HLA-DRB1*08:01L HLA-DRB1*11:01L HLA-DPA1*01:03-B1*02:01L
RVVFNGVSFSTFE

SEQ ID NO: 14381 - protein, 14 aa, Severe acute respiratory syndrome coronavirus 2
  REGION 1..14: note = Table B: HLA-DRB1*13:02L HLA-DRB1*08:04L HLA-DRB1*14:01L
VVFNGVSFSTFEEA

SEQ ID NO: 14382 - protein, 13 aa, Severe acute respiratory syndrome coronavirus 2
  REGION 1..13: note = Table B: HLA-DRB1*13:02L HLA-DRB1*04:02L HLA-DRB1*08:04L HLA-DRB3*02:01L HLA-DRB1*14:01L HLA-DRB1*14:02L HLA-DRB1*08:01L HLA-DPA1*01:03-B1*104:01L
NGVSFSTFEEAAL

SEQ ID NO: 14383 - protein, 13 aa, Severe acute respiratory syndrome coronavirus 2
  REGION 1..13: note = Table B: HLA-DRB1*13:02L HLA-DRB1*04:05L HLA-DPA1*01:03-B1*03:01L HLA-DRB1*14:01L HLA-DRB1*08:01L HLA-DPA1*01:03-B1*04:01L HLA-DRB3*01:01L HLA-DPA1*02:01-B1*13:01L HLA-DQA1*03:01-B1*03:02L
  REGION 1..13: note = CONT. FROM ABOVE: HLA-DPA1*01:03-B1*02:01L HLA-DRB1*15:03L
LKLRSDVLLPLTQ

SEQ ID NO: 14384 - protein, 14 aa, Severe acute respiratory syndrome coronavirus 2
  REGION 1..14: note = Table B: HLA-DRB1*13:02L HLA-DPA1*02:01-B1*13:01L
KLRSDVLLPLTQYN

SEQ ID NO: 14385 - protein, 10 aa, Severe acute respiratory syndrome coronavirus 2
  REGION 1..10: note = Table B: HLA-DRB1*13:02L HLA-DRB1*13:03L HLA-DRB4*03:01NL HLA-DRB1*08:01L HLA-DRB1*12:01L HLA-DQA1*03:01-B1*03:02L HLA-DQA1*05:05-B1*03:01L
VLLPLTQYNR

SEQ ID NO: 14386 - protein, 12 aa, Severe acute respiratory syndrome coronavirus 2
  REGION 1..12: note = Table B: HLA-DRB1*13:02L HLA-DRB3*01:01L HLA-DRB1*04:08L
YLALYNKYKYFS

SEQ ID NO: 14387 - protein, 12 aa, Severe acute respiratory syndrome coronavirus 2
  REGION 1..12: note = Table B: HLA-DRB1*13:02L HLA-DRB1*01:03L HLA-DRB1*04:02L HLA-DRB1*04:05L HLA-DQA1*01:02-B1*06:02L HLA-DRB1*01:02L HLA-DRB1*08:04L HLA-DPA1*03:01-B1*04:02L HLA-DRB1*11:03L HLA-DRB1*11:04L HLA-DRB1*08:01L HLA-DRB1*11:01L HLA-DRB1*12:01L
  REGION 1..12: note = CONT. FROM ABOVE: HLA-DRB3*01:01L HLA-DPA1*03:01-B1*105:01L HLA- DPA1*01:02-B1*04:01L HLA-DRB1*16:01L HLA-DRB1*04:08L
LALYNKYKYFSG

SEQ ID NO: 14388 - protein, 14 aa, Severe acute respiratory syndrome coronavirus 2
  REGION 1..14: note = Table B: HLA-DRB1*13:02L HLA-DRB1*01:03L HLA-DQA1*01:02-B1*06:02L HLA-DRB1*01:02L HLA-DPA1*01:03-B1*03:01L HLA-DQA1*01:01-B1*05:01L HLA-DPA1*02:01-B1*13:01L HLA-DPA1*03:01-B1*105:01L
  REGION 1..14: note = CONT. FROM ABOVE: HLA-DQA1*05:05-B1*03:01L HLA-DQA1*01:03-B1*06: 01L
LAKALNDFSNSGSD

SEQ ID NO: 14389 - protein, 13 aa, Severe acute respiratory syndrome coronavirus 2
  REGION 1..13: note = Table B: HLA-DRB1*13:02L HLA-DRB3*02:01L HLA-DPA1*01:03-B1*03:01L HLA-DRB1*04:10L HLA-DRB1*12:02L HLA-DRB1*14:54L HLA-DRB1*04:08L
SDVLYQPPQTSIT

SEQ ID NO: 14390 - protein, 12 aa, Severe acute respiratory syndrome coronavirus 2
  REGION 1..12: note = Table B: HLA-DRB1*13:02L HLA-DRB1*13:03L HLA-DRB1*04:04L HLA-DRB1*14:02L HLA-DRB1*11:01L HLA-DRB1*04:10L HLA-DPA1*01:03-B1*02:01L HLA-DPA1*01:03-B1*104:01L
SITSAVLQSGFR

SEQ ID NO: 14391 - protein, 16 aa, Severe acute respiratory syndrome coronavirus 2
  REGION 1..16: note = Table B: HLA-DRB1*13:02L HLA-DRB1*11:02L HLA-DQA1*05:05-B1*03:19L HLA-DPA1*01:03-B1*04:02L HLA-DRB1*12:01L HLA-DPA1*03:01-B1*105:01L HLA-DRB1*15:03L
SAVLQSGFRKMAFPSG

SEQ ID NO: 14392 - protein, 12 aa, Severe acute respiratory syndrome coronavirus 2
  REGION 1..12: note = Table B: HLA-DRB1*13:02L HLA-DRB1*01:03L HLA-DRB1*01:02L HLA-DRB1*08:04L HLA-DPA1*03:01-B1*04:02L HLA-DRB1*03:01L HLA-DRB1*14:01L HLA-DQA1*05:01-B1*02:01L HLA-DRB3*01:01L HLA-DRB1*16:01L HLA-DRB1*04:08L HLA-DRB1*15:03L
GLWLDDVVYCPR

SEQ ID NO: 14393 - protein, 14 aa, Severe acute respiratory syndrome coronavirus 2
  REGION 1..14: note = Table B: HLA-DRB1*13:02L HLA-DRB1*01:03L HLA-DRB1*01:02L HLA-DRB1*08:01L HLA-DRB3*01:01L HLA-DRB1*04:08L
LDDVVYCPRHVICT

SEQ ID NO: 14394 - protein, 16 aa, Severe acute respiratory syndrome coronavirus 2
  REGION 1..16: note = Table B: HLA-DRB1*13:02L HLA-DRB1*01:03L HLA-DRB1*01:02L HLA-DRB1*11:02L HLA-DRB1*14:02L HLA-DPA1*01:03-B1*04:02L HLA-DRB1*12:01L HLA-DPA1*03:01-B1*105:01L HLA-DRB1*16:01L HLA-DRB1*15:03L
DDVVYCPRHVICTSED

SEQ ID NO: 14395 - protein, 15 aa, Severe acute respiratory syndrome coronavirus 2
  REGION 1..15: note = Table B: HLA-DRB1*13:02L HLA-DRB1*01:03L HLA-DRB1*14:02L
SEDMLNPNYEDLLIR

SEQ ID NO: 14396 - protein, 12 aa, Severe acute respiratory syndrome coronavirus 2
  REGION 1..12: note = Table B: HLA-DRB1*13:02L HLA-DRB1*01:03L HLA-DRB1*04:02L HLA-DRB1*04:05L HLA-DRB1*01:02L HLA-DRB1*08:04L HLA-DRB1*08:01L HLA-DRB1*12:01L HLA-DRB1*14:54L HLA-DRB1*16:01L HLA-DRB1*04:08L HLA-DRB1*15:03L
DLLIRKSNHNFL

SEQ ID NO: 14397 - protein, 13 aa, Severe acute respiratory syndrome coronavirus 2
  REGION 1..13: note = Table B: HLA-DRB1*13:02L HLA-DRB1*16:01L
LLIRKSNHNFLVQ

SEQ ID NO: 14398 - protein, 14 aa, Severe acute respiratory syndrome coronavirus 2
  REGION 1..14: note = Table B: HLA-DRB1*13:02L HLA-DRB1*04:05L HLA-DPA1*02:01-B1*13:01L
LIRKSNHNFLVQAG

SEQ ID NO: 14399 - protein, 12 aa, Severe acute respiratory syndrome coronavirus 2
  REGION 1..12: note = Table B: HLA-DRB1*13:02L HLA-DRB1*04:04L HLA-DRB1*01:02L HLA-DRB1*08:04L HLA-DPA1*03:01-B1*04:02L HLA-DRB1*14:01L HLA-DRB1*12:02L HLA-DPA1*02:01-B1*13:01L HLA-DPA1*01:02-B1*04:01L HLA-DRB1*10:01L HLA-DRB1*08:03L
  REGION 1..12: note = CONT. FROM ABOVE: HLA-DRB1*15:03L
NHNFLVQAGNVQ

SEQ ID NO: 14400 - protein, 12 aa, Severe acute respiratory syndrome coronavirus 2
  REGION 1..12: note = Table B: HLA-DRB1*13:02L HLA-DRB1*13:03L HLA-DRB1*01:03L HLA-DRB1*04:02L HLA-DRB1*04:04L HLA-DRB1*04:05L HLA-DRB1*01:02L HLA-DRB4*03:01NL HLA-DRB1*14:01L HLA-DRB1*08:01L HLA-DRB1*04:10L HLA-DRB1*12:01L HLA-DRB3*01:01L HLA-DRB1*14:54L HLA-DRB1*16:01L
  REGION 1..12: note = CONT. FROM ABOVE: HLA-DRB1*04:08L HLA-DQA1*02:01-B1*03:03L HLA-D RB1*15:03L
VLKLKVDTANPK

SEQ ID NO: 14401 - protein, 12 aa, Severe acute respiratory syndrome coronavirus 2
  REGION 1..12: note = Table B: HLA-DRB1*13:02L HLA-DRB1*01:03L HLA-DRB1*01:02L HLA-DRB1*03:01L HLA-DQA1*05:01-B1*02:01L HLA-DRB1*12:01L HLA-DRB3*01:01L HLA-DRB1*15:03L
KLKVDTANPKTP

SEQ ID NO: 14402 - protein, 10 aa, Severe acute respiratory syndrome coronavirus 2
  REGION 1..10: note = Table B: HLA-DRB1*13:02L HLA-DRB1*13:03L HLA-DRB1*01:03L HLA-DRB1*04:02L HLA-DRB1*01:01L HLA-DRB4*03:01NL HLA-DRB1*14:01L HLA-DRB1*11:04L HLA-DRB1*08:01L HLA-DRB1*12:01L HLA-DRB3*01:01L HLA-DQA1*03:01-B1*03:02L HLA-DQA1*05:05-B1*03:01L
  REGION 1..10: note = CONT. FROM ABOVE: HLA-DRB1*14:17L HLA-DRB1*16:01L HLA-DQA1*02:01 -B1*03:03L
TANPKTPKYK

SEQ ID NO: 14403 - protein, 15 aa, Severe acute respiratory syndrome coronavirus 2
  REGION 1..15: note = Table B: HLA-DRB1*13:02L HLA-DRB1*04:04L HLA-DRB1*01:01L HLA-DRB3*02:01L HLA-DRB1*03:01L HLA-DRB1*11:02L HLA-DRB1*11:03L HLA-DRB1*11:04L HLA-DRB1*14:02L HLA-DQA1*05:01-B1*02:01L HLA-DPA1*01:03-B1*04:01L HLA-DQA1*05:05-B1*03:116L
  REGION 1..15: note = CONT. FROM ABOVE: HLA-DRB1*04:10L HLA-DRB3*01:01L HLA-DRB1*14:54 L HLA-DPA1*01:03-B1*02:01L HLA-DPA1*01:03-B1*104:01L HLA-DRB1*14 :17L HLA-DRB1*07:01L HLA-DRB1*10:01L HLA-DRB1*08:02L HLA-DRB1*08 :03L
SPSGVYQCAMRPNFT

SEQ ID NO: 14404 - protein, 13 aa, Severe acute respiratory syndrome coronavirus 2
  REGION 1..13: note = Table B: HLA-DRB1*13:02L HLA-DRB4*03:01NL HLA-DRB1*11:03L HLA-DRB1*11:04L HLA-DRB1*14:02L HLA-DRB1*11:01L HLA-DRB1*04:10L HLA-DRB3*01:01L HLA-DPA1*02:01-B1*13:01L HLA-DRB1*14:54L HLA-DPA1*01:02-B1*04:01L HLA-DRB1*10:01L HLA-DRB1*08:02L
  REGION 1..13: note = CONT. FROM ABOVE: HLA-DRB1*15:03L
RPNFTIKGSFLNG

SEQ ID NO: 14405 - protein, 14 aa, Severe acute respiratory syndrome coronavirus 2
  REGION 1..14: note = Table B: HLA-DRB1*13:02L HLA-DRB1*04:04L HLA-DRB1*01:02L HLA-DRB1*08:77L HLA-DRB1*14:02L HLA-DRB1*08:01L HLA-DQA1*05:05-B1*03:116L HLA-DPA1*01:03-B1*04:02L HLA-DRB3*01:01L HLA-DPA1*02:01-B1*13:01L
  REGION 1..14: note = CONT. FROM ABOVE: HLA-DPA1*03:01-B1*105:01L HLA-DRB1*14:54L HLA- DPA1*01:03-B1*104:01L HLA-DRB1*07:01L HLA-DRB1*15:03L
LPTGVHAGTDLEGN

SEQ ID NO: 14406 - protein, 12 aa, Severe acute respiratory syndrome coronavirus 2
  REGION 1..12: note = Table B: HLA-DRB1*13:02L HLA-DRB3*02:01L HLA-DPA1*03:01-B1*04:02L HLA-DRB4*01:01L HLA-DQA1*05:05-B1*03:116L HLA-DPA1*02:01-B1*13:01L HLA-DQA1*05:05-B1*03:01L HLA-DPA1*01:02-B1*04:01L
VHAGTDLEGNFY

SEQ ID NO: 14407 - protein, 15 aa, Severe acute respiratory syndrome coronavirus 2
  REGION 1..15: note = Table B: HLA-DRB1*13:02L HLA-DRB1*08:04L HLA-DPA1*01:03-B1*03:01L HLA-DRB1*14:01L
GTDLEGNFYGPFVDR

SEQ ID NO: 14408 - protein, 14 aa, Severe acute respiratory syndrome coronavirus 2
  REGION 1..14: note = Table B: HLA-DRB1*13:02L HLA-DRB1*04:04L HLA-DQA1*01:01-B1*05:01L HLA-DRB1*04:10L HLA-DPA1*01:03-B1*04:02L
GNFYGPFVDRQTAQ

SEQ ID NO: 14409 - protein, 14 aa, Severe acute respiratory syndrome coronavirus 2
  REGION 1..14: note = Table B: HLA-DRB1*13:02L HLA-DRB1*13:03L HLA-DRB1*01:03L HLA-DRB1*04:02L HLA-DRB1*04:05L HLA-DRB4*03:01NL HLA-DPA1*01:03-B1*03:01L HLA-DRB1*12:01L HLA-DPA1*03:01-B1*105:01L HLA-DRB1*14:17L HLA-DRB1*04:08L
TAQAAGTDTTITVN

SEQ ID NO: 14410 - protein, 14 aa, Severe acute respiratory syndrome coronavirus 2
  REGION 1..14: note = Table B: HLA-DRB1*13:02L HLA-DRB1*04:04L HLA-DRB1*08:04L HLA-DPA1*03:01-B1*04:02L HLA-DRB1*14:02L HLA-DQA1*01-B1*05L HLA-DPA1*02:01-B1*13:01L HLA-DPA1*01:03-B1*104:01L
VLAWLYAAVINGDR

SEQ ID NO: 14411 - protein, 14 aa, Severe acute respiratory syndrome coronavirus 2
  REGION 1..14: note = Table B: HLA-DRB1*13:02L
AWLYAAVINGDRWF

SEQ ID NO: 14412 - protein, 14 aa, Severe acute respiratory syndrome coronavirus 2
  REGION 1..14: note = Table B: HLA-DRB1*13:02L HLA-DRB1*04:05L HLA-DRB1*08:01L HLA-DRB3*01:01L
AVINGDRWFLNRFT

SEQ ID NO: 14413 - protein, 14 aa, Severe acute respiratory syndrome coronavirus 2
  REGION 1..14: note = Table B: HLA-DRB1*13:02L HLA-DRB1*13:03L HLA-DRB1*04:04L HLA-DPA1*01:03-B1*03:01L HLA-DRB1*11:04L HLA-DRB1*14:02L HLA-DRB3*01:01L HLA-DPA1*01:03-B1*104:01L HLA-DRB1*08:03L
GDRWFLNRFTTTLN

SEQ ID NO: 14414 - protein, 14 aa, Severe acute respiratory syndrome coronavirus 2
  REGION 1..14: note = Table B: HLA-DRB1*13:02L HLA-DRB1*04:04L HLA-DRB1*04:05L HLA-DPA1*01:03-B1*03:01L HLA-DRB1*14:01L HLA-DRB1*11:04L HLA-DRB3*01:01L
DRWFLNRFTTTLND

SEQ ID NO: 14415 - protein, 14 aa, Severe acute respiratory syndrome coronavirus 2
  REGION 1..14: note = Table B: HLA-DRB1*13:02L HLA-DRB1*04:04L HLA-DRB1*11:04L HLA-DRB1*14:02L HLA-DRB1*11:01L HLA-DPA1*01:03-B1*104:01L HLA-DRB1*14:17L HLA-DRB1*08:03L
DFNLVAMKYNYEPL

SEQ ID NO: 14416 - protein, 12 aa, Severe acute respiratory syndrome coronavirus 2
  REGION 1..12: note = Table B: HLA-DRB1*13:02L HLA-DRB1*01:02L HLA-DRB1*08:04L HLA-DRB3*02:01L HLA-DPA1*01:03-B1*03:01L HLA-DPA1*03:01-B1*04:02L HLA-DRB1*14:01L HLA-DRB1*14:02L HLA-DQA1*01:01-B1*05:01L HLA-DRB1*08:01L
  REGION 1..12: note = CONT. FROM ABOVE: HLA-DPA1*01:03-B1*04:01L HLA-DRB1*09:01L HLA-D PA1*01:03-B1*04:02L HLA-DPA1*02:01-B1*13:01L HLA-DRB1*14:54L HLA -DPA1*01:03-B1*104:01L HLA-DQA1*05:05-B1*03:01L HLA-DRB1*10:01L HLA-DRB1*08:03L
YNYEPLTQDHVD

SEQ ID NO: 14417 - protein, 14 aa, Severe acute respiratory syndrome coronavirus 2
  REGION 1..14: note = Table B: HLA-DRB1*13:02L HLA-DRB1*01:01L HLA-DRB1*14:02L HLA-DPA1*01:03-B1*04:02L HLA-DPA1*02:01-B1*13:01L HLA-DPA1*01:03-B1*104:01L HLA-DRB1*15:03L
VDILGPLSAQTGIA

SEQ ID NO: 14418 - protein, 10 aa, Severe acute respiratory syndrome coronavirus 2
  REGION 1..10: note = Table B: HLA-DRB1*13:02L HLA-DRB1*13:03M HLA-DRB1*01:01L HLA-DRB4*03:01NL HLA-DRB3*02:01L HLA-DRB1*11:04L HLA-DRB1*08:01M HLA-DRB5*01:01L HLA-DRB1*12:01M HLA-DRB1*12:02L HLA-DQA1*03:01-B1*03:02M HLA-DQA1*05:05-B1*03:01M
  REGION 1..10: note = CONT. FROM ABOVE: HLA-DRB1*14:17L HLA-DRB1*08:02L
ELLQNGMNGR

SEQ ID NO: 14419 - protein, 13 aa, Severe acute respiratory syndrome coronavirus 2
  REGION 1..13: note = Table B: HLA-DRB1*13:02L HLA-DRB1*13:03L HLA-DRB1*04:02L HLA-DRB1*04:05L HLA-DRB4*03:01NL HLA-DRB1*08:04L HLA-DRB1*14:01L HLA-DQA1*05:05-B1*03:19L HLA-DRB1*04:10L HLA-DPA1*02:01-B1*13:01L HLA-DPA1*01:03-B1*02:01L
  REGION 1..13: note = CONT. FROM ABOVE: HLA-DPA1*01:03-B1*104:01L HLA-DRB1*14:17L
GRTILGSALLEDE

SEQ ID NO: 14420 - protein, 13 aa, Severe acute respiratory syndrome coronavirus 2
  REGION 1..13: note = Table B: HLA-DRB1*13:02L HLA-DRB1*04:02L HLA-DRB1*08:04L HLA-DRB1*11:03L HLA-DRB3*01:01L HLA-DPA1*03:01-B1*105:01L HLA-DRB1*14:54L HLA-DQA1*01:03-B1*06:01L HLA-DRB1*08:03L
GVTFQSAVKRTIK

SEQ ID NO: 14421 - protein, 13 aa, Severe acute respiratory syndrome coronavirus 2
  REGION 1..13: note = Table B: HLA-DRB1*13:02L HLA-DRB1*04:02L HLA-DRB1*11:03L HLA-DRB3*01:01L
VTFQSAVKRTIKG

SEQ ID NO: 14422 - protein, 10 aa, Severe acute respiratory syndrome coronavirus 2
  REGION 1..10: note = Table B: HLA-DRB1*13:02L HLA-DRB1*01:03L HLA-DRB1*08:01L HLA-DQA1*03:01-B1*03:02L HLA-DRB1*16:01L HLA-DQA1*02:01-B1*03:03L
RTIKGTHHWL

SEQ ID NO: 14423 - protein, 12 aa, Severe acute respiratory syndrome coronavirus 2
  REGION 1..12: note = Table B: HLA-DRB1*13:02L HLA-DRB1*01:03L HLA-DRB1*01:02L HLA-DRB1*08:04L HLA-DRB1*14:01L HLA-DRB1*11:04L HLA-DRB1*08:01L HLA-DRB1*11:01L HLA-DRB1*12:01L HLA-DRB3*01:01L HLA-DRB1*16:01L HLA-DRB1*04:08L HLA-DRB1*15:03L
AMMFVKHKHAFL

SEQ ID NO: 14424 - protein, 10 aa, Severe acute respiratory syndrome coronavirus 2
  REGION 1..10: note = Table B: HLA-DRB1*13:02L HLA-DRB1*13:03L HLA-DRB1*04:02L HLA-DRB1*01:01L HLA-DRB4*03:01NL HLA-DRB1*08:01L HLA-DRB1*12:01L HLA-DQA1*03:01-B1*03:02L HLA-DQA1*05:05-B1*03:01L HLA-DRB1*14:17L HLA-DRB1*16:01L HLA-DQA1*01:03-B1*06:01L
  REGION 1..10: note = CONT. FROM ABOVE: HLA-DQA1*02:01-B1*03:03L
VYMPASWVMR

SEQ ID NO: 14425 - protein, 10 aa, Severe acute respiratory syndrome coronavirus 2
  REGION 1..10: note = Table B: HLA-DRB1*13:02L HLA-DRB1*13:03L HLA-DRB4*03:01NL HLA-DRB1*08:01L HLA-DRB5*01:01L HLA-DRB1*12:01L HLA-DQA1*03:01-B1*03:02L HLA-DQA1*05:05-B1*03:01L HLA-DQA1*02:01-B1*03:03L
DTSLSGFKLK

SEQ ID NO: 14426 - protein, 10 aa, Severe acute respiratory syndrome coronavirus 2
  REGION 1..10: note = Table B: HLA-DRB1*13:02L HLA-DRB1*13:03L HLA-DRB1*01:03L HLA-DRB1*08:01L HLA-DRB1*12:01L HLA-DQA1*03:01-B1*03:02L HLA-DRB1*16:01L
RTVYDDGARR

SEQ ID NO: 14427 - protein, 13 aa, Severe acute respiratory syndrome coronavirus 2
  REGION 1..13: note = Table B: HLA-DRB1*13:02L HLA-DRB1*04:04L HLA-DRB1*01:02L HLA-DPA1*01:03-B1*03:01L HLA-DPA1*03:01-B1*105:01L HLA-DPA1*01:03-B1*104:01L HLA-DRB1*07:01L HLA-DRB1*16:01L HLA-DRB1*04:08L HLA-DRB1*15:03L
GARRVWTLMNVLT

SEQ ID NO: 14428 - protein, 14 aa, Severe acute respiratory syndrome coronavirus 2
  REGION 1..14: note = Table B: HLA-DRB1*13:02L HLA-DRB1*01:03L HLA-DRB1*01:01L HLA-DQA1*05:05-B1*03:01L HLA-DRB1*04:08L
RVWTLMNVLTLVYK

SEQ ID NO: 14429 - protein, 12 aa, Severe acute respiratory syndrome coronavirus 2
  REGION 1..12: note = Table B: HLA-DRB1*13:02L HLA-DRB1*08:04L HLA-DRB1*14:54L
NVLTLVYKVYYG

SEQ ID NO: 14430 - protein, 12 aa, Severe acute respiratory syndrome coronavirus 2
  REGION 1..12: note = Table B: HLA-DRB1*13:02L HLA-DRB1*01:03L HLA-DRB1*04:02L HLA-DRB1*04:05L HLA-DPA1*01:03-B1*03:01L HLA-DPA1*01:03-B1*04:01L HLA-DRB1*09:01L HLA-DPA1*02:01-B1*13:01L
TLVYKVYYGNAL

SEQ ID NO: 14431 - protein, 12 aa, Severe acute respiratory syndrome coronavirus 2
  REGION 1..12: note = Table B: HLA-DRB1*13:02L HLA-DRB1*01:03L HLA-DRB1*04:02L HLA-DRB1*04:05L HLA-DQA1*01:02-B1*06:02L HLA-DPA1*01:03-B1*03:01L HLA-DRB1*08:01L HLA-DQA1*05:05-B1*03:19L HLA-DPA1*01:03-B1*04:01L
  REGION 1..12: note = CONT. FROM ABOVE: HLA-DPA1*02:01-B1*13:01L HLA-DQA1*05:05-B1*03: 01L HLA-DRB1*14:17L HLA-DRB1*15:01L
LVYKVYYGNALD

SEQ ID NO: 14432 - protein, 12 aa, Severe acute respiratory syndrome coronavirus 2
  REGION 1..12: note = Table B: HLA-DRB1*13:02L HLA-DRB1*04:04L HLA-DQA1*01:02-B1*06:02L HLA-DRB1*01:01L HLA-DRB3*02:01L HLA-DPA1*01:03-B1*03:01L HLA-DPA1*03:01-B1*04:02L HLA-DRB1*11:03L HLA-DRB1*14:02L HLA-DRB1*08:01L
  REGION 1..12: note = CONT. FROM ABOVE: HLA-DQA1*05:05-B1*03:19L HLA-DRB1*04:10L HLA-D PA1*02:01-B1*13:01L HLA-DQA1*05:05-B1*03:01L HLA-DRB1*07:01L HLA -DRB1*08:03L
YKVYYGNALDQA

SEQ ID NO: 14433 - protein, 12 aa, Severe acute respiratory syndrome coronavirus 2
  REGION 1..12: note = Table B: HLA-DRB1*13:02L HLA-DRB1*01:02L HLA-DRB1*08:04L HLA-DRB1*14:01L HLA-DRB1*11:03L HLA-DQA1*01-B1*05L HLA-DRB1*12:02L HLA-DQA1*05:05-B1*03:01L
ALIISVTSNYSG

SEQ ID NO: 14434 - protein, 15 aa, Severe acute respiratory syndrome coronavirus 2
  REGION 1..15: note = Table B: HLA-DRB1*13:02L HLA-DPA1*02:01-B1*13:01L HLA-DPA1*01:03-B1*104:01L
SGVVTTVMFLARGIV

SEQ ID NO: 14435 - protein, 12 aa, Severe acute respiratory syndrome coronavirus 2
  REGION 1..12: note = Table B: HLA-DRB1*13:02L HLA-DRB1*13:03L HLA-DRB1*01:03L HLA-DRB1*04:05L HLA-DRB1*01:02L HLA-DRB4*03:01NL HLA-DRB1*08:04L HLA-DRB3*02:01L HLA-DPA1*01:03-B1*03:01L HLA-DRB1*14:01L HLA-DRB1*11:03L HLA-DRB1*11:04L HLA-DRB1*08:01L
  REGION 1..12: note = CONT. FROM ABOVE: HLA-DPA1*01:03-B1*04:01L HLA-DRB1*12:02L HLA-D RB3*01:01L HLA-DPA1*02:01-B1*13:01L HLA-DPA1*03:01-B1*105:01L HL A-DRB1*14:54L HLA-DQA1*01:03-B1*06:01L HLA-DRB1*04:08L
TQEFRYMNSQGL

SEQ ID NO: 14436 - protein, 13 aa, Severe acute respiratory syndrome coronavirus 2
  REGION 1..13: note = Table B: HLA-DRB1*13:02L HLA-DRB1*01:02L HLA-DRB1*11:02L HLA-DRB1*11:03L HLA-DRB1*14:02L HLA-DQA1*05:05-B1*03:116L HLA-DPA1*01:03-B1*04:02L HLA-DRB3*01:01L HLA-DRB1*04:08L HLA-DRB1*08:02L HLA-DRB1*15:03L
DAFKLNIKLLGVG

SEQ ID NO: 14437 - protein, 14 aa, Severe acute respiratory syndrome coronavirus 2
  REGION 1..14: note = Table B: HLA-DRB1*13:02L HLA-DRB1*04:05L HLA-DPA1*01:03-B1*03:01L HLA-DRB1*08:01L HLA-DRB3*01:01L HLA-DPA1*03:01-B1*105:01L HLA-DPA1*01:02-B1*04:01L
FKLNIKLLGVGGKP

SEQ ID NO: 14438 - protein, 14 aa, Severe acute respiratory syndrome coronavirus 2
  REGION 1..14: note = Table B: HLA-DRB1*13:02L HLA-DRB1*01:02L
VGGKPCIKVATVQS

SEQ ID NO: 14439 - protein, 13 aa, Severe acute respiratory syndrome coronavirus 2
  REGION 1..13: note = Table B: HLA-DRB1*13:02L HLA-DRB1*04:05L HLA-DQA1*01:02-B1*06:02L HLA-DRB1*01:02L HLA-DPA1*01:03-B1*03:01L HLA-DRB1*12:01L HLA-DPA1*02:01-B1*13:01L HLA-DPA1*01:03-B1*104:01L
SSSKLWAQCVQLH

SEQ ID NO: 14440 - protein, 13 aa, Severe acute respiratory syndrome coronavirus 2
  REGION 1..13: note = Table B: HLA-DRB1*13:02L HLA-DRB1*12:01L HLA-DPA1*03:01-B1*105:01L HLA-DQA1*03:01-B1*03:02L HLA-DPA1*01:03-B1*104:01L HLA-DRB1*16:01L HLA-DQA1*02:01-B1*03:03L
SSKLWAQCVQLHN

SEQ ID NO: 14441 - protein, 12 aa, Severe acute respiratory syndrome coronavirus 2
  REGION 1..12: note = Table B: HLA-DRB1*13:02L HLA-DRB1*08:04L HLA-DRB1*12:02L
DILLAKDTTEAF

SEQ ID NO: 14442 - protein, 12 aa, Severe acute respiratory syndrome coronavirus 2
  REGION 1..12: note = Table B: HLA-DRB1*13:02L HLA-DRB1*04:04L HLA-DRB1*01:02L HLA-DRB1*08:04L HLA-DRB3*02:01L HLA-DPA1*01:03-B1*03:01L HLA-DRB1*03:01L HLA-DRB4*01:01L HLA-DRB3*01:01L HLA-DRB1*10:01L HLA-DRB1*04:08L
ILLAKDTTEAFE

SEQ ID NO: 14443 - protein, 14 aa, Severe acute respiratory syndrome coronavirus 2
  REGION 1..14: note = Table B: HLA-DRB1*13:02L HLA-DRB3*02:01L HLA-DPA1*03:01-B1*04:02L HLA-DRB1*14:01L
AVDINKLCEEMLDN

SEQ ID NO: 14444 - protein, 13 aa, Severe acute respiratory syndrome coronavirus 2
  REGION 1..13: note = Table B: HLA-DRB1*13:02L HLA-DPA1*03:01-B1*105:01L HLA-DPA1*01:03-B1*104:01L
DINKLCEEMLDNR

SEQ ID NO: 14445 - protein, 12 aa, Severe acute respiratory syndrome coronavirus 2
  REGION 1..12: note = Table B: HLA-DRB1*13:02L HLA-DRB4*03:01NL HLA-DRB1*14:54L
EEMLDNRATLQA

SEQ ID NO: 14446 - protein, 13 aa, Severe acute respiratory syndrome coronavirus 2
  REGION 1..13: note = Table B: HLA-DRB1*13:02L
DNRATLQAIASEF

SEQ ID NO: 14447 - protein, 13 aa, Severe acute respiratory syndrome coronavirus 2
  REGION 1..13: note = Table B: HLA-DRB1*13:02L HLA-DRB1*01:03L HLA-DRB1*04:04L HLA-DRB1*01:02L HLA-DPA1*03:01-B1*04:02L HLA-DRB1*11:03L HLA-DRB1*11:04L HLA-DRB1*09:01L HLA-DRB1*12:02L HLA-DQA1*05:05-B1*03:01L HLA-DRB1*08:03L
IASEFSSLPSYAA

SEQ ID NO: 14448 - protein, 13 aa, Severe acute respiratory syndrome coronavirus 2
  REGION 1..13: note = Table B: HLA-DRB1*13:02L HLA-DRB1*08:04L HLA-DRB1*08:77L HLA-DRB1*11:04L HLA-DRB1*11:01L HLA-DRB1*09:01L HLA-DRB1*08:03L
SEFSSLPSYAAFA

SEQ ID NO: 14449 - protein, 12 aa, Severe acute respiratory syndrome coronavirus 2
  REGION 1..12: note = Table B: HLA-DRB1*13:02L HLA-DRB1*04:02L HLA-DRB1*04:04L HLA-DRB1*04:05L HLA-DRB1*01:02L HLA-DRB4*03:01NL HLA-DRB1*08:04L HLA-DRB3*02:01L HLA-DPA1*03:01-B1*04:02L HLA-DQA1*01:01-B1*05:01L HLA-DRB1*08:01L HLA-DQA1*01-B1*05L
  REGION 1..12: note = CONT. FROM ABOVE: HLA-DRB1*04:10L HLA-DRB1*12:01L HLA-DRB1*12:02 L HLA-DRB1*14:54L HLA-DPA1*01:03-B1*104:01L HLA-DRB1*14:17L HLA- DRB1*10:01L HLA-DRB1*04:08L HLA-DRB1*08:03L
YAAFATAQEAYE

SEQ ID NO: 14450 - protein, 12 aa, Severe acute respiratory syndrome coronavirus 2
  REGION 1..12: note = Table B: HLA-DRB1*13:02L HLA-DRB1*04:04L HLA-DQA1*01:02-B1*06:02L HLA-DRB1*01:02L HLA-DRB1*08:04L HLA-DRB1*08:77L HLA-DPA1*01:03-B1*03:01L HLA-DRB1*11:03L HLA-DRB1*11:04L HLA-DQA1*01:01-B1*05:01L HLA-DRB5*01:01L
  REGION 1..12: note = CONT. FROM ABOVE: HLA-DQA1*05:05-B1*03:19L HLA-DRB1*12:02L HLA-D PA1*03:01-B1*105:01L HLA-DQA1*01:03-B1*06:01L
AYEQAVANGDSE

SEQ ID NO: 14451 - protein, 13 aa, Severe acute respiratory syndrome coronavirus 2
  REGION 1..13: note = Table B: HLA-DRB1*13:02L HLA-DRB1*01:03L HLA-DRB1*08:77L HLA-DPA1*01:03-B1*03:01L HLA-DRB1*14:02L HLA-DQA1*01:01-B1*05:01L HLA-DPA1*02:01-B1*13:01L HLA-DPA1*03:01-B1*105:01L HLA-DRB1*04:08L HLA-DRB1*15:03L
YEQAVANGDSEVV

SEQ ID NO: 14452 - protein, 14 aa, Severe acute respiratory syndrome coronavirus 2
  REGION 1..14: note = Table B: HLA-DRB1*13:02L HLA-DRB1*04:05L HLA-DRB1*11:02L HLA-DRB1*11:03L HLA-DRB1*14:54L HLA-DRB1*08:02L HLA-DRB1*08:03L HLA-DRB1*15:03L
EVVLKKLKKSLNVA

SEQ ID NO: 14453 - protein, 14 aa, Severe acute respiratory syndrome coronavirus 2
  REGION 1..14: note = Table B: HLA-DRB1*13:02L HLA-DRB1*04:04L HLA-DRB1*04:05L HLA-DRB1*11:03L HLA-DPA1*02:01-B1*13:01L HLA-DRB1*07:01L HLA-DRB1*08:03L HLA-DRB1*15:03L
VVLKKLKKSLNVAK

SEQ ID NO: 14454 - protein, 13 aa, Severe acute respiratory syndrome coronavirus 2
  REGION 1..13: note = Table B: HLA-DRB1*13:02L HLA-DPA1*01:03-B1*03:01L HLA-DPA1*01:02-B1*04:01L HLA-DRB1*07:01L HLA-DQA1*02:01-B1*03:03L HLA-DRB1*15:03L
KKLKKSLNVAKSE

SEQ ID NO: 14455 - protein, 14 aa, Severe acute respiratory syndrome coronavirus 2
  REGION 1..14: note = Table B: HLA-DRB1*13:02L HLA-DPA1*01:03-B1*104:01L HLA-DRB1*07:01L HLA-DRB1*15:03L
KLKKSLNVAKSEFD

SEQ ID NO: 14456 - protein, 15 aa, Severe acute respiratory syndrome coronavirus 2
  REGION 1..15: note = Table B: HLA-DRB1*13:02L HLA-DPA1*01:03-B1*03:01L HLA-DRB1*11:01L
KKSLNVAKSEFDRDA

SEQ ID NO: 14457 - protein, 14 aa, Severe acute respiratory syndrome coronavirus 2
  REGION 1..14: note = Table B: HLA-DRB1*13:02L HLA-DRB1*04:04L HLA-DRB1*08:04L HLA-DPA1*01:03-B1*03:01L HLA-DRB1*11:04L HLA-DQA1*05:05-B1*03:19L HLA-DRB3*01:01L HLA-DRB1*08:03L
SLNVAKSEFDRDAA

SEQ ID NO: 14458 - protein, 10 aa, Severe acute respiratory syndrome coronavirus 2
  REGION 1..10: note = Table B: HLA-DRB1*13:02L HLA-DRB1*13:03L HLA-DRB4*03:01NL HLA-DRB1*08:01L HLA-DRB5*01:01L HLA-DRB1*12:01L HLA-DQA1*03:01-B1*03:02L HLA-DQA1*05:05-B1*03:01L HLA-DRB1*14:17L
EFDRDAAMQR

SEQ ID NO: 14459 - protein, 16 aa, Severe acute respiratory syndrome coronavirus 2
  REGION 1..16: note = Table B: HLA-DRB1*13:02L HLA-DRB1*04:05L HLA-DRB1*08:04L HLA-DRB1*12:01L HLA-DRB3*01:01L HLA-DPA1*02:01-B1*13:01L HLA-DRB1*15:03L
DRDAAMQRKLEKMADQ

SEQ ID NO: 14460 - protein, 14 aa, Severe acute respiratory syndrome coronavirus 2
  REGION 1..14: note = Table B: HLA-DRB1*13:02L HLA-DQA1*01:02-B1*06:02L
MQRKLEKMADQAMT

SEQ ID NO: 14461 - protein, 12 aa, Severe acute respiratory syndrome coronavirus 2
  REGION 1..12: note = Table B: HLA-DRB1*13:02L HLA-DRB1*13:03L HLA-DRB1*01:03L HLA-DRB1*04:04L HLA-DQA1*01:02-B1*06:02L HLA-DRB1*01:02L HLA-DPA1*01:03-B1*03:01L HLA-DRB1*14:01L HLA-DPA1*02:01-B1*13:01L HLA-DPA1*01:03-B1*104:01L
  REGION 1..12: note = CONT. FROM ABOVE: HLA-DRB1*07:01L HLA-DRB1*04:08L HLA-DRB1*15:03 L
KLEKMADQAMTQ

SEQ ID NO: 14462 - protein, 14 aa, Severe acute respiratory syndrome coronavirus 2
  REGION 1..14: note = Table B: HLA-DRB1*13:02L HLA-DRB1*04:05L HLA-DRB1*08:04L HLA-DRB1*03:01L HLA-DRB1*11:04L HLA-DRB1*08:01L HLA-DRB1*13:01L HLA-DRB3*01:01L HLA-DPA1*03:01-B1*105:01L HLA-DRB1*04:08L
QAMTQMYKQARSED

SEQ ID NO: 14463 - protein, 16 aa, Severe acute respiratory syndrome coronavirus 2
  REGION 1..16: note = Table B: HLA-DRB1*13:02L HLA-DPA1*01:03-B1*104:01L
DKRAKVTSAMQTMLFT

SEQ ID NO: 14464 - protein, 14 aa, Severe acute respiratory syndrome coronavirus 2
  REGION 1..14: note = Table B: HLA-DRB1*13:02L HLA-DPA1*02:01-B1*13:01L
MQTMLFTMLRKLDN

SEQ ID NO: 14465 - protein, 14 aa, Severe acute respiratory syndrome coronavirus 2
  REGION 1..14: note = Table B: HLA-DRB1*13:02L
QTMLFTMLRKLDND

SEQ ID NO: 14466 - protein, 14 aa, Severe acute respiratory syndrome coronavirus 2
  REGION 1..14: note = Table B: HLA-DRB1*13:02L HLA-DQA1*05:05-B1*03:116L HLA-DRB3*01:01L HLA-DPA1*02:01-B1*13:01L HLA-DPA1*01:03-B1*02:01L HLA-DRB1*08:02L
TMLFTMLRKLDNDA

SEQ ID NO: 14467 - protein, 13 aa, Severe acute respiratory syndrome coronavirus 2
  REGION 1..13: note = Table B: HLA-DRB1*13:02L HLA-DRB1*13:03L HLA-DRB1*01:03L HLA-DRB1*04:05L HLA-DRB1*01:02L HLA-DPA1*03:01-B1*04:02L HLA-DRB1*14:01L HLA-DQA1*01:01-B1*05:01L HLA-DRB1*08:01L HLA-DRB1*12:01L HLA-DRB3*01:01L HLA-DPA1*02:01-B1*13:01L
  REGION 1..13: note = CONT. FROM ABOVE: HLA-DQA1*05:05-B1*03:01L HLA-DPA1*01:02-B1*04: 01L HLA-DRB1*04:08L
RKLDNDALNNIIN

SEQ ID NO: 14468 - protein, 10 aa, Severe acute respiratory syndrome coronavirus 2
  REGION 1..10: note = Table B: HLA-DRB1*13:02L HLA-DRB1*13:03L HLA-DRB1*01:01L HLA-DRB4*03:01NL HLA-DRB3*02:01L HLA-DRB1*11:04L HLA-DRB1*08:01L HLA-DRB5*01:01L HLA-DPA1*01:03-B1*04:02L HLA-DRB1*12:01L HLA-DRB1*12:02L HLA-DQA1*03:01-B1*03:02M
  REGION 1..10: note = CONT. FROM ABOVE: HLA-DQA1*05:05-B1*03:01L HLA-DRB1*14:17L HLA-D QA1*02:01-B1*03:03L
ALNNIINNAR

SEQ ID NO: 14469 - protein, 13 aa, Severe acute respiratory syndrome coronavirus 2
  REGION 1..13: note = Table B: HLA-DRB1*13:02L HLA-DRB1*01:02L HLA-DRB1*08:04L HLA-DPA1*01:03-B1*03:01L HLA-DRB3*01:01L
NNIINNARDGCVP

SEQ ID NO: 14470 - protein, 14 aa, Severe acute respiratory syndrome coronavirus 2
  REGION 1..14: note = Table B: HLA-DRB1*13:02L HLA-DRB1*01:02L HLA-DRB1*08:04L HLA-DPA1*01:03-B1*03:01L HLA-DRB1*03:01L HLA-DRB1*14:02L HLA-DQA1*05:05-B1*03:19L HLA-DRB1*12:01L HLA-DPA1*03:01-B1*105:01L HLA-DQA1*05:05-B1*03:01L
  REGION 1..14: note = CONT. FROM ABOVE: HLA-DRB1*16:01L
NIINNARDGCVPLN

SEQ ID NO: 14471 - protein, 15 aa, Severe acute respiratory syndrome coronavirus 2
  REGION 1..15: note = Table B: HLA-DRB1*13:02L HLA-DRB1*04:05L HLA-DRB1*01:02L HLA-DRB1*12:01L
NNARDGCVPLNIIPL

SEQ ID NO: 14472 - protein, 11 aa, Severe acute respiratory syndrome coronavirus 2
  REGION 1..11: note = Table B: HLA-DRB1*13:02L
IIPLTTAAKLM

SEQ ID NO: 14473 - protein, 15 aa, Severe acute respiratory syndrome coronavirus 2
  REGION 1..15: note = Table B: HLA-DRB1*13:02L HLA-DRB1*01:03L HLA-DRB1*04:02L HLA-DRB1*04:05L HLA-DRB1*01:02L HLA-DRB1*08:04L HLA-DRB3*02:01L HLA-DPA1*01:03-B1*03:01L HLA-DPA1*03:01-B1*04:02L HLA-DRB1*14:02L HLA-DRB1*08:01L HLA-DPA1*01:03-B1*04:02L
  REGION 1..15: note = CONT. FROM ABOVE: HLA-DRB1*12:01L HLA-DPA1*02:01-B1*13:01L HLA-D RB1*14:54L HLA-DPA1*01:03-B1*104:01L HLA-DRB1*14:17L HLA-DPA1*01 :02-B1*04:01L HLA-DRB1*16:01L HLA-DRB1*04:08L HLA-DRB1*15:03L
IPLTTAAKLMVVIPD

SEQ ID NO: 14474 - protein, 14 aa, Severe acute respiratory syndrome coronavirus 2
  REGION 1..14: note = Table B: HLA-DRB1*13:02L HLA-DRB1*01:03L HLA-DRB1*04:02L HLA-DRB3*02:01L HLA-DRB1*04:10L HLA-DPA1*01:03-B1*04:02L HLA-DPA1*01:02-B1*04:01L HLA-DRB1*04:08L
TTAAKLMVVIPDYN

SEQ ID NO: 14475 - protein, 15 aa, Severe acute respiratory syndrome coronavirus 2
  REGION 1..15: note = Table B: HLA-DRB1*13:02L HLA-DRB3*02:01L HLA-DPA1*01:03-B1*03:01L HLA-DPA1*03:01-B1*04:02L HLA-DRB1*14:02L HLA-DQA1*01:01-B1*05:01L HLA-DQA1*05:05-B1*03:19L HLA-DPA1*01:03-B1*04:02L
  REGION 1..15: note = CONT. FROM ABOVE: HLA-DRB3*01:01L HLA-DPA1*01:03-B1*104:01L HLA- DQA1*05:05-B1*03:01L HLA-DPA1*01:02-B1*04:01L
IPDYNTYKNTCDGTT

SEQ ID NO: 14476 - protein, 16 aa, Severe acute respiratory syndrome coronavirus 2
  REGION 1..16: note = Table B: HLA-DRB1*13:02L HLA-DPA1*03:01-B1*04:02L
SPNLAWPLIVTALRAN

SEQ ID NO: 14477 - protein, 10 aa, Severe acute respiratory syndrome coronavirus 2
  REGION 1..10: note = Table B: HLA-DRB1*13:02L HLA-DRB1*14:01L HLA-DRB1*12:01L HLA-DRB1*16:01L HLA-DRB1*15:03L
LRANSAVKLQ

SEQ ID NO: 14478 - protein, 14 aa, Severe acute respiratory syndrome coronavirus 2
  REGION 1..14: note = Table B: HLA-DRB1*13:02L HLA-DRB3*02:01L HLA-DPA1*01:03-B1*03:01L HLA-DQA1*01:01-B1*05:01L HLA-DRB1*08:01L HLA-DRB1*12:02L HLA-DPA1*02:01-B1*13:01L HLA-DPA1*01:03-B1*104:01L
ANSAVKLQNNELSP

SEQ ID NO: 14479 - protein, 13 aa, Severe acute respiratory syndrome coronavirus 2
  REGION 1..13: note = Table B: HLA-DRB1*13:02L HLA-DRB1*08:04L HLA-DPA1*01:03-B1*03:01L HLA-DPA1*03:01-B1*04:02L HLA-DRB1*11:03L HLA-DQA1*01:01-B1*05:01L HLA-DQA1*05:05-B1*03:19L HLA-DPA1*02:01-B1*13:01L
  REGION 1..13: note = CONT. FROM ABOVE: HLA-DRB1*10:01L
DDNALAYYNTTKG

SEQ ID NO: 14480 - protein, 10 aa, Severe acute respiratory syndrome coronavirus 2
  REGION 1..10: note = Table B: HLA-DRB1*13:02L HLA-DRB1*13:03L HLA-DRB1*01:03L HLA-DRB1*04:02L HLA-DRB1*01:01L HLA-DRB4*03:01NL HLA-DRB1*11:04L HLA-DRB1*08:01L HLA-DRB5*01:01L HLA-DRB1*12:01L HLA-DQA1*03:01-B1*03:02M HLA-DQA1*05:05-B1*03:01L
  REGION 1..10: note = CONT. FROM ABOVE: HLA-DRB1*14:17L HLA-DRB1*16:01L HLA-DQA1*02:01 -B1*03:03L
AYYNTTKGGR

SEQ ID NO: 14481 - protein, 13 aa, Severe acute respiratory syndrome coronavirus 2
  REGION 1..13: note = Table B: HLA-DRB1*13:02L HLA-DRB1*04:05L HLA-DRB1*01:02L
KGGRFVLALLSDL

SEQ ID NO: 14482 - protein, 14 aa, Severe acute respiratory syndrome coronavirus 2
  REGION 1..14: note = Table B: HLA-DRB1*13:02L HLA-DRB1*04:05L HLA-DRB1*11:04L HLA-DRB1*11:01L HLA-DRB3*01:01L HLA-DQA1*03:01-B1*03:02L HLA-DPA1*01:03-B1*02:01L
LSDLQDLKWARFPK

SEQ ID NO: 14483 - protein, 17 aa, Severe acute respiratory syndrome coronavirus 2
  REGION 1..17: note = Table B: HLA-DRB1*13:02L HLA-DPA1*01:03-B1*04:02L
TPKGPKVKYLYFIKGLN

SEQ ID NO: 14484 - protein, 14 aa, Severe acute respiratory syndrome coronavirus 2
  REGION 1..14: note = Table B: HLA-DRB1*13:02L HLA-DRB1*04:05L HLA-DRB1*01:02L HLA-DRB1*11:03L HLA-DRB1*12:01L HLA-DRB3*01:01L HLA-DRB1*16:01L HLA-DRB1*04:08L HLA-DRB1*15:03L
IKGLNNLNRGMVLG

SEQ ID NO: 14485 - protein, 11 aa, Severe acute respiratory syndrome coronavirus 2
  REGION 1..11: note = Table B: HLA-DRB1*13:02L HLA-DRB1*04:05L HLA-DRB1*01:01L HLA-DRB3*02:01L HLA-DPA1*01:03-B1*03:01L HLA-DRB1*14:01L HLA-DRB1*12:02L
MVLGSLAATVR

SEQ ID NO: 14486 - protein, 14 aa, Severe acute respiratory syndrome coronavirus 2
  REGION 1..14: note = Table B: HLA-DRB1*13:02L HLA-DRB1*01:03L HLA-DRB1*04:05L HLA-DQA1*01:02-B1*06:02L HLA-DRB4*03:01NL HLA-DPA1*01:03-B1*03:01L HLA-DQA1*05:01-B1*02:01L HLA-DRB1*12:01L HLA-DPA1*03:01-B1*105:01L HLA-DRB1*16:01L
  REGION 1..14: note = CONT. FROM ABOVE: HLA-DRB1*04:08L
TVRLQAGNATEVPA

SEQ ID NO: 14487 - protein, 14 aa, Severe acute respiratory syndrome coronavirus 2
  REGION 1..14: note = Table B: HLA-DRB1*13:02L HLA-DRB1*13:03L HLA-DRB1*01:03L HLA-DRB1*04:05L HLA-DRB1*01:02L HLA-DRB4*03:01NL HLA-DRB1*08:04L HLA-DRB1*08:77L HLA-DPA1*01:03-B1*03:01L HLA-DRB1*14:02L HLA-DRB1*08:01L HLA-DRB1*11:01L HLA-DPA1*01:03-B1*04:02L
  REGION 1..14: note = CONT. FROM ABOVE: HLA-DRB1*12:01L HLA-DRB1*12:02L HLA-DPA1*02:01 -B1*13:01L HLA-DPA1*03:01-B1*105:01L HLA-DPA1*01:03-B1*104:01L H LA-DRB1*07:01L HLA-DRB1*16:01L HLA-DRB1*15:03L
VRLQAGNATEVPAN

SEQ ID NO: 14488 - protein, 13 aa, Severe acute respiratory syndrome coronavirus 2
  REGION 1..13: note = Table B: HLA-DRB1*13:02L HLA-DRB1*13:03L HLA-DQA1*01:02-B1*06:02L HLA-DPA1*01:03-B1*03:01L HLA-DPA1*03:01-B1*04:02L HLA-DPA1*03:01-B1*105:01L HLA-DRB1*04:08L HLA-DRB1*15:01L
DAAKAYKDYLASG

SEQ ID NO: 14489 - protein, 14 aa, Severe acute respiratory syndrome coronavirus 2
  REGION 1..14: note = Table B: HLA-DRB1*13:02L HLA-DPA1*01:03-B1*03:01L HLA-DPA1*01:03-B1*104:01L
AAKAYKDYLASGGQ

SEQ ID NO: 14490 - protein, 15 aa, Severe acute respiratory syndrome coronavirus 2
  REGION 1..15: note = Table B: HLA-DRB1*13:02L HLA-DRB1*11:02L HLA-DRB1*11:03L HLA-DRB1*15:03L
GQPITNCVKMLCTHT

SEQ ID NO: 14491 - protein, 12 aa, Severe acute respiratory syndrome coronavirus 2
  REGION 1..12: note = Table B: HLA-DRB1*13:02L HLA-DRB1*04:02L HLA-DRB4*03:01NL HLA-DRB1*08:77L HLA-DRB3*02:01L HLA-DRB1*14:01L HLA-DRB1*04:10L HLA-DRB1*12:01L HLA-DRB1*12:02L HLA-DRB1*14:54L HLA-DRB1*14:17L HLA-DRB1*07:01L HLA-DRB1*16:01L HLA-DRB1*15:03L
GQAITVTPEANM

SEQ ID NO: 14492 - protein, 13 aa, Severe acute respiratory syndrome coronavirus 2
  REGION 1..13: note = Table B: HLA-DRB1*13:02L HLA-DRB1*01:02L HLA-DRB1*15:03L
QAITVTPEANMDQ

SEQ ID NO: 14493 - protein, 16 aa, Severe acute respiratory syndrome coronavirus 2
  REGION 1..16: note = Table B: HLA-DRB1*13:02L HLA-DRB1*01:03L HLA-DRB1*04:05L HLA-DQA1*01:02-B1*06:02L HLA-DRB1*03:01L HLA-DRB1*11:04L HLA-DRB1*08:01L HLA-DRB1*11:01L HLA-DRB3*01:01L HLA-DPA1*02:01-B1*13:01L HLA-DQA1*03:01-B1*03:02L
  REGION 1..16: note = CONT. FROM ABOVE: HLA-DQA1*01:03-B1*06:01L HLA-DRB1*04:08L HLA-D QA1*02:01-B1*03:03L
HPNPKGFCDLKGKYVQ

SEQ ID NO: 14494 - protein, 13 aa, Severe acute respiratory syndrome coronavirus 2
  REGION 1..13: note = Table B: HLA-DRB1*13:02L HLA-DRB1*01:01L HLA-DPA1*01:03-B1*03:01L HLA-DRB1*14:01L HLA-DRB1*11:03L HLA-DRB1*14:02L HLA-DQA1*01-B1*05L HLA-DRB3*01:01L HLA-DPA1*02:01-B1*13:01L HLA-DPA1*03:01-B1*105:01L
  REGION 1..13: note = CONT. FROM ABOVE: HLA-DPA1*01:02-B1*04:01L
KGKYVQIPTTCAN

SEQ ID NO: 14495 - protein, 14 aa, Severe acute respiratory syndrome coronavirus 2
  REGION 1..14: note = Table B: HLA-DRB1*13:02L HLA-DRB1*13:03L HLA-DRB1*01:02L HLA-DRB1*08:04L HLA-DRB1*14:01L HLA-DRB1*08:01L HLA-DPA1*01:03-B1*104:01L HLA-DRB1*15:03L
YVQIPTTCANDPVG

SEQ ID NO: 14496 - protein, 10 aa, Severe acute respiratory syndrome coronavirus 2
  REGION 1..10: note = Table B: HLA-DRB1*13:02L HLA-DRB1*13:03L HLA-DRB4*03:01NL HLA-DRB1*12:01L HLA-DQA1*03:01-B1*03:02L HLA-DQA1*05:05-B1*03:01L
ANDPVGFTLK

SEQ ID NO: 14497 - protein, 16 aa, Severe acute respiratory syndrome coronavirus 2
  REGION 1..16: note = Table B: HLA-DRB1*13:02L HLA-DRB1*01:03L HLA-DRB1*01:02L HLA-DPA1*01:03-B1*03:01L HLA-DRB1*11:02L HLA-DRB1*11:04L HLA-DRB1*14:02L HLA-DRB1*11:01L HLA-DPA1*01:03-B1*04:02L HLA-DRB1*12:01L HLA-DPA1*01:03-B1*104:01L
  REGION 1..16: note = CONT. FROM ABOVE: HLA-DQA1*05:05-B1*03:01L HLA-DRB1*04:08L HLA-D RB1*08:02L
DPVGFTLKNTVCTVCG

SEQ ID NO: 14498 - protein, 16 aa, Severe acute respiratory syndrome coronavirus 2
  REGION 1..16: note = Table B: HLA-DRB1*13:02L HLA-DRB1*04:05L HLA-DRB1*01:01L HLA-DPA1*01:03-B1*03:01L HLA-DRB1*11:04L HLA-DRB1*08:01L HLA-DRB1*11:01L HLA-DPA1*02:01-B1*13:01L
DAQSFLNRVCGVSAAR

SEQ ID NO: 14499 - protein, 12 aa, Severe acute respiratory syndrome coronavirus 2
  REGION 1..12: note = Table B: HLA-DRB1*13:02L HLA-DRB1*04:04L HLA-DRB3*02:01L HLA-DRB1*14:01L HLA-DRB1*11:04L HLA-DQA1*01:01-B1*05:01L HLA-DRB1*08:01L HLA-DRB3*01:01L HLA-DRB1*10:01L HLA-DRB1*08:03L HLA-DRB1*15:01L
RAFDIYNDKVAG

SEQ ID NO: 14500 - protein, 10 aa, Severe acute respiratory syndrome coronavirus 2
  REGION 1..10: note = Table B: HLA-DRB1*13:02L HLA-DQA1*03:01-B1*03:02L
KVAGFAKFLK

SEQ ID NO: 14501 - protein, 16 aa, Severe acute respiratory syndrome coronavirus 2
  REGION 1..16: note = Table B: HLA-DRB1*13:02L
VAGFAKFLKTNCCRFQ

SEQ ID NO: 14502 - protein, 10 aa, Severe acute respiratory syndrome coronavirus 2
  REGION 1..10: note = Table B: HLA-DRB1*13:02L HLA-DRB1*13:03L HLA-DRB1*04:02L HLA-DRB4*03:01NL HLA-DRB1*14:01L HLA-DRB1*08:01L HLA-DRB1*12:01L HLA-DPA1*03:01-B1*105:01L HLA-DQA1*03:01-B1*03:02L HLA-DQA1*05:05-B1*03:01L HLA-DQA1*02:01-B1*03:03L
NLIDSYFVVK

SEQ ID NO: 14503 - protein, 12 aa, Severe acute respiratory syndrome coronavirus 2
  REGION 1..12: note = Table B: HLA-DRB1*13:02L HLA-DRB1*04:02L HLA-DRB1*08:04L HLA-DRB3*02:01L HLA-DRB1*11:03L HLA-DRB1*11:04L HLA-DRB3*01:01L HLA-DPA1*03:01-B1*105:01L HLA-DRB1*14:54L HLA-DRB1*08:03L
IDSYFVVKRHTF

SEQ ID NO: 14504 - protein, 12 aa, Severe acute respiratory syndrome coronavirus 2
  REGION 1..12: note = Table B: HLA-DRB1*13:02L HLA-DRB1*13:03L HLA-DRB1*04:02L HLA-DRB1*08:04L HLA-DRB1*11:03L HLA-DRB1*11:04L HLA-DRB3*01:01L HLA-DRB1*14:54L HLA-DRB1*08:03L
DSYFVVKRHTFS

SEQ ID NO: 14505 - protein, 12 aa, Severe acute respiratory syndrome coronavirus 2
  REGION 1..12: note = Table B: HLA-DRB1*13:02L HLA-DRB1*13:03L HLA-DRB1*08:04L HLA-DRB1*14:01L HLA-DRB1*11:04L HLA-DRB3*01:01L HLA-DRB1*04:08L HLA-DRB1*08:03L
SYFVVKRHTFSN

SEQ ID NO: 14506 - protein, 12 aa, Severe acute respiratory syndrome coronavirus 2
  REGION 1..12: note = Table B: HLA-DRB1*13:02L HLA-DRB1*01:02L HLA-DRB1*08:04L HLA-DRB1*14:01L HLA-DRB1*08:01L HLA-DRB1*12:01L HLA-DPA1*01:02-B1*04:01L HLA-DRB1*16:01L HLA-DRB1*04:08L HLA-DRB1*15:03L
FVVKRHTFSNYQ

SEQ ID NO: 14507 - protein, 14 aa, Severe acute respiratory syndrome coronavirus 2
  REGION 1..14: note = Table B: HLA-DRB1*13:02L
VVKRHTFSNYQHEE

SEQ ID NO: 14508 - protein, 14 aa, Severe acute respiratory syndrome coronavirus 2
  REGION 1..14: note = Table B: HLA-DRB1*13:02L
VKRHTFSNYQHEET

SEQ ID NO: 14509 - protein, 12 aa, Severe acute respiratory syndrome coronavirus 2
  REGION 1..12: note = Table B: HLA-DRB1*13:02L HLA-DRB1*04:04L HLA-DRB1*01:02L HLA-DRB1*08:04L HLA-DRB3*02:01L HLA-DPA1*03:01-B1*04:02L HLA-DRB1*14:01L HLA-DRB1*08:01L HLA-DRB1*09:01L HLA-DRB1*12:02L HLA-DQA1*05:05-B1*03:01L HLA-DRB1*08:03L
FSNYQHEETIYN

SEQ ID NO: 14510 - protein, 14 aa, Severe acute respiratory syndrome coronavirus 2
  REGION 1..14: note = Table B: HLA-DRB1*13:02L HLA-DPA1*01:03-B1*03:01L
LLKDCPAVAKHDFF

SEQ ID NO: 14511 - protein, 10 aa, Severe acute respiratory syndrome coronavirus 2
  REGION 1..10: note = Table B: HLA-DRB1*13:02L HLA-DRB1*13:03L HLA-DRB1*01:03L HLA-DRB1*01:01L HLA-DRB4*03:01NL HLA-DRB1*14:01L HLA-DRB1*11:04L HLA-DRB1*08:01L HLA-DRB5*01:01L HLA-DRB1*12:01L HLA-DQA1*03:01-B1*03:02M HLA-DQA1*05:05-B1*03:01L
  REGION 1..10: note = CONT. FROM ABOVE: HLA-DRB1*14:17L HLA-DRB1*16:01L HLA-DQA1*01:03 -B1*06:01L HLA-DQA1*02:01-B1*03:03L
DMVPHISRQR

SEQ ID NO: 14512 - protein, 16 aa, Severe acute respiratory syndrome coronavirus 2
  REGION 1..16: note = Table B: HLA-DRB1*13:02L HLA-DQA1*01:02-B1*06:02L HLA-DRB1*14:01L HLA-DRB1*12:01L HLA-DRB3*01:01L HLA-DRB1*04:08L HLA-DRB1*15:03L
VPHISRQRLTKYTMAD

SEQ ID NO: 14513 - protein, 15 aa, Severe acute respiratory syndrome coronavirus 2
  REGION 1..15: note = Table B: HLA-DRB1*13:02L HLA-DPA1*01:03-B1*03:01L HLA-DRB1*15:03L
ISRQRLTKYTMADLV

SEQ ID NO: 14514 - protein, 16 aa, Severe acute respiratory syndrome coronavirus 2
  REGION 1..16: note = Table B: HLA-DRB1*13:02L HLA-DPA1*01:03-B1*104:01L
SRQRLTKYTMADLVYA

SEQ ID NO: 14515 - protein, 10 aa, Severe acute respiratory syndrome coronavirus 2
  REGION 1..10: note = Table B: HLA-DRB1*13:02L HLA-DRB1*13:03L HLA-DRB4*03:01NL HLA-DRB1*08:01L HLA-DRB1*12:01L HLA-DQA1*03:01-B1*03:02L HLA-DQA1*05:05-B1*03:01L HLA-DQA1*01:03-B1*06:01L HLA-DQA1*02:01-B1*03:03L
TMADLVYALR

SEQ ID NO: 14516 - protein, 13 aa, Severe acute respiratory syndrome coronavirus 2
  REGION 1..13: note = Table B: HLA-DRB1*13:02L HLA-DRB1*01:03L HLA-DRB1*01:02L HLA-DRB1*11:03L HLA-DQA1*05:05-B1*03:116L HLA-DRB1*12:01L HLA-DRB3*01:01L HLA-DQA1*03:01-B1*03:02L HLA-DRB1*14:54L HLA-DPA1*01:02-B1*04:01L
ADLVYALRHFDEG

SEQ ID NO: 14517 - protein, 15 aa, Severe acute respiratory syndrome coronavirus 2
  REGION 1..15: note = Table B: HLA-DRB1*13:02L HLA-DPA1*01:03-B1*03:01L
YALRHFDEGNCDTLK

SEQ ID NO: 14518 - protein, 15 aa, Severe acute respiratory syndrome coronavirus 2
  REGION 1..15: note = Table B: HLA-DRB1*13:02L HLA-DRB1*04:02L HLA-DPA1*01:03-B1*04:01L HLA-DRB3*01:01L HLA-DQA1*05:05-B1*03:01L
DDDYFNKKDWYDFVE

SEQ ID NO: 14519 - protein, 14 aa, Severe acute respiratory syndrome coronavirus 2
  REGION 1..14: note = Table B: HLA-DRB1*13:02L HLA-DRB1*13:03L HLA-DRB1*01:03L HLA-DRB1*04:02L HLA-DRB1*01:02L HLA-DPA1*01:03-B1*03:01L HLA-DPA1*03:01-B1*04:02L HLA-DRB1*08:01L HLA-DRB1*12:01L
FNKKDWYDFVENPD

SEQ ID NO: 14520 - protein, 14 aa, Severe acute respiratory syndrome coronavirus 2
  REGION 1..14: note = Table B: HLA-DRB1*13:02L HLA-DRB1*13:03L HLA-DRB1*08:04L HLA-DRB1*14:01L HLA-DRB1*11:04L HLA-DPA1*02:01-B1*13:01L HLA-DPA1*01:03-B1*104:01L HLA-DRB1*08:03L
NAGIVGVLTLDNQD

SEQ ID NO: 14521 - protein, 16 aa, Severe acute respiratory syndrome coronavirus 2
  REGION 1..16: note = Table B: HLA-DRB1*13:02L HLA-DRB3*02:01L HLA-DRB1*14:02L HLA-DPA1*01:03-B1*04:01L HLA-DPA1*01:03-B1*104:01L
VPVVDSYYSLLMPILT

SEQ ID NO: 14522 - protein, 10 aa, Severe acute respiratory syndrome coronavirus 2
  REGION 1..10: note = Table B: HLA-DRB1*13:02L HLA-DRB1*12:01L HLA-DQA1*03:01-B1*03:02L HLA-DQA1*05:05-B1*03:01L
LLMPILTLTR

SEQ ID NO: 14523 - protein, 14 aa, Severe acute respiratory syndrome coronavirus 2
  REGION 1..14: note = Table B: HLA-DRB1*13:02L HLA-DPA1*01:03-B1*03:01L HLA-DRB1*15:03L
LTRALTAESHVDTD

SEQ ID NO: 14524 - protein, 15 aa, Severe acute respiratory syndrome coronavirus 2
  REGION 1..15: note = Table B: HLA-DRB1*13:02L HLA-DPA1*01:03-B1*03:01L
DLTKPYIKWDLLKYD

SEQ ID NO: 14525 - protein, 14 aa, Severe acute respiratory syndrome coronavirus 2
  REGION 1..14: note = Table B: HLA-DRB1*13:02L HLA-DRB1*08:04L HLA-DPA1*01:03-B1*03:01L HLA-DRB1*14:01L HLA-DPA1*01:03-B1*04:02L HLA-DRB3*01:01L HLA-DPA1*01:03-B1*02:01L
KPYIKWDLLKYDFT

SEQ ID NO: 14526 - protein, 14 aa, Severe acute respiratory syndrome coronavirus 2
  REGION 1..14: note = Table B: HLA-DRB1*13:02L HLA-DRB1*01:02L HLA-DRB1*12:01L HLA-DRB3*01:01L HLA-DRB1*04:08L HLA-DRB1*15:03L
ERLKLFDRYFKYWD

SEQ ID NO: 14527 - protein, 14 aa, Severe acute respiratory syndrome coronavirus 2
  REGION 1..14: note = Table B: HLA-DRB1*13:02L HLA-DRB1*01:02L HLA-DRB1*14:01L HLA-DRB1*12:01L HLA-DRB3*01:01L HLA-DPA1*01:02-B1*04:01L
RLKLFDRYFKYWDQ

SEQ ID NO: 14528 - protein, 14 aa, Severe acute respiratory syndrome coronavirus 2
  REGION 1..14: note = Table B: HLA-DRB1*13:02L HLA-DRB1*04:05L HLA-DRB1*01:02L HLA-DRB1*08:04L HLA-DPA1*03:01-B1*04:02L HLA-DRB1*11:01L HLA-DRB1*12:01L HLA-DRB3*01:01L HLA-DPA1*03:01-B1*105:01L HLA-DPA1*01:02-B1*04:01L HLA-DRB1*08:03L
LKLFDRYFKYWDQT

SEQ ID NO: 14529 - protein, 15 aa, Severe acute respiratory syndrome coronavirus 2
  REGION 1..15: note = Table B: HLA-DRB1*13:02L
LFDRYFKYWDQTYHP

SEQ ID NO: 14530 - protein, 13 aa, Severe acute respiratory syndrome coronavirus 2
  REGION 1..13: note = Table B: HLA-DRB1*13:02L HLA-DRB1*11:01L HLA-DRB3*01:01L HLA-DRB1*08:03L
RYFKYWDQTYHPN

SEQ ID NO: 14531 - protein, 14 aa, Severe acute respiratory syndrome coronavirus 2
  REGION 1..14: note = Table B: HLA-DRB1*13:02L HLA-DRB1*01:02L HLA-DRB1*08:04L HLA-DPA1*03:01-B1*04:02L HLA-DRB1*14:01L HLA-DRB1*14:02L HLA-DRB1*11:01L HLA-DQA1*05:05-B1*03:19L HLA-DPA1*01:03-B1*04:02L HLA-DRB1*12:01L
  REGION 1..14: note = CONT. FROM ABOVE: HLA-DPA1*02:01-B1*13:01L HLA-DRB1*15:03L
FKYWDQTYHPNCVN

SEQ ID NO: 14532 - protein, 16 aa, Severe acute respiratory syndrome coronavirus 2
  REGION 1..16: note = Table B: HLA-DRB1*13:02L HLA-DRB1*01:03L HLA-DRB1*04:04L HLA-DRB1*01:01L HLA-DRB3*02:01L HLA-DRB1*14:02L HLA-DRB1*08:01L HLA-DPA1*01:03-B1*04:01L HLA-DPA1*01:03-B1*02:01L HLA-DRB1*10:01L
NVLFSTVFPPTSFGPL

SEQ ID NO: 14533 - protein, 11 aa, Severe acute respiratory syndrome coronavirus 2
  REGION 1..11: note = Table B: HLA-DRB1*13:02L HLA-DRB1*13:03L HLA-DRB1*01:03L HLA-DRB1*04:02L HLA-DPA1*01:03-B1*03:01L HLA-DRB1*12:01L HLA-DRB1*14:17L
IFVDGVPFVVS

SEQ ID NO: 14534 - protein, 10 aa, Severe acute respiratory syndrome coronavirus 2
  REGION 1..10: note = Table B: HLA-DRB1*13:02L HLA-DRB1*01:02L HLA-DRB1*12:01L HLA-DRB1*16:01L
FVVSTGYHFR

SEQ ID NO: 14535 - protein, 14 aa, Severe acute respiratory syndrome coronavirus 2
  REGION 1..14: note = Table B: HLA-DRB1*13:02L HLA-DRB1*13:03L HLA-DRB1*14:02L HLA-DPA1*01:03-B1*04:02L HLA-DRB3*01:01L HLA-DPA1*01:03-B1*02:01L HLA-DQA1*05:05-B1*03:01L HLA-DRB1*07:01L
GYHFRELGVVHNQD

SEQ ID NO: 14536 - protein, 12 aa, Severe acute respiratory syndrome coronavirus 2
  REGION 1..12: note = Table B: HLA-DRB1*13:02L HLA-DRB1*01:02L HLA-DRB1*08:01L HLA-DPA1*02:01-B1*13:01L HLA-DRB1*04:08L HLA-DRB1*15:03L
RELGVVHNQDVN

SEQ ID NO: 14537 - protein, 11 aa, Severe acute respiratory syndrome coronavirus 2
  REGION 1..11: note = Table B: HLA-DRB1*13:02L HLA-DRB1*04:10L HLA-DRB1*04:08L
GVVHNQDVNLH

SEQ ID NO: 14538 - protein, 15 aa, Severe acute respiratory syndrome coronavirus 2
  REGION 1..15: note = Table B: HLA-DRB1*13:02L HLA-DRB1*01:01L HLA-DRB1*11:01L HLA-DRB1*07:01L
NQDVNLHSSRLSFKE

SEQ ID NO: 14539 - protein, 13 aa, Severe acute respiratory syndrome coronavirus 2
  REGION 1..13: note = Table B: HLA-DRB1*13:02L HLA-DRB1*01:03L HLA-DRB1*01:02L HLA-DRB1*08:04L HLA-DRB1*11:04L HLA-DRB1*12:01L HLA-DRB1*04:08L HLA-DRB1*15:03L
SGNLLLDKRTTCF

SEQ ID NO: 14540 - protein, 12 aa, Severe acute respiratory syndrome coronavirus 2
  REGION 1..12: note = Table B: HLA-DRB1*13:02L HLA-DRB1*01:02L HLA-DRB1*03:01L HLA-DRB1*14:01L HLA-DRB3*01:01L HLA-DRB1*16:01L HLA-DRB1*15:03L
NLLLDKRTTCFS

SEQ ID NO: 14541 - protein, 12 aa, Severe acute respiratory syndrome coronavirus 2
  REGION 1..12: note = Table B: HLA-DRB1*13:02L HLA-DPA1*01:03-B1*03:01L HLA-DRB1*09:01L
SVAALTNNVAFQ

SEQ ID NO: 14542 - protein, 12 aa, Severe acute respiratory syndrome coronavirus 2
  REGION 1..12: note = Table B: HLA-DRB1*13:02L
VAALTNNVAFQT

SEQ ID NO: 14543 - protein, 14 aa, Severe acute respiratory syndrome coronavirus 2
  REGION 1..14: note = Table B: HLA-DRB1*13:02L HLA-DRB1*12:02L
ALTNNVAFQTVKPG

SEQ ID NO: 14544 - protein, 10 aa, Severe acute respiratory syndrome coronavirus 2
  REGION 1..10: note = Table B: HLA-DRB1*13:02L HLA-DRB1*13:03L HLA-DRB1*01:01L HLA-DRB4*03:01NL HLA-DRB1*14:01L HLA-DRB1*11:04L HLA-DRB1*08:01L HLA-DRB5*01:01L HLA-DRB1*12:01L HLA-DQA1*03:01-B1*03:02M HLA-DQA1*05:05-B1*03:01L HLA-DRB1*14:17L HLA-DRB1*15:01L
QTVKPGNFNK

SEQ ID NO: 14545 - protein, 14 aa, Severe acute respiratory syndrome coronavirus 2
  REGION 1..14: note = Table B: HLA-DRB1*13:02L HLA-DPA1*01:03-B1*03:01L HLA-DPA1*01:03-B1*04:02L HLA-DPA1*01:03-B1*104:01L
NFNKDFYDFAVSKG

SEQ ID NO: 14546 - protein, 12 aa, Severe acute respiratory syndrome coronavirus 2
  REGION 1..12: note = Table B: HLA-DRB1*13:02L HLA-DRB1*08:04L HLA-DRB3*02:01L HLA-DRB1*08:01L HLA-DRB1*09:01L HLA-DRB1*07:01L HLA-DRB1*04:08L
KDFYDFAVSKGF

SEQ ID NO: 14547 - protein, 13 aa, Severe acute respiratory syndrome coronavirus 2
  REGION 1..13: note = Table B: HLA-DRB1*13:02L HLA-DRB1*08:01L HLA-DRB1*07:01L
DFYDFAVSKGFFK

SEQ ID NO: 14548 - protein, 14 aa, Severe acute respiratory syndrome coronavirus 2
  REGION 1..14: note = Table B: HLA-DRB1*13:02L HLA-DRB1*08:04L HLA-DRB1*11:04L HLA-DQA1*01:01-B1*05:01L HLA-DRB1*08:03L
SKGFFKEGSSVELK

SEQ ID NO: 14549 - protein, 16 aa, Severe acute respiratory syndrome coronavirus 2
  REGION 1..16: note = Table B: HLA-DRB1*13:02L HLA-DRB1*04:05L HLA-DRB3*01:01L HLA-DPA1*02:01-B1*13:01L
EGSSVELKHFFFAQDG

SEQ ID NO: 14550 - protein, 16 aa, Severe acute respiratory syndrome coronavirus 2
  REGION 1..16: note = Table B: HLA-DRB1*13:02L HLA-DPA1*01:03-B1*03:01L HLA-DPA1*01:03-B1*04:01L HLA-DRB3*01:01L HLA-DPA1*01:03-B1*02:01L HLA-DPA1*01:03-B1*104:01L
GSSVELKHFFFAQDGN

SEQ ID NO: 14551 - protein, 11 aa, Severe acute respiratory syndrome coronavirus 2
  REGION 1..11: note = Table B: HLA-DRB1*13:02L HLA-DRB1*13:03L HLA-DRB1*01:03L HLA-DRB1*04:02L HLA-DRB4*03:01NL HLA-DRB1*08:77L HLA-DRB1*14:01L HLA-DRB1*11:03L HLA-DRB1*14:02L HLA-DQA1*05:01-B1*02:01L HLA-DRB1*12:01L HLA-DRB1*14:54L HLA-DRB1*10:01L HLA-DRB1*16:01L
  REGION 1..11: note = CONT. FROM ABOVE: HLA-DRB1*04:08L
FFAQDGNAAIS

SEQ ID NO: 14552 - protein, 11 aa, Severe acute respiratory syndrome coronavirus 2
  REGION 1..11: note = Table B: HLA-DRB1*13:02L HLA-DRB1*13:03L HLA-DRB1*01:03L HLA-DRB1*04:02L HLA-DRB4*03:01NL HLA-DRB1*14:01L HLA-DQA1*05:01-B1*02:01L HLA-DRB1*12:01L HLA-DRB1*14:54L HLA-DRB1*16:01L
FAQDGNAAISD

SEQ ID NO: 14553 - protein, 11 aa, Severe acute respiratory syndrome coronavirus 2
  REGION 1..11: note = Table B: HLA-DRB1*13:02L HLA-DRB1*13:03L HLA-DRB1*01:03L HLA-DRB1*04:05L HLA-DRB1*01:02L HLA-DRB1*08:04L HLA-DRB1*14:54L HLA-DRB1*04:08L
FVVEVVDKYFD

SEQ ID NO: 14554 - protein, 15 aa, Severe acute respiratory syndrome coronavirus 2
  REGION 1..15: note = Table B: HLA-DRB1*13:02L HLA-DRB1*01:03L HLA-DRB1*04:05L HLA-DRB1*01:02L HLA-DRB1*08:01L HLA-DPA1*01:03-B1*04:02L HLA-DRB1*12:01L HLA-DRB1*04:08L
VVEVVDKYFDCYDGG

SEQ ID NO: 14555 - protein, 11 aa, Severe acute respiratory syndrome coronavirus 2
  REGION 1..11: note = Table B: HLA-DRB1*13:02L HLA-DRB1*14:01L HLA-DRB1*04:08L HLA-DRB1*15:03L
NQVIVNNLDKS

SEQ ID NO: 14556 - protein, 12 aa, Severe acute respiratory syndrome coronavirus 2
  REGION 1..12: note = Table B: HLA-DRB1*13:02L HLA-DRB1*01:03L HLA-DRB1*04:02L HLA-DRB1*04:05L HLA-DQA1*01:02-B1*06:02L HLA-DRB1*01:02L HLA-DRB4*03:01NL HLA-DRB1*08:04L HLA-DRB3*02:01L HLA-DPA1*03:01-B1*04:02L HLA-DRB1*11:03L HLA-DRB1*11:04L
  REGION 1..12: note = CONT. FROM ABOVE: HLA-DRB1*14:02L HLA-DPA1*01:03-B1*04:01L HLA-D RB1*04:10L HLA-DRB1*09:01L HLA-DRB1*12:02L HLA-DPA1*03:01-B1*105 :01L HLA-DRB1*14:54L HLA-DQA1*05:05-B1*03:01L HLA-DRB1*14:17L HL A-DPA1*01:02-B1*04:01L HLA-DRB1*07:01L HLA-DRB1*04:08L
VNNLDKSAGFPF

SEQ ID NO: 14557 - protein, 12 aa, Severe acute respiratory syndrome coronavirus 2
  REGION 1..12: note = Table B: HLA-DRB1*13:02L HLA-DQA1*01:02-B1*06:02L HLA-DRB1*01:02L HLA-DRB1*12:01L HLA-DPA1*03:01-B1*105:01L HLA-DQA1*01:03-B1*06:01L HLA-DRB1*04:08L HLA-DRB1*15:03L
FPFNKWGKARLY

SEQ ID NO: 14558 - protein, 14 aa, Severe acute respiratory syndrome coronavirus 2
  REGION 1..14: note = Table B: HLA-DRB1*13:02L HLA-DRB1*04:04L HLA-DQA1*01:02-B1*06:02L HLA-DRB1*08:01L HLA-DPA1*01:02-B1*04:01L HLA-DQA1*01:03-B1*06:01L HLA-DQA1*02:01-B1*03:03L
GKARLYYDSMSYED

SEQ ID NO: 14559 - protein, 14 aa, Severe acute respiratory syndrome coronavirus 2
  REGION 1..14: note = Table B: HLA-DRB1*13:02L HLA-DRB1*04:04L HLA-DRB1*01:02L HLA-DRB1*08:04L HLA-DPA1*01:03-B1*03:01L HLA-DPA1*01:02-B1*04:01L HLA-DQA1*01:03-B1*06:01L HLA-DRB1*08:03L
KARLYYDSMSYEDQ

SEQ ID NO: 14560 - protein, 15 aa, Severe acute respiratory syndrome coronavirus 2
  REGION 1..15: note = Table B: HLA-DRB1*13:02L HLA-DRB1*04:04L HLA-DQA1*01:01-B1*05:01L HLA-DPA1*01:03-B1*04:01L HLA-DPA1*01:03-B1*02:01L HLA-DQA1*05:05-B1*03:01L HLA-DRB1*08:03L
ARLYYDSMSYEDQDA

SEQ ID NO: 14561 - protein, 15 aa, Severe acute respiratory syndrome coronavirus 2
  REGION 1..15: note = Table B: HLA-DRB1*13:02L HLA-DRB1*08:04L HLA-DRB1*14:01L HLA-DRB1*11:03L HLA-DRB1*11:04L HLA-DRB1*11:01L HLA-DRB3*01:01L HLA-DPA1*01:03-B1*02:01L
SMSYEDQDALFAYTK

SEQ ID NO: 14562 - protein, 14 aa, Severe acute respiratory syndrome coronavirus 2
  REGION 1..14: note = Table B: HLA-DRB1*13:02L HLA-DPA1*03:01-B1*105:01L HLA-DPA1*01:03-B1*104:01L HLA-DQA1*05:05-B1*03:01L
YTKRNVIPTITQMN

SEQ ID NO: 14563 - protein, 14 aa, Severe acute respiratory syndrome coronavirus 2
  REGION 1..14: note = Table B: HLA-DRB1*13:02L HLA-DRB1*01:03L HLA-DRB1*04:04L HLA-DRB1*04:05L HLA-DRB1*01:02L HLA-DRB1*08:04L HLA-DPA1*03:01-B1*04:02L HLA-DRB1*11:04L HLA-DRB1*08:01L HLA-DRB1*11:01L HLA-DRB1*04:10L HLA-DPA1*01:03-B1*04:02L
  REGION 1..14: note = CONT. FROM ABOVE: HLA-DRB1*14:54L HLA-DPA1*01:03-B1*02:01L HLA-D QA1*05:05-B1*03:01L HLA-DQA1*01:03-B1*06:01L HLA-DRB1*04:08L
IPTITQMNLKYAIS

SEQ ID NO: 14564 - protein, 13 aa, Severe acute respiratory syndrome coronavirus 2
  REGION 1..13: note = Table B: HLA-DRB1*13:02L HLA-DRB1*13:03L HLA-DQA1*01:02-B1*06:02L HLA-DRB1*01:02L HLA-DRB1*11:04L HLA-DRB1*11:01L HLA-DRB3*01:01L HLA-DRB1*16:01L HLA-DRB1*04:08L
AISAKNRARTVAG

SEQ ID NO: 14565 - protein, 14 aa, Severe acute respiratory syndrome coronavirus 2
  REGION 1..14: note = Table B: HLA-DRB1*13:02L HLA-DRB1*04:05L HLA-DRB1*01:02L HLA-DPA1*01:03-B1*03:01L HLA-DRB1*12:01L HLA-DPA1*01:03-B1*104:01L
NRARTVAGVSICST

SEQ ID NO: 14566 - protein, 10 aa, Severe acute respiratory syndrome coronavirus 2
  REGION 1..10: note = Table B: HLA-DRB1*13:02L HLA-DRB1*13:03L HLA-DRB1*01:03L HLA-DRB1*11:04L HLA-DRB1*08:01L HLA-DRB1*12:01L HLA-DQA1*03:01-B1*03:02L HLA-DRB1*14:17L HLA-DRB1*16:01L HLA-DQA1*02:01-B1*03:03L
TMTNRQFHQK

SEQ ID NO: 14567 - protein, 14 aa, Severe acute respiratory syndrome coronavirus 2
  REGION 1..14: note = Table B: HLA-DRB1*13:02L HLA-DRB1*04:05L HLA-DRB1*14:01L HLA-DRB1*11:01L HLA-DRB3*01:01L HLA-DPA1*02:01-B1*13:01L HLA-DRB1*15:03L
TNRQFHQKLLKSIA

SEQ ID NO: 14568 - protein, 15 aa, Severe acute respiratory syndrome coronavirus 2
  REGION 1..15: note = Table B: HLA-DRB1*13:02L HLA-DRB1*04:04L HLA-DPA1*01:03-B1*04:01L HLA-DPA1*01:03-B1*04:02L HLA-DPA1*02:01-B1*13:01L HLA-DQA1*01:03-B1*06:01L HLA-DQA1*02:01-B1*03:03L
NRQFHQKLLKSIAAT

SEQ ID NO: 14569 - protein, 14 aa, Severe acute respiratory syndrome coronavirus 2
  REGION 1..14: note = Table B: HLA-DRB1*13:02L HLA-DRB1*13:03L HLA-DRB4*03:01NL HLA-DRB1*08:04L HLA-DPA1*01:03-B1*03:01L HLA-DRB1*11:03L HLA-DRB1*11:01L HLA-DQA1*01-B1*05L HLA-DQA1*05:05-B1*03:19L HLA-DRB3*01:01L HLA-DPA1*02:01-B1*13:01L HLA-DRB1*14:54L
  REGION 1..14: note = CONT. FROM ABOVE: HLA-DRB1*07:01L HLA-DRB1*08:03L HLA-DRB1*15:01 L
QKLLKSIAATRGAT

SEQ ID NO: 14570 - protein, 13 aa, Severe acute respiratory syndrome coronavirus 2
  REGION 1..13: note = Table B: HLA-DRB1*13:02L HLA-DRB4*03:01NL HLA-DQA1*05:01-B1*02:01L HLA-DPA1*02:01-B1*13:01L HLA-DRB1*16:01L
AATRGATVVIGTS

SEQ ID NO: 14571 - protein, 14 aa, Severe acute respiratory syndrome coronavirus 2
  REGION 1..14: note = Table B: HLA-DRB1*13:02L HLA-DRB1*11:01L
VVIGTSKFYGGWHN

SEQ ID NO: 14572 - protein, 14 aa, Severe acute respiratory syndrome coronavirus 2
  REGION 1..14: note = Table B: HLA-DRB1*13:02L HLA-DRB1*01:03L HLA-DRB1*01:02L HLA-DRB1*04:08L HLA-DRB1*15:03L
YGGWHNMLKTVYSD

SEQ ID NO: 14573 - protein, 14 aa, Severe acute respiratory syndrome coronavirus 2
  REGION 1..14: note = Table B: HLA-DRB1*13:02L HLA-DRB1*01:02L HLA-DRB1*14:01L HLA-DRB1*08:01L HLA-DRB1*04:08L
GWHNMLKTVYSDVE

SEQ ID NO: 14574 - protein, 18 aa, Severe acute respiratory syndrome coronavirus 2
  REGION 1..18: note = Table B: HLA-DRB1*13:02L HLA-DRB1*08:04L HLA-DPA1*01:03-B1*03:01L HLA-DRB1*03:01L HLA-DRB1*14:02L HLA-DQA1*05:05-B1*03:19L HLA-DQA1*05:01-B1*02:01L HLA-DPA1*01:03-B1*04:01L HLA-DPA1*01:03-B1*04:02L
  REGION 1..18: note = CONT. FROM ABOVE: HLA-DPA1*01:03-B1*104:01L HLA-DQA1*05:05-B1*03 :01L HLA-DQA1*02:01-B1*03:03L
NPHLMGWDYPKCDRAMPN

SEQ ID NO: 14575 - protein, 10 aa, Severe acute respiratory syndrome coronavirus 2
  REGION 1..10: note = Table B: HLA-DRB1*13:02L HLA-DRB1*13:03L HLA-DRB1*12:01L HLA-DQA1*03:01-B1*03:02L
RIMASLVLAR

SEQ ID NO: 14576 - protein, 13 aa, Severe acute respiratory syndrome coronavirus 2
  REGION 1..13: note = Table B: HLA-DRB1*13:02L HLA-DRB1*04:05L HLA-DRB1*08:04L HLA-DRB1*11:04L HLA-DRB1*11:01L HLA-DPA1*03:01-B1*105:01L HLA-DRB1*14:54L HLA-DPA1*01:02-B1*04:01L HLA-DRB1*04:08L HLA-DRB1*15:03L
IMASLVLARKHTT

SEQ ID NO: 14577 - protein, 14 aa, Severe acute respiratory syndrome coronavirus 2
  REGION 1..14: note = Table B: HLA-DRB1*13:02L HLA-DRB1*01:01L HLA-DPA1*01:03-B1*03:01L HLA-DRB1*11:01L HLA-DPA1*01:02-B1*04:01L HLA-DRB1*04:08L HLA-DQA1*02:01-B1*03:03L
VLARKHTTCCSLSH

SEQ ID NO: 14578 - protein, 14 aa, Severe acute respiratory syndrome coronavirus 2
  REGION 1..14: note = Table B: HLA-DRB1*13:02L HLA-DRB1*01:01L HLA-DRB1*11:01L HLA-DPA1*01:02-B1*04:01L
LARKHTTCCSLSHR

SEQ ID NO: 14579 - protein, 16 aa, Severe acute respiratory syndrome coronavirus 2
  REGION 1..16: note = Table B: HLA-DRB1*13:02L HLA-DRB1*14:02L
LSEMVMCGGSLYVKPG

SEQ ID NO: 14580 - protein, 14 aa, Severe acute respiratory syndrome coronavirus 2
  REGION 1..14: note = Table B: HLA-DRB1*13:02L HLA-DRB1*01:02L HLA-DRB1*08:04L HLA-DPA1*01:03-B1*03:01L HLA-DRB1*11:03L HLA-DRB1*11:04L HLA-DRB1*14:02L HLA-DRB1*11:01L HLA-DRB1*04:10L HLA-DRB1*12:02L HLA-DRB1*08:03L HLA-DRB1*15:03L
GGSLYVKPGGTSSG

SEQ ID NO: 14581 - protein, 14 aa, Severe acute respiratory syndrome coronavirus 2
  REGION 1..14: note = Table B: HLA-DRB1*13:02L HLA-DRB1*04:04L HLA-DRB1*08:77L HLA-DPA1*03:01-B1*04:02L HLA-DRB1*14:02L HLA-DPA1*01:03-B1*04:01L HLA-DRB3*01:01L HLA-DRB1*07:01L
SGDATTAYANSVFN

SEQ ID NO: 14582 - protein, 15 aa, Severe acute respiratory syndrome coronavirus 2
  REGION 1..15: note = Table B: HLA-DRB1*13:02L
DATTAYANSVFNICQ

SEQ ID NO: 14583 - protein, 16 aa, Severe acute respiratory syndrome coronavirus 2
  REGION 1..16: note = Table B: HLA-DRB1*13:02L HLA-DRB1*11:02L HLA-DRB1*14:02L
TTAYANSVFNICQAVT

SEQ ID NO: 14584 - protein, 14 aa, Severe acute respiratory syndrome coronavirus 2
  REGION 1..14: note = Table B: HLA-DRB1*13:02L HLA-DRB1*08:04L HLA-DRB3*02:01L HLA-DPA1*03:01-B1*04:02L HLA-DPA1*01:03-B1*04:02L HLA-DPA1*02:01-B1*13:01L HLA-DPA1*01:02-B1*04:01L
ANSVFNICQAVTAN

SEQ ID NO: 14585 - protein, 13 aa, Severe acute respiratory syndrome coronavirus 2
  REGION 1..13: note = Table B: HLA-DRB1*13:02L HLA-DRB1*14:01L HLA-DRB1*12:01L HLA-DRB1*15:03L
QAVTANVNALLST

SEQ ID NO: 14586 - protein, 13 aa, Severe acute respiratory syndrome coronavirus 2
  REGION 1..13: note = Table B: HLA-DRB1*13:02L HLA-DQA1*01:02-B1*06:02L HLA-DRB1*14:01L HLA-DRB1*12:01L HLA-DRB1*15:03L
AVTANVNALLSTD

SEQ ID NO: 14587 - protein, 11 aa, Severe acute respiratory syndrome coronavirus 2
  REGION 1..11: note = Table B: HLA-DRB1*13:02L
NALLSTDGNKI

SEQ ID NO: 14588 - protein, 13 aa, Severe acute respiratory syndrome coronavirus 2
  REGION 1..13: note = Table B: HLA-DRB1*13:02L
TDGNKIADKYVRN

SEQ ID NO: 14589 - protein, 13 aa, Severe acute respiratory syndrome coronavirus 2
  REGION 1..13: note = Table B: HLA-DRB1*13:02L HLA-DPA1*01:03-B1*03:01L HLA-DPA1*01:02-B1*04:01L
DGNKIADKYVRNL

SEQ ID NO: 14590 - protein, 13 aa, Severe acute respiratory syndrome coronavirus 2
  REGION 1..13: note = Table B: HLA-DRB1*13:02L HLA-DRB1*04:05L HLA-DRB1*01:02L HLA-DPA1*01:02-B1*04:01L
GNKIADKYVRNLQ

SEQ ID NO: 14591 - protein, 14 aa, Severe acute respiratory syndrome coronavirus 2
  REGION 1..14: note = Table B: HLA-DRB1*13:02L HLA-DPA1*01:03-B1*03:01L HLA-DQA1*02:01-B1*03:03L HLA-DRB1*15:03L
LQHRLYECLYRNRD

SEQ ID NO: 14592 - protein, 14 aa, Severe acute respiratory syndrome coronavirus 2
  REGION 1..14: note = Table B: HLA-DRB1*13:02L HLA-DRB1*04:05L HLA-DRB1*14:01L HLA-DPA1*01:03-B1*04:02L HLA-DRB1*12:01L HLA-DRB3*01:01L HLA-DPA1*02:01-B1*13:01L HLA-DPA1*01:02-B1*04:01L HLA-DRB1*15:03L
HRLYECLYRNRDVD

SEQ ID NO: 14593 - protein, 14 aa, Severe acute respiratory syndrome coronavirus 2
  REGION 1..14: note = Table B: HLA-DRB1*13:02L HLA-DRB1*04:05L HLA-DRB1*01:02L HLA-DRB3*01:01L
RLYECLYRNRDVDT

SEQ ID NO: 14594 - protein, 12 aa, Severe acute respiratory syndrome coronavirus 2
  REGION 1..12: note = Table B: HLA-DRB1*13:02L HLA-DRB1*01:02L HLA-DRB3*02:01L HLA-DQA1*05:05-B1*03:01L
RDVDTDFVNEFY

SEQ ID NO: 14595 - protein, 12 aa, Severe acute respiratory syndrome coronavirus 2
  REGION 1..12: note = Table B: HLA-DRB1*13:02L HLA-DRB1*01:02L HLA-DRB1*08:04L HLA-DRB1*11:04L HLA-DPA1*01:03-B1*04:02L HLA-DRB1*08:03L
EFYAYLRKHFSM

SEQ ID NO: 14596 - protein, 14 aa, Severe acute respiratory syndrome coronavirus 2
  REGION 1..14: note = Table B: HLA-DRB1*13:02L
YLRKHFSMMILSDD

SEQ ID NO: 14597 - protein, 13 aa, Severe acute respiratory syndrome coronavirus 2
  REGION 1..13: note = Table B: HLA-DRB1*13:02L HLA-DRB1*08:04L HLA-DRB4*01:01L
MMILSDDAVVCFN

SEQ ID NO: 14598 - protein, 14 aa, Severe acute respiratory syndrome coronavirus 2
  REGION 1..14: note = Table B: HLA-DRB1*13:02L HLA-DRB1*08:04L HLA-DRB3*02:01L HLA-DRB1*11:02L HLA-DRB4*01:01L HLA-DRB3*01:01L HLA-DRB1*04:08L
MILSDDAVVCFNST

SEQ ID NO: 14599 - protein, 14 aa, Severe acute respiratory syndrome coronavirus 2
  REGION 1..14: note = Table B: HLA-DRB1*13:02L HLA-DRB1*01:03L HLA-DRB1*04:04L HLA-DRB1*04:05L HLA-DRB1*14:01L HLA-DQA1*05:05-B1*03:19L HLA-DRB1*04:10L HLA-DPA1*03:01-B1*105:01L HLA-DQA1*03:01-B1*03:02L HLA-DQA1*05:05-B1*03:01L
  REGION 1..14: note = CONT. FROM ABOVE: HLA-DQA1*01:03-B1*06:01L HLA-DRB1*04:08L HLA-D QA1*02:01-B1*03:03L HLA-DRB1*15:01L
DAVVCFNSTYASQG

SEQ ID NO: 14600 - protein, 12 aa, Severe acute respiratory syndrome coronavirus 2
  REGION 1..12: note = Table B: HLA-DRB1*13:02L HLA-DRB1*13:03L HLA-DRB1*04:05L HLA-DRB1*01:02L HLA-DRB1*08:04L HLA-DPA1*01:03-B1*03:01L HLA-DQA1*01:01-B1*05:01L HLA-DRB1*08:01L HLA-DQA1*05:01-B1*02:01L HLA-DQA1*05:05-B1*03:116L
  REGION 1..12: note = CONT. FROM ABOVE: HLA-DPA1*01:03-B1*04:02L HLA-DRB1*12:01L HLA-D PA1*01:02-B1*04:01L HLA-DRB1*16:01L HLA-DRB1*04:08L HLA-DRB1*15: 03L
YASQGLVASIKN

SEQ ID NO: 14601 - protein, 13 aa, Severe acute respiratory syndrome coronavirus 2
  REGION 1..13: note = Table B: HLA-DRB1*13:02L HLA-DRB1*13:03L HLA-DRB1*08:04L HLA-DRB1*11:04L HLA-DRB1*08:01L
SQGLVASIKNFKS

SEQ ID NO: 14602 - protein, 14 aa, Severe acute respiratory syndrome coronavirus 2
  REGION 1..14: note = Table B: HLA-DRB1*13:02L HLA-DPA1*01:03-B1*104:01L
KNFKSVLYYQNNVF

SEQ ID NO: 14603 - protein, 13 aa, Severe acute respiratory syndrome coronavirus 2
  REGION 1..13: note = Table B: HLA-DRB1*13:02L HLA-DRB1*01:03L HLA-DRB1*08:04L HLA-DPA1*01:03-B1*03:01L HLA-DPA1*01:03-B1*04:02L HLA-DRB1*14:17L HLA-DPA1*01:02-B1*04:01L HLA-DQA1*01:03-B1*06:01L HLA-DRB1*04:08L
VLYYQNNVFMSEA

SEQ ID NO: 14604 - protein, 12 aa, Severe acute respiratory syndrome coronavirus 2
  REGION 1..12: note = Table B: HLA-DRB1*13:02L HLA-DRB1*04:04L HLA-DRB1*04:05L HLA-DRB1*01:02L HLA-DRB1*08:04L HLA-DPA1*01:03-B1*03:01L HLA-DPA1*03:01-B1*04:02L HLA-DRB1*14:01L HLA-DRB1*11:04L HLA-DRB1*08:01L HLA-DRB1*11:01L HLA-DQA1*01-B1*05L
  REGION 1..12: note = CONT. FROM ABOVE: HLA-DPA1*01:03-B1*04:01L HLA-DRB1*12:01L HLA-D RB1*14:54L HLA-DPA1*01:03-B1*02:01L HLA-DRB1*04:08L HLA-DRB1*15: 03L
YYQNNVFMSEAK

SEQ ID NO: 14605 - protein, 16 aa, Severe acute respiratory syndrome coronavirus 2
  REGION 1..16: note = Table B: HLA-DRB1*13:02L HLA-DRB1*04:04L HLA-DQA1*01:02-B1*06:02L HLA-DPA1*01:03-B1*03:01L HLA-DRB1*12:01L HLA-DPA1*02:01-B1*13:01L HLA-DPA1*03:01-B1*105:01L HLA-DPA1*01:03-B1*104:01L
  REGION 1..16: note = CONT. FROM ABOVE: HLA-DRB1*07:01L HLA-DRB1*15:03L
SEAKCWTETDLTKGPH

SEQ ID NO: 14606 - protein, 12 aa, Severe acute respiratory syndrome coronavirus 2
  REGION 1..12: note = Table B: HLA-DRB1*13:02L HLA-DRB3*02:01L HLA-DRB1*14:01L HLA-DRB1*09:01L HLA-DPA1*02:01-B1*13:01L HLA-DQA1*05:05-B1*03:01L
TETDLTKGPHEF

SEQ ID NO: 14607 - protein, 18 aa, Severe acute respiratory syndrome coronavirus 2
  REGION 1..18: note = Table B: HLA-DRB1*13:02L HLA-DRB1*01:02L HLA-DRB1*08:04L
TMLVKQGDDYVYLPYPDP

SEQ ID NO: 14608 - protein, 18 aa, Severe acute respiratory syndrome coronavirus 2
  REGION 1..18: note = Table B: HLA-DRB1*13:02L
MLVKQGDDYVYLPYPDPS

SEQ ID NO: 14609 - protein, 12 aa, Severe acute respiratory syndrome coronavirus 2
  REGION 1..12: note = Table B: HLA-DRB1*13:02L HLA-DRB1*04:04L HLA-DRB3*02:01L HLA-DRB3*01:01L HLA-DQA1*05:05-B1*03:01L HLA-DRB1*07:01L HLA-DRB1*04:08L HLA-DRB1*15:01L
YLPYPDPSRILG

SEQ ID NO: 14610 - protein, 13 aa, Severe acute respiratory syndrome coronavirus 2
  REGION 1..13: note = Table B: HLA-DRB1*13:02L HLA-DRB1*11:04L HLA-DRB1*14:02L HLA-DQA1*01:01-B1*05:01L HLA-DRB1*11:01L HLA-DQA1*05:01-B1*02:01L HLA-DPA1*02:01-B1*13:01L HLA-DPA1*03:01-B1*105:01L HLA-DPA1*01:02-B1*04:01L
  REGION 1..13: note = CONT. FROM ABOVE: HLA-DRB1*15:03L
IDAYPLTKHPNQE

SEQ ID NO: 14611 - protein, 14 aa, Severe acute respiratory syndrome coronavirus 2
  REGION 1..14: note = Table B: HLA-DRB1*13:02L HLA-DRB1*04:05L
VFHLYLQYIRKLHD

SEQ ID NO: 14612 - protein, 12 aa, Severe acute respiratory syndrome coronavirus 2
  REGION 1..12: note = Table B: HLA-DRB1*13:02L HLA-DRB1*01:03L HLA-DRB1*04:05L HLA-DRB1*01:02L HLA-DRB3*01:01L HLA-DPA1*01:02-B1*04:01L HLA-DRB1*16:01L HLA-DRB1*15:03L
LYLQYIRKLHDE

SEQ ID NO: 14613 - protein, 13 aa, Severe acute respiratory syndrome coronavirus 2
  REGION 1..13: note = Table B: HLA-DRB1*13:02L HLA-DRB1*04:02L HLA-DRB1*04:04L HLA-DPA1*03:01-B1*04:02L HLA-DQA1*01-B1*05L HLA-DRB1*04:10L HLA-DRB3*01:01L HLA-DPA1*02:01-B1*13:01L HLA-DPA1*03:01-B1*105:01L HLA-DQA1*03:01-B1*03:02L
  REGION 1..13: note = CONT. FROM ABOVE: HLA-DRB1*14:17L HLA-DPA1*01:02-B1*04:01L HLA-D RB1*08:03L HLA-DQA1*02:01-B1*03:03L
LQYIRKLHDELTG

SEQ ID NO: 14614 - protein, 15 aa, Severe acute respiratory syndrome coronavirus 2
  REGION 1..15: note = Table B: HLA-DRB1*13:02L HLA-DRB1*01:03L HLA-DRB1*01:01L HLA-DRB1*08:04L HLA-DRB3*02:01L HLA-DPA1*03:01-B1*04:02L HLA-DRB1*14:01L HLA-DRB1*14:02L HLA-DRB1*08:01L HLA-DRB1*09:01L HLA-DPA1*01:03-B1*04:02L HLA-DPA1*02:01-B1*13:01L
  REGION 1..15: note = CONT. FROM ABOVE: HLA-DPA1*01:03-B1*104:01L HLA-DRB1*10:01L HLA- DRB1*08:03L HLA-DRB1*15:01L
GHMLDMYSVMLTNDN

SEQ ID NO: 14615 - protein, 13 aa, Severe acute respiratory syndrome coronavirus 2
  REGION 1..13: note = Table B: HLA-DRB1*13:02L HLA-DRB1*04:05L HLA-DRB1*01:02L HLA-DRB4*03:01NL HLA-DRB1*08:04L HLA-DRB1*11:03L HLA-DRB1*11:04L HLA-DRB1*08:01L HLA-DRB1*11:01L HLA-DRB3*01:01L HLA-DRB1*14:54L HLA-DQA1*05:05-B1*03:01L HLA-DRB1*14:17L HLA-DRB1*04:08L
LTNDNTSRYWEPE

SEQ ID NO: 14616 - protein, 14 aa, Severe acute respiratory syndrome coronavirus 2
  REGION 1..14: note = Table B: HLA-DRB1*13:02L HLA-DPA1*01:03-B1*104:01L HLA-DRB1*04:08L
DNTSRYWEPEFYEA

SEQ ID NO: 14617 - protein, 14 aa, Severe acute respiratory syndrome coronavirus 2
  REGION 1..14: note = Table B: HLA-DRB1*13:02L HLA-DRB1*04:05L HLA-DRB1*08:04L HLA-DRB1*14:01L HLA-DRB1*11:04L HLA-DRB1*11:01L HLA-DRB3*01:01L
YWEPEFYEAMYTPH

SEQ ID NO: 14618 - protein, 16 aa, Severe acute respiratory syndrome coronavirus 2
  REGION 1..16: note = Table B: HLA-DRB1*13:02L HLA-DRB1*08:04L
HVISTSHKLVLSVNPY

SEQ ID NO: 14619 - protein, 13 aa, Severe acute respiratory syndrome coronavirus 2
  REGION 1..13: note = Table B: HLA-DRB1*13:02L HLA-DRB1*04:05L HLA-DRB3*01:01L HLA-DPA1*02:01-B1*13:01L HLA-DRB1*08:03L HLA-DRB1*15:03L
MSYYCKSHKPPIS

SEQ ID NO: 14620 - protein, 12 aa, Severe acute respiratory syndrome coronavirus 2
  REGION 1..12: note = Table B: HLA-DRB1*13:02L HLA-DRB1*01:02L HLA-DRB1*08:04L HLA-DPA1*01:03-B1*03:01L HLA-DPA1*03:01-B1*04:02L HLA-DRB1*14:01L HLA-DQA1*05:05-B1*03:19L HLA-DQA1*05:01-B1*02:01L HLA-DRB1*12:01L
DYILANTCTERL

SEQ ID NO: 14621 - protein, 13 aa, Severe acute respiratory syndrome coronavirus 2
  REGION 1..13: note = Table B: HLA-DRB1*13:02L HLA-DRB1*08:04L HLA-DPA1*01:03-B1*03:01L HLA-DRB1*14:01L HLA-DRB1*11:04L HLA-DRB1*08:01L HLA-DRB1*11:01L HLA-DPA1*01:03-B1*04:01L HLA-DRB1*04:10L HLA-DPA1*02:01-B1*13:01L HLA-DRB1*10:01L
LKLFAAETLKATE

SEQ ID NO: 14622 - protein, 12 aa, Severe acute respiratory syndrome coronavirus 2
  REGION 1..12: note = Table B: HLA-DRB1*13:02L HLA-DRB1*13:03L HLA-DRB1*04:05L HLA-DRB1*01:02L HLA-DRB1*08:04L HLA-DRB3*02:01L HLA-DPA1*01:03-B1*03:01L HLA-DPA1*03:01-B1*04:02L HLA-DRB1*14:01L HLA-DRB1*14:02L HLA-DQA1*01:01-B1*05:01L
  REGION 1..12: note = CONT. FROM ABOVE: HLA-DRB1*08:01L HLA-DPA1*01:03-B1*04:01L HLA-D RB1*04:10L HLA-DPA1*02:01-B1*13:01L HLA-DPA1*01:03-B1*02:01L HLA -DPA1*01:03-B1*104:01L HLA-DRB1*15:03L
FAAETLKATEET

SEQ ID NO: 14623 - protein, 11 aa, Severe acute respiratory syndrome coronavirus 2
  REGION 1..11: note = Table B: HLA-DRB1*13:02L HLA-DRB1*04:02L HLA-DRB1*08:01L HLA-DRB1*14:17L
ETLKATEETFK

SEQ ID NO: 14624 - protein, 10 aa, Severe acute respiratory syndrome coronavirus 2
  REGION 1..10: note = Table B: HLA-DRB1*13:02L HLA-DRB1*13:03L HLA-DRB1*12:01L HLA-DQA1*03:01-B1*03:02L HLA-DQA1*05:05-B1*03:01L
KLSYGIATVR

SEQ ID NO: 14625 - protein, 16 aa, Severe acute respiratory syndrome coronavirus 2
  REGION 1..16: note = Table B: HLA-DRB1*13:02L HLA-DRB1*04:02L HLA-DRB1*04:04L HLA-DRB1*14:01L HLA-DRB3*01:01L HLA-DPA1*02:01-B1*13:01L HLA-DPA1*03:01-B1*105:01L HLA-DRB1*07:01L
DRELHLSWEVGKPRPP

SEQ ID NO: 14626 - protein, 10 aa, Severe acute respiratory syndrome coronavirus 2
  REGION 1..10: note = Table B: HLA-DRB1*13:02L HLA-DRB1*13:03L HLA-DRB4*03:01NL HLA-DRB1*08:01L HLA-DQA1*01-B1*05L HLA-DRB1*12:01L HLA-DQA1*03:01-B1*03:02L HLA-DQA1*05:05-B1*03:01L HLA-DQA1*02:01-B1*03:03L
GDYGDAVVYR

SEQ ID NO: 14627 - protein, 12 aa, Severe acute respiratory syndrome coronavirus 2
  REGION 1..12: note = Table B: HLA-DRB1*13:02L HLA-DRB1*01:03L HLA-DRB3*02:01L HLA-DRB1*11:03L HLA-DRB1*14:02L HLA-DQA1*05:05-B1*03:01L HLA-DRB1*04:08L
GDYFVLTSHTVM

SEQ ID NO: 14628 - protein, 12 aa, Severe acute respiratory syndrome coronavirus 2
  REGION 1..12: note = Table B: HLA-DRB1*13:02L HLA-DRB1*01:03L HLA-DRB1*01:01L HLA-DRB3*02:01L HLA-DPA1*01:03-B1*03:01L HLA-DRB1*11:03L HLA-DRB1*14:02L HLA-DRB1*09:01L HLA-DQA1*05:05-B1*03:01L HLA-DRB1*07:01L HLA-DRB1*10:01L HLA-DRB1*04:08L
DYFVLTSHTVMP

SEQ ID NO: 14629 - protein, 14 aa, Severe acute respiratory syndrome coronavirus 2
  REGION 1..14: note = Table B: HLA-DRB1*13:02L HLA-DRB1*01:03L HLA-DRB1*04:04L HLA-DRB1*04:05L HLA-DRB1*01:02L HLA-DPA1*01:03-B1*03:01L HLA-DRB1*08:01L HLA-DPA1*01:03-B1*04:02L HLA-DRB1*12:01L HLA-DPA1*01:03-B1*104:01L HLA-DPA1*01:02-B1*04:01L
  REGION 1..14: note = CONT. FROM ABOVE: HLA-DRB1*16:01L HLA-DRB1*04:08L HLA-DRB1*15:03 L
VLTSHTVMPLSAPT

SEQ ID NO: 14630 - protein, 12 aa, Severe acute respiratory syndrome coronavirus 2
  REGION 1..12: note = Table B: HLA-DRB1*13:02L HLA-DRB1*04:05L HLA-DRB4*03:01NL HLA-DPA1*01:03-B1*03:01L HLA-DRB1*11:03L HLA-DRB1*04:10L HLA-DRB1*12:02L HLA-DRB1*14:54L HLA-DQA1*05:05-B1*03:01L
SHTVMPLSAPTL

SEQ ID NO: 14631 - protein, 13 aa, Severe acute respiratory syndrome coronavirus 2
  REGION 1..13: note = Table B: HLA-DRB1*13:02L HLA-DRB1*04:05L HLA-DRB1*12:02L HLA-DRB1*04:08L
TVMPLSAPTLVPQ

SEQ ID NO: 14632 - protein, 14 aa, Severe acute respiratory syndrome coronavirus 2
  REGION 1..14: note = Table B: HLA-DRB1*13:02L HLA-DRB1*01:02L HLA-DRB1*04:08L
MPLSAPTLVPQEHY

SEQ ID NO: 14633 - protein, 12 aa, Severe acute respiratory syndrome coronavirus 2
  REGION 1..12: note = Table B: HLA-DRB1*13:02L HLA-DRB1*04:05L HLA-DRB1*01:02L HLA-DQA1*01:01-B1*05:01L HLA-DRB1*08:01L HLA-DRB1*14:54L HLA-DRB1*14:17L HLA-DRB1*04:08L
APTLVPQEHYVR

SEQ ID NO: 14634 - protein, 14 aa, Severe acute respiratory syndrome coronavirus 2
  REGION 1..14: note = Table B: HLA-DRB1*13:02L HLA-DRB1*01:03L HLA-DRB1*01:02L HLA-DRB1*03:01L HLA-DRB1*12:01L HLA-DRB3*01:01L HLA-DRB1*04:08L
PTLVPQEHYVRITG

SEQ ID NO: 14635 - protein, 15 aa, Severe acute respiratory syndrome coronavirus 2
  REGION 1..15: note = Table B: HLA-DRB1*13:02L HLA-DRB1*04:04L HLA-DRB4*03:01NL HLA-DRB1*08:04L HLA-DRB3*02:01L HLA-DPA1*01:03-B1*03:01L HLA-DPA1*03:01-B1*04:02L HLA-DRB1*11:03L HLA-DRB1*11:04L HLA-DRB1*14:02L HLA-DQA1*01:01-B1*05:01L HLA-DRB1*11:01L
  REGION 1..15: note = CONT. FROM ABOVE: HLA-DQA1*05:01-B1*02:01L HLA-DRB1*04:10L HLA-D PA1*01:03-B1*04:02L HLA-DRB1*12:02L HLA-DRB3*01:01L HLA-DPA1*02: 01-B1*13:01L HLA-DRB1*14:54L HLA-DPA1*01:03-B1*02:01L HLA-DQA1*0 5:05-B1*03:01L HLA-DRB1*07:01L HLA-DRB1*10:01L
  REGION 1..15: note = CONT. FROM ABOVE: HLA-DQA1*01:03-B1*06:01L HLA-DRB1*08:02L HLA-D RB1*08:03L
VPQEHYVRITGLYPT

SEQ ID NO: 14636 - protein, 13 aa, Severe acute respiratory syndrome coronavirus 2
  REGION 1..13: note = Table B: HLA-DRB1*13:02L HLA-DRB1*13:03L HLA-DRB1*01:03L HLA-DRB1*04:04L HLA-DRB1*01:02L HLA-DRB1*08:04L HLA-DPA1*01:03-B1*03:01L HLA-DPA1*03:01-B1*04:02L HLA-DRB1*14:01L HLA-DRB1*11:04L HLA-DQA1*01:01-B1*05:01L
  REGION 1..13: note = CONT. FROM ABOVE: HLA-DRB1*08:01L HLA-DRB1*12:01L HLA-DRB1*12:02 L HLA-DPA1*02:01-B1*13:01L HLA-DRB1*14:54L HLA-DPA1*01:03-B1*104 :01L HLA-DRB1*10:01L HLA-DRB1*04:08L HLA-DRB1*08:03L HLA-DRB1*15 :03L
ITGLYPTLNISDE

SEQ ID NO: 14637 - protein, 12 aa, Severe acute respiratory syndrome coronavirus 2
  REGION 1..12: note = Table B: HLA-DRB1*13:02L HLA-DRB1*14:54L HLA-DRB1*16:01L
SNVANYQKVGMQ

SEQ ID NO: 14638 - protein, 10 aa, Severe acute respiratory syndrome coronavirus 2
  REGION 1..10: note = Table B: HLA-DRB1*13:02L HLA-DRB1*13:03L HLA-DRB1*04:02L HLA-DRB1*01:01L HLA-DRB4*03:01NL HLA-DRB1*08:01L HLA-DRB1*12:01L HLA-DQA1*03:01-B1*03:02L HLA-DQA1*05:05-B1*03:01L HLA-DRB1*14:17L HLA-DRB1*16:01L HLA-DQA1*02:01-B1*03:03L
ANYQKVGMQK

SEQ ID NO: 14639 - protein, 14 aa, Severe acute respiratory syndrome coronavirus 2
  REGION 1..14: note = Table B: HLA-DRB1*13:02L HLA-DRB1*04:05L HLA-DRB1*01:02L HLA-DPA1*01:03-B1*02:01L HLA-DQA1*05:05-B1*03:01L HLA-DRB1*04:08L
KSHFAIGLALYYPS

SEQ ID NO: 14640 - protein, 15 aa, Severe acute respiratory syndrome coronavirus 2
  REGION 1..15: note = Table B: HLA-DRB1*13:02L HLA-DRB1*04:04L HLA-DRB1*04:05L HLA-DRB1*11:01L HLA-DRB3*01:01L
SHFAIGLALYYPSAR

SEQ ID NO: 14641 - protein, 14 aa, Severe acute respiratory syndrome coronavirus 2
  REGION 1..14: note = Table B: HLA-DRB1*13:02L HLA-DPA1*01:03-B1*03:01L HLA-DRB1*08:01L
AIGLALYYPSARIV

SEQ ID NO: 14642 - protein, 14 aa, Severe acute respiratory syndrome coronavirus 2
  REGION 1..14: note = Table B: HLA-DRB1*13:02L HLA-DPA1*01:03-B1*104:01L HLA-DRB1*04:08L HLA-DRB1*15:03L
YPSARIVYTACSHA

SEQ ID NO: 14643 - protein, 16 aa, Severe acute respiratory syndrome coronavirus 2
  REGION 1..16: note = Table B: HLA-DRB1*13:02L HLA-DPA1*02:01-B1*13:01L HLA-DPA1*03:01-B1*105:01L HLA-DRB1*16:01L
AVDALCEKALKYLPID

SEQ ID NO: 14644 - protein, 15 aa, Severe acute respiratory syndrome coronavirus 2
  REGION 1..15: note = Table B: HLA-DRB1*13:02L HLA-DRB3*01:01L
ALKYLPIDKCSRIIP

SEQ ID NO: 14645 - protein, 15 aa, Severe acute respiratory syndrome coronavirus 2
  REGION 1..15: note = Table B: HLA-DRB1*13:02L HLA-DRB1*04:05L HLA-DRB1*08:04L HLA-DRB1*11:04L HLA-DRB1*11:01L HLA-DRB1*12:01L
LKYLPIDKCSRIIPA

SEQ ID NO: 14646 - protein, 16 aa, Severe acute respiratory syndrome coronavirus 2
  REGION 1..16: note = Table B: HLA-DRB1*13:02L HLA-DRB1*01:03L HLA-DRB1*04:05L HLA-DQA1*01:02-B1*06:02L HLA-DRB1*12:01L HLA-DPA1*02:01-B1*13:01L HLA-DRB1*15:03L
IPARARVECFDKFKVN

SEQ ID NO: 14647 - protein, 14 aa, Severe acute respiratory syndrome coronavirus 2
  REGION 1..14: note = Table B: HLA-DRB1*13:02L HLA-DRB1*01:03L HLA-DRB1*04:05L HLA-DRB1*01:02L HLA-DRB1*11:04L HLA-DRB1*08:01L HLA-DRB1*11:01L HLA-DRB1*12:01L HLA-DRB3*01:01L HLA-DRB1*04:08L HLA-DRB1*15:03L
ARVECFDKFKVNST

SEQ ID NO: 14648 - protein, 14 aa, Severe acute respiratory syndrome coronavirus 2
  REGION 1..14: note = Table B: HLA-DRB1*13:02L HLA-DRB1*04:02L HLA-DRB1*01:02L HLA-DRB4*03:01NL HLA-DPA1*01:03-B1*03:01L HLA-DPA1*01:03-B1*04:02L HLA-DPA1*02:01-B1*13:01L
ALPETTADIVVFDE

SEQ ID NO: 14649 - protein, 13 aa, Severe acute respiratory syndrome coronavirus 2
  REGION 1..13: note = Table B: HLA-DRB1*13:02L HLA-DRB1*01:03L HLA-DRB1*04:04L HLA-DRB1*04:05L HLA-DQA1*01:02-B1*06:02L HLA-DRB3*02:01L HLA-DRB1*04:08L HLA-DRB1*15:01L
ADIVVFDEISMAT

SEQ ID NO: 14650 - protein, 13 aa, Severe acute respiratory syndrome coronavirus 2
  REGION 1..13: note = Table B: HLA-DRB1*13:02L HLA-DRB1*04:05L HLA-DQA1*01:02-B1*06:02L HLA-DRB1*14:01L HLA-DRB1*08:01L HLA-DRB3*01:01L
DLSVVNARLRAKH

SEQ ID NO: 14651 - protein, 16 aa, Severe acute respiratory syndrome coronavirus 2
  REGION 1..16: note = Table B: HLA-DRB1*13:02L HLA-DRB3*01:01L HLA-DPA1*02:01-B1*13:01L
VNARLRAKHYVYIGDP

SEQ ID NO: 14652 - protein, 16 aa, Severe acute respiratory syndrome coronavirus 2
  REGION 1..16: note = Table B: HLA-DRB1*13:02L HLA-DRB1*04:04L HLA-DRB1*04:05L HLA-DRB1*14:01L HLA-DPA1*02:01-B1*13:01L
NARLRAKHYVYIGDPA

SEQ ID NO: 14653 - protein, 13 aa, Severe acute respiratory syndrome coronavirus 2
  REGION 1..13: note = Table B: HLA-DRB1*13:02L HLA-DRB1*14:01L HLA-DRB1*14:02L
HYVYIGDPAQLPA

SEQ ID NO: 14654 - protein, 13 aa, Severe acute respiratory syndrome coronavirus 2
  REGION 1..13: note = Table B: HLA-DRB1*13:02L HLA-DQA1*01:02-B1*06:02L HLA-DRB1*01:02L HLA-DRB1*08:04L HLA-DRB3*02:01L HLA-DPA1*01:03-B1*03:01L HLA-DPA1*03:01-B1*04:02L HLA-DRB1*14:01L HLA-DRB1*14:02L HLA-DRB1*12:02L
YVYIGDPAQLPAP

SEQ ID NO: 14655 - protein, 11 aa, Severe acute respiratory syndrome coronavirus 2
  REGION 1..11: note = Table B: HLA-DRB1*13:02L HLA-DQA1*01:02-B1*06:02L HLA-DRB1*01:02L HLA-DRB1*08:77L HLA-DRB3*02:01L HLA-DPA1*01:03-B1*03:01L HLA-DPA1*03:01-B1*04:02L HLA-DRB1*14:01L HLA-DRB1*11:03L HLA-DRB1*11:04L HLA-DRB1*14:02L
  REGION 1..11: note = CONT. FROM ABOVE: HLA-DQA1*01:01-B1*05:01L HLA-DRB1*08:01L HLA-D RB5*01:01L HLA-DQA1*05:05-B1*03:19L HLA-DPA1*01:03-B1*04:01L HLA -DQA1*05:05-B1*03:116L HLA-DRB1*09:01L HLA-DPA1*01:03-B1*04:02L HLA-DRB1*12:01L HLA-DRB1*12:02L HLA-DRB3*01:01L
  REGION 1..11: note = CONT. FROM ABOVE: HLA-DPA1*02:01-B1*13:01L HLA-DPA1*03:01-B1*105 :01L HLA-DRB1*14:54L HLA-DRB1*14:17L HLA-DPA1*01:02-B1*04:01L HL A-DRB1*10:01L HLA-DRB1*15:03L
DPAQLPAPRTL

SEQ ID NO: 14656 - protein, 12 aa, Severe acute respiratory syndrome coronavirus 2
  REGION 1..12: note = Table B: HLA-DRB1*13:02L HLA-DRB1*01:02L HLA-DRB3*02:01L HLA-DRB1*12:02L HLA-DQA1*05:05-B1*03:01L
EIVDTVSALVYD

SEQ ID NO: 14657 - protein, 12 aa, Severe acute respiratory syndrome coronavirus 2
  REGION 1..12: note = Table B: HLA-DRB1*13:02L HLA-DRB1*13:03L HLA-DRB1*01:03L HLA-DRB1*04:05L HLA-DRB1*01:02L HLA-DRB4*03:01NL HLA-DRB1*08:04L HLA-DRB1*08:77L HLA-DRB1*11:03L HLA-DRB1*11:04L HLA-DRB1*14:02L HLA-DRB1*08:01L HLA-DRB1*11:01L HLA-DQA1*05:01-B1*02:01L
  REGION 1..12: note = CONT. FROM ABOVE: HLA-DRB1*12:01L HLA-DRB1*12:02L HLA-DRB3*01:01 L HLA-DPA1*01:02-B1*04:01L HLA-DRB1*04:08L HLA-DRB1*08:03L HLA-D RB1*15:03L
VSALVYDNKLKA

SEQ ID NO: 14658 - protein, 12 aa, Severe acute respiratory syndrome coronavirus 2
  REGION 1..12: note = Table B: HLA-DRB1*13:02L HLA-DRB1*04:05L HLA-DQA1*01:02-B1*06:02L HLA-DRB1*03:01L HLA-DRB1*14:01L HLA-DRB1*11:01L HLA-DRB1*12:01L HLA-DQA1*02:01-B1*03:03L HLA-DRB1*15:03L
VYDNKLKAHKDK

SEQ ID NO: 14659 - protein, 12 aa, Severe acute respiratory syndrome coronavirus 2
  REGION 1..12: note = Table B: HLA-DRB1*13:02L HLA-DRB1*13:03L HLA-DRB1*04:05L HLA-DPA1*01:03-B1*03:01L HLA-DPA1*03:01-B1*04:02L HLA-DRB1*14:01L HLA-DRB1*08:01L HLA-DQA1*05:05-B1*03:19L HLA-DQA1*05:01-B1*02:01L HLA-DRB1*12:01L
  REGION 1..12: note = CONT. FROM ABOVE: HLA-DPA1*02:01-B1*13:01L HLA-DRB1*15:03L
MFYKGVITHDVS

SEQ ID NO: 14660 - protein, 11 aa, Severe acute respiratory syndrome coronavirus 2
  REGION 1..11: note = Table B: HLA-DRB1*13:02L HLA-DRB1*13:03L HLA-DRB1*08:01L HLA-DRB1*12:01L
ITHDVSSAINR

SEQ ID NO: 14661 - protein, 10 aa, Severe acute respiratory syndrome coronavirus 2
  REGION 1..10: note = Table B: HLA-DRB1*13:02L HLA-DRB1*13:03L HLA-DRB1*01:03L HLA-DRB1*08:01L HLA-DRB1*12:01L HLA-DQA1*03:01-B1*03:02L HLA-DRB1*14:17L HLA-DQA1*02:01-B1*03:03L
INRPQIGVVR

SEQ ID NO: 14662 - protein, 16 aa, Severe acute respiratory syndrome coronavirus 2
  REGION 1..16: note = Table B: HLA-DRB1*13:02L HLA-DRB1*04:04L HLA-DRB1*01:01L HLA-DRB1*07:01L HLA-DRB1*15:01L
RPQIGVVREFLTRNPA

SEQ ID NO: 14663 - protein, 14 aa, Severe acute respiratory syndrome coronavirus 2
  REGION 1..14: note = Table B: HLA-DRB1*13:02L HLA-DRB1*04:04L HLA-DRB1*11:04L HLA-DRB1*11:01L HLA-DRB1*07:01L
VVREFLTRNPAWRK

SEQ ID NO: 14664 - protein, 12 aa, Severe acute respiratory syndrome coronavirus 2
  REGION 1..12: note = Table B: HLA-DRB1*13:02L HLA-DRB1*04:05L HLA-DRB1*12:01L HLA-DRB3*01:01L HLA-DPA1*01:02-B1*04:01L HLA-DRB1*15:03L
EFLTRNPAWRKA

SEQ ID NO: 14665 - protein, 13 aa, Severe acute respiratory syndrome coronavirus 2
  REGION 1..13: note = Table B: HLA-DRB1*13:02L HLA-DRB1*13:03L HLA-DRB1*04:04L HLA-DRB4*03:01NL HLA-DRB1*08:04L HLA-DPA1*01:03-B1*03:01L HLA-DRB1*14:01L HLA-DRB1*08:01L HLA-DPA1*01:03-B1*04:01L HLA-DPA1*01:03-B1*04:02L HLA-DPA1*02:01-B1*13:01L
RKAVFISPYNSQN

SEQ ID NO: 14666 - protein, 14 aa, Severe acute respiratory syndrome coronavirus 2
  REGION 1..14: note = Table B: HLA-DRB1*13:02L HLA-DRB1*08:04L HLA-DPA1*01:03-B1*04:01L HLA-DPA1*01:03-B1*04:02L HLA-DPA1*01:03-B1*104:01L HLA-DRB1*10:01L
KAVFISPYNSQNAV

SEQ ID NO: 14667 - protein, 12 aa, Severe acute respiratory syndrome coronavirus 2
  REGION 1..12: note = Table B: HLA-DRB1*13:02L HLA-DQA1*01:02-B1*06:02L HLA-DRB1*01:01L HLA-DRB1*08:01L HLA-DQA1*05:05-B1*03:01L HLA-DRB1*10:01L HLA-DRB1*08:03L
FISPYNSQNAVA

SEQ ID NO: 14668 - protein, 12 aa, Severe acute respiratory syndrome coronavirus 2
  REGION 1..12: note = Table B: HLA-DRB1*13:02L HLA-DRB1*04:04L HLA-DRB1*08:04L HLA-DRB1*08:77L HLA-DRB3*02:01L HLA-DPA1*01:03-B1*03:01L HLA-DRB1*11:03L HLA-DRB1*11:04L HLA-DRB1*12:02L HLA-DRB1*07:01L
SKILGLPTQTVD

SEQ ID NO: 14669 - protein, 11 aa, Severe acute respiratory syndrome coronavirus 2
  REGION 1..11: note = Table B: HLA-DRB1*13:02L HLA-DRB1*04:04L HLA-DRB1*08:77L HLA-DRB1*11:03L HLA-DRB1*11:04L HLA-DRB1*12:02L HLA-DRB1*10:01L HLA-DRB1*04:08L HLA-DRB1*08:03L
ILGLPTQTVDS

SEQ ID NO: 14670 - protein, 11 aa, Severe acute respiratory syndrome coronavirus 2
  REGION 1..11: note = Table B: HLA-DRB1*13:02L HLA-DRB1*04:02L HLA-DRB1*11:01L HLA-DPA1*03:01-B1*105:01L HLA-DQA1*02:01-B1*03:03L
QTVDSSQGSEY

SEQ ID NO: 14671 - protein, 14 aa, Severe acute respiratory syndrome coronavirus 2
  REGION 1..14: note = Table B: HLA-DRB1*13:02L HLA-DRB1*13:03L HLA-DRB1*04:02L HLA-DRB1*04:04L HLA-DRB1*04:05L HLA-DRB1*14:01L HLA-DRB1*11:04L HLA-DRB1*14:02L HLA-DRB1*11:01L HLA-DQA1*05:05-B1*03:19L HLA-DRB3*01:01L HLA-DRB1*10:01L HLA-DRB1*08:03L
GSEYDYVIFTQTTE

SEQ ID NO: 14672 - protein, 10 aa, Severe acute respiratory syndrome coronavirus 2
  REGION 1..10: note = Table B: HLA-DRB1*13:02L HLA-DRB1*13:03M HLA-DRB1*01:01L HLA-DRB4*03:01NL HLA-DRB1*14:01L HLA-DRB1*11:04L HLA-DRB1*08:01M HLA-DRB5*01:01L HLA-DRB1*12:01L HLA-DQA1*03:01-B1*03:02M HLA-DQA1*05:05-B1*03:01M HLA-DQA1*01:03-B1*06:01L
  REGION 1..10: note = CONT. FROM ABOVE: HLA-DQA1*02:01-B1*03:03L HLA-DRB1*15:01L
ETAHSCNVNR

SEQ ID NO: 14673 - protein, 11 aa, Severe acute respiratory syndrome coronavirus 2
  REGION 1..11: note = Table B: HLA-DRB1*13:02L HLA-DRB1*13:03L HLA-DRB1*01:03L HLA-DRB1*08:01L HLA-DRB1*12:01L HLA-DRB1*16:01L
NVNRFNVAITR

SEQ ID NO: 14674 - protein, 11 aa, Severe acute respiratory syndrome coronavirus 2
  REGION 1..11: note = Table B: HLA-DRB1*13:02L HLA-DRB1*04:05L HLA-DRB1*01:02L HLA-DQA1*01:01-B1*05:01L HLA-DRB1*08:01L HLA-DQA1*05:05-B1*03:19L HLA-DQA1*05:01-B1*02:01L HLA-DRB1*12:01L HLA-DPA1*03:01-B1*105:01L HLA-DRB1*14:54L
  REGION 1..11: note = CONT. FROM ABOVE: HLA-DQA1*05:05-B1*03:01L HLA-DRB1*04:08L HLA-D RB1*15:03L
FNVAITRAKVG

SEQ ID NO: 14675 - protein, 12 aa, Severe acute respiratory syndrome coronavirus 2
  REGION 1..12: note = Table B: HLA-DRB1*13:02L HLA-DRB1*04:05L HLA-DPA1*01:03-B1*03:01L HLA-DPA1*03:01-B1*04:02L HLA-DRB1*14:54L
NVAITRAKVGIL

SEQ ID NO: 14676 - protein, 14 aa, Severe acute respiratory syndrome coronavirus 2
  REGION 1..14: note = Table B: HLA-DRB1*13:02L HLA-DRB1*04:04L HLA-DPA1*01:03-B1*104:01L HLA-DPA1*01:02-B1*04:01L HLA-DRB1*07:01L HLA-DRB1*04:08L
TRAKVGILCIMSDR

SEQ ID NO: 14677 - protein, 14 aa, Severe acute respiratory syndrome coronavirus 2
  REGION 1..14: note = Table B: HLA-DRB1*13:02L HLA-DRB1*04:04L HLA-DPA1*01:03-B1*03:01L HLA-DPA1*01:03-B1*104:01L
RAKVGILCIMSDRD

SEQ ID NO: 14678 - protein, 14 aa, Severe acute respiratory syndrome coronavirus 2
  REGION 1..14: note = Table B: HLA-DRB1*13:02L HLA-DRB1*04:05L HLA-DRB1*01:02L HLA-DRB1*08:04L
DRDLYDKLQFTSLE

SEQ ID NO: 14679 - protein, 15 aa, Severe acute respiratory syndrome coronavirus 2
  REGION 1..15: note = Table B: HLA-DRB1*13:02L
DLYDKLQFTSLEIPR

SEQ ID NO: 14680 - protein, 12 aa, Severe acute respiratory syndrome coronavirus 2
  REGION 1..12: note = Table B: HLA-DRB1*13:02L HLA-DRB1*13:03L HLA-DRB1*01:03L HLA-DRB1*04:04L HLA-DRB1*04:05L HLA-DRB4*03:01NL HLA-DRB1*08:77L HLA-DRB3*02:01L HLA-DPA1*01:03-B1*03:01L HLA-DPA1*03:01-B1*04:02L HLA-DRB1*14:01L HLA-DRB1*11:03L
  REGION 1..12: note = CONT. FROM ABOVE: HLA-DRB1*14:02L HLA-DQA1*01-B1*05L HLA-DQA1*05 :05-B1*03:19L HLA-DRB1*04:10L HLA-DRB1*09:01L HLA-DRB1*12:02L HL A-DPA1*02:01-B1*13:01L HLA-DRB1*14:54L HLA-DPA1*01:02-B1*04:01L HLA-DRB1*07:01L HLA-DRB1*10:01L HLA-DRB1*04:08L
RNVATLQAENVT

SEQ ID NO: 14681 - protein, 12 aa, Severe acute respiratory syndrome coronavirus 2
  REGION 1..12: note = Table B: HLA-DRB1*13:02L HLA-DRB1*01:01L HLA-DRB1*08:77L HLA-DRB1*14:01L HLA-DRB1*11:03L HLA-DRB1*14:02L HLA-DRB1*12:02L HLA-DRB1*07:01L
NVATLQAENVTG

SEQ ID NO: 14682 - protein, 12 aa, Severe acute respiratory syndrome coronavirus 2
  REGION 1..12: note = Table B: HLA-DRB1*13:02L HLA-DRB1*08:77L HLA-DRB3*02:01L HLA-DPA1*01:03-B1*03:01L HLA-DQA1*01-B1*05L HLA-DPA1*01:03-B1*04:01L HLA-DRB1*12:02L HLA-DRB1*07:01L
VATLQAENVTGL

SEQ ID NO: 14683 - protein, 13 aa, Severe acute respiratory syndrome coronavirus 2
  REGION 1..13: note = Table B: HLA-DRB1*13:02L HLA-DRB1*04:02L HLA-DRB1*11:03L HLA-DRB1*12:01L HLA-DRB3*01:01L HLA-DRB1*14:54L
TGLFKDCSKVITG

SEQ ID NO: 14684 - protein, 11 aa, Severe acute respiratory syndrome coronavirus 2
  REGION 1..11: note = Table B: HLA-DRB1*13:02L HLA-DQA1*01:02-B1*06:02L HLA-DPA1*03:01-B1*04:02L HLA-DQA1*05:05-B1*03:116L HLA-DQA1*01:03-B1*06:01L HLA-DRB1*15:03L
GLHPTQAPTHL

SEQ ID NO: 14685 - protein, 11 aa, Severe acute respiratory syndrome coronavirus 2
  REGION 1..11: note = Table B: HLA-DRB1*13:02L HLA-DRB4*03:01NL HLA-DRB1*03:01L HLA-DRB1*14:01L HLA-DQA1*05:01-B1*02:01L HLA-DRB3*01:01L HLA-DRB1*14:54L HLA-DRB1*04:08L
LSVDTKFKTEG

SEQ ID NO: 14686 - protein, 15 aa, Severe acute respiratory syndrome coronavirus 2
  REGION 1..15: note = Table B: HLA-DRB1*13:02L HLA-DRB1*04:05L HLA-DRB1*03:01L HLA-DRB1*12:01L HLA-DRB1*04:08L
IPGIPKDMTYRRLIS

SEQ ID NO: 14687 - protein, 11 aa, Severe acute respiratory syndrome coronavirus 2
  REGION 1..11: note = Table B: HLA-DRB1*13:02L HLA-DRB1*13:03L HLA-DQA1*01:02-B1*06:02L HLA-DRB1*01:02L HLA-DRB3*02:01L HLA-DPA1*01:03-B1*03:01L HLA-DRB1*14:01L HLA-DPA1*01:03-B1*04:01L HLA-DPA1*01:03-B1*04:02L
MNYQVNGYPNM

SEQ ID NO: 14688 - protein, 10 aa, Severe acute respiratory syndrome coronavirus 2
  REGION 1..10: note = Table B: HLA-DRB1*13:02L HLA-DRB1*13:03L HLA-DRB1*01:01L HLA-DRB4*03:01NL HLA-DRB3*02:01L HLA-DRB1*11:04L HLA-DRB1*08:01L HLA-DRB5*01:01L HLA-DPA1*01:03-B1*04:02L HLA-DRB1*12:01L HLA-DRB1*12:02L HLA-DQA1*03:01-B1*03:02M
  REGION 1..10: note = CONT. FROM ABOVE: HLA-DQA1*05:05-B1*03:01L HLA-DRB1*14:17L HLA-D QA1*01:03-B1*06:01L HLA-DQA1*02:01-B1*03:03L
NGYPNMFITR

SEQ ID NO: 14689 - protein, 12 aa, Severe acute respiratory syndrome coronavirus 2
  REGION 1..12: note = Table B: HLA-DRB1*13:02L HLA-DRB1*04:05L HLA-DQA1*01:02-B1*06:02L HLA-DRB1*14:01L HLA-DRB3*01:01L HLA-DRB1*15:03L
FITREEAIRHVR

SEQ ID NO: 14690 - protein, 14 aa, Severe acute respiratory syndrome coronavirus 2
  REGION 1..14: note = Table B: HLA-DRB1*13:02L HLA-DRB1*04:05L HLA-DRB1*01:01L HLA-DRB1*08:04L HLA-DRB1*11:04L HLA-DRB1*11:01L HLA-DRB3*01:01L HLA-DPA1*02:01-B1*13:01L HLA-DRB1*07:01L HLA-DRB1*15:01L
EEAIRHVRAWIGFD

SEQ ID NO: 14691 - protein, 13 aa, Severe acute respiratory syndrome coronavirus 2
  REGION 1..13: note = Table B: HLA-DRB1*13:02L HLA-DRB1*01:03L HLA-DRB1*04:04L HLA-DPA1*01:03-B1*03:01L HLA-DPA1*03:01-B1*04:02L HLA-DRB1*08:01L HLA-DPA1*03:01-B1*105:01L HLA-DQA1*03:01-B1*03:02L HLA-DPA1*01:02-B1*04:01L
  REGION 1..13: note = CONT. FROM ABOVE: HLA-DRB1*07:01L
RHVRAWIGFDVEG

SEQ ID NO: 14692 - protein, 12 aa, Severe acute respiratory syndrome coronavirus 2
  REGION 1..12: note = Table B: HLA-DRB1*13:02L HLA-DRB1*04:02L HLA-DPA1*01:03-B1*03:01L HLA-DRB1*14:01L HLA-DQA1*01:01-B1*05:01L HLA-DQA1*01-B1*05L HLA-DRB1*12:01L HLA-DQA1*05:05-B1*03:01L HLA-DRB1*16:01L
EAVGTNLPLQLG

SEQ ID NO: 14693 - protein, 13 aa, Severe acute respiratory syndrome coronavirus 2
  REGION 1..13: note = Table B: HLA-DRB1*13:02L HLA-DRB1*13:03L HLA-DRB1*04:02L HLA-DRB1*04:05L HLA-DRB1*01:02L HLA-DRB4*03:01NL HLA-DRB1*08:77L HLA-DRB3*02:01L HLA-DPA1*01:03-B1*03:01L HLA-DPA1*03:01-B1*04:02L HLA-DRB1*14:01L HLA-DRB1*11:03L
  REGION 1..13: note = CONT. FROM ABOVE: HLA-DPA1*01:03-B1*04:01L HLA-DRB1*09:01L HLA-D RB1*12:01L HLA-DRB1*12:02L HLA-DRB1*14:54L HLA-DRB1*14:17L HLA-D RB1*07:01L HLA-DRB1*16:01L HLA-DRB1*15:03L
LPLQLGFSTGVNL

SEQ ID NO: 14694 - protein, 10 aa, Severe acute respiratory syndrome coronavirus 2
  REGION 1..10: note = Table B: HLA-DRB1*13:02L HLA-DRB1*13:03L HLA-DRB4*03:01NL HLA-DRB1*08:01L HLA-DRB5*01:01L HLA-DRB1*12:01L HLA-DQA1*03:01-B1*03:02L HLA-DQA1*05:05-B1*03:01L
DTPNNTDFSR

SEQ ID NO: 14695 - protein, 14 aa, Severe acute respiratory syndrome coronavirus 2
  REGION 1..14: note = Table B: HLA-DRB1*13:02L HLA-DRB1*04:04L HLA-DRB1*11:04L HLA-DRB1*11:01L HLA-DRB3*01:01L HLA-DPA1*02:01-B1*13:01L HLA-DPA1*03:01-B1*105:01L HLA-DQA1*05:05-B1*03:01L HLA-DRB1*07:01L HLA-DRB1*10:01L HLA-DQA1*01:03-B1*06:01L
  REGION 1..14: note = CONT. FROM ABOVE: HLA-DRB1*08:03L
NTDFSRVSAKPPPG

SEQ ID NO: 14696 - protein, 14 aa, Severe acute respiratory syndrome coronavirus 2
  REGION 1..14: note = Table B: HLA-DRB1*13:02L HLA-DRB1*04:04L HLA-DPA1*01:03-B1*03:01L HLA-DRB1*14:01L HLA-DQA1*01:01-B1*05:01L HLA-DRB1*11:01L HLA-DQA1*01-B1*05L HLA-DPA1*03:01-B1*105:01L HLA-DRB1*14:54L
  REGION 1..14: note = CONT. FROM ABOVE: HLA-DPA1*01:03-B1*104:01L HLA-DPA1*01:02-B1*04 :01L HLA-DRB1*07:01L HLA-DRB1*08:03L HLA-DRB1*15:03L
DFSRVSAKPPPGDQ

SEQ ID NO: 14697 - protein, 16 aa, Severe acute respiratory syndrome coronavirus 2
  REGION 1..16: note = Table B: HLA-DRB1*13:02L HLA-DRB1*14:01L HLA-DRB1*08:01L HLA-DRB1*07:01L
PPPGDQFKHLIPLMYK

SEQ ID NO: 14698 - protein, 13 aa, Severe acute respiratory syndrome coronavirus 2
  REGION 1..13: note = Table B: HLA-DRB1*13:02L HLA-DRB1*04:05L HLA-DRB1*08:04L HLA-DPA1*01:03-B1*03:01L HLA-DPA1*01:03-B1*04:01L HLA-DPA1*01:03-B1*04:02L HLA-DPA1*01:03-B1*02:01L HLA-DQA1*05:05-B1*03:01L
GLPWNVVRIKIVQ

SEQ ID NO: 14699 - protein, 14 aa, Severe acute respiratory syndrome coronavirus 2
  REGION 1..14: note = Table B: HLA-DRB1*13:02L
NVVRIKIVQMLSDT

SEQ ID NO: 14700 - protein, 15 aa, Severe acute respiratory syndrome coronavirus 2
  REGION 1..15: note = Table B: HLA-DRB1*13:02L
VVRIKIVQMLSDTLK

SEQ ID NO: 14701 - protein, 13 aa, Severe acute respiratory syndrome coronavirus 2
  REGION 1..13: note = Table B: HLA-DRB1*13:02L HLA-DRB1*01:01L HLA-DRB3*02:01L HLA-DPA1*01:03-B1*03:01L HLA-DRB1*11:03L HLA-DRB1*11:04L HLA-DRB1*08:01L HLA-DRB3*01:01L HLA-DQA1*05:05-B1*03:01L HLA-DRB1*07:01L HLA-DRB1*08:03L HLA-DRB1*15:01L
IKIVQMLSDTLKN

SEQ ID NO: 14702 - protein, 14 aa, Severe acute respiratory syndrome coronavirus 2
  REGION 1..14: note = Table B: HLA-DRB1*13:02L HLA-DRB1*08:04L HLA-DPA1*02:01-B1*13:01L
IVQMLSDTLKNLSD

SEQ ID NO: 14703 - protein, 12 aa, Severe acute respiratory syndrome coronavirus 2
  REGION 1..12: note = Table B: HLA-DRB1*13:02L HLA-DRB1*04:08L
RVVFVLWAHGFE

SEQ ID NO: 14704 - protein, 13 aa, Severe acute respiratory syndrome coronavirus 2
  REGION 1..13: note = Table B: HLA-DRB1*13:02L HLA-DRB1*01:03L HLA-DRB1*08:04L HLA-DPA1*01:03-B1*03:01L HLA-DRB1*14:02L HLA-DRB1*08:01L HLA-DQA1*05:05-B1*03:19L HLA-DPA1*01:03-B1*02:01L HLA-DPA1*01:03-B1*104:01L HLA-DQA1*05:05-B1*03:01L
VVFVLWAHGFELT

SEQ ID NO: 14705 - protein, 14 aa, Severe acute respiratory syndrome coronavirus 2
  REGION 1..14: note = Table B: HLA-DRB1*13:02L HLA-DRB1*11:04L HLA-DRB1*14:02L HLA-DRB1*11:01L HLA-DPA1*01:03-B1*104:01L
FVLWAHGFELTSMK

SEQ ID NO: 14706 - protein, 16 aa, Severe acute respiratory syndrome coronavirus 2
  REGION 1..16: note = Table B: HLA-DRB1*13:02L HLA-DPA1*01:03-B1*03:01L HLA-DPA1*01:03-B1*04:02L HLA-DRB3*01:01L HLA-DPA1*01:03-B1*02:01L HLA-DQA1*05:05-B1*03:01L
GFELTSMKYFVKIGPE

SEQ ID NO: 14707 - protein, 13 aa, Severe acute respiratory syndrome coronavirus 2
  REGION 1..13: note = Table B: HLA-DRB1*13:02L HLA-DRB1*04:05L HLA-DRB1*01:02L HLA-DRB1*12:01L HLA-DPA1*02:01-B1*13:01L
TSMKYFVKIGPER

SEQ ID NO: 14708 - protein, 12 aa, Severe acute respiratory syndrome coronavirus 2
  REGION 1..12: note = Table B: HLA-DRB1*13:02L HLA-DRB1*04:04L HLA-DRB1*08:04L HLA-DPA1*01:03-B1*03:01L HLA-DRB1*11:04L HLA-DQA1*01:01-B1*05:01L HLA-DRB1*11:01L HLA-DRB1*04:10L HLA-DRB3*01:01L HLA-DPA1*02:01-B1*13:01L HLA-DRB1*14:54L
  REGION 1..12: note = CONT. FROM ABOVE: HLA-DRB1*07:01L HLA-DRB1*10:01L HLA-DRB1*08:03 L
MKYFVKIGPERT

SEQ ID NO: 14709 - protein, 14 aa, Severe acute respiratory syndrome coronavirus 2
  REGION 1..14: note = Table B: HLA-DRB1*13:02L HLA-DPA1*03:01-B1*04:02L HLA-DRB1*11:02L HLA-DRB1*11:03L HLA-DRB1*11:04L HLA-DRB1*14:02L HLA-DQA1*05:05-B1*03:19L HLA-DQA1*05:05-B1*03:116L HLA-DRB1*12:01L HLA-DRB3*01:01L HLA-DPA1*01:03-B1*02:01L
  REGION 1..14: note = CONT. FROM ABOVE: HLA-DRB1*08:02L HLA-DRB1*15:03L
SDTYACWHHSIGFD

SEQ ID NO: 14710 - protein, 12 aa, Severe acute respiratory syndrome coronavirus 2
  REGION 1..12: note = Table B: HLA-DRB1*13:02L HLA-DRB1*04:05L HLA-DRB1*01:02L HLA-DRB3*02:01L HLA-DPA1*01:03-B1*03:01L HLA-DRB1*14:01L HLA-DPA1*01:03-B1*04:02L HLA-DQA1*05:05-B1*03:01L
SIGFDYVYNPFM

SEQ ID NO: 14711 - protein, 13 aa, Severe acute respiratory syndrome coronavirus 2
  REGION 1..13: note = Table B: HLA-DRB1*13:02L HLA-DRB1*01:02L HLA-DRB1*08:04L HLA-DRB3*02:01L HLA-DPA1*01:03-B1*03:01L HLA-DRB1*03:01L HLA-DPA1*01:03-B1*04:02L HLA-DQA1*05:05-B1*03:01L HLA-DRB1*04:08L
NPFMIDVQQWGFT

SEQ ID NO: 14712 - protein, 13 aa, Severe acute respiratory syndrome coronavirus 2
  REGION 1..13: note = Table B: HLA-DRB1*13:02L HLA-DRB1*04:02L HLA-DRB1*08:04L HLA-DRB1*14:01L HLA-DRB1*14:17L
TGNLQSNHDLYCQ

SEQ ID NO: 14713 - protein, 14 aa, Severe acute respiratory syndrome coronavirus 2
  REGION 1..14: note = Table B: HLA-DRB1*13:02L HLA-DRB1*01:02L HLA-DRB1*08:04L HLA-DPA1*03:01-B1*04:02L HLA-DRB1*14:01L HLA-DRB3*01:01L HLA-DPA1*01:02-B1*04:01L HLA-DQA1*01:03-B1*06:01L HLA-DRB1*04:08L
GNLQSNHDLYCQVH

SEQ ID NO: 14714 - protein, 14 aa, Severe acute respiratory syndrome coronavirus 2
  REGION 1..14: note = Table B: HLA-DRB1*13:02L HLA-DPA1*01:03-B1*03:01L HLA-DRB1*11:04L HLA-DPA1*02:01-B1*13:01L HLA-DRB1*07:01L
GNAHVASCDAIMTR

SEQ ID NO: 14715 - protein, 13 aa, Severe acute respiratory syndrome coronavirus 2
  REGION 1..13: note = Table B: HLA-DRB1*13:02L HLA-DRB1*04:04L HLA-DRB1*01:02L HLA-DRB4*03:01NL HLA-DRB1*08:04L HLA-DPA1*01:03-B1*03:01L HLA-DRB1*08:01L HLA-DRB1*04:10L HLA-DPA1*01:03-B1*04:02L HLA-DRB1*12:01L HLA-DRB1*14:54L HLA-DQA1*05:05-B1*03:01L
  REGION 1..13: note = CONT. FROM ABOVE: HLA-DRB1*04:08L
YPIIGDELKINAA

SEQ ID NO: 14716 - protein, 13 aa, Severe acute respiratory syndrome coronavirus 2
  REGION 1..13: note = Table B: HLA-DRB1*13:02L HLA-DRB1*13:03L HLA-DRB1*04:05L HLA-DRB1*11:03L
ELKINAACRKVQH

SEQ ID NO: 14717 - protein, 14 aa, Severe acute respiratory syndrome coronavirus 2
  REGION 1..14: note = Table B: HLA-DRB1*13:02L HLA-DRB1*04:04L HLA-DRB1*04:05L HLA-DRB1*08:04L HLA-DPA1*01:03-B1*03:01L HLA-DRB1*11:03L HLA-DRB1*11:04L HLA-DRB1*11:01L HLA-DRB3*01:01L HLA-DPA1*02:01-B1*13:01L HLA-DPA1*03:01-B1*105:01L
  REGION 1..14: note = CONT. FROM ABOVE: HLA-DPA1*01:03-B1*02:01L HLA-DRB1*07:01L HLA-D RB1*04:08M HLA-DRB1*08:03L HLA-DRB1*15:03L
VQHMVVKAALLADK

SEQ ID NO: 14718 - protein, 12 aa, Severe acute respiratory syndrome coronavirus 2
  REGION 1..12: note = Table B: HLA-DRB1*13:02L HLA-DRB1*08:04L HLA-DPA1*01:03-B1*03:01L HLA-DRB1*11:04L HLA-DRB1*08:01L HLA-DRB1*11:01L HLA-DRB3*01:01L HLA-DPA1*01:03-B1*02:01L
AALLADKFPVLH

SEQ ID NO: 14719 - protein, 12 aa, Severe acute respiratory syndrome coronavirus 2
  REGION 1..12: note = Table B: HLA-DRB1*13:02L HLA-DRB1*04:04L HLA-DRB1*01:02L HLA-DRB1*08:04L HLA-DRB1*08:77L HLA-DRB1*14:01L HLA-DRB1*11:04L HLA-DQA1*05:01-B1*02:01L HLA-DRB1*04:10L HLA-DRB3*01:01L HLA-DPA1*02:01-B1*13:01L HLA-DRB1*10:01L
FPVLHDIGNPKA

SEQ ID NO: 14720 - protein, 14 aa, Severe acute respiratory syndrome coronavirus 2
  REGION 1..14: note = Table B: HLA-DRB1*13:02L HLA-DRB1*13:03L HLA-DRB1*01:03L HLA-DRB1*04:02L HLA-DRB1*04:04L HLA-DRB1*04:05L HLA-DRB1*01:02L HLA-DRB4*03:01NL HLA-DRB1*08:04L HLA-DRB1*08:77L HLA-DRB3*02:01L HLA-DPA1*01:03-B1*03:01L HLA-DPA1*03:01-B1*04:02L
  REGION 1..14: note = CONT. FROM ABOVE: HLA-DRB1*14:01L HLA-DRB1*11:03L HLA-DRB1*11:04 L HLA-DRB1*14:02L HLA-DQA1*01:01-B1*05:01L HLA-DRB1*08:01L HLA-D RB1*11:01L HLA-DQA1*01-B1*05L HLA-DQA1*05:01-B1*02:01L HLA-DPA1* 01:03-B1*04:01L HLA-DRB1*04:10L HLA-DRB1*09:01L
  REGION 1..14: note = CONT. FROM ABOVE: HLA-DPA1*01:03-B1*04:02L HLA-DRB1*12:01M HLA-D RB1*12:02L HLA-DRB3*01:01L HLA-DPA1*02:01-B1*13:01L HLA-DRB1*14: 54L HLA-DPA1*01:03-B1*02:01L HLA-DPA1*01:03-B1*104:01L HLA-DRB1* 14:17L HLA-DPA1*01:02-B1*04:01L HLA-DRB1*07:01L HLA-DRB1*10:01L
  REGION 1..14: note = CONT. FROM ABOVE: HLA-DRB1*16:01L HLA-DRB1*04:08L HLA-DRB1*08:02 L HLA-DRB1*08:03L HLA-DRB1*15:03L
NPKAIKCVPQADVE

SEQ ID NO: 14721 - protein, 14 aa, Severe acute respiratory syndrome coronavirus 2
  REGION 1..14: note = Table B: HLA-DRB1*13:02L HLA-DRB1*01:03L HLA-DRB1*04:05L HLA-DRB1*01:02L HLA-DPA1*02:01-B1*13:01L HLA-DQA1*03:01-B1*03:02L HLA-DQA1*02:01-B1*03:03L
DAQPCSDKAYKIEE

SEQ ID NO: 14722 - protein, 14 aa, Severe acute respiratory syndrome coronavirus 2
  REGION 1..14: note = Table B: HLA-DRB1*13:02L HLA-DRB1*08:01L HLA-DPA1*01:03-B1*02:01L
KAYKIEELFYSYAT

SEQ ID NO: 14723 - protein, 14 aa, Severe acute respiratory syndrome coronavirus 2
  REGION 1..14: note = Table B: HLA-DRB1*13:02L HLA-DRB1*01:02L HLA-DRB1*08:04L HLA-DRB1*08:01L HLA-DRB1*12:01L HLA-DPA1*01:03-B1*02:01L HLA-DRB1*04:08L
AYKIEELFYSYATH

SEQ ID NO: 14724 - protein, 14 aa, Severe acute respiratory syndrome coronavirus 2
  REGION 1..14: note = Table B: HLA-DRB1*13:02L HLA-DRB1*08:04L HLA-DPA1*03:01-B1*04:02L HLA-DRB3*01:01L HLA-DQA1*05:05-B1*03:01L
FYSYATHSDKFTDG

SEQ ID NO: 14725 - protein, 13 aa, Severe acute respiratory syndrome coronavirus 2
  REGION 1..13: note = Table B: HLA-DRB1*13:02L HLA-DRB1*04:05L
NVDRYPANSIVCR

SEQ ID NO: 14726 - protein, 14 aa, Severe acute respiratory syndrome coronavirus 2
  REGION 1..14: note = Table B: HLA-DRB1*13:02L HLA-DRB1*04:04L HLA-DRB1*04:05L HLA-DQA1*01:02-B1*06:02L HLA-DPA1*01:03-B1*03:01L HLA-DPA1*03:01-B1*105:01L HLA-DPA1*01:03-B1*104:01L HLA-DRB1*07:01L HLA-DRB1*04:08L HLA-DRB1*15:03L
IVCRFDTRVLSNLN

SEQ ID NO: 14727 - protein, 13 aa, Severe acute respiratory syndrome coronavirus 2
  REGION 1..13: note = Table B: HLA-DRB1*13:02L HLA-DRB1*13:03L HLA-DRB1*04:05L HLA-DQA1*01:02-B1*06:02L HLA-DRB1*08:04L HLA-DRB1*11:04L HLA-DRB1*11:01L HLA-DRB1*12:01L HLA-DRB1*04:08L
GSLYVNKHAFHTP

SEQ ID NO: 14728 - protein, 13 aa, Severe acute respiratory syndrome coronavirus 2
  REGION 1..13: note = Table B: HLA-DRB1*13:02L HLA-DRB1*04:05L HLA-DRB1*11:03L HLA-DRB3*01:01L HLA-DRB1*08:03L HLA-DQA1*02:01-B1*03:03L
SLYVNKHAFHTPA

SEQ ID NO: 14729 - protein, 13 aa, Severe acute respiratory syndrome coronavirus 2
  REGION 1..13: note = Table B: HLA-DRB1*13:02L HLA-DRB1*01:03L HLA-DRB1*04:04L HLA-DRB1*01:01L HLA-DPA1*01:03-B1*03:01L HLA-DQA1*01:01-B1*05:01L HLA-DRB1*11:01L HLA-DRB1*04:10L HLA-DRB3*01:01L HLA-DPA1*01:03-B1*104:01L
  REGION 1..13: note = CONT. FROM ABOVE: HLA-DPA1*01:02-B1*04:01L HLA-DRB1*07:01L HLA-D RB1*04:08L HLA-DRB1*15:03L
VNKHAFHTPAFDK

SEQ ID NO: 14730 - protein, 14 aa, Severe acute respiratory syndrome coronavirus 2
  REGION 1..14: note = Table B: HLA-DRB1*13:02L HLA-DRB1*04:04L HLA-DPA1*01:03-B1*03:01L
NKHAFHTPAFDKSA

SEQ ID NO: 14731 - protein, 16 aa, Severe acute respiratory syndrome coronavirus 2
  REGION 1..16: note = Table B: HLA-DRB1*13:02L HLA-DRB1*03:01L HLA-DRB1*11:01L HLA-DQA1*05:05-B1*03:19L
PFFYYSDSPCESHGKQ

SEQ ID NO: 14732 - protein, 13 aa, Severe acute respiratory syndrome coronavirus 2
  REGION 1..13: note = Table B: HLA-DRB1*13:02L HLA-DRB1*13:03L HLA-DRB1*01:03L HLA-DRB1*04:04L HLA-DQA1*01:02-B1*06:02L HLA-DRB1*01:02L HLA-DRB4*03:01NL HLA-DRB1*08:04L HLA-DPA1*01:03-B1*03:01L HLA-DPA1*03:01-B1*04:02L HLA-DRB1*04:10L HLA-DRB1*12:01L
  REGION 1..13: note = CONT. FROM ABOVE: HLA-DPA1*02:01-B1*13:01L HLA-DPA1*03:01-B1*105 :01L HLA-DPA1*01:02-B1*04:01L HLA-DQA1*01:03-B1*06:01L HLA-DRB1* 04:08L HLA-DQA1*02:01-B1*03:03L
GKQVVSDIDYVPL

SEQ ID NO: 14733 - protein, 13 aa, Severe acute respiratory syndrome coronavirus 2
  REGION 1..13: note = Table B: HLA-DRB1*13:02L
DYVPLKSATCITR

SEQ ID NO: 14734 - protein, 13 aa, Severe acute respiratory syndrome coronavirus 2
  REGION 1..13: note = Table B: HLA-DRB1*13:02L HLA-DRB1*04:05L HLA-DRB3*01:01L
GGAVCRHHANEYR

SEQ ID NO: 14735 - protein, 13 aa, Severe acute respiratory syndrome coronavirus 2
  REGION 1..13: note = Table B: HLA-DRB1*13:02L HLA-DRB1*08:04L HLA-DRB1*14:01L HLA-DRB1*08:01L
NEYRLYLDAYNMM

SEQ ID NO: 14736 - protein, 14 aa, Severe acute respiratory syndrome coronavirus 2
  REGION 1..14: note = Table B: HLA-DRB1*13:02L HLA-DRB1*01:03L HLA-DRB1*04:05L HLA-DRB1*01:02L HLA-DPA1*01:03-B1*02:01L HLA-DRB1*04:08L
RLYLDAYNMMISAG

SEQ ID NO: 14737 - protein, 12 aa, Severe acute respiratory syndrome coronavirus 2
  REGION 1..12: note = Table B: HLA-DRB1*13:02L HLA-DRB1*04:02L HLA-DRB1*04:05L HLA-DRB1*08:04L HLA-DRB3*02:01L HLA-DRB1*11:04L HLA-DRB1*11:01L HLA-DPA1*01:03-B1*104:01L HLA-DQA1*05:05-B1*03:01L
SLWVYKQFDTYN

SEQ ID NO: 14738 - protein, 12 aa, Severe acute respiratory syndrome coronavirus 2
  REGION 1..12: note = Table B: HLA-DRB1*13:02L HLA-DRB3*02:01L HLA-DPA1*01:03-B1*104:01L HLA-DQA1*05:05-B1*03:01L
WVYKQFDTYNLW

SEQ ID NO: 14739 - protein, 11 aa, Severe acute respiratory syndrome coronavirus 2
  REGION 1..11: note = Table B: HLA-DRB1*13:02L HLA-DRB1*13:03L HLA-DRB1*04:02L HLA-DRB4*03:01NL HLA-DRB1*08:01L HLA-DRB5*01:01L HLA-DRB1*12:01L HLA-DQA1*05:05-B1*03:01L HLA-DRB1*14:17L HLA-DRB1*16:01L HLA-DQA1*01:03-B1*06:01L HLA-DQA1*02:01-B1*03:03L
DTYNLWNTFTR

SEQ ID NO: 14740 - protein, 13 aa, Severe acute respiratory syndrome coronavirus 2
  REGION 1..13: note = Table B: HLA-DRB1*13:02L HLA-DRB1*13:03L HLA-DRB1*01:03L HLA-DRB1*01:02L HLA-DRB1*11:02L HLA-DRB1*11:04L HLA-DQA1*05:05-B1*03:19L HLA-DQA1*05:05-B1*03:116L HLA-DPA1*01:03-B1*02:01L HLA-DQA1*05:05-B1*03:01L
  REGION 1..13: note = CONT. FROM ABOVE: HLA-DRB1*16:01L HLA-DRB1*08:02L HLA-DRB1*08:03 L HLA-DRB1*15:03L
NLWNTFTRLQSLE

SEQ ID NO: 14741 - protein, 13 aa, Severe acute respiratory syndrome coronavirus 2
  REGION 1..13: note = Table B: HLA-DRB1*13:02L HLA-DRB1*13:03L HLA-DRB1*04:02L HLA-DRB1*04:04L HLA-DRB1*04:05L HLA-DRB4*03:01NL HLA-DRB1*08:04L HLA-DRB1*08:77L HLA-DRB3*02:01L HLA-DRB1*11:03L HLA-DRB1*11:04L HLA-DRB1*14:02L HLA-DRB1*11:01L HLA-DRB1*09:01L HLA-DRB3*01:01L
  REGION 1..13: note = CONT. FROM ABOVE: HLA-DRB1*14:54L HLA-DPA1*01:03-B1*104:01L HLA- DQA1*05:05-B1*03:01L HLA-DRB1*14:17L HLA-DRB1*07:01L HLA-DRB1*10 :01L HLA-DRB1*08:03L
LQSLENVAFNVVN

SEQ ID NO: 14742 - protein, 10 aa, Severe acute respiratory syndrome coronavirus 2
  REGION 1..10: note = Table B: HLA-DRB1*13:02L HLA-DRB1*13:03L HLA-DRB1*01:01L HLA-DRB4*03:01NL HLA-DRB1*11:04L HLA-DRB1*08:01L HLA-DRB5*01:01L HLA-DPA1*01:03-B1*04:02L HLA-DRB1*12:01L HLA-DRB1*12:02L HLA-DQA1*03:01-B1*03:02L HLA-DQA1*05:05-B1*03:01L
  REGION 1..10: note = CONT. FROM ABOVE: HLA-DQA1*01:03-B1*06:01L HLA-DQA1*02:01-B1*03: 03L HLA-DRB1*15:01L
ENVAFNVVNK

SEQ ID NO: 14743 - protein, 12 aa, Severe acute respiratory syndrome coronavirus 2
  REGION 1..12: note = Table B: HLA-DRB1*13:02L HLA-DRB1*11:03L HLA-DRB1*11:04L HLA-DRB1*11:01L HLA-DRB1*12:01L HLA-DRB1*04:08L HLA-DRB1*08:03L
AFNVVNKGHFDG

SEQ ID NO: 14744 - protein, 12 aa, Severe acute respiratory syndrome coronavirus 2
  REGION 1..12: note = Table B: HLA-DRB1*13:02L HLA-DRB1*13:03L HLA-DRB1*01:03L HLA-DRB1*04:04L HLA-DRB1*04:05L HLA-DRB4*03:01NL HLA-DRB1*08:04L HLA-DRB1*08:77L HLA-DRB3*02:01L HLA-DPA1*01:03-B1*03:01L HLA-DRB1*03:01L HLA-DRB1*11:03L HLA-DRB1*11:04L HLA-DRB1*14:02L
  REGION 1..12: note = CONT. FROM ABOVE: HLA-DRB1*08:01L HLA-DRB1*11:01L HLA-DQA1*01-B1 *05L HLA-DPA1*01:03-B1*04:01L HLA-DRB1*04:10L HLA-DRB1*09:01L HL A-DPA1*01:03-B1*04:02L HLA-DRB1*12:02L HLA-DRB3*01:01L HLA-DPA1* 02:01-B1*13:01L HLA-DRB1*14:54L HLA-DPA1*01:03-B1*02:01L
  REGION 1..12: note = CONT. FROM ABOVE: HLA-DQA1*05:05-B1*03:01L HLA-DRB1*07:01L HLA-D RB1*10:01L HLA-DRB1*04:08L HLA-DRB1*08:03L
IINNTVYTKVDG

SEQ ID NO: 14745 - protein, 11 aa, Severe acute respiratory syndrome coronavirus 2
  REGION 1..11: note = Table B: HLA-DRB1*13:02L HLA-DRB1*01:03L HLA-DRB1*04:04L HLA-DQA1*01:02-B1*06:02L HLA-DRB1*01:02L HLA-DRB1*08:04L HLA-DRB1*08:77L HLA-DRB3*02:01L HLA-DPA1*01:03-B1*03:01L HLA-DPA1*03:01-B1*04:02L HLA-DRB1*14:01L HLA-DRB1*11:03L
  REGION 1..11: note = CONT. FROM ABOVE: HLA-DRB1*11:04L HLA-DRB1*14:02L HLA-DQA1*01:01 -B1*05:01L HLA-DRB1*08:01L HLA-DRB5*01:01L HLA-DQA1*05:05-B1*03: 19L HLA-DPA1*01:03-B1*04:01L HLA-DRB1*09:01L HLA-DRB1*12:02L HLA -DPA1*02:01-B1*13:01L HLA-DPA1*03:01-B1*105:01L
  REGION 1..11: note = CONT. FROM ABOVE: HLA-DQA1*05:05-B1*03:01L HLA-DRB1*07:01L HLA-D RB1*10:01L HLA-DRB1*04:08L HLA-DRB1*08:03L HLA-DRB1*15:03L
VYTKVDGVDVE

SEQ ID NO: 14746 - protein, 13 aa, Severe acute respiratory syndrome coronavirus 2
  REGION 1..13: note = Table B: HLA-DRB1*13:02L HLA-DRB1*08:04L HLA-DPA1*03:01-B1*04:02L HLA-DQA1*05:01-B1*02:01L HLA-DRB1*12:02L HLA-DPA1*01:02-B1*04:01L
DVELFENKTTLPV

SEQ ID NO: 14747 - protein, 13 aa, Severe acute respiratory syndrome coronavirus 2
  REGION 1..13: note = Table B: HLA-DRB1*13:02L HLA-DRB1*13:03L HLA-DRB1*01:03L HLA-DQA1*01:02-B1*06:02L HLA-DRB1*01:02L HLA-DRB1*08:04L HLA-DRB1*11:03L HLA-DRB1*11:04L HLA-DRB1*08:01L HLA-DRB1*11:01L HLA-DRB1*12:01L HLA-DRB3*01:01L HLA-DRB1*16:01L HLA-DRB1*04:08L
  REGION 1..13: note = CONT. FROM ABOVE: HLA-DRB1*15:03L
VAFELWAKRNIKP

SEQ ID NO: 14748 - protein, 13 aa, Severe acute respiratory syndrome coronavirus 2
  REGION 1..13: note = Table B: HLA-DRB1*13:02L HLA-DRB1*13:03L HLA-DRB1*04:04L HLA-DQA1*01:02-B1*06:02L HLA-DRB1*01:01L HLA-DPA1*01:03-B1*03:01L HLA-DRB1*11:01L HLA-DRB3*01:01L HLA-DPA1*01:03-B1*104:01L HLA-DRB1*07:01L HLA-DRB1*15:03L
WAKRNIKPVPEVK

SEQ ID NO: 14749 - protein, 12 aa, Severe acute respiratory syndrome coronavirus 2
  REGION 1..12: note = Table B: HLA-DRB1*13:02L HLA-DRB1*07:01L HLA-DRB1*04:08L
RNIKPVPEVKIL

SEQ ID NO: 14750 - protein, 12 aa, Severe acute respiratory syndrome coronavirus 2
  REGION 1..12: note = Table B: HLA-DRB1*13:02L
NIKPVPEVKILN

SEQ ID NO: 14751 - protein, 12 aa, Severe acute respiratory syndrome coronavirus 2
  REGION 1..12: note = Table B: HLA-DRB1*13:02L HLA-DRB1*14:01L HLA-DRB1*12:01L HLA-DRB1*15:03L
KILNNLGVDIAA

SEQ ID NO: 14752 - protein, 12 aa, Severe acute respiratory syndrome coronavirus 2
  REGION 1..12: note = Table B: HLA-DRB1*13:02L HLA-DRB1*04:05L HLA-DRB1*08:04L HLA-DRB3*02:01L HLA-DPA1*03:01-B1*04:02L HLA-DRB1*14:01L HLA-DRB1*14:02L HLA-DRB1*08:01L HLA-DRB1*04:10L HLA-DPA1*01:03-B1*04:02L HLA-DRB1*12:02L
  REGION 1..12: note = CONT. FROM ABOVE: HLA-DPA1*02:01-B1*13:01L HLA-DRB1*14:54L HLA-D RB1*04:08L
DIAANTVIWDYK

SEQ ID NO: 14753 - protein, 12 aa, Severe acute respiratory syndrome coronavirus 2
  REGION 1..12: note = Table B: HLA-DRB1*13:02L HLA-DRB1*04:05L HLA-DQA1*01:02-B1*06:02L HLA-DRB1*01:02L HLA-DRB4*03:01NL HLA-DRB1*08:04L HLA-DRB1*11:04L HLA-DRB1*08:01L HLA-DQA1*01-B1*05L HLA-DRB1*04:10L HLA-DRB1*12:01L
  REGION 1..12: note = CONT. FROM ABOVE: HLA-DRB3*01:01L HLA-DQA1*03:01-B1*03:02L HLA-D RB1*14:54L HLA-DPA1*01:02-B1*04:01L HLA-DRB1*04:08L HLA-DRB1*08: 03L HLA-DQA1*02:01-B1*03:03L HLA-DRB1*15:03L
TVIWDYKRDAPA

SEQ ID NO: 14754 - protein, 12 aa, Severe acute respiratory syndrome coronavirus 2
  REGION 1..12: note = Table B: HLA-DRB1*13:02L HLA-DQA1*01:02-B1*06:02L HLA-DRB1*01:02L HLA-DRB1*08:04L HLA-DRB1*11:04L HLA-DRB1*11:01L HLA-DRB1*04:10L HLA-DRB1*12:01L HLA-DRB3*01:01L HLA-DRB1*08:03L HLA-DQA1*02:01-B1*03:03L
VIWDYKRDAPAH

SEQ ID NO: 14755 - protein, 10 aa, Severe acute respiratory syndrome coronavirus 2
  REGION 1..10: note = Table B: HLA-DRB1*13:02L HLA-DRB1*14:01L HLA-DRB1*16:01L
YKRDAPAHIS

SEQ ID NO: 14756 - protein, 13 aa, Severe acute respiratory syndrome coronavirus 2
  REGION 1..13: note = Table B: HLA-DRB1*13:02L HLA-DRB1*13:03L HLA-DRB1*01:03L HLA-DRB1*04:04L HLA-DRB1*04:05L HLA-DRB1*01:02L HLA-DRB4*03:01NL HLA-DPA1*03:01-B1*04:02L HLA-DRB1*14:01L HLA-DRB1*08:01L HLA-DRB1*04:10L HLA-DRB1*12:01L HLA-DRB1*12:02L
  REGION 1..13: note = CONT. FROM ABOVE: HLA-DPA1*02:01-B1*13:01L HLA-DPA1*03:01-B1*105 :01L HLA-DRB1*14:54L HLA-DRB1*14:17L HLA-DRB1*04:08L HLA-DRB1*08 :03L HLA-DRB1*15:01L
APLTVFFDGRVDG

SEQ ID NO: 14757 - protein, 12 aa, Severe acute respiratory syndrome coronavirus 2
  REGION 1..12: note = Table B: HLA-DRB1*13:02L HLA-DRB1*13:03L HLA-DRB1*01:03L HLA-DRB1*04:05L HLA-DRB1*01:02L HLA-DRB4*03:01NL HLA-DRB1*08:04L HLA-DRB3*02:01L HLA-DPA1*01:03-B1*03:01L HLA-DPA1*03:01-B1*04:02L HLA-DRB1*03:01L HLA-DRB1*14:01L
  REGION 1..12: note = CONT. FROM ABOVE: HLA-DRB1*14:02L HLA-DQA1*01:01-B1*05:01L HLA-D RB1*08:01L HLA-DRB1*04:10L HLA-DPA1*01:03-B1*04:02L HLA-DRB1*12: 01L HLA-DRB3*01:01L HLA-DPA1*02:01-B1*13:01L HLA-DRB1*14:54L HLA -DRB1*14:17L HLA-DPA1*01:02-B1*04:01L HLA-DRB1*16:01L
  REGION 1..12: note = CONT. FROM ABOVE: HLA-DRB1*04:08L HLA-DRB1*08:03L HLA-DRB1*15:03 L
VFFDGRVDGQVD

SEQ ID NO: 14758 - protein, 15 aa, Severe acute respiratory syndrome coronavirus 2
  REGION 1..15: note = Table B: HLA-DRB1*13:02L HLA-DRB1*04:04L HLA-DPA1*01:03-B1*104:01L HLA-DRB1*07:01L
RNARNGVLITEGSVK

SEQ ID NO: 14759 - protein, 14 aa, Severe acute respiratory syndrome coronavirus 2
  REGION 1..14: note = Table B: HLA-DRB1*13:02L HLA-DRB1*08:04L HLA-DRB1*14:01L HLA-DRB1*11:03L HLA-DRB1*14:02L HLA-DQA1*01:01-B1*05:01L HLA-DRB1*08:01L HLA-DRB1*11:01L HLA-DQA1*01-B1*05L HLA-DRB1*09:01L HLA-DRB1*12:02L HLA-DRB3*01:01L
  REGION 1..14: note = CONT. FROM ABOVE: HLA-DPA1*02:01-B1*13:01L HLA-DPA1*01:03-B1*104 :01L HLA-DRB1*07:01L
EGSVKGLQPSVGPK

SEQ ID NO: 14760 - protein, 12 aa, Severe acute respiratory syndrome coronavirus 2
  REGION 1..12: note = Table B: HLA-DRB1*13:02L HLA-DRB1*01:02L HLA-DRB1*14:01L HLA-DQA1*05:05-B1*03:19L HLA-DQA1*05:01-B1*02:01L HLA-DRB1*12:01L HLA-DRB1*12:02L HLA-DRB1*14:54L HLA-DQA1*05:05-B1*03:01L HLA-DRB1*16:01L HLA-DRB1*15:03L
GLQPSVGPKQAS

SEQ ID NO: 14761 - protein, 16 aa, Severe acute respiratory syndrome coronavirus 2
  REGION 1..16: note = Table B: HLA-DRB1*13:02L HLA-DPA1*01:03-B1*03:01L HLA-DQA1*05:01-B1*02:01L HLA-DRB1*12:01L HLA-DPA1*02:01-B1*13:01L HLA-DPA1*03:01-B1*105:01L HLA-DPA1*01:03-B1*104:01L HLA-DRB1*15:03L
GPKQASLNGVTLIGEA

SEQ ID NO: 14762 - protein, 13 aa, Severe acute respiratory syndrome coronavirus 2
  REGION 1..13: note = Table B: HLA-DRB1*13:02L HLA-DRB1*04:04L HLA-DRB1*08:04L HLA-DRB3*02:01L HLA-DQA1*01:01-B1*05:01L HLA-DRB1*08:01L HLA-DRB1*04:10L HLA-DPA1*01:03-B1*02:01L
VTLIGEAVKTQFN

SEQ ID NO: 14763 - protein, 16 aa, Severe acute respiratory syndrome coronavirus 2
  REGION 1..16: note = Table B: HLA-DRB1*13:02L HLA-DRB3*01:01L
IGEAVKTQFNYYKKVD

SEQ ID NO: 14764 - protein, 13 aa, Severe acute respiratory syndrome coronavirus 2
  REGION 1..13: note = Table B: HLA-DRB1*13:02L HLA-DRB1*12:01L HLA-DRB3*01:01L HLA-DPA1*02:01-B1*13:01L HLA-DRB1*14:54L HLA-DRB1*15:03L
VKTQFNYYKKVDG

SEQ ID NO: 14765 - protein, 14 aa, Severe acute respiratory syndrome coronavirus 2
  REGION 1..14: note = Table B: HLA-DRB1*13:02L HLA-DRB1*04:04L HLA-DRB1*08:04L HLA-DRB1*11:04L HLA-DRB1*11:01L HLA-DRB3*01:01L
YFTQSRNLQEFKPR

SEQ ID NO: 14766 - protein, 16 aa, Severe acute respiratory syndrome coronavirus 2
  REGION 1..16: note = Table B: HLA-DRB1*13:02L HLA-DRB3*01:01L HLA-DPA1*03:01-B1*105:01L
SRNLQEFKPRSQMEID

SEQ ID NO: 14767 - protein, 10 aa, Severe acute respiratory syndrome coronavirus 2
  REGION 1..10: note = Table B: HLA-DRB1*13:02L HLA-DRB1*13:03L HLA-DRB4*03:01NL HLA-DRB1*08:01L HLA-DRB5*01:01L HLA-DPA1*01:03-B1*04:02L HLA-DRB1*12:01L HLA-DQA1*03:01-B1*03:02M HLA-DQA1*05:05-B1*03:01L HLA-DRB1*14:17L
  REGION 1..10: note = CONT. FROM ABOVE: HLA-DQA1*01:03-B1*06:01L HLA-DQA1*02:01-B1*03: 03L
ELAMDEFIER

SEQ ID NO: 14768 - protein, 12 aa, Severe acute respiratory syndrome coronavirus 2
  REGION 1..12: note = Table B: HLA-DRB1*13:02L HLA-DRB1*13:03L HLA-DRB1*01:02L HLA-DRB1*08:04L HLA-DPA1*03:01-B1*04:02L HLA-DRB1*14:01L HLA-DRB1*11:04L HLA-DRB1*11:01L HLA-DRB1*12:01L HLA-DPA1*01:02-B1*04:01L HLA-DRB1*04:08L HLA-DRB1*08:03L
  REGION 1..12: note = CONT. FROM ABOVE: HLA-DRB1*15:03L
EFIERYKLEGYA

SEQ ID NO: 14769 - protein, 14 aa, Severe acute respiratory syndrome coronavirus 2
  REGION 1..14: note = Table B: HLA-DRB1*13:02L HLA-DRB1*08:03L
ERYKLEGYAFEHIV

SEQ ID NO: 14770 - protein, 14 aa, Severe acute respiratory syndrome coronavirus 2
  REGION 1..14: note = Table B: HLA-DRB1*13:02L HLA-DRB1*04:05L HLA-DRB1*08:04L HLA-DRB1*11:01L HLA-DPA1*01:03-B1*02:01L
YKLEGYAFEHIVYG

SEQ ID NO: 14771 - protein, 14 aa, Severe acute respiratory syndrome coronavirus 2
  REGION 1..14: note = Table B: HLA-DRB1*13:02L HLA-DRB1*08:04L HLA-DRB1*08:01L HLA-DRB1*10:01L
LEGYAFEHIVYGDF

SEQ ID NO: 14772 - protein, 14 aa, Severe acute respiratory syndrome coronavirus 2
  REGION 1..14: note = Table B: HLA-DRB1*13:02L
EGYAFEHIVYGDFS

SEQ ID NO: 14773 - protein, 14 aa, Severe acute respiratory syndrome coronavirus 2
  REGION 1..14: note = Table B: HLA-DRB1*13:02L HLA-DRB1*11:01L HLA-DRB3*01:01L
GYAFEHIVYGDFSH

SEQ ID NO: 14774 - protein, 14 aa, Severe acute respiratory syndrome coronavirus 2
  REGION 1..14: note = Table B: HLA-DRB1*13:02L
AFEHIVYGDFSHSQ

SEQ ID NO: 14775 - protein, 13 aa, Severe acute respiratory syndrome coronavirus 2
  REGION 1..13: note = Table B: HLA-DRB1*13:02L HLA-DRB1*04:04L HLA-DRB1*11:04L HLA-DRB3*01:01L
EHIVYGDFSHSQL

SEQ ID NO: 14776 - protein, 14 aa, Severe acute respiratory syndrome coronavirus 2
  REGION 1..14: note = Table B: HLA-DRB1*13:02L HLA-DRB3*01:01L
HIVYGDFSHSQLGG

SEQ ID NO: 14777 - protein, 12 aa, Severe acute respiratory syndrome coronavirus 2
  REGION 1..12: note = Table B: HLA-DRB1*13:02L HLA-DRB1*13:03L HLA-DRB1*04:05L HLA-DRB1*08:04L HLA-DPA1*01:03-B1*03:01L HLA-DRB1*14:01L HLA-DQA1*01:01-B1*05:01L HLA-DRB1*11:01L HLA-DPA1*02:01-B1*13:01L HLA-DPA1*01:03-B1*02:01L
  REGION 1..12: note = CONT. FROM ABOVE: HLA-DRB1*15:03L
GDFSHSQLGGLH

SEQ ID NO: 14778 - protein, 16 aa, Severe acute respiratory syndrome coronavirus 2
  REGION 1..16: note = Table B: HLA-DRB1*13:02L HLA-DRB1*08:04L HLA-DPA1*02:01-B1*13:01L
GLHLLIGLAKRFKESP

SEQ ID NO: 14779 - protein, 15 aa, Severe acute respiratory syndrome coronavirus 2
  REGION 1..15: note = Table B: HLA-DRB1*13:02L HLA-DRB1*01:03L HLA-DRB1*08:04L HLA-DRB1*11:04L HLA-DRB1*11:01L HLA-DRB1*04:08L
HLLIGLAKRFKESPF

SEQ ID NO: 14780 - protein, 14 aa, Severe acute respiratory syndrome coronavirus 2
  REGION 1..14: note = Table B: HLA-DRB1*13:02L HLA-DRB1*08:04L HLA-DRB1*11:04L HLA-DRB1*11:01L HLA-DRB3*01:01L HLA-DRB1*08:03L
LIGLAKRFKESPFE

SEQ ID NO: 14781 - protein, 15 aa, Severe acute respiratory syndrome coronavirus 2
  REGION 1..15: note = Table B: HLA-DRB1*13:02L
IGLAKRFKESPFELE

SEQ ID NO: 14782 - protein, 13 aa, Severe acute respiratory syndrome coronavirus 2
  REGION 1..13: note = Table B: HLA-DRB1*13:02L HLA-DRB1*13:03L HLA-DRB1*04:05L HLA-DRB1*14:01L HLA-DRB1*11:04L HLA-DRB1*11:01L HLA-DPA1*01:03-B1*04:02L HLA-DRB3*01:01L HLA-DQA1*03:01-B1*03:02L HLA-DPA1*01:03-B1*02:01L
  REGION 1..13: note = CONT. FROM ABOVE: HLA-DQA1*02:01-B1*03:03L
AKRFKESPFELED

SEQ ID NO: 14783 - protein, 13 aa, Severe acute respiratory syndrome coronavirus 2
  REGION 1..13: note = Table B: HLA-DRB1*13:02L HLA-DRB1*04:05L HLA-DRB1*14:02L HLA-DQA1*05:05-B1*03:19L HLA-DRB3*01:01L HLA-DRB1*08:03L
ESPFELEDFIPMD

SEQ ID NO: 14784 - protein, 12 aa, Severe acute respiratory syndrome coronavirus 2
  REGION 1..12: note = Table B: HLA-DRB1*13:02L HLA-DRB1*01:02L HLA-DRB1*08:04L HLA-DRB1*14:01L HLA-DRB1*14:02L HLA-DPA1*02:01-B1*13:01L
DLLLDDFVEIIK

SEQ ID NO: 14785 - protein, 11 aa, Severe acute respiratory syndrome coronavirus 2
  REGION 1..11: note = Table B: HLA-DRB1*13:02L HLA-DRB1*01:03L HLA-DRB1*01:02L HLA-DRB4*03:01NL HLA-DRB1*08:04L HLA-DRB3*02:01L HLA-DPA1*01:03-B1*03:01L HLA-DRB1*14:02L HLA-DQA1*05:05-B1*03:19L HLA-DPA1*01:03-B1*04:01L
  REGION 1..11: note = CONT. FROM ABOVE: HLA-DQA1*05:05-B1*03:116L HLA-DRB1*04:10L HLA- DPA1*01:03-B1*04:02L HLA-DRB1*12:01L HLA-DPA1*02:01-B1*13:01L HL A-DRB1*14:54L HLA-DQA1*05:05-B1*03:01L HLA-DRB1*04:08L HLA-DRB1* 08:03L
DFVEIIKSQDL

SEQ ID NO: 14786 - protein, 12 aa, Severe acute respiratory syndrome coronavirus 2
  REGION 1..12: note = Table B: HLA-DRB1*13:02L HLA-DRB1*01:03L HLA-DRB1*04:04L HLA-DRB1*08:77L HLA-DRB3*02:01L HLA-DPA1*01:03-B1*03:01L HLA-DPA1*03:01-B1*04:02L HLA-DRB1*14:02L HLA-DRB1*12:02L HLA-DQA1*05:05-B1*03:01L HLA-DRB1*04:08L
VEIIKSQDLSVV

SEQ ID NO: 14787 - protein, 10 aa, Severe acute respiratory syndrome coronavirus 2
  REGION 1..10: note = Table B: HLA-DRB1*13:02L HLA-DRB1*13:03L HLA-DRB1*01:01L HLA-DRB4*03:01NL HLA-DRB1*11:04L HLA-DRB1*08:01L HLA-DRB5*01:01L HLA-DRB1*12:01L HLA-DRB1*12:02L HLA-DRB3*01:01L HLA-DQA1*03:01-B1*03:02M HLA-DQA1*05:05-B1*03:01L
  REGION 1..10: note = CONT. FROM ABOVE: HLA-DRB1*14:17L HLA-DRB1*16:01L HLA-DQA1*02:01 -B1*03:03L
KSQDLSVVSK

SEQ ID NO: 14788 - protein, 15 aa, Severe acute respiratory syndrome coronavirus 2
  REGION 1..15: note = Table B: HLA-DRB1*13:02L
LSVVSKVVKVTIDYT

SEQ ID NO: 14789 - protein, 14 aa, Severe acute respiratory syndrome coronavirus 2
  REGION 1..14: note = Table B: HLA-DRB1*13:02L HLA-DRB1*08:04L HLA-DQA1*05:05-B1*03:01L
VVSKVVKVTIDYTE

SEQ ID NO: 14790 - protein, 11 aa, Severe acute respiratory syndrome coronavirus 2
  REGION 1..11: note = Table B: HLA-DRB1*13:02L HLA-DRB1*01:02L HLA-DRB3*02:01L HLA-DRB1*09:01L HLA-DQA1*05:05-B1*03:01L HLA-DRB1*04:08L
VTIDYTEISFM

SEQ ID NO: 14791 - protein, 14 aa, Severe acute respiratory syndrome coronavirus 2
  REGION 1..14: note = Table B: HLA-DRB1*13:02L HLA-DRB1*01:02L HLA-DRB1*12:01L HLA-DPA1*02:01-B1*13:01L HLA-DRB1*08:03L HLA-DRB1*15:03L
GHVETFYPKLQSSQ

SEQ ID NO: 14792 - protein, 13 aa, Severe acute respiratory syndrome coronavirus 2
  REGION 1..13: note = Table B: HLA-DRB1*13:02L HLA-DRB1*13:03L HLA-DRB1*01:03L HLA-DRB1*04:02L HLA-DRB1*04:05L HLA-DQA1*01:02-B1*06:02L HLA-DRB1*01:02L HLA-DRB1*08:04L HLA-DRB1*11:04L HLA-DRB1*08:01L HLA-DRB1*11:01L HLA-DRB1*12:01L HLA-DRB3*01:01L HLA-DRB1*14:54L
  REGION 1..13: note = CONT. FROM ABOVE: HLA-DPA1*01:02-B1*04:01L HLA-DRB1*16:01L HLA-D RB1*04:08L HLA-DRB1*15:03L
MPNLYKMQRMLLE

SEQ ID NO: 14793 - protein, 13 aa, Severe acute respiratory syndrome coronavirus 2
  REGION 1..13: note = Table B: HLA-DRB1*13:02L HLA-DRB1*13:03L HLA-DRB1*01:03L HLA-DRB1*04:02L HLA-DRB1*04:04L HLA-DRB1*04:05L HLA-DRB4*03:01NL HLA-DRB1*08:77L HLA-DRB3*02:01L HLA-DPA1*03:01-B1*04:02L HLA-DRB1*14:01L HLA-DRB1*11:03L HLA-DRB1*14:02L
  REGION 1..13: note = CONT. FROM ABOVE: HLA-DQA1*01-B1*05L HLA-DRB1*04:10L HLA-DRB1*09 :01L HLA-DRB1*12:02L HLA-DPA1*02:01-B1*13:01L HLA-DRB1*14:54L HL A-DPA1*01:03-B1*104:01L HLA-DPA1*01:02-B1*04:01L HLA-DRB1*07:01L HLA-DRB1*10:01L HLA-DRB1*04:08L
LNTLTLAVPYNMR

SEQ ID NO: 14794 - protein, 14 aa, Severe acute respiratory syndrome coronavirus 2
  REGION 1..14: note = Table B: HLA-DRB1*13:02L HLA-DRB1*11:04L HLA-DRB1*11:01L HLA-DRB1*12:01L
AVPYNMRVIHFGAG

SEQ ID NO: 14795 - protein, 15 aa, Severe acute respiratory syndrome coronavirus 2
  REGION 1..15: note = Table B: HLA-DRB1*13:02L HLA-DPA1*01:03-B1*03:01L HLA-DRB1*11:04L HLA-DRB1*11:01L HLA-DPA1*01:03-B1*04:02L HLA-DRB1*12:01L HLA-DRB3*01:01L HLA-DPA1*01:03-B1*02:01L HLA-DPA1*01:03-B1*104:01L HLA-DQA1*05:05-B1*03:01L
VPYNMRVIHFGAGSD

SEQ ID NO: 14796 - protein, 11 aa, Severe acute respiratory syndrome coronavirus 2
  REGION 1..11: note = Table B: HLA-DRB1*13:02L HLA-DRB1*01:03L HLA-DRB1*04:02L HLA-DRB1*04:05L HLA-DRB1*08:77L HLA-DPA1*03:01-B1*04:02L HLA-DRB1*12:01L HLA-DRB1*14:17L HLA-DQA1*02:01-B1*03:03L
NDFVSDADSTL

SEQ ID NO: 14797 - protein, 12 aa, Severe acute respiratory syndrome coronavirus 2
  REGION 1..12: note = Table B: HLA-DRB1*13:02L HLA-DRB1*01:01L HLA-DRB1*01:02L HLA-DRB1*08:04L HLA-DRB3*02:01L HLA-DPA1*01:03-B1*03:01L HLA-DRB1*03:01L HLA-DRB1*11:01L HLA-DRB5*01:01L HLA-DRB4*01:01L HLA-DRB1*09:01L HLA-DRB1*12:02L HLA-DRB3*01:01L
  REGION 1..12: note = CONT. FROM ABOVE: HLA-DPA1*03:01-B1*105:01L HLA-DRB1*08:03L HLA- DQA1*02:01-B1*03:03L HLA-DRB1*15:03L
DFVSDADSTLIG

SEQ ID NO: 14798 - protein, 15 aa, Severe acute respiratory syndrome coronavirus 2
  REGION 1..15: note = Table B: HLA-DRB1*13:02L HLA-DPA1*02:01-B1*13:01L
DADSTLIGDCATVHT

SEQ ID NO: 14799 - protein, 11 aa, Severe acute respiratory syndrome coronavirus 2
  REGION 1..11: note = Table B: HLA-DRB1*13:02L HLA-DRB1*01:03L HLA-DRB1*11:04L HLA-DRB1*11:01L
MYDPKTKNVTK

SEQ ID NO: 14800 - protein, 14 aa, Severe acute respiratory syndrome coronavirus 2
  REGION 1..14: note = Table B: HLA-DRB1*13:02L HLA-DRB1*13:03L HLA-DRB1*01:03L HLA-DRB1*04:05L HLA-DRB3*02:01L HLA-DPA1*01:03-B1*03:01L HLA-DQA1*05:01-B1*02:01L HLA-DPA1*02:01-B1*13:01L HLA-DPA1*03:01-B1*105:01L HLA-DPA1*01:03-B1*104:01L
  REGION 1..14: note = CONT. FROM ABOVE: HLA-DRB1*07:01L HLA-DRB1*16:01L HLA-DRB1*04:08 L HLA-DRB1*15:03L
IQQKLALGGSVAIK

SEQ ID NO: 14801 - protein, 11 aa, Severe acute respiratory syndrome coronavirus 2
  REGION 1..11: note = Table B: HLA-DRB1*13:02L HLA-DRB1*01:02L HLA-DPA1*03:01-B1*04:02L HLA-DRB1*14:01L HLA-DQA1*05:01-B1*02:01L HLA-DPA1*03:01-B1*105:01L HLA-DRB1*16:01L HLA-DRB1*15:03L
ALGGSVAIKIT

SEQ ID NO: 14802 - protein, 14 aa, Severe acute respiratory syndrome coronavirus 2
  REGION 1..14: note = Table B: HLA-DRB1*13:02L HLA-DRB1*04:04L HLA-DRB1*11:04L HLA-DRB3*01:01L
SVAIKITEHSWNAD

SEQ ID NO: 14803 - protein, 14 aa, Severe acute respiratory syndrome coronavirus 2
  REGION 1..14: note = Table B: HLA-DRB1*13:02L HLA-DPA1*01:03-B1*03:01L HLA-DPA1*03:01-B1*04:02L
VAIKITEHSWNADL

SEQ ID NO: 14804 - protein, 14 aa, Severe acute respiratory syndrome coronavirus 2
  REGION 1..14: note = Table B: HLA-DRB1*13:02L HLA-DRB1*08:01L
IKITEHSWNADLYK

SEQ ID NO: 14805 - protein, 15 aa, Severe acute respiratory syndrome coronavirus 2
  REGION 1..15: note = Table B: HLA-DRB1*13:02L HLA-DRB1*08:04L HLA-DRB1*14:01L HLA-DRB1*11:04L
EHSWNADLYKLMGHF

SEQ ID NO: 14806 - protein, 14 aa, Severe acute respiratory syndrome coronavirus 2
  REGION 1..14: note = Table B: HLA-DRB1*13:02L HLA-DRB1*14:02L HLA-DRB1*11:01L HLA-DPA1*01:03-B1*04:02L HLA-DQA1*05:05-B1*03:01L HLA-DRB1*04:08L
ADLYKLMGHFAWWT

SEQ ID NO: 14807 - protein, 12 aa, Severe acute respiratory syndrome coronavirus 2
  REGION 1..12: note = Table B: HLA-DRB1*13:02L HLA-DRB1*04:02L HLA-DRB4*03:01NL HLA-DRB3*02:01L HLA-DPA1*01:03-B1*03:01L HLA-DPA1*03:01-B1*04:02L HLA-DQA1*01-B1*05L HLA-DRB1*12:01L HLA-DRB1*12:02L HLA-DRB1*14:54L HLA-DQA1*05:05-B1*03:01L
  REGION 1..12: note = CONT. FROM ABOVE: HLA-DRB1*16:01L
VTNVNASSSEAF

SEQ ID NO: 14808 - protein, 14 aa, Severe acute respiratory syndrome coronavirus 2
  REGION 1..14: note = Table B: HLA-DRB1*13:02L
TNVNASSSEAFLIG

SEQ ID NO: 14809 - protein, 13 aa, Severe acute respiratory syndrome coronavirus 2
  REGION 1..13: note = Table B: HLA-DRB1*13:02L HLA-DRB1*04:08L
DGYVMHANYIFWR

SEQ ID NO: 14810 - protein, 14 aa, Severe acute respiratory syndrome coronavirus 2
  REGION 1..14: note = Table B: HLA-DRB1*13:02L HLA-DRB1*14:01L HLA-DRB1*04:08L
GYVMHANYIFWRNT

SEQ ID NO: 14811 - protein, 13 aa, Severe acute respiratory syndrome coronavirus 2
  REGION 1..13: note = Table B: HLA-DRB1*13:02L HLA-DRB1*04:02L HLA-DRB1*04:05L HLA-DRB1*08:77L HLA-DRB3*02:01L HLA-DPA1*01:03-B1*03:01L HLA-DRB1*14:17L
TNPIQLSSYSLFD

SEQ ID NO: 14812 - protein, 15 aa, Severe acute respiratory syndrome coronavirus 2
  REGION 1..15: note = Table B: HLA-DRB1*13:02L HLA-DRB1*01:03L HLA-DRB1*04:02L HLA-DRB1*04:04L HLA-DRB1*04:05L HLA-DRB1*08:04L HLA-DRB3*02:01L HLA-DRB1*14:02L HLA-DQA1*01:01-B1*05:01L HLA-DRB1*08:01L HLA-DRB1*04:10L HLA-DRB3*01:01L HLA-DPA1*01:03-B1*02:01L
  REGION 1..15: note = CONT. FROM ABOVE: HLA-DPA1*01:03-B1*104:01L HLA-DRB1*07:01L HLA- DRB1*04:08L HLA-DRB1*08:03L
NPIQLSSYSLFDMSK

SEQ ID NO: 14813 - protein, 14 aa, Severe acute respiratory syndrome coronavirus 2
  REGION 1..14: note = Table B: HLA-DRB1*13:02L HLA-DRB1*01:03L HLA-DRB1*08:04L HLA-DPA1*01:03-B1*04:01L HLA-DRB1*04:08L
LSSYSLFDMSKFPL

SEQ ID NO: 14814 - protein, 11 aa, Severe acute respiratory syndrome coronavirus 2
  REGION 1..11: note = Table B: HLA-DRB1*13:02L HLA-DRB1*13:03L HLA-DRB1*04:05L HLA-DQA1*01:02-B1*06:02L HLA-DRB1*01:02L HLA-DRB4*03:01NL HLA-DRB1*08:04L HLA-DRB1*11:04L HLA-DRB1*08:01L HLA-DRB1*11:01L HLA-DRB1*12:01L HLA-DRB3*01:01L HLA-DRB1*14:54L
  REGION 1..11: note = CONT. FROM ABOVE: HLA-DQA1*05:05-B1*03:01L HLA-DQA1*01:03-B1*06: 01L HLA-DRB1*04:08L
SLFDMSKFPLK

SEQ ID NO: 14815 - protein, 14 aa, Severe acute respiratory syndrome coronavirus 2
  REGION 1..14: note = Table B: HLA-DRB1*13:02L HLA-DRB1*01:03L HLA-DQA1*05:05-B1*03:01L HLA-DRB1*07:01L HLA-DRB1*04:08L
FPLKLRGTAVMSLK

SEQ ID NO: 14816 - protein, 11 aa, Severe acute respiratory syndrome coronavirus 2
  REGION 1..11: note = Table B: HLA-DRB1*13:02L HLA-DRB1*13:03L HLA-DRB1*04:05L HLA-DRB1*01:02L HLA-DRB4*03:01NL HLA-DRB1*08:77L HLA-DRB3*02:01L HLA-DPA1*03:01-B1*04:02L HLA-DQA1*01-B1*05L HLA-DRB1*04:10L HLA-DRB1*12:02L HLA-DQA1*05:05-B1*03:01L
  REGION 1..11: note = CONT. FROM ABOVE: HLA-DPA1*01:02-B1*04:01L HLA-DRB1*07:01L
AVMSLKEGQIN

SEQ ID NO: 14817 - protein, 13 aa, Severe acute respiratory syndrome coronavirus 2
  REGION 1..13: note = Table B: HLA-DRB1*13:02L HLA-DRB1*04:05L HLA-DQA1*01:02-B1*06:02L HLA-DRB1*11:04L HLA-DRB1*11:01L HLA-DRB1*04:08L
ILSLLSKGRLIIR

SEQ ID NO: 14818 - protein, 14 aa, Severe acute respiratory syndrome coronavirus 2
  REGION 1..14: note = Table B: HLA-DRB1*13:02L HLA-DQA1*01:02-B1*06:02L HLA-DRB1*04:08L HLA-DRB1*15:03L
LSLLSKGRLIIREN

SEQ ID NO: 14819 - protein, 14 aa, Severe acute respiratory syndrome coronavirus 2
  REGION 1..14: note = Table B: HLA-DRB1*13:02L HLA-DRB1*01:02L HLA-DRB1*04:08L HLA-DRB1*15:03L
SLLSKGRLIIRENN

SEQ ID NO: 14820 - protein, 13 aa, Severe acute respiratory syndrome coronavirus 2
  REGION 1..13: note = Table B: HLA-DRB1*13:02L HLA-DRB1*13:03L HLA-DRB1*04:04L HLA-DQA1*01:02-B1*06:02L HLA-DRB1*11:04L HLA-DRB1*11:01L HLA-DRB3*01:01L HLA-DPA1*02:01-B1*13:01L HLA-DRB1*14:17L HLA-DQA1*02:01-B1*03:03L
KGRLIIRENNRVV

SEQ ID NO: 14821 - protein, 13 aa, Severe acute respiratory syndrome coronavirus 2
  REGION 1..13: note = Table B: HLA-DRB1*13:02L HLA-DRB3*01:01L
GRLIIRENNRVVI

SEQ ID NO: 14822 - protein, 12 aa, Severe acute respiratory syndrome coronavirus 2
  REGION 1..12: note = Table B: HLA-DRB1*13:02L HLA-DRB1*01:03L HLA-DRB1*01:02L HLA-DRB1*14:01L HLA-DRB1*12:01L HLA-DRB1*16:01L
IRENNRVVISSD

SEQ ID NO: 14823 - protein, 14 aa, Severe acute respiratory syndrome coronavirus 2
  REGION 1..14: note = Table B: HLA-DRB1*13:02L HLA-DRB1*04:05L HLA-DRB1*01:02L HLA-DRB4*03:01NL HLA-DRB1*08:04L HLA-DRB3*02:01L HLA-DRB1*14:01L HLA-DRB1*11:03L HLA-DRB1*11:04L HLA-DRB1*08:01L HLA-DRB1*04:10L HLA-DRB1*09:01L HLA-DRB1*12:02L HLA-DRB3*01:01L HLA-DRB1*14:54L
  REGION 1..14: note = CONT. FROM ABOVE: HLA-DQA1*05:05-B1*03:01L HLA-DRB1*07:01L HLA-D RB1*04:08L HLA-DRB1*08:03L
LPPAYTNSFTRGVY

SEQ ID NO: 14824 - protein, 16 aa, Severe acute respiratory syndrome coronavirus 2
  REGION 1..16: note = Table B: HLA-DRB1*13:02L HLA-DRB1*04:05L HLA-DQA1*05:05-B1*03:01L HLA-DRB1*04:08L
PPAYTNSFTRGVYYPD

SEQ ID NO: 14825 - protein, 13 aa, Severe acute respiratory syndrome coronavirus 2
  REGION 1..13: note = Table B: HLA-DRB1*13:02L HLA-DRB1*04:04L HLA-DRB4*03:01NL HLA-DRB1*08:04L HLA-DPA1*01:03-B1*03:01L HLA-DPA1*03:01-B1*04:02L HLA-DRB1*11:04L HLA-DQA1*01:01-B1*05:01L HLA-DRB1*11:01L
  REGION 1..13: note = CONT. FROM ABOVE: HLA-DQA1*05:01-B1*02:01L HLA-DPA1*01:03-B1*04: 01L HLA-DRB1*04:10L HLA-DPA1*01:03-B1*04:02L HLA-DRB3*01:01L HLA -DPA1*02:01-B1*13:01L HLA-DRB1*14:54L HLA-DPA1*01:03-B1*02:01L H LA-DRB1*08:03L
TNSFTRGVYYPDK

SEQ ID NO: 14826 - protein, 10 aa, Severe acute respiratory syndrome coronavirus 2
  REGION 1..10: note = Table B: HLA-DRB1*13:02L HLA-DRB1*13:03L HLA-DRB1*04:02L HLA-DRB1*01:01L HLA-DRB4*03:01NL HLA-DRB3*02:01L HLA-DRB1*14:01L HLA-DRB1*11:04L HLA-DRB1*08:01L HLA-DRB5*01:01L HLA-DPA1*01:03-B1*04:02L HLA-DRB1*12:01L HLA-DRB1*12:02L
  REGION 1..10: note = CONT. FROM ABOVE: HLA-DQA1*03:01-B1*03:02M HLA-DQA1*05:05-B1*03: 01L HLA-DRB1*14:17L HLA-DRB1*16:01L HLA-DQA1*02:01-B1*03:03L HLA -DRB1*15:01L
GVYYPDKVFR

SEQ ID NO: 14827 - protein, 12 aa, Severe acute respiratory syndrome coronavirus 2
  REGION 1..12: note = Table B: HLA-DRB1*13:02L HLA-DRB1*04:05L HLA-DRB1*01:02L HLA-DRB1*08:04L HLA-DPA1*01:03-B1*03:01L HLA-DPA1*03:01-B1*04:02L HLA-DRB1*14:02L HLA-DRB1*08:01L HLA-DQA1*05:01-B1*02:01L HLA-DPA1*01:03-B1*04:02L
  REGION 1..12: note = CONT. FROM ABOVE: HLA-DRB1*12:01L HLA-DRB1*15:03L
VYYPDKVFRSSV

SEQ ID NO: 14828 - protein, 14 aa, Severe acute respiratory syndrome coronavirus 2
  REGION 1..14: note = Table B: HLA-DRB1*13:02L HLA-DRB1*13:03L HLA-DRB1*04:04L HLA-DRB1*08:04L HLA-DRB1*14:01L HLA-DRB1*14:02L
DKVFRSSVLHSTQD

SEQ ID NO: 14829 - protein, 10 aa, Severe acute respiratory syndrome coronavirus 2
  REGION 1..10: note = Table B: HLA-DRB1*13:02L HLA-DRB1*13:03L HLA-DRB1*01:01L HLA-DRB4*03:01NL HLA-DRB1*11:04L HLA-DRB1*08:01L HLA-DRB5*01:01L HLA-DRB1*12:01L HLA-DQA1*03:01-B1*03:02M HLA-DQA1*05:05-B1*03:01L
HVSGTNGTKR

SEQ ID NO: 14830 - protein, 13 aa, Severe acute respiratory syndrome coronavirus 2
  REGION 1..13: note = Table B: HLA-DRB1*13:02L HLA-DRB1*04:05L HLA-DQA1*01:02-B1*06:02L HLA-DRB1*01:02L HLA-DPA1*01:03-B1*03:01L HLA-DRB1*12:01L HLA-DPA1*02:01-B1*13:01L HLA-DQA1*03:01-B1*03:02L
  REGION 1..13: note = CONT. FROM ABOVE: HLA-DPA1*01:03-B1*104:01L HLA-DPA1*01:02-B1*04 :01L HLA-DRB1*16:01L HLA-DRB1*04:08L HLA-DQA1*02:01-B1*03:03L HL A-DRB1*15:03L
GTKRFDNPVLPFN

SEQ ID NO: 14831 - protein, 14 aa, Severe acute respiratory syndrome coronavirus 2
  REGION 1..14: note = Table B: HLA-DRB1*13:02L HLA-DPA1*01:03-B1*104:01L HLA-DRB1*15:03L
TKRFDNPVLPFNDG

SEQ ID NO: 14832 - protein, 13 aa, Severe acute respiratory syndrome coronavirus 2
  REGION 1..13: note = Table B: HLA-DRB1*13:02L HLA-DRB1*04:04L HLA-DRB1*08:01L HLA-DRB1*04:10L HLA-DRB1*14:54L
DNPVLPFNDGVYF

SEQ ID NO: 14833 - protein, 17 aa, Severe acute respiratory syndrome coronavirus 2
  REGION 1..17: note = Table B: HLA-DRB1*13:02L HLA-DRB1*08:04L HLA-DQA1*01:01-B1*05:01L HLA-DRB1*11:01L HLA-DPA1*01:03-B1*02:01L
NPVLPFNDGVYFASTEK

SEQ ID NO: 14834 - protein, 12 aa, Severe acute respiratory syndrome coronavirus 2
  REGION 1..12: note = Table B: HLA-DRB1*13:02L HLA-DRB1*04:04L HLA-DRB1*08:04L HLA-DRB1*08:77L HLA-DRB1*11:03L HLA-DRB1*11:04L HLA-DRB1*14:02L HLA-DRB5*01:01L HLA-DPA1*01:03-B1*04:01L HLA-DRB1*09:01L HLA-DRB1*12:02L HLA-DPA1*02:01-B1*13:01L
  REGION 1..12: note = CONT. FROM ABOVE: HLA-DPA1*01:03-B1*104:01L HLA-DRB1*07:01L HLA- DRB1*08:03L
DGVYFASTEKSN

SEQ ID NO: 14835 - protein, 12 aa, Severe acute respiratory syndrome coronavirus 2
  REGION 1..12: note = Table B: HLA-DRB1*13:02L HLA-DRB1*08:04L HLA-DRB1*14:02L HLA-DPA1*01:03-B1*04:01L HLA-DPA1*01:03-B1*104:01L
VYFASTEKSNII

SEQ ID NO: 14836 - protein, 14 aa, Severe acute respiratory syndrome coronavirus 2
  REGION 1..14: note = Table B: HLA-DRB1*13:02L HLA-DRB1*04:05L HLA-DRB1*08:01L HLA-DPA1*01:03-B1*02:01L HLA-DPA1*01:03-B1*104:01L
SNIIRGWIFGTTLD

SEQ ID NO: 14837 - protein, 11 aa, Severe acute respiratory syndrome coronavirus 2
  REGION 1..11: note = Table B: HLA-DRB1*13:02L HLA-DRB1*04:04L HLA-DQA1*01:02-B1*06:02L HLA-DRB1*01:02L HLA-DRB1*08:77L HLA-DPA1*01:03-B1*03:01L HLA-DPA1*03:01-B1*04:02L HLA-DRB1*14:01L HLA-DRB1*11:03L HLA-DRB1*11:04L HLA-DRB1*14:02L
  REGION 1..11: note = CONT. FROM ABOVE: HLA-DQA1*01:01-B1*05:01L HLA-DRB5*01:01L HLA-D RB1*12:02L HLA-DPA1*03:01-B1*105:01L HLA-DPA1*01:02-B1*04:01L HL A-DRB1*10:01L HLA-DRB1*15:03L
IFGTTLDSKTQ

SEQ ID NO: 14838 - protein, 13 aa, Severe acute respiratory syndrome coronavirus 2
  REGION 1..13: note = Table B: HLA-DRB1*13:02L HLA-DRB1*13:03L HLA-DRB1*01:02L HLA-DRB1*04:10L HLA-DPA1*01:03-B1*104:01L
LDSKTQSLLIVNN

SEQ ID NO: 14839 - protein, 14 aa, Severe acute respiratory syndrome coronavirus 2
  REGION 1..14: note = Table B: HLA-DRB1*13:02L HLA-DRB1*01:02L HLA-DPA1*01:03-B1*104:01L
DSKTQSLLIVNNAT

SEQ ID NO: 14840 - protein, 13 aa, Severe acute respiratory syndrome coronavirus 2
  REGION 1..13: note = Table B: HLA-DRB1*13:02L HLA-DRB1*14:01L HLA-DRB1*15:03L
TQSLLIVNNATNV

SEQ ID NO: 14841 - protein, 16 aa, Severe acute respiratory syndrome coronavirus 2
  REGION 1..16: note = Table B: HLA-DRB1*13:02L
TNVVIKVCEFQFCNDP

SEQ ID NO: 14842 - protein, 12 aa, Severe acute respiratory syndrome coronavirus 2
  REGION 1..12: note = Table B: HLA-DRB1*13:02L HLA-DRB1*08:04L HLA-DRB1*08:01L HLA-DRB1*04:08L
GVYYHKNNKSWM

SEQ ID NO: 14843 - protein, 14 aa, Severe acute respiratory syndrome coronavirus 2
  REGION 1..14: note = Table B: HLA-DRB1*13:02L
VYYHKNNKSWMESE

SEQ ID NO: 14844 - protein, 14 aa, Severe acute respiratory syndrome coronavirus 2
  REGION 1..14: note = Table B: HLA-DRB1*13:02L HLA-DRB1*04:05L HLA-DRB1*08:04L HLA-DRB1*11:01L HLA-DRB3*01:01L
NNKSWMESEFRVYS

SEQ ID NO: 14845 - protein, 14 aa, Severe acute respiratory syndrome coronavirus 2
  REGION 1..14: note = Table B: HLA-DRB1*13:02L HLA-DRB1*04:05L HLA-DRB1*01:02L HLA-DRB1*08:04L HLA-DRB1*14:01L HLA-DRB1*11:04L HLA-DRB1*11:01L HLA-DRB3*01:01L
KSWMESEFRVYSSA

SEQ ID NO: 14846 - protein, 12 aa, Severe acute respiratory syndrome coronavirus 2
  REGION 1..12: note = Table B: HLA-DRB1*13:02L HLA-DRB1*04:04L HLA-DRB1*08:04L HLA-DRB1*08:77L HLA-DRB3*02:01L HLA-DRB1*11:03L HLA-DRB1*11:04L HLA-DRB1*08:01L HLA-DQA1*05:05-B1*03:19L HLA-DRB1*09:01L HLA-DPA1*01:03-B1*04:02L HLA-DRB1*12:02L
  REGION 1..12: note = CONT. FROM ABOVE: HLA-DPA1*02:01-B1*13:01L HLA-DPA1*01:03-B1*104 :01L HLA-DRB1*10:01L HLA-DRB1*08:03L
ESEFRVYSSANN

SEQ ID NO: 14847 - protein, 13 aa, Severe acute respiratory syndrome coronavirus 2
  REGION 1..13: note = Table B: HLA-DRB1*13:02L HLA-DRB1*04:04L HLA-DRB1*01:01L HLA-DRB3*02:01L HLA-DRB1*11:03L HLA-DRB1*11:04L HLA-DRB1*14:02L HLA-DRB1*08:01L HLA-DRB1*11:01L HLA-DQA1*05:05-B1*03:19L HLA-DPA1*01:03-B1*04:01L HLA-DPA1*01:03-B1*04:02L
  REGION 1..13: note = CONT. FROM ABOVE: HLA-DRB3*01:01L HLA-DPA1*01:03-B1*104:01L HLA- DRB1*07:01L HLA-DRB1*10:01L HLA-DRB1*15:01L
SEFRVYSSANNCT

SEQ ID NO: 14848 - protein, 14 aa, Severe acute respiratory syndrome coronavirus 2
  REGION 1..14: note = Table B: HLA-DRB1*13:02L HLA-DRB3*02:01L HLA-DRB1*14:01L HLA-DRB1*11:04L HLA-DRB1*10:01L HLA-DRB1*08:03L
TFEYVSQPFLMDLE

SEQ ID NO: 14849 - protein, 14 aa, Severe acute respiratory syndrome coronavirus 2
  REGION 1..14: note = Table B: HLA-DRB1*13:02L HLA-DRB1*14:01L HLA-DRB3*01:01L
FKNLREFVFKNIDG

SEQ ID NO: 14850 - protein, 13 aa, Severe acute respiratory syndrome coronavirus 2
  REGION 1..13: note = Table B: HLA-DRB1*13:02L HLA-DRB1*01:02L HLA-DRB1*08:04L HLA-DRB1*08:01L HLA-DRB1*04:08L
LREFVFKNIDGYF

SEQ ID NO: 14851 - protein, 11 aa, Severe acute respiratory syndrome coronavirus 2
  REGION 1..11: note = Table B: HLA-DRB1*13:02L HLA-DRB1*13:03L HLA-DRB1*04:02L HLA-DRB1*01:02L HLA-DRB1*14:01L HLA-DRB1*08:01L HLA-DRB1*12:01L HLA-DRB1*14:17L HLA-DRB1*04:08L
FVFKNIDGYFK

SEQ ID NO: 14852 - protein, 14 aa, Severe acute respiratory syndrome coronavirus 2
  REGION 1..14: note = Table B: HLA-DRB1*13:02L HLA-DRB1*04:05L HLA-DRB1*11:01L HLA-DRB1*12:01L HLA-DRB1*15:03L
FKNIDGYFKIYSKH

SEQ ID NO: 14853 - protein, 12 aa, Severe acute respiratory syndrome coronavirus 2
  REGION 1..12: note = Table B: HLA-DRB1*13:02L HLA-DRB3*01:01L HLA-DPA1*02:01-B1*13:01L HLA-DPA1*03:01-B1*105:01L HLA-DRB1*15:03L
YFKIYSKHTPIN

SEQ ID NO: 14854 - protein, 10 aa, Severe acute respiratory syndrome coronavirus 2
  REGION 1..10: note = Table B: HLA-DRB1*13:02L HLA-DRB1*13:03L HLA-DRB1*01:01L HLA-DRB4*03:01NL HLA-DRB1*11:04L HLA-DRB1*08:01L HLA-DRB5*01:01L HLA-DPA1*01:03-B1*04:02L HLA-DRB1*12:01L HLA-DQA1*03:01-B1*03:02M HLA-DQA1*05:05-B1*03:01M
  REGION 1..10: note = CONT. FROM ABOVE: HLA-DQA1*01:03-B1*06:01L HLA-DQA1*02:01-B1*03: 03L
DLPIGINITR

SEQ ID NO: 14855 - protein, 13 aa, Severe acute respiratory syndrome coronavirus 2
  REGION 1..13: note = Table B: HLA-DRB1*13:02L HLA-DRB1*04:04L HLA-DRB1*04:10L HLA-DPA1*01:03-B1*104:01L
ALHRSYLTPGDSS

SEQ ID NO: 14856 - protein, 17 aa, Severe acute respiratory syndrome coronavirus 2
  REGION 1..17: note = Table B: HLA-DRB1*13:02L HLA-DRB1*08:04L HLA-DPA1*02:01-B1*13:01L
TPGDSSSGWTAGAAAYY

SEQ ID NO: 14857 - protein, 12 aa, Severe acute respiratory syndrome coronavirus 2
  REGION 1..12: note = Table B: HLA-DRB1*13:02L HLA-DRB1*04:04L HLA-DRB1*08:04L HLA-DRB3*02:01L HLA-DPA1*01:03-B1*03:01L HLA-DRB1*14:01L HLA-DRB1*11:03L HLA-DQA1*01:01-B1*05:01L HLA-DRB1*08:01L HLA-DQA1*05:05-B1*03:19L HLA-DPA1*01:03-B1*04:01L
  REGION 1..12: note = CONT. FROM ABOVE: HLA-DRB1*04:10L HLA-DRB1*12:02L HLA-DPA1*02:01 -B1*13:01L HLA-DRB1*14:54L HLA-DQA1*05:05-B1*03:01L HLA-DRB1*10: 01L HLA-DRB1*08:03L
AAYYVGYLQPRT

SEQ ID NO: 14858 - protein, 14 aa, Severe acute respiratory syndrome coronavirus 2
  REGION 1..14: note = Table B: HLA-DRB1*13:02L
VGYLQPRTFLLKYN

SEQ ID NO: 14859 - protein, 16 aa, Severe acute respiratory syndrome coronavirus 2
  REGION 1..16: note = Table B: HLA-DRB1*13:02L HLA-DPA1*03:01-B1*04:02L HLA-DRB1*11:01L HLA-DRB4*01:01L HLA-DPA1*01:03-B1*04:02L HLA-DRB1*14:54L HLA-DPA1*01:03-B1*02:01L HLA-DPA1*01:03-B1*104:01L HLA-DPA1*01:02-B1*04:01L
ITDAVDCALDPLSETK

SEQ ID NO: 14860 - protein, 11 aa, Severe acute respiratory syndrome coronavirus 2
  REGION 1..11: note = Table B: HLA-DRB1*13:02L HLA-DRB1*13:03L HLA-DRB1*04:05L HLA-DRB1*01:02L HLA-DRB1*08:04L HLA-DRB1*08:77L HLA-DRB3*02:01L HLA-DRB1*03:01L HLA-DRB1*14:01L HLA-DRB1*11:02L HLA-DRB1*11:04L HLA-DRB1*08:01L HLA-DRB1*11:01L HLA-DRB4*01:01L
  REGION 1..11: note = CONT. FROM ABOVE: HLA-DQA1*05:05-B1*03:116L HLA-DQA1*03:01-B1*03 :02L HLA-DRB1*10:01L
VFNATRFASVY

SEQ ID NO: 14861 - protein, 12 aa, Severe acute respiratory syndrome coronavirus 2
  REGION 1..12: note = Table B: HLA-DRB1*13:02L HLA-DRB1*13:03L HLA-DRB1*01:03L HLA-DRB1*04:04L HLA-DRB1*04:05L HLA-DRB1*01:02L HLA-DPA1*01:03-B1*03:01L HLA-DRB1*08:01L HLA-DRB1*11:01L HLA-DPA1*02:01-B1*13:01L HLA-DPA1*01:03-B1*104:01L
  REGION 1..12: note = CONT. FROM ABOVE: HLA-DPA1*01:02-B1*04:01L HLA-DRB1*07:01L HLA-D RB1*16:01L HLA-DRB1*04:08L HLA-DRB1*15:03L
ATRFASVYAWNR

SEQ ID NO: 14862 - protein, 12 aa, Severe acute respiratory syndrome coronavirus 2
  REGION 1..12: note = Table B: HLA-DRB1*13:02L HLA-DRB1*04:05L HLA-DRB1*01:02L HLA-DRB1*11:04L HLA-DRB1*08:01L HLA-DRB1*11:01L HLA-DRB1*12:01L HLA-DRB3*01:01L HLA-DPA1*01:02-B1*04:01L HLA-DRB1*16:01L HLA-DRB1*04:08L HLA-DRB1*15:03L
ASVYAWNRKRIS

SEQ ID NO: 14863 - protein, 12 aa, Severe acute respiratory syndrome coronavirus 2
  REGION 1..12: note = Table B: HLA-DRB1*13:02L HLA-DRB1*04:02L HLA-DRB1*04:05L HLA-DRB1*11:02L HLA-DRB1*11:03L HLA-DRB1*13:01L HLA-DRB1*12:01L HLA-DRB1*14:54L HLA-DPA1*01:02-B1*04:01L HLA-DRB1*08:03L HLA-DRB1*15:03L
SVYAWNRKRISN

SEQ ID NO: 14864 - protein, 13 aa, Severe acute respiratory syndrome coronavirus 2
  REGION 1..13: note = Table B: HLA-DRB1*13:02L HLA-DRB1*04:04L HLA-DRB1*04:05L HLA-DQA1*01:02-B1*06:02L HLA-DPA1*01:03-B1*03:01L HLA-DRB1*12:01L HLA-DQA1*03:01-B1*03:02L HLA-DRB1*16:01L HLA-DQA1*02:01-B1*03:03L HLA-DRB1*15:03L
NRKRISNCVADYS

SEQ ID NO: 14865 - protein, 14 aa, Severe acute respiratory syndrome coronavirus 2
  REGION 1..14: note = Table B: HLA-DRB1*13:02L HLA-DRB1*04:05L HLA-DRB1*01:02L HLA-DPA1*03:01-B1*04:02L HLA-DRB1*12:01L HLA-DPA1*03:01-B1*105:01L HLA-DPA1*01:03-B1*104:01L HLA-DPA1*01:02-B1*04:01L HLA-DRB1*15:03L
SPTKLNDLCFTNVY

SEQ ID NO: 14866 - protein, 13 aa, Severe acute respiratory syndrome coronavirus 2
  REGION 1..13: note = Table B: HLA-DRB1*13:02L HLA-DRB1*08:04L HLA-DRB1*11:04L HLA-DRB1*04:10L HLA-DRB3*01:01L HLA-DPA1*02:01-B1*13:01L HLA-DPA1*03:01-B1*105:01L HLA-DPA1*01:02-B1*04:01L HLA-DRB1*08:03L
ADSFVIRGDEVRQ

SEQ ID NO: 14867 - protein, 14 aa, Severe acute respiratory syndrome coronavirus 2
  REGION 1..14: note = Table B: HLA-DRB1*13:02L HLA-DRB3*01:01L HLA-DRB1*15:03L
SFVIRGDEVRQIAP

SEQ ID NO: 14868 - protein, 10 aa, Severe acute respiratory syndrome coronavirus 2
  REGION 1..10: note = Table B: HLA-DRB1*13:02L HLA-DRB1*13:03L HLA-DRB1*01:03L HLA-DRB1*01:01L HLA-DRB4*03:01NL HLA-DRB1*14:01L HLA-DRB1*11:04L HLA-DRB1*08:01L HLA-DRB1*12:01L HLA-DRB3*01:01L HLA-DQA1*03:01-B1*03:02L HLA-DQA1*05:05-B1*03:01L
  REGION 1..10: note = CONT. FROM ABOVE: HLA-DRB1*16:01L
RQIAPGQTGK

SEQ ID NO: 14869 - protein, 12 aa, Severe acute respiratory syndrome coronavirus 2
  REGION 1..12: note = Table B: HLA-DRB1*13:02L
QIAPGQTGKIAD

SEQ ID NO: 14870 - protein, 13 aa, Severe acute respiratory syndrome coronavirus 2
  REGION 1..13: note = Table B: HLA-DRB1*13:02L HLA-DRB1*04:05L HLA-DRB3*02:01L HLA-DRB1*11:01L HLA-DRB4*02:01NL HLA-DQA1*05:05-B1*03:116L HLA-DPA1*02:01-B1*13:01L
IAPGQTGKIADYN

SEQ ID NO: 14871 - protein, 14 aa, Severe acute respiratory syndrome coronavirus 2
  REGION 1..14: note = Table B: HLA-DRB1*13:02L HLA-DRB1*04:04L HLA-DRB1*04:05L HLA-DRB1*11:01L HLA-DRB3*01:01L HLA-DPA1*02:01-B1*13:01L HLA-DPA1*01:02-B1*04:01L HLA-DRB1*07:01L
APGQTGKIADYNYK

SEQ ID NO: 14872 - protein, 16 aa, Severe acute respiratory syndrome coronavirus 2
  REGION 1..16: note = Table B: HLA-DRB1*13:02L HLA-DRB1*04:02L HLA-DPA1*03:01-B1*04:02L HLA-DRB1*14:02L HLA-DQA1*01:01-B1*05:01L HLA-DRB1*11:01L HLA-DQA1*01-B1*05L HLA-DPA1*01:02-B1*04:01L HLA-DRB1*10:01L
LPDDFTGCVIAWNSNN

SEQ ID NO: 14873 - protein, 11 aa, Severe acute respiratory syndrome coronavirus 2
  REGION 1..11: note = Table B: HLA-DRB1*13:02L HLA-DRB1*13:03L HLA-DRB1*01:03L HLA-DRB1*04:04L HLA-DRB1*08:77L HLA-DRB1*14:01L HLA-DRB1*11:03L HLA-DRB1*11:04L HLA-DRB1*12:02L HLA-DRB1*14:54L HLA-DRB1*10:01L HLA-DRB1*04:08L HLA-DRB1*08:03L
VIAWNSNNLDS

SEQ ID NO: 14874 - protein, 13 aa, Severe acute respiratory syndrome coronavirus 2
  REGION 1..13: note = Table B: HLA-DRB1*13:02L HLA-DRB1*04:05L
GGNYNYLYRLFRK

SEQ ID NO: 14875 - protein, 13 aa, Severe acute respiratory syndrome coronavirus 2
  REGION 1..13: note = Table B: HLA-DRB1*13:02L HLA-DRB1*04:05L HLA-DRB1*08:04L HLA-DRB1*11:03L HLA-DRB1*15:03L
GNYNYLYRLFRKS

SEQ ID NO: 14876 - protein, 13 aa, Severe acute respiratory syndrome coronavirus 2
  REGION 1..13: note = Table B: HLA-DRB1*13:02L HLA-DPA1*01:03-B1*02:01L
NYNYLYRLFRKSN

SEQ ID NO: 14877 - protein, 13 aa, Severe acute respiratory syndrome coronavirus 2
  REGION 1..13: note = Table B: HLA-DRB1*13:02L HLA-DRB1*14:01L HLA-DRB1*11:04L HLA-DRB1*11:01L HLA-DRB1*12:01L HLA-DRB3*01:01L HLA-DRB1*15:03L
YLYRLFRKSNLKP

SEQ ID NO: 14878 - protein, 13 aa, Severe acute respiratory syndrome coronavirus 2
  REGION 1..13: note = Table B: HLA-DRB1*13:02L HLA-DRB1*04:05L HLA-DQA1*01:02-B1*06:02L HLA-DRB1*11:04L HLA-DRB1*11:01L HLA-DRB3*01:01L HLA-DPA1*02:01-B1*13:01L HLA-DQA1*03:01-B1*03:02L HLA-DQA1*02:01-B1*03:03L
YRLFRKSNLKPFE

SEQ ID NO: 14879 - protein, 14 aa, Severe acute respiratory syndrome coronavirus 2
  REGION 1..14: note = Table B: HLA-DRB1*13:02L HLA-DRB1*04:05L HLA-DRB3*01:01L HLA-DPA1*02:01-B1*13:01L
RLFRKSNLKPFERD

SEQ ID NO: 14880 - protein, 13 aa, Severe acute respiratory syndrome coronavirus 2
  REGION 1..13: note = Table B: HLA-DRB1*13:02L HLA-DRB1*01:03L HLA-DRB1*04:05L HLA-DQA1*01:02-B1*06:02L HLA-DRB1*01:02L HLA-DRB1*08:04L HLA-DRB1*11:03L HLA-DRB1*11:04L HLA-DRB1*11:01L HLA-DRB1*12:01L HLA-DRB3*01:01L HLA-DRB1*14:54L HLA-DRB1*14:17L HLA-DRB1*04:08L
  REGION 1..13: note = CONT. FROM ABOVE: HLA-DRB1*08:03L HLA-DRB1*15:03L
SNLKPFERDISTE

SEQ ID NO: 14881 - protein, 12 aa, Severe acute respiratory syndrome coronavirus 2
  REGION 1..12: note = Table B: HLA-DRB1*13:02L HLA-DRB1*13:03L HLA-DRB1*01:03L HLA-DRB1*04:02L HLA-DRB1*04:05L HLA-DRB1*01:02L HLA-DRB4*03:01NL HLA-DRB1*08:04L HLA-DRB3*02:01L HLA-DRB1*14:01L HLA-DRB1*11:03L HLA-DRB1*11:04L HLA-DRB1*12:01L HLA-DRB1*12:02L HLA-DRB3*01:01L
  REGION 1..12: note = CONT. FROM ABOVE: HLA-DPA1*03:01-B1*105:01L HLA-DQA1*03:01-B1*03 :02L HLA-DRB1*14:54L HLA-DQA1*05:05-B1*03:01L HLA-DPA1*01:02-B1* 04:01L HLA-DRB1*04:08L
PFERDISTEIYQ

SEQ ID NO: 14882 - protein, 12 aa, Severe acute respiratory syndrome coronavirus 2
  REGION 1..12: note = Table B: HLA-DRB1*13:02L HLA-DQA1*01:02-B1*06:02L HLA-DRB1*01:02L HLA-DRB4*03:01NL HLA-DRB1*08:77L HLA-DRB3*02:01L HLA-DRB1*14:01L HLA-DQA1*05:01-B1*02:01L HLA-DRB1*12:01L HLA-DRB1*12:02L HLA-DPA1*03:01-B1*105:01L HLA-DRB1*14:54L
  REGION 1..12: note = CONT. FROM ABOVE: HLA-DRB1*14:17L HLA-DRB1*16:01L HLA-DQA1*01:03 -B1*06:01L HLA-DRB1*04:08L HLA-DRB1*15:03L
TEIYQAGSTPCN

SEQ ID NO: 14883 - protein, 12 aa, Severe acute respiratory syndrome coronavirus 2
  REGION 1..12: note = Table B: HLA-DRB1*13:02L HLA-DRB1*13:03L HLA-DRB1*01:03L HLA-DRB1*04:04L HLA-DRB1*04:05L HLA-DQA1*01:02-B1*06:02L HLA-DRB1*01:01L HLA-DRB1*01:02L HLA-DRB4*03:01NL HLA-DRB1*08:77L HLA-DPA1*01:03-B1*03:01L HLA-DRB1*14:01L HLA-DRB1*11:03L
  REGION 1..12: note = CONT. FROM ABOVE: HLA-DRB1*14:02L HLA-DQA1*05:01-B1*02:01L HLA-D RB1*12:01L HLA-DPA1*03:01-B1*105:01L HLA-DRB1*14:54L HLA-DRB1*14 :17L HLA-DRB1*10:01L HLA-DRB1*16:01L HLA-DQA1*01:03-B1*06:01L HL A-DRB1*04:08L HLA-DRB1*15:03L
EIYQAGSTPCNG

SEQ ID NO: 14884 - protein, 13 aa, Severe acute respiratory syndrome coronavirus 2
  REGION 1..13: note = Table B: HLA-DRB1*13:02L HLA-DRB1*13:03L HLA-DRB1*01:03L HLA-DRB1*04:04L HLA-DQA1*01:02-B1*06:02L HLA-DRB1*01:02L HLA-DRB1*08:04L HLA-DRB1*08:77L HLA-DRB3*02:01L HLA-DPA1*01:03-B1*03:01L HLA-DPA1*03:01-B1*04:02L
  REGION 1..13: note = CONT. FROM ABOVE: HLA-DRB1*14:01L HLA-DRB1*11:03L HLA-DRB1*11:04 L HLA-DRB1*14:02L HLA-DRB1*08:01L HLA-DRB1*04:10L HLA-DRB1*09:01 L HLA-DRB1*12:01L HLA-DRB1*12:02L HLA-DPA1*02:01-B1*13:01L HLA-D PA1*03:01-B1*105:01L HLA-DRB1*10:01L HLA-DRB1*04:08L
  REGION 1..13: note = CONT. FROM ABOVE: HLA-DRB1*08:03L HLA-DRB1*15:03L
LQSYGFQPTNGVG

SEQ ID NO: 14885 - protein, 13 aa, Severe acute respiratory syndrome coronavirus 2
  REGION 1..13: note = Table B: HLA-DRB1*13:02L HLA-DRB1*04:05L HLA-DRB1*01:02L HLA-DRB1*08:01L HLA-DPA1*01:03-B1*04:02L HLA-DRB1*04:08L
FQPTNGVGYQPYR

SEQ ID NO: 14886 - protein, 16 aa, Severe acute respiratory syndrome coronavirus 2
  REGION 1..16: note = Table B: HLA-DRB1*13:02L HLA-DPA1*01:03-B1*03:01L HLA-DPA1*01:03-B1*04:02L
QPTNGVGYQPYRVVVL

SEQ ID NO: 14887 - protein, 13 aa, Severe acute respiratory syndrome coronavirus 2
  REGION 1..13: note = Table B: HLA-DRB1*13:02L HLA-DRB1*04:02L HLA-DPA1*01:03-B1*03:01L HLA-DPA1*01:03-B1*04:02L HLA-DQA1*05:05-B1*03:01L
GVGYQPYRVVVLS

SEQ ID NO: 14888 - protein, 14 aa, Severe acute respiratory syndrome coronavirus 2
  REGION 1..14: note = Table B: HLA-DRB1*13:02L HLA-DPA1*01:03-B1*03:01L HLA-DPA1*01:03-B1*04:02L HLA-DQA1*05:05-B1*03:01L HLA-DRB1*07:01L HLA-DRB1*15:01L
VGYQPYRVVVLSFE

SEQ ID NO: 14889 - protein, 14 aa, Severe acute respiratory syndrome coronavirus 2
  REGION 1..14: note = Table B: HLA-DRB1*13:02L HLA-DRB1*04:04L HLA-DRB1*11:04L HLA-DRB1*11:01L HLA-DRB3*01:01L
RVVVLSFELLHAPA

SEQ ID NO: 14890 - protein, 12 aa, Severe acute respiratory syndrome coronavirus 2
  REGION 1..12: note = Table B: HLA-DRB1*13:02L HLA-DRB1*04:04L HLA-DQA1*01:02-B1*06:02L HLA-DRB1*08:04L HLA-DRB3*02:01L HLA-DPA1*01:03-B1*03:01L HLA-DRB1*14:01L HLA-DRB1*11:03L HLA-DRB1*11:04L HLA-DRB1*08:01L HLA-DQA1*05:05-B1*03:19L
  REGION 1..12: note = CONT. FROM ABOVE: HLA-DPA1*01:03-B1*04:01L HLA-DRB1*04:10L HLA-D PA1*01:03-B1*04:02L HLA-DRB1*12:02L HLA-DPA1*02:01-B1*13:01L HLA -DRB1*14:54L HLA-DPA1*01:03-B1*02:01L HLA-DPA1*01:03-B1*104:01L HLA-DQA1*05:05-B1*03:01L HLA-DRB1*10:01L
  REGION 1..12: note = CONT. FROM ABOVE: HLA-DQA1*01:03-B1*06:01L HLA-DRB1*08:03L
VLSFELLHAPAT

SEQ ID NO: 14891 - protein, 12 aa, Severe acute respiratory syndrome coronavirus 2
  REGION 1..12: note = Table B: HLA-DRB1*13:02L HLA-DRB1*13:03L HLA-DRB1*01:03L HLA-DRB1*04:04L HLA-DRB1*04:05L HLA-DRB1*01:02L HLA-DPA1*01:03-B1*03:01L HLA-DRB1*08:01L HLA-DRB1*11:01L HLA-DRB1*12:01L HLA-DPA1*02:01-B1*13:01L
  REGION 1..12: note = CONT. FROM ABOVE: HLA-DPA1*01:02-B1*04:01L HLA-DRB1*07:01L HLA-D RB1*16:01L HLA-DRB1*04:08L HLA-DQA1*02:01-B1*03:03L
GPKKSTNLVKNK

SEQ ID NO: 14892 - protein, 12 aa, Severe acute respiratory syndrome coronavirus 2
  REGION 1..12: note = Table B: HLA-DRB1*13:02L HLA-DRB1*01:02L HLA-DRB1*14:01L HLA-DRB1*12:01L HLA-DRB1*15:03L
TNLVKNKCVNFN

SEQ ID NO: 14893 - protein, 14 aa, Severe acute respiratory syndrome coronavirus 2
  REGION 1..14: note = Table B: HLA-DRB1*13:02L HLA-DRB1*01:02L HLA-DRB1*14:01L HLA-DRB1*12:01L
NLVKNKCVNFNFNG

SEQ ID NO: 14894 - protein, 14 aa, Severe acute respiratory syndrome coronavirus 2
  REGION 1..14: note = Table B: HLA-DRB1*13:02L HLA-DRB1*04:04L HLA-DRB1*11:01L HLA-DRB1*04:10L HLA-DPA1*02:01-B1*13:01L HLA-DPA1*01:03-B1*104:01L HLA-DRB1*15:03L
NGLTGTGVLTESNK

SEQ ID NO: 14895 - protein, 14 aa, Severe acute respiratory syndrome coronavirus 2
  REGION 1..14: note = Table B: HLA-DRB1*13:02L HLA-DRB1*04:08L
VLTESNKKFLPFQQ

SEQ ID NO: 14896 - protein, 14 aa, Severe acute respiratory syndrome coronavirus 2
  REGION 1..14: note = Table B: HLA-DRB1*13:02L
KFLPFQQFGRDIAD

SEQ ID NO: 14897 - protein, 14 aa, Severe acute respiratory syndrome coronavirus 2
  REGION 1..14: note = Table B: HLA-DRB1*13:02L
FLPFQQFGRDIADT

SEQ ID NO: 14898 - protein, 10 aa, Severe acute respiratory syndrome coronavirus 2
  REGION 1..10: note = Table B: HLA-DRB1*13:02L HLA-DRB1*13:03M HLA-DRB1*04:02L HLA-DRB1*01:01L HLA-DRB4*03:01NL HLA-DRB3*02:01L HLA-DRB1*14:01L HLA-DRB1*11:04L HLA-DRB1*14:02L HLA-DRB1*08:01L HLA-DRB5*01:01L HLA-DPA1*01:03-B1*04:02L HLA-DRB1*12:01M HLA-DRB1*12:02L
  REGION 1..10: note = CONT. FROM ABOVE: HLA-DPA1*03:01-B1*105:01L HLA-DQA1*03:01-B1*03 :02L HLA-DQA1*05:05-B1*03:01L HLA-DRB1*14:17L HLA-DRB1*16:01L HL A-DQA1*01:03-B1*06:01L HLA-DRB1*08:03L HLA-DQA1*02:01-B1*03:03L
DIADTTDAVR

SEQ ID NO: 14899 - protein, 12 aa, Severe acute respiratory syndrome coronavirus 2
  REGION 1..12: note = Table B: HLA-DRB1*13:02L HLA-DRB1*13:03L HLA-DRB1*01:03L HLA-DRB1*04:05L HLA-DQA1*01:02-B1*06:02L HLA-DRB1*01:02L HLA-DRB1*08:77L HLA-DPA1*01:03-B1*03:01L HLA-DRB1*14:01L HLA-DRB1*14:02L HLA-DQA1*05:05-B1*03:19L HLA-DRB1*04:10L
  REGION 1..12: note = CONT. FROM ABOVE: HLA-DRB1*12:01L HLA-DRB1*12:02L HLA-DPA1*02:01 -B1*13:01L HLA-DPA1*03:01-B1*105:01L HLA-DRB1*14:54L HLA-DRB1*04 :08L HLA-DRB1*15:03L
IADTTDAVRDPQ

SEQ ID NO: 14900 - protein, 11 aa, Severe acute respiratory syndrome coronavirus 2
  REGION 1..11: note = Table B: HLA-DRB1*13:02L HLA-DQA1*01:02-B1*06:02L HLA-DPA1*01:03-B1*03:01L HLA-DQA1*05:05-B1*03:19L HLA-DRB1*04:10L HLA-DRB1*12:02L HLA-DPA1*03:01-B1*105:01L HLA-DRB1*04:08L
DTTDAVRDPQT

SEQ ID NO: 14901 - protein, 12 aa, Severe acute respiratory syndrome coronavirus 2
  REGION 1..12: note = Table B: HLA-DRB1*13:02L HLA-DRB1*13:03L HLA-DRB1*01:03L HLA-DRB1*04:02L HLA-DRB1*04:05L HLA-DRB1*01:02L HLA-DRB4*03:01NL HLA-DRB3*02:01L HLA-DRB1*14:01L HLA-DRB1*08:01L HLA-DRB1*04:10L HLA-DPA1*02:01-B1*13:01L HLA-DPA1*01:03-B1*104:01L
  REGION 1..12: note = CONT. FROM ABOVE: HLA-DRB1*04:08L
SNQVAVLYQDVN

SEQ ID NO: 14902 - protein, 14 aa, Severe acute respiratory syndrome coronavirus 2
  REGION 1..14: note = Table B: HLA-DRB1*13:02L HLA-DRB1*01:03L HLA-DRB1*04:02L HLA-DRB1*04:05L HLA-DQA1*01:02-B1*06:02L HLA-DRB1*01:02L HLA-DRB1*08:04L HLA-DPA1*01:03-B1*03:01L HLA-DPA1*03:01-B1*04:02L HLA-DRB1*14:01L HLA-DRB1*14:02L
  REGION 1..14: note = CONT. FROM ABOVE: HLA-DQA1*05:01-B1*02:01L HLA-DRB4*01:01L HLA-D PA1*01:03-B1*04:02L HLA-DRB1*12:01L HLA-DPA1*02:01-B1*13:01L HLA -DPA1*03:01-B1*105:01L HLA-DQA1*03:01-B1*03:02L HLA-DRB1*14:17L HLA-DRB1*16:01L HLA-DRB1*04:08L
VAVLYQDVNCTEVP

SEQ ID NO: 14903 - protein, 14 aa, Severe acute respiratory syndrome coronavirus 2
  REGION 1..14: note = Table B: HLA-DRB1*13:02L HLA-DRB1*01:03L HLA-DRB1*04:02L HLA-DRB1*04:04L HLA-DRB1*04:05L HLA-DRB1*08:04L HLA-DPA1*01:03-B1*03:01L HLA-DPA1*03:01-B1*04:02L HLA-DRB1*08:01L HLA-DPA1*01:03-B1*04:02L HLA-DRB1*12:01L
  REGION 1..14: note = CONT. FROM ABOVE: HLA-DPA1*02:01-B1*13:01L HLA-DPA1*01:03-B1*104 :01L HLA-DRB1*16:01L HLA-DRB1*04:08L HLA-DRB1*15:03L
YQDVNCTEVPVAIH

SEQ ID NO: 14904 - protein, 13 aa, Severe acute respiratory syndrome coronavirus 2
  REGION 1..13: note = Table B: HLA-DRB1*13:02L HLA-DRB1*04:05L HLA-DRB1*01:02L HLA-DPA1*01:03-B1*03:01L HLA-DQA1*05:05-B1*03:19L HLA-DRB1*12:01L HLA-DPA1*02:01-B1*13:01L HLA-DPA1*01:03-B1*104:01L HLA-DRB1*04:08L
FQTRAGCLIGAEH

SEQ ID NO: 14905 - protein, 16 aa, Severe acute respiratory syndrome coronavirus 2
  REGION 1..16: note = Table B: HLA-DRB1*13:02L HLA-DRB1*04:05L HLA-DRB1*01:02L HLA-DPA1*01:03-B1*03:01L HLA-DRB1*12:01L HLA-DPA1*02:01-B1*13:01L HLA-DPA1*01:03-B1*104:01L HLA-DRB1*15:03L
GAEHVNNSYECDIPIG

SEQ ID NO: 14906 - protein, 13 aa, Severe acute respiratory syndrome coronavirus 2
  REGION 1..13: note = Table B: HLA-DRB1*13:02L HLA-DRB1*13:03L HLA-DRB1*08:04L HLA-DPA1*01:03-B1*03:01L HLA-DPA1*03:01-B1*04:02L HLA-DRB1*11:04L HLA-DRB1*14:02L HLA-DPA1*01:03-B1*04:02L HLA-DRB3*01:01L HLA-DPA1*02:01-B1*13:01L HLA-DRB1*14:54L
  REGION 1..13: note = CONT. FROM ABOVE: HLA-DRB1*10:01L
NNSYECDIPIGAG

SEQ ID NO: 14907 - protein, 13 aa, Severe acute respiratory syndrome coronavirus 2
  REGION 1..13: note = Table B: HLA-DRB1*13:02L HLA-DRB1*13:03L HLA-DRB1*08:77L HLA-DRB1*11:03L HLA-DRB1*12:02L HLA-DPA1*02:01-B1*13:01L
IIAYTMSLGAENS

SEQ ID NO: 14908 - protein, 12 aa, Severe acute respiratory syndrome coronavirus 2
  REGION 1..12: note = Table B: HLA-DRB1*13:02L
AYSNNSIAIPTN

SEQ ID NO: 14909 - protein, 14 aa, Severe acute respiratory syndrome coronavirus 2
  REGION 1..14: note = Table B: HLA-DRB1*13:02L HLA-DRB1*04:02L HLA-DRB1*04:05L HLA-DRB1*01:02L HLA-DPA1*01:03-B1*03:01L HLA-DRB1*14:01L HLA-DRB1*14:17L HLA-DRB1*16:01L
SNNSIAIPTNFTIS

SEQ ID NO: 14910 - protein, 12 aa, Severe acute respiratory syndrome coronavirus 2
  REGION 1..12: note = Table B: HLA-DRB1*13:02L HLA-DRB1*04:04L HLA-DRB1*01:02L HLA-DRB1*08:04L HLA-DPA1*01:03-B1*03:01L HLA-DRB1*04:08L HLA-DRB1*15:03L
ILPVSMTKTSVD

SEQ ID NO: 14911 - protein, 16 aa, Severe acute respiratory syndrome coronavirus 2
  REGION 1..16: note = Table B: HLA-DRB1*13:02L
SNLLLQYGSFCTQLNR

SEQ ID NO: 14912 - protein, 13 aa, Severe acute respiratory syndrome coronavirus 2
  REGION 1..13: note = Table B: HLA-DRB1*13:02L HLA-DPA1*02:01-B1*13:01L HLA-DPA1*01:03-B1*104:01L
QLNRALTGIAVEQ

SEQ ID NO: 14913 - protein, 13 aa, Severe acute respiratory syndrome coronavirus 2
  REGION 1..13: note = Table B: HLA-DRB1*13:02L HLA-DQA1*01:01-B1*05:01L HLA-DPA1*01:03-B1*104:01L
LNRALTGIAVEQD

SEQ ID NO: 14914 - protein, 12 aa, Severe acute respiratory syndrome coronavirus 2
  REGION 1..12: note = Table B: HLA-DRB1*13:02L HLA-DRB1*04:04L HLA-DRB1*08:04L HLA-DRB1*11:03L HLA-DRB1*11:04L HLA-DRB1*12:02L HLA-DPA1*02:01-B1*13:01L HLA-DPA1*01:02-B1*04:01L HLA-DRB1*07:01L HLA-DRB1*08:03L
RALTGIAVEQDK

SEQ ID NO: 14915 - protein, 14 aa, Severe acute respiratory syndrome coronavirus 2
  REGION 1..14: note = Table B: HLA-DRB1*13:02L HLA-DPA1*01:03-B1*104:01L
ALTGIAVEQDKNTQ

SEQ ID NO: 14916 - protein, 10 aa, Severe acute respiratory syndrome coronavirus 2
  REGION 1..10: note = Table B: HLA-DRB1*13:02L HLA-DRB1*13:03L HLA-DQA1*01:02-B1*06:02L HLA-DRB4*03:01NL HLA-DRB1*08:01L HLA-DRB5*01:01L HLA-DPA1*01:03-B1*04:02L HLA-DRB1*12:01L HLA-DPA1*03:01-B1*105:01L HLA-DQA1*03:01-B1*03:02L
  REGION 1..10: note = CONT. FROM ABOVE: HLA-DQA1*05:05-B1*03:01L HLA-DPA1*01:02-B1*04: 01L HLA-DQA1*01:03-B1*06:01L HLA-DQA1*02:01-B1*03:03L
NTQEVFAQVK

SEQ ID NO: 14917 - protein, 13 aa, Severe acute respiratory syndrome coronavirus 2
  REGION 1..13: note = Table B: HLA-DRB1*13:02L HLA-DRB4*03:01NL HLA-DRB1*08:04L HLA-DRB1*11:04L HLA-DRB1*14:02L HLA-DRB1*11:01L HLA-DRB1*12:02L HLA-DPA1*01:03-B1*104:01L HLA-DRB1*10:01L
GFNFSQILPDPSK

SEQ ID NO: 14918 - protein, 13 aa, Severe acute respiratory syndrome coronavirus 2
  REGION 1..13: note = Table B: HLA-DRB1*13:02L HLA-DRB1*13:03L HLA-DRB1*04:04L HLA-DRB1*08:04L HLA-DPA1*01:03-B1*03:01L HLA-DRB1*14:02L HLA-DQA1*01:01-B1*05:01L HLA-DRB1*08:01L HLA-DPA1*02:01-B1*13:01L HLA-DPA1*01:03-B1*02:01L
  REGION 1..13: note = CONT. FROM ABOVE: HLA-DPA1*01:03-B1*104:01L HLA-DRB1*15:03L
FNFSQILPDPSKP

SEQ ID NO: 14919 - protein, 10 aa, Severe acute respiratory syndrome coronavirus 2
  REGION 1..10: note = Table B: HLA-DRB1*13:02L HLA-DRB1*13:03L HLA-DRB4*03:01NL HLA-DPA1*01:03-B1*04:02L HLA-DRB1*12:01L HLA-DPA1*03:01-B1*105:01L HLA-DQA1*03:01-B1*03:02L HLA-DQA1*05:05-B1*03:01L HLA-DPA1*01:02-B1*04:01L
  REGION 1..10: note = CONT. FROM ABOVE: HLA-DQA1*02:01-B1*03:03L
SFIEDLLFNK

SEQ ID NO: 14920 - protein, 12 aa, Severe acute respiratory syndrome coronavirus 2
  REGION 1..12: note = Table B: HLA-DRB1*13:02L HLA-DRB1*13:03L HLA-DRB1*04:02L HLA-DQA1*01:02-B1*06:02L HLA-DRB1*08:04L HLA-DRB1*12:01L HLA-DRB1*14:54L HLA-DRB1*16:01L HLA-DRB1*15:03L
DLLFNKVTLADA

SEQ ID NO: 14921 - protein, 15 aa, Severe acute respiratory syndrome coronavirus 2
  REGION 1..15: note = Table B: HLA-DRB1*13:02L HLA-DQA1*05:05-B1*03:01L HLA-DQA1*01:03-B1*06:01L HLA-DQA1*02:01-B1*03:03L
DAGFIKQYGDCLGDI

SEQ ID NO: 14922 - protein, 13 aa, Severe acute respiratory syndrome coronavirus 2
  REGION 1..13: note = Table B: HLA-DRB1*13:02L HLA-DRB1*04:05L HLA-DQA1*01:02-B1*06:02L HLA-DRB1*01:02L HLA-DPA1*01:03-B1*03:01L HLA-DRB1*12:01L HLA-DPA1*02:01-B1*13:01L
IAARDLICAQKFN

SEQ ID NO: 14923 - protein, 13 aa, Severe acute respiratory syndrome coronavirus 2
  REGION 1..13: note = Table B: HLA-DRB1*13:02L HLA-DRB1*01:02L HLA-DRB1*11:04L HLA-DRB1*11:01L HLA-DRB3*01:01L
RDLICAQKFNGLT

SEQ ID NO: 14924 - protein, 15 aa, Severe acute respiratory syndrome coronavirus 2
  REGION 1..15: note = Table B: HLA-DRB1*13:02L HLA-DRB1*08:04L HLA-DPA1*03:01-B1*04:02L HLA-DRB1*14:02L HLA-DRB1*11:01L HLA-DRB4*02:01NL HLA-DPA1*01:03-B1*104:01L HLA-DRB1*15:03L
AGTITSGWTFGAGAA

SEQ ID NO: 14925 - protein, 15 aa, Severe acute respiratory syndrome coronavirus 2
  REGION 1..15: note = Table B: HLA-DRB1*13:02L HLA-DRB1*04:05L HLA-DQA1*01:01-B1*05:01L HLA-DRB1*11:01L HLA-DPA1*02:01-B1*13:01L
GWTFGAGAALQIPFA

SEQ ID NO: 14926 - protein, 14 aa, Severe acute respiratory syndrome coronavirus 2
  REGION 1..14: note = Table B: HLA-DRB1*13:02L HLA-DRB1*08:04L
QMAYRFNGIGVTQN

SEQ ID NO: 14927 - protein, 13 aa, Severe acute respiratory syndrome coronavirus 2
  REGION 1..13: note = Table B: HLA-DRB1*13:02L HLA-DRB1*04:02L HLA-DRB1*01:02L HLA-DRB1*14:01L HLA-DRB1*14:54L
GIGVTQNVLYENQ

SEQ ID NO: 14928 - protein, 14 aa, Severe acute respiratory syndrome coronavirus 2
  REGION 1..14: note = Table B: HLA-DRB1*13:02L HLA-DRB1*04:05L HLA-DRB1*08:04L HLA-DRB3*02:01L HLA-DPA1*02:01-B1*13:01L HLA-DRB1*04:08L
VTQNVLYENQKLIA

SEQ ID NO: 14929 - protein, 12 aa, Severe acute respiratory syndrome coronavirus 2
  REGION 1..12: note = Table B: HLA-DRB1*13:02L HLA-DRB1*13:03L HLA-DRB1*01:03L HLA-DRB1*04:02L HLA-DRB1*04:05L HLA-DQA1*01:02-B1*06:02L HLA-DRB1*01:02L HLA-DRB4*03:01NL HLA-DRB1*08:04L HLA-DRB1*08:77L HLA-DRB3*02:01L HLA-DPA1*01:03-B1*03:01L HLA-DRB1*08:01L
  REGION 1..12: note = CONT. FROM ABOVE: HLA-DQA1*01-B1*05L HLA-DQA1*05:01-B1*02:01L HL A-DPA1*01:03-B1*04:01L HLA-DPA1*01:03-B1*04:02L HLA-DRB1*12:01L HLA-DRB1*12:02L HLA-DPA1*02:01-B1*13:01L HLA-DRB1*14:54L HLA-DPA 1*01:03-B1*104:01L HLA-DQA1*05:05-B1*03:01L HLA-DRB1*14:17L
  REGION 1..12: note = CONT. FROM ABOVE: HLA-DQA1*01:03-B1*06:01L HLA-DRB1*04:08L
NQKLIANQFNSA

SEQ ID NO: 14930 - protein, 12 aa, Severe acute respiratory syndrome coronavirus 2
  REGION 1..12: note = Table B: HLA-DRB1*13:02L HLA-DRB1*13:03L HLA-DRB1*04:04L HLA-DRB1*04:05L HLA-DRB1*01:02L HLA-DRB1*08:04L HLA-DPA1*01:03-B1*03:01L HLA-DRB1*11:04L HLA-DRB1*08:01L HLA-DRB1*11:01L HLA-DRB1*04:10L HLA-DPA1*02:01-B1*13:01L
  REGION 1..12: note = CONT. FROM ABOVE: HLA-DRB1*14:54L HLA-DPA1*01:03-B1*02:01L HLA-D QA1*05:05-B1*03:01L HLA-DRB1*10:01L
KLIANQFNSAIG

SEQ ID NO: 14931 - protein, 12 aa, Severe acute respiratory syndrome coronavirus 2
  REGION 1..12: note = Table B: HLA-DRB1*13:02L HLA-DRB1*08:04L HLA-DRB1*08:77L HLA-DRB3*02:01L HLA-DPA1*01:03-B1*03:01L HLA-DPA1*03:01-B1*04:02L HLA-DRB1*08:01L HLA-DRB1*04:10L HLA-DRB1*09:01L HLA-DRB1*12:02L HLA-DPA1*02:01-B1*13:01L
ANQFNSAIGKIQ

SEQ ID NO: 14932 - protein, 13 aa, Severe acute respiratory syndrome coronavirus 2
  REGION 1..13: note = Table B: HLA-DRB1*13:02L HLA-DRB1*04:04L HLA-DRB1*01:01L HLA-DRB1*08:04L HLA-DPA1*01:03-B1*03:01L HLA-DPA1*03:01-B1*04:02L HLA-DRB1*11:03L HLA-DRB1*11:04L HLA-DRB1*14:02L HLA-DQA1*01:01-B1*05:01L HLA-DRB1*08:01L
  REGION 1..13: note = CONT. FROM ABOVE: HLA-DRB1*11:01L HLA-DRB1*04:10L HLA-DPA1*01:03 -B1*04:02L HLA-DRB1*12:02L HLA-DPA1*02:01-B1*13:01L HLA-DRB1*07: 01L HLA-DRB1*10:01L HLA-DRB1*08:03L
NQFNSAIGKIQDS

SEQ ID NO: 14933 - protein, 14 aa, Severe acute respiratory syndrome coronavirus 2
  REGION 1..14: note = Table B: HLA-DRB1*13:02L HLA-DRB1*08:04L HLA-DRB1*11:01L HLA-DPA1*02:01-B1*13:01L HLA-DPA1*01:03-B1*104:01L HLA-DRB1*08:03L
STASALGKLQDVVN

SEQ ID NO: 14934 - protein, 13 aa, Severe acute respiratory syndrome coronavirus 2
  REGION 1..13: note = Table B: HLA-DRB1*13:02L HLA-DPA1*01:03-B1*03:01L HLA-DPA1*02:01-B1*13:01L
ALGKLQDVVNQNA

SEQ ID NO: 14935 - protein, 10 aa, Severe acute respiratory syndrome coronavirus 2
  REGION 1..10: note = Table B: HLA-DRB1*13:02L HLA-DRB1*13:03L HLA-DRB1*04:02L HLA-DRB4*03:01NL HLA-DRB1*08:01L HLA-DRB5*01:01L HLA-DRB1*12:01L HLA-DQA1*03:01-B1*03:02M HLA-DQA1*05:05-B1*03:01L HLA-DRB1*14:17L HLA-DQA1*01:03-B1*06:01L
  REGION 1..10: note = CONT. FROM ABOVE: HLA-DQA1*02:01-B1*03:03L
SSVLNDILSR

SEQ ID NO: 14936 - protein, 12 aa, Severe acute respiratory syndrome coronavirus 2
  REGION 1..12: note = Table B: HLA-DRB1*13:02L HLA-DRB1*01:03L HLA-DRB1*04:02L HLA-DRB1*04:04L HLA-DRB1*04:05L HLA-DQA1*01:02-B1*06:02L HLA-DRB1*01:02L HLA-DRB4*03:01NL HLA-DPA1*01:03-B1*03:01L HLA-DQA1*01-B1*05L HLA-DQA1*05:01-B1*02:01L HLA-DRB1*04:10L
  REGION 1..12: note = CONT. FROM ABOVE: HLA-DPA1*02:01-B1*13:01L HLA-DQA1*05:05-B1*03: 01L HLA-DRB1*14:17L HLA-DRB1*07:01L HLA-DRB1*04:08L
LDKVEAEVQIDR

SEQ ID NO: 14937 - protein, 14 aa, Severe acute respiratory syndrome coronavirus 2
  REGION 1..14: note = Table B: HLA-DRB1*13:02L HLA-DPA1*01:03-B1*03:01L
GRLQSLQTYVTQQL

SEQ ID NO: 14938 - protein, 10 aa, Severe acute respiratory syndrome coronavirus 2
  REGION 1..10: note = Table B: HLA-DRB1*13:02L HLA-DRB1*13:03L HLA-DRB1*04:02L HLA-DRB4*03:01NL HLA-DRB1*08:01L HLA-DRB1*12:01L HLA-DQA1*03:01-B1*03:02L HLA-DQA1*05:05-B1*03:01L HLA-DRB1*14:17L HLA-DRB1*16:01L HLA-DQA1*01:03-B1*06:01L
  REGION 1..10: note = CONT. FROM ABOVE: HLA-DQA1*02:01-B1*03:03L
QTYVTQQLIR

SEQ ID NO: 14939 - protein, 14 aa, Severe acute respiratory syndrome coronavirus 2
  REGION 1..14: note = Table B: HLA-DRB1*13:02L HLA-DPA1*01:03-B1*03:01L HLA-DPA1*02:01-B1*13:01L
VTQQLIRAAEIRAS

SEQ ID NO: 14940 - protein, 12 aa, Severe acute respiratory syndrome coronavirus 2
  REGION 1..12: note = Table B: HLA-DRB1*13:02L HLA-DRB1*04:04L HLA-DRB1*04:05L HLA-DPA1*01:03-B1*03:01L HLA-DRB1*11:01L HLA-DRB4*02:01NL HLA-DPA1*01:03-B1*02:01L HLA-DPA1*01:03-B1*104:01L HLA-DRB1*08:03L HLA-DRB1*15:03L
LIRAAEIRASAN

SEQ ID NO: 14941 - protein, 10 aa, Severe acute respiratory syndrome coronavirus 2
  REGION 1..10: note = Table B: HLA-DRB1*13:02L HLA-DRB1*13:03L HLA-DRB1*01:03L HLA-DRB1*04:02L HLA-DRB1*01:01L HLA-DRB4*03:01NL HLA-DRB1*08:01L HLA-DRB1*12:01L HLA-DQA1*03:01-B1*03:02L HLA-DQA1*05:05-B1*03:01L HLA-DRB1*14:17L HLA-DRB1*16:01L
  REGION 1..10: note = CONT. FROM ABOVE: HLA-DQA1*02:01-B1*03:03L
RASANLAATK

SEQ ID NO: 14942 - protein, 15 aa, Severe acute respiratory syndrome coronavirus 2
  REGION 1..15: note = Table B: HLA-DRB1*13:02L HLA-DRB1*04:05L HLA-DRB1*08:04L HLA-DPA1*01:03-B1*03:01L HLA-DRB1*14:02L HLA-DRB1*08:01L HLA-DRB1*11:01L HLA-DPA1*02:01-B1*13:01L HLA-DPA1*01:03-B1*104:01L
SANLAATKMSECVLG

SEQ ID NO: 14943 - protein, 14 aa, Severe acute respiratory syndrome coronavirus 2
  REGION 1..14: note = Table B: HLA-DRB1*13:02L HLA-DRB1*01:03L HLA-DRB1*04:04L HLA-DRB1*04:05L HLA-DRB1*01:02L HLA-DRB1*12:01L HLA-DQA1*03:01-B1*03:02L HLA-DPA1*01:03-B1*104:01L HLA-DRB1*04:08L
AATKMSECVLGQSK

SEQ ID NO: 14944 - protein, 14 aa, Severe acute respiratory syndrome coronavirus 2
  REGION 1..14: note = Table B: HLA-DRB1*13:02L HLA-DRB1*01:01L HLA-DPA1*01:03-B1*03:01L HLA-DRB1*03:01L HLA-DRB1*11:03L HLA-DRB1*14:02L HLA-DPA1*01:03-B1*04:02L HLA-DRB3*01:01L HLA-DPA1*02:01-B1*13:01L HLA-DPA1*01:03-B1*02:01L
  REGION 1..14: note = CONT. FROM ABOVE: HLA-DRB1*07:01L HLA-DQA1*01:03-B1*06:01L
KGYHLMSFPQSAPH

SEQ ID NO: 14945 - protein, 14 aa, Severe acute respiratory syndrome coronavirus 2
  REGION 1..14: note = Table B: HLA-DRB1*13:02L HLA-DRB1*01:01L HLA-DPA1*03:01-B1*04:02L HLA-DRB1*14:02L HLA-DPA1*01:03-B1*04:02L HLA-DRB3*01:01L HLA-DPA1*01:03-B1*02:01L HLA-DPA1*01:03-B1*104:01L
GYHLMSFPQSAPHG

SEQ ID NO: 14946 - protein, 13 aa, Severe acute respiratory syndrome coronavirus 2
  REGION 1..13: note = Table B: HLA-DRB1*13:02L HLA-DRB1*01:03L HLA-DRB1*04:02L HLA-DRB1*04:05L HLA-DRB1*08:04L HLA-DRB3*02:01L HLA-DRB1*08:01L HLA-DQA1*01-B1*05L HLA-DPA1*02:01-B1*13:01L HLA-DQA1*03:01-B1*03:02L HLA-DPA1*01:03-B1*02:01L
  REGION 1..13: note = CONT. FROM ABOVE: HLA-DPA1*01:03-B1*104:01L HLA-DQA1*05:05-B1*03 :01L HLA-DRB1*14:17L HLA-DQA1*01:03-B1*06:01L
GVVFLHVTYVPAQ

SEQ ID NO: 14947 - protein, 10 aa, Severe acute respiratory syndrome coronavirus 2
  REGION 1..10: note = Table B: HLA-DRB1*13:02L HLA-DRB1*13:03L HLA-DRB1*04:02L HLA-DRB4*03:01NL HLA-DRB1*08:01L HLA-DRB5*01:01L HLA-DRB1*12:01L HLA-DQA1*03:01-B1*03:02L HLA-DQA1*05:05-B1*03:01L HLA-DRB1*14:17L HLA-DQA1*02:01-B1*03:03L
HVTYVPAQEK

SEQ ID NO: 14948 - protein, 12 aa, Severe acute respiratory syndrome coronavirus 2
  REGION 1..12: note = Table B: HLA-DRB1*13:02L HLA-DRB1*08:04L HLA-DRB3*02:01L HLA-DPA1*01:03-B1*03:01L HLA-DRB1*09:01L HLA-DRB1*12:02L HLA-DRB1*07:01L
VTYVPAQEKNFT

SEQ ID NO: 14949 - protein, 13 aa, Severe acute respiratory syndrome coronavirus 2
  REGION 1..13: note = Table B: HLA-DRB1*13:02L HLA-DRB1*01:03L HLA-DRB1*08:04L HLA-DRB1*14:01L HLA-DRB3*01:01L HLA-DRB1*16:01L
APAICHDGKAHFP

SEQ ID NO: 14950 - protein, 15 aa, Severe acute respiratory syndrome coronavirus 2
  REGION 1..15: note = Table B: HLA-DRB1*13:02L HLA-DPA1*01:03-B1*104:01L HLA-DRB1*15:03L
AHFPREGVFVSNGTH

SEQ ID NO: 14951 - protein, 14 aa, Severe acute respiratory syndrome coronavirus 2
  REGION 1..14: note = Table B: HLA-DRB1*13:02L HLA-DRB1*04:02L HLA-DRB1*11:04L HLA-DRB1*11:01L HLA-DQA1*03:01-B1*03:02L HLA-DRB1*08:03L
GTHWFVTQRNFYEP

SEQ ID NO: 14952 - protein, 13 aa, Severe acute respiratory syndrome coronavirus 2
  REGION 1..13: note = Table B: HLA-DRB1*13:02L HLA-DRB1*14:02L HLA-DRB1*11:01L HLA-DPA1*01:03-B1*04:02L HLA-DRB3*01:01L HLA-DRB1*08:02L
HWFVTQRNFYEPQ

SEQ ID NO: 14953 - protein, 14 aa, Severe acute respiratory syndrome coronavirus 2
  REGION 1..14: note = Table B: HLA-DRB1*13:02L HLA-DPA1*01:03-B1*104:01L
VTQRNFYEPQIITT

SEQ ID NO: 14954 - protein, 13 aa, Severe acute respiratory syndrome coronavirus 2
  REGION 1..13: note = Table B: HLA-DRB1*13:02L HLA-DRB1*01:03L HLA-DRB1*04:04L HLA-DRB1*01:02L HLA-DRB1*08:04L HLA-DPA1*01:03-B1*03:01L HLA-DPA1*03:01-B1*04:02L HLA-DQA1*01:01-B1*05:01L HLA-DRB1*08:01L HLA-DPA1*01:03-B1*04:02L HLA-DRB1*12:01L
  REGION 1..13: note = CONT. FROM ABOVE: HLA-DPA1*02:01-B1*13:01L HLA-DRB1*14:54L HLA-D PA1*01:02-B1*04:01L HLA-DRB1*10:01L HLA-DRB1*08:03L HLA-DRB1*15: 03L
RNFYEPQIITTDN

SEQ ID NO: 14955 - protein, 11 aa, Severe acute respiratory syndrome coronavirus 2
  REGION 1..11: note = Table B: HLA-DRB1*13:02L HLA-DRB1*13:03L HLA-DRB1*04:02L HLA-DRB4*03:01NL HLA-DRB1*14:01L HLA-DQA1*05:01-B1*02:01L HLA-DRB1*12:01L HLA-DRB1*14:54L HLA-DRB1*16:01L
IITTDNTFVSG

SEQ ID NO: 14956 - protein, 14 aa, Severe acute respiratory syndrome coronavirus 2
  REGION 1..14: note = Table B: HLA-DRB1*13:02L HLA-DRB1*13:03L HLA-DRB1*01:03L HLA-DRB1*04:02L HLA-DRB1*04:04L HLA-DRB1*04:05L HLA-DRB1*01:02L HLA-DRB4*03:01NL HLA-DRB1*08:04L HLA-DRB1*08:77L HLA-DRB3*02:01L HLA-DPA1*01:03-B1*03:01L HLA-DPA1*03:01-B1*04:02L
  REGION 1..14: note = CONT. FROM ABOVE: HLA-DRB1*14:01L HLA-DRB1*11:03L HLA-DRB1*11:04 L HLA-DRB1*14:02L HLA-DQA1*01:01-B1*05:01L HLA-DRB1*08:01L HLA-D RB1*11:01L HLA-DQA1*01-B1*05L HLA-DPA1*01:03-B1*04:01L HLA-DQA1* 05:05-B1*03:116L HLA-DRB1*04:10L HLA-DRB1*09:01L
  REGION 1..14: note = CONT. FROM ABOVE: HLA-DPA1*01:03-B1*04:02L HLA-DRB1*12:01L HLA-D RB1*12:02L HLA-DPA1*02:01-B1*13:01L HLA-DRB1*14:54L HLA-DPA1*01: 03-B1*02:01L HLA-DPA1*01:03-B1*104:01L HLA-DRB1*14:17L HLA-DPA1* 01:02-B1*04:01L HLA-DRB1*07:01L HLA-DRB1*10:01L HLA-DRB1*16:01L
  REGION 1..14: note = CONT. FROM ABOVE: HLA-DRB1*04:08L HLA-DRB1*08:03L HLA-DRB1*15:03L
DNTFVSGNCDVVIG

SEQ ID NO: 14957 - protein, 15 aa, Severe acute respiratory syndrome coronavirus 2
  REGION 1..15: note = Table B: HLA-DRB1*13:02L HLA-DRB1*01:03L HLA-DRB1*01:02L HLA-DPA1*01:03-B1*03:01L HLA-DRB1*08:01L HLA-DRB3*01:01L HLA-DQA1*05:05-B1*03:01L HLA-DRB1*04:08L HLA-DRB1*08:03L
DPLQPELDSFKEELD

SEQ ID NO: 14958 - protein, 14 aa, Severe acute respiratory syndrome coronavirus 2
  REGION 1..14: note = Table B: HLA-DRB1*13:02L HLA-DRB1*04:04L HLA-DRB1*11:04L HLA-DQA1*01-B1*05L HLA-DRB3*01:01L
EELDKYFKNHTSPD

SEQ ID NO: 14959 - protein, 13 aa, Severe acute respiratory syndrome coronavirus 2
  REGION 1..13: note = Table B: HLA-DRB1*13:02L HLA-DRB1*08:04L HLA-DRB1*11:04L HLA-DRB1*11:01L HLA-DRB1*04:10L HLA-DRB3*01:01L HLA-DPA1*02:01-B1*13:01L HLA-DRB1*08:03L HLA-DRB1*15:03L
LDKYFKNHTSPDV

SEQ ID NO: 14960 - protein, 12 aa, Severe acute respiratory syndrome coronavirus 2
  REGION 1..12: note = Table B: HLA-DRB1*13:02L HLA-DRB1*13:03L HLA-DRB1*01:03L HLA-DRB1*04:04L HLA-DRB1*04:05L HLA-DRB1*01:01L HLA-DRB1*08:04L HLA-DRB1*08:77L HLA-DRB3*02:01L HLA-DPA1*01:03-B1*03:01L HLA-DPA1*03:01-B1*04:02L HLA-DRB1*14:01L HLA-DRB1*11:03L
  REGION 1..12: note = CONT. FROM ABOVE: HLA-DRB1*11:04L HLA-DRB1*14:02L HLA-DQA1*01:01 -B1*05:01L HLA-DRB1*08:01L HLA-DRB5*01:01L HLA-DQA1*01-B1*05L HL A-DRB4*01:01L HLA-DRB1*04:10L HLA-DPA1*01:03-B1*04:02L HLA-DRB1* 12:02L HLA-DPA1*02:01-B1*13:01L HLA-DRB1*14:54L HLA-DRB1*07:01L
  REGION 1..12: note = CONT. FROM ABOVE: HLA-DRB1*10:01L HLA-DRB1*04:08L HLA-DRB1*08:03 L HLA-DRB1*15:03L
GDISGINASVVN

SEQ ID NO: 14961 - protein, 15 aa, Severe acute respiratory syndrome coronavirus 2
  REGION 1..15: note = Table B: HLA-DRB1*13:02L HLA-DRB1*04:04L HLA-DRB1*08:04L HLA-DPA1*01:03-B1*04:02L
AKNLNESLIDLQELG

SEQ ID NO: 14962 - protein, 10 aa, Severe acute respiratory syndrome coronavirus 2
  REGION 1..10: note = Table B: HLA-DRB1*13:02L HLA-DRB1*13:03L HLA-DRB1*04:02L HLA-DQA1*01:02-B1*06:02L HLA-DRB1*01:01L HLA-DRB4*03:01NL HLA-DRB3*02:01L HLA-DRB1*14:01L HLA-DRB1*11:04L HLA-DRB1*08:01L HLA-DRB5*01:01L HLA-DPA1*01:03-B1*04:02L HLA-DRB1*12:01L
  REGION 1..10: note = CONT. FROM ABOVE: HLA-DRB1*12:02L HLA-DPA1*03:01-B1*105:01L HLA- DQA1*03:01-B1*03:02M HLA-DQA1*05:05-B1*03:01L HLA-DRB1*14:17L HL A-DRB1*16:01L HLA-DQA1*01:03-B1*06:01L HLA-DQA1*02:01-B1*03:03L
SLIDLQELGK

SEQ ID NO: 14963 - protein, 14 aa, Severe acute respiratory syndrome coronavirus 2
  REGION 1..14: note = Table B: HLA-DRB1*13:02L HLA-DRB1*04:05L HLA-DRB1*11:03L HLA-DRB1*11:04L HLA-DRB1*11:01L HLA-DRB3*01:01L HLA-DPA1*01:03-B1*02:01L HLA-DRB1*08:03L
IDLQELGKYEQYIK

SEQ ID NO: 14964 - protein, 16 aa, Severe acute respiratory syndrome coronavirus 2
  REGION 1..16: note = Table B: HLA-DRB1*13:02L
DLQELGKYEQYIKWPW

SEQ ID NO: 14965 - protein, 12 aa, Severe acute respiratory syndrome coronavirus 2
  REGION 1..12: note = Table B: HLA-DRB1*13:02L HLA-DRB1*01:03L HLA-DRB1*01:02L HLA-DRB1*08:04L HLA-DRB1*14:01L HLA-DRB1*08:01L HLA-DPA1*03:01-B1*105:01L HLA-DRB1*04:08L
GKYEQYIKWPWY

SEQ ID NO: 14966 - protein, 13 aa, Severe acute respiratory syndrome coronavirus 2
  REGION 1..13: note = Table B: HLA-DRB1*13:02L HLA-DRB1*01:03L HLA-DRB1*04:04L HLA-DRB1*04:05L HLA-DQA1*01:02-B1*06:02L HLA-DRB1*01:02L HLA-DRB1*08:04L HLA-DPA1*01:03-B1*03:01L HLA-DPA1*03:01-B1*04:02L HLA-DRB1*14:01L HLA-DQA1*01-B1*05L
  REGION 1..13: note = CONT. FROM ABOVE: HLA-DPA1*01:03-B1*04:02L HLA-DRB1*12:01L HLA-D PA1*02:01-B1*13:01L HLA-DPA1*01:03-B1*104:01L HLA-DQA1*05:05-B1* 03:01L HLA-DRB1*16:01L HLA-DRB1*04:08L HLA-DRB1*15:03L
DLFMRIFTIGTVT

SEQ ID NO: 14967 - protein, 12 aa, Severe acute respiratory syndrome coronavirus 2
  REGION 1..12: note = Table B: HLA-DRB1*13:02L HLA-DRB1*01:02L HLA-DRB3*02:01L
IPIQASLPFGWL

SEQ ID NO: 14968 - protein, 10 aa, Severe acute respiratory syndrome coronavirus 2
  REGION 1..10: note = Table B: HLA-DRB1*13:02L HLA-DRB1*13:03L HLA-DQA1*01:02-B1*06:02L HLA-DRB4*03:01NL HLA-DRB1*08:01L HLA-DRB1*12:01L HLA-DPA1*03:01-B1*105:01L HLA-DQA1*03:01-B1*03:02L HLA-DQA1*05:05-B1*03:01L
  REGION 1..10: note = CONT. FROM ABOVE: HLA-DQA1*01:03-B1*06:01L HLA-DQA1*02:01-B1*03: 03L
QSASKIITLK

SEQ ID NO: 14969 - protein, 10 aa, Severe acute respiratory syndrome coronavirus 2
  REGION 1..10: note = Table B: HLA-DRB1*13:02L HLA-DRB1*13:03L HLA-DRB1*08:01L HLA-DRB1*12:01L HLA-DQA1*03:01-B1*03:02L HLA-DQA1*05:05-B1*03:01L HLA-DQA1*01:03-B1*06:01L HLA-DQA1*02:01-B1*03:03L
SASKIITLKK

SEQ ID NO: 14970 - protein, 12 aa, Severe acute respiratory syndrome coronavirus 2
  REGION 1..12: note = Table B: HLA-DRB1*13:02L HLA-DRB1*04:05L HLA-DRB1*12:01L HLA-DRB3*01:01L HLA-DRB1*14:54L HLA-DPA1*01:02-B1*04:01L HLA-DRB1*15:03L
ASKIITLKKRWQ

SEQ ID NO: 14971 - protein, 12 aa, Severe acute respiratory syndrome coronavirus 2
  REGION 1..12: note = Table B: HLA-DRB1*13:02L HLA-DRB1*13:03L HLA-DRB1*01:03L HLA-DRB1*04:05L HLA-DRB1*01:02L HLA-DRB1*11:02L HLA-DRB1*11:03L HLA-DRB1*12:01L HLA-DRB3*01:01L HLA-DRB1*04:08L HLA-DRB1*15:03L
KIITLKKRWQLA

SEQ ID NO: 14972 - protein, 14 aa, Severe acute respiratory syndrome coronavirus 2
  REGION 1..14: note = Table B: HLA-DRB1*13:02L HLA-DRB1*01:03L HLA-DRB1*01:02L HLA-DRB3*01:01L HLA-DRB1*04:08L
IITLKKRWQLALSK

SEQ ID NO: 14973 - protein, 12 aa, Severe acute respiratory syndrome coronavirus 2
  REGION 1..12: note = Table B: HLA-DRB1*13:02L HLA-DRB1*13:03L HLA-DRB1*04:05L HLA-DRB1*01:01L HLA-DRB1*14:01L HLA-DRB1*11:04L HLA-DRB1*11:01L HLA-DRB3*01:01L HLA-DPA1*02:01-B1*13:01L
KRWQLALSKGVH

SEQ ID NO: 14974 - protein, 12 aa, Severe acute respiratory syndrome coronavirus 2
  REGION 1..12: note = Table B: HLA-DRB1*13:02L HLA-DRB1*01:03L
YFLQSINFVRII

SEQ ID NO: 14975 - protein, 11 aa, Severe acute respiratory syndrome coronavirus 2
  REGION 1..11: note = Table B: HLA-DRB1*13:02L
QSINFVRIIMR

SEQ ID NO: 14976 - protein, 12 aa, Severe acute respiratory syndrome coronavirus 2
  REGION 1..12: note = Table B: HLA-DRB1*13:02L HLA-DRB1*04:02L HLA-DRB1*04:05L HLA-DRB1*01:02L HLA-DRB1*08:04L HLA-DPA1*01:03-B1*03:01L HLA-DPA1*03:01-B1*04:02L HLA-DRB1*12:01L HLA-DRB1*12:02L HLA-DPA1*02:01-B1*13:01L HLA-DRB1*14:54L
  REGION 1..12: note = CONT. FROM ABOVE: HLA-DPA1*01:02-B1*04:01L
KNPLLYDANYFL

SEQ ID NO: 14977 - protein, 14 aa, Severe acute respiratory syndrome coronavirus 2
  REGION 1..14: note = Table B: HLA-DRB1*13:02L HLA-DRB1*01:03L HLA-DQA1*01:02-B1*06:02L HLA-DRB1*01:02L HLA-DRB1*08:04L HLA-DPA1*03:01-B1*04:02L HLA-DRB1*14:01L HLA-DRB1*08:01L HLA-DRB1*11:01L HLA-DPA1*01:03-B1*04:02L
  REGION 1..14: note = CONT. FROM ABOVE: HLA-DPA1*03:01-B1*105:01L HLA-DRB1*16:01L HLA- DRB1*04:08L HLA-DRB1*15:03L
DANYFLCWHTNCYD

SEQ ID NO: 14978 - protein, 14 aa, Severe acute respiratory syndrome coronavirus 2
  REGION 1..14: note = Table B: HLA-DRB1*13:02L HLA-DRB1*01:02L HLA-DRB1*15:03L
VTSSIVITSGDGTT

SEQ ID NO: 14979 - protein, 14 aa, Severe acute respiratory syndrome coronavirus 2
  REGION 1..14: note = Table B: HLA-DRB1*13:02L HLA-DRB1*01:03L HLA-DQA1*01:02-B1*06:02L HLA-DRB1*01:02L HLA-DRB1*12:01L HLA-DPA1*03:01-B1*105:01L HLA-DRB1*14:54L HLA-DRB1*16:01L HLA-DQA1*01:03-B1*06:01L
SIVITSGDGTTSPI

SEQ ID NO: 14980 - protein, 13 aa, Severe acute respiratory syndrome coronavirus 2
  REGION 1..13: note = Table B: HLA-DRB1*13:02L HLA-DRB1*01:02L HLA-DRB1*11:01L HLA-DRB1*04:10L HLA-DRB3*01:01L HLA-DRB1*14:54L
SGDGTTSPISEHD

SEQ ID NO: 14981 - protein, 10 aa, Severe acute respiratory syndrome coronavirus 2
  REGION 1..10: note = Table B: HLA-DRB1*13:02L HLA-DRB1*13:03L HLA-DRB1*04:02L HLA-DRB4*03:01NL HLA-DRB1*08:01L HLA-DRB5*01:01L HLA-DRB1*12:01L HLA-DQA1*03:01-B1*03:02L HLA-DQA1*05:05-B1*03:01L HLA-DRB1*14:17L HLA-DQA1*01:03-B1*06:01L
  REGION 1..10: note = CONT. FROM ABOVE: HLA-DQA1*02:01-B1*03:03L
DYQIGGYTEK

SEQ ID NO: 14982 - protein, 14 aa, Severe acute respiratory syndrome coronavirus 2
  REGION 1..14: note = Table B: HLA-DRB1*13:02L HLA-DRB1*14:01L HLA-DRB1*11:04L HLA-DRB1*11:01L HLA-DRB3*01:01L HLA-DQA1*05:05-B1*03:01L
IGGYTEKWESGVKD

SEQ ID NO: 14983 - protein, 14 aa, Severe acute respiratory syndrome coronavirus 2
  REGION 1..14: note = Table B: HLA-DRB1*13:02L HLA-DRB1*01:03L HLA-DRB1*04:05L HLA-DRB1*01:02L HLA-DRB1*04:08L
DTGVEHVTFFIYNK

SEQ ID NO: 14984 - protein, 15 aa, Severe acute respiratory syndrome coronavirus 2
  REGION 1..15: note = Table B: HLA-DRB1*13:02L HLA-DRB1*01:03L HLA-DRB1*04:05L HLA-DPA1*01:03-B1*04:01L HLA-DQA1*02:01-B1*03:03L
GVEHVTFFIYNKIVD

SEQ ID NO: 14985 - protein, 14 aa, Severe acute respiratory syndrome coronavirus 2
  REGION 1..14: note = Table B: HLA-DRB1*13:02L HLA-DRB1*01:03L HLA-DRB1*01:02L HLA-DRB1*14:01L HLA-DRB1*14:02L HLA-DRB1*11:01L HLA-DRB1*12:01L HLA-DRB1*08:03L
HVTFFIYNKIVDEP

SEQ ID NO: 14986 - protein, 13 aa, Severe acute respiratory syndrome coronavirus 2
  REGION 1..13: note = Table B: HLA-DRB1*13:02L HLA-DRB1*01:03L HLA-DRB1*04:04L HLA-DRB1*04:05L HLA-DRB4*03:01NL HLA-DRB1*08:77L HLA-DPA1*01:03-B1*03:01L HLA-DRB1*14:01L HLA-DQA1*01:01-B1*05:01L HLA-DQA1*01-B1*05L HLA-DRB1*04:10L
  REGION 1..13: note = CONT. FROM ABOVE: HLA-DPA1*02:01-B1*13:01L HLA-DRB1*14:54L HLA-D PA1*01:03-B1*104:01L HLA-DRB1*10:01L HLA-DRB1*16:01L HLA-DQA1*01 :03-B1*06:01L HLA-DRB1*04:08L
IHTIDGSSGVVNP

SEQ ID NO: 14987 - protein, 16 aa, Severe acute respiratory syndrome coronavirus 2
  REGION 1..16: note = Table B: HLA-DRB1*13:02L HLA-DRB3*01:01L HLA-DPA1*02:01-B1*13:01L HLA-DPA1*01:03-B1*104:01L
TIDGSSGVVNPVMEPI

SEQ ID NO: 14988 - protein, 14 aa, Severe acute respiratory syndrome coronavirus 2
  REGION 1..14: note = Table B: HLA-DRB1*13:02L HLA-DRB1*01:02L HLA-DPA1*02:01-B1*13:01L HLA-DQA1*05:05-B1*03:01L
VVNPVMEPIYDEPT

SEQ ID NO: 14989 - protein, 14 aa, Severe acute respiratory syndrome coronavirus 2
  REGION 1..14: note = Table B: HLA-DRB1*13:02L HLA-DQA1*01:02-B1*06:02L HLA-DRB1*14:01L HLA-DPA1*02:01-B1*13:01L HLA-DPA1*03:01-B1*105:01L
VNPVMEPIYDEPTT

SEQ ID NO: 14990 - protein, 14 aa, Severe acute respiratory syndrome coronavirus 2
  REGION 1..14: note = Table B: HLA-DRB1*13:02L HLA-DRB1*01:03L HLA-DRB1*04:02L HLA-DRB1*04:04L HLA-DRB1*04:05L HLA-DRB4*03:01NL HLA-DRB1*14:02L HLA-DQA1*01:01-B1*05:01L HLA-DRB1*08:01L HLA-DRB1*11:01L HLA-DRB4*02:01NL HLA-DPA1*01:03-B1*04:01L
  REGION 1..14: note = CONT. FROM ABOVE: HLA-DPA1*01:03-B1*04:02L HLA-DRB1*12:01L HLA-D RB3*01:01L HLA-DRB1*14:17L HLA-DRB1*04:08M
VSEETGTLIVNSVL

SEQ ID NO: 14991 - protein, 12 aa, Severe acute respiratory syndrome coronavirus 2
  REGION 1..12: note = Table B: HLA-DRB1*13:02L HLA-DRB1*14:01L HLA-DPA1*03:01-B1*105:01L HLA-DRB1*16:01L
TGTLIVNSVLLF

SEQ ID NO: 14992 - protein, 13 aa, Severe acute respiratory syndrome coronavirus 2
  REGION 1..13: note = Table B: HLA-DRB1*13:02L HLA-DRB1*04:05L HLA-DRB1*11:04L HLA-DRB1*11:01L HLA-DRB3*01:01L HLA-DPA1*02:01-B1*13:01L HLA-DPA1*01:03-B1*02:01L HLA-DRB1*08:03L
PSFYVYSRVKNLN

SEQ ID NO: 14993 - protein, 12 aa, Severe acute respiratory syndrome coronavirus 2
  REGION 1..12: note = Table B: HLA-DRB1*13:02L HLA-DRB1*13:03L HLA-DRB1*04:04L HLA-DRB1*04:05L HLA-DRB1*08:04L HLA-DRB1*14:01L HLA-DRB1*11:04L HLA-DRB1*08:01L HLA-DRB1*11:01L HLA-DRB1*14:54L
YVYSRVKNLNSS

SEQ ID NO: 14994 - protein, 13 aa, Severe acute respiratory syndrome coronavirus 2
  REGION 1..13: note = Table B: HLA-DRB1*13:02L HLA-DRB1*13:03L HLA-DRB1*01:02L HLA-DRB4*03:01NL HLA-DPA1*01:03-B1*03:01L HLA-DPA1*01:03-B1*04:01L HLA-DQA1*05:05-B1*03:116L HLA-DRB1*04:10L HLA-DRB3*01:01L HLA-DRB1*14:17L
  REGION 1..13: note = CONT. FROM ABOVE: HLA-DPA1*01:02-B1*04:01L HLA-DRB1*07:01L HLA-D RB1*15:03L
ADSNGTITVEELK

SEQ ID NO: 14995 - protein, 13 aa, Severe acute respiratory syndrome coronavirus 2
  REGION 1..13: note = Table B: HLA-DRB1*13:02L HLA-DPA1*01:03-B1*04:02L HLA-DRB3*01:01L HLA-DRB1*14:54L HLA-DPA1*01:03-B1*02:01L
TITVEELKKLLEQ

SEQ ID NO: 14996 - protein, 14 aa, Severe acute respiratory syndrome coronavirus 2
  REGION 1..14: note = Table B: HLA-DRB1*13:02L HLA-DRB1*11:02L HLA-DPA1*02:01-B1*13:01L HLA-DQA1*05:05-B1*03:01L HLA-DRB1*08:02L
ITVEELKKLLEQWN

SEQ ID NO: 14997 - protein, 14 aa, Severe acute respiratory syndrome coronavirus 2
  REGION 1..14: note = Table B: HLA-DRB1*13:02L HLA-DPA1*01:03-B1*104:01L HLA-DQA1*02:01-B1*03:03L
ELKKLLEQWNLVIG

SEQ ID NO: 14998 - protein, 12 aa, Severe acute respiratory syndrome coronavirus 2
  REGION 1..12: note = Table B: HLA-DRB1*13:02L HLA-DRB1*04:05L HLA-DRB1*08:04L
LLQFAYANRNRF

SEQ ID NO: 14999 - protein, 12 aa, Severe acute respiratory syndrome coronavirus 2
  REGION 1..12: note = Table B: HLA-DRB1*13:02L HLA-DRB1*04:05L HLA-DRB1*08:04L HLA-DRB1*11:04L HLA-DRB1*11:01L HLA-DRB3*01:01L
LQFAYANRNRFL

SEQ ID NO: 15000 - protein, 14 aa, Severe acute respiratory syndrome coronavirus 2
  REGION 1..14: note = Table B: HLA-DRB1*13:02L HLA-DRB1*08:01L HLA-DRB1*12:01L HLA-DRB3*01:01L HLA-DRB1*04:08L
FAYANRNRFLYIIK

SEQ ID NO: 15001 - protein, 13 aa, Severe acute respiratory syndrome coronavirus 2
  REGION 1..13: note = Table B: HLA-DRB1*13:02L HLA-DPA1*01:03-B1*04:02L HLA-DRB3*01:01L
LSYFIASFRLFAR

SEQ ID NO: 15002 - protein, 13 aa, Severe acute respiratory syndrome coronavirus 2
  REGION 1..13: note = Table B: HLA-DRB1*13:02L HLA-DRB3*01:01L
SYFIASFRLFART

SEQ ID NO: 15003 - protein, 12 aa, Severe acute respiratory syndrome coronavirus 2
  REGION 1..12: note = Table B: HLA-DRB1*13:02L HLA-DQA1*01:02-B1*06:02L HLA-DRB1*01:02L HLA-DRB1*14:01L HLA-DRB1*12:01L HLA-DRB3*01:01L HLA-DRB1*16:01L HLA-DRB1*04:08L HLA-DRB1*15:03L
FIASFRLFARTR

SEQ ID NO: 15004 - protein, 13 aa, Severe acute respiratory syndrome coronavirus 2
  REGION 1..13: note = Table B: HLA-DRB1*13:02L HLA-DRB1*04:02L HLA-DRB1*11:02L HLA-DRB1*11:03L HLA-DQA1*05:05-B1*03:116L HLA-DPA1*01:03-B1*04:02L HLA-DPA1*02:01-B1*13:01L HLA-DRB1*08:02L HLA-DRB1*08:03L
IASFRLFARTRSM

SEQ ID NO: 15005 - protein, 16 aa, Severe acute respiratory syndrome coronavirus 2
  REGION 1..16: note = Table B: HLA-DRB1*13:02L HLA-DPA1*01:03-B1*104:01L
LFARTRSMWSFNPETN

SEQ ID NO: 15006 - protein, 12 aa, Severe acute respiratory syndrome coronavirus 2
  REGION 1..12: note = Table B: HLA-DRB1*13:02L HLA-DRB1*08:04L
NILLNVPLHGTI

SEQ ID NO: 15007 - protein, 12 aa, Severe acute respiratory syndrome coronavirus 2
  REGION 1..12: note = Table B: HLA-DRB1*13:02L HLA-DQA1*05:05-B1*03:01L
ILLNVPLHGTIL

SEQ ID NO: 15008 - protein, 16 aa, Severe acute respiratory syndrome coronavirus 2
  REGION 1..16: note = Table B: HLA-DRB1*13:02L HLA-DPA1*01:03-B1*03:01L HLA-DPA1*02:01-B1*13:01L HLA-DPA1*01:03-B1*104:01L
VPLHGTILTRPLLESE

SEQ ID NO: 15009 - protein, 10 aa, Severe acute respiratory syndrome coronavirus 2
  REGION 1..10: note = Table B: HLA-DRB1*13:02L HLA-DRB1*13:03L HLA-DRB4*03:01NL HLA-DRB1*08:01L HLA-DRB1*12:01L HLA-DQA1*03:01-B1*03:02L HLA-DQA1*05:05-B1*03:01L
ELVIGAVILR

SEQ ID NO: 15010 - protein, 14 aa, Severe acute respiratory syndrome coronavirus 2
  REGION 1..14: note = Table B: HLA-DRB1*13:02L HLA-DRB1*04:05L HLA-DRB1*11:04L HLA-DRB1*08:01L HLA-DRB1*12:01L
IGAVILRGHLRIAG

SEQ ID NO: 15011 - protein, 13 aa, Severe acute respiratory syndrome coronavirus 2
  REGION 1..13: note = Table B: HLA-DRB1*13:02L HLA-DRB1*04:05L HLA-DRB1*14:01L HLA-DRB1*12:01L HLA-DRB3*01:01L HLA-DRB1*16:01L
VILRGHLRIAGHH

SEQ ID NO: 15012 - protein, 12 aa, Severe acute respiratory syndrome coronavirus 2
  REGION 1..12: note = Table B: HLA-DRB1*13:02L HLA-DQA1*01:02-B1*06:02L HLA-DRB1*01:02L HLA-DRB1*12:01L HLA-DRB3*01:01L HLA-DPA1*01:02-B1*04:01L HLA-DRB1*08:03L HLA-DRB1*15:03L
RGHLRIAGHHLG

SEQ ID NO: 15013 - protein, 12 aa, Severe acute respiratory syndrome coronavirus 2
  REGION 1..12: note = Table B: HLA-DRB1*13:02L HLA-DQA1*01:02-B1*06:02L HLA-DRB1*01:02L HLA-DRB3*01:01L HLA-DRB1*15:03L
GHLRIAGHHLGR

SEQ ID NO: 15014 - protein, 10 aa, Severe acute respiratory syndrome coronavirus 2
  REGION 1..10: note = Table B: HLA-DRB1*13:02L HLA-DRB1*13:03L HLA-DRB1*01:01L HLA-DRB4*03:01NL HLA-DRB1*11:04L HLA-DRB1*08:01L HLA-DRB5*01:01L HLA-DRB1*12:01L HLA-DQA1*03:01-B1*03:02M HLA-DQA1*05:05-B1*03:01L HLA-DRB1*14:17L
  REGION 1..10: note = CONT. FROM ABOVE: HLA-DQA1*02:01-B1*03:03L
SYYKLGASQR

SEQ ID NO: 15015 - protein, 14 aa, Severe acute respiratory syndrome coronavirus 2
  REGION 1..14: note = Table B: HLA-DRB1*13:02L HLA-DRB1*11:01L HLA-DRB3*01:01L HLA-DPA1*02:01-B1*13:01L
VAGDSGFAAYSRYR

SEQ ID NO: 15016 - protein, 12 aa, Severe acute respiratory syndrome coronavirus 2
  REGION 1..12: note = Table B: HLA-DRB1*13:02L HLA-DRB1*13:03L HLA-DRB1*04:02L HLA-DRB1*04:05L HLA-DRB1*01:02L HLA-DRB1*08:04L HLA-DRB1*11:04L HLA-DRB1*08:01L HLA-DRB1*11:01L HLA-DRB1*12:01L HLA-DRB3*01:01L HLA-DRB1*16:01L HLA-DRB1*04:08L HLA-DRB1*15:03L
SGFAAYSRYRIG

SEQ ID NO: 15017 - protein, 14 aa, Severe acute respiratory syndrome coronavirus 2
  REGION 1..14: note = Table B: HLA-DRB1*13:02L HLA-DRB1*04:04L HLA-DRB1*11:04L HLA-DRB1*11:01L HLA-DRB3*01:01L HLA-DPA1*02:01-B1*13:01L HLA-DPA1*03:01-B1*105:01L HLA-DRB1*15:03L
SRYRIGNYKLNTDH

SEQ ID NO: 15018 - protein, 12 aa, Severe acute respiratory syndrome coronavirus 2
  REGION 1..12: note = Table B: HLA-DRB1*13:02L HLA-DRB1*01:02L HLA-DRB1*08:04L HLA-DQA1*01-B1*05L HLA-DQA1*05:01-B1*02:01L HLA-DQA1*03:01-B1*03:02L HLA-DQA1*02:01-B1*03:03L HLA-DRB1*15:03L
YKLNTDHSSSSD

SEQ ID NO: 15019 - protein, 13 aa, Severe acute respiratory syndrome coronavirus 2
  REGION 1..13: note = Table B: HLA-DRB1*13:02L HLA-DQA1*01:02-B1*06:02L HLA-DRB1*01:02L HLA-DPA1*01:03-B1*03:01L HLA-DRB1*04:10L HLA-DRB3*01:01L HLA-DPA1*02:01-B1*13:01L HLA-DPA1*03:01-B1*105:01L HLA-DRB1*04:08L HLA-DRB1*15:03L
LNTDHSSSSDNIA

SEQ ID NO: 15020 - protein, 16 aa, Severe acute respiratory syndrome coronavirus 2
  REGION 1..16: note = Table B: HLA-DRB1*13:02L HLA-DPA1*01:03-B1*104:01L
NTDHSSSSDNIALLVQ

SEQ ID NO: 15021 - protein, 13 aa, Severe acute respiratory syndrome coronavirus 2
  REGION 1..13: note = Table B: HLA-DRB1*13:02L HLA-DRB1*01:03L
EILLIIMRTFKVS

SEQ ID NO: 15022 - protein, 12 aa, Severe acute respiratory syndrome coronavirus 2
  REGION 1..12: note = Table B: HLA-DRB1*13:02L HLA-DRB1*11:03L HLA-DPA1*01:03-B1*04:02L HLA-DRB3*01:01L HLA-DPA1*03:01-B1*105:01L HLA-DPA1*01:03-B1*02:01L HLA-DRB1*08:03L HLA-DRB1*15:03L
IINLIIKNLSKS

SEQ ID NO: 15023 - protein, 12 aa, Severe acute respiratory syndrome coronavirus 2
  REGION 1..12: note = Table B: HLA-DRB1*13:02L HLA-DRB1*01:02L HLA-DPA1*03:01-B1*04:02L HLA-DPA1*01:02-B1*04:01L HLA-DRB1*16:01L
INLIIKNLSKSL

SEQ ID NO: 15024 - protein, 12 aa, Severe acute respiratory syndrome coronavirus 2
  REGION 1..12: note = Table B: HLA-DRB1*13:02L HLA-DRB1*08:04L HLA-DRB1*14:54L
NLIIKNLSKSLT

SEQ ID NO: 15025 - protein, 15 aa, Severe acute respiratory syndrome coronavirus 2
  REGION 1..15: note = Table B: HLA-DRB1*13:02L HLA-DRB1*04:04L HLA-DPA1*01:03-B1*03:01L HLA-DRB1*11:04L HLA-DPA1*02:01-B1*13:01L HLA-DPA1*01:03-B1*02:01L
SKSLTENKYSQLDEE

SEQ ID NO: 15026 - protein, 13 aa, Severe acute respiratory syndrome coronavirus 2
  REGION 1..13: note = Table B: HLA-DRB1*13:02L HLA-DRB1*13:03L HLA-DRB1*01:03L HLA-DRB1*04:02L HLA-DRB1*04:05L HLA-DRB1*01:02L HLA-DRB3*02:01L HLA-DPA1*01:03-B1*03:01L HLA-DPA1*03:01-B1*04:02L HLA-DRB1*14:02L HLA-DPA1*01:03-B1*04:01L
  REGION 1..13: note = CONT. FROM ABOVE: HLA-DPA1*01:03-B1*04:02L HLA-DQA1*05:05-B1*03: 01L HLA-DPA1*01:02-B1*04:01L HLA-DRB1*04:08L
YSQLDEEQPMEID

SEQ ID NO: 15027 - protein, 12 aa, Severe acute respiratory syndrome coronavirus 2
  REGION 1..12: note = Table B: HLA-DRB1*13:02L HLA-DRB1*01:03L HLA-DRB1*04:05L HLA-DRB1*01:02L HLA-DRB4*03:01NL HLA-DRB1*08:04L HLA-DRB1*08:77L HLA-DRB3*02:01L HLA-DPA1*01:03-B1*03:01L HLA-DRB1*14:01L HLA-DRB1*11:03L HLA-DRB1*11:04L HLA-DRB1*14:02L
  REGION 1..12: note = CONT. FROM ABOVE: HLA-DQA1*01:01-B1*05:01L HLA-DQA1*05:05-B1*03: 19L HLA-DRB1*04:10L HLA-DRB1*12:01L HLA-DRB1*12:02L HLA-DRB1*14: 54L HLA-DQA1*05:05-B1*03:01L HLA-DRB1*10:01L HLA-DRB1*04:08L HLA -DRB1*15:03L
SGTYEGNSPFHP

SEQ ID NO: 15028 - protein, 12 aa, Severe acute respiratory syndrome coronavirus 2
  REGION 1..12: note = Table B: HLA-DRB1*13:02L HLA-DRB1*01:03L HLA-DRB1*04:05L HLA-DQA1*01:02-B1*06:02L HLA-DRB1*01:02L HLA-DRB4*03:01NL HLA-DRB1*08:04L HLA-DPA1*01:03-B1*03:01L HLA-DPA1*03:01-B1*04:02L HLA-DRB1*14:01L HLA-DRB1*14:02L
  REGION 1..12: note = CONT. FROM ABOVE: HLA-DRB1*12:01L HLA-DRB1*12:02L HLA-DPA1*03:01 -B1*105:01L HLA-DRB1*14:54L HLA-DQA1*05:05-B1*03:01L HLA-DQA1*01 :03-B1*06:01L HLA-DRB1*04:08L HLA-DRB1*15:03L
GTYEGNSPFHPL

SEQ ID NO: 15029 - protein, 16 aa, Severe acute respiratory syndrome coronavirus 2
  REGION 1..16: note = Table B: HLA-DRB1*13:02L HLA-DRB1*14:02L
HPLADNKFALTCFSTQ

SEQ ID NO: 15030 - protein, 10 aa, Severe acute respiratory syndrome coronavirus 2
  REGION 1..10: note = Table B: HLA-DRB1*13:02L HLA-DRB1*12:01L HLA-DQA1*03:01-B1*03:02L
RSVSPKLFIR

SEQ ID NO: 15031 - protein, 14 aa, Severe acute respiratory syndrome coronavirus 2
  REGION 1..14: note = Table B: HLA-DRB1*13:02L HLA-DRB1*14:01L HLA-DPA1*03:01-B1*105:01L
IVFITLCFTLKRKT

SEQ ID NO: 15032 - protein, 14 aa, Severe acute respiratory syndrome coronavirus 2
  REGION 1..14: note = Table B: HLA-DRB1*13:02L HLA-DRB1*01:03L HLA-DRB1*04:02L HLA-DRB1*04:05L HLA-DRB1*01:02L HLA-DRB1*08:04L HLA-DRB1*14:01M HLA-DRB1*11:03L HLA-DRB1*11:04L HLA-DRB1*08:01L HLA-DRB1*11:01L HLA-DRB1*12:01L HLA-DRB3*01:01L HLA-DPA1*02:01-B1*13:01L
  REGION 1..14: note = CONT. FROM ABOVE: HLA-DPA1*01:02-B1*04:01L HLA-DRB1*04:08L HLA-D RB1*15:03L
DPCPIHFYSKWYIR

SEQ ID NO: 15033 - protein, 14 aa, Severe acute respiratory syndrome coronavirus 2
  REGION 1..14: note = Table B: HLA-DRB1*13:02L HLA-DQA1*01:02-B1*06:02L HLA-DRB1*01:01L HLA-DRB1*14:01L HLA-DRB1*11:04L HLA-DRB1*11:01L HLA-DRB3*01:01L HLA-DRB1*07:01L HLA-DQA1*02:01-B1*03:03L
SKWYIRVGARKSAP

SEQ ID NO: 15034 - protein, 15 aa, Severe acute respiratory syndrome coronavirus 2
  REGION 1..15: note = Table B: HLA-DRB1*13:02L HLA-DRB1*04:05L HLA-DRB1*01:02L
VGARKSAPLIELCVD

SEQ ID NO: 15035 - protein, 15 aa, Severe acute respiratory syndrome coronavirus 2
  REGION 1..15: note = Table B: HLA-DRB1*13:02L HLA-DRB1*04:05L HLA-DRB1*01:02L HLA-DRB1*12:01L
GARKSAPLIELCVDE

SEQ ID NO: 15036 - protein, 14 aa, Severe acute respiratory syndrome coronavirus 2
  REGION 1..14: note = Table B: HLA-DRB1*13:02L HLA-DRB1*01:02L HLA-DPA1*01:03-B1*03:01L
AGSKSPIQYIDIGN

SEQ ID NO: 15037 - protein, 12 aa, Severe acute respiratory syndrome coronavirus 2
  REGION 1..12: note = Table B: HLA-DRB1*13:02L HLA-DRB1*04:02L HLA-DRB1*04:05L HLA-DRB1*01:02L HLA-DRB3*02:01L HLA-DRB1*14:54L HLA-DRB1*14:17L HLA-DRB1*04:08L
KSPIQYIDIGNY

SEQ ID NO: 15038 - protein, 12 aa, Severe acute respiratory syndrome coronavirus 2
  REGION 1..12: note = Table B: HLA-DRB1*13:02L HLA-DRB1*04:02L HLA-DRB1*04:04L HLA-DRB1*04:05L HLA-DRB1*01:02L HLA-DRB1*08:04L HLA-DRB3*02:01L HLA-DRB1*11:03L HLA-DRB1*11:04L HLA-DQA1*01:01-B1*05:01L HLA-DRB1*08:01L HLA-DRB5*01:01L HLA-DRB1*04:10L HLA-DRB1*09:01L
  REGION 1..12: note = CONT. FROM ABOVE: HLA-DRB1*12:02L HLA-DRB3*01:01L HLA-DRB1*14:54 L HLA-DRB1*14:17L HLA-DRB1*07:01L HLA-DRB1*04:08L HLA-DRB1*08:03 L
SPIQYIDIGNYT

SEQ ID NO: 15039 - protein, 13 aa, Severe acute respiratory syndrome coronavirus 2
  REGION 1..13: note = Table B: HLA-DRB1*13:02L HLA-DRB1*13:03L HLA-DRB1*01:03L HLA-DRB1*04:05L HLA-DRB1*01:02L HLA-DRB1*08:04L HLA-DRB3*02:01L HLA-DPA1*01:03-B1*03:01L HLA-DPA1*03:01-B1*04:02L HLA-DRB1*14:02L HLA-DRB1*08:01L HLA-DQA1*01-B1*05L
  REGION 1..13: note = CONT. FROM ABOVE: HLA-DQA1*05:05-B1*03:19L HLA-DQA1*05:01-B1*02: 01L HLA-DRB1*12:01L HLA-DRB3*01:01L HLA-DPA1*02:01-B1*13:01L HLA -DPA1*03:01-B1*105:01L HLA-DRB1*14:54L HLA-DQA1*05:05-B1*03:01L HLA-DPA1*01:02-B1*04:01L HLA-DRB1*04:08L
LPFTINCQEPKLG

SEQ ID NO: 15040 - protein, 12 aa, Severe acute respiratory syndrome coronavirus 2
  REGION 1..12: note = Table B: HLA-DRB1*13:02L HLA-DRB1*01:03L HLA-DRB1*04:02L HLA-DRB1*04:04L HLA-DRB1*04:05L HLA-DRB1*08:04L HLA-DRB3*02:01L HLA-DPA1*01:03-B1*03:01L HLA-DRB1*14:01L HLA-DRB1*14:02L HLA-DRB1*08:01L HLA-DPA1*01:03-B1*04:01L HLA-DRB1*12:01L
  REGION 1..12: note = CONT. FROM ABOVE: HLA-DRB3*01:01L HLA-DQA1*05:05-B1*03:01L HLA-D RB1*14:17L HLA-DRB1*04:08L HLA-DRB1*15:01L
FLEYHDVRVVLD

SEQ ID NO: 15041 - protein, 14 aa, Severe acute respiratory syndrome coronavirus 2
  REGION 1..14: note = Table B: HLA-DRB1*13:02L HLA-DRB1*13:03L HLA-DRB1*01:03L HLA-DRB1*04:05L HLA-DRB1*01:02L HLA-DRB4*03:01NL HLA-DRB1*08:04L HLA-DPA1*01:03-B1*03:01L HLA-DQA1*01:01-B1*05:01L HLA-DRB1*08:01L HLA-DRB1*11:01L HLA-DRB1*04:10L
  REGION 1..14: note = CONT. FROM ABOVE: HLA-DPA1*01:03-B1*04:02L HLA-DRB1*12:01L HLA-D PA1*02:01-B1*13:01L HLA-DPA1*03:01-B1*105:01L HLA-DPA1*01:03-B1* 104:01L HLA-DRB1*14:17L HLA-DRB1*16:01L HLA-DRB1*04:08L HLA-DRB1 *15:03L
APRITFGGPSDSTG

SEQ ID NO: 15042 - protein, 11 aa, Severe acute respiratory syndrome coronavirus 2
  REGION 1..11: note = Table B: HLA-DRB1*13:02L HLA-DRB4*03:01NL HLA-DRB5*01:01L HLA-DRB1*14:17L HLA-DQA1*01:03-B1*06:01L HLA-DQA1*02:01-B1*03:03L
DSTGSNQNGER

SEQ ID NO: 15043 - protein, 16 aa, Severe acute respiratory syndrome coronavirus 2
  REGION 1..16: note = Table B: HLA-DRB1*13:02L HLA-DRB3*02:01L HLA-DPA1*02:01-B1*13:01L HLA-DRB1*07:01L HLA-DRB1*04:08L
GKEDLKFPRGQGVPIN

SEQ ID NO: 15044 - protein, 12 aa, Severe acute respiratory syndrome coronavirus 2
  REGION 1..12: note = Table B: HLA-DRB1*13:02L HLA-DRB1*04:05L HLA-DRB1*01:02L HLA-DRB1*14:01L HLA-DRB1*11:04L HLA-DRB1*08:01L HLA-DRB1*11:01L HLA-DRB1*12:01L HLA-DRB3*01:01L HLA-DRB1*16:01L HLA-DRB1*04:08L HLA-DRB1*15:03L
DQIGYYRRATRR

SEQ ID NO: 15045 - protein, 16 aa, Severe acute respiratory syndrome coronavirus 2
  REGION 1..16: note = Table B: HLA-DRB1*13:02L HLA-DQA1*01:02-B1*06:02L HLA-DRB1*03:01L HLA-DRB1*11:03L
IGYYRRATRRIRGGDG

SEQ ID NO: 15046 - protein, 14 aa, Severe acute respiratory syndrome coronavirus 2
  REGION 1..14: note = Table B: HLA-DRB1*13:02L HLA-DRB1*13:03L HLA-DRB1*04:05L HLA-DRB4*03:01NL HLA-DRB1*08:04L HLA-DPA1*01:03-B1*03:01L HLA-DRB1*11:04L HLA-DRB1*14:02L HLA-DQA1*01-B1*05L HLA-DQA1*05:05-B1*03:116L HLA-DRB1*04:10L HLA-DRB3*01:01L
  REGION 1..14: note = CONT. FROM ABOVE: HLA-DPA1*02:01-B1*13:01L HLA-DPA1*01:03-B1*104 :01L HLA-DRB1*14:17L HLA-DRB1*16:01L HLA-DRB1*08:03L HLA-DRB1*15 :03L
GPEAGLPYGANKDG

SEQ ID NO: 15047 - protein, 16 aa, Severe acute respiratory syndrome coronavirus 2
  REGION 1..16: note = Table B: HLA-DRB1*13:02L HLA-DRB1*04:04L HLA-DPA1*01:03-B1*03:01L HLA-DRB1*14:01L HLA-DRB1*11:01L HLA-DQA1*05:05-B1*03:19L HLA-DRB3*01:01L HLA-DPA1*03:01-B1*105:01L HLA-DPA1*01:03-B1*104:01L
  REGION 1..16: note = CONT. FROM ABOVE: HLA-DRB1*07:01L HLA-DRB1*15:03L
TPKDHIGTRNPANNAA

SEQ ID NO: 15048 - protein, 13 aa, Severe acute respiratory syndrome coronavirus 2
  REGION 1..13: note = Table B: HLA-DRB1*13:02L HLA-DRB3*02:01L HLA-DPA1*01:03-B1*03:01L HLA-DPA1*03:01-B1*04:02L HLA-DRB1*11:03L HLA-DRB1*12:02L HLA-DRB1*10:01L
NAAIVLQLPQGTT

SEQ ID NO: 15049 - protein, 13 aa, Severe acute respiratory syndrome coronavirus 2
  REGION 1..13: note = Table B: HLA-DRB1*13:02L HLA-DRB1*01:03L HLA-DRB1*04:05L HLA-DQA1*01:02-B1*06:02L HLA-DPA1*01:03-B1*03:01L HLA-DRB1*14:01L HLA-DQA1*05:05-B1*03:19L HLA-DRB1*04:10L HLA-DPA1*03:01-B1*105:01L HLA-DRB1*14:54L
  REGION 1..13: note = CONT. FROM ABOVE: HLA-DQA1*01:03-B1*06:01L HLA-DRB1*04:08L
IVLQLPQGTTLPK

SEQ ID NO: 15050 - protein, 11 aa, Severe acute respiratory syndrome coronavirus 2
  REGION 1..11: note = Table B: HLA-DRB1*13:02L HLA-DRB1*13:03L HLA-DRB1*01:03L HLA-DRB4*03:01NL HLA-DRB1*08:01L HLA-DRB1*12:01L HLA-DQA1*05:05-B1*03:01L
GSRGGSQASSR

SEQ ID NO: 15051 - protein, 11 aa, Severe acute respiratory syndrome coronavirus 2
  REGION 1..11: note = Table B: HLA-DRB1*13:02L HLA-DRB4*03:01NL HLA-DRB1*08:01L HLA-DRB1*12:01L HLA-DQA1*05:05-B1*03:01L HLA-DRB1*14:17L
SSRNSTPGSSR

SEQ ID NO: 15052 - protein, 14 aa, Severe acute respiratory syndrome coronavirus 2
  REGION 1..14: note = Table B: HLA-DRB1*13:02L HLA-DQA1*01:02-B1*06:02L HLA-DRB1*01:02L HLA-DPA1*01:03-B1*03:01L HLA-DRB1*14:01L HLA-DQA1*01-B1*05L HLA-DRB1*12:01L HLA-DPA1*02:01-B1*13:01L HLA-DQA1*01:03-B1*06:01L
SPARMAGNGGDAAL

SEQ ID NO: 15053 - protein, 14 aa, Severe acute respiratory syndrome coronavirus 2
  REGION 1..14: note = Table B: HLA-DRB1*13:02L HLA-DRB1*04:05L HLA-DQA1*05:05-B1*03:19L HLA-DPA1*01:03-B1*104:01L
GDAALALLLLDRLN

SEQ ID NO: 15054 - protein, 12 aa, Severe acute respiratory syndrome coronavirus 2
  REGION 1..12: note = Table B: HLA-DRB1*13:02L HLA-DRB1*01:03L HLA-DRB1*01:02L HLA-DRB1*11:04L HLA-DRB1*11:01L HLA-DRB1*04:08L
LALLLLDRLNQL

SEQ ID NO: 15055 - protein, 12 aa, Severe acute respiratory syndrome coronavirus 2
  REGION 1..12: note = Table B: HLA-DRB1*13:02L HLA-DRB1*01:02L HLA-DRB1*11:02L HLA-DRB1*11:03L HLA-DRB1*11:04L HLA-DRB1*11:01L HLA-DRB3*01:01L HLA-DRB1*14:54L HLA-DPA1*01:03-B1*02:01L HLA-DRB1*08:02L
ALLLLDRLNQLE

SEQ ID NO: 15056 - protein, 13 aa, Severe acute respiratory syndrome coronavirus 2
  REGION 1..13: note = Table B: HLA-DRB1*13:02L HLA-DRB1*04:05L HLA-DRB3*01:01L HLA-DPA1*01:03-B1*02:01L
LLLLDRLNQLESK

SEQ ID NO: 15057 - protein, 10 aa, Severe acute respiratory syndrome coronavirus 2
  REGION 1..10: note = Table B: HLA-DRB1*13:02L HLA-DRB1*13:03L HLA-DRB1*01:03L HLA-DRB1*04:02L HLA-DRB1*01:01L HLA-DRB4*03:01NL HLA-DRB1*11:04L HLA-DRB1*08:01L HLA-DRB5*01:01L HLA-DRB1*12:01L HLA-DQA1*03:01-B1*03:02M HLA-DQA1*05:05-B1*03:01L
  REGION 1..10: note = CONT. FROM ABOVE: HLA-DRB1*14:17L HLA-DRB1*16:01L HLA-DQA1*02:01 -B1*03:03L
QQQGQTVTKK

SEQ ID NO: 15058 - protein, 10 aa, Severe acute respiratory syndrome coronavirus 2
  REGION 1..10: note = Table B: HLA-DRB1*13:02L HLA-DRB1*13:03L HLA-DRB1*01:03L HLA-DRB1*04:02L HLA-DRB1*01:01L HLA-DRB4*03:01NL HLA-DRB1*14:01L HLA-DRB1*11:04L HLA-DRB1*08:01L HLA-DRB5*01:01L HLA-DRB1*12:01L HLA-DRB1*12:02L HLA-DQA1*03:01-B1*03:02M
  REGION 1..10: note = CONT. FROM ABOVE: HLA-DQA1*05:05-B1*03:01L HLA-DRB1*14:17L HLA-D RB1*16:01L HLA-DQA1*01:03-B1*06:01L HLA-DQA1*02:01-B1*03:03L
SAAEASKKPR

SEQ ID NO: 15059 - protein, 10 aa, Severe acute respiratory syndrome coronavirus 2
  REGION 1..10: note = Table B: HLA-DRB1*13:02L HLA-DRB1*13:03L HLA-DRB1*11:04L HLA-DRB1*08:01L HLA-DRB1*12:01L HLA-DQA1*03:01-B1*03:02L
EASKKPRQKR

SEQ ID NO: 15060 - protein, 13 aa, Severe acute respiratory syndrome coronavirus 2
  REGION 1..13: note = Table B: HLA-DRB1*13:02L HLA-DRB1*04:04L HLA-DRB1*07:01L
QKRTATKAYNVTQ

SEQ ID NO: 15061 - protein, 13 aa, Severe acute respiratory syndrome coronavirus 2
  REGION 1..13: note = Table B: HLA-DRB1*13:02L HLA-DRB1*04:04L HLA-DRB1*04:05L HLA-DRB1*01:02L HLA-DPA1*01:03-B1*03:01L HLA-DPA1*03:01-B1*04:02L HLA-DRB1*14:01L HLA-DQA1*01:01-B1*05:01L HLA-DRB1*08:01L HLA-DRB1*04:10L
  REGION 1..13: note = CONT. FROM ABOVE: HLA-DRB1*12:02L HLA-DPA1*02:01-B1*13:01L HLA-D PA1*03:01-B1*105:01L HLA-DRB1*14:54L HLA-DPA1*01:03-B1*104:01L H LA-DRB1*04:08L HLA-DRB1*15:03L
TATKAYNVTQAFG

SEQ ID NO: 15062 - protein, 10 aa, Severe acute respiratory syndrome coronavirus 2
  REGION 1..10: note = Table B: HLA-DRB1*13:02L HLA-DRB1*13:03L HLA-DRB4*03:01NL HLA-DRB1*08:01L HLA-DRB1*12:01L HLA-DQA1*03:01-B1*03:02L HLA-DQA1*05:05-B1*03:01L
AYNVTQAFGR

SEQ ID NO: 15063 - protein, 14 aa, Severe acute respiratory syndrome coronavirus 2
  REGION 1..14: note = Table B: HLA-DRB1*13:02L HLA-DRB1*04:05L HLA-DRB1*01:02L HLA-DPA1*01:03-B1*03:01L HLA-DRB1*12:01L HLA-DPA1*02:01-B1*13:01L HLA-DQA1*03:01-B1*03:02L HLA-DPA1*01:03-B1*104:01L HLA-DRB1*07:01L
  REGION 1..14: note = CONT. FROM ABOVE: HLA-DQA1*02:01-B1*03:03L
FGRRGPEQTQGNFG

SEQ ID NO: 15064 - protein, 16 aa, Severe acute respiratory syndrome coronavirus 2
  REGION 1..16: note = Table B: HLA-DRB1*13:02L HLA-DRB1*13:03L HLA-DRB1*04:04L HLA-DRB1*08:04L HLA-DRB3*02:01L HLA-DRB1*14:01L HLA-DRB1*14:02L HLA-DRB1*08:01L HLA-DPA1*01:03-B1*04:01L HLA-DRB3*01:01L HLA-DPA1*01:03-B1*104:01L HLA-DRB1*07:01L HLA-DRB1*08:03L
GPEQTQGNFGDQELIR

SEQ ID NO: 15065 - protein, 14 aa, Severe acute respiratory syndrome coronavirus 2
  REGION 1..14: note = Table B: HLA-DRB1*13:02L HLA-DRB1*08:04L HLA-DPA1*01:03-B1*03:01L HLA-DPA1*03:01-B1*04:02L HLA-DRB1*14:01L HLA-DRB1*14:02L HLA-DRB1*08:01L HLA-DRB1*04:10L HLA-DPA1*01:03-B1*04:02L HLA-DRB3*01:01L
  REGION 1..14: note = CONT. FROM ABOVE: HLA-DQA1*05:05-B1*03:01L
TQGNFGDQELIRQG

SEQ ID NO: 15066 - protein, 13 aa, Severe acute respiratory syndrome coronavirus 2
  REGION 1..13: note = Table B: HLA-DRB1*13:02L HLA-DRB1*04:04L HLA-DRB1*14:01L HLA-DPA1*02:01-B1*13:01L HLA-DRB1*15:03L
LIRQGTDYKHWPQ

SEQ ID NO: 15067 - protein, 15 aa, Severe acute respiratory syndrome coronavirus 2
  REGION 1..15: note = Table B: HLA-DRB1*13:02L HLA-DRB1*04:04L HLA-DRB1*11:04L HLA-DRB1*14:02L HLA-DPA1*01:03-B1*04:02L
GTDYKHWPQIAQFAP

SEQ ID NO: 15068 - protein, 14 aa, Severe acute respiratory syndrome coronavirus 2
  REGION 1..14: note = Table B: HLA-DRB1*13:02L HLA-DRB1*04:02L HLA-DRB1*04:05L HLA-DRB1*01:02L HLA-DRB1*08:04L HLA-DPA1*01:03-B1*03:01L HLA-DPA1*03:01-B1*04:02L HLA-DQA1*01-B1*05L HLA-DPA1*01:03-B1*04:01L HLA-DPA1*01:03-B1*04:02L
  REGION 1..14: note = CONT. FROM ABOVE: HLA-DPA1*02:01-B1*13:01L HLA-DPA1*01:03-B1*104 :01L HLA-DRB1*04:08L HLA-DRB1*15:03L
APSASAFFGMSRIG

SEQ ID NO: 15069 - protein, 13 aa, Severe acute respiratory syndrome coronavirus 2
  REGION 1..13: note = Table B: HLA-DRB1*13:02L HLA-DRB1*01:03L HLA-DRB1*04:02L HLA-DRB1*04:05L HLA-DRB1*01:02L HLA-DRB1*11:03L HLA-DRB1*14:02L HLA-DQA1*05:05-B1*03:116L HLA-DPA1*02:01-B1*13:01L HLA-DRB1*08:02L
ASAFFGMSRIGME

SEQ ID NO: 15070 - protein, 14 aa, Severe acute respiratory syndrome coronavirus 2
  REGION 1..14: note = Table B: HLA-DRB1*13:02L HLA-DRB1*13:03L HLA-DRB1*01:03L HLA-DRB1*04:05L HLA-DRB4*03:01NL HLA-DPA1*01:03-B1*03:01L HLA-DQA1*01:01-B1*05:01L HLA-DRB1*08:01L HLA-DQA1*05:05-B1*03:19L HLA-DQA1*05:01-B1*02:01L
  REGION 1..14: note = CONT. FROM ABOVE: HLA-DRB1*04:10L HLA-DPA1*01:03-B1*04:02L HLA-D RB1*12:01L HLA-DPA1*02:01-B1*13:01L HLA-DPA1*03:01-B1*105:01L HL A-DPA1*01:03-B1*104:01L HLA-DQA1*05:05-B1*03:01L HLA-DPA1*01:02- B1*04:01L HLA-DRB1*04:08L HLA-DRB1*15:03L
TPSGTWLTYTGAIK

SEQ ID NO: 15071 - protein, 12 aa, Severe acute respiratory syndrome coronavirus 2
  REGION 1..12: note = Table B: HLA-DRB1*13:02L HLA-DRB1*13:03L HLA-DRB1*01:03L HLA-DRB1*04:05L HLA-DRB4*03:01NL HLA-DPA1*01:03-B1*03:01L HLA-DRB1*11:03L HLA-DQA1*05:01-B1*02:01L HLA-DPA1*01:03-B1*04:01L HLA-DRB1*09:01L HLA-DRB1*12:02L
  REGION 1..12: note = CONT. FROM ABOVE: HLA-DPA1*02:01-B1*13:01L HLA-DPA1*03:01-B1*105 :01L HLA-DQA1*05:05-B1*03:01L HLA-DRB1*04:08L
GTWLTYTGAIKL

SEQ ID NO: 15072 - protein, 16 aa, Severe acute respiratory syndrome coronavirus 2
  REGION 1..16: note = Table B: HLA-DRB1*13:02L
DDKDPNFKDQVILLNK

SEQ ID NO: 15073 - protein, 12 aa, Severe acute respiratory syndrome coronavirus 2
  REGION 1..12: note = Table B: HLA-DRB1*13:02L HLA-DRB1*11:01L HLA-DPA1*02:01-B1*13:01L
KDQVILLNKHID

SEQ ID NO: 15074 - protein, 12 aa, Severe acute respiratory syndrome coronavirus 2
  REGION 1..12: note = Table B: HLA-DRB1*13:02L HLA-DRB1*01:02L HLA-DRB1*11:03L HLA-DRB1*11:01L HLA-DRB3*01:01L
VILLNKHIDAYK

SEQ ID NO: 15075 - protein, 15 aa, Severe acute respiratory syndrome coronavirus 2
  REGION 1..15: note = Table B: HLA-DRB1*13:02L HLA-DPA1*03:01-B1*04:02L HLA-DPA1*02:01-B1*13:01L
NKHIDAYKTFPPTEP

SEQ ID NO: 15076 - protein, 14 aa, Severe acute respiratory syndrome coronavirus 2
  REGION 1..14: note = Table B: HLA-DRB1*13:02L HLA-DRB1*01:03L HLA-DRB1*04:04L HLA-DRB1*08:77L HLA-DRB3*02:01L HLA-DPA1*01:03-B1*03:01L HLA-DPA1*03:01-B1*04:02L HLA-DRB1*14:01L HLA-DRB1*11:03L HLA-DQA1*01:01-B1*05:01L HLA-DRB1*09:01L HLA-DRB1*12:02L
  REGION 1..14: note = CONT. FROM ABOVE: HLA-DPA1*02:01-B1*13:01L HLA-DRB1*07:01L HLA-D RB1*10:01L HLA-DRB1*04:08L HLA-DRB1*08:03L
QQTVTLLPAADLDD

SEQ ID NO: 15077 - protein, 15 aa, Severe acute respiratory syndrome coronavirus 2
  REGION 1..15: note = Table B: HLA-DRB1*13:02L
VTLLPAADLDDFSKQ

SEQ ID NO: 15078 - protein, 16 aa, Severe acute respiratory syndrome coronavirus 2
  REGION 1..16: note = Table B: HLA-DRB1*13:02L
DDFSKQLQQSMSSADS

SEQ ID NO: 15079 - protein, 12 aa, Severe acute respiratory syndrome coronavirus 2
  REGION 1..12: note = Table B: HLA-DRB1*13:02L HLA-DRB1*04:04L HLA-DRB1*08:04L HLA-DRB3*02:01L HLA-DPA1*03:01-B1*04:02L HLA-DRB1*14:01L HLA-DRB1*11:04L HLA-DRB1*09:01L HLA-DPA1*01:03-B1*04:02L HLA-DRB1*12:02L HLA-DPA1*01:03-B1*104:01L HLA-DRB1*07:01L
  REGION 1..12: note = CONT. FROM ABOVE: HLA-DRB1*10:01L HLA-DRB1*08:03L
SRNYIAQVDVVN

SEQ ID NO: 15080 - protein, 11 aa, Severe acute respiratory syndrome coronavirus 2
  REGION 1..11: note = Table B: HLA-DRB1*13:03L HLA-DRB1*08:01L
QPYVFIKRSDA

SEQ ID NO: 15081 - protein, 10 aa, Severe acute respiratory syndrome coronavirus 2
  REGION 1..10: note = Table B: HLA-DRB1*13:03L HLA-DRB1*08:01L
YVFIKRSDAR

SEQ ID NO: 15082 - protein, 10 aa, Severe acute respiratory syndrome coronavirus 2
  REGION 1..10: note = Table B: HLA-DRB1*13:03L HLA-DRB1*01:03L HLA-DQA1*01:02-B1*06:02L HLA-DRB1*14:02L HLA-DQA1*05:05-B1*03:19L HLA-DQA1*05:01-B1*02:01L HLA-DPA1*03:01-B1*105:01L HLA-DQA1*02:01-B1*03:03L
PHVGEIPVAY

SEQ ID NO: 15083 - protein, 10 aa, Severe acute respiratory syndrome coronavirus 2
  REGION 1..10: note = Table B: HLA-DRB1*13:03L HLA-DRB1*01:03L HLA-DQA1*01:02-B1*06:02L HLA-DRB1*03:01L HLA-DRB1*14:02L HLA-DRB1*11:01L HLA-DQA1*05:05-B1*03:19L HLA-DQA1*05:01-B1*02:01L HLA-DPA1*01:03-B1*04:02L
  REGION 1..10: note = CONT. FROM ABOVE: HLA-DRB1*08:02L HLA-DQA1*02:01-B1*03:03L
GNKGAGGHSY

SEQ ID NO: 15084 - protein, 14 aa, Severe acute respiratory syndrome coronavirus 2
  REGION 1..14: note = Table B: HLA-DRB1*13:03L HLA-DRB1*04:02L HLA-DRB1*04:10L
GDELGTDPYEDFQE

SEQ ID NO: 15085 - protein, 13 aa, Severe acute respiratory syndrome coronavirus 2
  REGION 1..13: note = Table B: HLA-DRB1*13:03L HLA-DRB1*01:03L HLA-DRB1*04:04L HLA-DRB1*14:01L HLA-DRB1*08:01L HLA-DPA1*02:01-B1*13:01L HLA-DPA1*03:01-B1*105:01L HLA-DRB1*15:01L
EHEIAWYTERSEK

SEQ ID NO: 15086 - protein, 11 aa, Severe acute respiratory syndrome coronavirus 2
  REGION 1..11: note = Table B: HLA-DRB1*13:03L HLA-DRB1*01:03L HLA-DRB1*04:05L HLA-DRB1*01:02L HLA-DRB4*03:01NL HLA-DRB1*04:10L HLA-DRB1*12:01L HLA-DRB1*14:54L HLA-DPA1*01:02-B1*04:01L HLA-DRB1*16:01L HLA-DRB1*04:08L HLA-DQA1*02:01-B1*03:03L HLA-DRB1*15:03L
IAWYTERSEKS

SEQ ID NO: 15087 - protein, 10 aa, Severe acute respiratory syndrome coronavirus 2
  REGION 1..10: note = Table B: HLA-DRB1*13:03L HLA-DRB1*08:01L HLA-DQA1*03:01-B1*03:02L HLA-DQA1*02:01-B1*03:03L
TPFEIKLAKK

SEQ ID NO: 15088 - protein, 16 aa, Severe acute respiratory syndrome coronavirus 2
  REGION 1..16: note = Table B: HLA-DRB1*13:03L HLA-DRB1*08:01L HLA-DRB3*01:01L HLA-DQA1*01:03-B1*06:01L
IKLAKKFDTFNGECPN

SEQ ID NO: 15089 - protein, 10 aa, Severe acute respiratory syndrome coronavirus 2
  REGION 1..10: note = Table B: HLA-DRB1*13:03L HLA-DRB1*01:03L HLA-DQA1*01:02-B1*06:02L HLA-DPA1*01:03-B1*03:01L HLA-DQA1*05:05-B1*03:19L HLA-DQA1*05:01-B1*02:01L HLA-DPA1*03:01-B1*105:01L HLA-DQA1*02:01-B1*03:03L
VGPEHSLAEY

SEQ ID NO: 15090 - protein, 13 aa, Severe acute respiratory syndrome coronavirus 2
  REGION 1..13: note = Table B: HLA-DRB1*13:03L HLA-DRB1*01:03L HLA-DQA1*01:02-B1*06:02L HLA-DRB3*01:01L HLA-DRB1*16:01L HLA-DRB1*04:08L
ESGLKTILRKGGR

SEQ ID NO: 15091 - protein, 14 aa, Severe acute respiratory syndrome coronavirus 2
  REGION 1..14: note = Table B: HLA-DRB1*13:03L HLA-DRB1*03:01L HLA-DQA1*01:01-B1*05:01L HLA-DRB1*11:01L HLA-DRB3*01:01L HLA-DRB1*07:01L
QKEKVNINIVGDFK

SEQ ID NO: 15092 - protein, 12 aa, Severe acute respiratory syndrome coronavirus 2
  REGION 1..12: note = Table B: HLA-DRB1*13:03L HLA-DRB1*04:02L HLA-DRB1*08:04L HLA-DPA1*03:01-B1*04:02L HLA-DRB1*14:01L HLA-DRB1*08:01L HLA-DPA1*01:02-B1*04:01L HLA-DRB1*16:01L
TSAFVETVKGLD

SEQ ID NO: 15093 - protein, 12 aa, Severe acute respiratory syndrome coronavirus 2
  REGION 1..12: note = Table B: HLA-DRB1*13:03L HLA-DRB1*01:03L HLA-DRB1*04:04L HLA-DRB1*04:05L HLA-DQA1*01:02-B1*06:02L HLA-DRB1*01:01L HLA-DRB1*08:04L HLA-DRB3*02:01L HLA-DPA1*01:03-B1*03:01L HLA-DPA1*03:01-B1*04:02L HLA-DRB1*14:01L HLA-DRB1*11:03L
  REGION 1..12: note = CONT. FROM ABOVE: HLA-DRB1*11:04L HLA-DRB1*14:02L HLA-DRB1*04:10 L HLA-DRB1*09:01L HLA-DRB1*12:02L HLA-DRB1*14:54L HLA-DPA1*01:03 -B1*104:01L HLA-DPA1*01:02-B1*04:01L HLA-DRB1*10:01L HLA-DRB1*04 :08L HLA-DRB1*08:03L HLA-DRB1*15:01L
VVMAYITGGVVQ

SEQ ID NO: 15094 - protein, 12 aa, Severe acute respiratory syndrome coronavirus 2
  REGION 1..12: note = Table B: HLA-DRB1*13:03L HLA-DRB1*04:02L HLA-DRB1*04:04L HLA-DRB1*04:05L HLA-DRB1*08:04L HLA-DRB3*02:01L HLA-DRB1*11:03L HLA-DRB1*14:02L HLA-DPA1*02:01-B1*13:01L HLA-DQA1*05:05-B1*03:01L HLA-DRB1*07:01L HLA-DRB1*08:03L
VEFLRDGWEIVK

SEQ ID NO: 15095 - protein, 12 aa, Severe acute respiratory syndrome coronavirus 2
  REGION 1..12: note = Table B: HLA-DRB1*13:03L HLA-DQA1*01:02-B1*06:02L HLA-DRB1*14:54L
GGQIVTCAKEIK

SEQ ID NO: 15096 - protein, 13 aa, Severe acute respiratory syndrome coronavirus 2
  REGION 1..13: note = Table B: HLA-DRB1*13:03L HLA-DRB1*11:01L
VQTFFKLVNKFLA

SEQ ID NO: 15097 - protein, 10 aa, Severe acute respiratory syndrome coronavirus 2
  REGION 1..10: note = Table B: HLA-DRB1*13:03L HLA-DRB1*01:03L HLA-DQA1*01:02-B1*06:02L HLA-DRB1*08:04L HLA-DPA1*03:01-B1*04:02L HLA-DRB1*14:01L HLA-DRB1*11:04L HLA-DRB1*08:01L HLA-DRB1*11:01L HLA-DQA1*05:05-B1*03:19L
  REGION 1..10: note = CONT. FROM ABOVE: HLA-DPA1*01:03-B1*04:01L HLA-DPA1*01:03-B1*04: 02L HLA-DRB1*12:01L HLA-DPA1*02:01-B1*13:01L HLA-DPA1*03:01-B1*1 05:01L HLA-DPA1*01:02-B1*04:01L HLA-DRB1*16:01L HLA-DQA1*01:03-B 1*06:01L HLA-DRB1*04:08L HLA-DQA1*02:01-B1*03:03L
  REGION 1..10: note = CONT. FROM ABOVE: HLA-DRB1*15:03L
FKLVNKFLAL

SEQ ID NO: 15098 - protein, 10 aa, Severe acute respiratory syndrome coronavirus 2
  REGION 1..10: note = Table B: HLA-DRB1*13:03L HLA-DRB4*03:01NL HLA-DRB1*12:01L HLA-DQA1*03:01-B1*03:02L HLA-DRB1*14:17L HLA-DQA1*02:01-B1*03:03L
SIIIGGAKLK

SEQ ID NO: 15099 - protein, 12 aa, Severe acute respiratory syndrome coronavirus 2
  REGION 1..12: note = Table B: HLA-DRB1*13:03L HLA-DRB1*01:03L HLA-DRB1*04:05L HLA-DRB1*11:04L HLA-DRB1*11:01L HLA-DRB1*16:01L HLA-DRB1*04:08L
GLYRKCVKSREE

SEQ ID NO: 15100 - protein, 11 aa, Severe acute respiratory syndrome coronavirus 2
  REGION 1..11: note = Table B: HLA-DRB1*13:03L HLA-DRB1*01:03L HLA-DPA1*01:03-B1*03:01L HLA-DRB1*14:01L HLA-DQA1*05:05-B1*03:19L HLA-DQA1*05:01-B1*02:01L HLA-DPA1*03:01-B1*105:01L HLA-DQA1*03:01-B1*03:02L
  REGION 1..11: note = CONT. FROM ABOVE: HLA-DPA1*01:02-B1*04:01L HLA-DRB1*16:01L HLA-D RB1*15:03L
MPLKAPKEIIF

SEQ ID NO: 15101 - protein, 14 aa, Severe acute respiratory syndrome coronavirus 2
  REGION 1..14: note = Table B: HLA-DRB1*13:03L HLA-DRB1*01:03L HLA-DRB1*04:02L HLA-DRB1*04:05L HLA-DQA1*01:02-B1*06:02L HLA-DRB1*08:04L HLA-DPA1*01:03-B1*03:01L HLA-DRB1*14:02L HLA-DQA1*05:05-B1*03:19L HLA-DPA1*01:03-B1*04:01L
  REGION 1..14: note = CONT. FROM ABOVE: HLA-DPA1*02:01-B1*13:01L HLA-DPA1*03:01-B1*105 :01L HLA-DPA1*01:03-B1*104:01L HLA-DQA1*05:05-B1*03:01L HLA-DRB1 *14:17L HLA-DQA1*01:03-B1*06:01L HLA-DRB1*04:08L
APKEIIFLEGETLP

SEQ ID NO: 15102 - protein, 10 aa, Severe acute respiratory syndrome coronavirus 2
  REGION 1..10: note = Table B: HLA-DRB1*13:03L HLA-DQA1*01:02-B1*06:02L HLA-DPA1*03:01-B1*105:01L
LPTEVLTEEV

SEQ ID NO: 15103 - protein, 15 aa, Severe acute respiratory syndrome coronavirus 2
  REGION 1..15: note = Table B: HLA-DRB1*13:03L HLA-DRB4*03:01NL HLA-DRB1*04:10L
VVLKTGDLQPLEQPT

SEQ ID NO: 15104 - protein, 10 aa, Severe acute respiratory syndrome coronavirus 2
  REGION 1..10: note = Table B: HLA-DRB1*13:03L HLA-DRB1*04:05L HLA-DQA1*01-B1*05L
QPLEQPTSEA

SEQ ID NO: 15105 - protein, 10 aa, Severe acute respiratory syndrome coronavirus 2
  REGION 1..10: note = Table B: HLA-DRB1*13:03L HLA-DQA1*01:02-B1*06:02L HLA-DRB1*08:77L HLA-DPA1*01:03-B1*03:01L HLA-DRB1*03:01L HLA-DQA1*05:05-B1*03:19L HLA-DQA1*05:01-B1*02:01L HLA-DPA1*01:03-B1*04:01L HLA-DPA1*01:03-B1*104:01L
  REGION 1..10: note = CONT. FROM ABOVE: HLA-DRB1*10:01L HLA-DRB1*16:01L
DDTVIEVQGY

SEQ ID NO: 15106 - protein, 16 aa, Severe acute respiratory syndrome coronavirus 2
  REGION 1..16: note = Table B: HLA-DRB1*13:03L HLA-DRB1*14:02L HLA-DQA1*01:01-B1*05:01L HLA-DRB1*11:01L HLA-DPA1*01:03-B1*04:02L HLA-DRB3*01:01L HLA-DPA1*01:03-B1*104:01L HLA-DPA1*01:02-B1*04:01L
  REGION 1..16: note = CONT. FROM ABOVE: HLA-DRB1*08:02L
VQGYKSVNITFELDER

SEQ ID NO: 15107 - protein, 11 aa, Severe acute respiratory syndrome coronavirus 2
  REGION 1..11: note = Table B: HLA-DRB1*13:03L HLA-DRB1*01:03L HLA-DRB1*04:02L HLA-DRB1*04:05L HLA-DRB1*01:02L HLA-DRB4*03:01NL HLA-DRB1*14:01L HLA-DRB1*12:01L HLA-DRB1*14:54L HLA-DRB1*14:17L HLA-DRB1*04:08L
ITFELDERIDK

SEQ ID NO: 15108 - protein, 10 aa, Severe acute respiratory syndrome coronavirus 2
  REGION 1..10: note = Table B: HLA-DRB1*13:03L HLA-DQA1*01:02-B1*06:02L HLA-DRB1*08:77L HLA-DPA1*01:03-B1*03:01L HLA-DRB1*03:01L HLA-DRB1*11:02L HLA-DQA1*01-B1*05L HLA-DQA1*05:05-B1*03:19M HLA-DQA1*05:01-B1*02:01M HLA-DRB4*01:01L
  REGION 1..10: note = CONT. FROM ABOVE: HLA-DPA1*01:03-B1*04:01L HLA-DQA1*05:05-B1*03: 116L HLA-DPA1*01:03-B1*104:01L HLA-DRB1*10:01L HLA-DRB1*16:01L
DLDEWSMATY

SEQ ID NO: 15109 - protein, 16 aa, Severe acute respiratory syndrome coronavirus 2
  REGION 1..16: note = Table B: HLA-DRB1*13:03L HLA-DRB1*01:03L HLA-DRB1*04:02L HLA-DRB1*14:02L HLA-DQA1*05:05-B1*03:01L
EPSTQYEYGTEDDYQG

SEQ ID NO: 15110 - protein, 10 aa, Severe acute respiratory syndrome coronavirus 2
  REGION 1..10: note = Table B: HLA-DRB1*13:03L HLA-DRB1*04:05L HLA-DQA1*01-B1*05L HLA-DRB1*16:01L
KPLEFGATSA

SEQ ID NO: 15111 - protein, 14 aa, Severe acute respiratory syndrome coronavirus 2
  REGION 1..14: note = Table B: HLA-DRB1*13:03L HLA-DRB1*01:02L HLA-DPA1*02:01-B1*13:01L
GATSAALQPEEEQE

SEQ ID NO: 15112 - protein, 16 aa, Severe acute respiratory syndrome coronavirus 2
  REGION 1..16: note = Table B: HLA-DRB1*13:03L HLA-DRB1*01:02L HLA-DPA1*01:03-B1*03:01L HLA-DRB1*08:01L HLA-DPA1*01:03-B1*04:02L HLA-DPA1*02:01-B1*13:01L
DDSQQTVGQQDGSEDN

SEQ ID NO: 15113 - protein, 10 aa, Severe acute respiratory syndrome coronavirus 2
  REGION 1..10: note = Table B: HLA-DRB1*13:03L HLA-DQA1*03:01-B1*03:02L HLA-DRB1*16:01L
KVKPTVVVNA

SEQ ID NO: 15114 - protein, 10 aa, Severe acute respiratory syndrome coronavirus 2
  REGION 1..10: note = Table B: HLA-DRB1*13:03L HLA-DQA1*01:02-B1*06:02L HLA-DRB1*08:77L HLA-DRB1*14:02L HLA-DQA1*05:05-B1*03:19L HLA-DQA1*05:01-B1*02:01L HLA-DPA1*03:01-B1*105:01L HLA-DQA1*02:01-B1*03:03L
TVVVNAANVY

SEQ ID NO: 15115 - protein, 10 aa, Severe acute respiratory syndrome coronavirus 2
  REGION 1..10: note = Table B: HLA-DRB1*13:03L HLA-DRB1*01:03L HLA-DQA1*03:01-B1*03:02L HLA-DQA1*02:01-B1*03:03L
VYLKHGGGVA

SEQ ID NO: 15116 - protein, 10 aa, Severe acute respiratory syndrome coronavirus 2
  REGION 1..10: note = Table B: HLA-DRB1*13:03L HLA-DRB4*03:01NL HLA-DRB1*12:01L HLA-DQA1*03:01-B1*03:02L HLA-DRB1*14:17L
LHVVGPNVNK

SEQ ID NO: 15117 - protein, 11 aa, Severe acute respiratory syndrome coronavirus 2
  REGION 1..11: note = Table B: HLA-DRB1*13:03L HLA-DRB1*01:03L HLA-DRB1*01:01L HLA-DRB1*14:01L HLA-DQA1*05:05-B1*03:01L HLA-DRB1*08:02L
VYLAVFDKNLY

SEQ ID NO: 15118 - protein, 12 aa, Severe acute respiratory syndrome coronavirus 2
  REGION 1..12: note = Table B: HLA-DRB1*13:03L HLA-DRB1*08:01L HLA-DRB1*12:01L HLA-DRB1*14:54L
QKIAEIPKEEVK

SEQ ID NO: 15119 - protein, 11 aa, Severe acute respiratory syndrome coronavirus 2
  REGION 1..11: note = Table B: HLA-DRB1*13:03L HLA-DRB1*14:54L
FITESKPSVEQ

SEQ ID NO: 15120 - protein, 12 aa, Severe acute respiratory syndrome coronavirus 2
  REGION 1..12: note = Table B: HLA-DRB1*13:03L HLA-DRB1*04:02L HLA-DRB1*08:04L HLA-DRB1*08:01L HLA-DRB1*12:01L HLA-DPA1*02:01-B1*13:01L HLA-DPA1*03:01-B1*105:01L HLA-DRB1*04:08L HLA-DRB1*15:03L
IDITFLKKDAPY

SEQ ID NO: 15121 - protein, 12 aa, Severe acute respiratory syndrome coronavirus 2
  REGION 1..12: note = Table B: HLA-DRB1*13:03L HLA-DRB1*01:03L HLA-DQA1*01:02-B1*06:02L HLA-DRB1*08:04L HLA-DRB1*14:01L HLA-DRB1*08:01L HLA-DRB1*14:54L
AVVIPTKKAGGT

SEQ ID NO: 15122 - protein, 11 aa, Severe acute respiratory syndrome coronavirus 2
  REGION 1..11: note = Table B: HLA-DRB1*13:03L HLA-DQA1*03:01-B1*03:02L
IPTKKAGGTTE

SEQ ID NO: 15123 - protein, 10 aa, Severe acute respiratory syndrome coronavirus 2
  REGION 1..10: note = Table B: HLA-DRB1*13:03L HLA-DQA1*01:02-B1*06:02L HLA-DPA1*03:01-B1*105:01L
VPTDNYITTY

SEQ ID NO: 15124 - protein, 14 aa, Severe acute respiratory syndrome coronavirus 2
  REGION 1..14: note = Table B: HLA-DRB1*13:03L HLA-DPA1*03:01-B1*04:02L HLA-DPA1*02:01-B1*13:01L
GQGLNGYTVEEAKT

SEQ ID NO: 15125 - protein, 10 aa, Severe acute respiratory syndrome coronavirus 2
  REGION 1..10: note = Table B: HLA-DRB1*13:03L HLA-DQA1*03:01-B1*03:02L HLA-DRB1*14:17L HLA-DQA1*02:01-B1*03:03L
VEEAKTVLKK

SEQ ID NO: 15126 - protein, 10 aa, Severe acute respiratory syndrome coronavirus 2
  REGION 1..10: note = Table B: HLA-DRB1*13:03L HLA-DRB1*08:01L HLA-DQA1*03:01-B1*03:02L HLA-DQA1*02:01-B1*03:03L
TKAIVSTIQR

SEQ ID NO: 15127 - protein, 13 aa, Severe acute respiratory syndrome coronavirus 2
  REGION 1..13: note = Table B: HLA-DRB1*13:03L HLA-DRB1*04:04L HLA-DQA1*01:02-B1*06:02L HLA-DRB1*14:01L HLA-DRB1*11:04L HLA-DRB1*12:01L HLA-DPA1*02:01-B1*13:01L HLA-DPA1*01:02-B1*04:01L HLA-DQA1*02:01-B1*03:03L
  REGION 1..13: note = CONT. FROM ABOVE: HLA-DRB1*15:03L
IQRKYKGIKIQEG

SEQ ID NO: 15128 - protein, 11 aa, Severe acute respiratory syndrome coronavirus 2
  REGION 1..11: note = Table B: HLA-DRB1*13:03L HLA-DRB4*03:01NL HLA-DRB1*08:77L HLA-DPA1*01:03-B1*03:01L HLA-DPA1*03:01-B1*04:02L HLA-DRB1*03:01L HLA-DQA1*01-B1*05L HLA-DRB4*01:01L HLA-DPA1*01:03-B1*04:01L HLA-DQA1*05:05-B1*03:116L
  REGION 1..11: note = CONT. FROM ABOVE: HLA-DPA1*01:03-B1*04:02L HLA-DRB1*12:01L HLA-D PA1*01:03-B1*104:01L HLA-DRB1*10:01L HLA-DRB1*16:01L
QEGVVDYGARF

SEQ ID NO: 15129 - protein, 11 aa, Severe acute respiratory syndrome coronavirus 2
  REGION 1..11: note = Table B: HLA-DRB1*13:03L HLA-DQA1*01-B1*05L HLA-DQA1*05:01-B1*02:01L HLA-DPA1*03:01-B1*105:01L HLA-DPA1*01:02-B1*04:01L HLA-DRB1*16:01L HLA-DQA1*01:03-B1*06:01L
YVTHGLNLEEA

SEQ ID NO: 15130 - protein, 15 aa, Severe acute respiratory syndrome coronavirus 2
  REGION 1..15: note = Table B: HLA-DRB1*13:03L HLA-DRB1*04:04L HLA-DRB1*03:01L HLA-DQA1*01:01-B1*05:01L HLA-DRB3*01:01L HLA-DRB1*14:54L HLA-DRB1*07:01L
RSLKVPATVSVSSPD

SEQ ID NO: 15131 - protein, 10 aa, Severe acute respiratory syndrome coronavirus 2
  REGION 1..10: note = Table B: HLA-DRB1*13:03L
SVSSPDAVTA

SEQ ID NO: 15132 - protein, 11 aa, Severe acute respiratory syndrome coronavirus 2
  REGION 1..11: note = Table B: HLA-DRB1*13:03L HLA-DRB4*03:01NL HLA-DQA1*02:01-B1*03:03L
AYNGYLTSSSK

SEQ ID NO: 15133 - protein, 10 aa, Severe acute respiratory syndrome coronavirus 2
  REGION 1..10: note = Table B: HLA-DRB1*13:03L HLA-DQA1*01:02-B1*06:02L HLA-DRB1*08:77L HLA-DPA1*01:03-B1*03:01L HLA-DRB1*03:01L HLA-DRB1*11:02L HLA-DQA1*01-B1*05L HLA-DQA1*05:05-B1*03:19L HLA-DQA1*05:01-B1*02:01L HLA-DRB4*01:01L
  REGION 1..10: note = CONT. FROM ABOVE: HLA-DPA1*01:03-B1*04:01L HLA-DPA1*01:03-B1*104 :01L HLA-DRB1*10:01L HLA-DRB1*16:01L
TQVVDMSMTY

SEQ ID NO: 15134 - protein, 14 aa, Severe acute respiratory syndrome coronavirus 2
  REGION 1..14: note = Table B: HLA-DRB1*13:03L HLA-DRB1*01:01L HLA-DRB3*02:01L HLA-DPA1*03:01-B1*04:02L HLA-DRB1*11:03L HLA-DRB1*11:04L HLA-DRB1*14:02L HLA-DRB5*01:01L HLA-DQA1*01-B1*05L HLA-DRB1*09:01L HLA-DPA1*02:01-B1*13:01L HLA-DRB1*04:08L
  REGION 1..14: note = CONT. FROM ABOVE: HLA-DRB1*15:01L
VDMSMTYGQQFGPT

SEQ ID NO: 15135 - protein, 13 aa, Severe acute respiratory syndrome coronavirus 2
  REGION 1..13: note = Table B: HLA-DRB1*13:03L HLA-DRB4*03:01NL HLA-DRB1*14:54L HLA-DQA1*01:03-B1*06:01L HLA-DRB1*15:03L
DVTKIKPHNSHEG

SEQ ID NO: 15136 - protein, 13 aa, Severe acute respiratory syndrome coronavirus 2
  REGION 1..13: note = Table B: HLA-DRB1*13:03L HLA-DRB4*03:01NL HLA-DRB1*11:04L HLA-DRB3*01:01L HLA-DRB1*14:54L HLA-DPA1*01:02-B1*04:01L HLA-DRB1*15:03L
VTKIKPHNSHEGK

SEQ ID NO: 15137 - protein, 12 aa, Severe acute respiratory syndrome coronavirus 2
  REGION 1..12: note = Table B: HLA-DRB1*13:03L HLA-DRB1*01:03L HLA-DRB1*01:02L HLA-DPA1*01:03-B1*03:01L HLA-DQA1*01:01-B1*05:01L HLA-DRB1*08:01L HLA-DRB1*12:01L HLA-DQA1*05:05-B1*03:01L HLA-DRB1*04:08L
KTFYVLPNDDTL

SEQ ID NO: 15138 - protein, 11 aa, Severe acute respiratory syndrome coronavirus 2
  REGION 1..11: note = Table B: HLA-DRB1*13:03L
LPNDDTLRVEA

SEQ ID NO: 15139 - protein, 10 aa, Severe acute respiratory syndrome coronavirus 2
  REGION 1..10: note = Table B: HLA-DRB1*13:03L HLA-DRB1*01:03L HLA-DQA1*03:01-B1*03:02L HLA-DRB1*14:17L HLA-DRB1*16:01L HLA-DQA1*02:01-B1*03:03L
YMSALNHTKK

SEQ ID NO: 15140 - protein, 14 aa, Severe acute respiratory syndrome coronavirus 2
  REGION 1..14: note = Table B: HLA-DRB1*13:03L HLA-DRB1*04:02L HLA-DRB1*04:05L
MSALNHTKKWKYPQ

SEQ ID NO: 15141 - protein, 13 aa, Severe acute respiratory syndrome coronavirus 2
  REGION 1..13: note = Table B: HLA-DRB1*13:03L HLA-DRB1*01:01L HLA-DRB1*08:01L HLA-DRB1*11:01L HLA-DRB3*01:01L HLA-DQA1*03:01-B1*03:02L HLA-DPA1*01:03-B1*104:01L HLA-DQA1*02:01-B1*03:03L HLA-DRB1*15:03L
NHTKKWKYPQVNG

SEQ ID NO: 15142 - protein, 13 aa, Severe acute respiratory syndrome coronavirus 2
  REGION 1..13: note = Table B: HLA-DRB1*13:03L HLA-DRB1*04:04L HLA-DRB1*11:03L HLA-DRB1*11:04L HLA-DRB1*14:02L HLA-DQA1*01:01-B1*05:01L HLA-DRB1*08:01L HLA-DRB1*11:01L HLA-DPA1*01:03-B1*02:01L HLA-DPA1*01:03-B1*104:01L HLA-DRB1*10:01L HLA-DRB1*08:03L
VNGLTSIKWADNN

SEQ ID NO: 15143 - protein, 10 aa, Severe acute respiratory syndrome coronavirus 2
  REGION 1..10: note = Table B: HLA-DRB1*13:03L HLA-DQA1*01:02-B1*06:02L HLA-DPA1*03:01-B1*105:01L
NPPALQDAYY

SEQ ID NO: 15144 - protein, 10 aa, Severe acute respiratory syndrome coronavirus 2
  REGION 1..10: note = Table B: HLA-DRB1*13:03L HLA-DQA1*01:02-B1*06:02L HLA-DRB1*08:77L HLA-DPA1*01:03-B1*03:01M HLA-DRB1*03:01L HLA-DRB1*11:02L HLA-DQA1*01-B1*05L HLA-DQA1*05:05-B1*03:19M HLA-DQA1*05:01-B1*02:01M HLA-DRB4*01:01L
  REGION 1..10: note = CONT. FROM ABOVE: HLA-DPA1*01:03-B1*04:01L HLA-DRB1*12:01L HLA-D PA1*01:03-B1*104:01M HLA-DRB1*10:01L HLA-DRB1*16:01M
LGDVRETMSY

SEQ ID NO: 15145 - protein, 11 aa, Severe acute respiratory syndrome coronavirus 2
  REGION 1..11: note = Table B: HLA-DRB1*13:03L HLA-DRB1*01:03L HLA-DQA1*01:02-B1*06:02L HLA-DRB1*01:02L HLA-DRB1*08:04L HLA-DPA1*03:01-B1*04:02L HLA-DRB1*14:01L HLA-DRB1*11:04L HLA-DRB1*11:01L HLA-DPA1*01:03-B1*04:01L
  REGION 1..11: note = CONT. FROM ABOVE: HLA-DPA1*01:03-B1*04:02L HLA-DRB1*12:01L HLA-D PA1*03:01-B1*105:01L HLA-DQA1*03:01-B1*03:02L HLA-DPA1*01:03-B1* 02:01L HLA-DRB1*16:01L HLA-DQA1*01:03-B1*06:01L HLA-DRB1*04:08L HLA-DQA1*02:01-B1*03:03L
LSYEQFKKGVQ

SEQ ID NO: 15146 - protein, 12 aa, Severe acute respiratory syndrome coronavirus 2
  REGION 1..12: note = Table B: HLA-DRB1*13:03L HLA-DRB1*04:02L HLA-DRB1*08:04L HLA-DRB1*14:01L HLA-DRB1*08:01L HLA-DRB1*12:01L HLA-DQA1*03:01-B1*03:02L HLA-DRB1*14:54L HLA-DRB1*04:08L
DNYYKKDNSYFT

SEQ ID NO: 15147 - protein, 14 aa, Severe acute respiratory syndrome coronavirus 2
  REGION 1..14: note = Table B: HLA-DRB1*13:03L HLA-DRB3*01:01L HLA-DQA1*05:05-B1*03:01L HLA-DRB1*07:01L
ADDLNQLTGYKKPA

SEQ ID NO: 15148 - protein, 10 aa, Severe acute respiratory syndrome coronavirus 2
  REGION 1..10: note = Table B: HLA-DRB1*13:03L HLA-DRB1*01:03L HLA-DRB1*08:01L HLA-DQA1*03:01-B1*03:02L HLA-DRB1*16:01L HLA-DQA1*02:01-B1*03:03L
LTGYKKPASR

SEQ ID NO: 15149 - protein, 11 aa, Severe acute respiratory syndrome coronavirus 2
  REGION 1..11: note = Table B: HLA-DRB1*13:03L HLA-DRB1*08:01L HLA-DRB1*11:01L HLA-DRB1*16:01L HLA-DRB1*04:08L
HYTPSFKKGAK

SEQ ID NO: 15150 - protein, 12 aa, Severe acute respiratory syndrome coronavirus 2
  REGION 1..12: note = Table B: HLA-DRB1*13:03L HLA-DRB1*01:03L HLA-DRB1*04:04L HLA-DRB1*04:05L HLA-DQA1*01:02-B1*06:02L HLA-DRB1*01:02L HLA-DRB4*03:01NL HLA-DRB1*14:01L HLA-DQA1*01-B1*05L HLA-DRB1*04:10L HLA-DRB1*12:01L HLA-DRB1*14:54L HLA-DRB1*16:01L
  REGION 1..12: note = CONT. FROM ABOVE: HLA-DRB1*04:08L HLA-DQA1*02:01-B1*03:03L HLA-D RB1*15:03L
KPIVWHVNNATN

SEQ ID NO: 15151 - protein, 13 aa, Severe acute respiratory syndrome coronavirus 2
  REGION 1..13: note = Table B: HLA-DRB1*13:03L HLA-DRB1*08:77L HLA-DRB3*02:01L HLA-DRB1*11:03L HLA-DRB1*14:02L
IVWHVNNATNKAT

SEQ ID NO: 15152 - protein, 10 aa, Severe acute respiratory syndrome coronavirus 2
  REGION 1..10: note = Table B: HLA-DRB1*13:03L HLA-DRB1*01:03L HLA-DQA1*01:02-B1*06:02L HLA-DQA1*02:01-B1*03:03L
TKPVETSNSF

SEQ ID NO: 15153 - protein, 11 aa, Severe acute respiratory syndrome coronavirus 2
  REGION 1..11: note = Table B: HLA-DRB1*13:03L HLA-DRB1*04:02L HLA-DRB1*04:05L HLA-DRB4*03:01NL HLA-DQA1*01-B1*05L HLA-DQA1*05:01-B1*02:01L HLA-DRB1*04:10L HLA-DRB1*12:01L HLA-DRB1*14:54L HLA-DRB1*16:01L
NSFDVLKSEDA

SEQ ID NO: 15154 - protein, 11 aa, Severe acute respiratory syndrome coronavirus 2
  REGION 1..11: note = Table B: HLA-DRB1*13:03L HLA-DQA1*05:01-B1*02:01L HLA-DRB1*12:01L HLA-DRB1*16:01L HLA-DRB1*15:03L
DVLKSEDAQGM

SEQ ID NO: 15155 - protein, 12 aa, Severe acute respiratory syndrome coronavirus 2
  REGION 1..12: note = Table B: HLA-DRB1*13:03L HLA-DRB1*01:03L HLA-DRB1*08:77L HLA-DPA1*01:03-B1*03:01L HLA-DPA1*03:01-B1*04:02L HLA-DPA1*01:03-B1*04:01L HLA-DRB1*09:01L HLA-DPA1*02:01-B1*13:01L HLA-DRB1*14:17L
  REGION 1..12: note = CONT. FROM ABOVE: HLA-DPA1*01:02-B1*04:01L HLA-DRB1*07:01L HLA-D RB1*04:08L
EDLKPVSEEVVE

SEQ ID NO: 15156 - protein, 14 aa, Severe acute respiratory syndrome coronavirus 2
  REGION 1..14: note = Table B: HLA-DRB1*13:03L HLA-DRB1*04:04L HLA-DRB1*08:77L HLA-DPA1*01:03-B1*03:01L HLA-DRB1*08:01L HLA-DQA1*05:05-B1*03:19L HLA-DRB3*01:01L HLA-DRB1*07:01L HLA-DRB1*04:08L
DLKPVSEEVVENPT

SEQ ID NO: 15157 - protein, 11 aa, Severe acute respiratory syndrome coronavirus 2
  REGION 1..11: note = Table B: HLA-DRB1*13:03L HLA-DRB1*04:02L HLA-DRB1*08:77L HLA-DPA1*03:01-B1*04:02L HLA-DRB1*14:01L HLA-DRB1*14:02L HLA-DRB1*08:01L HLA-DPA1*01:03-B1*04:01L HLA-DQA1*05:05-B1*03:116L HLA-DPA1*01:02-B1*04:01L
  REGION 1..11: note = CONT. FROM ABOVE: HLA-DRB1*15:03L
VENPTIQKDVL

SEQ ID NO: 15158 - protein, 11 aa, Severe acute respiratory syndrome coronavirus 2
  REGION 1..11: note = Table B: HLA-DRB1*13:03L HLA-DRB4*03:01NL HLA-DRB1*14:54L
GDIILKPANNS

SEQ ID NO: 15159 - protein, 10 aa, Severe acute respiratory syndrome coronavirus 2
  REGION 1..10: note = Table B: HLA-DRB1*13:03L HLA-DRB1*01:03L HLA-DQA1*01:02-B1*06:02L HLA-DRB1*03:01L HLA-DQA1*05:05-B1*03:19L HLA-DQA1*05:01-B1*02:01L HLA-DPA1*03:01-B1*105:01L HLA-DRB1*16:01L
  REGION 1..10: note = CONT. FROM ABOVE: HLA-DQA1*02:01-B1*03:03L
VGHTDLMAAY

SEQ ID NO: 15160 - protein, 13 aa, Severe acute respiratory syndrome coronavirus 2
  REGION 1..13: note = Table B: HLA-DRB1*13:03L HLA-DRB1*01:03L HLA-DRB1*04:04L HLA-DRB1*04:05L HLA-DRB1*01:02L HLA-DRB4*03:01NL HLA-DPA1*01:03-B1*03:01L HLA-DPA1*03:01-B1*04:02L HLA-DRB1*04:10L HLA-DRB1*12:01L HLA-DPA1*02:01-B1*13:01L
  REGION 1..13: note = CONT. FROM ABOVE: HLA-DPA1*03:01-B1*105:01L HLA-DRB1*14:54L HLA- DRB1*04:08L HLA-DRB1*15:03L
HTDLMAAYVDNSS

SEQ ID NO: 15161 - protein, 12 aa, Severe acute respiratory syndrome coronavirus 2
  REGION 1..12: note = Table B: HLA-DRB1*13:03L HLA-DRB1*01:03L HLA-DRB1*04:05L HLA-DRB1*01:02L HLA-DQA1*01:01-B1*05:01L HLA-DRB1*08:01L HLA-DQA1*05:05-B1*03:19L HLA-DRB1*12:01L HLA-DPA1*03:01-B1*105:01L HLA-DQA1*05:05-B1*03:01L
  REGION 1..12: note = CONT. FROM ABOVE: HLA-DRB1*16:01L
VDNSSLTIKKPN

SEQ ID NO: 15162 - protein, 12 aa, Severe acute respiratory syndrome coronavirus 2
  REGION 1..12: note = Table B: HLA-DRB1*13:03L HLA-DRB1*01:03L HLA-DQA1*01:01-B1*05:01L HLA-DRB1*08:01L HLA-DPA1*03:01-B1*105:01L HLA-DQA1*05:05-B1*03:01L HLA-DRB1*16:01L
DNSSLTIKKPNE

SEQ ID NO: 15163 - protein, 10 aa, Severe acute respiratory syndrome coronavirus 2
  REGION 1..10: note = Table B: HLA-DRB1*13:03L HLA-DRB1*01:03L HLA-DQA1*01:02-B1*06:02L HLA-DRB1*08:77L HLA-DPA1*01:03-B1*03:01L HLA-DRB1*03:01L HLA-DRB1*14:02L HLA-DQA1*01-B1*05L HLA-DQA1*05:05-B1*03:19L
  REGION 1..10: note = CONT. FROM ABOVE: HLA-DQA1*05:01-B1*02:01L HLA-DRB4*01:01L HLA-D PA1*01:03-B1*04:01L HLA-DPA1*02:01-B1*13:01L HLA-DPA1*03:01-B1*1 05:01L HLA-DPA1*01:03-B1*104:01L HLA-DRB1*10:01L HLA-DRB1*16:01L HLA-DQA1*02:01-B1*03:03L HLA-DRB1*15:03L
SVPWDTIANY

SEQ ID NO: 15164 - protein, 13 aa, Severe acute respiratory syndrome coronavirus 2
  REGION 1..13: note = Table B: HLA-DRB1*13:03L HLA-DRB1*04:04L HLA-DRB1*04:05L HLA-DRB1*08:04L HLA-DRB1*14:01L HLA-DRB1*08:01L HLA-DQA1*01-B1*05L HLA-DRB1*04:10L HLA-DRB1*12:01L HLA-DPA1*02:01-B1*13:01L HLA-DPA1*01:02-B1*04:01L
  REGION 1..13: note = CONT. FROM ABOVE: HLA-DRB1*08:03L
KPFLNKVVSTTTN

SEQ ID NO: 15165 - protein, 11 aa, Severe acute respiratory syndrome coronavirus 2
  REGION 1..11: note = Table B: HLA-DRB1*13:03L HLA-DRB1*01:03L HLA-DRB1*04:02L HLA-DRB4*03:01NL HLA-DRB1*12:01L HLA-DRB1*14:17L HLA-DRB1*16:01L HLA-DQA1*02:01-B1*03:03L
IAKNTVKSVGK

SEQ ID NO: 15166 - protein, 12 aa, Severe acute respiratory syndrome coronavirus 2
  REGION 1..12: note = Table B: HLA-DRB1*13:03L HLA-DRB4*03:01NL HLA-DRB1*08:04L HLA-DRB1*11:03L HLA-DRB1*04:10L HLA-DRB1*14:54L HLA-DRB1*04:08L
EASFNYLKSPNF

SEQ ID NO: 15167 - protein, 12 aa, Severe acute respiratory syndrome coronavirus 2
  REGION 1..12: note = Table B: HLA-DRB1*13:03L HLA-DRB1*04:04L HLA-DRB1*01:01L HLA-DRB4*03:01NL HLA-DRB1*08:04L HLA-DRB1*11:03L HLA-DRB1*11:04L HLA-DRB1*08:01L HLA-DRB4*01:01L HLA-DRB1*04:10L HLA-DPA1*01:03-B1*04:02L HLA-DRB3*01:01L HLA-DRB1*14:54L
  REGION 1..12: note = CONT. FROM ABOVE: HLA-DPA1*01:03-B1*104:01L HLA-DRB1*10:01L HLA- DRB1*04:08L HLA-DRB1*08:03L
ASFNYLKSPNFS

SEQ ID NO: 15168 - protein, 10 aa, Severe acute respiratory syndrome coronavirus 2
  REGION 1..10: note = Table B: HLA-DRB1*13:03L HLA-DQA1*01-B1*05L HLA-DQA1*05:05-B1*03:116L HLA-DPA1*02:01-B1*13:01L
SPNFSKLINI

SEQ ID NO: 15169 - protein, 13 aa, Severe acute respiratory syndrome coronavirus 2
  REGION 1..13: note = Table B: HLA-DRB1*13:03L HLA-DRB1*04:04L HLA-DRB1*01:01L HLA-DRB1*08:04L HLA-DRB1*11:02L HLA-DRB1*11:04L HLA-DRB1*14:02L HLA-DRB1*11:01L HLA-DRB5*01:01L HLA-DRB5*02:02L HLA-DRB4*01:01L HLA-DQA1*05:05-B1*03:116L HLA-DRB1*04:10L
  REGION 1..13: note = CONT. FROM ABOVE: HLA-DPA1*01:03-B1*04:02L HLA-DRB1*12:02L HLA-D RB1*14:54L HLA-DRB1*10:01L HLA-DRB1*08:03L
GSLIYSTAALGVL

SEQ ID NO: 15170 - protein, 12 aa, Severe acute respiratory syndrome coronavirus 2
  REGION 1..12: note = Table B: HLA-DRB1*13:03L HLA-DRB1*01:03L HLA-DRB1*04:04L HLA-DQA1*01:02-B1*06:02L HLA-DRB1*01:02L HLA-DRB4*03:01NL HLA-DRB1*14:01L HLA-DRB1*11:04L HLA-DRB1*12:01L HLA-DPA1*03:01-B1*105:01L HLA-DRB1*14:54L
  REGION 1..12: note = CONT. FROM ABOVE: HLA-DQA1*01:03-B1*06:01L HLA-DRB1*04:08L HLA-D QA1*02:01-B1*03:03L HLA-DRB1*15:03L
LDSLDTYPSLET

SEQ ID NO: 15171 - protein, 11 aa, Severe acute respiratory syndrome coronavirus 2
  REGION 1..11: note = Table B: HLA-DRB1*13:03L HLA-DRB1*04:05L HLA-DQA1*01:02-B1*06:02L HLA-DPA1*03:01-B1*105:01L HLA-DQA1*03:01-B1*03:02L HLA-DRB1*16:01L HLA-DQA1*01:03-B1*06:01L HLA-DRB1*04:08L
  REGION 1..11: note = CONT. FROM ABOVE: HLA-DQA1*02:01-B1*03:03L
VWKSYVHVVDG

SEQ ID NO: 15172 - protein, 10 aa, Severe acute respiratory syndrome coronavirus 2
  REGION 1..10: note = Table B: HLA-DRB1*13:03L HLA-DQA1*01-B1*05L
RPINPTDQSS

SEQ ID NO: 15173 - protein, 10 aa, Severe acute respiratory syndrome coronavirus 2
  REGION 1..10: note = Table B: HLA-DRB1*13:03L HLA-DQA1*03:01-B1*03:02L HLA-DQA1*02:01-B1*03:03L
SYIVDSVTVK

SEQ ID NO: 15174 - protein, 13 aa, Severe acute respiratory syndrome coronavirus 2
  REGION 1..13: note = Table B: HLA-DRB1*13:03L HLA-DRB1*01:03L HLA-DRB1*04:04L HLA-DRB1*04:05L HLA-DRB4*03:01NL HLA-DRB1*14:01L HLA-DQA1*01:01-B1*05:01L HLA-DRB1*08:01L HLA-DRB1*04:10L HLA-DRB1*12:01L HLA-DRB1*14:54L HLA-DPA1*01:02-B1*04:01L
  REGION 1..13: note = CONT. FROM ABOVE: HLA-DRB1*04:08L HLA-DRB1*15:03L
LPINVIVFDGKSK

SEQ ID NO: 15175 - protein, 13 aa, Severe acute respiratory syndrome coronavirus 2
  REGION 1..13: note = Table B: HLA-DRB1*13:03L HLA-DRB1*04:05L HLA-DQA1*01:02-B1*06:02L HLA-DRB1*14:02L HLA-DRB1*08:01L HLA-DRB1*11:01L HLA-DQA1*05:01-B1*02:01L HLA-DRB1*12:01L HLA-DPA1*03:01-B1*105:01L HLA-DQA1*03:01-B1*03:02L
IVFDGKSKCEESS

SEQ ID NO: 15176 - protein, 11 aa, Severe acute respiratory syndrome coronavirus 2
  REGION 1..11: note = Table B: HLA-DRB1*13:03L HLA-DRB1*01:03L HLA-DRB1*04:05L HLA-DQA1*01-B1*05L HLA-DQA1*05:01-B1*02:01L HLA-DRB1*12:01L HLA-DRB1*14:54L HLA-DQA1*05:05-B1*03:01L HLA-DRB1*16:01L
AELAKNVSLDN

SEQ ID NO: 15177 - protein, 11 aa, Severe acute respiratory syndrome coronavirus 2
  REGION 1..11: note = Table B: HLA-DRB1*13:03L HLA-DQA1*01:02-B1*06:02L HLA-DRB4*03:01NL HLA-DRB1*12:01L HLA-DRB1*14:17L
NVLSTFISAAR

SEQ ID NO: 15178 - protein, 13 aa, Severe acute respiratory syndrome coronavirus 2
  REGION 1..13: note = Table B: HLA-DRB1*13:03L HLA-DRB1*01:03L HLA-DRB1*04:02L HLA-DRB1*01:02L HLA-DRB1*08:04L HLA-DRB1*11:04L HLA-DRB1*11:01L HLA-DRB1*04:08L
TKDVVECLKLSHQ

SEQ ID NO: 15179 - protein, 10 aa, Severe acute respiratory syndrome coronavirus 2
  REGION 1..10: note = Table B: HLA-DRB1*13:03L HLA-DQA1*01:02-B1*06:02M HLA-DPA1*01:03-B1*03:01L HLA-DRB1*03:01L HLA-DQA1*05:05-B1*03:19L HLA-DQA1*05:01-B1*02:01L HLA-DPA1*01:03-B1*04:01L HLA-DPA1*03:01-B1*105:01L
  REGION 1..10: note = CONT. FROM ABOVE: HLA-DQA1*02:01-B1*03:03L HLA-DRB1*15:03L
EVTGDSCNNY

SEQ ID NO: 15180 - protein, 13 aa, Severe acute respiratory syndrome coronavirus 2
  REGION 1..13: note = Table B: HLA-DRB1*13:03L HLA-DRB1*04:05L HLA-DRB1*14:01L HLA-DRB1*11:04L HLA-DRB1*11:01L HLA-DRB1*12:01L HLA-DRB3*01:01L HLA-DRB1*16:01L
SEQLRKQIRSAAK

SEQ ID NO: 15181 - protein, 12 aa, Severe acute respiratory syndrome coronavirus 2
  REGION 1..12: note = Table B: HLA-DRB1*13:03L HLA-DRB1*04:02L HLA-DRB1*08:04L HLA-DRB1*08:01L HLA-DRB1*12:02L HLA-DRB1*14:17L
AIFYLITPVHVM

SEQ ID NO: 15182 - protein, 10 aa, Severe acute respiratory syndrome coronavirus 2
  REGION 1..10: note = Table B: HLA-DRB1*13:03L HLA-DQA1*03:01-B1*03:02L HLA-DQA1*02:01-B1*03:03L
LITPVHVMSK

SEQ ID NO: 15183 - protein, 11 aa, Severe acute respiratory syndrome coronavirus 2
  REGION 1..11: note = Table B: HLA-DRB1*13:03L HLA-DRB1*01:03L HLA-DRB1*04:02L HLA-DRB1*14:01L HLA-DRB1*08:01L HLA-DQA1*03:01-B1*03:02L HLA-DRB1*14:17L HLA-DRB1*16:01L
TPVHVMSKHTD

SEQ ID NO: 15184 - protein, 11 aa, Severe acute respiratory syndrome coronavirus 2
  REGION 1..11: note = Table B: HLA-DRB1*13:03L HLA-DRB1*04:04L HLA-DRB1*04:05L HLA-DRB4*03:01NL HLA-DRB1*04:10L HLA-DRB1*12:01L HLA-DRB1*14:54L HLA-DRB1*16:01L HLA-DRB1*04:08L HLA-DRB1*15:01L HLA-DRB1*15:03L
SEIIGYKAIDG

SEQ ID NO: 15185 - protein, 13 aa, Severe acute respiratory syndrome coronavirus 2
  REGION 1..13: note = Table B: HLA-DRB1*13:03L HLA-DRB1*04:05L HLA-DRB4*03:01NL HLA-DQA1*01-B1*05L HLA-DRB1*12:01L
IDGGVTRDIASTD

SEQ ID NO: 15186 - protein, 16 aa, Severe acute respiratory syndrome coronavirus 2
  REGION 1..16: note = Table B: HLA-DRB1*13:03L HLA-DRB1*03:01L HLA-DRB1*11:03L HLA-DPA1*01:03-B1*104:01L HLA-DPA1*01:02-B1*04:01L HLA-DRB1*07:01L HLA-DRB1*10:01L HLA-DRB1*08:03L
VTRDIASTDTCFANKH

SEQ ID NO: 15187 - protein, 13 aa, Severe acute respiratory syndrome coronavirus 2
  REGION 1..13: note = Table B: HLA-DRB1*13:03L HLA-DRB1*08:04L
DTCFANKHADFDT

SEQ ID NO: 15188 - protein, 13 aa, Severe acute respiratory syndrome coronavirus 2
  REGION 1..13: note = Table B: HLA-DRB1*13:03L HLA-DRB1*04:04L HLA-DRB1*12:02L HLA-DRB1*14:54L HLA-DPA1*01:02-B1*04:01L HLA-DRB1*10:01L HLA-DRB1*15:01L
AVITREVGFVVPG

SEQ ID NO: 15189 - protein, 15 aa, Severe acute respiratory syndrome coronavirus 2
  REGION 1..15: note = Table B: HLA-DRB1*13:03L HLA-DRB1*04:04L HLA-DRB1*08:01L HLA-DRB1*12:02L HLA-DPA1*01:02-B1*04:01L
VITREVGFVVPGLPG

SEQ ID NO: 15190 - protein, 10 aa, Severe acute respiratory syndrome coronavirus 2
  REGION 1..10: note = Table B: HLA-DRB1*13:03L HLA-DQA1*03:01-B1*03:02L
VPGLPGTILR

SEQ ID NO: 15191 - protein, 14 aa, Severe acute respiratory syndrome coronavirus 2
  REGION 1..14: note = Table B: HLA-DRB1*13:03L HLA-DRB1*01:03L HLA-DRB1*04:04L HLA-DQA1*01:02-B1*06:02L HLA-DRB1*01:02L HLA-DRB4*03:01NL HLA-DRB1*08:04L HLA-DRB1*14:01L HLA-DRB1*08:01L HLA-DRB1*12:01L HLA-DPA1*03:01-B1*105:01L HLA-DQA1*02:01-B1*03:03L
KPVPYCYDTNVLEG

SEQ ID NO: 15192 - protein, 11 aa, Severe acute respiratory syndrome coronavirus 2
  REGION 1..11: note = Table B: HLA-DRB1*13:03L HLA-DRB1*01:03L HLA-DQA1*01:02-B1*06:02L HLA-DRB1*08:77L HLA-DPA1*01:03-B1*03:01L HLA-DRB1*03:01L HLA-DQA1*01-B1*05L HLA-DPA1*01:03-B1*04:01L HLA-DPA1*03:01-B1*105:01L
  REGION 1..11: note = CONT. FROM ABOVE: HLA-DPA1*01:03-B1*104:01L HLA-DRB1*16:01L HLA- DQA1*02:01-B1*03:03L HLA-DRB1*15:03L
DTNVLEGSVAY

SEQ ID NO: 15193 - protein, 10 aa, Severe acute respiratory syndrome coronavirus 2
  REGION 1..10: note = Table B: HLA-DRB1*13:03L HLA-DQA1*03:01-B1*03:02L HLA-DQA1*02:01-B1*03:03L
AYESLRPDTR

SEQ ID NO: 15194 - protein, 14 aa, Severe acute respiratory syndrome coronavirus 2
  REGION 1..14: note = Table B: HLA-DRB1*13:03L HLA-DRB1*04:02L HLA-DRB1*04:05L HLA-DQA1*01:02-B1*06:02L HLA-DRB1*01:01L HLA-DRB4*03:01NL HLA-DRB1*08:04L HLA-DRB1*08:77L HLA-DPA1*03:01-B1*04:02L HLA-DRB1*11:02L HLA-DRB1*11:03L HLA-DRB1*11:04L HLA-DRB1*14:02L
  REGION 1..14: note = CONT. FROM ABOVE: HLA-DRB1*08:01L HLA-DRB1*11:01L HLA-DRB5*01:01 L HLA-DQA1*05:05-B1*03:19L HLA-DRB1*12:01L HLA-DPA1*03:01-B1*105 :01L HLA-DRB1*14:54L HLA-DRB1*14:17L HLA-DPA1*01:02-B1*04:01L HL A-DRB1*10:01L HLA-DRB1*15:03L
ESLRPDTRYVLMDG

SEQ ID NO: 15195 - protein, 10 aa, Severe acute respiratory syndrome coronavirus 2
  REGION 1..10: note = Table B: HLA-DRB1*13:03L HLA-DQA1*01:02-B1*06:02M HLA-DPA1*01:03-B1*04:01L HLA-DPA1*02:01-B1*13:01L HLA-DPA1*03:01-B1*105:01L HLA-DQA1*01:03-B1*06:01L HLA-DQA1*02:01-B1*03:03L HLA-DRB1*15:03L
DAVNLLTNMF

SEQ ID NO: 15196 - protein, 10 aa, Severe acute respiratory syndrome coronavirus 2
  REGION 1..10: note = Table B: HLA-DRB1*13:03L HLA-DQA1*01-B1*05L HLA-DQA1*03:01-B1*03:02L
TPLIQPIGAL

SEQ ID NO: 15197 - protein, 10 aa, Severe acute respiratory syndrome coronavirus 2
  REGION 1..10: note = Table B: HLA-DRB1*13:03L HLA-DQA1*01:02-B1*06:02L HLA-DRB1*08:77L HLA-DPA1*01:03-B1*03:01L HLA-DQA1*01-B1*05L HLA-DQA1*05:05-B1*03:19L HLA-DQA1*05:01-B1*02:01L HLA-DPA1*01:03-B1*04:01L HLA-DPA1*01:03-B1*104:01L
  REGION 1..10: note = CONT. FROM ABOVE: HLA-DRB1*16:01L HLA-DQA1*02:01-B1*03:03L
FSGAMDTTSY

SEQ ID NO: 15198 - protein, 15 aa, Severe acute respiratory syndrome coronavirus 2
  REGION 1..15: note = Table B: HLA-DRB1*13:03L HLA-DRB1*03:01L HLA-DPA1*01:03-B1*04:02L HLA-DPA1*01:03-B1*02:01L
DTTSYREAACCHLAK

SEQ ID NO: 15199 - protein, 10 aa, Severe acute respiratory syndrome coronavirus 2
  REGION 1..10: note = Table B: HLA-DRB1*13:03L HLA-DQA1*01:02-B1*06:02L HLA-DRB1*08:77L HLA-DPA1*01:03-B1*03:01L HLA-DRB1*03:01L HLA-DRB1*11:02L HLA-DQA1*01-B1*05L HLA-DQA1*05:05-B1*03:19L HLA-DQA1*05:01-B1*02:01L HLA-DRB4*01:01L
  REGION 1..10: note = CONT. FROM ABOVE: HLA-DPA1*01:03-B1*04:01L HLA-DPA1*01:03-B1*104 :01L HLA-DRB1*16:01L
FSNSGSDVLY

SEQ ID NO: 15200 - protein, 11 aa, Severe acute respiratory syndrome coronavirus 2
  REGION 1..11: note = Table B: HLA-DRB1*13:03L
YQPPQTSITSA

SEQ ID NO: 15201 - protein, 10 aa, Severe acute respiratory syndrome coronavirus 2
  REGION 1..10: note = Table B: HLA-DRB1*13:03L HLA-DQA1*01:02-B1*06:02L HLA-DRB1*08:77L HLA-DPA1*01:03-B1*03:01M HLA-DRB1*03:01L HLA-DRB1*11:02M HLA-DQA1*01-B1*05L HLA-DQA1*05:05-B1*03:19M HLA-DQA1*05:01-B1*02:01M HLA-DRB4*01:01L
  REGION 1..10: note = CONT. FROM ABOVE: HLA-DPA1*01:03-B1*04:01L HLA-DRB1*12:01L HLA-D PA1*01:03-B1*104:01M HLA-DRB1*10:01L HLA-DRB1*16:01M
TSEDMLNPNY

SEQ ID NO: 15202 - protein, 13 aa, Severe acute respiratory syndrome coronavirus 2
  REGION 1..13: note = Table B: HLA-DRB1*13:03L HLA-DRB1*01:03L HLA-DRB1*14:54L
GNVQLRVIGHSMQ

SEQ ID NO: 15203 - protein, 12 aa, Severe acute respiratory syndrome coronavirus 2
  REGION 1..12: note = Table B: HLA-DRB1*13:03L HLA-DRB1*01:03L HLA-DRB1*04:02L HLA-DRB1*04:05L HLA-DQA1*01:02-B1*06:02L HLA-DRB1*01:02L HLA-DRB1*14:01L HLA-DRB1*11:04L HLA-DRB1*08:01L HLA-DRB1*11:01L HLA-DRB1*12:01L HLA-DRB3*01:01L HLA-DQA1*03:01-B1*03:02L
  REGION 1..12: note = CONT. FROM ABOVE: HLA-DRB1*14:17L HLA-DPA1*01:02-B1*04:01L HLA-D RB1*16:01L HLA-DRB1*04:08L HLA-DQA1*02:01-B1*03:03L HLA-DRB1*15: 03L
TPKYKFVRIQPG

SEQ ID NO: 15204 - protein, 12 aa, Severe acute respiratory syndrome coronavirus 2
  REGION 1..12: note = Table B: HLA-DRB1*13:03L HLA-DRB1*08:04L HLA-DRB1*08:01L HLA-DRB1*04:08L
PNFTIKGSFLNG

SEQ ID NO: 15205 - protein, 12 aa, Severe acute respiratory syndrome coronavirus 2
  REGION 1..12: note = Table B: HLA-DRB1*13:03L HLA-DRB1*01:03L HLA-DRB1*04:05L HLA-DRB1*08:77L HLA-DPA1*01:03-B1*03:01L HLA-DPA1*03:01-B1*04:02L HLA-DRB1*14:02L HLA-DPA1*01:03-B1*04:01L HLA-DPA1*01:03-B1*04:02L
  REGION 1..12: note = CONT. FROM ABOVE: HLA-DRB1*12:01L HLA-DPA1*02:01-B1*13:01L HLA-D PA1*01:03-B1*104:01L
GVHAGTDLEGNF

SEQ ID NO: 15206 - protein, 10 aa, Severe acute respiratory syndrome coronavirus 2
  REGION 1..10: note = Table B: HLA-DRB1*13:03L HLA-DQA1*01:02-B1*06:02L HLA-DRB1*08:77L HLA-DPA1*01:03-B1*03:01L HLA-DRB1*03:01L HLA-DQA1*01-B1*05L HLA-DQA1*05:05-B1*03:19L HLA-DQA1*05:01-B1*02:01L HLA-DPA1*01:03-B1*104:01L
  REGION 1..10: note = CONT. FROM ABOVE: HLA-DRB1*16:01L
AGTDLEGNFY

SEQ ID NO: 15207 - protein, 10 aa, Severe acute respiratory syndrome coronavirus 2
  REGION 1..10: note = Table B: HLA-DRB1*13:03L HLA-DRB1*08:01L HLA-DRB1*12:01L HLA-DQA1*03:01-B1*03:02L HLA-DQA1*05:05-B1*03:01L HLA-DQA1*02:01-B1*03:03L
GNFYGPFVDR

SEQ ID NO: 15208 - protein, 12 aa, Severe acute respiratory syndrome coronavirus 2
  REGION 1..12: note = Table B: HLA-DRB1*13:03L HLA-DRB1*01:03L HLA-DRB1*04:02L HLA-DRB1*04:05L HLA-DRB4*03:01NL HLA-DRB1*08:01L HLA-DQA1*03:01-B1*03:02L HLA-DRB1*04:08L HLA-DQA1*02:01-B1*03:03L
PFVDRQTAQAAG

SEQ ID NO: 15209 - protein, 13 aa, Severe acute respiratory syndrome coronavirus 2
  REGION 1..13: note = Table B: HLA-DRB1*13:03L HLA-DRB1*08:04L HLA-DRB1*08:01L HLA-DPA1*01:03-B1*04:01L HLA-DPA1*01:03-B1*04:02L
LNRFTTTLNDFNL

SEQ ID NO: 15210 - protein, 10 aa, Severe acute respiratory syndrome coronavirus 2
  REGION 1..10: note = Table B: HLA-DRB1*13:03L HLA-DRB1*08:01L HLA-DRB1*12:01L HLA-DQA1*03:01-B1*03:02L HLA-DQA1*02:01-B1*03:03L
GVTFQSAVKR

SEQ ID NO: 15211 - protein, 13 aa, Severe acute respiratory syndrome coronavirus 2
  REGION 1..13: note = Table B: HLA-DRB1*13:03L HLA-DRB1*04:04L HLA-DRB1*01:01L HLA-DRB1*11:03L HLA-DRB1*14:02L HLA-DPA1*01:03-B1*04:02L HLA-DPA1*01:03-B1*104:01L
TLVYKVYYGNALD

SEQ ID NO: 15212 - protein, 11 aa, Severe acute respiratory syndrome coronavirus 2
  REGION 1..11: note = Table B: HLA-DRB1*13:03L HLA-DRB1*01:03L HLA-DRB1*04:05L HLA-DRB1*01:02L HLA-DRB4*03:01NL HLA-DRB1*14:01L HLA-DRB1*12:01L HLA-DQA1*01:03-B1*06:01L HLA-DRB1*04:08L HLA-DRB1*15:01L
YKVYYGNALDQ

SEQ ID NO: 15213 - protein, 11 aa, Severe acute respiratory syndrome coronavirus 2
  REGION 1..11: note = Table B: HLA-DRB1*13:03L HLA-DRB1*08:04L HLA-DRB1*14:01L HLA-DRB1*08:01L
DAFKLNIKLLG

SEQ ID NO: 15214 - protein, 11 aa, Severe acute respiratory syndrome coronavirus 2
  REGION 1..11: note = Table B: HLA-DRB1*13:03L HLA-DRB1*04:05L HLA-DRB4*03:01NL HLA-DRB1*04:10L HLA-DRB1*12:01L HLA-DRB1*14:54L HLA-DRB1*16:01L HLA-DQA1*01:03-B1*06:01L
NDILLAKDTTE

SEQ ID NO: 15215 - protein, 10 aa, Severe acute respiratory syndrome coronavirus 2
  REGION 1..10: note = Table B: HLA-DRB1*13:03L HLA-DRB4*03:01NL HLA-DRB1*12:01L HLA-DQA1*03:01-B1*03:02L HLA-DQA1*05:05-B1*03:01L HLA-DQA1*01:03-B1*06:01L HLA-DQA1*02:01-B1*03:03L
ANGDSEVVLK

SEQ ID NO: 15216 - protein, 13 aa, Severe acute respiratory syndrome coronavirus 2
  REGION 1..13: note = Table B: HLA-DRB1*13:03L HLA-DRB1*01:03L HLA-DRB1*04:02L HLA-DQA1*01:02-B1*06:02L HLA-DRB1*01:02L HLA-DRB1*08:04L HLA-DRB1*14:01L HLA-DRB1*11:04L HLA-DRB1*11:01L HLA-DRB1*12:01L HLA-DRB3*01:01L HLA-DRB1*16:01L HLA-DRB1*04:08L
VVLKKLKKSLNVA

SEQ ID NO: 15217 - protein, 15 aa, Severe acute respiratory syndrome coronavirus 2
  REGION 1..15: note = Table B: HLA-DRB1*13:03L HLA-DRB1*01:01L HLA-DRB1*03:01L HLA-DQA1*01:01-B1*05:01L HLA-DRB1*08:01L HLA-DRB1*11:01L
KKLKKSLNVAKSEFD

SEQ ID NO: 15218 - protein, 12 aa, Severe acute respiratory syndrome coronavirus 2
  REGION 1..12: note = Table B: HLA-DRB1*13:03L HLA-DRB4*03:01NL HLA-DRB1*08:01L HLA-DRB1*16:01L HLA-DRB1*04:08L HLA-DRB1*08:03L
KSLNVAKSEFDR

SEQ ID NO: 15219 - protein, 13 aa, Severe acute respiratory syndrome coronavirus 2
  REGION 1..13: note = Table B: HLA-DRB1*13:03L HLA-DRB1*01:03L HLA-DRB1*01:02L HLA-DRB1*12:01L HLA-DPA1*02:01-B1*13:01L HLA-DRB1*15:03L
SLNVAKSEFDRDA

SEQ ID NO: 15220 - protein, 13 aa, Severe acute respiratory syndrome coronavirus 2
  REGION 1..13: note = Table B: HLA-DRB1*13:03L HLA-DRB1*01:02L HLA-DRB4*03:01NL HLA-DRB1*14:01L HLA-DRB1*08:01L HLA-DRB1*12:01L HLA-DPA1*02:01-B1*13:01L HLA-DRB1*14:54L HLA-DRB1*15:03L
LNVAKSEFDRDAA

SEQ ID NO: 15221 - protein, 10 aa, Severe acute respiratory syndrome coronavirus 2
  REGION 1..10: note = Table B: HLA-DRB1*13:03L HLA-DRB1*08:01L HLA-DQA1*03:01-B1*03:02L HLA-DQA1*01:03-B1*06:01L HLA-DQA1*02:01-B1*03:03L
DAAMQRKLEK

SEQ ID NO: 15222 - protein, 13 aa, Severe acute respiratory syndrome coronavirus 2
  REGION 1..13: note = Table B: HLA-DRB1*13:03L HLA-DPA1*01:03-B1*02:01L HLA-DRB1*08:03L
QTMLFTMLRKLDN

SEQ ID NO: 15223 - protein, 13 aa, Severe acute respiratory syndrome coronavirus 2
  REGION 1..13: note = Table B: HLA-DRB1*13:03L HLA-DRB1*08:03L
TMLFTMLRKLDND

SEQ ID NO: 15224 - protein, 12 aa, Severe acute respiratory syndrome coronavirus 2
  REGION 1..12: note = Table B: HLA-DRB1*13:03L HLA-DRB1*08:04L HLA-DRB1*11:01L HLA-DRB1*08:03L
LFTMLRKLDNDA

SEQ ID NO: 15225 - protein, 12 aa, Severe acute respiratory syndrome coronavirus 2
  REGION 1..12: note = Table B: HLA-DRB1*13:03L HLA-DRB1*01:03L HLA-DRB1*04:02L HLA-DRB1*04:04L HLA-DRB1*04:05L HLA-DRB1*01:02L HLA-DRB4*03:01NL HLA-DQA1*01-B1*05L HLA-DRB1*04:10L HLA-DRB1*12:01L HLA-DRB1*14:54L HLA-DRB1*16:01L HLA-DRB1*04:08L HLA-DRB1*15:03L
SAVKLQNNELSP

SEQ ID NO: 15226 - protein, 16 aa, Severe acute respiratory syndrome coronavirus 2
  REGION 1..16: note = Table B: HLA-DRB1*13:03L HLA-DPA1*03:01-B1*04:02L HLA-DRB1*11:02L HLA-DRB1*11:03L HLA-DRB1*14:02L HLA-DRB4*01:01L HLA-DRB3*01:01L HLA-DPA1*01:03-B1*02:01L HLA-DPA1*01:02-B1*04:01L HLA-DRB1*07:01L HLA-DRB1*08:02L
  REGION 1..16: note = CONT. FROM ABOVE: HLA-DRB1*08:03L
SPVALRQMSCAAGTTQ

SEQ ID NO: 15227 - protein, 13 aa, Severe acute respiratory syndrome coronavirus 2
  REGION 1..13: note = Table B: HLA-DRB1*13:03L HLA-DRB1*04:05L HLA-DRB1*01:02L HLA-DRB1*08:04L HLA-DRB1*14:01L HLA-DRB1*11:04L HLA-DRB1*11:01L HLA-DRB1*12:01L HLA-DQA1*03:01-B1*03:02L HLA-DRB1*16:01L
LKWARFPKSDGTG

SEQ ID NO: 15228 - protein, 12 aa, Severe acute respiratory syndrome coronavirus 2
  REGION 1..12: note = Table B: HLA-DRB1*13:03L HLA-DRB1*01:03L HLA-DRB1*04:05L HLA-DQA1*01:02-B1*06:02L HLA-DRB1*01:02L HLA-DRB1*08:04L HLA-DPA1*03:01-B1*04:02L HLA-DRB1*14:01L HLA-DRB1*11:04L HLA-DRB1*08:01L HLA-DRB1*11:01L HLA-DPA1*01:03-B1*04:02L
  REGION 1..12: note = CONT. FROM ABOVE: HLA-DRB1*12:01L HLA-DPA1*02:01-B1*13:01L HLA-D PA1*03:01-B1*105:01L HLA-DPA1*01:02-B1*04:01L HLA-DRB1*16:01L HL A-DRB1*04:08L HLA-DRB1*08:03L HLA-DQA1*02:01-B1*03:03L HLA-DRB1* 15:03L
VKYLYFIKGLNN

SEQ ID NO: 15229 - protein, 10 aa, Severe acute respiratory syndrome coronavirus 2
  REGION 1..10: note = Table B: HLA-DRB1*13:03L HLA-DRB4*03:01NL HLA-DRB1*08:01L HLA-DRB1*12:01L HLA-DQA1*03:01-B1*03:02L HLA-DRB1*14:17L
FIKGLNNLNR

SEQ ID NO: 15230 - protein, 13 aa, Severe acute respiratory syndrome coronavirus 2
  REGION 1..13: note = Table B: HLA-DRB1*13:03L HLA-DQA1*01:02-B1*06:02L HLA-DRB1*08:04L HLA-DRB1*11:04L HLA-DRB1*08:01L HLA-DRB1*11:01L HLA-DRB1*14:54L
IKGLNNLNRGMVL

SEQ ID NO: 15231 - protein, 13 aa, Severe acute respiratory syndrome coronavirus 2
  REGION 1..13: note = Table B: HLA-DRB1*13:03L HLA-DRB1*04:05L HLA-DPA1*03:01-B1*04:02L HLA-DRB1*11:03L HLA-DRB1*09:01L HLA-DPA1*03:01-B1*105:01L
TGQAITVTPEANM

SEQ ID NO: 15232 - protein, 13 aa, Severe acute respiratory syndrome coronavirus 2
  REGION 1..13: note = Table B: HLA-DRB1*13:03L HLA-DRB1*01:03L HLA-DRB1*04:04L HLA-DRB1*01:02L HLA-DRB1*04:08L HLA-DRB1*15:03L
AITVTPEANMDQE

SEQ ID NO: 15233 - protein, 13 aa, Severe acute respiratory syndrome coronavirus 2
  REGION 1..13: note = Table B: HLA-DRB1*13:03L HLA-DRB1*04:04L HLA-DRB1*04:08L
ITVTPEANMDQES

SEQ ID NO: 15234 - protein, 11 aa, Severe acute respiratory syndrome coronavirus 2
  REGION 1..11: note = Table B: HLA-DRB1*13:03L HLA-DQA1*01:02-B1*06:02L HLA-DQA1*05:01-B1*02:01L HLA-DPA1*03:01-B1*105:01L
TPEANMDQESF

SEQ ID NO: 15235 - protein, 10 aa, Severe acute respiratory syndrome coronavirus 2
  REGION 1..10: note = Table B: HLA-DRB1*13:03L HLA-DQA1*01:02-B1*06:02L HLA-DRB1*14:02L HLA-DPA1*03:01-B1*105:01L HLA-DQA1*02:01-B1*03:03L HLA-DRB1*15:03L
MLQSADAQSF

SEQ ID NO: 15236 - protein, 10 aa, Severe acute respiratory syndrome coronavirus 2
  REGION 1..10: note = Table B: HLA-DRB1*13:03L HLA-DQA1*01:02-B1*06:02L HLA-DPA1*01:03-B1*03:01L HLA-DQA1*05:05-B1*03:19L HLA-DQA1*05:01-B1*02:01L HLA-DPA1*01:03-B1*04:01L HLA-DPA1*03:01-B1*105:01L HLA-DRB1*15:03L
DVVYRAFDIY

SEQ ID NO: 15237 - protein, 11 aa, Severe acute respiratory syndrome coronavirus 2
  REGION 1..11: note = Table B: HLA-DRB1*13:03L HLA-DRB1*01:03L HLA-DQA1*01:02-B1*06:02L HLA-DRB1*08:01L HLA-DRB1*16:01L HLA-DRB1*04:08L
IDSYFVVKRHT

SEQ ID NO: 15238 - protein, 12 aa, Severe acute respiratory syndrome coronavirus 2
  REGION 1..12: note = Table B: HLA-DRB1*13:03L HLA-DRB1*01:03L HLA-DRB1*04:02L HLA-DRB1*04:05L HLA-DQA1*01:02-B1*06:02L HLA-DRB4*03:01NL HLA-DRB1*08:04L HLA-DPA1*03:01-B1*04:02L HLA-DRB1*14:01L HLA-DRB1*08:01L HLA-DQA1*01-B1*05L HLA-DRB1*04:10L
  REGION 1..12: note = CONT. FROM ABOVE: HLA-DRB1*12:01L HLA-DPA1*03:01-B1*105:01L HLA- DQA1*03:01-B1*03:02L HLA-DRB1*14:54L HLA-DPA1*01:02-B1*04:01L HL A-DRB1*16:01L HLA-DRB1*04:08L HLA-DQA1*02:01-B1*03:03L HLA-DRB1* 15:03L
ETIYNLLKDCPA

SEQ ID NO: 15239 - protein, 12 aa, Severe acute respiratory syndrome coronavirus 2
  REGION 1..12: note = Table B: HLA-DRB1*13:03L HLA-DRB1*04:02L HLA-DRB1*04:05L HLA-DQA1*01:02-B1*06:02L HLA-DRB1*08:04L HLA-DRB1*14:01L HLA-DRB1*11:04L HLA-DRB1*11:01L HLA-DRB1*08:03L
ADLVYALRHFDE

SEQ ID NO: 15240 - protein, 12 aa, Severe acute respiratory syndrome coronavirus 2
  REGION 1..12: note = Table B: HLA-DRB1*13:03L HLA-DRB1*04:02L HLA-DRB1*04:05L HLA-DQA1*01:02-B1*06:02L HLA-DRB1*08:04L HLA-DRB1*14:01L HLA-DRB1*11:04L HLA-DRB1*11:01L HLA-DRB1*16:01L HLA-DRB1*04:08L HLA-DRB1*08:03L
DLVYALRHFDEG

SEQ ID NO: 15241 - protein, 14 aa, Severe acute respiratory syndrome coronavirus 2
  REGION 1..14: note = Table B: HLA-DRB1*13:03L HLA-DRB1*01:03L HLA-DRB1*01:02L HLA-DPA1*03:01-B1*04:02L HLA-DRB1*14:02L HLA-DPA1*01:03-B1*04:02L HLA-DRB1*12:01L HLA-DQA1*03:01-B1*03:02L HLA-DRB1*04:08L HLA-DRB1*08:02L
  REGION 1..14: note = CONT. FROM ABOVE: HLA-DRB1*15:03L
DDYFNKKDWYDFVE

SEQ ID NO: 15242 - protein, 14 aa, Severe acute respiratory syndrome coronavirus 2
  REGION 1..14: note = Table B: HLA-DRB1*13:03L HLA-DRB1*08:04L HLA-DRB1*14:01L HLA-DPA1*02:01-B1*13:01L
AGIVGVLTLDNQDL

SEQ ID NO: 15243 - protein, 13 aa, Severe acute respiratory syndrome coronavirus 2
  REGION 1..13: note = Table B: HLA-DRB1*13:03L
GVLTLDNQDLNGN

SEQ ID NO: 15244 - protein, 10 aa, Severe acute respiratory syndrome coronavirus 2
  REGION 1..10: note = Table B: HLA-DRB1*13:03L HLA-DQA1*01:02-B1*06:02L HLA-DQA1*05:05-B1*03:19L HLA-DQA1*05:01-B1*02:01L HLA-DPA1*03:01-B1*105:01L
DNQDLNGNWY

SEQ ID NO: 15245 - protein, 10 aa, Severe acute respiratory syndrome coronavirus 2
  REGION 1..10: note = Table B: HLA-DRB1*13:03L HLA-DQA1*01:02-B1*06:02L HLA-DPA1*01:03-B1*03:01L HLA-DRB1*14:02L HLA-DQA1*05:05-B1*03:19L HLA-DQA1*05:01-B1*02:01L HLA-DPA1*03:01-B1*105:01L HLA-DPA1*01:03-B1*104:01L
  REGION 1..10: note = CONT. FROM ABOVE: HLA-DRB1*16:01L HLA-DQA1*02:01-B1*03:03L
SGVPVVDSYY

SEQ ID NO: 15246 - protein, 12 aa, Severe acute respiratory syndrome coronavirus 2
  REGION 1..12: note = Table B: HLA-DRB1*13:03L HLA-DRB1*01:03L HLA-DRB1*01:02L HLA-DRB1*08:04L HLA-DRB1*11:04L HLA-DRB1*08:01L HLA-DRB1*12:01L HLA-DPA1*01:02-B1*04:01L HLA-DRB1*16:01L HLA-DRB1*04:08L HLA-DRB1*15:03L
MPILTLTRALTA

SEQ ID NO: 15247 - protein, 13 aa, Severe acute respiratory syndrome coronavirus 2
  REGION 1..13: note = Table B: HLA-DRB1*13:03L HLA-DRB1*01:03L HLA-DRB1*01:02L HLA-DRB1*14:01L HLA-DQA1*01:01-B1*05:01L HLA-DRB1*08:01L HLA-DRB1*12:01L HLA-DPA1*02:01-B1*13:01L HLA-DRB1*04:08L
TRALTAESHVDTD

SEQ ID NO: 15248 - protein, 12 aa, Severe acute respiratory syndrome coronavirus 2
  REGION 1..12: note = Table B: HLA-DRB1*13:03L HLA-DQA1*01:02-B1*06:02L HLA-DRB1*08:04L HLA-DPA1*01:03-B1*03:01L HLA-DPA1*03:01-B1*04:02L HLA-DRB1*14:02L HLA-DQA1*05:01-B1*02:01L HLA-DPA1*02:01-B1*13:01L
  REGION 1..12: note = CONT. FROM ABOVE: HLA-DPA1*03:01-B1*105:01L
LLKYDFTEERLK

SEQ ID NO: 15249 - protein, 10 aa, Severe acute respiratory syndrome coronavirus 2
  REGION 1..10: note = Table B: HLA-DRB1*13:03L HLA-DQA1*01:02-B1*06:02L HLA-DRB1*08:77L HLA-DPA1*01:03-B1*03:01L HLA-DRB1*03:01L HLA-DRB1*14:02L HLA-DQA1*05:05-B1*03:19L HLA-DQA1*05:01-B1*02:01L HLA-DPA1*01:03-B1*04:01L
  REGION 1..10: note = CONT. FROM ABOVE: HLA-DPA1*03:01-B1*105:01L HLA-DRB1*16:01L HLA- DQA1*02:01-B1*03:03L
GVPFVVSTGY

SEQ ID NO: 15250 - protein, 10 aa, Severe acute respiratory syndrome coronavirus 2
  REGION 1..10: note = Table B: HLA-DRB1*13:03L HLA-DRB1*12:01L HLA-DQA1*03:01-B1*03:02L HLA-DQA1*05:05-B1*03:01L HLA-DRB1*14:17L HLA-DQA1*01:03-B1*06:01L HLA-DQA1*02:01-B1*03:03L
NQDVNLHSSR

SEQ ID NO: 15251 - protein, 11 aa, Severe acute respiratory syndrome coronavirus 2
  REGION 1..11: note = Table B: HLA-DRB1*13:03L HLA-DRB1*08:01L
AASGNLLLDKR

SEQ ID NO: 15252 - protein, 12 aa, Severe acute respiratory syndrome coronavirus 2
  REGION 1..12: note = Table B: HLA-DRB1*13:03L HLA-DRB1*04:04L HLA-DRB1*04:05L HLA-DQA1*01:02-B1*06:02L HLA-DRB1*14:01L HLA-DQA1*01:01-B1*05:01L HLA-DRB1*08:01L HLA-DQA1*05:01-B1*02:01L HLA-DRB1*04:10L HLA-DRB1*12:01L
  REGION 1..12: note = CONT. FROM ABOVE: HLA-DRB1*14:54L HLA-DQA1*05:05-B1*03:01L HLA-D RB1*04:08L
TNNVAFQTVKPG

SEQ ID NO: 15253 - protein, 16 aa, Severe acute respiratory syndrome coronavirus 2
  REGION 1..16: note = Table B: HLA-DRB1*13:03L HLA-DRB1*11:04L HLA-DRB1*11:01L
KPGNFNKDFYDFAVSK

SEQ ID NO: 15254 - protein, 11 aa, Severe acute respiratory syndrome coronavirus 2
  REGION 1..11: note = Table B: HLA-DRB1*13:03L HLA-DRB4*03:01NL HLA-DPA1*01:03-B1*03:01L HLA-DRB1*03:01L HLA-DRB1*14:01L HLA-DRB1*11:03L HLA-DQA1*05:05-B1*03:01L HLA-DRB1*08:02L
DFYDFAVSKGF

SEQ ID NO: 15255 - protein, 13 aa, Severe acute respiratory syndrome coronavirus 2
  REGION 1..13: note = Table B: HLA-DRB1*13:03L HLA-DRB1*08:01L
SKGFFKEGSSVEL

SEQ ID NO: 15256 - protein, 12 aa, Severe acute respiratory syndrome coronavirus 2
  REGION 1..12: note = Table B: HLA-DRB1*13:03L HLA-DQA1*01:02-B1*06:02L HLA-DRB1*01:02L HLA-DRB1*08:01L HLA-DQA1*05:05-B1*03:19L HLA-DRB1*04:10L HLA-DRB1*12:01L HLA-DPA1*03:01-B1*105:01L HLA-DQA1*05:05-B1*03:01L HLA-DRB1*10:01L HLA-DRB1*04:08L
GFFKEGSSVELK

SEQ ID NO: 15257 - protein, 12 aa, Severe acute respiratory syndrome coronavirus 2
  REGION 1..12: note = Table B: HLA-DRB1*13:03L HLA-DRB1*01:03L HLA-DRB1*04:02L HLA-DRB1*01:02L HLA-DRB4*03:01NL HLA-DRB1*08:01L HLA-DRB1*04:10L HLA-DRB1*12:01L HLA-DRB1*14:54L HLA-DRB1*16:01L HLA-DRB1*04:08L HLA-DQA1*02:01-B1*03:03L
KHFFFAQDGNAA

SEQ ID NO: 15258 - protein, 10 aa, Severe acute respiratory syndrome coronavirus 2
  REGION 1..10: note = Table B: HLA-DRB1*13:03L HLA-DQA1*01:02-B1*06:02L HLA-DPA1*01:03-B1*03:01L HLA-DQA1*05:05-B1*03:19L HLA-DQA1*05:01-B1*02:01L HLA-DPA1*01:03-B1*104:01L HLA-DRB1*16:01L
NAAISDYDYY

SEQ ID NO: 15259 - protein, 10 aa, Severe acute respiratory syndrome coronavirus 2
  REGION 1..10: note = Table B: HLA-DRB1*13:03L HLA-DRB1*01:03L HLA-DRB1*08:01L HLA-DQA1*03:01-B1*03:02L HLA-DPA1*01:02-B1*04:01L HLA-DRB1*16:01L HLA-DQA1*02:01-B1*03:03L
FPFNKWGKAR

SEQ ID NO: 15260 - protein, 11 aa, Severe acute respiratory syndrome coronavirus 2
  REGION 1..11: note = Table B: HLA-DRB1*13:03L
IPTITQMNLKY

SEQ ID NO: 15261 - protein, 11 aa, Severe acute respiratory syndrome coronavirus 2
  REGION 1..11: note = Table B: HLA-DRB1*13:03L HLA-DRB1*01:02L HLA-DRB1*12:01L HLA-DRB1*04:08L
NLKYAISAKNR

SEQ ID NO: 15262 - protein, 15 aa, Severe acute respiratory syndrome coronavirus 2
  REGION 1..15: note = Table B: HLA-DRB1*13:03L HLA-DRB1*08:77L HLA-DRB1*03:01L HLA-DPA1*01:03-B1*04:01L HLA-DRB1*12:02L HLA-DRB1*14:54L HLA-DPA1*01:03-B1*02:01L
NSVFNICQAVTANVN

SEQ ID NO: 15263 - protein, 12 aa, Severe acute respiratory syndrome coronavirus 2
  REGION 1..12: note = Table B: HLA-DRB1*13:03L HLA-DRB1*01:03L HLA-DRB1*04:02L HLA-DRB1*04:05L HLA-DRB4*03:01NL HLA-DRB1*08:04L HLA-DRB3*02:01L HLA-DPA1*01:03-B1*03:01L HLA-DRB1*11:03L HLA-DRB1*11:04L HLA-DRB1*11:01L HLA-DRB5*01:01L HLA-DQA1*01-B1*05L
  REGION 1..12: note = CONT. FROM ABOVE: HLA-DRB1*04:10L HLA-DRB1*12:02M HLA-DRB3*01:01 L HLA-DRB1*14:54L HLA-DQA1*05:05-B1*03:01L HLA-DRB1*14:17L HLA-D RB1*04:08L
VNALLSTDGNKI

SEQ ID NO: 15264 - protein, 11 aa, Severe acute respiratory syndrome coronavirus 2
  REGION 1..11: note = Table B: HLA-DRB1*13:03L HLA-DRB1*01:03L HLA-DRB1*04:02L HLA-DRB1*04:05L HLA-DRB1*08:04L HLA-DPA1*01:03-B1*03:01L HLA-DRB1*11:03L HLA-DRB1*11:04L HLA-DRB5*01:01L HLA-DRB1*04:10L HLA-DRB1*12:02L HLA-DRB1*14:54L HLA-DQA1*05:05-B1*03:01L
  REGION 1..11: note = CONT. FROM ABOVE: HLA-DRB1*04:08L
ALLSTDGNKIA

SEQ ID NO: 15265 - protein, 13 aa, Severe acute respiratory syndrome coronavirus 2
  REGION 1..13: note = Table B: HLA-DRB1*13:03L HLA-DRB1*11:04L
HRLYECLYRNRDV

SEQ ID NO: 15266 - protein, 12 aa, Severe acute respiratory syndrome coronavirus 2
  REGION 1..12: note = Table B: HLA-DRB1*13:03L HLA-DQA1*01:02-B1*06:02L HLA-DRB1*08:04L HLA-DRB1*11:04L HLA-DRB1*11:01L HLA-DRB1*04:08L HLA-DRB1*08:03L
LYECLYRNRDVD

SEQ ID NO: 15267 - protein, 14 aa, Severe acute respiratory syndrome coronavirus 2
  REGION 1..14: note = Table B: HLA-DRB1*13:03L HLA-DRB1*01:01L HLA-DQA1*03:01-B1*03:02L
DTDFVNEFYAYLRK

SEQ ID NO: 15268 - protein, 14 aa, Severe acute respiratory syndrome coronavirus 2
  REGION 1..14: note = Table B: HLA-DRB1*13:03L HLA-DRB1*01:01L HLA-DRB1*11:02L HLA-DRB1*11:03L HLA-DRB1*11:04L HLA-DRB1*14:02L HLA-DPA1*01:03-B1*04:01L HLA-DRB1*09:01L HLA-DPA1*01:03-B1*04:02L HLA-DRB3*01:01L
  REGION 1..14: note = CONT. FROM ABOVE: HLA-DPA1*01:03-B1*104:01L HLA-DRB1*07:01L HLA- DRB1*10:01L HLA-DRB1*08:03L
KSVLYYQNNVFMSE

SEQ ID NO: 15269 - protein, 10 aa, Severe acute respiratory syndrome coronavirus 2
  REGION 1..10: note = Table B: HLA-DRB1*13:03L
YPDPSRILGA

SEQ ID NO: 15270 - protein, 10 aa, Severe acute respiratory syndrome coronavirus 2
  REGION 1..10: note = Table B: HLA-DRB1*13:03L HLA-DQA1*01:02-B1*06:02L HLA-DRB1*08:04L HLA-DRB1*14:01L HLA-DRB1*11:04L HLA-DRB1*08:01L HLA-DRB1*11:01L HLA-DRB1*04:08L
LQYIRKLHDE

SEQ ID NO: 15271 - protein, 16 aa, Severe acute respiratory syndrome coronavirus 2
  REGION 1..16: note = Table B: HLA-DRB1*13:03L HLA-DRB3*02:01L HLA-DRB1*03:01L HLA-DRB1*11:02L HLA-DRB1*09:01L HLA-DRB1*14:17L HLA-DRB1*07:01L HLA-DRB1*08:02L HLA-DRB1*08:03L HLA-DRB1*15:01L
HKLVLSVNPYVCNAPG

SEQ ID NO: 15272 - protein, 10 aa, Severe acute respiratory syndrome coronavirus 2
  REGION 1..10: note = Table B: HLA-DRB1*13:03L HLA-DRB1*01:03L HLA-DQA1*01:02-B1*06:02L HLA-DRB1*08:77L HLA-DPA1*01:03-B1*03:01L HLA-DRB1*03:01L HLA-DRB1*11:02L HLA-DRB1*14:02L HLA-DQA1*01-B1*05L HLA-DQA1*05:05-B1*03:19L
  REGION 1..10: note = CONT. FROM ABOVE: HLA-DQA1*05:01-B1*02:01L HLA-DRB4*01:01L HLA-D PA1*01:03-B1*04:01L HLA-DPA1*01:03-B1*04:02L HLA-DPA1*01:03-B1*1 04:01L HLA-DRB1*10:01L HLA-DRB1*16:01L HLA-DQA1*02:01-B1*03:03L HLA-DRB1*15:03L
TQLYLGGMSY

SEQ ID NO: 15273 - protein, 12 aa, Severe acute respiratory syndrome coronavirus 2
  REGION 1..12: note = Table B: HLA-DRB1*13:03L HLA-DRB1*01:03L HLA-DQA1*01:02-B1*06:02L HLA-DRB1*01:02L HLA-DRB1*08:04L HLA-DRB1*11:04L HLA-DRB1*08:01L HLA-DRB1*11:01L HLA-DRB1*12:01L HLA-DRB1*16:01L HLA-DRB1*04:08L
SYYCKSHKPPIS

SEQ ID NO: 15274 - protein, 11 aa, Severe acute respiratory syndrome coronavirus 2
  REGION 1..11: note = Table B: HLA-DRB1*13:03L HLA-DRB1*08:01L HLA-DRB1*12:01L
EVGKPRPPLNR

SEQ ID NO: 15275 - protein, 13 aa, Severe acute respiratory syndrome coronavirus 2
  REGION 1..13: note = Table B: HLA-DRB1*13:03L HLA-DRB1*04:02L HLA-DRB1*11:04L HLA-DRB1*08:01L HLA-DRB1*11:01L HLA-DPA1*01:03-B1*04:01L HLA-DPA1*01:03-B1*04:02L HLA-DRB3*01:01L HLA-DRB1*14:17L
GDYFVLTSHTVMP

SEQ ID NO: 15276 - protein, 10 aa, Severe acute respiratory syndrome coronavirus 2
  REGION 1..10: note = Table B: HLA-DRB1*13:03L HLA-DQA1*01:02-B1*06:02L HLA-DPA1*02:01-B1*13:01L HLA-DPA1*03:01-B1*105:01L HLA-DRB1*15:03L
YPTLNISDEF

SEQ ID NO: 15277 - protein, 11 aa, Severe acute respiratory syndrome coronavirus 2
  REGION 1..11: note = Table B: HLA-DRB1*13:03L HLA-DRB1*01:03L HLA-DRB4*03:01NL HLA-DRB1*14:01L HLA-DQA1*01:01-B1*05:01L HLA-DQA1*01-B1*05L HLA-DRB1*12:01L HLA-DRB1*14:54L HLA-DRB1*16:01L HLA-DRB1*15:03L
SSNVANYQKVG

SEQ ID NO: 15278 - protein, 11 aa, Severe acute respiratory syndrome coronavirus 2
  REGION 1..11: note = Table B: HLA-DRB1*13:03L HLA-DQA1*01:02-B1*06:02L HLA-DQA1*05:01-B1*02:01L HLA-DPA1*03:01-B1*105:01L HLA-DRB1*15:03L
LPETTADIVVF

SEQ ID NO: 15279 - protein, 14 aa, Severe acute respiratory syndrome coronavirus 2
  REGION 1..14: note = Table B: HLA-DRB1*13:03L HLA-DQA1*03:01-B1*03:02L HLA-DQA1*01:03-B1*06:01L HLA-DQA1*02:01-B1*03:03L
TADIVVFDEISMAT

SEQ ID NO: 15280 - protein, 11 aa, Severe acute respiratory syndrome coronavirus 2
  REGION 1..11: note = Table B: HLA-DRB1*13:03L HLA-DQA1*01:02-B1*06:02L HLA-DRB1*11:02L HLA-DRB4*01:01L HLA-DPA1*01:03-B1*04:01L HLA-DQA1*05:05-B1*03:116L HLA-DRB1*10:01L
VFDEISMATNY

SEQ ID NO: 15281 - protein, 14 aa, Severe acute respiratory syndrome coronavirus 2
  REGION 1..14: note = Table B: HLA-DRB1*13:03L HLA-DRB1*04:05L HLA-DQA1*01:02-B1*06:02L HLA-DRB1*08:01L HLA-DRB1*04:08L HLA-DQA1*02:01-B1*03:03L
APRTLLTKGTLEPE

SEQ ID NO: 15282 - protein, 10 aa, Severe acute respiratory syndrome coronavirus 2
  REGION 1..10: note = Table B: HLA-DRB1*13:03L HLA-DRB1*01:03L HLA-DRB1*11:04L HLA-DRB1*08:01L HLA-DRB3*01:01L HLA-DQA1*03:01-B1*03:02L HLA-DRB1*14:17L HLA-DRB1*16:01L HLA-DRB1*04:08L
VYDNKLKAHK

SEQ ID NO: 15283 - protein, 13 aa, Severe acute respiratory syndrome coronavirus 2
  REGION 1..13: note = Table B: HLA-DRB1*13:03L HLA-DRB4*03:01NL HLA-DRB1*08:01L HLA-DRB1*14:54L HLA-DRB1*08:03L
AVFISPYNSQNAV

SEQ ID NO: 15284 - protein, 10 aa, Severe acute respiratory syndrome coronavirus 2
  REGION 1..10: note = Table B: HLA-DRB1*13:03L HLA-DQA1*01-B1*05L
SPYNSQNAVA

SEQ ID NO: 15285 - protein, 10 aa, Severe acute respiratory syndrome coronavirus 2
  REGION 1..10: note = Table B: HLA-DRB1*13:03L HLA-DQA1*01:02-B1*06:02L HLA-DPA1*01:03-B1*03:01L HLA-DQA1*05:05-B1*03:19L HLA-DQA1*05:01-B1*02:01L HLA-DPA1*03:01-B1*105:01L HLA-DPA1*01:03-B1*104:01L HLA-DRB1*16:01L
DSSQGSEYDY

SEQ ID NO: 15286 - protein, 13 aa, Severe acute respiratory syndrome coronavirus 2
  REGION 1..13: note = Table B: HLA-DRB1*13:03L HLA-DRB1*04:05L HLA-DQA1*01:02-B1*06:02L HLA-DRB1*01:02L HLA-DRB1*08:04L HLA-DRB1*12:01L HLA-DRB1*16:01L HLA-DRB1*04:08L HLA-DRB1*15:03L
VTGLFKDCSKVIT

SEQ ID NO: 15287 - protein, 12 aa, Severe acute respiratory syndrome coronavirus 2
  REGION 1..12: note = Table B: HLA-DRB1*13:03L HLA-DRB1*01:03L HLA-DRB1*04:05L HLA-DQA1*01:02-B1*06:02L HLA-DRB1*01:02L HLA-DRB1*08:04L HLA-DRB1*14:01L HLA-DRB1*11:04L HLA-DRB1*08:01L HLA-DRB1*11:01L HLA-DRB1*16:01L HLA-DRB1*04:08L HLA-DRB1*08:03L
GLFKDCSKVITG

SEQ ID NO: 15288 - protein, 17 aa, Severe acute respiratory syndrome coronavirus 2
  REGION 1..17: note = Table B: HLA-DRB1*13:03L HLA-DPA1*01:03-B1*03:01L HLA-DPA1*03:01-B1*04:02L HLA-DRB1*11:03L HLA-DRB1*14:02L HLA-DPA1*01:03-B1*04:02L HLA-DPA1*01:03-B1*02:01L HLA-DQA1*05:05-B1*03:01L HLA-DQA1*01:03-B1*06:01L
  REGION 1..17: note = CONT. FROM ABOVE: HLA-DRB1*08:02L
IPKDMTYRRLISMMGFK

SEQ ID NO: 15289 - protein, 11 aa, Severe acute respiratory syndrome coronavirus 2
  REGION 1..11: note = Table B: HLA-DRB1*13:03L
GVNLVAVPTGY

SEQ ID NO: 15290 - protein, 15 aa, Severe acute respiratory syndrome coronavirus 2
  REGION 1..15: note = Table B: HLA-DRB1*13:03L HLA-DRB1*03:01L HLA-DRB1*11:04L HLA-DRB1*11:01L HLA-DPA1*01:03-B1*04:02L HLA-DPA1*01:03-B1*02:01L HLA-DQA1*05:05-B1*03:01L
IVQMLSDTLKNLSDR

SEQ ID NO: 15291 - protein, 14 aa, Severe acute respiratory syndrome coronavirus 2
  REGION 1..14: note = Table B: HLA-DRB1*13:03L HLA-DRB1*04:02L HLA-DRB1*11:02L HLA-DRB1*11:03L HLA-DRB1*11:04L HLA-DRB1*11:01L HLA-DRB4*01:01L HLA-DRB3*01:01L HLA-DRB1*07:01L HLA-DRB1*10:01L HLA-DRB1*08:02L HLA-DRB1*08:03L
SDRVVFVLWAHGFE

SEQ ID NO: 15292 - protein, 13 aa, Severe acute respiratory syndrome coronavirus 2
  REGION 1..13: note = Table B: HLA-DRB1*13:03L HLA-DRB1*01:03L HLA-DRB1*04:05L HLA-DRB1*01:02L HLA-DRB1*08:04L
LTSMKYFVKIGPE

SEQ ID NO: 15293 - protein, 10 aa, Severe acute respiratory syndrome coronavirus 2
  REGION 1..10: note = Table B: HLA-DRB1*13:03L HLA-DRB1*08:01L HLA-DQA1*03:01-B1*03:02L HLA-DQA1*02:01-B1*03:03L
KYFVKIGPER

SEQ ID NO: 15294 - protein, 14 aa, Severe acute respiratory syndrome coronavirus 2
  REGION 1..14: note = Table B: HLA-DRB1*13:03L HLA-DRB1*04:04L HLA-DRB1*11:03L HLA-DRB1*14:02L HLA-DRB1*09:01L HLA-DRB3*01:01L HLA-DPA1*01:03-B1*104:01L HLA-DRB1*07:01L HLA-DRB1*08:03L
VKRVDWTIEYPIIG

SEQ ID NO: 15295 - protein, 14 aa, Severe acute respiratory syndrome coronavirus 2
  REGION 1..14: note = Table B: HLA-DRB1*13:03L HLA-DRB1*04:04L HLA-DPA1*01:03-B1*03:01L HLA-DPA1*03:01-B1*04:02L HLA-DRB1*11:02L HLA-DRB1*14:02L HLA-DRB1*13:01L HLA-DPA1*02:01-B1*13:01L HLA-DPA1*03:01-B1*105:01L
  REGION 1..14: note = CONT. FROM ABOVE: HLA-DQA1*03:01-B1*03:02L HLA-DRB1*07:01L
GDELKINAACRKVQ

SEQ ID NO: 15296 - protein, 14 aa, Severe acute respiratory syndrome coronavirus 2
  REGION 1..14: note = Table B: HLA-DRB1*13:03L HLA-DRB1*04:04L HLA-DPA1*01:03-B1*03:01L HLA-DRB1*14:01L HLA-DRB1*11:02L HLA-DRB1*11:03L HLA-DRB1*11:01L HLA-DRB1*09:01L HLA-DPA1*01:03-B1*04:02L HLA-DRB3*01:01L HLA-DRB1*14:17L
  REGION 1..14: note = CONT. FROM ABOVE: HLA-DRB1*08:03L
DVEWKFYDAQPCSD

SEQ ID NO: 15297 - protein, 17 aa, Severe acute respiratory syndrome coronavirus 2
  REGION 1..17: note = Table B: HLA-DRB1*13:03L HLA-DRB1*09:01L
SDKAYKIEELFYSYATH

SEQ ID NO: 15298 - protein, 12 aa, Severe acute respiratory syndrome coronavirus 2
  REGION 1..12: note = Table B: HLA-DRB1*13:03L HLA-DRB1*04:02L HLA-DRB1*04:05L HLA-DQA1*01:02-B1*06:02L HLA-DRB1*14:01L HLA-DRB1*08:01L HLA-DRB1*12:01L HLA-DQA1*03:01-B1*03:02L HLA-DRB1*14:54L HLA-DRB1*04:08L HLA-DQA1*02:01-B1*03:03L
GGSLYVNKHAFH

SEQ ID NO: 15299 - protein, 10 aa, Severe acute respiratory syndrome coronavirus 2
  REGION 1..10: note = Table B: HLA-DRB1*13:03L HLA-DRB1*08:01L HLA-DQA1*03:01-B1*03:02L HLA-DQA1*02:01-B1*03:03L
HAFHTPAFDK

SEQ ID NO: 15300 - protein, 14 aa, Severe acute respiratory syndrome coronavirus 2
  REGION 1..14: note = Table B: HLA-DRB1*13:03L HLA-DRB1*08:04L HLA-DRB1*08:77L HLA-DRB3*02:01L HLA-DRB1*03:01L HLA-DRB1*11:02L HLA-DRB1*11:04L HLA-DRB1*08:01L HLA-DRB1*09:01L HLA-DPA1*01:03-B1*02:01L HLA-DPA1*01:03-B1*104:01L HLA-DRB1*08:03L HLA-DRB1*15:01L
DIDYVPLKSATCIT

SEQ ID NO: 15301 - protein, 14 aa, Severe acute respiratory syndrome coronavirus 2
  REGION 1..14: note = Table B: HLA-DRB1*13:03L HLA-DRB1*03:01L HLA-DRB1*13:01L HLA-DPA1*02:01-B1*13:01L HLA-DRB1*15:01L
IDYVPLKSATCITR

SEQ ID NO: 15302 - protein, 12 aa, Severe acute respiratory syndrome coronavirus 2
  REGION 1..12: note = Table B: HLA-DRB1*13:03L HLA-DRB1*04:04L HLA-DRB1*01:02L HLA-DRB1*08:04L HLA-DRB3*02:01L HLA-DRB1*14:01L HLA-DRB1*08:01L HLA-DPA1*02:01-B1*13:01L HLA-DPA1*03:01-B1*105:01L HLA-DRB1*14:54L HLA-DQA1*05:05-B1*03:01L
  REGION 1..12: note = CONT. FROM ABOVE: HLA-DQA1*01:03-B1*06:01L HLA-DRB1*04:08L HLA-D RB1*08:03L
ANEYRLYLDAYN

SEQ ID NO: 15303 - protein, 13 aa, Severe acute respiratory syndrome coronavirus 2
  REGION 1..13: note = Table B: HLA-DRB1*13:03L HLA-DRB1*11:04L HLA-DRB1*08:03L
YNLWNTFTRLQSL

SEQ ID NO: 15304 - protein, 11 aa, Severe acute respiratory syndrome coronavirus 2
  REGION 1..11: note = Table B: HLA-DRB1*13:03L HLA-DRB1*01:03L HLA-DPA1*03:01-B1*04:02L HLA-DRB1*14:01L HLA-DRB1*14:02L HLA-DQA1*05:05-B1*03:19L HLA-DRB1*12:01L HLA-DPA1*03:01-B1*105:01L HLA-DRB1*16:01L HLA-DRB1*15:03L
VAFNVVNKGHF

SEQ ID NO: 15305 - protein, 10 aa, Severe acute respiratory syndrome coronavirus 2
  REGION 1..10: note = Table B: HLA-DRB1*13:03L HLA-DRB1*04:02L HLA-DQA1*01:02-B1*06:02L HLA-DRB1*08:04L HLA-DRB1*14:01L HLA-DRB1*08:01L HLA-DRB1*14:54L
FNVVNKGHFD

SEQ ID NO: 15306 - protein, 11 aa, Severe acute respiratory syndrome coronavirus 2
  REGION 1..11: note = Table B: HLA-DRB1*13:03L HLA-DRB1*04:05L HLA-DRB1*15:03L
TVYTKVDGVDV

SEQ ID NO: 15307 - protein, 10 aa, Severe acute respiratory syndrome coronavirus 2
  REGION 1..10: note = Table B: HLA-DRB1*13:03L HLA-DQA1*01:02-B1*06:02M HLA-DPA1*02:01-B1*13:01L HLA-DPA1*03:01-B1*105:01M HLA-DQA1*01:03-B1*06:01L HLA-DRB1*15:03L
LPVNVAFELW

SEQ ID NO: 15308 - protein, 10 aa, Severe acute respiratory syndrome coronavirus 2
  REGION 1..10: note = Table B: HLA-DRB1*13:03L HLA-DQA1*01:02-B1*06:02L HLA-DRB1*08:77L HLA-DPA1*01:03-B1*03:01L HLA-DQA1*05:05-B1*03:19L HLA-DQA1*05:01-B1*02:01L HLA-DRB4*01:01L HLA-DPA1*01:03-B1*04:01L
  REGION 1..10: note = CONT. FROM ABOVE: HLA-DPA1*03:01-B1*105:01L HLA-DPA1*01:03-B1*10 4:01L HLA-DRB1*16:01L HLA-DQA1*02:01-B1*03:03L
IAANTVIWDY

SEQ ID NO: 15309 - protein, 10 aa, Severe acute respiratory syndrome coronavirus 2
  REGION 1..10: note = Table B: HLA-DRB1*13:03L HLA-DRB1*08:01L HLA-DQA1*03:01-B1*03:02L
WDYKRDAPAH

SEQ ID NO: 15310 - protein, 12 aa, Severe acute respiratory syndrome coronavirus 2
  REGION 1..12: note = Table B: HLA-DRB1*13:03L HLA-DRB1*01:03L HLA-DRB1*04:04L HLA-DRB1*04:05L HLA-DQA1*01:02-B1*06:02L HLA-DRB1*01:02L HLA-DRB4*03:01NL HLA-DRB1*14:01L HLA-DRB1*08:01L HLA-DRB1*04:10L HLA-DRB1*12:01L HLA-DRB1*14:54L HLA-DRB1*16:01L
  REGION 1..12: note = CONT. FROM ABOVE: HLA-DQA1*01:03-B1*06:01L HLA-DRB1*04:08L HLA-D QA1*02:01-B1*03:03L HLA-DRB1*15:03L
GQVDLFRNARNG

SEQ ID NO: 15311 - protein, 10 aa, Severe acute respiratory syndrome coronavirus 2
  REGION 1..10: note = Table B: HLA-DRB1*13:03L
QPSVGPKQAS

SEQ ID NO: 15312 - protein, 11 aa, Severe acute respiratory syndrome coronavirus 2
  REGION 1..11: note = Table B: HLA-DRB1*13:03L HLA-DRB1*01:03L HLA-DRB1*04:02L HLA-DRB1*04:05L HLA-DQA1*01:02-B1*06:02L HLA-DRB1*08:04L HLA-DRB1*14:01L HLA-DRB1*11:04L HLA-DRB1*11:01L HLA-DQA1*03:01-B1*03:02L HLA-DRB1*16:01L HLA-DRB1*04:08L
  REGION 1..11: note = CONT. FROM ABOVE: HLA-DRB1*08:03L HLA-DQA1*02:01-B1*03:03L
TQFNYYKKVDG

SEQ ID NO: 15313 - protein, 10 aa, Severe acute respiratory syndrome coronavirus 2
  REGION 1..10: note = Table B: HLA-DRB1*13:03L HLA-DRB1*01:03L HLA-DRB1*08:01L HLA-DQA1*01-B1*05L HLA-DQA1*03:01-B1*03:02L HLA-DRB1*16:01L HLA-DRB1*04:08L HLA-DQA1*02:01-B1*03:03L
YYKKVDGVVQ

SEQ ID NO: 15314 - protein, 10 aa, Severe acute respiratory syndrome coronavirus 2
  REGION 1..10: note = Table B: HLA-DRB1*13:03L HLA-DQA1*01:02-B1*06:02L HLA-DPA1*03:01-B1*105:01L
KPRSQMEIDF

SEQ ID NO: 15315 - protein, 11 aa, Severe acute respiratory syndrome coronavirus 2
  REGION 1..11: note = Table B: HLA-DRB1*13:03L HLA-DRB1*08:04L
DEFIERYKLEG

SEQ ID NO: 15316 - protein, 12 aa, Severe acute respiratory syndrome coronavirus 2
  REGION 1..12: note = Table B: HLA-DRB1*13:03L HLA-DRB1*04:05L HLA-DRB1*01:02L HLA-DRB4*03:01NL HLA-DRB1*08:04L HLA-DPA1*01:03-B1*03:01L HLA-DRB1*14:01L HLA-DRB1*08:01L HLA-DRB1*04:10L HLA-DRB1*12:01L HLA-DPA1*02:01-B1*13:01L HLA-DRB1*14:54L
  REGION 1..12: note = CONT. FROM ABOVE: HLA-DPA1*01:03-B1*02:01L HLA-DQA1*05:05-B1*03: 01L
EHIVYGDFSHSQ

SEQ ID NO: 15317 - protein, 11 aa, Severe acute respiratory syndrome coronavirus 2
  REGION 1..11: note = Table B: HLA-DRB1*13:03L HLA-DRB1*08:77L HLA-DRB3*02:01L HLA-DPA1*01:03-B1*03:01L HLA-DRB1*14:01L HLA-DRB1*08:01L HLA-DRB1*09:01L HLA-DRB1*12:01L HLA-DPA1*01:03-B1*104:01L HLA-DRB1*10:01L HLA-DRB1*08:03L
IVYGDFSHSQL

SEQ ID NO: 15318 - protein, 10 aa, Severe acute respiratory syndrome coronavirus 2
  REGION 1..10: note = Table B: HLA-DRB1*13:03L HLA-DQA1*01:02-B1*06:02L HLA-DQA1*05:05-B1*03:19L HLA-DQA1*05:01-B1*02:01L HLA-DPA1*03:01-B1*105:01L
QPGVAMPNLY

SEQ ID NO: 15319 - protein, 12 aa, Severe acute respiratory syndrome coronavirus 2
  REGION 1..12: note = Table B: HLA-DRB1*13:03L HLA-DRB1*08:04L HLA-DRB1*11:03L HLA-DRB1*11:04L HLA-DRB1*11:01L HLA-DRB1*12:02L HLA-DPA1*01:03-B1*02:01L HLA-DRB1*07:01L
GIMMNVAKYTQL

SEQ ID NO: 15320 - protein, 11 aa, Severe acute respiratory syndrome coronavirus 2
  REGION 1..11: note = Table B: HLA-DRB1*13:03L HLA-DRB1*01:03L HLA-DRB1*08:01L HLA-DRB1*16:01L
RVIHFGAGSDK

SEQ ID NO: 15321 - protein, 12 aa, Severe acute respiratory syndrome coronavirus 2
  REGION 1..12: note = Table B: HLA-DRB1*13:03L HLA-DRB1*04:02L HLA-DRB1*04:05L HLA-DRB1*04:10L HLA-DRB1*12:01L HLA-DRB1*16:01L HLA-DRB1*04:08L
GTLLVDSDLNDF

SEQ ID NO: 15322 - protein, 12 aa, Severe acute respiratory syndrome coronavirus 2
  REGION 1..12: note = Table B: HLA-DRB1*13:03L HLA-DRB1*01:03L HLA-DRB1*04:04L HLA-DQA1*01:02-B1*06:02L HLA-DRB1*01:02L HLA-DPA1*03:01-B1*04:02L HLA-DRB1*12:01L HLA-DPA1*02:01-B1*13:01L HLA-DPA1*03:01-B1*105:01L
  REGION 1..12: note = CONT. FROM ABOVE: HLA-DQA1*01:03-B1*06:01L HLA-DRB1*15:03L
DLIISDMYDPKT

SEQ ID NO: 15323 - protein, 11 aa, Severe acute respiratory syndrome coronavirus 2
  REGION 1..11: note = Table B: HLA-DRB1*13:03L HLA-DRB1*01:03L HLA-DRB1*04:04L HLA-DRB1*01:02L HLA-DRB4*03:01NL HLA-DRB1*04:10L HLA-DRB1*12:01L HLA-DRB1*14:54L HLA-DRB1*04:08L HLA-DQA1*02:01-B1*03:03L
IISDMYDPKTK

SEQ ID NO: 15324 - protein, 10 aa, Severe acute respiratory syndrome coronavirus 2
  REGION 1..10: note = Table B: HLA-DRB1*13:03L HLA-DRB1*08:01L HLA-DQA1*03:01-B1*03:02L
YDPKTKNVTK

SEQ ID NO: 15325 - protein, 13 aa, Severe acute respiratory syndrome coronavirus 2
  REGION 1..13: note = Table B: HLA-DRB1*13:03L HLA-DRB1*04:05L HLA-DQA1*01:02-B1*06:02L HLA-DRB1*08:01L HLA-DQA1*02:01-B1*03:03L
DPKTKNVTKENDS

SEQ ID NO: 15326 - protein, 13 aa, Severe acute respiratory syndrome coronavirus 2
  REGION 1..13: note = Table B: HLA-DRB1*13:03L HLA-DRB1*01:03L HLA-DRB1*04:04L HLA-DRB1*01:02L HLA-DRB4*03:01NL HLA-DRB1*08:01L HLA-DQA1*01-B1*05L HLA-DRB1*12:01L HLA-DRB1*14:54L HLA-DRB1*16:01L HLA-DRB1*04:08L
TKNVTKENDSKEG

SEQ ID NO: 15327 - protein, 15 aa, Severe acute respiratory syndrome coronavirus 2
  REGION 1..15: note = Table B: HLA-DRB1*13:03L HLA-DPA1*01:03-B1*104:01L HLA-DPA1*01:02-B1*04:01L
KLALGGSVAIKITEH

SEQ ID NO: 15328 - protein, 12 aa, Severe acute respiratory syndrome coronavirus 2
  REGION 1..12: note = Table B: HLA-DRB1*13:03L HLA-DRB1*01:03L HLA-DRB1*04:05L HLA-DRB1*01:02L HLA-DRB4*03:01NL HLA-DPA1*01:03-B1*03:01L HLA-DRB1*14:01L HLA-DQA1*01:01-B1*05:01L HLA-DRB1*08:01L HLA-DQA1*05:05-B1*03:19L HLA-DQA1*05:01-B1*02:01L
  REGION 1..12: note = CONT. FROM ABOVE: HLA-DRB1*04:10L HLA-DRB1*12:01L HLA-DPA1*03:01 -B1*105:01L HLA-DRB1*14:54L HLA-DRB1*16:01L HLA-DRB1*04:08L
GGSVAIKITEHS

SEQ ID NO: 15329 - protein, 11 aa, Severe acute respiratory syndrome coronavirus 2
  REGION 1..11: note = Table B: HLA-DRB1*13:03L HLA-DRB1*04:02L HLA-DRB4*03:01NL HLA-DRB1*16:01L
AFVTNVNASSS

SEQ ID NO: 15330 - protein, 16 aa, Severe acute respiratory syndrome coronavirus 2
  REGION 1..16: note = Table B: HLA-DRB1*13:03L HLA-DRB1*14:02L HLA-DPA1*02:01-B1*13:01L HLA-DRB1*07:01L HLA-DRB1*08:02L HLA-DRB1*08:03L
SSEAFLIGCNYLGKPR

SEQ ID NO: 15331 - protein, 11 aa, Severe acute respiratory syndrome coronavirus 2
  REGION 1..11: note = Table B: HLA-DRB1*13:03L HLA-DRB1*01:03L HLA-DQA1*01:02-B1*06:02L HLA-DRB1*08:77L HLA-DPA1*03:01-B1*04:02L HLA-DRB1*11:02L HLA-DRB1*14:02L HLA-DRB4*01:01L HLA-DPA1*01:03-B1*04:01L
  REGION 1..11: note = CONT. FROM ABOVE: HLA-DQA1*05:05-B1*03:116L HLA-DPA1*01:03-B1*04 :02L HLA-DRB1*12:01L HLA-DRB1*10:01L HLA-DRB1*15:03L
QIDGYVMHANY

SEQ ID NO: 15332 - protein, 14 aa, Severe acute respiratory syndrome coronavirus 2
  REGION 1..14: note = Table B: HLA-DRB1*13:03L HLA-DRB1*04:02L HLA-DRB1*11:03L HLA-DRB1*11:04L HLA-DRB1*08:01L HLA-DRB1*11:01L HLA-DRB3*01:01L
IDGYVMHANYIFWR

SEQ ID NO: 15333 - protein, 10 aa, Severe acute respiratory syndrome coronavirus 2
  REGION 1..10: note = Table B: HLA-DRB1*13:03L HLA-DRB1*04:05L HLA-DQA1*01:02-B1*06:02L HLA-DPA1*02:01-B1*13:01M HLA-DPA1*03:01-B1*105:01L HLA-DQA1*01:03-B1*06:01L HLA-DRB1*15:03L
LPFFSNVTWF

SEQ ID NO: 15334 - protein, 13 aa, Severe acute respiratory syndrome coronavirus 2
  REGION 1..13: note = Table B: HLA-DRB1*13:03L HLA-DRB1*04:04L HLA-DRB1*01:01L HLA-DRB3*02:01L HLA-DPA1*03:01-B1*04:02L HLA-DRB1*11:03L HLA-DRB3*01:01L HLA-DQA1*03:01-B1*03:02L HLA-DQA1*05:05-B1*03:01L HLA-DRB1*07:01L
SNVTWFHAIHVSG

SEQ ID NO: 15335 - protein, 11 aa, Severe acute respiratory syndrome coronavirus 2
  REGION 1..11: note = Table B: HLA-DRB1*13:03L HLA-DRB1*12:01L HLA-DRB1*16:01L HLA-DQA1*02:01-B1*03:03L
AIHVSGTNGTK

SEQ ID NO: 15336 - protein, 11 aa, Severe acute respiratory syndrome coronavirus 2
  REGION 1..11: note = Table B: HLA-DRB1*13:03L HLA-DRB1*01:03L HLA-DRB1*04:02L HLA-DRB1*04:05L HLA-DQA1*01:02-B1*06:02L HLA-DRB4*03:01NL HLA-DPA1*01:03-B1*03:01L HLA-DRB1*04:10L HLA-DRB1*12:01L HLA-DPA1*03:01-B1*105:01L HLA-DRB1*14:54L HLA-DRB1*14:17L
  REGION 1..11: note = CONT. FROM ABOVE: HLA-DRB1*16:01L
FDNPVLPFNDG

SEQ ID NO: 15337 - protein, 13 aa, Severe acute respiratory syndrome coronavirus 2
  REGION 1..13: note = Table B: HLA-DRB1*13:03L HLA-DRB1*11:04L HLA-DRB3*01:01L
GVYYHKNNKSWME

SEQ ID NO: 15338 - protein, 12 aa, Severe acute respiratory syndrome coronavirus 2
  REGION 1..12: note = Table B: HLA-DRB1*13:03L HLA-DRB1*01:03L HLA-DRB1*04:05L HLA-DQA1*01:02-B1*06:02L HLA-DRB1*01:02L HLA-DRB1*08:04L HLA-DRB1*14:01L HLA-DRB1*08:01L HLA-DRB1*11:01L HLA-DRB1*12:01L HLA-DQA1*03:01-B1*03:02L HLA-DPA1*01:02-B1*04:01L
  REGION 1..12: note = CONT. FROM ABOVE: HLA-DRB1*16:01L HLA-DRB1*04:08L HLA-DQA1*02:01 -B1*03:03L HLA-DRB1*15:03L
DGYFKIYSKHTP

SEQ ID NO: 15339 - protein, 12 aa, Severe acute respiratory syndrome coronavirus 2
  REGION 1..12: note = Table B: HLA-DRB1*13:03L HLA-DRB1*01:03L HLA-DRB1*01:02L HLA-DRB1*14:01L HLA-DRB1*08:01L HLA-DRB1*11:01L HLA-DPA1*01:02-B1*04:01L HLA-DRB1*16:01L HLA-DRB1*04:08L
GYFKIYSKHTPI

SEQ ID NO: 15340 - protein, 11 aa, Severe acute respiratory syndrome coronavirus 2
  REGION 1..11: note = Table B: HLA-DRB1*13:03L HLA-DRB1*01:03L HLA-DRB1*04:04L HLA-DRB1*04:05L HLA-DRB4*03:01NL HLA-DRB1*14:01L HLA-DRB1*11:04L HLA-DQA1*01-B1*05L HLA-DQA1*05:01-B1*02:01L HLA-DRB1*04:10L HLA-DRB1*12:01L HLA-DQA1*03:01-B1*03:02L HLA-DRB1*14:54L
  REGION 1..11: note = CONT. FROM ABOVE: HLA-DRB1*16:01L HLA-DRB1*04:08L HLA-DRB1*08:03 L HLA-DQA1*02:01-B1*03:03L
TPINLVRDLPQ

SEQ ID NO: 15341 - protein, 14 aa, Severe acute respiratory syndrome coronavirus 2
  REGION 1..14: note = Table B: HLA-DRB1*13:03L HLA-DRB1*04:05L HLA-DRB1*11:02L HLA-DRB1*11:03L HLA-DRB1*11:01L HLA-DRB3*01:01L HLA-DRB1*14:54L
QTLLALHRSYLTPG

SEQ ID NO: 15342 - protein, 14 aa, Severe acute respiratory syndrome coronavirus 2
  REGION 1..14: note = Table B: HLA-DRB1*13:03L HLA-DPA1*03:01-B1*04:02L HLA-DQA1*05:05-B1*03:19L HLA-DRB1*07:01L
LALHRSYLTPGDSS

SEQ ID NO: 15343 - protein, 10 aa, Severe acute respiratory syndrome coronavirus 2
  REGION 1..10: note = Table B: HLA-DRB1*13:03L HLA-DQA1*01:02-B1*06:02L HLA-DPA1*03:01-B1*105:01L
LTPGDSSSGW

SEQ ID NO: 15344 - protein, 10 aa, Severe acute respiratory syndrome coronavirus 2
  REGION 1..10: note = Table B: HLA-DRB1*13:03L HLA-DQA1*01:02-B1*06:02L HLA-DQA1*05:05-B1*03:19L HLA-DQA1*05:01-B1*02:01L
SGWTAGAAAY

SEQ ID NO: 15345 - protein, 10 aa, Severe acute respiratory syndrome coronavirus 2
  REGION 1..10: note = Table B: HLA-DRB1*13:03L HLA-DQA1*01:02-B1*06:02L HLA-DRB1*08:77L HLA-DPA1*01:03-B1*03:01L HLA-DRB1*03:01L HLA-DRB1*14:02L HLA-DQA1*05:05-B1*03:19L HLA-DQA1*05:01-B1*02:01L HLA-DRB4*01:01L
  REGION 1..10: note = CONT. FROM ABOVE: HLA-DPA1*01:03-B1*04:01L HLA-DRB1*16:01L HLA-D QA1*02:01-B1*03:03L HLA-DRB1*15:03L
GWTAGAAAYY

SEQ ID NO: 15346 - protein, 10 aa, Severe acute respiratory syndrome coronavirus 2
  REGION 1..10: note = Table B: HLA-DRB1*13:03L HLA-DRB1*04:02L HLA-DQA1*01-B1*05L HLA-DRB1*12:01L HLA-DQA1*03:01-B1*03:02L HLA-DPA1*01:02-B1*04:01L HLA-DRB1*16:01L HLA-DQA1*01:03-B1*06:01L HLA-DQA1*02:01-B1*03:03L
AYYVGYLQPR

SEQ ID NO: 15347 - protein, 13 aa, Severe acute respiratory syndrome coronavirus 2
  REGION 1..13: note = Table B: HLA-DRB1*13:03L HLA-DRB1*01:03L HLA-DRB1*04:05L HLA-DQA1*01:02-B1*06:02L HLA-DRB1*08:04L HLA-DQA1*03:01-B1*03:02L HLA-DRB1*16:01L HLA-DRB1*04:08L HLA-DRB1*08:03L
QPRTFLLKYNENG

SEQ ID NO: 15348 - protein, 14 aa, Severe acute respiratory syndrome coronavirus 2
  REGION 1..14: note = Table B: HLA-DRB1*13:03L HLA-DRB1*04:04L HLA-DRB4*03:01NL HLA-DRB1*08:04L HLA-DPA1*01:03-B1*03:01L HLA-DRB1*14:01L HLA-DRB1*11:04L HLA-DQA1*01:01-B1*05:01L HLA-DRB1*08:01L HLA-DQA1*05:05-B1*03:19L HLA-DRB1*12:01L HLA-DRB3*01:01L
  REGION 1..14: note = CONT. FROM ABOVE: HLA-DPA1*02:01-B1*13:01L HLA-DRB1*08:03L
DAVDCALDPLSETK

SEQ ID NO: 15349 - protein, 13 aa, Severe acute respiratory syndrome coronavirus 2
  REGION 1..13: note = Table B: HLA-DRB1*13:03L HLA-DRB1*08:01L
EKGIYQTSNFRVQ

SEQ ID NO: 15350 - protein, 11 aa, Severe acute respiratory syndrome coronavirus 2
  REGION 1..11: note = Table B: HLA-DRB1*13:03L HLA-DQA1*01:02-B1*06:02L HLA-DRB1*01:02L HLA-DRB1*08:04L HLA-DRB1*14:01L HLA-DRB1*11:04L HLA-DRB1*11:01L HLA-DRB3*01:01L HLA-DRB1*16:01L HLA-DRB1*04:08L
VYAWNRKRISN

SEQ ID NO: 15351 - protein, 11 aa, Severe acute respiratory syndrome coronavirus 2
  REGION 1..11: note = Table B: HLA-DRB1*13:03L HLA-DRB1*08:01L HLA-DQA1*02:01-B1*03:03L
DSFVIRGDEVR

SEQ ID NO: 15352 - protein, 10 aa, Severe acute respiratory syndrome coronavirus 2
  REGION 1..10: note = Table B: HLA-DRB1*13:03L HLA-DQA1*01-B1*05L
APGQTGKIAD

SEQ ID NO: 15353 - protein, 11 aa, Severe acute respiratory syndrome coronavirus 2
  REGION 1..11: note = Table B: HLA-DRB1*13:03L HLA-DRB1*04:02L HLA-DRB4*03:01NL HLA-DQA1*02:01-B1*03:03L
SNNLDSKVGGN

SEQ ID NO: 15354 - protein, 13 aa, Severe acute respiratory syndrome coronavirus 2
  REGION 1..13: note = Table B: HLA-DRB1*13:03L HLA-DRB1*01:03L HLA-DRB1*04:05L HLA-DRB1*01:02L HLA-DRB1*08:04L HLA-DRB1*11:04L HLA-DRB1*11:01L HLA-DRB1*12:01L HLA-DPA1*01:02-B1*04:01L
VGGNYNYLYRLFR

SEQ ID NO: 15355 - protein, 12 aa, Severe acute respiratory syndrome coronavirus 2
  REGION 1..12: note = Table B: HLA-DRB1*13:03L HLA-DRB1*01:03L HLA-DRB1*01:02L HLA-DRB1*14:01L HLA-DRB1*11:04L HLA-DRB1*11:01L HLA-DRB1*12:01L HLA-DRB3*01:01L HLA-DRB1*16:01L HLA-DRB1*04:08L
GNYNYLYRLFRK

SEQ ID NO: 15356 - protein, 12 aa, Severe acute respiratory syndrome coronavirus 2
  REGION 1..12: note = Table B: HLA-DRB1*13:03L HLA-DRB1*04:02L HLA-DRB1*14:01L HLA-DRB1*08:01L HLA-DRB1*16:01L
SNLKPFERDIST

SEQ ID NO: 15357 - protein, 13 aa, Severe acute respiratory syndrome coronavirus 2
  REGION 1..13: note = Table B: HLA-DRB1*13:03L HLA-DRB1*01:03L HLA-DRB1*04:04L HLA-DRB1*04:05L HLA-DRB1*08:04L HLA-DRB1*11:03L HLA-DRB1*11:04L HLA-DRB1*14:02L HLA-DRB1*04:10L HLA-DRB1*09:01L HLA-DRB1*10:01L
STEIYQAGSTPCN

SEQ ID NO: 15358 - protein, 11 aa, Severe acute respiratory syndrome coronavirus 2
  REGION 1..11: note = Table B: HLA-DRB1*13:03L HLA-DRB1*01:03L HLA-DRB1*01:02L HLA-DPA1*03:01-B1*04:02L HLA-DRB1*04:08L
LSFELLHAPAT

SEQ ID NO: 15359 - protein, 15 aa, Severe acute respiratory syndrome coronavirus 2
  REGION 1..15: note = Table B: HLA-DRB1*13:03L HLA-DRB1*08:04L HLA-DRB3*02:01L HLA-DRB1*03:01L HLA-DRB1*11:03L HLA-DPA1*01:03-B1*02:01L HLA-DRB1*08:02L
SFELLHAPATVCGPK

SEQ ID NO: 15360 - protein, 15 aa, Severe acute respiratory syndrome coronavirus 2
  REGION 1..15: note = Table B: HLA-DRB1*13:03L HLA-DPA1*03:01-B1*04:02L HLA-DRB1*11:04L HLA-DRB1*14:02L HLA-DQA1*01-B1*05L HLA-DPA1*01:03-B1*04:01L HLA-DRB3*01:01L HLA-DPA1*01:03-B1*02:01L HLA-DPA1*01:02-B1*04:01L
  REGION 1..15: note = CONT. FROM ABOVE: HLA-DRB1*07:01L
FNGLTGTGVLTESNK

SEQ ID NO: 15361 - protein, 14 aa, Severe acute respiratory syndrome coronavirus 2
  REGION 1..14: note = Table B: HLA-DRB1*13:03L HLA-DRB1*04:04L HLA-DPA1*01:03-B1*03:01L HLA-DRB1*11:04L HLA-DQA1*01:01-B1*05:01L HLA-DRB1*11:01L HLA-DRB3*01:01L HLA-DPA1*01:03-B1*104:01L HLA-DRB1*07:01L
SNKKFLPFQQFGRD

SEQ ID NO: 15362 - protein, 12 aa, Severe acute respiratory syndrome coronavirus 2
  REGION 1..12: note = Table B: HLA-DRB1*13:03L HLA-DRB1*01:03L HLA-DRB1*04:02L HLA-DRB1*04:05L HLA-DQA1*01:02-B1*06:02L HLA-DRB1*08:04L HLA-DRB1*14:01L HLA-DRB1*08:01L HLA-DQA1*03:01-B1*03:02L HLA-DPA1*01:02-B1*04:01L HLA-DRB1*16:01L HLA-DRB1*04:08L
  REGION 1..12: note = CONT. FROM ABOVE: HLA-DQA1*02:01-B1*03:03L
LPFQQFGRDIAD

SEQ ID NO: 15363 - protein, 10 aa, Severe acute respiratory syndrome coronavirus 2
  REGION 1..10: note = Table B: HLA-DRB1*13:03L
TPGTNTSNQV

SEQ ID NO: 15364 - protein, 10 aa, Severe acute respiratory syndrome coronavirus 2
  REGION 1..10: note = Table B: HLA-DRB1*13:03L HLA-DRB1*01:03L HLA-DQA1*01:02-B1*06:02L HLA-DRB1*08:77L HLA-DRB1*14:02L HLA-DQA1*05:05-B1*03:19L HLA-DQA1*05:01-B1*02:01L HLA-DPA1*03:01-B1*105:01L HLA-DQA1*02:01-B1*03:03L
SLGAENSVAY

SEQ ID NO: 15365 - protein, 11 aa, Severe acute respiratory syndrome coronavirus 2
  REGION 1..11: note = Table B: HLA-DRB1*13:03L HLA-DRB1*01:03L HLA-DRB4*03:01NL HLA-DRB1*08:01L HLA-DQA1*01-B1*05L HLA-DRB1*12:01L HLA-DPA1*03:01-B1*105:01L HLA-DRB1*14:17L HLA-DRB1*04:08L
ALTGIAVEQDK

SEQ ID NO: 15366 - protein, 12 aa, Severe acute respiratory syndrome coronavirus 2
  REGION 1..12: note = Table B: HLA-DRB1*13:03L HLA-DRB1*12:01L HLA-DPA1*03:01-B1*105:01L
TGIAVEQDKNTQ

SEQ ID NO: 15367 - protein, 10 aa, Severe acute respiratory syndrome coronavirus 2
  REGION 1..10: note = Table B: HLA-DRB1*13:03L HLA-DQA1*01:02-B1*06:02L HLA-DPA1*03:01-B1*105:01L
TPPIKDFGGF

SEQ ID NO: 15368 - protein, 12 aa, Severe acute respiratory syndrome coronavirus 2
  REGION 1..12: note = Table B: HLA-DRB1*13:03L HLA-DRB1*04:02L HLA-DRB1*04:05L HLA-DRB1*01:02L HLA-DPA1*01:03-B1*03:01L HLA-DRB1*08:01L HLA-DRB1*12:01L HLA-DPA1*02:01-B1*13:01L HLA-DPA1*01:03-B1*02:01L HLA-DRB1*15:03L
GFNFSQILPDPS

SEQ ID NO: 15369 - protein, 10 aa, Severe acute respiratory syndrome coronavirus 2
  REGION 1..10: note = Table B: HLA-DRB1*13:03L HLA-DRB1*01:03L HLA-DRB1*08:01L HLA-DQA1*03:01-B1*03:02L HLA-DRB1*14:17L
LPDPSKPSKR

SEQ ID NO: 15370 - protein, 10 aa, Severe acute respiratory syndrome coronavirus 2
  REGION 1..10: note = Table B: HLA-DRB1*13:03L HLA-DQA1*01:02-B1*06:02L HLA-DPA1*03:01-B1*105:01L
DPSKPSKRSF

SEQ ID NO: 15371 - protein, 10 aa, Severe acute respiratory syndrome coronavirus 2
  REGION 1..10: note = Table B: HLA-DRB1*13:03L HLA-DRB1*01:03L HLA-DQA1*01:02-B1*06:02L HLA-DRB1*08:77L HLA-DPA1*01:03-B1*03:01L HLA-DRB1*03:01L HLA-DRB1*11:02L HLA-DRB1*14:02L HLA-DQA1*01-B1*05L HLA-DQA1*05:05-B1*03:19M
  REGION 1..10: note = CONT. FROM ABOVE: HLA-DQA1*05:01-B1*02:01M HLA-DRB4*01:01L HLA-D PA1*01:03-B1*04:01L HLA-DQA1*05:05-B1*03:116L HLA-DPA1*01:03-B1* 04:02L HLA-DPA1*01:03-B1*104:01L HLA-DRB1*10:01L HLA-DRB1*16:01L
LLTDEMIAQY

SEQ ID NO: 15372 - protein, 15 aa, Severe acute respiratory syndrome coronavirus 2
  REGION 1..15: note = Table B: HLA-DRB1*13:03L HLA-DRB1*04:02L HLA-DPA1*01:03-B1*03:01L HLA-DRB1*03:01L HLA-DRB1*11:02L HLA-DRB1*11:03L HLA-DRB1*11:04L HLA-DRB1*14:02L HLA-DRB1*08:01L HLA-DRB1*11:01L HLA-DPA1*01:03-B1*04:01L
  REGION 1..15: note = CONT. FROM ABOVE: HLA-DQA1*05:05-B1*03:116L HLA-DPA1*01:03-B1*04 :02L HLA-DRB3*01:01L HLA-DPA1*01:03-B1*02:01L HLA-DPA1*01:03-B1* 104:01L HLA-DQA1*05:05-B1*03:01L HLA-DRB1*08:02L HLA-DRB1*08:03L
IPFAMQMAYRFNGIG

SEQ ID NO: 15373 - protein, 11 aa, Severe acute respiratory syndrome coronavirus 2
  REGION 1..11: note = Table B: HLA-DRB1*13:03L HLA-DRB1*01:03L HLA-DRB1*04:02L HLA-DRB1*04:05L HLA-DQA1*01:02-B1*06:02L HLA-DRB1*01:02L HLA-DRB4*03:01NL HLA-DRB1*14:01L HLA-DQA1*01-B1*05L HLA-DQA1*05:01-B1*02:01L HLA-DRB1*12:01L HLA-DRB1*14:54L
  REGION 1..11: note = CONT. FROM ABOVE: HLA-DQA1*05:05-B1*03:01L HLA-DRB1*14:17L HLA-D RB1*04:08L
NQFNSAIGKIQ

SEQ ID NO: 15374 - protein, 12 aa, Severe acute respiratory syndrome coronavirus 2
  REGION 1..12: note = Table B: HLA-DRB1*13:03L HLA-DRB1*01:02L HLA-DRB1*14:01L HLA-DRB1*11:04L HLA-DQA1*05:01-B1*02:01L HLA-DRB1*12:01L
IGKIQDSLSSTA

SEQ ID NO: 15375 - protein, 12 aa, Severe acute respiratory syndrome coronavirus 2
  REGION 1..12: note = Table B: HLA-DRB1*13:03L HLA-DRB1*04:05L HLA-DRB1*01:02L HLA-DPA1*01:03-B1*03:01L HLA-DPA1*01:03-B1*04:02L HLA-DRB1*14:54L HLA-DRB1*04:08L
SSTASALGKLQD

SEQ ID NO: 15376 - protein, 12 aa, Severe acute respiratory syndrome coronavirus 2
  REGION 1..12: note = Table B: HLA-DRB1*13:03L HLA-DRB1*01:03L HLA-DRB1*01:02L HLA-DRB4*03:01NL HLA-DPA1*01:03-B1*03:01L HLA-DRB1*08:01L HLA-DQA1*01-B1*05L HLA-DRB1*12:01L HLA-DRB1*14:54L HLA-DRB1*04:08L HLA-DRB1*15:03L
ASALGKLQDVVN

SEQ ID NO: 15377 - protein, 13 aa, Severe acute respiratory syndrome coronavirus 2
  REGION 1..13: note = Table B: HLA-DRB1*13:03L HLA-DRB1*04:05L HLA-DRB1*11:04L HLA-DRB1*08:01L HLA-DRB1*11:01L
AQALNTLVKQLSS

SEQ ID NO: 15378 - protein, 12 aa, Severe acute respiratory syndrome coronavirus 2
  REGION 1..12: note = Table B: HLA-DRB1*13:03L HLA-DRB1*01:02L HLA-DRB1*08:04L HLA-DRB1*11:04L HLA-DRB1*08:01L HLA-DRB1*11:01L HLA-DQA1*05:05-B1*03:19L HLA-DPA1*03:01-B1*105:01L HLA-DRB1*14:54L HLA-DQA1*05:05-B1*03:01L
ALNTLVKQLSSN

SEQ ID NO: 15379 - protein, 13 aa, Severe acute respiratory syndrome coronavirus 2
  REGION 1..13: note = Table B: HLA-DRB1*13:03L HLA-DRB1*01:03L HLA-DRB1*04:04L HLA-DQA1*01-B1*05L HLA-DRB1*15:03L
SSNFGAISSVLND

SEQ ID NO: 15380 - protein, 12 aa, Severe acute respiratory syndrome coronavirus 2
  REGION 1..12: note = Table B: HLA-DRB1*13:03L HLA-DRB1*01:03L HLA-DRB1*04:05L HLA-DQA1*01:02-B1*06:02L HLA-DRB1*01:02L HLA-DRB1*08:04L HLA-DRB1*14:01L HLA-DRB1*11:04L HLA-DRB1*08:01L HLA-DRB1*12:01L HLA-DRB1*14:54L HLA-DRB1*14:17L HLA-DRB1*16:01L HLA-DRB1*04:08L
  REGION 1..12: note = CONT. FROM ABOVE: HLA-DRB1*08:03L HLA-DQA1*02:01-B1*03:03L
DILSRLDKVEAE

SEQ ID NO: 15381 - protein, 11 aa, Severe acute respiratory syndrome coronavirus 2
  REGION 1..11: note = Table B: HLA-DRB1*13:03L HLA-DQA1*01-B1*05L
VPAQEKNFTTA

SEQ ID NO: 15382 - protein, 13 aa, Severe acute respiratory syndrome coronavirus 2
  REGION 1..13: note = Table B: HLA-DRB1*13:03L HLA-DRB1*01:03L HLA-DRB1*04:05L HLA-DRB1*01:02L HLA-DRB1*08:04L HLA-DRB1*14:01L HLA-DRB1*04:08L HLA-DRB1*15:03L
THWFVTQRNFYEP

SEQ ID NO: 15383 - protein, 11 aa, Severe acute respiratory syndrome coronavirus 2
  REGION 1..11: note = Table B: HLA-DRB1*13:03L HLA-DQA1*01:02-B1*06:02L HLA-DQA1*05:01-B1*02:01L HLA-DQA1*02:01-B1*03:03L
EPQIITTDNTF

SEQ ID NO: 15384 - protein, 11 aa, Severe acute respiratory syndrome coronavirus 2
  REGION 1..11: note = Table B: HLA-DRB1*13:03L HLA-DRB1*01:03L HLA-DRB1*04:02L HLA-DRB4*03:01NL HLA-DRB1*04:10L HLA-DRB1*12:01L HLA-DRB1*14:54L HLA-DRB1*14:17L HLA-DRB1*04:08L
VYDPLQPELDS

SEQ ID NO: 15385 - protein, 11 aa, Severe acute respiratory syndrome coronavirus 2
  REGION 1..11: note = Table B: HLA-DRB1*13:03L HLA-DRB1*04:05L HLA-DRB4*03:01NL HLA-DRB1*14:01L HLA-DQA1*01:01-B1*05:01L HLA-DRB1*08:01L HLA-DQA1*01-B1*05L HLA-DRB1*04:10L HLA-DRB1*12:01L HLA-DRB1*14:54L HLA-DRB1*16:01L
ASVVNIQKEID

SEQ ID NO: 15386 - protein, 10 aa, Severe acute respiratory syndrome coronavirus 2
  REGION 1..10: note = Table B: HLA-DRB1*13:03L HLA-DQA1*03:01-B1*03:02L
EIDRLNEVAK

SEQ ID NO: 15387 - protein, 12 aa, Severe acute respiratory syndrome coronavirus 2
  REGION 1..12: note = Table B: HLA-DRB1*13:03L HLA-DRB1*01:03L HLA-DRB1*04:02L HLA-DRB1*04:05L HLA-DQA1*01:02-B1*06:02L HLA-DRB1*08:04L HLA-DRB1*14:01L HLA-DRB1*08:01L HLA-DRB1*12:01L HLA-DRB1*14:54L HLA-DRB1*04:08L HLA-DQA1*02:01-B1*03:03L
DRLNEVAKNLNE

SEQ ID NO: 15388 - protein, 12 aa, Severe acute respiratory syndrome coronavirus 2
  REGION 1..12: note = Table B: HLA-DRB1*13:03L HLA-DQA1*01:02-B1*06:02L HLA-DRB1*14:01L HLA-DRB1*08:01L
RLNEVAKNLNES

SEQ ID NO: 15389 - protein, 11 aa, Severe acute respiratory syndrome coronavirus 2
  REGION 1..11: note = Table B: HLA-DRB1*13:03L HLA-DPA1*03:01-B1*105:01L
DLQELGKYEQY

SEQ ID NO: 15390 - protein, 10 aa, Severe acute respiratory syndrome coronavirus 2
  REGION 1..10: note = Table B: HLA-DRB1*13:03L
TPSDFVRATA

SEQ ID NO: 15391 - protein, 11 aa, Severe acute respiratory syndrome coronavirus 2
  REGION 1..11: note = Table B: HLA-DRB1*13:03L HLA-DRB1*01:03L HLA-DRB1*04:02L HLA-DQA1*01:02-B1*06:02L HLA-DRB1*01:02L HLA-DRB1*08:04L HLA-DRB1*11:04L HLA-DRB1*11:01L HLA-DRB1*16:01L HLA-DRB1*04:08L
SKIITLKKRWQ

SEQ ID NO: 15392 - protein, 10 aa, Severe acute respiratory syndrome coronavirus 2
  REGION 1..10: note = Table B: HLA-DRB1*13:03L HLA-DRB1*08:01L HLA-DRB1*12:01L HLA-DQA1*03:01-B1*03:02L HLA-DPA1*01:02-B1*04:01L HLA-DQA1*01:03-B1*06:01L HLA-DQA1*02:01-B1*03:03L
SINFVRIIMR

SEQ ID NO: 15393 - protein, 15 aa, Severe acute respiratory syndrome coronavirus 2
  REGION 1..15: note = Table B: HLA-DRB1*13:03L HLA-DRB1*04:04L HLA-DRB1*04:05L HLA-DRB1*08:77L HLA-DPA1*01:03-B1*03:01L HLA-DRB1*11:03L HLA-DRB1*11:04L HLA-DRB1*04:10L HLA-DRB1*12:02L HLA-DRB1*04:08L
SSIVITSGDGTTSPI

SEQ ID NO: 15394 - protein, 13 aa, Severe acute respiratory syndrome coronavirus 2
  REGION 1..13: note = Table B: HLA-DRB1*13:03L HLA-DRB1*04:02L HLA-DRB4*03:01NL HLA-DPA1*01:03-B1*04:02L HLA-DRB1*12:01L
TSGDGTTSPISEH

SEQ ID NO: 15395 - protein, 12 aa, Severe acute respiratory syndrome coronavirus 2
  REGION 1..12: note = Table B: HLA-DRB1*13:03L HLA-DPA1*01:03-B1*03:01L HLA-DRB1*08:01L HLA-DQA1*05:05-B1*03:116L HLA-DPA1*01:03-B1*04:02L HLA-DPA1*03:01-B1*105:01L
GDGTTSPISEHD

SEQ ID NO: 15396 - protein, 13 aa, Severe acute respiratory syndrome coronavirus 2
  REGION 1..13: note = Table B: HLA-DRB1*13:03L HLA-DRB1*04:02L HLA-DRB1*04:05L HLA-DRB4*03:01NL HLA-DRB1*08:77L HLA-DRB1*11:03L HLA-DRB1*14:02L HLA-DRB1*14:54L HLA-DQA1*05:05-B1*03:01L HLA-DRB1*10:01L
SDYYQLYSTQLST

SEQ ID NO: 15397 - protein, 13 aa, Severe acute respiratory syndrome coronavirus 2
  REGION 1..13: note = Table B: HLA-DRB1*13:03L HLA-DRB1*04:05L
HVTFFIYNKIVDE

SEQ ID NO: 15398 - protein, 11 aa, Severe acute respiratory syndrome coronavirus 2
  REGION 1..11: note = Table B: HLA-DRB1*13:03L HLA-DRB1*01:03L HLA-DRB4*03:01NL HLA-DRB1*12:01L HLA-DPA1*02:01-B1*13:01L HLA-DRB1*14:54L
YNKIVDEPEEH

SEQ ID NO: 15399 - protein, 11 aa, Severe acute respiratory syndrome coronavirus 2
  REGION 1..11: note = Table B: HLA-DRB1*13:03L HLA-DRB1*01:03L HLA-DQA1*01:02-B1*06:02L HLA-DRB1*08:01L HLA-DQA1*03:01-B1*03:02L HLA-DPA1*01:02-B1*04:01L HLA-DRB1*16:01L HLA-DRB1*04:08L HLA-DQA1*02:01-B1*03:03L
PSFYVYSRVKN

SEQ ID NO: 15400 - protein, 12 aa, Severe acute respiratory syndrome coronavirus 2
  REGION 1..12: note = Table B: HLA-DRB1*13:03L HLA-DRB1*01:03L HLA-DRB1*04:02L HLA-DRB1*04:05L HLA-DQA1*01:02-B1*06:02L HLA-DRB1*01:02L HLA-DRB1*14:01L HLA-DRB1*11:04L HLA-DRB1*11:01L HLA-DRB1*16:01L HLA-DRB1*04:08L HLA-DRB1*08:03L
ITVEELKKLLEQ

SEQ ID NO: 15401 - protein, 12 aa, Severe acute respiratory syndrome coronavirus 2
  REGION 1..12: note = Table B: HLA-DRB1*13:03L HLA-DRB1*08:04L HLA-DRB1*14:01L HLA-DRB1*04:08L
SYFIASFRLFAR

SEQ ID NO: 15402 - protein, 12 aa, Severe acute respiratory syndrome coronavirus 2
  REGION 1..12: note = Table B: HLA-DRB1*13:03L HLA-DRB1*04:05L HLA-DQA1*01:02-B1*06:02L HLA-DRB1*01:02L HLA-DRB1*14:01L HLA-DRB1*11:04L HLA-DRB1*11:01L HLA-DRB1*12:01L HLA-DRB3*01:01L HLA-DRB1*16:01L HLA-DRB1*04:08L HLA-DRB1*15:03L
IASFRLFARTRS

SEQ ID NO: 15403 - protein, 12 aa, Severe acute respiratory syndrome coronavirus 2
  REGION 1..12: note = Table B: HLA-DRB1*13:03L HLA-DRB1*01:03L HLA-DRB1*04:05L HLA-DQA1*01:02-B1*06:02L HLA-DRB1*01:02L HLA-DRB1*08:04L HLA-DRB1*14:01L HLA-DRB1*11:04L HLA-DRB1*11:01L HLA-DRB3*01:01L HLA-DRB1*16:01L HLA-DRB1*04:08L
ASFRLFARTRSM

SEQ ID NO: 15404 - protein, 10 aa, Severe acute respiratory syndrome coronavirus 2
  REGION 1..10: note = Table B: HLA-DRB1*13:03L HLA-DQA1*03:01-B1*03:02L
VPLHGTILTR

SEQ ID NO: 15405 - protein, 16 aa, Severe acute respiratory syndrome coronavirus 2
  REGION 1..16: note = Table B: HLA-DRB1*13:03L HLA-DRB1*04:02L HLA-DRB1*11:02L
IGAVILRGHLRIAGHH

SEQ ID NO: 15406 - protein, 11 aa, Severe acute respiratory syndrome coronavirus 2
  REGION 1..11: note = Table B: HLA-DRB1*13:03L HLA-DRB1*01:03L HLA-DRB1*04:02L HLA-DRB1*04:05L HLA-DRB1*14:01L HLA-DRB1*11:04L HLA-DRB1*08:01L HLA-DRB1*11:01L HLA-DRB1*16:01L HLA-DRB1*04:08L
GHLRIAGHHLG

SEQ ID NO: 15407 - protein, 10 aa, Severe acute respiratory syndrome coronavirus 2
  REGION 1..10: note = Table B: HLA-DRB1*13:03L HLA-DRB1*01:03L HLA-DRB1*11:04L HLA-DRB1*08:01L HLA-DRB1*11:01L HLA-DRB1*12:01L HLA-DQA1*03:01-B1*03:02L HLA-DRB1*16:01L
LRIAGHHLGR

SEQ ID NO: 15408 - protein, 11 aa, Severe acute respiratory syndrome coronavirus 2
  REGION 1..11: note = Table B: HLA-DRB1*13:03L
LPKEITVATSR

SEQ ID NO: 15409 - protein, 10 aa, Severe acute respiratory syndrome coronavirus 2
  REGION 1..10: note = Table B: HLA-DRB1*13:03L HLA-DRB1*01:03L HLA-DQA1*01:02-B1*06:02L HLA-DRB1*14:02L HLA-DQA1*02:01-B1*03:03L
SQRVAGDSGF

SEQ ID NO: 15410 - protein, 10 aa, Severe acute respiratory syndrome coronavirus 2
  REGION 1..10: note = Table B: HLA-DRB1*13:03L HLA-DQA1*01:02-B1*06:02L HLA-DQA1*05:05-B1*03:19L HLA-DQA1*05:01-B1*02:01L HLA-DPA1*03:01-B1*105:01L HLA-DRB1*16:01L HLA-DQA1*02:01-B1*03:03L HLA-DRB1*15:03L
VAGDSGFAAY

SEQ ID NO: 15411 - protein, 11 aa, Severe acute respiratory syndrome coronavirus 2
  REGION 1..11: note = Table B: HLA-DRB1*13:03L HLA-DQA1*05:05-B1*03:01L HLA-DQA1*01:03-B1*06:01L
AGDSGFAAYSR

SEQ ID NO: 15412 - protein, 15 aa, Severe acute respiratory syndrome coronavirus 2
  REGION 1..15: note = Table B: HLA-DRB1*13:03L HLA-DPA1*03:01-B1*04:02L HLA-DRB1*14:01L HLA-DPA1*01:03-B1*04:02L HLA-DPA1*01:03-B1*02:01L
YSRYRIGNYKLNTDH

SEQ ID NO: 15413 - protein, 11 aa, Severe acute respiratory syndrome coronavirus 2
  REGION 1..11: note = Table B: HLA-DRB1*13:03L HLA-DRB1*01:03L HLA-DRB1*04:04L HLA-DRB1*04:05L HLA-DQA1*01:02-B1*06:02L HLA-DRB1*01:02L HLA-DRB4*03:01NL HLA-DRB1*08:04L HLA-DRB1*14:01L HLA-DRB1*11:04L HLA-DRB1*08:01L HLA-DRB1*11:01L HLA-DRB1*12:01L
  REGION 1..11: note = CONT. FROM ABOVE: HLA-DQA1*03:01-B1*03:02L HLA-DRB1*14:54L HLA-D PA1*01:02-B1*04:01L HLA-DRB1*16:01L HLA-DRB1*04:08L HLA-DQA1*02: 01-B1*03:03L
IINLIIKNLSK

SEQ ID NO: 15414 - protein, 13 aa, Severe acute respiratory syndrome coronavirus 2
  REGION 1..13: note = Table B: HLA-DRB1*13:03L HLA-DRB1*01:03L HLA-DRB1*04:02L HLA-DQA1*01:02-B1*06:02L HLA-DRB1*01:02L HLA-DQA1*01:01-B1*05:01L HLA-DRB1*08:01L HLA-DRB1*04:10L HLA-DRB1*12:01L HLA-DPA1*02:01-B1*13:01L
  REGION 1..13: note = CONT. FROM ABOVE: HLA-DQA1*05:05-B1*03:01L HLA-DQA1*01:03-B1*06: 01L HLA-DRB1*04:08L HLA-DRB1*15:03L
NKYSQLDEEQPME

SEQ ID NO: 15415 - protein, 10 aa, Severe acute respiratory syndrome coronavirus 2
  REGION 1..10: note = Table B: HLA-DRB1*13:03L HLA-DRB1*01:03L HLA-DRB1*01:02L HLA-DRB1*08:01L HLA-DRB1*11:01L HLA-DRB1*12:01L HLA-DQA1*03:01-B1*03:02L HLA-DRB1*14:17L HLA-DPA1*01:02-B1*04:01L HLA-DRB1*16:01L HLA-DRB1*04:08L
  REGION 1..10: note = CONT. FROM ABOVE: HLA-DQA1*02:01-B1*03:03L
QLRARSVSPK

SEQ ID NO: 15416 - protein, 10 aa, Severe acute respiratory syndrome coronavirus 2
  REGION 1..10: note = Table B: HLA-DRB1*13:03L HLA-DRB1*01:03L HLA-DQA1*03:01-B1*03:02L HLA-DRB1*14:17L HLA-DQA1*02:01-B1*03:03L
GPQNQRNAPR

SEQ ID NO: 15417 - protein, 10 aa, Severe acute respiratory syndrome coronavirus 2
  REGION 1..10: note = Table B: HLA-DRB1*13:03L HLA-DRB1*08:01L HLA-DRB1*12:01L HLA-DQA1*03:01-B1*03:02L HLA-DQA1*05:05-B1*03:01L
STGSNQNGER

SEQ ID NO: 15418 - protein, 10 aa, Severe acute respiratory syndrome coronavirus 2
  REGION 1..10: note = Table B: HLA-DRB1*13:03L HLA-DQA1*03:01-B1*03:02L
SPDDQIGYYR

SEQ ID NO: 15419 - protein, 10 aa, Severe acute respiratory syndrome coronavirus 2
  REGION 1..10: note = Table B: HLA-DRB1*13:03L HLA-DRB1*04:02L HLA-DRB4*03:01NL HLA-DRB1*12:01L HLA-DQA1*03:01-B1*03:02L HLA-DRB1*14:17L
ATEGALNTPK

SEQ ID NO: 15420 - protein, 10 aa, Severe acute respiratory syndrome coronavirus 2
  REGION 1..10: note = Table B: HLA-DRB1*13:03L
NPANNAAIVL

SEQ ID NO: 15421 - protein, 10 aa, Severe acute respiratory syndrome coronavirus 2
  REGION 1..10: note = Table B: HLA-DRB1*13:03L HLA-DRB1*01:03L HLA-DQA1*03:01-B1*03:02L
SRNSTPGSSR

SEQ ID NO: 15422 - protein, 10 aa, Severe acute respiratory syndrome coronavirus 2
  REGION 1..10: note = Table B: HLA-DRB1*13:03L
TPGSSRGTSP

SEQ ID NO: 15423 - protein, 11 aa, Severe acute respiratory syndrome coronavirus 2
  REGION 1..11: note = Table B: HLA-DRB1*13:03L HLA-DRB1*04:02L HLA-DRB1*08:04L HLA-DRB1*08:01L HLA-DQA1*05:01-B1*02:01L HLA-DPA1*01:03-B1*04:01L HLA-DRB1*12:01L HLA-DPA1*02:01-B1*13:01L HLA-DRB1*16:01L
  REGION 1..11: note = CONT. FROM ABOVE: HLA-DQA1*01:03-B1*06:01L
ALLLLDRLNQL

SEQ ID NO: 15424 - protein, 12 aa, Severe acute respiratory syndrome coronavirus 2
  REGION 1..12: note = Table B: HLA-DRB1*13:03L HLA-DRB1*01:02L HLA-DRB1*11:04L HLA-DRB1*08:01L HLA-DRB1*11:01L HLA-DRB1*14:54L
LLLLDRLNQLES

SEQ ID NO: 15425 - protein, 12 aa, Severe acute respiratory syndrome coronavirus 2
  REGION 1..12: note = Table B: HLA-DRB1*13:03L HLA-DRB1*04:02L HLA-DQA1*02:01-B1*03:03L
GQTVTKKSAAEA

SEQ ID NO: 15426 - protein, 10 aa, Severe acute respiratory syndrome coronavirus 2
  REGION 1..10: note = Table B: HLA-DRB1*13:03L HLA-DRB1*08:01L HLA-DRB1*12:01L HLA-DQA1*03:01-B1*03:02L HLA-DQA1*05:05-B1*03:01L HLA-DQA1*02:01-B1*03:03L
ELIRQGTDYK

SEQ ID NO: 15427 - protein, 10 aa, Severe acute respiratory syndrome coronavirus 2
  REGION 1..10: note = Table B: HLA-DRB1*13:03L HLA-DRB1*08:01L HLA-DRB1*12:01L HLA-DQA1*03:01-B1*03:02L HLA-DQA1*05:05-B1*03:01L HLA-DQA1*01:03-B1*06:01L HLA-DQA1*02:01-B1*03:03L
SASAFFGMSR

SEQ ID NO: 15428 - protein, 10 aa, Severe acute respiratory syndrome coronavirus 2
  REGION 1..10: note = Table B: HLA-DRB1*13:03L HLA-DRB1*01:03L HLA-DRB1*04:02L HLA-DRB1*08:01L HLA-DQA1*03:01-B1*03:02L HLA-DQA1*01:03-B1*06:01L HLA-DQA1*02:01-B1*03:03L
YTGAIKLDDK

SEQ ID NO: 15429 - protein, 10 aa, Severe acute respiratory syndrome coronavirus 2
  REGION 1..10: note = Table B: HLA-DRB1*13:03L HLA-DRB4*03:01NL HLA-DRB1*12:01L HLA-DQA1*03:01-B1*03:02L HLA-DQA1*05:05-B1*03:01L HLA-DQA1*02:01-B1*03:03L
ADETQALPQR

SEQ ID NO: 15430 - protein, 10 aa, Severe acute respiratory syndrome coronavirus 2
  REGION 1..10: note = Table B: HLA-DRB1*13:03L HLA-DRB1*08:01L HLA-DRB1*12:01L HLA-DQA1*03:01-B1*03:02L HLA-DQA1*05:05-B1*03:01L HLA-DQA1*02:01-B1*03:03L
TQALPQRQKK

SEQ ID NO: 15431 - protein, 11 aa, Severe acute respiratory syndrome coronavirus 2
  REGION 1..11: note = Table B: HLA-DRB1*13:03L HLA-DRB1*01:03L HLA-DRB1*04:02L HLA-DRB1*01:02L HLA-DRB4*03:01NL HLA-DPA1*01:03-B1*03:01L HLA-DQA1*01:01-B1*05:01L HLA-DRB1*08:01L HLA-DQA1*05:05-B1*03:19L HLA-DRB1*04:10L HLA-DRB1*12:01L
  REGION 1..11: note = CONT. FROM ABOVE: HLA-DPA1*02:01-B1*13:01L HLA-DPA1*03:01-B1*105 :01L HLA-DRB1*14:54L HLA-DQA1*05:05-B1*03:01L HLA-DRB1*14:17L HL A-DPA1*01:02-B1*04:01L HLA-DRB1*16:01L HLA-DRB1*04:08L HLA-DRB1* 15:03L
RNYIAQVDVVN

SEQ ID NO: 15432 - protein, 15 aa, Severe acute respiratory syndrome coronavirus 2
  REGION 1..15: note = Table B: HLA-DRB1*01:03L HLA-DRB1*04:05L HLA-DRB1*16:01L
EKTHVQLSLPVLQVR

SEQ ID NO: 15433 - protein, 13 aa, Severe acute respiratory syndrome coronavirus 2
  REGION 1..13: note = Table B: HLA-DRB1*01:03L HLA-DRB1*01:02L HLA-DRB1*14:01L HLA-DRB1*14:54L HLA-DRB1*04:08L HLA-DRB1*15:03L
DSVEEVLSEARQH

SEQ ID NO: 15434 - protein, 11 aa, Severe acute respiratory syndrome coronavirus 2
  REGION 1..11: note = Table B: HLA-DRB1*01:03L
VLSEARQHLKD

SEQ ID NO: 15435 - protein, 14 aa, Severe acute respiratory syndrome coronavirus 2
  REGION 1..14: note = Table B: HLA-DRB1*01:03L HLA-DRB1*04:08L
VLPQLEQPYVFIKR

SEQ ID NO: 15436 - protein, 15 aa, Severe acute respiratory syndrome coronavirus 2
  REGION 1..15: note = Table B: HLA-DRB1*01:03L HLA-DRB1*04:05L HLA-DRB1*12:01L HLA-DRB1*16:01L HLA-DRB1*04:08L
LPQLEQPYVFIKRSD

SEQ ID NO: 15437 - protein, 12 aa, Severe acute respiratory syndrome coronavirus 2
  REGION 1..12: note = Table B: HLA-DRB1*01:03L HLA-DRB1*04:02L HLA-DRB1*04:05L HLA-DQA1*01:02-B1*06:02L HLA-DRB1*08:04L HLA-DRB1*14:01L HLA-DRB1*11:04L HLA-DRB1*11:01L HLA-DRB1*14:54L HLA-DPA1*01:02-B1*04:01L HLA-DRB1*16:01L HLA-DRB1*04:08L
  REGION 1..12: note = CONT. FROM ABOVE: HLA-DRB1*08:03L HLA-DQA1*02:01-B1*03:03L
EQPYVFIKRSDA

SEQ ID NO: 15438 - protein, 11 aa, Severe acute respiratory syndrome coronavirus 2
  REGION 1..11: note = Table B: HLA-DRB1*01:03L HLA-DRB1*14:01L HLA-DRB1*11:04L HLA-DRB1*11:01L HLA-DRB1*16:01L HLA-DRB1*04:08L
PYVFIKRSDAR

SEQ ID NO: 15439 - protein, 11 aa, Severe acute respiratory syndrome coronavirus 2
  REGION 1..11: note = Table B: HLA-DRB1*01:03L HLA-DQA1*03:01-B1*03:02L HLA-DRB1*16:01L HLA-DQA1*02:01-B1*03:03L
IKRSDARTAPH

SEQ ID NO: 15440 - protein, 13 aa, Severe acute respiratory syndrome coronavirus 2
  REGION 1..13: note = Table B: HLA-DRB1*01:03L HLA-DRB1*04:02L HLA-DRB1*04:04L HLA-DRB1*04:05L HLA-DRB1*08:04L HLA-DPA1*01:03-B1*03:01L HLA-DRB1*11:03L HLA-DRB1*11:04L HLA-DRB1*14:02L HLA-DQA1*01:01-B1*05:01L HLA-DRB1*11:01L HLA-DQA1*01-B1*05L
  REGION 1..13: note = CONT. FROM ABOVE: HLA-DQA1*05:05-B1*03:19L HLA-DPA1*01:03-B1*04: 01L HLA-DRB1*04:10L HLA-DRB1*12:02L HLA-DPA1*02:01-B1*13:01L HLA -DPA1*01:03-B1*02:01L HLA-DPA1*01:03-B1*104:01L HLA-DRB1*10:01L HLA-DRB1*04:08L HLA-DRB1*08:03L
VAELEGIQYGRSG

SEQ ID NO: 15441 - protein, 12 aa, Severe acute respiratory syndrome coronavirus 2
  REGION 1..12: note = Table B: HLA-DRB1*01:03L HLA-DQA1*01:02-B1*06:02L HLA-DPA1*01:03-B1*03:01L HLA-DQA1*01:01-B1*05:01L HLA-DQA1*05:01-B1*02:01L HLA-DPA1*01:03-B1*04:02L HLA-DPA1*03:01-B1*105:01L HLA-DRB1*16:01L HLA-DRB1*04:08L
LEGIQYGRSGET

SEQ ID NO: 15442 - protein, 16 aa, Severe acute respiratory syndrome coronavirus 2
  REGION 1..16: note = Table B: HLA-DRB1*01:03L HLA-DRB1*01:01L HLA-DRB1*10:01L
GETLGVLVPHVGEIPV

SEQ ID NO: 15443 - protein, 14 aa, Severe acute respiratory syndrome coronavirus 2
  REGION 1..14: note = Table B: HLA-DRB1*01:03L HLA-DRB1*01:02L HLA-DRB1*11:04L HLA-DRB1*08:01L
VGEIPVAYRKVLLR

SEQ ID NO: 15444 - protein, 12 aa, Severe acute respiratory syndrome coronavirus 2
  REGION 1..12: note = Table B: HLA-DRB1*01:03L HLA-DRB1*01:02L HLA-DRB1*16:01L HLA-DRB1*04:08L
IPVAYRKVLLRK

SEQ ID NO: 15445 - protein, 14 aa, Severe acute respiratory syndrome coronavirus 2
  REGION 1..14: note = Table B: HLA-DRB1*01:03L HLA-DRB1*04:08L
PVAYRKVLLRKNGN

SEQ ID NO: 15446 - protein, 13 aa, Severe acute respiratory syndrome coronavirus 2
  REGION 1..13: note = Table B: HLA-DRB1*01:03L HLA-DRB1*01:02L HLA-DRB1*04:08L
YRKVLLRKNGNKG

SEQ ID NO: 15447 - protein, 13 aa, Severe acute respiratory syndrome coronavirus 2
  REGION 1..13: note = Table B: HLA-DRB1*01:03L HLA-DRB1*01:02L HLA-DRB1*04:08L
KVLLRKNGNKGAG

SEQ ID NO: 15448 - protein, 14 aa, Severe acute respiratory syndrome coronavirus 2
  REGION 1..14: note = Table B: HLA-DRB1*01:03L HLA-DRB1*01:02L
VLLRKNGNKGAGGH

SEQ ID NO: 15449 - protein, 12 aa, Severe acute respiratory syndrome coronavirus 2
  REGION 1..12: note = Table B: HLA-DRB1*01:03L HLA-DQA1*01:02-B1*06:02L HLA-DQA1*05:05-B1*03:19L HLA-DQA1*05:05-B1*03:01L HLA-DRB1*04:08L
GAGGHSYGADLK

SEQ ID NO: 15450 - protein, 14 aa, Severe acute respiratory syndrome coronavirus 2
  REGION 1..14: note = Table B: HLA-DRB1*01:03L HLA-DRB1*04:02L HLA-DRB1*04:05L HLA-DRB1*01:02L HLA-DPA1*01:03-B1*03:01L HLA-DRB1*14:01L HLA-DRB1*14:02L HLA-DQA1*01:01-B1*05:01L HLA-DRB1*08:01L
DELGTDPYEDFQEN

SEQ ID NO: 15451 - protein, 14 aa, Severe acute respiratory syndrome coronavirus 2
  REGION 1..14: note = Table B: HLA-DRB1*01:03L HLA-DRB1*04:05L HLA-DRB1*01:02L HLA-DRB1*08:01L HLA-DRB1*04:08L
DPYEDFQENWNTKH

SEQ ID NO: 15452 - protein, 11 aa, Severe acute respiratory syndrome coronavirus 2
  REGION 1..11: note = Table B: HLA-DRB1*01:03L
WNTKHSSGVTR

SEQ ID NO: 15453 - protein, 11 aa, Severe acute respiratory syndrome coronavirus 2
  REGION 1..11: note = Table B: HLA-DRB1*01:03L HLA-DQA1*02:01-B1*03:03L
NTKHSSGVTRE

SEQ ID NO: 15454 - protein, 12 aa, Severe acute respiratory syndrome coronavirus 2
  REGION 1..12: note = Table B: HLA-DRB1*01:03L HLA-DPA1*01:03-B1*04:02L HLA-DRB1*04:08L
LNGGAYTRYVDN

SEQ ID NO: 15455 - protein, 12 aa, Severe acute respiratory syndrome coronavirus 2
  REGION 1..12: note = Table B: HLA-DRB1*01:03L HLA-DQA1*01:01-B1*05:01L HLA-DRB1*08:01L HLA-DQA1*05:01-B1*02:01L HLA-DPA1*01:03-B1*04:02L
NGGAYTRYVDNN

SEQ ID NO: 15456 - protein, 14 aa, Severe acute respiratory syndrome coronavirus 2
  REGION 1..14: note = Table B: HLA-DRB1*01:03L HLA-DRB1*01:02L HLA-DQA1*01-B1*05L HLA-DRB1*12:01L HLA-DPA1*02:01-B1*13:01L HLA-DPA1*03:01-B1*105:01L HLA-DRB1*16:01L HLA-DRB1*15:03L
YTRYVDNNFCGPDG

SEQ ID NO: 15457 - protein, 12 aa, Severe acute respiratory syndrome coronavirus 2
  REGION 1..12: note = Table B: HLA-DRB1*01:03L HLA-DRB1*04:02L HLA-DRB1*04:04L HLA-DRB1*04:05L HLA-DQA1*01:02-B1*06:02L HLA-DRB1*01:02L HLA-DRB1*08:01L HLA-DRB1*16:01L
YPLECIKDLLAR

SEQ ID NO: 15458 - protein, 14 aa, Severe acute respiratory syndrome coronavirus 2
  REGION 1..14: note = Table B: HLA-DRB1*01:03L
PLECIKDLLARAGK

SEQ ID NO: 15459 - protein, 13 aa, Severe acute respiratory syndrome coronavirus 2
  REGION 1..13: note = Table B: HLA-DRB1*01:03L HLA-DRB1*04:05L HLA-DRB1*16:01L
KRGVYCCREHEHE

SEQ ID NO: 15460 - protein, 13 aa, Severe acute respiratory syndrome coronavirus 2
  REGION 1..13: note = Table B: HLA-DRB1*01:03L HLA-DRB1*04:08L
EIKLAKKFDTFNG

SEQ ID NO: 15461 - protein, 10 aa, Severe acute respiratory syndrome coronavirus 2
  REGION 1..10: note = Table B: HLA-DRB1*01:03L HLA-DQA1*03:01-B1*03:02L
TIQPRVEKKK

SEQ ID NO: 15462 - protein, 16 aa, Severe acute respiratory syndrome coronavirus 2
  REGION 1..16: note = Table B: HLA-DRB1*01:03L HLA-DRB1*04:08L
IQPRVEKKKLDGFMGR

SEQ ID NO: 15463 - protein, 14 aa, Severe acute respiratory syndrome coronavirus 2
  REGION 1..14: note = Table B: HLA-DRB1*01:03L HLA-DRB1*04:05L HLA-DQA1*01:02-B1*06:02L HLA-DRB1*08:01L HLA-DRB1*12:01L HLA-DPA1*02:01-B1*13:01L HLA-DRB1*04:08L HLA-DQA1*02:01-B1*03:03L HLA-DRB1*15:03L
VEKKKLDGFMGRIR

SEQ ID NO: 15464 - protein, 16 aa, Severe acute respiratory syndrome coronavirus 2
  REGION 1..16: note = Table B: HLA-DRB1*01:03L HLA-DRB1*12:01L HLA-DRB1*04:08L
KKKLDGFMGRIRSVYP

SEQ ID NO: 15465 - protein, 12 aa, Severe acute respiratory syndrome coronavirus 2
  REGION 1..12: note = Table B: HLA-DRB1*01:03L HLA-DRB1*04:04L HLA-DRB1*04:05L HLA-DRB1*01:02L HLA-DRB1*12:01L HLA-DRB1*16:01L HLA-DRB1*04:08L HLA-DRB1*15:03L
RIRSVYPVASPN

SEQ ID NO: 15466 - protein, 12 aa, Severe acute respiratory syndrome coronavirus 2
  REGION 1..12: note = Table B: HLA-DRB1*01:03L HLA-DRB1*01:02L HLA-DPA1*01:03-B1*03:01L HLA-DRB1*14:01L HLA-DPA1*01:03-B1*04:02L HLA-DPA1*02:01-B1*13:01L HLA-DRB1*04:08L HLA-DRB1*15:03L
ETSWQTGDFVKA

SEQ ID NO: 15467 - protein, 17 aa, Severe acute respiratory syndrome coronavirus 2
  REGION 1..17: note = Table B: HLA-DRB1*01:03L HLA-DPA1*03:01-B1*105:01L HLA-DRB1*08:03L
VVKIYCPACHNSEVGPE

SEQ ID NO: 15468 - protein, 13 aa, Severe acute respiratory syndrome coronavirus 2
  REGION 1..13: note = Table B: HLA-DRB1*01:03L HLA-DRB1*04:04L HLA-DQA1*01:02-B1*06:02L HLA-DRB1*01:02L HLA-DRB1*12:01L HLA-DRB1*04:08L HLA-DRB1*15:01L
HSLAEYHNESGLK

SEQ ID NO: 15469 - protein, 12 aa, Severe acute respiratory syndrome coronavirus 2
  REGION 1..12: note = Table B: HLA-DRB1*01:03L HLA-DRB1*04:08L
EYHNESGLKTIL

SEQ ID NO: 15470 - protein, 12 aa, Severe acute respiratory syndrome coronavirus 2
  REGION 1..12: note = Table B: HLA-DRB1*01:03L HLA-DRB1*04:08L
YHNESGLKTILR

SEQ ID NO: 15471 - protein, 12 aa, Severe acute respiratory syndrome coronavirus 2
  REGION 1..12: note = Table B: HLA-DRB1*01:03L HLA-DQA1*01:02-B1*06:02L HLA-DRB1*01:02L HLA-DRB1*14:01L HLA-DRB1*11:04L HLA-DRB1*08:01L HLA-DRB1*11:01L HLA-DRB1*04:08L
GLKTILRKGGRT

SEQ ID NO: 15472 - protein, 13 aa, Severe acute respiratory syndrome coronavirus 2
  REGION 1..13: note = Table B: HLA-DRB1*01:03L HLA-DRB1*01:02L HLA-DRB1*14:01L HLA-DRB1*12:01L HLA-DRB1*16:01L HLA-DRB1*04:08L HLA-DRB1*15:03L
LKTILRKGGRTIA

SEQ ID NO: 15473 - protein, 13 aa, Severe acute respiratory syndrome coronavirus 2
  REGION 1..13: note = Table B: HLA-DRB1*01:03L HLA-DQA1*01:02-B1*06:02L HLA-DRB1*01:02L
TILRKGGRTIAFG

SEQ ID NO: 15474 - protein, 14 aa, Severe acute respiratory syndrome coronavirus 2
  REGION 1..14: note = Table B: HLA-DRB1*01:03L HLA-DRB1*14:54L
HTGVVGEGSEGLND

SEQ ID NO: 15475 - protein, 14 aa, Severe acute respiratory syndrome coronavirus 2
  REGION 1..14: note = Table B: HLA-DRB1*01:03L HLA-DRB1*04:08L HLA-DRB1*15:03L
GLNDNLLEILQKEK

SEQ ID NO: 15476 - protein, 13 aa, Severe acute respiratory syndrome coronavirus 2
  REGION 1..13: note = Table B: HLA-DRB1*01:03L HLA-DRB1*04:04L HLA-DRB1*04:05L HLA-DRB1*04:08L
KVNINIVGDFKLN

SEQ ID NO: 15477 - protein, 14 aa, Severe acute respiratory syndrome coronavirus 2
  REGION 1..14: note = Table B: HLA-DRB1*01:03L HLA-DRB1*11:02L HLA-DPA1*01:03-B1*04:02L
VGDFKLNEEIAIIL

SEQ ID NO: 15478 - protein, 14 aa, Severe acute respiratory syndrome coronavirus 2
  REGION 1..14: note = Table B: HLA-DRB1*01:03L HLA-DRB1*04:05L HLA-DRB1*11:04L HLA-DRB1*04:10L HLA-DRB1*14:54L HLA-DQA1*05:05-B1*03:01L HLA-DRB1*04:08L HLA-DQA1*02:01-B1*03:03L
NEEIAIILASFSAS

SEQ ID NO: 15479 - protein, 10 aa, Severe acute respiratory syndrome coronavirus 2
  REGION 1..10: note = Table B: HLA-DRB1*01:03L HLA-DQA1*01:02-B1*06:02L HLA-DRB1*14:02L HLA-DQA1*05:01-B1*02:01L HLA-DPA1*01:03-B1*04:01L HLA-DPA1*03:01-B1*105:01L HLA-DQA1*01:03-B1*06:01L HLA-DQA1*02:01-B1*03:03L
TVKGLDYKAF

SEQ ID NO: 15480 - protein, 12 aa, Severe acute respiratory syndrome coronavirus 2
  REGION 1..12: note = Table B: HLA-DRB1*01:03L HLA-DPA1*01:03-B1*04:01L HLA-DPA1*01:03-B1*04:02L HLA-DRB1*04:08L
KGLDYKAFKQIV

SEQ ID NO: 15481 - protein, 14 aa, Severe acute respiratory syndrome coronavirus 2
  REGION 1..14: note = Table B: HLA-DRB1*01:03L HLA-DRB1*12:01L HLA-DRB1*16:01L HLA-DRB1*04:08L
QIVESCGNFKVTKG

SEQ ID NO: 15482 - protein, 10 aa, Severe acute respiratory syndrome coronavirus 2
  REGION 1..10: note = Table B: HLA-DRB1*01:03L HLA-DRB1*01:02L HLA-DQA1*03:01-B1*03:02L HLA-DRB1*16:01L HLA-DRB1*04:08L
NFKVTKGKAK

SEQ ID NO: 15483 - protein, 10 aa, Severe acute respiratory syndrome coronavirus 2
  REGION 1..10: note = Table B: HLA-DRB1*01:03L HLA-DRB1*01:02L HLA-DRB1*12:01L HLA-DRB1*16:01L HLA-DRB1*04:08L
FKVTKGKAKK

SEQ ID NO: 15484 - protein, 14 aa, Severe acute respiratory syndrome coronavirus 2
  REGION 1..14: note = Table B: HLA-DRB1*01:03L HLA-DRB1*04:05L HLA-DQA1*01:02-B1*06:02L HLA-DRB1*01:02L HLA-DRB1*08:01L HLA-DRB1*12:01L HLA-DPA1*02:01-B1*13:01L HLA-DRB1*16:01L HLA-DRB1*04:08L HLA-DQA1*02:01-B1*03:03L
GKAKKGAWNIGEQK

SEQ ID NO: 15485 - protein, 13 aa, Severe acute respiratory syndrome coronavirus 2
  REGION 1..13: note = Table B: HLA-DRB1*01:03L HLA-DRB1*04:05L HLA-DPA1*03:01-B1*04:02L HLA-DRB1*08:01L
AARVVRSIFSRTL

SEQ ID NO: 15486 - protein, 12 aa, Severe acute respiratory syndrome coronavirus 2
  REGION 1..12: note = Table B: HLA-DRB1*01:03L HLA-DQA1*01:02-B1*06:02L HLA-DRB1*04:08L
RVVRSIFSRTLE

SEQ ID NO: 15487 - protein, 11 aa, Severe acute respiratory syndrome coronavirus 2
  REGION 1..11: note = Table B: HLA-DRB1*01:03L HLA-DRB1*04:02L
TAQNSVRVLQK

SEQ ID NO: 15488 - protein, 13 aa, Severe acute respiratory syndrome coronavirus 2
  REGION 1..13: note = Table B: HLA-DRB1*01:03L HLA-DRB1*04:05L HLA-DRB1*01:02L HLA-DRB4*03:01NL HLA-DRB1*08:04L HLA-DQA1*01:01-B1*05:01L HLA-DRB1*08:01L HLA-DRB1*04:10L HLA-DPA1*02:01-B1*13:01L HLA-DRB1*14:54L HLA-DQA1*05:05-B1*03:01L HLA-DRB1*04:08L
DGISQYSLRLIDA

SEQ ID NO: 15489 - protein, 12 aa, Severe acute respiratory syndrome coronavirus 2
  REGION 1..12: note = Table B: HLA-DRB1*01:03L HLA-DQA1*01:02-B1*06:02L HLA-DRB1*01:01L HLA-DQA1*05:05-B1*03:19L HLA-DRB1*10:01L HLA-DQA1*01:03-B1*06:01L HLA-DRB1*04:08L
GVVQLTSQWLTN

SEQ ID NO: 15490 - protein, 13 aa, Severe acute respiratory syndrome coronavirus 2
  REGION 1..13: note = Table B: HLA-DRB1*01:03L HLA-DRB1*01:02L HLA-DRB1*04:08L
TSQWLTNIFGTVY

SEQ ID NO: 15491 - protein, 12 aa, Severe acute respiratory syndrome coronavirus 2
  REGION 1..12: note = Table B: HLA-DRB1*01:03L HLA-DRB1*01:02L HLA-DPA1*01:03-B1*02:01L HLA-DPA1*01:02-B1*04:01L HLA-DQA1*01:03-B1*06:01L HLA-DRB1*04:08L
WLTNIFGTVYEK

SEQ ID NO: 15492 - protein, 10 aa, Severe acute respiratory syndrome coronavirus 2
  REGION 1..10: note = Table B: HLA-DRB1*01:03L HLA-DPA1*03:01-B1*04:02L HLA-DPA1*01:03-B1*04:01L HLA-DPA1*01:03-B1*04:02L HLA-DPA1*03:01-B1*105:01L HLA-DPA1*01:02-B1*04:01L HLA-DRB1*16:01L HLA-DQA1*01:03-B1*06:01L HLA-DRB1*04:08L
IFGTVYEKLK

SEQ ID NO: 15493 - protein, 14 aa, Severe acute respiratory syndrome coronavirus 2
  REGION 1..14: note = Table B: HLA-DRB1*01:03L HLA-DRB1*04:04L HLA-DRB1*12:01L HLA-DPA1*02:01-B1*13:01L
YEKLKPVLDWLEEK

SEQ ID NO: 15494 - protein, 13 aa, Severe acute respiratory syndrome coronavirus 2
  REGION 1..13: note = Table B: HLA-DRB1*01:03L
LKPVLDWLEEKFK

SEQ ID NO: 15495 - protein, 11 aa, Severe acute respiratory syndrome coronavirus 2
  REGION 1..11: note = Table B: HLA-DRB1*01:03L HLA-DQA1*01:02-B1*06:02L HLA-DPA1*03:01-B1*04:02L HLA-DQA1*01-B1*05L HLA-DPA1*01:03-B1*04:01L HLA-DPA1*01:03-B1*04:02L HLA-DPA1*03:01-B1*105:01L HLA-DPA1*01:02-B1*04:01L
  REGION 1..11: note = CONT. FROM ABOVE: HLA-DRB1*16:01L HLA-DRB1*04:08L
WLEEKFKEGVE

SEQ ID NO: 15496 - protein, 13 aa, Severe acute respiratory syndrome coronavirus 2
  REGION 1..13: note = Table B: HLA-DRB1*01:03L HLA-DRB1*04:04L HLA-DQA1*01:02-B1*06:02L HLA-DRB1*08:01L HLA-DRB1*11:01L HLA-DPA1*01:03-B1*104:01L HLA-DRB1*07:01L HLA-DQA1*02:01-B1*03:03L HLA-DRB1*15:03L
EKFKEGVEFLRDG

SEQ ID NO: 15497 - protein, 14 aa, Severe acute respiratory syndrome coronavirus 2
  REGION 1..14: note = Table B: HLA-DRB1*01:03L HLA-DRB1*04:04L HLA-DRB1*08:01L HLA-DPA1*01:03-B1*04:02L HLA-DPA1*01:03-B1*104:01L HLA-DQA1*02:01-B1*03:03L
KFKEGVEFLRDGWE

SEQ ID NO: 15498 - protein, 10 aa, Severe acute respiratory syndrome coronavirus 2
  REGION 1..10: note = Table B: HLA-DRB1*01:03L HLA-DQA1*01:02-B1*06:02L HLA-DPA1*02:01-B1*13:01L HLA-DRB1*16:01L HLA-DQA1*01:03-B1*06:01L HLA-DQA1*02:01-B1*03:03L
LRDGWEIVKF

SEQ ID NO: 15499 - protein, 10 aa, Severe acute respiratory syndrome coronavirus 2
  REGION 1..10: note = Table B: HLA-DRB1*01:03L HLA-DPA1*03:01-B1*04:02L HLA-DQA1*01-B1*05L HLA-DPA1*01:03-B1*04:01L HLA-DPA1*01:03-B1*04:02L HLA-DPA1*03:01-B1*105:01L HLA-DPA1*01:02-B1*04:01L HLA-DRB1*16:01L
  REGION 1..10: note = CONT. FROM ABOVE: HLA-DQA1*01:03-B1*06:01L HLA-DRB1*04:08L
GWEIVKFIST

SEQ ID NO: 15500 - protein, 12 aa, Severe acute respiratory syndrome coronavirus 2
  REGION 1..12: note = Table B: HLA-DRB1*01:03L HLA-DRB1*01:02L HLA-DPA1*01:03-B1*04:02L HLA-DRB1*04:08L
EIVGGQIVTCAK

SEQ ID NO: 15501 - protein, 12 aa, Severe acute respiratory syndrome coronavirus 2
  REGION 1..12: note = Table B: HLA-DRB1*01:03L HLA-DRB1*01:02L HLA-DPA1*01:03-B1*03:01L HLA-DRB1*08:01L HLA-DPA1*01:03-B1*04:02L HLA-DRB1*04:08L
IVGGQIVTCAKE

SEQ ID NO: 15502 - protein, 13 aa, Severe acute respiratory syndrome coronavirus 2
  REGION 1..13: note = Table B: HLA-DRB1*01:03L HLA-DRB1*04:02L HLA-DRB1*04:05L HLA-DRB1*01:02L HLA-DRB1*08:04L HLA-DRB1*12:01L HLA-DQA1*03:01-B1*03:02L HLA-DPA1*01:02-B1*04:01L HLA-DRB1*16:01L HLA-DRB1*04:08L HLA-DRB1*15:03L
VGGQIVTCAKEIK

SEQ ID NO: 15503 - protein, 10 aa, Severe acute respiratory syndrome coronavirus 2
  REGION 1..10: note = Table B: HLA-DRB1*01:03L HLA-DRB1*08:01L HLA-DPA1*03:01-B1*105:01L HLA-DQA1*03:01-B1*03:02L HLA-DPA1*01:02-B1*04:01L HLA-DRB1*16:01L HLA-DQA1*01:03-B1*06:01L HLA-DRB1*04:08L
  REGION 1..10: note = CONT. FROM ABOVE: HLA-DQA1*02:01-B1*03:03L
VQTFFKLVNK

SEQ ID NO: 15504 - protein, 15 aa, Severe acute respiratory syndrome coronavirus 2
  REGION 1..15: note = Table B: HLA-DRB1*01:03L HLA-DQA1*01:02-B1*06:02L HLA-DRB1*01:01L HLA-DQA1*05:05-B1*03:01L HLA-DRB1*10:01L HLA-DRB1*04:08L
VNKFLALCADSIIIG

SEQ ID NO: 15505 - protein, 12 aa, Severe acute respiratory syndrome coronavirus 2
  REGION 1..12: note = Table B: HLA-DRB1*01:03L HLA-DRB1*04:05L HLA-DQA1*01:02-B1*06:02L HLA-DRB1*01:02L HLA-DRB1*12:01L HLA-DRB1*16:01L HLA-DQA1*01:03-B1*06:01L
GAKLKALNLGET

SEQ ID NO: 15506 - protein, 15 aa, Severe acute respiratory syndrome coronavirus 2
  REGION 1..15: note = Table B: HLA-DRB1*01:03L HLA-DRB1*04:04L HLA-DRB1*16:01L
LKALNLGETFVTHSK

SEQ ID NO: 15507 - protein, 12 aa, Severe acute respiratory syndrome coronavirus 2
  REGION 1..12: note = Table B: HLA-DRB1*01:03L HLA-DRB1*11:04L HLA-DRB1*11:01L HLA-DRB1*16:01L HLA-DRB1*04:08L
KGLYRKCVKSRE

SEQ ID NO: 15508 - protein, 15 aa, Severe acute respiratory syndrome coronavirus 2
  REGION 1..15: note = Table B: HLA-DRB1*01:03L HLA-DRB1*04:04L HLA-DRB1*08:04L HLA-DRB1*08:77L HLA-DPA1*03:01-B1*04:02L HLA-DRB1*03:01L HLA-DRB1*11:03L HLA-DRB4*01:01L HLA-DPA1*01:03-B1*04:01L HLA-DRB3*01:01L HLA-DPA1*01:03-B1*104:01L HLA-DRB1*10:01L
  REGION 1..15: note = CONT. FROM ABOVE: HLA-DRB1*04:08L
LPTEVLTEEVVLKTG

SEQ ID NO: 15509 - protein, 14 aa, Severe acute respiratory syndrome coronavirus 2
  REGION 1..14: note = Table B: HLA-DRB1*01:03L HLA-DRB1*01:02L HLA-DRB1*08:04L
TEEVVLKTGDLQPL

SEQ ID NO: 15510 - protein, 14 aa, Severe acute respiratory syndrome coronavirus 2
  REGION 1..14: note = Table B: HLA-DRB1*01:03L HLA-DRB1*08:04L HLA-DRB1*14:01L HLA-DPA1*02:01-B1*13:01L HLA-DPA1*01:03-B1*02:01L
INGLMLLEIKDTEK

SEQ ID NO: 15511 - protein, 14 aa, Severe acute respiratory syndrome coronavirus 2
  REGION 1..14: note = Table B: HLA-DRB1*01:03L HLA-DRB1*01:01L HLA-DRB1*10:01L HLA-DRB1*04:08L
TEKYCALAPNMMVT

SEQ ID NO: 15512 - protein, 14 aa, Severe acute respiratory syndrome coronavirus 2
  REGION 1..14: note = Table B: HLA-DRB1*01:03L HLA-DRB1*01:01L HLA-DRB1*12:01L HLA-DQA1*05:05-B1*03:01L HLA-DRB1*10:01L HLA-DRB1*04:08L
EKYCALAPNMMVTN

SEQ ID NO: 15513 - protein, 12 aa, Severe acute respiratory syndrome coronavirus 2
  REGION 1..12: note = Table B: HLA-DRB1*01:03L HLA-DRB1*04:02L HLA-DRB1*04:05L HLA-DPA1*01:03-B1*04:02L HLA-DPA1*03:01-B1*105:01L HLA-DRB1*04:08L
GDDTVIEVQGYK

SEQ ID NO: 15514 - protein, 12 aa, Severe acute respiratory syndrome coronavirus 2
  REGION 1..12: note = Table B: HLA-DRB1*01:03L HLA-DRB1*04:05L HLA-DRB1*01:02L HLA-DRB1*14:01L HLA-DQA1*01-B1*05L HLA-DRB1*04:10L HLA-DRB1*12:02L HLA-DPA1*03:01-B1*105:01L HLA-DRB1*14:54L HLA-DRB1*15:03L
DDTVIEVQGYKS

SEQ ID NO: 15515 - protein, 10 aa, Severe acute respiratory syndrome coronavirus 2
  REGION 1..10: note = Table B: HLA-DRB1*01:03L HLA-DRB1*04:05L HLA-DQA1*01:02-B1*06:02L HLA-DPA1*02:01-B1*13:01L HLA-DPA1*03:01-B1*105:01L HLA-DRB1*16:01L HLA-DQA1*01:03-B1*06:01L HLA-DQA1*02:01-B1*03:03L
  REGION 1..10: note = CONT. FROM ABOVE: HLA-DRB1*15:03L
QGYKSVNITF

SEQ ID NO: 15516 - protein, 15 aa, Severe acute respiratory syndrome coronavirus 2
  REGION 1..15: note = Table B: HLA-DRB1*01:03L HLA-DRB1*04:04L HLA-DRB1*08:04L HLA-DRB1*08:01L HLA-DRB1*04:08L
IKTLQPVSELLTPLG

SEQ ID NO: 15517 - protein, 16 aa, Severe acute respiratory syndrome coronavirus 2
  REGION 1..16: note = Table B: HLA-DRB1*01:03L HLA-DPA1*01:03-B1*03:01L HLA-DPA1*01:03-B1*04:01L HLA-DRB1*12:01L HLA-DRB1*16:01L HLA-DRB1*04:08L HLA-DRB1*15:03L
EFKLASHMYCSFYPPD

SEQ ID NO: 15518 - protein, 11 aa, Severe acute respiratory syndrome coronavirus 2
  REGION 1..11: note = Table B: HLA-DRB1*01:03L HLA-DRB1*04:02L HLA-DRB1*11:03L HLA-DRB1*14:02L HLA-DRB1*14:54L HLA-DRB1*08:02L HLA-DQA1*02:01-B1*03:03L
EEEEFEPSTQY

SEQ ID NO: 15519 - protein, 13 aa, Severe acute respiratory syndrome coronavirus 2
  REGION 1..13: note = Table B: HLA-DRB1*01:03L HLA-DRB4*03:01NL HLA-DRB1*14:54L HLA-DRB1*14:17L
SAALQPEEEQEED

SEQ ID NO: 15520 - protein, 14 aa, Severe acute respiratory syndrome coronavirus 2
  REGION 1..14: note = Table B: HLA-DRB1*01:03L HLA-DRB1*04:05L HLA-DQA1*01:02-B1*06:02L HLA-DQA1*01-B1*05L HLA-DRB1*04:08L
LDDDSQQTVGQQDG

SEQ ID NO: 15521 - protein, 15 aa, Severe acute respiratory syndrome coronavirus 2
  REGION 1..15: note = Table B: HLA-DRB1*01:03L HLA-DRB4*03:01NL HLA-DQA1*01-B1*05L HLA-DRB1*12:01L HLA-DPA1*03:01-B1*105:01L HLA-DRB1*04:08L
DSQQTVGQQDGSEDN

SEQ ID NO: 15522 - protein, 10 aa, Severe acute respiratory syndrome coronavirus 2
  REGION 1..10: note = Table B: HLA-DRB1*01:03L HLA-DQA1*03:01-B1*03:02L HLA-DRB1*16:01L
IVEEAKKVKP

SEQ ID NO: 15523 - protein, 13 aa, Severe acute respiratory syndrome coronavirus 2
  REGION 1..13: note = Table B: HLA-DRB1*01:03L HLA-DRB1*04:04L HLA-DRB1*01:02L HLA-DRB1*12:01L HLA-DRB1*04:08L
KKVKPTVVVNAAN

SEQ ID NO: 15524 - protein, 11 aa, Severe acute respiratory syndrome coronavirus 2
  REGION 1..11: note = Table B: HLA-DRB1*01:03L HLA-DRB1*04:05L HLA-DRB1*08:04L HLA-DRB1*11:03L HLA-DRB1*11:04L HLA-DRB1*04:10L HLA-DRB1*12:02L HLA-DRB1*14:54L HLA-DQA1*01:03-B1*06:01L HLA-DRB1*04:08L
VVVNAANVYLK

SEQ ID NO: 15525 - protein, 14 aa, Severe acute respiratory syndrome coronavirus 2
  REGION 1..14: note = Table B: HLA-DRB1*01:03L HLA-DRB1*04:05L HLA-DRB1*16:01L HLA-DRB1*04:08L HLA-DRB1*15:03L
VVNAANVYLKHGGG

SEQ ID NO: 15526 - protein, 15 aa, Severe acute respiratory syndrome coronavirus 2
  REGION 1..15: note = Table B: HLA-DRB1*01:03L HLA-DRB1*04:02L HLA-DRB1*04:08L
NKATNNAMQVESDDY

SEQ ID NO: 15527 - protein, 14 aa, Severe acute respiratory syndrome coronavirus 2
  REGION 1..14: note = Table B: HLA-DRB1*01:03L HLA-DRB1*04:04L HLA-DRB1*01:02L HLA-DRB4*03:01NL HLA-DRB1*14:54L HLA-DRB1*10:01L HLA-DRB1*04:08L HLA-DRB1*08:03L
NNAMQVESDDYIAT

SEQ ID NO: 15528 - protein, 14 aa, Severe acute respiratory syndrome coronavirus 2
  REGION 1..14: note = Table B: HLA-DRB1*01:03L HLA-DRB1*04:05L HLA-DRB1*01:02L HLA-DPA1*03:01-B1*04:02L HLA-DRB1*12:01L HLA-DPA1*02:01-B1*13:01L HLA-DRB1*04:08L
NAMQVESDDYIATN

SEQ ID NO: 15529 - protein, 14 aa, Severe acute respiratory syndrome coronavirus 2
  REGION 1..14: note = Table B: HLA-DRB1*01:03L HLA-DRB1*01:02L
VGGSCVLSGHNLAK

SEQ ID NO: 15530 - protein, 15 aa, Severe acute respiratory syndrome coronavirus 2
  REGION 1..15: note = Table B: HLA-DRB1*01:03L HLA-DQA1*01:03-B1*06:01L HLA-DRB1*04:08L HLA-DQA1*02:01-B1*03:03L
GHNLAKHCLHVVGPN

SEQ ID NO: 15531 - protein, 14 aa, Severe acute respiratory syndrome coronavirus 2
  REGION 1..14: note = Table B: HLA-DRB1*01:03L HLA-DRB1*04:05L HLA-DRB1*01:02L HLA-DPA1*01:03-B1*03:01L HLA-DRB1*08:01L HLA-DRB1*12:01L HLA-DPA1*02:01-B1*13:01L HLA-DPA1*01:02-B1*04:01L HLA-DRB1*04:08L HLA-DRB1*15:03L
GPNVNKGEDIQLLK

SEQ ID NO: 15532 - protein, 15 aa, Severe acute respiratory syndrome coronavirus 2
  REGION 1..15: note = Table B: HLA-DRB1*01:03L HLA-DRB1*04:02L HLA-DRB1*04:05L HLA-DRB1*01:02L HLA-DPA1*01:03-B1*03:01L HLA-DPA1*03:01-B1*04:02L HLA-DQA1*01:01-B1*05:01L HLA-DRB1*08:01L HLA-DPA1*01:03-B1*04:01L HLA-DRB1*12:01L
  REGION 1..15: note = CONT. FROM ABOVE: HLA-DPA1*02:01-B1*13:01L HLA-DPA1*01:03-B1*104 :01L HLA-DPA1*01:02-B1*04:01L HLA-DRB1*16:01L HLA-DRB1*04:08L HL A-DRB1*15:03L
APLLSAGIFGADPIH

SEQ ID NO: 15533 - protein, 14 aa, Severe acute respiratory syndrome coronavirus 2
  REGION 1..14: note = Table B: HLA-DRB1*01:03L HLA-DRB1*04:05L HLA-DRB1*01:02L HLA-DRB1*08:01L HLA-DPA1*02:01-B1*13:01L HLA-DQA1*03:01-B1*03:02L HLA-DRB1*16:01L HLA-DRB1*04:08L HLA-DQA1*02:01-B1*03:03L
DPIHSLRVCVDTVR

SEQ ID NO: 15534 - protein, 14 aa, Severe acute respiratory syndrome coronavirus 2
  REGION 1..14: note = Table B: HLA-DRB1*01:03L HLA-DRB1*04:08L
IHSLRVCVDTVRTN

SEQ ID NO: 15535 - protein, 13 aa, Severe acute respiratory syndrome coronavirus 2
  REGION 1..13: note = Table B: HLA-DRB1*01:03L HLA-DRB1*01:02L HLA-DPA1*03:01-B1*04:02L HLA-DRB1*12:01L HLA-DRB1*16:01L HLA-DRB1*04:08L HLA-DRB1*15:03L
TVRTNVYLAVFDK

SEQ ID NO: 15536 - protein, 11 aa, Severe acute respiratory syndrome coronavirus 2
  REGION 1..11: note = Table B: HLA-DRB1*01:03L HLA-DPA1*01:03-B1*03:01L HLA-DPA1*03:01-B1*04:02L HLA-DQA1*01-B1*05L HLA-DPA1*01:03-B1*04:01L HLA-DPA1*01:03-B1*04:02L HLA-DRB1*12:01L HLA-DRB1*16:01L HLA-DQA1*01:03-B1*06:01L
  REGION 1..11: note = CONT. FROM ABOVE: HLA-DRB1*04:08L HLA-DQA1*02:01-B1*03:03L
DKLVSSFLEMK

SEQ ID NO: 15537 - protein, 13 aa, Severe acute respiratory syndrome coronavirus 2
  REGION 1..13: note = Table B: HLA-DRB1*01:03L HLA-DRB1*04:02L HLA-DRB1*04:05L HLA-DRB1*08:01L HLA-DQA1*02:01-B1*03:03L
EKQVEQKIAEIPK

SEQ ID NO: 15538 - protein, 15 aa, Severe acute respiratory syndrome coronavirus 2
  REGION 1..15: note = Table B: HLA-DRB1*01:03L HLA-DRB1*04:04L HLA-DRB1*04:05L HLA-DRB1*14:01L HLA-DQA1*01:01-B1*05:01L HLA-DRB1*04:10L HLA-DPA1*02:01-B1*13:01L HLA-DPA1*03:01-B1*105:01L HLA-DPA1*01:02-B1*04:01L
IPKEEVKPFITESKP

SEQ ID NO: 15539 - protein, 13 aa, Severe acute respiratory syndrome coronavirus 2
  REGION 1..13: note = Table B: HLA-DRB1*01:03L HLA-DRB1*04:04L HLA-DRB1*04:05L HLA-DRB4*03:01NL HLA-DRB1*14:01L HLA-DRB1*04:10L HLA-DPA1*03:01-B1*105:01L HLA-DRB1*14:54L HLA-DPA1*01:02-B1*04:01L
EEVKPFITESKPS

SEQ ID NO: 15540 - protein, 12 aa, Severe acute respiratory syndrome coronavirus 2
  REGION 1..12: note = Table B: HLA-DRB1*01:03L HLA-DRB1*04:05L HLA-DQA1*01:02-B1*06:02L HLA-DRB1*01:02L HLA-DRB1*08:04L HLA-DRB1*14:01L HLA-DRB1*11:04L HLA-DRB1*14:02L HLA-DRB1*08:01L HLA-DRB1*12:01L HLA-DPA1*03:01-B1*105:01L HLA-DRB1*04:08L
  REGION 1..12: note = CONT. FROM ABOVE: HLA-DRB1*15:03L
PFITESKPSVEQ

SEQ ID NO: 15541 - protein, 11 aa, Severe acute respiratory syndrome coronavirus 2
  REGION 1..11: note = Table B: HLA-DRB1*01:03L HLA-DRB1*14:01L HLA-DRB1*12:02L
ITESKPSVEQR

SEQ ID NO: 15542 - protein, 12 aa, Severe acute respiratory syndrome coronavirus 2
  REGION 1..12: note = Table B: HLA-DRB1*01:03L HLA-DRB1*08:01L HLA-DRB1*04:08L
PSVEQRKQDDKK

SEQ ID NO: 15543 - protein, 15 aa, Severe acute respiratory syndrome coronavirus 2
  REGION 1..15: note = Table B: HLA-DRB1*01:03L HLA-DRB1*04:05L HLA-DQA1*01:02-B1*06:02L HLA-DPA1*03:01-B1*04:02L HLA-DRB1*14:01L HLA-DRB1*12:01L HLA-DRB1*04:08L
ENLLLYIDINGNLHP

SEQ ID NO: 15544 - protein, 12 aa, Severe acute respiratory syndrome coronavirus 2
  REGION 1..12: note = Table B: HLA-DRB1*01:03L HLA-DRB1*04:05L HLA-DRB1*01:02L HLA-DRB4*03:01NL HLA-DRB1*08:04L HLA-DRB1*08:77L HLA-DRB3*02:01L HLA-DPA1*01:03-B1*03:01L HLA-DRB1*03:01L HLA-DRB1*11:03L HLA-DRB1*11:04L HLA-DRB1*14:02L HLA-DRB1*11:01L HLA-DRB5*01:01L
  REGION 1..12: note = CONT. FROM ABOVE: HLA-DRB1*13:01L HLA-DRB1*04:10L HLA-DRB1*09:01 L HLA-DRB1*12:02L HLA-DRB3*01:01L HLA-DPA1*03:01-B1*105:01L HLA- DRB1*14:54L HLA-DRB1*14:17L HLA-DRB1*07:01L HLA-DRB1*10:01L HLA- DRB1*04:08L HLA-DRB1*08:03L HLA-DRB1*15:03L
GNLHPDSATLVS

SEQ ID NO: 15545 - protein, 12 aa, Severe acute respiratory syndrome coronavirus 2
  REGION 1..12: note = Table B: HLA-DRB1*01:03L HLA-DRB1*04:02L HLA-DRB1*01:02L HLA-DRB4*03:01NL HLA-DRB1*08:04L HLA-DRB1*08:77L HLA-DRB3*02:01L HLA-DPA1*01:03-B1*03:01L HLA-DRB1*03:01L HLA-DRB1*11:03L HLA-DRB1*11:04L HLA-DRB1*14:02L HLA-DRB1*12:01L HLA-DRB1*12:02L
  REGION 1..12: note = CONT. FROM ABOVE: HLA-DRB3*01:01L HLA-DQA1*03:01-B1*03:02L HLA-D RB1*14:54L HLA-DQA1*02:01-B1*03:03L HLA-DRB1*15:03L
NLHPDSATLVSD

SEQ ID NO: 15546 - protein, 14 aa, Severe acute respiratory syndrome coronavirus 2
  REGION 1..14: note = Table B: HLA-DRB1*01:03L HLA-DRB1*04:02L HLA-DRB1*04:05L HLA-DRB1*08:01L HLA-DRB1*12:01L HLA-DPA1*02:01-B1*13:01L HLA-DRB1*04:08L
HPDSATLVSDIDIT

SEQ ID NO: 15547 - protein, 12 aa, Severe acute respiratory syndrome coronavirus 2
  REGION 1..12: note = Table B: HLA-DRB1*01:03L HLA-DRB1*01:02L HLA-DRB1*04:10L HLA-DRB1*04:08L
IVGDVVQEGVLT

SEQ ID NO: 15548 - protein, 15 aa, Severe acute respiratory syndrome coronavirus 2
  REGION 1..15: note = Table B: HLA-DRB1*01:03L HLA-DRB1*04:05L HLA-DPA1*01:03-B1*03:01L HLA-DQA1*01:01-B1*05:01L HLA-DRB1*12:01L HLA-DRB1*04:08L
DVVQEGVLTAVVIPT

SEQ ID NO: 15549 - protein, 13 aa, Severe acute respiratory syndrome coronavirus 2
  REGION 1..13: note = Table B: HLA-DRB1*01:03L HLA-DRB1*16:01L HLA-DRB1*04:08L
GGTTEMLAKALRK

SEQ ID NO: 15550 - protein, 13 aa, Severe acute respiratory syndrome coronavirus 2
  REGION 1..13: note = Table B: HLA-DRB1*01:03L HLA-DQA1*01:02-B1*06:02L HLA-DRB1*14:01L HLA-DRB1*08:01L HLA-DRB1*04:08L
TEMLAKALRKVPT

SEQ ID NO: 15551 - protein, 13 aa, Severe acute respiratory syndrome coronavirus 2
  REGION 1..13: note = Table B: HLA-DRB1*01:03L HLA-DRB1*04:04L HLA-DRB1*01:02L HLA-DRB1*12:01L HLA-DRB1*14:54L HLA-DRB1*04:08L HLA-DRB1*15:03L
QGLNGYTVEEAKT

SEQ ID NO: 15552 - protein, 16 aa, Severe acute respiratory syndrome coronavirus 2
  REGION 1..16: note = Table B: HLA-DRB1*01:03L HLA-DRB1*14:01L HLA-DRB1*04:08L
KTVLKKCKSAFYILPS

SEQ ID NO: 15553 - protein, 15 aa, Severe acute respiratory syndrome coronavirus 2
  REGION 1..15: note = Table B: HLA-DRB1*01:03L HLA-DPA1*02:01-B1*13:01L HLA-DPA1*03:01-B1*105:01L HLA-DRB1*16:01L HLA-DRB1*15:03L
VSWNLREMLAHAEET

SEQ ID NO: 15554 - protein, 12 aa, Severe acute respiratory syndrome coronavirus 2
  REGION 1..12: note = Table B: HLA-DRB1*01:03L HLA-DQA1*01:02-B1*06:02L HLA-DRB1*01:02L HLA-DRB1*14:01L HLA-DPA1*03:01-B1*105:01L HLA-DRB1*04:08L HLA-DRB1*15:03L
EMLAHAEETRKL

SEQ ID NO: 15555 - protein, 15 aa, Severe acute respiratory syndrome coronavirus 2
  REGION 1..15: note = Table B: HLA-DRB1*01:03L HLA-DRB1*01:01L HLA-DRB3*01:01L HLA-DRB1*16:01L
AEETRKLMPVCVETK

SEQ ID NO: 15556 - protein, 12 aa, Severe acute respiratory syndrome coronavirus 2
  REGION 1..12: note = Table B: HLA-DRB1*01:03L HLA-DRB1*04:02L HLA-DRB1*04:05L HLA-DQA1*01:01-B1*05:01L HLA-DRB1*14:17L HLA-DRB1*04:08L
VETKAIVSTIQR

SEQ ID NO: 15557 - protein, 11 aa, Severe acute respiratory syndrome coronavirus 2
  REGION 1..11: note = Table B: HLA-DRB1*01:03L HLA-DRB1*01:02L HLA-DRB1*08:01L HLA-DQA1*03:01-B1*03:02L HLA-DRB1*16:01L HLA-DRB1*04:08L
RKYKGIKIQEG

SEQ ID NO: 15558 - protein, 11 aa, Severe acute respiratory syndrome coronavirus 2
  REGION 1..11: note = Table B: HLA-DRB1*01:03L HLA-DRB1*04:05L HLA-DRB1*01:02L HLA-DRB4*03:01NL HLA-DRB1*14:01L HLA-DQA1*01:01-B1*05:01L HLA-DQA1*05:05-B1*03:19L HLA-DRB1*04:10L HLA-DRB1*12:01L HLA-DRB1*14:54L HLA-DRB1*14:17L HLA-DRB1*16:01L HLA-DRB1*04:08L
  REGION 1..11: note = CONT. FROM ABOVE: HLA-DRB1*15:03L
KGIKIQEGVVD

SEQ ID NO: 15559 - protein, 10 aa, Severe acute respiratory syndrome coronavirus 2
  REGION 1..10: note = Table B: HLA-DRB1*01:03L HLA-DQA1*01:02-B1*06:02L HLA-DPA1*01:03-B1*03:01L HLA-DQA1*05:05-B1*03:19L HLA-DQA1*05:01-B1*02:01L HLA-DRB1*16:01L HLA-DQA1*02:01-B1*03:03L
IKIQEGVVDY

SEQ ID NO: 15560 - protein, 12 aa, Severe acute respiratory syndrome coronavirus 2
  REGION 1..12: note = Table B: HLA-DRB1*01:03L HLA-DRB1*04:05L HLA-DRB1*01:02L HLA-DRB1*08:01L HLA-DQA1*01-B1*05L HLA-DRB1*12:01L HLA-DQA1*03:01-B1*03:02L HLA-DPA1*01:02-B1*04:01L HLA-DRB1*16:01L HLA-DRB1*04:08L HLA-DQA1*02:01-B1*03:03L
  REGION 1..12: note = CONT. FROM ABOVE: HLA-DRB1*15:03L
GARFYFYTSKTT

SEQ ID NO: 15561 - protein, 14 aa, Severe acute respiratory syndrome coronavirus 2
  REGION 1..14: note = Table B: HLA-DRB1*01:03L HLA-DPA1*01:03-B1*04:02L HLA-DRB1*12:01L HLA-DRB1*04:08L
MPLGYVTHGLNLEE

SEQ ID NO: 15562 - protein, 14 aa, Severe acute respiratory syndrome coronavirus 2
  REGION 1..14: note = Table B: HLA-DRB1*01:03L HLA-DRB1*01:02L HLA-DRB1*16:01L HLA-DRB1*15:03L
EEAARYMRSLKVPA

SEQ ID NO: 15563 - protein, 12 aa, Severe acute respiratory syndrome coronavirus 2
  REGION 1..12: note = Table B: HLA-DRB1*01:03L HLA-DRB1*04:05L HLA-DRB1*01:02L HLA-DRB1*08:01L HLA-DQA1*01-B1*05L HLA-DRB1*04:10L HLA-DRB1*12:01L HLA-DRB1*14:54L HLA-DQA1*05:05-B1*03:01L HLA-DRB1*10:01L HLA-DRB1*16:01L HLA-DRB1*04:08L HLA-DRB1*15:03L
TAYNGYLTSSSK

SEQ ID NO: 15564 - protein, 13 aa, Severe acute respiratory syndrome coronavirus 2
  REGION 1..13: note = Table B: HLA-DRB1*01:03L HLA-DRB1*04:02L HLA-DRB1*04:04L HLA-DRB1*04:05L HLA-DRB1*08:04L HLA-DRB3*02:01L HLA-DRB1*14:01L HLA-DPA1*01:02-B1*04:01L HLA-DRB1*04:08L
EHFIETISLAGSY

SEQ ID NO: 15565 - protein, 12 aa, Severe acute respiratory syndrome coronavirus 2
  REGION 1..12: note = Table B: HLA-DRB1*01:03L HLA-DRB1*04:04L HLA-DRB1*04:05L HLA-DRB1*08:04L HLA-DRB1*04:10L HLA-DRB1*10:01L HLA-DRB1*04:08L HLA-DRB1*15:03L
FIETISLAGSYK

SEQ ID NO: 15566 - protein, 12 aa, Severe acute respiratory syndrome coronavirus 2
  REGION 1..12: note = Table B: HLA-DRB1*01:03L HLA-DRB1*04:04L HLA-DRB1*04:05L HLA-DRB1*08:04L HLA-DPA1*01:03-B1*03:01L HLA-DQA1*01:01-B1*05:01L HLA-DQA1*01-B1*05L HLA-DRB1*04:10L HLA-DRB1*10:01L HLA-DRB1*16:01L HLA-DRB1*04:08L HLA-DRB1*08:03L
  REGION 1..12: note = CONT. FROM ABOVE: HLA-DRB1*15:03L
IETISLAGSYKD

SEQ ID NO: 15567 - protein, 15 aa, Severe acute respiratory syndrome coronavirus 2
  REGION 1..15: note = Table B: HLA-DRB1*01:03L HLA-DRB1*08:04L HLA-DRB1*08:01L
ISLAGSYKDWSYSGQ

SEQ ID NO: 15568 - protein, 13 aa, Severe acute respiratory syndrome coronavirus 2
  REGION 1..13: note = Table B: HLA-DRB1*01:03L HLA-DRB1*04:02L HLA-DRB1*04:05L HLA-DRB1*01:02L HLA-DPA1*01:03-B1*03:01L HLA-DQA1*01:01-B1*05:01L HLA-DRB1*08:01L HLA-DPA1*01:03-B1*04:02L HLA-DRB1*16:01L HLA-DRB1*04:08L
KDWSYSGQSTQLG

SEQ ID NO: 15569 - protein, 13 aa, Severe acute respiratory syndrome coronavirus 2
  REGION 1..13: note = Table B: HLA-DRB1*01:03L HLA-DRB1*01:02L HLA-DRB1*16:01L HLA-DQA1*01:03-B1*06:01L HLA-DQA1*02:01-B1*03:03L
TQLGIEFLKRGDK

SEQ ID NO: 15570 - protein, 12 aa, Severe acute respiratory syndrome coronavirus 2
  REGION 1..12: note = Table B: HLA-DRB1*01:03L HLA-DQA1*01:02-B1*06:02L HLA-DRB1*01:02L HLA-DRB1*14:01L HLA-DRB1*16:01L
LGIEFLKRGDKS

SEQ ID NO: 15571 - protein, 10 aa, Severe acute respiratory syndrome coronavirus 2
  REGION 1..10: note = Table B: HLA-DRB1*01:03L HLA-DQA1*01:02-B1*06:02L HLA-DRB1*03:01L HLA-DRB1*14:02L HLA-DRB1*11:01L HLA-DPA1*01:03-B1*04:02L HLA-DQA1*02:01-B1*03:03L
FLKRGDKSVY

SEQ ID NO: 15572 - protein, 13 aa, Severe acute respiratory syndrome coronavirus 2
  REGION 1..13: note = Table B: HLA-DRB1*01:03L HLA-DRB1*04:04L HLA-DQA1*01:02-B1*06:02L HLA-DRB1*01:02L HLA-DRB1*08:01L HLA-DRB1*16:01L HLA-DRB1*04:08L HLA-DQA1*02:01-B1*03:03L HLA-DRB1*15:03L
DNLKTLLSLREVR

SEQ ID NO: 15573 - protein, 13 aa, Severe acute respiratory syndrome coronavirus 2
  REGION 1..13: note = Table B: HLA-DRB1*01:03L HLA-DRB1*12:01L HLA-DRB1*16:01L HLA-DRB1*04:08L
KTLLSLREVRTIK

SEQ ID NO: 15574 - protein, 13 aa, Severe acute respiratory syndrome coronavirus 2
  REGION 1..13: note = Table B: HLA-DRB1*01:03L HLA-DRB1*12:01L HLA-DRB1*04:08L
LSLREVRTIKVFT

SEQ ID NO: 15575 - protein, 12 aa, Severe acute respiratory syndrome coronavirus 2
  REGION 1..12: note = Table B: HLA-DRB1*01:03L HLA-DRB1*01:02L HLA-DRB1*16:01L HLA-DRB1*04:08L
TKIKPHNSHEGK

SEQ ID NO: 15576 - protein, 10 aa, Severe acute respiratory syndrome coronavirus 2
  REGION 1..10: note = Table B: HLA-DRB1*01:03L HLA-DPA1*03:01-B1*04:02L HLA-DPA1*01:03-B1*04:01L HLA-DPA1*01:03-B1*04:02L HLA-DPA1*03:01-B1*105:01L HLA-DPA1*01:02-B1*04:01L HLA-DRB1*16:01L HLA-DRB1*04:08L
LRVEAFEYYH

SEQ ID NO: 15577 - protein, 14 aa, Severe acute respiratory syndrome coronavirus 2
  REGION 1..14: note = Table B: HLA-DRB1*01:03L HLA-DRB1*01:02L HLA-DRB1*08:01L HLA-DRB1*12:01L HLA-DRB1*16:01L HLA-DRB1*04:08L HLA-DQA1*02:01-B1*03:03L HLA-DRB1*15:03L
DPSFLGRYMSALNH

SEQ ID NO: 15578 - protein, 11 aa, Severe acute respiratory syndrome coronavirus 2
  REGION 1..11: note = Table B: HLA-DRB1*01:03L
GRYMSALNHTK

SEQ ID NO: 15579 - protein, 14 aa, Severe acute respiratory syndrome coronavirus 2
  REGION 1..14: note = Table B: HLA-DRB1*01:03L HLA-DQA1*01:02-B1*06:02L HLA-DRB1*08:04L HLA-DRB1*11:01L
ALNHTKKWKYPQVN

SEQ ID NO: 15580 - protein, 14 aa, Severe acute respiratory syndrome coronavirus 2
  REGION 1..14: note = Table B: HLA-DRB1*01:03L HLA-DQA1*01:02-B1*06:02L HLA-DRB1*14:01L HLA-DRB1*11:04L
LNHTKKWKYPQVNG

SEQ ID NO: 15581 - protein, 14 aa, Severe acute respiratory syndrome coronavirus 2
  REGION 1..14: note = Table B: HLA-DRB1*01:03L HLA-DRB1*04:05L HLA-DQA1*01:02-B1*06:02L HLA-DRB1*15:03L
TKKWKYPQVNGLTS

SEQ ID NO: 15582 - protein, 14 aa, Severe acute respiratory syndrome coronavirus 2
  REGION 1..14: note = Table B: HLA-DRB1*01:03L HLA-DRB1*04:05L HLA-DRB1*04:08L
LTSIKWADNNCYLA

SEQ ID NO: 15583 - protein, 13 aa, Severe acute respiratory syndrome coronavirus 2
  REGION 1..13: note = Table B: HLA-DRB1*01:03L HLA-DRB1*04:04L HLA-DPA1*01:03-B1*03:01L HLA-DRB1*11:03L HLA-DQA1*01-B1*05L HLA-DRB1*04:10L HLA-DPA1*02:01-B1*13:01L HLA-DRB1*14:54L HLA-DRB1*07:01L HLA-DRB1*10:01L
ATALLTLQQIELK

SEQ ID NO: 15584 - protein, 16 aa, Severe acute respiratory syndrome coronavirus 2
  REGION 1..16: note = Table B: HLA-DRB1*01:03L HLA-DPA1*01:03-B1*03:01L HLA-DRB1*14:02L HLA-DPA1*01:03-B1*04:02L HLA-DPA1*02:01-B1*13:01L
TALLTLQQIELKFNPP

SEQ ID NO: 15585 - protein, 13 aa, Severe acute respiratory syndrome coronavirus 2
  REGION 1..13: note = Table B: HLA-DRB1*01:03L HLA-DRB1*04:04L HLA-DQA1*01:02-B1*06:02L HLA-DRB1*01:02L HLA-DRB1*11:04L HLA-DRB1*08:01L HLA-DQA1*01-B1*05L HLA-DRB1*04:10L HLA-DRB1*12:01L HLA-DRB1*14:54L HLA-DRB1*04:08L HLA-DRB1*15:03L
QQIELKFNPPALQ

SEQ ID NO: 15586 - protein, 15 aa, Severe acute respiratory syndrome coronavirus 2
  REGION 1..15: note = Table B: HLA-DRB1*01:03L HLA-DRB1*01:02L HLA-DRB1*08:01L HLA-DPA1*01:02-B1*04:01L HLA-DRB1*16:01L HLA-DQA1*01:03-B1*06:01L HLA-DRB1*04:08L HLA-DQA1*02:01-B1*03:03L
NPPALQDAYYRARAG

SEQ ID NO: 15587 - protein, 16 aa, Severe acute respiratory syndrome coronavirus 2
  REGION 1..16: note = Table B: HLA-DRB1*01:03L HLA-DRB1*01:02L HLA-DRB1*04:08L
ILAYCNKTVGELGDVR

SEQ ID NO: 15588 - protein, 14 aa, Severe acute respiratory syndrome coronavirus 2
  REGION 1..14: note = Table B: HLA-DRB1*01:03L HLA-DRB1*04:08L
LGDVRETMSYLFQH

SEQ ID NO: 15589 - protein, 14 aa, Severe acute respiratory syndrome coronavirus 2
  REGION 1..14: note = Table B: HLA-DRB1*01:03L HLA-DPA1*02:01-B1*13:01L HLA-DRB1*04:08L
GDVRETMSYLFQHA

SEQ ID NO: 15590 - protein, 11 aa, Severe acute respiratory syndrome coronavirus 2
  REGION 1..11: note = Table B: HLA-DRB1*01:03L HLA-DQA1*01:02-B1*06:02L HLA-DRB1*01:02L HLA-DQA1*03:01-B1*03:02L HLA-DRB1*16:01L HLA-DRB1*04:08L HLA-DQA1*02:01-B1*03:03L
FQHANLDSCKR

SEQ ID NO: 15591 - protein, 10 aa, Severe acute respiratory syndrome coronavirus 2
  REGION 1..10: note = Table B: HLA-DRB1*01:03L HLA-DPA1*03:01-B1*04:02L HLA-DPA1*01:03-B1*04:01L HLA-DPA1*03:01-B1*105:01L HLA-DQA1*03:01-B1*03:02L HLA-DPA1*01:02-B1*04:01L HLA-DRB1*16:01L HLA-DQA1*01:03-B1*06:01L HLA-DRB1*04:08L
  REGION 1..10: note = CONT. FROM ABOVE: HLA-DQA1*02:01-B1*03:03L
TLSYEQFKKG

SEQ ID NO: 15592 - protein, 14 aa, Severe acute respiratory syndrome coronavirus 2
  REGION 1..14: note = Table B: HLA-DRB1*01:03L HLA-DRB1*15:03L
SYEQFKKGVQIPCT

SEQ ID NO: 15593 - protein, 14 aa, Severe acute respiratory syndrome coronavirus 2
  REGION 1..14: note = Table B: HLA-DRB1*01:03L HLA-DRB1*01:02L HLA-DRB1*08:01L HLA-DRB1*04:08L
SEYTGNYQCGHYKH

SEQ ID NO: 15594 - protein, 12 aa, Severe acute respiratory syndrome coronavirus 2
  REGION 1..12: note = Table B: HLA-DRB1*01:03L HLA-DQA1*01:02-B1*06:02L HLA-DRB1*01:02L HLA-DRB1*08:01L HLA-DRB1*11:01L HLA-DPA1*01:03-B1*04:01L HLA-DPA1*01:03-B1*04:02L HLA-DRB1*12:01L HLA-DPA1*01:03-B1*02:01L
  REGION 1..12: note = CONT. FROM ABOVE: HLA-DQA1*01:03-B1*06:01L HLA-DRB1*15:03L
GNYQCGHYKHIT

SEQ ID NO: 15595 - protein, 12 aa, Severe acute respiratory syndrome coronavirus 2
  REGION 1..12: note = Table B: HLA-DRB1*01:03L
NYQCGHYKHITS

SEQ ID NO: 15596 - protein, 10 aa, Severe acute respiratory syndrome coronavirus 2
  REGION 1..10: note = Table B: HLA-DRB1*01:03L HLA-DRB1*04:05L HLA-DRB1*01:02L HLA-DRB1*08:01L HLA-DQA1*03:01-B1*03:02L HLA-DPA1*01:02-B1*04:01L HLA-DRB1*16:01L HLA-DRB1*04:08L HLA-DQA1*02:01-B1*03:03L
HYKHITSKET

SEQ ID NO: 15597 - protein, 15 aa, Severe acute respiratory syndrome coronavirus 2
  REGION 1..15: note = Table B: HLA-DRB1*01:03L HLA-DRB1*04:05L HLA-DRB1*08:04L HLA-DRB1*08:01L HLA-DRB1*12:01L HLA-DPA1*02:01-B1*13:01L HLA-DRB1*16:01L HLA-DRB1*04:08L
GALLTKSSEYKGPIT

SEQ ID NO: 15598 - protein, 14 aa, Severe acute respiratory syndrome coronavirus 2
  REGION 1..14: note = Table B: HLA-DRB1*01:03L HLA-DRB1*04:08L
DVFYKENSYTTTIK

SEQ ID NO: 15599 - protein, 14 aa, Severe acute respiratory syndrome coronavirus 2
  REGION 1..14: note = Table B: HLA-DRB1*01:03L HLA-DRB1*01:02L HLA-DRB1*12:01L HLA-DRB1*16:01L HLA-DRB1*04:08L HLA-DRB1*15:03L
KPVTYKLDGVVCTE

SEQ ID NO: 15600 - protein, 14 aa, Severe acute respiratory syndrome coronavirus 2
  REGION 1..14: note = Table B: HLA-DRB1*01:03L HLA-DRB1*01:02L HLA-DPA1*03:01-B1*105:01L
YKLDGVVCTEIDPK

SEQ ID NO: 15601 - protein, 14 aa, Severe acute respiratory syndrome coronavirus 2
  REGION 1..14: note = Table B: HLA-DRB1*01:03L HLA-DRB1*08:04L HLA-DPA1*03:01-B1*04:02L HLA-DPA1*01:03-B1*04:02L HLA-DPA1*02:01-B1*13:01L HLA-DRB1*15:03L
ASFDNFKFVCDNIK

SEQ ID NO: 15602 - protein, 13 aa, Severe acute respiratory syndrome coronavirus 2
  REGION 1..13: note = Table B: HLA-DRB1*01:03L HLA-DQA1*01:02-B1*06:02L HLA-DRB1*14:01L HLA-DQA1*01-B1*05L HLA-DRB1*12:01L HLA-DPA1*03:01-B1*105:01L HLA-DRB1*16:01L HLA-DRB1*04:08L
DNFKFVCDNIKFA

SEQ ID NO: 15603 - protein, 12 aa, Severe acute respiratory syndrome coronavirus 2
  REGION 1..12: note = Table B: HLA-DRB1*01:03L HLA-DRB1*04:04L HLA-DRB1*04:10L HLA-DRB1*04:08L
NIKFADDLNQLT

SEQ ID NO: 15604 - protein, 10 aa, Severe acute respiratory syndrome coronavirus 2
  REGION 1..10: note = Table B: HLA-DRB1*01:03L HLA-DQA1*03:01-B1*03:02L HLA-DRB1*16:01L HLA-DQA1*02:01-B1*03:03L
TGYKKPASRE

SEQ ID NO: 15605 - protein, 10 aa, Severe acute respiratory syndrome coronavirus 2
  REGION 1..10: note = Table B: HLA-DRB1*01:03L HLA-DQA1*03:01-B1*03:02L
YKKPASRELK

SEQ ID NO: 15606 - protein, 12 aa, Severe acute respiratory syndrome coronavirus 2
  REGION 1..12: note = Table B: HLA-DRB1*01:03L HLA-DPA1*01:03-B1*04:02L HLA-DRB1*12:01L HLA-DRB1*04:08L HLA-DRB1*15:03L
SRELKVTFFPDL

SEQ ID NO: 15607 - protein, 12 aa, Severe acute respiratory syndrome coronavirus 2
  REGION 1..12: note = Table B: HLA-DRB1*01:03L HLA-DQA1*01:02-B1*06:02L HLA-DRB1*01:02L HLA-DPA1*01:03-B1*03:01L HLA-DRB1*08:01L HLA-DRB1*12:01L HLA-DPA1*02:01-B1*13:01L HLA-DRB1*04:08L HLA-DQA1*02:01-B1*03:03L HLA-DRB1*15:03L
RELKVTFFPDLN

SEQ ID NO: 15608 - protein, 12 aa, Severe acute respiratory syndrome coronavirus 2
  REGION 1..12: note = Table B: HLA-DRB1*01:03L HLA-DRB1*04:04L HLA-DQA1*01:02-B1*06:02L HLA-DRB1*01:02L HLA-DPA1*03:01-B1*04:02L HLA-DRB1*14:01L HLA-DRB1*12:01L HLA-DPA1*02:01-B1*13:01L HLA-DPA1*03:01-B1*105:01L
  REGION 1..12: note = CONT. FROM ABOVE: HLA-DRB1*14:54L HLA-DRB1*04:08L
KVTFFPDLNGDV

SEQ ID NO: 15609 - protein, 13 aa, Severe acute respiratory syndrome coronavirus 2
  REGION 1..13: note = Table B: HLA-DRB1*01:03L HLA-DRB1*04:02L HLA-DRB1*04:05L HLA-DRB1*04:08L
PDLNGDVVAIDYK

SEQ ID NO: 15610 - protein, 11 aa, Severe acute respiratory syndrome coronavirus 2
  REGION 1..11: note = Table B: HLA-DRB1*01:03L HLA-DRB1*08:01L HLA-DPA1*01:02-B1*04:01L HLA-DRB1*04:08L
IDYKHYTPSFK

SEQ ID NO: 15611 - protein, 11 aa, Severe acute respiratory syndrome coronavirus 2
  REGION 1..11: note = Table B: HLA-DRB1*01:03L HLA-DRB1*01:02L HLA-DRB1*16:01L
YKHYTPSFKKG

SEQ ID NO: 15612 - protein, 10 aa, Severe acute respiratory syndrome coronavirus 2
  REGION 1..10: note = Table B: HLA-DRB1*01:03L
YTPSFKKGAK

SEQ ID NO: 15613 - protein, 13 aa, Severe acute respiratory syndrome coronavirus 2
  REGION 1..13: note = Table B: HLA-DRB1*01:03L HLA-DRB1*01:02L HLA-DRB1*11:04L HLA-DRB1*08:01L HLA-DRB1*11:01L HLA-DRB1*16:01L HLA-DRB1*04:08L
TPSFKKGAKLLHK

SEQ ID NO: 15614 - protein, 13 aa, Severe acute respiratory syndrome coronavirus 2
  REGION 1..13: note = Table B: HLA-DRB1*01:03L HLA-DRB1*08:01L HLA-DRB1*11:01L HLA-DRB1*04:08L
PSFKKGAKLLHKP

SEQ ID NO: 15615 - protein, 14 aa, Severe acute respiratory syndrome coronavirus 2
  REGION 1..14: note = Table B: HLA-DRB1*01:03L HLA-DRB1*04:08L
KKGAKLLHKPIVWH

SEQ ID NO: 15616 - protein, 12 aa, Severe acute respiratory syndrome coronavirus 2
  REGION 1..12: note = Table B: HLA-DRB1*01:03L HLA-DRB1*04:05L HLA-DRB1*01:02L HLA-DRB1*12:01L HLA-DRB1*16:01L HLA-DRB1*04:08L HLA-DQA1*02:01-B1*03:03L HLA-DRB1*15:03L
PIVWHVNNATNK

SEQ ID NO: 15617 - protein, 13 aa, Severe acute respiratory syndrome coronavirus 2
  REGION 1..13: note = Table B: HLA-DRB1*01:03L HLA-DRB1*04:02L HLA-DRB1*04:05L HLA-DRB1*01:02L HLA-DPA1*01:03-B1*03:01L HLA-DQA1*01:01-B1*05:01L HLA-DPA1*02:01-B1*13:01L HLA-DRB1*07:01L HLA-DRB1*04:08L HLA-DRB1*15:03L
KPVETSNSFDVLK

SEQ ID NO: 15618 - protein, 12 aa, Severe acute respiratory syndrome coronavirus 2
  REGION 1..12: note = Table B: HLA-DRB1*01:03L HLA-DPA1*03:01-B1*04:02L HLA-DQA1*05:01-B1*02:01L HLA-DPA1*01:03-B1*04:01L HLA-DPA1*01:03-B1*04:02L HLA-DQA1*03:01-B1*03:02L HLA-DQA1*05:05-B1*03:01L HLA-DRB1*16:01L HLA-DRB1*04:08L
  REGION 1..12: note = CONT. FROM ABOVE: HLA-DQA1*02:01-B1*03:03L
DNLACEDLKPVS

SEQ ID NO: 15619 - protein, 13 aa, Severe acute respiratory syndrome coronavirus 2
  REGION 1..13: note = Table B: HLA-DRB1*01:03L HLA-DRB1*04:02L HLA-DQA1*01:02-B1*06:02L HLA-DRB4*03:01NL HLA-DRB1*04:10L HLA-DRB1*12:01L HLA-DPA1*02:01-B1*13:01L HLA-DRB1*14:17L
LKPVSEEVVENPT

SEQ ID NO: 15620 - protein, 15 aa, Severe acute respiratory syndrome coronavirus 2
  REGION 1..15: note = Table B: HLA-DRB1*01:03L HLA-DRB1*04:02L HLA-DRB1*04:05L HLA-DRB1*03:01L HLA-DRB1*11:02L HLA-DRB1*11:03L HLA-DRB1*11:04L HLA-DRB1*11:01L HLA-DRB3*01:01L HLA-DRB1*04:08L
KDVLECNVKTTEVVG

SEQ ID NO: 15621 - protein, 12 aa, Severe acute respiratory syndrome coronavirus 2
  REGION 1..12: note = Table B: HLA-DRB1*01:03L HLA-DRB1*04:05L HLA-DRB4*03:01NL HLA-DQA1*01:01-B1*05:01L HLA-DRB1*14:17L HLA-DRB1*16:01L HLA-DRB1*04:08L
EVVGDIILKPAN

SEQ ID NO: 15622 - protein, 12 aa, Severe acute respiratory syndrome coronavirus 2
  REGION 1..12: note = Table B: HLA-DRB1*01:03L HLA-DQA1*01:01-B1*05:01L HLA-DRB1*08:01L HLA-DRB1*04:08L
VVGDIILKPANN

SEQ ID NO: 15623 - protein, 15 aa, Severe acute respiratory syndrome coronavirus 2
  REGION 1..15: note = Table B: HLA-DRB1*01:03L HLA-DRB1*04:08L
IKKPNELSRVLGLKT

SEQ ID NO: 15624 - protein, 15 aa, Severe acute respiratory syndrome coronavirus 2
  REGION 1..15: note = Table B: HLA-DRB1*01:03L HLA-DRB1*12:01L HLA-DRB1*04:08L
KPNELSRVLGLKTLA

SEQ ID NO: 15625 - protein, 11 aa, Severe acute respiratory syndrome coronavirus 2
  REGION 1..11: note = Table B: HLA-DRB1*01:03L HLA-DRB1*04:08L
RVLGLKTLATH

SEQ ID NO: 15626 - protein, 12 aa, Severe acute respiratory syndrome coronavirus 2
  REGION 1..12: note = Table B: HLA-DRB1*01:03L HLA-DRB1*04:02L HLA-DRB1*01:01L HLA-DRB1*04:08L
GLKTLATHGLAA

SEQ ID NO: 15627 - protein, 14 aa, Severe acute respiratory syndrome coronavirus 2
  REGION 1..14: note = Table B: HLA-DRB1*01:03L HLA-DRB1*12:01L HLA-DRB1*16:01L HLA-DRB1*04:08L HLA-DRB1*15:03L
TNIVTRCLNRVCTN

SEQ ID NO: 15628 - protein, 14 aa, Severe acute respiratory syndrome coronavirus 2
  REGION 1..14: note = Table B: HLA-DRB1*01:03L HLA-DRB1*01:02L HLA-DRB1*04:08L
LLQLCTFTRSTNSR

SEQ ID NO: 15629 - protein, 16 aa, Severe acute respiratory syndrome coronavirus 2
  REGION 1..16: note = Table B: HLA-DRB1*01:03L HLA-DRB1*08:04L HLA-DRB1*15:03L
AKNTVKSVGKFCLEAS

SEQ ID NO: 15630 - protein, 14 aa, Severe acute respiratory syndrome coronavirus 2
  REGION 1..14: note = Table B: HLA-DRB1*01:03L HLA-DQA1*01:02-B1*06:02L HLA-DRB1*01:02L HLA-DRB1*14:01L HLA-DPA1*02:01-B1*13:01L HLA-DPA1*03:01-B1*105:01L HLA-DRB1*16:01L HLA-DRB1*04:08L
VGKFCLEASFNYLK

SEQ ID NO: 15631 - protein, 13 aa, Severe acute respiratory syndrome coronavirus 2
  REGION 1..13: note = Table B: HLA-DRB1*01:03L HLA-DRB1*04:05L HLA-DRB1*14:02L HLA-DPA1*01:03-B1*04:01L HLA-DPA1*01:03-B1*04:02L HLA-DPA1*01:03-B1*104:01L HLA-DRB1*07:01L HLA-DRB1*10:01L HLA-DRB1*04:08L
SPNFSKLINIIIW

SEQ ID NO: 15632 - protein, 14 aa, Severe acute respiratory syndrome coronavirus 2
  REGION 1..14: note = Table B: HLA-DRB1*01:03L HLA-DRB1*04:04L HLA-DRB1*04:05L HLA-DRB1*01:02L HLA-DRB4*03:01NL HLA-DRB1*11:04L HLA-DRB1*12:01L HLA-DPA1*03:01-B1*105:01L HLA-DRB1*10:01L HLA-DRB1*16:01L HLA-DRB1*04:08L HLA-DRB1*15:03L
AALGVLMSNLGMPS

SEQ ID NO: 15633 - protein, 15 aa, Severe acute respiratory syndrome coronavirus 2
  REGION 1..15: note = Table B: HLA-DRB1*01:03L HLA-DRB1*04:02L HLA-DRB1*04:04L HLA-DRB1*04:05L HLA-DRB1*08:04L HLA-DRB3*02:01L HLA-DRB1*04:10L HLA-DPA1*01:03-B1*104:01L HLA-DRB1*16:01L HLA-DRB1*04:08L
YPSLETIQITISSFK

SEQ ID NO: 15634 - protein, 13 aa, Severe acute respiratory syndrome coronavirus 2
  REGION 1..13: note = Table B: HLA-DRB1*01:03L HLA-DRB1*04:02L HLA-DRB1*04:04L HLA-DRB1*04:05L HLA-DRB1*07:01L HLA-DRB1*04:08L
ETIQITISSFKWD

SEQ ID NO: 15635 - protein, 10 aa, Severe acute respiratory syndrome coronavirus 2
  REGION 1..10: note = Table B: HLA-DRB1*01:03L HLA-DQA1*01:02-B1*06:02L HLA-DRB1*14:02L HLA-DQA1*05:01-B1*02:01L HLA-DPA1*02:01-B1*13:01L HLA-DPA1*03:01-B1*105:01L HLA-DQA1*01:03-B1*06:01L HLA-DQA1*02:01-B1*03:03L
  REGION 1..10: note = CONT. FROM ABOVE: HLA-DRB1*15:03L
SSFKWDLTAF

SEQ ID NO: 15636 - protein, 12 aa, Severe acute respiratory syndrome coronavirus 2
  REGION 1..12: note = Table B: HLA-DRB1*01:03L HLA-DQA1*01:02-B1*06:02L HLA-DRB1*01:02L HLA-DPA1*01:03-B1*03:01L HLA-DRB1*14:01L HLA-DRB1*12:01L HLA-DPA1*01:03-B1*02:01L HLA-DRB1*04:08L HLA-DRB1*15:03L
FKWDLTAFGLVA

SEQ ID NO: 15637 - protein, 12 aa, Severe acute respiratory syndrome coronavirus 2
  REGION 1..12: note = Table B: HLA-DRB1*01:03L HLA-DQA1*01:02-B1*06:02L HLA-DRB1*01:02L HLA-DPA1*01:03-B1*03:01L HLA-DRB1*12:01L HLA-DPA1*01:03-B1*02:01L HLA-DRB1*04:08L HLA-DRB1*15:03L
KWDLTAFGLVAE

SEQ ID NO: 15638 - protein, 13 aa, Severe acute respiratory syndrome coronavirus 2
  REGION 1..13: note = Table B: HLA-DRB1*01:03L HLA-DRB1*01:02L HLA-DPA1*01:03-B1*03:01L HLA-DQA1*01-B1*05L HLA-DRB1*12:01L HLA-DPA1*01:03-B1*02:01L HLA-DRB1*16:01L HLA-DRB1*04:08L HLA-DRB1*15:03L
VAEWFLAYILFTR

SEQ ID NO: 15639 - protein, 12 aa, Severe acute respiratory syndrome coronavirus 2
  REGION 1..12: note = Table B: HLA-DRB1*01:03L HLA-DRB1*08:04L HLA-DPA1*01:03-B1*03:01L HLA-DRB1*08:01L HLA-DPA1*02:01-B1*13:01L HLA-DPA1*01:03-B1*02:01L
FSYFAVHFISNS

SEQ ID NO: 15640 - protein, 11 aa, Severe acute respiratory syndrome coronavirus 2
  REGION 1..11: note = Table B: HLA-DRB1*01:03L HLA-DRB1*08:01L HLA-DRB1*04:08L
SFYYVWKSYVH

SEQ ID NO: 15641 - protein, 12 aa, Severe acute respiratory syndrome coronavirus 2
  REGION 1..12: note = Table B: HLA-DRB1*01:03L HLA-DPA1*01:03-B1*04:02L HLA-DRB1*04:08L
FYYVWKSYVHVV

SEQ ID NO: 15642 - protein, 11 aa, Severe acute respiratory syndrome coronavirus 2
  REGION 1..11: note = Table B: HLA-DRB1*01:03L HLA-DQA1*01:02-B1*06:02L HLA-DRB1*01:02L HLA-DRB1*08:01L HLA-DPA1*01:03-B1*04:02L HLA-DRB1*12:01L HLA-DPA1*01:03-B1*02:01L HLA-DRB1*04:08L HLA-DQA1*02:01-B1*03:03L HLA-DRB1*15:03L
YVWKSYVHVVD

SEQ ID NO: 15643 - protein, 14 aa, Severe acute respiratory syndrome coronavirus 2
  REGION 1..14: note = Table B: HLA-DRB1*01:03L HLA-DRB1*04:04L HLA-DRB1*08:01L HLA-DRB1*12:01L HLA-DPA1*02:01-B1*13:01L HLA-DRB1*16:01L
KSYVHVVDGCNSST

SEQ ID NO: 15644 - protein, 14 aa, Severe acute respiratory syndrome coronavirus 2
  REGION 1..14: note = Table B: HLA-DRB1*01:03L HLA-DRB1*01:02L HLA-DRB1*14:01L HLA-DRB1*11:04L HLA-DRB1*08:01L HLA-DRB1*11:01L HLA-DRB3*01:01L HLA-DRB1*16:01L HLA-DRB1*04:08L
STCMMCYKRNRATR

SEQ ID NO: 15645 - protein, 14 aa, Severe acute respiratory syndrome coronavirus 2
  REGION 1..14: note = Table B: HLA-DRB1*01:03L HLA-DRB1*04:04L HLA-DRB1*04:05L HLA-DPA1*01:03-B1*03:01L HLA-DRB1*08:01L HLA-DRB1*12:01L HLA-DPA1*02:01-B1*13:01L HLA-DPA1*01:02-B1*04:01L HLA-DRB1*07:01L HLA-DRB1*16:01L HLA-DRB1*15:03L
ATRVECTTIVNGVR

SEQ ID NO: 15646 - protein, 14 aa, Severe acute respiratory syndrome coronavirus 2
  REGION 1..14: note = Table B: HLA-DRB1*01:03L
TRVECTTIVNGVRR

SEQ ID NO: 15647 - protein, 13 aa, Severe acute respiratory syndrome coronavirus 2
  REGION 1..13: note = Table B: HLA-DRB1*01:03L HLA-DRB1*04:05L HLA-DRB1*01:02L HLA-DRB1*16:01L HLA-DRB1*04:08L HLA-DQA1*02:01-B1*03:03L
VRRSFYVYANGGK

SEQ ID NO: 15648 - protein, 13 aa, Severe acute respiratory syndrome coronavirus 2
  REGION 1..13: note = Table B: HLA-DRB1*01:03L HLA-DRB1*01:02L HLA-DRB1*16:01L
KGFCKLHNWNCVN

SEQ ID NO: 15649 - protein, 15 aa, Severe acute respiratory syndrome coronavirus 2
  REGION 1..15: note = Table B: HLA-DRB1*01:03L HLA-DRB1*01:02L HLA-DRB1*11:01L HLA-DRB1*04:08L
VARDLSLQFKRPINP

SEQ ID NO: 15650 - protein, 14 aa, Severe acute respiratory syndrome coronavirus 2
  REGION 1..14: note = Table B: HLA-DRB1*01:03L HLA-DRB1*01:02L HLA-DRB1*04:08L HLA-DRB1*15:03L
DLSLQFKRPINPTD

SEQ ID NO: 15651 - protein, 12 aa, Severe acute respiratory syndrome coronavirus 2
  REGION 1..12: note = Table B: HLA-DRB1*01:03L HLA-DQA1*01:02-B1*06:02L HLA-DRB1*08:04L HLA-DRB1*04:10L HLA-DRB1*16:01L HLA-DRB1*04:08L HLA-DRB1*08:03L
LQFKRPINPTDQ

SEQ ID NO: 15652 - protein, 13 aa, Severe acute respiratory syndrome coronavirus 2
  REGION 1..13: note = Table B: HLA-DRB1*01:03L HLA-DRB1*04:04L HLA-DRB1*04:05L HLA-DRB1*01:02L HLA-DRB1*14:01L HLA-DRB1*12:01L HLA-DRB1*04:08L HLA-DRB1*15:01L
NGSIHLYFDKAGQ

SEQ ID NO: 15653 - protein, 10 aa, Severe acute respiratory syndrome coronavirus 2
  REGION 1..10: note = Table B: HLA-DRB1*01:03L HLA-DRB1*04:05L HLA-DQA1*01:02-B1*06:02L HLA-DPA1*02:01-B1*13:01L HLA-DRB1*16:01L HLA-DQA1*01:03-B1*06:01L HLA-DQA1*02:01-B1*03:03L
TYERHSLSHF

SEQ ID NO: 15654 - protein, 14 aa, Severe acute respiratory syndrome coronavirus 2
  REGION 1..14: note = Table B: HLA-DRB1*01:03L HLA-DRB1*04:04L HLA-DRB1*12:01L
RHSLSHFVNLDNLR

SEQ ID NO: 15655 - protein, 14 aa, Severe acute respiratory syndrome coronavirus 2
  REGION 1..14: note = Table B: HLA-DRB1*01:03L HLA-DRB1*04:02L HLA-DQA1*01:02-B1*06:02L HLA-DRB1*01:02L
DNLRANNTKGSLPI

SEQ ID NO: 15656 - protein, 14 aa, Severe acute respiratory syndrome coronavirus 2
  REGION 1..14: note = Table B: HLA-DRB1*01:03L HLA-DRB1*01:02L HLA-DRB1*12:01L
NLRANNTKGSLPIN

SEQ ID NO: 15657 - protein, 11 aa, Severe acute respiratory syndrome coronavirus 2
  REGION 1..11: note = Table B: HLA-DRB1*01:03L HLA-DRB1*03:01L HLA-DRB1*16:01L
IVFDGKSKCEE

SEQ ID NO: 15658 - protein, 15 aa, Severe acute respiratory syndrome coronavirus 2
  REGION 1..15: note = Table B: HLA-DRB1*01:03L HLA-DPA1*01:03-B1*04:01L HLA-DRB1*16:01L HLA-DRB1*04:08L
YSQLMCQPILLLDQA

SEQ ID NO: 15659 - protein, 12 aa, Severe acute respiratory syndrome coronavirus 2
  REGION 1..12: note = Table B: HLA-DRB1*01:03L HLA-DRB1*04:05L HLA-DPA1*01:03-B1*03:01L HLA-DRB1*14:01L HLA-DRB1*11:03L HLA-DRB1*11:04L HLA-DRB1*14:02L HLA-DRB5*01:01L HLA-DQA1*05:05-B1*03:19L HLA-DPA1*01:03-B1*04:01L
  REGION 1..12: note = CONT. FROM ABOVE: HLA-DRB1*04:10L HLA-DRB1*09:01L HLA-DRB1*12:02 L HLA-DRB1*14:54L HLA-DQA1*05:05-B1*03:01L HLA-DPA1*01:02-B1*04: 01L HLA-DRB1*04:08L
NTFSSTFNVPME

SEQ ID NO: 15660 - protein, 14 aa, Severe acute respiratory syndrome coronavirus 2
  REGION 1..14: note = Table B: HLA-DRB1*01:03L HLA-DRB1*04:04L HLA-DQA1*01:02-B1*06:02L HLA-DRB1*01:02L HLA-DRB1*16:01L HLA-DRB1*04:08L
NVPMEKLKTLVATA

SEQ ID NO: 15661 - protein, 11 aa, Severe acute respiratory syndrome coronavirus 2
  REGION 1..11: note = Table B: HLA-DRB1*01:03L
ISAARQGFVDS

SEQ ID NO: 15662 - protein, 12 aa, Severe acute respiratory syndrome coronavirus 2
  REGION 1..12: note = Table B: HLA-DRB1*01:03L HLA-DRB1*04:02L HLA-DRB1*04:05L HLA-DQA1*01:02-B1*06:02L HLA-DRB1*01:02L HLA-DQA1*01:01-B1*05:01L HLA-DRB1*12:01L HLA-DPA1*02:01-B1*13:01L HLA-DPA1*03:01-B1*105:01L
  REGION 1..12: note = CONT. FROM ABOVE: HLA-DRB1*04:08L HLA-DQA1*02:01-B1*03:03L HLA-D RB1*15:03L
AARQGFVDSDVE

SEQ ID NO: 15663 - protein, 13 aa, Severe acute respiratory syndrome coronavirus 2
  REGION 1..13: note = Table B: HLA-DRB1*01:03L HLA-DRB1*01:02L HLA-DQA1*01:01-B1*05:01L HLA-DRB1*04:10L HLA-DPA1*02:01-B1*13:01L HLA-DRB1*15:03L
ARQGFVDSDVETK

SEQ ID NO: 15664 - protein, 13 aa, Severe acute respiratory syndrome coronavirus 2
  REGION 1..13: note = Table B: HLA-DRB1*01:03L HLA-DRB1*04:05L HLA-DRB1*04:10L
LSHQSDIEVTGDS

SEQ ID NO: 15665 - protein, 14 aa, Severe acute respiratory syndrome coronavirus 2
  REGION 1..14: note = Table B: HLA-DRB1*01:03L HLA-DRB1*01:02L HLA-DRB1*08:04L HLA-DRB1*14:01L HLA-DRB1*11:04L HLA-DRB1*08:01L HLA-DRB1*11:01L HLA-DRB3*01:01L HLA-DRB1*04:08L
GACIDCSARHINAQ

SEQ ID NO: 15666 - protein, 12 aa, Severe acute respiratory syndrome coronavirus 2
  REGION 1..12: note = Table B: HLA-DRB1*01:03L HLA-DRB1*04:04L HLA-DRB1*01:02L HLA-DRB1*08:04L HLA-DPA1*01:03-B1*03:01L HLA-DRB1*08:01L HLA-DRB1*04:10L HLA-DRB1*04:08L
HNIALIWNVKDF

SEQ ID NO: 15667 - protein, 12 aa, Severe acute respiratory syndrome coronavirus 2
  REGION 1..12: note = Table B: HLA-DRB1*01:03L HLA-DQA1*01:02-B1*06:02L HLA-DRB1*01:02L HLA-DPA1*01:03-B1*03:01L HLA-DRB1*08:01L HLA-DQA1*05:01-B1*02:01L HLA-DPA1*01:03-B1*04:01L HLA-DRB1*12:01L HLA-DPA1*01:03-B1*02:01L HLA-DRB1*16:01L
  REGION 1..12: note = CONT. FROM ABOVE: HLA-DQA1*01:03-B1*06:01L HLA-DRB1*04:08L HLA-D RB1*15:03L
WNVKDFMSLSEQ

SEQ ID NO: 15668 - protein, 14 aa, Severe acute respiratory syndrome coronavirus 2
  REGION 1..14: note = Table B: HLA-DRB1*01:03L HLA-DRB1*14:01L HLA-DRB3*01:01L
FMSLSEQLRKQIRS

SEQ ID NO: 15669 - protein, 12 aa, Severe acute respiratory syndrome coronavirus 2
  REGION 1..12: note = Table B: HLA-DRB1*01:03L HLA-DRB1*01:02L HLA-DRB1*08:01L HLA-DRB1*04:08L
EQLRKQIRSAAK

SEQ ID NO: 15670 - protein, 11 aa, Severe acute respiratory syndrome coronavirus 2
  REGION 1..11: note = Table B: HLA-DRB1*01:03L HLA-DRB1*04:08L
LRKQIRSAAKK

SEQ ID NO: 15671 - protein, 12 aa, Severe acute respiratory syndrome coronavirus 2
  REGION 1..12: note = Table B: HLA-DRB1*01:03L HLA-DRB1*04:05L HLA-DRB1*01:02L HLA-DRB1*14:01L HLA-DRB1*08:01L HLA-DRB1*12:01L HLA-DRB1*16:01L HLA-DRB1*04:08L
RKQIRSAAKKNN

SEQ ID NO: 15672 - protein, 10 aa, Severe acute respiratory syndrome coronavirus 2
  REGION 1..10: note = Table B: HLA-DRB1*01:03L HLA-DQA1*03:01-B1*03:02L
AAKKNNLPFK

SEQ ID NO: 15673 - protein, 12 aa, Severe acute respiratory syndrome coronavirus 2
  REGION 1..12: note = Table B: HLA-DRB1*01:03L HLA-DRB1*01:02L HLA-DRB1*12:01L HLA-DRB1*16:01L HLA-DRB1*04:08L HLA-DRB1*15:03L
LPFKLTCATTRQ

SEQ ID NO: 15674 - protein, 14 aa, Severe acute respiratory syndrome coronavirus 2
  REGION 1..14: note = Table B: HLA-DRB1*01:03L HLA-DRB1*15:03L
PFKLTCATTRQVVN

SEQ ID NO: 15675 - protein, 12 aa, Severe acute respiratory syndrome coronavirus 2
  REGION 1..12: note = Table B: HLA-DRB1*01:03L HLA-DRB1*04:10L HLA-DRB1*04:08L
RQVVNVVTTKIA

SEQ ID NO: 15676 - protein, 13 aa, Severe acute respiratory syndrome coronavirus 2
  REGION 1..13: note = Table B: HLA-DRB1*01:03L HLA-DRB1*04:04L HLA-DRB1*04:08L
QVVNVVTTKIALK

SEQ ID NO: 15677 - protein, 12 aa, Severe acute respiratory syndrome coronavirus 2
  REGION 1..12: note = Table B: HLA-DRB1*01:03L HLA-DRB1*04:05L HLA-DQA1*01:02-B1*06:02L HLA-DRB1*01:02L HLA-DRB1*14:01L HLA-DRB1*08:01L HLA-DRB1*04:10L HLA-DRB1*12:01L HLA-DRB1*14:54L HLA-DRB1*16:01L HLA-DRB1*04:08L
VNVVTTKIALKG

SEQ ID NO: 15678 - protein, 12 aa, Severe acute respiratory syndrome coronavirus 2
  REGION 1..12: note = Table B: HLA-DRB1*01:03L HLA-DRB1*04:02L HLA-DRB1*04:05L HLA-DQA1*01:02-B1*06:02L HLA-DPA1*03:01-B1*04:02L HLA-DQA1*01-B1*05L HLA-DQA1*05:01-B1*02:01L HLA-DPA1*01:03-B1*04:01L HLA-DPA1*01:03-B1*04:02L
  REGION 1..12: note = CONT. FROM ABOVE: HLA-DRB1*12:01L HLA-DPA1*03:01-B1*105:01L HLA- DRB1*14:17L HLA-DPA1*01:02-B1*04:01L HLA-DRB1*16:01L HLA-DQA1*01 :03-B1*06:01L HLA-DRB1*04:08L HLA-DQA1*02:01-B1*03:03L HLA-DRB1* 15:03L
VAAIFYLITPVH

SEQ ID NO: 15679 - protein, 11 aa, Severe acute respiratory syndrome coronavirus 2
  REGION 1..11: note = Table B: HLA-DRB1*01:03L HLA-DRB1*04:05L HLA-DRB1*11:03L HLA-DRB1*14:02L HLA-DPA1*01:03-B1*04:02L HLA-DPA1*02:01-B1*13:01L HLA-DPA1*03:01-B1*105:01L HLA-DPA1*01:02-B1*04:01L HLA-DRB1*08:02L
  REGION 1..11: note = CONT. FROM ABOVE: HLA-DQA1*02:01-B1*03:03L
HTDFSSEIIGY

SEQ ID NO: 15680 - protein, 12 aa, Severe acute respiratory syndrome coronavirus 2
  REGION 1..12: note = Table B: HLA-DRB1*01:03L HLA-DPA1*01:03-B1*03:01L HLA-DRB1*08:01L HLA-DPA1*01:03-B1*04:02L HLA-DPA1*03:01-B1*105:01L HLA-DRB1*16:01L HLA-DRB1*04:08L
IDGGVTRDIAST

SEQ ID NO: 15681 - protein, 13 aa, Severe acute respiratory syndrome coronavirus 2
  REGION 1..13: note = Table B: HLA-DRB1*01:03L HLA-DRB1*04:04L HLA-DRB1*04:05L HLA-DRB1*01:02L HLA-DRB1*16:01L HLA-DRB1*04:08L
RDIASTDTCFANK

SEQ ID NO: 15682 - protein, 14 aa, Severe acute respiratory syndrome coronavirus 2
  REGION 1..14: note = Table B: HLA-DRB1*01:03L HLA-DRB1*04:04L HLA-DQA1*01:02-B1*06:02L HLA-DRB1*01:02L HLA-DRB1*12:01L HLA-DPA1*03:01-B1*105:01L HLA-DQA1*02:01-B1*03:03L
HADFDTWFSQRGGS

SEQ ID NO: 15683 - protein, 11 aa, Severe acute respiratory syndrome coronavirus 2
  REGION 1..11: note = Table B: HLA-DRB1*01:03L HLA-DRB1*04:02L HLA-DRB1*01:02L
ILRTTNGDFLH

SEQ ID NO: 15684 - protein, 12 aa, Severe acute respiratory syndrome coronavirus 2
  REGION 1..12: note = Table B: HLA-DRB1*01:03L HLA-DQA1*01:02-B1*06:02L HLA-DRB1*01:02L HLA-DRB1*08:04L HLA-DPA1*03:01-B1*04:02L HLA-DRB1*11:04L HLA-DRB1*08:01L HLA-DRB1*11:01L HLA-DPA1*01:03-B1*04:01L HLA-DPA1*01:03-B1*04:02L
  REGION 1..12: note = CONT. FROM ABOVE: HLA-DRB1*12:01L HLA-DPA1*03:01-B1*105:01L HLA- DPA1*01:03-B1*02:01L HLA-DRB1*16:01L HLA-DRB1*04:08L HLA-DRB1*15 :03L
LHFLPRVFSAVG

SEQ ID NO: 15685 - protein, 12 aa, Severe acute respiratory syndrome coronavirus 2
  REGION 1..12: note = Table B: HLA-DRB1*01:03L HLA-DQA1*01:02-B1*06:02L HLA-DPA1*03:01-B1*105:01L HLA-DRB1*16:01L HLA-DRB1*04:08L
HFLPRVFSAVGN

SEQ ID NO: 15686 - protein, 14 aa, Severe acute respiratory syndrome coronavirus 2
  REGION 1..14: note = Table B: HLA-DRB1*01:03L
GNICYTPSKLIEYT

SEQ ID NO: 15687 - protein, 14 aa, Severe acute respiratory syndrome coronavirus 2
  REGION 1..14: note = Table B: HLA-DRB1*01:03L HLA-DPA1*01:03-B1*03:01L HLA-DQA1*01:01-B1*05:01L HLA-DRB1*08:01L HLA-DQA1*05:01-B1*02:01L HLA-DPA1*01:03-B1*04:02L HLA-DPA1*03:01-B1*105:01L HLA-DQA1*03:01-B1*03:02L
  REGION 1..14: note = CONT. FROM ABOVE: HLA-DRB1*04:08L
DASGKPVPYCYDTN

SEQ ID NO: 15688 - protein, 13 aa, Severe acute respiratory syndrome coronavirus 2
  REGION 1..13: note = Table B: HLA-DRB1*01:03L HLA-DRB1*04:02L HLA-DRB1*01:02L HLA-DPA1*01:03-B1*04:02L
NVLEGSVAYESLR

SEQ ID NO: 15689 - protein, 12 aa, Severe acute respiratory syndrome coronavirus 2
  REGION 1..12: note = Table B: HLA-DRB1*01:03L HLA-DRB1*04:05L HLA-DRB4*03:01NL HLA-DQA1*01:01-B1*05:01L HLA-DRB1*08:01L HLA-DQA1*05:05-B1*03:19L HLA-DRB1*04:10L HLA-DPA1*01:03-B1*04:02L HLA-DRB1*12:01L HLA-DRB1*14:17L
  REGION 1..12: note = CONT. FROM ABOVE: HLA-DRB1*16:01L HLA-DRB1*04:08L
EGSVAYESLRPD

SEQ ID NO: 15690 - protein, 10 aa, Severe acute respiratory syndrome coronavirus 2
  REGION 1..10: note = Table B: HLA-DRB1*01:03L HLA-DRB1*14:01L HLA-DQA1*03:01-B1*03:02L HLA-DRB1*16:01L HLA-DQA1*02:01-B1*03:03L
SLRPDTRYVL

SEQ ID NO: 15691 - protein, 11 aa, Severe acute respiratory syndrome coronavirus 2
  REGION 1..11: note = Table B: HLA-DRB1*01:03L HLA-DRB1*04:04L HLA-DRB1*04:05L HLA-DRB4*03:01NL HLA-DRB1*04:10L HLA-DRB1*12:02L HLA-DRB1*14:54L HLA-DRB1*04:08L HLA-DRB1*15:01L
GSIIQFPNTYL

SEQ ID NO: 15692 - protein, 12 aa, Severe acute respiratory syndrome coronavirus 2
  REGION 1..12: note = Table B: HLA-DRB1*01:03L HLA-DRB1*04:05L HLA-DQA1*01:02-B1*06:02L HLA-DRB1*01:02L HLA-DQA1*01-B1*05L HLA-DRB1*12:01L HLA-DPA1*03:01-B1*105:01L HLA-DQA1*03:01-B1*03:02L HLA-DRB1*16:01L
  REGION 1..12: note = CONT. FROM ABOVE: HLA-DQA1*01:03-B1*06:01L HLA-DRB1*04:08L HLA-D QA1*02:01-B1*03:03L HLA-DRB1*15:03L
VTTFDSEYCRHG

SEQ ID NO: 15693 - protein, 14 aa, Severe acute respiratory syndrome coronavirus 2
  REGION 1..14: note = Table B: HLA-DRB1*01:03L HLA-DRB1*01:02L HLA-DRB1*08:01L HLA-DRB1*04:08L
ERSEAGVCVSTSGR

SEQ ID NO: 15694 - protein, 13 aa, Severe acute respiratory syndrome coronavirus 2
  REGION 1..13: note = Table B: HLA-DRB1*01:03L HLA-DRB1*04:08L
RWVLNNDYYRSLP

SEQ ID NO: 15695 - protein, 12 aa, Severe acute respiratory syndrome coronavirus 2
  REGION 1..12: note = Table B: HLA-DRB1*01:03L HLA-DQA1*01:02-B1*06:02L HLA-DRB1*12:01L HLA-DPA1*03:01-B1*105:01L HLA-DRB1*04:08L HLA-DRB1*15:03L
YRSLPGVFCGVD

SEQ ID NO: 15696 - protein, 14 aa, Severe acute respiratory syndrome coronavirus 2
  REGION 1..14: note = Table B: HLA-DRB1*01:03L HLA-DPA1*01:03-B1*04:02L
AVNLLTNMFTPLIQ

SEQ ID NO: 15697 - protein, 14 aa, Severe acute respiratory syndrome coronavirus 2
  REGION 1..14: note = Table B: HLA-DRB1*01:03L HLA-DPA1*01:03-B1*03:01L HLA-DPA1*01:03-B1*04:02L HLA-DRB1*12:01L HLA-DRB1*16:01L
ALDISASIVAGGIV

SEQ ID NO: 15698 - protein, 13 aa, Severe acute respiratory syndrome coronavirus 2
  REGION 1..13: note = Table B: HLA-DRB1*01:03L HLA-DRB1*04:02L HLA-DRB1*01:02L HLA-DPA1*01:03-B1*03:01L HLA-DQA1*01:01-B1*05:01L HLA-DPA1*01:03-B1*04:02L HLA-DRB1*12:01L HLA-DRB1*16:01L
DISASIVAGGIVA

SEQ ID NO: 15699 - protein, 12 aa, Severe acute respiratory syndrome coronavirus 2
  REGION 1..12: note = Table B: HLA-DRB1*01:03L HLA-DQA1*01:02-B1*06:02L HLA-DRB1*01:02L HLA-DRB1*08:01L HLA-DRB1*11:01L HLA-DPA1*01:02-B1*04:01L HLA-DRB1*16:01L HLA-DRB1*04:08L
AYYFMRFRRAFG

SEQ ID NO: 15700 - protein, 11 aa, Severe acute respiratory syndrome coronavirus 2
  REGION 1..11: note = Table B: HLA-DRB1*01:03L
RFRRAFGEYSH

SEQ ID NO: 15701 - protein, 13 aa, Severe acute respiratory syndrome coronavirus 2
  REGION 1..13: note = Table B: HLA-DRB1*01:03L HLA-DQA1*01:02-B1*06:02L HLA-DPA1*02:01-B1*13:01L HLA-DRB1*15:03L
FRRAFGEYSHVVA

SEQ ID NO: 15702 - protein, 14 aa, Severe acute respiratory syndrome coronavirus 2
  REGION 1..14: note = Table B: HLA-DRB1*01:03L HLA-DRB1*11:04L HLA-DRB1*11:01L HLA-DRB1*15:03L
RRAFGEYSHVVAFN

SEQ ID NO: 15703 - protein, 14 aa, Severe acute respiratory syndrome coronavirus 2
  REGION 1..14: note = Table B: HLA-DRB1*01:03L HLA-DRB1*08:01L
RAFGEYSHVVAFNT

SEQ ID NO: 15704 - protein, 13 aa, Severe acute respiratory syndrome coronavirus 2
  REGION 1..13: note = Table B: HLA-DRB1*01:03L HLA-DPA1*01:03-B1*04:02L HLA-DRB1*04:08L
PVYSFLPGVYSVI

SEQ ID NO: 15705 - protein, 12 aa, Severe acute respiratory syndrome coronavirus 2
  REGION 1..12: note = Table B: HLA-DRB1*01:03L HLA-DRB1*04:05L HLA-DRB1*01:02L HLA-DRB1*12:01L HLA-DRB1*04:08L
KHFYWFFSNYLK

SEQ ID NO: 15706 - protein, 10 aa, Severe acute respiratory syndrome coronavirus 2
  REGION 1..10: note = Table B: HLA-DRB1*01:03L HLA-DRB1*16:01L HLA-DRB1*15:03L
YWFFSNYLKR

SEQ ID NO: 15707 - protein, 10 aa, Severe acute respiratory syndrome coronavirus 2
  REGION 1..10: note = Table B: HLA-DRB1*01:03L HLA-DRB1*01:02L HLA-DRB1*08:01L HLA-DQA1*03:01-B1*03:02L HLA-DPA1*01:02-B1*04:01L HLA-DRB1*16:01L HLA-DRB1*04:08L HLA-DQA1*02:01-B1*03:03L
WFFSNYLKRR

SEQ ID NO: 15708 - protein, 14 aa, Severe acute respiratory syndrome coronavirus 2
  REGION 1..14: note = Table B: HLA-DRB1*01:03L HLA-DQA1*01:02-B1*06:02L HLA-DRB1*01:02L HLA-DRB1*16:01L HLA-DRB1*04:08L
FFSNYLKRRVVFNG

SEQ ID NO: 15709 - protein, 14 aa, Severe acute respiratory syndrome coronavirus 2
  REGION 1..14: note = Table B: HLA-DRB1*01:03L HLA-DRB1*04:05L HLA-DQA1*01:02-B1*06:02L HLA-DRB1*01:02L HLA-DRB1*08:04L HLA-DRB1*14:01L HLA-DRB1*11:01L HLA-DRB1*16:01L HLA-DRB1*04:08L HLA-DRB1*15:03L
SNYLKRRVVFNGVS

SEQ ID NO: 15710 - protein, 10 aa, Severe acute respiratory syndrome coronavirus 2
  REGION 1..10: note = Table B: HLA-DRB1*01:03L HLA-DQA1*02:01-B1*03:03L
RRVVFNGVSF

SEQ ID NO: 15711 - protein, 12 aa, Severe acute respiratory syndrome coronavirus 2
  REGION 1..12: note = Table B: HLA-DRB1*01:03L HLA-DRB1*04:05L HLA-DRB1*01:02L HLA-DPA1*01:03-B1*03:01L HLA-DQA1*05:05-B1*03:01L HLA-DRB1*04:08L
GVSFSTFEEAAL

SEQ ID NO: 15712 - protein, 11 aa, Severe acute respiratory syndrome coronavirus 2
  REGION 1..11: note = Table B: HLA-DRB1*01:03L HLA-DQA1*01:03-B1*06:01L HLA-DRB1*04:08L
LLNKEMYLKLR

SEQ ID NO: 15713 - protein, 12 aa, Severe acute respiratory syndrome coronavirus 2
  REGION 1..12: note = Table B: HLA-DRB1*01:03L HLA-DRB1*04:08L
LNKEMYLKLRSD

SEQ ID NO: 15714 - protein, 15 aa, Severe acute respiratory syndrome coronavirus 2
  REGION 1..15: note = Table B: HLA-DRB1*01:03L HLA-DRB1*04:08L
KEMYLKLRSDVLLPL

SEQ ID NO: 15715 - protein, 13 aa, Severe acute respiratory syndrome coronavirus 2
  REGION 1..13: note = Table B: HLA-DRB1*01:03L HLA-DQA1*01:02-B1*06:02L HLA-DRB1*01:02L HLA-DPA1*01:03-B1*03:01L HLA-DRB1*14:01L HLA-DQA1*01-B1*05L HLA-DQA1*05:01-B1*02:01L HLA-DPA1*01:03-B1*04:01L HLA-DPA1*01:03-B1*04:02L
  REGION 1..13: note = CONT. FROM ABOVE: HLA-DRB1*12:01L HLA-DPA1*02:01-B1*13:01L
YLKLRSDVLLPLT

SEQ ID NO: 15716 - protein, 12 aa, Severe acute respiratory syndrome coronavirus 2
  REGION 1..12: note = Table B: HLA-DRB1*01:03L HLA-DRB1*01:02L HLA-DRB1*12:01L HLA-DRB1*16:01L HLA-DRB1*04:08L
KLRSDVLLPLTQ

SEQ ID NO: 15717 - protein, 11 aa, Severe acute respiratory syndrome coronavirus 2
  REGION 1..11: note = Table B: HLA-DRB1*01:03L HLA-DRB1*14:02L HLA-DRB1*08:02L HLA-DQA1*02:01-B1*03:03L
RSDVLLPLTQY

SEQ ID NO: 15718 - protein, 13 aa, Severe acute respiratory syndrome coronavirus 2
  REGION 1..13: note = Table B: HLA-DRB1*01:03L HLA-DRB1*01:02L HLA-DRB1*16:01L HLA-DRB1*04:08L HLA-DRB1*15:03L
TTSYREAACCHLA

SEQ ID NO: 15719 - protein, 12 aa, Severe acute respiratory syndrome coronavirus 2
  REGION 1..12: note = Table B: HLA-DRB1*01:03L HLA-DRB1*04:05L HLA-DRB1*01:02L HLA-DRB1*12:01L HLA-DRB1*16:01L HLA-DRB1*04:08L HLA-DRB1*15:03L
SYREAACCHLAK

SEQ ID NO: 15720 - protein, 14 aa, Severe acute respiratory syndrome coronavirus 2
  REGION 1..14: note = Table B: HLA-DRB1*01:03L HLA-DQA1*01:02-B1*06:02L HLA-DRB1*01:02L HLA-DRB1*14:01L HLA-DRB1*11:04L HLA-DPA1*02:01-B1*13:01L HLA-DPA1*03:01-B1*105:01L HLA-DRB1*10:01L HLA-DQA1*01:03-B1*06:01L HLA-DRB1*08:03L
AKALNDFSNSGSDV

SEQ ID NO: 15721 - protein, 16 aa, Severe acute respiratory syndrome coronavirus 2
  REGION 1..16: note = Table B: HLA-DRB1*01:03L HLA-DRB1*01:02L HLA-DPA1*01:03-B1*04:02L HLA-DRB1*12:01L HLA-DRB1*15:03L
NDFSNSGSDVLYQPPQ

SEQ ID NO: 15722 - protein, 15 aa, Severe acute respiratory syndrome coronavirus 2
  REGION 1..15: note = Table B: HLA-DRB1*01:03L HLA-DRB1*04:02L HLA-DRB1*04:05L HLA-DRB1*01:02L HLA-DRB4*03:01NL HLA-DPA1*01:03-B1*03:01L HLA-DQA1*01:01-B1*05:01L HLA-DRB1*12:01L HLA-DRB1*14:17L HLA-DRB1*16:01L HLA-DRB1*04:08L
QPPQTSITSAVLQSG

SEQ ID NO: 15723 - protein, 14 aa, Severe acute respiratory syndrome coronavirus 2
  REGION 1..14: note = Table B: HLA-DRB1*01:03L HLA-DQA1*01:02-B1*06:02L HLA-DRB1*14:01L HLA-DRB1*04:08L
AVLQSGFRKMAFPS

SEQ ID NO: 15724 - protein, 12 aa, Severe acute respiratory syndrome coronavirus 2
  REGION 1..12: note = Table B: HLA-DRB1*01:03L HLA-DRB1*04:05L HLA-DRB1*01:02L HLA-DRB1*08:01L HLA-DRB1*12:01L HLA-DQA1*03:01-B1*03:02L HLA-DPA1*01:02-B1*04:01L HLA-DRB1*16:01L HLA-DRB1*04:08L
SGFRKMAFPSGK

SEQ ID NO: 15725 - protein, 12 aa, Severe acute respiratory syndrome coronavirus 2
  REGION 1..12: note = Table B: HLA-DRB1*01:03L HLA-DQA1*01:02-B1*06:02L HLA-DRB1*01:02L HLA-DRB1*16:01L HLA-DRB1*04:08L HLA-DRB1*15:03L
LWLDDVVYCPRH

SEQ ID NO: 15726 - protein, 14 aa, Severe acute respiratory syndrome coronavirus 2
  REGION 1..14: note = Table B: HLA-DRB1*01:03L
DMLNPNYEDLLIRK

SEQ ID NO: 15727 - protein, 15 aa, Severe acute respiratory syndrome coronavirus 2
  REGION 1..15: note = Table B: HLA-DRB1*01:03L HLA-DRB1*04:04L HLA-DPA1*01:03-B1*104:01L HLA-DQA1*05:05-B1*03:01L HLA-DRB1*07:01L
LIRKSNHNFLVQAGN

SEQ ID NO: 15728 - protein, 14 aa, Severe acute respiratory syndrome coronavirus 2
  REGION 1..14: note = Table B: HLA-DRB1*01:03L HLA-DRB1*01:02L HLA-DRB1*08:01L HLA-DRB1*04:08L
VQAGNVQLRVIGHS

SEQ ID NO: 15729 - protein, 13 aa, Severe acute respiratory syndrome coronavirus 2
  REGION 1..13: note = Table B: HLA-DRB1*01:03L HLA-DRB1*04:08L
RVIGHSMQNCVLK

SEQ ID NO: 15730 - protein, 15 aa, Severe acute respiratory syndrome coronavirus 2
  REGION 1..15: note = Table B: HLA-DRB1*01:03L HLA-DRB1*16:01L HLA-DRB1*15:03L
GQTFSVLACYNGSPS

SEQ ID NO: 15731 - protein, 13 aa, Severe acute respiratory syndrome coronavirus 2
  REGION 1..13: note = Table B: HLA-DRB1*01:03L HLA-DPA1*01:03-B1*03:01L HLA-DRB1*12:01L HLA-DPA1*01:03-B1*02:01L HLA-DQA1*01:03-B1*06:01L
NIDYDCVSFCYMH

SEQ ID NO: 15732 - protein, 12 aa, Severe acute respiratory syndrome coronavirus 2
  REGION 1..12: note = Table B: HLA-DRB1*01:03L HLA-DQA1*01:02-B1*06:02L HLA-DPA1*03:01-B1*04:02L HLA-DPA1*01:03-B1*04:02L HLA-DPA1*01:03-B1*02:01L HLA-DRB1*16:01L HLA-DRB1*04:08L
DYDCVSFCYMHH

SEQ ID NO: 15733 - protein, 14 aa, Severe acute respiratory syndrome coronavirus 2
  REGION 1..14: note = Table B: HLA-DRB1*01:03L HLA-DRB1*04:05L HLA-DRB1*01:02L HLA-DPA1*03:01-B1*04:02L HLA-DPA1*01:03-B1*04:01L HLA-DPA1*01:03-B1*04:02L HLA-DPA1*02:01-B1*13:01L HLA-DRB1*04:08L HLA-DRB1*15:03L
TDLEGNFYGPFVDR

SEQ ID NO: 15734 - protein, 14 aa, Severe acute respiratory syndrome coronavirus 2
  REGION 1..14: note = Table B: HLA-DRB1*01:03L HLA-DRB1*04:05L HLA-DRB1*01:02L HLA-DPA1*01:03-B1*03:01L HLA-DPA1*03:01-B1*04:02L HLA-DPA1*01:03-B1*04:01L HLA-DPA1*01:03-B1*04:02L HLA-DPA1*02:01-B1*13:01L HLA-DRB1*04:08L HLA-DRB1*15:03L
DLEGNFYGPFVDRQ

SEQ ID NO: 15735 - protein, 13 aa, Severe acute respiratory syndrome coronavirus 2
  REGION 1..13: note = Table B: HLA-DRB1*01:03L HLA-DRB1*01:02L HLA-DPA1*03:01-B1*04:02L
GNFYGPFVDRQTA

SEQ ID NO: 15736 - protein, 11 aa, Severe acute respiratory syndrome coronavirus 2
  REGION 1..11: note = Table B: HLA-DRB1*01:03L HLA-DRB4*03:01NL HLA-DQA1*05:01-B1*02:01L HLA-DRB1*14:54L HLA-DPA1*01:02-B1*04:01L
YGPFVDRQTAQ

SEQ ID NO: 15737 - protein, 13 aa, Severe acute respiratory syndrome coronavirus 2
  REGION 1..13: note = Table B: HLA-DRB1*01:03L HLA-DRB4*03:01NL HLA-DPA1*01:03-B1*03:01L HLA-DRB1*16:01L HLA-DRB1*04:08L
DRQTAQAAGTDTT

SEQ ID NO: 15738 - protein, 12 aa, Severe acute respiratory syndrome coronavirus 2
  REGION 1..12: note = Table B: HLA-DRB1*01:03L HLA-DRB1*12:01L HLA-DRB1*16:01L HLA-DRB1*04:08L
AVINGDRWFLNR

SEQ ID NO: 15739 - protein, 11 aa, Severe acute respiratory syndrome coronavirus 2
  REGION 1..11: note = Table B: HLA-DRB1*01:03L HLA-DPA1*03:01-B1*04:02L HLA-DQA1*01-B1*05L HLA-DPA1*01:03-B1*04:01L HLA-DPA1*03:01-B1*105:01L HLA-DRB1*16:01L HLA-DRB1*04:08L
DRWFLNRFTTT

SEQ ID NO: 15740 - protein, 12 aa, Severe acute respiratory syndrome coronavirus 2
  REGION 1..12: note = Table B: HLA-DRB1*01:03L HLA-DRB1*04:08L
RWFLNRFTTTLN

SEQ ID NO: 15741 - protein, 12 aa, Severe acute respiratory syndrome coronavirus 2
  REGION 1..12: note = Table B: HLA-DRB1*01:03L HLA-DQA1*01-B1*05L HLA-DPA1*01:03-B1*02:01L HLA-DRB1*04:08L
WFLNRFTTTLND

SEQ ID NO: 15742 - protein, 12 aa, Severe acute respiratory syndrome coronavirus 2
  REGION 1..12: note = Table B: HLA-DRB1*01:03L HLA-DRB1*08:02L
TLNDFNLVAMKY

SEQ ID NO: 15743 - protein, 13 aa, Severe acute respiratory syndrome coronavirus 2
  REGION 1..13: note = Table B: HLA-DRB1*01:03L HLA-DRB1*08:77L HLA-DRB3*01:01L
YEPLTQDHVDILG

SEQ ID NO: 15744 - protein, 13 aa, Severe acute respiratory syndrome coronavirus 2
  REGION 1..13: note = Table B: HLA-DRB1*01:03L HLA-DRB1*04:04L HLA-DRB1*04:05L HLA-DRB1*04:10L HLA-DRB1*10:01L HLA-DRB1*04:08L
DHVDILGPLSAQT

SEQ ID NO: 15745 - protein, 15 aa, Severe acute respiratory syndrome coronavirus 2
  REGION 1..15: note = Table B: HLA-DRB1*01:03L HLA-DRB1*15:03L
AQTGIAVLDMCASLK

SEQ ID NO: 15746 - protein, 13 aa, Severe acute respiratory syndrome coronavirus 2
  REGION 1..13: note = Table B: HLA-DRB1*01:03L HLA-DPA1*01:03-B1*04:01L HLA-DRB1*04:08L HLA-DRB1*15:03L
LLEDEFTPFDVVR

SEQ ID NO: 15747 - protein, 16 aa, Severe acute respiratory syndrome coronavirus 2
  REGION 1..16: note = Table B: HLA-DRB1*01:03L HLA-DPA1*01:03-B1*03:01L HLA-DPA1*02:01-B1*13:01L HLA-DPA1*01:03-B1*104:01L
DVVRQCSGVTFQSAVK

SEQ ID NO: 15748 - protein, 12 aa, Severe acute respiratory syndrome coronavirus 2
  REGION 1..12: note = Table B: HLA-DRB1*01:03L HLA-DQA1*01:02-B1*06:02L HLA-DRB1*01:02L HLA-DRB1*08:04L HLA-DRB1*14:01L HLA-DRB1*11:04L HLA-DRB1*11:01L HLA-DRB1*16:01L HLA-DRB1*04:08L
TFQSAVKRTIKG

SEQ ID NO: 15749 - protein, 11 aa, Severe acute respiratory syndrome coronavirus 2
  REGION 1..11: note = Table B: HLA-DRB1*01:03L
AVKRTIKGTHH

SEQ ID NO: 15750 - protein, 10 aa, Severe acute respiratory syndrome coronavirus 2
  REGION 1..10: note = Table B: HLA-DRB1*01:03L HLA-DQA1*02:01-B1*03:03L
KRTIKGTHHW

SEQ ID NO: 15751 - protein, 10 aa, Severe acute respiratory syndrome coronavirus 2
  REGION 1..10: note = Table B: HLA-DRB1*01:03L HLA-DQA1*03:01-B1*03:02L HLA-DPA1*01:02-B1*04:01L HLA-DRB1*16:01L
FAMMFVKHKH

SEQ ID NO: 15752 - protein, 15 aa, Severe acute respiratory syndrome coronavirus 2
  REGION 1..15: note = Table B: HLA-DRB1*01:03L HLA-DPA1*01:02-B1*04:01L HLA-DRB1*16:01L
HKHAFLCLFLLPSLA

SEQ ID NO: 15753 - protein, 14 aa, Severe acute respiratory syndrome coronavirus 2
  REGION 1..14: note = Table B: HLA-DRB1*01:03L HLA-DQA1*01:02-B1*06:02L HLA-DRB1*01:02L HLA-DRB4*01:01L HLA-DRB1*12:01L HLA-DRB1*10:01L
IMTWLDMVDTSLSG

SEQ ID NO: 15754 - protein, 12 aa, Severe acute respiratory syndrome coronavirus 2
  REGION 1..12: note = Table B: HLA-DRB1*01:03L HLA-DRB1*04:05L HLA-DQA1*01:01-B1*05:01L HLA-DRB1*08:01L HLA-DRB1*04:08L
MTARTVYDDGAR

SEQ ID NO: 15755 - protein, 13 aa, Severe acute respiratory syndrome coronavirus 2
  REGION 1..13: note = Table B: HLA-DRB1*01:03L HLA-DRB1*04:04L HLA-DRB1*04:05L HLA-DRB4*03:01NL HLA-DPA1*01:03-B1*03:01L HLA-DPA1*03:01-B1*04:02L HLA-DRB1*14:01L HLA-DRB1*08:01L HLA-DQA1*05:01-B1*02:01L HLA-DPA1*01:03-B1*04:02L
  REGION 1..13: note = CONT. FROM ABOVE: HLA-DPA1*01:03-B1*02:01L HLA-DRB1*15:03L
SGVVTTVMFLARG

SEQ ID NO: 15756 - protein, 10 aa, Severe acute respiratory syndrome coronavirus 2
  REGION 1..10: note = Table B: HLA-DRB1*01:03L HLA-DQA1*01:02-B1*06:02L HLA-DRB1*03:01L HLA-DRB1*14:02L HLA-DQA1*05:05-B1*03:19L HLA-DPA1*01:03-B1*04:01L HLA-DPA1*02:01-B1*13:01L HLA-DRB1*16:01L HLA-DQA1*01:03-B1*06:01L
  REGION 1..10: note = CONT. FROM ABOVE: HLA-DQA1*02:01-B1*03:03L
RYFRLTLGVY

SEQ ID NO: 15757 - protein, 12 aa, Severe acute respiratory syndrome coronavirus 2
  REGION 1..12: note = Table B: HLA-DRB1*01:03L HLA-DRB1*04:04L HLA-DQA1*01:02-B1*06:02L HLA-DRB1*12:01L HLA-DPA1*03:01-B1*105:01L HLA-DRB1*10:01L HLA-DRB1*04:08L HLA-DRB1*15:03L
LGVYDYLVSTQE

SEQ ID NO: 15758 - protein, 13 aa, Severe acute respiratory syndrome coronavirus 2
  REGION 1..13: note = Table B: HLA-DRB1*01:03L
QEFRYMNSQGLLP

SEQ ID NO: 15759 - protein, 15 aa, Severe acute respiratory syndrome coronavirus 2
  REGION 1..15: note = Table B: HLA-DRB1*01:03L HLA-DRB1*04:04L HLA-DRB1*08:01L HLA-DRB1*07:01L HLA-DRB1*04:08L
LPPKNSIDAFKLNIK

SEQ ID NO: 15760 - protein, 12 aa, Severe acute respiratory syndrome coronavirus 2
  REGION 1..12: note = Table B: HLA-DRB1*01:03L HLA-DRB1*04:05L HLA-DQA1*01:02-B1*06:02L HLA-DRB1*11:04L HLA-DRB1*11:01L HLA-DRB1*14:54L HLA-DRB1*16:01L HLA-DRB1*04:08L HLA-DRB1*08:03L
IDAFKLNIKLLG

SEQ ID NO: 15761 - protein, 14 aa, Severe acute respiratory syndrome coronavirus 2
  REGION 1..14: note = Table B: HLA-DRB1*01:03L HLA-DRB1*04:02L HLA-DQA1*05:05-B1*03:19L HLA-DRB1*12:01L HLA-DRB1*16:01L
DAFKLNIKLLGVGG

SEQ ID NO: 15762 - protein, 13 aa, Severe acute respiratory syndrome coronavirus 2
  REGION 1..13: note = Table B: HLA-DRB1*01:03L HLA-DRB1*04:08L
KLNIKLLGVGGKP

SEQ ID NO: 15763 - protein, 12 aa, Severe acute respiratory syndrome coronavirus 2
  REGION 1..12: note = Table B: HLA-DRB1*01:03L HLA-DRB1*01:02L
KLLGVGGKPCIK

SEQ ID NO: 15764 - protein, 13 aa, Severe acute respiratory syndrome coronavirus 2
  REGION 1..13: note = Table B: HLA-DRB1*01:03L HLA-DRB1*04:05L HLA-DQA1*01:02-B1*06:02L HLA-DRB1*01:02L HLA-DRB1*04:08L
GKPCIKVATVQSK

SEQ ID NO: 15765 - protein, 12 aa, Severe acute respiratory syndrome coronavirus 2
  REGION 1..12: note = Table B: HLA-DRB1*01:03L HLA-DRB1*04:04L HLA-DRB1*04:05L HLA-DRB1*01:02L HLA-DRB1*14:01L HLA-DPA1*01:03-B1*04:02L HLA-DQA1*05:05-B1*03:01L HLA-DRB1*16:01L HLA-DRB1*04:08L
SVVLLSVLQQLR

SEQ ID NO: 15766 - protein, 12 aa, Severe acute respiratory syndrome coronavirus 2
  REGION 1..12: note = Table B: HLA-DRB1*01:03L HLA-DRB1*04:04L HLA-DRB1*04:05L HLA-DQA1*01:02-B1*06:02L HLA-DRB1*01:02L HLA-DRB1*08:04L HLA-DRB1*04:10L HLA-DRB1*12:01L HLA-DPA1*03:01-B1*105:01L HLA-DRB1*14:54L HLA-DRB1*04:08L HLA-DRB1*15:03L
SVLQQLRVESSS

SEQ ID NO: 15767 - protein, 13 aa, Severe acute respiratory syndrome coronavirus 2
  REGION 1..13: note = Table B: HLA-DRB1*01:03L HLA-DRB1*01:01L HLA-DRB1*04:08L
QQLRVESSSKLWA

SEQ ID NO: 15768 - protein, 12 aa, Severe acute respiratory syndrome coronavirus 2
  REGION 1..12: note = Table B: HLA-DRB1*01:03L HLA-DRB1*04:04L HLA-DRB1*04:05L HLA-DRB1*01:02L HLA-DRB1*12:01L HLA-DPA1*03:01-B1*105:01L HLA-DQA1*05:05-B1*03:01L HLA-DRB1*04:08L
LRVESSSKLWAQ

SEQ ID NO: 15769 - protein, 14 aa, Severe acute respiratory syndrome coronavirus 2
  REGION 1..14: note = Table B: HLA-DRB1*01:03L HLA-DRB1*01:02L HLA-DPA1*01:03-B1*03:01L HLA-DRB1*08:01L HLA-DPA1*01:03-B1*04:02L HLA-DPA1*02:01-B1*13:01L HLA-DRB1*04:08L
RVESSSKLWAQCVQ

SEQ ID NO: 15770 - protein, 14 aa, Severe acute respiratory syndrome coronavirus 2
  REGION 1..14: note = Table B: HLA-DRB1*01:03L HLA-DPA1*03:01-B1*04:02L HLA-DPA1*01:03-B1*04:02L HLA-DQA1*05:05-B1*03:01L HLA-DPA1*01:02-B1*04:01L HLA-DQA1*01:03-B1*06:01L HLA-DRB1*15:03L
SSKLWAQCVQLHND

SEQ ID NO: 15771 - protein, 12 aa, Severe acute respiratory syndrome coronavirus 2
  REGION 1..12: note = Table B: HLA-DRB1*01:03L HLA-DRB1*04:04L HLA-DQA1*01:02-B1*06:02L HLA-DRB1*14:01L HLA-DRB1*04:08L
HNDILLAKDTTE

SEQ ID NO: 15772 - protein, 10 aa, Severe acute respiratory syndrome coronavirus 2
  REGION 1..10: note = Table B: HLA-DRB1*01:03L HLA-DQA1*01:02-B1*06:02L HLA-DRB1*14:02L HLA-DPA1*02:01-B1*13:01L HLA-DPA1*03:01-B1*105:01L HLA-DQA1*01:03-B1*06:01L HLA-DQA1*02:01-B1*03:03L HLA-DRB1*15:03L
LLAKDTTEAF

SEQ ID NO: 15773 - protein, 12 aa, Severe acute respiratory syndrome coronavirus 2
  REGION 1..12: note = Table B: HLA-DRB1*01:03L HLA-DPA1*01:03-B1*04:02L HLA-DQA1*05:05-B1*03:01L HLA-DRB1*10:01L
AFEKMVSLLSVL

SEQ ID NO: 15774 - protein, 13 aa, Severe acute respiratory syndrome coronavirus 2
  REGION 1..13: note = Table B: HLA-DRB1*01:03L
ASEFSSLPSYAAF

SEQ ID NO: 15775 - protein, 11 aa, Severe acute respiratory syndrome coronavirus 2
  REGION 1..11: note = Table B: HLA-DRB1*01:03L HLA-DRB1*04:02L HLA-DRB1*04:04L HLA-DRB1*01:02L HLA-DRB4*03:01NL HLA-DQA1*01-B1*05L HLA-DQA1*03:01-B1*03:02L HLA-DRB1*14:54L HLA-DQA1*05:05-B1*03:01L HLA-DRB1*14:17L HLA-DRB1*10:01L
  REGION 1..11: note = CONT. FROM ABOVE: HLA-DRB1*04:08L
FSSLPSYAAFA

SEQ ID NO: 15776 - protein, 14 aa, Severe acute respiratory syndrome coronavirus 2
  REGION 1..14: note = Table B: HLA-DRB1*01:03L HLA-DRB1*01:02L
ANGDSEVVLKKLKK

SEQ ID NO: 15777 - protein, 13 aa, Severe acute respiratory syndrome coronavirus 2
  REGION 1..13: note = Table B: HLA-DRB1*01:03L HLA-DRB1*04:05L HLA-DRB1*01:02L HLA-DRB1*14:01L HLA-DRB1*16:01L HLA-DRB1*04:08L
GDSEVVLKKLKKS

SEQ ID NO: 15778 - protein, 13 aa, Severe acute respiratory syndrome coronavirus 2
  REGION 1..13: note = Table B: HLA-DRB1*01:03L HLA-DRB1*01:02L HLA-DRB1*08:04L HLA-DRB1*12:01L HLA-DRB3*01:01L HLA-DRB1*04:08L HLA-DRB1*15:03L
SEVVLKKLKKSLN

SEQ ID NO: 15779 - protein, 13 aa, Severe acute respiratory syndrome coronavirus 2
  REGION 1..13: note = Table B: HLA-DRB1*01:03L HLA-DRB1*01:02L HLA-DRB1*16:01L HLA-DRB1*04:08L
VLKKLKKSLNVAK

SEQ ID NO: 15780 - protein, 13 aa, Severe acute respiratory syndrome coronavirus 2
  REGION 1..13: note = Table B: HLA-DRB1*01:03L HLA-DRB1*15:03L
LKKLKKSLNVAKS

SEQ ID NO: 15781 - protein, 11 aa, Severe acute respiratory syndrome coronavirus 2
  REGION 1..11: note = Table B: HLA-DRB1*01:03L HLA-DRB1*04:02L HLA-DRB1*01:01L HLA-DRB3*02:01L HLA-DRB1*14:01L HLA-DRB1*11:04L HLA-DPA1*01:03-B1*04:02L HLA-DRB1*12:02L HLA-DRB3*01:01L HLA-DRB1*16:01L HLA-DRB1*08:02L HLA-DQA1*02:01-B1*03:03L
SEFDRDAAMQR

SEQ ID NO: 15782 - protein, 15 aa, Severe acute respiratory syndrome coronavirus 2
  REGION 1..15: note = Table B: HLA-DRB1*01:03L HLA-DRB1*16:01L HLA-DRB1*04:08L
RDAAMQRKLEKMADQ

SEQ ID NO: 15783 - protein, 15 aa, Severe acute respiratory syndrome coronavirus 2
  REGION 1..15: note = Table B: HLA-DRB1*01:03L HLA-DRB1*08:04L HLA-DRB1*16:01L HLA-DRB1*04:08L HLA-DRB1*15:03L
DAAMQRKLEKMADQA

SEQ ID NO: 15784 - protein, 13 aa, Severe acute respiratory syndrome coronavirus 2
  REGION 1..13: note = Table B: HLA-DRB1*01:03L HLA-DRB1*04:02L HLA-DRB1*04:04L HLA-DRB1*08:01L HLA-DRB1*14:17L HLA-DQA1*02:01-B1*03:03L
QRKLEKMADQAMT

SEQ ID NO: 15785 - protein, 10 aa, Severe acute respiratory syndrome coronavirus 2
  REGION 1..10: note = Table B: HLA-DRB1*01:03L
YKQARSEDKR

SEQ ID NO: 15786 - protein, 14 aa, Severe acute respiratory syndrome coronavirus 2
  REGION 1..14: note = Table B: HLA-DRB1*01:03L HLA-DRB1*04:05L HLA-DRB1*01:02L HLA-DPA1*02:01-B1*13:01L HLA-DRB1*04:08L
SEDKRAKVTSAMQT

SEQ ID NO: 15787 - protein, 12 aa, Severe acute respiratory syndrome coronavirus 2
  REGION 1..12: note = Table B: HLA-DRB1*01:03L HLA-DPA1*01:03-B1*04:01L HLA-DRB1*12:01L HLA-DRB1*16:01L HLA-DRB1*04:08L HLA-DQA1*02:01-B1*03:03L
SAMQTMLFTMLR

SEQ ID NO: 15788 - protein, 12 aa, Severe acute respiratory syndrome coronavirus 2
  REGION 1..12: note = Table B: HLA-DRB1*01:03L HLA-DPA1*01:03-B1*04:02L HLA-DRB1*12:01L HLA-DRB1*16:01L HLA-DRB1*04:08L
MQTMLFTMLRKL

SEQ ID NO: 15789 - protein, 12 aa, Severe acute respiratory syndrome coronavirus 2
  REGION 1..12: note = Table B: HLA-DRB1*01:03L HLA-DRB1*04:05L HLA-DRB1*01:02L HLA-DRB1*08:04L HLA-DRB1*14:01L HLA-DRB1*11:04L HLA-DRB1*11:01L HLA-DPA1*01:03-B1*04:02L HLA-DRB1*12:01L HLA-DPA1*03:01-B1*105:01L HLA-DRB1*16:01L HLA-DRB1*15:03L
TMLFTMLRKLDN

SEQ ID NO: 15790 - protein, 12 aa, Severe acute respiratory syndrome coronavirus 2
  REGION 1..12: note = Table B: HLA-DRB1*01:03L HLA-DRB1*08:04L HLA-DRB1*11:01L HLA-DPA1*01:03-B1*04:02L HLA-DPA1*03:01-B1*105:01L HLA-DRB1*16:01L
MLFTMLRKLDND

SEQ ID NO: 15791 - protein, 14 aa, Severe acute respiratory syndrome coronavirus 2
  REGION 1..14: note = Table B: HLA-DRB1*01:03L
LFTMLRKLDNDALN

SEQ ID NO: 15792 - protein, 12 aa, Severe acute respiratory syndrome coronavirus 2
  REGION 1..12: note = Table B: HLA-DRB1*01:03L HLA-DRB1*04:04L HLA-DRB1*04:05L HLA-DRB1*01:02L HLA-DRB1*04:10L HLA-DRB1*12:01L HLA-DPA1*02:01-B1*13:01L HLA-DRB1*04:08L HLA-DQA1*02:01-B1*03:03L HLA-DRB1*15:03L
MLRKLDNDALNN

SEQ ID NO: 15793 - protein, 13 aa, Severe acute respiratory syndrome coronavirus 2
  REGION 1..13: note = Table B: HLA-DRB1*01:03L HLA-DRB1*04:05L HLA-DRB1*01:02L HLA-DPA1*01:03-B1*03:01L HLA-DPA1*03:01-B1*04:02L HLA-DRB1*12:01L HLA-DPA1*02:01-B1*13:01L HLA-DPA1*01:02-B1*04:01L HLA-DRB1*04:08L
LRKLDNDALNNII

SEQ ID NO: 15794 - protein, 13 aa, Severe acute respiratory syndrome coronavirus 2
  REGION 1..13: note = Table B: HLA-DRB1*01:03L HLA-DRB1*04:05L HLA-DRB1*14:17L
KLDNDALNNIINN

SEQ ID NO: 15795 - protein, 14 aa, Severe acute respiratory syndrome coronavirus 2
  REGION 1..14: note = Table B: HLA-DRB1*01:03L HLA-DPA1*01:03-B1*03:01L HLA-DQA1*01:01-B1*05:01L HLA-DQA1*05:05-B1*03:19L
DNDALNNIINNARD

SEQ ID NO: 15796 - protein, 14 aa, Severe acute respiratory syndrome coronavirus 2
  REGION 1..14: note = Table B: HLA-DRB1*01:03L HLA-DRB1*04:02L HLA-DRB1*04:04L HLA-DRB1*01:02L HLA-DRB4*03:01NL HLA-DRB1*08:04L HLA-DRB1*12:01L HLA-DPA1*02:01-B1*13:01L HLA-DRB1*14:54L HLA-DRB1*10:01L HLA-DRB1*16:01L HLA-DQA1*02:01-B1*03:03L HLA-DRB1*15:03L
SALWEIQQVVDADS

SEQ ID NO: 15797 - protein, 13 aa, Severe acute respiratory syndrome coronavirus 2
  REGION 1..13: note = Table B: HLA-DRB1*01:03L HLA-DRB1*08:04L HLA-DPA1*01:03-B1*03:01L HLA-DRB1*14:02L HLA-DQA1*01-B1*05L HLA-DQA1*05:05-B1*03:19L HLA-DPA1*02:01-B1*13:01L
ADSKIVQLSEISM

SEQ ID NO: 15798 - protein, 13 aa, Severe acute respiratory syndrome coronavirus 2
  REGION 1..13: note = Table B: HLA-DRB1*01:03L HLA-DRB1*04:04L HLA-DRB1*08:04L HLA-DPA1*01:03-B1*03:01L HLA-DRB1*14:02L HLA-DQA1*01-B1*05L HLA-DQA1*05:05-B1*03:19L HLA-DPA1*02:01-B1*13:01L HLA-DQA1*01:03-B1*06:01L HLA-DRB1*04:08L
DSKIVQLSEISMD

SEQ ID NO: 15799 - protein, 11 aa, Severe acute respiratory syndrome coronavirus 2
  REGION 1..11: note = Table B: HLA-DRB1*01:03L HLA-DRB1*01:02L HLA-DRB1*08:04L HLA-DRB1*12:02L
ALRANSAVKLQ

SEQ ID NO: 15800 - protein, 11 aa, Severe acute respiratory syndrome coronavirus 2
  REGION 1..11: note = Table B: HLA-DRB1*01:03L HLA-DRB1*04:04L HLA-DQA1*01:02-B1*06:02L HLA-DRB1*04:10L HLA-DRB1*04:08L
LALLSDLQDLK

SEQ ID NO: 15801 - protein, 13 aa, Severe acute respiratory syndrome coronavirus 2
  REGION 1..13: note = Table B: HLA-DRB1*01:03L HLA-DRB1*01:02L HLA-DPA1*01:03-B1*03:01L HLA-DRB1*14:01L HLA-DQA1*01-B1*05L HLA-DQA1*05:01-B1*02:01L HLA-DPA1*01:03-B1*04:01L HLA-DPA1*01:03-B1*04:02L HLA-DRB1*12:01L
  REGION 1..13: note = CONT. FROM ABOVE: HLA-DPA1*02:01-B1*13:01L HLA-DQA1*01:03-B1*06: 01L HLA-DRB1*04:08L HLA-DRB1*15:03L
LSDLQDLKWARFP

SEQ ID NO: 15802 - protein, 12 aa, Severe acute respiratory syndrome coronavirus 2
  REGION 1..12: note = Table B: HLA-DRB1*01:03L HLA-DRB1*08:01L HLA-DRB1*16:01L HLA-DRB1*04:08L
DLQDLKWARFPK

SEQ ID NO: 15803 - protein, 12 aa, Severe acute respiratory syndrome coronavirus 2
  REGION 1..12: note = Table B: HLA-DRB1*01:03L HLA-DRB1*01:02L HLA-DRB1*12:01L HLA-DRB1*16:01L HLA-DRB1*04:08L
LQDLKWARFPKS

SEQ ID NO: 15804 - protein, 11 aa, Severe acute respiratory syndrome coronavirus 2
  REGION 1..11: note = Table B: HLA-DRB1*01:03L HLA-DQA1*01:02-B1*06:02L HLA-DRB1*08:01L HLA-DRB1*04:08L
LKWARFPKSDG

SEQ ID NO: 15805 - protein, 14 aa, Severe acute respiratory syndrome coronavirus 2
  REGION 1..14: note = Table B: HLA-DRB1*01:03L HLA-DRB1*16:01L HLA-DRB1*04:08L
SDGTGTIYTELEPP

SEQ ID NO: 15806 - protein, 12 aa, Severe acute respiratory syndrome coronavirus 2
  REGION 1..12: note = Table B: HLA-DRB1*01:03L HLA-DRB1*08:01L HLA-DPA1*01:02-B1*04:01L HLA-DRB1*16:01L HLA-DRB1*04:08L
GPKVKYLYFIKG

SEQ ID NO: 15807 - protein, 11 aa, Severe acute respiratory syndrome coronavirus 2
  REGION 1..11: note = Table B: HLA-DRB1*01:03L HLA-DRB1*04:08L HLA-DQA1*02:01-B1*03:03L
YFIKGLNNLNR

SEQ ID NO: 15808 - protein, 14 aa, Severe acute respiratory syndrome coronavirus 2
  REGION 1..14: note = Table B: HLA-DRB1*01:03L HLA-DRB1*04:02L HLA-DRB1*08:01L HLA-DPA1*01:03-B1*04:02L HLA-DRB1*12:01L HLA-DPA1*01:03-B1*104:01L HLA-DRB1*16:01L
LNNLNRGMVLGSLA

SEQ ID NO: 15809 - protein, 13 aa, Severe acute respiratory syndrome coronavirus 2
  REGION 1..13: note = Table B: HLA-DRB1*01:03L HLA-DRB1*04:04L HLA-DRB1*04:05L HLA-DRB1*16:01L HLA-DRB1*04:08L HLA-DRB1*15:03L
AATVRLQAGNATE

SEQ ID NO: 15810 - protein, 14 aa, Severe acute respiratory syndrome coronavirus 2
  REGION 1..14: note = Table B: HLA-DRB1*01:03L HLA-DRB1*04:05L HLA-DPA1*01:03-B1*03:01L HLA-DQA1*05:01-B1*02:01L HLA-DPA1*02:01-B1*13:01L HLA-DPA1*03:01-B1*105:01L HLA-DRB1*16:01L HLA-DRB1*04:08L
ATVRLQAGNATEVP

SEQ ID NO: 15811 - protein, 12 aa, Severe acute respiratory syndrome coronavirus 2
  REGION 1..12: note = Table B: HLA-DRB1*01:03L HLA-DRB1*04:05L HLA-DQA1*01:02-B1*06:02L HLA-DRB4*03:01NL HLA-DPA1*01:03-B1*03:01L HLA-DQA1*01:01-B1*05:01L HLA-DQA1*05:05-B1*03:01L HLA-DRB1*14:17L
NATEVPANSTVL

SEQ ID NO: 15812 - protein, 14 aa, Severe acute respiratory syndrome coronavirus 2
  REGION 1..14: note = Table B: HLA-DRB1*01:03L HLA-DRB1*01:02L HLA-DRB1*11:04L HLA-DRB1*08:01L HLA-DRB1*11:01L HLA-DRB3*01:01L HLA-DRB1*04:08L
GQPITNCVKMLCTH

SEQ ID NO: 15813 - protein, 13 aa, Severe acute respiratory syndrome coronavirus 2
  REGION 1..13: note = Table B: HLA-DRB1*01:03L HLA-DRB1*04:02L HLA-DRB1*04:05L HLA-DRB4*03:01NL HLA-DPA1*01:03-B1*03:01L HLA-DRB1*04:10L HLA-DRB1*12:01L HLA-DPA1*03:01-B1*105:01L HLA-DRB1*14:17L HLA-DRB1*04:08L
GTGQAITVTPEAN

SEQ ID NO: 15814 - protein, 16 aa, Severe acute respiratory syndrome coronavirus 2
  REGION 1..16: note = Table B: HLA-DRB1*01:03L HLA-DRB1*01:02L
PKGFCDLKGKYVQIPT

SEQ ID NO: 15815 - protein, 14 aa, Severe acute respiratory syndrome coronavirus 2
  REGION 1..14: note = Table B: HLA-DRB1*01:03L HLA-DPA1*01:03-B1*03:01L HLA-DRB1*12:01L HLA-DPA1*02:01-B1*13:01L HLA-DRB1*15:03L
KYVQIPTTCANDPV

SEQ ID NO: 15816 - protein, 11 aa, Severe acute respiratory syndrome coronavirus 2
  REGION 1..11: note = Table B: HLA-DRB1*01:03L HLA-DRB1*04:04L HLA-DQA1*01:02-B1*06:02L HLA-DPA1*03:01-B1*105:01L HLA-DRB1*08:03L
QSADAQSFLNR

SEQ ID NO: 15817 - protein, 15 aa, Severe acute respiratory syndrome coronavirus 2
  REGION 1..15: note = Table B: HLA-DRB1*01:03L HLA-DRB1*01:02L HLA-DRB1*04:08L
DAQSFLNRVCGVSAA

SEQ ID NO: 15818 - protein, 14 aa, Severe acute respiratory syndrome coronavirus 2
  REGION 1..14: note = Table B: HLA-DRB1*01:03L HLA-DRB1*04:08L
QSFLNRVCGVSAAR

SEQ ID NO: 15819 - protein, 14 aa, Severe acute respiratory syndrome coronavirus 2
  REGION 1..14: note = Table B: HLA-DRB1*01:03L HLA-DRB1*08:04L HLA-DRB1*14:01L HLA-DPA1*02:01-B1*13:01L
STDVVYRAFDIYND

SEQ ID NO: 15820 - protein, 12 aa, Severe acute respiratory syndrome coronavirus 2
  REGION 1..12: note = Table B: HLA-DRB1*01:03L HLA-DRB1*01:02L HLA-DRB1*14:01L HLA-DRB1*12:01L HLA-DRB1*16:01L HLA-DRB1*04:08L HLA-DRB1*15:03L
DKVAGFAKFLKT

SEQ ID NO: 15821 - protein, 13 aa, Severe acute respiratory syndrome coronavirus 2
  REGION 1..13: note = Table B: HLA-DRB1*01:03L HLA-DRB1*01:02L HLA-DPA1*03:01-B1*04:02L HLA-DRB1*12:01L HLA-DPA1*03:01-B1*105:01L HLA-DPA1*01:02-B1*04:01L HLA-DRB1*16:01L HLA-DRB1*04:08L HLA-DRB1*15:03L
FAKFLKTNCCRFQ

SEQ ID NO: 15822 - protein, 14 aa, Severe acute respiratory syndrome coronavirus 2
  REGION 1..14: note = Table B: HLA-DRB1*01:03L HLA-DRB1*01:02L HLA-DRB1*16:01L HLA-DRB1*04:08L
AKFLKTNCCRFQEK

SEQ ID NO: 15823 - protein, 12 aa, Severe acute respiratory syndrome coronavirus 2
  REGION 1..12: note = Table B: HLA-DRB1*01:03L HLA-DQA1*01:02-B1*06:02L HLA-DRB1*04:08L
DNLIDSYFVVKR

SEQ ID NO: 15824 - protein, 12 aa, Severe acute respiratory syndrome coronavirus 2
  REGION 1..12: note = Table B: HLA-DRB1*01:03L HLA-DRB1*01:02L HLA-DRB1*04:08L HLA-DRB1*15:03L
NLIDSYFVVKRH

SEQ ID NO: 15825 - protein, 10 aa, Severe acute respiratory syndrome coronavirus 2
  REGION 1..10: note = Table B: HLA-DRB1*01:03L HLA-DQA1*01:02-B1*06:02L HLA-DRB1*03:01L HLA-DQA1*02:01-B1*03:03L
VVKRHTFSNY

SEQ ID NO: 15826 - protein, 12 aa, Severe acute respiratory syndrome coronavirus 2
  REGION 1..12: note = Table B: HLA-DRB1*01:03L HLA-DRB1*04:05L HLA-DRB1*15:03L
YNLLKDCPAVAK

SEQ ID NO: 15827 - protein, 12 aa, Severe acute respiratory syndrome coronavirus 2
  REGION 1..12: note = Table B: HLA-DRB1*01:03L HLA-DRB1*04:05L HLA-DRB1*01:02L HLA-DRB1*12:01L HLA-DRB1*16:01L HLA-DRB1*04:08L HLA-DRB1*15:03L
NLLKDCPAVAKH

SEQ ID NO: 15828 - protein, 12 aa, Severe acute respiratory syndrome coronavirus 2
  REGION 1..12: note = Table B: HLA-DRB1*01:03L HLA-DRB1*04:05L HLA-DQA1*01:02-B1*06:02L HLA-DRB1*01:02L HLA-DRB1*12:01L HLA-DQA1*03:01-B1*03:02L HLA-DRB1*16:01L HLA-DRB1*04:08L HLA-DQA1*02:01-B1*03:03L HLA-DRB1*15:03L
LLKDCPAVAKHD

SEQ ID NO: 15829 - protein, 10 aa, Severe acute respiratory syndrome coronavirus 2
  REGION 1..10: note = Table B: HLA-DRB1*01:03L HLA-DQA1*02:01-B1*03:03L
HISRQRLTKY

SEQ ID NO: 15830 - protein, 15 aa, Severe acute respiratory syndrome coronavirus 2
  REGION 1..15: note = Table B: HLA-DRB1*01:03L HLA-DRB1*04:08L
RQRLTKYTMADLVYA

SEQ ID NO: 15831 - protein, 13 aa, Severe acute respiratory syndrome coronavirus 2
  REGION 1..13: note = Table B: HLA-DRB1*01:03L HLA-DRB1*04:05L HLA-DPA1*01:03-B1*04:02L HLA-DRB1*16:01L
TKYTMADLVYALR

SEQ ID NO: 15832 - protein, 13 aa, Severe acute respiratory syndrome coronavirus 2
  REGION 1..13: note = Table B: HLA-DRB1*01:03L HLA-DRB1*16:01L HLA-DRB1*04:08L
MADLVYALRHFDE

SEQ ID NO: 15833 - protein, 13 aa, Severe acute respiratory syndrome coronavirus 2
  REGION 1..13: note = Table B: HLA-DRB1*01:03L HLA-DRB1*01:02L HLA-DPA1*03:01-B1*04:02L HLA-DRB1*12:01L HLA-DPA1*02:01-B1*13:01L HLA-DPA1*03:01-B1*105:01L HLA-DQA1*03:01-B1*03:02L HLA-DRB1*15:03L
DLVYALRHFDEGN

SEQ ID NO: 15834 - protein, 14 aa, Severe acute respiratory syndrome coronavirus 2
  REGION 1..14: note = Table B: HLA-DRB1*01:03L HLA-DQA1*01:02-B1*06:02L
VYALRHFDEGNCDT

SEQ ID NO: 15835 - protein, 14 aa, Severe acute respiratory syndrome coronavirus 2
  REGION 1..14: note = Table B: HLA-DRB1*01:03L HLA-DRB1*04:05L HLA-DQA1*01:02-B1*06:02L HLA-DRB1*12:01L HLA-DRB1*04:08L
ALRHFDEGNCDTLK

SEQ ID NO: 15836 - protein, 14 aa, Severe acute respiratory syndrome coronavirus 2
  REGION 1..14: note = Table B: HLA-DRB1*01:03L
NKKDWYDFVENPDI

SEQ ID NO: 15837 - protein, 13 aa, Severe acute respiratory syndrome coronavirus 2
  REGION 1..13: note = Table B: HLA-DRB1*01:03L
NPDILRVYANLGE

SEQ ID NO: 15838 - protein, 10 aa, Severe acute respiratory syndrome coronavirus 2
  REGION 1..10: note = Table B: HLA-DRB1*01:03L HLA-DRB1*01:02L HLA-DQA1*03:01-B1*03:02L HLA-DRB1*16:01L HLA-DQA1*02:01-B1*03:03L
YANLGERVRQ

SEQ ID NO: 15839 - protein, 13 aa, Severe acute respiratory syndrome coronavirus 2
  REGION 1..13: note = Table B: HLA-DRB1*01:03L HLA-DPA1*01:03-B1*02:01L HLA-DRB1*16:01L
ALLKTVQFCDAMR

SEQ ID NO: 15840 - protein, 12 aa, Severe acute respiratory syndrome coronavirus 2
  REGION 1..12: note = Table B: HLA-DRB1*01:03L HLA-DQA1*01:02-B1*06:02L HLA-DRB1*01:02L HLA-DPA1*03:01-B1*04:02L HLA-DRB1*08:01L HLA-DPA1*01:03-B1*04:02L HLA-DRB1*12:01L HLA-DPA1*03:01-B1*105:01L HLA-DRB1*16:01L
  REGION 1..12: note = CONT. FROM ABOVE: HLA-DQA1*01:03-B1*06:01L HLA-DRB1*04:08L HLA-D RB1*15:03L
LKTVQFCDAMRN

SEQ ID NO: 15841 - protein, 13 aa, Severe acute respiratory syndrome coronavirus 2
  REGION 1..13: note = Table B: HLA-DRB1*01:03L HLA-DRB1*04:02L HLA-DRB1*04:04L HLA-DRB1*04:05L HLA-DRB1*12:01L HLA-DQA1*03:01-B1*03:02L HLA-DRB1*10:01L HLA-DRB1*16:01L
KTVQFCDAMRNAG

SEQ ID NO: 15842 - protein, 12 aa, Severe acute respiratory syndrome coronavirus 2
  REGION 1..12: note = Table B: HLA-DRB1*01:03L HLA-DRB1*01:02L HLA-DRB4*03:01NL HLA-DRB1*12:01L HLA-DPA1*03:01-B1*105:01L HLA-DRB1*16:01L HLA-DRB1*04:08L HLA-DQA1*02:01-B1*03:03L HLA-DRB1*15:03L
VLTLDNQDLNGN

SEQ ID NO: 15843 - protein, 14 aa, Severe acute respiratory syndrome coronavirus 2
  REGION 1..14: note = Table B: HLA-DRB1*01:03L HLA-DRB1*10:01L HLA-DRB1*16:01L HLA-DRB1*04:08L
SYYSLLMPILTLTR

SEQ ID NO: 15844 - protein, 12 aa, Severe acute respiratory syndrome coronavirus 2
  REGION 1..12: note = Table B: HLA-DRB1*01:03L HLA-DQA1*01:02-B1*06:02L HLA-DRB1*01:02L HLA-DRB1*08:04L HLA-DRB1*14:01L HLA-DRB1*12:01L HLA-DRB1*16:01L HLA-DRB1*04:08L HLA-DRB1*15:03L
PILTLTRALTAE

SEQ ID NO: 15845 - protein, 10 aa, Severe acute respiratory syndrome coronavirus 2
  REGION 1..10: note = Table B: HLA-DRB1*01:03L HLA-DRB1*04:05L HLA-DQA1*01:02-B1*06:02L HLA-DQA1*05:05-B1*03:19L HLA-DRB4*01:01L HLA-DPA1*01:03-B1*04:01L HLA-DPA1*02:01-B1*13:01M HLA-DRB1*16:01L
  REGION 1..10: note = CONT. FROM ABOVE: HLA-DQA1*01:03-B1*06:01L HLA-DQA1*02:01-B1*03: 03L
PYIKWDLLKY

SEQ ID NO: 15846 - protein, 14 aa, Severe acute respiratory syndrome coronavirus 2
  REGION 1..14: note = Table B: HLA-DRB1*01:03L HLA-DRB1*04:05L HLA-DQA1*01:02-B1*06:02L HLA-DRB1*01:02L HLA-DPA1*03:01-B1*04:02L HLA-DPA1*01:03-B1*04:02L HLA-DRB1*12:01L HLA-DPA1*02:01-B1*13:01L HLA-DRB1*04:08L
  REGION 1..14: note = CONT. FROM ABOVE: HLA-DRB1*15:03L
IKWDLLKYDFTEER

SEQ ID NO: 15847 - protein, 10 aa, Severe acute respiratory syndrome coronavirus 2
  REGION 1..10: note = Table B: HLA-DRB1*01:03L HLA-DRB1*01:02L HLA-DQA1*01-B1*05L HLA-DQA1*03:01-B1*03:02L HLA-DPA1*01:02-B1*04:01L HLA-DRB1*16:01L
KYDFTEERLK

SEQ ID NO: 15848 - protein, 11 aa, Severe acute respiratory syndrome coronavirus 2
  REGION 1..11: note = Table B: HLA-DRB1*01:03L HLA-DQA1*01:02-B1*06:02L HLA-DPA1*01:03-B1*03:01L
TEERLKLFDRY

SEQ ID NO: 15849 - protein, 13 aa, Severe acute respiratory syndrome coronavirus 2
  REGION 1..13: note = Table B: HLA-DRB1*01:03L HLA-DRB1*01:02L HLA-DRB1*12:01L HLA-DRB1*04:08L HLA-DRB1*15:03L
EERLKLFDRYFKY

SEQ ID NO: 15850 - protein, 10 aa, Severe acute respiratory syndrome coronavirus 2
  REGION 1..10: note = Table B: HLA-DRB1*01:03L HLA-DQA1*01:02-B1*06:02L HLA-DRB1*03:01L HLA-DRB1*14:02L HLA-DPA1*01:03-B1*04:01L HLA-DPA1*01:03-B1*04:02L HLA-DPA1*02:01-B1*13:01L HLA-DQA1*01:03-B1*06:01L HLA-DQA1*02:01-B1*03:03L
KLFDRYFKYW

SEQ ID NO: 15851 - protein, 10 aa, Severe acute respiratory syndrome coronavirus 2
  REGION 1..10: note = Table B: HLA-DRB1*01:03L HLA-DRB1*04:05L HLA-DQA1*01:02-B1*06:02L HLA-DRB1*03:01L HLA-DRB1*14:02L HLA-DQA1*05:05-B1*03:19L HLA-DQA1*05:01-B1*02:01L HLA-DRB4*01:01L HLA-DPA1*01:03-B1*04:01L
  REGION 1..10: note = CONT. FROM ABOVE: HLA-DQA1*05:05-B1*03:116L HLA-DPA1*01:03-B1*04 :02L HLA-DPA1*02:01-B1*13:01L HLA-DPA1*03:01-B1*105:01L HLA-DRB1 *16:01L HLA-DQA1*01:03-B1*06:01L HLA-DQA1*02:01-B1*03:03L
RYFKYWDQTY

SEQ ID NO: 15852 - protein, 12 aa, Severe acute respiratory syndrome coronavirus 2
  REGION 1..12: note = Table B: HLA-DRB1*01:03L HLA-DQA1*01:02-B1*06:02L HLA-DPA1*03:01-B1*105:01L HLA-DPA1*01:02-B1*04:01L HLA-DQA1*01:03-B1*06:01L
VFPPTSFGPLVR

SEQ ID NO: 15853 - protein, 11 aa, Severe acute respiratory syndrome coronavirus 2
  REGION 1..11: note = Table B: HLA-DRB1*01:03L HLA-DQA1*02:01-B1*03:03L
PPTSFGPLVRK

SEQ ID NO: 15854 - protein, 13 aa, Severe acute respiratory syndrome coronavirus 2
  REGION 1..13: note = Table B: HLA-DRB1*01:03L HLA-DRB1*04:05L HLA-DRB1*01:02L HLA-DQA1*01:01-B1*05:01L HLA-DRB1*08:01L HLA-DPA1*01:03-B1*04:02L HLA-DRB1*12:01L HLA-DQA1*05:05-B1*03:01L HLA-DRB1*14:17L
  REGION 1..13: note = CONT. FROM ABOVE: HLA-DPA1*01:02-B1*04:01L HLA-DRB1*04:08L
VDGVPFVVSTGYH

SEQ ID NO: 15855 - protein, 12 aa, Severe acute respiratory syndrome coronavirus 2
  REGION 1..12: note = Table B: HLA-DRB1*01:03L
TGYHFRELGVVH

SEQ ID NO: 15856 - protein, 11 aa, Severe acute respiratory syndrome coronavirus 2
  REGION 1..11: note = Table B: HLA-DRB1*01:03L HLA-DRB1*08:01L HLA-DRB1*16:01L HLA-DRB1*04:08L
YHFRELGVVHN

SEQ ID NO: 15857 - protein, 11 aa, Severe acute respiratory syndrome coronavirus 2
  REGION 1..11: note = Table B: HLA-DRB1*01:03L HLA-DPA1*01:03-B1*03:01L HLA-DRB1*04:10L HLA-DRB1*12:02L HLA-DPA1*03:01-B1*105:01L
ELGVVHNQDVN

SEQ ID NO: 15858 - protein, 12 aa, Severe acute respiratory syndrome coronavirus 2
  REGION 1..12: note = Table B: HLA-DRB1*01:03L HLA-DRB1*01:02L HLA-DRB1*16:01L HLA-DRB1*04:08L HLA-DRB1*15:03L
DVNLHSSRLSFK

SEQ ID NO: 15859 - protein, 14 aa, Severe acute respiratory syndrome coronavirus 2
  REGION 1..14: note = Table B: HLA-DRB1*01:03L HLA-DRB1*01:02L HLA-DPA1*01:03-B1*04:02L HLA-DRB1*16:01L HLA-DRB1*04:08L HLA-DRB1*15:03L
RLSFKELLVYAADP

SEQ ID NO: 15860 - protein, 12 aa, Severe acute respiratory syndrome coronavirus 2
  REGION 1..12: note = Table B: HLA-DRB1*01:03L HLA-DRB1*01:01L HLA-DRB1*01:02M HLA-DQA1*05:05-B1*03:19L HLA-DPA1*03:01-B1*105:01L HLA-DRB1*10:01L HLA-DRB1*16:01L HLA-DRB1*04:08L HLA-DRB1*15:03L
MHAASGNLLLDK

SEQ ID NO: 15861 - protein, 12 aa, Severe acute respiratory syndrome coronavirus 2
  REGION 1..12: note = Table B: HLA-DRB1*01:03L HLA-DRB1*01:02L HLA-DRB1*16:01L HLA-DRB1*04:08L
HAASGNLLLDKR

SEQ ID NO: 15862 - protein, 14 aa, Severe acute respiratory syndrome coronavirus 2
  REGION 1..14: note = Table B: HLA-DRB1*01:03L HLA-DQA1*01:02-B1*06:02L HLA-DRB1*08:04L HLA-DPA1*01:03-B1*03:01L HLA-DRB1*14:02L HLA-DQA1*05:01-B1*02:01L HLA-DPA1*03:01-B1*105:01L HLA-DRB1*04:08L
NLLLDKRTTCFSVA

SEQ ID NO: 15863 - protein, 14 aa, Severe acute respiratory syndrome coronavirus 2
  REGION 1..14: note = Table B: HLA-DRB1*01:03L
GNFNKDFYDFAVSK

SEQ ID NO: 15864 - protein, 13 aa, Severe acute respiratory syndrome coronavirus 2
  REGION 1..13: note = Table B: HLA-DRB1*01:03L HLA-DRB1*01:02L HLA-DPA1*03:01-B1*04:02L HLA-DQA1*01:01-B1*05:01L HLA-DRB1*08:01L HLA-DRB1*12:01L HLA-DQA1*01:03-B1*06:01L HLA-DRB1*15:03L
FNKDFYDFAVSKG

SEQ ID NO: 15865 - protein, 11 aa, Severe acute respiratory syndrome coronavirus 2
  REGION 1..11: note = Table B: HLA-DRB1*01:03L HLA-DRB1*01:02L HLA-DRB1*12:01L
YDFAVSKGFFK

SEQ ID NO: 15866 - protein, 12 aa, Severe acute respiratory syndrome coronavirus 2
  REGION 1..12: note = Table B: HLA-DRB1*01:03L HLA-DRB1*04:10L HLA-DRB1*12:01L HLA-DRB1*04:08L
KGFFKEGSSVEL

SEQ ID NO: 15867 - protein, 11 aa, Severe acute respiratory syndrome coronavirus 2
  REGION 1..11: note = Table B: HLA-DRB1*01:03L HLA-DRB1*04:02L HLA-DRB1*14:17L
FFKEGSSVELK

SEQ ID NO: 15868 - protein, 11 aa, Severe acute respiratory syndrome coronavirus 2
  REGION 1..11: note = Table B: HLA-DRB1*01:03L HLA-DRB1*01:02L
FKEGSSVELKH

SEQ ID NO: 15869 - protein, 11 aa, Severe acute respiratory syndrome coronavirus 2
  REGION 1..11: note = Table B: HLA-DRB1*01:03L HLA-DRB1*08:77L HLA-DPA1*03:01-B1*04:02L HLA-DRB1*03:01L HLA-DRB4*01:01L HLA-DPA1*01:03-B1*04:02L HLA-DPA1*01:02-B1*04:01L HLA-DRB1*16:01L
KEGSSVELKHF

SEQ ID NO: 15870 - protein, 15 aa, Severe acute respiratory syndrome coronavirus 2
  REGION 1..15: note = Table B: HLA-DRB1*01:03L HLA-DRB1*01:02L HLA-DRB1*08:04L HLA-DPA1*03:01-B1*04:02L HLA-DRB1*14:01L HLA-DRB1*08:01L HLA-DRB1*12:01L HLA-DPA1*03:01-B1*105:01L HLA-DPA1*01:02-B1*04:01L HLA-DRB1*16:01L HLA-DRB1*15:03L
GSSVELKHFFFAQDG

SEQ ID NO: 15871 - protein, 14 aa, Severe acute respiratory syndrome coronavirus 2
  REGION 1..14: note = Table B: HLA-DRB1*01:03L HLA-DRB1*04:05L HLA-DRB1*01:02L HLA-DRB1*08:04L HLA-DPA1*03:01-B1*04:02L HLA-DRB1*08:01L HLA-DRB1*12:01L HLA-DPA1*02:01-B1*13:01L HLA-DRB1*16:01L HLA-DRB1*04:08L HLA-DQA1*02:01-B1*03:03L HLA-DRB1*15:03L
SVELKHFFFAQDGN

SEQ ID NO: 15872 - protein, 12 aa, Severe acute respiratory syndrome coronavirus 2
  REGION 1..12: note = Table B: HLA-DRB1*01:03L HLA-DQA1*01:02-B1*06:02L HLA-DRB1*01:02L HLA-DRB1*12:01L HLA-DPA1*02:01-B1*13:01L HLA-DQA1*03:01-B1*03:02L HLA-DRB1*16:01L HLA-DRB1*04:08L HLA-DQA1*02:01-B1*03:03L HLA-DRB1*15:03L
RYNLPTMCDIRQ

SEQ ID NO: 15873 - protein, 11 aa, Severe acute respiratory syndrome coronavirus 2
  REGION 1..11: note = Table B: HLA-DRB1*01:03L HLA-DRB1*14:02L HLA-DPA1*02:01-B1*13:01L HLA-DQA1*01:03-B1*06:01L
SYEDQDALFAY

SEQ ID NO: 15874 - protein, 13 aa, Severe acute respiratory syndrome coronavirus 2
  REGION 1..13: note = Table B: HLA-DRB1*01:03L HLA-DRB1*01:02L HLA-DRB1*08:01L HLA-DQA1*05:05-B1*03:01L HLA-DRB1*04:08L
YEDQDALFAYTKR

SEQ ID NO: 15875 - protein, 12 aa, Severe acute respiratory syndrome coronavirus 2
  REGION 1..12: note = Table B: HLA-DRB1*01:03L HLA-DRB1*01:02L HLA-DRB1*08:04L HLA-DRB1*08:01L HLA-DRB1*11:01L HLA-DRB1*12:01L HLA-DRB1*04:08L HLA-DRB1*15:03L
ALFAYTKRNVIP

SEQ ID NO: 15876 - protein, 13 aa, Severe acute respiratory syndrome coronavirus 2
  REGION 1..13: note = Table B: HLA-DRB1*01:03L HLA-DRB1*04:04L HLA-DPA1*01:03-B1*03:01L HLA-DRB1*11:04L HLA-DRB1*10:01L HLA-DRB1*04:08L
RNVIPTITQMNLK

SEQ ID NO: 15877 - protein, 10 aa, Severe acute respiratory syndrome coronavirus 2
  REGION 1..10: note = Table B: HLA-DRB1*01:03L HLA-DRB1*08:01L HLA-DQA1*03:01-B1*03:02L HLA-DRB1*14:17L HLA-DRB1*16:01L HLA-DQA1*02:01-B1*03:03L
LKYAISAKNR

SEQ ID NO: 15878 - protein, 10 aa, Severe acute respiratory syndrome coronavirus 2
  REGION 1..10: note = Table B: HLA-DRB1*01:03L
AISAKNRART

SEQ ID NO: 15879 - protein, 12 aa, Severe acute respiratory syndrome coronavirus 2
  REGION 1..12: note = Table B: HLA-DRB1*01:03L HLA-DRB1*14:01L HLA-DRB1*08:01L
ISAKNRARTVAG

SEQ ID NO: 15880 - protein, 14 aa, Severe acute respiratory syndrome coronavirus 2
  REGION 1..14: note = Table B: HLA-DRB1*01:03L HLA-DRB1*04:04L HLA-DRB1*01:02L HLA-DRB1*08:04L HLA-DPA1*01:03-B1*03:01L HLA-DRB1*14:01L HLA-DRB1*11:04L HLA-DRB1*12:01L HLA-DRB1*10:01L HLA-DRB1*16:01L HLA-DRB1*04:08L HLA-DRB1*15:03L
VAGVSICSTMTNRQ

SEQ ID NO: 15881 - protein, 13 aa, Severe acute respiratory syndrome coronavirus 2
  REGION 1..13: note = Table B: HLA-DRB1*01:03L HLA-DRB1*04:04L HLA-DRB1*04:05L HLA-DRB1*16:01L HLA-DRB1*04:08L
VSICSTMTNRQFH

SEQ ID NO: 15882 - protein, 12 aa, Severe acute respiratory syndrome coronavirus 2
  REGION 1..12: note = Table B: HLA-DRB1*01:03L HLA-DPA1*01:02-B1*04:01L HLA-DRB1*16:01L HLA-DRB1*04:08L
RQFHQKLLKSIA

SEQ ID NO: 15883 - protein, 14 aa, Severe acute respiratory syndrome coronavirus 2
  REGION 1..14: note = Table B: HLA-DRB1*01:03L HLA-DRB1*04:08L
QFHQKLLKSIAATR

SEQ ID NO: 15884 - protein, 12 aa, Severe acute respiratory syndrome coronavirus 2
  REGION 1..12: note = Table B: HLA-DRB1*01:03L HLA-DRB1*04:02L HLA-DRB1*04:04L HLA-DRB1*04:05L HLA-DQA1*01:02-B1*06:02L HLA-DRB1*01:02L HLA-DRB1*14:01L HLA-DRB1*08:01L HLA-DRB1*04:10L HLA-DRB1*12:01L HLA-DRB1*16:01L HLA-DRB1*04:08L HLA-DQA1*02:01-B1*03:03L
  REGION 1..12: note = CONT. FROM ABOVE: HLA-DRB1*15:03L
QKLLKSIAATRG

SEQ ID NO: 15885 - protein, 12 aa, Severe acute respiratory syndrome coronavirus 2
  REGION 1..12: note = Table B: HLA-DRB1*01:03L HLA-DRB1*04:02L HLA-DRB1*04:05L HLA-DRB1*01:02L HLA-DPA1*01:03-B1*03:01L HLA-DRB1*12:01L HLA-DPA1*03:01-B1*105:01L HLA-DPA1*01:03-B1*104:01L HLA-DRB1*04:08L
ATRGATVVIGTS

SEQ ID NO: 15886 - protein, 13 aa, Severe acute respiratory syndrome coronavirus 2
  REGION 1..13: note = Table B: HLA-DRB1*01:03L HLA-DRB1*04:05L HLA-DRB1*08:04L HLA-DRB1*08:01L HLA-DPA1*01:03-B1*04:02L HLA-DPA1*01:03-B1*02:01L
VVIGTSKFYGGWH

SEQ ID NO: 15887 - protein, 12 aa, Severe acute respiratory syndrome coronavirus 2
  REGION 1..12: note = Table B: HLA-DRB1*01:03L HLA-DRB1*01:02L HLA-DRB1*08:01L HLA-DRB1*16:01L HLA-DRB1*04:08L
SKFYGGWHNMLK

SEQ ID NO: 15888 - protein, 14 aa, Severe acute respiratory syndrome coronavirus 2
  REGION 1..14: note = Table B: HLA-DRB1*01:03L HLA-DRB1*04:05L HLA-DQA1*01:02-B1*06:02L HLA-DRB1*01:02L HLA-DRB1*08:01L HLA-DRB1*12:01L HLA-DPA1*02:01-B1*13:01L HLA-DPA1*01:02-B1*04:01L HLA-DRB1*16:01L HLA-DRB1*04:08L
NPHLMGWDYPKCDR

SEQ ID NO: 15889 - protein, 11 aa, Severe acute respiratory syndrome coronavirus 2
  REGION 1..11: note = Table B: HLA-DRB1*01:03L HLA-DRB1*01:02L HLA-DRB1*16:01L HLA-DRB1*15:03L
LRIMASLVLAR

SEQ ID NO: 15890 - protein, 12 aa, Severe acute respiratory syndrome coronavirus 2
  REGION 1..12: note = Table B: HLA-DRB1*01:03L HLA-DRB1*01:02L HLA-DRB1*16:01L HLA-DRB1*04:08L HLA-DRB1*15:03L
RIMASLVLARKH

SEQ ID NO: 15891 - protein, 12 aa, Severe acute respiratory syndrome coronavirus 2
  REGION 1..12: note = Table B: HLA-DRB1*01:03L HLA-DRB1*04:02L HLA-DQA1*01:02-B1*06:02L HLA-DRB1*01:02L HLA-DRB1*08:01L HLA-DRB1*12:01L HLA-DRB1*16:01L HLA-DQA1*01:03-B1*06:01L
MASLVLARKHTT

SEQ ID NO: 15892 - protein, 14 aa, Severe acute respiratory syndrome coronavirus 2
  REGION 1..14: note = Table B: HLA-DRB1*01:03L HLA-DRB1*11:01L
ASLVLARKHTTCCS

SEQ ID NO: 15893 - protein, 16 aa, Severe acute respiratory syndrome coronavirus 2
  REGION 1..16: note = Table B: HLA-DRB1*01:03L HLA-DRB1*15:03L
SLVLARKHTTCCSLSH

SEQ ID NO: 15894 - protein, 15 aa, Severe acute respiratory syndrome coronavirus 2
  REGION 1..15: note = Table B: HLA-DRB1*01:03L HLA-DRB1*03:01L HLA-DRB3*01:01L HLA-DQA1*03:01-B1*03:02L HLA-DPA1*01:03-B1*104:01L HLA-DQA1*01:03-B1*06:01L HLA-DRB1*15:03L
VLARKHTTCCSLSHR

SEQ ID NO: 15895 - protein, 16 aa, Severe acute respiratory syndrome coronavirus 2
  REGION 1..16: note = Table B: HLA-DRB1*01:03L HLA-DRB1*16:01L
ARKHTTCCSLSHRFYR

SEQ ID NO: 15896 - protein, 12 aa, Severe acute respiratory syndrome coronavirus 2
  REGION 1..12: note = Table B: HLA-DRB1*01:03L HLA-DRB1*04:05L HLA-DRB1*01:02L HLA-DRB1*08:01L HLA-DRB1*12:01L HLA-DPA1*02:01-B1*13:01L HLA-DRB1*16:01L
HRFYRLANECAQ

SEQ ID NO: 15897 - protein, 13 aa, Severe acute respiratory syndrome coronavirus 2
  REGION 1..13: note = Table B: HLA-DRB1*01:03L HLA-DRB1*04:04L HLA-DRB1*04:05L HLA-DPA1*01:03-B1*104:01L
RFYRLANECAQVL

SEQ ID NO: 15898 - protein, 12 aa, Severe acute respiratory syndrome coronavirus 2
  REGION 1..12: note = Table B: HLA-DRB1*01:03L HLA-DRB1*04:05L HLA-DQA1*01:02-B1*06:02L HLA-DRB1*14:01L HLA-DQA1*01:01-B1*05:01L HLA-DRB1*08:01L HLA-DQA1*01-B1*05L HLA-DQA1*05:05-B1*03:19L HLA-DQA1*05:01-B1*02:01L
  REGION 1..12: note = CONT. FROM ABOVE: HLA-DRB1*12:01L HLA-DPA1*03:01-B1*105:01L HLA- DRB1*14:54L HLA-DQA1*05:05-B1*03:01L HLA-DRB1*16:01L HLA-DQA1*01 :03-B1*06:01L HLA-DRB1*04:08L
GGSLYVKPGGTS

SEQ ID NO: 15899 - protein, 14 aa, Severe acute respiratory syndrome coronavirus 2
  REGION 1..14: note = Table B: HLA-DRB1*01:03L HLA-DRB1*04:02L HLA-DQA1*01:02-B1*06:02L HLA-DPA1*01:03-B1*03:01L HLA-DQA1*01:03-B1*06:01L HLA-DRB1*04:08L
LYVKPGGTSSGDAT

SEQ ID NO: 15900 - protein, 14 aa, Severe acute respiratory syndrome coronavirus 2
  REGION 1..14: note = Table B: HLA-DRB1*01:03L HLA-DQA1*01:02-B1*06:02L HLA-DQA1*01:03-B1*06:01L HLA-DRB1*04:08L
YVKPGGTSSGDATT

SEQ ID NO: 15901 - protein, 12 aa, Severe acute respiratory syndrome coronavirus 2
  REGION 1..12: note = Table B: HLA-DRB1*01:03L HLA-DRB1*04:02L HLA-DRB1*04:05L HLA-DRB1*01:02L HLA-DRB4*03:01NL HLA-DPA1*01:03-B1*03:01L HLA-DQA1*01:01-B1*05:01L HLA-DRB1*08:01L HLA-DQA1*01-B1*05L HLA-DQA1*05:05-B1*03:116L HLA-DPA1*01:03-B1*04:02L
  REGION 1..12: note = CONT. FROM ABOVE: HLA-DRB1*12:01L HLA-DRB1*16:01L HLA-DRB1*04:08 L
DATTAYANSVFN

SEQ ID NO: 15902 - protein, 12 aa, Severe acute respiratory syndrome coronavirus 2
  REGION 1..12: note = Table B: HLA-DRB1*01:03L HLA-DPA1*01:03-B1*03:01L HLA-DQA1*01-B1*05L HLA-DRB1*12:01L HLA-DPA1*01:03-B1*02:01L HLA-DRB1*16:01L HLA-DRB1*04:08L
TAYANSVFNICQ

SEQ ID NO: 15903 - protein, 14 aa, Severe acute respiratory syndrome coronavirus 2
  REGION 1..14: note = Table B: HLA-DRB1*01:03L HLA-DRB1*01:02L HLA-DRB1*08:04L HLA-DPA1*01:03-B1*03:01L HLA-DRB1*16:01L HLA-DRB1*15:03L
AYANSVFNICQAVT

SEQ ID NO: 15904 - protein, 13 aa, Severe acute respiratory syndrome coronavirus 2
  REGION 1..13: note = Table B: HLA-DRB1*01:03L HLA-DRB1*04:04L HLA-DRB1*04:05L HLA-DRB1*01:01L HLA-DRB3*02:01L HLA-DRB1*14:01L HLA-DRB1*14:02L HLA-DQA1*05:01-B1*02:01L HLA-DPA1*01:03-B1*04:02L HLA-DPA1*01:03-B1*104:01L HLA-DRB1*10:01L
VFNICQAVTANVN

SEQ ID NO: 15905 - protein, 14 aa, Severe acute respiratory syndrome coronavirus 2
  REGION 1..14: note = Table B: HLA-DRB1*01:03L HLA-DRB1*04:04L HLA-DQA1*01:02-B1*06:02L HLA-DRB1*14:01L HLA-DRB1*08:01L HLA-DRB3*01:01L HLA-DPA1*01:03-B1*104:01L HLA-DRB1*07:01L HLA-DQA1*01:03-B1*06:01L HLA-DRB1*04:08L HLA-DRB1*15:03L
DGNKIADKYVRNLQ

SEQ ID NO: 15906 - protein, 14 aa, Severe acute respiratory syndrome coronavirus 2
  REGION 1..14: note = Table B: HLA-DRB1*01:03L HLA-DRB1*04:04L HLA-DQA1*01:02-B1*06:02L HLA-DRB1*14:01L HLA-DRB1*08:01L HLA-DRB3*01:01L HLA-DRB1*07:01L HLA-DRB1*04:08L HLA-DRB1*15:03L
GNKIADKYVRNLQH

SEQ ID NO: 15907 - protein, 10 aa, Severe acute respiratory syndrome coronavirus 2
  REGION 1..10: note = Table B: HLA-DRB1*01:03L HLA-DRB1*08:01L HLA-DQA1*03:01-B1*03:02L
DKYVRNLQHR

SEQ ID NO: 15908 - protein, 10 aa, Severe acute respiratory syndrome coronavirus 2
  REGION 1..10: note = Table B: HLA-DRB1*01:03L HLA-DRB1*01:02L HLA-DRB1*12:01L HLA-DQA1*03:01-B1*03:02L HLA-DPA1*01:02-B1*04:01L HLA-DRB1*16:01L HLA-DQA1*02:01-B1*03:03L
KYVRNLQHRL

SEQ ID NO: 15909 - protein, 10 aa, Severe acute respiratory syndrome coronavirus 2
  REGION 1..10: note = Table B: HLA-DRB1*01:03L HLA-DRB1*01:02L HLA-DRB1*14:01L HLA-DRB1*12:01L HLA-DPA1*01:02-B1*04:01L HLA-DRB1*16:01L
VRNLQHRLYE

SEQ ID NO: 15910 - protein, 14 aa, Severe acute respiratory syndrome coronavirus 2
  REGION 1..14: note = Table B: HLA-DRB1*01:03L HLA-DRB1*16:01L
NLQHRLYECLYRNR

SEQ ID NO: 15911 - protein, 12 aa, Severe acute respiratory syndrome coronavirus 2
  REGION 1..12: note = Table B: HLA-DRB1*01:03L HLA-DRB1*01:02L HLA-DRB1*11:01L HLA-DRB1*16:01L HLA-DRB1*04:08L
HRLYECLYRNRD

SEQ ID NO: 15912 - protein, 13 aa, Severe acute respiratory syndrome coronavirus 2
  REGION 1..13: note = Table B: HLA-DRB1*01:03L HLA-DRB1*16:01L
RLYECLYRNRDVD

SEQ ID NO: 15913 - protein, 14 aa, Severe acute respiratory syndrome coronavirus 2
  REGION 1..14: note = Table B: HLA-DRB1*01:03L HLA-DRB1*01:02L
LYRNRDVDTDFVNE

SEQ ID NO: 15914 - protein, 13 aa, Severe acute respiratory syndrome coronavirus 2
  REGION 1..13: note = Table B: HLA-DRB1*01:03L HLA-DRB1*04:08L
VDTDFVNEFYAYL

SEQ ID NO: 15915 - protein, 10 aa, Severe acute respiratory syndrome coronavirus 2
  REGION 1..10: note = Table B: HLA-DRB1*01:03L HLA-DPA1*03:01-B1*04:02L HLA-DPA1*01:03-B1*04:01L HLA-DPA1*01:03-B1*04:02L HLA-DPA1*03:01-B1*105:01L HLA-DPA1*01:03-B1*02:01L HLA-DPA1*01:02-B1*04:01M HLA-DRB1*16:01L
  REGION 1..10: note = CONT. FROM ABOVE: HLA-DQA1*01:03-B1*06:01L HLA-DRB1*04:08L
FVNEFYAYLR

SEQ ID NO: 15916 - protein, 11 aa, Severe acute respiratory syndrome coronavirus 2
  REGION 1..11: note = Table B: HLA-DRB1*01:03L HLA-DRB1*01:02L HLA-DRB1*08:01L HLA-DQA1*03:01-B1*03:02L HLA-DRB1*16:01L HLA-DRB1*04:08L HLA-DQA1*02:01-B1*03:03L
VNEFYAYLRKH

SEQ ID NO: 15917 - protein, 10 aa, Severe acute respiratory syndrome coronavirus 2
  REGION 1..10: note = Table B: HLA-DRB1*01:03L HLA-DRB1*04:05L HLA-DQA1*01:02-B1*06:02L HLA-DQA1*05:05-B1*03:19L HLA-DPA1*02:01-B1*13:01L HLA-DPA1*03:01-B1*105:01L HLA-DPA1*01:02-B1*04:01L HLA-DRB1*16:01L
  REGION 1..10: note = CONT. FROM ABOVE: HLA-DQA1*01:03-B1*06:01L HLA-DQA1*02:01-B1*03: 03L HLA-DRB1*15:03L
EFYAYLRKHF

SEQ ID NO: 15918 - protein, 10 aa, Severe acute respiratory syndrome coronavirus 2
  REGION 1..10: note = Table B: HLA-DRB1*01:03L HLA-DQA1*01:02-B1*06:02L HLA-DRB1*14:01L HLA-DRB1*08:01L HLA-DRB1*11:01L HLA-DPA1*01:02-B1*04:01L HLA-DRB1*16:01L HLA-DRB1*04:08L
YAYLRKHFSM

SEQ ID NO: 15919 - protein, 15 aa, Severe acute respiratory syndrome coronavirus 2
  REGION 1..15: note = Table B: HLA-DRB1*01:03L HLA-DPA1*03:01-B1*04:02L HLA-DRB1*04:08L
AYLRKHFSMMILSDD

SEQ ID NO: 15920 - protein, 14 aa, Severe acute respiratory syndrome coronavirus 2
  REGION 1..14: note = Table B: HLA-DRB1*01:03L HLA-DRB1*15:03L
RKHFSMMILSDDAV

SEQ ID NO: 15921 - protein, 14 aa, Severe acute respiratory syndrome coronavirus 2
  REGION 1..14: note = Table B: HLA-DRB1*01:03L HLA-DPA1*03:01-B1*04:02L HLA-DRB1*11:02L HLA-DQA1*05:05-B1*03:19L HLA-DRB3*01:01L HLA-DQA1*05:05-B1*03:01L HLA-DRB1*04:08L
SMMILSDDAVVCFN

SEQ ID NO: 15922 - protein, 14 aa, Severe acute respiratory syndrome coronavirus 2
  REGION 1..14: note = Table B: HLA-DRB1*01:03L HLA-DRB1*04:04L HLA-DRB1*04:05L HLA-DRB1*14:01L HLA-DRB1*04:10L HLA-DPA1*03:01-B1*105:01L HLA-DQA1*05:05-B1*03:01L HLA-DRB1*04:08L HLA-DQA1*02:01-B1*03:03L HLA-DRB1*15:01L
DDAVVCFNSTYASQ

SEQ ID NO: 15923 - protein, 12 aa, Severe acute respiratory syndrome coronavirus 2
  REGION 1..12: note = Table B: HLA-DRB1*01:03L HLA-DRB1*04:04L HLA-DRB1*04:05L HLA-DQA1*01:02-B1*06:02L HLA-DRB1*01:02L HLA-DRB4*03:01NL HLA-DRB1*04:10L HLA-DRB1*12:01L HLA-DRB1*14:54L HLA-DRB1*16:01L HLA-DRB1*04:08L HLA-DRB1*15:03L
QGLVASIKNFKS

SEQ ID NO: 15924 - protein, 12 aa, Severe acute respiratory syndrome coronavirus 2
  REGION 1..12: note = Table B: HLA-DRB1*01:03L HLA-DRB1*04:04L HLA-DRB1*04:05L HLA-DQA1*01:02-B1*06:02L HLA-DRB1*01:02L HLA-DRB1*08:04L HLA-DRB1*12:01L HLA-DPA1*03:01-B1*105:01L HLA-DRB1*16:01L HLA-DRB1*04:08L HLA-DRB1*15:03L
GLVASIKNFKSV

SEQ ID NO: 15925 - protein, 12 aa, Severe acute respiratory syndrome coronavirus 2
  REGION 1..12: note = Table B: HLA-DRB1*01:03L HLA-DRB1*04:05L HLA-DRB1*01:02L HLA-DRB1*08:04L HLA-DRB1*08:01L HLA-DQA1*01-B1*05L HLA-DPA1*01:03-B1*04:01L HLA-DPA1*01:03-B1*04:02L HLA-DRB1*12:01L HLA-DPA1*02:01-B1*13:01L
  REGION 1..12: note = CONT. FROM ABOVE: HLA-DQA1*03:01-B1*03:02L HLA-DPA1*01:03-B1*02: 01L HLA-DRB1*16:01L HLA-DRB1*04:08L HLA-DRB1*15:03L
KNFKSVLYYQNN

SEQ ID NO: 15926 - protein, 14 aa, Severe acute respiratory syndrome coronavirus 2
  REGION 1..14: note = Table B: HLA-DRB1*01:03L HLA-DRB1*01:02L HLA-DRB1*04:08L
PHEFCSQHTMLVKQ

SEQ ID NO: 15927 - protein, 14 aa, Severe acute respiratory syndrome coronavirus 2
  REGION 1..14: note = Table B: HLA-DRB1*01:03L HLA-DRB1*01:02L HLA-DRB1*04:08L
HEFCSQHTMLVKQG

SEQ ID NO: 15928 - protein, 11 aa, Severe acute respiratory syndrome coronavirus 2
  REGION 1..11: note = Table B: HLA-DRB1*01:03L HLA-DQA1*05:05-B1*03:116L HLA-DPA1*02:01-B1*13:01L
KTDGTLMIERF

SEQ ID NO: 15929 - protein, 10 aa, Severe acute respiratory syndrome coronavirus 2
  REGION 1..10: note = Table B: HLA-DRB1*01:03L HLA-DPA1*01:03-B1*03:01L HLA-DPA1*03:01-B1*04:02L HLA-DPA1*01:03-B1*04:01L HLA-DPA1*01:03-B1*04:02L HLA-DRB1*12:01L HLA-DPA1*03:01-B1*105:01L HLA-DPA1*01:02-B1*04:01M
  REGION 1..10: note = CONT. FROM ABOVE: HLA-DRB1*16:01L HLA-DQA1*01:03-B1*06:01L HLA-D RB1*04:08L
LMIERFVSLA

SEQ ID NO: 15930 - protein, 12 aa, Severe acute respiratory syndrome coronavirus 2
  REGION 1..12: note = Table B: HLA-DRB1*01:03L HLA-DQA1*01:02-B1*06:02L HLA-DRB1*01:02L HLA-DRB1*08:01L HLA-DQA1*01-B1*05L HLA-DPA1*03:01-B1*105:01L HLA-DRB1*14:17L HLA-DPA1*01:02-B1*04:01L HLA-DRB1*16:01L HLA-DRB1*15:03L
AIDAYPLTKHPN

SEQ ID NO: 15931 - protein, 11 aa, Severe acute respiratory syndrome coronavirus 2
  REGION 1..11: note = Table B: HLA-DRB1*01:03L HLA-DRB1*01:02L HLA-DRB1*16:01L HLA-DRB1*04:08L HLA-DRB1*15:03L
VFHLYLQYIRK

SEQ ID NO: 15932 - protein, 12 aa, Severe acute respiratory syndrome coronavirus 2
  REGION 1..12: note = Table B: HLA-DRB1*01:03L HLA-DQA1*01:02-B1*06:02L HLA-DRB1*01:02L HLA-DRB1*14:01L HLA-DRB1*11:04L HLA-DRB1*08:01L HLA-DRB1*11:01L HLA-DRB1*16:01L HLA-DRB1*04:08L
HLYLQYIRKLHD

SEQ ID NO: 15933 - protein, 12 aa, Severe acute respiratory syndrome coronavirus 2
  REGION 1..12: note = Table B: HLA-DRB1*01:03L HLA-DRB1*01:02L HLA-DRB1*08:01L HLA-DRB1*04:08L HLA-DRB1*15:03L
QYIRKLHDELTG

SEQ ID NO: 15934 - protein, 12 aa, Severe acute respiratory syndrome coronavirus 2
  REGION 1..12: note = Table B: HLA-DRB1*01:03L HLA-DRB1*01:02L HLA-DRB1*04:08L HLA-DRB1*15:03L
YIRKLHDELTGH

SEQ ID NO: 15935 - protein, 12 aa, Severe acute respiratory syndrome coronavirus 2
  REGION 1..12: note = Table B: HLA-DRB1*01:03L HLA-DRB1*04:05L HLA-DRB1*01:02L HLA-DRB1*12:01L HLA-DRB1*04:08L HLA-DRB1*15:03L
IRKLHDELTGHM

SEQ ID NO: 15936 - protein, 14 aa, Severe acute respiratory syndrome coronavirus 2
  REGION 1..14: note = Table B: HLA-DRB1*01:03L HLA-DRB1*04:04L HLA-DQA1*01:02-B1*06:02L HLA-DRB1*14:01L HLA-DPA1*03:01-B1*105:01L HLA-DRB1*14:17L HLA-DRB1*04:08L
TGHMLDMYSVMLTN

SEQ ID NO: 15937 - protein, 13 aa, Severe acute respiratory syndrome coronavirus 2
  REGION 1..13: note = Table B: HLA-DRB1*01:03L HLA-DRB1*10:01L
LDMYSVMLTNDNT

SEQ ID NO: 15938 - protein, 13 aa, Severe acute respiratory syndrome coronavirus 2
  REGION 1..13: note = Table B: HLA-DRB1*01:03L HLA-DRB1*04:02L HLA-DQA1*01:02-B1*06:02L HLA-DRB1*01:02L HLA-DRB1*08:01L HLA-DPA1*01:03-B1*04:02L HLA-DRB1*12:01L HLA-DPA1*02:01-B1*13:01L HLA-DPA1*01:03-B1*02:01L
  REGION 1..13: note = CONT. FROM ABOVE: HLA-DQA1*05:05-B1*03:01L HLA-DRB1*04:08L HLA-D RB1*15:03L
WEPEFYEAMYTPH

SEQ ID NO: 15939 - protein, 13 aa, Severe acute respiratory syndrome coronavirus 2
  REGION 1..13: note = Table B: HLA-DRB1*01:03L HLA-DRB1*04:05L HLA-DQA1*01:02-B1*06:02L HLA-DRB1*11:03L HLA-DRB1*11:01L HLA-DRB1*04:08L
DHVISTSHKLVLS

SEQ ID NO: 15940 - protein, 12 aa, Severe acute respiratory syndrome coronavirus 2
  REGION 1..12: note = Table B: HLA-DRB1*01:03L HLA-DRB1*04:05L HLA-DQA1*01:02-B1*06:02L HLA-DRB1*01:02L HLA-DRB1*14:01L HLA-DRB1*11:04L HLA-DRB1*11:01L HLA-DQA1*03:01-B1*03:02L HLA-DPA1*01:02-B1*04:01L HLA-DRB1*16:01L HLA-DRB1*04:08L
  REGION 1..12: note = CONT. FROM ABOVE: HLA-DQA1*02:01-B1*03:03L
GMSYYCKSHKPP

SEQ ID NO: 15941 - protein, 14 aa, Severe acute respiratory syndrome coronavirus 2
  REGION 1..14: note = Table B: HLA-DRB1*01:03L HLA-DRB1*04:08L
QVFGLYKNTCVGSD

SEQ ID NO: 15942 - protein, 12 aa, Severe acute respiratory syndrome coronavirus 2
  REGION 1..12: note = Table B: HLA-DRB1*01:03L HLA-DRB1*04:08L
RLKLFAAETLKA

SEQ ID NO: 15943 - protein, 12 aa, Severe acute respiratory syndrome coronavirus 2
  REGION 1..12: note = Table B: HLA-DRB1*01:03L HLA-DRB1*12:01L HLA-DRB1*04:08L
LKLFAAETLKAT

SEQ ID NO: 15944 - protein, 11 aa, Severe acute respiratory syndrome coronavirus 2
  REGION 1..11: note = Table B: HLA-DRB1*01:03L HLA-DRB1*04:04L HLA-DRB1*04:05L HLA-DRB1*01:02L HLA-DPA1*03:01-B1*04:02L HLA-DQA1*05:05-B1*03:19L HLA-DPA1*01:03-B1*04:02L HLA-DRB1*12:01L HLA-DRB1*14:54L HLA-DRB1*04:08L HLA-DRB1*15:03L
LFAAETLKATE

SEQ ID NO: 15945 - protein, 11 aa, Severe acute respiratory syndrome coronavirus 2
  REGION 1..11: note = Table B: HLA-DRB1*01:03L HLA-DQA1*05:05-B1*03:19L HLA-DPA1*01:03-B1*04:02L HLA-DRB1*12:01L HLA-DRB1*14:54L HLA-DRB1*04:08L
FAAETLKATEE

SEQ ID NO: 15946 - protein, 12 aa, Severe acute respiratory syndrome coronavirus 2
  REGION 1..12: note = Table B: HLA-DRB1*01:03L HLA-DQA1*01:02-B1*06:02L HLA-DRB1*01:02L HLA-DPA1*03:01-B1*105:01L HLA-DRB1*16:01L HLA-DRB1*04:08L HLA-DRB1*15:03L
FKLSYGIATVRE

SEQ ID NO: 15947 - protein, 14 aa, Severe acute respiratory syndrome coronavirus 2
  REGION 1..14: note = Table B: HLA-DRB1*01:03L HLA-DRB1*08:01L
KLSYGIATVREVLS

SEQ ID NO: 15948 - protein, 14 aa, Severe acute respiratory syndrome coronavirus 2
  REGION 1..14: note = Table B: HLA-DRB1*01:03L
LSYGIATVREVLSD

SEQ ID NO: 15949 - protein, 14 aa, Severe acute respiratory syndrome coronavirus 2
  REGION 1..14: note = Table B: HLA-DRB1*01:03L
SYGIATVREVLSDR

SEQ ID NO: 15950 - protein, 12 aa, Severe acute respiratory syndrome coronavirus 2
  REGION 1..12: note = Table B: HLA-DRB1*01:03L HLA-DRB1*04:05L HLA-DQA1*01:02-B1*06:02L HLA-DRB1*01:02L HLA-DQA1*01:01-B1*05:01L HLA-DRB1*08:01L HLA-DRB1*04:08L
TVREVLSDRELH

SEQ ID NO: 15951 - protein, 14 aa, Severe acute respiratory syndrome coronavirus 2
  REGION 1..14: note = Table B: HLA-DRB1*01:03L HLA-DRB1*01:02L HLA-DRB1*04:08L
RPPLNRNYVFTGYR

SEQ ID NO: 15952 - protein, 11 aa, Severe acute respiratory syndrome coronavirus 2
  REGION 1..11: note = Table B: HLA-DRB1*01:03L HLA-DPA1*01:03-B1*04:01L HLA-DRB1*12:01L HLA-DRB1*04:08L
RNYVFTGYRVT

SEQ ID NO: 15953 - protein, 12 aa, Severe acute respiratory syndrome coronavirus 2
  REGION 1..12: note = Table B: HLA-DRB1*01:03L HLA-DRB1*04:08L HLA-DQA1*02:01-B1*03:03L
VFTGYRVTKNSK

SEQ ID NO: 15954 - protein, 11 aa, Severe acute respiratory syndrome coronavirus 2
  REGION 1..11: note = Table B: HLA-DRB1*01:03L HLA-DRB1*01:02L HLA-DRB1*14:01L HLA-DRB1*12:01L HLA-DPA1*01:02-B1*04:01L HLA-DRB1*04:08L HLA-DQA1*02:01-B1*03:03L HLA-DRB1*15:03L
TGYRVTKNSKV

SEQ ID NO: 15955 - protein, 10 aa, Severe acute respiratory syndrome coronavirus 2
  REGION 1..10: note = Table B: HLA-DRB1*01:03L HLA-DQA1*01:02-B1*06:02L HLA-DRB1*03:01L HLA-DRB1*14:02L HLA-DQA1*05:05-B1*03:19L HLA-DQA1*05:01-B1*02:01L HLA-DQA1*02:01-B1*03:03L
KNSKVQIGEY

SEQ ID NO: 15956 - protein, 14 aa, Severe acute respiratory syndrome coronavirus 2
  REGION 1..14: note = Table B: HLA-DRB1*01:03L HLA-DRB1*01:02L HLA-DPA1*02:01-B1*13:01L HLA-DRB1*04:08L HLA-DRB1*15:03L
EKGDYGDAVVYRGT

SEQ ID NO: 15957 - protein, 14 aa, Severe acute respiratory syndrome coronavirus 2
  REGION 1..14: note = Table B: HLA-DRB1*01:03L HLA-DRB1*01:02L HLA-DPA1*01:03-B1*02:01L HLA-DRB1*16:01L HLA-DRB1*04:08L
YKLNVGDYFVLTSH

SEQ ID NO: 15958 - protein, 14 aa, Severe acute respiratory syndrome coronavirus 2
  REGION 1..14: note = Table B: HLA-DRB1*01:03L HLA-DQA1*01-B1*05L HLA-DRB1*12:01L HLA-DRB1*04:08L
VRITGLYPTLNISD

SEQ ID NO: 15959 - protein, 12 aa, Severe acute respiratory syndrome coronavirus 2
  REGION 1..12: note = Table B: HLA-DRB1*01:03L HLA-DRB1*01:02L HLA-DPA1*03:01-B1*04:02L HLA-DQA1*01-B1*05L HLA-DQA1*05:05-B1*03:19L HLA-DPA1*01:03-B1*04:02L HLA-DQA1*05:05-B1*03:01L HLA-DRB1*16:01L HLA-DRB1*04:08L
AIGLALYYPSAR

SEQ ID NO: 15960 - protein, 13 aa, Severe acute respiratory syndrome coronavirus 2
  REGION 1..13: note = Table B: HLA-DRB1*01:03L HLA-DRB1*04:05L HLA-DRB3*02:01L HLA-DPA1*03:01-B1*04:02L HLA-DRB1*14:01L HLA-DPA1*02:01-B1*13:01L HLA-DQA1*05:05-B1*03:01L HLA-DRB1*04:08L HLA-DRB1*15:01L
IGLALYYPSARIV

SEQ ID NO: 15961 - protein, 15 aa, Severe acute respiratory syndrome coronavirus 2
  REGION 1..15: note = Table B: HLA-DRB1*01:03L HLA-DRB1*01:01L HLA-DPA1*03:01-B1*04:02L HLA-DRB1*14:01L HLA-DRB1*08:01L HLA-DRB1*11:01L HLA-DRB1*04:10L HLA-DRB3*01:01L HLA-DPA1*03:01-B1*105:01L HLA-DQA1*05:05-B1*03:01L
  REGION 1..15: note = CONT. FROM ABOVE: HLA-DRB1*07:01L HLA-DQA1*01:03-B1*06:01L
YPSARIVYTACSHAA

SEQ ID NO: 15962 - protein, 13 aa, Severe acute respiratory syndrome coronavirus 2
  REGION 1..13: note = Table B: HLA-DRB1*01:03L HLA-DRB1*01:02L HLA-DRB1*14:01L HLA-DRB1*12:01L HLA-DRB1*04:08L HLA-DRB1*15:03L
ARIVYTACSHAAV

SEQ ID NO: 15963 - protein, 11 aa, Severe acute respiratory syndrome coronavirus 2
  REGION 1..11: note = Table B: HLA-DRB1*01:03L HLA-DPA1*01:02-B1*04:01L HLA-DRB1*16:01L HLA-DRB1*04:08L
LKYLPIDKCSR

SEQ ID NO: 15964 - protein, 14 aa, Severe acute respiratory syndrome coronavirus 2
  REGION 1..14: note = Table B: HLA-DRB1*01:03L HLA-DRB1*01:02L HLA-DRB3*01:01L HLA-DRB1*16:01L HLA-DRB1*04:08L
KYLPIDKCSRIIPA

SEQ ID NO: 15965 - protein, 14 aa, Severe acute respiratory syndrome coronavirus 2
  REGION 1..14: note = Table B: HLA-DRB1*01:03L HLA-DRB1*11:04L HLA-DRB1*11:01L HLA-DRB1*12:01L HLA-DRB1*15:03L
RARVECFDKFKVNS

SEQ ID NO: 15966 - protein, 15 aa, Severe acute respiratory syndrome coronavirus 2
  REGION 1..15: note = Table B: HLA-DRB1*01:03L HLA-DRB1*04:04L HLA-DPA1*01:03-B1*03:01L HLA-DRB1*14:02L HLA-DRB1*09:01L HLA-DPA1*01:03-B1*04:02L HLA-DPA1*02:01-B1*13:01L HLA-DRB1*07:01L HLA-DRB1*04:08L HLA-DRB1*15:01L
DEISMATNYDLSVVN

SEQ ID NO: 15967 - protein, 10 aa, Severe acute respiratory syndrome coronavirus 2
  REGION 1..10: note = Table B: HLA-DRB1*01:03L HLA-DRB1*12:01L HLA-DQA1*03:01-B1*03:02L
SVVNARLRAK

SEQ ID NO: 15968 - protein, 10 aa, Severe acute respiratory syndrome coronavirus 2
  REGION 1..10: note = Table B: HLA-DRB1*01:03L
VVNARLRAKH

SEQ ID NO: 15969 - protein, 12 aa, Severe acute respiratory syndrome coronavirus 2
  REGION 1..12: note = Table B: HLA-DRB1*01:03L HLA-DRB1*16:01L HLA-DRB1*04:08L
ARLRAKHYVYIG

SEQ ID NO: 15970 - protein, 14 aa, Severe acute respiratory syndrome coronavirus 2
  REGION 1..14: note = Table B: HLA-DRB1*01:03L HLA-DRB1*01:02L HLA-DRB1*08:01L HLA-DRB1*16:01L HLA-DRB1*04:08L
RLRAKHYVYIGDPA

SEQ ID NO: 15971 - protein, 11 aa, Severe acute respiratory syndrome coronavirus 2
  REGION 1..11: note = Table B: HLA-DRB1*01:03L HLA-DPA1*03:01-B1*04:02L HLA-DPA1*01:03-B1*04:01L HLA-DPA1*01:03-B1*04:02L HLA-DPA1*03:01-B1*105:01L HLA-DPA1*01:02-B1*04:01L HLA-DRB1*04:08L
LEPEYFNSVCR

SEQ ID NO: 15972 - protein, 14 aa, Severe acute respiratory syndrome coronavirus 2
  REGION 1..14: note = Table B: HLA-DRB1*01:03L HLA-DRB1*01:02L HLA-DRB1*16:01L HLA-DRB1*04:08L
KTIGPDMFLGTCRR

SEQ ID NO: 15973 - protein, 12 aa, Severe acute respiratory syndrome coronavirus 2
  REGION 1..12: note = Table B: HLA-DRB1*01:03L HLA-DRB1*04:05L HLA-DRB1*01:02L HLA-DPA1*01:03-B1*03:01L HLA-DQA1*01-B1*05L HLA-DRB1*04:10L HLA-DRB1*16:01L HLA-DRB1*04:08L HLA-DRB1*15:03L
VDTVSALVYDNK

SEQ ID NO: 15974 - protein, 15 aa, Severe acute respiratory syndrome coronavirus 2
  REGION 1..15: note = Table B: HLA-DRB1*01:03L HLA-DRB1*16:01L HLA-DRB1*04:08L
NKLKAHKDKSAQCFK

SEQ ID NO: 15975 - protein, 10 aa, Severe acute respiratory syndrome coronavirus 2
  REGION 1..10: note = Table B: HLA-DRB1*01:03L HLA-DRB1*14:01L HLA-DRB1*16:01L
LTRNPAWRKA

SEQ ID NO: 15976 - protein, 12 aa, Severe acute respiratory syndrome coronavirus 2
  REGION 1..12: note = Table B: HLA-DRB1*01:03L HLA-DRB1*04:04L HLA-DRB1*04:05L HLA-DQA1*01:02-B1*06:02L HLA-DRB1*14:01L HLA-DRB1*04:10L HLA-DQA1*05:05-B1*03:01L HLA-DRB1*04:08L HLA-DRB1*15:01L
VFISPYNSQNAV

SEQ ID NO: 15977 - protein, 11 aa, Severe acute respiratory syndrome coronavirus 2
  REGION 1..11: note = Table B: HLA-DRB1*01:03L HLA-DRB1*04:02L HLA-DRB1*04:04L HLA-DRB1*04:05L HLA-DRB1*01:02L HLA-DRB4*03:01NL HLA-DPA1*03:01-B1*04:02L HLA-DRB1*14:01L HLA-DRB1*11:03L HLA-DRB1*11:04L HLA-DQA1*05:01-B1*02:01L HLA-DRB1*04:10L
  REGION 1..11: note = CONT. FROM ABOVE: HLA-DRB1*12:01L HLA-DQA1*03:01-B1*03:02L HLA-D RB1*14:54L HLA-DRB1*14:17L HLA-DQA1*01:03-B1*06:01L HLA-DRB1*04: 08L HLA-DQA1*02:01-B1*03:03L HLA-DRB1*15:01L HLA-DRB1*15:03L
ISPYNSQNAVA

SEQ ID NO: 15978 - protein, 12 aa, Severe acute respiratory syndrome coronavirus 2
  REGION 1..12: note = Table B: HLA-DRB1*01:03L HLA-DRB1*04:05L HLA-DRB4*03:01NL HLA-DPA1*01:03-B1*03:01L HLA-DQA1*01:01-B1*05:01L HLA-DRB1*08:01L HLA-DQA1*05:01-B1*02:01L HLA-DRB1*12:01L HLA-DRB1*14:17L HLA-DRB1*04:08L
NSQNAVASKILG

SEQ ID NO: 15979 - protein, 14 aa, Severe acute respiratory syndrome coronavirus 2
  REGION 1..14: note = Table B: HLA-DRB1*01:03L HLA-DRB1*01:02L HLA-DRB1*08:01L HLA-DRB1*12:01L HLA-DRB1*04:08L
SQNAVASKILGLPT

SEQ ID NO: 15980 - protein, 13 aa, Severe acute respiratory syndrome coronavirus 2
  REGION 1..13: note = Table B: HLA-DRB1*01:03L
LGLPTQTVDSSQG

SEQ ID NO: 15981 - protein, 12 aa, Severe acute respiratory syndrome coronavirus 2
  REGION 1..12: note = Table B: HLA-DRB1*01:03L HLA-DPA1*01:03-B1*03:01L HLA-DQA1*01-B1*05L HLA-DQA1*05:01-B1*02:01L HLA-DPA1*01:03-B1*04:01L HLA-DPA1*01:03-B1*04:02L HLA-DRB1*12:01L HLA-DPA1*02:01-B1*13:01L
  REGION 1..12: note = CONT. FROM ABOVE: HLA-DPA1*03:01-B1*105:01L HLA-DRB1*16:01L HLA- DQA1*01:03-B1*06:01L HLA-DRB1*04:08L HLA-DRB1*15:03L
GSEYDYVIFTQT

SEQ ID NO: 15982 - protein, 13 aa, Severe acute respiratory syndrome coronavirus 2
  REGION 1..13: note = Table B: HLA-DRB1*01:03L HLA-DQA1*01:02-B1*06:02L HLA-DPA1*01:03-B1*02:01L HLA-DRB1*16:01L HLA-DQA1*01:03-B1*06:01L HLA-DRB1*04:08L
SEYDYVIFTQTTE

SEQ ID NO: 15983 - protein, 12 aa, Severe acute respiratory syndrome coronavirus 2
  REGION 1..12: note = Table B: HLA-DRB1*01:03L HLA-DRB1*01:02L HLA-DRB1*04:08L
TTETAHSCNVNR

SEQ ID NO: 15984 - protein, 10 aa, Severe acute respiratory syndrome coronavirus 2
  REGION 1..10: note = Table B: HLA-DRB1*01:03L HLA-DRB1*01:02L HLA-DQA1*03:01-B1*03:02L HLA-DRB1*16:01L HLA-DQA1*02:01-B1*03:03L
RFNVAITRAK

SEQ ID NO: 15985 - protein, 16 aa, Severe acute respiratory syndrome coronavirus 2
  REGION 1..16: note = Table B: HLA-DRB1*01:03L HLA-DRB1*04:04L
AKVGILCIMSDRDLYD

SEQ ID NO: 15986 - protein, 13 aa, Severe acute respiratory syndrome coronavirus 2
  REGION 1..13: note = Table B: HLA-DRB1*01:03L HLA-DRB1*08:01L HLA-DRB1*12:01L HLA-DRB1*04:08L
RDLYDKLQFTSLE

SEQ ID NO: 15987 - protein, 12 aa, Severe acute respiratory syndrome coronavirus 2
  REGION 1..12: note = Table B: HLA-DRB1*01:03L HLA-DRB1*04:05L HLA-DQA1*01:02-B1*06:02L HLA-DRB1*08:01L HLA-DRB1*12:01L HLA-DRB1*16:01L HLA-DRB1*04:08L
DKLQFTSLEIPR

SEQ ID NO: 15988 - protein, 12 aa, Severe acute respiratory syndrome coronavirus 2
  REGION 1..12: note = Table B: HLA-DRB1*01:03L HLA-DRB1*04:05L HLA-DQA1*01:02-B1*06:02L HLA-DRB1*01:02L HLA-DRB1*08:01L HLA-DRB1*12:01L HLA-DRB1*16:01L HLA-DRB1*04:08L HLA-DRB1*15:03L
KLQFTSLEIPRR

SEQ ID NO: 15989 - protein, 14 aa, Severe acute respiratory syndrome coronavirus 2
  REGION 1..14: note = Table B: HLA-DRB1*01:03L HLA-DRB1*04:08L HLA-DRB1*15:03L
QFTSLEIPRRNVAT

SEQ ID NO: 15990 - protein, 13 aa, Severe acute respiratory syndrome coronavirus 2
  REGION 1..13: note = Table B: HLA-DRB1*01:03L HLA-DRB1*04:02L HLA-DRB1*01:01L HLA-DRB1*04:08L
ATLQAENVTGLFK

SEQ ID NO: 15991 - protein, 13 aa, Severe acute respiratory syndrome coronavirus 2
  REGION 1..13: note = Table B: HLA-DRB1*01:03L HLA-DRB1*16:01L HLA-DRB1*04:08L
AENVTGLFKDCSK

SEQ ID NO: 15992 - protein, 13 aa, Severe acute respiratory syndrome coronavirus 2
  REGION 1..13: note = Table B: HLA-DRB1*01:03L HLA-DRB1*04:02L HLA-DRB1*04:04L HLA-DRB1*04:05L HLA-DRB1*14:01L HLA-DRB1*04:10L HLA-DPA1*03:01-B1*105:01L HLA-DRB1*14:54L HLA-DQA1*05:05-B1*03:01L HLA-DRB1*04:08L
SKVITGLHPTQAP

SEQ ID NO: 15993 - protein, 15 aa, Severe acute respiratory syndrome coronavirus 2
  REGION 1..15: note = Table B: HLA-DRB1*01:03L HLA-DRB1*04:08L
LHPTQAPTHLSVDTK

SEQ ID NO: 15994 - protein, 16 aa, Severe acute respiratory syndrome coronavirus 2
  REGION 1..16: note = Table B: HLA-DRB1*01:03L HLA-DRB1*04:05L HLA-DRB1*12:01L HLA-DPA1*02:01-B1*13:01L HLA-DRB1*16:01L HLA-DRB1*04:08L
HPTQAPTHLSVDTKFK

SEQ ID NO: 15995 - protein, 14 aa, Severe acute respiratory syndrome coronavirus 2
  REGION 1..14: note = Table B: HLA-DRB1*01:03L HLA-DRB1*04:05L HLA-DRB1*01:02L HLA-DPA1*01:03-B1*03:01L HLA-DRB1*11:04L HLA-DRB1*08:01L HLA-DRB1*11:01L HLA-DPA1*01:03-B1*04:01L HLA-DRB1*12:01L HLA-DRB3*01:01L HLA-DPA1*02:01-B1*13:01L
  REGION 1..14: note = CONT. FROM ABOVE: HLA-DPA1*01:03-B1*02:01L HLA-DQA1*02:01-B1*03: 03L HLA-DRB1*15:03L
TKFKTEGLCVDIPG

SEQ ID NO: 15996 - protein, 13 aa, Severe acute respiratory syndrome coronavirus 2
  REGION 1..13: note = Table B: HLA-DRB1*01:03L HLA-DRB1*01:02L HLA-DRB1*16:01L
IPGIPKDMTYRRL

SEQ ID NO: 15997 - protein, 15 aa, Severe acute respiratory syndrome coronavirus 2
  REGION 1..15: note = Table B: HLA-DRB1*01:03L HLA-DRB1*04:05L HLA-DRB1*01:02L HLA-DRB1*08:04L HLA-DRB1*12:01L HLA-DPA1*02:01-B1*13:01L HLA-DPA1*03:01-B1*105:01L HLA-DRB1*16:01L HLA-DRB1*15:03L
IPKDMTYRRLISMMG

SEQ ID NO: 15998 - protein, 11 aa, Severe acute respiratory syndrome coronavirus 2
  REGION 1..11: note = Table B: HLA-DRB1*01:03L HLA-DRB1*01:02L HLA-DRB1*16:01L HLA-DRB1*04:08L
YRRLISMMGFK

SEQ ID NO: 15999 - protein, 12 aa, Severe acute respiratory syndrome coronavirus 2
  REGION 1..12: note = Table B: HLA-DRB1*01:03L HLA-DRB1*16:01L HLA-DRB1*04:08L HLA-DQA1*02:01-B1*03:03L
RRLISMMGFKMN

SEQ ID NO: 16000 - protein, 13 aa, Severe acute respiratory syndrome coronavirus 2
  REGION 1..13: note = Table B: HLA-DRB1*01:03L HLA-DRB1*04:08L
RLISMMGFKMNYQ

SEQ ID NO: 16001 - protein, 12 aa, Severe acute respiratory syndrome coronavirus 2
  REGION 1..12: note = Table B: HLA-DRB1*01:03L HLA-DRB1*04:05L HLA-DRB4*03:01NL HLA-DRB1*08:04L HLA-DRB1*08:77L HLA-DRB1*11:03L HLA-DRB1*08:01L HLA-DRB1*09:01L HLA-DRB1*12:02L HLA-DRB1*14:54L HLA-DPA1*01:03-B1*104:01L HLA-DQA1*05:05-B1*03:01L
  REGION 1..12: note = CONT. FROM ABOVE: HLA-DRB1*07:01L HLA-DRB1*04:08L
KMNYQVNGYPNM

SEQ ID NO: 16002 - protein, 11 aa, Severe acute respiratory syndrome coronavirus 2
  REGION 1..11: note = Table B: HLA-DRB1*01:03L HLA-DRB1*01:02L HLA-DRB1*08:01L HLA-DRB1*12:01L HLA-DQA1*02:01-B1*03:03L
ITREEAIRHVR

SEQ ID NO: 16003 - protein, 11 aa, Severe acute respiratory syndrome coronavirus 2
  REGION 1..11: note = Table B: HLA-DRB1*01:03L HLA-DQA1*01:03-B1*06:01L
REEAIRHVRAW

SEQ ID NO: 16004 - protein, 13 aa, Severe acute respiratory syndrome coronavirus 2
  REGION 1..13: note = Table B: HLA-DRB1*01:03L HLA-DRB1*04:02L HLA-DRB1*04:04L HLA-DPA1*01:03-B1*03:01L HLA-DPA1*03:01-B1*04:02L HLA-DRB1*14:01L HLA-DRB1*08:01L HLA-DPA1*03:01-B1*105:01L HLA-DQA1*03:01-B1*03:02L HLA-DQA1*01:03-B1*06:01L
  REGION 1..13: note = CONT. FROM ABOVE: HLA-DQA1*02:01-B1*03:03L HLA-DRB1*15:01L
IRHVRAWIGFDVE

SEQ ID NO: 16005 - protein, 14 aa, Severe acute respiratory syndrome coronavirus 2
  REGION 1..14: note = Table B: HLA-DRB1*01:03L HLA-DRB1*12:01L
VRAWIGFDVEGCHA

SEQ ID NO: 16006 - protein, 14 aa, Severe acute respiratory syndrome coronavirus 2
  REGION 1..14: note = Table B: HLA-DRB1*01:03L HLA-DRB1*01:02L HLA-DRB1*16:01L HLA-DRB1*04:08L HLA-DRB1*15:03L
RAWIGFDVEGCHAT

SEQ ID NO: 16007 - protein, 14 aa, Severe acute respiratory syndrome coronavirus 2
  REGION 1..14: note = Table B: HLA-DRB1*01:03L HLA-DRB1*04:05L HLA-DPA1*01:03-B1*03:01L HLA-DRB1*08:01L HLA-DPA1*01:03-B1*04:02L HLA-DRB1*12:01L HLA-DPA1*02:01-B1*13:01L HLA-DRB1*16:01L HLA-DRB1*15:03L
IGFDVEGCHATREA

SEQ ID NO: 16008 - protein, 13 aa, Severe acute respiratory syndrome coronavirus 2
  REGION 1..13: note = Table B: HLA-DRB1*01:03L HLA-DRB1*04:05L HLA-DRB1*01:02L HLA-DRB4*03:01NL HLA-DRB3*02:01L HLA-DPA1*03:01-B1*04:02L HLA-DRB1*14:02L HLA-DRB1*12:02L HLA-DPA1*02:01-B1*13:01L HLA-DRB1*14:54L
REAVGTNLPLQLG

SEQ ID NO: 16009 - protein, 18 aa, Severe acute respiratory syndrome coronavirus 2
  REGION 1..18: note = Table B: HLA-DRB1*01:03L HLA-DRB1*01:01L HLA-DRB1*14:02L HLA-DPA1*01:03-B1*104:01L
LPLQLGFSTGVNLVAVPT

SEQ ID NO: 16010 - protein, 10 aa, Severe acute respiratory syndrome coronavirus 2
  REGION 1..10: note = Table B: HLA-DRB1*01:03L
FSRVSAKPPP

SEQ ID NO: 16011 - protein, 10 aa, Severe acute respiratory syndrome coronavirus 2
  REGION 1..10: note = Table B: HLA-DRB1*01:03L HLA-DQA1*03:01-B1*03:02L
SRVSAKPPPG

SEQ ID NO: 16012 - protein, 10 aa, Severe acute respiratory syndrome coronavirus 2
  REGION 1..10: note = Table B: HLA-DRB1*01:03L HLA-DRB1*04:05L HLA-DQA1*01:02-B1*06:02L HLA-DPA1*01:03-B1*03:01L HLA-DRB1*03:01L HLA-DRB1*14:02L HLA-DQA1*05:05-B1*03:19L HLA-DQA1*05:01-B1*02:01L HLA-DRB4*01:01L
  REGION 1..10: note = CONT. FROM ABOVE: HLA-DPA1*01:03-B1*04:01L HLA-DPA1*01:03-B1*04: 02L HLA-DPA1*02:01-B1*13:01L HLA-DPA1*03:01-B1*105:01L HLA-DRB1* 16:01L HLA-DQA1*01:03-B1*06:01L HLA-DQA1*02:01-B1*03:03L HLA-DRB 1*15:03L
QFKHLIPLMY

SEQ ID NO: 16013 - protein, 13 aa, Severe acute respiratory syndrome coronavirus 2
  REGION 1..13: note = Table B: HLA-DRB1*01:03L HLA-DRB1*14:01L HLA-DPA1*02:01-B1*13:01L HLA-DRB1*04:08L
HLIPLMYKGLPWN

SEQ ID NO: 16014 - protein, 13 aa, Severe acute respiratory syndrome coronavirus 2
  REGION 1..13: note = Table B: HLA-DRB1*01:03L HLA-DRB1*01:02L HLA-DRB1*08:04L HLA-DPA1*01:03-B1*03:01L HLA-DPA1*03:01-B1*04:02L HLA-DRB1*14:01L HLA-DQA1*05:05-B1*03:19L HLA-DPA1*01:03-B1*04:01L HLA-DPA1*01:03-B1*04:02L
  REGION 1..13: note = CONT. FROM ABOVE: HLA-DPA1*02:01-B1*13:01L HLA-DPA1*03:01-B1*105 :01L HLA-DQA1*05:05-B1*03:01L HLA-DRB1*04:08L
IPLMYKGLPWNVV

SEQ ID NO: 16015 - protein, 14 aa, Severe acute respiratory syndrome coronavirus 2
  REGION 1..14: note = Table B: HLA-DRB1*01:03L HLA-DRB1*04:02L HLA-DRB1*04:04L HLA-DRB1*04:05L HLA-DRB1*01:02L HLA-DRB1*14:01L HLA-DRB1*08:01L HLA-DRB1*12:01L HLA-DRB3*01:01L HLA-DRB1*16:01L HLA-DRB1*04:08L
VQMLSDTLKNLSDR

SEQ ID NO: 16016 - protein, 12 aa, Severe acute respiratory syndrome coronavirus 2
  REGION 1..12: note = Table B: HLA-DRB1*01:03L HLA-DPA1*01:03-B1*04:01L HLA-DPA1*01:03-B1*02:01L HLA-DRB1*04:08L
LWAHGFELTSMK

SEQ ID NO: 16017 - protein, 12 aa, Severe acute respiratory syndrome coronavirus 2
  REGION 1..12: note = Table B: HLA-DRB1*01:03L HLA-DQA1*01:02-B1*06:02L HLA-DRB1*16:01L HLA-DRB1*04:08L
SMKYFVKIGPER

SEQ ID NO: 16018 - protein, 13 aa, Severe acute respiratory syndrome coronavirus 2
  REGION 1..13: note = Table B: HLA-DRB1*01:03L HLA-DRB1*04:05L HLA-DRB1*01:02L HLA-DPA1*01:03-B1*03:01L HLA-DRB1*14:01L HLA-DQA1*05:05-B1*03:01L HLA-DRB1*04:08L
IGFDYVYNPFMID

SEQ ID NO: 16019 - protein, 12 aa, Severe acute respiratory syndrome coronavirus 2
  REGION 1..12: note = Table B: HLA-DRB1*01:03L HLA-DRB1*04:08L
AHVASCDAIMTR

SEQ ID NO: 16020 - protein, 12 aa, Severe acute respiratory syndrome coronavirus 2
  REGION 1..12: note = Table B: HLA-DRB1*01:03L HLA-DQA1*01:02-B1*06:02L HLA-DRB1*01:02L HLA-DRB1*14:01L HLA-DRB1*11:04L HLA-DRB1*11:01L HLA-DRB3*01:01L HLA-DRB1*16:01L HLA-DRB1*04:08L
LKINAACRKVQH

SEQ ID NO: 16021 - protein, 14 aa, Severe acute respiratory syndrome coronavirus 2
  REGION 1..14: note = Table B: HLA-DRB1*01:03L HLA-DQA1*01:02-B1*06:02L HLA-DRB1*01:02L HLA-DRB1*08:01L
INAACRKVQHMVVK

SEQ ID NO: 16022 - protein, 11 aa, Severe acute respiratory syndrome coronavirus 2
  REGION 1..11: note = Table B: HLA-DRB1*01:03L HLA-DRB1*01:02L HLA-DRB3*02:01L HLA-DQA1*01-B1*05L HLA-DRB1*12:01L
AALLADKFPVL

SEQ ID NO: 16023 - protein, 10 aa, Severe acute respiratory syndrome coronavirus 2
  REGION 1..10: note = Table B: HLA-DRB1*01:03L HLA-DPA1*03:01-B1*04:02L HLA-DPA1*03:01-B1*105:01L HLA-DPA1*01:02-B1*04:01L HLA-DRB1*16:01L HLA-DQA1*01:03-B1*06:01L HLA-DRB1*04:08L
LLADKFPVLH

SEQ ID NO: 16024 - protein, 11 aa, Severe acute respiratory syndrome coronavirus 2
  REGION 1..11: note = Table B: HLA-DRB1*01:03L HLA-DRB1*04:04L HLA-DRB1*04:05L HLA-DRB1*01:02L HLA-DRB4*03:01NL HLA-DRB1*04:08L
LHDIGNPKAIK

SEQ ID NO: 16025 - protein, 14 aa, Severe acute respiratory syndrome coronavirus 2
  REGION 1..14: note = Table B: HLA-DRB1*01:03L HLA-DRB1*01:02L
HDIGNPKAIKCVPQ

SEQ ID NO: 16026 - protein, 14 aa, Severe acute respiratory syndrome coronavirus 2
  REGION 1..14: note = Table B: HLA-DRB1*01:03L HLA-DRB1*04:05L HLA-DPA1*01:03-B1*03:01L HLA-DRB1*08:01L HLA-DRB1*12:01L HLA-DPA1*02:01-B1*13:01L HLA-DRB1*16:01L
IGNPKAIKCVPQAD

SEQ ID NO: 16027 - protein, 12 aa, Severe acute respiratory syndrome coronavirus 2
  REGION 1..12: note = Table B: HLA-DRB1*01:03L HLA-DRB1*12:01L HLA-DQA1*01:03-B1*06:01L HLA-DRB1*04:08L HLA-DQA1*02:01-B1*03:03L
EWKFYDAQPCSD

SEQ ID NO: 16028 - protein, 11 aa, Severe acute respiratory syndrome coronavirus 2
  REGION 1..11: note = Table B: HLA-DRB1*01:03L HLA-DRB1*04:05L HLA-DRB1*16:01L HLA-DQA1*02:01-B1*03:03L
RYPANSIVCRF

SEQ ID NO: 16029 - protein, 16 aa, Severe acute respiratory syndrome coronavirus 2
  REGION 1..16: note = Table B: HLA-DRB1*01:03L HLA-DRB1*04:08L
YPANSIVCRFDTRVLS

SEQ ID NO: 16030 - protein, 14 aa, Severe acute respiratory syndrome coronavirus 2
  REGION 1..14: note = Table B: HLA-DRB1*01:03L
NSIVCRFDTRVLSN

SEQ ID NO: 16031 - protein, 10 aa, Severe acute respiratory syndrome coronavirus 2
  REGION 1..10: note = Table B: HLA-DRB1*01:03L HLA-DRB1*01:02L HLA-DRB1*16:01L HLA-DRB1*15:03L
SLYVNKHAFH

SEQ ID NO: 16032 - protein, 13 aa, Severe acute respiratory syndrome coronavirus 2
  REGION 1..13: note = Table B: HLA-DRB1*01:03L HLA-DPA1*01:02-B1*04:01L HLA-DRB1*04:08L HLA-DRB1*15:03L
NKHAFHTPAFDKS

SEQ ID NO: 16033 - protein, 13 aa, Severe acute respiratory syndrome coronavirus 2
  REGION 1..13: note = Table B: HLA-DRB1*01:03L HLA-DRB1*04:05L HLA-DQA1*01:02-B1*06:02L HLA-DRB1*12:01L HLA-DPA1*02:01-B1*13:01L HLA-DPA1*03:01-B1*105:01L HLA-DPA1*01:02-B1*04:01L HLA-DRB1*04:08L HLA-DRB1*15:03L
KHAFHTPAFDKSA

SEQ ID NO: 16034 - protein, 10 aa, Severe acute respiratory syndrome coronavirus 2
  REGION 1..10: note = Table B: HLA-DRB1*01:03L HLA-DPA1*03:01-B1*04:02L HLA-DPA1*03:01-B1*105:01L HLA-DPA1*01:02-B1*04:01L HLA-DRB1*16:01L HLA-DQA1*01:03-B1*06:01L
FDKSAFVNLK

SEQ ID NO: 16035 - protein, 13 aa, Severe acute respiratory syndrome coronavirus 2
  REGION 1..13: note = Table B: HLA-DRB1*01:03L HLA-DRB1*04:04L HLA-DRB1*04:05L HLA-DQA1*01:02-B1*06:02L HLA-DRB1*01:02L HLA-DPA1*03:01-B1*04:02L HLA-DRB1*14:01L HLA-DRB1*12:01L HLA-DPA1*03:01-B1*105:01L HLA-DQA1*01:03-B1*06:01L
  REGION 1..13: note = CONT. FROM ABOVE: HLA-DRB1*04:08L HLA-DRB1*15:01L
LPFFYYSDSPCES

SEQ ID NO: 16036 - protein, 13 aa, Severe acute respiratory syndrome coronavirus 2
  REGION 1..13: note = Table B: HLA-DRB1*01:03L HLA-DRB1*04:05L HLA-DPA1*02:01-B1*13:01L
SDIDYVPLKSATC

SEQ ID NO: 16037 - protein, 12 aa, Severe acute respiratory syndrome coronavirus 2
  REGION 1..12: note = Table B: HLA-DRB1*01:03L HLA-DQA1*01:02-B1*06:02L HLA-DPA1*03:01-B1*105:01L HLA-DRB1*04:08L
IDYVPLKSATCI

SEQ ID NO: 16038 - protein, 11 aa, Severe acute respiratory syndrome coronavirus 2
  REGION 1..11: note = Table B: HLA-DRB1*01:03L HLA-DRB1*01:02L HLA-DQA1*03:01-B1*03:02L HLA-DQA1*02:01-B1*03:03L
VPLKSATCITR

SEQ ID NO: 16039 - protein, 12 aa, Severe acute respiratory syndrome coronavirus 2
  REGION 1..12: note = Table B: HLA-DRB1*01:03L HLA-DRB1*01:02L HLA-DRB1*14:01L HLA-DRB1*08:01L HLA-DRB1*12:01L HLA-DRB1*16:01L HLA-DRB1*04:08L HLA-DRB1*15:03L
GAVCRHHANEYR

SEQ ID NO: 16040 - protein, 13 aa, Severe acute respiratory syndrome coronavirus 2
  REGION 1..13: note = Table B: HLA-DRB1*01:03L HLA-DRB1*04:02L HLA-DRB1*04:04L HLA-DRB4*03:01NL HLA-DRB1*08:77L HLA-DRB3*02:01L HLA-DPA1*01:03-B1*03:01L HLA-DRB1*11:03L HLA-DRB1*14:02L HLA-DQA1*01-B1*05L HLA-DRB4*01:01L HLA-DRB1*04:10L
  REGION 1..13: note = CONT. FROM ABOVE: HLA-DRB1*09:01L HLA-DRB1*12:02L HLA-DQA1*03:01 -B1*03:02L HLA-DRB1*14:54L HLA-DPA1*01:03-B1*104:01L HLA-DPA1*01 :02-B1*04:01L HLA-DRB1*07:01L HLA-DRB1*10:01L HLA-DRB1*04:08L
LDAYNMMISAGFS

SEQ ID NO: 16041 - protein, 12 aa, Severe acute respiratory syndrome coronavirus 2
  REGION 1..12: note = Table B: HLA-DRB1*01:03L HLA-DQA1*01:02-B1*06:02L HLA-DRB1*01:02L HLA-DRB1*14:01L HLA-DQA1*05:05-B1*03:19L HLA-DPA1*03:01-B1*105:01L HLA-DRB1*16:01L HLA-DRB1*04:08L
ENVAFNVVNKGH

SEQ ID NO: 16042 - protein, 11 aa, Severe acute respiratory syndrome coronavirus 2
  REGION 1..11: note = Table B: HLA-DRB1*01:03L HLA-DRB1*14:17L HLA-DRB1*16:01L
FNVVNKGHFDG

SEQ ID NO: 16043 - protein, 13 aa, Severe acute respiratory syndrome coronavirus 2
  REGION 1..13: note = Table B: HLA-DRB1*01:03L HLA-DRB1*04:02L HLA-DQA1*01:02-B1*06:02L HLA-DRB1*01:02L HLA-DPA1*03:01-B1*105:01L HLA-DRB1*14:17L HLA-DRB1*16:01L HLA-DQA1*01:03-B1*06:01L HLA-DRB1*04:08L
GHFDGQQGEVPVS

SEQ ID NO: 16044 - protein, 13 aa, Severe acute respiratory syndrome coronavirus 2
  REGION 1..13: note = Table B: HLA-DRB1*01:03L HLA-DPA1*01:03-B1*03:01L HLA-DQA1*01-B1*05L HLA-DRB1*12:01L HLA-DRB1*04:08L
DGQQGEVPVSIIN

SEQ ID NO: 16045 - protein, 13 aa, Severe acute respiratory syndrome coronavirus 2
  REGION 1..13: note = Table B: HLA-DRB1*01:03L HLA-DRB1*04:05L HLA-DRB1*12:01L HLA-DRB1*04:08L HLA-DRB1*15:03L
DGVDVELFENKTT

SEQ ID NO: 16046 - protein, 14 aa, Severe acute respiratory syndrome coronavirus 2
  REGION 1..14: note = Table B: HLA-DRB1*01:03L HLA-DRB1*01:02L HLA-DRB3*01:01L
AFELWAKRNIKPVP

SEQ ID NO: 16047 - protein, 11 aa, Severe acute respiratory syndrome coronavirus 2
  REGION 1..11: note = Table B: HLA-DRB1*01:03L HLA-DRB1*04:05L HLA-DRB1*01:02L HLA-DRB1*08:01L HLA-DRB1*12:01L HLA-DPA1*02:01-B1*13:01L HLA-DPA1*01:02-B1*04:01L HLA-DRB1*16:01L HLA-DQA1*02:01-B1*03:03L
WAKRNIKPVPE

SEQ ID NO: 16048 - protein, 10 aa, Severe acute respiratory syndrome coronavirus 2
  REGION 1..10: note = Table B: HLA-DRB1*01:03L HLA-DRB1*08:01L HLA-DRB1*12:01L HLA-DQA1*03:01-B1*03:02L HLA-DRB1*16:01L HLA-DQA1*02:01-B1*03:03L
RNIKPVPEVK

SEQ ID NO: 16049 - protein, 11 aa, Severe acute respiratory syndrome coronavirus 2
  REGION 1..11: note = Table B: HLA-DRB1*01:03L HLA-DRB1*04:05L HLA-DRB1*04:08L
IWDYKRDAPAH

SEQ ID NO: 16050 - protein, 14 aa, Severe acute respiratory syndrome coronavirus 2
  REGION 1..14: note = Table B: HLA-DRB1*01:03L HLA-DRB1*04:08L
DLFRNARNGVLITE

SEQ ID NO: 16051 - protein, 12 aa, Severe acute respiratory syndrome coronavirus 2
  REGION 1..12: note = Table B: HLA-DRB1*01:03L HLA-DRB1*04:02L HLA-DRB1*04:05L HLA-DQA1*01:02-B1*06:02L HLA-DRB1*01:02L HLA-DRB4*03:01NL HLA-DQA1*05:05-B1*03:19L HLA-DPA1*03:01-B1*105:01L HLA-DQA1*05:05-B1*03:01L HLA-DRB1*16:01L HLA-DRB1*04:08L
LITEGSVKGLQP

SEQ ID NO: 16052 - protein, 13 aa, Severe acute respiratory syndrome coronavirus 2
  REGION 1..13: note = Table B: HLA-DRB1*01:03L HLA-DRB1*04:04L HLA-DRB4*03:01NL HLA-DPA1*01:03-B1*03:01L HLA-DQA1*05:01-B1*02:01L HLA-DPA1*03:01-B1*105:01L HLA-DRB1*14:54L HLA-DRB1*16:01L HLA-DQA1*01:03-B1*06:01L HLA-DRB1*04:08L HLA-DRB1*15:03L
EGSVKGLQPSVGP

SEQ ID NO: 16053 - protein, 15 aa, Severe acute respiratory syndrome coronavirus 2
  REGION 1..15: note = Table B: HLA-DRB1*01:03L HLA-DRB1*01:02L HLA-DRB1*04:08L
QPSVGPKQASLNGVT

SEQ ID NO: 16054 - protein, 18 aa, Severe acute respiratory syndrome coronavirus 2
  REGION 1..18: note = Table B: HLA-DRB1*01:03L HLA-DRB1*04:05L HLA-DRB1*14:02L HLA-DPA1*01:03-B1*04:02L HLA-DRB1*16:01L
GPKQASLNGVTLIGEAVK

SEQ ID NO: 16055 - protein, 12 aa, Severe acute respiratory syndrome coronavirus 2
  REGION 1..12: note = Table B: HLA-DRB1*01:03L HLA-DRB4*03:01NL HLA-DRB1*08:04L HLA-DRB1*14:01L HLA-DRB1*04:10L HLA-DRB1*14:54L HLA-DRB1*08:03L
ETYFTQSRNLQE

SEQ ID NO: 16056 - protein, 12 aa, Severe acute respiratory syndrome coronavirus 2
  REGION 1..12: note = Table B: HLA-DRB1*01:03L HLA-DRB1*04:05L HLA-DRB1*01:02L HLA-DPA1*03:01-B1*04:02L HLA-DRB1*14:01L HLA-DRB1*08:01L HLA-DQA1*01-B1*05L HLA-DRB1*12:01L HLA-DPA1*02:01-B1*13:01L HLA-DPA1*03:01-B1*105:01L HLA-DQA1*03:01-B1*03:02L
  REGION 1..12: note = CONT. FROM ABOVE: HLA-DPA1*01:02-B1*04:01L HLA-DRB1*16:01L HLA-D RB1*04:08L HLA-DRB1*15:03L
IERYKLEGYAFE

SEQ ID NO: 16057 - protein, 12 aa, Severe acute respiratory syndrome coronavirus 2
  REGION 1..12: note = Table B: HLA-DRB1*01:03L HLA-DQA1*01:02-B1*06:02L HLA-DRB1*01:02L HLA-DPA1*01:03-B1*03:01L HLA-DRB1*08:01L HLA-DPA1*01:03-B1*04:01L HLA-DPA1*01:03-B1*04:02L HLA-DRB1*12:01L HLA-DPA1*02:01-B1*13:01L
  REGION 1..12: note = CONT. FROM ABOVE: HLA-DPA1*03:01-B1*105:01L HLA-DRB1*16:01L HLA- DQA1*01:03-B1*06:01L HLA-DRB1*04:08L HLA-DQA1*02:01-B1*03:03L HL A-DRB1*15:03L
YKLEGYAFEHIV

SEQ ID NO: 16058 - protein, 12 aa, Severe acute respiratory syndrome coronavirus 2
  REGION 1..12: note = Table B: HLA-DRB1*01:03L HLA-DPA1*03:01-B1*04:02L HLA-DPA1*01:03-B1*04:02L HLA-DQA1*03:01-B1*03:02L HLA-DRB1*04:08L
LEGYAFEHIVYG

SEQ ID NO: 16059 - protein, 12 aa, Severe acute respiratory syndrome coronavirus 2
  REGION 1..12: note = Table B: HLA-DRB1*01:03L HLA-DRB1*04:08L
YAFEHIVYGDFS

SEQ ID NO: 16060 - protein, 12 aa, Severe acute respiratory syndrome coronavirus 2
  REGION 1..12: note = Table B: HLA-DRB1*01:03L HLA-DRB1*01:02L HLA-DRB1*12:01L HLA-DRB1*16:01L HLA-DRB1*04:08L HLA-DQA1*02:01-B1*03:03L HLA-DRB1*15:03L
GGLHLLIGLAKR

SEQ ID NO: 16061 - protein, 14 aa, Severe acute respiratory syndrome coronavirus 2
  REGION 1..14: note = Table B: HLA-DRB1*01:03L HLA-DRB1*04:05L HLA-DRB1*04:08L
GLHLLIGLAKRFKE

SEQ ID NO: 16062 - protein, 15 aa, Severe acute respiratory syndrome coronavirus 2
  REGION 1..15: note = Table B: HLA-DRB1*01:03L HLA-DRB3*01:01L HLA-DRB1*04:08L
LHLLIGLAKRFKESP

SEQ ID NO: 16063 - protein, 13 aa, Severe acute respiratory syndrome coronavirus 2
  REGION 1..13: note = Table B: HLA-DRB1*01:03L HLA-DRB1*04:05L HLA-DQA1*01:02-B1*06:02L HLA-DRB1*14:01L HLA-DRB1*08:01L HLA-DQA1*01-B1*05L HLA-DPA1*02:01-B1*13:01L HLA-DQA1*03:01-B1*03:02L HLA-DPA1*01:02-B1*04:01L
  REGION 1..13: note = CONT. FROM ABOVE: HLA-DRB1*16:01L HLA-DRB1*04:08L HLA-DQA1*02:01 -B1*03:03L
IGLAKRFKESPFE

SEQ ID NO: 16064 - protein, 12 aa, Severe acute respiratory syndrome coronavirus 2
  REGION 1..12: note = Table B: HLA-DRB1*01:03L HLA-DRB1*01:02L HLA-DPA1*03:01-B1*04:02L HLA-DRB1*08:01L HLA-DPA1*01:03-B1*04:01L HLA-DRB1*12:01L HLA-DPA1*02:01-B1*13:01L HLA-DPA1*03:01-B1*105:01L
  REGION 1..12: note = CONT. FROM ABOVE: HLA-DRB1*04:08L HLA-DRB1*15:03L
AKRFKESPFELE

SEQ ID NO: 16065 - protein, 12 aa, Severe acute respiratory syndrome coronavirus 2
  REGION 1..12: note = Table B: HLA-DRB1*01:03L HLA-DPA1*03:01-B1*04:02L HLA-DRB1*08:01L HLA-DRB1*04:08L
KRFKESPFELED

SEQ ID NO: 16066 - protein, 11 aa, Severe acute respiratory syndrome coronavirus 2
  REGION 1..11: note = Table B: HLA-DRB1*01:03L HLA-DRB1*01:02L HLA-DPA1*01:03-B1*03:01L HLA-DRB1*08:01L HLA-DQA1*01-B1*05L HLA-DQA1*05:01-B1*02:01L HLA-DPA1*01:03-B1*04:01L HLA-DPA1*01:03-B1*04:02L HLA-DRB1*12:01L
  REGION 1..11: note = CONT. FROM ABOVE: HLA-DPA1*03:01-B1*105:01L HLA-DRB1*16:01L HLA- DQA1*01:03-B1*06:01L HLA-DRB1*04:08L HLA-DRB1*15:03L
SPFELEDFIPM

SEQ ID NO: 16067 - protein, 12 aa, Severe acute respiratory syndrome coronavirus 2
  REGION 1..12: note = Table B: HLA-DRB1*01:03L HLA-DPA1*01:03-B1*02:01L
PFELEDFIPMDS

SEQ ID NO: 16068 - protein, 12 aa, Severe acute respiratory syndrome coronavirus 2
  REGION 1..12: note = Table B: HLA-DRB1*01:03L HLA-DRB1*16:01L HLA-DQA1*01:03-B1*06:01L HLA-DRB1*04:08L
FELEDFIPMDST

SEQ ID NO: 16069 - protein, 11 aa, Severe acute respiratory syndrome coronavirus 2
  REGION 1..11: note = Table B: HLA-DRB1*01:03L HLA-DQA1*01:02-B1*06:02L HLA-DPA1*01:03-B1*03:01L HLA-DRB1*12:01L HLA-DPA1*01:03-B1*02:01L HLA-DRB1*04:08L HLA-DRB1*15:03L
LLLDDFVEIIK

SEQ ID NO: 16070 - protein, 11 aa, Severe acute respiratory syndrome coronavirus 2
  REGION 1..11: note = Table B: HLA-DRB1*01:03L HLA-DRB1*04:04L HLA-DRB1*08:04L HLA-DPA1*01:03-B1*03:01L HLA-DQA1*05:05-B1*03:19L HLA-DPA1*02:01-B1*13:01L HLA-DQA1*05:05-B1*03:01L HLA-DRB1*04:08L HLA-DRB1*08:03L
FVEIIKSQDLS

SEQ ID NO: 16071 - protein, 14 aa, Severe acute respiratory syndrome coronavirus 2
  REGION 1..14: note = Table B: HLA-DRB1*01:03L HLA-DRB1*16:01L
YTEISFMLWCKDGH

SEQ ID NO: 16072 - protein, 13 aa, Severe acute respiratory syndrome coronavirus 2
  REGION 1..13: note = Table B: HLA-DRB1*01:03L HLA-DRB1*04:05L HLA-DRB1*01:02L HLA-DRB1*08:04L HLA-DRB1*14:01L HLA-DRB1*08:01L HLA-DQA1*01-B1*05L HLA-DQA1*05:01-B1*02:01L HLA-DPA1*01:03-B1*04:01L HLA-DPA1*01:03-B1*04:02L
  REGION 1..13: note = CONT. FROM ABOVE: HLA-DRB1*12:01L HLA-DPA1*02:01-B1*13:01L HLA-D RB1*16:01L HLA-DQA1*01:03-B1*06:01L HLA-DRB1*04:08L HLA-DQA1*02: 01-B1*03:03L
ISFMLWCKDGHVE

SEQ ID NO: 16073 - protein, 13 aa, Severe acute respiratory syndrome coronavirus 2
  REGION 1..13: note = Table B: HLA-DRB1*01:03L HLA-DRB1*04:08L
SQAWQPGVAMPNL

SEQ ID NO: 16074 - protein, 12 aa, Severe acute respiratory syndrome coronavirus 2
  REGION 1..12: note = Table B: HLA-DRB1*01:03L HLA-DRB1*04:02L HLA-DRB1*01:02L HLA-DRB1*08:01L HLA-DRB1*11:01L HLA-DQA1*05:05-B1*03:116L HLA-DPA1*01:03-B1*04:02L HLA-DRB1*12:01L HLA-DRB1*04:08L
WQPGVAMPNLYK

SEQ ID NO: 16075 - protein, 11 aa, Severe acute respiratory syndrome coronavirus 2
  REGION 1..11: note = Table B: HLA-DRB1*01:03L HLA-DRB1*08:01L HLA-DRB1*16:01L HLA-DRB1*04:08L
LYKMQRMLLEK

SEQ ID NO: 16076 - protein, 14 aa, Severe acute respiratory syndrome coronavirus 2
  REGION 1..14: note = Table B: HLA-DRB1*01:03L HLA-DRB1*01:02L HLA-DRB1*08:01L HLA-DRB1*04:08L
QRMLLEKCDLQNYG

SEQ ID NO: 16077 - protein, 11 aa, Severe acute respiratory syndrome coronavirus 2
  REGION 1..11: note = Table B: HLA-DRB1*01:03L HLA-DRB1*04:05L HLA-DRB3*02:01L HLA-DPA1*01:03-B1*03:01L HLA-DRB1*08:01L HLA-DQA1*05:05-B1*03:116L HLA-DRB1*09:01L HLA-DPA1*02:01-B1*13:01L HLA-DPA1*01:03-B1*104:01L
  REGION 1..11: note = CONT. FROM ABOVE: HLA-DQA1*05:05-B1*03:01L HLA-DRB1*04:08L HLA-D RB1*08:03L
IMMNVAKYTQL

SEQ ID NO: 16078 - protein, 13 aa, Severe acute respiratory syndrome coronavirus 2
  REGION 1..13: note = Table B: HLA-DRB1*01:03L HLA-DRB1*04:05L HLA-DRB1*01:02L HLA-DRB1*08:04L HLA-DPA1*01:03-B1*04:01L HLA-DPA1*01:03-B1*04:02L HLA-DRB1*12:01L HLA-DPA1*02:01-B1*13:01L HLA-DPA1*01:03-B1*104:01L
  REGION 1..13: note = CONT. FROM ABOVE: HLA-DRB1*16:01L HLA-DRB1*04:08L HLA-DRB1*15:03 L
NVAKYTQLCQYLN

SEQ ID NO: 16079 - protein, 15 aa, Severe acute respiratory syndrome coronavirus 2
  REGION 1..15: note = Table B: HLA-DRB1*01:03L HLA-DRB1*04:05L HLA-DRB1*04:08L
NTLTLAVPYNMRVIH

SEQ ID NO: 16080 - protein, 13 aa, Severe acute respiratory syndrome coronavirus 2
  REGION 1..13: note = Table B: HLA-DRB1*01:03L HLA-DRB4*03:01NL
TGTLLVDSDLNDF

SEQ ID NO: 16081 - protein, 14 aa, Severe acute respiratory syndrome coronavirus 2
  REGION 1..14: note = Table B: HLA-DRB1*01:03L HLA-DRB1*04:05L HLA-DRB1*01:02L HLA-DPA1*01:03-B1*03:01L HLA-DRB1*12:01L HLA-DRB1*15:03L
ADSTLIGDCATVHT

SEQ ID NO: 16082 - protein, 14 aa, Severe acute respiratory syndrome coronavirus 2
  REGION 1..14: note = Table B: HLA-DRB1*01:03L HLA-DRB1*04:04L HLA-DRB1*04:05L HLA-DRB1*01:02L HLA-DRB1*08:04L HLA-DPA1*01:03-B1*03:01L HLA-DRB1*14:01L HLA-DQA1*05:01-B1*02:01L HLA-DRB1*04:10L HLA-DRB1*12:01L HLA-DRB1*14:17L HLA-DRB1*16:01L HLA-DRB1*04:08L
  REGION 1..14: note = CONT. FROM ABOVE: HLA-DRB1*15:03L
STLIGDCATVHTAN

SEQ ID NO: 16083 - protein, 14 aa, Severe acute respiratory syndrome coronavirus 2
  REGION 1..14: note = Table B: HLA-DRB1*01:03L HLA-DRB1*01:02L HLA-DQA1*01:01-B1*05:01L HLA-DRB1*12:01L HLA-DPA1*02:01-B1*13:01L HLA-DRB1*16:01L HLA-DQA1*01:03-B1*06:01L HLA-DRB1*04:08L
DPKTKNVTKENDSK

SEQ ID NO: 16084 - protein, 13 aa, Severe acute respiratory syndrome coronavirus 2
  REGION 1..13: note = Table B: HLA-DRB1*01:03L HLA-DPA1*01:03-B1*04:02L HLA-DRB1*12:01L HLA-DRB1*16:01L HLA-DRB1*04:08L
GFFTYICGFIQQK

SEQ ID NO: 16085 - protein, 11 aa, Severe acute respiratory syndrome coronavirus 2
  REGION 1..11: note = Table B: HLA-DRB1*01:03L HLA-DRB1*04:02L HLA-DRB1*14:17L HLA-DRB1*16:01L
FIQQKLALGGS

SEQ ID NO: 16086 - protein, 12 aa, Severe acute respiratory syndrome coronavirus 2
  REGION 1..12: note = Table B: HLA-DRB1*01:03L HLA-DRB1*01:02L HLA-DRB1*08:01L HLA-DRB1*04:08L
LGGSVAIKITEH

SEQ ID NO: 16087 - protein, 10 aa, Severe acute respiratory syndrome coronavirus 2
  REGION 1..10: note = Table B: HLA-DRB1*01:03L HLA-DQA1*01:02-B1*06:02L HLA-DRB1*14:02L HLA-DQA1*05:05-B1*03:19L HLA-DQA1*05:01-B1*02:01L HLA-DPA1*01:03-B1*04:01L HLA-DPA1*02:01-B1*13:01L HLA-DPA1*03:01-B1*105:01L
  REGION 1..10: note = CONT. FROM ABOVE: HLA-DQA1*01:03-B1*06:01L HLA-DQA1*02:01-B1*03: 03L HLA-DRB1*15:03L
VAIKITEHSW

SEQ ID NO: 16088 - protein, 12 aa, Severe acute respiratory syndrome coronavirus 2
  REGION 1..12: note = Table B: HLA-DRB1*01:03L HLA-DRB1*01:02L HLA-DPA1*01:03-B1*03:01L HLA-DRB1*14:02L HLA-DPA1*02:01-B1*13:01L HLA-DRB1*04:08L
EHSWNADLYKLM

SEQ ID NO: 16089 - protein, 13 aa, Severe acute respiratory syndrome coronavirus 2
  REGION 1..13: note = Table B: HLA-DRB1*01:03L HLA-DPA1*01:03-B1*02:01L
HSWNADLYKLMGH

SEQ ID NO: 16090 - protein, 13 aa, Severe acute respiratory syndrome coronavirus 2
  REGION 1..13: note = Table B: HLA-DRB1*01:03L HLA-DRB1*04:05L HLA-DRB1*01:02L HLA-DRB1*11:03L HLA-DQA1*01:01-B1*05:01L HLA-DRB1*04:10L HLA-DRB1*09:01L HLA-DPA1*01:02-B1*04:01L
VTNVNASSSEAFL

SEQ ID NO: 16091 - protein, 14 aa, Severe acute respiratory syndrome coronavirus 2
  REGION 1..14: note = Table B: HLA-DRB1*01:03L HLA-DRB1*04:04L HLA-DRB1*08:04L HLA-DRB1*12:01L HLA-DQA1*05:05-B1*03:01L
SEAFLIGCNYLGKP

SEQ ID NO: 16092 - protein, 12 aa, Severe acute respiratory syndrome coronavirus 2
  REGION 1..12: note = Table B: HLA-DRB1*01:03L HLA-DRB1*01:02L HLA-DPA1*03:01-B1*105:01L HLA-DRB1*16:01L HLA-DRB1*04:08L
FLIGCNYLGKPR

SEQ ID NO: 16093 - protein, 13 aa, Severe acute respiratory syndrome coronavirus 2
  REGION 1..13: note = Table B: HLA-DRB1*01:03L HLA-DRB1*04:05L HLA-DQA1*01:02-B1*06:02L HLA-DRB1*01:02L HLA-DRB1*14:01L HLA-DRB1*08:01L HLA-DRB1*12:01L HLA-DRB1*14:17L HLA-DRB1*04:08L
HANYIFWRNTNPI

SEQ ID NO: 16094 - protein, 14 aa, Severe acute respiratory syndrome coronavirus 2
  REGION 1..14: note = Table B: HLA-DRB1*01:03L HLA-DRB1*04:08L
LKLRGTAVMSLKEG

SEQ ID NO: 16095 - protein, 14 aa, Severe acute respiratory syndrome coronavirus 2
  REGION 1..14: note = Table B: HLA-DRB1*01:03L HLA-DRB1*12:01L HLA-DRB1*04:08L
KLRGTAVMSLKEGQ

SEQ ID NO: 16096 - protein, 12 aa, Severe acute respiratory syndrome coronavirus 2
  REGION 1..12: note = Table B: HLA-DRB1*01:03L HLA-DRB1*08:04L HLA-DPA1*01:03-B1*03:01L HLA-DRB1*11:03L HLA-DRB1*14:02L HLA-DRB1*09:01L HLA-DPA1*02:01-B1*13:01L
TAVMSLKEGQIN

SEQ ID NO: 16097 - protein, 11 aa, Severe acute respiratory syndrome coronavirus 2
  REGION 1..11: note = Table B: HLA-DRB1*01:03L HLA-DRB1*01:02L HLA-DRB4*03:01NL
VMSLKEGQIND

SEQ ID NO: 16098 - protein, 10 aa, Severe acute respiratory syndrome coronavirus 2
  REGION 1..10: note = Table B: HLA-DRB1*01:03L HLA-DRB1*14:01L HLA-DRB1*16:01L
LLSKGRLIIR

SEQ ID NO: 16099 - protein, 12 aa, Severe acute respiratory syndrome coronavirus 2
  REGION 1..12: note = Table B: HLA-DRB1*01:03L HLA-DRB1*01:02L HLA-DRB1*12:01L HLA-DRB1*16:01L HLA-DRB1*04:08L
KGRLIIRENNRV

SEQ ID NO: 16100 - protein, 11 aa, Severe acute respiratory syndrome coronavirus 2
  REGION 1..11: note = Table B: HLA-DRB1*01:03L HLA-DPA1*01:02-B1*04:01L
RGVYYPDKVFR

SEQ ID NO: 16101 - protein, 13 aa, Severe acute respiratory syndrome coronavirus 2
  REGION 1..13: note = Table B: HLA-DRB1*01:03L HLA-DPA1*01:03-B1*04:01L HLA-DPA1*01:03-B1*04:02L HLA-DPA1*01:03-B1*02:01L HLA-DRB1*16:01L HLA-DRB1*04:08L
PFFSNVTWFHAIH

SEQ ID NO: 16102 - protein, 11 aa, Severe acute respiratory syndrome coronavirus 2
  REGION 1..11: note = Table B: HLA-DRB1*01:03L HLA-DQA1*01:02-B1*06:02L
HVSGTNGTKRF

SEQ ID NO: 16103 - protein, 14 aa, Severe acute respiratory syndrome coronavirus 2
  REGION 1..14: note = Table B: HLA-DRB1*01:03L HLA-DRB1*04:04L
NGTKRFDNPVLPFN

SEQ ID NO: 16104 - protein, 11 aa, Severe acute respiratory syndrome coronavirus 2
  REGION 1..11: note = Table B: HLA-DRB1*01:03L HLA-DRB1*04:02L HLA-DRB4*03:01NL HLA-DRB1*14:01L HLA-DQA1*05:05-B1*03:116L HLA-DQA1*05:05-B1*03:01L HLA-DPA1*01:02-B1*04:01L HLA-DRB1*10:01L
NPVLPFNDGVY

SEQ ID NO: 16105 - protein, 13 aa, Severe acute respiratory syndrome coronavirus 2
  REGION 1..13: note = Table B: HLA-DRB1*01:03L HLA-DRB1*08:04L HLA-DRB1*14:02L HLA-DPA1*02:01-B1*13:01L
SNIIRGWIFGTTL

SEQ ID NO: 16106 - protein, 11 aa, Severe acute respiratory syndrome coronavirus 2
  REGION 1..11: note = Table B: HLA-DRB1*01:03L HLA-DRB1*04:05L HLA-DQA1*01-B1*05L HLA-DRB1*04:10L HLA-DRB1*12:02L HLA-DRB1*14:54L
LLIVNNATNVV

SEQ ID NO: 16107 - protein, 11 aa, Severe acute respiratory syndrome coronavirus 2
  REGION 1..11: note = Table B: HLA-DRB1*01:03L HLA-DQA1*01:02-B1*06:02L HLA-DPA1*01:03-B1*03:01L HLA-DRB1*11:03L HLA-DQA1*01-B1*05L HLA-DRB1*14:54L
LIVNNATNVVI

SEQ ID NO: 16108 - protein, 14 aa, Severe acute respiratory syndrome coronavirus 2
  REGION 1..14: note = Table B: HLA-DRB1*01:03L HLA-DRB1*01:02L HLA-DRB1*08:04L HLA-DPA1*01:03-B1*04:01L HLA-DPA1*01:03-B1*02:01L HLA-DRB1*16:01L HLA-DRB1*04:08L
VVIKVCEFQFCNDP

SEQ ID NO: 16109 - protein, 14 aa, Severe acute respiratory syndrome coronavirus 2
  REGION 1..14: note = Table B: HLA-DRB1*01:03L HLA-DPA1*01:03-B1*04:01L HLA-DPA1*01:03-B1*02:01L HLA-DRB1*16:01L HLA-DRB1*04:08L HLA-DRB1*15:03L
VIKVCEFQFCNDPF

SEQ ID NO: 16110 - protein, 14 aa, Severe acute respiratory syndrome coronavirus 2
  REGION 1..14: note = Table B: HLA-DRB1*01:03L HLA-DRB1*01:02L HLA-DRB1*12:01L HLA-DPA1*01:03-B1*02:01L
FQFCNDPFLGVYYH

SEQ ID NO: 16111 - protein, 11 aa, Severe acute respiratory syndrome coronavirus 2
  REGION 1..11: note = Table B: HLA-DRB1*01:03L HLA-DPA1*03:01-B1*04:02L HLA-DRB1*08:01L HLA-DPA1*01:03-B1*04:01L HLA-DPA1*01:03-B1*04:02L HLA-DPA1*03:01-B1*105:01L HLA-DRB1*16:01L HLA-DQA1*01:03-B1*06:01L HLA-DRB1*04:08L
DPFLGVYYHKN

SEQ ID NO: 16112 - protein, 12 aa, Severe acute respiratory syndrome coronavirus 2
  REGION 1..12: note = Table B: HLA-DRB1*01:03L HLA-DQA1*01:02-B1*06:02L HLA-DRB1*01:02L HLA-DRB1*11:04L HLA-DRB1*08:01L HLA-DRB1*11:01L HLA-DRB1*12:01L HLA-DPA1*01:03-B1*02:01L
PFLGVYYHKNNK

SEQ ID NO: 16113 - protein, 12 aa, Severe acute respiratory syndrome coronavirus 2
  REGION 1..12: note = Table B: HLA-DRB1*01:03L HLA-DRB1*16:01L HLA-DRB1*04:08L
FLGVYYHKNNKS

SEQ ID NO: 16114 - protein, 14 aa, Severe acute respiratory syndrome coronavirus 2
  REGION 1..14: note = Table B: HLA-DRB1*01:03L HLA-DRB1*04:05L HLA-DRB1*08:01L HLA-DRB1*12:01L HLA-DPA1*03:01-B1*105:01L HLA-DPA1*01:02-B1*04:01L HLA-DRB1*15:03L
YHKNNKSWMESEFR

SEQ ID NO: 16115 - protein, 12 aa, Severe acute respiratory syndrome coronavirus 2
  REGION 1..12: note = Table B: HLA-DRB1*01:03L HLA-DRB1*04:05L HLA-DRB1*01:02L HLA-DPA1*01:03-B1*03:01L HLA-DRB1*12:01L HLA-DPA1*02:01-B1*13:01L HLA-DPA1*03:01-B1*105:01L HLA-DRB1*16:01L HLA-DRB1*04:08L HLA-DQA1*02:01-B1*03:03L
  REGION 1..12: note = CONT. FROM ABOVE: HLA-DRB1*15:03L
EFRVYSSANNCT

SEQ ID NO: 16116 - protein, 12 aa, Severe acute respiratory syndrome coronavirus 2
  REGION 1..12: note = Table B: HLA-DRB1*01:03L HLA-DPA1*01:03-B1*03:01L
FEYVSQPFLMDL

SEQ ID NO: 16117 - protein, 11 aa, Severe acute respiratory syndrome coronavirus 2
  REGION 1..11: note = Table B: HLA-DRB1*01:03L HLA-DPA1*01:03-B1*03:01L HLA-DRB1*12:01L
YVSQPFLMDLE

SEQ ID NO: 16118 - protein, 12 aa, Severe acute respiratory syndrome coronavirus 2
  REGION 1..12: note = Table B: HLA-DRB1*01:03L HLA-DRB1*01:02L HLA-DQA1*05:01-B1*02:01L HLA-DRB1*16:01L HLA-DRB1*04:08L HLA-DQA1*02:01-B1*03:03L
PFLMDLEGKQGN

SEQ ID NO: 16119 - protein, 13 aa, Severe acute respiratory syndrome coronavirus 2
  REGION 1..13: note = Table B: HLA-DRB1*01:03L HLA-DRB1*04:05L HLA-DRB1*01:02L HLA-DRB1*12:01L HLA-DPA1*02:01-B1*13:01L HLA-DPA1*03:01-B1*105:01L HLA-DRB1*15:03L
KNLREFVFKNIDG

SEQ ID NO: 16120 - protein, 10 aa, Severe acute respiratory syndrome coronavirus 2
  REGION 1..10: note = Table B: HLA-DRB1*01:03L HLA-DQA1*01:02-B1*06:02L HLA-DPA1*01:03-B1*03:01L HLA-DRB1*03:01L HLA-DRB1*14:02L HLA-DQA1*05:05-B1*03:19L HLA-DQA1*05:01-B1*02:01L HLA-DPA1*01:03-B1*104:01L HLA-DRB1*16:01L
  REGION 1..10: note = CONT. FROM ABOVE: HLA-DQA1*02:01-B1*03:03L
KNIDGYFKIY

SEQ ID NO: 16121 - protein, 10 aa, Severe acute respiratory syndrome coronavirus 2
  REGION 1..10: note = Table B: HLA-DRB1*01:03L HLA-DRB1*14:01L HLA-DRB1*08:01L HLA-DQA1*03:01-B1*03:02L HLA-DRB1*16:01L HLA-DQA1*02:01-B1*03:03L
KIYSKHTPIN

SEQ ID NO: 16122 - protein, 10 aa, Severe acute respiratory syndrome coronavirus 2
  REGION 1..10: note = Table B: HLA-DRB1*01:03L HLA-DQA1*01:02-B1*06:02L HLA-DRB1*14:02L HLA-DPA1*02:01-B1*13:01L HLA-DPA1*03:01-B1*105:01L HLA-DQA1*01:03-B1*06:01L HLA-DQA1*02:01-B1*03:03L HLA-DRB1*15:03L
NLVRDLPQGF

SEQ ID NO: 16123 - protein, 10 aa, Severe acute respiratory syndrome coronavirus 2
  REGION 1..10: note = Table B: HLA-DRB1*01:03L HLA-DQA1*01:02-B1*06:02L HLA-DPA1*03:01-B1*04:02L HLA-DQA1*01-B1*05L HLA-DPA1*01:03-B1*04:01L HLA-DPA1*01:03-B1*04:02L HLA-DRB1*12:01L HLA-DPA1*03:01-B1*105:01L
  REGION 1..10: note = CONT. FROM ABOVE: HLA-DPA1*01:02-B1*04:01L HLA-DRB1*16:01L HLA-D QA1*01:03-B1*06:01L HLA-DRB1*04:08L HLA-DQA1*02:01-B1*03:03L HLA -DRB1*15:03L
INITRFQTLL

SEQ ID NO: 16124 - protein, 11 aa, Severe acute respiratory syndrome coronavirus 2
  REGION 1..11: note = Table B: HLA-DRB1*01:03L HLA-DRB1*04:05L HLA-DRB1*01:02L HLA-DRB1*08:01L HLA-DRB1*04:08L
TRFQTLLALHR

SEQ ID NO: 16125 - protein, 12 aa, Severe acute respiratory syndrome coronavirus 2
  REGION 1..12: note = Table B: HLA-DRB1*01:03L HLA-DPA1*03:01-B1*105:01L HLA-DRB1*04:08L HLA-DRB1*15:03L
RFQTLLALHRSY

SEQ ID NO: 16126 - protein, 12 aa, Severe acute respiratory syndrome coronavirus 2
  REGION 1..12: note = Table B: HLA-DRB1*01:03L HLA-DRB1*01:02L HLA-DRB1*14:01L HLA-DRB1*12:01L HLA-DRB1*16:01L HLA-DRB1*15:03L
LLALHRSYLTPG

SEQ ID NO: 16127 - protein, 14 aa, Severe acute respiratory syndrome coronavirus 2
  REGION 1..14: note = Table B: HLA-DRB1*01:03L HLA-DRB1*01:02L HLA-DQA1*01:01-B1*05:01L HLA-DQA1*05:05-B1*03:116L HLA-DRB1*04:08L
DSSSGWTAGAAAYY

SEQ ID NO: 16128 - protein, 12 aa, Severe acute respiratory syndrome coronavirus 2
  REGION 1..12: note = Table B: HLA-DRB1*01:03L HLA-DRB1*04:05L HLA-DRB1*08:01L HLA-DRB1*04:08L
VGYLQPRTFLLK

SEQ ID NO: 16129 - protein, 10 aa, Severe acute respiratory syndrome coronavirus 2
  REGION 1..10: note = Table B: HLA-DRB1*01:03L HLA-DQA1*01:02-B1*06:02L HLA-DRB1*03:01L HLA-DQA1*05:05-B1*03:19L HLA-DQA1*05:01-B1*02:01L HLA-DQA1*02:01-B1*03:03L
LQPRTFLLKY

SEQ ID NO: 16130 - protein, 10 aa, Severe acute respiratory syndrome coronavirus 2
  REGION 1..10: note = Table B: HLA-DRB1*01:03L HLA-DQA1*01:02-B1*06:02L HLA-DRB1*03:01L HLA-DRB1*14:02L HLA-DQA1*05:05-B1*03:19L HLA-DQA1*05:01-B1*02:01L HLA-DQA1*01:03-B1*06:01L HLA-DQA1*02:01-B1*03:03L
KSFTVEKGIY

SEQ ID NO: 16131 - protein, 12 aa, Severe acute respiratory syndrome coronavirus 2
  REGION 1..12: note = Table B: HLA-DRB1*01:03L HLA-DRB1*01:01L HLA-DRB1*01:02L HLA-DPA1*03:01-B1*105:01L HLA-DRB1*10:01L HLA-DRB1*04:08L HLA-DRB1*15:03L
SFTVEKGIYQTS

SEQ ID NO: 16132 - protein, 10 aa, Severe acute respiratory syndrome coronavirus 2
  REGION 1..10: note = Table B: HLA-DRB1*01:03L HLA-DQA1*01:02-B1*06:02L HLA-DRB1*14:02L HLA-DPA1*02:01-B1*13:01L HLA-DPA1*03:01-B1*105:01L HLA-DQA1*01:03-B1*06:01L HLA-DQA1*02:01-B1*03:03L HLA-DRB1*15:03L
VQPTESIVRF

SEQ ID NO: 16133 - protein, 11 aa, Severe acute respiratory syndrome coronavirus 2
  REGION 1..11: note = Table B: HLA-DRB1*01:03L HLA-DRB1*01:02L HLA-DRB1*16:01L HLA-DRB1*04:08L HLA-DQA1*02:01-B1*03:03L HLA-DRB1*15:03L
RFASVYAWNRK

SEQ ID NO: 16134 - protein, 10 aa, Severe acute respiratory syndrome coronavirus 2
  REGION 1..10: note = Table B: HLA-DRB1*01:03L HLA-DQA1*03:01-B1*03:02L
ASVYAWNRKR

SEQ ID NO: 16135 - protein, 10 aa, Severe acute respiratory syndrome coronavirus 2
  REGION 1..10: note = Table B: HLA-DRB1*01:03L HLA-DRB1*08:01L
YAWNRKRISN

SEQ ID NO: 16136 - protein, 12 aa, Severe acute respiratory syndrome coronavirus 2
  REGION 1..12: note = Table B: HLA-DRB1*01:03L HLA-DRB1*01:02L HLA-DRB1*14:01L HLA-DQA1*01-B1*05L HLA-DQA1*05:01-B1*02:01L HLA-DRB1*12:01L HLA-DQA1*03:01-B1*03:02L HLA-DRB1*14:54L HLA-DQA1*05:05-B1*03:01L HLA-DRB1*10:01L HLA-DRB1*15:03L
YSVLYNSASFST

SEQ ID NO: 16137 - protein, 12 aa, Severe acute respiratory syndrome coronavirus 2
  REGION 1..12: note = Table B: HLA-DRB1*01:03L HLA-DRB1*04:05L HLA-DQA1*01:02-B1*06:02L HLA-DRB1*01:02L HLA-DRB1*08:01L HLA-DRB1*12:01L HLA-DPA1*03:01-B1*105:01L HLA-DPA1*01:02-B1*04:01L HLA-DRB1*16:01L HLA-DRB1*04:08L
  REGION 1..12: note = CONT. FROM ABOVE: HLA-DQA1*02:01-B1*03:03L HLA-DRB1*15:03L
FSTFKCYGVSPT

SEQ ID NO: 16138 - protein, 10 aa, Severe acute respiratory syndrome coronavirus 2
  REGION 1..10: note = Table B: HLA-DRB1*01:03L HLA-DQA1*03:01-B1*03:02L
FKCYGVSPTK

SEQ ID NO: 16139 - protein, 12 aa, Severe acute respiratory syndrome coronavirus 2
  REGION 1..12: note = Table B: HLA-DRB1*01:03L HLA-DRB1*04:04L HLA-DRB1*04:05L HLA-DQA1*01:02-B1*06:02L HLA-DRB1*01:02L HLA-DPA1*01:03-B1*03:01L HLA-DRB1*04:10L HLA-DPA1*02:01-B1*13:01L HLA-DRB1*14:54L HLA-DRB1*04:08L
  REGION 1..12: note = CONT. FROM ABOVE: HLA-DRB1*15:03L
TNVYADSFVIRG

SEQ ID NO: 16140 - protein, 11 aa, Severe acute respiratory syndrome coronavirus 2
  REGION 1..11: note = Table B: HLA-DRB1*01:03L HLA-DRB4*03:01NL HLA-DRB1*14:54L HLA-DRB1*14:17L
QIAPGQTGKIA

SEQ ID NO: 16141 - protein, 11 aa, Severe acute respiratory syndrome coronavirus 2
  REGION 1..11: note = Table B: HLA-DRB1*01:03L HLA-DQA1*01:02-B1*06:02L HLA-DRB4*03:01NL HLA-DRB1*14:17L
IAPGQTGKIAD

SEQ ID NO: 16142 - protein, 13 aa, Severe acute respiratory syndrome coronavirus 2
  REGION 1..13: note = Table B: HLA-DRB1*01:03L HLA-DRB1*04:05L HLA-DQA1*01:02-B1*06:02L HLA-DPA1*01:03-B1*03:01L HLA-DRB1*14:01L HLA-DQA1*01:01-B1*05:01L HLA-DQA1*01-B1*05L HLA-DQA1*05:05-B1*03:19L HLA-DRB1*12:01L
  REGION 1..13: note = CONT. FROM ABOVE: HLA-DPA1*03:01-B1*105:01L HLA-DRB1*14:54L HLA- DQA1*05:05-B1*03:01L HLA-DRB1*16:01L
WNSNNLDSKVGGN

SEQ ID NO: 16143 - protein, 12 aa, Severe acute respiratory syndrome coronavirus 2
  REGION 1..12: note = Table B: HLA-DRB1*01:03L HLA-DRB1*01:02L HLA-DRB1*08:01L HLA-DRB1*16:01L HLA-DRB1*04:08L
NYNYLYRLFRKS

SEQ ID NO: 16144 - protein, 11 aa, Severe acute respiratory syndrome coronavirus 2
  REGION 1..11: note = Table B: HLA-DRB1*01:03L HLA-DRB1*08:01L
NYLYRLFRKSN

SEQ ID NO: 16145 - protein, 12 aa, Severe acute respiratory syndrome coronavirus 2
  REGION 1..12: note = Table B: HLA-DRB1*01:03L HLA-DRB1*01:02L HLA-DRB1*08:01L HLA-DRB1*16:01L HLA-DRB1*04:08L
LYRLFRKSNLKP

SEQ ID NO: 16146 - protein, 11 aa, Severe acute respiratory syndrome coronavirus 2
  REGION 1..11: note = Table B: HLA-DRB1*01:03L
RLFRKSNLKPF

SEQ ID NO: 16147 - protein, 13 aa, Severe acute respiratory syndrome coronavirus 2
  REGION 1..13: note = Table B: HLA-DRB1*01:03L HLA-DQA1*01:02-B1*06:02L HLA-DRB1*01:02L HLA-DRB1*12:01L HLA-DQA1*03:01-B1*03:02L HLA-DPA1*01:02-B1*04:01L HLA-DRB1*16:01L HLA-DRB1*04:08L HLA-DQA1*02:01-B1*03:03L
LFRKSNLKPFERD

SEQ ID NO: 16148 - protein, 13 aa, Severe acute respiratory syndrome coronavirus 2
  REGION 1..13: note = Table B: HLA-DRB1*01:03L HLA-DRB1*04:05L HLA-DRB1*01:02L HLA-DRB1*08:04L HLA-DRB1*11:04L HLA-DRB1*11:01L HLA-DRB1*04:08L
KSNLKPFERDIST

SEQ ID NO: 16149 - protein, 14 aa, Severe acute respiratory syndrome coronavirus 2
  REGION 1..14: note = Table B: HLA-DRB1*01:03L HLA-DRB1*04:02L HLA-DRB1*04:05L HLA-DRB1*01:02L HLA-DPA1*01:03-B1*03:01L HLA-DPA1*03:01-B1*04:02L HLA-DPA1*01:03-B1*04:02L HLA-DRB1*12:01L HLA-DPA1*01:03-B1*02:01L HLA-DRB1*14:17L
  REGION 1..14: note = CONT. FROM ABOVE: HLA-DPA1*01:02-B1*04:01L HLA-DRB1*16:01L HLA-D RB1*04:08L HLA-DRB1*15:03L
RDISTEIYQAGSTP

SEQ ID NO: 16150 - protein, 13 aa, Severe acute respiratory syndrome coronavirus 2
  REGION 1..13: note = Table B: HLA-DRB1*01:03L HLA-DPA1*01:03-B1*04:02L HLA-DPA1*03:01-B1*105:01L HLA-DQA1*03:01-B1*03:02L HLA-DRB1*04:08L
IYQAGSTPCNGVE

SEQ ID NO: 16151 - protein, 12 aa, Severe acute respiratory syndrome coronavirus 2
  REGION 1..12: note = Table B: HLA-DRB1*01:03L HLA-DRB1*08:01L HLA-DRB1*07:01L HLA-DRB1*04:08L
GVGYQPYRVVVL

SEQ ID NO: 16152 - protein, 12 aa, Severe acute respiratory syndrome coronavirus 2
  REGION 1..12: note = Table B: HLA-DRB1*01:03L HLA-DRB1*04:08L
VGYQPYRVVVLS

SEQ ID NO: 16153 - protein, 12 aa, Severe acute respiratory syndrome coronavirus 2
  REGION 1..12: note = Table B: HLA-DRB1*01:03L HLA-DQA1*01:02-B1*06:02L HLA-DRB1*01:02L HLA-DRB1*04:08L HLA-DQA1*02:01-B1*03:03L
LLHAPATVCGPK

SEQ ID NO: 16154 - protein, 16 aa, Severe acute respiratory syndrome coronavirus 2
  REGION 1..16: note = Table B: HLA-DRB1*01:03L HLA-DPA1*01:03-B1*03:01L HLA-DRB1*04:08L
STNLVKNKCVNFNFNG

SEQ ID NO: 16155 - protein, 12 aa, Severe acute respiratory syndrome coronavirus 2
  REGION 1..12: note = Table B: HLA-DRB1*01:03L HLA-DRB1*01:01L HLA-DRB1*11:03L HLA-DRB1*10:01L HLA-DRB1*16:01L HLA-DRB1*04:08L HLA-DRB1*15:03L
NFNGLTGTGVLT

SEQ ID NO: 16156 - protein, 14 aa, Severe acute respiratory syndrome coronavirus 2
  REGION 1..14: note = Table B: HLA-DRB1*01:03L HLA-DRB1*04:02L HLA-DRB1*04:05L HLA-DPA1*01:03-B1*03:01L HLA-DRB1*08:01L HLA-DQA1*05:01-B1*02:01L HLA-DPA1*01:03-B1*04:02L HLA-DRB1*12:01L HLA-DPA1*01:03-B1*104:01L HLA-DRB1*04:08L
FNGLTGTGVLTESN

SEQ ID NO: 16157 - protein, 13 aa, Severe acute respiratory syndrome coronavirus 2
  REGION 1..13: note = Table B: HLA-DRB1*01:03L HLA-DRB1*04:05L HLA-DRB1*01:02L HLA-DRB1*08:01L HLA-DRB1*12:01L HLA-DRB1*04:08L
SNKKFLPFQQFGR

SEQ ID NO: 16158 - protein, 14 aa, Severe acute respiratory syndrome coronavirus 2
  REGION 1..14: note = Table B: HLA-DRB1*01:03L HLA-DRB1*04:05L HLA-DRB1*14:01L HLA-DPA1*03:01-B1*105:01L HLA-DRB1*04:08L
GSNVFQTRAGCLIG

SEQ ID NO: 16159 - protein, 15 aa, Severe acute respiratory syndrome coronavirus 2
  REGION 1..15: note = Table B: HLA-DRB1*01:03L HLA-DRB1*04:08L
SNVFQTRAGCLIGAE

SEQ ID NO: 16160 - protein, 14 aa, Severe acute respiratory syndrome coronavirus 2
  REGION 1..14: note = Table B: HLA-DRB1*01:03L HLA-DPA1*01:03-B1*04:02L HLA-DRB1*04:08L
IPIGAGICASYQTQ

SEQ ID NO: 16161 - protein, 12 aa, Severe acute respiratory syndrome coronavirus 2
  REGION 1..12: note = Table B: HLA-DRB1*01:03L HLA-DRB1*04:05L HLA-DRB1*12:01L
SPRRARSVASQS

SEQ ID NO: 16162 - protein, 14 aa, Severe acute respiratory syndrome coronavirus 2
  REGION 1..14: note = Table B: HLA-DRB1*01:03L HLA-DRB1*04:04L HLA-DQA1*01:02-B1*06:02L HLA-DRB1*01:02L HLA-DRB1*08:04L HLA-DRB1*11:04L HLA-DQA1*05:05-B1*03:01L HLA-DRB1*04:08L HLA-DRB1*15:03L
ENSVAYSNNSIAIP

SEQ ID NO: 16163 - protein, 11 aa, Severe acute respiratory syndrome coronavirus 2
  REGION 1..11: note = Table B: HLA-DRB1*01:03L HLA-DRB1*04:05L HLA-DQA1*01:02-B1*06:02L HLA-DRB1*14:01L HLA-DQA1*01:01-B1*05:01L HLA-DQA1*05:05-B1*03:19L HLA-DRB1*04:10L HLA-DRB1*12:01L HLA-DRB1*14:54L
  REGION 1..11: note = CONT. FROM ABOVE: HLA-DQA1*05:05-B1*03:01L HLA-DPA1*01:02-B1*04: 01L
LPVSMTKTSVD

SEQ ID NO: 16164 - protein, 14 aa, Severe acute respiratory syndrome coronavirus 2
  REGION 1..14: note = Table B: HLA-DRB1*01:03L HLA-DQA1*05:05-B1*03:19L HLA-DRB1*12:01L HLA-DRB1*16:01L HLA-DRB1*04:08L HLA-DRB1*15:03L
YGSFCTQLNRALTG

SEQ ID NO: 16165 - protein, 13 aa, Severe acute respiratory syndrome coronavirus 2
  REGION 1..13: note = Table B: HLA-DRB1*01:03L HLA-DRB1*04:04L HLA-DRB1*01:02L HLA-DRB1*04:08L HLA-DRB1*15:03L
LTGIAVEQDKNTQ

SEQ ID NO: 16166 - protein, 14 aa, Severe acute respiratory syndrome coronavirus 2
  REGION 1..14: note = Table B: HLA-DRB1*01:03L HLA-DRB1*04:05L HLA-DRB1*04:08L
QDKNTQEVFAQVKQ

SEQ ID NO: 16167 - protein, 13 aa, Severe acute respiratory syndrome coronavirus 2
  REGION 1..13: note = Table B: HLA-DRB1*01:03L HLA-DRB1*08:01L HLA-DPA1*01:02-B1*04:01L
VFAQVKQIYKTPP

SEQ ID NO: 16168 - protein, 13 aa, Severe acute respiratory syndrome coronavirus 2
  REGION 1..13: note = Table B: HLA-DRB1*01:03L HLA-DRB1*04:05L HLA-DRB1*01:02L HLA-DRB3*02:01L HLA-DPA1*03:01-B1*04:02L HLA-DPA1*02:01-B1*13:01L HLA-DQA1*01:03-B1*06:01L HLA-DRB1*04:08L HLA-DRB1*15:01L
TPPIKDFGGFNFS

SEQ ID NO: 16169 - protein, 15 aa, Severe acute respiratory syndrome coronavirus 2
  REGION 1..15: note = Table B: HLA-DRB1*01:03L HLA-DRB1*04:05L HLA-DRB1*08:01L HLA-DRB1*04:08L
KPSKRSFIEDLLFNK

SEQ ID NO: 16170 - protein, 12 aa, Severe acute respiratory syndrome coronavirus 2
  REGION 1..12: note = Table B: HLA-DRB1*01:03L HLA-DPA1*01:03-B1*03:01L HLA-DRB1*04:08L
RSFIEDLLFNKV

SEQ ID NO: 16171 - protein, 14 aa, Severe acute respiratory syndrome coronavirus 2
  REGION 1..14: note = Table B: HLA-DRB1*01:03L HLA-DRB1*16:01L HLA-DRB1*15:03L
KQYGDCLGDIAARD

SEQ ID NO: 16172 - protein, 15 aa, Severe acute respiratory syndrome coronavirus 2
  REGION 1..15: note = Table B: HLA-DRB1*01:03L
DIAARDLICAQKFNG

SEQ ID NO: 16173 - protein, 13 aa, Severe acute respiratory syndrome coronavirus 2
  REGION 1..13: note = Table B: HLA-DRB1*01:03L HLA-DRB1*08:04L HLA-DRB1*11:04L HLA-DRB1*11:01L HLA-DRB1*15:03L
ARDLICAQKFNGL

SEQ ID NO: 16174 - protein, 12 aa, Severe acute respiratory syndrome coronavirus 2
  REGION 1..12: note = Table B: HLA-DRB1*01:03L HLA-DQA1*01:02-B1*06:02L HLA-DRB1*08:04L HLA-DRB1*14:01L HLA-DRB1*08:01L HLA-DPA1*01:03-B1*04:01L HLA-DPA1*01:03-B1*04:02L HLA-DRB1*12:01L HLA-DPA1*01:03-B1*02:01L HLA-DRB1*16:01L
  REGION 1..12: note = CONT. FROM ABOVE: HLA-DQA1*01:03-B1*06:01L HLA-DRB1*04:08L HLA-D RB1*15:03L
DLICAQKFNGLT

SEQ ID NO: 16175 - protein, 13 aa, Severe acute respiratory syndrome coronavirus 2
  REGION 1..13: note = Table B: HLA-DRB1*01:03L HLA-DRB1*04:04L HLA-DRB3*02:01L HLA-DQA1*05:05-B1*03:01L
EMIAQYTSALLAG

SEQ ID NO: 16176 - protein, 14 aa, Severe acute respiratory syndrome coronavirus 2
  REGION 1..14: note = Table B: HLA-DRB1*01:03L HLA-DRB1*01:02L HLA-DPA1*01:03-B1*03:01L HLA-DQA1*01:01-B1*05:01L HLA-DRB1*08:01L HLA-DQA1*05:01-B1*02:01L HLA-DPA1*01:03-B1*04:02L HLA-DRB1*16:01L HLA-DRB1*04:08L
GTITSGWTFGAGAA

SEQ ID NO: 16177 - protein, 12 aa, Severe acute respiratory syndrome coronavirus 2
  REGION 1..12: note = Table B: HLA-DRB1*01:03L HLA-DRB1*04:05L HLA-DQA1*01:02-B1*06:02L HLA-DRB1*01:02L HLA-DPA1*01:03-B1*03:01L HLA-DPA1*01:03-B1*04:02L HLA-DRB1*12:01L HLA-DPA1*02:01-B1*13:01L
  REGION 1..12: note = CONT. FROM ABOVE: HLA-DPA1*03:01-B1*105:01L HLA-DRB1*10:01L HLA- DRB1*16:01L HLA-DRB1*04:08L HLA-DRB1*15:03L
RFNGIGVTQNVL

SEQ ID NO: 16178 - protein, 13 aa, Severe acute respiratory syndrome coronavirus 2
  REGION 1..13: note = Table B: HLA-DRB1*01:03L HLA-DRB1*04:05L HLA-DRB1*01:02L HLA-DQA1*05:05-B1*03:19L HLA-DRB1*04:10L HLA-DPA1*01:02-B1*04:01L HLA-DRB1*16:01L HLA-DRB1*04:08L HLA-DRB1*15:03L
IGVTQNVLYENQK

SEQ ID NO: 16179 - protein, 11 aa, Severe acute respiratory syndrome coronavirus 2
  REGION 1..11: note = Table B: HLA-DRB1*01:03L HLA-DRB1*04:04L HLA-DRB1*04:05L HLA-DRB4*03:01NL HLA-DQA1*01-B1*05L HLA-DRB1*04:10L HLA-DRB1*14:54L HLA-DRB1*16:01L HLA-DRB1*04:08L HLA-DQA1*02:01-B1*03:03L
IGKIQDSLSST

SEQ ID NO: 16180 - protein, 15 aa, Severe acute respiratory syndrome coronavirus 2
  REGION 1..15: note = Table B: HLA-DRB1*01:03L HLA-DRB1*01:02L HLA-DPA1*01:03-B1*03:01L HLA-DPA1*03:01-B1*105:01L
GKIQDSLSSTASALG

SEQ ID NO: 16181 - protein, 11 aa, Severe acute respiratory syndrome coronavirus 2
  REGION 1..11: note = Table B: HLA-DRB1*01:03L HLA-DQA1*01:01-B1*05:01L
SSTASALGKLQ

SEQ ID NO: 16182 - protein, 11 aa, Severe acute respiratory syndrome coronavirus 2
  REGION 1..11: note = Table B: HLA-DRB1*01:03L HLA-DQA1*01:01-B1*05:01L
STASALGKLQD

SEQ ID NO: 16183 - protein, 13 aa, Severe acute respiratory syndrome coronavirus 2
  REGION 1..13: note = Table B: HLA-DRB1*01:03L HLA-DRB1*04:04L HLA-DRB1*10:01L HLA-DRB1*04:08L HLA-DRB1*15:03L
SALGKLQDVVNQN

SEQ ID NO: 16184 - protein, 13 aa, Severe acute respiratory syndrome coronavirus 2
  REGION 1..13: note = Table B: HLA-DRB1*01:03L HLA-DRB1*04:05L HLA-DRB1*01:02L HLA-DQA1*01:01-B1*05:01L HLA-DRB1*12:01L HLA-DRB1*14:17L HLA-DRB1*16:01L HLA-DRB1*04:08L
VNQNAQALNTLVK

SEQ ID NO: 16185 - protein, 14 aa, Severe acute respiratory syndrome coronavirus 2
  REGION 1..14: note = Table B: HLA-DRB1*01:03L HLA-DRB1*01:02L HLA-DRB1*12:01L HLA-DRB1*16:01L HLA-DRB1*04:08L
NAQALNTLVKQLSS

SEQ ID NO: 16186 - protein, 13 aa, Severe acute respiratory syndrome coronavirus 2
  REGION 1..13: note = Table B: HLA-DRB1*01:03L HLA-DRB1*11:03L HLA-DRB1*04:08L
QALNTLVKQLSSN

SEQ ID NO: 16187 - protein, 13 aa, Severe acute respiratory syndrome coronavirus 2
  REGION 1..13: note = Table B: HLA-DRB1*01:03L HLA-DRB1*04:04L HLA-DPA1*03:01-B1*105:01L HLA-DRB1*04:08L
TLVKQLSSNFGAI

SEQ ID NO: 16188 - protein, 12 aa, Severe acute respiratory syndrome coronavirus 2
  REGION 1..12: note = Table B: HLA-DRB1*01:03L HLA-DRB1*04:05L HLA-DRB1*01:02L HLA-DQA1*01:01-B1*05:01L HLA-DQA1*05:05-B1*03:19L HLA-DPA1*01:02-B1*04:01L HLA-DRB1*04:08L HLA-DRB1*15:03L
AISSVLNDILSR

SEQ ID NO: 16189 - protein, 12 aa, Severe acute respiratory syndrome coronavirus 2
  REGION 1..12: note = Table B: HLA-DRB1*01:03L HLA-DRB1*04:02L HLA-DRB1*04:04L HLA-DRB1*04:05L HLA-DQA1*01:02-B1*06:02L HLA-DRB1*01:02L HLA-DRB4*03:01NL HLA-DRB1*14:01L HLA-DRB1*04:10L HLA-DRB1*12:01L HLA-DQA1*03:01-B1*03:02L HLA-DRB1*14:54L HLA-DRB1*16:01L
  REGION 1..12: note = CONT. FROM ABOVE: HLA-DRB1*04:08L HLA-DQA1*02:01-B1*03:03L HLA-D RB1*15:03L
GRLQSLQTYVTQ

SEQ ID NO: 16190 - protein, 12 aa, Severe acute respiratory syndrome coronavirus 2
  REGION 1..12: note = Table B: HLA-DRB1*01:03L HLA-DRB1*04:05L HLA-DRB1*04:08L HLA-DRB1*15:01L
SLQTYVTQQLIR

SEQ ID NO: 16191 - protein, 13 aa, Severe acute respiratory syndrome coronavirus 2
  REGION 1..13: note = Table B: HLA-DRB1*01:03L HLA-DRB1*04:02L HLA-DRB1*04:05L HLA-DRB1*01:02L HLA-DRB1*14:01L HLA-DQA1*05:01-B1*02:01L HLA-DRB1*12:01L HLA-DPA1*03:01-B1*105:01L HLA-DRB1*14:54L HLA-DQA1*05:05-B1*03:01L HLA-DRB1*14:17L HLA-DRB1*16:01L
  REGION 1..13: note = CONT. FROM ABOVE: HLA-DRB1*04:08L HLA-DRB1*15:03L
TQQLIRAAEIRAS

SEQ ID NO: 16192 - protein, 13 aa, Severe acute respiratory syndrome coronavirus 2
  REGION 1..13: note = Table B: HLA-DRB1*01:03L HLA-DRB1*04:02L HLA-DRB1*14:17L HLA-DRB1*16:01L HLA-DRB1*15:03L
QQLIRAAEIRASA

SEQ ID NO: 16193 - protein, 12 aa, Severe acute respiratory syndrome coronavirus 2
  REGION 1..12: note = Table B: HLA-DRB1*01:03L HLA-DRB1*04:04L HLA-DRB4*03:01NL HLA-DRB1*14:01L HLA-DRB1*11:04L HLA-DRB1*12:01L HLA-DRB1*12:02L HLA-DRB1*04:08L
AAEIRASANLAA

SEQ ID NO: 16194 - protein, 12 aa, Severe acute respiratory syndrome coronavirus 2
  REGION 1..12: note = Table B: HLA-DRB1*01:03L HLA-DRB1*04:04L HLA-DQA1*01:02-B1*06:02L HLA-DRB1*01:02L HLA-DRB4*03:01NL HLA-DRB1*14:01L HLA-DRB1*11:04L HLA-DRB1*12:01L HLA-DQA1*05:05-B1*03:01L HLA-DRB1*10:01L HLA-DRB1*04:08L
  REGION 1..12: note = CONT. FROM ABOVE: HLA-DRB1*08:03L HLA-DQA1*02:01-B1*03:03L
AEIRASANLAAT

SEQ ID NO: 16195 - protein, 14 aa, Severe acute respiratory syndrome coronavirus 2
  REGION 1..14: note = Table B: HLA-DRB1*01:03L HLA-DRB1*04:05L HLA-DRB1*08:01L HLA-DRB1*12:01L
ATKMSECVLGQSKR

SEQ ID NO: 16196 - protein, 14 aa, Severe acute respiratory syndrome coronavirus 2
  REGION 1..14: note = Table B: HLA-DRB1*01:03L HLA-DRB1*04:04L HLA-DRB1*04:05L HLA-DQA1*01:02-B1*06:02L HLA-DRB1*01:02L HLA-DRB1*12:01L HLA-DPA1*02:01-B1*13:01L HLA-DRB1*07:01L HLA-DRB1*16:01L HLA-DRB1*04:08L
GQSKRVDFCGKGYH

SEQ ID NO: 16197 - protein, 16 aa, Severe acute respiratory syndrome coronavirus 2
  REGION 1..16: note = Table B: HLA-DRB1*01:03L HLA-DPA1*03:01-B1*105:01L HLA-DPA1*01:02-B1*04:01L HLA-DRB1*16:01L HLA-DRB1*04:08L
RVDFCGKGYHLMSFPQ

SEQ ID NO: 16198 - protein, 14 aa, Severe acute respiratory syndrome coronavirus 2
  REGION 1..14: note = Table B: HLA-DRB1*01:03L HLA-DRB1*08:04L HLA-DRB1*08:01L HLA-DRB1*11:01L HLA-DPA1*01:03-B1*04:02L HLA-DRB1*12:01L HLA-DPA1*02:01-B1*13:01L HLA-DPA1*01:02-B1*04:01L HLA-DQA1*02:01-B1*03:03L HLA-DRB1*15:03L
GKGYHLMSFPQSAP

SEQ ID NO: 16199 - protein, 12 aa, Severe acute respiratory syndrome coronavirus 2
  REGION 1..12: note = Table B: HLA-DRB1*01:03L HLA-DPA1*01:03-B1*04:01L HLA-DPA1*01:03-B1*04:02L HLA-DRB1*16:01L HLA-DRB1*04:08L
VFLHVTYVPAQE

SEQ ID NO: 16200 - protein, 12 aa, Severe acute respiratory syndrome coronavirus 2
  REGION 1..12: note = Table B: HLA-DRB1*01:03L HLA-DRB1*04:02L HLA-DRB1*01:02L HLA-DPA1*01:03-B1*03:01L HLA-DQA1*01:01-B1*05:01L HLA-DRB1*08:01L HLA-DQA1*05:01-B1*02:01L HLA-DPA1*01:03-B1*04:02L HLA-DRB1*12:01L HLA-DRB1*16:01L
  REGION 1..12: note = CONT. FROM ABOVE: HLA-DRB1*04:08L HLA-DRB1*15:03L
NFTTAPAICHDG

SEQ ID NO: 16201 - protein, 11 aa, Severe acute respiratory syndrome coronavirus 2
  REGION 1..11: note = Table B: HLA-DRB1*01:03L HLA-DRB1*16:01L
ICHDGKAHFPR

SEQ ID NO: 16202 - protein, 14 aa, Severe acute respiratory syndrome coronavirus 2
  REGION 1..14: note = Table B: HLA-DRB1*01:03L HLA-DRB1*04:04L HLA-DRB1*01:02L HLA-DPA1*01:03-B1*03:01L HLA-DRB1*08:01L HLA-DRB1*12:01L HLA-DPA1*02:01-B1*13:01L HLA-DRB1*07:01L HLA-DRB1*04:08L
HFPREGVFVSNGTH

SEQ ID NO: 16203 - protein, 12 aa, Severe acute respiratory syndrome coronavirus 2
  REGION 1..12: note = Table B: HLA-DRB1*01:03L HLA-DRB1*08:04L HLA-DRB1*12:02L HLA-DRB1*04:08L HLA-DRB1*15:03L
NASVVNIQKEID

SEQ ID NO: 16204 - protein, 13 aa, Severe acute respiratory syndrome coronavirus 2
  REGION 1..13: note = Table B: HLA-DRB1*01:03L HLA-DRB1*04:02L HLA-DRB1*08:04L HLA-DRB3*02:01L HLA-DPA1*03:01-B1*04:02L HLA-DQA1*01:01-B1*05:01L HLA-DQA1*05:05-B1*03:19L HLA-DRB1*12:02L HLA-DPA1*01:03-B1*104:01L
  REGION 1..13: note = CONT. FROM ABOVE: HLA-DQA1*05:05-B1*03:01L HLA-DRB1*04:08L
EIDRLNEVAKNLN

SEQ ID NO: 16205 - protein, 13 aa, Severe acute respiratory syndrome coronavirus 2
  REGION 1..13: note = Table B: HLA-DRB1*01:03L HLA-DRB1*12:01L HLA-DRB1*14:17L HLA-DRB1*04:08L HLA-DRB1*15:03L
AKNLNESLIDLQE

SEQ ID NO: 16206 - protein, 14 aa, Severe acute respiratory syndrome coronavirus 2
  REGION 1..14: note = Table B: HLA-DRB1*01:03L HLA-DRB1*01:02L HLA-DPA1*01:03-B1*03:01L HLA-DPA1*03:01-B1*04:02L HLA-DRB1*12:01L HLA-DQA1*05:05-B1*03:01L HLA-DRB1*04:08L HLA-DRB1*15:03L
KNLNESLIDLQELG

SEQ ID NO: 16207 - protein, 10 aa, Severe acute respiratory syndrome coronavirus 2
  REGION 1..10: note = Table B: HLA-DRB1*01:03L HLA-DQA1*01:02-B1*06:02L HLA-DQA1*05:05-B1*03:19L HLA-DQA1*02:01-B1*03:03L
PVLKGVKLHY

SEQ ID NO: 16208 - protein, 15 aa, Severe acute respiratory syndrome coronavirus 2
  REGION 1..15: note = Table B: HLA-DRB1*01:03L HLA-DRB1*10:01L
IVGVALLAVFQSASK

SEQ ID NO: 16209 - protein, 11 aa, Severe acute respiratory syndrome coronavirus 2
  REGION 1..11: note = Table B: HLA-DRB1*01:03L
SASKIITLKKR

SEQ ID NO: 16210 - protein, 14 aa, Severe acute respiratory syndrome coronavirus 2
  REGION 1..14: note = Table B: HLA-DRB1*01:03L HLA-DRB1*01:02L HLA-DRB1*08:04L HLA-DPA1*01:03-B1*03:01L HLA-DPA1*01:03-B1*04:01L HLA-DRB1*12:01L HLA-DPA1*01:03-B1*02:01L HLA-DRB1*04:08L
NPLLYDANYFLCWH

SEQ ID NO: 16211 - protein, 14 aa, Severe acute respiratory syndrome coronavirus 2
  REGION 1..14: note = Table B: HLA-DRB1*01:03L HLA-DRB1*04:05L HLA-DQA1*01:02-B1*06:02L HLA-DRB1*01:02L HLA-DPA1*01:03-B1*03:01L HLA-DQA1*01:01-B1*05:01L HLA-DRB1*08:01L HLA-DRB1*11:01L HLA-DQA1*05:05-B1*03:116L
  REGION 1..14: note = CONT. FROM ABOVE: HLA-DPA1*01:03-B1*04:02L HLA-DRB1*12:01L HLA-D PA1*03:01-B1*105:01L HLA-DRB1*16:01L HLA-DQA1*01:03-B1*06:01L HL A-DRB1*04:08L
IVITSGDGTTSPIS

SEQ ID NO: 16212 - protein, 11 aa, Severe acute respiratory syndrome coronavirus 2
  REGION 1..11: note = Table B: HLA-DRB1*01:03L HLA-DQA1*01:02-B1*06:02L HLA-DQA1*01-B1*05L
GDGTTSPISEH

SEQ ID NO: 16213 - protein, 11 aa, Severe acute respiratory syndrome coronavirus 2
  REGION 1..11: note = Table B: HLA-DRB1*01:03L HLA-DRB1*04:02L HLA-DRB1*04:05L HLA-DQA1*01:02-B1*06:02L HLA-DRB4*03:01NL HLA-DQA1*01-B1*05L HLA-DRB1*12:01L HLA-DRB1*04:08L
DGTTSPISEHD

SEQ ID NO: 16214 - protein, 13 aa, Severe acute respiratory syndrome coronavirus 2
  REGION 1..13: note = Table B: HLA-DRB1*01:03L HLA-DRB1*04:08L
GGYTEKWESGVKD

SEQ ID NO: 16215 - protein, 12 aa, Severe acute respiratory syndrome coronavirus 2
  REGION 1..12: note = Table B: HLA-DRB1*01:03L HLA-DQA1*01:02-B1*06:02L HLA-DPA1*03:01-B1*04:02L HLA-DQA1*01-B1*05L HLA-DQA1*05:01-B1*02:01L HLA-DPA1*01:03-B1*04:01L HLA-DPA1*01:03-B1*04:02L HLA-DPA1*03:01-B1*105:01M
  REGION 1..12: note = CONT. FROM ABOVE: HLA-DPA1*01:03-B1*02:01L HLA-DPA1*01:02-B1*04: 01L HLA-DRB1*16:01L HLA-DQA1*01:03-B1*06:01L HLA-DRB1*04:08L
FTSDYYQLYSTQ

SEQ ID NO: 16216 - protein, 13 aa, Severe acute respiratory syndrome coronavirus 2
  REGION 1..13: note = Table B: HLA-DRB1*01:03L HLA-DRB1*04:02L HLA-DRB1*04:05L HLA-DRB4*03:01NL HLA-DRB1*14:17L HLA-DRB1*07:01L HLA-DRB1*04:08L
TSDYYQLYSTQLS

SEQ ID NO: 16217 - protein, 12 aa, Severe acute respiratory syndrome coronavirus 2
  REGION 1..12: note = Table B: HLA-DRB1*01:03L HLA-DRB1*01:01L HLA-DQA1*05:05-B1*03:19L HLA-DRB1*12:01L HLA-DPA1*03:01-B1*105:01L HLA-DQA1*05:05-B1*03:01L HLA-DRB1*10:01L HLA-DRB1*04:08L HLA-DQA1*02:01-B1*03:03L
  REGION 1..12: note = CONT. FROM ABOVE: HLA-DRB1*15:03L
YYQLYSTQLSTD

SEQ ID NO: 16218 - protein, 12 aa, Severe acute respiratory syndrome coronavirus 2
  REGION 1..12: note = Table B: HLA-DRB1*01:03L HLA-DRB1*04:04L HLA-DRB1*04:05L HLA-DQA1*01:02-B1*06:02L HLA-DRB1*01:02L HLA-DRB4*03:01NL HLA-DRB1*14:01L HLA-DRB1*11:03L HLA-DQA1*05:01-B1*02:01L HLA-DRB1*04:10L HLA-DRB1*12:01L HLA-DPA1*03:01-B1*105:01L
  REGION 1..12: note = CONT. FROM ABOVE: HLA-DQA1*03:01-B1*03:02L HLA-DRB1*14:54L HLA-D RB1*10:01L HLA-DRB1*04:08L HLA-DQA1*02:01-B1*03:03L HLA-DRB1*15: 03L
YQLYSTQLSTDT

SEQ ID NO: 16219 - protein, 11 aa, Severe acute respiratory syndrome coronavirus 2
  REGION 1..11: note = Table B: HLA-DRB1*01:03L HLA-DQA1*01:02-B1*06:02L HLA-DQA1*01:01-B1*05:01L HLA-DRB1*08:01L HLA-DRB1*12:01L HLA-DPA1*02:01-B1*13:01L HLA-DRB1*14:54L
IYNKIVDEPEE

SEQ ID NO: 16220 - protein, 14 aa, Severe acute respiratory syndrome coronavirus 2
  REGION 1..14: note = Table B: HLA-DRB1*01:03L HLA-DRB1*08:01L HLA-DPA1*01:03-B1*04:02L HLA-DRB1*12:01L
DGSSGVVNPVMEPI

SEQ ID NO: 16221 - protein, 10 aa, Severe acute respiratory syndrome coronavirus 2
  REGION 1..10: note = Table B: HLA-DRB1*01:03L HLA-DQA1*01:02-B1*06:02L HLA-DRB1*14:01L HLA-DPA1*02:01-B1*13:01L HLA-DPA1*01:02-B1*04:01L HLA-DRB1*16:01L HLA-DQA1*01:03-B1*06:01L HLA-DQA1*02:01-B1*03:03L
  REGION 1..10: note = CONT. FROM ABOVE: HLA-DRB1*15:03L
QFAYANRNRF

SEQ ID NO: 16222 - protein, 10 aa, Severe acute respiratory syndrome coronavirus 2
  REGION 1..10: note = Table B: HLA-DRB1*01:03L HLA-DRB1*04:05L HLA-DQA1*01:02-B1*06:02L HLA-DRB1*03:01L HLA-DQA1*05:05-B1*03:19L HLA-DQA1*05:01-B1*02:01L HLA-DRB4*01:01L HLA-DPA1*01:03-B1*04:01L
  REGION 1..10: note = CONT. FROM ABOVE: HLA-DPA1*02:01-B1*13:01L HLA-DPA1*01:03-B1*104 :01L HLA-DRB1*16:01L HLA-DQA1*01:03-B1*06:01L HLA-DQA1*02:01-B1* 03:03L
AYANRNRFLY

SEQ ID NO: 16223 - protein, 10 aa, Severe acute respiratory syndrome coronavirus 2
  REGION 1..10: note = Table B: HLA-DRB1*01:03L HLA-DRB1*11:04L HLA-DRB1*08:01L HLA-DRB1*11:01L
FIASFRLFAR

SEQ ID NO: 16224 - protein, 11 aa, Severe acute respiratory syndrome coronavirus 2
  REGION 1..11: note = Table B: HLA-DRB1*01:03L HLA-DRB1*08:01L HLA-DPA1*01:02-B1*04:01L
IASFRLFARTR

SEQ ID NO: 16225 - protein, 10 aa, Severe acute respiratory syndrome coronavirus 2
  REGION 1..10: note = Table B: HLA-DRB1*01:03L HLA-DQA1*01:02-B1*06:02L HLA-DRB1*03:01L HLA-DPA1*02:01-B1*13:01L HLA-DQA1*01:03-B1*06:01L HLA-DQA1*02:01-B1*03:03L
RLFARTRSMW

SEQ ID NO: 16226 - protein, 14 aa, Severe acute respiratory syndrome coronavirus 2
  REGION 1..14: note = Table B: HLA-DRB1*01:03L HLA-DRB1*12:01L HLA-DPA1*03:01-B1*105:01L HLA-DRB1*04:08L
LFARTRSMWSFNPE

SEQ ID NO: 16227 - protein, 13 aa, Severe acute respiratory syndrome coronavirus 2
  REGION 1..13: note = Table B: HLA-DRB1*01:03L HLA-DRB1*04:05L HLA-DRB4*03:01NL HLA-DRB1*08:04L HLA-DRB1*03:01L HLA-DRB1*11:02L HLA-DRB1*11:03L HLA-DRB1*11:04L HLA-DQA1*01:01-B1*05:01L HLA-DRB1*08:01L HLA-DRB1*11:01L HLA-DRB4*01:01L HLA-DRB1*04:10L HLA-DRB1*12:02L
  REGION 1..13: note = CONT. FROM ABOVE: HLA-DRB3*01:01L HLA-DRB1*14:54L HLA-DPA1*01:03 -B1*104:01L HLA-DRB1*14:17L HLA-DRB1*10:01L HLA-DRB1*04:08L HLA- DRB1*08:03L
RSMWSFNPETNIL

SEQ ID NO: 16228 - protein, 13 aa, Severe acute respiratory syndrome coronavirus 2
  REGION 1..13: note = Table B: HLA-DRB1*01:03L HLA-DRB3*02:01L HLA-DQA1*05:05-B1*03:01L HLA-DRB1*04:08L
TNILLNVPLHGTI

SEQ ID NO: 16229 - protein, 12 aa, Severe acute respiratory syndrome coronavirus 2
  REGION 1..12: note = Table B: HLA-DRB1*01:03L HLA-DQA1*01:02-B1*06:02L HLA-DRB1*01:02L HLA-DRB1*08:04L HLA-DRB1*14:01L HLA-DRB1*08:01L HLA-DPA1*01:03-B1*04:01L HLA-DPA1*01:03-B1*04:02L HLA-DRB1*12:01L HLA-DRB1*15:03L
GTILTRPLLESE

SEQ ID NO: 16230 - protein, 14 aa, Severe acute respiratory syndrome coronavirus 2
  REGION 1..14: note = Table B: HLA-DRB1*01:03L HLA-DRB1*04:02L HLA-DRB1*04:04L HLA-DRB1*04:05L HLA-DRB1*01:02L HLA-DRB1*12:01L HLA-DQA1*05:05-B1*03:01L HLA-DRB1*14:17L HLA-DRB1*16:01L HLA-DRB1*04:08L
RPLLESELVIGAVI

SEQ ID NO: 16231 - protein, 14 aa, Severe acute respiratory syndrome coronavirus 2
  REGION 1..14: note = Table B: HLA-DRB1*01:03L HLA-DRB1*04:05L HLA-DRB1*16:01L HLA-DRB1*15:03L
ESELVIGAVILRGH

SEQ ID NO: 16232 - protein, 14 aa, Severe acute respiratory syndrome coronavirus 2
  REGION 1..14: note = Table B: HLA-DRB1*01:03L HLA-DRB1*15:03L
SELVIGAVILRGHL

SEQ ID NO: 16233 - protein, 12 aa, Severe acute respiratory syndrome coronavirus 2
  REGION 1..12: note = Table B: HLA-DRB1*01:03L HLA-DRB1*01:02L HLA-DRB1*08:01L HLA-DRB1*16:01L HLA-DRB1*04:08L
VIGAVILRGHLR

SEQ ID NO: 16234 - protein, 12 aa, Severe acute respiratory syndrome coronavirus 2
  REGION 1..12: note = Table B: HLA-DRB1*01:03L HLA-DQA1*01:02-B1*06:02L HLA-DRB1*01:02L HLA-DRB1*14:01L HLA-DRB1*16:01L HLA-DRB1*15:03L
AVILRGHLRIAG

SEQ ID NO: 16235 - protein, 12 aa, Severe acute respiratory syndrome coronavirus 2
  REGION 1..12: note = Table B: HLA-DRB1*01:03L HLA-DQA1*01:02-B1*06:02L HLA-DRB1*01:02L HLA-DRB1*11:04L HLA-DRB1*08:01L HLA-DRB1*11:01L HLA-DRB1*04:08L
ILRGHLRIAGHH

SEQ ID NO: 16236 - protein, 16 aa, Severe acute respiratory syndrome coronavirus 2
  REGION 1..16: note = Table B: HLA-DRB1*01:03L
IAGHHLGRCDIKDLPK

SEQ ID NO: 16237 - protein, 15 aa, Severe acute respiratory syndrome coronavirus 2
  REGION 1..15: note = Table B: HLA-DRB1*01:03L HLA-DRB1*01:02L HLA-DRB1*08:04L HLA-DRB1*04:08L
GRCDIKDLPKEITVA

SEQ ID NO: 16238 - protein, 14 aa, Severe acute respiratory syndrome coronavirus 2
  REGION 1..14: note = Table B: HLA-DRB1*01:03L HLA-DRB1*12:01L HLA-DRB1*15:03L
TSRTLSYYKLGASQ

SEQ ID NO: 16239 - protein, 12 aa, Severe acute respiratory syndrome coronavirus 2
  REGION 1..12: note = Table B: HLA-DRB1*01:03L HLA-DRB1*04:08L
LSYYKLGASQRV

SEQ ID NO: 16240 - protein, 10 aa, Severe acute respiratory syndrome coronavirus 2
  REGION 1..10: note = Table B: HLA-DRB1*01:03L HLA-DRB1*01:02L HLA-DRB1*16:01L HLA-DQA1*02:01-B1*03:03L
YKLGASQRVA

SEQ ID NO: 16241 - protein, 12 aa, Severe acute respiratory syndrome coronavirus 2
  REGION 1..12: note = Table B: HLA-DRB1*01:03L HLA-DQA1*01:02-B1*06:02L HLA-DRB1*08:01L HLA-DRB1*11:01L HLA-DRB1*16:01L HLA-DRB1*04:08L
GFAAYSRYRIGN

SEQ ID NO: 16242 - protein, 10 aa, Severe acute respiratory syndrome coronavirus 2
  REGION 1..10: note = Table B: HLA-DRB1*01:03L HLA-DQA1*03:01-B1*03:02L HLA-DPA1*01:02-B1*04:01L
YSRYRIGNYK

SEQ ID NO: 16243 - protein, 12 aa, Severe acute respiratory syndrome coronavirus 2
  REGION 1..12: note = Table B: HLA-DRB1*01:03L HLA-DQA1*01:02-B1*06:02L HLA-DRB1*01:02L HLA-DRB1*08:01L HLA-DPA1*01:02-B1*04:01L HLA-DRB1*16:01L HLA-DRB1*04:08L HLA-DQA1*02:01-B1*03:03L
YRIGNYKLNTDH

SEQ ID NO: 16244 - protein, 12 aa, Severe acute respiratory syndrome coronavirus 2
  REGION 1..12: note = Table B: HLA-DRB1*01:03L HLA-DRB1*16:01L
KLNTDHSSSSDN

SEQ ID NO: 16245 - protein, 11 aa, Severe acute respiratory syndrome coronavirus 2
  REGION 1..11: note = Table B: HLA-DRB1*01:03L HLA-DPA1*03:01-B1*04:02L HLA-DPA1*01:03-B1*04:01L HLA-DPA1*01:03-B1*04:02L HLA-DPA1*03:01-B1*105:01L HLA-DPA1*01:02-B1*04:01L HLA-DRB1*16:01L HLA-DRB1*04:08L
RTFKVSIWNLD

SEQ ID NO: 16246 - protein, 11 aa, Severe acute respiratory syndrome coronavirus 2
  REGION 1..11: note = Table B: HLA-DRB1*01:03L HLA-DQA1*01:02-B1*06:02L HLA-DRB1*08:04L HLA-DRB1*14:01L HLA-DRB1*11:04L HLA-DRB1*14:54L HLA-DRB1*04:08L
INLIIKNLSKS

SEQ ID NO: 16247 - protein, 13 aa, Severe acute respiratory syndrome coronavirus 2
  REGION 1..13: note = Table B: HLA-DRB1*01:03L HLA-DRB4*03:01NL HLA-DRB1*08:01L HLA-DRB1*12:01L HLA-DPA1*03:01-B1*105:01L HLA-DRB1*14:17L HLA-DRB1*04:08L HLA-DRB1*15:03L
TENKYSQLDEEQP

SEQ ID NO: 16248 - protein, 13 aa, Severe acute respiratory syndrome coronavirus 2
  REGION 1..13: note = Table B: HLA-DRB1*01:03L HLA-DRB1*01:02L HLA-DRB4*03:01NL HLA-DRB1*08:04L HLA-DRB1*08:01L HLA-DRB1*12:01L HLA-DPA1*03:01-B1*105:01L HLA-DRB1*14:54L HLA-DRB1*14:17L HLA-DRB1*04:08L HLA-DRB1*15:03L
ENKYSQLDEEQPM

SEQ ID NO: 16249 - protein, 12 aa, Severe acute respiratory syndrome coronavirus 2
  REGION 1..12: note = Table B: HLA-DRB1*01:03L HLA-DRB1*01:02L HLA-DRB1*08:01L HLA-DRB1*11:01L HLA-DPA1*03:01-B1*105:01L HLA-DRB1*16:01L HLA-DRB1*04:08L HLA-DRB1*15:03L
LYHYQECVRGTT

SEQ ID NO: 16250 - protein, 11 aa, Severe acute respiratory syndrome coronavirus 2
  REGION 1..11: note = Table B: HLA-DRB1*01:03L HLA-DQA1*03:01-B1*03:02L
GVKHVYQLRAR

SEQ ID NO: 16251 - protein, 13 aa, Severe acute respiratory syndrome coronavirus 2
  REGION 1..13: note = Table B: HLA-DRB1*01:03L HLA-DRB1*01:02L HLA-DRB1*12:01L HLA-DRB1*16:01L HLA-DRB1*04:08L HLA-DRB1*15:03L
VKHVYQLRARSVS

SEQ ID NO: 16252 - protein, 12 aa, Severe acute respiratory syndrome coronavirus 2
  REGION 1..12: note = Table B: HLA-DRB1*01:03L HLA-DRB1*01:02L HLA-DRB1*16:01L HLA-DRB1*04:08L
HVYQLRARSVSP

SEQ ID NO: 16253 - protein, 10 aa, Severe acute respiratory syndrome coronavirus 2
  REGION 1..10: note = Table B: HLA-DRB1*01:03L HLA-DQA1*01:02-B1*06:02L HLA-DQA1*01:03-B1*06:01L HLA-DQA1*02:01-B1*03:03L
RARSVSPKLF

SEQ ID NO: 16254 - protein, 14 aa, Severe acute respiratory syndrome coronavirus 2
  REGION 1..14: note = Table B: HLA-DRB1*01:03L HLA-DRB1*04:05L HLA-DRB1*01:02L HLA-DRB1*08:01L HLA-DRB1*16:01L HLA-DRB1*04:08L
ARSVSPKLFIRQEE

SEQ ID NO: 16255 - protein, 12 aa, Severe acute respiratory syndrome coronavirus 2
  REGION 1..12: note = Table B: HLA-DRB1*01:03L HLA-DRB1*04:05L HLA-DQA1*01:02-B1*06:02L HLA-DRB1*08:01L HLA-DPA1*02:01-B1*13:01L HLA-DRB1*04:08L
PKLFIRQEEVQE

SEQ ID NO: 16256 - protein, 13 aa, Severe acute respiratory syndrome coronavirus 2
  REGION 1..13: note = Table B: HLA-DRB1*01:03L HLA-DRB1*01:02L HLA-DPA1*01:03-B1*03:01L HLA-DPA1*01:03-B1*04:01L HLA-DPA1*01:03-B1*04:02L HLA-DRB1*12:01L HLA-DPA1*01:02-B1*04:01L HLA-DRB1*16:01L
  REGION 1..13: note = CONT. FROM ABOVE: HLA-DQA1*01:03-B1*06:01L HLA-DRB1*04:08L
VQELYSPIFLIVA

SEQ ID NO: 16257 - protein, 13 aa, Severe acute respiratory syndrome coronavirus 2
  REGION 1..13: note = Table B: HLA-DRB1*01:03L HLA-DQA1*01:02-B1*06:02L HLA-DRB1*12:01L HLA-DRB1*04:08L HLA-DRB1*15:03L
IVFITLCFTLKRK

SEQ ID NO: 16258 - protein, 14 aa, Severe acute respiratory syndrome coronavirus 2
  REGION 1..14: note = Table B: HLA-DRB1*01:03L HLA-DRB1*08:04L
LVFLGIITTVAAFH

SEQ ID NO: 16259 - protein, 12 aa, Severe acute respiratory syndrome coronavirus 2
  REGION 1..12: note = Table B: HLA-DRB1*01:03L HLA-DRB1*08:04L HLA-DPA1*01:03-B1*03:01L HLA-DRB1*11:04L HLA-DRB1*12:02L HLA-DPA1*03:01-B1*105:01L HLA-DQA1*05:05-B1*03:01L HLA-DRB1*10:01L HLA-DRB1*08:03L HLA-DRB1*15:03L
LGIITTVAAFHQ

SEQ ID NO: 16260 - protein, 14 aa, Severe acute respiratory syndrome coronavirus 2
  REGION 1..14: note = Table B: HLA-DRB1*01:03L HLA-DQA1*01:02-B1*06:02L HLA-DRB1*01:02L HLA-DPA1*03:01-B1*105:01L HLA-DRB1*04:08L HLA-DRB1*15:03L
VAAFHQECSLQSCT

SEQ ID NO: 16261 - protein, 12 aa, Severe acute respiratory syndrome coronavirus 2
  REGION 1..12: note = Table B: HLA-DRB1*01:03L HLA-DRB1*15:03L
IHFYSKWYIRVG

SEQ ID NO: 16262 - protein, 12 aa, Severe acute respiratory syndrome coronavirus 2
  REGION 1..12: note = Table B: HLA-DRB1*01:03L HLA-DRB1*08:01L
FYSKWYIRVGAR

SEQ ID NO: 16263 - protein, 12 aa, Severe acute respiratory syndrome coronavirus 2
  REGION 1..12: note = Table B: HLA-DRB1*01:03L HLA-DRB1*04:05L HLA-DRB1*01:02L HLA-DRB1*08:01L HLA-DRB1*12:01L HLA-DRB1*16:01L HLA-DRB1*04:08L HLA-DRB1*15:03L
SKWYIRVGARKS

SEQ ID NO: 16264 - protein, 12 aa, Severe acute respiratory syndrome coronavirus 2
  REGION 1..12: note = Table B: HLA-DRB1*01:03L HLA-DRB1*01:02L HLA-DRB1*12:01L HLA-DRB1*16:01L HLA-DRB1*04:08L HLA-DRB1*15:03L
WYIRVGARKSAP

SEQ ID NO: 16265 - protein, 13 aa, Severe acute respiratory syndrome coronavirus 2
  REGION 1..13: note = Table B: HLA-DRB1*01:03L HLA-DQA1*01:02-B1*06:02L HLA-DRB1*01:02L HLA-DRB1*16:01L HLA-DQA1*02:01-B1*03:03L
IRVGARKSAPLIE

SEQ ID NO: 16266 - protein, 10 aa, Severe acute respiratory syndrome coronavirus 2
  REGION 1..10: note = Table B: HLA-DRB1*01:03L HLA-DQA1*01:02-B1*06:02L HLA-DPA1*01:03-B1*03:01L HLA-DPA1*03:01-B1*04:02L HLA-DQA1*01-B1*05L HLA-DQA1*05:01-B1*02:01L HLA-DPA1*01:03-B1*04:01L HLA-DPA1*01:03-B1*04:02L
  REGION 1..10: note = CONT. FROM ABOVE: HLA-DPA1*03:01-B1*105:01L HLA-DPA1*01:02-B1*04 :01M HLA-DRB1*16:01L HLA-DQA1*01:03-B1*06:01L HLA-DRB1*04:08L HL A-DRB1*15:03L
FYEDFLEYHD

SEQ ID NO: 16267 - protein, 10 aa, Severe acute respiratory syndrome coronavirus 2
  REGION 1..10: note = Table B: HLA-DRB1*01:03L HLA-DQA1*01:02-B1*06:02L HLA-DQA1*02:01-B1*03:03L
NQRNAPRITF

SEQ ID NO: 16268 - protein, 15 aa, Severe acute respiratory syndrome coronavirus 2
  REGION 1..15: note = Table B: HLA-DRB1*01:03L
NGERSGARSKQRRPQ

SEQ ID NO: 16269 - protein, 15 aa, Severe acute respiratory syndrome coronavirus 2
  REGION 1..15: note = Table B: HLA-DRB1*01:03L HLA-DRB1*08:01L
GERSGARSKQRRPQG

SEQ ID NO: 16270 - protein, 16 aa, Severe acute respiratory syndrome coronavirus 2
  REGION 1..16: note = Table B: HLA-DRB1*01:03L HLA-DRB1*01:02L HLA-DPA1*01:03-B1*03:01L HLA-DPA1*03:01-B1*04:02L HLA-DQA1*05:01-B1*02:01L HLA-DPA1*01:03-B1*04:02L HLA-DRB1*12:01L HLA-DRB1*15:03L
LPNNTASWFTALTQHG

SEQ ID NO: 16271 - protein, 15 aa, Severe acute respiratory syndrome coronavirus 2
  REGION 1..15: note = Table B: HLA-DRB1*01:03L HLA-DRB1*01:02L HLA-DRB1*16:01L HLA-DQA1*02:01-B1*03:03L HLA-DRB1*15:03L
GKEDLKFPRGQGVPI

SEQ ID NO: 16272 - protein, 14 aa, Severe acute respiratory syndrome coronavirus 2
  REGION 1..14: note = Table B: HLA-DRB1*01:03L HLA-DQA1*01:02-B1*06:02L HLA-DRB1*01:02L HLA-DRB1*14:01L HLA-DRB1*08:01L HLA-DRB1*16:01L HLA-DRB1*04:08L HLA-DQA1*02:01-B1*03:03L
SPDDQIGYYRRATR

SEQ ID NO: 16273 - protein, 10 aa, Severe acute respiratory syndrome coronavirus 2
  REGION 1..10: note = Table B: HLA-DRB1*01:03L
IGYYRRATRR

SEQ ID NO: 16274 - protein, 12 aa, Severe acute respiratory syndrome coronavirus 2
  REGION 1..12: note = Table B: HLA-DRB1*01:03L HLA-DRB1*01:02L HLA-DRB1*08:01L HLA-DRB1*16:01L HLA-DRB1*04:08L
GYYRRATRRIRG

SEQ ID NO: 16275 - protein, 14 aa, Severe acute respiratory syndrome coronavirus 2
  REGION 1..14: note = Table B: HLA-DRB1*01:03L HLA-DRB1*01:02L HLA-DRB1*08:01L HLA-DRB1*11:01L HLA-DRB1*12:01L HLA-DRB3*01:01L HLA-DRB1*16:01L HLA-DRB1*04:08L
YYRRATRRIRGGDG

SEQ ID NO: 16276 - protein, 10 aa, Severe acute respiratory syndrome coronavirus 2
  REGION 1..10: note = Table B: HLA-DRB1*01:03L HLA-DQA1*03:01-B1*03:02L HLA-DQA1*02:01-B1*03:03L
DGKMKDLSPR

SEQ ID NO: 16277 - protein, 14 aa, Severe acute respiratory syndrome coronavirus 2
  REGION 1..14: note = Table B: HLA-DRB1*01:03L HLA-DRB1*01:02L
RWYFYYLGTGPEAG

SEQ ID NO: 16278 - protein, 14 aa, Severe acute respiratory syndrome coronavirus 2
  REGION 1..14: note = Table B: HLA-DRB1*01:03L HLA-DRB1*01:02L HLA-DPA1*01:03-B1*03:01L HLA-DPA1*01:03-B1*04:02L HLA-DRB1*15:03L
FYYLGTGPEAGLPY

SEQ ID NO: 16279 - protein, 12 aa, Severe acute respiratory syndrome coronavirus 2
  REGION 1..12: note = Table B: HLA-DRB1*01:03L HLA-DPA1*01:03-B1*04:02L HLA-DPA1*03:01-B1*105:01L
TGPEAGLPYGAN

SEQ ID NO: 16280 - protein, 17 aa, Severe acute respiratory syndrome coronavirus 2
  REGION 1..17: note = Table B: HLA-DRB1*01:03L
EGALNTPKDHIGTRNPA

SEQ ID NO: 16281 - protein, 15 aa, Severe acute respiratory syndrome coronavirus 2
  REGION 1..15: note = Table B: HLA-DRB1*01:03L HLA-DQA1*05:05-B1*03:01L
GTTLPKGFYAEGSRG

SEQ ID NO: 16282 - protein, 11 aa, Severe acute respiratory syndrome coronavirus 2
  REGION 1..11: note = Table B: HLA-DRB1*01:03L HLA-DRB1*04:02L HLA-DRB1*08:04L HLA-DRB1*12:01L HLA-DRB1*14:17L HLA-DRB1*16:01L HLA-DRB1*04:08L
LLLLDRLNQLE

SEQ ID NO: 16283 - protein, 12 aa, Severe acute respiratory syndrome coronavirus 2
  REGION 1..12: note = Table B: HLA-DRB1*01:03L HLA-DQA1*01:02-B1*06:02L HLA-DRB1*01:02L HLA-DRB1*16:01L HLA-DRB1*04:08L
LLLDRLNQLESK

SEQ ID NO: 16284 - protein, 13 aa, Severe acute respiratory syndrome coronavirus 2
  REGION 1..13: note = Table B: HLA-DRB1*01:03L HLA-DRB1*04:02L HLA-DRB1*04:04L HLA-DRB1*04:05L HLA-DRB1*14:01L HLA-DRB1*04:10L HLA-DRB1*12:01L HLA-DQA1*03:01-B1*03:02L HLA-DRB1*16:01L HLA-DRB1*04:08L HLA-DQA1*02:01-B1*03:03L HLA-DRB1*15:03L
LDRLNQLESKMSG

SEQ ID NO: 16285 - protein, 14 aa, Severe acute respiratory syndrome coronavirus 2
  REGION 1..14: note = Table B: HLA-DRB1*01:03L HLA-DRB1*04:05L HLA-DRB1*12:01L HLA-DRB1*16:01L HLA-DRB1*04:08L HLA-DRB1*15:03L
DRLNQLESKMSGKG

SEQ ID NO: 16286 - protein, 14 aa, Severe acute respiratory syndrome coronavirus 2
  REGION 1..14: note = Table B: HLA-DRB1*01:03L HLA-DRB1*04:02L HLA-DQA1*01:02-B1*06:02L HLA-DRB1*08:04L HLA-DRB1*14:01L HLA-DRB1*11:04L HLA-DRB1*11:01L HLA-DRB1*04:08L
NQLESKMSGKGQQQ

SEQ ID NO: 16287 - protein, 12 aa, Severe acute respiratory syndrome coronavirus 2
  REGION 1..12: note = Table B: HLA-DRB1*01:03L HLA-DRB1*04:02L HLA-DRB1*08:01L HLA-DRB1*14:17L HLA-DRB1*04:08L HLA-DQA1*02:01-B1*03:03L
TVTKKSAAEASK

SEQ ID NO: 16288 - protein, 10 aa, Severe acute respiratory syndrome coronavirus 2
  REGION 1..10: note = Table B: HLA-DRB1*01:03L HLA-DQA1*02:01-B1*03:03L
RQKRTATKAY

SEQ ID NO: 16289 - protein, 13 aa, Severe acute respiratory syndrome coronavirus 2
  REGION 1..13: note = Table B: HLA-DRB1*01:03L HLA-DRB1*04:05L
ATKAYNVTQAFGR

SEQ ID NO: 16290 - protein, 11 aa, Severe acute respiratory syndrome coronavirus 2
  REGION 1..11: note = Table B: HLA-DRB1*01:03L HLA-DRB1*01:02L HLA-DRB1*16:01L HLA-DQA1*02:01-B1*03:03L HLA-DRB1*15:03L
AYNVTQAFGRR

SEQ ID NO: 16291 - protein, 12 aa, Severe acute respiratory syndrome coronavirus 2
  REGION 1..12: note = Table B: HLA-DRB1*01:03L HLA-DQA1*01:02-B1*06:02L HLA-DRB1*01:02L HLA-DRB1*12:01L HLA-DRB1*16:01L HLA-DQA1*01:03-B1*06:01L HLA-DRB1*04:08L HLA-DQA1*02:01-B1*03:03L HLA-DRB1*15:03L
YNVTQAFGRRGP

SEQ ID NO: 16292 - protein, 13 aa, Severe acute respiratory syndrome coronavirus 2
  REGION 1..13: note = Table B: HLA-DRB1*01:03L HLA-DRB1*04:05L HLA-DQA1*01:01-B1*05:01L
GDQELIRQGTDYK

SEQ ID NO: 16293 - protein, 13 aa, Severe acute respiratory syndrome coronavirus 2
  REGION 1..13: note = Table B: HLA-DRB1*01:03L HLA-DRB1*04:04L HLA-DRB1*04:05L HLA-DRB1*01:02L HLA-DRB1*14:01L HLA-DRB1*04:10L HLA-DRB1*14:54L HLA-DRB1*14:17L HLA-DRB1*04:08L
DQELIRQGTDYKH

SEQ ID NO: 16294 - protein, 10 aa, Severe acute respiratory syndrome coronavirus 2
  REGION 1..10: note = Table B: HLA-DRB1*01:03L HLA-DRB1*04:05L HLA-DQA1*01:02-B1*06:02L HLA-DPA1*02:01-B1*13:01L HLA-DRB1*16:01L HLA-DQA1*01:03-B1*06:01L HLA-DQA1*02:01-B1*03:03L
YKHWPQIAQF

SEQ ID NO: 16295 - protein, 11 aa, Severe acute respiratory syndrome coronavirus 2
  REGION 1..11: note = Table B: HLA-DRB1*01:03L HLA-DRB4*03:01NL HLA-DPA1*03:01-B1*04:02L HLA-DRB1*14:01L HLA-DRB5*01:01L HLA-DQA1*05:05-B1*03:116L HLA-DPA1*01:03-B1*04:02L HLA-DRB1*12:01L HLA-DPA1*02:01-B1*13:01L HLA-DRB1*08:02L
EVTPSGTWLTY

SEQ ID NO: 16296 - protein, 13 aa, Severe acute respiratory syndrome coronavirus 2
  REGION 1..13: note = Table B: HLA-DRB1*01:03L HLA-DQA1*01:02-B1*06:02L HLA-DRB1*01:02L HLA-DRB1*08:01L HLA-DRB1*12:01L HLA-DPA1*03:01-B1*105:01L HLA-DRB1*16:01L HLA-DRB1*04:08L
PNFKDQVILLNKH

SEQ ID NO: 16297 - protein, 13 aa, Severe acute respiratory syndrome coronavirus 2
  REGION 1..13: note = Table B: HLA-DRB1*01:03L HLA-DRB1*04:04L HLA-DRB1*04:05L HLA-DRB1*01:02L HLA-DRB1*14:01L HLA-DRB1*08:01L HLA-DRB1*12:01L HLA-DQA1*03:01-B1*03:02L HLA-DRB1*14:17L HLA-DRB1*04:08L HLA-DQA1*02:01-B1*03:03L HLA-DRB1*15:01L
NKHIDAYKTFPPT

SEQ ID NO: 16298 - protein, 14 aa, Severe acute respiratory syndrome coronavirus 2
  REGION 1..14: note = Table B: HLA-DRB1*01:03L HLA-DRB1*01:02L HLA-DRB1*12:01L HLA-DRB1*04:08L
KHIDAYKTFPPTEP

SEQ ID NO: 16299 - protein, 14 aa, Severe acute respiratory syndrome coronavirus 2
  REGION 1..14: note = Table B: HLA-DRB1*01:03L HLA-DRB1*01:02L
TFPPTEPKKDKKKK

SEQ ID NO: 16300 - protein, 15 aa, Severe acute respiratory syndrome coronavirus 2
  REGION 1..15: note = Table B: HLA-DRB1*01:03L HLA-DRB1*08:01L HLA-DRB1*16:01L
DKKKKADETQALPQR

SEQ ID NO: 16301 - protein, 14 aa, Severe acute respiratory syndrome coronavirus 2
  REGION 1..14: note = Table B: HLA-DRB1*01:03L
LDDFSKQLQQSMSS

SEQ ID NO: 16302 - protein, 14 aa, Severe acute respiratory syndrome coronavirus 2
  REGION 1..14: note = Table B: HLA-DRB1*01:03L HLA-DRB1*01:02L HLA-DPA1*01:03-B1*04:02L HLA-DRB1*04:08L
TIYSLLLCRMNSRN

SEQ ID NO: 16303 - protein, 11 aa, Severe acute respiratory syndrome coronavirus 2
  REGION 1..11: note = Table B: HLA-DRB1*04:02L HLA-DRB3*02:01L HLA-DRB1*11:04L HLA-DRB1*08:01L HLA-DPA1*01:03-B1*04:02L HLA-DRB1*14:17L HLA-DQA1*01:03-B1*06:01L
DSVEEVLSEAR

SEQ ID NO: 16304 - protein, 12 aa, Severe acute respiratory syndrome coronavirus 2
  REGION 1..12: note = Table B: HLA-DRB1*04:02L HLA-DRB1*04:05L HLA-DRB1*11:04L HLA-DRB3*01:01L HLA-DRB1*14:54L HLA-DRB1*04:08L
EEVLSEARQHLK

SEQ ID NO: 16305 - protein, 12 aa, Severe acute respiratory syndrome coronavirus 2
  REGION 1..12: note = Table B: HLA-DRB1*04:02L HLA-DRB1*14:01L HLA-DRB1*14:17L
GVLVPHVGEIPV

SEQ ID NO: 16306 - protein, 12 aa, Severe acute respiratory syndrome coronavirus 2
  REGION 1..12: note = Table B: HLA-DRB1*04:02L HLA-DRB1*14:17L
VLVPHVGEIPVA

SEQ ID NO: 16307 - protein, 12 aa, Severe acute respiratory syndrome coronavirus 2
  REGION 1..12: note = Table B: HLA-DRB1*04:02L HLA-DRB1*08:01L
GHSYGADLKSFD

SEQ ID NO: 16308 - protein, 11 aa, Severe acute respiratory syndrome coronavirus 2
  REGION 1..11: note = Table B: HLA-DRB1*04:02L HLA-DRB1*01:02L HLA-DRB1*14:17L
LMRELNGGAYT

SEQ ID NO: 16309 - protein, 11 aa, Severe acute respiratory syndrome coronavirus 2
  REGION 1..11: note = Table B: HLA-DRB1*04:02L HLA-DRB1*04:05L HLA-DRB1*16:01L HLA-DQA1*02:01-B1*03:03L
EQLDFIDTKRG

SEQ ID NO: 16310 - protein, 14 aa, Severe acute respiratory syndrome coronavirus 2
  REGION 1..14: note = Table B: HLA-DRB1*04:02L HLA-DRB1*04:04L HLA-DRB1*04:05L HLA-DRB1*01:02L HLA-DRB1*04:10L HLA-DRB1*14:17L HLA-DRB1*04:08L
NSEVGPEHSLAEYH

SEQ ID NO: 16311 - protein, 14 aa, Severe acute respiratory syndrome coronavirus 2
  REGION 1..14: note = Table B: HLA-DRB1*04:02L HLA-DRB1*04:04L HLA-DRB1*04:05L HLA-DRB1*01:02L HLA-DRB1*04:10L HLA-DRB1*14:17L HLA-DRB1*04:08L
SEVGPEHSLAEYHN

SEQ ID NO: 16312 - protein, 12 aa, Severe acute respiratory syndrome coronavirus 2
  REGION 1..12: note = Table B: HLA-DRB1*04:02L HLA-DRB1*14:01L HLA-DRB1*08:01L HLA-DRB1*12:01L HLA-DRB1*14:54L HLA-DRB1*16:01L HLA-DRB1*15:03L
DNLLEILQKEKV

SEQ ID NO: 16313 - protein, 13 aa, Severe acute respiratory syndrome coronavirus 2
  REGION 1..13: note = Table B: HLA-DRB1*04:02L HLA-DRB1*04:04L HLA-DRB1*01:02L
EEIAIILASFSAS

SEQ ID NO: 16314 - protein, 12 aa, Severe acute respiratory syndrome coronavirus 2
  REGION 1..12: note = Table B: HLA-DRB1*04:02L
AIILASFSASTS

SEQ ID NO: 16315 - protein, 12 aa, Severe acute respiratory syndrome coronavirus 2
  REGION 1..12: note = Table B: HLA-DRB1*04:02L HLA-DQA1*01:02-B1*06:02L HLA-DQA1*05:05-B1*03:19L HLA-DQA1*05:05-B1*03:01L HLA-DQA1*02:01-B1*03:03L
IILASFSASTSA

SEQ ID NO: 16316 - protein, 11 aa, Severe acute respiratory syndrome coronavirus 2
  REGION 1..11: note = Table B: HLA-DRB1*04:02L
STSAFVETVKG

SEQ ID NO: 16317 - protein, 14 aa, Severe acute respiratory syndrome coronavirus 2
  REGION 1..14: note = Table B: HLA-DRB1*04:02L HLA-DRB1*01:02L
GAWNIGEQKSILSP

SEQ ID NO: 16318 - protein, 13 aa, Severe acute respiratory syndrome coronavirus 2
  REGION 1..13: note = Table B: HLA-DRB1*04:02L HLA-DRB1*04:04L HLA-DRB1*04:05L HLA-DRB1*01:02L HLA-DRB1*04:10L HLA-DRB1*12:01L HLA-DQA1*05:05-B1*03:01L HLA-DRB1*16:01L HLA-DRB1*04:08L
KSILSPLYAFASE

SEQ ID NO: 16319 - protein, 14 aa, Severe acute respiratory syndrome coronavirus 2
  REGION 1..14: note = Table B: HLA-DRB1*04:02L HLA-DRB1*01:02L HLA-DQA1*05:05-B1*03:19L HLA-DPA1*03:01-B1*105:01L HLA-DQA1*05:05-B1*03:01L HLA-DQA1*01:03-B1*06:01L HLA-DQA1*02:01-B1*03:03L HLA-DRB1*15:03L
SILSPLYAFASEAA

SEQ ID NO: 16320 - protein, 11 aa, Severe acute respiratory syndrome coronavirus 2
  REGION 1..11: note = Table B: HLA-DRB1*04:02L HLA-DRB1*04:05L HLA-DRB4*03:01NL HLA-DQA1*05:01-B1*02:01L HLA-DRB1*04:10L HLA-DRB1*12:01L HLA-DQA1*03:01-B1*03:02L HLA-DRB1*14:54L HLA-DRB1*16:01L HLA-DQA1*02:01-B1*03:03L
AAITILDGISQ

SEQ ID NO: 16321 - protein, 11 aa, Severe acute respiratory syndrome coronavirus 2
  REGION 1..11: note = Table B: HLA-DRB1*04:02L HLA-DRB1*04:04L HLA-DRB1*04:05L HLA-DRB1*01:02L HLA-DQA1*03:01-B1*03:02L HLA-DRB1*14:54L HLA-DRB1*14:17L HLA-DRB1*04:08L
ITILDGISQYS

SEQ ID NO: 16322 - protein, 13 aa, Severe acute respiratory syndrome coronavirus 2
  REGION 1..13: note = Table B: HLA-DRB1*04:02L HLA-DQA1*01:02-B1*06:02L HLA-DRB1*01:02L HLA-DRB1*08:01L HLA-DRB1*04:10L HLA-DQA1*03:01-B1*03:02L HLA-DRB1*14:17L HLA-DRB1*16:01L HLA-DRB1*04:08L HLA-DQA1*02:01-B1*03:03L HLA-DRB1*15:03L
EKLKPVLDWLEEK

SEQ ID NO: 16323 - protein, 12 aa, Severe acute respiratory syndrome coronavirus 2
  REGION 1..12: note = Table B: HLA-DRB1*04:02L HLA-DRB1*08:04L HLA-DRB3*02:01L HLA-DRB1*11:02L HLA-DRB1*08:01L HLA-DRB1*09:01L HLA-DRB1*14:54L
GETFVTHSKGLY

SEQ ID NO: 16324 - protein, 13 aa, Severe acute respiratory syndrome coronavirus 2
  REGION 1..13: note = Table B: HLA-DRB1*04:02L HLA-DRB1*04:05L HLA-DRB1*14:01L HLA-DRB1*12:01L HLA-DRB1*14:17L HLA-DRB1*16:01L HLA-DQA1*01:03-B1*06:01L HLA-DRB1*15:03L
TEEVVLKTGDLQP

SEQ ID NO: 16325 - protein, 13 aa, Severe acute respiratory syndrome coronavirus 2
  REGION 1..13: note = Table B: HLA-DRB1*04:02L HLA-DRB1*12:01L HLA-DQA1*05:05-B1*03:01L HLA-DRB1*16:01L
EEVVLKTGDLQPL

SEQ ID NO: 16326 - protein, 13 aa, Severe acute respiratory syndrome coronavirus 2
  REGION 1..13: note = Table B: HLA-DRB1*04:02L HLA-DRB1*04:04L HLA-DRB1*08:01L
GLMLLEIKDTEKY

SEQ ID NO: 16327 - protein, 13 aa, Severe acute respiratory syndrome coronavirus 2
  REGION 1..13: note = Table B: HLA-DRB1*04:02L HLA-DRB1*04:04L HLA-DPA1*03:01-B1*04:02L HLA-DPA1*01:03-B1*04:02L HLA-DPA1*02:01-B1*13:01L HLA-DRB1*14:17L HLA-DPA1*01:02-B1*04:01L HLA-DRB1*10:01L
NEFACVVADAVIK

SEQ ID NO: 16328 - protein, 14 aa, Severe acute respiratory syndrome coronavirus 2
  REGION 1..14: note = Table B: HLA-DRB1*04:02L HLA-DRB1*04:05L HLA-DQA1*01:02-B1*06:02L HLA-DRB1*01:02L HLA-DPA1*03:01-B1*105:01L HLA-DQA1*01:03-B1*06:01L HLA-DQA1*02:01-B1*03:03L
IKTLQPVSELLTPL

SEQ ID NO: 16329 - protein, 13 aa, Severe acute respiratory syndrome coronavirus 2
  REGION 1..13: note = Table B: HLA-DRB1*04:02L HLA-DRB1*04:04L HLA-DRB1*04:05L HLA-DQA1*01:02-B1*06:02L HLA-DRB1*04:10L HLA-DPA1*03:01-B1*105:01L HLA-DRB1*14:17L HLA-DRB1*16:01L
QPVSELLTPLGID

SEQ ID NO: 16330 - protein, 13 aa, Severe acute respiratory syndrome coronavirus 2
  REGION 1..13: note = Table B: HLA-DRB1*04:02L HLA-DRB1*04:05L HLA-DPA1*01:03-B1*03:01L HLA-DRB1*08:01L HLA-DPA1*01:03-B1*04:02L HLA-DRB1*12:01L
FGATSAALQPEEE

SEQ ID NO: 16331 - protein, 13 aa, Severe acute respiratory syndrome coronavirus 2
  REGION 1..13: note = Table B: HLA-DRB1*04:02L HLA-DRB1*04:05L HLA-DRB4*03:01NL HLA-DPA1*01:03-B1*03:01L HLA-DRB1*08:01L HLA-DQA1*01-B1*05L HLA-DRB1*04:10L HLA-DPA1*01:03-B1*04:02L HLA-DRB1*12:01L
GATSAALQPEEEQ

SEQ ID NO: 16332 - protein, 12 aa, Severe acute respiratory syndrome coronavirus 2
  REGION 1..12: note = Table B: HLA-DRB1*04:02L HLA-DQA1*05:01-B1*02:01L HLA-DQA1*01:03-B1*06:01L
TTIQTIVEVQPQ

SEQ ID NO: 16333 - protein, 13 aa, Severe acute respiratory syndrome coronavirus 2
  REGION 1..13: note = Table B: HLA-DRB1*04:02L HLA-DRB1*01:02L
PQLEMELTPVVQT

SEQ ID NO: 16334 - protein, 14 aa, Severe acute respiratory syndrome coronavirus 2
  REGION 1..14: note = Table B: HLA-DRB1*04:02L HLA-DRB1*01:02L HLA-DPA1*01:03-B1*03:01L HLA-DQA1*01-B1*05L HLA-DRB1*12:01L HLA-DRB1*04:08L
EMELTPVVQTIEVN

SEQ ID NO: 16335 - protein, 12 aa, Severe acute respiratory syndrome coronavirus 2
  REGION 1..12: note = Table B: HLA-DRB1*04:02L HLA-DRB1*01:02L HLA-DQA1*05:05-B1*03:01L HLA-DRB1*14:17L
PVVQTIEVNSFS

SEQ ID NO: 16336 - protein, 13 aa, Severe acute respiratory syndrome coronavirus 2
  REGION 1..13: note = Table B: HLA-DRB1*04:02L HLA-DRB1*08:01L
NADIVEEAKKVKP

SEQ ID NO: 16337 - protein, 12 aa, Severe acute respiratory syndrome coronavirus 2
  REGION 1..12: note = Table B: HLA-DRB1*04:02L HLA-DRB1*04:05L HLA-DRB1*01:02L HLA-DRB1*08:04L HLA-DRB1*11:03L HLA-DRB1*14:17L HLA-DRB1*07:01L
KPTVVVNAANVY

SEQ ID NO: 16338 - protein, 13 aa, Severe acute respiratory syndrome coronavirus 2
  REGION 1..13: note = Table B: HLA-DRB1*04:02L HLA-DRB1*04:10L HLA-DRB1*14:17L
NAMQVESDDYIAT

SEQ ID NO: 16339 - protein, 11 aa, Severe acute respiratory syndrome coronavirus 2
  REGION 1..11: note = Table B: HLA-DRB1*04:02L HLA-DRB1*04:05L HLA-DRB1*04:10L HLA-DQA1*03:01-B1*03:02L HLA-DRB1*14:54L
EDIQLLKSAYE

SEQ ID NO: 16340 - protein, 11 aa, Severe acute respiratory syndrome coronavirus 2
  REGION 1..11: note = Table B: HLA-DRB1*04:02L HLA-DRB1*14:17L
YLAVFDKNLYD

SEQ ID NO: 16341 - protein, 15 aa, Severe acute respiratory syndrome coronavirus 2
  REGION 1..15: note = Table B: HLA-DRB1*04:02L HLA-DRB1*01:02L HLA-DRB1*04:08L
TENLLLYIDINGNLH

SEQ ID NO: 16342 - protein, 12 aa, Severe acute respiratory syndrome coronavirus 2
  REGION 1..12: note = Table B: HLA-DRB1*04:02L HLA-DQA1*05:05-B1*03:01L HLA-DQA1*01:03-B1*06:01L
DVVQEGVLTAVV

SEQ ID NO: 16343 - protein, 13 aa, Severe acute respiratory syndrome coronavirus 2
  REGION 1..13: note = Table B: HLA-DRB1*04:02L HLA-DRB1*04:05L HLA-DRB1*01:02L HLA-DRB3*01:01L HLA-DRB1*04:08L
KALRKVPTDNYIT

SEQ ID NO: 16344 - protein, 11 aa, Severe acute respiratory syndrome coronavirus 2
  REGION 1..11: note = Table B: HLA-DRB1*04:02L HLA-DQA1*05:01-B1*02:01L HLA-DRB1*14:17L HLA-DQA1*01:03-B1*06:01L
GLNGYTVEEAK

SEQ ID NO: 16345 - protein, 11 aa, Severe acute respiratory syndrome coronavirus 2
  REGION 1..11: note = Table B: HLA-DRB1*04:02L HLA-DRB1*04:05L HLA-DRB4*03:01NL HLA-DQA1*05:01-B1*02:01L HLA-DRB1*04:10L HLA-DQA1*03:01-B1*03:02L
SLINTLNDLNE

SEQ ID NO: 16346 - protein, 13 aa, Severe acute respiratory syndrome coronavirus 2
  REGION 1..13: note = Table B: HLA-DRB1*04:02L HLA-DRB1*04:05L HLA-DRB1*01:02L HLA-DQA1*03:01-B1*03:02L HLA-DRB1*14:17L HLA-DRB1*04:08L
NETLVTMPLGYVT

SEQ ID NO: 16347 - protein, 13 aa, Severe acute respiratory syndrome coronavirus 2
  REGION 1..13: note = Table B: HLA-DRB1*04:02L HLA-DRB1*04:05L HLA-DRB3*02:01L HLA-DRB1*12:02L HLA-DRB1*14:54L HLA-DRB1*14:17L HLA-DRB1*04:08L
VTHGLNLEEAARY

SEQ ID NO: 16348 - protein, 13 aa, Severe acute respiratory syndrome coronavirus 2
  REGION 1..13: note = Table B: HLA-DRB1*04:02L HLA-DRB1*04:05L HLA-DRB1*01:02L HLA-DPA1*03:01-B1*04:02L HLA-DQA1*01:01-B1*05:01L HLA-DRB1*04:10L HLA-DRB1*14:54L HLA-DQA1*05:05-B1*03:01L HLA-DRB1*14:17L HLA-DRB1*04:08L HLA-DRB1*15:01L
SPDAVTAYNGYLT

SEQ ID NO: 16349 - protein, 13 aa, Severe acute respiratory syndrome coronavirus 2
  REGION 1..13: note = Table B: HLA-DRB1*04:02L
PDAVTAYNGYLTS

SEQ ID NO: 16350 - protein, 12 aa, Severe acute respiratory syndrome coronavirus 2
  REGION 1..12: note = Table B: HLA-DRB1*04:02L HLA-DQA1*01-B1*05L HLA-DRB1*16:01L HLA-DRB1*15:03L
VTAYNGYLTSSS

SEQ ID NO: 16351 - protein, 13 aa, Severe acute respiratory syndrome coronavirus 2
  REGION 1..13: note = Table B: HLA-DRB1*04:02L HLA-DPA1*03:01-B1*105:01L HLA-DRB1*14:17L
GSYKDWSYSGQST

SEQ ID NO: 16352 - protein, 13 aa, Severe acute respiratory syndrome coronavirus 2
  REGION 1..13: note = Table B: HLA-DRB1*04:02L HLA-DRB1*08:04L HLA-DRB1*04:08L
TFHLDGEVITFDN

SEQ ID NO: 16353 - protein, 14 aa, Severe acute respiratory syndrome coronavirus 2
  REGION 1..14: note = Table B: HLA-DRB1*04:02L HLA-DRB1*04:04L HLA-DRB1*08:04L HLA-DRB1*08:01L HLA-DPA1*02:01-B1*13:01L HLA-DPA1*01:03-B1*104:01L
LREVRTIKVFTTVD

SEQ ID NO: 16354 - protein, 11 aa, Severe acute respiratory syndrome coronavirus 2
  REGION 1..11: note = Table B: HLA-DRB1*04:02L HLA-DRB1*14:17L
RTIKVFTTVDN

SEQ ID NO: 16355 - protein, 11 aa, Severe acute respiratory syndrome coronavirus 2
  REGION 1..11: note = Table B: HLA-DRB1*04:02L HLA-DRB1*14:17L HLA-DQA1*02:01-B1*03:03L
PTYLDGADVTK

SEQ ID NO: 16356 - protein, 13 aa, Severe acute respiratory syndrome coronavirus 2
  REGION 1..13: note = Table B: HLA-DRB1*04:02L
DGADVTKIKPHNS

SEQ ID NO: 16357 - protein, 13 aa, Severe acute respiratory syndrome coronavirus 2
  REGION 1..13: note = Table B: HLA-DRB1*04:02L HLA-DRB1*04:04L HLA-DRB1*04:05L HLA-DRB1*14:01L HLA-DRB1*08:01L HLA-DRB1*12:01L HLA-DRB1*16:01L HLA-DQA1*01:03-B1*06:01L HLA-DRB1*15:03L
GADVTKIKPHNSH

SEQ ID NO: 16358 - protein, 12 aa, Severe acute respiratory syndrome coronavirus 2
  REGION 1..12: note = Table B: HLA-DRB1*04:02L HLA-DRB1*04:04L HLA-DRB1*04:05L HLA-DRB1*01:02L HLA-DRB1*14:01L HLA-DRB1*11:04L HLA-DRB1*08:01L HLA-DRB1*12:01L HLA-DRB3*01:01L HLA-DRB1*16:01L HLA-DRB1*04:08L HLA-DQA1*02:01-B1*03:03L HLA-DRB1*15:03L
KIKPHNSHEGKT

SEQ ID NO: 16359 - protein, 11 aa, Severe acute respiratory syndrome coronavirus 2
  REGION 1..11: note = Table B: HLA-DRB1*04:02L HLA-DRB1*11:04L HLA-DRB1*12:02L HLA-DPA1*01:03-B1*104:01L HLA-DRB1*04:08L
EYYHTTDPSFL

SEQ ID NO: 16360 - protein, 11 aa, Severe acute respiratory syndrome coronavirus 2
  REGION 1..11: note = Table B: HLA-DRB1*04:02L HLA-DRB4*03:01NL HLA-DRB1*14:17L
YYHTTDPSFLG

SEQ ID NO: 16361 - protein, 13 aa, Severe acute respiratory syndrome coronavirus 2
  REGION 1..13: note = Table B: HLA-DRB1*04:02L HLA-DRB1*04:05L HLA-DRB1*01:02L HLA-DRB3*02:01L HLA-DRB1*14:01L HLA-DRB1*04:10L HLA-DRB1*12:02L HLA-DRB1*14:54L HLA-DQA1*05:05-B1*03:01L HLA-DRB1*14:17L HLA-DPA1*01:02-B1*04:01L
VEAVMYMGTLSYE

SEQ ID NO: 16362 - protein, 12 aa, Severe acute respiratory syndrome coronavirus 2
  REGION 1..12: note = Table B: HLA-DRB1*04:02L HLA-DRB1*14:01L HLA-DRB1*14:54L
AVMYMGTLSYEQ

SEQ ID NO: 16363 - protein, 11 aa, Severe acute respiratory syndrome coronavirus 2
  REGION 1..11: note = Table B: HLA-DRB1*04:02L
TKYLVQQESPF

SEQ ID NO: 16364 - protein, 11 aa, Severe acute respiratory syndrome coronavirus 2
  REGION 1..11: note = Table B: HLA-DRB1*04:02L HLA-DQA1*03:01-B1*03:02L HLA-DRB1*14:17L
VMMSAPPAQYE

SEQ ID NO: 16365 - protein, 12 aa, Severe acute respiratory syndrome coronavirus 2
  REGION 1..12: note = Table B: HLA-DRB1*04:02L HLA-DRB1*01:02L HLA-DQA1*01-B1*05L HLA-DQA1*05:01-B1*02:01L HLA-DRB1*12:01L HLA-DPA1*03:01-B1*105:01L HLA-DQA1*03:01-B1*03:02L HLA-DRB1*14:17L HLA-DRB1*16:01L HLA-DQA1*02:01-B1*03:03L
  REGION 1..12: note = CONT. FROM ABOVE: HLA-DRB1*15:03L
DVFYKENSYTTT

SEQ ID NO: 16366 - protein, 12 aa, Severe acute respiratory syndrome coronavirus 2
  REGION 1..12: note = Table B: HLA-DRB1*04:02L HLA-DRB1*04:05L
TTIKPVTYKLDG

SEQ ID NO: 16367 - protein, 12 aa, Severe acute respiratory syndrome coronavirus 2
  REGION 1..12: note = Table B: HLA-DRB1*04:02L HLA-DQA1*01:02-B1*06:02L HLA-DRB1*01:02L HLA-DRB1*14:01L HLA-DRB1*04:08L
QLTGYKKPASRE

SEQ ID NO: 16368 - protein, 13 aa, Severe acute respiratory syndrome coronavirus 2
  REGION 1..13: note = Table B: HLA-DRB1*04:02L HLA-DRB1*04:05L HLA-DRB1*01:02L HLA-DRB1*12:01L HLA-DPA1*02:01-B1*13:01L
ELKVTFFPDLNGD

SEQ ID NO: 16369 - protein, 12 aa, Severe acute respiratory syndrome coronavirus 2
  REGION 1..12: note = Table B: HLA-DRB1*04:02L HLA-DRB1*04:05L HLA-DQA1*05:05-B1*03:01L HLA-DRB1*14:17L
STKPVETSNSFD

SEQ ID NO: 16370 - protein, 11 aa, Severe acute respiratory syndrome coronavirus 2
  REGION 1..11: note = Table B: HLA-DRB1*04:02L HLA-DQA1*01-B1*05L HLA-DQA1*05:01-B1*02:01L HLA-DQA1*02:01-B1*03:03L
SFDVLKSEDAQ

SEQ ID NO: 16371 - protein, 11 aa, Severe acute respiratory syndrome coronavirus 2
  REGION 1..11: note = Table B: HLA-DRB1*04:02L HLA-DRB1*14:17L HLA-DQA1*01:03-B1*06:01L HLA-DQA1*02:01-B1*03:03L
LKSEDAQGMDN

SEQ ID NO: 16372 - protein, 13 aa, Severe acute respiratory syndrome coronavirus 2
  REGION 1..13: note = Table B: HLA-DRB1*04:02L HLA-DRB1*01:02L HLA-DQA1*05:01-B1*02:01L HLA-DRB1*12:01L HLA-DRB1*16:01L
NNSLKITEEVGHT

SEQ ID NO: 16373 - protein, 13 aa, Severe acute respiratory syndrome coronavirus 2
  REGION 1..13: note = Table B: HLA-DRB1*04:02L HLA-DRB1*04:05L HLA-DRB1*01:02L HLA-DPA1*01:03-B1*03:01L HLA-DRB1*08:01L HLA-DPA1*01:03-B1*04:02L HLA-DRB1*12:01L HLA-DRB1*14:17L HLA-DRB1*04:08L
VGHTDLMAAYVDN

SEQ ID NO: 16374 - protein, 12 aa, Severe acute respiratory syndrome coronavirus 2
  REGION 1..12: note = Table B: HLA-DRB1*04:02L HLA-DRB1*04:05L HLA-DQA1*01:02-B1*06:02L HLA-DPA1*03:01-B1*04:02L HLA-DRB1*04:10L HLA-DRB1*12:01L HLA-DPA1*02:01-B1*13:01L HLA-DPA1*03:01-B1*105:01L HLA-DRB1*14:17L HLA-DRB1*16:01L
DLMAAYVDNSSL

SEQ ID NO: 16375 - protein, 11 aa, Severe acute respiratory syndrome coronavirus 2
  REGION 1..11: note = Table B: HLA-DRB1*04:02L HLA-DRB1*04:05L HLA-DRB4*03:01NL HLA-DRB1*04:10L HLA-DRB1*14:54L HLA-DRB1*14:17L HLA-DRB1*16:01L
MAAYVDNSSLT

SEQ ID NO: 16376 - protein, 12 aa, Severe acute respiratory syndrome coronavirus 2
  REGION 1..12: note = Table B: HLA-DRB1*04:02L HLA-DRB1*04:05L HLA-DQA1*01:02-B1*06:02L HLA-DRB4*03:01NL HLA-DQA1*05:01-B1*02:01L HLA-DRB1*04:10L HLA-DRB1*12:01L HLA-DQA1*03:01-B1*03:02L HLA-DRB1*14:54L
  REGION 1..12: note = CONT. FROM ABOVE: HLA-DQA1*02:01-B1*03:03L
LGSLIYSTAALG

SEQ ID NO: 16377 - protein, 12 aa, Severe acute respiratory syndrome coronavirus 2
  REGION 1..12: note = Table B: HLA-DRB1*04:02L HLA-DRB1*04:10L HLA-DRB1*14:54L
LGVLMSNLGMPS

SEQ ID NO: 16378 - protein, 12 aa, Severe acute respiratory syndrome coronavirus 2
  REGION 1..12: note = Table B: HLA-DRB1*04:02L HLA-DRB1*12:02L HLA-DRB1*14:54L
SDEVARDLSLQF

SEQ ID NO: 16379 - protein, 12 aa, Severe acute respiratory syndrome coronavirus 2
  REGION 1..12: note = Table B: HLA-DRB1*04:02L HLA-DRB1*08:04L HLA-DRB1*11:03L HLA-DRB1*11:04L HLA-DRB1*08:01L HLA-DRB1*11:01L HLA-DRB1*13:01L HLA-DRB1*12:02L HLA-DRB1*14:54L HLA-DRB1*14:17L HLA-DRB1*04:08L
DEVARDLSLQFK

SEQ ID NO: 16380 - protein, 13 aa, Severe acute respiratory syndrome coronavirus 2
  REGION 1..13: note = Table B: HLA-DRB1*04:02L HLA-DQA1*01:02-B1*06:02L HLA-DRB1*14:01L HLA-DRB1*08:01L HLA-DRB1*16:01L
DLSLQFKRPINPT

SEQ ID NO: 16381 - protein, 12 aa, Severe acute respiratory syndrome coronavirus 2
  REGION 1..12: note = Table B: HLA-DRB1*04:02L HLA-DRB1*14:17L
VKMFDAYVNTFS

SEQ ID NO: 16382 - protein, 13 aa, Severe acute respiratory syndrome coronavirus 2
  REGION 1..13: note = Table B: HLA-DRB1*04:02L
KMFDAYVNTFSST

SEQ ID NO: 16383 - protein, 13 aa, Severe acute respiratory syndrome coronavirus 2
  REGION 1..13: note = Table B: HLA-DRB1*04:02L
TAEAELAKNVSLD

SEQ ID NO: 16384 - protein, 12 aa, Severe acute respiratory syndrome coronavirus 2
  REGION 1..12: note = Table B: HLA-DRB1*04:02L HLA-DRB1*04:05L HLA-DRB1*14:17L
LAKNVSLDNVLS

SEQ ID NO: 16385 - protein, 12 aa, Severe acute respiratory syndrome coronavirus 2
  REGION 1..12: note = Table B: HLA-DRB1*04:02L HLA-DRB1*04:05L HLA-DRB4*03:01NL HLA-DQA1*05:01-B1*02:01L HLA-DRB1*04:10L HLA-DRB1*12:01L HLA-DRB1*14:54L HLA-DRB1*16:01L HLA-DQA1*02:01-B1*03:03L
AKNVSLDNVLST

SEQ ID NO: 16386 - protein, 11 aa, Severe acute respiratory syndrome coronavirus 2
  REGION 1..11: note = Table B: HLA-DRB1*04:02L HLA-DRB1*14:17L
HNIALIWNVKD

SEQ ID NO: 16387 - protein, 13 aa, Severe acute respiratory syndrome coronavirus 2
  REGION 1..13: note = Table B: HLA-DRB1*04:02L
VHVMSKHTDFSSE

SEQ ID NO: 16388 - protein, 14 aa, Severe acute respiratory syndrome coronavirus 2
  REGION 1..14: note = Table B: HLA-DRB1*04:02L HLA-DRB1*01:02L HLA-DRB1*04:08L
DTNVLEGSVAYESL

SEQ ID NO: 16389 - protein, 13 aa, Severe acute respiratory syndrome coronavirus 2
  REGION 1..13: note = Table B: HLA-DRB1*04:02L HLA-DQA1*01-B1*05L HLA-DPA1*01:03-B1*04:02L HLA-DRB1*04:08L
DAVNLLTNMFTPL

SEQ ID NO: 16390 - protein, 14 aa, Severe acute respiratory syndrome coronavirus 2
  REGION 1..14: note = Table B: HLA-DRB1*04:02L HLA-DRB1*04:04L HLA-DRB1*04:05L HLA-DRB1*01:02L HLA-DRB1*14:01L HLA-DPA1*01:03-B1*04:01L HLA-DPA1*01:03-B1*04:02L
VNLLTNMFTPLIQP

SEQ ID NO: 16391 - protein, 15 aa, Severe acute respiratory syndrome coronavirus 2
  REGION 1..15: note = Table B: HLA-DRB1*04:02L HLA-DRB1*01:02L HLA-DRB1*04:10L HLA-DRB1*12:01L HLA-DQA1*02:01-B1*03:03L
QPIGALDISASIVAG

SEQ ID NO: 16392 - protein, 14 aa, Severe acute respiratory syndrome coronavirus 2
  REGION 1..14: note = Table B: HLA-DRB1*04:02L HLA-DRB1*01:02L
IGALDISASIVAGG

SEQ ID NO: 16393 - protein, 14 aa, Severe acute respiratory syndrome coronavirus 2
  REGION 1..14: note = Table B: HLA-DRB1*04:02L HLA-DRB1*01:02L
GALDISASIVAGGI

SEQ ID NO: 16394 - protein, 13 aa, Severe acute respiratory syndrome coronavirus 2
  REGION 1..13: note = Table B: HLA-DRB1*04:02L HLA-DRB1*01:02L
LDISASIVAGGIV

SEQ ID NO: 16395 - protein, 15 aa, Severe acute respiratory syndrome coronavirus 2
  REGION 1..15: note = Table B: HLA-DRB1*04:02L
SASIVAGGIVAIVVT

SEQ ID NO: 16396 - protein, 14 aa, Severe acute respiratory syndrome coronavirus 2
  REGION 1..14: note = Table B: HLA-DRB1*04:02L HLA-DRB1*04:04L HLA-DRB1*11:02L HLA-DRB1*11:03L HLA-DQA1*01:01-B1*05:01L HLA-DRB1*09:01L HLA-DRB3*01:01L HLA-DRB1*07:01L HLA-DRB1*10:01L HLA-DRB1*08:02L HLA-DRB1*08:03L
RVVFNGVSFSTFEE

SEQ ID NO: 16397 - protein, 12 aa, Severe acute respiratory syndrome coronavirus 2
  REGION 1..12: note = Table B: HLA-DRB1*04:02L HLA-DRB1*08:04L HLA-DRB3*02:01L HLA-DRB1*11:03L HLA-DRB1*09:01L HLA-DRB1*12:02L HLA-DRB1*14:54L HLA-DRB1*07:01L HLA-DRB1*04:08L
DVLLPLTQYNRY

SEQ ID NO: 16398 - protein, 14 aa, Severe acute respiratory syndrome coronavirus 2
  REGION 1..14: note = Table B: HLA-DRB1*04:02L HLA-DRB1*01:01L HLA-DRB1*08:04L HLA-DRB1*11:03L HLA-DRB1*11:04L HLA-DRB1*13:01L HLA-DRB1*07:01L HLA-DRB1*15:01L
NRYLALYNKYKYFS

SEQ ID NO: 16399 - protein, 13 aa, Severe acute respiratory syndrome coronavirus 2
  REGION 1..13: note = Table B: HLA-DRB1*04:02L HLA-DRB1*04:05L HLA-DQA1*01:02-B1*06:02L HLA-DQA1*01-B1*05L HLA-DQA1*05:01-B1*02:01L HLA-DRB1*04:10L HLA-DQA1*03:01-B1*03:02L HLA-DRB1*14:17L HLA-DRB1*16:01L
  REGION 1..13: note = CONT. FROM ABOVE: HLA-DQA1*01:03-B1*06:01L HLA-DQA1*02:01-B1*03: 03L
HVICTSEDMLNPN

SEQ ID NO: 16400 - protein, 11 aa, Severe acute respiratory syndrome coronavirus 2
  REGION 1..11: note = Table B: HLA-DRB1*04:02L HLA-DRB1*14:01L HLA-DRB1*08:01L
VQLRVIGHSMQ

SEQ ID NO: 16401 - protein, 13 aa, Severe acute respiratory syndrome coronavirus 2
  REGION 1..13: note = Table B: HLA-DRB1*04:02L HLA-DRB1*01:02L HLA-DRB1*14:17L HLA-DRB1*16:01L HLA-DRB1*15:03L
FSVLACYNGSPSG

SEQ ID NO: 16402 - protein, 12 aa, Severe acute respiratory syndrome coronavirus 2
  REGION 1..12: note = Table B: HLA-DRB1*04:02L HLA-DRB1*04:05L HLA-DRB1*01:02L HLA-DRB1*08:04L HLA-DRB1*12:01L HLA-DRB1*16:01L HLA-DRB1*04:08L HLA-DRB1*08:03L
RPNFTIKGSFLN

SEQ ID NO: 16403 - protein, 13 aa, Severe acute respiratory syndrome coronavirus 2
  REGION 1..13: note = Table B: HLA-DRB1*04:02L HLA-DPA1*03:01-B1*105:01L HLA-DPA1*01:02-B1*04:01L HLA-DRB1*16:01L
LEGNFYGPFVDRQ

SEQ ID NO: 16404 - protein, 13 aa, Severe acute respiratory syndrome coronavirus 2
  REGION 1..13: note = Table B: HLA-DRB1*04:02L HLA-DRB1*04:05L HLA-DPA1*03:01-B1*105:01L
EPLTQDHVDILGP

SEQ ID NO: 16405 - protein, 11 aa, Severe acute respiratory syndrome coronavirus 2
  REGION 1..11: note = Table B: HLA-DRB1*04:02L HLA-DRB1*04:05L HLA-DQA1*01-B1*05L HLA-DRB1*04:10L
WLDMVDTSLSG

SEQ ID NO: 16406 - protein, 12 aa, Severe acute respiratory syndrome coronavirus 2
  REGION 1..12: note = Table B: HLA-DRB1*04:02L HLA-DRB1*01:02L HLA-DRB1*14:17L HLA-DRB1*16:01L HLA-DRB1*04:08L
GVVTTVMFLARG

SEQ ID NO: 16407 - protein, 11 aa, Severe acute respiratory syndrome coronavirus 2
  REGION 1..11: note = Table B: HLA-DRB1*04:02L HLA-DQA1*02:01-B1*03:03L
GLLPPKNSIDA

SEQ ID NO: 16408 - protein, 14 aa, Severe acute respiratory syndrome coronavirus 2
  REGION 1..14: note = Table B: HLA-DRB1*04:02L HLA-DPA1*03:01-B1*04:02L HLA-DQA1*05:05-B1*03:19L HLA-DRB1*12:01L HLA-DPA1*03:01-B1*105:01L HLA-DPA1*01:03-B1*02:01L HLA-DQA1*05:05-B1*03:01L
IDAFKLNIKLLGVG

SEQ ID NO: 16409 - protein, 11 aa, Severe acute respiratory syndrome coronavirus 2
  REGION 1..11: note = Table B: HLA-DRB1*04:02L HLA-DRB4*03:01NL HLA-DRB1*14:01L HLA-DQA1*03:01-B1*03:02L HLA-DRB1*16:01L HLA-DQA1*01:03-B1*06:01L HLA-DQA1*02:01-B1*03:03L
SVLQQLRVESS

SEQ ID NO: 16410 - protein, 11 aa, Severe acute respiratory syndrome coronavirus 2
  REGION 1..11: note = Table B: HLA-DRB1*04:02L
VLQQLRVESSS

SEQ ID NO: 16411 - protein, 12 aa, Severe acute respiratory syndrome coronavirus 2
  REGION 1..12: note = Table B: HLA-DRB1*04:02L HLA-DRB1*04:05L HLA-DRB4*03:01NL HLA-DRB1*08:04L HLA-DRB1*04:10L HLA-DRB1*14:54L HLA-DRB1*04:08L
TEAFEKMVSLLS

SEQ ID NO: 16412 - protein, 12 aa, Severe acute respiratory syndrome coronavirus 2
  REGION 1..12: note = Table B: HLA-DRB1*04:02L HLA-DQA1*01:02-B1*06:02L HLA-DRB1*14:17L
LSVLLSMQGAVD

SEQ ID NO: 16413 - protein, 13 aa, Severe acute respiratory syndrome coronavirus 2
  REGION 1..13: note = Table B: HLA-DRB1*04:02L HLA-DRB1*04:05L HLA-DQA1*01:02-B1*06:02L HLA-DRB1*01:02L HLA-DQA1*05:01-B1*02:01L HLA-DRB1*04:10L HLA-DRB1*12:01L HLA-DPA1*03:01-B1*105:01L HLA-DQA1*03:01-B1*03:02L
  REGION 1..13: note = CONT. FROM ABOVE: HLA-DQA1*05:05-B1*03:01L HLA-DRB1*14:17L HLA-D RB1*16:01L HLA-DQA1*02:01-B1*03:03L HLA-DRB1*15:03L
SVLLSMQGAVDIN

SEQ ID NO: 16414 - protein, 11 aa, Severe acute respiratory syndrome coronavirus 2
  REGION 1..11: note = Table B: HLA-DRB1*04:02L HLA-DRB1*04:05L HLA-DRB1*14:17L
AFATAQEAYEQ

SEQ ID NO: 16415 - protein, 13 aa, Severe acute respiratory syndrome coronavirus 2
  REGION 1..13: note = Table B: HLA-DRB1*04:02L HLA-DRB1*04:05L HLA-DRB4*03:01NL HLA-DRB1*04:10L HLA-DRB1*14:17L HLA-DRB1*16:01L
TAQEAYEQAVANG

SEQ ID NO: 16416 - protein, 11 aa, Severe acute respiratory syndrome coronavirus 2
  REGION 1..11: note = Table B: HLA-DRB1*04:02L HLA-DRB1*04:10L
SLNVAKSEFDR

SEQ ID NO: 16417 - protein, 11 aa, Severe acute respiratory syndrome coronavirus 2
  REGION 1..11: note = Table B: HLA-DRB1*04:02L HLA-DRB1*04:05L HLA-DPA1*01:03-B1*03:01L HLA-DRB1*11:04L HLA-DQA1*05:01-B1*02:01L HLA-DRB1*04:08L HLA-DQA1*02:01-B1*03:03L HLA-DRB1*15:03L
EFDRDAAMQRK

SEQ ID NO: 16418 - protein, 11 aa, Severe acute respiratory syndrome coronavirus 2
  REGION 1..11: note = Table B: HLA-DRB1*04:02L HLA-DQA1*01:03-B1*06:01L
DALNNIINNAR

SEQ ID NO: 16419 - protein, 11 aa, Severe acute respiratory syndrome coronavirus 2
  REGION 1..11: note = Table B: HLA-DRB1*04:02L
ALNNIINNARD

SEQ ID NO: 16420 - protein, 12 aa, Severe acute respiratory syndrome coronavirus 2
  REGION 1..12: note = Table B: HLA-DRB1*04:02L HLA-DRB1*04:05L HLA-DRB1*04:10L HLA-DRB1*14:17L
AKLMVVIPDYNT

SEQ ID NO: 16421 - protein, 14 aa, Severe acute respiratory syndrome coronavirus 2
  REGION 1..14: note = Table B: HLA-DRB1*04:02L HLA-DRB1*01:02L HLA-DRB1*08:04L HLA-DPA1*03:01-B1*04:02L HLA-DRB1*12:01L HLA-DPA1*02:01-B1*13:01L HLA-DQA1*05:05-B1*03:01L HLA-DRB1*16:01L HLA-DRB1*15:03L
ASALWEIQQVVDAD

SEQ ID NO: 16422 - protein, 11 aa, Severe acute respiratory syndrome coronavirus 2
  REGION 1..11: note = Table B: HLA-DRB1*04:02L
NSAVKLQNNEL

SEQ ID NO: 16423 - protein, 13 aa, Severe acute respiratory syndrome coronavirus 2
  REGION 1..13: note = Table B: HLA-DRB1*04:02L HLA-DRB1*01:02L HLA-DRB1*12:01L HLA-DQA1*05:05-B1*03:01L
LQNNELSPVALRQ

SEQ ID NO: 16424 - protein, 13 aa, Severe acute respiratory syndrome coronavirus 2
  REGION 1..13: note = Table B: HLA-DRB1*04:02L
NNELSPVALRQMS

SEQ ID NO: 16425 - protein, 17 aa, Severe acute respiratory syndrome coronavirus 2
  REGION 1..17: note = Table B: HLA-DRB1*04:02L HLA-DRB1*01:02L HLA-DRB1*08:01L HLA-DRB4*02:01NL HLA-DRB3*01:01L HLA-DPA1*02:01-B1*13:01L HLA-DPA1*01:03-B1*104:01L
FPKSDGTGTIYTELEPP

SEQ ID NO: 16426 - protein, 14 aa, Severe acute respiratory syndrome coronavirus 2
  REGION 1..14: note = Table B: HLA-DRB1*04:02L HLA-DRB4*03:01NL HLA-DPA1*03:01-B1*105:01L HLA-DRB1*16:01L
LQAGNATEVPANST

SEQ ID NO: 16427 - protein, 13 aa, Severe acute respiratory syndrome coronavirus 2
  REGION 1..13: note = Table B: HLA-DRB1*04:02L HLA-DQA1*01:02-B1*06:02L
AGNATEVPANSTV

SEQ ID NO: 16428 - protein, 19 aa, Severe acute respiratory syndrome coronavirus 2
  REGION 1..19: note = Table B: HLA-DRB1*04:02L HLA-DRB1*01:01L HLA-DRB1*11:02L HLA-DRB4*01:01L HLA-DRB1*09:01L HLA-DRB1*07:01L
VPANSTVLSFCAFAVDAAK

SEQ ID NO: 16429 - protein, 12 aa, Severe acute respiratory syndrome coronavirus 2
  REGION 1..12: note = Table B: HLA-DRB1*04:02L HLA-DRB1*04:05L HLA-DRB4*03:01NL HLA-DQA1*01-B1*05L HLA-DQA1*05:01-B1*02:01L HLA-DRB1*04:10L
TVTPEANMDQES

SEQ ID NO: 16430 - protein, 13 aa, Severe acute respiratory syndrome coronavirus 2
  REGION 1..13: note = Table B: HLA-DRB1*04:02L HLA-DRB1*14:17L
TPEANMDQESFGG

SEQ ID NO: 16431 - protein, 12 aa, Severe acute respiratory syndrome coronavirus 2
  REGION 1..12: note = Table B: HLA-DRB1*04:02L HLA-DRB1*04:04L HLA-DRB1*04:05L HLA-DQA1*01:02-B1*06:02L HLA-DRB1*04:10L HLA-DQA1*03:01-B1*03:02L HLA-DRB1*16:01L
YVQIPTTCANDP

SEQ ID NO: 16432 - protein, 11 aa, Severe acute respiratory syndrome coronavirus 2
  REGION 1..11: note = Table B: HLA-DRB1*04:02L HLA-DRB1*08:04L HLA-DRB3*02:01L HLA-DRB3*01:01L HLA-DRB1*14:54L HLA-DRB1*14:17L HLA-DRB1*04:08L
DIYNDKVAGFA

SEQ ID NO: 16433 - protein, 11 aa, Severe acute respiratory syndrome coronavirus 2
  REGION 1..11: note = Table B: HLA-DRB1*04:02L HLA-DRB1*01:01L HLA-DRB4*03:01NL HLA-DRB1*11:04L HLA-DRB1*11:01L HLA-DRB3*01:01L HLA-DQA1*05:05-B1*03:01L
RVYANLGERVR

SEQ ID NO: 16434 - protein, 13 aa, Severe acute respiratory syndrome coronavirus 2
  REGION 1..13: note = Table B: HLA-DRB1*04:02L HLA-DRB1*04:05L HLA-DRB4*03:01NL HLA-DQA1*05:01-B1*02:01L HLA-DRB1*04:10L HLA-DRB1*12:01L
NAGIVGVLTLDNQ

SEQ ID NO: 16435 - protein, 14 aa, Severe acute respiratory syndrome coronavirus 2
  REGION 1..14: note = Table B: HLA-DRB1*04:02L HLA-DRB1*01:02L HLA-DPA1*01:03-B1*03:01L HLA-DRB1*08:01L HLA-DRB1*11:01L HLA-DPA1*01:03-B1*04:02L HLA-DRB1*12:01L
IQTTPGSGVPVVDS

SEQ ID NO: 16436 - protein, 12 aa, Severe acute respiratory syndrome coronavirus 2
  REGION 1..12: note = Table B: HLA-DRB1*04:02L HLA-DRB1*14:01L
ILTLTRALTAES

SEQ ID NO: 16437 - protein, 11 aa, Severe acute respiratory syndrome coronavirus 2
  REGION 1..11: note = Table B: HLA-DRB1*04:02L HLA-DQA1*02:01-B1*03:03L
TLTRALTAESH

SEQ ID NO: 16438 - protein, 13 aa, Severe acute respiratory syndrome coronavirus 2
  REGION 1..13: note = Table B: HLA-DRB1*04:02L HLA-DQA1*01:01-B1*05:01L HLA-DRB1*16:01L HLA-DQA1*01:03-B1*06:01L
TAESHVDTDLTKP

SEQ ID NO: 16439 - protein, 11 aa, Severe acute respiratory syndrome coronavirus 2
  REGION 1..11: note = Table B: HLA-DRB1*04:02L HLA-DQA1*03:01-B1*03:02L HLA-DRB1*14:17L
AADPAMHAASG

SEQ ID NO: 16440 - protein, 11 aa, Severe acute respiratory syndrome coronavirus 2
  REGION 1..11: note = Table B: HLA-DRB1*04:02L HLA-DRB1*04:05L HLA-DQA1*01:02-B1*06:02L HLA-DRB1*01:02L HLA-DRB1*08:04L HLA-DRB3*02:01L HLA-DPA1*03:01-B1*04:02L HLA-DRB1*14:01L HLA-DRB1*11:03L HLA-DRB1*11:04L HLA-DRB1*14:02L HLA-DRB5*01:01L
  REGION 1..11: note = CONT. FROM ABOVE: HLA-DRB1*09:01L HLA-DRB1*12:02L HLA-DPA1*03:01 -B1*105:01L HLA-DRB1*14:54L HLA-DQA1*05:05-B1*03:01L HLA-DRB1*14 :17L HLA-DRB1*07:01L HLA-DQA1*01:03-B1*06:01L HLA-DRB1*04:08L
NLDKSAGFPFN

SEQ ID NO: 16441 - protein, 13 aa, Severe acute respiratory syndrome coronavirus 2
  REGION 1..13: note = Table B: HLA-DRB1*04:02L HLA-DRB1*01:02L HLA-DPA1*01:03-B1*03:01L HLA-DRB1*04:10L HLA-DPA1*02:01-B1*13:01L
KRNVIPTITQMNL

SEQ ID NO: 16442 - protein, 15 aa, Severe acute respiratory syndrome coronavirus 2
  REGION 1..15: note = Table B: HLA-DRB1*04:02L HLA-DRB1*04:04L HLA-DRB1*04:05L HLA-DRB1*01:01L HLA-DRB1*11:04L HLA-DRB3*01:01L HLA-DPA1*03:01-B1*105:01L HLA-DRB1*07:01L HLA-DQA1*02:01-B1*03:03L HLA-DRB1*15:01L
MPNMLRIMASLVLAR

SEQ ID NO: 16443 - protein, 14 aa, Severe acute respiratory syndrome coronavirus 2
  REGION 1..14: note = Table B: HLA-DRB1*04:02L HLA-DRB1*01:02L HLA-DRB1*08:04L HLA-DQA1*05:05-B1*03:19L HLA-DRB1*12:02L HLA-DQA1*05:05-B1*03:01L
QAVTANVNALLSTD

SEQ ID NO: 16444 - protein, 12 aa, Severe acute respiratory syndrome coronavirus 2
  REGION 1..12: note = Table B: HLA-DRB1*04:02L HLA-DRB1*14:17L HLA-DQA1*01:03-B1*06:01L HLA-DQA1*02:01-B1*03:03L
NVNALLSTDGNK

SEQ ID NO: 16445 - protein, 13 aa, Severe acute respiratory syndrome coronavirus 2
  REGION 1..13: note = Table B: HLA-DRB1*04:02L HLA-DRB1*08:04L HLA-DRB1*11:03L
ADKYVRNLQHRLY

SEQ ID NO: 16446 - protein, 13 aa, Severe acute respiratory syndrome coronavirus 2
  REGION 1..13: note = Table B: HLA-DRB1*04:02L HLA-DRB1*08:04L HLA-DRB1*09:01L HLA-DRB3*01:01L HLA-DRB1*14:54L HLA-DRB1*04:08L
NRDVDTDFVNEFY

SEQ ID NO: 16447 - protein, 13 aa, Severe acute respiratory syndrome coronavirus 2
  REGION 1..13: note = Table B: HLA-DRB1*04:02L HLA-DRB1*14:01L
ASQGLVASIKNFK

SEQ ID NO: 16448 - protein, 11 aa, Severe acute respiratory syndrome coronavirus 2
  REGION 1..11: note = Table B: HLA-DRB1*04:02L HLA-DRB1*14:01L HLA-DRB1*14:17L
GLVASIKNFKS

SEQ ID NO: 16449 - protein, 12 aa, Severe acute respiratory syndrome coronavirus 2
  REGION 1..12: note = Table B: HLA-DRB1*04:02L HLA-DRB1*04:08L HLA-DRB1*15:01L
SIKNFKSVLYYQ

SEQ ID NO: 16450 - protein, 12 aa, Severe acute respiratory syndrome coronavirus 2
  REGION 1..12: note = Table B: HLA-DRB1*04:02L HLA-DRB1*01:02L HLA-DRB1*14:17L
SVLYYQNNVFMS

SEQ ID NO: 16451 - protein, 13 aa, Severe acute respiratory syndrome coronavirus 2
  REGION 1..13: note = Table B: HLA-DRB1*04:02L HLA-DRB1*04:05L HLA-DRB1*14:01L HLA-DPA1*02:01-B1*13:01L
HTMLVKQGDDYVY

SEQ ID NO: 16452 - protein, 11 aa, Severe acute respiratory syndrome coronavirus 2
  REGION 1..11: note = Table B: HLA-DRB1*04:02L HLA-DRB1*08:01L
DAYPLTKHPNQ

SEQ ID NO: 16453 - protein, 13 aa, Severe acute respiratory syndrome coronavirus 2
  REGION 1..13: note = Table B: HLA-DRB1*04:02L HLA-DRB1*11:03L HLA-DRB1*12:01L HLA-DPA1*02:01-B1*13:01L HLA-DPA1*01:03-B1*02:01L HLA-DRB1*08:02L
HLYLQYIRKLHDE

SEQ ID NO: 16454 - protein, 12 aa, Severe acute respiratory syndrome coronavirus 2
  REGION 1..12: note = Table B: HLA-DRB1*04:02L HLA-DRB1*04:05L HLA-DQA1*05:01-B1*02:01L HLA-DRB1*04:10L
DMYSVMLTNDNT

SEQ ID NO: 16455 - protein, 12 aa, Severe acute respiratory syndrome coronavirus 2
  REGION 1..12: note = Table B: HLA-DRB1*04:02L HLA-DRB1*04:05L HLA-DRB1*04:10L HLA-DQA1*03:01-B1*03:02L HLA-DRB1*14:54L HLA-DRB1*14:17L HLA-DRB1*04:08L
AGDYILANTCTE

SEQ ID NO: 16456 - protein, 12 aa, Severe acute respiratory syndrome coronavirus 2
  REGION 1..12: note = Table B: HLA-DRB1*04:02L HLA-DRB1*01:02L HLA-DRB1*12:01L
YGIATVREVLSD

SEQ ID NO: 16457 - protein, 13 aa, Severe acute respiratory syndrome coronavirus 2
  REGION 1..13: note = Table B: HLA-DRB1*04:02L HLA-DRB1*04:04L HLA-DRB1*04:10L HLA-DRB1*12:01L HLA-DRB1*15:03L
ATVREVLSDRELH

SEQ ID NO: 16458 - protein, 13 aa, Severe acute respiratory syndrome coronavirus 2
  REGION 1..13: note = Table B: HLA-DRB1*04:02L HLA-DRB1*04:05L
EKGDYGDAVVYRG

SEQ ID NO: 16459 - protein, 13 aa, Severe acute respiratory syndrome coronavirus 2
  REGION 1..13: note = Table B: HLA-DRB1*04:02L HLA-DRB1*14:17L
GDYGDAVVYRGTT

SEQ ID NO: 16460 - protein, 13 aa, Severe acute respiratory syndrome coronavirus 2
  REGION 1..13: note = Table B: HLA-DRB1*04:02L
GTTTYKLNVGDYF

SEQ ID NO: 16461 - protein, 13 aa, Severe acute respiratory syndrome coronavirus 2
  REGION 1..13: note = Table B: HLA-DRB1*04:02L HLA-DRB1*08:04L HLA-DPA1*01:03-B1*04:02L HLA-DRB1*12:02L
DYFVLTSHTVMPL

SEQ ID NO: 16462 - protein, 12 aa, Severe acute respiratory syndrome coronavirus 2
  REGION 1..12: note = Table B: HLA-DRB1*04:02L HLA-DQA1*05:01-B1*02:01L HLA-DRB1*14:17L HLA-DQA1*01:03-B1*06:01L HLA-DQA1*02:01-B1*03:03L
NISDEFSSNVAN

SEQ ID NO: 16463 - protein, 12 aa, Severe acute respiratory syndrome coronavirus 2
  REGION 1..12: note = Table B: HLA-DRB1*04:02L HLA-DRB1*08:04L HLA-DRB3*02:01L HLA-DRB1*08:01L HLA-DRB1*12:02L HLA-DRB1*14:54L HLA-DRB1*14:17L HLA-DRB1*04:08L
LALYYPSARIVY

SEQ ID NO: 16464 - protein, 12 aa, Severe acute respiratory syndrome coronavirus 2
  REGION 1..12: note = Table B: HLA-DRB1*04:02L HLA-DRB1*08:04L HLA-DRB3*02:01L HLA-DRB1*08:01L HLA-DRB1*14:54L HLA-DRB1*14:17L HLA-DRB1*07:01L HLA-DRB1*04:08L
ALYYPSARIVYT

SEQ ID NO: 16465 - protein, 12 aa, Severe acute respiratory syndrome coronavirus 2
  REGION 1..12: note = Table B: HLA-DRB1*04:02L HLA-DRB1*04:04L HLA-DRB1*04:05L HLA-DRB1*08:04L HLA-DRB3*02:01L HLA-DRB1*11:03L HLA-DRB1*11:04L HLA-DRB1*09:01L HLA-DRB1*07:01L HLA-DRB1*04:08L
FKVNSTLEQYVF

SEQ ID NO: 16466 - protein, 12 aa, Severe acute respiratory syndrome coronavirus 2
  REGION 1..12: note = Table B: HLA-DRB1*04:02L HLA-DRB1*01:02L HLA-DPA1*03:01-B1*04:02L HLA-DRB1*14:01L HLA-DPA1*03:01-B1*105:01L
ADIVVFDEISMA

SEQ ID NO: 16467 - protein, 12 aa, Severe acute respiratory syndrome coronavirus 2
  REGION 1..12: note = Table B: HLA-DRB1*04:02L HLA-DRB1*01:02L HLA-DRB1*14:01L HLA-DPA1*03:01-B1*105:01L
DIVVFDEISMAT

SEQ ID NO: 16468 - protein, 11 aa, Severe acute respiratory syndrome coronavirus 2
  REGION 1..11: note = Table B: HLA-DRB1*04:02L HLA-DRB1*01:01L HLA-DRB4*03:01NL HLA-DRB1*11:04L HLA-DRB5*01:01L HLA-DRB1*12:02L HLA-DRB3*01:01L HLA-DQA1*05:05-B1*03:01L HLA-DRB1*16:01L
AINRPQIGVVR

SEQ ID NO: 16469 - protein, 11 aa, Severe acute respiratory syndrome coronavirus 2
  REGION 1..11: note = Table B: HLA-DRB1*04:02L HLA-DQA1*05:01-B1*02:01L HLA-DQA1*02:01-B1*03:03L
AVFISPYNSQN

SEQ ID NO: 16470 - protein, 11 aa, Severe acute respiratory syndrome coronavirus 2
  REGION 1..11: note = Table B: HLA-DRB1*04:02L
VFISPYNSQNA

SEQ ID NO: 16471 - protein, 14 aa, Severe acute respiratory syndrome coronavirus 2
  REGION 1..14: note = Table B: HLA-DRB1*04:02L HLA-DRB1*04:05L HLA-DRB1*01:02L HLA-DRB1*04:10L HLA-DRB1*12:01L HLA-DPA1*02:01-B1*13:01L HLA-DQA1*03:01-B1*03:02L HLA-DRB1*16:01L HLA-DRB1*04:08L
VGILCIMSDRDLYD

SEQ ID NO: 16472 - protein, 12 aa, Severe acute respiratory syndrome coronavirus 2
  REGION 1..12: note = Table B: HLA-DRB1*04:02L HLA-DRB1*01:02L HLA-DRB3*02:01L HLA-DRB1*15:01L
YQVNGYPNMFIT

SEQ ID NO: 16473 - protein, 14 aa, Severe acute respiratory syndrome coronavirus 2
  REGION 1..14: note = Table B: HLA-DRB1*04:02L HLA-DQA1*05:05-B1*03:01L
STGVNLVAVPTGYV

SEQ ID NO: 16474 - protein, 12 aa, Severe acute respiratory syndrome coronavirus 2
  REGION 1..12: note = Table B: HLA-DRB1*04:02L HLA-DQA1*03:01-B1*03:02L HLA-DRB1*16:01L HLA-DQA1*02:01-B1*03:03L
TDFSRVSAKPPP

SEQ ID NO: 16475 - protein, 18 aa, Severe acute respiratory syndrome coronavirus 2
  REGION 1..18: note = Table B: HLA-DRB1*04:02L HLA-DRB1*08:77L HLA-DRB1*11:02L HLA-DQA1*01-B1*05L HLA-DRB1*09:01L HLA-DPA1*01:03-B1*02:01L HLA-DRB1*14:17L HLA-DRB1*08:02L HLA-DRB1*08:03L HLA-DRB1*15:01L
KPPPGDQFKHLIPLMYKG

SEQ ID NO: 16476 - protein, 12 aa, Severe acute respiratory syndrome coronavirus 2
  REGION 1..12: note = Table B: HLA-DRB1*04:02L HLA-DRB1*01:02L HLA-DRB1*14:01L HLA-DQA1*05:01-B1*02:01L HLA-DRB1*12:01L HLA-DRB1*16:01L
DTLKNLSDRVVF

SEQ ID NO: 16477 - protein, 12 aa, Severe acute respiratory syndrome coronavirus 2
  REGION 1..12: note = Table B: HLA-DRB1*04:02L HLA-DQA1*01:02-B1*06:02L HLA-DRB1*14:01L HLA-DRB1*08:01L HLA-DQA1*03:01-B1*03:02L HLA-DRB1*16:01L HLA-DRB1*04:08L HLA-DQA1*02:01-B1*03:03L
TSMKYFVKIGPE

SEQ ID NO: 16478 - protein, 13 aa, Severe acute respiratory syndrome coronavirus 2
  REGION 1..13: note = Table B: HLA-DRB1*04:02L HLA-DPA1*03:01-B1*04:02L HLA-DRB1*11:01L HLA-DRB1*12:01L HLA-DRB1*15:03L
ASDTYACWHHSIG

SEQ ID NO: 16479 - protein, 15 aa, Severe acute respiratory syndrome coronavirus 2
  REGION 1..15: note = Table B: HLA-DRB1*04:02L HLA-DPA1*01:03-B1*04:02L HLA-DPA1*01:03-B1*104:01L HLA-DRB1*15:03L
DIGNPKAIKCVPQAD

SEQ ID NO: 16480 - protein, 12 aa, Severe acute respiratory syndrome coronavirus 2
  REGION 1..12: note = Table B: HLA-DRB1*04:02L HLA-DRB3*02:01L HLA-DRB1*14:17L
TRLQSLENVAFN

SEQ ID NO: 16481 - protein, 10 aa, Severe acute respiratory syndrome coronavirus 2
  REGION 1..10: note = Table B: HLA-DRB1*04:02L HLA-DQA1*03:01-B1*03:02L HLA-DQA1*02:01-B1*03:03L
NVVNKGHFDG

SEQ ID NO: 16482 - protein, 14 aa, Severe acute respiratory syndrome coronavirus 2
  REGION 1..14: note = Table B: HLA-DRB1*04:02L HLA-DRB1*04:05L HLA-DRB1*01:02L HLA-DRB1*08:01L HLA-DRB1*11:01L HLA-DPA1*01:03-B1*04:02L
FDGQQGEVPVSIIN

SEQ ID NO: 16483 - protein, 17 aa, Severe acute respiratory syndrome coronavirus 2
  REGION 1..17: note = Table B: HLA-DRB1*04:02L HLA-DRB1*14:02L HLA-DPA1*01:03-B1*02:01L HLA-DRB1*08:02L HLA-DRB1*08:03L
LPVNVAFELWAKRNIKP

SEQ ID NO: 16484 - protein, 16 aa, Severe acute respiratory syndrome coronavirus 2
  REGION 1..16: note = Table B: HLA-DRB1*04:02L HLA-DRB1*11:02L HLA-DRB1*14:02L HLA-DRB1*08:02L
NVAFELWAKRNIKPVP

SEQ ID NO: 16485 - protein, 13 aa, Severe acute respiratory syndrome coronavirus 2
  REGION 1..13: note = Table B: HLA-DRB1*04:02L
ELWAKRNIKPVPE

SEQ ID NO: 16486 - protein, 14 aa, Severe acute respiratory syndrome coronavirus 2
  REGION 1..14: note = Table B: HLA-DRB1*04:02L HLA-DRB1*04:04L HLA-DRB3*01:01L HLA-DRB1*15:01L
KRNIKPVPEVKILN

SEQ ID NO: 16487 - protein, 12 aa, Severe acute respiratory syndrome coronavirus 2
  REGION 1..12: note = Table B: HLA-DRB1*04:02L HLA-DRB1*04:05L HLA-DRB4*03:01NL HLA-DQA1*01-B1*05L HLA-DQA1*05:01-B1*02:01L HLA-DRB1*04:10L HLA-DQA1*03:01-B1*03:02L HLA-DRB1*14:54L HLA-DRB1*16:01L HLA-DQA1*02:01-B1*03:03L
LNNLGVDIAANT

SEQ ID NO: 16488 - protein, 11 aa, Severe acute respiratory syndrome coronavirus 2
  REGION 1..11: note = Table B: HLA-DRB1*04:02L HLA-DQA1*05:05-B1*03:01L HLA-DRB1*14:17L
LIGEAVKTQFN

SEQ ID NO: 16489 - protein, 11 aa, Severe acute respiratory syndrome coronavirus 2
  REGION 1..11: note = Table B: HLA-DRB1*04:02L HLA-DRB1*04:05L
NYYKKVDGVVQ

SEQ ID NO: 16490 - protein, 13 aa, Severe acute respiratory syndrome coronavirus 2
  REGION 1..13: note = Table B: HLA-DRB1*04:02L HLA-DRB1*04:05L HLA-DRB1*01:02L HLA-DRB1*08:01L HLA-DRB1*12:01L
FTQSRNLQEFKPR

SEQ ID NO: 16491 - protein, 13 aa, Severe acute respiratory syndrome coronavirus 2
  REGION 1..13: note = Table B: HLA-DRB1*04:02L HLA-DRB1*04:05L HLA-DRB3*01:01L
SPFELEDFIPMDS

SEQ ID NO: 16492 - protein, 12 aa, Severe acute respiratory syndrome coronavirus 2
  REGION 1..12: note = Table B: HLA-DRB1*04:02L HLA-DRB1*14:17L HLA-DRB1*16:01L
KNYFITDAQTGS

SEQ ID NO: 16493 - protein, 11 aa, Severe acute respiratory syndrome coronavirus 2
  REGION 1..11: note = Table B: HLA-DRB1*04:02L HLA-DRB1*04:05L HLA-DRB4*03:01NL HLA-DQA1*01-B1*05L HLA-DQA1*03:01-B1*03:02L HLA-DRB1*14:54L HLA-DRB1*16:01L
YFITDAQTGSS

SEQ ID NO: 16494 - protein, 11 aa, Severe acute respiratory syndrome coronavirus 2
  REGION 1..11: note = Table B: HLA-DRB1*04:02L HLA-DQA1*05:01-B1*02:01L HLA-DRB1*14:17L HLA-DRB1*16:01L HLA-DQA1*02:01-B1*03:03L
GSDKGVAPGTA

SEQ ID NO: 16495 - protein, 14 aa, Severe acute respiratory syndrome coronavirus 2
  REGION 1..14: note = Table B: HLA-DRB1*04:02L HLA-DRB1*04:05L HLA-DRB1*04:10L HLA-DRB1*12:01L
LPTGTLLVDSDLND

SEQ ID NO: 16496 - protein, 13 aa, Severe acute respiratory syndrome coronavirus 2
  REGION 1..13: note = Table B: HLA-DRB1*04:02L HLA-DQA1*05:01-B1*02:01L HLA-DRB1*14:54L HLA-DRB1*14:17L HLA-DRB1*16:01L
DSTLIGDCATVHT

SEQ ID NO: 16497 - protein, 13 aa, Severe acute respiratory syndrome coronavirus 2
  REGION 1..13: note = Table B: HLA-DRB1*04:02L
STLIGDCATVHTA

SEQ ID NO: 16498 - protein, 12 aa, Severe acute respiratory syndrome coronavirus 2
  REGION 1..12: note = Table B: HLA-DRB1*04:02L HLA-DRB1*08:04L HLA-DRB1*04:08L
DMYDPKTKNVTK

SEQ ID NO: 16499 - protein, 11 aa, Severe acute respiratory syndrome coronavirus 2
  REGION 1..11: note = Table B: HLA-DRB1*04:02L HLA-DRB1*04:05L HLA-DRB1*14:17L HLA-DQA1*02:01-B1*03:03L
NVTKENDSKEG

SEQ ID NO: 16500 - protein, 12 aa, Severe acute respiratory syndrome coronavirus 2
  REGION 1..12: note = Table B: HLA-DRB1*04:02L HLA-DRB1*04:05L HLA-DRB1*01:02L HLA-DQA1*01:01-B1*05:01L HLA-DPA1*02:01-B1*13:01L HLA-DPA1*03:01-B1*105:01L HLA-DQA1*01:03-B1*06:01L HLA-DRB1*04:08L
ITEHSWNADLYK

SEQ ID NO: 16501 - protein, 17 aa, Severe acute respiratory syndrome coronavirus 2
  REGION 1..17: note = Table B: HLA-DRB1*04:02L HLA-DRB1*14:02L HLA-DQA1*01:01-B1*05:01L HLA-DPA1*01:03-B1*04:01L HLA-DRB3*01:01L
FPLKLRGTAVMSLKEGQ

SEQ ID NO: 16502 - protein, 15 aa, Severe acute respiratory syndrome coronavirus 2
  REGION 1..15: note = Table B: HLA-DRB1*04:02L HLA-DRB1*04:04L HLA-DRB1*04:05L
EGQINDMILSLLSKG

SEQ ID NO: 16503 - protein, 11 aa, Severe acute respiratory syndrome coronavirus 2
  REGION 1..11: note = Table B: HLA-DRB1*04:02L HLA-DRB1*14:01L HLA-DQA1*05:01-B1*02:01L HLA-DRB1*12:01L HLA-DQA1*03:01-B1*03:02L HLA-DRB1*14:54L HLA-DRB1*16:01L
RVVISSDVLVN

SEQ ID NO: 16504 - protein, 12 aa, Severe acute respiratory syndrome coronavirus 2
  REGION 1..12: note = Table B: HLA-DRB1*04:02L HLA-DQA1*03:01-B1*03:02L
FHAIHVSGTNGT

SEQ ID NO: 16505 - protein, 13 aa, Severe acute respiratory syndrome coronavirus 2
  REGION 1..13: note = Table B: HLA-DRB1*04:02L HLA-DRB1*01:01L
DPFLGVYYHKNNK

SEQ ID NO: 16506 - protein, 14 aa, Severe acute respiratory syndrome coronavirus 2
  REGION 1..14: note = Table B: HLA-DRB1*04:02L HLA-DRB1*04:04L HLA-DRB1*11:02L HLA-DQA1*03:01-B1*03:02L HLA-DRB1*07:01L HLA-DRB1*08:02L HLA-DRB1*08:03L
LGVYYHKNNKSWME

SEQ ID NO: 16507 - protein, 13 aa, Severe acute respiratory syndrome coronavirus 2
  REGION 1..13: note = Table B: HLA-DRB1*04:02L HLA-DRB1*11:04L HLA-DRB1*08:03L
DGYFKIYSKHTPI

SEQ ID NO: 16508 - protein, 11 aa, Severe acute respiratory syndrome coronavirus 2
  REGION 1..11: note = Table B: HLA-DRB1*04:02L HLA-DRB1*14:17L
VDLPIGINITR

SEQ ID NO: 16509 - protein, 14 aa, Severe acute respiratory syndrome coronavirus 2
  REGION 1..14: note = Table B: HLA-DRB1*04:02L HLA-DRB1*04:05L HLA-DRB1*08:01L HLA-DRB1*11:01L
SSGWTAGAAAYYVG

SEQ ID NO: 16510 - protein, 15 aa, Severe acute respiratory syndrome coronavirus 2
  REGION 1..15: note = Table B: HLA-DRB1*04:02L HLA-DRB1*11:04L HLA-DRB1*11:01L HLA-DRB1*12:01L HLA-DPA1*02:01-B1*13:01L
QPRTFLLKYNENGTI

SEQ ID NO: 16511 - protein, 13 aa, Severe acute respiratory syndrome coronavirus 2
  REGION 1..13: note = Table B: HLA-DRB1*04:02L HLA-DRB1*04:05L HLA-DQA1*01:02-B1*06:02L HLA-DRB1*04:10L HLA-DQA1*03:01-B1*03:02L
TDAVDCALDPLSE

SEQ ID NO: 16512 - protein, 14 aa, Severe acute respiratory syndrome coronavirus 2
  REGION 1..14: note = Table B: HLA-DRB1*04:02L HLA-DRB1*11:03L HLA-DRB1*15:03L
VGGNYNYLYRLFRK

SEQ ID NO: 16513 - protein, 14 aa, Severe acute respiratory syndrome coronavirus 2
  REGION 1..14: note = Table B: HLA-DRB1*04:02L
GGNYNYLYRLFRKS

SEQ ID NO: 16514 - protein, 12 aa, Severe acute respiratory syndrome coronavirus 2
  REGION 1..12: note = Table B: HLA-DRB1*04:02L HLA-DRB1*08:01L
NLKPFERDISTE

SEQ ID NO: 16515 - protein, 13 aa, Severe acute respiratory syndrome coronavirus 2
  REGION 1..13: note = Table B: HLA-DRB1*04:02L HLA-DRB1*04:05L HLA-DRB4*03:01NL HLA-DRB1*11:03L HLA-DRB1*11:04L HLA-DRB1*08:01L HLA-DRB1*11:01L HLA-DRB1*09:01L
LKPFERDISTEIY

SEQ ID NO: 16516 - protein, 12 aa, Severe acute respiratory syndrome coronavirus 2
  REGION 1..12: note = Table B: HLA-DRB1*04:02L HLA-DQA1*01:01-B1*05:01L HLA-DRB1*16:01L
QPTNGVGYQPYR

SEQ ID NO: 16517 - protein, 14 aa, Severe acute respiratory syndrome coronavirus 2
  REGION 1..14: note = Table B: HLA-DRB1*04:02L HLA-DRB1*04:05L HLA-DRB1*01:02L HLA-DRB1*11:03L HLA-DRB1*11:04L HLA-DRB1*08:01L HLA-DRB1*11:01L HLA-DRB3*01:01L HLA-DRB1*04:08L
TGVLTESNKKFLPF

SEQ ID NO: 16518 - protein, 14 aa, Severe acute respiratory syndrome coronavirus 2
  REGION 1..14: note = Table B: HLA-DRB1*04:02L HLA-DRB1*04:05L HLA-DRB1*11:02L HLA-DRB1*11:03L HLA-DRB1*11:04L HLA-DRB1*11:01L HLA-DRB3*01:01L HLA-DRB1*14:54L HLA-DRB1*04:08L
GVLTESNKKFLPFQ

SEQ ID NO: 16519 - protein, 14 aa, Severe acute respiratory syndrome coronavirus 2
  REGION 1..14: note = Table B: HLA-DRB1*04:02L HLA-DRB1*04:05L HLA-DQA1*01:02-B1*06:02L HLA-DRB1*16:01L
FQQFGRDIADTTDA

SEQ ID NO: 16520 - protein, 11 aa, Severe acute respiratory syndrome coronavirus 2
  REGION 1..11: note = Table B: HLA-DRB1*04:02L HLA-DQA1*03:01-B1*03:02L
VITPGTNTSNQ

SEQ ID NO: 16521 - protein, 14 aa, Severe acute respiratory syndrome coronavirus 2
  REGION 1..14: note = Table B: HLA-DRB1*04:02L HLA-DRB1*01:02L
NQVAVLYQDVNCTE

SEQ ID NO: 16522 - protein, 13 aa, Severe acute respiratory syndrome coronavirus 2
  REGION 1..13: note = Table B: HLA-DRB1*04:02L
EVPVAIHADQLTP

SEQ ID NO: 16523 - protein, 11 aa, Severe acute respiratory syndrome coronavirus 2
  REGION 1..11: note = Table B: HLA-DRB1*04:02L HLA-DQA1*05:05-B1*03:01L HLA-DRB1*14:17L
IHADQLTPTWR

SEQ ID NO: 16524 - protein, 12 aa, Severe acute respiratory syndrome coronavirus 2
  REGION 1..12: note = Table B: HLA-DRB1*04:02L HLA-DRB1*08:04L HLA-DRB1*08:01L HLA-DRB1*14:54L
DQLTPTWRVYST

SEQ ID NO: 16525 - protein, 13 aa, Severe acute respiratory syndrome coronavirus 2
  REGION 1..13: note = Table B: HLA-DRB1*04:02L HLA-DRB1*04:05L
ARSVASQSIIAYT

SEQ ID NO: 16526 - protein, 12 aa, Severe acute respiratory syndrome coronavirus 2
  REGION 1..12: note = Table B: HLA-DRB1*04:02L HLA-DQA1*01:02-B1*06:02L HLA-DRB1*12:01L HLA-DRB1*15:03L
SIIAYTMSLGAE

SEQ ID NO: 16527 - protein, 14 aa, Severe acute respiratory syndrome coronavirus 2
  REGION 1..14: note = Table B: HLA-DRB1*04:02L HLA-DRB1*14:17L
TMSLGAENSVAYSN

SEQ ID NO: 16528 - protein, 14 aa, Severe acute respiratory syndrome coronavirus 2
  REGION 1..14: note = Table B: HLA-DRB1*04:02L
MSLGAENSVAYSNN

SEQ ID NO: 16529 - protein, 11 aa, Severe acute respiratory syndrome coronavirus 2
  REGION 1..11: note = Table B: HLA-DRB1*04:02L
TEILPVSMTKT

SEQ ID NO: 16530 - protein, 11 aa, Severe acute respiratory syndrome coronavirus 2
  REGION 1..11: note = Table B: HLA-DRB1*04:02L HLA-DRB1*14:17L
EVFAQVKQIYK

SEQ ID NO: 16531 - protein, 12 aa, Severe acute respiratory syndrome coronavirus 2
  REGION 1..12: note = Table B: HLA-DRB1*04:02L HLA-DQA1*01:02-B1*06:02L HLA-DRB1*01:02L HLA-DRB1*12:01L HLA-DRB1*16:01L HLA-DQA1*02:01-B1*03:03L HLA-DRB1*15:03L
FAQVKQIYKTPP

SEQ ID NO: 16532 - protein, 11 aa, Severe acute respiratory syndrome coronavirus 2
  REGION 1..11: note = Table B: HLA-DRB1*04:02L HLA-DQA1*03:01-B1*03:02L
VKQIYKTPPIK

SEQ ID NO: 16533 - protein, 11 aa, Severe acute respiratory syndrome coronavirus 2
  REGION 1..11: note = Table B: HLA-DRB1*04:02L HLA-DQA1*03:01-B1*03:02L HLA-DRB1*14:17L
IYKTPPIKDFG

SEQ ID NO: 16534 - protein, 11 aa, Severe acute respiratory syndrome coronavirus 2
  REGION 1..11: note = Table B: HLA-DRB1*04:02L HLA-DQA1*05:01-B1*02:01L HLA-DRB1*14:17L
FSQILPDPSKP

SEQ ID NO: 16535 - protein, 14 aa, Severe acute respiratory syndrome coronavirus 2
  REGION 1..14: note = Table B: HLA-DRB1*04:02L HLA-DRB1*04:04L HLA-DRB1*04:05L HLA-DPA1*03:01-B1*04:02L HLA-DRB1*14:01L HLA-DRB1*15:01L
AGFIKQYGDCLGDI

SEQ ID NO: 16536 - protein, 12 aa, Severe acute respiratory syndrome coronavirus 2
  REGION 1..12: note = Table B: HLA-DRB1*04:02L HLA-DRB1*12:01L HLA-DRB1*14:17L HLA-DRB1*16:01L
DEMIAQYTSALL

SEQ ID NO: 16537 - protein, 13 aa, Severe acute respiratory syndrome coronavirus 2
  REGION 1..13: note = Table B: HLA-DRB1*04:02L HLA-DQA1*05:05-B1*03:116L HLA-DRB1*12:01L HLA-DPA1*01:03-B1*104:01L HLA-DRB1*16:01L HLA-DRB1*15:03L
TFGAGAALQIPFA

SEQ ID NO: 16538 - protein, 13 aa, Severe acute respiratory syndrome coronavirus 2
  REGION 1..13: note = Table B: HLA-DRB1*04:02L HLA-DRB1*04:10L
FNGIGVTQNVLYE

SEQ ID NO: 16539 - protein, 13 aa, Severe acute respiratory syndrome coronavirus 2
  REGION 1..13: note = Table B: HLA-DRB1*04:02L HLA-DRB1*01:02L
NGIGVTQNVLYEN

SEQ ID NO: 16540 - protein, 12 aa, Severe acute respiratory syndrome coronavirus 2
  REGION 1..12: note = Table B: HLA-DRB1*04:02L HLA-DRB1*01:02L HLA-DQA1*05:05-B1*03:01L
YENQKLIANQFN

SEQ ID NO: 16541 - protein, 13 aa, Severe acute respiratory syndrome coronavirus 2
  REGION 1..13: note = Table B: HLA-DRB1*04:02L HLA-DRB1*04:04L HLA-DRB1*04:05L HLA-DRB4*03:01NL HLA-DRB1*04:10L HLA-DQA1*03:01-B1*03:02L HLA-DRB1*14:54L HLA-DRB1*16:01L
GKIQDSLSSTASA

SEQ ID NO: 16542 - protein, 11 aa, Severe acute respiratory syndrome coronavirus 2
  REGION 1..11: note = Table B: HLA-DRB1*04:02L HLA-DRB1*04:05L HLA-DQA1*01:01-B1*05:01L HLA-DRB1*04:10L HLA-DPA1*03:01-B1*105:01L HLA-DRB1*14:17L HLA-DRB1*16:01L
SALGKLQDVVN

SEQ ID NO: 16543 - protein, 11 aa, Severe acute respiratory syndrome coronavirus 2
  REGION 1..11: note = Table B: HLA-DRB1*04:02L HLA-DQA1*01-B1*05L HLA-DRB1*14:17L
LGKLQDVVNQN

SEQ ID NO: 16544 - protein, 12 aa, Severe acute respiratory syndrome coronavirus 2
  REGION 1..12: note = Table B: HLA-DRB1*04:02L HLA-DRB1*04:05L HLA-DRB1*01:02L HLA-DRB4*03:01NL HLA-DPA1*01:03-B1*03:01L HLA-DRB1*04:10L HLA-DRB1*12:01L HLA-DPA1*03:01-B1*105:01L HLA-DRB1*14:54L HLA-DRB1*16:01L HLA-DRB1*04:08L
SSNFGAISSVLN

SEQ ID NO: 16545 - protein, 12 aa, Severe acute respiratory syndrome coronavirus 2
  REGION 1..12: note = Table B: HLA-DRB1*04:02L HLA-DRB1*04:05L HLA-DRB1*01:02L HLA-DRB4*03:01NL HLA-DRB1*04:10L HLA-DRB1*12:01L HLA-DPA1*03:01-B1*105:01L HLA-DRB1*14:54L HLA-DRB1*10:01L HLA-DRB1*16:01L HLA-DRB1*04:08L
SNFGAISSVLND

SEQ ID NO: 16546 - protein, 12 aa, Severe acute respiratory syndrome coronavirus 2
  REGION 1..12: note = Table B: HLA-DRB1*04:02L HLA-DRB1*14:17L
GAISSVLNDILS

SEQ ID NO: 16547 - protein, 12 aa, Severe acute respiratory syndrome coronavirus 2
  REGION 1..12: note = Table B: HLA-DRB1*04:02L HLA-DRB1*04:05L HLA-DQA1*01:02-B1*06:02L HLA-DRB1*14:01L HLA-DRB1*08:01L HLA-DRB1*16:01L
LSRLDKVEAEVQ

SEQ ID NO: 16548 - protein, 12 aa, Severe acute respiratory syndrome coronavirus 2
  REGION 1..12: note = Table B: HLA-DRB1*04:02L HLA-DRB1*04:05L HLA-DRB1*04:10L HLA-DRB1*12:01L HLA-DRB1*14:54L
TGRLQSLQTYVT

SEQ ID NO: 16549 - protein, 13 aa, Severe acute respiratory syndrome coronavirus 2
  REGION 1..13: note = Table B: HLA-DRB1*04:02L HLA-DRB1*04:05L HLA-DRB1*08:04L HLA-DRB1*08:01L HLA-DQA1*05:05-B1*03:19L HLA-DPA1*01:03-B1*02:01L HLA-DQA1*05:05-B1*03:01L
VVFLHVTYVPAQE

SEQ ID NO: 16550 - protein, 12 aa, Severe acute respiratory syndrome coronavirus 2
  REGION 1..12: note = Table B: HLA-DRB1*04:02L HLA-DRB1*08:04L HLA-DRB1*11:04L HLA-DRB1*08:01L HLA-DRB1*04:10L HLA-DRB1*12:02L HLA-DRB3*01:01L HLA-DRB1*14:54L HLA-DRB1*14:17L HLA-DRB1*04:08L HLA-DRB1*08:03L
EGVFVSNGTHWF

SEQ ID NO: 16551 - protein, 13 aa, Severe acute respiratory syndrome coronavirus 2
  REGION 1..13: note = Table B: HLA-DRB1*04:02L HLA-DRB1*08:04L HLA-DRB1*12:02L HLA-DRB3*01:01L HLA-DRB1*14:54L
GVFVSNGTHWFVT

SEQ ID NO: 16552 - protein, 12 aa, Severe acute respiratory syndrome coronavirus 2
  REGION 1..12: note = Table B: HLA-DRB1*04:02L
FYEPQIITTDNT

SEQ ID NO: 16553 - protein, 11 aa, Severe acute respiratory syndrome coronavirus 2
  REGION 1..11: note = Table B: HLA-DRB1*04:02L HLA-DRB1*04:10L HLA-DRB1*14:54L HLA-DRB1*14:17L
VIGIVNNTVYD

SEQ ID NO: 16554 - protein, 14 aa, Severe acute respiratory syndrome coronavirus 2
  REGION 1..14: note = Table B: HLA-DRB1*04:02L HLA-DRB4*03:01NL HLA-DRB1*14:17L
SPDVDLGDISGINA

SEQ ID NO: 16555 - protein, 11 aa, Severe acute respiratory syndrome coronavirus 2
  REGION 1..11: note = Table B: HLA-DRB1*04:02L HLA-DQA1*02:01-B1*03:03L
LNEVAKNLNES

SEQ ID NO: 16556 - protein, 13 aa, Severe acute respiratory syndrome coronavirus 2
  REGION 1..13: note = Table B: HLA-DRB1*04:02L HLA-DRB1*01:02L HLA-DRB1*08:04L HLA-DRB1*14:01L HLA-DRB1*08:01L HLA-DQA1*03:01-B1*03:02L HLA-DPA1*01:02-B1*04:01L HLA-DQA1*01:03-B1*06:01L HLA-DRB1*04:08L
DLQELGKYEQYIK

SEQ ID NO: 16557 - protein, 12 aa, Severe acute respiratory syndrome coronavirus 2
  REGION 1..12: note = Table B: HLA-DRB1*04:02L HLA-DRB1*04:05L HLA-DRB1*04:08L
EIKDATPSDFVR

SEQ ID NO: 16558 - protein, 11 aa, Severe acute respiratory syndrome coronavirus 2
  REGION 1..11: note = Table B: HLA-DRB1*04:02L HLA-DRB1*08:77L HLA-DRB1*12:01L HLA-DRB1*14:17L HLA-DRB1*16:01L
RATATIPIQAS

SEQ ID NO: 16559 - protein, 11 aa, Severe acute respiratory syndrome coronavirus 2
  REGION 1..11: note = Table B: HLA-DRB1*04:02L HLA-DQA1*03:01-B1*03:02L
YQIGGYTEKWE

SEQ ID NO: 16560 - protein, 11 aa, Severe acute respiratory syndrome coronavirus 2
  REGION 1..11: note = Table B: HLA-DRB1*04:02L HLA-DQA1*01:01-B1*05:01L HLA-DQA1*01:03-B1*06:01L
LSTDTGVEHVT

SEQ ID NO: 16561 - protein, 11 aa, Severe acute respiratory syndrome coronavirus 2
  REGION 1..11: note = Table B: HLA-DRB1*04:02L HLA-DRB1*01:01L HLA-DRB1*11:03L HLA-DRB1*11:04L HLA-DRB1*11:01L HLA-DRB5*01:01L HLA-DRB1*09:01L HLA-DRB1*14:54L HLA-DQA1*05:05-B1*03:01L
STDTGVEHVTF

SEQ ID NO: 16562 - protein, 12 aa, Severe acute respiratory syndrome coronavirus 2
  REGION 1..12: note = Table B: HLA-DRB1*04:02L HLA-DQA1*05:05-B1*03:19L HLA-DQA1*05:05-B1*03:01L
IHTIDGSSGVVN

SEQ ID NO: 16563 - protein, 12 aa, Severe acute respiratory syndrome coronavirus 2
  REGION 1..12: note = Table B: HLA-DRB1*04:02L HLA-DRB1*04:05L HLA-DRB4*03:01NL HLA-DQA1*05:01-B1*02:01L HLA-DRB1*04:10L HLA-DRB1*12:01L HLA-DQA1*03:01-B1*03:02L HLA-DRB1*14:54L HLA-DRB1*14:17L HLA-DRB1*16:01L HLA-DQA1*02:01-B1*03:03L
NPVMEPIYDEPT

SEQ ID NO: 16564 - protein, 12 aa, Severe acute respiratory syndrome coronavirus 2
  REGION 1..12: note = Table B: HLA-DRB1*04:02L HLA-DRB1*04:05L HLA-DQA1*05:01-B1*02:01L HLA-DRB1*04:10L HLA-DRB1*14:17L
PVMEPIYDEPTT

SEQ ID NO: 16565 - protein, 13 aa, Severe acute respiratory syndrome coronavirus 2
  REGION 1..13: note = Table B: HLA-DRB1*04:02L
YSRVKNLNSSRVP

SEQ ID NO: 16566 - protein, 12 aa, Severe acute respiratory syndrome coronavirus 2
  REGION 1..12: note = Table B: HLA-DRB1*04:02L HLA-DRB1*04:05L HLA-DRB1*14:02L HLA-DRB1*08:01L HLA-DRB4*02:01NL HLA-DPA1*01:03-B1*04:02L HLA-DPA1*02:01-B1*13:01L HLA-DRB1*04:08L
DSNGTITVEELK

SEQ ID NO: 16567 - protein, 13 aa, Severe acute respiratory syndrome coronavirus 2
  REGION 1..13: note = Table B: HLA-DRB1*04:02L HLA-DPA1*01:03-B1*03:01L HLA-DRB1*11:03L HLA-DRB1*14:02L HLA-DQA1*05:05-B1*03:19L HLA-DPA1*01:03-B1*04:02L HLA-DRB1*14:54L HLA-DRB1*08:03L
LLQFAYANRNRFL

SEQ ID NO: 16568 - protein, 14 aa, Severe acute respiratory syndrome coronavirus 2
  REGION 1..14: note = Table B: HLA-DRB1*04:02L HLA-DRB1*04:05L HLA-DRB1*01:02L
ASQRVAGDSGFAAY

SEQ ID NO: 16569 - protein, 14 aa, Severe acute respiratory syndrome coronavirus 2
  REGION 1..14: note = Table B: HLA-DRB1*04:02L HLA-DRB1*04:04L HLA-DRB1*04:05L HLA-DRB1*01:02L HLA-DRB1*08:04L HLA-DRB1*11:04L HLA-DRB3*01:01L HLA-DQA1*03:01-B1*03:02L HLA-DRB1*14:54L HLA-DRB1*14:17L HLA-DRB1*04:08L
SQRVAGDSGFAAYS

SEQ ID NO: 16570 - protein, 11 aa, Severe acute respiratory syndrome coronavirus 2
  REGION 1..11: note = Table B: HLA-DRB1*04:02L HLA-DQA1*01:02-B1*06:02L HLA-DPA1*03:01-B1*04:02L HLA-DRB1*12:01L HLA-DRB1*16:01L HLA-DRB1*15:03L
LDYIINLIIKN

SEQ ID NO: 16571 - protein, 12 aa, Severe acute respiratory syndrome coronavirus 2
  REGION 1..12: note = Table B: HLA-DRB1*04:02L HLA-DRB1*08:04L HLA-DRB1*12:02L HLA-DRB1*14:54L HLA-DRB1*14:17L HLA-DRB1*04:08L
DYIINLIIKNLS

SEQ ID NO: 16572 - protein, 11 aa, Severe acute respiratory syndrome coronavirus 2
  REGION 1..11: note = Table B: HLA-DRB1*04:02L HLA-DRB1*04:05L HLA-DRB1*14:01L HLA-DRB1*11:04L
YQLRARSVSPK

SEQ ID NO: 16573 - protein, 13 aa, Severe acute respiratory syndrome coronavirus 2
  REGION 1..13: note = Table B: HLA-DRB1*04:02L HLA-DRB1*04:05L HLA-DPA1*03:01-B1*04:02L HLA-DRB1*14:01L HLA-DPA1*02:01-B1*13:01L HLA-DQA1*05:05-B1*03:01L HLA-DRB1*14:17L HLA-DPA1*01:02-B1*04:01L
IRQEEVQELYSPI

SEQ ID NO: 16574 - protein, 11 aa, Severe acute respiratory syndrome coronavirus 2
  REGION 1..11: note = Table B: HLA-DRB1*04:02L HLA-DRB1*04:05L HLA-DRB4*03:01NL HLA-DQA1*05:01-B1*02:01L HLA-DRB1*04:10L HLA-DQA1*03:01-B1*03:02L HLA-DRB1*14:54L HLA-DRB1*14:17L
VPINTNSSPDD

SEQ ID NO: 16575 - protein, 15 aa, Severe acute respiratory syndrome coronavirus 2
  REGION 1..15: note = Table B: HLA-DRB1*04:02L HLA-DRB1*04:05L HLA-DRB1*01:02L HLA-DPA1*01:03-B1*03:01L HLA-DQA1*01:01-B1*05:01L HLA-DRB1*08:01L HLA-DRB4*02:01NL HLA-DRB1*04:10L HLA-DPA1*01:03-B1*04:02L HLA-DRB1*12:01L
  REGION 1..15: note = CONT. FROM ABOVE: HLA-DPA1*02:01-B1*13:01L HLA-DPA1*01:03-B1*104 :01L HLA-DRB1*16:01L HLA-DRB1*15:03L
NPANNAAIVLQLPQG

SEQ ID NO: 16576 - protein, 12 aa, Severe acute respiratory syndrome coronavirus 2
  REGION 1..12: note = Table B: HLA-DRB1*04:02L HLA-DQA1*01:02-B1*06:02L HLA-DRB1*08:01L HLA-DRB1*12:01L HLA-DRB1*16:01L HLA-DRB1*04:08L HLA-DRB1*15:03L
ALALLLLDRLNQ

SEQ ID NO: 16577 - protein, 12 aa, Severe acute respiratory syndrome coronavirus 2
  REGION 1..12: note = Table B: HLA-DRB1*04:02L HLA-DQA1*01:02-B1*06:02L HLA-DRB1*08:01L HLA-DQA1*02:01-B1*03:03L
LNQLESKMSGKG

SEQ ID NO: 16578 - protein, 13 aa, Severe acute respiratory syndrome coronavirus 2
  REGION 1..13: note = Table B: HLA-DRB1*04:02L HLA-DRB1*14:01L HLA-DRB3*01:01L
TKAYNVTQAFGRR

SEQ ID NO: 16579 - protein, 11 aa, Severe acute respiratory syndrome coronavirus 2
  REGION 1..11: note = Table B: HLA-DRB1*04:02L HLA-DQA1*01:03-B1*06:01L
NFGDQELIRQG

SEQ ID NO: 16580 - protein, 12 aa, Severe acute respiratory syndrome coronavirus 2
  REGION 1..12: note = Table B: HLA-DRB1*04:02L HLA-DRB1*01:02L HLA-DRB1*08:04L HLA-DRB3*02:01L HLA-DRB1*11:03L HLA-DRB1*04:10L HLA-DRB1*09:01L HLA-DRB1*12:02L HLA-DRB1*14:54L HLA-DQA1*05:05-B1*03:01L HLA-DRB1*14:17L HLA-DRB1*07:01L HLA-DRB1*04:08L
IAQFAPSASAFF

SEQ ID NO: 16581 - protein, 12 aa, Severe acute respiratory syndrome coronavirus 2
  REGION 1..12: note = Table B: HLA-DRB1*04:02L HLA-DRB1*01:02L HLA-DRB3*02:01L HLA-DRB1*11:03L HLA-DRB1*04:10L HLA-DRB1*09:01L HLA-DRB1*12:02L HLA-DRB1*14:54L HLA-DQA1*05:05-B1*03:01L HLA-DRB1*14:17L HLA-DRB1*07:01L
AQFAPSASAFFG

SEQ ID NO: 16582 - protein, 12 aa, Severe acute respiratory syndrome coronavirus 2
  REGION 1..12: note = Table B: HLA-DRB1*04:02L HLA-DRB1*01:02L HLA-DPA1*01:03-B1*104:01L HLA-DQA1*05:05-B1*03:01L
RIGMEVTPSGTW

SEQ ID NO: 16583 - protein, 14 aa, Severe acute respiratory syndrome coronavirus 2
  REGION 1..14: note = Table B: HLA-DRB1*04:02L HLA-DRB1*04:05L HLA-DRB1*04:10L HLA-DPA1*02:01-B1*13:01L HLA-DPA1*01:03-B1*104:01L HLA-DRB1*04:08L
KQQTVTLLPAADLD

SEQ ID NO: 16584 - protein, 13 aa, Severe acute respiratory syndrome coronavirus 2
  REGION 1..13: note = Table B: HLA-DRB1*04:02L HLA-DRB1*04:04L HLA-DRB1*04:05L HLA-DRB4*03:01NL HLA-DQA1*01-B1*05L HLA-DRB1*04:10L HLA-DQA1*03:01-B1*03:02L HLA-DRB1*14:54L HLA-DRB1*16:01L HLA-DRB1*04:08L HLA-DQA1*02:01-B1*03:03L
SKQLQQSMSSADS

SEQ ID NO: 16585 - protein, 14 aa, Severe acute respiratory syndrome coronavirus 2
  REGION 1..14: note = Table B: HLA-DRB1*04:04L HLA-DRB1*08:04L HLA-DPA1*01:03-B1*03:01L HLA-DRB1*11:01L HLA-DRB3*01:01L HLA-DPA1*02:01-B1*13:01L HLA-DRB1*07:01L
ESLVPGFNEKTHVQ

SEQ ID NO: 16586 - protein, 16 aa, Severe acute respiratory syndrome coronavirus 2
  REGION 1..16: note = Table B: HLA-DRB1*04:04L
EKTHVQLSLPVLQVRD

SEQ ID NO: 16587 - protein, 13 aa, Severe acute respiratory syndrome coronavirus 2
  REGION 1..13: note = Table B: HLA-DRB1*04:04L
SLPVLQVRDVLVR

SEQ ID NO: 16588 - protein, 14 aa, Severe acute respiratory syndrome coronavirus 2
  REGION 1..14: note = Table B: HLA-DRB1*04:04L HLA-DPA1*02:01-B1*13:01L
GDSVEEVLSEARQH

SEQ ID NO: 16589 - protein, 15 aa, Severe acute respiratory syndrome coronavirus 2
  REGION 1..15: note = Table B: HLA-DRB1*04:04L HLA-DRB3*01:01L HLA-DRB1*07:01L HLA-DRB1*08:03L
VEVEKGVLPQLEQPY

SEQ ID NO: 16590 - protein, 17 aa, Severe acute respiratory syndrome coronavirus 2
  REGION 1..17: note = Table B: HLA-DRB1*04:04L
SGETLGVLVPHVGEIPV

SEQ ID NO: 16591 - protein, 13 aa, Severe acute respiratory syndrome coronavirus 2
  REGION 1..13: note = Table B: HLA-DRB1*04:04L HLA-DRB1*04:10L HLA-DRB3*01:01L HLA-DPA1*01:02-B1*04:01L
VPHVGEIPVAYRK

SEQ ID NO: 16592 - protein, 16 aa, Severe acute respiratory syndrome coronavirus 2
  REGION 1..16: note = Table B: HLA-DRB1*04:04L
RKVLLRKNGNKGAGGH

SEQ ID NO: 16593 - protein, 14 aa, Severe acute respiratory syndrome coronavirus 2
  REGION 1..14: note = Table B: HLA-DRB1*04:04L HLA-DRB1*08:01L
VTRELMRELNGGAY

SEQ ID NO: 16594 - protein, 12 aa, Severe acute respiratory syndrome coronavirus 2
  REGION 1..12: note = Table B: HLA-DRB1*04:04L HLA-DRB1*04:05L HLA-DRB1*04:10L HLA-DRB1*04:08L
ELMRELNGGAYT

SEQ ID NO: 16595 - protein, 13 aa, Severe acute respiratory syndrome coronavirus 2
  REGION 1..13: note = Table B: HLA-DRB1*04:04L HLA-DRB1*08:04L HLA-DRB3*02:01L HLA-DRB1*11:03L HLA-DRB1*11:04L HLA-DRB3*01:01L HLA-DRB1*14:54L HLA-DRB1*04:08L
EQLDFIDTKRGVY

SEQ ID NO: 16596 - protein, 13 aa, Severe acute respiratory syndrome coronavirus 2
  REGION 1..13: note = Table B: HLA-DRB1*04:04L HLA-DRB1*01:02L HLA-DPA1*02:01-B1*13:01L HLA-DPA1*01:02-B1*04:01L HLA-DRB1*07:01L
IDTKRGVYCCREH

SEQ ID NO: 16597 - protein, 14 aa, Severe acute respiratory syndrome coronavirus 2
  REGION 1..14: note = Table B: HLA-DRB1*04:04L HLA-DRB1*01:02L HLA-DPA1*02:01-B1*13:01L HLA-DRB1*07:01L HLA-DRB1*04:08L
DTKRGVYCCREHEH

SEQ ID NO: 16598 - protein, 12 aa, Severe acute respiratory syndrome coronavirus 2
  REGION 1..12: note = Table B: HLA-DRB1*04:04L HLA-DQA1*01:02-B1*06:02L HLA-DPA1*03:01-B1*04:02L HLA-DRB1*14:01L HLA-DRB1*08:01L HLA-DQA1*05:01-B1*02:01L HLA-DPA1*02:01-B1*13:01L HLA-DPA1*03:01-B1*105:01L
EIAWYTERSEKS

SEQ ID NO: 16599 - protein, 12 aa, Severe acute respiratory syndrome coronavirus 2
  REGION 1..12: note = Table B: HLA-DRB1*04:04L HLA-DRB1*11:04L HLA-DRB1*08:01L HLA-DRB1*11:01L HLA-DPA1*01:03-B1*04:01L HLA-DRB1*09:01L HLA-DRB3*01:01L HLA-DRB1*15:01L
KSYELQTPFEIK

SEQ ID NO: 16600 - protein, 14 aa, Severe acute respiratory syndrome coronavirus 2
  REGION 1..14: note = Table B: HLA-DRB1*04:04L HLA-DRB1*04:05L HLA-DRB1*01:02L HLA-DRB1*11:03L HLA-DRB1*11:01L HLA-DRB3*01:01L HLA-DRB1*16:01L
VFPLNSIIKTIQPR

SEQ ID NO: 16601 - protein, 12 aa, Severe acute respiratory syndrome coronavirus 2
  REGION 1..12: note = Table B: HLA-DRB1*04:04L HLA-DQA1*01:01-B1*05:01L HLA-DRB1*11:01L HLA-DRB3*01:01L HLA-DRB1*10:01L HLA-DRB1*08:03L
SIIKTIQPRVEK

SEQ ID NO: 16602 - protein, 12 aa, Severe acute respiratory syndrome coronavirus 2
  REGION 1..12: note = Table B: HLA-DRB1*04:04L HLA-DRB1*01:02L HLA-DRB1*08:04L HLA-DRB3*02:01L HLA-DPA1*01:03-B1*03:01L HLA-DRB1*11:03L HLA-DQA1*01:01-B1*05:01L HLA-DRB1*08:01L HLA-DPA1*02:01-B1*13:01L HLA-DPA1*01:03-B1*104:01L
  REGION 1..12: note = CONT. FROM ABOVE: HLA-DRB1*07:01L HLA-DRB1*04:08L HLA-DRB1*08:03 L HLA-DRB1*15:03L
IRSVYPVASPNE

SEQ ID NO: 16603 - protein, 14 aa, Severe acute respiratory syndrome coronavirus 2
  REGION 1..14: note = Table B: HLA-DRB1*04:04L HLA-DRB1*01:02L HLA-DPA1*01:03-B1*03:01L HLA-DPA1*02:01-B1*13:01L HLA-DRB1*04:08L HLA-DRB1*15:03L
RSVYPVASPNECNQ

SEQ ID NO: 16604 - protein, 14 aa, Severe acute respiratory syndrome coronavirus 2
  REGION 1..14: note = Table B: HLA-DRB1*04:04L HLA-DRB1*08:77L HLA-DQA1*01:01-B1*05:01L HLA-DPA1*01:03-B1*04:01L HLA-DRB1*04:10L HLA-DRB1*09:01L HLA-DPA1*01:03-B1*104:01L HLA-DRB1*10:01L
NDNLLEILQKEKVN

SEQ ID NO: 16605 - protein, 14 aa, Severe acute respiratory syndrome coronavirus 2
  REGION 1..14: note = Table B: HLA-DRB1*04:04L HLA-DRB1*03:01L HLA-DRB1*11:04L HLA-DRB1*14:02L HLA-DQA1*05:05-B1*03:19L HLA-DRB3*01:01L HLA-DRB1*04:08L
EILQKEKVNINIVG

SEQ ID NO: 16606 - protein, 13 aa, Severe acute respiratory syndrome coronavirus 2
  REGION 1..13: note = Table B: HLA-DRB1*04:04L HLA-DRB1*04:05L HLA-DRB1*14:54L HLA-DRB1*04:08L
VNINIVGDFKLNE

SEQ ID NO: 16607 - protein, 11 aa, Severe acute respiratory syndrome coronavirus 2
  REGION 1..11: note = Table B: HLA-DRB1*04:04L HLA-DRB1*08:04L HLA-DRB1*11:04L HLA-DRB1*08:01L HLA-DRB1*04:10L HLA-DRB3*01:01L HLA-DRB1*08:03L
FVETVKGLDYK

SEQ ID NO: 16608 - protein, 14 aa, Severe acute respiratory syndrome coronavirus 2
  REGION 1..14: note = Table B: HLA-DRB1*04:04L HLA-DRB1*04:05L
KQIVESCGNFKVTK

SEQ ID NO: 16609 - protein, 13 aa, Severe acute respiratory syndrome coronavirus 2
  REGION 1..13: note = Table B: HLA-DRB1*04:04L HLA-DQA1*01:01-B1*05:01L HLA-DRB1*04:10L HLA-DRB1*04:08L
IGEQKSILSPLYA

SEQ ID NO: 16610 - protein, 14 aa, Severe acute respiratory syndrome coronavirus 2
  REGION 1..14: note = Table B: HLA-DRB1*04:04L HLA-DPA1*01:03-B1*02:01L
VRSIFSRTLETAQN

SEQ ID NO: 16611 - protein, 15 aa, Severe acute respiratory syndrome coronavirus 2
  REGION 1..15: note = Table B: HLA-DRB1*04:04L HLA-DPA1*03:01-B1*105:01L HLA-DQA1*05:05-B1*03:01L
NSVRVLQKAAITILD

SEQ ID NO: 16612 - protein, 15 aa, Severe acute respiratory syndrome coronavirus 2
  REGION 1..15: note = Table B: HLA-DRB1*04:04L HLA-DRB3*02:01L HLA-DPA1*03:01-B1*04:02L HLA-DRB1*11:03L HLA-DRB1*14:02L HLA-DRB1*08:01L HLA-DRB3*01:01L
SVRVLQKAAITILDG

SEQ ID NO: 16613 - protein, 12 aa, Severe acute respiratory syndrome coronavirus 2
  REGION 1..12: note = Table B: HLA-DRB1*04:04L HLA-DRB1*08:04L HLA-DRB3*01:01L HLA-DPA1*01:03-B1*02:01L
NIFGTVYEKLKP

SEQ ID NO: 16614 - protein, 12 aa, Severe acute respiratory syndrome coronavirus 2
  REGION 1..12: note = Table B: HLA-DRB1*04:04L HLA-DRB3*02:01L HLA-DRB1*11:03L HLA-DRB3*01:01L HLA-DRB1*07:01L HLA-DRB1*08:03L
RDGWEIVKFIST

SEQ ID NO: 16615 - protein, 14 aa, Severe acute respiratory syndrome coronavirus 2
  REGION 1..14: note = Table B: HLA-DRB1*04:04L HLA-DPA1*02:01-B1*13:01L HLA-DPA1*01:03-B1*02:01L
IKESVQTFFKLVNK

SEQ ID NO: 16616 - protein, 15 aa, Severe acute respiratory syndrome coronavirus 2
  REGION 1..15: note = Table B: HLA-DRB1*04:04L HLA-DPA1*01:03-B1*104:01L
KALNLGETFVTHSKG

SEQ ID NO: 16617 - protein, 14 aa, Severe acute respiratory syndrome coronavirus 2
  REGION 1..14: note = Table B: HLA-DRB1*04:04L HLA-DRB1*04:05L HLA-DQA1*01:02-B1*06:02L HLA-DRB1*14:01L HLA-DQA1*03:01-B1*03:02L HLA-DQA1*01:03-B1*06:01L
PKEIIFLEGETLPT

SEQ ID NO: 16618 - protein, 14 aa, Severe acute respiratory syndrome coronavirus 2
  REGION 1..14: note = Table B: HLA-DRB1*04:04L HLA-DQA1*01:02-B1*06:02L
DERIDKVLNEKCSA

SEQ ID NO: 16619 - protein, 12 aa, Severe acute respiratory syndrome coronavirus 2
  REGION 1..12: note = Table B: HLA-DRB1*04:04L HLA-DRB1*01:02L HLA-DRB1*14:01L HLA-DRB1*15:03L
YGTEDDYQGKPL

SEQ ID NO: 16620 - protein, 13 aa, Severe acute respiratory syndrome coronavirus 2
  REGION 1..13: note = Table B: HLA-DRB1*04:04L HLA-DRB1*04:08L
QTIVEVQPQLEME

SEQ ID NO: 16621 - protein, 14 aa, Severe acute respiratory syndrome coronavirus 2
  REGION 1..14: note = Table B: HLA-DRB1*04:04L HLA-DRB1*11:03L HLA-DRB1*11:01L HLA-DRB1*04:10L HLA-DRB3*01:01L HLA-DPA1*01:03-B1*02:01L HLA-DRB1*08:03L
VQTIEVNSFSGYLK

SEQ ID NO: 16622 - protein, 15 aa, Severe acute respiratory syndrome coronavirus 2
  REGION 1..15: note = Table B: HLA-DRB1*04:04L HLA-DRB1*09:01L
IEVNSFSGYLKLTDN

SEQ ID NO: 16623 - protein, 12 aa, Severe acute respiratory syndrome coronavirus 2
  REGION 1..12: note = Table B: HLA-DRB1*04:04L HLA-DRB3*02:01L HLA-DRB1*11:03L HLA-DRB1*11:04L HLA-DRB1*08:01L HLA-DRB1*09:01L HLA-DRB1*12:02L HLA-DRB3*01:01L
GYLKLTDNVYIK

SEQ ID NO: 16624 - protein, 13 aa, Severe acute respiratory syndrome coronavirus 2
  REGION 1..13: note = Table B: HLA-DRB1*04:04L HLA-DRB1*11:03L
NVYIKNADIVEEA

SEQ ID NO: 16625 - protein, 13 aa, Severe acute respiratory syndrome coronavirus 2
  REGION 1..13: note = Table B: HLA-DRB1*04:04L HLA-DRB3*01:01L
PTVVVNAANVYLK

SEQ ID NO: 16626 - protein, 15 aa, Severe acute respiratory syndrome coronavirus 2
  REGION 1..15: note = Table B: HLA-DRB1*04:04L HLA-DPA1*01:03-B1*03:01L HLA-DQA1*01:01-B1*05:01L HLA-DRB3*01:01L HLA-DPA1*02:01-B1*13:01L HLA-DPA1*01:03-B1*104:01L
VVVNAANVYLKHGGG

SEQ ID NO: 16627 - protein, 14 aa, Severe acute respiratory syndrome coronavirus 2
  REGION 1..14: note = Table B: HLA-DRB1*04:04L HLA-DPA1*03:01-B1*04:02L HLA-DRB1*15:01L
AANVYLKHGGGVAG

SEQ ID NO: 16628 - protein, 11 aa, Severe acute respiratory syndrome coronavirus 2
  REGION 1..11: note = Table B: HLA-DRB1*04:04L HLA-DRB1*04:05L HLA-DRB1*01:01L HLA-DRB1*03:01L HLA-DRB1*11:01L HLA-DRB5*01:01L HLA-DRB1*04:10L HLA-DPA1*01:03-B1*04:02L HLA-DRB3*01:01L HLA-DPA1*01:03-B1*02:01L HLA-DRB1*04:08L
YIATNGPLKVG

SEQ ID NO: 16629 - protein, 12 aa, Severe acute respiratory syndrome coronavirus 2
  REGION 1..12: note = Table B: HLA-DRB1*04:04L HLA-DRB1*01:02L HLA-DRB1*14:01L HLA-DRB1*12:02L HLA-DPA1*03:01-B1*105:01L HLA-DQA1*05:05-B1*03:01L HLA-DRB1*04:08L
GEDIQLLKSAYE

SEQ ID NO: 16630 - protein, 14 aa, Severe acute respiratory syndrome coronavirus 2
  REGION 1..14: note = Table B: HLA-DRB1*04:04L
DIQLLKSAYENFNQ

SEQ ID NO: 16631 - protein, 14 aa, Severe acute respiratory syndrome coronavirus 2
  REGION 1..14: note = Table B: HLA-DRB1*04:04L HLA-DRB1*08:01L HLA-DPA1*01:03-B1*02:01L
IQLLKSAYENFNQH

SEQ ID NO: 16632 - protein, 11 aa, Severe acute respiratory syndrome coronavirus 2
  REGION 1..11: note = Table B: HLA-DRB1*04:04L HLA-DRB1*08:04L HLA-DRB5*01:01L HLA-DRB1*13:01L HLA-DRB1*04:10L HLA-DRB1*12:02L HLA-DRB3*01:01L HLA-DRB1*14:54L HLA-DRB1*08:02L HLA-DRB1*15:01L
GIFGADPIHSL

SEQ ID NO: 16633 - protein, 11 aa, Severe acute respiratory syndrome coronavirus 2
  REGION 1..11: note = Table B: HLA-DRB1*04:04L HLA-DRB1*08:04L HLA-DRB1*14:54L HLA-DPA1*01:03-B1*02:01L
IFGADPIHSLR

SEQ ID NO: 16634 - protein, 13 aa, Severe acute respiratory syndrome coronavirus 2
  REGION 1..13: note = Table B: HLA-DRB1*04:04L HLA-DRB1*11:03L HLA-DRB1*09:01L HLA-DRB3*01:01L HLA-DRB1*14:54L
NVYLAVFDKNLYD

SEQ ID NO: 16635 - protein, 14 aa, Severe acute respiratory syndrome coronavirus 2
  REGION 1..14: note = Table B: HLA-DRB1*04:04L HLA-DRB1*08:01L HLA-DPA1*01:03-B1*02:01L
DKLVSSFLEMKSEK

SEQ ID NO: 16636 - protein, 11 aa, Severe acute respiratory syndrome coronavirus 2
  REGION 1..11: note = Table B: HLA-DRB1*04:04L HLA-DRB1*01:02L HLA-DRB1*14:01L HLA-DRB1*12:01L HLA-DRB1*10:01L HLA-DRB1*08:03L
SSFLEMKSEKQ

SEQ ID NO: 16637 - protein, 14 aa, Severe acute respiratory syndrome coronavirus 2
  REGION 1..14: note = Table B: HLA-DRB1*04:04L HLA-DRB1*01:01L HLA-DRB1*03:01L HLA-DRB1*07:01L
VEQKIAEIPKEEVK

SEQ ID NO: 16638 - protein, 14 aa, Severe acute respiratory syndrome coronavirus 2
  REGION 1..14: note = Table B: HLA-DRB1*04:04L HLA-DRB1*03:01L HLA-DRB1*08:02L
EQKIAEIPKEEVKP

SEQ ID NO: 16639 - protein, 12 aa, Severe acute respiratory syndrome coronavirus 2
  REGION 1..12: note = Table B: HLA-DRB1*04:04L HLA-DRB1*04:05L HLA-DRB1*01:02L HLA-DRB1*08:04L HLA-DRB3*02:01L HLA-DRB1*11:03L HLA-DRB1*11:04L HLA-DRB1*08:01L HLA-DRB1*11:01L HLA-DRB3*01:01L HLA-DQA1*05:05-B1*03:01L HLA-DRB1*04:08L
IAEIPKEEVKPF

SEQ ID NO: 16640 - protein, 16 aa, Severe acute respiratory syndrome coronavirus 2
  REGION 1..16: note = Table B: HLA-DRB1*04:04L
TENLLLYIDINGNLHP

SEQ ID NO: 16641 - protein, 17 aa, Severe acute respiratory syndrome coronavirus 2
  REGION 1..17: note = Table B: HLA-DRB1*04:04L HLA-DRB3*02:01L HLA-DPA1*01:02-B1*04:01L
HPDSATLVSDIDITFLK

SEQ ID NO: 16642 - protein, 15 aa, Severe acute respiratory syndrome coronavirus 2
  REGION 1..15: note = Table B: HLA-DRB1*04:04L
IDITFLKKDAPYIVG

SEQ ID NO: 16643 - protein, 13 aa, Severe acute respiratory syndrome coronavirus 2
  REGION 1..13: note = Table B: HLA-DRB1*04:04L HLA-DRB1*11:01L HLA-DRB4*02:01NL
EGVLTAVVIPTKK

SEQ ID NO: 16644 - protein, 14 aa, Severe acute respiratory syndrome coronavirus 2
  REGION 1..14: note = Table B: HLA-DRB1*04:04L HLA-DRB1*08:04L HLA-DRB1*11:03L HLA-DRB1*11:04L HLA-DRB1*08:01L HLA-DRB1*04:10L HLA-DRB1*14:54L HLA-DRB1*14:17L HLA-DRB1*07:01L HLA-DRB1*08:03L
AKALRKVPTDNYIT

SEQ ID NO: 16645 - protein, 11 aa, Severe acute respiratory syndrome coronavirus 2
  REGION 1..11: note = Table B: HLA-DRB1*04:04L HLA-DRB1*04:05L HLA-DRB1*01:01L HLA-DRB1*08:77L HLA-DPA1*03:01-B1*04:02L HLA-DRB1*11:03L HLA-DRB1*11:04L HLA-DRB1*08:01L HLA-DRB1*04:10L HLA-DRB1*12:02L HLA-DRB1*14:54L HLA-DPA1*01:02-B1*04:01L HLA-DRB1*07:01L
  REGION 1..11: note = CONT. FROM ABOVE: HLA-DRB1*10:01L HLA-DRB1*08:03L
ITTYPGQGLNG

SEQ ID NO: 16646 - protein, 13 aa, Severe acute respiratory syndrome coronavirus 2
  REGION 1..13: note = Table B: HLA-DRB1*04:04L HLA-DRB1*08:04L HLA-DRB1*11:04L HLA-DRB1*04:10L HLA-DRB3*01:01L
LNGYTVEEAKTVL

SEQ ID NO: 16647 - protein, 11 aa, Severe acute respiratory syndrome coronavirus 2
  REGION 1..11: note = Table B: HLA-DRB1*04:04L HLA-DRB1*11:03L HLA-DRB1*11:04L HLA-DRB1*12:02L HLA-DRB3*01:01L HLA-DRB1*14:54L HLA-DRB1*04:08L
YTVEEAKTVLK

SEQ ID NO: 16648 - protein, 11 aa, Severe acute respiratory syndrome coronavirus 2
  REGION 1..11: note = Table B: HLA-DRB1*04:04L
FYILPSIISNE

SEQ ID NO: 16649 - protein, 12 aa, Severe acute respiratory syndrome coronavirus 2
  REGION 1..12: note = Table B: HLA-DRB1*04:04L HLA-DRB1*08:04L HLA-DPA1*01:03-B1*03:01L HLA-DRB1*14:01L HLA-DQA1*01:01-B1*05:01L HLA-DRB1*08:01L HLA-DQA1*01-B1*05L HLA-DQA1*05:05-B1*03:19L HLA-DRB1*04:10L
  REGION 1..12: note = CONT. FROM ABOVE: HLA-DPA1*02:01-B1*13:01L HLA-DRB1*14:54L HLA-D RB1*15:03L
YILPSIISNEKQ

SEQ ID NO: 16650 - protein, 13 aa, Severe acute respiratory syndrome coronavirus 2
  REGION 1..13: note = Table B: HLA-DRB1*04:04L HLA-DRB1*01:01L HLA-DRB1*08:04L HLA-DRB1*11:04L HLA-DRB1*14:02L HLA-DRB1*08:01L HLA-DRB3*01:01L HLA-DRB1*14:54L HLA-DRB1*10:01L HLA-DRB1*08:03L HLA-DRB1*15:01L
KQEILGTVSWNLR

SEQ ID NO: 16651 - protein, 13 aa, Severe acute respiratory syndrome coronavirus 2
  REGION 1..13: note = Table B: HLA-DRB1*04:04L HLA-DPA1*02:01-B1*13:01L HLA-DPA1*01:02-B1*04:01L
LREMLAHAEETRK

SEQ ID NO: 16652 - protein, 14 aa, Severe acute respiratory syndrome coronavirus 2
  REGION 1..14: note = Table B: HLA-DRB1*04:04L HLA-DRB1*08:04L HLA-DRB1*13:01L
TKAIVSTIQRKYKG

SEQ ID NO: 16653 - protein, 12 aa, Severe acute respiratory syndrome coronavirus 2
  REGION 1..12: note = Table B: HLA-DRB1*04:04L
KIQEGVVDYGAR

SEQ ID NO: 16654 - protein, 13 aa, Severe acute respiratory syndrome coronavirus 2
  REGION 1..13: note = Table B: HLA-DRB1*04:04L HLA-DRB1*04:05L HLA-DRB4*03:01NL HLA-DRB1*04:10L HLA-DRB1*16:01L HLA-DRB1*04:08L
KTTVASLINTLND

SEQ ID NO: 16655 - protein, 13 aa, Severe acute respiratory syndrome coronavirus 2
  REGION 1..13: note = Table B: HLA-DRB1*04:04L HLA-DRB1*12:01L HLA-DRB1*04:08L
VASLINTLNDLNE

SEQ ID NO: 16656 - protein, 14 aa, Severe acute respiratory syndrome coronavirus 2
  REGION 1..14: note = Table B: HLA-DRB1*04:04L HLA-DPA1*01:03-B1*02:01L
NETLVTMPLGYVTH

SEQ ID NO: 16657 - protein, 14 aa, Severe acute respiratory syndrome coronavirus 2
  REGION 1..14: note = Table B: HLA-DRB1*04:04L HLA-DRB1*04:05L HLA-DRB1*08:04L HLA-DPA1*01:03-B1*02:01L
ETLVTMPLGYVTHG

SEQ ID NO: 16658 - protein, 16 aa, Severe acute respiratory syndrome coronavirus 2
  REGION 1..16: note = Table B: HLA-DRB1*04:04L HLA-DRB1*01:01L HLA-DRB1*11:04L HLA-DRB1*07:01L
VTHGLNLEEAARYMRS

SEQ ID NO: 16659 - protein, 14 aa, Severe acute respiratory syndrome coronavirus 2
  REGION 1..14: note = Table B: HLA-DRB1*04:04L HLA-DRB3*02:01L
SPDAVTAYNGYLTS

SEQ ID NO: 16660 - protein, 14 aa, Severe acute respiratory syndrome coronavirus 2
  REGION 1..14: note = Table B: HLA-DRB1*04:04L HLA-DQA1*05:05-B1*03:19L
TAYNGYLTSSSKTP

SEQ ID NO: 16661 - protein, 13 aa, Severe acute respiratory syndrome coronavirus 2
  REGION 1..13: note = Table B: HLA-DRB1*04:04L HLA-DPA1*01:03-B1*03:01L HLA-DRB1*11:01L HLA-DPA1*02:01-B1*13:01L HLA-DRB1*07:01L
YNGYLTSSSKTPE

SEQ ID NO: 16662 - protein, 12 aa, Severe acute respiratory syndrome coronavirus 2
  REGION 1..12: note = Table B: HLA-DRB1*04:04L HLA-DPA1*01:03-B1*03:01L HLA-DPA1*03:01-B1*04:02L HLA-DQA1*01:01-B1*05:01L HLA-DRB1*11:01L HLA-DRB5*01:01L HLA-DRB1*09:01L HLA-DPA1*01:03-B1*04:02L HLA-DPA1*02:01-B1*13:01L
  REGION 1..12: note = CONT. FROM ABOVE: HLA-DRB1*07:01L HLA-DRB1*08:02L
GYLTSSSKTPEE

SEQ ID NO: 16663 - protein, 12 aa, Severe acute respiratory syndrome coronavirus 2
  REGION 1..12: note = Table B: HLA-DRB1*04:04L HLA-DPA1*02:01-B1*13:01L
YLTSSSKTPEEH

SEQ ID NO: 16664 - protein, 13 aa, Severe acute respiratory syndrome coronavirus 2
  REGION 1..13: note = Table B: HLA-DRB1*04:04L HLA-DRB1*08:04L HLA-DRB1*04:10L HLA-DRB1*04:08L
ETISLAGSYKDWS

SEQ ID NO: 16665 - protein, 11 aa, Severe acute respiratory syndrome coronavirus 2
  REGION 1..11: note = Table B: HLA-DRB1*04:04L HLA-DRB1*08:04L HLA-DPA1*01:03-B1*03:01L HLA-DRB1*11:04L HLA-DRB1*08:01L HLA-DRB1*04:10L HLA-DRB1*12:02L HLA-DRB1*14:54L HLA-DRB1*14:17L HLA-DRB1*07:01L HLA-DRB1*04:08L
VYYTSNPTTFH

SEQ ID NO: 16666 - protein, 12 aa, Severe acute respiratory syndrome coronavirus 2
  REGION 1..12: note = Table B: HLA-DRB1*04:04L HLA-DRB1*04:05L HLA-DQA1*01:02-B1*06:02L HLA-DRB1*01:02L HLA-DRB1*08:04L HLA-DRB1*11:04L HLA-DRB1*08:01L HLA-DRB1*11:01L HLA-DRB1*16:01L
TFDNLKTLLSLR

SEQ ID NO: 16667 - protein, 12 aa, Severe acute respiratory syndrome coronavirus 2
  REGION 1..12: note = Table B: HLA-DRB1*04:04L HLA-DQA1*01:02-B1*06:02L HLA-DRB1*01:02L HLA-DRB4*03:01NL HLA-DRB1*08:04L HLA-DRB1*14:01L HLA-DRB1*11:04L HLA-DRB1*08:01L HLA-DRB1*04:10L HLA-DRB1*16:01L HLA-DQA1*02:01-B1*03:03L HLA-DRB1*15:03L
FDNLKTLLSLRE

SEQ ID NO: 16668 - protein, 12 aa, Severe acute respiratory syndrome coronavirus 2
  REGION 1..12: note = Table B: HLA-DRB1*04:04L HLA-DRB1*08:04L HLA-DPA1*03:01-B1*04:02L HLA-DPA1*02:01-B1*13:01L
FTTVDNINLHTQ

SEQ ID NO: 16669 - protein, 14 aa, Severe acute respiratory syndrome coronavirus 2
  REGION 1..14: note = Table B: HLA-DRB1*04:04L HLA-DRB1*01:02L HLA-DQA1*05:05-B1*03:01L
HTQVVDMSMTYGQQ

SEQ ID NO: 16670 - protein, 15 aa, Severe acute respiratory syndrome coronavirus 2
  REGION 1..15: note = Table B: HLA-DRB1*04:04L HLA-DRB1*08:04L HLA-DRB1*03:01L HLA-DRB1*08:01L HLA-DRB1*11:01L HLA-DRB4*02:01NL HLA-DRB4*01:01L HLA-DPA1*01:03-B1*04:01L HLA-DRB3*01:01L HLA-DPA1*01:03-B1*104:01L HLA-DPA1*01:02-B1*04:01L
  REGION 1..15: note = CONT. FROM ABOVE: HLA-DRB1*10:01L HLA-DRB1*08:03L
VVDMSMTYGQQFGPT

SEQ ID NO: 16671 - protein, 14 aa, Severe acute respiratory syndrome coronavirus 2
  REGION 1..14: note = Table B: HLA-DRB1*04:04L
AFEYYHTTDPSFLG

SEQ ID NO: 16672 - protein, 14 aa, Severe acute respiratory syndrome coronavirus 2
  REGION 1..14: note = Table B: HLA-DRB1*04:04L HLA-DRB1*04:08L
YPQVNGLTSIKWAD

SEQ ID NO: 16673 - protein, 14 aa, Severe acute respiratory syndrome coronavirus 2
  REGION 1..14: note = Table B: HLA-DRB1*04:04L
PQVNGLTSIKWADN

SEQ ID NO: 16674 - protein, 18 aa, Severe acute respiratory syndrome coronavirus 2
  REGION 1..18: note = Table B: HLA-DRB1*04:04L HLA-DRB3*02:01L HLA-DPA1*03:01-B1*04:02L HLA-DRB1*11:02L HLA-DPA1*01:03-B1*04:01L HLA-DQA1*05:05-B1*03:116L HLA-DPA1*01:03-B1*104:01L HLA-DRB1*08:02L
NPPALQDAYYRARAGEAA

SEQ ID NO: 16675 - protein, 13 aa, Severe acute respiratory syndrome coronavirus 2
  REGION 1..13: note = Table B: HLA-DRB1*04:04L HLA-DPA1*01:03-B1*104:01L HLA-DRB1*07:01L
YRARAGEAANFCA

SEQ ID NO: 16676 - protein, 12 aa, Severe acute respiratory syndrome coronavirus 2
  REGION 1..12: note = Table B: HLA-DRB1*04:04L HLA-DPA1*02:01-B1*13:01L
KTVGELGDVRET

SEQ ID NO: 16677 - protein, 15 aa, Severe acute respiratory syndrome coronavirus 2
  REGION 1..15: note = Table B: HLA-DRB1*04:04L HLA-DRB1*08:04L HLA-DQA1*01:01-B1*05:01L HLA-DPA1*01:03-B1*04:01L HLA-DPA1*01:03-B1*04:02L HLA-DRB3*01:01L HLA-DRB1*07:01L
GDVRETMSYLFQHAN

SEQ ID NO: 16678 - protein, 15 aa, Severe acute respiratory syndrome coronavirus 2
  REGION 1..15: note = Table B: HLA-DRB1*04:04L
GKQATKYLVQQESPF

SEQ ID NO: 16679 - protein, 13 aa, Severe acute respiratory syndrome coronavirus 2
  REGION 1..13: note = Table B: HLA-DRB1*04:04L HLA-DRB1*08:77L HLA-DRB1*11:03L HLA-DPA1*01:03-B1*04:02L HLA-DRB3*01:01L HLA-DRB1*10:01L
ATKYLVQQESPFV

SEQ ID NO: 16680 - protein, 13 aa, Severe acute respiratory syndrome coronavirus 2
  REGION 1..13: note = Table B: HLA-DRB1*04:04L HLA-DRB1*08:77L HLA-DRB1*11:03L HLA-DRB1*11:04L HLA-DRB4*01:01L HLA-DRB3*01:01L HLA-DRB1*08:03L
TKYLVQQESPFVM

SEQ ID NO: 16681 - protein, 13 aa, Severe acute respiratory syndrome coronavirus 2
  REGION 1..13: note = Table B: HLA-DRB1*04:04L HLA-DPA1*03:01-B1*04:02L HLA-DQA1*05:05-B1*03:01L HLA-DRB1*10:01L
GHYKHITSKETLY

SEQ ID NO: 16682 - protein, 14 aa, Severe acute respiratory syndrome coronavirus 2
  REGION 1..14: note = Table B: HLA-DRB1*04:04L HLA-DRB1*08:04L HLA-DRB1*11:04L HLA-DRB1*08:01L HLA-DRB3*01:01L
KHITSKETLYCIDG

SEQ ID NO: 16683 - protein, 17 aa, Severe acute respiratory syndrome coronavirus 2
  REGION 1..17: note = Table B: HLA-DRB1*04:04L HLA-DRB3*02:01L HLA-DRB1*11:04L HLA-DRB1*07:01L HLA-DRB1*08:03L
IDGALLTKSSEYKGPIT

SEQ ID NO: 16684 - protein, 16 aa, Severe acute respiratory syndrome coronavirus 2
  REGION 1..16: note = Table B: HLA-DRB1*04:04L HLA-DRB3*02:01L HLA-DRB1*11:03L HLA-DRB1*14:02L HLA-DRB1*09:01L HLA-DRB3*01:01L HLA-DPA1*01:03-B1*02:01L HLA-DRB1*07:01L HLA-DRB1*08:02L
GPITDVFYKENSYTTT

SEQ ID NO: 16685 - protein, 11 aa, Severe acute respiratory syndrome coronavirus 2
  REGION 1..11: note = Table B: HLA-DRB1*04:04L HLA-DRB1*08:04L HLA-DRB1*04:08L
YTTTIKPVTYK

SEQ ID NO: 16686 - protein, 11 aa, Severe acute respiratory syndrome coronavirus 2
  REGION 1..11: note = Table B: HLA-DRB1*04:04L HLA-DRB1*01:02L HLA-DRB1*08:04L HLA-DRB3*02:01L HLA-DRB1*11:03L HLA-DRB1*11:04L HLA-DRB1*14:02L HLA-DRB1*10:01L HLA-DRB1*04:08L HLA-DRB1*08:03L HLA-DRB1*15:03L
IDLVPNQPYPN

SEQ ID NO: 16687 - protein, 14 aa, Severe acute respiratory syndrome coronavirus 2
  REGION 1..14: note = Table B: HLA-DRB1*04:04L HLA-DRB1*11:02L
LVPNQPYPNASFDN

SEQ ID NO: 16688 - protein, 15 aa, Severe acute respiratory syndrome coronavirus 2
  REGION 1..15: note = Table B: HLA-DRB1*04:04L HLA-DRB1*08:04L HLA-DRB3*02:01L HLA-DRB1*09:01L
VPNQPYPNASFDNFK

SEQ ID NO: 16689 - protein, 14 aa, Severe acute respiratory syndrome coronavirus 2
  REGION 1..14: note = Table B: HLA-DRB1*04:04L HLA-DRB1*11:04L HLA-DRB3*01:01L
SRELKVTFFPDLNG

SEQ ID NO: 16690 - protein, 14 aa, Severe acute respiratory syndrome coronavirus 2
  REGION 1..14: note = Table B: HLA-DRB1*04:04L HLA-DRB3*01:01L
HVNNATNKATYKPN

SEQ ID NO: 16691 - protein, 14 aa, Severe acute respiratory syndrome coronavirus 2
  REGION 1..14: note = Table B: HLA-DRB1*04:04L HLA-DPA1*01:03-B1*03:01L HLA-DRB1*14:01L HLA-DRB1*04:10L HLA-DPA1*01:03-B1*04:02L HLA-DPA1*02:01-B1*13:01L
TTEVVGDIILKPAN

SEQ ID NO: 16692 - protein, 11 aa, Severe acute respiratory syndrome coronavirus 2
  REGION 1..11: note = Table B: HLA-DRB1*04:04L HLA-DRB1*11:04L HLA-DRB1*04:10L HLA-DRB1*14:54L HLA-DRB1*04:08L
IILKPANNSLK

SEQ ID NO: 16693 - protein, 17 aa, Severe acute respiratory syndrome coronavirus 2
  REGION 1..17: note = Table B: HLA-DRB1*04:04L
ITEEVGHTDLMAAYVDN

SEQ ID NO: 16694 - protein, 12 aa, Severe acute respiratory syndrome coronavirus 2
  REGION 1..12: note = Table B: HLA-DRB1*04:04L HLA-DQA1*01:02-B1*06:02L HLA-DRB1*01:02L HLA-DRB1*12:01L HLA-DPA1*03:01-B1*105:01L HLA-DQA1*01:03-B1*06:01L HLA-DRB1*04:08L
LMAAYVDNSSLT

SEQ ID NO: 16695 - protein, 12 aa, Severe acute respiratory syndrome coronavirus 2
  REGION 1..12: note = Table B: HLA-DRB1*04:04L HLA-DQA1*01:02-B1*06:02L HLA-DRB1*08:01L HLA-DRB1*04:10L HLA-DPA1*02:01-B1*13:01L HLA-DRB1*08:03L
YVDNSSLTIKKP

SEQ ID NO: 16696 - protein, 14 aa, Severe acute respiratory syndrome coronavirus 2
  REGION 1..14: note = Table B: HLA-DRB1*04:04L HLA-DRB1*03:01L HLA-DRB1*11:03L HLA-DRB1*11:01L HLA-DRB1*13:01L
NSSLTIKKPNELSR

SEQ ID NO: 16697 - protein, 13 aa, Severe acute respiratory syndrome coronavirus 2
  REGION 1..13: note = Table B: HLA-DRB1*04:04L HLA-DQA1*01:02-B1*06:02L HLA-DRB1*11:04L HLA-DRB1*08:01L HLA-DRB1*04:10L HLA-DQA1*03:01-B1*03:02L HLA-DQA1*02:01-B1*03:03L HLA-DRB1*15:03L
LSRVLGLKTLATH

SEQ ID NO: 16698 - protein, 14 aa, Severe acute respiratory syndrome coronavirus 2
  REGION 1..14: note = Table B: HLA-DRB1*04:04L
SVPWDTIANYAKPF

SEQ ID NO: 16699 - protein, 13 aa, Severe acute respiratory syndrome coronavirus 2
  REGION 1..13: note = Table B: HLA-DRB1*04:04L HLA-DRB1*11:03L HLA-DRB1*11:04L HLA-DRB1*11:01L HLA-DRB1*04:10L HLA-DRB3*01:01L HLA-DRB1*07:01L HLA-DRB1*08:03L
DTIANYAKPFLNK

SEQ ID NO: 16700 - protein, 13 aa, Severe acute respiratory syndrome coronavirus 2
  REGION 1..13: note = Table B: HLA-DRB1*04:04L HLA-DRB1*01:01L HLA-DRB1*08:77L HLA-DPA1*01:03-B1*03:01L HLA-DRB1*11:03L HLA-DRB1*11:04L HLA-DRB1*12:02L HLA-DRB3*01:01L HLA-DPA1*03:01-B1*105:01L HLA-DRB1*14:54L HLA-DRB1*10:01L
SRIKASMPTTIAK

SEQ ID NO: 16701 - protein, 15 aa, Severe acute respiratory syndrome coronavirus 2
  REGION 1..15: note = Table B: HLA-DRB1*04:04L
IKASMPTTIAKNTVK

SEQ ID NO: 16702 - protein, 15 aa, Severe acute respiratory syndrome coronavirus 2
  REGION 1..15: note = Table B: HLA-DRB1*04:04L HLA-DRB1*03:01L HLA-DRB1*11:01L HLA-DRB1*13:01L
MPTTIAKNTVKSVGK

SEQ ID NO: 16703 - protein, 14 aa, Severe acute respiratory syndrome coronavirus 2
  REGION 1..14: note = Table B: HLA-DRB1*04:04L HLA-DRB1*01:02L HLA-DRB1*15:03L
TAALGVLMSNLGMP

SEQ ID NO: 16704 - protein, 13 aa, Severe acute respiratory syndrome coronavirus 2
  REGION 1..13: note = Table B: HLA-DRB1*04:04L HLA-DRB1*08:04L HLA-DRB1*08:01L HLA-DRB1*11:01L HLA-DRB5*01:01L HLA-DRB4*01:01L HLA-DRB1*04:10L HLA-DPA1*01:03-B1*04:02L HLA-DRB3*01:01L HLA-DRB1*10:01L
REGYLNSTNVTIA

SEQ ID NO: 16705 - protein, 13 aa, Severe acute respiratory syndrome coronavirus 2
  REGION 1..13: note = Table B: HLA-DRB1*04:04L HLA-DQA1*01:02-B1*06:02L HLA-DRB1*01:02L HLA-DRB1*12:01L HLA-DPA1*03:01-B1*105:01L HLA-DQA1*05:05-B1*03:01L HLA-DRB1*10:01L HLA-DRB1*04:08L
LSGLDSLDTYPSL

SEQ ID NO: 16706 - protein, 14 aa, Severe acute respiratory syndrome coronavirus 2
  REGION 1..14: note = Table B: HLA-DRB1*04:04L
IINLVQMAPISAMV

SEQ ID NO: 16707 - protein, 12 aa, Severe acute respiratory syndrome coronavirus 2
  REGION 1..12: note = Table B: HLA-DRB1*04:04L HLA-DRB1*04:05L HLA-DPA1*01:03-B1*03:01L HLA-DRB1*04:10L HLA-DRB1*14:54L HLA-DRB1*10:01L HLA-DRB1*04:08L
LVQMAPISAMVR

SEQ ID NO: 16708 - protein, 15 aa, Severe acute respiratory syndrome coronavirus 2
  REGION 1..15: note = Table B: HLA-DRB1*04:04L HLA-DRB3*02:01L HLA-DQA1*05:05-B1*03:116L HLA-DRB1*10:01L HLA-DRB1*15:01L
ASFYYVWKSYVHVVD

SEQ ID NO: 16709 - protein, 16 aa, Severe acute respiratory syndrome coronavirus 2
  REGION 1..16: note = Table B: HLA-DRB1*04:04L HLA-DRB1*15:01L
ISDEVARDLSLQFKRP

SEQ ID NO: 16710 - protein, 14 aa, Severe acute respiratory syndrome coronavirus 2
  REGION 1..14: note = Table B: HLA-DRB1*04:04L HLA-DRB1*08:01L HLA-DPA1*01:03-B1*04:01L HLA-DPA1*01:03-B1*04:02L HLA-DRB1*07:01L
DQSSYIVDSVTVKN

SEQ ID NO: 16711 - protein, 12 aa, Severe acute respiratory syndrome coronavirus 2
  REGION 1..12: note = Table B: HLA-DRB1*04:04L HLA-DRB1*04:05L HLA-DQA1*01:02-B1*06:02L HLA-DRB1*14:01L HLA-DRB1*08:01L HLA-DRB1*12:01L HLA-DQA1*02:01-B1*03:03L HLA-DRB1*15:01L
SIHLYFDKAGQK

SEQ ID NO: 16712 - protein, 12 aa, Severe acute respiratory syndrome coronavirus 2
  REGION 1..12: note = Table B: HLA-DRB1*04:04L HLA-DRB1*01:02L HLA-DRB1*08:01L HLA-DRB1*12:01L
LSHFVNLDNLRA

SEQ ID NO: 16713 - protein, 14 aa, Severe acute respiratory syndrome coronavirus 2
  REGION 1..14: note = Table B: HLA-DRB1*04:04L HLA-DRB1*04:05L HLA-DRB1*01:02L HLA-DRB1*08:04L HLA-DRB3*02:01L HLA-DQA1*01:01-B1*05:01L HLA-DRB1*08:01L HLA-DRB1*04:10L HLA-DRB1*04:08L
SAEVAVKMFDAYVN

SEQ ID NO: 16714 - protein, 14 aa, Severe acute respiratory syndrome coronavirus 2
  REGION 1..14: note = Table B: HLA-DRB1*04:04L HLA-DRB1*08:04L HLA-DRB3*02:01L HLA-DRB1*11:02L HLA-DRB1*11:04L HLA-DRB1*04:10L HLA-DQA1*05:05-B1*03:01L HLA-DRB1*04:08L HLA-DRB1*15:01L
VKMFDAYVNTFSST

SEQ ID NO: 16715 - protein, 11 aa, Severe acute respiratory syndrome coronavirus 2
  REGION 1..11: note = Table B: HLA-DRB1*04:04L HLA-DRB1*04:05L HLA-DQA1*01:02-B1*06:02L HLA-DRB1*01:02L HLA-DRB3*02:01L HLA-DPA1*01:03-B1*03:01L HLA-DRB1*14:01L HLA-DRB1*11:04L HLA-DQA1*05:05-B1*03:19L HLA-DRB1*04:10L
  REGION 1..11: note = CONT. FROM ABOVE: HLA-DPA1*01:03-B1*04:02L HLA-DRB1*14:54L HLA-D PA1*01:02-B1*04:01L HLA-DRB1*04:08L HLA-DRB1*15:03L
FSSTFNVPMEK

SEQ ID NO: 16716 - protein, 14 aa, Severe acute respiratory syndrome coronavirus 2
  REGION 1..14: note = Table B: HLA-DRB1*04:04L HLA-DRB1*01:01L HLA-DRB1*11:03L HLA-DRB1*11:04L HLA-DPA1*01:03-B1*04:01L HLA-DRB1*09:01L HLA-DPA1*01:03-B1*104:01L HLA-DRB1*10:01L HLA-DRB1*08:03L
LKTLVATAEAELAK

SEQ ID NO: 16717 - protein, 14 aa, Severe acute respiratory syndrome coronavirus 2
  REGION 1..14: note = Table B: HLA-DRB1*04:04L HLA-DRB1*03:01L HLA-DRB1*11:03L HLA-DRB1*11:04L HLA-DRB1*14:02L HLA-DRB1*08:01L HLA-DRB1*12:02L HLA-DRB3*01:01L HLA-DRB1*08:03L
AELAKNVSLDNVLS

SEQ ID NO: 16718 - protein, 16 aa, Severe acute respiratory syndrome coronavirus 2
  REGION 1..16: note = Table B: HLA-DRB1*04:04L HLA-DRB3*01:01L HLA-DRB1*07:01L
ISAARQGFVDSDVETK

SEQ ID NO: 16719 - protein, 13 aa, Severe acute respiratory syndrome coronavirus 2
  REGION 1..13: note = Table B: HLA-DRB1*04:04L HLA-DRB1*14:01L HLA-DPA1*02:01-B1*13:01L
ARHINAQVAKSHN

SEQ ID NO: 16720 - protein, 16 aa, Severe acute respiratory syndrome coronavirus 2
  REGION 1..16: note = Table B: HLA-DRB1*04:04L
LRKQIRSAAKKNNLPF

SEQ ID NO: 16721 - protein, 13 aa, Severe acute respiratory syndrome coronavirus 2
  REGION 1..13: note = Table B: HLA-DRB1*04:04L HLA-DRB1*04:05L HLA-DQA1*01:02-B1*06:02L HLA-DRB1*01:02L HLA-DPA1*01:03-B1*03:01L HLA-DPA1*02:01-B1*13:01L HLA-DRB1*16:01L
ATTRQVVNVVTTK

SEQ ID NO: 16722 - protein, 14 aa, Severe acute respiratory syndrome coronavirus 2
  REGION 1..14: note = Table B: HLA-DRB1*04:04L HLA-DRB3*02:01L HLA-DPA1*01:03-B1*03:01L HLA-DRB1*03:01L HLA-DRB1*11:02L HLA-DQA1*01-B1*05L HLA-DQA1*05:01-B1*02:01L HLA-DPA1*01:03-B1*04:01L HLA-DPA1*01:03-B1*04:02L
  REGION 1..14: note = CONT. FROM ABOVE: HLA-DPA1*01:03-B1*104:01L HLA-DRB1*07:01L HLA- DRB1*08:03L
GGKIVNNWLKQLIK

SEQ ID NO: 16723 - protein, 14 aa, Severe acute respiratory syndrome coronavirus 2
  REGION 1..14: note = Table B: HLA-DRB1*04:04L HLA-DPA1*03:01-B1*04:02L HLA-DRB1*14:02L HLA-DQA1*05:05-B1*03:19L HLA-DRB1*13:01L HLA-DPA1*01:03-B1*04:02L HLA-DPA1*03:01-B1*105:01L HLA-DPA1*01:03-B1*02:01L HLA-DPA1*01:03-B1*104:01L
  REGION 1..14: note = CONT. FROM ABOVE: HLA-DQA1*05:05-B1*03:01L HLA-DRB1*07:01L
ITPVHVMSKHTDFS

SEQ ID NO: 16724 - protein, 12 aa, Severe acute respiratory syndrome coronavirus 2
  REGION 1..12: note = Table B: HLA-DRB1*04:04L HLA-DQA1*01:02-B1*06:02L HLA-DRB1*03:01L HLA-DRB1*11:03L HLA-DRB1*11:04L HLA-DRB1*14:02L HLA-DRB1*08:01L HLA-DRB1*11:01L HLA-DRB5*01:01L HLA-DQA1*05:05-B1*03:19L HLA-DRB4*01:01L HLA-DRB1*04:10L
  REGION 1..12: note = CONT. FROM ABOVE: HLA-DRB1*09:01L HLA-DPA1*01:03-B1*04:02L HLA-D PA1*02:01-B1*13:01L HLA-DQA1*05:05-B1*03:01L HLA-DRB1*10:01L HLA -DQA1*01:03-B1*06:01L HLA-DRB1*08:03L
GGSYTNDKACPL

SEQ ID NO: 16725 - protein, 12 aa, Severe acute respiratory syndrome coronavirus 2
  REGION 1..12: note = Table B: HLA-DRB1*04:04L HLA-DPA1*02:01-B1*13:01L HLA-DPA1*01:03-B1*104:01L
PLIAAVITREVG

SEQ ID NO: 16726 - protein, 14 aa, Severe acute respiratory syndrome coronavirus 2
  REGION 1..14: note = Table B: HLA-DRB1*04:04L HLA-DRB1*11:04L HLA-DRB4*01:01L HLA-DPA1*01:03-B1*04:02L HLA-DRB3*01:01L HLA-DPA1*01:03-B1*104:01L HLA-DRB1*10:01L HLA-DRB1*08:03L
LPGTILRTTNGDFL

SEQ ID NO: 16727 - protein, 13 aa, Severe acute respiratory syndrome coronavirus 2
  REGION 1..13: note = Table B: HLA-DRB1*04:04L HLA-DQA1*01:02-B1*06:02L HLA-DRB3*02:01L HLA-DRB1*14:01L HLA-DRB1*08:01L HLA-DQA1*03:01-B1*03:02L HLA-DRB1*15:01L
PSKLIEYTDFATS

SEQ ID NO: 16728 - protein, 16 aa, Severe acute respiratory syndrome coronavirus 2
  REGION 1..16: note = Table B: HLA-DRB1*04:04L
AAECTIFKDASGKPVP

SEQ ID NO: 16729 - protein, 14 aa, Severe acute respiratory syndrome coronavirus 2
  REGION 1..14: note = Table B: HLA-DRB1*04:04L HLA-DRB1*04:05L HLA-DPA1*01:03-B1*03:01L HLA-DQA1*01:01-B1*05:01L HLA-DRB1*08:01L HLA-DRB1*12:01L HLA-DRB1*14:17L HLA-DRB1*16:01L HLA-DRB1*15:03L
NVLEGSVAYESLRP

SEQ ID NO: 16730 - protein, 12 aa, Severe acute respiratory syndrome coronavirus 2
  REGION 1..12: note = Table B: HLA-DRB1*04:04L HLA-DRB1*14:01L HLA-DRB1*04:10L HLA-DPA1*02:01-B1*13:01L HLA-DRB1*14:54L HLA-DRB1*15:03L
SVAYESLRPDTR

SEQ ID NO: 16731 - protein, 13 aa, Severe acute respiratory syndrome coronavirus 2
  REGION 1..13: note = Table B: HLA-DRB1*04:04L HLA-DRB1*04:05L HLA-DRB1*04:08L
VRVVTTFDSEYCR

SEQ ID NO: 16732 - protein, 13 aa, Severe acute respiratory syndrome coronavirus 2
  REGION 1..13: note = Table B: HLA-DRB1*04:04L HLA-DRB1*04:05L
RVVTTFDSEYCRH

SEQ ID NO: 16733 - protein, 14 aa, Severe acute respiratory syndrome coronavirus 2
  REGION 1..14: note = Table B: HLA-DRB1*04:04L HLA-DRB1*04:05L HLA-DQA1*05:05-B1*03:01L
VDAVNLLTNMFTPL

SEQ ID NO: 16734 - protein, 12 aa, Severe acute respiratory syndrome coronavirus 2
  REGION 1..12: note = Table B: HLA-DRB1*04:04L HLA-DRB1*01:01L HLA-DRB1*08:04L HLA-DRB1*11:02L HLA-DRB1*11:03L HLA-DRB1*11:04L HLA-DRB1*11:01L HLA-DRB5*02:02L HLA-DRB4*01:01L HLA-DRB1*04:10L HLA-DRB1*12:02L HLA-DRB3*01:01L
GEYSHVVAFNTL

SEQ ID NO: 16735 - protein, 14 aa, Severe acute respiratory syndrome coronavirus 2
  REGION 1..14: note = Table B: HLA-DRB1*04:04L HLA-DRB3*01:01L
RRVVFNGVSFSTFE

SEQ ID NO: 16736 - protein, 13 aa, Severe acute respiratory syndrome coronavirus 2
  REGION 1..13: note = Table B: HLA-DRB1*04:04L HLA-DRB1*11:04L HLA-DRB3*01:01L
SDVLLPLTQYNRY

SEQ ID NO: 16737 - protein, 15 aa, Severe acute respiratory syndrome coronavirus 2
  REGION 1..15: note = Table B: HLA-DRB1*04:04L HLA-DQA1*03:01-B1*03:02L HLA-DRB1*07:01L
LPLTQYNRYLALYNK

SEQ ID NO: 16738 - protein, 15 aa, Severe acute respiratory syndrome coronavirus 2
  REGION 1..15: note = Table B: HLA-DRB1*04:04L HLA-DRB3*02:01L HLA-DRB1*14:54L HLA-DPA1*01:03-B1*02:01L HLA-DQA1*05:05-B1*03:01L HLA-DRB1*08:02L
NRYLALYNKYKYFSG

SEQ ID NO: 16739 - protein, 14 aa, Severe acute respiratory syndrome coronavirus 2
  REGION 1..14: note = Table B: HLA-DRB1*04:04L HLA-DQA1*01:02-B1*06:02L HLA-DRB1*08:04L HLA-DRB1*11:04L HLA-DRB3*01:01L HLA-DRB1*15:03L
QSGFRKMAFPSGKV

SEQ ID NO: 16740 - protein, 14 aa, Severe acute respiratory syndrome coronavirus 2
  REGION 1..14: note = Table B: HLA-DRB1*04:04L HLA-DRB1*04:08L
RHVICTSEDMLNPN

SEQ ID NO: 16741 - protein, 14 aa, Severe acute respiratory syndrome coronavirus 2
  REGION 1..14: note = Table B: HLA-DRB1*04:04L HLA-DRB1*11:01L
YEDLLIRKSNHNFL

SEQ ID NO: 16742 - protein, 13 aa, Severe acute respiratory syndrome coronavirus 2
  REGION 1..13: note = Table B: HLA-DRB1*04:04L HLA-DRB1*11:04L HLA-DRB1*11:01L HLA-DPA1*02:01-B1*13:01L HLA-DPA1*01:03-B1*02:01L HLA-DRB1*10:01L
PKYKFVRIQPGQT

SEQ ID NO: 16743 - protein, 11 aa, Severe acute respiratory syndrome coronavirus 2
  REGION 1..11: note = Table B: HLA-DRB1*04:04L HLA-DRB1*04:08L
FVRIQPGQTFS

SEQ ID NO: 16744 - protein, 14 aa, Severe acute respiratory syndrome coronavirus 2
  REGION 1..14: note = Table B: HLA-DRB1*04:04L HLA-DRB1*08:04L HLA-DRB1*08:77L HLA-DRB1*11:03L HLA-DRB1*11:04L HLA-DRB1*14:02L HLA-DRB1*11:01L HLA-DQA1*05:05-B1*03:116L HLA-DRB1*12:02L HLA-DRB3*01:01L HLA-DRB1*07:01L HLA-DRB1*10:01L HLA-DRB1*08:03L HLA-DRB1*15:03L
VDRQTAQAAGTDTT

SEQ ID NO: 16745 - protein, 14 aa, Severe acute respiratory syndrome coronavirus 2
  REGION 1..14: note = Table B: HLA-DRB1*04:04L HLA-DRB1*10:01L
LNRFTTTLNDFNLV

SEQ ID NO: 16746 - protein, 14 aa, Severe acute respiratory syndrome coronavirus 2
  REGION 1..14: note = Table B: HLA-DRB1*04:04L HLA-DRB1*11:01L HLA-DRB3*01:01L
MKYNYEPLTQDHVD

SEQ ID NO: 16747 - protein, 13 aa, Severe acute respiratory syndrome coronavirus 2
  REGION 1..13: note = Table B: HLA-DRB1*04:04L HLA-DRB1*04:05L HLA-DQA1*01:02-B1*06:02L HLA-DRB1*04:10L HLA-DRB1*15:03L
QDHVDILGPLSAQ

SEQ ID NO: 16748 - protein, 14 aa, Severe acute respiratory syndrome coronavirus 2
  REGION 1..14: note = Table B: HLA-DRB1*04:04L
QTGIAVLDMCASLK

SEQ ID NO: 16749 - protein, 13 aa, Severe acute respiratory syndrome coronavirus 2
  REGION 1..13: note = Table B: HLA-DRB1*04:04L HLA-DRB1*11:04L
MSAFAMMFVKHKH

SEQ ID NO: 16750 - protein, 14 aa, Severe acute respiratory syndrome coronavirus 2
  REGION 1..14: note = Table B: HLA-DRB1*04:04L HLA-DRB1*01:02L HLA-DPA1*01:03-B1*04:02L HLA-DPA1*02:01-B1*13:01L
VMRIMTWLDMVDTS

SEQ ID NO: 16751 - protein, 13 aa, Severe acute respiratory syndrome coronavirus 2
  REGION 1..13: note = Table B: HLA-DRB1*04:04L
MTWLDMVDTSLSG

SEQ ID NO: 16752 - protein, 12 aa, Severe acute respiratory syndrome coronavirus 2
  REGION 1..12: note = Table B: HLA-DRB1*04:04L HLA-DRB1*04:05L HLA-DRB1*01:02L HLA-DPA1*01:03-B1*03:01L HLA-DRB1*04:10L HLA-DRB1*04:08L
LDMVDTSLSGFK

SEQ ID NO: 16753 - protein, 16 aa, Severe acute respiratory syndrome coronavirus 2
  REGION 1..16: note = Table B: HLA-DRB1*04:04L HLA-DRB1*08:04L HLA-DRB1*11:04L HLA-DRB3*01:01L
ARRVWTLMNVLTLVYK

SEQ ID NO: 16754 - protein, 15 aa, Severe acute respiratory syndrome coronavirus 2
  REGION 1..15: note = Table B: HLA-DRB1*04:04L HLA-DPA1*03:01-B1*04:02L HLA-DPA1*01:03-B1*04:02L HLA-DPA1*02:01-B1*13:01L HLA-DPA1*01:03-B1*02:01L
AFKLNIKLLGVGGKP

SEQ ID NO: 16755 - protein, 15 aa, Severe acute respiratory syndrome coronavirus 2
  REGION 1..15: note = Table B: HLA-DRB1*04:04L HLA-DRB1*08:01L HLA-DRB1*11:01L HLA-DQA1*03:01-B1*03:02L HLA-DPA1*01:03-B1*104:01L HLA-DPA1*01:02-B1*04:01L HLA-DRB1*07:01L HLA-DQA1*01:03-B1*06:01L HLA-DQA1*02:01-B1*03:03L
  REGION 1..15: note = CONT. FROM ABOVE: HLA-DRB1*15:03L
VGGKPCIKVATVQSK

SEQ ID NO: 16756 - protein, 12 aa, Severe acute respiratory syndrome coronavirus 2
  REGION 1..12: note = Table B: HLA-DRB1*04:04L HLA-DRB1*04:05L HLA-DRB1*01:02L HLA-DPA1*01:03-B1*03:01L HLA-DQA1*01-B1*05L HLA-DRB1*04:10L HLA-DPA1*02:01-B1*13:01L HLA-DRB1*14:54L HLA-DRB1*04:08L HLA-DRB1*15:03L
VATVQSKMSDVK

SEQ ID NO: 16757 - protein, 14 aa, Severe acute respiratory syndrome coronavirus 2
  REGION 1..14: note = Table B: HLA-DRB1*04:04L HLA-DQA1*05:05-B1*03:01L HLA-DPA1*01:02-B1*04:01L HLA-DRB1*07:01L HLA-DRB1*15:03L
SSSKLWAQCVQLHN

SEQ ID NO: 16758 - protein, 15 aa, Severe acute respiratory syndrome coronavirus 2
  REGION 1..15: note = Table B: HLA-DRB1*04:04L HLA-DRB1*01:02L HLA-DPA1*03:01-B1*105:01L HLA-DQA1*05:05-B1*03:01L HLA-DRB1*04:08L
VSLLSVLLSMQGAVD

SEQ ID NO: 16759 - protein, 14 aa, Severe acute respiratory syndrome coronavirus 2
  REGION 1..14: note = Table B: HLA-DRB1*04:04L HLA-DRB1*10:01L HLA-DRB1*04:08L
LSVLLSMQGAVDIN

SEQ ID NO: 16760 - protein, 14 aa, Severe acute respiratory syndrome coronavirus 2
  REGION 1..14: note = Table B: HLA-DRB1*04:04L HLA-DRB4*03:01NL HLA-DRB3*02:01L HLA-DRB1*08:01L HLA-DRB1*12:02L HLA-DRB1*07:01L HLA-DRB1*04:08L
DNRATLQAIASEFS

SEQ ID NO: 16761 - protein, 13 aa, Severe acute respiratory syndrome coronavirus 2
  REGION 1..13: note = Table B: HLA-DRB1*04:04L HLA-DRB1*01:02L HLA-DRB4*03:01NL HLA-DRB1*11:04L HLA-DRB1*12:02L HLA-DQA1*05:05-B1*03:01L HLA-DRB1*04:08L HLA-DRB1*08:03L
RATLQAIASEFSS

SEQ ID NO: 16762 - protein, 15 aa, Severe acute respiratory syndrome coronavirus 2
  REGION 1..15: note = Table B: HLA-DRB1*04:04L HLA-DRB1*04:08L
ATLQAIASEFSSLPS

SEQ ID NO: 16763 - protein, 14 aa, Severe acute respiratory syndrome coronavirus 2
  REGION 1..14: note = Table B: HLA-DRB1*04:04L HLA-DRB1*08:04L HLA-DRB1*11:03L HLA-DRB1*11:01L HLA-DQA1*05:05-B1*03:116L HLA-DRB1*09:01L HLA-DRB3*01:01L HLA-DPA1*01:03-B1*104:01L
EQAVANGDSEVVLK

SEQ ID NO: 16764 - protein, 12 aa, Severe acute respiratory syndrome coronavirus 2
  REGION 1..12: note = Table B: HLA-DRB1*04:04L HLA-DRB1*04:05L HLA-DRB1*01:02L HLA-DRB1*12:01L HLA-DPA1*02:01-B1*13:01L HLA-DRB1*16:01L HLA-DRB1*04:08L
KKLKKSLNVAKS

SEQ ID NO: 16765 - protein, 12 aa, Severe acute respiratory syndrome coronavirus 2
  REGION 1..12: note = Table B: HLA-DRB1*04:04L HLA-DRB1*04:05L HLA-DRB1*01:02L HLA-DRB1*12:01L HLA-DPA1*02:01-B1*13:01L HLA-DRB1*16:01L HLA-DRB1*04:08L
KLKKSLNVAKSE

SEQ ID NO: 16766 - protein, 13 aa, Severe acute respiratory syndrome coronavirus 2
  REGION 1..13: note = Table B: HLA-DRB1*04:04L HLA-DRB1*01:02L HLA-DRB1*12:01L
KKSLNVAKSEFDR

SEQ ID NO: 16767 - protein, 13 aa, Severe acute respiratory syndrome coronavirus 2
  REGION 1..13: note = Table B: HLA-DRB1*04:04L HLA-DRB1*01:02L HLA-DRB1*12:01L
KSLNVAKSEFDRD

SEQ ID NO: 16768 - protein, 14 aa, Severe acute respiratory syndrome coronavirus 2
  REGION 1..14: note = Table B: HLA-DRB1*04:04L HLA-DRB1*08:04L HLA-DRB1*08:77L HLA-DRB3*02:01L HLA-DRB1*03:01L HLA-DRB1*11:03L HLA-DRB1*11:04L HLA-DRB1*11:01L HLA-DPA1*01:03-B1*04:01L HLA-DRB1*04:10L HLA-DPA1*01:03-B1*04:02L HLA-DRB1*14:54L HLA-DRB1*07:01L
LRKLDNDALNNIIN

SEQ ID NO: 16769 - protein, 14 aa, Severe acute respiratory syndrome coronavirus 2
  REGION 1..14: note = Table B: HLA-DRB1*04:04L HLA-DRB1*03:01L HLA-DRB1*04:10L HLA-DPA1*01:03-B1*04:02L
RKLDNDALNNIINN

SEQ ID NO: 16770 - protein, 12 aa, Severe acute respiratory syndrome coronavirus 2
  REGION 1..12: note = Table B: HLA-DRB1*04:04L HLA-DRB1*04:05L HLA-DQA1*01:02-B1*06:02L HLA-DRB1*01:02L HLA-DQA1*05:01-B1*02:01L HLA-DRB1*04:10L HLA-DRB1*14:54L HLA-DRB1*16:01L HLA-DRB1*04:08L
DALNNIINNARD

SEQ ID NO: 16771 - protein, 12 aa, Severe acute respiratory syndrome coronavirus 2
  REGION 1..12: note = Table B: HLA-DRB1*04:04L HLA-DRB1*01:02L HLA-DRB1*14:01L HLA-DQA1*05:05-B1*03:19L HLA-DPA1*03:01-B1*105:01L HLA-DRB1*08:03L HLA-DRB1*15:03L
ALNNIINNARDG

SEQ ID NO: 16772 - protein, 12 aa, Severe acute respiratory syndrome coronavirus 2
  REGION 1..12: note = Table B: HLA-DRB1*04:04L HLA-DRB1*04:10L HLA-DRB1*04:08L
NIIPLTTAAKLM

SEQ ID NO: 16773 - protein, 16 aa, Severe acute respiratory syndrome coronavirus 2
  REGION 1..16: note = Table B: HLA-DRB1*04:04L HLA-DRB1*11:02L HLA-DRB1*11:03L HLA-DRB1*11:04L HLA-DRB1*11:01L HLA-DRB1*12:02L HLA-DRB3*01:01L HLA-DPA1*01:03-B1*02:01L HLA-DRB1*08:02L HLA-DRB1*08:03L
IIPLTTAAKLMVVIPD

SEQ ID NO: 16774 - protein, 13 aa, Severe acute respiratory syndrome coronavirus 2
  REGION 1..13: note = Table B: HLA-DRB1*04:04L HLA-DRB1*08:04L HLA-DRB1*12:02L HLA-DRB1*14:54L HLA-DRB1*04:08L
AKLMVVIPDYNTY

SEQ ID NO: 16775 - protein, 11 aa, Severe acute respiratory syndrome coronavirus 2
  REGION 1..11: note = Table B: HLA-DRB1*04:04L HLA-DRB1*01:02L HLA-DRB1*04:10L HLA-DRB1*04:08L
MVVIPDYNTYK

SEQ ID NO: 16776 - protein, 13 aa, Severe acute respiratory syndrome coronavirus 2
  REGION 1..13: note = Table B: HLA-DRB1*04:04L HLA-DRB1*01:01L HLA-DRB1*08:01L HLA-DRB4*02:01NL HLA-DPA1*02:01-B1*13:01L HLA-DQA1*05:05-B1*03:01L HLA-DRB1*15:01L
LSEISMDNSPNLA

SEQ ID NO: 16777 - protein, 13 aa, Severe acute respiratory syndrome coronavirus 2
  REGION 1..13: note = Table B: HLA-DRB1*04:04L HLA-DRB1*08:01L HLA-DPA1*02:01-B1*13:01L HLA-DPA1*01:03-B1*02:01L
LRANSAVKLQNNE

SEQ ID NO: 16778 - protein, 14 aa, Severe acute respiratory syndrome coronavirus 2
  REGION 1..14: note = Table B: HLA-DRB1*04:04L HLA-DRB1*04:05L HLA-DRB1*01:02L HLA-DPA1*01:03-B1*03:01L HLA-DRB1*12:01L HLA-DPA1*02:01-B1*13:01L HLA-DPA1*01:03-B1*104:01L HLA-DRB1*04:08L
VALRQMSCAAGTTQ

SEQ ID NO: 16779 - protein, 13 aa, Severe acute respiratory syndrome coronavirus 2
  REGION 1..13: note = Table B: HLA-DRB1*04:04L HLA-DRB1*14:01L HLA-DRB1*04:10L HLA-DRB1*14:54L HLA-DRB1*15:01L
NALAYYNTTKGGR

SEQ ID NO: 16780 - protein, 12 aa, Severe acute respiratory syndrome coronavirus 2
  REGION 1..12: note = Table B: HLA-DRB1*04:04L HLA-DRB1*08:04L HLA-DRB1*04:10L HLA-DRB1*12:02L HLA-DRB3*01:01L HLA-DRB1*14:54L
LAYYNTTKGGRF

SEQ ID NO: 16781 - protein, 12 aa, Severe acute respiratory syndrome coronavirus 2
  REGION 1..12: note = Table B: HLA-DRB1*04:04L
AYYNTTKGGRFV

SEQ ID NO: 16782 - protein, 14 aa, Severe acute respiratory syndrome coronavirus 2
  REGION 1..14: note = Table B: HLA-DRB1*04:04L HLA-DRB1*11:01L HLA-DRB1*07:01L
KGGRFVLALLSDLQ

SEQ ID NO: 16783 - protein, 12 aa, Severe acute respiratory syndrome coronavirus 2
  REGION 1..12: note = Table B: HLA-DRB1*04:04L HLA-DRB1*08:04L HLA-DRB1*08:77L HLA-DPA1*03:01-B1*04:02L HLA-DRB1*11:03L HLA-DRB1*11:04L HLA-DQA1*01-B1*05L HLA-DPA1*01:03-B1*04:01L HLA-DRB1*04:10L HLA-DRB1*09:01L HLA-DPA1*02:01-B1*13:01L HLA-DRB1*14:54L
  REGION 1..12: note = CONT. FROM ABOVE: HLA-DPA1*01:03-B1*104:01L HLA-DRB1*07:01L HLA- DRB1*10:01L
GMVLGSLAATVR

SEQ ID NO: 16784 - protein, 15 aa, Severe acute respiratory syndrome coronavirus 2
  REGION 1..15: note = Table B: HLA-DRB1*04:04L HLA-DRB1*04:10L HLA-DRB1*12:02L HLA-DPA1*01:03-B1*104:01L HLA-DRB1*07:01L HLA-DRB1*10:01L
ATVRLQAGNATEVPA

SEQ ID NO: 16785 - protein, 13 aa, Severe acute respiratory syndrome coronavirus 2
  REGION 1..13: note = Table B: HLA-DRB1*04:04L HLA-DRB1*04:05L HLA-DRB1*01:02L HLA-DRB1*04:10L HLA-DRB1*04:08L HLA-DRB1*15:01L
VDAAKAYKDYLAS

SEQ ID NO: 16786 - protein, 14 aa, Severe acute respiratory syndrome coronavirus 2
  REGION 1..14: note = Table B: HLA-DRB1*04:04L HLA-DRB1*11:04L HLA-DRB1*14:02L HLA-DRB1*08:01L HLA-DRB4*01:01L HLA-DPA1*02:01-B1*13:01L HLA-DPA1*01:03-B1*104:01L HLA-DPA1*01:02-B1*04:01L HLA-DRB1*10:01L
TGQAITVTPEANMD

SEQ ID NO: 16787 - protein, 13 aa, Severe acute respiratory syndrome coronavirus 2
  REGION 1..13: note = Table B: HLA-DRB1*04:04L HLA-DRB1*01:02L HLA-DRB1*08:04L HLA-DRB1*11:04L HLA-DQA1*01:01-B1*05:01L HLA-DRB1*08:01L HLA-DRB4*01:01L HLA-DRB1*09:01L HLA-DPA1*02:01-B1*13:01L HLA-DPA1*01:03-B1*104:01L HLA-DRB1*10:01L HLA-DRB1*04:08L
REPMLQSADAQSF

SEQ ID NO: 16788 - protein, 13 aa, Severe acute respiratory syndrome coronavirus 2
  REGION 1..13: note = Table B: HLA-DRB1*04:04L HLA-DRB1*01:02L HLA-DRB1*08:04L HLA-DRB1*11:03L HLA-DRB4*01:01L HLA-DRB1*09:01L HLA-DPA1*01:03-B1*04:02L HLA-DPA1*02:01-B1*13:01L HLA-DPA1*01:03-B1*104:01L HLA-DRB1*10:01L HLA-DRB1*04:08L
  REGION 1..13: note = CONT. FROM ABOVE: HLA-DRB1*08:03L
EPMLQSADAQSFL

SEQ ID NO: 16789 - protein, 13 aa, Severe acute respiratory syndrome coronavirus 2
  REGION 1..13: note = Table B: HLA-DRB1*04:04L HLA-DRB1*11:02L HLA-DRB1*13:01L
AFDIYNDKVAGFA

SEQ ID NO: 16790 - protein, 12 aa, Severe acute respiratory syndrome coronavirus 2
  REGION 1..12: note = Table B: HLA-DRB1*04:04L HLA-DRB1*13:01L HLA-DRB1*04:10L HLA-DRB1*12:02L HLA-DPA1*01:03-B1*02:01L
DIYNDKVAGFAK

SEQ ID NO: 16791 - protein, 14 aa, Severe acute respiratory syndrome coronavirus 2
  REGION 1..14: note = Table B: HLA-DRB1*04:04L HLA-DRB1*11:04L HLA-DRB1*11:01L HLA-DPA1*02:01-B1*13:01L HLA-DPA1*01:03-B1*02:01L
DDNLIDSYFVVKRH

SEQ ID NO: 16792 - protein, 14 aa, Severe acute respiratory syndrome coronavirus 2
  REGION 1..14: note = Table B: HLA-DRB1*04:04L HLA-DRB1*14:01L HLA-DRB1*08:01L HLA-DPA1*03:01-B1*105:01L
YNLLKDCPAVAKHD

SEQ ID NO: 16793 - protein, 14 aa, Severe acute respiratory syndrome coronavirus 2
  REGION 1..14: note = Table B: HLA-DRB1*04:04L HLA-DQA1*01-B1*05L HLA-DRB1*13:01L HLA-DRB1*07:01L HLA-DRB1*15:01L
DGDMVPHISRQRLT

SEQ ID NO: 16794 - protein, 16 aa, Severe acute respiratory syndrome coronavirus 2
  REGION 1..16: note = Table B: HLA-DRB1*04:04L HLA-DPA1*01:03-B1*104:01L
ISRQRLTKYTMADLVY

SEQ ID NO: 16795 - protein, 18 aa, Severe acute respiratory syndrome coronavirus 2
  REGION 1..18: note = Table B: HLA-DRB1*04:04L HLA-DRB1*03:01L HLA-DRB1*11:02L HLA-DRB1*11:03L HLA-DRB1*11:04L HLA-DRB1*13:01L HLA-DRB4*01:01L HLA-DQA1*05:05-B1*03:116L HLA-DRB1*09:01L HLA-DPA1*01:03-B1*02:01L HLA-DRB1*07:01L HLA-DRB1*10:01L
DDDYFNKKDWYDFVENPD

SEQ ID NO: 16796 - protein, 12 aa, Severe acute respiratory syndrome coronavirus 2
  REGION 1..12: note = Table B: HLA-DRB1*04:04L HLA-DRB1*03:01L HLA-DRB1*07:01L
RVYANLGERVRQ

SEQ ID NO: 16797 - protein, 14 aa, Severe acute respiratory syndrome coronavirus 2
  REGION 1..14: note = Table B: HLA-DRB1*04:04L HLA-DPA1*01:03-B1*03:01L HLA-DPA1*02:01-B1*13:01L
LGERVRQALLKTVQ

SEQ ID NO: 16798 - protein, 13 aa, Severe acute respiratory syndrome coronavirus 2
  REGION 1..13: note = Table B: HLA-DRB1*04:04L HLA-DRB1*01:02L HLA-DRB1*08:04L HLA-DRB1*14:01L HLA-DRB1*14:02L HLA-DRB1*08:01L HLA-DPA1*02:01-B1*13:01L HLA-DRB1*07:01L HLA-DQA1*01:03-B1*06:01L HLA-DRB1*08:03L HLA-DRB1*15:03L
DFGDFIQTTPGSG

SEQ ID NO: 16799 - protein, 13 aa, Severe acute respiratory syndrome coronavirus 2
  REGION 1..13: note = Table B: HLA-DRB1*04:04L HLA-DRB1*11:04L HLA-DRB1*14:02L HLA-DRB1*04:10L HLA-DRB1*12:02L HLA-DRB1*10:01L HLA-DRB1*04:08L
DFIQTTPGSGVPV

SEQ ID NO: 16800 - protein, 14 aa, Severe acute respiratory syndrome coronavirus 2
  REGION 1..14: note = Table B: HLA-DRB1*04:04L
TLTRALTAESHVDT

SEQ ID NO: 16801 - protein, 14 aa, Severe acute respiratory syndrome coronavirus 2
  REGION 1..14: note = Table B: HLA-DRB1*04:04L HLA-DRB1*08:03L
ESHVDTDLTKPYIK

SEQ ID NO: 16802 - protein, 14 aa, Severe acute respiratory syndrome coronavirus 2
  REGION 1..14: note = Table B: HLA-DRB1*04:04L HLA-DRB1*01:01L HLA-DRB5*01:01L HLA-DRB4*02:01NL HLA-DRB1*13:01L HLA-DRB1*04:10L HLA-DPA1*01:03-B1*02:01L HLA-DRB1*07:01L HLA-DRB1*08:02L HLA-DRB1*15:01L
VRKIFVDGVPFVVS

SEQ ID NO: 16803 - protein, 14 aa, Severe acute respiratory syndrome coronavirus 2
  REGION 1..14: note = Table B: HLA-DRB1*04:04L HLA-DRB1*01:01L HLA-DQA1*01:01-B1*05:01L HLA-DRB1*08:01L HLA-DPA1*01:03-B1*02:01L HLA-DRB1*07:01L HLA-DRB1*08:02L
KIFVDGVPFVVSTG

SEQ ID NO: 16804 - protein, 13 aa, Severe acute respiratory syndrome coronavirus 2
  REGION 1..13: note = Table B: HLA-DRB1*04:04L HLA-DRB1*15:01L
GVPFVVSTGYHFR

SEQ ID NO: 16805 - protein, 13 aa, Severe acute respiratory syndrome coronavirus 2
  REGION 1..13: note = Table B: HLA-DRB1*04:04L HLA-DRB1*15:01L
VPFVVSTGYHFRE

SEQ ID NO: 16806 - protein, 13 aa, Severe acute respiratory syndrome coronavirus 2
  REGION 1..13: note = Table B: HLA-DRB1*04:04L HLA-DRB1*08:04L HLA-DRB3*02:01L HLA-DPA1*03:01-B1*04:02L HLA-DRB1*14:01L HLA-DRB1*11:03L HLA-DRB1*11:04L HLA-DRB1*14:02L HLA-DPA1*01:03-B1*04:02L HLA-DPA1*01:02-B1*04:01L HLA-DRB1*07:01L HLA-DRB1*08:03L
FRELGVVHNQDVN

SEQ ID NO: 16807 - protein, 13 aa, Severe acute respiratory syndrome coronavirus 2
  REGION 1..13: note = Table B: HLA-DRB1*04:04L
ELGVVHNQDVNLH

SEQ ID NO: 16808 - protein, 12 aa, Severe acute respiratory syndrome coronavirus 2
  REGION 1..12: note = Table B: HLA-DRB1*04:04L HLA-DRB1*08:04L HLA-DRB1*08:77L HLA-DRB1*11:03L HLA-DRB1*11:04L HLA-DRB1*12:02L HLA-DRB1*10:01L HLA-DRB1*08:03L
GVVHNQDVNLHS

SEQ ID NO: 16809 - protein, 14 aa, Severe acute respiratory syndrome coronavirus 2
  REGION 1..14: note = Table B: HLA-DRB1*04:04L HLA-DRB1*04:05L HLA-DRB1*11:04L HLA-DRB1*08:01L HLA-DRB3*01:01L
NQDVNLHSSRLSFK

SEQ ID NO: 16810 - protein, 14 aa, Severe acute respiratory syndrome coronavirus 2
  REGION 1..14: note = Table B: HLA-DRB1*04:04L HLA-DRB1*11:04L HLA-DRB3*01:01L
QDVNLHSSRLSFKE

SEQ ID NO: 16811 - protein, 13 aa, Severe acute respiratory syndrome coronavirus 2
  REGION 1..13: note = Table B: HLA-DRB1*04:04L
FKELLVYAADPAM

SEQ ID NO: 16812 - protein, 12 aa, Severe acute respiratory syndrome coronavirus 2
  REGION 1..12: note = Table B: HLA-DRB1*04:04L HLA-DPA1*02:01-B1*13:01L
ELLVYAADPAMH

SEQ ID NO: 16813 - protein, 12 aa, Severe acute respiratory syndrome coronavirus 2
  REGION 1..12: note = Table B: HLA-DRB1*04:04L HLA-DRB5*01:01L HLA-DRB1*09:01L HLA-DPA1*02:01-B1*13:01L HLA-DRB1*08:03L
LLVYAADPAMHA

SEQ ID NO: 16814 - protein, 12 aa, Severe acute respiratory syndrome coronavirus 2
  REGION 1..12: note = Table B: HLA-DRB1*04:04L HLA-DRB1*01:01L HLA-DRB5*01:01L HLA-DRB1*13:01L HLA-DRB4*01:01L HLA-DRB1*07:01L
LVYAADPAMHAA

SEQ ID NO: 16815 - protein, 11 aa, Severe acute respiratory syndrome coronavirus 2
  REGION 1..11: note = Table B: HLA-DRB1*04:04L
YAADPAMHAAS

SEQ ID NO: 16816 - protein, 14 aa, Severe acute respiratory syndrome coronavirus 2
  REGION 1..14: note = Table B: HLA-DRB1*04:04L
DPAMHAASGNLLLD

SEQ ID NO: 16817 - protein, 12 aa, Severe acute respiratory syndrome coronavirus 2
  REGION 1..12: note = Table B: HLA-DRB1*04:04L HLA-DRB1*04:08L
FSVAALTNNVAF

SEQ ID NO: 16818 - protein, 12 aa, Severe acute respiratory syndrome coronavirus 2
  REGION 1..12: note = Table B: HLA-DRB1*04:04L HLA-DRB1*08:04L HLA-DRB3*02:01L HLA-DPA1*02:01-B1*13:01L HLA-DPA1*01:03-B1*104:01L
NNVAFQTVKPGN

SEQ ID NO: 16819 - protein, 13 aa, Severe acute respiratory syndrome coronavirus 2
  REGION 1..13: note = Table B: HLA-DRB1*04:04L HLA-DRB1*08:01L HLA-DRB1*08:03L
INANQVIVNNLDK

SEQ ID NO: 16820 - protein, 12 aa, Severe acute respiratory syndrome coronavirus 2
  REGION 1..12: note = Table B: HLA-DRB1*04:04L HLA-DRB1*01:02L HLA-DRB1*08:04L HLA-DRB1*08:77L HLA-DRB3*02:01L HLA-DPA1*01:03-B1*03:01L HLA-DRB1*11:03L HLA-DRB1*11:04L HLA-DRB1*14:02L HLA-DQA1*01:01-B1*05:01L HLA-DQA1*05:05-B1*03:19L
  REGION 1..12: note = CONT. FROM ABOVE: HLA-DRB1*12:02L HLA-DPA1*02:01-B1*13:01L HLA-D PA1*03:01-B1*105:01L HLA-DQA1*05:05-B1*03:01L HLA-DRB1*08:03L
ANQVIVNNLDKS

SEQ ID NO: 16821 - protein, 13 aa, Severe acute respiratory syndrome coronavirus 2
  REGION 1..13: note = Table B: HLA-DRB1*04:04L HLA-DRB1*01:01L HLA-DRB1*11:02L HLA-DQA1*01:01-B1*05:01L HLA-DRB1*11:01L HLA-DRB4*02:01NL HLA-DRB1*13:01L HLA-DRB4*01:01L HLA-DPA1*01:03-B1*04:02L HLA-DPA1*01:03-B1*104:01L HLA-DRB1*08:02L HLA-DRB1*15:01L
VNNLDKSAGFPFN

SEQ ID NO: 16822 - protein, 14 aa, Severe acute respiratory syndrome coronavirus 2
  REGION 1..14: note = Table B: HLA-DRB1*04:04L HLA-DRB1*04:05L HLA-DRB1*01:01L
SYEDQDALFAYTKR

SEQ ID NO: 16823 - protein, 14 aa, Severe acute respiratory syndrome coronavirus 2
  REGION 1..14: note = Table B: HLA-DRB1*04:04L HLA-DPA1*01:03-B1*104:01L HLA-DRB1*04:08L
TKRNVIPTITQMNL

SEQ ID NO: 16824 - protein, 12 aa, Severe acute respiratory syndrome coronavirus 2
  REGION 1..12: note = Table B: HLA-DRB1*04:04L HLA-DRB1*11:03L HLA-DPA1*02:01-B1*13:01L HLA-DPA1*01:02-B1*04:01L HLA-DRB1*07:01L HLA-DRB1*15:03L
LKYAISAKNRAR

SEQ ID NO: 16825 - protein, 15 aa, Severe acute respiratory syndrome coronavirus 2
  REGION 1..15: note = Table B: HLA-DRB1*04:04L HLA-DPA1*01:03-B1*04:02L HLA-DQA1*02:01-B1*03:03L
TNRQFHQKLLKSIAA

SEQ ID NO: 16826 - protein, 14 aa, Severe acute respiratory syndrome coronavirus 2
  REGION 1..14: note = Table B: HLA-DRB1*04:04L HLA-DRB1*01:01L HLA-DRB1*11:04L HLA-DRB1*11:01L HLA-DRB1*04:10L HLA-DRB3*01:01L HLA-DPA1*01:02-B1*04:01L HLA-DRB1*07:01L HLA-DRB1*15:03L
AATRGATVVIGTSK

SEQ ID NO: 16827 - protein, 14 aa, Severe acute respiratory syndrome coronavirus 2
  REGION 1..14: note = Table B: HLA-DRB1*04:04L HLA-DRB1*11:04L HLA-DRB1*11:01L HLA-DRB3*01:01L
TVVIGTSKFYGGWH

SEQ ID NO: 16828 - protein, 13 aa, Severe acute respiratory syndrome coronavirus 2
  REGION 1..13: note = Table B: HLA-DRB1*04:04L HLA-DRB1*07:01L
LARKHTTCCSLSH

SEQ ID NO: 16829 - protein, 13 aa, Severe acute respiratory syndrome coronavirus 2
  REGION 1..13: note = Table B: HLA-DRB1*04:04L HLA-DQA1*01:02-B1*06:02L HLA-DRB1*08:01L HLA-DRB1*07:01L HLA-DRB1*04:08L HLA-DQA1*02:01-B1*03:03L
ARKHTTCCSLSHR

SEQ ID NO: 16830 - protein, 13 aa, Severe acute respiratory syndrome coronavirus 2
  REGION 1..13: note = Table B: HLA-DRB1*04:04L HLA-DRB1*04:05L HLA-DRB1*01:02L HLA-DRB1*12:01L HLA-DPA1*02:01-B1*13:01L
LSHRFYRLANECA

SEQ ID NO: 16831 - protein, 13 aa, Severe acute respiratory syndrome coronavirus 2
  REGION 1..13: note = Table B: HLA-DRB1*04:04L HLA-DRB1*03:01L HLA-DRB1*11:01L HLA-DRB1*15:01L
NALLSTDGNKIAD

SEQ ID NO: 16832 - protein, 12 aa, Severe acute respiratory syndrome coronavirus 2
  REGION 1..12: note = Table B: HLA-DRB1*04:04L HLA-DQA1*01:02-B1*06:02L HLA-DRB1*08:04L HLA-DPA1*01:03-B1*03:01L HLA-DPA1*03:01-B1*04:02L HLA-DRB1*11:03L HLA-DRB1*14:02L HLA-DRB1*11:01L HLA-DQA1*05:05-B1*03:19L HLA-DRB1*04:10L
  REGION 1..12: note = CONT. FROM ABOVE: HLA-DRB1*12:02L HLA-DRB3*01:01L HLA-DPA1*03:01 -B1*105:01L HLA-DRB1*10:01L HLA-DRB1*04:08L
LLSTDGNKIADK

SEQ ID NO: 16833 - protein, 13 aa, Severe acute respiratory syndrome coronavirus 2
  REGION 1..13: note = Table B: HLA-DRB1*04:04L HLA-DRB1*01:02L HLA-DRB1*08:01L HLA-DPA1*02:01-B1*13:01L HLA-DPA1*01:02-B1*04:01L HLA-DRB1*07:01L HLA-DRB1*04:08L
LQHRLYECLYRNR

SEQ ID NO: 16834 - protein, 12 aa, Severe acute respiratory syndrome coronavirus 2
  REGION 1..12: note = Table B: HLA-DRB1*04:04L HLA-DRB1*04:05L HLA-DRB1*08:04L HLA-DRB3*02:01L HLA-DRB1*12:02L HLA-DRB1*14:54L HLA-DRB1*04:08L
VASIKNFKSVLY

SEQ ID NO: 16835 - protein, 13 aa, Severe acute respiratory syndrome coronavirus 2
  REGION 1..13: note = Table B: HLA-DRB1*04:04L HLA-DRB1*04:05L HLA-DRB3*02:01L HLA-DRB1*08:01L HLA-DRB3*01:01L
ASIKNFKSVLYYQ

SEQ ID NO: 16836 - protein, 15 aa, Severe acute respiratory syndrome coronavirus 2
  REGION 1..15: note = Table B: HLA-DRB1*04:04L HLA-DRB1*16:01L HLA-DRB1*15:03L
PHEFCSQHTMLVKQG

SEQ ID NO: 16837 - protein, 11 aa, Severe acute respiratory syndrome coronavirus 2
  REGION 1..11: note = Table B: HLA-DRB1*04:04L HLA-DQA1*01:02-B1*06:02L HLA-DRB1*01:02L HLA-DRB3*02:01L HLA-DRB1*14:01L HLA-DRB1*04:10L HLA-DPA1*01:03-B1*04:02L HLA-DRB1*12:02L HLA-DRB1*14:54L HLA-DRB1*15:03L
YVYLPYPDPSR

SEQ ID NO: 16838 - protein, 13 aa, Severe acute respiratory syndrome coronavirus 2
  REGION 1..13: note = Table B: HLA-DRB1*04:04L
TDGTLMIERFVSL

SEQ ID NO: 16839 - protein, 13 aa, Severe acute respiratory syndrome coronavirus 2
  REGION 1..13: note = Table B: HLA-DRB1*04:04L
DGTLMIERFVSLA

SEQ ID NO: 16840 - protein, 14 aa, Severe acute respiratory syndrome coronavirus 2
  REGION 1..14: note = Table B: HLA-DRB1*04:04L
SLAIDAYPLTKHPN

SEQ ID NO: 16841 - protein, 15 aa, Severe acute respiratory syndrome coronavirus 2
  REGION 1..15: note = Table B: HLA-DRB1*04:04L HLA-DRB1*11:03L
DAYPLTKHPNQEYAD

SEQ ID NO: 16842 - protein, 13 aa, Severe acute respiratory syndrome coronavirus 2
  REGION 1..13: note = Table B: HLA-DRB1*04:04L HLA-DRB4*03:01NL HLA-DRB1*14:54L HLA-DRB1*10:01L HLA-DRB1*16:01L HLA-DRB1*04:08L
DMYSVMLTNDNTS

SEQ ID NO: 16843 - protein, 15 aa, Severe acute respiratory syndrome coronavirus 2
  REGION 1..15: note = Table B: HLA-DRB1*04:04L
RYWEPEFYEAMYTPH

SEQ ID NO: 16844 - protein, 12 aa, Severe acute respiratory syndrome coronavirus 2
  REGION 1..12: note = Table B: HLA-DRB1*04:04L HLA-DRB1*08:04L HLA-DPA1*01:03-B1*03:01L HLA-DPA1*03:01-B1*04:02L HLA-DRB1*08:01L HLA-DQA1*05:01-B1*02:01L HLA-DPA1*01:03-B1*04:02L HLA-DQA1*05:05-B1*03:01L
MYTPHTVLQAVG

SEQ ID NO: 16845 - protein, 14 aa, Severe acute respiratory syndrome coronavirus 2
  REGION 1..14: note = Table B: HLA-DRB1*04:04L HLA-DPA1*03:01-B1*105:01L HLA-DQA1*05:05-B1*03:01L
SHKLVLSVNPYVCN

SEQ ID NO: 16846 - protein, 14 aa, Severe acute respiratory syndrome coronavirus 2
  REGION 1..14: note = Table B: HLA-DRB1*04:04L HLA-DPA1*03:01-B1*105:01L
LGGMSYYCKSHKPP

SEQ ID NO: 16847 - protein, 13 aa, Severe acute respiratory syndrome coronavirus 2
  REGION 1..13: note = Table B: HLA-DRB1*04:04L HLA-DRB1*08:77L HLA-DRB3*02:01L HLA-DRB1*03:01L HLA-DRB1*11:03L HLA-DRB1*11:04L HLA-DRB1*14:02L HLA-DRB1*11:01L HLA-DPA1*01:03-B1*04:02L HLA-DRB3*01:01L HLA-DPA1*02:01-B1*13:01L HLA-DRB1*14:54L HLA-DRB1*08:03L
DYILANTCTERLK

SEQ ID NO: 16848 - protein, 13 aa, Severe acute respiratory syndrome coronavirus 2
  REGION 1..13: note = Table B: HLA-DRB1*04:04L HLA-DRB1*04:05L HLA-DPA1*01:03-B1*02:01L
NRNYVFTGYRVTK

SEQ ID NO: 16849 - protein, 13 aa, Severe acute respiratory syndrome coronavirus 2
  REGION 1..13: note = Table B: HLA-DRB1*04:04L HLA-DRB1*04:05L HLA-DPA1*02:01-B1*13:01L
RNYVFTGYRVTKN

SEQ ID NO: 16850 - protein, 14 aa, Severe acute respiratory syndrome coronavirus 2
  REGION 1..14: note = Table B: HLA-DRB1*04:04L
NYVFTGYRVTKNSK

SEQ ID NO: 16851 - protein, 14 aa, Severe acute respiratory syndrome coronavirus 2
  REGION 1..14: note = Table B: HLA-DRB1*04:04L HLA-DRB1*08:04L HLA-DRB1*11:04L HLA-DRB1*11:01L HLA-DRB3*01:01L
RVTKNSKVQIGEYT

SEQ ID NO: 16852 - protein, 14 aa, Severe acute respiratory syndrome coronavirus 2
  REGION 1..14: note = Table B: HLA-DRB1*04:04L HLA-DRB1*04:05L HLA-DRB1*08:04L HLA-DRB1*15:03L
KGDYGDAVVYRGTT

SEQ ID NO: 16853 - protein, 14 aa, Severe acute respiratory syndrome coronavirus 2
  REGION 1..14: note = Table B: HLA-DRB1*04:04L HLA-DRB1*08:04L HLA-DRB1*11:01L HLA-DPA1*01:03-B1*104:01L HLA-DRB1*15:03L
GDYGDAVVYRGTTT

SEQ ID NO: 16854 - protein, 15 aa, Severe acute respiratory syndrome coronavirus 2
  REGION 1..15: note = Table B: HLA-DRB1*04:04L HLA-DRB1*01:01L HLA-DRB1*13:01L HLA-DPA1*01:03-B1*02:01L HLA-DRB1*07:01L HLA-DRB1*08:03L
APTLVPQEHYVRITG

SEQ ID NO: 16855 - protein, 13 aa, Severe acute respiratory syndrome coronavirus 2
  REGION 1..13: note = Table B: HLA-DRB1*04:04L HLA-DRB1*01:02L HLA-DQA1*01:01-B1*05:01L HLA-DRB1*08:01L HLA-DRB1*11:01L HLA-DRB5*01:01L HLA-DRB3*01:01L HLA-DPA1*02:01-B1*13:01L HLA-DRB1*07:01L HLA-DQA1*01:03-B1*06:01L HLA-DRB1*08:03L
ISDEFSSNVANYQ

SEQ ID NO: 16856 - protein, 13 aa, Severe acute respiratory syndrome coronavirus 2
  REGION 1..13: note = Table B: HLA-DRB1*04:04L HLA-DRB1*08:04L HLA-DRB1*11:03L HLA-DRB1*11:04L HLA-DRB3*01:01L
SNVANYQKVGMQK

SEQ ID NO: 16857 - protein, 14 aa, Severe acute respiratory syndrome coronavirus 2
  REGION 1..14: note = Table B: HLA-DRB1*04:04L
VANYQKVGMQKYST

SEQ ID NO: 16858 - protein, 15 aa, Severe acute respiratory syndrome coronavirus 2
  REGION 1..15: note = Table B: HLA-DRB1*04:04L HLA-DRB1*08:04L HLA-DQA1*03:01-B1*03:02L
GKSHFAIGLALYYPS

SEQ ID NO: 16859 - protein, 14 aa, Severe acute respiratory syndrome coronavirus 2
  REGION 1..14: note = Table B: HLA-DRB1*04:04L
IGLALYYPSARIVY

SEQ ID NO: 16860 - protein, 14 aa, Severe acute respiratory syndrome coronavirus 2
  REGION 1..14: note = Table B: HLA-DRB1*04:04L HLA-DRB1*15:01L
GLALYYPSARIVYT

SEQ ID NO: 16861 - protein, 13 aa, Severe acute respiratory syndrome coronavirus 2
  REGION 1..13: note = Table B: HLA-DRB1*04:04L HLA-DQA1*01:02-B1*06:02L HLA-DRB1*01:02L HLA-DPA1*01:03-B1*03:01L HLA-DRB1*12:01L HLA-DPA1*02:01-B1*13:01L HLA-DQA1*03:01-B1*03:02L HLA-DQA1*02:01-B1*03:03L
YPSARIVYTACSH

SEQ ID NO: 16862 - protein, 14 aa, Severe acute respiratory syndrome coronavirus 2
  REGION 1..14: note = Table B: HLA-DRB1*04:04L HLA-DPA1*01:03-B1*03:01L
PSARIVYTACSHAA

SEQ ID NO: 16863 - protein, 13 aa, Severe acute respiratory syndrome coronavirus 2
  REGION 1..13: note = Table B: HLA-DRB1*04:04L HLA-DPA1*01:03-B1*02:01L
DKFKVNSTLEQYV

SEQ ID NO: 16864 - protein, 15 aa, Severe acute respiratory syndrome coronavirus 2
  REGION 1..15: note = Table B: HLA-DRB1*04:04L
ISMATNYDLSVVNAR

SEQ ID NO: 16865 - protein, 14 aa, Severe acute respiratory syndrome coronavirus 2
  REGION 1..14: note = Table B: HLA-DRB1*04:04L HLA-DRB3*01:01L HLA-DRB1*07:01L
ATNYDLSVVNARLR

SEQ ID NO: 16866 - protein, 12 aa, Severe acute respiratory syndrome coronavirus 2
  REGION 1..12: note = Table B: HLA-DRB1*04:04L HLA-DQA1*01:02-B1*06:02L HLA-DRB1*01:02L HLA-DRB1*08:04L HLA-DPA1*02:01-B1*13:01L HLA-DPA1*03:01-B1*105:01L HLA-DRB1*15:03L
HYVYIGDPAQLP

SEQ ID NO: 16867 - protein, 13 aa, Severe acute respiratory syndrome coronavirus 2
  REGION 1..13: note = Table B: HLA-DRB1*04:04L HLA-DRB1*08:04L HLA-DRB1*11:01L HLA-DPA1*01:03-B1*104:01L HLA-DRB1*07:01L HLA-DRB1*08:03L
IGDPAQLPAPRTL

SEQ ID NO: 16868 - protein, 17 aa, Severe acute respiratory syndrome coronavirus 2
  REGION 1..17: note = Table B: HLA-DRB1*04:04L HLA-DRB1*04:10L HLA-DRB1*07:01L
LPAPRTLLTKGTLEPEY

SEQ ID NO: 16869 - protein, 13 aa, Severe acute respiratory syndrome coronavirus 2
  REGION 1..13: note = Table B: HLA-DRB1*04:04L HLA-DRB1*08:04L HLA-DRB1*11:04L HLA-DRB3*01:01L
GTLEPEYFNSVCR

SEQ ID NO: 16870 - protein, 13 aa, Severe acute respiratory syndrome coronavirus 2
  REGION 1..13: note = Table B: HLA-DRB1*04:04L HLA-DRB1*08:04L HLA-DRB3*02:01L HLA-DRB1*11:04L HLA-DQA1*01:01-B1*05:01L HLA-DRB1*11:01L HLA-DRB1*04:10L HLA-DRB3*01:01L HLA-DRB1*14:17L HLA-DRB1*07:01L HLA-DRB1*10:01L HLA-DRB1*08:03L
KMFYKGVITHDVS

SEQ ID NO: 16871 - protein, 15 aa, Severe acute respiratory syndrome coronavirus 2
  REGION 1..15: note = Table B: HLA-DRB1*04:04L HLA-DRB1*11:04L HLA-DRB1*11:01L HLA-DRB3*01:01L
IGVVREFLTRNPAWR

SEQ ID NO: 16872 - protein, 13 aa, Severe acute respiratory syndrome coronavirus 2
  REGION 1..13: note = Table B: HLA-DRB1*04:04L HLA-DRB4*03:01NL HLA-DPA1*01:03-B1*03:01L HLA-DRB1*14:01L
KAVFISPYNSQNA

SEQ ID NO: 16873 - protein, 13 aa, Severe acute respiratory syndrome coronavirus 2
  REGION 1..13: note = Table B: HLA-DRB1*04:04L HLA-DPA1*01:03-B1*03:01L HLA-DRB1*14:01L HLA-DRB3*01:01L HLA-DPA1*02:01-B1*13:01L HLA-DQA1*01:03-B1*06:01L
NVNRFNVAITRAK

SEQ ID NO: 16874 - protein, 12 aa, Severe acute respiratory syndrome coronavirus 2
  REGION 1..12: note = Table B: HLA-DRB1*04:04L HLA-DPA1*01:03-B1*03:01L HLA-DRB1*11:04L HLA-DRB1*11:01L HLA-DRB3*01:01L HLA-DPA1*02:01-B1*13:01L HLA-DRB1*07:01L
RFNVAITRAKVG

SEQ ID NO: 16875 - protein, 17 aa, Severe acute respiratory syndrome coronavirus 2
  REGION 1..17: note = Table B: HLA-DRB1*04:04L HLA-DRB1*11:02L HLA-DQA1*05:05-B1*03:01L HLA-DRB1*07:01L HLA-DRB1*10:01L HLA-DRB1*08:02L HLA-DRB1*08:03L
DRDLYDKLQFTSLEIPR

SEQ ID NO: 16876 - protein, 13 aa, Severe acute respiratory syndrome coronavirus 2
  REGION 1..13: note = Table B: HLA-DRB1*04:04L HLA-DRB1*04:08L
YQVNGYPNMFITR

SEQ ID NO: 16877 - protein, 12 aa, Severe acute respiratory syndrome coronavirus 2
  REGION 1..12: note = Table B: HLA-DRB1*04:04L HLA-DRB4*03:01NL HLA-DRB3*02:01L HLA-DRB1*11:03L HLA-DRB1*11:04L HLA-DRB1*11:01L HLA-DRB3*01:01L HLA-DRB1*10:01L
YVYNPFMIDVQQ

SEQ ID NO: 16878 - protein, 12 aa, Severe acute respiratory syndrome coronavirus 2
  REGION 1..12: note = Table B: HLA-DRB1*04:04L HLA-DRB1*04:05L HLA-DPA1*01:03-B1*03:01L HLA-DPA1*03:01-B1*04:02L HLA-DRB1*08:01L HLA-DRB1*04:10L HLA-DPA1*01:03-B1*02:01L HLA-DRB1*04:08L HLA-DRB1*15:03L
WGFTGNLQSNHD

SEQ ID NO: 16879 - protein, 15 aa, Severe acute respiratory syndrome coronavirus 2
  REGION 1..15: note = Table B: HLA-DRB1*04:04L HLA-DRB1*04:05L HLA-DRB1*01:01L HLA-DRB1*11:03L HLA-DRB1*11:04L HLA-DRB1*08:01L HLA-DRB1*11:01L HLA-DPA1*01:03-B1*02:01L HLA-DQA1*05:05-B1*03:01L
TGNLQSNHDLYCQVH

SEQ ID NO: 16880 - protein, 13 aa, Severe acute respiratory syndrome coronavirus 2
  REGION 1..13: note = Table B: HLA-DRB1*04:04L HLA-DRB1*04:05L HLA-DRB1*14:01L HLA-DRB1*08:01L HLA-DRB1*16:01L HLA-DRB1*15:03L
NAHVASCDAIMTR

SEQ ID NO: 16881 - protein, 15 aa, Severe acute respiratory syndrome coronavirus 2
  REGION 1..15: note = Table B: HLA-DRB1*04:04L HLA-DRB1*08:04L HLA-DRB3*02:01L
VDWTIEYPIIGDELK

SEQ ID NO: 16882 - protein, 14 aa, Severe acute respiratory syndrome coronavirus 2
  REGION 1..14: note = Table B: HLA-DRB1*04:04L HLA-DRB1*11:02L HLA-DRB1*13:01L HLA-DPA1*02:01-B1*13:01L HLA-DQA1*03:01-B1*03:02L HLA-DRB1*07:01L
DELKINAACRKVQH

SEQ ID NO: 16883 - protein, 13 aa, Severe acute respiratory syndrome coronavirus 2
  REGION 1..13: note = Table B: HLA-DRB1*04:04L HLA-DRB1*04:05L
KAALLADKFPVLH

SEQ ID NO: 16884 - protein, 15 aa, Severe acute respiratory syndrome coronavirus 2
  REGION 1..15: note = Table B: HLA-DRB1*04:04L HLA-DRB1*11:04L HLA-DRB3*01:01L HLA-DQA1*03:01-B1*03:02L
DKAYKIEELFYSYAT

SEQ ID NO: 16885 - protein, 15 aa, Severe acute respiratory syndrome coronavirus 2
  REGION 1..15: note = Table B: HLA-DRB1*04:04L HLA-DRB1*11:04L HLA-DRB1*11:01L HLA-DRB3*01:01L
KAYKIEELFYSYATH

SEQ ID NO: 16886 - protein, 13 aa, Severe acute respiratory syndrome coronavirus 2
  REGION 1..13: note = Table B: HLA-DRB1*04:04L
PAFDKSAFVNLKQ

SEQ ID NO: 16887 - protein, 13 aa, Severe acute respiratory syndrome coronavirus 2
  REGION 1..13: note = Table B: HLA-DRB1*04:04L HLA-DRB1*08:04L HLA-DRB3*01:01L HLA-DPA1*02:01-B1*13:01L
KQVVSDIDYVPLK

SEQ ID NO: 16888 - protein, 13 aa, Severe acute respiratory syndrome coronavirus 2
  REGION 1..13: note = Table B: HLA-DRB1*04:04L HLA-DRB3*01:01L HLA-DRB1*10:01L HLA-DRB1*08:03L
FSLWVYKQFDTYN

SEQ ID NO: 16889 - protein, 14 aa, Severe acute respiratory syndrome coronavirus 2
  REGION 1..14: note = Table B: HLA-DRB1*04:04L HLA-DRB1*08:04L HLA-DRB1*11:02L HLA-DRB3*01:01L HLA-DRB1*07:01L HLA-DRB1*10:01L
WVYKQFDTYNLWNT

SEQ ID NO: 16890 - protein, 13 aa, Severe acute respiratory syndrome coronavirus 2
  REGION 1..13: note = Table B: HLA-DRB1*04:04L HLA-DRB1*04:05L HLA-DRB1*08:04L HLA-DRB3*02:01L HLA-DPA1*01:03-B1*03:01L HLA-DRB1*11:02L HLA-DRB1*11:03L HLA-DRB1*11:01L HLA-DRB1*09:01L HLA-DRB3*01:01L HLA-DRB1*07:01L HLA-DRB1*08:03L HLA-DRB1*15:01L
DTYNLWNTFTRLQ

SEQ ID NO: 16891 - protein, 13 aa, Severe acute respiratory syndrome coronavirus 2
  REGION 1..13: note = Table B: HLA-DRB1*04:04L HLA-DRB1*04:05L HLA-DRB3*01:01L
QSLENVAFNVVNK

SEQ ID NO: 16892 - protein, 12 aa, Severe acute respiratory syndrome coronavirus 2
  REGION 1..12: note = Table B: HLA-DRB1*04:04L HLA-DRB1*04:05L HLA-DRB1*01:02L HLA-DRB1*08:04L HLA-DRB1*08:77L HLA-DRB3*02:01L HLA-DPA1*01:03-B1*03:01L HLA-DRB1*14:01L HLA-DRB1*11:03L HLA-DRB1*11:01L HLA-DQA1*05:05-B1*03:19L HLA-DRB1*04:10L
  REGION 1..12: note = CONT. FROM ABOVE: HLA-DRB3*01:01L HLA-DPA1*02:01-B1*13:01L HLA-D RB1*14:54L HLA-DPA1*01:03-B1*02:01L HLA-DPA1*01:03-B1*104:01L HL A-DRB1*15:03L
LENVAFNVVNKG

SEQ ID NO: 16893 - protein, 12 aa, Severe acute respiratory syndrome coronavirus 2
  REGION 1..12: note = Table B: HLA-DRB1*04:04L HLA-DRB1*08:04L HLA-DRB3*02:01L HLA-DRB1*11:03L HLA-DRB1*11:04L HLA-DRB1*04:10L HLA-DRB1*09:01L HLA-DRB1*12:02L HLA-DRB1*14:54L HLA-DRB1*07:01L HLA-DRB1*04:08L
VPVSIINNTVYT

SEQ ID NO: 16894 - protein, 15 aa, Severe acute respiratory syndrome coronavirus 2
  REGION 1..15: note = Table B: HLA-DRB1*04:04L
GVDVELFENKTTLPV

SEQ ID NO: 16895 - protein, 11 aa, Severe acute respiratory syndrome coronavirus 2
  REGION 1..11: note = Table B: HLA-DRB1*04:04L HLA-DPA1*01:03-B1*02:01L HLA-DRB1*08:02L
LFENKTTLPVN

SEQ ID NO: 16896 - protein, 12 aa, Severe acute respiratory syndrome coronavirus 2
  REGION 1..12: note = Table B: HLA-DRB1*04:04L HLA-DQA1*05:05-B1*03:116L HLA-DRB1*09:01L HLA-DPA1*01:03-B1*02:01L HLA-DPA1*01:03-B1*104:01L HLA-DRB1*07:01L
FENKTTLPVNVA

SEQ ID NO: 16897 - protein, 14 aa, Severe acute respiratory syndrome coronavirus 2
  REGION 1..14: note = Table B: HLA-DRB1*04:04L HLA-DRB1*01:01L HLA-DPA1*03:01-B1*04:02L HLA-DRB1*11:03L HLA-DRB3*01:01L HLA-DRB1*15:01L
RNIKPVPEVKILNN

SEQ ID NO: 16898 - protein, 13 aa, Severe acute respiratory syndrome coronavirus 2
  REGION 1..13: note = Table B: HLA-DRB1*04:04L HLA-DRB1*11:03L HLA-DRB1*11:04L HLA-DRB1*11:01L HLA-DRB1*09:01L HLA-DPA1*01:03-B1*02:01L HLA-DRB1*07:01L HLA-DRB1*10:01L HLA-DRB1*08:03L
VDIAANTVIWDYK

SEQ ID NO: 16899 - protein, 13 aa, Severe acute respiratory syndrome coronavirus 2
  REGION 1..13: note = Table B: HLA-DRB1*04:04L HLA-DRB1*08:77L HLA-DRB1*11:03L HLA-DRB1*14:02L HLA-DRB1*11:01L HLA-DQA1*05:01-B1*02:01L HLA-DPA1*02:01-B1*13:01L
NTVIWDYKRDAPA

SEQ ID NO: 16900 - protein, 15 aa, Severe acute respiratory syndrome coronavirus 2
  REGION 1..15: note = Table B: HLA-DRB1*04:04L HLA-DRB1*08:04L HLA-DRB1*04:08L
APAHISTIGVCSMTD

SEQ ID NO: 16901 - protein, 13 aa, Severe acute respiratory syndrome coronavirus 2
  REGION 1..13: note = Table B: HLA-DRB1*04:04L
VLITEGSVKGLQP

SEQ ID NO: 16902 - protein, 14 aa, Severe acute respiratory syndrome coronavirus 2
  REGION 1..14: note = Table B: HLA-DRB1*04:04L HLA-DRB1*11:04L HLA-DRB1*04:10L HLA-DRB1*04:08L
VKGLQPSVGPKQAS

SEQ ID NO: 16903 - protein, 17 aa, Severe acute respiratory syndrome coronavirus 2
  REGION 1..17: note = Table B: HLA-DRB1*04:04L
IGEAVKTQFNYYKKVDG

SEQ ID NO: 16904 - protein, 14 aa, Severe acute respiratory syndrome coronavirus 2
  REGION 1..14: note = Table B: HLA-DRB1*04:04L HLA-DRB1*08:04L HLA-DRB1*04:08L
DGVVQQLPETYFTQ

SEQ ID NO: 16905 - protein, 13 aa, Severe acute respiratory syndrome coronavirus 2
  REGION 1..13: note = Table B: HLA-DRB1*04:04L HLA-DRB1*11:04L HLA-DRB1*14:02L HLA-DQA1*01:01-B1*05:01L HLA-DRB1*11:01L HLA-DQA1*05:05-B1*03:116L HLA-DRB1*04:10L HLA-DRB3*01:01L HLA-DPA1*01:03-B1*02:01L HLA-DPA1*01:03-B1*104:01L
  REGION 1..13: note = CONT. FROM ABOVE: HLA-DRB1*10:01L HLA-DRB1*08:02L HLA-DRB1*08:03 L
LPETYFTQSRNLQ

SEQ ID NO: 16906 - protein, 14 aa, Severe acute respiratory syndrome coronavirus 2
  REGION 1..14: note = Table B: HLA-DRB1*04:04L HLA-DRB1*12:01L HLA-DQA1*01:03-B1*06:01L HLA-DRB1*15:03L
TQSRNLQEFKPRSQ

SEQ ID NO: 16907 - protein, 13 aa, Severe acute respiratory syndrome coronavirus 2
  REGION 1..13: note = Table B: HLA-DRB1*04:04L
HIVYGDFSHSQLG

SEQ ID NO: 16908 - protein, 14 aa, Severe acute respiratory syndrome coronavirus 2
  REGION 1..14: note = Table B: HLA-DRB1*04:04L HLA-DQA1*01:02-B1*06:02L HLA-DPA1*01:03-B1*03:01L
LAKRFKESPFELED

SEQ ID NO: 16909 - protein, 12 aa, Severe acute respiratory syndrome coronavirus 2
  REGION 1..12: note = Table B: HLA-DRB1*04:04L HLA-DRB1*08:04L HLA-DRB1*08:77L HLA-DRB3*02:01L HLA-DPA1*03:01-B1*04:02L HLA-DRB1*11:03L HLA-DRB1*11:04L HLA-DRB1*14:02L HLA-DQA1*01:01-B1*05:01L HLA-DRB1*08:01L HLA-DRB1*09:01L HLA-DRB1*12:02L
  REGION 1..12: note = CONT. FROM ABOVE: HLA-DPA1*02:01-B1*13:01L HLA-DRB1*07:01L HLA-D RB1*08:03L
EDFIPMDSTVKN

SEQ ID NO: 16910 - protein, 13 aa, Severe acute respiratory syndrome coronavirus 2
  REGION 1..13: note = Table B: HLA-DRB1*04:04L HLA-DQA1*01:02-B1*06:02L HLA-DRB1*01:01L HLA-DPA1*03:01-B1*04:02L HLA-DRB1*03:01L HLA-DRB1*08:01L HLA-DRB1*11:01L HLA-DRB5*01:01L HLA-DRB1*13:01L HLA-DRB4*01:01L HLA-DRB1*09:01L HLA-DPA1*02:01-B1*13:01L
  REGION 1..13: note = CONT. FROM ABOVE: HLA-DPA1*01:02-B1*04:01L HLA-DRB1*07:01L HLA-D RB1*08:03L
KNYFITDAQTGSS

SEQ ID NO: 16911 - protein, 13 aa, Severe acute respiratory syndrome coronavirus 2
  REGION 1..13: note = Table B: HLA-DRB1*04:04L HLA-DRB1*11:02L
LDDFVEIIKSQDL

SEQ ID NO: 16912 - protein, 15 aa, Severe acute respiratory syndrome coronavirus 2
  REGION 1..15: note = Table B: HLA-DRB1*04:04L HLA-DRB3*02:01L HLA-DPA1*01:03-B1*03:01L HLA-DRB1*11:03L HLA-DRB1*11:04L HLA-DQA1*01:01-B1*05:01L HLA-DRB1*11:01L HLA-DQA1*05:05-B1*03:19L HLA-DRB1*04:10L
  REGION 1..15: note = CONT. FROM ABOVE: HLA-DPA1*01:03-B1*04:02L HLA-DRB3*01:01L HLA-D PA1*01:03-B1*02:01L HLA-DPA1*01:03-B1*104:01L HLA-DQA1*05:05-B1* 03:01L HLA-DRB1*07:01L
DGHVETFYPKLQSSQ

SEQ ID NO: 16913 - protein, 12 aa, Severe acute respiratory syndrome coronavirus 2
  REGION 1..12: note = Table B: HLA-DRB1*04:04L HLA-DPA1*02:01-B1*13:01L HLA-DRB1*07:01L
QNYGDSATLPKG

SEQ ID NO: 16914 - protein, 13 aa, Severe acute respiratory syndrome coronavirus 2
  REGION 1..13: note = Table B: HLA-DRB1*04:04L HLA-DRB1*01:02L HLA-DRB1*04:10L HLA-DRB1*12:01L HLA-DPA1*02:01-B1*13:01L HLA-DPA1*01:02-B1*04:01L HLA-DRB1*15:03L
NMRVIHFGAGSDK

SEQ ID NO: 16915 - protein, 14 aa, Severe acute respiratory syndrome coronavirus 2
  REGION 1..14: note = Table B: HLA-DRB1*04:04L HLA-DRB1*01:01L HLA-DRB1*11:01L HLA-DRB1*04:10L HLA-DRB3*01:01L HLA-DRB1*10:01L
LRQWLPTGTLLVDS

SEQ ID NO: 16916 - protein, 11 aa, Severe acute respiratory syndrome coronavirus 2
  REGION 1..11: note = Table B: HLA-DRB1*04:04L HLA-DRB1*03:01L HLA-DRB1*11:04L HLA-DRB1*14:02L HLA-DQA1*01:01-B1*05:01L HLA-DRB1*11:01L HLA-DPA1*01:03-B1*04:01L HLA-DRB1*09:01L HLA-DPA1*01:03-B1*04:02L HLA-DRB3*01:01L HLA-DRB1*07:01L
  REGION 1..11: note = CONT. FROM ABOVE: HLA-DRB1*10:01L HLA-DRB1*08:03L
YIFWRNTNPIQ

SEQ ID NO: 16917 - protein, 13 aa, Severe acute respiratory syndrome coronavirus 2
  REGION 1..13: note = Table B: HLA-DRB1*04:04L HLA-DRB1*01:01L HLA-DRB5*02:02L HLA-DRB3*01:01L HLA-DPA1*01:03-B1*104:01L
IFWRNTNPIQLSS

SEQ ID NO: 16918 - protein, 13 aa, Severe acute respiratory syndrome coronavirus 2
  REGION 1..13: note = Table B: HLA-DRB1*04:04L HLA-DRB1*11:03L HLA-DPA1*01:03-B1*02:01L HLA-DRB1*08:03L
SYSLFDMSKFPLK

SEQ ID NO: 16919 - protein, 13 aa, Severe acute respiratory syndrome coronavirus 2
  REGION 1..13: note = Table B: HLA-DRB1*04:04L HLA-DRB1*10:01L HLA-DRB1*04:08L
TAVMSLKEGQIND

SEQ ID NO: 16920 - protein, 14 aa, Severe acute respiratory syndrome coronavirus 2
  REGION 1..14: note = Table B: HLA-DRB1*04:04L HLA-DRB1*08:04L HLA-DPA1*01:03-B1*03:01L HLA-DRB1*08:01L HLA-DQA1*05:05-B1*03:19L HLA-DPA1*02:01-B1*13:01L HLA-DPA1*01:03-B1*104:01L HLA-DRB1*07:01L
INDMILSLLSKGRL

SEQ ID NO: 16921 - protein, 14 aa, Severe acute respiratory syndrome coronavirus 2
  REGION 1..14: note = Table B: HLA-DRB1*04:04L HLA-DPA1*01:03-B1*03:01L HLA-DRB1*11:04L HLA-DRB3*01:01L HLA-DPA1*02:01-B1*13:01L
NDMILSLLSKGRLI

SEQ ID NO: 16922 - protein, 12 aa, Severe acute respiratory syndrome coronavirus 2
  REGION 1..12: note = Table B: HLA-DRB1*04:04L HLA-DRB1*04:05L HLA-DRB1*01:02L HLA-DRB1*04:10L HLA-DRB1*07:01L
TTRTQLPPAYTN

SEQ ID NO: 16923 - protein, 16 aa, Severe acute respiratory syndrome coronavirus 2
  REGION 1..16: note = Table B: HLA-DRB1*04:04L HLA-DRB1*11:01L
LPPAYTNSFTRGVYYP

SEQ ID NO: 16924 - protein, 12 aa, Severe acute respiratory syndrome coronavirus 2
  REGION 1..12: note = Table B: HLA-DRB1*04:04L HLA-DRB1*08:04L HLA-DRB1*11:01L HLA-DRB1*04:10L HLA-DRB3*01:01L HLA-DPA1*02:01-B1*13:01L
RGVYYPDKVFRS

SEQ ID NO: 16925 - protein, 14 aa, Severe acute respiratory syndrome coronavirus 2
  REGION 1..14: note = Table B: HLA-DRB1*04:04L HLA-DRB1*08:04L HLA-DRB1*04:10L HLA-DQA1*05:05-B1*03:01L HLA-DRB1*04:08L
SSVLHSTQDLFLPF

SEQ ID NO: 16926 - protein, 15 aa, Severe acute respiratory syndrome coronavirus 2
  REGION 1..15: note = Table B: HLA-DRB1*04:04L HLA-DRB1*01:01L HLA-DPA1*03:01-B1*04:02L HLA-DRB1*03:01L HLA-DRB1*14:01L HLA-DRB1*11:01L HLA-DRB3*01:01L HLA-DRB1*07:01L
GTKRFDNPVLPFNDG

SEQ ID NO: 16927 - protein, 14 aa, Severe acute respiratory syndrome coronavirus 2
  REGION 1..14: note = Table B: HLA-DRB1*04:04L HLA-DRB1*03:01L HLA-DRB1*11:02L HLA-DRB1*13:01L HLA-DPA1*01:03-B1*02:01L HLA-DRB1*07:01L HLA-DRB1*08:02L
GVYFASTEKSNIIR

SEQ ID NO: 16928 - protein, 14 aa, Severe acute respiratory syndrome coronavirus 2
  REGION 1..14: note = Table B: HLA-DRB1*04:04L HLA-DRB1*08:04L HLA-DPA1*01:03-B1*03:01L HLA-DQA1*05:05-B1*03:19L HLA-DQA1*05:01-B1*02:01L HLA-DPA1*01:03-B1*04:01L HLA-DPA1*01:03-B1*04:02L HLA-DPA1*02:01-B1*13:01L
  REGION 1..14: note = CONT. FROM ABOVE: HLA-DPA1*01:03-B1*02:01L HLA-DPA1*01:03-B1*104 :01L HLA-DRB1*15:03L
IIRGWIFGTTLDSK

SEQ ID NO: 16929 - protein, 13 aa, Severe acute respiratory syndrome coronavirus 2
  REGION 1..13: note = Table B: HLA-DRB1*04:04L HLA-DRB3*02:01L HLA-DQA1*01-B1*05L HLA-DRB1*07:01L
FRVYSSANNCTFE

SEQ ID NO: 16930 - protein, 16 aa, Severe acute respiratory syndrome coronavirus 2
  REGION 1..16: note = Table B: HLA-DRB1*04:04L HLA-DRB1*08:04L HLA-DPA1*03:01-B1*04:02L HLA-DRB1*11:02L HLA-DRB1*11:04L HLA-DRB1*11:01L HLA-DRB3*01:01L HLA-DPA1*01:03-B1*02:01L
VGYLQPRTFLLKYNEN

SEQ ID NO: 16931 - protein, 16 aa, Severe acute respiratory syndrome coronavirus 2
  REGION 1..16: note = Table B: HLA-DRB1*04:04L HLA-DRB1*11:02L HLA-DRB1*11:03L HLA-DQA1*05:05-B1*03:116L HLA-DPA1*01:03-B1*04:02L HLA-DRB3*01:01L HLA-DPA1*01:03-B1*104:01L HLA-DRB1*07:01L HLA-DRB1*08:02L
QPRTFLLKYNENGTIT

SEQ ID NO: 16932 - protein, 13 aa, Severe acute respiratory syndrome coronavirus 2
  REGION 1..13: note = Table B: HLA-DRB1*04:04L HLA-DQA1*01:02-B1*06:02L HLA-DPA1*03:01-B1*04:02L HLA-DRB1*11:04L HLA-DRB1*08:01L HLA-DRB1*09:01L HLA-DPA1*02:01-B1*13:01L HLA-DRB1*10:01L HLA-DQA1*01:03-B1*06:01L HLA-DRB1*04:08L HLA-DRB1*08:03L
LLKYNENGTITDA

SEQ ID NO: 16933 - protein, 14 aa, Severe acute respiratory syndrome coronavirus 2
  REGION 1..14: note = Table B: HLA-DRB1*04:04L HLA-DRB1*16:01L HLA-DRB1*04:08L
TDAVDCALDPLSET

SEQ ID NO: 16934 - protein, 11 aa, Severe acute respiratory syndrome coronavirus 2
  REGION 1..11: note = Table B: HLA-DRB1*04:04L HLA-DRB1*08:01L HLA-DPA1*03:01-B1*105:01L
ESIVRFPNITN

SEQ ID NO: 16935 - protein, 15 aa, Severe acute respiratory syndrome coronavirus 2
  REGION 1..15: note = Table B: HLA-DRB1*04:04L HLA-DPA1*01:03-B1*04:02L HLA-DQA1*05:05-B1*03:01L HLA-DRB1*07:01L HLA-DQA1*01:03-B1*06:01L HLA-DRB1*04:08L
SPTKLNDLCFTNVYA

SEQ ID NO: 16936 - protein, 13 aa, Severe acute respiratory syndrome coronavirus 2
  REGION 1..13: note = Table B: HLA-DRB1*04:04L HLA-DRB1*04:05L HLA-DRB1*08:04L HLA-DRB1*08:77L HLA-DRB3*02:01L HLA-DPA1*01:03-B1*03:01L HLA-DRB1*11:03L HLA-DRB1*04:10L HLA-DRB1*12:02L HLA-DRB1*07:01L HLA-DRB1*04:08L
VRQIAPGQTGKIA

SEQ ID NO: 16937 - protein, 14 aa, Severe acute respiratory syndrome coronavirus 2
  REGION 1..14: note = Table B: HLA-DRB1*04:04L HLA-DRB3*01:01L HLA-DRB1*08:03L
IADYNYKLPDDFTG

SEQ ID NO: 16938 - protein, 14 aa, Severe acute respiratory syndrome coronavirus 2
  REGION 1..14: note = Table B: HLA-DRB1*04:04L
NSNNLDSKVGGNYN

SEQ ID NO: 16939 - protein, 14 aa, Severe acute respiratory syndrome coronavirus 2
  REGION 1..14: note = Table B: HLA-DRB1*04:04L HLA-DRB1*03:01L HLA-DRB1*11:02L HLA-DRB1*13:01L HLA-DPA1*02:01-B1*13:01L HLA-DPA1*01:02-B1*04:01L
KSNLKPFERDISTE

SEQ ID NO: 16940 - protein, 15 aa, Severe acute respiratory syndrome coronavirus 2
  REGION 1..15: note = Table B: HLA-DRB1*04:04L HLA-DQA1*01:01-B1*05:01L HLA-DRB1*08:01L
ERDISTEIYQAGSTP

SEQ ID NO: 16941 - protein, 14 aa, Severe acute respiratory syndrome coronavirus 2
  REGION 1..14: note = Table B: HLA-DRB1*04:04L HLA-DRB3*01:01L
RDIADTTDAVRDPQ

SEQ ID NO: 16942 - protein, 15 aa, Severe acute respiratory syndrome coronavirus 2
  REGION 1..15: note = Table B: HLA-DRB1*04:04L HLA-DPA1*03:01-B1*105:01L HLA-DRB1*10:01L HLA-DRB1*15:03L
VSVITPGTNTSNQVA

SEQ ID NO: 16943 - protein, 18 aa, Severe acute respiratory syndrome coronavirus 2
  REGION 1..18: note = Table B: HLA-DRB1*04:04L HLA-DRB1*11:01L HLA-DRB1*09:01L HLA-DRB1*07:01L HLA-DRB1*08:03L
TPGTNTSNQVAVLYQDVN

SEQ ID NO: 16944 - protein, 12 aa, Severe acute respiratory syndrome coronavirus 2
  REGION 1..12: note = Table B: HLA-DRB1*04:04L HLA-DQA1*01:02-B1*06:02L HLA-DRB1*14:01L HLA-DQA1*01:03-B1*06:01L HLA-DRB1*15:03L
SYQTQTNSPRRA

SEQ ID NO: 16945 - protein, 13 aa, Severe acute respiratory syndrome coronavirus 2
  REGION 1..13: note = Table B: HLA-DRB1*04:04L HLA-DRB1*04:05L HLA-DRB1*01:02L HLA-DRB4*03:01NL HLA-DPA1*03:01-B1*04:02L HLA-DRB1*14:01L HLA-DQA1*01-B1*05L HLA-DQA1*05:01-B1*02:01L HLA-DRB1*04:10L HLA-DPA1*03:01-B1*105:01L HLA-DRB1*14:54L HLA-DRB1*16:01L
  REGION 1..13: note = CONT. FROM ABOVE: HLA-DRB1*04:08L
QSIIAYTMSLGAE

SEQ ID NO: 16946 - protein, 13 aa, Severe acute respiratory syndrome coronavirus 2
  REGION 1..13: note = Table B: HLA-DRB1*04:04L HLA-DRB1*01:02L HLA-DRB1*08:04L HLA-DRB1*08:77L HLA-DRB3*02:01L HLA-DPA1*01:03-B1*03:01L HLA-DRB1*14:01L HLA-DRB1*11:03L HLA-DRB1*11:04L HLA-DRB1*14:02L HLA-DQA1*01:01-B1*05:01L HLA-DRB1*08:01L HLA-DRB1*11:01L
  REGION 1..13: note = CONT. FROM ABOVE: HLA-DRB5*01:01L HLA-DQA1*05:05-B1*03:116L HLA- DRB1*09:01L HLA-DPA1*01:03-B1*04:02L HLA-DRB1*12:02L HLA-DPA1*02 :01-B1*13:01L HLA-DPA1*01:03-B1*104:01L HLA-DRB1*07:01L HLA-DRB1 *10:01L HLA-DRB1*04:08L HLA-DRB1*15:03L
VAYSNNSIAIPTN

SEQ ID NO: 16947 - protein, 14 aa, Severe acute respiratory syndrome coronavirus 2
  REGION 1..14: note = Table B: HLA-DRB1*04:04L HLA-DRB1*01:01L HLA-DRB3*02:01L HLA-DRB1*04:10L HLA-DRB1*07:01L HLA-DRB1*10:01L HLA-DRB1*04:08L
TQLNRALTGIAVEQ

SEQ ID NO: 16948 - protein, 14 aa, Severe acute respiratory syndrome coronavirus 2
  REGION 1..14: note = Table B: HLA-DRB1*04:04L HLA-DRB1*07:01L
QLNRALTGIAVEQD

SEQ ID NO: 16949 - protein, 15 aa, Severe acute respiratory syndrome coronavirus 2
  REGION 1..15: note = Table B: HLA-DRB1*04:04L HLA-DRB1*08:04L HLA-DRB1*11:03L HLA-DRB1*11:01L HLA-DRB1*07:01L
QEVFAQVKQIYKTPP

SEQ ID NO: 16950 - protein, 12 aa, Severe acute respiratory syndrome coronavirus 2
  REGION 1..12: note = Table B: HLA-DRB1*04:04L HLA-DRB1*08:01L HLA-DRB1*04:10L HLA-DPA1*02:01-B1*13:01L HLA-DRB1*14:54L
VKQIYKTPPIKD

SEQ ID NO: 16951 - protein, 14 aa, Severe acute respiratory syndrome coronavirus 2
  REGION 1..14: note = Table B: HLA-DRB1*04:04L
KQIYKTPPIKDFGG

SEQ ID NO: 16952 - protein, 14 aa, Severe acute respiratory syndrome coronavirus 2
  REGION 1..14: note = Table B: HLA-DRB1*04:04L HLA-DRB1*08:77L HLA-DRB1*03:01L HLA-DRB1*11:01L HLA-DRB1*04:10L HLA-DRB3*01:01L HLA-DPA1*01:03-B1*02:01L HLA-DRB1*07:01L HLA-DRB1*10:01L HLA-DRB1*08:02L HLA-DRB1*08:03L
IEDLLFNKVTLADA

SEQ ID NO: 16953 - protein, 13 aa, Severe acute respiratory syndrome coronavirus 2
  REGION 1..13: note = Table B: HLA-DRB1*04:04L HLA-DRB1*08:04L HLA-DPA1*03:01-B1*04:02L HLA-DRB1*11:04L HLA-DRB1*14:02L HLA-DRB1*08:01L HLA-DRB3*01:01L HLA-DPA1*01:03-B1*104:01L HLA-DPA1*01:02-B1*04:01L HLA-DRB1*10:01L HLA-DRB1*08:03L
FNKVTLADAGFIK

SEQ ID NO: 16954 - protein, 13 aa, Severe acute respiratory syndrome coronavirus 2
  REGION 1..13: note = Table B: HLA-DRB1*04:04L HLA-DRB1*01:01L HLA-DPA1*01:02-B1*04:01L HLA-DRB1*10:01L
NKVTLADAGFIKQ

SEQ ID NO: 16955 - protein, 14 aa, Severe acute respiratory syndrome coronavirus 2
  REGION 1..14: note = Table B: HLA-DRB1*04:04L HLA-DPA1*01:03-B1*104:01L HLA-DPA1*01:02-B1*04:01L HLA-DRB1*07:01L HLA-DRB1*16:01L HLA-DRB1*04:08L HLA-DRB1*15:03L
IAARDLICAQKFNG

SEQ ID NO: 16956 - protein, 13 aa, Severe acute respiratory syndrome coronavirus 2
  REGION 1..13: note = Table B: HLA-DRB1*04:04L HLA-DRB1*04:05L HLA-DRB1*01:02L HLA-DRB4*03:01NL HLA-DQA1*05:01-B1*02:01L HLA-DRB1*04:10L HLA-DRB1*12:01L HLA-DRB1*14:54L HLA-DRB1*16:01L HLA-DRB1*04:08L
AGTITSGWTFGAG

SEQ ID NO: 16957 - protein, 14 aa, Severe acute respiratory syndrome coronavirus 2
  REGION 1..14: note = Table B: HLA-DRB1*04:04L HLA-DRB3*02:01L HLA-DPA1*03:01-B1*04:02L HLA-DRB1*08:01L HLA-DPA1*02:01-B1*13:01L HLA-DRB1*07:01L
GIGVTQNVLYENQK

SEQ ID NO: 16958 - protein, 13 aa, Severe acute respiratory syndrome coronavirus 2
  REGION 1..13: note = Table B: HLA-DRB1*04:04L HLA-DRB1*11:01L HLA-DPA1*02:01-B1*13:01L
QNVLYENQKLIAN

SEQ ID NO: 16959 - protein, 13 aa, Severe acute respiratory syndrome coronavirus 2
  REGION 1..13: note = Table B: HLA-DRB1*04:04L HLA-DRB1*11:02L HLA-DQA1*05:05-B1*03:116L HLA-DPA1*02:01-B1*13:01L HLA-DRB1*10:01L HLA-DRB1*08:02L
NVLYENQKLIANQ

SEQ ID NO: 16960 - protein, 13 aa, Severe acute respiratory syndrome coronavirus 2
  REGION 1..13: note = Table B: HLA-DRB1*04:04L HLA-DRB1*11:03L HLA-DRB1*11:04L HLA-DRB1*14:02L HLA-DQA1*01:01-B1*05:01L HLA-DPA1*01:03-B1*04:02L HLA-DRB1*07:01L HLA-DRB1*10:01L HLA-DRB1*08:03L
ANQFNSAIGKIQD

SEQ ID NO: 16961 - protein, 12 aa, Severe acute respiratory syndrome coronavirus 2
  REGION 1..12: note = Table B: HLA-DRB1*04:04L
NSAIGKIQDSLS

SEQ ID NO: 16962 - protein, 12 aa, Severe acute respiratory syndrome coronavirus 2
  REGION 1..12: note = Table B: HLA-DRB1*04:04L HLA-DRB1*08:04L HLA-DRB1*11:04L HLA-DRB1*10:01L
SAIGKIQDSLSS

SEQ ID NO: 16963 - protein, 12 aa, Severe acute respiratory syndrome coronavirus 2
  REGION 1..12: note = Table B: HLA-DRB1*04:04L HLA-DRB1*04:05L HLA-DRB1*01:02L HLA-DPA1*01:03-B1*03:01L HLA-DRB1*04:10L HLA-DPA1*01:03-B1*04:02L HLA-DRB1*04:08L HLA-DRB1*15:03L
LSSTASALGKLQ

SEQ ID NO: 16964 - protein, 13 aa, Severe acute respiratory syndrome coronavirus 2
  REGION 1..13: note = Table B: HLA-DRB1*04:04L
ASALGKLQDVVNQ

SEQ ID NO: 16965 - protein, 12 aa, Severe acute respiratory syndrome coronavirus 2
  REGION 1..12: note = Table B: HLA-DRB1*04:04L HLA-DQA1*01:02-B1*06:02L HLA-DRB1*01:02L HLA-DQA1*01:01-B1*05:01L HLA-DRB1*12:01L HLA-DPA1*02:01-B1*13:01L HLA-DRB1*04:08L
GKLQDVVNQNAQ

SEQ ID NO: 16966 - protein, 14 aa, Severe acute respiratory syndrome coronavirus 2
  REGION 1..14: note = Table B: HLA-DRB1*04:04L HLA-DRB1*08:01L HLA-DPA1*01:03-B1*04:02L HLA-DPA1*02:01-B1*13:01L HLA-DPA1*01:03-B1*104:01L
VVNQNAQALNTLVK

SEQ ID NO: 16967 - protein, 13 aa, Severe acute respiratory syndrome coronavirus 2
  REGION 1..13: note = Table B: HLA-DRB1*04:04L HLA-DRB3*02:01L
QSLQTYVTQQLIR

SEQ ID NO: 16968 - protein, 13 aa, Severe acute respiratory syndrome coronavirus 2
  REGION 1..13: note = Table B: HLA-DRB1*04:04L
SLQTYVTQQLIRA

SEQ ID NO: 16969 - protein, 13 aa, Severe acute respiratory syndrome coronavirus 2
  REGION 1..13: note = Table B: HLA-DRB1*04:04L HLA-DRB1*08:04L HLA-DPA1*01:03-B1*03:01L HLA-DPA1*01:03-B1*04:01L HLA-DRB1*04:10L HLA-DPA1*01:03-B1*04:02L HLA-DRB1*14:54L HLA-DPA1*01:03-B1*02:01L HLA-DRB1*10:01L
LQTYVTQQLIRAA

SEQ ID NO: 16970 - protein, 14 aa, Severe acute respiratory syndrome coronavirus 2
  REGION 1..14: note = Table B: HLA-DRB1*04:04L
VVFLHVTYVPAQEK

SEQ ID NO: 16971 - protein, 13 aa, Severe acute respiratory syndrome coronavirus 2
  REGION 1..13: note = Table B: HLA-DRB1*04:04L HLA-DPA1*01:03-B1*03:01L
FLHVTYVPAQEKN

SEQ ID NO: 16972 - protein, 14 aa, Severe acute respiratory syndrome coronavirus 2
  REGION 1..14: note = Table B: HLA-DRB1*04:04L HLA-DPA1*01:03-B1*104:01L
LHVTYVPAQEKNFT

SEQ ID NO: 16973 - protein, 14 aa, Severe acute respiratory syndrome coronavirus 2
  REGION 1..14: note = Table B: HLA-DRB1*04:04L
HVTYVPAQEKNFTT

SEQ ID NO: 16974 - protein, 17 aa, Severe acute respiratory syndrome coronavirus 2
  REGION 1..17: note = Table B: HLA-DRB1*04:04L
FPREGVFVSNGTHWFVT

SEQ ID NO: 16975 - protein, 12 aa, Severe acute respiratory syndrome coronavirus 2
  REGION 1..12: note = Table B: HLA-DRB1*04:04L HLA-DRB1*08:04L HLA-DRB1*11:04L HLA-DRB1*04:10L HLA-DRB1*04:08L
DVVIGIVNNTVY

SEQ ID NO: 16976 - protein, 12 aa, Severe acute respiratory syndrome coronavirus 2
  REGION 1..12: note = Table B: HLA-DRB1*04:04L HLA-DRB1*04:08L
VVIGIVNNTVYD

SEQ ID NO: 16977 - protein, 13 aa, Severe acute respiratory syndrome coronavirus 2
  REGION 1..13: note = Table B: HLA-DRB1*04:04L HLA-DRB1*08:04L HLA-DRB1*11:03L HLA-DPA1*02:01-B1*13:01L HLA-DQA1*05:05-B1*03:01L HLA-DRB1*04:08L
VIGIVNNTVYDPL

SEQ ID NO: 16978 - protein, 14 aa, Severe acute respiratory syndrome coronavirus 2
  REGION 1..14: note = Table B: HLA-DRB1*04:04L HLA-DRB1*08:04L HLA-DRB1*08:77L HLA-DRB3*02:01L HLA-DRB1*14:01L HLA-DRB1*11:03L HLA-DRB1*14:02L HLA-DRB1*08:01L HLA-DPA1*01:03-B1*04:01L HLA-DPA1*01:03-B1*04:02L HLA-DRB1*12:02L
  REGION 1..14: note = CONT. FROM ABOVE: HLA-DPA1*01:03-B1*104:01L HLA-DRB1*07:01L HLA- DRB1*08:03L
GIVNNTVYDPLQPE

SEQ ID NO: 16979 - protein, 12 aa, Severe acute respiratory syndrome coronavirus 2
  REGION 1..12: note = Table B: HLA-DRB1*04:04L HLA-DRB1*08:04L HLA-DRB1*11:03L HLA-DRB1*11:04L HLA-DRB5*01:01L HLA-DRB1*12:02L
TVYDPLQPELDS

SEQ ID NO: 16980 - protein, 12 aa, Severe acute respiratory syndrome coronavirus 2
  REGION 1..12: note = Table B: HLA-DRB1*04:04L HLA-DRB1*11:04L HLA-DRB1*11:01L HLA-DRB3*01:01L HLA-DRB1*08:03L
KYFKNHTSPDVD

SEQ ID NO: 16981 - protein, 13 aa, Severe acute respiratory syndrome coronavirus 2
  REGION 1..13: note = Table B: HLA-DRB1*04:04L HLA-DRB4*03:01NL HLA-DRB1*11:03L HLA-DRB1*11:04L HLA-DRB1*11:01L HLA-DRB1*04:10L HLA-DRB3*01:01L HLA-DPA1*01:03-B1*104:01L HLA-DRB1*08:03L
IDRLNEVAKNLNE

SEQ ID NO: 16982 - protein, 15 aa, Severe acute respiratory syndrome coronavirus 2
  REGION 1..15: note = Table B: HLA-DRB1*04:04L HLA-DRB1*08:04L HLA-DPA1*01:03-B1*04:02L
VAKNLNESLIDLQEL

SEQ ID NO: 16983 - protein, 14 aa, Severe acute respiratory syndrome coronavirus 2
  REGION 1..14: note = Table B: HLA-DRB1*04:04L HLA-DQA1*01:01-B1*05:01L
NESLIDLQELGKYE

SEQ ID NO: 16984 - protein, 15 aa, Severe acute respiratory syndrome coronavirus 2
  REGION 1..15: note = Table B: HLA-DRB1*04:04L HLA-DPA1*01:03-B1*03:01L HLA-DPA1*01:03-B1*04:02L
TVTLKQGEIKDATPS

SEQ ID NO: 16985 - protein, 13 aa, Severe acute respiratory syndrome coronavirus 2
  REGION 1..13: note = Table B: HLA-DRB1*04:04L HLA-DRB1*08:01L HLA-DRB1*04:10L HLA-DRB1*14:54L
GEIKDATPSDFVR

SEQ ID NO: 16986 - protein, 11 aa, Severe acute respiratory syndrome coronavirus 2
  REGION 1..11: note = Table B: HLA-DRB1*04:04L HLA-DRB1*01:01L HLA-DRB1*08:04L HLA-DRB1*14:02L HLA-DRB1*08:01L HLA-DRB1*11:01L HLA-DPA1*01:03-B1*04:02L HLA-DPA1*01:03-B1*104:01L HLA-DRB1*10:01L HLA-DRB1*08:03L
FVRATATIPIQ

SEQ ID NO: 16987 - protein, 14 aa, Severe acute respiratory syndrome coronavirus 2
  REGION 1..14: note = Table B: HLA-DRB1*04:04L HLA-DRB1*01:01L
LAVFQSASKIITLK

SEQ ID NO: 16988 - protein, 17 aa, Severe acute respiratory syndrome coronavirus 2
  REGION 1..17: note = Table B: HLA-DRB1*04:04L HLA-DPA1*01:03-B1*104:01L
IPYNSVTSSIVITSGDG

SEQ ID NO: 16989 - protein, 13 aa, Severe acute respiratory syndrome coronavirus 2
  REGION 1..13: note = Table B: HLA-DRB1*04:04L HLA-DRB1*04:05L HLA-DRB1*11:03L HLA-DRB1*14:02L HLA-DRB1*15:01L
DYYQLYSTQLSTD

SEQ ID NO: 16990 - protein, 16 aa, Severe acute respiratory syndrome coronavirus 2
  REGION 1..16: note = Table B: HLA-DRB1*04:04L HLA-DRB1*09:01L HLA-DRB1*07:01L
SGVVNPVMEPIYDEPT

SEQ ID NO: 16991 - protein, 13 aa, Severe acute respiratory syndrome coronavirus 2
  REGION 1..13: note = Table B: HLA-DRB1*04:04L HLA-DQA1*03:01-B1*03:02L HLA-DRB1*16:01L HLA-DRB1*04:08L HLA-DRB1*15:03L
PVMEPIYDEPTTT

SEQ ID NO: 16992 - protein, 14 aa, Severe acute respiratory syndrome coronavirus 2
  REGION 1..14: note = Table B: HLA-DRB1*04:04L HLA-DRB1*01:01L HLA-DRB3*02:01L HLA-DPA1*01:03-B1*03:01L HLA-DRB1*11:02L HLA-DRB1*11:03L HLA-DRB1*14:02L HLA-DQA1*05:05-B1*03:19L HLA-DQA1*05:05-B1*03:116L HLA-DPA1*01:03-B1*104:01L
  REGION 1..14: note = CONT. FROM ABOVE: HLA-DQA1*05:05-B1*03:01L HLA-DRB1*07:01L HLA-D RB1*10:01L HLA-DRB1*08:02L
KPSFYVYSRVKNLN

SEQ ID NO: 16993 - protein, 14 aa, Severe acute respiratory syndrome coronavirus 2
  REGION 1..14: note = Table B: HLA-DRB1*04:04L HLA-DPA1*02:01-B1*13:01L HLA-DQA1*02:01-B1*03:03L
VYSRVKNLNSSRVP

SEQ ID NO: 16994 - protein, 14 aa, Severe acute respiratory syndrome coronavirus 2
  REGION 1..14: note = Table B: HLA-DRB1*04:04L
ADSNGTITVEELKK

SEQ ID NO: 16995 - protein, 14 aa, Severe acute respiratory syndrome coronavirus 2
  REGION 1..14: note = Table B: HLA-DRB1*04:04L HLA-DRB1*11:03L
GTITVEELKKLLEQ

SEQ ID NO: 16996 - protein, 14 aa, Severe acute respiratory syndrome coronavirus 2
  REGION 1..14: note = Table B: HLA-DRB1*04:04L HLA-DRB1*13:01L HLA-DPA1*01:03-B1*02:01L
TRSMWSFNPETNIL

SEQ ID NO: 16997 - protein, 16 aa, Severe acute respiratory syndrome coronavirus 2
  REGION 1..16: note = Table B: HLA-DRB1*04:04L HLA-DRB1*03:01L HLA-DRB1*11:02L HLA-DRB1*11:03L HLA-DRB1*11:04L HLA-DRB1*11:01L HLA-DRB4*01:01L HLA-DRB1*09:01L HLA-DRB3*01:01L HLA-DRB1*07:01L HLA-DRB1*10:01L
NPETNILLNVPLHGTI

SEQ ID NO: 16998 - protein, 16 aa, Severe acute respiratory syndrome coronavirus 2
  REGION 1..16: note = Table B: HLA-DRB1*04:04L HLA-DRB1*08:04L HLA-DRB3*01:01L HLA-DPA1*02:01-B1*13:01L
ESELVIGAVILRGHLR

SEQ ID NO: 16999 - protein, 14 aa, Severe acute respiratory syndrome coronavirus 2
  REGION 1..14: note = Table B: HLA-DRB1*04:04L HLA-DRB1*08:01L HLA-DRB3*01:01L
EITVATSRTLSYYK

SEQ ID NO: 17000 - protein, 14 aa, Severe acute respiratory syndrome coronavirus 2
  REGION 1..14: note = Table B: HLA-DRB1*04:04L HLA-DRB3*01:01L
SRTLSYYKLGASQR

SEQ ID NO: 17001 - protein, 14 aa, Severe acute respiratory syndrome coronavirus 2
  REGION 1..14: note = Table B: HLA-DRB1*04:04L HLA-DPA1*01:03-B1*04:02L HLA-DRB3*01:01L HLA-DPA1*02:01-B1*13:01L HLA-DPA1*01:03-B1*104:01L HLA-DRB1*08:02L HLA-DRB1*08:03L
YKLGASQRVAGDSG

SEQ ID NO: 17002 - protein, 14 aa, Severe acute respiratory syndrome coronavirus 2
  REGION 1..14: note = Table B: HLA-DRB1*04:04L HLA-DQA1*01-B1*05L HLA-DPA1*01:03-B1*02:01L HLA-DQA1*05:05-B1*03:01L HLA-DRB1*07:01L
IIMRTFKVSIWNLD

SEQ ID NO: 17003 - protein, 14 aa, Severe acute respiratory syndrome coronavirus 2
  REGION 1..14: note = Table B: HLA-DRB1*04:04L HLA-DRB1*03:01L HLA-DRB1*11:04L HLA-DRB1*08:01L HLA-DRB1*11:01L HLA-DRB3*01:01L HLA-DPA1*01:03-B1*02:01L HLA-DRB1*10:01L HLA-DRB1*08:02L
NLDYIINLIIKNLS

SEQ ID NO: 17004 - protein, 15 aa, Severe acute respiratory syndrome coronavirus 2
  REGION 1..15: note = Table B: HLA-DRB1*04:04L HLA-DRB1*14:01L HLA-DRB1*11:02L HLA-DRB1*10:01L HLA-DRB1*08:03L
ADNKFALTCFSTQFA

SEQ ID NO: 17005 - protein, 14 aa, Severe acute respiratory syndrome coronavirus 2
  REGION 1..14: note = Table B: HLA-DRB1*04:04L HLA-DRB1*08:04L HLA-DRB3*02:01L HLA-DRB1*08:01L HLA-DRB1*04:08L
FIRQEEVQELYSPI

SEQ ID NO: 17006 - protein, 11 aa, Severe acute respiratory syndrome coronavirus 2
  REGION 1..11: note = Table B: HLA-DRB1*04:04L HLA-DRB1*04:05L HLA-DQA1*01:02-B1*06:02L HLA-DRB1*01:02L HLA-DRB4*03:01NL HLA-DRB1*04:10L HLA-DRB1*12:01L HLA-DRB1*14:54L HLA-DRB1*16:01L HLA-DRB1*04:08L HLA-DQA1*02:01-B1*03:03L
LGIITTVAAFH

SEQ ID NO: 17007 - protein, 11 aa, Severe acute respiratory syndrome coronavirus 2
  REGION 1..11: note = Table B: HLA-DRB1*04:04L HLA-DRB1*01:02L HLA-DRB1*14:01L HLA-DQA1*05:01-B1*02:01L HLA-DRB1*04:08L
GIITTVAAFHQ

SEQ ID NO: 17008 - protein, 11 aa, Severe acute respiratory syndrome coronavirus 2
  REGION 1..11: note = Table B: HLA-DRB1*04:04L HLA-DRB1*08:04L HLA-DRB1*08:77L HLA-DRB3*02:01L HLA-DPA1*03:01-B1*04:02L HLA-DRB1*11:03L HLA-DRB1*11:04L HLA-DRB1*14:02L HLA-DRB1*08:01L HLA-DRB5*01:01L HLA-DPA1*01:03-B1*04:01L HLA-DRB1*09:01L
  REGION 1..11: note = CONT. FROM ABOVE: HLA-DPA1*01:03-B1*04:02L HLA-DRB1*12:02L HLA-D PA1*02:01-B1*13:01L HLA-DPA1*01:03-B1*02:01L HLA-DPA1*01:03-B1*1 04:01L HLA-DRB1*07:01L HLA-DRB1*10:01L HLA-DRB1*08:03L
IITTVAAFHQE

SEQ ID NO: 17009 - protein, 13 aa, Severe acute respiratory syndrome coronavirus 2
  REGION 1..13: note = Table B: HLA-DRB1*04:04L HLA-DRB1*04:05L HLA-DRB1*01:02L HLA-DRB1*04:08L
PLIELCVDEAGSK

SEQ ID NO: 17010 - protein, 13 aa, Severe acute respiratory syndrome coronavirus 2
  REGION 1..13: note = Table B: HLA-DRB1*04:04L HLA-DRB1*08:04L HLA-DRB1*08:01L HLA-DRB1*04:10L HLA-DRB1*12:02L
SKSPIQYIDIGNY

SEQ ID NO: 17011 - protein, 15 aa, Severe acute respiratory syndrome coronavirus 2
  REGION 1..15: note = Table B: HLA-DRB1*04:04L HLA-DPA1*01:03-B1*03:01L HLA-DQA1*02:01-B1*03:03L
SKQRRPQGLPNNTAS

SEQ ID NO: 17012 - protein, 13 aa, Severe acute respiratory syndrome coronavirus 2
  REGION 1..13: note = Table B: HLA-DRB1*04:04L HLA-DRB1*14:01L HLA-DRB1*11:04L HLA-DRB1*11:01L HLA-DPA1*02:01-B1*13:01L HLA-DRB1*15:03L
TASWFTALTQHGK

SEQ ID NO: 17013 - protein, 11 aa, Severe acute respiratory syndrome coronavirus 2
  REGION 1..11: note = Table B: HLA-DRB1*04:04L HLA-DRB1*01:01L HLA-DRB1*08:04L HLA-DRB1*08:77L HLA-DRB3*02:01L HLA-DPA1*01:03-B1*03:01L HLA-DPA1*03:01-B1*04:02L HLA-DRB1*11:03L HLA-DRB1*11:04L HLA-DRB1*14:02L HLA-DRB1*11:01L HLA-DPA1*01:03-B1*04:02L
  REGION 1..11: note = CONT. FROM ABOVE: HLA-DRB1*12:02L HLA-DPA1*02:01-B1*13:01L HLA-D RB1*07:01L HLA-DRB1*10:01L HLA-DRB1*08:03L
FTALTQHGKED

SEQ ID NO: 17014 - protein, 15 aa, Severe acute respiratory syndrome coronavirus 2
  REGION 1..15: note = Table B: HLA-DRB1*04:04L HLA-DRB1*01:01L HLA-DRB1*08:04L HLA-DRB1*08:77L HLA-DRB3*02:01L HLA-DRB1*11:03L HLA-DRB1*11:04L HLA-DRB1*12:02L HLA-DRB1*07:01L
AAIVLQLPQGTTLPK

SEQ ID NO: 17015 - protein, 17 aa, Severe acute respiratory syndrome coronavirus 2
  REGION 1..17: note = Table B: HLA-DRB1*04:04L HLA-DRB1*04:10L
TPGSSRGTSPARMAGNG

SEQ ID NO: 17016 - protein, 15 aa, Severe acute respiratory syndrome coronavirus 2
  REGION 1..15: note = Table B: HLA-DRB1*04:04L HLA-DRB1*08:04L HLA-DRB1*08:77L HLA-DRB3*02:01L HLA-DRB1*11:03L HLA-DRB1*11:04L HLA-DRB1*14:02L HLA-DQA1*01:01-B1*05:01L HLA-DRB5*01:01L HLA-DRB1*04:10L HLA-DRB1*12:02L HLA-DRB3*01:01L HLA-DPA1*03:01-B1*105:01L
  REGION 1..15: note = CONT. FROM ABOVE: HLA-DPA1*01:03-B1*104:01L HLA-DRB1*07:01L HLA- DRB1*10:01L HLA-DRB1*04:08L HLA-DRB1*15:03L
SPARMAGNGGDAALA

SEQ ID NO: 17017 - protein, 14 aa, Severe acute respiratory syndrome coronavirus 2
  REGION 1..14: note = Table B: HLA-DRB1*04:04L
ALALLLLDRLNQLE

SEQ ID NO: 17018 - protein, 15 aa, Severe acute respiratory syndrome coronavirus 2
  REGION 1..15: note = Table B: HLA-DRB1*04:04L HLA-DRB1*11:03L HLA-DRB1*12:01L HLA-DRB3*01:01L HLA-DRB1*14:17L HLA-DRB1*08:02L HLA-DRB1*15:03L
LNQLESKMSGKGQQQ

SEQ ID NO: 17019 - protein, 13 aa, Severe acute respiratory syndrome coronavirus 2
  REGION 1..13: note = Table B: HLA-DRB1*04:04L HLA-DRB1*04:05L HLA-DRB1*01:02L HLA-DRB1*07:01L
RQKRTATKAYNVT

SEQ ID NO: 17020 - protein, 14 aa, Severe acute respiratory syndrome coronavirus 2
  REGION 1..14: note = Table B: HLA-DRB1*04:04L HLA-DRB1*11:04L HLA-DRB1*11:01L HLA-DPA1*02:01-B1*13:01L HLA-DPA1*01:02-B1*04:01L
ATKAYNVTQAFGRR

SEQ ID NO: 17021 - protein, 14 aa, Severe acute respiratory syndrome coronavirus 2
  REGION 1..14: note = Table B: HLA-DRB1*04:04L HLA-DRB1*08:04L HLA-DRB1*04:08L
WPQIAQFAPSASAF

SEQ ID NO: 17022 - protein, 13 aa, Severe acute respiratory syndrome coronavirus 2
  REGION 1..13: note = Table B: HLA-DRB1*04:04L HLA-DRB1*11:04L HLA-DQA1*01:01-B1*05:01L HLA-DRB1*08:01L HLA-DRB5*01:01L HLA-DRB3*01:01L HLA-DPA1*01:03-B1*104:01L HLA-DRB1*08:03L
IAQFAPSASAFFG

SEQ ID NO: 17023 - protein, 16 aa, Severe acute respiratory syndrome coronavirus 2
  REGION 1..16: note = Table B: HLA-DRB1*04:04L HLA-DRB4*03:01NL HLA-DRB1*08:77L HLA-DRB1*11:02L HLA-DRB4*01:01L HLA-DRB1*09:01L HLA-DRB1*12:02L HLA-DRB3*01:01L HLA-DPA1*01:03-B1*02:01L HLA-DRB1*14:17L HLA-DRB1*07:01L HLA-DRB1*10:01L
APSASAFFGMSRIGME

SEQ ID NO: 17024 - protein, 12 aa, Severe acute respiratory syndrome coronavirus 2
  REGION 1..12: note = Table B: HLA-DRB1*04:04L HLA-DQA1*01:02-B1*06:02L HLA-DRB1*01:02L HLA-DPA1*01:03-B1*03:01L HLA-DQA1*05:01-B1*02:01L HLA-DPA1*02:01-B1*13:01L
MSRIGMEVTPSG

SEQ ID NO: 17025 - protein, 13 aa, Severe acute respiratory syndrome coronavirus 2
  REGION 1..13: note = Table B: HLA-DRB1*04:04L HLA-DRB1*14:01L HLA-DPA1*01:02-B1*04:01L
SRIGMEVTPSGTW

SEQ ID NO: 17026 - protein, 16 aa, Severe acute respiratory syndrome coronavirus 2
  REGION 1..16: note = Table B: HLA-DRB1*04:04L HLA-DRB1*04:08L
IGMEVTPSGTWLTYTG

SEQ ID NO: 17027 - protein, 14 aa, Severe acute respiratory syndrome coronavirus 2
  REGION 1..14: note = Table B: HLA-DRB1*04:04L HLA-DRB1*15:01L
TWLTYTGAIKLDDK

SEQ ID NO: 17028 - protein, 14 aa, Severe acute respiratory syndrome coronavirus 2
  REGION 1..14: note = Table B: HLA-DRB1*04:04L HLA-DRB1*01:02L
TLLPAADLDDFSKQ

SEQ ID NO: 17029 - protein, 16 aa, Severe acute respiratory syndrome coronavirus 2
  REGION 1..16: note = Table B: HLA-DRB1*04:04L HLA-DRB1*03:01L HLA-DRB1*11:02L HLA-DRB1*11:03L HLA-DRB1*14:02L HLA-DRB1*11:01L HLA-DPA1*01:03-B1*04:02L HLA-DPA1*01:03-B1*02:01L HLA-DQA1*05:05-B1*03:01L HLA-DRB1*08:03L
LPAADLDDFSKQLQQS

SEQ ID NO: 17030 - protein, 12 aa, Severe acute respiratory syndrome coronavirus 2
  REGION 1..12: note = Table B: HLA-DRB1*04:04L HLA-DRB1*08:04L HLA-DRB1*08:77L HLA-DRB1*11:03L HLA-DRB1*11:04L HLA-DQA1*01:01-B1*05:01L HLA-DRB3*01:01L HLA-DPA1*01:03-B1*02:01L HLA-DRB1*07:01L HLA-DRB1*04:08L
IAQVDVVNFNLT

SEQ ID NO: 17031 - protein, 14 aa, Severe acute respiratory syndrome coronavirus 2
  REGION 1..14: note = Table B: HLA-DRB1*04:05L HLA-DPA1*01:03-B1*03:01L HLA-DRB1*04:08L
THVQLSLPVLQVRD

SEQ ID NO: 17032 - protein, 13 aa, Severe acute respiratory syndrome coronavirus 2
  REGION 1..13: note = Table B: HLA-DRB1*04:05L HLA-DRB1*03:01L
EVLSEARQHLKDG

SEQ ID NO: 17033 - protein, 12 aa, Severe acute respiratory syndrome coronavirus 2
  REGION 1..12: note = Table B: HLA-DRB1*04:05L HLA-DRB1*01:02L HLA-DRB1*08:04L
PYVFIKRSDART

SEQ ID NO: 17034 - protein, 14 aa, Severe acute respiratory syndrome coronavirus 2
  REGION 1..14: note = Table B: HLA-DRB1*04:05L HLA-DRB1*12:01L HLA-DRB1*16:01L
RKVLLRKNGNKGAG

SEQ ID NO: 17035 - protein, 16 aa, Severe acute respiratory syndrome coronavirus 2
  REGION 1..16: note = Table B: HLA-DRB1*04:05L HLA-DQA1*01:02-B1*06:02L HLA-DRB1*11:04L HLA-DRB1*11:01L HLA-DRB3*01:01L HLA-DRB1*15:03L
KVLLRKNGNKGAGGHS

SEQ ID NO: 17036 - protein, 13 aa, Severe acute respiratory syndrome coronavirus 2
  REGION 1..13: note = Table B: HLA-DRB1*04:05L HLA-DQA1*01:02-B1*06:02L HLA-DPA1*02:01-B1*13:01L HLA-DPA1*03:01-B1*105:01L
ADLKSFDLGDELG

SEQ ID NO: 17037 - protein, 14 aa, Severe acute respiratory syndrome coronavirus 2
  REGION 1..14: note = Table B: HLA-DRB1*04:05L HLA-DRB1*04:08L
TDPYEDFQENWNTK

SEQ ID NO: 17038 - protein, 14 aa, Severe acute respiratory syndrome coronavirus 2
  REGION 1..14: note = Table B: HLA-DRB1*04:05L HLA-DRB1*15:03L
ENWNTKHSSGVTRE

SEQ ID NO: 17039 - protein, 12 aa, Severe acute respiratory syndrome coronavirus 2
  REGION 1..12: note = Table B: HLA-DRB1*04:05L HLA-DRB1*01:02L
RELMRELNGGAY

SEQ ID NO: 17040 - protein, 14 aa, Severe acute respiratory syndrome coronavirus 2
  REGION 1..14: note = Table B: HLA-DRB1*04:05L HLA-DRB1*01:02L HLA-DPA1*01:03-B1*03:01L HLA-DRB1*12:01L HLA-DPA1*02:01-B1*13:01L HLA-DPA1*01:03-B1*104:01L HLA-DQA1*05:05-B1*03:01L
LLARAGKASCTLSE

SEQ ID NO: 17041 - protein, 12 aa, Severe acute respiratory syndrome coronavirus 2
  REGION 1..12: note = Table B: HLA-DRB1*04:05L HLA-DRB1*12:01L
IDTKRGVYCCRE

SEQ ID NO: 17042 - protein, 12 aa, Severe acute respiratory syndrome coronavirus 2
  REGION 1..12: note = Table B: HLA-DRB1*04:05L HLA-DRB1*12:01L
DTKRGVYCCREH

SEQ ID NO: 17043 - protein, 12 aa, Severe acute respiratory syndrome coronavirus 2
  REGION 1..12: note = Table B: HLA-DRB1*04:05L HLA-DQA1*01:02-B1*06:02L HLA-DRB1*01:02L HLA-DRB1*12:01L HLA-DRB1*04:08L HLA-DRB1*15:03L
HEIAWYTERSEK

SEQ ID NO: 17044 - protein, 11 aa, Severe acute respiratory syndrome coronavirus 2
  REGION 1..11: note = Table B: HLA-DRB1*04:05L HLA-DRB1*01:01L HLA-DPA1*01:03-B1*03:01L HLA-DPA1*03:01-B1*04:02L HLA-DRB1*14:01L HLA-DRB1*14:02L HLA-DRB1*12:02L HLA-DRB1*07:01L HLA-DRB1*10:01L
SYELQTPFEIK

SEQ ID NO: 17045 - protein, 15 aa, Severe acute respiratory syndrome coronavirus 2
  REGION 1..15: note = Table B: HLA-DRB1*04:05L HLA-DRB1*11:04L
IKTIQPRVEKKKLDG

SEQ ID NO: 17046 - protein, 13 aa, Severe acute respiratory syndrome coronavirus 2
  REGION 1..13: note = Table B: HLA-DRB1*04:05L HLA-DRB1*08:04L HLA-DRB1*14:02L HLA-DRB1*11:01L HLA-DPA1*01:03-B1*104:01L
ETSWQTGDFVKAT

SEQ ID NO: 17047 - protein, 15 aa, Severe acute respiratory syndrome coronavirus 2
  REGION 1..15: note = Table B: HLA-DRB1*04:05L HLA-DRB1*01:02L HLA-DRB1*12:01L HLA-DRB1*16:01L HLA-DRB1*04:08L
LPQNAVVKIYCPACH

SEQ ID NO: 17048 - protein, 12 aa, Severe acute respiratory syndrome coronavirus 2
  REGION 1..12: note = Table B: HLA-DRB1*04:05L HLA-DRB1*01:02L HLA-DPA1*01:03-B1*03:01L HLA-DRB1*12:01L HLA-DPA1*02:01-B1*13:01L HLA-DRB1*15:03L
AVVKIYCPACHN

SEQ ID NO: 17049 - protein, 13 aa, Severe acute respiratory syndrome coronavirus 2
  REGION 1..13: note = Table B: HLA-DRB1*04:05L HLA-DQA1*01:02-B1*06:02L HLA-DRB1*01:02L HLA-DPA1*01:03-B1*03:01L HLA-DRB1*12:01L HLA-DPA1*02:01-B1*13:01L
VVKIYCPACHNSE

SEQ ID NO: 17050 - protein, 16 aa, Severe acute respiratory syndrome coronavirus 2
  REGION 1..16: note = Table B: HLA-DRB1*04:05L HLA-DRB1*08:04L HLA-DRB1*08:01L HLA-DPA1*02:01-B1*13:01L HLA-DRB1*04:08L
VKIYCPACHNSEVGPE

SEQ ID NO: 17051 - protein, 13 aa, Severe acute respiratory syndrome coronavirus 2
  REGION 1..13: note = Table B: HLA-DRB1*04:05L
VGPEHSLAEYHNE

SEQ ID NO: 17052 - protein, 14 aa, Severe acute respiratory syndrome coronavirus 2
  REGION 1..14: note = Table B: HLA-DRB1*04:05L
NESGLKTILRKGGR

SEQ ID NO: 17053 - protein, 14 aa, Severe acute respiratory syndrome coronavirus 2
  REGION 1..14: note = Table B: HLA-DRB1*04:05L HLA-DRB1*11:02L HLA-DRB1*13:01L HLA-DQA1*05:05-B1*03:116L HLA-DRB1*14:54L HLA-DRB1*08:02L HLA-DRB1*08:03L HLA-DRB1*15:03L
ESGLKTILRKGGRT

SEQ ID NO: 17054 - protein, 16 aa, Severe acute respiratory syndrome coronavirus 2
  REGION 1..16: note = Table B: HLA-DRB1*04:05L
LKTILRKGGRTIAFGG

SEQ ID NO: 17055 - protein, 13 aa, Severe acute respiratory syndrome coronavirus 2
  REGION 1..13: note = Table B: HLA-DRB1*04:05L HLA-DPA1*01:03-B1*03:01L HLA-DRB1*12:01L HLA-DPA1*02:01-B1*13:01L HLA-DPA1*01:03-B1*104:01L
QKEKVNINIVGDF

SEQ ID NO: 17056 - protein, 12 aa, Severe acute respiratory syndrome coronavirus 2
  REGION 1..12: note = Table B: HLA-DRB1*04:05L HLA-DRB1*12:01L HLA-DPA1*02:01-B1*13:01L
EKVNINIVGDFK

SEQ ID NO: 17057 - protein, 14 aa, Severe acute respiratory syndrome coronavirus 2
  REGION 1..14: note = Table B: HLA-DRB1*04:05L HLA-DQA1*05:05-B1*03:01L HLA-DRB1*04:08L
EEIAIILASFSAST

SEQ ID NO: 17058 - protein, 12 aa, Severe acute respiratory syndrome coronavirus 2
  REGION 1..12: note = Table B: HLA-DRB1*04:05L HLA-DRB1*01:02L HLA-DQA1*01-B1*05L HLA-DRB4*02:01NL HLA-DRB1*04:08L
SASTSAFVETVK

SEQ ID NO: 17059 - protein, 12 aa, Severe acute respiratory syndrome coronavirus 2
  REGION 1..12: note = Table B: HLA-DRB1*04:05L HLA-DRB1*01:02L HLA-DPA1*01:03-B1*03:01L HLA-DQA1*01-B1*05L HLA-DRB4*02:01NL HLA-DRB1*14:17L HLA-DPA1*01:02-B1*04:01L HLA-DRB1*04:08L HLA-DRB1*15:03L
ASTSAFVETVKG

SEQ ID NO: 17060 - protein, 13 aa, Severe acute respiratory syndrome coronavirus 2
  REGION 1..13: note = Table B: HLA-DRB1*04:05L HLA-DPA1*01:03-B1*03:01L HLA-DRB1*12:01L HLA-DPA1*02:01-B1*13:01L
KAFKQIVESCGNF

SEQ ID NO: 17061 - protein, 13 aa, Severe acute respiratory syndrome coronavirus 2
  REGION 1..13: note = Table B: HLA-DRB1*04:05L HLA-DRB1*01:02L HLA-DPA1*01:03-B1*03:01L HLA-DRB1*12:01L HLA-DPA1*02:01-B1*13:01L
AFKQIVESCGNFK

SEQ ID NO: 17062 - protein, 12 aa, Severe acute respiratory syndrome coronavirus 2
  REGION 1..12: note = Table B: HLA-DRB1*04:05L HLA-DRB1*01:02L HLA-DRB3*02:01L HLA-DRB1*12:02L HLA-DRB1*14:54L
IGEQKSILSPLY

SEQ ID NO: 17063 - protein, 14 aa, Severe acute respiratory syndrome coronavirus 2
  REGION 1..14: note = Table B: HLA-DRB1*04:05L
RVVRSIFSRTLETA

SEQ ID NO: 17064 - protein, 14 aa, Severe acute respiratory syndrome coronavirus 2
  REGION 1..14: note = Table B: HLA-DRB1*04:05L HLA-DRB1*08:01L HLA-DPA1*01:03-B1*04:02L HLA-DPA1*02:01-B1*13:01L HLA-DQA1*05:05-B1*03:01L
VVRSIFSRTLETAQ

SEQ ID NO: 17065 - protein, 12 aa, Severe acute respiratory syndrome coronavirus 2
  REGION 1..12: note = Table B: HLA-DRB1*04:05L HLA-DRB4*03:01NL HLA-DRB1*08:04L HLA-DPA1*01:03-B1*03:01L HLA-DQA1*01:01-B1*05:01L HLA-DRB1*08:01L HLA-DQA1*01-B1*05L HLA-DPA1*01:03-B1*04:01L HLA-DRB1*04:10L HLA-DPA1*01:03-B1*04:02L HLA-DRB1*12:01L
  REGION 1..12: note = CONT. FROM ABOVE: HLA-DPA1*02:01-B1*13:01L HLA-DRB1*14:54L HLA-D QA1*05:05-B1*03:01L HLA-DRB1*04:08L
SIFSRTLETAQN

SEQ ID NO: 17066 - protein, 12 aa, Severe acute respiratory syndrome coronavirus 2
  REGION 1..12: note = Table B: HLA-DRB1*04:05L HLA-DPA1*01:03-B1*03:01L HLA-DRB1*12:01L HLA-DPA1*02:01-B1*13:01L
IFSRTLETAQNS

SEQ ID NO: 17067 - protein, 12 aa, Severe acute respiratory syndrome coronavirus 2
  REGION 1..12: note = Table B: HLA-DRB1*04:05L HLA-DRB1*01:02L HLA-DRB1*12:01L HLA-DPA1*03:01-B1*105:01L HLA-DQA1*03:01-B1*03:02L HLA-DRB1*16:01L HLA-DRB1*04:08L
KPVLDWLEEKFK

SEQ ID NO: 17068 - protein, 13 aa, Severe acute respiratory syndrome coronavirus 2
  REGION 1..13: note = Table B: HLA-DRB1*04:05L HLA-DRB1*14:01L HLA-DRB1*11:04L HLA-DRB3*01:01L
LDWLEEKFKEGVE

SEQ ID NO: 17069 - protein, 12 aa, Severe acute respiratory syndrome coronavirus 2
  REGION 1..12: note = Table B: HLA-DRB1*04:05L HLA-DRB1*12:01L HLA-DPA1*02:01-B1*13:01L
EKFKEGVEFLRD

SEQ ID NO: 17070 - protein, 12 aa, Severe acute respiratory syndrome coronavirus 2
  REGION 1..12: note = Table B: HLA-DRB1*04:05L HLA-DRB1*12:01L HLA-DPA1*02:01-B1*13:01L HLA-DQA1*03:01-B1*03:02L HLA-DPA1*01:02-B1*04:01L HLA-DRB1*16:01L HLA-DRB1*15:03L
KEGVEFLRDGWE

SEQ ID NO: 17071 - protein, 11 aa, Severe acute respiratory syndrome coronavirus 2
  REGION 1..11: note = Table B: HLA-DRB1*04:05L HLA-DQA1*05:05-B1*03:19L
FLRDGWEIVKF

SEQ ID NO: 17072 - protein, 13 aa, Severe acute respiratory syndrome coronavirus 2
  REGION 1..13: note = Table B: HLA-DRB1*04:05L HLA-DRB1*11:04L HLA-DRB1*11:01L HLA-DRB3*01:01L
KESVQTFFKLVNK

SEQ ID NO: 17073 - protein, 13 aa, Severe acute respiratory syndrome coronavirus 2
  REGION 1..13: note = Table B: HLA-DRB1*04:05L
ADSIIIGGAKLKA

SEQ ID NO: 17074 - protein, 13 aa, Severe acute respiratory syndrome coronavirus 2
  REGION 1..13: note = Table B: HLA-DRB1*04:05L HLA-DRB1*11:03L HLA-DRB1*14:02L
SIIIGGAKLKALN

SEQ ID NO: 17075 - protein, 14 aa, Severe acute respiratory syndrome coronavirus 2
  REGION 1..14: note = Table B: HLA-DRB1*04:05L HLA-DPA1*01:03-B1*03:01L HLA-DRB1*12:01L HLA-DPA1*02:01-B1*13:01L HLA-DRB1*04:08L
KALNLGETFVTHSK

SEQ ID NO: 17076 - protein, 17 aa, Severe acute respiratory syndrome coronavirus 2
  REGION 1..17: note = Table B: HLA-DRB1*04:05L
VKSREETGLLMPLKAPK

SEQ ID NO: 17077 - protein, 15 aa, Severe acute respiratory syndrome coronavirus 2
  REGION 1..15: note = Table B: HLA-DRB1*04:05L
EGETLPTEVLTEEVV

SEQ ID NO: 17078 - protein, 12 aa, Severe acute respiratory syndrome coronavirus 2
  REGION 1..12: note = Table B: HLA-DRB1*04:05L HLA-DQA1*01:02-B1*06:02L HLA-DQA1*02:01-B1*03:03L
GLMLLEIKDTEK

SEQ ID NO: 17079 - protein, 12 aa, Severe acute respiratory syndrome coronavirus 2
  REGION 1..12: note = Table B: HLA-DRB1*04:05L HLA-DRB1*01:02L HLA-DRB1*08:04L HLA-DRB3*02:01L HLA-DQA1*05:05-B1*03:01L HLA-DRB1*04:08L
LMLLEIKDTEKY

SEQ ID NO: 17080 - protein, 14 aa, Severe acute respiratory syndrome coronavirus 2
  REGION 1..14: note = Table B: HLA-DRB1*04:05L HLA-DRB1*01:02L HLA-DRB1*08:01L HLA-DPA1*02:01-B1*13:01L HLA-DPA1*03:01-B1*105:01L HLA-DRB1*16:01L HLA-DQA1*01:03-B1*06:01L HLA-DRB1*04:08L
GYKSVNITFELDER

SEQ ID NO: 17081 - protein, 13 aa, Severe acute respiratory syndrome coronavirus 2
  REGION 1..13: note = Table B: HLA-DRB1*04:05L HLA-DRB1*01:02L HLA-DQA1*01:03-B1*06:01L HLA-DRB1*04:08L
ELDERIDKVLNEK

SEQ ID NO: 17082 - protein, 14 aa, Severe acute respiratory syndrome coronavirus 2
  REGION 1..14: note = Table B: HLA-DRB1*04:05L
RIDKVLNEKCSAYT

SEQ ID NO: 17083 - protein, 12 aa, Severe acute respiratory syndrome coronavirus 2
  REGION 1..12: note = Table B: HLA-DRB1*04:05L HLA-DQA1*01:01-B1*05:01L HLA-DQA1*05:05-B1*03:01L HLA-DRB1*14:17L
TVELGTEVNEFA

SEQ ID NO: 17084 - protein, 14 aa, Severe acute respiratory syndrome coronavirus 2
  REGION 1..14: note = Table B: HLA-DRB1*04:05L
LTPLGIDLDEWSMA

SEQ ID NO: 17085 - protein, 14 aa, Severe acute respiratory syndrome coronavirus 2
  REGION 1..14: note = Table B: HLA-DRB1*04:05L HLA-DQA1*03:01-B1*03:02L HLA-DRB1*16:01L
TPLGIDLDEWSMAT

SEQ ID NO: 17086 - protein, 10 aa, Severe acute respiratory syndrome coronavirus 2
  REGION 1..10: note = Table B: HLA-DRB1*04:05L HLA-DQA1*01:02-B1*06:02L HLA-DQA1*05:05-B1*03:19L HLA-DPA1*02:01-B1*13:01L HLA-DQA1*01:03-B1*06:01L HLA-DRB1*15:03L
YYLFDESGEF

SEQ ID NO: 17087 - protein, 15 aa, Severe acute respiratory syndrome coronavirus 2
  REGION 1..15: note = Table B: HLA-DRB1*04:05L
SHMYCSFYPPDEDEE

SEQ ID NO: 17088 - protein, 15 aa, Severe acute respiratory syndrome coronavirus 2
  REGION 1..15: note = Table B: HLA-DRB1*04:05L HLA-DPA1*02:01-B1*13:01L
QPEEEQEEDWLDDDS

SEQ ID NO: 17089 - protein, 13 aa, Severe acute respiratory syndrome coronavirus 2
  REGION 1..13: note = Table B: HLA-DRB1*04:05L HLA-DQA1*01:02-B1*06:02L HLA-DRB4*03:01NL HLA-DQA1*01-B1*05L HLA-DRB1*04:10L HLA-DRB1*12:01L HLA-DRB1*14:54L HLA-DRB1*16:01L
TTTIQTIVEVQPQ

SEQ ID NO: 17090 - protein, 11 aa, Severe acute respiratory syndrome coronavirus 2
  REGION 1..11: note = Table B: HLA-DRB1*04:05L HLA-DQA1*01:02-B1*06:02L HLA-DRB1*14:01L HLA-DRB1*04:10L HLA-DPA1*03:01-B1*105:01L HLA-DRB1*14:54L HLA-DQA1*05:05-B1*03:01L HLA-DRB1*15:03L
IVEVQPQLEME

SEQ ID NO: 17091 - protein, 13 aa, Severe acute respiratory syndrome coronavirus 2
  REGION 1..13: note = Table B: HLA-DRB1*04:05L HLA-DRB1*04:10L HLA-DPA1*03:01-B1*105:01L
MELTPVVQTIEVN

SEQ ID NO: 17092 - protein, 12 aa, Severe acute respiratory syndrome coronavirus 2
  REGION 1..12: note = Table B: HLA-DRB1*04:05L HLA-DRB1*01:02L HLA-DRB1*14:54L HLA-DRB1*04:08L
TIEVNSFSGYLK

SEQ ID NO: 17093 - protein, 12 aa, Severe acute respiratory syndrome coronavirus 2
  REGION 1..12: note = Table B: HLA-DRB1*04:05L HLA-DRB1*01:02L
IKNADIVEEAKK

SEQ ID NO: 17094 - protein, 14 aa, Severe acute respiratory syndrome coronavirus 2
  REGION 1..14: note = Table B: HLA-DRB1*04:05L HLA-DRB1*01:02L HLA-DRB1*14:01L HLA-DRB1*08:01L HLA-DRB1*12:01L HLA-DPA1*02:01-B1*13:01L HLA-DQA1*05:05-B1*03:01L HLA-DRB1*15:03L
VEEAKKVKPTVVVN

SEQ ID NO: 17095 - protein, 14 aa, Severe acute respiratory syndrome coronavirus 2
  REGION 1..14: note = Table B: HLA-DRB1*04:05L HLA-DRB1*01:02L HLA-DRB1*12:01L HLA-DPA1*02:01-B1*13:01L
EAKKVKPTVVVNAA

SEQ ID NO: 17096 - protein, 12 aa, Severe acute respiratory syndrome coronavirus 2
  REGION 1..12: note = Table B: HLA-DRB1*04:05L HLA-DQA1*05:05-B1*03:19L HLA-DPA1*03:01-B1*105:01L
KVKPTVVVNAAN

SEQ ID NO: 17097 - protein, 13 aa, Severe acute respiratory syndrome coronavirus 2
  REGION 1..13: note = Table B: HLA-DRB1*04:05L HLA-DQA1*01:01-B1*05:01L HLA-DRB1*14:17L
KATNNAMQVESDD

SEQ ID NO: 17098 - protein, 11 aa, Severe acute respiratory syndrome coronavirus 2
  REGION 1..11: note = Table B: HLA-DRB1*04:05L HLA-DQA1*01:02-B1*06:02L HLA-DRB1*04:08L
IATNGPLKVGG

SEQ ID NO: 17099 - protein, 13 aa, Severe acute respiratory syndrome coronavirus 2
  REGION 1..13: note = Table B: HLA-DRB1*04:05L HLA-DPA1*01:03-B1*03:01L HLA-DPA1*01:03-B1*04:01L HLA-DRB1*12:01L HLA-DPA1*02:01-B1*13:01L
LLKSAYENFNQHE

SEQ ID NO: 17100 - protein, 14 aa, Severe acute respiratory syndrome coronavirus 2
  REGION 1..14: note = Table B: HLA-DRB1*04:05L HLA-DRB3*02:01L HLA-DRB1*14:02L HLA-DRB3*01:01L HLA-DPA1*01:03-B1*02:01L HLA-DRB1*08:03L
YENFNQHEVLLAPL

SEQ ID NO: 17101 - protein, 13 aa, Severe acute respiratory syndrome coronavirus 2
  REGION 1..13: note = Table B: HLA-DRB1*04:05L HLA-DRB1*01:02L HLA-DRB1*12:01L HLA-DRB1*16:01L HLA-DRB1*15:03L
HSLRVCVDTVRTN

SEQ ID NO: 17102 - protein, 11 aa, Severe acute respiratory syndrome coronavirus 2
  REGION 1..11: note = Table B: HLA-DRB1*04:05L HLA-DRB1*04:08L HLA-DRB1*15:03L
LAVFDKNLYDK

SEQ ID NO: 17103 - protein, 11 aa, Severe acute respiratory syndrome coronavirus 2
  REGION 1..11: note = Table B: HLA-DRB1*04:05L HLA-DRB1*08:77L HLA-DRB1*03:01L HLA-DRB4*01:01L HLA-DQA1*05:05-B1*03:116L HLA-DRB1*09:01L
AVFDKNLYDKL

SEQ ID NO: 17104 - protein, 16 aa, Severe acute respiratory syndrome coronavirus 2
  REGION 1..16: note = Table B: HLA-DRB1*04:05L
ITESKPSVEQRKQDDK

SEQ ID NO: 17105 - protein, 14 aa, Severe acute respiratory syndrome coronavirus 2
  REGION 1..14: note = Table B: HLA-DRB1*04:05L HLA-DQA1*01:02-B1*06:02L HLA-DRB1*01:02L HLA-DRB1*12:01L HLA-DRB1*16:01L HLA-DQA1*02:01-B1*03:03L
SKPSVEQRKQDDKK

SEQ ID NO: 17106 - protein, 15 aa, Severe acute respiratory syndrome coronavirus 2
  REGION 1..15: note = Table B: HLA-DRB1*04:05L HLA-DRB1*16:01L
KPSVEQRKQDDKKIK

SEQ ID NO: 17107 - protein, 13 aa, Severe acute respiratory syndrome coronavirus 2
  REGION 1..13: note = Table B: HLA-DRB1*04:05L HLA-DQA1*01:02-B1*06:02L HLA-DRB1*12:01L HLA-DPA1*02:01-B1*13:01L HLA-DQA1*03:01-B1*03:02L
DDKKIKACVEEVT

SEQ ID NO: 17108 - protein, 15 aa, Severe acute respiratory syndrome coronavirus 2
  REGION 1..15: note = Table B: HLA-DRB1*04:05L
IKACVEEVTTTLEET

SEQ ID NO: 17109 - protein, 12 aa, Severe acute respiratory syndrome coronavirus 2
  REGION 1..12: note = Table B: HLA-DRB1*04:05L HLA-DRB1*08:04L HLA-DPA1*01:03-B1*03:01L HLA-DRB1*03:01L HLA-DRB1*14:02L HLA-DRB1*08:01L HLA-DPA1*03:01-B1*105:01L HLA-DRB1*04:08L
TFLKKDAPYIVG

SEQ ID NO: 17110 - protein, 11 aa, Severe acute respiratory syndrome coronavirus 2
  REGION 1..11: note = Table B: HLA-DRB1*04:05L HLA-DPA1*01:03-B1*03:01L HLA-DQA1*01:01-B1*05:01L HLA-DRB1*15:03L
GVLTAVVIPTK

SEQ ID NO: 17111 - protein, 13 aa, Severe acute respiratory syndrome coronavirus 2
  REGION 1..13: note = Table B: HLA-DRB1*04:05L HLA-DRB4*03:01NL HLA-DRB1*11:04L HLA-DRB1*11:01L HLA-DRB1*12:01L HLA-DRB1*16:01L HLA-DRB1*04:08L
TAVVIPTKKAGGT

SEQ ID NO: 17112 - protein, 14 aa, Severe acute respiratory syndrome coronavirus 2
  REGION 1..14: note = Table B: HLA-DRB1*04:05L HLA-DRB1*08:01L HLA-DRB1*12:01L HLA-DRB1*15:03L
AGGTTEMLAKALRK

SEQ ID NO: 17113 - protein, 13 aa, Severe acute respiratory syndrome coronavirus 2
  REGION 1..13: note = Table B: HLA-DRB1*04:05L
AKALRKVPTDNYI

SEQ ID NO: 17114 - protein, 13 aa, Severe acute respiratory syndrome coronavirus 2
  REGION 1..13: note = Table B: HLA-DRB1*04:05L HLA-DRB1*01:02L
ALRKVPTDNYITT

SEQ ID NO: 17115 - protein, 13 aa, Severe acute respiratory syndrome coronavirus 2
  REGION 1..13: note = Table B: HLA-DRB1*04:05L HLA-DRB1*04:10L HLA-DRB1*16:01L
GQGLNGYTVEEAK

SEQ ID NO: 17116 - protein, 11 aa, Severe acute respiratory syndrome coronavirus 2
  REGION 1..11: note = Table B: HLA-DRB1*04:05L HLA-DQA1*01:02-B1*06:02L HLA-DRB4*03:01NL HLA-DRB1*14:17L HLA-DRB1*16:01L
LNGYTVEEAKT

SEQ ID NO: 17117 - protein, 14 aa, Severe acute respiratory syndrome coronavirus 2
  REGION 1..14: note = Table B: HLA-DRB1*04:05L HLA-DRB1*01:02L HLA-DPA1*02:01-B1*13:01L HLA-DPA1*03:01-B1*105:01L HLA-DQA1*05:05-B1*03:01L HLA-DQA1*01:03-B1*06:01L
SNEKQEILGTVSWN

SEQ ID NO: 17118 - protein, 14 aa, Severe acute respiratory syndrome coronavirus 2
  REGION 1..14: note = Table B: HLA-DRB1*04:05L HLA-DRB1*08:04L HLA-DRB1*11:03L HLA-DRB1*11:04L HLA-DRB1*08:01L HLA-DRB1*11:01L HLA-DRB1*04:08L
LGTVSWNLREMLAH

SEQ ID NO: 17119 - protein, 14 aa, Severe acute respiratory syndrome coronavirus 2
  REGION 1..14: note = Table B: HLA-DRB1*04:05L HLA-DRB1*01:02L HLA-DRB1*12:01L HLA-DRB1*04:08L
SWNLREMLAHAEET

SEQ ID NO: 17120 - protein, 12 aa, Severe acute respiratory syndrome coronavirus 2
  REGION 1..12: note = Table B: HLA-DRB1*04:05L HLA-DQA1*01:02-B1*06:02L HLA-DRB1*01:02L HLA-DRB1*16:01L
LREMLAHAEETR

SEQ ID NO: 17121 - protein, 13 aa, Severe acute respiratory syndrome coronavirus 2
  REGION 1..13: note = Table B: HLA-DRB1*04:05L HLA-DRB1*12:01L HLA-DPA1*02:01-B1*13:01L
EETRKLMPVCVET

SEQ ID NO: 17122 - protein, 12 aa, Severe acute respiratory syndrome coronavirus 2
  REGION 1..12: note = Table B: HLA-DRB1*04:05L HLA-DRB1*01:02L HLA-DRB1*12:01L HLA-DPA1*02:01-B1*13:01L
TRKLMPVCVETK

SEQ ID NO: 17123 - protein, 12 aa, Severe acute respiratory syndrome coronavirus 2
  REGION 1..12: note = Table B: HLA-DRB1*04:05L
QRKYKGIKIQEG

SEQ ID NO: 17124 - protein, 14 aa, Severe acute respiratory syndrome coronavirus 2
  REGION 1..14: note = Table B: HLA-DRB1*04:05L HLA-DPA1*02:01-B1*13:01L HLA-DPA1*01:03-B1*104:01L HLA-DRB1*16:01L HLA-DRB1*04:08L
TSKTTVASLINTLN

SEQ ID NO: 17125 - protein, 14 aa, Severe acute respiratory syndrome coronavirus 2
  REGION 1..14: note = Table B: HLA-DRB1*04:05L
TTVASLINTLNDLN

SEQ ID NO: 17126 - protein, 13 aa, Severe acute respiratory syndrome coronavirus 2
  REGION 1..13: note = Table B: HLA-DRB1*04:05L
THGLNLEEAARYM

SEQ ID NO: 17127 - protein, 14 aa, Severe acute respiratory syndrome coronavirus 2
  REGION 1..14: note = Table B: HLA-DRB1*04:05L HLA-DRB3*01:01L HLA-DRB1*04:08L
HGLNLEEAARYMRS

SEQ ID NO: 17128 - protein, 13 aa, Severe acute respiratory syndrome coronavirus 2
  REGION 1..13: note = Table B: HLA-DRB1*04:05L HLA-DQA1*01:03-B1*06:01L
KVPATVSVSSPDA

SEQ ID NO: 17129 - protein, 13 aa, Severe acute respiratory syndrome coronavirus 2
  REGION 1..13: note = Table B: HLA-DRB1*04:05L HLA-DRB1*01:02L HLA-DRB3*02:01L HLA-DRB1*04:08L
ISLAGSYKDWSYS

SEQ ID NO: 17130 - protein, 17 aa, Severe acute respiratory syndrome coronavirus 2
  REGION 1..17: note = Table B: HLA-DRB1*04:05L HLA-DRB1*12:01L
EFLKRGDKSVYYTSNPT

SEQ ID NO: 17131 - protein, 11 aa, Severe acute respiratory syndrome coronavirus 2
  REGION 1..11: note = Table B: HLA-DRB1*04:05L
YYTSNPTTFHL

SEQ ID NO: 17132 - protein, 12 aa, Severe acute respiratory syndrome coronavirus 2
  REGION 1..12: note = Table B: HLA-DRB1*04:05L HLA-DQA1*01:02-B1*06:02L HLA-DRB1*01:02L HLA-DRB1*12:01L HLA-DRB1*16:01L HLA-DRB1*15:03L
LKTLLSLREVRT

SEQ ID NO: 17133 - protein, 14 aa, Severe acute respiratory syndrome coronavirus 2
  REGION 1..14: note = Table B: HLA-DRB1*04:05L
LSLREVRTIKVFTT

SEQ ID NO: 17134 - protein, 13 aa, Severe acute respiratory syndrome coronavirus 2
  REGION 1..13: note = Table B: HLA-DRB1*04:05L HLA-DRB1*01:02L HLA-DPA1*01:03-B1*03:01L HLA-DRB1*12:01L HLA-DQA1*03:01-B1*03:02L HLA-DRB1*16:01L HLA-DRB1*04:08L HLA-DRB1*15:03L
REVRTIKVFTTVD

SEQ ID NO: 17135 - protein, 12 aa, Severe acute respiratory syndrome coronavirus 2
  REGION 1..12: note = Table B: HLA-DRB1*04:05L HLA-DRB1*08:04L HLA-DPA1*01:03-B1*03:01L HLA-DRB1*03:01L HLA-DRB3*01:01L HLA-DRB1*04:08L
YVLPNDDTLRVE

SEQ ID NO: 17136 - protein, 11 aa, Severe acute respiratory syndrome coronavirus 2
  REGION 1..11: note = Table B: HLA-DRB1*04:05L HLA-DQA1*03:01-B1*03:02L HLA-DPA1*01:03-B1*104:01L HLA-DRB1*16:01L HLA-DQA1*01:03-B1*06:01L HLA-DQA1*02:01-B1*03:03L
KYPQVNGLTSI

SEQ ID NO: 17137 - protein, 12 aa, Severe acute respiratory syndrome coronavirus 2
  REGION 1..12: note = Table B: HLA-DRB1*04:05L HLA-DRB1*08:04L
QIELKFNPPALQ

SEQ ID NO: 17138 - protein, 11 aa, Severe acute respiratory syndrome coronavirus 2
  REGION 1..11: note = Table B: HLA-DRB1*04:05L HLA-DPA1*01:02-B1*04:01L
YRARAGEAANF

SEQ ID NO: 17139 - protein, 12 aa, Severe acute respiratory syndrome coronavirus 2
  REGION 1..12: note = Table B: HLA-DRB1*04:05L HLA-DRB1*01:02L HLA-DPA1*01:03-B1*03:01L
RARAGEAANFCA

SEQ ID NO: 17140 - protein, 15 aa, Severe acute respiratory syndrome coronavirus 2
  REGION 1..15: note = Table B: HLA-DRB1*04:05L HLA-DPA1*01:03-B1*03:01L HLA-DPA1*03:01-B1*04:02L HLA-DRB1*11:02L HLA-DRB1*11:04L HLA-DRB1*14:02L HLA-DRB1*11:01L HLA-DRB1*08:02L HLA-DRB1*08:03L
ALILAYCNKTVGELG

SEQ ID NO: 17141 - protein, 12 aa, Severe acute respiratory syndrome coronavirus 2
  REGION 1..12: note = Table B: HLA-DRB1*04:05L HLA-DQA1*01:02-B1*06:02L HLA-DRB1*04:10L
NKTVGELGDVRE

SEQ ID NO: 17142 - protein, 11 aa, Severe acute respiratory syndrome coronavirus 2
  REGION 1..11: note = Table B: HLA-DRB1*04:05L
TTLKGVEAVMY

SEQ ID NO: 17143 - protein, 13 aa, Severe acute respiratory syndrome coronavirus 2
  REGION 1..13: note = Table B: HLA-DRB1*04:05L HLA-DRB1*01:02L HLA-DRB1*04:10L
EAVMYMGTLSYEQ

SEQ ID NO: 17144 - protein, 15 aa, Severe acute respiratory syndrome coronavirus 2
  REGION 1..15: note = Table B: HLA-DRB1*04:05L HLA-DRB1*01:02L HLA-DRB1*12:01L HLA-DPA1*02:01-B1*13:01L
EQFKKGVQIPCTCGK

SEQ ID NO: 17145 - protein, 15 aa, Severe acute respiratory syndrome coronavirus 2
  REGION 1..15: note = Table B: HLA-DRB1*04:05L HLA-DRB1*12:01L HLA-DPA1*02:01-B1*13:01L
QFKKGVQIPCTCGKQ

SEQ ID NO: 17146 - protein, 14 aa, Severe acute respiratory syndrome coronavirus 2
  REGION 1..14: note = Table B: HLA-DRB1*04:05L HLA-DRB1*01:02L HLA-DPA1*02:01-B1*13:01L HLA-DRB1*16:01L
GKQATKYLVQQESP

SEQ ID NO: 17147 - protein, 16 aa, Severe acute respiratory syndrome coronavirus 2
  REGION 1..16: note = Table B: HLA-DRB1*04:05L HLA-DPA1*01:03-B1*03:01L HLA-DRB1*14:02L HLA-DRB1*11:01L HLA-DPA1*02:01-B1*13:01L
KHGTFTCASEYTGNYQ

SEQ ID NO: 17148 - protein, 13 aa, Severe acute respiratory syndrome coronavirus 2
  REGION 1..13: note = Table B: HLA-DRB1*04:05L HLA-DRB1*14:01L HLA-DRB1*12:01L HLA-DRB1*15:03L
HITSKETLYCIDG

SEQ ID NO: 17149 - protein, 13 aa, Severe acute respiratory syndrome coronavirus 2
  REGION 1..13: note = Table B: HLA-DRB1*04:05L
IDGALLTKSSEYK

SEQ ID NO: 17150 - protein, 13 aa, Severe acute respiratory syndrome coronavirus 2
  REGION 1..13: note = Table B: HLA-DRB1*04:05L HLA-DRB1*01:02L HLA-DPA1*03:01-B1*04:02L HLA-DRB1*15:03L
YKGPITDVFYKEN

SEQ ID NO: 17151 - protein, 13 aa, Severe acute respiratory syndrome coronavirus 2
  REGION 1..13: note = Table B: HLA-DRB1*04:05L HLA-DRB4*03:01NL HLA-DRB1*04:08L
TDVFYKENSYTTT

SEQ ID NO: 17152 - protein, 12 aa, Severe acute respiratory syndrome coronavirus 2
  REGION 1..12: note = Table B: HLA-DRB1*04:05L HLA-DQA1*01:02-B1*06:02L HLA-DRB1*01:02L HLA-DRB1*08:01L HLA-DQA1*01-B1*05L HLA-DPA1*03:01-B1*105:01L HLA-DPA1*01:02-B1*04:01L HLA-DRB1*16:01L HLA-DRB1*04:08L
FDNFKFVCDNIK

SEQ ID NO: 17153 - protein, 14 aa, Severe acute respiratory syndrome coronavirus 2
  REGION 1..14: note = Table B: HLA-DRB1*04:05L HLA-DPA1*02:01-B1*13:01L
DNFKFVCDNIKFAD

SEQ ID NO: 17154 - protein, 12 aa, Severe acute respiratory syndrome coronavirus 2
  REGION 1..12: note = Table B: HLA-DRB1*04:05L HLA-DQA1*01:02-B1*06:02L HLA-DRB1*12:01L HLA-DQA1*01:03-B1*06:01L HLA-DRB1*15:03L
TGYKKPASRELK

SEQ ID NO: 17155 - protein, 13 aa, Severe acute respiratory syndrome coronavirus 2
  REGION 1..13: note = Table B: HLA-DRB1*04:05L
RELKVTFFPDLNG

SEQ ID NO: 17156 - protein, 13 aa, Severe acute respiratory syndrome coronavirus 2
  REGION 1..13: note = Table B: HLA-DRB1*04:05L HLA-DRB3*02:01L HLA-DRB1*11:03L HLA-DRB1*11:04L HLA-DRB1*08:01L HLA-DRB1*11:01L HLA-DRB1*04:08L
GDVVAIDYKHYTP

SEQ ID NO: 17157 - protein, 12 aa, Severe acute respiratory syndrome coronavirus 2
  REGION 1..12: note = Table B: HLA-DRB1*04:05L HLA-DQA1*01:02-B1*06:02L HLA-DRB1*01:02L HLA-DRB1*12:01L HLA-DPA1*03:01-B1*105:01L HLA-DRB1*15:03L
AIDYKHYTPSFK

SEQ ID NO: 17158 - protein, 12 aa, Severe acute respiratory syndrome coronavirus 2
  REGION 1..12: note = Table B: HLA-DRB1*04:05L HLA-DRB1*01:02L HLA-DRB1*12:01L HLA-DRB1*15:03L
IDYKHYTPSFKK

SEQ ID NO: 17159 - protein, 13 aa, Severe acute respiratory syndrome coronavirus 2
  REGION 1..13: note = Table B: HLA-DRB1*04:05L HLA-DRB1*01:02L HLA-DRB1*08:01L HLA-DRB1*12:01L HLA-DPA1*02:01-B1*13:01L
KGAKLLHKPIVWH

SEQ ID NO: 17160 - protein, 14 aa, Severe acute respiratory syndrome coronavirus 2
  REGION 1..14: note = Table B: HLA-DRB1*04:05L HLA-DQA1*01:02-B1*06:02L HLA-DRB1*01:02L HLA-DRB1*08:01L HLA-DRB1*12:01L HLA-DPA1*02:01-B1*13:01L HLA-DRB1*16:01L HLA-DRB1*04:08L HLA-DRB1*15:03L
GAKLLHKPIVWHVN

SEQ ID NO: 17161 - protein, 16 aa, Severe acute respiratory syndrome coronavirus 2
  REGION 1..16: note = Table B: HLA-DRB1*04:05L HLA-DPA1*02:01-B1*13:01L HLA-DPA1*03:01-B1*105:01L
KPANNSLKITEEVGHT

SEQ ID NO: 17162 - protein, 13 aa, Severe acute respiratory syndrome coronavirus 2
  REGION 1..13: note = Table B: HLA-DRB1*04:05L HLA-DRB3*01:01L HLA-DRB1*04:08L HLA-DRB1*15:03L
SSLTIKKPNELSR

SEQ ID NO: 17163 - protein, 12 aa, Severe acute respiratory syndrome coronavirus 2
  REGION 1..12: note = Table B: HLA-DRB1*04:05L HLA-DRB1*01:02L HLA-DRB1*12:01L HLA-DRB1*16:01L
SRVLGLKTLATH

SEQ ID NO: 17164 - protein, 13 aa, Severe acute respiratory syndrome coronavirus 2
  REGION 1..13: note = Table B: HLA-DRB1*04:05L HLA-DRB4*03:01NL HLA-DRB1*14:01L HLA-DRB1*04:10L HLA-DRB1*14:54L
HGLAAVNSVPWDT

SEQ ID NO: 17165 - protein, 14 aa, Severe acute respiratory syndrome coronavirus 2
  REGION 1..14: note = Table B: HLA-DRB1*04:05L HLA-DRB1*01:02L HLA-DPA1*02:01-B1*13:01L HLA-DRB1*16:01L HLA-DRB1*04:08L HLA-DQA1*02:01-B1*03:03L HLA-DRB1*15:03L
YAKPFLNKVVSTTT

SEQ ID NO: 17166 - protein, 16 aa, Severe acute respiratory syndrome coronavirus 2
  REGION 1..16: note = Table B: HLA-DRB1*04:05L HLA-DRB1*12:01L HLA-DPA1*01:03-B1*104:01L
IVTRCLNRVCTNYMPY

SEQ ID NO: 17167 - protein, 10 aa, Severe acute respiratory syndrome coronavirus 2
  REGION 1..10: note = Table B: HLA-DRB1*04:05L HLA-DQA1*01:02-B1*06:02L HLA-DQA1*05:05-B1*03:19L HLA-DPA1*02:01-B1*13:01L HLA-DPA1*03:01-B1*105:01L HLA-DQA1*01:03-B1*06:01L HLA-DRB1*15:03L
NYMPYFFTLL

SEQ ID NO: 17168 - protein, 14 aa, Severe acute respiratory syndrome coronavirus 2
  REGION 1..14: note = Table B: HLA-DRB1*04:05L HLA-DPA1*02:01-B1*13:01L
TNSRIKASMPTTIA

SEQ ID NO: 17169 - protein, 12 aa, Severe acute respiratory syndrome coronavirus 2
  REGION 1..12: note = Table B: HLA-DRB1*04:05L HLA-DRB1*07:01L HLA-DRB1*04:08L HLA-DRB1*15:03L
RIKASMPTTIAK

SEQ ID NO: 17170 - protein, 12 aa, Severe acute respiratory syndrome coronavirus 2
  REGION 1..12: note = Table B: HLA-DRB1*04:05L HLA-DQA1*05:05-B1*03:01L HLA-DRB1*07:01L
FNYLKSPNFSKL

SEQ ID NO: 17171 - protein, 13 aa, Severe acute respiratory syndrome coronavirus 2
  REGION 1..13: note = Table B: HLA-DRB1*04:05L HLA-DRB1*11:03L
LGVLMSNLGMPSY

SEQ ID NO: 17172 - protein, 13 aa, Severe acute respiratory syndrome coronavirus 2
  REGION 1..13: note = Table B: HLA-DRB1*04:05L HLA-DRB1*01:02L HLA-DPA1*03:01-B1*105:01L HLA-DQA1*03:01-B1*03:02L HLA-DQA1*05:05-B1*03:01L HLA-DQA1*02:01-B1*03:03L HLA-DRB1*15:03L
SYVHVVDGCNSST

SEQ ID NO: 17173 - protein, 13 aa, Severe acute respiratory syndrome coronavirus 2
  REGION 1..13: note = Table B: HLA-DRB1*04:05L HLA-DRB1*01:02L HLA-DPA1*01:03-B1*03:01L HLA-DRB1*12:01L HLA-DPA1*02:01-B1*13:01L
RATRVECTTIVNG

SEQ ID NO: 17174 - protein, 14 aa, Severe acute respiratory syndrome coronavirus 2
  REGION 1..14: note = Table B: HLA-DRB1*04:05L HLA-DRB1*01:02L HLA-DRB1*12:01L HLA-DPA1*02:01-B1*13:01L
NGVRRSFYVYANGG

SEQ ID NO: 17175 - protein, 13 aa, Severe acute respiratory syndrome coronavirus 2
  REGION 1..13: note = Table B: HLA-DRB1*04:05L HLA-DRB1*01:02L HLA-DRB1*04:08L HLA-DQA1*02:01-B1*03:03L
AGQKTYERHSLSH

SEQ ID NO: 17176 - protein, 12 aa, Severe acute respiratory syndrome coronavirus 2
  REGION 1..12: note = Table B: HLA-DRB1*04:05L HLA-DQA1*01:02-B1*06:02L HLA-DRB1*01:02L HLA-DRB1*08:01L HLA-DPA1*02:01-B1*13:01L HLA-DRB1*04:08L
RHSLSHFVNLDN

SEQ ID NO: 17177 - protein, 14 aa, Severe acute respiratory syndrome coronavirus 2
  REGION 1..14: note = Table B: HLA-DRB1*04:05L HLA-DRB1*01:02L HLA-DPA1*01:03-B1*03:01L HLA-DRB1*14:01L HLA-DRB1*04:10L HLA-DRB1*12:01L HLA-DQA1*05:05-B1*03:01L HLA-DRB1*04:08L
GSLPINVIVFDGKS

SEQ ID NO: 17178 - protein, 14 aa, Severe acute respiratory syndrome coronavirus 2
  REGION 1..14: note = Table B: HLA-DRB1*04:05L HLA-DRB1*01:02L HLA-DRB1*12:01L HLA-DPA1*02:01-B1*13:01L
GKSKCEESSAKSAS

SEQ ID NO: 17179 - protein, 14 aa, Severe acute respiratory syndrome coronavirus 2
  REGION 1..14: note = Table B: HLA-DRB1*04:05L
ESSAKSASVYYSQL

SEQ ID NO: 17180 - protein, 12 aa, Severe acute respiratory syndrome coronavirus 2
  REGION 1..12: note = Table B: HLA-DRB1*04:05L HLA-DQA1*02:01-B1*03:03L
KLKTLVATAEAE

SEQ ID NO: 17181 - protein, 11 aa, Severe acute respiratory syndrome coronavirus 2
  REGION 1..11: note = Table B: HLA-DRB1*04:05L HLA-DRB1*01:02L HLA-DRB1*08:77L
LVATAEAELAK

SEQ ID NO: 17182 - protein, 12 aa, Severe acute respiratory syndrome coronavirus 2
  REGION 1..12: note = Table B: HLA-DRB1*04:05L HLA-DRB1*01:02L HLA-DQA1*01-B1*05L HLA-DRB1*12:01L HLA-DRB1*04:08L HLA-DRB1*15:03L
VLSTFISAARQG

SEQ ID NO: 17183 - protein, 12 aa, Severe acute respiratory syndrome coronavirus 2
  REGION 1..12: note = Table B: HLA-DRB1*04:05L HLA-DRB1*04:08L
RQGFVDSDVETK

SEQ ID NO: 17184 - protein, 14 aa, Severe acute respiratory syndrome coronavirus 2
  REGION 1..14: note = Table B: HLA-DRB1*04:05L HLA-DRB1*01:02L HLA-DRB1*12:01L HLA-DPA1*02:01-B1*13:01L
VETKDVVECLKLSH

SEQ ID NO: 17185 - protein, 14 aa, Severe acute respiratory syndrome coronavirus 2
  REGION 1..14: note = Table B: HLA-DRB1*04:05L
ETKDVVECLKLSHQ

SEQ ID NO: 17186 - protein, 13 aa, Severe acute respiratory syndrome coronavirus 2
  REGION 1..13: note = Table B: HLA-DRB1*04:05L HLA-DQA1*01:02-B1*06:02L HLA-DRB1*01:02L HLA-DRB1*16:01L HLA-DRB1*15:03L
LKLSHQSDIEVTG

SEQ ID NO: 17187 - protein, 11 aa, Severe acute respiratory syndrome coronavirus 2
  REGION 1..11: note = Table B: HLA-DRB1*04:05L HLA-DRB4*03:01NL HLA-DRB1*08:01L HLA-DRB1*12:01L HLA-DRB1*14:54L HLA-DPA1*01:02-B1*04:01L HLA-DRB1*16:01L HLA-DRB1*04:08L
TYNKVENMTPR

SEQ ID NO: 17188 - protein, 12 aa, Severe acute respiratory syndrome coronavirus 2
  REGION 1..12: note = Table B: HLA-DRB1*04:05L HLA-DRB1*01:02L HLA-DRB1*14:01L
NKVENMTPRDLG

SEQ ID NO: 17189 - protein, 14 aa, Severe acute respiratory syndrome coronavirus 2
  REGION 1..14: note = Table B: HLA-DRB1*04:05L HLA-DQA1*05:05-B1*03:01L HLA-DQA1*01:03-B1*06:01L
AQVAKSHNIALIWN

SEQ ID NO: 17190 - protein, 14 aa, Severe acute respiratory syndrome coronavirus 2
  REGION 1..14: note = Table B: HLA-DRB1*04:05L HLA-DRB1*01:02L HLA-DRB1*12:01L HLA-DPA1*02:01-B1*13:01L HLA-DPA1*03:01-B1*105:01L HLA-DQA1*03:01-B1*03:02L
VAKSHNIALIWNVK

SEQ ID NO: 17191 - protein, 12 aa, Severe acute respiratory syndrome coronavirus 2
  REGION 1..12: note = Table B: HLA-DRB1*04:05L HLA-DRB1*04:08L
KDFMSLSEQLRK

SEQ ID NO: 17192 - protein, 13 aa, Severe acute respiratory syndrome coronavirus 2
  REGION 1..13: note = Table B: HLA-DRB1*04:05L HLA-DRB1*14:01L HLA-DRB1*12:01L HLA-DRB1*04:08L
IRSAAKKNNLPFK

SEQ ID NO: 17193 - protein, 15 aa, Severe acute respiratory syndrome coronavirus 2
  REGION 1..15: note = Table B: HLA-DRB1*04:05L
KNNLPFKLTCATTRQ

SEQ ID NO: 17194 - protein, 13 aa, Severe acute respiratory syndrome coronavirus 2
  REGION 1..13: note = Table B: HLA-DRB1*04:05L HLA-DRB1*08:01L HLA-DRB3*01:01L
TTKIALKGGKIVN

SEQ ID NO: 17195 - protein, 14 aa, Severe acute respiratory syndrome coronavirus 2
  REGION 1..14: note = Table B: HLA-DRB1*04:05L HLA-DRB1*11:01L
IALKGGKIVNNWLK

SEQ ID NO: 17196 - protein, 12 aa, Severe acute respiratory syndrome coronavirus 2
  REGION 1..12: note = Table B: HLA-DRB1*04:05L HLA-DQA1*01:02-B1*06:02L HLA-DRB1*01:02L HLA-DRB1*12:01L HLA-DPA1*02:01-B1*13:01L HLA-DQA1*03:01-B1*03:02L HLA-DQA1*02:01-B1*03:03L
KGGKIVNNWLKQ

SEQ ID NO: 17197 - protein, 12 aa, Severe acute respiratory syndrome coronavirus 2
  REGION 1..12: note = Table B: HLA-DRB1*04:05L HLA-DQA1*01:01-B1*05:01L HLA-DRB1*12:01L HLA-DPA1*02:01-B1*13:01L HLA-DQA1*01:03-B1*06:01L HLA-DQA1*02:01-B1*03:03L HLA-DRB1*15:03L
SKHTDFSSEIIG

SEQ ID NO: 17198 - protein, 13 aa, Severe acute respiratory syndrome coronavirus 2
  REGION 1..13: note = Table B: HLA-DRB1*04:05L HLA-DRB1*14:17L HLA-DRB1*16:01L HLA-DRB1*04:08L HLA-DRB1*15:03L
HADFDTWFSQRGG

SEQ ID NO: 17199 - protein, 14 aa, Severe acute respiratory syndrome coronavirus 2
  REGION 1..14: note = Table B: HLA-DRB1*04:05L
NDKACPLIAAVITR

SEQ ID NO: 17200 - protein, 12 aa, Severe acute respiratory syndrome coronavirus 2
  REGION 1..12: note = Table B: HLA-DRB1*04:05L HLA-DPA1*02:01-B1*13:01L
SKLIEYTDFATS

SEQ ID NO: 17201 - protein, 14 aa, Severe acute respiratory syndrome coronavirus 2
  REGION 1..14: note = Table B: HLA-DRB1*04:05L HLA-DPA1*03:01-B1*04:02L HLA-DRB1*14:02L HLA-DRB1*08:01L HLA-DRB1*04:10L HLA-DPA1*02:01-B1*13:01L HLA-DPA1*01:03-B1*104:01L HLA-DRB1*16:01L
TNVLEGSVAYESLR

SEQ ID NO: 17202 - protein, 11 aa, Severe acute respiratory syndrome coronavirus 2
  REGION 1..11: note = Table B: HLA-DRB1*04:05L
SIIQFPNTYLE

SEQ ID NO: 17203 - protein, 12 aa, Severe acute respiratory syndrome coronavirus 2
  REGION 1..12: note = Table B: HLA-DRB1*04:05L HLA-DRB1*01:02L HLA-DRB3*02:01L
SVRVVTTFDSEY

SEQ ID NO: 17204 - protein, 14 aa, Severe acute respiratory syndrome coronavirus 2
  REGION 1..14: note = Table B: HLA-DRB1*04:05L HLA-DRB1*08:01L HLA-DPA1*01:03-B1*104:01L HLA-DRB1*15:03L
LDISASIVAGGIVA

SEQ ID NO: 17205 - protein, 13 aa, Severe acute respiratory syndrome coronavirus 2
  REGION 1..13: note = Table B: HLA-DRB1*04:05L HLA-DRB1*12:01L HLA-DRB1*15:03L
FMRFRRAFGEYSH

SEQ ID NO: 17206 - protein, 12 aa, Severe acute respiratory syndrome coronavirus 2
  REGION 1..12: note = Table B: HLA-DRB1*04:05L HLA-DRB1*01:02L HLA-DRB1*08:01L HLA-DRB1*12:01L HLA-DRB1*04:08L
RRAFGEYSHVVA

SEQ ID NO: 17207 - protein, 11 aa, Severe acute respiratory syndrome coronavirus 2
  REGION 1..11: note = Table B: HLA-DRB1*04:05L HLA-DPA1*02:01-B1*13:01L HLA-DQA1*01:03-B1*06:01L HLA-DQA1*02:01-B1*03:03L
AFGEYSHVVAF

SEQ ID NO: 17208 - protein, 12 aa, Severe acute respiratory syndrome coronavirus 2
  REGION 1..12: note = Table B: HLA-DRB1*04:05L HLA-DRB1*01:02L HLA-DRB4*03:01NL HLA-DPA1*01:03-B1*03:01L HLA-DRB1*14:01L HLA-DQA1*01-B1*05L HLA-DRB1*04:10L HLA-DRB1*12:01L HLA-DPA1*03:01-B1*105:01L HLA-DRB1*14:54L HLA-DRB1*04:08L HLA-DRB1*15:03L
FGEYSHVVAFNT

SEQ ID NO: 17209 - protein, 12 aa, Severe acute respiratory syndrome coronavirus 2
  REGION 1..12: note = Table B: HLA-DRB1*04:05L HLA-DQA1*01:02-B1*06:02L HLA-DRB1*08:01L HLA-DRB1*12:01L HLA-DPA1*03:01-B1*105:01L HLA-DQA1*02:01-B1*03:03L HLA-DRB1*15:01L
HFYWFFSNYLKR

SEQ ID NO: 17210 - protein, 12 aa, Severe acute respiratory syndrome coronavirus 2
  REGION 1..12: note = Table B: HLA-DRB1*04:05L HLA-DQA1*01:02-B1*06:02L HLA-DPA1*03:01-B1*105:01L HLA-DRB1*15:01L
FYWFFSNYLKRR

SEQ ID NO: 17211 - protein, 12 aa, Severe acute respiratory syndrome coronavirus 2
  REGION 1..12: note = Table B: HLA-DRB1*04:05L HLA-DRB1*15:03L
YNRYLALYNKYK

SEQ ID NO: 17212 - protein, 12 aa, Severe acute respiratory syndrome coronavirus 2
  REGION 1..12: note = Table B: HLA-DRB1*04:05L HLA-DRB1*04:10L HLA-DQA1*02:01-B1*03:03L
LAKALNDFSNSG

SEQ ID NO: 17213 - protein, 13 aa, Severe acute respiratory syndrome coronavirus 2
  REGION 1..13: note = Table B: HLA-DRB1*04:05L HLA-DPA1*01:03-B1*03:01L HLA-DRB1*04:10L HLA-DRB1*12:01L HLA-DRB1*14:17L
LPTGVHAGTDLEG

SEQ ID NO: 17214 - protein, 12 aa, Severe acute respiratory syndrome coronavirus 2
  REGION 1..12: note = Table B: HLA-DRB1*04:05L
NRFTTTLNDFNL

SEQ ID NO: 17215 - protein, 13 aa, Severe acute respiratory syndrome coronavirus 2
  REGION 1..13: note = Table B: HLA-DRB1*04:05L HLA-DRB1*01:02L HLA-DPA1*03:01-B1*04:02L HLA-DRB1*12:01L HLA-DRB1*16:01L
RFTTTLNDFNLVA

SEQ ID NO: 17216 - protein, 12 aa, Severe acute respiratory syndrome coronavirus 2
  REGION 1..12: note = Table B: HLA-DRB1*04:05L HLA-DRB1*01:02L HLA-DRB1*12:01L HLA-DPA1*03:01-B1*105:01L HLA-DRB1*15:03L
IAVLDMCASLKE

SEQ ID NO: 17217 - protein, 15 aa, Severe acute respiratory syndrome coronavirus 2
  REGION 1..15: note = Table B: HLA-DRB1*04:05L
ASLKELLQNGMNGRT

SEQ ID NO: 17218 - protein, 12 aa, Severe acute respiratory syndrome coronavirus 2
  REGION 1..12: note = Table B: HLA-DRB1*04:05L HLA-DPA1*02:01-B1*13:01L
LEDEFTPFDVVR

SEQ ID NO: 17219 - protein, 11 aa, Severe acute respiratory syndrome coronavirus 2
  REGION 1..11: note = Table B: HLA-DRB1*04:05L HLA-DPA1*01:03-B1*03:01L HLA-DQA1*01-B1*05L HLA-DRB4*01:01L HLA-DPA1*01:03-B1*04:01L HLA-DPA1*02:01-B1*13:01L HLA-DPA1*01:03-B1*104:01L HLA-DQA1*05:05-B1*03:01L
VLVQSTQWSLF

SEQ ID NO: 17220 - protein, 12 aa, Severe acute respiratory syndrome coronavirus 2
  REGION 1..12: note = Table B: HLA-DRB1*04:05L HLA-DQA1*01-B1*05L HLA-DRB1*10:01L HLA-DRB1*04:08L
NMVYMPASWVMR

SEQ ID NO: 17221 - protein, 14 aa, Severe acute respiratory syndrome coronavirus 2
  REGION 1..14: note = Table B: HLA-DRB1*04:05L
DMVDTSLSGFKLKD

SEQ ID NO: 17222 - protein, 11 aa, Severe acute respiratory syndrome coronavirus 2
  REGION 1..11: note = Table B: HLA-DRB1*04:05L HLA-DRB1*08:77L HLA-DRB3*02:01L HLA-DPA1*03:01-B1*04:02L HLA-DRB1*11:03L HLA-DRB1*14:02L HLA-DQA1*05:05-B1*03:01L HLA-DQA1*01:03-B1*06:01L HLA-DRB1*04:08L
LILMTARTVYD

SEQ ID NO: 17223 - protein, 12 aa, Severe acute respiratory syndrome coronavirus 2
  REGION 1..12: note = Table B: HLA-DRB1*04:05L HLA-DRB1*01:02L HLA-DRB1*04:08L
TARTVYDDGARR

SEQ ID NO: 17224 - protein, 12 aa, Severe acute respiratory syndrome coronavirus 2
  REGION 1..12: note = Table B: HLA-DRB1*04:05L HLA-DRB1*12:01L HLA-DPA1*02:01-B1*13:01L
ARRVWTLMNVLT

SEQ ID NO: 17225 - protein, 14 aa, Severe acute respiratory syndrome coronavirus 2
  REGION 1..14: note = Table B: HLA-DRB1*04:05L HLA-DRB1*11:02L HLA-DRB1*11:03L HLA-DRB1*11:04L HLA-DRB1*11:01L HLA-DRB3*01:01L HLA-DPA1*01:03-B1*02:01L
NVLTLVYKVYYGNA

SEQ ID NO: 17226 - protein, 10 aa, Severe acute respiratory syndrome coronavirus 2
  REGION 1..10: note = Table B: HLA-DRB1*04:05L HLA-DQA1*01:02-B1*06:02L HLA-DRB1*08:77L HLA-DQA1*05:05-B1*03:19L HLA-DQA1*05:01-B1*02:01L HLA-DRB4*01:01L HLA-DPA1*02:01-B1*13:01L HLA-DQA1*01:03-B1*06:01L
  REGION 1..10: note = CONT. FROM ABOVE: HLA-DRB1*15:03L
YDYLVSTQEF

SEQ ID NO: 17227 - protein, 13 aa, Severe acute respiratory syndrome coronavirus 2
  REGION 1..13: note = Table B: HLA-DRB1*04:05L HLA-DQA1*01:02-B1*06:02L HLA-DPA1*01:03-B1*03:01L HLA-DRB1*12:01L HLA-DPA1*02:01-B1*13:01L
VGGKPCIKVATVQ

SEQ ID NO: 17228 - protein, 12 aa, Severe acute respiratory syndrome coronavirus 2
  REGION 1..12: note = Table B: HLA-DRB1*04:05L HLA-DRB1*01:02L HLA-DRB1*14:01L HLA-DRB1*15:03L
IKVATVQSKMSD

SEQ ID NO: 17229 - protein, 12 aa, Severe acute respiratory syndrome coronavirus 2
  REGION 1..12: note = Table B: HLA-DRB1*04:05L HLA-DQA1*01:02-B1*06:02L HLA-DRB1*01:02L HLA-DPA1*01:03-B1*03:01L HLA-DRB1*08:01L HLA-DPA1*02:01-B1*13:01L HLA-DRB1*04:08L
SKLWAQCVQLHN

SEQ ID NO: 17230 - protein, 13 aa, Severe acute respiratory syndrome coronavirus 2
  REGION 1..13: note = Table B: HLA-DRB1*04:05L HLA-DQA1*01:02-B1*06:02L HLA-DQA1*05:05-B1*03:19L HLA-DQA1*05:01-B1*02:01L HLA-DRB1*04:08L
VLLSMQGAVDINK

SEQ ID NO: 17231 - protein, 12 aa, Severe acute respiratory syndrome coronavirus 2
  REGION 1..12: note = Table B: HLA-DRB1*04:05L HLA-DQA1*01:02-B1*06:02L HLA-DRB1*01:02L HLA-DPA1*01:03-B1*03:01L HLA-DRB1*12:01L HLA-DPA1*02:01-B1*13:01L HLA-DQA1*01:03-B1*06:01L HLA-DQA1*02:01-B1*03:03L HLA-DRB1*15:03L
INKLCEEMLDNR

SEQ ID NO: 17232 - protein, 11 aa, Severe acute respiratory syndrome coronavirus 2
  REGION 1..11: note = Table B: HLA-DRB1*04:05L HLA-DRB1*01:01L HLA-DRB1*01:02L HLA-DQA1*05:05-B1*03:01L
EFSSLPSYAAF

SEQ ID NO: 17233 - protein, 13 aa, Severe acute respiratory syndrome coronavirus 2
  REGION 1..13: note = Table B: HLA-DRB1*04:05L
LKKSLNVAKSEFD

SEQ ID NO: 17234 - protein, 14 aa, Severe acute respiratory syndrome coronavirus 2
  REGION 1..14: note = Table B: HLA-DRB1*04:05L HLA-DRB1*01:02L HLA-DRB1*04:08L
VAKSEFDRDAAMQR

SEQ ID NO: 17235 - protein, 13 aa, Severe acute respiratory syndrome coronavirus 2
  REGION 1..13: note = Table B: HLA-DRB1*04:05L HLA-DRB1*01:02L HLA-DRB1*12:01L HLA-DPA1*02:01-B1*13:01L
AMQRKLEKMADQA

SEQ ID NO: 17236 - protein, 12 aa, Severe acute respiratory syndrome coronavirus 2
  REGION 1..12: note = Table B: HLA-DRB1*04:05L HLA-DRB1*01:02L HLA-DRB1*12:01L HLA-DPA1*02:01-B1*13:01L HLA-DQA1*03:01-B1*03:02L HLA-DRB1*04:08L HLA-DRB1*15:03L
RKLEKMADQAMT

SEQ ID NO: 17237 - protein, 12 aa, Severe acute respiratory syndrome coronavirus 2
  REGION 1..12: note = Table B: HLA-DRB1*04:05L HLA-DRB1*08:01L HLA-DRB1*12:01L HLA-DQA1*03:01-B1*03:02L HLA-DRB1*04:08L HLA-DQA1*02:01-B1*03:03L HLA-DRB1*15:03L
QMYKQARSEDKR

SEQ ID NO: 17238 - protein, 13 aa, Severe acute respiratory syndrome coronavirus 2
  REGION 1..13: note = Table B: HLA-DRB1*04:05L HLA-DRB1*01:02L HLA-DRB1*12:01L HLA-DPA1*02:01-B1*13:01L HLA-DRB1*16:01L HLA-DQA1*01:03-B1*06:01L
DKRAKVTSAMQTM

SEQ ID NO: 17239 - protein, 13 aa, Severe acute respiratory syndrome coronavirus 2
  REGION 1..13: note = Table B: HLA-DRB1*04:05L HLA-DRB1*04:10L
DNDALNNIINNAR

SEQ ID NO: 17240 - protein, 11 aa, Severe acute respiratory syndrome coronavirus 2
  REGION 1..11: note = Table B: HLA-DRB1*04:05L HLA-DPA1*02:01-B1*13:01L HLA-DQA1*01:03-B1*06:01L
TYKNTCDGTTF

SEQ ID NO: 17241 - protein, 14 aa, Severe acute respiratory syndrome coronavirus 2
  REGION 1..14: note = Table B: HLA-DRB1*04:05L HLA-DRB1*08:04L HLA-DRB1*14:02L HLA-DRB1*08:01L HLA-DPA1*01:03-B1*104:01L HLA-DRB1*10:01L HLA-DRB1*08:03L
TTFTYASALWEIQQ

SEQ ID NO: 17242 - protein, 13 aa, Severe acute respiratory syndrome coronavirus 2
  REGION 1..13: note = Table B: HLA-DRB1*04:05L HLA-DQA1*01-B1*05L HLA-DRB1*04:10L
ASALWEIQQVVDA

SEQ ID NO: 17243 - protein, 13 aa, Severe acute respiratory syndrome coronavirus 2
  REGION 1..13: note = Table B: HLA-DRB1*04:05L HLA-DQA1*05:01-B1*02:01L HLA-DRB1*04:10L HLA-DRB1*14:17L HLA-DRB1*04:08L
SALWEIQQVVDAD

SEQ ID NO: 17244 - protein, 12 aa, Severe acute respiratory syndrome coronavirus 2
  REGION 1..12: note = Table B: HLA-DRB1*04:05L HLA-DQA1*05:01-B1*02:01L
LWEIQQVVDADS

SEQ ID NO: 17245 - protein, 12 aa, Severe acute respiratory syndrome coronavirus 2
  REGION 1..12: note = Table B: HLA-DRB1*04:05L HLA-DRB1*08:04L HLA-DPA1*01:03-B1*03:01L HLA-DRB1*13:01L HLA-DRB1*04:10L HLA-DRB1*12:02L HLA-DRB3*01:01L HLA-DRB1*04:08L
LSEISMDNSPNL

SEQ ID NO: 17246 - protein, 12 aa, Severe acute respiratory syndrome coronavirus 2
  REGION 1..12: note = Table B: HLA-DRB1*04:05L HLA-DRB1*01:02L HLA-DRB1*08:04L HLA-DPA1*01:03-B1*03:01L HLA-DRB1*03:01L HLA-DRB1*04:10L HLA-DRB1*12:02L HLA-DRB3*01:01L HLA-DRB1*04:08L
SEISMDNSPNLA

SEQ ID NO: 17247 - protein, 12 aa, Severe acute respiratory syndrome coronavirus 2
  REGION 1..12: note = Table B: HLA-DRB1*04:05L HLA-DQA1*01:02-B1*06:02L HLA-DRB1*08:04L
PLIVTALRANSA

SEQ ID NO: 17248 - protein, 12 aa, Severe acute respiratory syndrome coronavirus 2
  REGION 1..12: note = Table B: HLA-DRB1*04:05L HLA-DRB1*01:01L HLA-DPA1*01:03-B1*03:01L HLA-DPA1*03:01-B1*04:02L HLA-DRB1*03:01L HLA-DRB1*11:01L HLA-DQA1*05:05-B1*03:19L HLA-DQA1*05:01-B1*02:01L HLA-DRB3*01:01L
  REGION 1..12: note = CONT. FROM ABOVE: HLA-DQA1*05:05-B1*03:01L HLA-DPA1*01:02-B1*04: 01L
ALRANSAVKLQN

SEQ ID NO: 17249 - protein, 12 aa, Severe acute respiratory syndrome coronavirus 2
  REGION 1..12: note = Table B: HLA-DRB1*04:05L HLA-DRB1*01:01L HLA-DRB3*02:01L HLA-DPA1*01:03-B1*03:01L HLA-DPA1*03:01-B1*04:02L HLA-DRB1*03:01L HLA-DRB1*11:02L HLA-DRB1*11:01L HLA-DQA1*05:05-B1*03:19L HLA-DQA1*05:01-B1*02:01L
  REGION 1..12: note = CONT. FROM ABOVE: HLA-DRB1*04:10L HLA-DPA1*01:03-B1*04:02L HLA-D PA1*03:01-B1*105:01L HLA-DPA1*01:02-B1*04:01L HLA-DRB1*07:01L
LRANSAVKLQNN

SEQ ID NO: 17250 - protein, 12 aa, Severe acute respiratory syndrome coronavirus 2
  REGION 1..12: note = Table B: HLA-DRB1*04:05L HLA-DQA1*01:02-B1*06:02L HLA-DRB1*01:02L HLA-DPA1*01:02-B1*04:01L HLA-DQA1*01:03-B1*06:01L HLA-DRB1*04:08L HLA-DRB1*15:03L
ALAYYNTTKGGR

SEQ ID NO: 17251 - protein, 13 aa, Severe acute respiratory syndrome coronavirus 2
  REGION 1..13: note = Table B: HLA-DRB1*04:05L HLA-DQA1*01:02-B1*06:02L HLA-DRB1*04:10L HLA-DRB1*12:01L HLA-DRB1*16:01L HLA-DRB1*04:08L HLA-DRB1*15:03L
RFVLALLSDLQDL

SEQ ID NO: 17252 - protein, 15 aa, Severe acute respiratory syndrome coronavirus 2
  REGION 1..15: note = Table B: HLA-DRB1*04:05L HLA-DRB1*01:02L HLA-DRB1*14:01L HLA-DRB1*12:01L HLA-DPA1*02:01-B1*13:01L HLA-DQA1*03:01-B1*03:02L HLA-DRB1*15:03L
TPKGPKVKYLYFIKG

SEQ ID NO: 17253 - protein, 14 aa, Severe acute respiratory syndrome coronavirus 2
  REGION 1..14: note = Table B: HLA-DRB1*04:05L HLA-DQA1*01:02-B1*06:02L HLA-DRB1*01:02L HLA-DRB1*08:04L HLA-DPA1*03:01-B1*04:02L HLA-DRB1*14:01L HLA-DRB1*11:04L HLA-DRB1*11:01L HLA-DRB1*12:01L HLA-DPA1*02:01-B1*13:01L HLA-DPA1*03:01-B1*105:01L
  REGION 1..14: note = CONT. FROM ABOVE: HLA-DPA1*01:03-B1*02:01L HLA-DRB1*15:03L
GPKVKYLYFIKGLN

SEQ ID NO: 17254 - protein, 12 aa, Severe acute respiratory syndrome coronavirus 2
  REGION 1..12: note = Table B: HLA-DRB1*04:05L HLA-DRB1*01:02L
LYFIKGLNNLNR

SEQ ID NO: 17255 - protein, 11 aa, Severe acute respiratory syndrome coronavirus 2
  REGION 1..11: note = Table B: HLA-DRB1*04:05L HLA-DRB1*01:01L HLA-DRB1*08:04L HLA-DPA1*01:03-B1*03:01L HLA-DPA1*03:01-B1*04:02L HLA-DRB1*14:01L HLA-DRB1*14:02L HLA-DRB5*01:01L HLA-DPA1*01:03-B1*04:01L HLA-DRB1*04:10L
  REGION 1..11: note = CONT. FROM ABOVE: HLA-DPA1*03:01-B1*105:01L HLA-DQA1*03:01-B1*03 :02L HLA-DRB1*14:54L HLA-DQA1*05:05-B1*03:01L HLA-DRB1*14:17L HL A-DQA1*01:03-B1*06:01L HLA-DRB1*04:08L
DYLASGGQPIT

SEQ ID NO: 17256 - protein, 11 aa, Severe acute respiratory syndrome coronavirus 2
  REGION 1..11: note = Table B: HLA-DRB1*04:05L HLA-DRB1*01:01L HLA-DPA1*01:03-B1*03:01L HLA-DPA1*03:01-B1*04:02L HLA-DRB1*14:01L HLA-DRB1*14:02L HLA-DRB5*01:01L HLA-DPA1*03:01-B1*105:01L HLA-DRB1*14:54L
  REGION 1..11: note = CONT. FROM ABOVE: HLA-DPA1*01:02-B1*04:01L HLA-DRB1*10:01L HLA-D RB1*04:08L
YLASGGQPITN

SEQ ID NO: 17257 - protein, 14 aa, Severe acute respiratory syndrome coronavirus 2
  REGION 1..14: note = Table B: HLA-DRB1*04:05L
TPEANMDQESFGGA

SEQ ID NO: 17258 - protein, 13 aa, Severe acute respiratory syndrome coronavirus 2
  REGION 1..13: note = Table B: HLA-DRB1*04:05L HLA-DRB1*16:01L
LKGKYVQIPTTCA

SEQ ID NO: 17259 - protein, 12 aa, Severe acute respiratory syndrome coronavirus 2
  REGION 1..12: note = Table B: HLA-DRB1*04:05L HLA-DQA1*05:01-B1*02:01L HLA-DRB1*04:08L
YRAFDIYNDKVA

SEQ ID NO: 17260 - protein, 13 aa, Severe acute respiratory syndrome coronavirus 2
  REGION 1..13: note = Table B: HLA-DRB1*04:05L HLA-DRB3*01:01L
DNLIDSYFVVKRH

SEQ ID NO: 17261 - protein, 13 aa, Severe acute respiratory syndrome coronavirus 2
  REGION 1..13: note = Table B: HLA-DRB1*04:05L
NLIDSYFVVKRHT

SEQ ID NO: 17262 - protein, 13 aa, Severe acute respiratory syndrome coronavirus 2
  REGION 1..13: note = Table B: HLA-DRB1*04:05L
FVVKRHTFSNYQH

SEQ ID NO: 17263 - protein, 13 aa, Severe acute respiratory syndrome coronavirus 2
  REGION 1..13: note = Table B: HLA-DRB1*04:05L HLA-DRB1*08:01L HLA-DRB1*12:01L HLA-DPA1*02:01-B1*13:01L HLA-DQA1*03:01-B1*03:02L HLA-DPA1*01:02-B1*04:01L HLA-DRB1*15:03L
VVKRHTFSNYQHE

SEQ ID NO: 17264 - protein, 11 aa, Severe acute respiratory syndrome coronavirus 2
  REGION 1..11: note = Table B: HLA-DRB1*04:05L HLA-DRB4*03:01NL HLA-DQA1*01:01-B1*05:01L HLA-DRB1*04:10L HLA-DRB1*12:01L HLA-DRB1*14:54L HLA-DRB1*04:08L
SNYQHEETIYN

SEQ ID NO: 17265 - protein, 12 aa, Severe acute respiratory syndrome coronavirus 2
  REGION 1..12: note = Table B: HLA-DRB1*04:05L HLA-DRB1*16:01L HLA-DRB1*04:08L
TIYNLLKDCPAV

SEQ ID NO: 17266 - protein, 12 aa, Severe acute respiratory syndrome coronavirus 2
  REGION 1..12: note = Table B: HLA-DRB1*04:05L HLA-DRB1*01:02L HLA-DRB3*01:01L HLA-DRB1*04:08L HLA-DRB1*15:03L
GDMVPHISRQRL

SEQ ID NO: 17267 - protein, 13 aa, Severe acute respiratory syndrome coronavirus 2
  REGION 1..13: note = Table B: HLA-DRB1*04:05L HLA-DRB1*12:01L HLA-DPA1*02:01-B1*13:01L
SRQRLTKYTMADL

SEQ ID NO: 17268 - protein, 14 aa, Severe acute respiratory syndrome coronavirus 2
  REGION 1..14: note = Table B: HLA-DRB1*04:05L HLA-DRB1*01:02L HLA-DRB1*12:01L HLA-DPA1*02:01-B1*13:01L HLA-DRB1*16:01L
RQRLTKYTMADLVY

SEQ ID NO: 17269 - protein, 13 aa, Severe acute respiratory syndrome coronavirus 2
  REGION 1..13: note = Table B: HLA-DRB1*04:05L HLA-DRB1*01:02L HLA-DRB1*12:01L HLA-DPA1*02:01-B1*13:01L HLA-DRB1*16:01L
RLTKYTMADLVYA

SEQ ID NO: 17270 - protein, 14 aa, Severe acute respiratory syndrome coronavirus 2
  REGION 1..14: note = Table B: HLA-DRB1*04:05L HLA-DRB1*15:03L
KEILVTYNCCDDDY

SEQ ID NO: 17271 - protein, 11 aa, Severe acute respiratory syndrome coronavirus 2
  REGION 1..11: note = Table B: HLA-DRB1*04:05L HLA-DPA1*03:01-B1*105:01L HLA-DRB1*16:01L
DYFNKKDWYDF

SEQ ID NO: 17272 - protein, 13 aa, Severe acute respiratory syndrome coronavirus 2
  REGION 1..13: note = Table B: HLA-DRB1*04:05L HLA-DRB1*12:01L HLA-DRB1*04:08L HLA-DRB1*15:03L
GERVRQALLKTVQ

SEQ ID NO: 17273 - protein, 14 aa, Severe acute respiratory syndrome coronavirus 2
  REGION 1..14: note = Table B: HLA-DRB1*04:05L HLA-DRB1*08:77L HLA-DPA1*01:03-B1*03:01L HLA-DRB1*14:02L HLA-DRB1*08:01L HLA-DPA1*01:03-B1*04:02L HLA-DPA1*01:03-B1*104:01L HLA-DRB1*07:01L HLA-DRB1*15:03L
FIQTTPGSGVPVVD

SEQ ID NO: 17274 - protein, 14 aa, Severe acute respiratory syndrome coronavirus 2
  REGION 1..14: note = Table B: HLA-DRB1*04:05L HLA-DPA1*02:01-B1*13:01L
RALTAESHVDTDLT

SEQ ID NO: 17275 - protein, 15 aa, Severe acute respiratory syndrome coronavirus 2
  REGION 1..15: note = Table B: HLA-DRB1*04:05L HLA-DRB1*08:04L HLA-DPA1*03:01-B1*04:02L HLA-DRB1*11:01L HLA-DRB1*13:01L HLA-DPA1*03:01-B1*105:01L
ERLKLFDRYFKYWDQ

SEQ ID NO: 17276 - protein, 15 aa, Severe acute respiratory syndrome coronavirus 2
  REGION 1..15: note = Table B: HLA-DRB1*04:05L HLA-DPA1*01:03-B1*104:01L HLA-DRB1*04:08L
VLFSTVFPPTSFGPL

SEQ ID NO: 17277 - protein, 13 aa, Severe acute respiratory syndrome coronavirus 2
  REGION 1..13: note = Table B: HLA-DRB1*04:05L HLA-DRB1*08:01L HLA-DRB1*12:01L HLA-DRB1*04:08L
VFPPTSFGPLVRK

SEQ ID NO: 17278 - protein, 12 aa, Severe acute respiratory syndrome coronavirus 2
  REGION 1..12: note = Table B: HLA-DRB1*04:05L HLA-DRB1*01:02L HLA-DRB1*12:01L
GYHFRELGVVHN

SEQ ID NO: 17279 - protein, 12 aa, Severe acute respiratory syndrome coronavirus 2
  REGION 1..12: note = Table B: HLA-DRB1*04:05L HLA-DRB1*01:02L
YHFRELGVVHNQ

SEQ ID NO: 17280 - protein, 14 aa, Severe acute respiratory syndrome coronavirus 2
  REGION 1..14: note = Table B: HLA-DRB1*04:05L
MHAASGNLLLDKRT

SEQ ID NO: 17281 - protein, 15 aa, Severe acute respiratory syndrome coronavirus 2
  REGION 1..15: note = Table B: HLA-DRB1*04:05L HLA-DRB1*01:02L HLA-DRB1*12:01L HLA-DPA1*01:03-B1*104:01L HLA-DQA1*01:03-B1*06:01L
LDKRTTCFSVAALTN

SEQ ID NO: 17282 - protein, 15 aa, Severe acute respiratory syndrome coronavirus 2
  REGION 1..15: note = Table B: HLA-DRB1*04:05L HLA-DRB1*08:04L HLA-DPA1*01:03-B1*04:02L HLA-DPA1*02:01-B1*13:01L HLA-DRB1*04:08L
FQTVKPGNFNKDFYD

SEQ ID NO: 17283 - protein, 13 aa, Severe acute respiratory syndrome coronavirus 2
  REGION 1..13: note = Table B: HLA-DRB1*04:05L HLA-DRB1*12:01L HLA-DPA1*02:01-B1*13:01L HLA-DRB1*04:08L HLA-DRB1*15:03L
NFNKDFYDFAVSK

SEQ ID NO: 17284 - protein, 11 aa, Severe acute respiratory syndrome coronavirus 2
  REGION 1..11: note = Table B: HLA-DRB1*04:05L HLA-DQA1*01-B1*05L HLA-DQA1*03:01-B1*03:02L HLA-DRB1*14:17L
HFFFAQDGNAA

SEQ ID NO: 17285 - protein, 14 aa, Severe acute respiratory syndrome coronavirus 2
  REGION 1..14: note = Table B: HLA-DRB1*04:05L HLA-DRB3*01:01L
GNAAISDYDYYRYN

SEQ ID NO: 17286 - protein, 15 aa, Severe acute respiratory syndrome coronavirus 2
  REGION 1..15: note = Table B: HLA-DRB1*04:05L HLA-DRB1*08:04L
AAISDYDYYRYNLPT

SEQ ID NO: 17287 - protein, 12 aa, Severe acute respiratory syndrome coronavirus 2
  REGION 1..12: note = Table B: HLA-DRB1*04:05L
RQLLFVVEVVDK

SEQ ID NO: 17288 - protein, 12 aa, Severe acute respiratory syndrome coronavirus 2
  REGION 1..12: note = Table B: HLA-DRB1*04:05L HLA-DRB1*08:04L HLA-DRB3*02:01L HLA-DPA1*01:03-B1*03:01L HLA-DRB1*11:03L HLA-DQA1*01:01-B1*05:01L HLA-DQA1*01-B1*05L HLA-DQA1*05:05-B1*03:19L HLA-DRB1*04:10L
  REGION 1..12: note = CONT. FROM ABOVE: HLA-DPA1*01:03-B1*04:02L HLA-DRB1*12:02L HLA-D PA1*02:01-B1*13:01L HLA-DPA1*01:03-B1*104:01L HLA-DRB1*04:08L
INANQVIVNNLD

SEQ ID NO: 17289 - protein, 15 aa, Severe acute respiratory syndrome coronavirus 2
  REGION 1..15: note = Table B: HLA-DRB1*04:05L HLA-DRB1*12:01L
DKSAGFPFNKWGKAR

SEQ ID NO: 17290 - protein, 14 aa, Severe acute respiratory syndrome coronavirus 2
  REGION 1..14: note = Table B: HLA-DRB1*04:05L HLA-DRB1*11:01L HLA-DRB3*01:01L
AGFPFNKWGKARLY

SEQ ID NO: 17291 - protein, 13 aa, Severe acute respiratory syndrome coronavirus 2
  REGION 1..13: note = Table B: HLA-DRB1*04:05L HLA-DRB1*16:01L
KARLYYDSMSYED

SEQ ID NO: 17292 - protein, 13 aa, Severe acute respiratory syndrome coronavirus 2
  REGION 1..13: note = Table B: HLA-DRB1*04:05L HLA-DQA1*01:03-B1*06:01L
LYYDSMSYEDQDA

SEQ ID NO: 17293 - protein, 12 aa, Severe acute respiratory syndrome coronavirus 2
  REGION 1..12: note = Table B: HLA-DRB1*04:05L HLA-DRB1*01:02L HLA-DRB1*04:10L
NVIPTITQMNLK

SEQ ID NO: 17294 - protein, 13 aa, Severe acute respiratory syndrome coronavirus 2
  REGION 1..13: note = Table B: HLA-DRB1*04:05L HLA-DRB1*01:02L
VIPTITQMNLKYA

SEQ ID NO: 17295 - protein, 12 aa, Severe acute respiratory syndrome coronavirus 2
  REGION 1..12: note = Table B: HLA-DRB1*04:05L HLA-DQA1*01:02-B1*06:02L HLA-DRB1*01:02L HLA-DRB1*12:01L
QMNLKYAISAKN

SEQ ID NO: 17296 - protein, 13 aa, Severe acute respiratory syndrome coronavirus 2
  REGION 1..13: note = Table B: HLA-DRB1*04:05L HLA-DRB1*12:01L HLA-DPA1*02:01-B1*13:01L
AKNRARTVAGVSI

SEQ ID NO: 17297 - protein, 14 aa, Severe acute respiratory syndrome coronavirus 2
  REGION 1..14: note = Table B: HLA-DRB1*04:05L HLA-DRB1*14:01L HLA-DRB1*11:04L HLA-DRB1*11:01L HLA-DRB3*01:01L HLA-DPA1*01:03-B1*02:01L HLA-DRB1*15:03L
NRQFHQKLLKSIAA

SEQ ID NO: 17298 - protein, 12 aa, Severe acute respiratory syndrome coronavirus 2
  REGION 1..12: note = Table B: HLA-DRB1*04:05L HLA-DRB1*01:02L HLA-DPA1*03:01-B1*105:01L HLA-DRB1*04:08L
TRGATVVIGTSK

SEQ ID NO: 17299 - protein, 14 aa, Severe acute respiratory syndrome coronavirus 2
  REGION 1..14: note = Table B: HLA-DRB1*04:05L HLA-DRB1*12:01L
GTSKFYGGWHNMLK

SEQ ID NO: 17300 - protein, 14 aa, Severe acute respiratory syndrome coronavirus 2
  REGION 1..14: note = Table B: HLA-DRB1*04:05L HLA-DPA1*02:01-B1*13:01L HLA-DQA1*03:01-B1*03:02L HLA-DRB1*16:01L HLA-DRB1*04:08L HLA-DRB1*15:03L
HNMLKTVYSDVENP

SEQ ID NO: 17301 - protein, 12 aa, Severe acute respiratory syndrome coronavirus 2
  REGION 1..12: note = Table B: HLA-DRB1*04:05L HLA-DQA1*01:02-B1*06:02L HLA-DRB1*04:08L
LRIMASLVLARK

SEQ ID NO: 17302 - protein, 13 aa, Severe acute respiratory syndrome coronavirus 2
  REGION 1..13: note = Table B: HLA-DRB1*04:05L HLA-DRB1*12:01L HLA-DPA1*02:01-B1*13:01L
VLARKHTTCCSLS

SEQ ID NO: 17303 - protein, 12 aa, Severe acute respiratory syndrome coronavirus 2
  REGION 1..12: note = Table B: HLA-DRB1*04:05L HLA-DRB1*01:02L HLA-DRB1*12:01L HLA-DPA1*02:01-B1*13:01L
ARKHTTCCSLSH

SEQ ID NO: 17304 - protein, 12 aa, Severe acute respiratory syndrome coronavirus 2
  REGION 1..12: note = Table B: HLA-DRB1*04:05L HLA-DRB1*01:02L HLA-DRB1*12:01L
RKHTTCCSLSHR

SEQ ID NO: 17305 - protein, 15 aa, Severe acute respiratory syndrome coronavirus 2
  REGION 1..15: note = Table B: HLA-DRB1*04:05L HLA-DPA1*01:03-B1*03:01L HLA-DRB1*12:01L HLA-DRB1*16:01L HLA-DQA1*01:03-B1*06:01L
GSLYVKPGGTSSGDA

SEQ ID NO: 17306 - protein, 17 aa, Severe acute respiratory syndrome coronavirus 2
  REGION 1..17: note = Table B: HLA-DRB1*04:05L HLA-DRB1*14:17L
VKPGGTSSGDATTAYAN

SEQ ID NO: 17307 - protein, 13 aa, Severe acute respiratory syndrome coronavirus 2
  REGION 1..13: note = Table B: HLA-DRB1*04:05L HLA-DRB4*03:01NL HLA-DRB1*04:10L HLA-DRB1*14:54L
ANVNALLSTDGNK

SEQ ID NO: 17308 - protein, 11 aa, Severe acute respiratory syndrome coronavirus 2
  REGION 1..11: note = Table B: HLA-DRB1*04:05L HLA-DRB1*11:03L HLA-DRB1*14:02L HLA-DRB1*11:01L HLA-DQA1*05:05-B1*03:116L HLA-DRB1*14:54L HLA-DPA1*01:02-B1*04:01L HLA-DRB1*08:02L
STDGNKIADKY

SEQ ID NO: 17309 - protein, 12 aa, Severe acute respiratory syndrome coronavirus 2
  REGION 1..12: note = Table B: HLA-DRB1*04:05L HLA-DRB1*01:02L HLA-DRB1*12:01L HLA-DPA1*02:01-B1*13:01L HLA-DQA1*02:01-B1*03:03L
DGNKIADKYVRN

SEQ ID NO: 17310 - protein, 14 aa, Severe acute respiratory syndrome coronavirus 2
  REGION 1..14: note = Table B: HLA-DRB1*04:05L HLA-DRB1*12:01L HLA-DRB3*01:01L
NKIADKYVRNLQHR

SEQ ID NO: 17311 - protein, 12 aa, Severe acute respiratory syndrome coronavirus 2
  REGION 1..12: note = Table B: HLA-DRB1*04:05L HLA-DRB1*12:01L
LQHRLYECLYRN

SEQ ID NO: 17312 - protein, 12 aa, Severe acute respiratory syndrome coronavirus 2
  REGION 1..12: note = Table B: HLA-DRB1*04:05L HLA-DRB1*12:01L
QHRLYECLYRNR

SEQ ID NO: 17313 - protein, 14 aa, Severe acute respiratory syndrome coronavirus 2
  REGION 1..14: note = Table B: HLA-DRB1*04:05L HLA-DPA1*02:01-B1*13:01L HLA-DRB1*16:01L
LYECLYRNRDVDTD

SEQ ID NO: 17314 - protein, 12 aa, Severe acute respiratory syndrome coronavirus 2
  REGION 1..12: note = Table B: HLA-DRB1*04:05L HLA-DRB1*08:01L HLA-DPA1*02:01-B1*13:01L HLA-DRB1*16:01L HLA-DRB1*04:08L
YRNRDVDTDFVN

SEQ ID NO: 17315 - protein, 13 aa, Severe acute respiratory syndrome coronavirus 2
  REGION 1..13: note = Table B: HLA-DRB1*04:05L HLA-DRB1*01:02L HLA-DPA1*01:03-B1*03:01L HLA-DRB1*12:01L HLA-DPA1*02:01-B1*13:01L HLA-DPA1*03:01-B1*105:01L HLA-DQA1*03:01-B1*03:02L HLA-DPA1*01:02-B1*04:01L
  REGION 1..13: note = CONT. FROM ABOVE: HLA-DRB1*16:01L HLA-DQA1*01:03-B1*06:01L HLA-D QA1*02:01-B1*03:03L HLA-DRB1*15:03L
LRKHFSMMILSDD

SEQ ID NO: 17316 - protein, 13 aa, Severe acute respiratory syndrome coronavirus 2
  REGION 1..13: note = Table B: HLA-DRB1*04:05L HLA-DRB1*01:02L HLA-DRB1*08:01L HLA-DRB1*12:01L HLA-DPA1*02:01-B1*13:01L HLA-DRB1*16:01L HLA-DRB1*04:08L
RKHFSMMILSDDA

SEQ ID NO: 17317 - protein, 14 aa, Severe acute respiratory syndrome coronavirus 2
  REGION 1..14: note = Table B: HLA-DRB1*04:05L HLA-DPA1*02:01-B1*13:01L HLA-DRB1*15:03L
KHFSMMILSDDAVV

SEQ ID NO: 17318 - protein, 13 aa, Severe acute respiratory syndrome coronavirus 2
  REGION 1..13: note = Table B: HLA-DRB1*04:05L HLA-DPA1*01:03-B1*04:01L HLA-DPA1*01:03-B1*04:02L HLA-DQA1*05:05-B1*03:01L HLA-DRB1*04:08L
NFKSVLYYQNNVF

SEQ ID NO: 17319 - protein, 15 aa, Severe acute respiratory syndrome coronavirus 2
  REGION 1..15: note = Table B: HLA-DRB1*04:05L
EAKCWTETDLTKGPH

SEQ ID NO: 17320 - protein, 13 aa, Severe acute respiratory syndrome coronavirus 2
  REGION 1..13: note = Table B: HLA-DRB1*04:05L HLA-DRB1*08:01L HLA-DRB1*04:10L HLA-DPA1*03:01-B1*105:01L HLA-DRB1*04:08L
AGCFVDDIVKTDG

SEQ ID NO: 17321 - protein, 13 aa, Severe acute respiratory syndrome coronavirus 2
  REGION 1..13: note = Table B: HLA-DRB1*04:05L HLA-DPA1*01:03-B1*04:02L HLA-DPA1*01:03-B1*104:01L HLA-DPA1*01:02-B1*04:01L HLA-DRB1*04:08L
ERFVSLAIDAYPL

SEQ ID NO: 17322 - protein, 13 aa, Severe acute respiratory syndrome coronavirus 2
  REGION 1..13: note = Table B: HLA-DRB1*04:05L HLA-DRB3*01:01L HLA-DRB1*14:54L HLA-DRB1*04:08L
YPLTKHPNQEYAD

SEQ ID NO: 17323 - protein, 12 aa, Severe acute respiratory syndrome coronavirus 2
  REGION 1..12: note = Table B: HLA-DRB1*04:05L HLA-DRB1*04:10L
MYSVMLTNDNTS

SEQ ID NO: 17324 - protein, 14 aa, Severe acute respiratory syndrome coronavirus 2
  REGION 1..14: note = Table B: HLA-DRB1*04:05L HLA-DRB1*01:02L HLA-DRB1*12:01L HLA-DRB1*04:08L
IRRPFLCCKCCYDH

SEQ ID NO: 17325 - protein, 12 aa, Severe acute respiratory syndrome coronavirus 2
  REGION 1..12: note = Table B: HLA-DRB1*04:05L HLA-DRB1*01:02L HLA-DQA1*01:01-B1*05:01L
AETLKATEETFK

SEQ ID NO: 17326 - protein, 13 aa, Severe acute respiratory syndrome coronavirus 2
  REGION 1..13: note = Table B: HLA-DRB1*04:05L HLA-DRB1*04:08L
KLSYGIATVREVL

SEQ ID NO: 17327 - protein, 13 aa, Severe acute respiratory syndrome coronavirus 2
  REGION 1..13: note = Table B: HLA-DRB1*04:05L HLA-DRB1*14:01L HLA-DRB1*04:08L
LSYGIATVREVLS

SEQ ID NO: 17328 - protein, 13 aa, Severe acute respiratory syndrome coronavirus 2
  REGION 1..13: note = Table B: HLA-DRB1*04:05L HLA-DRB1*08:01L HLA-DRB1*04:08L
YGIATVREVLSDR

SEQ ID NO: 17329 - protein, 12 aa, Severe acute respiratory syndrome coronavirus 2
  REGION 1..12: note = Table B: HLA-DRB1*04:05L
ATVREVLSDREL

SEQ ID NO: 17330 - protein, 15 aa, Severe acute respiratory syndrome coronavirus 2
  REGION 1..15: note = Table B: HLA-DRB1*04:05L HLA-DRB1*01:02L HLA-DRB1*12:01L
LSDRELHLSWEVGKP

SEQ ID NO: 17331 - protein, 14 aa, Severe acute respiratory syndrome coronavirus 2
  REGION 1..14: note = Table B: HLA-DRB1*04:05L
ELHLSWEVGKPRPP

SEQ ID NO: 17332 - protein, 16 aa, Severe acute respiratory syndrome coronavirus 2
  REGION 1..16: note = Table B: HLA-DRB1*04:05L HLA-DRB1*11:04L HLA-DRB1*12:01L HLA-DPA1*02:01-B1*13:01L
KPRPPLNRNYVFTGYR

SEQ ID NO: 17333 - protein, 13 aa, Severe acute respiratory syndrome coronavirus 2
  REGION 1..13: note = Table B: HLA-DRB1*04:05L
YVFTGYRVTKNSK

SEQ ID NO: 17334 - protein, 13 aa, Severe acute respiratory syndrome coronavirus 2
  REGION 1..13: note = Table B: HLA-DRB1*04:05L HLA-DPA1*01:03-B1*03:01L HLA-DRB1*08:01L HLA-DRB1*04:10L HLA-DRB1*12:01L
DYGDAVVYRGTTT

SEQ ID NO: 17335 - protein, 12 aa, Severe acute respiratory syndrome coronavirus 2
  REGION 1..12: note = Table B: HLA-DRB1*04:05L HLA-DRB1*14:54L HLA-DRB1*04:08L
DAVVYRGTTTYK

SEQ ID NO: 17336 - protein, 12 aa, Severe acute respiratory syndrome coronavirus 2
  REGION 1..12: note = Table B: HLA-DRB1*04:05L HLA-DQA1*01:02-B1*06:02L HLA-DPA1*01:03-B1*03:01L HLA-DRB1*11:03L HLA-DRB1*14:02L HLA-DQA1*05:05-B1*03:19L HLA-DQA1*05:01-B1*02:01L HLA-DPA1*01:03-B1*04:01L HLA-DRB1*09:01L
  REGION 1..12: note = CONT. FROM ABOVE: HLA-DPA1*02:01-B1*13:01L
VVYRGTTTYKLN

SEQ ID NO: 17337 - protein, 13 aa, Severe acute respiratory syndrome coronavirus 2
  REGION 1..13: note = Table B: HLA-DRB1*04:05L HLA-DRB1*08:04L HLA-DRB3*02:01L HLA-DPA1*03:01-B1*04:02L HLA-DRB1*08:01L HLA-DRB1*12:02L
SSNVANYQKVGMQ

SEQ ID NO: 17338 - protein, 11 aa, Severe acute respiratory syndrome coronavirus 2
  REGION 1..11: note = Table B: HLA-DRB1*04:05L HLA-DRB1*14:17L
QKYSTLQGPPG

SEQ ID NO: 17339 - protein, 13 aa, Severe acute respiratory syndrome coronavirus 2
  REGION 1..13: note = Table B: HLA-DRB1*04:05L HLA-DRB1*01:02L HLA-DRB1*12:01L HLA-DPA1*02:01-B1*13:01L HLA-DRB1*04:08L
SARIVYTACSHAA

SEQ ID NO: 17340 - protein, 12 aa, Severe acute respiratory syndrome coronavirus 2
  REGION 1..12: note = Table B: HLA-DRB1*04:05L HLA-DRB1*01:02L HLA-DRB1*08:01L HLA-DRB1*12:01L HLA-DPA1*03:01-B1*105:01L HLA-DRB1*15:03L
ALKYLPIDKCSR

SEQ ID NO: 17341 - protein, 15 aa, Severe acute respiratory syndrome coronavirus 2
  REGION 1..15: note = Table B: HLA-DRB1*04:05L HLA-DQA1*05:05-B1*03:19L HLA-DRB1*12:01L HLA-DPA1*02:01-B1*13:01L HLA-DRB1*15:03L
LPIDKCSRIIPARAR

SEQ ID NO: 17342 - protein, 13 aa, Severe acute respiratory syndrome coronavirus 2
  REGION 1..13: note = Table B: HLA-DRB1*04:05L HLA-DQA1*01:02-B1*06:02L HLA-DRB3*02:01L
TADIVVFDEISMA

SEQ ID NO: 17343 - protein, 13 aa, Severe acute respiratory syndrome coronavirus 2
  REGION 1..13: note = Table B: HLA-DRB1*04:05L HLA-DRB1*01:02L HLA-DRB1*04:10L HLA-DQA1*05:05-B1*03:01L HLA-DQA1*01:03-B1*06:01L HLA-DRB1*04:08L
VVFDEISMATNYD

SEQ ID NO: 17344 - protein, 12 aa, Severe acute respiratory syndrome coronavirus 2
  REGION 1..12: note = Table B: HLA-DRB1*04:05L HLA-DQA1*01:02-B1*06:02L HLA-DRB1*01:02L HLA-DRB4*03:01NL HLA-DRB1*04:10L HLA-DRB1*14:54L HLA-DQA1*05:05-B1*03:01L HLA-DQA1*01:03-B1*06:01L
DEISMATNYDLS

SEQ ID NO: 17345 - protein, 13 aa, Severe acute respiratory syndrome coronavirus 2
  REGION 1..13: note = Table B: HLA-DRB1*04:05L HLA-DQA1*01:01-B1*05:01L HLA-DRB1*15:03L
TNYDLSVVNARLR

SEQ ID NO: 17346 - protein, 13 aa, Severe acute respiratory syndrome coronavirus 2
  REGION 1..13: note = Table B: HLA-DRB1*04:05L HLA-DRB1*14:01L
YDLSVVNARLRAK

SEQ ID NO: 17347 - protein, 13 aa, Severe acute respiratory syndrome coronavirus 2
  REGION 1..13: note = Table B: HLA-DRB1*04:05L HLA-DRB1*01:02L HLA-DRB1*12:01L
VVREFLTRNPAWR

SEQ ID NO: 17348 - protein, 12 aa, Severe acute respiratory syndrome coronavirus 2
  REGION 1..12: note = Table B: HLA-DRB1*04:05L HLA-DRB1*01:02L HLA-DRB1*14:01L HLA-DRB1*12:01L
REFLTRNPAWRK

SEQ ID NO: 17349 - protein, 12 aa, Severe acute respiratory syndrome coronavirus 2
  REGION 1..12: note = Table B: HLA-DRB1*04:05L HLA-DRB1*04:10L HLA-DRB1*16:01L HLA-DRB1*15:03L
AVFISPYNSQNA

SEQ ID NO: 17350 - protein, 14 aa, Severe acute respiratory syndrome coronavirus 2
  REGION 1..14: note = Table B: HLA-DRB1*04:05L
TQTTETAHSCNVNR

SEQ ID NO: 17351 - protein, 14 aa, Severe acute respiratory syndrome coronavirus 2
  REGION 1..14: note = Table B: HLA-DRB1*04:05L HLA-DRB1*08:04L HLA-DPA1*01:03-B1*03:01L HLA-DPA1*03:01-B1*04:02L HLA-DPA1*01:03-B1*04:02L HLA-DPA1*02:01-B1*13:01L HLA-DPA1*01:02-B1*04:01L HLA-DRB1*16:01L
TTETAHSCNVNRFN

SEQ ID NO: 17352 - protein, 13 aa, Severe acute respiratory syndrome coronavirus 2
  REGION 1..13: note = Table B: HLA-DRB1*04:05L HLA-DPA1*01:03-B1*03:01L HLA-DRB1*12:01L HLA-DPA1*02:01-B1*13:01L
TRAKVGILCIMSD

SEQ ID NO: 17353 - protein, 13 aa, Severe acute respiratory syndrome coronavirus 2
  REGION 1..13: note = Table B: HLA-DRB1*04:05L HLA-DRB1*01:02L HLA-DRB1*12:01L HLA-DPA1*02:01-B1*13:01L
RAKVGILCIMSDR

SEQ ID NO: 17354 - protein, 13 aa, Severe acute respiratory syndrome coronavirus 2
  REGION 1..13: note = Table B: HLA-DRB1*04:05L HLA-DQA1*01-B1*05L
KVGILCIMSDRDL

SEQ ID NO: 17355 - protein, 14 aa, Severe acute respiratory syndrome coronavirus 2
  REGION 1..14: note = Table B: HLA-DRB1*04:05L HLA-DRB1*11:03L HLA-DRB1*08:01L HLA-DRB1*11:01L HLA-DRB1*13:01L
PTHLSVDTKFKTEG

SEQ ID NO: 17356 - protein, 13 aa, Severe acute respiratory syndrome coronavirus 2
  REGION 1..13: note = Table B: HLA-DRB1*04:05L HLA-DQA1*01:02-B1*06:02L HLA-DRB1*14:01L HLA-DPA1*03:01-B1*105:01L
YRRLISMMGFKMN

SEQ ID NO: 17357 - protein, 13 aa, Severe acute respiratory syndrome coronavirus 2
  REGION 1..13: note = Table B: HLA-DRB1*04:05L HLA-DRB3*01:01L
PNMFITREEAIRH

SEQ ID NO: 17358 - protein, 13 aa, Severe acute respiratory syndrome coronavirus 2
  REGION 1..13: note = Table B: HLA-DRB1*04:05L HLA-DQA1*01:02-B1*06:02L HLA-DRB4*03:01NL HLA-DPA1*01:03-B1*03:01L HLA-DQA1*01:01-B1*05:01L HLA-DRB1*12:01L HLA-DQA1*05:05-B1*03:01L HLA-DRB1*16:01L
ATREAVGTNLPLQ

SEQ ID NO: 17359 - protein, 14 aa, Severe acute respiratory syndrome coronavirus 2
  REGION 1..14: note = Table B: HLA-DRB1*04:05L HLA-DRB1*11:04L HLA-DRB1*08:01L HLA-DRB3*01:01L HLA-DQA1*03:01-B1*03:02L
AHGFELTSMKYFVK

SEQ ID NO: 17360 - protein, 15 aa, Severe acute respiratory syndrome coronavirus 2
  REGION 1..15: note = Table B: HLA-DRB1*04:05L HLA-DRB1*12:01L
IGPERTCCLCDRRAT

SEQ ID NO: 17361 - protein, 15 aa, Severe acute respiratory syndrome coronavirus 2
  REGION 1..15: note = Table B: HLA-DRB1*04:05L HLA-DPA1*03:01-B1*105:01L HLA-DRB1*16:01L HLA-DRB1*15:03L
DRRATCFSTASDTYA

SEQ ID NO: 17362 - protein, 13 aa, Severe acute respiratory syndrome coronavirus 2
  REGION 1..13: note = Table B: HLA-DRB1*04:05L HLA-DRB1*01:02L HLA-DRB1*08:04L HLA-DRB1*11:04L HLA-DRB1*11:01L HLA-DPA1*03:01-B1*105:01L HLA-DQA1*05:05-B1*03:01L HLA-DPA1*01:02-B1*04:01L HLA-DRB1*16:01L
NHDLYCQVHGNAH

SEQ ID NO: 17363 - protein, 14 aa, Severe acute respiratory syndrome coronavirus 2
  REGION 1..14: note = Table B: HLA-DRB1*04:05L HLA-DRB1*01:02L HLA-DPA1*02:01-B1*13:01L HLA-DPA1*03:01-B1*105:01L HLA-DQA1*05:05-B1*03:01L HLA-DRB1*15:03L
MVVKAALLADKFPV

SEQ ID NO: 17364 - protein, 14 aa, Severe acute respiratory syndrome coronavirus 2
  REGION 1..14: note = Table B: HLA-DRB1*04:05L
VVKAALLADKFPVL

SEQ ID NO: 17365 - protein, 11 aa, Severe acute respiratory syndrome coronavirus 2
  REGION 1..11: note = Table B: HLA-DRB1*04:05L HLA-DRB4*03:01NL HLA-DRB1*08:01L HLA-DQA1*01-B1*05L HLA-DRB1*12:01L HLA-DRB1*14:54L HLA-DPA1*01:02-B1*04:01L HLA-DRB1*04:08L
FPVLHDIGNPK

SEQ ID NO: 17366 - protein, 11 aa, Severe acute respiratory syndrome coronavirus 2
  REGION 1..11: note = Table B: HLA-DRB1*04:05L
PVLHDIGNPKA

SEQ ID NO: 17367 - protein, 15 aa, Severe acute respiratory syndrome coronavirus 2
  REGION 1..15: note = Table B: HLA-DRB1*04:05L HLA-DRB1*12:01L HLA-DRB1*16:01L
PKAIKCVPQADVEWK

SEQ ID NO: 17368 - protein, 11 aa, Severe acute respiratory syndrome coronavirus 2
  REGION 1..11: note = Table B: HLA-DRB1*04:05L
AYKIEELFYSY

SEQ ID NO: 17369 - protein, 10 aa, Severe acute respiratory syndrome coronavirus 2
  REGION 1..10: note = Table B: HLA-DRB1*04:05L HLA-DPA1*02:01-B1*13:01M HLA-DQA1*01:03-B1*06:01L
KFTDGVCLFW

SEQ ID NO: 17370 - protein, 13 aa, Severe acute respiratory syndrome coronavirus 2
  REGION 1..13: note = Table B: HLA-DRB1*04:05L HLA-DRB1*14:01L HLA-DRB1*16:01L HLA-DRB1*04:08L HLA-DRB1*15:03L
SIVCRFDTRVLSN

SEQ ID NO: 17371 - protein, 12 aa, Severe acute respiratory syndrome coronavirus 2
  REGION 1..12: note = Table B: HLA-DRB1*04:05L HLA-DQA1*01:02-B1*06:02L HLA-DRB1*01:02L HLA-DRB1*12:01L HLA-DPA1*02:01-B1*13:01L HLA-DQA1*03:01-B1*03:02L HLA-DRB1*16:01L HLA-DQA1*02:01-B1*03:03L
VNKHAFHTPAFD

SEQ ID NO: 17372 - protein, 12 aa, Severe acute respiratory syndrome coronavirus 2
  REGION 1..12: note = Table B: HLA-DRB1*04:05L HLA-DRB1*12:01L HLA-DPA1*02:01-B1*13:01L
NKHAFHTPAFDK

SEQ ID NO: 17373 - protein, 14 aa, Severe acute respiratory syndrome coronavirus 2
  REGION 1..14: note = Table B: HLA-DRB1*04:05L HLA-DRB1*01:02L HLA-DRB1*12:01L HLA-DRB1*04:08L
AFHTPAFDKSAFVN

SEQ ID NO: 17374 - protein, 13 aa, Severe acute respiratory syndrome coronavirus 2
  REGION 1..13: note = Table B: HLA-DRB1*04:05L HLA-DRB1*14:02L HLA-DQA1*05:05-B1*03:19L HLA-DPA1*02:01-B1*13:01L HLA-DQA1*05:05-B1*03:01L HLA-DRB1*10:01L
DIDYVPLKSATCI

SEQ ID NO: 17375 - protein, 14 aa, Severe acute respiratory syndrome coronavirus 2
  REGION 1..14: note = Table B: HLA-DRB1*04:05L HLA-DRB1*01:02L HLA-DRB1*08:04L HLA-DPA1*01:03-B1*03:01L HLA-DRB1*08:01L HLA-DQA1*05:01-B1*02:01L HLA-DPA1*01:03-B1*04:02L HLA-DRB1*12:01L HLA-DQA1*05:05-B1*03:01L HLA-DRB1*04:08L
SAGFSLWVYKQFDT

SEQ ID NO: 17376 - protein, 13 aa, Severe acute respiratory syndrome coronavirus 2
  REGION 1..13: note = Table B: HLA-DRB1*04:05L HLA-DRB3*02:01L HLA-DPA1*01:03-B1*03:01L HLA-DQA1*05:01-B1*02:01L
ENVAFNVVNKGHF

SEQ ID NO: 17377 - protein, 14 aa, Severe acute respiratory syndrome coronavirus 2
  REGION 1..14: note = Table B: HLA-DRB1*04:05L HLA-DRB1*12:01L HLA-DRB1*15:03L
KGHFDGQQGEVPVS

SEQ ID NO: 17378 - protein, 13 aa, Severe acute respiratory syndrome coronavirus 2
  REGION 1..13: note = Table B: HLA-DRB1*04:05L HLA-DPA1*03:01-B1*04:02L HLA-DQA1*01:01-B1*05:01L HLA-DRB1*08:01L HLA-DQA1*05:05-B1*03:19L HLA-DPA1*02:01-B1*13:01L HLA-DQA1*05:05-B1*03:01L HLA-DRB1*15:03L
INNTVYTKVDGVD

SEQ ID NO: 17379 - protein, 14 aa, Severe acute respiratory syndrome coronavirus 2
  REGION 1..14: note = Table B: HLA-DRB1*04:05L HLA-DRB1*01:02L HLA-DRB1*12:01L HLA-DPA1*02:01-B1*13:01L HLA-DRB1*04:08L
GVDVELFENKTTLP

SEQ ID NO: 17380 - protein, 14 aa, Severe acute respiratory syndrome coronavirus 2
  REGION 1..14: note = Table B: HLA-DRB1*04:05L
NVAFELWAKRNIKP

SEQ ID NO: 17381 - protein, 15 aa, Severe acute respiratory syndrome coronavirus 2
  REGION 1..15: note = Table B: HLA-DRB1*04:05L
VAFELWAKRNIKPVP

SEQ ID NO: 17382 - protein, 12 aa, Severe acute respiratory syndrome coronavirus 2
  REGION 1..12: note = Table B: HLA-DRB1*04:05L HLA-DRB1*01:02L HLA-DPA1*02:01-B1*13:01L HLA-DRB1*04:08L
AKRNIKPVPEVK

SEQ ID NO: 17383 - protein, 15 aa, Severe acute respiratory syndrome coronavirus 2
  REGION 1..15: note = Table B: HLA-DRB1*04:05L HLA-DQA1*01-B1*05L HLA-DPA1*02:01-B1*13:01L
IAANTVIWDYKRDAP

SEQ ID NO: 17384 - protein, 12 aa, Severe acute respiratory syndrome coronavirus 2
  REGION 1..12: note = Table B: HLA-DRB1*04:05L
WDYKRDAPAHIS

SEQ ID NO: 17385 - protein, 14 aa, Severe acute respiratory syndrome coronavirus 2
  REGION 1..14: note = Table B: HLA-DRB1*04:05L HLA-DQA1*01:02-B1*06:02L HLA-DRB1*01:02L HLA-DPA1*01:03-B1*03:01L HLA-DRB1*12:01L HLA-DPA1*02:01-B1*13:01L HLA-DQA1*03:01-B1*03:02L HLA-DQA1*02:01-B1*03:03L
IAKKPTETICAPLT

SEQ ID NO: 17386 - protein, 13 aa, Severe acute respiratory syndrome coronavirus 2
  REGION 1..13: note = Table B: HLA-DRB1*04:05L HLA-DQA1*01:02-B1*06:02L HLA-DRB1*04:10L HLA-DRB1*16:01L HLA-DRB1*04:08L HLA-DQA1*02:01-B1*03:03L HLA-DRB1*15:03L
VDGQVDLFRNARN

SEQ ID NO: 17387 - protein, 12 aa, Severe acute respiratory syndrome coronavirus 2
  REGION 1..12: note = Table B: HLA-DRB1*04:05L HLA-DRB1*12:01L HLA-DQA1*03:01-B1*03:02L HLA-DQA1*02:01-B1*03:03L
RNARNGVLITEG

SEQ ID NO: 17388 - protein, 12 aa, Severe acute respiratory syndrome coronavirus 2
  REGION 1..12: note = Table B: HLA-DRB1*04:05L HLA-DQA1*01:02-B1*06:02L HLA-DRB1*01:02L HLA-DQA1*05:05-B1*03:19L HLA-DRB1*12:01L HLA-DQA1*05:05-B1*03:01L HLA-DQA1*01:03-B1*06:01L
VKGLQPSVGPKQ

SEQ ID NO: 17389 - protein, 11 aa, Severe acute respiratory syndrome coronavirus 2
  REGION 1..11: note = Table B: HLA-DRB1*04:05L HLA-DPA1*01:03-B1*03:01L HLA-DPA1*03:01-B1*04:02L HLA-DQA1*01-B1*05L HLA-DQA1*05:05-B1*03:19L HLA-DPA1*01:03-B1*04:02L HLA-DRB1*04:08L
VTLIGEAVKTQ

SEQ ID NO: 17390 - protein, 13 aa, Severe acute respiratory syndrome coronavirus 2
  REGION 1..13: note = Table B: HLA-DRB1*04:05L HLA-DRB1*01:02L
IGEAVKTQFNYYK

SEQ ID NO: 17391 - protein, 11 aa, Severe acute respiratory syndrome coronavirus 2
  REGION 1..11: note = Table B: HLA-DRB1*04:05L HLA-DRB1*01:02L HLA-DRB1*12:01L
YYKKVDGVVQQ

SEQ ID NO: 17392 - protein, 11 aa, Severe acute respiratory syndrome coronavirus 2
  REGION 1..11: note = Table B: HLA-DRB1*04:05L HLA-DRB1*08:01L
TYFTQSRNLQE

SEQ ID NO: 17393 - protein, 11 aa, Severe acute respiratory syndrome coronavirus 2
  REGION 1..11: note = Table B: HLA-DRB1*04:05L
YFTQSRNLQEF

SEQ ID NO: 17394 - protein, 12 aa, Severe acute respiratory syndrome coronavirus 2
  REGION 1..12: note = Table B: HLA-DRB1*04:05L HLA-DRB1*01:02L HLA-DRB1*08:01L HLA-DRB1*16:01L HLA-DRB1*04:08L
SRNLQEFKPRSQ

SEQ ID NO: 17395 - protein, 13 aa, Severe acute respiratory syndrome coronavirus 2
  REGION 1..13: note = Table B: HLA-DRB1*04:05L HLA-DRB1*08:04L
RYKLEGYAFEHIV

SEQ ID NO: 17396 - protein, 13 aa, Severe acute respiratory syndrome coronavirus 2
  REGION 1..13: note = Table B: HLA-DRB1*04:05L
LGGLHLLIGLAKR

SEQ ID NO: 17397 - protein, 14 aa, Severe acute respiratory syndrome coronavirus 2
  REGION 1..14: note = Table B: HLA-DRB1*04:05L
GGLHLLIGLAKRFK

SEQ ID NO: 17398 - protein, 13 aa, Severe acute respiratory syndrome coronavirus 2
  REGION 1..13: note = Table B: HLA-DRB1*04:05L HLA-DQA1*01-B1*05L
LAKRFKESPFELE

SEQ ID NO: 17399 - protein, 14 aa, Severe acute respiratory syndrome coronavirus 2
  REGION 1..14: note = Table B: HLA-DRB1*04:05L HLA-DPA1*02:01-B1*13:01L HLA-DPA1*03:01-B1*105:01L HLA-DRB1*16:01L HLA-DRB1*15:03L
DSTVKNYFITDAQT

SEQ ID NO: 17400 - protein, 14 aa, Severe acute respiratory syndrome coronavirus 2
  REGION 1..14: note = Table B: HLA-DRB1*04:05L
VIDLLLDDFVEIIK

SEQ ID NO: 17401 - protein, 12 aa, Severe acute respiratory syndrome coronavirus 2
  REGION 1..12: note = Table B: HLA-DRB1*04:05L HLA-DRB1*01:02L HLA-DRB1*04:10L HLA-DPA1*03:01-B1*105:01L HLA-DRB1*14:54L
SQDLSVVSKVVK

SEQ ID NO: 17402 - protein, 14 aa, Severe acute respiratory syndrome coronavirus 2
  REGION 1..14: note = Table B: HLA-DRB1*04:05L HLA-DRB1*01:02L HLA-DPA1*03:01-B1*04:02L
DLSVVSKVVKVTID

SEQ ID NO: 17403 - protein, 10 aa, Severe acute respiratory syndrome coronavirus 2
  REGION 1..10: note = Table B: HLA-DRB1*04:05L HLA-DQA1*01:02-B1*06:02L HLA-DPA1*02:01-B1*13:01M HLA-DPA1*03:01-B1*105:01L HLA-DQA1*01:03-B1*06:01L HLA-DRB1*15:03L
DYTEISFMLW

SEQ ID NO: 17404 - protein, 12 aa, Severe acute respiratory syndrome coronavirus 2
  REGION 1..12: note = Table B: HLA-DRB1*04:05L HLA-DQA1*01:02-B1*06:02L HLA-DRB1*08:04L HLA-DRB1*08:01L
ETFYPKLQSSQA

SEQ ID NO: 17405 - protein, 13 aa, Severe acute respiratory syndrome coronavirus 2
  REGION 1..13: note = Table B: HLA-DRB1*04:05L HLA-DRB4*03:01NL HLA-DRB1*10:01L
AWQPGVAMPNLYK

SEQ ID NO: 17406 - protein, 15 aa, Severe acute respiratory syndrome coronavirus 2
  REGION 1..15: note = Table B: HLA-DRB1*04:05L HLA-DRB1*16:01L HLA-DRB1*15:03L
MQRMLLEKCDLQNYG

SEQ ID NO: 17407 - protein, 16 aa, Severe acute respiratory syndrome coronavirus 2
  REGION 1..16: note = Table B: HLA-DRB1*04:05L HLA-DRB1*12:01L HLA-DPA1*02:01-B1*13:01L HLA-DRB1*16:01L
QRMLLEKCDLQNYGDS

SEQ ID NO: 17408 - protein, 12 aa, Severe acute respiratory syndrome coronavirus 2
  REGION 1..12: note = Table B: HLA-DRB1*04:05L HLA-DRB1*04:08L
MRVIHFGAGSDK

SEQ ID NO: 17409 - protein, 12 aa, Severe acute respiratory syndrome coronavirus 2
  REGION 1..12: note = Table B: HLA-DRB1*04:05L HLA-DRB1*01:02L HLA-DRB1*04:08L
RVIHFGAGSDKG

SEQ ID NO: 17410 - protein, 13 aa, Severe acute respiratory syndrome coronavirus 2
  REGION 1..13: note = Table B: HLA-DRB1*04:05L HLA-DRB1*01:02L HLA-DQA1*01:01-B1*05:01L HLA-DRB1*04:08L
SDKGVAPGTAVLR

SEQ ID NO: 17411 - protein, 12 aa, Severe acute respiratory syndrome coronavirus 2
  REGION 1..12: note = Table B: HLA-DRB1*04:05L
LLVDSDLNDFVS

SEQ ID NO: 17412 - protein, 11 aa, Severe acute respiratory syndrome coronavirus 2
  REGION 1..11: note = Table B: HLA-DRB1*04:05L HLA-DRB4*03:01NL HLA-DRB1*16:01L HLA-DQA1*02:01-B1*03:03L
ISDMYDPKTKN

SEQ ID NO: 17413 - protein, 14 aa, Severe acute respiratory syndrome coronavirus 2
  REGION 1..14: note = Table B: HLA-DRB1*04:05L HLA-DRB1*11:04L HLA-DRB1*08:01L HLA-DRB1*11:01L HLA-DPA1*01:03-B1*04:02L HLA-DRB1*15:03L
GFIQQKLALGGSVA

SEQ ID NO: 17414 - protein, 14 aa, Severe acute respiratory syndrome coronavirus 2
  REGION 1..14: note = Table B: HLA-DRB1*04:05L HLA-DPA1*01:03-B1*03:01L HLA-DPA1*01:03-B1*04:02L HLA-DPA1*02:01-B1*13:01L
LALGGSVAIKITEH

SEQ ID NO: 17415 - protein, 13 aa, Severe acute respiratory syndrome coronavirus 2
  REGION 1..13: note = Table B: HLA-DRB1*04:05L HLA-DRB1*01:02L HLA-DRB1*12:01L HLA-DPA1*02:01-B1*13:01L HLA-DQA1*03:01-B1*03:02L HLA-DRB1*16:01L
GKPREQIDGYVMH

SEQ ID NO: 17416 - protein, 15 aa, Severe acute respiratory syndrome coronavirus 2
  REGION 1..15: note = Table B: HLA-DRB1*04:05L HLA-DRB1*04:08L
KPREQIDGYVMHANY

SEQ ID NO: 17417 - protein, 12 aa, Severe acute respiratory syndrome coronavirus 2
  REGION 1..12: note = Table B: HLA-DRB1*04:05L HLA-DRB1*01:02L
LTTRTQLPPAYT

SEQ ID NO: 17418 - protein, 12 aa, Severe acute respiratory syndrome coronavirus 2
  REGION 1..12: note = Table B: HLA-DRB1*04:05L HLA-DRB1*01:02L HLA-DRB3*02:01L HLA-DRB1*14:17L HLA-DRB1*04:08L
DNPVLPFNDGVY

SEQ ID NO: 17419 - protein, 12 aa, Severe acute respiratory syndrome coronavirus 2
  REGION 1..12: note = Table B: HLA-DRB1*04:05L HLA-DRB1*15:03L
YFASTEKSNIIR

SEQ ID NO: 17420 - protein, 12 aa, Severe acute respiratory syndrome coronavirus 2
  REGION 1..12: note = Table B: HLA-DRB1*04:05L HLA-DQA1*05:01-B1*02:01L HLA-DRB1*15:03L
FASTEKSNIIRG

SEQ ID NO: 17421 - protein, 10 aa, Severe acute respiratory syndrome coronavirus 2
  REGION 1..10: note = Table B: HLA-DRB1*04:05L HLA-DPA1*02:01-B1*13:01L HLA-DQA1*01:03-B1*06:01L
NFKNLREFVF

SEQ ID NO: 17422 - protein, 14 aa, Severe acute respiratory syndrome coronavirus 2
  REGION 1..14: note = Table B: HLA-DRB1*04:05L HLA-DRB1*01:02L HLA-DRB1*12:01L
VFKNIDGYFKIYSK

SEQ ID NO: 17423 - protein, 15 aa, Severe acute respiratory syndrome coronavirus 2
  REGION 1..15: note = Table B: HLA-DRB1*04:05L
PQGFSALEPLVDLPI

SEQ ID NO: 17424 - protein, 13 aa, Severe acute respiratory syndrome coronavirus 2
  REGION 1..13: note = Table B: HLA-DRB1*04:05L HLA-DPA1*02:01-B1*13:01L
LHRSYLTPGDSSS

SEQ ID NO: 17425 - protein, 11 aa, Severe acute respiratory syndrome coronavirus 2
  REGION 1..11: note = Table B: HLA-DRB1*04:05L HLA-DRB1*01:02L HLA-DRB4*03:01NL
AYYVGYLQPRT

SEQ ID NO: 17426 - protein, 11 aa, Severe acute respiratory syndrome coronavirus 2
  REGION 1..11: note = Table B: HLA-DRB1*04:05L HLA-DRB1*01:02L HLA-DRB1*04:08L
KSFTVEKGIYQ

SEQ ID NO: 17427 - protein, 12 aa, Severe acute respiratory syndrome coronavirus 2
  REGION 1..12: note = Table B: HLA-DRB1*04:05L HLA-DRB1*01:02L HLA-DRB1*08:04L HLA-DPA1*01:03-B1*03:01L HLA-DRB1*14:01L HLA-DRB1*08:01L HLA-DQA1*05:05-B1*03:19L HLA-DPA1*02:01-B1*13:01L HLA-DPA1*01:03-B1*02:01L HLA-DQA1*05:05-B1*03:01L
  REGION 1..12: note = CONT. FROM ABOVE: HLA-DRB1*15:03L
YQTSNFRVQPTE

SEQ ID NO: 17428 - protein, 11 aa, Severe acute respiratory syndrome coronavirus 2
  REGION 1..11: note = Table B: HLA-DRB1*04:05L HLA-DQA1*01:02-B1*06:02L HLA-DRB1*01:02M HLA-DRB1*08:04L HLA-DRB1*08:77L HLA-DPA1*01:03-B1*03:01L HLA-DRB1*03:01L HLA-DRB1*11:03L HLA-DQA1*01:01-B1*05:01L HLA-DQA1*01-B1*05L
  REGION 1..11: note = CONT. FROM ABOVE: HLA-DQA1*05:05-B1*03:19L HLA-DQA1*05:01-B1*02: 01L HLA-DRB1*04:10L HLA-DPA1*02:01-B1*13:01L HLA-DPA1*03:01-B1*1 05:01L HLA-DRB1*14:54L HLA-DPA1*01:02-B1*04:01L HLA-DRB1*07:01L HLA-DRB1*10:01L HLA-DRB1*04:08M HLA-DRB1*15:03L
FRVQPTESIVR

SEQ ID NO: 17429 - protein, 15 aa, Severe acute respiratory syndrome coronavirus 2
  REGION 1..15: note = Table B: HLA-DRB1*04:05L HLA-DRB1*12:01L HLA-DPA1*02:01-B1*13:01L HLA-DRB1*16:01L HLA-DRB1*04:08L
ITNLCPFGEVFNATR

SEQ ID NO: 17430 - protein, 11 aa, Severe acute respiratory syndrome coronavirus 2
  REGION 1..11: note = Table B: HLA-DRB1*04:05L HLA-DQA1*01:02-B1*06:02L HLA-DPA1*02:01-B1*13:01L
PFGEVFNATRF

SEQ ID NO: 17431 - protein, 13 aa, Severe acute respiratory syndrome coronavirus 2
  REGION 1..13: note = Table B: HLA-DRB1*04:05L HLA-DRB1*01:02L HLA-DPA1*01:03-B1*03:01L HLA-DRB1*12:01L HLA-DPA1*02:01-B1*13:01L
WNRKRISNCVADY

SEQ ID NO: 17432 - protein, 12 aa, Severe acute respiratory syndrome coronavirus 2
  REGION 1..12: note = Table B: HLA-DRB1*04:05L HLA-DQA1*01-B1*05L HLA-DQA1*05:01-B1*02:01L HLA-DPA1*03:01-B1*105:01L HLA-DRB1*16:01L HLA-DRB1*04:08L
ADYSVLYNSASF

SEQ ID NO: 17433 - protein, 13 aa, Severe acute respiratory syndrome coronavirus 2
  REGION 1..13: note = Table B: HLA-DRB1*04:05L HLA-DRB1*01:02L HLA-DRB1*08:01L HLA-DRB1*04:08L
DSKVGGNYNYLYR

SEQ ID NO: 17434 - protein, 14 aa, Severe acute respiratory syndrome coronavirus 2
  REGION 1..14: note = Table B: HLA-DRB1*04:05L HLA-DQA1*01:02-B1*06:02L
NYLYRLFRKSNLKP

SEQ ID NO: 17435 - protein, 12 aa, Severe acute respiratory syndrome coronavirus 2
  REGION 1..12: note = Table B: HLA-DRB1*04:05L HLA-DRB1*01:02L HLA-DRB4*03:01NL HLA-DRB4*02:01NL HLA-DQA1*05:01-B1*02:01L HLA-DPA1*01:03-B1*04:02L HLA-DRB1*14:17L HLA-DRB1*16:01L HLA-DRB1*04:08L
LTGTGVLTESNK

SEQ ID NO: 17436 - protein, 13 aa, Severe acute respiratory syndrome coronavirus 2
  REGION 1..13: note = Table B: HLA-DRB1*04:05L HLA-DQA1*01:01-B1*05:01L HLA-DQA1*05:01-B1*02:01L
FGRDIADTTDAVR

SEQ ID NO: 17437 - protein, 12 aa, Severe acute respiratory syndrome coronavirus 2
  REGION 1..12: note = Table B: HLA-DRB1*04:05L HLA-DRB1*01:02L HLA-DRB1*08:77L HLA-DPA1*01:03-B1*03:01L HLA-DPA1*03:01-B1*04:02L HLA-DRB1*11:03L HLA-DQA1*01:01-B1*05:01L HLA-DQA1*01-B1*05L HLA-DQA1*05:01-B1*02:01L HLA-DQA1*05:05-B1*03:116L
  REGION 1..12: note = CONT. FROM ABOVE: HLA-DRB1*04:10L HLA-DRB1*09:01L HLA-DPA1*02:01 -B1*13:01L HLA-DPA1*01:03-B1*02:01L HLA-DPA1*01:03-B1*104:01L HL A-DPA1*01:02-B1*04:01L HLA-DRB1*07:01L HLA-DRB1*10:01L HLA-DRB1* 04:08L HLA-DRB1*15:03L
VYSTGSNVFQTR

SEQ ID NO: 17438 - protein, 12 aa, Severe acute respiratory syndrome coronavirus 2
  REGION 1..12: note = Table B: HLA-DRB1*04:05L HLA-DRB1*01:02L HLA-DPA1*01:03-B1*03:01L HLA-DQA1*05:01-B1*02:01L HLA-DRB1*04:08L
STGSNVFQTRAG

SEQ ID NO: 17439 - protein, 14 aa, Severe acute respiratory syndrome coronavirus 2
  REGION 1..14: note = Table B: HLA-DRB1*04:05L HLA-DRB1*01:02L HLA-DRB1*12:01L HLA-DPA1*02:01-B1*13:01L
PRRARSVASQSIIA

SEQ ID NO: 17440 - protein, 12 aa, Severe acute respiratory syndrome coronavirus 2
  REGION 1..12: note = Table B: HLA-DRB1*04:05L HLA-DRB1*01:02L HLA-DPA1*01:03-B1*03:01L HLA-DQA1*05:05-B1*03:19L HLA-DRB1*16:01L HLA-DRB1*15:03L
TEILPVSMTKTS

SEQ ID NO: 17441 - protein, 12 aa, Severe acute respiratory syndrome coronavirus 2
  REGION 1..12: note = Table B: HLA-DRB1*04:05L HLA-DQA1*01:02-B1*06:02L HLA-DPA1*01:03-B1*03:01L HLA-DQA1*05:05-B1*03:19L HLA-DRB1*12:01L HLA-DQA1*03:01-B1*03:02L HLA-DQA1*05:05-B1*03:01L HLA-DQA1*01:03-B1*06:01L
  REGION 1..12: note = CONT. FROM ABOVE: HLA-DQA1*02:01-B1*03:03L
LNRALTGIAVEQ

SEQ ID NO: 17442 - protein, 13 aa, Severe acute respiratory syndrome coronavirus 2
  REGION 1..13: note = Table B: HLA-DRB1*04:05L HLA-DRB1*08:04L HLA-DRB1*11:03L HLA-DRB1*11:01L HLA-DRB3*01:01L HLA-DRB1*04:08L HLA-DRB1*08:03L
TQEVFAQVKQIYK

SEQ ID NO: 17443 - protein, 12 aa, Severe acute respiratory syndrome coronavirus 2
  REGION 1..12: note = Table B: HLA-DRB1*04:05L HLA-DRB1*04:10L HLA-DRB1*12:01L
FNFSQILPDPSK

SEQ ID NO: 17444 - protein, 12 aa, Severe acute respiratory syndrome coronavirus 2
  REGION 1..12: note = Table B: HLA-DRB1*04:05L HLA-DRB1*11:04L HLA-DRB1*11:01L HLA-DRB3*01:01L
SFIEDLLFNKVT

SEQ ID NO: 17445 - protein, 13 aa, Severe acute respiratory syndrome coronavirus 2
  REGION 1..13: note = Table B: HLA-DRB1*04:05L HLA-DRB1*01:02L HLA-DRB1*08:01L HLA-DQA1*05:01-B1*02:01L HLA-DRB1*12:02L HLA-DRB1*14:17L HLA-DRB1*04:08L HLA-DQA1*02:01-B1*03:03L
EDLLFNKVTLADA

SEQ ID NO: 17446 - protein, 14 aa, Severe acute respiratory syndrome coronavirus 2
  REGION 1..14: note = Table B: HLA-DRB1*04:05L HLA-DRB1*07:01L
FNGIGVTQNVLYEN

SEQ ID NO: 17447 - protein, 14 aa, Severe acute respiratory syndrome coronavirus 2
  REGION 1..14: note = Table B: HLA-DRB1*04:05L HLA-DRB1*04:10L HLA-DRB1*07:01L
NGIGVTQNVLYENQ

SEQ ID NO: 17448 - protein, 11 aa, Severe acute respiratory syndrome coronavirus 2
  REGION 1..11: note = Table B: HLA-DRB1*04:05L HLA-DRB4*03:01NL HLA-DPA1*03:01-B1*04:02L HLA-DRB1*03:01L HLA-DRB1*14:01L HLA-DQA1*01-B1*05L HLA-DRB4*01:01L HLA-DQA1*05:05-B1*03:116L HLA-DPA1*01:03-B1*04:02L HLA-DRB1*12:01L
  REGION 1..11: note = CONT. FROM ABOVE: HLA-DPA1*01:03-B1*104:01L HLA-DPA1*01:02-B1*04 :01L HLA-DRB1*10:01L HLA-DRB1*16:01L HLA-DRB1*08:02L
YENQKLIANQF

SEQ ID NO: 17449 - protein, 12 aa, Severe acute respiratory syndrome coronavirus 2
  REGION 1..12: note = Table B: HLA-DRB1*04:05L HLA-DRB1*01:02L HLA-DRB1*04:08L HLA-DRB1*15:03L
QFNSAIGKIQDS

SEQ ID NO: 17450 - protein, 11 aa, Severe acute respiratory syndrome coronavirus 2
  REGION 1..11: note = Table B: HLA-DRB1*04:05L HLA-DRB4*03:01NL HLA-DRB1*04:10L
AIGKIQDSLSS

SEQ ID NO: 17451 - protein, 12 aa, Severe acute respiratory syndrome coronavirus 2
  REGION 1..12: note = Table B: HLA-DRB1*04:05L HLA-DRB1*01:02L HLA-DRB1*04:10L HLA-DRB1*12:01L HLA-DPA1*03:01-B1*105:01L
ALGKLQDVVNQN

SEQ ID NO: 17452 - protein, 12 aa, Severe acute respiratory syndrome coronavirus 2
  REGION 1..12: note = Table B: HLA-DRB1*04:05L HLA-DRB1*04:10L
LGKLQDVVNQNA

SEQ ID NO: 17453 - protein, 11 aa, Severe acute respiratory syndrome coronavirus 2
  REGION 1..11: note = Table B: HLA-DRB1*04:05L HLA-DRB1*11:03L HLA-DRB1*11:04L
VVNQNAQALNT

SEQ ID NO: 17454 - protein, 12 aa, Severe acute respiratory syndrome coronavirus 2
  REGION 1..12: note = Table B: HLA-DRB1*04:05L HLA-DRB1*01:02L HLA-DRB3*02:01L HLA-DPA1*01:03-B1*03:01L HLA-DPA1*03:01-B1*04:02L HLA-DRB1*14:01L HLA-DRB1*14:02L HLA-DQA1*05:05-B1*03:19L HLA-DPA1*02:01-B1*13:01L HLA-DPA1*01:03-B1*104:01L
  REGION 1..12: note = CONT. FROM ABOVE: HLA-DQA1*05:05-B1*03:01L HLA-DRB1*04:08L
FGAISSVLNDIL

SEQ ID NO: 17455 - protein, 12 aa, Severe acute respiratory syndrome coronavirus 2
  REGION 1..12: note = Table B: HLA-DRB1*04:05L HLA-DRB1*04:10L HLA-DRB1*14:17L HLA-DRB1*04:08L
SVLNDILSRLDK

SEQ ID NO: 17456 - protein, 14 aa, Severe acute respiratory syndrome coronavirus 2
  REGION 1..14: note = Table B: HLA-DRB1*04:05L HLA-DRB1*01:02L
DKVEAEVQIDRLIT

SEQ ID NO: 17457 - protein, 13 aa, Severe acute respiratory syndrome coronavirus 2
  REGION 1..13: note = Table B: HLA-DRB1*04:05L HLA-DRB1*08:04L HLA-DQA1*01:01-B1*05:01L HLA-DRB1*08:01L HLA-DRB1*04:10L HLA-DRB1*12:02L
VEAEVQIDRLITG

SEQ ID NO: 17458 - protein, 13 aa, Severe acute respiratory syndrome coronavirus 2
  REGION 1..13: note = Table B: HLA-DRB1*04:05L HLA-DRB1*08:04L HLA-DRB1*08:77L HLA-DPA1*01:03-B1*03:01L HLA-DRB1*03:01L HLA-DRB1*14:02L HLA-DRB1*04:08L
AEVQIDRLITGRL

SEQ ID NO: 17459 - protein, 12 aa, Severe acute respiratory syndrome coronavirus 2
  REGION 1..12: note = Table B: HLA-DRB1*04:05L HLA-DRB1*14:17L HLA-DRB1*16:01L HLA-DRB1*04:08L
GKGYHLMSFPQS

SEQ ID NO: 17460 - protein, 13 aa, Severe acute respiratory syndrome coronavirus 2
  REGION 1..13: note = Table B: HLA-DRB1*04:05L HLA-DRB1*01:02L HLA-DRB1*16:01L HLA-DRB1*04:08L
KGYHLMSFPQSAP

SEQ ID NO: 17461 - protein, 14 aa, Severe acute respiratory syndrome coronavirus 2
  REGION 1..14: note = Table B: HLA-DRB1*04:05L HLA-DQA1*01:02-B1*06:02L HLA-DPA1*01:03-B1*03:01L HLA-DRB1*12:01L HLA-DPA1*02:01-B1*13:01L HLA-DRB1*16:01L HLA-DQA1*01:03-B1*06:01L
VPAQEKNFTTAPAI

SEQ ID NO: 17462 - protein, 14 aa, Severe acute respiratory syndrome coronavirus 2
  REGION 1..14: note = Table B: HLA-DRB1*04:05L HLA-DRB1*12:01L
AQEKNFTTAPAICH

SEQ ID NO: 17463 - protein, 12 aa, Severe acute respiratory syndrome coronavirus 2
  REGION 1..12: note = Table B: HLA-DRB1*04:05L HLA-DRB1*04:10L
QIITTDNTFVSG

SEQ ID NO: 17464 - protein, 12 aa, Severe acute respiratory syndrome coronavirus 2
  REGION 1..12: note = Table B: HLA-DRB1*04:05L HLA-DQA1*01:02-B1*06:02L HLA-DRB1*08:01L HLA-DRB1*04:10L HLA-DRB1*16:01L HLA-DRB1*04:08L HLA-DRB1*15:03L
PELDSFKEELDK

SEQ ID NO: 17465 - protein, 14 aa, Severe acute respiratory syndrome coronavirus 2
  REGION 1..14: note = Table B: HLA-DRB1*04:05L HLA-DQA1*01:02-B1*06:02L HLA-DQA1*05:05-B1*03:01L
FKNHTSPDVDLGDI

SEQ ID NO: 17466 - protein, 14 aa, Severe acute respiratory syndrome coronavirus 2
  REGION 1..14: note = Table B: HLA-DRB1*04:05L HLA-DQA1*01:02-B1*06:02L HLA-DRB1*01:02L HLA-DRB1*08:01L HLA-DPA1*02:01-B1*13:01L HLA-DPA1*03:01-B1*105:01L
VNIQKEIDRLNEVA

SEQ ID NO: 17467 - protein, 14 aa, Severe acute respiratory syndrome coronavirus 2
  REGION 1..14: note = Table B: HLA-DRB1*04:05L HLA-DRB1*15:03L
NLNESLIDLQELGK

SEQ ID NO: 17468 - protein, 13 aa, Severe acute respiratory syndrome coronavirus 2
  REGION 1..13: note = Table B: HLA-DRB1*04:05L HLA-DRB1*11:04L HLA-DRB1*14:02L HLA-DRB1*11:01L HLA-DRB1*08:03L
LGKYEQYIKWPWY

SEQ ID NO: 17469 - protein, 13 aa, Severe acute respiratory syndrome coronavirus 2
  REGION 1..13: note = Table B: HLA-DRB1*04:05L HLA-DRB1*14:01L HLA-DRB1*08:01L HLA-DRB1*12:01L HLA-DRB1*04:08L HLA-DRB1*15:03L
SEPVLKGVKLHYT

SEQ ID NO: 17470 - protein, 13 aa, Severe acute respiratory syndrome coronavirus 2
  REGION 1..13: note = Table B: HLA-DRB1*04:05L HLA-DRB1*01:02L HLA-DRB4*03:01NL HLA-DRB1*14:01L HLA-DRB1*12:02L HLA-DRB1*14:54L HLA-DRB1*16:01L
TATIPIQASLPFG

SEQ ID NO: 17471 - protein, 10 aa, Severe acute respiratory syndrome coronavirus 2
  REGION 1..10: note = Table B: HLA-DRB1*04:05L HLA-DQA1*01:02-B1*06:02L HLA-DQA1*05:05-B1*03:19L HLA-DPA1*02:01-B1*13:01L HLA-DPA1*03:01-B1*105:01L HLA-DQA1*01:03-B1*06:01L HLA-DQA1*02:01-B1*03:03L HLA-DRB1*15:03L
PIQASLPFGW

SEQ ID NO: 17472 - protein, 12 aa, Severe acute respiratory syndrome coronavirus 2
  REGION 1..12: note = Table B: HLA-DRB1*04:05L HLA-DRB3*01:01L
SKIITLKKRWQL

SEQ ID NO: 17473 - protein, 13 aa, Severe acute respiratory syndrome coronavirus 2
  REGION 1..13: note = Table B: HLA-DRB1*04:05L HLA-DRB1*01:02L HLA-DRB1*12:01L HLA-DPA1*02:01-B1*13:01L
TLKKRWQLALSKG

SEQ ID NO: 17474 - protein, 12 aa, Severe acute respiratory syndrome coronavirus 2
  REGION 1..12: note = Table B: HLA-DRB1*04:05L HLA-DQA1*01-B1*05L HLA-DQA1*05:01-B1*02:01L
LVYFLQSINFVR

SEQ ID NO: 17475 - protein, 10 aa, Severe acute respiratory syndrome coronavirus 2
  REGION 1..10: note = Table B: HLA-DRB1*04:05L HLA-DPA1*02:01-B1*13:01L HLA-DQA1*01:03-B1*06:01L
NFVRIIMRLW

SEQ ID NO: 17476 - protein, 13 aa, Severe acute respiratory syndrome coronavirus 2
  REGION 1..13: note = Table B: HLA-DRB1*04:05L HLA-DRB4*03:01NL HLA-DRB1*04:10L HLA-DRB1*12:01L HLA-DRB1*14:54L HLA-DRB1*16:01L
TSSIVITSGDGTT

SEQ ID NO: 17477 - protein, 14 aa, Severe acute respiratory syndrome coronavirus 2
  REGION 1..14: note = Table B: HLA-DRB1*04:05L HLA-DRB1*01:02L HLA-DQA1*01:01-B1*05:01L HLA-DPA1*02:01-B1*13:01L HLA-DQA1*05:05-B1*03:01L
SPISEHDYQIGGYT

SEQ ID NO: 17478 - protein, 12 aa, Severe acute respiratory syndrome coronavirus 2
  REGION 1..12: note = Table B: HLA-DRB1*04:05L
FYVYSRVKNLNS

SEQ ID NO: 17479 - protein, 12 aa, Severe acute respiratory syndrome coronavirus 2
  REGION 1..12: note = Table B: HLA-DRB1*04:05L HLA-DQA1*01:02-B1*06:02L HLA-DRB1*01:02L HLA-DRB1*11:04L HLA-DRB1*08:01L HLA-DRB1*11:01L HLA-DRB1*12:01L
VYSRVKNLNSSR

SEQ ID NO: 17480 - protein, 12 aa, Severe acute respiratory syndrome coronavirus 2
  REGION 1..12: note = Table B: HLA-DRB1*04:05L HLA-DRB1*01:02L
SNGTITVEELKK

SEQ ID NO: 17481 - protein, 11 aa, Severe acute respiratory syndrome coronavirus 2
  REGION 1..11: note = Table B: HLA-DRB1*04:05L HLA-DRB1*01:02L HLA-DRB1*08:77L HLA-DRB3*02:01L HLA-DPA1*01:03-B1*03:01L HLA-DRB1*14:01L HLA-DRB1*14:02L HLA-DQA1*01-B1*05L HLA-DQA1*05:05-B1*03:19L HLA-DPA1*01:03-B1*04:01L HLA-DPA1*01:03-B1*04:02L
  REGION 1..11: note = CONT. FROM ABOVE: HLA-DPA1*02:01-B1*13:01L HLA-DPA1*01:03-B1*104 :01L HLA-DRB1*04:08L
GTITVEELKKL

SEQ ID NO: 17482 - protein, 15 aa, Severe acute respiratory syndrome coronavirus 2
  REGION 1..15: note = Table B: HLA-DRB1*04:05L HLA-DRB1*16:01L HLA-DRB1*15:03L
RLFARTRSMWSFNPE

SEQ ID NO: 17483 - protein, 13 aa, Severe acute respiratory syndrome coronavirus 2
  REGION 1..13: note = Table B: HLA-DRB1*04:05L HLA-DRB1*11:04L HLA-DPA1*01:03-B1*02:01L
HGTILTRPLLESE

SEQ ID NO: 17484 - protein, 15 aa, Severe acute respiratory syndrome coronavirus 2
  REGION 1..15: note = Table B: HLA-DRB1*04:05L HLA-DRB1*11:01L
SELVIGAVILRGHLR

SEQ ID NO: 17485 - protein, 12 aa, Severe acute respiratory syndrome coronavirus 2
  REGION 1..12: note = Table B: HLA-DRB1*04:05L HLA-DRB1*01:02L HLA-DRB3*02:01L
ITVATSRTLSYY

SEQ ID NO: 17486 - protein, 12 aa, Severe acute respiratory syndrome coronavirus 2
  REGION 1..12: note = Table B: HLA-DRB1*04:05L HLA-DQA1*01:02-B1*06:02L HLA-DRB1*14:02L HLA-DPA1*03:01-B1*105:01L HLA-DRB1*07:01L HLA-DRB1*10:01L
SYYKLGASQRVA

SEQ ID NO: 17487 - protein, 14 aa, Severe acute respiratory syndrome coronavirus 2
  REGION 1..14: note = Table B: HLA-DRB1*04:05L HLA-DRB1*01:02L HLA-DRB1*12:01L HLA-DRB1*16:01L
GASQRVAGDSGFAA

SEQ ID NO: 17488 - protein, 12 aa, Severe acute respiratory syndrome coronavirus 2
  REGION 1..12: note = Table B: HLA-DRB1*04:05L HLA-DRB1*01:02L HLA-DRB1*14:01L HLA-DRB1*08:01L HLA-DRB1*12:01L HLA-DRB1*16:01L HLA-DRB1*04:08L HLA-DRB1*15:03L
AAYSRYRIGNYK

SEQ ID NO: 17489 - protein, 13 aa, Severe acute respiratory syndrome coronavirus 2
  REGION 1..13: note = Table B: HLA-DRB1*04:05L HLA-DRB1*12:01L
RYRIGNYKLNTDH

SEQ ID NO: 17490 - protein, 15 aa, Severe acute respiratory syndrome coronavirus 2
  REGION 1..15: note = Table B: HLA-DRB1*04:05L HLA-DRB1*01:02L HLA-DRB1*12:01L
TDHSSSSDNIALLVQ

SEQ ID NO: 17491 - protein, 12 aa, Severe acute respiratory syndrome coronavirus 2
  REGION 1..12: note = Table B: HLA-DRB1*04:05L HLA-DQA1*05:01-B1*02:01L HLA-DRB1*16:01L
NKYSQLDEEQPM

SEQ ID NO: 17492 - protein, 12 aa, Severe acute respiratory syndrome coronavirus 2
  REGION 1..12: note = Table B: HLA-DRB1*04:05L HLA-DPA1*03:01-B1*105:01L
KYSQLDEEQPME

SEQ ID NO: 17493 - protein, 13 aa, Severe acute respiratory syndrome coronavirus 2
  REGION 1..13: note = Table B: HLA-DRB1*04:05L HLA-DRB1*11:04L HLA-DRB1*12:01L HLA-DPA1*01:02-B1*04:01L HLA-DQA1*02:01-B1*03:03L
ELYHYQECVRGTT

SEQ ID NO: 17494 - protein, 14 aa, Severe acute respiratory syndrome coronavirus 2
  REGION 1..14: note = Table B: HLA-DRB1*04:05L
LRARSVSPKLFIRQ

SEQ ID NO: 17495 - protein, 14 aa, Severe acute respiratory syndrome coronavirus 2
  REGION 1..14: note = Table B: HLA-DRB1*04:05L HLA-DRB1*08:04L
LFIRQEEVQELYSP

SEQ ID NO: 17496 - protein, 12 aa, Severe acute respiratory syndrome coronavirus 2
  REGION 1..12: note = Table B: HLA-DRB1*04:05L HLA-DPA1*01:03-B1*03:01L HLA-DPA1*02:01-B1*13:01L
EPKLGSLVVRCS

SEQ ID NO: 17497 - protein, 14 aa, Severe acute respiratory syndrome coronavirus 2
  REGION 1..14: note = Table B: HLA-DRB1*04:05L HLA-DQA1*01:02-B1*06:02L HLA-DRB1*01:02L HLA-DRB1*08:01L HLA-DRB1*12:01L HLA-DRB1*04:08L
IRGGDGKMKDLSPR

SEQ ID NO: 17498 - protein, 12 aa, Severe acute respiratory syndrome coronavirus 2
  REGION 1..12: note = Table B: HLA-DRB1*04:05L HLA-DQA1*01:02-B1*06:02L HLA-DRB1*01:02L HLA-DRB1*14:01L HLA-DQA1*05:05-B1*03:19L HLA-DRB1*04:10L HLA-DPA1*03:01-B1*105:01L HLA-DRB1*14:54L HLA-DQA1*05:05-B1*03:01L HLA-DQA1*01:03-B1*06:01L
  REGION 1..12: note = CONT. FROM ABOVE: HLA-DRB1*15:03L
AAIVLQLPQGTT

SEQ ID NO: 17499 - protein, 17 aa, Severe acute respiratory syndrome coronavirus 2
  REGION 1..17: note = Table B: HLA-DRB1*04:05L
LPQGTTLPKGFYAEGSR

SEQ ID NO: 17500 - protein, 15 aa, Severe acute respiratory syndrome coronavirus 2
  REGION 1..15: note = Table B: HLA-DRB1*04:05L HLA-DRB1*16:01L
GSRGGSQASSRSSSR

SEQ ID NO: 17501 - protein, 15 aa, Severe acute respiratory syndrome coronavirus 2
  REGION 1..15: note = Table B: HLA-DRB1*04:05L
ASSRSSSRSRNSSRN

SEQ ID NO: 17502 - protein, 13 aa, Severe acute respiratory syndrome coronavirus 2
  REGION 1..13: note = Table B: HLA-DRB1*04:05L HLA-DPA1*01:03-B1*03:01L HLA-DQA1*05:05-B1*03:19L HLA-DQA1*05:01-B1*02:01L
GGDAALALLLLDR

SEQ ID NO: 17503 - protein, 13 aa, Severe acute respiratory syndrome coronavirus 2
  REGION 1..13: note = Table B: HLA-DRB1*04:05L HLA-DRB1*01:02L
AALALLLLDRLNQ

SEQ ID NO: 17504 - protein, 13 aa, Severe acute respiratory syndrome coronavirus 2
  REGION 1..13: note = Table B: HLA-DRB1*04:05L HLA-DPA1*01:03-B1*02:01L
ALALLLLDRLNQL

SEQ ID NO: 17505 - protein, 13 aa, Severe acute respiratory syndrome coronavirus 2
  REGION 1..13: note = Table B: HLA-DRB1*04:05L HLA-DPA1*01:03-B1*03:01L HLA-DRB1*03:01L HLA-DPA1*01:03-B1*104:01L HLA-DQA1*05:05-B1*03:01L
LALLLLDRLNQLE

SEQ ID NO: 17506 - protein, 13 aa, Severe acute respiratory syndrome coronavirus 2
  REGION 1..13: note = Table B: HLA-DRB1*04:05L HLA-DRB1*03:01L
ALLLLDRLNQLES

SEQ ID NO: 17507 - protein, 14 aa, Severe acute respiratory syndrome coronavirus 2
  REGION 1..14: note = Table B: HLA-DRB1*04:05L HLA-DQA1*01:02-B1*06:02L HLA-DQA1*01:03-B1*06:01L HLA-DRB1*04:08L
SGKGQQQQGQTVTK

SEQ ID NO: 17508 - protein, 14 aa, Severe acute respiratory syndrome coronavirus 2
  REGION 1..14: note = Table B: HLA-DRB1*04:05L HLA-DRB1*04:08L
GKGQQQQGQTVTKK

SEQ ID NO: 17509 - protein, 16 aa, Severe acute respiratory syndrome coronavirus 2
  REGION 1..16: note = Table B: HLA-DRB1*04:05L HLA-DPA1*02:01-B1*13:01L HLA-DPA1*03:01-B1*105:01L HLA-DRB1*04:08L
GQQQQGQTVTKKSAAE

SEQ ID NO: 17510 - protein, 13 aa, Severe acute respiratory syndrome coronavirus 2
  REGION 1..13: note = Table B: HLA-DRB1*04:05L HLA-DRB1*08:01L
GQTVTKKSAAEAS

SEQ ID NO: 17511 - protein, 12 aa, Severe acute respiratory syndrome coronavirus 2
  REGION 1..12: note = Table B: HLA-DRB1*04:05L HLA-DRB1*01:02L HLA-DPA1*02:01-B1*13:01L
KRTATKAYNVTQ

SEQ ID NO: 17512 - protein, 14 aa, Severe acute respiratory syndrome coronavirus 2
  REGION 1..14: note = Table B: HLA-DRB1*04:05L HLA-DRB1*01:01L HLA-DRB3*01:01L HLA-DPA1*03:01-B1*105:01L HLA-DRB1*07:01L HLA-DRB1*15:01L
AYNVTQAFGRRGPE

SEQ ID NO: 17513 - protein, 16 aa, Severe acute respiratory syndrome coronavirus 2
  REGION 1..16: note = Table B: HLA-DRB1*04:05L HLA-DQA1*01:02-B1*06:02L HLA-DRB1*01:02L HLA-DRB1*12:01L HLA-DPA1*02:01-B1*13:01L
GRRGPEQTQGNFGDQE

SEQ ID NO: 17514 - protein, 14 aa, Severe acute respiratory syndrome coronavirus 2
  REGION 1..14: note = Table B: HLA-DRB1*04:05L HLA-DRB1*01:02L HLA-DPA1*02:01-B1*13:01L HLA-DQA1*03:01-B1*03:02L HLA-DQA1*02:01-B1*03:03L
DKKKKADETQALPQ

SEQ ID NO: 17515 - protein, 15 aa, Severe acute respiratory syndrome coronavirus 2
  REGION 1..15: note = Table B: HLA-DRB1*04:05L HLA-DRB1*12:01L HLA-DPA1*01:03-B1*104:01L
DDFSKQLQQSMSSAD

SEQ ID NO: 17516 - protein, 14 aa, Severe acute respiratory syndrome coronavirus 2
  REGION 1..14: note = Table B: HLA-DQA1*01:02-B1*06:02L
GFNEKTHVQLSLPV

SEQ ID NO: 17517 - protein, 14 aa, Severe acute respiratory syndrome coronavirus 2
  REGION 1..14: note = Table B: HLA-DQA1*01:02-B1*06:02L
FNEKTHVQLSLPVL

SEQ ID NO: 17518 - protein, 13 aa, Severe acute respiratory syndrome coronavirus 2
  REGION 1..13: note = Table B: HLA-DQA1*01:02-B1*06:02L HLA-DRB1*01:02L HLA-DRB1*12:01L HLA-DQA1*01:03-B1*06:01L HLA-DQA1*02:01-B1*03:03L HLA-DRB1*15:03L
EKTHVQLSLPVLQ

SEQ ID NO: 17519 - protein, 12 aa, Severe acute respiratory syndrome coronavirus 2
  REGION 1..12: note = Table B: HLA-DQA1*01:02-B1*06:02L HLA-DPA1*03:01-B1*105:01L
HVQLSLPVLQVR

SEQ ID NO: 17520 - protein, 12 aa, Severe acute respiratory syndrome coronavirus 2
  REGION 1..12: note = Table B: HLA-DQA1*01:02-B1*06:02L HLA-DPA1*03:01-B1*105:01L
VQLSLPVLQVRD

SEQ ID NO: 17521 - protein, 12 aa, Severe acute respiratory syndrome coronavirus 2
  REGION 1..12: note = Table B: HLA-DQA1*01:02-B1*06:02L HLA-DQA1*01:03-B1*06:01L HLA-DQA1*02:01-B1*03:03L
VRDVLVRGFGDS

SEQ ID NO: 17522 - protein, 12 aa, Severe acute respiratory syndrome coronavirus 2
  REGION 1..12: note = Table B: HLA-DQA1*01:02-B1*06:02L HLA-DPA1*03:01-B1*04:02L HLA-DRB1*12:01L HLA-DPA1*02:01-B1*13:01L HLA-DPA1*03:01-B1*105:01L HLA-DQA1*01:03-B1*06:01L HLA-DRB1*15:03L
VRGFGDSVEEVL

SEQ ID NO: 17523 - protein, 12 aa, Severe acute respiratory syndrome coronavirus 2
  REGION 1..12: note = Table B: HLA-DQA1*01:02-B1*06:02L HLA-DRB1*01:02L HLA-DRB1*14:01L HLA-DRB1*11:04L HLA-DRB1*08:01L HLA-DRB1*12:01L HLA-DRB3*01:01L HLA-DRB1*16:01L HLA-DRB1*04:08L HLA-DRB1*15:03L
VLSEARQHLKDG

SEQ ID NO: 17524 - protein, 12 aa, Severe acute respiratory syndrome coronavirus 2
  REGION 1..12: note = Table B: HLA-DQA1*01:02-B1*06:02L
LKDGTCGLVEVE

SEQ ID NO: 17525 - protein, 11 aa, Severe acute respiratory syndrome coronavirus 2
  REGION 1..11: note = Table B: HLA-DQA1*01:02-B1*06:02L HLA-DQA1*02:01-B1*03:03L
DGTCGLVEVEK

SEQ ID NO: 17526 - protein, 12 aa, Severe acute respiratory syndrome coronavirus 2
  REGION 1..12: note = Table B: HLA-DQA1*01:02-B1*06:02L
LEQPYVFIKRSD

SEQ ID NO: 17527 - protein, 12 aa, Severe acute respiratory syndrome coronavirus 2
  REGION 1..12: note = Table B: HLA-DQA1*01:02-B1*06:02L HLA-DQA1*01:03-B1*06:01L
SDARTAPHGHVM

SEQ ID NO: 17528 - protein, 12 aa, Severe acute respiratory syndrome coronavirus 2
  REGION 1..12: note = Table B: HLA-DQA1*01:02-B1*06:02L
MVELVAELEGIQ

SEQ ID NO: 17529 - protein, 13 aa, Severe acute respiratory syndrome coronavirus 2
  REGION 1..13: note = Table B: HLA-DQA1*01:02-B1*06:02L
GRSGETLGVLVPH

SEQ ID NO: 17530 - protein, 12 aa, Severe acute respiratory syndrome coronavirus 2
  REGION 1..12: note = Table B: HLA-DQA1*01:02-B1*06:02L HLA-DQA1*01:03-B1*06:01L
LGVLVPHVGEIP

SEQ ID NO: 17531 - protein, 14 aa, Severe acute respiratory syndrome coronavirus 2
  REGION 1..14: note = Table B: HLA-DQA1*01:02-B1*06:02L HLA-DRB1*11:04L HLA-DRB1*11:01L HLA-DRB1*13:01L
IPVAYRKVLLRKNG

SEQ ID NO: 17532 - protein, 15 aa, Severe acute respiratory syndrome coronavirus 2
  REGION 1..15: note = Table B: HLA-DQA1*01:02-B1*06:02L HLA-DPA1*03:01-B1*105:01L HLA-DQA1*03:01-B1*03:02L
LKSFDLGDELGTDPY

SEQ ID NO: 17533 - protein, 13 aa, Severe acute respiratory syndrome coronavirus 2
  REGION 1..13: note = Table B: HLA-DQA1*01:02-B1*06:02L HLA-DPA1*02:01-B1*13:01L
ELGTDPYEDFQEN

SEQ ID NO: 17534 - protein, 13 aa, Severe acute respiratory syndrome coronavirus 2
  REGION 1..13: note = Table B: HLA-DQA1*01:02-B1*06:02L
SSGVTRELMRELN

SEQ ID NO: 17535 - protein, 14 aa, Severe acute respiratory syndrome coronavirus 2
  REGION 1..14: note = Table B: HLA-DQA1*01:02-B1*06:02L
SGVTRELMRELNGG

SEQ ID NO: 17536 - protein, 14 aa, Severe acute respiratory syndrome coronavirus 2
  REGION 1..14: note = Table B: HLA-DQA1*01:02-B1*06:02L
GVTRELMRELNGGA

SEQ ID NO: 17537 - protein, 10 aa, Severe acute respiratory syndrome coronavirus 2
  REGION 1..10: note = Table B: HLA-DQA1*01:02-B1*06:02L HLA-DQA1*03:01-B1*03:02L HLA-DQA1*01:03-B1*06:01L HLA-DQA1*02:01-B1*03:03L
NGGAYTRYVD

SEQ ID NO: 17538 - protein, 11 aa, Severe acute respiratory syndrome coronavirus 2
  REGION 1..11: note = Table B: HLA-DQA1*01:02-B1*06:02L
GGAYTRYVDNN

SEQ ID NO: 17539 - protein, 14 aa, Severe acute respiratory syndrome coronavirus 2
  REGION 1..14: note = Table B: HLA-DQA1*01:02-B1*06:02L
RYVDNNFCGPDGYP

SEQ ID NO: 17540 - protein, 13 aa, Severe acute respiratory syndrome coronavirus 2
  REGION 1..13: note = Table B: HLA-DQA1*01:02-B1*06:02L HLA-DQA1*01:03-B1*06:01L
VDNNFCGPDGYPL

SEQ ID NO: 17541 - protein, 13 aa, Severe acute respiratory syndrome coronavirus 2
  REGION 1..13: note = Table B: HLA-DQA1*01:02-B1*06:02L HLA-DQA1*01:03-B1*06:01L
DNNFCGPDGYPLE

SEQ ID NO: 17542 - protein, 13 aa, Severe acute respiratory syndrome coronavirus 2
  REGION 1..13: note = Table B: HLA-DQA1*01:02-B1*06:02L HLA-DRB1*01:02L
PLECIKDLLARAG

SEQ ID NO: 17543 - protein, 13 aa, Severe acute respiratory syndrome coronavirus 2
  REGION 1..13: note = Table B: HLA-DQA1*01:02-B1*06:02L
ECIKDLLARAGKA

SEQ ID NO: 17544 - protein, 13 aa, Severe acute respiratory syndrome coronavirus 2
  REGION 1..13: note = Table B: HLA-DQA1*01:02-B1*06:02L
DLLARAGKASCTL

SEQ ID NO: 17545 - protein, 13 aa, Severe acute respiratory syndrome coronavirus 2
  REGION 1..13: note = Table B: HLA-DQA1*01:02-B1*06:02L
LARAGKASCTLSE

SEQ ID NO: 17546 - protein, 13 aa, Severe acute respiratory syndrome coronavirus 2
  REGION 1..13: note = Table B: HLA-DQA1*01:02-B1*06:02L
ARAGKASCTLSEQ

SEQ ID NO: 17547 - protein, 12 aa, Severe acute respiratory syndrome coronavirus 2
  REGION 1..12: note = Table B: HLA-DQA1*01:02-B1*06:02L HLA-DQA1*01:03-B1*06:01L
GKASCTLSEQLD

SEQ ID NO: 17548 - protein, 15 aa, Severe acute respiratory syndrome coronavirus 2
  REGION 1..15: note = Table B: HLA-DQA1*01:02-B1*06:02L HLA-DRB1*01:01L HLA-DRB1*11:01L HLA-DQA1*03:01-B1*03:02L HLA-DPA1*01:03-B1*104:01L HLA-DRB1*15:03L
IDTKRGVYCCREHEH

SEQ ID NO: 17549 - protein, 12 aa, Severe acute respiratory syndrome coronavirus 2
  REGION 1..12: note = Table B: HLA-DQA1*01:02-B1*06:02L HLA-DRB1*01:02L HLA-DRB1*08:01L HLA-DRB1*04:08L
RGVYCCREHEHE

SEQ ID NO: 17550 - protein, 13 aa, Severe acute respiratory syndrome coronavirus 2
  REGION 1..13: note = Table B: HLA-DQA1*01:02-B1*06:02L HLA-DRB1*08:01L
GVYCCREHEHEIA

SEQ ID NO: 17551 - protein, 12 aa, Severe acute respiratory syndrome coronavirus 2
  REGION 1..12: note = Table B: HLA-DQA1*01:02-B1*06:02L HLA-DRB1*01:02L HLA-DRB1*12:01L HLA-DPA1*02:01-B1*13:01L HLA-DPA1*03:01-B1*105:01L HLA-DQA1*01:03-B1*06:01L HLA-DRB1*15:03L
YTERSEKSYELQ

SEQ ID NO: 17552 - protein, 12 aa, Severe acute respiratory syndrome coronavirus 2
  REGION 1..12: note = Table B: HLA-DQA1*01:02-B1*06:02L HLA-DQA1*01:03-B1*06:01L
LQTPFEIKLAKK

SEQ ID NO: 17553 - protein, 12 aa, Severe acute respiratory syndrome coronavirus 2
  REGION 1..12: note = Table B: HLA-DQA1*01:02-B1*06:02L HLA-DRB1*08:04L HLA-DRB1*14:01L HLA-DRB1*08:01L
EIKLAKKFDTFN

SEQ ID NO: 17554 - protein, 10 aa, Severe acute respiratory syndrome coronavirus 2
  REGION 1..10: note = Table B: HLA-DQA1*01:02-B1*06:02L HLA-DPA1*02:01-B1*13:01L HLA-DPA1*03:01-B1*105:01L HLA-DQA1*02:01-B1*03:03L HLA-DRB1*15:03L
DTFNGECPNF

SEQ ID NO: 17555 - protein, 12 aa, Severe acute respiratory syndrome coronavirus 2
  REGION 1..12: note = Table B: HLA-DQA1*01:02-B1*06:02L HLA-DQA1*01:03-B1*06:01L
NGECPNFVFPLN

SEQ ID NO: 17556 - protein, 12 aa, Severe acute respiratory syndrome coronavirus 2
  REGION 1..12: note = Table B: HLA-DQA1*01:02-B1*06:02L
PNFVFPLNSIIK

SEQ ID NO: 17557 - protein, 12 aa, Severe acute respiratory syndrome coronavirus 2
  REGION 1..12: note = Table B: HLA-DQA1*01:02-B1*06:02L
PLNSIIKTIQPR

SEQ ID NO: 17558 - protein, 12 aa, Severe acute respiratory syndrome coronavirus 2
  REGION 1..12: note = Table B: HLA-DQA1*01:02-B1*06:02L HLA-DQA1*01:03-B1*06:01L
DGFMGRIRSVYP

SEQ ID NO: 17559 - protein, 12 aa, Severe acute respiratory syndrome coronavirus 2
  REGION 1..12: note = Table B: HLA-DQA1*01:02-B1*06:02L
GFMGRIRSVYPV

SEQ ID NO: 17560 - protein, 13 aa, Severe acute respiratory syndrome coronavirus 2
  REGION 1..13: note = Table B: HLA-DQA1*01:02-B1*06:02L
SPNECNQMCLSTL

SEQ ID NO: 17561 - protein, 14 aa, Severe acute respiratory syndrome coronavirus 2
  REGION 1..14: note = Table B: HLA-DQA1*01:02-B1*06:02L
PNECNQMCLSTLMK

SEQ ID NO: 17562 - protein, 13 aa, Severe acute respiratory syndrome coronavirus 2
  REGION 1..13: note = Table B: HLA-DQA1*01:02-B1*06:02L
NQMCLSTLMKCDH

SEQ ID NO: 17563 - protein, 14 aa, Severe acute respiratory syndrome coronavirus 2
  REGION 1..14: note = Table B: HLA-DQA1*01:02-B1*06:02L
MKCDHCGETSWQTG

SEQ ID NO: 17564 - protein, 12 aa, Severe acute respiratory syndrome coronavirus 2
  REGION 1..12: note = Table B: HLA-DQA1*01:02-B1*06:02L HLA-DQA1*05:05-B1*03:01L HLA-DQA1*01:03-B1*06:01L
DHCGETSWQTGD

SEQ ID NO: 17565 - protein, 13 aa, Severe acute respiratory syndrome coronavirus 2
  REGION 1..13: note = Table B: HLA-DQA1*01:02-B1*06:02L HLA-DQA1*01:03-B1*06:01L
DFVKATCEFCGTE

SEQ ID NO: 17566 - protein, 12 aa, Severe acute respiratory syndrome coronavirus 2
  REGION 1..12: note = Table B: HLA-DQA1*01:02-B1*06:02L HLA-DQA1*01:03-B1*06:01L
VKATCEFCGTEN

SEQ ID NO: 17567 - protein, 12 aa, Severe acute respiratory syndrome coronavirus 2
  REGION 1..12: note = Table B: HLA-DQA1*01:02-B1*06:02L HLA-DQA1*03:01-B1*03:02L HLA-DQA1*05:05-B1*03:01L HLA-DQA1*02:01-B1*03:03L
EFCGTENLTKEG

SEQ ID NO: 17568 - protein, 11 aa, Severe acute respiratory syndrome coronavirus 2
  REGION 1..11: note = Table B: HLA-DQA1*01:02-B1*06:02L HLA-DQA1*02:01-B1*03:03L
LTKEGATTCGY

SEQ ID NO: 17569 - protein, 12 aa, Severe acute respiratory syndrome coronavirus 2
  REGION 1..12: note = Table B: HLA-DQA1*01:02-B1*06:02L
EGATTCGYLPQN

SEQ ID NO: 17570 - protein, 12 aa, Severe acute respiratory syndrome coronavirus 2
  REGION 1..12: note = Table B: HLA-DQA1*01:02-B1*06:02L
GATTCGYLPQNA

SEQ ID NO: 17571 - protein, 12 aa, Severe acute respiratory syndrome coronavirus 2
  REGION 1..12: note = Table B: HLA-DQA1*01:02-B1*06:02L
ATTCGYLPQNAV

SEQ ID NO: 17572 - protein, 14 aa, Severe acute respiratory syndrome coronavirus 2
  REGION 1..14: note = Table B: HLA-DQA1*01:02-B1*06:02L
IYCPACHNSEVGPE

SEQ ID NO: 17573 - protein, 10 aa, Severe acute respiratory syndrome coronavirus 2
  REGION 1..10: note = Table B: HLA-DQA1*01:02-B1*06:02L HLA-DQA1*05:05-B1*03:19L HLA-DRB4*01:01L HLA-DPA1*01:03-B1*04:01L
IAFGGCVFSY

SEQ ID NO: 17574 - protein, 14 aa, Severe acute respiratory syndrome coronavirus 2
  REGION 1..14: note = Table B: HLA-DQA1*01:02-B1*06:02L HLA-DRB1*01:02L
YVGCHNKCAYWVPR

SEQ ID NO: 17575 - protein, 15 aa, Severe acute respiratory syndrome coronavirus 2
  REGION 1..15: note = Table B: HLA-DQA1*01:02-B1*06:02L
VGCHNKCAYWVPRAS

SEQ ID NO: 17576 - protein, 13 aa, Severe acute respiratory syndrome coronavirus 2
  REGION 1..13: note = Table B: HLA-DQA1*01:02-B1*06:02L
NKCAYWVPRASAN

SEQ ID NO: 17577 - protein, 12 aa, Severe acute respiratory syndrome coronavirus 2
  REGION 1..12: note = Table B: HLA-DQA1*01:02-B1*06:02L HLA-DQA1*01:03-B1*06:01L
WVPRASANIGCN

SEQ ID NO: 17578 - protein, 12 aa, Severe acute respiratory syndrome coronavirus 2
  REGION 1..12: note = Table B: HLA-DQA1*01:02-B1*06:02L HLA-DQA1*01:03-B1*06:01L
IGCNHTGVVGEG

SEQ ID NO: 17579 - protein, 14 aa, Severe acute respiratory syndrome coronavirus 2
  REGION 1..14: note = Table B: HLA-DQA1*01:02-B1*06:02L HLA-DPA1*03:01-B1*105:01L HLA-DQA1*02:01-B1*03:03L
VGEGSEGLNDNLLE

SEQ ID NO: 17580 - protein, 13 aa, Severe acute respiratory syndrome coronavirus 2
  REGION 1..13: note = Table B: HLA-DQA1*01:02-B1*06:02L
EGLNDNLLEILQK

SEQ ID NO: 17581 - protein, 12 aa, Severe acute respiratory syndrome coronavirus 2
  REGION 1..12: note = Table B: HLA-DQA1*01:02-B1*06:02L HLA-DPA1*03:01-B1*105:01L HLA-DQA1*02:01-B1*03:03L
LNDNLLEILQKE

SEQ ID NO: 17582 - protein, 11 aa, Severe acute respiratory syndrome coronavirus 2
  REGION 1..11: note = Table B: HLA-DQA1*01:02-B1*06:02L HLA-DPA1*01:02-B1*04:01L HLA-DQA1*01:03-B1*06:01L HLA-DQA1*02:01-B1*03:03L
DNLLEILQKEK

SEQ ID NO: 17583 - protein, 14 aa, Severe acute respiratory syndrome coronavirus 2
  REGION 1..14: note = Table B: HLA-DQA1*01:02-B1*06:02L HLA-DRB1*01:02L
LQKEKVNINIVGDF

SEQ ID NO: 17584 - protein, 12 aa, Severe acute respiratory syndrome coronavirus 2
  REGION 1..12: note = Table B: HLA-DQA1*01:02-B1*06:02L HLA-DRB1*08:04L HLA-DRB1*08:77L HLA-DRB3*02:01L HLA-DPA1*03:01-B1*04:02L HLA-DRB1*03:01L HLA-DRB1*11:04L HLA-DQA1*01:01-B1*05:01L HLA-DRB1*08:01L HLA-DRB4*01:01L HLA-DPA1*01:03-B1*04:01L
  REGION 1..12: note = CONT. FROM ABOVE: HLA-DRB1*04:10L HLA-DPA1*01:03-B1*04:02L HLA-D RB3*01:01L HLA-DPA1*02:01-B1*13:01L HLA-DQA1*05:05-B1*03:01L HLA -DRB1*08:03L
IVGDFKLNEEIA

SEQ ID NO: 17585 - protein, 14 aa, Severe acute respiratory syndrome coronavirus 2
  REGION 1..14: note = Table B: HLA-DQA1*01:02-B1*06:02L HLA-DPA1*01:03-B1*03:01L HLA-DQA1*05:05-B1*03:19L HLA-DQA1*05:05-B1*03:01L HLA-DRB1*16:01L
DFKLNEEIAIILAS

SEQ ID NO: 17586 - protein, 13 aa, Severe acute respiratory syndrome coronavirus 2
  REGION 1..13: note = Table B: HLA-DQA1*01:02-B1*06:02L
EIAIILASFSAST

SEQ ID NO: 17587 - protein, 14 aa, Severe acute respiratory syndrome coronavirus 2
  REGION 1..14: note = Table B: HLA-DQA1*01:02-B1*06:02L HLA-DPA1*02:01-B1*13:01L HLA-DPA1*03:01-B1*105:01L
DYKAFKQIVESCGN

SEQ ID NO: 17588 - protein, 12 aa, Severe acute respiratory syndrome coronavirus 2
  REGION 1..12: note = Table B: HLA-DQA1*01:02-B1*06:02L
FKQIVESCGNFK

SEQ ID NO: 17589 - protein, 11 aa, Severe acute respiratory syndrome coronavirus 2
  REGION 1..11: note = Table B: HLA-DQA1*01:02-B1*06:02L HLA-DQA1*01:03-B1*06:01L
IVESCGNFKVT

SEQ ID NO: 17590 - protein, 12 aa, Severe acute respiratory syndrome coronavirus 2
  REGION 1..12: note = Table B: HLA-DQA1*01:02-B1*06:02L HLA-DQA1*01:03-B1*06:01L
VESCGNFKVTKG

SEQ ID NO: 17591 - protein, 12 aa, Severe acute respiratory syndrome coronavirus 2
  REGION 1..12: note = Table B: HLA-DQA1*01:02-B1*06:02L
VTKGKAKKGAWN

SEQ ID NO: 17592 - protein, 10 aa, Severe acute respiratory syndrome coronavirus 2
  REGION 1..10: note = Table B: HLA-DQA1*01:02-B1*06:02L HLA-DQA1*05:05-B1*03:19L HLA-DQA1*05:01-B1*02:01L HLA-DPA1*02:01-B1*13:01L HLA-DPA1*03:01-B1*105:01L HLA-DQA1*01:03-B1*06:01L HLA-DQA1*02:01-B1*03:03L HLA-DRB1*15:03L
KSILSPLYAF

SEQ ID NO: 17593 - protein, 12 aa, Severe acute respiratory syndrome coronavirus 2
  REGION 1..12: note = Table B: HLA-DQA1*01:02-B1*06:02L HLA-DRB1*12:01L
VVRSIFSRTLET

SEQ ID NO: 17594 - protein, 11 aa, Severe acute respiratory syndrome coronavirus 2
  REGION 1..11: note = Table B: HLA-DQA1*01:02-B1*06:02L
TLETAQNSVRV

SEQ ID NO: 17595 - protein, 12 aa, Severe acute respiratory syndrome coronavirus 2
  REGION 1..12: note = Table B: HLA-DQA1*01:02-B1*06:02L HLA-DQA1*01:03-B1*06:01L
AQNSVRVLQKAA

SEQ ID NO: 17596 - protein, 14 aa, Severe acute respiratory syndrome coronavirus 2
  REGION 1..14: note = Table B: HLA-DQA1*01:02-B1*06:02L HLA-DPA1*01:03-B1*104:01L
SVRVLQKAAITILD

SEQ ID NO: 17597 - protein, 12 aa, Severe acute respiratory syndrome coronavirus 2
  REGION 1..12: note = Table B: HLA-DQA1*01:02-B1*06:02L HLA-DQA1*01:03-B1*06:01L
QKAAITILDGIS

SEQ ID NO: 17598 - protein, 10 aa, Severe acute respiratory syndrome coronavirus 2
  REGION 1..10: note = Table B: HLA-DQA1*01:02-B1*06:02L HLA-DQA1*01:03-B1*06:01L
QYSLRLIDAM

SEQ ID NO: 17599 - protein, 12 aa, Severe acute respiratory syndrome coronavirus 2
  REGION 1..12: note = Table B: HLA-DQA1*01:02-B1*06:02L
NNLVVMAYITGG

SEQ ID NO: 17600 - protein, 13 aa, Severe acute respiratory syndrome coronavirus 2
  REGION 1..13: note = Table B: HLA-DQA1*01:02-B1*06:02L HLA-DRB1*12:01L HLA-DRB1*15:03L
NLVVMAYITGGVV

SEQ ID NO: 17601 - protein, 10 aa, Severe acute respiratory syndrome coronavirus 2
  REGION 1..10: note = Table B: HLA-DQA1*01:02-B1*06:02L
GGVVQLTSQW

SEQ ID NO: 17602 - protein, 13 aa, Severe acute respiratory syndrome coronavirus 2
  REGION 1..13: note = Table B: HLA-DQA1*01:02-B1*06:02L HLA-DPA1*03:01-B1*04:02L HLA-DQA1*05:05-B1*03:19L HLA-DPA1*01:03-B1*04:02L
VVQLTSQWLTNIF

SEQ ID NO: 17603 - protein, 12 aa, Severe acute respiratory syndrome coronavirus 2
  REGION 1..12: note = Table B: HLA-DQA1*01:02-B1*06:02L
QLTSQWLTNIFG

SEQ ID NO: 17604 - protein, 12 aa, Severe acute respiratory syndrome coronavirus 2
  REGION 1..12: note = Table B: HLA-DQA1*01:02-B1*06:02L HLA-DQA1*01-B1*05L HLA-DQA1*05:01-B1*02:01L HLA-DPA1*01:03-B1*04:01L HLA-DPA1*01:03-B1*04:02L HLA-DPA1*03:01-B1*105:01L HLA-DPA1*01:02-B1*04:01L HLA-DRB1*16:01L
  REGION 1..12: note = CONT. FROM ABOVE: HLA-DQA1*01:03-B1*06:01L HLA-DRB1*15:03L
TSQWLTNIFGTV

SEQ ID NO: 17605 - protein, 10 aa, Severe acute respiratory syndrome coronavirus 2
  REGION 1..10: note = Table B: HLA-DQA1*01:02-B1*06:02L HLA-DRB1*08:77L HLA-DPA1*01:03-B1*03:01L HLA-DPA1*03:01-B1*04:02L HLA-DRB1*03:01L HLA-DRB1*11:02L HLA-DRB1*14:02L HLA-DQA1*01-B1*05L HLA-DQA1*05:05-B1*03:19M
  REGION 1..10: note = CONT. FROM ABOVE: HLA-DQA1*05:01-B1*02:01L HLA-DRB4*01:01L HLA-D PA1*01:03-B1*04:01L HLA-DQA1*05:05-B1*03:116L HLA-DPA1*01:03-B1* 04:02L HLA-DPA1*02:01-B1*13:01L HLA-DPA1*03:01-B1*105:01L HLA-DP A1*01:03-B1*104:01L HLA-DRB1*10:01L HLA-DRB1*16:01L
  REGION 1..10: note = CONT. FROM ABOVE: HLA-DRB1*15:03L
WLTNIFGTVY

SEQ ID NO: 17606 - protein, 11 aa, Severe acute respiratory syndrome coronavirus 2
  REGION 1..11: note = Table B: HLA-DQA1*01:02-B1*06:02L HLA-DRB1*12:01L HLA-DQA1*02:01-B1*03:03L
IFGTVYEKLKP

SEQ ID NO: 17607 - protein, 10 aa, Severe acute respiratory syndrome coronavirus 2
  REGION 1..10: note = Table B: HLA-DQA1*01:02-B1*06:02L HLA-DPA1*02:01-B1*13:01L HLA-DQA1*01:03-B1*06:01L HLA-DQA1*02:01-B1*03:03L HLA-DRB1*15:03L
PVLDWLEEKF

SEQ ID NO: 17608 - protein, 10 aa, Severe acute respiratory syndrome coronavirus 2
  REGION 1..10: note = Table B: HLA-DQA1*01:02-B1*06:02L HLA-DPA1*03:01-B1*105:01L
EGVEFLRDGW

SEQ ID NO: 17609 - protein, 12 aa, Severe acute respiratory syndrome coronavirus 2
  REGION 1..12: note = Table B: HLA-DQA1*01:02-B1*06:02L HLA-DPA1*03:01-B1*105:01L
KFISTCACEIVG

SEQ ID NO: 17610 - protein, 12 aa, Severe acute respiratory syndrome coronavirus 2
  REGION 1..12: note = Table B: HLA-DQA1*01:02-B1*06:02L
FISTCACEIVGG

SEQ ID NO: 17611 - protein, 12 aa, Severe acute respiratory syndrome coronavirus 2
  REGION 1..12: note = Table B: HLA-DQA1*01:02-B1*06:02L HLA-DPA1*03:01-B1*105:01L HLA-DQA1*05:05-B1*03:01L HLA-DQA1*01:03-B1*06:01L
ISTCACEIVGGQ

SEQ ID NO: 17612 - protein, 14 aa, Severe acute respiratory syndrome coronavirus 2
  REGION 1..14: note = Table B: HLA-DQA1*01:02-B1*06:02L
STCACEIVGGQIVT

SEQ ID NO: 17613 - protein, 12 aa, Severe acute respiratory syndrome coronavirus 2
  REGION 1..12: note = Table B: HLA-DQA1*01:02-B1*06:02L HLA-DQA1*01:03-B1*06:01L
VTCAKEIKESVQ

SEQ ID NO: 17614 - protein, 13 aa, Severe acute respiratory syndrome coronavirus 2
  REGION 1..13: note = Table B: HLA-DQA1*01:02-B1*06:02L HLA-DPA1*03:01-B1*04:02L HLA-DRB1*14:01L HLA-DRB1*12:01L HLA-DPA1*03:01-B1*105:01L HLA-DRB1*16:01L HLA-DQA1*01:03-B1*06:01L HLA-DRB1*04:08L HLA-DRB1*15:03L
IKESVQTFFKLVN

SEQ ID NO: 17615 - protein, 12 aa, Severe acute respiratory syndrome coronavirus 2
  REGION 1..12: note = Table B: HLA-DQA1*01:02-B1*06:02L HLA-DRB1*01:02L HLA-DRB1*14:01L
ESVQTFFKLVNK

SEQ ID NO: 17616 - protein, 12 aa, Severe acute respiratory syndrome coronavirus 2
  REGION 1..12: note = Table B: HLA-DQA1*01:02-B1*06:02L HLA-DPA1*03:01-B1*04:02L HLA-DPA1*01:03-B1*04:02L HLA-DPA1*03:01-B1*105:01L HLA-DPA1*01:02-B1*04:01L
LVNKFLALCADS

SEQ ID NO: 17617 - protein, 12 aa, Severe acute respiratory syndrome coronavirus 2
  REGION 1..12: note = Table B: HLA-DQA1*01:02-B1*06:02L
LCADSIIIGGAK

SEQ ID NO: 17618 - protein, 10 aa, Severe acute respiratory syndrome coronavirus 2
  REGION 1..10: note = Table B: HLA-DQA1*01:02-B1*06:02L HLA-DQA1*01:03-B1*06:01L HLA-DQA1*02:01-B1*03:03L
LKALNLGETF

SEQ ID NO: 17619 - protein, 12 aa, Severe acute respiratory syndrome coronavirus 2
  REGION 1..12: note = Table B: HLA-DQA1*01:02-B1*06:02L HLA-DQA1*01:03-B1*06:01L
ALNLGETFVTHS

SEQ ID NO: 17620 - protein, 14 aa, Severe acute respiratory syndrome coronavirus 2
  REGION 1..14: note = Table B: HLA-DQA1*01:02-B1*06:02L HLA-DRB1*14:01L HLA-DRB1*12:01L HLA-DRB3*01:01L
SKGLYRKCVKSREE

SEQ ID NO: 17621 - protein, 12 aa, Severe acute respiratory syndrome coronavirus 2
  REGION 1..12: note = Table B: HLA-DQA1*01:02-B1*06:02L
YRKCVKSREETG

SEQ ID NO: 17622 - protein, 11 aa, Severe acute respiratory syndrome coronavirus 2
  REGION 1..11: note = Table B: HLA-DQA1*01:02-B1*06:02L
ETGLLMPLKAP

SEQ ID NO: 17623 - protein, 10 aa, Severe acute respiratory syndrome coronavirus 2
  REGION 1..10: note = Table B: HLA-DQA1*01:02-B1*06:02L HLA-DQA1*01:03-B1*06:01L HLA-DQA1*02:01-B1*03:03L
PLKAPKEIIF

SEQ ID NO: 17624 - protein, 13 aa, Severe acute respiratory syndrome coronavirus 2
  REGION 1..13: note = Table B: HLA-DQA1*01:02-B1*06:02L HLA-DPA1*02:01-B1*13:01L
KAPKEIIFLEGET

SEQ ID NO: 17625 - protein, 14 aa, Severe acute respiratory syndrome coronavirus 2
  REGION 1..14: note = Table B: HLA-DQA1*01:02-B1*06:02L HLA-DQA1*05:05-B1*03:01L
LEGETLPTEVLTEE

SEQ ID NO: 17626 - protein, 12 aa, Severe acute respiratory syndrome coronavirus 2
  REGION 1..12: note = Table B: HLA-DQA1*01:02-B1*06:02L HLA-DQA1*05:01-B1*02:01L HLA-DPA1*03:01-B1*105:01L HLA-DQA1*01:03-B1*06:01L HLA-DQA1*02:01-B1*03:03L
LTEEVVLKTGDL

SEQ ID NO: 17627 - protein, 12 aa, Severe acute respiratory syndrome coronavirus 2
  REGION 1..12: note = Table B: HLA-DQA1*01:02-B1*06:02L HLA-DQA1*02:01-B1*03:03L
TEEVVLKTGDLQ

SEQ ID NO: 17628 - protein, 11 aa, Severe acute respiratory syndrome coronavirus 2
  REGION 1..11: note = Table B: HLA-DQA1*01:02-B1*06:02L HLA-DPA1*03:01-B1*105:01L HLA-DQA1*03:01-B1*03:02L HLA-DQA1*02:01-B1*03:03L
VVLKTGDLQPL

SEQ ID NO: 17629 - protein, 10 aa, Severe acute respiratory syndrome coronavirus 2
  REGION 1..10: note = Table B: HLA-DQA1*01:02-B1*06:02L HLA-DPA1*03:01-B1*105:01L HLA-DQA1*01:03-B1*06:01M HLA-DQA1*02:01-B1*03:03L
LKTGDLQPLE

SEQ ID NO: 17630 - protein, 13 aa, Severe acute respiratory syndrome coronavirus 2
  REGION 1..13: note = Table B: HLA-DQA1*01:02-B1*06:02L
PLVGTPVCINGLM

SEQ ID NO: 17631 - protein, 10 aa, Severe acute respiratory syndrome coronavirus 2
  REGION 1..10: note = Table B: HLA-DQA1*01:02-B1*06:02L HLA-DPA1*03:01-B1*04:02L HLA-DPA1*03:01-B1*105:01L HLA-DPA1*01:02-B1*04:01L HLA-DQA1*01:03-B1*06:01L
INGLMLLEIK

SEQ ID NO: 17632 - protein, 12 aa, Severe acute respiratory syndrome coronavirus 2
  REGION 1..12: note = Table B: HLA-DQA1*01:02-B1*06:02L HLA-DPA1*03:01-B1*105:01L HLA-DQA1*01:03-B1*06:01L HLA-DQA1*02:01-B1*03:03L
NGLMLLEIKDTE

SEQ ID NO: 17633 - protein, 11 aa, Severe acute respiratory syndrome coronavirus 2
  REGION 1..11: note = Table B: HLA-DQA1*01:02-B1*06:02L HLA-DQA1*01:03-B1*06:01L
EKYCALAPNMM

SEQ ID NO: 17634 - protein, 13 aa, Severe acute respiratory syndrome coronavirus 2
  REGION 1..13: note = Table B: HLA-DQA1*01:02-B1*06:02L HLA-DQA1*01:03-B1*06:01L
VTNNTFTLKGGAP

SEQ ID NO: 17635 - protein, 12 aa, Severe acute respiratory syndrome coronavirus 2
  REGION 1..12: note = Table B: HLA-DQA1*01:02-B1*06:02L HLA-DRB1*08:04L HLA-DRB1*14:01L HLA-DRB1*11:01L HLA-DRB1*04:08L HLA-DRB1*15:03L
NTFTLKGGAPTK

SEQ ID NO: 17636 - protein, 11 aa, Severe acute respiratory syndrome coronavirus 2
  REGION 1..11: note = Table B: HLA-DQA1*01:02-B1*06:02L HLA-DQA1*05:05-B1*03:19L
TLKGGAPTKVT

SEQ ID NO: 17637 - protein, 12 aa, Severe acute respiratory syndrome coronavirus 2
  REGION 1..12: note = Table B: HLA-DQA1*01:02-B1*06:02L HLA-DQA1*05:05-B1*03:19L
LKGGAPTKVTFG

SEQ ID NO: 17638 - protein, 13 aa, Severe acute respiratory syndrome coronavirus 2
  REGION 1..13: note = Table B: HLA-DQA1*01:02-B1*06:02L
GYKSVNITFELDE

SEQ ID NO: 17639 - protein, 13 aa, Severe acute respiratory syndrome coronavirus 2
  REGION 1..13: note = Table B: HLA-DQA1*01:02-B1*06:02L HLA-DQA1*02:01-B1*03:03L
YKSVNITFELDER

SEQ ID NO: 17640 - protein, 12 aa, Severe acute respiratory syndrome coronavirus 2
  REGION 1..12: note = Table B: HLA-DQA1*01:02-B1*06:02L HLA-DRB1*12:01L HLA-DPA1*02:01-B1*13:01L
VNITFELDERID

SEQ ID NO: 17641 - protein, 12 aa, Severe acute respiratory syndrome coronavirus 2
  REGION 1..12: note = Table B: HLA-DQA1*01:02-B1*06:02L
LDERIDKVLNEK

SEQ ID NO: 17642 - protein, 10 aa, Severe acute respiratory syndrome coronavirus 2
  REGION 1..10: note = Table B: HLA-DQA1*01:02-B1*06:02L HLA-DQA1*05:05-B1*03:19L HLA-DQA1*02:01-B1*03:03L
KVLNEKCSAY

SEQ ID NO: 17643 - protein, 12 aa, Severe acute respiratory syndrome coronavirus 2
  REGION 1..12: note = Table B: HLA-DQA1*01:02-B1*06:02L
VLNEKCSAYTVE

SEQ ID NO: 17644 - protein, 12 aa, Severe acute respiratory syndrome coronavirus 2
  REGION 1..12: note = Table B: HLA-DQA1*01:02-B1*06:02L HLA-DQA1*01:03-B1*06:01L
NEKCSAYTVELG

SEQ ID NO: 17645 - protein, 13 aa, Severe acute respiratory syndrome coronavirus 2
  REGION 1..13: note = Table B: HLA-DQA1*01:02-B1*06:02L HLA-DPA1*03:01-B1*105:01L
TEVNEFACVVADA

SEQ ID NO: 17646 - protein, 13 aa, Severe acute respiratory syndrome coronavirus 2
  REGION 1..13: note = Table B: HLA-DQA1*01:02-B1*06:02L
EVNEFACVVADAV

SEQ ID NO: 17647 - protein, 13 aa, Severe acute respiratory syndrome coronavirus 2
  REGION 1..13: note = Table B: HLA-DQA1*01:02-B1*06:02L
VNEFACVVADAVI

SEQ ID NO: 17648 - protein, 12 aa, Severe acute respiratory syndrome coronavirus 2
  REGION 1..12: note = Table B: HLA-DQA1*01:02-B1*06:02L HLA-DQA1*03:01-B1*03:02L HLA-DQA1*01:03-B1*06:01L HLA-DQA1*02:01-B1*03:03L
VADAVIKTLQPV

SEQ ID NO: 17649 - protein, 14 aa, Severe acute respiratory syndrome coronavirus 2
  REGION 1..14: note = Table B: HLA-DQA1*01:02-B1*06:02L
PVSELLTPLGIDLD

SEQ ID NO: 17650 - protein, 14 aa, Severe acute respiratory syndrome coronavirus 2
  REGION 1..14: note = Table B: HLA-DQA1*01:02-B1*06:02L
LDEWSMATYYLFDE

SEQ ID NO: 17651 - protein, 14 aa, Severe acute respiratory syndrome coronavirus 2
  REGION 1..14: note = Table B: HLA-DQA1*01:02-B1*06:02L HLA-DPA1*03:01-B1*04:02L HLA-DPA1*03:01-B1*105:01L
DEWSMATYYLFDES

SEQ ID NO: 17652 - protein, 15 aa, Severe acute respiratory syndrome coronavirus 2
  REGION 1..15: note = Table B: HLA-DQA1*01:02-B1*06:02L HLA-DPA1*01:03-B1*04:02L
EFKLASHMYCSFYPP

SEQ ID NO: 17653 - protein, 15 aa, Severe acute respiratory syndrome coronavirus 2
  REGION 1..15: note = Table B: HLA-DQA1*01:02-B1*06:02L HLA-DPA1*01:03-B1*04:02L
FKLASHMYCSFYPPD

SEQ ID NO: 17654 - protein, 12 aa, Severe acute respiratory syndrome coronavirus 2
  REGION 1..12: note = Table B: HLA-DQA1*01:02-B1*06:02L
SHMYCSFYPPDE

SEQ ID NO: 17655 - protein, 14 aa, Severe acute respiratory syndrome coronavirus 2
  REGION 1..14: note = Table B: HLA-DQA1*01:02-B1*06:02L HLA-DQA1*05:05-B1*03:01L
FEPSTQYEYGTEDD

SEQ ID NO: 17656 - protein, 10 aa, Severe acute respiratory syndrome coronavirus 2
  REGION 1..10: note = Table B: HLA-DQA1*01:02-B1*06:02L
QPEEEQEEDW

SEQ ID NO: 17657 - protein, 14 aa, Severe acute respiratory syndrome coronavirus 2
  REGION 1..14: note = Table B: HLA-DQA1*01:02-B1*06:02L HLA-DPA1*01:03-B1*03:01L HLA-DRB1*03:01L HLA-DPA1*03:01-B1*105:01L HLA-DQA1*05:05-B1*03:01L
DWLDDDSQQTVGQQ

SEQ ID NO: 17658 - protein, 14 aa, Severe acute respiratory syndrome coronavirus 2
  REGION 1..14: note = Table B: HLA-DQA1*01:02-B1*06:02L HLA-DQA1*05:05-B1*03:19L
DDSQQTVGQQDGSE

SEQ ID NO: 17659 - protein, 12 aa, Severe acute respiratory syndrome coronavirus 2
  REGION 1..12: note = Table B: HLA-DQA1*01:02-B1*06:02L HLA-DQA1*05:05-B1*03:01L HLA-DQA1*02:01-B1*03:03L
EDNQTTTIQTIV

SEQ ID NO: 17660 - protein, 10 aa, Severe acute respiratory syndrome coronavirus 2
  REGION 1..10: note = Table B: HLA-DQA1*01:02-B1*06:02L HLA-DQA1*03:01-B1*03:02L HLA-DQA1*01:03-B1*06:01L HLA-DQA1*02:01-B1*03:03L
QTTTIQTIVE

SEQ ID NO: 17661 - protein, 12 aa, Severe acute respiratory syndrome coronavirus 2
  REGION 1..12: note = Table B: HLA-DQA1*01:02-B1*06:02L HLA-DQA1*01:03-B1*06:01L
TIQTIVEVQPQL

SEQ ID NO: 17662 - protein, 12 aa, Severe acute respiratory syndrome coronavirus 2
  REGION 1..12: note = Table B: HLA-DQA1*01:02-B1*06:02L HLA-DQA1*05:01-B1*02:01L HLA-DQA1*05:05-B1*03:01L
ELTPVVQTIEVN

SEQ ID NO: 17663 - protein, 10 aa, Severe acute respiratory syndrome coronavirus 2
  REGION 1..10: note = Table B: HLA-DQA1*01:02-B1*06:02L HLA-DRB1*14:02L HLA-DPA1*02:01-B1*13:01L HLA-DPA1*03:01-B1*105:01L HLA-DQA1*01:03-B1*06:01L HLA-DQA1*02:01-B1*03:03L HLA-DRB1*15:03L
VVQTIEVNSF

SEQ ID NO: 17664 - protein, 12 aa, Severe acute respiratory syndrome coronavirus 2
  REGION 1..12: note = Table B: HLA-DQA1*01:02-B1*06:02L HLA-DPA1*03:01-B1*105:01L HLA-DRB1*16:01L HLA-DRB1*15:03L
VNSFSGYLKLTD

SEQ ID NO: 17665 - protein, 12 aa, Severe acute respiratory syndrome coronavirus 2
  REGION 1..12: note = Table B: HLA-DQA1*01:02-B1*06:02L HLA-DQA1*01-B1*05L HLA-DQA1*05:05-B1*03:01L HLA-DQA1*01:03-B1*06:01L
YLKLTDNVYIKN

SEQ ID NO: 17666 - protein, 13 aa, Severe acute respiratory syndrome coronavirus 2
  REGION 1..13: note = Table B: HLA-DQA1*01:02-B1*06:02L HLA-DPA1*03:01-B1*105:01L HLA-DQA1*01:03-B1*06:01L
LKLTDNVYIKNAD

SEQ ID NO: 17667 - protein, 12 aa, Severe acute respiratory syndrome coronavirus 2
  REGION 1..12: note = Table B: HLA-DQA1*01:02-B1*06:02L HLA-DQA1*03:01-B1*03:02L HLA-DQA1*02:01-B1*03:03L
EAKKVKPTVVVN

SEQ ID NO: 17668 - protein, 12 aa, Severe acute respiratory syndrome coronavirus 2
  REGION 1..12: note = Table B: HLA-DQA1*01:02-B1*06:02L
VVVNAANVYLKH

SEQ ID NO: 17669 - protein, 12 aa, Severe acute respiratory syndrome coronavirus 2
  REGION 1..12: note = Table B: HLA-DQA1*01:02-B1*06:02L
VNAANVYLKHGG

SEQ ID NO: 17670 - protein, 13 aa, Severe acute respiratory syndrome coronavirus 2
  REGION 1..13: note = Table B: HLA-DQA1*01:02-B1*06:02L HLA-DPA1*03:01-B1*105:01L HLA-DQA1*01:03-B1*06:01L
VYLKHGGGVAGAL

SEQ ID NO: 17671 - protein, 12 aa, Severe acute respiratory syndrome coronavirus 2
  REGION 1..12: note = Table B: HLA-DQA1*01:02-B1*06:02L HLA-DQA1*03:01-B1*03:02L HLA-DQA1*01:03-B1*06:01L HLA-DQA1*02:01-B1*03:03L
LNKATNNAMQVE

SEQ ID NO: 17672 - protein, 16 aa, Severe acute respiratory syndrome coronavirus 2
  REGION 1..16: note = Table B: HLA-DQA1*01:02-B1*06:02L HLA-DQA1*01:03-B1*06:01L HLA-DQA1*02:01-B1*03:03L
AMQVESDDYIATNGPL

SEQ ID NO: 17673 - protein, 13 aa, Severe acute respiratory syndrome coronavirus 2
  REGION 1..13: note = Table B: HLA-DQA1*01:02-B1*06:02L HLA-DQA1*05:05-B1*03:01L HLA-DQA1*01:03-B1*06:01L
GPLKVGGSCVLSG

SEQ ID NO: 17674 - protein, 12 aa, Severe acute respiratory syndrome coronavirus 2
  REGION 1..12: note = Table B: HLA-DQA1*01:02-B1*06:02L
LAKHCLHVVGPN

SEQ ID NO: 17675 - protein, 12 aa, Severe acute respiratory syndrome coronavirus 2
  REGION 1..12: note = Table B: HLA-DQA1*01:02-B1*06:02L
HVVGPNVNKGED

SEQ ID NO: 17676 - protein, 13 aa, Severe acute respiratory syndrome coronavirus 2
  REGION 1..13: note = Table B: HLA-DQA1*01:02-B1*06:02L
GPNVNKGEDIQLL

SEQ ID NO: 17677 - protein, 11 aa, Severe acute respiratory syndrome coronavirus 2
  REGION 1..11: note = Table B: HLA-DQA1*01:02-B1*06:02L HLA-DPA1*03:01-B1*105:01L HLA-DQA1*03:01-B1*03:02L HLA-DQA1*02:01-B1*03:03L
VNKGEDIQLLK

SEQ ID NO: 17678 - protein, 10 aa, Severe acute respiratory syndrome coronavirus 2
  REGION 1..10: note = Table B: HLA-DQA1*01:02-B1*06:02L HLA-DQA1*01:03-B1*06:01L HLA-DQA1*02:01-B1*03:03L
QLLKSAYENF

SEQ ID NO: 17679 - protein, 12 aa, Severe acute respiratory syndrome coronavirus 2
  REGION 1..12: note = Table B: HLA-DQA1*01:02-B1*06:02L HLA-DRB1*01:02L HLA-DPA1*03:01-B1*04:02L HLA-DPA1*01:03-B1*04:02L HLA-DRB1*16:01L HLA-DRB1*04:08L HLA-DRB1*15:03L
LLKSAYENFNQH

SEQ ID NO: 17680 - protein, 12 aa, Severe acute respiratory syndrome coronavirus 2
  REGION 1..12: note = Table B: HLA-DQA1*01:02-B1*06:02L
LKSAYENFNQHE

SEQ ID NO: 17681 - protein, 12 aa, Severe acute respiratory syndrome coronavirus 2
  REGION 1..12: note = Table B: HLA-DQA1*01:02-B1*06:02L HLA-DPA1*03:01-B1*105:01L HLA-DQA1*01:03-B1*06:01L
FNQHEVLLAPLL

SEQ ID NO: 17682 - protein, 12 aa, Severe acute respiratory syndrome coronavirus 2
  REGION 1..12: note = Table B: HLA-DQA1*01:02-B1*06:02L HLA-DQA1*01:03-B1*06:01L
NQHEVLLAPLLS

SEQ ID NO: 17683 - protein, 12 aa, Severe acute respiratory syndrome coronavirus 2
  REGION 1..12: note = Table B: HLA-DQA1*01:02-B1*06:02L
HEVLLAPLLSAG

SEQ ID NO: 17684 - protein, 14 aa, Severe acute respiratory syndrome coronavirus 2
  REGION 1..14: note = Table B: HLA-DQA1*01:02-B1*06:02L HLA-DRB1*12:01L HLA-DPA1*03:01-B1*105:01L
EVLLAPLLSAGIFG

SEQ ID NO: 17685 - protein, 13 aa, Severe acute respiratory syndrome coronavirus 2
  REGION 1..13: note = Table B: HLA-DQA1*01:02-B1*06:02L HLA-DQA1*01:03-B1*06:01L
LAPLLSAGIFGAD

SEQ ID NO: 17686 - protein, 12 aa, Severe acute respiratory syndrome coronavirus 2
  REGION 1..12: note = Table B: HLA-DQA1*01:02-B1*06:02L HLA-DQA1*01:01-B1*05:01L
SAGIFGADPIHS

SEQ ID NO: 17687 - protein, 12 aa, Severe acute respiratory syndrome coronavirus 2
  REGION 1..12: note = Table B: HLA-DQA1*01:02-B1*06:02L
DPIHSLRVCVDT

SEQ ID NO: 17688 - protein, 11 aa, Severe acute respiratory syndrome coronavirus 2
  REGION 1..11: note = Table B: HLA-DQA1*01:02-B1*06:02L HLA-DPA1*01:03-B1*03:01L HLA-DRB1*03:01L HLA-DQA1*05:01-B1*02:01L HLA-DPA1*01:03-B1*104:01L HLA-DRB1*16:01L HLA-DQA1*02:01-B1*03:03L
VCVDTVRTNVY

SEQ ID NO: 17689 - protein, 13 aa, Severe acute respiratory syndrome coronavirus 2
  REGION 1..13: note = Table B: HLA-DQA1*01:02-B1*06:02L HLA-DPA1*03:01-B1*105:01L HLA-DQA1*01:03-B1*06:01L HLA-DRB1*15:03L
VDTVRTNVYLAVF

SEQ ID NO: 17690 - protein, 12 aa, Severe acute respiratory syndrome coronavirus 2
  REGION 1..12: note = Table B: HLA-DQA1*01:02-B1*06:02L HLA-DPA1*03:01-B1*105:01L HLA-DPA1*01:02-B1*04:01L
VRTNVYLAVFDK

SEQ ID NO: 17691 - protein, 12 aa, Severe acute respiratory syndrome coronavirus 2
  REGION 1..12: note = Table B: HLA-DQA1*01:02-B1*06:02L
KLVSSFLEMKSE

SEQ ID NO: 17692 - protein, 12 aa, Severe acute respiratory syndrome coronavirus 2
  REGION 1..12: note = Table B: HLA-DQA1*01:02-B1*06:02L HLA-DPA1*01:03-B1*04:01L HLA-DPA1*01:03-B1*04:02L HLA-DQA1*02:01-B1*03:03L
LVSSFLEMKSEK

SEQ ID NO: 17693 - protein, 14 aa, Severe acute respiratory syndrome coronavirus 2
  REGION 1..14: note = Table B: HLA-DQA1*01:02-B1*06:02L
EMKSEKQVEQKIAE

SEQ ID NO: 17694 - protein, 14 aa, Severe acute respiratory syndrome coronavirus 2
  REGION 1..14: note = Table B: HLA-DQA1*01:02-B1*06:02L HLA-DRB1*01:02L HLA-DRB1*12:01L HLA-DPA1*02:01-B1*13:01L HLA-DRB1*16:01L HLA-DRB1*04:08L
SEKQVEQKIAEIPK

SEQ ID NO: 17695 - protein, 14 aa, Severe acute respiratory syndrome coronavirus 2
  REGION 1..14: note = Table B: HLA-DQA1*01:02-B1*06:02L HLA-DRB1*01:02L HLA-DRB1*16:01L HLA-DRB1*04:08L
EKQVEQKIAEIPKE

SEQ ID NO: 17696 - protein, 12 aa, Severe acute respiratory syndrome coronavirus 2
  REGION 1..12: note = Table B: HLA-DQA1*01:02-B1*06:02L HLA-DQA1*01:03-B1*06:01L
EVKPFITESKPS

SEQ ID NO: 17697 - protein, 12 aa, Severe acute respiratory syndrome coronavirus 2
  REGION 1..12: note = Table B: HLA-DQA1*01:02-B1*06:02L HLA-DRB1*04:08L
FITESKPSVEQR

SEQ ID NO: 17698 - protein, 14 aa, Severe acute respiratory syndrome coronavirus 2
  REGION 1..14: note = Table B: HLA-DQA1*01:02-B1*06:02L
ITESKPSVEQRKQD

SEQ ID NO: 17699 - protein, 14 aa, Severe acute respiratory syndrome coronavirus 2
  REGION 1..14: note = Table B: HLA-DQA1*01:02-B1*06:02L HLA-DRB1*01:02L HLA-DQA1*02:01-B1*03:03L
ESKPSVEQRKQDDK

SEQ ID NO: 17700 - protein, 12 aa, Severe acute respiratory syndrome coronavirus 2
  REGION 1..12: note = Table B: HLA-DQA1*01:02-B1*06:02L
KKIKACVEEVTT

SEQ ID NO: 17701 - protein, 12 aa, Severe acute respiratory syndrome coronavirus 2
  REGION 1..12: note = Table B: HLA-DQA1*01:02-B1*06:02L
KIKACVEEVTTT

SEQ ID NO: 17702 - protein, 12 aa, Severe acute respiratory syndrome coronavirus 2
  REGION 1..12: note = Table B: HLA-DQA1*01:02-B1*06:02L
IKACVEEVTTTL

SEQ ID NO: 17703 - protein, 12 aa, Severe acute respiratory syndrome coronavirus 2
  REGION 1..12: note = Table B: HLA-DQA1*01:02-B1*06:02L HLA-DRB1*08:04L HLA-DPA1*01:03-B1*03:01L HLA-DPA1*03:01-B1*04:02L HLA-DRB1*14:02L HLA-DRB1*08:01L HLA-DPA1*01:03-B1*04:02L HLA-DRB3*01:01L HLA-DQA1*01:03-B1*06:01L
LYIDINGNLHPD

SEQ ID NO: 17704 - protein, 13 aa, Severe acute respiratory syndrome coronavirus 2
  REGION 1..13: note = Table B: HLA-DQA1*01:02-B1*06:02L HLA-DQA1*02:01-B1*03:03L
PDSATLVSDIDIT

SEQ ID NO: 17705 - protein, 12 aa, Severe acute respiratory syndrome coronavirus 2
  REGION 1..12: note = Table B: HLA-DQA1*01:02-B1*06:02L HLA-DQA1*03:01-B1*03:02L HLA-DPA1*01:02-B1*04:01L HLA-DQA1*01:03-B1*06:01L HLA-DQA1*02:01-B1*03:03L
DIDITFLKKDAP

SEQ ID NO: 17706 - protein, 14 aa, Severe acute respiratory syndrome coronavirus 2
  REGION 1..14: note = Table B: HLA-DQA1*01:02-B1*06:02L
FLKKDAPYIVGDVV

SEQ ID NO: 17707 - protein, 14 aa, Severe acute respiratory syndrome coronavirus 2
  REGION 1..14: note = Table B: HLA-DQA1*01:02-B1*06:02L HLA-DPA1*02:01-B1*13:01L HLA-DQA1*01:03-B1*06:01L HLA-DQA1*02:01-B1*03:03L
LKKDAPYIVGDVVQ

SEQ ID NO: 17708 - protein, 13 aa, Severe acute respiratory syndrome coronavirus 2
  REGION 1..13: note = Table B: HLA-DQA1*01:02-B1*06:02L HLA-DRB1*08:04L HLA-DPA1*01:03-B1*03:01L HLA-DPA1*03:01-B1*04:02L HLA-DRB1*14:01L HLA-DRB1*14:02L HLA-DQA1*05:05-B1*03:19L HLA-DQA1*05:05-B1*03:01L HLA-DRB1*15:03L
APYIVGDVVQEGV

SEQ ID NO: 17709 - protein, 12 aa, Severe acute respiratory syndrome coronavirus 2
  REGION 1..12: note = Table B: HLA-DQA1*01:02-B1*06:02L
KAGGTTEMLAKA

SEQ ID NO: 17710 - protein, 12 aa, Severe acute respiratory syndrome coronavirus 2
  REGION 1..12: note = Table B: HLA-DQA1*01:02-B1*06:02L
LAKALRKVPTDN

SEQ ID NO: 17711 - protein, 12 aa, Severe acute respiratory syndrome coronavirus 2
  REGION 1..12: note = Table B: HLA-DQA1*01:02-B1*06:02L
QGLNGYTVEEAK

SEQ ID NO: 17712 - protein, 14 aa, Severe acute respiratory syndrome coronavirus 2
  REGION 1..14: note = Table B: HLA-DQA1*01:02-B1*06:02L
TVEEAKTVLKKCKS

SEQ ID NO: 17713 - protein, 14 aa, Severe acute respiratory syndrome coronavirus 2
  REGION 1..14: note = Table B: HLA-DQA1*01:02-B1*06:02L
VEEAKTVLKKCKSA

SEQ ID NO: 17714 - protein, 14 aa, Severe acute respiratory syndrome coronavirus 2
  REGION 1..14: note = Table B: HLA-DQA1*01:02-B1*06:02L HLA-DRB1*01:02L HLA-DRB1*15:03L
VLKKCKSAFYILPS

SEQ ID NO: 17715 - protein, 13 aa, Severe acute respiratory syndrome coronavirus 2
  REGION 1..13: note = Table B: HLA-DQA1*01:02-B1*06:02L HLA-DQA1*01:03-B1*06:01L HLA-DQA1*02:01-B1*03:03L
ISNEKQEILGTVS

SEQ ID NO: 17716 - protein, 14 aa, Severe acute respiratory syndrome coronavirus 2
  REGION 1..14: note = Table B: HLA-DQA1*01:02-B1*06:02L
TVSWNLREMLAHAE

SEQ ID NO: 17717 - protein, 12 aa, Severe acute respiratory syndrome coronavirus 2
  REGION 1..12: note = Table B: HLA-DQA1*01:02-B1*06:02L
WNLREMLAHAEE

SEQ ID NO: 17718 - protein, 14 aa, Severe acute respiratory syndrome coronavirus 2
  REGION 1..14: note = Table B: HLA-DQA1*01:02-B1*06:02L HLA-DRB1*01:02L
MLAHAEETRKLMPV

SEQ ID NO: 17719 - protein, 14 aa, Severe acute respiratory syndrome coronavirus 2
  REGION 1..14: note = Table B: HLA-DQA1*01:02-B1*06:02L
HAEETRKLMPVCVE

SEQ ID NO: 17720 - protein, 14 aa, Severe acute respiratory syndrome coronavirus 2
  REGION 1..14: note = Table B: HLA-DQA1*01:02-B1*06:02L HLA-DRB1*01:02L
AEETRKLMPVCVET

SEQ ID NO: 17721 - protein, 14 aa, Severe acute respiratory syndrome coronavirus 2
  REGION 1..14: note = Table B: HLA-DQA1*01:02-B1*06:02L HLA-DPA1*01:03-B1*03:01L HLA-DRB1*08:01L HLA-DRB1*11:01L HLA-DPA1*01:03-B1*104:01L HLA-DPA1*01:02-B1*04:01L HLA-DRB1*04:08L HLA-DQA1*02:01-B1*03:03L HLA-DRB1*15:03L
EETRKLMPVCVETK

SEQ ID NO: 17722 - protein, 14 aa, Severe acute respiratory syndrome coronavirus 2
  REGION 1..14: note = Table B: HLA-DQA1*01:02-B1*06:02L HLA-DPA1*01:03-B1*03:01L HLA-DRB1*04:08L HLA-DQA1*02:01-B1*03:03L HLA-DRB1*15:03L
ETRKLMPVCVETKA

SEQ ID NO: 17723 - protein, 14 aa, Severe acute respiratory syndrome coronavirus 2
  REGION 1..14: note = Table B: HLA-DQA1*01:02-B1*06:02L
KLMPVCVETKAIVS

SEQ ID NO: 17724 - protein, 14 aa, Severe acute respiratory syndrome coronavirus 2
  REGION 1..14: note = Table B: HLA-DQA1*01:02-B1*06:02L
LMPVCVETKAIVST

SEQ ID NO: 17725 - protein, 11 aa, Severe acute respiratory syndrome coronavirus 2
  REGION 1..11: note = Table B: HLA-DQA1*01:02-B1*06:02L HLA-DRB1*14:01L
IVSTIQRKYKG

SEQ ID NO: 17726 - protein, 11 aa, Severe acute respiratory syndrome coronavirus 2
  REGION 1..11: note = Table B: HLA-DQA1*01:02-B1*06:02L HLA-DQA1*01:03-B1*06:01L
YKGIKIQEGVV

SEQ ID NO: 17727 - protein, 10 aa, Severe acute respiratory syndrome coronavirus 2
  REGION 1..10: note = Table B: HLA-DQA1*01:02-B1*06:02L HLA-DPA1*01:03-B1*03:01L HLA-DRB1*03:01L HLA-DRB1*11:02L HLA-DQA1*01-B1*05L HLA-DQA1*05:05-B1*03:19M HLA-DQA1*05:01-B1*02:01L HLA-DRB4*01:01L HLA-DPA1*01:03-B1*04:01L
  REGION 1..10: note = CONT. FROM ABOVE: HLA-DPA1*01:03-B1*104:01L HLA-DRB1*16:01L
VDYGARFYFY

SEQ ID NO: 17728 - protein, 14 aa, Severe acute respiratory syndrome coronavirus 2
  REGION 1..14: note = Table B: HLA-DQA1*01:02-B1*06:02L
DYGARFYFYTSKTT

SEQ ID NO: 17729 - protein, 12 aa, Severe acute respiratory syndrome coronavirus 2
  REGION 1..12: note = Table B: HLA-DQA1*01:02-B1*06:02L HLA-DQA1*05:05-B1*03:01L HLA-DQA1*02:01-B1*03:03L
TVASLINTLNDL

SEQ ID NO: 17730 - protein, 12 aa, Severe acute respiratory syndrome coronavirus 2
  REGION 1..12: note = Table B: HLA-DQA1*01:02-B1*06:02L HLA-DRB1*01:02L HLA-DRB1*14:01L HLA-DRB1*11:04L HLA-DPA1*03:01-B1*105:01L HLA-DRB1*10:01L HLA-DRB1*08:03L HLA-DRB1*15:03L
SLINTLNDLNET

SEQ ID NO: 17731 - protein, 14 aa, Severe acute respiratory syndrome coronavirus 2
  REGION 1..14: note = Table B: HLA-DQA1*01:02-B1*06:02L HLA-DPA1*03:01-B1*105:01L
LNDLNETLVTMPLG

SEQ ID NO: 17732 - protein, 11 aa, Severe acute respiratory syndrome coronavirus 2
  REGION 1..11: note = Table B: HLA-DQA1*01:02-B1*06:02L
LVTMPLGYVTH

SEQ ID NO: 17733 - protein, 12 aa, Severe acute respiratory syndrome coronavirus 2
  REGION 1..12: note = Table B: HLA-DQA1*01:02-B1*06:02L
GYVTHGLNLEEA

SEQ ID NO: 17734 - protein, 10 aa, Severe acute respiratory syndrome coronavirus 2
  REGION 1..10: note = Table B: HLA-DQA1*01:02-B1*06:02L HLA-DPA1*01:03-B1*03:01L HLA-DQA1*05:05-B1*03:19L HLA-DQA1*05:01-B1*02:01L HLA-DPA1*01:03-B1*104:01L HLA-DRB1*16:01L
PDAVTAYNGY

SEQ ID NO: 17735 - protein, 14 aa, Severe acute respiratory syndrome coronavirus 2
  REGION 1..14: note = Table B: HLA-DQA1*01:02-B1*06:02L HLA-DRB1*12:01L
DAVTAYNGYLTSSS

SEQ ID NO: 17736 - protein, 12 aa, Severe acute respiratory syndrome coronavirus 2
  REGION 1..12: note = Table B: HLA-DQA1*01:02-B1*06:02L HLA-DRB3*02:01L HLA-DQA1*01:01-B1*05:01L HLA-DRB5*01:01L HLA-DQA1*05:05-B1*03:19L HLA-DRB1*09:01L HLA-DPA1*03:01-B1*105:01L HLA-DQA1*01:03-B1*06:01L
NGYLTSSSKTPE

SEQ ID NO: 17737 - protein, 11 aa, Severe acute respiratory syndrome coronavirus 2
  REGION 1..11: note = Table B: HLA-DQA1*01:02-B1*06:02L HLA-DRB3*02:01L HLA-DRB1*08:01L HLA-DQA1*05:05-B1*03:19L HLA-DPA1*03:01-B1*105:01L HLA-DQA1*01:03-B1*06:01L
YLTSSSKTPEE

SEQ ID NO: 17738 - protein, 14 aa, Severe acute respiratory syndrome coronavirus 2
  REGION 1..14: note = Table B: HLA-DQA1*01:02-B1*06:02L HLA-DQA1*01:03-B1*06:01L
SSKTPEEHFIETIS

SEQ ID NO: 17739 - protein, 11 aa, Severe acute respiratory syndrome coronavirus 2
  REGION 1..11: note = Table B: HLA-DQA1*01:02-B1*06:02L HLA-DPA1*01:03-B1*03:01L HLA-DQA1*05:01-B1*02:01L HLA-DPA1*01:03-B1*104:01L HLA-DRB1*16:01L
FIETISLAGSY

SEQ ID NO: 17740 - protein, 10 aa, Severe acute respiratory syndrome coronavirus 2
  REGION 1..10: note = Table B: HLA-DQA1*01:02-B1*06:02L HLA-DQA1*05:05-B1*03:19L HLA-DQA1*01:03-B1*06:01L HLA-DQA1*02:01-B1*03:03L HLA-DRB1*15:03L
ISLAGSYKDW

SEQ ID NO: 17741 - protein, 11 aa, Severe acute respiratory syndrome coronavirus 2
  REGION 1..11: note = Table B: HLA-DQA1*01:02-B1*06:02L HLA-DQA1*01-B1*05L HLA-DQA1*02:01-B1*03:03L
SLAGSYKDWSY

SEQ ID NO: 17742 - protein, 12 aa, Severe acute respiratory syndrome coronavirus 2
  REGION 1..12: note = Table B: HLA-DQA1*01:02-B1*06:02L
STQLGIEFLKRG

SEQ ID NO: 17743 - protein, 12 aa, Severe acute respiratory syndrome coronavirus 2
  REGION 1..12: note = Table B: HLA-DQA1*01:02-B1*06:02L HLA-DRB1*08:01L HLA-DRB1*04:08L
QLGIEFLKRGDK

SEQ ID NO: 17744 - protein, 14 aa, Severe acute respiratory syndrome coronavirus 2
  REGION 1..14: note = Table B: HLA-DQA1*01:02-B1*06:02L HLA-DQA1*02:01-B1*03:03L
TSNPTTFHLDGEVI

SEQ ID NO: 17745 - protein, 12 aa, Severe acute respiratory syndrome coronavirus 2
  REGION 1..12: note = Table B: HLA-DQA1*01:02-B1*06:02L HLA-DRB1*01:02L HLA-DRB1*15:03L
TLLSLREVRTIK

SEQ ID NO: 17746 - protein, 11 aa, Severe acute respiratory syndrome coronavirus 2
  REGION 1..11: note = Table B: HLA-DQA1*01:02-B1*06:02L
SLREVRTIKVF

SEQ ID NO: 17747 - protein, 13 aa, Severe acute respiratory syndrome coronavirus 2
  REGION 1..13: note = Table B: HLA-DQA1*01:02-B1*06:02L
LREVRTIKVFTTV

SEQ ID NO: 17748 - protein, 11 aa, Severe acute respiratory syndrome coronavirus 2
  REGION 1..11: note = Table B: HLA-DQA1*01:02-B1*06:02L HLA-DQA1*01:03-B1*06:01L
VRTIKVFTTVD

SEQ ID NO: 17749 - protein, 14 aa, Severe acute respiratory syndrome coronavirus 2
  REGION 1..14: note = Table B: HLA-DQA1*01:02-B1*06:02L HLA-DPA1*03:01-B1*105:01L HLA-DQA1*05:05-B1*03:01L HLA-DQA1*01:03-B1*06:01L HLA-DQA1*02:01-B1*03:03L
YGQQFGPTYLDGAD

SEQ ID NO: 17750 - protein, 13 aa, Severe acute respiratory syndrome coronavirus 2
  REGION 1..13: note = Table B: HLA-DQA1*01:02-B1*06:02L HLA-DPA1*01:03-B1*03:01L HLA-DPA1*03:01-B1*105:01L HLA-DQA1*01:03-B1*06:01L HLA-DRB1*15:03L
FGPTYLDGADVTK

SEQ ID NO: 17751 - protein, 12 aa, Severe acute respiratory syndrome coronavirus 2
  REGION 1..12: note = Table B: HLA-DQA1*01:02-B1*06:02L
DVTKIKPHNSHE

SEQ ID NO: 17752 - protein, 13 aa, Severe acute respiratory syndrome coronavirus 2
  REGION 1..13: note = Table B: HLA-DQA1*01:02-B1*06:02L
TKIKPHNSHEGKT

SEQ ID NO: 17753 - protein, 15 aa, Severe acute respiratory syndrome coronavirus 2
  REGION 1..15: note = Table B: HLA-DQA1*01:02-B1*06:02L
PHNSHEGKTFYVLPN

SEQ ID NO: 17754 - protein, 13 aa, Severe acute respiratory syndrome coronavirus 2
  REGION 1..13: note = Table B: HLA-DQA1*01:02-B1*06:02L HLA-DQA1*01:03-B1*06:01L
HEGKTFYVLPNDD

SEQ ID NO: 17755 - protein, 11 aa, Severe acute respiratory syndrome coronavirus 2
  REGION 1..11: note = Table B: HLA-DQA1*01:02-B1*06:02L HLA-DRB1*01:02L HLA-DPA1*03:01-B1*04:02L HLA-DRB1*11:02L HLA-DRB1*14:02L HLA-DQA1*05:01-B1*02:01L HLA-DRB1*09:01L HLA-DPA1*01:03-B1*104:01L HLA-DPA1*01:02-B1*04:01L
  REGION 1..11: note = CONT. FROM ABOVE: HLA-DRB1*10:01L HLA-DRB1*08:03L
YVLPNDDTLRV

SEQ ID NO: 17756 - protein, 13 aa, Severe acute respiratory syndrome coronavirus 2
  REGION 1..13: note = Table B: HLA-DQA1*01:02-B1*06:02L HLA-DPA1*03:01-B1*105:01L
VLPNDDTLRVEAF

SEQ ID NO: 17757 - protein, 10 aa, Severe acute respiratory syndrome coronavirus 2
  REGION 1..10: note = Table B: HLA-DQA1*01:02-B1*06:02L HLA-DPA1*01:03-B1*03:01L HLA-DPA1*03:01-B1*04:02L HLA-DQA1*05:05-B1*03:19L HLA-DQA1*05:01-B1*02:01L HLA-DPA1*01:03-B1*04:01L HLA-DPA1*03:01-B1*105:01L HLA-DPA1*01:02-B1*04:01L
  REGION 1..10: note = CONT. FROM ABOVE: HLA-DRB1*16:01L
TLRVEAFEYY

SEQ ID NO: 17758 - protein, 14 aa, Severe acute respiratory syndrome coronavirus 2
  REGION 1..14: note = Table B: HLA-DQA1*01:02-B1*06:02L HLA-DQA1*01:03-B1*06:01L HLA-DRB1*15:03L
LRVEAFEYYHTTDP

SEQ ID NO: 17759 - protein, 13 aa, Severe acute respiratory syndrome coronavirus 2
  REGION 1..13: note = Table B: HLA-DQA1*01:02-B1*06:02L HLA-DPA1*03:01-B1*04:02L HLA-DPA1*01:03-B1*04:01L HLA-DPA1*01:03-B1*04:02L HLA-DPA1*03:01-B1*105:01L HLA-DPA1*01:02-B1*04:01L HLA-DQA1*01:03-B1*06:01L
DPSFLGRYMSALN

SEQ ID NO: 17760 - protein, 11 aa, Severe acute respiratory syndrome coronavirus 2
  REGION 1..11: note = Table B: HLA-DQA1*01:02-B1*06:02L
YMSALNHTKKW

SEQ ID NO: 17761 - protein, 15 aa, Severe acute respiratory syndrome coronavirus 2
  REGION 1..15: note = Table B: HLA-DQA1*01:02-B1*06:02L
NHTKKWKYPQVNGLT

SEQ ID NO: 17762 - protein, 10 aa, Severe acute respiratory syndrome coronavirus 2
  REGION 1..10: note = Table B: HLA-DQA1*01:02-B1*06:02L HLA-DQA1*03:01-B1*03:02L HLA-DQA1*01:03-B1*06:01L HLA-DQA1*02:01-B1*03:03L
GLTSIKWADN

SEQ ID NO: 17763 - protein, 10 aa, Severe acute respiratory syndrome coronavirus 2
  REGION 1..10: note = Table B: HLA-DQA1*01:02-B1*06:02L HLA-DQA1*05:05-B1*03:19L HLA-DQA1*05:01-B1*02:01L
SIKWADNNCY

SEQ ID NO: 17764 - protein, 13 aa, Severe acute respiratory syndrome coronavirus 2
  REGION 1..13: note = Table B: HLA-DQA1*01:02-B1*06:02L
KWADNNCYLATAL

SEQ ID NO: 17765 - protein, 14 aa, Severe acute respiratory syndrome coronavirus 2
  REGION 1..14: note = Table B: HLA-DQA1*01:02-B1*06:02L
WADNNCYLATALLT

SEQ ID NO: 17766 - protein, 14 aa, Severe acute respiratory syndrome coronavirus 2
  REGION 1..14: note = Table B: HLA-DQA1*01:02-B1*06:02L HLA-DPA1*01:03-B1*04:02L
DNNCYLATALLTLQ

SEQ ID NO: 17767 - protein, 10 aa, Severe acute respiratory syndrome coronavirus 2
  REGION 1..10: note = Table B: HLA-DQA1*01:02-B1*06:02L HLA-DPA1*03:01-B1*105:01L HLA-DQA1*01:03-B1*06:01L
LATALLTLQQ

SEQ ID NO: 17768 - protein, 10 aa, Severe acute respiratory syndrome coronavirus 2
  REGION 1..10: note = Table B: HLA-DQA1*01:02-B1*06:02L HLA-DQA1*05:05-B1*03:19L HLA-DQA1*01:03-B1*06:01L HLA-DQA1*02:01-B1*03:03L
LTLQQIELKF

SEQ ID NO: 17769 - protein, 12 aa, Severe acute respiratory syndrome coronavirus 2
  REGION 1..12: note = Table B: HLA-DQA1*01:02-B1*06:02L
TLQQIELKFNPP

SEQ ID NO: 17770 - protein, 12 aa, Severe acute respiratory syndrome coronavirus 2
  REGION 1..12: note = Table B: HLA-DQA1*01:02-B1*06:02L
QDAYYRARAGEA

SEQ ID NO: 17771 - protein, 14 aa, Severe acute respiratory syndrome coronavirus 2
  REGION 1..14: note = Table B: HLA-DQA1*01:02-B1*06:02L HLA-DPA1*01:03-B1*03:01L HLA-DPA1*02:01-B1*13:01L HLA-DPA1*03:01-B1*105:01L
ARAGEAANFCALIL

SEQ ID NO: 17772 - protein, 14 aa, Severe acute respiratory syndrome coronavirus 2
  REGION 1..14: note = Table B: HLA-DQA1*01:02-B1*06:02L
AGEAANFCALILAY

SEQ ID NO: 17773 - protein, 14 aa, Severe acute respiratory syndrome coronavirus 2
  REGION 1..14: note = Table B: HLA-DQA1*01:02-B1*06:02L HLA-DPA1*03:01-B1*105:01L
AANFCALILAYCNK

SEQ ID NO: 17774 - protein, 14 aa, Severe acute respiratory syndrome coronavirus 2
  REGION 1..14: note = Table B: HLA-DQA1*01:02-B1*06:02L
ANFCALILAYCNKT

SEQ ID NO: 17775 - protein, 11 aa, Severe acute respiratory syndrome coronavirus 2
  REGION 1..11: note = Table B: HLA-DQA1*01:02-B1*06:02L HLA-DQA1*01:03-B1*06:01L HLA-DRB1*15:03L
LILAYCNKTVG

SEQ ID NO: 17776 - protein, 12 aa, Severe acute respiratory syndrome coronavirus 2
  REGION 1..12: note = Table B: HLA-DQA1*01:02-B1*06:02L HLA-DRB1*15:03L
ILAYCNKTVGEL

SEQ ID NO: 17777 - protein, 12 aa, Severe acute respiratory syndrome coronavirus 2
  REGION 1..12: note = Table B: HLA-DQA1*01:02-B1*06:02L
LAYCNKTVGELG

SEQ ID NO: 17778 - protein, 14 aa, Severe acute respiratory syndrome coronavirus 2
  REGION 1..14: note = Table B: HLA-DQA1*01:02-B1*06:02L
AYCNKTVGELGDVR

SEQ ID NO: 17779 - protein, 11 aa, Severe acute respiratory syndrome coronavirus 2
  REGION 1..11: note = Table B: HLA-DQA1*01:02-B1*06:02L HLA-DRB1*01:02L HLA-DPA1*01:03-B1*03:01L HLA-DQA1*05:05-B1*03:19L HLA-DPA1*03:01-B1*105:01L HLA-DRB1*15:03L
TVGELGDVRET

SEQ ID NO: 17780 - protein, 10 aa, Severe acute respiratory syndrome coronavirus 2
  REGION 1..10: note = Table B: HLA-DQA1*01:02-B1*06:02L HLA-DPA1*03:01-B1*105:01L
DVRETMSYLF

SEQ ID NO: 17781 - protein, 12 aa, Severe acute respiratory syndrome coronavirus 2
  REGION 1..12: note = Table B: HLA-DQA1*01:02-B1*06:02L HLA-DPA1*03:01-B1*04:02L HLA-DPA1*01:03-B1*04:02L HLA-DRB1*04:08L
YLFQHANLDSCK

SEQ ID NO: 17782 - protein, 14 aa, Severe acute respiratory syndrome coronavirus 2
  REGION 1..14: note = Table B: HLA-DQA1*01:02-B1*06:02L HLA-DRB1*08:04L HLA-DRB1*11:04L HLA-DRB1*11:01L
HANLDSCKRVLNVV

SEQ ID NO: 17783 - protein, 12 aa, Severe acute respiratory syndrome coronavirus 2
  REGION 1..12: note = Table B: HLA-DQA1*01:02-B1*06:02L
VLNVVCKTCGQQ

SEQ ID NO: 17784 - protein, 12 aa, Severe acute respiratory syndrome coronavirus 2
  REGION 1..12: note = Table B: HLA-DQA1*01:02-B1*06:02L
LNVVCKTCGQQQ

SEQ ID NO: 17785 - protein, 12 aa, Severe acute respiratory syndrome coronavirus 2
  REGION 1..12: note = Table B: HLA-DQA1*01:02-B1*06:02L
NVVCKTCGQQQT

SEQ ID NO: 17786 - protein, 12 aa, Severe acute respiratory syndrome coronavirus 2
  REGION 1..12: note = Table B: HLA-DQA1*01:02-B1*06:02L
VVCKTCGQQQTT

SEQ ID NO: 17787 - protein, 14 aa, Severe acute respiratory syndrome coronavirus 2
  REGION 1..14: note = Table B: HLA-DQA1*01:02-B1*06:02L
VCKTCGQQQTTLKG

SEQ ID NO: 17788 - protein, 12 aa, Severe acute respiratory syndrome coronavirus 2
  REGION 1..12: note = Table B: HLA-DQA1*01:02-B1*06:02L HLA-DQA1*01:03-B1*06:01L
LKGVEAVMYMGT

SEQ ID NO: 17789 - protein, 12 aa, Severe acute respiratory syndrome coronavirus 2
  REGION 1..12: note = Table B: HLA-DQA1*01:02-B1*06:02L HLA-DPA1*03:01-B1*105:01L HLA-DPA1*01:02-B1*04:01L HLA-DQA1*01:03-B1*06:01L
KGVEAVMYMGTL

SEQ ID NO: 17790 - protein, 12 aa, Severe acute respiratory syndrome coronavirus 2
  REGION 1..12: note = Table B: HLA-DQA1*01:02-B1*06:02L
GVEAVMYMGTLS

SEQ ID NO: 17791 - protein, 10 aa, Severe acute respiratory syndrome coronavirus 2
  REGION 1..10: note = Table B: HLA-DQA1*01:02-B1*06:02L HLA-DQA1*05:05-B1*03:19L HLA-DPA1*02:01-B1*13:01L HLA-DPA1*03:01-B1*105:01L HLA-DQA1*01:03-B1*06:01L HLA-DRB1*15:03L
YMGTLSYEQF

SEQ ID NO: 17792 - protein, 12 aa, Severe acute respiratory syndrome coronavirus 2
  REGION 1..12: note = Table B: HLA-DQA1*01:02-B1*06:02L HLA-DRB1*08:04L HLA-DRB1*14:01L HLA-DRB1*11:01L HLA-DPA1*01:03-B1*04:02L HLA-DRB1*16:01L HLA-DRB1*04:08L
SYEQFKKGVQIP

SEQ ID NO: 17793 - protein, 12 aa, Severe acute respiratory syndrome coronavirus 2
  REGION 1..12: note = Table B: HLA-DQA1*01:02-B1*06:02L HLA-DQA1*01:03-B1*06:01L
EQFKKGVQIPCT

SEQ ID NO: 17794 - protein, 12 aa, Severe acute respiratory syndrome coronavirus 2
  REGION 1..12: note = Table B: HLA-DQA1*01:02-B1*06:02L
GVQIPCTCGKQA

SEQ ID NO: 17795 - protein, 12 aa, Severe acute respiratory syndrome coronavirus 2
  REGION 1..12: note = Table B: HLA-DQA1*01:02-B1*06:02L
VQIPCTCGKQAT

SEQ ID NO: 17796 - protein, 12 aa, Severe acute respiratory syndrome coronavirus 2
  REGION 1..12: note = Table B: HLA-DQA1*01:02-B1*06:02L HLA-DQA1*01:03-B1*06:01L HLA-DQA1*02:01-B1*03:03L
QATKYLVQQESP

SEQ ID NO: 17797 - protein, 14 aa, Severe acute respiratory syndrome coronavirus 2
  REGION 1..14: note = Table B: HLA-DQA1*01:02-B1*06:02L HLA-DQA1*01:03-B1*06:01L HLA-DQA1*02:01-B1*03:03L
VQQESPFVMMSAPP

SEQ ID NO: 17798 - protein, 13 aa, Severe acute respiratory syndrome coronavirus 2
  REGION 1..13: note = Table B: HLA-DQA1*01:02-B1*06:02L
YELKHGTFTCASE

SEQ ID NO: 17799 - protein, 13 aa, Severe acute respiratory syndrome coronavirus 2
  REGION 1..13: note = Table B: HLA-DQA1*01:02-B1*06:02L
ELKHGTFTCASEY

SEQ ID NO: 17800 - protein, 13 aa, Severe acute respiratory syndrome coronavirus 2
  REGION 1..13: note = Table B: HLA-DQA1*01:02-B1*06:02L
LKHGTFTCASEYT

SEQ ID NO: 17801 - protein, 12 aa, Severe acute respiratory syndrome coronavirus 2
  REGION 1..12: note = Table B: HLA-DQA1*01:02-B1*06:02L
HGTFTCASEYTG

SEQ ID NO: 17802 - protein, 12 aa, Severe acute respiratory syndrome coronavirus 2
  REGION 1..12: note = Table B: HLA-DQA1*01:02-B1*06:02L
GTFTCASEYTGN

SEQ ID NO: 17803 - protein, 12 aa, Severe acute respiratory syndrome coronavirus 2
  REGION 1..12: note = Table B: HLA-DQA1*01:02-B1*06:02L
TFTCASEYTGNY

SEQ ID NO: 17804 - protein, 12 aa, Severe acute respiratory syndrome coronavirus 2
  REGION 1..12: note = Table B: HLA-DQA1*01:02-B1*06:02L HLA-DQA1*01:03-B1*06:01L
FTCASEYTGNYQ

SEQ ID NO: 17805 - protein, 10 aa, Severe acute respiratory syndrome coronavirus 2
  REGION 1..10: note = Table B: HLA-DQA1*01:02-B1*06:02L HLA-DQA1*05:05-B1*03:19L HLA-DQA1*05:01-B1*02:01L
YTGNYQCGHY

SEQ ID NO: 17806 - protein, 14 aa, Severe acute respiratory syndrome coronavirus 2
  REGION 1..14: note = Table B: HLA-DQA1*01:02-B1*06:02L HLA-DRB1*01:02L
NYQCGHYKHITSKE

SEQ ID NO: 17807 - protein, 14 aa, Severe acute respiratory syndrome coronavirus 2
  REGION 1..14: note = Table B: HLA-DQA1*01:02-B1*06:02L
YQCGHYKHITSKET

SEQ ID NO: 17808 - protein, 12 aa, Severe acute respiratory syndrome coronavirus 2
  REGION 1..12: note = Table B: HLA-DQA1*01:02-B1*06:02L HLA-DRB1*01:01L HLA-DRB1*11:04L HLA-DRB1*11:01L HLA-DRB3*01:01L HLA-DPA1*03:01-B1*105:01L HLA-DRB1*07:01L
GHYKHITSKETL

SEQ ID NO: 17809 - protein, 12 aa, Severe acute respiratory syndrome coronavirus 2
  REGION 1..12: note = Table B: HLA-DQA1*01:02-B1*06:02L HLA-DQA1*01-B1*05L HLA-DQA1*01:03-B1*06:01L HLA-DQA1*02:01-B1*03:03L
LTKSSEYKGPIT

SEQ ID NO: 17810 - protein, 13 aa, Severe acute respiratory syndrome coronavirus 2
  REGION 1..13: note = Table B: HLA-DQA1*01:02-B1*06:02L HLA-DPA1*01:02-B1*04:01L
YKENSYTTTIKPV

SEQ ID NO: 17811 - protein, 13 aa, Severe acute respiratory syndrome coronavirus 2
  REGION 1..13: note = Table B: HLA-DQA1*01:02-B1*06:02L
TIKPVTYKLDGVV

SEQ ID NO: 17812 - protein, 17 aa, Severe acute respiratory syndrome coronavirus 2
  REGION 1..17: note = Table B: HLA-DQA1*01:02-B1*06:02L HLA-DPA1*03:01-B1*105:01L
KPVTYKLDGVVCTEIDP

SEQ ID NO: 17813 - protein, 12 aa, Severe acute respiratory syndrome coronavirus 2
  REGION 1..12: note = Table B: HLA-DQA1*01:02-B1*06:02L HLA-DQA1*01-B1*05L HLA-DQA1*05:01-B1*02:01L HLA-DPA1*03:01-B1*105:01L HLA-DQA1*03:01-B1*03:02L
GVVCTEIDPKLD

SEQ ID NO: 17814 - protein, 10 aa, Severe acute respiratory syndrome coronavirus 2
  REGION 1..10: note = Table B: HLA-DQA1*01:02-B1*06:02L HLA-DQA1*05:05-B1*03:19L HLA-DQA1*02:01-B1*03:03L
DNYYKKDNSY

SEQ ID NO: 17815 - protein, 13 aa, Severe acute respiratory syndrome coronavirus 2
  REGION 1..13: note = Table B: HLA-DQA1*01:02-B1*06:02L HLA-DPA1*02:01-B1*13:01L HLA-DRB1*15:03L
KKDNSYFTEQPID

SEQ ID NO: 17816 - protein, 10 aa, Severe acute respiratory syndrome coronavirus 2
  REGION 1..10: note = Table B: HLA-DQA1*01:02-B1*06:02L HLA-DQA1*05:05-B1*03:19L HLA-DPA1*02:01-B1*13:01L HLA-DQA1*01:03-B1*06:01L HLA-DQA1*02:01-B1*03:03L
PNASFDNFKF

SEQ ID NO: 17817 - protein, 13 aa, Severe acute respiratory syndrome coronavirus 2
  REGION 1..13: note = Table B: HLA-DQA1*01:02-B1*06:02L HLA-DRB1*01:02L HLA-DPA1*03:01-B1*105:01L HLA-DRB1*16:01L HLA-DRB1*15:03L
FKFVCDNIKFADD

SEQ ID NO: 17818 - protein, 13 aa, Severe acute respiratory syndrome coronavirus 2
  REGION 1..13: note = Table B: HLA-DQA1*01:02-B1*06:02L HLA-DPA1*03:01-B1*105:01L
FVCDNIKFADDLN

SEQ ID NO: 17819 - protein, 12 aa, Severe acute respiratory syndrome coronavirus 2
  REGION 1..12: note = Table B: HLA-DQA1*01:02-B1*06:02L HLA-DRB1*01:02L HLA-DRB1*12:01L HLA-DRB1*04:08L HLA-DRB1*15:03L
LTGYKKPASREL

SEQ ID NO: 17820 - protein, 12 aa, Severe acute respiratory syndrome coronavirus 2
  REGION 1..12: note = Table B: HLA-DQA1*01:02-B1*06:02L HLA-DRB1*04:08L HLA-DRB1*15:03L
ELKVTFFPDLNG

SEQ ID NO: 17821 - protein, 10 aa, Severe acute respiratory syndrome coronavirus 2
  REGION 1..10: note = Table B: HLA-DQA1*01:02-B1*06:02L HLA-DQA1*05:05-B1*03:19L HLA-DQA1*05:01-B1*02:01L
LNGDVVAIDY

SEQ ID NO: 17822 - protein, 12 aa, Severe acute respiratory syndrome coronavirus 2
  REGION 1..12: note = Table B: HLA-DQA1*01:02-B1*06:02L HLA-DRB1*08:04L HLA-DRB1*14:01L HLA-DRB1*11:04L
HYTPSFKKGAKL

SEQ ID NO: 17823 - protein, 14 aa, Severe acute respiratory syndrome coronavirus 2
  REGION 1..14: note = Table B: HLA-DQA1*01:02-B1*06:02L HLA-DRB1*01:02L HLA-DRB1*08:01L HLA-DRB1*16:01L HLA-DRB1*04:08L HLA-DRB1*15:03L
AKLLHKPIVWHVNN

SEQ ID NO: 17824 - protein, 14 aa, Severe acute respiratory syndrome coronavirus 2
  REGION 1..14: note = Table B: HLA-DQA1*01:02-B1*06:02L HLA-DPA1*03:01-B1*105:01L HLA-DQA1*05:05-B1*03:01L
PIVWHVNNATNKAT

SEQ ID NO: 17825 - protein, 11 aa, Severe acute respiratory syndrome coronavirus 2
  REGION 1..11: note = Table B: HLA-DQA1*01:02-B1*06:02L HLA-DRB1*08:01L
NATNKATYKPN

SEQ ID NO: 17826 - protein, 10 aa, Severe acute respiratory syndrome coronavirus 2
  REGION 1..10: note = Table B: HLA-DQA1*01:02-B1*06:02L HLA-DQA1*02:01-B1*03:03L
NKATYKPNTW

SEQ ID NO: 17827 - protein, 14 aa, Severe acute respiratory syndrome coronavirus 2
  REGION 1..14: note = Table B: HLA-DQA1*01:02-B1*06:02L
PNTWCIRCLWSTKP

SEQ ID NO: 17828 - protein, 14 aa, Severe acute respiratory syndrome coronavirus 2
  REGION 1..14: note = Table B: HLA-DQA1*01:02-B1*06:02L HLA-DQA1*05:05-B1*03:01L HLA-DQA1*01:03-B1*06:01L HLA-DQA1*02:01-B1*03:03L
SEDAQGMDNLACED

SEQ ID NO: 17829 - protein, 14 aa, Severe acute respiratory syndrome coronavirus 2
  REGION 1..14: note = Table B: HLA-DQA1*01:02-B1*06:02L HLA-DQA1*05:05-B1*03:01L HLA-DQA1*01:03-B1*06:01L
EDAQGMDNLACEDL

SEQ ID NO: 17830 - protein, 14 aa, Severe acute respiratory syndrome coronavirus 2
  REGION 1..14: note = Table B: HLA-DQA1*01:02-B1*06:02L
DAQGMDNLACEDLK

SEQ ID NO: 17831 - protein, 14 aa, Severe acute respiratory syndrome coronavirus 2
  REGION 1..14: note = Table B: HLA-DQA1*01:02-B1*06:02L
AQGMDNLACEDLKP

SEQ ID NO: 17832 - protein, 13 aa, Severe acute respiratory syndrome coronavirus 2
  REGION 1..13: note = Table B: HLA-DQA1*01:02-B1*06:02L HLA-DPA1*03:01-B1*105:01L HLA-DQA1*01:03-B1*06:01L
GMDNLACEDLKPV

SEQ ID NO: 17833 - protein, 11 aa, Severe acute respiratory syndrome coronavirus 2
  REGION 1..11: note = Table B: HLA-DQA1*01:02-B1*06:02L
NLACEDLKPVS

SEQ ID NO: 17834 - protein, 12 aa, Severe acute respiratory syndrome coronavirus 2
  REGION 1..12: note = Table B: HLA-DQA1*01:02-B1*06:02L
LACEDLKPVSEE

SEQ ID NO: 17835 - protein, 11 aa, Severe acute respiratory syndrome coronavirus 2
  REGION 1..11: note = Table B: HLA-DQA1*01:02-B1*06:02L
DVLECNVKTTE

SEQ ID NO: 17836 - protein, 12 aa, Severe acute respiratory syndrome coronavirus 2
  REGION 1..12: note = Table B: HLA-DQA1*01:02-B1*06:02L
VLECNVKTTEVV

SEQ ID NO: 17837 - protein, 12 aa, Severe acute respiratory syndrome coronavirus 2
  REGION 1..12: note = Table B: HLA-DQA1*01:02-B1*06:02L HLA-DRB1*01:02L
LKITEEVGHTDL

SEQ ID NO: 17838 - protein, 11 aa, Severe acute respiratory syndrome coronavirus 2
  REGION 1..11: note = Table B: HLA-DQA1*01:02-B1*06:02L HLA-DPA1*01:03-B1*04:01L
ITEEVGHTDLM

SEQ ID NO: 17839 - protein, 11 aa, Severe acute respiratory syndrome coronavirus 2
  REGION 1..11: note = Table B: HLA-DQA1*01:02-B1*06:02L
NSSLTIKKPNE

SEQ ID NO: 17840 - protein, 12 aa, Severe acute respiratory syndrome coronavirus 2
  REGION 1..12: note = Table B: HLA-DQA1*01:02-B1*06:02L
SSLTIKKPNELS

SEQ ID NO: 17841 - protein, 14 aa, Severe acute respiratory syndrome coronavirus 2
  REGION 1..14: note = Table B: HLA-DQA1*01:02-B1*06:02L HLA-DRB1*01:02L HLA-DRB1*15:03L
LTIKKPNELSRVLG

SEQ ID NO: 17842 - protein, 12 aa, Severe acute respiratory syndrome coronavirus 2
  REGION 1..12: note = Table B: HLA-DQA1*01:02-B1*06:02L HLA-DQA1*01:03-B1*06:01L
PNELSRVLGLKT

SEQ ID NO: 17843 - protein, 11 aa, Severe acute respiratory syndrome coronavirus 2
  REGION 1..11: note = Table B: HLA-DQA1*01:02-B1*06:02L HLA-DQA1*01:03-B1*06:01L HLA-DRB1*15:03L
HGLAAVNSVPW

SEQ ID NO: 17844 - protein, 13 aa, Severe acute respiratory syndrome coronavirus 2
  REGION 1..13: note = Table B: HLA-DQA1*01:02-B1*06:02L HLA-DQA1*03:01-B1*03:02L
YAKPFLNKVVSTT

SEQ ID NO: 17845 - protein, 10 aa, Severe acute respiratory syndrome coronavirus 2
  REGION 1..10: note = Table B: HLA-DQA1*01:02-B1*06:02L HLA-DPA1*03:01-B1*105:01L HLA-DQA1*01:03-B1*06:01L
STTTNIVTRC

SEQ ID NO: 17846 - protein, 10 aa, Severe acute respiratory syndrome coronavirus 2
  REGION 1..10: note = Table B: HLA-DQA1*01:02-B1*06:02L HLA-DPA1*03:01-B1*105:01L HLA-DQA1*01:03-B1*06:01L
TTTNIVTRCL

SEQ ID NO: 17847 - protein, 12 aa, Severe acute respiratory syndrome coronavirus 2
  REGION 1..12: note = Table B: HLA-DQA1*01:02-B1*06:02L
IVTRCLNRVCTN

SEQ ID NO: 17848 - protein, 10 aa, Severe acute respiratory syndrome coronavirus 2
  REGION 1..10: note = Table B: HLA-DQA1*01:02-B1*06:02L
RVCTNYMPYF

SEQ ID NO: 17849 - protein, 13 aa, Severe acute respiratory syndrome coronavirus 2
  REGION 1..13: note = Table B: HLA-DQA1*01:02-B1*06:02L HLA-DPA1*03:01-B1*105:01L HLA-DRB1*15:03L
TLLLQLCTFTRST

SEQ ID NO: 17850 - protein, 11 aa, Severe acute respiratory syndrome coronavirus 2
  REGION 1..11: note = Table B: HLA-DQA1*01:02-B1*06:02L HLA-DQA1*01:03-B1*06:01L
LQLCTFTRSTN

SEQ ID NO: 17851 - protein, 14 aa, Severe acute respiratory syndrome coronavirus 2
  REGION 1..14: note = Table B: HLA-DQA1*01:02-B1*06:02L
PTTIAKNTVKSVGK

SEQ ID NO: 17852 - protein, 14 aa, Severe acute respiratory syndrome coronavirus 2
  REGION 1..14: note = Table B: HLA-DQA1*01:02-B1*06:02L HLA-DRB1*01:02L HLA-DRB1*14:01L HLA-DPA1*02:01-B1*13:01L
NTVKSVGKFCLEAS

SEQ ID NO: 17853 - protein, 12 aa, Severe acute respiratory syndrome coronavirus 2
  REGION 1..12: note = Table B: HLA-DQA1*01:02-B1*06:02L
SVGKFCLEASFN

SEQ ID NO: 17854 - protein, 12 aa, Severe acute respiratory syndrome coronavirus 2
  REGION 1..12: note = Table B: HLA-DQA1*01:02-B1*06:02L HLA-DPA1*03:01-B1*105:01L HLA-DQA1*01:03-B1*06:01L
LEASFNYLKSPN

SEQ ID NO: 17855 - protein, 10 aa, Severe acute respiratory syndrome coronavirus 2
  REGION 1..10: note = Table B: HLA-DQA1*01:02-B1*06:02L HLA-DPA1*03:01-B1*04:02L HLA-DQA1*05:05-B1*03:19L HLA-DQA1*05:01-B1*02:01L HLA-DPA1*02:01-B1*13:01L HLA-DPA1*03:01-B1*105:01L HLA-DQA1*01:03-B1*06:01L HLA-DQA1*02:01-B1*03:03L
  REGION 1..10: note = CONT. FROM ABOVE: HLA-DRB1*15:03L
FSKLINIIIW

SEQ ID NO: 17856 - protein, 10 aa, Severe acute respiratory syndrome coronavirus 2
  REGION 1..10: note = Table B: HLA-DQA1*01:02-B1*06:02L HLA-DRB1*15:03L
KLINIIIWFL

SEQ ID NO: 17857 - protein, 13 aa, Severe acute respiratory syndrome coronavirus 2
  REGION 1..13: note = Table B: HLA-DQA1*01:02-B1*06:02L
SVCLGSLIYSTAA

SEQ ID NO: 17858 - protein, 10 aa, Severe acute respiratory syndrome coronavirus 2
  REGION 1..10: note = Table B: HLA-DQA1*01:02-B1*06:02L HLA-DRB1*08:77L HLA-DPA1*01:03-B1*03:01L HLA-DQA1*05:05-B1*03:19L HLA-DQA1*05:01-B1*02:01L HLA-DRB4*01:01L HLA-DPA1*01:03-B1*04:01L HLA-DPA1*01:03-B1*104:01L
  REGION 1..10: note = CONT. FROM ABOVE: HLA-DRB1*16:01L HLA-DQA1*02:01-B1*03:03L HLA-D RB1*15:03L
LMSNLGMPSY

SEQ ID NO: 17859 - protein, 12 aa, Severe acute respiratory syndrome coronavirus 2
  REGION 1..12: note = Table B: HLA-DQA1*01:02-B1*06:02L HLA-DQA1*05:05-B1*03:19L HLA-DQA1*05:05-B1*03:01L HLA-DQA1*01:03-B1*06:01L
MSNLGMPSYCTG

SEQ ID NO: 17860 - protein, 12 aa, Severe acute respiratory syndrome coronavirus 2
  REGION 1..12: note = Table B: HLA-DQA1*01:02-B1*06:02L HLA-DQA1*05:05-B1*03:19L HLA-DQA1*01:03-B1*06:01L
SNLGMPSYCTGY

SEQ ID NO: 17861 - protein, 12 aa, Severe acute respiratory syndrome coronavirus 2
  REGION 1..12: note = Table B: HLA-DQA1*01:02-B1*06:02L HLA-DQA1*01:03-B1*06:01L
NLGMPSYCTGYR

SEQ ID NO: 17862 - protein, 13 aa, Severe acute respiratory syndrome coronavirus 2
  REGION 1..13: note = Table B: HLA-DQA1*01:02-B1*06:02L
LGMPSYCTGYREG

SEQ ID NO: 17863 - protein, 11 aa, Severe acute respiratory syndrome coronavirus 2
  REGION 1..11: note = Table B: HLA-DQA1*01:02-B1*06:02L HLA-DQA1*05:05-B1*03:19L
PSYCTGYREGY

SEQ ID NO: 17864 - protein, 14 aa, Severe acute respiratory syndrome coronavirus 2
  REGION 1..14: note = Table B: HLA-DQA1*01:02-B1*06:02L
IATYCTGSIPCSVC

SEQ ID NO: 17865 - protein, 12 aa, Severe acute respiratory syndrome coronavirus 2
  REGION 1..12: note = Table B: HLA-DQA1*01:02-B1*06:02L
SIPCSVCLSGLD

SEQ ID NO: 17866 - protein, 15 aa, Severe acute respiratory syndrome coronavirus 2
  REGION 1..15: note = Table B: HLA-DQA1*01:02-B1*06:02L
SVCLSGLDSLDTYPS

SEQ ID NO: 17867 - protein, 12 aa, Severe acute respiratory syndrome coronavirus 2
  REGION 1..12: note = Table B: HLA-DQA1*01:02-B1*06:02L HLA-DPA1*03:01-B1*105:01L HLA-DQA1*05:05-B1*03:01L HLA-DQA1*01:03-B1*06:01L HLA-DQA1*02:01-B1*03:03L
GLDSLDTYPSLE

SEQ ID NO: 17868 - protein, 12 aa, Severe acute respiratory syndrome coronavirus 2
  REGION 1..12: note = Table B: HLA-DQA1*01:02-B1*06:02L HLA-DRB1*01:02L HLA-DRB1*12:01L HLA-DPA1*03:01-B1*105:01L HLA-DRB1*16:01L HLA-DRB1*15:03L
SLDTYPSLETIQ

SEQ ID NO: 17869 - protein, 10 aa, Severe acute respiratory syndrome coronavirus 2
  REGION 1..10: note = Table B: HLA-DQA1*01:02-B1*06:02L HLA-DQA1*05:05-B1*03:19L HLA-DRB4*01:01L HLA-DPA1*01:03-B1*04:01L HLA-DPA1*02:01-B1*13:01L HLA-DPA1*03:01-B1*105:01L HLA-DQA1*01:03-B1*06:01L HLA-DQA1*02:01-B1*03:03L
  REGION 1..10: note = CONT. FROM ABOVE: HLA-DRB1*15:03L
IQITISSFKW

SEQ ID NO: 17870 - protein, 12 aa, Severe acute respiratory syndrome coronavirus 2
  REGION 1..12: note = Table B: HLA-DQA1*01:02-B1*06:02L HLA-DPA1*01:03-B1*04:02L HLA-DRB1*15:03L
ITISSFKWDLTA

SEQ ID NO: 17871 - protein, 10 aa, Severe acute respiratory syndrome coronavirus 2
  REGION 1..10: note = Table B: HLA-DQA1*01:02-B1*06:02L
LTAFGLVAEW

SEQ ID NO: 17872 - protein, 10 aa, Severe acute respiratory syndrome coronavirus 2
  REGION 1..10: note = Table B: HLA-DQA1*01:02-B1*06:02L HLA-DPA1*02:01-B1*13:01L HLA-DPA1*03:01-B1*105:01L HLA-DQA1*01:03-B1*06:01L HLA-DRB1*15:03L
TAFGLVAEWF

SEQ ID NO: 17873 - protein, 10 aa, Severe acute respiratory syndrome coronavirus 2
  REGION 1..10: note = Table B: HLA-DQA1*01:02-B1*06:02L HLA-DPA1*01:03-B1*03:01L HLA-DPA1*03:01-B1*04:02L HLA-DRB1*11:02L HLA-DRB1*14:02L HLA-DQA1*05:05-B1*03:19L HLA-DQA1*05:01-B1*02:01L HLA-DRB4*01:01L HLA-DPA1*01:03-B1*04:01L
  REGION 1..10: note = CONT. FROM ABOVE: HLA-DPA1*01:03-B1*04:02L HLA-DPA1*02:01-B1*13: 01L HLA-DPA1*03:01-B1*105:01L HLA-DPA1*01:03-B1*104:01L HLA-DRB1 *16:01L HLA-DQA1*01:03-B1*06:01L HLA-DQA1*02:01-B1*03:03L HLA-DR B1*15:03L
GLVAEWFLAY

SEQ ID NO: 17874 - protein, 11 aa, Severe acute respiratory syndrome coronavirus 2
  REGION 1..11: note = Table B: HLA-DQA1*01:02-B1*06:02L HLA-DPA1*01:03-B1*04:02L HLA-DQA1*01:03-B1*06:01L
EWFLAYILFTR

SEQ ID NO: 17875 - protein, 10 aa, Severe acute respiratory syndrome coronavirus 2
  REGION 1..10: note = Table B: HLA-DQA1*01:02-B1*06:02L HLA-DPA1*03:01-B1*04:02L HLA-DPA1*01:03-B1*04:01L HLA-DRB1*12:01L HLA-DPA1*02:01-B1*13:01L HLA-DPA1*03:01-B1*105:01L HLA-DPA1*01:02-B1*04:01L HLA-DQA1*01:03-B1*06:01L
  REGION 1..10: note = CONT. FROM ABOVE: HLA-DRB1*15:03L
LAYILFTRFF

SEQ ID NO: 17876 - protein, 10 aa, Severe acute respiratory syndrome coronavirus 2
  REGION 1..10: note = Table B: HLA-DQA1*01:02-B1*06:02L HLA-DPA1*03:01-B1*04:02L HLA-DQA1*05:05-B1*03:19L HLA-DPA1*02:01-B1*13:01L HLA-DPA1*01:03-B1*104:01L HLA-DQA1*01:03-B1*06:01L HLA-DRB1*15:03L
YILFTRFFYV

SEQ ID NO: 17877 - protein, 14 aa, Severe acute respiratory syndrome coronavirus 2
  REGION 1..14: note = Table B: HLA-DQA1*01:02-B1*06:02L HLA-DRB1*01:02L HLA-DPA1*01:03-B1*04:02L HLA-DRB1*15:03L
TRFFYVLGLAAIMQ

SEQ ID NO: 17878 - protein, 11 aa, Severe acute respiratory syndrome coronavirus 2
  REGION 1..11: note = Table B: HLA-DQA1*01:02-B1*06:02L
VLGLAAIMQLF

SEQ ID NO: 17879 - protein, 10 aa, Severe acute respiratory syndrome coronavirus 2
  REGION 1..10: note = Table B: HLA-DQA1*01:02-B1*06:02L HLA-DRB1*15:03L
GLAAIMQLFF

SEQ ID NO: 17880 - protein, 10 aa, Severe acute respiratory syndrome coronavirus 2
  REGION 1..10: note = Table B: HLA-DQA1*01:02-B1*06:02L HLA-DQA1*05:05-B1*03:19L HLA-DQA1*05:01-B1*02:01L HLA-DPA1*03:01-B1*105:01L HLA-DPA1*01:03-B1*104:01L HLA-DRB1*15:03L
AAIMQLFFSY

SEQ ID NO: 17881 - protein, 10 aa, Severe acute respiratory syndrome coronavirus 2
  REGION 1..10: note = Table B: HLA-DQA1*01:02-B1*06:02L
RMYIFFASFY

SEQ ID NO: 17882 - protein, 10 aa, Severe acute respiratory syndrome coronavirus 2
  REGION 1..10: note = Table B: HLA-DQA1*01:02-B1*06:02L HLA-DRB4*01:01L
MYIFFASFYY

SEQ ID NO: 17883 - protein, 10 aa, Severe acute respiratory syndrome coronavirus 2
  REGION 1..10: note = Table B: HLA-DQA1*01:02-B1*06:02L HLA-DPA1*01:03-B1*03:01L HLA-DQA1*01-B1*05L HLA-DQA1*05:05-B1*03:19L HLA-DQA1*05:01-B1*02:01L HLA-DPA1*01:03-B1*04:01L HLA-DPA1*01:03-B1*104:01L HLA-DQA1*01:03-B1*06:01L
  REGION 1..10: note = CONT. FROM ABOVE: HLA-DQA1*02:01-B1*03:03L
ASFYYVWKSY

SEQ ID NO: 17884 - protein, 12 aa, Severe acute respiratory syndrome coronavirus 2
  REGION 1..12: note = Table B: HLA-DQA1*01:02-B1*06:02L
YVHVVDGCNSST

SEQ ID NO: 17885 - protein, 12 aa, Severe acute respiratory syndrome coronavirus 2
  REGION 1..12: note = Table B: HLA-DQA1*01:02-B1*06:02L
HVVDGCNSSTCM

SEQ ID NO: 17886 - protein, 12 aa, Severe acute respiratory syndrome coronavirus 2
  REGION 1..12: note = Table B: HLA-DQA1*01:02-B1*06:02L
VVDGCNSSTCMM

SEQ ID NO: 17887 - protein, 13 aa, Severe acute respiratory syndrome coronavirus 2
  REGION 1..13: note = Table B: HLA-DQA1*01:02-B1*06:02L
DGCNSSTCMMCYK

SEQ ID NO: 17888 - protein, 12 aa, Severe acute respiratory syndrome coronavirus 2
  REGION 1..12: note = Table B: HLA-DQA1*01:02-B1*06:02L HLA-DQA1*01:03-B1*06:01L
NSSTCMMCYKRN

SEQ ID NO: 17889 - protein, 10 aa, Severe acute respiratory syndrome coronavirus 2
  REGION 1..10: note = Table B: HLA-DQA1*01:02-B1*06:02L HLA-DQA1*01:03-B1*06:01L HLA-DQA1*02:01-B1*03:03L
ECTTIVNGVR

SEQ ID NO: 17890 - protein, 11 aa, Severe acute respiratory syndrome coronavirus 2
  REGION 1..11: note = Table B: HLA-DQA1*01:02-B1*06:02L HLA-DRB1*08:01L HLA-DQA1*05:05-B1*03:19L HLA-DRB1*04:10L HLA-DPA1*03:01-B1*105:01L HLA-DQA1*05:05-B1*03:01L
SFYVYANGGKG

SEQ ID NO: 17891 - protein, 12 aa, Severe acute respiratory syndrome coronavirus 2
  REGION 1..12: note = Table B: HLA-DQA1*01:02-B1*06:02L
GGKGFCKLHNWN

SEQ ID NO: 17892 - protein, 14 aa, Severe acute respiratory syndrome coronavirus 2
  REGION 1..14: note = Table B: HLA-DQA1*01:02-B1*06:02L
WNCVNCDTFCAGST

SEQ ID NO: 17893 - protein, 14 aa, Severe acute respiratory syndrome coronavirus 2
  REGION 1..14: note = Table B: HLA-DQA1*01:02-B1*06:02L HLA-DQA1*05:05-B1*03:01L HLA-DQA1*01:03-B1*06:01L
DTFCAGSTFISDEV

SEQ ID NO: 17894 - protein, 14 aa, Severe acute respiratory syndrome coronavirus 2
  REGION 1..14: note = Table B: HLA-DQA1*01:02-B1*06:02L HLA-DQA1*01:03-B1*06:01L
TFCAGSTFISDEVA

SEQ ID NO: 17895 - protein, 12 aa, Severe acute respiratory syndrome coronavirus 2
  REGION 1..12: note = Table B: HLA-DQA1*01:02-B1*06:02L HLA-DQA1*01:01-B1*05:01L HLA-DPA1*03:01-B1*105:01L HLA-DQA1*05:05-B1*03:01L
ISDEVARDLSLQ

SEQ ID NO: 17896 - protein, 13 aa, Severe acute respiratory syndrome coronavirus 2
  REGION 1..13: note = Table B: HLA-DQA1*01:02-B1*06:02L
PTDQSSYIVDSVT

SEQ ID NO: 17897 - protein, 13 aa, Severe acute respiratory syndrome coronavirus 2
  REGION 1..13: note = Table B: HLA-DQA1*01:02-B1*06:02L HLA-DRB1*01:01L HLA-DRB1*08:01L HLA-DRB4*01:01L HLA-DPA1*01:03-B1*04:02L HLA-DPA1*02:01-B1*13:01L HLA-DRB1*07:01L
SSYIVDSVTVKNG

SEQ ID NO: 17898 - protein, 12 aa, Severe acute respiratory syndrome coronavirus 2
  REGION 1..12: note = Table B: HLA-DQA1*01:02-B1*06:02L HLA-DQA1*05:05-B1*03:19L
YIVDSVTVKNGS

SEQ ID NO: 17899 - protein, 12 aa, Severe acute respiratory syndrome coronavirus 2
  REGION 1..12: note = Table B: HLA-DQA1*01:02-B1*06:02L HLA-DQA1*05:05-B1*03:19L HLA-DPA1*03:01-B1*105:01L HLA-DQA1*05:05-B1*03:01L HLA-DQA1*01:03-B1*06:01L
IVDSVTVKNGSI

SEQ ID NO: 17900 - protein, 11 aa, Severe acute respiratory syndrome coronavirus 2
  REGION 1..11: note = Table B: HLA-DQA1*01:02-B1*06:02L
VKNGSIHLYFD

SEQ ID NO: 17901 - protein, 12 aa, Severe acute respiratory syndrome coronavirus 2
  REGION 1..12: note = Table B: HLA-DQA1*01:02-B1*06:02L
KNGSIHLYFDKA

SEQ ID NO: 17902 - protein, 12 aa, Severe acute respiratory syndrome coronavirus 2
  REGION 1..12: note = Table B: HLA-DQA1*01:02-B1*06:02L HLA-DQA1*03:01-B1*03:02L HLA-DRB1*16:01L HLA-DRB1*15:03L
NGSIHLYFDKAG

SEQ ID NO: 17903 - protein, 13 aa, Severe acute respiratory syndrome coronavirus 2
  REGION 1..13: note = Table B: HLA-DQA1*01:02-B1*06:02L HLA-DRB1*01:02L HLA-DQA1*02:01-B1*03:03L
FDKAGQKTYERHS

SEQ ID NO: 17904 - protein, 15 aa, Severe acute respiratory syndrome coronavirus 2
  REGION 1..15: note = Table B: HLA-DQA1*01:02-B1*06:02L HLA-DRB1*14:01L HLA-DRB1*11:04L HLA-DRB1*11:01L HLA-DPA1*02:01-B1*13:01L HLA-DRB1*15:03L
DKAGQKTYERHSLSH

SEQ ID NO: 17905 - protein, 12 aa, Severe acute respiratory syndrome coronavirus 2
  REGION 1..12: note = Table B: HLA-DQA1*01:02-B1*06:02L
SLSHFVNLDNLR

SEQ ID NO: 17906 - protein, 13 aa, Severe acute respiratory syndrome coronavirus 2
  REGION 1..13: note = Table B: HLA-DQA1*01:02-B1*06:02L HLA-DRB1*14:01L
LRANNTKGSLPIN

SEQ ID NO: 17907 - protein, 10 aa, Severe acute respiratory syndrome coronavirus 2
  REGION 1..10: note = Table B: HLA-DQA1*01:02-B1*06:02L HLA-DRB1*14:02L HLA-DQA1*05:05-B1*03:19L HLA-DPA1*02:01-B1*13:01L HLA-DPA1*03:01-B1*105:01L HLA-DQA1*01:03-B1*06:01L HLA-DQA1*02:01-B1*03:03L HLA-DRB1*15:03L
GSLPINVIVF

SEQ ID NO: 17908 - protein, 12 aa, Severe acute respiratory syndrome coronavirus 2
  REGION 1..12: note = Table B: HLA-DQA1*01:02-B1*06:02L HLA-DRB1*01:02L
PINVIVFDGKSK

SEQ ID NO: 17909 - protein, 12 aa, Severe acute respiratory syndrome coronavirus 2
  REGION 1..12: note = Table B: HLA-DQA1*01:02-B1*06:02L HLA-DQA1*01:03-B1*06:01L
DGKSKCEESSAK

SEQ ID NO: 17910 - protein, 14 aa, Severe acute respiratory syndrome coronavirus 2
  REGION 1..14: note = Table B: HLA-DQA1*01:02-B1*06:02L HLA-DPA1*03:01-B1*105:01L
SASVYYSQLMCQPI

SEQ ID NO: 17911 - protein, 12 aa, Severe acute respiratory syndrome coronavirus 2
  REGION 1..12: note = Table B: HLA-DQA1*01:02-B1*06:02L HLA-DRB1*01:02L HLA-DPA1*03:01-B1*04:02L HLA-DQA1*05:05-B1*03:19L HLA-DRB1*12:01L HLA-DPA1*03:01-B1*105:01L HLA-DQA1*05:05-B1*03:01L HLA-DRB1*15:03L
VYYSQLMCQPIL

SEQ ID NO: 17912 - protein, 12 aa, Severe acute respiratory syndrome coronavirus 2
  REGION 1..12: note = Table B: HLA-DQA1*01:02-B1*06:02L HLA-DPA1*03:01-B1*105:01L
QLMCQPILLLDQ

SEQ ID NO: 17913 - protein, 12 aa, Severe acute respiratory syndrome coronavirus 2
  REGION 1..12: note = Table B: HLA-DQA1*01:02-B1*06:02L HLA-DPA1*03:01-B1*105:01L
LMCQPILLLDQA

SEQ ID NO: 17914 - protein, 12 aa, Severe acute respiratory syndrome coronavirus 2
  REGION 1..12: note = Table B: HLA-DQA1*01:02-B1*06:02L
TFNVPMEKLKTL

SEQ ID NO: 17915 - protein, 14 aa, Severe acute respiratory syndrome coronavirus 2
  REGION 1..14: note = Table B: HLA-DQA1*01:02-B1*06:02L
FNVPMEKLKTLVAT

SEQ ID NO: 17916 - protein, 13 aa, Severe acute respiratory syndrome coronavirus 2
  REGION 1..13: note = Table B: HLA-DQA1*01:02-B1*06:02L HLA-DRB1*01:02L
KLKTLVATAEAEL

SEQ ID NO: 17917 - protein, 13 aa, Severe acute respiratory syndrome coronavirus 2
  REGION 1..13: note = Table B: HLA-DQA1*01:02-B1*06:02L HLA-DRB1*01:02L HLA-DQA1*05:05-B1*03:19L HLA-DQA1*05:05-B1*03:01L
LKTLVATAEAELA

SEQ ID NO: 17918 - protein, 12 aa, Severe acute respiratory syndrome coronavirus 2
  REGION 1..12: note = Table B: HLA-DQA1*01:02-B1*06:02L HLA-DRB1*14:01L HLA-DRB1*12:01L HLA-DPA1*03:01-B1*105:01L HLA-DRB1*16:01L HLA-DRB1*15:03L
ELAKNVSLDNVL

SEQ ID NO: 17919 - protein, 11 aa, Severe acute respiratory syndrome coronavirus 2
  REGION 1..11: note = Table B: HLA-DQA1*01:02-B1*06:02L
VLSTFISAARQ

SEQ ID NO: 17920 - protein, 14 aa, Severe acute respiratory syndrome coronavirus 2
  REGION 1..14: note = Table B: HLA-DQA1*01:02-B1*06:02L HLA-DRB1*08:01L HLA-DRB3*01:01L HLA-DPA1*01:02-B1*04:01L
ARQGFVDSDVETKD

SEQ ID NO: 17921 - protein, 12 aa, Severe acute respiratory syndrome coronavirus 2
  REGION 1..12: note = Table B: HLA-DQA1*01:02-B1*06:02L HLA-DPA1*01:03-B1*03:01L HLA-DPA1*02:01-B1*13:01L HLA-DRB1*15:03L
FVDSDVETKDVV

SEQ ID NO: 17922 - protein, 12 aa, Severe acute respiratory syndrome coronavirus 2
  REGION 1..12: note = Table B: HLA-DQA1*01:02-B1*06:02L HLA-DQA1*01:03-B1*06:01L
DVETKDVVECLK

SEQ ID NO: 17923 - protein, 12 aa, Severe acute respiratory syndrome coronavirus 2
  REGION 1..12: note = Table B: HLA-DQA1*01:02-B1*06:02L HLA-DRB1*14:01L HLA-DRB1*08:01L
KDVVECLKLSHQ

SEQ ID NO: 17924 - protein, 12 aa, Severe acute respiratory syndrome coronavirus 2
  REGION 1..12: note = Table B: HLA-DQA1*01:02-B1*06:02L
DVVECLKLSHQS

SEQ ID NO: 17925 - protein, 12 aa, Severe acute respiratory syndrome coronavirus 2
  REGION 1..12: note = Table B: HLA-DQA1*01:02-B1*06:02L HLA-DQA1*01:03-B1*06:01L
VVECLKLSHQSD

SEQ ID NO: 17926 - protein, 13 aa, Severe acute respiratory syndrome coronavirus 2
  REGION 1..13: note = Table B: HLA-DQA1*01:02-B1*06:02L
VECLKLSHQSDIE

SEQ ID NO: 17927 - protein, 15 aa, Severe acute respiratory syndrome coronavirus 2
  REGION 1..15: note = Table B: HLA-DQA1*01:02-B1*06:02L
VTGDSCNNYMLTYNK

SEQ ID NO: 17928 - protein, 14 aa, Severe acute respiratory syndrome coronavirus 2
  REGION 1..14: note = Table B: HLA-DQA1*01:02-B1*06:02L HLA-DPA1*03:01-B1*105:01L
DSCNNYMLTYNKVE

SEQ ID NO: 17929 - protein, 13 aa, Severe acute respiratory syndrome coronavirus 2
  REGION 1..13: note = Table B: HLA-DQA1*01:02-B1*06:02L
YMLTYNKVENMTP

SEQ ID NO: 17930 - protein, 12 aa, Severe acute respiratory syndrome coronavirus 2
  REGION 1..12: note = Table B: HLA-DQA1*01:02-B1*06:02L HLA-DRB1*01:02L HLA-DQA1*01-B1*05L HLA-DPA1*03:01-B1*105:01L
TYNKVENMTPRD

SEQ ID NO: 17931 - protein, 11 aa, Severe acute respiratory syndrome coronavirus 2
  REGION 1..11: note = Table B: HLA-DQA1*01:02-B1*06:02L HLA-DQA1*01:03-B1*06:01L
DLGACIDCSAR

SEQ ID NO: 17932 - protein, 12 aa, Severe acute respiratory syndrome coronavirus 2
  REGION 1..12: note = Table B: HLA-DQA1*01:02-B1*06:02L
GACIDCSARHIN

SEQ ID NO: 17933 - protein, 13 aa, Severe acute respiratory syndrome coronavirus 2
  REGION 1..13: note = Table B: HLA-DQA1*01:02-B1*06:02L
ACIDCSARHINAQ

SEQ ID NO: 17934 - protein, 14 aa, Severe acute respiratory syndrome coronavirus 2
  REGION 1..14: note = Table B: HLA-DQA1*01:02-B1*06:02L HLA-DRB1*01:02L
IDCSARHINAQVAK

SEQ ID NO: 17935 - protein, 11 aa, Severe acute respiratory syndrome coronavirus 2
  REGION 1..11: note = Table B: HLA-DQA1*01:02-B1*06:02L HLA-DQA1*02:01-B1*03:03L
VAKSHNIALIW

SEQ ID NO: 17936 - protein, 12 aa, Severe acute respiratory syndrome coronavirus 2
  REGION 1..12: note = Table B: HLA-DQA1*01:02-B1*06:02L
KSHNIALIWNVK

SEQ ID NO: 17937 - protein, 12 aa, Severe acute respiratory syndrome coronavirus 2
  REGION 1..12: note = Table B: HLA-DQA1*01:02-B1*06:02L
MSLSEQLRKQIR

SEQ ID NO: 17938 - protein, 14 aa, Severe acute respiratory syndrome coronavirus 2
  REGION 1..14: note = Table B: HLA-DQA1*01:02-B1*06:02L HLA-DRB1*08:04L HLA-DRB1*11:04L HLA-DRB1*11:01L HLA-DRB3*01:01L
RKQIRSAAKKNNLP

SEQ ID NO: 17939 - protein, 10 aa, Severe acute respiratory syndrome coronavirus 2
  REGION 1..10: note = Table B: HLA-DQA1*01:02-B1*06:02L HLA-DQA1*02:01-B1*03:03L
SAAKKNNLPF

SEQ ID NO: 17940 - protein, 16 aa, Severe acute respiratory syndrome coronavirus 2
  REGION 1..16: note = Table B: HLA-DQA1*01:02-B1*06:02L
AAKKNNLPFKLTCATT

SEQ ID NO: 17941 - protein, 14 aa, Severe acute respiratory syndrome coronavirus 2
  REGION 1..14: note = Table B: HLA-DQA1*01:02-B1*06:02L
NNLPFKLTCATTRQ

SEQ ID NO: 17942 - protein, 14 aa, Severe acute respiratory syndrome coronavirus 2
  REGION 1..14: note = Table B: HLA-DQA1*01:02-B1*06:02L HLA-DQA1*01:03-B1*06:01L
LPFKLTCATTRQVV

SEQ ID NO: 17943 - protein, 10 aa, Severe acute respiratory syndrome coronavirus 2
  REGION 1..10: note = Table B: HLA-DQA1*01:02-B1*06:02L HLA-DQA1*01:03-B1*06:01L
TCATTRQVVN

SEQ ID NO: 17944 - protein, 12 aa, Severe acute respiratory syndrome coronavirus 2
  REGION 1..12: note = Table B: HLA-DQA1*01:02-B1*06:02L
VVNVVTTKIALK

SEQ ID NO: 17945 - protein, 12 aa, Severe acute respiratory syndrome coronavirus 2
  REGION 1..12: note = Table B: HLA-DQA1*01:02-B1*06:02L
NVVTTKIALKGG

SEQ ID NO: 17946 - protein, 14 aa, Severe acute respiratory syndrome coronavirus 2
  REGION 1..14: note = Table B: HLA-DQA1*01:02-B1*06:02L HLA-DRB3*02:01L HLA-DPA1*01:03-B1*03:01L HLA-DPA1*02:01-B1*13:01L HLA-DPA1*03:01-B1*105:01L HLA-DPA1*01:02-B1*04:01L HLA-DQA1*01:03-B1*06:01L
VTTKIALKGGKIVN

SEQ ID NO: 17947 - protein, 10 aa, Severe acute respiratory syndrome coronavirus 2
  REGION 1..10: note = Table B: HLA-DQA1*01:02-B1*06:02L HLA-DQA1*01:03-B1*06:01L HLA-DQA1*02:01-B1*03:03L
LKGGKIVNNW

SEQ ID NO: 17948 - protein, 13 aa, Severe acute respiratory syndrome coronavirus 2
  REGION 1..13: note = Table B: HLA-DQA1*01:02-B1*06:02L HLA-DPA1*03:01-B1*105:01L
IVNNWLKQLIKVT

SEQ ID NO: 17949 - protein, 10 aa, Severe acute respiratory syndrome coronavirus 2
  REGION 1..10: note = Table B: HLA-DQA1*01:02-B1*06:02L
WLKQLIKVTL

SEQ ID NO: 17950 - protein, 12 aa, Severe acute respiratory syndrome coronavirus 2
  REGION 1..12: note = Table B: HLA-DQA1*01:02-B1*06:02L HLA-DQA1*01:03-B1*06:01L HLA-DRB1*04:08L
YLITPVHVMSKH

SEQ ID NO: 17951 - protein, 12 aa, Severe acute respiratory syndrome coronavirus 2
  REGION 1..12: note = Table B: HLA-DQA1*01:02-B1*06:02L HLA-DRB1*01:02L HLA-DRB1*16:01L HLA-DQA1*01:03-B1*06:01L HLA-DRB1*15:03L
LITPVHVMSKHT

SEQ ID NO: 17952 - protein, 12 aa, Severe acute respiratory syndrome coronavirus 2
  REGION 1..12: note = Table B: HLA-DQA1*01:02-B1*06:02L HLA-DRB1*08:04L HLA-DRB1*11:04L HLA-DRB1*11:01L HLA-DRB1*04:08L
TPVHVMSKHTDF

SEQ ID NO: 17953 - protein, 12 aa, Severe acute respiratory syndrome coronavirus 2
  REGION 1..12: note = Table B: HLA-DQA1*01:02-B1*06:02L HLA-DRB1*08:04L HLA-DRB1*08:01L
PVHVMSKHTDFS

SEQ ID NO: 17954 - protein, 13 aa, Severe acute respiratory syndrome coronavirus 2
  REGION 1..13: note = Table B: HLA-DQA1*01:02-B1*06:02L
MSKHTDFSSEIIG

SEQ ID NO: 17955 - protein, 12 aa, Severe acute respiratory syndrome coronavirus 2
  REGION 1..12: note = Table B: HLA-DQA1*01:02-B1*06:02L
FSSEIIGYKAID

SEQ ID NO: 17956 - protein, 12 aa, Severe acute respiratory syndrome coronavirus 2
  REGION 1..12: note = Table B: HLA-DQA1*01:02-B1*06:02L HLA-DRB1*01:02L HLA-DRB1*12:01L HLA-DPA1*03:01-B1*105:01L
EIIGYKAIDGGV

SEQ ID NO: 17957 - protein, 12 aa, Severe acute respiratory syndrome coronavirus 2
  REGION 1..12: note = Table B: HLA-DQA1*01:02-B1*06:02L HLA-DQA1*01:03-B1*06:01L
STDTCFANKHAD

SEQ ID NO: 17958 - protein, 12 aa, Severe acute respiratory syndrome coronavirus 2
  REGION 1..12: note = Table B: HLA-DQA1*01:02-B1*06:02L HLA-DQA1*01:03-B1*06:01L
TDTCFANKHADF

SEQ ID NO: 17959 - protein, 12 aa, Severe acute respiratory syndrome coronavirus 2
  REGION 1..12: note = Table B: HLA-DQA1*01:02-B1*06:02L HLA-DRB1*08:01L HLA-DQA1*01:03-B1*06:01L
DTCFANKHADFD

SEQ ID NO: 17960 - protein, 10 aa, Severe acute respiratory syndrome coronavirus 2
  REGION 1..10: note = Table B: HLA-DQA1*01:02-B1*06:02L HLA-DQA1*02:01-B1*03:03L
ANKHADFDTW

SEQ ID NO: 17961 - protein, 15 aa, Severe acute respiratory syndrome coronavirus 2
  REGION 1..15: note = Table B: HLA-DQA1*01:02-B1*06:02L HLA-DPA1*02:01-B1*13:01L
NKHADFDTWFSQRGG

SEQ ID NO: 17962 - protein, 13 aa, Severe acute respiratory syndrome coronavirus 2
  REGION 1..13: note = Table B: HLA-DQA1*01:02-B1*06:02L HLA-DQA1*05:05-B1*03:01L
WFSQRGGSYTNDK

SEQ ID NO: 17963 - protein, 13 aa, Severe acute respiratory syndrome coronavirus 2
  REGION 1..13: note = Table B: HLA-DQA1*01:02-B1*06:02L HLA-DQA1*05:05-B1*03:01L HLA-DQA1*01:03-B1*06:01L
FSQRGGSYTNDKA

SEQ ID NO: 17964 - protein, 14 aa, Severe acute respiratory syndrome coronavirus 2
  REGION 1..14: note = Table B: HLA-DQA1*01:02-B1*06:02L
YTNDKACPLIAAVI

SEQ ID NO: 17965 - protein, 10 aa, Severe acute respiratory syndrome coronavirus 2
  REGION 1..10: note = Table B: HLA-DQA1*01:02-B1*06:02L HLA-DPA1*03:01-B1*105:01L HLA-DQA1*01:03-B1*06:01L HLA-DQA1*02:01-B1*03:03L
AAVITREVGF

SEQ ID NO: 17966 - protein, 13 aa, Severe acute respiratory syndrome coronavirus 2
  REGION 1..13: note = Table B: HLA-DQA1*01:02-B1*06:02L
TREVGFVVPGLPG

SEQ ID NO: 17967 - protein, 13 aa, Severe acute respiratory syndrome coronavirus 2
  REGION 1..13: note = Table B: HLA-DQA1*01:02-B1*06:02L HLA-DQA1*05:05-B1*03:01L
VPGLPGTILRTTN

SEQ ID NO: 17968 - protein, 12 aa, Severe acute respiratory syndrome coronavirus 2
  REGION 1..12: note = Table B: HLA-DQA1*01:02-B1*06:02L HLA-DQA1*03:01-B1*03:02L HLA-DQA1*02:01-B1*03:03L
LPGTILRTTNGD

SEQ ID NO: 17969 - protein, 10 aa, Severe acute respiratory syndrome coronavirus 2
  REGION 1..10: note = Table B: HLA-DQA1*01:02-B1*06:02L HLA-DQA1*05:05-B1*03:19L HLA-DQA1*05:01-B1*02:01L HLA-DRB4*01:01L HLA-DPA1*01:03-B1*04:01L HLA-DPA1*02:01-B1*13:01L HLA-DQA1*01:03-B1*06:01L
VFSAVGNICY

SEQ ID NO: 17970 - protein, 12 aa, Severe acute respiratory syndrome coronavirus 2
  REGION 1..12: note = Table B: HLA-DQA1*01:02-B1*06:02L HLA-DQA1*01:03-B1*06:01L HLA-DQA1*02:01-B1*03:03L
SAVGNICYTPSK

SEQ ID NO: 17971 - protein, 11 aa, Severe acute respiratory syndrome coronavirus 2
  REGION 1..11: note = Table B: HLA-DQA1*01:02-B1*06:02L HLA-DPA1*01:03-B1*03:01L HLA-DRB1*03:01L HLA-DRB1*14:02L HLA-DQA1*01-B1*05L HLA-DRB4*01:01L HLA-DPA1*01:03-B1*04:01L HLA-DPA1*01:03-B1*04:02L HLA-DPA1*02:01-B1*13:01L
  REGION 1..11: note = CONT. FROM ABOVE: HLA-DPA1*03:01-B1*105:01L HLA-DPA1*01:03-B1*10 4:01L HLA-DQA1*05:05-B1*03:01L HLA-DQA1*01:03-B1*06:01L
ICYTPSKLIEY

SEQ ID NO: 17972 - protein, 12 aa, Severe acute respiratory syndrome coronavirus 2
  REGION 1..12: note = Table B: HLA-DQA1*01:02-B1*06:02L HLA-DPA1*03:01-B1*04:02L HLA-DQA1*05:01-B1*02:01L HLA-DRB1*12:01L HLA-DPA1*03:01-B1*105:01L HLA-DPA1*01:02-B1*04:01L HLA-DRB1*15:03L
YTPSKLIEYTDF

SEQ ID NO: 17973 - protein, 14 aa, Severe acute respiratory syndrome coronavirus 2
  REGION 1..14: note = Table B: HLA-DQA1*01:02-B1*06:02L HLA-DQA1*05:05-B1*03:01L
IEYTDFATSACVLA

SEQ ID NO: 17974 - protein, 11 aa, Severe acute respiratory syndrome coronavirus 2
  REGION 1..11: note = Table B: HLA-DQA1*01:02-B1*06:02L HLA-DQA1*01:03-B1*06:01L
FATSACVLAAE

SEQ ID NO: 17975 - protein, 12 aa, Severe acute respiratory syndrome coronavirus 2
  REGION 1..12: note = Table B: HLA-DQA1*01:02-B1*06:02L HLA-DQA1*01:03-B1*06:01L
ATSACVLAAECT

SEQ ID NO: 17976 - protein, 14 aa, Severe acute respiratory syndrome coronavirus 2
  REGION 1..14: note = Table B: HLA-DQA1*01:02-B1*06:02L
TSACVLAAECTIFK

SEQ ID NO: 17977 - protein, 10 aa, Severe acute respiratory syndrome coronavirus 2
  REGION 1..10: note = Table B: HLA-DQA1*01:02-B1*06:02L HLA-DQA1*01:03-B1*06:01L
AAECTIFKDA

SEQ ID NO: 17978 - protein, 10 aa, Severe acute respiratory syndrome coronavirus 2
  REGION 1..10: note = Table B: HLA-DQA1*01:02-B1*06:02L HLA-DQA1*05:05-B1*03:19L HLA-DQA1*05:05-B1*03:01L HLA-DQA1*01:03-B1*06:01L
DASGKPVPYC

SEQ ID NO: 17979 - protein, 10 aa, Severe acute respiratory syndrome coronavirus 2
  REGION 1..10: note = Table B: HLA-DQA1*01:02-B1*06:02L HLA-DQA1*05:05-B1*03:19L
ASGKPVPYCY

SEQ ID NO: 17980 - protein, 12 aa, Severe acute respiratory syndrome coronavirus 2
  REGION 1..12: note = Table B: HLA-DQA1*01:02-B1*06:02L
SGKPVPYCYDTN

SEQ ID NO: 17981 - protein, 12 aa, Severe acute respiratory syndrome coronavirus 2
  REGION 1..12: note = Table B: HLA-DQA1*01:02-B1*06:02L
CYDTNVLEGSVA

SEQ ID NO: 17982 - protein, 11 aa, Severe acute respiratory syndrome coronavirus 2
  REGION 1..11: note = Table B: HLA-DQA1*01:02-B1*06:02L
EGSVAYESLRP

SEQ ID NO: 17983 - protein, 11 aa, Severe acute respiratory syndrome coronavirus 2
  REGION 1..11: note = Table B: HLA-DQA1*01:02-B1*06:02L
SVAYESLRPDT

SEQ ID NO: 17984 - protein, 11 aa, Severe acute respiratory syndrome coronavirus 2
  REGION 1..11: note = Table B: HLA-DQA1*01:02-B1*06:02L HLA-DRB1*01:02L HLA-DQA1*01:01-B1*05:01L HLA-DRB1*08:01L HLA-DRB1*12:01L HLA-DQA1*05:05-B1*03:01L HLA-DRB1*04:08L
VAYESLRPDTR

SEQ ID NO: 17985 - protein, 14 aa, Severe acute respiratory syndrome coronavirus 2
  REGION 1..14: note = Table B: HLA-DQA1*01:02-B1*06:02L
LRPDTRYVLMDGSI

SEQ ID NO: 17986 - protein, 14 aa, Severe acute respiratory syndrome coronavirus 2
  REGION 1..14: note = Table B: HLA-DQA1*01:02-B1*06:02L HLA-DPA1*02:01-B1*13:01L HLA-DRB1*16:01L
RPDTRYVLMDGSII

SEQ ID NO: 17987 - protein, 10 aa, Severe acute respiratory syndrome coronavirus 2
  REGION 1..10: note = Table B: HLA-DQA1*01:02-B1*06:02L HLA-DQA1*02:01-B1*03:03L
EGSVRVVTTF

SEQ ID NO: 17988 - protein, 12 aa, Severe acute respiratory syndrome coronavirus 2
  REGION 1..12: note = Table B: HLA-DQA1*01:02-B1*06:02L
DSEYCRHGTCER

SEQ ID NO: 17989 - protein, 13 aa, Severe acute respiratory syndrome coronavirus 2
  REGION 1..13: note = Table B: HLA-DQA1*01:02-B1*06:02L
YCRHGTCERSEAG

SEQ ID NO: 17990 - protein, 11 aa, Severe acute respiratory syndrome coronavirus 2
  REGION 1..11: note = Table B: HLA-DQA1*01:02-B1*06:02L HLA-DQA1*05:05-B1*03:01L HLA-DQA1*01:03-B1*06:01L
EAGVCVSTSGR

SEQ ID NO: 17991 - protein, 12 aa, Severe acute respiratory syndrome coronavirus 2
  REGION 1..12: note = Table B: HLA-DQA1*01:02-B1*06:02L
AGVCVSTSGRWV

SEQ ID NO: 17992 - protein, 12 aa, Severe acute respiratory syndrome coronavirus 2
  REGION 1..12: note = Table B: HLA-DQA1*01:02-B1*06:02L HLA-DQA1*02:01-B1*03:03L
VSTSGRWVLNND

SEQ ID NO: 17993 - protein, 11 aa, Severe acute respiratory syndrome coronavirus 2
  REGION 1..11: note = Table B: HLA-DQA1*01:02-B1*06:02L HLA-DQA1*05:01-B1*02:01L
TSGRWVLNNDY

SEQ ID NO: 17994 - protein, 10 aa, Severe acute respiratory syndrome coronavirus 2
  REGION 1..10: note = Table B: HLA-DQA1*01:02-B1*06:02L HLA-DPA1*01:03-B1*03:01L HLA-DQA1*05:05-B1*03:19L HLA-DQA1*05:01-B1*02:01L HLA-DRB1*16:01L HLA-DQA1*02:01-B1*03:03L
GRWVLNNDYY

SEQ ID NO: 17995 - protein, 14 aa, Severe acute respiratory syndrome coronavirus 2
  REGION 1..14: note = Table B: HLA-DQA1*01:02-B1*06:02L HLA-DPA1*03:01-B1*105:01L HLA-DQA1*01:03-B1*06:01L
RSLPGVFCGVDAVN

SEQ ID NO: 17996 - protein, 13 aa, Severe acute respiratory syndrome coronavirus 2
  REGION 1..13: note = Table B: HLA-DQA1*01:02-B1*06:02L HLA-DQA1*01-B1*05L HLA-DQA1*05:01-B1*02:01L HLA-DPA1*03:01-B1*105:01L HLA-DRB1*16:01L HLA-DQA1*01:03-B1*06:01L HLA-DRB1*04:08L
VNLLTNMFTPLIQ

SEQ ID NO: 17997 - protein, 13 aa, Severe acute respiratory syndrome coronavirus 2
  REGION 1..13: note = Table B: HLA-DQA1*01:02-B1*06:02L
LLTNMFTPLIQPI

SEQ ID NO: 17998 - protein, 13 aa, Severe acute respiratory syndrome coronavirus 2
  REGION 1..13: note = Table B: HLA-DQA1*01:02-B1*06:02L
QPIGALDISASIV

SEQ ID NO: 17999 - protein, 15 aa, Severe acute respiratory syndrome coronavirus 2
  REGION 1..15: note = Table B: HLA-DQA1*01:02-B1*06:02L
PIGALDISASIVAGG

SEQ ID NO: 18000 - protein, 11 aa, Severe acute respiratory syndrome coronavirus 2
  REGION 1..11: note = Table B: HLA-DQA1*01:02-B1*06:02L HLA-DQA1*01:03-B1*06:01L
DISASIVAGGI

SEQ ID NO: 18001 - protein, 11 aa, Severe acute respiratory syndrome coronavirus 2
  REGION 1..11: note = Table B: HLA-DQA1*01:02-B1*06:02L
IVAGGIVAIVV

SEQ ID NO: 18002 - protein, 11 aa, Severe acute respiratory syndrome coronavirus 2
  REGION 1..11: note = Table B: HLA-DQA1*01:02-B1*06:02L
VVTCLAYYFMR

SEQ ID NO: 18003 - protein, 13 aa, Severe acute respiratory syndrome coronavirus 2
  REGION 1..13: note = Table B: HLA-DQA1*01:02-B1*06:02L
YYFMRFRRAFGEY

SEQ ID NO: 18004 - protein, 10 aa, Severe acute respiratory syndrome coronavirus 2
  REGION 1..10: note = Table B: HLA-DQA1*01:02-B1*06:02L HLA-DQA1*05:05-B1*03:19L HLA-DQA1*05:01-B1*02:01L
FGEYSHVVAF

SEQ ID NO: 18005 - protein, 14 aa, Severe acute respiratory syndrome coronavirus 2
  REGION 1..14: note = Table B: HLA-DQA1*01:02-B1*06:02L HLA-DPA1*01:03-B1*04:02L
LMSFTVLCLTPVYS

SEQ ID NO: 18006 - protein, 14 aa, Severe acute respiratory syndrome coronavirus 2
  REGION 1..14: note = Table B: HLA-DQA1*01:02-B1*06:02L HLA-DRB1*01:02L HLA-DRB1*12:01L HLA-DPA1*03:01-B1*105:01L HLA-DRB1*15:03L
TVLCLTPVYSFLPG

SEQ ID NO: 18007 - protein, 10 aa, Severe acute respiratory syndrome coronavirus 2
  REGION 1..10: note = Table B: HLA-DQA1*01:02-B1*06:02L HLA-DQA1*05:05-B1*03:19L HLA-DQA1*05:01-B1*02:01L HLA-DPA1*01:03-B1*04:01L HLA-DPA1*02:01-B1*13:01L HLA-DPA1*03:01-B1*105:01L HLA-DRB1*16:01L HLA-DQA1*01:03-B1*06:01L
  REGION 1..10: note = CONT. FROM ABOVE: HLA-DQA1*02:01-B1*03:03L HLA-DRB1*15:03L
PVYSFLPGVY

SEQ ID NO: 18008 - protein, 10 aa, Severe acute respiratory syndrome coronavirus 2
  REGION 1..10: note = Table B: HLA-DQA1*01:02-B1*06:02L HLA-DQA1*05:05-B1*03:19L
PGVYSVIYLY

SEQ ID NO: 18009 - protein, 10 aa, Severe acute respiratory syndrome coronavirus 2
  REGION 1..10: note = Table B: HLA-DQA1*01:02-B1*06:02L
SVIYLYLTFY

SEQ ID NO: 18010 - protein, 10 aa, Severe acute respiratory syndrome coronavirus 2
  REGION 1..10: note = Table B: HLA-DQA1*01:02-B1*06:02L HLA-DPA1*03:01-B1*04:02L HLA-DPA1*03:01-B1*105:01L HLA-DPA1*01:02-B1*04:01L HLA-DQA1*01:03-B1*06:01L HLA-DRB1*15:03L
FLAHIQWMVM

SEQ ID NO: 18011 - protein, 13 aa, Severe acute respiratory syndrome coronavirus 2
  REGION 1..13: note = Table B: HLA-DQA1*01:02-B1*06:02L HLA-DPA1*01:02-B1*04:01L
LAHIQWMVMFTPL

SEQ ID NO: 18012 - protein, 14 aa, Severe acute respiratory syndrome coronavirus 2
  REGION 1..14: note = Table B: HLA-DQA1*01:02-B1*06:02L HLA-DPA1*01:03-B1*04:02L HLA-DRB1*12:01L HLA-DPA1*01:02-B1*04:01L
AHIQWMVMFTPLVP

SEQ ID NO: 18013 - protein, 10 aa, Severe acute respiratory syndrome coronavirus 2
  REGION 1..10: note = Table B: HLA-DQA1*01:02-B1*06:02L
MVMFTPLVPF

SEQ ID NO: 18014 - protein, 10 aa, Severe acute respiratory syndrome coronavirus 2
  REGION 1..10: note = Table B: HLA-DQA1*01:02-B1*06:02L HLA-DQA1*05:05-B1*03:116L HLA-DPA1*02:01-B1*13:01L HLA-DPA1*03:01-B1*105:01L HLA-DRB1*15:03L
TPLVPFWITI

SEQ ID NO: 18015 - protein, 12 aa, Severe acute respiratory syndrome coronavirus 2
  REGION 1..12: note = Table B: HLA-DQA1*01:02-B1*06:02L HLA-DPA1*03:01-B1*105:01L HLA-DQA1*01:03-B1*06:01L
ITIAYIICISTK

SEQ ID NO: 18016 - protein, 10 aa, Severe acute respiratory syndrome coronavirus 2
  REGION 1..10: note = Table B: HLA-DQA1*01:02-B1*06:02L HLA-DRB1*12:01L HLA-DQA1*01:03-B1*06:01L HLA-DRB1*15:03L
YIICISTKHF

SEQ ID NO: 18017 - protein, 10 aa, Severe acute respiratory syndrome coronavirus 2
  REGION 1..10: note = Table B: HLA-DQA1*01:02-B1*06:02L HLA-DPA1*01:03-B1*03:01L HLA-DRB1*03:01L HLA-DRB1*14:01L HLA-DRB1*14:02L HLA-DQA1*05:05-B1*03:19L HLA-DQA1*05:01-B1*02:01L HLA-DRB1*12:01L HLA-DPA1*03:01-B1*105:01L HLA-DRB1*16:01L
  REGION 1..10: note = CONT. FROM ABOVE: HLA-DQA1*01:03-B1*06:01L HLA-DQA1*02:01-B1*03: 03L HLA-DRB1*15:03L
IICISTKHFY

SEQ ID NO: 18018 - protein, 10 aa, Severe acute respiratory syndrome coronavirus 2
  REGION 1..10: note = Table B: HLA-DQA1*01:02-B1*06:02L HLA-DQA1*05:05-B1*03:19L HLA-DQA1*05:01-B1*02:01L HLA-DPA1*02:01-B1*13:01L HLA-DQA1*01:03-B1*06:01L HLA-DQA1*02:01-B1*03:03L
KHFYWFFSNY

SEQ ID NO: 18019 - protein, 13 aa, Severe acute respiratory syndrome coronavirus 2
  REGION 1..13: note = Table B: HLA-DQA1*01:02-B1*06:02L HLA-DRB1*14:01L HLA-DPA1*03:01-B1*105:01L
YWFFSNYLKRRVV

SEQ ID NO: 18020 - protein, 14 aa, Severe acute respiratory syndrome coronavirus 2
  REGION 1..14: note = Table B: HLA-DQA1*01:02-B1*06:02L
WFFSNYLKRRVVFN

SEQ ID NO: 18021 - protein, 12 aa, Severe acute respiratory syndrome coronavirus 2
  REGION 1..12: note = Table B: HLA-DQA1*01:02-B1*06:02L HLA-DQA1*05:01-B1*02:01L HLA-DPA1*01:03-B1*04:02L HLA-DRB1*16:01L
NGVSFSTFEEAA

SEQ ID NO: 18022 - protein, 10 aa, Severe acute respiratory syndrome coronavirus 2
  REGION 1..10: note = Table B: HLA-DQA1*01:02-B1*06:02L HLA-DPA1*02:01-B1*13:01L HLA-DQA1*01:03-B1*06:01L HLA-DRB1*15:03L
TFEEAALCTF

SEQ ID NO: 18023 - protein, 12 aa, Severe acute respiratory syndrome coronavirus 2
  REGION 1..12: note = Table B: HLA-DQA1*01:02-B1*06:02L HLA-DQA1*01:03-B1*06:01L
EEAALCTFLLNK

SEQ ID NO: 18024 - protein, 10 aa, Severe acute respiratory syndrome coronavirus 2
  REGION 1..10: note = Table B: HLA-DQA1*01:02-B1*06:02L HLA-DPA1*03:01-B1*105:01L HLA-DPA1*01:02-B1*04:01L HLA-DQA1*01:03-B1*06:01L
ALCTFLLNKE

SEQ ID NO: 18025 - protein, 12 aa, Severe acute respiratory syndrome coronavirus 2
  REGION 1..12: note = Table B: HLA-DQA1*01:02-B1*06:02L HLA-DRB1*08:01L
FLLNKEMYLKLR

SEQ ID NO: 18026 - protein, 13 aa, Severe acute respiratory syndrome coronavirus 2
  REGION 1..13: note = Table B: HLA-DQA1*01:02-B1*06:02L HLA-DPA1*01:03-B1*04:02L
LLNKEMYLKLRSD

SEQ ID NO: 18027 - protein, 14 aa, Severe acute respiratory syndrome coronavirus 2
  REGION 1..14: note = Table B: HLA-DQA1*01:02-B1*06:02L
LNKEMYLKLRSDVL

SEQ ID NO: 18028 - protein, 11 aa, Severe acute respiratory syndrome coronavirus 2
  REGION 1..11: note = Table B: HLA-DQA1*01:02-B1*06:02L HLA-DPA1*03:01-B1*04:02L HLA-DPA1*01:03-B1*04:02L HLA-DQA1*01:03-B1*06:01L HLA-DQA1*02:01-B1*03:03L
LRSDVLLPLTQ

SEQ ID NO: 18029 - protein, 12 aa, Severe acute respiratory syndrome coronavirus 2
  REGION 1..12: note = Table B: HLA-DQA1*01:02-B1*06:02L HLA-DRB1*01:02L HLA-DRB1*08:04L HLA-DPA1*03:01-B1*04:02L HLA-DRB1*08:01L HLA-DQA1*01-B1*05L HLA-DPA1*01:03-B1*04:01L HLA-DRB1*12:01L HLA-DPA1*03:01-B1*105:01L HLA-DRB1*16:01L HLA-DRB1*04:08L
  REGION 1..12: note = CONT. FROM ABOVE: HLA-DRB1*15:03L
LPLTQYNRYLAL

SEQ ID NO: 18030 - protein, 14 aa, Severe acute respiratory syndrome coronavirus 2
  REGION 1..14: note = Table B: HLA-DQA1*01:02-B1*06:02L
ALYNKYKYFSGAMD

SEQ ID NO: 18031 - protein, 14 aa, Severe acute respiratory syndrome coronavirus 2
  REGION 1..14: note = Table B: HLA-DQA1*01:02-B1*06:02L HLA-DPA1*01:03-B1*03:01L HLA-DRB1*12:01L HLA-DPA1*02:01-B1*13:01L HLA-DPA1*03:01-B1*105:01L
DTTSYREAACCHLA

SEQ ID NO: 18032 - protein, 12 aa, Severe acute respiratory syndrome coronavirus 2
  REGION 1..12: note = Table B: HLA-DQA1*01:02-B1*06:02L
YREAACCHLAKA

SEQ ID NO: 18033 - protein, 10 aa, Severe acute respiratory syndrome coronavirus 2
  REGION 1..10: note = Table B: HLA-DQA1*01:02-B1*06:02L
AACCHLAKAL

SEQ ID NO: 18034 - protein, 14 aa, Severe acute respiratory syndrome coronavirus 2
  REGION 1..14: note = Table B: HLA-DQA1*01:02-B1*06:02L HLA-DRB1*01:02L
KALNDFSNSGSDVL

SEQ ID NO: 18035 - protein, 12 aa, Severe acute respiratory syndrome coronavirus 2
  REGION 1..12: note = Table B: HLA-DQA1*01:02-B1*06:02L HLA-DQA1*03:01-B1*03:02L HLA-DQA1*01:03-B1*06:01L HLA-DQA1*02:01-B1*03:03L
NSGSDVLYQPPQ

SEQ ID NO: 18036 - protein, 14 aa, Severe acute respiratory syndrome coronavirus 2
  REGION 1..14: note = Table B: HLA-DQA1*01:02-B1*06:02L
YQPPQTSITSAVLQ

SEQ ID NO: 18037 - protein, 14 aa, Severe acute respiratory syndrome coronavirus 2
  REGION 1..14: note = Table B: HLA-DQA1*01:02-B1*06:02L
VLQSGFRKMAFPSG

SEQ ID NO: 18038 - protein, 14 aa, Severe acute respiratory syndrome coronavirus 2
  REGION 1..14: note = Table B: HLA-DQA1*01:02-B1*06:02L
LQSGFRKMAFPSGK

SEQ ID NO: 18039 - protein, 12 aa, Severe acute respiratory syndrome coronavirus 2
  REGION 1..12: note = Table B: HLA-DQA1*01:02-B1*06:02L
MAFPSGKVEGCM

SEQ ID NO: 18040 - protein, 11 aa, Severe acute respiratory syndrome coronavirus 2
  REGION 1..11: note = Table B: HLA-DQA1*01:02-B1*06:02L
GKVEGCMVQVT

SEQ ID NO: 18041 - protein, 12 aa, Severe acute respiratory syndrome coronavirus 2
  REGION 1..12: note = Table B: HLA-DQA1*01:02-B1*06:02L
KVEGCMVQVTCG

SEQ ID NO: 18042 - protein, 12 aa, Severe acute respiratory syndrome coronavirus 2
  REGION 1..12: note = Table B: HLA-DQA1*01:02-B1*06:02L
VEGCMVQVTCGT

SEQ ID NO: 18043 - protein, 14 aa, Severe acute respiratory syndrome coronavirus 2
  REGION 1..14: note = Table B: HLA-DQA1*01:02-B1*06:02L
VQVTCGTTTLNGLW

SEQ ID NO: 18044 - protein, 12 aa, Severe acute respiratory syndrome coronavirus 2
  REGION 1..12: note = Table B: HLA-DQA1*01:02-B1*06:02L HLA-DRB1*12:01L HLA-DRB1*14:54L HLA-DPA1*01:02-B1*04:01L HLA-DRB1*16:01L HLA-DRB1*15:03L
LDDVVYCPRHVI

SEQ ID NO: 18045 - protein, 15 aa, Severe acute respiratory syndrome coronavirus 2
  REGION 1..15: note = Table B: HLA-DQA1*01:02-B1*06:02L
DVVYCPRHVICTSED

SEQ ID NO: 18046 - protein, 11 aa, Severe acute respiratory syndrome coronavirus 2
  REGION 1..11: note = Table B: HLA-DQA1*01:02-B1*06:02L HLA-DPA1*03:01-B1*04:02L HLA-DRB1*12:01L HLA-DPA1*02:01-B1*13:01L HLA-DPA1*01:02-B1*04:01L HLA-DRB1*16:01L
DMLNPNYEDLL

SEQ ID NO: 18047 - protein, 12 aa, Severe acute respiratory syndrome coronavirus 2
  REGION 1..12: note = Table B: HLA-DQA1*01:02-B1*06:02L HLA-DQA1*01:03-B1*06:01L
PNYEDLLIRKSN

SEQ ID NO: 18048 - protein, 10 aa, Severe acute respiratory syndrome coronavirus 2
  REGION 1..10: note = Table B: HLA-DQA1*01:02-B1*06:02L HLA-DQA1*02:01-B1*03:03L
LLIRKSNHNF

SEQ ID NO: 18049 - protein, 12 aa, Severe acute respiratory syndrome coronavirus 2
  REGION 1..12: note = Table B: HLA-DQA1*01:02-B1*06:02L HLA-DQA1*03:01-B1*03:02L HLA-DQA1*01:03-B1*06:01L HLA-DQA1*02:01-B1*03:03L
KSNHNFLVQAGN

SEQ ID NO: 18050 - protein, 12 aa, Severe acute respiratory syndrome coronavirus 2
  REGION 1..12: note = Table B: HLA-DQA1*01:02-B1*06:02L HLA-DRB1*14:01L
GNVQLRVIGHSM

SEQ ID NO: 18051 - protein, 12 aa, Severe acute respiratory syndrome coronavirus 2
  REGION 1..12: note = Table B: HLA-DQA1*01:02-B1*06:02L HLA-DRB1*01:02L HLA-DPA1*03:01-B1*105:01L HLA-DQA1*01:03-B1*06:01L HLA-DQA1*02:01-B1*03:03L
VIGHSMQNCVLK

SEQ ID NO: 18052 - protein, 12 aa, Severe acute respiratory syndrome coronavirus 2
  REGION 1..12: note = Table B: HLA-DQA1*01:02-B1*06:02L
SMQNCVLKLKVD

SEQ ID NO: 18053 - protein, 12 aa, Severe acute respiratory syndrome coronavirus 2
  REGION 1..12: note = Table B: HLA-DQA1*01:02-B1*06:02L
MQNCVLKLKVDT

SEQ ID NO: 18054 - protein, 12 aa, Severe acute respiratory syndrome coronavirus 2
  REGION 1..12: note = Table B: HLA-DQA1*01:02-B1*06:02L HLA-DPA1*01:03-B1*03:01L HLA-DRB1*03:01L HLA-DRB3*01:01L HLA-DRB1*15:03L
LKVDTANPKTPK

SEQ ID NO: 18055 - protein, 10 aa, Severe acute respiratory syndrome coronavirus 2
  REGION 1..10: note = Table B: HLA-DQA1*01:02-B1*06:02L HLA-DQA1*02:01-B1*03:03L
ANPKTPKYKF

SEQ ID NO: 18056 - protein, 10 aa, Severe acute respiratory syndrome coronavirus 2
  REGION 1..10: note = Table B: HLA-DQA1*01:02-B1*06:02L HLA-DQA1*01:03-B1*06:01L
YKFVRIQPGQ

SEQ ID NO: 18057 - protein, 16 aa, Severe acute respiratory syndrome coronavirus 2
  REGION 1..16: note = Table B: HLA-DQA1*01:02-B1*06:02L HLA-DPA1*03:01-B1*105:01L HLA-DPA1*01:03-B1*104:01L HLA-DQA1*05:05-B1*03:01L
QPGQTFSVLACYNGSP

SEQ ID NO: 18058 - protein, 14 aa, Severe acute respiratory syndrome coronavirus 2
  REGION 1..14: note = Table B: HLA-DQA1*01:02-B1*06:02L HLA-DRB1*01:02L HLA-DPA1*03:01-B1*105:01L HLA-DQA1*05:05-B1*03:01L HLA-DRB1*10:01L HLA-DRB1*04:08L
QTFSVLACYNGSPS

SEQ ID NO: 18059 - protein, 14 aa, Severe acute respiratory syndrome coronavirus 2
  REGION 1..14: note = Table B: HLA-DQA1*01:02-B1*06:02L
TFSVLACYNGSPSG

SEQ ID NO: 18060 - protein, 11 aa, Severe acute respiratory syndrome coronavirus 2
  REGION 1..11: note = Table B: HLA-DQA1*01:02-B1*06:02L HLA-DQA1*05:05-B1*03:19L HLA-DQA1*05:01-B1*02:01L
ACYNGSPSGVY

SEQ ID NO: 18061 - protein, 14 aa, Severe acute respiratory syndrome coronavirus 2
  REGION 1..14: note = Table B: HLA-DQA1*01:02-B1*06:02L
NGSPSGVYQCAMRP

SEQ ID NO: 18062 - protein, 10 aa, Severe acute respiratory syndrome coronavirus 2
  REGION 1..10: note = Table B: HLA-DQA1*01:02-B1*06:02L
GVYQCAMRPN

SEQ ID NO: 18063 - protein, 10 aa, Severe acute respiratory syndrome coronavirus 2
  REGION 1..10: note = Table B: HLA-DQA1*01:02-B1*06:02L HLA-DQA1*01:03-B1*06:01L
VYQCAMRPNF

SEQ ID NO: 18064 - protein, 10 aa, Severe acute respiratory syndrome coronavirus 2
  REGION 1..10: note = Table B: HLA-DQA1*01:02-B1*06:02L HLA-DQA1*01:03-B1*06:01L
YQCAMRPNFT

SEQ ID NO: 18065 - protein, 12 aa, Severe acute respiratory syndrome coronavirus 2
  REGION 1..12: note = Table B: HLA-DQA1*01:02-B1*06:02L HLA-DQA1*01:03-B1*06:01L
FTIKGSFLNGSC

SEQ ID NO: 18066 - protein, 11 aa, Severe acute respiratory syndrome coronavirus 2
  REGION 1..11: note = Table B: HLA-DQA1*01:02-B1*06:02L HLA-DQA1*01:03-B1*06:01L
IKGSFLNGSCG

SEQ ID NO: 18067 - protein, 12 aa, Severe acute respiratory syndrome coronavirus 2
  REGION 1..12: note = Table B: HLA-DQA1*01:02-B1*06:02L HLA-DQA1*05:05-B1*03:01L
FLNGSCGSVGFN

SEQ ID NO: 18068 - protein, 13 aa, Severe acute respiratory syndrome coronavirus 2
  REGION 1..13: note = Table B: HLA-DQA1*01:02-B1*06:02L
LNGSCGSVGFNID

SEQ ID NO: 18069 - protein, 14 aa, Severe acute respiratory syndrome coronavirus 2
  REGION 1..14: note = Table B: HLA-DQA1*01:02-B1*06:02L
NGSCGSVGFNIDYD

SEQ ID NO: 18070 - protein, 10 aa, Severe acute respiratory syndrome coronavirus 2
  REGION 1..10: note = Table B: HLA-DQA1*01:02-B1*06:02L HLA-DQA1*05:05-B1*03:19L HLA-DPA1*02:01-B1*13:01L HLA-DPA1*03:01-B1*105:01L HLA-DQA1*01:03-B1*06:01L HLA-DRB1*15:03L
FNIDYDCVSF

SEQ ID NO: 18071 - protein, 12 aa, Severe acute respiratory syndrome coronavirus 2
  REGION 1..12: note = Table B: HLA-DQA1*01:02-B1*06:02L HLA-DPA1*01:03-B1*04:01L HLA-DPA1*01:03-B1*04:02L HLA-DRB1*16:01L HLA-DRB1*04:08L
IDYDCVSFCYMH

SEQ ID NO: 18072 - protein, 10 aa, Severe acute respiratory syndrome coronavirus 2
  REGION 1..10: note = Table B: HLA-DQA1*01:02-B1*06:02L HLA-DQA1*01:03-B1*06:01L
VSFCYMHHME

SEQ ID NO: 18073 - protein, 12 aa, Severe acute respiratory syndrome coronavirus 2
  REGION 1..12: note = Table B: HLA-DQA1*01:02-B1*06:02L HLA-DQA1*05:05-B1*03:19L
MELPTGVHAGTD

SEQ ID NO: 18074 - protein, 10 aa, Severe acute respiratory syndrome coronavirus 2
  REGION 1..10: note = Table B: HLA-DQA1*01:02-B1*06:02L HLA-DPA1*03:01-B1*105:01L HLA-DQA1*01:03-B1*06:01L HLA-DQA1*02:01-B1*03:03L
HAGTDLEGNF

SEQ ID NO: 18075 - protein, 13 aa, Severe acute respiratory syndrome coronavirus 2
  REGION 1..13: note = Table B: HLA-DQA1*01:02-B1*06:02L HLA-DPA1*03:01-B1*105:01L HLA-DQA1*03:01-B1*03:02L
TDLEGNFYGPFVD

SEQ ID NO: 18076 - protein, 12 aa, Severe acute respiratory syndrome coronavirus 2
  REGION 1..12: note = Table B: HLA-DQA1*01:02-B1*06:02L HLA-DQA1*01:03-B1*06:01L
LEGNFYGPFVDR

SEQ ID NO: 18077 - protein, 12 aa, Severe acute respiratory syndrome coronavirus 2
  REGION 1..12: note = Table B: HLA-DQA1*01:02-B1*06:02L HLA-DQA1*05:05-B1*03:19L HLA-DQA1*05:05-B1*03:01L HLA-DQA1*01:03-B1*06:01L
DRQTAQAAGTDT

SEQ ID NO: 18078 - protein, 14 aa, Severe acute respiratory syndrome coronavirus 2
  REGION 1..14: note = Table B: HLA-DQA1*01:02-B1*06:02L
AAGTDTTITVNVLA

SEQ ID NO: 18079 - protein, 10 aa, Severe acute respiratory syndrome coronavirus 2
  REGION 1..10: note = Table B: HLA-DQA1*01:02-B1*06:02L HLA-DPA1*01:03-B1*03:01L HLA-DQA1*05:05-B1*03:19L HLA-DQA1*05:01-B1*02:01L HLA-DRB4*01:01L HLA-DPA1*01:03-B1*04:01L HLA-DPA1*01:03-B1*104:01L
ITVNVLAWLY

SEQ ID NO: 18080 - protein, 13 aa, Severe acute respiratory syndrome coronavirus 2
  REGION 1..13: note = Table B: HLA-DQA1*01:02-B1*06:02L HLA-DRB1*01:02L HLA-DPA1*01:03-B1*03:01L HLA-DPA1*03:01-B1*04:02L HLA-DRB1*12:01L HLA-DPA1*03:01-B1*105:01L HLA-DRB1*16:01L
VNVLAWLYAAVIN

SEQ ID NO: 18081 - protein, 13 aa, Severe acute respiratory syndrome coronavirus 2
  REGION 1..13: note = Table B: HLA-DQA1*01:02-B1*06:02L
VINGDRWFLNRFT

SEQ ID NO: 18082 - protein, 11 aa, Severe acute respiratory syndrome coronavirus 2
  REGION 1..11: note = Table B: HLA-DQA1*01:02-B1*06:02L HLA-DQA1*05:01-B1*02:01L
DFNLVAMKYNY

SEQ ID NO: 18083 - protein, 12 aa, Severe acute respiratory syndrome coronavirus 2
  REGION 1..12: note = Table B: HLA-DQA1*01:02-B1*06:02L HLA-DPA1*03:01-B1*04:02L HLA-DRB1*12:01L HLA-DPA1*03:01-B1*105:01L HLA-DPA1*01:02-B1*04:01L HLA-DRB1*15:03L
FNLVAMKYNYEP

SEQ ID NO: 18084 - protein, 12 aa, Severe acute respiratory syndrome coronavirus 2
  REGION 1..12: note = Table B: HLA-DQA1*01:02-B1*06:02L HLA-DPA1*03:01-B1*105:01L
NLVAMKYNYEPL

SEQ ID NO: 18085 - protein, 13 aa, Severe acute respiratory syndrome coronavirus 2
  REGION 1..13: note = Table B: HLA-DQA1*01:02-B1*06:02L HLA-DPA1*03:01-B1*04:02L HLA-DQA1*05:01-B1*02:01L HLA-DPA1*02:01-B1*13:01L HLA-DPA1*03:01-B1*105:01L HLA-DPA1*01:02-B1*04:01L HLA-DRB1*16:01L HLA-DRB1*15:03L
VAMKYNYEPLTQD

SEQ ID NO: 18086 - protein, 12 aa, Severe acute respiratory syndrome coronavirus 2
  REGION 1..12: note = Table B: HLA-DQA1*01:02-B1*06:02L HLA-DRB1*01:02L HLA-DRB1*08:04L HLA-DPA1*03:01-B1*04:02L HLA-DRB1*12:01L HLA-DPA1*02:01-B1*13:01L HLA-DRB1*08:03L HLA-DRB1*15:03L
MKYNYEPLTQDH

SEQ ID NO: 18087 - protein, 12 aa, Severe acute respiratory syndrome coronavirus 2
  REGION 1..12: note = Table B: HLA-DQA1*01:02-B1*06:02L
LDMCASLKELLQ

SEQ ID NO: 18088 - protein, 12 aa, Severe acute respiratory syndrome coronavirus 2
  REGION 1..12: note = Table B: HLA-DQA1*01:02-B1*06:02L
DMCASLKELLQN

SEQ ID NO: 18089 - protein, 12 aa, Severe acute respiratory syndrome coronavirus 2
  REGION 1..12: note = Table B: HLA-DQA1*01:02-B1*06:02L HLA-DQA1*01:03-B1*06:01L
LQNGMNGRTILG

SEQ ID NO: 18090 - protein, 12 aa, Severe acute respiratory syndrome coronavirus 2
  REGION 1..12: note = Table B: HLA-DQA1*01:02-B1*06:02L HLA-DPA1*03:01-B1*105:01L HLA-DQA1*05:05-B1*03:01L HLA-DQA1*01:03-B1*06:01L
GMNGRTILGSAL

SEQ ID NO: 18091 - protein, 14 aa, Severe acute respiratory syndrome coronavirus 2
  REGION 1..14: note = Table B: HLA-DQA1*01:02-B1*06:02L
MNGRTILGSALLED

SEQ ID NO: 18092 - protein, 11 aa, Severe acute respiratory syndrome coronavirus 2
  REGION 1..11: note = Table B: HLA-DQA1*01:02-B1*06:02L HLA-DQA1*05:01-B1*02:01L HLA-DPA1*03:01-B1*105:01L
ILGSALLEDEF

SEQ ID NO: 18093 - protein, 12 aa, Severe acute respiratory syndrome coronavirus 2
  REGION 1..12: note = Table B: HLA-DQA1*01:02-B1*06:02L
PFDVVRQCSGVT

SEQ ID NO: 18094 - protein, 12 aa, Severe acute respiratory syndrome coronavirus 2
  REGION 1..12: note = Table B: HLA-DQA1*01:02-B1*06:02L HLA-DRB1*01:02L HLA-DRB1*12:01L HLA-DRB1*16:01L HLA-DRB1*15:03L
DVVRQCSGVTFQ

SEQ ID NO: 18095 - protein, 13 aa, Severe acute respiratory syndrome coronavirus 2
  REGION 1..13: note = Table B: HLA-DQA1*01:02-B1*06:02L HLA-DRB1*01:02L HLA-DQA1*01:03-B1*06:01L HLA-DRB1*15:03L
VVRQCSGVTFQSA

SEQ ID NO: 18096 - protein, 12 aa, Severe acute respiratory syndrome coronavirus 2
  REGION 1..12: note = Table B: HLA-DQA1*01:02-B1*06:02L
QCSGVTFQSAVK

SEQ ID NO: 18097 - protein, 14 aa, Severe acute respiratory syndrome coronavirus 2
  REGION 1..14: note = Table B: HLA-DQA1*01:02-B1*06:02L HLA-DRB1*11:04L HLA-DRB1*11:01L HLA-DRB3*01:01L
FQSAVKRTIKGTHH

SEQ ID NO: 18098 - protein, 15 aa, Severe acute respiratory syndrome coronavirus 2
  REGION 1..15: note = Table B: HLA-DQA1*01:02-B1*06:02L
IKGTHHWLLLTILTS

SEQ ID NO: 18099 - protein, 12 aa, Severe acute respiratory syndrome coronavirus 2
  REGION 1..12: note = Table B: HLA-DQA1*01:02-B1*06:02L HLA-DPA1*03:01-B1*105:01L
LTSLLVLVQSTQ

SEQ ID NO: 18100 - protein, 10 aa, Severe acute respiratory syndrome coronavirus 2
  REGION 1..10: note = Table B: HLA-DQA1*01:02-B1*06:02L HLA-DQA1*05:05-B1*03:19L HLA-DPA1*03:01-B1*105:01L HLA-DRB1*15:03L
LLVLVQSTQW

SEQ ID NO: 18101 - protein, 10 aa, Severe acute respiratory syndrome coronavirus 2
  REGION 1..10: note = Table B: HLA-DQA1*01:02-B1*06:02L HLA-DPA1*03:01-B1*105:01L HLA-DQA1*01:03-B1*06:01L HLA-DQA1*02:01-B1*03:03L HLA-DRB1*15:03L
LVQSTQWSLF

SEQ ID NO: 18102 - protein, 10 aa, Severe acute respiratory syndrome coronavirus 2
  REGION 1..10: note = Table B: HLA-DQA1*01:02-B1*06:02L HLA-DQA1*05:05-B1*03:19L HLA-DPA1*02:01-B1*13:01L HLA-DPA1*03:01-B1*105:01L HLA-DQA1*01:03-B1*06:01L HLA-DRB1*15:03L
VQSTQWSLFF

SEQ ID NO: 18103 - protein, 11 aa, Severe acute respiratory syndrome coronavirus 2
  REGION 1..11: note = Table B: HLA-DQA1*01:02-B1*06:02L HLA-DQA1*05:01-B1*02:01L HLA-DPA1*03:01-B1*105:01L
YENAFLPFAMG

SEQ ID NO: 18104 - protein, 10 aa, Severe acute respiratory syndrome coronavirus 2
  REGION 1..10: note = Table B: HLA-DQA1*01:02-B1*06:02L HLA-DQA1*05:05-B1*03:19L HLA-DPA1*03:01-B1*105:01L HLA-DQA1*01:03-B1*06:01L HLA-DRB1*15:03L
AMGIIAMSAF

SEQ ID NO: 18105 - protein, 12 aa, Severe acute respiratory syndrome coronavirus 2
  REGION 1..12: note = Table B: HLA-DQA1*01:02-B1*06:02L HLA-DPA1*03:01-B1*105:01L HLA-DQA1*01:03-B1*06:01L
IAMSAFAMMFVK

SEQ ID NO: 18106 - protein, 12 aa, Severe acute respiratory syndrome coronavirus 2
  REGION 1..12: note = Table B: HLA-DQA1*01:02-B1*06:02L HLA-DRB1*01:02L
MSAFAMMFVKHK

SEQ ID NO: 18107 - protein, 10 aa, Severe acute respiratory syndrome coronavirus 2
  REGION 1..10: note = Table B: HLA-DQA1*01:02-B1*06:02L HLA-DQA1*01:03-B1*06:01L HLA-DQA1*02:01-B1*03:03L
MMFVKHKHAF

SEQ ID NO: 18108 - protein, 15 aa, Severe acute respiratory syndrome coronavirus 2
  REGION 1..15: note = Table B: HLA-DQA1*01:02-B1*06:02L HLA-DPA1*01:03-B1*03:01L HLA-DPA1*03:01-B1*04:02L HLA-DRB1*12:01L HLA-DPA1*02:01-B1*13:01L HLA-DPA1*03:01-B1*105:01L HLA-DPA1*01:03-B1*104:01L HLA-DRB1*15:03L
VKHKHAFLCLFLLPS

SEQ ID NO: 18109 - protein, 14 aa, Severe acute respiratory syndrome coronavirus 2
  REGION 1..14: note = Table B: HLA-DQA1*01:02-B1*06:02L HLA-DPA1*01:03-B1*04:02L HLA-DRB1*04:08L
KHAFLCLFLLPSLA

SEQ ID NO: 18110 - protein, 14 aa, Severe acute respiratory syndrome coronavirus 2
  REGION 1..14: note = Table B: HLA-DQA1*01:02-B1*06:02L HLA-DPA1*01:03-B1*04:02L
HAFLCLFLLPSLAT

SEQ ID NO: 18111 - protein, 10 aa, Severe acute respiratory syndrome coronavirus 2
  REGION 1..10: note = Table B: HLA-DQA1*01:02-B1*06:02L HLA-DPA1*03:01-B1*105:01L
LPSLATVAYF

SEQ ID NO: 18112 - protein, 13 aa, Severe acute respiratory syndrome coronavirus 2
  REGION 1..13: note = Table B: HLA-DQA1*01:02-B1*06:02L
TVAYFNMVYMPAS

SEQ ID NO: 18113 - protein, 10 aa, Severe acute respiratory syndrome coronavirus 2
  REGION 1..10: note = Table B: HLA-DQA1*01:02-B1*06:02L HLA-DQA1*05:05-B1*03:19L
FNMVYMPASW

SEQ ID NO: 18114 - protein, 10 aa, Severe acute respiratory syndrome coronavirus 2
  REGION 1..10: note = Table B: HLA-DQA1*01:02-B1*06:02L
ASWVMRIMTW

SEQ ID NO: 18115 - protein, 12 aa, Severe acute respiratory syndrome coronavirus 2
  REGION 1..12: note = Table B: HLA-DQA1*01:02-B1*06:02L
VDTSLSGFKLKD

SEQ ID NO: 18116 - protein, 13 aa, Severe acute respiratory syndrome coronavirus 2
  REGION 1..13: note = Table B: HLA-DQA1*01:02-B1*06:02L
TSLSGFKLKDCVM

SEQ ID NO: 18117 - protein, 11 aa, Severe acute respiratory syndrome coronavirus 2
  REGION 1..11: note = Table B: HLA-DQA1*01:02-B1*06:02L
KLKDCVMYASA

SEQ ID NO: 18118 - protein, 12 aa, Severe acute respiratory syndrome coronavirus 2
  REGION 1..12: note = Table B: HLA-DQA1*01:02-B1*06:02L
LKDCVMYASAVV

SEQ ID NO: 18119 - protein, 14 aa, Severe acute respiratory syndrome coronavirus 2
  REGION 1..14: note = Table B: HLA-DQA1*01:02-B1*06:02L HLA-DPA1*03:01-B1*105:01L
ASAVVLLILMTART

SEQ ID NO: 18120 - protein, 10 aa, Severe acute respiratory syndrome coronavirus 2
  REGION 1..10: note = Table B: HLA-DQA1*01:02-B1*06:02L HLA-DQA1*05:05-B1*03:19L HLA-DQA1*05:01-B1*02:01L HLA-DRB1*12:01L HLA-DRB1*15:03L
LILMTARTVY

SEQ ID NO: 18121 - protein, 14 aa, Severe acute respiratory syndrome coronavirus 2
  REGION 1..14: note = Table B: HLA-DQA1*01:02-B1*06:02L
DGARRVWTLMNVLT

SEQ ID NO: 18122 - protein, 11 aa, Severe acute respiratory syndrome coronavirus 2
  REGION 1..11: note = Table B: HLA-DQA1*01:02-B1*06:02L HLA-DPA1*03:01-B1*04:02L HLA-DRB1*12:01L HLA-DPA1*03:01-B1*105:01L HLA-DRB1*15:03L
RVWTLMNVLTL

SEQ ID NO: 18123 - protein, 10 aa, Severe acute respiratory syndrome coronavirus 2
  REGION 1..10: note = Table B: HLA-DQA1*01:02-B1*06:02L HLA-DQA1*05:05-B1*03:19L HLA-DQA1*05:01-B1*02:01L
VLTLVYKVYY

SEQ ID NO: 18124 - protein, 14 aa, Severe acute respiratory syndrome coronavirus 2
  REGION 1..14: note = Table B: HLA-DQA1*01:02-B1*06:02L HLA-DPA1*03:01-B1*105:01L
DQAISMWALIISVT

SEQ ID NO: 18125 - protein, 10 aa, Severe acute respiratory syndrome coronavirus 2
  REGION 1..10: note = Table B: HLA-DQA1*01:02-B1*06:02L HLA-DQA1*05:05-B1*03:19L HLA-DPA1*02:01-B1*13:01L HLA-DPA1*03:01-B1*105:01L HLA-DQA1*01:03-B1*06:01L HLA-DQA1*02:01-B1*03:03L HLA-DRB1*15:03L
YSGVVTTVMF

SEQ ID NO: 18126 - protein, 10 aa, Severe acute respiratory syndrome coronavirus 2
  REGION 1..10: note = Table B: HLA-DQA1*01:02-B1*06:02L HLA-DPA1*03:01-B1*105:01L HLA-DQA1*01:03-B1*06:01L HLA-DQA1*02:01-B1*03:03L
VTTVMFLARG

SEQ ID NO: 18127 - protein, 12 aa, Severe acute respiratory syndrome coronavirus 2
  REGION 1..12: note = Table B: HLA-DQA1*01:02-B1*06:02L
FLARGIVFMCVE

SEQ ID NO: 18128 - protein, 12 aa, Severe acute respiratory syndrome coronavirus 2
  REGION 1..12: note = Table B: HLA-DQA1*01:02-B1*06:02L
LARGIVFMCVEY

SEQ ID NO: 18129 - protein, 14 aa, Severe acute respiratory syndrome coronavirus 2
  REGION 1..14: note = Table B: HLA-DQA1*01:02-B1*06:02L HLA-DRB1*15:03L
ARGIVFMCVEYCPI

SEQ ID NO: 18130 - protein, 13 aa, Severe acute respiratory syndrome coronavirus 2
  REGION 1..13: note = Table B: HLA-DQA1*01:02-B1*06:02L HLA-DPA1*03:01-B1*105:01L
VEYCPIFFITGNT

SEQ ID NO: 18131 - protein, 11 aa, Severe acute respiratory syndrome coronavirus 2
  REGION 1..11: note = Table B: HLA-DQA1*01:02-B1*06:02L HLA-DPA1*03:01-B1*105:01L HLA-DQA1*01:03-B1*06:01L
FITGNTLQCIM

SEQ ID NO: 18132 - protein, 10 aa, Severe acute respiratory syndrome coronavirus 2
  REGION 1..10: note = Table B: HLA-DQA1*01:02-B1*06:02L HLA-DQA1*05:05-B1*03:19L
NTLQCIMLVY

SEQ ID NO: 18133 - protein, 10 aa, Severe acute respiratory syndrome coronavirus 2
  REGION 1..10: note = Table B: HLA-DQA1*01:02-B1*06:02L HLA-DQA1*05:05-B1*03:19L
FGLFCLLNRY

SEQ ID NO: 18134 - protein, 10 aa, Severe acute respiratory syndrome coronavirus 2
  REGION 1..10: note = Table B: HLA-DQA1*01:02-B1*06:02L HLA-DQA1*05:05-B1*03:19L HLA-DQA1*05:01-B1*02:01L
FRLTLGVYDY

SEQ ID NO: 18135 - protein, 14 aa, Severe acute respiratory syndrome coronavirus 2
  REGION 1..14: note = Table B: HLA-DQA1*01:02-B1*06:02L
RLTLGVYDYLVSTQ

SEQ ID NO: 18136 - protein, 12 aa, Severe acute respiratory syndrome coronavirus 2
  REGION 1..12: note = Table B: HLA-DQA1*01:02-B1*06:02L HLA-DPA1*03:01-B1*105:01L HLA-DQA1*02:01-B1*03:03L
VSTQEFRYMNSQ

SEQ ID NO: 18137 - protein, 12 aa, Severe acute respiratory syndrome coronavirus 2
  REGION 1..12: note = Table B: HLA-DQA1*01:02-B1*06:02L HLA-DQA1*05:05-B1*03:01L HLA-DQA1*01:03-B1*06:01L HLA-DQA1*02:01-B1*03:03L
SQGLLPPKNSID

SEQ ID NO: 18138 - protein, 12 aa, Severe acute respiratory syndrome coronavirus 2
  REGION 1..12: note = Table B: HLA-DQA1*01:02-B1*06:02L HLA-DRB1*11:04L HLA-DRB1*08:01L HLA-DRB1*11:01L
AFKLNIKLLGVG

SEQ ID NO: 18139 - protein, 12 aa, Severe acute respiratory syndrome coronavirus 2
  REGION 1..12: note = Table B: HLA-DQA1*01:02-B1*06:02L HLA-DRB1*11:04L HLA-DRB1*11:01L HLA-DRB1*04:08L
FKLNIKLLGVGG

SEQ ID NO: 18140 - protein, 12 aa, Severe acute respiratory syndrome coronavirus 2
  REGION 1..12: note = Table B: HLA-DQA1*01:02-B1*06:02L HLA-DRB1*01:02L HLA-DRB1*12:01L HLA-DRB1*16:01L HLA-DQA1*02:01-B1*03:03L HLA-DRB1*15:03L
LNIKLLGVGGKP

SEQ ID NO: 18141 - protein, 13 aa, Severe acute respiratory syndrome coronavirus 2
  REGION 1..13: note = Table B: HLA-DQA1*01:02-B1*06:02L HLA-DRB1*01:01L HLA-DRB1*12:01L HLA-DRB1*16:01L HLA-DRB1*04:08L HLA-DQA1*02:01-B1*03:03L HLA-DRB1*15:03L
IKLLGVGGKPCIK

SEQ ID NO: 18142 - protein, 14 aa, Severe acute respiratory syndrome coronavirus 2
  REGION 1..14: note = Table B: HLA-DQA1*01:02-B1*06:02L HLA-DRB1*01:02L
KPCIKVATVQSKMS

SEQ ID NO: 18143 - protein, 14 aa, Severe acute respiratory syndrome coronavirus 2
  REGION 1..14: note = Table B: HLA-DQA1*01:02-B1*06:02L HLA-DPA1*02:01-B1*13:01L
VQSKMSDVKCTSVV

SEQ ID NO: 18144 - protein, 14 aa, Severe acute respiratory syndrome coronavirus 2
  REGION 1..14: note = Table B: HLA-DQA1*01:02-B1*06:02L
DVKCTSVVLLSVLQ

SEQ ID NO: 18145 - protein, 14 aa, Severe acute respiratory syndrome coronavirus 2
  REGION 1..14: note = Table B: HLA-DQA1*01:02-B1*06:02L
VKCTSVVLLSVLQQ

SEQ ID NO: 18146 - protein, 12 aa, Severe acute respiratory syndrome coronavirus 2
  REGION 1..12: note = Table B: HLA-DQA1*01:02-B1*06:02L HLA-DRB1*01:02L HLA-DRB1*14:01L HLA-DPA1*03:01-B1*105:01L
VLLSVLQQLRVE

SEQ ID NO: 18147 - protein, 10 aa, Severe acute respiratory syndrome coronavirus 2
  REGION 1..10: note = Table B: HLA-DQA1*01:02-B1*06:02L HLA-DQA1*01:03-B1*06:01L HLA-DQA1*02:01-B1*03:03L HLA-DRB1*15:03L
LRVESSSKLW

SEQ ID NO: 18148 - protein, 12 aa, Severe acute respiratory syndrome coronavirus 2
  REGION 1..12: note = Table B: HLA-DQA1*01:02-B1*06:02L
RVESSSKLWAQC

SEQ ID NO: 18149 - protein, 12 aa, Severe acute respiratory syndrome coronavirus 2
  REGION 1..12: note = Table B: HLA-DQA1*01:02-B1*06:02L HLA-DPA1*03:01-B1*105:01L
ESSSKLWAQCVQ

SEQ ID NO: 18150 - protein, 12 aa, Severe acute respiratory syndrome coronavirus 2
  REGION 1..12: note = Table B: HLA-DQA1*01:02-B1*06:02L
KLWAQCVQLHND

SEQ ID NO: 18151 - protein, 12 aa, Severe acute respiratory syndrome coronavirus 2
  REGION 1..12: note = Table B: HLA-DQA1*01:02-B1*06:02M HLA-DPA1*03:01-B1*105:01L HLA-DQA1*05:05-B1*03:01L HLA-DQA1*01:03-B1*06:01L
WAQCVQLHNDIL

SEQ ID NO: 18152 - protein, 12 aa, Severe acute respiratory syndrome coronavirus 2
  REGION 1..12: note = Table B: HLA-DQA1*01:02-B1*06:02L HLA-DQA1*03:01-B1*03:02L HLA-DQA1*01:03-B1*06:01L HLA-DQA1*02:01-B1*03:03L
LHNDILLAKDTT

SEQ ID NO: 18153 - protein, 12 aa, Severe acute respiratory syndrome coronavirus 2
  REGION 1..12: note = Table B: HLA-DQA1*01:02-B1*06:02L HLA-DPA1*01:03-B1*03:01L HLA-DPA1*03:01-B1*04:02L HLA-DRB1*14:02L HLA-DPA1*02:01-B1*13:01L HLA-DPA1*03:01-B1*105:01L HLA-DRB1*15:03L
LAKDTTEAFEKM

SEQ ID NO: 18154 - protein, 14 aa, Severe acute respiratory syndrome coronavirus 2
  REGION 1..14: note = Table B: HLA-DQA1*01:02-B1*06:02L HLA-DRB1*01:02L HLA-DPA1*03:01-B1*105:01L
EKMVSLLSVLLSMQ

SEQ ID NO: 18155 - protein, 14 aa, Severe acute respiratory syndrome coronavirus 2
  REGION 1..14: note = Table B: HLA-DQA1*01:02-B1*06:02L HLA-DRB1*01:02L HLA-DPA1*03:01-B1*105:01L
KMVSLLSVLLSMQG

SEQ ID NO: 18156 - protein, 12 aa, Severe acute respiratory syndrome coronavirus 2
  REGION 1..12: note = Table B: HLA-DQA1*01:02-B1*06:02L HLA-DQA1*01:03-B1*06:01L
QGAVDINKLCEE

SEQ ID NO: 18157 - protein, 12 aa, Severe acute respiratory syndrome coronavirus 2
  REGION 1..12: note = Table B: HLA-DQA1*01:02-B1*06:02L HLA-DPA1*03:01-B1*105:01L HLA-DQA1*01:03-B1*06:01L
GAVDINKLCEEM

SEQ ID NO: 18158 - protein, 12 aa, Severe acute respiratory syndrome coronavirus 2
  REGION 1..12: note = Table B: HLA-DQA1*01:02-B1*06:02L HLA-DRB1*12:01L HLA-DQA1*01:03-B1*06:01L HLA-DRB1*15:03L
DINKLCEEMLDN

SEQ ID NO: 18159 - protein, 13 aa, Severe acute respiratory syndrome coronavirus 2
  REGION 1..13: note = Table B: HLA-DQA1*01:02-B1*06:02L HLA-DRB1*01:02L HLA-DRB1*04:08L
NKLCEEMLDNRAT

SEQ ID NO: 18160 - protein, 12 aa, Severe acute respiratory syndrome coronavirus 2
  REGION 1..12: note = Table B: HLA-DQA1*01:02-B1*06:02L HLA-DPA1*03:01-B1*105:01L HLA-DQA1*05:05-B1*03:01L HLA-DQA1*01:03-B1*06:01L HLA-DQA1*02:01-B1*03:03L
MLDNRATLQAIA

SEQ ID NO: 18161 - protein, 11 aa, Severe acute respiratory syndrome coronavirus 2
  REGION 1..11: note = Table B: HLA-DQA1*01:02-B1*06:02L
IASEFSSLPSY

SEQ ID NO: 18162 - protein, 12 aa, Severe acute respiratory syndrome coronavirus 2
  REGION 1..12: note = Table B: HLA-DQA1*01:02-B1*06:02L HLA-DQA1*05:05-B1*03:19L HLA-DRB1*12:01L HLA-DQA1*01:03-B1*06:01L
YEQAVANGDSEV

SEQ ID NO: 18163 - protein, 13 aa, Severe acute respiratory syndrome coronavirus 2
  REGION 1..13: note = Table B: HLA-DQA1*01:02-B1*06:02L HLA-DQA1*05:05-B1*03:01L HLA-DRB1*16:01L
EQAVANGDSEVVL

SEQ ID NO: 18164 - protein, 12 aa, Severe acute respiratory syndrome coronavirus 2
  REGION 1..12: note = Table B: HLA-DQA1*01:02-B1*06:02L
NGDSEVVLKKLK

SEQ ID NO: 18165 - protein, 12 aa, Severe acute respiratory syndrome coronavirus 2
  REGION 1..12: note = Table B: HLA-DQA1*01:02-B1*06:02L HLA-DRB1*08:01L
DSEVVLKKLKKS

SEQ ID NO: 18166 - protein, 12 aa, Severe acute respiratory syndrome coronavirus 2
  REGION 1..12: note = Table B: HLA-DQA1*01:02-B1*06:02L HLA-DRB1*14:01L HLA-DRB1*08:01L HLA-DRB1*16:01L
EVVLKKLKKSLN

SEQ ID NO: 18167 - protein, 14 aa, Severe acute respiratory syndrome coronavirus 2
  REGION 1..14: note = Table B: HLA-DQA1*01:02-B1*06:02L HLA-DRB1*08:01L HLA-DRB3*01:01L
LKKLKKSLNVAKSE

SEQ ID NO: 18168 - protein, 12 aa, Severe acute respiratory syndrome coronavirus 2
  REGION 1..12: note = Table B: HLA-DQA1*01:02-B1*06:02L HLA-DRB1*12:01L HLA-DPA1*03:01-B1*105:01L HLA-DQA1*01:03-B1*06:01L HLA-DRB1*04:08L HLA-DQA1*02:01-B1*03:03L HLA-DRB1*15:03L
FDRDAAMQRKLE

SEQ ID NO: 18169 - protein, 12 aa, Severe acute respiratory syndrome coronavirus 2
  REGION 1..12: note = Table B: HLA-DQA1*01:02-B1*06:02L
DRDAAMQRKLEK

SEQ ID NO: 18170 - protein, 14 aa, Severe acute respiratory syndrome coronavirus 2
  REGION 1..14: note = Table B: HLA-DQA1*01:02-B1*06:02L HLA-DRB1*01:02L HLA-DRB1*14:01L
DAAMQRKLEKMADQ

SEQ ID NO: 18171 - protein, 14 aa, Severe acute respiratory syndrome coronavirus 2
  REGION 1..14: note = Table B: HLA-DQA1*01:02-B1*06:02L
AAMQRKLEKMADQA

SEQ ID NO: 18172 - protein, 12 aa, Severe acute respiratory syndrome coronavirus 2
  REGION 1..12: note = Table B: HLA-DQA1*01:02-B1*06:02L HLA-DQA1*02:01-B1*03:03L
ADQAMTQMYKQA

SEQ ID NO: 18173 - protein, 12 aa, Severe acute respiratory syndrome coronavirus 2
  REGION 1..12: note = Table B: HLA-DQA1*01:02-B1*06:02L HLA-DRB1*14:01L
QAMTQMYKQARS

SEQ ID NO: 18174 - protein, 14 aa, Severe acute respiratory syndrome coronavirus 2
  REGION 1..14: note = Table B: HLA-DQA1*01:02-B1*06:02L HLA-DRB1*08:01L
YKQARSEDKRAKVT

SEQ ID NO: 18175 - protein, 12 aa, Severe acute respiratory syndrome coronavirus 2
  REGION 1..12: note = Table B: HLA-DQA1*01:02-B1*06:02L
DKRAKVTSAMQT

SEQ ID NO: 18176 - protein, 10 aa, Severe acute respiratory syndrome coronavirus 2
  REGION 1..10: note = Table B: HLA-DQA1*01:02-B1*06:02L HLA-DPA1*03:01-B1*105:01L HLA-DQA1*01:03-B1*06:01L HLA-DQA1*02:01-B1*03:03L
VTSAMQTMLF

SEQ ID NO: 18177 - protein, 12 aa, Severe acute respiratory syndrome coronavirus 2
  REGION 1..12: note = Table B: HLA-DQA1*01:02-B1*06:02L
AMQTMLFTMLRK

SEQ ID NO: 18178 - protein, 13 aa, Severe acute respiratory syndrome coronavirus 2
  REGION 1..13: note = Table B: HLA-DQA1*01:02-B1*06:02L
MQTMLFTMLRKLD

SEQ ID NO: 18179 - protein, 10 aa, Severe acute respiratory syndrome coronavirus 2
  REGION 1..10: note = Table B: HLA-DQA1*01:02-B1*06:02L HLA-DRB1*08:01L HLA-DPA1*01:02-B1*04:01L HLA-DRB1*04:08L
LFTMLRKLDN

SEQ ID NO: 18180 - protein, 13 aa, Severe acute respiratory syndrome coronavirus 2
  REGION 1..13: note = Table B: HLA-DQA1*01:02-B1*06:02L HLA-DPA1*03:01-B1*105:01L
FTMLRKLDNDALN

SEQ ID NO: 18181 - protein, 13 aa, Severe acute respiratory syndrome coronavirus 2
  REGION 1..13: note = Table B: HLA-DQA1*01:02-B1*06:02L HLA-DQA1*01:03-B1*06:01L
IINNARDGCVPLN

SEQ ID NO: 18182 - protein, 15 aa, Severe acute respiratory syndrome coronavirus 2
  REGION 1..15: note = Table B: HLA-DQA1*01:02-B1*06:02L
INNARDGCVPLNIIP

SEQ ID NO: 18183 - protein, 13 aa, Severe acute respiratory syndrome coronavirus 2
  REGION 1..13: note = Table B: HLA-DQA1*01:02-B1*06:02L
ARDGCVPLNIIPL

SEQ ID NO: 18184 - protein, 14 aa, Severe acute respiratory syndrome coronavirus 2
  REGION 1..14: note = Table B: HLA-DQA1*01:02-B1*06:02L
RDGCVPLNIIPLTT

SEQ ID NO: 18185 - protein, 14 aa, Severe acute respiratory syndrome coronavirus 2
  REGION 1..14: note = Table B: HLA-DQA1*01:02-B1*06:02L
DGCVPLNIIPLTTA

SEQ ID NO: 18186 - protein, 12 aa, Severe acute respiratory syndrome coronavirus 2
  REGION 1..12: note = Table B: HLA-DQA1*01:02-B1*06:02L
PLNIIPLTTAAK

SEQ ID NO: 18187 - protein, 14 aa, Severe acute respiratory syndrome coronavirus 2
  REGION 1..14: note = Table B: HLA-DQA1*01:02-B1*06:02L HLA-DRB1*14:01L HLA-DQA1*05:05-B1*03:19L HLA-DPA1*03:01-B1*105:01L HLA-DQA1*05:05-B1*03:01L
IPLTTAAKLMVVIP

SEQ ID NO: 18188 - protein, 12 aa, Severe acute respiratory syndrome coronavirus 2
  REGION 1..12: note = Table B: HLA-DQA1*01:02-B1*06:02L HLA-DPA1*03:01-B1*105:01L HLA-DQA1*05:05-B1*03:01L HLA-DQA1*02:01-B1*03:03L
TAAKLMVVIPDY

SEQ ID NO: 18189 - protein, 13 aa, Severe acute respiratory syndrome coronavirus 2
  REGION 1..13: note = Table B: HLA-DQA1*01:02-B1*06:02L HLA-DRB1*08:04L HLA-DRB1*15:03L
YNTYKNTCDGTTF

SEQ ID NO: 18190 - protein, 10 aa, Severe acute respiratory syndrome coronavirus 2
  REGION 1..10: note = Table B: HLA-DQA1*01:02-B1*06:02L HLA-DRB1*08:77L HLA-DPA1*01:03-B1*03:01L HLA-DRB1*03:01L HLA-DRB1*14:02L HLA-DQA1*05:05-B1*03:19L HLA-DQA1*05:01-B1*02:01L HLA-DRB4*01:01L HLA-DPA1*01:03-B1*04:01L
  REGION 1..10: note = CONT. FROM ABOVE: HLA-DPA1*02:01-B1*13:01L HLA-DPA1*03:01-B1*105 :01L HLA-DPA1*01:03-B1*104:01L HLA-DQA1*02:01-B1*03:03L HLA-DRB1 *15:03L
NTCDGTTFTY

SEQ ID NO: 18191 - protein, 10 aa, Severe acute respiratory syndrome coronavirus 2
  REGION 1..10: note = Table B: HLA-DQA1*01:02-B1*06:02L
TTFTYASALW

SEQ ID NO: 18192 - protein, 11 aa, Severe acute respiratory syndrome coronavirus 2
  REGION 1..11: note = Table B: HLA-DQA1*01:02-B1*06:02L HLA-DPA1*03:01-B1*105:01L HLA-DQA1*01:03-B1*06:01L
FTYASALWEIQ

SEQ ID NO: 18193 - protein, 10 aa, Severe acute respiratory syndrome coronavirus 2
  REGION 1..10: note = Table B: HLA-DQA1*01:02-B1*06:02L HLA-DPA1*03:01-B1*04:02L HLA-DPA1*01:03-B1*04:02L HLA-DPA1*03:01-B1*105:01L HLA-DPA1*01:02-B1*04:01L HLA-DQA1*01:03-B1*06:01L
YASALWEIQQ

SEQ ID NO: 18194 - protein, 12 aa, Severe acute respiratory syndrome coronavirus 2
  REGION 1..12: note = Table B: HLA-DQA1*01:02-B1*06:02L HLA-DQA1*05:01-B1*02:01L HLA-DPA1*03:01-B1*105:01L HLA-DQA1*01:03-B1*06:01L HLA-DQA1*02:01-B1*03:03L
ASALWEIQQVVD

SEQ ID NO: 18195 - protein, 12 aa, Severe acute respiratory syndrome coronavirus 2
  REGION 1..12: note = Table B: HLA-DQA1*01:02-B1*06:02L HLA-DPA1*03:01-B1*105:01L
ALWEIQQVVDAD

SEQ ID NO: 18196 - protein, 12 aa, Severe acute respiratory syndrome coronavirus 2
  REGION 1..12: note = Table B: HLA-DQA1*01:02-B1*06:02L HLA-DPA1*03:01-B1*105:01L HLA-DQA1*05:05-B1*03:01L
SKIVQLSEISMD

SEQ ID NO: 18197 - protein, 14 aa, Severe acute respiratory syndrome coronavirus 2
  REGION 1..14: note = Table B: HLA-DQA1*01:02-B1*06:02L HLA-DQA1*05:05-B1*03:01L
SEISMDNSPNLAWP

SEQ ID NO: 18198 - protein, 15 aa, Severe acute respiratory syndrome coronavirus 2
  REGION 1..15: note = Table B: HLA-DQA1*01:02-B1*06:02L HLA-DQA1*05:05-B1*03:01L HLA-DQA1*01:03-B1*06:01L
ISMDNSPNLAWPLIV

SEQ ID NO: 18199 - protein, 10 aa, Severe acute respiratory syndrome coronavirus 2
  REGION 1..10: note = Table B: HLA-DQA1*01:02-B1*06:02L HLA-DPA1*03:01-B1*105:01L HLA-DQA1*03:01-B1*03:02L HLA-DPA1*01:02-B1*04:01L HLA-DQA1*01:03-B1*06:01L HLA-DQA1*02:01-B1*03:03L
LSPVALRQMS

SEQ ID NO: 18200 - protein, 14 aa, Severe acute respiratory syndrome coronavirus 2
  REGION 1..14: note = Table B: HLA-DQA1*01:02-B1*06:02L HLA-DRB1*01:02L
SPVALRQMSCAAGT

SEQ ID NO: 18201 - protein, 12 aa, Severe acute respiratory syndrome coronavirus 2
  REGION 1..12: note = Table B: HLA-DQA1*01:02-B1*06:02L
ALRQMSCAAGTT

SEQ ID NO: 18202 - protein, 13 aa, Severe acute respiratory syndrome coronavirus 2
  REGION 1..13: note = Table B: HLA-DQA1*01:02-B1*06:02L HLA-DQA1*05:05-B1*03:01L
RQMSCAAGTTQTA

SEQ ID NO: 18203 - protein, 16 aa, Severe acute respiratory syndrome coronavirus 2
  REGION 1..16: note = Table B: HLA-DQA1*01:02-B1*06:02L HLA-DQA1*05:05-B1*03:01L
QMSCAAGTTQTACTDD

SEQ ID NO: 18204 - protein, 14 aa, Severe acute respiratory syndrome coronavirus 2
  REGION 1..14: note = Table B: HLA-DQA1*01:02-B1*06:02L
AGTTQTACTDDNAL

SEQ ID NO: 18205 - protein, 14 aa, Severe acute respiratory syndrome coronavirus 2
  REGION 1..14: note = Table B: HLA-DQA1*01:02-B1*06:02L
NTTKGGRFVLALLS

SEQ ID NO: 18206 - protein, 14 aa, Severe acute respiratory syndrome coronavirus 2
  REGION 1..14: note = Table B: HLA-DQA1*01:02-B1*06:02L
TTKGGRFVLALLSD

SEQ ID NO: 18207 - protein, 12 aa, Severe acute respiratory syndrome coronavirus 2
  REGION 1..12: note = Table B: HLA-DQA1*01:02-B1*06:02L HLA-DPA1*01:03-B1*03:01L HLA-DPA1*03:01-B1*04:02L HLA-DPA1*01:03-B1*04:01L HLA-DPA1*01:03-B1*04:02L HLA-DRB1*12:01L HLA-DPA1*02:01-B1*13:01L HLA-DPA1*03:01-B1*105:01L
  REGION 1..12: note = CONT. FROM ABOVE: HLA-DPA1*01:03-B1*104:01L HLA-DPA1*01:02-B1*04 :01L HLA-DRB1*16:01L HLA-DQA1*01:03-B1*06:01L HLA-DRB1*15:03L
GGRFVLALLSDL

SEQ ID NO: 18208 - protein, 12 aa, Severe acute respiratory syndrome coronavirus 2
  REGION 1..12: note = Table B: HLA-DQA1*01:02-B1*06:02L HLA-DQA1*01-B1*05L HLA-DPA1*01:03-B1*04:01L HLA-DPA1*01:03-B1*04:02L HLA-DRB1*16:01L HLA-DQA1*01:03-B1*06:01L HLA-DRB1*04:08L HLA-DRB1*15:03L
GRFVLALLSDLQ

SEQ ID NO: 18209 - protein, 10 aa, Severe acute respiratory syndrome coronavirus 2
  REGION 1..10: note = Table B: HLA-DQA1*01:02-B1*06:02L
DLQDLKWARF

SEQ ID NO: 18210 - protein, 12 aa, Severe acute respiratory syndrome coronavirus 2
  REGION 1..12: note = Table B: HLA-DQA1*01:02-B1*06:02L HLA-DPA1*03:01-B1*04:02L HLA-DPA1*03:01-B1*105:01L HLA-DRB1*16:01L HLA-DRB1*04:08L
QDLKWARFPKSD

SEQ ID NO: 18211 - protein, 14 aa, Severe acute respiratory syndrome coronavirus 2
  REGION 1..14: note = Table B: HLA-DQA1*01:02-B1*06:02L
PKSDGTGTIYTELE

SEQ ID NO: 18212 - protein, 11 aa, Severe acute respiratory syndrome coronavirus 2
  REGION 1..11: note = Table B: HLA-DQA1*01:02-B1*06:02L HLA-DQA1*02:01-B1*03:03L
TPKGPKVKYLY

SEQ ID NO: 18213 - protein, 11 aa, Severe acute respiratory syndrome coronavirus 2
  REGION 1..11: note = Table B: HLA-DQA1*01:02-B1*06:02L HLA-DPA1*03:01-B1*04:02L HLA-DPA1*03:01-B1*105:01L HLA-DQA1*03:01-B1*03:02L HLA-DPA1*01:02-B1*04:01L HLA-DRB1*15:03L
YLYFIKGLNNL

SEQ ID NO: 18214 - protein, 12 aa, Severe acute respiratory syndrome coronavirus 2
  REGION 1..12: note = Table B: HLA-DQA1*01:02-B1*06:02L
GLNNLNRGMVLG

SEQ ID NO: 18215 - protein, 10 aa, Severe acute respiratory syndrome coronavirus 2
  REGION 1..10: note = Table B: HLA-DQA1*01:02-B1*06:02L HLA-DQA1*01:03-B1*06:01L HLA-DQA1*02:01-B1*03:03L
LNRGMVLGSL

SEQ ID NO: 18216 - protein, 12 aa, Severe acute respiratory syndrome coronavirus 2
  REGION 1..12: note = Table B: HLA-DQA1*01:02-B1*06:02L
NRGMVLGSLAAT

SEQ ID NO: 18217 - protein, 14 aa, Severe acute respiratory syndrome coronavirus 2
  REGION 1..14: note = Table B: HLA-DQA1*01:02-B1*06:02L HLA-DRB1*01:02L HLA-DPA1*03:01-B1*04:02L HLA-DQA1*01-B1*05L HLA-DRB1*12:01L HLA-DRB1*16:01L
STVLSFCAFAVDAA

SEQ ID NO: 18218 - protein, 12 aa, Severe acute respiratory syndrome coronavirus 2
  REGION 1..12: note = Table B: HLA-DQA1*01:02-B1*06:02L HLA-DPA1*03:01-B1*04:02L HLA-DPA1*01:03-B1*04:02L HLA-DPA1*03:01-B1*105:01L HLA-DPA1*01:02-B1*04:01L HLA-DRB1*04:08L HLA-DQA1*02:01-B1*03:03L
LSFCAFAVDAAK

SEQ ID NO: 18219 - protein, 12 aa, Severe acute respiratory syndrome coronavirus 2
  REGION 1..12: note = Table B: HLA-DQA1*01:02-B1*06:02L
SFCAFAVDAAKA

SEQ ID NO: 18220 - protein, 11 aa, Severe acute respiratory syndrome coronavirus 2
  REGION 1..11: note = Table B: HLA-DQA1*01:02-B1*06:02L HLA-DPA1*03:01-B1*04:02L HLA-DRB1*04:10L HLA-DPA1*01:03-B1*04:02L
FAVDAAKAYKD

SEQ ID NO: 18221 - protein, 13 aa, Severe acute respiratory syndrome coronavirus 2
  REGION 1..13: note = Table B: HLA-DQA1*01:02-B1*06:02L
QPITNCVKMLCTH

SEQ ID NO: 18222 - protein, 14 aa, Severe acute respiratory syndrome coronavirus 2
  REGION 1..14: note = Table B: HLA-DQA1*01:02-B1*06:02L
PITNCVKMLCTHTG

SEQ ID NO: 18223 - protein, 14 aa, Severe acute respiratory syndrome coronavirus 2
  REGION 1..14: note = Table B: HLA-DQA1*01:02-B1*06:02L HLA-DRB1*01:02L
TNCVKMLCTHTGTG

SEQ ID NO: 18224 - protein, 13 aa, Severe acute respiratory syndrome coronavirus 2
  REGION 1..13: note = Table B: HLA-DQA1*01:02-B1*06:02L
VKMLCTHTGTGQA

SEQ ID NO: 18225 - protein, 12 aa, Severe acute respiratory syndrome coronavirus 2
  REGION 1..12: note = Table B: HLA-DQA1*01:02-B1*06:02L HLA-DQA1*01-B1*05L HLA-DRB1*12:01L HLA-DQA1*05:05-B1*03:01L
ITVTPEANMDQE

SEQ ID NO: 18226 - protein, 14 aa, Severe acute respiratory syndrome coronavirus 2
  REGION 1..14: note = Table B: HLA-DQA1*01:02-B1*06:02L HLA-DPA1*03:01-B1*105:01L HLA-DQA1*05:05-B1*03:01L HLA-DQA1*01:03-B1*06:01L HLA-DQA1*02:01-B1*03:03L
PEANMDQESFGGAS

SEQ ID NO: 18227 - protein, 11 aa, Severe acute respiratory syndrome coronavirus 2
  REGION 1..11: note = Table B: HLA-DQA1*01:02-B1*06:02L HLA-DQA1*05:05-B1*03:19L
ESFGGASCCLY

SEQ ID NO: 18228 - protein, 12 aa, Severe acute respiratory syndrome coronavirus 2
  REGION 1..12: note = Table B: HLA-DQA1*01:02-B1*06:02L
SFGGASCCLYCR

SEQ ID NO: 18229 - protein, 17 aa, Severe acute respiratory syndrome coronavirus 2
  REGION 1..17: note = Table B: HLA-DQA1*01:02-B1*06:02L
IDHPNPKGFCDLKGKYV

SEQ ID NO: 18230 - protein, 12 aa, Severe acute respiratory syndrome coronavirus 2
  REGION 1..12: note = Table B: HLA-DQA1*01:02-B1*06:02L HLA-DQA1*03:01-B1*03:02L HLA-DQA1*02:01-B1*03:03L
DLKGKYVQIPTT

SEQ ID NO: 18231 - protein, 13 aa, Severe acute respiratory syndrome coronavirus 2
  REGION 1..13: note = Table B: HLA-DQA1*01:02-B1*06:02L HLA-DQA1*01:03-B1*06:01L
IPTTCANDPVGFT

SEQ ID NO: 18232 - protein, 12 aa, Severe acute respiratory syndrome coronavirus 2
  REGION 1..12: note = Table B: HLA-DQA1*01:02-B1*06:02L HLA-DPA1*03:01-B1*105:01L
FTLKNTVCTVCG

SEQ ID NO: 18233 - protein, 13 aa, Severe acute respiratory syndrome coronavirus 2
  REGION 1..13: note = Table B: HLA-DQA1*01:02-B1*06:02L
LKNTVCTVCGMWK

SEQ ID NO: 18234 - protein, 12 aa, Severe acute respiratory syndrome coronavirus 2
  REGION 1..12: note = Table B: HLA-DQA1*01:02-B1*06:02L
NTVCTVCGMWKG

SEQ ID NO: 18235 - protein, 10 aa, Severe acute respiratory syndrome coronavirus 2
  REGION 1..10: note = Table B: HLA-DQA1*01:02-B1*06:02L HLA-DQA1*01:03-B1*06:01L
TVCGMWKGYG

SEQ ID NO: 18236 - protein, 13 aa, Severe acute respiratory syndrome coronavirus 2
  REGION 1..13: note = Table B: HLA-DQA1*01:02-B1*06:02L
MWKGYGCSCDQLR

SEQ ID NO: 18237 - protein, 12 aa, Severe acute respiratory syndrome coronavirus 2
  REGION 1..12: note = Table B: HLA-DQA1*01:02-B1*06:02L
GYGCSCDQLREP

SEQ ID NO: 18238 - protein, 13 aa, Severe acute respiratory syndrome coronavirus 2
  REGION 1..13: note = Table B: HLA-DQA1*01:02-B1*06:02L
QLREPMLQSADAQ

SEQ ID NO: 18239 - protein, 11 aa, Severe acute respiratory syndrome coronavirus 2
  REGION 1..11: note = Table B: HLA-DQA1*01:02-B1*06:02L HLA-DPA1*03:01-B1*04:02L HLA-DQA1*05:05-B1*03:116L HLA-DPA1*02:01-B1*13:01L HLA-DPA1*03:01-B1*105:01L HLA-DPA1*01:02-B1*04:01L HLA-DRB1*15:03L
SADAQSFLNRV

SEQ ID NO: 18240 - protein, 12 aa, Severe acute respiratory syndrome coronavirus 2
  REGION 1..12: note = Table B: HLA-DQA1*01:02-B1*06:02L
ADAQSFLNRVCG

SEQ ID NO: 18241 - protein, 13 aa, Severe acute respiratory syndrome coronavirus 2
  REGION 1..13: note = Table B: HLA-DQA1*01:02-B1*06:02L
DAQSFLNRVCGVS

SEQ ID NO: 18242 - protein, 14 aa, Severe acute respiratory syndrome coronavirus 2
  REGION 1..14: note = Table B: HLA-DQA1*01:02-B1*06:02L
AQSFLNRVCGVSAA

SEQ ID NO: 18243 - protein, 10 aa, Severe acute respiratory syndrome coronavirus 2
  REGION 1..10: note = Table B: HLA-DQA1*01:02-B1*06:02L HLA-DQA1*01:03-B1*06:01L
NRVCGVSAAR

SEQ ID NO: 18244 - protein, 12 aa, Severe acute respiratory syndrome coronavirus 2
  REGION 1..12: note = Table B: HLA-DQA1*01:02-B1*06:02L HLA-DQA1*05:05-B1*03:01L
RLTPCGTGTSTD

SEQ ID NO: 18245 - protein, 14 aa, Severe acute respiratory syndrome coronavirus 2
  REGION 1..14: note = Table B: HLA-DQA1*01:02-B1*06:02L HLA-DQA1*05:05-B1*03:01L HLA-DQA1*01:03-B1*06:01L
LTPCGTGTSTDVVY

SEQ ID NO: 18246 - protein, 11 aa, Severe acute respiratory syndrome coronavirus 2
  REGION 1..11: note = Table B: HLA-DQA1*01:02-B1*06:02L HLA-DPA1*03:01-B1*04:02L HLA-DPA1*03:01-B1*105:01L HLA-DPA1*01:02-B1*04:01L
AFDIYNDKVAG

SEQ ID NO: 18247 - protein, 12 aa, Severe acute respiratory syndrome coronavirus 2
  REGION 1..12: note = Table B: HLA-DQA1*01:02-B1*06:02L HLA-DPA1*02:01-B1*13:01L HLA-DQA1*01:03-B1*06:01L
IYNDKVAGFAKF

SEQ ID NO: 18248 - protein, 12 aa, Severe acute respiratory syndrome coronavirus 2
  REGION 1..12: note = Table B: HLA-DQA1*01:02-B1*06:02L
FLKTNCCRFQEK

SEQ ID NO: 18249 - protein, 12 aa, Severe acute respiratory syndrome coronavirus 2
  REGION 1..12: note = Table B: HLA-DQA1*01:02-B1*06:02L
LKTNCCRFQEKD

SEQ ID NO: 18250 - protein, 12 aa, Severe acute respiratory syndrome coronavirus 2
  REGION 1..12: note = Table B: HLA-DQA1*01:02-B1*06:02L
KTNCCRFQEKDE

SEQ ID NO: 18251 - protein, 14 aa, Severe acute respiratory syndrome coronavirus 2
  REGION 1..14: note = Table B: HLA-DQA1*01:02-B1*06:02L
TNCCRFQEKDEDDN

SEQ ID NO: 18252 - protein, 13 aa, Severe acute respiratory syndrome coronavirus 2
  REGION 1..13: note = Table B: HLA-DQA1*01:02-B1*06:02L HLA-DQA1*01:03-B1*06:01L
EDDNLIDSYFVVK

SEQ ID NO: 18253 - protein, 13 aa, Severe acute respiratory syndrome coronavirus 2
  REGION 1..13: note = Table B: HLA-DQA1*01:02-B1*06:02L HLA-DQA1*02:01-B1*03:03L
YNLLKDCPAVAKH

SEQ ID NO: 18254 - protein, 10 aa, Severe acute respiratory syndrome coronavirus 2
  REGION 1..10: note = Table B: HLA-DQA1*01:02-B1*06:02L HLA-DQA1*01:03-B1*06:01L HLA-DQA1*02:01-B1*03:03L
DCPAVAKHDF

SEQ ID NO: 18255 - protein, 10 aa, Severe acute respiratory syndrome coronavirus 2
  REGION 1..10: note = Table B: HLA-DQA1*01:02-B1*06:02L HLA-DQA1*01:03-B1*06:01L HLA-DQA1*02:01-B1*03:03L
AVAKHDFFKF

SEQ ID NO: 18256 - protein, 14 aa, Severe acute respiratory syndrome coronavirus 2
  REGION 1..14: note = Table B: HLA-DQA1*01:02-B1*06:02L HLA-DQA1*05:01-B1*02:01L HLA-DPA1*03:01-B1*105:01L HLA-DPA1*01:02-B1*04:01L
DFFKFRIDGDMVPH

SEQ ID NO: 18257 - protein, 11 aa, Severe acute respiratory syndrome coronavirus 2
  REGION 1..11: note = Table B: HLA-DQA1*01:02-B1*06:02L HLA-DQA1*05:01-B1*02:01L HLA-DPA1*02:01-B1*13:01L HLA-DQA1*01:03-B1*06:01L
FRIDGDMVPHI

SEQ ID NO: 18258 - protein, 11 aa, Severe acute respiratory syndrome coronavirus 2
  REGION 1..11: note = Table B: HLA-DQA1*01:02-B1*06:02L
DMVPHISRQRL

SEQ ID NO: 18259 - protein, 10 aa, Severe acute respiratory syndrome coronavirus 2
  REGION 1..10: note = Table B: HLA-DQA1*01:02-B1*06:02L HLA-DQA1*05:05-B1*03:19L HLA-DQA1*05:01-B1*02:01L HLA-DQA1*02:01-B1*03:03L
TKYTMADLVY

SEQ ID NO: 18260 - protein, 12 aa, Severe acute respiratory syndrome coronavirus 2
  REGION 1..12: note = Table B: HLA-DQA1*01:02-B1*06:02L HLA-DRB1*08:04L HLA-DRB1*16:01L HLA-DRB1*04:08L
LVYALRHFDEGN

SEQ ID NO: 18261 - protein, 13 aa, Severe acute respiratory syndrome coronavirus 2
  REGION 1..13: note = Table B: HLA-DQA1*01:02-B1*06:02L HLA-DQA1*01:03-B1*06:01L
FDEGNCDTLKEIL

SEQ ID NO: 18262 - protein, 14 aa, Severe acute respiratory syndrome coronavirus 2
  REGION 1..14: note = Table B: HLA-DQA1*01:02-B1*06:02L HLA-DPA1*03:01-B1*105:01L HLA-DQA1*01:03-B1*06:01L HLA-DRB1*15:03L
DEGNCDTLKEILVT

SEQ ID NO: 18263 - protein, 14 aa, Severe acute respiratory syndrome coronavirus 2
  REGION 1..14: note = Table B: HLA-DQA1*01:02-B1*06:02L HLA-DPA1*02:01-B1*13:01L HLA-DPA1*03:01-B1*105:01L HLA-DRB1*15:03L
ILVTYNCCDDDYFN

SEQ ID NO: 18264 - protein, 12 aa, Severe acute respiratory syndrome coronavirus 2
  REGION 1..12: note = Table B: HLA-DQA1*01:02-B1*06:02L HLA-DRB1*08:01L HLA-DQA1*01-B1*05L HLA-DQA1*03:01-B1*03:02L
DDDYFNKKDWYD

SEQ ID NO: 18265 - protein, 10 aa, Severe acute respiratory syndrome coronavirus 2
  REGION 1..10: note = Table B: HLA-DQA1*01:02-B1*06:02L HLA-DPA1*02:01-B1*13:01L HLA-DQA1*01:03-B1*06:01L
YFNKKDWYDF

SEQ ID NO: 18266 - protein, 13 aa, Severe acute respiratory syndrome coronavirus 2
  REGION 1..13: note = Table B: HLA-DQA1*01:02-B1*06:02L HLA-DQA1*01:01-B1*05:01L HLA-DPA1*03:01-B1*105:01L HLA-DPA1*01:02-B1*04:01L HLA-DQA1*01:03-B1*06:01L HLA-DRB1*04:08L HLA-DQA1*02:01-B1*03:03L HLA-DRB1*15:03L
NKKDWYDFVENPD

SEQ ID NO: 18267 - protein, 12 aa, Severe acute respiratory syndrome coronavirus 2
  REGION 1..12: note = Table B: HLA-DQA1*01:02-B1*06:02L HLA-DPA1*03:01-B1*04:02L HLA-DRB1*12:01L HLA-DPA1*02:01-B1*13:01L HLA-DPA1*03:01-B1*105:01L HLA-DRB1*16:01L HLA-DQA1*01:03-B1*06:01L HLA-DRB1*15:03L
DWYDFVENPDIL

SEQ ID NO: 18268 - protein, 10 aa, Severe acute respiratory syndrome coronavirus 2
  REGION 1..10: note = Table B: HLA-DQA1*01:02-B1*06:02L
NLGERVRQAL

SEQ ID NO: 18269 - protein, 10 aa, Severe acute respiratory syndrome coronavirus 2
  REGION 1..10: note = Table B: HLA-DQA1*01:02-B1*06:02L HLA-DPA1*03:01-B1*105:01L HLA-DPA1*01:02-B1*04:01L HLA-DQA1*01:03-B1*06:01L HLA-DQA1*02:01-B1*03:03L
VRQALLKTVQ

SEQ ID NO: 18270 - protein, 12 aa, Severe acute respiratory syndrome coronavirus 2
  REGION 1..12: note = Table B: HLA-DQA1*01:02-B1*06:02L HLA-DPA1*03:01-B1*04:02L HLA-DPA1*01:03-B1*04:01L HLA-DPA1*01:03-B1*04:02L HLA-DPA1*01:02-B1*04:01L HLA-DQA1*01:03-B1*06:01L
ALLKTVQFCDAM

SEQ ID NO: 18271 - protein, 12 aa, Severe acute respiratory syndrome coronavirus 2
  REGION 1..12: note = Table B: HLA-DQA1*01:02-B1*06:02L HLA-DQA1*01:03-B1*06:01L HLA-DRB1*04:08L
LLKTVQFCDAMR

SEQ ID NO: 18272 - protein, 12 aa, Severe acute respiratory syndrome coronavirus 2
  REGION 1..12: note = Table B: HLA-DQA1*01:02-B1*06:02L HLA-DQA1*03:01-B1*03:02L HLA-DQA1*01:03-B1*06:01L HLA-DQA1*02:01-B1*03:03L
NAGIVGVLTLDN

SEQ ID NO: 18273 - protein, 11 aa, Severe acute respiratory syndrome coronavirus 2
  REGION 1..11: note = Table B: HLA-DQA1*01:02-B1*06:02L HLA-DQA1*05:01-B1*02:01L
TPGSGVPVVDS

SEQ ID NO: 18274 - protein, 11 aa, Severe acute respiratory syndrome coronavirus 2
  REGION 1..11: note = Table B: HLA-DQA1*01:02-B1*06:02L HLA-DQA1*05:01-B1*02:01L HLA-DQA1*02:01-B1*03:03L
PGSGVPVVDSY

SEQ ID NO: 18275 - protein, 12 aa, Severe acute respiratory syndrome coronavirus 2
  REGION 1..12: note = Table B: HLA-DQA1*01:02-B1*06:02L HLA-DRB1*01:02L HLA-DPA1*03:01-B1*105:01L
YSLLMPILTLTR

SEQ ID NO: 18276 - protein, 12 aa, Severe acute respiratory syndrome coronavirus 2
  REGION 1..12: note = Table B: HLA-DQA1*01:02-B1*06:02L
SLLMPILTLTRA

SEQ ID NO: 18277 - protein, 12 aa, Severe acute respiratory syndrome coronavirus 2
  REGION 1..12: note = Table B: HLA-DQA1*01:02-B1*06:02L HLA-DRB1*12:01L HLA-DRB1*15:03L
LMPILTLTRALT

SEQ ID NO: 18278 - protein, 12 aa, Severe acute respiratory syndrome coronavirus 2
  REGION 1..12: note = Table B: HLA-DQA1*01:02-B1*06:02L
LTAESHVDTDLT

SEQ ID NO: 18279 - protein, 11 aa, Severe acute respiratory syndrome coronavirus 2
  REGION 1..11: note = Table B: HLA-DQA1*01:02-B1*06:02L
DTDLTKPYIKW

SEQ ID NO: 18280 - protein, 14 aa, Severe acute respiratory syndrome coronavirus 2
  REGION 1..14: note = Table B: HLA-DQA1*01:02-B1*06:02L
TDLTKPYIKWDLLK

SEQ ID NO: 18281 - protein, 10 aa, Severe acute respiratory syndrome coronavirus 2
  REGION 1..10: note = Table B: HLA-DQA1*01:02-B1*06:02L HLA-DQA1*01:03-B1*06:01L
DFTEERLKLF

SEQ ID NO: 18282 - protein, 12 aa, Severe acute respiratory syndrome coronavirus 2
  REGION 1..12: note = Table B: HLA-DQA1*01:02-B1*06:02L HLA-DRB1*01:02L HLA-DRB1*08:04L HLA-DPA1*03:01-B1*04:02L HLA-DRB1*14:01L HLA-DRB1*12:01L HLA-DPA1*02:01-B1*13:01L HLA-DRB1*15:03L
YFKYWDQTYHPN

SEQ ID NO: 18283 - protein, 12 aa, Severe acute respiratory syndrome coronavirus 2
  REGION 1..12: note = Table B: HLA-DQA1*01:02-B1*06:02L HLA-DPA1*03:01-B1*105:01L HLA-DQA1*05:05-B1*03:01L HLA-DQA1*01:03-B1*06:01L
YWDQTYHPNCVN

SEQ ID NO: 18284 - protein, 14 aa, Severe acute respiratory syndrome coronavirus 2
  REGION 1..14: note = Table B: HLA-DQA1*01:02-B1*06:02L HLA-DRB1*01:02L HLA-DRB1*14:01L HLA-DRB1*15:03L
DQTYHPNCVNCLDD

SEQ ID NO: 18285 - protein, 12 aa, Severe acute respiratory syndrome coronavirus 2
  REGION 1..12: note = Table B: HLA-DQA1*01:02-B1*06:02L
YHPNCVNCLDDR

SEQ ID NO: 18286 - protein, 12 aa, Severe acute respiratory syndrome coronavirus 2
  REGION 1..12: note = Table B: HLA-DQA1*01:02-B1*06:02L
DDRCILHCANFN

SEQ ID NO: 18287 - protein, 10 aa, Severe acute respiratory syndrome coronavirus 2
  REGION 1..10: note = Table B: HLA-DQA1*01:02-B1*06:02L HLA-DPA1*03:01-B1*04:02L HLA-DQA1*01-B1*05L HLA-DPA1*01:03-B1*04:01L HLA-DPA1*01:03-B1*04:02L HLA-DRB1*12:01L HLA-DPA1*03:01-B1*105:01L HLA-DPA1*01:02-B1*04:01L
  REGION 1..10: note = CONT. FROM ABOVE: HLA-DRB1*16:01L HLA-DQA1*01:03-B1*06:01L HLA-D RB1*04:08L HLA-DRB1*15:03L
ILHCANFNVL

SEQ ID NO: 18288 - protein, 14 aa, Severe acute respiratory syndrome coronavirus 2
  REGION 1..14: note = Table B: HLA-DQA1*01:02-B1*06:02L HLA-DRB1*01:02L HLA-DRB1*14:01L HLA-DQA1*05:01-B1*02:01L HLA-DQA1*05:05-B1*03:01L HLA-DRB1*16:01L HLA-DQA1*02:01-B1*03:03L
ANFNVLFSTVFPPT

SEQ ID NO: 18289 - protein, 12 aa, Severe acute respiratory syndrome coronavirus 2
  REGION 1..12: note = Table B: HLA-DQA1*01:02-B1*06:02L HLA-DPA1*03:01-B1*04:02L HLA-DPA1*03:01-B1*105:01L HLA-DPA1*01:02-B1*04:01L HLA-DQA1*01:03-B1*06:01L
NVLFSTVFPPTS

SEQ ID NO: 18290 - protein, 10 aa, Severe acute respiratory syndrome coronavirus 2
  REGION 1..10: note = Table B: HLA-DQA1*01:02-B1*06:02L HLA-DQA1*05:05-B1*03:19L HLA-DPA1*02:01-B1*13:01L HLA-DPA1*03:01-B1*105:01L HLA-DQA1*01:03-B1*06:01L HLA-DQA1*02:01-B1*03:03L HLA-DRB1*15:03L
FSTVFPPTSF

SEQ ID NO: 18291 - protein, 10 aa, Severe acute respiratory syndrome coronavirus 2
  REGION 1..10: note = Table B: HLA-DQA1*01:02-B1*06:02L HLA-DQA1*05:05-B1*03:19L HLA-DQA1*02:01-B1*03:03L
TSFGPLVRKI

SEQ ID NO: 18292 - protein, 12 aa, Severe acute respiratory syndrome coronavirus 2
  REGION 1..12: note = Table B: HLA-DQA1*01:02-B1*06:02L HLA-DRB1*14:01L HLA-DRB1*08:01L
FGPLVRKIFVDG

SEQ ID NO: 18293 - protein, 14 aa, Severe acute respiratory syndrome coronavirus 2
  REGION 1..14: note = Table B: HLA-DQA1*01:02-B1*06:02L HLA-DRB1*01:02L HLA-DRB1*12:01L HLA-DPA1*03:01-B1*105:01L HLA-DRB1*15:03L
VSTGYHFRELGVVH

SEQ ID NO: 18294 - protein, 13 aa, Severe acute respiratory syndrome coronavirus 2
  REGION 1..13: note = Table B: HLA-DQA1*01:02-B1*06:02L HLA-DRB1*11:01L HLA-DPA1*03:01-B1*105:01L HLA-DRB1*15:03L
TGYHFRELGVVHN

SEQ ID NO: 18295 - protein, 12 aa, Severe acute respiratory syndrome coronavirus 2
  REGION 1..12: note = Table B: HLA-DQA1*01:02-B1*06:02L HLA-DRB1*01:01L HLA-DRB1*08:01L HLA-DRB1*11:01L HLA-DRB1*12:01L HLA-DPA1*03:01-B1*105:01L
HFRELGVVHNQD

SEQ ID NO: 18296 - protein, 12 aa, Severe acute respiratory syndrome coronavirus 2
  REGION 1..12: note = Table B: HLA-DQA1*01:02-B1*06:02L
VHNQDVNLHSSR

SEQ ID NO: 18297 - protein, 12 aa, Severe acute respiratory syndrome coronavirus 2
  REGION 1..12: note = Table B: HLA-DQA1*01:02-B1*06:02L
HNQDVNLHSSRL

SEQ ID NO: 18298 - protein, 11 aa, Severe acute respiratory syndrome coronavirus 2
  REGION 1..11: note = Table B: HLA-DQA1*01:02-B1*06:02L HLA-DQA1*01:03-B1*06:01L
DVNLHSSRLSF

SEQ ID NO: 18299 - protein, 12 aa, Severe acute respiratory syndrome coronavirus 2
  REGION 1..12: note = Table B: HLA-DQA1*01:02-B1*06:02L HLA-DQA1*01:03-B1*06:01L
NLHSSRLSFKEL

SEQ ID NO: 18300 - protein, 10 aa, Severe acute respiratory syndrome coronavirus 2
  REGION 1..10: note = Table B: HLA-DQA1*01:02-B1*06:02L HLA-DRB1*03:01L HLA-DQA1*05:05-B1*03:19L HLA-DQA1*02:01-B1*03:03L
RLSFKELLVY

SEQ ID NO: 18301 - protein, 12 aa, Severe acute respiratory syndrome coronavirus 2
  REGION 1..12: note = Table B: HLA-DQA1*01:02-B1*06:02L HLA-DRB1*01:01L HLA-DRB1*08:04L HLA-DPA1*01:03-B1*03:01L HLA-DRB1*11:04L HLA-DRB1*14:02L HLA-DQA1*01:01-B1*05:01L HLA-DRB1*08:01L HLA-DRB1*11:01L HLA-DRB5*01:01L HLA-DRB4*02:01NL HLA-DRB4*01:01L
  REGION 1..12: note = CONT. FROM ABOVE: HLA-DPA1*01:03-B1*04:01L HLA-DRB1*04:10L HLA-D PA1*01:03-B1*04:02L HLA-DRB3*01:01L HLA-DPA1*02:01-B1*13:01L HLA -DPA1*03:01-B1*105:01L HLA-DRB1*14:54L HLA-DPA1*01:03-B1*104:01L HLA-DRB1*14:17L HLA-DRB1*10:01L HLA-DRB1*04:08L HLA-DRB1*08:03L
DPAMHAASGNLL

SEQ ID NO: 18302 - protein, 14 aa, Severe acute respiratory syndrome coronavirus 2
  REGION 1..14: note = Table B: HLA-DQA1*01:02-B1*06:02L HLA-DPA1*01:03-B1*03:01L HLA-DPA1*02:01-B1*13:01L
LDKRTTCFSVAALT

SEQ ID NO: 18303 - protein, 14 aa, Severe acute respiratory syndrome coronavirus 2
  REGION 1..14: note = Table B: HLA-DQA1*01:02-B1*06:02L HLA-DPA1*01:03-B1*03:01L HLA-DPA1*02:01-B1*13:01L
DKRTTCFSVAALTN

SEQ ID NO: 18304 - protein, 13 aa, Severe acute respiratory syndrome coronavirus 2
  REGION 1..13: note = Table B: HLA-DQA1*01:02-B1*06:02L
RTTCFSVAALTNN

SEQ ID NO: 18305 - protein, 12 aa, Severe acute respiratory syndrome coronavirus 2
  REGION 1..12: note = Table B: HLA-DQA1*01:02-B1*06:02L HLA-DPA1*03:01-B1*105:01L HLA-DQA1*03:01-B1*03:02L HLA-DQA1*01:03-B1*06:01L HLA-DQA1*02:01-B1*03:03L
LTNNVAFQTVKP

SEQ ID NO: 18306 - protein, 12 aa, Severe acute respiratory syndrome coronavirus 2
  REGION 1..12: note = Table B: HLA-DQA1*01:02-B1*06:02L HLA-DQA1*01-B1*05L HLA-DQA1*05:01-B1*02:01L HLA-DPA1*03:01-B1*105:01L
PGNFNKDFYDFA

SEQ ID NO: 18307 - protein, 12 aa, Severe acute respiratory syndrome coronavirus 2
  REGION 1..12: note = Table B: HLA-DQA1*01:02-B1*06:02L HLA-DQA1*01:03-B1*06:01L
AVSKGFFKEGSS

SEQ ID NO: 18308 - protein, 12 aa, Severe acute respiratory syndrome coronavirus 2
  REGION 1..12: note = Table B: HLA-DQA1*01:02-B1*06:02L HLA-DRB1*08:01L HLA-DRB1*12:01L HLA-DRB1*04:08L
FFKEGSSVELKH

SEQ ID NO: 18309 - protein, 10 aa, Severe acute respiratory syndrome coronavirus 2
  REGION 1..10: note = Table B: HLA-DQA1*01:02-B1*06:02L HLA-DQA1*01:03-B1*06:01L HLA-DQA1*02:01-B1*03:03L
GSSVELKHFF

SEQ ID NO: 18310 - protein, 10 aa, Severe acute respiratory syndrome coronavirus 2
  REGION 1..10: note = Table B: HLA-DQA1*01:02-B1*06:02L HLA-DQA1*05:05-B1*03:19L HLA-DQA1*05:01-B1*02:01L HLA-DQA1*01:03-B1*06:01L HLA-DQA1*02:01-B1*03:03L
SSVELKHFFF

SEQ ID NO: 18311 - protein, 13 aa, Severe acute respiratory syndrome coronavirus 2
  REGION 1..13: note = Table B: HLA-DQA1*01:02-B1*06:02L HLA-DQA1*01-B1*05L HLA-DPA1*03:01-B1*105:01L HLA-DQA1*03:01-B1*03:02L HLA-DPA1*01:02-B1*04:01L HLA-DQA1*01:03-B1*06:01L
VELKHFFFAQDGN

SEQ ID NO: 18312 - protein, 10 aa, Severe acute respiratory syndrome coronavirus 2
  REGION 1..10: note = Table B: HLA-DQA1*01:02-B1*06:02L HLA-DQA1*05:05-B1*03:19L HLA-DQA1*05:01-B1*02:01L
GNAAISDYDY

SEQ ID NO: 18313 - protein, 12 aa, Severe acute respiratory syndrome coronavirus 2
  REGION 1..12: note = Table B: HLA-DQA1*01:02-B1*06:02L HLA-DPA1*03:01-B1*105:01L HLA-DQA1*01:03-B1*06:01L
YNLPTMCDIRQL

SEQ ID NO: 18314 - protein, 10 aa, Severe acute respiratory syndrome coronavirus 2
  REGION 1..10: note = Table B: HLA-DQA1*01:02-B1*06:02L HLA-DQA1*01:03-B1*06:01L
PTMCDIRQLL

SEQ ID NO: 18315 - protein, 14 aa, Severe acute respiratory syndrome coronavirus 2
  REGION 1..14: note = Table B: HLA-DQA1*01:02-B1*06:02L HLA-DQA1*05:05-B1*03:01L
FDCYDGGCINANQV

SEQ ID NO: 18316 - protein, 14 aa, Severe acute respiratory syndrome coronavirus 2
  REGION 1..14: note = Table B: HLA-DQA1*01:02-B1*06:02L
DCYDGGCINANQVI

SEQ ID NO: 18317 - protein, 13 aa, Severe acute respiratory syndrome coronavirus 2
  REGION 1..13: note = Table B: HLA-DQA1*01:02-B1*06:02L HLA-DQA1*05:05-B1*03:01L HLA-DQA1*01:03-B1*06:01L
YDGGCINANQVIV

SEQ ID NO: 18318 - protein, 12 aa, Severe acute respiratory syndrome coronavirus 2
  REGION 1..12: note = Table B: HLA-DQA1*01:02-B1*06:02L
IVNNLDKSAGFP

SEQ ID NO: 18319 - protein, 13 aa, Severe acute respiratory syndrome coronavirus 2
  REGION 1..13: note = Table B: HLA-DQA1*01:02-B1*06:02L HLA-DRB1*01:02L
SAGFPFNKWGKAR

SEQ ID NO: 18320 - protein, 13 aa, Severe acute respiratory syndrome coronavirus 2
  REGION 1..13: note = Table B: HLA-DQA1*01:02-B1*06:02L
PFNKWGKARLYYD

SEQ ID NO: 18321 - protein, 12 aa, Severe acute respiratory syndrome coronavirus 2
  REGION 1..12: note = Table B: HLA-DQA1*01:02-B1*06:02L HLA-DQA1*01:03-B1*06:01L
NKWGKARLYYDS

SEQ ID NO: 18322 - protein, 14 aa, Severe acute respiratory syndrome coronavirus 2
  REGION 1..14: note = Table B: HLA-DQA1*01:02-B1*06:02L
WGKARLYYDSMSYE

SEQ ID NO: 18323 - protein, 14 aa, Severe acute respiratory syndrome coronavirus 2
  REGION 1..14: note = Table B: HLA-DQA1*01:02-B1*06:02L HLA-DPA1*03:01-B1*04:02L HLA-DRB1*08:01L HLA-DPA1*02:01-B1*13:01L HLA-DRB1*16:01L HLA-DRB1*04:08L HLA-DRB1*15:03L
RLYYDSMSYEDQDA

SEQ ID NO: 18324 - protein, 12 aa, Severe acute respiratory syndrome coronavirus 2
  REGION 1..12: note = Table B: HLA-DQA1*01:02-B1*06:02L HLA-DQA1*01:03-B1*06:01L HLA-DQA1*02:01-B1*03:03L
DQDALFAYTKRN

SEQ ID NO: 18325 - protein, 11 aa, Severe acute respiratory syndrome coronavirus 2
  REGION 1..11: note = Table B: HLA-DQA1*01:02-B1*06:02L HLA-DPA1*03:01-B1*04:02L HLA-DRB1*14:01L HLA-DRB1*14:02L HLA-DQA1*05:05-B1*03:19L HLA-DQA1*05:01-B1*02:01L HLA-DQA1*05:05-B1*03:116L HLA-DRB1*09:01L HLA-DPA1*03:01-B1*105:01L
  REGION 1..11: note = CONT. FROM ABOVE: HLA-DPA1*01:02-B1*04:01L HLA-DRB1*16:01L
NVIPTITQMNL

SEQ ID NO: 18326 - protein, 11 aa, Severe acute respiratory syndrome coronavirus 2
  REGION 1..11: note = Table B: HLA-DQA1*01:02-B1*06:02L
ITQMNLKYAIS

SEQ ID NO: 18327 - protein, 11 aa, Severe acute respiratory syndrome coronavirus 2
  REGION 1..11: note = Table B: HLA-DQA1*01:02-B1*06:02L
TVAGVSICSTM

SEQ ID NO: 18328 - protein, 12 aa, Severe acute respiratory syndrome coronavirus 2
  REGION 1..12: note = Table B: HLA-DQA1*01:02-B1*06:02L HLA-DQA1*05:05-B1*03:01L HLA-DQA1*01:03-B1*06:01L
VAGVSICSTMTN

SEQ ID NO: 18329 - protein, 11 aa, Severe acute respiratory syndrome coronavirus 2
  REGION 1..11: note = Table B: HLA-DQA1*01:02-B1*06:02L
SICSTMTNRQF

SEQ ID NO: 18330 - protein, 11 aa, Severe acute respiratory syndrome coronavirus 2
  REGION 1..11: note = Table B: HLA-DQA1*01:02-B1*06:02L
ICSTMTNRQFH

SEQ ID NO: 18331 - protein, 13 aa, Severe acute respiratory syndrome coronavirus 2
  REGION 1..13: note = Table B: HLA-DQA1*01:02-B1*06:02L HLA-DRB1*01:02L HLA-DPA1*03:01-B1*04:02L HLA-DRB1*08:01L HLA-DRB1*12:01L HLA-DPA1*03:01-B1*105:01L
NRQFHQKLLKSIA

SEQ ID NO: 18332 - protein, 13 aa, Severe acute respiratory syndrome coronavirus 2
  REGION 1..13: note = Table B: HLA-DQA1*01:02-B1*06:02L
QFHQKLLKSIAAT

SEQ ID NO: 18333 - protein, 13 aa, Severe acute respiratory syndrome coronavirus 2
  REGION 1..13: note = Table B: HLA-DQA1*01:02-B1*06:02L HLA-DQA1*02:01-B1*03:03L HLA-DRB1*15:03L
TSKFYGGWHNMLK

SEQ ID NO: 18334 - protein, 10 aa, Severe acute respiratory syndrome coronavirus 2
  REGION 1..10: note = Table B: HLA-DQA1*01:02-B1*06:02L HLA-DQA1*05:05-B1*03:19L HLA-DQA1*01:03-B1*06:01L HLA-DQA1*02:01-B1*03:03L
GWHNMLKTVY

SEQ ID NO: 18335 - protein, 13 aa, Severe acute respiratory syndrome coronavirus 2
  REGION 1..13: note = Table B: HLA-DQA1*01:02-B1*06:02L HLA-DRB1*08:04L HLA-DPA1*03:01-B1*04:02L HLA-DRB1*12:01L HLA-DPA1*02:01-B1*13:01L HLA-DRB1*16:01L HLA-DQA1*01:03-B1*06:01L HLA-DRB1*15:03L
WHNMLKTVYSDVE

SEQ ID NO: 18336 - protein, 13 aa, Severe acute respiratory syndrome coronavirus 2
  REGION 1..13: note = Table B: HLA-DQA1*01:02-B1*06:02L HLA-DRB1*08:01L
GWDYPKCDRAMPN

SEQ ID NO: 18337 - protein, 14 aa, Severe acute respiratory syndrome coronavirus 2
  REGION 1..14: note = Table B: HLA-DQA1*01:02-B1*06:02L HLA-DRB1*01:02L
DYPKCDRAMPNMLR

SEQ ID NO: 18338 - protein, 11 aa, Severe acute respiratory syndrome coronavirus 2
  REGION 1..11: note = Table B: HLA-DQA1*01:02-B1*06:02L HLA-DQA1*05:01-B1*02:01L HLA-DQA1*03:01-B1*03:02L
MPNMLRIMASL

SEQ ID NO: 18339 - protein, 11 aa, Severe acute respiratory syndrome coronavirus 2
  REGION 1..11: note = Table B: HLA-DQA1*01:02-B1*06:02L
IMASLVLARKH

SEQ ID NO: 18340 - protein, 12 aa, Severe acute respiratory syndrome coronavirus 2
  REGION 1..12: note = Table B: HLA-DQA1*01:02-B1*06:02L
HTTCCSLSHRFY

SEQ ID NO: 18341 - protein, 12 aa, Severe acute respiratory syndrome coronavirus 2
  REGION 1..12: note = Table B: HLA-DQA1*01:02-B1*06:02L HLA-DRB1*01:02L HLA-DPA1*01:03-B1*03:01L HLA-DRB1*12:01L HLA-DPA1*02:01-B1*13:01L HLA-DPA1*03:01-B1*105:01L HLA-DRB1*15:03L
FYRLANECAQVL

SEQ ID NO: 18342 - protein, 12 aa, Severe acute respiratory syndrome coronavirus 2
  REGION 1..12: note = Table B: HLA-DQA1*01:02-B1*06:02L HLA-DRB1*01:02L HLA-DQA1*01:03-B1*06:01L HLA-DQA1*02:01-B1*03:03L HLA-DRB1*15:03L
RLANECAQVLSE

SEQ ID NO: 18343 - protein, 10 aa, Severe acute respiratory syndrome coronavirus 2
  REGION 1..10: note = Table B: HLA-DQA1*01:02-B1*06:02L HLA-DQA1*01:03-B1*06:01L
NECAQVLSEM

SEQ ID NO: 18344 - protein, 12 aa, Severe acute respiratory syndrome coronavirus 2
  REGION 1..12: note = Table B: HLA-DQA1*01:02-B1*06:02L
VLSEMVMCGGSL

SEQ ID NO: 18345 - protein, 14 aa, Severe acute respiratory syndrome coronavirus 2
  REGION 1..14: note = Table B: HLA-DQA1*01:02-B1*06:02L HLA-DRB1*01:02L HLA-DRB1*15:03L
SEMVMCGGSLYVKP

SEQ ID NO: 18346 - protein, 12 aa, Severe acute respiratory syndrome coronavirus 2
  REGION 1..12: note = Table B: HLA-DQA1*01:02-B1*06:02L HLA-DQA1*01:03-B1*06:01L
VMCGGSLYVKPG

SEQ ID NO: 18347 - protein, 14 aa, Severe acute respiratory syndrome coronavirus 2
  REGION 1..14: note = Table B: HLA-DQA1*01:02-B1*06:02L
GSLYVKPGGTSSGD

SEQ ID NO: 18348 - protein, 12 aa, Severe acute respiratory syndrome coronavirus 2
  REGION 1..12: note = Table B: HLA-DQA1*01:02-B1*06:02L HLA-DPA1*03:01-B1*105:01L HLA-DQA1*01:03-B1*06:01L
ANSVFNICQAVT

SEQ ID NO: 18349 - protein, 13 aa, Severe acute respiratory syndrome coronavirus 2
  REGION 1..13: note = Table B: HLA-DQA1*01:02-B1*06:02L
ICQAVTANVNALL

SEQ ID NO: 18350 - protein, 13 aa, Severe acute respiratory syndrome coronavirus 2
  REGION 1..13: note = Table B: HLA-DQA1*01:02-B1*06:02L HLA-DQA1*03:01-B1*03:02L HLA-DQA1*05:05-B1*03:01L HLA-DQA1*01:03-B1*06:01L HLA-DQA1*02:01-B1*03:03L
VTANVNALLSTDG

SEQ ID NO: 18351 - protein, 13 aa, Severe acute respiratory syndrome coronavirus 2
  REGION 1..13: note = Table B: HLA-DQA1*01:02-B1*06:02L HLA-DRB1*11:04L HLA-DPA1*01:02-B1*04:01L
QHRLYECLYRNRD

SEQ ID NO: 18352 - protein, 10 aa, Severe acute respiratory syndrome coronavirus 2
  REGION 1..10: note = Table B: HLA-DQA1*01:02-B1*06:02L HLA-DRB1*08:77L HLA-DPA1*01:03-B1*03:01L HLA-DRB1*03:01L HLA-DRB1*11:02L HLA-DQA1*01-B1*05L HLA-DQA1*05:05-B1*03:19M HLA-DQA1*05:01-B1*02:01M HLA-DRB4*01:01L
  REGION 1..10: note = CONT. FROM ABOVE: HLA-DPA1*01:03-B1*04:01L HLA-DPA1*01:03-B1*104 :01M HLA-DRB1*10:01L HLA-DRB1*16:01L
TDFVNEFYAY

SEQ ID NO: 18353 - protein, 12 aa, Severe acute respiratory syndrome coronavirus 2
  REGION 1..12: note = Table B: HLA-DQA1*01:02-B1*06:02L
RKHFSMMILSDD

SEQ ID NO: 18354 - protein, 12 aa, Severe acute respiratory syndrome coronavirus 2
  REGION 1..12: note = Table B: HLA-DQA1*01:02-B1*06:02L HLA-DQA1*03:01-B1*03:02L
KHFSMMILSDDA

SEQ ID NO: 18355 - protein, 10 aa, Severe acute respiratory syndrome coronavirus 2
  REGION 1..10: note = Table B: HLA-DQA1*01:02-B1*06:02L
ILSDDAVVCF

SEQ ID NO: 18356 - protein, 10 aa, Severe acute respiratory syndrome coronavirus 2
  REGION 1..10: note = Table B: HLA-DQA1*01:02-B1*06:02L
DAVVCFNSTY

SEQ ID NO: 18357 - protein, 14 aa, Severe acute respiratory syndrome coronavirus 2
  REGION 1..14: note = Table B: HLA-DQA1*01:02-B1*06:02L HLA-DPA1*03:01-B1*105:01L
VVCFNSTYASQGLV

SEQ ID NO: 18358 - protein, 11 aa, Severe acute respiratory syndrome coronavirus 2
  REGION 1..11: note = Table B: HLA-DQA1*01:02-B1*06:02L
SQGLVASIKNF

SEQ ID NO: 18359 - protein, 12 aa, Severe acute respiratory syndrome coronavirus 2
  REGION 1..12: note = Table B: HLA-DQA1*01:02-B1*06:02L
LVASIKNFKSVL

SEQ ID NO: 18360 - protein, 11 aa, Severe acute respiratory syndrome coronavirus 2
  REGION 1..11: note = Table B: HLA-DQA1*01:02-B1*06:02L HLA-DPA1*03:01-B1*04:02L HLA-DPA1*03:01-B1*105:01L HLA-DQA1*01:03-B1*06:01L HLA-DQA1*02:01-B1*03:03L
NFKSVLYYQNN

SEQ ID NO: 18361 - protein, 13 aa, Severe acute respiratory syndrome coronavirus 2
  REGION 1..13: note = Table B: HLA-DQA1*01:02-B1*06:02L HLA-DPA1*03:01-B1*04:02L HLA-DPA1*03:01-B1*105:01L
NNVFMSEAKCWTE

SEQ ID NO: 18362 - protein, 12 aa, Severe acute respiratory syndrome coronavirus 2
  REGION 1..12: note = Table B: HLA-DQA1*01:02-B1*06:02L HLA-DPA1*03:01-B1*105:01L HLA-DQA1*01:03-B1*06:01L
VFMSEAKCWTET

SEQ ID NO: 18363 - protein, 12 aa, Severe acute respiratory syndrome coronavirus 2
  REGION 1..12: note = Table B: HLA-DQA1*01:02-B1*06:02L HLA-DPA1*03:01-B1*105:01L HLA-DQA1*01:03-B1*06:01L
FMSEAKCWTETD

SEQ ID NO: 18364 - protein, 12 aa, Severe acute respiratory syndrome coronavirus 2
  REGION 1..12: note = Table B: HLA-DQA1*01:02-B1*06:02L HLA-DQA1*01:03-B1*06:01L
MSEAKCWTETDL

SEQ ID NO: 18365 - protein, 14 aa, Severe acute respiratory syndrome coronavirus 2
  REGION 1..14: note = Table B: HLA-DQA1*01:02-B1*06:02L
DLTKGPHEFCSQHT

SEQ ID NO: 18366 - protein, 12 aa, Severe acute respiratory syndrome coronavirus 2
  REGION 1..12: note = Table B: HLA-DQA1*01:02-B1*06:02L
GPHEFCSQHTML

SEQ ID NO: 18367 - protein, 10 aa, Severe acute respiratory syndrome coronavirus 2
  REGION 1..10: note = Table B: HLA-DQA1*01:02-B1*06:02L HLA-DQA1*03:01-B1*03:02L HLA-DQA1*01:03-B1*06:01L HLA-DQA1*02:01-B1*03:03L
HTMLVKQGDD

SEQ ID NO: 18368 - protein, 13 aa, Severe acute respiratory syndrome coronavirus 2
  REGION 1..13: note = Table B: HLA-DQA1*01:02-B1*06:02L
QGDDYVYLPYPDP

SEQ ID NO: 18369 - protein, 12 aa, Severe acute respiratory syndrome coronavirus 2
  REGION 1..12: note = Table B: HLA-DQA1*01:02-B1*06:02L
PYPDPSRILGAG

SEQ ID NO: 18370 - protein, 14 aa, Severe acute respiratory syndrome coronavirus 2
  REGION 1..14: note = Table B: HLA-DQA1*01:02-B1*06:02L HLA-DQA1*05:05-B1*03:19L HLA-DQA1*05:05-B1*03:01L
DPSRILGAGCFVDD

SEQ ID NO: 18371 - protein, 11 aa, Severe acute respiratory syndrome coronavirus 2
  REGION 1..11: note = Table B: HLA-DQA1*01:02-B1*06:02L
GAGCFVDDIVK

SEQ ID NO: 18372 - protein, 14 aa, Severe acute respiratory syndrome coronavirus 2
  REGION 1..14: note = Table B: HLA-DQA1*01:02-B1*06:02L
AGCFVDDIVKTDGT

SEQ ID NO: 18373 - protein, 12 aa, Severe acute respiratory syndrome coronavirus 2
  REGION 1..12: note = Table B: HLA-DQA1*01:02-B1*06:02L HLA-DQA1*01:01-B1*05:01L HLA-DPA1*03:01-B1*105:01L HLA-DRB1*16:01L HLA-DQA1*01:03-B1*06:01L
FVDDIVKTDGTL

SEQ ID NO: 18374 - protein, 12 aa, Severe acute respiratory syndrome coronavirus 2
  REGION 1..12: note = Table B: HLA-DQA1*01:02-B1*06:02L HLA-DRB1*03:01L HLA-DRB1*08:01L HLA-DRB1*11:01L HLA-DRB4*02:01NL HLA-DRB4*01:01L HLA-DPA1*01:03-B1*04:02L HLA-DPA1*02:01-B1*13:01L HLA-DRB1*10:01L HLA-DRB1*08:03L
VDDIVKTDGTLM

SEQ ID NO: 18375 - protein, 12 aa, Severe acute respiratory syndrome coronavirus 2
  REGION 1..12: note = Table B: HLA-DQA1*01:02-B1*06:02L HLA-DRB1*01:01L HLA-DRB1*08:04L HLA-DRB1*03:01L HLA-DRB1*11:01L HLA-DRB1*13:01L HLA-DRB4*01:01L HLA-DRB1*04:10L HLA-DRB3*01:01L HLA-DPA1*02:01-B1*13:01L HLA-DRB1*10:01L HLA-DRB1*04:08L
  REGION 1..12: note = CONT. FROM ABOVE: HLA-DRB1*08:03L
DIVKTDGTLMIE

SEQ ID NO: 18376 - protein, 12 aa, Severe acute respiratory syndrome coronavirus 2
  REGION 1..12: note = Table B: HLA-DQA1*01:02-B1*06:02L HLA-DRB1*01:02L
LMIERFVSLAID

SEQ ID NO: 18377 - protein, 10 aa, Severe acute respiratory syndrome coronavirus 2
  REGION 1..10: note = Table B: HLA-DQA1*01:02-B1*06:02L HLA-DQA1*05:05-B1*03:19L HLA-DPA1*01:03-B1*04:01L HLA-DPA1*02:01-B1*13:01L
RFVSLAIDAY

SEQ ID NO: 18378 - protein, 12 aa, Severe acute respiratory syndrome coronavirus 2
  REGION 1..12: note = Table B: HLA-DQA1*01:02-B1*06:02L
VSLAIDAYPLTK

SEQ ID NO: 18379 - protein, 12 aa, Severe acute respiratory syndrome coronavirus 2
  REGION 1..12: note = Table B: HLA-DQA1*01:02-B1*06:02L HLA-DPA1*03:01-B1*04:02L HLA-DQA1*01-B1*05L HLA-DQA1*05:01-B1*02:01L HLA-DPA1*01:02-B1*04:01L HLA-DRB1*04:08L
LAIDAYPLTKHP

SEQ ID NO: 18380 - protein, 13 aa, Severe acute respiratory syndrome coronavirus 2
  REGION 1..13: note = Table B: HLA-DQA1*01:02-B1*06:02L HLA-DRB1*08:01L HLA-DRB1*12:01L
VFHLYLQYIRKLH

SEQ ID NO: 18381 - protein, 14 aa, Severe acute respiratory syndrome coronavirus 2
  REGION 1..14: note = Table B: HLA-DQA1*01:02-B1*06:02L
QYIRKLHDELTGHM

SEQ ID NO: 18382 - protein, 10 aa, Severe acute respiratory syndrome coronavirus 2
  REGION 1..10: note = Table B: HLA-DQA1*01:02-B1*06:02L HLA-DPA1*03:01-B1*105:01L HLA-DQA1*01:03-B1*06:01M HLA-DQA1*02:01-B1*03:03L
LTGHMLDMYS

SEQ ID NO: 18383 - protein, 14 aa, Severe acute respiratory syndrome coronavirus 2
  REGION 1..14: note = Table B: HLA-DQA1*01:02-B1*06:02L HLA-DPA1*03:01-B1*105:01L HLA-DRB1*04:08L
GHMLDMYSVMLTND

SEQ ID NO: 18384 - protein, 10 aa, Severe acute respiratory syndrome coronavirus 2
  REGION 1..10: note = Table B: HLA-DQA1*01:02-B1*06:02L HLA-DQA1*05:05-B1*03:19L HLA-DQA1*05:01-B1*02:01L HLA-DRB1*16:01L HLA-DQA1*02:01-B1*03:03L
TSRYWEPEFY

SEQ ID NO: 18385 - protein, 12 aa, Severe acute respiratory syndrome coronavirus 2
  REGION 1..12: note = Table B: HLA-DQA1*01:02-B1*06:02L HLA-DRB1*08:01L HLA-DPA1*01:03-B1*04:02L HLA-DRB1*12:01L HLA-DRB1*15:03L
PEFYEAMYTPHT

SEQ ID NO: 18386 - protein, 12 aa, Severe acute respiratory syndrome coronavirus 2
  REGION 1..12: note = Table B: HLA-DQA1*01:02-B1*06:02L
QAVGACVLCNSQ

SEQ ID NO: 18387 - protein, 11 aa, Severe acute respiratory syndrome coronavirus 2
  REGION 1..11: note = Table B: HLA-DQA1*01:02-B1*06:02L
VGACVLCNSQT

SEQ ID NO: 18388 - protein, 13 aa, Severe acute respiratory syndrome coronavirus 2
  REGION 1..13: note = Table B: HLA-DQA1*01:02-B1*06:02L
NSQTSLRCGACIR

SEQ ID NO: 18389 - protein, 15 aa, Severe acute respiratory syndrome coronavirus 2
  REGION 1..15: note = Table B: HLA-DQA1*01:02-B1*06:02L
SQTSLRCGACIRRPF

SEQ ID NO: 18390 - protein, 17 aa, Severe acute respiratory syndrome coronavirus 2
  REGION 1..17: note = Table B: HLA-DQA1*01:02-B1*06:02L HLA-DPA1*02:01-B1*13:01L
IRRPFLCCKCCYDHVIS

SEQ ID NO: 18391 - protein, 13 aa, Severe acute respiratory syndrome coronavirus 2
  REGION 1..13: note = Table B: HLA-DQA1*01:02-B1*06:02L
VISTSHKLVLSVN

SEQ ID NO: 18392 - protein, 11 aa, Severe acute respiratory syndrome coronavirus 2
  REGION 1..11: note = Table B: HLA-DQA1*01:02-B1*06:02L HLA-DQA1*05:05-B1*03:19L HLA-DQA1*03:01-B1*03:02L HLA-DRB1*16:01L
SHKLVLSVNPY

SEQ ID NO: 18393 - protein, 13 aa, Severe acute respiratory syndrome coronavirus 2
  REGION 1..13: note = Table B: HLA-DQA1*01:02-B1*06:02L
SVNPYVCNAPGCD

SEQ ID NO: 18394 - protein, 13 aa, Severe acute respiratory syndrome coronavirus 2
  REGION 1..13: note = Table B: HLA-DQA1*01:02-B1*06:02L
NPYVCNAPGCDVT

SEQ ID NO: 18395 - protein, 10 aa, Severe acute respiratory syndrome coronavirus 2
  REGION 1..10: note = Table B: HLA-DQA1*01:02-B1*06:02L HLA-DPA1*01:03-B1*03:01L HLA-DRB1*03:01L HLA-DRB1*11:02L HLA-DQA1*05:05-B1*03:19M HLA-DQA1*05:01-B1*02:01L HLA-DPA1*01:03-B1*104:01L HLA-DRB1*16:01L
CDVTDVTQLY

SEQ ID NO: 18396 - protein, 12 aa, Severe acute respiratory syndrome coronavirus 2
  REGION 1..12: note = Table B: HLA-DQA1*01:02-B1*06:02L HLA-DQA1*01:03-B1*06:01L
YLGGMSYYCKSH

SEQ ID NO: 18397 - protein, 14 aa, Severe acute respiratory syndrome coronavirus 2
  REGION 1..14: note = Table B: HLA-DQA1*01:02-B1*06:02L
KPPISFPLCANGQV

SEQ ID NO: 18398 - protein, 15 aa, Severe acute respiratory syndrome coronavirus 2
  REGION 1..15: note = Table B: HLA-DQA1*01:02-B1*06:02L
PPISFPLCANGQVFG

SEQ ID NO: 18399 - protein, 14 aa, Severe acute respiratory syndrome coronavirus 2
  REGION 1..14: note = Table B: HLA-DQA1*01:02-B1*06:02L HLA-DPA1*03:01-B1*105:01L
FPLCANGQVFGLYK

SEQ ID NO: 18400 - protein, 12 aa, Severe acute respiratory syndrome coronavirus 2
  REGION 1..12: note = Table B: HLA-DQA1*01:02-B1*06:02L HLA-DPA1*03:01-B1*105:01L HLA-DPA1*01:02-B1*04:01L
ANGQVFGLYKNT

SEQ ID NO: 18401 - protein, 13 aa, Severe acute respiratory syndrome coronavirus 2
  REGION 1..13: note = Table B: HLA-DQA1*01:02-B1*06:02L HLA-DRB1*01:02L HLA-DQA1*01-B1*05L HLA-DRB1*12:01L HLA-DRB1*16:01L
VFGLYKNTCVGSD

SEQ ID NO: 18402 - protein, 14 aa, Severe acute respiratory syndrome coronavirus 2
  REGION 1..14: note = Table B: HLA-DQA1*01:02-B1*06:02L
LYKNTCVGSDNVTD

SEQ ID NO: 18403 - protein, 15 aa, Severe acute respiratory syndrome coronavirus 2
  REGION 1..15: note = Table B: HLA-DQA1*01:02-B1*06:02L
YKNTCVGSDNVTDFN

SEQ ID NO: 18404 - protein, 14 aa, Severe acute respiratory syndrome coronavirus 2
  REGION 1..14: note = Table B: HLA-DQA1*01:02-B1*06:02L HLA-DPA1*03:01-B1*105:01L HLA-DQA1*05:05-B1*03:01L HLA-DQA1*01:03-B1*06:01L HLA-DRB1*15:03L
SDNVTDFNAIATCD

SEQ ID NO: 18405 - protein, 13 aa, Severe acute respiratory syndrome coronavirus 2
  REGION 1..13: note = Table B: HLA-DQA1*01:02-B1*06:02L HLA-DPA1*03:01-B1*105:01L
VTDFNAIATCDWT

SEQ ID NO: 18406 - protein, 12 aa, Severe acute respiratory syndrome coronavirus 2
  REGION 1..12: note = Table B: HLA-DQA1*01:02-B1*06:02L
DFNAIATCDWTN

SEQ ID NO: 18407 - protein, 12 aa, Severe acute respiratory syndrome coronavirus 2
  REGION 1..12: note = Table B: HLA-DQA1*01:02-B1*06:02L HLA-DPA1*03:01-B1*105:01L HLA-DQA1*01:03-B1*06:01L
NAIATCDWTNAG

SEQ ID NO: 18408 - protein, 12 aa, Severe acute respiratory syndrome coronavirus 2
  REGION 1..12: note = Table B: HLA-DQA1*01:02-B1*06:02L HLA-DPA1*03:01-B1*105:01L HLA-DQA1*05:05-B1*03:01L HLA-DQA1*01:03-B1*06:01L HLA-DQA1*02:01-B1*03:03L
IATCDWTNAGDY

SEQ ID NO: 18409 - protein, 13 aa, Severe acute respiratory syndrome coronavirus 2
  REGION 1..13: note = Table B: HLA-DQA1*01:02-B1*06:02L
NAGDYILANTCTE

SEQ ID NO: 18410 - protein, 11 aa, Severe acute respiratory syndrome coronavirus 2
  REGION 1..11: note = Table B: HLA-DQA1*01:02-B1*06:02L HLA-DRB1*01:02L HLA-DQA1*01:03-B1*06:01L HLA-DQA1*02:01-B1*03:03L
ILANTCTERLK

SEQ ID NO: 18411 - protein, 11 aa, Severe acute respiratory syndrome coronavirus 2
  REGION 1..11: note = Table B: HLA-DQA1*01:02-B1*06:02L HLA-DQA1*01-B1*05L HLA-DPA1*01:03-B1*04:01L HLA-DQA1*02:01-B1*03:03L
VLSDRELHLSW

SEQ ID NO: 18412 - protein, 11 aa, Severe acute respiratory syndrome coronavirus 2
  REGION 1..11: note = Table B: HLA-DQA1*01:02-B1*06:02L HLA-DQA1*05:05-B1*03:01L
WEVGKPRPPLN

SEQ ID NO: 18413 - protein, 10 aa, Severe acute respiratory syndrome coronavirus 2
  REGION 1..10: note = Table B: HLA-DQA1*01:02-B1*06:02L
RPPLNRNYVF

SEQ ID NO: 18414 - protein, 12 aa, Severe acute respiratory syndrome coronavirus 2
  REGION 1..12: note = Table B: HLA-DQA1*01:02-B1*06:02L HLA-DRB1*08:04L HLA-DRB1*11:01L HLA-DRB1*14:54L
YRVTKNSKVQIG

SEQ ID NO: 18415 - protein, 13 aa, Severe acute respiratory syndrome coronavirus 2
  REGION 1..13: note = Table B: HLA-DQA1*01:02-B1*06:02L
KLNVGDYFVLTSH

SEQ ID NO: 18416 - protein, 13 aa, Severe acute respiratory syndrome coronavirus 2
  REGION 1..13: note = Table B: HLA-DQA1*01:02-B1*06:02L
LNVGDYFVLTSHT

SEQ ID NO: 18417 - protein, 12 aa, Severe acute respiratory syndrome coronavirus 2
  REGION 1..12: note = Table B: HLA-DQA1*01:02-B1*06:02L
LTSHTVMPLSAP

SEQ ID NO: 18418 - protein, 10 aa, Severe acute respiratory syndrome coronavirus 2
  REGION 1..10: note = Table B: HLA-DQA1*01:02-B1*06:02L
EHYVRITGLY

SEQ ID NO: 18419 - protein, 12 aa, Severe acute respiratory syndrome coronavirus 2
  REGION 1..12: note = Table B: HLA-DQA1*01:02-B1*06:02L HLA-DQA1*05:05-B1*03:01L HLA-DQA1*01:03-B1*06:01L
TGLYPTLNISDE

SEQ ID NO: 18420 - protein, 15 aa, Severe acute respiratory syndrome coronavirus 2
  REGION 1..15: note = Table B: HLA-DQA1*01:02-B1*06:02L HLA-DPA1*03:01-B1*105:01L
PTLNISDEFSSNVAN

SEQ ID NO: 18421 - protein, 13 aa, Severe acute respiratory syndrome coronavirus 2
  REGION 1..13: note = Table B: HLA-DQA1*01:02-B1*06:02L
YQKVGMQKYSTLQ

SEQ ID NO: 18422 - protein, 14 aa, Severe acute respiratory syndrome coronavirus 2
  REGION 1..14: note = Table B: HLA-DQA1*01:02-B1*06:02L
YSTLQGPPGTGKSH

SEQ ID NO: 18423 - protein, 10 aa, Severe acute respiratory syndrome coronavirus 2
  REGION 1..10: note = Table B: HLA-DQA1*01:02-B1*06:02L HLA-DQA1*05:05-B1*03:19L HLA-DRB4*01:01L HLA-DPA1*01:03-B1*04:01L HLA-DPA1*02:01-B1*13:01L
HFAIGLALYY

SEQ ID NO: 18424 - protein, 11 aa, Severe acute respiratory syndrome coronavirus 2
  REGION 1..11: note = Table B: HLA-DQA1*01:02-B1*06:02L
IVYTACSHAAV

SEQ ID NO: 18425 - protein, 10 aa, Severe acute respiratory syndrome coronavirus 2
  REGION 1..10: note = Table B: HLA-DQA1*01:02-B1*06:02L HLA-DQA1*01:03-B1*06:01L
YTACSHAAVD

SEQ ID NO: 18426 - protein, 14 aa, Severe acute respiratory syndrome coronavirus 2
  REGION 1..14: note = Table B: HLA-DQA1*01:02-B1*06:02L
TACSHAAVDALCEK

SEQ ID NO: 18427 - protein, 12 aa, Severe acute respiratory syndrome coronavirus 2
  REGION 1..12: note = Table B: HLA-DQA1*01:02-B1*06:02L
SHAAVDALCEKA

SEQ ID NO: 18428 - protein, 12 aa, Severe acute respiratory syndrome coronavirus 2
  REGION 1..12: note = Table B: HLA-DQA1*01:02-B1*06:02L
HAAVDALCEKAL

SEQ ID NO: 18429 - protein, 12 aa, Severe acute respiratory syndrome coronavirus 2
  REGION 1..12: note = Table B: HLA-DQA1*01:02-B1*06:02L HLA-DRB1*01:02L HLA-DQA1*01:03-B1*06:01L
AAVDALCEKALK

SEQ ID NO: 18430 - protein, 10 aa, Severe acute respiratory syndrome coronavirus 2
  REGION 1..10: note = Table B: HLA-DQA1*01:02-B1*06:02L HLA-DQA1*05:05-B1*03:19L
DALCEKALKY

SEQ ID NO: 18431 - protein, 11 aa, Severe acute respiratory syndrome coronavirus 2
  REGION 1..11: note = Table B: HLA-DQA1*01:02-B1*06:02L HLA-DQA1*01-B1*05L
EKALKYLPIDK

SEQ ID NO: 18432 - protein, 13 aa, Severe acute respiratory syndrome coronavirus 2
  REGION 1..13: note = Table B: HLA-DQA1*01:02-B1*06:02L HLA-DRB1*08:01L
YLPIDKCSRIIPA

SEQ ID NO: 18433 - protein, 10 aa, Severe acute respiratory syndrome coronavirus 2
  REGION 1..10: note = Table B: HLA-DQA1*01:02-B1*06:02L HLA-DQA1*01:03-B1*06:01L HLA-DQA1*02:01-B1*03:03L
DKCSRIIPAR

SEQ ID NO: 18434 - protein, 12 aa, Severe acute respiratory syndrome coronavirus 2
  REGION 1..12: note = Table B: HLA-DQA1*01:02-B1*06:02L
IIPARARVECFD

SEQ ID NO: 18435 - protein, 14 aa, Severe acute respiratory syndrome coronavirus 2
  REGION 1..14: note = Table B: HLA-DQA1*01:02-B1*06:02L
VECFDKFKVNSTLE

SEQ ID NO: 18436 - protein, 12 aa, Severe acute respiratory syndrome coronavirus 2
  REGION 1..12: note = Table B: HLA-DQA1*01:02-B1*06:02L
VFCTVNALPETT

SEQ ID NO: 18437 - protein, 12 aa, Severe acute respiratory syndrome coronavirus 2
  REGION 1..12: note = Table B: HLA-DQA1*01:02-B1*06:02L HLA-DQA1*03:01-B1*03:02L HLA-DQA1*02:01-B1*03:03L
PETTADIVVFDE

SEQ ID NO: 18438 - protein, 12 aa, Severe acute respiratory syndrome coronavirus 2
  REGION 1..12: note = Table B: HLA-DQA1*01:02-B1*06:02L HLA-DPA1*03:01-B1*105:01L
TNYDLSVVNARL

SEQ ID NO: 18439 - protein, 11 aa, Severe acute respiratory syndrome coronavirus 2
  REGION 1..11: note = Table B: HLA-DQA1*01:02-B1*06:02L
YDLSVVNARLR

SEQ ID NO: 18440 - protein, 11 aa, Severe acute respiratory syndrome coronavirus 2
  REGION 1..11: note = Table B: HLA-DQA1*01:02-B1*06:02L HLA-DRB1*03:01L HLA-DRB1*14:01L HLA-DQA1*02:01-B1*03:03L HLA-DRB1*15:03L
VVNARLRAKHY

SEQ ID NO: 18441 - protein, 15 aa, Severe acute respiratory syndrome coronavirus 2
  REGION 1..15: note = Table B: HLA-DQA1*01:02-B1*06:02L HLA-DRB1*11:04L HLA-DRB1*11:01L HLA-DRB3*01:01L HLA-DRB1*15:03L
ARLRAKHYVYIGDPA

SEQ ID NO: 18442 - protein, 15 aa, Severe acute respiratory syndrome coronavirus 2
  REGION 1..15: note = Table B: HLA-DQA1*01:02-B1*06:02L
LPAPRTLLTKGTLEP

SEQ ID NO: 18443 - protein, 13 aa, Severe acute respiratory syndrome coronavirus 2
  REGION 1..13: note = Table B: HLA-DQA1*01:02-B1*06:02L HLA-DPA1*01:03-B1*03:01L HLA-DPA1*02:01-B1*13:01L HLA-DQA1*01:03-B1*06:01L
LEPEYFNSVCRLM

SEQ ID NO: 18444 - protein, 12 aa, Severe acute respiratory syndrome coronavirus 2
  REGION 1..12: note = Table B: HLA-DQA1*01:02-B1*06:02L
FNSVCRLMKTIG

SEQ ID NO: 18445 - protein, 12 aa, Severe acute respiratory syndrome coronavirus 2
  REGION 1..12: note = Table B: HLA-DQA1*01:02-B1*06:02L HLA-DQA1*01:03-B1*06:01L
NSVCRLMKTIGP

SEQ ID NO: 18446 - protein, 12 aa, Severe acute respiratory syndrome coronavirus 2
  REGION 1..12: note = Table B: HLA-DQA1*01:02-B1*06:02L HLA-DQA1*01:03-B1*06:01L
SVCRLMKTIGPD

SEQ ID NO: 18447 - protein, 14 aa, Severe acute respiratory syndrome coronavirus 2
  REGION 1..14: note = Table B: HLA-DQA1*01:02-B1*06:02L
IGPDMFLGTCRRCP

SEQ ID NO: 18448 - protein, 14 aa, Severe acute respiratory syndrome coronavirus 2
  REGION 1..14: note = Table B: HLA-DQA1*01:02-B1*06:02L HLA-DRB1*01:02L HLA-DQA1*01:03-B1*06:01L
GPDMFLGTCRRCPA

SEQ ID NO: 18449 - protein, 12 aa, Severe acute respiratory syndrome coronavirus 2
  REGION 1..12: note = Table B: HLA-DQA1*01:02-B1*06:02L
MFLGTCRRCPAE

SEQ ID NO: 18450 - protein, 13 aa, Severe acute respiratory syndrome coronavirus 2
  REGION 1..13: note = Table B: HLA-DQA1*01:02-B1*06:02L
AHKDKSAQCFKMF

SEQ ID NO: 18451 - protein, 12 aa, Severe acute respiratory syndrome coronavirus 2
  REGION 1..12: note = Table B: HLA-DQA1*01:02-B1*06:02L HLA-DQA1*01:03-B1*06:01L
DKSAQCFKMFYK

SEQ ID NO: 18452 - protein, 14 aa, Severe acute respiratory syndrome coronavirus 2
  REGION 1..14: note = Table B: HLA-DQA1*01:02-B1*06:02L HLA-DRB1*08:01L
SAQCFKMFYKGVIT

SEQ ID NO: 18453 - protein, 13 aa, Severe acute respiratory syndrome coronavirus 2
  REGION 1..13: note = Table B: HLA-DQA1*01:02-B1*06:02L HLA-DRB1*03:01L HLA-DQA1*05:05-B1*03:19L
VITHDVSSAINRP

SEQ ID NO: 18454 - protein, 13 aa, Severe acute respiratory syndrome coronavirus 2
  REGION 1..13: note = Table B: HLA-DQA1*01:02-B1*06:02L
PAWRKAVFISPYN

SEQ ID NO: 18455 - protein, 13 aa, Severe acute respiratory syndrome coronavirus 2
  REGION 1..13: note = Table B: HLA-DQA1*01:02-B1*06:02L HLA-DQA1*01-B1*05L HLA-DPA1*02:01-B1*13:01L HLA-DQA1*02:01-B1*03:03L
WRKAVFISPYNSQ

SEQ ID NO: 18456 - protein, 12 aa, Severe acute respiratory syndrome coronavirus 2
  REGION 1..12: note = Table B: HLA-DQA1*01:02-B1*06:02L
VASKILGLPTQT

SEQ ID NO: 18457 - protein, 14 aa, Severe acute respiratory syndrome coronavirus 2
  REGION 1..14: note = Table B: HLA-DQA1*01:02-B1*06:02L HLA-DQA1*05:05-B1*03:19L HLA-DQA1*01:03-B1*06:01L
GLPTQTVDSSQGSE

SEQ ID NO: 18458 - protein, 12 aa, Severe acute respiratory syndrome coronavirus 2
  REGION 1..12: note = Table B: HLA-DQA1*01:02-B1*06:02L HLA-DQA1*05:05-B1*03:19L HLA-DPA1*03:01-B1*105:01L HLA-DQA1*05:05-B1*03:01L
FTQTTETAHSCN

SEQ ID NO: 18459 - protein, 11 aa, Severe acute respiratory syndrome coronavirus 2
  REGION 1..11: note = Table B: HLA-DQA1*01:02-B1*06:02L
ETAHSCNVNRF

SEQ ID NO: 18460 - protein, 10 aa, Severe acute respiratory syndrome coronavirus 2
  REGION 1..10: note = Table B: HLA-DQA1*01:02-B1*06:02L HLA-DQA1*01:03-B1*06:01L
AHSCNVNRFN

SEQ ID NO: 18461 - protein, 10 aa, Severe acute respiratory syndrome coronavirus 2
  REGION 1..10: note = Table B: HLA-DQA1*01:02-B1*06:02L HLA-DQA1*05:05-B1*03:19L HLA-DRB1*16:01L HLA-DQA1*01:03-B1*06:01L HLA-DQA1*02:01-B1*03:03L
VAITRAKVGI

SEQ ID NO: 18462 - protein, 14 aa, Severe acute respiratory syndrome coronavirus 2
  REGION 1..14: note = Table B: HLA-DQA1*01:02-B1*06:02L HLA-DRB1*01:02L HLA-DPA1*01:03-B1*104:01L
ITRAKVGILCIMSD

SEQ ID NO: 18463 - protein, 12 aa, Severe acute respiratory syndrome coronavirus 2
  REGION 1..12: note = Table B: HLA-DQA1*01:02-B1*06:02L
AKVGILCIMSDR

SEQ ID NO: 18464 - protein, 12 aa, Severe acute respiratory syndrome coronavirus 2
  REGION 1..12: note = Table B: HLA-DQA1*01:02-B1*06:02L HLA-DQA1*05:01-B1*02:01L HLA-DPA1*03:01-B1*105:01L
IMSDRDLYDKLQ

SEQ ID NO: 18465 - protein, 11 aa, Severe acute respiratory syndrome coronavirus 2
  REGION 1..11: note = Table B: HLA-DQA1*01:02-B1*06:02L HLA-DRB1*01:02L HLA-DPA1*03:01-B1*105:01L HLA-DRB1*16:01L
QFTSLEIPRRN

SEQ ID NO: 18466 - protein, 12 aa, Severe acute respiratory syndrome coronavirus 2
  REGION 1..12: note = Table B: HLA-DQA1*01:02-B1*06:02L HLA-DRB1*01:02L
FTSLEIPRRNVA

SEQ ID NO: 18467 - protein, 10 aa, Severe acute respiratory syndrome coronavirus 2
  REGION 1..10: note = Table B: HLA-DQA1*01:02-B1*06:02L HLA-DQA1*05:01-B1*02:01L HLA-DQA1*03:01-B1*03:02L
EIPRRNVATL

SEQ ID NO: 18468 - protein, 10 aa, Severe acute respiratory syndrome coronavirus 2
  REGION 1..10: note = Table B: HLA-DQA1*01:02-B1*06:02L HLA-DQA1*02:01-B1*03:03L
LQAENVTGLF

SEQ ID NO: 18469 - protein, 12 aa, Severe acute respiratory syndrome coronavirus 2
  REGION 1..12: note = Table B: HLA-DQA1*01:02-B1*06:02L HLA-DPA1*03:01-B1*105:01L
AENVTGLFKDCS

SEQ ID NO: 18470 - protein, 12 aa, Severe acute respiratory syndrome coronavirus 2
  REGION 1..12: note = Table B: HLA-DQA1*01:02-B1*06:02L HLA-DPA1*03:01-B1*105:01L HLA-DQA1*02:01-B1*03:03L
ENVTGLFKDCSK

SEQ ID NO: 18471 - protein, 13 aa, Severe acute respiratory syndrome coronavirus 2
  REGION 1..13: note = Table B: HLA-DQA1*01:02-B1*06:02L
FKDCSKVITGLHP

SEQ ID NO: 18472 - protein, 11 aa, Severe acute respiratory syndrome coronavirus 2
  REGION 1..11: note = Table B: HLA-DQA1*01:02-B1*06:02L HLA-DQA1*01:03-B1*06:01L HLA-DQA1*02:01-B1*03:03L
VITGLHPTQAP

SEQ ID NO: 18473 - protein, 12 aa, Severe acute respiratory syndrome coronavirus 2
  REGION 1..12: note = Table B: HLA-DQA1*01:02-B1*06:02L HLA-DQA1*03:01-B1*03:02L HLA-DQA1*01:03-B1*06:01L HLA-DQA1*02:01-B1*03:03L
HPTQAPTHLSVD

SEQ ID NO: 18474 - protein, 12 aa, Severe acute respiratory syndrome coronavirus 2
  REGION 1..12: note = Table B: HLA-DQA1*01:02-B1*06:02L HLA-DQA1*03:01-B1*03:02L HLA-DQA1*01:03-B1*06:01L HLA-DQA1*02:01-B1*03:03L
PTQAPTHLSVDT

SEQ ID NO: 18475 - protein, 11 aa, Severe acute respiratory syndrome coronavirus 2
  REGION 1..11: note = Table B: HLA-DQA1*01:02-B1*06:02L HLA-DQA1*02:01-B1*03:03L
APTHLSVDTKF

SEQ ID NO: 18476 - protein, 12 aa, Severe acute respiratory syndrome coronavirus 2
  REGION 1..12: note = Table B: HLA-DQA1*01:02-B1*06:02L HLA-DRB1*01:02L HLA-DRB1*08:04L HLA-DPA1*01:03-B1*03:01L HLA-DRB1*11:04L HLA-DRB1*12:01L HLA-DRB1*15:03L
HLSVDTKFKTEG

SEQ ID NO: 18477 - protein, 13 aa, Severe acute respiratory syndrome coronavirus 2
  REGION 1..13: note = Table B: HLA-DQA1*01:02-B1*06:02L HLA-DPA1*03:01-B1*04:02L HLA-DPA1*01:03-B1*04:01L HLA-DPA1*01:03-B1*04:02L HLA-DPA1*02:01-B1*13:01L HLA-DPA1*03:01-B1*105:01L HLA-DPA1*01:02-B1*04:01L HLA-DRB1*04:08L
VDTKFKTEGLCVD

SEQ ID NO: 18478 - protein, 13 aa, Severe acute respiratory syndrome coronavirus 2
  REGION 1..13: note = Table B: HLA-DQA1*01:02-B1*06:02L HLA-DPA1*01:03-B1*04:02L HLA-DRB1*16:01L HLA-DRB1*04:08L
KFKTEGLCVDIPG

SEQ ID NO: 18479 - protein, 13 aa, Severe acute respiratory syndrome coronavirus 2
  REGION 1..13: note = Table B: HLA-DQA1*01:02-B1*06:02L
TEGLCVDIPGIPK

SEQ ID NO: 18480 - protein, 12 aa, Severe acute respiratory syndrome coronavirus 2
  REGION 1..12: note = Table B: HLA-DQA1*01:02-B1*06:02L HLA-DRB1*08:01L HLA-DRB1*04:08L
DMTYRRLISMMG

SEQ ID NO: 18481 - protein, 12 aa, Severe acute respiratory syndrome coronavirus 2
  REGION 1..12: note = Table B: HLA-DQA1*01:02-B1*06:02L HLA-DRB1*01:01L HLA-DRB1*08:01L HLA-DRB1*11:01L HLA-DRB1*12:01L HLA-DRB1*15:03L
TYRRLISMMGFK

SEQ ID NO: 18482 - protein, 10 aa, Severe acute respiratory syndrome coronavirus 2
  REGION 1..10: note = Table B: HLA-DQA1*01:02-B1*06:02L HLA-DPA1*01:03-B1*03:01L HLA-DRB1*03:01L HLA-DRB1*11:02L HLA-DQA1*05:05-B1*03:19M HLA-DQA1*05:01-B1*02:01L HLA-DPA1*01:03-B1*104:01L HLA-DRB1*16:01L
ISMMGFKMNY

SEQ ID NO: 18483 - protein, 12 aa, Severe acute respiratory syndrome coronavirus 2
  REGION 1..12: note = Table B: HLA-DQA1*01:02-B1*06:02L
SMMGFKMNYQVN

SEQ ID NO: 18484 - protein, 12 aa, Severe acute respiratory syndrome coronavirus 2
  REGION 1..12: note = Table B: HLA-DQA1*01:02-B1*06:02L
MMGFKMNYQVNG

SEQ ID NO: 18485 - protein, 12 aa, Severe acute respiratory syndrome coronavirus 2
  REGION 1..12: note = Table B: HLA-DQA1*01:02-B1*06:02L HLA-DRB1*01:02L HLA-DRB1*15:01L
QVNGYPNMFITR

SEQ ID NO: 18486 - protein, 12 aa, Severe acute respiratory syndrome coronavirus 2
  REGION 1..12: note = Table B: HLA-DQA1*01:02-B1*06:02L HLA-DRB1*01:02L
VNGYPNMFITRE

SEQ ID NO: 18487 - protein, 12 aa, Severe acute respiratory syndrome coronavirus 2
  REGION 1..12: note = Table B: HLA-DQA1*01:02-B1*06:02L HLA-DQA1*01-B1*05L
NGYPNMFITREE

SEQ ID NO: 18488 - protein, 11 aa, Severe acute respiratory syndrome coronavirus 2
  REGION 1..11: note = Table B: HLA-DQA1*01:02-B1*06:02L
IRHVRAWIGFD

SEQ ID NO: 18489 - protein, 15 aa, Severe acute respiratory syndrome coronavirus 2
  REGION 1..15: note = Table B: HLA-DQA1*01:02-B1*06:02L HLA-DRB1*01:01L
VRAWIGFDVEGCHAT

SEQ ID NO: 18490 - protein, 13 aa, Severe acute respiratory syndrome coronavirus 2
  REGION 1..13: note = Table B: HLA-DQA1*01:02-B1*06:02L
WIGFDVEGCHATR

SEQ ID NO: 18491 - protein, 12 aa, Severe acute respiratory syndrome coronavirus 2
  REGION 1..12: note = Table B: HLA-DQA1*01:02-B1*06:02L
GFDVEGCHATRE

SEQ ID NO: 18492 - protein, 11 aa, Severe acute respiratory syndrome coronavirus 2
  REGION 1..11: note = Table B: HLA-DQA1*01:02-B1*06:02L HLA-DQA1*02:01-B1*03:03L
DVEGCHATREA

SEQ ID NO: 18493 - protein, 12 aa, Severe acute respiratory syndrome coronavirus 2
  REGION 1..12: note = Table B: HLA-DQA1*01:02-B1*06:02L
TNLPLQLGFSTG

SEQ ID NO: 18494 - protein, 14 aa, Severe acute respiratory syndrome coronavirus 2
  REGION 1..14: note = Table B: HLA-DQA1*01:02-B1*06:02L
QLGFSTGVNLVAVP

SEQ ID NO: 18495 - protein, 10 aa, Severe acute respiratory syndrome coronavirus 2
  REGION 1..10: note = Table B: HLA-DQA1*01:02-B1*06:02L HLA-DQA1*05:05-B1*03:19L HLA-DQA1*05:01-B1*02:01L HLA-DQA1*02:01-B1*03:03L
VNLVAVPTGY

SEQ ID NO: 18496 - protein, 15 aa, Severe acute respiratory syndrome coronavirus 2
  REGION 1..15: note = Table B: HLA-DQA1*01:02-B1*06:02L
TPNNTDFSRVSAKPP

SEQ ID NO: 18497 - protein, 13 aa, Severe acute respiratory syndrome coronavirus 2
  REGION 1..13: note = Table B: HLA-DQA1*01:02-B1*06:02L HLA-DRB4*03:01NL HLA-DRB1*14:01L HLA-DRB1*15:03L
TDFSRVSAKPPPG

SEQ ID NO: 18498 - protein, 14 aa, Severe acute respiratory syndrome coronavirus 2
  REGION 1..14: note = Table B: HLA-DQA1*01:02-B1*06:02L HLA-DPA1*01:03-B1*04:02L HLA-DRB1*12:01L HLA-DRB1*16:01L HLA-DRB1*04:08L HLA-DRB1*15:03L
FKHLIPLMYKGLPW

SEQ ID NO: 18499 - protein, 10 aa, Severe acute respiratory syndrome coronavirus 2
  REGION 1..10: note = Table B: HLA-DQA1*01:02-B1*06:02L HLA-DQA1*05:05-B1*03:116L HLA-DPA1*02:01-B1*13:01L HLA-DPA1*03:01-B1*105:01L HLA-DQA1*01:03-B1*06:01L HLA-DRB1*15:03L
LPWNVVRIKI

SEQ ID NO: 18500 - protein, 12 aa, Severe acute respiratory syndrome coronavirus 2
  REGION 1..12: note = Table B: HLA-DQA1*01:02-B1*06:02L HLA-DPA1*03:01-B1*105:01L
MLSDTLKNLSDR

SEQ ID NO: 18501 - protein, 11 aa, Severe acute respiratory syndrome coronavirus 2
  REGION 1..11: note = Table B: HLA-DQA1*01:02-B1*06:02L HLA-DQA1*01:03-B1*06:01L HLA-DRB1*15:03L
TLKNLSDRVVF

SEQ ID NO: 18502 - protein, 10 aa, Severe acute respiratory syndrome coronavirus 2
  REGION 1..10: note = Table B: HLA-DQA1*01:02-B1*06:02L HLA-DPA1*01:03-B1*03:01L HLA-DRB1*11:02L HLA-DQA1*05:05-B1*03:19M HLA-DQA1*05:01-B1*02:01L HLA-DPA1*01:03-B1*104:01L HLA-DRB1*16:01L
LSDRVVFVLW

SEQ ID NO: 18503 - protein, 12 aa, Severe acute respiratory syndrome coronavirus 2
  REGION 1..12: note = Table B: HLA-DQA1*01:02-B1*06:02L HLA-DPA1*03:01-B1*105:01L HLA-DQA1*02:01-B1*03:03L
SDRVVFVLWAHG

SEQ ID NO: 18504 - protein, 10 aa, Severe acute respiratory syndrome coronavirus 2
  REGION 1..10: note = Table B: HLA-DQA1*01:02-B1*06:02L HLA-DPA1*03:01-B1*04:02L HLA-DPA1*02:01-B1*13:01L HLA-DQA1*01:03-B1*06:01L HLA-DRB1*15:03L
VVFVLWAHGF

SEQ ID NO: 18505 - protein, 14 aa, Severe acute respiratory syndrome coronavirus 2
  REGION 1..14: note = Table B: HLA-DQA1*01:02-B1*06:02L
IGPERTCCLCDRRA

SEQ ID NO: 18506 - protein, 14 aa, Severe acute respiratory syndrome coronavirus 2
  REGION 1..14: note = Table B: HLA-DQA1*01:02-B1*06:02L HLA-DRB1*01:02L
GPERTCCLCDRRAT

SEQ ID NO: 18507 - protein, 13 aa, Severe acute respiratory syndrome coronavirus 2
  REGION 1..13: note = Table B: HLA-DQA1*01:02-B1*06:02L HLA-DQA1*03:01-B1*03:02L HLA-DQA1*01:03-B1*06:01L HLA-DQA1*02:01-B1*03:03L
DRRATCFSTASDT

SEQ ID NO: 18508 - protein, 14 aa, Severe acute respiratory syndrome coronavirus 2
  REGION 1..14: note = Table B: HLA-DQA1*01:02-B1*06:02L HLA-DPA1*02:01-B1*13:01L
RRATCFSTASDTYA

SEQ ID NO: 18509 - protein, 12 aa, Severe acute respiratory syndrome coronavirus 2
  REGION 1..12: note = Table B: HLA-DQA1*01:02-B1*06:02L HLA-DQA1*05:05-B1*03:01L
FSTASDTYACWH

SEQ ID NO: 18510 - protein, 12 aa, Severe acute respiratory syndrome coronavirus 2
  REGION 1..12: note = Table B: HLA-DQA1*01:02-B1*06:02L HLA-DQA1*02:01-B1*03:03L
STASDTYACWHH

SEQ ID NO: 18511 - protein, 12 aa, Severe acute respiratory syndrome coronavirus 2
  REGION 1..12: note = Table B: HLA-DQA1*01:02-B1*06:02L HLA-DQA1*01:03-B1*06:01L HLA-DQA1*02:01-B1*03:03L
TASDTYACWHHS

SEQ ID NO: 18512 - protein, 11 aa, Severe acute respiratory syndrome coronavirus 2
  REGION 1..11: note = Table B: HLA-DQA1*01:02-B1*06:02L HLA-DRB1*08:01L HLA-DQA1*01:03-B1*06:01L
DTYACWHHSIG

SEQ ID NO: 18513 - protein, 12 aa, Severe acute respiratory syndrome coronavirus 2
  REGION 1..12: note = Table B: HLA-DQA1*01:02-B1*06:02L
TYACWHHSIGFD

SEQ ID NO: 18514 - protein, 10 aa, Severe acute respiratory syndrome coronavirus 2
  REGION 1..10: note = Table B: HLA-DQA1*01:02-B1*06:02L HLA-DPA1*01:03-B1*03:01L HLA-DRB1*03:01L HLA-DRB1*14:02L HLA-DQA1*05:05-B1*03:19L HLA-DQA1*05:01-B1*02:01L HLA-DRB1*16:01L HLA-DQA1*02:01-B1*03:03L
HHSIGFDYVY

SEQ ID NO: 18515 - protein, 12 aa, Severe acute respiratory syndrome coronavirus 2
  REGION 1..12: note = Table B: HLA-DQA1*01:02-B1*06:02L HLA-DPA1*03:01-B1*105:01L HLA-DQA1*01:03-B1*06:01L
MIDVQQWGFTGN

SEQ ID NO: 18516 - protein, 13 aa, Severe acute respiratory syndrome coronavirus 2
  REGION 1..13: note = Table B: HLA-DQA1*01:02-B1*06:02L
LQSNHDLYCQVHG

SEQ ID NO: 18517 - protein, 13 aa, Severe acute respiratory syndrome coronavirus 2
  REGION 1..13: note = Table B: HLA-DQA1*01:02-B1*06:02L HLA-DQA1*01:03-B1*06:01L
SNHDLYCQVHGNA

SEQ ID NO: 18518 - protein, 11 aa, Severe acute respiratory syndrome coronavirus 2
  REGION 1..11: note = Table B: HLA-DQA1*01:02-B1*06:02L HLA-DQA1*01:03-B1*06:01L HLA-DQA1*02:01-B1*03:03L
DLYCQVHGNAH

SEQ ID NO: 18519 - protein, 12 aa, Severe acute respiratory syndrome coronavirus 2
  REGION 1..12: note = Table B: HLA-DQA1*01:02-B1*06:02L
VHGNAHVASCDA

SEQ ID NO: 18520 - protein, 12 aa, Severe acute respiratory syndrome coronavirus 2
  REGION 1..12: note = Table B: HLA-DQA1*01:02-B1*06:02L HLA-DQA1*01:03-B1*06:01L
GNAHVASCDAIM

SEQ ID NO: 18521 - protein, 11 aa, Severe acute respiratory syndrome coronavirus 2
  REGION 1..11: note = Table B: HLA-DQA1*01:02-B1*06:02L HLA-DQA1*01:03-B1*06:01L HLA-DQA1*02:01-B1*03:03L
DAIMTRCLAVH

SEQ ID NO: 18522 - protein, 14 aa, Severe acute respiratory syndrome coronavirus 2
  REGION 1..14: note = Table B: HLA-DQA1*01:02-B1*06:02L
IMTRCLAVHECFVK

SEQ ID NO: 18523 - protein, 10 aa, Severe acute respiratory syndrome coronavirus 2
  REGION 1..10: note = Table B: HLA-DQA1*01:02-B1*06:02L HLA-DQA1*01:03-B1*06:01L
VHECFVKRVD

SEQ ID NO: 18524 - protein, 11 aa, Severe acute respiratory syndrome coronavirus 2
  REGION 1..11: note = Table B: HLA-DQA1*01:02-B1*06:02L HLA-DRB4*03:01NL HLA-DRB1*12:01L HLA-DPA1*01:02-B1*04:01L
MVVKAALLADK

SEQ ID NO: 18525 - protein, 12 aa, Severe acute respiratory syndrome coronavirus 2
  REGION 1..12: note = Table B: HLA-DQA1*01:02-B1*06:02L
VVKAALLADKFP

SEQ ID NO: 18526 - protein, 13 aa, Severe acute respiratory syndrome coronavirus 2
  REGION 1..13: note = Table B: HLA-DQA1*01:02-B1*06:02L
LLADKFPVLHDIG

SEQ ID NO: 18527 - protein, 14 aa, Severe acute respiratory syndrome coronavirus 2
  REGION 1..14: note = Table B: HLA-DQA1*01:02-B1*06:02L HLA-DPA1*02:01-B1*13:01L
ADKFPVLHDIGNPK

SEQ ID NO: 18528 - protein, 12 aa, Severe acute respiratory syndrome coronavirus 2
  REGION 1..12: note = Table B: HLA-DQA1*01:02-B1*06:02L
VLHDIGNPKAIK

SEQ ID NO: 18529 - protein, 12 aa, Severe acute respiratory syndrome coronavirus 2
  REGION 1..12: note = Table B: HLA-DQA1*01:02-B1*06:02L
IGNPKAIKCVPQ

SEQ ID NO: 18530 - protein, 12 aa, Severe acute respiratory syndrome coronavirus 2
  REGION 1..12: note = Table B: HLA-DQA1*01:02-B1*06:02L
GNPKAIKCVPQA

SEQ ID NO: 18531 - protein, 11 aa, Severe acute respiratory syndrome coronavirus 2
  REGION 1..11: note = Table B: HLA-DQA1*01:02-B1*06:02L HLA-DQA1*01:03-B1*06:01L
AIKCVPQADVE

SEQ ID NO: 18532 - protein, 12 aa, Severe acute respiratory syndrome coronavirus 2
  REGION 1..12: note = Table B: HLA-DQA1*01:02-B1*06:02L
IKCVPQADVEWK

SEQ ID NO: 18533 - protein, 10 aa, Severe acute respiratory syndrome coronavirus 2
  REGION 1..10: note = Table B: HLA-DQA1*01:02-B1*06:02L HLA-DPA1*01:03-B1*03:01L HLA-DRB1*03:01L HLA-DQA1*05:05-B1*03:19L HLA-DQA1*05:01-B1*02:01L HLA-DPA1*01:03-B1*104:01L HLA-DRB1*16:01L
PQADVEWKFY

SEQ ID NO: 18534 - protein, 10 aa, Severe acute respiratory syndrome coronavirus 2
  REGION 1..10: note = Table B: HLA-DQA1*01:02-B1*06:02L
DAQPCSDKAY

SEQ ID NO: 18535 - protein, 12 aa, Severe acute respiratory syndrome coronavirus 2
  REGION 1..12: note = Table B: HLA-DQA1*01:02-B1*06:02L HLA-DRB1*08:01L
SYATHSDKFTDG

SEQ ID NO: 18536 - protein, 13 aa, Severe acute respiratory syndrome coronavirus 2
  REGION 1..13: note = Table B: HLA-DQA1*01:02-B1*06:02L HLA-DPA1*03:01-B1*105:01L
SDKFTDGVCLFWN

SEQ ID NO: 18537 - protein, 14 aa, Severe acute respiratory syndrome coronavirus 2
  REGION 1..14: note = Table B: HLA-DQA1*01:02-B1*06:02L
DKFTDGVCLFWNCN

SEQ ID NO: 18538 - protein, 14 aa, Severe acute respiratory syndrome coronavirus 2
  REGION 1..14: note = Table B: HLA-DQA1*01:02-B1*06:02L
TDGVCLFWNCNVDR

SEQ ID NO: 18539 - protein, 12 aa, Severe acute respiratory syndrome coronavirus 2
  REGION 1..12: note = Table B: HLA-DQA1*01:02-B1*06:02L HLA-DPA1*03:01-B1*04:02L HLA-DPA1*01:03-B1*04:02L HLA-DQA1*01:03-B1*06:01L HLA-DRB1*15:03L
LFWNCNVDRYPA

SEQ ID NO: 18540 - protein, 11 aa, Severe acute respiratory syndrome coronavirus 2
  REGION 1..11: note = Table B: HLA-DQA1*01:02-B1*06:02L
WNCNVDRYPAN

SEQ ID NO: 18541 - protein, 10 aa, Severe acute respiratory syndrome coronavirus 2
  REGION 1..10: note = Table B: HLA-DQA1*01:02-B1*06:02M HLA-DPA1*02:01-B1*13:01L HLA-DPA1*03:01-B1*105:01L HLA-DQA1*01:03-B1*06:01L HLA-DRB1*15:03L
YPANSIVCRF

SEQ ID NO: 18542 - protein, 12 aa, Severe acute respiratory syndrome coronavirus 2
  REGION 1..12: note = Table B: HLA-DQA1*01:02-B1*06:02L
PANSIVCRFDTR

SEQ ID NO: 18543 - protein, 14 aa, Severe acute respiratory syndrome coronavirus 2
  REGION 1..14: note = Table B: HLA-DQA1*01:02-B1*06:02L HLA-DRB1*01:02L HLA-DRB1*08:04L HLA-DRB1*14:01L HLA-DRB1*04:08L
DTRVLSNLNLPGCD

SEQ ID NO: 18544 - protein, 14 aa, Severe acute respiratory syndrome coronavirus 2
  REGION 1..14: note = Table B: HLA-DQA1*01:02-B1*06:02L
SNLNLPGCDGGSLY

SEQ ID NO: 18545 - protein, 14 aa, Severe acute respiratory syndrome coronavirus 2
  REGION 1..14: note = Table B: HLA-DQA1*01:02-B1*06:02L
PGCDGGSLYVNKHA

SEQ ID NO: 18546 - protein, 12 aa, Severe acute respiratory syndrome coronavirus 2
  REGION 1..12: note = Table B: HLA-DQA1*01:02-B1*06:02L HLA-DRB1*01:02L HLA-DRB1*08:04L HLA-DRB1*14:01L HLA-DRB1*11:04L HLA-DRB1*08:01L HLA-DRB1*11:01L HLA-DRB1*12:01L
LYVNKHAFHTPA

SEQ ID NO: 18547 - protein, 11 aa, Severe acute respiratory syndrome coronavirus 2
  REGION 1..11: note = Table B: HLA-DQA1*01:02-B1*06:02L HLA-DPA1*01:03-B1*04:01L HLA-DPA1*01:03-B1*04:02L HLA-DQA1*03:01-B1*03:02L HLA-DRB1*04:08L HLA-DQA1*02:01-B1*03:03L
FDKSAFVNLKQ

SEQ ID NO: 18548 - protein, 10 aa, Severe acute respiratory syndrome coronavirus 2
  REGION 1..10: note = Table B: HLA-DQA1*01:02-B1*06:02L HLA-DPA1*01:03-B1*03:01L HLA-DRB1*03:01L HLA-DQA1*05:05-B1*03:19L HLA-DQA1*05:01-B1*02:01L HLA-DPA1*01:03-B1*04:01L HLA-DPA1*01:03-B1*104:01L HLA-DRB1*16:01L
  REGION 1..10: note = CONT. FROM ABOVE: HLA-DQA1*02:01-B1*03:03L HLA-DRB1*15:03L
VNLKQLPFFY

SEQ ID NO: 18549 - protein, 12 aa, Severe acute respiratory syndrome coronavirus 2
  REGION 1..12: note = Table B: HLA-DQA1*01:02-B1*06:02L HLA-DPA1*01:03-B1*04:02L
SDIDYVPLKSAT

SEQ ID NO: 18550 - protein, 12 aa, Severe acute respiratory syndrome coronavirus 2
  REGION 1..12: note = Table B: HLA-DQA1*01:02-B1*06:02L HLA-DPA1*01:03-B1*03:01L HLA-DRB1*14:01L HLA-DRB1*04:08L
DIDYVPLKSATC

SEQ ID NO: 18551 - protein, 12 aa, Severe acute respiratory syndrome coronavirus 2
  REGION 1..12: note = Table B: HLA-DQA1*01:02-B1*06:02L HLA-DRB1*14:02L HLA-DQA1*01-B1*05L HLA-DRB1*12:01L HLA-DPA1*03:01-B1*105:01L HLA-DQA1*05:05-B1*03:01L HLA-DRB1*10:01L HLA-DQA1*02:01-B1*03:03L
DYVPLKSATCIT

SEQ ID NO: 18552 - protein, 13 aa, Severe acute respiratory syndrome coronavirus 2
  REGION 1..13: note = Table B: HLA-DQA1*01:02-B1*06:02L HLA-DPA1*03:01-B1*105:01L HLA-DQA1*01:03-B1*06:01L
VPLKSATCITRCN

SEQ ID NO: 18553 - protein, 12 aa, Severe acute respiratory syndrome coronavirus 2
  REGION 1..12: note = Table B: HLA-DQA1*01:02-B1*06:02L
KSATCITRCNLG

SEQ ID NO: 18554 - protein, 14 aa, Severe acute respiratory syndrome coronavirus 2
  REGION 1..14: note = Table B: HLA-DQA1*01:02-B1*06:02L
SATCITRCNLGGAV

SEQ ID NO: 18555 - protein, 11 aa, Severe acute respiratory syndrome coronavirus 2
  REGION 1..11: note = Table B: HLA-DQA1*01:02-B1*06:02L HLA-DQA1*01:03-B1*06:01L
LGGAVCRHHAN

SEQ ID NO: 18556 - protein, 10 aa, Severe acute respiratory syndrome coronavirus 2
  REGION 1..10: note = Table B: HLA-DQA1*01:02-B1*06:02L HLA-DRB4*01:01L HLA-DPA1*02:01-B1*13:01L HLA-DPA1*03:01-B1*105:01L HLA-DQA1*01:03-B1*06:01L HLA-DQA1*02:01-B1*03:03L HLA-DRB1*15:03L
MMISAGFSLW

SEQ ID NO: 18557 - protein, 10 aa, Severe acute respiratory syndrome coronavirus 2
  REGION 1..10: note = Table B: HLA-DQA1*01:02-B1*06:02L HLA-DQA1*05:05-B1*03:19L
ISAGFSLWVY

SEQ ID NO: 18558 - protein, 12 aa, Severe acute respiratory syndrome coronavirus 2
  REGION 1..12: note = Table B: HLA-DQA1*01:02-B1*06:02L HLA-DPA1*03:01-B1*04:02L HLA-DPA1*03:01-B1*105:01L
AGFSLWVYKQFD

SEQ ID NO: 18559 - protein, 12 aa, Severe acute respiratory syndrome coronavirus 2
  REGION 1..12: note = Table B: HLA-DQA1*01:02-B1*06:02L HLA-DPA1*03:01-B1*04:02L HLA-DPA1*03:01-B1*105:01L
GFSLWVYKQFDT

SEQ ID NO: 18560 - protein, 10 aa, Severe acute respiratory syndrome coronavirus 2
  REGION 1..10: note = Table B: HLA-DQA1*01:02-B1*06:02L HLA-DPA1*03:01-B1*04:02L HLA-DQA1*01-B1*05L HLA-DQA1*05:05-B1*03:19L HLA-DQA1*05:01-B1*02:01L HLA-DPA1*01:03-B1*04:01L HLA-DPA1*01:03-B1*04:02L HLA-DPA1*03:01-B1*105:01L
  REGION 1..10: note = CONT. FROM ABOVE: HLA-DPA1*01:02-B1*04:01L HLA-DRB1*16:01L HLA-D QA1*01:03-B1*06:01L HLA-DRB1*15:03L
LWVYKQFDTY

SEQ ID NO: 18561 - protein, 10 aa, Severe acute respiratory syndrome coronavirus 2
  REGION 1..10: note = Table B: HLA-DQA1*01:02-B1*06:02L HLA-DPA1*02:01-B1*13:01L HLA-DQA1*01:03-B1*06:01L HLA-DRB1*15:03L
YKQFDTYNLW

SEQ ID NO: 18562 - protein, 11 aa, Severe acute respiratory syndrome coronavirus 2
  REGION 1..11: note = Table B: HLA-DQA1*01:02-B1*06:02L HLA-DQA1*01-B1*05L HLA-DQA1*05:01-B1*02:01L HLA-DPA1*01:03-B1*04:01L HLA-DPA1*02:01-B1*13:01L HLA-DRB1*16:01L
TYNLWNTFTRL

SEQ ID NO: 18563 - protein, 11 aa, Severe acute respiratory syndrome coronavirus 2
  REGION 1..11: note = Table B: HLA-DQA1*01:02-B1*06:02L HLA-DRB1*01:02L HLA-DQA1*01-B1*05L HLA-DPA1*01:03-B1*04:01L HLA-DPA1*01:03-B1*04:02L HLA-DRB1*16:01L
YNLWNTFTRLQ

SEQ ID NO: 18564 - protein, 12 aa, Severe acute respiratory syndrome coronavirus 2
  REGION 1..12: note = Table B: HLA-DQA1*01:02-B1*06:02L HLA-DRB1*11:01L HLA-DPA1*01:03-B1*04:02L HLA-DRB1*04:08L
NLWNTFTRLQSL

SEQ ID NO: 18565 - protein, 10 aa, Severe acute respiratory syndrome coronavirus 2
  REGION 1..10: note = Table B: HLA-DQA1*01:02-B1*06:02L HLA-DPA1*01:02-B1*04:01L HLA-DQA1*01:03-B1*06:01L HLA-DQA1*02:01-B1*03:03L
NTFTRLQSLE

SEQ ID NO: 18566 - protein, 10 aa, Severe acute respiratory syndrome coronavirus 2
  REGION 1..10: note = Table B: HLA-DQA1*01:02-B1*06:02L HLA-DPA1*02:01-B1*13:01L HLA-DQA1*01:03-B1*06:01L
AFNVVNKGHF

SEQ ID NO: 18567 - protein, 14 aa, Severe acute respiratory syndrome coronavirus 2
  REGION 1..14: note = Table B: HLA-DQA1*01:02-B1*06:02L
VNKGHFDGQQGEVP

SEQ ID NO: 18568 - protein, 10 aa, Severe acute respiratory syndrome coronavirus 2
  REGION 1..10: note = Table B: HLA-DQA1*01:02-B1*06:02L HLA-DPA1*01:03-B1*03:01L HLA-DQA1*05:05-B1*03:19L HLA-DQA1*05:01-B1*02:01L HLA-DPA1*03:01-B1*105:01L HLA-DRB1*15:03L
PVSIINNTVY

SEQ ID NO: 18569 - protein, 12 aa, Severe acute respiratory syndrome coronavirus 2
  REGION 1..12: note = Table B: HLA-DQA1*01:02-B1*06:02L HLA-DPA1*01:03-B1*04:01L HLA-DPA1*01:03-B1*04:02L
GVDVELFENKTT

SEQ ID NO: 18570 - protein, 13 aa, Severe acute respiratory syndrome coronavirus 2
  REGION 1..13: note = Table B: HLA-DQA1*01:02-B1*06:02L HLA-DRB1*15:03L
VDVELFENKTTLP

SEQ ID NO: 18571 - protein, 11 aa, Severe acute respiratory syndrome coronavirus 2
  REGION 1..11: note = Table B: HLA-DQA1*01:02-B1*06:02L HLA-DQA1*05:05-B1*03:19L HLA-DPA1*01:03-B1*104:01L HLA-DRB1*15:03L
TTLPVNVAFEL

SEQ ID NO: 18572 - protein, 12 aa, Severe acute respiratory syndrome coronavirus 2
  REGION 1..12: note = Table B: HLA-DQA1*01:02-B1*06:02L
PVPEVKILNNLG

SEQ ID NO: 18573 - protein, 11 aa, Severe acute respiratory syndrome coronavirus 2
  REGION 1..11: note = Table B: HLA-DQA1*01:02-B1*06:02L
GVDIAANTVIW

SEQ ID NO: 18574 - protein, 10 aa, Severe acute respiratory syndrome coronavirus 2
  REGION 1..10: note = Table B: HLA-DQA1*01:02-B1*06:02L HLA-DQA1*03:01-B1*03:02L HLA-DQA1*05:05-B1*03:01L HLA-DQA1*01:03-B1*06:01L HLA-DQA1*02:01-B1*03:03L
AANTVIWDYK

SEQ ID NO: 18575 - protein, 11 aa, Severe acute respiratory syndrome coronavirus 2
  REGION 1..11: note = Table B: HLA-DQA1*01:02-B1*06:02L
RDAPAHISTIG

SEQ ID NO: 18576 - protein, 12 aa, Severe acute respiratory syndrome coronavirus 2
  REGION 1..12: note = Table B: HLA-DQA1*01:02-B1*06:02L HLA-DQA1*01:03-B1*06:01L
HISTIGVCSMTD

SEQ ID NO: 18577 - protein, 13 aa, Severe acute respiratory syndrome coronavirus 2
  REGION 1..13: note = Table B: HLA-DQA1*01:02-B1*06:02L HLA-DQA1*01:03-B1*06:01L
ISTIGVCSMTDIA

SEQ ID NO: 18578 - protein, 12 aa, Severe acute respiratory syndrome coronavirus 2
  REGION 1..12: note = Table B: HLA-DQA1*01:02-B1*06:02L HLA-DQA1*01:03-B1*06:01L
TIGVCSMTDIAK

SEQ ID NO: 18579 - protein, 13 aa, Severe acute respiratory syndrome coronavirus 2
  REGION 1..13: note = Table B: HLA-DQA1*01:02-B1*06:02L HLA-DQA1*01:03-B1*06:01L HLA-DQA1*02:01-B1*03:03L
IGVCSMTDIAKKP

SEQ ID NO: 18580 - protein, 14 aa, Severe acute respiratory syndrome coronavirus 2
  REGION 1..14: note = Table B: HLA-DQA1*01:02-B1*06:02L
GVCSMTDIAKKPTE

SEQ ID NO: 18581 - protein, 12 aa, Severe acute respiratory syndrome coronavirus 2
  REGION 1..12: note = Table B: HLA-DQA1*01:02-B1*06:02L HLA-DRB1*08:01L HLA-DQA1*05:05-B1*03:19L HLA-DQA1*05:05-B1*03:01L
SMTDIAKKPTET

SEQ ID NO: 18582 - protein, 10 aa, Severe acute respiratory syndrome coronavirus 2
  REGION 1..10: note = Table B: HLA-DQA1*01:02-B1*06:02L
ETICAPLTVF

SEQ ID NO: 18583 - protein, 13 aa, Severe acute respiratory syndrome coronavirus 2
  REGION 1..13: note = Table B: HLA-DQA1*01:02-B1*06:02L HLA-DQA1*01:03-B1*06:01L
FRNARNGVLITEG

SEQ ID NO: 18584 - protein, 13 aa, Severe acute respiratory syndrome coronavirus 2
  REGION 1..13: note = Table B: HLA-DQA1*01:02-B1*06:02L HLA-DQA1*03:01-B1*03:02L HLA-DQA1*02:01-B1*03:03L
NARNGVLITEGSV

SEQ ID NO: 18585 - protein, 12 aa, Severe acute respiratory syndrome coronavirus 2
  REGION 1..12: note = Table B: HLA-DQA1*01:02-B1*06:02L
RNGVLITEGSVK

SEQ ID NO: 18586 - protein, 11 aa, Severe acute respiratory syndrome coronavirus 2
  REGION 1..11: note = Table B: HLA-DQA1*01:02-B1*06:02L HLA-DPA1*03:01-B1*04:02L HLA-DRB1*14:01L HLA-DRB1*14:02L HLA-DQA1*05:05-B1*03:19L HLA-DQA1*05:01-B1*02:01L HLA-DQA1*05:05-B1*03:116L HLA-DPA1*03:01-B1*105:01L HLA-DPA1*01:02-B1*04:01L
VLITEGSVKGL

SEQ ID NO: 18587 - protein, 13 aa, Severe acute respiratory syndrome coronavirus 2
  REGION 1..13: note = Table B: HLA-DQA1*01:02-B1*06:02L HLA-DQA1*01:03-B1*06:01L
GLQPSVGPKQASL

SEQ ID NO: 18588 - protein, 13 aa, Severe acute respiratory syndrome coronavirus 2
  REGION 1..13: note = Table B: HLA-DQA1*01:02-B1*06:02L HLA-DQA1*05:05-B1*03:19L HLA-DQA1*05:05-B1*03:01L
LQPSVGPKQASLN

SEQ ID NO: 18589 - protein, 14 aa, Severe acute respiratory syndrome coronavirus 2
  REGION 1..14: note = Table B: HLA-DQA1*01:02-B1*06:02L HLA-DRB1*01:02L HLA-DQA1*05:05-B1*03:19L HLA-DQA1*05:05-B1*03:01L HLA-DQA1*01:03-B1*06:01L
GPKQASLNGVTLIG

SEQ ID NO: 18590 - protein, 13 aa, Severe acute respiratory syndrome coronavirus 2
  REGION 1..13: note = Table B: HLA-DQA1*01:02-B1*06:02L HLA-DQA1*01:03-B1*06:01L
QASLNGVTLIGEA

SEQ ID NO: 18591 - protein, 12 aa, Severe acute respiratory syndrome coronavirus 2
  REGION 1..12: note = Table B: HLA-DQA1*01:02-B1*06:02L HLA-DQA1*01:03-B1*06:01L
SLNGVTLIGEAV

SEQ ID NO: 18592 - protein, 11 aa, Severe acute respiratory syndrome coronavirus 2
  REGION 1..11: note = Table B: HLA-DQA1*01:02-B1*06:02L
IGEAVKTQFNY

SEQ ID NO: 18593 - protein, 13 aa, Severe acute respiratory syndrome coronavirus 2
  REGION 1..13: note = Table B: HLA-DQA1*01:02-B1*06:02L HLA-DRB1*16:01L
AVKTQFNYYKKVD

SEQ ID NO: 18594 - protein, 12 aa, Severe acute respiratory syndrome coronavirus 2
  REGION 1..12: note = Table B: HLA-DQA1*01:02-B1*06:02L HLA-DRB1*08:04L HLA-DRB1*14:01L HLA-DRB1*11:04L HLA-DRB1*11:01L HLA-DPA1*02:01-B1*13:01L HLA-DRB1*10:01L HLA-DRB1*08:03L HLA-DRB1*15:03L
NYYKKVDGVVQQ

SEQ ID NO: 18595 - protein, 13 aa, Severe acute respiratory syndrome coronavirus 2
  REGION 1..13: note = Table B: HLA-DQA1*01:02-B1*06:02L HLA-DQA1*01:03-B1*06:01L
YKKVDGVVQQLPE

SEQ ID NO: 18596 - protein, 13 aa, Severe acute respiratory syndrome coronavirus 2
  REGION 1..13: note = Table B: HLA-DQA1*01:02-B1*06:02L
KKVDGVVQQLPET

SEQ ID NO: 18597 - protein, 13 aa, Severe acute respiratory syndrome coronavirus 2
  REGION 1..13: note = Table B: HLA-DQA1*01:02-B1*06:02L
QSRNLQEFKPRSQ

SEQ ID NO: 18598 - protein, 12 aa, Severe acute respiratory syndrome coronavirus 2
  REGION 1..12: note = Table B: HLA-DQA1*01:02-B1*06:02L HLA-DRB1*08:01L
NLQEFKPRSQME

SEQ ID NO: 18599 - protein, 13 aa, Severe acute respiratory syndrome coronavirus 2
  REGION 1..13: note = Table B: HLA-DQA1*01:02-B1*06:02L HLA-DQA1*01-B1*05L HLA-DPA1*03:01-B1*105:01L HLA-DRB1*15:03L
DFLELAMDEFIER

SEQ ID NO: 18600 - protein, 13 aa, Severe acute respiratory syndrome coronavirus 2
  REGION 1..13: note = Table B: HLA-DQA1*01:02-B1*06:02L
AMDEFIERYKLEG

SEQ ID NO: 18601 - protein, 11 aa, Severe acute respiratory syndrome coronavirus 2
  REGION 1..11: note = Table B: HLA-DQA1*01:02-B1*06:02L HLA-DQA1*02:01-B1*03:03L
EFIERYKLEGY

SEQ ID NO: 18602 - protein, 10 aa, Severe acute respiratory syndrome coronavirus 2
  REGION 1..10: note = Table B: HLA-DQA1*01:02-B1*06:02L HLA-DQA1*01:03-B1*06:01L HLA-DQA1*02:01-B1*03:03L
ERYKLEGYAF

SEQ ID NO: 18603 - protein, 12 aa, Severe acute respiratory syndrome coronavirus 2
  REGION 1..12: note = Table B: HLA-DQA1*01:02-B1*06:02L
HSQLGGLHLLIG

SEQ ID NO: 18604 - protein, 12 aa, Severe acute respiratory syndrome coronavirus 2
  REGION 1..12: note = Table B: HLA-DQA1*01:02-B1*06:02L
QLGGLHLLIGLA

SEQ ID NO: 18605 - protein, 12 aa, Severe acute respiratory syndrome coronavirus 2
  REGION 1..12: note = Table B: HLA-DQA1*01:02-B1*06:02L HLA-DQA1*01:03-B1*06:01L HLA-DQA1*02:01-B1*03:03L
LGGLHLLIGLAK

SEQ ID NO: 18606 - protein, 10 aa, Severe acute respiratory syndrome coronavirus 2
  REGION 1..10: note = Table B: HLA-DQA1*01:02-B1*06:02L HLA-DQA1*02:01-B1*03:03L
HLLIGLAKRF

SEQ ID NO: 18607 - protein, 14 aa, Severe acute respiratory syndrome coronavirus 2
  REGION 1..14: note = Table B: HLA-DQA1*01:02-B1*06:02L HLA-DRB1*01:02L HLA-DRB1*08:01L HLA-DRB3*01:01L
LLIGLAKRFKESPF

SEQ ID NO: 18608 - protein, 11 aa, Severe acute respiratory syndrome coronavirus 2
  REGION 1..11: note = Table B: HLA-DQA1*01:02-B1*06:02L HLA-DPA1*03:01-B1*105:01L HLA-DQA1*01:03-B1*06:01L
FKESPFELEDF

SEQ ID NO: 18609 - protein, 12 aa, Severe acute respiratory syndrome coronavirus 2
  REGION 1..12: note = Table B: HLA-DQA1*01:02-B1*06:02L HLA-DPA1*02:01-B1*13:01L
ESPFELEDFIPM

SEQ ID NO: 18610 - protein, 13 aa, Severe acute respiratory syndrome coronavirus 2
  REGION 1..13: note = Table B: HLA-DQA1*01:02-B1*06:02L HLA-DQA1*05:01-B1*02:01L
PFELEDFIPMDST

SEQ ID NO: 18611 - protein, 10 aa, Severe acute respiratory syndrome coronavirus 2
  REGION 1..10: note = Table B: HLA-DQA1*01:02-B1*06:02L HLA-DQA1*05:05-B1*03:19L HLA-DQA1*01:03-B1*06:01L HLA-DQA1*02:01-B1*03:03L
PMDSTVKNYF

SEQ ID NO: 18612 - protein, 14 aa, Severe acute respiratory syndrome coronavirus 2
  REGION 1..14: note = Table B: HLA-DQA1*01:02-B1*06:02L
DAQTGSSKCVCSVI

SEQ ID NO: 18613 - protein, 12 aa, Severe acute respiratory syndrome coronavirus 2
  REGION 1..12: note = Table B: HLA-DQA1*01:02-B1*06:02L
TGSSKCVCSVID

SEQ ID NO: 18614 - protein, 12 aa, Severe acute respiratory syndrome coronavirus 2
  REGION 1..12: note = Table B: HLA-DQA1*01:02-B1*06:02L
LLDDFVEIIKSQ

SEQ ID NO: 18615 - protein, 13 aa, Severe acute respiratory syndrome coronavirus 2
  REGION 1..13: note = Table B: HLA-DQA1*01:02-B1*06:02L
IKSQDLSVVSKVV

SEQ ID NO: 18616 - protein, 12 aa, Severe acute respiratory syndrome coronavirus 2
  REGION 1..12: note = Table B: HLA-DQA1*01:02-B1*06:02L HLA-DPA1*03:01-B1*04:02L HLA-DPA1*01:03-B1*04:01L HLA-DPA1*01:03-B1*04:02L HLA-DPA1*03:01-B1*105:01L HLA-DPA1*01:02-B1*04:01L HLA-DQA1*01:03-B1*06:01L
TEISFMLWCKDG

SEQ ID NO: 18617 - protein, 12 aa, Severe acute respiratory syndrome coronavirus 2
  REGION 1..12: note = Table B: HLA-DQA1*01:02-B1*06:02L HLA-DPA1*03:01-B1*105:01L HLA-DRB1*15:03L
SFMLWCKDGHVE

SEQ ID NO: 18618 - protein, 15 aa, Severe acute respiratory syndrome coronavirus 2
  REGION 1..15: note = Table B: HLA-DQA1*01:02-B1*06:02L HLA-DRB1*01:02L HLA-DRB1*03:01L
MLWCKDGHVETFYPK

SEQ ID NO: 18619 - protein, 12 aa, Severe acute respiratory syndrome coronavirus 2
  REGION 1..12: note = Table B: HLA-DQA1*01:02-B1*06:02L HLA-DQA1*05:01-B1*02:01L HLA-DPA1*03:01-B1*105:01L HLA-DRB1*16:01L HLA-DQA1*01:03-B1*06:01L
DGHVETFYPKLQ

SEQ ID NO: 18620 - protein, 13 aa, Severe acute respiratory syndrome coronavirus 2
  REGION 1..13: note = Table B: HLA-DQA1*01:02-B1*06:02L HLA-DRB1*01:02L HLA-DRB1*08:04L HLA-DRB1*11:04L
PNLYKMQRMLLEK

SEQ ID NO: 18621 - protein, 15 aa, Severe acute respiratory syndrome coronavirus 2
  REGION 1..15: note = Table B: HLA-DQA1*01:02-B1*06:02L HLA-DPA1*03:01-B1*105:01L
YKMQRMLLEKCDLQN

SEQ ID NO: 18622 - protein, 12 aa, Severe acute respiratory syndrome coronavirus 2
  REGION 1..12: note = Table B: HLA-DQA1*01:02-B1*06:02L HLA-DPA1*03:01-B1*105:01L HLA-DQA1*01:03-B1*06:01L
MLLEKCDLQNYG

SEQ ID NO: 18623 - protein, 12 aa, Severe acute respiratory syndrome coronavirus 2
  REGION 1..12: note = Table B: HLA-DQA1*01:02-B1*06:02L HLA-DPA1*03:01-B1*105:01L HLA-DQA1*01:03-B1*06:01L
LEKCDLQNYGDS

SEQ ID NO: 18624 - protein, 11 aa, Severe acute respiratory syndrome coronavirus 2
  REGION 1..11: note = Table B: HLA-DQA1*01:02-B1*06:02L HLA-DRB1*01:02L HLA-DPA1*01:03-B1*03:01L HLA-DRB1*11:03L HLA-DRB1*08:01L HLA-DRB5*01:01L HLA-DPA1*01:03-B1*04:02L HLA-DRB1*12:02L HLA-DRB1*10:01L HLA-DRB1*15:03L
NYGDSATLPKG

SEQ ID NO: 18625 - protein, 11 aa, Severe acute respiratory syndrome coronavirus 2
  REGION 1..11: note = Table B: HLA-DQA1*01:02-B1*06:02L HLA-DQA1*03:01-B1*03:02L HLA-DQA1*02:01-B1*03:03L
LPKGIMMNVAK

SEQ ID NO: 18626 - protein, 11 aa, Severe acute respiratory syndrome coronavirus 2
  REGION 1..11: note = Table B: HLA-DQA1*01:02-B1*06:02L
PKGIMMNVAKY

SEQ ID NO: 18627 - protein, 10 aa, Severe acute respiratory syndrome coronavirus 2
  REGION 1..10: note = Table B: HLA-DQA1*01:02-B1*06:02L HLA-DQA1*05:05-B1*03:19L
VAKYTQLCQY

SEQ ID NO: 18628 - protein, 12 aa, Severe acute respiratory syndrome coronavirus 2
  REGION 1..12: note = Table B: HLA-DQA1*01:02-B1*06:02L HLA-DPA1*03:01-B1*105:01L
YTQLCQYLNTLT

SEQ ID NO: 18629 - protein, 12 aa, Severe acute respiratory syndrome coronavirus 2
  REGION 1..12: note = Table B: HLA-DQA1*01:02-B1*06:02L
TLAVPYNMRVIH

SEQ ID NO: 18630 - protein, 12 aa, Severe acute respiratory syndrome coronavirus 2
  REGION 1..12: note = Table B: HLA-DQA1*01:02-B1*06:02L
NMRVIHFGAGSD

SEQ ID NO: 18631 - protein, 13 aa, Severe acute respiratory syndrome coronavirus 2
  REGION 1..13: note = Table B: HLA-DQA1*01:02-B1*06:02L HLA-DRB1*15:03L
MRVIHFGAGSDKG

SEQ ID NO: 18632 - protein, 14 aa, Severe acute respiratory syndrome coronavirus 2
  REGION 1..14: note = Table B: HLA-DQA1*01:02-B1*06:02L HLA-DRB1*01:02L HLA-DRB1*08:01L
IHFGAGSDKGVAPG

SEQ ID NO: 18633 - protein, 14 aa, Severe acute respiratory syndrome coronavirus 2
  REGION 1..14: note = Table B: HLA-DQA1*01:02-B1*06:02L HLA-DRB1*01:02L
FGAGSDKGVAPGTA

SEQ ID NO: 18634 - protein, 13 aa, Severe acute respiratory syndrome coronavirus 2
  REGION 1..13: note = Table B: HLA-DQA1*01:02-B1*06:02L
AGSDKGVAPGTAV

SEQ ID NO: 18635 - protein, 12 aa, Severe acute respiratory syndrome coronavirus 2
  REGION 1..12: note = Table B: HLA-DQA1*01:02-B1*06:02L HLA-DQA1*05:05-B1*03:19L HLA-DQA1*05:01-B1*02:01L HLA-DQA1*05:05-B1*03:01L HLA-DQA1*01:03-B1*06:01L HLA-DQA1*02:01-B1*03:03L
SDKGVAPGTAVL

SEQ ID NO: 18636 - protein, 12 aa, Severe acute respiratory syndrome coronavirus 2
  REGION 1..12: note = Table B: HLA-DQA1*01:02-B1*06:02L HLA-DQA1*01:03-B1*06:01L
PGTAVLRQWLPT

SEQ ID NO: 18637 - protein, 12 aa, Severe acute respiratory syndrome coronavirus 2
  REGION 1..12: note = Table B: HLA-DQA1*01:02-B1*06:02L
PTGTLLVDSDLN

SEQ ID NO: 18638 - protein, 14 aa, Severe acute respiratory syndrome coronavirus 2
  REGION 1..14: note = Table B: HLA-DQA1*01:02-B1*06:02L HLA-DPA1*03:01-B1*105:01L HLA-DRB1*16:01L HLA-DQA1*02:01-B1*03:03L
LVDSDLNDFVSDAD

SEQ ID NO: 18639 - protein, 15 aa, Severe acute respiratory syndrome coronavirus 2
  REGION 1..15: note = Table B: HLA-DQA1*01:02-B1*06:02L HLA-DRB1*12:01L HLA-DPA1*02:01-B1*13:01L HLA-DPA1*03:01-B1*105:01L
VDSDLNDFVSDADST

SEQ ID NO: 18640 - protein, 13 aa, Severe acute respiratory syndrome coronavirus 2
  REGION 1..13: note = Table B: HLA-DQA1*01:02-B1*06:02L HLA-DRB1*03:01L HLA-DQA1*01:01-B1*05:01L HLA-DPA1*01:03-B1*04:02L HLA-DPA1*01:02-B1*04:01L HLA-DQA1*01:03-B1*06:01L
DLNDFVSDADSTL

SEQ ID NO: 18641 - protein, 14 aa, Severe acute respiratory syndrome coronavirus 2
  REGION 1..14: note = Table B: HLA-DQA1*01:02-B1*06:02L
FVSDADSTLIGDCA

SEQ ID NO: 18642 - protein, 11 aa, Severe acute respiratory syndrome coronavirus 2
  REGION 1..11: note = Table B: HLA-DQA1*01:02-B1*06:02L HLA-DQA1*05:05-B1*03:01L HLA-DQA1*01:03-B1*06:01L HLA-DQA1*02:01-B1*03:03L
IGDCATVHTAN

SEQ ID NO: 18643 - protein, 11 aa, Severe acute respiratory syndrome coronavirus 2
  REGION 1..11: note = Table B: HLA-DQA1*01:02-B1*06:02L HLA-DQA1*02:01-B1*03:03L
DCATVHTANKW

SEQ ID NO: 18644 - protein, 14 aa, Severe acute respiratory syndrome coronavirus 2
  REGION 1..14: note = Table B: HLA-DQA1*01:02-B1*06:02L HLA-DRB1*14:01L HLA-DRB1*15:03L
ATVHTANKWDLIIS

SEQ ID NO: 18645 - protein, 13 aa, Severe acute respiratory syndrome coronavirus 2
  REGION 1..13: note = Table B: HLA-DQA1*01:02-B1*06:02L HLA-DQA1*01-B1*05L HLA-DPA1*03:01-B1*105:01L HLA-DQA1*03:01-B1*03:02L HLA-DPA1*01:02-B1*04:01L HLA-DQA1*02:01-B1*03:03L
VHTANKWDLIISD

SEQ ID NO: 18646 - protein, 10 aa, Severe acute respiratory syndrome coronavirus 2
  REGION 1..10: note = Table B: HLA-DQA1*01:02-B1*06:02L HLA-DPA1*01:03-B1*03:01L HLA-DRB1*03:01L HLA-DRB1*11:02L HLA-DRB1*14:02L HLA-DQA1*01-B1*05L HLA-DQA1*05:05-B1*03:19M HLA-DQA1*05:01-B1*02:01L HLA-DRB4*01:01L
  REGION 1..10: note = CONT. FROM ABOVE: HLA-DPA1*01:03-B1*04:01L HLA-DPA1*02:01-B1*13: 01L HLA-DPA1*01:03-B1*104:01L HLA-DRB1*16:01L
KWDLIISDMY

SEQ ID NO: 18647 - protein, 10 aa, Severe acute respiratory syndrome coronavirus 2
  REGION 1..10: note = Table B: HLA-DQA1*01:02-B1*06:02L HLA-DRB1*08:77L HLA-DPA1*01:03-B1*03:01L HLA-DRB1*03:01L HLA-DRB1*11:02L HLA-DQA1*01-B1*05L HLA-DQA1*05:05-B1*03:19M HLA-DQA1*05:01-B1*02:01L HLA-DRB4*01:01L
  REGION 1..10: note = CONT. FROM ABOVE: HLA-DPA1*01:03-B1*104:01L HLA-DRB1*10:01L HLA- DRB1*16:01L
NDSKEGFFTY

SEQ ID NO: 18648 - protein, 15 aa, Severe acute respiratory syndrome coronavirus 2
  REGION 1..15: note = Table B: HLA-DQA1*01:02-B1*06:02L HLA-DPA1*01:03-B1*03:01L HLA-DPA1*03:01-B1*04:02L HLA-DQA1*01-B1*05L HLA-DPA1*03:01-B1*105:01L HLA-DRB1*15:03L
DSKEGFFTYICGFIQ

SEQ ID NO: 18649 - protein, 10 aa, Severe acute respiratory syndrome coronavirus 2
  REGION 1..10: note = Table B: HLA-DQA1*01:02-B1*06:02L HLA-DPA1*03:01-B1*105:01L HLA-DQA1*03:01-B1*03:02L HLA-DPA1*01:02-B1*04:01L HLA-DQA1*01:03-B1*06:01L HLA-DQA1*02:01-B1*03:03L
TYICGFIQQK

SEQ ID NO: 18650 - protein, 12 aa, Severe acute respiratory syndrome coronavirus 2
  REGION 1..12: note = Table B: HLA-DQA1*01:02-B1*06:02L HLA-DRB1*14:01L HLA-DQA1*03:01-B1*03:02L HLA-DRB1*04:08L HLA-DQA1*02:01-B1*03:03L
GFIQQKLALGGS

SEQ ID NO: 18651 - protein, 12 aa, Severe acute respiratory syndrome coronavirus 2
  REGION 1..12: note = Table B: HLA-DQA1*01:02-B1*06:02L HLA-DRB1*14:01L HLA-DPA1*03:01-B1*105:01L HLA-DQA1*03:01-B1*03:02L HLA-DQA1*02:01-B1*03:03L
FIQQKLALGGSV

SEQ ID NO: 18652 - protein, 11 aa, Severe acute respiratory syndrome coronavirus 2
  REGION 1..11: note = Table B: HLA-DQA1*01:02-B1*06:02L
GGSVAIKITEH

SEQ ID NO: 18653 - protein, 12 aa, Severe acute respiratory syndrome coronavirus 2
  REGION 1..12: note = Table B: HLA-DQA1*01:02-B1*06:02L HLA-DPA1*03:01-B1*105:01L HLA-DQA1*01:03-B1*06:01L
IKITEHSWNADL

SEQ ID NO: 18654 - protein, 12 aa, Severe acute respiratory syndrome coronavirus 2
  REGION 1..12: note = Table B: HLA-DQA1*01:02-B1*06:02L HLA-DPA1*01:03-B1*04:02L
SWNADLYKLMGH

SEQ ID NO: 18655 - protein, 11 aa, Severe acute respiratory syndrome coronavirus 2
  REGION 1..11: note = Table B: HLA-DQA1*01:02-B1*06:02L HLA-DQA1*01:03-B1*06:01L HLA-DQA1*02:01-B1*03:03L
NADLYKLMGHF

SEQ ID NO: 18656 - protein, 10 aa, Severe acute respiratory syndrome coronavirus 2
  REGION 1..10: note = Table B: HLA-DQA1*01:02-B1*06:02L HLA-DPA1*03:01-B1*04:02L HLA-DQA1*01-B1*05L HLA-DPA1*01:03-B1*04:01L HLA-DPA1*01:03-B1*04:02L HLA-DPA1*03:01-B1*105:01L HLA-DPA1*01:02-B1*04:01L HLA-DQA1*01:03-B1*06:01L
WWTAFVTNVN

SEQ ID NO: 18657 - protein, 13 aa, Severe acute respiratory syndrome coronavirus 2
  REGION 1..13: note = Table B: HLA-DQA1*01:02-B1*06:02L HLA-DPA1*03:01-B1*105:01L
NASSSEAFLIGCN

SEQ ID NO: 18658 - protein, 11 aa, Severe acute respiratory syndrome coronavirus 2
  REGION 1..11: note = Table B: HLA-DQA1*01:02-B1*06:02L
SSEAFLIGCNY

SEQ ID NO: 18659 - protein, 11 aa, Severe acute respiratory syndrome coronavirus 2
  REGION 1..11: note = Table B: HLA-DQA1*01:02-B1*06:02L HLA-DPA1*01:02-B1*04:01L
LIGCNYLGKPR

SEQ ID NO: 18660 - protein, 12 aa, Severe acute respiratory syndrome coronavirus 2
  REGION 1..12: note = Table B: HLA-DQA1*01:02-B1*06:02L
IGCNYLGKPREQ

SEQ ID NO: 18661 - protein, 10 aa, Severe acute respiratory syndrome coronavirus 2
  REGION 1..10: note = Table B: HLA-DQA1*01:02-B1*06:02L HLA-DQA1*01:03-B1*06:01L
YLGKPREQID

SEQ ID NO: 18662 - protein, 14 aa, Severe acute respiratory syndrome coronavirus 2
  REGION 1..14: note = Table B: HLA-DQA1*01:02-B1*06:02L
VMHANYIFWRNTNP

SEQ ID NO: 18663 - protein, 12 aa, Severe acute respiratory syndrome coronavirus 2
  REGION 1..12: note = Table B: HLA-DQA1*01:02-B1*06:02L HLA-DRB1*08:04L HLA-DPA1*01:03-B1*03:01L HLA-DRB1*11:04L HLA-DRB1*12:02L HLA-DQA1*05:05-B1*03:01L HLA-DRB1*14:17L HLA-DRB1*04:08L
FWRNTNPIQLSS

SEQ ID NO: 18664 - protein, 13 aa, Severe acute respiratory syndrome coronavirus 2
  REGION 1..13: note = Table B: HLA-DQA1*01:02-B1*06:02L
IQLSSYSLFDMSK

SEQ ID NO: 18665 - protein, 11 aa, Severe acute respiratory syndrome coronavirus 2
  REGION 1..11: note = Table B: HLA-DQA1*01:02-B1*06:02L
SSYSLFDMSKF

SEQ ID NO: 18666 - protein, 14 aa, Severe acute respiratory syndrome coronavirus 2
  REGION 1..14: note = Table B: HLA-DQA1*01:02-B1*06:02L
FDMSKFPLKLRGTA

SEQ ID NO: 18667 - protein, 12 aa, Severe acute respiratory syndrome coronavirus 2
  REGION 1..12: note = Table B: HLA-DQA1*01:02-B1*06:02L HLA-DQA1*05:05-B1*03:01L
RGTAVMSLKEGQ

SEQ ID NO: 18668 - protein, 12 aa, Severe acute respiratory syndrome coronavirus 2
  REGION 1..12: note = Table B: HLA-DQA1*01:02-B1*06:02L HLA-DRB1*14:01L HLA-DQA1*05:01-B1*02:01L
GTAVMSLKEGQI

SEQ ID NO: 18669 - protein, 12 aa, Severe acute respiratory syndrome coronavirus 2
  REGION 1..12: note = Table B: HLA-DQA1*01:02-B1*06:02L HLA-DPA1*03:01-B1*105:01L
LKEGQINDMILS

SEQ ID NO: 18670 - protein, 12 aa, Severe acute respiratory syndrome coronavirus 2
  REGION 1..12: note = Table B: HLA-DQA1*01:02-B1*06:02L HLA-DPA1*03:01-B1*105:01L HLA-DQA1*03:01-B1*03:02L HLA-DQA1*05:05-B1*03:01L HLA-DQA1*01:03-B1*06:01L HLA-DQA1*02:01-B1*03:03L
INDMILSLLSKG

SEQ ID NO: 18671 - protein, 11 aa, Severe acute respiratory syndrome coronavirus 2
  REGION 1..11: note = Table B: HLA-DQA1*01:02-B1*06:02L HLA-DQA1*01:03-B1*06:01L HLA-DQA1*02:01-B1*03:03L
DMILSLLSKGR

SEQ ID NO: 18672 - protein, 12 aa, Severe acute respiratory syndrome coronavirus 2
  REGION 1..12: note = Table B: HLA-DQA1*01:02-B1*06:02L HLA-DRB1*01:02L HLA-DPA1*03:01-B1*105:01L HLA-DRB1*16:01L
MILSLLSKGRLI

SEQ ID NO: 18673 - protein, 13 aa, Severe acute respiratory syndrome coronavirus 2
  REGION 1..13: note = Table B: HLA-DQA1*01:02-B1*06:02L
LLSKGRLIIRENN

SEQ ID NO: 18674 - protein, 12 aa, Severe acute respiratory syndrome coronavirus 2
  REGION 1..12: note = Table B: HLA-DQA1*01:02-B1*06:02L HLA-DQA1*05:01-B1*02:01L HLA-DQA1*01:03-B1*06:01L HLA-DQA1*02:01-B1*03:03L
ENNRVVISSDVL

SEQ ID NO: 18675 - protein, 13 aa, Severe acute respiratory syndrome coronavirus 2
  REGION 1..13: note = Table B: HLA-DQA1*01:02-B1*06:02L HLA-DPA1*03:01-B1*04:02L HLA-DPA1*01:03-B1*04:02L
FVFLVLLPLVSSQ

SEQ ID NO: 18676 - protein, 12 aa, Severe acute respiratory syndrome coronavirus 2
  REGION 1..12: note = Table B: HLA-DQA1*01:02-B1*06:02L HLA-DPA1*03:01-B1*105:01L
LPLVSSQCVNLT

SEQ ID NO: 18677 - protein, 11 aa, Severe acute respiratory syndrome coronavirus 2
  REGION 1..11: note = Table B: HLA-DQA1*01:02-B1*06:02L HLA-DQA1*01:03-B1*06:01L HLA-DQA1*02:01-B1*03:03L
VSSQCVNLTTR

SEQ ID NO: 18678 - protein, 12 aa, Severe acute respiratory syndrome coronavirus 2
  REGION 1..12: note = Table B: HLA-DQA1*01:02-B1*06:02L HLA-DQA1*01:03-B1*06:01L
SSQCVNLTTRTQ

SEQ ID NO: 18679 - protein, 10 aa, Severe acute respiratory syndrome coronavirus 2
  REGION 1..10: note = Table B: HLA-DQA1*01:02-B1*06:02L HLA-DPA1*02:01-B1*13:01L HLA-DPA1*03:01-B1*105:01L HLA-DQA1*01:03-B1*06:01L HLA-DQA1*02:01-B1*03:03L
QLPPAYTNSF

SEQ ID NO: 18680 - protein, 10 aa, Severe acute respiratory syndrome coronavirus 2
  REGION 1..10: note = Table B: HLA-DQA1*01:02-B1*06:02L HLA-DPA1*03:01-B1*105:01L HLA-DQA1*01:03-B1*06:01L HLA-DQA1*02:01-B1*03:03L
FRSSVLHSTQ

SEQ ID NO: 18681 - protein, 10 aa, Severe acute respiratory syndrome coronavirus 2
  REGION 1..10: note = Table B: HLA-DQA1*01:02-B1*06:02L HLA-DQA1*03:01-B1*03:02L HLA-DQA1*01:03-B1*06:01L HLA-DQA1*02:01-B1*03:03L
RSSVLHSTQD

SEQ ID NO: 18682 - protein, 10 aa, Severe acute respiratory syndrome coronavirus 2
  REGION 1..10: note = Table B: HLA-DQA1*01:02-B1*06:02L HLA-DQA1*01:03-B1*06:01L
HSTQDLFLPF

SEQ ID NO: 18683 - protein, 11 aa, Severe acute respiratory syndrome coronavirus 2
  REGION 1..11: note = Table B: HLA-DQA1*01:02-B1*06:02L HLA-DPA1*03:01-B1*04:02L HLA-DPA1*03:01-B1*105:01L HLA-DQA1*01:03-B1*06:01L HLA-DQA1*02:01-B1*03:03L
FSNVTWFHAIH

SEQ ID NO: 18684 - protein, 12 aa, Severe acute respiratory syndrome coronavirus 2
  REGION 1..12: note = Table B: HLA-DQA1*01:02-B1*06:02L HLA-DPA1*03:01-B1*04:02L
VTWFHAIHVSGT

SEQ ID NO: 18685 - protein, 10 aa, Severe acute respiratory syndrome coronavirus 2
  REGION 1..10: note = Table B: HLA-DQA1*01:02-B1*06:02L HLA-DQA1*02:01-B1*03:03L
FHAIHVSGTN

SEQ ID NO: 18686 - protein, 14 aa, Severe acute respiratory syndrome coronavirus 2
  REGION 1..14: note = Table B: HLA-DQA1*01:02-B1*06:02L HLA-DQA1*03:01-B1*03:02L
VSGTNGTKRFDNPV

SEQ ID NO: 18687 - protein, 12 aa, Severe acute respiratory syndrome coronavirus 2
  REGION 1..12: note = Table B: HLA-DQA1*01:02-B1*06:02L
FNDGVYFASTEK

SEQ ID NO: 18688 - protein, 12 aa, Severe acute respiratory syndrome coronavirus 2
  REGION 1..12: note = Table B: HLA-DQA1*01:02-B1*06:02L
EKSNIIRGWIFG

SEQ ID NO: 18689 - protein, 11 aa, Severe acute respiratory syndrome coronavirus 2
  REGION 1..11: note = Table B: HLA-DQA1*01:02-B1*06:02L HLA-DPA1*03:01-B1*04:02L HLA-DPA1*03:01-B1*105:01L HLA-DQA1*02:01-B1*03:03L
NIIRGWIFGTT

SEQ ID NO: 18690 - protein, 12 aa, Severe acute respiratory syndrome coronavirus 2
  REGION 1..12: note = Table B: HLA-DQA1*01:02-B1*06:02L
LDSKTQSLLIVN

SEQ ID NO: 18691 - protein, 13 aa, Severe acute respiratory syndrome coronavirus 2
  REGION 1..13: note = Table B: HLA-DQA1*01:02-B1*06:02L
SKTQSLLIVNNAT

SEQ ID NO: 18692 - protein, 12 aa, Severe acute respiratory syndrome coronavirus 2
  REGION 1..12: note = Table B: HLA-DQA1*01:02-B1*06:02L HLA-DRB1*08:04L HLA-DPA1*01:03-B1*03:01L HLA-DPA1*03:01-B1*04:02L HLA-DRB1*11:03L HLA-DRB1*11:04L HLA-DRB1*14:02L HLA-DQA1*05:05-B1*03:01L HLA-DRB1*10:01L HLA-DRB1*04:08L
SLLIVNNATNVV

SEQ ID NO: 18693 - protein, 11 aa, Severe acute respiratory syndrome coronavirus 2
  REGION 1..11: note = Table B: HLA-DQA1*01:02-B1*06:02L
NATNVVIKVCE

SEQ ID NO: 18694 - protein, 11 aa, Severe acute respiratory syndrome coronavirus 2
  REGION 1..11: note = Table B: HLA-DQA1*01:02-B1*06:02L HLA-DQA1*05:05-B1*03:19L
ATNVVIKVCEF

SEQ ID NO: 18695 - protein, 10 aa, Severe acute respiratory syndrome coronavirus 2
  REGION 1..10: note = Table B: HLA-DQA1*01:02-B1*06:02L HLA-DRB1*12:01L HLA-DQA1*01:03-B1*06:01L HLA-DRB1*15:03L
VVIKVCEFQF

SEQ ID NO: 18696 - protein, 13 aa, Severe acute respiratory syndrome coronavirus 2
  REGION 1..13: note = Table B: HLA-DQA1*01:02-B1*06:02L HLA-DPA1*01:03-B1*04:02L HLA-DPA1*01:02-B1*04:01L
VIKVCEFQFCNDP

SEQ ID NO: 18697 - protein, 13 aa, Severe acute respiratory syndrome coronavirus 2
  REGION 1..13: note = Table B: HLA-DQA1*01:02-B1*06:02L HLA-DPA1*01:03-B1*04:02L HLA-DPA1*01:02-B1*04:01L HLA-DQA1*01:03-B1*06:01L
IKVCEFQFCNDPF

SEQ ID NO: 18698 - protein, 10 aa, Severe acute respiratory syndrome coronavirus 2
  REGION 1..10: note = Table B: HLA-DQA1*01:02-B1*06:02L HLA-DPA1*01:03-B1*03:01L HLA-DPA1*03:01-B1*04:02L HLA-DRB1*03:01L HLA-DRB1*11:02L HLA-DRB1*14:02L HLA-DQA1*01-B1*05L HLA-DQA1*05:05-B1*03:19L HLA-DQA1*05:01-B1*02:01L HLA-DRB4*01:01L
  REGION 1..10: note = CONT. FROM ABOVE: HLA-DPA1*01:03-B1*04:01L HLA-DPA1*01:03-B1*04: 02L HLA-DPA1*03:01-B1*105:01L HLA-DPA1*01:03-B1*104:01L HLA-DRB1 *16:01L HLA-DRB1*15:03L
FCNDPFLGVY

SEQ ID NO: 18699 - protein, 12 aa, Severe acute respiratory syndrome coronavirus 2
  REGION 1..12: note = Table B: HLA-DQA1*01:02-B1*06:02L HLA-DRB1*16:01L
KNNKSWMESEFR

SEQ ID NO: 18700 - protein, 12 aa, Severe acute respiratory syndrome coronavirus 2
  REGION 1..12: note = Table B: HLA-DQA1*01:02-B1*06:02L
MESEFRVYSSAN

SEQ ID NO: 18701 - protein, 10 aa, Severe acute respiratory syndrome coronavirus 2
  REGION 1..10: note = Table B: HLA-DQA1*01:02-B1*06:02L HLA-DQA1*05:05-B1*03:19L HLA-DQA1*05:01-B1*02:01L
SSANNCTFEY

SEQ ID NO: 18702 - protein, 13 aa, Severe acute respiratory syndrome coronavirus 2
  REGION 1..13: note = Table B: HLA-DQA1*01:02-B1*06:02L
ANNCTFEYVSQPF

SEQ ID NO: 18703 - protein, 11 aa, Severe acute respiratory syndrome coronavirus 2
  REGION 1..11: note = Table B: HLA-DQA1*01:02-B1*06:02L HLA-DPA1*01:03-B1*04:02L HLA-DRB1*12:01L HLA-DRB1*16:01L HLA-DRB1*04:08L
FEYVSQPFLMD

SEQ ID NO: 18704 - protein, 13 aa, Severe acute respiratory syndrome coronavirus 2
  REGION 1..13: note = Table B: HLA-DQA1*01:02-B1*06:02L HLA-DRB1*01:02L HLA-DQA1*01:01-B1*05:01L HLA-DPA1*02:01-B1*13:01L
VSQPFLMDLEGKQ

SEQ ID NO: 18705 - protein, 13 aa, Severe acute respiratory syndrome coronavirus 2
  REGION 1..13: note = Table B: HLA-DQA1*01:02-B1*06:02L HLA-DRB1*15:03L
QPFLMDLEGKQGN

SEQ ID NO: 18706 - protein, 13 aa, Severe acute respiratory syndrome coronavirus 2
  REGION 1..13: note = Table B: HLA-DQA1*01:02-B1*06:02L HLA-DPA1*03:01-B1*105:01L
PFLMDLEGKQGNF

SEQ ID NO: 18707 - protein, 12 aa, Severe acute respiratory syndrome coronavirus 2
  REGION 1..12: note = Table B: HLA-DQA1*01:02-B1*06:02L HLA-DRB1*01:02L HLA-DQA1*02:01-B1*03:03L
LMDLEGKQGNFK

SEQ ID NO: 18708 - protein, 15 aa, Severe acute respiratory syndrome coronavirus 2
  REGION 1..15: note = Table B: HLA-DQA1*01:02-B1*06:02L
DLEGKQGNFKNLREF

SEQ ID NO: 18709 - protein, 13 aa, Severe acute respiratory syndrome coronavirus 2
  REGION 1..13: note = Table B: HLA-DQA1*01:02-B1*06:02L HLA-DPA1*03:01-B1*04:02L HLA-DPA1*03:01-B1*105:01L HLA-DRB1*16:01L
FKNLREFVFKNID

SEQ ID NO: 18710 - protein, 12 aa, Severe acute respiratory syndrome coronavirus 2
  REGION 1..12: note = Table B: HLA-DQA1*01:02-B1*06:02L HLA-DRB1*08:01L HLA-DPA1*01:02-B1*04:01L HLA-DRB1*16:01L HLA-DRB1*04:08L HLA-DQA1*02:01-B1*03:03L
NLREFVFKNIDG

SEQ ID NO: 18711 - protein, 14 aa, Severe acute respiratory syndrome coronavirus 2
  REGION 1..14: note = Table B: HLA-DQA1*01:02-B1*06:02L
YSKHTPINLVRDLP

SEQ ID NO: 18712 - protein, 12 aa, Severe acute respiratory syndrome coronavirus 2
  REGION 1..12: note = Table B: HLA-DQA1*01:02-B1*06:02L HLA-DRB1*01:02L HLA-DRB1*08:01L
HTPINLVRDLPQ

SEQ ID NO: 18713 - protein, 14 aa, Severe acute respiratory syndrome coronavirus 2
  REGION 1..14: note = Table B: HLA-DQA1*01:02-B1*06:02L
LVRDLPQGFSALEP

SEQ ID NO: 18714 - protein, 14 aa, Severe acute respiratory syndrome coronavirus 2
  REGION 1..14: note = Table B: HLA-DQA1*01:02-B1*06:02L HLA-DQA1*05:01-B1*02:01L HLA-DQA1*01:03-B1*06:01L HLA-DQA1*02:01-B1*03:03L
VRDLPQGFSALEPL

SEQ ID NO: 18715 - protein, 12 aa, Severe acute respiratory syndrome coronavirus 2
  REGION 1..12: note = Table B: HLA-DQA1*01:02-B1*06:02L HLA-DRB1*01:02L HLA-DPA1*01:03-B1*03:01L HLA-DPA1*03:01-B1*04:02L HLA-DQA1*05:05-B1*03:19L HLA-DPA1*02:01-B1*13:01L HLA-DQA1*05:05-B1*03:01L
LEPLVDLPIGIN

SEQ ID NO: 18716 - protein, 13 aa, Severe acute respiratory syndrome coronavirus 2
  REGION 1..13: note = Table B: HLA-DQA1*01:02-B1*06:02L HLA-DPA1*03:01-B1*105:01L HLA-DQA1*05:05-B1*03:01L HLA-DRB1*15:03L
EPLVDLPIGINIT

SEQ ID NO: 18717 - protein, 10 aa, Severe acute respiratory syndrome coronavirus 2
  REGION 1..10: note = Table B: HLA-DQA1*01:02-B1*06:02L HLA-DQA1*05:05-B1*03:19L
AGAAAYYVGY

SEQ ID NO: 18718 - protein, 12 aa, Severe acute respiratory syndrome coronavirus 2
  REGION 1..12: note = Table B: HLA-DQA1*01:02-B1*06:02L HLA-DRB1*01:02L HLA-DQA1*01-B1*05L HLA-DQA1*05:01-B1*02:01L HLA-DPA1*03:01-B1*105:01L
FLLKYNENGTIT

SEQ ID NO: 18719 - protein, 11 aa, Severe acute respiratory syndrome coronavirus 2
  REGION 1..11: note = Table B: HLA-DQA1*01:02-B1*06:02L HLA-DQA1*05:01-B1*02:01L HLA-DQA1*01:03-B1*06:01L HLA-DQA1*02:01-B1*03:03L
NENGTITDAVD

SEQ ID NO: 18720 - protein, 14 aa, Severe acute respiratory syndrome coronavirus 2
  REGION 1..14: note = Table B: HLA-DQA1*01:02-B1*06:02L HLA-DRB1*01:02L HLA-DPA1*03:01-B1*105:01L HLA-DQA1*01:03-B1*06:01L HLA-DRB1*15:03L
DPLSETKCTLKSFT

SEQ ID NO: 18721 - protein, 15 aa, Severe acute respiratory syndrome coronavirus 2
  REGION 1..15: note = Table B: HLA-DQA1*01:02-B1*06:02L
PLSETKCTLKSFTVE

SEQ ID NO: 18722 - protein, 15 aa, Severe acute respiratory syndrome coronavirus 2
  REGION 1..15: note = Table B: HLA-DQA1*01:02-B1*06:02L
SETKCTLKSFTVEKG

SEQ ID NO: 18723 - protein, 11 aa, Severe acute respiratory syndrome coronavirus 2
  REGION 1..11: note = Table B: HLA-DQA1*01:02-B1*06:02L HLA-DQA1*05:05-B1*03:19L HLA-DQA1*02:01-B1*03:03L
VEKGIYQTSNF

SEQ ID NO: 18724 - protein, 11 aa, Severe acute respiratory syndrome coronavirus 2
  REGION 1..11: note = Table B: HLA-DQA1*01:02-B1*06:02L HLA-DPA1*03:01-B1*04:02L HLA-DQA1*05:01-B1*02:01L HLA-DPA1*01:03-B1*04:01L HLA-DPA1*01:03-B1*04:02L HLA-DRB1*04:08L
YQTSNFRVQPT

SEQ ID NO: 18725 - protein, 12 aa, Severe acute respiratory syndrome coronavirus 2
  REGION 1..12: note = Table B: HLA-DQA1*01:02-B1*06:02L
QTSNFRVQPTES

SEQ ID NO: 18726 - protein, 13 aa, Severe acute respiratory syndrome coronavirus 2
  REGION 1..13: note = Table B: HLA-DQA1*01:02-B1*06:02L HLA-DRB1*08:77L HLA-DPA1*01:03-B1*03:01L HLA-DRB1*11:03L HLA-DRB1*11:04L HLA-DRB1*14:02L HLA-DRB1*08:01L HLA-DQA1*05:05-B1*03:19L HLA-DPA1*01:03-B1*04:01L HLA-DRB1*04:10L HLA-DRB1*09:01L
  REGION 1..13: note = CONT. FROM ABOVE: HLA-DPA1*01:03-B1*04:02L HLA-DRB3*01:01L HLA-D QA1*05:05-B1*03:01L HLA-DRB1*07:01L HLA-DRB1*10:01L HLA-DRB1*08: 03L
TSNFRVQPTESIV

SEQ ID NO: 18727 - protein, 12 aa, Severe acute respiratory syndrome coronavirus 2
  REGION 1..12: note = Table B: HLA-DQA1*01:02-B1*06:02L HLA-DQA1*05:01-B1*02:01L HLA-DPA1*03:01-B1*105:01L
PTESIVRFPNIT

SEQ ID NO: 18728 - protein, 12 aa, Severe acute respiratory syndrome coronavirus 2
  REGION 1..12: note = Table B: HLA-DQA1*01:02-B1*06:02L HLA-DQA1*01-B1*05L HLA-DQA1*05:01-B1*02:01L HLA-DPA1*03:01-B1*105:01L HLA-DQA1*03:01-B1*03:02L HLA-DQA1*01:03-B1*06:01L HLA-DQA1*02:01-B1*03:03L HLA-DRB1*15:03L
ITNLCPFGEVFN

SEQ ID NO: 18729 - protein, 12 aa, Severe acute respiratory syndrome coronavirus 2
  REGION 1..12: note = Table B: HLA-DQA1*01:02-B1*06:02L
LCPFGEVFNATR

SEQ ID NO: 18730 - protein, 10 aa, Severe acute respiratory syndrome coronavirus 2
  REGION 1..10: note = Table B: HLA-DQA1*01:02-B1*06:02L HLA-DQA1*02:01-B1*03:03L
ATRFASVYAW

SEQ ID NO: 18731 - protein, 13 aa, Severe acute respiratory syndrome coronavirus 2
  REGION 1..13: note = Table B: HLA-DQA1*01:02-B1*06:02L HLA-DRB1*08:04L
FASVYAWNRKRIS

SEQ ID NO: 18732 - protein, 12 aa, Severe acute respiratory syndrome coronavirus 2
  REGION 1..12: note = Table B: HLA-DQA1*01:02-B1*06:02L HLA-DPA1*03:01-B1*105:01L HLA-DQA1*05:05-B1*03:01L
RISNCVADYSVL

SEQ ID NO: 18733 - protein, 12 aa, Severe acute respiratory syndrome coronavirus 2
  REGION 1..12: note = Table B: HLA-DQA1*01:02-B1*06:02L HLA-DQA1*05:05-B1*03:19L HLA-DPA1*03:01-B1*105:01L
ISNCVADYSVLY

SEQ ID NO: 18734 - protein, 10 aa, Severe acute respiratory syndrome coronavirus 2
  REGION 1..10: note = Table B: HLA-DQA1*01:02-B1*06:02L HLA-DQA1*01:03-B1*06:01L
YSVLYNSASF

SEQ ID NO: 18735 - protein, 14 aa, Severe acute respiratory syndrome coronavirus 2
  REGION 1..14: note = Table B: HLA-DQA1*01:02-B1*06:02L HLA-DRB1*01:02L HLA-DRB1*12:01L HLA-DPA1*03:01-B1*105:01L HLA-DRB1*16:01L
SASFSTFKCYGVSP

SEQ ID NO: 18736 - protein, 11 aa, Severe acute respiratory syndrome coronavirus 2
  REGION 1..11: note = Table B: HLA-DQA1*01:02-B1*06:02L HLA-DQA1*05:05-B1*03:19L HLA-DQA1*02:01-B1*03:03L
KLNDLCFTNVY

SEQ ID NO: 18737 - protein, 13 aa, Severe acute respiratory syndrome coronavirus 2
  REGION 1..13: note = Table B: HLA-DQA1*01:02-B1*06:02L
LNDLCFTNVYADS

SEQ ID NO: 18738 - protein, 12 aa, Severe acute respiratory syndrome coronavirus 2
  REGION 1..12: note = Table B: HLA-DQA1*01:02-B1*06:02L HLA-DRB1*15:03L
FTNVYADSFVIR

SEQ ID NO: 18739 - protein, 10 aa, Severe acute respiratory syndrome coronavirus 2
  REGION 1..10: note = Table B: HLA-DQA1*01:02-B1*06:02L HLA-DQA1*05:05-B1*03:19L HLA-DQA1*05:01-B1*02:01L HLA-DQA1*02:01-B1*03:03L
PGQTGKIADY

SEQ ID NO: 18740 - protein, 13 aa, Severe acute respiratory syndrome coronavirus 2
  REGION 1..13: note = Table B: HLA-DQA1*01:02-B1*06:02L HLA-DQA1*05:05-B1*03:19L HLA-DPA1*03:01-B1*105:01L HLA-DQA1*05:05-B1*03:01L HLA-DQA1*01:03-B1*06:01L
LPDDFTGCVIAWN

SEQ ID NO: 18741 - protein, 11 aa, Severe acute respiratory syndrome coronavirus 2
  REGION 1..11: note = Table B: HLA-DQA1*01:02-B1*06:02L HLA-DQA1*05:05-B1*03:01L
FTGCVIAWNSN

SEQ ID NO: 18742 - protein, 11 aa, Severe acute respiratory syndrome coronavirus 2
  REGION 1..11: note = Table B: HLA-DQA1*01:02-B1*06:02L
TGCVIAWNSNN

SEQ ID NO: 18743 - protein, 10 aa, Severe acute respiratory syndrome coronavirus 2
  REGION 1..10: note = Table B: HLA-DQA1*01:02-B1*06:02L HLA-DPA1*01:03-B1*03:01L HLA-DRB1*03:01L HLA-DQA1*05:05-B1*03:19L HLA-DQA1*05:01-B1*02:01L HLA-DPA1*01:03-B1*104:01L HLA-DRB1*16:01L HLA-DQA1*02:01-B1*03:03L
KVGGNYNYLY

SEQ ID NO: 18744 - protein, 10 aa, Severe acute respiratory syndrome coronavirus 2
  REGION 1..10: note = Table B: HLA-DQA1*01:02-B1*06:02L HLA-DQA1*01:03-B1*06:01L
GNYNYLYRLF

SEQ ID NO: 18745 - protein, 12 aa, Severe acute respiratory syndrome coronavirus 2
  REGION 1..12: note = Table B: HLA-DQA1*01:02-B1*06:02L HLA-DRB1*01:02L HLA-DPA1*03:01-B1*04:02L HLA-DRB1*14:01L HLA-DRB1*11:04L HLA-DRB1*11:01L HLA-DRB1*12:01L HLA-DRB3*01:01L HLA-DPA1*03:01-B1*105:01L HLA-DRB1*15:03L
YNYLYRLFRKSN

SEQ ID NO: 18746 - protein, 11 aa, Severe acute respiratory syndrome coronavirus 2
  REGION 1..11: note = Table B: HLA-DQA1*01:02-B1*06:02L HLA-DRB1*11:02L HLA-DRB1*14:02L HLA-DQA1*02:01-B1*03:03L
PFERDISTEIY

SEQ ID NO: 18747 - protein, 12 aa, Severe acute respiratory syndrome coronavirus 2
  REGION 1..12: note = Table B: HLA-DQA1*01:02-B1*06:02L
RDISTEIYQAGS

SEQ ID NO: 18748 - protein, 12 aa, Severe acute respiratory syndrome coronavirus 2
  REGION 1..12: note = Table B: HLA-DQA1*01:02-B1*06:02L HLA-DQA1*01:03-B1*06:01L
GSTPCNGVEGFN

SEQ ID NO: 18749 - protein, 14 aa, Severe acute respiratory syndrome coronavirus 2
  REGION 1..14: note = Table B: HLA-DQA1*01:02-B1*06:02L
NGVEGFNCYFPLQS

SEQ ID NO: 18750 - protein, 12 aa, Severe acute respiratory syndrome coronavirus 2
  REGION 1..12: note = Table B: HLA-DQA1*01:02-B1*06:02L HLA-DPA1*03:01-B1*105:01L
GFNCYFPLQSYG

SEQ ID NO: 18751 - protein, 10 aa, Severe acute respiratory syndrome coronavirus 2
  REGION 1..10: note = Table B: HLA-DQA1*01:02-B1*06:02L HLA-DQA1*05:05-B1*03:19L HLA-DQA1*05:01-B1*02:01L
PTNGVGYQPY

SEQ ID NO: 18752 - protein, 12 aa, Severe acute respiratory syndrome coronavirus 2
  REGION 1..12: note = Table B: HLA-DQA1*01:02-B1*06:02L HLA-DPA1*03:01-B1*04:02L HLA-DPA1*03:01-B1*105:01L HLA-DRB1*15:03L
VVVLSFELLHAP

SEQ ID NO: 18753 - protein, 12 aa, Severe acute respiratory syndrome coronavirus 2
  REGION 1..12: note = Table B: HLA-DQA1*01:02-B1*06:02L
PATVCGPKKSTN

SEQ ID NO: 18754 - protein, 15 aa, Severe acute respiratory syndrome coronavirus 2
  REGION 1..15: note = Table B: HLA-DQA1*01:02-B1*06:02L HLA-DQA1*01:03-B1*06:01L
GPKKSTNLVKNKCVN

SEQ ID NO: 18755 - protein, 13 aa, Severe acute respiratory syndrome coronavirus 2
  REGION 1..13: note = Table B: HLA-DQA1*01:02-B1*06:02L HLA-DRB1*15:03L
NLVKNKCVNFNFN

SEQ ID NO: 18756 - protein, 13 aa, Severe acute respiratory syndrome coronavirus 2
  REGION 1..13: note = Table B: HLA-DQA1*01:02-B1*06:02L
LVKNKCVNFNFNG

SEQ ID NO: 18757 - protein, 14 aa, Severe acute respiratory syndrome coronavirus 2
  REGION 1..14: note = Table B: HLA-DQA1*01:02-B1*06:02L
VKNKCVNFNFNGLT

SEQ ID NO: 18758 - protein, 11 aa, Severe acute respiratory syndrome coronavirus 2
  REGION 1..11: note = Table B: HLA-DQA1*01:02-B1*06:02L HLA-DQA1*05:05-B1*03:01L
LTGTGVLTESN

SEQ ID NO: 18759 - protein, 13 aa, Severe acute respiratory syndrome coronavirus 2
  REGION 1..13: note = Table B: HLA-DQA1*01:02-B1*06:02L HLA-DRB1*01:02L HLA-DRB1*08:04L HLA-DPA1*03:01-B1*04:02L HLA-DRB1*08:01L HLA-DRB1*12:01L HLA-DPA1*03:01-B1*105:01L HLA-DPA1*01:02-B1*04:01L HLA-DRB1*16:01L
  REGION 1..13: note = CONT. FROM ABOVE: HLA-DQA1*01:03-B1*06:01L HLA-DRB1*15:03L
VLTESNKKFLPFQ

SEQ ID NO: 18760 - protein, 12 aa, Severe acute respiratory syndrome coronavirus 2
  REGION 1..12: note = Table B: HLA-DQA1*01:02-B1*06:02L HLA-DPA1*03:01-B1*04:02L HLA-DPA1*02:01-B1*13:01L HLA-DPA1*03:01-B1*105:01L HLA-DQA1*03:01-B1*03:02L HLA-DPA1*01:02-B1*04:01L HLA-DRB1*16:01L HLA-DQA1*01:03-B1*06:01L
  REGION 1..12: note = CONT. FROM ABOVE: HLA-DQA1*02:01-B1*03:03L
SNKKFLPFQQFG

SEQ ID NO: 18761 - protein, 12 aa, Severe acute respiratory syndrome coronavirus 2
  REGION 1..12: note = Table B: HLA-DQA1*01:02-B1*06:02L HLA-DRB1*01:02L HLA-DPA1*03:01-B1*04:02L HLA-DRB1*14:01L HLA-DRB1*12:01L HLA-DPA1*03:01-B1*105:01L HLA-DRB1*16:01L HLA-DRB1*15:03L
FLPFQQFGRDIA

SEQ ID NO: 18762 - protein, 11 aa, Severe acute respiratory syndrome coronavirus 2
  REGION 1..11: note = Table B: HLA-DQA1*01:02-B1*06:02L HLA-DRB3*02:01L HLA-DPA1*01:03-B1*03:01L HLA-DRB4*01:01L HLA-DPA1*03:01-B1*105:01L HLA-DRB1*15:03L
TTDAVRDPQTL

SEQ ID NO: 18763 - protein, 14 aa, Severe acute respiratory syndrome coronavirus 2
  REGION 1..14: note = Table B: HLA-DQA1*01:02-B1*06:02L HLA-DPA1*02:01-B1*13:01L HLA-DPA1*03:01-B1*105:01L HLA-DQA1*02:01-B1*03:03L
VRDPQTLEILDITP

SEQ ID NO: 18764 - protein, 12 aa, Severe acute respiratory syndrome coronavirus 2
  REGION 1..12: note = Table B: HLA-DQA1*01:02-B1*06:02L HLA-DPA1*03:01-B1*105:01L
LDITPCSFGGVS

SEQ ID NO: 18765 - protein, 14 aa, Severe acute respiratory syndrome coronavirus 2
  REGION 1..14: note = Table B: HLA-DQA1*01:02-B1*06:02L HLA-DQA1*05:01-B1*02:01L
GVSVITPGTNTSNQ

SEQ ID NO: 18766 - protein, 14 aa, Severe acute respiratory syndrome coronavirus 2
  REGION 1..14: note = Table B: HLA-DQA1*01:02-B1*06:02L HLA-DQA1*01-B1*05L HLA-DQA1*05:01-B1*02:01L HLA-DPA1*03:01-B1*105:01L
VLYQDVNCTEVPVA

SEQ ID NO: 18767 - protein, 12 aa, Severe acute respiratory syndrome coronavirus 2
  REGION 1..12: note = Table B: HLA-DQA1*01:02-B1*06:02L
TEVPVAIHADQL

SEQ ID NO: 18768 - protein, 11 aa, Severe acute respiratory syndrome coronavirus 2
  REGION 1..11: note = Table B: HLA-DQA1*01:02-B1*06:02L HLA-DQA1*01:01-B1*05:01L HLA-DQA1*05:05-B1*03:19L HLA-DQA1*05:05-B1*03:01L
TGSNVFQTRAG

SEQ ID NO: 18769 - protein, 13 aa, Severe acute respiratory syndrome coronavirus 2
  REGION 1..13: note = Table B: HLA-DQA1*01:02-B1*06:02L HLA-DRB1*01:02L HLA-DRB1*12:01L HLA-DRB1*16:01L HLA-DQA1*02:01-B1*03:03L HLA-DRB1*15:03L
SNVFQTRAGCLIG

SEQ ID NO: 18770 - protein, 12 aa, Severe acute respiratory syndrome coronavirus 2
  REGION 1..12: note = Table B: HLA-DQA1*01:02-B1*06:02L HLA-DQA1*01:03-B1*06:01L
FQTRAGCLIGAE

SEQ ID NO: 18771 - protein, 11 aa, Severe acute respiratory syndrome coronavirus 2
  REGION 1..11: note = Table B: HLA-DQA1*01:02-B1*06:02L HLA-DQA1*01:03-B1*06:01L HLA-DQA1*02:01-B1*03:03L
TRAGCLIGAEH

SEQ ID NO: 18772 - protein, 12 aa, Severe acute respiratory syndrome coronavirus 2
  REGION 1..12: note = Table B: HLA-DQA1*01:02-B1*06:02L
RAGCLIGAEHVN

SEQ ID NO: 18773 - protein, 12 aa, Severe acute respiratory syndrome coronavirus 2
  REGION 1..12: note = Table B: HLA-DQA1*01:02-B1*06:02L
AGCLIGAEHVNN

SEQ ID NO: 18774 - protein, 13 aa, Severe acute respiratory syndrome coronavirus 2
  REGION 1..13: note = Table B: HLA-DQA1*01:02-B1*06:02L HLA-DQA1*01-B1*05L HLA-DQA1*03:01-B1*03:02L HLA-DQA1*01:03-B1*06:01L
HVNNSYECDIPIG

SEQ ID NO: 18775 - protein, 11 aa, Severe acute respiratory syndrome coronavirus 2
  REGION 1..11: note = Table B: HLA-DQA1*01:02-B1*06:02L HLA-DQA1*01:03-B1*06:01L
SYECDIPIGAG

SEQ ID NO: 18776 - protein, 13 aa, Severe acute respiratory syndrome coronavirus 2
  REGION 1..13: note = Table B: HLA-DQA1*01:02-B1*06:02L HLA-DQA1*05:05-B1*03:01L
PIGAGICASYQTQ

SEQ ID NO: 18777 - protein, 12 aa, Severe acute respiratory syndrome coronavirus 2
  REGION 1..12: note = Table B: HLA-DQA1*01:02-B1*06:02L HLA-DQA1*01:03-B1*06:01L
AGICASYQTQTN

SEQ ID NO: 18778 - protein, 14 aa, Severe acute respiratory syndrome coronavirus 2
  REGION 1..14: note = Table B: HLA-DQA1*01:02-B1*06:02L
GICASYQTQTNSPR

SEQ ID NO: 18779 - protein, 12 aa, Severe acute respiratory syndrome coronavirus 2
  REGION 1..12: note = Table B: HLA-DQA1*01:02-B1*06:02L HLA-DRB3*01:01L HLA-DPA1*03:01-B1*105:01L HLA-DPA1*01:02-B1*04:01L HLA-DRB1*07:01L HLA-DQA1*01:03-B1*06:01L HLA-DRB1*15:03L
ASYQTQTNSPRR

SEQ ID NO: 18780 - protein, 12 aa, Severe acute respiratory syndrome coronavirus 2
  REGION 1..12: note = Table B: HLA-DQA1*01:02-B1*06:02L HLA-DPA1*03:01-B1*105:01L HLA-DQA1*05:05-B1*03:01L HLA-DQA1*02:01-B1*03:03L
VASQSIIAYTMS

SEQ ID NO: 18781 - protein, 12 aa, Severe acute respiratory syndrome coronavirus 2
  REGION 1..12: note = Table B: HLA-DQA1*01:02-B1*06:02L HLA-DQA1*05:05-B1*03:19L HLA-DQA1*05:05-B1*03:01L
IAYTMSLGAENS

SEQ ID NO: 18782 - protein, 13 aa, Severe acute respiratory syndrome coronavirus 2
  REGION 1..13: note = Table B: HLA-DQA1*01:02-B1*06:02L HLA-DPA1*03:01-B1*105:01L
AYTMSLGAENSVA

SEQ ID NO: 18783 - protein, 14 aa, Severe acute respiratory syndrome coronavirus 2
  REGION 1..14: note = Table B: HLA-DQA1*01:02-B1*06:02L
IAIPTNFTISVTTE

SEQ ID NO: 18784 - protein, 11 aa, Severe acute respiratory syndrome coronavirus 2
  REGION 1..11: note = Table B: HLA-DQA1*01:02-B1*06:02L HLA-DPA1*01:03-B1*03:01L HLA-DQA1*05:01-B1*02:01L HLA-DQA1*02:01-B1*03:03L
MTKTSVDCTMY

SEQ ID NO: 18785 - protein, 14 aa, Severe acute respiratory syndrome coronavirus 2
  REGION 1..14: note = Table B: HLA-DQA1*01:02-B1*06:02L
TKTSVDCTMYICGD

SEQ ID NO: 18786 - protein, 12 aa, Severe acute respiratory syndrome coronavirus 2
  REGION 1..12: note = Table B: HLA-DQA1*01:02-B1*06:02L
SVDCTMYICGDS

SEQ ID NO: 18787 - protein, 12 aa, Severe acute respiratory syndrome coronavirus 2
  REGION 1..12: note = Table B: HLA-DQA1*01:02-B1*06:02L HLA-DPA1*03:01-B1*04:02L HLA-DPA1*01:03-B1*04:02L
LLQYGSFCTQLN

SEQ ID NO: 18788 - protein, 10 aa, Severe acute respiratory syndrome coronavirus 2
  REGION 1..10: note = Table B: HLA-DQA1*01:02-B1*06:02L HLA-DQA1*01:03-B1*06:01L
SFCTQLNRAL

SEQ ID NO: 18789 - protein, 12 aa, Severe acute respiratory syndrome coronavirus 2
  REGION 1..12: note = Table B: HLA-DQA1*01:02-B1*06:02L HLA-DRB1*01:02L HLA-DRB1*08:04L HLA-DRB1*12:02L HLA-DPA1*03:01-B1*105:01L HLA-DQA1*01:03-B1*06:01L HLA-DRB1*08:03L HLA-DRB1*15:03L
GIAVEQDKNTQE

SEQ ID NO: 18790 - protein, 12 aa, Severe acute respiratory syndrome coronavirus 2
  REGION 1..12: note = Table B: HLA-DQA1*01:02-B1*06:02L HLA-DRB1*01:02L HLA-DRB1*08:04L HLA-DPA1*01:03-B1*03:01L HLA-DRB1*14:02L HLA-DRB3*01:01L HLA-DPA1*02:01-B1*13:01L HLA-DPA1*03:01-B1*105:01L HLA-DQA1*05:05-B1*03:01L
IAVEQDKNTQEV

SEQ ID NO: 18791 - protein, 12 aa, Severe acute respiratory syndrome coronavirus 2
  REGION 1..12: note = Table B: HLA-DQA1*01:02-B1*06:02L HLA-DQA1*01-B1*05L HLA-DQA1*05:01-B1*02:01L HLA-DQA1*03:01-B1*03:02L
FNKVTLADAGFI

SEQ ID NO: 18792 - protein, 14 aa, Severe acute respiratory syndrome coronavirus 2
  REGION 1..14: note = Table B: HLA-DQA1*01:02-B1*06:02L
ADAGFIKQYGDCLG

SEQ ID NO: 18793 - protein, 14 aa, Severe acute respiratory syndrome coronavirus 2
  REGION 1..14: note = Table B: HLA-DQA1*01:02-B1*06:02L HLA-DRB1*04:08L
DAGFIKQYGDCLGD

SEQ ID NO: 18794 - protein, 12 aa, Severe acute respiratory syndrome coronavirus 2
  REGION 1..12: note = Table B: HLA-DQA1*01:02-B1*06:02L
YGDCLGDIAARD

SEQ ID NO: 18795 - protein, 13 aa, Severe acute respiratory syndrome coronavirus 2
  REGION 1..13: note = Table B: HLA-DQA1*01:02-B1*06:02L HLA-DQA1*01:03-B1*06:01L
LGDIAARDLICAQ

SEQ ID NO: 18796 - protein, 12 aa, Severe acute respiratory syndrome coronavirus 2
  REGION 1..12: note = Table B: HLA-DQA1*01:02-B1*06:02L HLA-DQA1*01:03-B1*06:01L HLA-DQA1*02:01-B1*03:03L
DIAARDLICAQK

SEQ ID NO: 18797 - protein, 12 aa, Severe acute respiratory syndrome coronavirus 2
  REGION 1..12: note = Table B: HLA-DQA1*01:02-B1*06:02L HLA-DRB1*14:01L HLA-DRB1*08:01L HLA-DPA1*01:03-B1*04:01L HLA-DRB1*12:01L HLA-DRB1*16:01L HLA-DRB1*04:08L
RDLICAQKFNGL

SEQ ID NO: 18798 - protein, 13 aa, Severe acute respiratory syndrome coronavirus 2
  REGION 1..13: note = Table B: HLA-DQA1*01:02-B1*06:02L
KFNGLTVLPPLLT

SEQ ID NO: 18799 - protein, 13 aa, Severe acute respiratory syndrome coronavirus 2
  REGION 1..13: note = Table B: HLA-DQA1*01:02-B1*06:02L HLA-DRB1*01:02L HLA-DPA1*03:01-B1*04:02L HLA-DRB1*14:01L HLA-DQA1*01:03-B1*06:01L
TDEMIAQYTSALL

SEQ ID NO: 18800 - protein, 12 aa, Severe acute respiratory syndrome coronavirus 2
  REGION 1..12: note = Table B: HLA-DQA1*01:02-B1*06:02L
MIAQYTSALLAG

SEQ ID NO: 18801 - protein, 11 aa, Severe acute respiratory syndrome coronavirus 2
  REGION 1..11: note = Table B: HLA-DQA1*01:02-B1*06:02L
TITSGWTFGAG

SEQ ID NO: 18802 - protein, 11 aa, Severe acute respiratory syndrome coronavirus 2
  REGION 1..11: note = Table B: HLA-DQA1*01:02-B1*06:02L HLA-DQA1*05:05-B1*03:19L HLA-DQA1*05:05-B1*03:01L HLA-DQA1*01:03-B1*06:01L
FGAGAALQIPF

SEQ ID NO: 18803 - protein, 11 aa, Severe acute respiratory syndrome coronavirus 2
  REGION 1..11: note = Table B: HLA-DQA1*01:02-B1*06:02L
GAGAALQIPFA

SEQ ID NO: 18804 - protein, 12 aa, Severe acute respiratory syndrome coronavirus 2
  REGION 1..12: note = Table B: HLA-DQA1*01:02-B1*06:02L HLA-DQA1*05:01-B1*02:01L HLA-DPA1*03:01-B1*105:01L
AGAALQIPFAMQ

SEQ ID NO: 18805 - protein, 10 aa, Severe acute respiratory syndrome coronavirus 2
  REGION 1..10: note = Table B: HLA-DQA1*01:02-B1*06:02L HLA-DPA1*01:03-B1*03:01L HLA-DRB1*03:01L HLA-DRB1*11:02L HLA-DQA1*05:05-B1*03:19L HLA-DQA1*05:01-B1*02:01L HLA-DRB4*01:01L HLA-DPA1*01:03-B1*04:01L HLA-DPA1*01:03-B1*104:01L
  REGION 1..10: note = CONT. FROM ABOVE: HLA-DRB1*16:01L
QIPFAMQMAY

SEQ ID NO: 18806 - protein, 11 aa, Severe acute respiratory syndrome coronavirus 2
  REGION 1..11: note = Table B: HLA-DQA1*01:02-B1*06:02L HLA-DRB1*01:02L HLA-DRB1*12:01L HLA-DPA1*03:01-B1*105:01L HLA-DRB1*16:01L HLA-DQA1*02:01-B1*03:03L HLA-DRB1*15:03L
IPFAMQMAYRF

SEQ ID NO: 18807 - protein, 12 aa, Severe acute respiratory syndrome coronavirus 2
  REGION 1..12: note = Table B: HLA-DQA1*01:02-B1*06:02L HLA-DRB1*08:04L HLA-DRB1*14:01L
AMQMAYRFNGIG

SEQ ID NO: 18808 - protein, 12 aa, Severe acute respiratory syndrome coronavirus 2
  REGION 1..12: note = Table B: HLA-DQA1*01:02-B1*06:02L HLA-DRB1*01:02L HLA-DRB1*15:03L
YRFNGIGVTQNV

SEQ ID NO: 18809 - protein, 14 aa, Severe acute respiratory syndrome coronavirus 2
  REGION 1..14: note = Table B: HLA-DQA1*01:02-B1*06:02L HLA-DQA1*05:05-B1*03:19L HLA-DQA1*05:05-B1*03:01L HLA-DQA1*01:03-B1*06:01L HLA-DQA1*02:01-B1*03:03L
GKIQDSLSSTASAL

SEQ ID NO: 18810 - protein, 11 aa, Severe acute respiratory syndrome coronavirus 2
  REGION 1..11: note = Table B: HLA-DQA1*01:02-B1*06:02L HLA-DPA1*03:01-B1*105:01L
QNAQALNTLVK

SEQ ID NO: 18811 - protein, 11 aa, Severe acute respiratory syndrome coronavirus 2
  REGION 1..11: note = Table B: HLA-DQA1*01:02-B1*06:02L HLA-DPA1*03:01-B1*04:02L HLA-DRB1*14:01L HLA-DQA1*05:05-B1*03:19L HLA-DQA1*05:01-B1*02:01L HLA-DQA1*05:05-B1*03:116L HLA-DPA1*01:02-B1*04:01L HLA-DRB1*15:03L
AQALNTLVKQL

SEQ ID NO: 18812 - protein, 10 aa, Severe acute respiratory syndrome coronavirus 2
  REGION 1..10: note = Table B: HLA-DQA1*01:02-B1*06:02L HLA-DQA1*01:03-B1*06:01L HLA-DQA1*02:01-B1*03:03L
TLVKQLSSNF

SEQ ID NO: 18813 - protein, 14 aa, Severe acute respiratory syndrome coronavirus 2
  REGION 1..14: note = Table B: HLA-DQA1*01:02-B1*06:02L
KQLSSNFGAISSVL

SEQ ID NO: 18814 - protein, 12 aa, Severe acute respiratory syndrome coronavirus 2
  REGION 1..12: note = Table B: HLA-DQA1*01:02-B1*06:02L HLA-DQA1*05:05-B1*03:19L HLA-DQA1*05:05-B1*03:01L HLA-DQA1*01:03-B1*06:01L
NFGAISSVLNDI

SEQ ID NO: 18815 - protein, 12 aa, Severe acute respiratory syndrome coronavirus 2
  REGION 1..12: note = Table B: HLA-DQA1*01:02-B1*06:02L HLA-DQA1*03:01-B1*03:02L HLA-DQA1*01:03-B1*06:01L
LNDILSRLDKVE

SEQ ID NO: 18816 - protein, 13 aa, Severe acute respiratory syndrome coronavirus 2
  REGION 1..13: note = Table B: HLA-DQA1*01:02-B1*06:02L
SRLDKVEAEVQID

SEQ ID NO: 18817 - protein, 11 aa, Severe acute respiratory syndrome coronavirus 2
  REGION 1..11: note = Table B: HLA-DQA1*01:02-B1*06:02L
EVQIDRLITGR

SEQ ID NO: 18818 - protein, 10 aa, Severe acute respiratory syndrome coronavirus 2
  REGION 1..10: note = Table B: HLA-DQA1*01:02-B1*06:02L HLA-DQA1*02:01-B1*03:03L
TGRLQSLQTY

SEQ ID NO: 18819 - protein, 12 aa, Severe acute respiratory syndrome coronavirus 2
  REGION 1..12: note = Table B: HLA-DQA1*01:02-B1*06:02L HLA-DRB1*01:02L HLA-DQA1*02:01-B1*03:03L
RLQSLQTYVTQQ

SEQ ID NO: 18820 - protein, 12 aa, Severe acute respiratory syndrome coronavirus 2
  REGION 1..12: note = Table B: HLA-DQA1*01:02-B1*06:02L HLA-DPA1*03:01-B1*04:02L HLA-DPA1*01:03-B1*04:02L
ANLAATKMSECV

SEQ ID NO: 18821 - protein, 12 aa, Severe acute respiratory syndrome coronavirus 2
  REGION 1..12: note = Table B: HLA-DQA1*01:02-B1*06:02L HLA-DPA1*03:01-B1*105:01L
NLAATKMSECVL

SEQ ID NO: 18822 - protein, 12 aa, Severe acute respiratory syndrome coronavirus 2
  REGION 1..12: note = Table B: HLA-DQA1*01:02-B1*06:02L HLA-DQA1*05:05-B1*03:19L HLA-DPA1*03:01-B1*105:01L HLA-DQA1*05:05-B1*03:01L HLA-DQA1*02:01-B1*03:03L
LAATKMSECVLG

SEQ ID NO: 18823 - protein, 12 aa, Severe acute respiratory syndrome coronavirus 2
  REGION 1..12: note = Table B: HLA-DQA1*01:02-B1*06:02L HLA-DQA1*01:03-B1*06:01L
ATKMSECVLGQS

SEQ ID NO: 18824 - protein, 10 aa, Severe acute respiratory syndrome coronavirus 2
  REGION 1..10: note = Table B: HLA-DQA1*01:02-B1*06:02L HLA-DQA1*01:03-B1*06:01L
MSECVLGQSK

SEQ ID NO: 18825 - protein, 10 aa, Severe acute respiratory syndrome coronavirus 2
  REGION 1..10: note = Table B: HLA-DQA1*01:02-B1*06:02L HLA-DQA1*03:01-B1*03:02L HLA-DQA1*01:03-B1*06:01L
SECVLGQSKR

SEQ ID NO: 18826 - protein, 15 aa, Severe acute respiratory syndrome coronavirus 2
  REGION 1..15: note = Table B: HLA-DQA1*01:02-B1*06:02L HLA-DRB1*01:02L HLA-DRB1*16:01L HLA-DRB1*04:08L
SKRVDFCGKGYHLMS

SEQ ID NO: 18827 - protein, 15 aa, Severe acute respiratory syndrome coronavirus 2
  REGION 1..15: note = Table B: HLA-DQA1*01:02-B1*06:02L
VDFCGKGYHLMSFPQ

SEQ ID NO: 18828 - protein, 12 aa, Severe acute respiratory syndrome coronavirus 2
  REGION 1..12: note = Table B: HLA-DQA1*01:02-B1*06:02L
HLMSFPQSAPHG

SEQ ID NO: 18829 - protein, 11 aa, Severe acute respiratory syndrome coronavirus 2
  REGION 1..11: note = Table B: HLA-DQA1*01:02-B1*06:02L HLA-DPA1*03:01-B1*04:02L HLA-DQA1*01-B1*05L HLA-DPA1*03:01-B1*105:01L
FLHVTYVPAQE

SEQ ID NO: 18830 - protein, 13 aa, Severe acute respiratory syndrome coronavirus 2
  REGION 1..13: note = Table B: HLA-DQA1*01:02-B1*06:02L HLA-DPA1*02:01-B1*13:01L
QEKNFTTAPAICH

SEQ ID NO: 18831 - protein, 10 aa, Severe acute respiratory syndrome coronavirus 2
  REGION 1..10: note = Table B: HLA-DQA1*01:02-B1*06:02L HLA-DQA1*05:05-B1*03:01L HLA-DQA1*01:03-B1*06:01L HLA-DQA1*02:01-B1*03:03L
FTTAPAICHD

SEQ ID NO: 18832 - protein, 12 aa, Severe acute respiratory syndrome coronavirus 2
  REGION 1..12: note = Table B: HLA-DQA1*01:02-B1*06:02L HLA-DQA1*02:01-B1*03:03L
TAPAICHDGKAH

SEQ ID NO: 18833 - protein, 13 aa, Severe acute respiratory syndrome coronavirus 2
  REGION 1..13: note = Table B: HLA-DQA1*01:02-B1*06:02L
ICHDGKAHFPREG

SEQ ID NO: 18834 - protein, 10 aa, Severe acute respiratory syndrome coronavirus 2
  REGION 1..10: note = Table B: HLA-DQA1*01:02-B1*06:02L HLA-DQA1*02:01-B1*03:03L
KAHFPREGVF

SEQ ID NO: 18835 - protein, 12 aa, Severe acute respiratory syndrome coronavirus 2
  REGION 1..12: note = Table B: HLA-DQA1*01:02-B1*06:02L HLA-DRB1*14:01L HLA-DPA1*03:01-B1*105:01L HLA-DQA1*01:03-B1*06:01L HLA-DRB1*15:03L
FVSNGTHWFVTQ

SEQ ID NO: 18836 - protein, 12 aa, Severe acute respiratory syndrome coronavirus 2
  REGION 1..12: note = Table B: HLA-DQA1*01:02-B1*06:02L HLA-DQA1*01:03-B1*06:01L HLA-DQA1*02:01-B1*03:03L
VSNGTHWFVTQR

SEQ ID NO: 18837 - protein, 12 aa, Severe acute respiratory syndrome coronavirus 2
  REGION 1..12: note = Table B: HLA-DQA1*01:02-B1*06:02L HLA-DQA1*01:03-B1*06:01L HLA-DQA1*02:01-B1*03:03L
SNGTHWFVTQRN

SEQ ID NO: 18838 - protein, 10 aa, Severe acute respiratory syndrome coronavirus 2
  REGION 1..10: note = Table B: HLA-DQA1*01:02-B1*06:02L HLA-DQA1*01:03-B1*06:01L HLA-DQA1*02:01-B1*03:03L
THWFVTQRNF

SEQ ID NO: 18839 - protein, 10 aa, Severe acute respiratory syndrome coronavirus 2
  REGION 1..10: note = Table B: HLA-DQA1*01:02-B1*06:02L HLA-DRB1*03:01L HLA-DQA1*05:05-B1*03:19L HLA-DQA1*05:01-B1*02:01L HLA-DPA1*01:03-B1*04:01L HLA-DPA1*02:01-B1*13:01L HLA-DRB1*16:01L HLA-DQA1*01:03-B1*06:01L
  REGION 1..10: note = CONT. FROM ABOVE: HLA-DQA1*02:01-B1*03:03L
HWFVTQRNFY

SEQ ID NO: 18840 - protein, 11 aa, Severe acute respiratory syndrome coronavirus 2
  REGION 1..11: note = Table B: HLA-DQA1*01:02-B1*06:02L HLA-DQA1*01:03-B1*06:01L
FVSGNCDVVIG

SEQ ID NO: 18841 - protein, 12 aa, Severe acute respiratory syndrome coronavirus 2
  REGION 1..12: note = Table B: HLA-DQA1*01:02-B1*06:02L HLA-DQA1*01:03-B1*06:01L
SGNCDVVIGIVN

SEQ ID NO: 18842 - protein, 12 aa, Severe acute respiratory syndrome coronavirus 2
  REGION 1..12: note = Table B: HLA-DQA1*01:02-B1*06:02L
GNCDVVIGIVNN

SEQ ID NO: 18843 - protein, 14 aa, Severe acute respiratory syndrome coronavirus 2
  REGION 1..14: note = Table B: HLA-DQA1*01:02-B1*06:02L
IGIVNNTVYDPLQP

SEQ ID NO: 18844 - protein, 10 aa, Severe acute respiratory syndrome coronavirus 2
  REGION 1..10: note = Table B: HLA-DQA1*01:02-B1*06:02L HLA-DPA1*02:01-B1*13:01L HLA-DQA1*01:03-B1*06:01L HLA-DQA1*02:01-B1*03:03L
SFKEELDKYF

SEQ ID NO: 18845 - protein, 12 aa, Severe acute respiratory syndrome coronavirus 2
  REGION 1..12: note = Table B: HLA-DQA1*01:02-B1*06:02L HLA-DPA1*03:01-B1*105:01L HLA-DQA1*01:03-B1*06:01L HLA-DQA1*02:01-B1*03:03L
LNESLIDLQELG

SEQ ID NO: 18846 - protein, 10 aa, Severe acute respiratory syndrome coronavirus 2
  REGION 1..10: note = Table B: HLA-DQA1*01:02-B1*06:02L HLA-DPA1*02:01-B1*13:01L HLA-DQA1*01:03-B1*06:01L
KYEQYIKWPW

SEQ ID NO: 18847 - protein, 10 aa, Severe acute respiratory syndrome coronavirus 2
  REGION 1..10: note = Table B: HLA-DQA1*01:02-B1*06:02L HLA-DQA1*01:03-B1*06:01L
FIAGLIAIVM

SEQ ID NO: 18848 - protein, 14 aa, Severe acute respiratory syndrome coronavirus 2
  REGION 1..14: note = Table B: HLA-DQA1*01:02-B1*06:02L
EDDSEPVLKGVKLH

SEQ ID NO: 18849 - protein, 11 aa, Severe acute respiratory syndrome coronavirus 2
  REGION 1..11: note = Table B: HLA-DQA1*01:02-B1*06:02L
FTIGTVTLKQG

SEQ ID NO: 18850 - protein, 11 aa, Severe acute respiratory syndrome coronavirus 2
  REGION 1..11: note = Table B: HLA-DQA1*01:02-B1*06:02L
GTVTLKQGEIK

SEQ ID NO: 18851 - protein, 13 aa, Severe acute respiratory syndrome coronavirus 2
  REGION 1..13: note = Table B: HLA-DQA1*01:02-B1*06:02L
TVTLKQGEIKDAT

SEQ ID NO: 18852 - protein, 13 aa, Severe acute respiratory syndrome coronavirus 2
  REGION 1..13: note = Table B: HLA-DQA1*01:02-B1*06:02L
VTLKQGEIKDATP

SEQ ID NO: 18853 - protein, 13 aa, Severe acute respiratory syndrome coronavirus 2
  REGION 1..13: note = Table B: HLA-DQA1*01:02-B1*06:02L
IKDATPSDFVRAT

SEQ ID NO: 18854 - protein, 13 aa, Severe acute respiratory syndrome coronavirus 2
  REGION 1..13: note = Table B: HLA-DQA1*01:02-B1*06:02L HLA-DQA1*05:01-B1*02:01L
DATPSDFVRATAT

SEQ ID NO: 18855 - protein, 11 aa, Severe acute respiratory syndrome coronavirus 2
  REGION 1..11: note = Table B: HLA-DQA1*01:02-B1*06:02L
ATIPIQASLPF

SEQ ID NO: 18856 - protein, 11 aa, Severe acute respiratory syndrome coronavirus 2
  REGION 1..11: note = Table B: HLA-DQA1*01:02-B1*06:02L HLA-DPA1*03:01-B1*105:01L HLA-DQA1*01:03-B1*06:01L
IVGVALLAVFQ

SEQ ID NO: 18857 - protein, 13 aa, Severe acute respiratory syndrome coronavirus 2
  REGION 1..13: note = Table B: HLA-DQA1*01:02-B1*06:02L
VGVALLAVFQSAS

SEQ ID NO: 18858 - protein, 11 aa, Severe acute respiratory syndrome coronavirus 2
  REGION 1..11: note = Table B: HLA-DQA1*01:02-B1*06:02L HLA-DPA1*01:03-B1*03:01L HLA-DRB1*11:04L HLA-DRB1*11:01L HLA-DRB5*01:01L HLA-DPA1*01:03-B1*04:01L HLA-DRB1*04:10L HLA-DPA1*02:01-B1*13:01L HLA-DRB1*08:03L
AVFQSASKIIT

SEQ ID NO: 18859 - protein, 11 aa, Severe acute respiratory syndrome coronavirus 2
  REGION 1..11: note = Table B: HLA-DQA1*01:02-B1*06:02L HLA-DRB1*11:04L HLA-DRB1*11:01L HLA-DRB1*16:01L
IITLKKRWQLA

SEQ ID NO: 18860 - protein, 14 aa, Severe acute respiratory syndrome coronavirus 2
  REGION 1..14: note = Table B: HLA-DQA1*01:02-B1*06:02L
LALSKGVHFVCNLL

SEQ ID NO: 18861 - protein, 10 aa, Severe acute respiratory syndrome coronavirus 2
  REGION 1..10: note = Table B: HLA-DQA1*01:02-B1*06:02L HLA-DPA1*03:01-B1*04:02L HLA-DPA1*03:01-B1*105:01L HLA-DPA1*01:02-B1*04:01L HLA-DQA1*01:03-B1*06:01L HLA-DRB1*15:03L
TVYSHLLLVA

SEQ ID NO: 18862 - protein, 11 aa, Severe acute respiratory syndrome coronavirus 2
  REGION 1..11: note = Table B: HLA-DQA1*01:02-B1*06:02L HLA-DPA1*01:03-B1*04:01L HLA-DRB1*16:01L HLA-DRB1*04:08L
VYSHLLLVAAG

SEQ ID NO: 18863 - protein, 12 aa, Severe acute respiratory syndrome coronavirus 2
  REGION 1..12: note = Table B: HLA-DQA1*01:02-B1*06:02L HLA-DPA1*03:01-B1*105:01L HLA-DQA1*01:03-B1*06:01L
YSHLLLVAAGLE

SEQ ID NO: 18864 - protein, 10 aa, Severe acute respiratory syndrome coronavirus 2
  REGION 1..10: note = Table B: HLA-DQA1*01:02-B1*06:02L HLA-DPA1*01:03-B1*03:01L HLA-DQA1*05:05-B1*03:19L HLA-DQA1*05:01-B1*02:01L HLA-DPA1*01:03-B1*104:01L
AAGLEAPFLY

SEQ ID NO: 18865 - protein, 10 aa, Severe acute respiratory syndrome coronavirus 2
  REGION 1..10: note = Table B: HLA-DQA1*01:02-B1*06:02L HLA-DPA1*03:01-B1*04:02L HLA-DQA1*01-B1*05L HLA-DQA1*05:05-B1*03:19L HLA-DQA1*05:01-B1*02:01L HLA-DPA1*01:03-B1*04:01L HLA-DPA1*03:01-B1*105:01L HLA-DPA1*01:02-B1*04:01L
  REGION 1..10: note = CONT. FROM ABOVE: HLA-DRB1*16:01L HLA-DQA1*01:03-B1*06:01L HLA-D QA1*02:01-B1*03:03L HLA-DRB1*15:03L
LQSINFVRII

SEQ ID NO: 18866 - protein, 12 aa, Severe acute respiratory syndrome coronavirus 2
  REGION 1..12: note = Table B: HLA-DQA1*01:02-B1*06:02L HLA-DQA1*02:01-B1*03:03L
RSKNPLLYDANY

SEQ ID NO: 18867 - protein, 10 aa, Severe acute respiratory syndrome coronavirus 2
  REGION 1..10: note = Table B: HLA-DQA1*01:02-B1*06:02L HLA-DPA1*03:01-B1*105:01L
NPLLYDANYF

SEQ ID NO: 18868 - protein, 12 aa, Severe acute respiratory syndrome coronavirus 2
  REGION 1..12: note = Table B: HLA-DQA1*01:02-B1*06:02L HLA-DPA1*01:03-B1*04:01L HLA-DPA1*01:03-B1*04:02L HLA-DPA1*03:01-B1*105:01L HLA-DRB1*16:01L HLA-DQA1*01:03-B1*06:01L HLA-DRB1*04:08L
YDANYFLCWHTN

SEQ ID NO: 18869 - protein, 13 aa, Severe acute respiratory syndrome coronavirus 2
  REGION 1..13: note = Table B: HLA-DQA1*01:02-B1*06:02L HLA-DPA1*03:01-B1*105:01L HLA-DQA1*01:03-B1*06:01L
WHTNCYDYCIPYN

SEQ ID NO: 18870 - protein, 11 aa, Severe acute respiratory syndrome coronavirus 2
  REGION 1..11: note = Table B: HLA-DQA1*01:02-B1*06:02L HLA-DPA1*03:01-B1*105:01L HLA-DQA1*05:05-B1*03:01L HLA-DQA1*01:03-B1*06:01L
YDYCIPYNSVT

SEQ ID NO: 18871 - protein, 12 aa, Severe acute respiratory syndrome coronavirus 2
  REGION 1..12: note = Table B: HLA-DQA1*01:02-B1*06:02L HLA-DQA1*05:05-B1*03:19L HLA-DQA1*05:05-B1*03:01L HLA-DQA1*02:01-B1*03:03L
NSVTSSIVITSG

SEQ ID NO: 18872 - protein, 12 aa, Severe acute respiratory syndrome coronavirus 2
  REGION 1..12: note = Table B: HLA-DQA1*01:02-B1*06:02L HLA-DRB1*08:01L HLA-DQA1*02:01-B1*03:03L
GGYTEKWESGVK

SEQ ID NO: 18873 - protein, 12 aa, Severe acute respiratory syndrome coronavirus 2
  REGION 1..12: note = Table B: HLA-DQA1*01:02-B1*06:02L HLA-DRB1*01:02L HLA-DRB1*08:01L HLA-DPA1*03:01-B1*105:01L HLA-DRB1*16:01L HLA-DQA1*01:03-B1*06:01L
GYTEKWESGVKD

SEQ ID NO: 18874 - protein, 14 aa, Severe acute respiratory syndrome coronavirus 2
  REGION 1..14: note = Table B: HLA-DQA1*01:02-B1*06:02L
TEKWESGVKDCVVL

SEQ ID NO: 18875 - protein, 12 aa, Severe acute respiratory syndrome coronavirus 2
  REGION 1..12: note = Table B: HLA-DQA1*01:02-B1*06:02L
WESGVKDCVVLH

SEQ ID NO: 18876 - protein, 10 aa, Severe acute respiratory syndrome coronavirus 2
  REGION 1..10: note = Table B: HLA-DQA1*01:02-B1*06:02L HLA-DQA1*05:05-B1*03:19L HLA-DQA1*01:03-B1*06:01L HLA-DQA1*02:01-B1*03:03L
VKDCVVLHSY

SEQ ID NO: 18877 - protein, 10 aa, Severe acute respiratory syndrome coronavirus 2
  REGION 1..10: note = Table B: HLA-DQA1*01:02-B1*06:02L HLA-DPA1*01:03-B1*03:01L HLA-DQA1*01-B1*05L HLA-DQA1*05:05-B1*03:19L HLA-DQA1*05:01-B1*02:01L HLA-DPA1*01:03-B1*104:01L HLA-DQA1*02:01-B1*03:03L
VLHSYFTSDY

SEQ ID NO: 18878 - protein, 10 aa, Severe acute respiratory syndrome coronavirus 2
  REGION 1..10: note = Table B: HLA-DQA1*01:02-B1*06:02L HLA-DRB1*08:77L HLA-DPA1*01:03-B1*03:01L HLA-DPA1*03:01-B1*04:02L HLA-DRB1*03:01L HLA-DRB1*11:02L HLA-DRB1*14:02L HLA-DQA1*01-B1*05L HLA-DQA1*05:05-B1*03:19M
  REGION 1..10: note = CONT. FROM ABOVE: HLA-DQA1*05:01-B1*02:01L HLA-DRB4*01:01L HLA-D PA1*01:03-B1*04:01L HLA-DQA1*05:05-B1*03:116L HLA-DPA1*01:03-B1* 04:02L HLA-DPA1*02:01-B1*13:01L HLA-DPA1*03:01-B1*105:01L HLA-DP A1*01:03-B1*104:01L HLA-DRB1*10:01L HLA-DRB1*16:01L
  REGION 1..10: note = CONT. FROM ABOVE: HLA-DQA1*01:03-B1*06:01L HLA-DRB1*15:03L
YFTSDYYQLY

SEQ ID NO: 18879 - protein, 13 aa, Severe acute respiratory syndrome coronavirus 2
  REGION 1..13: note = Table B: HLA-DQA1*01:02-B1*06:02L HLA-DQA1*01-B1*05L
LYSTQLSTDTGVE

SEQ ID NO: 18880 - protein, 13 aa, Severe acute respiratory syndrome coronavirus 2
  REGION 1..13: note = Table B: HLA-DQA1*01:02-B1*06:02L
YSTQLSTDTGVEH

SEQ ID NO: 18881 - protein, 13 aa, Severe acute respiratory syndrome coronavirus 2
  REGION 1..13: note = Table B: HLA-DQA1*01:02-B1*06:02L HLA-DRB1*01:02L HLA-DRB1*08:04L HLA-DRB1*08:77L HLA-DPA1*01:03-B1*03:01L HLA-DRB1*03:01L HLA-DRB1*14:01L HLA-DRB3*01:01L HLA-DRB1*04:08L
TQLSTDTGVEHVT

SEQ ID NO: 18882 - protein, 10 aa, Severe acute respiratory syndrome coronavirus 2
  REGION 1..10: note = Table B: HLA-DQA1*01:02-B1*06:02L HLA-DPA1*01:03-B1*03:01L HLA-DRB1*11:02L HLA-DQA1*05:05-B1*03:19M HLA-DQA1*05:01-B1*02:01L HLA-DPA1*01:03-B1*104:01L HLA-DRB1*16:01L
GVEHVTFFIY

SEQ ID NO: 18883 - protein, 14 aa, Severe acute respiratory syndrome coronavirus 2
  REGION 1..14: note = Table B: HLA-DQA1*01:02-B1*06:02L HLA-DRB1*01:02L HLA-DRB1*08:04L HLA-DRB1*14:01L HLA-DRB1*08:01L HLA-DQA1*01-B1*05L HLA-DPA1*01:03-B1*04:02L HLA-DRB1*12:01L HLA-DPA1*02:01-B1*13:01L HLA-DRB1*16:01L
  REGION 1..14: note = CONT. FROM ABOVE: HLA-DQA1*01:03-B1*06:01L HLA-DRB1*04:08L
VEHVTFFIYNKIVD

SEQ ID NO: 18884 - protein, 13 aa, Severe acute respiratory syndrome coronavirus 2
  REGION 1..13: note = Table B: HLA-DQA1*01:02-B1*06:02L HLA-DPA1*01:03-B1*04:01L HLA-DPA1*01:03-B1*04:02L HLA-DPA1*02:01-B1*13:01L HLA-DRB1*16:01L HLA-DRB1*15:03L
VTFFIYNKIVDEP

SEQ ID NO: 18885 - protein, 12 aa, Severe acute respiratory syndrome coronavirus 2
  REGION 1..12: note = Table B: HLA-DQA1*01:02-B1*06:02L HLA-DQA1*03:01-B1*03:02L HLA-DQA1*01:03-B1*06:01L HLA-DQA1*02:01-B1*03:03L
EPEEHVQIHTID

SEQ ID NO: 18886 - protein, 12 aa, Severe acute respiratory syndrome coronavirus 2
  REGION 1..12: note = Table B: HLA-DQA1*01:02-B1*06:02L HLA-DQA1*01:03-B1*06:01L HLA-DQA1*02:01-B1*03:03L
PEEHVQIHTIDG

SEQ ID NO: 18887 - protein, 14 aa, Severe acute respiratory syndrome coronavirus 2
  REGION 1..14: note = Table B: HLA-DQA1*01:02-B1*06:02L HLA-DRB1*01:02L HLA-DRB1*12:01L HLA-DPA1*03:01-B1*105:01L HLA-DQA1*02:01-B1*03:03L
PVMEPIYDEPTTTT

SEQ ID NO: 18888 - protein, 10 aa, Severe acute respiratory syndrome coronavirus 2
  REGION 1..10: note = Table B: HLA-DQA1*01:02-B1*06:02L HLA-DPA1*02:01-B1*13:01L HLA-DQA1*01:03-B1*06:01L HLA-DRB1*15:03L
TLIVNSVLLF

SEQ ID NO: 18889 - protein, 10 aa, Severe acute respiratory syndrome coronavirus 2
  REGION 1..10: note = Table B: HLA-DQA1*01:02-B1*06:02L HLA-DPA1*03:01-B1*105:01L HLA-DQA1*03:01-B1*03:02L HLA-DQA1*05:05-B1*03:01L HLA-DQA1*01:03-B1*06:01L HLA-DQA1*02:01-B1*03:03L
VTLAILTALR

SEQ ID NO: 18890 - protein, 10 aa, Severe acute respiratory syndrome coronavirus 2
  REGION 1..10: note = Table B: HLA-DQA1*01:02-B1*06:02L HLA-DQA1*05:05-B1*03:19L HLA-DQA1*05:01-B1*02:01L HLA-DRB1*15:03L
ILTALRLCAY

SEQ ID NO: 18891 - protein, 14 aa, Severe acute respiratory syndrome coronavirus 2
  REGION 1..14: note = Table B: HLA-DQA1*01:02-B1*06:02L HLA-DPA1*01:03-B1*03:01L HLA-DPA1*03:01-B1*04:02L HLA-DPA1*01:03-B1*04:02L HLA-DRB1*12:01L HLA-DPA1*02:01-B1*13:01L HLA-DPA1*03:01-B1*105:01L HLA-DPA1*01:03-B1*104:01L
TALRLCAYCCNIVN

SEQ ID NO: 18892 - protein, 16 aa, Severe acute respiratory syndrome coronavirus 2
  REGION 1..16: note = Table B: HLA-DQA1*01:02-B1*06:02L
LCAYCCNIVNVSLVKP

SEQ ID NO: 18893 - protein, 11 aa, Severe acute respiratory syndrome coronavirus 2
  REGION 1..11: note = Table B: HLA-DQA1*01:02-B1*06:02L HLA-DRB1*01:02L HLA-DRB1*14:01L HLA-DRB1*04:10L HLA-DQA1*05:05-B1*03:01L
NIVNVSLVKPS

SEQ ID NO: 18894 - protein, 13 aa, Severe acute respiratory syndrome coronavirus 2
  REGION 1..13: note = Table B: HLA-DQA1*01:02-B1*06:02L
LVKPSFYVYSRVK

SEQ ID NO: 18895 - protein, 14 aa, Severe acute respiratory syndrome coronavirus 2
  REGION 1..14: note = Table B: HLA-DQA1*01:02-B1*06:02L
KKLLEQWNLVIGFL

SEQ ID NO: 18896 - protein, 12 aa, Severe acute respiratory syndrome coronavirus 2
  REGION 1..12: note = Table B: HLA-DQA1*01:02-B1*06:02L
ICLLQFAYANRN

SEQ ID NO: 18897 - protein, 12 aa, Severe acute respiratory syndrome coronavirus 2
  REGION 1..12: note = Table B: HLA-DQA1*01:02-B1*06:02L
TLACFVLAAVYR

SEQ ID NO: 18898 - protein, 13 aa, Severe acute respiratory syndrome coronavirus 2
  REGION 1..13: note = Table B: HLA-DQA1*01:02-B1*06:02L HLA-DRB1*01:02L HLA-DRB1*08:04L HLA-DPA1*01:03-B1*03:01L HLA-DPA1*03:01-B1*04:02L HLA-DQA1*01-B1*05L HLA-DRB1*12:01L HLA-DPA1*02:01-B1*13:01L HLA-DPA1*03:01-B1*105:01L
  REGION 1..13: note = CONT. FROM ABOVE: HLA-DRB1*16:01L HLA-DRB1*15:03L
AAVYRINWITGGI

SEQ ID NO: 18899 - protein, 10 aa, Severe acute respiratory syndrome coronavirus 2
  REGION 1..10: note = Table B: HLA-DQA1*01:02-B1*06:02L HLA-DQA1*05:05-B1*03:19L HLA-DPA1*03:01-B1*105:01L HLA-DQA1*05:05-B1*03:01L HLA-DQA1*01:03-B1*06:01L
WITGGIAIAM

SEQ ID NO: 18900 - protein, 12 aa, Severe acute respiratory syndrome coronavirus 2
  REGION 1..12: note = Table B: HLA-DQA1*01:02-B1*06:02L HLA-DPA1*03:01-B1*105:01L
GGIAIAMACLVG

SEQ ID NO: 18901 - protein, 12 aa, Severe acute respiratory syndrome coronavirus 2
  REGION 1..12: note = Table B: HLA-DQA1*01:02-B1*06:02L HLA-DRB1*08:04L HLA-DPA1*01:03-B1*04:02L HLA-DRB1*16:01L HLA-DRB1*04:08L
YFIASFRLFART

SEQ ID NO: 18902 - protein, 13 aa, Severe acute respiratory syndrome coronavirus 2
  REGION 1..13: note = Table B: HLA-DQA1*01:02-B1*06:02L HLA-DRB1*01:02L HLA-DQA1*03:01-B1*03:02L HLA-DQA1*01:03-B1*06:01L HLA-DQA1*02:01-B1*03:03L
FARTRSMWSFNPE

SEQ ID NO: 18903 - protein, 13 aa, Severe acute respiratory syndrome coronavirus 2
  REGION 1..13: note = Table B: HLA-DQA1*01:02-B1*06:02L
SFNPETNILLNVP

SEQ ID NO: 18904 - protein, 13 aa, Severe acute respiratory syndrome coronavirus 2
  REGION 1..13: note = Table B: HLA-DQA1*01:02-B1*06:02L HLA-DQA1*03:01-B1*03:02L HLA-DQA1*01:03-B1*06:01L HLA-DQA1*02:01-B1*03:03L
NPETNILLNVPLH

SEQ ID NO: 18905 - protein, 11 aa, Severe acute respiratory syndrome coronavirus 2
  REGION 1..11: note = Table B: HLA-DQA1*01:02-B1*06:02L HLA-DPA1*01:03-B1*03:01L HLA-DPA1*03:01-B1*04:02L HLA-DQA1*05:01-B1*02:01L HLA-DPA1*01:03-B1*04:02L HLA-DPA1*02:01-B1*13:01L HLA-DPA1*03:01-B1*105:01L HLA-DPA1*01:03-B1*104:01L
  REGION 1..11: note = CONT. FROM ABOVE: HLA-DPA1*01:02-B1*04:01L HLA-DQA1*01:03-B1*06: 01L
ILLNVPLHGTI

SEQ ID NO: 18906 - protein, 12 aa, Severe acute respiratory syndrome coronavirus 2
  REGION 1..12: note = Table B: HLA-DQA1*01:02-B1*06:02L HLA-DPA1*01:03-B1*04:02L HLA-DPA1*02:01-B1*13:01L HLA-DRB1*15:03L
TILTRPLLESEL

SEQ ID NO: 18907 - protein, 12 aa, Severe acute respiratory syndrome coronavirus 2
  REGION 1..12: note = Table B: HLA-DQA1*01:02-B1*06:02L
ILTRPLLESELV

SEQ ID NO: 18908 - protein, 10 aa, Severe acute respiratory syndrome coronavirus 2
  REGION 1..10: note = Table B: HLA-DQA1*01:02-B1*06:02L HLA-DQA1*01:03-B1*06:01L
IGAVILRGHL

SEQ ID NO: 18909 - protein, 14 aa, Severe acute respiratory syndrome coronavirus 2
  REGION 1..14: note = Table B: HLA-DQA1*01:02-B1*06:02L
HHLGRCDIKDLPKE

SEQ ID NO: 18910 - protein, 14 aa, Severe acute respiratory syndrome coronavirus 2
  REGION 1..14: note = Table B: HLA-DQA1*01:02-B1*06:02L HLA-DRB1*01:02L
IKDLPKEITVATSR

SEQ ID NO: 18911 - protein, 12 aa, Severe acute respiratory syndrome coronavirus 2
  REGION 1..12: note = Table B: HLA-DQA1*01:02-B1*06:02L
RTLSYYKLGASQ

SEQ ID NO: 18912 - protein, 12 aa, Severe acute respiratory syndrome coronavirus 2
  REGION 1..12: note = Table B: HLA-DQA1*01:02-B1*06:02L
KLGASQRVAGDS

SEQ ID NO: 18913 - protein, 11 aa, Severe acute respiratory syndrome coronavirus 2
  REGION 1..11: note = Table B: HLA-DQA1*01:02-B1*06:02L
AAYSRYRIGNY

SEQ ID NO: 18914 - protein, 14 aa, Severe acute respiratory syndrome coronavirus 2
  REGION 1..14: note = Table B: HLA-DQA1*01:02-B1*06:02L HLA-DRB1*01:02L
YSRYRIGNYKLNTD

SEQ ID NO: 18915 - protein, 14 aa, Severe acute respiratory syndrome coronavirus 2
  REGION 1..14: note = Table B: HLA-DQA1*01:02-B1*06:02L
NTDHSSSSDNIALL

SEQ ID NO: 18916 - protein, 13 aa, Severe acute respiratory syndrome coronavirus 2
  REGION 1..13: note = Table B: HLA-DQA1*01:02-B1*06:02L HLA-DRB1*14:01L HLA-DPA1*02:01-B1*13:01L
HLVDFQVTIAEIL

SEQ ID NO: 18917 - protein, 12 aa, Severe acute respiratory syndrome coronavirus 2
  REGION 1..12: note = Table B: HLA-DQA1*01:02-B1*06:02L
VTIAEILLIIMR

SEQ ID NO: 18918 - protein, 10 aa, Severe acute respiratory syndrome coronavirus 2
  REGION 1..10: note = Table B: HLA-DQA1*01:02-B1*06:02L HLA-DQA1*05:01-B1*02:01L HLA-DPA1*01:03-B1*04:01L HLA-DPA1*03:01-B1*105:01L HLA-DQA1*02:01-B1*03:03L HLA-DRB1*15:03L
EILLIIMRTF

SEQ ID NO: 18919 - protein, 12 aa, Severe acute respiratory syndrome coronavirus 2
  REGION 1..12: note = Table B: HLA-DQA1*01:02-B1*06:02L HLA-DPA1*03:01-B1*04:02L HLA-DPA1*03:01-B1*105:01L
ILLIIMRTFKVS

SEQ ID NO: 18920 - protein, 13 aa, Severe acute respiratory syndrome coronavirus 2
  REGION 1..13: note = Table B: HLA-DQA1*01:02-B1*06:02L HLA-DRB1*01:02L HLA-DPA1*01:03-B1*03:01L HLA-DRB1*08:01L HLA-DPA1*02:01-B1*13:01L HLA-DPA1*01:03-B1*104:01L HLA-DQA1*01:03-B1*06:01L HLA-DRB1*15:03L
IMRTFKVSIWNLD

SEQ ID NO: 18921 - protein, 10 aa, Severe acute respiratory syndrome coronavirus 2
  REGION 1..10: note = Table B: HLA-DQA1*01:02-B1*06:02L HLA-DPA1*01:03-B1*03:01L HLA-DPA1*03:01-B1*04:02L HLA-DQA1*05:05-B1*03:19L HLA-DQA1*05:01-B1*02:01L HLA-DPA1*01:03-B1*04:01L HLA-DPA1*03:01-B1*105:01L HLA-DPA1*01:03-B1*104:01L
  REGION 1..10: note = CONT. FROM ABOVE: HLA-DRB1*16:01L
FKVSIWNLDY

SEQ ID NO: 18922 - protein, 12 aa, Severe acute respiratory syndrome coronavirus 2
  REGION 1..12: note = Table B: HLA-DQA1*01:02-B1*06:02L HLA-DQA1*05:01-B1*02:01L HLA-DPA1*03:01-B1*105:01L HLA-DRB1*15:03L
KVSIWNLDYIIN

SEQ ID NO: 18923 - protein, 13 aa, Severe acute respiratory syndrome coronavirus 2
  REGION 1..13: note = Table B: HLA-DQA1*01:02-B1*06:02L HLA-DRB1*01:02L HLA-DQA1*05:01-B1*02:01L HLA-DPA1*01:03-B1*04:02L HLA-DRB1*12:01L HLA-DPA1*01:02-B1*04:01L HLA-DRB1*16:01L
IWNLDYIINLIIK

SEQ ID NO: 18924 - protein, 10 aa, Severe acute respiratory syndrome coronavirus 2
  REGION 1..10: note = Table B: HLA-DQA1*01:02-B1*06:02L
ITLATCELYH

SEQ ID NO: 18925 - protein, 10 aa, Severe acute respiratory syndrome coronavirus 2
  REGION 1..10: note = Table B: HLA-DQA1*01:02-B1*06:02L HLA-DQA1*05:05-B1*03:19L HLA-DQA1*05:01-B1*02:01L
TLATCELYHY

SEQ ID NO: 18926 - protein, 10 aa, Severe acute respiratory syndrome coronavirus 2
  REGION 1..10: note = Table B: HLA-DQA1*01:02-B1*06:02L HLA-DPA1*03:01-B1*105:01L HLA-DQA1*01:03-B1*06:01L
LATCELYHYQ

SEQ ID NO: 18927 - protein, 11 aa, Severe acute respiratory syndrome coronavirus 2
  REGION 1..11: note = Table B: HLA-DQA1*01:02-B1*06:02L
YHYQECVRGTT

SEQ ID NO: 18928 - protein, 12 aa, Severe acute respiratory syndrome coronavirus 2
  REGION 1..12: note = Table B: HLA-DQA1*01:02-B1*06:02L HLA-DRB1*11:01L
HYQECVRGTTVL

SEQ ID NO: 18929 - protein, 15 aa, Severe acute respiratory syndrome coronavirus 2
  REGION 1..15: note = Table B: HLA-DQA1*01:02-B1*06:02L HLA-DRB1*01:02L
VRGTTVLLKEPCSSG

SEQ ID NO: 18930 - protein, 13 aa, Severe acute respiratory syndrome coronavirus 2
  REGION 1..13: note = Table B: HLA-DQA1*01:02-B1*06:02L
TVLLKEPCSSGTY

SEQ ID NO: 18931 - protein, 15 aa, Severe acute respiratory syndrome coronavirus 2
  REGION 1..15: note = Table B: HLA-DQA1*01:02-B1*06:02L HLA-DQA1*01:03-B1*06:01L
LKEPCSSGTYEGNSP

SEQ ID NO: 18932 - protein, 13 aa, Severe acute respiratory syndrome coronavirus 2
  REGION 1..13: note = Table B: HLA-DQA1*01:02-B1*06:02L HLA-DRB1*08:01L HLA-DQA1*01:03-B1*06:01L
SSGTYEGNSPFHP

SEQ ID NO: 18933 - protein, 12 aa, Severe acute respiratory syndrome coronavirus 2
  REGION 1..12: note = Table B: HLA-DQA1*01:02-B1*06:02L
GNSPFHPLADNK

SEQ ID NO: 18934 - protein, 13 aa, Severe acute respiratory syndrome coronavirus 2
  REGION 1..13: note = Table B: HLA-DQA1*01:02-B1*06:02L HLA-DPA1*03:01-B1*04:02L HLA-DPA1*01:03-B1*04:02L HLA-DRB1*15:03L
NKFALTCFSTQFA

SEQ ID NO: 18935 - protein, 13 aa, Severe acute respiratory syndrome coronavirus 2
  REGION 1..13: note = Table B: HLA-DQA1*01:02-B1*06:02L HLA-DPA1*01:02-B1*04:01L
ARSVSPKLFIRQE

SEQ ID NO: 18936 - protein, 12 aa, Severe acute respiratory syndrome coronavirus 2
  REGION 1..12: note = Table B: HLA-DQA1*01:02-B1*06:02L
SVSPKLFIRQEE

SEQ ID NO: 18937 - protein, 12 aa, Severe acute respiratory syndrome coronavirus 2
  REGION 1..12: note = Table B: HLA-DQA1*01:02-B1*06:02L HLA-DRB1*08:01L HLA-DQA1*01-B1*05L HLA-DQA1*05:01-B1*02:01L HLA-DQA1*03:01-B1*03:02L HLA-DQA1*02:01-B1*03:03L
SPKLFIRQEEVQ

SEQ ID NO: 18938 - protein, 10 aa, Severe acute respiratory syndrome coronavirus 2
  REGION 1..10: note = Table B: HLA-DQA1*01:02-B1*06:02L
IVAAIVFITL

SEQ ID NO: 18939 - protein, 13 aa, Severe acute respiratory syndrome coronavirus 2
  REGION 1..13: note = Table B: HLA-DQA1*01:02-B1*06:02L HLA-DPA1*01:02-B1*04:01L
IIFWFSLELQDHN

SEQ ID NO: 18940 - protein, 12 aa, Severe acute respiratory syndrome coronavirus 2
  REGION 1..12: note = Table B: HLA-DQA1*01:02-B1*06:02L HLA-DQA1*01:03-B1*06:01L
WFSLELQDHNET

SEQ ID NO: 18941 - protein, 14 aa, Severe acute respiratory syndrome coronavirus 2
  REGION 1..14: note = Table B: HLA-DQA1*01:02-B1*06:02L HLA-DRB1*01:02L
FSLELQDHNETCHA

SEQ ID NO: 18942 - protein, 12 aa, Severe acute respiratory syndrome coronavirus 2
  REGION 1..12: note = Table B: HLA-DQA1*01:02-B1*06:02L
TVAAFHQECSLQ

SEQ ID NO: 18943 - protein, 12 aa, Severe acute respiratory syndrome coronavirus 2
  REGION 1..12: note = Table B: HLA-DQA1*01:02-B1*06:02L
FHQECSLQSCTQ

SEQ ID NO: 18944 - protein, 12 aa, Severe acute respiratory syndrome coronavirus 2
  REGION 1..12: note = Table B: HLA-DQA1*01:02-B1*06:02L HLA-DQA1*01:03-B1*06:01L
HQECSLQSCTQH

SEQ ID NO: 18945 - protein, 10 aa, Severe acute respiratory syndrome coronavirus 2
  REGION 1..10: note = Table B: HLA-DQA1*01:02-B1*06:02L HLA-DQA1*01:03-B1*06:01L HLA-DQA1*02:01-B1*03:03L
LQSCTQHQPY

SEQ ID NO: 18946 - protein, 11 aa, Severe acute respiratory syndrome coronavirus 2
  REGION 1..11: note = Table B: HLA-DQA1*01:02-B1*06:02L HLA-DQA1*02:01-B1*03:03L
DPCPIHFYSKW

SEQ ID NO: 18947 - protein, 15 aa, Severe acute respiratory syndrome coronavirus 2
  REGION 1..15: note = Table B: HLA-DQA1*01:02-B1*06:02L HLA-DRB1*11:04L HLA-DPA1*01:03-B1*02:01L
PIHFYSKWYIRVGAR

SEQ ID NO: 18948 - protein, 14 aa, Severe acute respiratory syndrome coronavirus 2
  REGION 1..14: note = Table B: HLA-DQA1*01:02-B1*06:02L HLA-DPA1*02:01-B1*13:01L
ARKSAPLIELCVDE

SEQ ID NO: 18949 - protein, 14 aa, Severe acute respiratory syndrome coronavirus 2
  REGION 1..14: note = Table B: HLA-DQA1*01:02-B1*06:02L
KSAPLIELCVDEAG

SEQ ID NO: 18950 - protein, 13 aa, Severe acute respiratory syndrome coronavirus 2
  REGION 1..13: note = Table B: HLA-DQA1*01:02-B1*06:02L HLA-DPA1*02:01-B1*13:01L HLA-DQA1*01:03-B1*06:01L HLA-DQA1*02:01-B1*03:03L
AGSKSPIQYIDIG

SEQ ID NO: 18951 - protein, 10 aa, Severe acute respiratory syndrome coronavirus 2
  REGION 1..10: note = Table B: HLA-DQA1*01:02-B1*06:02L HLA-DPA1*01:03-B1*03:01L HLA-DRB1*14:02L HLA-DQA1*01-B1*05L HLA-DQA1*05:05-B1*03:19L HLA-DQA1*05:01-B1*02:01L HLA-DPA1*03:01-B1*105:01L HLA-DPA1*01:03-B1*104:01L HLA-DRB1*16:01L
  REGION 1..10: note = CONT. FROM ABOVE: HLA-DQA1*02:01-B1*03:03L HLA-DRB1*15:03L
PIQYIDIGNY

SEQ ID NO: 18952 - protein, 10 aa, Severe acute respiratory syndrome coronavirus 2
  REGION 1..10: note = Table B: HLA-DQA1*01:02-B1*06:02L HLA-DQA1*01:03-B1*06:01L
TVSCLPFTIN

SEQ ID NO: 18953 - protein, 12 aa, Severe acute respiratory syndrome coronavirus 2
  REGION 1..12: note = Table B: HLA-DQA1*01:02-B1*06:02L
PFTINCQEPKLG

SEQ ID NO: 18954 - protein, 12 aa, Severe acute respiratory syndrome coronavirus 2
  REGION 1..12: note = Table B: HLA-DQA1*01:02-B1*06:02L HLA-DQA1*01:03-B1*06:01L
TINCQEPKLGSL

SEQ ID NO: 18955 - protein, 14 aa, Severe acute respiratory syndrome coronavirus 2
  REGION 1..14: note = Table B: HLA-DQA1*01:02-B1*06:02L
PKLGSLVVRCSFYE

SEQ ID NO: 18956 - protein, 12 aa, Severe acute respiratory syndrome coronavirus 2
  REGION 1..12: note = Table B: HLA-DQA1*01:02-B1*06:02L HLA-DPA1*03:01-B1*04:02L HLA-DPA1*03:01-B1*105:01L
VVRCSFYEDFLE

SEQ ID NO: 18957 - protein, 11 aa, Severe acute respiratory syndrome coronavirus 2
  REGION 1..11: note = Table B: HLA-DQA1*01:02-B1*06:02L HLA-DPA1*01:03-B1*04:02L
YEDFLEYHDVR

SEQ ID NO: 18958 - protein, 10 aa, Severe acute respiratory syndrome coronavirus 2
  REGION 1..10: note = Table B: HLA-DQA1*01:02-B1*06:02L HLA-DPA1*02:01-B1*13:01L HLA-DPA1*03:01-B1*105:01L HLA-DQA1*01:03-B1*06:01L HLA-DQA1*02:01-B1*03:03L HLA-DRB1*15:03L
YHDVRVVLDF

SEQ ID NO: 18959 - protein, 13 aa, Severe acute respiratory syndrome coronavirus 2
  REGION 1..13: note = Table B: HLA-DQA1*01:02-B1*06:02L HLA-DQA1*01:01-B1*05:01L HLA-DQA1*05:01-B1*02:01L
DSTGSNQNGERSG

SEQ ID NO: 18960 - protein, 12 aa, Severe acute respiratory syndrome coronavirus 2
  REGION 1..12: note = Table B: HLA-DQA1*01:02-B1*06:02L HLA-DPA1*01:03-B1*03:01L HLA-DQA1*05:05-B1*03:19L HLA-DQA1*02:01-B1*03:03L
RPQGLPNNTASW

SEQ ID NO: 18961 - protein, 10 aa, Severe acute respiratory syndrome coronavirus 2
  REGION 1..10: note = Table B: HLA-DQA1*01:02-B1*06:02L HLA-DQA1*02:01-B1*03:03L
GLPNNTASWF

SEQ ID NO: 18962 - protein, 12 aa, Severe acute respiratory syndrome coronavirus 2
  REGION 1..12: note = Table B: HLA-DQA1*01:02-B1*06:02L
LPNNTASWFTAL

SEQ ID NO: 18963 - protein, 12 aa, Severe acute respiratory syndrome coronavirus 2
  REGION 1..12: note = Table B: HLA-DQA1*01:02-B1*06:02L
PNNTASWFTALT

SEQ ID NO: 18964 - protein, 12 aa, Severe acute respiratory syndrome coronavirus 2
  REGION 1..12: note = Table B: HLA-DQA1*01:02-B1*06:02L
NTASWFTALTQH

SEQ ID NO: 18965 - protein, 14 aa, Severe acute respiratory syndrome coronavirus 2
  REGION 1..14: note = Table B: HLA-DQA1*01:02-B1*06:02L HLA-DRB1*12:01L HLA-DQA1*01:03-B1*06:01L HLA-DRB1*15:03L
EDLKFPRGQGVPIN

SEQ ID NO: 18966 - protein, 11 aa, Severe acute respiratory syndrome coronavirus 2
  REGION 1..11: note = Table B: HLA-DQA1*01:02-B1*06:02L
DGKMKDLSPRW

SEQ ID NO: 18967 - protein, 10 aa, Severe acute respiratory syndrome coronavirus 2
  REGION 1..10: note = Table B: HLA-DQA1*01:02-B1*06:02M HLA-DPA1*01:03-B1*03:01L HLA-DRB1*03:01L HLA-DRB1*11:02L HLA-DRB1*14:02L HLA-DQA1*01-B1*05L HLA-DQA1*05:05-B1*03:19M HLA-DQA1*05:01-B1*02:01L HLA-DRB4*01:01L
  REGION 1..10: note = CONT. FROM ABOVE: HLA-DPA1*01:03-B1*04:01L HLA-DPA1*03:01-B1*105 :01L HLA-DPA1*01:03-B1*104:01L HLA-DRB1*16:01L HLA-DQA1*02:01-B1 *03:03L
DLSPRWYFYY

SEQ ID NO: 18968 - protein, 12 aa, Severe acute respiratory syndrome coronavirus 2
  REGION 1..12: note = Table B: HLA-DQA1*01:02-B1*06:02L HLA-DQA1*05:05-B1*03:19L HLA-DPA1*03:01-B1*105:01L HLA-DQA1*05:05-B1*03:01L HLA-DRB1*10:01L
YFYYLGTGPEAG

SEQ ID NO: 18969 - protein, 13 aa, Severe acute respiratory syndrome coronavirus 2
  REGION 1..13: note = Table B: HLA-DQA1*01:02-B1*06:02L HLA-DPA1*03:01-B1*105:01L HLA-DQA1*01:03-B1*06:01L
FYYLGTGPEAGLP

SEQ ID NO: 18970 - protein, 11 aa, Severe acute respiratory syndrome coronavirus 2
  REGION 1..11: note = Table B: HLA-DQA1*01:02-B1*06:02L HLA-DQA1*05:01-B1*02:01L HLA-DQA1*03:01-B1*03:02L HLA-DRB1*04:08L
GPEAGLPYGAN

SEQ ID NO: 18971 - protein, 12 aa, Severe acute respiratory syndrome coronavirus 2
  REGION 1..12: note = Table B: HLA-DQA1*01:02-B1*06:02L
PEAGLPYGANKD

SEQ ID NO: 18972 - protein, 10 aa, Severe acute respiratory syndrome coronavirus 2
  REGION 1..10: note = Table B: HLA-DQA1*01:02-B1*06:02L
YGANKDGIIW

SEQ ID NO: 18973 - protein, 12 aa, Severe acute respiratory syndrome coronavirus 2
  REGION 1..12: note = Table B: HLA-DQA1*01:02-B1*06:02L HLA-DQA1*05:05-B1*03:01L HLA-DQA1*01:03-B1*06:01L
GANKDGIIWVAT

SEQ ID NO: 18974 - protein, 12 aa, Severe acute respiratory syndrome coronavirus 2
  REGION 1..12: note = Table B: HLA-DQA1*01:02-B1*06:02L HLA-DPA1*03:01-B1*105:01L HLA-DQA1*05:05-B1*03:01L HLA-DQA1*02:01-B1*03:03L
ANKDGIIWVATE

SEQ ID NO: 18975 - protein, 14 aa, Severe acute respiratory syndrome coronavirus 2
  REGION 1..14: note = Table B: HLA-DQA1*01:02-B1*06:02L HLA-DPA1*01:03-B1*03:01L HLA-DPA1*02:01-B1*13:01L HLA-DQA1*05:05-B1*03:01L HLA-DQA1*01:03-B1*06:01L
GTRNPANNAAIVLQ

SEQ ID NO: 18976 - protein, 13 aa, Severe acute respiratory syndrome coronavirus 2
  REGION 1..13: note = Table B: HLA-DQA1*01:02-B1*06:02L HLA-DQA1*01:03-B1*06:01L
NPANNAAIVLQLP

SEQ ID NO: 18977 - protein, 12 aa, Severe acute respiratory syndrome coronavirus 2
  REGION 1..12: note = Table B: HLA-DQA1*01:02-B1*06:02L
ANNAAIVLQLPQ

SEQ ID NO: 18978 - protein, 10 aa, Severe acute respiratory syndrome coronavirus 2
  REGION 1..10: note = Table B: HLA-DQA1*01:02-B1*06:02L HLA-DPA1*02:01-B1*13:01L HLA-DQA1*01:03-B1*06:01L HLA-DQA1*02:01-B1*03:03L
PQGTTLPKGF

SEQ ID NO: 18979 - protein, 10 aa, Severe acute respiratory syndrome coronavirus 2
  REGION 1..10: note = Table B: HLA-DQA1*01:02-B1*06:02L HLA-DQA1*05:05-B1*03:19L
QGTTLPKGFY

SEQ ID NO: 18980 - protein, 14 aa, Severe acute respiratory syndrome coronavirus 2
  REGION 1..14: note = Table B: HLA-DQA1*01:02-B1*06:02L
RNSSRNSTPGSSRG

SEQ ID NO: 18981 - protein, 16 aa, Severe acute respiratory syndrome coronavirus 2
  REGION 1..16: note = Table B: HLA-DQA1*01:02-B1*06:02L HLA-DQA1*01:03-B1*06:01L
NSSRNSTPGSSRGTSP

SEQ ID NO: 18982 - protein, 13 aa, Severe acute respiratory syndrome coronavirus 2
  REGION 1..13: note = Table B: HLA-DQA1*01:02-B1*06:02L HLA-DRB1*14:54L HLA-DQA1*01:03-B1*06:01L HLA-DRB1*04:08L
NSTPGSSRGTSPA

SEQ ID NO: 18983 - protein, 14 aa, Severe acute respiratory syndrome coronavirus 2
  REGION 1..14: note = Table B: HLA-DQA1*01:02-B1*06:02L HLA-DQA1*05:05-B1*03:19L HLA-DQA1*01:03-B1*06:01L
TPGSSRGTSPARMA

SEQ ID NO: 18984 - protein, 13 aa, Severe acute respiratory syndrome coronavirus 2
  REGION 1..13: note = Table B: HLA-DQA1*01:02-B1*06:02L HLA-DQA1*01:03-B1*06:01L
SRGTSPARMAGNG

SEQ ID NO: 18985 - protein, 14 aa, Severe acute respiratory syndrome coronavirus 2
  REGION 1..14: note = Table B: HLA-DQA1*01:02-B1*06:02L
RMAGNGGDAALALL

SEQ ID NO: 18986 - protein, 12 aa, Severe acute respiratory syndrome coronavirus 2
  REGION 1..12: note = Table B: HLA-DQA1*01:02-B1*06:02L HLA-DQA1*05:01-B1*02:01L HLA-DQA1*01:03-B1*06:01L HLA-DRB1*15:03L
AALALLLLDRLN

SEQ ID NO: 18987 - protein, 14 aa, Severe acute respiratory syndrome coronavirus 2
  REGION 1..14: note = Table B: HLA-DQA1*01:02-B1*06:02L
ESKMSGKGQQQQGQ

SEQ ID NO: 18988 - protein, 15 aa, Severe acute respiratory syndrome coronavirus 2
  REGION 1..15: note = Table B: HLA-DQA1*01:02-B1*06:02L
GKGQQQQGQTVTKKS

SEQ ID NO: 18989 - protein, 14 aa, Severe acute respiratory syndrome coronavirus 2
  REGION 1..14: note = Table B: HLA-DQA1*01:02-B1*06:02L HLA-DQA1*01:03-B1*06:01L
GQQQQGQTVTKKSA

SEQ ID NO: 18990 - protein, 13 aa, Severe acute respiratory syndrome coronavirus 2
  REGION 1..13: note = Table B: HLA-DQA1*01:02-B1*06:02L
QQGQTVTKKSAAE

SEQ ID NO: 18991 - protein, 14 aa, Severe acute respiratory syndrome coronavirus 2
  REGION 1..14: note = Table B: HLA-DQA1*01:02-B1*06:02L
QGQTVTKKSAAEAS

SEQ ID NO: 18992 - protein, 14 aa, Severe acute respiratory syndrome coronavirus 2
  REGION 1..14: note = Table B: HLA-DQA1*01:02-B1*06:02L HLA-DRB1*04:08L
TKKSAAEASKKPRQ

SEQ ID NO: 18993 - protein, 11 aa, Severe acute respiratory syndrome coronavirus 2
  REGION 1..11: note = Table B: HLA-DQA1*01:02-B1*06:02L HLA-DQA1*02:01-B1*03:03L
DQELIRQGTDY

SEQ ID NO: 18994 - protein, 13 aa, Severe acute respiratory syndrome coronavirus 2
  REGION 1..13: note = Table B: HLA-DQA1*01:02-B1*06:02L HLA-DQA1*05:05-B1*03:01L HLA-DQA1*01:03-B1*06:01L
HWPQIAQFAPSAS

SEQ ID NO: 18995 - protein, 12 aa, Severe acute respiratory syndrome coronavirus 2
  REGION 1..12: note = Table B: HLA-DQA1*01:02-B1*06:02L HLA-DQA1*05:05-B1*03:01L HLA-DQA1*01:03-B1*06:01L
FAPSASAFFGMS

SEQ ID NO: 18996 - protein, 12 aa, Severe acute respiratory syndrome coronavirus 2
  REGION 1..12: note = Table B: HLA-DQA1*01:02-B1*06:02L HLA-DPA1*03:01-B1*105:01L
SASAFFGMSRIG

SEQ ID NO: 18997 - protein, 10 aa, Severe acute respiratory syndrome coronavirus 2
  REGION 1..10: note = Table B: HLA-DQA1*01:02-B1*06:02L HLA-DQA1*01:03-B1*06:01L
AFFGMSRIGM

SEQ ID NO: 18998 - protein, 14 aa, Severe acute respiratory syndrome coronavirus 2
  REGION 1..14: note = Table B: HLA-DQA1*01:02-B1*06:02L
FFGMSRIGMEVTPS

SEQ ID NO: 18999 - protein, 10 aa, Severe acute respiratory syndrome coronavirus 2
  REGION 1..10: note = Table B: HLA-DQA1*01:02-B1*06:02L HLA-DQA1*05:05-B1*03:19L HLA-DQA1*05:01-B1*02:01L
GMEVTPSGTW

SEQ ID NO: 19000 - protein, 13 aa, Severe acute respiratory syndrome coronavirus 2
  REGION 1..13: note = Table B: HLA-DQA1*01:02-B1*06:02L
PSGTWLTYTGAIK

SEQ ID NO: 19001 - protein, 13 aa, Severe acute respiratory syndrome coronavirus 2
  REGION 1..13: note = Table B: HLA-DQA1*01:02-B1*06:02L HLA-DRB1*14:01L HLA-DRB1*14:02L HLA-DQA1*05:05-B1*03:19L HLA-DRB1*15:01L
GTWLTYTGAIKLD

SEQ ID NO: 19002 - protein, 12 aa, Severe acute respiratory syndrome coronavirus 2
  REGION 1..12: note = Table B: HLA-DQA1*01:02-B1*06:02L HLA-DQA1*05:05-B1*03:19L HLA-DQA1*05:05-B1*03:01L
WLTYTGAIKLDD

SEQ ID NO: 19003 - protein, 12 aa, Severe acute respiratory syndrome coronavirus 2
  REGION 1..12: note = Table B: HLA-DQA1*01:02-B1*06:02L
YTGAIKLDDKDP

SEQ ID NO: 19004 - protein, 13 aa, Severe acute respiratory syndrome coronavirus 2
  REGION 1..13: note = Table B: HLA-DQA1*01:02-B1*06:02L HLA-DQA1*01-B1*05L HLA-DPA1*02:01-B1*13:01L HLA-DPA1*03:01-B1*105:01L
IKLDDKDPNFKDQ

SEQ ID NO: 19005 - protein, 15 aa, Severe acute respiratory syndrome coronavirus 2
  REGION 1..15: note = Table B: HLA-DQA1*01:02-B1*06:02L HLA-DPA1*03:01-B1*105:01L HLA-DRB1*15:03L
DDKDPNFKDQVILLN

SEQ ID NO: 19006 - protein, 12 aa, Severe acute respiratory syndrome coronavirus 2
  REGION 1..12: note = Table B: HLA-DQA1*01:02-B1*06:02L
KADETQALPQRQ

SEQ ID NO: 19007 - protein, 12 aa, Severe acute respiratory syndrome coronavirus 2
  REGION 1..12: note = Table B: HLA-DQA1*01:02-B1*06:02L
TQALPQRQKKQQ

SEQ ID NO: 19008 - protein, 10 aa, Severe acute respiratory syndrome coronavirus 2
  REGION 1..10: note = Table B: HLA-DQA1*01:02-B1*06:02L HLA-DQA1*03:01-B1*03:02L HLA-DQA1*01:03-B1*06:01L HLA-DQA1*02:01-B1*03:03L
QTVTLLPAAD

SEQ ID NO: 19009 - protein, 10 aa, Severe acute respiratory syndrome coronavirus 2
  REGION 1..10: note = Table B: HLA-DQA1*01:02-B1*06:02L HLA-DQA1*05:01-B1*02:01L
LLPAADLDDF

SEQ ID NO: 19010 - protein, 14 aa, Severe acute respiratory syndrome coronavirus 2
  REGION 1..14: note = Table B: HLA-DQA1*01:02-B1*06:02L HLA-DRB1*01:02L HLA-DPA1*02:01-B1*13:01L HLA-DRB1*15:03L
LPAADLDDFSKQLQ

SEQ ID NO: 19011 - protein, 12 aa, Severe acute respiratory syndrome coronavirus 2
  REGION 1..12: note = Table B: HLA-DQA1*01:02-B1*06:02L HLA-DPA1*03:01-B1*105:01L
LDDFSKQLQQSM

SEQ ID NO: 19012 - protein, 12 aa, Severe acute respiratory syndrome coronavirus 2
  REGION 1..12: note = Table B: HLA-DQA1*01:02-B1*06:02L HLA-DQA1*05:05-B1*03:19L HLA-DPA1*03:01-B1*105:01L HLA-DQA1*05:05-B1*03:01L
DDFSKQLQQSMS

SEQ ID NO: 19013 - protein, 14 aa, Severe acute respiratory syndrome coronavirus 2
  REGION 1..14: note = Table B: HLA-DQA1*01:02-B1*06:02L HLA-DPA1*01:03-B1*03:01L HLA-DPA1*02:01-B1*13:01L HLA-DQA1*05:05-B1*03:01L HLA-DQA1*02:01-B1*03:03L
DFSKQLQQSMSSAD

SEQ ID NO: 19014 - protein, 14 aa, Severe acute respiratory syndrome coronavirus 2
  REGION 1..14: note = Table B: HLA-DQA1*01:02-B1*06:02L HLA-DQA1*05:05-B1*03:01L
FSKQLQQSMSSADS

SEQ ID NO: 19015 - protein, 16 aa, Severe acute respiratory syndrome coronavirus 2
  REGION 1..16: note = Table B: HLA-DQA1*01:02-B1*06:02L HLA-DRB1*16:01L HLA-DRB1*04:08L
FPFTIYSLLLCRMNSR

SEQ ID NO: 19016 - protein, 12 aa, Severe acute respiratory syndrome coronavirus 2
  REGION 1..12: note = Table B: HLA-DQA1*01:02-B1*06:02L
YSLLLCRMNSRN

SEQ ID NO: 19017 - protein, 12 aa, Severe acute respiratory syndrome coronavirus 2
  REGION 1..12: note = Table B: HLA-DQA1*01:02-B1*06:02L
SLLLCRMNSRNY

SEQ ID NO: 19018 - protein, 14 aa, Severe acute respiratory syndrome coronavirus 2
  REGION 1..14: note = Table B: HLA-DRB1*01:01L HLA-DRB1*08:01L HLA-DRB3*01:01L HLA-DRB1*08:03L
TRELMRELNGGAYT

SEQ ID NO: 19019 - protein, 15 aa, Severe acute respiratory syndrome coronavirus 2
  REGION 1..15: note = Table B: HLA-DRB1*01:01L HLA-DQA1*01-B1*05L HLA-DPA1*02:01-B1*13:01L HLA-DQA1*05:05-B1*03:01L HLA-DRB1*10:01L HLA-DQA1*01:03-B1*06:01L
GYPLECIKDLLARAG

SEQ ID NO: 19020 - protein, 15 aa, Severe acute respiratory syndrome coronavirus 2
  REGION 1..15: note = Table B: HLA-DRB1*01:01L
IRSVYPVASPNECNQ

SEQ ID NO: 19021 - protein, 18 aa, Severe acute respiratory syndrome coronavirus 2
  REGION 1..18: note = Table B: HLA-DRB1*01:01L HLA-DRB1*04:08L
GTENLTKEGATTCGYLPQ

SEQ ID NO: 19022 - protein, 13 aa, Severe acute respiratory syndrome coronavirus 2
  REGION 1..13: note = Table B: HLA-DRB1*01:01L HLA-DRB1*14:02L HLA-DQA1*05:05-B1*03:01L
AEYHNESGLKTIL

SEQ ID NO: 19023 - protein, 14 aa, Severe acute respiratory syndrome coronavirus 2
  REGION 1..14: note = Table B: HLA-DRB1*01:01L HLA-DRB3*02:01L HLA-DRB1*11:04L HLA-DRB5*01:01L HLA-DRB1*09:01L HLA-DPA1*01:03-B1*04:02L HLA-DPA1*02:01-B1*13:01L HLA-DPA1*01:03-B1*104:01L
TGVVGEGSEGLNDN

SEQ ID NO: 19024 - protein, 16 aa, Severe acute respiratory syndrome coronavirus 2
  REGION 1..16: note = Table B: HLA-DRB1*01:01L
NDNLLEILQKEKVNIN

SEQ ID NO: 19025 - protein, 13 aa, Severe acute respiratory syndrome coronavirus 2
  REGION 1..13: note = Table B: HLA-DRB1*01:01L HLA-DRB1*08:04L HLA-DPA1*01:03-B1*03:01L HLA-DPA1*03:01-B1*04:02L HLA-DRB1*14:01L HLA-DRB1*11:04L HLA-DRB5*01:01L HLA-DQA1*01-B1*05L HLA-DRB1*04:10L HLA-DRB1*14:54L
  REGION 1..13: note = CONT. FROM ABOVE: HLA-DRB1*10:01L HLA-DRB1*04:08L HLA-DRB1*08:03 L
LASFSASTSAFVE

SEQ ID NO: 19026 - protein, 13 aa, Severe acute respiratory syndrome coronavirus 2
  REGION 1..13: note = Table B: HLA-DRB1*01:01L HLA-DRB1*14:01L HLA-DRB1*14:54L HLA-DRB1*10:01L HLA-DRB1*04:08L
ASFSASTSAFVET

SEQ ID NO: 19027 - protein, 13 aa, Severe acute respiratory syndrome coronavirus 2
  REGION 1..13: note = Table B: HLA-DRB1*01:01L HLA-DRB1*12:02L HLA-DPA1*01:03-B1*02:01L HLA-DRB1*07:01L
SAFVETVKGLDYK

SEQ ID NO: 19028 - protein, 16 aa, Severe acute respiratory syndrome coronavirus 2
  REGION 1..16: note = Table B: HLA-DRB1*01:01L HLA-DRB1*03:01L HLA-DRB1*11:02L HLA-DPA1*01:03-B1*04:02L HLA-DPA1*01:03-B1*02:01L
NSVRVLQKAAITILDG

SEQ ID NO: 19029 - protein, 14 aa, Severe acute respiratory syndrome coronavirus 2
  REGION 1..14: note = Table B: HLA-DRB1*01:01L HLA-DRB1*10:01L
LTNIFGTVYEKLKP

SEQ ID NO: 19030 - protein, 16 aa, Severe acute respiratory syndrome coronavirus 2
  REGION 1..16: note = Table B: HLA-DRB1*01:01L HLA-DRB3*02:01L HLA-DRB1*11:02L HLA-DRB1*14:02L HLA-DPA1*01:03-B1*02:01L HLA-DRB1*08:03L
EEKFKEGVEFLRDGWE

SEQ ID NO: 19031 - protein, 17 aa, Severe acute respiratory syndrome coronavirus 2
  REGION 1..17: note = Table B: HLA-DRB1*01:01L HLA-DRB1*11:02L HLA-DRB1*11:01L HLA-DPA1*01:03-B1*02:01L HLA-DRB1*08:02L
APTKVTFGDDTVIEVQG

SEQ ID NO: 19032 - protein, 12 aa, Severe acute respiratory syndrome coronavirus 2
  REGION 1..12: note = Table B: HLA-DRB1*01:01L HLA-DRB1*11:01L HLA-DRB4*02:01NL HLA-DRB4*01:01L HLA-DPA1*01:03-B1*04:01L HLA-DPA1*01:03-B1*04:02L HLA-DPA1*01:03-B1*104:01L
DAVIKTLQPVSE

SEQ ID NO: 19033 - protein, 14 aa, Severe acute respiratory syndrome coronavirus 2
  REGION 1..14: note = Table B: HLA-DRB1*01:01L
YEYGTEDDYQGKPL

SEQ ID NO: 19034 - protein, 14 aa, Severe acute respiratory syndrome coronavirus 2
  REGION 1..14: note = Table B: HLA-DRB1*01:01L HLA-DRB1*03:01L
VYIKNADIVEEAKK

SEQ ID NO: 19035 - protein, 15 aa, Severe acute respiratory syndrome coronavirus 2
  REGION 1..15: note = Table B: HLA-DRB1*01:01L HLA-DPA1*01:03-B1*02:01L HLA-DRB1*07:01L
EQKIAEIPKEEVKPF

SEQ ID NO: 19036 - protein, 14 aa, Severe acute respiratory syndrome coronavirus 2
  REGION 1..14: note = Table B: HLA-DRB1*01:01L HLA-DQA1*05:05-B1*03:19L HLA-DRB4*02:01NL HLA-DRB4*01:01L HLA-DPA1*01:03-B1*04:01L HLA-DPA1*01:03-B1*04:02L HLA-DQA1*05:05-B1*03:01L
INGNLHPDSATLVS

SEQ ID NO: 19037 - protein, 14 aa, Severe acute respiratory syndrome coronavirus 2
  REGION 1..14: note = Table B: HLA-DRB1*01:01L HLA-DRB3*02:01L HLA-DRB1*11:02L HLA-DRB1*11:03L HLA-DQA1*01:01-B1*05:01L HLA-DRB1*08:01L HLA-DRB1*11:01L HLA-DRB5*01:01L HLA-DRB1*13:01L HLA-DQA1*05:05-B1*03:116L HLA-DRB1*09:01L HLA-DRB3*01:01L
  REGION 1..14: note = CONT. FROM ABOVE: HLA-DPA1*01:03-B1*02:01L HLA-DRB1*07:01L HLA-D RB1*08:02L HLA-DRB1*08:03L
APYIVGDVVQEGVL

SEQ ID NO: 19038 - protein, 12 aa, Severe acute respiratory syndrome coronavirus 2
  REGION 1..12: note = Table B: HLA-DRB1*01:01L HLA-DPA1*01:03-B1*03:01L HLA-DRB1*11:04L HLA-DPA1*01:03-B1*04:01L HLA-DPA1*01:03-B1*04:02L HLA-DPA1*02:01-B1*13:01L HLA-DRB1*10:01L HLA-DRB1*08:03L
NYITTYPGQGLN

SEQ ID NO: 19039 - protein, 16 aa, Severe acute respiratory syndrome coronavirus 2
  REGION 1..16: note = Table B: HLA-DRB1*01:01L HLA-DRB3*01:01L HLA-DRB1*07:01L
SPDAVTAYNGYLTSSS

SEQ ID NO: 19040 - protein, 15 aa, Severe acute respiratory syndrome coronavirus 2
  REGION 1..15: note = Table B: HLA-DRB1*01:01L HLA-DRB1*08:04L HLA-DPA1*01:03-B1*03:01L HLA-DPA1*03:01-B1*04:02L HLA-DRB1*14:02L HLA-DRB1*11:01L HLA-DPA1*01:03-B1*04:02L HLA-DPA1*02:01-B1*13:01L
VTAYNGYLTSSSKTP

SEQ ID NO: 19041 - protein, 15 aa, Severe acute respiratory syndrome coronavirus 2
  REGION 1..15: note = Table B: HLA-DRB1*01:01L
LLSLREVRTIKVFTT

SEQ ID NO: 19042 - protein, 15 aa, Severe acute respiratory syndrome coronavirus 2
  REGION 1..15: note = Table B: HLA-DRB1*01:01L
DGADVTKIKPHNSHE

SEQ ID NO: 19043 - protein, 13 aa, Severe acute respiratory syndrome coronavirus 2
  REGION 1..13: note = Table B: HLA-DRB1*01:01L HLA-DRB1*08:04L HLA-DRB1*11:04L HLA-DRB1*11:01L HLA-DRB3*01:01L HLA-DRB1*07:01L HLA-DRB1*08:03L
KTFYVLPNDDTLR

SEQ ID NO: 19044 - protein, 15 aa, Severe acute respiratory syndrome coronavirus 2
  REGION 1..15: note = Table B: HLA-DRB1*01:01L HLA-DRB1*11:03L HLA-DRB1*08:03L
DDTLRVEAFEYYHTT

SEQ ID NO: 19045 - protein, 16 aa, Severe acute respiratory syndrome coronavirus 2
  REGION 1..16: note = Table B: HLA-DRB1*01:01L HLA-DRB1*07:01L
DPSFLGRYMSALNHTK

SEQ ID NO: 19046 - protein, 18 aa, Severe acute respiratory syndrome coronavirus 2
  REGION 1..18: note = Table B: HLA-DRB1*01:01L HLA-DRB1*11:02L
ATALLTLQQIELKFNPPA

SEQ ID NO: 19047 - protein, 15 aa, Severe acute respiratory syndrome coronavirus 2
  REGION 1..15: note = Table B: HLA-DRB1*01:01L HLA-DRB1*03:01L HLA-DRB4*01:01L HLA-DPA1*01:03-B1*02:01L HLA-DRB1*07:01L
LQQIELKFNPPALQD

SEQ ID NO: 19048 - protein, 14 aa, Severe acute respiratory syndrome coronavirus 2
  REGION 1..14: note = Table B: HLA-DRB1*01:01L HLA-DQA1*05:05-B1*03:01L HLA-DRB1*04:08L
YRARAGEAANFCAL

SEQ ID NO: 19049 - protein, 13 aa, Severe acute respiratory syndrome coronavirus 2
  REGION 1..13: note = Table B: HLA-DRB1*01:01L HLA-DRB1*11:03L HLA-DRB1*14:02L HLA-DPA1*01:03-B1*104:01L HLA-DQA1*05:05-B1*03:01L HLA-DRB1*10:01L
GTLSYEQFKKGVQ

SEQ ID NO: 19050 - protein, 12 aa, Severe acute respiratory syndrome coronavirus 2
  REGION 1..12: note = Table B: HLA-DRB1*01:01L
PFVMMSAPPAQY

SEQ ID NO: 19051 - protein, 12 aa, Severe acute respiratory syndrome coronavirus 2
  REGION 1..12: note = Table B: HLA-DRB1*01:01L HLA-DRB1*08:04L HLA-DRB3*02:01L HLA-DRB1*11:03L HLA-DRB1*11:04L
FVMMSAPPAQYE

SEQ ID NO: 19052 - protein, 15 aa, Severe acute respiratory syndrome coronavirus 2
  REGION 1..15: note = Table B: HLA-DRB1*01:01L HLA-DRB1*13:01L
TGNYQCGHYKHITSK

SEQ ID NO: 19053 - protein, 15 aa, Severe acute respiratory syndrome coronavirus 2
  REGION 1..15: note = Table B: HLA-DRB1*01:01L
TDVFYKENSYTTTIK

SEQ ID NO: 19054 - protein, 14 aa, Severe acute respiratory syndrome coronavirus 2
  REGION 1..14: note = Table B: HLA-DRB1*01:01L HLA-DRB1*07:01L
DLNQLTGYKKPASR

SEQ ID NO: 19055 - protein, 14 aa, Severe acute respiratory syndrome coronavirus 2
  REGION 1..14: note = Table B: HLA-DRB1*01:01L HLA-DRB1*03:01L HLA-DRB1*14:02L HLA-DQA1*05:05-B1*03:19L HLA-DRB1*13:01L HLA-DQA1*05:05-B1*03:116L HLA-DPA1*01:03-B1*04:02L HLA-DPA1*03:01-B1*105:01L HLA-DPA1*01:03-B1*02:01L
  REGION 1..14: note = CONT. FROM ABOVE: HLA-DQA1*05:05-B1*03:01L HLA-DRB1*07:01L HLA-D RB1*08:02L
LNQLTGYKKPASRE

SEQ ID NO: 19056 - protein, 15 aa, Severe acute respiratory syndrome coronavirus 2
  REGION 1..15: note = Table B: HLA-DRB1*01:01L HLA-DRB1*03:01L HLA-DRB1*07:01L
NQLTGYKKPASRELK

SEQ ID NO: 19057 - protein, 14 aa, Severe acute respiratory syndrome coronavirus 2
  REGION 1..14: note = Table B: HLA-DRB1*01:01L HLA-DRB1*11:02L HLA-DRB1*13:01L HLA-DPA1*01:03-B1*02:01L HLA-DRB1*07:01L HLA-DRB1*08:02L
KVTFFPDLNGDVVA

SEQ ID NO: 19058 - protein, 13 aa, Severe acute respiratory syndrome coronavirus 2
  REGION 1..13: note = Table B: HLA-DRB1*01:01L HLA-DRB4*02:01NL HLA-DRB1*09:01L HLA-DPA1*01:03-B1*104:01L HLA-DRB1*07:01L HLA-DRB1*08:02L HLA-DRB1*15:01L
DVVAIDYKHYTPS

SEQ ID NO: 19059 - protein, 14 aa, Severe acute respiratory syndrome coronavirus 2
  REGION 1..14: note = Table B: HLA-DRB1*01:01L HLA-DPA1*01:03-B1*104:01L HLA-DRB1*07:01L HLA-DRB1*08:02L
VVAIDYKHYTPSFK

SEQ ID NO: 19060 - protein, 14 aa, Severe acute respiratory syndrome coronavirus 2
  REGION 1..14: note = Table B: HLA-DRB1*01:01L
HKPIVWHVNNATNK

SEQ ID NO: 19061 - protein, 14 aa, Severe acute respiratory syndrome coronavirus 2
  REGION 1..14: note = Table B: HLA-DRB1*01:01L HLA-DRB1*08:04L HLA-DPA1*01:03-B1*03:01L HLA-DRB1*11:03L HLA-DRB1*14:02L HLA-DPA1*03:01-B1*105:01L
KPIVWHVNNATNKA

SEQ ID NO: 19062 - protein, 18 aa, Severe acute respiratory syndrome coronavirus 2
  REGION 1..18: note = Table B: HLA-DRB1*01:01L HLA-DRB1*07:01L
PIVWHVNNATNKATYKPN

SEQ ID NO: 19063 - protein, 12 aa, Severe acute respiratory syndrome coronavirus 2
  REGION 1..12: note = Table B: HLA-DRB1*01:01L HLA-DRB1*11:03L HLA-DRB1*11:04L HLA-DRB1*08:01L HLA-DRB1*11:01L HLA-DRB3*01:01L HLA-DRB1*07:01L HLA-DRB1*10:01L
SFNYLKSPNFSK

SEQ ID NO: 19064 - protein, 15 aa, Severe acute respiratory syndrome coronavirus 2
  REGION 1..15: note = Table B: HLA-DRB1*01:01L HLA-DRB1*11:03L HLA-DRB1*09:01L
ISSFKWDLTAFGLVA

SEQ ID NO: 19065 - protein, 11 aa, Severe acute respiratory syndrome coronavirus 2
  REGION 1..11: note = Table B: HLA-DRB1*01:01L HLA-DRB1*03:01L
FISDEVARDLS

SEQ ID NO: 19066 - protein, 13 aa, Severe acute respiratory syndrome coronavirus 2
  REGION 1..13: note = Table B: HLA-DRB1*01:01L HLA-DRB4*01:01L
QSSYIVDSVTVKN

SEQ ID NO: 19067 - protein, 14 aa, Severe acute respiratory syndrome coronavirus 2
  REGION 1..14: note = Table B: HLA-DRB1*01:01L HLA-DRB1*07:01L HLA-DRB1*08:03L
NGSIHLYFDKAGQK

SEQ ID NO: 19068 - protein, 12 aa, Severe acute respiratory syndrome coronavirus 2
  REGION 1..12: note = Table B: HLA-DRB1*01:01L HLA-DRB3*01:01L
HFVNLDNLRANN

SEQ ID NO: 19069 - protein, 15 aa, Severe acute respiratory syndrome coronavirus 2
  REGION 1..15: note = Table B: HLA-DRB1*01:01L HLA-DRB1*11:02L HLA-DQA1*01:01-B1*05:01L HLA-DRB1*08:01L HLA-DRB1*11:01L HLA-DRB5*01:01L HLA-DRB1*13:01L HLA-DPA1*01:03-B1*04:01L HLA-DRB1*09:01L HLA-DPA1*02:01-B1*13:01L
  REGION 1..15: note = CONT. FROM ABOVE: HLA-DPA1*01:03-B1*02:01L HLA-DPA1*01:03-B1*104 :01L HLA-DPA1*01:02-B1*04:01L HLA-DRB1*07:01L HLA-DRB1*08:02L HL A-DRB1*08:03L
QPILLLDQALVSDVG

SEQ ID NO: 19070 - protein, 12 aa, Severe acute respiratory syndrome coronavirus 2
  REGION 1..12: note = Table B: HLA-DRB1*01:01L HLA-DRB1*11:03L HLA-DPA1*01:03-B1*04:01L HLA-DRB1*09:01L HLA-DPA1*02:01-B1*13:01L HLA-DRB1*10:01L
TFSSTFNVPMEK

SEQ ID NO: 19071 - protein, 16 aa, Severe acute respiratory syndrome coronavirus 2
  REGION 1..16: note = Table B: HLA-DRB1*01:01L HLA-DRB3*02:01L HLA-DPA1*03:01-B1*04:02L HLA-DRB1*03:01L HLA-DRB1*11:01L HLA-DQA1*05:05-B1*03:19L HLA-DRB4*01:01L HLA-DRB3*01:01L HLA-DPA1*01:02-B1*04:01L
VPMEKLKTLVATAEAE

SEQ ID NO: 19072 - protein, 15 aa, Severe acute respiratory syndrome coronavirus 2
  REGION 1..15: note = Table B: HLA-DRB1*01:01L HLA-DRB5*01:01L
EAELAKNVSLDNVLS

SEQ ID NO: 19073 - protein, 16 aa, Severe acute respiratory syndrome coronavirus 2
  REGION 1..16: note = Table B: HLA-DRB1*01:01L HLA-DRB1*03:01L HLA-DRB1*13:01L HLA-DRB1*07:01L HLA-DRB1*08:02L
RKQIRSAAKKNNLPFK

SEQ ID NO: 19074 - protein, 15 aa, Severe acute respiratory syndrome coronavirus 2
  REGION 1..15: note = Table B: HLA-DRB1*01:01L HLA-DRB1*11:01L
DTWFSQRGGSYTNDK

SEQ ID NO: 19075 - protein, 14 aa, Severe acute respiratory syndrome coronavirus 2
  REGION 1..14: note = Table B: HLA-DRB1*01:01L HLA-DRB1*04:08L
LPRVFSAVGNICYT

SEQ ID NO: 19076 - protein, 15 aa, Severe acute respiratory syndrome coronavirus 2
  REGION 1..15: note = Table B: HLA-DRB1*01:01L
VGNICYTPSKLIEYT

SEQ ID NO: 19077 - protein, 12 aa, Severe acute respiratory syndrome coronavirus 2
  REGION 1..12: note = Table B: HLA-DRB1*01:01L HLA-DRB1*08:04L HLA-DPA1*03:01-B1*04:02L HLA-DRB1*11:03L HLA-DRB1*11:04L HLA-DRB1*14:02L HLA-DRB1*08:01L HLA-DRB1*04:10L HLA-DRB1*09:01L HLA-DRB1*12:02L HLA-DRB3*01:01L HLA-DRB1*10:01L
TIFKDASGKPVP

SEQ ID NO: 19078 - protein, 16 aa, Severe acute respiratory syndrome coronavirus 2
  REGION 1..16: note = Table B: HLA-DRB1*01:01L HLA-DRB1*11:03L HLA-DRB4*01:01L HLA-DRB1*09:01L HLA-DRB1*12:02L HLA-DRB3*01:01L HLA-DRB1*07:01L HLA-DRB1*08:02L HLA-DRB1*08:03L
DTNVLEGSVAYESLRP

SEQ ID NO: 19079 - protein, 13 aa, Severe acute respiratory syndrome coronavirus 2
  REGION 1..13: note = Table B: HLA-DRB1*01:01L HLA-DRB1*11:02L HLA-DRB1*11:01L HLA-DRB1*12:02L HLA-DRB3*01:01L HLA-DPA1*01:03-B1*02:01L HLA-DPA1*01:03-B1*104:01L
YVLMDGSIIQFPN

SEQ ID NO: 19080 - protein, 13 aa, Severe acute respiratory syndrome coronavirus 2
  REGION 1..13: note = Table B: HLA-DRB1*01:01L HLA-DRB1*11:02L HLA-DRB1*11:01L HLA-DRB3*01:01L HLA-DRB1*10:01L
DGSIIQFPNTYLE

SEQ ID NO: 19081 - protein, 14 aa, Severe acute respiratory syndrome coronavirus 2
  REGION 1..14: note = Table B: HLA-DRB1*01:01L HLA-DRB3*02:01L HLA-DPA1*02:01-B1*13:01L HLA-DPA1*01:03-B1*104:01L
PLIQPIGALDISAS

SEQ ID NO: 19082 - protein, 14 aa, Severe acute respiratory syndrome coronavirus 2
  REGION 1..14: note = Table B: HLA-DRB1*01:01L HLA-DRB3*01:01L HLA-DRB1*07:01L
TQYNRYLALYNKYK

SEQ ID NO: 19083 - protein, 14 aa, Severe acute respiratory syndrome coronavirus 2
  REGION 1..14: note = Table B: HLA-DRB1*01:01L HLA-DRB1*07:01L HLA-DRB1*15:01L
YNRYLALYNKYKYF

SEQ ID NO: 19084 - protein, 14 aa, Severe acute respiratory syndrome coronavirus 2
  REGION 1..14: note = Table B: HLA-DRB1*01:01L HLA-DRB1*14:02L
NKYKYFSGAMDTTS

SEQ ID NO: 19085 - protein, 14 aa, Severe acute respiratory syndrome coronavirus 2
  REGION 1..14: note = Table B: HLA-DRB1*01:01L HLA-DRB1*11:03L HLA-DRB1*11:01L HLA-DRB1*09:01L HLA-DRB3*01:01L HLA-DPA1*01:03-B1*02:01L HLA-DRB1*07:01L HLA-DRB1*08:03L
YKYFSGAMDTTSYR

SEQ ID NO: 19086 - protein, 15 aa, Severe acute respiratory syndrome coronavirus 2
  REGION 1..15: note = Table B: HLA-DRB1*01:01L HLA-DRB1*11:02L
ALIISVTSNYSGVVT

SEQ ID NO: 19087 - protein, 16 aa, Severe acute respiratory syndrome coronavirus 2
  REGION 1..16: note = Table B: HLA-DRB1*01:01L HLA-DRB3*02:01L HLA-DRB1*03:01L HLA-DQA1*05:05-B1*03:19L HLA-DPA1*01:03-B1*04:01L HLA-DRB1*10:01L
VDINKLCEEMLDNRAT

SEQ ID NO: 19088 - protein, 13 aa, Severe acute respiratory syndrome coronavirus 2
  REGION 1..13: note = Table B: HLA-DRB1*01:01L HLA-DRB3*02:01L HLA-DPA1*03:01-B1*04:02L HLA-DRB1*14:02L HLA-DQA1*01:01-B1*05:01L HLA-DRB1*11:01L HLA-DRB4*01:01L HLA-DPA1*02:01-B1*13:01L HLA-DRB1*07:01L
LPSYAAFATAQEA

SEQ ID NO: 19089 - protein, 14 aa, Severe acute respiratory syndrome coronavirus 2
  REGION 1..14: note = Table B: HLA-DRB1*01:01L HLA-DRB3*02:01L HLA-DRB1*13:01L HLA-DPA1*01:03-B1*04:02L HLA-DRB3*01:01L HLA-DPA1*01:03-B1*104:01L HLA-DRB1*15:03L
AQEAYEQAVANGDS

SEQ ID NO: 19090 - protein, 16 aa, Severe acute respiratory syndrome coronavirus 2
  REGION 1..16: note = Table B: HLA-DRB1*01:01L HLA-DPA1*01:03-B1*104:01L
LKKSLNVAKSEFDRDA

SEQ ID NO: 19091 - protein, 15 aa, Severe acute respiratory syndrome coronavirus 2
  REGION 1..15: note = Table B: HLA-DRB1*01:01L HLA-DRB1*08:77L HLA-DRB3*02:01L HLA-DPA1*01:03-B1*03:01L HLA-DPA1*03:01-B1*04:02L HLA-DQA1*05:01-B1*02:01L HLA-DPA1*01:03-B1*04:02L HLA-DPA1*02:01-B1*13:01L HLA-DPA1*01:03-B1*02:01L
  REGION 1..15: note = CONT. FROM ABOVE: HLA-DQA1*05:05-B1*03:01L HLA-DRB1*07:01L HLA-D RB1*10:01L
DQAMTQMYKQARSED

SEQ ID NO: 19092 - protein, 13 aa, Severe acute respiratory syndrome coronavirus 2
  REGION 1..13: note = Table B: HLA-DRB1*01:01L HLA-DRB1*07:01L HLA-DQA1*01:03-B1*06:01L
TQMYKQARSEDKR

SEQ ID NO: 19093 - protein, 16 aa, Severe acute respiratory syndrome coronavirus 2
  REGION 1..16: note = Table B: HLA-DRB1*01:01L HLA-DRB1*11:02L HLA-DRB1*11:03L HLA-DRB1*11:04L HLA-DQA1*01:01-B1*05:01L HLA-DQA1*05:05-B1*03:116L
DGTTFTYASALWEIQQ

SEQ ID NO: 19094 - protein, 15 aa, Severe acute respiratory syndrome coronavirus 2
  REGION 1..15: note = Table B: HLA-DRB1*01:01L HLA-DPA1*03:01-B1*04:02L HLA-DRB1*14:02L HLA-DRB1*11:01L HLA-DPA1*01:03-B1*02:01L HLA-DRB1*07:01L HLA-DRB1*08:02L
SALWEIQQVVDADSK

SEQ ID NO: 19095 - protein, 14 aa, Severe acute respiratory syndrome coronavirus 2
  REGION 1..14: note = Table B: HLA-DRB1*01:01L HLA-DRB1*11:02L HLA-DPA1*01:03-B1*02:01L HLA-DRB1*08:02L
QVVDADSKIVQLSE

SEQ ID NO: 19096 - protein, 12 aa, Severe acute respiratory syndrome coronavirus 2
  REGION 1..12: note = Table B: HLA-DRB1*01:01L HLA-DRB3*02:01L HLA-DPA1*01:03-B1*03:01L HLA-DPA1*03:01-B1*04:02L HLA-DQA1*01:01-B1*05:01L HLA-DRB1*08:01L HLA-DRB1*11:01L HLA-DRB1*12:02L HLA-DRB3*01:01L HLA-DPA1*02:01-B1*13:01L
  REGION 1..12: note = CONT. FROM ABOVE: HLA-DPA1*01:03-B1*104:01L HLA-DPA1*01:02-B1*04 :01L HLA-DRB1*07:01L HLA-DQA1*01:03-B1*06:01L
VKLQNNELSPVA

SEQ ID NO: 19097 - protein, 16 aa, Severe acute respiratory syndrome coronavirus 2
  REGION 1..16: note = Table B: HLA-DRB1*01:01L HLA-DRB1*11:03L HLA-DRB1*14:02L HLA-DRB1*11:01L HLA-DRB1*09:01L HLA-DRB3*01:01L HLA-DRB1*08:03L
DAAKAYKDYLASGGQP

SEQ ID NO: 19098 - protein, 14 aa, Severe acute respiratory syndrome coronavirus 2
  REGION 1..14: note = Table B: HLA-DRB1*01:01L
KAYKDYLASGGQPI

SEQ ID NO: 19099 - protein, 19 aa, Severe acute respiratory syndrome coronavirus 2
  REGION 1..19: note = Table B: HLA-DRB1*01:01L HLA-DPA1*01:03-B1*03:01L HLA-DRB1*14:02L HLA-DPA1*03:01-B1*105:01L HLA-DQA1*05:05-B1*03:01L
HPNPKGFCDLKGKYVQIPT

SEQ ID NO: 19100 - protein, 15 aa, Severe acute respiratory syndrome coronavirus 2
  REGION 1..15: note = Table B: HLA-DRB1*01:01L HLA-DRB1*11:01L HLA-DRB4*01:01L HLA-DQA1*05:05-B1*03:116L
DFGDFIQTTPGSGVP

SEQ ID NO: 19101 - protein, 15 aa, Severe acute respiratory syndrome coronavirus 2
  REGION 1..15: note = Table B: HLA-DRB1*01:01L HLA-DRB1*08:04L HLA-DRB1*11:01L HLA-DRB1*09:01L HLA-DPA1*02:01-B1*13:01L
DFIQTTPGSGVPVVD

SEQ ID NO: 19102 - protein, 15 aa, Severe acute respiratory syndrome coronavirus 2
  REGION 1..15: note = Table B: HLA-DRB1*01:01L
DSYYSLLMPILTLTR

SEQ ID NO: 19103 - protein, 14 aa, Severe acute respiratory syndrome coronavirus 2
  REGION 1..14: note = Table B: HLA-DRB1*01:01L
MPILTLTRALTAES

SEQ ID NO: 19104 - protein, 11 aa, Severe acute respiratory syndrome coronavirus 2
  REGION 1..11: note = Table B: HLA-DRB1*01:01L HLA-DRB1*01:02L HLA-DRB3*02:01L HLA-DRB1*08:01L HLA-DRB1*12:02L HLA-DRB1*04:08L
SHVDTDLTKPY

SEQ ID NO: 19105 - protein, 14 aa, Severe acute respiratory syndrome coronavirus 2
  REGION 1..14: note = Table B: HLA-DRB1*01:01L HLA-DRB1*03:01L HLA-DRB1*11:01L HLA-DRB1*07:01L
LGVVHNQDVNLHSS

SEQ ID NO: 19106 - protein, 14 aa, Severe acute respiratory syndrome coronavirus 2
  REGION 1..14: note = Table B: HLA-DRB1*01:01L HLA-DRB1*03:01L HLA-DQA1*01:01-B1*05:01L HLA-DRB1*11:01L HLA-DPA1*02:01-B1*13:01L HLA-DRB1*07:01L
GVVHNQDVNLHSSR

SEQ ID NO: 19107 - protein, 12 aa, Severe acute respiratory syndrome coronavirus 2
  REGION 1..12: note = Table B: HLA-DRB1*01:01L HLA-DRB5*01:01L HLA-DRB4*01:01L
VYAADPAMHAAS

SEQ ID NO: 19108 - protein, 12 aa, Severe acute respiratory syndrome coronavirus 2
  REGION 1..12: note = Table B: HLA-DRB1*01:01L HLA-DRB1*03:01L HLA-DRB1*11:02L HLA-DRB5*01:01L HLA-DRB1*13:01L HLA-DRB4*01:01L HLA-DPA1*01:03-B1*104:01L HLA-DRB1*08:02L
YAADPAMHAASG

SEQ ID NO: 19109 - protein, 13 aa, Severe acute respiratory syndrome coronavirus 2
  REGION 1..13: note = Table B: HLA-DRB1*01:01L
PAMHAASGNLLLD

SEQ ID NO: 19110 - protein, 13 aa, Severe acute respiratory syndrome coronavirus 2
  REGION 1..13: note = Table B: HLA-DRB1*01:01L
YDFAVSKGFFKEG

SEQ ID NO: 19111 - protein, 14 aa, Severe acute respiratory syndrome coronavirus 2
  REGION 1..14: note = Table B: HLA-DRB1*01:01L
LKSIAATRGATVVI

SEQ ID NO: 19112 - protein, 14 aa, Severe acute respiratory syndrome coronavirus 2
  REGION 1..14: note = Table B: HLA-DRB1*01:01L HLA-DRB1*11:01L
HRFYRLANECAQVL

SEQ ID NO: 19113 - protein, 12 aa, Severe acute respiratory syndrome coronavirus 2
  REGION 1..12: note = Table B: HLA-DRB1*01:01L HLA-DQA1*01-B1*05L HLA-DRB3*01:01L
ALLSTDGNKIAD

SEQ ID NO: 19114 - protein, 14 aa, Severe acute respiratory syndrome coronavirus 2
  REGION 1..14: note = Table B: HLA-DRB1*01:01L HLA-DRB1*14:01L HLA-DRB1*11:02L HLA-DRB1*11:03L HLA-DQA1*01-B1*05L HLA-DRB4*01:01L HLA-DRB1*09:01L HLA-DRB1*12:02L HLA-DRB3*01:01L HLA-DRB1*14:54L HLA-DRB1*07:01L HLA-DRB1*08:02L HLA-DRB1*08:03L
NSTYASQGLVASIK

SEQ ID NO: 19115 - protein, 14 aa, Severe acute respiratory syndrome coronavirus 2
  REGION 1..14: note = Table B: HLA-DRB1*01:01L HLA-DRB1*14:01L HLA-DRB1*11:03L HLA-DQA1*01-B1*05L HLA-DRB3*01:01L HLA-DRB1*14:54L HLA-DRB1*07:01L HLA-DRB1*08:02L HLA-DRB1*08:03L
STYASQGLVASIKN

SEQ ID NO: 19116 - protein, 15 aa, Severe acute respiratory syndrome coronavirus 2
  REGION 1..15: note = Table B: HLA-DRB1*01:01L HLA-DRB3*02:01L HLA-DPA1*03:01-B1*04:02L HLA-DRB1*11:03L HLA-DRB1*14:02L HLA-DQA1*05:01-B1*02:01L HLA-DPA1*01:03-B1*04:02L HLA-DPA1*01:03-B1*104:01L HLA-DPA1*01:02-B1*04:01L
  REGION 1..15: note = CONT. FROM ABOVE: HLA-DRB1*08:02L
SQGLVASIKNFKSVL

SEQ ID NO: 19117 - protein, 14 aa, Severe acute respiratory syndrome coronavirus 2
  REGION 1..14: note = Table B: HLA-DRB1*01:01L HLA-DRB1*11:02L HLA-DRB1*11:03L HLA-DRB1*11:04L HLA-DRB1*11:01L HLA-DRB1*07:01L HLA-DRB1*08:03L
VASIKNFKSVLYYQ

SEQ ID NO: 19118 - protein, 14 aa, Severe acute respiratory syndrome coronavirus 2
  REGION 1..14: note = Table B: HLA-DRB1*01:01L HLA-DRB1*11:02L HLA-DRB1*11:03L HLA-DRB1*11:04L HLA-DRB1*11:01L HLA-DRB1*08:03L
ASIKNFKSVLYYQN

SEQ ID NO: 19119 - protein, 15 aa, Severe acute respiratory syndrome coronavirus 2
  REGION 1..15: note = Table B: HLA-DRB1*01:01L HLA-DRB1*09:01L HLA-DRB1*12:02L
VMLTNDNTSRYWEPE

SEQ ID NO: 19120 - protein, 14 aa, Severe acute respiratory syndrome coronavirus 2
  REGION 1..14: note = Table B: HLA-DRB1*01:01L
EPEFYEAMYTPHTV

SEQ ID NO: 19121 - protein, 14 aa, Severe acute respiratory syndrome coronavirus 2
  REGION 1..14: note = Table B: HLA-DRB1*01:01L
EFYEAMYTPHTVLQ

SEQ ID NO: 19122 - protein, 13 aa, Severe acute respiratory syndrome coronavirus 2
  REGION 1..13: note = Table B: HLA-DRB1*01:01L HLA-DRB1*08:77L HLA-DRB3*02:01L HLA-DPA1*03:01-B1*04:02L HLA-DRB1*11:03L HLA-DRB1*14:02L HLA-DRB5*01:01L HLA-DRB4*01:01L HLA-DRB1*09:01L HLA-DPA1*01:03-B1*04:02L HLA-DRB3*01:01L
  REGION 1..13: note = CONT. FROM ABOVE: HLA-DPA1*01:03-B1*02:01L HLA-DPA1*01:03-B1*104 :01L HLA-DRB1*07:01L HLA-DRB1*08:02L
AGDYILANTCTER

SEQ ID NO: 19123 - protein, 14 aa, Severe acute respiratory syndrome coronavirus 2
  REGION 1..14: note = Table B: HLA-DRB1*01:01L HLA-DRB1*11:02L HLA-DRB1*13:01L HLA-DRB4*01:01L HLA-DPA1*01:03-B1*04:01L HLA-DRB1*09:01L HLA-DPA1*01:03-B1*02:01L HLA-DPA1*01:03-B1*104:01L HLA-DRB1*07:01L HLA-DRB1*08:02L
GDYILANTCTERLK

SEQ ID NO: 19124 - protein, 14 aa, Severe acute respiratory syndrome coronavirus 2
  REGION 1..14: note = Table B: HLA-DRB1*01:01L HLA-DRB3*02:01L HLA-DRB1*11:03L HLA-DRB4*01:01L HLA-DRB1*09:01L HLA-DRB3*01:01L HLA-DRB1*07:01L HLA-DRB1*08:02L HLA-DRB1*08:03L
LKLFAAETLKATEE

SEQ ID NO: 19125 - protein, 17 aa, Severe acute respiratory syndrome coronavirus 2
  REGION 1..17: note = Table B: HLA-DRB1*01:01L
DRELHLSWEVGKPRPPL

SEQ ID NO: 19126 - protein, 13 aa, Severe acute respiratory syndrome coronavirus 2
  REGION 1..13: note = Table B: HLA-DRB1*01:01L
VGDYFVLTSHTVM

SEQ ID NO: 19127 - protein, 14 aa, Severe acute respiratory syndrome coronavirus 2
  REGION 1..14: note = Table B: HLA-DRB1*01:01L HLA-DRB1*04:08L
SHTVMPLSAPTLVP

SEQ ID NO: 19128 - protein, 15 aa, Severe acute respiratory syndrome coronavirus 2
  REGION 1..15: note = Table B: HLA-DRB1*01:01L
VRITGLYPTLNISDE

SEQ ID NO: 19129 - protein, 12 aa, Severe acute respiratory syndrome coronavirus 2
  REGION 1..12: note = Table B: HLA-DRB1*01:01L HLA-DRB1*12:01L HLA-DRB1*10:01L HLA-DRB1*15:03L
KYSTLQGPPGTG

SEQ ID NO: 19130 - protein, 16 aa, Severe acute respiratory syndrome coronavirus 2
  REGION 1..16: note = Table B: HLA-DRB1*01:01L HLA-DRB3*02:01L HLA-DRB1*11:04L HLA-DRB1*07:01L
KSHFAIGLALYYPSAR

SEQ ID NO: 19131 - protein, 14 aa, Severe acute respiratory syndrome coronavirus 2
  REGION 1..14: note = Table B: HLA-DRB1*01:01L HLA-DRB1*07:01L
FDKFKVNSTLEQYV

SEQ ID NO: 19132 - protein, 11 aa, Severe acute respiratory syndrome coronavirus 2
  REGION 1..11: note = Table B: HLA-DRB1*01:01L HLA-DRB3*02:01L HLA-DRB1*14:01L HLA-DRB1*11:04L HLA-DRB1*12:02L HLA-DRB1*08:02L HLA-DRB1*15:01L
TNYDLSVVNAR

SEQ ID NO: 19133 - protein, 14 aa, Severe acute respiratory syndrome coronavirus 2
  REGION 1..14: note = Table B: HLA-DRB1*01:01L HLA-DRB1*11:04L HLA-DRB1*11:01L HLA-DRB1*07:01L
YDLSVVNARLRAKH

SEQ ID NO: 19134 - protein, 14 aa, Severe acute respiratory syndrome coronavirus 2
  REGION 1..14: note = Table B: HLA-DRB1*01:01L HLA-DRB1*03:01L HLA-DRB1*08:01L HLA-DRB1*11:01L HLA-DRB5*01:01L HLA-DRB4*01:01L HLA-DRB1*09:01L HLA-DPA1*01:03-B1*04:02L HLA-DRB3*01:01L HLA-DPA1*01:03-B1*104:01L HLA-DPA1*01:02-B1*04:01L
  REGION 1..14: note = CONT. FROM ABOVE: HLA-DRB1*07:01L HLA-DQA1*01:03-B1*06:01L HLA-D RB1*08:02L
HYVYIGDPAQLPAP

SEQ ID NO: 19135 - protein, 14 aa, Severe acute respiratory syndrome coronavirus 2
  REGION 1..14: note = Table B: HLA-DRB1*01:01L
KGTLEPEYFNSVCR

SEQ ID NO: 19136 - protein, 14 aa, Severe acute respiratory syndrome coronavirus 2
  REGION 1..14: note = Table B: HLA-DRB1*01:01L
KMFYKGVITHDVSS

SEQ ID NO: 19137 - protein, 15 aa, Severe acute respiratory syndrome coronavirus 2
  REGION 1..15: note = Table B: HLA-DRB1*01:01L HLA-DRB1*11:03L HLA-DPA1*03:01-B1*105:01L
VVREFLTRNPAWRKA

SEQ ID NO: 19138 - protein, 12 aa, Severe acute respiratory syndrome coronavirus 2
  REGION 1..12: note = Table B: HLA-DRB1*01:01L HLA-DRB1*08:04L HLA-DRB3*02:01L HLA-DPA1*01:03-B1*03:01L HLA-DRB1*07:01L
KILGLPTQTVDS

SEQ ID NO: 19139 - protein, 13 aa, Severe acute respiratory syndrome coronavirus 2
  REGION 1..13: note = Table B: HLA-DRB1*01:01L HLA-DRB3*02:01L HLA-DPA1*03:01-B1*04:02L HLA-DRB1*11:01L HLA-DRB4*01:01L HLA-DRB1*09:01L HLA-DPA1*01:03-B1*04:02L HLA-DRB3*01:01L HLA-DPA1*01:03-B1*104:01L HLA-DRB1*07:01L
DYVIFTQTTETAH

SEQ ID NO: 19140 - protein, 15 aa, Severe acute respiratory syndrome coronavirus 2
  REGION 1..15: note = Table B: HLA-DRB1*01:01L
KLQFTSLEIPRRNVA

SEQ ID NO: 19141 - protein, 15 aa, Severe acute respiratory syndrome coronavirus 2
  REGION 1..15: note = Table B: HLA-DRB1*01:01L HLA-DRB1*11:04L HLA-DRB1*11:01L HLA-DRB3*01:01L HLA-DRB1*08:03L
IPRRNVATLQAENVT

SEQ ID NO: 19142 - protein, 15 aa, Severe acute respiratory syndrome coronavirus 2
  REGION 1..15: note = Table B: HLA-DRB1*01:01L HLA-DRB1*11:01L
PNMFITREEAIRHVR

SEQ ID NO: 19143 - protein, 11 aa, Severe acute respiratory syndrome coronavirus 2
  REGION 1..11: note = Table B: HLA-DRB1*01:01L HLA-DRB1*01:02L
GYVDTPNNTDF

SEQ ID NO: 19144 - protein, 19 aa, Severe acute respiratory syndrome coronavirus 2
  REGION 1..19: note = Table B: HLA-DRB1*01:01L HLA-DRB1*14:02L HLA-DPA1*01:03-B1*04:02L
TPNNTDFSRVSAKPPPGDQ

SEQ ID NO: 19145 - protein, 15 aa, Severe acute respiratory syndrome coronavirus 2
  REGION 1..15: note = Table B: HLA-DRB1*01:01L HLA-DRB1*07:01L
VKAALLADKFPVLHD

SEQ ID NO: 19146 - protein, 13 aa, Severe acute respiratory syndrome coronavirus 2
  REGION 1..13: note = Table B: HLA-DRB1*01:01L HLA-DRB1*08:77L HLA-DRB3*02:01L HLA-DRB1*11:03L HLA-DRB1*08:02L
EELFYSYATHSDK

SEQ ID NO: 19147 - protein, 13 aa, Severe acute respiratory syndrome coronavirus 2
  REGION 1..13: note = Table B: HLA-DRB1*01:01L
TPAFDKSAFVNLK

SEQ ID NO: 19148 - protein, 15 aa, Severe acute respiratory syndrome coronavirus 2
  REGION 1..15: note = Table B: HLA-DRB1*01:01L HLA-DRB4*03:01NL HLA-DRB1*08:77L HLA-DRB1*03:01L HLA-DRB1*11:02L HLA-DRB1*11:03L HLA-DQA1*01:01-B1*05:01L HLA-DRB1*11:01L HLA-DRB4*01:01L HLA-DPA1*01:03-B1*04:01L HLA-DQA1*05:05-B1*03:116L
  REGION 1..15: note = CONT. FROM ABOVE: HLA-DRB1*04:10L HLA-DRB1*09:01L HLA-DRB1*12:02 L HLA-DPA1*01:03-B1*02:01L HLA-DPA1*01:03-B1*104:01L HLA-DRB1*07 :01L HLA-DRB1*10:01L HLA-DRB1*08:02L
LPFFYYSDSPCESHG

SEQ ID NO: 19149 - protein, 14 aa, Severe acute respiratory syndrome coronavirus 2
  REGION 1..14: note = Table B: HLA-DRB1*01:01L HLA-DRB1*11:04L HLA-DPA1*01:03-B1*104:01L HLA-DRB1*10:01L
FDTYNLWNTFTRLQ

SEQ ID NO: 19150 - protein, 14 aa, Severe acute respiratory syndrome coronavirus 2
  REGION 1..14: note = Table B: HLA-DRB1*01:01L HLA-DRB1*11:04L
DTYNLWNTFTRLQS

SEQ ID NO: 19151 - protein, 16 aa, Severe acute respiratory syndrome coronavirus 2
  REGION 1..16: note = Table B: HLA-DRB1*01:01L HLA-DRB3*02:01L HLA-DPA1*03:01-B1*04:02L HLA-DRB1*03:01L HLA-DRB1*14:02L HLA-DQA1*05:05-B1*03:19L HLA-DQA1*05:01-B1*02:01L HLA-DRB1*13:01L HLA-DPA1*01:03-B1*04:01L
  REGION 1..16: note = CONT. FROM ABOVE: HLA-DQA1*05:05-B1*03:116L HLA-DPA1*01:03-B1*04 :02L HLA-DRB1*14:54L HLA-DPA1*01:03-B1*104:01L HLA-DQA1*05:05-B1 *03:01L HLA-DRB1*10:01L
VAFELWAKRNIKPVPE

SEQ ID NO: 19152 - protein, 15 aa, Severe acute respiratory syndrome coronavirus 2
  REGION 1..15: note = Table B: HLA-DRB1*01:01L HLA-DRB3*02:01L HLA-DRB1*11:03L HLA-DRB1*11:04L HLA-DRB1*11:01L HLA-DPA1*03:01-B1*105:01L
AKRNIKPVPEVKILN

SEQ ID NO: 19153 - protein, 13 aa, Severe acute respiratory syndrome coronavirus 2
  REGION 1..13: note = Table B: HLA-DRB1*01:01L HLA-DRB1*03:01L HLA-DRB1*11:01L HLA-DPA1*01:03-B1*04:02L HLA-DPA1*01:03-B1*104:01L
KILNNLGVDIAAN

SEQ ID NO: 19154 - protein, 15 aa, Severe acute respiratory syndrome coronavirus 2
  REGION 1..15: note = Table B: HLA-DRB1*01:01L HLA-DRB3*02:01L
ANTVIWDYKRDAPAH

SEQ ID NO: 19155 - protein, 14 aa, Severe acute respiratory syndrome coronavirus 2
  REGION 1..14: note = Table B: HLA-DRB1*01:01L HLA-DPA1*01:03-B1*03:01L HLA-DRB1*03:01L HLA-DRB1*11:03L HLA-DRB1*11:04L HLA-DRB1*14:02L HLA-DRB1*11:01L HLA-DQA1*05:05-B1*03:19L HLA-DQA1*05:05-B1*03:01L
VDLFRNARNGVLIT

SEQ ID NO: 19156 - protein, 14 aa, Severe acute respiratory syndrome coronavirus 2
  REGION 1..14: note = Table B: HLA-DRB1*01:01L HLA-DPA1*03:01-B1*04:02L HLA-DRB1*11:02L HLA-DRB1*11:03L HLA-DRB1*14:02L HLA-DQA1*05:05-B1*03:19L HLA-DQA1*05:05-B1*03:116L HLA-DPA1*01:03-B1*04:02L HLA-DPA1*01:03-B1*02:01L
  REGION 1..14: note = CONT. FROM ABOVE: HLA-DQA1*05:05-B1*03:01L HLA-DRB1*07:01L HLA-D RB1*08:02L
TQFNYYKKVDGVVQ

SEQ ID NO: 19157 - protein, 14 aa, Severe acute respiratory syndrome coronavirus 2
  REGION 1..14: note = Table B: HLA-DRB1*01:01L
QAWQPGVAMPNLYK

SEQ ID NO: 19158 - protein, 14 aa, Severe acute respiratory syndrome coronavirus 2
  REGION 1..14: note = Table B: HLA-DRB1*01:01L HLA-DRB1*03:01L HLA-DRB4*01:01L HLA-DPA1*01:03-B1*04:01L HLA-DQA1*05:05-B1*03:116L HLA-DPA1*01:03-B1*02:01L HLA-DRB1*15:01L
DLQNYGDSATLPKG

SEQ ID NO: 19159 - protein, 16 aa, Severe acute respiratory syndrome coronavirus 2
  REGION 1..16: note = Table B: HLA-DRB1*01:01L HLA-DPA1*01:03-B1*04:02L
LNTLTLAVPYNMRVIH

SEQ ID NO: 19160 - protein, 17 aa, Severe acute respiratory syndrome coronavirus 2
  REGION 1..17: note = Table B: HLA-DRB1*01:01L HLA-DRB1*03:01L HLA-DRB1*11:01L HLA-DPA1*01:03-B1*02:01L HLA-DRB1*07:01L HLA-DRB1*08:02L
LPTGTLLVDSDLNDFVS

SEQ ID NO: 19161 - protein, 16 aa, Severe acute respiratory syndrome coronavirus 2
  REGION 1..16: note = Table B: HLA-DRB1*01:01L HLA-DRB1*03:01L HLA-DRB1*11:01L HLA-DRB3*01:01L
DSTLIGDCATVHTANK

SEQ ID NO: 19162 - protein, 14 aa, Severe acute respiratory syndrome coronavirus 2
  REGION 1..14: note = Table B: HLA-DRB1*01:01L HLA-DRB3*01:01L
GTAVMSLKEGQIND

SEQ ID NO: 19163 - protein, 14 aa, Severe acute respiratory syndrome coronavirus 2
  REGION 1..14: note = Table B: HLA-DRB1*01:01L HLA-DRB1*11:03L HLA-DRB1*11:04L HLA-DRB1*09:01L HLA-DRB1*07:01L
NVTWFHAIHVSGTN

SEQ ID NO: 19164 - protein, 15 aa, Severe acute respiratory syndrome coronavirus 2
  REGION 1..15: note = Table B: HLA-DRB1*01:01L HLA-DPA1*01:03-B1*04:01L HLA-DPA1*01:03-B1*02:01L HLA-DRB1*08:02L
IRGWIFGTTLDSKTQ

SEQ ID NO: 19165 - protein, 14 aa, Severe acute respiratory syndrome coronavirus 2
  REGION 1..14: note = Table B: HLA-DRB1*01:01L HLA-DRB1*11:04L HLA-DRB1*11:01L
QGNFKNLREFVFKN

SEQ ID NO: 19166 - protein, 14 aa, Severe acute respiratory syndrome coronavirus 2
  REGION 1..14: note = Table B: HLA-DRB1*01:01L HLA-DRB1*11:02L HLA-DPA1*01:03-B1*04:01L HLA-DPA1*01:03-B1*04:02L HLA-DPA1*01:03-B1*104:01L HLA-DPA1*01:02-B1*04:01L
SALEPLVDLPIGIN

SEQ ID NO: 19167 - protein, 15 aa, Severe acute respiratory syndrome coronavirus 2
  REGION 1..15: note = Table B: HLA-DRB1*01:01L HLA-DRB1*14:02L HLA-DQA1*05:05-B1*03:116L HLA-DPA1*01:03-B1*04:02L HLA-DPA1*03:01-B1*105:01L HLA-DPA1*01:03-B1*02:01L HLA-DQA1*05:05-B1*03:01L HLA-DRB1*08:02L HLA-DRB1*08:03L
FQTLLALHRSYLTPG

SEQ ID NO: 19168 - protein, 15 aa, Severe acute respiratory syndrome coronavirus 2
  REGION 1..15: note = Table B: HLA-DRB1*01:01L HLA-DRB1*03:01L HLA-DRB1*11:01L HLA-DRB4*01:01L HLA-DRB1*12:02L HLA-DPA1*01:02-B1*04:01L HLA-DRB1*10:01L
ALHRSYLTPGDSSSG

SEQ ID NO: 19169 - protein, 19 aa, Severe acute respiratory syndrome coronavirus 2
  REGION 1..19: note = Table B: HLA-DRB1*01:01L HLA-DRB3*02:01L HLA-DRB1*11:02L HLA-DRB1*09:01L HLA-DRB1*07:01L
TPGDSSSGWTAGAAAYYVG

SEQ ID NO: 19170 - protein, 15 aa, Severe acute respiratory syndrome coronavirus 2
  REGION 1..15: note = Table B: HLA-DRB1*01:01L HLA-DPA1*01:03-B1*104:01L HLA-DRB1*10:01L HLA-DRB1*08:03L HLA-DRB1*15:01L
VEKGIYQTSNFRVQP

SEQ ID NO: 19171 - protein, 13 aa, Severe acute respiratory syndrome coronavirus 2
  REGION 1..13: note = Table B: HLA-DRB1*01:01L HLA-DQA1*01:01-B1*05:01L HLA-DRB1*04:10L HLA-DRB3*01:01L
NATRFASVYAWNR

SEQ ID NO: 19172 - protein, 13 aa, Severe acute respiratory syndrome coronavirus 2
  REGION 1..13: note = Table B: HLA-DRB1*01:01L HLA-DRB1*11:03L HLA-DRB1*11:04L HLA-DRB1*08:03L
ADYSVLYNSASFS

SEQ ID NO: 19173 - protein, 12 aa, Severe acute respiratory syndrome coronavirus 2
  REGION 1..12: note = Table B: HLA-DRB1*01:01L HLA-DRB3*02:01L HLA-DPA1*01:03-B1*03:01L HLA-DRB1*14:02L HLA-DQA1*01:01-B1*05:01L HLA-DRB1*11:01L HLA-DRB5*01:01L HLA-DQA1*05:05-B1*03:19L HLA-DRB4*01:01L
  REGION 1..12: note = CONT. FROM ABOVE: HLA-DPA1*01:03-B1*04:01L HLA-DRB1*09:01L HLA-D PA1*01:03-B1*04:02L HLA-DRB3*01:01L HLA-DPA1*02:01-B1*13:01L HLA -DPA1*01:03-B1*104:01L HLA-DPA1*01:02-B1*04:01L HLA-DRB1*07:01L HLA-DRB1*15:01L
VIAWNSNNLDSK

SEQ ID NO: 19174 - protein, 13 aa, Severe acute respiratory syndrome coronavirus 2
  REGION 1..13: note = Table B: HLA-DRB1*01:01L
VLSFELLHAPATV

SEQ ID NO: 19175 - protein, 12 aa, Severe acute respiratory syndrome coronavirus 2
  REGION 1..12: note = Table B: HLA-DRB1*01:01L HLA-DRB1*10:01L HLA-DRB1*16:01L HLA-DRB1*15:03L
FNGLTGTGVLTE

SEQ ID NO: 19176 - protein, 16 aa, Severe acute respiratory syndrome coronavirus 2
  REGION 1..16: note = Table B: HLA-DRB1*01:01L HLA-DRB1*08:04L HLA-DRB3*02:01L HLA-DRB1*11:02L HLA-DRB1*11:03L HLA-DQA1*05:05-B1*03:19L HLA-DQA1*05:01-B1*02:01L HLA-DPA1*01:03-B1*04:01L HLA-DRB1*09:01L HLA-DPA1*01:03-B1*04:02L
  REGION 1..16: note = CONT. FROM ABOVE: HLA-DQA1*05:05-B1*03:01L HLA-DRB1*08:03L
SNKKFLPFQQFGRDIA

SEQ ID NO: 19177 - protein, 14 aa, Severe acute respiratory syndrome coronavirus 2
  REGION 1..14: note = Table B: HLA-DRB1*01:01L HLA-DRB1*15:01L
EVPVAIHADQLTPT

SEQ ID NO: 19178 - protein, 15 aa, Severe acute respiratory syndrome coronavirus 2
  REGION 1..15: note = Table B: HLA-DRB1*01:01L HLA-DRB1*11:02L HLA-DRB1*13:01L HLA-DPA1*01:03-B1*02:01L
VPVAIHADQLTPTWR

SEQ ID NO: 19179 - protein, 14 aa, Severe acute respiratory syndrome coronavirus 2
  REGION 1..14: note = Table B: HLA-DRB1*01:01L HLA-DPA1*03:01-B1*04:02L HLA-DRB1*14:02L HLA-DRB4*01:01L HLA-DPA1*01:03-B1*04:02L HLA-DPA1*01:03-B1*104:01L
IIAYTMSLGAENSV

SEQ ID NO: 19180 - protein, 15 aa, Severe acute respiratory syndrome coronavirus 2
  REGION 1..15: note = Table B: HLA-DRB1*01:01L
QLNRALTGIAVEQDK

SEQ ID NO: 19181 - protein, 14 aa, Severe acute respiratory syndrome coronavirus 2
  REGION 1..14: note = Table B: HLA-DRB1*01:01L HLA-DPA1*03:01-B1*04:02L HLA-DRB1*14:02L HLA-DRB4*01:01L HLA-DRB1*09:01L HLA-DPA1*01:03-B1*02:01L HLA-DRB1*08:02L
NRALTGIAVEQDKN

SEQ ID NO: 19182 - protein, 14 aa, Severe acute respiratory syndrome coronavirus 2
  REGION 1..14: note = Table B: HLA-DRB1*01:01L HLA-DRB1*07:01L
QKLIANQFNSAIGK

SEQ ID NO: 19183 - protein, 15 aa, Severe acute respiratory syndrome coronavirus 2
  REGION 1..15: note = Table B: HLA-DRB1*01:01L HLA-DRB3*02:01L HLA-DRB1*14:02L HLA-DRB1*11:01L HLA-DRB4*01:01L HLA-DRB1*09:01L
IQDSLSSTASALGKL

SEQ ID NO: 19184 - protein, 14 aa, Severe acute respiratory syndrome coronavirus 2
  REGION 1..14: note = Table B: HLA-DRB1*01:01L HLA-DRB3*02:01L HLA-DRB1*03:01L HLA-DRB1*08:01L HLA-DRB3*01:01L
ALGKLQDVVNQNAQ

SEQ ID NO: 19185 - protein, 16 aa, Severe acute respiratory syndrome coronavirus 2
  REGION 1..16: note = Table B: HLA-DRB1*01:01L HLA-DRB1*03:01L HLA-DRB1*13:01L HLA-DRB4*01:01L
AQALNTLVKQLSSNFG

SEQ ID NO: 19186 - protein, 14 aa, Severe acute respiratory syndrome coronavirus 2
  REGION 1..14: note = Table B: HLA-DRB1*01:01L
SSNFGAISSVLNDI

SEQ ID NO: 19187 - protein, 14 aa, Severe acute respiratory syndrome coronavirus 2
  REGION 1..14: note = Table B: HLA-DRB1*01:01L HLA-DRB1*09:01L HLA-DPA1*01:03-B1*04:02L HLA-DRB3*01:01L HLA-DRB1*07:01L
FGAISSVLNDILSR

SEQ ID NO: 19188 - protein, 14 aa, Severe acute respiratory syndrome coronavirus 2
  REGION 1..14: note = Table B: HLA-DRB1*01:01L HLA-DRB1*03:01L HLA-DRB1*14:01L HLA-DRB1*11:04L HLA-DRB1*11:01L HLA-DPA1*03:01-B1*105:01L
SRLDKVEAEVQIDR

SEQ ID NO: 19189 - protein, 14 aa, Severe acute respiratory syndrome coronavirus 2
  REGION 1..14: note = Table B: HLA-DRB1*01:01L HLA-DRB1*11:03L HLA-DRB1*11:04L HLA-DRB3*01:01L HLA-DRB1*07:01L HLA-DRB1*08:03L
LQSLQTYVTQQLIR

SEQ ID NO: 19190 - protein, 14 aa, Severe acute respiratory syndrome coronavirus 2
  REGION 1..14: note = Table B: HLA-DRB1*01:01L HLA-DRB1*08:77L HLA-DRB3*02:01L HLA-DRB1*03:01L HLA-DRB1*11:02L HLA-DRB1*11:03L HLA-DRB1*14:02M HLA-DQA1*01:01-B1*05:01L HLA-DRB5*01:01L HLA-DRB1*13:01L HLA-DRB4*01:01L HLA-DQA1*05:05-B1*03:116L HLA-DRB1*09:01L
  REGION 1..14: note = CONT. FROM ABOVE: HLA-DRB1*12:02L HLA-DRB3*01:01L HLA-DPA1*01:03 -B1*104:01L HLA-DRB1*07:01L HLA-DRB1*08:02L HLA-DRB1*08:03L
LQTYVTQQLIRAAE

SEQ ID NO: 19191 - protein, 14 aa, Severe acute respiratory syndrome coronavirus 2
  REGION 1..14: note = Table B: HLA-DRB1*01:01L HLA-DRB3*01:01L HLA-DPA1*01:03-B1*104:01L
TYVTQQLIRAAEIR

SEQ ID NO: 19192 - protein, 16 aa, Severe acute respiratory syndrome coronavirus 2
  REGION 1..16: note = Table B: HLA-DRB1*01:01L HLA-DRB1*08:77L HLA-DRB1*11:02L HLA-DRB1*11:04L HLA-DRB1*14:02L HLA-DRB1*11:01L HLA-DQA1*05:05-B1*03:19L HLA-DRB1*09:01L HLA-DRB3*01:01L HLA-DRB1*08:02L HLA-DRB1*08:03L
APHGVVFLHVTYVPAQ

SEQ ID NO: 19193 - protein, 14 aa, Severe acute respiratory syndrome coronavirus 2
  REGION 1..14: note = Table B: HLA-DRB1*01:01L HLA-DRB1*03:01L HLA-DRB1*11:02L HLA-DRB1*13:01L HLA-DRB4*01:01L HLA-DPA1*01:03-B1*04:01L
INASVVNIQKEIDR

SEQ ID NO: 19194 - protein, 14 aa, Severe acute respiratory syndrome coronavirus 2
  REGION 1..14: note = Table B: HLA-DRB1*01:01L HLA-DRB1*11:01L HLA-DRB1*13:01L
IYNKIVDEPEEHVQ

SEQ ID NO: 19195 - protein, 16 aa, Severe acute respiratory syndrome coronavirus 2
  REGION 1..16: note = Table B: HLA-DRB1*01:01L HLA-DRB3*02:01L HLA-DPA1*03:01-B1*04:02L HLA-DRB1*03:01L HLA-DRB4*01:01L HLA-DPA1*01:03-B1*04:01L HLA-DPA1*01:03-B1*04:02L HLA-DPA1*01:03-B1*02:01L HLA-DPA1*01:02-B1*04:01L
  REGION 1..16: note = CONT. FROM ABOVE: HLA-DRB1*08:02L
EPEEHVQIHTIDGSSG

SEQ ID NO: 19196 - protein, 14 aa, Severe acute respiratory syndrome coronavirus 2
  REGION 1..14: note = Table B: HLA-DRB1*01:01L HLA-DRB1*08:04L HLA-DPA1*01:03-B1*03:01L HLA-DQA1*01:03-B1*06:01L
VQIHTIDGSSGVVN

SEQ ID NO: 19197 - protein, 15 aa, Severe acute respiratory syndrome coronavirus 2
  REGION 1..15: note = Table B: HLA-DRB1*01:01L HLA-DRB1*08:01L HLA-DRB1*07:01L
SQRVAGDSGFAAYSR

SEQ ID NO: 19198 - protein, 13 aa, Severe acute respiratory syndrome coronavirus 2
  REGION 1..13: note = Table B: HLA-DRB1*01:01L HLA-DRB1*03:01L HLA-DQA1*05:01-B1*02:01L
GNYKLNTDHSSSS

SEQ ID NO: 19199 - protein, 14 aa, Severe acute respiratory syndrome coronavirus 2
  REGION 1..14: note = Table B: HLA-DRB1*01:01L HLA-DPA1*03:01-B1*04:02L HLA-DRB1*11:02L HLA-DRB1*09:01L HLA-DPA1*01:03-B1*04:02L HLA-DPA1*01:03-B1*104:01L HLA-DPA1*01:02-B1*04:01L HLA-DRB1*08:02L
NYKLNTDHSSSSDN

SEQ ID NO: 19200 - protein, 15 aa, Severe acute respiratory syndrome coronavirus 2
  REGION 1..15: note = Table B: HLA-DRB1*01:01L HLA-DRB1*13:01L HLA-DPA1*01:03-B1*04:01L HLA-DRB1*09:01L
INLIIKNLSKSLTEN

SEQ ID NO: 19201 - protein, 14 aa, Severe acute respiratory syndrome coronavirus 2
  REGION 1..14: note = Table B: HLA-DRB1*01:01L HLA-DRB1*03:01L
SGTYEGNSPFHPLA

SEQ ID NO: 19202 - protein, 13 aa, Severe acute respiratory syndrome coronavirus 2
  REGION 1..13: note = Table B: HLA-DRB1*01:01L HLA-DRB1*08:04L HLA-DQA1*05:05-B1*03:19L HLA-DPA1*02:01-B1*13:01L HLA-DPA1*03:01-B1*105:01L HLA-DQA1*05:05-B1*03:01L HLA-DQA1*01:03-B1*06:01L
WYIRVGARKSAPL

SEQ ID NO: 19203 - protein, 14 aa, Severe acute respiratory syndrome coronavirus 2
  REGION 1..14: note = Table B: HLA-DRB1*01:01L HLA-DRB1*07:01L HLA-DRB1*08:03L
EDFLEYHDVRVVLD

SEQ ID NO: 19204 - protein, 15 aa, Severe acute respiratory syndrome coronavirus 2
  REGION 1..15: note = Table B: HLA-DRB1*01:01L HLA-DRB1*08:02L
GVPINTNSSPDDQIG

SEQ ID NO: 19205 - protein, 14 aa, Severe acute respiratory syndrome coronavirus 2
  REGION 1..14: note = Table B: HLA-DRB1*01:01L HLA-DPA1*01:03-B1*03:01L HLA-DRB1*11:01L HLA-DPA1*01:03-B1*104:01L HLA-DRB1*04:08L HLA-DRB1*15:03L
RQKRTATKAYNVTQ

SEQ ID NO: 19206 - protein, 11 aa, Severe acute respiratory syndrome coronavirus 2
  REGION 1..11: note = Table B: HLA-DRB1*01:01L HLA-DRB1*16:01L
KAYNVTQAFGR

SEQ ID NO: 19207 - protein, 14 aa, Severe acute respiratory syndrome coronavirus 2
  REGION 1..14: note = Table B: HLA-DRB1*01:01L
GTWLTYTGAIKLDD

SEQ ID NO: 19208 - protein, 14 aa, Severe acute respiratory syndrome coronavirus 2
  REGION 1..14: note = Table B: HLA-DRB1*01:01L HLA-DRB1*13:01L HLA-DRB1*07:01L
DQVILLNKHIDAYK

SEQ ID NO: 19209 - protein, 16 aa, Severe acute respiratory syndrome coronavirus 2
  REGION 1..16: note = Table B: HLA-DRB1*01:01L
QQTVTLLPAADLDDFS

SEQ ID NO: 19210 - protein, 12 aa, Severe acute respiratory syndrome coronavirus 2
  REGION 1..12: note = Table B: HLA-DRB1*01:02L HLA-DQA1*05:05-B1*03:19L HLA-DPA1*03:01-B1*105:01L HLA-DQA1*05:05-B1*03:01L
LVPGFNEKTHVQ

SEQ ID NO: 19211 - protein, 13 aa, Severe acute respiratory syndrome coronavirus 2
  REGION 1..13: note = Table B: HLA-DRB1*01:02L HLA-DRB1*12:01L
THVQLSLPVLQVR

SEQ ID NO: 19212 - protein, 14 aa, Severe acute respiratory syndrome coronavirus 2
  REGION 1..14: note = Table B: HLA-DRB1*01:02L
HVQLSLPVLQVRDV

SEQ ID NO: 19213 - protein, 16 aa, Severe acute respiratory syndrome coronavirus 2
  REGION 1..16: note = Table B: HLA-DRB1*01:02L
VRGFGDSVEEVLSEAR

SEQ ID NO: 19214 - protein, 13 aa, Severe acute respiratory syndrome coronavirus 2
  REGION 1..13: note = Table B: HLA-DRB1*01:02L HLA-DRB1*08:04L HLA-DRB3*02:01L HLA-DQA1*01:01-B1*05:01L HLA-DRB1*08:01L HLA-DRB1*04:10L HLA-DRB1*09:01L HLA-DRB1*12:02L HLA-DRB1*14:54L HLA-DRB1*14:17L HLA-DRB1*04:08L
VEKGVLPQLEQPY

SEQ ID NO: 19215 - protein, 13 aa, Severe acute respiratory syndrome coronavirus 2
  REGION 1..13: note = Table B: HLA-DRB1*01:02L HLA-DRB1*08:01L
LPQLEQPYVFIKR

SEQ ID NO: 19216 - protein, 13 aa, Severe acute respiratory syndrome coronavirus 2
  REGION 1..13: note = Table B: HLA-DRB1*01:02L
RSDARTAPHGHVM

SEQ ID NO: 19217 - protein, 15 aa, Severe acute respiratory syndrome coronavirus 2
  REGION 1..15: note = Table B: HLA-DRB1*01:02L HLA-DRB1*12:01L HLA-DPA1*02:01-B1*13:01L HLA-DPA1*01:03-B1*104:01L HLA-DQA1*01:03-B1*06:01L HLA-DRB1*15:03L
APHGHVMVELVAELE

SEQ ID NO: 19218 - protein, 15 aa, Severe acute respiratory syndrome coronavirus 2
  REGION 1..15: note = Table B: HLA-DRB1*01:02L HLA-DPA1*01:03-B1*03:01L HLA-DPA1*03:01-B1*04:02L HLA-DPA1*01:03-B1*04:02L HLA-DQA1*05:05-B1*03:01L
GHVMVELVAELEGIQ

SEQ ID NO: 19219 - protein, 12 aa, Severe acute respiratory syndrome coronavirus 2
  REGION 1..12: note = Table B: HLA-DRB1*01:02L
LVAELEGIQYGR

SEQ ID NO: 19220 - protein, 14 aa, Severe acute respiratory syndrome coronavirus 2
  REGION 1..14: note = Table B: HLA-DRB1*01:02L
AELEGIQYGRSGET

SEQ ID NO: 19221 - protein, 14 aa, Severe acute respiratory syndrome coronavirus 2
  REGION 1..14: note = Table B: HLA-DRB1*01:02L HLA-DQA1*05:05-B1*03:01L
TLGVLVPHVGEIPV

SEQ ID NO: 19222 - protein, 12 aa, Severe acute respiratory syndrome coronavirus 2
  REGION 1..12: note = Table B: HLA-DRB1*01:02L HLA-DRB1*16:01L
PVAYRKVLLRKN

SEQ ID NO: 19223 - protein, 15 aa, Severe acute respiratory syndrome coronavirus 2
  REGION 1..15: note = Table B: HLA-DRB1*01:02L HLA-DRB1*08:01L
GNKGAGGHSYGADLK

SEQ ID NO: 19224 - protein, 12 aa, Severe acute respiratory syndrome coronavirus 2
  REGION 1..12: note = Table B: HLA-DRB1*01:02L HLA-DRB1*04:08L
NWNTKHSSGVTR

SEQ ID NO: 19225 - protein, 12 aa, Severe acute respiratory syndrome coronavirus 2
  REGION 1..12: note = Table B: HLA-DRB1*01:02L HLA-DRB1*04:08L
WNTKHSSGVTRE

SEQ ID NO: 19226 - protein, 14 aa, Severe acute respiratory syndrome coronavirus 2
  REGION 1..14: note = Table B: HLA-DRB1*01:02L
TKHSSGVTRELMRE

SEQ ID NO: 19227 - protein, 14 aa, Severe acute respiratory syndrome coronavirus 2
  REGION 1..14: note = Table B: HLA-DRB1*01:02L HLA-DQA1*05:05-B1*03:01L
DLLARAGKASCTLS

SEQ ID NO: 19228 - protein, 14 aa, Severe acute respiratory syndrome coronavirus 2
  REGION 1..14: note = Table B: HLA-DRB1*01:02L HLA-DPA1*02:01-B1*13:01L
EHEHEIAWYTERSE

SEQ ID NO: 19229 - protein, 12 aa, Severe acute respiratory syndrome coronavirus 2
  REGION 1..12: note = Table B: HLA-DRB1*01:02L HLA-DRB1*04:08L
QTPFEIKLAKKF

SEQ ID NO: 19230 - protein, 14 aa, Severe acute respiratory syndrome coronavirus 2
  REGION 1..14: note = Table B: HLA-DRB1*01:02L HLA-DQA1*05:05-B1*03:19L HLA-DQA1*05:05-B1*03:01L
FDTFNGECPNFVFP

SEQ ID NO: 19231 - protein, 11 aa, Severe acute respiratory syndrome coronavirus 2
  REGION 1..11: note = Table B: HLA-DRB1*01:02L HLA-DRB1*15:03L
FVFPLNSIIKT

SEQ ID NO: 19232 - protein, 14 aa, Severe acute respiratory syndrome coronavirus 2
  REGION 1..14: note = Table B: HLA-DRB1*01:02L
FPLNSIIKTIQPRV

SEQ ID NO: 19233 - protein, 12 aa, Severe acute respiratory syndrome coronavirus 2
  REGION 1..12: note = Table B: HLA-DRB1*01:02L
IKTIQPRVEKKK

SEQ ID NO: 19234 - protein, 13 aa, Severe acute respiratory syndrome coronavirus 2
  REGION 1..13: note = Table B: HLA-DRB1*01:02L HLA-DRB1*16:01L
TIQPRVEKKKLDG

SEQ ID NO: 19235 - protein, 15 aa, Severe acute respiratory syndrome coronavirus 2
  REGION 1..15: note = Table B: HLA-DRB1*01:02L HLA-DRB1*16:01L
IQPRVEKKKLDGFMG

SEQ ID NO: 19236 - protein, 15 aa, Severe acute respiratory syndrome coronavirus 2
  REGION 1..15: note = Table B: HLA-DRB1*01:02L
QPRVEKKKLDGFMGR

SEQ ID NO: 19237 - protein, 12 aa, Severe acute respiratory syndrome coronavirus 2
  REGION 1..12: note = Table B: HLA-DRB1*01:02L
KKKLDGFMGRIR

SEQ ID NO: 19238 - protein, 16 aa, Severe acute respiratory syndrome coronavirus 2
  REGION 1..16: note = Table B: HLA-DRB1*01:02L
KKLDGFMGRIRSVYPV

SEQ ID NO: 19239 - protein, 15 aa, Severe acute respiratory syndrome coronavirus 2
  REGION 1..15: note = Table B: HLA-DRB1*01:02L HLA-DRB1*14:01L
LDGFMGRIRSVYPVA
